United States Patent Application Publication US 2005/0255487 A1 - sequence listing, part 66

SEQ ID NO: 1810992 - RNA, 19 nt, Homo sapiens
  misc_RNA (1)...(19): siRNA sense strand
gcaccaggagggcaaguuc

SEQ ID NO: 1810993 - RNA, 19 nt, Homo sapiens
  misc_RNA (1)...(19): siRNA sense strand
gaacuggacacggccuuca

SEQ ID NO: 1810994 - RNA, 19 nt, Homo sapiens
  misc_RNA (1)...(19): siRNA sense strand
gacacggccuucauguaca

SEQ ID NO: 1810995 - RNA, 19 nt, Homo sapiens
  misc_RNA (1)...(19): siRNA sense strand
ccaaguggaccucuucuac

SEQ ID NO: 1810996 - RNA, 19 nt, Homo sapiens
  misc_RNA (1)...(19): siRNA sense strand
gcuggauccugcccacugu

SEQ ID NO: 1810997 - RNA, 19 nt, Homo sapiens
  misc_RNA (1)...(19): siRNA sense strand
ggccgcuucuuugggaaua

SEQ ID NO: 1810998 - RNA, 19 nt, Homo sapiens
  misc_RNA (1)...(19): siRNA sense strand
ggacaaggacgggaaacag

SEQ ID NO: 1810999 - RNA, 19 nt, Homo sapiens
  misc_RNA (1)...(19): siRNA sense strand
acaggaaucgcuucuggaa

SEQ ID NO: 1811000 - RNA, 19 nt, Homo sapiens
  misc_RNA (1)...(19): siRNA sense strand
acaaguaugaggacaagga

SEQ ID NO: 1811001 - RNA, 19 nt, Homo sapiens
  misc_RNA (1)...(19): siRNA sense strand
gcucacgaaugucccaacu

SEQ ID NO: 1811002 - RNA, 19 nt, Homo sapiens
  misc_RNA (1)...(19): siRNA sense strand
acgaaugucccaacuacuu

SEQ ID NO: 1811003 - RNA, 19 nt, Homo sapiens
  misc_RNA (1)...(19): siRNA sense strand
uuugguugcucacgaaugu

SEQ ID NO: 1811004 - RNA, 19 nt, Homo sapiens
  misc_RNA (1)...(19): siRNA sense strand
cgaaugucccaacuacuuc

SEQ ID NO: 1811005 - RNA, 19 nt, Homo sapiens
  misc_RNA (1)...(19): siRNA sense strand
gcagaacuuggcagcaaca

SEQ ID NO: 1811006 - RNA, 19 nt, Homo sapiens
  misc_RNA (1)...(19): siRNA sense strand
uuaaucaagccuggcauuu

SEQ ID NO: 1811007 - RNA, 19 nt, Homo sapiens
  misc_RNA (1)...(19): siRNA sense strand
gaccucuucuaccuacaca

SEQ ID NO: 1811008 - RNA, 19 nt, Homo sapiens
  misc_RNA (1)...(19): siRNA sense strand
gcagcuggagcagaacuug

SEQ ID NO: 1811009 - RNA, 19 nt, Homo sapiens
  misc_RNA (1)...(19): siRNA sense strand
cagcuggagacgucauuga

SEQ ID NO: 1811010 - RNA, 19 nt, Homo sapiens
  misc_RNA (1)...(19): siRNA sense strand
gauggaaaaucacuaaagc

SEQ ID NO: 1811011 - RNA, 19 nt, Homo sapiens
  misc_RNA (1)...(19): siRNA sense strand
ggauccugcccacugugua

SEQ ID NO: 1811012 - RNA, 19 nt, Homo sapiens
  misc_RNA (1)...(19): siRNA sense strand
gagugaaaauugccaccaa

SEQ ID NO: 1811013 - RNA, 19 nt, Homo sapiens
  misc_RNA (1)...(19): siRNA sense strand
gagcagcuguuccggguua

SEQ ID NO: 1811014 - RNA, 19 nt, Homo sapiens
  misc_RNA (1)...(19): siRNA sense strand
gggcgacccucaucaguga

SEQ ID NO: 1811015 - RNA, 19 nt, Homo sapiens
  misc_RNA (1)...(19): siRNA sense strand
ccaaugaccacaaugauga

SEQ ID NO: 1811016 - RNA, 19 nt, Homo sapiens
  misc_RNA (1)...(19): siRNA sense strand
gagcaccaccucuggaaau

SEQ ID NO: 1811017 - RNA, 19 nt, Homo sapiens
  misc_RNA (1)...(19): siRNA sense strand
ggcauacccuggacacauc

SEQ ID NO: 1811018 - RNA, 19 nt, Homo sapiens
  misc_RNA (1)...(19): siRNA sense strand
gccacuaccuugacuggau

SEQ ID NO: 1811019 - RNA, 19 nt, Homo sapiens
  misc_RNA (1)...(19): siRNA sense strand
gcgccaaugaccacaauga

SEQ ID NO: 1811020 - RNA, 19 nt, Homo sapiens
  misc_RNA (1)...(19): siRNA sense strand
gagaacaaacucugucacu

SEQ ID NO: 1811021 - RNA, 19 nt, Homo sapiens
  misc_RNA (1)...(19): siRNA sense strand
gaagcugggacuccucugu

SEQ ID NO: 1811022 - RNA, 19 nt, Homo sapiens
  misc_RNA (1)...(19): siRNA sense strand
gccaaugaccacaaugaug

SEQ ID NO: 1811023 - RNA, 19 nt, Homo sapiens
  misc_RNA (1)...(19): siRNA sense strand
ucagcauccuggagaacaa

SEQ ID NO: 1811024 - RNA, 19 nt, Homo sapiens
  misc_RNA (1)...(19): siRNA sense strand
caagaaaucauggagaacu

SEQ ID NO: 1811025 - RNA, 19 nt, Homo sapiens
  misc_RNA (1)...(19): siRNA sense strand
cagcgccaaugaccacaau

SEQ ID NO: 1811026 - RNA, 19 nt, Homo sapiens
  misc_RNA (1)...(19): siRNA sense strand
ggcaugcagugucucaucu

SEQ ID NO: 1811027 - RNA, 19 nt, Homo sapiens
  misc_RNA (1)...(19): siRNA sense strand
aagaaaucauggagaacug

SEQ ID NO: 1811028 - RNA, 19 nt, Homo sapiens
  misc_RNA (1)...(19): siRNA sense strand
caugcagugucucaucuca

SEQ ID NO: 1811029 - RNA, 19 nt, Homo sapiens
  misc_RNA (1)...(19): siRNA sense strand
cagcguaugccacuaccuu

SEQ ID NO: 1811030 - RNA, 19 nt, Homo sapiens
  misc_RNA (1)...(19): siRNA sense strand
gggcauacccuggacacau

SEQ ID NO: 1811031 - RNA, 19 nt, Homo sapiens
  misc_RNA (1)...(19): siRNA sense strand
ccaccuuacucggcucuuc

SEQ ID NO: 1811032 - RNA, 19 nt, Homo sapiens
  misc_RNA (1)...(19): siRNA sense strand
gcguaugccacuaccuuga

SEQ ID NO: 1811033 - RNA, 19 nt, Homo sapiens
  misc_RNA (1)...(19): siRNA sense strand
ugacuggauccaagaaauc

SEQ ID NO: 1811034 - RNA, 19 nt, Homo sapiens
  misc_RNA (1)...(19): siRNA sense strand
uugacuggauccaagaaau

SEQ ID NO: 1811035 - RNA, 19 nt, Homo sapiens
  misc_RNA (1)...(19): siRNA sense strand
gaaagaugcuggaauguuu

SEQ ID NO: 1811036 - RNA, 19 nt, Homo sapiens
  misc_RNA (1)...(19): siRNA sense strand
gagaaugccuauaagauuu

SEQ ID NO: 1811037 - RNA, 19 nt, Homo sapiens
  misc_RNA (1)...(19): siRNA sense strand
gaacuaggauuucauagca

SEQ ID NO: 1811038 - RNA, 19 nt, Homo sapiens
  misc_RNA (1)...(19): siRNA sense strand
uaagaaagaugcuggaaug

SEQ ID NO: 1811039 - RNA, 19 nt, Homo sapiens
  misc_RNA (1)...(19): siRNA sense strand
ccuagagacuuuagauuua

SEQ ID NO: 1811040 - RNA, 19 nt, Homo sapiens
  misc_RNA (1)...(19): siRNA sense strand
gaauggugccucacaaaua

SEQ ID NO: 1811041 - RNA, 19 nt, Homo sapiens
  misc_RNA (1)...(19): siRNA sense strand
gcucucaucuugcucaauu

SEQ ID NO: 1811042 - RNA, 19 nt, Homo sapiens
  misc_RNA (1)...(19): siRNA sense strand
gaaacgcucugacauacau

SEQ ID NO: 1811043 - RNA, 19 nt, Homo sapiens
  misc_RNA (1)...(19): siRNA sense strand
gagcguggguucucuguga

SEQ ID NO: 1811044 - RNA, 19 nt, Homo sapiens
  misc_RNA (1)...(19): siRNA sense strand
ggacgaccuucauaagaaa

SEQ ID NO: 1811045 - RNA, 19 nt, Homo sapiens
  misc_RNA (1)...(19): siRNA sense strand
gacaaugcguuaacagaaa

SEQ ID NO: 1811046 - RNA, 19 nt, Homo sapiens
  misc_RNA (1)...(19): siRNA sense strand
uaauaaagcuggaccuauc

SEQ ID NO: 1811047 - RNA, 19 nt, Homo sapiens
  misc_RNA (1)...(19): siRNA sense strand
guaggcaacccuucucuua

SEQ ID NO: 1811048 - RNA, 19 nt, Homo sapiens
  misc_RNA (1)...(19): siRNA sense strand
acugagagcugccaucuuu

SEQ ID NO: 1811049 - RNA, 19 nt, Homo sapiens
  misc_RNA (1)...(19): siRNA sense strand
gaacucaagguuauagaaa

SEQ ID NO: 1811050 - RNA, 19 nt, Homo sapiens
  misc_RNA (1)...(19): siRNA sense strand
uaagaacacugacucugaa

SEQ ID NO: 1811051 - RNA, 19 nt, Homo sapiens
  misc_RNA (1)...(19): siRNA sense strand
uuacagagcuugauaucau

SEQ ID NO: 1811052 - RNA, 19 nt, Homo sapiens
  misc_RNA (1)...(19): siRNA sense strand
gaacgugaccuugaagauu

SEQ ID NO: 1811053 - RNA, 19 nt, Homo sapiens
  misc_RNA (1)...(19): siRNA sense strand
ggcaacccuucucuuauua

SEQ ID NO: 1811054 - RNA, 19 nt, Homo sapiens
  misc_RNA (1)...(19): siRNA sense strand
ucaauuaacucugaugaug

SEQ ID NO: 1811055 - RNA, 19 nt, Homo sapiens
  misc_RNA (1)...(19): siRNA sense strand
uagaaaugccuuaugcuua

SEQ ID NO: 1811056 - RNA, 19 nt, Homo sapiens
  misc_RNA (1)...(19): siRNA sense strand
acauuuaccugaacuaaga

SEQ ID NO: 1811057 - RNA, 19 nt, Homo sapiens
  misc_RNA (1)...(19): siRNA sense strand
cauggucgcucucaucuug

SEQ ID NO: 1811058 - RNA, 19 nt, Homo sapiens
  misc_RNA (1)...(19): siRNA sense strand
gaucucaucucuuccucaa

SEQ ID NO: 1811059 - RNA, 19 nt, Homo sapiens
  misc_RNA (1)...(19): siRNA sense strand
aauggugccucacaaauaa

SEQ ID NO: 1811060 - RNA, 19 nt, Homo sapiens
  misc_RNA (1)...(19): siRNA sense strand
cuacaucuccauaacaaua

SEQ ID NO: 1811061 - RNA, 19 nt, Homo sapiens
  misc_RNA (1)...(19): siRNA sense strand
gcaaucaguuaccuaaucu

SEQ ID NO: 1811062 - RNA, 19 nt, Homo sapiens
  misc_RNA (1)...(19): siRNA sense strand
caauaaccuugaugaauuc

SEQ ID NO: 1811063 - RNA, 19 nt, Homo sapiens
  misc_RNA (1)...(19): siRNA sense strand
uagaagauuuacccaguuu

SEQ ID NO: 1811064 - RNA, 19 nt, Homo sapiens
  misc_RNA (1)...(19): siRNA sense strand
gccaaaagcuucagaaaau

SEQ ID NO: 1811065 - RNA, 19 nt, Homo sapiens
  misc_RNA (1)...(19): siRNA sense strand
gcagaauaaucagcuaaga

SEQ ID NO: 1811066 - RNA, 19 nt, Homo sapiens
  misc_RNA (1)...(19): siRNA sense strand
gaccuaagacauaaugaaa

SEQ ID NO: 1811067 - RNA, 19 nt, Homo sapiens
  misc_RNA (1)...(19): siRNA sense strand
gcuccagcaucacuuauga

SEQ ID NO: 1811068 - RNA, 19 nt, Homo sapiens
  misc_RNA (1)...(19): siRNA sense strand
acaccaagcucuacugcaa

SEQ ID NO: 1811069 - RNA, 19 nt, Homo sapiens
  misc_RNA (1)...(19): siRNA sense strand
aacaggaaaucaugccuua

SEQ ID NO: 1811070 - RNA, 19 nt, Homo sapiens
  misc_RNA (1)...(19): siRNA sense strand
gaacaaaauacaccacaua

SEQ ID NO: 1811071 - RNA, 19 nt, Homo sapiens
  misc_RNA (1)...(19): siRNA sense strand
aacgugaccuugaagauuu

SEQ ID NO: 1811072 - RNA, 19 nt, Homo sapiens
  misc_RNA (1)...(19): siRNA sense strand
agggagaccuggagaauau

SEQ ID NO: 1811073 - RNA, 19 nt, Homo sapiens
  misc_RNA (1)...(19): siRNA sense strand
gggaaacgcucugacauac

SEQ ID NO: 1811074 - RNA, 19 nt, Homo sapiens
  misc_RNA (1)...(19): siRNA sense strand
guaaugcuuuggugacuuc

SEQ ID NO: 1811075 - RNA, 19 nt, Homo sapiens
  misc_RNA (1)...(19): siRNA sense strand
ccuaagacauaaugaaauc

SEQ ID NO: 1811076 - RNA, 19 nt, Homo sapiens
  misc_RNA (1)...(19): siRNA sense strand
ugagaaugccuauaagauu

SEQ ID NO: 1811077 - RNA, 19 nt, Homo sapiens
  misc_RNA (1)...(19): siRNA sense strand
guccuucuccucuuuaaua

SEQ ID NO: 1811078 - RNA, 19 nt, Homo sapiens
  misc_RNA (1)...(19): siRNA sense strand
gccuagagacuuuagauuu

SEQ ID NO: 1811079 - RNA, 19 nt, Homo sapiens
  misc_RNA (1)...(19): siRNA sense strand
uggacgaccuucauaagaa

SEQ ID NO: 1811080 - RNA, 19 nt, Homo sapiens
  misc_RNA (1)...(19): siRNA sense strand
ucaguuaccuaaucuccaa

SEQ ID NO: 1811081 - RNA, 19 nt, Homo sapiens
  misc_RNA (1)...(19): siRNA sense strand
gaacacugacucugaaugg

SEQ ID NO: 1811082 - RNA, 19 nt, Homo sapiens
  misc_RNA (1)...(19): siRNA sense strand
ugacaaucccauccaauuu

SEQ ID NO: 1811083 - RNA, 19 nt, Homo sapiens
  misc_RNA (1)...(19): siRNA sense strand
aggcaacccuucucuuauu

SEQ ID NO: 1811084 - RNA, 19 nt, Homo sapiens
  misc_RNA (1)...(19): siRNA sense strand
gacaaucccauccaauuug

SEQ ID NO: 1811085 - RNA, 19 nt, Homo sapiens
  misc_RNA (1)...(19): siRNA sense strand
uaacucugaugaugucgaa

SEQ ID NO: 1811086 - RNA, 19 nt, Homo sapiens
  misc_RNA (1)...(19): siRNA sense strand
agaaaugccuuaugcuuac

SEQ ID NO: 1811087 - RNA, 19 nt, Homo sapiens
  misc_RNA (1)...(19): siRNA sense strand
ccucacaaauaacugaauu

SEQ ID NO: 1811088 - RNA, 19 nt, Homo sapiens
  misc_RNA (1)...(19): siRNA sense strand
gcaacaauaucaggucgau

SEQ ID NO: 1811089 - RNA, 19 nt, Homo sapiens
  misc_RNA (1)...(19): siRNA sense strand
caacauuuaccugaacuaa

SEQ ID NO: 1811090 - RNA, 19 nt, Homo sapiens
  misc_RNA (1)...(19): siRNA sense strand
ucucggagcugccuuccaa

SEQ ID NO: 1811091 - RNA, 19 nt, Homo sapiens
  misc_RNA (1)...(19): siRNA sense strand
uaagacacguacccacaga

SEQ ID NO: 1811092 - RNA, 19 nt, Homo sapiens
  misc_RNA (1)...(19): siRNA sense strand
ugaugucaauuaacucuga

SEQ ID NO: 1811093 - RNA, 19 nt, Homo sapiens
  misc_RNA (1)...(19): siRNA sense strand
cuaagaacacugacucuga

SEQ ID NO: 1811094 - RNA, 19 nt, Homo sapiens
  misc_RNA (1)...(19): siRNA sense strand
guccugaaguaauuaaguu

SEQ ID NO: 1811095 - RNA, 19 nt, Homo sapiens
  misc_RNA (1)...(19): siRNA sense strand
ggaaaucaugccuuacaga

SEQ ID NO: 1811096 - RNA, 19 nt, Homo sapiens
  misc_RNA (1)...(19): siRNA sense strand
ggagaccuggagaauauuu

SEQ ID NO: 1811097 - RNA, 19 nt, Homo sapiens
  misc_RNA (1)...(19): siRNA sense strand
uaaacugcccuguggcuuu

SEQ ID NO: 1811098 - RNA, 19 nt, Homo sapiens
  misc_RNA (1)...(19): siRNA sense strand
ugacaaugcguuaacagaa

SEQ ID NO: 1811099 - RNA, 19 nt, Homo sapiens
  misc_RNA (1)...(19): siRNA sense strand
ccaaccuccugucgucuuu

SEQ ID NO: 1811100 - RNA, 19 nt, Homo sapiens
  misc_RNA (1)...(19): siRNA sense strand
caaaccgucugcaaucagu

SEQ ID NO: 1811101 - RNA, 19 nt, Homo sapiens
  misc_RNA (1)...(19): siRNA sense strand
aggacacucuccaaccuua

SEQ ID NO: 1811102 - RNA, 19 nt, Homo sapiens
  misc_RNA (1)...(19): siRNA sense strand
guucaauccucacuuuaag

SEQ ID NO: 1811103 - RNA, 19 nt, Homo sapiens
  misc_RNA (1)...(19): siRNA sense strand
ggacugcucuaugguaaaa

SEQ ID NO: 1811104 - RNA, 19 nt, Homo sapiens
  misc_RNA (1)...(19): siRNA sense strand
gaucugcuuuucaacauuu

SEQ ID NO: 1811105 - RNA, 19 nt, Homo sapiens
  misc_RNA (1)...(19): siRNA sense strand
cgggaaacgcucugacaua

SEQ ID NO: 1811106 - RNA, 19 nt, Homo sapiens
  misc_RNA (1)...(19): siRNA sense strand
gaagauuuccugcuugacu

SEQ ID NO: 1811107 - RNA, 19 nt, Homo sapiens
  misc_RNA (1)...(19): siRNA sense strand
gaccuuggcccugaacaaa

SEQ ID NO: 1811108 - RNA, 19 nt, Homo sapiens
  misc_RNA (1)...(19): siRNA sense strand
ggauuucauagcaacaaua

SEQ ID NO: 1811109 - RNA, 19 nt, Homo sapiens
  misc_RNA (1)...(19): siRNA sense strand
ccuuaaagaacuaggauuu

SEQ ID NO: 1811110 - RNA, 19 nt, Homo sapiens
  misc_RNA (1)...(19): siRNA sense strand
gagcauucacuggccuuua

SEQ ID NO: 1811111 - RNA, 19 nt, Homo sapiens
  misc_RNA (1)...(19): siRNA sense strand
uuccagaacucaagguuau

SEQ ID NO: 1811112 - RNA, 19 nt, Homo sapiens
  misc_RNA (1)...(19): siRNA sense strand
cugcaaaccuggagagucu

SEQ ID NO: 1811113 - RNA, 19 nt, Homo sapiens
  misc_RNA (1)...(19): siRNA sense strand
ggaugacaaugcguuaaca

SEQ ID NO: 1811114 - RNA, 19 nt, Homo sapiens
  misc_RNA (1)...(19): siRNA sense strand
gcugccaucuuuccucugu

SEQ ID NO: 1811115 - RNA, 19 nt, Homo sapiens
  misc_RNA (1)...(19): siRNA sense strand
gaaacgaaagcuccauuuu

SEQ ID NO: 1811116 - RNA, 19 nt, Homo sapiens
  misc_RNA (1)...(19): siRNA sense strand
ggaauaaaggugacaacag

SEQ ID NO: 1811117 - RNA, 19 nt, Homo sapiens
  misc_RNA (1)...(19): siRNA sense strand
ugugugagaaugccuauaa

SEQ ID NO: 1811118 - RNA, 19 nt, Homo sapiens
  misc_RNA (1)...(19): siRNA sense strand
caacccuucucuuauuaca

SEQ ID NO: 1811119 - RNA, 19 nt, Homo sapiens
  misc_RNA (1)...(19): siRNA sense strand
ccagugcugugcauuugga

SEQ ID NO: 1811120 - RNA, 19 nt, Homo sapiens
  misc_RNA (1)...(19): siRNA sense strand
ccaacugcauccuaaacug

SEQ ID NO: 1811121 - RNA, 19 nt, Homo sapiens
  misc_RNA (1)...(19): siRNA sense strand
acaaugcguuaacagaaau

SEQ ID NO: 1811122 - RNA, 19 nt, Homo sapiens
  misc_RNA (1)...(19): siRNA sense strand
cuuguucaauccucacuuu

SEQ ID NO: 1811123 - RNA, 19 nt, Homo sapiens
  misc_RNA (1)...(19): siRNA sense strand
aaacugcccuguggcuuuc

SEQ ID NO: 1811124 - RNA, 19 nt, Homo sapiens
  misc_RNA (1)...(19): siRNA sense strand
ugaaacgaaagcuccauuu

SEQ ID NO: 1811125 - RNA, 19 nt, Homo sapiens
  misc_RNA (1)...(19): siRNA sense strand
agaugaacgugaccuugaa

SEQ ID NO: 1811126 - RNA, 19 nt, Homo sapiens
  misc_RNA (1)...(19): siRNA sense strand
acucaagguuauagaaaug

SEQ ID NO: 1811127 - RNA, 19 nt, Homo sapiens
  misc_RNA (1)...(19): siRNA sense strand
uuagaagauuuacccaguu

SEQ ID NO: 1811128 - RNA, 19 nt, Homo sapiens
  misc_RNA (1)...(19): siRNA sense strand
cuuacaaccuauuagaaga

SEQ ID NO: 1811129 - RNA, 19 nt, Homo sapiens
  misc_RNA (1)...(19): siRNA sense strand
ugcuagaucugucuuacaa

SEQ ID NO: 1811130 - RNA, 19 nt, Homo sapiens
  misc_RNA (1)...(19): siRNA sense strand
uaccuagaccucaguauga

SEQ ID NO: 1811131 - RNA, 19 nt, Homo sapiens
  misc_RNA (1)...(19): siRNA sense strand
uaccagugcugugcauuug

SEQ ID NO: 1811132 - RNA, 19 nt, Homo sapiens
  misc_RNA (1)...(19): siRNA sense strand
ugggacugcucuaugguaa

SEQ ID NO: 1811133 - RNA, 19 nt, Homo sapiens
  misc_RNA (1)...(19): siRNA sense strand
ucccuuugcuuccucauga

SEQ ID NO: 1811134 - RNA, 19 nt, Homo sapiens
  misc_RNA (1)...(19): siRNA sense strand
gguucucugugaaauauuc

SEQ ID NO: 1811135 - RNA, 19 nt, Homo sapiens
  misc_RNA (1)...(19): siRNA sense strand
gaagauugcucauauaaug

SEQ ID NO: 1811136 - RNA, 19 nt, Homo sapiens
  misc_RNA (1)...(19): siRNA sense strand
ucaagaagauccagaauga

SEQ ID NO: 1811137 - RNA, 19 nt, Homo sapiens
  misc_RNA (1)...(19): siRNA sense strand
cagaggaggugaacaaauu

SEQ ID NO: 1811138 - RNA, 19 nt, Homo sapiens
  misc_RNA (1)...(19): siRNA sense strand
gagaagauugcucauauaa

SEQ ID NO: 1811139 - RNA, 19 nt, Homo sapiens
  misc_RNA (1)...(19): siRNA sense strand
guggagagaugaucaagaa

SEQ ID NO: 1811140 - RNA, 19 nt, Homo sapiens
  misc_RNA (1)...(19): siRNA sense strand
cgagaagauugcucauaua

SEQ ID NO: 1811141 - RNA, 19 nt, Homo sapiens
  misc_RNA (1)...(19): siRNA sense strand
ggauacaguucaagcaaga

SEQ ID NO: 1811142 - RNA, 19 nt, Homo sapiens
  misc_RNA (1)...(19): siRNA sense strand
uaacagcacuccugauuuu

SEQ ID NO: 1811143 - RNA, 19 nt, Homo sapiens
  misc_RNA (1)...(19): siRNA sense strand
guacagauuucuccagaca

SEQ ID NO: 1811144 - RNA, 19 nt, Homo sapiens
  misc_RNA (1)...(19): siRNA sense strand
ccgagaagauugcucauau

SEQ ID NO: 1811145 - RNA, 19 nt, Homo sapiens
  misc_RNA (1)...(19): siRNA sense strand
ggaacgcgcuggagugaag

SEQ ID NO: 1811146 - RNA, 19 nt, Homo sapiens
  misc_RNA (1)...(19): siRNA sense strand
caggacggaucucagaaua

SEQ ID NO: 1811147 - RNA, 19 nt, Homo sapiens
  misc_RNA (1)...(19): siRNA sense strand
ccaagaugaugcuggauga

SEQ ID NO: 1811148 - RNA, 19 nt, Homo sapiens
  misc_RNA (1)...(19): siRNA sense strand
ggauucaggcugcaaagua

SEQ ID NO: 1811149 - RNA, 19 nt, Homo sapiens
  misc_RNA (1)...(19): siRNA sense strand
gagagaugaucaagaagau

SEQ ID NO: 1811150 - RNA, 19 nt, Homo sapiens
  misc_RNA (1)...(19): siRNA sense strand
gaauacgaauguggacaaa

SEQ ID NO: 1811151 - RNA, 19 nt, Homo sapiens
  misc_RNA (1)...(19): siRNA sense strand
gcagcaagccugugagaug

SEQ ID NO: 1811152 - RNA, 19 nt, Homo sapiens
  misc_RNA (1)...(19): siRNA sense strand
ggagagaugaucaagaaga

SEQ ID NO: 1811153 - RNA, 19 nt, Homo sapiens
  misc_RNA (1)...(19): siRNA sense strand
gaguacggaucucggauug

SEQ ID NO: 1811154 - RNA, 19 nt, Homo sapiens
  misc_RNA (1)...(19): siRNA sense strand
gguccucucugcccaguug

SEQ ID NO: 1811155 - RNA, 19 nt, Homo sapiens
  misc_RNA (1)...(19): siRNA sense strand
gaucucagaauacgaaugu

SEQ ID NO: 1811156 - RNA, 19 nt, Homo sapiens
  misc_RNA (1)...(19): siRNA sense strand
ggaagaggccaaggcaauu

SEQ ID NO: 1811157 - RNA, 19 nt, Homo sapiens
  misc_RNA (1)...(19): siRNA sense strand
guuggaagauggagaucaa

SEQ ID NO: 1811158 - RNA, 19 nt, Homo sapiens
  misc_RNA (1)...(19): siRNA sense strand
ggacggaucucagaauacg

SEQ ID NO: 1811159 - RNA, 19 nt, Homo sapiens
  misc_RNA (1)...(19): siRNA sense strand
cagggagacucaaucaguu

SEQ ID NO: 1811160 - RNA, 19 nt, Homo sapiens
  misc_RNA (1)...(19): siRNA sense strand
gaagaggccaaggcaauug

SEQ ID NO: 1811161 - RNA, 19 nt, Homo sapiens
  misc_RNA (1)...(19): siRNA sense strand
acagacagcaggccgcuua

SEQ ID NO: 1811162 - RNA, 19 nt, Homo sapiens
  misc_RNA (1)...(19): siRNA sense strand
gaggugaacaaauuaacaa

SEQ ID NO: 1811163 - RNA, 19 nt, Homo sapiens
  misc_RNA (1)...(19): siRNA sense strand
gacagcaggccgcuuacua

SEQ ID NO: 1811164 - RNA, 19 nt, Homo sapiens
  misc_RNA (1)...(19): siRNA sense strand
aauaacagcacuccugauu

SEQ ID NO: 1811165 - RNA, 19 nt, Homo sapiens
  misc_RNA (1)...(19): siRNA sense strand
gaugcuggaugacauugug

SEQ ID NO: 1811166 - RNA, 19 nt, Homo sapiens
  misc_RNA (1)...(19): siRNA sense strand
gagaucaaccggagagcaa

SEQ ID NO: 1811167 - RNA, 19 nt, Homo sapiens
  misc_RNA (1)...(19): siRNA sense strand
gcagacgggagccuucgua

SEQ ID NO: 1811168 - RNA, 19 nt, Homo sapiens
  misc_RNA (1)...(19): siRNA sense strand
gauucaggcugcaaaguac

SEQ ID NO: 1811169 - RNA, 19 nt, Homo sapiens
  misc_RNA (1)...(19): siRNA sense strand
ccagaaagccaagaugaug

SEQ ID NO: 1811170 - RNA, 19 nt, Homo sapiens
  misc_RNA (1)...(19): siRNA sense strand
gaggaggugaacaaauuaa

SEQ ID NO: 1811171 - RNA, 19 nt, Homo sapiens
  misc_RNA (1)...(19): siRNA sense strand
gggaggaguacuacaagaa

SEQ ID NO: 1811172 - RNA, 19 nt, Homo sapiens
  misc_RNA (1)...(19): siRNA sense strand
gcagaggaggugaacaaau

SEQ ID NO: 1811173 - RNA, 19 nt, Homo sapiens
  misc_RNA (1)...(19): siRNA sense strand
ccugugagauggugaugga

SEQ ID NO: 1811174 - RNA, 19 nt, Homo sapiens
  misc_RNA (1)...(19): siRNA sense strand
aaaccucuccgcaucauug

SEQ ID NO: 1811175 - RNA, 19 nt, Homo sapiens
  misc_RNA (1)...(19): siRNA sense strand
cccaaggacuucaaugaca

SEQ ID NO: 1811176 - RNA, 19 nt, Homo sapiens
  misc_RNA (1)...(19): siRNA sense strand
aagaagauccagaaugaug

SEQ ID NO: 1811177 - RNA, 19 nt, Homo sapiens
  misc_RNA (1)...(19): siRNA sense strand
ccacgacagugaauaacag

SEQ ID NO: 1811178 - RNA, 19 nt, Homo sapiens
  misc_RNA (1)...(19): siRNA sense strand
gcgcuggagugaagaugau

SEQ ID NO: 1811179 - RNA, 19 nt, Homo sapiens
  misc_RNA (1)...(19): siRNA sense strand
ggaggugaacaaauuaaca

SEQ ID NO: 1811180 - RNA, 19 nt, Homo sapiens
  misc_RNA (1)...(19): siRNA sense strand
gcugcaaaguacagauuuc

SEQ ID NO: 1811181 - RNA, 19 nt, Homo sapiens
  misc_RNA (1)...(19): siRNA sense strand
gacagcagcaggcucaaug

SEQ ID NO: 1811182 - RNA, 19 nt, Homo sapiens
  misc_RNA (1)...(19): siRNA sense strand
gagaaugugaaagccauaa

SEQ ID NO: 1811183 - RNA, 19 nt, Homo sapiens
  misc_RNA (1)...(19): siRNA sense strand
caggacaguuccacgacaa

SEQ ID NO: 1811184 - RNA, 19 nt, Homo sapiens
  misc_RNA (1)...(19): siRNA sense strand
ccagggagacucaaucagu

SEQ ID NO: 1811185 - RNA, 19 nt, Homo sapiens
  misc_RNA (1)...(19): siRNA sense strand
gacgggagccuucguagag

SEQ ID NO: 1811186 - RNA, 19 nt, Homo sapiens
  misc_RNA (1)...(19): siRNA sense strand
agaggaggugaacaaauua

SEQ ID NO: 1811187 - RNA, 19 nt, Homo sapiens
  misc_RNA (1)...(19): siRNA sense strand
ggaggaguacuacaagaag

SEQ ID NO: 1811188 - RNA, 19 nt, Homo sapiens
  misc_RNA (1)...(19): siRNA sense strand
gaugaugcuggaugacauu

SEQ ID NO: 1811189 - RNA, 19 nt, Homo sapiens
  misc_RNA (1)...(19): siRNA sense strand
cgagguggcgagaauguga

SEQ ID NO: 1811190 - RNA, 19 nt, Homo sapiens
  misc_RNA (1)...(19): siRNA sense strand
guccagaaagccaagauga

SEQ ID NO: 1811191 - RNA, 19 nt, Homo sapiens
  misc_RNA (1)...(19): siRNA sense strand
gaucaaccggagagcaaga

SEQ ID NO: 1811192 - RNA, 19 nt, Homo sapiens
  misc_RNA (1)...(19): siRNA sense strand
gcggauacaguucaagcaa

SEQ ID NO: 1811193 - RNA, 19 nt, Homo sapiens
  misc_RNA (1)...(19): siRNA sense strand
gagcgcaguguguccuuga

SEQ ID NO: 1811194 - RNA, 19 nt, Homo sapiens
  misc_RNA (1)...(19): siRNA sense strand
gaugcugccacgacaguga

SEQ ID NO: 1811195 - RNA, 19 nt, Homo sapiens
  misc_RNA (1)...(19): siRNA sense strand
gaaugugaaagccauaaac

SEQ ID NO: 1811196 - RNA, 19 nt, Homo sapiens
  misc_RNA (1)...(19): siRNA sense strand
ggaguggagagaugaucaa

SEQ ID NO: 1811197 - RNA, 19 nt, Homo sapiens
  misc_RNA (1)...(19): siRNA sense strand
uggcagaggaggugaacaa

SEQ ID NO: 1811198 - RNA, 19 nt, Homo sapiens
  misc_RNA (1)...(19): siRNA sense strand
acacuaaggccugggaaga

SEQ ID NO: 1811199 - RNA, 19 nt, Homo sapiens
  misc_RNA (1)...(19): siRNA sense strand
gacaaaccucuccgcauca

SEQ ID NO: 1811200 - RNA, 19 nt, Homo sapiens
  misc_RNA (1)...(19): siRNA sense strand
gaauaacagcacuccugau

SEQ ID NO: 1811201 - RNA, 19 nt, Homo sapiens
  misc_RNA (1)...(19): siRNA sense strand
ggacagcagcaggcucaau

SEQ ID NO: 1811202 - RNA, 19 nt, Homo sapiens
  misc_RNA (1)...(19): siRNA sense strand
ccucaugacccaagcaaag

SEQ ID NO: 1811203 - RNA, 19 nt, Homo sapiens
  misc_RNA (1)...(19): siRNA sense strand
acaagaagcaagcgcaagu

SEQ ID NO: 1811204 - RNA, 19 nt, Homo sapiens
  misc_RNA (1)...(19): siRNA sense strand
cgaaggcuugggaggagua

SEQ ID NO: 1811205 - RNA, 19 nt, Homo sapiens
  misc_RNA (1)...(19): siRNA sense strand
caggaacgcgcuggaguga

SEQ ID NO: 1811206 - RNA, 19 nt, Homo sapiens
  misc_RNA (1)...(19): siRNA sense strand
cugggaagaguauuacaaa

SEQ ID NO: 1811207 - RNA, 19 nt, Homo sapiens
  misc_RNA (1)...(19): siRNA sense strand
agaauacgaauguggacaa

SEQ ID NO: 1811208 - RNA, 19 nt, Homo sapiens
  misc_RNA (1)...(19): siRNA sense strand
cagcccggaucaucaacga

SEQ ID NO: 1811209 - RNA, 19 nt, Homo sapiens
  misc_RNA (1)...(19): siRNA sense strand
aagagacaguuggaagaug

SEQ ID NO: 1811210 - RNA, 19 nt, Homo sapiens
  misc_RNA (1)...(19): siRNA sense strand
ugggaggaguacuacaaga

SEQ ID NO: 1811211 - RNA, 19 nt, Homo sapiens
  misc_RNA (1)...(19): siRNA sense strand
auaacagcacuccugauuu

SEQ ID NO: 1811212 - RNA, 19 nt, Homo sapiens
  misc_RNA (1)...(19): siRNA sense strand
ugaguacggaucucggauu

SEQ ID NO: 1811213 - RNA, 19 nt, Homo sapiens
  misc_RNA (1)...(19): siRNA sense strand
gugagauggugauggacau

SEQ ID NO: 1811214 - RNA, 19 nt, Homo sapiens
  misc_RNA (1)...(19): siRNA sense strand
aaagagacaguuggaagau

SEQ ID NO: 1811215 - RNA, 19 nt, Homo sapiens
  misc_RNA (1)...(19): siRNA sense strand
caaggacuucaaugacaga

SEQ ID NO: 1811216 - RNA, 19 nt, Homo sapiens
  misc_RNA (1)...(19): siRNA sense strand
ccagauugcagccaaaauu

SEQ ID NO: 1811217 - RNA, 19 nt, Homo sapiens
  misc_RNA (1)...(19): siRNA sense strand
cuacuacucacacuacuac

SEQ ID NO: 1811218 - RNA, 19 nt, Homo sapiens
  misc_RNA (1)...(19): siRNA sense strand
cgagaaugugaaagccaua

SEQ ID NO: 1811219 - RNA, 19 nt, Homo sapiens
  misc_RNA (1)...(19): siRNA sense strand
gacaggagccccagaaucu

SEQ ID NO: 1811220 - RNA, 19 nt, Homo sapiens
  misc_RNA (1)...(19): siRNA sense strand
aggaagaggccaaggcaau

SEQ ID NO: 1811221 - RNA, 19 nt, Homo sapiens
  misc_RNA (1)...(19): siRNA sense strand
acaaaccucuccgcaucau

SEQ ID NO: 1811222 - RNA, 19 nt, Homo sapiens
  misc_RNA (1)...(19): siRNA sense strand
gcaagaagcaccaccagua

SEQ ID NO: 1811223 - RNA, 19 nt, Homo sapiens
  misc_RNA (1)...(19): siRNA sense strand
gcuggucgcccaaauauaa

SEQ ID NO: 1811224 - RNA, 19 nt, Homo sapiens
  misc_RNA (1)...(19): siRNA sense strand
uggaguaucuggugaaaug

SEQ ID NO: 1811225 - RNA, 19 nt, Homo sapiens
  misc_RNA (1)...(19): siRNA sense strand
aggagcagcugaugggaua

SEQ ID NO: 1811226 - RNA, 19 nt, Homo sapiens
  misc_RNA (1)...(19): siRNA sense strand
agaccuggaugaacccaua

SEQ ID NO: 1811227 - RNA, 19 nt, Homo sapiens
  misc_RNA (1)...(19): siRNA sense strand
ggaugaacccauagacuug

SEQ ID NO: 1811228 - RNA, 19 nt, Homo sapiens
  misc_RNA (1)...(19): siRNA sense strand
gcgaacugccucaccguua

SEQ ID NO: 1811229 - RNA, 19 nt, Homo sapiens
  misc_RNA (1)...(19): siRNA sense strand
gcaagagcggcaaguacua

SEQ ID NO: 1811230 - RNA, 19 nt, Homo sapiens
  misc_RNA (1)...(19): siRNA sense strand
gaugggauaucggaagaga

SEQ ID NO: 1811231 - RNA, 19 nt, Homo sapiens
  misc_RNA (1)...(19): siRNA sense strand
agaugaagauagucaagaa

SEQ ID NO: 1811232 - RNA, 19 nt, Homo sapiens
  misc_RNA (1)...(19): siRNA sense strand
ucaagaacaagaacaagaa

SEQ ID NO: 1811233 - RNA, 19 nt, Homo sapiens
  misc_RNA (1)...(19): siRNA sense strand
gaacggacgcaucgugauc

SEQ ID NO: 1811234 - RNA, 19 nt, Homo sapiens
  misc_RNA (1)...(19): siRNA sense strand
ugaagauagucaagaacaa

SEQ ID NO: 1811235 - RNA, 19 nt, Homo sapiens
  misc_RNA (1)...(19): siRNA sense strand
gaagauagucaagaacaag

SEQ ID NO: 1811236 - RNA, 19 nt, Homo sapiens
  misc_RNA (1)...(19): siRNA sense strand
gaggcuggucgcccaaaua

SEQ ID NO: 1811237 - RNA, 19 nt, Homo sapiens
  misc_RNA (1)...(19): siRNA sense strand
aguacgagcucaacagcaa

SEQ ID NO: 1811238 - RNA, 19 nt, Homo sapiens
  misc_RNA (1)...(19): siRNA sense strand
gcccuucuuugggaauaua

SEQ ID NO: 1811239 - RNA, 19 nt, Homo sapiens
  misc_RNA (1)...(19): siRNA sense strand
gcaagggcagaguggagua

SEQ ID NO: 1811240 - RNA, 19 nt, Homo sapiens
  misc_RNA (1)...(19): siRNA sense strand
uggagagcaucgagaagaa

SEQ ID NO: 1811241 - RNA, 19 nt, Homo sapiens
  misc_RNA (1)...(19): siRNA sense strand
gcgcagaggagaagaaggu

SEQ ID NO: 1811242 - RNA, 19 nt, Homo sapiens
  misc_RNA (1)...(19): siRNA sense strand
aggaguacgugacggugua

SEQ ID NO: 1811243 - RNA, 19 nt, Homo sapiens
  misc_RNA (1)...(19): siRNA sense strand
ccagcucccuccaggugaa

SEQ ID NO: 1811244 - RNA, 19 nt, Homo sapiens
  misc_RNA (1)...(19): siRNA sense strand
cgaacugccucaccguuac

SEQ ID NO: 1811245 - RNA, 19 nt, Homo sapiens
  misc_RNA (1)...(19): siRNA sense strand
cgaguucaagcccuucuuu

SEQ ID NO: 1811246 - RNA, 19 nt, Homo sapiens
  misc_RNA (1)...(19): siRNA sense strand
gcaagaugaagauagucaa

SEQ ID NO: 1811247 - RNA, 19 nt, Homo sapiens
  misc_RNA (1)...(19): siRNA sense strand
gcaugcaggcggugaagau

SEQ ID NO: 1811248 - RNA, 19 nt, Homo sapiens
  misc_RNA (1)...(19): siRNA sense strand
ugaucgugaugagcaaaua

SEQ ID NO: 1811249 - RNA, 19 nt, Homo sapiens
  misc_RNA (1)...(19): siRNA sense strand
caagaagcaccaccaguac

SEQ ID NO: 1811250 - RNA, 19 nt, Homo sapiens
  misc_RNA (1)...(19): siRNA sense strand
gcugaucgccuuccagaac

SEQ ID NO: 1811251 - RNA, 19 nt, Homo sapiens
  misc_RNA (1)...(19): siRNA sense strand
gucaagaacaagaacaaga

SEQ ID NO: 1811252 - RNA, 19 nt, Homo sapiens
  misc_RNA (1)...(19): siRNA sense strand
acuaccagcucaacagcaa

SEQ ID NO: 1811253 - RNA, 19 nt, Homo sapiens
  misc_RNA (1)...(19): siRNA sense strand
uggaugaacccauagacuu

SEQ ID NO: 1811254 - RNA, 19 nt, Homo sapiens
  misc_RNA (1)...(19): siRNA sense strand
aaauguacgaccugcagua

SEQ ID NO: 1811255 - RNA, 19 nt, Homo sapiens
  misc_RNA (1)...(19): siRNA sense strand
guggagagcaucgagaaga

SEQ ID NO: 1811256 - RNA, 19 nt, Homo sapiens
  misc_RNA (1)...(19): siRNA sense strand
cugaugggauaucggaaga

SEQ ID NO: 1811257 - RNA, 19 nt, Homo sapiens
  misc_RNA (1)...(19): siRNA sense strand
gaggagguguccgggguua

SEQ ID NO: 1811258 - RNA, 19 nt, Homo sapiens
  misc_RNA (1)...(19): siRNA sense strand
ggcaagaugaagauaguca

SEQ ID NO: 1811259 - RNA, 19 nt, Homo sapiens
  misc_RNA (1)...(19): siRNA sense strand
cgugggaaccggaggagaa

SEQ ID NO: 1811260 - RNA, 19 nt, Homo sapiens
  misc_RNA (1)...(19): siRNA sense strand
gaguucaagcccuucuuug

SEQ ID NO: 1811261 - RNA, 19 nt, Homo sapiens
  misc_RNA (1)...(19): siRNA sense strand
gggcaagagcggcaaguac

SEQ ID NO: 1811262 - RNA, 19 nt, Homo sapiens
  misc_RNA (1)...(19): siRNA sense strand
gcuagacucagaccuggau

SEQ ID NO: 1811263 - RNA, 19 nt, Homo sapiens
  misc_RNA (1)...(19): siRNA sense strand
gaggucauccugcuagacu

SEQ ID NO: 1811264 - RNA, 19 nt, Homo sapiens
  misc_RNA (1)...(19): siRNA sense strand
caagaugaagauagucaag

SEQ ID NO: 1811265 - RNA, 19 nt, Homo sapiens
  misc_RNA (1)...(19): siRNA sense strand
ggcaagagcggcaaguacu

SEQ ID NO: 1811266 - RNA, 19 nt, Homo sapiens
  misc_RNA (1)...(19): siRNA sense strand
gagcaaauacauggagaac

SEQ ID NO: 1811267 - RNA, 19 nt, Homo sapiens
  misc_RNA (1)...(19): siRNA sense strand
ggucauccugcuagacuca

SEQ ID NO: 1811268 - RNA, 19 nt, Homo sapiens
  misc_RNA (1)...(19): siRNA sense strand
gaguaucuggugaaaugga

SEQ ID NO: 1811269 - RNA, 19 nt, Homo sapiens
  misc_RNA (1)...(19): siRNA sense strand
ggacuccuccacugacaac

SEQ ID NO: 1811270 - RNA, 19 nt, Homo sapiens
  misc_RNA (1)...(19): siRNA sense strand
ugcaggcggugaagaucaa

SEQ ID NO: 1811271 - RNA, 19 nt, Homo sapiens
  misc_RNA (1)...(19): siRNA sense strand
gugacagucuaccauauua

SEQ ID NO: 1811272 - RNA, 19 nt, Homo sapiens
  misc_RNA (1)...(19): siRNA sense strand
gaacaucugggcccugauu

SEQ ID NO: 1811273 - RNA, 19 nt, Homo sapiens
  misc_RNA (1)...(19): siRNA sense strand
ccaagugccugaacaucug

SEQ ID NO: 1811274 - RNA, 19 nt, Homo sapiens
  misc_RNA (1)...(19): siRNA sense strand
guucaacacccucuucuug

SEQ ID NO: 1811275 - RNA, 19 nt, Homo sapiens
  misc_RNA (1)...(19): siRNA sense strand
gcacaaggaggaacaugag

SEQ ID NO: 1811276 - RNA, 19 nt, Homo sapiens
  misc_RNA (1)...(19): siRNA sense strand
ugucugggcuucauagcau

SEQ ID NO: 1811277 - RNA, 19 nt, Homo sapiens
  misc_RNA (1)...(19): siRNA sense strand
gguauucggcucugugaca

SEQ ID NO: 1811278 - RNA, 19 nt, Homo sapiens
  misc_RNA (1)...(19): siRNA sense strand
gguccaccgugaucaacau

SEQ ID NO: 1811279 - RNA, 19 nt, Homo sapiens
  misc_RNA (1)...(19): siRNA sense strand
ccucaugaccauuggauuc

SEQ ID NO: 1811280 - RNA, 19 nt, Homo sapiens
  misc_RNA (1)...(19): siRNA sense strand
caagguccaccgugaucaa

SEQ ID NO: 1811281 - RNA, 19 nt, Homo sapiens
  misc_RNA (1)...(19): siRNA sense strand
gccaagugccugaacaucu

SEQ ID NO: 1811282 - RNA, 19 nt, Homo sapiens
  misc_RNA (1)...(19): siRNA sense strand
ugaagucuagggacaggaa

SEQ ID NO: 1811283 - RNA, 19 nt, Homo sapiens
  misc_RNA (1)...(19): siRNA sense strand
ugugacagucuaccauauu

SEQ ID NO: 1811284 - RNA, 19 nt, Homo sapiens
  misc_RNA (1)...(19): siRNA sense strand
ccuacuccgugaagucuag

SEQ ID NO: 1811285 - RNA, 19 nt, Homo sapiens
  misc_RNA (1)...(19): siRNA sense strand
ggcauccucaugaccauug

SEQ ID NO: 1811286 - RNA, 19 nt, Homo sapiens
  misc_RNA (1)...(19): siRNA sense strand
ggaaagccaucaccaaguc

SEQ ID NO: 1811287 - RNA, 19 nt, Homo sapiens
  misc_RNA (1)...(19): siRNA sense strand
gaaucaggcuccaggaaug

SEQ ID NO: 1811288 - RNA, 19 nt, Homo sapiens
  misc_RNA (1)...(19): siRNA sense strand
ggacagcuuucucugacuu

SEQ ID NO: 1811289 - RNA, 19 nt, Homo sapiens
  misc_RNA (1)...(19): siRNA sense strand
gaaauucaacagccgcuuu

SEQ ID NO: 1811290 - RNA, 19 nt, Homo sapiens
  misc_RNA (1)...(19): siRNA sense strand
ccaaggaccuggccaagca

SEQ ID NO: 1811291 - RNA, 19 nt, Homo sapiens
  misc_RNA (1)...(19): siRNA sense strand
gcacaggaugagauuuaua

SEQ ID NO: 1811292 - RNA, 19 nt, Homo sapiens
  misc_RNA (1)...(19): siRNA sense strand
caaccagggugcaaagauc

SEQ ID NO: 1811293 - RNA, 19 nt, Homo sapiens
  misc_RNA (1)...(19): siRNA sense strand
gaggaaguccagcaagaaa

SEQ ID NO: 1811294 - RNA, 19 nt, Homo sapiens
  misc_RNA (1)...(19): siRNA sense strand
gcucugccgugcccacauu

SEQ ID NO: 1811295 - RNA, 19 nt, Homo sapiens
  misc_RNA (1)...(19): siRNA sense strand
aacagccgcuuucggaaua

SEQ ID NO: 1811296 - RNA, 19 nt, Homo sapiens
  misc_RNA (1)...(19): siRNA sense strand
aggaggcgcuggagaugua

SEQ ID NO: 1811297 - RNA, 19 nt, Homo sapiens
  misc_RNA (1)...(19): siRNA sense strand
cggcagcacuaccagauga

SEQ ID NO: 1811298 - RNA, 19 nt, Homo sapiens
  misc_RNA (1)...(19): siRNA sense strand
ggagauguaccgcaaagug

SEQ ID NO: 1811299 - RNA, 19 nt, Homo sapiens
  misc_RNA (1)...(19): siRNA sense strand
cagaugagccuguguccaa

SEQ ID NO: 1811300 - RNA, 19 nt, Homo sapiens
  misc_RNA (1)...(19): siRNA sense strand
aagauaaauuuccgcugua

SEQ ID NO: 1811301 - RNA, 19 nt, Homo sapiens
  misc_RNA (1)...(19): siRNA sense strand
gagcagcuggagaagauaa

SEQ ID NO: 1811302 - RNA, 19 nt, Homo sapiens
  misc_RNA (1)...(19): siRNA sense strand
ucgcacaggaugagauuua

SEQ ID NO: 1811303 - RNA, 19 nt, Homo sapiens
  misc_RNA (1)...(19): siRNA sense strand
gaagucagugucucgaaga

SEQ ID NO: 1811304 - RNA, 19 nt, Homo sapiens
  misc_RNA (1)...(19): siRNA sense strand
ucaacuaugugacugagau

SEQ ID NO: 1811305 - RNA, 19 nt, Homo sapiens
  misc_RNA (1)...(19): siRNA sense strand
ggagcgagucagcgacaua

SEQ ID NO: 1811306 - RNA, 19 nt, Homo sapiens
  misc_RNA (1)...(19): siRNA sense strand
caagguguccugcuucaug

SEQ ID NO: 1811307 - RNA, 19 nt, Homo sapiens
  misc_RNA (1)...(19): siRNA sense strand
ucgagcagcuggagaagau

SEQ ID NO: 1811308 - RNA, 19 nt, Homo sapiens
  misc_RNA (1)...(19): siRNA sense strand
aagaggaaguccagcaaga

SEQ ID NO: 1811309 - RNA, 19 nt, Homo sapiens
  misc_RNA (1)...(19): siRNA sense strand
agauaaauuuccgcuguaa

SEQ ID NO: 1811310 - RNA, 19 nt, Homo sapiens
  misc_RNA (1)...(19): siRNA sense strand
ugaaagcaagcaagaagaa

SEQ ID NO: 1811311 - RNA, 19 nt, Homo sapiens
  misc_RNA (1)...(19): siRNA sense strand
caagaggaacgacuucugu

SEQ ID NO: 1811312 - RNA, 19 nt, Homo sapiens
  misc_RNA (1)...(19): siRNA sense strand
uggagacccuucaucauca

SEQ ID NO: 1811313 - RNA, 19 nt, Homo sapiens
  misc_RNA (1)...(19): siRNA sense strand
gcaucgagcagcuggagaa

SEQ ID NO: 1811314 - RNA, 19 nt, Homo sapiens
  misc_RNA (1)...(19): siRNA sense strand
gaucgcacaggaugagauu

SEQ ID NO: 1811315 - RNA, 19 nt, Homo sapiens
  misc_RNA (1)...(19): siRNA sense strand
caacagccgcuuucggaau

SEQ ID NO: 1811316 - RNA, 19 nt, Homo sapiens
  misc_RNA (1)...(19): siRNA sense strand
ggagaccuguuugcaccaa

SEQ ID NO: 1811317 - RNA, 19 nt, Homo sapiens
  misc_RNA (1)...(19): siRNA sense strand
gcaagcaagaagaagaaga

SEQ ID NO: 1811318 - RNA, 19 nt, Homo sapiens
  misc_RNA (1)...(19): siRNA sense strand
gggccucgcucaugaagac

SEQ ID NO: 1811319 - RNA, 19 nt, Homo sapiens
  misc_RNA (1)...(19): siRNA sense strand
gggagcaccacgacuuuga

SEQ ID NO: 1811320 - RNA, 19 nt, Homo sapiens
  misc_RNA (1)...(19): siRNA sense strand
ccaaggaggcgcuggagau

SEQ ID NO: 1811321 - RNA, 19 nt, Homo sapiens
  misc_RNA (1)...(19): siRNA sense strand
gcaaccagggugcaaagau

SEQ ID NO: 1811322 - RNA, 19 nt, Homo sapiens
  misc_RNA (1)...(19): siRNA sense strand
cacaggaugagauuuauau

SEQ ID NO: 1811323 - RNA, 19 nt, Homo sapiens
  misc_RNA (1)...(19): siRNA sense strand
gagcggcagauccggagua

SEQ ID NO: 1811324 - RNA, 19 nt, Homo sapiens
  misc_RNA (1)...(19): siRNA sense strand
gcacuggcagcaaggaugu

SEQ ID NO: 1811325 - RNA, 19 nt, Homo sapiens
  misc_RNA (1)...(19): siRNA sense strand
aagagggcauccuucaaga

SEQ ID NO: 1811326 - RNA, 19 nt, Homo sapiens
  misc_RNA (1)...(19): siRNA sense strand
gaggaacgacuucuguaag

SEQ ID NO: 1811327 - RNA, 19 nt, Homo sapiens
  misc_RNA (1)...(19): siRNA sense strand
agaggaacgacuucuguaa

SEQ ID NO: 1811328 - RNA, 19 nt, Homo sapiens
  misc_RNA (1)...(19): siRNA sense strand
gucagugucucgaagaaag

SEQ ID NO: 1811329 - RNA, 19 nt, Homo sapiens
  misc_RNA (1)...(19): siRNA sense strand
aaagcaagcaagaagaaga

SEQ ID NO: 1811330 - RNA, 19 nt, Homo sapiens
  misc_RNA (1)...(19): siRNA sense strand
cgaguggugugugauggaa

SEQ ID NO: 1811331 - RNA, 19 nt, Homo sapiens
  misc_RNA (1)...(19): siRNA sense strand
ggaaguccagcaagaaagg

SEQ ID NO: 1811332 - RNA, 19 nt, Homo sapiens
  misc_RNA (1)...(19): siRNA sense strand
gcucuucgggcacaggaaa

SEQ ID NO: 1811333 - RNA, 19 nt, Homo sapiens
  misc_RNA (1)...(19): siRNA sense strand
gagcgagucagcgacauau

SEQ ID NO: 1811334 - RNA, 19 nt, Homo sapiens
  misc_RNA (1)...(19): siRNA sense strand
caagcaagaagaagaagag

SEQ ID NO: 1811335 - RNA, 19 nt, Homo sapiens
  misc_RNA (1)...(19): siRNA sense strand
ugaaucaggcuccaggaau

SEQ ID NO: 1811336 - RNA, 19 nt, Homo sapiens
  misc_RNA (1)...(19): siRNA sense strand
ggaacgacuucuguaagcu

SEQ ID NO: 1811337 - RNA, 19 nt, Homo sapiens
  misc_RNA (1)...(19): siRNA sense strand
gaaagcaagcaagaagaag

SEQ ID NO: 1811338 - RNA, 19 nt, Homo sapiens
  misc_RNA (1)...(19): siRNA sense strand
gcaccacuggguacacaga

SEQ ID NO: 1811339 - RNA, 19 nt, Homo sapiens
  misc_RNA (1)...(19): siRNA sense strand
agaagaagagggcauccuu

SEQ ID NO: 1811340 - RNA, 19 nt, Homo sapiens
  misc_RNA (1)...(19): siRNA sense strand
gcaccgagacgagcagagu

SEQ ID NO: 1811341 - RNA, 19 nt, Homo sapiens
  misc_RNA (1)...(19): siRNA sense strand
uagccaggaugcugaaguc

SEQ ID NO: 1811342 - RNA, 19 nt, Homo sapiens
  misc_RNA (1)...(19): siRNA sense strand
gagaggccaacccagagaa

SEQ ID NO: 1811343 - RNA, 19 nt, Homo sapiens
  misc_RNA (1)...(19): siRNA sense strand
gaagggauuccagcagaag

SEQ ID NO: 1811344 - RNA, 19 nt, Homo sapiens
  misc_RNA (1)...(19): siRNA sense strand
acuaugaggcccugcacua

SEQ ID NO: 1811345 - RNA, 19 nt, Homo sapiens
  misc_RNA (1)...(19): siRNA sense strand
uggaugucuucaacaacua

SEQ ID NO: 1811346 - RNA, 19 nt, Homo sapiens
  misc_RNA (1)...(19): siRNA sense strand
caaggaggcgcuggagaug

SEQ ID NO: 1811347 - RNA, 19 nt, Homo sapiens
  misc_RNA (1)...(19): siRNA sense strand
cagcuggagaagauaaauu

SEQ ID NO: 1811348 - RNA, 19 nt, Homo sapiens
  misc_RNA (1)...(19): siRNA sense strand
aagcaagcaagaagaagaa

SEQ ID NO: 1811349 - RNA, 19 nt, Homo sapiens
  misc_RNA (1)...(19): siRNA sense strand
gcgagucagcgacauaugg

SEQ ID NO: 1811350 - RNA, 19 nt, Homo sapiens
  misc_RNA (1)...(19): siRNA sense strand
ucagcaugcacgacuauga

SEQ ID NO: 1811351 - RNA, 19 nt, Homo sapiens
  misc_RNA (1)...(19): siRNA sense strand
ccacgucacccuggaguuc

SEQ ID NO: 1811352 - RNA, 19 nt, Homo sapiens
  misc_RNA (1)...(19): siRNA sense strand
ggagacccuucaucaucag

SEQ ID NO: 1811353 - RNA, 19 nt, Homo sapiens
  misc_RNA (1)...(19): siRNA sense strand
ucaagaggaaguccagcaa

SEQ ID NO: 1811354 - RNA, 19 nt, Homo sapiens
  misc_RNA (1)...(19): siRNA sense strand
aagaggaacgacuucugua

SEQ ID NO: 1811355 - RNA, 19 nt, Homo sapiens
  misc_RNA (1)...(19): siRNA sense strand
gaugagccuguguccaaga

SEQ ID NO: 1811356 - RNA, 19 nt, Homo sapiens
  misc_RNA (1)...(19): siRNA sense strand
uggagaaccggcagcacua

SEQ ID NO: 1811357 - RNA, 19 nt, Homo sapiens
  misc_RNA (1)...(19): siRNA sense strand
ggccaacccagagaaauuc

SEQ ID NO: 1811358 - RNA, 19 nt, Homo sapiens
  misc_RNA (1)...(19): siRNA sense strand
cggcagauccggaguacag

SEQ ID NO: 1811359 - RNA, 19 nt, Homo sapiens
  misc_RNA (1)...(19): siRNA sense strand
gcuucaccaugacgucguu

SEQ ID NO: 1811360 - RNA, 19 nt, Homo sapiens
  misc_RNA (1)...(19): siRNA sense strand
ggaccuggccaagcacauc

SEQ ID NO: 1811361 - RNA, 19 nt, Homo sapiens
  misc_RNA (1)...(19): siRNA sense strand
cuggaugucuucaacaacu

SEQ ID NO: 1811362 - RNA, 19 nt, Homo sapiens
  misc_RNA (1)...(19): siRNA sense strand
cgagaggccaacccagaga

SEQ ID NO: 1811363 - RNA, 19 nt, Homo sapiens
  misc_RNA (1)...(19): siRNA sense strand
gugaaucaggcuccaggaa

SEQ ID NO: 1811364 - RNA, 19 nt, Homo sapiens
  misc_RNA (1)...(19): siRNA sense strand
gggagcacaucugguucga

SEQ ID NO: 1811365 - RNA, 19 nt, Homo sapiens
  misc_RNA (1)...(19): siRNA sense strand
ccaggagacggcuguguag

SEQ ID NO: 1811366 - RNA, 19 nt, Homo sapiens
  misc_RNA (1)...(19): siRNA sense strand
ccaagaggaacgacuucug

SEQ ID NO: 1811367 - RNA, 19 nt, Homo sapiens
  misc_RNA (1)...(19): siRNA sense strand
caggagacagugaccuaga

SEQ ID NO: 1811368 - RNA, 19 nt, Homo sapiens
  misc_RNA (1)...(19): siRNA sense strand
cccuggaugucuucaacaa

SEQ ID NO: 1811369 - RNA, 19 nt, Homo sapiens
  misc_RNA (1)...(19): siRNA sense strand
acaggaaagccaucaccaa

SEQ ID NO: 1811370 - RNA, 19 nt, Homo sapiens
  misc_RNA (1)...(19): siRNA sense strand
ggacagauccauucaguuu

SEQ ID NO: 1811371 - RNA, 19 nt, Homo sapiens
  misc_RNA (1)...(19): siRNA sense strand
caugguaacucuaugaaua

SEQ ID NO: 1811372 - RNA, 19 nt, Homo sapiens
  misc_RNA (1)...(19): siRNA sense strand
gaaguacuguggcuguaua

SEQ ID NO: 1811373 - RNA, 19 nt, Homo sapiens
  misc_RNA (1)...(19): siRNA sense strand
caaacaagcuagaaauaug

SEQ ID NO: 1811374 - RNA, 19 nt, Homo sapiens
  misc_RNA (1)...(19): siRNA sense strand
caauauggcugaguucuuu

SEQ ID NO: 1811375 - RNA, 19 nt, Homo sapiens
  misc_RNA (1)...(19): siRNA sense strand
gagauggccugacagaauu

SEQ ID NO: 1811376 - RNA, 19 nt, Homo sapiens
  misc_RNA (1)...(19): siRNA sense strand
gaauugaucacugucauua

SEQ ID NO: 1811377 - RNA, 19 nt, Homo sapiens
  misc_RNA (1)...(19): siRNA sense strand
ggauauauuuaccuggaua

SEQ ID NO: 1811378 - RNA, 19 nt, Homo sapiens
  misc_RNA (1)...(19): siRNA sense strand
ugaagaaacuccauuagca

SEQ ID NO: 1811379 - RNA, 19 nt, Homo sapiens
  misc_RNA (1)...(19): siRNA sense strand
ccagaggacuugcaauaug

SEQ ID NO: 1811380 - RNA, 19 nt, Homo sapiens
  misc_RNA (1)...(19): siRNA sense strand
ggaaauauggacagaagaa

SEQ ID NO: 1811381 - RNA, 19 nt, Homo sapiens
  misc_RNA (1)...(19): siRNA sense strand
ggagauggccugacagaau

SEQ ID NO: 1811382 - RNA, 19 nt, Homo sapiens
  misc_RNA (1)...(19): siRNA sense strand
cagaggacuugcaauauga

SEQ ID NO: 1811383 - RNA, 19 nt, Homo sapiens
  misc_RNA (1)...(19): siRNA sense strand
caacagcaguauuuaucaa

SEQ ID NO: 1811384 - RNA, 19 nt, Homo sapiens
  misc_RNA (1)...(19): siRNA sense strand
aaacaggccuucaaacaag

SEQ ID NO: 1811385 - RNA, 19 nt, Homo sapiens
  misc_RNA (1)...(19): siRNA sense strand
ugaauagucuuuccagugu

SEQ ID NO: 1811386 - RNA, 19 nt, Homo sapiens
  misc_RNA (1)...(19): siRNA sense strand
caaugaaacuagagacaug

SEQ ID NO: 1811387 - RNA, 19 nt, Homo sapiens
  misc_RNA (1)...(19): siRNA sense strand
cagcauaagucuucuucuu

SEQ ID NO: 1811388 - RNA, 19 nt, Homo sapiens
  misc_RNA (1)...(19): siRNA sense strand
gauccaaaccuuuauuaug

SEQ ID NO: 1811389 - RNA, 19 nt, Homo sapiens
  misc_RNA (1)...(19): siRNA sense strand
aaagggaggcugcagaaua

SEQ ID NO: 1811390 - RNA, 19 nt, Homo sapiens
  misc_RNA (1)...(19): siRNA sense strand
gcacgacgacaauaucauu

SEQ ID NO: 1811391 - RNA, 19 nt, Homo sapiens
  misc_RNA (1)...(19): siRNA sense strand
cagcaguauuuaucaagua

SEQ ID NO: 1811392 - RNA, 19 nt, Homo sapiens
  misc_RNA (1)...(19): siRNA sense strand
aaagauggauccaaaccuu

SEQ ID NO: 1811393 - RNA, 19 nt, Homo sapiens
  misc_RNA (1)...(19): siRNA sense strand
ggaaagggaggcugcagaa

SEQ ID NO: 1811394 - RNA, 19 nt, Homo sapiens
  misc_RNA (1)...(19): siRNA sense strand
gcugaguucuuucgaccua

SEQ ID NO: 1811395 - RNA, 19 nt, Homo sapiens
  misc_RNA (1)...(19): siRNA sense strand
uaaacaagcugugcagaag

SEQ ID NO: 1811396 - RNA, 19 nt, Homo sapiens
  misc_RNA (1)...(19): siRNA sense strand
uaggaaguguuucucuuaa

SEQ ID NO: 1811397 - RNA, 19 nt, Homo sapiens
  misc_RNA (1)...(19): siRNA sense strand
gcuaagauaauuccaauag

SEQ ID NO: 1811398 - RNA, 19 nt, Homo sapiens
  misc_RNA (1)...(19): siRNA sense strand
cgagacauuaccacuauua

SEQ ID NO: 1811399 - RNA, 19 nt, Homo sapiens
  misc_RNA (1)...(19): siRNA sense strand
aaacauucuuugucccuuu

SEQ ID NO: 1811400 - RNA, 19 nt, Homo sapiens
  misc_RNA (1)...(19): siRNA sense strand
gcugaggucuguauggaau

SEQ ID NO: 1811401 - RNA, 19 nt, Homo sapiens
  misc_RNA (1)...(19): siRNA sense strand
caacaugguaacucuauga

SEQ ID NO: 1811402 - RNA, 19 nt, Homo sapiens
  misc_RNA (1)...(19): siRNA sense strand
gugcaggccuguggacuuu

SEQ ID NO: 1811403 - RNA, 19 nt, Homo sapiens
  misc_RNA (1)...(19): siRNA sense strand
gccuuuagcuaagauaauu

SEQ ID NO: 1811404 - RNA, 19 nt, Homo sapiens
  misc_RNA (1)...(19): siRNA sense strand
gacaauggagcaagugaaa

SEQ ID NO: 1811405 - RNA, 19 nt, Homo sapiens
  misc_RNA (1)...(19): siRNA sense strand
gaaauauggacagaagaaa

SEQ ID NO: 1811406 - RNA, 19 nt, Homo sapiens
  misc_RNA (1)...(19): siRNA sense strand
ugaaacaccuagucauuuu

SEQ ID NO: 1811407 - RNA, 19 nt, Homo sapiens
  misc_RNA (1)...(19): siRNA sense strand
cuagagacauguuggaaag

SEQ ID NO: 1811408 - RNA, 19 nt, Homo sapiens
  misc_RNA (1)...(19): siRNA sense strand
caauggagcaagugaaaga

SEQ ID NO: 1811409 - RNA, 19 nt, Homo sapiens
  misc_RNA (1)...(19): siRNA sense strand
uaagucuucuucuuggauu

SEQ ID NO: 1811410 - RNA, 19 nt, Homo sapiens
  misc_RNA (1)...(19): siRNA sense strand
agacuuugcugcuaaugug

SEQ ID NO: 1811411 - RNA, 19 nt, Homo sapiens
  misc_RNA (1)...(19): siRNA sense strand
gugaaacaccuagucauuu

SEQ ID NO: 1811412 - RNA, 19 nt, Homo sapiens
  misc_RNA (1)...(19): siRNA sense strand
uuaggaaguguuucucuua

SEQ ID NO: 1811413 - RNA, 19 nt, Homo sapiens
  misc_RNA (1)...(19): siRNA sense strand
ucagagaaauacaggaaag

SEQ ID NO: 1811414 - RNA, 19 nt, Homo sapiens
  misc_RNA (1)...(19): siRNA sense strand
uagacaauauggcugaguu

SEQ ID NO: 1811415 - RNA, 19 nt, Homo sapiens
  misc_RNA (1)...(19): siRNA sense strand
gcaacaugguaacucuaug

SEQ ID NO: 1811416 - RNA, 19 nt, Homo sapiens
  misc_RNA (1)...(19): siRNA sense strand
gcagugaaacaccuaguca

SEQ ID NO: 1811417 - RNA, 19 nt, Homo sapiens
  misc_RNA (1)...(19): siRNA sense strand
caggaucuguugacaaugg

SEQ ID NO: 1811418 - RNA, 19 nt, Homo sapiens
  misc_RNA (1)...(19): siRNA sense strand
aaccagaggacuugcaaua

SEQ ID NO: 1811419 - RNA, 19 nt, Homo sapiens
  misc_RNA (1)...(19): siRNA sense strand
gacauuaccacuauuaaac

SEQ ID NO: 1811420 - RNA, 19 nt, Homo sapiens
  misc_RNA (1)...(19): siRNA sense strand
gagacauuaccacuauuaa

SEQ ID NO: 1811421 - RNA, 19 nt, Homo sapiens
  misc_RNA (1)...(19): siRNA sense strand
gaugccagaugaagaaacu

SEQ ID NO: 1811422 - RNA, 19 nt, Homo sapiens
  misc_RNA (1)...(19): siRNA sense strand
ugaggucuguauggaauuu

SEQ ID NO: 1811423 - RNA, 19 nt, Homo sapiens
  misc_RNA (1)...(19): siRNA sense strand
guaaacggacagauccauu

SEQ ID NO: 1811424 - RNA, 19 nt, Homo sapiens
  misc_RNA (1)...(19): siRNA sense strand
guaccuguaugcugguugu

SEQ ID NO: 1811425 - RNA, 19 nt, Homo sapiens
  misc_RNA (1)...(19): siRNA sense strand
agauggauccaaaccuuua

SEQ ID NO: 1811426 - RNA, 19 nt, Homo sapiens
  misc_RNA (1)...(19): siRNA sense strand
aaucagaaaucucguugag

SEQ ID NO: 1811427 - RNA, 19 nt, Homo sapiens
  misc_RNA (1)...(19): siRNA sense strand
agaugaagaaacuccauua

SEQ ID NO: 1811428 - RNA, 19 nt, Homo sapiens
  misc_RNA (1)...(19): siRNA sense strand
ggaggcugcagaauacauu

SEQ ID NO: 1811429 - RNA, 19 nt, Homo sapiens
  misc_RNA (1)...(19): siRNA sense strand
aagggaggcugcagaauac

SEQ ID NO: 1811430 - RNA, 19 nt, Homo sapiens
  misc_RNA (1)...(19): siRNA sense strand
cggguccaguuaaacauaa

SEQ ID NO: 1811431 - RNA, 19 nt, Homo sapiens
  misc_RNA (1)...(19): siRNA sense strand
ccaagcacgacgacaauau

SEQ ID NO: 1811432 - RNA, 19 nt, Homo sapiens
  misc_RNA (1)...(19): siRNA sense strand
ggacuugcaauaugacagu

SEQ ID NO: 1811433 - RNA, 19 nt, Homo sapiens
  misc_RNA (1)...(19): siRNA sense strand
gcuaauguguaugaagcuu

SEQ ID NO: 1811434 - RNA, 19 nt, Homo sapiens
  misc_RNA (1)...(19): siRNA sense strand
aggaaguguuucucuuaaa

SEQ ID NO: 1811435 - RNA, 19 nt, Homo sapiens
  misc_RNA (1)...(19): siRNA sense strand
gaaauaugggaggaucuga

SEQ ID NO: 1811436 - RNA, 19 nt, Homo sapiens
  misc_RNA (1)...(19): siRNA sense strand
ccucacagcucugcuaaaa

SEQ ID NO: 1811437 - RNA, 19 nt, Homo sapiens
  misc_RNA (1)...(19): siRNA sense strand
gaugaagaaacuccauuag

SEQ ID NO: 1811438 - RNA, 19 nt, Homo sapiens
  misc_RNA (1)...(19): siRNA sense strand
uaugaugccagaugaagaa

SEQ ID NO: 1811439 - RNA, 19 nt, Homo sapiens
  misc_RNA (1)...(19): siRNA sense strand
ggauccaaaccuuuauuau

SEQ ID NO: 1811440 - RNA, 19 nt, Homo sapiens
  misc_RNA (1)...(19): siRNA sense strand
aaauggcacuacaauucuu

SEQ ID NO: 1811441 - RNA, 19 nt, Homo sapiens
  misc_RNA (1)...(19): siRNA sense strand
uaaugcagcaguuggcaaa

SEQ ID NO: 1811442 - RNA, 19 nt, Homo sapiens
  misc_RNA (1)...(19): siRNA sense strand
gcggguccaguuaaacaua

SEQ ID NO: 1811443 - RNA, 19 nt, Homo sapiens
  misc_RNA (1)...(19): siRNA sense strand
ugagagaggccuuaaugca

SEQ ID NO: 1811444 - RNA, 19 nt, Homo sapiens
  misc_RNA (1)...(19): siRNA sense strand
cucagcaacuggagaaaug

SEQ ID NO: 1811445 - RNA, 19 nt, Homo sapiens
  misc_RNA (1)...(19): siRNA sense strand
gcaggccuguggacuuucu

SEQ ID NO: 1811446 - RNA, 19 nt, Homo sapiens
  misc_RNA (1)...(19): siRNA sense strand
gcagaagguuuuaggaagu

SEQ ID NO: 1811447 - RNA, 19 nt, Homo sapiens
  misc_RNA (1)...(19): siRNA sense strand
uuaaacaagcugugcagaa

SEQ ID NO: 1811448 - RNA, 19 nt, Homo sapiens
  misc_RNA (1)...(19): siRNA sense strand
auauuuaccuggauaaugc

SEQ ID NO: 1811449 - RNA, 19 nt, Homo sapiens
  misc_RNA (1)...(19): siRNA sense strand
uaaugcagcaacugaauuc

SEQ ID NO: 1811450 - RNA, 19 nt, Homo sapiens
  misc_RNA (1)...(19): siRNA sense strand
uucaggaucuguugacaau

SEQ ID NO: 1811451 - RNA, 19 nt, Homo sapiens
  misc_RNA (1)...(19): siRNA sense strand
uaaacggacagauccauuc

SEQ ID NO: 1811452 - RNA, 19 nt, Homo sapiens
  misc_RNA (1)...(19): siRNA sense strand
cucgagacauuaccacuau

SEQ ID NO: 1811453 - RNA, 19 nt, Homo sapiens
  misc_RNA (1)...(19): siRNA sense strand
cauaagucuucuucuugga

SEQ ID NO: 1811454 - RNA, 19 nt, Homo sapiens
  misc_RNA (1)...(19): siRNA sense strand
cagaauugaucacugucau

SEQ ID NO: 1811455 - RNA, 19 nt, Homo sapiens
  misc_RNA (1)...(19): siRNA sense strand
aagaaguacuguggcugua

SEQ ID NO: 1811456 - RNA, 19 nt, Homo sapiens
  misc_RNA (1)...(19): siRNA sense strand
uggauccaaaccuuuauua

SEQ ID NO: 1811457 - RNA, 19 nt, Homo sapiens
  misc_RNA (1)...(19): siRNA sense strand
aaucagagaaauacaggaa

SEQ ID NO: 1811458 - RNA, 19 nt, Homo sapiens
  misc_RNA (1)...(19): siRNA sense strand
uugaauaccuguuuaaacc

SEQ ID NO: 1811459 - RNA, 19 nt, Homo sapiens
  misc_RNA (1)...(19): siRNA sense strand
auccaaaccuuuauuaugc

SEQ ID NO: 1811460 - RNA, 19 nt, Homo sapiens
  misc_RNA (1)...(19): siRNA sense strand
gaaagggaggcugcagaau

SEQ ID NO: 1811461 - RNA, 19 nt, Homo sapiens
  misc_RNA (1)...(19): siRNA sense strand
ccaacagcaguauuuauca

SEQ ID NO: 1811462 - RNA, 19 nt, Homo sapiens
  misc_RNA (1)...(19): siRNA sense strand
agaauacauugcccaagca

SEQ ID NO: 1811463 - RNA, 19 nt, Homo sapiens
  misc_RNA (1)...(19): siRNA sense strand
acagauccauucaguuugc

SEQ ID NO: 1811464 - RNA, 19 nt, Homo sapiens
  misc_RNA (1)...(19): siRNA sense strand
aauagucuuuccaguguca

SEQ ID NO: 1811465 - RNA, 19 nt, Homo sapiens
  misc_RNA (1)...(19): siRNA sense strand
ugaucacugucauuaaaca

SEQ ID NO: 1811466 - RNA, 19 nt, Homo sapiens
  misc_RNA (1)...(19): siRNA sense strand
agugaaacaccuagucauu

SEQ ID NO: 1811467 - RNA, 19 nt, Homo sapiens
  misc_RNA (1)...(19): siRNA sense strand
caagcacgacgacaauauc

SEQ ID NO: 1811468 - RNA, 19 nt, Homo sapiens
  misc_RNA (1)...(19): siRNA sense strand
auuauaugaugccagauga

SEQ ID NO: 1811469 - RNA, 19 nt, Homo sapiens
  misc_RNA (1)...(19): siRNA sense strand
cgacgacaauaucauuuug

SEQ ID NO: 1811470 - RNA, 19 nt, Homo sapiens
  misc_RNA (1)...(19): siRNA sense strand
ggaaacaucugccuucuua

SEQ ID NO: 1811471 - RNA, 19 nt, Homo sapiens
  misc_RNA (1)...(19): siRNA sense strand
uaaagcagguagaacauua

SEQ ID NO: 1811472 - RNA, 19 nt, Homo sapiens
  misc_RNA (1)...(19): siRNA sense strand
cgaaagaugucuggguuua

SEQ ID NO: 1811473 - RNA, 19 nt, Homo sapiens
  misc_RNA (1)...(19): siRNA sense strand
gugaagagcuggagacaga

SEQ ID NO: 1811474 - RNA, 19 nt, Homo sapiens
  misc_RNA (1)...(19): siRNA sense strand
guaaggaaauuguggaaga

SEQ ID NO: 1811475 - RNA, 19 nt, Homo sapiens
  misc_RNA (1)...(19): siRNA sense strand
gcaccaagcuguacgaacu

SEQ ID NO: 1811476 - RNA, 19 nt, Homo sapiens
  misc_RNA (1)...(19): siRNA sense strand
gaacuaucuuggagaaugu

SEQ ID NO: 1811477 - RNA, 19 nt, Homo sapiens
  misc_RNA (1)...(19): siRNA sense strand
gcgauuggcugcaaagugu

SEQ ID NO: 1811478 - RNA, 19 nt, Homo sapiens
  misc_RNA (1)...(19): siRNA sense strand
gagaaagaguaaggaaauu

SEQ ID NO: 1811479 - RNA, 19 nt, Homo sapiens
  misc_RNA (1)...(19): siRNA sense strand
gcaagacuuuggacugcua

SEQ ID NO: 1811480 - RNA, 19 nt, Homo sapiens
  misc_RNA (1)...(19): siRNA sense strand
cugcuacgauccaacauua

SEQ ID NO: 1811481 - RNA, 19 nt, Homo sapiens
  misc_RNA (1)...(19): siRNA sense strand
ggacagugaggucaacuuu

SEQ ID NO: 1811482 - RNA, 19 nt, Homo sapiens
  misc_RNA (1)...(19): siRNA sense strand
guagugagugccaaacuua

SEQ ID NO: 1811483 - RNA, 19 nt, Homo sapiens
  misc_RNA (1)...(19): siRNA sense strand
gaaugugucucagcaacuu

SEQ ID NO: 1811484 - RNA, 19 nt, Homo sapiens
  misc_RNA (1)...(19): siRNA sense strand
ugaagaagcgcuauugcua

SEQ ID NO: 1811485 - RNA, 19 nt, Homo sapiens
  misc_RNA (1)...(19): siRNA sense strand
gcugauuccuacugcauuu

SEQ ID NO: 1811486 - RNA, 19 nt, Homo sapiens
  misc_RNA (1)...(19): siRNA sense strand
gcagaaugacgguguggua

SEQ ID NO: 1811487 - RNA, 19 nt, Homo sapiens
  misc_RNA (1)...(19): siRNA sense strand
cgaacuaucuuggagaaug

SEQ ID NO: 1811488 - RNA, 19 nt, Homo sapiens
  misc_RNA (1)...(19): siRNA sense strand
gaaagaguaaggaaauugu

SEQ ID NO: 1811489 - RNA, 19 nt, Homo sapiens
  misc_RNA (1)...(19): siRNA sense strand
guacgagucugcaauuaac

SEQ ID NO: 1811490 - RNA, 19 nt, Homo sapiens
  misc_RNA (1)...(19): siRNA sense strand
ccuggaagcuggugacaug

SEQ ID NO: 1811491 - RNA, 19 nt, Homo sapiens
  misc_RNA (1)...(19): siRNA sense strand
ucaggaagaaugaagauuu

SEQ ID NO: 1811492 - RNA, 19 nt, Homo sapiens
  misc_RNA (1)...(19): siRNA sense strand
gcaugcugcugcugucuga

SEQ ID NO: 1811493 - RNA, 19 nt, Homo sapiens
  misc_RNA (1)...(19): siRNA sense strand
aaagaugucuggguuuaug

SEQ ID NO: 1811494 - RNA, 19 nt, Homo sapiens
  misc_RNA (1)...(19): siRNA sense strand
gacagacuuucauguguga

SEQ ID NO: 1811495 - RNA, 19 nt, Homo sapiens
  misc_RNA (1)...(19): siRNA sense strand
caggaagaaugaagauuuc

SEQ ID NO: 1811496 - RNA, 19 nt, Homo sapiens
  misc_RNA (1)...(19): siRNA sense strand
ggaccaaagugggagaugu

SEQ ID NO: 1811497 - RNA, 19 nt, Homo sapiens
  misc_RNA (1)...(19): siRNA sense strand
gccagcagcggcuccauua

SEQ ID NO: 1811498 - RNA, 19 nt, Homo sapiens
  misc_RNA (1)...(19): siRNA sense strand
gaccagaaggccaaagaaa

SEQ ID NO: 1811499 - RNA, 19 nt, Homo sapiens
  misc_RNA (1)...(19): siRNA sense strand
gaggauacuuuggcauuca

SEQ ID NO: 1811500 - RNA, 19 nt, Homo sapiens
  misc_RNA (1)...(19): siRNA sense strand
gcagagaaagaguaaggaa

SEQ ID NO: 1811501 - RNA, 19 nt, Homo sapiens
  misc_RNA (1)...(19): siRNA sense strand
ggaggauacuuuggcauuc

SEQ ID NO: 1811502 - RNA, 19 nt, Homo sapiens
  misc_RNA (1)...(19): siRNA sense strand
aaacaaacucuacgugguu

SEQ ID NO: 1811503 - RNA, 19 nt, Homo sapiens
  misc_RNA (1)...(19): siRNA sense strand
uggaggaacucaucaccaa

SEQ ID NO: 1811504 - RNA, 19 nt, Homo sapiens
  misc_RNA (1)...(19): siRNA sense strand
ccagaaggccaaagaaauc

SEQ ID NO: 1811505 - RNA, 19 nt, Homo sapiens
  misc_RNA (1)...(19): siRNA sense strand
ugaaaauccugcagaauga

SEQ ID NO: 1811506 - RNA, 19 nt, Homo sapiens
  misc_RNA (1)...(19): siRNA sense strand
ccaagcagagaaagaguaa

SEQ ID NO: 1811507 - RNA, 19 nt, Homo sapiens
  misc_RNA (1)...(19): siRNA sense strand
gaaggccaaagaaaucauu

SEQ ID NO: 1811508 - RNA, 19 nt, Homo sapiens
  misc_RNA (1)...(19): siRNA sense strand
gaggacagacuuucaugug

SEQ ID NO: 1811509 - RNA, 19 nt, Homo sapiens
  misc_RNA (1)...(19): siRNA sense strand
guaccagugucagucauga

SEQ ID NO: 1811510 - RNA, 19 nt, Homo sapiens
  misc_RNA (1)...(19): siRNA sense strand
uuaacuggaucagcuauga

SEQ ID NO: 1811511 - RNA, 19 nt, Homo sapiens
  misc_RNA (1)...(19): siRNA sense strand
gaaagaugucuggguuuau

SEQ ID NO: 1811512 - RNA, 19 nt, Homo sapiens
  misc_RNA (1)...(19): siRNA sense strand
ucacucaccugaaucuuuu

SEQ ID NO: 1811513 - RNA, 19 nt, Homo sapiens
  misc_RNA (1)...(19): siRNA sense strand
ugggagaugugacagcaaa

SEQ ID NO: 1811514 - RNA, 19 nt, Homo sapiens
  misc_RNA (1)...(19): siRNA sense strand
uagcaacgccgcaguagug

SEQ ID NO: 1811515 - RNA, 19 nt, Homo sapiens
  misc_RNA (1)...(19): siRNA sense strand
ucuuggagcugcugcuuga

SEQ ID NO: 1811516 - RNA, 19 nt, Homo sapiens
  misc_RNA (1)...(19): siRNA sense strand
ggacugcuacgauccaaca

SEQ ID NO: 1811517 - RNA, 19 nt, Homo sapiens
  misc_RNA (1)...(19): siRNA sense strand
ugccugcucugcuuauaaa

SEQ ID NO: 1811518 - RNA, 19 nt, Homo sapiens
  misc_RNA (1)...(19): siRNA sense strand
uuucaugugugacaaguug

SEQ ID NO: 1811519 - RNA, 19 nt, Homo sapiens
  misc_RNA (1)...(19): siRNA sense strand
guguacgagucugcaauua

SEQ ID NO: 1811520 - RNA, 19 nt, Homo sapiens
  misc_RNA (1)...(19): siRNA sense strand
caaaccaucaggaagaaug

SEQ ID NO: 1811521 - RNA, 19 nt, Homo sapiens
  misc_RNA (1)...(19): siRNA sense strand
aaaauggggucucgaaaga

SEQ ID NO: 1811522 - RNA, 19 nt, Homo sapiens
  misc_RNA (1)...(19): siRNA sense strand
agagaaagaguaaggaaau

SEQ ID NO: 1811523 - RNA, 19 nt, Homo sapiens
  misc_RNA (1)...(19): siRNA sense strand
ggagacagaggaugaaagg

SEQ ID NO: 1811524 - RNA, 19 nt, Homo sapiens
  misc_RNA (1)...(19): siRNA sense strand
acaucuaucuguuucacaa

SEQ ID NO: 1811525 - RNA, 19 nt, Homo sapiens
  misc_RNA (1)...(19): siRNA sense strand
augaaaggcuuguguacga

SEQ ID NO: 1811526 - RNA, 19 nt, Homo sapiens
  misc_RNA (1)...(19): siRNA sense strand
gugacaugcuggaguuuca

SEQ ID NO: 1811527 - RNA, 19 nt, Homo sapiens
  misc_RNA (1)...(19): siRNA sense strand
gcuacgauccaacauuaga

SEQ ID NO: 1811528 - RNA, 19 nt, Homo sapiens
  misc_RNA (1)...(19): siRNA sense strand
gacauucccagcccaagaa

SEQ ID NO: 1811529 - RNA, 19 nt, Homo sapiens
  misc_RNA (1)...(19): siRNA sense strand
gcggcuccauuaacaucua

SEQ ID NO: 1811530 - RNA, 19 nt, Homo sapiens
  misc_RNA (1)...(19): siRNA sense strand
gcugcaaaguguacauuac

SEQ ID NO: 1811531 - RNA, 19 nt, Homo sapiens
  misc_RNA (1)...(19): siRNA sense strand
caaagugggagaugugaca

SEQ ID NO: 1811532 - RNA, 19 nt, Homo sapiens
  misc_RNA (1)...(19): siRNA sense strand
cugcucugcuuauaaauuc

SEQ ID NO: 1811533 - RNA, 19 nt, Homo sapiens
  misc_RNA (1)...(19): siRNA sense strand
uacgaacuaucuuggagaa

SEQ ID NO: 1811534 - RNA, 19 nt, Homo sapiens
  misc_RNA (1)...(19): siRNA sense strand
caacauuagacguguggaa

SEQ ID NO: 1811535 - RNA, 19 nt, Homo sapiens
  misc_RNA (1)...(19): siRNA sense strand
cugaagcacugccuguaug

SEQ ID NO: 1811536 - RNA, 19 nt, Homo sapiens
  misc_RNA (1)...(19): siRNA sense strand
ccauggcucugcugaacug

SEQ ID NO: 1811537 - RNA, 19 nt, Homo sapiens
  misc_RNA (1)...(19): siRNA sense strand
gaugucuggguuuaugaua

SEQ ID NO: 1811538 - RNA, 19 nt, Homo sapiens
  misc_RNA (1)...(19): siRNA sense strand
gaauguggccauggaggaa

SEQ ID NO: 1811539 - RNA, 19 nt, Homo sapiens
  misc_RNA (1)...(19): siRNA sense strand
ucucuucacugacguccuu

SEQ ID NO: 1811540 - RNA, 19 nt, Homo sapiens
  misc_RNA (1)...(19): siRNA sense strand
cagagaaagaguaaggaaa

SEQ ID NO: 1811541 - RNA, 19 nt, Homo sapiens
  misc_RNA (1)...(19): siRNA sense strand
caguaaggcuggcacuucu

SEQ ID NO: 1811542 - RNA, 19 nt, Homo sapiens
  misc_RNA (1)...(19): siRNA sense strand
gaaacaucugccuucuuaa

SEQ ID NO: 1811543 - RNA, 19 nt, Homo sapiens
  misc_RNA (1)...(19): siRNA sense strand
gcuguggccucuggaaaca

SEQ ID NO: 1811544 - RNA, 19 nt, Homo sapiens
  misc_RNA (1)...(19): siRNA sense strand
ugcaugcagucgcuacuuu

SEQ ID NO: 1811545 - RNA, 19 nt, Homo sapiens
  misc_RNA (1)...(19): siRNA sense strand
gcagguagaacauuaugac

SEQ ID NO: 1811546 - RNA, 19 nt, Homo sapiens
  misc_RNA (1)...(19): siRNA sense strand
gucagcaccuggaaacauc

SEQ ID NO: 1811547 - RNA, 19 nt, Homo sapiens
  misc_RNA (1)...(19): siRNA sense strand
gaaagagagccaggacagu

SEQ ID NO: 1811548 - RNA, 19 nt, Homo sapiens
  misc_RNA (1)...(19): siRNA sense strand
cguccucacucaccugaau

SEQ ID NO: 1811549 - RNA, 19 nt, Homo sapiens
  misc_RNA (1)...(19): siRNA sense strand
cuacgugguuggaggauac

SEQ ID NO: 1811550 - RNA, 19 nt, Homo sapiens
  misc_RNA (1)...(19): siRNA sense strand
gaccaaagugggagaugug

SEQ ID NO: 1811551 - RNA, 19 nt, Homo sapiens
  misc_RNA (1)...(19): siRNA sense strand
gcacugccuguaugugguu

SEQ ID NO: 1811552 - RNA, 19 nt, Homo sapiens
  misc_RNA (1)...(19): siRNA sense strand
ggaggacagacuuucaugu

SEQ ID NO: 1811553 - RNA, 19 nt, Homo sapiens
  misc_RNA (1)...(19): siRNA sense strand
cagaaugacggugugguaa

SEQ ID NO: 1811554 - RNA, 19 nt, Homo sapiens
  misc_RNA (1)...(19): siRNA sense strand
uaaggaaauuguggaagag

SEQ ID NO: 1811555 - RNA, 19 nt, Homo sapiens
  misc_RNA (1)...(19): siRNA sense strand
uggagaauguggccaugga

SEQ ID NO: 1811556 - RNA, 19 nt, Homo sapiens
  misc_RNA (1)...(19): siRNA sense strand
caacucuuguccagugaag

SEQ ID NO: 1811557 - RNA, 19 nt, Homo sapiens
  misc_RNA (1)...(19): siRNA sense strand
gcaugcagucgcuacuuug

SEQ ID NO: 1811558 - RNA, 19 nt, Homo sapiens
  misc_RNA (1)...(19): siRNA sense strand
uguggccucuggaaacaaa

SEQ ID NO: 1811559 - RNA, 19 nt, Homo sapiens
  misc_RNA (1)...(19): siRNA sense strand
ggccauggcucugcugaac

SEQ ID NO: 1811560 - RNA, 19 nt, Homo sapiens
  misc_RNA (1)...(19): siRNA sense strand
agaaagaguaaggaaauug

SEQ ID NO: 1811561 - RNA, 19 nt, Homo sapiens
  misc_RNA (1)...(19): siRNA sense strand
uguacgagucugcaauuaa

SEQ ID NO: 1811562 - RNA, 19 nt, Homo sapiens
  misc_RNA (1)...(19): siRNA sense strand
gaggaugaaaggcuugugu

SEQ ID NO: 1811563 - RNA, 19 nt, Homo sapiens
  misc_RNA (1)...(19): siRNA sense strand
caacgccgcaguagugagu

SEQ ID NO: 1811564 - RNA, 19 nt, Homo sapiens
  misc_RNA (1)...(19): siRNA sense strand
uggagcugcugcuugacua

SEQ ID NO: 1811565 - RNA, 19 nt, Homo sapiens
  misc_RNA (1)...(19): siRNA sense strand
caauuaacuggaucagcua

SEQ ID NO: 1811566 - RNA, 19 nt, Homo sapiens
  misc_RNA (1)...(19): siRNA sense strand
gcuggaguuucaagacauc

SEQ ID NO: 1811567 - RNA, 19 nt, Homo sapiens
  misc_RNA (1)...(19): siRNA sense strand
gaaaauggggucucgaaag

SEQ ID NO: 1811568 - RNA, 19 nt, Homo sapiens
  misc_RNA (1)...(19): siRNA sense strand
gccaugcccucuuccuucu

SEQ ID NO: 1811569 - RNA, 19 nt, Homo sapiens
  misc_RNA (1)...(19): siRNA sense strand
gaguaaggaaauuguggaa

SEQ ID NO: 1811570 - RNA, 19 nt, Homo sapiens
  misc_RNA (1)...(19): siRNA sense strand
gaagauggcuuuaugcuuu

SEQ ID NO: 1811571 - RNA, 19 nt, Homo sapiens
  misc_RNA (1)...(19): siRNA sense strand
gaagaaggcuggaagaaau

SEQ ID NO: 1811572 - RNA, 19 nt, Homo sapiens
  misc_RNA (1)...(19): siRNA sense strand
ggaacuggcugguuugaaa

SEQ ID NO: 1811573 - RNA, 19 nt, Homo sapiens
  misc_RNA (1)...(19): siRNA sense strand
gagcggaacuggcugguuu

SEQ ID NO: 1811574 - RNA, 19 nt, Homo sapiens
  misc_RNA (1)...(19): siRNA sense strand
uaacuagugucuuggaaua

SEQ ID NO: 1811575 - RNA, 19 nt, Homo sapiens
  misc_RNA (1)...(19): siRNA sense strand
gcaagaaggugcucugaag

SEQ ID NO: 1811576 - RNA, 19 nt, Homo sapiens
  misc_RNA (1)...(19): siRNA sense strand
gaagcaaagugugaauauu

SEQ ID NO: 1811577 - RNA, 19 nt, Homo sapiens
  misc_RNA (1)...(19): siRNA sense strand
aaaugaaaguccuggaaua

SEQ ID NO: 1811578 - RNA, 19 nt, Homo sapiens
  misc_RNA (1)...(19): siRNA sense strand
uggaauaucugaguaauug

SEQ ID NO: 1811579 - RNA, 19 nt, Homo sapiens
  misc_RNA (1)...(19): siRNA sense strand
gaucgaagcagcucaaugu

SEQ ID NO: 1811580 - RNA, 19 nt, Homo sapiens
  misc_RNA (1)...(19): siRNA sense strand
gguagagccuugcgacuug

SEQ ID NO: 1811581 - RNA, 19 nt, Homo sapiens
  misc_RNA (1)...(19): siRNA sense strand
gacagaaugugaacaaaca

SEQ ID NO: 1811582 - RNA, 19 nt, Homo sapiens
  misc_RNA (1)...(19): siRNA sense strand
agacuuuacuccagaauug

SEQ ID NO: 1811583 - RNA, 19 nt, Homo sapiens
  misc_RNA (1)...(19): siRNA sense strand
ggaagcaaagugugaauau

SEQ ID NO: 1811584 - RNA, 19 nt, Homo sapiens
  misc_RNA (1)...(19): siRNA sense strand
ugaaaguccuggaauagau

SEQ ID NO: 1811585 - RNA, 19 nt, Homo sapiens
  misc_RNA (1)...(19): siRNA sense strand
gcaacaaguggcacaguuu

SEQ ID NO: 1811586 - RNA, 19 nt, Homo sapiens
  misc_RNA (1)...(19): siRNA sense strand
gaaaguccuggaauagauu

SEQ ID NO: 1811587 - RNA, 19 nt, Homo sapiens
  misc_RNA (1)...(19): siRNA sense strand
caaagaaguugaaaaggaa

SEQ ID NO: 1811588 - RNA, 19 nt, Homo sapiens
  misc_RNA (1)...(19): siRNA sense strand
caaauugacccaaagaagu

SEQ ID NO: 1811589 - RNA, 19 nt, Homo sapiens
  misc_RNA (1)...(19): siRNA sense strand
gaauugggaagauggcuuu

SEQ ID NO: 1811590 - RNA, 19 nt, Homo sapiens
  misc_RNA (1)...(19): siRNA sense strand
ccaaagaaguugaaaagga

SEQ ID NO: 1811591 - RNA, 19 nt, Homo sapiens
  misc_RNA (1)...(19): siRNA sense strand
ggaccagccacaaaugaaa

SEQ ID NO: 1811592 - RNA, 19 nt, Homo sapiens
  misc_RNA (1)...(19): siRNA sense strand
gcagcucaauguccagaug

SEQ ID NO: 1811593 - RNA, 19 nt, Homo sapiens
  misc_RNA (1)...(19): siRNA sense strand
gugaggcucuuaguggaua

SEQ ID NO: 1811594 - RNA, 19 nt, Homo sapiens
  misc_RNA (1)...(19): siRNA sense strand
aagauggcuuuaugcuuua

SEQ ID NO: 1811595 - RNA, 19 nt, Homo sapiens
  misc_RNA (1)...(19): siRNA sense strand
acauagaagucacuggaaa

SEQ ID NO: 1811596 - RNA, 19 nt, Homo sapiens
  misc_RNA (1)...(19): siRNA sense strand
guugaugccucggcuauug

SEQ ID NO: 1811597 - RNA, 19 nt, Homo sapiens
  misc_RNA (1)...(19): siRNA sense strand
uuuauuggcuugucuugaa

SEQ ID NO: 1811598 - RNA, 19 nt, Homo sapiens
  misc_RNA (1)...(19): siRNA sense strand
gaggguuccugcuuugaau

SEQ ID NO: 1811599 - RNA, 19 nt, Homo sapiens
  misc_RNA (1)...(19): siRNA sense strand
gaaugaaucaggcaacagu

SEQ ID NO: 1811600 - RNA, 19 nt, Homo sapiens
  misc_RNA (1)...(19): siRNA sense strand
aacaguaacuagugucuug

SEQ ID NO: 1811601 - RNA, 19 nt, Homo sapiens
  misc_RNA (1)...(19): siRNA sense strand
uaauugguuuggagaaaga

SEQ ID NO: 1811602 - RNA, 19 nt, Homo sapiens
  misc_RNA (1)...(19): siRNA sense strand
ugagaggguuccugcuuug

SEQ ID NO: 1811603 - RNA, 19 nt, Homo sapiens
  misc_RNA (1)...(19): siRNA sense strand
ugaagaaggcuggaagaaa

SEQ ID NO: 1811604 - RNA, 19 nt, Homo sapiens
  misc_RNA (1)...(19): siRNA sense strand
agaaggugcucugaaguga

SEQ ID NO: 1811605 - RNA, 19 nt, Homo sapiens
  misc_RNA (1)...(19): siRNA sense strand
ggaagauggcuuuaugcuu

SEQ ID NO: 1811606 - RNA, 19 nt, Homo sapiens
  misc_RNA (1)...(19): siRNA sense strand
caaaugaaaguccuggaau

SEQ ID NO: 1811607 - RNA, 19 nt, Homo sapiens
  misc_RNA (1)...(19): siRNA sense strand
gaugagaggguuccugcuu

SEQ ID NO: 1811608 - RNA, 19 nt, Homo sapiens
  misc_RNA (1)...(19): siRNA sense strand
guaauugguuuggagaaag

SEQ ID NO: 1811609 - RNA, 19 nt, Homo sapiens
  misc_RNA (1)...(19): siRNA sense strand
ggauaguaaugugacaaug

SEQ ID NO: 1811610 - RNA, 19 nt, Homo sapiens
  misc_RNA (1)...(19): siRNA sense strand
uuuccucccuugcuuagua

SEQ ID NO: 1811611 - RNA, 19 nt, Homo sapiens
  misc_RNA (1)...(19): siRNA sense strand
aaauugacccaaagaaguu

SEQ ID NO: 1811612 - RNA, 19 nt, Homo sapiens
  misc_RNA (1)...(19): siRNA sense strand
gcucuuaguggauagcaaa

SEQ ID NO: 1811613 - RNA, 19 nt, Homo sapiens
  misc_RNA (1)...(19): siRNA sense strand
gguuccugcuuugaauuua

SEQ ID NO: 1811614 - RNA, 19 nt, Homo sapiens
  misc_RNA (1)...(19): siRNA sense strand
gugugaauauuucucuuuc

SEQ ID NO: 1811615 - RNA, 19 nt, Homo sapiens
  misc_RNA (1)...(19): siRNA sense strand
guagagccuugcgacuuga

SEQ ID NO: 1811616 - RNA, 19 nt, Homo sapiens
  misc_RNA (1)...(19): siRNA sense strand
cagaaugaaucaggcaaca

SEQ ID NO: 1811617 - RNA, 19 nt, Homo sapiens
  misc_RNA (1)...(19): siRNA sense strand
gaugaagaaggcuggaaga

SEQ ID NO: 1811618 - RNA, 19 nt, Homo sapiens
  misc_RNA (1)...(19): siRNA sense strand
guaaugugacaaugccaaa

SEQ ID NO: 1811619 - RNA, 19 nt, Homo sapiens
  misc_RNA (1)...(19): siRNA sense strand
gaggcucauucacugauuc

SEQ ID NO: 1811620 - RNA, 19 nt, Homo sapiens
  misc_RNA (1)...(19): siRNA sense strand
guuccugcuuugaauuuau

SEQ ID NO: 1811621 - RNA, 19 nt, Homo sapiens
  misc_RNA (1)...(19): siRNA sense strand
acaguuggauaguaaugug

SEQ ID NO: 1811622 - RNA, 19 nt, Homo sapiens
  misc_RNA (1)...(19): siRNA sense strand
uugggaagauggcuuuaug

SEQ ID NO: 1811623 - RNA, 19 nt, Homo sapiens
  misc_RNA (1)...(19): siRNA sense strand
gaauaucugaguaauuggu

SEQ ID NO: 1811624 - RNA, 19 nt, Homo sapiens
  misc_RNA (1)...(19): siRNA sense strand
aguaauugguuuggagaaa

SEQ ID NO: 1811625 - RNA, 19 nt, Homo sapiens
  misc_RNA (1)...(19): siRNA sense strand
gcucugaagugaggcucuu

SEQ ID NO: 1811626 - RNA, 19 nt, Homo sapiens
  misc_RNA (1)...(19): siRNA sense strand
gagacuuuacuccagaauu

SEQ ID NO: 1811627 - RNA, 19 nt, Homo sapiens
  misc_RNA (1)...(19): siRNA sense strand
agcaaagugugaauauuuc

SEQ ID NO: 1811628 - RNA, 19 nt, Homo sapiens
  misc_RNA (1)...(19): siRNA sense strand
guccuggaauagauuaugu

SEQ ID NO: 1811629 - RNA, 19 nt, Homo sapiens
  misc_RNA (1)...(19): siRNA sense strand
gauaguaaugugacaaugc

SEQ ID NO: 1811630 - RNA, 19 nt, Homo sapiens
  misc_RNA (1)...(19): siRNA sense strand
gaagucacuggaaaucaca

SEQ ID NO: 1811631 - RNA, 19 nt, Homo sapiens
  misc_RNA (1)...(19): siRNA sense strand
augagaggguuccugcuuu

SEQ ID NO: 1811632 - RNA, 19 nt, Homo sapiens
  misc_RNA (1)...(19): siRNA sense strand
cgacuugacggaagguuuc

SEQ ID NO: 1811633 - RNA, 19 nt, Homo sapiens
  misc_RNA (1)...(19): siRNA sense strand
acaaaugaaaguccuggaa

SEQ ID NO: 1811634 - RNA, 19 nt, Homo sapiens
  misc_RNA (1)...(19): siRNA sense strand
cauagaagucacuggaaau

SEQ ID NO: 1811635 - RNA, 19 nt, Homo sapiens
  misc_RNA (1)...(19): siRNA sense strand
guaacuagugucuuggaau

SEQ ID NO: 1811636 - RNA, 19 nt, Homo sapiens
  misc_RNA (1)...(19): siRNA sense strand
aaaguccuggaauagauua

SEQ ID NO: 1811637 - RNA, 19 nt, Homo sapiens
  misc_RNA (1)...(19): siRNA sense strand
gaguugaugccucggcuau

SEQ ID NO: 1811638 - RNA, 19 nt, Homo sapiens
  misc_RNA (1)...(19): siRNA sense strand
ggguuccugcuuugaauuu

SEQ ID NO: 1811639 - RNA, 19 nt, Homo sapiens
  misc_RNA (1)...(19): siRNA sense strand
cuuaguggauagcaaagau

SEQ ID NO: 1811640 - RNA, 19 nt, Homo sapiens
  misc_RNA (1)...(19): siRNA sense strand
uuauuggcuugucuugaaa

SEQ ID NO: 1811641 - RNA, 19 nt, Homo sapiens
  misc_RNA (1)...(19): siRNA sense strand
caagaaggugcucugaagu

SEQ ID NO: 1811642 - RNA, 19 nt, Homo sapiens
  misc_RNA (1)...(19): siRNA sense strand
gcaaagugugaauauuucu

SEQ ID NO: 1811643 - RNA, 19 nt, Homo sapiens
  misc_RNA (1)...(19): siRNA sense strand
agaagucacuggaaaucac

SEQ ID NO: 1811644 - RNA, 19 nt, Homo sapiens
  misc_RNA (1)...(19): siRNA sense strand
ugaacaaacauagaaguca

SEQ ID NO: 1811645 - RNA, 19 nt, Homo sapiens
  misc_RNA (1)...(19): siRNA sense strand
gcgacuugacggaagguuu

SEQ ID NO: 1811646 - RNA, 19 nt, Homo sapiens
  misc_RNA (1)...(19): siRNA sense strand
caacaaguggcacaguuuu

SEQ ID NO: 1811647 - RNA, 19 nt, Homo sapiens
  misc_RNA (1)...(19): siRNA sense strand
gcaacaguaacuagugucu

SEQ ID NO: 1811648 - RNA, 19 nt, Homo sapiens
  misc_RNA (1)...(19): siRNA sense strand
cgacagaaugugaacaaac

SEQ ID NO: 1811649 - RNA, 19 nt, Homo sapiens
  misc_RNA (1)...(19): siRNA sense strand
agcaacaaguggcacaguu

SEQ ID NO: 1811650 - RNA, 19 nt, Homo sapiens
  misc_RNA (1)...(19): siRNA sense strand
gagaggguuccugcuuuga

SEQ ID NO: 1811651 - RNA, 19 nt, Homo sapiens
  misc_RNA (1)...(19): siRNA sense strand
guggauagcaaagaugaug

SEQ ID NO: 1811652 - RNA, 19 nt, Homo sapiens
  misc_RNA (1)...(19): siRNA sense strand
guugugguagcucaaauug

SEQ ID NO: 1811653 - RNA, 19 nt, Homo sapiens
  misc_RNA (1)...(19): siRNA sense strand
aggcaacaguaacuagugu

SEQ ID NO: 1811654 - RNA, 19 nt, Homo sapiens
  misc_RNA (1)...(19): siRNA sense strand
gaaucaggcaacaguaacu

SEQ ID NO: 1811655 - RNA, 19 nt, Homo sapiens
  misc_RNA (1)...(19): siRNA sense strand
gcucaauguccagauguug

SEQ ID NO: 1811656 - RNA, 19 nt, Homo sapiens
  misc_RNA (1)...(19): siRNA sense strand
gaaauuuugucugggugaa

SEQ ID NO: 1811657 - RNA, 19 nt, Homo sapiens
  misc_RNA (1)...(19): siRNA sense strand
aagaaggcuggaagaaauu

SEQ ID NO: 1811658 - RNA, 19 nt, Homo sapiens
  misc_RNA (1)...(19): siRNA sense strand
gaacuggcugguuugaaaa

SEQ ID NO: 1811659 - RNA, 19 nt, Homo sapiens
  misc_RNA (1)...(19): siRNA sense strand
gauguugugguagcucaaa

SEQ ID NO: 1811660 - RNA, 19 nt, Homo sapiens
  misc_RNA (1)...(19): siRNA sense strand
ugaagugaggcucuuagug

SEQ ID NO: 1811661 - RNA, 19 nt, Homo sapiens
  misc_RNA (1)...(19): siRNA sense strand
aagaaggugcucugaagug

SEQ ID NO: 1811662 - RNA, 19 nt, Homo sapiens
  misc_RNA (1)...(19): siRNA sense strand
gucuuggaauaucugagua

SEQ ID NO: 1811663 - RNA, 19 nt, Homo sapiens
  misc_RNA (1)...(19): siRNA sense strand
ccagaucgaagcagcucaa

SEQ ID NO: 1811664 - RNA, 19 nt, Homo sapiens
  misc_RNA (1)...(19): siRNA sense strand
aaaggaagcaaagugugaa

SEQ ID NO: 1811665 - RNA, 19 nt, Homo sapiens
  misc_RNA (1)...(19): siRNA sense strand
aagagacuuuacuccagaa

SEQ ID NO: 1811666 - RNA, 19 nt, Homo sapiens
  misc_RNA (1)...(19): siRNA sense strand
ugacaaugccaaaaucuga

SEQ ID NO: 1811667 - RNA, 19 nt, Homo sapiens
  misc_RNA (1)...(19): siRNA sense strand
uaucugaguaauugguuug

SEQ ID NO: 1811668 - RNA, 19 nt, Homo sapiens
  misc_RNA (1)...(19): siRNA sense strand
acuagugucuuggaauauc

SEQ ID NO: 1811669 - RNA, 19 nt, Homo sapiens
  misc_RNA (1)...(19): siRNA sense strand
gaccagccacaaaugaaag

SEQ ID NO: 1811670 - RNA, 19 nt, Homo sapiens
  misc_RNA (1)...(19): siRNA sense strand
gaagaggacugcaauagaa

SEQ ID NO: 1811671 - RNA, 19 nt, Homo sapiens
  misc_RNA (1)...(19): siRNA sense strand
ggagguaaaugacaaauug

SEQ ID NO: 1811672 - RNA, 19 nt, Homo sapiens
  misc_RNA (1)...(19): siRNA sense strand
cgacagaacugauauuuua

SEQ ID NO: 1811673 - RNA, 19 nt, Homo sapiens
  misc_RNA (1)...(19): siRNA sense strand
gcagggagauuauacuuug

SEQ ID NO: 1811674 - RNA, 19 nt, Homo sapiens
  misc_RNA (1)...(19): siRNA sense strand
gcagaggacuugcuuuaug

SEQ ID NO: 1811675 - RNA, 19 nt, Homo sapiens
  misc_RNA (1)...(19): siRNA sense strand
gggaggcaauaauaaguua

SEQ ID NO: 1811676 - RNA, 19 nt, Homo sapiens
  misc_RNA (1)...(19): siRNA sense strand
ggacugcaauagaagcuuu

SEQ ID NO: 1811677 - RNA, 19 nt, Homo sapiens
  misc_RNA (1)...(19): siRNA sense strand
gcacagaugcccucgcuuu

SEQ ID NO: 1811678 - RNA, 19 nt, Homo sapiens
  misc_RNA (1)...(19): siRNA sense strand
ggagaagaguaaagaguau

SEQ ID NO: 1811679 - RNA, 19 nt, Homo sapiens
  misc_RNA (1)...(19): siRNA sense strand
ggaagggaggcaauaauaa

SEQ ID NO: 1811680 - RNA, 19 nt, Homo sapiens
  misc_RNA (1)...(19): siRNA sense strand
ggauaucaaucgaguacaa

SEQ ID NO: 1811681 - RNA, 19 nt, Homo sapiens
  misc_RNA (1)...(19): siRNA sense strand
ggacuugcuuuaugggaaa

SEQ ID NO: 1811682 - RNA, 19 nt, Homo sapiens
  misc_RNA (1)...(19): siRNA sense strand
gagauugaacgaauuauga

SEQ ID NO: 1811683 - RNA, 19 nt, Homo sapiens
  misc_RNA (1)...(19): siRNA sense strand
gauggugcauucuuaauuc

SEQ ID NO: 1811684 - RNA, 19 nt, Homo sapiens
  misc_RNA (1)...(19): siRNA sense strand
gaacaucccaggaaauaca

SEQ ID NO: 1811685 - RNA, 19 nt, Homo sapiens
  misc_RNA (1)...(19): siRNA sense strand
gccaaugacuucagcaguu

SEQ ID NO: 1811686 - RNA, 19 nt, Homo sapiens
  misc_RNA (1)...(19): siRNA sense strand
caagggaggagguaaauga

SEQ ID NO: 1811687 - RNA, 19 nt, Homo sapiens
  misc_RNA (1)...(19): siRNA sense strand
ucaccgggaugguaaauau

SEQ ID NO: 1811688 - RNA, 19 nt, Homo sapiens
  misc_RNA (1)...(19): siRNA sense strand
gggaggagguaaaugacaa

SEQ ID NO: 1811689 - RNA, 19 nt, Homo sapiens
  misc_RNA (1)...(19): siRNA sense strand
gaaaccugauggugcauuc

SEQ ID NO: 1811690 - RNA, 19 nt, Homo sapiens
  misc_RNA (1)...(19): siRNA sense strand
gaacaacauagcaaagaau

SEQ ID NO: 1811691 - RNA, 19 nt, Homo sapiens
  misc_RNA (1)...(19): siRNA sense strand
uagaacaucccaggaaaua

SEQ ID NO: 1811692 - RNA, 19 nt, Homo sapiens
  misc_RNA (1)...(19): siRNA sense strand
gaagggaggcaauaauaag

SEQ ID NO: 1811693 - RNA, 19 nt, Homo sapiens
  misc_RNA (1)...(19): siRNA sense strand
gaaucaagcuuuggacaac

SEQ ID NO: 1811694 - RNA, 19 nt, Homo sapiens
  misc_RNA (1)...(19): siRNA sense strand
uaaccacuaucaccaugaa

SEQ ID NO: 1811695 - RNA, 19 nt, Homo sapiens
  misc_RNA (1)...(19): siRNA sense strand
cggaagggaggcaauaaua

SEQ ID NO: 1811696 - RNA, 19 nt, Homo sapiens
  misc_RNA (1)...(19): siRNA sense strand
aagaauaccacucucagua

SEQ ID NO: 1811697 - RNA, 19 nt, Homo sapiens
  misc_RNA (1)...(19): siRNA sense strand
aaugacaaauugcgggaua

SEQ ID NO: 1811698 - RNA, 19 nt, Homo sapiens
  misc_RNA (1)...(19): siRNA sense strand
caaccgagaaauagauaaa

SEQ ID NO: 1811699 - RNA, 19 nt, Homo sapiens
  misc_RNA (1)...(19): siRNA sense strand
ggacaaccgagaaauagau

SEQ ID NO: 1811700 - RNA, 19 nt, Homo sapiens
  misc_RNA (1)...(19): siRNA sense strand
augaaucucuugcucagua

SEQ ID NO: 1811701 - RNA, 19 nt, Homo sapiens
  misc_RNA (1)...(19): siRNA sense strand
agaacaacauagcaaagaa

SEQ ID NO: 1811702 - RNA, 19 nt, Homo sapiens
  misc_RNA (1)...(19): siRNA sense strand
aagaaaggaugcuaugcuu

SEQ ID NO: 1811703 - RNA, 19 nt, Homo sapiens
  misc_RNA (1)...(19): siRNA sense strand
aaaggagauugaacgaauu

SEQ ID NO: 1811704 - RNA, 19 nt, Homo sapiens
  misc_RNA (1)...(19): siRNA sense strand
gguccgagaugccucaaca

SEQ ID NO: 1811705 - RNA, 19 nt, Homo sapiens
  misc_RNA (1)...(19): siRNA sense strand
gcugagaacuauuuuauca

SEQ ID NO: 1811706 - RNA, 19 nt, Homo sapiens
  misc_RNA (1)...(19): siRNA sense strand
gacagaaacgccugaaugu

SEQ ID NO: 1811707 - RNA, 19 nt, Homo sapiens
  misc_RNA (1)...(19): siRNA sense strand
cugauccucugacauuuaa

SEQ ID NO: 1811708 - RNA, 19 nt, Homo sapiens
  misc_RNA (1)...(19): siRNA sense strand
caaaggagugagacagaaa

SEQ ID NO: 1811709 - RNA, 19 nt, Homo sapiens
  misc_RNA (1)...(19): siRNA sense strand
ugagauucaugauagcaaa

SEQ ID NO: 1811710 - RNA, 19 nt, Homo sapiens
  misc_RNA (1)...(19): siRNA sense strand
ucaguacaaucccaaacuu

SEQ ID NO: 1811711 - RNA, 19 nt, Homo sapiens
  misc_RNA (1)...(19): siRNA sense strand
gcacaacgacucccucaac

SEQ ID NO: 1811712 - RNA, 19 nt, Homo sapiens
  misc_RNA (1)...(19): siRNA sense strand
gagaguagcaagaaaggau

SEQ ID NO: 1811713 - RNA, 19 nt, Homo sapiens
  misc_RNA (1)...(19): siRNA sense strand
ggagauugaacgaauuaug

SEQ ID NO: 1811714 - RNA, 19 nt, Homo sapiens
  misc_RNA (1)...(19): siRNA sense strand
gauuauacuuugacuuugc

SEQ ID NO: 1811715 - RNA, 19 nt, Homo sapiens
  misc_RNA (1)...(19): siRNA sense strand
cagaggacuugcuuuaugg

SEQ ID NO: 1811716 - RNA, 19 nt, Homo sapiens
  misc_RNA (1)...(19): siRNA sense strand
gacaaccgagaaauagaua

SEQ ID NO: 1811717 - RNA, 19 nt, Homo sapiens
  misc_RNA (1)...(19): siRNA sense strand
gaugaagaggacugcaaua

SEQ ID NO: 1811718 - RNA, 19 nt, Homo sapiens
  misc_RNA (1)...(19): siRNA sense strand
gauccucugacauuuaauu

SEQ ID NO: 1811719 - RNA, 19 nt, Homo sapiens
  misc_RNA (1)...(19): siRNA sense strand
uaauauugaugcaguaggu

SEQ ID NO: 1811720 - RNA, 19 nt, Homo sapiens
  misc_RNA (1)...(19): siRNA sense strand
cagaaacgccugaaugucu

SEQ ID NO: 1811721 - RNA, 19 nt, Homo sapiens
  misc_RNA (1)...(19): siRNA sense strand
ccaaugacuucagcaguuc

SEQ ID NO: 1811722 - RNA, 19 nt, Homo sapiens
  misc_RNA (1)...(19): siRNA sense strand
ugaagaggacugcaauaga

SEQ ID NO: 1811723 - RNA, 19 nt, Homo sapiens
  misc_RNA (1)...(19): siRNA sense strand
ggcugggaauuaagaauga

SEQ ID NO: 1811724 - RNA, 19 nt, Homo sapiens
  misc_RNA (1)...(19): siRNA sense strand
agacagaaacgccugaaug

SEQ ID NO: 1811725 - RNA, 19 nt, Homo sapiens
  misc_RNA (1)...(19): siRNA sense strand
ugggugagauucaugauag

SEQ ID NO: 1811726 - RNA, 19 nt, Homo sapiens
  misc_RNA (1)...(19): siRNA sense strand
augauaggcuguaugaaga

SEQ ID NO: 1811727 - RNA, 19 nt, Homo sapiens
  misc_RNA (1)...(19): siRNA sense strand
acaaaggagugagacagaa

SEQ ID NO: 1811728 - RNA, 19 nt, Homo sapiens
  misc_RNA (1)...(19): siRNA sense strand
gaauauauugagcgauuuc

SEQ ID NO: 1811729 - RNA, 19 nt, Homo sapiens
  misc_RNA (1)...(19): siRNA sense strand
ggagcucauuaaccacuau

SEQ ID NO: 1811730 - RNA, 19 nt, Homo sapiens
  misc_RNA (1)...(19): siRNA sense strand
augaaaaccugccccauua

SEQ ID NO: 1811731 - RNA, 19 nt, Homo sapiens
  misc_RNA (1)...(19): siRNA sense strand
ggaugcugcugagaacuau

SEQ ID NO: 1811732 - RNA, 19 nt, Homo sapiens
  misc_RNA (1)...(19): siRNA sense strand
gagaucaacaccuuguaug

SEQ ID NO: 1811733 - RNA, 19 nt, Homo sapiens
  misc_RNA (1)...(19): siRNA sense strand
gcagagaggggaaugaaaa

SEQ ID NO: 1811734 - RNA, 19 nt, Homo sapiens
  misc_RNA (1)...(19): siRNA sense strand
gauaggcuguaugaagaau

SEQ ID NO: 1811735 - RNA, 19 nt, Homo sapiens
  misc_RNA (1)...(19): siRNA sense strand
aaaaggagauugaacgaau

SEQ ID NO: 1811736 - RNA, 19 nt, Homo sapiens
  misc_RNA (1)...(19): siRNA sense strand
acuagaacaucccaggaaa

SEQ ID NO: 1811737 - RNA, 19 nt, Homo sapiens
  misc_RNA (1)...(19): siRNA sense strand
uaggcuguaugaagaauau

SEQ ID NO: 1811738 - RNA, 19 nt, Homo sapiens
  misc_RNA (1)...(19): siRNA sense strand
guaaauauggcuuuucuga

SEQ ID NO: 1811739 - RNA, 19 nt, Homo sapiens
  misc_RNA (1)...(19): siRNA sense strand
ccagauaccaacaggauca

SEQ ID NO: 1811740 - RNA, 19 nt, Homo sapiens
  misc_RNA (1)...(19): siRNA sense strand
caccuaagccaaugacuuc

SEQ ID NO: 1811741 - RNA, 19 nt, Homo sapiens
  misc_RNA (1)...(19): siRNA sense strand
gaagcacugugugaucuac

SEQ ID NO: 1811742 - RNA, 19 nt, Homo sapiens
  misc_RNA (1)...(19): siRNA sense strand
gaggauaucaaucgaguac

SEQ ID NO: 1811743 - RNA, 19 nt, Homo sapiens
  misc_RNA (1)...(19): siRNA sense strand
gauaccaacaggaucaguu

SEQ ID NO: 1811744 - RNA, 19 nt, Homo sapiens
  misc_RNA (1)...(19): siRNA sense strand
caaagccaccuaagccaau

SEQ ID NO: 1811745 - RNA, 19 nt, Homo sapiens
  misc_RNA (1)...(19): siRNA sense strand
cagaugcccucgcuuugca

SEQ ID NO: 1811746 - RNA, 19 nt, Homo sapiens
  misc_RNA (1)...(19): siRNA sense strand
aaggagauugaacgaauua

SEQ ID NO: 1811747 - RNA, 19 nt, Homo sapiens
  misc_RNA (1)...(19): siRNA sense strand
ggaaugaaaaggagauuga

SEQ ID NO: 1811748 - RNA, 19 nt, Homo sapiens
  misc_RNA (1)...(19): siRNA sense strand
ggaggagguaaaugacaaa

SEQ ID NO: 1811749 - RNA, 19 nt, Homo sapiens
  misc_RNA (1)...(19): siRNA sense strand
gcccucgcuuugcagauaa

SEQ ID NO: 1811750 - RNA, 19 nt, Homo sapiens
  misc_RNA (1)...(19): siRNA sense strand
gugaagcacugugugaucu

SEQ ID NO: 1811751 - RNA, 19 nt, Homo sapiens
  misc_RNA (1)...(19): siRNA sense strand
acaagaacaacauagcaaa

SEQ ID NO: 1811752 - RNA, 19 nt, Homo sapiens
  misc_RNA (1)...(19): siRNA sense strand
uaugauaggcuguaugaag

SEQ ID NO: 1811753 - RNA, 19 nt, Homo sapiens
  misc_RNA (1)...(19): siRNA sense strand
gaggugaugaugcccuauu

SEQ ID NO: 1811754 - RNA, 19 nt, Homo sapiens
  misc_RNA (1)...(19): siRNA sense strand
uacaauacgguguggagua

SEQ ID NO: 1811755 - RNA, 19 nt, Homo sapiens
  misc_RNA (1)...(19): siRNA sense strand
caggaaauacagaugaaga

SEQ ID NO: 1811756 - RNA, 19 nt, Homo sapiens
  misc_RNA (1)...(19): siRNA sense strand
aggagaagaguaaagagua

SEQ ID NO: 1811757 - RNA, 19 nt, Homo sapiens
  misc_RNA (1)...(19): siRNA sense strand
cuccagcucuuccaccaaa

SEQ ID NO: 1811758 - RNA, 19 nt, Homo sapiens
  misc_RNA (1)...(19): siRNA sense strand
uuucugauccucugacauu

SEQ ID NO: 1811759 - RNA, 19 nt, Homo sapiens
  misc_RNA (1)...(19): siRNA sense strand
aaauauggcuuuucugauc

SEQ ID NO: 1811760 - RNA, 19 nt, Homo sapiens
  misc_RNA (1)...(19): siRNA sense strand
gaugaaaaccugccccauu

SEQ ID NO: 1811761 - RNA, 19 nt, Homo sapiens
  misc_RNA (1)...(19): siRNA sense strand
cgagaucaacaccuuguau

SEQ ID NO: 1811762 - RNA, 19 nt, Homo sapiens
  misc_RNA (1)...(19): siRNA sense strand
uagagcaggauuugaagaa

SEQ ID NO: 1811763 - RNA, 19 nt, Homo sapiens
  misc_RNA (1)...(19): siRNA sense strand
guacaaucccaaacuugau

SEQ ID NO: 1811764 - RNA, 19 nt, Homo sapiens
  misc_RNA (1)...(19): siRNA sense strand
ucugauccucugacauuua

SEQ ID NO: 1811765 - RNA, 19 nt, Homo sapiens
  misc_RNA (1)...(19): siRNA sense strand
caagaaaggaugcuaugcu

SEQ ID NO: 1811766 - RNA, 19 nt, Homo sapiens
  misc_RNA (1)...(19): siRNA sense strand
ugauggugcauucuuaauu

SEQ ID NO: 1811767 - RNA, 19 nt, Homo sapiens
  misc_RNA (1)...(19): siRNA sense strand
cuucagcaguuccaaaugg

SEQ ID NO: 1811768 - RNA, 19 nt, Homo sapiens
  misc_RNA (1)...(19): siRNA sense strand
ugaagaaucaagcuuugga

SEQ ID NO: 1811769 - RNA, 19 nt, Homo sapiens
  misc_RNA (1)...(19): siRNA sense strand
gaguaaagaguaugauagg

SEQ ID NO: 1811770 - RNA, 19 nt, Homo sapiens
  misc_RNA (1)...(19): siRNA sense strand
gaagagaguuauucauaga

SEQ ID NO: 1811771 - RNA, 19 nt, Homo sapiens
  misc_RNA (1)...(19): siRNA sense strand
gaacuuacuucuuggauca

SEQ ID NO: 1811772 - RNA, 19 nt, Homo sapiens
  misc_RNA (1)...(19): siRNA sense strand
gagaacugcuacuuauaua

SEQ ID NO: 1811773 - RNA, 19 nt, Homo sapiens
  misc_RNA (1)...(19): siRNA sense strand
gaagagaaguagaaauaca

SEQ ID NO: 1811774 - RNA, 19 nt, Homo sapiens
  misc_RNA (1)...(19): siRNA sense strand
cagaagagaaguagaaaua

SEQ ID NO: 1811775 - RNA, 19 nt, Homo sapiens
  misc_RNA (1)...(19): siRNA sense strand
gcaaacacauaccaagaga

SEQ ID NO: 1811776 - RNA, 19 nt, Homo sapiens
  misc_RNA (1)...(19): siRNA sense strand
gcaauuuccuugucagaau

SEQ ID NO: 1811777 - RNA, 19 nt, Homo sapiens
  misc_RNA (1)...(19): siRNA sense strand
caaaugcccugucuuacug

SEQ ID NO: 1811778 - RNA, 19 nt, Homo sapiens
  misc_RNA (1)...(19): siRNA sense strand
gaauaucacggguugaauu

SEQ ID NO: 1811779 - RNA, 19 nt, Homo sapiens
  misc_RNA (1)...(19): siRNA sense strand
caaagaaucagcuagcaaa

SEQ ID NO: 1811780 - RNA, 19 nt, Homo sapiens
  misc_RNA (1)...(19): siRNA sense strand
uaacagaauuggcaaaugc

SEQ ID NO: 1811781 - RNA, 19 nt, Homo sapiens
  misc_RNA (1)...(19): siRNA sense strand
caagacuguugaagcauaa

SEQ ID NO: 1811782 - RNA, 19 nt, Homo sapiens
  misc_RNA (1)...(19): siRNA sense strand
cacauucccugacuuugua

SEQ ID NO: 1811783 - RNA, 19 nt, Homo sapiens
  misc_RNA (1)...(19): siRNA sense strand
cgaagagaguuauucauag

SEQ ID NO: 1811784 - RNA, 19 nt, Homo sapiens
  misc_RNA (1)...(19): siRNA sense strand
caagagaccuacaaaagaa

SEQ ID NO: 1811785 - RNA, 19 nt, Homo sapiens
  misc_RNA (1)...(19): siRNA sense strand
guaaaggaaaguuugguaa

SEQ ID NO: 1811786 - RNA, 19 nt, Homo sapiens
  misc_RNA (1)...(19): siRNA sense strand
ucgaagagaguuauucaua

SEQ ID NO: 1811787 - RNA, 19 nt, Homo sapiens
  misc_RNA (1)...(19): siRNA sense strand
ggaguucuuugcuaugaau

SEQ ID NO: 1811788 - RNA, 19 nt, Homo sapiens
  misc_RNA (1)...(19): siRNA sense strand
gaucacagcaaauucauca

SEQ ID NO: 1811789 - RNA, 19 nt, Homo sapiens
  misc_RNA (1)...(19): siRNA sense strand
ccagggaccucauuucaag

SEQ ID NO: 1811790 - RNA, 19 nt, Homo sapiens
  misc_RNA (1)...(19): siRNA sense strand
gaaaagcaaagcaaguuua

SEQ ID NO: 1811791 - RNA, 19 nt, Homo sapiens
  misc_RNA (1)...(19): siRNA sense strand
gcucagagaaguacuugaa

SEQ ID NO: 1811792 - RNA, 19 nt, Homo sapiens
  misc_RNA (1)...(19): siRNA sense strand
aaaggaaaguuugguaaug

SEQ ID NO: 1811793 - RNA, 19 nt, Homo sapiens
  misc_RNA (1)...(19): siRNA sense strand
gaauaugcaccacuuggaa

SEQ ID NO: 1811794 - RNA, 19 nt, Homo sapiens
  misc_RNA (1)...(19): siRNA sense strand
aggaggaacuggcaucaaa

SEQ ID NO: 1811795 - RNA, 19 nt, Homo sapiens
  misc_RNA (1)...(19): siRNA sense strand
gcucagaagagaaguagaa

SEQ ID NO: 1811796 - RNA, 19 nt, Homo sapiens
  misc_RNA (1)...(19): siRNA sense strand
ggaaaguuugguaauguuu

SEQ ID NO: 1811797 - RNA, 19 nt, Homo sapiens
  misc_RNA (1)...(19): siRNA sense strand
gaacuggcaucaaaacaga

SEQ ID NO: 1811798 - RNA, 19 nt, Homo sapiens
  misc_RNA (1)...(19): siRNA sense strand
ggucuuguguccuucaaau

SEQ ID NO: 1811799 - RNA, 19 nt, Homo sapiens
  misc_RNA (1)...(19): siRNA sense strand
ggaagacuuugaaauuggu

SEQ ID NO: 1811800 - RNA, 19 nt, Homo sapiens
  misc_RNA (1)...(19): siRNA sense strand
gcaaaugcccugucuuacu

SEQ ID NO: 1811801 - RNA, 19 nt, Homo sapiens
  misc_RNA (1)...(19): siRNA sense strand
gaacugcuacuuauauaac

SEQ ID NO: 1811802 - RNA, 19 nt, Homo sapiens
  misc_RNA (1)...(19): siRNA sense strand
ucucgugacucagcaauuu

SEQ ID NO: 1811803 - RNA, 19 nt, Homo sapiens
  misc_RNA (1)...(19): siRNA sense strand
gguaaaggaaaguuuggua

SEQ ID NO: 1811804 - RNA, 19 nt, Homo sapiens
  misc_RNA (1)...(19): siRNA sense strand
gaaggucggaugcaugaug

SEQ ID NO: 1811805 - RNA, 19 nt, Homo sapiens
  misc_RNA (1)...(19): siRNA sense strand
auagagaacuucagaaacu

SEQ ID NO: 1811806 - RNA, 19 nt, Homo sapiens
  misc_RNA (1)...(19): siRNA sense strand
uggaacaguuuauagagaa

SEQ ID NO: 1811807 - RNA, 19 nt, Homo sapiens
  misc_RNA (1)...(19): siRNA sense strand
aagcaaagcaaguuuauuc

SEQ ID NO: 1811808 - RNA, 19 nt, Homo sapiens
  misc_RNA (1)...(19): siRNA sense strand
acaagccgguucagaauca

SEQ ID NO: 1811809 - RNA, 19 nt, Homo sapiens
  misc_RNA (1)...(19): siRNA sense strand
ucagagaaguacuugaaca

SEQ ID NO: 1811810 - RNA, 19 nt, Homo sapiens
  misc_RNA (1)...(19): siRNA sense strand
gcagugggcuuuggaagac

SEQ ID NO: 1811811 - RNA, 19 nt, Homo sapiens
  misc_RNA (1)...(19): siRNA sense strand
uaccagagucuaccuaauu

SEQ ID NO: 1811812 - RNA, 19 nt, Homo sapiens
  misc_RNA (1)...(19): siRNA sense strand
ggaauaugcaccacuugga

SEQ ID NO: 1811813 - RNA, 19 nt, Homo sapiens
  misc_RNA (1)...(19): siRNA sense strand
ucacagcaaauucaucaaa

SEQ ID NO: 1811814 - RNA, 19 nt, Homo sapiens
  misc_RNA (1)...(19): siRNA sense strand
ccacuuggaacaguuuaua

SEQ ID NO: 1811815 - RNA, 19 nt, Homo sapiens
  misc_RNA (1)...(19): siRNA sense strand
cagcgggucuuguguccuu

SEQ ID NO: 1811816 - RNA, 19 nt, Homo sapiens
  misc_RNA (1)...(19): siRNA sense strand
gcaaagcaaguuuauucug

SEQ ID NO: 1811817 - RNA, 19 nt, Homo sapiens
  misc_RNA (1)...(19): siRNA sense strand
cagagaacugcuacuuaua

SEQ ID NO: 1811818 - RNA, 19 nt, Homo sapiens
  misc_RNA (1)...(19): siRNA sense strand
gaccucauuucaagacugu

SEQ ID NO: 1811819 - RNA, 19 nt, Homo sapiens
  misc_RNA (1)...(19): siRNA sense strand
agagaacugcuacuuauau

SEQ ID NO: 1811820 - RNA, 19 nt, Homo sapiens
  misc_RNA (1)...(19): siRNA sense strand
aaggaaaguuugguaaugu

SEQ ID NO: 1811821 - RNA, 19 nt, Homo sapiens
  misc_RNA (1)...(19): siRNA sense strand
acacauaccaagagaccua

SEQ ID NO: 1811822 - RNA, 19 nt, Homo sapiens
  misc_RNA (1)...(19): siRNA sense strand
agagaguuauucauagaga

SEQ ID NO: 1811823 - RNA, 19 nt, Homo sapiens
  misc_RNA (1)...(19): siRNA sense strand
uuggaagacuuugaaauug

SEQ ID NO: 1811824 - RNA, 19 nt, Homo sapiens
  misc_RNA (1)...(19): siRNA sense strand
agaaucagcuagcaaacag

SEQ ID NO: 1811825 - RNA, 19 nt, Homo sapiens
  misc_RNA (1)...(19): siRNA sense strand
caccuucggcauccuaaua

SEQ ID NO: 1811826 - RNA, 19 nt, Homo sapiens
  misc_RNA (1)...(19): siRNA sense strand
gcaccacuuggaacaguuu

SEQ ID NO: 1811827 - RNA, 19 nt, Homo sapiens
  misc_RNA (1)...(19): siRNA sense strand
caucaaaaccaucaaauug

SEQ ID NO: 1811828 - RNA, 19 nt, Homo sapiens
  misc_RNA (1)...(19): siRNA sense strand
ucacaagccgguucagaau

SEQ ID NO: 1811829 - RNA, 19 nt, Homo sapiens
  misc_RNA (1)...(19): siRNA sense strand
uagacuguaugguuauuuc

SEQ ID NO: 1811830 - RNA, 19 nt, Homo sapiens
  misc_RNA (1)...(19): siRNA sense strand
uauucuggcucuuaaagug

SEQ ID NO: 1811831 - RNA, 19 nt, Homo sapiens
  misc_RNA (1)...(19): siRNA sense strand
caauuuccuugucagaauc

SEQ ID NO: 1811832 - RNA, 19 nt, Homo sapiens
  misc_RNA (1)...(19): siRNA sense strand
ucacauucccugacuuugu

SEQ ID NO: 1811833 - RNA, 19 nt, Homo sapiens
  misc_RNA (1)...(19): siRNA sense strand
uggaagacuuugaaauugg

SEQ ID NO: 1811834 - RNA, 19 nt, Homo sapiens
  misc_RNA (1)...(19): siRNA sense strand
aagcuugucuccagucaca

SEQ ID NO: 1811835 - RNA, 19 nt, Homo sapiens
  misc_RNA (1)...(19): siRNA sense strand
gcgcauuccuuugcaagca

SEQ ID NO: 1811836 - RNA, 19 nt, Homo sapiens
  misc_RNA (1)...(19): siRNA sense strand
cagcuagcaaacagucuua

SEQ ID NO: 1811837 - RNA, 19 nt, Homo sapiens
  misc_RNA (1)...(19): siRNA sense strand
uagagaacuucagaaacuu

SEQ ID NO: 1811838 - RNA, 19 nt, Homo sapiens
  misc_RNA (1)...(19): siRNA sense strand
ggaccgaucuaaagaaaac

SEQ ID NO: 1811839 - RNA, 19 nt, Homo sapiens
  misc_RNA (1)...(19): siRNA sense strand
gcuaccagagucuaccuaa

SEQ ID NO: 1811840 - RNA, 19 nt, Homo sapiens
  misc_RNA (1)...(19): siRNA sense strand
aaaguuugaugagcagaga

SEQ ID NO: 1811841 - RNA, 19 nt, Homo sapiens
  misc_RNA (1)...(19): siRNA sense strand
ucuccaggccacugaauaa

SEQ ID NO: 1811842 - RNA, 19 nt, Homo sapiens
  misc_RNA (1)...(19): siRNA sense strand
ggccaaugcucagagaagu

SEQ ID NO: 1811843 - RNA, 19 nt, Homo sapiens
  misc_RNA (1)...(19): siRNA sense strand
ggagccagggaccucauuu

SEQ ID NO: 1811844 - RNA, 19 nt, Homo sapiens
  misc_RNA (1)...(19): siRNA sense strand
aaggucggaugcaugauga

SEQ ID NO: 1811845 - RNA, 19 nt, Homo sapiens
  misc_RNA (1)...(19): siRNA sense strand
aggaaaguuugguaauguu

SEQ ID NO: 1811846 - RNA, 19 nt, Homo sapiens
  misc_RNA (1)...(19): siRNA sense strand
caucggcaccugaaaauaa

SEQ ID NO: 1811847 - RNA, 19 nt, Homo sapiens
  misc_RNA (1)...(19): siRNA sense strand
gauugaaggucggaugcau

SEQ ID NO: 1811848 - RNA, 19 nt, Homo sapiens
  misc_RNA (1)...(19): siRNA sense strand
acauuaagccagagaacuu

SEQ ID NO: 1811849 - RNA, 19 nt, Homo sapiens
  misc_RNA (1)...(19): siRNA sense strand
ggaacaguuuauagagaac

SEQ ID NO: 1811850 - RNA, 19 nt, Homo sapiens
  misc_RNA (1)...(19): siRNA sense strand
gucacaagccgguucagaa

SEQ ID NO: 1811851 - RNA, 19 nt, Homo sapiens
  misc_RNA (1)...(19): siRNA sense strand
agaaauacagucccaccuu

SEQ ID NO: 1811852 - RNA, 19 nt, Homo sapiens
  misc_RNA (1)...(19): siRNA sense strand
gccaaugcucagagaagua

SEQ ID NO: 1811853 - RNA, 19 nt, Homo sapiens
  misc_RNA (1)...(19): siRNA sense strand
ccuuggaguucuuugcuau

SEQ ID NO: 1811854 - RNA, 19 nt, Homo sapiens
  misc_RNA (1)...(19): siRNA sense strand
gucaguacaugcuccaucu

SEQ ID NO: 1811855 - RNA, 19 nt, Homo sapiens
  misc_RNA (1)...(19): siRNA sense strand
ucagaauccauuaccugua

SEQ ID NO: 1811856 - RNA, 19 nt, Homo sapiens
  misc_RNA (1)...(19): siRNA sense strand
uuggaacaguuuauagaga

SEQ ID NO: 1811857 - RNA, 19 nt, Homo sapiens
  misc_RNA (1)...(19): siRNA sense strand
uucuuagacuguaugguua

SEQ ID NO: 1811858 - RNA, 19 nt, Homo sapiens
  misc_RNA (1)...(19): siRNA sense strand
gagaaaagcaaagcaaguu

SEQ ID NO: 1811859 - RNA, 19 nt, Homo sapiens
  misc_RNA (1)...(19): siRNA sense strand
gcaaauucaucaaaaccau

SEQ ID NO: 1811860 - RNA, 19 nt, Homo sapiens
  misc_RNA (1)...(19): siRNA sense strand
gccuuggaguucuuugcua

SEQ ID NO: 1811861 - RNA, 19 nt, Homo sapiens
  misc_RNA (1)...(19): siRNA sense strand
ucuggaauaugcaccacuu

SEQ ID NO: 1811862 - RNA, 19 nt, Homo sapiens
  misc_RNA (1)...(19): siRNA sense strand
cggcauccuaauauucuua

SEQ ID NO: 1811863 - RNA, 19 nt, Homo sapiens
  misc_RNA (1)...(19): siRNA sense strand
ggcagugggcuuuggaaga

SEQ ID NO: 1811864 - RNA, 19 nt, Homo sapiens
  misc_RNA (1)...(19): siRNA sense strand
ccaagagaccuacaaaaga

SEQ ID NO: 1811865 - RNA, 19 nt, Homo sapiens
  misc_RNA (1)...(19): siRNA sense strand
caucagcucagaagagaag

SEQ ID NO: 1811866 - RNA, 19 nt, Homo sapiens
  misc_RNA (1)...(19): siRNA sense strand
agagaacuucagaaacuuu

SEQ ID NO: 1811867 - RNA, 19 nt, Homo sapiens
  misc_RNA (1)...(19): siRNA sense strand
cuaccagagucuaccuaau

SEQ ID NO: 1811868 - RNA, 19 nt, Homo sapiens
  misc_RNA (1)...(19): siRNA sense strand
aagaauaucacggguugaa

SEQ ID NO: 1811869 - RNA, 19 nt, Homo sapiens
  misc_RNA (1)...(19): siRNA sense strand
ucccugacuuuguaacaga

SEQ ID NO: 1811870 - RNA, 19 nt, Homo sapiens
  misc_RNA (1)...(19): siRNA sense strand
gaagagaguuauucauaga

SEQ ID NO: 1811871 - RNA, 19 nt, Homo sapiens
  misc_RNA (1)...(19): siRNA sense strand
gaacuuacuucuuggauca

SEQ ID NO: 1811872 - RNA, 19 nt, Homo sapiens
  misc_RNA (1)...(19): siRNA sense strand
gagaacugcuacuuauaua

SEQ ID NO: 1811873 - RNA, 19 nt, Homo sapiens
  misc_RNA (1)...(19): siRNA sense strand
gaagagaaguagaaauaca

SEQ ID NO: 1811874 - RNA, 19 nt, Homo sapiens
  misc_RNA (1)...(19): siRNA sense strand
cagaagagaaguagaaaua

SEQ ID NO: 1811875 - RNA, 19 nt, Homo sapiens
  misc_RNA (1)...(19): siRNA sense strand
gcaaacacauaccaagaga

SEQ ID NO: 1811876 - RNA, 19 nt, Homo sapiens
  misc_RNA (1)...(19): siRNA sense strand
gcaauuuccuugucagaau

SEQ ID NO: 1811877 - RNA, 19 nt, Homo sapiens
  misc_RNA (1)...(19): siRNA sense strand
caaaugcccugucuuacug

SEQ ID NO: 1811878 - RNA, 19 nt, Homo sapiens
  misc_RNA (1)...(19): siRNA sense strand
gaauaucacggguugaauu

SEQ ID NO: 1811879 - RNA, 19 nt, Homo sapiens
  misc_RNA (1)...(19): siRNA sense strand
caaagaaucagcuagcaaa

SEQ ID NO: 1811880 - RNA, 19 nt, Homo sapiens
  misc_RNA (1)...(19): siRNA sense strand
uaacagaauuggcaaaugc

SEQ ID NO: 1811881 - RNA, 19 nt, Homo sapiens
  misc_RNA (1)...(19): siRNA sense strand
caagacuguugaagcauaa

SEQ ID NO: 1811882 - RNA, 19 nt, Homo sapiens
  misc_RNA (1)...(19): siRNA sense strand
cacauucccugacuuugua

SEQ ID NO: 1811883 - RNA, 19 nt, Homo sapiens
  misc_RNA (1)...(19): siRNA sense strand
cgaagagaguuauucauag

SEQ ID NO: 1811884 - RNA, 19 nt, Homo sapiens
  misc_RNA (1)...(19): siRNA sense strand
caagagaccuacaaaagaa

SEQ ID NO: 1811885 - RNA, 19 nt, Homo sapiens
  misc_RNA (1)...(19): siRNA sense strand
guaaaggaaaguuugguaa

SEQ ID NO: 1811886 - RNA, 19 nt, Homo sapiens
  misc_RNA (1)...(19): siRNA sense strand
ucgaagagaguuauucaua

SEQ ID NO: 1811887 - RNA, 19 nt, Homo sapiens
  misc_RNA (1)...(19): siRNA sense strand
ggaguucuuugcuaugaau

SEQ ID NO: 1811888 - RNA, 19 nt, Homo sapiens
  misc_RNA (1)...(19): siRNA sense strand
gaucacagcaaauucauca

SEQ ID NO: 1811889 - RNA, 19 nt, Homo sapiens
  misc_RNA (1)...(19): siRNA sense strand
ccagggaccucauuucaag

SEQ ID NO: 1811890 - RNA, 19 nt, Homo sapiens
  misc_RNA (1)...(19): siRNA sense strand
gaaaagcaaagcaaguuua

SEQ ID NO: 1811891 - RNA, 19 nt, Homo sapiens
  misc_RNA (1)...(19): siRNA sense strand
gcucagagaaguacuugaa

SEQ ID NO: 1811892 - RNA, 19 nt, Homo sapiens
  misc_RNA (1)...(19): siRNA sense strand
aaaggaaaguuugguaaug

SEQ ID NO: 1811893 - RNA, 19 nt, Homo sapiens
  misc_RNA (1)...(19): siRNA sense strand
gaauaugcaccacuuggaa

SEQ ID NO: 1811894 - RNA, 19 nt, Homo sapiens
  misc_RNA (1)...(19): siRNA sense strand
aggaggaacuggcaucaaa

SEQ ID NO: 1811895 - RNA, 19 nt, Homo sapiens
  misc_RNA (1)...(19): siRNA sense strand
gcucagaagagaaguagaa

SEQ ID NO: 1811896 - RNA, 19 nt, Homo sapiens
  misc_RNA (1)...(19): siRNA sense strand
ggaaaguuugguaauguuu

SEQ ID NO: 1811897 - RNA, 19 nt, Homo sapiens
  misc_RNA (1)...(19): siRNA sense strand
gaacuggcaucaaaacaga

SEQ ID NO: 1811898 - RNA, 19 nt, Homo sapiens
  misc_RNA (1)...(19): siRNA sense strand
ggucuuguguccuucaaau

SEQ ID NO: 1811899 - RNA, 19 nt, Homo sapiens
  misc_RNA (1)...(19): siRNA sense strand
ggaagacuuugaaauuggu

SEQ ID NO: 1811900 - RNA, 19 nt, Homo sapiens
  misc_RNA (1)...(19): siRNA sense strand
gcaaaugcccugucuuacu

SEQ ID NO: 1811901 - RNA, 19 nt, Homo sapiens
  misc_RNA (1)...(19): siRNA sense strand
gaacugcuacuuauauaac

SEQ ID NO: 1811902 - RNA, 19 nt, Homo sapiens
  misc_RNA (1)...(19): siRNA sense strand
ucucgugacucagcaauuu

SEQ ID NO: 1811903 - RNA, 19 nt, Homo sapiens
  misc_RNA (1)...(19): siRNA sense strand
gguaaaggaaaguuuggua

SEQ ID NO: 1811904 - RNA, 19 nt, Homo sapiens
  misc_RNA (1)...(19): siRNA sense strand
gaaggucggaugcaugaug

SEQ ID NO: 1811905 - RNA, 19 nt, Homo sapiens
  misc_RNA (1)...(19): siRNA sense strand
auagagaacuucagaaacu

SEQ ID NO: 1811906 - RNA, 19 nt, Homo sapiens
  misc_RNA (1)...(19): siRNA sense strand
uggaacaguuuauagagaa

SEQ ID NO: 1811907 - RNA, 19 nt, Homo sapiens
  misc_RNA (1)...(19): siRNA sense strand
aagcaaagcaaguuuauuc

SEQ ID NO: 1811908 - RNA, 19 nt, Homo sapiens
  misc_RNA (1)...(19): siRNA sense strand
acaagccgguucagaauca

SEQ ID NO: 1811909 - RNA, 19 nt, Homo sapiens
  misc_RNA (1)...(19): siRNA sense strand
ucagagaaguacuugaaca

SEQ ID NO: 1811910 - RNA, 19 nt, Homo sapiens
  misc_RNA (1)...(19): siRNA sense strand
gcagugggcuuuggaagac

SEQ ID NO: 1811911 - RNA, 19 nt, Homo sapiens
  misc_RNA (1)...(19): siRNA sense strand
uaccagagucuaccuaauu

SEQ ID NO: 1811912 - RNA, 19 nt, Homo sapiens
  misc_RNA (1)...(19): siRNA sense strand
ggaauaugcaccacuugga

SEQ ID NO: 1811913 - RNA, 19 nt, Homo sapiens
  misc_RNA (1)...(19): siRNA sense strand
ucacagcaaauucaucaaa

SEQ ID NO: 1811914 - RNA, 19 nt, Homo sapiens
  misc_RNA (1)...(19): siRNA sense strand
ccacuuggaacaguuuaua

SEQ ID NO: 1811915 - RNA, 19 nt, Homo sapiens
  misc_RNA (1)...(19): siRNA sense strand
cagcgggucuuguguccuu

SEQ ID NO: 1811916 - RNA, 19 nt, Homo sapiens
  misc_RNA (1)...(19): siRNA sense strand
gcaaagcaaguuuauucug

SEQ ID NO: 1811917 - RNA, 19 nt, Homo sapiens
  misc_RNA (1)...(19): siRNA sense strand
cagagaacugcuacuuaua

SEQ ID NO: 1811918 - RNA, 19 nt, Homo sapiens
  misc_RNA (1)...(19): siRNA sense strand
gaccucauuucaagacugu

SEQ ID NO: 1811919 - RNA, 19 nt, Homo sapiens
  misc_RNA (1)...(19): siRNA sense strand
agagaacugcuacuuauau

SEQ ID NO: 1811920 - RNA, 19 nt, Homo sapiens
  misc_RNA (1)...(19): siRNA sense strand
aaggaaaguuugguaaugu

SEQ ID NO: 1811921 - RNA, 19 nt, Homo sapiens
  misc_RNA (1)...(19): siRNA sense strand
acacauaccaagagaccua

SEQ ID NO: 1811922 - RNA, 19 nt, Homo sapiens
  misc_RNA (1)...(19): siRNA sense strand
agagaguuauucauagaga

SEQ ID NO: 1811923 - RNA, 19 nt, Homo sapiens
  misc_RNA (1)...(19): siRNA sense strand
uuggaagacuuugaaauug

SEQ ID NO: 1811924 - RNA, 19 nt, Homo sapiens
  misc_RNA (1)...(19): siRNA sense strand
agaaucagcuagcaaacag

SEQ ID NO: 1811925 - RNA, 19 nt, Homo sapiens
  misc_RNA (1)...(19): siRNA sense strand
caccuucggcauccuaaua

SEQ ID NO: 1811926 - RNA, 19 nt, Homo sapiens
  misc_RNA (1)...(19): siRNA sense strand
gcaccacuuggaacaguuu

SEQ ID NO: 1811927 - RNA, 19 nt, Homo sapiens
  misc_RNA (1)...(19): siRNA sense strand
caucaaaaccaucaaauug

SEQ ID NO: 1811928 - RNA, 19 nt, Homo sapiens
  misc_RNA (1)...(19): siRNA sense strand
ucacaagccgguucagaau

SEQ ID NO: 1811929 - RNA, 19 nt, Homo sapiens
  misc_RNA (1)...(19): siRNA sense strand
uagacuguaugguuauuuc

SEQ ID NO: 1811930 - RNA, 19 nt, Homo sapiens
  misc_RNA (1)...(19): siRNA sense strand
uauucuggcucuuaaagug

SEQ ID NO: 1811931 - RNA, 19 nt, Homo sapiens
  misc_RNA (1)...(19): siRNA sense strand
caauuuccuugucagaauc

SEQ ID NO: 1811932 - RNA, 19 nt, Homo sapiens
  misc_RNA (1)...(19): siRNA sense strand
ucacauucccugacuuugu

SEQ ID NO: 1811933 - RNA, 19 nt, Homo sapiens
  misc_RNA (1)...(19): siRNA sense strand
uggaagacuuugaaauugg

SEQ ID NO: 1811934 - RNA, 19 nt, Homo sapiens
  misc_RNA (1)...(19): siRNA sense strand
aagcuugucuccagucaca

SEQ ID NO: 1811935 - RNA, 19 nt, Homo sapiens
  misc_RNA (1)...(19): siRNA sense strand
gcgcauuccuuugcaagca

SEQ ID NO: 1811936 - RNA, 19 nt, Homo sapiens
  misc_RNA (1)...(19): siRNA sense strand
cagcuagcaaacagucuua

SEQ ID NO: 1811937 - RNA, 19 nt, Homo sapiens
  misc_RNA (1)...(19): siRNA sense strand
uagagaacuucagaaacuu

SEQ ID NO: 1811938 - RNA, 19 nt, Homo sapiens
  misc_RNA (1)...(19): siRNA sense strand
ggaccgaucuaaagaaaac

SEQ ID NO: 1811939 - RNA, 19 nt, Homo sapiens
  misc_RNA (1)...(19): siRNA sense strand
gcuaccagagucuaccuaa

SEQ ID NO: 1811940 - RNA, 19 nt, Homo sapiens
  misc_RNA (1)...(19): siRNA sense strand
aaaguuugaugagcagaga

SEQ ID NO: 1811941 - RNA, 19 nt, Homo sapiens
  misc_RNA (1)...(19): siRNA sense strand
ucuccaggccacugaauaa

SEQ ID NO: 1811942 - RNA, 19 nt, Homo sapiens
  misc_RNA (1)...(19): siRNA sense strand
ggccaaugcucagagaagu

SEQ ID NO: 1811943 - RNA, 19 nt, Homo sapiens
  misc_RNA (1)...(19): siRNA sense strand
ggagccagggaccucauuu

SEQ ID NO: 1811944 - RNA, 19 nt, Homo sapiens
  misc_RNA (1)...(19): siRNA sense strand
aaggucggaugcaugauga

SEQ ID NO: 1811945 - RNA, 19 nt, Homo sapiens
  misc_RNA (1)...(19): siRNA sense strand
aggaaaguuugguaauguu

SEQ ID NO: 1811946 - RNA, 19 nt, Homo sapiens
  misc_RNA (1)...(19): siRNA sense strand
caucggcaccugaaaauaa

SEQ ID NO: 1811947 - RNA, 19 nt, Homo sapiens
  misc_RNA (1)...(19): siRNA sense strand
gauugaaggucggaugcau

SEQ ID NO: 1811948 - RNA, 19 nt, Homo sapiens
  misc_RNA (1)...(19): siRNA sense strand
acauuaagccagagaacuu

SEQ ID NO: 1811949 - RNA, 19 nt, Homo sapiens
  misc_RNA (1)...(19): siRNA sense strand
ggaacaguuuauagagaac

SEQ ID NO: 1811950 - RNA, 19 nt, Homo sapiens
  misc_RNA (1)...(19): siRNA sense strand
gucacaagccgguucagaa

SEQ ID NO: 1811951 - RNA, 19 nt, Homo sapiens
  misc_RNA (1)...(19): siRNA sense strand
agaaauacagucccaccuu

SEQ ID NO: 1811952 - RNA, 19 nt, Homo sapiens
  misc_RNA (1)...(19): siRNA sense strand
gccaaugcucagagaagua

SEQ ID NO: 1811953 - RNA, 19 nt, Homo sapiens
  misc_RNA (1)...(19): siRNA sense strand
ccuuggaguucuuugcuau

SEQ ID NO: 1811954 - RNA, 19 nt, Homo sapiens
  misc_RNA (1)...(19): siRNA sense strand
gucaguacaugcuccaucu

SEQ ID NO: 1811955 - RNA, 19 nt, Homo sapiens
  misc_RNA (1)...(19): siRNA sense strand
ucagaauccauuaccugua

SEQ ID NO: 1811956 - RNA, 19 nt, Homo sapiens
  misc_RNA (1)...(19): siRNA sense strand
uuggaacaguuuauagaga

SEQ ID NO: 1811957 - RNA, 19 nt, Homo sapiens
  misc_RNA (1)...(19): siRNA sense strand
uucuuagacuguaugguua

SEQ ID NO: 1811958 - RNA, 19 nt, Homo sapiens
  misc_RNA (1)...(19): siRNA sense strand
gagaaaagcaaagcaaguu

SEQ ID NO: 1811959 - RNA, 19 nt, Homo sapiens
  misc_RNA (1)...(19): siRNA sense strand
gcaaauucaucaaaaccau

SEQ ID NO: 1811960 - RNA, 19 nt, Homo sapiens
  misc_RNA (1)...(19): siRNA sense strand
gccuuggaguucuuugcua

SEQ ID NO: 1811961 - RNA, 19 nt, Homo sapiens
  misc_RNA (1)...(19): siRNA sense strand
ucuggaauaugcaccacuu

SEQ ID NO: 1811962 - RNA, 19 nt, Homo sapiens
  misc_RNA (1)...(19): siRNA sense strand
cggcauccuaauauucuua

SEQ ID NO: 1811963 - RNA, 19 nt, Homo sapiens
  misc_RNA (1)...(19): siRNA sense strand
ggcagugggcuuuggaaga

SEQ ID NO: 1811964 - RNA, 19 nt, Homo sapiens
  misc_RNA (1)...(19): siRNA sense strand
ccaagagaccuacaaaaga

SEQ ID NO: 1811965 - RNA, 19 nt, Homo sapiens
  misc_RNA (1)...(19): siRNA sense strand
caucagcucagaagagaag

SEQ ID NO: 1811966 - RNA, 19 nt, Homo sapiens
  misc_RNA (1)...(19): siRNA sense strand
agagaacuucagaaacuuu

SEQ ID NO: 1811967 - RNA, 19 nt, Homo sapiens
  misc_RNA (1)...(19): siRNA sense strand
cuaccagagucuaccuaau

SEQ ID NO: 1811968 - RNA, 19 nt, Homo sapiens
  misc_RNA (1)...(19): siRNA sense strand
aagaauaucacggguugaa

SEQ ID NO: 1811969 - RNA, 19 nt, Homo sapiens
  misc_RNA (1)...(19): siRNA sense strand
ucccugacuuuguaacaga

SEQ ID NO: 1811970 - RNA, 19 nt, Homo sapiens
  misc_RNA (1)...(19): siRNA sense strand
gaagagaguuauucauaga

SEQ ID NO: 1811971 - RNA, 19 nt, Homo sapiens
  misc_RNA (1)...(19): siRNA sense strand
gaacuuacuucuuggauca

SEQ ID NO: 1811972 - RNA, 19 nt, Homo sapiens
  misc_RNA (1)...(19): siRNA sense strand
gagaacugcuacuuauaua

SEQ ID NO: 1811973 - RNA, 19 nt, Homo sapiens
  misc_RNA (1)...(19): siRNA sense strand
gaagagaaguagaaauaca

SEQ ID NO: 1811974 - RNA, 19 nt, Homo sapiens
  misc_RNA (1)...(19): siRNA sense strand
cagaagagaaguagaaaua

SEQ ID NO: 1811975 - RNA, 19 nt, Homo sapiens
  misc_RNA (1)...(19): siRNA sense strand
gcaaacacauaccaagaga

SEQ ID NO: 1811976 - RNA, 19 nt, Homo sapiens
  misc_RNA (1)...(19): siRNA sense strand
gcaauuuccuugucagaau

SEQ ID NO: 1811977 - RNA, 19 nt, Homo sapiens
  misc_RNA (1)...(19): siRNA sense strand
caaaugcccugucuuacug

SEQ ID NO: 1811978 - RNA, 19 nt, Homo sapiens
  misc_RNA (1)...(19): siRNA sense strand
gaauaucacggguugaauu

SEQ ID NO: 1811979 - RNA, 19 nt, Homo sapiens
  misc_RNA (1)...(19): siRNA sense strand
caaagaaucagcuagcaaa

SEQ ID NO: 1811980 - RNA, 19 nt, Homo sapiens
  misc_RNA (1)...(19): siRNA sense strand
uaacagaauuggcaaaugc

SEQ ID NO: 1811981 - RNA, 19 nt, Homo sapiens
  misc_RNA (1)...(19): siRNA sense strand
caagacuguugaagcauaa

SEQ ID NO: 1811982 - RNA, 19 nt, Homo sapiens
  misc_RNA (1)...(19): siRNA sense strand
cacauucccugacuuugua

SEQ ID NO: 1811983 - RNA, 19 nt, Homo sapiens
  misc_RNA (1)...(19): siRNA sense strand
cgaagagaguuauucauag

SEQ ID NO: 1811984 - RNA, 19 nt, Homo sapiens
  misc_RNA (1)...(19): siRNA sense strand
caagagaccuacaaaagaa

SEQ ID NO: 1811985 - RNA, 19 nt, Homo sapiens
  misc_RNA (1)...(19): siRNA sense strand
guaaaggaaaguuugguaa

SEQ ID NO: 1811986 - RNA, 19 nt, Homo sapiens
  misc_RNA (1)...(19): siRNA sense strand
ucgaagagaguuauucaua

SEQ ID NO: 1811987 - RNA, 19 nt, Homo sapiens
  misc_RNA (1)...(19): siRNA sense strand
ggaguucuuugcuaugaau

SEQ ID NO: 1811988 - RNA, 19 nt, Homo sapiens
  misc_RNA (1)...(19): siRNA sense strand
gaucacagcaaauucauca

SEQ ID NO: 1811989 - RNA, 19 nt, Homo sapiens
  misc_RNA (1)...(19): siRNA sense strand
ccagggaccucauuucaag

SEQ ID NO: 1811990 - RNA, 19 nt, Homo sapiens
  misc_RNA (1)...(19): siRNA sense strand
gaaaagcaaagcaaguuua

SEQ ID NO: 1811991 - RNA, 19 nt, Homo sapiens
  misc_RNA (1)...(19): siRNA sense strand
gcucagagaaguacuugaa

SEQ ID NO: 1811992 - RNA, 19 nt, Homo sapiens
  misc_RNA (1)...(19): siRNA sense strand
aaaggaaaguuugguaaug

SEQ ID NO: 1811993 - RNA, 19 nt, Homo sapiens
  misc_RNA (1)...(19): siRNA sense strand
gaauaugcaccacuuggaa

SEQ ID NO: 1811994 - RNA, 19 nt, Homo sapiens
  misc_RNA (1)...(19): siRNA sense strand
aggaggaacuggcaucaaa

SEQ ID NO: 1811995 - RNA, 19 nt, Homo sapiens
  misc_RNA (1)...(19): siRNA sense strand
gcucagaagagaaguagaa

SEQ ID NO: 1811996 - RNA, 19 nt, Homo sapiens
  misc_RNA (1)...(19): siRNA sense strand
ggaaaguuugguaauguuu

SEQ ID NO: 1811997 - RNA, 19 nt, Homo sapiens
  misc_RNA (1)...(19): siRNA sense strand
gaacuggcaucaaaacaga

SEQ ID NO: 1811998 - RNA, 19 nt, Homo sapiens
  misc_RNA (1)...(19): siRNA sense strand
ggucuuguguccuucaaau

SEQ ID NO: 1811999 - RNA, 19 nt, Homo sapiens
  misc_RNA (1)...(19): siRNA sense strand
ggaagacuuugaaauuggu

SEQ ID NO: 1812000 - RNA, 19 nt, Homo sapiens
  misc_RNA (1)...(19): siRNA sense strand
gcaaaugcccugucuuacu

SEQ ID NO: 1812001 - RNA, 19 nt, Homo sapiens
  misc_RNA (1)...(19): siRNA sense strand
gaacugcuacuuauauaac

SEQ ID NO: 1812002 - RNA, 19 nt, Homo sapiens
  misc_RNA (1)...(19): siRNA sense strand
ucucgugacucagcaauuu

SEQ ID NO: 1812003 - RNA, 19 nt, Homo sapiens
  misc_RNA (1)...(19): siRNA sense strand
gguaaaggaaaguuuggua

SEQ ID NO: 1812004 - RNA, 19 nt, Homo sapiens
  misc_RNA (1)...(19): siRNA sense strand
gaaggucggaugcaugaug

SEQ ID NO: 1812005 - RNA, 19 nt, Homo sapiens
  misc_RNA (1)...(19): siRNA sense strand
auagagaacuucagaaacu

SEQ ID NO: 1812006 - RNA, 19 nt, Homo sapiens
  misc_RNA (1)...(19): siRNA sense strand
uggaacaguuuauagagaa

SEQ ID NO: 1812007 - RNA, 19 nt, Homo sapiens
  misc_RNA (1)...(19): siRNA sense strand
aagcaaagcaaguuuauuc

SEQ ID NO: 1812008 - RNA, 19 nt, Homo sapiens
  misc_RNA (1)...(19): siRNA sense strand
acaagccgguucagaauca

SEQ ID NO: 1812009 - RNA, 19 nt, Homo sapiens
  misc_RNA (1)...(19): siRNA sense strand
ucagagaaguacuugaaca

SEQ ID NO: 1812010 - RNA, 19 nt, Homo sapiens
  misc_RNA (1)...(19): siRNA sense strand
gcagugggcuuuggaagac

SEQ ID NO: 1812011 - RNA, 19 nt, Homo sapiens
  misc_RNA (1)...(19): siRNA sense strand
uaccagagucuaccuaauu

SEQ ID NO: 1812012 - RNA, 19 nt, Homo sapiens
  misc_RNA (1)...(19): siRNA sense strand
ggaauaugcaccacuugga

SEQ ID NO: 1812013 - RNA, 19 nt, Homo sapiens
  misc_RNA (1)...(19): siRNA sense strand
ucacagcaaauucaucaaa

SEQ ID NO: 1812014 - RNA, 19 nt, Homo sapiens
  misc_RNA (1)...(19): siRNA sense strand
ccacuuggaacaguuuaua

SEQ ID NO: 1812015 - RNA, 19 nt, Homo sapiens
  misc_RNA (1)...(19): siRNA sense strand
cagcgggucuuguguccuu

SEQ ID NO: 1812016 - RNA, 19 nt, Homo sapiens
  misc_RNA (1)...(19): siRNA sense strand
gcaaagcaaguuuauucug

SEQ ID NO: 1812017 - RNA, 19 nt, Homo sapiens
  misc_RNA (1)...(19): siRNA sense strand
cagagaacugcuacuuaua

SEQ ID NO: 1812018 - RNA, 19 nt, Homo sapiens
  misc_RNA (1)...(19): siRNA sense strand
gaccucauuucaagacugu

SEQ ID NO: 1812019 - RNA, 19 nt, Homo sapiens
  misc_RNA (1)...(19): siRNA sense strand
agagaacugcuacuuauau

SEQ ID NO: 1812020 - RNA, 19 nt, Homo sapiens
  misc_RNA (1)...(19): siRNA sense strand
aaggaaaguuugguaaugu

SEQ ID NO: 1812021 - RNA, 19 nt, Homo sapiens
  misc_RNA (1)...(19): siRNA sense strand
acacauaccaagagaccua

SEQ ID NO: 1812022 - RNA, 19 nt, Homo sapiens
  misc_RNA (1)...(19): siRNA sense strand
agagaguuauucauagaga

SEQ ID NO: 1812023 - RNA, 19 nt, Homo sapiens
  misc_RNA (1)...(19): siRNA sense strand
uuggaagacuuugaaauug

SEQ ID NO: 1812024 - RNA, 19 nt, Homo sapiens
  misc_RNA (1)...(19): siRNA sense strand
agaaucagcuagcaaacag

SEQ ID NO: 1812025 - RNA, 19 nt, Homo sapiens
  misc_RNA (1)...(19): siRNA sense strand
caccuucggcauccuaaua

SEQ ID NO: 1812026 - RNA, 19 nt, Homo sapiens
  misc_RNA (1)...(19): siRNA sense strand
gcaccacuuggaacaguuu

SEQ ID NO: 1812027 - RNA, 19 nt, Homo sapiens
  misc_RNA (1)...(19): siRNA sense strand
caucaaaaccaucaaauug

SEQ ID NO: 1812028 - RNA, 19 nt, Homo sapiens
  misc_RNA (1)...(19): siRNA sense strand
ucacaagccgguucagaau

SEQ ID NO: 1812029 - RNA, 19 nt, Homo sapiens
  misc_RNA (1)...(19): siRNA sense strand
uagacuguaugguuauuuc

SEQ ID NO: 1812030 - RNA, 19 nt, Homo sapiens
  misc_RNA (1)...(19): siRNA sense strand
uauucuggcucuuaaagug

SEQ ID NO: 1812031 - RNA, 19 nt, Homo sapiens
  misc_RNA (1)...(19): siRNA sense strand
caauuuccuugucagaauc

SEQ ID NO: 1812032 - RNA, 19 nt, Homo sapiens
  misc_RNA (1)...(19): siRNA sense strand
ucacauucccugacuuugu

SEQ ID NO: 1812033 - RNA, 19 nt, Homo sapiens
  misc_RNA (1)...(19): siRNA sense strand
uggaagacuuugaaauugg

SEQ ID NO: 1812034 - RNA, 19 nt, Homo sapiens
  misc_RNA (1)...(19): siRNA sense strand
aagcuugucuccagucaca

SEQ ID NO: 1812035 - RNA, 19 nt, Homo sapiens
  misc_RNA (1)...(19): siRNA sense strand
gcgcauuccuuugcaagca

SEQ ID NO: 1812036 - RNA, 19 nt, Homo sapiens
  misc_RNA (1)...(19): siRNA sense strand
cagcuagcaaacagucuua

SEQ ID NO: 1812037 - RNA, 19 nt, Homo sapiens
  misc_RNA (1)...(19): siRNA sense strand
uagagaacuucagaaacuu

SEQ ID NO: 1812038 - RNA, 19 nt, Homo sapiens
  misc_RNA (1)...(19): siRNA sense strand
ggaccgaucuaaagaaaac

SEQ ID NO: 1812039 - RNA, 19 nt, Homo sapiens
  misc_RNA (1)...(19): siRNA sense strand
gcuaccagagucuaccuaa

SEQ ID NO: 1812040 - RNA, 19 nt, Homo sapiens
  misc_RNA (1)...(19): siRNA sense strand
aaaguuugaugagcagaga

SEQ ID NO: 1812041 - RNA, 19 nt, Homo sapiens
  misc_RNA (1)...(19): siRNA sense strand
ucuccaggccacugaauaa

SEQ ID NO: 1812042 - RNA, 19 nt, Homo sapiens
  misc_RNA (1)...(19): siRNA sense strand
ggccaaugcucagagaagu

SEQ ID NO: 1812043 - RNA, 19 nt, Homo sapiens
  misc_RNA (1)...(19): siRNA sense strand
ggagccagggaccucauuu

SEQ ID NO: 1812044 - RNA, 19 nt, Homo sapiens
  misc_RNA (1)...(19): siRNA sense strand
aaggucggaugcaugauga

SEQ ID NO: 1812045 - RNA, 19 nt, Homo sapiens
  misc_RNA (1)...(19): siRNA sense strand
aggaaaguuugguaauguu

SEQ ID NO: 1812046 - RNA, 19 nt, Homo sapiens
  misc_RNA (1)...(19): siRNA sense strand
caucggcaccugaaaauaa

SEQ ID NO: 1812047 - RNA, 19 nt, Homo sapiens
  misc_RNA (1)...(19): siRNA sense strand
gauugaaggucggaugcau

SEQ ID NO: 1812048 - RNA, 19 nt, Homo sapiens
  misc_RNA (1)...(19): siRNA sense strand
acauuaagccagagaacuu

SEQ ID NO: 1812049 - RNA, 19 nt, Homo sapiens
  misc_RNA (1)...(19): siRNA sense strand
ggaacaguuuauagagaac

SEQ ID NO: 1812050 - RNA, 19 nt, Homo sapiens
  misc_RNA (1)...(19): siRNA sense strand
gucacaagccgguucagaa

SEQ ID NO: 1812051 - RNA, 19 nt, Homo sapiens
  misc_RNA (1)...(19): siRNA sense strand
agaaauacagucccaccuu

SEQ ID NO: 1812052 - RNA, 19 nt, Homo sapiens
  misc_RNA (1)...(19): siRNA sense strand
gccaaugcucagagaagua

SEQ ID NO: 1812053 - RNA, 19 nt, Homo sapiens
  misc_RNA (1)...(19): siRNA sense strand
ccuuggaguucuuugcuau

SEQ ID NO: 1812054 - RNA, 19 nt, Homo sapiens
  misc_RNA (1)...(19): siRNA sense strand
gucaguacaugcuccaucu

SEQ ID NO: 1812055 - RNA, 19 nt, Homo sapiens
  misc_RNA (1)...(19): siRNA sense strand
ucagaauccauuaccugua

SEQ ID NO: 1812056 - RNA, 19 nt, Homo sapiens
  misc_RNA (1)...(19): siRNA sense strand
uuggaacaguuuauagaga

SEQ ID NO: 1812057 - RNA, 19 nt, Homo sapiens
  misc_RNA (1)...(19): siRNA sense strand
uucuuagacuguaugguua

SEQ ID NO: 1812058 - RNA, 19 nt, Homo sapiens
  misc_RNA (1)...(19): siRNA sense strand
gagaaaagcaaagcaaguu

SEQ ID NO: 1812059 - RNA, 19 nt, Homo sapiens
  misc_RNA (1)...(19): siRNA sense strand
gcaaauucaucaaaaccau

SEQ ID NO: 1812060 - RNA, 19 nt, Homo sapiens
  misc_RNA (1)...(19): siRNA sense strand
gccuuggaguucuuugcua

SEQ ID NO: 1812061 - RNA, 19 nt, Homo sapiens
  misc_RNA (1)...(19): siRNA sense strand
ucuggaauaugcaccacuu

SEQ ID NO: 1812062 - RNA, 19 nt, Homo sapiens
  misc_RNA (1)...(19): siRNA sense strand
cggcauccuaauauucuua

SEQ ID NO: 1812063 - RNA, 19 nt, Homo sapiens
  misc_RNA (1)...(19): siRNA sense strand
ggcagugggcuuuggaaga

SEQ ID NO: 1812064 - RNA, 19 nt, Homo sapiens
  misc_RNA (1)...(19): siRNA sense strand
ccaagagaccuacaaaaga

SEQ ID NO: 1812065 - RNA, 19 nt, Homo sapiens
  misc_RNA (1)...(19): siRNA sense strand
caucagcucagaagagaag

SEQ ID NO: 1812066 - RNA, 19 nt, Homo sapiens
  misc_RNA (1)...(19): siRNA sense strand
agagaacuucagaaacuuu

SEQ ID NO: 1812067 - RNA, 19 nt, Homo sapiens
  misc_RNA (1)...(19): siRNA sense strand
cuaccagagucuaccuaau

SEQ ID NO: 1812068 - RNA, 19 nt, Homo sapiens
  misc_RNA (1)...(19): siRNA sense strand
aagaauaucacggguugaa

SEQ ID NO: 1812069 - RNA, 19 nt, Homo sapiens
  misc_RNA (1)...(19): siRNA sense strand
ucccugacuuuguaacaga

SEQ ID NO: 1812070 - RNA, 19 nt, Homo sapiens
  misc_RNA (1)...(19): siRNA sense strand
gaagagaguuauucauaga

SEQ ID NO: 1812071 - RNA, 19 nt, Homo sapiens
  misc_RNA (1)...(19): siRNA sense strand
gaacuuacuucuuggauca

SEQ ID NO: 1812072 - RNA, 19 nt, Homo sapiens
  misc_RNA (1)...(19): siRNA sense strand
gagaacugcuacuuauaua

SEQ ID NO: 1812073 - RNA, 19 nt, Homo sapiens
  misc_RNA (1)...(19): siRNA sense strand
gaagagaaguagaaauaca

SEQ ID NO: 1812074 - RNA, 19 nt, Homo sapiens
  misc_RNA (1)...(19): siRNA sense strand
cagaagagaaguagaaaua

SEQ ID NO: 1812075 - RNA, 19 nt, Homo sapiens
  misc_RNA (1)...(19): siRNA sense strand
gcaaacacauaccaagaga

SEQ ID NO: 1812076 - RNA, 19 nt, Homo sapiens
  misc_RNA (1)...(19): siRNA sense strand
gcaauuuccuugucagaau

SEQ ID NO: 1812077 - RNA, 19 nt, Homo sapiens
  misc_RNA (1)...(19): siRNA sense strand
caaaugcccugucuuacug

SEQ ID NO: 1812078 - RNA, 19 nt, Homo sapiens
  misc_RNA (1)...(19): siRNA sense strand
gaauaucacggguugaauu

SEQ ID NO: 1812079 - RNA, 19 nt, Homo sapiens
  misc_RNA (1)...(19): siRNA sense strand
caaagaaucagcuagcaaa

SEQ ID NO: 1812080 - RNA, 19 nt, Homo sapiens
  misc_RNA (1)...(19): siRNA sense strand
uaacagaauuggcaaaugc

SEQ ID NO: 1812081 - RNA, 19 nt, Homo sapiens
  misc_RNA (1)...(19): siRNA sense strand
caagacuguugaagcauaa

SEQ ID NO: 1812082 - RNA, 19 nt, Homo sapiens
  misc_RNA (1)...(19): siRNA sense strand
cacauucccugacuuugua

SEQ ID NO: 1812083 - RNA, 19 nt, Homo sapiens
  misc_RNA (1)...(19): siRNA sense strand
cgaagagaguuauucauag

SEQ ID NO: 1812084 - RNA, 19 nt, Homo sapiens
  misc_RNA (1)...(19): siRNA sense strand
caagagaccuacaaaagaa

SEQ ID NO: 1812085 - RNA, 19 nt, Homo sapiens
  misc_RNA (1)...(19): siRNA sense strand
guaaaggaaaguuugguaa

SEQ ID NO: 1812086 - RNA, 19 nt, Homo sapiens
  misc_RNA (1)...(19): siRNA sense strand
ucgaagagaguuauucaua

SEQ ID NO: 1812087 - RNA, 19 nt, Homo sapiens
  misc_RNA (1)...(19): siRNA sense strand
ggaguucuuugcuaugaau

SEQ ID NO: 1812088 - RNA, 19 nt, Homo sapiens
  misc_RNA (1)...(19): siRNA sense strand
gaucacagcaaauucauca

SEQ ID NO: 1812089 - RNA, 19 nt, Homo sapiens
  misc_RNA (1)...(19): siRNA sense strand
ccagggaccucauuucaag

SEQ ID NO: 1812090 - RNA, 19 nt, Homo sapiens
  misc_RNA (1)...(19): siRNA sense strand
gaaaagcaaagcaaguuua

SEQ ID NO: 1812091 - RNA, 19 nt, Homo sapiens
  misc_RNA (1)...(19): siRNA sense strand
gcucagagaaguacuugaa

SEQ ID NO: 1812092 - RNA, 19 nt, Homo sapiens
  misc_RNA (1)...(19): siRNA sense strand
aaaggaaaguuugguaaug

SEQ ID NO: 1812093 - RNA, 19 nt, Homo sapiens
  misc_RNA (1)...(19): siRNA sense strand
gaauaugcaccacuuggaa

SEQ ID NO: 1812094 - RNA, 19 nt, Homo sapiens
  misc_RNA (1)...(19): siRNA sense strand
aggaggaacuggcaucaaa

SEQ ID NO: 1812095 - RNA, 19 nt, Homo sapiens
  misc_RNA (1)...(19): siRNA sense strand
gcucagaagagaaguagaa

SEQ ID NO: 1812096 - RNA, 19 nt, Homo sapiens
  misc_RNA (1)...(19): siRNA sense strand
ggaaaguuugguaauguuu

SEQ ID NO: 1812097 - RNA, 19 nt, Homo sapiens
  misc_RNA (1)...(19): siRNA sense strand
gaacuggcaucaaaacaga

SEQ ID NO: 1812098 - RNA, 19 nt, Homo sapiens
  misc_RNA (1)...(19): siRNA sense strand
ggucuuguguccuucaaau

SEQ ID NO: 1812099 - RNA, 19 nt, Homo sapiens
  misc_RNA (1)...(19): siRNA sense strand
ggaagacuuugaaauuggu

SEQ ID NO: 1812100 - RNA, 19 nt, Homo sapiens
  misc_RNA (1)...(19): siRNA sense strand
gcaaaugcccugucuuacu

SEQ ID NO: 1812101 - RNA, 19 nt, Homo sapiens
  misc_RNA (1)...(19): siRNA sense strand
gaacugcuacuuauauaac

SEQ ID NO: 1812102 - RNA, 19 nt, Homo sapiens
  misc_RNA (1)...(19): siRNA sense strand
ucucgugacucagcaauuu

SEQ ID NO: 1812103 - RNA, 19 nt, Homo sapiens
  misc_RNA (1)...(19): siRNA sense strand
gguaaaggaaaguuuggua

SEQ ID NO: 1812104 - RNA, 19 nt, Homo sapiens
  misc_RNA (1)...(19): siRNA sense strand
gaaggucggaugcaugaug

SEQ ID NO: 1812105 - RNA, 19 nt, Homo sapiens
  misc_RNA (1)...(19): siRNA sense strand
auagagaacuucagaaacu

SEQ ID NO: 1812106 - RNA, 19 nt, Homo sapiens
  misc_RNA (1)...(19): siRNA sense strand
uggaacaguuuauagagaa

SEQ ID NO: 1812107 - RNA, 19 nt, Homo sapiens
  misc_RNA (1)...(19): siRNA sense strand
aagcaaagcaaguuuauuc

SEQ ID NO: 1812108 - RNA, 19 nt, Homo sapiens
  misc_RNA (1)...(19): siRNA sense strand
acaagccgguucagaauca

SEQ ID NO: 1812109 - RNA, 19 nt, Homo sapiens
  misc_RNA (1)...(19): siRNA sense strand
ucagagaaguacuugaaca

SEQ ID NO: 1812110 - RNA, 19 nt, Homo sapiens
  misc_RNA (1)...(19): siRNA sense strand
gcagugggcuuuggaagac

SEQ ID NO: 1812111 - RNA, 19 nt, Homo sapiens
  misc_RNA (1)...(19): siRNA sense strand
uaccagagucuaccuaauu

SEQ ID NO: 1812112 - RNA, 19 nt, Homo sapiens
  misc_RNA (1)...(19): siRNA sense strand
ggaauaugcaccacuugga

SEQ ID NO: 1812113 - RNA, 19 nt, Homo sapiens
  misc_RNA (1)...(19): siRNA sense strand
ucacagcaaauucaucaaa

SEQ ID NO: 1812114 - RNA, 19 nt, Homo sapiens
  misc_RNA (1)...(19): siRNA sense strand
ccacuuggaacaguuuaua

SEQ ID NO: 1812115 - RNA, 19 nt, Homo sapiens
  misc_RNA (1)...(19): siRNA sense strand
cagcgggucuuguguccuu

SEQ ID NO: 1812116 - RNA, 19 nt, Homo sapiens
  misc_RNA (1)...(19): siRNA sense strand
gcaaagcaaguuuauucug

SEQ ID NO: 1812117 - RNA, 19 nt, Homo sapiens
  misc_RNA (1)...(19): siRNA sense strand
cagagaacugcuacuuaua

SEQ ID NO: 1812118 - RNA, 19 nt, Homo sapiens
  misc_RNA (1)...(19): siRNA sense strand
gaccucauuucaagacugu

SEQ ID NO: 1812119 - RNA, 19 nt, Homo sapiens
  misc_RNA (1)...(19): siRNA sense strand
agagaacugcuacuuauau

SEQ ID NO: 1812120 - RNA, 19 nt, Homo sapiens
  misc_RNA (1)...(19): siRNA sense strand
aaggaaaguuugguaaugu

SEQ ID NO: 1812121 - RNA, 19 nt, Homo sapiens
  misc_RNA (1)...(19): siRNA sense strand
acacauaccaagagaccua

SEQ ID NO: 1812122 - RNA, 19 nt, Homo sapiens
  misc_RNA (1)...(19): siRNA sense strand
agagaguuauucauagaga

SEQ ID NO: 1812123 - RNA, 19 nt, Homo sapiens
  misc_RNA (1)...(19): siRNA sense strand
uuggaagacuuugaaauug

SEQ ID NO: 1812124 - RNA, 19 nt, Homo sapiens
  misc_RNA (1)...(19): siRNA sense strand
agaaucagcuagcaaacag

SEQ ID NO: 1812125 - RNA, 19 nt, Homo sapiens
  misc_RNA (1)...(19): siRNA sense strand
caccuucggcauccuaaua

SEQ ID NO: 1812126 - RNA, 19 nt, Homo sapiens
  misc_RNA (1)...(19): siRNA sense strand
gcaccacuuggaacaguuu

SEQ ID NO: 1812127 - RNA, 19 nt, Homo sapiens
  misc_RNA (1)...(19): siRNA sense strand
caucaaaaccaucaaauug

SEQ ID NO: 1812128 - RNA, 19 nt, Homo sapiens
  misc_RNA (1)...(19): siRNA sense strand
ucacaagccgguucagaau

SEQ ID NO: 1812129 - RNA, 19 nt, Homo sapiens
  misc_RNA (1)...(19): siRNA sense strand
uagacuguaugguuauuuc

SEQ ID NO: 1812130 - RNA, 19 nt, Homo sapiens
  misc_RNA (1)...(19): siRNA sense strand
uauucuggcucuuaaagug

SEQ ID NO: 1812131 - RNA, 19 nt, Homo sapiens
  misc_RNA (1)...(19): siRNA sense strand
caauuuccuugucagaauc

SEQ ID NO: 1812132 - RNA, 19 nt, Homo sapiens
  misc_RNA (1)...(19): siRNA sense strand
ucacauucccugacuuugu

SEQ ID NO: 1812133 - RNA, 19 nt, Homo sapiens
  misc_RNA (1)...(19): siRNA sense strand
uggaagacuuugaaauugg

SEQ ID NO: 1812134 - RNA, 19 nt, Homo sapiens
  misc_RNA (1)...(19): siRNA sense strand
aagcuugucuccagucaca

SEQ ID NO: 1812135 - RNA, 19 nt, Homo sapiens
  misc_RNA (1)...(19): siRNA sense strand
gcgcauuccuuugcaagca

SEQ ID NO: 1812136 - RNA, 19 nt, Homo sapiens
  misc_RNA (1)...(19): siRNA sense strand
cagcuagcaaacagucuua

SEQ ID NO: 1812137 - RNA, 19 nt, Homo sapiens
  misc_RNA (1)...(19): siRNA sense strand
uagagaacuucagaaacuu

SEQ ID NO: 1812138 - RNA, 19 nt, Homo sapiens
  misc_RNA (1)...(19): siRNA sense strand
ggaccgaucuaaagaaaac

SEQ ID NO: 1812139 - RNA, 19 nt, Homo sapiens
  misc_RNA (1)...(19): siRNA sense strand
gcuaccagagucuaccuaa

SEQ ID NO: 1812140 - RNA, 19 nt, Homo sapiens
  misc_RNA (1)...(19): siRNA sense strand
aaaguuugaugagcagaga

SEQ ID NO: 1812141 - RNA, 19 nt, Homo sapiens
  misc_RNA (1)...(19): siRNA sense strand
ucuccaggccacugaauaa

SEQ ID NO: 1812142 - RNA, 19 nt, Homo sapiens
  misc_RNA (1)...(19): siRNA sense strand
ggccaaugcucagagaagu

SEQ ID NO: 1812143 - RNA, 19 nt, Homo sapiens
  misc_RNA (1)...(19): siRNA sense strand
ggagccagggaccucauuu

SEQ ID NO: 1812144 - RNA, 19 nt, Homo sapiens
  misc_RNA (1)...(19): siRNA sense strand
aaggucggaugcaugauga

SEQ ID NO: 1812145 - RNA, 19 nt, Homo sapiens
  misc_RNA (1)...(19): siRNA sense strand
aggaaaguuugguaauguu

SEQ ID NO: 1812146 - RNA, 19 nt, Homo sapiens
  misc_RNA (1)...(19): siRNA sense strand
caucggcaccugaaaauaa

SEQ ID NO: 1812147 - RNA, 19 nt, Homo sapiens
  misc_RNA (1)...(19): siRNA sense strand
gauugaaggucggaugcau

SEQ ID NO: 1812148 - RNA, 19 nt, Homo sapiens
  misc_RNA (1)...(19): siRNA sense strand
acauuaagccagagaacuu

SEQ ID NO: 1812149 - RNA, 19 nt, Homo sapiens
  misc_RNA (1)...(19): siRNA sense strand
ggaacaguuuauagagaac

SEQ ID NO: 1812150 - RNA, 19 nt, Homo sapiens
  misc_RNA (1)...(19): siRNA sense strand
gucacaagccgguucagaa

SEQ ID NO: 1812151 - RNA, 19 nt, Homo sapiens
  misc_RNA (1)...(19): siRNA sense strand
agaaauacagucccaccuu

SEQ ID NO: 1812152 - RNA, 19 nt, Homo sapiens
  misc_RNA (1)...(19): siRNA sense strand
gccaaugcucagagaagua

SEQ ID NO: 1812153 - RNA, 19 nt, Homo sapiens
  misc_RNA (1)...(19): siRNA sense strand
ccuuggaguucuuugcuau

SEQ ID NO: 1812154 - RNA, 19 nt, Homo sapiens
  misc_RNA (1)...(19): siRNA sense strand
gucaguacaugcuccaucu

SEQ ID NO: 1812155 - RNA, 19 nt, Homo sapiens
  misc_RNA (1)...(19): siRNA sense strand
ucagaauccauuaccugua

SEQ ID NO: 1812156 - RNA, 19 nt, Homo sapiens
  misc_RNA (1)...(19): siRNA sense strand
uuggaacaguuuauagaga

SEQ ID NO: 1812157 - RNA, 19 nt, Homo sapiens
  misc_RNA (1)...(19): siRNA sense strand
uucuuagacuguaugguua

SEQ ID NO: 1812158 - RNA, 19 nt, Homo sapiens
  misc_RNA (1)...(19): siRNA sense strand
gagaaaagcaaagcaaguu

SEQ ID NO: 1812159 - RNA, 19 nt, Homo sapiens
  misc_RNA (1)...(19): siRNA sense strand
gcaaauucaucaaaaccau

SEQ ID NO: 1812160 - RNA, 19 nt, Homo sapiens
  misc_RNA (1)...(19): siRNA sense strand
gccuuggaguucuuugcua

SEQ ID NO: 1812161 - RNA, 19 nt, Homo sapiens
  misc_RNA (1)...(19): siRNA sense strand
ucuggaauaugcaccacuu

SEQ ID NO: 1812162 - RNA, 19 nt, Homo sapiens
  misc_RNA (1)...(19): siRNA sense strand
cggcauccuaauauucuua

SEQ ID NO: 1812163 - RNA, 19 nt, Homo sapiens
  misc_RNA (1)...(19): siRNA sense strand
ggcagugggcuuuggaaga

SEQ ID NO: 1812164 - RNA, 19 nt, Homo sapiens
  misc_RNA (1)...(19): siRNA sense strand
ccaagagaccuacaaaaga

SEQ ID NO: 1812165 - RNA, 19 nt, Homo sapiens
  misc_RNA (1)...(19): siRNA sense strand
caucagcucagaagagaag

SEQ ID NO: 1812166 - RNA, 19 nt, Homo sapiens
  misc_RNA (1)...(19): siRNA sense strand
agagaacuucagaaacuuu

SEQ ID NO: 1812167 - RNA, 19 nt, Homo sapiens
  misc_RNA (1)...(19): siRNA sense strand
cuaccagagucuaccuaau

SEQ ID NO: 1812168 - RNA, 19 nt, Homo sapiens
  misc_RNA (1)...(19): siRNA sense strand
aagaauaucacggguugaa

SEQ ID NO: 1812169 - RNA, 19 nt, Homo sapiens
  misc_RNA (1)...(19): siRNA sense strand
ucccugacuuuguaacaga

SEQ ID NO: 1812170 - RNA, 19 nt, Homo sapiens
  misc_RNA (1)...(19): siRNA sense strand
gaagagaguuauucauaga

SEQ ID NO: 1812171 - RNA, 19 nt, Homo sapiens
  misc_RNA (1)...(19): siRNA sense strand
gaacuuacuucuuggauca

SEQ ID NO: 1812172 - RNA, 19 nt, Homo sapiens
  misc_RNA (1)...(19): siRNA sense strand
gagaacugcuacuuauaua

SEQ ID NO: 1812173 - RNA, 19 nt, Homo sapiens
  misc_RNA (1)...(19): siRNA sense strand
gaagagaaguagaaauaca

SEQ ID NO: 1812174 - RNA, 19 nt, Homo sapiens
  misc_RNA (1)...(19): siRNA sense strand
cagaagagaaguagaaaua

SEQ ID NO: 1812175 - RNA, 19 nt, Homo sapiens
  misc_RNA (1)...(19): siRNA sense strand
gcaaacacauaccaagaga

SEQ ID NO: 1812176 - RNA, 19 nt, Homo sapiens
  misc_RNA (1)...(19): siRNA sense strand
gcaauuuccuugucagaau

SEQ ID NO: 1812177 - RNA, 19 nt, Homo sapiens
  misc_RNA (1)...(19): siRNA sense strand
caaaugcccugucuuacug

SEQ ID NO: 1812178 - RNA, 19 nt, Homo sapiens
  misc_RNA (1)...(19): siRNA sense strand
gaauaucacggguugaauu

SEQ ID NO: 1812179 - RNA, 19 nt, Homo sapiens
  misc_RNA (1)...(19): siRNA sense strand
caaagaaucagcuagcaaa

SEQ ID NO: 1812180 - RNA, 19 nt, Homo sapiens
  misc_RNA (1)...(19): siRNA sense strand
uaacagaauuggcaaaugc

SEQ ID NO: 1812181 - RNA, 19 nt, Homo sapiens
  misc_RNA (1)...(19): siRNA sense strand
caagacuguugaagcauaa

SEQ ID NO: 1812182 - RNA, 19 nt, Homo sapiens
  misc_RNA (1)...(19): siRNA sense strand
cacauucccugacuuugua

SEQ ID NO: 1812183 - RNA, 19 nt, Homo sapiens
  misc_RNA (1)...(19): siRNA sense strand
cgaagagaguuauucauag

SEQ ID NO: 1812184 - RNA, 19 nt, Homo sapiens
  misc_RNA (1)...(19): siRNA sense strand
caagagaccuacaaaagaa

SEQ ID NO: 1812185 - RNA, 19 nt, Homo sapiens
  misc_RNA (1)...(19): siRNA sense strand
guaaaggaaaguuugguaa

SEQ ID NO: 1812186 - RNA, 19 nt, Homo sapiens
  misc_RNA (1)...(19): siRNA sense strand
ucgaagagaguuauucaua

SEQ ID NO: 1812187 - RNA, 19 nt, Homo sapiens
  misc_RNA (1)...(19): siRNA sense strand
ggaguucuuugcuaugaau

SEQ ID NO: 1812188 - RNA, 19 nt, Homo sapiens
  misc_RNA (1)...(19): siRNA sense strand
gaucacagcaaauucauca

SEQ ID NO: 1812189 - RNA, 19 nt, Homo sapiens
  misc_RNA (1)...(19): siRNA sense strand
ccagggaccucauuucaag

SEQ ID NO: 1812190 - RNA, 19 nt, Homo sapiens
  misc_RNA (1)...(19): siRNA sense strand
gaaaagcaaagcaaguuua

SEQ ID NO: 1812191 - RNA, 19 nt, Homo sapiens
  misc_RNA (1)...(19): siRNA sense strand
gcucagagaaguacuugaa

SEQ ID NO: 1812192 - RNA, 19 nt, Homo sapiens
  misc_RNA (1)...(19): siRNA sense strand
aaaggaaaguuugguaaug

SEQ ID NO: 1812193 - RNA, 19 nt, Homo sapiens
  misc_RNA (1)...(19): siRNA sense strand
gaauaugcaccacuuggaa

SEQ ID NO: 1812194 - RNA, 19 nt, Homo sapiens
  misc_RNA (1)...(19): siRNA sense strand
aggaggaacuggcaucaaa

SEQ ID NO: 1812195 - RNA, 19 nt, Homo sapiens
  misc_RNA (1)...(19): siRNA sense strand
gcucagaagagaaguagaa

SEQ ID NO: 1812196 - RNA, 19 nt, Homo sapiens
  misc_RNA (1)...(19): siRNA sense strand
ggaaaguuugguaauguuu

SEQ ID NO: 1812197 - RNA, 19 nt, Homo sapiens
  misc_RNA (1)...(19): siRNA sense strand
gaacuggcaucaaaacaga

SEQ ID NO: 1812198 - RNA, 19 nt, Homo sapiens
  misc_RNA (1)...(19): siRNA sense strand
ggucuuguguccuucaaau

SEQ ID NO: 1812199 - RNA, 19 nt, Homo sapiens
  misc_RNA (1)...(19): siRNA sense strand
ggaagacuuugaaauuggu

SEQ ID NO: 1812200 - RNA, 19 nt, Homo sapiens
  misc_RNA (1)...(19): siRNA sense strand
gcaaaugcccugucuuacu

SEQ ID NO: 1812201 - RNA, 19 nt, Homo sapiens
  misc_RNA (1)...(19): siRNA sense strand
gaacugcuacuuauauaac

SEQ ID NO: 1812202 - RNA, 19 nt, Homo sapiens
  misc_RNA (1)...(19): siRNA sense strand
ucucgugacucagcaauuu

SEQ ID NO: 1812203 - RNA, 19 nt, Homo sapiens
  misc_RNA (1)...(19): siRNA sense strand
gguaaaggaaaguuuggua

SEQ ID NO: 1812204 - RNA, 19 nt, Homo sapiens
  misc_RNA (1)...(19): siRNA sense strand
gaaggucggaugcaugaug

SEQ ID NO: 1812205 - RNA, 19 nt, Homo sapiens
  misc_RNA (1)...(19): siRNA sense strand
auagagaacuucagaaacu

SEQ ID NO: 1812206 - RNA, 19 nt, Homo sapiens
  misc_RNA (1)...(19): siRNA sense strand
uggaacaguuuauagagaa

SEQ ID NO: 1812207 - RNA, 19 nt, Homo sapiens
  misc_RNA (1)...(19): siRNA sense strand
aagcaaagcaaguuuauuc

SEQ ID NO: 1812208 - RNA, 19 nt, Homo sapiens
  misc_RNA (1)...(19): siRNA sense strand
acaagccgguucagaauca

SEQ ID NO: 1812209 - RNA, 19 nt, Homo sapiens
  misc_RNA (1)...(19): siRNA sense strand
ucagagaaguacuugaaca

SEQ ID NO: 1812210 - RNA, 19 nt, Homo sapiens
  misc_RNA (1)...(19): siRNA sense strand
gcagugggcuuuggaagac

SEQ ID NO: 1812211 - RNA, 19 nt, Homo sapiens
  misc_RNA (1)...(19): siRNA sense strand
uaccagagucuaccuaauu

SEQ ID NO: 1812212 - RNA, 19 nt, Homo sapiens
  misc_RNA (1)...(19): siRNA sense strand
ggaauaugcaccacuugga

SEQ ID NO: 1812213 - RNA, 19 nt, Homo sapiens
  misc_RNA (1)...(19): siRNA sense strand
ucacagcaaauucaucaaa

SEQ ID NO: 1812214 - RNA, 19 nt, Homo sapiens
  misc_RNA (1)...(19): siRNA sense strand
ccacuuggaacaguuuaua

SEQ ID NO: 1812215 - RNA, 19 nt, Homo sapiens
  misc_RNA (1)...(19): siRNA sense strand
cagcgggucuuguguccuu

SEQ ID NO: 1812216 - RNA, 19 nt, Homo sapiens
  misc_RNA (1)...(19): siRNA sense strand
gcaaagcaaguuuauucug

SEQ ID NO: 1812217 - RNA, 19 nt, Homo sapiens
  misc_RNA (1)...(19): siRNA sense strand
cagagaacugcuacuuaua

SEQ ID NO: 1812218 - RNA, 19 nt, Homo sapiens
  misc_RNA (1)...(19): siRNA sense strand
gaccucauuucaagacugu

SEQ ID NO: 1812219 - RNA, 19 nt, Homo sapiens
  misc_RNA (1)...(19): siRNA sense strand
agagaacugcuacuuauau

SEQ ID NO: 1812220 - RNA, 19 nt, Homo sapiens
  misc_RNA (1)...(19): siRNA sense strand
aaggaaaguuugguaaugu

SEQ ID NO: 1812221 - RNA, 19 nt, Homo sapiens
  misc_RNA (1)...(19): siRNA sense strand
acacauaccaagagaccua

SEQ ID NO: 1812222 - RNA, 19 nt, Homo sapiens
  misc_RNA (1)...(19): siRNA sense strand
agagaguuauucauagaga

SEQ ID NO: 1812223 - RNA, 19 nt, Homo sapiens
  misc_RNA (1)...(19): siRNA sense strand
uuggaagacuuugaaauug

SEQ ID NO: 1812224 - RNA, 19 nt, Homo sapiens
  misc_RNA (1)...(19): siRNA sense strand
agaaucagcuagcaaacag

SEQ ID NO: 1812225 - RNA, 19 nt, Homo sapiens
  misc_RNA (1)...(19): siRNA sense strand
caccuucggcauccuaaua

SEQ ID NO: 1812226 - RNA, 19 nt, Homo sapiens
  misc_RNA (1)...(19): siRNA sense strand
gcaccacuuggaacaguuu

SEQ ID NO: 1812227 - RNA, 19 nt, Homo sapiens
  misc_RNA (1)...(19): siRNA sense strand
caucaaaaccaucaaauug

SEQ ID NO: 1812228 - RNA, 19 nt, Homo sapiens
  misc_RNA (1)...(19): siRNA sense strand
ucacaagccgguucagaau

SEQ ID NO: 1812229 - RNA, 19 nt, Homo sapiens
  misc_RNA (1)...(19): siRNA sense strand
uagacuguaugguuauuuc

SEQ ID NO: 1812230 - RNA, 19 nt, Homo sapiens
  misc_RNA (1)...(19): siRNA sense strand
uauucuggcucuuaaagug

SEQ ID NO: 1812231 - RNA, 19 nt, Homo sapiens
  misc_RNA (1)...(19): siRNA sense strand
caauuuccuugucagaauc

SEQ ID NO: 1812232 - RNA, 19 nt, Homo sapiens
  misc_RNA (1)...(19): siRNA sense strand
ucacauucccugacuuugu

SEQ ID NO: 1812233 - RNA, 19 nt, Homo sapiens
  misc_RNA (1)...(19): siRNA sense strand
uggaagacuuugaaauugg

SEQ ID NO: 1812234 - RNA, 19 nt, Homo sapiens
  misc_RNA (1)...(19): siRNA sense strand
aagcuugucuccagucaca

SEQ ID NO: 1812235 - RNA, 19 nt, Homo sapiens
  misc_RNA (1)...(19): siRNA sense strand
gcgcauuccuuugcaagca

SEQ ID NO: 1812236 - RNA, 19 nt, Homo sapiens
  misc_RNA (1)...(19): siRNA sense strand
cagcuagcaaacagucuua

SEQ ID NO: 1812237 - RNA, 19 nt, Homo sapiens
  misc_RNA (1)...(19): siRNA sense strand
uagagaacuucagaaacuu

SEQ ID NO: 1812238 - RNA, 19 nt, Homo sapiens
  misc_RNA (1)...(19): siRNA sense strand
ggaccgaucuaaagaaaac

SEQ ID NO: 1812239 - RNA, 19 nt, Homo sapiens
  misc_RNA (1)...(19): siRNA sense strand
gcuaccagagucuaccuaa

SEQ ID NO: 1812240 - RNA, 19 nt, Homo sapiens
  misc_RNA (1)...(19): siRNA sense strand
aaaguuugaugagcagaga

SEQ ID NO: 1812241 - RNA, 19 nt, Homo sapiens
  misc_RNA (1)...(19): siRNA sense strand
ucuccaggccacugaauaa

SEQ ID NO: 1812242 - RNA, 19 nt, Homo sapiens
  misc_RNA (1)...(19): siRNA sense strand
ggccaaugcucagagaagu

SEQ ID NO: 1812243 - RNA, 19 nt, Homo sapiens
  misc_RNA (1)...(19): siRNA sense strand
ggagccagggaccucauuu

SEQ ID NO: 1812244 - RNA, 19 nt, Homo sapiens
  misc_RNA (1)...(19): siRNA sense strand
aaggucggaugcaugauga

SEQ ID NO: 1812245 - RNA, 19 nt, Homo sapiens
  misc_RNA (1)...(19): siRNA sense strand
aggaaaguuugguaauguu

SEQ ID NO: 1812246 - RNA, 19 nt, Homo sapiens
  misc_RNA (1)...(19): siRNA sense strand
caucggcaccugaaaauaa

SEQ ID NO: 1812247 - RNA, 19 nt, Homo sapiens
  misc_RNA (1)...(19): siRNA sense strand
gauugaaggucggaugcau

SEQ ID NO: 1812248 - RNA, 19 nt, Homo sapiens
  misc_RNA (1)...(19): siRNA sense strand
acauuaagccagagaacuu

SEQ ID NO: 1812249 - RNA, 19 nt, Homo sapiens
  misc_RNA (1)...(19): siRNA sense strand
ggaacaguuuauagagaac

SEQ ID NO: 1812250 - RNA, 19 nt, Homo sapiens
  misc_RNA (1)...(19): siRNA sense strand
gucacaagccgguucagaa

SEQ ID NO: 1812251 - RNA, 19 nt, Homo sapiens
  misc_RNA (1)...(19): siRNA sense strand
agaaauacagucccaccuu

SEQ ID NO: 1812252 - RNA, 19 nt, Homo sapiens
  misc_RNA (1)...(19): siRNA sense strand
gccaaugcucagagaagua

SEQ ID NO: 1812253 - RNA, 19 nt, Homo sapiens
  misc_RNA (1)...(19): siRNA sense strand
ccuuggaguucuuugcuau

SEQ ID NO: 1812254 - RNA, 19 nt, Homo sapiens
  misc_RNA (1)...(19): siRNA sense strand
gucaguacaugcuccaucu

SEQ ID NO: 1812255 - RNA, 19 nt, Homo sapiens
  misc_RNA (1)...(19): siRNA sense strand
ucagaauccauuaccugua

SEQ ID NO: 1812256 - RNA, 19 nt, Homo sapiens
  misc_RNA (1)...(19): siRNA sense strand
uuggaacaguuuauagaga

SEQ ID NO: 1812257 - RNA, 19 nt, Homo sapiens
  misc_RNA (1)...(19): siRNA sense strand
uucuuagacuguaugguua

SEQ ID NO: 1812258 - RNA, 19 nt, Homo sapiens
  misc_RNA (1)...(19): siRNA sense strand
gagaaaagcaaagcaaguu

SEQ ID NO: 1812259 - RNA, 19 nt, Homo sapiens
  misc_RNA (1)...(19): siRNA sense strand
gcaaauucaucaaaaccau

SEQ ID NO: 1812260 - RNA, 19 nt, Homo sapiens
  misc_RNA (1)...(19): siRNA sense strand
gccuuggaguucuuugcua

SEQ ID NO: 1812261 - RNA, 19 nt, Homo sapiens
  misc_RNA (1)...(19): siRNA sense strand
ucuggaauaugcaccacuu

SEQ ID NO: 1812262 - RNA, 19 nt, Homo sapiens
  misc_RNA (1)...(19): siRNA sense strand
cggcauccuaauauucuua

SEQ ID NO: 1812263 - RNA, 19 nt, Homo sapiens
  misc_RNA (1)...(19): siRNA sense strand
ggcagugggcuuuggaaga

SEQ ID NO: 1812264 - RNA, 19 nt, Homo sapiens
  misc_RNA (1)...(19): siRNA sense strand
ccaagagaccuacaaaaga

SEQ ID NO: 1812265 - RNA, 19 nt, Homo sapiens
  misc_RNA (1)...(19): siRNA sense strand
caucagcucagaagagaag

SEQ ID NO: 1812266 - RNA, 19 nt, Homo sapiens
  misc_RNA (1)...(19): siRNA sense strand
agagaacuucagaaacuuu

SEQ ID NO: 1812267 - RNA, 19 nt, Homo sapiens
  misc_RNA (1)...(19): siRNA sense strand
cuaccagagucuaccuaau

SEQ ID NO: 1812268 - RNA, 19 nt, Homo sapiens
  misc_RNA (1)...(19): siRNA sense strand
aagaauaucacggguugaa

SEQ ID NO: 1812269 - RNA, 19 nt, Homo sapiens
  misc_RNA (1)...(19): siRNA sense strand
ucccugacuuuguaacaga

SEQ ID NO: 1812270 - RNA, 19 nt, Homo sapiens
  misc_RNA (1)...(19): siRNA sense strand
gaagagaguuauucauaga

SEQ ID NO: 1812271 - RNA, 19 nt, Homo sapiens
  misc_RNA (1)...(19): siRNA sense strand
gaacuuacuucuuggauca

SEQ ID NO: 1812272 - RNA, 19 nt, Homo sapiens
  misc_RNA (1)...(19): siRNA sense strand
gagaacugcuacuuauaua

SEQ ID NO: 1812273 - RNA, 19 nt, Homo sapiens
  misc_RNA (1)...(19): siRNA sense strand
gaagagaaguagaaauaca

SEQ ID NO: 1812274 - RNA, 19 nt, Homo sapiens
  misc_RNA (1)...(19): siRNA sense strand
cagaagagaaguagaaaua

SEQ ID NO: 1812275 - RNA, 19 nt, Homo sapiens
  misc_RNA (1)...(19): siRNA sense strand
gcaaacacauaccaagaga

SEQ ID NO: 1812276 - RNA, 19 nt, Homo sapiens
  misc_RNA (1)...(19): siRNA sense strand
gcaauuuccuugucagaau

SEQ ID NO: 1812277 - RNA, 19 nt, Homo sapiens
  misc_RNA (1)...(19): siRNA sense strand
caaaugcccugucuuacug

SEQ ID NO: 1812278 - RNA, 19 nt, Homo sapiens
  misc_RNA (1)...(19): siRNA sense strand
gaauaucacggguugaauu

SEQ ID NO: 1812279 - RNA, 19 nt, Homo sapiens
  misc_RNA (1)...(19): siRNA sense strand
caaagaaucagcuagcaaa

SEQ ID NO: 1812280 - RNA, 19 nt, Homo sapiens
  misc_RNA (1)...(19): siRNA sense strand
uaacagaauuggcaaaugc

SEQ ID NO: 1812281 - RNA, 19 nt, Homo sapiens
  misc_RNA (1)...(19): siRNA sense strand
caagacuguugaagcauaa

SEQ ID NO: 1812282 - RNA, 19 nt, Homo sapiens
  misc_RNA (1)...(19): siRNA sense strand
cacauucccugacuuugua

SEQ ID NO: 1812283 - RNA, 19 nt, Homo sapiens
  misc_RNA (1)...(19): siRNA sense strand
cgaagagaguuauucauag

SEQ ID NO: 1812284 - RNA, 19 nt, Homo sapiens
  misc_RNA (1)...(19): siRNA sense strand
caagagaccuacaaaagaa

SEQ ID NO: 1812285 - RNA, 19 nt, Homo sapiens
  misc_RNA (1)...(19): siRNA sense strand
guaaaggaaaguuugguaa

SEQ ID NO: 1812286 - RNA, 19 nt, Homo sapiens
  misc_RNA (1)...(19): siRNA sense strand
ucgaagagaguuauucaua

SEQ ID NO: 1812287 - RNA, 19 nt, Homo sapiens
  misc_RNA (1)...(19): siRNA sense strand
ggaguucuuugcuaugaau

SEQ ID NO: 1812288 - RNA, 19 nt, Homo sapiens
  misc_RNA (1)...(19): siRNA sense strand
gaucacagcaaauucauca

SEQ ID NO: 1812289 - RNA, 19 nt, Homo sapiens
  misc_RNA (1)...(19): siRNA sense strand
ccagggaccucauuucaag

SEQ ID NO: 1812290 - RNA, 19 nt, Homo sapiens
  misc_RNA (1)...(19): siRNA sense strand
gaaaagcaaagcaaguuua

SEQ ID NO: 1812291 - RNA, 19 nt, Homo sapiens
  misc_RNA (1)...(19): siRNA sense strand
gcucagagaaguacuugaa

SEQ ID NO: 1812292 - RNA, 19 nt, Homo sapiens
  misc_RNA (1)...(19): siRNA sense strand
aaaggaaaguuugguaaug

SEQ ID NO: 1812293 - RNA, 19 nt, Homo sapiens
  misc_RNA (1)...(19): siRNA sense strand
gaauaugcaccacuuggaa

SEQ ID NO: 1812294 - RNA, 19 nt, Homo sapiens
  misc_RNA (1)...(19): siRNA sense strand
aggaggaacuggcaucaaa

SEQ ID NO: 1812295 - RNA, 19 nt, Homo sapiens
  misc_RNA (1)...(19): siRNA sense strand
gcucagaagagaaguagaa

SEQ ID NO: 1812296 - RNA, 19 nt, Homo sapiens
  misc_RNA (1)...(19): siRNA sense strand
ggaaaguuugguaauguuu

SEQ ID NO: 1812297 - RNA, 19 nt, Homo sapiens
  misc_RNA (1)...(19): siRNA sense strand
gaacuggcaucaaaacaga

SEQ ID NO: 1812298 - RNA, 19 nt, Homo sapiens
  misc_RNA (1)...(19): siRNA sense strand
ggucuuguguccuucaaau

SEQ ID NO: 1812299 - RNA, 19 nt, Homo sapiens
  misc_RNA (1)...(19): siRNA sense strand
ggaagacuuugaaauuggu

SEQ ID NO: 1812300 - RNA, 19 nt, Homo sapiens
  misc_RNA (1)...(19): siRNA sense strand
gcaaaugcccugucuuacu

SEQ ID NO: 1812301 - RNA, 19 nt, Homo sapiens
  misc_RNA (1)...(19): siRNA sense strand
gaacugcuacuuauauaac

SEQ ID NO: 1812302 - RNA, 19 nt, Homo sapiens
  misc_RNA (1)...(19): siRNA sense strand
ucucgugacucagcaauuu

SEQ ID NO: 1812303 - RNA, 19 nt, Homo sapiens
  misc_RNA (1)...(19): siRNA sense strand
gguaaaggaaaguuuggua

SEQ ID NO: 1812304 - RNA, 19 nt, Homo sapiens
  misc_RNA (1)...(19): siRNA sense strand
gaaggucggaugcaugaug

SEQ ID NO: 1812305 - RNA, 19 nt, Homo sapiens
  misc_RNA (1)...(19): siRNA sense strand
auagagaacuucagaaacu

SEQ ID NO: 1812306 - RNA, 19 nt, Homo sapiens
  misc_RNA (1)...(19): siRNA sense strand
uggaacaguuuauagagaa

SEQ ID NO: 1812307 - RNA, 19 nt, Homo sapiens
  misc_RNA (1)...(19): siRNA sense strand
aagcaaagcaaguuuauuc

SEQ ID NO: 1812308 - RNA, 19 nt, Homo sapiens
  misc_RNA (1)...(19): siRNA sense strand
acaagccgguucagaauca

SEQ ID NO: 1812309 - RNA, 19 nt, Homo sapiens
  misc_RNA (1)...(19): siRNA sense strand
ucagagaaguacuugaaca

SEQ ID NO: 1812310 - RNA, 19 nt, Homo sapiens
  misc_RNA (1)...(19): siRNA sense strand
gcagugggcuuuggaagac

SEQ ID NO: 1812311 - RNA, 19 nt, Homo sapiens
  misc_RNA (1)...(19): siRNA sense strand
uaccagagucuaccuaauu

SEQ ID NO: 1812312 - RNA, 19 nt, Homo sapiens
  misc_RNA (1)...(19): siRNA sense strand
ggaauaugcaccacuugga

SEQ ID NO: 1812313 - RNA, 19 nt, Homo sapiens
  misc_RNA (1)...(19): siRNA sense strand
ucacagcaaauucaucaaa

SEQ ID NO: 1812314 - RNA, 19 nt, Homo sapiens
  misc_RNA (1)...(19): siRNA sense strand
ccacuuggaacaguuuaua

SEQ ID NO: 1812315 - RNA, 19 nt, Homo sapiens
  misc_RNA (1)...(19): siRNA sense strand
cagcgggucuuguguccuu

SEQ ID NO: 1812316 - RNA, 19 nt, Homo sapiens
  misc_RNA (1)...(19): siRNA sense strand
gcaaagcaaguuuauucug

SEQ ID NO: 1812317 - RNA, 19 nt, Homo sapiens
  misc_RNA (1)...(19): siRNA sense strand
cagagaacugcuacuuaua

SEQ ID NO: 1812318 - RNA, 19 nt, Homo sapiens
  misc_RNA (1)...(19): siRNA sense strand
gaccucauuucaagacugu

SEQ ID NO: 1812319 - RNA, 19 nt, Homo sapiens
  misc_RNA (1)...(19): siRNA sense strand
agagaacugcuacuuauau

SEQ ID NO: 1812320 - RNA, 19 nt, Homo sapiens
  misc_RNA (1)...(19): siRNA sense strand
aaggaaaguuugguaaugu

SEQ ID NO: 1812321 - RNA, 19 nt, Homo sapiens
  misc_RNA (1)...(19): siRNA sense strand
acacauaccaagagaccua

SEQ ID NO: 1812322 - RNA, 19 nt, Homo sapiens
  misc_RNA (1)...(19): siRNA sense strand
agagaguuauucauagaga

SEQ ID NO: 1812323 - RNA, 19 nt, Homo sapiens
  misc_RNA (1)...(19): siRNA sense strand
uuggaagacuuugaaauug

SEQ ID NO: 1812324 - RNA, 19 nt, Homo sapiens
  misc_RNA (1)...(19): siRNA sense strand
agaaucagcuagcaaacag

SEQ ID NO: 1812325 - RNA, 19 nt, Homo sapiens
  misc_RNA (1)...(19): siRNA sense strand
caccuucggcauccuaaua

SEQ ID NO: 1812326 - RNA, 19 nt, Homo sapiens
  misc_RNA (1)...(19): siRNA sense strand
gcaccacuuggaacaguuu

SEQ ID NO: 1812327 - RNA, 19 nt, Homo sapiens
  misc_RNA (1)...(19): siRNA sense strand
caucaaaaccaucaaauug

SEQ ID NO: 1812328 - RNA, 19 nt, Homo sapiens
  misc_RNA (1)...(19): siRNA sense strand
ucacaagccgguucagaau

SEQ ID NO: 1812329 - RNA, 19 nt, Homo sapiens
  misc_RNA (1)...(19): siRNA sense strand
uagacuguaugguuauuuc

SEQ ID NO: 1812330 - RNA, 19 nt, Homo sapiens
  misc_RNA (1)...(19): siRNA sense strand
uauucuggcucuuaaagug

SEQ ID NO: 1812331 - RNA, 19 nt, Homo sapiens
  misc_RNA (1)...(19): siRNA sense strand
caauuuccuugucagaauc

SEQ ID NO: 1812332 - RNA, 19 nt, Homo sapiens
  misc_RNA (1)...(19): siRNA sense strand
ucacauucccugacuuugu

SEQ ID NO: 1812333 - RNA, 19 nt, Homo sapiens
  misc_RNA (1)...(19): siRNA sense strand
uggaagacuuugaaauugg

SEQ ID NO: 1812334 - RNA, 19 nt, Homo sapiens
  misc_RNA (1)...(19): siRNA sense strand
aagcuugucuccagucaca

SEQ ID NO: 1812335 - RNA, 19 nt, Homo sapiens
  misc_RNA (1)...(19): siRNA sense strand
gcgcauuccuuugcaagca

SEQ ID NO: 1812336 - RNA, 19 nt, Homo sapiens
  misc_RNA (1)...(19): siRNA sense strand
cagcuagcaaacagucuua

SEQ ID NO: 1812337 - RNA, 19 nt, Homo sapiens
  misc_RNA (1)...(19): siRNA sense strand
uagagaacuucagaaacuu

SEQ ID NO: 1812338 - RNA, 19 nt, Homo sapiens
  misc_RNA (1)...(19): siRNA sense strand
ggaccgaucuaaagaaaac

SEQ ID NO: 1812339 - RNA, 19 nt, Homo sapiens
  misc_RNA (1)...(19): siRNA sense strand
gcuaccagagucuaccuaa

SEQ ID NO: 1812340 - RNA, 19 nt, Homo sapiens
  misc_RNA (1)...(19): siRNA sense strand
aaaguuugaugagcagaga

SEQ ID NO: 1812341 - RNA, 19 nt, Homo sapiens
  misc_RNA (1)...(19): siRNA sense strand
ucuccaggccacugaauaa

SEQ ID NO: 1812342 - RNA, 19 nt, Homo sapiens
  misc_RNA (1)...(19): siRNA sense strand
ggccaaugcucagagaagu

SEQ ID NO: 1812343 - RNA, 19 nt, Homo sapiens
  misc_RNA (1)...(19): siRNA sense strand
ggagccagggaccucauuu

SEQ ID NO: 1812344 - RNA, 19 nt, Homo sapiens
  misc_RNA (1)...(19): siRNA sense strand
aaggucggaugcaugauga

SEQ ID NO: 1812345 - RNA, 19 nt, Homo sapiens
  misc_RNA (1)...(19): siRNA sense strand
aggaaaguuugguaauguu

SEQ ID NO: 1812346 - RNA, 19 nt, Homo sapiens
  misc_RNA (1)...(19): siRNA sense strand
caucggcaccugaaaauaa

SEQ ID NO: 1812347 - RNA, 19 nt, Homo sapiens
  misc_RNA (1)...(19): siRNA sense strand
gauugaaggucggaugcau

SEQ ID NO: 1812348 - RNA, 19 nt, Homo sapiens
  misc_RNA (1)...(19): siRNA sense strand
acauuaagccagagaacuu

SEQ ID NO: 1812349 - RNA, 19 nt, Homo sapiens
  misc_RNA (1)...(19): siRNA sense strand
ggaacaguuuauagagaac

SEQ ID NO: 1812350 - RNA, 19 nt, Homo sapiens
  misc_RNA (1)...(19): siRNA sense strand
gucacaagccgguucagaa

SEQ ID NO: 1812351 - RNA, 19 nt, Homo sapiens
  misc_RNA (1)...(19): siRNA sense strand
agaaauacagucccaccuu

SEQ ID NO: 1812352 - RNA, 19 nt, Homo sapiens
  misc_RNA (1)...(19): siRNA sense strand
gccaaugcucagagaagua

SEQ ID NO: 1812353 - RNA, 19 nt, Homo sapiens
  misc_RNA (1)...(19): siRNA sense strand
ccuuggaguucuuugcuau

SEQ ID NO: 1812354 - RNA, 19 nt, Homo sapiens
  misc_RNA (1)...(19): siRNA sense strand
gucaguacaugcuccaucu

SEQ ID NO: 1812355 - RNA, 19 nt, Homo sapiens
  misc_RNA (1)...(19): siRNA sense strand
ucagaauccauuaccugua

SEQ ID NO: 1812356 - RNA, 19 nt, Homo sapiens
  misc_RNA (1)...(19): siRNA sense strand
uuggaacaguuuauagaga

SEQ ID NO: 1812357 - RNA, 19 nt, Homo sapiens
  misc_RNA (1)...(19): siRNA sense strand
uucuuagacuguaugguua

SEQ ID NO: 1812358 - RNA, 19 nt, Homo sapiens
  misc_RNA (1)...(19): siRNA sense strand
gagaaaagcaaagcaaguu

SEQ ID NO: 1812359 - RNA, 19 nt, Homo sapiens
  misc_RNA (1)...(19): siRNA sense strand
gcaaauucaucaaaaccau

SEQ ID NO: 1812360 - RNA, 19 nt, Homo sapiens
  misc_RNA (1)...(19): siRNA sense strand
gccuuggaguucuuugcua

SEQ ID NO: 1812361 - RNA, 19 nt, Homo sapiens
  misc_RNA (1)...(19): siRNA sense strand
ucuggaauaugcaccacuu

SEQ ID NO: 1812362 - RNA, 19 nt, Homo sapiens
  misc_RNA (1)...(19): siRNA sense strand
cggcauccuaauauucuua

SEQ ID NO: 1812363 - RNA, 19 nt, Homo sapiens
  misc_RNA (1)...(19): siRNA sense strand
ggcagugggcuuuggaaga

SEQ ID NO: 1812364 - RNA, 19 nt, Homo sapiens
  misc_RNA (1)...(19): siRNA sense strand
ccaagagaccuacaaaaga

SEQ ID NO: 1812365 - RNA, 19 nt, Homo sapiens
  misc_RNA (1)...(19): siRNA sense strand
caucagcucagaagagaag

SEQ ID NO: 1812366 - RNA, 19 nt, Homo sapiens
  misc_RNA (1)...(19): siRNA sense strand
agagaacuucagaaacuuu

SEQ ID NO: 1812367 - RNA, 19 nt, Homo sapiens
  misc_RNA (1)...(19): siRNA sense strand
cuaccagagucuaccuaau

SEQ ID NO: 1812368 - RNA, 19 nt, Homo sapiens
  misc_RNA (1)...(19): siRNA sense strand
aagaauaucacggguugaa

SEQ ID NO: 1812369 - RNA, 19 nt, Homo sapiens
  misc_RNA (1)...(19): siRNA sense strand
ucccugacuuuguaacaga

SEQ ID NO: 1812370 - RNA, 19 nt, Homo sapiens
  misc_RNA (1)...(19): siRNA sense strand
caucaaggaucacaaauua

SEQ ID NO: 1812371 - RNA, 19 nt, Homo sapiens
  misc_RNA (1)...(19): siRNA sense strand
gaaaccagcuaauucauga

SEQ ID NO: 1812372 - RNA, 19 nt, Homo sapiens
  misc_RNA (1)...(19): siRNA sense strand
ucaaagagcuucagcaaga

SEQ ID NO: 1812373 - RNA, 19 nt, Homo sapiens
  misc_RNA (1)...(19): siRNA sense strand
gcucauagcuauuaauuca

SEQ ID NO: 1812374 - RNA, 19 nt, Homo sapiens
  misc_RNA (1)...(19): siRNA sense strand
ugaaagaacuugagcuuga

SEQ ID NO: 1812375 - RNA, 19 nt, Homo sapiens
  misc_RNA (1)...(19): siRNA sense strand
gcagaucacuuacaaagau

SEQ ID NO: 1812376 - RNA, 19 nt, Homo sapiens
  misc_RNA (1)...(19): siRNA sense strand
gaagaaagaaggcagagua

SEQ ID NO: 1812377 - RNA, 19 nt, Homo sapiens
  misc_RNA (1)...(19): siRNA sense strand
gaagaugaaaggaagaaua

SEQ ID NO: 1812378 - RNA, 19 nt, Homo sapiens
  misc_RNA (1)...(19): siRNA sense strand
gaagagaguagaaaugaaa

SEQ ID NO: 1812379 - RNA, 19 nt, Homo sapiens
  misc_RNA (1)...(19): siRNA sense strand
cagacaaguucgacauuua

SEQ ID NO: 1812380 - RNA, 19 nt, Homo sapiens
  misc_RNA (1)...(19): siRNA sense strand
gaacgaagagaacuagaaa

SEQ ID NO: 1812381 - RNA, 19 nt, Homo sapiens
  misc_RNA (1)...(19): siRNA sense strand
ugacaaagucgaaaguuua

SEQ ID NO: 1812382 - RNA, 19 nt, Homo sapiens
  misc_RNA (1)...(19): siRNA sense strand
aaagaagccucgaaaguga

SEQ ID NO: 1812383 - RNA, 19 nt, Homo sapiens
  misc_RNA (1)...(19): siRNA sense strand
gaaagaacuugagcuugaa

SEQ ID NO: 1812384 - RNA, 19 nt, Homo sapiens
  misc_RNA (1)...(19): siRNA sense strand
aaaggaagaugauugaaga

SEQ ID NO: 1812385 - RNA, 19 nt, Homo sapiens
  misc_RNA (1)...(19): siRNA sense strand
ggaacucaaucaaucugua

SEQ ID NO: 1812386 - RNA, 19 nt, Homo sapiens
  misc_RNA (1)...(19): siRNA sense strand
acaaagauguggcuaugaa

SEQ ID NO: 1812387 - RNA, 19 nt, Homo sapiens
  misc_RNA (1)...(19): siRNA sense strand
gaaguguacugcaauccaa

SEQ ID NO: 1812388 - RNA, 19 nt, Homo sapiens
  misc_RNA (1)...(19): siRNA sense strand
cuacucagguugccgauuu

SEQ ID NO: 1812389 - RNA, 19 nt, Homo sapiens
  misc_RNA (1)...(19): siRNA sense strand
ggaagagaguagaaaugaa

SEQ ID NO: 1812390 - RNA, 19 nt, Homo sapiens
  misc_RNA (1)...(19): siRNA sense strand
aaagagaguuguaauaugg

SEQ ID NO: 1812391 - RNA, 19 nt, Homo sapiens
  misc_RNA (1)...(19): siRNA sense strand
agacagcccuagagaauga

SEQ ID NO: 1812392 - RNA, 19 nt, Homo sapiens
  misc_RNA (1)...(19): siRNA sense strand
gcuaaagagaguuguaaua

SEQ ID NO: 1812393 - RNA, 19 nt, Homo sapiens
  misc_RNA (1)...(19): siRNA sense strand
agacaaaucugcucacagu

SEQ ID NO: 1812394 - RNA, 19 nt, Homo sapiens
  misc_RNA (1)...(19): siRNA sense strand
gacaggagcagaauauaaa

SEQ ID NO: 1812395 - RNA, 19 nt, Homo sapiens
  misc_RNA (1)...(19): siRNA sense strand
cagaauaucaucaagcuaa

SEQ ID NO: 1812396 - RNA, 19 nt, Homo sapiens
  misc_RNA (1)...(19): siRNA sense strand
gaacucaaucaaucuguaa

SEQ ID NO: 1812397 - RNA, 19 nt, Homo sapiens
  misc_RNA (1)...(19): siRNA sense strand
guaucaaguucgaaucuuu

SEQ ID NO: 1812398 - RNA, 19 nt, Homo sapiens
  misc_RNA (1)...(19): siRNA sense strand
gcaaagagcccaccaucuc

SEQ ID NO: 1812399 - RNA, 19 nt, Homo sapiens
  misc_RNA (1)...(19): siRNA sense strand
accgaaagcucaagaauga

SEQ ID NO: 1812400 - RNA, 19 nt, Homo sapiens
  misc_RNA (1)...(19): siRNA sense strand
aagcagagcugaagcaaag

SEQ ID NO: 1812401 - RNA, 19 nt, Homo sapiens
  misc_RNA (1)...(19): siRNA sense strand
gugacaaagucgaaaguuu

SEQ ID NO: 1812402 - RNA, 19 nt, Homo sapiens
  misc_RNA (1)...(19): siRNA sense strand
ggagacaggagcagaauau

SEQ ID NO: 1812403 - RNA, 19 nt, Homo sapiens
  misc_RNA (1)...(19): siRNA sense strand
gaaaaggaguuaaccaugu

SEQ ID NO: 1812404 - RNA, 19 nt, Homo sapiens
  misc_RNA (1)...(19): siRNA sense strand
gaucacaaauuauccaacu

SEQ ID NO: 1812405 - RNA, 19 nt, Homo sapiens
  misc_RNA (1)...(19): siRNA sense strand
accaagagauugaaacaaa

SEQ ID NO: 1812406 - RNA, 19 nt, Homo sapiens
  misc_RNA (1)...(19): siRNA sense strand
ugaauuagagucugucaaa

SEQ ID NO: 1812407 - RNA, 19 nt, Homo sapiens
  misc_RNA (1)...(19): siRNA sense strand
gaaaggaagaugauugaag

SEQ ID NO: 1812408 - RNA, 19 nt, Homo sapiens
  misc_RNA (1)...(19): siRNA sense strand
ccucgaaagugaaauguau

SEQ ID NO: 1812409 - RNA, 19 nt, Homo sapiens
  misc_RNA (1)...(19): siRNA sense strand
ggcaagcucugcacaaaca

SEQ ID NO: 1812410 - RNA, 19 nt, Homo sapiens
  misc_RNA (1)...(19): siRNA sense strand
gaaaagguauuuacuaugc

SEQ ID NO: 1812411 - RNA, 19 nt, Homo sapiens
  misc_RNA (1)...(19): siRNA sense strand
gcugcaaucuagugacaaa

SEQ ID NO: 1812412 - RNA, 19 nt, Homo sapiens
  misc_RNA (1)...(19): siRNA sense strand
gaacgaaggcagagagaag

SEQ ID NO: 1812413 - RNA, 19 nt, Homo sapiens
  misc_RNA (1)...(19): siRNA sense strand
gaacuugcagucuuucaga

SEQ ID NO: 1812414 - RNA, 19 nt, Homo sapiens
  misc_RNA (1)...(19): siRNA sense strand
uaaccauguuccagaauga

SEQ ID NO: 1812415 - RNA, 19 nt, Homo sapiens
  misc_RNA (1)...(19): siRNA sense strand
gacaaagucgaaaguuuaa

SEQ ID NO: 1812416 - RNA, 19 nt, Homo sapiens
  misc_RNA (1)...(19): siRNA sense strand
ucagacaaguucgacauuu

SEQ ID NO: 1812417 - RNA, 19 nt, Homo sapiens
  misc_RNA (1)...(19): siRNA sense strand
gaagagaagcagagcugaa

SEQ ID NO: 1812418 - RNA, 19 nt, Homo sapiens
  misc_RNA (1)...(19): siRNA sense strand
caaguucgaaucuuuagaa

SEQ ID NO: 1812419 - RNA, 19 nt, Homo sapiens
  misc_RNA (1)...(19): siRNA sense strand
uaccguggcugauguguug

SEQ ID NO: 1812420 - RNA, 19 nt, Homo sapiens
  misc_RNA (1)...(19): siRNA sense strand
ggaacgaagagaacuagaa

SEQ ID NO: 1812421 - RNA, 19 nt, Homo sapiens
  misc_RNA (1)...(19): siRNA sense strand
agaaugaaguguacugcaa

SEQ ID NO: 1812422 - RNA, 19 nt, Homo sapiens
  misc_RNA (1)...(19): siRNA sense strand
gcagaaaugugucaaaagu

SEQ ID NO: 1812423 - RNA, 19 nt, Homo sapiens
  misc_RNA (1)...(19): siRNA sense strand
guuguaauauggaaacuca

SEQ ID NO: 1812424 - RNA, 19 nt, Homo sapiens
  misc_RNA (1)...(19): siRNA sense strand
gcaucaaggaucacaaauu

SEQ ID NO: 1812425 - RNA, 19 nt, Homo sapiens
  misc_RNA (1)...(19): siRNA sense strand
gaaaagaguacccuugaaa

SEQ ID NO: 1812426 - RNA, 19 nt, Homo sapiens
  misc_RNA (1)...(19): siRNA sense strand
caggaucuauuacaacuca

SEQ ID NO: 1812427 - RNA, 19 nt, Homo sapiens
  misc_RNA (1)...(19): siRNA sense strand
gagcagaauauaaagaguu

SEQ ID NO: 1812428 - RNA, 19 nt, Homo sapiens
  misc_RNA (1)...(19): siRNA sense strand
uuacaaagauguggcuaug

SEQ ID NO: 1812429 - RNA, 19 nt, Homo sapiens
  misc_RNA (1)...(19): siRNA sense strand
ccaagaaggcucccuagug

SEQ ID NO: 1812430 - RNA, 19 nt, Homo sapiens
  misc_RNA (1)...(19): siRNA sense strand
gcagaguaaccuacaagaa

SEQ ID NO: 1812431 - RNA, 19 nt, Homo sapiens
  misc_RNA (1)...(19): siRNA sense strand
gggaacagcaagugaaaga

SEQ ID NO: 1812432 - RNA, 19 nt, Homo sapiens
  misc_RNA (1)...(19): siRNA sense strand
agagaugagugauuauuca

SEQ ID NO: 1812433 - RNA, 19 nt, Homo sapiens
  misc_RNA (1)...(19): siRNA sense strand
gaugaucaguuugcagaug

SEQ ID NO: 1812434 - RNA, 19 nt, Homo sapiens
  misc_RNA (1)...(19): siRNA sense strand
aaagauguggcuaugaaua

SEQ ID NO: 1812435 - RNA, 19 nt, Homo sapiens
  misc_RNA (1)...(19): siRNA sense strand
ccagcuaauucaugaguug

SEQ ID NO: 1812436 - RNA, 19 nt, Homo sapiens
  misc_RNA (1)...(19): siRNA sense strand
gaucagaaacaaauugaag

SEQ ID NO: 1812437 - RNA, 19 nt, Homo sapiens
  misc_RNA (1)...(19): siRNA sense strand
caaagcuucuguaaagagu

SEQ ID NO: 1812438 - RNA, 19 nt, Homo sapiens
  misc_RNA (1)...(19): siRNA sense strand
gagcugaagcaaagaguug

SEQ ID NO: 1812439 - RNA, 19 nt, Homo sapiens
  misc_RNA (1)...(19): siRNA sense strand
agaguacccuugaaagaau

SEQ ID NO: 1812440 - RNA, 19 nt, Homo sapiens
  misc_RNA (1)...(19): siRNA sense strand
gaacaauccuuuuaaacag

SEQ ID NO: 1812441 - RNA, 19 nt, Homo sapiens
  misc_RNA (1)...(19): siRNA sense strand
gaucgaucguucugucaau

SEQ ID NO: 1812442 - RNA, 19 nt, Homo sapiens
  misc_RNA (1)...(19): siRNA sense strand
caggcaagcucugcacaaa

SEQ ID NO: 1812443 - RNA, 19 nt, Homo sapiens
  misc_RNA (1)...(19): siRNA sense strand
gaacuugagcuugaauuag

SEQ ID NO: 1812444 - RNA, 19 nt, Homo sapiens
  misc_RNA (1)...(19): siRNA sense strand
ggagaccuaugaccgaaag

SEQ ID NO: 1812445 - RNA, 19 nt, Homo sapiens
  misc_RNA (1)...(19): siRNA sense strand
agacaggagcagaauauaa

SEQ ID NO: 1812446 - RNA, 19 nt, Homo sapiens
  misc_RNA (1)...(19): siRNA sense strand
gauauggauuugcuaagag

SEQ ID NO: 1812447 - RNA, 19 nt, Homo sapiens
  misc_RNA (1)...(19): siRNA sense strand
ucacaagcaccaagagauu

SEQ ID NO: 1812448 - RNA, 19 nt, Homo sapiens
  misc_RNA (1)...(19): siRNA sense strand
ggucaaagagcuucagcaa

SEQ ID NO: 1812449 - RNA, 19 nt, Homo sapiens
  misc_RNA (1)...(19): siRNA sense strand
cgaaaaggcuauagugguu

SEQ ID NO: 1812450 - RNA, 19 nt, Homo sapiens
  misc_RNA (1)...(19): siRNA sense strand
ucagaaagaacuacggaaa

SEQ ID NO: 1812451 - RNA, 19 nt, Homo sapiens
  misc_RNA (1)...(19): siRNA sense strand
gaugaaaggaagaauaaag

SEQ ID NO: 1812452 - RNA, 19 nt, Homo sapiens
  misc_RNA (1)...(19): siRNA sense strand
caacuucgaaaccagcuaa

SEQ ID NO: 1812453 - RNA, 19 nt, Homo sapiens
  misc_RNA (1)...(19): siRNA sense strand
gaacagcaagugaaagaac

SEQ ID NO: 1812454 - RNA, 19 nt, Homo sapiens
  misc_RNA (1)...(19): siRNA sense strand
ucagacagcccuagagaau

SEQ ID NO: 1812455 - RNA, 19 nt, Homo sapiens
  misc_RNA (1)...(19): siRNA sense strand
agacaaguucgacauuuaa

SEQ ID NO: 1812456 - RNA, 19 nt, Homo sapiens
  misc_RNA (1)...(19): siRNA sense strand
gcaaucuagugacaaaguc

SEQ ID NO: 1812457 - RNA, 19 nt, Homo sapiens
  misc_RNA (1)...(19): siRNA sense strand
uaaggauaaugaggaguuu

SEQ ID NO: 1812458 - RNA, 19 nt, Homo sapiens
  misc_RNA (1)...(19): siRNA sense strand
aagcuucuguaaagaguuu

SEQ ID NO: 1812459 - RNA, 19 nt, Homo sapiens
  misc_RNA (1)...(19): siRNA sense strand
aaagaguacccuugaaaga

SEQ ID NO: 1812460 - RNA, 19 nt, Homo sapiens
  misc_RNA (1)...(19): siRNA sense strand
guagaucagaaacaaauug

SEQ ID NO: 1812461 - RNA, 19 nt, Homo sapiens
  misc_RNA (1)...(19): siRNA sense strand
aacuugagcuugaauuaga

SEQ ID NO: 1812462 - RNA, 19 nt, Homo sapiens
  misc_RNA (1)...(19): siRNA sense strand
gaugcacccuguauugagu

SEQ ID NO: 1812463 - RNA, 19 nt, Homo sapiens
  misc_RNA (1)...(19): siRNA sense strand
ggagcucccucuuaauagg

SEQ ID NO: 1812464 - RNA, 19 nt, Homo sapiens
  misc_RNA (1)...(19): siRNA sense strand
aagcauaacugaggcacuu

SEQ ID NO: 1812465 - RNA, 19 nt, Homo sapiens
  misc_RNA (1)...(19): siRNA sense strand
agauauggauuugcuaaga

SEQ ID NO: 1812466 - RNA, 19 nt, Homo sapiens
  misc_RNA (1)...(19): siRNA sense strand
gcaccaagagauugaaaca

SEQ ID NO: 1812467 - RNA, 19 nt, Homo sapiens
  misc_RNA (1)...(19): siRNA sense strand
gaguacccuugaaagaauu

SEQ ID NO: 1812468 - RNA, 19 nt, Homo sapiens
  misc_RNA (1)...(19): siRNA sense strand
gaaagaaggcagaguaacc

SEQ ID NO: 1812469 - RNA, 19 nt, Homo sapiens
  misc_RNA (1)...(19): siRNA sense strand
gaaagggaacgaagagaac

SEQ ID NO: 1812470 - RNA, 19 nt, Homo sapiens
  misc_RNA (1)...(19): siRNA sense strand
caacaggacgggcuaugua

SEQ ID NO: 1812471 - RNA, 19 nt, Homo sapiens
  misc_RNA (1)...(19): siRNA sense strand
ggaagaacagccugaagaa

SEQ ID NO: 1812472 - RNA, 19 nt, Homo sapiens
  misc_RNA (1)...(19): siRNA sense strand
ccauggaggugauugagaa

SEQ ID NO: 1812473 - RNA, 19 nt, Homo sapiens
  misc_RNA (1)...(19): siRNA sense strand
cagaagaaguuauugugau

SEQ ID NO: 1812474 - RNA, 19 nt, Homo sapiens
  misc_RNA (1)...(19): siRNA sense strand
gaaccugaaggacacacua

SEQ ID NO: 1812475 - RNA, 19 nt, Homo sapiens
  misc_RNA (1)...(19): siRNA sense strand
gcuauguaccguccaacua

SEQ ID NO: 1812476 - RNA, 19 nt, Homo sapiens
  misc_RNA (1)...(19): siRNA sense strand
gacagaagaaguuauugug

SEQ ID NO: 1812477 - RNA, 19 nt, Homo sapiens
  misc_RNA (1)...(19): siRNA sense strand
aggaggagcucaacuucga

SEQ ID NO: 1812478 - RNA, 19 nt, Homo sapiens
  misc_RNA (1)...(19): siRNA sense strand
cggaagaacagccugaaga

SEQ ID NO: 1812479 - RNA, 19 nt, Homo sapiens
  misc_RNA (1)...(19): siRNA sense strand
uggacgagcugguggaaca

SEQ ID NO: 1812480 - RNA, 19 nt, Homo sapiens
  misc_RNA (1)...(19): siRNA sense strand
ugaacgagcggcugugguu

SEQ ID NO: 1812481 - RNA, 19 nt, Homo sapiens
  misc_RNA (1)...(19): siRNA sense strand
gaagaacagccugaagaag

SEQ ID NO: 1812482 - RNA, 19 nt, Homo sapiens
  misc_RNA (1)...(19): siRNA sense strand
ggcaagacgcgcaggaaga

SEQ ID NO: 1812483 - RNA, 19 nt, Homo sapiens
  misc_RNA (1)...(19): siRNA sense strand
gaagaaguuauugugauag

SEQ ID NO: 1812484 - RNA, 19 nt, Homo sapiens
  misc_RNA (1)...(19): siRNA sense strand
acagaagaaguuauuguga

SEQ ID NO: 1812485 - RNA, 19 nt, Homo sapiens
  misc_RNA (1)...(19): siRNA sense strand
gcugguggaacacuacaaa

SEQ ID NO: 1812486 - RNA, 19 nt, Homo sapiens
  misc_RNA (1)...(19): siRNA sense strand
gggagaccauggaggugau

SEQ ID NO: 1812487 - RNA, 19 nt, Homo sapiens
  misc_RNA (1)...(19): siRNA sense strand
caucuacgaccucaacauc

SEQ ID NO: 1812488 - RNA, 19 nt, Homo sapiens
  misc_RNA (1)...(19): siRNA sense strand
acacuaggccucggcaaga

SEQ ID NO: 1812489 - RNA, 19 nt, Homo sapiens
  misc_RNA (1)...(19): siRNA sense strand
cagggaagaacaaacacuu

SEQ ID NO: 1812490 - RNA, 19 nt, Homo sapiens
  misc_RNA (1)...(19): siRNA sense strand
cgucagggaagaacaaaca

SEQ ID NO: 1812491 - RNA, 19 nt, Homo sapiens
  misc_RNA (1)...(19): siRNA sense strand
gcaagacgcgcaggaagac

SEQ ID NO: 1812492 - RNA, 19 nt, Homo sapiens
  misc_RNA (1)...(19): siRNA sense strand
cgaggaggagcucaacuuc

SEQ ID NO: 1812493 - RNA, 19 nt, Homo sapiens
  misc_RNA (1)...(19): siRNA sense strand
ucaccgucauggagaagug

SEQ ID NO: 1812494 - RNA, 19 nt, Homo sapiens
  misc_RNA (1)...(19): siRNA sense strand
ugauugagaagccggagaa

SEQ ID NO: 1812495 - RNA, 19 nt, Homo sapiens
  misc_RNA (1)...(19): siRNA sense strand
gggcagagagugguacuac

SEQ ID NO: 1812496 - RNA, 19 nt, Homo sapiens
  misc_RNA (1)...(19): siRNA sense strand
ccgaggaggagcucaacuu

SEQ ID NO: 1812497 - RNA, 19 nt, Homo sapiens
  misc_RNA (1)...(19): siRNA sense strand
agaacaaacacuucaaggu

SEQ ID NO: 1812498 - RNA, 19 nt, Homo sapiens
  misc_RNA (1)...(19): siRNA sense strand
cuuaaagcgucagggaaga

SEQ ID NO: 1812499 - RNA, 19 nt, Homo sapiens
  misc_RNA (1)...(19): siRNA sense strand
uugagaagccggagaacga

SEQ ID NO: 1812500 - RNA, 19 nt, Homo sapiens
  misc_RNA (1)...(19): siRNA sense strand
ggagcuggacaucaagaag

SEQ ID NO: 1812501 - RNA, 19 nt, Homo sapiens
  misc_RNA (1)...(19): siRNA sense strand
gcgucaccgucauggagaa

SEQ ID NO: 1812502 - RNA, 19 nt, Homo sapiens
  misc_RNA (1)...(19): siRNA sense strand
gaaagacaaacucgaauua

SEQ ID NO: 1812503 - RNA, 19 nt, Homo sapiens
  misc_RNA (1)...(19): siRNA sense strand
gcaacagaauuacagagua

SEQ ID NO: 1812504 - RNA, 19 nt, Homo sapiens
  misc_RNA (1)...(19): siRNA sense strand
caauggaaaucuuagcaua

SEQ ID NO: 1812505 - RNA, 19 nt, Homo sapiens
  misc_RNA (1)...(19): siRNA sense strand
caacagaauuacagaguau

SEQ ID NO: 1812506 - RNA, 19 nt, Homo sapiens
  misc_RNA (1)...(19): siRNA sense strand
gaaagucgacaauuaaguu

SEQ ID NO: 1812507 - RNA, 19 nt, Homo sapiens
  misc_RNA (1)...(19): siRNA sense strand
gguaaucacuccugaagau

SEQ ID NO: 1812508 - RNA, 19 nt, Homo sapiens
  misc_RNA (1)...(19): siRNA sense strand
guacacacucaguuaauua

SEQ ID NO: 1812509 - RNA, 19 nt, Homo sapiens
  misc_RNA (1)...(19): siRNA sense strand
ggagagagcagaaagacaa

SEQ ID NO: 1812510 - RNA, 19 nt, Homo sapiens
  misc_RNA (1)...(19): siRNA sense strand
ugacgaaauugaugaaguu

SEQ ID NO: 1812511 - RNA, 19 nt, Homo sapiens
  misc_RNA (1)...(19): siRNA sense strand
gcagaaagacaaacucgaa

SEQ ID NO: 1812512 - RNA, 19 nt, Homo sapiens
  misc_RNA (1)...(19): siRNA sense strand
guuugaagaugacgaaauu

SEQ ID NO: 1812513 - RNA, 19 nt, Homo sapiens
  misc_RNA (1)...(19): siRNA sense strand
gcagcaguauggagauaaa

SEQ ID NO: 1812514 - RNA, 19 nt, Homo sapiens
  misc_RNA (1)...(19): siRNA sense strand
ggauucagcucaauaugca

SEQ ID NO: 1812515 - RNA, 19 nt, Homo sapiens
  misc_RNA (1)...(19): siRNA sense strand
gaagaugacgaaauugaug

SEQ ID NO: 1812516 - RNA, 19 nt, Homo sapiens
  misc_RNA (1)...(19): siRNA sense strand
gguacacacucaguuaauu

SEQ ID NO: 1812517 - RNA, 19 nt, Homo sapiens
  misc_RNA (1)...(19): siRNA sense strand
gcaagcugcugaaguuucu

SEQ ID NO: 1812518 - RNA, 19 nt, Homo sapiens
  misc_RNA (1)...(19): siRNA sense strand
cugugaaagucgacaauua

SEQ ID NO: 1812519 - RNA, 19 nt, Homo sapiens
  misc_RNA (1)...(19): siRNA sense strand
ggaucuggcucuucuugug

SEQ ID NO: 1812520 - RNA, 19 nt, Homo sapiens
  misc_RNA (1)...(19): siRNA sense strand
caaccuucauucaguauca

SEQ ID NO: 1812521 - RNA, 19 nt, Homo sapiens
  misc_RNA (1)...(19): siRNA sense strand
uagcaauguuugaagauga

SEQ ID NO: 1812522 - RNA, 19 nt, Homo sapiens
  misc_RNA (1)...(19): siRNA sense strand
aagacaaacucgaauuaug

SEQ ID NO: 1812523 - RNA, 19 nt, Homo sapiens
  misc_RNA (1)...(19): siRNA sense strand
gcaggaaugggauggcuuu

SEQ ID NO: 1812524 - RNA, 19 nt, Homo sapiens
  misc_RNA (1)...(19): siRNA sense strand
uauaagcuuugcaacagaa

SEQ ID NO: 1812525 - RNA, 19 nt, Homo sapiens
  misc_RNA (1)...(19): siRNA sense strand
uaucacaacucugcugaga

SEQ ID NO: 1812526 - RNA, 19 nt, Homo sapiens
  misc_RNA (1)...(19): siRNA sense strand
aaagauugcucaggacuuc

SEQ ID NO: 1812527 - RNA, 19 nt, Homo sapiens
  misc_RNA (1)...(19): siRNA sense strand
ucaaguaguggaaggagua

SEQ ID NO: 1812528 - RNA, 19 nt, Homo sapiens
  misc_RNA (1)...(19): siRNA sense strand
gauguauucuuuaggugau

SEQ ID NO: 1812529 - RNA, 19 nt, Homo sapiens
  misc_RNA (1)...(19): siRNA sense strand
ugugaaagucgacaauuaa

SEQ ID NO: 1812530 - RNA, 19 nt, Homo sapiens
  misc_RNA (1)...(19): siRNA sense strand
caaacucgaauuauggauu

SEQ ID NO: 1812531 - RNA, 19 nt, Homo sapiens
  misc_RNA (1)...(19): siRNA sense strand
aagcuuugcaacagaauua

SEQ ID NO: 1812532 - RNA, 19 nt, Homo sapiens
  misc_RNA (1)...(19): siRNA sense strand
ccacaggauuggcccacuu

SEQ ID NO: 1812533 - RNA, 19 nt, Homo sapiens
  misc_RNA (1)...(19): siRNA sense strand
ugaggaugaucuucucgaa

SEQ ID NO: 1812534 - RNA, 19 nt, Homo sapiens
  misc_RNA (1)...(19): siRNA sense strand
guacagggaagucuauaag

SEQ ID NO: 1812535 - RNA, 19 nt, Homo sapiens
  misc_RNA (1)...(19): siRNA sense strand
gaucuggcucuucuuguga

SEQ ID NO: 1812536 - RNA, 19 nt, Homo sapiens
  misc_RNA (1)...(19): siRNA sense strand
gcagcuaguccaaugucua

SEQ ID NO: 1812537 - RNA, 19 nt, Homo sapiens
  misc_RNA (1)...(19): siRNA sense strand
gaccagacaggagaacuuu

SEQ ID NO: 1812538 - RNA, 19 nt, Homo sapiens
  misc_RNA (1)...(19): siRNA sense strand
cagcaauaaugcgaacaaa

SEQ ID NO: 1812539 - RNA, 19 nt, Homo sapiens
  misc_RNA (1)...(19): siRNA sense strand
uauccgagacuacaaauca

SEQ ID NO: 1812540 - RNA, 19 nt, Homo sapiens
  misc_RNA (1)...(19): siRNA sense strand
cugcaaccuucauucagua

SEQ ID NO: 1812541 - RNA, 19 nt, Homo sapiens
  misc_RNA (1)...(19): siRNA sense strand
gaauuacagaguaugaugu

SEQ ID NO: 1812542 - RNA, 19 nt, Homo sapiens
  misc_RNA (1)...(19): siRNA sense strand
ggaguacagggaagucuau

SEQ ID NO: 1812543 - RNA, 19 nt, Homo sapiens
  misc_RNA (1)...(19): siRNA sense strand
agggaagucuauaagcuuu

SEQ ID NO: 1812544 - RNA, 19 nt, Homo sapiens
  misc_RNA (1)...(19): siRNA sense strand
gcagcaauaaugcgaacaa

SEQ ID NO: 1812545 - RNA, 19 nt, Homo sapiens
  misc_RNA (1)...(19): siRNA sense strand
ccaauguugucgcaaugga

SEQ ID NO: 1812546 - RNA, 19 nt, Homo sapiens
  misc_RNA (1)...(19): siRNA sense strand
agaaagacaaacucgaauu

SEQ ID NO: 1812547 - RNA, 19 nt, Homo sapiens
  misc_RNA (1)...(19): siRNA sense strand
ggaaugggauggcuuuucu

SEQ ID NO: 1812548 - RNA, 19 nt, Homo sapiens
  misc_RNA (1)...(19): siRNA sense strand
ucuauaagcuuugcaacag

SEQ ID NO: 1812549 - RNA, 19 nt, Homo sapiens
  misc_RNA (1)...(19): siRNA sense strand
agacaaacucgaauuaugg

SEQ ID NO: 1812550 - RNA, 19 nt, Homo sapiens
  misc_RNA (1)...(19): siRNA sense strand
gaagacugcuaaaauacau

SEQ ID NO: 1812551 - RNA, 19 nt, Homo sapiens
  misc_RNA (1)...(19): siRNA sense strand
gagauaaaacccaauguug

SEQ ID NO: 1812552 - RNA, 19 nt, Homo sapiens
  misc_RNA (1)...(19): siRNA sense strand
ggacuuccucaacucuauu

SEQ ID NO: 1812553 - RNA, 19 nt, Homo sapiens
  misc_RNA (1)...(19): siRNA sense strand
gguagaagaugugguacac

SEQ ID NO: 1812554 - RNA, 19 nt, Homo sapiens
  misc_RNA (1)...(19): siRNA sense strand
gagagagcagaaagacaaa

SEQ ID NO: 1812555 - RNA, 19 nt, Homo sapiens
  misc_RNA (1)...(19): siRNA sense strand
gacgaaauugaugaaguua

SEQ ID NO: 1812556 - RNA, 19 nt, Homo sapiens
  misc_RNA (1)...(19): siRNA sense strand
gcaauaaugcgaacaaaag

SEQ ID NO: 1812557 - RNA, 19 nt, Homo sapiens
  misc_RNA (1)...(19): siRNA sense strand
cacacucaguuaauuaauc

SEQ ID NO: 1812558 - RNA, 19 nt, Homo sapiens
  misc_RNA (1)...(19): siRNA sense strand
ggaagucuauaagcuuugc

SEQ ID NO: 1812559 - RNA, 19 nt, Homo sapiens
  misc_RNA (1)...(19): siRNA sense strand
cuuagcauauuuagcguau

SEQ ID NO: 1812560 - RNA, 19 nt, Homo sapiens
  misc_RNA (1)...(19): siRNA sense strand
gacaaacucgaauuaugga

SEQ ID NO: 1812561 - RNA, 19 nt, Homo sapiens
  misc_RNA (1)...(19): siRNA sense strand
cuauaagcuuugcaacaga

SEQ ID NO: 1812562 - RNA, 19 nt, Homo sapiens
  misc_RNA (1)...(19): siRNA sense strand
gaauggagagagcagaaag

SEQ ID NO: 1812563 - RNA, 19 nt, Homo sapiens
  misc_RNA (1)...(19): siRNA sense strand
caggagaacuuuuagcaau

SEQ ID NO: 1812564 - RNA, 19 nt, Homo sapiens
  misc_RNA (1)...(19): siRNA sense strand
ccagacaggagaacuuuua

SEQ ID NO: 1812565 - RNA, 19 nt, Homo sapiens
  misc_RNA (1)...(19): siRNA sense strand
gcaauggaaaucuuagcau

SEQ ID NO: 1812566 - RNA, 19 nt, Homo sapiens
  misc_RNA (1)...(19): siRNA sense strand
caaugucuacugcaacuuc

SEQ ID NO: 1812567 - RNA, 19 nt, Homo sapiens
  misc_RNA (1)...(19): siRNA sense strand
caucagagaggccauucga

SEQ ID NO: 1812568 - RNA, 19 nt, Homo sapiens
  misc_RNA (1)...(19): siRNA sense strand
cagaguaugauguauucuu

SEQ ID NO: 1812569 - RNA, 19 nt, Homo sapiens
  misc_RNA (1)...(19): siRNA sense strand
acagggaagucuauaagcu

SEQ ID NO: 1812570 - RNA, 19 nt, Homo sapiens
  misc_RNA (1)...(19): siRNA sense strand
ccaaauuucgagacugguu

SEQ ID NO: 1812571 - RNA, 19 nt, Homo sapiens
  misc_RNA (1)...(19): siRNA sense strand
aaucacuccugaagaucuu

SEQ ID NO: 1812572 - RNA, 19 nt, Homo sapiens
  misc_RNA (1)...(19): siRNA sense strand
ggagauaaaacccaauguu

SEQ ID NO: 1812573 - RNA, 19 nt, Homo sapiens
  misc_RNA (1)...(19): siRNA sense strand
uacggcagcuaguccaaug

SEQ ID NO: 1812574 - RNA, 19 nt, Homo sapiens
  misc_RNA (1)...(19): siRNA sense strand
aauuauggauucagcucaa

SEQ ID NO: 1812575 - RNA, 19 nt, Homo sapiens
  misc_RNA (1)...(19): siRNA sense strand
caacucuauugaccagaca

SEQ ID NO: 1812576 - RNA, 19 nt, Homo sapiens
  misc_RNA (1)...(19): siRNA sense strand
gagacuacaaaucaaagau

SEQ ID NO: 1812577 - RNA, 19 nt, Homo sapiens
  misc_RNA (1)...(19): siRNA sense strand
gaugcgcaaagauaagaaa

SEQ ID NO: 1812578 - RNA, 19 nt, Homo sapiens
  misc_RNA (1)...(19): siRNA sense strand
gugguacacacucaguuaa

SEQ ID NO: 1812579 - RNA, 19 nt, Homo sapiens
  misc_RNA (1)...(19): siRNA sense strand
ucugcaaccuucauucagu

SEQ ID NO: 1812580 - RNA, 19 nt, Homo sapiens
  misc_RNA (1)...(19): siRNA sense strand
gaauaauacggcagcuagu

SEQ ID NO: 1812581 - RNA, 19 nt, Homo sapiens
  misc_RNA (1)...(19): siRNA sense strand
ggagaacuuuuagcaaugu

SEQ ID NO: 1812582 - RNA, 19 nt, Homo sapiens
  misc_RNA (1)...(19): siRNA sense strand
caaaggcaucgaugaggau

SEQ ID NO: 1812583 - RNA, 19 nt, Homo sapiens
  misc_RNA (1)...(19): siRNA sense strand
uugaagaugacgaaauuga

SEQ ID NO: 1812584 - RNA, 19 nt, Homo sapiens
  misc_RNA (1)...(19): siRNA sense strand
ggaaggaguacagggaagu

SEQ ID NO: 1812585 - RNA, 19 nt, Homo sapiens
  misc_RNA (1)...(19): siRNA sense strand
cgaugaggaugaucuucuc

SEQ ID NO: 1812586 - RNA, 19 nt, Homo sapiens
  misc_RNA (1)...(19): siRNA sense strand
uuagcaauguuugaagaug

SEQ ID NO: 1812587 - RNA, 19 nt, Homo sapiens
  misc_RNA (1)...(19): siRNA sense strand
agaauuacagaguaugaug

SEQ ID NO: 1812588 - RNA, 19 nt, Homo sapiens
  misc_RNA (1)...(19): siRNA sense strand
ugucgcaauggaaaucuua

SEQ ID NO: 1812589 - RNA, 19 nt, Homo sapiens
  misc_RNA (1)...(19): siRNA sense strand
cagggaagucuauaagcuu

SEQ ID NO: 1812590 - RNA, 19 nt, Homo sapiens
  misc_RNA (1)...(19): siRNA sense strand
acagaauuacagaguauga

SEQ ID NO: 1812591 - RNA, 19 nt, Homo sapiens
  misc_RNA (1)...(19): siRNA sense strand
ugaagaugacgaaauugau

SEQ ID NO: 1812592 - RNA, 19 nt, Homo sapiens
  misc_RNA (1)...(19): siRNA sense strand
cagaaagacaaacucgaau

SEQ ID NO: 1812593 - RNA, 19 nt, Homo sapiens
  misc_RNA (1)...(19): siRNA sense strand
uaguggaucuggcucuucu

SEQ ID NO: 1812594 - RNA, 19 nt, Homo sapiens
  misc_RNA (1)...(19): siRNA sense strand
guuaguggaucuggcucuu

SEQ ID NO: 1812595 - RNA, 19 nt, Homo sapiens
  misc_RNA (1)...(19): siRNA sense strand
gauaaaacccaauguuguc

SEQ ID NO: 1812596 - RNA, 19 nt, Homo sapiens
  misc_RNA (1)...(19): siRNA sense strand
gacaauuaaguuucuccaa

SEQ ID NO: 1812597 - RNA, 19 nt, Homo sapiens
  misc_RNA (1)...(19): siRNA sense strand
aagaugacgaaauugauga

SEQ ID NO: 1812598 - RNA, 19 nt, Homo sapiens
  misc_RNA (1)...(19): siRNA sense strand
cuucagccaugccauuucu

SEQ ID NO: 1812599 - RNA, 19 nt, Homo sapiens
  misc_RNA (1)...(19): siRNA sense strand
ugaaagucgacaauuaagu

SEQ ID NO: 1812600 - RNA, 19 nt, Homo sapiens
  misc_RNA (1)...(19): siRNA sense strand
aguccaaugucuacugcaa

SEQ ID NO: 1812601 - RNA, 19 nt, Homo sapiens
  misc_RNA (1)...(19): siRNA sense strand
gagagcagaaagacaaacu

SEQ ID NO: 1812602 - RNA, 19 nt, Homo sapiens
  misc_RNA (1)...(19): siRNA sense strand
gaucugcgcugaccucuuc

SEQ ID NO: 1812603 - RNA, 19 nt, Homo sapiens
  misc_RNA (1)...(19): siRNA sense strand
gagauggccuugaagaaca

SEQ ID NO: 1812604 - RNA, 19 nt, Homo sapiens
  misc_RNA (1)...(19): siRNA sense strand
ccaaagacuucucuguguu

SEQ ID NO: 1812605 - RNA, 19 nt, Homo sapiens
  misc_RNA (1)...(19): siRNA sense strand
ccagguggcugagauugua

SEQ ID NO: 1812606 - RNA, 19 nt, Homo sapiens
  misc_RNA (1)...(19): siRNA sense strand
guagagaagucccucaagu

SEQ ID NO: 1812607 - RNA, 19 nt, Homo sapiens
  misc_RNA (1)...(19): siRNA sense strand
ucgcagaggugaagagcua

SEQ ID NO: 1812608 - RNA, 19 nt, Homo sapiens
  misc_RNA (1)...(19): siRNA sense strand
gggagaacgucaucagugu

SEQ ID NO: 1812609 - RNA, 19 nt, Homo sapiens
  misc_RNA (1)...(19): siRNA sense strand
gcgagcagguggacaacaa

SEQ ID NO: 1812610 - RNA, 19 nt, Homo sapiens
  misc_RNA (1)...(19): siRNA sense strand
ccaaagagaaggcagagaa

SEQ ID NO: 1812611 - RNA, 19 nt, Homo sapiens
  misc_RNA (1)...(19): siRNA sense strand
caaagacuucucuguguuu

SEQ ID NO: 1812612 - RNA, 19 nt, Homo sapiens
  misc_RNA (1)...(19): siRNA sense strand
ugauugagcugguggacaa

SEQ ID NO: 1812613 - RNA, 19 nt, Homo sapiens
  misc_RNA (1)...(19): siRNA sense strand
agaagucacucaccaagga

SEQ ID NO: 1812614 - RNA, 19 nt, Homo sapiens
  misc_RNA (1)...(19): siRNA sense strand
aggaagagaucacgaagga

SEQ ID NO: 1812615 - RNA, 19 nt, Homo sapiens
  misc_RNA (1)...(19): siRNA sense strand
uggacgagcugaagcacua

SEQ ID NO: 1812616 - RNA, 19 nt, Homo sapiens
  misc_RNA (1)...(19): siRNA sense strand
ccgcagaggugguggugaa

SEQ ID NO: 1812617 - RNA, 19 nt, Homo sapiens
  misc_RNA (1)...(19): siRNA sense strand
ucccagagauuguggcaaa

SEQ ID NO: 1812618 - RNA, 19 nt, Homo sapiens
  misc_RNA (1)...(19): siRNA sense strand
ggagaaggccaaagagaag

SEQ ID NO: 1812619 - RNA, 19 nt, Homo sapiens
  misc_RNA (1)...(19): siRNA sense strand
gcgaucaccucggcuguug

SEQ ID NO: 1812620 - RNA, 19 nt, Homo sapiens
  misc_RNA (1)...(19): siRNA sense strand
acacaguccugcagucaga

SEQ ID NO: 1812621 - RNA, 19 nt, Homo sapiens
  misc_RNA (1)...(19): siRNA sense strand
agaagucccucaaguccuu

SEQ ID NO: 1812622 - RNA, 19 nt, Homo sapiens
  misc_RNA (1)...(19): siRNA sense strand
ucgaggagauggccuugaa

SEQ ID NO: 1812623 - RNA, 19 nt, Homo sapiens
  misc_RNA (1)...(19): siRNA sense strand
cagaggugguggugaagaa

SEQ ID NO: 1812624 - RNA, 19 nt, Homo sapiens
  misc_RNA (1)...(19): siRNA sense strand
gaacaagaagcuggaggaa

SEQ ID NO: 1812625 - RNA, 19 nt, Homo sapiens
  misc_RNA (1)...(19): siRNA sense strand
gaucaagaaggaacuuuca

SEQ ID NO: 1812626 - RNA, 19 nt, Homo sapiens
  misc_RNA (1)...(19): siRNA sense strand
ucaagaaggaacuuucaaa

SEQ ID NO: 1812627 - RNA, 19 nt, Homo sapiens
  misc_RNA (1)...(19): siRNA sense strand
gggagaggcccagcaauga

SEQ ID NO: 1812628 - RNA, 19 nt, Homo sapiens
  misc_RNA (1)...(19): siRNA sense strand
ccacaucgcugcucauccu

SEQ ID NO: 1812629 - RNA, 19 nt, Homo sapiens
  misc_RNA (1)...(19): siRNA sense strand
uuccugcgcuuccagcuua

SEQ ID NO: 1812630 - RNA, 19 nt, Homo sapiens
  misc_RNA (1)...(19): siRNA sense strand
ugaaggacaagaacaagaa

SEQ ID NO: 1812631 - RNA, 19 nt, Homo sapiens
  misc_RNA (1)...(19): siRNA sense strand
aggagaggcugaagaagga

SEQ ID NO: 1812632 - RNA, 19 nt, Homo sapiens
  misc_RNA (1)...(19): siRNA sense strand
gaggagauggccuugaaga

SEQ ID NO: 1812633 - RNA, 19 nt, Homo sapiens
  misc_RNA (1)...(19): siRNA sense strand
aggagaagguggaggagaa

SEQ ID NO: 1812634 - RNA, 19 nt, Homo sapiens
  misc_RNA (1)...(19): siRNA sense strand
ggacaaagaagauguucac

SEQ ID NO: 1812635 - RNA, 19 nt, Homo sapiens
  misc_RNA (1)...(19): siRNA sense strand
aaaggaagcacaggugaaa

SEQ ID NO: 1812636 - RNA, 19 nt, Homo sapiens
  misc_RNA (1)...(19): siRNA sense strand
agaaggagaaggccaaaga

SEQ ID NO: 1812637 - RNA, 19 nt, Homo sapiens
  misc_RNA (1)...(19): siRNA sense strand
uugaggaacugccugaaug

SEQ ID NO: 1812638 - RNA, 19 nt, Homo sapiens
  misc_RNA (1)...(19): siRNA sense strand
ugcaggagaucaagaagga

SEQ ID NO: 1812639 - RNA, 19 nt, Homo sapiens
  misc_RNA (1)...(19): siRNA sense strand
gagcagaagaagucacuca

SEQ ID NO: 1812640 - RNA, 19 nt, Homo sapiens
  misc_RNA (1)...(19): siRNA sense strand
cggcugcgcuccauaaagg

SEQ ID NO: 1812641 - RNA, 19 nt, Homo sapiens
  misc_RNA (1)...(19): siRNA sense strand
gauuguagcaacacuggaa

SEQ ID NO: 1812642 - RNA, 19 nt, Homo sapiens
  misc_RNA (1)...(19): siRNA sense strand
ucaagcacauucccgaaag

SEQ ID NO: 1812643 - RNA, 19 nt, Homo sapiens
  misc_RNA (1)...(19): siRNA sense strand
ggacuacagcgaggacuug

SEQ ID NO: 1812644 - RNA, 19 nt, Homo sapiens
  misc_RNA (1)...(19): siRNA sense strand
caaaggaagcacaggugaa

SEQ ID NO: 1812645 - RNA, 19 nt, Homo sapiens
  misc_RNA (1)...(19): siRNA sense strand
ggagauggccuugaagaac

SEQ ID NO: 1812646 - RNA, 19 nt, Homo sapiens
  misc_RNA (1)...(19): siRNA sense strand
gaaucuaaagccagcaaga

SEQ ID NO: 1812647 - RNA, 19 nt, Homo sapiens
  misc_RNA (1)...(19): siRNA sense strand
gcgaggacuugcaggagau

SEQ ID NO: 1812648 - RNA, 19 nt, Homo sapiens
  misc_RNA (1)...(19): siRNA sense strand
caagcugauugcugaggaa

SEQ ID NO: 1812649 - RNA, 19 nt, Homo sapiens
  misc_RNA (1)...(19): siRNA sense strand
gcagacgacaagcugauug

SEQ ID NO: 1812650 - RNA, 19 nt, Homo sapiens
  misc_RNA (1)...(19): siRNA sense strand
gaagcaagucaagcacauu

SEQ ID NO: 1812651 - RNA, 19 nt, Homo sapiens
  misc_RNA (1)...(19): siRNA sense strand
cauaaaggcagacgacaag

SEQ ID NO: 1812652 - RNA, 19 nt, Homo sapiens
  misc_RNA (1)...(19): siRNA sense strand
aggaggaugugcaggacua

SEQ ID NO: 1812653 - RNA, 19 nt, Homo sapiens
  misc_RNA (1)...(19): siRNA sense strand
cagagauuguggcaaagga

SEQ ID NO: 1812654 - RNA, 19 nt, Homo sapiens
  misc_RNA (1)...(19): siRNA sense strand
ugaagcaagucaagcacau

SEQ ID NO: 1812655 - RNA, 19 nt, Homo sapiens
  misc_RNA (1)...(19): siRNA sense strand
cuaaagccagcaagagauu

SEQ ID NO: 1812656 - RNA, 19 nt, Homo sapiens
  misc_RNA (1)...(19): siRNA sense strand
gaaggaggaaaucgacauc

SEQ ID NO: 1812657 - RNA, 19 nt, Homo sapiens
  misc_RNA (1)...(19): siRNA sense strand
accaaagacuucucugugu

SEQ ID NO: 1812658 - RNA, 19 nt, Homo sapiens
  misc_RNA (1)...(19): siRNA sense strand
gcccagcaaugaggaaauc

SEQ ID NO: 1812659 - RNA, 19 nt, Homo sapiens
  misc_RNA (1)...(19): siRNA sense strand
cgagugccuucgcauagug

SEQ ID NO: 1812660 - RNA, 19 nt, Homo sapiens
  misc_RNA (1)...(19): siRNA sense strand
cagaaaugccugacacagu

SEQ ID NO: 1812661 - RNA, 19 nt, Homo sapiens
  misc_RNA (1)...(19): siRNA sense strand
gcagacccucccagagauu

SEQ ID NO: 1812662 - RNA, 19 nt, Homo sapiens
  misc_RNA (1)...(19): siRNA sense strand
gugagaaggagcugcagaa

SEQ ID NO: 1812663 - RNA, 19 nt, Homo sapiens
  misc_RNA (1)...(19): siRNA sense strand
gaaggagaaggccaaagag

SEQ ID NO: 1812664 - RNA, 19 nt, Homo sapiens
  misc_RNA (1)...(19): siRNA sense strand
ccgcagcacuggaugaaaa

SEQ ID NO: 1812665 - RNA, 19 nt, Homo sapiens
  misc_RNA (1)...(19): siRNA sense strand
ccauaaaggcagacgacaa

SEQ ID NO: 1812666 - RNA, 19 nt, Homo sapiens
  misc_RNA (1)...(19): siRNA sense strand
ccagcaagagauugacaaa

SEQ ID NO: 1812667 - RNA, 19 nt, Homo sapiens
  misc_RNA (1)...(19): siRNA sense strand
ucaaagacuggugaagaaa

SEQ ID NO: 1812668 - RNA, 19 nt, Homo sapiens
  misc_RNA (1)...(19): siRNA sense strand
caagggcagcgccaccaaa

SEQ ID NO: 1812669 - RNA, 19 nt, Homo sapiens
  misc_RNA (1)...(19): siRNA sense strand
ucaacgccaugaagcaagu

SEQ ID NO: 1812670 - RNA, 19 nt, Homo sapiens
  misc_RNA (1)...(19): siRNA sense strand
cugcagacccucccagaga

SEQ ID NO: 1812671 - RNA, 19 nt, Homo sapiens
  misc_RNA (1)...(19): siRNA sense strand
gaguuucugcugccuguug

SEQ ID NO: 1812672 - RNA, 19 nt, Homo sapiens
  misc_RNA (1)...(19): siRNA sense strand
gagaucaagaaggaacuuu

SEQ ID NO: 1812673 - RNA, 19 nt, Homo sapiens
  misc_RNA (1)...(19): siRNA sense strand
ggagaggcccagcaaugag

SEQ ID NO: 1812674 - RNA, 19 nt, Homo sapiens
  misc_RNA (1)...(19): siRNA sense strand
caaagagaaggcagagaag

SEQ ID NO: 1812675 - RNA, 19 nt, Homo sapiens
  misc_RNA (1)...(19): siRNA sense strand
ggagaaggagaaggccaaa

SEQ ID NO: 1812676 - RNA, 19 nt, Homo sapiens
  misc_RNA (1)...(19): siRNA sense strand
ucacgaaggaggaaaucga

SEQ ID NO: 1812677 - RNA, 19 nt, Homo sapiens
  misc_RNA (1)...(19): siRNA sense strand
gaggaacugccugaauguu

SEQ ID NO: 1812678 - RNA, 19 nt, Homo sapiens
  misc_RNA (1)...(19): siRNA sense strand
ggaagcacaggugaaagug

SEQ ID NO: 1812679 - RNA, 19 nt, Homo sapiens
  misc_RNA (1)...(19): siRNA sense strand
gaaggacaagaacaagaag

SEQ ID NO: 1812680 - RNA, 19 nt, Homo sapiens
  misc_RNA (1)...(19): siRNA sense strand
gcccgagugccuucgcaua

SEQ ID NO: 1812681 - RNA, 19 nt, Homo sapiens
  misc_RNA (1)...(19): siRNA sense strand
aggagaaggccaaagagaa

SEQ ID NO: 1812682 - RNA, 19 nt, Homo sapiens
  misc_RNA (1)...(19): siRNA sense strand
gggcagaucgauggcuuga

SEQ ID NO: 1812683 - RNA, 19 nt, Homo sapiens
  misc_RNA (1)...(19): siRNA sense strand
gcgaugacucgguaguaga

SEQ ID NO: 1812684 - RNA, 19 nt, Homo sapiens
  misc_RNA (1)...(19): siRNA sense strand
ccaccaaagacuucucugu

SEQ ID NO: 1812685 - RNA, 19 nt, Homo sapiens
  misc_RNA (1)...(19): siRNA sense strand
caucaacgccaugaagcaa

SEQ ID NO: 1812686 - RNA, 19 nt, Homo sapiens
  misc_RNA (1)...(19): siRNA sense strand
aaagccagcaagagauuga

SEQ ID NO: 1812687 - RNA, 19 nt, Homo sapiens
  misc_RNA (1)...(19): siRNA sense strand
gcaggagcaccgugagaag

SEQ ID NO: 1812688 - RNA, 19 nt, Homo sapiens
  misc_RNA (1)...(19): siRNA sense strand
caucggcaccaacaacuuc

SEQ ID NO: 1812689 - RNA, 19 nt, Homo sapiens
  misc_RNA (1)...(19): siRNA sense strand
gcagaggugguggugaaga

SEQ ID NO: 1812690 - RNA, 19 nt, Homo sapiens
  misc_RNA (1)...(19): siRNA sense strand
gucaagcacauucccgaaa

SEQ ID NO: 1812691 - RNA, 19 nt, Homo sapiens
  misc_RNA (1)...(19): siRNA sense strand
aagagaaggcagagaagga

SEQ ID NO: 1812692 - RNA, 19 nt, Homo sapiens
  misc_RNA (1)...(19): siRNA sense strand
uagagaagucccucaaguc

SEQ ID NO: 1812693 - RNA, 19 nt, Homo sapiens
  misc_RNA (1)...(19): siRNA sense strand
cggagguggcgaaggauuu

SEQ ID NO: 1812694 - RNA, 19 nt, Homo sapiens
  misc_RNA (1)...(19): siRNA sense strand
cagaagauccgggaaacag

SEQ ID NO: 1812695 - RNA, 19 nt, Homo sapiens
  misc_RNA (1)...(19): siRNA sense strand
ggaggucgcagaggugaag

SEQ ID NO: 1812696 - RNA, 19 nt, Homo sapiens
  misc_RNA (1)...(19): siRNA sense strand
ccaugaagcaagucaagca

SEQ ID NO: 1812697 - RNA, 19 nt, Homo sapiens
  misc_RNA (1)...(19): siRNA sense strand
auacguggaagaaucuaaa

SEQ ID NO: 1812698 - RNA, 19 nt, Homo sapiens
  misc_RNA (1)...(19): siRNA sense strand
ggagaucaagaaggaacuu

SEQ ID NO: 1812699 - RNA, 19 nt, Homo sapiens
  misc_RNA (1)...(19): siRNA sense strand
gcagucagagaccuugaag

SEQ ID NO: 1812700 - RNA, 19 nt, Homo sapiens
  misc_RNA (1)...(19): siRNA sense strand
cagugucgcugagcucauc

SEQ ID NO: 1812701 - RNA, 19 nt, Homo sapiens
  misc_RNA (1)...(19): siRNA sense strand
gcugguggacaaagaagau

SEQ ID NO: 1812702 - RNA, 19 nt, Homo sapiens
  misc_RNA (1)...(19): siRNA sense strand
gcuacaaguuccuuaaaga

SEQ ID NO: 1812703 - RNA, 19 nt, Homo sapiens
  misc_RNA (1)...(19): siRNA sense strand
acaaguuccuuaaagacaa

SEQ ID NO: 1812704 - RNA, 19 nt, Homo sapiens
  misc_RNA (1)...(19): siRNA sense strand
caaguuccuuaaagacaag

SEQ ID NO: 1812705 - RNA, 19 nt, Homo sapiens
  misc_RNA (1)...(19): siRNA sense strand
ccgcuacaaguuccuuaaa

SEQ ID NO: 1812706 - RNA, 19 nt, Homo sapiens
  misc_RNA (1)...(19): siRNA sense strand
ggaauuauguggccaagaa

SEQ ID NO: 1812707 - RNA, 19 nt, Homo sapiens
  misc_RNA (1)...(19): siRNA sense strand
caacguccuucuccaacua

SEQ ID NO: 1812708 - RNA, 19 nt, Homo sapiens
  misc_RNA (1)...(19): siRNA sense strand
ugauggaggugcagcauuu

SEQ ID NO: 1812709 - RNA, 19 nt, Homo sapiens
  misc_RNA (1)...(19): siRNA sense strand
guucaucgcuggccugugu

SEQ ID NO: 1812710 - RNA, 19 nt, Homo sapiens
  misc_RNA (1)...(19): siRNA sense strand
ggaacguggugguccauga

SEQ ID NO: 1812711 - RNA, 19 nt, Homo sapiens
  misc_RNA (1)...(19): siRNA sense strand
gggaggcuauacaauccua

SEQ ID NO: 1812712 - RNA, 19 nt, Homo sapiens
  misc_RNA (1)...(19): siRNA sense strand
uaugucagguggaauuaug

SEQ ID NO: 1812713 - RNA, 19 nt, Homo sapiens
  misc_RNA (1)...(19): siRNA sense strand
ggagauggaaacacugaga

SEQ ID NO: 1812714 - RNA, 19 nt, Homo sapiens
  misc_RNA (1)...(19): siRNA sense strand
gcccaacacucaucuacag

SEQ ID NO: 1812715 - RNA, 19 nt, Homo sapiens
  misc_RNA (1)...(19): siRNA sense strand
guucuucuaucccgucaug

SEQ ID NO: 1812716 - RNA, 19 nt, Homo sapiens
  misc_RNA (1)...(19): siRNA sense strand
gcauggaacgugcugaugu

SEQ ID NO: 1812717 - RNA, 19 nt, Homo sapiens
  misc_RNA (1)...(19): siRNA sense strand
cugauacucuuccuuguca

SEQ ID NO: 1812718 - RNA, 19 nt, Homo sapiens
  misc_RNA (1)...(19): siRNA sense strand
ccucuguguuccugucuuu

SEQ ID NO: 1812719 - RNA, 19 nt, Homo sapiens
  misc_RNA (1)...(19): siRNA sense strand
caacgccuuugccgagaug

SEQ ID NO: 1812720 - RNA, 19 nt, Homo sapiens
  misc_RNA (1)...(19): siRNA sense strand
gcaguggcccaugaguaua

SEQ ID NO: 1812721 - RNA, 19 nt, Homo sapiens
  misc_RNA (1)...(19): siRNA sense strand
cauggaacgugcugaugug

SEQ ID NO: 1812722 - RNA, 19 nt, Homo sapiens
  misc_RNA (1)...(19): siRNA sense strand
gccgagaugcuacgauuug

SEQ ID NO: 1812723 - RNA, 19 nt, Homo sapiens
  misc_RNA (1)...(19): siRNA sense strand
uauacaauccuacccauca

SEQ ID NO: 1812724 - RNA, 19 nt, Homo sapiens
  misc_RNA (1)...(19): siRNA sense strand
gauacucuuccuugucauu

SEQ ID NO: 1812725 - RNA, 19 nt, Homo sapiens
  misc_RNA (1)...(19): siRNA sense strand
ggaguuugaccuacugauc

SEQ ID NO: 1812726 - RNA, 19 nt, Homo sapiens
  misc_RNA (1)...(19): siRNA sense strand
gauguggaccaugcuguuu

SEQ ID NO: 1812727 - RNA, 19 nt, Homo sapiens
  misc_RNA (1)...(19): siRNA sense strand
guccaugacuggcuguaca

SEQ ID NO: 1812728 - RNA, 19 nt, Homo sapiens
  misc_RNA (1)...(19): siRNA sense strand
cgaucuugguccugccaua

SEQ ID NO: 1812729 - RNA, 19 nt, Homo sapiens
  misc_RNA (1)...(19): siRNA sense strand
acaauggacccgacacaug

SEQ ID NO: 1812730 - RNA, 19 nt, Homo sapiens
  misc_RNA (1)...(19): siRNA sense strand
gcucuaugccugcuucauc

SEQ ID NO: 1812731 - RNA, 19 nt, Homo sapiens
  misc_RNA (1)...(19): siRNA sense strand
gcuacuccuuccugagaga

SEQ ID NO: 1812732 - RNA, 19 nt, Homo sapiens
  misc_RNA (1)...(19): siRNA sense strand
ucaucuacagggagacuua

SEQ ID NO: 1812733 - RNA, 19 nt, Homo sapiens
  misc_RNA (1)...(19): siRNA sense strand
gcgggaggcuauacaaucc

SEQ ID NO: 1812734 - RNA, 19 nt, Homo sapiens
  misc_RNA (1)...(19): siRNA sense strand
ggccaucgacuucauugau

SEQ ID NO: 1812735 - RNA, 19 nt, Homo sapiens
  misc_RNA (1)...(19): siRNA sense strand
uugccgagaugcuacgauu

SEQ ID NO: 1812736 - RNA, 19 nt, Homo sapiens
  misc_RNA (1)...(19): siRNA sense strand
cuacccaucacaagacaaa

SEQ ID NO: 1812737 - RNA, 19 nt, Homo sapiens
  misc_RNA (1)...(19): siRNA sense strand
ggagcaagcgcagggacaa

SEQ ID NO: 1812738 - RNA, 19 nt, Homo sapiens
  misc_RNA (1)...(19): siRNA sense strand
gcuggaguuugaccuacug

SEQ ID NO: 1812739 - RNA, 19 nt, Homo sapiens
  misc_RNA (1)...(19): siRNA sense strand
augaguauaucuucugcuu

SEQ ID NO: 1812740 - RNA, 19 nt, Homo sapiens
  misc_RNA (1)...(19): siRNA sense strand
guacaauggacccgacaca

SEQ ID NO: 1812741 - RNA, 19 nt, Homo sapiens
  misc_RNA (1)...(19): siRNA sense strand
cgcaguggcccaugaguau

SEQ ID NO: 1812742 - RNA, 19 nt, Homo sapiens
  misc_RNA (1)...(19): siRNA sense strand
ccgcaguggcccaugagua

SEQ ID NO: 1812743 - RNA, 19 nt, Homo sapiens
  misc_RNA (1)...(19): siRNA sense strand
ccugggaugugugcucuau

SEQ ID NO: 1812744 - RNA, 19 nt, Homo sapiens
  misc_RNA (1)...(19): siRNA sense strand
gcgccaacccuguggagau

SEQ ID NO: 1812745 - RNA, 19 nt, Homo sapiens
  misc_RNA (1)...(19): siRNA sense strand
aagcuacuccuuccugaga

SEQ ID NO: 1812746 - RNA, 19 nt, Homo sapiens
  misc_RNA (1)...(19): siRNA sense strand
gaguuugaccuacugaucu

SEQ ID NO: 1812747 - RNA, 19 nt, Homo sapiens
  misc_RNA (1)...(19): siRNA sense strand
caccaucuaccacauguuc

SEQ ID NO: 1812748 - RNA, 19 nt, Homo sapiens
  misc_RNA (1)...(19): siRNA sense strand
uuggaggaauguugaacuu

SEQ ID NO: 1812749 - RNA, 19 nt, Homo sapiens
  misc_RNA (1)...(19): siRNA sense strand
gcccaugaguauaucuucu

SEQ ID NO: 1812750 - RNA, 19 nt, Homo sapiens
  misc_RNA (1)...(19): siRNA sense strand
ccaacccuguggagaugga

SEQ ID NO: 1812751 - RNA, 19 nt, Homo sapiens
  misc_RNA (1)...(19): siRNA sense strand
cgccaacccuguggagaug

SEQ ID NO: 1812752 - RNA, 19 nt, Homo sapiens
  misc_RNA (1)...(19): siRNA sense strand
ggcugcugcuggaguuuga

SEQ ID NO: 1812753 - RNA, 19 nt, Homo sapiens
  misc_RNA (1)...(19): siRNA sense strand
ccagcuaccucuacuuccu

SEQ ID NO: 1812754 - RNA, 19 nt, Homo sapiens
  misc_RNA (1)...(19): siRNA sense strand
guggagauggaaacacuga

SEQ ID NO: 1812755 - RNA, 19 nt, Homo sapiens
  misc_RNA (1)...(19): siRNA sense strand
cugugugucuucaucauca

SEQ ID NO: 1812756 - RNA, 19 nt, Homo sapiens
  misc_RNA (1)...(19): siRNA sense strand
gaacguggugguccaugac

SEQ ID NO: 1812757 - RNA, 19 nt, Homo sapiens
  misc_RNA (1)...(19): siRNA sense strand
caagcgcagggacaacuga

SEQ ID NO: 1812758 - RNA, 19 nt, Homo sapiens
  misc_RNA (1)...(19): siRNA sense strand
gcugauacucuuccuuguc

SEQ ID NO: 1812759 - RNA, 19 nt, Homo sapiens
  misc_RNA (1)...(19): siRNA sense strand
ucaugcugcugcucaucuu

SEQ ID NO: 1812760 - RNA, 19 nt, Homo sapiens
  misc_RNA (1)...(19): siRNA sense strand
guuccugucuuugccaaca

SEQ ID NO: 1812761 - RNA, 19 nt, Homo sapiens
  misc_RNA (1)...(19): siRNA sense strand
ucagcacccuggccaucga

SEQ ID NO: 1812762 - RNA, 19 nt, Homo sapiens
  misc_RNA (1)...(19): siRNA sense strand
caguggcccaugaguauau

SEQ ID NO: 1812763 - RNA, 19 nt, Homo sapiens
  misc_RNA (1)...(19): siRNA sense strand
ucuccgcaguggcccauga

SEQ ID NO: 1812764 - RNA, 19 nt, Homo sapiens
  misc_RNA (1)...(19): siRNA sense strand
caacaucacugacaaacuu

SEQ ID NO: 1812765 - RNA, 19 nt, Homo sapiens
  misc_RNA (1)...(19): siRNA sense strand
gauuaucagucucaucaua

SEQ ID NO: 1812766 - RNA, 19 nt, Homo sapiens
  misc_RNA (1)...(19): siRNA sense strand
ccaaagaaacagauaagua

SEQ ID NO: 1812767 - RNA, 19 nt, Homo sapiens
  misc_RNA (1)...(19): siRNA sense strand
gaggaucucuucuaacauc

SEQ ID NO: 1812768 - RNA, 19 nt, Homo sapiens
  misc_RNA (1)...(19): siRNA sense strand
gaaauacaaagaacucuga

SEQ ID NO: 1812769 - RNA, 19 nt, Homo sapiens
  misc_RNA (1)...(19): siRNA sense strand
acaaggagauguaauagau

SEQ ID NO: 1812770 - RNA, 19 nt, Homo sapiens
  misc_RNA (1)...(19): siRNA sense strand
caacagaagcagcaguaua

SEQ ID NO: 1812771 - RNA, 19 nt, Homo sapiens
  misc_RNA (1)...(19): siRNA sense strand
cuaaccagcuugccaaaga

SEQ ID NO: 1812772 - RNA, 19 nt, Homo sapiens
  misc_RNA (1)...(19): siRNA sense strand
ugaacaaggagauguaaua

SEQ ID NO: 1812773 - RNA, 19 nt, Homo sapiens
  misc_RNA (1)...(19): siRNA sense strand
caacuugaagcugauauua

SEQ ID NO: 1812774 - RNA, 19 nt, Homo sapiens
  misc_RNA (1)...(19): siRNA sense strand
gaggacagcucaaaagaaa

SEQ ID NO: 1812775 - RNA, 19 nt, Homo sapiens
  misc_RNA (1)...(19): siRNA sense strand
acaaagaacucugaaucaa

SEQ ID NO: 1812776 - RNA, 19 nt, Homo sapiens
  misc_RNA (1)...(19): siRNA sense strand
ggugcaggaugaagaaauu

SEQ ID NO: 1812777 - RNA, 19 nt, Homo sapiens
  misc_RNA (1)...(19): siRNA sense strand
caaagaaacagauaaguac

SEQ ID NO: 1812778 - RNA, 19 nt, Homo sapiens
  misc_RNA (1)...(19): siRNA sense strand
agaagcagcaguauacuaa

SEQ ID NO: 1812779 - RNA, 19 nt, Homo sapiens
  misc_RNA (1)...(19): siRNA sense strand
gaacaaggagauguaauag

SEQ ID NO: 1812780 - RNA, 19 nt, Homo sapiens
  misc_RNA (1)...(19): siRNA sense strand
aaagaacucugaaucaacu

SEQ ID NO: 1812781 - RNA, 19 nt, Homo sapiens
  misc_RNA (1)...(19): siRNA sense strand
acagaaggaucgcuuagug

SEQ ID NO: 1812782 - RNA, 19 nt, Homo sapiens
  misc_RNA (1)...(19): siRNA sense strand
uggaacaccucaagauuca

SEQ ID NO: 1812783 - RNA, 19 nt, Homo sapiens
  misc_RNA (1)...(19): siRNA sense strand
cauagaagccaauguggaa

SEQ ID NO: 1812784 - RNA, 19 nt, Homo sapiens
  misc_RNA (1)...(19): siRNA sense strand
gaugaccuccgucuuauuc

SEQ ID NO: 1812785 - RNA, 19 nt, Homo sapiens
  misc_RNA (1)...(19): siRNA sense strand
gcaguauacuaaccagcuu

SEQ ID NO: 1812786 - RNA, 19 nt, Homo sapiens
  misc_RNA (1)...(19): siRNA sense strand
gcgauuaucagucucauca

SEQ ID NO: 1812787 - RNA, 19 nt, Homo sapiens
  misc_RNA (1)...(19): siRNA sense strand
uaaccagcuugccaaagaa

SEQ ID NO: 1812788 - RNA, 19 nt, Homo sapiens
  misc_RNA (1)...(19): siRNA sense strand
caucaucauucuuauccuu

SEQ ID NO: 1812789 - RNA, 19 nt, Homo sapiens
  misc_RNA (1)...(19): siRNA sense strand
caaggagauguaauagaua

SEQ ID NO: 1812790 - RNA, 19 nt, Homo sapiens
  misc_RNA (1)...(19): siRNA sense strand
acuugaagcugauauuaug

SEQ ID NO: 1812791 - RNA, 19 nt, Homo sapiens
  misc_RNA (1)...(19): siRNA sense strand
gugaacagcgucaaaggaa

SEQ ID NO: 1812792 - RNA, 19 nt, Homo sapiens
  misc_RNA (1)...(19): siRNA sense strand
gaagcugauauuauggaua

SEQ ID NO: 1812793 - RNA, 19 nt, Homo sapiens
  misc_RNA (1)...(19): siRNA sense strand
ugaacagcgucaaaggaaa

SEQ ID NO: 1812794 - RNA, 19 nt, Homo sapiens
  misc_RNA (1)...(19): siRNA sense strand
gaguugcgauuaucagucu

SEQ ID NO: 1812795 - RNA, 19 nt, Homo sapiens
  misc_RNA (1)...(19): siRNA sense strand
ugucaagggcagcagauua

SEQ ID NO: 1812796 - RNA, 19 nt, Homo sapiens
  misc_RNA (1)...(19): siRNA sense strand
uggcagaguucacaacauc

SEQ ID NO: 1812797 - RNA, 19 nt, Homo sapiens
  misc_RNA (1)...(19): siRNA sense strand
guuuguugcucgaguaaga

SEQ ID NO: 1812798 - RNA, 19 nt, Homo sapiens
  misc_RNA (1)...(19): siRNA sense strand
gcaacuugaagcugauauu

SEQ ID NO: 1812799 - RNA, 19 nt, Homo sapiens
  misc_RNA (1)...(19): siRNA sense strand
aaucuuguauccugggaaa

SEQ ID NO: 1812800 - RNA, 19 nt, Homo sapiens
  misc_RNA (1)...(19): siRNA sense strand
gcaggugcaggaugaagaa

SEQ ID NO: 1812801 - RNA, 19 nt, Homo sapiens
  misc_RNA (1)...(19): siRNA sense strand
cgagagaaagaguuuguug

SEQ ID NO: 1812802 - RNA, 19 nt, Homo sapiens
  misc_RNA (1)...(19): siRNA sense strand
ucauuggaguugcgauuau

SEQ ID NO: 1812803 - RNA, 19 nt, Homo sapiens
  misc_RNA (1)...(19): siRNA sense strand
aaggagauguaauagauag

SEQ ID NO: 1812804 - RNA, 19 nt, Homo sapiens
  misc_RNA (1)...(19): siRNA sense strand
ugaagaaauuacagaggau

SEQ ID NO: 1812805 - RNA, 19 nt, Homo sapiens
  misc_RNA (1)...(19): siRNA sense strand
cagaagcagcaguauacua

SEQ ID NO: 1812806 - RNA, 19 nt, Homo sapiens
  misc_RNA (1)...(19): siRNA sense strand
agaaaggaaucuuguaucc

SEQ ID NO: 1812807 - RNA, 19 nt, Homo sapiens
  misc_RNA (1)...(19): siRNA sense strand
gaacagcgucaaaggaaaa

SEQ ID NO: 1812808 - RNA, 19 nt, Homo sapiens
  misc_RNA (1)...(19): siRNA sense strand
agaguuuguugcucgagua

SEQ ID NO: 1812809 - RNA, 19 nt, Homo sapiens
  misc_RNA (1)...(19): siRNA sense strand
caaagaacucugaaucaac

SEQ ID NO: 1812810 - RNA, 19 nt, Homo sapiens
  misc_RNA (1)...(19): siRNA sense strand
aagccaaacucaaccucaa

SEQ ID NO: 1812811 - RNA, 19 nt, Homo sapiens
  misc_RNA (1)...(19): siRNA sense strand
gucaagggcagcagauuau

SEQ ID NO: 1812812 - RNA, 19 nt, Homo sapiens
  misc_RNA (1)...(19): siRNA sense strand
uagcauagaagccaaugug

SEQ ID NO: 1812813 - RNA, 19 nt, Homo sapiens
  misc_RNA (1)...(19): siRNA sense strand
uaucagcgcaaauccagaa

SEQ ID NO: 1812814 - RNA, 19 nt, Homo sapiens
  misc_RNA (1)...(19): siRNA sense strand
auacaaagaacucugaauc

SEQ ID NO: 1812815 - RNA, 19 nt, Homo sapiens
  misc_RNA (1)...(19): siRNA sense strand
uacaaagaacucugaauca

SEQ ID NO: 1812816 - RNA, 19 nt, Homo sapiens
  misc_RNA (1)...(19): siRNA sense strand
caagggcagcagauuauca

SEQ ID NO: 1812817 - RNA, 19 nt, Homo sapiens
  misc_RNA (1)...(19): siRNA sense strand
gauguaauagauagcauag

SEQ ID NO: 1812818 - RNA, 19 nt, Homo sapiens
  misc_RNA (1)...(19): siRNA sense strand
ucacaacaucacugacaaa

SEQ ID NO: 1812819 - RNA, 19 nt, Homo sapiens
  misc_RNA (1)...(19): siRNA sense strand
gagauguaauagauagcau

SEQ ID NO: 1812820 - RNA, 19 nt, Homo sapiens
  misc_RNA (1)...(19): siRNA sense strand
ggaugaccuccgucuuauu

SEQ ID NO: 1812821 - RNA, 19 nt, Homo sapiens
  misc_RNA (1)...(19): siRNA sense strand
ugagcgagagaaagaguuu

SEQ ID NO: 1812822 - RNA, 19 nt, Homo sapiens
  misc_RNA (1)...(19): siRNA sense strand
uuaucagucucaucauaug

SEQ ID NO: 1812823 - RNA, 19 nt, Homo sapiens
  misc_RNA (1)...(19): siRNA sense strand
ucaugaacaaggagaugua

SEQ ID NO: 1812824 - RNA, 19 nt, Homo sapiens
  misc_RNA (1)...(19): siRNA sense strand
aaagauuugggaaugauga

SEQ ID NO: 1812825 - RNA, 19 nt, Homo sapiens
  misc_RNA (1)...(19): siRNA sense strand
gcaggaugaagaaauuaca

SEQ ID NO: 1812826 - RNA, 19 nt, Homo sapiens
  misc_RNA (1)...(19): siRNA sense strand
guucacaacaucacugaca

SEQ ID NO: 1812827 - RNA, 19 nt, Homo sapiens
  misc_RNA (1)...(19): siRNA sense strand
gcacguucagcaagcaaau

SEQ ID NO: 1812828 - RNA, 19 nt, Homo sapiens
  misc_RNA (1)...(19): siRNA sense strand
aggaugaccuccgucuuau

SEQ ID NO: 1812829 - RNA, 19 nt, Homo sapiens
  misc_RNA (1)...(19): siRNA sense strand
ggagauguaauagauagca

SEQ ID NO: 1812830 - RNA, 19 nt, Homo sapiens
  misc_RNA (1)...(19): siRNA sense strand
gucauuggaguugcgauua

SEQ ID NO: 1812831 - RNA, 19 nt, Homo sapiens
  misc_RNA (1)...(19): siRNA sense strand
gaguucacaacaucacuga

SEQ ID NO: 1812832 - RNA, 19 nt, Homo sapiens
  misc_RNA (1)...(19): siRNA sense strand
ucuaacauccagaagauca

SEQ ID NO: 1812833 - RNA, 19 nt, Homo sapiens
  misc_RNA (1)...(19): siRNA sense strand
gugcaggaugaagaaauua

SEQ ID NO: 1812834 - RNA, 19 nt, Homo sapiens
  misc_RNA (1)...(19): siRNA sense strand
ugaagcugauauuauggau

SEQ ID NO: 1812835 - RNA, 19 nt, Homo sapiens
  misc_RNA (1)...(19): siRNA sense strand
caugaacaaggagauguaa

SEQ ID NO: 1812836 - RNA, 19 nt, Homo sapiens
  misc_RNA (1)...(19): siRNA sense strand
cauuaaagaguuuggaucu

SEQ ID NO: 1812837 - RNA, 19 nt, Homo sapiens
  misc_RNA (1)...(19): siRNA sense strand
cugcugagcgagagaaaga

SEQ ID NO: 1812838 - RNA, 19 nt, Homo sapiens
  misc_RNA (1)...(19): siRNA sense strand
ugaccuccgucuuauucau

SEQ ID NO: 1812839 - RNA, 19 nt, Homo sapiens
  misc_RNA (1)...(19): siRNA sense strand
gaguuuguugcucgaguaa

SEQ ID NO: 1812840 - RNA, 19 nt, Homo sapiens
  misc_RNA (1)...(19): siRNA sense strand
aacagaagcagcaguauac

SEQ ID NO: 1812841 - RNA, 19 nt, Homo sapiens
  misc_RNA (1)...(19): siRNA sense strand
gcaacagaagcagcaguau

SEQ ID NO: 1812842 - RNA, 19 nt, Homo sapiens
  misc_RNA (1)...(19): siRNA sense strand
aaaggaaaauacagaagga

SEQ ID NO: 1812843 - RNA, 19 nt, Homo sapiens
  misc_RNA (1)...(19): siRNA sense strand
gaccuccgucuuauucaug

SEQ ID NO: 1812844 - RNA, 19 nt, Homo sapiens
  misc_RNA (1)...(19): siRNA sense strand
cugugcaucaucauucuua

SEQ ID NO: 1812845 - RNA, 19 nt, Homo sapiens
  misc_RNA (1)...(19): siRNA sense strand
guaauagauagcauagaag

SEQ ID NO: 1812846 - RNA, 19 nt, Homo sapiens
  misc_RNA (1)...(19): siRNA sense strand
ugcaacagaagcagcagua

SEQ ID NO: 1812847 - RNA, 19 nt, Homo sapiens
  misc_RNA (1)...(19): siRNA sense strand
aauacagaaggaucgcuua

SEQ ID NO: 1812848 - RNA, 19 nt, Homo sapiens
  misc_RNA (1)...(19): siRNA sense strand
gcagauuaucagcgcaaau

SEQ ID NO: 1812849 - RNA, 19 nt, Homo sapiens
  misc_RNA (1)...(19): siRNA sense strand
uaagagccaguuccagagu

SEQ ID NO: 1812850 - RNA, 19 nt, Homo sapiens
  misc_RNA (1)...(19): siRNA sense strand
gaacaucacuaaacagauc

SEQ ID NO: 1812851 - RNA, 19 nt, Homo sapiens
  misc_RNA (1)...(19): siRNA sense strand
gcacugauguggacgaaug

SEQ ID NO: 1812852 - RNA, 19 nt, Homo sapiens
  misc_RNA (1)...(19): siRNA sense strand
ggagagacguggacgaaug

SEQ ID NO: 1812853 - RNA, 19 nt, Homo sapiens
  misc_RNA (1)...(19): siRNA sense strand
gaaccugccuggcucuuuc

SEQ ID NO: 1812854 - RNA, 19 nt, Homo sapiens
  misc_RNA (1)...(19): siRNA sense strand
gggcuucgguuacugcuuu

SEQ ID NO: 1812855 - RNA, 19 nt, Homo sapiens
  misc_RNA (1)...(19): siRNA sense strand
caacagcccggaagaguuu

SEQ ID NO: 1812856 - RNA, 19 nt, Homo sapiens
  misc_RNA (1)...(19): siRNA sense strand
ggccagagcucuacugaag

SEQ ID NO: 1812857 - RNA, 19 nt, Homo sapiens
  misc_RNA (1)...(19): siRNA sense strand
ggacgaaugucagcucuuc

SEQ ID NO: 1812858 - RNA, 19 nt, Homo sapiens
  misc_RNA (1)...(19): siRNA sense strand
cauaugggccugaguugua

SEQ ID NO: 1812859 - RNA, 19 nt, Homo sapiens
  misc_RNA (1)...(19): siRNA sense strand
gcaccgagacagcugagua

SEQ ID NO: 1812860 - RNA, 19 nt, Homo sapiens
  misc_RNA (1)...(19): siRNA sense strand
cgaguacggcccagacuua

SEQ ID NO: 1812861 - RNA, 19 nt, Homo sapiens
  misc_RNA (1)...(19): siRNA sense strand
gaggacggcuacucagaug

SEQ ID NO: 1812862 - RNA, 19 nt, Homo sapiens
  misc_RNA (1)...(19): siRNA sense strand
caacacggcaggcuccuuu

SEQ ID NO: 1812863 - RNA, 19 nt, Homo sapiens
  misc_RNA (1)...(19): siRNA sense strand
gaauauggucccgagauuu

SEQ ID NO: 1812864 - RNA, 19 nt, Homo sapiens
  misc_RNA (1)...(19): siRNA sense strand
gaacuucuguuggcauguc

SEQ ID NO: 1812865 - RNA, 19 nt, Homo sapiens
  misc_RNA (1)...(19): siRNA sense strand
gccaggauguggaugaaug

SEQ ID NO: 1812866 - RNA, 19 nt, Homo sapiens
  misc_RNA (1)...(19): siRNA sense strand
gugaagaggauguggauga

SEQ ID NO: 1812867 - RNA, 19 nt, Homo sapiens
  misc_RNA (1)...(19): siRNA sense strand
ucaacacugugggcucuua

SEQ ID NO: 1812868 - RNA, 19 nt, Homo sapiens
  misc_RNA (1)...(19): siRNA sense strand
agaauauggucccgagauu

SEQ ID NO: 1812869 - RNA, 19 nt, Homo sapiens
  misc_RNA (1)...(19): siRNA sense strand
gguggaagcuaugcugguu

SEQ ID NO: 1812870 - RNA, 19 nt, Homo sapiens
  misc_RNA (1)...(19): siRNA sense strand
gccaggauguggacgaaug

SEQ ID NO: 1812871 - RNA, 19 nt, Homo sapiens
  misc_RNA (1)...(19): siRNA sense strand
gaugugaacgagugugaaa

SEQ ID NO: 1812872 - RNA, 19 nt, Homo sapiens
  misc_RNA (1)...(19): siRNA sense strand
gcuguucgcugcccauucu

SEQ ID NO: 1812873 - RNA, 19 nt, Homo sapiens
  misc_RNA (1)...(19): siRNA sense strand
ggagcugcccugugugaaa

SEQ ID NO: 1812874 - RNA, 19 nt, Homo sapiens
  misc_RNA (1)...(19): siRNA sense strand
ggaugagugccaagaauau

SEQ ID NO: 1812875 - RNA, 19 nt, Homo sapiens
  misc_RNA (1)...(19): siRNA sense strand
ucacucagccagccucgua

SEQ ID NO: 1812876 - RNA, 19 nt, Homo sapiens
  misc_RNA (1)...(19): siRNA sense strand
caacacugacggcuccuuu

SEQ ID NO: 1812877 - RNA, 19 nt, Homo sapiens
  misc_RNA (1)...(19): siRNA sense strand
ccucuugccucgacguuga

SEQ ID NO: 1812878 - RNA, 19 nt, Homo sapiens
  misc_RNA (1)...(19): siRNA sense strand
gcagcaacggcuacuacua

SEQ ID NO: 1812879 - RNA, 19 nt, Homo sapiens
  misc_RNA (1)...(19): siRNA sense strand
gcaggacucagaugacuuc

SEQ ID NO: 1812880 - RNA, 19 nt, Homo sapiens
  misc_RNA (1)...(19): siRNA sense strand
gagccucgaugacaaucug

SEQ ID NO: 1812881 - RNA, 19 nt, Homo sapiens
  misc_RNA (1)...(19): siRNA sense strand
gccagagccucgaugacaa

SEQ ID NO: 1812882 - RNA, 19 nt, Homo sapiens
  misc_RNA (1)...(19): siRNA sense strand
guaaaagcguugcuguuug

SEQ ID NO: 1812883 - RNA, 19 nt, Homo sapiens
  misc_RNA (1)...(19): siRNA sense strand
cgagugcgccgaugaggaa

SEQ ID NO: 1812884 - RNA, 19 nt, Homo sapiens
  misc_RNA (1)...(19): siRNA sense strand
gugcaagaguggcgugugu

SEQ ID NO: 1812885 - RNA, 19 nt, Homo sapiens
  misc_RNA (1)...(19): siRNA sense strand
caggagugcugcuguacug

SEQ ID NO: 1812886 - RNA, 19 nt, Homo sapiens
  misc_RNA (1)...(19): siRNA sense strand
gcagcugcaucucccaaca

SEQ ID NO: 1812887 - RNA, 19 nt, Homo sapiens
  misc_RNA (1)...(19): siRNA sense strand
guggaugagugccaagaau

SEQ ID NO: 1812888 - RNA, 19 nt, Homo sapiens
  misc_RNA (1)...(19): siRNA sense strand
ggaggacggcuacucagau

SEQ ID NO: 1812889 - RNA, 19 nt, Homo sapiens
  misc_RNA (1)...(19): siRNA sense strand
gcgaccagguggcuuugga

SEQ ID NO: 1812890 - RNA, 19 nt, Homo sapiens
  misc_RNA (1)...(19): siRNA sense strand
uaaaagcguugcuguuugu

SEQ ID NO: 1812891 - RNA, 19 nt, Homo sapiens
  misc_RNA (1)...(19): siRNA sense strand
caccugcgcuugcgacucu

SEQ ID NO: 1812892 - RNA, 19 nt, Homo sapiens
  misc_RNA (1)...(19): siRNA sense strand
gcaagaguggcgugugugu

SEQ ID NO: 1812893 - RNA, 19 nt, Homo sapiens
  misc_RNA (1)...(19): siRNA sense strand
gggcaccugugacgaugug

SEQ ID NO: 1812894 - RNA, 19 nt, Homo sapiens
  misc_RNA (1)...(19): siRNA sense strand
gcagcgaggaggaccuuug

SEQ ID NO: 1812895 - RNA, 19 nt, Homo sapiens
  misc_RNA (1)...(19): siRNA sense strand
cccaacacgugaucucaga

SEQ ID NO: 1812896 - RNA, 19 nt, Homo sapiens
  misc_RNA (1)...(19): siRNA sense strand
gagagacguggacgaaugu

SEQ ID NO: 1812897 - RNA, 19 nt, Homo sapiens
  misc_RNA (1)...(19): siRNA sense strand
cagcugaguaccagucauu

SEQ ID NO: 1812898 - RNA, 19 nt, Homo sapiens
  misc_RNA (1)...(19): siRNA sense strand
aauauggucccgagauuug

SEQ ID NO: 1812899 - RNA, 19 nt, Homo sapiens
  misc_RNA (1)...(19): siRNA sense strand
uggaugagugccaagaaua

SEQ ID NO: 1812900 - RNA, 19 nt, Homo sapiens
  misc_RNA (1)...(19): siRNA sense strand
cggaacaucacuaaacaga

SEQ ID NO: 1812901 - RNA, 19 nt, Homo sapiens
  misc_RNA (1)...(19): siRNA sense strand
gcgcaggacucagaugacu

SEQ ID NO: 1812902 - RNA, 19 nt, Homo sapiens
  misc_RNA (1)...(19): siRNA sense strand
cguggcagaugcacugaug

SEQ ID NO: 1812903 - RNA, 19 nt, Homo sapiens
  misc_RNA (1)...(19): siRNA sense strand
gagcugcccugugugaaaa

SEQ ID NO: 1812904 - RNA, 19 nt, Homo sapiens
  misc_RNA (1)...(19): siRNA sense strand
ccaacagcccggaagaguu

SEQ ID NO: 1812905 - RNA, 19 nt, Homo sapiens
  misc_RNA (1)...(19): siRNA sense strand
ccagggcacccgaugcauu

SEQ ID NO: 1812906 - RNA, 19 nt, Homo sapiens
  misc_RNA (1)...(19): siRNA sense strand
caccugcgcuacccuacga

SEQ ID NO: 1812907 - RNA, 19 nt, Homo sapiens
  misc_RNA (1)...(19): siRNA sense strand
uaccagggccucccauaug

SEQ ID NO: 1812908 - RNA, 19 nt, Homo sapiens
  misc_RNA (1)...(19): siRNA sense strand
ugugggcucuuaucacugu

SEQ ID NO: 1812909 - RNA, 19 nt, Homo sapiens
  misc_RNA (1)...(19): siRNA sense strand
cccuugaucugucacaaug

SEQ ID NO: 1812910 - RNA, 19 nt, Homo sapiens
  misc_RNA (1)...(19): siRNA sense strand
cagcaacggcuacuacuac

SEQ ID NO: 1812911 - RNA, 19 nt, Homo sapiens
  misc_RNA (1)...(19): siRNA sense strand
aagaguggcguguguguga

SEQ ID NO: 1812912 - RNA, 19 nt, Homo sapiens
  misc_RNA (1)...(19): siRNA sense strand
gguccugugucccuugauc

SEQ ID NO: 1812913 - RNA, 19 nt, Homo sapiens
  misc_RNA (1)...(19): siRNA sense strand
gagaccaggugugcaagag

SEQ ID NO: 1812914 - RNA, 19 nt, Homo sapiens
  misc_RNA (1)...(19): siRNA sense strand
cauccuggcucggaaugug

SEQ ID NO: 1812915 - RNA, 19 nt, Homo sapiens
  misc_RNA (1)...(19): siRNA sense strand
cagggcacccgaugcauug

SEQ ID NO: 1812916 - RNA, 19 nt, Homo sapiens
  misc_RNA (1)...(19): siRNA sense strand
gagugcugcugccuguaug

SEQ ID NO: 1812917 - RNA, 19 nt, Homo sapiens
  misc_RNA (1)...(19): siRNA sense strand
ggagugcuauuuugacaca

SEQ ID NO: 1812918 - RNA, 19 nt, Homo sapiens
  misc_RNA (1)...(19): siRNA sense strand
gggaggacggcuacucaga

SEQ ID NO: 1812919 - RNA, 19 nt, Homo sapiens
  misc_RNA (1)...(19): siRNA sense strand
gaugagugccaagaauaug

SEQ ID NO: 1812920 - RNA, 19 nt, Homo sapiens
  misc_RNA (1)...(19): siRNA sense strand
ggcccaggacgcugcauuu

SEQ ID NO: 1812921 - RNA, 19 nt, Homo sapiens
  misc_RNA (1)...(19): siRNA sense strand
cgacaugccagacuuugag

SEQ ID NO: 1812922 - RNA, 19 nt, Homo sapiens
  misc_RNA (1)...(19): siRNA sense strand
guacggcccagacuuaggu

SEQ ID NO: 1812923 - RNA, 19 nt, Homo sapiens
  misc_RNA (1)...(19): siRNA sense strand
ccaggaggccagagcucua

SEQ ID NO: 1812924 - RNA, 19 nt, Homo sapiens
  misc_RNA (1)...(19): siRNA sense strand
uaauggguccugcgaagau

SEQ ID NO: 1812925 - RNA, 19 nt, Homo sapiens
  misc_RNA (1)...(19): siRNA sense strand
gauguggacgaaugcaguu

SEQ ID NO: 1812926 - RNA, 19 nt, Homo sapiens
  misc_RNA (1)...(19): siRNA sense strand
ugaagaggauguggaugag

SEQ ID NO: 1812927 - RNA, 19 nt, Homo sapiens
  misc_RNA (1)...(19): siRNA sense strand
gaggccagagcucuacuga

SEQ ID NO: 1812928 - RNA, 19 nt, Homo sapiens
  misc_RNA (1)...(19): siRNA sense strand
ggaacaucacuaaacagau

SEQ ID NO: 1812929 - RNA, 19 nt, Homo sapiens
  misc_RNA (1)...(19): siRNA sense strand
ggacgaugguggccccuau

SEQ ID NO: 1812930 - RNA, 19 nt, Homo sapiens
  misc_RNA (1)...(19): siRNA sense strand
ggcaggcuccuuucacugu

SEQ ID NO: 1812931 - RNA, 19 nt, Homo sapiens
  misc_RNA (1)...(19): siRNA sense strand
ggcacccgaugcauugaug

SEQ ID NO: 1812932 - RNA, 19 nt, Homo sapiens
  misc_RNA (1)...(19): siRNA sense strand
ccuccgaccuccgcuacaa

SEQ ID NO: 1812933 - RNA, 19 nt, Homo sapiens
  misc_RNA (1)...(19): siRNA sense strand
ucggccaucugcaggcuuu

SEQ ID NO: 1812934 - RNA, 19 nt, Homo sapiens
  misc_RNA (1)...(19): siRNA sense strand
gcuucgacaugccagacuu

SEQ ID NO: 1812935 - RNA, 19 nt, Homo sapiens
  misc_RNA (1)...(19): siRNA sense strand
ucgaggcccugugcaaugu

SEQ ID NO: 1812936 - RNA, 19 nt, Homo sapiens
  misc_RNA (1)...(19): siRNA sense strand
gagcccagcguugugagaa

SEQ ID NO: 1812937 - RNA, 19 nt, Homo sapiens
  misc_RNA (1)...(19): siRNA sense strand
ugcggaacaucacuaaaca

SEQ ID NO: 1812938 - RNA, 19 nt, Homo sapiens
  misc_RNA (1)...(19): siRNA sense strand
gcccagcguugugagaaca

SEQ ID NO: 1812939 - RNA, 19 nt, Homo sapiens
  misc_RNA (1)...(19): siRNA sense strand
caacauccuggcucggaau

SEQ ID NO: 1812940 - RNA, 19 nt, Homo sapiens
  misc_RNA (1)...(19): siRNA sense strand
guggagcugcccuguguga

SEQ ID NO: 1812941 - RNA, 19 nt, Homo sapiens
  misc_RNA (1)...(19): siRNA sense strand
uguccaaccggcuuugaaa

SEQ ID NO: 1812942 - RNA, 19 nt, Homo sapiens
  misc_RNA (1)...(19): siRNA sense strand
cacggccacugcacuaaca

SEQ ID NO: 1812943 - RNA, 19 nt, Homo sapiens
  misc_RNA (1)...(19): siRNA sense strand
ccagagccucgaugacaau

SEQ ID NO: 1812944 - RNA, 19 nt, Homo sapiens
  misc_RNA (1)...(19): siRNA sense strand
cguaaaagcguugcuguuu

SEQ ID NO: 1812945 - RNA, 19 nt, Homo sapiens
  misc_RNA (1)...(19): siRNA sense strand
cgagggcaccugugacgau

SEQ ID NO: 1812946 - RNA, 19 nt, Homo sapiens
  misc_RNA (1)...(19): siRNA sense strand
ugaaggaacugaaacauga

SEQ ID NO: 1812947 - RNA, 19 nt, Homo sapiens
  misc_RNA (1)...(19): siRNA sense strand
ggacacggcugcagcuuug

SEQ ID NO: 1812948 - RNA, 19 nt, Homo sapiens
  misc_RNA (1)...(19): siRNA sense strand
ucacugaccugcuccuuaa

SEQ ID NO: 1812949 - RNA, 19 nt, Homo sapiens
  misc_RNA (1)...(19): siRNA sense strand
ccacgcaggugcagaacua

SEQ ID NO: 1812950 - RNA, 19 nt, Homo sapiens
  misc_RNA (1)...(19): siRNA sense strand
ucaagugcauuaacaagaa

SEQ ID NO: 1812951 - RNA, 19 nt, Homo sapiens
  misc_RNA (1)...(19): siRNA sense strand
agaagaaccucgccaaguc

SEQ ID NO: 1812952 - RNA, 19 nt, Homo sapiens
  misc_RNA (1)...(19): siRNA sense strand
gcauggacuucgaugaguu

SEQ ID NO: 1812953 - RNA, 19 nt, Homo sapiens
  misc_RNA (1)...(19): siRNA sense strand
gcgagaagcacgauuugga

SEQ ID NO: 1812954 - RNA, 19 nt, Homo sapiens
  misc_RNA (1)...(19): siRNA sense strand
ggagaucgcagcccugaag

SEQ ID NO: 1812955 - RNA, 19 nt, Homo sapiens
  misc_RNA (1)...(19): siRNA sense strand
gaagguggccgagcuacug

SEQ ID NO: 1812956 - RNA, 19 nt, Homo sapiens
  misc_RNA (1)...(19): siRNA sense strand
gaaggaacugaaacaugaa

SEQ ID NO: 1812957 - RNA, 19 nt, Homo sapiens
  misc_RNA (1)...(19): siRNA sense strand
cggagagccugcaggagaa

SEQ ID NO: 1812958 - RNA, 19 nt, Homo sapiens
  misc_RNA (1)...(19): siRNA sense strand
gcacagcaaaggcaucauc

SEQ ID NO: 1812959 - RNA, 19 nt, Homo sapiens
  misc_RNA (1)...(19): siRNA sense strand
uccaggaaauggcuaauuc

SEQ ID NO: 1812960 - RNA, 19 nt, Homo sapiens
  misc_RNA (1)...(19): siRNA sense strand
cacccaagcugcccgacuu

SEQ ID NO: 1812961 - RNA, 19 nt, Homo sapiens
  misc_RNA (1)...(19): siRNA sense strand
ucgagaacgucaccaagug

SEQ ID NO: 1812962 - RNA, 19 nt, Homo sapiens
  misc_RNA (1)...(19): siRNA sense strand
gcugcugacuggcaucugu

SEQ ID NO: 1812963 - RNA, 19 nt, Homo sapiens
  misc_RNA (1)...(19): siRNA sense strand
gaagaaccucgccaagucu

SEQ ID NO: 1812964 - RNA, 19 nt, Homo sapiens
  misc_RNA (1)...(19): siRNA sense strand
gcagucacccacccaguuc

SEQ ID NO: 1812965 - RNA, 19 nt, Homo sapiens
  misc_RNA (1)...(19): siRNA sense strand
gcagaacuaccagcgcauu

SEQ ID NO: 1812966 - RNA, 19 nt, Homo sapiens
  misc_RNA (1)...(19): siRNA sense strand
gccgucaagugcauuaaca

SEQ ID NO: 1812967 - RNA, 19 nt, Homo sapiens
  misc_RNA (1)...(19): siRNA sense strand
aaagugccaucgaccagau

SEQ ID NO: 1812968 - RNA, 19 nt, Homo sapiens
  misc_RNA (1)...(19): siRNA sense strand
caagugcauuaacaagaag

SEQ ID NO: 1812969 - RNA, 19 nt, Homo sapiens
  misc_RNA (1)...(19): siRNA sense strand
gaacuaccagcgcauugag

SEQ ID NO: 1812970 - RNA, 19 nt, Homo sapiens
  misc_RNA (1)...(19): siRNA sense strand
cagagaccgugggcaaguu

SEQ ID NO: 1812971 - RNA, 19 nt, Homo sapiens
  misc_RNA (1)...(19): siRNA sense strand
cacgccaucuccucaaguu

SEQ ID NO: 1812972 - RNA, 19 nt, Homo sapiens
  misc_RNA (1)...(19): siRNA sense strand
gaccugaaaccgcagaaca

SEQ ID NO: 1812973 - RNA, 19 nt, Homo sapiens
  misc_RNA (1)...(19): siRNA sense strand
gcugugcccuccuuugacu

SEQ ID NO: 1812974 - RNA, 19 nt, Homo sapiens
  misc_RNA (1)...(19): siRNA sense strand
aauucugucuaccugguua

SEQ ID NO: 1812975 - RNA, 19 nt, Homo sapiens
  misc_RNA (1)...(19): siRNA sense strand
gcuccuggcccuacugcaa

SEQ ID NO: 1812976 - RNA, 19 nt, Homo sapiens
  misc_RNA (1)...(19): siRNA sense strand
gccgagaggcucaucuuca

SEQ ID NO: 1812977 - RNA, 19 nt, Homo sapiens
  misc_RNA (1)...(19): siRNA sense strand
caacagcauccgcgucaag

SEQ ID NO: 1812978 - RNA, 19 nt, Homo sapiens
  misc_RNA (1)...(19): siRNA sense strand
ccgagaggcucaucuucag

SEQ ID NO: 1812979 - RNA, 19 nt, Homo sapiens
  misc_RNA (1)...(19): siRNA sense strand
gaaccugcuggcccuccua

SEQ ID NO: 1812980 - RNA, 19 nt, Homo sapiens
  misc_RNA (1)...(19): siRNA sense strand
acaaggaccgcauggacuu

SEQ ID NO: 1812981 - RNA, 19 nt, Homo sapiens
  misc_RNA (1)...(19): siRNA sense strand
gucaagugcauuaacaaga

SEQ ID NO: 1812982 - RNA, 19 nt, Homo sapiens
  misc_RNA (1)...(19): siRNA sense strand
gaaauggcuaauucugucu

SEQ ID NO: 1812983 - RNA, 19 nt, Homo sapiens
  misc_RNA (1)...(19): siRNA sense strand
ggagaagcccauggagauc

SEQ ID NO: 1812984 - RNA, 19 nt, Homo sapiens
  misc_RNA (1)...(19): siRNA sense strand
cauggacuucgaugaguuu

SEQ ID NO: 1812985 - RNA, 19 nt, Homo sapiens
  misc_RNA (1)...(19): siRNA sense strand
cgcgguaccuccagagcaa

SEQ ID NO: 1812986 - RNA, 19 nt, Homo sapiens
  misc_RNA (1)...(19): siRNA sense strand
agaacauccugcuguccaa

SEQ ID NO: 1812987 - RNA, 19 nt, Homo sapiens
  misc_RNA (1)...(19): siRNA sense strand
gaacugaaacaugaaaaca

SEQ ID NO: 1812988 - RNA, 19 nt, Homo sapiens
  misc_RNA (1)...(19): siRNA sense strand
gcaggcugaaugagcugua

SEQ ID NO: 1812989 - RNA, 19 nt, Homo sapiens
  misc_RNA (1)...(19): siRNA sense strand
acccucagcuggcuuugga

SEQ ID NO: 1812990 - RNA, 19 nt, Homo sapiens
  misc_RNA (1)...(19): siRNA sense strand
aggagaagcccauggagau

SEQ ID NO: 1812991 - RNA, 19 nt, Homo sapiens
  misc_RNA (1)...(19): siRNA sense strand
gccaucuccucaaguugga

SEQ ID NO: 1812992 - RNA, 19 nt, Homo sapiens
  misc_RNA (1)...(19): siRNA sense strand
ucuaccugguuauggagua

SEQ ID NO: 1812993 - RNA, 19 nt, Homo sapiens
  misc_RNA (1)...(19): siRNA sense strand
ccgacuuccugcagcgaaa

SEQ ID NO: 1812994 - RNA, 19 nt, Homo sapiens
  misc_RNA (1)...(19): siRNA sense strand
ucaucacccuuuccucgau

SEQ ID NO: 1812995 - RNA, 19 nt, Homo sapiens
  misc_RNA (1)...(19): siRNA sense strand
cagcauccgcgucaagauc

SEQ ID NO: 1812996 - RNA, 19 nt, Homo sapiens
  misc_RNA (1)...(19): siRNA sense strand
ggugggacccuuccauggu

SEQ ID NO: 1812997 - RNA, 19 nt, Homo sapiens
  misc_RNA (1)...(19): siRNA sense strand
ugaagggcagcgccaguga

SEQ ID NO: 1812998 - RNA, 19 nt, Homo sapiens
  misc_RNA (1)...(19): siRNA sense strand
agacagagcuugagaauaa

SEQ ID NO: 1812999 - RNA, 19 nt, Homo sapiens
  misc_RNA (1)...(19): siRNA sense strand
gagaagaucuuuaugcaaa

SEQ ID NO: 1813000 - RNA, 19 nt, Homo sapiens
  misc_RNA (1)...(19): siRNA sense strand
gaagagaaaucagcagaua

SEQ ID NO: 1813001 - RNA, 19 nt, Homo sapiens
  misc_RNA (1)...(19): siRNA sense strand
aaacaaagauucagcauga

SEQ ID NO: 1813002 - RNA, 19 nt, Homo sapiens
  misc_RNA (1)...(19): siRNA sense strand
gaacaagacuauacuaagu

SEQ ID NO: 1813003 - RNA, 19 nt, Homo sapiens
  misc_RNA (1)...(19): siRNA sense strand
gaaacaaacggaugacuua

SEQ ID NO: 1813004 - RNA, 19 nt, Homo sapiens
  misc_RNA (1)...(19): siRNA sense strand
ucaaacagcuucaaucuga

SEQ ID NO: 1813005 - RNA, 19 nt, Homo sapiens
  misc_RNA (1)...(19): siRNA sense strand
gaaauaguauccaguacaa

SEQ ID NO: 1813006 - RNA, 19 nt, Homo sapiens
  misc_RNA (1)...(19): siRNA sense strand
gaacauaaaugagcuaaag

SEQ ID NO: 1813007 - RNA, 19 nt, Homo sapiens
  misc_RNA (1)...(19): siRNA sense strand
ggagaaacauaaugaagaa

SEQ ID NO: 1813008 - RNA, 19 nt, Homo sapiens
  misc_RNA (1)...(19): siRNA sense strand
aaagaaagcuggauaauac

SEQ ID NO: 1813009 - RNA, 19 nt, Homo sapiens
  misc_RNA (1)...(19): siRNA sense strand
gaagagcaguugaaggaaa

SEQ ID NO: 1813010 - RNA, 19 nt, Homo sapiens
  misc_RNA (1)...(19): siRNA sense strand
guaaacaacuugaaaugga

SEQ ID NO: 1813011 - RNA, 19 nt, Homo sapiens
  misc_RNA (1)...(19): siRNA sense strand
gaagcgagaugauguaaca

SEQ ID NO: 1813012 - RNA, 19 nt, Homo sapiens
  misc_RNA (1)...(19): siRNA sense strand
uaaguugcauuccgaaaua

SEQ ID NO: 1813013 - RNA, 19 nt, Homo sapiens
  misc_RNA (1)...(19): siRNA sense strand
agaaauaccucucuuuaga

SEQ ID NO: 1813014 - RNA, 19 nt, Homo sapiens
  misc_RNA (1)...(19): siRNA sense strand
cgaaguaacucaacuaaca

SEQ ID NO: 1813015 - RNA, 19 nt, Homo sapiens
  misc_RNA (1)...(19): siRNA sense strand
cagcagaacuacagucuuu

SEQ ID NO: 1813016 - RNA, 19 nt, Homo sapiens
  misc_RNA (1)...(19): siRNA sense strand
ucagagaccugguauagaa

SEQ ID NO: 1813017 - RNA, 19 nt, Homo sapiens
  misc_RNA (1)...(19): siRNA sense strand
uaaaggagaaggugaaaua

SEQ ID NO: 1813018 - RNA, 19 nt, Homo sapiens
  misc_RNA (1)...(19): siRNA sense strand
gaaaucagcagauacuaaa

SEQ ID NO: 1813019 - RNA, 19 nt, Homo sapiens
  misc_RNA (1)...(19): siRNA sense strand
gaaauuagaacuucaagga

SEQ ID NO: 1813020 - RNA, 19 nt, Homo sapiens
  misc_RNA (1)...(19): siRNA sense strand
cuaaacagcuucuaauuca

SEQ ID NO: 1813021 - RNA, 19 nt, Homo sapiens
  misc_RNA (1)...(19): siRNA sense strand
gagggaaucugaacuucua

SEQ ID NO: 1813022 - RNA, 19 nt, Homo sapiens
  misc_RNA (1)...(19): siRNA sense strand
ugacagagcuuucuacagu

SEQ ID NO: 1813023 - RNA, 19 nt, Homo sapiens
  misc_RNA (1)...(19): siRNA sense strand
ucaggucacugcaaaguua

SEQ ID NO: 1813024 - RNA, 19 nt, Homo sapiens
  misc_RNA (1)...(19): siRNA sense strand
uaaaugagcuaaagcaauc

SEQ ID NO: 1813025 - RNA, 19 nt, Homo sapiens
  misc_RNA (1)...(19): siRNA sense strand
gcagucagcuggaaaguca

SEQ ID NO: 1813026 - RNA, 19 nt, Homo sapiens
  misc_RNA (1)...(19): siRNA sense strand
gcaaagaauuaaagcauca

SEQ ID NO: 1813027 - RNA, 19 nt, Homo sapiens
  misc_RNA (1)...(19): siRNA sense strand
gaaccuugaagcuuuauua

SEQ ID NO: 1813028 - RNA, 19 nt, Homo sapiens
  misc_RNA (1)...(19): siRNA sense strand
aaacuuaccaugcagauua

SEQ ID NO: 1813029 - RNA, 19 nt, Homo sapiens
  misc_RNA (1)...(19): siRNA sense strand
gagcagaaggcacaucuua

SEQ ID NO: 1813030 - RNA, 19 nt, Homo sapiens
  misc_RNA (1)...(19): siRNA sense strand
aagcaacgguucagaauaa

SEQ ID NO: 1813031 - RNA, 19 nt, Homo sapiens
  misc_RNA (1)...(19): siRNA sense strand
ggaaguucguguauaugua

SEQ ID NO: 1813032 - RNA, 19 nt, Homo sapiens
  misc_RNA (1)...(19): siRNA sense strand
aaagacagcugaacacaga

SEQ ID NO: 1813033 - RNA, 19 nt, Homo sapiens
  misc_RNA (1)...(19): siRNA sense strand
gaauuugcaugaccaggua

SEQ ID NO: 1813034 - RNA, 19 nt, Homo sapiens
  misc_RNA (1)...(19): siRNA sense strand
aaucagaccuugacagaaa

SEQ ID NO: 1813035 - RNA, 19 nt, Homo sapiens
  misc_RNA (1)...(19): siRNA sense strand
agagacagcuuucaaguga

SEQ ID NO: 1813036 - RNA, 19 nt, Homo sapiens
  misc_RNA (1)...(19): siRNA sense strand
gaaagaagcuaaguugcau

SEQ ID NO: 1813037 - RNA, 19 nt, Homo sapiens
  misc_RNA (1)...(19): siRNA sense strand
gaacagagacagcuuucaa

SEQ ID NO: 1813038 - RNA, 19 nt, Homo sapiens
  misc_RNA (1)...(19): siRNA sense strand
caaagaaagcuggauaaua

SEQ ID NO: 1813039 - RNA, 19 nt, Homo sapiens
  misc_RNA (1)...(19): siRNA sense strand
aagaggagcugaagaaaga

SEQ ID NO: 1813040 - RNA, 19 nt, Homo sapiens
  misc_RNA (1)...(19): siRNA sense strand
ggcaagaucuuaagucugu

SEQ ID NO: 1813041 - RNA, 19 nt, Homo sapiens
  misc_RNA (1)...(19): siRNA sense strand
gggugaaauugcaguauua

SEQ ID NO: 1813042 - RNA, 19 nt, Homo sapiens
  misc_RNA (1)...(19): siRNA sense strand
gaagaagcccaaacagaaa

SEQ ID NO: 1813043 - RNA, 19 nt, Homo sapiens
  misc_RNA (1)...(19): siRNA sense strand
gagaagcucagaaugauuu

SEQ ID NO: 1813044 - RNA, 19 nt, Homo sapiens
  misc_RNA (1)...(19): siRNA sense strand
ggagugaacuguccaaagg

SEQ ID NO: 1813045 - RNA, 19 nt, Homo sapiens
  misc_RNA (1)...(19): siRNA sense strand
ggaggagagucuaaucuug

SEQ ID NO: 1813046 - RNA, 19 nt, Homo sapiens
  misc_RNA (1)...(19): siRNA sense strand
ucacuaaacuaaacgaaga

SEQ ID NO: 1813047 - RNA, 19 nt, Homo sapiens
  misc_RNA (1)...(19): siRNA sense strand
gagcuagaaggucaaauua

SEQ ID NO: 1813048 - RNA, 19 nt, Homo sapiens
  misc_RNA (1)...(19): siRNA sense strand
ccaggaaguucguguauau

SEQ ID NO: 1813049 - RNA, 19 nt, Homo sapiens
  misc_RNA (1)...(19): siRNA sense strand
gaacagcaauuagaagaag

SEQ ID NO: 1813050 - RNA, 19 nt, Homo sapiens
  misc_RNA (1)...(19): siRNA sense strand
gcagagauagaagaaauua

SEQ ID NO: 1813051 - RNA, 19 nt, Homo sapiens
  misc_RNA (1)...(19): siRNA sense strand
uaacagagaacgugaagaa

SEQ ID NO: 1813052 - RNA, 19 nt, Homo sapiens
  misc_RNA (1)...(19): siRNA sense strand
acaaguggcugauuuacaa

SEQ ID NO: 1813053 - RNA, 19 nt, Homo sapiens
  misc_RNA (1)...(19): siRNA sense strand
uaacucaacuaacagagaa

SEQ ID NO: 1813054 - RNA, 19 nt, Homo sapiens
  misc_RNA (1)...(19): siRNA sense strand
gcauaaaggagauaacaaa

SEQ ID NO: 1813055 - RNA, 19 nt, Homo sapiens
  misc_RNA (1)...(19): siRNA sense strand
cuacugaaauugcagauau

SEQ ID NO: 1813056 - RNA, 19 nt, Homo sapiens
  misc_RNA (1)...(19): siRNA sense strand
ucaaugacuugcaaggaua

SEQ ID NO: 1813057 - RNA, 19 nt, Homo sapiens
  misc_RNA (1)...(19): siRNA sense strand
gcuagaaggucaaauuaag

SEQ ID NO: 1813058 - RNA, 19 nt, Homo sapiens
  misc_RNA (1)...(19): siRNA sense strand
gaaauaccucucuuuagaa

SEQ ID NO: 1813059 - RNA, 19 nt, Homo sapiens
  misc_RNA (1)...(19): siRNA sense strand
gcuggaaagucaucuuaaa

SEQ ID NO: 1813060 - RNA, 19 nt, Homo sapiens
  misc_RNA (1)...(19): siRNA sense strand
ccagaaccuugaagcuuua

SEQ ID NO: 1813061 - RNA, 19 nt, Homo sapiens
  misc_RNA (1)...(19): siRNA sense strand
ucugaaaccucacugcaua

SEQ ID NO: 1813062 - RNA, 19 nt, Homo sapiens
  misc_RNA (1)...(19): siRNA sense strand
agaaagaacugguccaagu

SEQ ID NO: 1813063 - RNA, 19 nt, Homo sapiens
  misc_RNA (1)...(19): siRNA sense strand
gguuacaacuccaaaguga

SEQ ID NO: 1813064 - RNA, 19 nt, Homo sapiens
  misc_RNA (1)...(19): siRNA sense strand
ugaagaaucugugaguaaa

SEQ ID NO: 1813065 - RNA, 19 nt, Homo sapiens
  misc_RNA (1)...(19): siRNA sense strand
caaagaggcaacuguaauu

SEQ ID NO: 1813066 - RNA, 19 nt, Homo sapiens
  misc_RNA (1)...(19): siRNA sense strand
acacaagcguugaauagaa

SEQ ID NO: 1813067 - RNA, 19 nt, Homo sapiens
  misc_RNA (1)...(19): siRNA sense strand
gaagcaacgguucagaaua

SEQ ID NO: 1813068 - RNA, 19 nt, Homo sapiens
  misc_RNA (1)...(19): siRNA sense strand
uuagugagcuugagaaaca

SEQ ID NO: 1813069 - RNA, 19 nt, Homo sapiens
  misc_RNA (1)...(19): siRNA sense strand
gcaaucaagugaacagaag

SEQ ID NO: 1813070 - RNA, 19 nt, Homo sapiens
  misc_RNA (1)...(19): siRNA sense strand
cagagaacgugaagaauca

SEQ ID NO: 1813071 - RNA, 19 nt, Homo sapiens
  misc_RNA (1)...(19): siRNA sense strand
gcaacagcaucaagaacaa

SEQ ID NO: 1813072 - RNA, 19 nt, Homo sapiens
  misc_RNA (1)...(19): siRNA sense strand
gcagaaggcacaucuuaga

SEQ ID NO: 1813073 - RNA, 19 nt, Homo sapiens
  misc_RNA (1)...(19): siRNA sense strand
gaaaaugaggcuaaacuua

SEQ ID NO: 1813074 - RNA, 19 nt, Homo sapiens
  misc_RNA (1)...(19): siRNA sense strand
uacaagacauucagaaaga

SEQ ID NO: 1813075 - RNA, 19 nt, Homo sapiens
  misc_RNA (1)...(19): siRNA sense strand
ccaacuugcuacugaaauu

SEQ ID NO: 1813076 - RNA, 19 nt, Homo sapiens
  misc_RNA (1)...(19): siRNA sense strand
cgaagacaaugaaguacaa

SEQ ID NO: 1813077 - RNA, 19 nt, Homo sapiens
  misc_RNA (1)...(19): siRNA sense strand
gaacucaagucccacaaac

SEQ ID NO: 1813078 - RNA, 19 nt, Homo sapiens
  misc_RNA (1)...(19): siRNA sense strand
uaagauuacuacucaguug

SEQ ID NO: 1813079 - RNA, 19 nt, Homo sapiens
  misc_RNA (1)...(19): siRNA sense strand
acucaaagaugaaucgaaa

SEQ ID NO: 1813080 - RNA, 19 nt, Homo sapiens
  misc_RNA (1)...(19): siRNA sense strand
ucgagaagcugcugaacaa

SEQ ID NO: 1813081 - RNA, 19 nt, Homo sapiens
  misc_RNA (1)...(19): siRNA sense strand
gcacaagaccguguccuuu

SEQ ID NO: 1813082 - RNA, 19 nt, Homo sapiens
  misc_RNA (1)...(19): siRNA sense strand
guucaaacacuaauggaua

SEQ ID NO: 1813083 - RNA, 19 nt, Homo sapiens
  misc_RNA (1)...(19): siRNA sense strand
aaacaaagaggcaacugua

SEQ ID NO: 1813084 - RNA, 19 nt, Homo sapiens
  misc_RNA (1)...(19): siRNA sense strand
gguccaaguucaaacacua

SEQ ID NO: 1813085 - RNA, 19 nt, Homo sapiens
  misc_RNA (1)...(19): siRNA sense strand
gaaagugggccgaagacaa

SEQ ID NO: 1813086 - RNA, 19 nt, Homo sapiens
  misc_RNA (1)...(19): siRNA sense strand
gaagaagcaugaagaaaau

SEQ ID NO: 1813087 - RNA, 19 nt, Homo sapiens
  misc_RNA (1)...(19): siRNA sense strand
gaagacagagcuugagaau

SEQ ID NO: 1813088 - RNA, 19 nt, Homo sapiens
  misc_RNA (1)...(19): siRNA sense strand
aaacaaauccugaaacaag

SEQ ID NO: 1813089 - RNA, 19 nt, Homo sapiens
  misc_RNA (1)...(19): siRNA sense strand
gcugauagucuugaaguua

SEQ ID NO: 1813090 - RNA, 19 nt, Homo sapiens
  misc_RNA (1)...(19): siRNA sense strand
gaagcuuuauuacagaaga

SEQ ID NO: 1813091 - RNA, 19 nt, Homo sapiens
  misc_RNA (1)...(19): siRNA sense strand
ggagagcacuacuggaaag

SEQ ID NO: 1813092 - RNA, 19 nt, Homo sapiens
  misc_RNA (1)...(19): siRNA sense strand
gaaugaagaagcaugaaga

SEQ ID NO: 1813093 - RNA, 19 nt, Homo sapiens
  misc_RNA (1)...(19): siRNA sense strand
cagcuugacauacagauua

SEQ ID NO: 1813094 - RNA, 19 nt, Homo sapiens
  misc_RNA (1)...(19): siRNA sense strand
ggauaaagaacaacaagug

SEQ ID NO: 1813095 - RNA, 19 nt, Homo sapiens
  misc_RNA (1)...(19): siRNA sense strand
gagcacuacuggaaagaug

SEQ ID NO: 1813096 - RNA, 19 nt, Homo sapiens
  misc_RNA (1)...(19): siRNA sense strand
guaaagcacuacaagacau

SEQ ID NO: 1813097 - RNA, 19 nt, Homo sapiens
  misc_RNA (1)...(19): siRNA sense strand
acucaaacuuucucgguua

SEQ ID NO: 1813098 - RNA, 19 nt, Homo sapiens
  misc_RNA (1)...(19): siRNA sense strand
ggaaagcccugguacauga

SEQ ID NO: 1813099 - RNA, 19 nt, Homo sapiens
  misc_RNA (1)...(19): siRNA sense strand
ggacuuugcugccuaaauu

SEQ ID NO: 1813100 - RNA, 19 nt, Homo sapiens
  misc_RNA (1)...(19): siRNA sense strand
gaaaggugccauccaguua

SEQ ID NO: 1813101 - RNA, 19 nt, Homo sapiens
  misc_RNA (1)...(19): siRNA sense strand
cugcagagcuucaagauaa

SEQ ID NO: 1813102 - RNA, 19 nt, Homo sapiens
  misc_RNA (1)...(19): siRNA sense strand
gcagugagccgcugauuga

SEQ ID NO: 1813103 - RNA, 19 nt, Homo sapiens
  misc_RNA (1)...(19): siRNA sense strand
agucagaguucacccauua

SEQ ID NO: 1813104 - RNA, 19 nt, Homo sapiens
  misc_RNA (1)...(19): siRNA sense strand
gaaacacaguacucaguug

SEQ ID NO: 1813105 - RNA, 19 nt, Homo sapiens
  misc_RNA (1)...(19): siRNA sense strand
gaacacaaggcacaaguga

SEQ ID NO: 1813106 - RNA, 19 nt, Homo sapiens
  misc_RNA (1)...(19): siRNA sense strand
gcaacacaguauuuaagaa

SEQ ID NO: 1813107 - RNA, 19 nt, Homo sapiens
  misc_RNA (1)...(19): siRNA sense strand
gcaagaacauucggauugu

SEQ ID NO: 1813108 - RNA, 19 nt, Homo sapiens
  misc_RNA (1)...(19): siRNA sense strand
uuaagaagauucccuugaa

SEQ ID NO: 1813109 - RNA, 19 nt, Homo sapiens
  misc_RNA (1)...(19): siRNA sense strand
caggagagacaacauauaa

SEQ ID NO: 1813110 - RNA, 19 nt, Homo sapiens
  misc_RNA (1)...(19): siRNA sense strand
caaaugcuaacuacaagua

SEQ ID NO: 1813111 - RNA, 19 nt, Homo sapiens
  misc_RNA (1)...(19): siRNA sense strand
ggagagacuuugcaaaugc

SEQ ID NO: 1813112 - RNA, 19 nt, Homo sapiens
  misc_RNA (1)...(19): siRNA sense strand
uuaagacaguccaacauaa

SEQ ID NO: 1813113 - RNA, 19 nt, Homo sapiens
  misc_RNA (1)...(19): siRNA sense strand
acacaguacucaguugaua

SEQ ID NO: 1813114 - RNA, 19 nt, Homo sapiens
  misc_RNA (1)...(19): siRNA sense strand
ggagacugaugaccauaug

SEQ ID NO: 1813115 - RNA, 19 nt, Homo sapiens
  misc_RNA (1)...(19): siRNA sense strand
uaaauucuauggacuguac

SEQ ID NO: 1813116 - RNA, 19 nt, Homo sapiens
  misc_RNA (1)...(19): siRNA sense strand
uacaaugacuuucguuuca

SEQ ID NO: 1813117 - RNA, 19 nt, Homo sapiens
  misc_RNA (1)...(19): siRNA sense strand
gcacaacgagagcccuuaa

SEQ ID NO: 1813118 - RNA, 19 nt, Homo sapiens
  misc_RNA (1)...(19): siRNA sense strand
gaccuagacuucuuacaag

SEQ ID NO: 1813119 - RNA, 19 nt, Homo sapiens
  misc_RNA (1)...(19): siRNA sense strand
gauacuacaugaaccucaa

SEQ ID NO: 1813120 - RNA, 19 nt, Homo sapiens
  misc_RNA (1)...(19): siRNA sense strand
gaaaauaggccauagaagu

SEQ ID NO: 1813121 - RNA, 19 nt, Homo sapiens
  misc_RNA (1)...(19): siRNA sense strand
uaagacaguccaacauaaa

SEQ ID NO: 1813122 - RNA, 19 nt, Homo sapiens
  misc_RNA (1)...(19): siRNA sense strand
caucugaggugccuuaugc

SEQ ID NO: 1813123 - RNA, 19 nt, Homo sapiens
  misc_RNA (1)...(19): siRNA sense strand
gcaacuccugcauuacuua

SEQ ID NO: 1813124 - RNA, 19 nt, Homo sapiens
  misc_RNA (1)...(19): siRNA sense strand
aguggcaacuccugcauua

SEQ ID NO: 1813125 - RNA, 19 nt, Homo sapiens
  misc_RNA (1)...(19): siRNA sense strand
ggcaagaacauucggauug

SEQ ID NO: 1813126 - RNA, 19 nt, Homo sapiens
  misc_RNA (1)...(19): siRNA sense strand
acaugaaccucaaccagaa

SEQ ID NO: 1813127 - RNA, 19 nt, Homo sapiens
  misc_RNA (1)...(19): siRNA sense strand
caagaccuaugcaccuguu

SEQ ID NO: 1813128 - RNA, 19 nt, Homo sapiens
  misc_RNA (1)...(19): siRNA sense strand
caaaggcucaaccuacaaa

SEQ ID NO: 1813129 - RNA, 19 nt, Homo sapiens
  misc_RNA (1)...(19): siRNA sense strand
ccagaacccucggacuuug

SEQ ID NO: 1813130 - RNA, 19 nt, Homo sapiens
  misc_RNA (1)...(19): siRNA sense strand
gcccgaugauuacuuguau

SEQ ID NO: 1813131 - RNA, 19 nt, Homo sapiens
  misc_RNA (1)...(19): siRNA sense strand
gcaggcagguggcaagaac

SEQ ID NO: 1813132 - RNA, 19 nt, Homo sapiens
  misc_RNA (1)...(19): siRNA sense strand
ggagagacaacauauaaaa

SEQ ID NO: 1813133 - RNA, 19 nt, Homo sapiens
  misc_RNA (1)...(19): siRNA sense strand
agugagggcucgccuauuc

SEQ ID NO: 1813134 - RNA, 19 nt, Homo sapiens
  misc_RNA (1)...(19): siRNA sense strand
ucuacagucuuacagguuu

SEQ ID NO: 1813135 - RNA, 19 nt, Homo sapiens
  misc_RNA (1)...(19): siRNA sense strand
gguugagaguaucuucuuu

SEQ ID NO: 1813136 - RNA, 19 nt, Homo sapiens
  misc_RNA (1)...(19): siRNA sense strand
gcuugaaguugcagaguca

SEQ ID NO: 1813137 - RNA, 19 nt, Homo sapiens
  misc_RNA (1)...(19): siRNA sense strand
uaagaagauucccuugaag

SEQ ID NO: 1813138 - RNA, 19 nt, Homo sapiens
  misc_RNA (1)...(19): siRNA sense strand
gccauccaguuaggcauua

SEQ ID NO: 1813139 - RNA, 19 nt, Homo sapiens
  misc_RNA (1)...(19): siRNA sense strand
aggcacaagugacaacaaa

SEQ ID NO: 1813140 - RNA, 19 nt, Homo sapiens
  misc_RNA (1)...(19): siRNA sense strand
caacacaguauuuaagaag

SEQ ID NO: 1813141 - RNA, 19 nt, Homo sapiens
  misc_RNA (1)...(19): siRNA sense strand
gugauguccucaugcaaga

SEQ ID NO: 1813142 - RNA, 19 nt, Homo sapiens
  misc_RNA (1)...(19): siRNA sense strand
gcagguggcaagaacauuc

SEQ ID NO: 1813143 - RNA, 19 nt, Homo sapiens
  misc_RNA (1)...(19): siRNA sense strand
ucuauggacuguacugugu

SEQ ID NO: 1813144 - RNA, 19 nt, Homo sapiens
  misc_RNA (1)...(19): siRNA sense strand
gugguucccuauucuaugu

SEQ ID NO: 1813145 - RNA, 19 nt, Homo sapiens
  misc_RNA (1)...(19): siRNA sense strand
gcacaagugacaacaaagg

SEQ ID NO: 1813146 - RNA, 19 nt, Homo sapiens
  misc_RNA (1)...(19): siRNA sense strand
gcuagugguucccuauucu

SEQ ID NO: 1813147 - RNA, 19 nt, Homo sapiens
  misc_RNA (1)...(19): siRNA sense strand
uaaagaggcggaauuucug

SEQ ID NO: 1813148 - RNA, 19 nt, Homo sapiens
  misc_RNA (1)...(19): siRNA sense strand
ggcaacuccugcauuacuu

SEQ ID NO: 1813149 - RNA, 19 nt, Homo sapiens
  misc_RNA (1)...(19): siRNA sense strand
uggcaucauugacauucua

SEQ ID NO: 1813150 - RNA, 19 nt, Homo sapiens
  misc_RNA (1)...(19): siRNA sense strand
gugguaccauggagacuga

SEQ ID NO: 1813151 - RNA, 19 nt, Homo sapiens
  misc_RNA (1)...(19): siRNA sense strand
agaccuagacuucuuacaa

SEQ ID NO: 1813152 - RNA, 19 nt, Homo sapiens
  misc_RNA (1)...(19): siRNA sense strand
ugaaaggugccauccaguu

SEQ ID NO: 1813153 - RNA, 19 nt, Homo sapiens
  misc_RNA (1)...(19): siRNA sense strand
acagguuuguuaagaaguu

SEQ ID NO: 1813154 - RNA, 19 nt, Homo sapiens
  misc_RNA (1)...(19): siRNA sense strand
aaacacaguacucaguuga

SEQ ID NO: 1813155 - RNA, 19 nt, Homo sapiens
  misc_RNA (1)...(19): siRNA sense strand
agagacccauggcaucuga

SEQ ID NO: 1813156 - RNA, 19 nt, Homo sapiens
  misc_RNA (1)...(19): siRNA sense strand
caagaacauucggauugug

SEQ ID NO: 1813157 - RNA, 19 nt, Homo sapiens
  misc_RNA (1)...(19): siRNA sense strand
uggagagacuuugcaaaug

SEQ ID NO: 1813158 - RNA, 19 nt, Homo sapiens
  misc_RNA (1)...(19): siRNA sense strand
ggccauagaaguguugauu

SEQ ID NO: 1813159 - RNA, 19 nt, Homo sapiens
  misc_RNA (1)...(19): siRNA sense strand
uguauucccucugcaguga

SEQ ID NO: 1813160 - RNA, 19 nt, Homo sapiens
  misc_RNA (1)...(19): siRNA sense strand
uuacagguuuguuaagaag

SEQ ID NO: 1813161 - RNA, 19 nt, Homo sapiens
  misc_RNA (1)...(19): siRNA sense strand
ugaaacacaguacucaguu

SEQ ID NO: 1813162 - RNA, 19 nt, Homo sapiens
  misc_RNA (1)...(19): siRNA sense strand
acauaaagaggcggaauuu

SEQ ID NO: 1813163 - RNA, 19 nt, Homo sapiens
  misc_RNA (1)...(19): siRNA sense strand
gauguccucaugcaagauu

SEQ ID NO: 1813164 - RNA, 19 nt, Homo sapiens
  misc_RNA (1)...(19): siRNA sense strand
acacaaggcacaagugaca

SEQ ID NO: 1813165 - RNA, 19 nt, Homo sapiens
  misc_RNA (1)...(19): siRNA sense strand
ccucaggagagacaacaua

SEQ ID NO: 1813166 - RNA, 19 nt, Homo sapiens
  misc_RNA (1)...(19): siRNA sense strand
ucaggagagacaacauaua

SEQ ID NO: 1813167 - RNA, 19 nt, Homo sapiens
  misc_RNA (1)...(19): siRNA sense strand
ccagaaagagcgagagaag

SEQ ID NO: 1813168 - RNA, 19 nt, Homo sapiens
  misc_RNA (1)...(19): siRNA sense strand
ucaaauaugaccucaaagg

SEQ ID NO: 1813169 - RNA, 19 nt, Homo sapiens
  misc_RNA (1)...(19): siRNA sense strand
gcaagauuucuacgugguu

SEQ ID NO: 1813170 - RNA, 19 nt, Homo sapiens
  misc_RNA (1)...(19): siRNA sense strand
caacgagagcccuuaagca

SEQ ID NO: 1813171 - RNA, 19 nt, Homo sapiens
  misc_RNA (1)...(19): siRNA sense strand
caaugacuuucguuucaag

SEQ ID NO: 1813172 - RNA, 19 nt, Homo sapiens
  misc_RNA (1)...(19): siRNA sense strand
gagucagaguucacccauu

SEQ ID NO: 1813173 - RNA, 19 nt, Homo sapiens
  misc_RNA (1)...(19): siRNA sense strand
gcugcagagcuucaagaua

SEQ ID NO: 1813174 - RNA, 19 nt, Homo sapiens
  misc_RNA (1)...(19): siRNA sense strand
auaaagaggcggaauuucu

SEQ ID NO: 1813175 - RNA, 19 nt, Homo sapiens
  misc_RNA (1)...(19): siRNA sense strand
ccauagaaguguugauucc

SEQ ID NO: 1813176 - RNA, 19 nt, Homo sapiens
  misc_RNA (1)...(19): siRNA sense strand
gagcuagugguucccuauu

SEQ ID NO: 1813177 - RNA, 19 nt, Homo sapiens
  misc_RNA (1)...(19): siRNA sense strand
acaaugacuuucguuucaa

SEQ ID NO: 1813178 - RNA, 19 nt, Homo sapiens
  misc_RNA (1)...(19): siRNA sense strand
uaacuacaaguacaaccuu

SEQ ID NO: 1813179 - RNA, 19 nt, Homo sapiens
  misc_RNA (1)...(19): siRNA sense strand
gacaacaaaggcagaagug

SEQ ID NO: 1813180 - RNA, 19 nt, Homo sapiens
  misc_RNA (1)...(19): siRNA sense strand
uugacauucuacagucuua

SEQ ID NO: 1813181 - RNA, 19 nt, Homo sapiens
  misc_RNA (1)...(19): siRNA sense strand
uauauuggcaucauugaca

SEQ ID NO: 1813182 - RNA, 19 nt, Homo sapiens
  misc_RNA (1)...(19): siRNA sense strand
ucacuacaaugacuuucgu

SEQ ID NO: 1813183 - RNA, 19 nt, Homo sapiens
  misc_RNA (1)...(19): siRNA sense strand
ggaacacaaggcacaagug

SEQ ID NO: 1813184 - RNA, 19 nt, Homo sapiens
  misc_RNA (1)...(19): siRNA sense strand
auuaagacaguccaacaua

SEQ ID NO: 1813185 - RNA, 19 nt, Homo sapiens
  misc_RNA (1)...(19): siRNA sense strand
uaucuucuuucccagugaa

SEQ ID NO: 1813186 - RNA, 19 nt, Homo sapiens
  misc_RNA (1)...(19): siRNA sense strand
gcagugaaacacaguacuc

SEQ ID NO: 1813187 - RNA, 19 nt, Homo sapiens
  misc_RNA (1)...(19): siRNA sense strand
cucaaaggcucaaccuaca

SEQ ID NO: 1813188 - RNA, 19 nt, Homo sapiens
  misc_RNA (1)...(19): siRNA sense strand
ggagcuagugguucccuau

SEQ ID NO: 1813189 - RNA, 19 nt, Homo sapiens
  misc_RNA (1)...(19): siRNA sense strand
gugagccgcugauugaacu

SEQ ID NO: 1813190 - RNA, 19 nt, Homo sapiens
  misc_RNA (1)...(19): siRNA sense strand
uccgggagcuauuugguau

SEQ ID NO: 1813191 - RNA, 19 nt, Homo sapiens
  misc_RNA (1)...(19): siRNA sense strand
cuacaaugacuuucguuuc

SEQ ID NO: 1813192 - RNA, 19 nt, Homo sapiens
  misc_RNA (1)...(19): siRNA sense strand
gcuuuauauuggcaucauu

SEQ ID NO: 1813193 - RNA, 19 nt, Homo sapiens
  misc_RNA (1)...(19): siRNA sense strand
gagagacuuugcaaaugcu

SEQ ID NO: 1813194 - RNA, 19 nt, Homo sapiens
  misc_RNA (1)...(19): siRNA sense strand
uuucucaccucuaguugga

SEQ ID NO: 1813195 - RNA, 19 nt, Homo sapiens
  misc_RNA (1)...(19): siRNA sense strand
ggaaaagcuugaaguugca

SEQ ID NO: 1813196 - RNA, 19 nt, Homo sapiens
  misc_RNA (1)...(19): siRNA sense strand
gcaaaugcuaacuacaagu

SEQ ID NO: 1813197 - RNA, 19 nt, Homo sapiens
  misc_RNA (1)...(19): siRNA sense strand
uugcaaaugcuaacuacaa

SEQ ID NO: 1813198 - RNA, 19 nt, Homo sapiens
  misc_RNA (1)...(19): siRNA sense strand
ggagauugcuaacugcuua

SEQ ID NO: 1813199 - RNA, 19 nt, Homo sapiens
  misc_RNA (1)...(19): siRNA sense strand
gaacaaaugccaagaacug

SEQ ID NO: 1813200 - RNA, 19 nt, Homo sapiens
  misc_RNA (1)...(19): siRNA sense strand
gccaagaacuguugugcaa

SEQ ID NO: 1813201 - RNA, 19 nt, Homo sapiens
  misc_RNA (1)...(19): siRNA sense strand
caaacugaguacaacuuaa

SEQ ID NO: 1813202 - RNA, 19 nt, Homo sapiens
  misc_RNA (1)...(19): siRNA sense strand
caagaacuguugugcaagu

SEQ ID NO: 1813203 - RNA, 19 nt, Homo sapiens
  misc_RNA (1)...(19): siRNA sense strand
gagaacaaaugccaagaac

SEQ ID NO: 1813204 - RNA, 19 nt, Homo sapiens
  misc_RNA (1)...(19): siRNA sense strand
ccaaacugaguacaacuua

SEQ ID NO: 1813205 - RNA, 19 nt, Homo sapiens
  misc_RNA (1)...(19): siRNA sense strand
gaaauaugguugcuuuugu

SEQ ID NO: 1813206 - RNA, 19 nt, Homo sapiens
  misc_RNA (1)...(19): siRNA sense strand
ggcgaggccuccaggauau

SEQ ID NO: 1813207 - RNA, 19 nt, Homo sapiens
  misc_RNA (1)...(19): siRNA sense strand
caaaugccaagaacuguug

SEQ ID NO: 1813208 - RNA, 19 nt, Homo sapiens
  misc_RNA (1)...(19): siRNA sense strand
ggccacgacuguuguuaca

SEQ ID NO: 1813209 - RNA, 19 nt, Homo sapiens
  misc_RNA (1)...(19): siRNA sense strand
ggaacuguggguuguguug

SEQ ID NO: 1813210 - RNA, 19 nt, Homo sapiens
  misc_RNA (1)...(19): siRNA sense strand
ccacgacuguuguuacacu

SEQ ID NO: 1813211 - RNA, 19 nt, Homo sapiens
  misc_RNA (1)...(19): siRNA sense strand
ggcaggaacuguggguugu

SEQ ID NO: 1813212 - RNA, 19 nt, Homo sapiens
  misc_RNA (1)...(19): siRNA sense strand
cgaggccuccaggauauua

SEQ ID NO: 1813213 - RNA, 19 nt, Homo sapiens
  misc_RNA (1)...(19): siRNA sense strand
gcaagugugaccaggagau

SEQ ID NO: 1813214 - RNA, 19 nt, Homo sapiens
  misc_RNA (1)...(19): siRNA sense strand
agagaacaaaugccaagaa

SEQ ID NO: 1813215 - RNA, 19 nt, Homo sapiens
  misc_RNA (1)...(19): siRNA sense strand
cggacucgcccaaguguga

SEQ ID NO: 1813216 - RNA, 19 nt, Homo sapiens
  misc_RNA (1)...(19): siRNA sense strand
accaggagauugcuaacug

SEQ ID NO: 1813217 - RNA, 19 nt, Homo sapiens
  misc_RNA (1)...(19): siRNA sense strand
gcuuagcccaaacugagua

SEQ ID NO: 1813218 - RNA, 19 nt, Homo sapiens
  misc_RNA (1)...(19): siRNA sense strand
caggaacuguggguugugu

SEQ ID NO: 1813219 - RNA, 19 nt, Homo sapiens
  misc_RNA (1)...(19): siRNA sense strand
caagugugaccaggagauu

SEQ ID NO: 1813220 - RNA, 19 nt, Homo sapiens
  misc_RNA (1)...(19): siRNA sense strand
gaccggcagagaacaaaug

SEQ ID NO: 1813221 - RNA, 19 nt, Homo sapiens
  misc_RNA (1)...(19): siRNA sense strand
gccauggccacgacuguug

SEQ ID NO: 1813222 - RNA, 19 nt, Homo sapiens
  misc_RNA (1)...(19): siRNA sense strand
acaaaugccaagaacuguu

SEQ ID NO: 1813223 - RNA, 19 nt, Homo sapiens
  misc_RNA (1)...(19): siRNA sense strand
gugaccaggagauugcuaa

SEQ ID NO: 1813224 - RNA, 19 nt, Homo sapiens
  misc_RNA (1)...(19): siRNA sense strand
ccaucgccuauaugaaaua

SEQ ID NO: 1813225 - RNA, 19 nt, Homo sapiens
  misc_RNA (1)...(19): siRNA sense strand
gaaaggagcuucugauugc

SEQ ID NO: 1813226 - RNA, 19 nt, Homo sapiens
  misc_RNA (1)...(19): siRNA sense strand
gcacaagaauccuaugaaa

SEQ ID NO: 1813227 - RNA, 19 nt, Homo sapiens
  misc_RNA (1)...(19): siRNA sense strand
ggacuuaacuggagagguu

SEQ ID NO: 1813228 - RNA, 19 nt, Homo sapiens
  misc_RNA (1)...(19): siRNA sense strand
ccaaauuccuucaaugaua

SEQ ID NO: 1813229 - RNA, 19 nt, Homo sapiens
  misc_RNA (1)...(19): siRNA sense strand
gaugaugacuuacauagaa

SEQ ID NO: 1813230 - RNA, 19 nt, Homo sapiens
  misc_RNA (1)...(19): siRNA sense strand
ucaaggagguucagaguaa

SEQ ID NO: 1813231 - RNA, 19 nt, Homo sapiens
  misc_RNA (1)...(19): siRNA sense strand
gaauacaccugaugaaaca

SEQ ID NO: 1813232 - RNA, 19 nt, Homo sapiens
  misc_RNA (1)...(19): siRNA sense strand
caauguagcucuggauaua

SEQ ID NO: 1813233 - RNA, 19 nt, Homo sapiens
  misc_RNA (1)...(19): siRNA sense strand
gaucaaauccacacacaua

SEQ ID NO: 1813234 - RNA, 19 nt, Homo sapiens
  misc_RNA (1)...(19): siRNA sense strand
ccaaagagacacagauuua

SEQ ID NO: 1813235 - RNA, 19 nt, Homo sapiens
  misc_RNA (1)...(19): siRNA sense strand
ggagaagccuguaugagaa

SEQ ID NO: 1813236 - RNA, 19 nt, Homo sapiens
  misc_RNA (1)...(19): siRNA sense strand
gaaaauggcucgaaaggaa

SEQ ID NO: 1813237 - RNA, 19 nt, Homo sapiens
  misc_RNA (1)...(19): siRNA sense strand
ugaauuaaaugcccaguuu

SEQ ID NO: 1813238 - RNA, 19 nt, Homo sapiens
  misc_RNA (1)...(19): siRNA sense strand
caacuucggagaugaauua

SEQ ID NO: 1813239 - RNA, 19 nt, Homo sapiens
  misc_RNA (1)...(19): siRNA sense strand
gcagaauguuuaugaguuu

SEQ ID NO: 1813240 - RNA, 19 nt, Homo sapiens
  misc_RNA (1)...(19): siRNA sense strand
gaaaggaaugcuccaguua

SEQ ID NO: 1813241 - RNA, 19 nt, Homo sapiens
  misc_RNA (1)...(19): siRNA sense strand
gcacuucucuuugucauga

SEQ ID NO: 1813242 - RNA, 19 nt, Homo sapiens
  misc_RNA (1)...(19): siRNA sense strand
cggaagaccuugaauuaaa

SEQ ID NO: 1813243 - RNA, 19 nt, Homo sapiens
  misc_RNA (1)...(19): siRNA sense strand
aagaaugggucaagaauaa

SEQ ID NO: 1813244 - RNA, 19 nt, Homo sapiens
  misc_RNA (1)...(19): siRNA sense strand
gaacaggcgugguaugcaa

SEQ ID NO: 1813245 - RNA, 19 nt, Homo sapiens
  misc_RNA (1)...(19): siRNA sense strand
agaaaugguugguaugaua

SEQ ID NO: 1813246 - RNA, 19 nt, Homo sapiens
  misc_RNA (1)...(19): siRNA sense strand
gugcugagcuuccugcuaa

SEQ ID NO: 1813247 - RNA, 19 nt, Homo sapiens
  misc_RNA (1)...(19): siRNA sense strand
ugaaacagauuuacaagga

SEQ ID NO: 1813248 - RNA, 19 nt, Homo sapiens
  misc_RNA (1)...(19): siRNA sense strand
caagugaacuaugggaaua

SEQ ID NO: 1813249 - RNA, 19 nt, Homo sapiens
  misc_RNA (1)...(19): siRNA sense strand
gcucguacuugaaauaauu

SEQ ID NO: 1813250 - RNA, 19 nt, Homo sapiens
  misc_RNA (1)...(19): siRNA sense strand
aaacuacggucccuuauau

SEQ ID NO: 1813251 - RNA, 19 nt, Homo sapiens
  misc_RNA (1)...(19): siRNA sense strand
uaacaacgauugcugugaa

SEQ ID NO: 1813252 - RNA, 19 nt, Homo sapiens
  misc_RNA (1)...(19): siRNA sense strand
ccaggaagcugcacaaauc

SEQ ID NO: 1813253 - RNA, 19 nt, Homo sapiens
  misc_RNA (1)...(19): siRNA sense strand
gggaagcccugacggagua

SEQ ID NO: 1813254 - RNA, 19 nt, Homo sapiens
  misc_RNA (1)...(19): siRNA sense strand
gaacauaucaucccucgau

SEQ ID NO: 1813255 - RNA, 19 nt, Homo sapiens
  misc_RNA (1)...(19): siRNA sense strand
gaucauugcuuggcacaaa

SEQ ID NO: 1813256 - RNA, 19 nt, Homo sapiens
  misc_RNA (1)...(19): siRNA sense strand
ggaagaccuugaauuaaau

SEQ ID NO: 1813257 - RNA, 19 nt, Homo sapiens
  misc_RNA (1)...(19): siRNA sense strand
cuaauuggcucaggauaua

SEQ ID NO: 1813258 - RNA, 19 nt, Homo sapiens
  misc_RNA (1)...(19): siRNA sense strand
gaagaaugggucaagaaua

SEQ ID NO: 1813259 - RNA, 19 nt, Homo sapiens
  misc_RNA (1)...(19): siRNA sense strand
caaagccaacgcauuauua

SEQ ID NO: 1813260 - RNA, 19 nt, Homo sapiens
  misc_RNA (1)...(19): siRNA sense strand
gcauuucgcugguguguuc

SEQ ID NO: 1813261 - RNA, 19 nt, Homo sapiens
  misc_RNA (1)...(19): siRNA sense strand
cgaaggagauggccuggaa

SEQ ID NO: 1813262 - RNA, 19 nt, Homo sapiens
  misc_RNA (1)...(19): siRNA sense strand
gaagaccacuggauucgau

SEQ ID NO: 1813263 - RNA, 19 nt, Homo sapiens
  misc_RNA (1)...(19): siRNA sense strand
ggaaugcuccaguuacuuu

SEQ ID NO: 1813264 - RNA, 19 nt, Homo sapiens
  misc_RNA (1)...(19): siRNA sense strand
uuacggagauauagaauug

SEQ ID NO: 1813265 - RNA, 19 nt, Homo sapiens
  misc_RNA (1)...(19): siRNA sense strand
gaagucaccucuccaaacu

SEQ ID NO: 1813266 - RNA, 19 nt, Homo sapiens
  misc_RNA (1)...(19): siRNA sense strand
ggagagagccgaagagauc

SEQ ID NO: 1813267 - RNA, 19 nt, Homo sapiens
  misc_RNA (1)...(19): siRNA sense strand
ccaaggaacccuacaacua

SEQ ID NO: 1813268 - RNA, 19 nt, Homo sapiens
  misc_RNA (1)...(19): siRNA sense strand
ccacgacgcuggcagagaa

SEQ ID NO: 1813269 - RNA, 19 nt, Homo sapiens
  misc_RNA (1)...(19): siRNA sense strand
ggcccuagcugugauauuu

SEQ ID NO: 1813270 - RNA, 19 nt, Homo sapiens
  misc_RNA (1)...(19): siRNA sense strand
gcaaugcaagcuuuagaua

SEQ ID NO: 1813271 - RNA, 19 nt, Homo sapiens
  misc_RNA (1)...(19): siRNA sense strand
ucacgaggcucuucccaaa

SEQ ID NO: 1813272 - RNA, 19 nt, Homo sapiens
  misc_RNA (1)...(19): siRNA sense strand
gaaaugguugguaugauaa

SEQ ID NO: 1813273 - RNA, 19 nt, Homo sapiens
  misc_RNA (1)...(19): siRNA sense strand
gaaaggagaccaccaagag

SEQ ID NO: 1813274 - RNA, 19 nt, Homo sapiens
  misc_RNA (1)...(19): siRNA sense strand
gcaaaucgaggaaauacuu

SEQ ID NO: 1813275 - RNA, 19 nt, Homo sapiens
  misc_RNA (1)...(19): siRNA sense strand
caacaggcacgacaaguuu

SEQ ID NO: 1813276 - RNA, 19 nt, Homo sapiens
  misc_RNA (1)...(19): siRNA sense strand
caacagagccgaguacuuc

SEQ ID NO: 1813277 - RNA, 19 nt, Homo sapiens
  misc_RNA (1)...(19): siRNA sense strand
gaagugaaacgcuuuagga

SEQ ID NO: 1813278 - RNA, 19 nt, Homo sapiens
  misc_RNA (1)...(19): siRNA sense strand
gcacaagcgaggcaacaua

SEQ ID NO: 1813279 - RNA, 19 nt, Homo sapiens
  misc_RNA (1)...(19): siRNA sense strand
gcacaugaaggaccucuuu

SEQ ID NO: 1813280 - RNA, 19 nt, Homo sapiens
  misc_RNA (1)...(19): siRNA sense strand
caacauaagcuuuacaaca

SEQ ID NO: 1813281 - RNA, 19 nt, Homo sapiens
  misc_RNA (1)...(19): siRNA sense strand
ggaauucguccugcauuua

SEQ ID NO: 1813282 - RNA, 19 nt, Homo sapiens
  misc_RNA (1)...(19): siRNA sense strand
acagacagcugaaguggaa

SEQ ID NO: 1813283 - RNA, 19 nt, Homo sapiens
  misc_RNA (1)...(19): siRNA sense strand
agaggaggauguagagaua

SEQ ID NO: 1813284 - RNA, 19 nt, Homo sapiens
  misc_RNA (1)...(19): siRNA sense strand
cagcaucacuguggaguuu

SEQ ID NO: 1813285 - RNA, 19 nt, Homo sapiens
  misc_RNA (1)...(19): siRNA sense strand
ggaguuguaugcugacuuc

SEQ ID NO: 1813286 - RNA, 19 nt, Homo sapiens
  misc_RNA (1)...(19): siRNA sense strand
caaccguccugucccauuu

SEQ ID NO: 1813287 - RNA, 19 nt, Homo sapiens
  misc_RNA (1)...(19): siRNA sense strand
gaacgacgccugccucaca

SEQ ID NO: 1813288 - RNA, 19 nt, Homo sapiens
  misc_RNA (1)...(19): siRNA sense strand
ggguagagauugugcagaa

SEQ ID NO: 1813289 - RNA, 19 nt, Homo sapiens
  misc_RNA (1)...(19): siRNA sense strand
ggaaauacuuagccaaggu

SEQ ID NO: 1813290 - RNA, 19 nt, Homo sapiens
  misc_RNA (1)...(19): siRNA sense strand
gcuagagguugucaugaaa

SEQ ID NO: 1813291 - RNA, 19 nt, Homo sapiens
  misc_RNA (1)...(19): siRNA sense strand
gaagcucguacuugaaaua

SEQ ID NO: 1813292 - RNA, 19 nt, Homo sapiens
  misc_RNA (1)...(19): siRNA sense strand
gaauucguccugcauuuaa

SEQ ID NO: 1813293 - RNA, 19 nt, Homo sapiens
  misc_RNA (1)...(19): siRNA sense strand
caacuggacugccaugaag

SEQ ID NO: 1813294 - RNA, 19 nt, Homo sapiens
  misc_RNA (1)...(19): siRNA sense strand
agacacagauuuacaucaa

SEQ ID NO: 1813295 - RNA, 19 nt, Homo sapiens
  misc_RNA (1)...(19): siRNA sense strand
uggacaagcuguuugauga

SEQ ID NO: 1813296 - RNA, 19 nt, Homo sapiens
  misc_RNA (1)...(19): siRNA sense strand
ccacagagcugagaaacca

SEQ ID NO: 1813297 - RNA, 19 nt, Homo sapiens
  misc_RNA (1)...(19): siRNA sense strand
aaucaucgcugcacucuuc

SEQ ID NO: 1813298 - RNA, 19 nt, Homo sapiens
  misc_RNA (1)...(19): siRNA sense strand
cuaaaguucugcagcauau

SEQ ID NO: 1813299 - RNA, 19 nt, Homo sapiens
  misc_RNA (1)...(19): siRNA sense strand
gcccugaauuccaccaaua

SEQ ID NO: 1813300 - RNA, 19 nt, Homo sapiens
  misc_RNA (1)...(19): siRNA sense strand
ugaaaggaaugcuccaguu

SEQ ID NO: 1813301 - RNA, 19 nt, Homo sapiens
  misc_RNA (1)...(19): siRNA sense strand
cagaugccgucgacaagua

SEQ ID NO: 1813302 - RNA, 19 nt, Homo sapiens
  misc_RNA (1)...(19): siRNA sense strand
gagagcaaaucgaggaaau

SEQ ID NO: 1813303 - RNA, 19 nt, Homo sapiens
  misc_RNA (1)...(19): siRNA sense strand
uaagucggauucauacuau

SEQ ID NO: 1813304 - RNA, 19 nt, Homo sapiens
  misc_RNA (1)...(19): siRNA sense strand
guaacugccuaugagaaua

SEQ ID NO: 1813305 - RNA, 19 nt, Homo sapiens
  misc_RNA (1)...(19): siRNA sense strand
gaaaccagcugcacaugcu

SEQ ID NO: 1813306 - RNA, 19 nt, Homo sapiens
  misc_RNA (1)...(19): siRNA sense strand
gaccagaccacuuugauga

SEQ ID NO: 1813307 - RNA, 19 nt, Homo sapiens
  misc_RNA (1)...(19): siRNA sense strand
ccucaaggcucacgcaaug

SEQ ID NO: 1813308 - RNA, 19 nt, Homo sapiens
  misc_RNA (1)...(19): siRNA sense strand
gaaaguguuggcagaauug

SEQ ID NO: 1813309 - RNA, 19 nt, Homo sapiens
  misc_RNA (1)...(19): siRNA sense strand
caaacagccuggacaaucu

SEQ ID NO: 1813310 - RNA, 19 nt, Homo sapiens
  misc_RNA (1)...(19): siRNA sense strand
gcagggccuugaaguuauu

SEQ ID NO: 1813311 - RNA, 19 nt, Homo sapiens
  misc_RNA (1)...(19): siRNA sense strand
caaccaaccugggaaggaa

SEQ ID NO: 1813312 - RNA, 19 nt, Homo sapiens
  misc_RNA (1)...(19): siRNA sense strand
ccuggaaggugaacaugua

SEQ ID NO: 1813313 - RNA, 19 nt, Homo sapiens
  misc_RNA (1)...(19): siRNA sense strand
gaagaugaugacuuacaua

SEQ ID NO: 1813314 - RNA, 19 nt, Homo sapiens
  misc_RNA (1)...(19): siRNA sense strand
gaaagcaucaccagugugu

SEQ ID NO: 1813315 - RNA, 19 nt, Homo sapiens
  misc_RNA (1)...(19): siRNA sense strand
gccacgaucucuuguauca

SEQ ID NO: 1813316 - RNA, 19 nt, Homo sapiens
  misc_RNA (1)...(19): siRNA sense strand
gcuguuugaugaauccaua

SEQ ID NO: 1813317 - RNA, 19 nt, Homo sapiens
  misc_RNA (1)...(19): siRNA sense strand
ccauagaagucgaucaaau

SEQ ID NO: 1813318 - RNA, 19 nt, Homo sapiens
  misc_RNA (1)...(19): siRNA sense strand
gaacauggacagccagcaa

SEQ ID NO: 1813319 - RNA, 19 nt, Homo sapiens
  misc_RNA (1)...(19): siRNA sense strand
gcccaacauuucugaguuu

SEQ ID NO: 1813320 - RNA, 19 nt, Homo sapiens
  misc_RNA (1)...(19): siRNA sense strand
caugaucccaguucaaaua

SEQ ID NO: 1813321 - RNA, 19 nt, Homo sapiens
  misc_RNA (1)...(19): siRNA sense strand
gaauagcucucagcaugau

SEQ ID NO: 1813322 - RNA, 19 nt, Homo sapiens
  misc_RNA (1)...(19): siRNA sense strand
gggaaccacuucuggauca

SEQ ID NO: 1813323 - RNA, 19 nt, Homo sapiens
  misc_RNA (1)...(19): siRNA sense strand
gaauuacggagauauagaa

SEQ ID NO: 1813324 - RNA, 19 nt, Homo sapiens
  misc_RNA (1)...(19): siRNA sense strand
ggaauguucuuggcucaga

SEQ ID NO: 1813325 - RNA, 19 nt, Homo sapiens
  misc_RNA (1)...(19): siRNA sense strand
gagcugacguguacucaua

SEQ ID NO: 1813326 - RNA, 19 nt, Homo sapiens
  misc_RNA (1)...(19): siRNA sense strand
ggacaacccugcucgaauc

SEQ ID NO: 1813327 - RNA, 19 nt, Homo sapiens
  misc_RNA (1)...(19): siRNA sense strand
ggagagacauuucaauaag

SEQ ID NO: 1813328 - RNA, 19 nt, Homo sapiens
  misc_RNA (1)...(19): siRNA sense strand
aagaggagcuucuggagua

SEQ ID NO: 1813329 - RNA, 19 nt, Homo sapiens
  misc_RNA (1)...(19): siRNA sense strand
gaucuacaaugaccagaaa

SEQ ID NO: 1813330 - RNA, 19 nt, Homo sapiens
  misc_RNA (1)...(19): siRNA sense strand
ccacagagaaggugaagua

SEQ ID NO: 1813331 - RNA, 19 nt, Homo sapiens
  misc_RNA (1)...(19): siRNA sense strand
gagagacauuucaauaaga

SEQ ID NO: 1813332 - RNA, 19 nt, Homo sapiens
  misc_RNA (1)...(19): siRNA sense strand
gaugggugaucuacaauga

SEQ ID NO: 1813333 - RNA, 19 nt, Homo sapiens
  misc_RNA (1)...(19): siRNA sense strand
ggaaguauguggauaagcu

SEQ ID NO: 1813334 - RNA, 19 nt, Homo sapiens
  misc_RNA (1)...(19): siRNA sense strand
ccgcaaagcugucuacuac

SEQ ID NO: 1813335 - RNA, 19 nt, Homo sapiens
  misc_RNA (1)...(19): siRNA sense strand
ugacugaguuggagauaga

SEQ ID NO: 1813336 - RNA, 19 nt, Homo sapiens
  misc_RNA (1)...(19): siRNA sense strand
gaacacguuucugggcuuu

SEQ ID NO: 1813337 - RNA, 19 nt, Homo sapiens
  misc_RNA (1)...(19): siRNA sense strand
ggaugcagcccuuaacaaa

SEQ ID NO: 1813338 - RNA, 19 nt, Homo sapiens
  misc_RNA (1)...(19): siRNA sense strand
uggauaagcuggagaagau

SEQ ID NO: 1813339 - RNA, 19 nt, Homo sapiens
  misc_RNA (1)...(19): siRNA sense strand
gaaacaguauguggagaga

SEQ ID NO: 1813340 - RNA, 19 nt, Homo sapiens
  misc_RNA (1)...(19): siRNA sense strand
gaggagaaguuugaauuag

SEQ ID NO: 1813341 - RNA, 19 nt, Homo sapiens
  misc_RNA (1)...(19): siRNA sense strand
cgaggagaaguuugaauua

SEQ ID NO: 1813342 - RNA, 19 nt, Homo sapiens
  misc_RNA (1)...(19): siRNA sense strand
guggagagacauuucaaua

SEQ ID NO: 1813343 - RNA, 19 nt, Homo sapiens
  misc_RNA (1)...(19): siRNA sense strand
ggaugguccuggaaaguau

SEQ ID NO: 1813344 - RNA, 19 nt, Homo sapiens
  misc_RNA (1)...(19): siRNA sense strand
gcaaagcugucuacuacac

SEQ ID NO: 1813345 - RNA, 19 nt, Homo sapiens
  misc_RNA (1)...(19): siRNA sense strand
ucaagugccuggccacaga

SEQ ID NO: 1813346 - RNA, 19 nt, Homo sapiens
  misc_RNA (1)...(19): siRNA sense strand
acaagacgaugacugaguu

SEQ ID NO: 1813347 - RNA, 19 nt, Homo sapiens
  misc_RNA (1)...(19): siRNA sense strand
gcgaggagaaguuugaauu

SEQ ID NO: 1813348 - RNA, 19 nt, Homo sapiens
  misc_RNA (1)...(19): siRNA sense strand
gagagaaccuguggcucaa

SEQ ID NO: 1813349 - RNA, 19 nt, Homo sapiens
  misc_RNA (1)...(19): siRNA sense strand
ggagaaguuugaauuagac

SEQ ID NO: 1813350 - RNA, 19 nt, Homo sapiens
  misc_RNA (1)...(19): siRNA sense strand
ccacacgauuugccucauu

SEQ ID NO: 1813351 - RNA, 19 nt, Homo sapiens
  misc_RNA (1)...(19): siRNA sense strand
cagauuaccuggagauugc

SEQ ID NO: 1813352 - RNA, 19 nt, Homo sapiens
  misc_RNA (1)...(19): siRNA sense strand
gcugcuaccucaacucugu

SEQ ID NO: 1813353 - RNA, 19 nt, Homo sapiens
  misc_RNA (1)...(19): siRNA sense strand
cagaggagcucgacaucuc

SEQ ID NO: 1813354 - RNA, 19 nt, Homo sapiens
  misc_RNA (1)...(19): siRNA sense strand
ggaagugcuccaaguguga

SEQ ID NO: 1813355 - RNA, 19 nt, Homo sapiens
  misc_RNA (1)...(19): siRNA sense strand
ugauggagcugacguguac

SEQ ID NO: 1813356 - RNA, 19 nt, Homo sapiens
  misc_RNA (1)...(19): siRNA sense strand
agagacaggcuacccguua

SEQ ID NO: 1813357 - RNA, 19 nt, Homo sapiens
  misc_RNA (1)...(19): siRNA sense strand
agacgaggaugugaagauu

SEQ ID NO: 1813358 - RNA, 19 nt, Homo sapiens
  misc_RNA (1)...(19): siRNA sense strand
gacaugaaccagcggauug

SEQ ID NO: 1813359 - RNA, 19 nt, Homo sapiens
  misc_RNA (1)...(19): siRNA sense strand
cagaggaaguauguggaua

SEQ ID NO: 1813360 - RNA, 19 nt, Homo sapiens
  misc_RNA (1)...(19): siRNA sense strand
ccaaggaccugggcuacau

SEQ ID NO: 1813361 - RNA, 19 nt, Homo sapiens
  misc_RNA (1)...(19): siRNA sense strand
gaaguacacccagcgaguu

SEQ ID NO: 1813362 - RNA, 19 nt, Homo sapiens
  misc_RNA (1)...(19): siRNA sense strand
gagacaggcuacccguuag

SEQ ID NO: 1813363 - RNA, 19 nt, Homo sapiens
  misc_RNA (1)...(19): siRNA sense strand
gggaugguccuggaaagua

SEQ ID NO: 1813364 - RNA, 19 nt, Homo sapiens
  misc_RNA (1)...(19): siRNA sense strand
gcuguggacuggaucuuca

SEQ ID NO: 1813365 - RNA, 19 nt, Homo sapiens
  misc_RNA (1)...(19): siRNA sense strand
gacguguacucauaugaug

SEQ ID NO: 1813366 - RNA, 19 nt, Homo sapiens
  misc_RNA (1)...(19): siRNA sense strand
aggagaaguuugaauuaga

SEQ ID NO: 1813367 - RNA, 19 nt, Homo sapiens
  misc_RNA (1)...(19): siRNA sense strand
cagacaagacgaugacuga

SEQ ID NO: 1813368 - RNA, 19 nt, Homo sapiens
  misc_RNA (1)...(19): siRNA sense strand
gaugugaagauugucauuu

SEQ ID NO: 1813369 - RNA, 19 nt, Homo sapiens
  misc_RNA (1)...(19): siRNA sense strand
gggcaccucuaccaugugu

SEQ ID NO: 1813370 - RNA, 19 nt, Homo sapiens
  misc_RNA (1)...(19): siRNA sense strand
uggagagacauuucaauaa

SEQ ID NO: 1813371 - RNA, 19 nt, Homo sapiens
  misc_RNA (1)...(19): siRNA sense strand
augcagcccuuaacaaaga

SEQ ID NO: 1813372 - RNA, 19 nt, Homo sapiens
  misc_RNA (1)...(19): siRNA sense strand
ggaauugccggagcucuga

SEQ ID NO: 1813373 - RNA, 19 nt, Homo sapiens
  misc_RNA (1)...(19): siRNA sense strand
ucauccagaucaagaaguu

SEQ ID NO: 1813374 - RNA, 19 nt, Homo sapiens
  misc_RNA (1)...(19): siRNA sense strand
cacgaacaauaguuuagaa

SEQ ID NO: 1813375 - RNA, 19 nt, Homo sapiens
  misc_RNA (1)...(19): siRNA sense strand
cagagaaggugaaguacac

SEQ ID NO: 1813376 - RNA, 19 nt, Homo sapiens
  misc_RNA (1)...(19): siRNA sense strand
ccagagaguggccagcuaa

SEQ ID NO: 1813377 - RNA, 19 nt, Homo sapiens
  misc_RNA (1)...(19): siRNA sense strand
ugaacugggucaugucaca

SEQ ID NO: 1813378 - RNA, 19 nt, Homo sapiens
  misc_RNA (1)...(19): siRNA sense strand
gaggaaguauguggauaag

SEQ ID NO: 1813379 - RNA, 19 nt, Homo sapiens
  misc_RNA (1)...(19): siRNA sense strand
uaucagcucuuugccuuca

SEQ ID NO: 1813380 - RNA, 19 nt, Homo sapiens
  misc_RNA (1)...(19): siRNA sense strand
gucaagaccacacgauuug

SEQ ID NO: 1813381 - RNA, 19 nt, Homo sapiens
  misc_RNA (1)...(19): siRNA sense strand
guggagcacuaccgagaga

SEQ ID NO: 1813382 - RNA, 19 nt, Homo sapiens
  misc_RNA (1)...(19): siRNA sense strand
ccagcgaguugacuacauc

SEQ ID NO: 1813383 - RNA, 19 nt, Homo sapiens
  misc_RNA (1)...(19): siRNA sense strand
agaggaaguauguggauaa

SEQ ID NO: 1813384 - RNA, 19 nt, Homo sapiens
  misc_RNA (1)...(19): siRNA sense strand
gggccacgaacaauaguuu

SEQ ID NO: 1813385 - RNA, 19 nt, Homo sapiens
  misc_RNA (1)...(19): siRNA sense strand
ugucaagaccacacgauuu

SEQ ID NO: 1813386 - RNA, 19 nt, Homo sapiens
  misc_RNA (1)...(19): siRNA sense strand
ucaacaugguggagaggaa

SEQ ID NO: 1813387 - RNA, 19 nt, Homo sapiens
  misc_RNA (1)...(19): siRNA sense strand
ggaccugggcuacaucuac

SEQ ID NO: 1813388 - RNA, 19 nt, Homo sapiens
  misc_RNA (1)...(19): siRNA sense strand
acgaggaugugaagauugu

SEQ ID NO: 1813389 - RNA, 19 nt, Homo sapiens
  misc_RNA (1)...(19): siRNA sense strand
gcucuuugccuucauuagu

SEQ ID NO: 1813390 - RNA, 19 nt, Homo sapiens
  misc_RNA (1)...(19): siRNA sense strand
gaguucuuccuucaccuua

SEQ ID NO: 1813391 - RNA, 19 nt, Homo sapiens
  misc_RNA (1)...(19): siRNA sense strand
ggaaguucaagauggcauu

SEQ ID NO: 1813392 - RNA, 19 nt, Homo sapiens
  misc_RNA (1)...(19): siRNA sense strand
ugaagaugcagaagacaga

SEQ ID NO: 1813393 - RNA, 19 nt, Homo sapiens
  misc_RNA (1)...(19): siRNA sense strand
ccaagucaguagcugucaa

SEQ ID NO: 1813394 - RNA, 19 nt, Homo sapiens
  misc_RNA (1)...(19): siRNA sense strand
gaauuagacgaggauguga

SEQ ID NO: 1813395 - RNA, 19 nt, Homo sapiens
  misc_RNA (1)...(19): siRNA sense strand
gaccugggcuacaucuacu

SEQ ID NO: 1813396 - RNA, 19 nt, Homo sapiens
  misc_RNA (1)...(19): siRNA sense strand
ggccacgaacaauaguuua

SEQ ID NO: 1813397 - RNA, 19 nt, Homo sapiens
  misc_RNA (1)...(19): siRNA sense strand
gcggcuggcuauugguguu

SEQ ID NO: 1813398 - RNA, 19 nt, Homo sapiens
  misc_RNA (1)...(19): siRNA sense strand
aggaggagcugccagacau

SEQ ID NO: 1813399 - RNA, 19 nt, Homo sapiens
  misc_RNA (1)...(19): siRNA sense strand
uaacaaagaggagcuucug

SEQ ID NO: 1813400 - RNA, 19 nt, Homo sapiens
  misc_RNA (1)...(19): siRNA sense strand
gcugacguguacucauaug

SEQ ID NO: 1813401 - RNA, 19 nt, Homo sapiens
  misc_RNA (1)...(19): siRNA sense strand
ugaauuagacgaggaugug

SEQ ID NO: 1813402 - RNA, 19 nt, Homo sapiens
  misc_RNA (1)...(19): siRNA sense strand
ucagcucuuugccuucauu

SEQ ID NO: 1813403 - RNA, 19 nt, Homo sapiens
  misc_RNA (1)...(19): siRNA sense strand
gcgaguugacuacaucaug

SEQ ID NO: 1813404 - RNA, 19 nt, Homo sapiens
  misc_RNA (1)...(19): siRNA sense strand
gacaagacgaugacugagu

SEQ ID NO: 1813405 - RNA, 19 nt, Homo sapiens
  misc_RNA (1)...(19): siRNA sense strand
gaaguacggcaggugucua

SEQ ID NO: 1813406 - RNA, 19 nt, Homo sapiens
  misc_RNA (1)...(19): siRNA sense strand
ccacuucggcaucgacaug

SEQ ID NO: 1813407 - RNA, 19 nt, Homo sapiens
  misc_RNA (1)...(19): siRNA sense strand
cgaccuggaugcugaagcu

SEQ ID NO: 1813408 - RNA, 19 nt, Homo sapiens
  misc_RNA (1)...(19): siRNA sense strand
ccacgaacaauaguuuaga

SEQ ID NO: 1813409 - RNA, 19 nt, Homo sapiens
  misc_RNA (1)...(19): siRNA sense strand
gaaguucaagauggcauug

SEQ ID NO: 1813410 - RNA, 19 nt, Homo sapiens
  misc_RNA (1)...(19): siRNA sense strand
cagaaggaaguucaagaug

SEQ ID NO: 1813411 - RNA, 19 nt, Homo sapiens
  misc_RNA (1)...(19): siRNA sense strand
ggaguauuccaagccagua

SEQ ID NO: 1813412 - RNA, 19 nt, Homo sapiens
  misc_RNA (1)...(19): siRNA sense strand
ccaagugugacaugagaga

SEQ ID NO: 1813413 - RNA, 19 nt, Homo sapiens
  misc_RNA (1)...(19): siRNA sense strand
ugggcuacaucuacuucua

SEQ ID NO: 1813414 - RNA, 19 nt, Homo sapiens
  misc_RNA (1)...(19): siRNA sense strand
gaggagcugccagacauug

SEQ ID NO: 1813415 - RNA, 19 nt, Homo sapiens
  misc_RNA (1)...(19): siRNA sense strand
caggugcccuucagcucuu

SEQ ID NO: 1813416 - RNA, 19 nt, Homo sapiens
  misc_RNA (1)...(19): siRNA sense strand
gcaggaugcccaggaguuc

SEQ ID NO: 1813417 - RNA, 19 nt, Homo sapiens
  misc_RNA (1)...(19): siRNA sense strand
uaacagcugcuaccucaac

SEQ ID NO: 1813418 - RNA, 19 nt, Homo sapiens
  misc_RNA (1)...(19): siRNA sense strand
ggaugugaagauugucauu

SEQ ID NO: 1813419 - RNA, 19 nt, Homo sapiens
  misc_RNA (1)...(19): siRNA sense strand
aacaguauguggagagaca

SEQ ID NO: 1813420 - RNA, 19 nt, Homo sapiens
  misc_RNA (1)...(19): siRNA sense strand
guucuuccuucaccuuauc

SEQ ID NO: 1813421 - RNA, 19 nt, Homo sapiens
  misc_RNA (1)...(19): siRNA sense strand
ggaguucuuccuucaccuu

SEQ ID NO: 1813422 - RNA, 19 nt, Homo sapiens
  misc_RNA (1)...(19): siRNA sense strand
ggaggagcugccagacauu

SEQ ID NO: 1813423 - RNA, 19 nt, Homo sapiens
  misc_RNA (1)...(19): siRNA sense strand
cgacgauccgggucccuaa

SEQ ID NO: 1813424 - RNA, 19 nt, Homo sapiens
  misc_RNA (1)...(19): siRNA sense strand
uauggacgccugccgcaaa

SEQ ID NO: 1813425 - RNA, 19 nt, Homo sapiens
  misc_RNA (1)...(19): siRNA sense strand
ggaaauugcugacucugua

SEQ ID NO: 1813426 - RNA, 19 nt, Homo sapiens
  misc_RNA (1)...(19): siRNA sense strand
ggagaugcauuaugugaaa

SEQ ID NO: 1813427 - RNA, 19 nt, Homo sapiens
  misc_RNA (1)...(19): siRNA sense strand
caaagcaacugccauuuau

SEQ ID NO: 1813428 - RNA, 19 nt, Homo sapiens
  misc_RNA (1)...(19): siRNA sense strand
gauaaaggcuuacuuacuc

SEQ ID NO: 1813429 - RNA, 19 nt, Homo sapiens
  misc_RNA (1)...(19): siRNA sense strand
ggcaagaucuggucaaaga

SEQ ID NO: 1813430 - RNA, 19 nt, Homo sapiens
  misc_RNA (1)...(19): siRNA sense strand
uaaaggcucuaucaaagaa

SEQ ID NO: 1813431 - RNA, 19 nt, Homo sapiens
  misc_RNA (1)...(19): siRNA sense strand
gcucuuggguggucuguaa

SEQ ID NO: 1813432 - RNA, 19 nt, Homo sapiens
  misc_RNA (1)...(19): siRNA sense strand
gaaacaaacgggcaagauu

SEQ ID NO: 1813433 - RNA, 19 nt, Homo sapiens
  misc_RNA (1)...(19): siRNA sense strand
gccaagagauuaacugaau

SEQ ID NO: 1813434 - RNA, 19 nt, Homo sapiens
  misc_RNA (1)...(19): siRNA sense strand
aaacaaacgggcaagauua

SEQ ID NO: 1813435 - RNA, 19 nt, Homo sapiens
  misc_RNA (1)...(19): siRNA sense strand
ccaaagcaacugccauuua

SEQ ID NO: 1813436 - RNA, 19 nt, Homo sapiens
  misc_RNA (1)...(19): siRNA sense strand
ggcaacagauaaaggcuua

SEQ ID NO: 1813437 - RNA, 19 nt, Homo sapiens
  misc_RNA (1)...(19): siRNA sense strand
cgaauuuacugcagugauu

SEQ ID NO: 1813438 - RNA, 19 nt, Homo sapiens
  misc_RNA (1)...(19): siRNA sense strand
ggagaagauuggaaacaug

SEQ ID NO: 1813439 - RNA, 19 nt, Homo sapiens
  misc_RNA (1)...(19): siRNA sense strand
gaagaaggaaacauuguga

SEQ ID NO: 1813440 - RNA, 19 nt, Homo sapiens
  misc_RNA (1)...(19): siRNA sense strand
caacugccauuuauugaca

SEQ ID NO: 1813441 - RNA, 19 nt, Homo sapiens
  misc_RNA (1)...(19): siRNA sense strand
gauauucacuaaagaggau

SEQ ID NO: 1813442 - RNA, 19 nt, Homo sapiens
  misc_RNA (1)...(19): siRNA sense strand
gauaguagaagaaggagaa

SEQ ID NO: 1813443 - RNA, 19 nt, Homo sapiens
  misc_RNA (1)...(19): siRNA sense strand
acagauaaaggcuuacuua

SEQ ID NO: 1813444 - RNA, 19 nt, Homo sapiens
  misc_RNA (1)...(19): siRNA sense strand
uaugugaaauugagacuga

SEQ ID NO: 1813445 - RNA, 19 nt, Homo sapiens
  misc_RNA (1)...(19): siRNA sense strand
caaggaggaucuuuuagua

SEQ ID NO: 1813446 - RNA, 19 nt, Homo sapiens
  misc_RNA (1)...(19): siRNA sense strand
gaagagucauugccaagag

SEQ ID NO: 1813447 - RNA, 19 nt, Homo sapiens
  misc_RNA (1)...(19): siRNA sense strand
gcucauaacagucacaaug

SEQ ID NO: 1813448 - RNA, 19 nt, Homo sapiens
  misc_RNA (1)...(19): siRNA sense strand
gaaggaaacauugugaaau

SEQ ID NO: 1813449 - RNA, 19 nt, Homo sapiens
  misc_RNA (1)...(19): siRNA sense strand
uguaaaggcucuaucaaag

SEQ ID NO: 1813450 - RNA, 19 nt, Homo sapiens
  misc_RNA (1)...(19): siRNA sense strand
cuaaagguauccaggaaau

SEQ ID NO: 1813451 - RNA, 19 nt, Homo sapiens
  misc_RNA (1)...(19): siRNA sense strand
ggacguaauuggagauggu

SEQ ID NO: 1813452 - RNA, 19 nt, Homo sapiens
  misc_RNA (1)...(19): siRNA sense strand
gaauuuacugcagugauua

SEQ ID NO: 1813453 - RNA, 19 nt, Homo sapiens
  misc_RNA (1)...(19): siRNA sense strand
gaaauugcugacucuguaa

SEQ ID NO: 1813454 - RNA, 19 nt, Homo sapiens
  misc_RNA (1)...(19): siRNA sense strand
cagcagcgccagcucauaa

SEQ ID NO: 1813455 - RNA, 19 nt, Homo sapiens
  misc_RNA (1)...(19): siRNA sense strand
guaaaggcucuaucaaaga

SEQ ID NO: 1813456 - RNA, 19 nt, Homo sapiens
  misc_RNA (1)...(19): siRNA sense strand
uuaaacaaaugccagaugu

SEQ ID NO: 1813457 - RNA, 19 nt, Homo sapiens
  misc_RNA (1)...(19): siRNA sense strand
gaaaauuguugccugaaga

SEQ ID NO: 1813458 - RNA, 19 nt, Homo sapiens
  misc_RNA (1)...(19): siRNA sense strand
cggcuagguucacuaauug

SEQ ID NO: 1813459 - RNA, 19 nt, Homo sapiens
  misc_RNA (1)...(19): siRNA sense strand
gaagauuggaaacauguug

SEQ ID NO: 1813460 - RNA, 19 nt, Homo sapiens
  misc_RNA (1)...(19): siRNA sense strand
cuaauugguuugauaguag

SEQ ID NO: 1813461 - RNA, 19 nt, Homo sapiens
  misc_RNA (1)...(19): siRNA sense strand
ggaagaaggaaacauugug

SEQ ID NO: 1813462 - RNA, 19 nt, Homo sapiens
  misc_RNA (1)...(19): siRNA sense strand
uagguucacuaauugguuu

SEQ ID NO: 1813463 - RNA, 19 nt, Homo sapiens
  misc_RNA (1)...(19): siRNA sense strand
acaaagcugugguuaccuu

SEQ ID NO: 1813464 - RNA, 19 nt, Homo sapiens
  misc_RNA (1)...(19): siRNA sense strand
ggagcuguuuuaaaaguua

SEQ ID NO: 1813465 - RNA, 19 nt, Homo sapiens
  misc_RNA (1)...(19): siRNA sense strand
gagaagauuggaaacaugu

SEQ ID NO: 1813466 - RNA, 19 nt, Homo sapiens
  misc_RNA (1)...(19): siRNA sense strand
ucaaagaaagcaagagaug

SEQ ID NO: 1813467 - RNA, 19 nt, Homo sapiens
  misc_RNA (1)...(19): siRNA sense strand
ugaaauucccaaagacgua

SEQ ID NO: 1813468 - RNA, 19 nt, Homo sapiens
  misc_RNA (1)...(19): siRNA sense strand
aaugccagauguuaaugua

SEQ ID NO: 1813469 - RNA, 19 nt, Homo sapiens
  misc_RNA (1)...(19): siRNA sense strand
uaaagcaaaccuagagaau

SEQ ID NO: 1813470 - RNA, 19 nt, Homo sapiens
  misc_RNA (1)...(19): siRNA sense strand
aaagaaagcaagagaugga

SEQ ID NO: 1813471 - RNA, 19 nt, Homo sapiens
  misc_RNA (1)...(19): siRNA sense strand
cuuacuuacuccaaucaua

SEQ ID NO: 1813472 - RNA, 19 nt, Homo sapiens
  misc_RNA (1)...(19): siRNA sense strand
acggcuagguucacuaauu

SEQ ID NO: 1813473 - RNA, 19 nt, Homo sapiens
  misc_RNA (1)...(19): siRNA sense strand
aagcaacugccauuuauug

SEQ ID NO: 1813474 - RNA, 19 nt, Homo sapiens
  misc_RNA (1)...(19): siRNA sense strand
uacuguaccucaugcauau

SEQ ID NO: 1813475 - RNA, 19 nt, Homo sapiens
  misc_RNA (1)...(19): siRNA sense strand
agaaggagaagauuggaaa

SEQ ID NO: 1813476 - RNA, 19 nt, Homo sapiens
  misc_RNA (1)...(19): siRNA sense strand
agaaggaaacauugugaaa

SEQ ID NO: 1813477 - RNA, 19 nt, Homo sapiens
  misc_RNA (1)...(19): siRNA sense strand
ggaggaucuuuuaguauuu

SEQ ID NO: 1813478 - RNA, 19 nt, Homo sapiens
  misc_RNA (1)...(19): siRNA sense strand
aaagguauccaggaaauug

SEQ ID NO: 1813479 - RNA, 19 nt, Homo sapiens
  misc_RNA (1)...(19): siRNA sense strand
uaaaagaugcugcugcuaa

SEQ ID NO: 1813480 - RNA, 19 nt, Homo sapiens
  misc_RNA (1)...(19): siRNA sense strand
gcccaaagcaacugccauu

SEQ ID NO: 1813481 - RNA, 19 nt, Homo sapiens
  misc_RNA (1)...(19): siRNA sense strand
gaggaugcucucaaacuug

SEQ ID NO: 1813482 - RNA, 19 nt, Homo sapiens
  misc_RNA (1)...(19): siRNA sense strand
acacauacccgggacacua

SEQ ID NO: 1813483 - RNA, 19 nt, Homo sapiens
  misc_RNA (1)...(19): siRNA sense strand
gauggaaucuuggccaaaa

SEQ ID NO: 1813484 - RNA, 19 nt, Homo sapiens
  misc_RNA (1)...(19): siRNA sense strand
ugacaaagcugugguuacc

SEQ ID NO: 1813485 - RNA, 19 nt, Homo sapiens
  misc_RNA (1)...(19): siRNA sense strand
ggugagugcuggagaugca

SEQ ID NO: 1813486 - RNA, 19 nt, Homo sapiens
  misc_RNA (1)...(19): siRNA sense strand
gaugcauuaugugaaauug

SEQ ID NO: 1813487 - RNA, 19 nt, Homo sapiens
  misc_RNA (1)...(19): siRNA sense strand
gagaauccuauccgacuug

SEQ ID NO: 1813488 - RNA, 19 nt, Homo sapiens
  misc_RNA (1)...(19): siRNA sense strand
gcaaaccuagagaauccua

SEQ ID NO: 1813489 - RNA, 19 nt, Homo sapiens
  misc_RNA (1)...(19): siRNA sense strand
ccagguuucuuaaaaguuu

SEQ ID NO: 1813490 - RNA, 19 nt, Homo sapiens
  misc_RNA (1)...(19): siRNA sense strand
ccuuggagcuguuuuaaaa

SEQ ID NO: 1813491 - RNA, 19 nt, Homo sapiens
  misc_RNA (1)...(19): siRNA sense strand
gugguuaccuuagaugcaa

SEQ ID NO: 1813492 - RNA, 19 nt, Homo sapiens
  misc_RNA (1)...(19): siRNA sense strand
agagggaaaugccaaacug

SEQ ID NO: 1813493 - RNA, 19 nt, Homo sapiens
  misc_RNA (1)...(19): siRNA sense strand
uaucaaagaaagcaagaga

SEQ ID NO: 1813494 - RNA, 19 nt, Homo sapiens
  misc_RNA (1)...(19): siRNA sense strand
acaaaugccagauguuaau

SEQ ID NO: 1813495 - RNA, 19 nt, Homo sapiens
  misc_RNA (1)...(19): siRNA sense strand
uaccuuagaugcaagugau

SEQ ID NO: 1813496 - RNA, 19 nt, Homo sapiens
  misc_RNA (1)...(19): siRNA sense strand
ccaggaaauugcugacucu

SEQ ID NO: 1813497 - RNA, 19 nt, Homo sapiens
  misc_RNA (1)...(19): siRNA sense strand
gcuaaagguauccaggaaa

SEQ ID NO: 1813498 - RNA, 19 nt, Homo sapiens
  misc_RNA (1)...(19): siRNA sense strand
aaucgugguugaagaagga

SEQ ID NO: 1813499 - RNA, 19 nt, Homo sapiens
  misc_RNA (1)...(19): siRNA sense strand
caaagcugugguuaccuua

SEQ ID NO: 1813500 - RNA, 19 nt, Homo sapiens
  misc_RNA (1)...(19): siRNA sense strand
aagcaaaccuagagaaucc

SEQ ID NO: 1813501 - RNA, 19 nt, Homo sapiens
  misc_RNA (1)...(19): siRNA sense strand
uaggcaagaucuggucaaa

SEQ ID NO: 1813502 - RNA, 19 nt, Homo sapiens
  misc_RNA (1)...(19): siRNA sense strand
ucaccagaaccacagauuu

SEQ ID NO: 1813503 - RNA, 19 nt, Homo sapiens
  misc_RNA (1)...(19): siRNA sense strand
caccagaaccacagauuuc

SEQ ID NO: 1813504 - RNA, 19 nt, Homo sapiens
  misc_RNA (1)...(19): siRNA sense strand
aaaagaugcugcugcuaaa

SEQ ID NO: 1813505 - RNA, 19 nt, Homo sapiens
  misc_RNA (1)...(19): siRNA sense strand
ugucaagaaggaacacaua

SEQ ID NO: 1813506 - RNA, 19 nt, Homo sapiens
  misc_RNA (1)...(19): siRNA sense strand
gaagaaggagaagauugga

SEQ ID NO: 1813507 - RNA, 19 nt, Homo sapiens
  misc_RNA (1)...(19): siRNA sense strand
gaaagcaagagauggaaaa

SEQ ID NO: 1813508 - RNA, 19 nt, Homo sapiens
  misc_RNA (1)...(19): siRNA sense strand
aagcugugguuaccuuaga

SEQ ID NO: 1813509 - RNA, 19 nt, Homo sapiens
  misc_RNA (1)...(19): siRNA sense strand
acagucgagugguugauga

SEQ ID NO: 1813510 - RNA, 19 nt, Homo sapiens
  misc_RNA (1)...(19): siRNA sense strand
aguaucaacuccuggacaa

SEQ ID NO: 1813511 - RNA, 19 nt, Homo sapiens
  misc_RNA (1)...(19): siRNA sense strand
gagaugcauuaugugaaau

SEQ ID NO: 1813512 - RNA, 19 nt, Homo sapiens
  misc_RNA (1)...(19): siRNA sense strand
uagaagaaggagaagauug

SEQ ID NO: 1813513 - RNA, 19 nt, Homo sapiens
  misc_RNA (1)...(19): siRNA sense strand
ugaaauugagacugacaaa

SEQ ID NO: 1813514 - RNA, 19 nt, Homo sapiens
  misc_RNA (1)...(19): siRNA sense strand
gaaauugagacugacaaag

SEQ ID NO: 1813515 - RNA, 19 nt, Homo sapiens
  misc_RNA (1)...(19): siRNA sense strand
gguugaagaaggaaguaaa

SEQ ID NO: 1813516 - RNA, 19 nt, Homo sapiens
  misc_RNA (1)...(19): siRNA sense strand
ucgagugguugaugacgaa

SEQ ID NO: 1813517 - RNA, 19 nt, Homo sapiens
  misc_RNA (1)...(19): siRNA sense strand
aauuggagaugguuucaca

SEQ ID NO: 1813518 - RNA, 19 nt, Homo sapiens
  misc_RNA (1)...(19): siRNA sense strand
ccugugaucccaccaguau

SEQ ID NO: 1813519 - RNA, 19 nt, Homo sapiens
  misc_RNA (1)...(19): siRNA sense strand
guagaagaaggagaagauu

SEQ ID NO: 1813520 - RNA, 19 nt, Homo sapiens
  misc_RNA (1)...(19): siRNA sense strand
ucauaacagucacaauguc

SEQ ID NO: 1813521 - RNA, 19 nt, Homo sapiens
  misc_RNA (1)...(19): siRNA sense strand
agcaagagauggaaaauug

SEQ ID NO: 1813522 - RNA, 19 nt, Homo sapiens
  misc_RNA (1)...(19): siRNA sense strand
gguccuccaccaccaguuu

SEQ ID NO: 1813523 - RNA, 19 nt, Homo sapiens
  misc_RNA (1)...(19): siRNA sense strand
aauuguugccugaagaaua

SEQ ID NO: 1813524 - RNA, 19 nt, Homo sapiens
  misc_RNA (1)...(19): siRNA sense strand
cauaacagucacaauguca

SEQ ID NO: 1813525 - RNA, 19 nt, Homo sapiens
  misc_RNA (1)...(19): siRNA sense strand
gaaauacguugagcaguua

SEQ ID NO: 1813526 - RNA, 19 nt, Homo sapiens
  misc_RNA (1)...(19): siRNA sense strand
guaagagaauccuauguua

SEQ ID NO: 1813527 - RNA, 19 nt, Homo sapiens
  misc_RNA (1)...(19): siRNA sense strand
gaaugaaguuggucaauau

SEQ ID NO: 1813528 - RNA, 19 nt, Homo sapiens
  misc_RNA (1)...(19): siRNA sense strand
gacacgacgucuuauauua

SEQ ID NO: 1813529 - RNA, 19 nt, Homo sapiens
  misc_RNA (1)...(19): siRNA sense strand
gcaaauagaguggcuaaua

SEQ ID NO: 1813530 - RNA, 19 nt, Homo sapiens
  misc_RNA (1)...(19): siRNA sense strand
gcaguuacuuacacuauuu

SEQ ID NO: 1813531 - RNA, 19 nt, Homo sapiens
  misc_RNA (1)...(19): siRNA sense strand
uaaacaagcuugcuagaau

SEQ ID NO: 1813532 - RNA, 19 nt, Homo sapiens
  misc_RNA (1)...(19): siRNA sense strand
uaaagguucucuucaguuu

SEQ ID NO: 1813533 - RNA, 19 nt, Homo sapiens
  misc_RNA (1)...(19): siRNA sense strand
gaacuuaggaggacuuuau

SEQ ID NO: 1813534 - RNA, 19 nt, Homo sapiens
  misc_RNA (1)...(19): siRNA sense strand
gcacuacguuauuuagaaa

SEQ ID NO: 1813535 - RNA, 19 nt, Homo sapiens
  misc_RNA (1)...(19): siRNA sense strand
caagagaaaugaaacugaa

SEQ ID NO: 1813536 - RNA, 19 nt, Homo sapiens
  misc_RNA (1)...(19): siRNA sense strand
gaaccaagcuuuuaaggaa

SEQ ID NO: 1813537 - RNA, 19 nt, Homo sapiens
  misc_RNA (1)...(19): siRNA sense strand
ggacaaaguuccuaauggu

SEQ ID NO: 1813538 - RNA, 19 nt, Homo sapiens
  misc_RNA (1)...(19): siRNA sense strand
cgucuaaucuguuaaagaa

SEQ ID NO: 1813539 - RNA, 19 nt, Homo sapiens
  misc_RNA (1)...(19): siRNA sense strand
caaauagaguggcuaauag

SEQ ID NO: 1813540 - RNA, 19 nt, Homo sapiens
  misc_RNA (1)...(19): siRNA sense strand
caaaguuccuaaugguaua

SEQ ID NO: 1813541 - RNA, 19 nt, Homo sapiens
  misc_RNA (1)...(19): siRNA sense strand
caagagauaaggcguauaa

SEQ ID NO: 1813542 - RNA, 19 nt, Homo sapiens
  misc_RNA (1)...(19): siRNA sense strand
gaugauccacgauuucuua

SEQ ID NO: 1813543 - RNA, 19 nt, Homo sapiens
  misc_RNA (1)...(19): siRNA sense strand
gaaacaagacgagaaugua

SEQ ID NO: 1813544 - RNA, 19 nt, Homo sapiens
  misc_RNA (1)...(19): siRNA sense strand
ccaggaagcuaucauacaa

SEQ ID NO: 1813545 - RNA, 19 nt, Homo sapiens
  misc_RNA (1)...(19): siRNA sense strand
gcagugguuugaucuguuu

SEQ ID NO: 1813546 - RNA, 19 nt, Homo sapiens
  misc_RNA (1)...(19): siRNA sense strand
ucauaaagcucauuugaca

SEQ ID NO: 1813547 - RNA, 19 nt, Homo sapiens
  misc_RNA (1)...(19): siRNA sense strand
gaauaaagguucucuucag

SEQ ID NO: 1813548 - RNA, 19 nt, Homo sapiens
  misc_RNA (1)...(19): siRNA sense strand
agaagagaaugaaggaaua

SEQ ID NO: 1813549 - RNA, 19 nt, Homo sapiens
  misc_RNA (1)...(19): siRNA sense strand
gaaauaugcagaugcuaaa

SEQ ID NO: 1813550 - RNA, 19 nt, Homo sapiens
  misc_RNA (1)...(19): siRNA sense strand
agaaauacguugagcaguu

SEQ ID NO: 1813551 - RNA, 19 nt, Homo sapiens
  misc_RNA (1)...(19): siRNA sense strand
gcacaaauacaucagaaga

SEQ ID NO: 1813552 - RNA, 19 nt, Homo sapiens
  misc_RNA (1)...(19): siRNA sense strand
uuaguaaacucgucaaaga

SEQ ID NO: 1813553 - RNA, 19 nt, Homo sapiens
  misc_RNA (1)...(19): siRNA sense strand
gaacacaagcacccucgua

SEQ ID NO: 1813554 - RNA, 19 nt, Homo sapiens
  misc_RNA (1)...(19): siRNA sense strand
gagcacaaauacaucagaa

SEQ ID NO: 1813555 - RNA, 19 nt, Homo sapiens
  misc_RNA (1)...(19): siRNA sense strand
gcugcagacugaauuagua

SEQ ID NO: 1813556 - RNA, 19 nt, Homo sapiens
  misc_RNA (1)...(19): siRNA sense strand
ucaagaugauccacgauuu

SEQ ID NO: 1813557 - RNA, 19 nt, Homo sapiens
  misc_RNA (1)...(19): siRNA sense strand
agaaugaaguuggucaaua

SEQ ID NO: 1813558 - RNA, 19 nt, Homo sapiens
  misc_RNA (1)...(19): siRNA sense strand
ggcaucaucucaugucaaa

SEQ ID NO: 1813559 - RNA, 19 nt, Homo sapiens
  misc_RNA (1)...(19): siRNA sense strand
caagcuugcuagaauguuu

SEQ ID NO: 1813560 - RNA, 19 nt, Homo sapiens
  misc_RNA (1)...(19): siRNA sense strand
ccaaagacccagagagaaa

SEQ ID NO: 1813561 - RNA, 19 nt, Homo sapiens
  misc_RNA (1)...(19): siRNA sense strand
gagaaggcauacuuggauu

SEQ ID NO: 1813562 - RNA, 19 nt, Homo sapiens
  misc_RNA (1)...(19): siRNA sense strand
gaauguaacuccguugaag

SEQ ID NO: 1813563 - RNA, 19 nt, Homo sapiens
  misc_RNA (1)...(19): siRNA sense strand
caacuacgaauacuaagaa

SEQ ID NO: 1813564 - RNA, 19 nt, Homo sapiens
  misc_RNA (1)...(19): siRNA sense strand
cugaagagauugaagcaaa

SEQ ID NO: 1813565 - RNA, 19 nt, Homo sapiens
  misc_RNA (1)...(19): siRNA sense strand
uaaaugcccuggugacauc

SEQ ID NO: 1813566 - RNA, 19 nt, Homo sapiens
  misc_RNA (1)...(19): siRNA sense strand
guaaacagggcagcaauaa

SEQ ID NO: 1813567 - RNA, 19 nt, Homo sapiens
  misc_RNA (1)...(19): siRNA sense strand
cuacugaacuggaggacuu

SEQ ID NO: 1813568 - RNA, 19 nt, Homo sapiens
  misc_RNA (1)...(19): siRNA sense strand
caauuacugugacauguug

SEQ ID NO: 1813569 - RNA, 19 nt, Homo sapiens
  misc_RNA (1)...(19): siRNA sense strand
gcuaccauauuuaaacuug

SEQ ID NO: 1813570 - RNA, 19 nt, Homo sapiens
  misc_RNA (1)...(19): siRNA sense strand
ggaggaacauaucauuagu

SEQ ID NO: 1813571 - RNA, 19 nt, Homo sapiens
  misc_RNA (1)...(19): siRNA sense strand
caacuugauuggacguuug

SEQ ID NO: 1813572 - RNA, 19 nt, Homo sapiens
  misc_RNA (1)...(19): siRNA sense strand
ggcgacgucuaaucuguua

SEQ ID NO: 1813573 - RNA, 19 nt, Homo sapiens
  misc_RNA (1)...(19): siRNA sense strand
guauagagccaauguugaa

SEQ ID NO: 1813574 - RNA, 19 nt, Homo sapiens
  misc_RNA (1)...(19): siRNA sense strand
acaaauacaucagaagaga

SEQ ID NO: 1813575 - RNA, 19 nt, Homo sapiens
  misc_RNA (1)...(19): siRNA sense strand
caagucaacucacccaaag

SEQ ID NO: 1813576 - RNA, 19 nt, Homo sapiens
  misc_RNA (1)...(19): siRNA sense strand
gaaguuggucaauaugauu

SEQ ID NO: 1813577 - RNA, 19 nt, Homo sapiens
  misc_RNA (1)...(19): siRNA sense strand
aaacaagacgagaauguaa

SEQ ID NO: 1813578 - RNA, 19 nt, Homo sapiens
  misc_RNA (1)...(19): siRNA sense strand
aaacaagcuugcuagaaug

SEQ ID NO: 1813579 - RNA, 19 nt, Homo sapiens
  misc_RNA (1)...(19): siRNA sense strand
gauccacgauuucuuacug

SEQ ID NO: 1813580 - RNA, 19 nt, Homo sapiens
  misc_RNA (1)...(19): siRNA sense strand
cuacugacucugagaaaua

SEQ ID NO: 1813581 - RNA, 19 nt, Homo sapiens
  misc_RNA (1)...(19): siRNA sense strand
gaugauacggcuuugcuaa

SEQ ID NO: 1813582 - RNA, 19 nt, Homo sapiens
  misc_RNA (1)...(19): siRNA sense strand
gcuaauagagcacaaauac

SEQ ID NO: 1813583 - RNA, 19 nt, Homo sapiens
  misc_RNA (1)...(19): siRNA sense strand
cugagcugcuugccaauua

SEQ ID NO: 1813584 - RNA, 19 nt, Homo sapiens
  misc_RNA (1)...(19): siRNA sense strand
ugaaauaugcagaugcuaa

SEQ ID NO: 1813585 - RNA, 19 nt, Homo sapiens
  misc_RNA (1)...(19): siRNA sense strand
cacaagcacccucguauuu

SEQ ID NO: 1813586 - RNA, 19 nt, Homo sapiens
  misc_RNA (1)...(19): siRNA sense strand
gaugagagaagaagagaau

SEQ ID NO: 1813587 - RNA, 19 nt, Homo sapiens
  misc_RNA (1)...(19): siRNA sense strand
guucaacuacgaauacuaa

SEQ ID NO: 1813588 - RNA, 19 nt, Homo sapiens
  misc_RNA (1)...(19): siRNA sense strand
gcugguacaugcugagaga

SEQ ID NO: 1813589 - RNA, 19 nt, Homo sapiens
  misc_RNA (1)...(19): siRNA sense strand
gagcaaauagaguggcuaa

SEQ ID NO: 1813590 - RNA, 19 nt, Homo sapiens
  misc_RNA (1)...(19): siRNA sense strand
cagaaaggaugagagaaga

SEQ ID NO: 1813591 - RNA, 19 nt, Homo sapiens
  misc_RNA (1)...(19): siRNA sense strand
caucucaugucaaauggaa

SEQ ID NO: 1813592 - RNA, 19 nt, Homo sapiens
  misc_RNA (1)...(19): siRNA sense strand
ugaaagacuuggaggaaca

SEQ ID NO: 1813593 - RNA, 19 nt, Homo sapiens
  misc_RNA (1)...(19): siRNA sense strand
cugaaacuauuacuacuga

SEQ ID NO: 1813594 - RNA, 19 nt, Homo sapiens
  misc_RNA (1)...(19): siRNA sense strand
ccaggaaucuguuacaaaa

SEQ ID NO: 1813595 - RNA, 19 nt, Homo sapiens
  misc_RNA (1)...(19): siRNA sense strand
ucaauaugauuuggaggua

SEQ ID NO: 1813596 - RNA, 19 nt, Homo sapiens
  misc_RNA (1)...(19): siRNA sense strand
gguaaacagggcagcaaua

SEQ ID NO: 1813597 - RNA, 19 nt, Homo sapiens
  misc_RNA (1)...(19): siRNA sense strand
agacaucucugccgauagu

SEQ ID NO: 1813598 - RNA, 19 nt, Homo sapiens
  misc_RNA (1)...(19): siRNA sense strand
gagacuaucuuagcugagu

SEQ ID NO: 1813599 - RNA, 19 nt, Homo sapiens
  misc_RNA (1)...(19): siRNA sense strand
ggaagacaguauuguucga

SEQ ID NO: 1813600 - RNA, 19 nt, Homo sapiens
  misc_RNA (1)...(19): siRNA sense strand
gugcuggccuggcagauau

SEQ ID NO: 1813601 - RNA, 19 nt, Homo sapiens
  misc_RNA (1)...(19): siRNA sense strand
aaccaggaguucaguuuaa

SEQ ID NO: 1813602 - RNA, 19 nt, Homo sapiens
  misc_RNA (1)...(19): siRNA sense strand
uuagacaucucugccgaua

SEQ ID NO: 1813603 - RNA, 19 nt, Homo sapiens
  misc_RNA (1)...(19): siRNA sense strand
gguacccucuucucaguga

SEQ ID NO: 1813604 - RNA, 19 nt, Homo sapiens
  misc_RNA (1)...(19): siRNA sense strand
guaugaaccucaagucaac

SEQ ID NO: 1813605 - RNA, 19 nt, Homo sapiens
  misc_RNA (1)...(19): siRNA sense strand
caucaucucaugucaaaug

SEQ ID NO: 1813606 - RNA, 19 nt, Homo sapiens
  misc_RNA (1)...(19): siRNA sense strand
aagguucucuucaguuuga

SEQ ID NO: 1813607 - RNA, 19 nt, Homo sapiens
  misc_RNA (1)...(19): siRNA sense strand
gcaaugaagcugguacaug

SEQ ID NO: 1813608 - RNA, 19 nt, Homo sapiens
  misc_RNA (1)...(19): siRNA sense strand
gcacaggcacgaguacuga

SEQ ID NO: 1813609 - RNA, 19 nt, Homo sapiens
  misc_RNA (1)...(19): siRNA sense strand
gagaaugaaggaauaguuc

SEQ ID NO: 1813610 - RNA, 19 nt, Homo sapiens
  misc_RNA (1)...(19): siRNA sense strand
gagaaaaucagcuuugaaa

SEQ ID NO: 1813611 - RNA, 19 nt, Homo sapiens
  misc_RNA (1)...(19): siRNA sense strand
caauaugauuuggagguaa

SEQ ID NO: 1813612 - RNA, 19 nt, Homo sapiens
  misc_RNA (1)...(19): siRNA sense strand
guaaacaagcuugcuagaa

SEQ ID NO: 1813613 - RNA, 19 nt, Homo sapiens
  misc_RNA (1)...(19): siRNA sense strand
gcuaagagaaguugguaug

SEQ ID NO: 1813614 - RNA, 19 nt, Homo sapiens
  misc_RNA (1)...(19): siRNA sense strand
gacaaaguuccuaauggua

SEQ ID NO: 1813615 - RNA, 19 nt, Homo sapiens
  misc_RNA (1)...(19): siRNA sense strand
acaagcacccucguauuua

SEQ ID NO: 1813616 - RNA, 19 nt, Homo sapiens
  misc_RNA (1)...(19): siRNA sense strand
ggaugugcaugcagucugu

SEQ ID NO: 1813617 - RNA, 19 nt, Homo sapiens
  misc_RNA (1)...(19): siRNA sense strand
gagauaaggcguauaaagc

SEQ ID NO: 1813618 - RNA, 19 nt, Homo sapiens
  misc_RNA (1)...(19): siRNA sense strand
gagcaguuacuuacacuau

SEQ ID NO: 1813619 - RNA, 19 nt, Homo sapiens
  misc_RNA (1)...(19): siRNA sense strand
caagcacccucguauuuac

SEQ ID NO: 1813620 - RNA, 19 nt, Homo sapiens
  misc_RNA (1)...(19): siRNA sense strand
caggaguucaguuuaauaa

SEQ ID NO: 1813621 - RNA, 19 nt, Homo sapiens
  misc_RNA (1)...(19): siRNA sense strand
ggaggacuuuauggucuuu

SEQ ID NO: 1813622 - RNA, 19 nt, Homo sapiens
  misc_RNA (1)...(19): siRNA sense strand
cauuugacacgacgucuua

SEQ ID NO: 1813623 - RNA, 19 nt, Homo sapiens
  misc_RNA (1)...(19): siRNA sense strand
gaaaagggguaaaaucaac

SEQ ID NO: 1813624 - RNA, 19 nt, Homo sapiens
  misc_RNA (1)...(19): siRNA sense strand
guuugcagcucacuacaga

SEQ ID NO: 1813625 - RNA, 19 nt, Homo sapiens
  misc_RNA (1)...(19): siRNA sense strand
ggaaugacauguacgauga

SEQ ID NO: 1813626 - RNA, 19 nt, Homo sapiens
  misc_RNA (1)...(19): siRNA sense strand
gagaaaggauuuauagaug

SEQ ID NO: 1813627 - RNA, 19 nt, Homo sapiens
  misc_RNA (1)...(19): siRNA sense strand
gaagauguaugaucccaaa

SEQ ID NO: 1813628 - RNA, 19 nt, Homo sapiens
  misc_RNA (1)...(19): siRNA sense strand
cuaaggacccugcaaauua

SEQ ID NO: 1813629 - RNA, 19 nt, Homo sapiens
  misc_RNA (1)...(19): siRNA sense strand
gaccagcaauguuagauaa

SEQ ID NO: 1813630 - RNA, 19 nt, Homo sapiens
  misc_RNA (1)...(19): siRNA sense strand
gugguuacguuaucaaaua

SEQ ID NO: 1813631 - RNA, 19 nt, Homo sapiens
  misc_RNA (1)...(19): siRNA sense strand
gcaggaagcccaucucuau

SEQ ID NO: 1813632 - RNA, 19 nt, Homo sapiens
  misc_RNA (1)...(19): siRNA sense strand
ggagaaagcaucagggaaa

SEQ ID NO: 1813633 - RNA, 19 nt, Homo sapiens
  misc_RNA (1)...(19): siRNA sense strand
ugacgugucucuugauaaa

SEQ ID NO: 1813634 - RNA, 19 nt, Homo sapiens
  misc_RNA (1)...(19): siRNA sense strand
gaaaggcuguguacaugau

SEQ ID NO: 1813635 - RNA, 19 nt, Homo sapiens
  misc_RNA (1)...(19): siRNA sense strand
ggacauagacaaagagaau

SEQ ID NO: 1813636 - RNA, 19 nt, Homo sapiens
  misc_RNA (1)...(19): siRNA sense strand
gaagguacuuuaagagauc

SEQ ID NO: 1813637 - RNA, 19 nt, Homo sapiens
  misc_RNA (1)...(19): siRNA sense strand
aagcgucccuuuagcauua

SEQ ID NO: 1813638 - RNA, 19 nt, Homo sapiens
  misc_RNA (1)...(19): siRNA sense strand
ugacagagcaggauuuauu

SEQ ID NO: 1813639 - RNA, 19 nt, Homo sapiens
  misc_RNA (1)...(19): siRNA sense strand
guaauccucuuagacauaa

SEQ ID NO: 1813640 - RNA, 19 nt, Homo sapiens
  misc_RNA (1)...(19): siRNA sense strand
caaagaguguucuaugaau

SEQ ID NO: 1813641 - RNA, 19 nt, Homo sapiens
  misc_RNA (1)...(19): siRNA sense strand
uaaggacccugcaaauuau

SEQ ID NO: 1813642 - RNA, 19 nt, Homo sapiens
  misc_RNA (1)...(19): siRNA sense strand
gcacuaaugcuuacauguu

SEQ ID NO: 1813643 - RNA, 19 nt, Homo sapiens
  misc_RNA (1)...(19): siRNA sense strand
gaaggaguuugagaaguuu

SEQ ID NO: 1813644 - RNA, 19 nt, Homo sapiens
  misc_RNA (1)...(19): siRNA sense strand
gagcaggauuuauucaaga

SEQ ID NO: 1813645 - RNA, 19 nt, Homo sapiens
  misc_RNA (1)...(19): siRNA sense strand
ugauugagcucagugauaa

SEQ ID NO: 1813646 - RNA, 19 nt, Homo sapiens
  misc_RNA (1)...(19): siRNA sense strand
cacuaaugcuuacauguua

SEQ ID NO: 1813647 - RNA, 19 nt, Homo sapiens
  misc_RNA (1)...(19): siRNA sense strand
gggcauaucuacacaccaa

SEQ ID NO: 1813648 - RNA, 19 nt, Homo sapiens
  misc_RNA (1)...(19): siRNA sense strand
gaugacccaccaagaauua

SEQ ID NO: 1813649 - RNA, 19 nt, Homo sapiens
  misc_RNA (1)...(19): siRNA sense strand
gaagacgaguaugaaguaa

SEQ ID NO: 1813650 - RNA, 19 nt, Homo sapiens
  misc_RNA (1)...(19): siRNA sense strand
agaaggaguuugagaaguu

SEQ ID NO: 1813651 - RNA, 19 nt, Homo sapiens
  misc_RNA (1)...(19): siRNA sense strand
aaacuuaggcugcuagaaa

SEQ ID NO: 1813652 - RNA, 19 nt, Homo sapiens
  misc_RNA (1)...(19): siRNA sense strand
gaagaggaaauaacacuau

SEQ ID NO: 1813653 - RNA, 19 nt, Homo sapiens
  misc_RNA (1)...(19): siRNA sense strand
gaauagaggaaaucccuuu

SEQ ID NO: 1813654 - RNA, 19 nt, Homo sapiens
  misc_RNA (1)...(19): siRNA sense strand
ggagcgacuuguuacauga

SEQ ID NO: 1813655 - RNA, 19 nt, Homo sapiens
  misc_RNA (1)...(19): siRNA sense strand
uaaaugaagacgaguauga

SEQ ID NO: 1813656 - RNA, 19 nt, Homo sapiens
  misc_RNA (1)...(19): siRNA sense strand
guaaagaaguagacuaucg

SEQ ID NO: 1813657 - RNA, 19 nt, Homo sapiens
  misc_RNA (1)...(19): siRNA sense strand
gcaaaaugguguccuauau

SEQ ID NO: 1813658 - RNA, 19 nt, Homo sapiens
  misc_RNA (1)...(19): siRNA sense strand
gauggcaaaugguguaaau

SEQ ID NO: 1813659 - RNA, 19 nt, Homo sapiens
  misc_RNA (1)...(19): siRNA sense strand
uacaaagaguguucuauga

SEQ ID NO: 1813660 - RNA, 19 nt, Homo sapiens
  misc_RNA (1)...(19): siRNA sense strand
ggaagcccaucucuauaug

SEQ ID NO: 1813661 - RNA, 19 nt, Homo sapiens
  misc_RNA (1)...(19): siRNA sense strand
ccagagcaguuaccacuug

SEQ ID NO: 1813662 - RNA, 19 nt, Homo sapiens
  misc_RNA (1)...(19): siRNA sense strand
agagaaaggugugaaauuc

SEQ ID NO: 1813663 - RNA, 19 nt, Homo sapiens
  misc_RNA (1)...(19): siRNA sense strand
gcaguuaccacuugaugaa

SEQ ID NO: 1813664 - RNA, 19 nt, Homo sapiens
  misc_RNA (1)...(19): siRNA sense strand
gagaagugaugaagcgaau

SEQ ID NO: 1813665 - RNA, 19 nt, Homo sapiens
  misc_RNA (1)...(19): siRNA sense strand
ggaaauaacacuauaucca

SEQ ID NO: 1813666 - RNA, 19 nt, Homo sapiens
  misc_RNA (1)...(19): siRNA sense strand
guucgacacugcacuaaug

SEQ ID NO: 1813667 - RNA, 19 nt, Homo sapiens
  misc_RNA (1)...(19): siRNA sense strand
gaauuacagcauagugaua

SEQ ID NO: 1813668 - RNA, 19 nt, Homo sapiens
  misc_RNA (1)...(19): siRNA sense strand
ggagcgaccuuacccaagu

SEQ ID NO: 1813669 - RNA, 19 nt, Homo sapiens
  misc_RNA (1)...(19): siRNA sense strand
caacugaugagauuuaugu

SEQ ID NO: 1813670 - RNA, 19 nt, Homo sapiens
  misc_RNA (1)...(19): siRNA sense strand
gaaaggcaccuguguagag

SEQ ID NO: 1813671 - RNA, 19 nt, Homo sapiens
  misc_RNA (1)...(19): siRNA sense strand
ugauaaaccuguaggaaca

SEQ ID NO: 1813672 - RNA, 19 nt, Homo sapiens
  misc_RNA (1)...(19): siRNA sense strand
gcauagugauaaaccugua

SEQ ID NO: 1813673 - RNA, 19 nt, Homo sapiens
  misc_RNA (1)...(19): siRNA sense strand
gaguguugcucgauaaugu

SEQ ID NO: 1813674 - RNA, 19 nt, Homo sapiens
  misc_RNA (1)...(19): siRNA sense strand
cuacaacugaugagauuua

SEQ ID NO: 1813675 - RNA, 19 nt, Homo sapiens
  misc_RNA (1)...(19): siRNA sense strand
uaugauauccagcuaagua

SEQ ID NO: 1813676 - RNA, 19 nt, Homo sapiens
  misc_RNA (1)...(19): siRNA sense strand
gaggcaaccuuucaguuca

SEQ ID NO: 1813677 - RNA, 19 nt, Homo sapiens
  misc_RNA (1)...(19): siRNA sense strand
gguaauccucuuagacaua

SEQ ID NO: 1813678 - RNA, 19 nt, Homo sapiens
  misc_RNA (1)...(19): siRNA sense strand
ugauaaagcccuugaugaa

SEQ ID NO: 1813679 - RNA, 19 nt, Homo sapiens
  misc_RNA (1)...(19): siRNA sense strand
aaacgcggagcuugaauua

SEQ ID NO: 1813680 - RNA, 19 nt, Homo sapiens
  misc_RNA (1)...(19): siRNA sense strand
gaugaaaggcaccugugua

SEQ ID NO: 1813681 - RNA, 19 nt, Homo sapiens
  misc_RNA (1)...(19): siRNA sense strand
gagaacaggcgaaguuuua

SEQ ID NO: 1813682 - RNA, 19 nt, Homo sapiens
  misc_RNA (1)...(19): siRNA sense strand
gcauaucuacacaccaaua

SEQ ID NO: 1813683 - RNA, 19 nt, Homo sapiens
  misc_RNA (1)...(19): siRNA sense strand
cagcaauguuagauaauga

SEQ ID NO: 1813684 - RNA, 19 nt, Homo sapiens
  misc_RNA (1)...(19): siRNA sense strand
uaaagcccuugaugaacua

SEQ ID NO: 1813685 - RNA, 19 nt, Homo sapiens
  misc_RNA (1)...(19): siRNA sense strand
agacgaguaugaaguaaau

SEQ ID NO: 1813686 - RNA, 19 nt, Homo sapiens
  misc_RNA (1)...(19): siRNA sense strand
ugaagacgaguaugaagua

SEQ ID NO: 1813687 - RNA, 19 nt, Homo sapiens
  misc_RNA (1)...(19): siRNA sense strand
cacagaggcucaacacaga

SEQ ID NO: 1813688 - RNA, 19 nt, Homo sapiens
  misc_RNA (1)...(19): siRNA sense strand
gaagugaccgauccugaga

SEQ ID NO: 1813689 - RNA, 19 nt, Homo sapiens
  misc_RNA (1)...(19): siRNA sense strand
cgacaccaguacauaaaug

SEQ ID NO: 1813690 - RNA, 19 nt, Homo sapiens
  misc_RNA (1)...(19): siRNA sense strand
cagagagaauucaggacua

SEQ ID NO: 1813691 - RNA, 19 nt, Homo sapiens
  misc_RNA (1)...(19): siRNA sense strand
gaaaacccuuggacaauau

SEQ ID NO: 1813692 - RNA, 19 nt, Homo sapiens
  misc_RNA (1)...(19): siRNA sense strand
gcaccauacccaaauuauu

SEQ ID NO: 1813693 - RNA, 19 nt, Homo sapiens
  misc_RNA (1)...(19): siRNA sense strand
ggaagaggaaauaacacua

SEQ ID NO: 1813694 - RNA, 19 nt, Homo sapiens
  misc_RNA (1)...(19): siRNA sense strand
uaugacgugucucuugaua

SEQ ID NO: 1813695 - RNA, 19 nt, Homo sapiens
  misc_RNA (1)...(19): siRNA sense strand
aaaccgaauuuaacagaga

SEQ ID NO: 1813696 - RNA, 19 nt, Homo sapiens
  misc_RNA (1)...(19): siRNA sense strand
gcagugcugaagauaauaa

SEQ ID NO: 1813697 - RNA, 19 nt, Homo sapiens
  misc_RNA (1)...(19): siRNA sense strand
acacaccaauauccuguaa

SEQ ID NO: 1813698 - RNA, 19 nt, Homo sapiens
  misc_RNA (1)...(19): siRNA sense strand
ugacauguacgaugaagaa

SEQ ID NO: 1813699 - RNA, 19 nt, Homo sapiens
  misc_RNA (1)...(19): siRNA sense strand
guuaccacuugaugaauuu

SEQ ID NO: 1813700 - RNA, 19 nt, Homo sapiens
  misc_RNA (1)...(19): siRNA sense strand
caccaagaauuacucagaa

SEQ ID NO: 1813701 - RNA, 19 nt, Homo sapiens
  misc_RNA (1)...(19): siRNA sense strand
uguccuauauccaguguaa

SEQ ID NO: 1813702 - RNA, 19 nt, Homo sapiens
  misc_RNA (1)...(19): siRNA sense strand
ggaauguggcccugaguga

SEQ ID NO: 1813703 - RNA, 19 nt, Homo sapiens
  misc_RNA (1)...(19): siRNA sense strand
gggagcgacuuguuacaug

SEQ ID NO: 1813704 - RNA, 19 nt, Homo sapiens
  misc_RNA (1)...(19): siRNA sense strand
ggugugaaauuccuaacau

SEQ ID NO: 1813705 - RNA, 19 nt, Homo sapiens
  misc_RNA (1)...(19): siRNA sense strand
gaaagcaucagggaaacuu

SEQ ID NO: 1813706 - RNA, 19 nt, Homo sapiens
  misc_RNA (1)...(19): siRNA sense strand
ccaccgcguugaugucauu

SEQ ID NO: 1813707 - RNA, 19 nt, Homo sapiens
  misc_RNA (1)...(19): siRNA sense strand
caaagagaaugagaugcuu

SEQ ID NO: 1813708 - RNA, 19 nt, Homo sapiens
  misc_RNA (1)...(19): siRNA sense strand
gagccggacguuucgaaua

SEQ ID NO: 1813709 - RNA, 19 nt, Homo sapiens
  misc_RNA (1)...(19): siRNA sense strand
gaauguuuaucuccugcaa

SEQ ID NO: 1813710 - RNA, 19 nt, Homo sapiens
  misc_RNA (1)...(19): siRNA sense strand
caccauacccaaauuauuc

SEQ ID NO: 1813711 - RNA, 19 nt, Homo sapiens
  misc_RNA (1)...(19): siRNA sense strand
ccacagcccgguaauaugu

SEQ ID NO: 1813712 - RNA, 19 nt, Homo sapiens
  misc_RNA (1)...(19): siRNA sense strand
gagaaggaguuugagaagu

SEQ ID NO: 1813713 - RNA, 19 nt, Homo sapiens
  misc_RNA (1)...(19): siRNA sense strand
gcgauuacaagaagagaaa

SEQ ID NO: 1813714 - RNA, 19 nt, Homo sapiens
  misc_RNA (1)...(19): siRNA sense strand
cugaugagauuuauguaug

SEQ ID NO: 1813715 - RNA, 19 nt, Homo sapiens
  misc_RNA (1)...(19): siRNA sense strand
cagagaaaggugugaaauu

SEQ ID NO: 1813716 - RNA, 19 nt, Homo sapiens
  misc_RNA (1)...(19): siRNA sense strand
gacaaccuaagaaacuuua

SEQ ID NO: 1813717 - RNA, 19 nt, Homo sapiens
  misc_RNA (1)...(19): siRNA sense strand
ugaagguacuuuaagagau

SEQ ID NO: 1813718 - RNA, 19 nt, Homo sapiens
  misc_RNA (1)...(19): siRNA sense strand
ugaaaacccuuggacaaua

SEQ ID NO: 1813719 - RNA, 19 nt, Homo sapiens
  misc_RNA (1)...(19): siRNA sense strand
cuaaagaggaagcaauuga

SEQ ID NO: 1813720 - RNA, 19 nt, Homo sapiens
  misc_RNA (1)...(19): siRNA sense strand
ccaagggaaugacauguac

SEQ ID NO: 1813721 - RNA, 19 nt, Homo sapiens
  misc_RNA (1)...(19): siRNA sense strand
uagaggaaaucccuuugga

SEQ ID NO: 1813722 - RNA, 19 nt, Homo sapiens
  misc_RNA (1)...(19): siRNA sense strand
cgaaaucugccauggaaga

SEQ ID NO: 1813723 - RNA, 19 nt, Homo sapiens
  misc_RNA (1)...(19): siRNA sense strand
auacuagccuuauccucua

SEQ ID NO: 1813724 - RNA, 19 nt, Homo sapiens
  misc_RNA (1)...(19): siRNA sense strand
ccagcaauguuagauaaug

SEQ ID NO: 1813725 - RNA, 19 nt, Homo sapiens
  misc_RNA (1)...(19): siRNA sense strand
ccggaacgcugccuaauuc

SEQ ID NO: 1813726 - RNA, 19 nt, Homo sapiens
  misc_RNA (1)...(19): siRNA sense strand
ugccagcgauguccaguuu

SEQ ID NO: 1813727 - RNA, 19 nt, Homo sapiens
  misc_RNA (1)...(19): siRNA sense strand
cgcacuagcccaagcaaua

SEQ ID NO: 1813728 - RNA, 19 nt, Homo sapiens
  misc_RNA (1)...(19): siRNA sense strand
cugaggagcugggccauga

SEQ ID NO: 1813729 - RNA, 19 nt, Homo sapiens
  misc_RNA (1)...(19): siRNA sense strand
ccagcgauguccaguuugu

SEQ ID NO: 1813730 - RNA, 19 nt, Homo sapiens
  misc_RNA (1)...(19): siRNA sense strand
gcacuagcccaagcaauag

SEQ ID NO: 1813731 - RNA, 19 nt, Homo sapiens
  misc_RNA (1)...(19): siRNA sense strand
ggagaaggagcggcaguug

SEQ ID NO: 1813732 - RNA, 19 nt, Homo sapiens
  misc_RNA (1)...(19): siRNA sense strand
gugccagccucccuguaaa

SEQ ID NO: 1813733 - RNA, 19 nt, Homo sapiens
  misc_RNA (1)...(19): siRNA sense strand
ggccaccugcggacaguuu

SEQ ID NO: 1813734 - RNA, 19 nt, Homo sapiens
  misc_RNA (1)...(19): siRNA sense strand
cgugccagccucccuguaa

SEQ ID NO: 1813735 - RNA, 19 nt, Homo sapiens
  misc_RNA (1)...(19): siRNA sense strand
cagcagagcgagccuugca

SEQ ID NO: 1813736 - RNA, 19 nt, Homo sapiens
  misc_RNA (1)...(19): siRNA sense strand
gggagaaggagcggcaguu

SEQ ID NO: 1813737 - RNA, 19 nt, Homo sapiens
  misc_RNA (1)...(19): siRNA sense strand
ggacaaauguauaggauca

SEQ ID NO: 1813738 - RNA, 19 nt, Homo sapiens
  misc_RNA (1)...(19): siRNA sense strand
gaaggaagaaggauuacua

SEQ ID NO: 1813739 - RNA, 19 nt, Homo sapiens
  misc_RNA (1)...(19): siRNA sense strand
gaagagugauaaggaaauu

SEQ ID NO: 1813740 - RNA, 19 nt, Homo sapiens
  misc_RNA (1)...(19): siRNA sense strand
ggaagaaggauuacuaaau

SEQ ID NO: 1813741 - RNA, 19 nt, Homo sapiens
  misc_RNA (1)...(19): siRNA sense strand
agaaggaccugaaguguga

SEQ ID NO: 1813742 - RNA, 19 nt, Homo sapiens
  misc_RNA (1)...(19): siRNA sense strand
gaugaagagugauaaggaa

SEQ ID NO: 1813743 - RNA, 19 nt, Homo sapiens
  misc_RNA (1)...(19): siRNA sense strand
ccagaaggaagaaggauua

SEQ ID NO: 1813744 - RNA, 19 nt, Homo sapiens
  misc_RNA (1)...(19): siRNA sense strand
ggaaauuguugguacucuu

SEQ ID NO: 1813745 - RNA, 19 nt, Homo sapiens
  misc_RNA (1)...(19): siRNA sense strand
uguauaggaucaagaauuc

SEQ ID NO: 1813746 - RNA, 19 nt, Homo sapiens
  misc_RNA (1)...(19): siRNA sense strand
ucuaggauuugaugacuuu

SEQ ID NO: 1813747 - RNA, 19 nt, Homo sapiens
  misc_RNA (1)...(19): siRNA sense strand
uggaagaugucacugaguu

SEQ ID NO: 1813748 - RNA, 19 nt, Homo sapiens
  misc_RNA (1)...(19): siRNA sense strand
gaucaagaauucacaucgu

SEQ ID NO: 1813749 - RNA, 19 nt, Homo sapiens
  misc_RNA (1)...(19): siRNA sense strand
gaagaugucacugaguuug

SEQ ID NO: 1813750 - RNA, 19 nt, Homo sapiens
  misc_RNA (1)...(19): siRNA sense strand
gaaaucacaccagaaggaa

SEQ ID NO: 1813751 - RNA, 19 nt, Homo sapiens
  misc_RNA (1)...(19): siRNA sense strand
gaaauuguugguacucuuc

SEQ ID NO: 1813752 - RNA, 19 nt, Homo sapiens
  misc_RNA (1)...(19): siRNA sense strand
gauaaggaaauuguuggua

SEQ ID NO: 1813753 - RNA, 19 nt, Homo sapiens
  misc_RNA (1)...(19): siRNA sense strand
ggaagaugucacugaguuu

SEQ ID NO: 1813754 - RNA, 19 nt, Homo sapiens
  misc_RNA (1)...(19): siRNA sense strand
ugaaaucacaccagaagga

SEQ ID NO: 1813755 - RNA, 19 nt, Homo sapiens
  misc_RNA (1)...(19): siRNA sense strand
ucaauaugguacuggaaga

SEQ ID NO: 1813756 - RNA, 19 nt, Homo sapiens
  misc_RNA (1)...(19): siRNA sense strand
ggagaaggaccugaagugu

SEQ ID NO: 1813757 - RNA, 19 nt, Homo sapiens
  misc_RNA (1)...(19): siRNA sense strand
guacucuucuaggauuuga

SEQ ID NO: 1813758 - RNA, 19 nt, Homo sapiens
  misc_RNA (1)...(19): siRNA sense strand
guggacaaauguauaggau

SEQ ID NO: 1813759 - RNA, 19 nt, Homo sapiens
  misc_RNA (1)...(19): siRNA sense strand
ucacugaguuugaaaucac

SEQ ID NO: 1813760 - RNA, 19 nt, Homo sapiens
  misc_RNA (1)...(19): siRNA sense strand
uaaggaaauuguugguacu

SEQ ID NO: 1813761 - RNA, 19 nt, Homo sapiens
  misc_RNA (1)...(19): siRNA sense strand
ugaugaagagugauaagga

SEQ ID NO: 1813762 - RNA, 19 nt, Homo sapiens
  misc_RNA (1)...(19): siRNA sense strand
uugguacucuucuaggauu

SEQ ID NO: 1813763 - RNA, 19 nt, Homo sapiens
  misc_RNA (1)...(19): siRNA sense strand
aaggaagaaggauuacuaa

SEQ ID NO: 1813764 - RNA, 19 nt, Homo sapiens
  misc_RNA (1)...(19): siRNA sense strand
agaugucacugaguuugaa

SEQ ID NO: 1813765 - RNA, 19 nt, Homo sapiens
  misc_RNA (1)...(19): siRNA sense strand
aaucacaccagaaggaaga

SEQ ID NO: 1813766 - RNA, 19 nt, Homo sapiens
  misc_RNA (1)...(19): siRNA sense strand
acaaauguauaggaucaag

SEQ ID NO: 1813767 - RNA, 19 nt, Homo sapiens
  misc_RNA (1)...(19): siRNA sense strand
ugaagagugauaaggaaau

SEQ ID NO: 1813768 - RNA, 19 nt, Homo sapiens
  misc_RNA (1)...(19): siRNA sense strand
caaauguauaggaucaaga

SEQ ID NO: 1813769 - RNA, 19 nt, Homo sapiens
  misc_RNA (1)...(19): siRNA sense strand
agagugauaaggaaauugu

SEQ ID NO: 1813770 - RNA, 19 nt, Homo sapiens
  misc_RNA (1)...(19): siRNA sense strand
gaggagaaggaccugaagu

SEQ ID NO: 1813771 - RNA, 19 nt, Homo sapiens
  misc_RNA (1)...(19): siRNA sense strand
gaugucacugaguuugaaa

SEQ ID NO: 1813772 - RNA, 19 nt, Homo sapiens
  misc_RNA (1)...(19): siRNA sense strand
ggaggagaaggaccugaag

SEQ ID NO: 1813773 - RNA, 19 nt, Homo sapiens
  misc_RNA (1)...(19): siRNA sense strand
cggcuaacgcuacuaccaa

SEQ ID NO: 1813774 - RNA, 19 nt, Homo sapiens
  misc_RNA (1)...(19): siRNA sense strand
ccaaguagauuucccauug

SEQ ID NO: 1813775 - RNA, 19 nt, Homo sapiens
  misc_RNA (1)...(19): siRNA sense strand
gaaacuacguaaugauuga

SEQ ID NO: 1813776 - RNA, 19 nt, Homo sapiens
  misc_RNA (1)...(19): siRNA sense strand
cagcagaacugacugauga

SEQ ID NO: 1813777 - RNA, 19 nt, Homo sapiens
  misc_RNA (1)...(19): siRNA sense strand
gagacggacugguuugaua

SEQ ID NO: 1813778 - RNA, 19 nt, Homo sapiens
  misc_RNA (1)...(19): siRNA sense strand
guacccagcuccugccuuu

SEQ ID NO: 1813779 - RNA, 19 nt, Homo sapiens
  misc_RNA (1)...(19): siRNA sense strand
gcccugaccuugugcagua

SEQ ID NO: 1813780 - RNA, 19 nt, Homo sapiens
  misc_RNA (1)...(19): siRNA sense strand
ucaagaggcucccuuuaug

SEQ ID NO: 1813781 - RNA, 19 nt, Homo sapiens
  misc_RNA (1)...(19): siRNA sense strand
gaacguuccucgaaacuac

SEQ ID NO: 1813782 - RNA, 19 nt, Homo sapiens
  misc_RNA (1)...(19): siRNA sense strand
gaccuggacuccuugguaa

SEQ ID NO: 1813783 - RNA, 19 nt, Homo sapiens
  misc_RNA (1)...(19): siRNA sense strand
gggcagggcuugcaguaug

SEQ ID NO: 1813784 - RNA, 19 nt, Homo sapiens
  misc_RNA (1)...(19): siRNA sense strand
ccuaugggcucaagaagaa

SEQ ID NO: 1813785 - RNA, 19 nt, Homo sapiens
  misc_RNA (1)...(19): siRNA sense strand
ccaaagacguagagucaga

SEQ ID NO: 1813786 - RNA, 19 nt, Homo sapiens
  misc_RNA (1)...(19): siRNA sense strand
cgucaaggcuguuccagaa

SEQ ID NO: 1813787 - RNA, 19 nt, Homo sapiens
  misc_RNA (1)...(19): siRNA sense strand
guacaggccuuacgcaucu

SEQ ID NO: 1813788 - RNA, 19 nt, Homo sapiens
  misc_RNA (1)...(19): siRNA sense strand
gagcagccguguacgaaga

SEQ ID NO: 1813789 - RNA, 19 nt, Homo sapiens
  misc_RNA (1)...(19): siRNA sense strand
caaagaccaugccgaagga

SEQ ID NO: 1813790 - RNA, 19 nt, Homo sapiens
  misc_RNA (1)...(19): siRNA sense strand
ccacagagccucagugaca

SEQ ID NO: 1813791 - RNA, 19 nt, Homo sapiens
  misc_RNA (1)...(19): siRNA sense strand
gaaggagccuggagaacca

SEQ ID NO: 1813792 - RNA, 19 nt, Homo sapiens
  misc_RNA (1)...(19): siRNA sense strand
gagcagaacguuccucgaa

SEQ ID NO: 1813793 - RNA, 19 nt, Homo sapiens
  misc_RNA (1)...(19): siRNA sense strand
gaaguuauggucaugaguu

SEQ ID NO: 1813794 - RNA, 19 nt, Homo sapiens
  misc_RNA (1)...(19): siRNA sense strand
ucaagaagaacguguauga

SEQ ID NO: 1813795 - RNA, 19 nt, Homo sapiens
  misc_RNA (1)...(19): siRNA sense strand
gauauaaccuacccaacca

SEQ ID NO: 1813796 - RNA, 19 nt, Homo sapiens
  misc_RNA (1)...(19): siRNA sense strand
uaaccuacccaaccaagua

SEQ ID NO: 1813797 - RNA, 19 nt, Homo sapiens
  misc_RNA (1)...(19): siRNA sense strand
gaacguguaugagcagcaa

SEQ ID NO: 1813798 - RNA, 19 nt, Homo sapiens
  misc_RNA (1)...(19): siRNA sense strand
ggcaugaucuacucgacua

SEQ ID NO: 1813799 - RNA, 19 nt, Homo sapiens
  misc_RNA (1)...(19): siRNA sense strand
gcaagagcccagccaacua

SEQ ID NO: 1813800 - RNA, 19 nt, Homo sapiens
  misc_RNA (1)...(19): siRNA sense strand
ccaccaaacugcgcaagaa

SEQ ID NO: 1813801 - RNA, 19 nt, Homo sapiens
  misc_RNA (1)...(19): siRNA sense strand
gcauggaccucaccucucu

SEQ ID NO: 1813802 - RNA, 19 nt, Homo sapiens
  misc_RNA (1)...(19): siRNA sense strand
ggaguuggguaucacacaa

SEQ ID NO: 1813803 - RNA, 19 nt, Homo sapiens
  misc_RNA (1)...(19): siRNA sense strand
gcugugacauggucuacaa

SEQ ID NO: 1813804 - RNA, 19 nt, Homo sapiens
  misc_RNA (1)...(19): siRNA sense strand
cgagcaagcuggcaaacug

SEQ ID NO: 1813805 - RNA, 19 nt, Homo sapiens
  misc_RNA (1)...(19): siRNA sense strand
gagaagagcauggcagaug

SEQ ID NO: 1813806 - RNA, 19 nt, Homo sapiens
  misc_RNA (1)...(19): siRNA sense strand
cgaagagucugccaaagag

SEQ ID NO: 1813807 - RNA, 19 nt, Homo sapiens
  misc_RNA (1)...(19): siRNA sense strand
ccucagaccuggacuccuu

SEQ ID NO: 1813808 - RNA, 19 nt, Homo sapiens
  misc_RNA (1)...(19): siRNA sense strand
gcucagugcuccacagagu

SEQ ID NO: 1813809 - RNA, 19 nt, Homo sapiens
  misc_RNA (1)...(19): siRNA sense strand
ucagacaugucacugcaaa

SEQ ID NO: 1813810 - RNA, 19 nt, Homo sapiens
  misc_RNA (1)...(19): siRNA sense strand
gaacaaccaguccaaagca

SEQ ID NO: 1813811 - RNA, 19 nt, Homo sapiens
  misc_RNA (1)...(19): siRNA sense strand
caacagagccagccaacca

SEQ ID NO: 1813812 - RNA, 19 nt, Homo sapiens
  misc_RNA (1)...(19): siRNA sense strand
ggaggacgaccgcauuuau

SEQ ID NO: 1813813 - RNA, 19 nt, Homo sapiens
  misc_RNA (1)...(19): siRNA sense strand
agucagaccuggcguccua

SEQ ID NO: 1813814 - RNA, 19 nt, Homo sapiens
  misc_RNA (1)...(19): siRNA sense strand
ccucgaaacuacguaauga

SEQ ID NO: 1813815 - RNA, 19 nt, Homo sapiens
  misc_RNA (1)...(19): siRNA sense strand
ggccaggguucgagaaaga

SEQ ID NO: 1813816 - RNA, 19 nt, Homo sapiens
  misc_RNA (1)...(19): siRNA sense strand
gcgcugaggaggcuuauga

SEQ ID NO: 1813817 - RNA, 19 nt, Homo sapiens
  misc_RNA (1)...(19): siRNA sense strand
caacagcacgggaaguuau

SEQ ID NO: 1813818 - RNA, 19 nt, Homo sapiens
  misc_RNA (1)...(19): siRNA sense strand
gcaggcagcgucuagaaga

SEQ ID NO: 1813819 - RNA, 19 nt, Homo sapiens
  misc_RNA (1)...(19): siRNA sense strand
ugaagaggccaaagacgua

SEQ ID NO: 1813820 - RNA, 19 nt, Homo sapiens
  misc_RNA (1)...(19): siRNA sense strand
gaggagaagaggaaucuga

SEQ ID NO: 1813821 - RNA, 19 nt, Homo sapiens
  misc_RNA (1)...(19): siRNA sense strand
gcagaacguuccucgaaac

SEQ ID NO: 1813822 - RNA, 19 nt, Homo sapiens
  misc_RNA (1)...(19): siRNA sense strand
agacaucgcuagccgacuu

SEQ ID NO: 1813823 - RNA, 19 nt, Homo sapiens
  misc_RNA (1)...(19): siRNA sense strand
ggagauaggcaugcccuuu

SEQ ID NO: 1813824 - RNA, 19 nt, Homo sapiens
  misc_RNA (1)...(19): siRNA sense strand
ggugagcacuccucuacau

SEQ ID NO: 1813825 - RNA, 19 nt, Homo sapiens
  misc_RNA (1)...(19): siRNA sense strand
cagcugccaucuccucaaa

SEQ ID NO: 1813826 - RNA, 19 nt, Homo sapiens
  misc_RNA (1)...(19): siRNA sense strand
guagacagcaggacacaga

SEQ ID NO: 1813827 - RNA, 19 nt, Homo sapiens
  misc_RNA (1)...(19): siRNA sense strand
ggaacgccaggcucaauuu

SEQ ID NO: 1813828 - RNA, 19 nt, Homo sapiens
  misc_RNA (1)...(19): siRNA sense strand
ucaacuccauggaccagua

SEQ ID NO: 1813829 - RNA, 19 nt, Homo sapiens
  misc_RNA (1)...(19): siRNA sense strand
gcauauuccuacuuugcaa

SEQ ID NO: 1813830 - RNA, 19 nt, Homo sapiens
  misc_RNA (1)...(19): siRNA sense strand
gugcauacauggacccaau

SEQ ID NO: 1813831 - RNA, 19 nt, Homo sapiens
  misc_RNA (1)...(19): siRNA sense strand
gaagccagaccaagagaga

SEQ ID NO: 1813832 - RNA, 19 nt, Homo sapiens
  misc_RNA (1)...(19): siRNA sense strand
acagacaaauggcucuaaa

SEQ ID NO: 1813833 - RNA, 19 nt, Homo sapiens
  misc_RNA (1)...(19): siRNA sense strand
cccaagcccucaucccuaa

SEQ ID NO: 1813834 - RNA, 19 nt, Homo sapiens
  misc_RNA (1)...(19): siRNA sense strand
gagcaugaguccaccaaac

SEQ ID NO: 1813835 - RNA, 19 nt, Homo sapiens
  misc_RNA (1)...(19): siRNA sense strand
gugcagcccuugguuauca

SEQ ID NO: 1813836 - RNA, 19 nt, Homo sapiens
  misc_RNA (1)...(19): siRNA sense strand
ccaagacaccacccaguaa

SEQ ID NO: 1813837 - RNA, 19 nt, Homo sapiens
  misc_RNA (1)...(19): siRNA sense strand
gcaaggaggcuggcccaaa

SEQ ID NO: 1813838 - RNA, 19 nt, Homo sapiens
  misc_RNA (1)...(19): siRNA sense strand
ggaggaagacgaagacucu

SEQ ID NO: 1813839 - RNA, 19 nt, Homo sapiens
  misc_RNA (1)...(19): siRNA sense strand
gggcagaacagacaaaugg

SEQ ID NO: 1813840 - RNA, 19 nt, Homo sapiens
  misc_RNA (1)...(19): siRNA sense strand
ggaggagacggacugguuu

SEQ ID NO: 1813841 - RNA, 19 nt, Homo sapiens
  misc_RNA (1)...(19): siRNA sense strand
gcagacagacgaugaggau

SEQ ID NO: 1813842 - RNA, 19 nt, Homo sapiens
  misc_RNA (1)...(19): siRNA sense strand
gcagaggcccuacccacaa

SEQ ID NO: 1813843 - RNA, 19 nt, Homo sapiens
  misc_RNA (1)...(19): siRNA sense strand
caaggaggcuggcccaaaa

SEQ ID NO: 1813844 - RNA, 19 nt, Homo sapiens
  misc_RNA (1)...(19): siRNA sense strand
gcacagcuaccaugacuac

SEQ ID NO: 1813845 - RNA, 19 nt, Homo sapiens
  misc_RNA (1)...(19): siRNA sense strand
ggccaaagacguagaguca

SEQ ID NO: 1813846 - RNA, 19 nt, Homo sapiens
  misc_RNA (1)...(19): siRNA sense strand
gggcucgaguagagaagua

SEQ ID NO: 1813847 - RNA, 19 nt, Homo sapiens
  misc_RNA (1)...(19): siRNA sense strand
cgagaaagaggaagcauca

SEQ ID NO: 1813848 - RNA, 19 nt, Homo sapiens
  misc_RNA (1)...(19): siRNA sense strand
ccaaggaacagcagucaga

SEQ ID NO: 1813849 - RNA, 19 nt, Homo sapiens
  misc_RNA (1)...(19): siRNA sense strand
augaggagcuggaggauau

SEQ ID NO: 1813850 - RNA, 19 nt, Homo sapiens
  misc_RNA (1)...(19): siRNA sense strand
gaagccaccuccagagacu

SEQ ID NO: 1813851 - RNA, 19 nt, Homo sapiens
  misc_RNA (1)...(19): siRNA sense strand
caagagcccagccaacuau

SEQ ID NO: 1813852 - RNA, 19 nt, Homo sapiens
  misc_RNA (1)...(19): siRNA sense strand
ucaucacgcuggcaucuga

SEQ ID NO: 1813853 - RNA, 19 nt, Homo sapiens
  misc_RNA (1)...(19): siRNA sense strand
gaaguuccaggaugaaauc

SEQ ID NO: 1813854 - RNA, 19 nt, Homo sapiens
  misc_RNA (1)...(19): siRNA sense strand
ccacuacuauggugacagu

SEQ ID NO: 1813855 - RNA, 19 nt, Homo sapiens
  misc_RNA (1)...(19): siRNA sense strand
ccuagcggcugcugaguug

SEQ ID NO: 1813856 - RNA, 19 nt, Homo sapiens
  misc_RNA (1)...(19): siRNA sense strand
cagaagggccugucuaucu

SEQ ID NO: 1813857 - RNA, 19 nt, Homo sapiens
  misc_RNA (1)...(19): siRNA sense strand
ggccaaguuugccagauau

SEQ ID NO: 1813858 - RNA, 19 nt, Homo sapiens
  misc_RNA (1)...(19): siRNA sense strand
gaacagacaaauggcucua

SEQ ID NO: 1813859 - RNA, 19 nt, Homo sapiens
  misc_RNA (1)...(19): siRNA sense strand
ggagaucgucagguacaua

SEQ ID NO: 1813860 - RNA, 19 nt, Homo sapiens
  misc_RNA (1)...(19): siRNA sense strand
gaacgccaggcucaauuug

SEQ ID NO: 1813861 - RNA, 19 nt, Homo sapiens
  misc_RNA (1)...(19): siRNA sense strand
ugucgaacaucuacucaga

SEQ ID NO: 1813862 - RNA, 19 nt, Homo sapiens
  misc_RNA (1)...(19): siRNA sense strand
uagaauggguccuggaucu

SEQ ID NO: 1813863 - RNA, 19 nt, Homo sapiens
  misc_RNA (1)...(19): siRNA sense strand
ucacagccaucccgugcuu

SEQ ID NO: 1813864 - RNA, 19 nt, Homo sapiens
  misc_RNA (1)...(19): siRNA sense strand
ccagagccgccuugacuuu

SEQ ID NO: 1813865 - RNA, 19 nt, Homo sapiens
  misc_RNA (1)...(19): siRNA sense strand
ggccugggcuccuucgaau

SEQ ID NO: 1813866 - RNA, 19 nt, Homo sapiens
  misc_RNA (1)...(19): siRNA sense strand
ccgggcauauuccuacuuu

SEQ ID NO: 1813867 - RNA, 19 nt, Homo sapiens
  misc_RNA (1)...(19): siRNA sense strand
caaguucucgccuauugaa

SEQ ID NO: 1813868 - RNA, 19 nt, Homo sapiens
  misc_RNA (1)...(19): siRNA sense strand
gcgaggaaguauggucuug

SEQ ID NO: 1813869 - RNA, 19 nt, Homo sapiens
  misc_RNA (1)...(19): siRNA sense strand
aggccaaguuugccagaua

SEQ ID NO: 1813870 - RNA, 19 nt, Homo sapiens
  misc_RNA (1)...(19): siRNA sense strand
caaaagauauccaaguucu

SEQ ID NO: 1813871 - RNA, 19 nt, Homo sapiens
  misc_RNA (1)...(19): siRNA sense strand
gugagaggcugaacaaagc

SEQ ID NO: 1813872 - RNA, 19 nt, Homo sapiens
  misc_RNA (1)...(19): siRNA sense strand
uuacgcaucugguggaauc

SEQ ID NO: 1813873 - RNA, 19 nt, Homo sapiens
  misc_RNA (1)...(19): siRNA sense strand
uccaaguucucgccuauug

SEQ ID NO: 1813874 - RNA, 19 nt, Homo sapiens
  misc_RNA (1)...(19): siRNA sense strand
ggucauggguuaccagaag

SEQ ID NO: 1813875 - RNA, 19 nt, Homo sapiens
  misc_RNA (1)...(19): siRNA sense strand
ccuguuggcugccuuacua

SEQ ID NO: 1813876 - RNA, 19 nt, Homo sapiens
  misc_RNA (1)...(19): siRNA sense strand
gaagcaugacggacaagua

SEQ ID NO: 1813877 - RNA, 19 nt, Homo sapiens
  misc_RNA (1)...(19): siRNA sense strand
ugaggcagaugacagauau

SEQ ID NO: 1813878 - RNA, 19 nt, Homo sapiens
  misc_RNA (1)...(19): siRNA sense strand
gguggacauucaucuguuu

SEQ ID NO: 1813879 - RNA, 19 nt, Homo sapiens
  misc_RNA (1)...(19): siRNA sense strand
caagcaagggugugaguuu

SEQ ID NO: 1813880 - RNA, 19 nt, Homo sapiens
  misc_RNA (1)...(19): siRNA sense strand
ggccuuauccugccuggua

SEQ ID NO: 1813881 - RNA, 19 nt, Homo sapiens
  misc_RNA (1)...(19): siRNA sense strand
aaagcgagguggacauuca

SEQ ID NO: 1813882 - RNA, 19 nt, Homo sapiens
  misc_RNA (1)...(19): siRNA sense strand
ggaaagcgagguggacauu

SEQ ID NO: 1813883 - RNA, 19 nt, Homo sapiens
  misc_RNA (1)...(19): siRNA sense strand
caucaugguuggccuuauc

SEQ ID NO: 1813884 - RNA, 19 nt, Homo sapiens
  misc_RNA (1)...(19): siRNA sense strand
uaacuacaccgaggaaaug

SEQ ID NO: 1813885 - RNA, 19 nt, Homo sapiens
  misc_RNA (1)...(19): siRNA sense strand
ccacugagucugagucuuc

SEQ ID NO: 1813886 - RNA, 19 nt, Homo sapiens
  misc_RNA (1)...(19): siRNA sense strand
gcaaggcaguccaugucau

SEQ ID NO: 1813887 - RNA, 19 nt, Homo sapiens
  misc_RNA (1)...(19): siRNA sense strand
cuucuuaacuggcauugug

SEQ ID NO: 1813888 - RNA, 19 nt, Homo sapiens
  misc_RNA (1)...(19): siRNA sense strand
ugagaagcaugacggacaa

SEQ ID NO: 1813889 - RNA, 19 nt, Homo sapiens
  misc_RNA (1)...(19): siRNA sense strand
cuacagcaguguccucauc

SEQ ID NO: 1813890 - RNA, 19 nt, Homo sapiens
  misc_RNA (1)...(19): siRNA sense strand
gagucugagucuucaaguu

SEQ ID NO: 1813891 - RNA, 19 nt, Homo sapiens
  misc_RNA (1)...(19): siRNA sense strand
cagaagaaacugagaagca

SEQ ID NO: 1813892 - RNA, 19 nt, Homo sapiens
  misc_RNA (1)...(19): siRNA sense strand
ccucuaugcuuuccuugga

SEQ ID NO: 1813893 - RNA, 19 nt, Homo sapiens
  misc_RNA (1)...(19): siRNA sense strand
ucaccgaggcccuagcuuu

SEQ ID NO: 1813894 - RNA, 19 nt, Homo sapiens
  misc_RNA (1)...(19): siRNA sense strand
gaaaagguggucuauguug

SEQ ID NO: 1813895 - RNA, 19 nt, Homo sapiens
  misc_RNA (1)...(19): siRNA sense strand
ggacuaugacuccaugaag

SEQ ID NO: 1813896 - RNA, 19 nt, Homo sapiens
  misc_RNA (1)...(19): siRNA sense strand
ggaucaguauauacacuuc

SEQ ID NO: 1813897 - RNA, 19 nt, Homo sapiens
  misc_RNA (1)...(19): siRNA sense strand
agaagaaacugagaagcau

SEQ ID NO: 1813898 - RNA, 19 nt, Homo sapiens
  misc_RNA (1)...(19): siRNA sense strand
gcuauugcauuaucaucuc

SEQ ID NO: 1813899 - RNA, 19 nt, Homo sapiens
  misc_RNA (1)...(19): siRNA sense strand
ucaagauccucuccaaagg

SEQ ID NO: 1813900 - RNA, 19 nt, Homo sapiens
  misc_RNA (1)...(19): siRNA sense strand
gaccuccucuuugucauca

SEQ ID NO: 1813901 - RNA, 19 nt, Homo sapiens
  misc_RNA (1)...(19): siRNA sense strand
gcaagggugugaguuugag

SEQ ID NO: 1813902 - RNA, 19 nt, Homo sapiens
  misc_RNA (1)...(19): siRNA sense strand
caacgucagugaggcagau

SEQ ID NO: 1813903 - RNA, 19 nt, Homo sapiens
  misc_RNA (1)...(19): siRNA sense strand
aagcaagggugugaguuug

SEQ ID NO: 1813904 - RNA, 19 nt, Homo sapiens
  misc_RNA (1)...(19): siRNA sense strand
auucaucuguuuccacuga

SEQ ID NO: 1813905 - RNA, 19 nt, Homo sapiens
  misc_RNA (1)...(19): siRNA sense strand
ugagaacacugugcacaag

SEQ ID NO: 1813906 - RNA, 19 nt, Homo sapiens
  misc_RNA (1)...(19): siRNA sense strand
agucugagucuucaaguuu

SEQ ID NO: 1813907 - RNA, 19 nt, Homo sapiens
  misc_RNA (1)...(19): siRNA sense strand
cagcaucgacuccuucauc

SEQ ID NO: 1813908 - RNA, 19 nt, Homo sapiens
  misc_RNA (1)...(19): siRNA sense strand
ggacauucaucuguuucca

SEQ ID NO: 1813909 - RNA, 19 nt, Homo sapiens
  misc_RNA (1)...(19): siRNA sense strand
gaacccuguuuccgugaag

SEQ ID NO: 1813910 - RNA, 19 nt, Homo sapiens
  misc_RNA (1)...(19): siRNA sense strand
ggaucagcaucgacuccuu

SEQ ID NO: 1813911 - RNA, 19 nt, Homo sapiens
  misc_RNA (1)...(19): siRNA sense strand
gagguggacauucaucugu

SEQ ID NO: 1813912 - RNA, 19 nt, Homo sapiens
  misc_RNA (1)...(19): siRNA sense strand
uggccgaccuccucuuugu

SEQ ID NO: 1813913 - RNA, 19 nt, Homo sapiens
  misc_RNA (1)...(19): siRNA sense strand
cauccucuaugcuuuccuu

SEQ ID NO: 1813914 - RNA, 19 nt, Homo sapiens
  misc_RNA (1)...(19): siRNA sense strand
ccaugaaggaacccuguuu

SEQ ID NO: 1813915 - RNA, 19 nt, Homo sapiens
  misc_RNA (1)...(19): siRNA sense strand
caucuacuccaucaucuuc

SEQ ID NO: 1813916 - RNA, 19 nt, Homo sapiens
  misc_RNA (1)...(19): siRNA sense strand
gugaggcagaugacagaua

SEQ ID NO: 1813917 - RNA, 19 nt, Homo sapiens
  misc_RNA (1)...(19): siRNA sense strand
uccaucaucuucuuaacug

SEQ ID NO: 1813918 - RNA, 19 nt, Homo sapiens
  misc_RNA (1)...(19): siRNA sense strand
cugaaaagguggucuaugu

SEQ ID NO: 1813919 - RNA, 19 nt, Homo sapiens
  misc_RNA (1)...(19): siRNA sense strand
uagcuuucuuccacuguug

SEQ ID NO: 1813920 - RNA, 19 nt, Homo sapiens
  misc_RNA (1)...(19): siRNA sense strand
cuacuccaucaucuucuua

SEQ ID NO: 1813921 - RNA, 19 nt, Homo sapiens
  misc_RNA (1)...(19): siRNA sense strand
guccugcuauugcauuauc

SEQ ID NO: 1813922 - RNA, 19 nt, Homo sapiens
  misc_RNA (1)...(19): siRNA sense strand
gugguuguguuccaguuuc

SEQ ID NO: 1813923 - RNA, 19 nt, Homo sapiens
  misc_RNA (1)...(19): siRNA sense strand
aagaaacugagaagcauga

SEQ ID NO: 1813924 - RNA, 19 nt, Homo sapiens
  misc_RNA (1)...(19): siRNA sense strand
ucauccuggucauggguua

SEQ ID NO: 1813925 - RNA, 19 nt, Homo sapiens
  misc_RNA (1)...(19): siRNA sense strand
uauccugccugguauuguc

SEQ ID NO: 1813926 - RNA, 19 nt, Homo sapiens
  misc_RNA (1)...(19): siRNA sense strand
ggaagcuguuggcugaaaa

SEQ ID NO: 1813927 - RNA, 19 nt, Homo sapiens
  misc_RNA (1)...(19): siRNA sense strand
aggaagcuguuggcugaaa

SEQ ID NO: 1813928 - RNA, 19 nt, Homo sapiens
  misc_RNA (1)...(19): siRNA sense strand
gcauuaucaucuccaagcu

SEQ ID NO: 1813929 - RNA, 19 nt, Homo sapiens
  misc_RNA (1)...(19): siRNA sense strand
gaaagcgagguggacauuc

SEQ ID NO: 1813930 - RNA, 19 nt, Homo sapiens
  misc_RNA (1)...(19): siRNA sense strand
gccucaagauccucuccaa

SEQ ID NO: 1813931 - RNA, 19 nt, Homo sapiens
  misc_RNA (1)...(19): siRNA sense strand
ccgaggcccuagcuuucuu

SEQ ID NO: 1813932 - RNA, 19 nt, Homo sapiens
  misc_RNA (1)...(19): siRNA sense strand
gggacuaugacuccaugaa

SEQ ID NO: 1813933 - RNA, 19 nt, Homo sapiens
  misc_RNA (1)...(19): siRNA sense strand
ucaucacgcuucccuucug

SEQ ID NO: 1813934 - RNA, 19 nt, Homo sapiens
  misc_RNA (1)...(19): siRNA sense strand
gggaucaguauauacacuu

SEQ ID NO: 1813935 - RNA, 19 nt, Homo sapiens
  misc_RNA (1)...(19): siRNA sense strand
cauccuggccuucaucagu

SEQ ID NO: 1813936 - RNA, 19 nt, Homo sapiens
  misc_RNA (1)...(19): siRNA sense strand
gucauggguuaccagaaga

SEQ ID NO: 1813937 - RNA, 19 nt, Homo sapiens
  misc_RNA (1)...(19): siRNA sense strand
gagaacacugugcacaagu

SEQ ID NO: 1813938 - RNA, 19 nt, Homo sapiens
  misc_RNA (1)...(19): siRNA sense strand
uuggcugccuuacuacauu

SEQ ID NO: 1813939 - RNA, 19 nt, Homo sapiens
  misc_RNA (1)...(19): siRNA sense strand
cuagcuuucuuccacuguu

SEQ ID NO: 1813940 - RNA, 19 nt, Homo sapiens
  misc_RNA (1)...(19): siRNA sense strand
gucauccuguccugcuauu

SEQ ID NO: 1813941 - RNA, 19 nt, Homo sapiens
  misc_RNA (1)...(19): siRNA sense strand
gaucaguauauacacuuca

SEQ ID NO: 1813942 - RNA, 19 nt, Homo sapiens
  misc_RNA (1)...(19): siRNA sense strand
caccgaggcccuagcuuuc

SEQ ID NO: 1813943 - RNA, 19 nt, Homo sapiens
  misc_RNA (1)...(19): siRNA sense strand
gauaacuacaccgaggaaa

SEQ ID NO: 1813944 - RNA, 19 nt, Homo sapiens
  misc_RNA (1)...(19): siRNA sense strand
caugaaggaacccuguuuc

SEQ ID NO: 1813945 - RNA, 19 nt, Homo sapiens
  misc_RNA (1)...(19): siRNA sense strand
gaccacagucauccucauc

SEQ ID NO: 1813946 - RNA, 19 nt, Homo sapiens
  misc_RNA (1)...(19): siRNA sense strand
gggugguuguguuccaguu

SEQ ID NO: 1813947 - RNA, 19 nt, Homo sapiens
  misc_RNA (1)...(19): siRNA sense strand
ucacugggcuuucccuuca

SEQ ID NO: 1813948 - RNA, 19 nt, Homo sapiens
  misc_RNA (1)...(19): siRNA sense strand
gggauguccugcagaagaa

SEQ ID NO: 1813949 - RNA, 19 nt, Homo sapiens
  misc_RNA (1)...(19): siRNA sense strand
ucgaggauguggccuugua

SEQ ID NO: 1813950 - RNA, 19 nt, Homo sapiens
  misc_RNA (1)...(19): siRNA sense strand
ucacggcucuaaggagaaa

SEQ ID NO: 1813951 - RNA, 19 nt, Homo sapiens
  misc_RNA (1)...(19): siRNA sense strand
gccagugacuuucgaggau

SEQ ID NO: 1813952 - RNA, 19 nt, Homo sapiens
  misc_RNA (1)...(19): siRNA sense strand
gaccagagaccggcagaug

SEQ ID NO: 1813953 - RNA, 19 nt, Homo sapiens
  misc_RNA (1)...(19): siRNA sense strand
gcacaaccgcacacacaca

SEQ ID NO: 1813954 - RNA, 19 nt, Homo sapiens
  misc_RNA (1)...(19): siRNA sense strand
gcgcacaaccgcacacaca

SEQ ID NO: 1813955 - RNA, 19 nt, Homo sapiens
  misc_RNA (1)...(19): siRNA sense strand
acagugaggugggcaggaa

SEQ ID NO: 1813956 - RNA, 19 nt, Homo sapiens
  misc_RNA (1)...(19): siRNA sense strand
uggcagcccuugggaaugu

SEQ ID NO: 1813957 - RNA, 19 nt, Homo sapiens
  misc_RNA (1)...(19): siRNA sense strand
gcacacacacaggcgagaa

SEQ ID NO: 1813958 - RNA, 19 nt, Homo sapiens
  misc_RNA (1)...(19): siRNA sense strand
gcaggcaggagaugagaag

SEQ ID NO: 1813959 - RNA, 19 nt, Homo sapiens
  misc_RNA (1)...(19): siRNA sense strand
uaagucacggcucuaagga

SEQ ID NO: 1813960 - RNA, 19 nt, Homo sapiens
  misc_RNA (1)...(19): siRNA sense strand
gaacuucuacagggauguc

SEQ ID NO: 1813961 - RNA, 19 nt, Homo sapiens
  misc_RNA (1)...(19): siRNA sense strand
ggaaauauaugguauggaa

SEQ ID NO: 1813962 - RNA, 19 nt, Homo sapiens
  misc_RNA (1)...(19): siRNA sense strand
ggaaugagaccuccuguaa

SEQ ID NO: 1813963 - RNA, 19 nt, Homo sapiens
  misc_RNA (1)...(19): siRNA sense strand
gaacagacauagaguugga

SEQ ID NO: 1813964 - RNA, 19 nt, Homo sapiens
  misc_RNA (1)...(19): siRNA sense strand
ccauauaugucacaagaaa

SEQ ID NO: 1813965 - RNA, 19 nt, Homo sapiens
  misc_RNA (1)...(19): siRNA sense strand
ggaccuggcuuagcuauuc

SEQ ID NO: 1813966 - RNA, 19 nt, Homo sapiens
  misc_RNA (1)...(19): siRNA sense strand
gcaacaagaugauucugau

SEQ ID NO: 1813967 - RNA, 19 nt, Homo sapiens
  misc_RNA (1)...(19): siRNA sense strand
gcagguacauaaagaaaca

SEQ ID NO: 1813968 - RNA, 19 nt, Homo sapiens
  misc_RNA (1)...(19): siRNA sense strand
aggcauaccuccauuaaug

SEQ ID NO: 1813969 - RNA, 19 nt, Homo sapiens
  misc_RNA (1)...(19): siRNA sense strand
aaugagaccuccuguaaug

SEQ ID NO: 1813970 - RNA, 19 nt, Homo sapiens
  misc_RNA (1)...(19): siRNA sense strand
gcaugcagguacauaaaga

SEQ ID NO: 1813971 - RNA, 19 nt, Homo sapiens
  misc_RNA (1)...(19): siRNA sense strand
agacauagaguuggaaaua

SEQ ID NO: 1813972 - RNA, 19 nt, Homo sapiens
  misc_RNA (1)...(19): siRNA sense strand
caacaacuaguacaacaaa

SEQ ID NO: 1813973 - RNA, 19 nt, Homo sapiens
  misc_RNA (1)...(19): siRNA sense strand
gaugaaagacgacgacuuc

SEQ ID NO: 1813974 - RNA, 19 nt, Homo sapiens
  misc_RNA (1)...(19): siRNA sense strand
ccaggaaugccaccaguua

SEQ ID NO: 1813975 - RNA, 19 nt, Homo sapiens
  misc_RNA (1)...(19): siRNA sense strand
uaaaccagcggcuucaaua

SEQ ID NO: 1813976 - RNA, 19 nt, Homo sapiens
  misc_RNA (1)...(19): siRNA sense strand
gaaagucugucugcaucuu

SEQ ID NO: 1813977 - RNA, 19 nt, Homo sapiens
  misc_RNA (1)...(19): siRNA sense strand
caaauaguacugcagcuaa

SEQ ID NO: 1813978 - RNA, 19 nt, Homo sapiens
  misc_RNA (1)...(19): siRNA sense strand
gaagaacagacauagaguu

SEQ ID NO: 1813979 - RNA, 19 nt, Homo sapiens
  misc_RNA (1)...(19): siRNA sense strand
gccaauggguggaaugaug

SEQ ID NO: 1813980 - RNA, 19 nt, Homo sapiens
  misc_RNA (1)...(19): siRNA sense strand
ucaggcagcuguccaagga

SEQ ID NO: 1813981 - RNA, 19 nt, Homo sapiens
  misc_RNA (1)...(19): siRNA sense strand
gaugagaagauccuuauuc

SEQ ID NO: 1813982 - RNA, 19 nt, Homo sapiens
  misc_RNA (1)...(19): siRNA sense strand
gaacagaaaacacaagaaa

SEQ ID NO: 1813983 - RNA, 19 nt, Homo sapiens
  misc_RNA (1)...(19): siRNA sense strand
gacauagaguuggaaauau

SEQ ID NO: 1813984 - RNA, 19 nt, Homo sapiens
  misc_RNA (1)...(19): siRNA sense strand
caacuagugcaaccaguaa

SEQ ID NO: 1813985 - RNA, 19 nt, Homo sapiens
  misc_RNA (1)...(19): siRNA sense strand
gcaagguggccguuacuga

SEQ ID NO: 1813986 - RNA, 19 nt, Homo sapiens
  misc_RNA (1)...(19): siRNA sense strand
agagagaagggcacaguua

SEQ ID NO: 1813987 - RNA, 19 nt, Homo sapiens
  misc_RNA (1)...(19): siRNA sense strand
caauagaugccguaccaaa

SEQ ID NO: 1813988 - RNA, 19 nt, Homo sapiens
  misc_RNA (1)...(19): siRNA sense strand
aaauaguacugcagcuaaa

SEQ ID NO: 1813989 - RNA, 19 nt, Homo sapiens
  misc_RNA (1)...(19): siRNA sense strand
acaagaugauucugaugaa

SEQ ID NO: 1813990 - RNA, 19 nt, Homo sapiens
  misc_RNA (1)...(19): siRNA sense strand
cggcuucaauaacaaguaa

SEQ ID NO: 1813991 - RNA, 19 nt, Homo sapiens
  misc_RNA (1)...(19): siRNA sense strand
caaguaagccugcuacacu

SEQ ID NO: 1813992 - RNA, 19 nt, Homo sapiens
  misc_RNA (1)...(19): siRNA sense strand
gaugaugagaagauccuua

SEQ ID NO: 1813993 - RNA, 19 nt, Homo sapiens
  misc_RNA (1)...(19): siRNA sense strand
caacuaguacaacaaauag

SEQ ID NO: 1813994 - RNA, 19 nt, Homo sapiens
  misc_RNA (1)...(19): siRNA sense strand
ugccauauaugucacaaga

SEQ ID NO: 1813995 - RNA, 19 nt, Homo sapiens
  misc_RNA (1)...(19): siRNA sense strand
ugcaauaccuggaagaaca

SEQ ID NO: 1813996 - RNA, 19 nt, Homo sapiens
  misc_RNA (1)...(19): siRNA sense strand
gaaugagaccuccuguaau

SEQ ID NO: 1813997 - RNA, 19 nt, Homo sapiens
  misc_RNA (1)...(19): siRNA sense strand
uauaugguauggaagguau

SEQ ID NO: 1813998 - RNA, 19 nt, Homo sapiens
  misc_RNA (1)...(19): siRNA sense strand
gacgacgacuucuugaaca

SEQ ID NO: 1813999 - RNA, 19 nt, Homo sapiens
  misc_RNA (1)...(19): siRNA sense strand
ccaggaauaccaccucuga

SEQ ID NO: 1814000 - RNA, 19 nt, Homo sapiens
  misc_RNA (1)...(19): siRNA sense strand
gaagagagaagggcacagu

SEQ ID NO: 1814001 - RNA, 19 nt, Homo sapiens
  misc_RNA (1)...(19): siRNA sense strand
ccaggcauaccuccauuaa

SEQ ID NO: 1814002 - RNA, 19 nt, Homo sapiens
  misc_RNA (1)...(19): siRNA sense strand
ccaaaugcaauaccuggaa

SEQ ID NO: 1814003 - RNA, 19 nt, Homo sapiens
  misc_RNA (1)...(19): siRNA sense strand
augagaagauccuuauuca

SEQ ID NO: 1814004 - RNA, 19 nt, Homo sapiens
  misc_RNA (1)...(19): siRNA sense strand
aaguacagcuucauccaau

SEQ ID NO: 1814005 - RNA, 19 nt, Homo sapiens
  misc_RNA (1)...(19): siRNA sense strand
guacagcuucauccaauuc

SEQ ID NO: 1814006 - RNA, 19 nt, Homo sapiens
  misc_RNA (1)...(19): siRNA sense strand
aacaauagaugccguacca

SEQ ID NO: 1814007 - RNA, 19 nt, Homo sapiens
  misc_RNA (1)...(19): siRNA sense strand
ggaagaacagacauagagu

SEQ ID NO: 1814008 - RNA, 19 nt, Homo sapiens
  misc_RNA (1)...(19): siRNA sense strand
uggcuuagcuauucauugc

SEQ ID NO: 1814009 - RNA, 19 nt, Homo sapiens
  misc_RNA (1)...(19): siRNA sense strand
aaaccagcggcuucaauaa

SEQ ID NO: 1814010 - RNA, 19 nt, Homo sapiens
  misc_RNA (1)...(19): siRNA sense strand
uacauucccugcuuauaca

SEQ ID NO: 1814011 - RNA, 19 nt, Homo sapiens
  misc_RNA (1)...(19): siRNA sense strand
gaagcaacaagaugauucu

SEQ ID NO: 1814012 - RNA, 19 nt, Homo sapiens
  misc_RNA (1)...(19): siRNA sense strand
caugccaccuggaaugaug

SEQ ID NO: 1814013 - RNA, 19 nt, Homo sapiens
  misc_RNA (1)...(19): siRNA sense strand
gaguuggaaauauauggua

SEQ ID NO: 1814014 - RNA, 19 nt, Homo sapiens
  misc_RNA (1)...(19): siRNA sense strand
guaugguggucaucaucaa

SEQ ID NO: 1814015 - RNA, 19 nt, Homo sapiens
  misc_RNA (1)...(19): siRNA sense strand
ccguggugcugguauugua

SEQ ID NO: 1814016 - RNA, 19 nt, Homo sapiens
  misc_RNA (1)...(19): siRNA sense strand
ccacagcaacaaggaauga

SEQ ID NO: 1814017 - RNA, 19 nt, Homo sapiens
  misc_RNA (1)...(19): siRNA sense strand
ggaccaauuggagguauga

SEQ ID NO: 1814018 - RNA, 19 nt, Homo sapiens
  misc_RNA (1)...(19): siRNA sense strand
gucacaagcucaaguacag

SEQ ID NO: 1814019 - RNA, 19 nt, Homo sapiens
  misc_RNA (1)...(19): siRNA sense strand
gaauuccuccaaugacuca

SEQ ID NO: 1814020 - RNA, 19 nt, Homo sapiens
  misc_RNA (1)...(19): siRNA sense strand
aagaacagacauagaguug

SEQ ID NO: 1814021 - RNA, 19 nt, Homo sapiens
  misc_RNA (1)...(19): siRNA sense strand
gggaaugagaccuccugua

SEQ ID NO: 1814022 - RNA, 19 nt, Homo sapiens
  misc_RNA (1)...(19): siRNA sense strand
caucgguaauccaccaguu

SEQ ID NO: 1814023 - RNA, 19 nt, Homo sapiens
  misc_RNA (1)...(19): siRNA sense strand
caaguacagcuucauccaa

SEQ ID NO: 1814024 - RNA, 19 nt, Homo sapiens
  misc_RNA (1)...(19): siRNA sense strand
aagguuauauuccuccaau

SEQ ID NO: 1814025 - RNA, 19 nt, Homo sapiens
  misc_RNA (1)...(19): siRNA sense strand
gagagaagggcacaguuac

SEQ ID NO: 1814026 - RNA, 19 nt, Homo sapiens
  misc_RNA (1)...(19): siRNA sense strand
caucaaggcaugccaggau

SEQ ID NO: 1814027 - RNA, 19 nt, Homo sapiens
  misc_RNA (1)...(19): siRNA sense strand
caacaagaugauucugaug

SEQ ID NO: 1814028 - RNA, 19 nt, Homo sapiens
  misc_RNA (1)...(19): siRNA sense strand
cuacauucccugcuuauac

SEQ ID NO: 1814029 - RNA, 19 nt, Homo sapiens
  misc_RNA (1)...(19): siRNA sense strand
gcuuagcuauucauugcau

SEQ ID NO: 1814030 - RNA, 19 nt, Homo sapiens
  misc_RNA (1)...(19): siRNA sense strand
agaagaagaagcagcugaa

SEQ ID NO: 1814031 - RNA, 19 nt, Homo sapiens
  misc_RNA (1)...(19): siRNA sense strand
gauauaucccuggaagaga

SEQ ID NO: 1814032 - RNA, 19 nt, Homo sapiens
  misc_RNA (1)...(19): siRNA sense strand
aaaagaagcaacaagauga

SEQ ID NO: 1814033 - RNA, 19 nt, Homo sapiens
  misc_RNA (1)...(19): siRNA sense strand
acaacuagugcaaccagua

SEQ ID NO: 1814034 - RNA, 19 nt, Homo sapiens
  misc_RNA (1)...(19): siRNA sense strand
gaccuggcuuagcuauuca

SEQ ID NO: 1814035 - RNA, 19 nt, Homo sapiens
  misc_RNA (1)...(19): siRNA sense strand
aacaagaugauucugauga

SEQ ID NO: 1814036 - RNA, 19 nt, Homo sapiens
  misc_RNA (1)...(19): siRNA sense strand
uagaccaccugcaccaaca

SEQ ID NO: 1814037 - RNA, 19 nt, Homo sapiens
  misc_RNA (1)...(19): siRNA sense strand
ccagcggcuucaauaacaa

SEQ ID NO: 1814038 - RNA, 19 nt, Homo sapiens
  misc_RNA (1)...(19): siRNA sense strand
acaaauaguacugcagcua

SEQ ID NO: 1814039 - RNA, 19 nt, Homo sapiens
  misc_RNA (1)...(19): siRNA sense strand
ccacagccuccaguuacua

SEQ ID NO: 1814040 - RNA, 19 nt, Homo sapiens
  misc_RNA (1)...(19): siRNA sense strand
ggaugaaagacgacgacuu

SEQ ID NO: 1814041 - RNA, 19 nt, Homo sapiens
  misc_RNA (1)...(19): siRNA sense strand
gaagaagaagcagcugaag

SEQ ID NO: 1814042 - RNA, 19 nt, Homo sapiens
  misc_RNA (1)...(19): siRNA sense strand
ucuacagcuucaacaacua

SEQ ID NO: 1814043 - RNA, 19 nt, Homo sapiens
  misc_RNA (1)...(19): siRNA sense strand
uauacacagucuacagcuu

SEQ ID NO: 1814044 - RNA, 19 nt, Homo sapiens
  misc_RNA (1)...(19): siRNA sense strand
aaagcucuguuuccuagca

SEQ ID NO: 1814045 - RNA, 19 nt, Homo sapiens
  misc_RNA (1)...(19): siRNA sense strand
ucagcgccagguauucuua

SEQ ID NO: 1814046 - RNA, 19 nt, Homo sapiens
  misc_RNA (1)...(19): siRNA sense strand
ccucagcaagguuauauuc

SEQ ID NO: 1814047 - RNA, 19 nt, Homo sapiens
  misc_RNA (1)...(19): siRNA sense strand
guaccaggagcaccaggaa

SEQ ID NO: 1814048 - RNA, 19 nt, Homo sapiens
  misc_RNA (1)...(19): siRNA sense strand
ucaaacccuuaaauaguac

SEQ ID NO: 1814049 - RNA, 19 nt, Homo sapiens
  misc_RNA (1)...(19): siRNA sense strand
ccaguuacuaagccucuuu

SEQ ID NO: 1814050 - RNA, 19 nt, Homo sapiens
  misc_RNA (1)...(19): siRNA sense strand
ugaugaauaugaugaugac

SEQ ID NO: 1814051 - RNA, 19 nt, Homo sapiens
  misc_RNA (1)...(19): siRNA sense strand
gucuacagcuucaacaacu

SEQ ID NO: 1814052 - RNA, 19 nt, Homo sapiens
  misc_RNA (1)...(19): siRNA sense strand
aggaauaccaccucugaug

SEQ ID NO: 1814053 - RNA, 19 nt, Homo sapiens
  misc_RNA (1)...(19): siRNA sense strand
caccuggaaugaugccaau

SEQ ID NO: 1814054 - RNA, 19 nt, Homo sapiens
  misc_RNA (1)...(19): siRNA sense strand
gaaaacacaagaaagucaa

SEQ ID NO: 1814055 - RNA, 19 nt, Homo sapiens
  misc_RNA (1)...(19): siRNA sense strand
gcucaaguacagcuucauc

SEQ ID NO: 1814056 - RNA, 19 nt, Homo sapiens
  misc_RNA (1)...(19): siRNA sense strand
uggaagaacagacauagag

SEQ ID NO: 1814057 - RNA, 19 nt, Homo sapiens
  misc_RNA (1)...(19): siRNA sense strand
ggaaugccaccaguuaugc

SEQ ID NO: 1814058 - RNA, 19 nt, Homo sapiens
  misc_RNA (1)...(19): siRNA sense strand
gguuauauuccuccaaugg

SEQ ID NO: 1814059 - RNA, 19 nt, Homo sapiens
  misc_RNA (1)...(19): siRNA sense strand
auagaugccguaccaaaug

SEQ ID NO: 1814060 - RNA, 19 nt, Homo sapiens
  misc_RNA (1)...(19): siRNA sense strand
cugcuacacuuacaacaac

SEQ ID NO: 1814061 - RNA, 19 nt, Homo sapiens
  misc_RNA (1)...(19): siRNA sense strand
caaagaaacccuacaaaug

SEQ ID NO: 1814062 - RNA, 19 nt, Homo sapiens
  misc_RNA (1)...(19): siRNA sense strand
gcaagagagacacauaaua

SEQ ID NO: 1814063 - RNA, 19 nt, Homo sapiens
  misc_RNA (1)...(19): siRNA sense strand
gcaaagaaacccuacaaau

SEQ ID NO: 1814064 - RNA, 19 nt, Homo sapiens
  misc_RNA (1)...(19): siRNA sense strand
cauaauagccaaacuagaa

SEQ ID NO: 1814065 - RNA, 19 nt, Homo sapiens
  misc_RNA (1)...(19): siRNA sense strand
gcagaauccugaaccaaga

SEQ ID NO: 1814066 - RNA, 19 nt, Homo sapiens
  misc_RNA (1)...(19): siRNA sense strand
ucacagagcauccaagaaa

SEQ ID NO: 1814067 - RNA, 19 nt, Homo sapiens
  misc_RNA (1)...(19): siRNA sense strand
cuacaaaugugaugacugu

SEQ ID NO: 1814068 - RNA, 19 nt, Homo sapiens
  misc_RNA (1)...(19): siRNA sense strand
aaagaaacccuacaaaugu

SEQ ID NO: 1814069 - RNA, 19 nt, Homo sapiens
  misc_RNA (1)...(19): siRNA sense strand
caagagagacacauaauag

SEQ ID NO: 1814070 - RNA, 19 nt, Homo sapiens
  misc_RNA (1)...(19): siRNA sense strand
ggaauggucugcagaaucc

SEQ ID NO: 1814071 - RNA, 19 nt, Homo sapiens
  misc_RNA (1)...(19): siRNA sense strand
gcaaagccaugugcagugu

SEQ ID NO: 1814072 - RNA, 19 nt, Homo sapiens
  misc_RNA (1)...(19): siRNA sense strand
ggagguaaacggagucuga

SEQ ID NO: 1814073 - RNA, 19 nt, Homo sapiens
  misc_RNA (1)...(19): siRNA sense strand
cgacagcucugccgucagu

SEQ ID NO: 1814074 - RNA, 19 nt, Homo sapiens
  misc_RNA (1)...(19): siRNA sense strand
aggcaucgauguccaauga

SEQ ID NO: 1814075 - RNA, 19 nt, Homo sapiens
  misc_RNA (1)...(19): siRNA sense strand
caagcaagagagacacaua

SEQ ID NO: 1814076 - RNA, 19 nt, Homo sapiens
  misc_RNA (1)...(19): siRNA sense strand
uagccaaacuagaagagaa

SEQ ID NO: 1814077 - RNA, 19 nt, Homo sapiens
  misc_RNA (1)...(19): siRNA sense strand
gaacaggaacugccagacu

SEQ ID NO: 1814078 - RNA, 19 nt, Homo sapiens
  misc_RNA (1)...(19): siRNA sense strand
gagcauccaagaaaccaaa

SEQ ID NO: 1814079 - RNA, 19 nt, Homo sapiens
  misc_RNA (1)...(19): siRNA sense strand
ccacugagagagcuaaaga

SEQ ID NO: 1814080 - RNA, 19 nt, Homo sapiens
  misc_RNA (1)...(19): siRNA sense strand
gagcugaagagacacaaga

SEQ ID NO: 1814081 - RNA, 19 nt, Homo sapiens
  misc_RNA (1)...(19): siRNA sense strand
acacauaauagccaaacua

SEQ ID NO: 1814082 - RNA, 19 nt, Homo sapiens
  misc_RNA (1)...(19): siRNA sense strand
gagaagugacaacaaggaa

SEQ ID NO: 1814083 - RNA, 19 nt, Homo sapiens
  misc_RNA (1)...(19): siRNA sense strand
ggaaaagcuucacguggaa

SEQ ID NO: 1814084 - RNA, 19 nt, Homo sapiens
  misc_RNA (1)...(19): siRNA sense strand
aagaaacccuacaaaugug

SEQ ID NO: 1814085 - RNA, 19 nt, Homo sapiens
  misc_RNA (1)...(19): siRNA sense strand
ugagagagcuaaagaaaag

SEQ ID NO: 1814086 - RNA, 19 nt, Homo sapiens
  misc_RNA (1)...(19): siRNA sense strand
gacauugcaggguggaaua

SEQ ID NO: 1814087 - RNA, 19 nt, Homo sapiens
  misc_RNA (1)...(19): siRNA sense strand
gaaugagaagugacaacaa

SEQ ID NO: 1814088 - RNA, 19 nt, Homo sapiens
  misc_RNA (1)...(19): siRNA sense strand
gaaccaagaggggcaaaua

SEQ ID NO: 1814089 - RNA, 19 nt, Homo sapiens
  misc_RNA (1)...(19): siRNA sense strand
aaugagaagugacaacaag

SEQ ID NO: 1814090 - RNA, 19 nt, Homo sapiens
  misc_RNA (1)...(19): siRNA sense strand
cagcaaagaaacccuacaa

SEQ ID NO: 1814091 - RNA, 19 nt, Homo sapiens
  misc_RNA (1)...(19): siRNA sense strand
aacaggaacugccagacuu

SEQ ID NO: 1814092 - RNA, 19 nt, Homo sapiens
  misc_RNA (1)...(19): siRNA sense strand
ggaacugccagacuuucaa

SEQ ID NO: 1814093 - RNA, 19 nt, Homo sapiens
  misc_RNA (1)...(19): siRNA sense strand
gaagugacaacaaggaaaa

SEQ ID NO: 1814094 - RNA, 19 nt, Homo sapiens
  misc_RNA (1)...(19): siRNA sense strand
uaaaggagcaaagccaugu

SEQ ID NO: 1814095 - RNA, 19 nt, Homo sapiens
  misc_RNA (1)...(19): siRNA sense strand
gaaaagcaaaggagguaaa

SEQ ID NO: 1814096 - RNA, 19 nt, Homo sapiens
  misc_RNA (1)...(19): siRNA sense strand
guaaacggagucugagcaa

SEQ ID NO: 1814097 - RNA, 19 nt, Homo sapiens
  misc_RNA (1)...(19): siRNA sense strand
gauugugacccucguggaa

SEQ ID NO: 1814098 - RNA, 19 nt, Homo sapiens
  misc_RNA (1)...(19): siRNA sense strand
aagcaagagagacacauaa

SEQ ID NO: 1814099 - RNA, 19 nt, Homo sapiens
  misc_RNA (1)...(19): siRNA sense strand
aaaaggugcucuuggagaa

SEQ ID NO: 1814100 - RNA, 19 nt, Homo sapiens
  misc_RNA (1)...(19): siRNA sense strand
aaagccaugugcaguguca

SEQ ID NO: 1814101 - RNA, 19 nt, Homo sapiens
  misc_RNA (1)...(19): siRNA sense strand
gggaauggucugcagaauc

SEQ ID NO: 1814102 - RNA, 19 nt, Homo sapiens
  misc_RNA (1)...(19): siRNA sense strand
aacccgagcugcacaccaa

SEQ ID NO: 1814103 - RNA, 19 nt, Homo sapiens
  misc_RNA (1)...(19): siRNA sense strand
ggcaaaaggugcucuugga

SEQ ID NO: 1814104 - RNA, 19 nt, Homo sapiens
  misc_RNA (1)...(19): siRNA sense strand
gcacaccaaggagcagauu

SEQ ID NO: 1814105 - RNA, 19 nt, Homo sapiens
  misc_RNA (1)...(19): siRNA sense strand
ugacccucguggaagauuu

SEQ ID NO: 1814106 - RNA, 19 nt, Homo sapiens
  misc_RNA (1)...(19): siRNA sense strand
acugagagagcuaaagaaa

SEQ ID NO: 1814107 - RNA, 19 nt, Homo sapiens
  misc_RNA (1)...(19): siRNA sense strand
ucaccagcaucaccgacuu

SEQ ID NO: 1814108 - RNA, 19 nt, Homo sapiens
  misc_RNA (1)...(19): siRNA sense strand
acacugaagcuuccuccaa

SEQ ID NO: 1814109 - RNA, 19 nt, Homo sapiens
  misc_RNA (1)...(19): siRNA sense strand
caggucagcuccccaaaug

SEQ ID NO: 1814110 - RNA, 19 nt, Homo sapiens
  misc_RNA (1)...(19): siRNA sense strand
gcucacuaccagagacauu

SEQ ID NO: 1814111 - RNA, 19 nt, Homo sapiens
  misc_RNA (1)...(19): siRNA sense strand
ggagucugagcaaccguuu

SEQ ID NO: 1814112 - RNA, 19 nt, Homo sapiens
  misc_RNA (1)...(19): siRNA sense strand
gcugaagagacacaagaga

SEQ ID NO: 1814113 - RNA, 19 nt, Homo sapiens
  misc_RNA (1)...(19): siRNA sense strand
acacuggagagaagccaua

SEQ ID NO: 1814114 - RNA, 19 nt, Homo sapiens
  misc_RNA (1)...(19): siRNA sense strand
gaacugccagacuuucaac

SEQ ID NO: 1814115 - RNA, 19 nt, Homo sapiens
  misc_RNA (1)...(19): siRNA sense strand
ugaagagacacaagagagu

SEQ ID NO: 1814116 - RNA, 19 nt, Homo sapiens
  misc_RNA (1)...(19): siRNA sense strand
ugagaagugacaacaagga

SEQ ID NO: 1814117 - RNA, 19 nt, Homo sapiens
  misc_RNA (1)...(19): siRNA sense strand
ggaaaauccacaacaggaa

SEQ ID NO: 1814118 - RNA, 19 nt, Homo sapiens
  misc_RNA (1)...(19): siRNA sense strand
gauguccaaugagcagcaa

SEQ ID NO: 1814119 - RNA, 19 nt, Homo sapiens
  misc_RNA (1)...(19): siRNA sense strand
agagaagccauaccagugu

SEQ ID NO: 1814120 - RNA, 19 nt, Homo sapiens
  misc_RNA (1)...(19): siRNA sense strand
agaagugacaacaaggaaa

SEQ ID NO: 1814121 - RNA, 19 nt, Homo sapiens
  misc_RNA (1)...(19): siRNA sense strand
gcaguggguggccguuugu

SEQ ID NO: 1814122 - RNA, 19 nt, Homo sapiens
  misc_RNA (1)...(19): siRNA sense strand
cguggaagauuuucacaga

SEQ ID NO: 1814123 - RNA, 19 nt, Homo sapiens
  misc_RNA (1)...(19): siRNA sense strand
guggguggccguuuguaug

SEQ ID NO: 1814124 - RNA, 19 nt, Homo sapiens
  misc_RNA (1)...(19): siRNA sense strand
ccaagaggggcaaauauga

SEQ ID NO: 1814125 - RNA, 19 nt, Homo sapiens
  misc_RNA (1)...(19): siRNA sense strand
caaggaaaauccacaacag

SEQ ID NO: 1814126 - RNA, 19 nt, Homo sapiens
  misc_RNA (1)...(19): siRNA sense strand
cacauaauagccaaacuag

SEQ ID NO: 1814127 - RNA, 19 nt, Homo sapiens
  misc_RNA (1)...(19): siRNA sense strand
acaggaacugccagacuuu

SEQ ID NO: 1814128 - RNA, 19 nt, Homo sapiens
  misc_RNA (1)...(19): siRNA sense strand
ccagagcuucagacgcuuu

SEQ ID NO: 1814129 - RNA, 19 nt, Homo sapiens
  misc_RNA (1)...(19): siRNA sense strand
caaccgcagacuccuagga

SEQ ID NO: 1814130 - RNA, 19 nt, Homo sapiens
  misc_RNA (1)...(19): siRNA sense strand
uggcagauccaaagggaau

SEQ ID NO: 1814131 - RNA, 19 nt, Homo sapiens
  misc_RNA (1)...(19): siRNA sense strand
gagagaaaccuuacaaaua

SEQ ID NO: 1814132 - RNA, 19 nt, Homo sapiens
  misc_RNA (1)...(19): siRNA sense strand
agacagaucuuacaagugu

SEQ ID NO: 1814133 - RNA, 19 nt, Homo sapiens
  misc_RNA (1)...(19): siRNA sense strand
gcaaaucacuggagaaucc

SEQ ID NO: 1814134 - RNA, 19 nt, Homo sapiens
  misc_RNA (1)...(19): siRNA sense strand
gggaaacuuugcaaaugua

SEQ ID NO: 1814135 - RNA, 19 nt, Homo sapiens
  misc_RNA (1)...(19): siRNA sense strand
agagaaaccuuacaagugu

SEQ ID NO: 1814136 - RNA, 19 nt, Homo sapiens
  misc_RNA (1)...(19): siRNA sense strand
cacaaagucuucaguaaug

SEQ ID NO: 1814137 - RNA, 19 nt, Homo sapiens
  misc_RNA (1)...(19): siRNA sense strand
gagagaaaccuuacaagug

SEQ ID NO: 1814138 - RNA, 19 nt, Homo sapiens
  misc_RNA (1)...(19): siRNA sense strand
ugucuaagguuucuaauca

SEQ ID NO: 1814139 - RNA, 19 nt, Homo sapiens
  misc_RNA (1)...(19): siRNA sense strand
agagaaaccucacaagugu

SEQ ID NO: 1814140 - RNA, 19 nt, Homo sapiens
  misc_RNA (1)...(19): siRNA sense strand
ggagagaaaccuuacaaau

SEQ ID NO: 1814141 - RNA, 19 nt, Homo sapiens
  misc_RNA (1)...(19): siRNA sense strand
cuacaaccauugcaaauca

SEQ ID NO: 1814142 - RNA, 19 nt, Homo sapiens
  misc_RNA (1)...(19): siRNA sense strand
gagagaaaccucacaagug

SEQ ID NO: 1814143 - RNA, 19 nt, Homo sapiens
  misc_RNA (1)...(19): siRNA sense strand
aaucaaaccuugcacaaca

SEQ ID NO: 1814144 - RNA, 19 nt, Homo sapiens
  misc_RNA (1)...(19): siRNA sense strand
gcaaauguaaugauuguca

SEQ ID NO: 1814145 - RNA, 19 nt, Homo sapiens
  misc_RNA (1)...(19): siRNA sense strand
gcacaacaucagagaguuu

SEQ ID NO: 1814146 - RNA, 19 nt, Homo sapiens
  misc_RNA (1)...(19): siRNA sense strand
caccuugcaugucaucaua

SEQ ID NO: 1814147 - RNA, 19 nt, Homo sapiens
  misc_RNA (1)...(19): siRNA sense strand
ggcaaggucuucagucugu

SEQ ID NO: 1814148 - RNA, 19 nt, Homo sapiens
  misc_RNA (1)...(19): siRNA sense strand
guucacaccucauuagaca

SEQ ID NO: 1814149 - RNA, 19 nt, Homo sapiens
  misc_RNA (1)...(19): siRNA sense strand
caacaucagagaguuuaua

SEQ ID NO: 1814150 - RNA, 19 nt, Homo sapiens
  misc_RNA (1)...(19): siRNA sense strand
ggagagaaaccuuacaagu

SEQ ID NO: 1814151 - RNA, 19 nt, Homo sapiens
  misc_RNA (1)...(19): siRNA sense strand
caucauagacuucauacug

SEQ ID NO: 1814152 - RNA, 19 nt, Homo sapiens
  misc_RNA (1)...(19): siRNA sense strand
gucacaaagucuucaguaa

SEQ ID NO: 1814153 - RNA, 19 nt, Homo sapiens
  misc_RNA (1)...(19): siRNA sense strand
ggagagaaaccucacaagu

SEQ ID NO: 1814154 - RNA, 19 nt, Homo sapiens
  misc_RNA (1)...(19): siRNA sense strand
aagcacaccuugcauguca

SEQ ID NO: 1814155 - RNA, 19 nt, Homo sapiens
  misc_RNA (1)...(19): siRNA sense strand
gagaaaccuuacaaauauc

SEQ ID NO: 1814156 - RNA, 19 nt, Homo sapiens
  misc_RNA (1)...(19): siRNA sense strand
uagggaaacuuugcaaaug

SEQ ID NO: 1814157 - RNA, 19 nt, Homo sapiens
  misc_RNA (1)...(19): siRNA sense strand
gaacucauacuggagagaa

SEQ ID NO: 1814158 - RNA, 19 nt, Homo sapiens
  misc_RNA (1)...(19): siRNA sense strand
ggcaaggucuucagucaag

SEQ ID NO: 1814159 - RNA, 19 nt, Homo sapiens
  misc_RNA (1)...(19): siRNA sense strand
cagucaagcuucauccuau

SEQ ID NO: 1814160 - RNA, 19 nt, Homo sapiens
  misc_RNA (1)...(19): siRNA sense strand
ucacaaagucuucaguaau

SEQ ID NO: 1814161 - RNA, 19 nt, Homo sapiens
  misc_RNA (1)...(19): siRNA sense strand
caucagagaguuuauacug

SEQ ID NO: 1814162 - RNA, 19 nt, Homo sapiens
  misc_RNA (1)...(19): siRNA sense strand
ggucuucagucaagcuuca

SEQ ID NO: 1814163 - RNA, 19 nt, Homo sapiens
  misc_RNA (1)...(19): siRNA sense strand
guagggaaacuuugcaaau

SEQ ID NO: 1814164 - RNA, 19 nt, Homo sapiens
  misc_RNA (1)...(19): siRNA sense strand
ggaaacuuugcaaauguaa

SEQ ID NO: 1814165 - RNA, 19 nt, Homo sapiens
  misc_RNA (1)...(19): siRNA sense strand
caucagagaauccauacug

SEQ ID NO: 1814166 - RNA, 19 nt, Homo sapiens
  misc_RNA (1)...(19): siRNA sense strand
agacaucagagaauccaua

SEQ ID NO: 1814167 - RNA, 19 nt, Homo sapiens
  misc_RNA (1)...(19): siRNA sense strand
guggcaaggucuucaguca

SEQ ID NO: 1814168 - RNA, 19 nt, Homo sapiens
  misc_RNA (1)...(19): siRNA sense strand
cacaacaucagagaguuua

SEQ ID NO: 1814169 - RNA, 19 nt, Homo sapiens
  misc_RNA (1)...(19): siRNA sense strand
guuuaucagcgaacucaua

SEQ ID NO: 1814170 - RNA, 19 nt, Homo sapiens
  misc_RNA (1)...(19): siRNA sense strand
agggaaacuuugcaaaugu

SEQ ID NO: 1814171 - RNA, 19 nt, Homo sapiens
  misc_RNA (1)...(19): siRNA sense strand
ucacguucacaccucauua

SEQ ID NO: 1814172 - RNA, 19 nt, Homo sapiens
  misc_RNA (1)...(19): siRNA sense strand
gguaaaauuuucagacauc

SEQ ID NO: 1814173 - RNA, 19 nt, Homo sapiens
  misc_RNA (1)...(19): siRNA sense strand
caagcuucauccuaugcaa

SEQ ID NO: 1814174 - RNA, 19 nt, Homo sapiens
  misc_RNA (1)...(19): siRNA sense strand
cauuagacaucagagaauc

SEQ ID NO: 1814175 - RNA, 19 nt, Homo sapiens
  misc_RNA (1)...(19): siRNA sense strand
ugucacaaagucuucagua

SEQ ID NO: 1814176 - RNA, 19 nt, Homo sapiens
  misc_RNA (1)...(19): siRNA sense strand
ccaugcagaacaucagaaa

SEQ ID NO: 1814177 - RNA, 19 nt, Homo sapiens
  misc_RNA (1)...(19): siRNA sense strand
ucagucaagcuucauccua

SEQ ID NO: 1814178 - RNA, 19 nt, Homo sapiens
  misc_RNA (1)...(19): siRNA sense strand
ugucaucauagacuucaua

SEQ ID NO: 1814179 - RNA, 19 nt, Homo sapiens
  misc_RNA (1)...(19): siRNA sense strand
guggcaaggucuucagucu

SEQ ID NO: 1814180 - RNA, 19 nt, Homo sapiens
  misc_RNA (1)...(19): siRNA sense strand
auacuggagagaaaccuua

SEQ ID NO: 1814181 - RNA, 19 nt, Homo sapiens
  misc_RNA (1)...(19): siRNA sense strand
ucaagcaauccauggugua

SEQ ID NO: 1814182 - RNA, 19 nt, Homo sapiens
  misc_RNA (1)...(19): siRNA sense strand
auacuggagagaaaccuua

SEQ ID NO: 1814183 - RNA, 19 nt, Homo sapiens
  misc_RNA (1)...(19): siRNA sense strand
gaguuuauacuggagagaa

SEQ ID NO: 1814184 - RNA, 19 nt, Homo sapiens
  misc_RNA (1)...(19): siRNA sense strand
gguuucuaaucaacaauca

SEQ ID NO: 1814185 - RNA, 19 nt, Homo sapiens
  misc_RNA (1)...(19): siRNA sense strand
caugguguagggaaacuuu

SEQ ID NO: 1814186 - RNA, 19 nt, Homo sapiens
  misc_RNA (1)...(19): siRNA sense strand
uucauacugucuaagguuu

SEQ ID NO: 1814187 - RNA, 19 nt, Homo sapiens
  misc_RNA (1)...(19): siRNA sense strand
ucacaccucauuagacauc

SEQ ID NO: 1814188 - RNA, 19 nt, Homo sapiens
  misc_RNA (1)...(19): siRNA sense strand
cauaggagaauucauacag

SEQ ID NO: 1814189 - RNA, 19 nt, Homo sapiens
  misc_RNA (1)...(19): siRNA sense strand
gaauucauacaggagagaa

SEQ ID NO: 1814190 - RNA, 19 nt, Homo sapiens
  misc_RNA (1)...(19): siRNA sense strand
gugugaugauuguggcaaa

SEQ ID NO: 1814191 - RNA, 19 nt, Homo sapiens
  misc_RNA (1)...(19): siRNA sense strand
aauccaugguguagggaaa

SEQ ID NO: 1814192 - RNA, 19 nt, Homo sapiens
  misc_RNA (1)...(19): siRNA sense strand
gucuaagguuucuaaucaa

SEQ ID NO: 1814193 - RNA, 19 nt, Homo sapiens
  misc_RNA (1)...(19): siRNA sense strand
gcaaaacauaggagaauuc

SEQ ID NO: 1814194 - RNA, 19 nt, Homo sapiens
  misc_RNA (1)...(19): siRNA sense strand
acaaucaaaccuugcacaa

SEQ ID NO: 1814195 - RNA, 19 nt, Homo sapiens
  misc_RNA (1)...(19): siRNA sense strand
uaucagcgaacucauacug

SEQ ID NO: 1814196 - RNA, 19 nt, Homo sapiens
  misc_RNA (1)...(19): siRNA sense strand
gcuacaaccauugcaaauc

SEQ ID NO: 1814197 - RNA, 19 nt, Homo sapiens
  misc_RNA (1)...(19): siRNA sense strand
ccuugcaugucaucauaga

SEQ ID NO: 1814198 - RNA, 19 nt, Homo sapiens
  misc_RNA (1)...(19): siRNA sense strand
gcacaccuugcaugucauc

SEQ ID NO: 1814199 - RNA, 19 nt, Homo sapiens
  misc_RNA (1)...(19): siRNA sense strand
aguuuauacuggagagaaa

SEQ ID NO: 1814200 - RNA, 19 nt, Homo sapiens
  misc_RNA (1)...(19): siRNA sense strand
ucuaagguuucuaaucaac

SEQ ID NO: 1814201 - RNA, 19 nt, Homo sapiens
  misc_RNA (1)...(19): siRNA sense strand
caagcaauccaugguguag

SEQ ID NO: 1814202 - RNA, 19 nt, Homo sapiens
  misc_RNA (1)...(19): siRNA sense strand
caggagagaaaccucacaa

SEQ ID NO: 1814203 - RNA, 19 nt, Homo sapiens
  misc_RNA (1)...(19): siRNA sense strand
aucauagacuucauacugu

SEQ ID NO: 1814204 - RNA, 19 nt, Homo sapiens
  misc_RNA (1)...(19): siRNA sense strand
ucaguaaugcuacaaccau

SEQ ID NO: 1814205 - RNA, 19 nt, Homo sapiens
  misc_RNA (1)...(19): siRNA sense strand
agucaagcuucauccuaug

SEQ ID NO: 1814206 - RNA, 19 nt, Homo sapiens
  misc_RNA (1)...(19): siRNA sense strand
gguaaagccuucaguaaua

SEQ ID NO: 1814207 - RNA, 19 nt, Homo sapiens
  misc_RNA (1)...(19): siRNA sense strand
ugaaagaccuuaugagugu

SEQ ID NO: 1814208 - RNA, 19 nt, Homo sapiens
  misc_RNA (1)...(19): siRNA sense strand
ugaaagaucuacacuuguu

SEQ ID NO: 1814209 - RNA, 19 nt, Homo sapiens
  misc_RNA (1)...(19): siRNA sense strand
gcucacagcuccacucuca

SEQ ID NO: 1814210 - RNA, 19 nt, Homo sapiens
  misc_RNA (1)...(19): siRNA sense strand
gggagagccuuuagcagua

SEQ ID NO: 1814211 - RNA, 19 nt, Homo sapiens
  misc_RNA (1)...(19): siRNA sense strand
ggagaaacccuacacaugu

SEQ ID NO: 1814212 - RNA, 19 nt, Homo sapiens
  misc_RNA (1)...(19): siRNA sense strand
gagaaaggccuuacgaaug

SEQ ID NO: 1814213 - RNA, 19 nt, Homo sapiens
  misc_RNA (1)...(19): siRNA sense strand
ggagaaagaccguaugaau

SEQ ID NO: 1814214 - RNA, 19 nt, Homo sapiens
  misc_RNA (1)...(19): siRNA sense strand
uaacagaucacaccucauu

SEQ ID NO: 1814215 - RNA, 19 nt, Homo sapiens
  misc_RNA (1)...(19): siRNA sense strand
gggaaagccuucaguaaca

SEQ ID NO: 1814216 - RNA, 19 nt, Homo sapiens
  misc_RNA (1)...(19): siRNA sense strand
gaacacagucugaggagaa

SEQ ID NO: 1814217 - RNA, 19 nt, Homo sapiens
  misc_RNA (1)...(19): siRNA sense strand
gaagagauaccauuuacau

SEQ ID NO: 1814218 - RNA, 19 nt, Homo sapiens
  misc_RNA (1)...(19): siRNA sense strand
agaaaucaauccuugguaa

SEQ ID NO: 1814219 - RNA, 19 nt, Homo sapiens
  misc_RNA (1)...(19): siRNA sense strand
gggaaauucuuuagccaaa

SEQ ID NO: 1814220 - RNA, 19 nt, Homo sapiens
  misc_RNA (1)...(19): siRNA sense strand
gaaaggacuuaugagugua

SEQ ID NO: 1814221 - RNA, 19 nt, Homo sapiens
  misc_RNA (1)...(19): siRNA sense strand
gagaaaagccuuauaaaug

SEQ ID NO: 1814222 - RNA, 19 nt, Homo sapiens
  misc_RNA (1)...(19): siRNA sense strand
agaaaggacuuaugagugu

SEQ ID NO: 1814223 - RNA, 19 nt, Homo sapiens
  misc_RNA (1)...(19): siRNA sense strand
gagaaagaccguaugaaug

SEQ ID NO: 1814224 - RNA, 19 nt, Homo sapiens
  misc_RNA (1)...(19): siRNA sense strand
gaaaguucauacuggagaa

SEQ ID NO: 1814225 - RNA, 19 nt, Homo sapiens
  misc_RNA (1)...(19): siRNA sense strand
gagaaacccuacacaugug

SEQ ID NO: 1814226 - RNA, 19 nt, Homo sapiens
  misc_RNA (1)...(19): siRNA sense strand
ggacagggacgcacuuaug

SEQ ID NO: 1814227 - RNA, 19 nt, Homo sapiens
  misc_RNA (1)...(19): siRNA sense strand
ggagagccuuuagcaguaa

SEQ ID NO: 1814228 - RNA, 19 nt, Homo sapiens
  misc_RNA (1)...(19): siRNA sense strand
ggagaaaggccuuacgaau

SEQ ID NO: 1814229 - RNA, 19 nt, Homo sapiens
  misc_RNA (1)...(19): siRNA sense strand
ccgaagcucugcucucauu

SEQ ID NO: 1814230 - RNA, 19 nt, Homo sapiens
  misc_RNA (1)...(19): siRNA sense strand
gaagccauauuccaaucuu

SEQ ID NO: 1814231 - RNA, 19 nt, Homo sapiens
  misc_RNA (1)...(19): siRNA sense strand
ugaggaagcaccagaaauu

SEQ ID NO: 1814232 - RNA, 19 nt, Homo sapiens
  misc_RNA (1)...(19): siRNA sense strand
ggaagagcuuuuaacaaua

SEQ ID NO: 1814233 - RNA, 19 nt, Homo sapiens
  misc_RNA (1)...(19): siRNA sense strand
ucagagaguucacacacaa

SEQ ID NO: 1814234 - RNA, 19 nt, Homo sapiens
  misc_RNA (1)...(19): siRNA sense strand
ccagagaaaggacuuauga

SEQ ID NO: 1814235 - RNA, 19 nt, Homo sapiens
  misc_RNA (1)...(19): siRNA sense strand
ggaagcaccagaaauuuca

SEQ ID NO: 1814236 - RNA, 19 nt, Homo sapiens
  misc_RNA (1)...(19): siRNA sense strand
caucuaagcugaggaagca

SEQ ID NO: 1814237 - RNA, 19 nt, Homo sapiens
  misc_RNA (1)...(19): siRNA sense strand
caagaaaggcccuaugagu

SEQ ID NO: 1814238 - RNA, 19 nt, Homo sapiens
  misc_RNA (1)...(19): siRNA sense strand
guaaagccuucaguaauag

SEQ ID NO: 1814239 - RNA, 19 nt, Homo sapiens
  misc_RNA (1)...(19): siRNA sense strand
ucacauuuguucaucauca

SEQ ID NO: 1814240 - RNA, 19 nt, Homo sapiens
  misc_RNA (1)...(19): siRNA sense strand
gggaagcccuuuagauggu

SEQ ID NO: 1814241 - RNA, 19 nt, Homo sapiens
  misc_RNA (1)...(19): siRNA sense strand
agaaaggccuuacgaaugc

SEQ ID NO: 1814242 - RNA, 19 nt, Homo sapiens
  misc_RNA (1)...(19): siRNA sense strand
gaaaguucacacacaggua

SEQ ID NO: 1814243 - RNA, 19 nt, Homo sapiens
  misc_RNA (1)...(19): siRNA sense strand
ggaaauucuuuagccgaaa

SEQ ID NO: 1814244 - RNA, 19 nt, Homo sapiens
  misc_RNA (1)...(19): siRNA sense strand
gggaaggccuuuagucacu

SEQ ID NO: 1814245 - RNA, 19 nt, Homo sapiens
  misc_RNA (1)...(19): siRNA sense strand
gaggaagcaccagaaauuu

SEQ ID NO: 1814246 - RNA, 19 nt, Homo sapiens
  misc_RNA (1)...(19): siRNA sense strand
gaaaucaauccuugguaau

SEQ ID NO: 1814247 - RNA, 19 nt, Homo sapiens
  misc_RNA (1)...(19): siRNA sense strand
ggaagcccuuuagauggua

SEQ ID NO: 1814248 - RNA, 19 nt, Homo sapiens
  misc_RNA (1)...(19): siRNA sense strand
ggaaauaccccaugugugu

SEQ ID NO: 1814249 - RNA, 19 nt, Homo sapiens
  misc_RNA (1)...(19): siRNA sense strand
gggcaaaggccuuaugagu

SEQ ID NO: 1814250 - RNA, 19 nt, Homo sapiens
  misc_RNA (1)...(19): siRNA sense strand
gcagaagccauauuccaau

SEQ ID NO: 1814251 - RNA, 19 nt, Homo sapiens
  misc_RNA (1)...(19): siRNA sense strand
aaagaaaggccuuaugagu

SEQ ID NO: 1814252 - RNA, 19 nt, Homo sapiens
  misc_RNA (1)...(19): siRNA sense strand
cagcuccacucucauugaa

SEQ ID NO: 1814253 - RNA, 19 nt, Homo sapiens
  misc_RNA (1)...(19): siRNA sense strand
gacagggacgcacuuauga

SEQ ID NO: 1814254 - RNA, 19 nt, Homo sapiens
  misc_RNA (1)...(19): siRNA sense strand
gaaauucuuuagccgaaaa

SEQ ID NO: 1814255 - RNA, 19 nt, Homo sapiens
  misc_RNA (1)...(19): siRNA sense strand
gcuccacucucauugaaca

SEQ ID NO: 1814256 - RNA, 19 nt, Homo sapiens
  misc_RNA (1)...(19): siRNA sense strand
ccaaagcucccaucuccuu

SEQ ID NO: 1814257 - RNA, 19 nt, Homo sapiens
  misc_RNA (1)...(19): siRNA sense strand
ggugaaagaccuuaugagu

SEQ ID NO: 1814258 - RNA, 19 nt, Homo sapiens
  misc_RNA (1)...(19): siRNA sense strand
gagaaaucaauccuuggua

SEQ ID NO: 1814259 - RNA, 19 nt, Homo sapiens
  misc_RNA (1)...(19): siRNA sense strand
caaccacaaacucacauuu

SEQ ID NO: 1814260 - RNA, 19 nt, Homo sapiens
  misc_RNA (1)...(19): siRNA sense strand
gaaugugggagagccuuua

SEQ ID NO: 1814261 - RNA, 19 nt, Homo sapiens
  misc_RNA (1)...(19): siRNA sense strand
caaaagaaaggccuuauga

SEQ ID NO: 1814262 - RNA, 19 nt, Homo sapiens
  misc_RNA (1)...(19): siRNA sense strand
ucacagcuccacucucauu

SEQ ID NO: 1814263 - RNA, 19 nt, Homo sapiens
  misc_RNA (1)...(19): siRNA sense strand
cccaacagguggaaauuuc

SEQ ID NO: 1814264 - RNA, 19 nt, Homo sapiens
  misc_RNA (1)...(19): siRNA sense strand
uggaagagcuuuuaacaau

SEQ ID NO: 1814265 - RNA, 19 nt, Homo sapiens
  misc_RNA (1)...(19): siRNA sense strand
gcacuuaugaagagcucua

SEQ ID NO: 1814266 - RNA, 19 nt, Homo sapiens
  misc_RNA (1)...(19): siRNA sense strand
ccuuauaaaugcagugaau

SEQ ID NO: 1814267 - RNA, 19 nt, Homo sapiens
  misc_RNA (1)...(19): siRNA sense strand
ggagaaaagccuuauaaau

SEQ ID NO: 1814268 - RNA, 19 nt, Homo sapiens
  misc_RNA (1)...(19): siRNA sense strand
gaaagaccguaugaaugca

SEQ ID NO: 1814269 - RNA, 19 nt, Homo sapiens
  misc_RNA (1)...(19): siRNA sense strand
gaaaguucacacuggagaa

SEQ ID NO: 1814270 - RNA, 19 nt, Homo sapiens
  misc_RNA (1)...(19): siRNA sense strand
gaaaguucacaccagagaa

SEQ ID NO: 1814271 - RNA, 19 nt, Homo sapiens
  misc_RNA (1)...(19): siRNA sense strand
gugguaaagccuucaguaa

SEQ ID NO: 1814272 - RNA, 19 nt, Homo sapiens
  misc_RNA (1)...(19): siRNA sense strand
gaaaguucacacuggagaa

SEQ ID NO: 1814273 - RNA, 19 nt, Homo sapiens
  misc_RNA (1)...(19): siRNA sense strand
ccaaagcuccaauuuccuu

SEQ ID NO: 1814274 - RNA, 19 nt, Homo sapiens
  misc_RNA (1)...(19): siRNA sense strand
gaaggccuuuagucacuca

SEQ ID NO: 1814275 - RNA, 19 nt, Homo sapiens
  misc_RNA (1)...(19): siRNA sense strand
cacaagaaaggcccuauga

SEQ ID NO: 1814276 - RNA, 19 nt, Homo sapiens
  misc_RNA (1)...(19): siRNA sense strand
gggacgcacuuaugaagag

SEQ ID NO: 1814277 - RNA, 19 nt, Homo sapiens
  misc_RNA (1)...(19): siRNA sense strand
cagaagccauauuccaauc

SEQ ID NO: 1814278 - RNA, 19 nt, Homo sapiens
  misc_RNA (1)...(19): siRNA sense strand
gcucagcaccagaaaguuc

SEQ ID NO: 1814279 - RNA, 19 nt, Homo sapiens
  misc_RNA (1)...(19): siRNA sense strand
gaagcucugcucucauuca

SEQ ID NO: 1814280 - RNA, 19 nt, Homo sapiens
  misc_RNA (1)...(19): siRNA sense strand
aaaguucacacacagguaa

SEQ ID NO: 1814281 - RNA, 19 nt, Homo sapiens
  misc_RNA (1)...(19): siRNA sense strand
ccaauuuccuucggcauca

SEQ ID NO: 1814282 - RNA, 19 nt, Homo sapiens
  misc_RNA (1)...(19): siRNA sense strand
ggagaaaucaauccuuggu

SEQ ID NO: 1814283 - RNA, 19 nt, Homo sapiens
  misc_RNA (1)...(19): siRNA sense strand
cugaagagauaccauuuac

SEQ ID NO: 1814284 - RNA, 19 nt, Homo sapiens
  misc_RNA (1)...(19): siRNA sense strand
aaaguucacaccagagaaa

SEQ ID NO: 1814285 - RNA, 19 nt, Homo sapiens
  misc_RNA (1)...(19): siRNA sense strand
aauccagccuuauuuguca

SEQ ID NO: 1814286 - RNA, 19 nt, Homo sapiens
  misc_RNA (1)...(19): siRNA sense strand
gaaaguucacaccggagaa

SEQ ID NO: 1814287 - RNA, 19 nt, Homo sapiens
  misc_RNA (1)...(19): siRNA sense strand
ggaaagccuucaguaacag

SEQ ID NO: 1814288 - RNA, 19 nt, Homo sapiens
  misc_RNA (1)...(19): siRNA sense strand
gugggaaagccuucaguaa

SEQ ID NO: 1814289 - RNA, 19 nt, Homo sapiens
  misc_RNA (1)...(19): siRNA sense strand
aaacucacauuuguucauc

SEQ ID NO: 1814290 - RNA, 19 nt, Homo sapiens
  misc_RNA (1)...(19): siRNA sense strand
ggcagaagccauauuccaa

SEQ ID NO: 1814291 - RNA, 19 nt, Homo sapiens
  misc_RNA (1)...(19): siRNA sense strand
gcagugaaugugggaaauu

SEQ ID NO: 1814292 - RNA, 19 nt, Homo sapiens
  misc_RNA (1)...(19): siRNA sense strand
ucauuaagcaucagaaagu

SEQ ID NO: 1814293 - RNA, 19 nt, Homo sapiens
  misc_RNA (1)...(19): siRNA sense strand
agaaagaccguaugaaugc

SEQ ID NO: 1814294 - RNA, 19 nt, Homo sapiens
  misc_RNA (1)...(19): siRNA sense strand
ggaaaaccuucaaccacaa

SEQ ID NO: 1814295 - RNA, 19 nt, Homo sapiens
  misc_RNA (1)...(19): siRNA sense strand
cauuaagcaucagaaaguu

SEQ ID NO: 1814296 - RNA, 19 nt, Homo sapiens
  misc_RNA (1)...(19): siRNA sense strand
uaacaauaacuccaaccuu

SEQ ID NO: 1814297 - RNA, 19 nt, Homo sapiens
  misc_RNA (1)...(19): siRNA sense strand
gaaagaucuacacuuguuc

SEQ ID NO: 1814298 - RNA, 19 nt, Homo sapiens
  misc_RNA (1)...(19): siRNA sense strand
caucagaaaguucauacug

SEQ ID NO: 1814299 - RNA, 19 nt, Homo sapiens
  misc_RNA (1)...(19): siRNA sense strand
caaaacuccauucucauua

SEQ ID NO: 1814300 - RNA, 19 nt, Homo sapiens
  misc_RNA (1)...(19): siRNA sense strand
ucugaagagauaccauuua

SEQ ID NO: 1814301 - RNA, 19 nt, Homo sapiens
  misc_RNA (1)...(19): siRNA sense strand
gggagagacuuuugguuga

SEQ ID NO: 1814302 - RNA, 19 nt, Homo sapiens
  misc_RNA (1)...(19): siRNA sense strand
acagugggcagaagccaua

SEQ ID NO: 1814303 - RNA, 19 nt, Homo sapiens
  misc_RNA (1)...(19): siRNA sense strand
gaggagaaacccuacacau

SEQ ID NO: 1814304 - RNA, 19 nt, Homo sapiens
  misc_RNA (1)...(19): siRNA sense strand
gaaagccuucaguaacaga

SEQ ID NO: 1814305 - RNA, 19 nt, Homo sapiens
  misc_RNA (1)...(19): siRNA sense strand
auucagcacuggagaguuc

SEQ ID NO: 1814306 - RNA, 19 nt, Homo sapiens
  misc_RNA (1)...(19): siRNA sense strand
gagaagcccuuuacgugua

SEQ ID NO: 1814307 - RNA, 19 nt, Homo sapiens
  misc_RNA (1)...(19): siRNA sense strand
gagaaaggccuuaugaaug

SEQ ID NO: 1814308 - RNA, 19 nt, Homo sapiens
  misc_RNA (1)...(19): siRNA sense strand
ccagaaguguuacaguaua

SEQ ID NO: 1814309 - RNA, 19 nt, Homo sapiens
  misc_RNA (1)...(19): siRNA sense strand
caaauacacccucauuaaa

SEQ ID NO: 1814310 - RNA, 19 nt, Homo sapiens
  misc_RNA (1)...(19): siRNA sense strand
ggagaaaggccuuaugaau

SEQ ID NO: 1814311 - RNA, 19 nt, Homo sapiens
  misc_RNA (1)...(19): siRNA sense strand
gagcaaggccuuauaagug

SEQ ID NO: 1814312 - RNA, 19 nt, Homo sapiens
  misc_RNA (1)...(19): siRNA sense strand
gaacaaaugcauuacaagu

SEQ ID NO: 1814313 - RNA, 19 nt, Homo sapiens
  misc_RNA (1)...(19): siRNA sense strand
gggaaauucuuuagucgaa

SEQ ID NO: 1814314 - RNA, 19 nt, Homo sapiens
  misc_RNA (1)...(19): siRNA sense strand
gggaaggccuacagcuuaa

SEQ ID NO: 1814315 - RNA, 19 nt, Homo sapiens
  misc_RNA (1)...(19): siRNA sense strand
uaccagaaguguuacagua

SEQ ID NO: 1814316 - RNA, 19 nt, Homo sapiens
  misc_RNA (1)...(19): siRNA sense strand
acaaauacacccucauuaa

SEQ ID NO: 1814317 - RNA, 19 nt, Homo sapiens
  misc_RNA (1)...(19): siRNA sense strand
agacacaaaucuacacuug

SEQ ID NO: 1814318 - RNA, 19 nt, Homo sapiens
  misc_RNA (1)...(19): siRNA sense strand
gagaaaugccuuauaagug

SEQ ID NO: 1814319 - RNA, 19 nt, Homo sapiens
  misc_RNA (1)...(19): siRNA sense strand
ggagaaaugccuuauaagu

SEQ ID NO: 1814320 - RNA, 19 nt, Homo sapiens
  misc_RNA (1)...(19): siRNA sense strand
cuggagaaaugccuuauaa

SEQ ID NO: 1814321 - RNA, 19 nt, Homo sapiens
  misc_RNA (1)...(19): siRNA sense strand
ggagaaaggccauaugagu

SEQ ID NO: 1814322 - RNA, 19 nt, Homo sapiens
  misc_RNA (1)...(19): siRNA sense strand
gcaaugaaugugggaaaua

SEQ ID NO: 1814323 - RNA, 19 nt, Homo sapiens
  misc_RNA (1)...(19): siRNA sense strand
ccagagaguucacaaugga

SEQ ID NO: 1814324 - RNA, 19 nt, Homo sapiens
  misc_RNA (1)...(19): siRNA sense strand
caaugaaugugggaaauau

SEQ ID NO: 1814325 - RNA, 19 nt, Homo sapiens
  misc_RNA (1)...(19): siRNA sense strand
gugaacaaaugcauuacaa

SEQ ID NO: 1814326 - RNA, 19 nt, Homo sapiens
  misc_RNA (1)...(19): siRNA sense strand
gaaauucuuuagucgaagu

SEQ ID NO: 1814327 - RNA, 19 nt, Homo sapiens
  misc_RNA (1)...(19): siRNA sense strand
agaaaggccuuaugaaugc

SEQ ID NO: 1814328 - RNA, 19 nt, Homo sapiens
  misc_RNA (1)...(19): siRNA sense strand
gaauucacacugagucaaa

SEQ ID NO: 1814329 - RNA, 19 nt, Homo sapiens
  misc_RNA (1)...(19): siRNA sense strand
ccacaaauacacccucauu

SEQ ID NO: 1814330 - RNA, 19 nt, Homo sapiens
  misc_RNA (1)...(19): siRNA sense strand
ggagagaagccuuaugagu

SEQ ID NO: 1814331 - RNA, 19 nt, Homo sapiens
  misc_RNA (1)...(19): siRNA sense strand
ucgaaguucugacuauauu

SEQ ID NO: 1814332 - RNA, 19 nt, Homo sapiens
  misc_RNA (1)...(19): siRNA sense strand
agccaucacuccaaucuaa

SEQ ID NO: 1814333 - RNA, 19 nt, Homo sapiens
  misc_RNA (1)...(19): siRNA sense strand
ccuuauaagugcagugauu

SEQ ID NO: 1814334 - RNA, 19 nt, Homo sapiens
  misc_RNA (1)...(19): siRNA sense strand
ggaaauccuuuggccacaa

SEQ ID NO: 1814335 - RNA, 19 nt, Homo sapiens
  misc_RNA (1)...(19): siRNA sense strand
caguauagagcaacccuua

SEQ ID NO: 1814336 - RNA, 19 nt, Homo sapiens
  misc_RNA (1)...(19): siRNA sense strand
ggagcaaggccuuauaagu

SEQ ID NO: 1814337 - RNA, 19 nt, Homo sapiens
  misc_RNA (1)...(19): siRNA sense strand
ccgcaaagcuacacuuguc

SEQ ID NO: 1814338 - RNA, 19 nt, Homo sapiens
  misc_RNA (1)...(19): siRNA sense strand
gugcagugauugugggaaa

SEQ ID NO: 1814339 - RNA, 19 nt, Homo sapiens
  misc_RNA (1)...(19): siRNA sense strand
guggagagaagccuuauga

SEQ ID NO: 1814340 - RNA, 19 nt, Homo sapiens
  misc_RNA (1)...(19): siRNA sense strand
ugggaaggccuacagcuua

SEQ ID NO: 1814341 - RNA, 19 nt, Homo sapiens
  misc_RNA (1)...(19): siRNA sense strand
cauuaaacaucagcgaauu

SEQ ID NO: 1814342 - RNA, 19 nt, Homo sapiens
  misc_RNA (1)...(19): siRNA sense strand
gaaugcagcgaauguggaa

SEQ ID NO: 1814343 - RNA, 19 nt, Homo sapiens
  misc_RNA (1)...(19): siRNA sense strand
gggagacaauucugguuca

SEQ ID NO: 1814344 - RNA, 19 nt, Homo sapiens
  misc_RNA (1)...(19): siRNA sense strand
ccauaugagugcagugaau

SEQ ID NO: 1814345 - RNA, 19 nt, Homo sapiens
  misc_RNA (1)...(19): siRNA sense strand
cacaaauacacccucauua

SEQ ID NO: 1814346 - RNA, 19 nt, Homo sapiens
  misc_RNA (1)...(19): siRNA sense strand
gaaaagacaaccuuacuca

SEQ ID NO: 1814347 - RNA, 19 nt, Homo sapiens
  misc_RNA (1)...(19): siRNA sense strand
ggaaauauuuuagccauca

SEQ ID NO: 1814348 - RNA, 19 nt, Homo sapiens
  misc_RNA (1)...(19): siRNA sense strand
ccuuauaagugcaaugaau

SEQ ID NO: 1814349 - RNA, 19 nt, Homo sapiens
  misc_RNA (1)...(19): siRNA sense strand
agugcaaccuucaucagua

SEQ ID NO: 1814350 - RNA, 19 nt, Homo sapiens
  misc_RNA (1)...(19): siRNA sense strand
uaucagaaccucccaccuu

SEQ ID NO: 1814351 - RNA, 19 nt, Homo sapiens
  misc_RNA (1)...(19): siRNA sense strand
cuacacuuguucagcauga

SEQ ID NO: 1814352 - RNA, 19 nt, Homo sapiens
  misc_RNA (1)...(19): siRNA sense strand
cagaaguguuacaguauag

SEQ ID NO: 1814353 - RNA, 19 nt, Homo sapiens
  misc_RNA (1)...(19): siRNA sense strand
aauacacccucauuaaaca

SEQ ID NO: 1814354 - RNA, 19 nt, Homo sapiens
  misc_RNA (1)...(19): siRNA sense strand
caucagagaauccauacug

SEQ ID NO: 1814355 - RNA, 19 nt, Homo sapiens
  misc_RNA (1)...(19): siRNA sense strand
cagcaucagagaauccaua

SEQ ID NO: 1814356 - RNA, 19 nt, Homo sapiens
  misc_RNA (1)...(19): siRNA sense strand
guaaaugugggaaagacuu

SEQ ID NO: 1814357 - RNA, 19 nt, Homo sapiens
  misc_RNA (1)...(19): siRNA sense strand
gaaccucauccgucagaga

SEQ ID NO: 1814358 - RNA, 19 nt, Homo sapiens
  misc_RNA (1)...(19): siRNA sense strand
aaaaggccauccacaguaa

SEQ ID NO: 1814359 - RNA, 19 nt, Homo sapiens
  misc_RNA (1)...(19): siRNA sense strand
aaacaucagcgaauucaca

SEQ ID NO: 1814360 - RNA, 19 nt, Homo sapiens
  misc_RNA (1)...(19): siRNA sense strand
caccagagaauucauagug

SEQ ID NO: 1814361 - RNA, 19 nt, Homo sapiens
  misc_RNA (1)...(19): siRNA sense strand
cauuacaagugcagugaau

SEQ ID NO: 1814362 - RNA, 19 nt, Homo sapiens
  misc_RNA (1)...(19): siRNA sense strand
caaaaggccauccacagua

SEQ ID NO: 1814363 - RNA, 19 nt, Homo sapiens
  misc_RNA (1)...(19): siRNA sense strand
caccagagaguucacaaug

SEQ ID NO: 1814364 - RNA, 19 nt, Homo sapiens
  misc_RNA (1)...(19): siRNA sense strand
cagcaccagagaauucaua

SEQ ID NO: 1814365 - RNA, 19 nt, Homo sapiens
  misc_RNA (1)...(19): siRNA sense strand
cugcacaguuagcaaagaa

SEQ ID NO: 1814366 - RNA, 19 nt, Homo sapiens
  misc_RNA (1)...(19): siRNA sense strand
gaaaggccuuaugaaugca

SEQ ID NO: 1814367 - RNA, 19 nt, Homo sapiens
  misc_RNA (1)...(19): siRNA sense strand
guauagagcaacccuuaag

SEQ ID NO: 1814368 - RNA, 19 nt, Homo sapiens
  misc_RNA (1)...(19): siRNA sense strand
gugaaugugggaaagcuuu

SEQ ID NO: 1814369 - RNA, 19 nt, Homo sapiens
  misc_RNA (1)...(19): siRNA sense strand
gcaguaaaugugggaaaga

SEQ ID NO: 1814370 - RNA, 19 nt, Homo sapiens
  misc_RNA (1)...(19): siRNA sense strand
uuacucagcacaagagaau

SEQ ID NO: 1814371 - RNA, 19 nt, Homo sapiens
  misc_RNA (1)...(19): siRNA sense strand
cagaaccucccaccuuguu

SEQ ID NO: 1814372 - RNA, 19 nt, Homo sapiens
  misc_RNA (1)...(19): siRNA sense strand
gaaguucugacuauauugc

SEQ ID NO: 1814373 - RNA, 19 nt, Homo sapiens
  misc_RNA (1)...(19): siRNA sense strand
gugcaaccuucaucaguac

SEQ ID NO: 1814374 - RNA, 19 nt, Homo sapiens
  misc_RNA (1)...(19): siRNA sense strand
aaauacacccucauuaaac

SEQ ID NO: 1814375 - RNA, 19 nt, Homo sapiens
  misc_RNA (1)...(19): siRNA sense strand
ccuuaugauugcagugauu

SEQ ID NO: 1814376 - RNA, 19 nt, Homo sapiens
  misc_RNA (1)...(19): siRNA sense strand
acacacaggagcacugaga

SEQ ID NO: 1814377 - RNA, 19 nt, Homo sapiens
  misc_RNA (1)...(19): siRNA sense strand
caauucugguucagugcaa

SEQ ID NO: 1814378 - RNA, 19 nt, Homo sapiens
  misc_RNA (1)...(19): siRNA sense strand
cuacacuuguccagcauca

SEQ ID NO: 1814379 - RNA, 19 nt, Homo sapiens
  misc_RNA (1)...(19): siRNA sense strand
ccucaauugugaagaacug

SEQ ID NO: 1814380 - RNA, 19 nt, Homo sapiens
  misc_RNA (1)...(19): siRNA sense strand
gugcagcgaaugugggaaa

SEQ ID NO: 1814381 - RNA, 19 nt, Homo sapiens
  misc_RNA (1)...(19): siRNA sense strand
uugcagugauugugggaaa

SEQ ID NO: 1814382 - RNA, 19 nt, Homo sapiens
  misc_RNA (1)...(19): siRNA sense strand
caaccuuacucagcacaag

SEQ ID NO: 1814383 - RNA, 19 nt, Homo sapiens
  misc_RNA (1)...(19): siRNA sense strand
gaaagccuucagccgcaaa

SEQ ID NO: 1814384 - RNA, 19 nt, Homo sapiens
  misc_RNA (1)...(19): siRNA sense strand
ccaucacuccaaucuaauu

SEQ ID NO: 1814385 - RNA, 19 nt, Homo sapiens
  misc_RNA (1)...(19): siRNA sense strand
gaauucauaguggagagaa

SEQ ID NO: 1814386 - RNA, 19 nt, Homo sapiens
  misc_RNA (1)...(19): siRNA sense strand
ucaaucggcaccagaaagu

SEQ ID NO: 1814387 - RNA, 19 nt, Homo sapiens
  misc_RNA (1)...(19): siRNA sense strand
aucaguaccagaaguguua

SEQ ID NO: 1814388 - RNA, 19 nt, Homo sapiens
  misc_RNA (1)...(19): siRNA sense strand
aaacuuccaggcuacuuug

SEQ ID NO: 1814389 - RNA, 19 nt, Homo sapiens
  misc_RNA (1)...(19): siRNA sense strand
gcaugagaguauucacacu

SEQ ID NO: 1814390 - RNA, 19 nt, Homo sapiens
  misc_RNA (1)...(19): siRNA sense strand
uuacaagugcagugaaugu

SEQ ID NO: 1814391 - RNA, 19 nt, Homo sapiens
  misc_RNA (1)...(19): siRNA sense strand
gaaguguuacaguauagag

SEQ ID NO: 1814392 - RNA, 19 nt, Homo sapiens
  misc_RNA (1)...(19): siRNA sense strand
acacuggagaaaugccuua

SEQ ID NO: 1814393 - RNA, 19 nt, Homo sapiens
  misc_RNA (1)...(19): siRNA sense strand
auagagcaacccuuaagaa

SEQ ID NO: 1814394 - RNA, 19 nt, Homo sapiens
  misc_RNA (1)...(19): siRNA sense strand
acacuuguccagcaucaga

SEQ ID NO: 1814395 - RNA, 19 nt, Homo sapiens
  misc_RNA (1)...(19): siRNA sense strand
guccagcaccagagaauuc

SEQ ID NO: 1814396 - RNA, 19 nt, Homo sapiens
  misc_RNA (1)...(19): siRNA sense strand
ccaccuuguucgacaccaa

SEQ ID NO: 1814397 - RNA, 19 nt, Homo sapiens
  misc_RNA (1)...(19): siRNA sense strand
uaagaagggauaaaaguga

SEQ ID NO: 1814398 - RNA, 19 nt, Homo sapiens
  misc_RNA (1)...(19): siRNA sense strand
aggccucaauugugaagaa

SEQ ID NO: 1814399 - RNA, 19 nt, Homo sapiens
  misc_RNA (1)...(19): siRNA sense strand
cuggagaaaggccuuauga

SEQ ID NO: 1814400 - RNA, 19 nt, Homo sapiens
  misc_RNA (1)...(19): siRNA sense strand
ggccauaugagugcaguga

SEQ ID NO: 1814401 - RNA, 19 nt, Homo sapiens
  misc_RNA (1)...(19): siRNA sense strand
cuggagaaaggccauauga

SEQ ID NO: 1814402 - RNA, 19 nt, Homo sapiens
  misc_RNA (1)...(19): siRNA sense strand
guucgacaccaaagaguuc

SEQ ID NO: 1814403 - RNA, 19 nt, Homo sapiens
  misc_RNA (1)...(19): siRNA sense strand
ggagacaauucugguucag

SEQ ID NO: 1814404 - RNA, 19 nt, Homo sapiens
  misc_RNA (1)...(19): siRNA sense strand
uauagagcaacccuuaaga

SEQ ID NO: 1814405 - RNA, 19 nt, Homo sapiens
  misc_RNA (1)...(19): siRNA sense strand
uagagcaacccuuaagaag

SEQ ID NO: 1814406 - RNA, 19 nt, Homo sapiens
  misc_RNA (1)...(19): siRNA sense strand
gaaagagaguccagaagua

SEQ ID NO: 1814407 - RNA, 19 nt, Homo sapiens
  misc_RNA (1)...(19): siRNA sense strand
caggugaaauugccaaaua

SEQ ID NO: 1814408 - RNA, 19 nt, Homo sapiens
  misc_RNA (1)...(19): siRNA sense strand
caaggaaccugguguugaa

SEQ ID NO: 1814409 - RNA, 19 nt, Homo sapiens
  misc_RNA (1)...(19): siRNA sense strand
gaaaguaggauuacccauu

SEQ ID NO: 1814410 - RNA, 19 nt, Homo sapiens
  misc_RNA (1)...(19): siRNA sense strand
ggaauggaaaguaggauua

SEQ ID NO: 1814411 - RNA, 19 nt, Homo sapiens
  misc_RNA (1)...(19): siRNA sense strand
aaacaaaccaggugaaauu

SEQ ID NO: 1814412 - RNA, 19 nt, Homo sapiens
  misc_RNA (1)...(19): siRNA sense strand
caaaucuucuucugaacua

SEQ ID NO: 1814413 - RNA, 19 nt, Homo sapiens
  misc_RNA (1)...(19): siRNA sense strand
gaaagaaauugaagaaagc

SEQ ID NO: 1814414 - RNA, 19 nt, Homo sapiens
  misc_RNA (1)...(19): siRNA sense strand
ccaaauacauggaaacagu

SEQ ID NO: 1814415 - RNA, 19 nt, Homo sapiens
  misc_RNA (1)...(19): siRNA sense strand
caaagaagcgaaagaaaga

SEQ ID NO: 1814416 - RNA, 19 nt, Homo sapiens
  misc_RNA (1)...(19): siRNA sense strand
agaaggaguucauaaagaa

SEQ ID NO: 1814417 - RNA, 19 nt, Homo sapiens
  misc_RNA (1)...(19): siRNA sense strand
ccucaaaucuucuucugaa

SEQ ID NO: 1814418 - RNA, 19 nt, Homo sapiens
  misc_RNA (1)...(19): siRNA sense strand
gcagaacaauuugcaguug

SEQ ID NO: 1814419 - RNA, 19 nt, Homo sapiens
  misc_RNA (1)...(19): siRNA sense strand
cagaaggaguucauaaaga

SEQ ID NO: 1814420 - RNA, 19 nt, Homo sapiens
  misc_RNA (1)...(19): siRNA sense strand
aaaguaggauuacccauug

SEQ ID NO: 1814421 - RNA, 19 nt, Homo sapiens
  misc_RNA (1)...(19): siRNA sense strand
uaaggaugauggcaaauug

SEQ ID NO: 1814422 - RNA, 19 nt, Homo sapiens
  misc_RNA (1)...(19): siRNA sense strand
gaggauaauuugaaagauc

SEQ ID NO: 1814423 - RNA, 19 nt, Homo sapiens
  misc_RNA (1)...(19): siRNA sense strand
caaggaggcuuuggcugua

SEQ ID NO: 1814424 - RNA, 19 nt, Homo sapiens
  misc_RNA (1)...(19): siRNA sense strand
ggaaacagugaaauuacua

SEQ ID NO: 1814425 - RNA, 19 nt, Homo sapiens
  misc_RNA (1)...(19): siRNA sense strand
gaauggagguuugaaagca

SEQ ID NO: 1814426 - RNA, 19 nt, Homo sapiens
  misc_RNA (1)...(19): siRNA sense strand
gcaguuggagagauaauaa

SEQ ID NO: 1814427 - RNA, 19 nt, Homo sapiens
  misc_RNA (1)...(19): siRNA sense strand
ggagugaccuucagaaaau

SEQ ID NO: 1814428 - RNA, 19 nt, Homo sapiens
  misc_RNA (1)...(19): siRNA sense strand
cagagcaaauucagaaaug

SEQ ID NO: 1814429 - RNA, 19 nt, Homo sapiens
  misc_RNA (1)...(19): siRNA sense strand
uaacaaagaagcgaaagaa

SEQ ID NO: 1814430 - RNA, 19 nt, Homo sapiens
  misc_RNA (1)...(19): siRNA sense strand
gcaaggaaccugguguuga

SEQ ID NO: 1814431 - RNA, 19 nt, Homo sapiens
  misc_RNA (1)...(19): siRNA sense strand
cauggaaacagugaaauua

SEQ ID NO: 1814432 - RNA, 19 nt, Homo sapiens
  misc_RNA (1)...(19): siRNA sense strand
ugaugcaccuuguguugua

SEQ ID NO: 1814433 - RNA, 19 nt, Homo sapiens
  misc_RNA (1)...(19): siRNA sense strand
gaagcgaaagaaagaaauu

SEQ ID NO: 1814434 - RNA, 19 nt, Homo sapiens
  misc_RNA (1)...(19): siRNA sense strand
uuacuagacuacacugaaa

SEQ ID NO: 1814435 - RNA, 19 nt, Homo sapiens
  misc_RNA (1)...(19): siRNA sense strand
gcuuaagaauucuggauau

SEQ ID NO: 1814436 - RNA, 19 nt, Homo sapiens
  misc_RNA (1)...(19): siRNA sense strand
auucagaaauggauucgua

SEQ ID NO: 1814437 - RNA, 19 nt, Homo sapiens
  misc_RNA (1)...(19): siRNA sense strand
auacagacccguucaagaa

SEQ ID NO: 1814438 - RNA, 19 nt, Homo sapiens
  misc_RNA (1)...(19): siRNA sense strand
gauacggaauggucaaaca

SEQ ID NO: 1814439 - RNA, 19 nt, Homo sapiens
  misc_RNA (1)...(19): siRNA sense strand
ggagagauaauaacugaca

SEQ ID NO: 1814440 - RNA, 19 nt, Homo sapiens
  misc_RNA (1)...(19): siRNA sense strand
caaauuggaccucaguguu

SEQ ID NO: 1814441 - RNA, 19 nt, Homo sapiens
  misc_RNA (1)...(19): siRNA sense strand
ggagaauggagguuugaaa

SEQ ID NO: 1814442 - RNA, 19 nt, Homo sapiens
  misc_RNA (1)...(19): siRNA sense strand
agagacaucuugcagaaca

SEQ ID NO: 1814443 - RNA, 19 nt, Homo sapiens
  misc_RNA (1)...(19): siRNA sense strand
ggucuggucuacaugacaa

SEQ ID NO: 1814444 - RNA, 19 nt, Homo sapiens
  misc_RNA (1)...(19): siRNA sense strand
aaagagaguccagaaguaa

SEQ ID NO: 1814445 - RNA, 19 nt, Homo sapiens
  misc_RNA (1)...(19): siRNA sense strand
gaaccugguguugaagaua

SEQ ID NO: 1814446 - RNA, 19 nt, Homo sapiens
  misc_RNA (1)...(19): siRNA sense strand
gggaggauaauuugaaaga

SEQ ID NO: 1814447 - RNA, 19 nt, Homo sapiens
  misc_RNA (1)...(19): siRNA sense strand
cgauggcacuauugaauuc

SEQ ID NO: 1814448 - RNA, 19 nt, Homo sapiens
  misc_RNA (1)...(19): siRNA sense strand
uuggagagauaauaacuga

SEQ ID NO: 1814449 - RNA, 19 nt, Homo sapiens
  misc_RNA (1)...(19): siRNA sense strand
guaaggaugauggcaaauu

SEQ ID NO: 1814450 - RNA, 19 nt, Homo sapiens
  misc_RNA (1)...(19): siRNA sense strand
uagauuauggccuugcuua

SEQ ID NO: 1814451 - RNA, 19 nt, Homo sapiens
  misc_RNA (1)...(19): siRNA sense strand
uaucaaggccucaaaucuu

SEQ ID NO: 1814452 - RNA, 19 nt, Homo sapiens
  misc_RNA (1)...(19): siRNA sense strand
ugaaauugccaaauacaug

SEQ ID NO: 1814453 - RNA, 19 nt, Homo sapiens
  misc_RNA (1)...(19): siRNA sense strand
gcaaauuggaccucagugu

SEQ ID NO: 1814454 - RNA, 19 nt, Homo sapiens
  misc_RNA (1)...(19): siRNA sense strand
caaagaagaccccaaaaga

SEQ ID NO: 1814455 - RNA, 19 nt, Homo sapiens
  misc_RNA (1)...(19): siRNA sense strand
ggaaccugguguugaagau

SEQ ID NO: 1814456 - RNA, 19 nt, Homo sapiens
  misc_RNA (1)...(19): siRNA sense strand
gagaauggagguuugaaag

SEQ ID NO: 1814457 - RNA, 19 nt, Homo sapiens
  misc_RNA (1)...(19): siRNA sense strand
ggucaaacacacagacaga

SEQ ID NO: 1814458 - RNA, 19 nt, Homo sapiens
  misc_RNA (1)...(19): siRNA sense strand
ggaacccagugacaaugga

SEQ ID NO: 1814459 - RNA, 19 nt, Homo sapiens
  misc_RNA (1)...(19): siRNA sense strand
gaagauacggaauggucaa

SEQ ID NO: 1814460 - RNA, 19 nt, Homo sapiens
  misc_RNA (1)...(19): siRNA sense strand
gcgaaagaaagaaauugaa

SEQ ID NO: 1814461 - RNA, 19 nt, Homo sapiens
  misc_RNA (1)...(19): siRNA sense strand
gaaauuacuagacuacacu

SEQ ID NO: 1814462 - RNA, 19 nt, Homo sapiens
  misc_RNA (1)...(19): siRNA sense strand
ggaggauaauuugaaagau

SEQ ID NO: 1814463 - RNA, 19 nt, Homo sapiens
  misc_RNA (1)...(19): siRNA sense strand
gagcaaauucagaaaugga

SEQ ID NO: 1814464 - RNA, 19 nt, Homo sapiens
  misc_RNA (1)...(19): siRNA sense strand
ggcuuuggcuguauauauc

SEQ ID NO: 1814465 - RNA, 19 nt, Homo sapiens
  misc_RNA (1)...(19): siRNA sense strand
guacugcccagaaggaguu

SEQ ID NO: 1814466 - RNA, 19 nt, Homo sapiens
  misc_RNA (1)...(19): siRNA sense strand
gcaaauucagaaauggauu

SEQ ID NO: 1814467 - RNA, 19 nt, Homo sapiens
  misc_RNA (1)...(19): siRNA sense strand
ccagaaagagaguccagaa

SEQ ID NO: 1814468 - RNA, 19 nt, Homo sapiens
  misc_RNA (1)...(19): siRNA sense strand
aaguaaggaugauggcaaa

SEQ ID NO: 1814469 - RNA, 19 nt, Homo sapiens
  misc_RNA (1)...(19): siRNA sense strand
uugcugauaugaauucuuc

SEQ ID NO: 1814470 - RNA, 19 nt, Homo sapiens
  misc_RNA (1)...(19): siRNA sense strand
auacuugguuauugcauga

SEQ ID NO: 1814471 - RNA, 19 nt, Homo sapiens
  misc_RNA (1)...(19): siRNA sense strand
guaccuggguguuccuaag

SEQ ID NO: 1814472 - RNA, 19 nt, Homo sapiens
  misc_RNA (1)...(19): siRNA sense strand
gcagugaugcaccuugugu

SEQ ID NO: 1814473 - RNA, 19 nt, Homo sapiens
  misc_RNA (1)...(19): siRNA sense strand
acaaagaagcgaaagaaag

SEQ ID NO: 1814474 - RNA, 19 nt, Homo sapiens
  misc_RNA (1)...(19): siRNA sense strand
gaaggaguucauaaagaau

SEQ ID NO: 1814475 - RNA, 19 nt, Homo sapiens
  misc_RNA (1)...(19): siRNA sense strand
gcccagaaggaguucauaa

SEQ ID NO: 1814476 - RNA, 19 nt, Homo sapiens
  misc_RNA (1)...(19): siRNA sense strand
agguguacuugguagauua

SEQ ID NO: 1814477 - RNA, 19 nt, Homo sapiens
  misc_RNA (1)...(19): siRNA sense strand
cagagucaguuggcaguga

SEQ ID NO: 1814478 - RNA, 19 nt, Homo sapiens
  misc_RNA (1)...(19): siRNA sense strand
gaaacagugaaauuacuag

SEQ ID NO: 1814479 - RNA, 19 nt, Homo sapiens
  misc_RNA (1)...(19): siRNA sense strand
ccagaaggaguucauaaag

SEQ ID NO: 1814480 - RNA, 19 nt, Homo sapiens
  misc_RNA (1)...(19): siRNA sense strand
gaugcaccuuguguuguaa

SEQ ID NO: 1814481 - RNA, 19 nt, Homo sapiens
  misc_RNA (1)...(19): siRNA sense strand
guaugugcauggagauauc

SEQ ID NO: 1814482 - RNA, 19 nt, Homo sapiens
  misc_RNA (1)...(19): siRNA sense strand
aaaacugucuugcagcuaa

SEQ ID NO: 1814483 - RNA, 19 nt, Homo sapiens
  misc_RNA (1)...(19): siRNA sense strand
agaaagagaguccagaagu

SEQ ID NO: 1814484 - RNA, 19 nt, Homo sapiens
  misc_RNA (1)...(19): siRNA sense strand
cgaaagaaagaaauugaag

SEQ ID NO: 1814485 - RNA, 19 nt, Homo sapiens
  misc_RNA (1)...(19): siRNA sense strand
caauaacaaagaagcgaaa

SEQ ID NO: 1814486 - RNA, 19 nt, Homo sapiens
  misc_RNA (1)...(19): siRNA sense strand
gauaucaaggccucaaauc

SEQ ID NO: 1814487 - RNA, 19 nt, Homo sapiens
  misc_RNA (1)...(19): siRNA sense strand
caaauucagaaauggauuc

SEQ ID NO: 1814488 - RNA, 19 nt, Homo sapiens
  misc_RNA (1)...(19): siRNA sense strand
aaauuggaccucaguguug

SEQ ID NO: 1814489 - RNA, 19 nt, Homo sapiens
  misc_RNA (1)...(19): siRNA sense strand
acagugaaauuacuagacu

SEQ ID NO: 1814490 - RNA, 19 nt, Homo sapiens
  misc_RNA (1)...(19): siRNA sense strand
agaacaauuugcaguugga

SEQ ID NO: 1814491 - RNA, 19 nt, Homo sapiens
  misc_RNA (1)...(19): siRNA sense strand
ugcaugauccaauggcuua

SEQ ID NO: 1814492 - RNA, 19 nt, Homo sapiens
  misc_RNA (1)...(19): siRNA sense strand
gauuauggccuugcuuauc

SEQ ID NO: 1814493 - RNA, 19 nt, Homo sapiens
  misc_RNA (1)...(19): siRNA sense strand
gagacaucuugcagaacaa

SEQ ID NO: 1814494 - RNA, 19 nt, Homo sapiens
  misc_RNA (1)...(19): siRNA sense strand
cagguguacuugguagauu

SEQ ID NO: 1814495 - RNA, 19 nt, Homo sapiens
  misc_RNA (1)...(19): siRNA sense strand
cagugaaauuacuagacua

SEQ ID NO: 1814496 - RNA, 19 nt, Homo sapiens
  misc_RNA (1)...(19): siRNA sense strand
gagagauaauaacugacau

SEQ ID NO: 1814497 - RNA, 19 nt, Homo sapiens
  misc_RNA (1)...(19): siRNA sense strand
ggacuaaaagcuauaggaa

SEQ ID NO: 1814498 - RNA, 19 nt, Homo sapiens
  misc_RNA (1)...(19): siRNA sense strand
ugaaauuacuagacuacac

SEQ ID NO: 1814499 - RNA, 19 nt, Homo sapiens
  misc_RNA (1)...(19): siRNA sense strand
gagauaucaaggccucaaa

SEQ ID NO: 1814500 - RNA, 19 nt, Homo sapiens
  misc_RNA (1)...(19): siRNA sense strand
aaccagagcaaauucagaa

SEQ ID NO: 1814501 - RNA, 19 nt, Homo sapiens
  misc_RNA (1)...(19): siRNA sense strand
agacagaggaggccauaca

SEQ ID NO: 1814502 - RNA, 19 nt, Homo sapiens
  misc_RNA (1)...(19): siRNA sense strand
ccagagcaaauucagaaau

SEQ ID NO: 1814503 - RNA, 19 nt, Homo sapiens
  misc_RNA (1)...(19): siRNA sense strand
ggccucaaaucuucuucug

SEQ ID NO: 1814504 - RNA, 19 nt, Homo sapiens
  misc_RNA (1)...(19): siRNA sense strand
cauacagacccguucaaga

SEQ ID NO: 1814505 - RNA, 19 nt, Homo sapiens
  misc_RNA (1)...(19): siRNA sense strand
uaauaacugacauggcaaa

SEQ ID NO: 1814506 - RNA, 19 nt, Homo sapiens
  misc_RNA (1)...(19): siRNA sense strand
gaacauagcagaauucaua

SEQ ID NO: 1814507 - RNA, 19 nt, Homo sapiens
  misc_RNA (1)...(19): siRNA sense strand
caaaggagguuguaaugga

SEQ ID NO: 1814508 - RNA, 19 nt, Homo sapiens
  misc_RNA (1)...(19): siRNA sense strand
guaauggacuuaaccaaug

SEQ ID NO: 1814509 - RNA, 19 nt, Homo sapiens
  misc_RNA (1)...(19): siRNA sense strand
aaagaggccuggaguauga

SEQ ID NO: 1814510 - RNA, 19 nt, Homo sapiens
  misc_RNA (1)...(19): siRNA sense strand
agagaaaccuuacaaaugu

SEQ ID NO: 1814511 - RNA, 19 nt, Homo sapiens
  misc_RNA (1)...(19): siRNA sense strand
agagaaaccuuacaaaugu

SEQ ID NO: 1814512 - RNA, 19 nt, Homo sapiens
  misc_RNA (1)...(19): siRNA sense strand
agagaaaccuuacaaaugu

SEQ ID NO: 1814513 - RNA, 19 nt, Homo sapiens
  misc_RNA (1)...(19): siRNA sense strand
agagaaaccuuacaaaugu

SEQ ID NO: 1814514 - RNA, 19 nt, Homo sapiens
  misc_RNA (1)...(19): siRNA sense strand
cuacaaaugugaagaaugu

SEQ ID NO: 1814515 - RNA, 19 nt, Homo sapiens
  misc_RNA (1)...(19): siRNA sense strand
gaagagaaaccuuacaaau

SEQ ID NO: 1814516 - RNA, 19 nt, Homo sapiens
  misc_RNA (1)...(19): siRNA sense strand
gagagaaaccuuacaaaug

SEQ ID NO: 1814517 - RNA, 19 nt, Homo sapiens
  misc_RNA (1)...(19): siRNA sense strand
gagagaaaccuuacaaaug

SEQ ID NO: 1814518 - RNA, 19 nt, Homo sapiens
  misc_RNA (1)...(19): siRNA sense strand
cuacaaaugugaagaaugu

SEQ ID NO: 1814519 - RNA, 19 nt, Homo sapiens
  misc_RNA (1)...(19): siRNA sense strand
gagagaaaccuuacaaaug

SEQ ID NO: 1814520 - RNA, 19 nt, Homo sapiens
  misc_RNA (1)...(19): siRNA sense strand
ccucaaaccuuauuaaaca

SEQ ID NO: 1814521 - RNA, 19 nt, Homo sapiens
  misc_RNA (1)...(19): siRNA sense strand
gagagaagccuuacaaauc

SEQ ID NO: 1814522 - RNA, 19 nt, Homo sapiens
  misc_RNA (1)...(19): siRNA sense strand
gcacagcggaauuuauaua

SEQ ID NO: 1814523 - RNA, 19 nt, Homo sapiens
  misc_RNA (1)...(19): siRNA sense strand
gagagaaacccuacaaaug

SEQ ID NO: 1814524 - RNA, 19 nt, Homo sapiens
  misc_RNA (1)...(19): siRNA sense strand
gagagaaacccuacaaaug

SEQ ID NO: 1814525 - RNA, 19 nt, Homo sapiens
  misc_RNA (1)...(19): siRNA sense strand
gagagaaacccuacaaaug

SEQ ID NO: 1814526 - RNA, 19 nt, Homo sapiens
  misc_RNA (1)...(19): siRNA sense strand
gagagaaacccuacaaaug

SEQ ID NO: 1814527 - RNA, 19 nt, Homo sapiens
  misc_RNA (1)...(19): siRNA sense strand
aaacagacaugagauaaga

SEQ ID NO: 1814528 - RNA, 19 nt, Homo sapiens
  misc_RNA (1)...(19): siRNA sense strand
ccucaaaccuuacuaaaca

SEQ ID NO: 1814529 - RNA, 19 nt, Homo sapiens
  misc_RNA (1)...(19): siRNA sense strand
aaucauuucucacaccuua

SEQ ID NO: 1814530 - RNA, 19 nt, Homo sapiens
  misc_RNA (1)...(19): siRNA sense strand
gagaaacccuacaaaugug

SEQ ID NO: 1814531 - RNA, 19 nt, Homo sapiens
  misc_RNA (1)...(19): siRNA sense strand
gagagaaacccuaugaaug

SEQ ID NO: 1814532 - RNA, 19 nt, Homo sapiens
  misc_RNA (1)...(19): siRNA sense strand
gagaaacccuacaaaugug

SEQ ID NO: 1814533 - RNA, 19 nt, Homo sapiens
  misc_RNA (1)...(19): siRNA sense strand
ggaaagaggccuggaguau

SEQ ID NO: 1814534 - RNA, 19 nt, Homo sapiens
  misc_RNA (1)...(19): siRNA sense strand
gagagaaaccauacaaaug

SEQ ID NO: 1814535 - RNA, 19 nt, Homo sapiens
  misc_RNA (1)...(19): siRNA sense strand
ccucaaaucuuacuagaca

SEQ ID NO: 1814536 - RNA, 19 nt, Homo sapiens
  misc_RNA (1)...(19): siRNA sense strand
ggacuuaaccaaugucuca

SEQ ID NO: 1814537 - RNA, 19 nt, Homo sapiens
  misc_RNA (1)...(19): siRNA sense strand
ggagagaaaccuuacaaau

SEQ ID NO: 1814538 - RNA, 19 nt, Homo sapiens
  misc_RNA (1)...(19): siRNA sense strand
ggagagaaaccauacaaau

SEQ ID NO: 1814539 - RNA, 19 nt, Homo sapiens
  misc_RNA (1)...(19): siRNA sense strand
ggagagaaaccuuacaaau

SEQ ID NO: 1814540 - RNA, 19 nt, Homo sapiens
  misc_RNA (1)...(19): siRNA sense strand
ggagagaaaccuuacaaau

SEQ ID NO: 1814541 - RNA, 19 nt, Homo sapiens
  misc_RNA (1)...(19): siRNA sense strand
gagagaaacccuacacaug

SEQ ID NO: 1814542 - RNA, 19 nt, Homo sapiens
  misc_RNA (1)...(19): siRNA sense strand
ugacaaagcuuuuaaaugg

SEQ ID NO: 1814543 - RNA, 19 nt, Homo sapiens
  misc_RNA (1)...(19): siRNA sense strand
gagaaacccuacacaugug

SEQ ID NO: 1814544 - RNA, 19 nt, Homo sapiens
  misc_RNA (1)...(19): siRNA sense strand
ccucaaaccuuacuacaca

SEQ ID NO: 1814545 - RNA, 19 nt, Homo sapiens
  misc_RNA (1)...(19): siRNA sense strand
aaauggcccucaacccuua

SEQ ID NO: 1814546 - RNA, 19 nt, Homo sapiens
  misc_RNA (1)...(19): siRNA sense strand
ggagagaaacccuacaaau

SEQ ID NO: 1814547 - RNA, 19 nt, Homo sapiens
  misc_RNA (1)...(19): siRNA sense strand
ggagagaaacccuaugaau

SEQ ID NO: 1814548 - RNA, 19 nt, Homo sapiens
  misc_RNA (1)...(19): siRNA sense strand
ggagagaagccuuacaaau

SEQ ID NO: 1814549 - RNA, 19 nt, Homo sapiens
  misc_RNA (1)...(19): siRNA sense strand
ggagagaaacccuacaaau

SEQ ID NO: 1814550 - RNA, 19 nt, Homo sapiens
  misc_RNA (1)...(19): siRNA sense strand
ggagagaaacccuacaaau

SEQ ID NO: 1814551 - RNA, 19 nt, Homo sapiens
  misc_RNA (1)...(19): siRNA sense strand
aagcaguccucaaaccuua

SEQ ID NO: 1814552 - RNA, 19 nt, Homo sapiens
  misc_RNA (1)...(19): siRNA sense strand
ggagagaaacccuacaaau

SEQ ID NO: 1814553 - RNA, 19 nt, Homo sapiens
  misc_RNA (1)...(19): siRNA sense strand
acaguuauguguucucauu

SEQ ID NO: 1814554 - RNA, 19 nt, Homo sapiens
  misc_RNA (1)...(19): siRNA sense strand
aaccaguccucaaaucuua

SEQ ID NO: 1814555 - RNA, 19 nt, Homo sapiens
  misc_RNA (1)...(19): siRNA sense strand
gagaagccuuacaaaucua

SEQ ID NO: 1814556 - RNA, 19 nt, Homo sapiens
  misc_RNA (1)...(19): siRNA sense strand
gaaacccuaugaaugugaa

SEQ ID NO: 1814557 - RNA, 19 nt, Homo sapiens
  misc_RNA (1)...(19): siRNA sense strand
ccucaacccuuacuaaaca

SEQ ID NO: 1814558 - RNA, 19 nt, Homo sapiens
  misc_RNA (1)...(19): siRNA sense strand
gagaaaccauacaaaugug

SEQ ID NO: 1814559 - RNA, 19 nt, Homo sapiens
  misc_RNA (1)...(19): siRNA sense strand
uaaagaaugugguaaagcu

SEQ ID NO: 1814560 - RNA, 19 nt, Homo sapiens
  misc_RNA (1)...(19): siRNA sense strand
gguccucaguccuuacuaa

SEQ ID NO: 1814561 - RNA, 19 nt, Homo sapiens
  misc_RNA (1)...(19): siRNA sense strand
uaaagaaugugguaaagcu

SEQ ID NO: 1814562 - RNA, 19 nt, Homo sapiens
  misc_RNA (1)...(19): siRNA sense strand
gaaagaggccuggaguaug

SEQ ID NO: 1814563 - RNA, 19 nt, Homo sapiens
  misc_RNA (1)...(19): siRNA sense strand
gccauagaauucucucuga

SEQ ID NO: 1814564 - RNA, 19 nt, Homo sapiens
  misc_RNA (1)...(19): siRNA sense strand
gauaauucauaccggagaa

SEQ ID NO: 1814565 - RNA, 19 nt, Homo sapiens
  misc_RNA (1)...(19): siRNA sense strand
gagaauucauacuggagaa

SEQ ID NO: 1814566 - RNA, 19 nt, Homo sapiens
  misc_RNA (1)...(19): siRNA sense strand
agagaaacccuaugaaugu

SEQ ID NO: 1814567 - RNA, 19 nt, Homo sapiens
  misc_RNA (1)...(19): siRNA sense strand
agagaagccuuacaaaucu

SEQ ID NO: 1814568 - RNA, 19 nt, Homo sapiens
  misc_RNA (1)...(19): siRNA sense strand
agagaaacccuacaaaugu

SEQ ID NO: 1814569 - RNA, 19 nt, Homo sapiens
  misc_RNA (1)...(19): siRNA sense strand
agagaaacccuacaaaugu

SEQ ID NO: 1814570 - RNA, 19 nt, Homo sapiens
  misc_RNA (1)...(19): siRNA sense strand
agagaaacccuacaaaugu

SEQ ID NO: 1814571 - RNA, 19 nt, Homo sapiens
  misc_RNA (1)...(19): siRNA sense strand
agagaaacccuacaaaugu

SEQ ID NO: 1814572 - RNA, 19 nt, Homo sapiens
  misc_RNA (1)...(19): siRNA sense strand
aaccgauucucaacucuua

SEQ ID NO: 1814573 - RNA, 19 nt, Homo sapiens
  misc_RNA (1)...(19): siRNA sense strand
ugaagaauguggcaaaggu

SEQ ID NO: 1814574 - RNA, 19 nt, Homo sapiens
  misc_RNA (1)...(19): siRNA sense strand
gagaaacccuaugaaugug

SEQ ID NO: 1814575 - RNA, 19 nt, Homo sapiens
  misc_RNA (1)...(19): siRNA sense strand
aaacacucuucaacccuua

SEQ ID NO: 1814576 - RNA, 19 nt, Homo sapiens
  misc_RNA (1)...(19): siRNA sense strand
ggccggagcagaauauaaa

SEQ ID NO: 1814577 - RNA, 19 nt, Homo sapiens
  misc_RNA (1)...(19): siRNA sense strand
aaccaguccucaaaccuua

SEQ ID NO: 1814578 - RNA, 19 nt, Homo sapiens
  misc_RNA (1)...(19): siRNA sense strand
uaaccagucugcacaccuu

SEQ ID NO: 1814579 - RNA, 19 nt, Homo sapiens
  misc_RNA (1)...(19): siRNA sense strand
aaccaguccucaaaccuua

SEQ ID NO: 1814580 - RNA, 19 nt, Homo sapiens
  misc_RNA (1)...(19): siRNA sense strand
uagcagaauucauacuaga

SEQ ID NO: 1814581 - RNA, 19 nt, Homo sapiens
  misc_RNA (1)...(19): siRNA sense strand
agaaaaggcugugaaagua

SEQ ID NO: 1814582 - RNA, 19 nt, Homo sapiens
  misc_RNA (1)...(19): siRNA sense strand
aagagaaaccuuacaaaug

SEQ ID NO: 1814583 - RNA, 19 nt, Homo sapiens
  misc_RNA (1)...(19): siRNA sense strand
cuucaacccuuacuaaaca

SEQ ID NO: 1814584 - RNA, 19 nt, Homo sapiens
  misc_RNA (1)...(19): siRNA sense strand
ggauguggccauagaauuc

SEQ ID NO: 1814585 - RNA, 19 nt, Homo sapiens
  misc_RNA (1)...(19): siRNA sense strand
agacaugagauaagacaua

SEQ ID NO: 1814586 - RNA, 19 nt, Homo sapiens
  misc_RNA (1)...(19): siRNA sense strand
gagaaaccuuacaaaugug

SEQ ID NO: 1814587 - RNA, 19 nt, Homo sapiens
  misc_RNA (1)...(19): siRNA sense strand
auacagaagagaaaccuua

SEQ ID NO: 1814588 - RNA, 19 nt, Homo sapiens
  misc_RNA (1)...(19): siRNA sense strand
gagaaaccuuacaaaugug

SEQ ID NO: 1814589 - RNA, 19 nt, Homo sapiens
  misc_RNA (1)...(19): siRNA sense strand
gagaaaccuuacaaaugug

SEQ ID NO: 1814590 - RNA, 19 nt, Homo sapiens
  misc_RNA (1)...(19): siRNA sense strand
gaaaguauggaugagugua

SEQ ID NO: 1814591 - RNA, 19 nt, Homo sapiens
  misc_RNA (1)...(19): siRNA sense strand
agagaaaccauacaaaugu

SEQ ID NO: 1814592 - RNA, 19 nt, Homo sapiens
  misc_RNA (1)...(19): siRNA sense strand
agccagaccugaucacuug

SEQ ID NO: 1814593 - RNA, 19 nt, Homo sapiens
  misc_RNA (1)...(19): siRNA sense strand
caugagauaagacauacua

SEQ ID NO: 1814594 - RNA, 19 nt, Homo sapiens
  misc_RNA (1)...(19): siRNA sense strand
cauaagagaauucauacug

SEQ ID NO: 1814595 - RNA, 19 nt, Homo sapiens
  misc_RNA (1)...(19): siRNA sense strand
cugcacagcggaauuuaua

SEQ ID NO: 1814596 - RNA, 19 nt, Homo sapiens
  misc_RNA (1)...(19): siRNA sense strand
ccauagaauucucucugaa

SEQ ID NO: 1814597 - RNA, 19 nt, Homo sapiens
  misc_RNA (1)...(19): siRNA sense strand
ucaaacagacaugagauaa

SEQ ID NO: 1814598 - RNA, 19 nt, Homo sapiens
  misc_RNA (1)...(19): siRNA sense strand
ccucaguccuuacuaaaca

SEQ ID NO: 1814599 - RNA, 19 nt, Homo sapiens
  misc_RNA (1)...(19): siRNA sense strand
ugaagaaugugacaaagcu

SEQ ID NO: 1814600 - RNA, 19 nt, Homo sapiens
  misc_RNA (1)...(19): siRNA sense strand
cauagcagaauucauacua

SEQ ID NO: 1814601 - RNA, 19 nt, Homo sapiens
  misc_RNA (1)...(19): siRNA sense strand
ucucacaccuuacuacaca

SEQ ID NO: 1814602 - RNA, 19 nt, Homo sapiens
  misc_RNA (1)...(19): siRNA sense strand
uaaaugguccucaguccuu

SEQ ID NO: 1814603 - RNA, 19 nt, Homo sapiens
  misc_RNA (1)...(19): siRNA sense strand
agagaaacccuacacaugu

SEQ ID NO: 1814604 - RNA, 19 nt, Homo sapiens
  misc_RNA (1)...(19): siRNA sense strand
ggagagaaacccuacacau

SEQ ID NO: 1814605 - RNA, 19 nt, Homo sapiens
  misc_RNA (1)...(19): siRNA sense strand
ugaagaauguggcaaagcu

SEQ ID NO: 1814606 - RNA, 19 nt, Homo sapiens
  misc_RNA (1)...(19): siRNA sense strand
ugagaaagcugcacaaaua

SEQ ID NO: 1814607 - RNA, 19 nt, Homo sapiens
  misc_RNA (1)...(19): siRNA sense strand
gaacauggcugcaucaaau

SEQ ID NO: 1814608 - RNA, 19 nt, Homo sapiens
  misc_RNA (1)...(19): siRNA sense strand
caagagagauggcagauuu

SEQ ID NO: 1814609 - RNA, 19 nt, Homo sapiens
  misc_RNA (1)...(19): siRNA sense strand
ggaaacggcucuucacaga

SEQ ID NO: 1814610 - RNA, 19 nt, Homo sapiens
  misc_RNA (1)...(19): siRNA sense strand
gcgaacaacuuuccuuaaa

SEQ ID NO: 1814611 - RNA, 19 nt, Homo sapiens
  misc_RNA (1)...(19): siRNA sense strand
cagaacagcugcuccuaua

SEQ ID NO: 1814612 - RNA, 19 nt, Homo sapiens
  misc_RNA (1)...(19): siRNA sense strand
caagaaauccugucaacua

SEQ ID NO: 1814613 - RNA, 19 nt, Homo sapiens
  misc_RNA (1)...(19): siRNA sense strand
gcaaggaagucgauacaga

SEQ ID NO: 1814614 - RNA, 19 nt, Homo sapiens
  misc_RNA (1)...(19): siRNA sense strand
uauaaugucuccugcauaa

SEQ ID NO: 1814615 - RNA, 19 nt, Homo sapiens
  misc_RNA (1)...(19): siRNA sense strand
cgacagaaguacugaauga

SEQ ID NO: 1814616 - RNA, 19 nt, Homo sapiens
  misc_RNA (1)...(19): siRNA sense strand
gcagaaaugcugauaauau

SEQ ID NO: 1814617 - RNA, 19 nt, Homo sapiens
  misc_RNA (1)...(19): siRNA sense strand
gcaaggauuuggacgguuu

SEQ ID NO: 1814618 - RNA, 19 nt, Homo sapiens
  misc_RNA (1)...(19): siRNA sense strand
gauauuagaagucgguuua

SEQ ID NO: 1814619 - RNA, 19 nt, Homo sapiens
  misc_RNA (1)...(19): siRNA sense strand
ccagaaaucuccacggaaa

SEQ ID NO: 1814620 - RNA, 19 nt, Homo sapiens
  misc_RNA (1)...(19): siRNA sense strand
acaggaauaugcaagauua

SEQ ID NO: 1814621 - RNA, 19 nt, Homo sapiens
  misc_RNA (1)...(19): siRNA sense strand
caacagagaccauuucaga

SEQ ID NO: 1814622 - RNA, 19 nt, Homo sapiens
  misc_RNA (1)...(19): siRNA sense strand
gcaguuaacuaauacacuu

SEQ ID NO: 1814623 - RNA, 19 nt, Homo sapiens
  misc_RNA (1)...(19): siRNA sense strand
ugaagaacauagagaagua

SEQ ID NO: 1814624 - RNA, 19 nt, Homo sapiens
  misc_RNA (1)...(19): siRNA sense strand
ggaagaagaagaagaagaa

SEQ ID NO: 1814625 - RNA, 19 nt, Homo sapiens
  misc_RNA (1)...(19): siRNA sense strand
gaagaggauuuggauguuu

SEQ ID NO: 1814626 - RNA, 19 nt, Homo sapiens
  misc_RNA (1)...(19): siRNA sense strand
caagaaguguggaugguuu

SEQ ID NO: 1814627 - RNA, 19 nt, Homo sapiens
  misc_RNA (1)...(19): siRNA sense strand
guaaugaucuccgcaaugu

SEQ ID NO: 1814628 - RNA, 19 nt, Homo sapiens
  misc_RNA (1)...(19): siRNA sense strand
ggaagaagaggaagaagaa

SEQ ID NO: 1814629 - RNA, 19 nt, Homo sapiens
  misc_RNA (1)...(19): siRNA sense strand
gaugaaggauccaugaaug

SEQ ID NO: 1814630 - RNA, 19 nt, Homo sapiens
  misc_RNA (1)...(19): siRNA sense strand
gauagaggauuucauaugg

SEQ ID NO: 1814631 - RNA, 19 nt, Homo sapiens
  misc_RNA (1)...(19): siRNA sense strand
ggacacccauccuguuuga

SEQ ID NO: 1814632 - RNA, 19 nt, Homo sapiens
  misc_RNA (1)...(19): siRNA sense strand
ggaugaugauacugaaaua

SEQ ID NO: 1814633 - RNA, 19 nt, Homo sapiens
  misc_RNA (1)...(19): siRNA sense strand
gcaaucaccugcaaaagua

SEQ ID NO: 1814634 - RNA, 19 nt, Homo sapiens
  misc_RNA (1)...(19): siRNA sense strand
cagaaaugcugauaauaug

SEQ ID NO: 1814635 - RNA, 19 nt, Homo sapiens
  misc_RNA (1)...(19): siRNA sense strand
ggaagucgauacagaguuc

SEQ ID NO: 1814636 - RNA, 19 nt, Homo sapiens
  misc_RNA (1)...(19): siRNA sense strand
acaagaaagugcagaugua

SEQ ID NO: 1814637 - RNA, 19 nt, Homo sapiens
  misc_RNA (1)...(19): siRNA sense strand
gauuucagcuauuugcuuu

SEQ ID NO: 1814638 - RNA, 19 nt, Homo sapiens
  misc_RNA (1)...(19): siRNA sense strand
ggacaucacggcuacauga

SEQ ID NO: 1814639 - RNA, 19 nt, Homo sapiens
  misc_RNA (1)...(19): siRNA sense strand
gcugucaucugguuggaua

SEQ ID NO: 1814640 - RNA, 19 nt, Homo sapiens
  misc_RNA (1)...(19): siRNA sense strand
caacagcaguguaacaaca

SEQ ID NO: 1814641 - RNA, 19 nt, Homo sapiens
  misc_RNA (1)...(19): siRNA sense strand
gaagucgguuuauuucuca

SEQ ID NO: 1814642 - RNA, 19 nt, Homo sapiens
  misc_RNA (1)...(19): siRNA sense strand
ggaaaccagucccaugaug

SEQ ID NO: 1814643 - RNA, 19 nt, Homo sapiens
  misc_RNA (1)...(19): siRNA sense strand
gcaaacaaguguggccaaa

SEQ ID NO: 1814644 - RNA, 19 nt, Homo sapiens
  misc_RNA (1)...(19): siRNA sense strand
ggauaccucucuaaggaaa

SEQ ID NO: 1814645 - RNA, 19 nt, Homo sapiens
  misc_RNA (1)...(19): siRNA sense strand
gaggugaaauuauagacuu

SEQ ID NO: 1814646 - RNA, 19 nt, Homo sapiens
  misc_RNA (1)...(19): siRNA sense strand
ggaagccaguccugagaaa

SEQ ID NO: 1814647 - RNA, 19 nt, Homo sapiens
  misc_RNA (1)...(19): siRNA sense strand
acaaggaugucguuacuga

SEQ ID NO: 1814648 - RNA, 19 nt, Homo sapiens
  misc_RNA (1)...(19): siRNA sense strand
ccaccacgcucgacgauug

SEQ ID NO: 1814649 - RNA, 19 nt, Homo sapiens
  misc_RNA (1)...(19): siRNA sense strand
gaagagcugcccagagaaa

SEQ ID NO: 1814650 - RNA, 19 nt, Homo sapiens
  misc_RNA (1)...(19): siRNA sense strand
gaaauccugucaacuagag

SEQ ID NO: 1814651 - RNA, 19 nt, Homo sapiens
  misc_RNA (1)...(19): siRNA sense strand
gacgacaccuuucaggauu

SEQ ID NO: 1814652 - RNA, 19 nt, Homo sapiens
  misc_RNA (1)...(19): siRNA sense strand
gaggaagaccggauuuaaa

SEQ ID NO: 1814653 - RNA, 19 nt, Homo sapiens
  misc_RNA (1)...(19): siRNA sense strand
gagccuaccugugagauug

SEQ ID NO: 1814654 - RNA, 19 nt, Homo sapiens
  misc_RNA (1)...(19): siRNA sense strand
caaacccacuuuauacaga

SEQ ID NO: 1814655 - RNA, 19 nt, Homo sapiens
  misc_RNA (1)...(19): siRNA sense strand
gacgguuucucauugauuu

SEQ ID NO: 1814656 - RNA, 19 nt, Homo sapiens
  misc_RNA (1)...(19): siRNA sense strand
ccacagcaaucauggcuau

SEQ ID NO: 1814657 - RNA, 19 nt, Homo sapiens
  misc_RNA (1)...(19): siRNA sense strand
caaaucagcccagaucaaa

SEQ ID NO: 1814658 - RNA, 19 nt, Homo sapiens
  misc_RNA (1)...(19): siRNA sense strand
gcagauuugucaucauuag

SEQ ID NO: 1814659 - RNA, 19 nt, Homo sapiens
  misc_RNA (1)...(19): siRNA sense strand
gcacuaucguccaaggaaa

SEQ ID NO: 1814660 - RNA, 19 nt, Homo sapiens
  misc_RNA (1)...(19): siRNA sense strand
ggagaaggaggaacaagaa

SEQ ID NO: 1814661 - RNA, 19 nt, Homo sapiens
  misc_RNA (1)...(19): siRNA sense strand
caagauuaccaaagcuuua

SEQ ID NO: 1814662 - RNA, 19 nt, Homo sapiens
  misc_RNA (1)...(19): siRNA sense strand
gagaaagcugcacaaauaa

SEQ ID NO: 1814663 - RNA, 19 nt, Homo sapiens
  misc_RNA (1)...(19): siRNA sense strand
gaacaaagcgcggucuauc

SEQ ID NO: 1814664 - RNA, 19 nt, Homo sapiens
  misc_RNA (1)...(19): siRNA sense strand
caaacgcgcugugaauaau

SEQ ID NO: 1814665 - RNA, 19 nt, Homo sapiens
  misc_RNA (1)...(19): siRNA sense strand
aggaagagcugcccagaga

SEQ ID NO: 1814666 - RNA, 19 nt, Homo sapiens
  misc_RNA (1)...(19): siRNA sense strand
gaugggcuuucucauacua

SEQ ID NO: 1814667 - RNA, 19 nt, Homo sapiens
  misc_RNA (1)...(19): siRNA sense strand
gaccaaaguccacagauug

SEQ ID NO: 1814668 - RNA, 19 nt, Homo sapiens
  misc_RNA (1)...(19): siRNA sense strand
gaacccagaggucuuaaug

SEQ ID NO: 1814669 - RNA, 19 nt, Homo sapiens
  misc_RNA (1)...(19): siRNA sense strand
ugaaugagcccuuugacaa

SEQ ID NO: 1814670 - RNA, 19 nt, Homo sapiens
  misc_RNA (1)...(19): siRNA sense strand
gcuauuugcuuucuagaag

SEQ ID NO: 1814671 - RNA, 19 nt, Homo sapiens
  misc_RNA (1)...(19): siRNA sense strand
gcaccaaaggcaaggauuu

SEQ ID NO: 1814672 - RNA, 19 nt, Homo sapiens
  misc_RNA (1)...(19): siRNA sense strand
ggucaauuaugggagcuua

SEQ ID NO: 1814673 - RNA, 19 nt, Homo sapiens
  misc_RNA (1)...(19): siRNA sense strand
gagcacaacugagaacuac

SEQ ID NO: 1814674 - RNA, 19 nt, Homo sapiens
  misc_RNA (1)...(19): siRNA sense strand
ccauggaaaucgacucuga

SEQ ID NO: 1814675 - RNA, 19 nt, Homo sapiens
  misc_RNA (1)...(19): siRNA sense strand
ggaagaagaggaggaagaa

SEQ ID NO: 1814676 - RNA, 19 nt, Homo sapiens
  misc_RNA (1)...(19): siRNA sense strand
gcgagaagcugagaaagag

SEQ ID NO: 1814677 - RNA, 19 nt, Homo sapiens
  misc_RNA (1)...(19): siRNA sense strand
ugagcagccuuaccacuaa

SEQ ID NO: 1814678 - RNA, 19 nt, Homo sapiens
  misc_RNA (1)...(19): siRNA sense strand
gaaaacuacuucaugagaa

SEQ ID NO: 1814679 - RNA, 19 nt, Homo sapiens
  misc_RNA (1)...(19): siRNA sense strand
agaaguaucucagaaguca

SEQ ID NO: 1814680 - RNA, 19 nt, Homo sapiens
  misc_RNA (1)...(19): siRNA sense strand
ccaagcagcuacgauucua

SEQ ID NO: 1814681 - RNA, 19 nt, Homo sapiens
  misc_RNA (1)...(19): siRNA sense strand
gaaagaaggcaguaaagac

SEQ ID NO: 1814682 - RNA, 19 nt, Homo sapiens
  misc_RNA (1)...(19): siRNA sense strand
ucuccuaccuggcauauug

SEQ ID NO: 1814683 - RNA, 19 nt, Homo sapiens
  misc_RNA (1)...(19): siRNA sense strand
gaaauuuaccgaaggaaag

SEQ ID NO: 1814684 - RNA, 19 nt, Homo sapiens
  misc_RNA (1)...(19): siRNA sense strand
ucaaagcacuaucguccaa

SEQ ID NO: 1814685 - RNA, 19 nt, Homo sapiens
  misc_RNA (1)...(19): siRNA sense strand
ccaaacgcgcugugaauaa

SEQ ID NO: 1814686 - RNA, 19 nt, Homo sapiens
  misc_RNA (1)...(19): siRNA sense strand
aaacaaggaugucguuacu

SEQ ID NO: 1814687 - RNA, 19 nt, Homo sapiens
  misc_RNA (1)...(19): siRNA sense strand
gaacacaggcauguccaaa

SEQ ID NO: 1814688 - RNA, 19 nt, Homo sapiens
  misc_RNA (1)...(19): siRNA sense strand
gaucauucauugccuuaca

SEQ ID NO: 1814689 - RNA, 19 nt, Homo sapiens
  misc_RNA (1)...(19): siRNA sense strand
gaaaacagcuacgcccaaa

SEQ ID NO: 1814690 - RNA, 19 nt, Homo sapiens
  misc_RNA (1)...(19): siRNA sense strand
agaagacucugcacguuug

SEQ ID NO: 1814691 - RNA, 19 nt, Homo sapiens
  misc_RNA (1)...(19): siRNA sense strand
gaaggaggaacaagaaauc

SEQ ID NO: 1814692 - RNA, 19 nt, Homo sapiens
  misc_RNA (1)...(19): siRNA sense strand
caagaaagugcagauguaa

SEQ ID NO: 1814693 - RNA, 19 nt, Homo sapiens
  misc_RNA (1)...(19): siRNA sense strand
cucaauggcuccuacauga

SEQ ID NO: 1814694 - RNA, 19 nt, Homo sapiens
  misc_RNA (1)...(19): siRNA sense strand
gaagaaggaggaggaaaug

SEQ ID NO: 1814695 - RNA, 19 nt, Homo sapiens
  misc_RNA (1)...(19): siRNA sense strand
ggaagaagaggaagaagag

SEQ ID NO: 1814696 - RNA, 19 nt, Homo sapiens
  misc_RNA (1)...(19): siRNA sense strand
ggaagaggaagaagaggaa

SEQ ID NO: 1814697 - RNA, 19 nt, Homo sapiens
  misc_RNA (1)...(19): siRNA sense strand
ggaagaagaggaagaggau

SEQ ID NO: 1814698 - RNA, 19 nt, Homo sapiens
  misc_RNA (1)...(19): siRNA sense strand
agagagcagugaagaagaa

SEQ ID NO: 1814699 - RNA, 19 nt, Homo sapiens
  misc_RNA (1)...(19): siRNA sense strand
gcaagauuaccaaagcuuu

SEQ ID NO: 1814700 - RNA, 19 nt, Homo sapiens
  misc_RNA (1)...(19): siRNA sense strand
ucuagaggaucauguaaug

SEQ ID NO: 1814701 - RNA, 19 nt, Homo sapiens
  misc_RNA (1)...(19): siRNA sense strand
acacagggcuuguucaacu

SEQ ID NO: 1814702 - RNA, 19 nt, Homo sapiens
  misc_RNA (1)...(19): siRNA sense strand
agaccaaaguccacagauu

SEQ ID NO: 1814703 - RNA, 19 nt, Homo sapiens
  misc_RNA (1)...(19): siRNA sense strand
gagaggaagaccggauuua

SEQ ID NO: 1814704 - RNA, 19 nt, Homo sapiens
  misc_RNA (1)...(19): siRNA sense strand
gaacaagaaauccugucaa

SEQ ID NO: 1814705 - RNA, 19 nt, Homo sapiens
  misc_RNA (1)...(19): siRNA sense strand
uggcagauuugucaucauu

SEQ ID NO: 1814706 - RNA, 19 nt, Homo sapiens
  misc_RNA (1)...(19): siRNA sense strand
gaagaaagaucgaguuaug

SEQ ID NO: 1814707 - RNA, 19 nt, Homo sapiens
  misc_RNA (1)...(19): siRNA sense strand
ggaaacaccugcuucauga

SEQ ID NO: 1814708 - RNA, 19 nt, Homo sapiens
  misc_RNA (1)...(19): siRNA sense strand
ccaaauggaugaagguuua

SEQ ID NO: 1814709 - RNA, 19 nt, Homo sapiens
  misc_RNA (1)...(19): siRNA sense strand
gaacagcugugaaggagaa

SEQ ID NO: 1814710 - RNA, 19 nt, Homo sapiens
  misc_RNA (1)...(19): siRNA sense strand
ggaauaaacuacuaaacug

SEQ ID NO: 1814711 - RNA, 19 nt, Homo sapiens
  misc_RNA (1)...(19): siRNA sense strand
gaagaaguaugugggcuuu

SEQ ID NO: 1814712 - RNA, 19 nt, Homo sapiens
  misc_RNA (1)...(19): siRNA sense strand
gaacugaagcucugugaga

SEQ ID NO: 1814713 - RNA, 19 nt, Homo sapiens
  misc_RNA (1)...(19): siRNA sense strand
agaacaaacugaaugguaa

SEQ ID NO: 1814714 - RNA, 19 nt, Homo sapiens
  misc_RNA (1)...(19): siRNA sense strand
aaacucaacucucgaucua

SEQ ID NO: 1814715 - RNA, 19 nt, Homo sapiens
  misc_RNA (1)...(19): siRNA sense strand
gaacagcugacauaaauuc

SEQ ID NO: 1814716 - RNA, 19 nt, Homo sapiens
  misc_RNA (1)...(19): siRNA sense strand
agacaacucugggcuauuu

SEQ ID NO: 1814717 - RNA, 19 nt, Homo sapiens
  misc_RNA (1)...(19): siRNA sense strand
gggauaagcucgacacagu

SEQ ID NO: 1814718 - RNA, 19 nt, Homo sapiens
  misc_RNA (1)...(19): siRNA sense strand
gaacuccgcuuugcagugu

SEQ ID NO: 1814719 - RNA, 19 nt, Homo sapiens
  misc_RNA (1)...(19): siRNA sense strand
uggaacagcugacauaaau

SEQ ID NO: 1814720 - RNA, 19 nt, Homo sapiens
  misc_RNA (1)...(19): siRNA sense strand
gagcauggccuguuuguca

SEQ ID NO: 1814721 - RNA, 19 nt, Homo sapiens
  misc_RNA (1)...(19): siRNA sense strand
gaaacagccuuuaccugau

SEQ ID NO: 1814722 - RNA, 19 nt, Homo sapiens
  misc_RNA (1)...(19): siRNA sense strand
gagcuuggacccuuaauga

SEQ ID NO: 1814723 - RNA, 19 nt, Homo sapiens
  misc_RNA (1)...(19): siRNA sense strand
gagccaccauccucucaua

SEQ ID NO: 1814724 - RNA, 19 nt, Homo sapiens
  misc_RNA (1)...(19): siRNA sense strand
gaucuacacuggccaugga

SEQ ID NO: 1814725 - RNA, 19 nt, Homo sapiens
  misc_RNA (1)...(19): siRNA sense strand
gccuuuaccugaugaguuu

SEQ ID NO: 1814726 - RNA, 19 nt, Homo sapiens
  misc_RNA (1)...(19): siRNA sense strand
ugaauuggacuauguauug

SEQ ID NO: 1814727 - RNA, 19 nt, Homo sapiens
  misc_RNA (1)...(19): siRNA sense strand
ugacauaaauucacuugca

SEQ ID NO: 1814728 - RNA, 19 nt, Homo sapiens
  misc_RNA (1)...(19): siRNA sense strand
gcaaagucgagguguauuu

SEQ ID NO: 1814729 - RNA, 19 nt, Homo sapiens
  misc_RNA (1)...(19): siRNA sense strand
gcgcagugguaucuuauug

SEQ ID NO: 1814730 - RNA, 19 nt, Homo sapiens
  misc_RNA (1)...(19): siRNA sense strand
gggugaacauaaccuauuu

SEQ ID NO: 1814731 - RNA, 19 nt, Homo sapiens
  misc_RNA (1)...(19): siRNA sense strand
gguauuacuuugaugauag

SEQ ID NO: 1814732 - RNA, 19 nt, Homo sapiens
  misc_RNA (1)...(19): siRNA sense strand
gaacaaacugaaugguaaa

SEQ ID NO: 1814733 - RNA, 19 nt, Homo sapiens
  misc_RNA (1)...(19): siRNA sense strand
ucgcagauguguauaauca

SEQ ID NO: 1814734 - RNA, 19 nt, Homo sapiens
  misc_RNA (1)...(19): siRNA sense strand
ccaccaaugugcugaguug

SEQ ID NO: 1814735 - RNA, 19 nt, Homo sapiens
  misc_RNA (1)...(19): siRNA sense strand
ggaaauugcagaagccuau

SEQ ID NO: 1814736 - RNA, 19 nt, Homo sapiens
  misc_RNA (1)...(19): siRNA sense strand
cagcaaggccuuaugugua

SEQ ID NO: 1814737 - RNA, 19 nt, Homo sapiens
  misc_RNA (1)...(19): siRNA sense strand
cagcuuaugugcuauuuua

SEQ ID NO: 1814738 - RNA, 19 nt, Homo sapiens
  misc_RNA (1)...(19): siRNA sense strand
caaacugaaugguaaaugg

SEQ ID NO: 1814739 - RNA, 19 nt, Homo sapiens
  misc_RNA (1)...(19): siRNA sense strand
gaucugaaccggguaaaga

SEQ ID NO: 1814740 - RNA, 19 nt, Homo sapiens
  misc_RNA (1)...(19): siRNA sense strand
aaacacggcucuggaacaa

SEQ ID NO: 1814741 - RNA, 19 nt, Homo sapiens
  misc_RNA (1)...(19): siRNA sense strand
ccacugcccuugaagaaag

SEQ ID NO: 1814742 - RNA, 19 nt, Homo sapiens
  misc_RNA (1)...(19): siRNA sense strand
ucacuuagcaguucugguu

SEQ ID NO: 1814743 - RNA, 19 nt, Homo sapiens
  misc_RNA (1)...(19): siRNA sense strand
gaccuugaaagaacacuua

SEQ ID NO: 1814744 - RNA, 19 nt, Homo sapiens
  misc_RNA (1)...(19): siRNA sense strand
gagaagaugaggaagaaau

SEQ ID NO: 1814745 - RNA, 19 nt, Homo sapiens
  misc_RNA (1)...(19): siRNA sense strand
aaacagccuuuaccugaug

SEQ ID NO: 1814746 - RNA, 19 nt, Homo sapiens
  misc_RNA (1)...(19): siRNA sense strand
guaccaggcuguuugugau

SEQ ID NO: 1814747 - RNA, 19 nt, Homo sapiens
  misc_RNA (1)...(19): siRNA sense strand
aaucacagguugaggaaug

SEQ ID NO: 1814748 - RNA, 19 nt, Homo sapiens
  misc_RNA (1)...(19): siRNA sense strand
gaagaugagccaggaaaug

SEQ ID NO: 1814749 - RNA, 19 nt, Homo sapiens
  misc_RNA (1)...(19): siRNA sense strand
gaacauguccgaguuuguc

SEQ ID NO: 1814750 - RNA, 19 nt, Homo sapiens
  misc_RNA (1)...(19): siRNA sense strand
gugcugaguugccauuuca

SEQ ID NO: 1814751 - RNA, 19 nt, Homo sapiens
  misc_RNA (1)...(19): siRNA sense strand
gacccucacugcagaccua

SEQ ID NO: 1814752 - RNA, 19 nt, Homo sapiens
  misc_RNA (1)...(19): siRNA sense strand
cagaugcggugguggcaaa

SEQ ID NO: 1814753 - RNA, 19 nt, Homo sapiens
  misc_RNA (1)...(19): siRNA sense strand
gggaaacaccugcuucaug

SEQ ID NO: 1814754 - RNA, 19 nt, Homo sapiens
  misc_RNA (1)...(19): siRNA sense strand
acacggcucuggaacaaau

SEQ ID NO: 1814755 - RNA, 19 nt, Homo sapiens
  misc_RNA (1)...(19): siRNA sense strand
gcaaauggugauagcacua

SEQ ID NO: 1814756 - RNA, 19 nt, Homo sapiens
  misc_RNA (1)...(19): siRNA sense strand
agaaguaugugggcuuuga

SEQ ID NO: 1814757 - RNA, 19 nt, Homo sapiens
  misc_RNA (1)...(19): siRNA sense strand
gguacugucccaacuguaa

SEQ ID NO: 1814758 - RNA, 19 nt, Homo sapiens
  misc_RNA (1)...(19): siRNA sense strand
gaagaucugaaccggguaa

SEQ ID NO: 1814759 - RNA, 19 nt, Homo sapiens
  misc_RNA (1)...(19): siRNA sense strand
gaaacacggcucuggaaca

SEQ ID NO: 1814760 - RNA, 19 nt, Homo sapiens
  misc_RNA (1)...(19): siRNA sense strand
cagcauggacaccaacuaa

SEQ ID NO: 1814761 - RNA, 19 nt, Homo sapiens
  misc_RNA (1)...(19): siRNA sense strand
uguccgaguuugucuguaa

SEQ ID NO: 1814762 - RNA, 19 nt, Homo sapiens
  misc_RNA (1)...(19): siRNA sense strand
aaacguuucuccuacaaca

SEQ ID NO: 1814763 - RNA, 19 nt, Homo sapiens
  misc_RNA (1)...(19): siRNA sense strand
guucaaaacucaaguagga

SEQ ID NO: 1814764 - RNA, 19 nt, Homo sapiens
  misc_RNA (1)...(19): siRNA sense strand
cuagauggauugcaugaag

SEQ ID NO: 1814765 - RNA, 19 nt, Homo sapiens
  misc_RNA (1)...(19): siRNA sense strand
gcgaagaacaaacugaaug

SEQ ID NO: 1814766 - RNA, 19 nt, Homo sapiens
  misc_RNA (1)...(19): siRNA sense strand
ggucgcagauguguauaau

SEQ ID NO: 1814767 - RNA, 19 nt, Homo sapiens
  misc_RNA (1)...(19): siRNA sense strand
gggcagccacuauugcuuu

SEQ ID NO: 1814768 - RNA, 19 nt, Homo sapiens
  misc_RNA (1)...(19): siRNA sense strand
cauggccucuucaaaucua

SEQ ID NO: 1814769 - RNA, 19 nt, Homo sapiens
  misc_RNA (1)...(19): siRNA sense strand
aggaagaaauggagcauca

SEQ ID NO: 1814770 - RNA, 19 nt, Homo sapiens
  misc_RNA (1)...(19): siRNA sense strand
aguuaacccuugagucuuu

SEQ ID NO: 1814771 - RNA, 19 nt, Homo sapiens
  misc_RNA (1)...(19): siRNA sense strand
gaauuggacuauguauugg

SEQ ID NO: 1814772 - RNA, 19 nt, Homo sapiens
  misc_RNA (1)...(19): siRNA sense strand
ucaaacguuucuccuacaa

SEQ ID NO: 1814773 - RNA, 19 nt, Homo sapiens
  misc_RNA (1)...(19): siRNA sense strand
cuugugaacuccuauggaa

SEQ ID NO: 1814774 - RNA, 19 nt, Homo sapiens
  misc_RNA (1)...(19): siRNA sense strand
ugaaggagaagaugaggaa

SEQ ID NO: 1814775 - RNA, 19 nt, Homo sapiens
  misc_RNA (1)...(19): siRNA sense strand
cguaucagccgcuauguga

SEQ ID NO: 1814776 - RNA, 19 nt, Homo sapiens
  misc_RNA (1)...(19): siRNA sense strand
gaucguaucagccgcuaug

SEQ ID NO: 1814777 - RNA, 19 nt, Homo sapiens
  misc_RNA (1)...(19): siRNA sense strand
cagcaaggcagacaccauu

SEQ ID NO: 1814778 - RNA, 19 nt, Homo sapiens
  misc_RNA (1)...(19): siRNA sense strand
gcagugguaucuuauugac

SEQ ID NO: 1814779 - RNA, 19 nt, Homo sapiens
  misc_RNA (1)...(19): siRNA sense strand
ucaagcaguggaagaagua

SEQ ID NO: 1814780 - RNA, 19 nt, Homo sapiens
  misc_RNA (1)...(19): siRNA sense strand
aagaacaaacugaauggua

SEQ ID NO: 1814781 - RNA, 19 nt, Homo sapiens
  misc_RNA (1)...(19): siRNA sense strand
aaagagaugcggaagcuau

SEQ ID NO: 1814782 - RNA, 19 nt, Homo sapiens
  misc_RNA (1)...(19): siRNA sense strand
ggucaggugcuaguaauug

SEQ ID NO: 1814783 - RNA, 19 nt, Homo sapiens
  misc_RNA (1)...(19): siRNA sense strand
gcaguucugguuccucuga

SEQ ID NO: 1814784 - RNA, 19 nt, Homo sapiens
  misc_RNA (1)...(19): siRNA sense strand
acgucgagaugaugaauuu

SEQ ID NO: 1814785 - RNA, 19 nt, Homo sapiens
  misc_RNA (1)...(19): siRNA sense strand
gggaagaugagccaggaaa

SEQ ID NO: 1814786 - RNA, 19 nt, Homo sapiens
  misc_RNA (1)...(19): siRNA sense strand
ccaccauccucucauauac

SEQ ID NO: 1814787 - RNA, 19 nt, Homo sapiens
  misc_RNA (1)...(19): siRNA sense strand
gccaccauccucucauaua

SEQ ID NO: 1814788 - RNA, 19 nt, Homo sapiens
  misc_RNA (1)...(19): siRNA sense strand
gcgccuagcagaaauuuua

SEQ ID NO: 1814789 - RNA, 19 nt, Homo sapiens
  misc_RNA (1)...(19): siRNA sense strand
gucaggugcuaguaauuga

SEQ ID NO: 1814790 - RNA, 19 nt, Homo sapiens
  misc_RNA (1)...(19): siRNA sense strand
agucagaccuugaaagaac

SEQ ID NO: 1814791 - RNA, 19 nt, Homo sapiens
  misc_RNA (1)...(19): siRNA sense strand
aggagaagaugaggaagaa

SEQ ID NO: 1814792 - RNA, 19 nt, Homo sapiens
  misc_RNA (1)...(19): siRNA sense strand
gggaugacauuuucgugua

SEQ ID NO: 1814793 - RNA, 19 nt, Homo sapiens
  misc_RNA (1)...(19): siRNA sense strand
uguauuugcuggaacugaa

SEQ ID NO: 1814794 - RNA, 19 nt, Homo sapiens
  misc_RNA (1)...(19): siRNA sense strand
ggaaaugaccccagugaga

SEQ ID NO: 1814795 - RNA, 19 nt, Homo sapiens
  misc_RNA (1)...(19): siRNA sense strand
aaauggagcaucaggaaga

SEQ ID NO: 1814796 - RNA, 19 nt, Homo sapiens
  misc_RNA (1)...(19): siRNA sense strand
caaaggaagccugggagaa

SEQ ID NO: 1814797 - RNA, 19 nt, Homo sapiens
  misc_RNA (1)...(19): siRNA sense strand
guaugaagccgaaaucaac

SEQ ID NO: 1814798 - RNA, 19 nt, Homo sapiens
  misc_RNA (1)...(19): siRNA sense strand
aggcagaccuugcagucaa

SEQ ID NO: 1814799 - RNA, 19 nt, Homo sapiens
  misc_RNA (1)...(19): siRNA sense strand
ggaaaacuacuuaaacuca

SEQ ID NO: 1814800 - RNA, 19 nt, Homo sapiens
  misc_RNA (1)...(19): siRNA sense strand
ugcaauggcuccaggaaca

SEQ ID NO: 1814801 - RNA, 19 nt, Homo sapiens
  misc_RNA (1)...(19): siRNA sense strand
uaucagccgcuaugugaaa

SEQ ID NO: 1814802 - RNA, 19 nt, Homo sapiens
  misc_RNA (1)...(19): siRNA sense strand
cuaccgaggcguggaauaa

SEQ ID NO: 1814803 - RNA, 19 nt, Homo sapiens
  misc_RNA (1)...(19): siRNA sense strand
cccagaaugugcuaagguu

SEQ ID NO: 1814804 - RNA, 19 nt, Homo sapiens
  misc_RNA (1)...(19): siRNA sense strand
gcagaagccuaugcugaac

SEQ ID NO: 1814805 - RNA, 19 nt, Homo sapiens
  misc_RNA (1)...(19): siRNA sense strand
ggcagaccuugcagucaaa

SEQ ID NO: 1814806 - RNA, 19 nt, Homo sapiens
  misc_RNA (1)...(19): siRNA sense strand
ucgaggagcugaagaauga

SEQ ID NO: 1814807 - RNA, 19 nt, Homo sapiens
  misc_RNA (1)...(19): siRNA sense strand
caaaaucccuucagcaaug

SEQ ID NO: 1814808 - RNA, 19 nt, Homo sapiens
  misc_RNA (1)...(19): siRNA sense strand
gggacaagaucaacaacug

SEQ ID NO: 1814809 - RNA, 19 nt, Homo sapiens
  misc_RNA (1)...(19): siRNA sense strand
gaaaaucauuccagacugu

SEQ ID NO: 1814810 - RNA, 19 nt, Homo sapiens
  misc_RNA (1)...(19): siRNA sense strand
gcaagacgggagcgaguaa

SEQ ID NO: 1814811 - RNA, 19 nt, Homo sapiens
  misc_RNA (1)...(19): siRNA sense strand
gaagagcccagcacaacga

SEQ ID NO: 1814812 - RNA, 19 nt, Homo sapiens
  misc_RNA (1)...(19): siRNA sense strand
gcgauuacauccgggaguu

SEQ ID NO: 1814813 - RNA, 19 nt, Homo sapiens
  misc_RNA (1)...(19): siRNA sense strand
caacauccaguaccaguuc

SEQ ID NO: 1814814 - RNA, 19 nt, Homo sapiens
  misc_RNA (1)...(19): siRNA sense strand
ggagggacaagaucaacaa

SEQ ID NO: 1814815 - RNA, 19 nt, Homo sapiens
  misc_RNA (1)...(19): siRNA sense strand
gagaagagcccagcacaac

SEQ ID NO: 1814816 - RNA, 19 nt, Homo sapiens
  misc_RNA (1)...(19): siRNA sense strand
gcaggagaccuucaaagag

SEQ ID NO: 1814817 - RNA, 19 nt, Homo sapiens
  misc_RNA (1)...(19): siRNA sense strand
ggagaagagcccagcacaa

SEQ ID NO: 1814818 - RNA, 19 nt, Homo sapiens
  misc_RNA (1)...(19): siRNA sense strand
gaucguccagcuuucgaaa

SEQ ID NO: 1814819 - RNA, 19 nt, Homo sapiens
  misc_RNA (1)...(19): siRNA sense strand
gaaugagaacgcccugcuu

SEQ ID NO: 1814820 - RNA, 19 nt, Homo sapiens
  misc_RNA (1)...(19): siRNA sense strand
ggccaguucuacgucauga

SEQ ID NO: 1814821 - RNA, 19 nt, Homo sapiens
  misc_RNA (1)...(19): siRNA sense strand
gacgggagcgaguaaagga

SEQ ID NO: 1814822 - RNA, 19 nt, Homo sapiens
  misc_RNA (1)...(19): siRNA sense strand
ccaguucuacgucaugaug

SEQ ID NO: 1814823 - RNA, 19 nt, Homo sapiens
  misc_RNA (1)...(19): siRNA sense strand
uguccaaggccugcgauua

SEQ ID NO: 1814824 - RNA, 19 nt, Homo sapiens
  misc_RNA (1)...(19): siRNA sense strand
ugcaggagaccuucaaaga

SEQ ID NO: 1814825 - RNA, 19 nt, Homo sapiens
  misc_RNA (1)...(19): siRNA sense strand
gagcccagcacaacgaagu

SEQ ID NO: 1814826 - RNA, 19 nt, Homo sapiens
  misc_RNA (1)...(19): siRNA sense strand
gaucgaggagcugaagaau

SEQ ID NO: 1814827 - RNA, 19 nt, Homo sapiens
  misc_RNA (1)...(19): siRNA sense strand
ggagauacuacggcugugu

SEQ ID NO: 1814828 - RNA, 19 nt, Homo sapiens
  misc_RNA (1)...(19): siRNA sense strand
gaggagcugaagaaugaga

SEQ ID NO: 1814829 - RNA, 19 nt, Homo sapiens
  misc_RNA (1)...(19): siRNA sense strand
gcaugcaggagaccuucaa

SEQ ID NO: 1814830 - RNA, 19 nt, Homo sapiens
  misc_RNA (1)...(19): siRNA sense strand
guccaaggccugcgauuac

SEQ ID NO: 1814831 - RNA, 19 nt, Homo sapiens
  misc_RNA (1)...(19): siRNA sense strand
gcgaccacaacauccagua

SEQ ID NO: 1814832 - RNA, 19 nt, Homo sapiens
  misc_RNA (1)...(19): siRNA sense strand
gcagaucgaggagcugaag

SEQ ID NO: 1814833 - RNA, 19 nt, Homo sapiens
  misc_RNA (1)...(19): siRNA sense strand
ccacagaccagagcuugca

SEQ ID NO: 1814834 - RNA, 19 nt, Homo sapiens
  misc_RNA (1)...(19): siRNA sense strand
ggcugcagauggacaacga

SEQ ID NO: 1814835 - RNA, 19 nt, Homo sapiens
  misc_RNA (1)...(19): siRNA sense strand
ggaggcggagggacaagau

SEQ ID NO: 1814836 - RNA, 19 nt, Homo sapiens
  misc_RNA (1)...(19): siRNA sense strand
ggugacauaccgcguaguc

SEQ ID NO: 1814837 - RNA, 19 nt, Homo sapiens
  misc_RNA (1)...(19): siRNA sense strand
agacagcgguggccaucac

SEQ ID NO: 1814838 - RNA, 19 nt, Homo sapiens
  misc_RNA (1)...(19): siRNA sense strand
uaagaaugcugaagaguuu

SEQ ID NO: 1814839 - RNA, 19 nt, Homo sapiens
  misc_RNA (1)...(19): siRNA sense strand
ugaaggagcuugaagaaau

SEQ ID NO: 1814840 - RNA, 19 nt, Homo sapiens
  misc_RNA (1)...(19): siRNA sense strand
gcaggaggcugaugaagga

SEQ ID NO: 1814841 - RNA, 19 nt, Homo sapiens
  misc_RNA (1)...(19): siRNA sense strand
gaagaaauccgcaaaugug

SEQ ID NO: 1814842 - RNA, 19 nt, Homo sapiens
  misc_RNA (1)...(19): siRNA sense strand
caccgaagaucacauuuaa

SEQ ID NO: 1814843 - RNA, 19 nt, Homo sapiens
  misc_RNA (1)...(19): siRNA sense strand
ugaccuagcugaagaauac

SEQ ID NO: 1814844 - RNA, 19 nt, Homo sapiens
  misc_RNA (1)...(19): siRNA sense strand
gcugaagaguuuacaaaga

SEQ ID NO: 1814845 - RNA, 19 nt, Homo sapiens
  misc_RNA (1)...(19): siRNA sense strand
gaaggagcuugaagaaauc

SEQ ID NO: 1814846 - RNA, 19 nt, Homo sapiens
  misc_RNA (1)...(19): siRNA sense strand
cugaagaguuuacaaagaa

SEQ ID NO: 1814847 - RNA, 19 nt, Homo sapiens
  misc_RNA (1)...(19): siRNA sense strand
ugacaacccuccauaugau

SEQ ID NO: 1814848 - RNA, 19 nt, Homo sapiens
  misc_RNA (1)...(19): siRNA sense strand
gggcugaccuagcugaaga

SEQ ID NO: 1814849 - RNA, 19 nt, Homo sapiens
  misc_RNA (1)...(19): siRNA sense strand
guaagaaugcugaagaguu

SEQ ID NO: 1814850 - RNA, 19 nt, Homo sapiens
  misc_RNA (1)...(19): siRNA sense strand
ccaccgaagaucacauuua

SEQ ID NO: 1814851 - RNA, 19 nt, Homo sapiens
  misc_RNA (1)...(19): siRNA sense strand
aaagcgaccuguggacuaa

SEQ ID NO: 1814852 - RNA, 19 nt, Homo sapiens
  misc_RNA (1)...(19): siRNA sense strand
gaugaaggagcuugaagaa

SEQ ID NO: 1814853 - RNA, 19 nt, Homo sapiens
  misc_RNA (1)...(19): siRNA sense strand
ccgcaaaugugggaugaaa

SEQ ID NO: 1814854 - RNA, 19 nt, Homo sapiens
  misc_RNA (1)...(19): siRNA sense strand
cagaaucgaaaucaacuuu

SEQ ID NO: 1814855 - RNA, 19 nt, Homo sapiens
  misc_RNA (1)...(19): siRNA sense strand
gacaacccuccauaugaua

SEQ ID NO: 1814856 - RNA, 19 nt, Homo sapiens
  misc_RNA (1)...(19): siRNA sense strand
aaagaucuaucacccaaac

SEQ ID NO: 1814857 - RNA, 19 nt, Homo sapiens
  misc_RNA (1)...(19): siRNA sense strand
ugaagaaauccgcaaaugu

SEQ ID NO: 1814858 - RNA, 19 nt, Homo sapiens
  misc_RNA (1)...(19): siRNA sense strand
ccagguugaugaagcuaau

SEQ ID NO: 1814859 - RNA, 19 nt, Homo sapiens
  misc_RNA (1)...(19): siRNA sense strand
gguugaugaagcuaauuua

SEQ ID NO: 1814860 - RNA, 19 nt, Homo sapiens
  misc_RNA (1)...(19): siRNA sense strand
gcugaagaauacucuaagg

SEQ ID NO: 1814861 - RNA, 19 nt, Homo sapiens
  misc_RNA (1)...(19): siRNA sense strand
uugaagaaauccgcaaaug

SEQ ID NO: 1814862 - RNA, 19 nt, Homo sapiens
  misc_RNA (1)...(19): siRNA sense strand
gcagaguacccauucaaac

SEQ ID NO: 1814863 - RNA, 19 nt, Homo sapiens
  misc_RNA (1)...(19): siRNA sense strand
uagcugaagaauacucuaa

SEQ ID NO: 1814864 - RNA, 19 nt, Homo sapiens
  misc_RNA (1)...(19): siRNA sense strand
cugacaacccuccauauga

SEQ ID NO: 1814865 - RNA, 19 nt, Homo sapiens
  misc_RNA (1)...(19): siRNA sense strand
ccgaagaucacauuuaaaa

SEQ ID NO: 1814866 - RNA, 19 nt, Homo sapiens
  misc_RNA (1)...(19): siRNA sense strand
ccucauagcacuggugaau

SEQ ID NO: 1814867 - RNA, 19 nt, Homo sapiens
  misc_RNA (1)...(19): siRNA sense strand
uggcaagggcuuauuguuc

SEQ ID NO: 1814868 - RNA, 19 nt, Homo sapiens
  misc_RNA (1)...(19): siRNA sense strand
cagcagaguacccauucaa

SEQ ID NO: 1814869 - RNA, 19 nt, Homo sapiens
  misc_RNA (1)...(19): siRNA sense strand
ccugacaacccuccauaug

SEQ ID NO: 1814870 - RNA, 19 nt, Homo sapiens
  misc_RNA (1)...(19): siRNA sense strand
ugaugaaggagcuugaaga

SEQ ID NO: 1814871 - RNA, 19 nt, Homo sapiens
  misc_RNA (1)...(19): siRNA sense strand
gaucuaucacccaaacauc

SEQ ID NO: 1814872 - RNA, 19 nt, Homo sapiens
  misc_RNA (1)...(19): siRNA sense strand
acaacccuccauaugauaa

SEQ ID NO: 1814873 - RNA, 19 nt, Homo sapiens
  misc_RNA (1)...(19): siRNA sense strand
caacuuuccagcagaguac

SEQ ID NO: 1814874 - RNA, 19 nt, Homo sapiens
  misc_RNA (1)...(19): siRNA sense strand
uccguaacauccagguuga

SEQ ID NO: 1814875 - RNA, 19 nt, Homo sapiens
  misc_RNA (1)...(19): siRNA sense strand
ucaacuuuccagcagagua

SEQ ID NO: 1814876 - RNA, 19 nt, Homo sapiens
  misc_RNA (1)...(19): siRNA sense strand
ccagcagaguacccauuca

SEQ ID NO: 1814877 - RNA, 19 nt, Homo sapiens
  misc_RNA (1)...(19): siRNA sense strand
caaagaucuaucacccaaa

SEQ ID NO: 1814878 - RNA, 19 nt, Homo sapiens
  misc_RNA (1)...(19): siRNA sense strand
aaagaaauauggggaaaag

SEQ ID NO: 1814879 - RNA, 19 nt, Homo sapiens
  misc_RNA (1)...(19): siRNA sense strand
ucuguaagaaugcugaaga

SEQ ID NO: 1814880 - RNA, 19 nt, Homo sapiens
  misc_RNA (1)...(19): siRNA sense strand
ccauucaaaccaccgaaga

SEQ ID NO: 1814881 - RNA, 19 nt, Homo sapiens
  misc_RNA (1)...(19): siRNA sense strand
gcuugaagaaauccgcaaa

SEQ ID NO: 1814882 - RNA, 19 nt, Homo sapiens
  misc_RNA (1)...(19): siRNA sense strand
ugaaggagcuugaagaaau

SEQ ID NO: 1814883 - RNA, 19 nt, Homo sapiens
  misc_RNA (1)...(19): siRNA sense strand
gcaggaggcugaugaagga

SEQ ID NO: 1814884 - RNA, 19 nt, Homo sapiens
  misc_RNA (1)...(19): siRNA sense strand
gaagaaauccgcaaaugug

SEQ ID NO: 1814885 - RNA, 19 nt, Homo sapiens
  misc_RNA (1)...(19): siRNA sense strand
caccgaagaucacauuuaa

SEQ ID NO: 1814886 - RNA, 19 nt, Homo sapiens
  misc_RNA (1)...(19): siRNA sense strand
gaaggagcuugaagaaauc

SEQ ID NO: 1814887 - RNA, 19 nt, Homo sapiens
  misc_RNA (1)...(19): siRNA sense strand
ugacaacccuccauaugau

SEQ ID NO: 1814888 - RNA, 19 nt, Homo sapiens
  misc_RNA (1)...(19): siRNA sense strand
ccaccgaagaucacauuua

SEQ ID NO: 1814889 - RNA, 19 nt, Homo sapiens
  misc_RNA (1)...(19): siRNA sense strand
gaugaaggagcuugaagaa

SEQ ID NO: 1814890 - RNA, 19 nt, Homo sapiens
  misc_RNA (1)...(19): siRNA sense strand
ccgcaaaugugggaugaaa

SEQ ID NO: 1814891 - RNA, 19 nt, Homo sapiens
  misc_RNA (1)...(19): siRNA sense strand
cagaaucgaaaucaacuuu

SEQ ID NO: 1814892 - RNA, 19 nt, Homo sapiens
  misc_RNA (1)...(19): siRNA sense strand
gacaacccuccauaugaua

SEQ ID NO: 1814893 - RNA, 19 nt, Homo sapiens
  misc_RNA (1)...(19): siRNA sense strand
ugaagaaauccgcaaaugu

SEQ ID NO: 1814894 - RNA, 19 nt, Homo sapiens
  misc_RNA (1)...(19): siRNA sense strand
aaagaucuaucacccaaac

SEQ ID NO: 1814895 - RNA, 19 nt, Homo sapiens
  misc_RNA (1)...(19): siRNA sense strand
ccagguugaugaagcuaau

SEQ ID NO: 1814896 - RNA, 19 nt, Homo sapiens
  misc_RNA (1)...(19): siRNA sense strand
uugaagaaauccgcaaaug

SEQ ID NO: 1814897 - RNA, 19 nt, Homo sapiens
  misc_RNA (1)...(19): siRNA sense strand
gguugaugaagcuaauuua

SEQ ID NO: 1814898 - RNA, 19 nt, Homo sapiens
  misc_RNA (1)...(19): siRNA sense strand
gcagaguacccauucaaac

SEQ ID NO: 1814899 - RNA, 19 nt, Homo sapiens
  misc_RNA (1)...(19): siRNA sense strand
cugacaacccuccauauga

SEQ ID NO: 1814900 - RNA, 19 nt, Homo sapiens
  misc_RNA (1)...(19): siRNA sense strand
ccgaagaucacauuuaaaa

SEQ ID NO: 1814901 - RNA, 19 nt, Homo sapiens
  misc_RNA (1)...(19): siRNA sense strand
uggcaagggcuuauuguuc

SEQ ID NO: 1814902 - RNA, 19 nt, Homo sapiens
  misc_RNA (1)...(19): siRNA sense strand
cagcagaguacccauucaa

SEQ ID NO: 1814903 - RNA, 19 nt, Homo sapiens
  misc_RNA (1)...(19): siRNA sense strand
ccugacaacccuccauaug

SEQ ID NO: 1814904 - RNA, 19 nt, Homo sapiens
  misc_RNA (1)...(19): siRNA sense strand
gaucuaucacccaaacauc

SEQ ID NO: 1814905 - RNA, 19 nt, Homo sapiens
  misc_RNA (1)...(19): siRNA sense strand
ugaugaaggagcuugaaga

SEQ ID NO: 1814906 - RNA, 19 nt, Homo sapiens
  misc_RNA (1)...(19): siRNA sense strand
acaacccuccauaugauaa

SEQ ID NO: 1814907 - RNA, 19 nt, Homo sapiens
  misc_RNA (1)...(19): siRNA sense strand
caacuuuccagcagaguac

SEQ ID NO: 1814908 - RNA, 19 nt, Homo sapiens
  misc_RNA (1)...(19): siRNA sense strand
uccguaacauccagguuga

SEQ ID NO: 1814909 - RNA, 19 nt, Homo sapiens
  misc_RNA (1)...(19): siRNA sense strand
ucaacuuuccagcagagua

SEQ ID NO: 1814910 - RNA, 19 nt, Homo sapiens
  misc_RNA (1)...(19): siRNA sense strand
ccagcagaguacccauuca

SEQ ID NO: 1814911 - RNA, 19 nt, Homo sapiens
  misc_RNA (1)...(19): siRNA sense strand
caaagaucuaucacccaaa

SEQ ID NO: 1814912 - RNA, 19 nt, Homo sapiens
  misc_RNA (1)...(19): siRNA sense strand
ccauucaaaccaccgaaga

SEQ ID NO: 1814913 - RNA, 19 nt, Homo sapiens
  misc_RNA (1)...(19): siRNA sense strand
gcuugaagaaauccgcaaa

SEQ ID NO: 1814914 - RNA, 19 nt, Homo sapiens
  misc_RNA (1)...(19): siRNA sense strand
gaucauagauagucuguuu

SEQ ID NO: 1814915 - RNA, 19 nt, Homo sapiens
  misc_RNA (1)...(19): siRNA sense strand
cagcagaucugaaguauau

SEQ ID NO: 1814916 - RNA, 19 nt, Homo sapiens
  misc_RNA (1)...(19): siRNA sense strand
gaaaguauccgucgcauau

SEQ ID NO: 1814917 - RNA, 19 nt, Homo sapiens
  misc_RNA (1)...(19): siRNA sense strand
gcucauauguguccugaaa

SEQ ID NO: 1814918 - RNA, 19 nt, Homo sapiens
  misc_RNA (1)...(19): siRNA sense strand
gugcacaucuacauauaua

SEQ ID NO: 1814919 - RNA, 19 nt, Homo sapiens
  misc_RNA (1)...(19): siRNA sense strand
gaauuugguuuaucucugu

SEQ ID NO: 1814920 - RNA, 19 nt, Homo sapiens
  misc_RNA (1)...(19): siRNA sense strand
ggacacuggugauacaaga

SEQ ID NO: 1814921 - RNA, 19 nt, Homo sapiens
  misc_RNA (1)...(19): siRNA sense strand
gaaaagauccucaccacua

SEQ ID NO: 1814922 - RNA, 19 nt, Homo sapiens
  misc_RNA (1)...(19): siRNA sense strand
agaaguagcucguuauugg

SEQ ID NO: 1814923 - RNA, 19 nt, Homo sapiens
  misc_RNA (1)...(19): siRNA sense strand
ggaauggaccagagaauug

SEQ ID NO: 1814924 - RNA, 19 nt, Homo sapiens
  misc_RNA (1)...(19): siRNA sense strand
ggacauguuuaaggaauug

SEQ ID NO: 1814925 - RNA, 19 nt, Homo sapiens
  misc_RNA (1)...(19): siRNA sense strand
aacaggagcugauguagaa

SEQ ID NO: 1814926 - RNA, 19 nt, Homo sapiens
  misc_RNA (1)...(19): siRNA sense strand
gaaggugcacaucuacaua

SEQ ID NO: 1814927 - RNA, 19 nt, Homo sapiens
  misc_RNA (1)...(19): siRNA sense strand
caacagcgauuggaaugga

SEQ ID NO: 1814928 - RNA, 19 nt, Homo sapiens
  misc_RNA (1)...(19): siRNA sense strand
gaucugaaguauauugaag

SEQ ID NO: 1814929 - RNA, 19 nt, Homo sapiens
  misc_RNA (1)...(19): siRNA sense strand
caaagagaauuccauaugc

SEQ ID NO: 1814930 - RNA, 19 nt, Homo sapiens
  misc_RNA (1)...(19): siRNA sense strand
agaagcugaucuuguauuu

SEQ ID NO: 1814931 - RNA, 19 nt, Homo sapiens
  misc_RNA (1)...(19): siRNA sense strand
ggugaaauuccgaaguuua

SEQ ID NO: 1814932 - RNA, 19 nt, Homo sapiens
  misc_RNA (1)...(19): siRNA sense strand
cagagaauaagcagcauua

SEQ ID NO: 1814933 - RNA, 19 nt, Homo sapiens
  misc_RNA (1)...(19): siRNA sense strand
cuccuacacuuccuauuua

SEQ ID NO: 1814934 - RNA, 19 nt, Homo sapiens
  misc_RNA (1)...(19): siRNA sense strand
ggacccacauguaguguca

SEQ ID NO: 1814935 - RNA, 19 nt, Homo sapiens
  misc_RNA (1)...(19): siRNA sense strand
ucaaagagaauuccauaug

SEQ ID NO: 1814936 - RNA, 19 nt, Homo sapiens
  misc_RNA (1)...(19): siRNA sense strand
cuucagagcuuuccaaacu

SEQ ID NO: 1814937 - RNA, 19 nt, Homo sapiens
  misc_RNA (1)...(19): siRNA sense strand
gucaaugaaucaagaauca

SEQ ID NO: 1814938 - RNA, 19 nt, Homo sapiens
  misc_RNA (1)...(19): siRNA sense strand
aaacucaaauggguacaaa

SEQ ID NO: 1814939 - RNA, 19 nt, Homo sapiens
  misc_RNA (1)...(19): siRNA sense strand
gcagaucugaaguauauug

SEQ ID NO: 1814940 - RNA, 19 nt, Homo sapiens
  misc_RNA (1)...(19): siRNA sense strand
gaagcugaucuuguauuua

SEQ ID NO: 1814941 - RNA, 19 nt, Homo sapiens
  misc_RNA (1)...(19): siRNA sense strand
uauugaagcuugugcuaga

SEQ ID NO: 1814942 - RNA, 19 nt, Homo sapiens
  misc_RNA (1)...(19): siRNA sense strand
ugucauugcucauaugugu

SEQ ID NO: 1814943 - RNA, 19 nt, Homo sapiens
  misc_RNA (1)...(19): siRNA sense strand
ccagagaauuggaaacaag

SEQ ID NO: 1814944 - RNA, 19 nt, Homo sapiens
  misc_RNA (1)...(19): siRNA sense strand
aaacccaacuugaauuuac

SEQ ID NO: 1814945 - RNA, 19 nt, Homo sapiens
  misc_RNA (1)...(19): siRNA sense strand
ggguaacgguuguugaugu

SEQ ID NO: 1814946 - RNA, 19 nt, Homo sapiens
  misc_RNA (1)...(19): siRNA sense strand
caagauccaccuaacaaga

SEQ ID NO: 1814947 - RNA, 19 nt, Homo sapiens
  misc_RNA (1)...(19): siRNA sense strand
gaaguauauugaagcuugu

SEQ ID NO: 1814948 - RNA, 19 nt, Homo sapiens
  misc_RNA (1)...(19): siRNA sense strand
guagugucauugcucauau

SEQ ID NO: 1814949 - RNA, 19 nt, Homo sapiens
  misc_RNA (1)...(19): siRNA sense strand
ucaaauggguacaaaauug

SEQ ID NO: 1814950 - RNA, 19 nt, Homo sapiens
  misc_RNA (1)...(19): siRNA sense strand
aaaggacacuggugauaca

SEQ ID NO: 1814951 - RNA, 19 nt, Homo sapiens
  misc_RNA (1)...(19): siRNA sense strand
aaagaacccagacagagua

SEQ ID NO: 1814952 - RNA, 19 nt, Homo sapiens
  misc_RNA (1)...(19): siRNA sense strand
aaguauccgucgcauauuu

SEQ ID NO: 1814953 - RNA, 19 nt, Homo sapiens
  misc_RNA (1)...(19): siRNA sense strand
uaaaagaagugguagaauc

SEQ ID NO: 1814954 - RNA, 19 nt, Homo sapiens
  misc_RNA (1)...(19): siRNA sense strand
ugccagaaguagcucguua

SEQ ID NO: 1814955 - RNA, 19 nt, Homo sapiens
  misc_RNA (1)...(19): siRNA sense strand
caacaggagcugauguaga

SEQ ID NO: 1814956 - RNA, 19 nt, Homo sapiens
  misc_RNA (1)...(19): siRNA sense strand
gggcagcagaucugaagua

SEQ ID NO: 1814957 - RNA, 19 nt, Homo sapiens
  misc_RNA (1)...(19): siRNA sense strand
cuacacuuccuauuuauga

SEQ ID NO: 1814958 - RNA, 19 nt, Homo sapiens
  misc_RNA (1)...(19): siRNA sense strand
acaaugaacuacaaaccau

SEQ ID NO: 1814959 - RNA, 19 nt, Homo sapiens
  misc_RNA (1)...(19): siRNA sense strand
gcuccacaaugaacuacaa

SEQ ID NO: 1814960 - RNA, 19 nt, Homo sapiens
  misc_RNA (1)...(19): siRNA sense strand
ccagacagaguacugauug

SEQ ID NO: 1814961 - RNA, 19 nt, Homo sapiens
  misc_RNA (1)...(19): siRNA sense strand
ucugugaggcucugaauuu

SEQ ID NO: 1814962 - RNA, 19 nt, Homo sapiens
  misc_RNA (1)...(19): siRNA sense strand
ccaaaaggauguucugaau

SEQ ID NO: 1814963 - RNA, 19 nt, Homo sapiens
  misc_RNA (1)...(19): siRNA sense strand
cauaagugcucugugugaa

SEQ ID NO: 1814964 - RNA, 19 nt, Homo sapiens
  misc_RNA (1)...(19): siRNA sense strand
ucauauguguccugaaauc

SEQ ID NO: 1814965 - RNA, 19 nt, Homo sapiens
  misc_RNA (1)...(19): siRNA sense strand
ggauccauaugaagcaugu

SEQ ID NO: 1814966 - RNA, 19 nt, Homo sapiens
  misc_RNA (1)...(19): siRNA sense strand
gggacauguuuaaggaauu

SEQ ID NO: 1814967 - RNA, 19 nt, Homo sapiens
  misc_RNA (1)...(19): siRNA sense strand
uaaagaacccagacagagu

SEQ ID NO: 1814968 - RNA, 19 nt, Homo sapiens
  misc_RNA (1)...(19): siRNA sense strand
accauuggcuuccagauug

SEQ ID NO: 1814969 - RNA, 19 nt, Homo sapiens
  misc_RNA (1)...(19): siRNA sense strand
agcauuaacuccauaagug

SEQ ID NO: 1814970 - RNA, 19 nt, Homo sapiens
  misc_RNA (1)...(19): siRNA sense strand
ggcagcagaucugaaguau

SEQ ID NO: 1814971 - RNA, 19 nt, Homo sapiens
  misc_RNA (1)...(19): siRNA sense strand
agaauaagcagcauuaacu

SEQ ID NO: 1814972 - RNA, 19 nt, Homo sapiens
  misc_RNA (1)...(19): siRNA sense strand
aaaagauccucaccacuaa

SEQ ID NO: 1814973 - RNA, 19 nt, Homo sapiens
  misc_RNA (1)...(19): siRNA sense strand
gaaauuccgaaguuuaguc

SEQ ID NO: 1814974 - RNA, 19 nt, Homo sapiens
  misc_RNA (1)...(19): siRNA sense strand
ggaggacccacauguagug

SEQ ID NO: 1814975 - RNA, 19 nt, Homo sapiens
  misc_RNA (1)...(19): siRNA sense strand
gaacccagacagaguacug

SEQ ID NO: 1814976 - RNA, 19 nt, Homo sapiens
  misc_RNA (1)...(19): siRNA sense strand
aagcagcauuaacuccaua

SEQ ID NO: 1814977 - RNA, 19 nt, Homo sapiens
  misc_RNA (1)...(19): siRNA sense strand
ggcccugugugcuguauau

SEQ ID NO: 1814978 - RNA, 19 nt, Homo sapiens
  misc_RNA (1)...(19): siRNA sense strand
gcagcagaucugaaguaua

SEQ ID NO: 1814979 - RNA, 19 nt, Homo sapiens
  misc_RNA (1)...(19): siRNA sense strand
cuggugaaauuccgaaguu

SEQ ID NO: 1814980 - RNA, 19 nt, Homo sapiens
  misc_RNA (1)...(19): siRNA sense strand
guaccuagggaacaaauag

SEQ ID NO: 1814981 - RNA, 19 nt, Homo sapiens
  misc_RNA (1)...(19): siRNA sense strand
gagaauaagcagcauuaac

SEQ ID NO: 1814982 - RNA, 19 nt, Homo sapiens
  misc_RNA (1)...(19): siRNA sense strand
gguaacgguuguugauguc

SEQ ID NO: 1814983 - RNA, 19 nt, Homo sapiens
  misc_RNA (1)...(19): siRNA sense strand
ucuccuacacuuccuauuu

SEQ ID NO: 1814984 - RNA, 19 nt, Homo sapiens
  misc_RNA (1)...(19): siRNA sense strand
cuucaaagagaauuccaua

SEQ ID NO: 1814985 - RNA, 19 nt, Homo sapiens
  misc_RNA (1)...(19): siRNA sense strand
cccaugcuguuguuauuug

SEQ ID NO: 1814986 - RNA, 19 nt, Homo sapiens
  misc_RNA (1)...(19): siRNA sense strand
guggaauucuccuacacuu

SEQ ID NO: 1814987 - RNA, 19 nt, Homo sapiens
  misc_RNA (1)...(19): siRNA sense strand
ccagaaguagcucguuauu

SEQ ID NO: 1814988 - RNA, 19 nt, Homo sapiens
  misc_RNA (1)...(19): siRNA sense strand
gaccagagaauuggaaaca

SEQ ID NO: 1814989 - RNA, 19 nt, Homo sapiens
  misc_RNA (1)...(19): siRNA sense strand
ccacuaauacuuggucuuc

SEQ ID NO: 1814990 - RNA, 19 nt, Homo sapiens
  misc_RNA (1)...(19): siRNA sense strand
ccaccuaacaagaaaccua

SEQ ID NO: 1814991 - RNA, 19 nt, Homo sapiens
  misc_RNA (1)...(19): siRNA sense strand
ccauuggcuuccagauuga

SEQ ID NO: 1814992 - RNA, 19 nt, Homo sapiens
  misc_RNA (1)...(19): siRNA sense strand
caaauaguuguggaucuuu

SEQ ID NO: 1814993 - RNA, 19 nt, Homo sapiens
  misc_RNA (1)...(19): siRNA sense strand
uuaagaagaucuguugcau

SEQ ID NO: 1814994 - RNA, 19 nt, Homo sapiens
  misc_RNA (1)...(19): siRNA sense strand
aaagagaauuccauaugcu

SEQ ID NO: 1814995 - RNA, 19 nt, Homo sapiens
  misc_RNA (1)...(19): siRNA sense strand
ccauaagugcucuguguga

SEQ ID NO: 1814996 - RNA, 19 nt, Homo sapiens
  misc_RNA (1)...(19): siRNA sense strand
uuuccaaacuggcagcaaa

SEQ ID NO: 1814997 - RNA, 19 nt, Homo sapiens
  misc_RNA (1)...(19): siRNA sense strand
aagauccucaccacuaaua

SEQ ID NO: 1814998 - RNA, 19 nt, Homo sapiens
  misc_RNA (1)...(19): siRNA sense strand
gaauaagcagcauuaacuc

SEQ ID NO: 1814999 - RNA, 19 nt, Homo sapiens
  misc_RNA (1)...(19): siRNA sense strand
uuccaaggauccauaugaa

SEQ ID NO: 1815000 - RNA, 19 nt, Homo sapiens
  misc_RNA (1)...(19): siRNA sense strand
gcuagacgcauugugcaaa

SEQ ID NO: 1815001 - RNA, 19 nt, Homo sapiens
  misc_RNA (1)...(19): siRNA sense strand
caccuaacaagaaaccuaa

SEQ ID NO: 1815002 - RNA, 19 nt, Homo sapiens
  misc_RNA (1)...(19): siRNA sense strand
gugaaauuccgaaguuuag

SEQ ID NO: 1815003 - RNA, 19 nt, Homo sapiens
  misc_RNA (1)...(19): siRNA sense strand
ggcagcaggucauagacau

SEQ ID NO: 1815004 - RNA, 19 nt, Homo sapiens
  misc_RNA (1)...(19): siRNA sense strand
aaaggauguucugaauuug

SEQ ID NO: 1815005 - RNA, 19 nt, Homo sapiens
  misc_RNA (1)...(19): siRNA sense strand
cuccauaagugcucugugu

SEQ ID NO: 1815006 - RNA, 19 nt, Homo sapiens
  misc_RNA (1)...(19): siRNA sense strand
caaaacccaacuugaauuu

SEQ ID NO: 1815007 - RNA, 19 nt, Homo sapiens
  misc_RNA (1)...(19): siRNA sense strand
gauguucugaauuugguuu

SEQ ID NO: 1815008 - RNA, 19 nt, Homo sapiens
  misc_RNA (1)...(19): siRNA sense strand
agugggacauguuuaagga

SEQ ID NO: 1815009 - RNA, 19 nt, Homo sapiens
  misc_RNA (1)...(19): siRNA sense strand
guuguuauuugcacugagu

SEQ ID NO: 1815010 - RNA, 19 nt, Homo sapiens
  misc_RNA (1)...(19): siRNA sense strand
aaauaguuguggaucuuuc

SEQ ID NO: 1815011 - RNA, 19 nt, Homo sapiens
  misc_RNA (1)...(19): siRNA sense strand
guuggaggacccacaugua

SEQ ID NO: 1815012 - RNA, 19 nt, Homo sapiens
  misc_RNA (1)...(19): siRNA sense strand
gaauggaccagagaauugg

SEQ ID NO: 1815013 - RNA, 19 nt, Homo sapiens
  misc_RNA (1)...(19): siRNA sense strand
guucugaauuugguuuauc

SEQ ID NO: 1815014 - RNA, 19 nt, Homo sapiens
  misc_RNA (1)...(19): siRNA sense strand
gaagagagcacuagacuaa

SEQ ID NO: 1815015 - RNA, 19 nt, Homo sapiens
  misc_RNA (1)...(19): siRNA sense strand
ggagggaaaugaacaguuu

SEQ ID NO: 1815016 - RNA, 19 nt, Homo sapiens
  misc_RNA (1)...(19): siRNA sense strand
gaagagauguuagguaaau

SEQ ID NO: 1815017 - RNA, 19 nt, Homo sapiens
  misc_RNA (1)...(19): siRNA sense strand
gagcagaguuguaugagaa

SEQ ID NO: 1815018 - RNA, 19 nt, Homo sapiens
  misc_RNA (1)...(19): siRNA sense strand
gagauuaccuaagcaaauu

SEQ ID NO: 1815019 - RNA, 19 nt, Homo sapiens
  misc_RNA (1)...(19): siRNA sense strand
aagaagagauguuagguaa

SEQ ID NO: 1815020 - RNA, 19 nt, Homo sapiens
  misc_RNA (1)...(19): siRNA sense strand
ggacaagguugagaacaaa

SEQ ID NO: 1815021 - RNA, 19 nt, Homo sapiens
  misc_RNA (1)...(19): siRNA sense strand
aagagaagcuuguaugaga

SEQ ID NO: 1815022 - RNA, 19 nt, Homo sapiens
  misc_RNA (1)...(19): siRNA sense strand
gagaacaaaucuaaugaag

SEQ ID NO: 1815023 - RNA, 19 nt, Homo sapiens
  misc_RNA (1)...(19): siRNA sense strand
gaggaucuguuaaaugguu

SEQ ID NO: 1815024 - RNA, 19 nt, Homo sapiens
  misc_RNA (1)...(19): siRNA sense strand
ggagaggucgauucuauuu

SEQ ID NO: 1815025 - RNA, 19 nt, Homo sapiens
  misc_RNA (1)...(19): siRNA sense strand
ggaaaugaacaguuuaaga

SEQ ID NO: 1815026 - RNA, 19 nt, Homo sapiens
  misc_RNA (1)...(19): siRNA sense strand
gaacguaaugaaagacuaa

SEQ ID NO: 1815027 - RNA, 19 nt, Homo sapiens
  misc_RNA (1)...(19): siRNA sense strand
ugaagaacguaaugaaaga

SEQ ID NO: 1815028 - RNA, 19 nt, Homo sapiens
  misc_RNA (1)...(19): siRNA sense strand
gaauuccucugaacuagau

SEQ ID NO: 1815029 - RNA, 19 nt, Homo sapiens
  misc_RNA (1)...(19): siRNA sense strand
ugaacuagaugaagaauac

SEQ ID NO: 1815030 - RNA, 19 nt, Homo sapiens
  misc_RNA (1)...(19): siRNA sense strand
gaugaagaauaccuaauag

SEQ ID NO: 1815031 - RNA, 19 nt, Homo sapiens
  misc_RNA (1)...(19): siRNA sense strand
ugacugcagugccucauuu

SEQ ID NO: 1815032 - RNA, 19 nt, Homo sapiens
  misc_RNA (1)...(19): siRNA sense strand
gcugaaaguucuuauaguc

SEQ ID NO: 1815033 - RNA, 19 nt, Homo sapiens
  misc_RNA (1)...(19): siRNA sense strand
agaaagaaauggccaucaa

SEQ ID NO: 1815034 - RNA, 19 nt, Homo sapiens
  misc_RNA (1)...(19): siRNA sense strand
gaagcugaaaguucuuaua

SEQ ID NO: 1815035 - RNA, 19 nt, Homo sapiens
  misc_RNA (1)...(19): siRNA sense strand
aaggagaggucgauucuau

SEQ ID NO: 1815036 - RNA, 19 nt, Homo sapiens
  misc_RNA (1)...(19): siRNA sense strand
gaugaaacaggacaagaaa

SEQ ID NO: 1815037 - RNA, 19 nt, Homo sapiens
  misc_RNA (1)...(19): siRNA sense strand
gcucguacuccaucaauuu

SEQ ID NO: 1815038 - RNA, 19 nt, Homo sapiens
  misc_RNA (1)...(19): siRNA sense strand
ggagagcagaguuguauga

SEQ ID NO: 1815039 - RNA, 19 nt, Homo sapiens
  misc_RNA (1)...(19): siRNA sense strand
ggaugaaacaggacaagaa

SEQ ID NO: 1815040 - RNA, 19 nt, Homo sapiens
  misc_RNA (1)...(19): siRNA sense strand
gaaagaaauggccaucaau

SEQ ID NO: 1815041 - RNA, 19 nt, Homo sapiens
  misc_RNA (1)...(19): siRNA sense strand
ccucugaacuagaugaaga

SEQ ID NO: 1815042 - RNA, 19 nt, Homo sapiens
  misc_RNA (1)...(19): siRNA sense strand
aaagauccaucaauacauc

SEQ ID NO: 1815043 - RNA, 19 nt, Homo sapiens
  misc_RNA (1)...(19): siRNA sense strand
gaagaggaguguuuucaug

SEQ ID NO: 1815044 - RNA, 19 nt, Homo sapiens
  misc_RNA (1)...(19): siRNA sense strand
gaggagagcagaguuguau

SEQ ID NO: 1815045 - RNA, 19 nt, Homo sapiens
  misc_RNA (1)...(19): siRNA sense strand
gaagaauaccuaauagaac

SEQ ID NO: 1815046 - RNA, 19 nt, Homo sapiens
  misc_RNA (1)...(19): siRNA sense strand
ugaaacaggacaagaaaga

SEQ ID NO: 1815047 - RNA, 19 nt, Homo sapiens
  misc_RNA (1)...(19): siRNA sense strand
uaaaggaggagggaaauga

SEQ ID NO: 1815048 - RNA, 19 nt, Homo sapiens
  misc_RNA (1)...(19): siRNA sense strand
uaaaagaucuugggaacuu

SEQ ID NO: 1815049 - RNA, 19 nt, Homo sapiens
  misc_RNA (1)...(19): siRNA sense strand
guaagcugcucagggauga

SEQ ID NO: 1815050 - RNA, 19 nt, Homo sapiens
  misc_RNA (1)...(19): siRNA sense strand
ggaugaagagaaacagaaa

SEQ ID NO: 1815051 - RNA, 19 nt, Homo sapiens
  misc_RNA (1)...(19): siRNA sense strand
aaacaggacaagaaagaaa

SEQ ID NO: 1815052 - RNA, 19 nt, Homo sapiens
  misc_RNA (1)...(19): siRNA sense strand
gaaacaggacaagaaagaa

SEQ ID NO: 1815053 - RNA, 19 nt, Homo sapiens
  misc_RNA (1)...(19): siRNA sense strand
cggacaagguugagaacaa

SEQ ID NO: 1815054 - RNA, 19 nt, Homo sapiens
  misc_RNA (1)...(19): siRNA sense strand
caugucggaugaagagaaa

SEQ ID NO: 1815055 - RNA, 19 nt, Homo sapiens
  misc_RNA (1)...(19): siRNA sense strand
gaagagaaacagaaaagaa

SEQ ID NO: 1815056 - RNA, 19 nt, Homo sapiens
  misc_RNA (1)...(19): siRNA sense strand
gcaaauugaagaacguaau

SEQ ID NO: 1815057 - RNA, 19 nt, Homo sapiens
  misc_RNA (1)...(19): siRNA sense strand
gguuacagauacucaggaa

SEQ ID NO: 1815058 - RNA, 19 nt, Homo sapiens
  misc_RNA (1)...(19): siRNA sense strand
aaucagcauucccagagua

SEQ ID NO: 1815059 - RNA, 19 nt, Homo sapiens
  misc_RNA (1)...(19): siRNA sense strand
gaaauggccaucaaugacu

SEQ ID NO: 1815060 - RNA, 19 nt, Homo sapiens
  misc_RNA (1)...(19): siRNA sense strand
gagaagcuuguaugagauu

SEQ ID NO: 1815061 - RNA, 19 nt, Homo sapiens
  misc_RNA (1)...(19): siRNA sense strand
gaagagaagagagcacuag

SEQ ID NO: 1815062 - RNA, 19 nt, Homo sapiens
  misc_RNA (1)...(19): siRNA sense strand
agagagcacuagacuaaag

SEQ ID NO: 1815063 - RNA, 19 nt, Homo sapiens
  misc_RNA (1)...(19): siRNA sense strand
aaagaagagauguuaggua

SEQ ID NO: 1815064 - RNA, 19 nt, Homo sapiens
  misc_RNA (1)...(19): siRNA sense strand
cuaaugaagaugugaauuc

SEQ ID NO: 1815065 - RNA, 19 nt, Homo sapiens
  misc_RNA (1)...(19): siRNA sense strand
caaauugaagaacguaaug

SEQ ID NO: 1815066 - RNA, 19 nt, Homo sapiens
  misc_RNA (1)...(19): siRNA sense strand
guuaaaugguuugaagguu

SEQ ID NO: 1815067 - RNA, 19 nt, Homo sapiens
  misc_RNA (1)...(19): siRNA sense strand
gagaagagagcacuagacu

SEQ ID NO: 1815068 - RNA, 19 nt, Homo sapiens
  misc_RNA (1)...(19): siRNA sense strand
gagcggacaagguugagaa

SEQ ID NO: 1815069 - RNA, 19 nt, Homo sapiens
  misc_RNA (1)...(19): siRNA sense strand
gguuugaagguuacagaua

SEQ ID NO: 1815070 - RNA, 19 nt, Homo sapiens
  misc_RNA (1)...(19): siRNA sense strand
guugagaacaaaucuaaug

SEQ ID NO: 1815071 - RNA, 19 nt, Homo sapiens
  misc_RNA (1)...(19): siRNA sense strand
uaaaugguuugaagguuac

SEQ ID NO: 1815072 - RNA, 19 nt, Homo sapiens
  misc_RNA (1)...(19): siRNA sense strand
cuggaagacuauaaaucua

SEQ ID NO: 1815073 - RNA, 19 nt, Homo sapiens
  misc_RNA (1)...(19): siRNA sense strand
aaagaaauggccaucaaug

SEQ ID NO: 1815074 - RNA, 19 nt, Homo sapiens
  misc_RNA (1)...(19): siRNA sense strand
gagggaaaugaacaguuua

SEQ ID NO: 1815075 - RNA, 19 nt, Homo sapiens
  misc_RNA (1)...(19): siRNA sense strand
gaugugaauuccucugaac

SEQ ID NO: 1815076 - RNA, 19 nt, Homo sapiens
  misc_RNA (1)...(19): siRNA sense strand
guuugaagguuacagauac

SEQ ID NO: 1815077 - RNA, 19 nt, Homo sapiens
  misc_RNA (1)...(19): siRNA sense strand
uguaugagauuaccuaagc

SEQ ID NO: 1815078 - RNA, 19 nt, Homo sapiens
  misc_RNA (1)...(19): siRNA sense strand
gcagaguuguaugagaaga

SEQ ID NO: 1815079 - RNA, 19 nt, Homo sapiens
  misc_RNA (1)...(19): siRNA sense strand
aagaaauggccaucaauga

SEQ ID NO: 1815080 - RNA, 19 nt, Homo sapiens
  misc_RNA (1)...(19): siRNA sense strand
gccaggagcggacaagguu

SEQ ID NO: 1815081 - RNA, 19 nt, Homo sapiens
  misc_RNA (1)...(19): siRNA sense strand
ggagaagucagagaacugu

SEQ ID NO: 1815082 - RNA, 19 nt, Homo sapiens
  misc_RNA (1)...(19): siRNA sense strand
augaagcccuggaagacua

SEQ ID NO: 1815083 - RNA, 19 nt, Homo sapiens
  misc_RNA (1)...(19): siRNA sense strand
ugagaagacggacaagcua

SEQ ID NO: 1815084 - RNA, 19 nt, Homo sapiens
  misc_RNA (1)...(19): siRNA sense strand
aaacaugucggaugaagag

SEQ ID NO: 1815085 - RNA, 19 nt, Homo sapiens
  misc_RNA (1)...(19): siRNA sense strand
caucaaugacugcagcaaa

SEQ ID NO: 1815086 - RNA, 19 nt, Homo sapiens
  misc_RNA (1)...(19): siRNA sense strand
gugaauuccucugaacuag

SEQ ID NO: 1815087 - RNA, 19 nt, Homo sapiens
  misc_RNA (1)...(19): siRNA sense strand
caauuaaaccccagcuaua

SEQ ID NO: 1815088 - RNA, 19 nt, Homo sapiens
  misc_RNA (1)...(19): siRNA sense strand
agaacguaaugaaagacua

SEQ ID NO: 1815089 - RNA, 19 nt, Homo sapiens
  misc_RNA (1)...(19): siRNA sense strand
ugagauuaccuaagcaaau

SEQ ID NO: 1815090 - RNA, 19 nt, Homo sapiens
  misc_RNA (1)...(19): siRNA sense strand
caauacaucaagcaagaga

SEQ ID NO: 1815091 - RNA, 19 nt, Homo sapiens
  misc_RNA (1)...(19): siRNA sense strand
gacuaaaggaggagggaaa

SEQ ID NO: 1815092 - RNA, 19 nt, Homo sapiens
  misc_RNA (1)...(19): siRNA sense strand
agacggacaagcuagauga

SEQ ID NO: 1815093 - RNA, 19 nt, Homo sapiens
  misc_RNA (1)...(19): siRNA sense strand
ucaaauagagcugcagcaa

SEQ ID NO: 1815094 - RNA, 19 nt, Homo sapiens
  misc_RNA (1)...(19): siRNA sense strand
ucuguuaaaugguuugaag

SEQ ID NO: 1815095 - RNA, 19 nt, Homo sapiens
  misc_RNA (1)...(19): siRNA sense strand
uaagcaaauugaagaacgu

SEQ ID NO: 1815096 - RNA, 19 nt, Homo sapiens
  misc_RNA (1)...(19): siRNA sense strand
aucaauacaucaagcaaga

SEQ ID NO: 1815097 - RNA, 19 nt, Homo sapiens
  misc_RNA (1)...(19): siRNA sense strand
gaagacggacaagcuagau

SEQ ID NO: 1815098 - RNA, 19 nt, Homo sapiens
  misc_RNA (1)...(19): siRNA sense strand
uaccuaagcaaauugaaga

SEQ ID NO: 1815099 - RNA, 19 nt, Homo sapiens
  misc_RNA (1)...(19): siRNA sense strand
uagaugaagcccuggaaga

SEQ ID NO: 1815100 - RNA, 19 nt, Homo sapiens
  misc_RNA (1)...(19): siRNA sense strand
ccuggaagacuauaaaucu

SEQ ID NO: 1815101 - RNA, 19 nt, Homo sapiens
  misc_RNA (1)...(19): siRNA sense strand
agaagcuuguaugagauua

SEQ ID NO: 1815102 - RNA, 19 nt, Homo sapiens
  misc_RNA (1)...(19): siRNA sense strand
agagaagcuuguaugagau

SEQ ID NO: 1815103 - RNA, 19 nt, Homo sapiens
  misc_RNA (1)...(19): siRNA sense strand
ugacugcagcaaagcaauu

SEQ ID NO: 1815104 - RNA, 19 nt, Homo sapiens
  misc_RNA (1)...(19): siRNA sense strand
gauuaccuaagcaaauuga

SEQ ID NO: 1815105 - RNA, 19 nt, Homo sapiens
  misc_RNA (1)...(19): siRNA sense strand
agagcagaguuguaugaga

SEQ ID NO: 1815106 - RNA, 19 nt, Homo sapiens
  misc_RNA (1)...(19): siRNA sense strand
aaaggaggagggaaaugaa

SEQ ID NO: 1815107 - RNA, 19 nt, Homo sapiens
  misc_RNA (1)...(19): siRNA sense strand
ggucgauucuauuuucaaa

SEQ ID NO: 1815108 - RNA, 19 nt, Homo sapiens
  misc_RNA (1)...(19): siRNA sense strand
aagcugaaaguucuuauag

SEQ ID NO: 1815109 - RNA, 19 nt, Homo sapiens
  misc_RNA (1)...(19): siRNA sense strand
ugugaauuccucugaacua

SEQ ID NO: 1815110 - RNA, 19 nt, Homo sapiens
  misc_RNA (1)...(19): siRNA sense strand
gcuuguaugagauuaccua

SEQ ID NO: 1815111 - RNA, 19 nt, Homo sapiens
  misc_RNA (1)...(19): siRNA sense strand
uaaugaagaugugaauucc

SEQ ID NO: 1815112 - RNA, 19 nt, Homo sapiens
  misc_RNA (1)...(19): siRNA sense strand
cuagaugaagaauaccuaa

SEQ ID NO: 1815113 - RNA, 19 nt, Homo sapiens
  misc_RNA (1)...(19): siRNA sense strand
agaugugaauuccucugaa

SEQ ID NO: 1815114 - RNA, 19 nt, Homo sapiens
  misc_RNA (1)...(19): siRNA sense strand
gaaacuagaugaugcaaua

SEQ ID NO: 1815115 - RNA, 19 nt, Homo sapiens
  misc_RNA (1)...(19): siRNA sense strand
caagaaagcuuaucggaaa

SEQ ID NO: 1815116 - RNA, 19 nt, Homo sapiens
  misc_RNA (1)...(19): siRNA sense strand
ggaaggaaauuacaaacua

SEQ ID NO: 1815117 - RNA, 19 nt, Homo sapiens
  misc_RNA (1)...(19): siRNA sense strand
gaaagaagaugggaauaaa

SEQ ID NO: 1815118 - RNA, 19 nt, Homo sapiens
  misc_RNA (1)...(19): siRNA sense strand
ccaaagcacucaaagcaaa

SEQ ID NO: 1815119 - RNA, 19 nt, Homo sapiens
  misc_RNA (1)...(19): siRNA sense strand
caacaagaguucaagaaug

SEQ ID NO: 1815120 - RNA, 19 nt, Homo sapiens
  misc_RNA (1)...(19): siRNA sense strand
gaggaaagauuacuacaag

SEQ ID NO: 1815121 - RNA, 19 nt, Homo sapiens
  misc_RNA (1)...(19): siRNA sense strand
gaacacaaacagcuccuaa

SEQ ID NO: 1815122 - RNA, 19 nt, Homo sapiens
  misc_RNA (1)...(19): siRNA sense strand
cuaaugcagucauggaaua

SEQ ID NO: 1815123 - RNA, 19 nt, Homo sapiens
  misc_RNA (1)...(19): siRNA sense strand
gcaugaauaugggugauuu

SEQ ID NO: 1815124 - RNA, 19 nt, Homo sapiens
  misc_RNA (1)...(19): siRNA sense strand
gagaagagcucaguguuac

SEQ ID NO: 1815125 - RNA, 19 nt, Homo sapiens
  misc_RNA (1)...(19): siRNA sense strand
caaaugcagugaagcuuga

SEQ ID NO: 1815126 - RNA, 19 nt, Homo sapiens
  misc_RNA (1)...(19): siRNA sense strand
gaaggaaauuacaaacuag

SEQ ID NO: 1815127 - RNA, 19 nt, Homo sapiens
  misc_RNA (1)...(19): siRNA sense strand
gcuaaacucuacuguaauc

SEQ ID NO: 1815128 - RNA, 19 nt, Homo sapiens
  misc_RNA (1)...(19): siRNA sense strand
ggaccgugcccuagaauuu

SEQ ID NO: 1815129 - RNA, 19 nt, Homo sapiens
  misc_RNA (1)...(19): siRNA sense strand
acaaggaaaugcauacuau

SEQ ID NO: 1815130 - RNA, 19 nt, Homo sapiens
  misc_RNA (1)...(19): siRNA sense strand
gaacugaagaagaguaaga

SEQ ID NO: 1815131 - RNA, 19 nt, Homo sapiens
  misc_RNA (1)...(19): siRNA sense strand
gaagaagaguaagaggaaa

SEQ ID NO: 1815132 - RNA, 19 nt, Homo sapiens
  misc_RNA (1)...(19): siRNA sense strand
ccaagaaagauuacaauga

SEQ ID NO: 1815133 - RNA, 19 nt, Homo sapiens
  misc_RNA (1)...(19): siRNA sense strand
agaguaagaggaaagauua

SEQ ID NO: 1815134 - RNA, 19 nt, Homo sapiens
  misc_RNA (1)...(19): siRNA sense strand
ggagaggccuuuacuaucc

SEQ ID NO: 1815135 - RNA, 19 nt, Homo sapiens
  misc_RNA (1)...(19): siRNA sense strand
gaaaauagcagaaacagau

SEQ ID NO: 1815136 - RNA, 19 nt, Homo sapiens
  misc_RNA (1)...(19): siRNA sense strand
augcuaaacucuacuguaa

SEQ ID NO: 1815137 - RNA, 19 nt, Homo sapiens
  misc_RNA (1)...(19): siRNA sense strand
ccucaaggcagaauguuua

SEQ ID NO: 1815138 - RNA, 19 nt, Homo sapiens
  misc_RNA (1)...(19): siRNA sense strand
ugagaaggcaguucaguuu

SEQ ID NO: 1815139 - RNA, 19 nt, Homo sapiens
  misc_RNA (1)...(19): siRNA sense strand
ggaaagauuacuacaagau

SEQ ID NO: 1815140 - RNA, 19 nt, Homo sapiens
  misc_RNA (1)...(19): siRNA sense strand
cccuagaacuggaucauaa

SEQ ID NO: 1815141 - RNA, 19 nt, Homo sapiens
  misc_RNA (1)...(19): siRNA sense strand
ggcagaauguuuagcaaug

SEQ ID NO: 1815142 - RNA, 19 nt, Homo sapiens
  misc_RNA (1)...(19): siRNA sense strand
aaugcuagcuauuauggua

SEQ ID NO: 1815143 - RNA, 19 nt, Homo sapiens
  misc_RNA (1)...(19): siRNA sense strand
auagaagacugcacaaaug

SEQ ID NO: 1815144 - RNA, 19 nt, Homo sapiens
  misc_RNA (1)...(19): siRNA sense strand
caaacuagcauaugaacug

SEQ ID NO: 1815145 - RNA, 19 nt, Homo sapiens
  misc_RNA (1)...(19): siRNA sense strand
ccagagagcccuagaacug

SEQ ID NO: 1815146 - RNA, 19 nt, Homo sapiens
  misc_RNA (1)...(19): siRNA sense strand
acacagaacaguaugaaga

SEQ ID NO: 1815147 - RNA, 19 nt, Homo sapiens
  misc_RNA (1)...(19): siRNA sense strand
gaugaggagggcaugaaua

SEQ ID NO: 1815148 - RNA, 19 nt, Homo sapiens
  misc_RNA (1)...(19): siRNA sense strand
uuacgaagauuguauugag

SEQ ID NO: 1815149 - RNA, 19 nt, Homo sapiens
  misc_RNA (1)...(19): siRNA sense strand
agaagaaguucaaggaagu

SEQ ID NO: 1815150 - RNA, 19 nt, Homo sapiens
  misc_RNA (1)...(19): siRNA sense strand
ggacacagaacaguaugaa

SEQ ID NO: 1815151 - RNA, 19 nt, Homo sapiens
  misc_RNA (1)...(19): siRNA sense strand
guacgaggucuuugccuuu

SEQ ID NO: 1815152 - RNA, 19 nt, Homo sapiens
  misc_RNA (1)...(19): siRNA sense strand
ggagaagaaguucaaggaa

SEQ ID NO: 1815153 - RNA, 19 nt, Homo sapiens
  misc_RNA (1)...(19): siRNA sense strand
ugaagaagaguaagaggaa

SEQ ID NO: 1815154 - RNA, 19 nt, Homo sapiens
  misc_RNA (1)...(19): siRNA sense strand
agaaagaagaugggaauaa

SEQ ID NO: 1815155 - RNA, 19 nt, Homo sapiens
  misc_RNA (1)...(19): siRNA sense strand
cgaggucuuugccuuuauu

SEQ ID NO: 1815156 - RNA, 19 nt, Homo sapiens
  misc_RNA (1)...(19): siRNA sense strand
gaggagggcaugaauaugg

SEQ ID NO: 1815157 - RNA, 19 nt, Homo sapiens
  misc_RNA (1)...(19): siRNA sense strand
gcacaacaagaguucaaga

SEQ ID NO: 1815158 - RNA, 19 nt, Homo sapiens
  misc_RNA (1)...(19): siRNA sense strand
gaauaugggugauuuugau

SEQ ID NO: 1815159 - RNA, 19 nt, Homo sapiens
  misc_RNA (1)...(19): siRNA sense strand
gaaguuggagaggccuuua

SEQ ID NO: 1815160 - RNA, 19 nt, Homo sapiens
  misc_RNA (1)...(19): siRNA sense strand
uacgaggucuuugccuuua

SEQ ID NO: 1815161 - RNA, 19 nt, Homo sapiens
  misc_RNA (1)...(19): siRNA sense strand
ggauagaccccaacaauau

SEQ ID NO: 1815162 - RNA, 19 nt, Homo sapiens
  misc_RNA (1)...(19): siRNA sense strand
gcaguacgagacuaugaaa

SEQ ID NO: 1815163 - RNA, 19 nt, Homo sapiens
  misc_RNA (1)...(19): siRNA sense strand
aagcagagacuuucaagga

SEQ ID NO: 1815164 - RNA, 19 nt, Homo sapiens
  misc_RNA (1)...(19): siRNA sense strand
ccgggaagcucuuggagau

SEQ ID NO: 1815165 - RNA, 19 nt, Homo sapiens
  misc_RNA (1)...(19): siRNA sense strand
gaagcuugaugacacuuac

SEQ ID NO: 1815166 - RNA, 19 nt, Homo sapiens
  misc_RNA (1)...(19): siRNA sense strand
gaaugcuaaugcagucaug

SEQ ID NO: 1815167 - RNA, 19 nt, Homo sapiens
  misc_RNA (1)...(19): siRNA sense strand
cauaaaagccuacuugaga

SEQ ID NO: 1815168 - RNA, 19 nt, Homo sapiens
  misc_RNA (1)...(19): siRNA sense strand
acgguuaauuccaagcuua

SEQ ID NO: 1815169 - RNA, 19 nt, Homo sapiens
  misc_RNA (1)...(19): siRNA sense strand
gagguuggaugacaguuuu

SEQ ID NO: 1815170 - RNA, 19 nt, Homo sapiens
  misc_RNA (1)...(19): siRNA sense strand
gaaguucaaggaaguugga

SEQ ID NO: 1815171 - RNA, 19 nt, Homo sapiens
  misc_RNA (1)...(19): siRNA sense strand
agaaggaggaggagaagaa

SEQ ID NO: 1815172 - RNA, 19 nt, Homo sapiens
  misc_RNA (1)...(19): siRNA sense strand
gcacaaaugcagugaagcu

SEQ ID NO: 1815173 - RNA, 19 nt, Homo sapiens
  misc_RNA (1)...(19): siRNA sense strand
aaagaaagaagaugggaau

SEQ ID NO: 1815174 - RNA, 19 nt, Homo sapiens
  misc_RNA (1)...(19): siRNA sense strand
guucaagaaugcuaaugca

SEQ ID NO: 1815175 - RNA, 19 nt, Homo sapiens
  misc_RNA (1)...(19): siRNA sense strand
gcuagugacauucuacgaa

SEQ ID NO: 1815176 - RNA, 19 nt, Homo sapiens
  misc_RNA (1)...(19): siRNA sense strand
gaagagcucaguguuacau

SEQ ID NO: 1815177 - RNA, 19 nt, Homo sapiens
  misc_RNA (1)...(19): siRNA sense strand
cauggaccgugcccuagaa

SEQ ID NO: 1815178 - RNA, 19 nt, Homo sapiens
  misc_RNA (1)...(19): siRNA sense strand
gaagaaguucaaggaaguu

SEQ ID NO: 1815179 - RNA, 19 nt, Homo sapiens
  misc_RNA (1)...(19): siRNA sense strand
gaagaugggaauaaagcau

SEQ ID NO: 1815180 - RNA, 19 nt, Homo sapiens
  misc_RNA (1)...(19): siRNA sense strand
ucaaagcaaagaaagaaga

SEQ ID NO: 1815181 - RNA, 19 nt, Homo sapiens
  misc_RNA (1)...(19): siRNA sense strand
ucagugagguuggaugaca

SEQ ID NO: 1815182 - RNA, 19 nt, Homo sapiens
  misc_RNA (1)...(19): siRNA sense strand
ggaaacgggccuugaugca

SEQ ID NO: 1815183 - RNA, 19 nt, Homo sapiens
  misc_RNA (1)...(19): siRNA sense strand
gaagagggaagcagagacu

SEQ ID NO: 1815184 - RNA, 19 nt, Homo sapiens
  misc_RNA (1)...(19): siRNA sense strand
aauagaagacugcacaaau

SEQ ID NO: 1815185 - RNA, 19 nt, Homo sapiens
  misc_RNA (1)...(19): siRNA sense strand
acuagaugaugcaauagaa

SEQ ID NO: 1815186 - RNA, 19 nt, Homo sapiens
  misc_RNA (1)...(19): siRNA sense strand
gcagaauguuuagcaaugc

SEQ ID NO: 1815187 - RNA, 19 nt, Homo sapiens
  misc_RNA (1)...(19): siRNA sense strand
aacaagaguucaagaaugc

SEQ ID NO: 1815188 - RNA, 19 nt, Homo sapiens
  misc_RNA (1)...(19): siRNA sense strand
agaugggaauaaagcauuu

SEQ ID NO: 1815189 - RNA, 19 nt, Homo sapiens
  misc_RNA (1)...(19): siRNA sense strand
gcacucaaagcaaagaaag

SEQ ID NO: 1815190 - RNA, 19 nt, Homo sapiens
  misc_RNA (1)...(19): siRNA sense strand
cugcagaaaugccaaagca

SEQ ID NO: 1815191 - RNA, 19 nt, Homo sapiens
  misc_RNA (1)...(19): siRNA sense strand
gcaagugccaccucucucu

SEQ ID NO: 1815192 - RNA, 19 nt, Homo sapiens
  misc_RNA (1)...(19): siRNA sense strand
gagcagccaccuugaugau

SEQ ID NO: 1815193 - RNA, 19 nt, Homo sapiens
  misc_RNA (1)...(19): siRNA sense strand
caagaguucaagaaugcua

SEQ ID NO: 1815194 - RNA, 19 nt, Homo sapiens
  misc_RNA (1)...(19): siRNA sense strand
gauccaaacaauaucuuca

SEQ ID NO: 1815195 - RNA, 19 nt, Homo sapiens
  misc_RNA (1)...(19): siRNA sense strand
caauagaagacugcacaaa

SEQ ID NO: 1815196 - RNA, 19 nt, Homo sapiens
  misc_RNA (1)...(19): siRNA sense strand
gauagaccccaacaauaua

SEQ ID NO: 1815197 - RNA, 19 nt, Homo sapiens
  misc_RNA (1)...(19): siRNA sense strand
ggaacaaggaaaugcauac

SEQ ID NO: 1815198 - RNA, 19 nt, Homo sapiens
  misc_RNA (1)...(19): siRNA sense strand
uaucuucaaggcauucuuu

SEQ ID NO: 1815199 - RNA, 19 nt, Homo sapiens
  misc_RNA (1)...(19): siRNA sense strand
ggaagcagagacuuucaag

SEQ ID NO: 1815200 - RNA, 19 nt, Homo sapiens
  misc_RNA (1)...(19): siRNA sense strand
gaagaagcaguacgagacu

SEQ ID NO: 1815201 - RNA, 19 nt, Homo sapiens
  misc_RNA (1)...(19): siRNA sense strand
cuugaugacacuuacauaa

SEQ ID NO: 1815202 - RNA, 19 nt, Homo sapiens
  misc_RNA (1)...(19): siRNA sense strand
aaacuagcauaugaacugu

SEQ ID NO: 1815203 - RNA, 19 nt, Homo sapiens
  misc_RNA (1)...(19): siRNA sense strand
gcaaugcugggucguuauc

SEQ ID NO: 1815204 - RNA, 19 nt, Homo sapiens
  misc_RNA (1)...(19): siRNA sense strand
gcauggaccgugcccuaga

SEQ ID NO: 1815205 - RNA, 19 nt, Homo sapiens
  misc_RNA (1)...(19): siRNA sense strand
ccucucugaucccaagaaa

SEQ ID NO: 1815206 - RNA, 19 nt, Homo sapiens
  misc_RNA (1)...(19): siRNA sense strand
cacagaacaguaugaagaa

SEQ ID NO: 1815207 - RNA, 19 nt, Homo sapiens
  misc_RNA (1)...(19): siRNA sense strand
gcagugaagcuugaugaca

SEQ ID NO: 1815208 - RNA, 19 nt, Homo sapiens
  misc_RNA (1)...(19): siRNA sense strand
cagagacuuucaaggaaca

SEQ ID NO: 1815209 - RNA, 19 nt, Homo sapiens
  misc_RNA (1)...(19): siRNA sense strand
gggauagaccccaacaaua

SEQ ID NO: 1815210 - RNA, 19 nt, Homo sapiens
  misc_RNA (1)...(19): siRNA sense strand
ggaaauuacaaacuagcau

SEQ ID NO: 1815211 - RNA, 19 nt, Homo sapiens
  misc_RNA (1)...(19): siRNA sense strand
caaagcaaagaaagaagau

SEQ ID NO: 1815212 - RNA, 19 nt, Homo sapiens
  misc_RNA (1)...(19): siRNA sense strand
caaggcagaauguuuagca

SEQ ID NO: 1815213 - RNA, 19 nt, Homo sapiens
  misc_RNA (1)...(19): siRNA sense strand
gaccgugcccuagaauuug

SEQ ID NO: 1815214 - RNA, 19 nt, Homo sapiens
  misc_RNA (1)...(19): siRNA sense strand
gaaggacaguuauauugaa

SEQ ID NO: 1815215 - RNA, 19 nt, Homo sapiens
  misc_RNA (1)...(19): siRNA sense strand
ggacaguuauauugaaguu

SEQ ID NO: 1815216 - RNA, 19 nt, Homo sapiens
  misc_RNA (1)...(19): siRNA sense strand
gaaguucucuugccuuugg

SEQ ID NO: 1815217 - RNA, 19 nt, Homo sapiens
  misc_RNA (1)...(19): siRNA sense strand
uuacagcccugguggauaa

SEQ ID NO: 1815218 - RNA, 19 nt, Homo sapiens
  misc_RNA (1)...(19): siRNA sense strand
ggagaaugaaggacaguua

SEQ ID NO: 1815219 - RNA, 19 nt, Homo sapiens
  misc_RNA (1)...(19): siRNA sense strand
gccaagaugucuccuuuau

SEQ ID NO: 1815220 - RNA, 19 nt, Homo sapiens
  misc_RNA (1)...(19): siRNA sense strand
caagaugucuccuuuaucg

SEQ ID NO: 1815221 - RNA, 19 nt, Homo sapiens
  misc_RNA (1)...(19): siRNA sense strand
gcucauugcucuuucuuuc

SEQ ID NO: 1815222 - RNA, 19 nt, Homo sapiens
  misc_RNA (1)...(19): siRNA sense strand
ugggaguucuuauuuguua

SEQ ID NO: 1815223 - RNA, 19 nt, Homo sapiens
  misc_RNA (1)...(19): siRNA sense strand
gagaguccauguuguacuu

SEQ ID NO: 1815224 - RNA, 19 nt, Homo sapiens
  misc_RNA (1)...(19): siRNA sense strand
gaagugaagaugcaaaugu

SEQ ID NO: 1815225 - RNA, 19 nt, Homo sapiens
  misc_RNA (1)...(19): siRNA sense strand
gaggagcucuuuagacaag

SEQ ID NO: 1815226 - RNA, 19 nt, Homo sapiens
  misc_RNA (1)...(19): siRNA sense strand
ccaguuacauggugaugaa

SEQ ID NO: 1815227 - RNA, 19 nt, Homo sapiens
  misc_RNA (1)...(19): siRNA sense strand
gaugucuccuuuaucgaua

SEQ ID NO: 1815228 - RNA, 19 nt, Homo sapiens
  misc_RNA (1)...(19): siRNA sense strand
cugaagaguuuggaaauuu

SEQ ID NO: 1815229 - RNA, 19 nt, Homo sapiens
  misc_RNA (1)...(19): siRNA sense strand
gggcagugagccugaauua

SEQ ID NO: 1815230 - RNA, 19 nt, Homo sapiens
  misc_RNA (1)...(19): siRNA sense strand
ggauaagauugauaugugu

SEQ ID NO: 1815231 - RNA, 19 nt, Homo sapiens
  misc_RNA (1)...(19): siRNA sense strand
gagaaauauuugacuguuc

SEQ ID NO: 1815232 - RNA, 19 nt, Homo sapiens
  misc_RNA (1)...(19): siRNA sense strand
guuacauggugaugaauuu

SEQ ID NO: 1815233 - RNA, 19 nt, Homo sapiens
  misc_RNA (1)...(19): siRNA sense strand
gcccagaacaggacauuaa

SEQ ID NO: 1815234 - RNA, 19 nt, Homo sapiens
  misc_RNA (1)...(19): siRNA sense strand
gaaugaaggacaguuauau

SEQ ID NO: 1815235 - RNA, 19 nt, Homo sapiens
  misc_RNA (1)...(19): siRNA sense strand
ugaagaguuuggaaauuug

SEQ ID NO: 1815236 - RNA, 19 nt, Homo sapiens
  misc_RNA (1)...(19): siRNA sense strand
gaggaaggcauaugaacuu

SEQ ID NO: 1815237 - RNA, 19 nt, Homo sapiens
  misc_RNA (1)...(19): siRNA sense strand
gaucuuuggugguuuccuu

SEQ ID NO: 1815238 - RNA, 19 nt, Homo sapiens
  misc_RNA (1)...(19): siRNA sense strand
ggaagaaaggaaauuacuu

SEQ ID NO: 1815239 - RNA, 19 nt, Homo sapiens
  misc_RNA (1)...(19): siRNA sense strand
gaacuugcgugggcuacug

SEQ ID NO: 1815240 - RNA, 19 nt, Homo sapiens
  misc_RNA (1)...(19): siRNA sense strand
uggauaagauugauaugug

SEQ ID NO: 1815241 - RNA, 19 nt, Homo sapiens
  misc_RNA (1)...(19): siRNA sense strand
gagccugaauuacgagaga

SEQ ID NO: 1815242 - RNA, 19 nt, Homo sapiens
  misc_RNA (1)...(19): siRNA sense strand
ccgccaagaugucuccuuu

SEQ ID NO: 1815243 - RNA, 19 nt, Homo sapiens
  misc_RNA (1)...(19): siRNA sense strand
gcuuguagcuuuggugguu

SEQ ID NO: 1815244 - RNA, 19 nt, Homo sapiens
  misc_RNA (1)...(19): siRNA sense strand
gagaggaccaccauacaug

SEQ ID NO: 1815245 - RNA, 19 nt, Homo sapiens
  misc_RNA (1)...(19): siRNA sense strand
uaaguucaguggccauguu

SEQ ID NO: 1815246 - RNA, 19 nt, Homo sapiens
  misc_RNA (1)...(19): siRNA sense strand
cguaagauuuggcaggauu

SEQ ID NO: 1815247 - RNA, 19 nt, Homo sapiens
  misc_RNA (1)...(19): siRNA sense strand
cagguaugcuuuacucaga

SEQ ID NO: 1815248 - RNA, 19 nt, Homo sapiens
  misc_RNA (1)...(19): siRNA sense strand
gcaggauucuugaggaucu

SEQ ID NO: 1815249 - RNA, 19 nt, Homo sapiens
  misc_RNA (1)...(19): siRNA sense strand
ugaaggacaguuauauuga

SEQ ID NO: 1815250 - RNA, 19 nt, Homo sapiens
  misc_RNA (1)...(19): siRNA sense strand
gauccaaagacuauaaguu

SEQ ID NO: 1815251 - RNA, 19 nt, Homo sapiens
  misc_RNA (1)...(19): siRNA sense strand
agacauccauggaagugaa

SEQ ID NO: 1815252 - RNA, 19 nt, Homo sapiens
  misc_RNA (1)...(19): siRNA sense strand
cagaacaggacauuaaguu

SEQ ID NO: 1815253 - RNA, 19 nt, Homo sapiens
  misc_RNA (1)...(19): siRNA sense strand
gagauaaguugcgggagau

SEQ ID NO: 1815254 - RNA, 19 nt, Homo sapiens
  misc_RNA (1)...(19): siRNA sense strand
gaugcaaauguuccaguua

SEQ ID NO: 1815255 - RNA, 19 nt, Homo sapiens
  misc_RNA (1)...(19): siRNA sense strand
gaagacauccauggaagug

SEQ ID NO: 1815256 - RNA, 19 nt, Homo sapiens
  misc_RNA (1)...(19): siRNA sense strand
ucacagguaugcuuuacuc

SEQ ID NO: 1815257 - RNA, 19 nt, Homo sapiens
  misc_RNA (1)...(19): siRNA sense strand
gcagugagccugaauuacg

SEQ ID NO: 1815258 - RNA, 19 nt, Homo sapiens
  misc_RNA (1)...(19): siRNA sense strand
aaagaagugccauugguuu

SEQ ID NO: 1815259 - RNA, 19 nt, Homo sapiens
  misc_RNA (1)...(19): siRNA sense strand
gagaaugaaggacaguuau

SEQ ID NO: 1815260 - RNA, 19 nt, Homo sapiens
  misc_RNA (1)...(19): siRNA sense strand
gcuugggaguucuuauuug

SEQ ID NO: 1815261 - RNA, 19 nt, Homo sapiens
  misc_RNA (1)...(19): siRNA sense strand
gcacccugcguucgagaua

SEQ ID NO: 1815262 - RNA, 19 nt, Homo sapiens
  misc_RNA (1)...(19): siRNA sense strand
ucauugcucuuucuuucuu

SEQ ID NO: 1815263 - RNA, 19 nt, Homo sapiens
  misc_RNA (1)...(19): siRNA sense strand
aaucggaucuuuggugguu

SEQ ID NO: 1815264 - RNA, 19 nt, Homo sapiens
  misc_RNA (1)...(19): siRNA sense strand
caguguggauggagaauuc

SEQ ID NO: 1815265 - RNA, 19 nt, Homo sapiens
  misc_RNA (1)...(19): siRNA sense strand
ucagcacacuggauccaaa

SEQ ID NO: 1815266 - RNA, 19 nt, Homo sapiens
  misc_RNA (1)...(19): siRNA sense strand
cauaguuucuuggcuaaau

SEQ ID NO: 1815267 - RNA, 19 nt, Homo sapiens
  misc_RNA (1)...(19): siRNA sense strand
gcccagcgaccuugagaaa

SEQ ID NO: 1815268 - RNA, 19 nt, Homo sapiens
  misc_RNA (1)...(19): siRNA sense strand
ugaaggcaauggaagaaag

SEQ ID NO: 1815269 - RNA, 19 nt, Homo sapiens
  misc_RNA (1)...(19): siRNA sense strand
aagugaagaugcaaauguu

SEQ ID NO: 1815270 - RNA, 19 nt, Homo sapiens
  misc_RNA (1)...(19): siRNA sense strand
ucuccuuuaucgauaguua

SEQ ID NO: 1815271 - RNA, 19 nt, Homo sapiens
  misc_RNA (1)...(19): siRNA sense strand
agaaugaaggacaguuaua

SEQ ID NO: 1815272 - RNA, 19 nt, Homo sapiens
  misc_RNA (1)...(19): siRNA sense strand
ggaccaccauacaugagau

SEQ ID NO: 1815273 - RNA, 19 nt, Homo sapiens
  misc_RNA (1)...(19): siRNA sense strand
gagaccaugugaaggcaau

SEQ ID NO: 1815274 - RNA, 19 nt, Homo sapiens
  misc_RNA (1)...(19): siRNA sense strand
ucaaaacaccguaagauuu

SEQ ID NO: 1815275 - RNA, 19 nt, Homo sapiens
  misc_RNA (1)...(19): siRNA sense strand
uugaaguucucuugccuuu

SEQ ID NO: 1815276 - RNA, 19 nt, Homo sapiens
  misc_RNA (1)...(19): siRNA sense strand
gagagaaauauuugacugu

SEQ ID NO: 1815277 - RNA, 19 nt, Homo sapiens
  misc_RNA (1)...(19): siRNA sense strand
guaggagcauccacaaacu

SEQ ID NO: 1815278 - RNA, 19 nt, Homo sapiens
  misc_RNA (1)...(19): siRNA sense strand
ggagaggaccaccauacau

SEQ ID NO: 1815279 - RNA, 19 nt, Homo sapiens
  misc_RNA (1)...(19): siRNA sense strand
guaaugguggcucgugauu

SEQ ID NO: 1815280 - RNA, 19 nt, Homo sapiens
  misc_RNA (1)...(19): siRNA sense strand
gaacaaggggagaagaauu

SEQ ID NO: 1815281 - RNA, 19 nt, Homo sapiens
  misc_RNA (1)...(19): siRNA sense strand
uugaggaucuugacagcuu

SEQ ID NO: 1815282 - RNA, 19 nt, Homo sapiens
  misc_RNA (1)...(19): siRNA sense strand
ccucaggagcggaacauuu

SEQ ID NO: 1815283 - RNA, 19 nt, Homo sapiens
  misc_RNA (1)...(19): siRNA sense strand
gcaauggaagaaaggaaau

SEQ ID NO: 1815284 - RNA, 19 nt, Homo sapiens
  misc_RNA (1)...(19): siRNA sense strand
cagcauacaaccaccaaug

SEQ ID NO: 1815285 - RNA, 19 nt, Homo sapiens
  misc_RNA (1)...(19): siRNA sense strand
gguaugcuuuacucagaau

SEQ ID NO: 1815286 - RNA, 19 nt, Homo sapiens
  misc_RNA (1)...(19): siRNA sense strand
gaggagaggaccaccauac

SEQ ID NO: 1815287 - RNA, 19 nt, Homo sapiens
  misc_RNA (1)...(19): siRNA sense strand
ggcaauggaagaaaggaaa

SEQ ID NO: 1815288 - RNA, 19 nt, Homo sapiens
  misc_RNA (1)...(19): siRNA sense strand
cagcuugggaguucuuauu

SEQ ID NO: 1815289 - RNA, 19 nt, Homo sapiens
  misc_RNA (1)...(19): siRNA sense strand
ggaagacauccauggaagu

SEQ ID NO: 1815290 - RNA, 19 nt, Homo sapiens
  misc_RNA (1)...(19): siRNA sense strand
ccauggaagugaagaugca

SEQ ID NO: 1815291 - RNA, 19 nt, Homo sapiens
  misc_RNA (1)...(19): siRNA sense strand
cagugagccugaauuacga

SEQ ID NO: 1815292 - RNA, 19 nt, Homo sapiens
  misc_RNA (1)...(19): siRNA sense strand
gaugaauuuuguccuguuu

SEQ ID NO: 1815293 - RNA, 19 nt, Homo sapiens
  misc_RNA (1)...(19): siRNA sense strand
uuuggugguuuccuuauga

SEQ ID NO: 1815294 - RNA, 19 nt, Homo sapiens
  misc_RNA (1)...(19): siRNA sense strand
acugaagaguuuggaaauu

SEQ ID NO: 1815295 - RNA, 19 nt, Homo sapiens
  misc_RNA (1)...(19): siRNA sense strand
aaugguggcucgugauucu

SEQ ID NO: 1815296 - RNA, 19 nt, Homo sapiens
  misc_RNA (1)...(19): siRNA sense strand
cuugggaguucuuauuugu

SEQ ID NO: 1815297 - RNA, 19 nt, Homo sapiens
  misc_RNA (1)...(19): siRNA sense strand
agaugcaaauguuccaguu

SEQ ID NO: 1815298 - RNA, 19 nt, Homo sapiens
  misc_RNA (1)...(19): siRNA sense strand
gaagagcuugagcccagaa

SEQ ID NO: 1815299 - RNA, 19 nt, Homo sapiens
  misc_RNA (1)...(19): siRNA sense strand
cuugacagcuugggaguuc

SEQ ID NO: 1815300 - RNA, 19 nt, Homo sapiens
  misc_RNA (1)...(19): siRNA sense strand
gauggacugccuccuagga

SEQ ID NO: 1815301 - RNA, 19 nt, Homo sapiens
  misc_RNA (1)...(19): siRNA sense strand
gcauacaaccaccaauguc

SEQ ID NO: 1815302 - RNA, 19 nt, Homo sapiens
  misc_RNA (1)...(19): siRNA sense strand
gcucgugauucugaaaaua

SEQ ID NO: 1815303 - RNA, 19 nt, Homo sapiens
  misc_RNA (1)...(19): siRNA sense strand
cugaauuacgagagaaaua

SEQ ID NO: 1815304 - RNA, 19 nt, Homo sapiens
  misc_RNA (1)...(19): siRNA sense strand
ggaagugaagaugcaaaug

SEQ ID NO: 1815305 - RNA, 19 nt, Homo sapiens
  misc_RNA (1)...(19): siRNA sense strand
uaaguugcgggagauagua

SEQ ID NO: 1815306 - RNA, 19 nt, Homo sapiens
  misc_RNA (1)...(19): siRNA sense strand
uacaaccaccaaugucuuu

SEQ ID NO: 1815307 - RNA, 19 nt, Homo sapiens
  misc_RNA (1)...(19): siRNA sense strand
augaaggacaguuauauug

SEQ ID NO: 1815308 - RNA, 19 nt, Homo sapiens
  misc_RNA (1)...(19): siRNA sense strand
caaccaccaaugucuuuca

SEQ ID NO: 1815309 - RNA, 19 nt, Homo sapiens
  misc_RNA (1)...(19): siRNA sense strand
agauuuggcaggauucuug

SEQ ID NO: 1815310 - RNA, 19 nt, Homo sapiens
  misc_RNA (1)...(19): siRNA sense strand
caggagaagcagcauacaa

SEQ ID NO: 1815311 - RNA, 19 nt, Homo sapiens
  misc_RNA (1)...(19): siRNA sense strand
cagaguacacagugaagug

SEQ ID NO: 1815312 - RNA, 19 nt, Homo sapiens
  misc_RNA (1)...(19): siRNA sense strand
ggaguucuuauuuguuaca

SEQ ID NO: 1815313 - RNA, 19 nt, Homo sapiens
  misc_RNA (1)...(19): siRNA sense strand
gaguccauguuguacuuag

SEQ ID NO: 1815314 - RNA, 19 nt, Homo sapiens
  misc_RNA (1)...(19): siRNA sense strand
gcacaaagcuucauuaagu

SEQ ID NO: 1815315 - RNA, 19 nt, Homo sapiens
  misc_RNA (1)...(19): siRNA sense strand
ggacugaaaugcuaauuau

SEQ ID NO: 1815316 - RNA, 19 nt, Homo sapiens
  misc_RNA (1)...(19): siRNA sense strand
gcucaaauaugaucacaaa

SEQ ID NO: 1815317 - RNA, 19 nt, Homo sapiens
  misc_RNA (1)...(19): siRNA sense strand
ccaagcaacugaggaauua

SEQ ID NO: 1815318 - RNA, 19 nt, Homo sapiens
  misc_RNA (1)...(19): siRNA sense strand
ggaaugauguggucugaau

SEQ ID NO: 1815319 - RNA, 19 nt, Homo sapiens
  misc_RNA (1)...(19): siRNA sense strand
gaccauagcuaucaagugu

SEQ ID NO: 1815320 - RNA, 19 nt, Homo sapiens
  misc_RNA (1)...(19): siRNA sense strand
gaauggagaucuggaauca

SEQ ID NO: 1815321 - RNA, 19 nt, Homo sapiens
  misc_RNA (1)...(19): siRNA sense strand
agaaggaguucaagaauga

SEQ ID NO: 1815322 - RNA, 19 nt, Homo sapiens
  misc_RNA (1)...(19): siRNA sense strand
gagaaggaguucaagaaug

SEQ ID NO: 1815323 - RNA, 19 nt, Homo sapiens
  misc_RNA (1)...(19): siRNA sense strand
auaaauggcucccuucuga

SEQ ID NO: 1815324 - RNA, 19 nt, Homo sapiens
  misc_RNA (1)...(19): siRNA sense strand
gauguggucugaauguaaa

SEQ ID NO: 1815325 - RNA, 19 nt, Homo sapiens
  misc_RNA (1)...(19): siRNA sense strand
ggaaugugcuugacuuugg

SEQ ID NO: 1815326 - RNA, 19 nt, Homo sapiens
  misc_RNA (1)...(19): siRNA sense strand
ucaccacgcugcccaauau

SEQ ID NO: 1815327 - RNA, 19 nt, Homo sapiens
  misc_RNA (1)...(19): siRNA sense strand
caacgaaggcacaacagua

SEQ ID NO: 1815328 - RNA, 19 nt, Homo sapiens
  misc_RNA (1)...(19): siRNA sense strand
gaaagcacaaguagacaaa

SEQ ID NO: 1815329 - RNA, 19 nt, Homo sapiens
  misc_RNA (1)...(19): siRNA sense strand
aacaguauguggacaguua

SEQ ID NO: 1815330 - RNA, 19 nt, Homo sapiens
  misc_RNA (1)...(19): siRNA sense strand
ucagaaggauauagaaaug

SEQ ID NO: 1815331 - RNA, 19 nt, Homo sapiens
  misc_RNA (1)...(19): siRNA sense strand
ggaugacagugauguagaa

SEQ ID NO: 1815332 - RNA, 19 nt, Homo sapiens
  misc_RNA (1)...(19): siRNA sense strand
ggaaggaccuagggaauac

SEQ ID NO: 1815333 - RNA, 19 nt, Homo sapiens
  misc_RNA (1)...(19): siRNA sense strand
ucaaucagccaacacguua

SEQ ID NO: 1815334 - RNA, 19 nt, Homo sapiens
  misc_RNA (1)...(19): siRNA sense strand
gaauggaaguuugcucguu

SEQ ID NO: 1815335 - RNA, 19 nt, Homo sapiens
  misc_RNA (1)...(19): siRNA sense strand
ggaccuagggaauacauuu

SEQ ID NO: 1815336 - RNA, 19 nt, Homo sapiens
  misc_RNA (1)...(19): siRNA sense strand
gauguagaauggaaguuug

SEQ ID NO: 1815337 - RNA, 19 nt, Homo sapiens
  misc_RNA (1)...(19): siRNA sense strand
cugcagaucucucuuggaa

SEQ ID NO: 1815338 - RNA, 19 nt, Homo sapiens
  misc_RNA (1)...(19): siRNA sense strand
guauuucacuuaugcuaga

SEQ ID NO: 1815339 - RNA, 19 nt, Homo sapiens
  misc_RNA (1)...(19): siRNA sense strand
gcacaaguagacaaagaaa

SEQ ID NO: 1815340 - RNA, 19 nt, Homo sapiens
  misc_RNA (1)...(19): siRNA sense strand
gugucaaacuugccauuaa

SEQ ID NO: 1815341 - RNA, 19 nt, Homo sapiens
  misc_RNA (1)...(19): siRNA sense strand
ugacagugauguagaaugg

SEQ ID NO: 1815342 - RNA, 19 nt, Homo sapiens
  misc_RNA (1)...(19): siRNA sense strand
gagcagaccauagcuauca

SEQ ID NO: 1815343 - RNA, 19 nt, Homo sapiens
  misc_RNA (1)...(19): siRNA sense strand
aaacauuaccuccaccuuu

SEQ ID NO: 1815344 - RNA, 19 nt, Homo sapiens
  misc_RNA (1)...(19): siRNA sense strand
gaggaucaaugccuacaag

SEQ ID NO: 1815345 - RNA, 19 nt, Homo sapiens
  misc_RNA (1)...(19): siRNA sense strand
caugcgaauuguuaacuuu

SEQ ID NO: 1815346 - RNA, 19 nt, Homo sapiens
  misc_RNA (1)...(19): siRNA sense strand
cagcagcucuugacgaucu

SEQ ID NO: 1815347 - RNA, 19 nt, Homo sapiens
  misc_RNA (1)...(19): siRNA sense strand
gggaauggguaacucaaag

SEQ ID NO: 1815348 - RNA, 19 nt, Homo sapiens
  misc_RNA (1)...(19): siRNA sense strand
guaaaggacauauucaagu

SEQ ID NO: 1815349 - RNA, 19 nt, Homo sapiens
  misc_RNA (1)...(19): siRNA sense strand
ggucuggguucuuggaaug

SEQ ID NO: 1815350 - RNA, 19 nt, Homo sapiens
  misc_RNA (1)...(19): siRNA sense strand
uacauggacugaaaugcua

SEQ ID NO: 1815351 - RNA, 19 nt, Homo sapiens
  misc_RNA (1)...(19): siRNA sense strand
gcacaugcagcuucuuuca

SEQ ID NO: 1815352 - RNA, 19 nt, Homo sapiens
  misc_RNA (1)...(19): siRNA sense strand
gauacguucuuuauggaau

SEQ ID NO: 1815353 - RNA, 19 nt, Homo sapiens
  misc_RNA (1)...(19): siRNA sense strand
gggaauacauuuugcaguu

SEQ ID NO: 1815354 - RNA, 19 nt, Homo sapiens
  misc_RNA (1)...(19): siRNA sense strand
gaaggacuguaaaggacau

SEQ ID NO: 1815355 - RNA, 19 nt, Homo sapiens
  misc_RNA (1)...(19): siRNA sense strand
gcauguucauacuuuauuc

SEQ ID NO: 1815356 - RNA, 19 nt, Homo sapiens
  misc_RNA (1)...(19): siRNA sense strand
ccguugugcucaaauauga

SEQ ID NO: 1815357 - RNA, 19 nt, Homo sapiens
  misc_RNA (1)...(19): siRNA sense strand
gaagacaagagccaagcaa

SEQ ID NO: 1815358 - RNA, 19 nt, Homo sapiens
  misc_RNA (1)...(19): siRNA sense strand
cggaagcucuccaugcaau

SEQ ID NO: 1815359 - RNA, 19 nt, Homo sapiens
  misc_RNA (1)...(19): siRNA sense strand
aagcacaaguagacaaaga

SEQ ID NO: 1815360 - RNA, 19 nt, Homo sapiens
  misc_RNA (1)...(19): siRNA sense strand
caugcuaauugcuaugauu

SEQ ID NO: 1815361 - RNA, 19 nt, Homo sapiens
  misc_RNA (1)...(19): siRNA sense strand
caacauagagaaggaguuc

SEQ ID NO: 1815362 - RNA, 19 nt, Homo sapiens
  misc_RNA (1)...(19): siRNA sense strand
guuaugaacuuuuggaaga

SEQ ID NO: 1815363 - RNA, 19 nt, Homo sapiens
  misc_RNA (1)...(19): siRNA sense strand
uuaaaccucuucacucagu

SEQ ID NO: 1815364 - RNA, 19 nt, Homo sapiens
  misc_RNA (1)...(19): siRNA sense strand
ucaacaugcuaauugcuau

SEQ ID NO: 1815365 - RNA, 19 nt, Homo sapiens
  misc_RNA (1)...(19): siRNA sense strand
uuacucaacaugcuaauug

SEQ ID NO: 1815366 - RNA, 19 nt, Homo sapiens
  misc_RNA (1)...(19): siRNA sense strand
ggacauauucaaguucaug

SEQ ID NO: 1815367 - RNA, 19 nt, Homo sapiens
  misc_RNA (1)...(19): siRNA sense strand
ccaagagagugaccucagu

SEQ ID NO: 1815368 - RNA, 19 nt, Homo sapiens
  misc_RNA (1)...(19): siRNA sense strand
uaucaagugucucguugug

SEQ ID NO: 1815369 - RNA, 19 nt, Homo sapiens
  misc_RNA (1)...(19): siRNA sense strand
uagagaaggaguucaagaa

SEQ ID NO: 1815370 - RNA, 19 nt, Homo sapiens
  misc_RNA (1)...(19): siRNA sense strand
cggcuuaccucucauuguc

SEQ ID NO: 1815371 - RNA, 19 nt, Homo sapiens
  misc_RNA (1)...(19): siRNA sense strand
uuaacagcauucucaauca

SEQ ID NO: 1815372 - RNA, 19 nt, Homo sapiens
  misc_RNA (1)...(19): siRNA sense strand
acagugauguagaauggaa

SEQ ID NO: 1815373 - RNA, 19 nt, Homo sapiens
  misc_RNA (1)...(19): siRNA sense strand
guucaugguccucuuuauu

SEQ ID NO: 1815374 - RNA, 19 nt, Homo sapiens
  misc_RNA (1)...(19): siRNA sense strand
ggacuguaaaggacauauu

SEQ ID NO: 1815375 - RNA, 19 nt, Homo sapiens
  misc_RNA (1)...(19): siRNA sense strand
guacacaggcacaaagcuu

SEQ ID NO: 1815376 - RNA, 19 nt, Homo sapiens
  misc_RNA (1)...(19): siRNA sense strand
aaacuuagugagaaacuga

SEQ ID NO: 1815377 - RNA, 19 nt, Homo sapiens
  misc_RNA (1)...(19): siRNA sense strand
gagccaagcaacugaggaa

SEQ ID NO: 1815378 - RNA, 19 nt, Homo sapiens
  misc_RNA (1)...(19): siRNA sense strand
ucaugguccucuuuauuau

SEQ ID NO: 1815379 - RNA, 19 nt, Homo sapiens
  misc_RNA (1)...(19): siRNA sense strand
uucaugguccucuuuauua

SEQ ID NO: 1815380 - RNA, 19 nt, Homo sapiens
  misc_RNA (1)...(19): siRNA sense strand
acaugcagcuucuuucauc

SEQ ID NO: 1815381 - RNA, 19 nt, Homo sapiens
  misc_RNA (1)...(19): siRNA sense strand
gagagugaccucagugaag

SEQ ID NO: 1815382 - RNA, 19 nt, Homo sapiens
  misc_RNA (1)...(19): siRNA sense strand
ugaaguuaaugaaggugaa

SEQ ID NO: 1815383 - RNA, 19 nt, Homo sapiens
  misc_RNA (1)...(19): siRNA sense strand
cuuauaaagcgguauguuu

SEQ ID NO: 1815384 - RNA, 19 nt, Homo sapiens
  misc_RNA (1)...(19): siRNA sense strand
aacauuaccuccaccuuuc

SEQ ID NO: 1815385 - RNA, 19 nt, Homo sapiens
  misc_RNA (1)...(19): siRNA sense strand
gaaaucaagcaagauaucu

SEQ ID NO: 1815386 - RNA, 19 nt, Homo sapiens
  misc_RNA (1)...(19): siRNA sense strand
ugacagugaugcgggagaa

SEQ ID NO: 1815387 - RNA, 19 nt, Homo sapiens
  misc_RNA (1)...(19): siRNA sense strand
gccaagcaacugaggaauu

SEQ ID NO: 1815388 - RNA, 19 nt, Homo sapiens
  misc_RNA (1)...(19): siRNA sense strand
uaacagcauucucaaucag

SEQ ID NO: 1815389 - RNA, 19 nt, Homo sapiens
  misc_RNA (1)...(19): siRNA sense strand
aaauugaggaugacaguga

SEQ ID NO: 1815390 - RNA, 19 nt, Homo sapiens
  misc_RNA (1)...(19): siRNA sense strand
gacacucccaccagagaua

SEQ ID NO: 1815391 - RNA, 19 nt, Homo sapiens
  misc_RNA (1)...(19): siRNA sense strand
cuucauugcugcuuucaca

SEQ ID NO: 1815392 - RNA, 19 nt, Homo sapiens
  misc_RNA (1)...(19): siRNA sense strand
gggagcagaccauagcuau

SEQ ID NO: 1815393 - RNA, 19 nt, Homo sapiens
  misc_RNA (1)...(19): siRNA sense strand
gcaggacgacgacuucuac

SEQ ID NO: 1815394 - RNA, 19 nt, Homo sapiens
  misc_RNA (1)...(19): siRNA sense strand
ccauagcuaucaagugucu

SEQ ID NO: 1815395 - RNA, 19 nt, Homo sapiens
  misc_RNA (1)...(19): siRNA sense strand
uucauuaagucgugucaaa

SEQ ID NO: 1815396 - RNA, 19 nt, Homo sapiens
  misc_RNA (1)...(19): siRNA sense strand
gacaagagccaagcaacug

SEQ ID NO: 1815397 - RNA, 19 nt, Homo sapiens
  misc_RNA (1)...(19): siRNA sense strand
gaaaugggaauggguaacu

SEQ ID NO: 1815398 - RNA, 19 nt, Homo sapiens
  misc_RNA (1)...(19): siRNA sense strand
uaacuaugguggucguuuu

SEQ ID NO: 1815399 - RNA, 19 nt, Homo sapiens
  misc_RNA (1)...(19): siRNA sense strand
ugacuuccguugugcucaa

SEQ ID NO: 1815400 - RNA, 19 nt, Homo sapiens
  misc_RNA (1)...(19): siRNA sense strand
gugcacaugcugcugauga

SEQ ID NO: 1815401 - RNA, 19 nt, Homo sapiens
  misc_RNA (1)...(19): siRNA sense strand
caaguucaugguccucuuu

SEQ ID NO: 1815402 - RNA, 19 nt, Homo sapiens
  misc_RNA (1)...(19): siRNA sense strand
guacauccucccugcaaau

SEQ ID NO: 1815403 - RNA, 19 nt, Homo sapiens
  misc_RNA (1)...(19): siRNA sense strand
gaaccucucaggccuaagg

SEQ ID NO: 1815404 - RNA, 19 nt, Homo sapiens
  misc_RNA (1)...(19): siRNA sense strand
ggaguucaagaaugacuau

SEQ ID NO: 1815405 - RNA, 19 nt, Homo sapiens
  misc_RNA (1)...(19): siRNA sense strand
gcacugccagaaauacgaa

SEQ ID NO: 1815406 - RNA, 19 nt, Homo sapiens
  misc_RNA (1)...(19): siRNA sense strand
cagcuucuuucaucaucuu

SEQ ID NO: 1815407 - RNA, 19 nt, Homo sapiens
  misc_RNA (1)...(19): siRNA sense strand
uugacgaucugguaugaga

SEQ ID NO: 1815408 - RNA, 19 nt, Homo sapiens
  misc_RNA (1)...(19): siRNA sense strand
ugucaaacuugccauuaag

SEQ ID NO: 1815409 - RNA, 19 nt, Homo sapiens
  misc_RNA (1)...(19): siRNA sense strand
acgacgacuucuacgcuua

SEQ ID NO: 1815410 - RNA, 19 nt, Homo sapiens
  misc_RNA (1)...(19): siRNA sense strand
ggauauagaaaugggaaug

SEQ ID NO: 1815411 - RNA, 19 nt, Homo sapiens
  misc_RNA (1)...(19): siRNA sense strand
caacugcguggacuacaug

SEQ ID NO: 1815412 - RNA, 19 nt, Homo sapiens
  misc_RNA (1)...(19): siRNA sense strand
aaggacauauucaaguuca

SEQ ID NO: 1815413 - RNA, 19 nt, Homo sapiens
  misc_RNA (1)...(19): siRNA sense strand
cagccagauuccuagcuuu

SEQ ID NO: 1815414 - RNA, 19 nt, Homo sapiens
  misc_RNA (1)...(19): siRNA sense strand
gccaagaacuucaacauga

SEQ ID NO: 1815415 - RNA, 19 nt, Homo sapiens
  misc_RNA (1)...(19): siRNA sense strand
gaagaaagaaugcguguau

SEQ ID NO: 1815416 - RNA, 19 nt, Homo sapiens
  misc_RNA (1)...(19): siRNA sense strand
gcagugagaucuucaugga

SEQ ID NO: 1815417 - RNA, 19 nt, Homo sapiens
  misc_RNA (1)...(19): siRNA sense strand
ugaacaggcugaacucuaa

SEQ ID NO: 1815418 - RNA, 19 nt, Homo sapiens
  misc_RNA (1)...(19): siRNA sense strand
agaacaagcuggagaagaa

SEQ ID NO: 1815419 - RNA, 19 nt, Homo sapiens
  misc_RNA (1)...(19): siRNA sense strand
uaaagaagaugcuggaagu

SEQ ID NO: 1815420 - RNA, 19 nt, Homo sapiens
  misc_RNA (1)...(19): siRNA sense strand
ugaaggaacuguccaagga

SEQ ID NO: 1815421 - RNA, 19 nt, Homo sapiens
  misc_RNA (1)...(19): siRNA sense strand
acaagcagcucaagaacaa

SEQ ID NO: 1815422 - RNA, 19 nt, Homo sapiens
  misc_RNA (1)...(19): siRNA sense strand
ccaaggacaugaaguuugu

SEQ ID NO: 1815423 - RNA, 19 nt, Homo sapiens
  misc_RNA (1)...(19): siRNA sense strand
gcaggaagagcauaaagaa

SEQ ID NO: 1815424 - RNA, 19 nt, Homo sapiens
  misc_RNA (1)...(19): siRNA sense strand
gcagaggccuggucaaggu

SEQ ID NO: 1815425 - RNA, 19 nt, Homo sapiens
  misc_RNA (1)...(19): siRNA sense strand
ggaagagcauaaagaagau

SEQ ID NO: 1815426 - RNA, 19 nt, Homo sapiens
  misc_RNA (1)...(19): siRNA sense strand
guacaaaggcuacauggau

SEQ ID NO: 1815427 - RNA, 19 nt, Homo sapiens
  misc_RNA (1)...(19): siRNA sense strand
gaacauccucuccuacuuc

SEQ ID NO: 1815428 - RNA, 19 nt, Homo sapiens
  misc_RNA (1)...(19): siRNA sense strand
gcauggagguguacaaagg

SEQ ID NO: 1815429 - RNA, 19 nt, Homo sapiens
  misc_RNA (1)...(19): siRNA sense strand
ggagccaucugcaggaaga

SEQ ID NO: 1815430 - RNA, 19 nt, Homo sapiens
  misc_RNA (1)...(19): siRNA sense strand
ggacgucggcgcaaucuug

SEQ ID NO: 1815431 - RNA, 19 nt, Homo sapiens
  misc_RNA (1)...(19): siRNA sense strand
caaccacucucacuucauc

SEQ ID NO: 1815432 - RNA, 19 nt, Homo sapiens
  misc_RNA (1)...(19): siRNA sense strand
agaagaggcugcaggaugu

SEQ ID NO: 1815433 - RNA, 19 nt, Homo sapiens
  misc_RNA (1)...(19): siRNA sense strand
agacggaguuccugaucua

SEQ ID NO: 1815434 - RNA, 19 nt, Homo sapiens
  misc_RNA (1)...(19): siRNA sense strand
ucagugacuucuggaauaa

SEQ ID NO: 1815435 - RNA, 19 nt, Homo sapiens
  misc_RNA (1)...(19): siRNA sense strand
agaaagaaugcguguauuu

SEQ ID NO: 1815436 - RNA, 19 nt, Homo sapiens
  misc_RNA (1)...(19): siRNA sense strand
ggacaucagcaauaagguu

SEQ ID NO: 1815437 - RNA, 19 nt, Homo sapiens
  misc_RNA (1)...(19): siRNA sense strand
acaagacccuccuccagaa

SEQ ID NO: 1815438 - RNA, 19 nt, Homo sapiens
  misc_RNA (1)...(19): siRNA sense strand
caagaaagccucaguucgu

SEQ ID NO: 1815439 - RNA, 19 nt, Homo sapiens
  misc_RNA (1)...(19): siRNA sense strand
cggaguuccugaucuauga

SEQ ID NO: 1815440 - RNA, 19 nt, Homo sapiens
  misc_RNA (1)...(19): siRNA sense strand
gaagagagagcccagaaac

SEQ ID NO: 1815441 - RNA, 19 nt, Homo sapiens
  misc_RNA (1)...(19): siRNA sense strand
ucgaggacaucagcaauaa

SEQ ID NO: 1815442 - RNA, 19 nt, Homo sapiens
  misc_RNA (1)...(19): siRNA sense strand
gggugcagcugaaggaguu

SEQ ID NO: 1815443 - RNA, 19 nt, Homo sapiens
  misc_RNA (1)...(19): siRNA sense strand
ucaagagggugguccugaa

SEQ ID NO: 1815444 - RNA, 19 nt, Homo sapiens
  misc_RNA (1)...(19): siRNA sense strand
ugaagcggaugaugaagga

SEQ ID NO: 1815445 - RNA, 19 nt, Homo sapiens
  misc_RNA (1)...(19): siRNA sense strand
gagcagcagcuacaaggaa

SEQ ID NO: 1815446 - RNA, 19 nt, Homo sapiens
  misc_RNA (1)...(19): siRNA sense strand
ggcccaagaucaucauugu

SEQ ID NO: 1815447 - RNA, 19 nt, Homo sapiens
  misc_RNA (1)...(19): siRNA sense strand
cagcugcacucaucuccaa

SEQ ID NO: 1815448 - RNA, 19 nt, Homo sapiens
  misc_RNA (1)...(19): siRNA sense strand
gaggagguguggccaucaa

SEQ ID NO: 1815449 - RNA, 19 nt, Homo sapiens
  misc_RNA (1)...(19): siRNA sense strand
gaaagaaugcguguauuuu

SEQ ID NO: 1815450 - RNA, 19 nt, Homo sapiens
  misc_RNA (1)...(19): siRNA sense strand
agaaugacguggagcugaa

SEQ ID NO: 1815451 - RNA, 19 nt, Homo sapiens
  misc_RNA (1)...(19): siRNA sense strand
gcaacaaugacaagcaaga

SEQ ID NO: 1815452 - RNA, 19 nt, Homo sapiens
  misc_RNA (1)...(19): siRNA sense strand
ggaggaguaugagcacaga

SEQ ID NO: 1815453 - RNA, 19 nt, Homo sapiens
  misc_RNA (1)...(19): siRNA sense strand
gaucuaugacccacccuuu

SEQ ID NO: 1815454 - RNA, 19 nt, Homo sapiens
  misc_RNA (1)...(19): siRNA sense strand
uuugagaccuucacggaaa

SEQ ID NO: 1815455 - RNA, 19 nt, Homo sapiens
  misc_RNA (1)...(19): siRNA sense strand
acaccuugcucuaccugua

SEQ ID NO: 1815456 - RNA, 19 nt, Homo sapiens
  misc_RNA (1)...(19): siRNA sense strand
agaaacauguccaggagau

SEQ ID NO: 1815457 - RNA, 19 nt, Homo sapiens
  misc_RNA (1)...(19): siRNA sense strand
ccaagaucaucauugugaa

SEQ ID NO: 1815458 - RNA, 19 nt, Homo sapiens
  misc_RNA (1)...(19): siRNA sense strand
uucagugacuucuggaaua

SEQ ID NO: 1815459 - RNA, 19 nt, Homo sapiens
  misc_RNA (1)...(19): siRNA sense strand
ugcggcagcucuucuauga

SEQ ID NO: 1815460 - RNA, 19 nt, Homo sapiens
  misc_RNA (1)...(19): siRNA sense strand
gagcacacggaccagauuu

SEQ ID NO: 1815461 - RNA, 19 nt, Homo sapiens
  misc_RNA (1)...(19): siRNA sense strand
aggaagagcauaaagaaga

SEQ ID NO: 1815462 - RNA, 19 nt, Homo sapiens
  misc_RNA (1)...(19): siRNA sense strand
uccgugaccuucucauuug

SEQ ID NO: 1815463 - RNA, 19 nt, Homo sapiens
  misc_RNA (1)...(19): siRNA sense strand
cggcaacaaugacaagcaa

SEQ ID NO: 1815464 - RNA, 19 nt, Homo sapiens
  misc_RNA (1)...(19): siRNA sense strand
agaucuaccugaaggagaa

SEQ ID NO: 1815465 - RNA, 19 nt, Homo sapiens
  misc_RNA (1)...(19): siRNA sense strand
ccugggagaucuaccugaa

SEQ ID NO: 1815466 - RNA, 19 nt, Homo sapiens
  misc_RNA (1)...(19): siRNA sense strand
cccaagaucaucauuguga

SEQ ID NO: 1815467 - RNA, 19 nt, Homo sapiens
  misc_RNA (1)...(19): siRNA sense strand
caacagcagccucuucaag

SEQ ID NO: 1815468 - RNA, 19 nt, Homo sapiens
  misc_RNA (1)...(19): siRNA sense strand
ugaacauccucuccuacuu

SEQ ID NO: 1815469 - RNA, 19 nt, Homo sapiens
  misc_RNA (1)...(19): siRNA sense strand
acaugaaguuugugucuca

SEQ ID NO: 1815470 - RNA, 19 nt, Homo sapiens
  misc_RNA (1)...(19): siRNA sense strand
ggacagcucggaggagaug

SEQ ID NO: 1815471 - RNA, 19 nt, Homo sapiens
  misc_RNA (1)...(19): siRNA sense strand
gaugccaaccgaugccuuu

SEQ ID NO: 1815472 - RNA, 19 nt, Homo sapiens
  misc_RNA (1)...(19): siRNA sense strand
ggcacaagcagcucaagaa

SEQ ID NO: 1815473 - RNA, 19 nt, Homo sapiens
  misc_RNA (1)...(19): siRNA sense strand
caacaaugacaagcaagaa

SEQ ID NO: 1815474 - RNA, 19 nt, Homo sapiens
  misc_RNA (1)...(19): siRNA sense strand
uaucggagcagaccaagga

SEQ ID NO: 1815475 - RNA, 19 nt, Homo sapiens
  misc_RNA (1)...(19): siRNA sense strand
gaagguggugugucagugu

SEQ ID NO: 1815476 - RNA, 19 nt, Homo sapiens
  misc_RNA (1)...(19): siRNA sense strand
uggaagugcugguggugaa

SEQ ID NO: 1815477 - RNA, 19 nt, Homo sapiens
  misc_RNA (1)...(19): siRNA sense strand
cgacagcuaccacgugaau

SEQ ID NO: 1815478 - RNA, 19 nt, Homo sapiens
  misc_RNA (1)...(19): siRNA sense strand
gaccuggacccacugaaga

SEQ ID NO: 1815479 - RNA, 19 nt, Homo sapiens
  misc_RNA (1)...(19): siRNA sense strand
ggaccagauuuggaaguuc

SEQ ID NO: 1815480 - RNA, 19 nt, Homo sapiens
  misc_RNA (1)...(19): siRNA sense strand
caucgacggugugaacuuc

SEQ ID NO: 1815481 - RNA, 19 nt, Homo sapiens
  misc_RNA (1)...(19): siRNA sense strand
gacauugcccgcagugaga

SEQ ID NO: 1815482 - RNA, 19 nt, Homo sapiens
  misc_RNA (1)...(19): siRNA sense strand
ggaaucgcguggacauugc

SEQ ID NO: 1815483 - RNA, 19 nt, Homo sapiens
  misc_RNA (1)...(19): siRNA sense strand
gaaccugaccugccuagac

SEQ ID NO: 1815484 - RNA, 19 nt, Homo sapiens
  misc_RNA (1)...(19): siRNA sense strand
ucacgggccugagccagaa

SEQ ID NO: 1815485 - RNA, 19 nt, Homo sapiens
  misc_RNA (1)...(19): siRNA sense strand
ucaccggccucaucuccuu

SEQ ID NO: 1815486 - RNA, 19 nt, Homo sapiens
  misc_RNA (1)...(19): siRNA sense strand
acacggaccagauuuggaa

SEQ ID NO: 1815487 - RNA, 19 nt, Homo sapiens
  misc_RNA (1)...(19): siRNA sense strand
ggagcacacggaccagauu

SEQ ID NO: 1815488 - RNA, 19 nt, Homo sapiens
  misc_RNA (1)...(19): siRNA sense strand
gaaacugagcguguucuuc

SEQ ID NO: 1815489 - RNA, 19 nt, Homo sapiens
  misc_RNA (1)...(19): siRNA sense strand
gagacggaguuccugaucu

SEQ ID NO: 1815490 - RNA, 19 nt, Homo sapiens
  misc_RNA (1)...(19): siRNA sense strand
guacauacuggaugaggau

SEQ ID NO: 1815491 - RNA, 19 nt, Homo sapiens
  misc_RNA (1)...(19): siRNA sense strand
aagaaagaaugcguguauu

SEQ ID NO: 1815492 - RNA, 19 nt, Homo sapiens
  misc_RNA (1)...(19): siRNA sense strand
ucaagaacaagcuggagaa

SEQ ID NO: 1815493 - RNA, 19 nt, Homo sapiens
  misc_RNA (1)...(19): siRNA sense strand
gucgggagcuggcaggaau

SEQ ID NO: 1815494 - RNA, 19 nt, Homo sapiens
  misc_RNA (1)...(19): siRNA sense strand
gccaaggacaugaaguuug

SEQ ID NO: 1815495 - RNA, 19 nt, Homo sapiens
  misc_RNA (1)...(19): siRNA sense strand
guucggggcucacuacuga

SEQ ID NO: 1815496 - RNA, 19 nt, Homo sapiens
  misc_RNA (1)...(19): siRNA sense strand
caggagcacuggccgucuu

SEQ ID NO: 1815497 - RNA, 19 nt, Homo sapiens
  misc_RNA (1)...(19): siRNA sense strand
gaggacaucagcaauaagg

SEQ ID NO: 1815498 - RNA, 19 nt, Homo sapiens
  misc_RNA (1)...(19): siRNA sense strand
ucaucgccauguucaacua

SEQ ID NO: 1815499 - RNA, 19 nt, Homo sapiens
  misc_RNA (1)...(19): siRNA sense strand
aaccugaccugccuagaca

SEQ ID NO: 1815500 - RNA, 19 nt, Homo sapiens
  misc_RNA (1)...(19): siRNA sense strand
ggccaagaacuucaacaug

SEQ ID NO: 1815501 - RNA, 19 nt, Homo sapiens
  misc_RNA (1)...(19): siRNA sense strand
gagcugaacaggcugaacu

SEQ ID NO: 1815502 - RNA, 19 nt, Homo sapiens
  misc_RNA (1)...(19): siRNA sense strand
gacccaaccacacgcugua

SEQ ID NO: 1815503 - RNA, 19 nt, Homo sapiens
  misc_RNA (1)...(19): siRNA sense strand
ggaccuggacccacugaag

SEQ ID NO: 1815504 - RNA, 19 nt, Homo sapiens
  misc_RNA (1)...(19): siRNA sense strand
gcacaagcagcucaagaac

SEQ ID NO: 1815505 - RNA, 19 nt, Homo sapiens
  misc_RNA (1)...(19): siRNA sense strand
uaccugcucuucaccaaca

SEQ ID NO: 1815506 - RNA, 19 nt, Homo sapiens
  misc_RNA (1)...(19): siRNA sense strand
cgaagagagagcccagaaa

SEQ ID NO: 1815507 - RNA, 19 nt, Homo sapiens
  misc_RNA (1)...(19): siRNA sense strand
ggagcuggcaggaaucauc

SEQ ID NO: 1815508 - RNA, 19 nt, Homo sapiens
  misc_RNA (1)...(19): siRNA sense strand
gcagaaacugagcguguuc

SEQ ID NO: 1815509 - RNA, 19 nt, Homo sapiens
  misc_RNA (1)...(19): siRNA sense strand
gcacguugcacaccaucga

SEQ ID NO: 1815510 - RNA, 19 nt, Homo sapiens
  misc_RNA (1)...(19): siRNA sense strand
cagcaaccacucucacuuc

SEQ ID NO: 1815511 - RNA, 19 nt, Homo sapiens
  misc_RNA (1)...(19): siRNA sense strand
guucguggauuccugaaaa

SEQ ID NO: 1815512 - RNA, 19 nt, Homo sapiens
  misc_RNA (1)...(19): siRNA sense strand
cugggaaggugguguguca

SEQ ID NO: 1815513 - RNA, 19 nt, Homo sapiens
  misc_RNA (1)...(19): siRNA sense strand
gaucgaggacaucagcaau

SEQ ID NO: 1815514 - RNA, 19 nt, Homo sapiens
  misc_RNA (1)...(19): siRNA sense strand
ggacagaagguaacauuga

SEQ ID NO: 1815515 - RNA, 19 nt, Homo sapiens
  misc_RNA (1)...(19): siRNA sense strand
gcacauccuugcuaauuuc

SEQ ID NO: 1815516 - RNA, 19 nt, Homo sapiens
  misc_RNA (1)...(19): siRNA sense strand
gaacagagaccagaaagag

SEQ ID NO: 1815517 - RNA, 19 nt, Homo sapiens
  misc_RNA (1)...(19): siRNA sense strand
gaagaacagagaccagaaa

SEQ ID NO: 1815518 - RNA, 19 nt, Homo sapiens
  misc_RNA (1)...(19): siRNA sense strand
ggaaaugccuccgcugaag

SEQ ID NO: 1815519 - RNA, 19 nt, Homo sapiens
  misc_RNA (1)...(19): siRNA sense strand
gaauccagauggcaugguu

SEQ ID NO: 1815520 - RNA, 19 nt, Homo sapiens
  misc_RNA (1)...(19): siRNA sense strand
gacagaagguaacauugau

SEQ ID NO: 1815521 - RNA, 19 nt, Homo sapiens
  misc_RNA (1)...(19): siRNA sense strand
uggcaugguugcucuauug

SEQ ID NO: 1815522 - RNA, 19 nt, Homo sapiens
  misc_RNA (1)...(19): siRNA sense strand
gaaaucaaucaaagggaaa

SEQ ID NO: 1815523 - RNA, 19 nt, Homo sapiens
  misc_RNA (1)...(19): siRNA sense strand
acagagaccagaaagagua

SEQ ID NO: 1815524 - RNA, 19 nt, Homo sapiens
  misc_RNA (1)...(19): siRNA sense strand
cauccuugcuaauuucaaa

SEQ ID NO: 1815525 - RNA, 19 nt, Homo sapiens
  misc_RNA (1)...(19): siRNA sense strand
guacaucaaagauuacaug

SEQ ID NO: 1815526 - RNA, 19 nt, Homo sapiens
  misc_RNA (1)...(19): siRNA sense strand
caaagggaaacuugaagaa

SEQ ID NO: 1815527 - RNA, 19 nt, Homo sapiens
  misc_RNA (1)...(19): siRNA sense strand
ucacuggugucgauauugu

SEQ ID NO: 1815528 - RNA, 19 nt, Homo sapiens
  misc_RNA (1)...(19): siRNA sense strand
aaagaagccuacaagaagu

SEQ ID NO: 1815529 - RNA, 19 nt, Homo sapiens
  misc_RNA (1)...(19): siRNA sense strand
caaaagaagccuacaagaa

SEQ ID NO: 1815530 - RNA, 19 nt, Homo sapiens
  misc_RNA (1)...(19): siRNA sense strand
gaaacuugaagaacagaga

SEQ ID NO: 1815531 - RNA, 19 nt, Homo sapiens
  misc_RNA (1)...(19): siRNA sense strand
aagggaaacuugaagaaca

SEQ ID NO: 1815532 - RNA, 19 nt, Homo sapiens
  misc_RNA (1)...(19): siRNA sense strand
cagaacaaaucaagcacau

SEQ ID NO: 1815533 - RNA, 19 nt, Homo sapiens
  misc_RNA (1)...(19): siRNA sense strand
gggaagauggucaguagga

SEQ ID NO: 1815534 - RNA, 19 nt, Homo sapiens
  misc_RNA (1)...(19): siRNA sense strand
cuacaagaaguacaucaaa

SEQ ID NO: 1815535 - RNA, 19 nt, Homo sapiens
  misc_RNA (1)...(19): siRNA sense strand
acaagaaguacaucaaaga

SEQ ID NO: 1815536 - RNA, 19 nt, Homo sapiens
  misc_RNA (1)...(19): siRNA sense strand
cagaagguaacauugauga

SEQ ID NO: 1815537 - RNA, 19 nt, Homo sapiens
  misc_RNA (1)...(19): siRNA sense strand
caagaaguacaucaaagau

SEQ ID NO: 1815538 - RNA, 19 nt, Homo sapiens
  misc_RNA (1)...(19): siRNA sense strand
aaucacuggugucgauauu

SEQ ID NO: 1815539 - RNA, 19 nt, Homo sapiens
  misc_RNA (1)...(19): siRNA sense strand
gaagguaacauugaugacu

SEQ ID NO: 1815540 - RNA, 19 nt, Homo sapiens
  misc_RNA (1)...(19): siRNA sense strand
aguaaucacuggugucgau

SEQ ID NO: 1815541 - RNA, 19 nt, Homo sapiens
  misc_RNA (1)...(19): siRNA sense strand
gggcgaagguaccgaaagc

SEQ ID NO: 1815542 - RNA, 19 nt, Homo sapiens
  misc_RNA (1)...(19): siRNA sense strand
uacaagaaguacaucaaag

SEQ ID NO: 1815543 - RNA, 19 nt, Homo sapiens
  misc_RNA (1)...(19): siRNA sense strand
ucaaucaaagggaaacuug

SEQ ID NO: 1815544 - RNA, 19 nt, Homo sapiens
  misc_RNA (1)...(19): siRNA sense strand
gacaggggcugcagaacaa

SEQ ID NO: 1815545 - RNA, 19 nt, Homo sapiens
  misc_RNA (1)...(19): siRNA sense strand
ggacuaccgugaggauggu

SEQ ID NO: 1815546 - RNA, 19 nt, Homo sapiens
  misc_RNA (1)...(19): siRNA sense strand
uaggacagaagguaacauu

SEQ ID NO: 1815547 - RNA, 19 nt, Homo sapiens
  misc_RNA (1)...(19): siRNA sense strand
ucaguaggacagaagguaa

SEQ ID NO: 1815548 - RNA, 19 nt, Homo sapiens
  misc_RNA (1)...(19): siRNA sense strand
cgaaagcacaguaaucacu

SEQ ID NO: 1815549 - RNA, 19 nt, Homo sapiens
  misc_RNA (1)...(19): siRNA sense strand
ggugugaccccauauauga

SEQ ID NO: 1815550 - RNA, 19 nt, Homo sapiens
  misc_RNA (1)...(19): siRNA sense strand
gaaguacaucaaagauuac

SEQ ID NO: 1815551 - RNA, 19 nt, Homo sapiens
  misc_RNA (1)...(19): siRNA sense strand
gauggucaguaggacagaa

SEQ ID NO: 1815552 - RNA, 19 nt, Homo sapiens
  misc_RNA (1)...(19): siRNA sense strand
gugucgauauugucaugaa

SEQ ID NO: 1815553 - RNA, 19 nt, Homo sapiens
  misc_RNA (1)...(19): siRNA sense strand
ccaguucuuuauuggugaa

SEQ ID NO: 1815554 - RNA, 19 nt, Homo sapiens
  misc_RNA (1)...(19): siRNA sense strand
aaaagaagccuacaagaag

SEQ ID NO: 1815555 - RNA, 19 nt, Homo sapiens
  misc_RNA (1)...(19): siRNA sense strand
cagccacgaugagauguuc

SEQ ID NO: 1815556 - RNA, 19 nt, Homo sapiens
  misc_RNA (1)...(19): siRNA sense strand
aagaagccuacaagaagua

SEQ ID NO: 1815557 - RNA, 19 nt, Homo sapiens
  misc_RNA (1)...(19): siRNA sense strand
ugaagaacagagaccagaa

SEQ ID NO: 1815558 - RNA, 19 nt, Homo sapiens
  misc_RNA (1)...(19): siRNA sense strand
cagagaccagaaagaguaa

SEQ ID NO: 1815559 - RNA, 19 nt, Homo sapiens
  misc_RNA (1)...(19): siRNA sense strand
guaccgaaagcacaguaau

SEQ ID NO: 1815560 - RNA, 19 nt, Homo sapiens
  misc_RNA (1)...(19): siRNA sense strand
gaaaacaugaauccagaug

SEQ ID NO: 1815561 - RNA, 19 nt, Homo sapiens
  misc_RNA (1)...(19): siRNA sense strand
guaaucacuggugucgaua

SEQ ID NO: 1815562 - RNA, 19 nt, Homo sapiens
  misc_RNA (1)...(19): siRNA sense strand
aaccaucaccugcaggaaa

SEQ ID NO: 1815563 - RNA, 19 nt, Homo sapiens
  misc_RNA (1)...(19): siRNA sense strand
acaaaucaagcacauccuu

SEQ ID NO: 1815564 - RNA, 19 nt, Homo sapiens
  misc_RNA (1)...(19): siRNA sense strand
gaaccaucaccugcaggaa

SEQ ID NO: 1815565 - RNA, 19 nt, Homo sapiens
  misc_RNA (1)...(19): siRNA sense strand
ugguugcucuauuggacua

SEQ ID NO: 1815566 - RNA, 19 nt, Homo sapiens
  misc_RNA (1)...(19): siRNA sense strand
gucaguaggacagaaggua

SEQ ID NO: 1815567 - RNA, 19 nt, Homo sapiens
  misc_RNA (1)...(19): siRNA sense strand
ugacagcacuugaucauaa

SEQ ID NO: 1815568 - RNA, 19 nt, Homo sapiens
  misc_RNA (1)...(19): siRNA sense strand
gcaagacucuguccaaugu

SEQ ID NO: 1815569 - RNA, 19 nt, Homo sapiens
  misc_RNA (1)...(19): siRNA sense strand
ggaaggaaguguacaccua

SEQ ID NO: 1815570 - RNA, 19 nt, Homo sapiens
  misc_RNA (1)...(19): siRNA sense strand
ucaggaauguucaugaaua

SEQ ID NO: 1815571 - RNA, 19 nt, Homo sapiens
  misc_RNA (1)...(19): siRNA sense strand
ggugaaagcuuacuggaau

SEQ ID NO: 1815572 - RNA, 19 nt, Homo sapiens
  misc_RNA (1)...(19): siRNA sense strand
gagcacaucuucaaacuac

SEQ ID NO: 1815573 - RNA, 19 nt, Homo sapiens
  misc_RNA (1)...(19): siRNA sense strand
ggaaaaggcuuauguggaa

SEQ ID NO: 1815574 - RNA, 19 nt, Homo sapiens
  misc_RNA (1)...(19): siRNA sense strand
gcaaugaugauaccucuuu

SEQ ID NO: 1815575 - RNA, 19 nt, Homo sapiens
  misc_RNA (1)...(19): siRNA sense strand
aaauggagccugcagauua

SEQ ID NO: 1815576 - RNA, 19 nt, Homo sapiens
  misc_RNA (1)...(19): siRNA sense strand
gaagaaauugcacaucaaa

SEQ ID NO: 1815577 - RNA, 19 nt, Homo sapiens
  misc_RNA (1)...(19): siRNA sense strand
guuaaacucugcauugaug

SEQ ID NO: 1815578 - RNA, 19 nt, Homo sapiens
  misc_RNA (1)...(19): siRNA sense strand
uaccaucacugaagaauug

SEQ ID NO: 1815579 - RNA, 19 nt, Homo sapiens
  misc_RNA (1)...(19): siRNA sense strand
gaccaacggugauguuuca

SEQ ID NO: 1815580 - RNA, 19 nt, Homo sapiens
  misc_RNA (1)...(19): siRNA sense strand
gaaggaaguguacaccuaa

SEQ ID NO: 1815581 - RNA, 19 nt, Homo sapiens
  misc_RNA (1)...(19): siRNA sense strand
uagaagaaauugcacauca

SEQ ID NO: 1815582 - RNA, 19 nt, Homo sapiens
  misc_RNA (1)...(19): siRNA sense strand
gcagcaaacugggcagaaa

SEQ ID NO: 1815583 - RNA, 19 nt, Homo sapiens
  misc_RNA (1)...(19): siRNA sense strand
ucucagcgauucacaugua

SEQ ID NO: 1815584 - RNA, 19 nt, Homo sapiens
  misc_RNA (1)...(19): siRNA sense strand
ggaccuucguagcccauua

SEQ ID NO: 1815585 - RNA, 19 nt, Homo sapiens
  misc_RNA (1)...(19): siRNA sense strand
uagcaacauuugucaauug

SEQ ID NO: 1815586 - RNA, 19 nt, Homo sapiens
  misc_RNA (1)...(19): siRNA sense strand
gcacugggcacuuucgauu

SEQ ID NO: 1815587 - RNA, 19 nt, Homo sapiens
  misc_RNA (1)...(19): siRNA sense strand
ggcaagcaguucauucuga

SEQ ID NO: 1815588 - RNA, 19 nt, Homo sapiens
  misc_RNA (1)...(19): siRNA sense strand
ucaaugcacugggcacuuu

SEQ ID NO: 1815589 - RNA, 19 nt, Homo sapiens
  misc_RNA (1)...(19): siRNA sense strand
cguaguauguggagacaaa

SEQ ID NO: 1815590 - RNA, 19 nt, Homo sapiens
  misc_RNA (1)...(19): siRNA sense strand
uaacugcaacuccaacuuu

SEQ ID NO: 1815591 - RNA, 19 nt, Homo sapiens
  misc_RNA (1)...(19): siRNA sense strand
caacauuugucaauugucu

SEQ ID NO: 1815592 - RNA, 19 nt, Homo sapiens
  misc_RNA (1)...(19): siRNA sense strand
acagagauguauugcguuu

SEQ ID NO: 1815593 - RNA, 19 nt, Homo sapiens
  misc_RNA (1)...(19): siRNA sense strand
agauaaggcugaaucaugu

SEQ ID NO: 1815594 - RNA, 19 nt, Homo sapiens
  misc_RNA (1)...(19): siRNA sense strand
ggaucaaaggauuguauua

SEQ ID NO: 1815595 - RNA, 19 nt, Homo sapiens
  misc_RNA (1)...(19): siRNA sense strand
gcaacuauauuagcaacau

SEQ ID NO: 1815596 - RNA, 19 nt, Homo sapiens
  misc_RNA (1)...(19): siRNA sense strand
gaagcaagacucuguccaa

SEQ ID NO: 1815597 - RNA, 19 nt, Homo sapiens
  misc_RNA (1)...(19): siRNA sense strand
cgaaaccgcugucaauacu

SEQ ID NO: 1815598 - RNA, 19 nt, Homo sapiens
  misc_RNA (1)...(19): siRNA sense strand
ucacaauagucuucaacaa

SEQ ID NO: 1815599 - RNA, 19 nt, Homo sapiens
  misc_RNA (1)...(19): siRNA sense strand
ugggagagauuguuacaga

SEQ ID NO: 1815600 - RNA, 19 nt, Homo sapiens
  misc_RNA (1)...(19): siRNA sense strand
gaaugaagcaagacucugu

SEQ ID NO: 1815601 - RNA, 19 nt, Homo sapiens
  misc_RNA (1)...(19): siRNA sense strand
caggaauguucaugaauau

SEQ ID NO: 1815602 - RNA, 19 nt, Homo sapiens
  misc_RNA (1)...(19): siRNA sense strand
ggagauucaagcauaaauu

SEQ ID NO: 1815603 - RNA, 19 nt, Homo sapiens
  misc_RNA (1)...(19): siRNA sense strand
cagcaggugucaaccaguu

SEQ ID NO: 1815604 - RNA, 19 nt, Homo sapiens
  misc_RNA (1)...(19): siRNA sense strand
gaucauccaagccuagaaa

SEQ ID NO: 1815605 - RNA, 19 nt, Homo sapiens
  misc_RNA (1)...(19): siRNA sense strand
cacuggagauucaagcaua

SEQ ID NO: 1815606 - RNA, 19 nt, Homo sapiens
  misc_RNA (1)...(19): siRNA sense strand
ucagggagauuuaaguaca

SEQ ID NO: 1815607 - RNA, 19 nt, Homo sapiens
  misc_RNA (1)...(19): siRNA sense strand
ggaaguguacaccuaauca

SEQ ID NO: 1815608 - RNA, 19 nt, Homo sapiens
  misc_RNA (1)...(19): siRNA sense strand
cagauaaggcugaaucaug

SEQ ID NO: 1815609 - RNA, 19 nt, Homo sapiens
  misc_RNA (1)...(19): siRNA sense strand
gcauugauggauacgaaua

SEQ ID NO: 1815610 - RNA, 19 nt, Homo sapiens
  misc_RNA (1)...(19): siRNA sense strand
caacagaugggagagauug

SEQ ID NO: 1815611 - RNA, 19 nt, Homo sapiens
  misc_RNA (1)...(19): siRNA sense strand
gcuggcaagugaugaaugu

SEQ ID NO: 1815612 - RNA, 19 nt, Homo sapiens
  misc_RNA (1)...(19): siRNA sense strand
uuaauaagcaccaccgaaa

SEQ ID NO: 1815613 - RNA, 19 nt, Homo sapiens
  misc_RNA (1)...(19): siRNA sense strand
aauaauuggucacagcauu

SEQ ID NO: 1815614 - RNA, 19 nt, Homo sapiens
  misc_RNA (1)...(19): siRNA sense strand
aguguuaucccacauauuu

SEQ ID NO: 1815615 - RNA, 19 nt, Homo sapiens
  misc_RNA (1)...(19): siRNA sense strand
cuacucagauugccagcuu

SEQ ID NO: 1815616 - RNA, 19 nt, Homo sapiens
  misc_RNA (1)...(19): siRNA sense strand
gaaaguacaaggucaacag

SEQ ID NO: 1815617 - RNA, 19 nt, Homo sapiens
  misc_RNA (1)...(19): siRNA sense strand
uaacagauagugaaaguac

SEQ ID NO: 1815618 - RNA, 19 nt, Homo sapiens
  misc_RNA (1)...(19): siRNA sense strand
agaagaaauugcacaucaa

SEQ ID NO: 1815619 - RNA, 19 nt, Homo sapiens
  misc_RNA (1)...(19): siRNA sense strand
gaacaacagaugggagaga

SEQ ID NO: 1815620 - RNA, 19 nt, Homo sapiens
  misc_RNA (1)...(19): siRNA sense strand
cacuuucgauuccuucuuu

SEQ ID NO: 1815621 - RNA, 19 nt, Homo sapiens
  misc_RNA (1)...(19): siRNA sense strand
ccagacugcuguucuuauc

SEQ ID NO: 1815622 - RNA, 19 nt, Homo sapiens
  misc_RNA (1)...(19): siRNA sense strand
gcgauucacauguagcuuu

SEQ ID NO: 1815623 - RNA, 19 nt, Homo sapiens
  misc_RNA (1)...(19): siRNA sense strand
cagaugggagagauuguua

SEQ ID NO: 1815624 - RNA, 19 nt, Homo sapiens
  misc_RNA (1)...(19): siRNA sense strand
caccaugccuucuccuaug

SEQ ID NO: 1815625 - RNA, 19 nt, Homo sapiens
  misc_RNA (1)...(19): siRNA sense strand
cugcagcuccuaacagaua

SEQ ID NO: 1815626 - RNA, 19 nt, Homo sapiens
  misc_RNA (1)...(19): siRNA sense strand
ccagacuacuacucagauu

SEQ ID NO: 1815627 - RNA, 19 nt, Homo sapiens
  misc_RNA (1)...(19): siRNA sense strand
ugucgaggaucaaaggauu

SEQ ID NO: 1815628 - RNA, 19 nt, Homo sapiens
  misc_RNA (1)...(19): siRNA sense strand
cagguuauccagacuacua

SEQ ID NO: 1815629 - RNA, 19 nt, Homo sapiens
  misc_RNA (1)...(19): siRNA sense strand
gauagagaaauuucaggaa

SEQ ID NO: 1815630 - RNA, 19 nt, Homo sapiens
  misc_RNA (1)...(19): siRNA sense strand
gacagcacuugaucauaau

SEQ ID NO: 1815631 - RNA, 19 nt, Homo sapiens
  misc_RNA (1)...(19): siRNA sense strand
ugaugaauguagcaacuau

SEQ ID NO: 1815632 - RNA, 19 nt, Homo sapiens
  misc_RNA (1)...(19): siRNA sense strand
gggcauggaaggaagugua

SEQ ID NO: 1815633 - RNA, 19 nt, Homo sapiens
  misc_RNA (1)...(19): siRNA sense strand
uguaacagauagugaaagu

SEQ ID NO: 1815634 - RNA, 19 nt, Homo sapiens
  misc_RNA (1)...(19): siRNA sense strand
ccagaccaaggaccaaaua

SEQ ID NO: 1815635 - RNA, 19 nt, Homo sapiens
  misc_RNA (1)...(19): siRNA sense strand
gcaguucauucugacaaau

SEQ ID NO: 1815636 - RNA, 19 nt, Homo sapiens
  misc_RNA (1)...(19): siRNA sense strand
agacugcuguucuuaucaa

SEQ ID NO: 1815637 - RNA, 19 nt, Homo sapiens
  misc_RNA (1)...(19): siRNA sense strand
caacugugccgcuucaaca

SEQ ID NO: 1815638 - RNA, 19 nt, Homo sapiens
  misc_RNA (1)...(19): siRNA sense strand
gaggaucaaaggauuguau

SEQ ID NO: 1815639 - RNA, 19 nt, Homo sapiens
  misc_RNA (1)...(19): siRNA sense strand
ccaaggaccaaauaagguu

SEQ ID NO: 1815640 - RNA, 19 nt, Homo sapiens
  misc_RNA (1)...(19): siRNA sense strand
ugugaaggcugcaaaggau

SEQ ID NO: 1815641 - RNA, 19 nt, Homo sapiens
  misc_RNA (1)...(19): siRNA sense strand
aauggagccugcagauuau

SEQ ID NO: 1815642 - RNA, 19 nt, Homo sapiens
  misc_RNA (1)...(19): siRNA sense strand
ugaaugcuaccaucacuga

SEQ ID NO: 1815643 - RNA, 19 nt, Homo sapiens
  misc_RNA (1)...(19): siRNA sense strand
gcuuuaagacugaugaaug

SEQ ID NO: 1815644 - RNA, 19 nt, Homo sapiens
  misc_RNA (1)...(19): siRNA sense strand
gucuaugauugaaagcuua

SEQ ID NO: 1815645 - RNA, 19 nt, Homo sapiens
  misc_RNA (1)...(19): siRNA sense strand
gaugaauguagcaacuaua

SEQ ID NO: 1815646 - RNA, 19 nt, Homo sapiens
  misc_RNA (1)...(19): siRNA sense strand
gaccaaggaccaaauaagg

SEQ ID NO: 1815647 - RNA, 19 nt, Homo sapiens
  misc_RNA (1)...(19): siRNA sense strand
cagauugccagcuuuaaga

SEQ ID NO: 1815648 - RNA, 19 nt, Homo sapiens
  misc_RNA (1)...(19): siRNA sense strand
caaugaugauaccucuuug

SEQ ID NO: 1815649 - RNA, 19 nt, Homo sapiens
  misc_RNA (1)...(19): siRNA sense strand
gaaaacccauugaaguauc

SEQ ID NO: 1815650 - RNA, 19 nt, Homo sapiens
  misc_RNA (1)...(19): siRNA sense strand
caacaccugcagcuccuaa

SEQ ID NO: 1815651 - RNA, 19 nt, Homo sapiens
  misc_RNA (1)...(19): siRNA sense strand
ggagcacaucuucaaacua

SEQ ID NO: 1815652 - RNA, 19 nt, Homo sapiens
  misc_RNA (1)...(19): siRNA sense strand
gcagaccaacggugauguu

SEQ ID NO: 1815653 - RNA, 19 nt, Homo sapiens
  misc_RNA (1)...(19): siRNA sense strand
uguauugcguuuggaauga

SEQ ID NO: 1815654 - RNA, 19 nt, Homo sapiens
  misc_RNA (1)...(19): siRNA sense strand
ugaaggcugcaaaggauuu

SEQ ID NO: 1815655 - RNA, 19 nt, Homo sapiens
  misc_RNA (1)...(19): siRNA sense strand
cugcauugauggauacgaa

SEQ ID NO: 1815656 - RNA, 19 nt, Homo sapiens
  misc_RNA (1)...(19): siRNA sense strand
gaccuucguagcccauuaa

SEQ ID NO: 1815657 - RNA, 19 nt, Homo sapiens
  misc_RNA (1)...(19): siRNA sense strand
gaaagaaaacccauugaag

SEQ ID NO: 1815658 - RNA, 19 nt, Homo sapiens
  misc_RNA (1)...(19): siRNA sense strand
agagauguauugcguuugg

SEQ ID NO: 1815659 - RNA, 19 nt, Homo sapiens
  misc_RNA (1)...(19): siRNA sense strand
caucaggacgucauuaugg

SEQ ID NO: 1815660 - RNA, 19 nt, Homo sapiens
  misc_RNA (1)...(19): siRNA sense strand
caucacugaagaauuguuu

SEQ ID NO: 1815661 - RNA, 19 nt, Homo sapiens
  misc_RNA (1)...(19): siRNA sense strand
cgaauaugccuaccugaag

SEQ ID NO: 1815662 - RNA, 19 nt, Homo sapiens
  misc_RNA (1)...(19): siRNA sense strand
caagggcauuugacacucu

SEQ ID NO: 1815663 - RNA, 19 nt, Homo sapiens
  misc_RNA (1)...(19): siRNA sense strand
gaaagcuuaagcaaugaug

SEQ ID NO: 1815664 - RNA, 19 nt, Homo sapiens
  misc_RNA (1)...(19): siRNA sense strand
cgauucacauguagcuuuc

SEQ ID NO: 1815665 - RNA, 19 nt, Homo sapiens
  misc_RNA (1)...(19): siRNA sense strand
gacaguguuaucccacaua

SEQ ID NO: 1815666 - RNA, 19 nt, Homo sapiens
  misc_RNA (1)...(19): siRNA sense strand
gugaaagcuuacuggaaug

SEQ ID NO: 1815667 - RNA, 19 nt, Homo sapiens
  misc_RNA (1)...(19): siRNA sense strand
gcaugaaccugaugaauga

SEQ ID NO: 1815668 - RNA, 19 nt, Homo sapiens
  misc_RNA (1)...(19): siRNA sense strand
gaaagaaaggcaucuaguu

SEQ ID NO: 1815669 - RNA, 19 nt, Homo sapiens
  misc_RNA (1)...(19): siRNA sense strand
gaacggccaucagcaagaa

SEQ ID NO: 1815670 - RNA, 19 nt, Homo sapiens
  misc_RNA (1)...(19): siRNA sense strand
ucacaagccucaagacgaa

SEQ ID NO: 1815671 - RNA, 19 nt, Homo sapiens
  misc_RNA (1)...(19): siRNA sense strand
aaacagaacuucagcaaaa

SEQ ID NO: 1815672 - RNA, 19 nt, Homo sapiens
  misc_RNA (1)...(19): siRNA sense strand
gaaccugaugaaugaauua

SEQ ID NO: 1815673 - RNA, 19 nt, Homo sapiens
  misc_RNA (1)...(19): siRNA sense strand
ggaauucuccuacuuucaa

SEQ ID NO: 1815674 - RNA, 19 nt, Homo sapiens
  misc_RNA (1)...(19): siRNA sense strand
gcaaggaacagacgaagau

SEQ ID NO: 1815675 - RNA, 19 nt, Homo sapiens
  misc_RNA (1)...(19): siRNA sense strand
gaauucuccuacuuucaaa

SEQ ID NO: 1815676 - RNA, 19 nt, Homo sapiens
  misc_RNA (1)...(19): siRNA sense strand
aaagaaaggcaucuaguug

SEQ ID NO: 1815677 - RNA, 19 nt, Homo sapiens
  misc_RNA (1)...(19): siRNA sense strand
aggaggagcugcagugcua

SEQ ID NO: 1815678 - RNA, 19 nt, Homo sapiens
  misc_RNA (1)...(19): siRNA sense strand
gcuagaagacgaaauuaca

SEQ ID NO: 1815679 - RNA, 19 nt, Homo sapiens
  misc_RNA (1)...(19): siRNA sense strand
gcaagaaguucggagacau

SEQ ID NO: 1815680 - RNA, 19 nt, Homo sapiens
  misc_RNA (1)...(19): siRNA sense strand
agacgaaauuacaacacua

SEQ ID NO: 1815681 - RNA, 19 nt, Homo sapiens
  misc_RNA (1)...(19): siRNA sense strand
ggcaugaaccugaugaaug

SEQ ID NO: 1815682 - RNA, 19 nt, Homo sapiens
  misc_RNA (1)...(19): siRNA sense strand
agaguuaguucagcuagaa

SEQ ID NO: 1815683 - RNA, 19 nt, Homo sapiens
  misc_RNA (1)...(19): siRNA sense strand
ggaggaaaaggaagaguua

SEQ ID NO: 1815684 - RNA, 19 nt, Homo sapiens
  misc_RNA (1)...(19): siRNA sense strand
gaaguucggagacaugagu

SEQ ID NO: 1815685 - RNA, 19 nt, Homo sapiens
  misc_RNA (1)...(19): siRNA sense strand
gaaaggcaucuaguugaga

SEQ ID NO: 1815686 - RNA, 19 nt, Homo sapiens
  misc_RNA (1)...(19): siRNA sense strand
ugaaccugaugaaugaauu

SEQ ID NO: 1815687 - RNA, 19 nt, Homo sapiens
  misc_RNA (1)...(19): siRNA sense strand
ucagcuagaagacgaaauu

SEQ ID NO: 1815688 - RNA, 19 nt, Homo sapiens
  misc_RNA (1)...(19): siRNA sense strand
aagaaaggcaucuaguuga

SEQ ID NO: 1815689 - RNA, 19 nt, Homo sapiens
  misc_RNA (1)...(19): siRNA sense strand
ucucuagcaugcucucuga

SEQ ID NO: 1815690 - RNA, 19 nt, Homo sapiens
  misc_RNA (1)...(19): siRNA sense strand
ggaacggccaucagcaaga

SEQ ID NO: 1815691 - RNA, 19 nt, Homo sapiens
  misc_RNA (1)...(19): siRNA sense strand
caacugcagcuuucagcaa

SEQ ID NO: 1815692 - RNA, 19 nt, Homo sapiens
  misc_RNA (1)...(19): siRNA sense strand
ggaaaaggaagaguuaaaa

SEQ ID NO: 1815693 - RNA, 19 nt, Homo sapiens
  misc_RNA (1)...(19): siRNA sense strand
agaaaggcaucuaguugag

SEQ ID NO: 1815694 - RNA, 19 nt, Homo sapiens
  misc_RNA (1)...(19): siRNA sense strand
caagaaguucggagacaug

SEQ ID NO: 1815695 - RNA, 19 nt, Homo sapiens
  misc_RNA (1)...(19): siRNA sense strand
acaacacuacgacaaguuu

SEQ ID NO: 1815696 - RNA, 19 nt, Homo sapiens
  misc_RNA (1)...(19): siRNA sense strand
cgaaagaaaggcaucuagu

SEQ ID NO: 1815697 - RNA, 19 nt, Homo sapiens
  misc_RNA (1)...(19): siRNA sense strand
cagaguuaguucagcuaga

SEQ ID NO: 1815698 - RNA, 19 nt, Homo sapiens
  misc_RNA (1)...(19): siRNA sense strand
cagcuagaagacgaaauua

SEQ ID NO: 1815699 - RNA, 19 nt, Homo sapiens
  misc_RNA (1)...(19): siRNA sense strand
gcgaaagaaaggcaucuag

SEQ ID NO: 1815700 - RNA, 19 nt, Homo sapiens
  misc_RNA (1)...(19): siRNA sense strand
gaggagaggguugagacaa

SEQ ID NO: 1815701 - RNA, 19 nt, Homo sapiens
  misc_RNA (1)...(19): siRNA sense strand
uuacaacacuacgacaagu

SEQ ID NO: 1815702 - RNA, 19 nt, Homo sapiens
  misc_RNA (1)...(19): siRNA sense strand
auaaguaugccugcuauga

SEQ ID NO: 1815703 - RNA, 19 nt, Homo sapiens
  misc_RNA (1)...(19): siRNA sense strand
uccauucgccauuccauaa

SEQ ID NO: 1815704 - RNA, 19 nt, Homo sapiens
  misc_RNA (1)...(19): siRNA sense strand
gacuaccacugccuacaag

SEQ ID NO: 1815705 - RNA, 19 nt, Homo sapiens
  misc_RNA (1)...(19): siRNA sense strand
cuagaagacgaaauuacaa

SEQ ID NO: 1815706 - RNA, 19 nt, Homo sapiens
  misc_RNA (1)...(19): siRNA sense strand
acugaaccguugcaaggaa

SEQ ID NO: 1815707 - RNA, 19 nt, Homo sapiens
  misc_RNA (1)...(19): siRNA sense strand
cacaugaaacccugaguca

SEQ ID NO: 1815708 - RNA, 19 nt, Homo sapiens
  misc_RNA (1)...(19): siRNA sense strand
uaccacugccuacaagaaa

SEQ ID NO: 1815709 - RNA, 19 nt, Homo sapiens
  misc_RNA (1)...(19): siRNA sense strand
gaaaaggaagaguuaaaag

SEQ ID NO: 1815710 - RNA, 19 nt, Homo sapiens
  misc_RNA (1)...(19): siRNA sense strand
cgaaauuacaacacuacga

SEQ ID NO: 1815711 - RNA, 19 nt, Homo sapiens
  misc_RNA (1)...(19): siRNA sense strand
agacuaccacugccuacaa

SEQ ID NO: 1815712 - RNA, 19 nt, Homo sapiens
  misc_RNA (1)...(19): siRNA sense strand
uaaguaugccugcuaugag

SEQ ID NO: 1815713 - RNA, 19 nt, Homo sapiens
  misc_RNA (1)...(19): siRNA sense strand
aagguuuguuggagacuga

SEQ ID NO: 1815714 - RNA, 19 nt, Homo sapiens
  misc_RNA (1)...(19): siRNA sense strand
guuaaaagcagaguuaguu

SEQ ID NO: 1815715 - RNA, 19 nt, Homo sapiens
  misc_RNA (1)...(19): siRNA sense strand
cuccuacuuucaaaucauu

SEQ ID NO: 1815716 - RNA, 19 nt, Homo sapiens
  misc_RNA (1)...(19): siRNA sense strand
cuaccacugccuacaagaa

SEQ ID NO: 1815717 - RNA, 19 nt, Homo sapiens
  misc_RNA (1)...(19): siRNA sense strand
aagacgaaauuacaacacu

SEQ ID NO: 1815718 - RNA, 19 nt, Homo sapiens
  misc_RNA (1)...(19): siRNA sense strand
gaagacgaaauuacaacac

SEQ ID NO: 1815719 - RNA, 19 nt, Homo sapiens
  misc_RNA (1)...(19): siRNA sense strand
caugcucucugaggaggaa

SEQ ID NO: 1815720 - RNA, 19 nt, Homo sapiens
  misc_RNA (1)...(19): siRNA sense strand
agaguuaaaagcagaguua

SEQ ID NO: 1815721 - RNA, 19 nt, Homo sapiens
  misc_RNA (1)...(19): siRNA sense strand
gacgaaauuacaacacuac

SEQ ID NO: 1815722 - RNA, 19 nt, Homo sapiens
  misc_RNA (1)...(19): siRNA sense strand
acaaaggucugcugucuga

SEQ ID NO: 1815723 - RNA, 19 nt, Homo sapiens
  misc_RNA (1)...(19): siRNA sense strand
gggcugagcuuaccaaggu

SEQ ID NO: 1815724 - RNA, 19 nt, Homo sapiens
  misc_RNA (1)...(19): siRNA sense strand
agucagaccucuacaagaa

SEQ ID NO: 1815725 - RNA, 19 nt, Homo sapiens
  misc_RNA (1)...(19): siRNA sense strand
caagauaucaaccugaauu

SEQ ID NO: 1815726 - RNA, 19 nt, Homo sapiens
  misc_RNA (1)...(19): siRNA sense strand
ggaccgaguugggaccaua

SEQ ID NO: 1815727 - RNA, 19 nt, Homo sapiens
  misc_RNA (1)...(19): siRNA sense strand
uaacaaaggucugcugucu

SEQ ID NO: 1815728 - RNA, 19 nt, Homo sapiens
  misc_RNA (1)...(19): siRNA sense strand
gcaggaagcuuggagacau

SEQ ID NO: 1815729 - RNA, 19 nt, Homo sapiens
  misc_RNA (1)...(19): siRNA sense strand
gccaagauaucaaccugaa

SEQ ID NO: 1815730 - RNA, 19 nt, Homo sapiens
  misc_RNA (1)...(19): siRNA sense strand
gcaggucucuagcgccuau

SEQ ID NO: 1815731 - RNA, 19 nt, Homo sapiens
  misc_RNA (1)...(19): siRNA sense strand
caagaagacucaggaaacu

SEQ ID NO: 1815732 - RNA, 19 nt, Homo sapiens
  misc_RNA (1)...(19): siRNA sense strand
ccugaauucuccuaacaaa

SEQ ID NO: 1815733 - RNA, 19 nt, Homo sapiens
  misc_RNA (1)...(19): siRNA sense strand
gaccauaaagucuaagguu

SEQ ID NO: 1815734 - RNA, 19 nt, Homo sapiens
  misc_RNA (1)...(19): siRNA sense strand
ucagaccucuacaagaaga

SEQ ID NO: 1815735 - RNA, 19 nt, Homo sapiens
  misc_RNA (1)...(19): siRNA sense strand
ggauguuccugucgacaca

SEQ ID NO: 1815736 - RNA, 19 nt, Homo sapiens
  misc_RNA (1)...(19): siRNA sense strand
gagaguggaaugagaaagu

SEQ ID NO: 1815737 - RNA, 19 nt, Homo sapiens
  misc_RNA (1)...(19): siRNA sense strand
cauaaagucuaagguugug

SEQ ID NO: 1815738 - RNA, 19 nt, Homo sapiens
  misc_RNA (1)...(19): siRNA sense strand
caagguggaagaggaaauu

SEQ ID NO: 1815739 - RNA, 19 nt, Homo sapiens
  misc_RNA (1)...(19): siRNA sense strand
gauaucaaccugaauucuc

SEQ ID NO: 1815740 - RNA, 19 nt, Homo sapiens
  misc_RNA (1)...(19): siRNA sense strand
ugaauucuccuaacaaagg

SEQ ID NO: 1815741 - RNA, 19 nt, Homo sapiens
  misc_RNA (1)...(19): siRNA sense strand
gaauucuccuaacaaaggu

SEQ ID NO: 1815742 - RNA, 19 nt, Homo sapiens
  misc_RNA (1)...(19): siRNA sense strand
ggaucccgcaccuuucuaa

SEQ ID NO: 1815743 - RNA, 19 nt, Homo sapiens
  misc_RNA (1)...(19): siRNA sense strand
acagugggcucugccauca

SEQ ID NO: 1815744 - RNA, 19 nt, Homo sapiens
  misc_RNA (1)...(19): siRNA sense strand
ugucggaucccgcaccuuu

SEQ ID NO: 1815745 - RNA, 19 nt, Homo sapiens
  misc_RNA (1)...(19): siRNA sense strand
caggaagcuuggagacaug

SEQ ID NO: 1815746 - RNA, 19 nt, Homo sapiens
  misc_RNA (1)...(19): siRNA sense strand
caaccugaauucuccuaac

SEQ ID NO: 1815747 - RNA, 19 nt, Homo sapiens
  misc_RNA (1)...(19): siRNA sense strand
ccauaaagucuaagguugu

SEQ ID NO: 1815748 - RNA, 19 nt, Homo sapiens
  misc_RNA (1)...(19): siRNA sense strand
ggaacucugcgaccuucaa

SEQ ID NO: 1815749 - RNA, 19 nt, Homo sapiens
  misc_RNA (1)...(19): siRNA sense strand
acaagaagacucaggaaac

SEQ ID NO: 1815750 - RNA, 19 nt, Homo sapiens
  misc_RNA (1)...(19): siRNA sense strand
aaccugaauucuccuaaca

SEQ ID NO: 1815751 - RNA, 19 nt, Homo sapiens
  misc_RNA (1)...(19): siRNA sense strand
ucacaggcaggacagaaga

SEQ ID NO: 1815752 - RNA, 19 nt, Homo sapiens
  misc_RNA (1)...(19): siRNA sense strand
gaacucugcgaccuucaag

SEQ ID NO: 1815753 - RNA, 19 nt, Homo sapiens
  misc_RNA (1)...(19): siRNA sense strand
guugggaccauaaagucua

SEQ ID NO: 1815754 - RNA, 19 nt, Homo sapiens
  misc_RNA (1)...(19): siRNA sense strand
ggaagaggaaauugucacu

SEQ ID NO: 1815755 - RNA, 19 nt, Homo sapiens
  misc_RNA (1)...(19): siRNA sense strand
agagagaacggcagugaca

SEQ ID NO: 1815756 - RNA, 19 nt, Homo sapiens
  misc_RNA (1)...(19): siRNA sense strand
gaguugggaccauaaaguc

SEQ ID NO: 1815757 - RNA, 19 nt, Homo sapiens
  misc_RNA (1)...(19): siRNA sense strand
gaccgaguugggaccauaa

SEQ ID NO: 1815758 - RNA, 19 nt, Homo sapiens
  misc_RNA (1)...(19): siRNA sense strand
uacaagaagacucaggaaa

SEQ ID NO: 1815759 - RNA, 19 nt, Homo sapiens
  misc_RNA (1)...(19): siRNA sense strand
aaacuuggagaguggaaug

SEQ ID NO: 1815760 - RNA, 19 nt, Homo sapiens
  misc_RNA (1)...(19): siRNA sense strand
ccagucagaccucuacaag

SEQ ID NO: 1815761 - RNA, 19 nt, Homo sapiens
  misc_RNA (1)...(19): siRNA sense strand
acagagagaacggcaguga

SEQ ID NO: 1815762 - RNA, 19 nt, Homo sapiens
  misc_RNA (1)...(19): siRNA sense strand
cgaguugggaccauaaagu

SEQ ID NO: 1815763 - RNA, 19 nt, Homo sapiens
  misc_RNA (1)...(19): siRNA sense strand
agaguggaaugagaaagug

SEQ ID NO: 1815764 - RNA, 19 nt, Homo sapiens
  misc_RNA (1)...(19): siRNA sense strand
gguggaagaggaaauuguc

SEQ ID NO: 1815765 - RNA, 19 nt, Homo sapiens
  misc_RNA (1)...(19): siRNA sense strand
gcgccuaugugaaaacuuc

SEQ ID NO: 1815766 - RNA, 19 nt, Homo sapiens
  misc_RNA (1)...(19): siRNA sense strand
uugggaccauaaagucuaa

SEQ ID NO: 1815767 - RNA, 19 nt, Homo sapiens
  misc_RNA (1)...(19): siRNA sense strand
gagagaacggcagugacaa

SEQ ID NO: 1815768 - RNA, 19 nt, Homo sapiens
  misc_RNA (1)...(19): siRNA sense strand
cuuggagaguggaaugaga

SEQ ID NO: 1815769 - RNA, 19 nt, Homo sapiens
  misc_RNA (1)...(19): siRNA sense strand
cuacaagaagacucaggaa

SEQ ID NO: 1815770 - RNA, 19 nt, Homo sapiens
  misc_RNA (1)...(19): siRNA sense strand
ggagugguguuauuuguuu

SEQ ID NO: 1815771 - RNA, 19 nt, Homo sapiens
  misc_RNA (1)...(19): siRNA sense strand
ugacaacccucgaagauau

SEQ ID NO: 1815772 - RNA, 19 nt, Homo sapiens
  misc_RNA (1)...(19): siRNA sense strand
ucccagaucuuauuucuuu

SEQ ID NO: 1815773 - RNA, 19 nt, Homo sapiens
  misc_RNA (1)...(19): siRNA sense strand
gggagaugcuggauacgua

SEQ ID NO: 1815774 - RNA, 19 nt, Homo sapiens
  misc_RNA (1)...(19): siRNA sense strand
gauuaugacugguacaaug

SEQ ID NO: 1815775 - RNA, 19 nt, Homo sapiens
  misc_RNA (1)...(19): siRNA sense strand
gaccuugccuggaacauug

SEQ ID NO: 1815776 - RNA, 19 nt, Homo sapiens
  misc_RNA (1)...(19): siRNA sense strand
guuuauuucuuccgaguua

SEQ ID NO: 1815777 - RNA, 19 nt, Homo sapiens
  misc_RNA (1)...(19): siRNA sense strand
gaagauaugacagugauga

SEQ ID NO: 1815778 - RNA, 19 nt, Homo sapiens
  misc_RNA (1)...(19): siRNA sense strand
ccaccuuagucguuuauuu

SEQ ID NO: 1815779 - RNA, 19 nt, Homo sapiens
  misc_RNA (1)...(19): siRNA sense strand
gauaugacagugaugauga

SEQ ID NO: 1815780 - RNA, 19 nt, Homo sapiens
  misc_RNA (1)...(19): siRNA sense strand
acucuuaccuaccaccuua

SEQ ID NO: 1815781 - RNA, 19 nt, Homo sapiens
  misc_RNA (1)...(19): siRNA sense strand
ggaagguuaucgucucugu

SEQ ID NO: 1815782 - RNA, 19 nt, Homo sapiens
  misc_RNA (1)...(19): siRNA sense strand
uaucagaccaggcagauuu

SEQ ID NO: 1815783 - RNA, 19 nt, Homo sapiens
  misc_RNA (1)...(19): siRNA sense strand
caagagcguccauuccuuu

SEQ ID NO: 1815784 - RNA, 19 nt, Homo sapiens
  misc_RNA (1)...(19): siRNA sense strand
gagcguccauuccuuugau

SEQ ID NO: 1815785 - RNA, 19 nt, Homo sapiens
  misc_RNA (1)...(19): siRNA sense strand
ugacagugaugaugaccuu

SEQ ID NO: 1815786 - RNA, 19 nt, Homo sapiens
  misc_RNA (1)...(19): siRNA sense strand
ucacgcugaugaacuugua

SEQ ID NO: 1815787 - RNA, 19 nt, Homo sapiens
  misc_RNA (1)...(19): siRNA sense strand
cuccagaauuacucaaaua

SEQ ID NO: 1815788 - RNA, 19 nt, Homo sapiens
  misc_RNA (1)...(19): siRNA sense strand
gcugggagaugcuggauac

SEQ ID NO: 1815789 - RNA, 19 nt, Homo sapiens
  misc_RNA (1)...(19): siRNA sense strand
gcaggaacuuugcaagacu

SEQ ID NO: 1815790 - RNA, 19 nt, Homo sapiens
  misc_RNA (1)...(19): siRNA sense strand
ccaggcagauuugaagaau

SEQ ID NO: 1815791 - RNA, 19 nt, Homo sapiens
  misc_RNA (1)...(19): siRNA sense strand
gaggaagguuaucgucucu

SEQ ID NO: 1815792 - RNA, 19 nt, Homo sapiens
  misc_RNA (1)...(19): siRNA sense strand
gacaacaaacuaacagcuu

SEQ ID NO: 1815793 - RNA, 19 nt, Homo sapiens
  misc_RNA (1)...(19): siRNA sense strand
gaacaagagcguccauucc

SEQ ID NO: 1815794 - RNA, 19 nt, Homo sapiens
  misc_RNA (1)...(19): siRNA sense strand
gauucagucccagaucuua

SEQ ID NO: 1815795 - RNA, 19 nt, Homo sapiens
  misc_RNA (1)...(19): siRNA sense strand
ucgaagauaugacagugau

SEQ ID NO: 1815796 - RNA, 19 nt, Homo sapiens
  misc_RNA (1)...(19): siRNA sense strand
gcaagacucaacuuuggau

SEQ ID NO: 1815797 - RNA, 19 nt, Homo sapiens
  misc_RNA (1)...(19): siRNA sense strand
gaaauugggagaggaaggu

SEQ ID NO: 1815798 - RNA, 19 nt, Homo sapiens
  misc_RNA (1)...(19): siRNA sense strand
gcuccagauuacuaugauu

SEQ ID NO: 1815799 - RNA, 19 nt, Homo sapiens
  misc_RNA (1)...(19): siRNA sense strand
augaugaccuugccuggaa

SEQ ID NO: 1815800 - RNA, 19 nt, Homo sapiens
  misc_RNA (1)...(19): siRNA sense strand
gcgcugcucuucguguuca

SEQ ID NO: 1815801 - RNA, 19 nt, Homo sapiens
  misc_RNA (1)...(19): siRNA sense strand
cuuagucguuuauuucuuc

SEQ ID NO: 1815802 - RNA, 19 nt, Homo sapiens
  misc_RNA (1)...(19): siRNA sense strand
cuaccaccuuagucguuua

SEQ ID NO: 1815803 - RNA, 19 nt, Homo sapiens
  misc_RNA (1)...(19): siRNA sense strand
gaugcuggauacguauuau

SEQ ID NO: 1815804 - RNA, 19 nt, Homo sapiens
  misc_RNA (1)...(19): siRNA sense strand
acaagagcguccauuccuu

SEQ ID NO: 1815805 - RNA, 19 nt, Homo sapiens
  misc_RNA (1)...(19): siRNA sense strand
caagggcuccuccgugugu

SEQ ID NO: 1815806 - RNA, 19 nt, Homo sapiens
  misc_RNA (1)...(19): siRNA sense strand
gguaaagacgggaaauugg

SEQ ID NO: 1815807 - RNA, 19 nt, Homo sapiens
  misc_RNA (1)...(19): siRNA sense strand
gaacuuugcaagacucaac

SEQ ID NO: 1815808 - RNA, 19 nt, Homo sapiens
  misc_RNA (1)...(19): siRNA sense strand
ccagaucuuauuucuuuga

SEQ ID NO: 1815809 - RNA, 19 nt, Homo sapiens
  misc_RNA (1)...(19): siRNA sense strand
cgaguuagaaauccuacaa

SEQ ID NO: 1815810 - RNA, 19 nt, Homo sapiens
  misc_RNA (1)...(19): siRNA sense strand
uauuuggagugguguuauu

SEQ ID NO: 1815811 - RNA, 19 nt, Homo sapiens
  misc_RNA (1)...(19): siRNA sense strand
uccauuccuuugauuauga

SEQ ID NO: 1815812 - RNA, 19 nt, Homo sapiens
  misc_RNA (1)...(19): siRNA sense strand
cuccaucugucucuacaaa

SEQ ID NO: 1815813 - RNA, 19 nt, Homo sapiens
  misc_RNA (1)...(19): siRNA sense strand
ggagaugcuggauacguau

SEQ ID NO: 1815814 - RNA, 19 nt, Homo sapiens
  misc_RNA (1)...(19): siRNA sense strand
uugcaagacucaacuuugg

SEQ ID NO: 1815815 - RNA, 19 nt, Homo sapiens
  misc_RNA (1)...(19): siRNA sense strand
gcacaagcaggaacuuugc

SEQ ID NO: 1815816 - RNA, 19 nt, Homo sapiens
  misc_RNA (1)...(19): siRNA sense strand
ggcacaagcaggaacuuug

SEQ ID NO: 1815817 - RNA, 19 nt, Homo sapiens
  misc_RNA (1)...(19): siRNA sense strand
gaccuuaccaacccuggaa

SEQ ID NO: 1815818 - RNA, 19 nt, Homo sapiens
  misc_RNA (1)...(19): siRNA sense strand
caccuuagucguuuauuuc

SEQ ID NO: 1815819 - RNA, 19 nt, Homo sapiens
  misc_RNA (1)...(19): siRNA sense strand
ccuaccaccuuagucguuu

SEQ ID NO: 1815820 - RNA, 19 nt, Homo sapiens
  misc_RNA (1)...(19): siRNA sense strand
ucaaagccaagucaaaaua

SEQ ID NO: 1815821 - RNA, 19 nt, Homo sapiens
  misc_RNA (1)...(19): siRNA sense strand
gccacaagcggcucagcua

SEQ ID NO: 1815822 - RNA, 19 nt, Homo sapiens
  misc_RNA (1)...(19): siRNA sense strand
gaguuagaaauccuacaaa

SEQ ID NO: 1815823 - RNA, 19 nt, Homo sapiens
  misc_RNA (1)...(19): siRNA sense strand
gcuacaaccuguucauccu

SEQ ID NO: 1815824 - RNA, 19 nt, Homo sapiens
  misc_RNA (1)...(19): siRNA sense strand
gugcugugcugguaaagac

SEQ ID NO: 1815825 - RNA, 19 nt, Homo sapiens
  misc_RNA (1)...(19): siRNA sense strand
caacuuuggauccugacaa

SEQ ID NO: 1815826 - RNA, 19 nt, Homo sapiens
  misc_RNA (1)...(19): siRNA sense strand
ccucuucuccuucuacuuc

SEQ ID NO: 1815827 - RNA, 19 nt, Homo sapiens
  misc_RNA (1)...(19): siRNA sense strand
guccauuccuuugauuaug

SEQ ID NO: 1815828 - RNA, 19 nt, Homo sapiens
  misc_RNA (1)...(19): siRNA sense strand
gcuggauacguauuauuug

SEQ ID NO: 1815829 - RNA, 19 nt, Homo sapiens
  misc_RNA (1)...(19): siRNA sense strand
cuaccuggccucccucuuc

SEQ ID NO: 1815830 - RNA, 19 nt, Homo sapiens
  misc_RNA (1)...(19): siRNA sense strand
ugggaacucuuaccuacca

SEQ ID NO: 1815831 - RNA, 19 nt, Homo sapiens
  misc_RNA (1)...(19): siRNA sense strand
gagugguguuauuuguuug

SEQ ID NO: 1815832 - RNA, 19 nt, Homo sapiens
  misc_RNA (1)...(19): siRNA sense strand
ccugugcugugcugguaaa

SEQ ID NO: 1815833 - RNA, 19 nt, Homo sapiens
  misc_RNA (1)...(19): siRNA sense strand
ucuccagaauuacucaaau

SEQ ID NO: 1815834 - RNA, 19 nt, Homo sapiens
  misc_RNA (1)...(19): siRNA sense strand
aagcaggaacuuugcaaga

SEQ ID NO: 1815835 - RNA, 19 nt, Homo sapiens
  misc_RNA (1)...(19): siRNA sense strand
ggauucagucccagaucuu

SEQ ID NO: 1815836 - RNA, 19 nt, Homo sapiens
  misc_RNA (1)...(19): siRNA sense strand
gagaugcuggauacguauu

SEQ ID NO: 1815837 - RNA, 19 nt, Homo sapiens
  misc_RNA (1)...(19): siRNA sense strand
uaccuggccucccucuuca

SEQ ID NO: 1815838 - RNA, 19 nt, Homo sapiens
  misc_RNA (1)...(19): siRNA sense strand
aaccugugcugugcuggua

SEQ ID NO: 1815839 - RNA, 19 nt, Homo sapiens
  misc_RNA (1)...(19): siRNA sense strand
agaacaagagcguccauuc

SEQ ID NO: 1815840 - RNA, 19 nt, Homo sapiens
  misc_RNA (1)...(19): siRNA sense strand
guccuuagccaacauuuac

SEQ ID NO: 1815841 - RNA, 19 nt, Homo sapiens
  misc_RNA (1)...(19): siRNA sense strand
gcguccauuccuuugauua

SEQ ID NO: 1815842 - RNA, 19 nt, Homo sapiens
  misc_RNA (1)...(19): siRNA sense strand
aguuagaaauccuacaaag

SEQ ID NO: 1815843 - RNA, 19 nt, Homo sapiens
  misc_RNA (1)...(19): siRNA sense strand
ugguaaagacgggaaauug

SEQ ID NO: 1815844 - RNA, 19 nt, Homo sapiens
  misc_RNA (1)...(19): siRNA sense strand
cuggauacguauuauuugg

SEQ ID NO: 1815845 - RNA, 19 nt, Homo sapiens
  misc_RNA (1)...(19): siRNA sense strand
gaccaggcagauuugaaga

SEQ ID NO: 1815846 - RNA, 19 nt, Homo sapiens
  misc_RNA (1)...(19): siRNA sense strand
cgaguggccauuaaugaca

SEQ ID NO: 1815847 - RNA, 19 nt, Homo sapiens
  misc_RNA (1)...(19): siRNA sense strand
gcugaugaacuuguacuuc

SEQ ID NO: 1815848 - RNA, 19 nt, Homo sapiens
  misc_RNA (1)...(19): siRNA sense strand
ugcuggauacguauuauuu

SEQ ID NO: 1815849 - RNA, 19 nt, Homo sapiens
  misc_RNA (1)...(19): siRNA sense strand
ucuggcuggugcugcguua

SEQ ID NO: 1815850 - RNA, 19 nt, Homo sapiens
  misc_RNA (1)...(19): siRNA sense strand
agaugcuggauacguauua

SEQ ID NO: 1815851 - RNA, 19 nt, Homo sapiens
  misc_RNA (1)...(19): siRNA sense strand
ugaccuugccuggaacauu

SEQ ID NO: 1815852 - RNA, 19 nt, Homo sapiens
  misc_RNA (1)...(19): siRNA sense strand
gacaacccucgaagauaug

SEQ ID NO: 1815853 - RNA, 19 nt, Homo sapiens
  misc_RNA (1)...(19): siRNA sense strand
guuagaaauccuacaaagg

SEQ ID NO: 1815854 - RNA, 19 nt, Homo sapiens
  misc_RNA (1)...(19): siRNA sense strand
gcucaacccucguaucugu

SEQ ID NO: 1815855 - RNA, 19 nt, Homo sapiens
  misc_RNA (1)...(19): siRNA sense strand
cgccugcgcuauccuauua

SEQ ID NO: 1815856 - RNA, 19 nt, Homo sapiens
  misc_RNA (1)...(19): siRNA sense strand
cggagugccugcagaagua

SEQ ID NO: 1815857 - RNA, 19 nt, Homo sapiens
  misc_RNA (1)...(19): siRNA sense strand
uaucacacaugacggguuu

SEQ ID NO: 1815858 - RNA, 19 nt, Homo sapiens
  misc_RNA (1)...(19): siRNA sense strand
ccucaccgcuuucaucuuc

SEQ ID NO: 1815859 - RNA, 19 nt, Homo sapiens
  misc_RNA (1)...(19): siRNA sense strand
gagcucaacccucguaucu

SEQ ID NO: 1815860 - RNA, 19 nt, Homo sapiens
  misc_RNA (1)...(19): siRNA sense strand
ggucaauggcuuccaguug

SEQ ID NO: 1815861 - RNA, 19 nt, Homo sapiens
  misc_RNA (1)...(19): siRNA sense strand
gguccgccaucccaacuau

SEQ ID NO: 1815862 - RNA, 19 nt, Homo sapiens
  misc_RNA (1)...(19): siRNA sense strand
ggcaggaauugaaggacaa

SEQ ID NO: 1815863 - RNA, 19 nt, Homo sapiens
  misc_RNA (1)...(19): siRNA sense strand
ggaauugaaggacaagagu

SEQ ID NO: 1815864 - RNA, 19 nt, Homo sapiens
  misc_RNA (1)...(19): siRNA sense strand
ugacggguuuggcuucaug

SEQ ID NO: 1815865 - RNA, 19 nt, Homo sapiens
  misc_RNA (1)...(19): siRNA sense strand
gcccauggccucugucauc

SEQ ID NO: 1815866 - RNA, 19 nt, Homo sapiens
  misc_RNA (1)...(19): siRNA sense strand
caucaugcccuacaucuac

SEQ ID NO: 1815867 - RNA, 19 nt, Homo sapiens
  misc_RNA (1)...(19): siRNA sense strand
gagcggagugccugcagaa

SEQ ID NO: 1815868 - RNA, 19 nt, Homo sapiens
  misc_RNA (1)...(19): siRNA sense strand
cgacuucaaauauuucugu

SEQ ID NO: 1815869 - RNA, 19 nt, Homo sapiens
  misc_RNA (1)...(19): siRNA sense strand
gaugaaggaggcagagcuu

SEQ ID NO: 1815870 - RNA, 19 nt, Homo sapiens
  misc_RNA (1)...(19): siRNA sense strand
ucugucaucugccucauca

SEQ ID NO: 1815871 - RNA, 19 nt, Homo sapiens
  misc_RNA (1)...(19): siRNA sense strand
ucaucaaccuggcccuguu

SEQ ID NO: 1815872 - RNA, 19 nt, Homo sapiens
  misc_RNA (1)...(19): siRNA sense strand
gaggcgcacucugggaaug

SEQ ID NO: 1815873 - RNA, 19 nt, Homo sapiens
  misc_RNA (1)...(19): siRNA sense strand
ccaggagccucgacacacu

SEQ ID NO: 1815874 - RNA, 19 nt, Homo sapiens
  misc_RNA (1)...(19): siRNA sense strand
ucgccacccucaccgcuuu

SEQ ID NO: 1815875 - RNA, 19 nt, Homo sapiens
  misc_RNA (1)...(19): siRNA sense strand
ucaacccucguaucuguuu

SEQ ID NO: 1815876 - RNA, 19 nt, Homo sapiens
  misc_RNA (1)...(19): siRNA sense strand
caccauggauaucacacau

SEQ ID NO: 1815877 - RNA, 19 nt, Homo sapiens
  misc_RNA (1)...(19): siRNA sense strand
uggcugggcuugagaccau

SEQ ID NO: 1815878 - RNA, 19 nt, Homo sapiens
  misc_RNA (1)...(19): siRNA sense strand
cagccucuuucucuacaug

SEQ ID NO: 1815879 - RNA, 19 nt, Homo sapiens
  misc_RNA (1)...(19): siRNA sense strand
caaauauuucugugaacug

SEQ ID NO: 1815880 - RNA, 19 nt, Homo sapiens
  misc_RNA (1)...(19): siRNA sense strand
cagaguggcugggcuugag

SEQ ID NO: 1815881 - RNA, 19 nt, Homo sapiens
  misc_RNA (1)...(19): siRNA sense strand
cgacacacuugggacucaa

SEQ ID NO: 1815882 - RNA, 19 nt, Homo sapiens
  misc_RNA (1)...(19): siRNA sense strand
guccucaccaccauggaua

SEQ ID NO: 1815883 - RNA, 19 nt, Homo sapiens
  misc_RNA (1)...(19): siRNA sense strand
gaccaggagccucgacaca

SEQ ID NO: 1815884 - RNA, 19 nt, Homo sapiens
  misc_RNA (1)...(19): siRNA sense strand
gcggagugccugcagaagu

SEQ ID NO: 1815885 - RNA, 19 nt, Homo sapiens
  misc_RNA (1)...(19): siRNA sense strand
gcaggaggagggucuucga

SEQ ID NO: 1815886 - RNA, 19 nt, Homo sapiens
  misc_RNA (1)...(19): siRNA sense strand
guaucuguuucuucgacuu

SEQ ID NO: 1815887 - RNA, 19 nt, Homo sapiens
  misc_RNA (1)...(19): siRNA sense strand
ucaucugccucaucaaugc

SEQ ID NO: 1815888 - RNA, 19 nt, Homo sapiens
  misc_RNA (1)...(19): siRNA sense strand
cuacaugaaggcgcaggua

SEQ ID NO: 1815889 - RNA, 19 nt, Homo sapiens
  misc_RNA (1)...(19): siRNA sense strand
acuucuaccuccucuacuu

SEQ ID NO: 1815890 - RNA, 19 nt, Homo sapiens
  misc_RNA (1)...(19): siRNA sense strand
caugacggguuuggcuuca

SEQ ID NO: 1815891 - RNA, 19 nt, Homo sapiens
  misc_RNA (1)...(19): siRNA sense strand
aaccuggcccuguugauga

SEQ ID NO: 1815892 - RNA, 19 nt, Homo sapiens
  misc_RNA (1)...(19): siRNA sense strand
ggagaaccauugucauaua

SEQ ID NO: 1815893 - RNA, 19 nt, Homo sapiens
  misc_RNA (1)...(19): siRNA sense strand
gcacagcucuccuauugaa

SEQ ID NO: 1815894 - RNA, 19 nt, Homo sapiens
  misc_RNA (1)...(19): siRNA sense strand
ggacacagauuauccuuau

SEQ ID NO: 1815895 - RNA, 19 nt, Homo sapiens
  misc_RNA (1)...(19): siRNA sense strand
gaauggaucuauagugauu

SEQ ID NO: 1815896 - RNA, 19 nt, Homo sapiens
  misc_RNA (1)...(19): siRNA sense strand
gaaacucacuuuagacaau

SEQ ID NO: 1815897 - RNA, 19 nt, Homo sapiens
  misc_RNA (1)...(19): siRNA sense strand
gaaacuugcuguagaugaa

SEQ ID NO: 1815898 - RNA, 19 nt, Homo sapiens
  misc_RNA (1)...(19): siRNA sense strand
gcugaaagcuuaaaugcaa

SEQ ID NO: 1815899 - RNA, 19 nt, Homo sapiens
  misc_RNA (1)...(19): siRNA sense strand
ugagggaucugaaccaaua

SEQ ID NO: 1815900 - RNA, 19 nt, Homo sapiens
  misc_RNA (1)...(19): siRNA sense strand
gggaugaccugaagagaaa

SEQ ID NO: 1815901 - RNA, 19 nt, Homo sapiens
  misc_RNA (1)...(19): siRNA sense strand
gcccagauguucucagaua

SEQ ID NO: 1815902 - RNA, 19 nt, Homo sapiens
  misc_RNA (1)...(19): siRNA sense strand
gauaagaacgguagacuug

SEQ ID NO: 1815903 - RNA, 19 nt, Homo sapiens
  misc_RNA (1)...(19): siRNA sense strand
gugaauggaucuauaguga

SEQ ID NO: 1815904 - RNA, 19 nt, Homo sapiens
  misc_RNA (1)...(19): siRNA sense strand
gcaaguagauggcgauaac

SEQ ID NO: 1815905 - RNA, 19 nt, Homo sapiens
  misc_RNA (1)...(19): siRNA sense strand
ggaaaugggccugaguuua

SEQ ID NO: 1815906 - RNA, 19 nt, Homo sapiens
  misc_RNA (1)...(19): siRNA sense strand
gcaaugugcugaaagagau

SEQ ID NO: 1815907 - RNA, 19 nt, Homo sapiens
  misc_RNA (1)...(19): siRNA sense strand
ccaucaagcugcugaauga

SEQ ID NO: 1815908 - RNA, 19 nt, Homo sapiens
  misc_RNA (1)...(19): siRNA sense strand
caauugguguguugauaua

SEQ ID NO: 1815909 - RNA, 19 nt, Homo sapiens
  misc_RNA (1)...(19): siRNA sense strand
gagcagacauaaaggaaau

SEQ ID NO: 1815910 - RNA, 19 nt, Homo sapiens
  misc_RNA (1)...(19): siRNA sense strand
caacugcuuucauuuguga

SEQ ID NO: 1815911 - RNA, 19 nt, Homo sapiens
  misc_RNA (1)...(19): siRNA sense strand
gaaaugggccugaguuuac

SEQ ID NO: 1815912 - RNA, 19 nt, Homo sapiens
  misc_RNA (1)...(19): siRNA sense strand
guaaacugguccaugcuaa

SEQ ID NO: 1815913 - RNA, 19 nt, Homo sapiens
  misc_RNA (1)...(19): siRNA sense strand
gaaaagcuguuugggaaua

SEQ ID NO: 1815914 - RNA, 19 nt, Homo sapiens
  misc_RNA (1)...(19): siRNA sense strand
gaucagcauucucuaacuu

SEQ ID NO: 1815915 - RNA, 19 nt, Homo sapiens
  misc_RNA (1)...(19): siRNA sense strand
gaugaaacuugcuguagau

SEQ ID NO: 1815916 - RNA, 19 nt, Homo sapiens
  misc_RNA (1)...(19): siRNA sense strand
ucucagauauggucuuaaa

SEQ ID NO: 1815917 - RNA, 19 nt, Homo sapiens
  misc_RNA (1)...(19): siRNA sense strand
aggcacagcucuccuauug

SEQ ID NO: 1815918 - RNA, 19 nt, Homo sapiens
  misc_RNA (1)...(19): siRNA sense strand
uaagaacgguagacuuguu

SEQ ID NO: 1815919 - RNA, 19 nt, Homo sapiens
  misc_RNA (1)...(19): siRNA sense strand
ggagacuucuuccgugcua

SEQ ID NO: 1815920 - RNA, 19 nt, Homo sapiens
  misc_RNA (1)...(19): siRNA sense strand
uguauacgcuuauugagaa

SEQ ID NO: 1815921 - RNA, 19 nt, Homo sapiens
  misc_RNA (1)...(19): siRNA sense strand
ugcaaaugcugaaagcuua

SEQ ID NO: 1815922 - RNA, 19 nt, Homo sapiens
  misc_RNA (1)...(19): siRNA sense strand
caucaggauugccuaauau

SEQ ID NO: 1815923 - RNA, 19 nt, Homo sapiens
  misc_RNA (1)...(19): siRNA sense strand
cagacuaaauuucccauug

SEQ ID NO: 1815924 - RNA, 19 nt, Homo sapiens
  misc_RNA (1)...(19): siRNA sense strand
ugauuaaacuaacccauga

SEQ ID NO: 1815925 - RNA, 19 nt, Homo sapiens
  misc_RNA (1)...(19): siRNA sense strand
ucaucaggauugccuaaua

SEQ ID NO: 1815926 - RNA, 19 nt, Homo sapiens
  misc_RNA (1)...(19): siRNA sense strand
agagaaaguugucggagaa

SEQ ID NO: 1815927 - RNA, 19 nt, Homo sapiens
  misc_RNA (1)...(19): siRNA sense strand
uaaacuaacccaugauguu

SEQ ID NO: 1815928 - RNA, 19 nt, Homo sapiens
  misc_RNA (1)...(19): siRNA sense strand
gcagaagcauuaucuuugc

SEQ ID NO: 1815929 - RNA, 19 nt, Homo sapiens
  misc_RNA (1)...(19): siRNA sense strand
guucucagauauggucuua

SEQ ID NO: 1815930 - RNA, 19 nt, Homo sapiens
  misc_RNA (1)...(19): siRNA sense strand
gaaaaucaccuuugcagaa

SEQ ID NO: 1815931 - RNA, 19 nt, Homo sapiens
  misc_RNA (1)...(19): siRNA sense strand
aauugaaccuggacuauga

SEQ ID NO: 1815932 - RNA, 19 nt, Homo sapiens
  misc_RNA (1)...(19): siRNA sense strand
gauaaagcgguucuuggua

SEQ ID NO: 1815933 - RNA, 19 nt, Homo sapiens
  misc_RNA (1)...(19): siRNA sense strand
cugaauggcuagagggaua

SEQ ID NO: 1815934 - RNA, 19 nt, Homo sapiens
  misc_RNA (1)...(19): siRNA sense strand
uaacuuguuugguggagaa

SEQ ID NO: 1815935 - RNA, 19 nt, Homo sapiens
  misc_RNA (1)...(19): siRNA sense strand
gcuggucaguucgugauua

SEQ ID NO: 1815936 - RNA, 19 nt, Homo sapiens
  misc_RNA (1)...(19): siRNA sense strand
ccacuguuguauacgcuua

SEQ ID NO: 1815937 - RNA, 19 nt, Homo sapiens
  misc_RNA (1)...(19): siRNA sense strand
ucagaaagcaagaauguga

SEQ ID NO: 1815938 - RNA, 19 nt, Homo sapiens
  misc_RNA (1)...(19): siRNA sense strand
guggagaaccauugucaua

SEQ ID NO: 1815939 - RNA, 19 nt, Homo sapiens
  misc_RNA (1)...(19): siRNA sense strand
cagcagaagcauuaucuuu

SEQ ID NO: 1815940 - RNA, 19 nt, Homo sapiens
  misc_RNA (1)...(19): siRNA sense strand
ggaaccgagucuccaguga

SEQ ID NO: 1815941 - RNA, 19 nt, Homo sapiens
  misc_RNA (1)...(19): siRNA sense strand
gcucuccuauugaaacuug

SEQ ID NO: 1815942 - RNA, 19 nt, Homo sapiens
  misc_RNA (1)...(19): siRNA sense strand
gcaauugguguguugauau

SEQ ID NO: 1815943 - RNA, 19 nt, Homo sapiens
  misc_RNA (1)...(19): siRNA sense strand
uaguaaggcugcaacaguu

SEQ ID NO: 1815944 - RNA, 19 nt, Homo sapiens
  misc_RNA (1)...(19): siRNA sense strand
gagaaccauugucauauac

SEQ ID NO: 1815945 - RNA, 19 nt, Homo sapiens
  misc_RNA (1)...(19): siRNA sense strand
gaauuuaaacucagcaaag

SEQ ID NO: 1815946 - RNA, 19 nt, Homo sapiens
  misc_RNA (1)...(19): siRNA sense strand
guaccaccauggacaccua

SEQ ID NO: 1815947 - RNA, 19 nt, Homo sapiens
  misc_RNA (1)...(19): siRNA sense strand
gacuaaauuucccauuguu

SEQ ID NO: 1815948 - RNA, 19 nt, Homo sapiens
  misc_RNA (1)...(19): siRNA sense strand
ggagaugaaacuugcugua

SEQ ID NO: 1815949 - RNA, 19 nt, Homo sapiens
  misc_RNA (1)...(19): siRNA sense strand
gagaaacucacuuuagaca

SEQ ID NO: 1815950 - RNA, 19 nt, Homo sapiens
  misc_RNA (1)...(19): siRNA sense strand
gaaaacagacucuacaugu

SEQ ID NO: 1815951 - RNA, 19 nt, Homo sapiens
  misc_RNA (1)...(19): siRNA sense strand
gaauauggaaggagacugu

SEQ ID NO: 1815952 - RNA, 19 nt, Homo sapiens
  misc_RNA (1)...(19): siRNA sense strand
agacuaaauuucccauugu

SEQ ID NO: 1815953 - RNA, 19 nt, Homo sapiens
  misc_RNA (1)...(19): siRNA sense strand
caacagauuucgggaaugc

SEQ ID NO: 1815954 - RNA, 19 nt, Homo sapiens
  misc_RNA (1)...(19): siRNA sense strand
agaggucgcuggucaguuc

SEQ ID NO: 1815955 - RNA, 19 nt, Homo sapiens
  misc_RNA (1)...(19): siRNA sense strand
cagcccagcagaagcauua

SEQ ID NO: 1815956 - RNA, 19 nt, Homo sapiens
  misc_RNA (1)...(19): siRNA sense strand
gccaacugcuuucauuugu

SEQ ID NO: 1815957 - RNA, 19 nt, Homo sapiens
  misc_RNA (1)...(19): siRNA sense strand
ccaauacagagcagacaua

SEQ ID NO: 1815958 - RNA, 19 nt, Homo sapiens
  misc_RNA (1)...(19): siRNA sense strand
agaaccagaucacuauguu

SEQ ID NO: 1815959 - RNA, 19 nt, Homo sapiens
  misc_RNA (1)...(19): siRNA sense strand
cagcuuuacuggagaacuu

SEQ ID NO: 1815960 - RNA, 19 nt, Homo sapiens
  misc_RNA (1)...(19): siRNA sense strand
acagauuugucaugaagaa

SEQ ID NO: 1815961 - RNA, 19 nt, Homo sapiens
  misc_RNA (1)...(19): siRNA sense strand
ggauaaagcgguucuuggu

SEQ ID NO: 1815962 - RNA, 19 nt, Homo sapiens
  misc_RNA (1)...(19): siRNA sense strand
caaaggccaaugucacaaa

SEQ ID NO: 1815963 - RNA, 19 nt, Homo sapiens
  misc_RNA (1)...(19): siRNA sense strand
gaacugauugagaggauuc

SEQ ID NO: 1815964 - RNA, 19 nt, Homo sapiens
  misc_RNA (1)...(19): siRNA sense strand
agaugaaacuugcuguaga

SEQ ID NO: 1815965 - RNA, 19 nt, Homo sapiens
  misc_RNA (1)...(19): siRNA sense strand
gcaaaugcugaaagcuuaa

SEQ ID NO: 1815966 - RNA, 19 nt, Homo sapiens
  misc_RNA (1)...(19): siRNA sense strand
aaucuugcguuguauguug

SEQ ID NO: 1815967 - RNA, 19 nt, Homo sapiens
  misc_RNA (1)...(19): siRNA sense strand
uaaaugcaauugguguguu

SEQ ID NO: 1815968 - RNA, 19 nt, Homo sapiens
  misc_RNA (1)...(19): siRNA sense strand
acagccaacugcuuucauu

SEQ ID NO: 1815969 - RNA, 19 nt, Homo sapiens
  misc_RNA (1)...(19): siRNA sense strand
gaauugaaccuggacuaug

SEQ ID NO: 1815970 - RNA, 19 nt, Homo sapiens
  misc_RNA (1)...(19): siRNA sense strand
uaacgcagaacuuucauuc

SEQ ID NO: 1815971 - RNA, 19 nt, Homo sapiens
  misc_RNA (1)...(19): siRNA sense strand
uaacggugcuuuuaaugaa

SEQ ID NO: 1815972 - RNA, 19 nt, Homo sapiens
  misc_RNA (1)...(19): siRNA sense strand
auacagagcagacauaaag

SEQ ID NO: 1815973 - RNA, 19 nt, Homo sapiens
  misc_RNA (1)...(19): siRNA sense strand
cccaugauguugaauugaa

SEQ ID NO: 1815974 - RNA, 19 nt, Homo sapiens
  misc_RNA (1)...(19): siRNA sense strand
gaaacuugcccagauguuc

SEQ ID NO: 1815975 - RNA, 19 nt, Homo sapiens
  misc_RNA (1)...(19): siRNA sense strand
ccagaucacuauguuguag

SEQ ID NO: 1815976 - RNA, 19 nt, Homo sapiens
  misc_RNA (1)...(19): siRNA sense strand
gaaacgcuguucagaaacc

SEQ ID NO: 1815977 - RNA, 19 nt, Homo sapiens
  misc_RNA (1)...(19): siRNA sense strand
gaacuugaaacugcguaaa

SEQ ID NO: 1815978 - RNA, 19 nt, Homo sapiens
  misc_RNA (1)...(19): siRNA sense strand
uuucgucccugcauuuaaa

SEQ ID NO: 1815979 - RNA, 19 nt, Homo sapiens
  misc_RNA (1)...(19): siRNA sense strand
gcauuaucuuugccaguug

SEQ ID NO: 1815980 - RNA, 19 nt, Homo sapiens
  misc_RNA (1)...(19): siRNA sense strand
caauacagagcagacauaa

SEQ ID NO: 1815981 - RNA, 19 nt, Homo sapiens
  misc_RNA (1)...(19): siRNA sense strand
guacaacagccaacugcuu

SEQ ID NO: 1815982 - RNA, 19 nt, Homo sapiens
  misc_RNA (1)...(19): siRNA sense strand
aaacuaacccaugauguug

SEQ ID NO: 1815983 - RNA, 19 nt, Homo sapiens
  misc_RNA (1)...(19): siRNA sense strand
uaacagucauguggagaug

SEQ ID NO: 1815984 - RNA, 19 nt, Homo sapiens
  misc_RNA (1)...(19): siRNA sense strand
guaaagggguagaaccaaa

SEQ ID NO: 1815985 - RNA, 19 nt, Homo sapiens
  misc_RNA (1)...(19): siRNA sense strand
ggaacugauugagaggauu

SEQ ID NO: 1815986 - RNA, 19 nt, Homo sapiens
  misc_RNA (1)...(19): siRNA sense strand
uuggagugcuggagacuuu

SEQ ID NO: 1815987 - RNA, 19 nt, Homo sapiens
  misc_RNA (1)...(19): siRNA sense strand
caagcuagaucagcauucu

SEQ ID NO: 1815988 - RNA, 19 nt, Homo sapiens
  misc_RNA (1)...(19): siRNA sense strand
gaaccagaucacuauguug

SEQ ID NO: 1815989 - RNA, 19 nt, Homo sapiens
  misc_RNA (1)...(19): siRNA sense strand
aaaacagacucuacaugua

SEQ ID NO: 1815990 - RNA, 19 nt, Homo sapiens
  misc_RNA (1)...(19): siRNA sense strand
uggauucccuuccuucaau

SEQ ID NO: 1815991 - RNA, 19 nt, Homo sapiens
  misc_RNA (1)...(19): siRNA sense strand
cagcacgucgcuuauauug

SEQ ID NO: 1815992 - RNA, 19 nt, Homo sapiens
  misc_RNA (1)...(19): siRNA sense strand
gaaaugacgggacaaguuu

SEQ ID NO: 1815993 - RNA, 19 nt, Homo sapiens
  misc_RNA (1)...(19): siRNA sense strand
ggaaaugacgggacaaguu

SEQ ID NO: 1815994 - RNA, 19 nt, Homo sapiens
  misc_RNA (1)...(19): siRNA sense strand
gaauggaaccgcagagaca

SEQ ID NO: 1815995 - RNA, 19 nt, Homo sapiens
  misc_RNA (1)...(19): siRNA sense strand
ggaaauaccaggaaaugac

SEQ ID NO: 1815996 - RNA, 19 nt, Homo sapiens
  misc_RNA (1)...(19): siRNA sense strand
acaaggaaauaccaggaaa

SEQ ID NO: 1815997 - RNA, 19 nt, Homo sapiens
  misc_RNA (1)...(19): siRNA sense strand
cccaggaggugacaaggaa

SEQ ID NO: 1815998 - RNA, 19 nt, Homo sapiens
  misc_RNA (1)...(19): siRNA sense strand
ucaugcaccucaccgagaa

SEQ ID NO: 1815999 - RNA, 19 nt, Homo sapiens
  misc_RNA (1)...(19): siRNA sense strand
cagccgaggugcacaacau

SEQ ID NO: 1816000 - RNA, 19 nt, Homo sapiens
  misc_RNA (1)...(19): siRNA sense strand
ggaagucgaggacgagagu

SEQ ID NO: 1816001 - RNA, 19 nt, Homo sapiens
  misc_RNA (1)...(19): siRNA sense strand
gacaaggaaauaccaggaa

SEQ ID NO: 1816002 - RNA, 19 nt, Homo sapiens
  misc_RNA (1)...(19): siRNA sense strand
gagaauggaaccgcagaga

SEQ ID NO: 1816003 - RNA, 19 nt, Homo sapiens
  misc_RNA (1)...(19): siRNA sense strand
ugacgggacaaguuuggua

SEQ ID NO: 1816004 - RNA, 19 nt, Homo sapiens
  misc_RNA (1)...(19): siRNA sense strand
caaggaaauaccaggaaau

SEQ ID NO: 1816005 - RNA, 19 nt, Homo sapiens
  misc_RNA (1)...(19): siRNA sense strand
gcacuucuccagccuccau

SEQ ID NO: 1816006 - RNA, 19 nt, Homo sapiens
  misc_RNA (1)...(19): siRNA sense strand
uggagcagguggugaugau

SEQ ID NO: 1816007 - RNA, 19 nt, Homo sapiens
  misc_RNA (1)...(19): siRNA sense strand
gcaggcagcgaagagaaug

SEQ ID NO: 1816008 - RNA, 19 nt, Homo sapiens
  misc_RNA (1)...(19): siRNA sense strand
aaggaaauaccaggaaaug

SEQ ID NO: 1816009 - RNA, 19 nt, Homo sapiens
  misc_RNA (1)...(19): siRNA sense strand
ccccugaucucuacaccua

SEQ ID NO: 1816010 - RNA, 19 nt, Homo sapiens
  misc_RNA (1)...(19): siRNA sense strand
ccgcagagacagaggaagu

SEQ ID NO: 1816011 - RNA, 19 nt, Homo sapiens
  misc_RNA (1)...(19): siRNA sense strand
ccaaaucuaugacaaauuc

SEQ ID NO: 1816012 - RNA, 19 nt, Homo sapiens
  misc_RNA (1)...(19): siRNA sense strand
gcaagcaggugguggagaa

SEQ ID NO: 1816013 - RNA, 19 nt, Homo sapiens
  misc_RNA (1)...(19): siRNA sense strand
ccacgaaggucugcucuuu

SEQ ID NO: 1816014 - RNA, 19 nt, Homo sapiens
  misc_RNA (1)...(19): siRNA sense strand
gggcagaccucaacaccaa

SEQ ID NO: 1816015 - RNA, 19 nt, Homo sapiens
  misc_RNA (1)...(19): siRNA sense strand
ggacauccgccaaaucuau

SEQ ID NO: 1816016 - RNA, 19 nt, Homo sapiens
  misc_RNA (1)...(19): siRNA sense strand
uaaaggaccaggcagcuaa

SEQ ID NO: 1816017 - RNA, 19 nt, Homo sapiens
  misc_RNA (1)...(19): siRNA sense strand
ucaagcaccucccugagaa

SEQ ID NO: 1816018 - RNA, 19 nt, Homo sapiens
  misc_RNA (1)...(19): siRNA sense strand
gugaguacaugaucaacuu

SEQ ID NO: 1816019 - RNA, 19 nt, Homo sapiens
  misc_RNA (1)...(19): siRNA sense strand
agaauggacacuacucuua

SEQ ID NO: 1816020 - RNA, 19 nt, Homo sapiens
  misc_RNA (1)...(19): siRNA sense strand
gugcauugccuaugucuuu

SEQ ID NO: 1816021 - RNA, 19 nt, Homo sapiens
  misc_RNA (1)...(19): siRNA sense strand
ggacaagcccaucgacaau

SEQ ID NO: 1816022 - RNA, 19 nt, Homo sapiens
  misc_RNA (1)...(19): siRNA sense strand
ccugagaaguacaugauga

SEQ ID NO: 1816023 - RNA, 19 nt, Homo sapiens
  misc_RNA (1)...(19): siRNA sense strand
gaaaguugagacagaguau

SEQ ID NO: 1816024 - RNA, 19 nt, Homo sapiens
  misc_RNA (1)...(19): siRNA sense strand
ucuacaggcuggugaaaga

SEQ ID NO: 1816025 - RNA, 19 nt, Homo sapiens
  misc_RNA (1)...(19): siRNA sense strand
gacagaguaugcucgcuau

SEQ ID NO: 1816026 - RNA, 19 nt, Homo sapiens
  misc_RNA (1)...(19): siRNA sense strand
ggaagacccgcaccaggaa

SEQ ID NO: 1816027 - RNA, 19 nt, Homo sapiens
  misc_RNA (1)...(19): siRNA sense strand
gccgaaacgucccaugaug

SEQ ID NO: 1816028 - RNA, 19 nt, Homo sapiens
  misc_RNA (1)...(19): siRNA sense strand
acaagcccaucgacaauga

SEQ ID NO: 1816029 - RNA, 19 nt, Homo sapiens
  misc_RNA (1)...(19): siRNA sense strand
ggugcuggcucgucgcaaa

SEQ ID NO: 1816030 - RNA, 19 nt, Homo sapiens
  misc_RNA (1)...(19): siRNA sense strand
gccacggccuuccacagua

SEQ ID NO: 1816031 - RNA, 19 nt, Homo sapiens
  misc_RNA (1)...(19): siRNA sense strand
acucaaggaucucuucgaa

SEQ ID NO: 1816032 - RNA, 19 nt, Homo sapiens
  misc_RNA (1)...(19): siRNA sense strand
cccaugaugugaagccuuu

SEQ ID NO: 1816033 - RNA, 19 nt, Homo sapiens
  misc_RNA (1)...(19): siRNA sense strand
uggagaaaguugagacaga

SEQ ID NO: 1816034 - RNA, 19 nt, Homo sapiens
  misc_RNA (1)...(19): siRNA sense strand
gcaccucccugagaaguac

SEQ ID NO: 1816035 - RNA, 19 nt, Homo sapiens
  misc_RNA (1)...(19): siRNA sense strand
gggcucagcaccacaucua

SEQ ID NO: 1816036 - RNA, 19 nt, Homo sapiens
  misc_RNA (1)...(19): siRNA sense strand
agaaguacaugaugaacag

SEQ ID NO: 1816037 - RNA, 19 nt, Homo sapiens
  misc_RNA (1)...(19): siRNA sense strand
gagaauggacacuacucuu

SEQ ID NO: 1816038 - RNA, 19 nt, Homo sapiens
  misc_RNA (1)...(19): siRNA sense strand
gagaaguacaugaugaaca

SEQ ID NO: 1816039 - RNA, 19 nt, Homo sapiens
  misc_RNA (1)...(19): siRNA sense strand
gaauggacacuacucuuac

SEQ ID NO: 1816040 - RNA, 19 nt, Homo sapiens
  misc_RNA (1)...(19): siRNA sense strand
cagaguaugcucgcuauga

SEQ ID NO: 1816041 - RNA, 19 nt, Homo sapiens
  misc_RNA (1)...(19): siRNA sense strand
gcuaugagaauggacacua

SEQ ID NO: 1816042 - RNA, 19 nt, Homo sapiens
  misc_RNA (1)...(19): siRNA sense strand
ggacgagggcaagauguau

SEQ ID NO: 1816043 - RNA, 19 nt, Homo sapiens
  misc_RNA (1)...(19): siRNA sense strand
cgaaacgucccaugaugug

SEQ ID NO: 1816044 - RNA, 19 nt, Homo sapiens
  misc_RNA (1)...(19): siRNA sense strand
gcaaagcucgcgagaucca

SEQ ID NO: 1816045 - RNA, 19 nt, Homo sapiens
  misc_RNA (1)...(19): siRNA sense strand
ugacaaauucccggagaaa

SEQ ID NO: 1816046 - RNA, 19 nt, Homo sapiens
  misc_RNA (1)...(19): siRNA sense strand
cgccaaaucuaugacaaau

SEQ ID NO: 1816047 - RNA, 19 nt, Homo sapiens
  misc_RNA (1)...(19): siRNA sense strand
ccacggccuuccacaguag

SEQ ID NO: 1816048 - RNA, 19 nt, Homo sapiens
  misc_RNA (1)...(19): siRNA sense strand
gaaacgucccaugauguga

SEQ ID NO: 1816049 - RNA, 19 nt, Homo sapiens
  misc_RNA (1)...(19): siRNA sense strand
acaaggcccugcagagcau

SEQ ID NO: 1816050 - RNA, 19 nt, Homo sapiens
  misc_RNA (1)...(19): siRNA sense strand
aaacgucccaugaugugaa

SEQ ID NO: 1816051 - RNA, 19 nt, Homo sapiens
  misc_RNA (1)...(19): siRNA sense strand
gaacggggacccuccaaug

SEQ ID NO: 1816052 - RNA, 19 nt, Homo sapiens
  misc_RNA (1)...(19): siRNA sense strand
gcaggucuccagccacauc

SEQ ID NO: 1816053 - RNA, 19 nt, Homo sapiens
  misc_RNA (1)...(19): siRNA sense strand
gcugauugcccgcuacauc

SEQ ID NO: 1816054 - RNA, 19 nt, Homo sapiens
  misc_RNA (1)...(19): siRNA sense strand
gagauccaggccaagcuaa

SEQ ID NO: 1816055 - RNA, 19 nt, Homo sapiens
  misc_RNA (1)...(19): siRNA sense strand
ccaggcagcuaaggacaag

SEQ ID NO: 1816056 - RNA, 19 nt, Homo sapiens
  misc_RNA (1)...(19): siRNA sense strand
agaaaguugagacagagua

SEQ ID NO: 1816057 - RNA, 19 nt, Homo sapiens
  misc_RNA (1)...(19): siRNA sense strand
guguggagcccggauauug

SEQ ID NO: 1816058 - RNA, 19 nt, Homo sapiens
  misc_RNA (1)...(19): siRNA sense strand
cgagauccaggccaagcua

SEQ ID NO: 1816059 - RNA, 19 nt, Homo sapiens
  misc_RNA (1)...(19): siRNA sense strand
aagccuuucucucagcaaa

SEQ ID NO: 1816060 - RNA, 19 nt, Homo sapiens
  misc_RNA (1)...(19): siRNA sense strand
gcauugccuaugucuuuga

SEQ ID NO: 1816061 - RNA, 19 nt, Homo sapiens
  misc_RNA (1)...(19): siRNA sense strand
agaguaugcucgcuaugag

SEQ ID NO: 1816062 - RNA, 19 nt, Homo sapiens
  misc_RNA (1)...(19): siRNA sense strand
guggacauccgccaaaucu

SEQ ID NO: 1816063 - RNA, 19 nt, Homo sapiens
  misc_RNA (1)...(19): siRNA sense strand
gcucagcaccacaucuaca

SEQ ID NO: 1816064 - RNA, 19 nt, Homo sapiens
  misc_RNA (1)...(19): siRNA sense strand
gacaagcccaucgacaaug

SEQ ID NO: 1816065 - RNA, 19 nt, Homo sapiens
  misc_RNA (1)...(19): siRNA sense strand
gcaggugguggagaaaguu

SEQ ID NO: 1816066 - RNA, 19 nt, Homo sapiens
  misc_RNA (1)...(19): siRNA sense strand
gacauccgccaaaucuaug

SEQ ID NO: 1816067 - RNA, 19 nt, Homo sapiens
  misc_RNA (1)...(19): siRNA sense strand
gaguaugcucgcuaugaga

SEQ ID NO: 1816068 - RNA, 19 nt, Homo sapiens
  misc_RNA (1)...(19): siRNA sense strand
gagacacacaggagaccuu

SEQ ID NO: 1816069 - RNA, 19 nt, Homo sapiens
  misc_RNA (1)...(19): siRNA sense strand
gaucaacuucauccacaag

SEQ ID NO: 1816070 - RNA, 19 nt, Homo sapiens
  misc_RNA (1)...(19): siRNA sense strand
cggacgagggcaagaugua

SEQ ID NO: 1816071 - RNA, 19 nt, Homo sapiens
  misc_RNA (1)...(19): siRNA sense strand
gccaaaucuaugacaaauu

SEQ ID NO: 1816072 - RNA, 19 nt, Homo sapiens
  misc_RNA (1)...(19): siRNA sense strand
gacgagggcaagauguaug

SEQ ID NO: 1816073 - RNA, 19 nt, Homo sapiens
  misc_RNA (1)...(19): siRNA sense strand
caacaccaacaucgaggau

SEQ ID NO: 1816074 - RNA, 19 nt, Homo sapiens
  misc_RNA (1)...(19): siRNA sense strand
gcagaccucaacaccaaca

SEQ ID NO: 1816075 - RNA, 19 nt, Homo sapiens
  misc_RNA (1)...(19): siRNA sense strand
uggacaagcccaucgacaa

SEQ ID NO: 1816076 - RNA, 19 nt, Homo sapiens
  misc_RNA (1)...(19): siRNA sense strand
ugaucaacuucauccacaa

SEQ ID NO: 1816077 - RNA, 19 nt, Homo sapiens
  misc_RNA (1)...(19): siRNA sense strand
acaggcuggugaaagaaug

SEQ ID NO: 1816078 - RNA, 19 nt, Homo sapiens
  misc_RNA (1)...(19): siRNA sense strand
cuaaaggaccaggcagcua

SEQ ID NO: 1816079 - RNA, 19 nt, Homo sapiens
  misc_RNA (1)...(19): siRNA sense strand
ccgaaacgucccaugaugu

SEQ ID NO: 1816080 - RNA, 19 nt, Homo sapiens
  misc_RNA (1)...(19): siRNA sense strand
gaguacaugaucaacuuca

SEQ ID NO: 1816081 - RNA, 19 nt, Homo sapiens
  misc_RNA (1)...(19): siRNA sense strand
gcaccauuaccuccaacga

SEQ ID NO: 1816082 - RNA, 19 nt, Homo sapiens
  misc_RNA (1)...(19): siRNA sense strand
gauccaggccaagcuaaag

SEQ ID NO: 1816083 - RNA, 19 nt, Homo sapiens
  misc_RNA (1)...(19): siRNA sense strand
ccgccaaaucuaugacaaa

SEQ ID NO: 1816084 - RNA, 19 nt, Homo sapiens
  misc_RNA (1)...(19): siRNA sense strand
cuaugagaauggacacuac

SEQ ID NO: 1816085 - RNA, 19 nt, Homo sapiens
  misc_RNA (1)...(19): siRNA sense strand
uaugcucgcuaugagaaug

SEQ ID NO: 1816086 - RNA, 19 nt, Homo sapiens
  misc_RNA (1)...(19): siRNA sense strand
gaacgggccuggaaccaua

SEQ ID NO: 1816087 - RNA, 19 nt, Homo sapiens
  misc_RNA (1)...(19): siRNA sense strand
gagcugacguggaagauga

SEQ ID NO: 1816088 - RNA, 19 nt, Homo sapiens
  misc_RNA (1)...(19): siRNA sense strand
gcaaagcauuggaaucaga

SEQ ID NO: 1816089 - RNA, 19 nt, Homo sapiens
  misc_RNA (1)...(19): siRNA sense strand
guacagguuucacgcaugu

SEQ ID NO: 1816090 - RNA, 19 nt, Homo sapiens
  misc_RNA (1)...(19): siRNA sense strand
gcacugcccucagacuuca

SEQ ID NO: 1816091 - RNA, 19 nt, Homo sapiens
  misc_RNA (1)...(19): siRNA sense strand
ggaaucagacagcacuuga

SEQ ID NO: 1816092 - RNA, 19 nt, Homo sapiens
  misc_RNA (1)...(19): siRNA sense strand
gagccagucucaccuucaa

SEQ ID NO: 1816093 - RNA, 19 nt, Homo sapiens
  misc_RNA (1)...(19): siRNA sense strand
gguggaugauuucuuguug

SEQ ID NO: 1816094 - RNA, 19 nt, Homo sapiens
  misc_RNA (1)...(19): siRNA sense strand
cgccugagcuguacuuugu

SEQ ID NO: 1816095 - RNA, 19 nt, Homo sapiens
  misc_RNA (1)...(19): siRNA sense strand
gcucaggucuuucuuuuau

SEQ ID NO: 1816096 - RNA, 19 nt, Homo sapiens
  misc_RNA (1)...(19): siRNA sense strand
ggaagagugucuggagcaa

SEQ ID NO: 1816097 - RNA, 19 nt, Homo sapiens
  misc_RNA (1)...(19): siRNA sense strand
gguaugccgugguccagaa

SEQ ID NO: 1816098 - RNA, 19 nt, Homo sapiens
  misc_RNA (1)...(19): siRNA sense strand
ugcaggagcugacguggaa

SEQ ID NO: 1816099 - RNA, 19 nt, Homo sapiens
  misc_RNA (1)...(19): siRNA sense strand
ucacggagaccacguuuca

SEQ ID NO: 1816100 - RNA, 19 nt, Homo sapiens
  misc_RNA (1)...(19): siRNA sense strand
ucaggaacaccaagaaguu

SEQ ID NO: 1816101 - RNA, 19 nt, Homo sapiens
  misc_RNA (1)...(19): siRNA sense strand
ggucaucgccagcaucauc

SEQ ID NO: 1816102 - RNA, 19 nt, Homo sapiens
  misc_RNA (1)...(19): siRNA sense strand
gagugaccgugguuucugu

SEQ ID NO: 1816103 - RNA, 19 nt, Homo sapiens
  misc_RNA (1)...(19): siRNA sense strand
ccagaacguuccgcagaga

SEQ ID NO: 1816104 - RNA, 19 nt, Homo sapiens
  misc_RNA (1)...(19): siRNA sense strand
gaaucagacagcacuugaa

SEQ ID NO: 1816105 - RNA, 19 nt, Homo sapiens
  misc_RNA (1)...(19): siRNA sense strand
gcgacgacgugcugguuca

SEQ ID NO: 1816106 - RNA, 19 nt, Homo sapiens
  misc_RNA (1)...(19): siRNA sense strand
gcucguggagaccaucuuu

SEQ ID NO: 1816107 - RNA, 19 nt, Homo sapiens
  misc_RNA (1)...(19): siRNA sense strand
aagagugucuggagcaagu

SEQ ID NO: 1816108 - RNA, 19 nt, Homo sapiens
  misc_RNA (1)...(19): siRNA sense strand
uuugguggaugauuucuug

SEQ ID NO: 1816109 - RNA, 19 nt, Homo sapiens
  misc_RNA (1)...(19): siRNA sense strand
agaccaagcacuuccucua

SEQ ID NO: 1816110 - RNA, 19 nt, Homo sapiens
  misc_RNA (1)...(19): siRNA sense strand
gagaccacguuucaaaaga

SEQ ID NO: 1816111 - RNA, 19 nt, Homo sapiens
  misc_RNA (1)...(19): siRNA sense strand
caucagcaaguuuggaaga

SEQ ID NO: 1816112 - RNA, 19 nt, Homo sapiens
  misc_RNA (1)...(19): siRNA sense strand
gugcugggccuggacgaua

SEQ ID NO: 1816113 - RNA, 19 nt, Homo sapiens
  misc_RNA (1)...(19): siRNA sense strand
ucagacagcacuugaagag

SEQ ID NO: 1816114 - RNA, 19 nt, Homo sapiens
  misc_RNA (1)...(19): siRNA sense strand
ucagcgugcucaacuacga

SEQ ID NO: 1816115 - RNA, 19 nt, Homo sapiens
  misc_RNA (1)...(19): siRNA sense strand
ccucagacuucaagaccau

SEQ ID NO: 1816116 - RNA, 19 nt, Homo sapiens
  misc_RNA (1)...(19): siRNA sense strand
gaggucaucgccagcauca

SEQ ID NO: 1816117 - RNA, 19 nt, Homo sapiens
  misc_RNA (1)...(19): siRNA sense strand
ccaagcacuuccucuacuc

SEQ ID NO: 1816118 - RNA, 19 nt, Homo sapiens
  misc_RNA (1)...(19): siRNA sense strand
ggagauccuggccaaguuc

SEQ ID NO: 1816119 - RNA, 19 nt, Homo sapiens
  misc_RNA (1)...(19): siRNA sense strand
gaugcgaacgggccuggaa

SEQ ID NO: 1816120 - RNA, 19 nt, Homo sapiens
  misc_RNA (1)...(19): siRNA sense strand
gcugcaggcguacagguuu

SEQ ID NO: 1816121 - RNA, 19 nt, Homo sapiens
  misc_RNA (1)...(19): siRNA sense strand
gcucccauuucaucagcaa

SEQ ID NO: 1816122 - RNA, 19 nt, Homo sapiens
  misc_RNA (1)...(19): siRNA sense strand
gaccaagcacuuccucuac

SEQ ID NO: 1816123 - RNA, 19 nt, Homo sapiens
  misc_RNA (1)...(19): siRNA sense strand
ccugagcuguacuuuguca

SEQ ID NO: 1816124 - RNA, 19 nt, Homo sapiens
  misc_RNA (1)...(19): siRNA sense strand
uugcaaagcauuggaauca

SEQ ID NO: 1816125 - RNA, 19 nt, Homo sapiens
  misc_RNA (1)...(19): siRNA sense strand
uuccugcacuggcugauga

SEQ ID NO: 1816126 - RNA, 19 nt, Homo sapiens
  misc_RNA (1)...(19): siRNA sense strand
uggaagaaccccacauuuu

SEQ ID NO: 1816127 - RNA, 19 nt, Homo sapiens
  misc_RNA (1)...(19): siRNA sense strand
ucaccucacccacgcgaaa

SEQ ID NO: 1816128 - RNA, 19 nt, Homo sapiens
  misc_RNA (1)...(19): siRNA sense strand
ugcguuugguggaugauuu

SEQ ID NO: 1816129 - RNA, 19 nt, Homo sapiens
  misc_RNA (1)...(19): siRNA sense strand
ggaccgagugaccgugguu

SEQ ID NO: 1816130 - RNA, 19 nt, Homo sapiens
  misc_RNA (1)...(19): siRNA sense strand
acggagaccacguuucaaa

SEQ ID NO: 1816131 - RNA, 19 nt, Homo sapiens
  misc_RNA (1)...(19): siRNA sense strand
guacugcgugcgucgguau

SEQ ID NO: 1816132 - RNA, 19 nt, Homo sapiens
  misc_RNA (1)...(19): siRNA sense strand
gcuacuccauccugaaagc

SEQ ID NO: 1816133 - RNA, 19 nt, Homo sapiens
  misc_RNA (1)...(19): siRNA sense strand
ggccgauugugaacaugga

SEQ ID NO: 1816134 - RNA, 19 nt, Homo sapiens
  misc_RNA (1)...(19): siRNA sense strand
gccaagaacgcagggaugu

SEQ ID NO: 1816135 - RNA, 19 nt, Homo sapiens
  misc_RNA (1)...(19): siRNA sense strand
gcugcucaggucuuucuuu

SEQ ID NO: 1816136 - RNA, 19 nt, Homo sapiens
  misc_RNA (1)...(19): siRNA sense strand
uggaugauuucuuguuggu

SEQ ID NO: 1816137 - RNA, 19 nt, Homo sapiens
  misc_RNA (1)...(19): siRNA sense strand
ccgaggaggaggacacaga

SEQ ID NO: 1816138 - RNA, 19 nt, Homo sapiens
  misc_RNA (1)...(19): siRNA sense strand
agaacguuccgcagagaaa

SEQ ID NO: 1816139 - RNA, 19 nt, Homo sapiens
  misc_RNA (1)...(19): siRNA sense strand
gcugugccaccaagcauuc

SEQ ID NO: 1816140 - RNA, 19 nt, Homo sapiens
  misc_RNA (1)...(19): siRNA sense strand
agucugccguugcccaaga

SEQ ID NO: 1816141 - RNA, 19 nt, Homo sapiens
  misc_RNA (1)...(19): siRNA sense strand
gagggugaaggcacuguuc

SEQ ID NO: 1816142 - RNA, 19 nt, Homo sapiens
  misc_RNA (1)...(19): siRNA sense strand
gaacgggccuggaaccaua

SEQ ID NO: 1816143 - RNA, 19 nt, Homo sapiens
  misc_RNA (1)...(19): siRNA sense strand
gagcugacguggaagauga

SEQ ID NO: 1816144 - RNA, 19 nt, Homo sapiens
  misc_RNA (1)...(19): siRNA sense strand
gcaaagcauuggaaucaga

SEQ ID NO: 1816145 - RNA, 19 nt, Homo sapiens
  misc_RNA (1)...(19): siRNA sense strand
ggaaucagacagcacuuga

SEQ ID NO: 1816146 - RNA, 19 nt, Homo sapiens
  misc_RNA (1)...(19): siRNA sense strand
cgccugagcuguacuuugu

SEQ ID NO: 1816147 - RNA, 19 nt, Homo sapiens
  misc_RNA (1)...(19): siRNA sense strand
gcucaggucuuucuuuuau

SEQ ID NO: 1816148 - RNA, 19 nt, Homo sapiens
  misc_RNA (1)...(19): siRNA sense strand
ggaagagugucuggagcaa

SEQ ID NO: 1816149 - RNA, 19 nt, Homo sapiens
  misc_RNA (1)...(19): siRNA sense strand
gguaugccgugguccagaa

SEQ ID NO: 1816150 - RNA, 19 nt, Homo sapiens
  misc_RNA (1)...(19): siRNA sense strand
ugcaggagcugacguggaa

SEQ ID NO: 1816151 - RNA, 19 nt, Homo sapiens
  misc_RNA (1)...(19): siRNA sense strand
ucacggagaccacguuuca

SEQ ID NO: 1816152 - RNA, 19 nt, Homo sapiens
  misc_RNA (1)...(19): siRNA sense strand
ucaggaacaccaagaaguu

SEQ ID NO: 1816153 - RNA, 19 nt, Homo sapiens
  misc_RNA (1)...(19): siRNA sense strand
ggucaucgccagcaucauc

SEQ ID NO: 1816154 - RNA, 19 nt, Homo sapiens
  misc_RNA (1)...(19): siRNA sense strand
gagugaccgugguuucugu

SEQ ID NO: 1816155 - RNA, 19 nt, Homo sapiens
  misc_RNA (1)...(19): siRNA sense strand
ccagaacguuccgcagaga

SEQ ID NO: 1816156 - RNA, 19 nt, Homo sapiens
  misc_RNA (1)...(19): siRNA sense strand
gaaucagacagcacuugaa

SEQ ID NO: 1816157 - RNA, 19 nt, Homo sapiens
  misc_RNA (1)...(19): siRNA sense strand
gcgacgacgugcugguuca

SEQ ID NO: 1816158 - RNA, 19 nt, Homo sapiens
  misc_RNA (1)...(19): siRNA sense strand
gcucguggagaccaucuuu

SEQ ID NO: 1816159 - RNA, 19 nt, Homo sapiens
  misc_RNA (1)...(19): siRNA sense strand
aagagugucuggagcaagu

SEQ ID NO: 1816160 - RNA, 19 nt, Homo sapiens
  misc_RNA (1)...(19): siRNA sense strand
agaccaagcacuuccucua

SEQ ID NO: 1816161 - RNA, 19 nt, Homo sapiens
  misc_RNA (1)...(19): siRNA sense strand
gagaccacguuucaaaaga

SEQ ID NO: 1816162 - RNA, 19 nt, Homo sapiens
  misc_RNA (1)...(19): siRNA sense strand
gugcugggccuggacgaua

SEQ ID NO: 1816163 - RNA, 19 nt, Homo sapiens
  misc_RNA (1)...(19): siRNA sense strand
ucagacagcacuugaagag

SEQ ID NO: 1816164 - RNA, 19 nt, Homo sapiens
  misc_RNA (1)...(19): siRNA sense strand
ccaagcacuuccucuacuc

SEQ ID NO: 1816165 - RNA, 19 nt, Homo sapiens
  misc_RNA (1)...(19): siRNA sense strand
gaggucaucgccagcauca

SEQ ID NO: 1816166 - RNA, 19 nt, Homo sapiens
  misc_RNA (1)...(19): siRNA sense strand
ucagcgugcucaacuacga

SEQ ID NO: 1816167 - RNA, 19 nt, Homo sapiens
  misc_RNA (1)...(19): siRNA sense strand
ggagauccuggccaaguuc

SEQ ID NO: 1816168 - RNA, 19 nt, Homo sapiens
  misc_RNA (1)...(19): siRNA sense strand
gaugcgaacgggccuggaa

SEQ ID NO: 1816169 - RNA, 19 nt, Homo sapiens
  misc_RNA (1)...(19): siRNA sense strand
uugcaaagcauuggaauca

SEQ ID NO: 1816170 - RNA, 19 nt, Homo sapiens
  misc_RNA (1)...(19): siRNA sense strand
ccugagcuguacuuuguca

SEQ ID NO: 1816171 - RNA, 19 nt, Homo sapiens
  misc_RNA (1)...(19): siRNA sense strand
gaccaagcacuuccucuac

SEQ ID NO: 1816172 - RNA, 19 nt, Homo sapiens
  misc_RNA (1)...(19): siRNA sense strand
uuccugcacuggcugauga

SEQ ID NO: 1816173 - RNA, 19 nt, Homo sapiens
  misc_RNA (1)...(19): siRNA sense strand
acggagaccacguuucaaa

SEQ ID NO: 1816174 - RNA, 19 nt, Homo sapiens
  misc_RNA (1)...(19): siRNA sense strand
ggaccgagugaccgugguu

SEQ ID NO: 1816175 - RNA, 19 nt, Homo sapiens
  misc_RNA (1)...(19): siRNA sense strand
guacugcgugcgucgguau

SEQ ID NO: 1816176 - RNA, 19 nt, Homo sapiens
  misc_RNA (1)...(19): siRNA sense strand
ggccgauugugaacaugga

SEQ ID NO: 1816177 - RNA, 19 nt, Homo sapiens
  misc_RNA (1)...(19): siRNA sense strand
ccgaggaggaggacacaga

SEQ ID NO: 1816178 - RNA, 19 nt, Homo sapiens
  misc_RNA (1)...(19): siRNA sense strand
gcugcucaggucuuucuuu

SEQ ID NO: 1816179 - RNA, 19 nt, Homo sapiens
  misc_RNA (1)...(19): siRNA sense strand
agucugccguugcccaaga

SEQ ID NO: 1816180 - RNA, 19 nt, Homo sapiens
  misc_RNA (1)...(19): siRNA sense strand
gagggugaaggcacuguuc

SEQ ID NO: 1816181 - RNA, 19 nt, Homo sapiens
  misc_RNA (1)...(19): siRNA sense strand
agaacguuccgcagagaaa

SEQ ID NO: 1816182 - RNA, 19 nt, Homo sapiens
  misc_RNA (1)...(19): siRNA sense strand
gaacgggccuggaaccaua

SEQ ID NO: 1816183 - RNA, 19 nt, Homo sapiens
  misc_RNA (1)...(19): siRNA sense strand
gagcugacguggaagauga

SEQ ID NO: 1816184 - RNA, 19 nt, Homo sapiens
  misc_RNA (1)...(19): siRNA sense strand
gcaaagcauuggaaucaga

SEQ ID NO: 1816185 - RNA, 19 nt, Homo sapiens
  misc_RNA (1)...(19): siRNA sense strand
ggaaucagacagcacuuga

SEQ ID NO: 1816186 - RNA, 19 nt, Homo sapiens
  misc_RNA (1)...(19): siRNA sense strand
cgccugagcuguacuuugu

SEQ ID NO: 1816187 - RNA, 19 nt, Homo sapiens
  misc_RNA (1)...(19): siRNA sense strand
gcucaggucuuucuuuuau

SEQ ID NO: 1816188 - RNA, 19 nt, Homo sapiens
  misc_RNA (1)...(19): siRNA sense strand
ggaagagugucuggagcaa

SEQ ID NO: 1816189 - RNA, 19 nt, Homo sapiens
  misc_RNA (1)...(19): siRNA sense strand
gguaugccgugguccagaa

SEQ ID NO: 1816190 - RNA, 19 nt, Homo sapiens
  misc_RNA (1)...(19): siRNA sense strand
ugcaggagcugacguggaa

SEQ ID NO: 1816191 - RNA, 19 nt, Homo sapiens
  misc_RNA (1)...(19): siRNA sense strand
ucacggagaccacguuuca

SEQ ID NO: 1816192 - RNA, 19 nt, Homo sapiens
  misc_RNA (1)...(19): siRNA sense strand
ucaggaacaccaagaaguu

SEQ ID NO: 1816193 - RNA, 19 nt, Homo sapiens
  misc_RNA (1)...(19): siRNA sense strand
ggucaucgccagcaucauc

SEQ ID NO: 1816194 - RNA, 19 nt, Homo sapiens
  misc_RNA (1)...(19): siRNA sense strand
gagugaccgugguuucugu

SEQ ID NO: 1816195 - RNA, 19 nt, Homo sapiens
  misc_RNA (1)...(19): siRNA sense strand
ccagaacguuccgcagaga

SEQ ID NO: 1816196 - RNA, 19 nt, Homo sapiens
  misc_RNA (1)...(19): siRNA sense strand
gaaucagacagcacuugaa

SEQ ID NO: 1816197 - RNA, 19 nt, Homo sapiens
  misc_RNA (1)...(19): siRNA sense strand
gcgacgacgugcugguuca

SEQ ID NO: 1816198 - RNA, 19 nt, Homo sapiens
  misc_RNA (1)...(19): siRNA sense strand
gcucguggagaccaucuuu

SEQ ID NO: 1816199 - RNA, 19 nt, Homo sapiens
  misc_RNA (1)...(19): siRNA sense strand
aagagugucuggagcaagu

SEQ ID NO: 1816200 - RNA, 19 nt, Homo sapiens
  misc_RNA (1)...(19): siRNA sense strand
agaccaagcacuuccucua

SEQ ID NO: 1816201 - RNA, 19 nt, Homo sapiens
  misc_RNA (1)...(19): siRNA sense strand
gagaccacguuucaaaaga

SEQ ID NO: 1816202 - RNA, 19 nt, Homo sapiens
  misc_RNA (1)...(19): siRNA sense strand
gugcugggccuggacgaua

SEQ ID NO: 1816203 - RNA, 19 nt, Homo sapiens
  misc_RNA (1)...(19): siRNA sense strand
ucagacagcacuugaagag

SEQ ID NO: 1816204 - RNA, 19 nt, Homo sapiens
  misc_RNA (1)...(19): siRNA sense strand
ccaagcacuuccucuacuc

SEQ ID NO: 1816205 - RNA, 19 nt, Homo sapiens
  misc_RNA (1)...(19): siRNA sense strand
gaggucaucgccagcauca

SEQ ID NO: 1816206 - RNA, 19 nt, Homo sapiens
  misc_RNA (1)...(19): siRNA sense strand
ucagcgugcucaacuacga

SEQ ID NO: 1816207 - RNA, 19 nt, Homo sapiens
  misc_RNA (1)...(19): siRNA sense strand
ggagauccuggccaaguuc

SEQ ID NO: 1816208 - RNA, 19 nt, Homo sapiens
  misc_RNA (1)...(19): siRNA sense strand
gaugcgaacgggccuggaa

SEQ ID NO: 1816209 - RNA, 19 nt, Homo sapiens
  misc_RNA (1)...(19): siRNA sense strand
uugcaaagcauuggaauca

SEQ ID NO: 1816210 - RNA, 19 nt, Homo sapiens
  misc_RNA (1)...(19): siRNA sense strand
ccugagcuguacuuuguca

SEQ ID NO: 1816211 - RNA, 19 nt, Homo sapiens
  misc_RNA (1)...(19): siRNA sense strand
gaccaagcacuuccucuac

SEQ ID NO: 1816212 - RNA, 19 nt, Homo sapiens
  misc_RNA (1)...(19): siRNA sense strand
uuccugcacuggcugauga

SEQ ID NO: 1816213 - RNA, 19 nt, Homo sapiens
  misc_RNA (1)...(19): siRNA sense strand
acggagaccacguuucaaa

SEQ ID NO: 1816214 - RNA, 19 nt, Homo sapiens
  misc_RNA (1)...(19): siRNA sense strand
ggaccgagugaccgugguu

SEQ ID NO: 1816215 - RNA, 19 nt, Homo sapiens
  misc_RNA (1)...(19): siRNA sense strand
guacugcgugcgucgguau

SEQ ID NO: 1816216 - RNA, 19 nt, Homo sapiens
  misc_RNA (1)...(19): siRNA sense strand
ggccgauugugaacaugga

SEQ ID NO: 1816217 - RNA, 19 nt, Homo sapiens
  misc_RNA (1)...(19): siRNA sense strand
ccgaggaggaggacacaga

SEQ ID NO: 1816218 - RNA, 19 nt, Homo sapiens
  misc_RNA (1)...(19): siRNA sense strand
gcugcucaggucuuucuuu

SEQ ID NO: 1816219 - RNA, 19 nt, Homo sapiens
  misc_RNA (1)...(19): siRNA sense strand
agucugccguugcccaaga

SEQ ID NO: 1816220 - RNA, 19 nt, Homo sapiens
  misc_RNA (1)...(19): siRNA sense strand
gagggugaaggcacuguuc

SEQ ID NO: 1816221 - RNA, 19 nt, Homo sapiens
  misc_RNA (1)...(19): siRNA sense strand
agaacguuccgcagagaaa

SEQ ID NO: 1816222 - RNA, 19 nt, Homo sapiens
  misc_RNA (1)...(19): siRNA sense strand
gaacgggccuggaaccaua

SEQ ID NO: 1816223 - RNA, 19 nt, Homo sapiens
  misc_RNA (1)...(19): siRNA sense strand
gagcugacguggaagauga

SEQ ID NO: 1816224 - RNA, 19 nt, Homo sapiens
  misc_RNA (1)...(19): siRNA sense strand
gcaaagcauuggaaucaga

SEQ ID NO: 1816225 - RNA, 19 nt, Homo sapiens
  misc_RNA (1)...(19): siRNA sense strand
guacagguuucacgcaugu

SEQ ID NO: 1816226 - RNA, 19 nt, Homo sapiens
  misc_RNA (1)...(19): siRNA sense strand
gcacugcccucagacuuca

SEQ ID NO: 1816227 - RNA, 19 nt, Homo sapiens
  misc_RNA (1)...(19): siRNA sense strand
ggaaucagacagcacuuga

SEQ ID NO: 1816228 - RNA, 19 nt, Homo sapiens
  misc_RNA (1)...(19): siRNA sense strand
gagccagucucaccuucaa

SEQ ID NO: 1816229 - RNA, 19 nt, Homo sapiens
  misc_RNA (1)...(19): siRNA sense strand
gguggaugauuucuuguug

SEQ ID NO: 1816230 - RNA, 19 nt, Homo sapiens
  misc_RNA (1)...(19): siRNA sense strand
cgccugagcuguacuuugu

SEQ ID NO: 1816231 - RNA, 19 nt, Homo sapiens
  misc_RNA (1)...(19): siRNA sense strand
gcucaggucuuucuuuuau

SEQ ID NO: 1816232 - RNA, 19 nt, Homo sapiens
  misc_RNA (1)...(19): siRNA sense strand
ggaagagugucuggagcaa

SEQ ID NO: 1816233 - RNA, 19 nt, Homo sapiens
  misc_RNA (1)...(19): siRNA sense strand
gguaugccgugguccagaa

SEQ ID NO: 1816234 - RNA, 19 nt, Homo sapiens
  misc_RNA (1)...(19): siRNA sense strand
ugcaggagcugacguggaa

SEQ ID NO: 1816235 - RNA, 19 nt, Homo sapiens
  misc_RNA (1)...(19): siRNA sense strand
ucacggagaccacguuuca

SEQ ID NO: 1816236 - RNA, 19 nt, Homo sapiens
  misc_RNA (1)...(19): siRNA sense strand
ucaggaacaccaagaaguu

SEQ ID NO: 1816237 - RNA, 19 nt, Homo sapiens
  misc_RNA (1)...(19): siRNA sense strand
ggucaucgccagcaucauc

SEQ ID NO: 1816238 - RNA, 19 nt, Homo sapiens
  misc_RNA (1)...(19): siRNA sense strand
gagugaccgugguuucugu

SEQ ID NO: 1816239 - RNA, 19 nt, Homo sapiens
  misc_RNA (1)...(19): siRNA sense strand
ccagaacguuccgcagaga

SEQ ID NO: 1816240 - RNA, 19 nt, Homo sapiens
  misc_RNA (1)...(19): siRNA sense strand
gaaucagacagcacuugaa

SEQ ID NO: 1816241 - RNA, 19 nt, Homo sapiens
  misc_RNA (1)...(19): siRNA sense strand
gcgacgacgugcugguuca

SEQ ID NO: 1816242 - RNA, 19 nt, Homo sapiens
  misc_RNA (1)...(19): siRNA sense strand
gcucguggagaccaucuuu

SEQ ID NO: 1816243 - RNA, 19 nt, Homo sapiens
  misc_RNA (1)...(19): siRNA sense strand
aagagugucuggagcaagu

SEQ ID NO: 1816244 - RNA, 19 nt, Homo sapiens
  misc_RNA (1)...(19): siRNA sense strand
uuugguggaugauuucuug

SEQ ID NO: 1816245 - RNA, 19 nt, Homo sapiens
  misc_RNA (1)...(19): siRNA sense strand
agaccaagcacuuccucua

SEQ ID NO: 1816246 - RNA, 19 nt, Homo sapiens
  misc_RNA (1)...(19): siRNA sense strand
gagaccacguuucaaaaga

SEQ ID NO: 1816247 - RNA, 19 nt, Homo sapiens
  misc_RNA (1)...(19): siRNA sense strand
caucagcaaguuuggaaga

SEQ ID NO: 1816248 - RNA, 19 nt, Homo sapiens
  misc_RNA (1)...(19): siRNA sense strand
gugcugggccuggacgaua

SEQ ID NO: 1816249 - RNA, 19 nt, Homo sapiens
  misc_RNA (1)...(19): siRNA sense strand
ucagacagcacuugaagag

SEQ ID NO: 1816250 - RNA, 19 nt, Homo sapiens
  misc_RNA (1)...(19): siRNA sense strand
ucagcgugcucaacuacga

SEQ ID NO: 1816251 - RNA, 19 nt, Homo sapiens
  misc_RNA (1)...(19): siRNA sense strand
ccucagacuucaagaccau

SEQ ID NO: 1816252 - RNA, 19 nt, Homo sapiens
  misc_RNA (1)...(19): siRNA sense strand
gaggucaucgccagcauca

SEQ ID NO: 1816253 - RNA, 19 nt, Homo sapiens
  misc_RNA (1)...(19): siRNA sense strand
ccaagcacuuccucuacuc

SEQ ID NO: 1816254 - RNA, 19 nt, Homo sapiens
  misc_RNA (1)...(19): siRNA sense strand
ggagauccuggccaaguuc

SEQ ID NO: 1816255 - RNA, 19 nt, Homo sapiens
  misc_RNA (1)...(19): siRNA sense strand
gaugcgaacgggccuggaa

SEQ ID NO: 1816256 - RNA, 19 nt, Homo sapiens
  misc_RNA (1)...(19): siRNA sense strand
gcugcaggcguacagguuu

SEQ ID NO: 1816257 - RNA, 19 nt, Homo sapiens
  misc_RNA (1)...(19): siRNA sense strand
gcucccauuucaucagcaa

SEQ ID NO: 1816258 - RNA, 19 nt, Homo sapiens
  misc_RNA (1)...(19): siRNA sense strand
gaccaagcacuuccucuac

SEQ ID NO: 1816259 - RNA, 19 nt, Homo sapiens
  misc_RNA (1)...(19): siRNA sense strand
ccugagcuguacuuuguca

SEQ ID NO: 1816260 - RNA, 19 nt, Homo sapiens
  misc_RNA (1)...(19): siRNA sense strand
uugcaaagcauuggaauca

SEQ ID NO: 1816261 - RNA, 19 nt, Homo sapiens
  misc_RNA (1)...(19): siRNA sense strand
uuccugcacuggcugauga

SEQ ID NO: 1816262 - RNA, 19 nt, Homo sapiens
  misc_RNA (1)...(19): siRNA sense strand
uggaagaaccccacauuuu

SEQ ID NO: 1816263 - RNA, 19 nt, Homo sapiens
  misc_RNA (1)...(19): siRNA sense strand
ucaccucacccacgcgaaa

SEQ ID NO: 1816264 - RNA, 19 nt, Homo sapiens
  misc_RNA (1)...(19): siRNA sense strand
ugcguuugguggaugauuu

SEQ ID NO: 1816265 - RNA, 19 nt, Homo sapiens
  misc_RNA (1)...(19): siRNA sense strand
ggaccgagugaccgugguu

SEQ ID NO: 1816266 - RNA, 19 nt, Homo sapiens
  misc_RNA (1)...(19): siRNA sense strand
acggagaccacguuucaaa

SEQ ID NO: 1816267 - RNA, 19 nt, Homo sapiens
  misc_RNA (1)...(19): siRNA sense strand
guacugcgugcgucgguau

SEQ ID NO: 1816268 - RNA, 19 nt, Homo sapiens
  misc_RNA (1)...(19): siRNA sense strand
gcuacuccauccugaaagc

SEQ ID NO: 1816269 - RNA, 19 nt, Homo sapiens
  misc_RNA (1)...(19): siRNA sense strand
ggccgauugugaacaugga

SEQ ID NO: 1816270 - RNA, 19 nt, Homo sapiens
  misc_RNA (1)...(19): siRNA sense strand
gccaagaacgcagggaugu

SEQ ID NO: 1816271 - RNA, 19 nt, Homo sapiens
  misc_RNA (1)...(19): siRNA sense strand
gcugcucaggucuuucuuu

SEQ ID NO: 1816272 - RNA, 19 nt, Homo sapiens
  misc_RNA (1)...(19): siRNA sense strand
uggaugauuucuuguuggu

SEQ ID NO: 1816273 - RNA, 19 nt, Homo sapiens
  misc_RNA (1)...(19): siRNA sense strand
ccgaggaggaggacacaga

SEQ ID NO: 1816274 - RNA, 19 nt, Homo sapiens
  misc_RNA (1)...(19): siRNA sense strand
agaacguuccgcagagaaa

SEQ ID NO: 1816275 - RNA, 19 nt, Homo sapiens
  misc_RNA (1)...(19): siRNA sense strand
gcugugccaccaagcauuc

SEQ ID NO: 1816276 - RNA, 19 nt, Homo sapiens
  misc_RNA (1)...(19): siRNA sense strand
agucugccguugcccaaga

SEQ ID NO: 1816277 - RNA, 19 nt, Homo sapiens
  misc_RNA (1)...(19): siRNA sense strand
gagggugaaggcacuguuc

SEQ ID NO: 1816278 - RNA, 19 nt, Homo sapiens
  misc_RNA (1)...(19): siRNA sense strand
gagagaagauuaugcauga

SEQ ID NO: 1816279 - RNA, 19 nt, Homo sapiens
  misc_RNA (1)...(19): siRNA sense strand
uaaagaaggucaagaagaa

SEQ ID NO: 1816280 - RNA, 19 nt, Homo sapiens
  misc_RNA (1)...(19): siRNA sense strand
agaaagagcucagcaagua

SEQ ID NO: 1816281 - RNA, 19 nt, Homo sapiens
  misc_RNA (1)...(19): siRNA sense strand
ggacaaacuugacaccaaa

SEQ ID NO: 1816282 - RNA, 19 nt, Homo sapiens
  misc_RNA (1)...(19): siRNA sense strand
ugaagaagaugccucagua

SEQ ID NO: 1816283 - RNA, 19 nt, Homo sapiens
  misc_RNA (1)...(19): siRNA sense strand
gauuaugcaugaugugaua

SEQ ID NO: 1816284 - RNA, 19 nt, Homo sapiens
  misc_RNA (1)...(19): siRNA sense strand
gcauaacgauuguggaaga

SEQ ID NO: 1816285 - RNA, 19 nt, Homo sapiens
  misc_RNA (1)...(19): siRNA sense strand
cagaugcccuguuuaauga

SEQ ID NO: 1816286 - RNA, 19 nt, Homo sapiens
  misc_RNA (1)...(19): siRNA sense strand
ggacuccgauuaucaagga

SEQ ID NO: 1816287 - RNA, 19 nt, Homo sapiens
  misc_RNA (1)...(19): siRNA sense strand
gaagucacccggucucuga

SEQ ID NO: 1816288 - RNA, 19 nt, Homo sapiens
  misc_RNA (1)...(19): siRNA sense strand
gagcagaucgcgacccuuu

SEQ ID NO: 1816289 - RNA, 19 nt, Homo sapiens
  misc_RNA (1)...(19): siRNA sense strand
caagcucgaugccuauaaa

SEQ ID NO: 1816290 - RNA, 19 nt, Homo sapiens
  misc_RNA (1)...(19): siRNA sense strand
guuaugaucugcugccuau

SEQ ID NO: 1816291 - RNA, 19 nt, Homo sapiens
  misc_RNA (1)...(19): siRNA sense strand
gauagguucuacucacauu

SEQ ID NO: 1816292 - RNA, 19 nt, Homo sapiens
  misc_RNA (1)...(19): siRNA sense strand
gaugaagaauccuauacug

SEQ ID NO: 1816293 - RNA, 19 nt, Homo sapiens
  misc_RNA (1)...(19): siRNA sense strand
ggaucaggcuccaacaaug

SEQ ID NO: 1816294 - RNA, 19 nt, Homo sapiens
  misc_RNA (1)...(19): siRNA sense strand
ggacucugcugacucuuuc

SEQ ID NO: 1816295 - RNA, 19 nt, Homo sapiens
  misc_RNA (1)...(19): siRNA sense strand
uaacgauuguggaagauau

SEQ ID NO: 1816296 - RNA, 19 nt, Homo sapiens
  misc_RNA (1)...(19): siRNA sense strand
ccacaaggcucagaugaag

SEQ ID NO: 1816297 - RNA, 19 nt, Homo sapiens
  misc_RNA (1)...(19): siRNA sense strand
ccagaugcccuguuuaaug

SEQ ID NO: 1816298 - RNA, 19 nt, Homo sapiens
  misc_RNA (1)...(19): siRNA sense strand
ggugugagccugaaugaga

SEQ ID NO: 1816299 - RNA, 19 nt, Homo sapiens
  misc_RNA (1)...(19): siRNA sense strand
guggaucaguuaagcauga

SEQ ID NO: 1816300 - RNA, 19 nt, Homo sapiens
  misc_RNA (1)...(19): siRNA sense strand
ggacgacgaccuguggaua

SEQ ID NO: 1816301 - RNA, 19 nt, Homo sapiens
  misc_RNA (1)...(19): siRNA sense strand
ccaaggcaccguagacaaa

SEQ ID NO: 1816302 - RNA, 19 nt, Homo sapiens
  misc_RNA (1)...(19): siRNA sense strand
cuauaaagcugaugaucca

SEQ ID NO: 1816303 - RNA, 19 nt, Homo sapiens
  misc_RNA (1)...(19): siRNA sense strand
ugacggaaaucaauauugc

SEQ ID NO: 1816304 - RNA, 19 nt, Homo sapiens
  misc_RNA (1)...(19): siRNA sense strand
gagaagauuaugcaugaug

SEQ ID NO: 1816305 - RNA, 19 nt, Homo sapiens
  misc_RNA (1)...(19): siRNA sense strand
acacuacccuuauaucucu

SEQ ID NO: 1816306 - RNA, 19 nt, Homo sapiens
  misc_RNA (1)...(19): siRNA sense strand
gugccacccugaaggagua

SEQ ID NO: 1816307 - RNA, 19 nt, Homo sapiens
  misc_RNA (1)...(19): siRNA sense strand
ugcaugaugugauaaagaa

SEQ ID NO: 1816308 - RNA, 19 nt, Homo sapiens
  misc_RNA (1)...(19): siRNA sense strand
acaccaaacacuacccuua

SEQ ID NO: 1816309 - RNA, 19 nt, Homo sapiens
  misc_RNA (1)...(19): siRNA sense strand
gggcauaacgauuguggaa

SEQ ID NO: 1816310 - RNA, 19 nt, Homo sapiens
  misc_RNA (1)...(19): siRNA sense strand
accaaacacuacccuuaua

SEQ ID NO: 1816311 - RNA, 19 nt, Homo sapiens
  misc_RNA (1)...(19): siRNA sense strand
gcaccuugcugaggacugu

SEQ ID NO: 1816312 - RNA, 19 nt, Homo sapiens
  misc_RNA (1)...(19): siRNA sense strand
ggauagcacugcgccacaa

SEQ ID NO: 1816313 - RNA, 19 nt, Homo sapiens
  misc_RNA (1)...(19): siRNA sense strand
ugauaaagaaggucaagaa

SEQ ID NO: 1816314 - RNA, 19 nt, Homo sapiens
  misc_RNA (1)...(19): siRNA sense strand
ggacaagcucgaugccuau

SEQ ID NO: 1816315 - RNA, 19 nt, Homo sapiens
  misc_RNA (1)...(19): siRNA sense strand
gaagaucaaggacccuaug

SEQ ID NO: 1816316 - RNA, 19 nt, Homo sapiens
  misc_RNA (1)...(19): siRNA sense strand
aggacuguaugaagcauua

SEQ ID NO: 1816317 - RNA, 19 nt, Homo sapiens
  misc_RNA (1)...(19): siRNA sense strand
gaaugaauacuggagagaa

SEQ ID NO: 1816318 - RNA, 19 nt, Homo sapiens
  misc_RNA (1)...(19): siRNA sense strand
guccagaugcccuguuuaa

SEQ ID NO: 1816319 - RNA, 19 nt, Homo sapiens
  misc_RNA (1)...(19): siRNA sense strand
ccaccaaauuucucaugga

SEQ ID NO: 1816320 - RNA, 19 nt, Homo sapiens
  misc_RNA (1)...(19): siRNA sense strand
ggacacuauugaggacaaa

SEQ ID NO: 1816321 - RNA, 19 nt, Homo sapiens
  misc_RNA (1)...(19): siRNA sense strand
cccggucucugaaagauuu

SEQ ID NO: 1816322 - RNA, 19 nt, Homo sapiens
  misc_RNA (1)...(19): siRNA sense strand
gcagaucgcgacccuuugu

SEQ ID NO: 1816323 - RNA, 19 nt, Homo sapiens
  misc_RNA (1)...(19): siRNA sense strand
gcauuucucccguaugaau

SEQ ID NO: 1816324 - RNA, 19 nt, Homo sapiens
  misc_RNA (1)...(19): siRNA sense strand
uugcauuucucccguauga

SEQ ID NO: 1816325 - RNA, 19 nt, Homo sapiens
  misc_RNA (1)...(19): siRNA sense strand
gaucugcugccuaucgaaa

SEQ ID NO: 1816326 - RNA, 19 nt, Homo sapiens
  misc_RNA (1)...(19): siRNA sense strand
gauccagcacgcccagaua

SEQ ID NO: 1816327 - RNA, 19 nt, Homo sapiens
  misc_RNA (1)...(19): siRNA sense strand
uaaagcugaugauccaaca

SEQ ID NO: 1816328 - RNA, 19 nt, Homo sapiens
  misc_RNA (1)...(19): siRNA sense strand
ccaaacacuacccuuauau

SEQ ID NO: 1816329 - RNA, 19 nt, Homo sapiens
  misc_RNA (1)...(19): siRNA sense strand
caucauccuucucuacauc

SEQ ID NO: 1816330 - RNA, 19 nt, Homo sapiens
  misc_RNA (1)...(19): siRNA sense strand
caucaugaccgagggcaua

SEQ ID NO: 1816331 - RNA, 19 nt, Homo sapiens
  misc_RNA (1)...(19): siRNA sense strand
gaaagugggaggugcugau

SEQ ID NO: 1816332 - RNA, 19 nt, Homo sapiens
  misc_RNA (1)...(19): siRNA sense strand
gcucagaugaagaauccua

SEQ ID NO: 1816333 - RNA, 19 nt, Homo sapiens
  misc_RNA (1)...(19): siRNA sense strand
ucaaaacucugacggaaau

SEQ ID NO: 1816334 - RNA, 19 nt, Homo sapiens
  misc_RNA (1)...(19): siRNA sense strand
gcuggugguggaucaguua

SEQ ID NO: 1816335 - RNA, 19 nt, Homo sapiens
  misc_RNA (1)...(19): siRNA sense strand
ucacgguggacuccgauua

SEQ ID NO: 1816336 - RNA, 19 nt, Homo sapiens
  misc_RNA (1)...(19): siRNA sense strand
gauaaagaaggucaagaag

SEQ ID NO: 1816337 - RNA, 19 nt, Homo sapiens
  misc_RNA (1)...(19): siRNA sense strand
caucauggaggacacuauu

SEQ ID NO: 1816338 - RNA, 19 nt, Homo sapiens
  misc_RNA (1)...(19): siRNA sense strand
agaagauuaugcaugaugu

SEQ ID NO: 1816339 - RNA, 19 nt, Homo sapiens
  misc_RNA (1)...(19): siRNA sense strand
gcacuggcauaagaacaag

SEQ ID NO: 1816340 - RNA, 19 nt, Homo sapiens
  misc_RNA (1)...(19): siRNA sense strand
ugucccagaugcugaagaa

SEQ ID NO: 1816341 - RNA, 19 nt, Homo sapiens
  misc_RNA (1)...(19): siRNA sense strand
gcugcaagaugacagacau

SEQ ID NO: 1816342 - RNA, 19 nt, Homo sapiens
  misc_RNA (1)...(19): siRNA sense strand
guaugaaucccaggucuau

SEQ ID NO: 1816343 - RNA, 19 nt, Homo sapiens
  misc_RNA (1)...(19): siRNA sense strand
gaggauagugagaucauca

SEQ ID NO: 1816344 - RNA, 19 nt, Homo sapiens
  misc_RNA (1)...(19): siRNA sense strand
acaaggcucagaugaagaa

SEQ ID NO: 1816345 - RNA, 19 nt, Homo sapiens
  misc_RNA (1)...(19): siRNA sense strand
ccuguuuaaugaacuggua

SEQ ID NO: 1816346 - RNA, 19 nt, Homo sapiens
  misc_RNA (1)...(19): siRNA sense strand
gaucaggcuccaacaaugg

SEQ ID NO: 1816347 - RNA, 19 nt, Homo sapiens
  misc_RNA (1)...(19): siRNA sense strand
ucucaucagugacuuuaag

SEQ ID NO: 1816348 - RNA, 19 nt, Homo sapiens
  misc_RNA (1)...(19): siRNA sense strand
caccaaacacuacccuuau

SEQ ID NO: 1816349 - RNA, 19 nt, Homo sapiens
  misc_RNA (1)...(19): siRNA sense strand
gcaucauccuucucuacau

SEQ ID NO: 1816350 - RNA, 19 nt, Homo sapiens
  misc_RNA (1)...(19): siRNA sense strand
ccaaugucagcacuuauga

SEQ ID NO: 1816351 - RNA, 19 nt, Homo sapiens
  misc_RNA (1)...(19): siRNA sense strand
auaaagaaggucaagaaga

SEQ ID NO: 1816352 - RNA, 19 nt, Homo sapiens
  misc_RNA (1)...(19): siRNA sense strand
caaacacuacccuuauauc

SEQ ID NO: 1816353 - RNA, 19 nt, Homo sapiens
  misc_RNA (1)...(19): siRNA sense strand
aggacaaacuugacaccaa

SEQ ID NO: 1816354 - RNA, 19 nt, Homo sapiens
  misc_RNA (1)...(19): siRNA sense strand
gccaaugucagcacuuaug

SEQ ID NO: 1816355 - RNA, 19 nt, Homo sapiens
  misc_RNA (1)...(19): siRNA sense strand
gaagaagaugccucaguac

SEQ ID NO: 1816356 - RNA, 19 nt, Homo sapiens
  misc_RNA (1)...(19): siRNA sense strand
gggaauacaaggacaaugc

SEQ ID NO: 1816357 - RNA, 19 nt, Homo sapiens
  misc_RNA (1)...(19): siRNA sense strand
gaggcuguguaucucauca

SEQ ID NO: 1816358 - RNA, 19 nt, Homo sapiens
  misc_RNA (1)...(19): siRNA sense strand
aaacacuacccuuauaucu

SEQ ID NO: 1816359 - RNA, 19 nt, Homo sapiens
  misc_RNA (1)...(19): siRNA sense strand
ucauggaggacacuauuga

SEQ ID NO: 1816360 - RNA, 19 nt, Homo sapiens
  misc_RNA (1)...(19): siRNA sense strand
cccagaugcugaagaagau

SEQ ID NO: 1816361 - RNA, 19 nt, Homo sapiens
  misc_RNA (1)...(19): siRNA sense strand
cuucuucacugacucuugu

SEQ ID NO: 1816362 - RNA, 19 nt, Homo sapiens
  misc_RNA (1)...(19): siRNA sense strand
gaggaucaggcuccaacaa

SEQ ID NO: 1816363 - RNA, 19 nt, Homo sapiens
  misc_RNA (1)...(19): siRNA sense strand
ggaguccucuaggguaucu

SEQ ID NO: 1816364 - RNA, 19 nt, Homo sapiens
  misc_RNA (1)...(19): siRNA sense strand
gaaagagcucagcaaguac

SEQ ID NO: 1816365 - RNA, 19 nt, Homo sapiens
  misc_RNA (1)...(19): siRNA sense strand
ucagaugaagaauccuaua

SEQ ID NO: 1816366 - RNA, 19 nt, Homo sapiens
  misc_RNA (1)...(19): siRNA sense strand
cgagaaguccguccacucu

SEQ ID NO: 1816367 - RNA, 19 nt, Homo sapiens
  misc_RNA (1)...(19): siRNA sense strand
gaagauuaugcaugaugug

SEQ ID NO: 1816368 - RNA, 19 nt, Homo sapiens
  misc_RNA (1)...(19): siRNA sense strand
uguggaagauaucaauaag

SEQ ID NO: 1816369 - RNA, 19 nt, Homo sapiens
  misc_RNA (1)...(19): siRNA sense strand
gauuaucaaggacaucaug

SEQ ID NO: 1816370 - RNA, 19 nt, Homo sapiens
  misc_RNA (1)...(19): siRNA sense strand
gguggacuccgauuaucaa

SEQ ID NO: 1816371 - RNA, 19 nt, Homo sapiens
  misc_RNA (1)...(19): siRNA sense strand
ggaggauagugagaucauc

SEQ ID NO: 1816372 - RNA, 19 nt, Homo sapiens
  misc_RNA (1)...(19): siRNA sense strand
cgaaaaugauguauacaag

SEQ ID NO: 1816373 - RNA, 19 nt, Homo sapiens
  misc_RNA (1)...(19): siRNA sense strand
gacaagcucgaugccuaua

SEQ ID NO: 1816374 - RNA, 19 nt, Homo sapiens
  misc_RNA (1)...(19): siRNA sense strand
ucuagcaagagaaugaaua

SEQ ID NO: 1816375 - RNA, 19 nt, Homo sapiens
  misc_RNA (1)...(19): siRNA sense strand
agaaguccguccacucucu

SEQ ID NO: 1816376 - RNA, 19 nt, Homo sapiens
  misc_RNA (1)...(19): siRNA sense strand
aaagugggaggugcugaua

SEQ ID NO: 1816377 - RNA, 19 nt, Homo sapiens
  misc_RNA (1)...(19): siRNA sense strand
aaugaauacuggagagaag

SEQ ID NO: 1816378 - RNA, 19 nt, Homo sapiens
  misc_RNA (1)...(19): siRNA sense strand
gcgaggagcucaccuuuga

SEQ ID NO: 1816379 - RNA, 19 nt, Homo sapiens
  misc_RNA (1)...(19): siRNA sense strand
gaaccucuaugacuuugaa

SEQ ID NO: 1816380 - RNA, 19 nt, Homo sapiens
  misc_RNA (1)...(19): siRNA sense strand
aauauuaccuggugaaaug

SEQ ID NO: 1816381 - RNA, 19 nt, Homo sapiens
  misc_RNA (1)...(19): siRNA sense strand
gcacaaguuugccuacaau

SEQ ID NO: 1816382 - RNA, 19 nt, Homo sapiens
  misc_RNA (1)...(19): siRNA sense strand
ccaacuaccuggugcagaa

SEQ ID NO: 1816383 - RNA, 19 nt, Homo sapiens
  misc_RNA (1)...(19): siRNA sense strand
gggcgucacugcacaaguu

SEQ ID NO: 1816384 - RNA, 19 nt, Homo sapiens
  misc_RNA (1)...(19): siRNA sense strand
gauaugaccucugcaucuu

SEQ ID NO: 1816385 - RNA, 19 nt, Homo sapiens
  misc_RNA (1)...(19): siRNA sense strand
ucgaguaccugugcgauua

SEQ ID NO: 1816386 - RNA, 19 nt, Homo sapiens
  misc_RNA (1)...(19): siRNA sense strand
ggcagaaucucaagugugu

SEQ ID NO: 1816387 - RNA, 19 nt, Homo sapiens
  misc_RNA (1)...(19): siRNA sense strand
ggcaacaucucccacuuug

SEQ ID NO: 1816388 - RNA, 19 nt, Homo sapiens
  misc_RNA (1)...(19): siRNA sense strand
gaagauccgcgaacaggaa

SEQ ID NO: 1816389 - RNA, 19 nt, Homo sapiens
  misc_RNA (1)...(19): siRNA sense strand
caaaucgugugguacagaa

SEQ ID NO: 1816390 - RNA, 19 nt, Homo sapiens
  misc_RNA (1)...(19): siRNA sense strand
gagagaucauuaccucaga

SEQ ID NO: 1816391 - RNA, 19 nt, Homo sapiens
  misc_RNA (1)...(19): siRNA sense strand
gagcucaccuuugauuaca

SEQ ID NO: 1816392 - RNA, 19 nt, Homo sapiens
  misc_RNA (1)...(19): siRNA sense strand
ucaagcaguuccacaagga

SEQ ID NO: 1816393 - RNA, 19 nt, Homo sapiens
  misc_RNA (1)...(19): siRNA sense strand
gaggagcucaccuuugauu

SEQ ID NO: 1816394 - RNA, 19 nt, Homo sapiens
  misc_RNA (1)...(19): siRNA sense strand
caacaucucccacuuuguc

SEQ ID NO: 1816395 - RNA, 19 nt, Homo sapiens
  misc_RNA (1)...(19): siRNA sense strand
gcaucacuguagagaauga

SEQ ID NO: 1816396 - RNA, 19 nt, Homo sapiens
  misc_RNA (1)...(19): siRNA sense strand
uggagaagauucgcaagaa

SEQ ID NO: 1816397 - RNA, 19 nt, Homo sapiens
  misc_RNA (1)...(19): siRNA sense strand
gguguacaacgucuucaua

SEQ ID NO: 1816398 - RNA, 19 nt, Homo sapiens
  misc_RNA (1)...(19): siRNA sense strand
gagaagauucgcaagaaca

SEQ ID NO: 1816399 - RNA, 19 nt, Homo sapiens
  misc_RNA (1)...(19): siRNA sense strand
ggagaagauucgcaagaac

SEQ ID NO: 1816400 - RNA, 19 nt, Homo sapiens
  misc_RNA (1)...(19): siRNA sense strand
caagaacagcuucgucaug

SEQ ID NO: 1816401 - RNA, 19 nt, Homo sapiens
  misc_RNA (1)...(19): siRNA sense strand
gcaguuccacaaggacuua

SEQ ID NO: 1816402 - RNA, 19 nt, Homo sapiens
  misc_RNA (1)...(19): siRNA sense strand
ccacaaggacuuagaaagg

SEQ ID NO: 1816403 - RNA, 19 nt, Homo sapiens
  misc_RNA (1)...(19): siRNA sense strand
acgcaucacuguagagaau

SEQ ID NO: 1816404 - RNA, 19 nt, Homo sapiens
  misc_RNA (1)...(19): siRNA sense strand
cuaagaagcggguccguau

SEQ ID NO: 1816405 - RNA, 19 nt, Homo sapiens
  misc_RNA (1)...(19): siRNA sense strand
acaagaagauccgcgaaca

SEQ ID NO: 1816406 - RNA, 19 nt, Homo sapiens
  misc_RNA (1)...(19): siRNA sense strand
ggcuaugacugcccaaauc

SEQ ID NO: 1816407 - RNA, 19 nt, Homo sapiens
  misc_RNA (1)...(19): siRNA sense strand
ucguguacaucaaugagua

SEQ ID NO: 1816408 - RNA, 19 nt, Homo sapiens
  misc_RNA (1)...(19): siRNA sense strand
gaauauuaccuggugaaau

SEQ ID NO: 1816409 - RNA, 19 nt, Homo sapiens
  misc_RNA (1)...(19): siRNA sense strand
ggaauauuaccuggugaaa

SEQ ID NO: 1816410 - RNA, 19 nt, Homo sapiens
  misc_RNA (1)...(19): siRNA sense strand
gaagcggguccguauugaa

SEQ ID NO: 1816411 - RNA, 19 nt, Homo sapiens
  misc_RNA (1)...(19): siRNA sense strand
caccuuugauuacaacaug

SEQ ID NO: 1816412 - RNA, 19 nt, Homo sapiens
  misc_RNA (1)...(19): siRNA sense strand
ggugaaauggcguggauau

SEQ ID NO: 1816413 - RNA, 19 nt, Homo sapiens
  misc_RNA (1)...(19): siRNA sense strand
ggacgcaucacuguagaga

SEQ ID NO: 1816414 - RNA, 19 nt, Homo sapiens
  misc_RNA (1)...(19): siRNA sense strand
uguacaacgucuucauaga

SEQ ID NO: 1816415 - RNA, 19 nt, Homo sapiens
  misc_RNA (1)...(19): siRNA sense strand
ggagcucaccuuugauuac

SEQ ID NO: 1816416 - RNA, 19 nt, Homo sapiens
  misc_RNA (1)...(19): siRNA sense strand
ccgcaaauaccucuucuag

SEQ ID NO: 1816417 - RNA, 19 nt, Homo sapiens
  misc_RNA (1)...(19): siRNA sense strand
guacgugggagagaucauu

SEQ ID NO: 1816418 - RNA, 19 nt, Homo sapiens
  misc_RNA (1)...(19): siRNA sense strand
aagaagcggguccguauug

SEQ ID NO: 1816419 - RNA, 19 nt, Homo sapiens
  misc_RNA (1)...(19): siRNA sense strand
acaaguuugccuacaauga

SEQ ID NO: 1816420 - RNA, 19 nt, Homo sapiens
  misc_RNA (1)...(19): siRNA sense strand
agaagcggguccguauuga

SEQ ID NO: 1816421 - RNA, 19 nt, Homo sapiens
  misc_RNA (1)...(19): siRNA sense strand
cagcguguguugcaagucu

SEQ ID NO: 1816422 - RNA, 19 nt, Homo sapiens
  misc_RNA (1)...(19): siRNA sense strand
gcagguguacaacgucuuc

SEQ ID NO: 1816423 - RNA, 19 nt, Homo sapiens
  misc_RNA (1)...(19): siRNA sense strand
gcaagaacagcuucgucau

SEQ ID NO: 1816424 - RNA, 19 nt, Homo sapiens
  misc_RNA (1)...(19): siRNA sense strand
ccugugcgauuacaagaag

SEQ ID NO: 1816425 - RNA, 19 nt, Homo sapiens
  misc_RNA (1)...(19): siRNA sense strand
uaagaagcggguccguauu

SEQ ID NO: 1816426 - RNA, 19 nt, Homo sapiens
  misc_RNA (1)...(19): siRNA sense strand
uccgcgaacaggaauauua

SEQ ID NO: 1816427 - RNA, 19 nt, Homo sapiens
  misc_RNA (1)...(19): siRNA sense strand
gcucaccuuugauuacaac

SEQ ID NO: 1816428 - RNA, 19 nt, Homo sapiens
  misc_RNA (1)...(19): siRNA sense strand
gcccaaaucgugugguaca

SEQ ID NO: 1816429 - RNA, 19 nt, Homo sapiens
  misc_RNA (1)...(19): siRNA sense strand
gauccgcgaacaggaauau

SEQ ID NO: 1816430 - RNA, 19 nt, Homo sapiens
  misc_RNA (1)...(19): siRNA sense strand
cggcaccaccggucaaaga

SEQ ID NO: 1816431 - RNA, 19 nt, Homo sapiens
  misc_RNA (1)...(19): siRNA sense strand
ggacguguacaccguggau

SEQ ID NO: 1816432 - RNA, 19 nt, Homo sapiens
  misc_RNA (1)...(19): siRNA sense strand
cgauaugaccucugcaucu

SEQ ID NO: 1816433 - RNA, 19 nt, Homo sapiens
  misc_RNA (1)...(19): siRNA sense strand
cugcccaaaucguguggua

SEQ ID NO: 1816434 - RNA, 19 nt, Homo sapiens
  misc_RNA (1)...(19): siRNA sense strand
ggauauccagacucagaga

SEQ ID NO: 1816435 - RNA, 19 nt, Homo sapiens
  misc_RNA (1)...(19): siRNA sense strand
ugcacaaguuugccuacaa

SEQ ID NO: 1816436 - RNA, 19 nt, Homo sapiens
  misc_RNA (1)...(19): siRNA sense strand
uggcaacaucucccacuuu

SEQ ID NO: 1816437 - RNA, 19 nt, Homo sapiens
  misc_RNA (1)...(19): siRNA sense strand
gagccacggcagaaucuca

SEQ ID NO: 1816438 - RNA, 19 nt, Homo sapiens
  misc_RNA (1)...(19): siRNA sense strand
acagcuucgucauggagua

SEQ ID NO: 1816439 - RNA, 19 nt, Homo sapiens
  misc_RNA (1)...(19): siRNA sense strand
ccaaaucgugugguacaga

SEQ ID NO: 1816440 - RNA, 19 nt, Homo sapiens
  misc_RNA (1)...(19): siRNA sense strand
caaguuugccuacaaugac

SEQ ID NO: 1816441 - RNA, 19 nt, Homo sapiens
  misc_RNA (1)...(19): siRNA sense strand
ggaguacgugggagagauc

SEQ ID NO: 1816442 - RNA, 19 nt, Homo sapiens
  misc_RNA (1)...(19): siRNA sense strand
guaccugugcgauuacaag

SEQ ID NO: 1816443 - RNA, 19 nt, Homo sapiens
  misc_RNA (1)...(19): siRNA sense strand
aagcggguccguauugaau

SEQ ID NO: 1816444 - RNA, 19 nt, Homo sapiens
  misc_RNA (1)...(19): siRNA sense strand
gggccuucguguacaucaa

SEQ ID NO: 1816445 - RNA, 19 nt, Homo sapiens
  misc_RNA (1)...(19): siRNA sense strand
caucaaugaguaccguguu

SEQ ID NO: 1816446 - RNA, 19 nt, Homo sapiens
  misc_RNA (1)...(19): siRNA sense strand
uacgugggagagaucauua

SEQ ID NO: 1816447 - RNA, 19 nt, Homo sapiens
  misc_RNA (1)...(19): siRNA sense strand
ggaagacacugccugcuuu

SEQ ID NO: 1816448 - RNA, 19 nt, Homo sapiens
  misc_RNA (1)...(19): siRNA sense strand
gaaagagagggaauauuua

SEQ ID NO: 1816449 - RNA, 19 nt, Homo sapiens
  misc_RNA (1)...(19): siRNA sense strand
ggacauggcaggaguguuu

SEQ ID NO: 1816450 - RNA, 19 nt, Homo sapiens
  misc_RNA (1)...(19): siRNA sense strand
agaaagagagggaauauuu

SEQ ID NO: 1816451 - RNA, 19 nt, Homo sapiens
  misc_RNA (1)...(19): siRNA sense strand
gagaauaucaugcuuaauc

SEQ ID NO: 1816452 - RNA, 19 nt, Homo sapiens
  misc_RNA (1)...(19): siRNA sense strand
gcaaugauaguaagaaaug

SEQ ID NO: 1816453 - RNA, 19 nt, Homo sapiens
  misc_RNA (1)...(19): siRNA sense strand
ggaaacaaguggcauagag

SEQ ID NO: 1816454 - RNA, 19 nt, Homo sapiens
  misc_RNA (1)...(19): siRNA sense strand
gaugagaaguggccacaau

SEQ ID NO: 1816455 - RNA, 19 nt, Homo sapiens
  misc_RNA (1)...(19): siRNA sense strand
gaacuuggcauggaacauu

SEQ ID NO: 1816456 - RNA, 19 nt, Homo sapiens
  misc_RNA (1)...(19): siRNA sense strand
gcagauggaugugacaaug

SEQ ID NO: 1816457 - RNA, 19 nt, Homo sapiens
  misc_RNA (1)...(19): siRNA sense strand
ccagaugacucaacucuca

SEQ ID NO: 1816458 - RNA, 19 nt, Homo sapiens
  misc_RNA (1)...(19): siRNA sense strand
ccugaaaucuugaugagaa

SEQ ID NO: 1816459 - RNA, 19 nt, Homo sapiens
  misc_RNA (1)...(19): siRNA sense strand
ggaacauugugagaaauuu

SEQ ID NO: 1816460 - RNA, 19 nt, Homo sapiens
  misc_RNA (1)...(19): siRNA sense strand
gaggagaacuauuuaugca

SEQ ID NO: 1816461 - RNA, 19 nt, Homo sapiens
  misc_RNA (1)...(19): siRNA sense strand
ggaauauucuggaggaagu

SEQ ID NO: 1816462 - RNA, 19 nt, Homo sapiens
  misc_RNA (1)...(19): siRNA sense strand
gaaacuaacagacuuugga

SEQ ID NO: 1816463 - RNA, 19 nt, Homo sapiens
  misc_RNA (1)...(19): siRNA sense strand
ccgaucaccucgaagauuu

SEQ ID NO: 1816464 - RNA, 19 nt, Homo sapiens
  misc_RNA (1)...(19): siRNA sense strand
cauggaacauugugagaaa

SEQ ID NO: 1816465 - RNA, 19 nt, Homo sapiens
  misc_RNA (1)...(19): siRNA sense strand
cggagaauaucaugcuuaa

SEQ ID NO: 1816466 - RNA, 19 nt, Homo sapiens
  misc_RNA (1)...(19): siRNA sense strand
ucaguuugauuccaaguuu

SEQ ID NO: 1816467 - RNA, 19 nt, Homo sapiens
  misc_RNA (1)...(19): siRNA sense strand
gcauagagcagauggaugu

SEQ ID NO: 1816468 - RNA, 19 nt, Homo sapiens
  misc_RNA (1)...(19): siRNA sense strand
gaaaauauuugccaugaag

SEQ ID NO: 1816469 - RNA, 19 nt, Homo sapiens
  misc_RNA (1)...(19): siRNA sense strand
ugacucaacucucagugaa

SEQ ID NO: 1816470 - RNA, 19 nt, Homo sapiens
  misc_RNA (1)...(19): siRNA sense strand
ccagagcaccugcguauga

SEQ ID NO: 1816471 - RNA, 19 nt, Homo sapiens
  misc_RNA (1)...(19): siRNA sense strand
gaacagucacacacacauu

SEQ ID NO: 1816472 - RNA, 19 nt, Homo sapiens
  misc_RNA (1)...(19): siRNA sense strand
gaacauugugagaaauuug

SEQ ID NO: 1816473 - RNA, 19 nt, Homo sapiens
  misc_RNA (1)...(19): siRNA sense strand
uaagucaguuugauuccaa

SEQ ID NO: 1816474 - RNA, 19 nt, Homo sapiens
  misc_RNA (1)...(19): siRNA sense strand
gagagggaauauuuaugga

SEQ ID NO: 1816475 - RNA, 19 nt, Homo sapiens
  misc_RNA (1)...(19): siRNA sense strand
ccucaaauguaaacucaau

SEQ ID NO: 1816476 - RNA, 19 nt, Homo sapiens
  misc_RNA (1)...(19): siRNA sense strand
uaacagacuuuggacuaug

SEQ ID NO: 1816477 - RNA, 19 nt, Homo sapiens
  misc_RNA (1)...(19): siRNA sense strand
cauaugaacuuggcaugga

SEQ ID NO: 1816478 - RNA, 19 nt, Homo sapiens
  misc_RNA (1)...(19): siRNA sense strand
gacaaaauccucaaaugua

SEQ ID NO: 1816479 - RNA, 19 nt, Homo sapiens
  misc_RNA (1)...(19): siRNA sense strand
gauguaagucaguuugauu

SEQ ID NO: 1816480 - RNA, 19 nt, Homo sapiens
  misc_RNA (1)...(19): siRNA sense strand
cagggaagcugaggacaug

SEQ ID NO: 1816481 - RNA, 19 nt, Homo sapiens
  misc_RNA (1)...(19): siRNA sense strand
gcucauccauucuuuagac

SEQ ID NO: 1816482 - RNA, 19 nt, Homo sapiens
  misc_RNA (1)...(19): siRNA sense strand
gcaggaguguuugacauag

SEQ ID NO: 1816483 - RNA, 19 nt, Homo sapiens
  misc_RNA (1)...(19): siRNA sense strand
gaacucugggccauacaaa

SEQ ID NO: 1816484 - RNA, 19 nt, Homo sapiens
  misc_RNA (1)...(19): siRNA sense strand
uuaaaccucuguugcaauc

SEQ ID NO: 1816485 - RNA, 19 nt, Homo sapiens
  misc_RNA (1)...(19): siRNA sense strand
ucaagcucauccauucuuu

SEQ ID NO: 1816486 - RNA, 19 nt, Homo sapiens
  misc_RNA (1)...(19): siRNA sense strand
caguuugauuccaaguuua

SEQ ID NO: 1816487 - RNA, 19 nt, Homo sapiens
  misc_RNA (1)...(19): siRNA sense strand
aaaguaacaggagcaaaua

SEQ ID NO: 1816488 - RNA, 19 nt, Homo sapiens
  misc_RNA (1)...(19): siRNA sense strand
ugucagcccagucaaauuu

SEQ ID NO: 1816489 - RNA, 19 nt, Homo sapiens
  misc_RNA (1)...(19): siRNA sense strand
ggauguaagucaguuugau

SEQ ID NO: 1816490 - RNA, 19 nt, Homo sapiens
  misc_RNA (1)...(19): siRNA sense strand
aaagauacagcucauacaa

SEQ ID NO: 1816491 - RNA, 19 nt, Homo sapiens
  misc_RNA (1)...(19): siRNA sense strand
ggcaggaguguuugacaua

SEQ ID NO: 1816492 - RNA, 19 nt, Homo sapiens
  misc_RNA (1)...(19): siRNA sense strand
ccaaggucaugugaaacua

SEQ ID NO: 1816493 - RNA, 19 nt, Homo sapiens
  misc_RNA (1)...(19): siRNA sense strand
gaccugaagccggagaaua

SEQ ID NO: 1816494 - RNA, 19 nt, Homo sapiens
  misc_RNA (1)...(19): siRNA sense strand
ggaagcaucggcaccacuu

SEQ ID NO: 1816495 - RNA, 19 nt, Homo sapiens
  misc_RNA (1)...(19): siRNA sense strand
ucagacaccuguggaauac

SEQ ID NO: 1816496 - RNA, 19 nt, Homo sapiens
  misc_RNA (1)...(19): siRNA sense strand
gcaaauacugggaaaauau

SEQ ID NO: 1816497 - RNA, 19 nt, Homo sapiens
  misc_RNA (1)...(19): siRNA sense strand
ggccagagcaccugcguau

SEQ ID NO: 1816498 - RNA, 19 nt, Homo sapiens
  misc_RNA (1)...(19): siRNA sense strand
auauguggcuccaucugua

SEQ ID NO: 1816499 - RNA, 19 nt, Homo sapiens
  misc_RNA (1)...(19): siRNA sense strand
caagcucauccauucuuua

SEQ ID NO: 1816500 - RNA, 19 nt, Homo sapiens
  misc_RNA (1)...(19): siRNA sense strand
cuaacagacuuuggacuau

SEQ ID NO: 1816501 - RNA, 19 nt, Homo sapiens
  misc_RNA (1)...(19): siRNA sense strand
caguggaggagaacuauuu

SEQ ID NO: 1816502 - RNA, 19 nt, Homo sapiens
  misc_RNA (1)...(19): siRNA sense strand
gggaaaauauuugccauga

SEQ ID NO: 1816503 - RNA, 19 nt, Homo sapiens
  misc_RNA (1)...(19): siRNA sense strand
caaggucaugugaaacuaa

SEQ ID NO: 1816504 - RNA, 19 nt, Homo sapiens
  misc_RNA (1)...(19): siRNA sense strand
gcaccugcguaugaaucua

SEQ ID NO: 1816505 - RNA, 19 nt, Homo sapiens
  misc_RNA (1)...(19): siRNA sense strand
cagagcaccugcguaugaa

SEQ ID NO: 1816506 - RNA, 19 nt, Homo sapiens
  misc_RNA (1)...(19): siRNA sense strand
cgacagcccagaugacuca

SEQ ID NO: 1816507 - RNA, 19 nt, Homo sapiens
  misc_RNA (1)...(19): siRNA sense strand
agauacagcucauacaaaa

SEQ ID NO: 1816508 - RNA, 19 nt, Homo sapiens
  misc_RNA (1)...(19): siRNA sense strand
ucaccucgaagauuuauug

SEQ ID NO: 1816509 - RNA, 19 nt, Homo sapiens
  misc_RNA (1)...(19): siRNA sense strand
gaacuucuggcucgaaagg

SEQ ID NO: 1816510 - RNA, 19 nt, Homo sapiens
  misc_RNA (1)...(19): siRNA sense strand
cuacuucggguacuuggua

SEQ ID NO: 1816511 - RNA, 19 nt, Homo sapiens
  misc_RNA (1)...(19): siRNA sense strand
guugcaaucugaagaggau

SEQ ID NO: 1816512 - RNA, 19 nt, Homo sapiens
  misc_RNA (1)...(19): siRNA sense strand
ggaaaauauuugccaugaa

SEQ ID NO: 1816513 - RNA, 19 nt, Homo sapiens
  misc_RNA (1)...(19): siRNA sense strand
caggaguguuugacauaga

SEQ ID NO: 1816514 - RNA, 19 nt, Homo sapiens
  misc_RNA (1)...(19): siRNA sense strand
ggaggagaacuauuuaugc

SEQ ID NO: 1816515 - RNA, 19 nt, Homo sapiens
  misc_RNA (1)...(19): siRNA sense strand
gugaacagagggccagaaa

SEQ ID NO: 1816516 - RNA, 19 nt, Homo sapiens
  misc_RNA (1)...(19): siRNA sense strand
caaguggcauagagcagau

SEQ ID NO: 1816517 - RNA, 19 nt, Homo sapiens
  misc_RNA (1)...(19): siRNA sense strand
ggaguuggaccauaugaac

SEQ ID NO: 1816518 - RNA, 19 nt, Homo sapiens
  misc_RNA (1)...(19): siRNA sense strand
gaggauguaagucaguuug

SEQ ID NO: 1816519 - RNA, 19 nt, Homo sapiens
  misc_RNA (1)...(19): siRNA sense strand
gaagaggauguaagucagu

SEQ ID NO: 1816520 - RNA, 19 nt, Homo sapiens
  misc_RNA (1)...(19): siRNA sense strand
ggacuaugcaaagaaucua

SEQ ID NO: 1816521 - RNA, 19 nt, Homo sapiens
  misc_RNA (1)...(19): siRNA sense strand
gcauggaacauugugagaa

SEQ ID NO: 1816522 - RNA, 19 nt, Homo sapiens
  misc_RNA (1)...(19): siRNA sense strand
aggcaaugauaguaagaaa

SEQ ID NO: 1816523 - RNA, 19 nt, Homo sapiens
  misc_RNA (1)...(19): siRNA sense strand
gaaaucuugaugagaagug

SEQ ID NO: 1816524 - RNA, 19 nt, Homo sapiens
  misc_RNA (1)...(19): siRNA sense strand
aaaagcugcugaaaagaaa

SEQ ID NO: 1816525 - RNA, 19 nt, Homo sapiens
  misc_RNA (1)...(19): siRNA sense strand
aaacaagcuuuucccauga

SEQ ID NO: 1816526 - RNA, 19 nt, Homo sapiens
  misc_RNA (1)...(19): siRNA sense strand
gcuaaagauacagcucaua

SEQ ID NO: 1816527 - RNA, 19 nt, Homo sapiens
  misc_RNA (1)...(19): siRNA sense strand
cauccauucuuuagacaca

SEQ ID NO: 1816528 - RNA, 19 nt, Homo sapiens
  misc_RNA (1)...(19): siRNA sense strand
gaguuugggagcauuaaug

SEQ ID NO: 1816529 - RNA, 19 nt, Homo sapiens
  misc_RNA (1)...(19): siRNA sense strand
gcuguggauugguggaguu

SEQ ID NO: 1816530 - RNA, 19 nt, Homo sapiens
  misc_RNA (1)...(19): siRNA sense strand
acuaacagacuuuggacua

SEQ ID NO: 1816531 - RNA, 19 nt, Homo sapiens
  misc_RNA (1)...(19): siRNA sense strand
guuagaaagagagggaaua

SEQ ID NO: 1816532 - RNA, 19 nt, Homo sapiens
  misc_RNA (1)...(19): siRNA sense strand
ugaaaucucagaaacuagu

SEQ ID NO: 1816533 - RNA, 19 nt, Homo sapiens
  misc_RNA (1)...(19): siRNA sense strand
ucagugaaagugccaauca

SEQ ID NO: 1816534 - RNA, 19 nt, Homo sapiens
  misc_RNA (1)...(19): siRNA sense strand
ugggagcauuaauguauga

SEQ ID NO: 1816535 - RNA, 19 nt, Homo sapiens
  misc_RNA (1)...(19): siRNA sense strand
ccggagaauaucaugcuua

SEQ ID NO: 1816536 - RNA, 19 nt, Homo sapiens
  misc_RNA (1)...(19): siRNA sense strand
uaucaugcuuaaucaccaa

SEQ ID NO: 1816537 - RNA, 19 nt, Homo sapiens
  misc_RNA (1)...(19): siRNA sense strand
ggaauacccaauggaaaca

SEQ ID NO: 1816538 - RNA, 19 nt, Homo sapiens
  misc_RNA (1)...(19): siRNA sense strand
cuaaagauacagcucauac

SEQ ID NO: 1816539 - RNA, 19 nt, Homo sapiens
  misc_RNA (1)...(19): siRNA sense strand
gagcaccugcguaugaauc

SEQ ID NO: 1816540 - RNA, 19 nt, Homo sapiens
  misc_RNA (1)...(19): siRNA sense strand
guaagucaguuugauucca

SEQ ID NO: 1816541 - RNA, 19 nt, Homo sapiens
  misc_RNA (1)...(19): siRNA sense strand
aaaccucuguugcaaucug

SEQ ID NO: 1816542 - RNA, 19 nt, Homo sapiens
  misc_RNA (1)...(19): siRNA sense strand
aguucaagcucauccauuc

SEQ ID NO: 1816543 - RNA, 19 nt, Homo sapiens
  misc_RNA (1)...(19): siRNA sense strand
gaaguucaagcucauccau

SEQ ID NO: 1816544 - RNA, 19 nt, Homo sapiens
  misc_RNA (1)...(19): siRNA sense strand
guggaacaauagaauacau

SEQ ID NO: 1816545 - RNA, 19 nt, Homo sapiens
  misc_RNA (1)...(19): siRNA sense strand
gaauauucuggaggaagua

SEQ ID NO: 1816546 - RNA, 19 nt, Homo sapiens
  misc_RNA (1)...(19): siRNA sense strand
aagauacagcucauacaaa

SEQ ID NO: 1816547 - RNA, 19 nt, Homo sapiens
  misc_RNA (1)...(19): siRNA sense strand
gaaacaaggucgacaacua

SEQ ID NO: 1816548 - RNA, 19 nt, Homo sapiens
  misc_RNA (1)...(19): siRNA sense strand
gaaccuaucuauacauuca

SEQ ID NO: 1816549 - RNA, 19 nt, Homo sapiens
  misc_RNA (1)...(19): siRNA sense strand
gcacagaggcugaaguuaa

SEQ ID NO: 1816550 - RNA, 19 nt, Homo sapiens
  misc_RNA (1)...(19): siRNA sense strand
gcacuucucuugauguaga

SEQ ID NO: 1816551 - RNA, 19 nt, Homo sapiens
  misc_RNA (1)...(19): siRNA sense strand
gaguuugacuucuugguua

SEQ ID NO: 1816552 - RNA, 19 nt, Homo sapiens
  misc_RNA (1)...(19): siRNA sense strand
gaagcagacucacuaacuu

SEQ ID NO: 1816553 - RNA, 19 nt, Homo sapiens
  misc_RNA (1)...(19): siRNA sense strand
gagcacuucucuugaugua

SEQ ID NO: 1816554 - RNA, 19 nt, Homo sapiens
  misc_RNA (1)...(19): siRNA sense strand
gaaaggaagggccaagaaa

SEQ ID NO: 1816555 - RNA, 19 nt, Homo sapiens
  misc_RNA (1)...(19): siRNA sense strand
uagaagcuguuacaaguuu

SEQ ID NO: 1816556 - RNA, 19 nt, Homo sapiens
  misc_RNA (1)...(19): siRNA sense strand
uaaaggaguuugacuucuu

SEQ ID NO: 1816557 - RNA, 19 nt, Homo sapiens
  misc_RNA (1)...(19): siRNA sense strand
gaugguagcccaccuagaa

SEQ ID NO: 1816558 - RNA, 19 nt, Homo sapiens
  misc_RNA (1)...(19): siRNA sense strand
gaaauacgggacagaauug

SEQ ID NO: 1816559 - RNA, 19 nt, Homo sapiens
  misc_RNA (1)...(19): siRNA sense strand
gcaauggugagcaguguua

SEQ ID NO: 1816560 - RNA, 19 nt, Homo sapiens
  misc_RNA (1)...(19): siRNA sense strand
ggacagggaagaugacaaa

SEQ ID NO: 1816561 - RNA, 19 nt, Homo sapiens
  misc_RNA (1)...(19): siRNA sense strand
ccaaauaaauagagucauc

SEQ ID NO: 1816562 - RNA, 19 nt, Homo sapiens
  misc_RNA (1)...(19): siRNA sense strand
cacagaggcugaaguuaaa

SEQ ID NO: 1816563 - RNA, 19 nt, Homo sapiens
  misc_RNA (1)...(19): siRNA sense strand
uaaauagagucaucaguca

SEQ ID NO: 1816564 - RNA, 19 nt, Homo sapiens
  misc_RNA (1)...(19): siRNA sense strand
gacaaugaaucuagaagug

SEQ ID NO: 1816565 - RNA, 19 nt, Homo sapiens
  misc_RNA (1)...(19): siRNA sense strand
gagaaaagcgucauugaua

SEQ ID NO: 1816566 - RNA, 19 nt, Homo sapiens
  misc_RNA (1)...(19): siRNA sense strand
ccaaauaccacaaguugaa

SEQ ID NO: 1816567 - RNA, 19 nt, Homo sapiens
  misc_RNA (1)...(19): siRNA sense strand
gagguggguuauacagaua

SEQ ID NO: 1816568 - RNA, 19 nt, Homo sapiens
  misc_RNA (1)...(19): siRNA sense strand
ggagguggguuauacagau

SEQ ID NO: 1816569 - RNA, 19 nt, Homo sapiens
  misc_RNA (1)...(19): siRNA sense strand
caagggauauacaagcauu

SEQ ID NO: 1816570 - RNA, 19 nt, Homo sapiens
  misc_RNA (1)...(19): siRNA sense strand
ccuagaagcuguuacaagu

SEQ ID NO: 1816571 - RNA, 19 nt, Homo sapiens
  misc_RNA (1)...(19): siRNA sense strand
caacaacgcauucucacuu

SEQ ID NO: 1816572 - RNA, 19 nt, Homo sapiens
  misc_RNA (1)...(19): siRNA sense strand
caacucuuccugccaaaua

SEQ ID NO: 1816573 - RNA, 19 nt, Homo sapiens
  misc_RNA (1)...(19): siRNA sense strand
gaagugcagccacaacaaa

SEQ ID NO: 1816574 - RNA, 19 nt, Homo sapiens
  misc_RNA (1)...(19): siRNA sense strand
ccaauggccuuuacuugau

SEQ ID NO: 1816575 - RNA, 19 nt, Homo sapiens
  misc_RNA (1)...(19): siRNA sense strand
gcauugacauuuccuccuu

SEQ ID NO: 1816576 - RNA, 19 nt, Homo sapiens
  misc_RNA (1)...(19): siRNA sense strand
cagaugaaguggaagcauu

SEQ ID NO: 1816577 - RNA, 19 nt, Homo sapiens
  misc_RNA (1)...(19): siRNA sense strand
aaucaggacucaguuguaa

SEQ ID NO: 1816578 - RNA, 19 nt, Homo sapiens
  misc_RNA (1)...(19): siRNA sense strand
gaagacaggcacaucaaau

SEQ ID NO: 1816579 - RNA, 19 nt, Homo sapiens
  misc_RNA (1)...(19): siRNA sense strand
ccauaaagguccagugcuu

SEQ ID NO: 1816580 - RNA, 19 nt, Homo sapiens
  misc_RNA (1)...(19): siRNA sense strand
aaagaugcauugaggaaga

SEQ ID NO: 1816581 - RNA, 19 nt, Homo sapiens
  misc_RNA (1)...(19): siRNA sense strand
ggaaggagacaaugaaucu

SEQ ID NO: 1816582 - RNA, 19 nt, Homo sapiens
  misc_RNA (1)...(19): siRNA sense strand
ggaguaugcucuuaaacag

SEQ ID NO: 1816583 - RNA, 19 nt, Homo sapiens
  misc_RNA (1)...(19): siRNA sense strand
cagacucacuaacuuauga

SEQ ID NO: 1816584 - RNA, 19 nt, Homo sapiens
  misc_RNA (1)...(19): siRNA sense strand
gaaaacagccccagccaaa

SEQ ID NO: 1816585 - RNA, 19 nt, Homo sapiens
  misc_RNA (1)...(19): siRNA sense strand
gcaaacugauccacucgau

SEQ ID NO: 1816586 - RNA, 19 nt, Homo sapiens
  misc_RNA (1)...(19): siRNA sense strand
uaaagagacagcaaugauu

SEQ ID NO: 1816587 - RNA, 19 nt, Homo sapiens
  misc_RNA (1)...(19): siRNA sense strand
agacguguauccaagaauu

SEQ ID NO: 1816588 - RNA, 19 nt, Homo sapiens
  misc_RNA (1)...(19): siRNA sense strand
caaugaagcagacucacua

SEQ ID NO: 1816589 - RNA, 19 nt, Homo sapiens
  misc_RNA (1)...(19): siRNA sense strand
ccuccgugcuggauaauuu

SEQ ID NO: 1816590 - RNA, 19 nt, Homo sapiens
  misc_RNA (1)...(19): siRNA sense strand
ggucaaaacuacaagauau

SEQ ID NO: 1816591 - RNA, 19 nt, Homo sapiens
  misc_RNA (1)...(19): siRNA sense strand
ggaaacacaacaacgcauu

SEQ ID NO: 1816592 - RNA, 19 nt, Homo sapiens
  misc_RNA (1)...(19): siRNA sense strand
caucagaggaucacacauu

SEQ ID NO: 1816593 - RNA, 19 nt, Homo sapiens
  misc_RNA (1)...(19): siRNA sense strand
gauaacagcaucagaggau

SEQ ID NO: 1816594 - RNA, 19 nt, Homo sapiens
  misc_RNA (1)...(19): siRNA sense strand
gagagauguugaugaacuu

SEQ ID NO: 1816595 - RNA, 19 nt, Homo sapiens
  misc_RNA (1)...(19): siRNA sense strand
ugaaauacgggacagaauu

SEQ ID NO: 1816596 - RNA, 19 nt, Homo sapiens
  misc_RNA (1)...(19): siRNA sense strand
agaugaagaugaugauguu

SEQ ID NO: 1816597 - RNA, 19 nt, Homo sapiens
  misc_RNA (1)...(19): siRNA sense strand
cagauacuauucuagaugu

SEQ ID NO: 1816598 - RNA, 19 nt, Homo sapiens
  misc_RNA (1)...(19): siRNA sense strand
gcagaugaagcccuugaaa

SEQ ID NO: 1816599 - RNA, 19 nt, Homo sapiens
  misc_RNA (1)...(19): siRNA sense strand
ucaauacguuuauggaauc

SEQ ID NO: 1816600 - RNA, 19 nt, Homo sapiens
  misc_RNA (1)...(19): siRNA sense strand
cagaggaucacacauuaaa

SEQ ID NO: 1816601 - RNA, 19 nt, Homo sapiens
  misc_RNA (1)...(19): siRNA sense strand
uaugaagccuccaagcuau

SEQ ID NO: 1816602 - RNA, 19 nt, Homo sapiens
  misc_RNA (1)...(19): siRNA sense strand
uaagacguguauccaagaa

SEQ ID NO: 1816603 - RNA, 19 nt, Homo sapiens
  misc_RNA (1)...(19): siRNA sense strand
gcacaucagcguuuguugu

SEQ ID NO: 1816604 - RNA, 19 nt, Homo sapiens
  misc_RNA (1)...(19): siRNA sense strand
acauggaacccuaaguuua

SEQ ID NO: 1816605 - RNA, 19 nt, Homo sapiens
  misc_RNA (1)...(19): siRNA sense strand
ugacagcggugaagaucga

SEQ ID NO: 1816606 - RNA, 19 nt, Homo sapiens
  misc_RNA (1)...(19): siRNA sense strand
caacaaaacagccaguuaa

SEQ ID NO: 1816607 - RNA, 19 nt, Homo sapiens
  misc_RNA (1)...(19): siRNA sense strand
gcagugacccgagccauau

SEQ ID NO: 1816608 - RNA, 19 nt, Homo sapiens
  misc_RNA (1)...(19): siRNA sense strand
acucugcguuuauggaaua

SEQ ID NO: 1816609 - RNA, 19 nt, Homo sapiens
  misc_RNA (1)...(19): siRNA sense strand
gacauggaacccuaaguuu

SEQ ID NO: 1816610 - RNA, 19 nt, Homo sapiens
  misc_RNA (1)...(19): siRNA sense strand
uuugagagauguugaugaa

SEQ ID NO: 1816611 - RNA, 19 nt, Homo sapiens
  misc_RNA (1)...(19): siRNA sense strand
aagaagcucuaaaggaguu

SEQ ID NO: 1816612 - RNA, 19 nt, Homo sapiens
  misc_RNA (1)...(19): siRNA sense strand
ugaugaagaugaagaugau

SEQ ID NO: 1816613 - RNA, 19 nt, Homo sapiens
  misc_RNA (1)...(19): siRNA sense strand
ugaugaagguaaugaaaca

SEQ ID NO: 1816614 - RNA, 19 nt, Homo sapiens
  misc_RNA (1)...(19): siRNA sense strand
acaacgcauucucacuuua

SEQ ID NO: 1816615 - RNA, 19 nt, Homo sapiens
  misc_RNA (1)...(19): siRNA sense strand
uuaccaaacucaaggaaca

SEQ ID NO: 1816616 - RNA, 19 nt, Homo sapiens
  misc_RNA (1)...(19): siRNA sense strand
aaaggaguuugacuucuug

SEQ ID NO: 1816617 - RNA, 19 nt, Homo sapiens
  misc_RNA (1)...(19): siRNA sense strand
gugaagaucgagauacaaa

SEQ ID NO: 1816618 - RNA, 19 nt, Homo sapiens
  misc_RNA (1)...(19): siRNA sense strand
ugaagguaaugaaacagaa

SEQ ID NO: 1816619 - RNA, 19 nt, Homo sapiens
  misc_RNA (1)...(19): siRNA sense strand
guuggaguaugcucuuaaa

SEQ ID NO: 1816620 - RNA, 19 nt, Homo sapiens
  misc_RNA (1)...(19): siRNA sense strand
ugagagauguugaugaacu

SEQ ID NO: 1816621 - RNA, 19 nt, Homo sapiens
  misc_RNA (1)...(19): siRNA sense strand
gaauguggaccagggagua

SEQ ID NO: 1816622 - RNA, 19 nt, Homo sapiens
  misc_RNA (1)...(19): siRNA sense strand
gaaaguaagacguguaucc

SEQ ID NO: 1816623 - RNA, 19 nt, Homo sapiens
  misc_RNA (1)...(19): siRNA sense strand
uaacauggaaacacaacaa

SEQ ID NO: 1816624 - RNA, 19 nt, Homo sapiens
  misc_RNA (1)...(19): siRNA sense strand
ccacuaaucccaacaucga

SEQ ID NO: 1816625 - RNA, 19 nt, Homo sapiens
  misc_RNA (1)...(19): siRNA sense strand
ggagaacuagcaggccuua

SEQ ID NO: 1816626 - RNA, 19 nt, Homo sapiens
  misc_RNA (1)...(19): siRNA sense strand
acugggaccuggagaacua

SEQ ID NO: 1816627 - RNA, 19 nt, Homo sapiens
  misc_RNA (1)...(19): siRNA sense strand
gaaguuaaagagacagcaa

SEQ ID NO: 1816628 - RNA, 19 nt, Homo sapiens
  misc_RNA (1)...(19): siRNA sense strand
gagcugacgcacuggcuaa

SEQ ID NO: 1816629 - RNA, 19 nt, Homo sapiens
  misc_RNA (1)...(19): siRNA sense strand
acaggcacaucaaauucua

SEQ ID NO: 1816630 - RNA, 19 nt, Homo sapiens
  misc_RNA (1)...(19): siRNA sense strand
augaagcccuugaaaguga

SEQ ID NO: 1816631 - RNA, 19 nt, Homo sapiens
  misc_RNA (1)...(19): siRNA sense strand
guggaagcauugacauuuc

SEQ ID NO: 1816632 - RNA, 19 nt, Homo sapiens
  misc_RNA (1)...(19): siRNA sense strand
gaaauuaauagggcagaug

SEQ ID NO: 1816633 - RNA, 19 nt, Homo sapiens
  misc_RNA (1)...(19): siRNA sense strand
ggaguuugacuucuugguu

SEQ ID NO: 1816634 - RNA, 19 nt, Homo sapiens
  misc_RNA (1)...(19): siRNA sense strand
ugaagaugaugauguugau

SEQ ID NO: 1816635 - RNA, 19 nt, Homo sapiens
  misc_RNA (1)...(19): siRNA sense strand
aagcagacucacuaacuua

SEQ ID NO: 1816636 - RNA, 19 nt, Homo sapiens
  misc_RNA (1)...(19): siRNA sense strand
gaaacacaacaacgcauuc

SEQ ID NO: 1816637 - RNA, 19 nt, Homo sapiens
  misc_RNA (1)...(19): siRNA sense strand
gcacucugcguuuauggaa

SEQ ID NO: 1816638 - RNA, 19 nt, Homo sapiens
  misc_RNA (1)...(19): siRNA sense strand
aucagaggaucacacauua

SEQ ID NO: 1816639 - RNA, 19 nt, Homo sapiens
  misc_RNA (1)...(19): siRNA sense strand
ggaagacauggaacccuaa

SEQ ID NO: 1816640 - RNA, 19 nt, Homo sapiens
  misc_RNA (1)...(19): siRNA sense strand
caagcuaugauucugauga

SEQ ID NO: 1816641 - RNA, 19 nt, Homo sapiens
  misc_RNA (1)...(19): siRNA sense strand
gccuuacgguggccaauga

SEQ ID NO: 1816642 - RNA, 19 nt, Homo sapiens
  misc_RNA (1)...(19): siRNA sense strand
gaauugaaucagggagaua

SEQ ID NO: 1816643 - RNA, 19 nt, Homo sapiens
  misc_RNA (1)...(19): siRNA sense strand
uaauagggcagaugaagug

SEQ ID NO: 1816644 - RNA, 19 nt, Homo sapiens
  misc_RNA (1)...(19): siRNA sense strand
caaaacagccaguuaaugu

SEQ ID NO: 1816645 - RNA, 19 nt, Homo sapiens
  misc_RNA (1)...(19): siRNA sense strand
agacauggaacccuaaguu

SEQ ID NO: 1816646 - RNA, 19 nt, Homo sapiens
  misc_RNA (1)...(19): siRNA sense strand
guuacaaguuuagcaguug

SEQ ID NO: 1816647 - RNA, 19 nt, Homo sapiens
  misc_RNA (1)...(19): siRNA sense strand
gaagaaaucucaaacagua

SEQ ID NO: 1816648 - RNA, 19 nt, Homo sapiens
  misc_RNA (1)...(19): siRNA sense strand
gcaaagaucucaccaacaa

SEQ ID NO: 1816649 - RNA, 19 nt, Homo sapiens
  misc_RNA (1)...(19): siRNA sense strand
caaaguaccucaagucaaa

SEQ ID NO: 1816650 - RNA, 19 nt, Homo sapiens
  misc_RNA (1)...(19): siRNA sense strand
gaaagaagauaccuuggaa

SEQ ID NO: 1816651 - RNA, 19 nt, Homo sapiens
  misc_RNA (1)...(19): siRNA sense strand
ggaaagcucucaaagcaaa

SEQ ID NO: 1816652 - RNA, 19 nt, Homo sapiens
  misc_RNA (1)...(19): siRNA sense strand
gauagacgcuucauguuaa

SEQ ID NO: 1816653 - RNA, 19 nt, Homo sapiens
  misc_RNA (1)...(19): siRNA sense strand
gauggaagcuugagcauag

SEQ ID NO: 1816654 - RNA, 19 nt, Homo sapiens
  misc_RNA (1)...(19): siRNA sense strand
aaugaaagcuuccuaaaug

SEQ ID NO: 1816655 - RNA, 19 nt, Homo sapiens
  misc_RNA (1)...(19): siRNA sense strand
gaagauaccuuggaauuuu

SEQ ID NO: 1816656 - RNA, 19 nt, Homo sapiens
  misc_RNA (1)...(19): siRNA sense strand
gcuauucacuggugccaua

SEQ ID NO: 1816657 - RNA, 19 nt, Homo sapiens
  misc_RNA (1)...(19): siRNA sense strand
gaacagcucccuccagaga

SEQ ID NO: 1816658 - RNA, 19 nt, Homo sapiens
  misc_RNA (1)...(19): siRNA sense strand
gaaagcagcacauugucua

SEQ ID NO: 1816659 - RNA, 19 nt, Homo sapiens
  misc_RNA (1)...(19): siRNA sense strand
caaggaaacacaugaaauu

SEQ ID NO: 1816660 - RNA, 19 nt, Homo sapiens
  misc_RNA (1)...(19): siRNA sense strand
gaagaaauaaccgaaauga

SEQ ID NO: 1816661 - RNA, 19 nt, Homo sapiens
  misc_RNA (1)...(19): siRNA sense strand
guacuuaaaugcagacaca

SEQ ID NO: 1816662 - RNA, 19 nt, Homo sapiens
  misc_RNA (1)...(19): siRNA sense strand
aagcugcgcuccugacaua

SEQ ID NO: 1816663 - RNA, 19 nt, Homo sapiens
  misc_RNA (1)...(19): siRNA sense strand
gauauuguccaucgagaua

SEQ ID NO: 1816664 - RNA, 19 nt, Homo sapiens
  misc_RNA (1)...(19): siRNA sense strand
ggacccagcugacagauac

SEQ ID NO: 1816665 - RNA, 19 nt, Homo sapiens
  misc_RNA (1)...(19): siRNA sense strand
ggcaagaucuucggucaaa

SEQ ID NO: 1816666 - RNA, 19 nt, Homo sapiens
  misc_RNA (1)...(19): siRNA sense strand
caagauagacgcuucaugu

SEQ ID NO: 1816667 - RNA, 19 nt, Homo sapiens
  misc_RNA (1)...(19): siRNA sense strand
cuaagacgauggaggaauu

SEQ ID NO: 1816668 - RNA, 19 nt, Homo sapiens
  misc_RNA (1)...(19): siRNA sense strand
gaaggagccuauggaguug

SEQ ID NO: 1816669 - RNA, 19 nt, Homo sapiens
  misc_RNA (1)...(19): siRNA sense strand
aaagagaccuccagagaag

SEQ ID NO: 1816670 - RNA, 19 nt, Homo sapiens
  misc_RNA (1)...(19): siRNA sense strand
cggcauagcuauauugaca

SEQ ID NO: 1816671 - RNA, 19 nt, Homo sapiens
  misc_RNA (1)...(19): siRNA sense strand
gcccugaucuucugacguu

SEQ ID NO: 1816672 - RNA, 19 nt, Homo sapiens
  misc_RNA (1)...(19): siRNA sense strand
caacauaccacaccuucuu

SEQ ID NO: 1816673 - RNA, 19 nt, Homo sapiens
  misc_RNA (1)...(19): siRNA sense strand
ugaaggagccuauggaguu

SEQ ID NO: 1816674 - RNA, 19 nt, Homo sapiens
  misc_RNA (1)...(19): siRNA sense strand
ugaauaguguucuacuuga

SEQ ID NO: 1816675 - RNA, 19 nt, Homo sapiens
  misc_RNA (1)...(19): siRNA sense strand
ggaaaaguccugaaaauau

SEQ ID NO: 1816676 - RNA, 19 nt, Homo sapiens
  misc_RNA (1)...(19): siRNA sense strand
agacaauucuuuccaugaa

SEQ ID NO: 1816677 - RNA, 19 nt, Homo sapiens
  misc_RNA (1)...(19): siRNA sense strand
ggaaagaagauaccuugga

SEQ ID NO: 1816678 - RNA, 19 nt, Homo sapiens
  misc_RNA (1)...(19): siRNA sense strand
ucaaagagaccuccagaga

SEQ ID NO: 1816679 - RNA, 19 nt, Homo sapiens
  misc_RNA (1)...(19): siRNA sense strand
caaagagaccuccagagaa

SEQ ID NO: 1816680 - RNA, 19 nt, Homo sapiens
  misc_RNA (1)...(19): siRNA sense strand
gaagauuccuaacauuggu

SEQ ID NO: 1816681 - RNA, 19 nt, Homo sapiens
  misc_RNA (1)...(19): siRNA sense strand
gaaauuguggcgaucaaga

SEQ ID NO: 1816682 - RNA, 19 nt, Homo sapiens
  misc_RNA (1)...(19): siRNA sense strand
cgacagcccugaucuucug

SEQ ID NO: 1816683 - RNA, 19 nt, Homo sapiens
  misc_RNA (1)...(19): siRNA sense strand
ggacaaaguaccucaaguc

SEQ ID NO: 1816684 - RNA, 19 nt, Homo sapiens
  misc_RNA (1)...(19): siRNA sense strand
agauagacgcuucauguua

SEQ ID NO: 1816685 - RNA, 19 nt, Homo sapiens
  misc_RNA (1)...(19): siRNA sense strand
aaggagaguugguagcuuu

SEQ ID NO: 1816686 - RNA, 19 nt, Homo sapiens
  misc_RNA (1)...(19): siRNA sense strand
uugcagaaauccauucauu

SEQ ID NO: 1816687 - RNA, 19 nt, Homo sapiens
  misc_RNA (1)...(19): siRNA sense strand
ggaguugaaggaagcauuu

SEQ ID NO: 1816688 - RNA, 19 nt, Homo sapiens
  misc_RNA (1)...(19): siRNA sense strand
cuauggaguuguacuuaaa

SEQ ID NO: 1816689 - RNA, 19 nt, Homo sapiens
  misc_RNA (1)...(19): siRNA sense strand
gacaguagccauucccauu

SEQ ID NO: 1816690 - RNA, 19 nt, Homo sapiens
  misc_RNA (1)...(19): siRNA sense strand
gcaaggacauccagaaccu

SEQ ID NO: 1816691 - RNA, 19 nt, Homo sapiens
  misc_RNA (1)...(19): siRNA sense strand
gaaucacccuacauuucaa

SEQ ID NO: 1816692 - RNA, 19 nt, Homo sapiens
  misc_RNA (1)...(19): siRNA sense strand
gaagacagagacaccauuc

SEQ ID NO: 1816693 - RNA, 19 nt, Homo sapiens
  misc_RNA (1)...(19): siRNA sense strand
ccuauggaguuguacuuaa

SEQ ID NO: 1816694 - RNA, 19 nt, Homo sapiens
  misc_RNA (1)...(19): siRNA sense strand
ccacaaugauguccuaaaa

SEQ ID NO: 1816695 - RNA, 19 nt, Homo sapiens
  misc_RNA (1)...(19): siRNA sense strand
guagguacuucccaucuag

SEQ ID NO: 1816696 - RNA, 19 nt, Homo sapiens
  misc_RNA (1)...(19): siRNA sense strand
gaagccagggcccaaauug

SEQ ID NO: 1816697 - RNA, 19 nt, Homo sapiens
  misc_RNA (1)...(19): siRNA sense strand
gcagcacauugucuaauag

SEQ ID NO: 1816698 - RNA, 19 nt, Homo sapiens
  misc_RNA (1)...(19): siRNA sense strand
ucgaauugcuggaagaaau

SEQ ID NO: 1816699 - RNA, 19 nt, Homo sapiens
  misc_RNA (1)...(19): siRNA sense strand
gcauagcuauauugacaca

SEQ ID NO: 1816700 - RNA, 19 nt, Homo sapiens
  misc_RNA (1)...(19): siRNA sense strand
uggaagaaaugccaaaugg

SEQ ID NO: 1816701 - RNA, 19 nt, Homo sapiens
  misc_RNA (1)...(19): siRNA sense strand
uaggaccacuuccaucuga

SEQ ID NO: 1816702 - RNA, 19 nt, Homo sapiens
  misc_RNA (1)...(19): siRNA sense strand
caaugaaagcuuccuaaau

SEQ ID NO: 1816703 - RNA, 19 nt, Homo sapiens
  misc_RNA (1)...(19): siRNA sense strand
ucggugggcuguauucuug

SEQ ID NO: 1816704 - RNA, 19 nt, Homo sapiens
  misc_RNA (1)...(19): siRNA sense strand
caaagaaaauagacaccua

SEQ ID NO: 1816705 - RNA, 19 nt, Homo sapiens
  misc_RNA (1)...(19): siRNA sense strand
gaaccgccacucauucaug

SEQ ID NO: 1816706 - RNA, 19 nt, Homo sapiens
  misc_RNA (1)...(19): siRNA sense strand
aagaagauaccuuggaauu

SEQ ID NO: 1816707 - RNA, 19 nt, Homo sapiens
  misc_RNA (1)...(19): siRNA sense strand
uauuguccaucgagauaua

SEQ ID NO: 1816708 - RNA, 19 nt, Homo sapiens
  misc_RNA (1)...(19): siRNA sense strand
ggaagaaauaaccgaaaug

SEQ ID NO: 1816709 - RNA, 19 nt, Homo sapiens
  misc_RNA (1)...(19): siRNA sense strand
gcagaaccgccacucauuc

SEQ ID NO: 1816710 - RNA, 19 nt, Homo sapiens
  misc_RNA (1)...(19): siRNA sense strand
caaaagaagccaagucaaa

SEQ ID NO: 1816711 - RNA, 19 nt, Homo sapiens
  misc_RNA (1)...(19): siRNA sense strand
agaauuuacugaaguugga

SEQ ID NO: 1816712 - RNA, 19 nt, Homo sapiens
  misc_RNA (1)...(19): siRNA sense strand
ccaaugaaagcuuccuaaa

SEQ ID NO: 1816713 - RNA, 19 nt, Homo sapiens
  misc_RNA (1)...(19): siRNA sense strand
cuacaucuaucagcuaauc

SEQ ID NO: 1816714 - RNA, 19 nt, Homo sapiens
  misc_RNA (1)...(19): siRNA sense strand
uaaaaucacugcgcaaguu

SEQ ID NO: 1816715 - RNA, 19 nt, Homo sapiens
  misc_RNA (1)...(19): siRNA sense strand
ccacaaccagacauucuaa

SEQ ID NO: 1816716 - RNA, 19 nt, Homo sapiens
  misc_RNA (1)...(19): siRNA sense strand
uggaagaaauaaccgaaau

SEQ ID NO: 1816717 - RNA, 19 nt, Homo sapiens
  misc_RNA (1)...(19): siRNA sense strand
agcagcacauugucuaaua

SEQ ID NO: 1816718 - RNA, 19 nt, Homo sapiens
  misc_RNA (1)...(19): siRNA sense strand
cuacuugaccuaaugaaga

SEQ ID NO: 1816719 - RNA, 19 nt, Homo sapiens
  misc_RNA (1)...(19): siRNA sense strand
cgauggacagccuuuauuu

SEQ ID NO: 1816720 - RNA, 19 nt, Homo sapiens
  misc_RNA (1)...(19): siRNA sense strand
ugacauaccaugagaaugc

SEQ ID NO: 1816721 - RNA, 19 nt, Homo sapiens
  misc_RNA (1)...(19): siRNA sense strand
aagaagaaaucucaaacag

SEQ ID NO: 1816722 - RNA, 19 nt, Homo sapiens
  misc_RNA (1)...(19): siRNA sense strand
gaaggucucccugccaaug

SEQ ID NO: 1816723 - RNA, 19 nt, Homo sapiens
  misc_RNA (1)...(19): siRNA sense strand
aaagugaaauugaccaacu

SEQ ID NO: 1816724 - RNA, 19 nt, Homo sapiens
  misc_RNA (1)...(19): siRNA sense strand
ggaagaaaugccaaaugga

SEQ ID NO: 1816725 - RNA, 19 nt, Homo sapiens
  misc_RNA (1)...(19): siRNA sense strand
gacaaaguaccucaaguca

SEQ ID NO: 1816726 - RNA, 19 nt, Homo sapiens
  misc_RNA (1)...(19): siRNA sense strand
acagauacuugacagaaca

SEQ ID NO: 1816727 - RNA, 19 nt, Homo sapiens
  misc_RNA (1)...(19): siRNA sense strand
ccauaagaaugauauuguc

SEQ ID NO: 1816728 - RNA, 19 nt, Homo sapiens
  misc_RNA (1)...(19): siRNA sense strand
agagaugacuguggcaaga

SEQ ID NO: 1816729 - RNA, 19 nt, Homo sapiens
  misc_RNA (1)...(19): siRNA sense strand
ggauggaagcuugagcaua

SEQ ID NO: 1816730 - RNA, 19 nt, Homo sapiens
  misc_RNA (1)...(19): siRNA sense strand
guaugugacccgugacaaa

SEQ ID NO: 1816731 - RNA, 19 nt, Homo sapiens
  misc_RNA (1)...(19): siRNA sense strand
cagcagaucucagcagaac

SEQ ID NO: 1816732 - RNA, 19 nt, Homo sapiens
  misc_RNA (1)...(19): siRNA sense strand
ugacagauacuugacagaa

SEQ ID NO: 1816733 - RNA, 19 nt, Homo sapiens
  misc_RNA (1)...(19): siRNA sense strand
gcgauggacagccuuuauu

SEQ ID NO: 1816734 - RNA, 19 nt, Homo sapiens
  misc_RNA (1)...(19): siRNA sense strand
ucagaaggcaauaaugcua

SEQ ID NO: 1816735 - RNA, 19 nt, Homo sapiens
  misc_RNA (1)...(19): siRNA sense strand
cagccacaaugauguccua

SEQ ID NO: 1816736 - RNA, 19 nt, Homo sapiens
  misc_RNA (1)...(19): siRNA sense strand
aauaaugugucaacuagag

SEQ ID NO: 1816737 - RNA, 19 nt, Homo sapiens
  misc_RNA (1)...(19): siRNA sense strand
caacagccugcaacucuug

SEQ ID NO: 1816738 - RNA, 19 nt, Homo sapiens
  misc_RNA (1)...(19): siRNA sense strand
ccaacagccugcaacucuu

SEQ ID NO: 1816739 - RNA, 19 nt, Homo sapiens
  misc_RNA (1)...(19): siRNA sense strand
gaaaagcagagucggcaua

SEQ ID NO: 1816740 - RNA, 19 nt, Homo sapiens
  misc_RNA (1)...(19): siRNA sense strand
guggaaagcagcacauugu

SEQ ID NO: 1816741 - RNA, 19 nt, Homo sapiens
  misc_RNA (1)...(19): siRNA sense strand
cagaaggcaauaaugcuaa

SEQ ID NO: 1816742 - RNA, 19 nt, Homo sapiens
  misc_RNA (1)...(19): siRNA sense strand
gccauaagaaugauauugu

SEQ ID NO: 1816743 - RNA, 19 nt, Homo sapiens
  misc_RNA (1)...(19): siRNA sense strand
ucucagaaauucggauuca

SEQ ID NO: 1816744 - RNA, 19 nt, Homo sapiens
  misc_RNA (1)...(19): siRNA sense strand
gacccaaagccagccauua

SEQ ID NO: 1816745 - RNA, 19 nt, Homo sapiens
  misc_RNA (1)...(19): siRNA sense strand
auggaaagcucucaaagca

SEQ ID NO: 1816746 - RNA, 19 nt, Homo sapiens
  misc_RNA (1)...(19): siRNA sense strand
gaauaguguucuacuugac

SEQ ID NO: 1816747 - RNA, 19 nt, Homo sapiens
  misc_RNA (1)...(19): siRNA sense strand
gaugugagguuuccacuau

SEQ ID NO: 1816748 - RNA, 19 nt, Homo sapiens
  misc_RNA (1)...(19): siRNA sense strand
gauccaggcucaucuacaa

SEQ ID NO: 1816749 - RNA, 19 nt, Homo sapiens
  misc_RNA (1)...(19): siRNA sense strand
caagguagaugugagguuu

SEQ ID NO: 1816750 - RNA, 19 nt, Homo sapiens
  misc_RNA (1)...(19): siRNA sense strand
gcacagccacgauaauaga

SEQ ID NO: 1816751 - RNA, 19 nt, Homo sapiens
  misc_RNA (1)...(19): siRNA sense strand
gcgcacagccacgauaaua

SEQ ID NO: 1816752 - RNA, 19 nt, Homo sapiens
  misc_RNA (1)...(19): siRNA sense strand
cuacugccaugacaagaaa

SEQ ID NO: 1816753 - RNA, 19 nt, Homo sapiens
  misc_RNA (1)...(19): siRNA sense strand
gcagaaaagcgagaaauua

SEQ ID NO: 1816754 - RNA, 19 nt, Homo sapiens
  misc_RNA (1)...(19): siRNA sense strand
gcauuggagugcucugcua

SEQ ID NO: 1816755 - RNA, 19 nt, Homo sapiens
  misc_RNA (1)...(19): siRNA sense strand
gauaauagaggaaguugca

SEQ ID NO: 1816756 - RNA, 19 nt, Homo sapiens
  misc_RNA (1)...(19): siRNA sense strand
gggagaacauaugaugaaa

SEQ ID NO: 1816757 - RNA, 19 nt, Homo sapiens
  misc_RNA (1)...(19): siRNA sense strand
ggaaauuugggaaugugua

SEQ ID NO: 1816758 - RNA, 19 nt, Homo sapiens
  misc_RNA (1)...(19): siRNA sense strand
uuuccaggcuucucagaua

SEQ ID NO: 1816759 - RNA, 19 nt, Homo sapiens
  misc_RNA (1)...(19): siRNA sense strand
ucaagucgcagauagagaa

SEQ ID NO: 1816760 - RNA, 19 nt, Homo sapiens
  misc_RNA (1)...(19): siRNA sense strand
aggugaagauugcagauuu

SEQ ID NO: 1816761 - RNA, 19 nt, Homo sapiens
  misc_RNA (1)...(19): siRNA sense strand
cagaugcccugaccuacug

SEQ ID NO: 1816762 - RNA, 19 nt, Homo sapiens
  misc_RNA (1)...(19): siRNA sense strand
gagaacauaugaugaaaag

SEQ ID NO: 1816763 - RNA, 19 nt, Homo sapiens
  misc_RNA (1)...(19): siRNA sense strand
ggauauccacccuuugaga

SEQ ID NO: 1816764 - RNA, 19 nt, Homo sapiens
  misc_RNA (1)...(19): siRNA sense strand
ccaauauccugcgccugua

SEQ ID NO: 1816765 - RNA, 19 nt, Homo sapiens
  misc_RNA (1)...(19): siRNA sense strand
gcgagaaauuagaugaaca

SEQ ID NO: 1816766 - RNA, 19 nt, Homo sapiens
  misc_RNA (1)...(19): siRNA sense strand
gugggacacuggacuacuu

SEQ ID NO: 1816767 - RNA, 19 nt, Homo sapiens
  misc_RNA (1)...(19): siRNA sense strand
gcagauagagaaggaagga

SEQ ID NO: 1816768 - RNA, 19 nt, Homo sapiens
  misc_RNA (1)...(19): siRNA sense strand
ggggugagcucuacaagga

SEQ ID NO: 1816769 - RNA, 19 nt, Homo sapiens
  misc_RNA (1)...(19): siRNA sense strand
acaaggagcugcagaaaag

SEQ ID NO: 1816770 - RNA, 19 nt, Homo sapiens
  misc_RNA (1)...(19): siRNA sense strand
gaacauaugaugaaaaggu

SEQ ID NO: 1816771 - RNA, 19 nt, Homo sapiens
  misc_RNA (1)...(19): siRNA sense strand
guaccuggcucggcucaag

SEQ ID NO: 1816772 - RNA, 19 nt, Homo sapiens
  misc_RNA (1)...(19): siRNA sense strand
guggauuuguggugcauug

SEQ ID NO: 1816773 - RNA, 19 nt, Homo sapiens
  misc_RNA (1)...(19): siRNA sense strand
gcgccuguauaacuauuuc

SEQ ID NO: 1816774 - RNA, 19 nt, Homo sapiens
  misc_RNA (1)...(19): siRNA sense strand
gaaauuugggaauguguac

SEQ ID NO: 1816775 - RNA, 19 nt, Homo sapiens
  misc_RNA (1)...(19): siRNA sense strand
gaaaagcgagaaauuagau

SEQ ID NO: 1816776 - RNA, 19 nt, Homo sapiens
  misc_RNA (1)...(19): siRNA sense strand
ucagauaccagcccuugga

SEQ ID NO: 1816777 - RNA, 19 nt, Homo sapiens
  misc_RNA (1)...(19): siRNA sense strand
ggugaagauugcagauuuu

SEQ ID NO: 1816778 - RNA, 19 nt, Homo sapiens
  misc_RNA (1)...(19): siRNA sense strand
cuacuugccgccagaaaug

SEQ ID NO: 1816779 - RNA, 19 nt, Homo sapiens
  misc_RNA (1)...(19): siRNA sense strand
aaagcgagaaauuagauga

SEQ ID NO: 1816780 - RNA, 19 nt, Homo sapiens
  misc_RNA (1)...(19): siRNA sense strand
ugagagcgccucccacagu

SEQ ID NO: 1816781 - RNA, 19 nt, Homo sapiens
  misc_RNA (1)...(19): siRNA sense strand
gcagaugcccugaccuacu

SEQ ID NO: 1816782 - RNA, 19 nt, Homo sapiens
  misc_RNA (1)...(19): siRNA sense strand
gaggugaagauugcagauu

SEQ ID NO: 1816783 - RNA, 19 nt, Homo sapiens
  misc_RNA (1)...(19): siRNA sense strand
ugugagguuuccacuauca

SEQ ID NO: 1816784 - RNA, 19 nt, Homo sapiens
  misc_RNA (1)...(19): siRNA sense strand
ugggauauccacccuuuga

SEQ ID NO: 1816785 - RNA, 19 nt, Homo sapiens
  misc_RNA (1)...(19): siRNA sense strand
cuacaaggagcugcagaaa

SEQ ID NO: 1816786 - RNA, 19 nt, Homo sapiens
  misc_RNA (1)...(19): siRNA sense strand
uuggagugcucugcuauga

SEQ ID NO: 1816787 - RNA, 19 nt, Homo sapiens
  misc_RNA (1)...(19): siRNA sense strand
gagauauuaagccagagaa

SEQ ID NO: 1816788 - RNA, 19 nt, Homo sapiens
  misc_RNA (1)...(19): siRNA sense strand
cagcgcacagccacgauaa

SEQ ID NO: 1816789 - RNA, 19 nt, Homo sapiens
  misc_RNA (1)...(19): siRNA sense strand
gagguuuccacuaucaaug

SEQ ID NO: 1816790 - RNA, 19 nt, Homo sapiens
  misc_RNA (1)...(19): siRNA sense strand
ccacgauaauagaggaagu

SEQ ID NO: 1816791 - RNA, 19 nt, Homo sapiens
  misc_RNA (1)...(19): siRNA sense strand
uggcucggcucaaggaaag

SEQ ID NO: 1816792 - RNA, 19 nt, Homo sapiens
  misc_RNA (1)...(19): siRNA sense strand
ccacagugagacuuacaga

SEQ ID NO: 1816793 - RNA, 19 nt, Homo sapiens
  misc_RNA (1)...(19): siRNA sense strand
agucgcagauagagaagga

SEQ ID NO: 1816794 - RNA, 19 nt, Homo sapiens
  misc_RNA (1)...(19): siRNA sense strand
gacgcauccucaagguaga

SEQ ID NO: 1816795 - RNA, 19 nt, Homo sapiens
  misc_RNA (1)...(19): siRNA sense strand
ccugagaggaagacaaugu

SEQ ID NO: 1816796 - RNA, 19 nt, Homo sapiens
  misc_RNA (1)...(19): siRNA sense strand
ccucccacagugagacuua

SEQ ID NO: 1816797 - RNA, 19 nt, Homo sapiens
  misc_RNA (1)...(19): siRNA sense strand
caauauccugcgccuguau

SEQ ID NO: 1816798 - RNA, 19 nt, Homo sapiens
  misc_RNA (1)...(19): siRNA sense strand
uugcagaugcccugaccua

SEQ ID NO: 1816799 - RNA, 19 nt, Homo sapiens
  misc_RNA (1)...(19): siRNA sense strand
acagacgcauccucaaggu

SEQ ID NO: 1816800 - RNA, 19 nt, Homo sapiens
  misc_RNA (1)...(19): siRNA sense strand
augagcugcuggugggaua

SEQ ID NO: 1816801 - RNA, 19 nt, Homo sapiens
  misc_RNA (1)...(19): siRNA sense strand
ggauuuguggugcauugga

SEQ ID NO: 1816802 - RNA, 19 nt, Homo sapiens
  misc_RNA (1)...(19): siRNA sense strand
ggagaacauaugaugaaaa

SEQ ID NO: 1816803 - RNA, 19 nt, Homo sapiens
  misc_RNA (1)...(19): siRNA sense strand
gccgggaaauugagaucca

SEQ ID NO: 1816804 - RNA, 19 nt, Homo sapiens
  misc_RNA (1)...(19): siRNA sense strand
gaaaugcccuguacucugu

SEQ ID NO: 1816805 - RNA, 19 nt, Homo sapiens
  misc_RNA (1)...(19): siRNA sense strand
gaacaggauucuuuggaaa

SEQ ID NO: 1816806 - RNA, 19 nt, Homo sapiens
  misc_RNA (1)...(19): siRNA sense strand
cugcagagcuuacaauuga

SEQ ID NO: 1816807 - RNA, 19 nt, Homo sapiens
  misc_RNA (1)...(19): siRNA sense strand
gaaccgagcugacauuuug

SEQ ID NO: 1816808 - RNA, 19 nt, Homo sapiens
  misc_RNA (1)...(19): siRNA sense strand
gaagguggauucagugcuu

SEQ ID NO: 1816809 - RNA, 19 nt, Homo sapiens
  misc_RNA (1)...(19): siRNA sense strand
gaaaggagucagcuucaaa

SEQ ID NO: 1816810 - RNA, 19 nt, Homo sapiens
  misc_RNA (1)...(19): siRNA sense strand
gauaaacuaugaggacauu

SEQ ID NO: 1816811 - RNA, 19 nt, Homo sapiens
  misc_RNA (1)...(19): siRNA sense strand
gcacgaagccaaacuggaa

SEQ ID NO: 1816812 - RNA, 19 nt, Homo sapiens
  misc_RNA (1)...(19): siRNA sense strand
gaaacaacauuuaguucag

SEQ ID NO: 1816813 - RNA, 19 nt, Homo sapiens
  misc_RNA (1)...(19): siRNA sense strand
gguugaagcagaagaauaa

SEQ ID NO: 1816814 - RNA, 19 nt, Homo sapiens
  misc_RNA (1)...(19): siRNA sense strand
ccaaggagcagcuguuuga

SEQ ID NO: 1816815 - RNA, 19 nt, Homo sapiens
  misc_RNA (1)...(19): siRNA sense strand
cgaacaggauucuuuggaa

SEQ ID NO: 1816816 - RNA, 19 nt, Homo sapiens
  misc_RNA (1)...(19): siRNA sense strand
gcaaacgcccuucuggaaa

SEQ ID NO: 1816817 - RNA, 19 nt, Homo sapiens
  misc_RNA (1)...(19): siRNA sense strand
ggaaaggagucagcuucaa

SEQ ID NO: 1816818 - RNA, 19 nt, Homo sapiens
  misc_RNA (1)...(19): siRNA sense strand
agaauaaggagaaggauaa

SEQ ID NO: 1816819 - RNA, 19 nt, Homo sapiens
  misc_RNA (1)...(19): siRNA sense strand
ucaaagacguggcaggaau

SEQ ID NO: 1816820 - RNA, 19 nt, Homo sapiens
  misc_RNA (1)...(19): siRNA sense strand
aagaugagcugaauaucga

SEQ ID NO: 1816821 - RNA, 19 nt, Homo sapiens
  misc_RNA (1)...(19): siRNA sense strand
caagcgaacaggauucuuu

SEQ ID NO: 1816822 - RNA, 19 nt, Homo sapiens
  misc_RNA (1)...(19): siRNA sense strand
gaagaugagcugaauaucg

SEQ ID NO: 1816823 - RNA, 19 nt, Homo sapiens
  misc_RNA (1)...(19): siRNA sense strand
ggugguacuuucuauuuua

SEQ ID NO: 1816824 - RNA, 19 nt, Homo sapiens
  misc_RNA (1)...(19): siRNA sense strand
ggucaucgcgguugucaug

SEQ ID NO: 1816825 - RNA, 19 nt, Homo sapiens
  misc_RNA (1)...(19): siRNA sense strand
ggaagaacagaaagugguu

SEQ ID NO: 1816826 - RNA, 19 nt, Homo sapiens
  misc_RNA (1)...(19): siRNA sense strand
ggcaaacgcccuucuggaa

SEQ ID NO: 1816827 - RNA, 19 nt, Homo sapiens
  misc_RNA (1)...(19): siRNA sense strand
gccauccugugguauguuu

SEQ ID NO: 1816828 - RNA, 19 nt, Homo sapiens
  misc_RNA (1)...(19): siRNA sense strand
gggcugacaucgccaacau

SEQ ID NO: 1816829 - RNA, 19 nt, Homo sapiens
  misc_RNA (1)...(19): siRNA sense strand
uaaacuaugaggacauuga

SEQ ID NO: 1816830 - RNA, 19 nt, Homo sapiens
  misc_RNA (1)...(19): siRNA sense strand
ugacaaguuugaagagaag

SEQ ID NO: 1816831 - RNA, 19 nt, Homo sapiens
  misc_RNA (1)...(19): siRNA sense strand
aggaagugauaaacuauga

SEQ ID NO: 1816832 - RNA, 19 nt, Homo sapiens
  misc_RNA (1)...(19): siRNA sense strand
ggaccggcacgucuucauu

SEQ ID NO: 1816833 - RNA, 19 nt, Homo sapiens
  misc_RNA (1)...(19): siRNA sense strand
caaacgcccuucuggaaaa

SEQ ID NO: 1816834 - RNA, 19 nt, Homo sapiens
  misc_RNA (1)...(19): siRNA sense strand
aggacaaccuggacaaguu

SEQ ID NO: 1816835 - RNA, 19 nt, Homo sapiens
  misc_RNA (1)...(19): siRNA sense strand
agaaggugcugcaggacaa

SEQ ID NO: 1816836 - RNA, 19 nt, Homo sapiens
  misc_RNA (1)...(19): siRNA sense strand
gugaugaaggucuccauaa

SEQ ID NO: 1816837 - RNA, 19 nt, Homo sapiens
  misc_RNA (1)...(19): siRNA sense strand
gaucccaguuuccuacaag

SEQ ID NO: 1816838 - RNA, 19 nt, Homo sapiens
  misc_RNA (1)...(19): siRNA sense strand
uaggugguacuuucuauuu

SEQ ID NO: 1816839 - RNA, 19 nt, Homo sapiens
  misc_RNA (1)...(19): siRNA sense strand
gucaugagccuccugaaug

SEQ ID NO: 1816840 - RNA, 19 nt, Homo sapiens
  misc_RNA (1)...(19): siRNA sense strand
gcagaagaauaaggagaag

SEQ ID NO: 1816841 - RNA, 19 nt, Homo sapiens
  misc_RNA (1)...(19): siRNA sense strand
caggagaggcgggagauuu

SEQ ID NO: 1816842 - RNA, 19 nt, Homo sapiens
  misc_RNA (1)...(19): siRNA sense strand
gcagagcuuacaauugaga

SEQ ID NO: 1816843 - RNA, 19 nt, Homo sapiens
  misc_RNA (1)...(19): siRNA sense strand
gccaaggccuacagacaca

SEQ ID NO: 1816844 - RNA, 19 nt, Homo sapiens
  misc_RNA (1)...(19): siRNA sense strand
agagcaagauccuguccaa

SEQ ID NO: 1816845 - RNA, 19 nt, Homo sapiens
  misc_RNA (1)...(19): siRNA sense strand
gcgaguuuguggauuaucu

SEQ ID NO: 1816846 - RNA, 19 nt, Homo sapiens
  misc_RNA (1)...(19): siRNA sense strand
ugaagcagaagaauaagga

SEQ ID NO: 1816847 - RNA, 19 nt, Homo sapiens
  misc_RNA (1)...(19): siRNA sense strand
cggcacgucuucauugauc

SEQ ID NO: 1816848 - RNA, 19 nt, Homo sapiens
  misc_RNA (1)...(19): siRNA sense strand
gugcggagccucuuuaagg

SEQ ID NO: 1816849 - RNA, 19 nt, Homo sapiens
  misc_RNA (1)...(19): siRNA sense strand
uccgcgaguuuguggauua

SEQ ID NO: 1816850 - RNA, 19 nt, Homo sapiens
  misc_RNA (1)...(19): siRNA sense strand
gaagggaucaacggauugu

SEQ ID NO: 1816851 - RNA, 19 nt, Homo sapiens
  misc_RNA (1)...(19): siRNA sense strand
gcgaggaggagaccgaaga

SEQ ID NO: 1816852 - RNA, 19 nt, Homo sapiens
  misc_RNA (1)...(19): siRNA sense strand
acagaaagugguugcguuu

SEQ ID NO: 1816853 - RNA, 19 nt, Homo sapiens
  misc_RNA (1)...(19): siRNA sense strand
caaggaagaacagaaagug

SEQ ID NO: 1816854 - RNA, 19 nt, Homo sapiens
  misc_RNA (1)...(19): siRNA sense strand
gaccggcacgucuucauug

SEQ ID NO: 1816855 - RNA, 19 nt, Homo sapiens
  misc_RNA (1)...(19): siRNA sense strand
gcgaacaggauucuuugga

SEQ ID NO: 1816856 - RNA, 19 nt, Homo sapiens
  misc_RNA (1)...(19): siRNA sense strand
caagguugaagcagaagaa

SEQ ID NO: 1816857 - RNA, 19 nt, Homo sapiens
  misc_RNA (1)...(19): siRNA sense strand
caacauuuaguucagaauc

SEQ ID NO: 1816858 - RNA, 19 nt, Homo sapiens
  misc_RNA (1)...(19): siRNA sense strand
ugaugaaggucuccauaac

SEQ ID NO: 1816859 - RNA, 19 nt, Homo sapiens
  misc_RNA (1)...(19): siRNA sense strand
aagggaagguggauucagu

SEQ ID NO: 1816860 - RNA, 19 nt, Homo sapiens
  misc_RNA (1)...(19): siRNA sense strand
aagaauaaggagaaggaua

SEQ ID NO: 1816861 - RNA, 19 nt, Homo sapiens
  misc_RNA (1)...(19): siRNA sense strand
caaagacguggcaggaaug

SEQ ID NO: 1816862 - RNA, 19 nt, Homo sapiens
  misc_RNA (1)...(19): siRNA sense strand
ggaucccaguuuccuacaa

SEQ ID NO: 1816863 - RNA, 19 nt, Homo sapiens
  misc_RNA (1)...(19): siRNA sense strand
gagcugacaccaggauuca

SEQ ID NO: 1816864 - RNA, 19 nt, Homo sapiens
  misc_RNA (1)...(19): siRNA sense strand
cugaagaugagcugaauau

SEQ ID NO: 1816865 - RNA, 19 nt, Homo sapiens
  misc_RNA (1)...(19): siRNA sense strand
gggaaaggagucagcuuca

SEQ ID NO: 1816866 - RNA, 19 nt, Homo sapiens
  misc_RNA (1)...(19): siRNA sense strand
acaggauucuuuggaaaug

SEQ ID NO: 1816867 - RNA, 19 nt, Homo sapiens
  misc_RNA (1)...(19): siRNA sense strand
agaagaauaaggagaagga

SEQ ID NO: 1816868 - RNA, 19 nt, Homo sapiens
  misc_RNA (1)...(19): siRNA sense strand
gcgacgugguggaagucua

SEQ ID NO: 1816869 - RNA, 19 nt, Homo sapiens
  misc_RNA (1)...(19): siRNA sense strand
guccaaggaagaacagaaa

SEQ ID NO: 1816870 - RNA, 19 nt, Homo sapiens
  misc_RNA (1)...(19): siRNA sense strand
ucgccaacaucugcaauga

SEQ ID NO: 1816871 - RNA, 19 nt, Homo sapiens
  misc_RNA (1)...(19): siRNA sense strand
ucgagcagcugaagaugag

SEQ ID NO: 1816872 - RNA, 19 nt, Homo sapiens
  misc_RNA (1)...(19): siRNA sense strand
uugacaaguuugaagagaa

SEQ ID NO: 1816873 - RNA, 19 nt, Homo sapiens
  misc_RNA (1)...(19): siRNA sense strand
ccacagaccaugucaucgu

SEQ ID NO: 1816874 - RNA, 19 nt, Homo sapiens
  misc_RNA (1)...(19): siRNA sense strand
gguagaaauggauggaaug

SEQ ID NO: 1816875 - RNA, 19 nt, Homo sapiens
  misc_RNA (1)...(19): siRNA sense strand
ucaugagccuccugaaugc

SEQ ID NO: 1816876 - RNA, 19 nt, Homo sapiens
  misc_RNA (1)...(19): siRNA sense strand
guuuguggauuaucugaag

SEQ ID NO: 1816877 - RNA, 19 nt, Homo sapiens
  misc_RNA (1)...(19): siRNA sense strand
acacuuccgugcacacucu

SEQ ID NO: 1816878 - RNA, 19 nt, Homo sapiens
  misc_RNA (1)...(19): siRNA sense strand
cgugcacacucucaacuuc

SEQ ID NO: 1816879 - RNA, 19 nt, Homo sapiens
  misc_RNA (1)...(19): siRNA sense strand
gcugaagaugagcugaaua

SEQ ID NO: 1816880 - RNA, 19 nt, Homo sapiens
  misc_RNA (1)...(19): siRNA sense strand
ccaaggaagaacagaaagu

SEQ ID NO: 1816881 - RNA, 19 nt, Homo sapiens
  misc_RNA (1)...(19): siRNA sense strand
gcagagcugacaccaggau

SEQ ID NO: 1816882 - RNA, 19 nt, Homo sapiens
  misc_RNA (1)...(19): siRNA sense strand
ugguagaaauggauggaau

SEQ ID NO: 1816883 - RNA, 19 nt, Homo sapiens
  misc_RNA (1)...(19): siRNA sense strand
gccuggccauccuguggua

SEQ ID NO: 1816884 - RNA, 19 nt, Homo sapiens
  misc_RNA (1)...(19): siRNA sense strand
aaggacaggaucccaguuu

SEQ ID NO: 1816885 - RNA, 19 nt, Homo sapiens
  misc_RNA (1)...(19): siRNA sense strand
gaaaaggaagugauaaacu

SEQ ID NO: 1816886 - RNA, 19 nt, Homo sapiens
  misc_RNA (1)...(19): siRNA sense strand
ggaagggaagguggauuca

SEQ ID NO: 1816887 - RNA, 19 nt, Homo sapiens
  misc_RNA (1)...(19): siRNA sense strand
ggaaguccgcgaguuugug

SEQ ID NO: 1816888 - RNA, 19 nt, Homo sapiens
  misc_RNA (1)...(19): siRNA sense strand
gacccaguccagcaccuuu

SEQ ID NO: 1816889 - RNA, 19 nt, Homo sapiens
  misc_RNA (1)...(19): siRNA sense strand
gugguugcguuucaugagu

SEQ ID NO: 1816890 - RNA, 19 nt, Homo sapiens
  misc_RNA (1)...(19): siRNA sense strand
gagcgggacgaccagaugu

SEQ ID NO: 1816891 - RNA, 19 nt, Homo sapiens
  misc_RNA (1)...(19): siRNA sense strand
gaggcgaagagccgacuug

SEQ ID NO: 1816892 - RNA, 19 nt, Homo sapiens
  misc_RNA (1)...(19): siRNA sense strand
gcggagccucuuuaaggaa

SEQ ID NO: 1816893 - RNA, 19 nt, Homo sapiens
  misc_RNA (1)...(19): siRNA sense strand
uuacaauugagacugcuaa

SEQ ID NO: 1816894 - RNA, 19 nt, Homo sapiens
  misc_RNA (1)...(19): siRNA sense strand
cauuguggaugggaagaug

SEQ ID NO: 1816895 - RNA, 19 nt, Homo sapiens
  misc_RNA (1)...(19): siRNA sense strand
ggccucggcuagccuugau

SEQ ID NO: 1816896 - RNA, 19 nt, Homo sapiens
  misc_RNA (1)...(19): siRNA sense strand
gcuaaccccuaccuuugaa

SEQ ID NO: 1816897 - RNA, 19 nt, Homo sapiens
  misc_RNA (1)...(19): siRNA sense strand
gaagaauaaggagaaggau

SEQ ID NO: 1816898 - RNA, 19 nt, Homo sapiens
  misc_RNA (1)...(19): siRNA sense strand
caccaaggagcagcuguuu

SEQ ID NO: 1816899 - RNA, 19 nt, Homo sapiens
  misc_RNA (1)...(19): siRNA sense strand
gaauaaggagaaggauaag

SEQ ID NO: 1816900 - RNA, 19 nt, Homo sapiens
  misc_RNA (1)...(19): siRNA sense strand
cgugaugaaggucuccaua

SEQ ID NO: 1816901 - RNA, 19 nt, Homo sapiens
  misc_RNA (1)...(19): siRNA sense strand
gcugacaucgccaacaucu

SEQ ID NO: 1816902 - RNA, 19 nt, Homo sapiens
  misc_RNA (1)...(19): siRNA sense strand
ugcggagccucuuuaagga

SEQ ID NO: 1816903 - RNA, 19 nt, Homo sapiens
  misc_RNA (1)...(19): siRNA sense strand
cgugugcggagccucuuua

SEQ ID NO: 1816904 - RNA, 19 nt, Homo sapiens
  misc_RNA (1)...(19): siRNA sense strand
guacagcgcugcuaaauuu

SEQ ID NO: 1816905 - RNA, 19 nt, Homo sapiens
  misc_RNA (1)...(19): siRNA sense strand
aaacucagcugaagugguu

SEQ ID NO: 1816906 - RNA, 19 nt, Homo sapiens
  misc_RNA (1)...(19): siRNA sense strand
caacagauacuauaacaga

SEQ ID NO: 1816907 - RNA, 19 nt, Homo sapiens
  misc_RNA (1)...(19): siRNA sense strand
gaagccugcuggaauguga

SEQ ID NO: 1816908 - RNA, 19 nt, Homo sapiens
  misc_RNA (1)...(19): siRNA sense strand
gaaaagcauucgucaaaga

SEQ ID NO: 1816909 - RNA, 19 nt, Homo sapiens
  misc_RNA (1)...(19): siRNA sense strand
gagacagccugauggagaa

SEQ ID NO: 1816910 - RNA, 19 nt, Homo sapiens
  misc_RNA (1)...(19): siRNA sense strand
ugacacagaugggauguau

SEQ ID NO: 1816911 - RNA, 19 nt, Homo sapiens
  misc_RNA (1)...(19): siRNA sense strand
uaacauggccagccucuuc

SEQ ID NO: 1816912 - RNA, 19 nt, Homo sapiens
  misc_RNA (1)...(19): siRNA sense strand
aaacgcacaucccaugaga

SEQ ID NO: 1816913 - RNA, 19 nt, Homo sapiens
  misc_RNA (1)...(19): siRNA sense strand
acacagaugggauguauga

SEQ ID NO: 1816914 - RNA, 19 nt, Homo sapiens
  misc_RNA (1)...(19): siRNA sense strand
guaaauccuucuuguacag

SEQ ID NO: 1816915 - RNA, 19 nt, Homo sapiens
  misc_RNA (1)...(19): siRNA sense strand
gaagacacagucagcacaa

SEQ ID NO: 1816916 - RNA, 19 nt, Homo sapiens
  misc_RNA (1)...(19): siRNA sense strand
aaagagagcuuaaaaugca

SEQ ID NO: 1816917 - RNA, 19 nt, Homo sapiens
  misc_RNA (1)...(19): siRNA sense strand
gggaaaagcauucgucaaa

SEQ ID NO: 1816918 - RNA, 19 nt, Homo sapiens
  misc_RNA (1)...(19): siRNA sense strand
ccaaugagccgcagaagcu

SEQ ID NO: 1816919 - RNA, 19 nt, Homo sapiens
  misc_RNA (1)...(19): siRNA sense strand
cccaaucacuucuccaaca

SEQ ID NO: 1816920 - RNA, 19 nt, Homo sapiens
  misc_RNA (1)...(19): siRNA sense strand
cagauacuauaacagacuu

SEQ ID NO: 1816921 - RNA, 19 nt, Homo sapiens
  misc_RNA (1)...(19): siRNA sense strand
gcaccaaugagccgcagaa

SEQ ID NO: 1816922 - RNA, 19 nt, Homo sapiens
  misc_RNA (1)...(19): siRNA sense strand
gcuggaaugugaugaagac

SEQ ID NO: 1816923 - RNA, 19 nt, Homo sapiens
  misc_RNA (1)...(19): siRNA sense strand
uugcugaggugcaggaaga

SEQ ID NO: 1816924 - RNA, 19 nt, Homo sapiens
  misc_RNA (1)...(19): siRNA sense strand
uguaugacaucuguaaauc

SEQ ID NO: 1816925 - RNA, 19 nt, Homo sapiens
  misc_RNA (1)...(19): siRNA sense strand
uccaacagauacuauaaca

SEQ ID NO: 1816926 - RNA, 19 nt, Homo sapiens
  misc_RNA (1)...(19): siRNA sense strand
ucaaagagagcuuaaaaug

SEQ ID NO: 1816927 - RNA, 19 nt, Homo sapiens
  misc_RNA (1)...(19): siRNA sense strand
cugcuaaauuugacacuca

SEQ ID NO: 1816928 - RNA, 19 nt, Homo sapiens
  misc_RNA (1)...(19): siRNA sense strand
caacaggagacgcaccaau

SEQ ID NO: 1816929 - RNA, 19 nt, Homo sapiens
  misc_RNA (1)...(19): siRNA sense strand
ccaaucacuucuccaacag

SEQ ID NO: 1816930 - RNA, 19 nt, Homo sapiens
  misc_RNA (1)...(19): siRNA sense strand
acaggagacgcaccaauga

SEQ ID NO: 1816931 - RNA, 19 nt, Homo sapiens
  misc_RNA (1)...(19): siRNA sense strand
gaaaauugggccuaacaug

SEQ ID NO: 1816932 - RNA, 19 nt, Homo sapiens
  misc_RNA (1)...(19): siRNA sense strand
gacacagucagcacaauca

SEQ ID NO: 1816933 - RNA, 19 nt, Homo sapiens
  misc_RNA (1)...(19): siRNA sense strand
gcucaaaacucagcugaag

SEQ ID NO: 1816934 - RNA, 19 nt, Homo sapiens
  misc_RNA (1)...(19): siRNA sense strand
agaccacugugcccaaaca

SEQ ID NO: 1816935 - RNA, 19 nt, Homo sapiens
  misc_RNA (1)...(19): siRNA sense strand
ggaaaagcauucgucaaag

SEQ ID NO: 1816936 - RNA, 19 nt, Homo sapiens
  misc_RNA (1)...(19): siRNA sense strand
guccgaagccugcuggaau

SEQ ID NO: 1816937 - RNA, 19 nt, Homo sapiens
  misc_RNA (1)...(19): siRNA sense strand
gacucucccucccacauca

SEQ ID NO: 1816938 - RNA, 19 nt, Homo sapiens
  misc_RNA (1)...(19): siRNA sense strand
ccucaacagugcucuacag

SEQ ID NO: 1816939 - RNA, 19 nt, Homo sapiens
  misc_RNA (1)...(19): siRNA sense strand
ucaaacgcacaucccauga

SEQ ID NO: 1816940 - RNA, 19 nt, Homo sapiens
  misc_RNA (1)...(19): siRNA sense strand
uccgaagccugcuggaaug

SEQ ID NO: 1816941 - RNA, 19 nt, Homo sapiens
  misc_RNA (1)...(19): siRNA sense strand
aaucacuucuccaacagau

SEQ ID NO: 1816942 - RNA, 19 nt, Homo sapiens
  misc_RNA (1)...(19): siRNA sense strand
gaggugcuccacuuuccaa

SEQ ID NO: 1816943 - RNA, 19 nt, Homo sapiens
  misc_RNA (1)...(19): siRNA sense strand
uaugacaucuguaaauccu

SEQ ID NO: 1816944 - RNA, 19 nt, Homo sapiens
  misc_RNA (1)...(19): siRNA sense strand
caaggucuuccucgccauu

SEQ ID NO: 1816945 - RNA, 19 nt, Homo sapiens
  misc_RNA (1)...(19): siRNA sense strand
ggacucucccucccacauc

SEQ ID NO: 1816946 - RNA, 19 nt, Homo sapiens
  misc_RNA (1)...(19): siRNA sense strand
cccacgagcugacuucaac

SEQ ID NO: 1816947 - RNA, 19 nt, Homo sapiens
  misc_RNA (1)...(19): siRNA sense strand
ucuguaaauccuucuugua

SEQ ID NO: 1816948 - RNA, 19 nt, Homo sapiens
  misc_RNA (1)...(19): siRNA sense strand
ucacuucuccaacagauac

SEQ ID NO: 1816949 - RNA, 19 nt, Homo sapiens
  misc_RNA (1)...(19): siRNA sense strand
ucuccaacagauacuauaa

SEQ ID NO: 1816950 - RNA, 19 nt, Homo sapiens
  misc_RNA (1)...(19): siRNA sense strand
ucguccagcugcccaauca

SEQ ID NO: 1816951 - RNA, 19 nt, Homo sapiens
  misc_RNA (1)...(19): siRNA sense strand
cccaugaggcggagcagaa

SEQ ID NO: 1816952 - RNA, 19 nt, Homo sapiens
  misc_RNA (1)...(19): siRNA sense strand
aacaggagacgcaccaaug

SEQ ID NO: 1816953 - RNA, 19 nt, Homo sapiens
  misc_RNA (1)...(19): siRNA sense strand
auacauaccucacccauga

SEQ ID NO: 1816954 - RNA, 19 nt, Homo sapiens
  misc_RNA (1)...(19): siRNA sense strand
gaaggaaacacaaagagaa

SEQ ID NO: 1816955 - RNA, 19 nt, Homo sapiens
  misc_RNA (1)...(19): siRNA sense strand
gugaaagacuauuaucaga

SEQ ID NO: 1816956 - RNA, 19 nt, Homo sapiens
  misc_RNA (1)...(19): siRNA sense strand
acaaagagaaugugaaaga

SEQ ID NO: 1816957 - RNA, 19 nt, Homo sapiens
  misc_RNA (1)...(19): siRNA sense strand
ggaaggaaacacaaagaga

SEQ ID NO: 1816958 - RNA, 19 nt, Homo sapiens
  misc_RNA (1)...(19): siRNA sense strand
ggaaagauaccuccuacuc

SEQ ID NO: 1816959 - RNA, 19 nt, Homo sapiens
  misc_RNA (1)...(19): siRNA sense strand
aagagaaugugaaagacua

SEQ ID NO: 1816960 - RNA, 19 nt, Homo sapiens
  misc_RNA (1)...(19): siRNA sense strand
ggaaacacaaagagaaugu

SEQ ID NO: 1816961 - RNA, 19 nt, Homo sapiens
  misc_RNA (1)...(19): siRNA sense strand
aaacaacggcugcauuuca

SEQ ID NO: 1816962 - RNA, 19 nt, Homo sapiens
  misc_RNA (1)...(19): siRNA sense strand
caaaacaacggcugcauuu

SEQ ID NO: 1816963 - RNA, 19 nt, Homo sapiens
  misc_RNA (1)...(19): siRNA sense strand
ggaaugacucgaccagaca

SEQ ID NO: 1816964 - RNA, 19 nt, Homo sapiens
  misc_RNA (1)...(19): siRNA sense strand
caaagagaaugugaaagac

SEQ ID NO: 1816965 - RNA, 19 nt, Homo sapiens
  misc_RNA (1)...(19): siRNA sense strand
uauugugacuacugcgaua

SEQ ID NO: 1816966 - RNA, 19 nt, Homo sapiens
  misc_RNA (1)...(19): siRNA sense strand
ugacucgaccagacagaua

SEQ ID NO: 1816967 - RNA, 19 nt, Homo sapiens
  misc_RNA (1)...(19): siRNA sense strand
aacaacggcugcauuucaa

SEQ ID NO: 1816968 - RNA, 19 nt, Homo sapiens
  misc_RNA (1)...(19): siRNA sense strand
gggaccugcuccuggaaug

SEQ ID NO: 1816969 - RNA, 19 nt, Homo sapiens
  misc_RNA (1)...(19): siRNA sense strand
gaggccauaugccaaugau

SEQ ID NO: 1816970 - RNA, 19 nt, Homo sapiens
  misc_RNA (1)...(19): siRNA sense strand
gcaguggaaggaaacacaa

SEQ ID NO: 1816971 - RNA, 19 nt, Homo sapiens
  misc_RNA (1)...(19): siRNA sense strand
gacucgaccagacagauaa

SEQ ID NO: 1816972 - RNA, 19 nt, Homo sapiens
  misc_RNA (1)...(19): siRNA sense strand
gauaccuccuacuccauuc

SEQ ID NO: 1816973 - RNA, 19 nt, Homo sapiens
  misc_RNA (1)...(19): siRNA sense strand
caacggcugcauuucaaca

SEQ ID NO: 1816974 - RNA, 19 nt, Homo sapiens
  misc_RNA (1)...(19): siRNA sense strand
ggaggccauaugccaauga

SEQ ID NO: 1816975 - RNA, 19 nt, Homo sapiens
  misc_RNA (1)...(19): siRNA sense strand
ggaccugcuccuggaauga

SEQ ID NO: 1816976 - RNA, 19 nt, Homo sapiens
  misc_RNA (1)...(19): siRNA sense strand
gugacuacugcgauacaua

SEQ ID NO: 1816977 - RNA, 19 nt, Homo sapiens
  misc_RNA (1)...(19): siRNA sense strand
gagaaugugaaagacuauu

SEQ ID NO: 1816978 - RNA, 19 nt, Homo sapiens
  misc_RNA (1)...(19): siRNA sense strand
guggaaggaaacacaaaga

SEQ ID NO: 1816979 - RNA, 19 nt, Homo sapiens
  misc_RNA (1)...(19): siRNA sense strand
ugacuacugcgauacauac

SEQ ID NO: 1816980 - RNA, 19 nt, Homo sapiens
  misc_RNA (1)...(19): siRNA sense strand
gggaggccauaugccaaug

SEQ ID NO: 1816981 - RNA, 19 nt, Homo sapiens
  misc_RNA (1)...(19): siRNA sense strand
agacuauuaucagaaaugg

SEQ ID NO: 1816982 - RNA, 19 nt, Homo sapiens
  misc_RNA (1)...(19): siRNA sense strand
ccuccucgcccugguauga

SEQ ID NO: 1816983 - RNA, 19 nt, Homo sapiens
  misc_RNA (1)...(19): siRNA sense strand
guacaagggcuaucuggua

SEQ ID NO: 1816984 - RNA, 19 nt, Homo sapiens
  misc_RNA (1)...(19): siRNA sense strand
auacauagauggagcuuug

SEQ ID NO: 1816985 - RNA, 19 nt, Homo sapiens
  misc_RNA (1)...(19): siRNA sense strand
gaaagccagugauggugaa

SEQ ID NO: 1816986 - RNA, 19 nt, Homo sapiens
  misc_RNA (1)...(19): siRNA sense strand
uaucagagguguggaagaa

SEQ ID NO: 1816987 - RNA, 19 nt, Homo sapiens
  misc_RNA (1)...(19): siRNA sense strand
ggaagaagaggaagaagau

SEQ ID NO: 1816988 - RNA, 19 nt, Homo sapiens
  misc_RNA (1)...(19): siRNA sense strand
ccagugauggugaaacuua

SEQ ID NO: 1816989 - RNA, 19 nt, Homo sapiens
  misc_RNA (1)...(19): siRNA sense strand
ucaauggacuaacaggaaa

SEQ ID NO: 1816990 - RNA, 19 nt, Homo sapiens
  misc_RNA (1)...(19): siRNA sense strand
gguguaauaauguccuuua

SEQ ID NO: 1816991 - RNA, 19 nt, Homo sapiens
  misc_RNA (1)...(19): siRNA sense strand
ggaagaagauggggaaaug

SEQ ID NO: 1816992 - RNA, 19 nt, Homo sapiens
  misc_RNA (1)...(19): siRNA sense strand
ggacaucugggugaaguuu

SEQ ID NO: 1816993 - RNA, 19 nt, Homo sapiens
  misc_RNA (1)...(19): siRNA sense strand
ucagagguguggaagaaga

SEQ ID NO: 1816994 - RNA, 19 nt, Homo sapiens
  misc_RNA (1)...(19): siRNA sense strand
ucccaaaccuuuccucaau

SEQ ID NO: 1816995 - RNA, 19 nt, Homo sapiens
  misc_RNA (1)...(19): siRNA sense strand
uacaagggcuaucugguau

SEQ ID NO: 1816996 - RNA, 19 nt, Homo sapiens
  misc_RNA (1)...(19): siRNA sense strand
ccaaaccuuuccucaaugg

SEQ ID NO: 1816997 - RNA, 19 nt, Homo sapiens
  misc_RNA (1)...(19): siRNA sense strand
acagaagaauacauagaug

SEQ ID NO: 1816998 - RNA, 19 nt, Homo sapiens
  misc_RNA (1)...(19): siRNA sense strand
cagugauggugaaacuuaa

SEQ ID NO: 1816999 - RNA, 19 nt, Homo sapiens
  misc_RNA (1)...(19): siRNA sense strand
gcaaauacagaagaauaca

SEQ ID NO: 1817000 - RNA, 19 nt, Homo sapiens
  misc_RNA (1)...(19): siRNA sense strand
gcuugcaaauacagaagaa

SEQ ID NO: 1817001 - RNA, 19 nt, Homo sapiens
  misc_RNA (1)...(19): siRNA sense strand
caagggcuaucugguaucu

SEQ ID NO: 1817002 - RNA, 19 nt, Homo sapiens
  misc_RNA (1)...(19): siRNA sense strand
gaagaagaggaagaagaug

SEQ ID NO: 1817003 - RNA, 19 nt, Homo sapiens
  misc_RNA (1)...(19): siRNA sense strand
caggaaagccagugauggu

SEQ ID NO: 1817004 - RNA, 19 nt, Homo sapiens
  misc_RNA (1)...(19): siRNA sense strand
cccaaaccuuuccucaaug

SEQ ID NO: 1817005 - RNA, 19 nt, Homo sapiens
  misc_RNA (1)...(19): siRNA sense strand
agaagaauacauagaugga

SEQ ID NO: 1817006 - RNA, 19 nt, Homo sapiens
  misc_RNA (1)...(19): siRNA sense strand
gcagcuugcaaauacagaa

SEQ ID NO: 1817007 - RNA, 19 nt, Homo sapiens
  misc_RNA (1)...(19): siRNA sense strand
gcuaucugguaucuguaga

SEQ ID NO: 1817008 - RNA, 19 nt, Homo sapiens
  misc_RNA (1)...(19): siRNA sense strand
agggcuaucugguaucugu

SEQ ID NO: 1817009 - RNA, 19 nt, Homo sapiens
  misc_RNA (1)...(19): siRNA sense strand
uggaagaagaggaagaaga

SEQ ID NO: 1817010 - RNA, 19 nt, Homo sapiens
  misc_RNA (1)...(19): siRNA sense strand
uaacaggaaagccagugau

SEQ ID NO: 1817011 - RNA, 19 nt, Homo sapiens
  misc_RNA (1)...(19): siRNA sense strand
acaucugggugaaguuuua

SEQ ID NO: 1817012 - RNA, 19 nt, Homo sapiens
  misc_RNA (1)...(19): siRNA sense strand
ucagagcucuuccucauga

SEQ ID NO: 1817013 - RNA, 19 nt, Homo sapiens
  misc_RNA (1)...(19): siRNA sense strand
ccagcagccugaagaagaa

SEQ ID NO: 1817014 - RNA, 19 nt, Homo sapiens
  misc_RNA (1)...(19): siRNA sense strand
gcaaguuugugaccuccaa

SEQ ID NO: 1817015 - RNA, 19 nt, Homo sapiens
  misc_RNA (1)...(19): siRNA sense strand
gcaagaaugccagcugcua

SEQ ID NO: 1817016 - RNA, 19 nt, Homo sapiens
  misc_RNA (1)...(19): siRNA sense strand
caaagacuccacaggcaaa

SEQ ID NO: 1817017 - RNA, 19 nt, Homo sapiens
  misc_RNA (1)...(19): siRNA sense strand
gaaugccagcugcuacuuu

SEQ ID NO: 1817018 - RNA, 19 nt, Homo sapiens
  misc_RNA (1)...(19): siRNA sense strand
gccaaccgcuccagcuaug

SEQ ID NO: 1817019 - RNA, 19 nt, Homo sapiens
  misc_RNA (1)...(19): siRNA sense strand
gggcaaggacgagcucuuu

SEQ ID NO: 1817020 - RNA, 19 nt, Homo sapiens
  misc_RNA (1)...(19): siRNA sense strand
cgacugccguuuccucauc

SEQ ID NO: 1817021 - RNA, 19 nt, Homo sapiens
  misc_RNA (1)...(19): siRNA sense strand
ggacuucuucuucgaguuc

SEQ ID NO: 1817022 - RNA, 19 nt, Homo sapiens
  misc_RNA (1)...(19): siRNA sense strand
gucaacaucuacaguguca

SEQ ID NO: 1817023 - RNA, 19 nt, Homo sapiens
  misc_RNA (1)...(19): siRNA sense strand
ggaccugucugccaaucag

SEQ ID NO: 1817024 - RNA, 19 nt, Homo sapiens
  misc_RNA (1)...(19): siRNA sense strand
gccagcagccugaagaaga

SEQ ID NO: 1817025 - RNA, 19 nt, Homo sapiens
  misc_RNA (1)...(19): siRNA sense strand
acucagagcucuuccucau

SEQ ID NO: 1817026 - RNA, 19 nt, Homo sapiens
  misc_RNA (1)...(19): siRNA sense strand
gaucgaccgcgacaccaaa

SEQ ID NO: 1817027 - RNA, 19 nt, Homo sapiens
  misc_RNA (1)...(19): siRNA sense strand
auaacaagguggccaucaa

SEQ ID NO: 1817028 - RNA, 19 nt, Homo sapiens
  misc_RNA (1)...(19): siRNA sense strand
uuugugaccuccaagaaga

SEQ ID NO: 1817029 - RNA, 19 nt, Homo sapiens
  misc_RNA (1)...(19): siRNA sense strand
aaugccagcugcuacuuug

SEQ ID NO: 1817030 - RNA, 19 nt, Homo sapiens
  misc_RNA (1)...(19): siRNA sense strand
ggcguccaauggcaaguuu

SEQ ID NO: 1817031 - RNA, 19 nt, Homo sapiens
  misc_RNA (1)...(19): siRNA sense strand
cgacacuccuguggacuuc

SEQ ID NO: 1817032 - RNA, 19 nt, Homo sapiens
  misc_RNA (1)...(19): siRNA sense strand
gcgccuacaacaucaaaga

SEQ ID NO: 1817033 - RNA, 19 nt, Homo sapiens
  misc_RNA (1)...(19): siRNA sense strand
caacugcggcaacaaguac

SEQ ID NO: 1817034 - RNA, 19 nt, Homo sapiens
  misc_RNA (1)...(19): siRNA sense strand
ugaagaagaagcagaucug

SEQ ID NO: 1817035 - RNA, 19 nt, Homo sapiens
  misc_RNA (1)...(19): siRNA sense strand
acacugagggcguccaaug

SEQ ID NO: 1817036 - RNA, 19 nt, Homo sapiens
  misc_RNA (1)...(19): siRNA sense strand
ucaacugcggcaacaagua

SEQ ID NO: 1817037 - RNA, 19 nt, Homo sapiens
  misc_RNA (1)...(19): siRNA sense strand
ucuacagugucacccguaa

SEQ ID NO: 1817038 - RNA, 19 nt, Homo sapiens
  misc_RNA (1)...(19): siRNA sense strand
guacccacacgggcaagua

SEQ ID NO: 1817039 - RNA, 19 nt, Homo sapiens
  misc_RNA (1)...(19): siRNA sense strand
uaacaagguggccaucaag

SEQ ID NO: 1817040 - RNA, 19 nt, Homo sapiens
  misc_RNA (1)...(19): siRNA sense strand
acccucaggucaacaucua

SEQ ID NO: 1817041 - RNA, 19 nt, Homo sapiens
  misc_RNA (1)...(19): siRNA sense strand
ggcgucgacucgcucauca

SEQ ID NO: 1817042 - RNA, 19 nt, Homo sapiens
  misc_RNA (1)...(19): siRNA sense strand
gaaguggagcgugcacauc

SEQ ID NO: 1817043 - RNA, 19 nt, Homo sapiens
  misc_RNA (1)...(19): siRNA sense strand
guucugcgacuauaacaag

SEQ ID NO: 1817044 - RNA, 19 nt, Homo sapiens
  misc_RNA (1)...(19): siRNA sense strand
acacuccuguggacuucuu

SEQ ID NO: 1817045 - RNA, 19 nt, Homo sapiens
  misc_RNA (1)...(19): siRNA sense strand
cugaaggccucggcggaaa

SEQ ID NO: 1817046 - RNA, 19 nt, Homo sapiens
  misc_RNA (1)...(19): siRNA sense strand
gcugcuacuuugacaucga

SEQ ID NO: 1817047 - RNA, 19 nt, Homo sapiens
  misc_RNA (1)...(19): siRNA sense strand
caucaacugcggcaacaag

SEQ ID NO: 1817048 - RNA, 19 nt, Homo sapiens
  misc_RNA (1)...(19): siRNA sense strand
gcgacacuccuguggacuu

SEQ ID NO: 1817049 - RNA, 19 nt, Homo sapiens
  misc_RNA (1)...(19): siRNA sense strand
cuccagcuaugacgucuuc

SEQ ID NO: 1817050 - RNA, 19 nt, Homo sapiens
  misc_RNA (1)...(19): siRNA sense strand
uccaauggcaaguuuguga

SEQ ID NO: 1817051 - RNA, 19 nt, Homo sapiens
  misc_RNA (1)...(19): siRNA sense strand
gccagcugcuacuuugaca

SEQ ID NO: 1817052 - RNA, 19 nt, Homo sapiens
  misc_RNA (1)...(19): siRNA sense strand
cagcugcuacuuugacauc

SEQ ID NO: 1817053 - RNA, 19 nt, Homo sapiens
  misc_RNA (1)...(19): siRNA sense strand
gaaauccgguaaccaauaa

SEQ ID NO: 1817054 - RNA, 19 nt, Homo sapiens
  misc_RNA (1)...(19): siRNA sense strand
gaacucauucucaccaaua

SEQ ID NO: 1817055 - RNA, 19 nt, Homo sapiens
  misc_RNA (1)...(19): siRNA sense strand
uaagaagcauuacagauug

SEQ ID NO: 1817056 - RNA, 19 nt, Homo sapiens
  misc_RNA (1)...(19): siRNA sense strand
aaaucuaggugcuacguua

SEQ ID NO: 1817057 - RNA, 19 nt, Homo sapiens
  misc_RNA (1)...(19): siRNA sense strand
caacagaauaugccguaua

SEQ ID NO: 1817058 - RNA, 19 nt, Homo sapiens
  misc_RNA (1)...(19): siRNA sense strand
uaagaaauccgguaaccaa

SEQ ID NO: 1817059 - RNA, 19 nt, Homo sapiens
  misc_RNA (1)...(19): siRNA sense strand
ucagaucccuggcagagaa

SEQ ID NO: 1817060 - RNA, 19 nt, Homo sapiens
  misc_RNA (1)...(19): siRNA sense strand
cuaaguauccuaagaaauc

SEQ ID NO: 1817061 - RNA, 19 nt, Homo sapiens
  misc_RNA (1)...(19): siRNA sense strand
gaacaacaacagaauaugc

SEQ ID NO: 1817062 - RNA, 19 nt, Homo sapiens
  misc_RNA (1)...(19): siRNA sense strand
gcacagcuugcaaaggaua

SEQ ID NO: 1817063 - RNA, 19 nt, Homo sapiens
  misc_RNA (1)...(19): siRNA sense strand
ucaaaucgcugacuuaccu

SEQ ID NO: 1817064 - RNA, 19 nt, Homo sapiens
  misc_RNA (1)...(19): siRNA sense strand
caauaauagucucguggaa

SEQ ID NO: 1817065 - RNA, 19 nt, Homo sapiens
  misc_RNA (1)...(19): siRNA sense strand
agaaauccgguaaccaaua

SEQ ID NO: 1817066 - RNA, 19 nt, Homo sapiens
  misc_RNA (1)...(19): siRNA sense strand
ucaagaaugccauagcaaa

SEQ ID NO: 1817067 - RNA, 19 nt, Homo sapiens
  misc_RNA (1)...(19): siRNA sense strand
ugagaagacugaaaacauu

SEQ ID NO: 1817068 - RNA, 19 nt, Homo sapiens
  misc_RNA (1)...(19): siRNA sense strand
caagaaugccauagcaaau

SEQ ID NO: 1817069 - RNA, 19 nt, Homo sapiens
  misc_RNA (1)...(19): siRNA sense strand
uuaccuaaguauccuaaga

SEQ ID NO: 1817070 - RNA, 19 nt, Homo sapiens
  misc_RNA (1)...(19): siRNA sense strand
uagaagcaaucaagaaugc

SEQ ID NO: 1817071 - RNA, 19 nt, Homo sapiens
  misc_RNA (1)...(19): siRNA sense strand
aacagaauaugccguauag

SEQ ID NO: 1817072 - RNA, 19 nt, Homo sapiens
  misc_RNA (1)...(19): siRNA sense strand
acaaugagaucaggaaacu

SEQ ID NO: 1817073 - RNA, 19 nt, Homo sapiens
  misc_RNA (1)...(19): siRNA sense strand
aaagagaggugggccaucu

SEQ ID NO: 1817074 - RNA, 19 nt, Homo sapiens
  misc_RNA (1)...(19): siRNA sense strand
caagucagaguacuggauu

SEQ ID NO: 1817075 - RNA, 19 nt, Homo sapiens
  misc_RNA (1)...(19): siRNA sense strand
gugaacaacaacagaauau

SEQ ID NO: 1817076 - RNA, 19 nt, Homo sapiens
  misc_RNA (1)...(19): siRNA sense strand
ccaguuugaugcuauugau

SEQ ID NO: 1817077 - RNA, 19 nt, Homo sapiens
  misc_RNA (1)...(19): siRNA sense strand
uccagaaagugaaacuaaa

SEQ ID NO: 1817078 - RNA, 19 nt, Homo sapiens
  misc_RNA (1)...(19): siRNA sense strand
aaucaagaaugccauagca

SEQ ID NO: 1817079 - RNA, 19 nt, Homo sapiens
  misc_RNA (1)...(19): siRNA sense strand
cagaauaugccguauaggu

SEQ ID NO: 1817080 - RNA, 19 nt, Homo sapiens
  misc_RNA (1)...(19): siRNA sense strand
guagaagcaaucaagaaug

SEQ ID NO: 1817081 - RNA, 19 nt, Homo sapiens
  misc_RNA (1)...(19): siRNA sense strand
gugcugguuugccaacuga

SEQ ID NO: 1817082 - RNA, 19 nt, Homo sapiens
  misc_RNA (1)...(19): siRNA sense strand
caauaagaagcauuacaga

SEQ ID NO: 1817083 - RNA, 19 nt, Homo sapiens
  misc_RNA (1)...(19): siRNA sense strand
ggauguagaagcaaucaag

SEQ ID NO: 1817084 - RNA, 19 nt, Homo sapiens
  misc_RNA (1)...(19): siRNA sense strand
ccaauaagaagcauuacag

SEQ ID NO: 1817085 - RNA, 19 nt, Homo sapiens
  misc_RNA (1)...(19): siRNA sense strand
gugaagaagagauggaaga

SEQ ID NO: 1817086 - RNA, 19 nt, Homo sapiens
  misc_RNA (1)...(19): siRNA sense strand
gauauugccaggagaagca

SEQ ID NO: 1817087 - RNA, 19 nt, Homo sapiens
  misc_RNA (1)...(19): siRNA sense strand
guauaaaauucccgucauu

SEQ ID NO: 1817088 - RNA, 19 nt, Homo sapiens
  misc_RNA (1)...(19): siRNA sense strand
ccucuggcaucucucaaau

SEQ ID NO: 1817089 - RNA, 19 nt, Homo sapiens
  misc_RNA (1)...(19): siRNA sense strand
uaaaguuccgcaagucaga

SEQ ID NO: 1817090 - RNA, 19 nt, Homo sapiens
  misc_RNA (1)...(19): siRNA sense strand
gauguagaagcaaucaaga

SEQ ID NO: 1817091 - RNA, 19 nt, Homo sapiens
  misc_RNA (1)...(19): siRNA sense strand
gcaagucagaguacuggau

SEQ ID NO: 1817092 - RNA, 19 nt, Homo sapiens
  misc_RNA (1)...(19): siRNA sense strand
cucauucucaccaauaaua

SEQ ID NO: 1817093 - RNA, 19 nt, Homo sapiens
  misc_RNA (1)...(19): siRNA sense strand
gugcuacguuagaccaguu

SEQ ID NO: 1817094 - RNA, 19 nt, Homo sapiens
  misc_RNA (1)...(19): siRNA sense strand
uagaccaguuugaugcuau

SEQ ID NO: 1817095 - RNA, 19 nt, Homo sapiens
  misc_RNA (1)...(19): siRNA sense strand
auaauagucucguggaacu

SEQ ID NO: 1817096 - RNA, 19 nt, Homo sapiens
  misc_RNA (1)...(19): siRNA sense strand
agaccaguuugaugcuauu

SEQ ID NO: 1817097 - RNA, 19 nt, Homo sapiens
  misc_RNA (1)...(19): siRNA sense strand
gcccacugaugauggugaa

SEQ ID NO: 1817098 - RNA, 19 nt, Homo sapiens
  misc_RNA (1)...(19): siRNA sense strand
uuuauaaaguuccgcaagu

SEQ ID NO: 1817099 - RNA, 19 nt, Homo sapiens
  misc_RNA (1)...(19): siRNA sense strand
uguagaagcaaucaagaau

SEQ ID NO: 1817100 - RNA, 19 nt, Homo sapiens
  misc_RNA (1)...(19): siRNA sense strand
ucucucaaaucgcugacuu

SEQ ID NO: 1817101 - RNA, 19 nt, Homo sapiens
  misc_RNA (1)...(19): siRNA sense strand
aagaagcauuacagauugu

SEQ ID NO: 1817102 - RNA, 19 nt, Homo sapiens
  misc_RNA (1)...(19): siRNA sense strand
uaccuaaguauccuaagaa

SEQ ID NO: 1817103 - RNA, 19 nt, Homo sapiens
  misc_RNA (1)...(19): siRNA sense strand
agaaugccauagcaaaugc

SEQ ID NO: 1817104 - RNA, 19 nt, Homo sapiens
  misc_RNA (1)...(19): siRNA sense strand
ccacugaugauggugaaga

SEQ ID NO: 1817105 - RNA, 19 nt, Homo sapiens
  misc_RNA (1)...(19): siRNA sense strand
cacugaugauggugaagaa

SEQ ID NO: 1817106 - RNA, 19 nt, Homo sapiens
  misc_RNA (1)...(19): siRNA sense strand
uaaaauucccgucauugaa

SEQ ID NO: 1817107 - RNA, 19 nt, Homo sapiens
  misc_RNA (1)...(19): siRNA sense strand
uuagaccaguuugaugcua

SEQ ID NO: 1817108 - RNA, 19 nt, Homo sapiens
  misc_RNA (1)...(19): siRNA sense strand
uuccagaaagugaaacuaa

SEQ ID NO: 1817109 - RNA, 19 nt, Homo sapiens
  misc_RNA (1)...(19): siRNA sense strand
uauaaaguuccgcaaguca

SEQ ID NO: 1817110 - RNA, 19 nt, Homo sapiens
  misc_RNA (1)...(19): siRNA sense strand
ugacaaugagaucaggaaa

SEQ ID NO: 1817111 - RNA, 19 nt, Homo sapiens
  misc_RNA (1)...(19): siRNA sense strand
uuagugaacaacaacagaa

SEQ ID NO: 1817112 - RNA, 19 nt, Homo sapiens
  misc_RNA (1)...(19): siRNA sense strand
uuauaaaguuccgcaaguc

SEQ ID NO: 1817113 - RNA, 19 nt, Homo sapiens
  misc_RNA (1)...(19): siRNA sense strand
aacucauucucaccaauaa

SEQ ID NO: 1817114 - RNA, 19 nt, Homo sapiens
  misc_RNA (1)...(19): siRNA sense strand
ccguauaggugagggacuu

SEQ ID NO: 1817115 - RNA, 19 nt, Homo sapiens
  misc_RNA (1)...(19): siRNA sense strand
agugaacaacaacagaaua

SEQ ID NO: 1817116 - RNA, 19 nt, Homo sapiens
  misc_RNA (1)...(19): siRNA sense strand
aagaaugccauagcaaaug

SEQ ID NO: 1817117 - RNA, 19 nt, Homo sapiens
  misc_RNA (1)...(19): siRNA sense strand
ggugcugguuugccaacug

SEQ ID NO: 1817118 - RNA, 19 nt, Homo sapiens
  misc_RNA (1)...(19): siRNA sense strand
ucuggcaucucucaaaucg

SEQ ID NO: 1817119 - RNA, 19 nt, Homo sapiens
  misc_RNA (1)...(19): siRNA sense strand
accuaaguauccuaagaaa

SEQ ID NO: 1817120 - RNA, 19 nt, Homo sapiens
  misc_RNA (1)...(19): siRNA sense strand
ugaugauggugaagaagag

SEQ ID NO: 1817121 - RNA, 19 nt, Homo sapiens
  misc_RNA (1)...(19): siRNA sense strand
aaaauucccgucauugaaa

SEQ ID NO: 1817122 - RNA, 19 nt, Homo sapiens
  misc_RNA (1)...(19): siRNA sense strand
ccagaaagugaaacuaaaa

SEQ ID NO: 1817123 - RNA, 19 nt, Homo sapiens
  misc_RNA (1)...(19): siRNA sense strand
guuagugaacaacaacaga

SEQ ID NO: 1817124 - RNA, 19 nt, Homo sapiens
  misc_RNA (1)...(19): siRNA sense strand
caaacggggugcacagcuu

SEQ ID NO: 1817125 - RNA, 19 nt, Homo sapiens
  misc_RNA (1)...(19): siRNA sense strand
gaaagugaaacuaaaagag

SEQ ID NO: 1817126 - RNA, 19 nt, Homo sapiens
  misc_RNA (1)...(19): siRNA sense strand
gaaagaagaucaugaaaca

SEQ ID NO: 1817127 - RNA, 19 nt, Homo sapiens
  misc_RNA (1)...(19): siRNA sense strand
ggaagaagauggaaacaga

SEQ ID NO: 1817128 - RNA, 19 nt, Homo sapiens
  misc_RNA (1)...(19): siRNA sense strand
gaagauggcucgagaagca

SEQ ID NO: 1817129 - RNA, 19 nt, Homo sapiens
  misc_RNA (1)...(19): siRNA sense strand
gagaacagauugagaagga

SEQ ID NO: 1817130 - RNA, 19 nt, Homo sapiens
  misc_RNA (1)...(19): siRNA sense strand
gaacgaaggcagcaacaaa

SEQ ID NO: 1817131 - RNA, 19 nt, Homo sapiens
  misc_RNA (1)...(19): siRNA sense strand
cggcagaaauccauucaaa

SEQ ID NO: 1817132 - RNA, 19 nt, Homo sapiens
  misc_RNA (1)...(19): siRNA sense strand
gaaccggauugccaccuuu

SEQ ID NO: 1817133 - RNA, 19 nt, Homo sapiens
  misc_RNA (1)...(19): siRNA sense strand
agaaggagaugguguggaa

SEQ ID NO: 1817134 - RNA, 19 nt, Homo sapiens
  misc_RNA (1)...(19): siRNA sense strand
gagaagcgguuggaucaga

SEQ ID NO: 1817135 - RNA, 19 nt, Homo sapiens
  misc_RNA (1)...(19): siRNA sense strand
gaagaugcaagcugagauu

SEQ ID NO: 1817136 - RNA, 19 nt, Homo sapiens
  misc_RNA (1)...(19): siRNA sense strand
gaggaaagaauuagaggaa

SEQ ID NO: 1817137 - RNA, 19 nt, Homo sapiens
  misc_RNA (1)...(19): siRNA sense strand
gcagaaauccauucaaagg

SEQ ID NO: 1817138 - RNA, 19 nt, Homo sapiens
  misc_RNA (1)...(19): siRNA sense strand
gagauuaagcgcaucaaug

SEQ ID NO: 1817139 - RNA, 19 nt, Homo sapiens
  misc_RNA (1)...(19): siRNA sense strand
ugauggaguuuaccaagaa

SEQ ID NO: 1817140 - RNA, 19 nt, Homo sapiens
  misc_RNA (1)...(19): siRNA sense strand
ucgaugagaucaagaggaa

SEQ ID NO: 1817141 - RNA, 19 nt, Homo sapiens
  misc_RNA (1)...(19): siRNA sense strand
gagaugguguggaacaaca

SEQ ID NO: 1817142 - RNA, 19 nt, Homo sapiens
  misc_RNA (1)...(19): siRNA sense strand
gagcaagauuauccucaau

SEQ ID NO: 1817143 - RNA, 19 nt, Homo sapiens
  misc_RNA (1)...(19): siRNA sense strand
gcagugaugacacgaaaga

SEQ ID NO: 1817144 - RNA, 19 nt, Homo sapiens
  misc_RNA (1)...(19): siRNA sense strand
gcaagauuauccucaaugc

SEQ ID NO: 1817145 - RNA, 19 nt, Homo sapiens
  misc_RNA (1)...(19): siRNA sense strand
gaugcaagcugagauuaag

SEQ ID NO: 1817146 - RNA, 19 nt, Homo sapiens
  misc_RNA (1)...(19): siRNA sense strand
ccaacaagcugcggaugga

SEQ ID NO: 1817147 - RNA, 19 nt, Homo sapiens
  misc_RNA (1)...(19): siRNA sense strand
caaagaggaggcccagaaa

SEQ ID NO: 1817148 - RNA, 19 nt, Homo sapiens
  misc_RNA (1)...(19): siRNA sense strand
gcucagagagaacagauug

SEQ ID NO: 1817149 - RNA, 19 nt, Homo sapiens
  misc_RNA (1)...(19): siRNA sense strand
gggaugaguucgagaggau

SEQ ID NO: 1817150 - RNA, 19 nt, Homo sapiens
  misc_RNA (1)...(19): siRNA sense strand
gaacuggacacagaagaga

SEQ ID NO: 1817151 - RNA, 19 nt, Homo sapiens
  misc_RNA (1)...(19): siRNA sense strand
gcuuacagcaugccaauga

SEQ ID NO: 1817152 - RNA, 19 nt, Homo sapiens
  misc_RNA (1)...(19): siRNA sense strand
gaggagggaggaaagaauu

SEQ ID NO: 1817153 - RNA, 19 nt, Homo sapiens
  misc_RNA (1)...(19): siRNA sense strand
aagauuauccucaaugcua

SEQ ID NO: 1817154 - RNA, 19 nt, Homo sapiens
  misc_RNA (1)...(19): siRNA sense strand
agauuaagcgcaucaauga

SEQ ID NO: 1817155 - RNA, 19 nt, Homo sapiens
  misc_RNA (1)...(19): siRNA sense strand
gaggaaggcggcaaauugu

SEQ ID NO: 1817156 - RNA, 19 nt, Homo sapiens
  misc_RNA (1)...(19): siRNA sense strand
gugauggaguuuaccaaga

SEQ ID NO: 1817157 - RNA, 19 nt, Homo sapiens
  misc_RNA (1)...(19): siRNA sense strand
ucaaagaggaggcccagaa

SEQ ID NO: 1817158 - RNA, 19 nt, Homo sapiens
  misc_RNA (1)...(19): siRNA sense strand
gacagagaguggcgcagaa

SEQ ID NO: 1817159 - RNA, 19 nt, Homo sapiens
  misc_RNA (1)...(19): siRNA sense strand
aggagaaggcccaggauua

SEQ ID NO: 1817160 - RNA, 19 nt, Homo sapiens
  misc_RNA (1)...(19): siRNA sense strand
gaaguggagcggcagaaau

SEQ ID NO: 1817161 - RNA, 19 nt, Homo sapiens
  misc_RNA (1)...(19): siRNA sense strand
agaggaaggcggcaaauug

SEQ ID NO: 1817162 - RNA, 19 nt, Homo sapiens
  misc_RNA (1)...(19): siRNA sense strand
ucaaggacaugagcaagau

SEQ ID NO: 1817163 - RNA, 19 nt, Homo sapiens
  misc_RNA (1)...(19): siRNA sense strand
gaagaagauggcucgagaa

SEQ ID NO: 1817164 - RNA, 19 nt, Homo sapiens
  misc_RNA (1)...(19): siRNA sense strand
aggaggaacuggagaggaa

SEQ ID NO: 1817165 - RNA, 19 nt, Homo sapiens
  misc_RNA (1)...(19): siRNA sense strand
aagaagaucaugaaacaga

SEQ ID NO: 1817166 - RNA, 19 nt, Homo sapiens
  misc_RNA (1)...(19): siRNA sense strand
gcaaauuguggaacagaug

SEQ ID NO: 1817167 - RNA, 19 nt, Homo sapiens
  misc_RNA (1)...(19): siRNA sense strand
gcgcaucgaugagaucaag

SEQ ID NO: 1817168 - RNA, 19 nt, Homo sapiens
  misc_RNA (1)...(19): siRNA sense strand
agagagaacagauugagaa

SEQ ID NO: 1817169 - RNA, 19 nt, Homo sapiens
  misc_RNA (1)...(19): siRNA sense strand
ccaggagguugcagacaga

SEQ ID NO: 1817170 - RNA, 19 nt, Homo sapiens
  misc_RNA (1)...(19): siRNA sense strand
gaagaggagggaggaaaga

SEQ ID NO: 1817171 - RNA, 19 nt, Homo sapiens
  misc_RNA (1)...(19): siRNA sense strand
uggaggagguggccaagga

SEQ ID NO: 1817172 - RNA, 19 nt, Homo sapiens
  misc_RNA (1)...(19): siRNA sense strand
ggagggagaaagagaagga

SEQ ID NO: 1817173 - RNA, 19 nt, Homo sapiens
  misc_RNA (1)...(19): siRNA sense strand
agauuauccucaaugcuaa

SEQ ID NO: 1817174 - RNA, 19 nt, Homo sapiens
  misc_RNA (1)...(19): siRNA sense strand
gcgagaaccagcagaagga

SEQ ID NO: 1817175 - RNA, 19 nt, Homo sapiens
  misc_RNA (1)...(19): siRNA sense strand
ucgaacagguggcuuucaa

SEQ ID NO: 1817176 - RNA, 19 nt, Homo sapiens
  misc_RNA (1)...(19): siRNA sense strand
ggagaaggcccaggauuac

SEQ ID NO: 1817177 - RNA, 19 nt, Homo sapiens
  misc_RNA (1)...(19): siRNA sense strand
agaagaucaugaaacagaa

SEQ ID NO: 1817178 - RNA, 19 nt, Homo sapiens
  misc_RNA (1)...(19): siRNA sense strand
gagaagcagcagauccaaa

SEQ ID NO: 1817179 - RNA, 19 nt, Homo sapiens
  misc_RNA (1)...(19): siRNA sense strand
ggaaguggagcggcagaaa

SEQ ID NO: 1817180 - RNA, 19 nt, Homo sapiens
  misc_RNA (1)...(19): siRNA sense strand
gaaaaugcgcggaagaaga

SEQ ID NO: 1817181 - RNA, 19 nt, Homo sapiens
  misc_RNA (1)...(19): siRNA sense strand
gcuccaagaggaagaucua

SEQ ID NO: 1817182 - RNA, 19 nt, Homo sapiens
  misc_RNA (1)...(19): siRNA sense strand
ggaagaggagggaggaaag

SEQ ID NO: 1817183 - RNA, 19 nt, Homo sapiens
  misc_RNA (1)...(19): siRNA sense strand
gccgugagcgcaucgauga

SEQ ID NO: 1817184 - RNA, 19 nt, Homo sapiens
  misc_RNA (1)...(19): siRNA sense strand
gugaugacacgaaagaaga

SEQ ID NO: 1817185 - RNA, 19 nt, Homo sapiens
  misc_RNA (1)...(19): siRNA sense strand
gaagugcagaaccggauug

SEQ ID NO: 1817186 - RNA, 19 nt, Homo sapiens
  misc_RNA (1)...(19): siRNA sense strand
gaaacagaaagcagaacug

SEQ ID NO: 1817187 - RNA, 19 nt, Homo sapiens
  misc_RNA (1)...(19): siRNA sense strand
gcagaugcuggaauauaug

SEQ ID NO: 1817188 - RNA, 19 nt, Homo sapiens
  misc_RNA (1)...(19): siRNA sense strand
ccaagaggaagaucuaaag

SEQ ID NO: 1817189 - RNA, 19 nt, Homo sapiens
  misc_RNA (1)...(19): siRNA sense strand
ugagggccaugcaggagaa

SEQ ID NO: 1817190 - RNA, 19 nt, Homo sapiens
  misc_RNA (1)...(19): siRNA sense strand
aagagaagcgguuggauca

SEQ ID NO: 1817191 - RNA, 19 nt, Homo sapiens
  misc_RNA (1)...(19): siRNA sense strand
acaacaagaagcucaguga

SEQ ID NO: 1817192 - RNA, 19 nt, Homo sapiens
  misc_RNA (1)...(19): siRNA sense strand
aaggacaugagcaagauua

SEQ ID NO: 1817193 - RNA, 19 nt, Homo sapiens
  misc_RNA (1)...(19): siRNA sense strand
gcagaaaggaaaaggaaaa

SEQ ID NO: 1817194 - RNA, 19 nt, Homo sapiens
  misc_RNA (1)...(19): siRNA sense strand
gagaguggcgcagaaagga

SEQ ID NO: 1817195 - RNA, 19 nt, Homo sapiens
  misc_RNA (1)...(19): siRNA sense strand
aggaggagcucaaggacau

SEQ ID NO: 1817196 - RNA, 19 nt, Homo sapiens
  misc_RNA (1)...(19): siRNA sense strand
cgaaagaagaucaugaaac

SEQ ID NO: 1817197 - RNA, 19 nt, Homo sapiens
  misc_RNA (1)...(19): siRNA sense strand
aggaagaucuaaaggacau

SEQ ID NO: 1817198 - RNA, 19 nt, Homo sapiens
  misc_RNA (1)...(19): siRNA sense strand
cacgaaagaagaucaugaa

SEQ ID NO: 1817199 - RNA, 19 nt, Homo sapiens
  misc_RNA (1)...(19): siRNA sense strand
gaguggcgcagaaaggaaa

SEQ ID NO: 1817200 - RNA, 19 nt, Homo sapiens
  misc_RNA (1)...(19): siRNA sense strand
gaguuuaccaagaagaaga

SEQ ID NO: 1817201 - RNA, 19 nt, Homo sapiens
  misc_RNA (1)...(19): siRNA sense strand
ccagaaacagaaagcagaa

SEQ ID NO: 1817202 - RNA, 19 nt, Homo sapiens
  misc_RNA (1)...(19): siRNA sense strand
ggcaaauuguggaacagau

SEQ ID NO: 1817203 - RNA, 19 nt, Homo sapiens
  misc_RNA (1)...(19): siRNA sense strand
ggagaaagagaaggagauc

SEQ ID NO: 1817204 - RNA, 19 nt, Homo sapiens
  misc_RNA (1)...(19): siRNA sense strand
uggaacagauggaaaagaa

SEQ ID NO: 1817205 - RNA, 19 nt, Homo sapiens
  misc_RNA (1)...(19): siRNA sense strand
ggaagugcagaaccggauu

SEQ ID NO: 1817206 - RNA, 19 nt, Homo sapiens
  misc_RNA (1)...(19): siRNA sense strand
ggacaugagcaagauuauc

SEQ ID NO: 1817207 - RNA, 19 nt, Homo sapiens
  misc_RNA (1)...(19): siRNA sense strand
ggaacagcuccaagaggaa

SEQ ID NO: 1817208 - RNA, 19 nt, Homo sapiens
  misc_RNA (1)...(19): siRNA sense strand
gaugcuggaauauauggaa

SEQ ID NO: 1817209 - RNA, 19 nt, Homo sapiens
  misc_RNA (1)...(19): siRNA sense strand
gaugaaaaccagaaacaga

SEQ ID NO: 1817210 - RNA, 19 nt, Homo sapiens
  misc_RNA (1)...(19): siRNA sense strand
acacgaaagaagaucauga

SEQ ID NO: 1817211 - RNA, 19 nt, Homo sapiens
  misc_RNA (1)...(19): siRNA sense strand
gaagaucaugaaacagaag

SEQ ID NO: 1817212 - RNA, 19 nt, Homo sapiens
  misc_RNA (1)...(19): siRNA sense strand
ggaggagguggccaaggaa

SEQ ID NO: 1817213 - RNA, 19 nt, Homo sapiens
  misc_RNA (1)...(19): siRNA sense strand
gagggaggaaagaauuaga

SEQ ID NO: 1817214 - RNA, 19 nt, Homo sapiens
  misc_RNA (1)...(19): siRNA sense strand
gaugagaucaagaggaaaa

SEQ ID NO: 1817215 - RNA, 19 nt, Homo sapiens
  misc_RNA (1)...(19): siRNA sense strand
gagagaacagauugagaag

SEQ ID NO: 1817216 - RNA, 19 nt, Homo sapiens
  misc_RNA (1)...(19): siRNA sense strand
gaaaggaaaaggaaaaugc

SEQ ID NO: 1817217 - RNA, 19 nt, Homo sapiens
  misc_RNA (1)...(19): siRNA sense strand
ggaacaacaacaagaagcu

SEQ ID NO: 1817218 - RNA, 19 nt, Homo sapiens
  misc_RNA (1)...(19): siRNA sense strand
gaauccggagggagaaaga

SEQ ID NO: 1817219 - RNA, 19 nt, Homo sapiens
  misc_RNA (1)...(19): siRNA sense strand
gauggaguuuaccaagaag

SEQ ID NO: 1817220 - RNA, 19 nt, Homo sapiens
  misc_RNA (1)...(19): siRNA sense strand
ggaacgaaggcagcaacaa

SEQ ID NO: 1817221 - RNA, 19 nt, Homo sapiens
  misc_RNA (1)...(19): siRNA sense strand
gacaugagcaagauuaucc

SEQ ID NO: 1817222 - RNA, 19 nt, Homo sapiens
  misc_RNA (1)...(19): siRNA sense strand
ggagggaggaaagaauuag

SEQ ID NO: 1817223 - RNA, 19 nt, Homo sapiens
  misc_RNA (1)...(19): siRNA sense strand
cuaaaggacauggaacgaa

SEQ ID NO: 1817224 - RNA, 19 nt, Homo sapiens
  misc_RNA (1)...(19): siRNA sense strand
aaggagaucgcacgcuuga

SEQ ID NO: 1817225 - RNA, 19 nt, Homo sapiens
  misc_RNA (1)...(19): siRNA sense strand
gaggagcucaaggacauga

SEQ ID NO: 1817226 - RNA, 19 nt, Homo sapiens
  misc_RNA (1)...(19): siRNA sense strand
ggacggaucuggcugagaa

SEQ ID NO: 1817227 - RNA, 19 nt, Homo sapiens
  misc_RNA (1)...(19): siRNA sense strand
gcaagcagcugggaucugu

SEQ ID NO: 1817228 - RNA, 19 nt, Homo sapiens
  misc_RNA (1)...(19): siRNA sense strand
uugagaagaucuacaagua

SEQ ID NO: 1817229 - RNA, 19 nt, Homo sapiens
  misc_RNA (1)...(19): siRNA sense strand
gagaagaucuacaaguacu

SEQ ID NO: 1817230 - RNA, 19 nt, Homo sapiens
  misc_RNA (1)...(19): siRNA sense strand
uaacagggccacuggaaga

SEQ ID NO: 1817231 - RNA, 19 nt, Homo sapiens
  misc_RNA (1)...(19): siRNA sense strand
agacuuugcuguggacuuu

SEQ ID NO: 1817232 - RNA, 19 nt, Homo sapiens
  misc_RNA (1)...(19): siRNA sense strand
gauaacagggccacuggaa

SEQ ID NO: 1817233 - RNA, 19 nt, Homo sapiens
  misc_RNA (1)...(19): siRNA sense strand
gagcacagcgaacugaaau

SEQ ID NO: 1817234 - RNA, 19 nt, Homo sapiens
  misc_RNA (1)...(19): siRNA sense strand
gggaggccauucagaaagu

SEQ ID NO: 1817235 - RNA, 19 nt, Homo sapiens
  misc_RNA (1)...(19): siRNA sense strand
gcuguggacuuugagaaga

SEQ ID NO: 1817236 - RNA, 19 nt, Homo sapiens
  misc_RNA (1)...(19): siRNA sense strand
gcuggucccuccacugaag

SEQ ID NO: 1817237 - RNA, 19 nt, Homo sapiens
  misc_RNA (1)...(19): siRNA sense strand
gaccugcucaugucacuuc

SEQ ID NO: 1817238 - RNA, 19 nt, Homo sapiens
  misc_RNA (1)...(19): siRNA sense strand
gcacagcgaacugaaaucg

SEQ ID NO: 1817239 - RNA, 19 nt, Homo sapiens
  misc_RNA (1)...(19): siRNA sense strand
gcgagaagcggcagcuagu

SEQ ID NO: 1817240 - RNA, 19 nt, Homo sapiens
  misc_RNA (1)...(19): siRNA sense strand
ggaggccauucagaaagug

SEQ ID NO: 1817241 - RNA, 19 nt, Homo sapiens
  misc_RNA (1)...(19): siRNA sense strand
cagcccugguugagcauau

SEQ ID NO: 1817242 - RNA, 19 nt, Homo sapiens
  misc_RNA (1)...(19): siRNA sense strand
cgagcacagcgaacugaaa

SEQ ID NO: 1817243 - RNA, 19 nt, Homo sapiens
  misc_RNA (1)...(19): siRNA sense strand
ccgggaggccauucagaaa

SEQ ID NO: 1817244 - RNA, 19 nt, Homo sapiens
  misc_RNA (1)...(19): siRNA sense strand
ggaggaagaugcuaaguug

SEQ ID NO: 1817245 - RNA, 19 nt, Homo sapiens
  misc_RNA (1)...(19): siRNA sense strand
gaaagucaguggugaguga

SEQ ID NO: 1817246 - RNA, 19 nt, Homo sapiens
  misc_RNA (1)...(19): siRNA sense strand
gggagaagauuuccaauau

SEQ ID NO: 1817247 - RNA, 19 nt, Homo sapiens
  misc_RNA (1)...(19): siRNA sense strand
gcagaauugucuacuauau

SEQ ID NO: 1817248 - RNA, 19 nt, Homo sapiens
  misc_RNA (1)...(19): siRNA sense strand
ggagaagauuuccaauauu

SEQ ID NO: 1817249 - RNA, 19 nt, Homo sapiens
  misc_RNA (1)...(19): siRNA sense strand
ucaaggagcuggaaaggau

SEQ ID NO: 1817250 - RNA, 19 nt, Homo sapiens
  misc_RNA (1)...(19): siRNA sense strand
gaagaggaacaguuaauug

SEQ ID NO: 1817251 - RNA, 19 nt, Homo sapiens
  misc_RNA (1)...(19): siRNA sense strand
gaggaacaguuaauugaau

SEQ ID NO: 1817252 - RNA, 19 nt, Homo sapiens
  misc_RNA (1)...(19): siRNA sense strand
gcacaacaaagcucugaaa

SEQ ID NO: 1817253 - RNA, 19 nt, Homo sapiens
  misc_RNA (1)...(19): siRNA sense strand
gcacagagccacccagagu

SEQ ID NO: 1817254 - RNA, 19 nt, Homo sapiens
  misc_RNA (1)...(19): siRNA sense strand
ggagcaggauugguuuaaa

SEQ ID NO: 1817255 - RNA, 19 nt, Homo sapiens
  misc_RNA (1)...(19): siRNA sense strand
aaucaagucucgagucaga

SEQ ID NO: 1817256 - RNA, 19 nt, Homo sapiens
  misc_RNA (1)...(19): siRNA sense strand
gcugaaagagagaagauaa

SEQ ID NO: 1817257 - RNA, 19 nt, Homo sapiens
  misc_RNA (1)...(19): siRNA sense strand
gaagauaacacaggagauc

SEQ ID NO: 1817258 - RNA, 19 nt, Homo sapiens
  misc_RNA (1)...(19): siRNA sense strand
cagaggagauccggaaguu

SEQ ID NO: 1817259 - RNA, 19 nt, Homo sapiens
  misc_RNA (1)...(19): siRNA sense strand
ccgcagaauugucuacuau

SEQ ID NO: 1817260 - RNA, 19 nt, Homo sapiens
  misc_RNA (1)...(19): siRNA sense strand
ucaagaagccucaaagagu

SEQ ID NO: 1817261 - RNA, 19 nt, Homo sapiens
  misc_RNA (1)...(19): siRNA sense strand
gcaggaggcugggacuuca

SEQ ID NO: 1817262 - RNA, 19 nt, Homo sapiens
  misc_RNA (1)...(19): siRNA sense strand
ggaagaugcuaaguugcuu

SEQ ID NO: 1817263 - RNA, 19 nt, Homo sapiens
  misc_RNA (1)...(19): siRNA sense strand
augaagaccuccugaguga

SEQ ID NO: 1817264 - RNA, 19 nt, Homo sapiens
  misc_RNA (1)...(19): siRNA sense strand
agaauugucuacuauaugg

SEQ ID NO: 1817265 - RNA, 19 nt, Homo sapiens
  misc_RNA (1)...(19): siRNA sense strand
uaacacaggagaucaagga

SEQ ID NO: 1817266 - RNA, 19 nt, Homo sapiens
  misc_RNA (1)...(19): siRNA sense strand
aagggucgguggaauuuaa

SEQ ID NO: 1817267 - RNA, 19 nt, Homo sapiens
  misc_RNA (1)...(19): siRNA sense strand
gagcaggauugguuuaaaa

SEQ ID NO: 1817268 - RNA, 19 nt, Homo sapiens
  misc_RNA (1)...(19): siRNA sense strand
cagcugaucuaccgaugga

SEQ ID NO: 1817269 - RNA, 19 nt, Homo sapiens
  misc_RNA (1)...(19): siRNA sense strand
ggagaucucagaaucaagu

SEQ ID NO: 1817270 - RNA, 19 nt, Homo sapiens
  misc_RNA (1)...(19): siRNA sense strand
uucaagcuguugccaaaua

SEQ ID NO: 1817271 - RNA, 19 nt, Homo sapiens
  misc_RNA (1)...(19): siRNA sense strand
gcagggaagccgagaagga

SEQ ID NO: 1817272 - RNA, 19 nt, Homo sapiens
  misc_RNA (1)...(19): siRNA sense strand
aaaagaagaggaacaguua

SEQ ID NO: 1817273 - RNA, 19 nt, Homo sapiens
  misc_RNA (1)...(19): siRNA sense strand
gaugcuaaguugcuucaag

SEQ ID NO: 1817274 - RNA, 19 nt, Homo sapiens
  misc_RNA (1)...(19): siRNA sense strand
guggagaucucagaaucaa

SEQ ID NO: 1817275 - RNA, 19 nt, Homo sapiens
  misc_RNA (1)...(19): siRNA sense strand
ggaggcgucugcugacagu

SEQ ID NO: 1817276 - RNA, 19 nt, Homo sapiens
  misc_RNA (1)...(19): siRNA sense strand
agaaggagauccaggacau

SEQ ID NO: 1817277 - RNA, 19 nt, Homo sapiens
  misc_RNA (1)...(19): siRNA sense strand
ggcaagcccuggagaagca

SEQ ID NO: 1817278 - RNA, 19 nt, Homo sapiens
  misc_RNA (1)...(19): siRNA sense strand
agaaucaagucucgaguca

SEQ ID NO: 1817279 - RNA, 19 nt, Homo sapiens
  misc_RNA (1)...(19): siRNA sense strand
ggaucuggcuggguccaaa

SEQ ID NO: 1817280 - RNA, 19 nt, Homo sapiens
  misc_RNA (1)...(19): siRNA sense strand
gcaaguggaagaucaugau

SEQ ID NO: 1817281 - RNA, 19 nt, Homo sapiens
  misc_RNA (1)...(19): siRNA sense strand
uccagugccugcagaaauu

SEQ ID NO: 1817282 - RNA, 19 nt, Homo sapiens
  misc_RNA (1)...(19): siRNA sense strand
aaagagagaagauaacaca

SEQ ID NO: 1817283 - RNA, 19 nt, Homo sapiens
  misc_RNA (1)...(19): siRNA sense strand
ggacuucagccaaggacaa

SEQ ID NO: 1817284 - RNA, 19 nt, Homo sapiens
  misc_RNA (1)...(19): siRNA sense strand
agagcaaagucuccaguga

SEQ ID NO: 1817285 - RNA, 19 nt, Homo sapiens
  misc_RNA (1)...(19): siRNA sense strand
aagaggaacaguuaauuga

SEQ ID NO: 1817286 - RNA, 19 nt, Homo sapiens
  misc_RNA (1)...(19): siRNA sense strand
agaaggcccuggagcacaa

SEQ ID NO: 1817287 - RNA, 19 nt, Homo sapiens
  misc_RNA (1)...(19): siRNA sense strand
gaggagauccggaaguucu

SEQ ID NO: 1817288 - RNA, 19 nt, Homo sapiens
  misc_RNA (1)...(19): siRNA sense strand
ccacaaagggagccgaaga

SEQ ID NO: 1817289 - RNA, 19 nt, Homo sapiens
  misc_RNA (1)...(19): siRNA sense strand
gcucaagaagccucaaaga

SEQ ID NO: 1817290 - RNA, 19 nt, Homo sapiens
  misc_RNA (1)...(19): siRNA sense strand
cacacaggcuucccagaga

SEQ ID NO: 1817291 - RNA, 19 nt, Homo sapiens
  misc_RNA (1)...(19): siRNA sense strand
ggagauuacauuucagcuu

SEQ ID NO: 1817292 - RNA, 19 nt, Homo sapiens
  misc_RNA (1)...(19): siRNA sense strand
gaagaggugccagguagga

SEQ ID NO: 1817293 - RNA, 19 nt, Homo sapiens
  misc_RNA (1)...(19): siRNA sense strand
cucaggagauuacauuuca

SEQ ID NO: 1817294 - RNA, 19 nt, Homo sapiens
  misc_RNA (1)...(19): siRNA sense strand
ggaugaagaccuccugagu

SEQ ID NO: 1817295 - RNA, 19 nt, Homo sapiens
  misc_RNA (1)...(19): siRNA sense strand
ggauggcaguguggccuuu

SEQ ID NO: 1817296 - RNA, 19 nt, Homo sapiens
  misc_RNA (1)...(19): siRNA sense strand
aaacgugccggcucaagaa

SEQ ID NO: 1817297 - RNA, 19 nt, Homo sapiens
  misc_RNA (1)...(19): siRNA sense strand
caaacgugccggcucaaga

SEQ ID NO: 1817298 - RNA, 19 nt, Homo sapiens
  misc_RNA (1)...(19): siRNA sense strand
aaagagugccagccacaaa

SEQ ID NO: 1817299 - RNA, 19 nt, Homo sapiens
  misc_RNA (1)...(19): siRNA sense strand
gcuucucccuguuccugua

SEQ ID NO: 1817300 - RNA, 19 nt, Homo sapiens
  misc_RNA (1)...(19): siRNA sense strand
ugggagaagauuuccaaua

SEQ ID NO: 1817301 - RNA, 19 nt, Homo sapiens
  misc_RNA (1)...(19): siRNA sense strand
gcacauacauggggcacuu

SEQ ID NO: 1817302 - RNA, 19 nt, Homo sapiens
  misc_RNA (1)...(19): siRNA sense strand
caggccaccucuucccaaa

SEQ ID NO: 1817303 - RNA, 19 nt, Homo sapiens
  misc_RNA (1)...(19): siRNA sense strand
ucgaguacuugcaccagaa

SEQ ID NO: 1817304 - RNA, 19 nt, Homo sapiens
  misc_RNA (1)...(19): siRNA sense strand
gccuggauacuucuaauga

SEQ ID NO: 1817305 - RNA, 19 nt, Homo sapiens
  misc_RNA (1)...(19): siRNA sense strand
ccuccugccuggauacuuc

SEQ ID NO: 1817306 - RNA, 19 nt, Homo sapiens
  misc_RNA (1)...(19): siRNA sense strand
ccagguggccagggagaua

SEQ ID NO: 1817307 - RNA, 19 nt, Homo sapiens
  misc_RNA (1)...(19): siRNA sense strand
gcacauaggagggccacau

SEQ ID NO: 1817308 - RNA, 19 nt, Homo sapiens
  misc_RNA (1)...(19): siRNA sense strand
ggacccaccaguucaucuu

SEQ ID NO: 1817309 - RNA, 19 nt, Homo sapiens
  misc_RNA (1)...(19): siRNA sense strand
gggagcaggauugguuuaa

SEQ ID NO: 1817310 - RNA, 19 nt, Homo sapiens
  misc_RNA (1)...(19): siRNA sense strand
ugaaagagagaagauaaca

SEQ ID NO: 1817311 - RNA, 19 nt, Homo sapiens
  misc_RNA (1)...(19): siRNA sense strand
ggcccaagcccaagacugu

SEQ ID NO: 1817312 - RNA, 19 nt, Homo sapiens
  misc_RNA (1)...(19): siRNA sense strand
ucaagucucgagucagauu

SEQ ID NO: 1817313 - RNA, 19 nt, Homo sapiens
  misc_RNA (1)...(19): siRNA sense strand
caccuggaguggcagaaga

SEQ ID NO: 1817314 - RNA, 19 nt, Homo sapiens
  misc_RNA (1)...(19): siRNA sense strand
gauaaaacccucccugaag

SEQ ID NO: 1817315 - RNA, 19 nt, Homo sapiens
  misc_RNA (1)...(19): siRNA sense strand
cggagcugcuucaggagaa

SEQ ID NO: 1817316 - RNA, 19 nt, Homo sapiens
  misc_RNA (1)...(19): siRNA sense strand
uuacccagcuguuccacau

SEQ ID NO: 1817317 - RNA, 19 nt, Homo sapiens
  misc_RNA (1)...(19): siRNA sense strand
agaagaggaacaguuaauu

SEQ ID NO: 1817318 - RNA, 19 nt, Homo sapiens
  misc_RNA (1)...(19): siRNA sense strand
gagacuccaugcagcugau

SEQ ID NO: 1817319 - RNA, 19 nt, Homo sapiens
  misc_RNA (1)...(19): siRNA sense strand
cagaauugucuacuauaug

SEQ ID NO: 1817320 - RNA, 19 nt, Homo sapiens
  misc_RNA (1)...(19): siRNA sense strand
aaagaagaggaacaguuaa

SEQ ID NO: 1817321 - RNA, 19 nt, Homo sapiens
  misc_RNA (1)...(19): siRNA sense strand
gaccuggacgugcucagaa

SEQ ID NO: 1817322 - RNA, 19 nt, Homo sapiens
  misc_RNA (1)...(19): siRNA sense strand
ccgcaccacccucucagua

SEQ ID NO: 1817323 - RNA, 19 nt, Homo sapiens
  misc_RNA (1)...(19): siRNA sense strand
ggucccaccgucuuaaaug

SEQ ID NO: 1817324 - RNA, 19 nt, Homo sapiens
  misc_RNA (1)...(19): siRNA sense strand
caaggugaaagacggcaaa

SEQ ID NO: 1817325 - RNA, 19 nt, Homo sapiens
  misc_RNA (1)...(19): siRNA sense strand
ucugguaaaugcucugcuu

SEQ ID NO: 1817326 - RNA, 19 nt, Homo sapiens
  misc_RNA (1)...(19): siRNA sense strand
cugcaggcauccucaagug

SEQ ID NO: 1817327 - RNA, 19 nt, Homo sapiens
  misc_RNA (1)...(19): siRNA sense strand
gcagcaggaggaacucaug

SEQ ID NO: 1817328 - RNA, 19 nt, Homo sapiens
  misc_RNA (1)...(19): siRNA sense strand
ggagcuccuugugaccaaa

SEQ ID NO: 1817329 - RNA, 19 nt, Homo sapiens
  misc_RNA (1)...(19): siRNA sense strand
ggagaucaaggagcuggaa

SEQ ID NO: 1817330 - RNA, 19 nt, Homo sapiens
  misc_RNA (1)...(19): siRNA sense strand
acacacgcccucucccaaa

SEQ ID NO: 1817331 - RNA, 19 nt, Homo sapiens
  misc_RNA (1)...(19): siRNA sense strand
ggagcugcacacagaaaga

SEQ ID NO: 1817332 - RNA, 19 nt, Homo sapiens
  misc_RNA (1)...(19): siRNA sense strand
caucaaccagcuuccagaa

SEQ ID NO: 1817333 - RNA, 19 nt, Homo sapiens
  misc_RNA (1)...(19): siRNA sense strand
gcagaggagauccggaagu

SEQ ID NO: 1817334 - RNA, 19 nt, Homo sapiens
  misc_RNA (1)...(19): siRNA sense strand
ggauaaaacccucccugaa

SEQ ID NO: 1817335 - RNA, 19 nt, Homo sapiens
  misc_RNA (1)...(19): siRNA sense strand
cagcuguuccacaucgaua

SEQ ID NO: 1817336 - RNA, 19 nt, Homo sapiens
  misc_RNA (1)...(19): siRNA sense strand
agaggaacaguuaauugaa

SEQ ID NO: 1817337 - RNA, 19 nt, Homo sapiens
  misc_RNA (1)...(19): siRNA sense strand
cggaggaagaugcuaaguu

SEQ ID NO: 1817338 - RNA, 19 nt, Homo sapiens
  misc_RNA (1)...(19): siRNA sense strand
ugacccuccugaagcagaa

SEQ ID NO: 1817339 - RNA, 19 nt, Homo sapiens
  misc_RNA (1)...(19): siRNA sense strand
cugagcaaguggaagauca

SEQ ID NO: 1817340 - RNA, 19 nt, Homo sapiens
  misc_RNA (1)...(19): siRNA sense strand
aagaagaggaacaguuaau

SEQ ID NO: 1817341 - RNA, 19 nt, Homo sapiens
  misc_RNA (1)...(19): siRNA sense strand
uaaaagaagaggaacaguu

SEQ ID NO: 1817342 - RNA, 19 nt, Homo sapiens
  misc_RNA (1)...(19): siRNA sense strand
agauuacauuucagcuuga

SEQ ID NO: 1817343 - RNA, 19 nt, Homo sapiens
  misc_RNA (1)...(19): siRNA sense strand
ucaagcuguugccaaauac

SEQ ID NO: 1817344 - RNA, 19 nt, Homo sapiens
  misc_RNA (1)...(19): siRNA sense strand
caacuucacuauugucuug

SEQ ID NO: 1817345 - RNA, 19 nt, Homo sapiens
  misc_RNA (1)...(19): siRNA sense strand
uuucucaacuucacuauug

SEQ ID NO: 1817346 - RNA, 19 nt, Homo sapiens
  misc_RNA (1)...(19): siRNA sense strand
ggagcuguuucucaacuuc

SEQ ID NO: 1817347 - RNA, 19 nt, Homo sapiens
  misc_RNA (1)...(19): siRNA sense strand
gauuacgguuauucuuaug

SEQ ID NO: 1817348 - RNA, 19 nt, Homo sapiens
  misc_RNA (1)...(19): siRNA sense strand
ucacuauugucuugauuac

SEQ ID NO: 1817349 - RNA, 19 nt, Homo sapiens
  misc_RNA (1)...(19): siRNA sense strand
cccgggagcuguuucucaa

SEQ ID NO: 1817350 - RNA, 19 nt, Homo sapiens
  misc_RNA (1)...(19): siRNA sense strand
gggagcuguuucucaacuu

SEQ ID NO: 1817351 - RNA, 19 nt, Homo sapiens
  misc_RNA (1)...(19): siRNA sense strand
uuacgguuauucuuaugug

SEQ ID NO: 1817352 - RNA, 19 nt, Homo sapiens
  misc_RNA (1)...(19): siRNA sense strand
cuugugagguccuaucagu

SEQ ID NO: 1817353 - RNA, 19 nt, Homo sapiens
  misc_RNA (1)...(19): siRNA sense strand
ggacagaacuaaagaacaa

SEQ ID NO: 1817354 - RNA, 19 nt, Homo sapiens
  misc_RNA (1)...(19): siRNA sense strand
gcagagaggucgccguuga

SEQ ID NO: 1817355 - RNA, 19 nt, Homo sapiens
  misc_RNA (1)...(19): siRNA sense strand
ggaggucaauggcuuauau

SEQ ID NO: 1817356 - RNA, 19 nt, Homo sapiens
  misc_RNA (1)...(19): siRNA sense strand
caaggcaguuucuggguuu

SEQ ID NO: 1817357 - RNA, 19 nt, Homo sapiens
  misc_RNA (1)...(19): siRNA sense strand
ccugauggcuacucuguuu

SEQ ID NO: 1817358 - RNA, 19 nt, Homo sapiens
  misc_RNA (1)...(19): siRNA sense strand
caugaugccuaucuugaaa

SEQ ID NO: 1817359 - RNA, 19 nt, Homo sapiens
  misc_RNA (1)...(19): siRNA sense strand
ugaaaccacuacaggcuuu

SEQ ID NO: 1817360 - RNA, 19 nt, Homo sapiens
  misc_RNA (1)...(19): siRNA sense strand
cagcacaucuacacucuca

SEQ ID NO: 1817361 - RNA, 19 nt, Homo sapiens
  misc_RNA (1)...(19): siRNA sense strand
caagaaggcagacgugguu

SEQ ID NO: 1817362 - RNA, 19 nt, Homo sapiens
  misc_RNA (1)...(19): siRNA sense strand
ggaaggcaacacaauggua

SEQ ID NO: 1817363 - RNA, 19 nt, Homo sapiens
  misc_RNA (1)...(19): siRNA sense strand
gcacaucuacacucucaau

SEQ ID NO: 1817364 - RNA, 19 nt, Homo sapiens
  misc_RNA (1)...(19): siRNA sense strand
cgaauacaaucgacagaag

SEQ ID NO: 1817365 - RNA, 19 nt, Homo sapiens
  misc_RNA (1)...(19): siRNA sense strand
ggaauuggcccaguucauc

SEQ ID NO: 1817366 - RNA, 19 nt, Homo sapiens
  misc_RNA (1)...(19): siRNA sense strand
acacaaugguacccaagaa

SEQ ID NO: 1817367 - RNA, 19 nt, Homo sapiens
  misc_RNA (1)...(19): siRNA sense strand
gcauugacuacgugcuuua

SEQ ID NO: 1817368 - RNA, 19 nt, Homo sapiens
  misc_RNA (1)...(19): siRNA sense strand
guggagaccucaacaugca

SEQ ID NO: 1817369 - RNA, 19 nt, Homo sapiens
  misc_RNA (1)...(19): siRNA sense strand
ggacaucuaccuagcacau

SEQ ID NO: 1817370 - RNA, 19 nt, Homo sapiens
  misc_RNA (1)...(19): siRNA sense strand
gcugaagccauuucccuuu

SEQ ID NO: 1817371 - RNA, 19 nt, Homo sapiens
  misc_RNA (1)...(19): siRNA sense strand
ggacuuccaguaccugaga

SEQ ID NO: 1817372 - RNA, 19 nt, Homo sapiens
  misc_RNA (1)...(19): siRNA sense strand
agcaggagcugaagccauu

SEQ ID NO: 1817373 - RNA, 19 nt, Homo sapiens
  misc_RNA (1)...(19): siRNA sense strand
gcaguggccucugugucuu

SEQ ID NO: 1817374 - RNA, 19 nt, Homo sapiens
  misc_RNA (1)...(19): siRNA sense strand
gaggucaauggcuuauaua

SEQ ID NO: 1817375 - RNA, 19 nt, Homo sapiens
  misc_RNA (1)...(19): siRNA sense strand
uggaggagguguggaguga

SEQ ID NO: 1817376 - RNA, 19 nt, Homo sapiens
  misc_RNA (1)...(19): siRNA sense strand
gcugcugccugcugaagga

SEQ ID NO: 1817377 - RNA, 19 nt, Homo sapiens
  misc_RNA (1)...(19): siRNA sense strand
gagcuuacccagcacaucu

SEQ ID NO: 1817378 - RNA, 19 nt, Homo sapiens
  misc_RNA (1)...(19): siRNA sense strand
ggagugagcaggacuucca

SEQ ID NO: 1817379 - RNA, 19 nt, Homo sapiens
  misc_RNA (1)...(19): siRNA sense strand
gaggaaggcaacacaaugg

SEQ ID NO: 1817380 - RNA, 19 nt, Homo sapiens
  misc_RNA (1)...(19): siRNA sense strand
uaaguggcauggugcucaa

SEQ ID NO: 1817381 - RNA, 19 nt, Homo sapiens
  misc_RNA (1)...(19): siRNA sense strand
caccuucgcuagcuaugug

SEQ ID NO: 1817382 - RNA, 19 nt, Homo sapiens
  misc_RNA (1)...(19): siRNA sense strand
gaaggacaucuaccuagca

SEQ ID NO: 1817383 - RNA, 19 nt, Homo sapiens
  misc_RNA (1)...(19): siRNA sense strand
caagggaggcccaggaucu

SEQ ID NO: 1817384 - RNA, 19 nt, Homo sapiens
  misc_RNA (1)...(19): siRNA sense strand
ugaugugugugcuaaagga

SEQ ID NO: 1817385 - RNA, 19 nt, Homo sapiens
  misc_RNA (1)...(19): siRNA sense strand
gaagccauuucccuuuggu

SEQ ID NO: 1817386 - RNA, 19 nt, Homo sapiens
  misc_RNA (1)...(19): siRNA sense strand
cugaagccauuucccuuug

SEQ ID NO: 1817387 - RNA, 19 nt, Homo sapiens
  misc_RNA (1)...(19): siRNA sense strand
ggucgccguugaugugugu

SEQ ID NO: 1817388 - RNA, 19 nt, Homo sapiens
  misc_RNA (1)...(19): siRNA sense strand
caacaugcacccagaagac

SEQ ID NO: 1817389 - RNA, 19 nt, Homo sapiens
  misc_RNA (1)...(19): siRNA sense strand
cauccaauccaggagcuua

SEQ ID NO: 1817390 - RNA, 19 nt, Homo sapiens
  misc_RNA (1)...(19): siRNA sense strand
gugagcaggacuuccagua

SEQ ID NO: 1817391 - RNA, 19 nt, Homo sapiens
  misc_RNA (1)...(19): siRNA sense strand
ugaggaaggcaacacaaug

SEQ ID NO: 1817392 - RNA, 19 nt, Homo sapiens
  misc_RNA (1)...(19): siRNA sense strand
gagcuucgaccuggcuuug

SEQ ID NO: 1817393 - RNA, 19 nt, Homo sapiens
  misc_RNA (1)...(19): siRNA sense strand
gugcucaacgccuauguga

SEQ ID NO: 1817394 - RNA, 19 nt, Homo sapiens
  misc_RNA (1)...(19): siRNA sense strand
acagaaggacaucuaccua

SEQ ID NO: 1817395 - RNA, 19 nt, Homo sapiens
  misc_RNA (1)...(19): siRNA sense strand
uccaguaccugagacagaa

SEQ ID NO: 1817396 - RNA, 19 nt, Homo sapiens
  misc_RNA (1)...(19): siRNA sense strand
gggccaccuucgcuagcua

SEQ ID NO: 1817397 - RNA, 19 nt, Homo sapiens
  misc_RNA (1)...(19): siRNA sense strand
gcugugggcaggugcauuc

SEQ ID NO: 1817398 - RNA, 19 nt, Homo sapiens
  misc_RNA (1)...(19): siRNA sense strand
guugaugugugugcuaaag

SEQ ID NO: 1817399 - RNA, 19 nt, Homo sapiens
  misc_RNA (1)...(19): siRNA sense strand
gugggcaggugcauucuac

SEQ ID NO: 1817400 - RNA, 19 nt, Homo sapiens
  misc_RNA (1)...(19): siRNA sense strand
agacgugguucuguugugu

SEQ ID NO: 1817401 - RNA, 19 nt, Homo sapiens
  misc_RNA (1)...(19): siRNA sense strand
uugacuacgugcuuuacaa

SEQ ID NO: 1817402 - RNA, 19 nt, Homo sapiens
  misc_RNA (1)...(19): siRNA sense strand
ucaugaugccuaucuugaa

SEQ ID NO: 1817403 - RNA, 19 nt, Homo sapiens
  misc_RNA (1)...(19): siRNA sense strand
cagaagcugucaccuaccu

SEQ ID NO: 1817404 - RNA, 19 nt, Homo sapiens
  misc_RNA (1)...(19): siRNA sense strand
ggucaauggcuuauauagg

SEQ ID NO: 1817405 - RNA, 19 nt, Homo sapiens
  misc_RNA (1)...(19): siRNA sense strand
ccguugaugugugugcuaa

SEQ ID NO: 1817406 - RNA, 19 nt, Homo sapiens
  misc_RNA (1)...(19): siRNA sense strand
acaggaggucaauggcuua

SEQ ID NO: 1817407 - RNA, 19 nt, Homo sapiens
  misc_RNA (1)...(19): siRNA sense strand
ggcaguggccucugugucu

SEQ ID NO: 1817408 - RNA, 19 nt, Homo sapiens
  misc_RNA (1)...(19): siRNA sense strand
agaggucgccguugaugug

SEQ ID NO: 1817409 - RNA, 19 nt, Homo sapiens
  misc_RNA (1)...(19): siRNA sense strand
cuucaagggcucugaggaa

SEQ ID NO: 1817410 - RNA, 19 nt, Homo sapiens
  misc_RNA (1)...(19): siRNA sense strand
cgcauugacuacgugcuuu

SEQ ID NO: 1817411 - RNA, 19 nt, Homo sapiens
  misc_RNA (1)...(19): siRNA sense strand
ccaucuccaugccgaauac

SEQ ID NO: 1817412 - RNA, 19 nt, Homo sapiens
  misc_RNA (1)...(19): siRNA sense strand
gagaggucgccguugaugu

SEQ ID NO: 1817413 - RNA, 19 nt, Homo sapiens
  misc_RNA (1)...(19): siRNA sense strand
gauggcuacucuguuugug

SEQ ID NO: 1817414 - RNA, 19 nt, Homo sapiens
  misc_RNA (1)...(19): siRNA sense strand
guguggagaccucaacaug

SEQ ID NO: 1817415 - RNA, 19 nt, Homo sapiens
  misc_RNA (1)...(19): siRNA sense strand
ucaacaugcacccagaaga

SEQ ID NO: 1817416 - RNA, 19 nt, Homo sapiens
  misc_RNA (1)...(19): siRNA sense strand
ugaagccauuucccuuugg

SEQ ID NO: 1817417 - RNA, 19 nt, Homo sapiens
  misc_RNA (1)...(19): siRNA sense strand
ucuugaaacucgggacuuc

SEQ ID NO: 1817418 - RNA, 19 nt, Homo sapiens
  misc_RNA (1)...(19): siRNA sense strand
gaguggacagggcuucaug

SEQ ID NO: 1817419 - RNA, 19 nt, Homo sapiens
  misc_RNA (1)...(19): siRNA sense strand
ggaccaagcuggaugauga

SEQ ID NO: 1817420 - RNA, 19 nt, Homo sapiens
  misc_RNA (1)...(19): siRNA sense strand
ucaaagagauggagaagaa

SEQ ID NO: 1817421 - RNA, 19 nt, Homo sapiens
  misc_RNA (1)...(19): siRNA sense strand
gaugaugacuucaaagaga

SEQ ID NO: 1817422 - RNA, 19 nt, Homo sapiens
  misc_RNA (1)...(19): siRNA sense strand
gcaaggcgcuguacgacuu

SEQ ID NO: 1817423 - RNA, 19 nt, Homo sapiens
  misc_RNA (1)...(19): siRNA sense strand
caacuuuggugacgcauug

SEQ ID NO: 1817424 - RNA, 19 nt, Homo sapiens
  misc_RNA (1)...(19): siRNA sense strand
agaaagaccugaaggagau

SEQ ID NO: 1817425 - RNA, 19 nt, Homo sapiens
  misc_RNA (1)...(19): siRNA sense strand
gcaaggcggugacagaagu

SEQ ID NO: 1817426 - RNA, 19 nt, Homo sapiens
  misc_RNA (1)...(19): siRNA sense strand
gcccuaagcgggaguauaa

SEQ ID NO: 1817427 - RNA, 19 nt, Homo sapiens
  misc_RNA (1)...(19): siRNA sense strand
cgagccagcuggucaguga

SEQ ID NO: 1817428 - RNA, 19 nt, Homo sapiens
  misc_RNA (1)...(19): siRNA sense strand
ccaaccagaucgaugagaa

SEQ ID NO: 1817429 - RNA, 19 nt, Homo sapiens
  misc_RNA (1)...(19): siRNA sense strand
caagcuggaugaugacuuc

SEQ ID NO: 1817430 - RNA, 19 nt, Homo sapiens
  misc_RNA (1)...(19): siRNA sense strand
gcuggaugaugacuucaaa

SEQ ID NO: 1817431 - RNA, 19 nt, Homo sapiens
  misc_RNA (1)...(19): siRNA sense strand
ccaaggagguggcagaaac

SEQ ID NO: 1817432 - RNA, 19 nt, Homo sapiens
  misc_RNA (1)...(19): siRNA sense strand
gggcuaagcugaccaugcu

SEQ ID NO: 1817433 - RNA, 19 nt, Homo sapiens
  misc_RNA (1)...(19): siRNA sense strand
uggacgagcuggcggagaa

SEQ ID NO: 1817434 - RNA, 19 nt, Homo sapiens
  misc_RNA (1)...(19): siRNA sense strand
ggacuuugacuacaagaag

SEQ ID NO: 1817435 - RNA, 19 nt, Homo sapiens
  misc_RNA (1)...(19): siRNA sense strand
gacuuugacuacaagaaga

SEQ ID NO: 1817436 - RNA, 19 nt, Homo sapiens
  misc_RNA (1)...(19): siRNA sense strand
ugaccaaccagaucgauga

SEQ ID NO: 1817437 - RNA, 19 nt, Homo sapiens
  misc_RNA (1)...(19): siRNA sense strand
gagaagaagguggauguca

SEQ ID NO: 1817438 - RNA, 19 nt, Homo sapiens
  misc_RNA (1)...(19): siRNA sense strand
gaaggacucccuggacauc

SEQ ID NO: 1817439 - RNA, 19 nt, Homo sapiens
  misc_RNA (1)...(19): siRNA sense strand
acaucgaggucaagcagaa

SEQ ID NO: 1817440 - RNA, 19 nt, Homo sapiens
  misc_RNA (1)...(19): siRNA sense strand
ggucaagcagaacuucauu

SEQ ID NO: 1817441 - RNA, 19 nt, Homo sapiens
  misc_RNA (1)...(19): siRNA sense strand
gcgagaaagaccugaagga

SEQ ID NO: 1817442 - RNA, 19 nt, Homo sapiens
  misc_RNA (1)...(19): siRNA sense strand
ccagcaaggcggugacaga

SEQ ID NO: 1817443 - RNA, 19 nt, Homo sapiens
  misc_RNA (1)...(19): siRNA sense strand
cagcaaggcggugacagaa

SEQ ID NO: 1817444 - RNA, 19 nt, Homo sapiens
  misc_RNA (1)...(19): siRNA sense strand
uggaugaugacuucaaaga

SEQ ID NO: 1817445 - RNA, 19 nt, Homo sapiens
  misc_RNA (1)...(19): siRNA sense strand
gccuggacuuugacuacaa

SEQ ID NO: 1817446 - RNA, 19 nt, Homo sapiens
  misc_RNA (1)...(19): siRNA sense strand
uccagaaccugugcgagaa

SEQ ID NO: 1817447 - RNA, 19 nt, Homo sapiens
  misc_RNA (1)...(19): siRNA sense strand
ccagaaccugugcgagaaa

SEQ ID NO: 1817448 - RNA, 19 nt, Homo sapiens
  misc_RNA (1)...(19): siRNA sense strand
augcacagcuggacuacca

SEQ ID NO: 1817449 - RNA, 19 nt, Homo sapiens
  misc_RNA (1)...(19): siRNA sense strand
ggaugaugacuucaaagag

SEQ ID NO: 1817450 - RNA, 19 nt, Homo sapiens
  misc_RNA (1)...(19): siRNA sense strand
ucaucacgcugaccaacca

SEQ ID NO: 1817451 - RNA, 19 nt, Homo sapiens
  misc_RNA (1)...(19): siRNA sense strand
ggagcccuuugaccuugga

SEQ ID NO: 1817452 - RNA, 19 nt, Homo sapiens
  misc_RNA (1)...(19): siRNA sense strand
cagaaaccagcaugcacaa

SEQ ID NO: 1817453 - RNA, 19 nt, Homo sapiens
  misc_RNA (1)...(19): siRNA sense strand
uuuccgaucuuccgacaag

SEQ ID NO: 1817454 - RNA, 19 nt, Homo sapiens
  misc_RNA (1)...(19): siRNA sense strand
gcugcaaggcgcuguacga

SEQ ID NO: 1817455 - RNA, 19 nt, Homo sapiens
  misc_RNA (1)...(19): siRNA sense strand
gaugagggaugguaccuua

SEQ ID NO: 1817456 - RNA, 19 nt, Homo sapiens
  misc_RNA (1)...(19): siRNA sense strand
gcuuacagcuggagugaaa

SEQ ID NO: 1817457 - RNA, 19 nt, Homo sapiens
  misc_RNA (1)...(19): siRNA sense strand
caaauuccaucacagucua

SEQ ID NO: 1817458 - RNA, 19 nt, Homo sapiens
  misc_RNA (1)...(19): siRNA sense strand
ggucuccacuccagaaauu

SEQ ID NO: 1817459 - RNA, 19 nt, Homo sapiens
  misc_RNA (1)...(19): siRNA sense strand
agaagaaacuugacuccuu

SEQ ID NO: 1817460 - RNA, 19 nt, Homo sapiens
  misc_RNA (1)...(19): siRNA sense strand
ggagaucgcuacaaguuuu

SEQ ID NO: 1817461 - RNA, 19 nt, Homo sapiens
  misc_RNA (1)...(19): siRNA sense strand
ccugacauaugaaaggaua

SEQ ID NO: 1817462 - RNA, 19 nt, Homo sapiens
  misc_RNA (1)...(19): siRNA sense strand
gagggaugguaccuuauga

SEQ ID NO: 1817463 - RNA, 19 nt, Homo sapiens
  misc_RNA (1)...(19): siRNA sense strand
gaagcaggcccuccacguu

SEQ ID NO: 1817464 - RNA, 19 nt, Homo sapiens
  misc_RNA (1)...(19): siRNA sense strand
gaacagugucgagaacaaa

SEQ ID NO: 1817465 - RNA, 19 nt, Homo sapiens
  misc_RNA (1)...(19): siRNA sense strand
gaugaacugcccaaagauu

SEQ ID NO: 1817466 - RNA, 19 nt, Homo sapiens
  misc_RNA (1)...(19): siRNA sense strand
gaaaccagguccucuucag

SEQ ID NO: 1817467 - RNA, 19 nt, Homo sapiens
  misc_RNA (1)...(19): siRNA sense strand
uaaacaagacccaggagaa

SEQ ID NO: 1817468 - RNA, 19 nt, Homo sapiens
  misc_RNA (1)...(19): siRNA sense strand
ggagaacagugucgagaac

SEQ ID NO: 1817469 - RNA, 19 nt, Homo sapiens
  misc_RNA (1)...(19): siRNA sense strand
gaacaaaagcauccacauu

SEQ ID NO: 1817470 - RNA, 19 nt, Homo sapiens
  misc_RNA (1)...(19): siRNA sense strand
caaagauucuccggcaguu

SEQ ID NO: 1817471 - RNA, 19 nt, Homo sapiens
  misc_RNA (1)...(19): siRNA sense strand
auacuacaguugagaagaa

SEQ ID NO: 1817472 - RNA, 19 nt, Homo sapiens
  misc_RNA (1)...(19): siRNA sense strand
augaugaacugcccaaaga

SEQ ID NO: 1817473 - RNA, 19 nt, Homo sapiens
  misc_RNA (1)...(19): siRNA sense strand
aagcaggcccuccacguua

SEQ ID NO: 1817474 - RNA, 19 nt, Homo sapiens
  misc_RNA (1)...(19): siRNA sense strand
gagguaaaacgaaccauua

SEQ ID NO: 1817475 - RNA, 19 nt, Homo sapiens
  misc_RNA (1)...(19): siRNA sense strand
caucauggugguaauacua

SEQ ID NO: 1817476 - RNA, 19 nt, Homo sapiens
  misc_RNA (1)...(19): siRNA sense strand
uaggagaucgcuacaaguu

SEQ ID NO: 1817477 - RNA, 19 nt, Homo sapiens
  misc_RNA (1)...(19): siRNA sense strand
guaauacuacaguugagaa

SEQ ID NO: 1817478 - RNA, 19 nt, Homo sapiens
  misc_RNA (1)...(19): siRNA sense strand
ucuaggagaucgcuacaag

SEQ ID NO: 1817479 - RNA, 19 nt, Homo sapiens
  misc_RNA (1)...(19): siRNA sense strand
aaacaaauuccaucacagu

SEQ ID NO: 1817480 - RNA, 19 nt, Homo sapiens
  misc_RNA (1)...(19): siRNA sense strand
gcaggucuccacuccagaa

SEQ ID NO: 1817481 - RNA, 19 nt, Homo sapiens
  misc_RNA (1)...(19): siRNA sense strand
caaaaucacuggagaacag

SEQ ID NO: 1817482 - RNA, 19 nt, Homo sapiens
  misc_RNA (1)...(19): siRNA sense strand
ggauaaauaagagcaugaa

SEQ ID NO: 1817483 - RNA, 19 nt, Homo sapiens
  misc_RNA (1)...(19): siRNA sense strand
gcaacccuaucagcaacaa

SEQ ID NO: 1817484 - RNA, 19 nt, Homo sapiens
  misc_RNA (1)...(19): siRNA sense strand
agaacagugucgagaacaa

SEQ ID NO: 1817485 - RNA, 19 nt, Homo sapiens
  misc_RNA (1)...(19): siRNA sense strand
gcaacaauucccagaccuu

SEQ ID NO: 1817486 - RNA, 19 nt, Homo sapiens
  misc_RNA (1)...(19): siRNA sense strand
aguguaugcugggcuguua

SEQ ID NO: 1817487 - RNA, 19 nt, Homo sapiens
  misc_RNA (1)...(19): siRNA sense strand
ggaacaggugggcgcauga

SEQ ID NO: 1817488 - RNA, 19 nt, Homo sapiens
  misc_RNA (1)...(19): siRNA sense strand
caguugagaagaagaggua

SEQ ID NO: 1817489 - RNA, 19 nt, Homo sapiens
  misc_RNA (1)...(19): siRNA sense strand
gugguaauacuacaguuga

SEQ ID NO: 1817490 - RNA, 19 nt, Homo sapiens
  misc_RNA (1)...(19): siRNA sense strand
ccagaaaccagguccucuu

SEQ ID NO: 1817491 - RNA, 19 nt, Homo sapiens
  misc_RNA (1)...(19): siRNA sense strand
gcaguugggaagcaaagug

SEQ ID NO: 1817492 - RNA, 19 nt, Homo sapiens
  misc_RNA (1)...(19): siRNA sense strand
aacgggaccugcaccuuga

SEQ ID NO: 1817493 - RNA, 19 nt, Homo sapiens
  misc_RNA (1)...(19): siRNA sense strand
ccacugaacccagccaaca

SEQ ID NO: 1817494 - RNA, 19 nt, Homo sapiens
  misc_RNA (1)...(19): siRNA sense strand
gaacaggugggcgcaugau

SEQ ID NO: 1817495 - RNA, 19 nt, Homo sapiens
  misc_RNA (1)...(19): siRNA sense strand
gaagaagagguaaaacgaa

SEQ ID NO: 1817496 - RNA, 19 nt, Homo sapiens
  misc_RNA (1)...(19): siRNA sense strand
aauagugucucuugaucca

SEQ ID NO: 1817497 - RNA, 19 nt, Homo sapiens
  misc_RNA (1)...(19): siRNA sense strand
ggugguaauacuacaguug

SEQ ID NO: 1817498 - RNA, 19 nt, Homo sapiens
  misc_RNA (1)...(19): siRNA sense strand
ggacagaccccucagaaac

SEQ ID NO: 1817499 - RNA, 19 nt, Homo sapiens
  misc_RNA (1)...(19): siRNA sense strand
acaggugggcgcaugauga

SEQ ID NO: 1817500 - RNA, 19 nt, Homo sapiens
  misc_RNA (1)...(19): siRNA sense strand
gguaauacuacaguugaga

SEQ ID NO: 1817501 - RNA, 19 nt, Homo sapiens
  misc_RNA (1)...(19): siRNA sense strand
ugagcaacccuaucagcaa

SEQ ID NO: 1817502 - RNA, 19 nt, Homo sapiens
  misc_RNA (1)...(19): siRNA sense strand
caggugggcgcaugaugaa

SEQ ID NO: 1817503 - RNA, 19 nt, Homo sapiens
  misc_RNA (1)...(19): siRNA sense strand
cagaaaccagguccucuuc

SEQ ID NO: 1817504 - RNA, 19 nt, Homo sapiens
  misc_RNA (1)...(19): siRNA sense strand
aaccagguccucuucagaa

SEQ ID NO: 1817505 - RNA, 19 nt, Homo sapiens
  misc_RNA (1)...(19): siRNA sense strand
caaaauagugucucuugau

SEQ ID NO: 1817506 - RNA, 19 nt, Homo sapiens
  misc_RNA (1)...(19): siRNA sense strand
aaaccagguccucuucaga

SEQ ID NO: 1817507 - RNA, 19 nt, Homo sapiens
  misc_RNA (1)...(19): siRNA sense strand
ugagggaugguaccuuaug

SEQ ID NO: 1817508 - RNA, 19 nt, Homo sapiens
  misc_RNA (1)...(19): siRNA sense strand
aaaauagugucucuugauc

SEQ ID NO: 1817509 - RNA, 19 nt, Homo sapiens
  misc_RNA (1)...(19): siRNA sense strand
aaagcaggaaggaggauga

SEQ ID NO: 1817510 - RNA, 19 nt, Homo sapiens
  misc_RNA (1)...(19): siRNA sense strand
uacgaucuaugcccaaguc

SEQ ID NO: 1817511 - RNA, 19 nt, Homo sapiens
  misc_RNA (1)...(19): siRNA sense strand
gcaccgugagcaacccuau

SEQ ID NO: 1817512 - RNA, 19 nt, Homo sapiens
  misc_RNA (1)...(19): siRNA sense strand
ucuccacuccagaaauuaa

SEQ ID NO: 1817513 - RNA, 19 nt, Homo sapiens
  misc_RNA (1)...(19): siRNA sense strand
gacccuugcaccaccauau

SEQ ID NO: 1817514 - RNA, 19 nt, Homo sapiens
  misc_RNA (1)...(19): siRNA sense strand
caucacagucuaugcuagu

SEQ ID NO: 1817515 - RNA, 19 nt, Homo sapiens
  misc_RNA (1)...(19): siRNA sense strand
gagaacagugucgagaaca

SEQ ID NO: 1817516 - RNA, 19 nt, Homo sapiens
  misc_RNA (1)...(19): siRNA sense strand
guugagaagaagagguaaa

SEQ ID NO: 1817517 - RNA, 19 nt, Homo sapiens
  misc_RNA (1)...(19): siRNA sense strand
gggaccauguggcuuacag

SEQ ID NO: 1817518 - RNA, 19 nt, Homo sapiens
  misc_RNA (1)...(19): siRNA sense strand
aaacaagacccaggagaac

SEQ ID NO: 1817519 - RNA, 19 nt, Homo sapiens
  misc_RNA (1)...(19): siRNA sense strand
cuacagcgauuaagaagaa

SEQ ID NO: 1817520 - RNA, 19 nt, Homo sapiens
  misc_RNA (1)...(19): siRNA sense strand
ggugauccguguauauauu

SEQ ID NO: 1817521 - RNA, 19 nt, Homo sapiens
  misc_RNA (1)...(19): siRNA sense strand
gaagaaacaacaagaugug

SEQ ID NO: 1817522 - RNA, 19 nt, Homo sapiens
  misc_RNA (1)...(19): siRNA sense strand
gagaaaauguaccugaaaa

SEQ ID NO: 1817523 - RNA, 19 nt, Homo sapiens
  misc_RNA (1)...(19): siRNA sense strand
aagcagaagugcaagcaaa

SEQ ID NO: 1817524 - RNA, 19 nt, Homo sapiens
  misc_RNA (1)...(19): siRNA sense strand
guguauauauugcaucuuc

SEQ ID NO: 1817525 - RNA, 19 nt, Homo sapiens
  misc_RNA (1)...(19): siRNA sense strand
gaaacaacaagaugugcuu

SEQ ID NO: 1817526 - RNA, 19 nt, Homo sapiens
  misc_RNA (1)...(19): siRNA sense strand
gagaaucggaaguggauga

SEQ ID NO: 1817527 - RNA, 19 nt, Homo sapiens
  misc_RNA (1)...(19): siRNA sense strand
ugcaguguaugccuucuua

SEQ ID NO: 1817528 - RNA, 19 nt, Homo sapiens
  misc_RNA (1)...(19): siRNA sense strand
ggaaguggaugagagaaaa

SEQ ID NO: 1817529 - RNA, 19 nt, Homo sapiens
  misc_RNA (1)...(19): siRNA sense strand
gcucuacagcgauuaagaa

SEQ ID NO: 1817530 - RNA, 19 nt, Homo sapiens
  misc_RNA (1)...(19): siRNA sense strand
aaaggaagcagaagugcaa

SEQ ID NO: 1817531 - RNA, 19 nt, Homo sapiens
  misc_RNA (1)...(19): siRNA sense strand
gagagaaaauguaccugaa

SEQ ID NO: 1817532 - RNA, 19 nt, Homo sapiens
  misc_RNA (1)...(19): siRNA sense strand
ccuagaagccaacaaaaua

SEQ ID NO: 1817533 - RNA, 19 nt, Homo sapiens
  misc_RNA (1)...(19): siRNA sense strand
caccucagauuuucaauga

SEQ ID NO: 1817534 - RNA, 19 nt, Homo sapiens
  misc_RNA (1)...(19): siRNA sense strand
gagaaaauaaugcagugua

SEQ ID NO: 1817535 - RNA, 19 nt, Homo sapiens
  misc_RNA (1)...(19): siRNA sense strand
agaagaaacaacaagaugu

SEQ ID NO: 1817536 - RNA, 19 nt, Homo sapiens
  misc_RNA (1)...(19): siRNA sense strand
gugcuugguuuccuagaag

SEQ ID NO: 1817537 - RNA, 19 nt, Homo sapiens
  misc_RNA (1)...(19): siRNA sense strand
aagaagaaacaacaagaug

SEQ ID NO: 1817538 - RNA, 19 nt, Homo sapiens
  misc_RNA (1)...(19): siRNA sense strand
cgauuaagaagaaacaaca

SEQ ID NO: 1817539 - RNA, 19 nt, Homo sapiens
  misc_RNA (1)...(19): siRNA sense strand
gaagcagaagugcaagcaa

SEQ ID NO: 1817540 - RNA, 19 nt, Homo sapiens
  misc_RNA (1)...(19): siRNA sense strand
ggaagcagaagugcaagca

SEQ ID NO: 1817541 - RNA, 19 nt, Homo sapiens
  misc_RNA (1)...(19): siRNA sense strand
guucaaaggaagcagaagu

SEQ ID NO: 1817542 - RNA, 19 nt, Homo sapiens
  misc_RNA (1)...(19): siRNA sense strand
gugauccguguauauauug

SEQ ID NO: 1817543 - RNA, 19 nt, Homo sapiens
  misc_RNA (1)...(19): siRNA sense strand
agaugugcuugguuuccua

SEQ ID NO: 1817544 - RNA, 19 nt, Homo sapiens
  misc_RNA (1)...(19): siRNA sense strand
ucaaugaaagccaguaucg

SEQ ID NO: 1817545 - RNA, 19 nt, Homo sapiens
  misc_RNA (1)...(19): siRNA sense strand
cggaaguggaugagagaaa

SEQ ID NO: 1817546 - RNA, 19 nt, Homo sapiens
  misc_RNA (1)...(19): siRNA sense strand
gcaucuuccucuggcucua

SEQ ID NO: 1817547 - RNA, 19 nt, Homo sapiens
  misc_RNA (1)...(19): siRNA sense strand
ugugcuugguuuccuagaa

SEQ ID NO: 1817548 - RNA, 19 nt, Homo sapiens
  misc_RNA (1)...(19): siRNA sense strand
aagagaaucggaaguggau

SEQ ID NO: 1817549 - RNA, 19 nt, Homo sapiens
  misc_RNA (1)...(19): siRNA sense strand
ggacauaguuguacugaaa

SEQ ID NO: 1817550 - RNA, 19 nt, Homo sapiens
  misc_RNA (1)...(19): siRNA sense strand
gcacagagauucacuuguu

SEQ ID NO: 1817551 - RNA, 19 nt, Homo sapiens
  misc_RNA (1)...(19): siRNA sense strand
gcaaugguguucagacuua

SEQ ID NO: 1817552 - RNA, 19 nt, Homo sapiens
  misc_RNA (1)...(19): siRNA sense strand
ggaaggagcugauuaugug

SEQ ID NO: 1817553 - RNA, 19 nt, Homo sapiens
  misc_RNA (1)...(19): siRNA sense strand
aaucaaaccugcaguauaa

SEQ ID NO: 1817554 - RNA, 19 nt, Homo sapiens
  misc_RNA (1)...(19): siRNA sense strand
gauacucaaugaccaauua

SEQ ID NO: 1817555 - RNA, 19 nt, Homo sapiens
  misc_RNA (1)...(19): siRNA sense strand
gcagaaagcauaaaugaaa

SEQ ID NO: 1817556 - RNA, 19 nt, Homo sapiens
  misc_RNA (1)...(19): siRNA sense strand
aaacaaaucuagagaguug

SEQ ID NO: 1817557 - RNA, 19 nt, Homo sapiens
  misc_RNA (1)...(19): siRNA sense strand
gccaauaucuggauucauu

SEQ ID NO: 1817558 - RNA, 19 nt, Homo sapiens
  misc_RNA (1)...(19): siRNA sense strand
gauaucagaugucgauuga

SEQ ID NO: 1817559 - RNA, 19 nt, Homo sapiens
  misc_RNA (1)...(19): siRNA sense strand
ggucacaacuaaacacuaa

SEQ ID NO: 1817560 - RNA, 19 nt, Homo sapiens
  misc_RNA (1)...(19): siRNA sense strand
gaucagcaguuccauaguu

SEQ ID NO: 1817561 - RNA, 19 nt, Homo sapiens
  misc_RNA (1)...(19): siRNA sense strand
gaagaugccugugaagaug

SEQ ID NO: 1817562 - RNA, 19 nt, Homo sapiens
  misc_RNA (1)...(19): siRNA sense strand
gaauaaugauggaagaaug

SEQ ID NO: 1817563 - RNA, 19 nt, Homo sapiens
  misc_RNA (1)...(19): siRNA sense strand
ggccauaacuguagaggaa

SEQ ID NO: 1817564 - RNA, 19 nt, Homo sapiens
  misc_RNA (1)...(19): siRNA sense strand
gaacaagaacgaaagauca

SEQ ID NO: 1817565 - RNA, 19 nt, Homo sapiens
  misc_RNA (1)...(19): siRNA sense strand
ggcaagaacuacuaaauca

SEQ ID NO: 1817566 - RNA, 19 nt, Homo sapiens
  misc_RNA (1)...(19): siRNA sense strand
uagcugacaugaauaauga

SEQ ID NO: 1817567 - RNA, 19 nt, Homo sapiens
  misc_RNA (1)...(19): siRNA sense strand
gagcagaaagcauaaauga

SEQ ID NO: 1817568 - RNA, 19 nt, Homo sapiens
  misc_RNA (1)...(19): siRNA sense strand
gauacccacugaucauuaa

SEQ ID NO: 1817569 - RNA, 19 nt, Homo sapiens
  misc_RNA (1)...(19): siRNA sense strand
guaacaagauacccacuga

SEQ ID NO: 1817570 - RNA, 19 nt, Homo sapiens
  misc_RNA (1)...(19): siRNA sense strand
gcacagauaugggcacuag

SEQ ID NO: 1817571 - RNA, 19 nt, Homo sapiens
  misc_RNA (1)...(19): siRNA sense strand
gaaaggcaacgacaacuug

SEQ ID NO: 1817572 - RNA, 19 nt, Homo sapiens
  misc_RNA (1)...(19): siRNA sense strand
ggaugccacucucuaguuu

SEQ ID NO: 1817573 - RNA, 19 nt, Homo sapiens
  misc_RNA (1)...(19): siRNA sense strand
gaaaggagaagucaaugga

SEQ ID NO: 1817574 - RNA, 19 nt, Homo sapiens
  misc_RNA (1)...(19): siRNA sense strand
gcaaaugcuuggaagacuu

SEQ ID NO: 1817575 - RNA, 19 nt, Homo sapiens
  misc_RNA (1)...(19): siRNA sense strand
gaacgaaagaucauagaau

SEQ ID NO: 1817576 - RNA, 19 nt, Homo sapiens
  misc_RNA (1)...(19): siRNA sense strand
gaaggaacuaagagaaaua

SEQ ID NO: 1817577 - RNA, 19 nt, Homo sapiens
  misc_RNA (1)...(19): siRNA sense strand
ggagacauagucaugguua

SEQ ID NO: 1817578 - RNA, 19 nt, Homo sapiens
  misc_RNA (1)...(19): siRNA sense strand
caagacauguggugguuug

SEQ ID NO: 1817579 - RNA, 19 nt, Homo sapiens
  misc_RNA (1)...(19): siRNA sense strand
ugaucaagcuagaaacuuu

SEQ ID NO: 1817580 - RNA, 19 nt, Homo sapiens
  misc_RNA (1)...(19): siRNA sense strand
gggagaagaugccugugaa

SEQ ID NO: 1817581 - RNA, 19 nt, Homo sapiens
  misc_RNA (1)...(19): siRNA sense strand
gaaagaaagcgacaaggau

SEQ ID NO: 1817582 - RNA, 19 nt, Homo sapiens
  misc_RNA (1)...(19): siRNA sense strand
caacagagccaccuaaguc

SEQ ID NO: 1817583 - RNA, 19 nt, Homo sapiens
  misc_RNA (1)...(19): siRNA sense strand
gaaauugcccagguuauug

SEQ ID NO: 1817584 - RNA, 19 nt, Homo sapiens
  misc_RNA (1)...(19): siRNA sense strand
gguccagggucacaacuaa

SEQ ID NO: 1817585 - RNA, 19 nt, Homo sapiens
  misc_RNA (1)...(19): siRNA sense strand
gaacuaagagaaauacaca

SEQ ID NO: 1817586 - RNA, 19 nt, Homo sapiens
  misc_RNA (1)...(19): siRNA sense strand
aaagaaggauggcgaggaa

SEQ ID NO: 1817587 - RNA, 19 nt, Homo sapiens
  misc_RNA (1)...(19): siRNA sense strand
gaggagaacuaugugaaug

SEQ ID NO: 1817588 - RNA, 19 nt, Homo sapiens
  misc_RNA (1)...(19): siRNA sense strand
aaagaaagcgacaaggaua

SEQ ID NO: 1817589 - RNA, 19 nt, Homo sapiens
  misc_RNA (1)...(19): siRNA sense strand
caucaaggcugaaauacag

SEQ ID NO: 1817590 - RNA, 19 nt, Homo sapiens
  misc_RNA (1)...(19): siRNA sense strand
aaacuggccuugcgugaga

SEQ ID NO: 1817591 - RNA, 19 nt, Homo sapiens
  misc_RNA (1)...(19): siRNA sense strand
gaacaagaggacauaguug

SEQ ID NO: 1817592 - RNA, 19 nt, Homo sapiens
  misc_RNA (1)...(19): siRNA sense strand
ggcacuagcugacaugaau

SEQ ID NO: 1817593 - RNA, 19 nt, Homo sapiens
  misc_RNA (1)...(19): siRNA sense strand
caagaaaacuccacgaaga

SEQ ID NO: 1817594 - RNA, 19 nt, Homo sapiens
  misc_RNA (1)...(19): siRNA sense strand
gagauucacuuguuacacu

SEQ ID NO: 1817595 - RNA, 19 nt, Homo sapiens
  misc_RNA (1)...(19): siRNA sense strand
gaggagaggaggaaagaaa

SEQ ID NO: 1817596 - RNA, 19 nt, Homo sapiens
  misc_RNA (1)...(19): siRNA sense strand
aagggaaacuucaagauau

SEQ ID NO: 1817597 - RNA, 19 nt, Homo sapiens
  misc_RNA (1)...(19): siRNA sense strand
caacaggcauuggaagguu

SEQ ID NO: 1817598 - RNA, 19 nt, Homo sapiens
  misc_RNA (1)...(19): siRNA sense strand
guucccagcuaauuaugua

SEQ ID NO: 1817599 - RNA, 19 nt, Homo sapiens
  misc_RNA (1)...(19): siRNA sense strand
caacaacuccagaagcaaa

SEQ ID NO: 1817600 - RNA, 19 nt, Homo sapiens
  misc_RNA (1)...(19): siRNA sense strand
gcagaacaguuugcacaga

SEQ ID NO: 1817601 - RNA, 19 nt, Homo sapiens
  misc_RNA (1)...(19): siRNA sense strand
caaaugcuuggaagacuua

SEQ ID NO: 1817602 - RNA, 19 nt, Homo sapiens
  misc_RNA (1)...(19): siRNA sense strand
gcacaaacaaaucuagaga

SEQ ID NO: 1817603 - RNA, 19 nt, Homo sapiens
  misc_RNA (1)...(19): siRNA sense strand
gcagccacauugccaaaga

SEQ ID NO: 1817604 - RNA, 19 nt, Homo sapiens
  misc_RNA (1)...(19): siRNA sense strand
cuucugaacuuuacauaga

SEQ ID NO: 1817605 - RNA, 19 nt, Homo sapiens
  misc_RNA (1)...(19): siRNA sense strand
gggaauggguggaugaaag

SEQ ID NO: 1817606 - RNA, 19 nt, Homo sapiens
  misc_RNA (1)...(19): siRNA sense strand
gaaagaacaagaacgaaag

SEQ ID NO: 1817607 - RNA, 19 nt, Homo sapiens
  misc_RNA (1)...(19): siRNA sense strand
gaaacagaaagaacaagaa

SEQ ID NO: 1817608 - RNA, 19 nt, Homo sapiens
  misc_RNA (1)...(19): siRNA sense strand
gaaacuagaucaaaacuac

SEQ ID NO: 1817609 - RNA, 19 nt, Homo sapiens
  misc_RNA (1)...(19): siRNA sense strand
ggagaaagaaacuagauca

SEQ ID NO: 1817610 - RNA, 19 nt, Homo sapiens
  misc_RNA (1)...(19): siRNA sense strand
cacagagauucacuuguua

SEQ ID NO: 1817611 - RNA, 19 nt, Homo sapiens
  misc_RNA (1)...(19): siRNA sense strand
gcuucaauauggaaucuuu

SEQ ID NO: 1817612 - RNA, 19 nt, Homo sapiens
  misc_RNA (1)...(19): siRNA sense strand
gcugaaauacaggcaauua

SEQ ID NO: 1817613 - RNA, 19 nt, Homo sapiens
  misc_RNA (1)...(19): siRNA sense strand
cgacaaggccggagucuuc

SEQ ID NO: 1817614 - RNA, 19 nt, Homo sapiens
  misc_RNA (1)...(19): siRNA sense strand
cagaagccaugaugaaauc

SEQ ID NO: 1817615 - RNA, 19 nt, Homo sapiens
  misc_RNA (1)...(19): siRNA sense strand
gaagaugaacaacaacaau

SEQ ID NO: 1817616 - RNA, 19 nt, Homo sapiens
  misc_RNA (1)...(19): siRNA sense strand
gaccaguucucaccagaug

SEQ ID NO: 1817617 - RNA, 19 nt, Homo sapiens
  misc_RNA (1)...(19): siRNA sense strand
gaaauggauccucggugua

SEQ ID NO: 1817618 - RNA, 19 nt, Homo sapiens
  misc_RNA (1)...(19): siRNA sense strand
gcaguuccauaguuuaaag

SEQ ID NO: 1817619 - RNA, 19 nt, Homo sapiens
  misc_RNA (1)...(19): siRNA sense strand
gaaauugagagcacaaaca

SEQ ID NO: 1817620 - RNA, 19 nt, Homo sapiens
  misc_RNA (1)...(19): siRNA sense strand
caaagaacaagaggacaua

SEQ ID NO: 1817621 - RNA, 19 nt, Homo sapiens
  misc_RNA (1)...(19): siRNA sense strand
ugacauugaucaagaugga

SEQ ID NO: 1817622 - RNA, 19 nt, Homo sapiens
  misc_RNA (1)...(19): siRNA sense strand
caagauaucagaugucgau

SEQ ID NO: 1817623 - RNA, 19 nt, Homo sapiens
  misc_RNA (1)...(19): siRNA sense strand
uuauugccauguacacuua

SEQ ID NO: 1817624 - RNA, 19 nt, Homo sapiens
  misc_RNA (1)...(19): siRNA sense strand
uuacaggaaucucagcaaa

SEQ ID NO: 1817625 - RNA, 19 nt, Homo sapiens
  misc_RNA (1)...(19): siRNA sense strand
caauauggaaucuuucuga

SEQ ID NO: 1817626 - RNA, 19 nt, Homo sapiens
  misc_RNA (1)...(19): siRNA sense strand
gcuuggaccugcaguuguu

SEQ ID NO: 1817627 - RNA, 19 nt, Homo sapiens
  misc_RNA (1)...(19): siRNA sense strand
gaacaacaaggagcuguau

SEQ ID NO: 1817628 - RNA, 19 nt, Homo sapiens
  misc_RNA (1)...(19): siRNA sense strand
gagacauagucaugguuaa

SEQ ID NO: 1817629 - RNA, 19 nt, Homo sapiens
  misc_RNA (1)...(19): siRNA sense strand
gagaccaacuggaugaagu

SEQ ID NO: 1817630 - RNA, 19 nt, Homo sapiens
  misc_RNA (1)...(19): siRNA sense strand
gucauaagcucaacaucug

SEQ ID NO: 1817631 - RNA, 19 nt, Homo sapiens
  misc_RNA (1)...(19): siRNA sense strand
gaccugcaguuguuugaug

SEQ ID NO: 1817632 - RNA, 19 nt, Homo sapiens
  misc_RNA (1)...(19): siRNA sense strand
gaagguugauggugaacgu

SEQ ID NO: 1817633 - RNA, 19 nt, Homo sapiens
  misc_RNA (1)...(19): siRNA sense strand
gcaaacaggaagcacaaga

SEQ ID NO: 1817634 - RNA, 19 nt, Homo sapiens
  misc_RNA (1)...(19): siRNA sense strand
ugaaggaacuaagagaaau

SEQ ID NO: 1817635 - RNA, 19 nt, Homo sapiens
  misc_RNA (1)...(19): siRNA sense strand
uggaugaaguggagaaaga

SEQ ID NO: 1817636 - RNA, 19 nt, Homo sapiens
  misc_RNA (1)...(19): siRNA sense strand
acaggaaucucagcaaaug

SEQ ID NO: 1817637 - RNA, 19 nt, Homo sapiens
  misc_RNA (1)...(19): siRNA sense strand
ugacaugaauaaugaugga

SEQ ID NO: 1817638 - RNA, 19 nt, Homo sapiens
  misc_RNA (1)...(19): siRNA sense strand
gaaagaccagggcuccaaa

SEQ ID NO: 1817639 - RNA, 19 nt, Homo sapiens
  misc_RNA (1)...(19): siRNA sense strand
ccaaaucaaaccugcagua

SEQ ID NO: 1817640 - RNA, 19 nt, Homo sapiens
  misc_RNA (1)...(19): siRNA sense strand
cagcaacaauuacaggaau

SEQ ID NO: 1817641 - RNA, 19 nt, Homo sapiens
  misc_RNA (1)...(19): siRNA sense strand
ucuagagaguugagaauug

SEQ ID NO: 1817642 - RNA, 19 nt, Homo sapiens
  misc_RNA (1)...(19): siRNA sense strand
acaaacaaaucuagagagu

SEQ ID NO: 1817643 - RNA, 19 nt, Homo sapiens
  misc_RNA (1)...(19): siRNA sense strand
ccuguaacguuugaagaua

SEQ ID NO: 1817644 - RNA, 19 nt, Homo sapiens
  misc_RNA (1)...(19): siRNA sense strand
cuaaaugagguucuaguaa

SEQ ID NO: 1817645 - RNA, 19 nt, Homo sapiens
  misc_RNA (1)...(19): siRNA sense strand
gggagaaggagaacucuga

SEQ ID NO: 1817646 - RNA, 19 nt, Homo sapiens
  misc_RNA (1)...(19): siRNA sense strand
agacuuacaucucuuggau

SEQ ID NO: 1817647 - RNA, 19 nt, Homo sapiens
  misc_RNA (1)...(19): siRNA sense strand
ucaauaaucagcugaagga

SEQ ID NO: 1817648 - RNA, 19 nt, Homo sapiens
  misc_RNA (1)...(19): siRNA sense strand
ggagaggaggaaagaaauu

SEQ ID NO: 1817649 - RNA, 19 nt, Homo sapiens
  misc_RNA (1)...(19): siRNA sense strand
ggaaguugauucacucuaa

SEQ ID NO: 1817650 - RNA, 19 nt, Homo sapiens
  misc_RNA (1)...(19): siRNA sense strand
gaaguuagaagaugaguuc

SEQ ID NO: 1817651 - RNA, 19 nt, Homo sapiens
  misc_RNA (1)...(19): siRNA sense strand
ccaaguaucuucagcucaa

SEQ ID NO: 1817652 - RNA, 19 nt, Homo sapiens
  misc_RNA (1)...(19): siRNA sense strand
ggacacagaaagcaaguuu

SEQ ID NO: 1817653 - RNA, 19 nt, Homo sapiens
  misc_RNA (1)...(19): siRNA sense strand
agaagaaguuagaagauga

SEQ ID NO: 1817654 - RNA, 19 nt, Homo sapiens
  misc_RNA (1)...(19): siRNA sense strand
aaagcaaguuucugaaguu

SEQ ID NO: 1817655 - RNA, 19 nt, Homo sapiens
  misc_RNA (1)...(19): siRNA sense strand
gcaaguuucugaaguuggu

SEQ ID NO: 1817656 - RNA, 19 nt, Homo sapiens
  misc_RNA (1)...(19): siRNA sense strand
gaugguagccgggaaguug

SEQ ID NO: 1817657 - RNA, 19 nt, Homo sapiens
  misc_RNA (1)...(19): siRNA sense strand
gaaguugauucacucuaag

SEQ ID NO: 1817658 - RNA, 19 nt, Homo sapiens
  misc_RNA (1)...(19): siRNA sense strand
ucaagaagaaguuagaaga

SEQ ID NO: 1817659 - RNA, 19 nt, Homo sapiens
  misc_RNA (1)...(19): siRNA sense strand
aagaagaaguuagaagaug

SEQ ID NO: 1817660 - RNA, 19 nt, Homo sapiens
  misc_RNA (1)...(19): siRNA sense strand
gaggcuacaaguccaagua

SEQ ID NO: 1817661 - RNA, 19 nt, Homo sapiens
  misc_RNA (1)...(19): siRNA sense strand
caagaagaaguuagaagau

SEQ ID NO: 1817662 - RNA, 19 nt, Homo sapiens
  misc_RNA (1)...(19): siRNA sense strand
uugauucacucuaagaaga

SEQ ID NO: 1817663 - RNA, 19 nt, Homo sapiens
  misc_RNA (1)...(19): siRNA sense strand
gauucacucuaagaagaaa

SEQ ID NO: 1817664 - RNA, 19 nt, Homo sapiens
  misc_RNA (1)...(19): siRNA sense strand
ccaccggguucuuugaagu

SEQ ID NO: 1817665 - RNA, 19 nt, Homo sapiens
  misc_RNA (1)...(19): siRNA sense strand
cgccuuggcucagggcuaa

SEQ ID NO: 1817666 - RNA, 19 nt, Homo sapiens
  misc_RNA (1)...(19): siRNA sense strand
gaagaaguuagaagaugag

SEQ ID NO: 1817667 - RNA, 19 nt, Homo sapiens
  misc_RNA (1)...(19): siRNA sense strand
aagcaaguuucugaaguug

SEQ ID NO: 1817668 - RNA, 19 nt, Homo sapiens
  misc_RNA (1)...(19): siRNA sense strand
gcuacaaguccaaguaucu

SEQ ID NO: 1817669 - RNA, 19 nt, Homo sapiens
  misc_RNA (1)...(19): siRNA sense strand
gcucaagaagaaguuagaa

SEQ ID NO: 1817670 - RNA, 19 nt, Homo sapiens
  misc_RNA (1)...(19): siRNA sense strand
gccgggaaguugauucacu

SEQ ID NO: 1817671 - RNA, 19 nt, Homo sapiens
  misc_RNA (1)...(19): siRNA sense strand
cggguucuuugaagugaug

SEQ ID NO: 1817672 - RNA, 19 nt, Homo sapiens
  misc_RNA (1)...(19): siRNA sense strand
gggaaguugauucacucua

SEQ ID NO: 1817673 - RNA, 19 nt, Homo sapiens
  misc_RNA (1)...(19): siRNA sense strand
ccaggccaccggguucuuu

SEQ ID NO: 1817674 - RNA, 19 nt, Homo sapiens
  misc_RNA (1)...(19): siRNA sense strand
gaggaaggauuagaagaua

SEQ ID NO: 1817675 - RNA, 19 nt, Homo sapiens
  misc_RNA (1)...(19): siRNA sense strand
gaaauagacagacuuaaug

SEQ ID NO: 1817676 - RNA, 19 nt, Homo sapiens
  misc_RNA (1)...(19): siRNA sense strand
gaaaucaaauggaaaucug

SEQ ID NO: 1817677 - RNA, 19 nt, Homo sapiens
  misc_RNA (1)...(19): siRNA sense strand
ggaugaaggugaagaagau

SEQ ID NO: 1817678 - RNA, 19 nt, Homo sapiens
  misc_RNA (1)...(19): siRNA sense strand
cagaagaggucagaauuga

SEQ ID NO: 1817679 - RNA, 19 nt, Homo sapiens
  misc_RNA (1)...(19): siRNA sense strand
aagaggcacugcauuauuu

SEQ ID NO: 1817680 - RNA, 19 nt, Homo sapiens
  misc_RNA (1)...(19): siRNA sense strand
gaagaggcacugcauuauu

SEQ ID NO: 1817681 - RNA, 19 nt, Homo sapiens
  misc_RNA (1)...(19): siRNA sense strand
cgauauggaugaugaagaa

SEQ ID NO: 1817682 - RNA, 19 nt, Homo sapiens
  misc_RNA (1)...(19): siRNA sense strand
uaggagaggucaucaaaga

SEQ ID NO: 1817683 - RNA, 19 nt, Homo sapiens
  misc_RNA (1)...(19): siRNA sense strand
uagaagauauugacgaaga

SEQ ID NO: 1817684 - RNA, 19 nt, Homo sapiens
  misc_RNA (1)...(19): siRNA sense strand
ugaagaagaugaagaugau

SEQ ID NO: 1817685 - RNA, 19 nt, Homo sapiens
  misc_RNA (1)...(19): siRNA sense strand
gaguugaagugacagaauu

SEQ ID NO: 1817686 - RNA, 19 nt, Homo sapiens
  misc_RNA (1)...(19): siRNA sense strand
gagaagaagaugaugauga

SEQ ID NO: 1817687 - RNA, 19 nt, Homo sapiens
  misc_RNA (1)...(19): siRNA sense strand
gaaaggauuugacgaaacg

SEQ ID NO: 1817688 - RNA, 19 nt, Homo sapiens
  misc_RNA (1)...(19): siRNA sense strand
gaaguccaccgaaaucaaa

SEQ ID NO: 1817689 - RNA, 19 nt, Homo sapiens
  misc_RNA (1)...(19): siRNA sense strand
gaccagaguugaagugaca

SEQ ID NO: 1817690 - RNA, 19 nt, Homo sapiens
  misc_RNA (1)...(19): siRNA sense strand
gaaccagagagcuucuuua

SEQ ID NO: 1817691 - RNA, 19 nt, Homo sapiens
  misc_RNA (1)...(19): siRNA sense strand
ccaccgaaaucaaauggaa

SEQ ID NO: 1817692 - RNA, 19 nt, Homo sapiens
  misc_RNA (1)...(19): siRNA sense strand
ugaaggagaagaugacuaa

SEQ ID NO: 1817693 - RNA, 19 nt, Homo sapiens
  misc_RNA (1)...(19): siRNA sense strand
agaagaagaugaugaugau

SEQ ID NO: 1817694 - RNA, 19 nt, Homo sapiens
  misc_RNA (1)...(19): siRNA sense strand
ccagagagcuucuuuaccu

SEQ ID NO: 1817695 - RNA, 19 nt, Homo sapiens
  misc_RNA (1)...(19): siRNA sense strand
gaagaggucagaauugauc

SEQ ID NO: 1817696 - RNA, 19 nt, Homo sapiens
  misc_RNA (1)...(19): siRNA sense strand
ggaaggauuagaagauauu

SEQ ID NO: 1817697 - RNA, 19 nt, Homo sapiens
  misc_RNA (1)...(19): siRNA sense strand
ugaagaggaggaaggauua

SEQ ID NO: 1817698 - RNA, 19 nt, Homo sapiens
  misc_RNA (1)...(19): siRNA sense strand
acacauugaugaaguacaa

SEQ ID NO: 1817699 - RNA, 19 nt, Homo sapiens
  misc_RNA (1)...(19): siRNA sense strand
gcaggaagaggcagcauga

SEQ ID NO: 1817700 - RNA, 19 nt, Homo sapiens
  misc_RNA (1)...(19): siRNA sense strand
ggaaaggauuugacgaaac

SEQ ID NO: 1817701 - RNA, 19 nt, Homo sapiens
  misc_RNA (1)...(19): siRNA sense strand
ggaugaggaugaaggugaa

SEQ ID NO: 1817702 - RNA, 19 nt, Homo sapiens
  misc_RNA (1)...(19): siRNA sense strand
ugaacacauugaugaagua

SEQ ID NO: 1817703 - RNA, 19 nt, Homo sapiens
  misc_RNA (1)...(19): siRNA sense strand
auaaaguucucuccaaaga

SEQ ID NO: 1817704 - RNA, 19 nt, Homo sapiens
  misc_RNA (1)...(19): siRNA sense strand
ggccaaacccauuacagua

SEQ ID NO: 1817705 - RNA, 19 nt, Homo sapiens
  misc_RNA (1)...(19): siRNA sense strand
ugcaggugcugaugaguua

SEQ ID NO: 1817706 - RNA, 19 nt, Homo sapiens
  misc_RNA (1)...(19): siRNA sense strand
agaugaagaugaugaugaa

SEQ ID NO: 1817707 - RNA, 19 nt, Homo sapiens
  misc_RNA (1)...(19): siRNA sense strand
ggaggaaggauuagaagau

SEQ ID NO: 1817708 - RNA, 19 nt, Homo sapiens
  misc_RNA (1)...(19): siRNA sense strand
cgagucaaacgcagaauaa

SEQ ID NO: 1817709 - RNA, 19 nt, Homo sapiens
  misc_RNA (1)...(19): siRNA sense strand
gagcuucuuuaccugguuu

SEQ ID NO: 1817710 - RNA, 19 nt, Homo sapiens
  misc_RNA (1)...(19): siRNA sense strand
agacagacuuaaugaacaa

SEQ ID NO: 1817711 - RNA, 19 nt, Homo sapiens
  misc_RNA (1)...(19): siRNA sense strand
gaagaggcagcaugaggaa

SEQ ID NO: 1817712 - RNA, 19 nt, Homo sapiens
  misc_RNA (1)...(19): siRNA sense strand
caaacuccgccaaccauuu

SEQ ID NO: 1817713 - RNA, 19 nt, Homo sapiens
  misc_RNA (1)...(19): siRNA sense strand
uccaaagaauuucaucuga

SEQ ID NO: 1817714 - RNA, 19 nt, Homo sapiens
  misc_RNA (1)...(19): siRNA sense strand
ggaaggagaggaggaugaa

SEQ ID NO: 1817715 - RNA, 19 nt, Homo sapiens
  misc_RNA (1)...(19): siRNA sense strand
gugaagaagaugaagauga

SEQ ID NO: 1817716 - RNA, 19 nt, Homo sapiens
  misc_RNA (1)...(19): siRNA sense strand
ggaaccagagagcuucuuu

SEQ ID NO: 1817717 - RNA, 19 nt, Homo sapiens
  misc_RNA (1)...(19): siRNA sense strand
cgauugaacacauugauga

SEQ ID NO: 1817718 - RNA, 19 nt, Homo sapiens
  misc_RNA (1)...(19): siRNA sense strand
agaggaggaugaaggagaa

SEQ ID NO: 1817719 - RNA, 19 nt, Homo sapiens
  misc_RNA (1)...(19): siRNA sense strand
gugacagaauuugaagaua

SEQ ID NO: 1817720 - RNA, 19 nt, Homo sapiens
  misc_RNA (1)...(19): siRNA sense strand
agaaggagaaggagaagaa

SEQ ID NO: 1817721 - RNA, 19 nt, Homo sapiens
  misc_RNA (1)...(19): siRNA sense strand
ugaagaaggagaaggagaa

SEQ ID NO: 1817722 - RNA, 19 nt, Homo sapiens
  misc_RNA (1)...(19): siRNA sense strand
cuacuugguucccgauaug

SEQ ID NO: 1817723 - RNA, 19 nt, Homo sapiens
  misc_RNA (1)...(19): siRNA sense strand
guuaggagaggucaucaaa

SEQ ID NO: 1817724 - RNA, 19 nt, Homo sapiens
  misc_RNA (1)...(19): siRNA sense strand
gaacagcaagaagcgauug

SEQ ID NO: 1817725 - RNA, 19 nt, Homo sapiens
  misc_RNA (1)...(19): siRNA sense strand
ggugauccaucuucgaagu

SEQ ID NO: 1817726 - RNA, 19 nt, Homo sapiens
  misc_RNA (1)...(19): siRNA sense strand
gagaaggagaagaagauga

SEQ ID NO: 1817727 - RNA, 19 nt, Homo sapiens
  misc_RNA (1)...(19): siRNA sense strand
ugaagugacagaauuugaa

SEQ ID NO: 1817728 - RNA, 19 nt, Homo sapiens
  misc_RNA (1)...(19): siRNA sense strand
caaacccauuacaguacua

SEQ ID NO: 1817729 - RNA, 19 nt, Homo sapiens
  misc_RNA (1)...(19): siRNA sense strand
uggaaaggauuugacgaaa

SEQ ID NO: 1817730 - RNA, 19 nt, Homo sapiens
  misc_RNA (1)...(19): siRNA sense strand
uagacagacuuaaugaaca

SEQ ID NO: 1817731 - RNA, 19 nt, Homo sapiens
  misc_RNA (1)...(19): siRNA sense strand
gaagugacagaauuugaag

SEQ ID NO: 1817732 - RNA, 19 nt, Homo sapiens
  misc_RNA (1)...(19): siRNA sense strand
gcaagaagcgauugaacac

SEQ ID NO: 1817733 - RNA, 19 nt, Homo sapiens
  misc_RNA (1)...(19): siRNA sense strand
aagaagaugaugaugauga

SEQ ID NO: 1817734 - RNA, 19 nt, Homo sapiens
  misc_RNA (1)...(19): siRNA sense strand
ugucaaccauccacaagug

SEQ ID NO: 1817735 - RNA, 19 nt, Homo sapiens
  misc_RNA (1)...(19): siRNA sense strand
gaaugagaguggugaucca

SEQ ID NO: 1817736 - RNA, 19 nt, Homo sapiens
  misc_RNA (1)...(19): siRNA sense strand
aagaagcgauugaacacau

SEQ ID NO: 1817737 - RNA, 19 nt, Homo sapiens
  misc_RNA (1)...(19): siRNA sense strand
augaagaggcacugcauua

SEQ ID NO: 1817738 - RNA, 19 nt, Homo sapiens
  misc_RNA (1)...(19): siRNA sense strand
ucaaauggaaaucuggaaa

SEQ ID NO: 1817739 - RNA, 19 nt, Homo sapiens
  misc_RNA (1)...(19): siRNA sense strand
ucagaagaggucagaauug

SEQ ID NO: 1817740 - RNA, 19 nt, Homo sapiens
  misc_RNA (1)...(19): siRNA sense strand
agaagauauugacgaagaa

SEQ ID NO: 1817741 - RNA, 19 nt, Homo sapiens
  misc_RNA (1)...(19): siRNA sense strand
agaagaugaugaugaugau

SEQ ID NO: 1817742 - RNA, 19 nt, Homo sapiens
  misc_RNA (1)...(19): siRNA sense strand
agaagcgauugaacacauu

SEQ ID NO: 1817743 - RNA, 19 nt, Homo sapiens
  misc_RNA (1)...(19): siRNA sense strand
gaagcgauugaacacauug

SEQ ID NO: 1817744 - RNA, 19 nt, Homo sapiens
  misc_RNA (1)...(19): siRNA sense strand
uuaaugaacaagccaguga

SEQ ID NO: 1817745 - RNA, 19 nt, Homo sapiens
  misc_RNA (1)...(19): siRNA sense strand
gaggagauuuugaaaguag

SEQ ID NO: 1817746 - RNA, 19 nt, Homo sapiens
  misc_RNA (1)...(19): siRNA sense strand
uauggaugaugaagaagga

SEQ ID NO: 1817747 - RNA, 19 nt, Homo sapiens
  misc_RNA (1)...(19): siRNA sense strand
gaugaagaggcacugcauu

SEQ ID NO: 1817748 - RNA, 19 nt, Homo sapiens
  misc_RNA (1)...(19): siRNA sense strand
gaagaugaagaugaugaug

SEQ ID NO: 1817749 - RNA, 19 nt, Homo sapiens
  misc_RNA (1)...(19): siRNA sense strand
ugagaguggugauccaucu

SEQ ID NO: 1817750 - RNA, 19 nt, Homo sapiens
  misc_RNA (1)...(19): siRNA sense strand
cagguuacagaauagauuu

SEQ ID NO: 1817751 - RNA, 19 nt, Homo sapiens
  misc_RNA (1)...(19): siRNA sense strand
gauugaacacauugaugaa

SEQ ID NO: 1817752 - RNA, 19 nt, Homo sapiens
  misc_RNA (1)...(19): siRNA sense strand
gugaggagauuuugaaagu

SEQ ID NO: 1817753 - RNA, 19 nt, Homo sapiens
  misc_RNA (1)...(19): siRNA sense strand
ugaagaggcacugcauuau

SEQ ID NO: 1817754 - RNA, 19 nt, Homo sapiens
  misc_RNA (1)...(19): siRNA sense strand
aagaugaagaugaugauga

SEQ ID NO: 1817755 - RNA, 19 nt, Homo sapiens
  misc_RNA (1)...(19): siRNA sense strand
aagaugaugaugaugauga

SEQ ID NO: 1817756 - RNA, 19 nt, Homo sapiens
  misc_RNA (1)...(19): siRNA sense strand
caaauggaaaucuggaaag

SEQ ID NO: 1817757 - RNA, 19 nt, Homo sapiens
  misc_RNA (1)...(19): siRNA sense strand
uaacaaacuccgccaacca

SEQ ID NO: 1817758 - RNA, 19 nt, Homo sapiens
  misc_RNA (1)...(19): siRNA sense strand
auggaaaucuggaaaggau

SEQ ID NO: 1817759 - RNA, 19 nt, Homo sapiens
  misc_RNA (1)...(19): siRNA sense strand
agaugaugaugaugaugaa

SEQ ID NO: 1817760 - RNA, 19 nt, Homo sapiens
  misc_RNA (1)...(19): siRNA sense strand
ccaaacccauuacaguacu

SEQ ID NO: 1817761 - RNA, 19 nt, Homo sapiens
  misc_RNA (1)...(19): siRNA sense strand
cgaaguccaccgaaaucaa

SEQ ID NO: 1817762 - RNA, 19 nt, Homo sapiens
  misc_RNA (1)...(19): siRNA sense strand
aagaagaugaagaugauga

SEQ ID NO: 1817763 - RNA, 19 nt, Homo sapiens
  misc_RNA (1)...(19): siRNA sense strand
gaaggauuagaagauauug

SEQ ID NO: 1817764 - RNA, 19 nt, Homo sapiens
  misc_RNA (1)...(19): siRNA sense strand
cagaauugaucgccaaaau

SEQ ID NO: 1817765 - RNA, 19 nt, Homo sapiens
  misc_RNA (1)...(19): siRNA sense strand
agaaggagaagaagaugau

SEQ ID NO: 1817766 - RNA, 19 nt, Homo sapiens
  misc_RNA (1)...(19): siRNA sense strand
ggagaaggagaagaagaug

SEQ ID NO: 1817767 - RNA, 19 nt, Homo sapiens
  misc_RNA (1)...(19): siRNA sense strand
aauaaagccagcaggaaga

SEQ ID NO: 1817768 - RNA, 19 nt, Homo sapiens
  misc_RNA (1)...(19): siRNA sense strand
ggaggaugaaggagaagau

SEQ ID NO: 1817769 - RNA, 19 nt, Homo sapiens
  misc_RNA (1)...(19): siRNA sense strand
ucagguuacagaauagauu

SEQ ID NO: 1817770 - RNA, 19 nt, Homo sapiens
  misc_RNA (1)...(19): siRNA sense strand
gcgauugaacacauugaug

SEQ ID NO: 1817771 - RNA, 19 nt, Homo sapiens
  misc_RNA (1)...(19): siRNA sense strand
uugaacacauugaugaagu

SEQ ID NO: 1817772 - RNA, 19 nt, Homo sapiens
  misc_RNA (1)...(19): siRNA sense strand
gaagaaggagaaggagaag

SEQ ID NO: 1817773 - RNA, 19 nt, Homo sapiens
  misc_RNA (1)...(19): siRNA sense strand
guggugauccaucuucgaa

SEQ ID NO: 1817774 - RNA, 19 nt, Homo sapiens
  misc_RNA (1)...(19): siRNA sense strand
agacagagaugaugauuua

SEQ ID NO: 1817775 - RNA, 19 nt, Homo sapiens
  misc_RNA (1)...(19): siRNA sense strand
caaguaggcuggaauauuu

SEQ ID NO: 1817776 - RNA, 19 nt, Homo sapiens
  misc_RNA (1)...(19): siRNA sense strand
gaacacaguugguuugaaa

SEQ ID NO: 1817777 - RNA, 19 nt, Homo sapiens
  misc_RNA (1)...(19): siRNA sense strand
gaaagaugaugaugaagaa

SEQ ID NO: 1817778 - RNA, 19 nt, Homo sapiens
  misc_RNA (1)...(19): siRNA sense strand
gagcaaaggucacaauuuc

SEQ ID NO: 1817779 - RNA, 19 nt, Homo sapiens
  misc_RNA (1)...(19): siRNA sense strand
gcaagaggcuucuguguag

SEQ ID NO: 1817780 - RNA, 19 nt, Homo sapiens
  misc_RNA (1)...(19): siRNA sense strand
cagacaagaucuucacuua

SEQ ID NO: 1817781 - RNA, 19 nt, Homo sapiens
  misc_RNA (1)...(19): siRNA sense strand
aaacaaaccuuacgugaau

SEQ ID NO: 1817782 - RNA, 19 nt, Homo sapiens
  misc_RNA (1)...(19): siRNA sense strand
ugaagaagcuaaacagaaa

SEQ ID NO: 1817783 - RNA, 19 nt, Homo sapiens
  misc_RNA (1)...(19): siRNA sense strand
gguaagagcuacaaagaau

SEQ ID NO: 1817784 - RNA, 19 nt, Homo sapiens
  misc_RNA (1)...(19): siRNA sense strand
gaacaagacagaacagaaa

SEQ ID NO: 1817785 - RNA, 19 nt, Homo sapiens
  misc_RNA (1)...(19): siRNA sense strand
gaauauagccucuacaugu

SEQ ID NO: 1817786 - RNA, 19 nt, Homo sapiens
  misc_RNA (1)...(19): siRNA sense strand
gcaugcagcucuuugguaa

SEQ ID NO: 1817787 - RNA, 19 nt, Homo sapiens
  misc_RNA (1)...(19): siRNA sense strand
uaacccaucuguuggaaua

SEQ ID NO: 1817788 - RNA, 19 nt, Homo sapiens
  misc_RNA (1)...(19): siRNA sense strand
gauggacgauuauuaugua

SEQ ID NO: 1817789 - RNA, 19 nt, Homo sapiens
  misc_RNA (1)...(19): siRNA sense strand
gaguagagcaagcauauua

SEQ ID NO: 1817790 - RNA, 19 nt, Homo sapiens
  misc_RNA (1)...(19): siRNA sense strand
uaacaaagccagacaaaga

SEQ ID NO: 1817791 - RNA, 19 nt, Homo sapiens
  misc_RNA (1)...(19): siRNA sense strand
cagaagaacagaagaaaua

SEQ ID NO: 1817792 - RNA, 19 nt, Homo sapiens
  misc_RNA (1)...(19): siRNA sense strand
gcaagcauauuaacaaaca

SEQ ID NO: 1817793 - RNA, 19 nt, Homo sapiens
  misc_RNA (1)...(19): siRNA sense strand
gaucuucacuuacaucuuc

SEQ ID NO: 1817794 - RNA, 19 nt, Homo sapiens
  misc_RNA (1)...(19): siRNA sense strand
gcaaacaaccuccagauug

SEQ ID NO: 1817795 - RNA, 19 nt, Homo sapiens
  misc_RNA (1)...(19): siRNA sense strand
gacaagaucuucacuuaca

SEQ ID NO: 1817796 - RNA, 19 nt, Homo sapiens
  misc_RNA (1)...(19): siRNA sense strand
gaaagaagaaacagaagaa

SEQ ID NO: 1817797 - RNA, 19 nt, Homo sapiens
  misc_RNA (1)...(19): siRNA sense strand
gaacaacgcauugcugaaa

SEQ ID NO: 1817798 - RNA, 19 nt, Homo sapiens
  misc_RNA (1)...(19): siRNA sense strand
gagcaagcauauuaacaaa

SEQ ID NO: 1817799 - RNA, 19 nt, Homo sapiens
  misc_RNA (1)...(19): siRNA sense strand
gaaugugucugcaagauca

SEQ ID NO: 1817800 - RNA, 19 nt, Homo sapiens
  misc_RNA (1)...(19): siRNA sense strand
ucucuaaacucucugauuu

SEQ ID NO: 1817801 - RNA, 19 nt, Homo sapiens
  misc_RNA (1)...(19): siRNA sense strand
cagaggauaugcugaauga

SEQ ID NO: 1817802 - RNA, 19 nt, Homo sapiens
  misc_RNA (1)...(19): siRNA sense strand
gcacgcugcucuuugcuuu

SEQ ID NO: 1817803 - RNA, 19 nt, Homo sapiens
  misc_RNA (1)...(19): siRNA sense strand
gcaauuccuuccaucauga

SEQ ID NO: 1817804 - RNA, 19 nt, Homo sapiens
  misc_RNA (1)...(19): siRNA sense strand
gaucauugguaacucagua

SEQ ID NO: 1817805 - RNA, 19 nt, Homo sapiens
  misc_RNA (1)...(19): siRNA sense strand
gcacacaaauucuugaucu

SEQ ID NO: 1817806 - RNA, 19 nt, Homo sapiens
  misc_RNA (1)...(19): siRNA sense strand
gcaaacaacugcccuucau

SEQ ID NO: 1817807 - RNA, 19 nt, Homo sapiens
  misc_RNA (1)...(19): siRNA sense strand
caagcuaugugccuuauug

SEQ ID NO: 1817808 - RNA, 19 nt, Homo sapiens
  misc_RNA (1)...(19): siRNA sense strand
aaagggagaugcugagaaa

SEQ ID NO: 1817809 - RNA, 19 nt, Homo sapiens
  misc_RNA (1)...(19): siRNA sense strand
ggucuuuacuggaaucuuu

SEQ ID NO: 1817810 - RNA, 19 nt, Homo sapiens
  misc_RNA (1)...(19): siRNA sense strand
gaaacaaaccuuacgugaa

SEQ ID NO: 1817811 - RNA, 19 nt, Homo sapiens
  misc_RNA (1)...(19): siRNA sense strand
cagcugaaaugguauuaaa

SEQ ID NO: 1817812 - RNA, 19 nt, Homo sapiens
  misc_RNA (1)...(19): siRNA sense strand
caaaggaacccaaagaaga

SEQ ID NO: 1817813 - RNA, 19 nt, Homo sapiens
  misc_RNA (1)...(19): siRNA sense strand
gcaaauccuuccaaagugu

SEQ ID NO: 1817814 - RNA, 19 nt, Homo sapiens
  misc_RNA (1)...(19): siRNA sense strand
guacugaaccucugaguga

SEQ ID NO: 1817815 - RNA, 19 nt, Homo sapiens
  misc_RNA (1)...(19): siRNA sense strand
guucauuggugucaucaua

SEQ ID NO: 1817816 - RNA, 19 nt, Homo sapiens
  misc_RNA (1)...(19): siRNA sense strand
gcagaaacccugauuaugg

SEQ ID NO: 1817817 - RNA, 19 nt, Homo sapiens
  misc_RNA (1)...(19): siRNA sense strand
cugacaaacugcauauuua

SEQ ID NO: 1817818 - RNA, 19 nt, Homo sapiens
  misc_RNA (1)...(19): siRNA sense strand
ugggaaaccugaagcauaa

SEQ ID NO: 1817819 - RNA, 19 nt, Homo sapiens
  misc_RNA (1)...(19): siRNA sense strand
caacugcccuucaucuaug

SEQ ID NO: 1817820 - RNA, 19 nt, Homo sapiens
  misc_RNA (1)...(19): siRNA sense strand
caacuuugccuauguuaaa

SEQ ID NO: 1817821 - RNA, 19 nt, Homo sapiens
  misc_RNA (1)...(19): siRNA sense strand
gauggucaaucauuuauuc

SEQ ID NO: 1817822 - RNA, 19 nt, Homo sapiens
  misc_RNA (1)...(19): siRNA sense strand
agaagaagcugaggcaauu

SEQ ID NO: 1817823 - RNA, 19 nt, Homo sapiens
  misc_RNA (1)...(19): siRNA sense strand
uuuaagggauggacgauua

SEQ ID NO: 1817824 - RNA, 19 nt, Homo sapiens
  misc_RNA (1)...(19): siRNA sense strand
gcacuauucugacaaacug

SEQ ID NO: 1817825 - RNA, 19 nt, Homo sapiens
  misc_RNA (1)...(19): siRNA sense strand
gugauuaucuccauuguag

SEQ ID NO: 1817826 - RNA, 19 nt, Homo sapiens
  misc_RNA (1)...(19): siRNA sense strand
gcugagaaauugucgaaau

SEQ ID NO: 1817827 - RNA, 19 nt, Homo sapiens
  misc_RNA (1)...(19): siRNA sense strand
gaauugcucuccauauugg

SEQ ID NO: 1817828 - RNA, 19 nt, Homo sapiens
  misc_RNA (1)...(19): siRNA sense strand
cuaugugccuuauuguuua

SEQ ID NO: 1817829 - RNA, 19 nt, Homo sapiens
  misc_RNA (1)...(19): siRNA sense strand
gaaugagggucguugugaa

SEQ ID NO: 1817830 - RNA, 19 nt, Homo sapiens
  misc_RNA (1)...(19): siRNA sense strand
uaacauagagucagggaaa

SEQ ID NO: 1817831 - RNA, 19 nt, Homo sapiens
  misc_RNA (1)...(19): siRNA sense strand
gaagcuuucugaugucaug

SEQ ID NO: 1817832 - RNA, 19 nt, Homo sapiens
  misc_RNA (1)...(19): siRNA sense strand
aauauagccucuacaugua

SEQ ID NO: 1817833 - RNA, 19 nt, Homo sapiens
  misc_RNA (1)...(19): siRNA sense strand
cuacuugugugucuuauau

SEQ ID NO: 1817834 - RNA, 19 nt, Homo sapiens
  misc_RNA (1)...(19): siRNA sense strand
uaacaaacacuguggaaga

SEQ ID NO: 1817835 - RNA, 19 nt, Homo sapiens
  misc_RNA (1)...(19): siRNA sense strand
gaaauugucgaaaucagaa

SEQ ID NO: 1817836 - RNA, 19 nt, Homo sapiens
  misc_RNA (1)...(19): siRNA sense strand
gaacagaaccaggcaaaca

SEQ ID NO: 1817837 - RNA, 19 nt, Homo sapiens
  misc_RNA (1)...(19): siRNA sense strand
ccaaucaaauacacaagaa

SEQ ID NO: 1817838 - RNA, 19 nt, Homo sapiens
  misc_RNA (1)...(19): siRNA sense strand
uuauagacguuaccgcuua

SEQ ID NO: 1817839 - RNA, 19 nt, Homo sapiens
  misc_RNA (1)...(19): siRNA sense strand
caacauaugacugaaguuu

SEQ ID NO: 1817840 - RNA, 19 nt, Homo sapiens
  misc_RNA (1)...(19): siRNA sense strand
ggucaaagucaacauauga

SEQ ID NO: 1817841 - RNA, 19 nt, Homo sapiens
  misc_RNA (1)...(19): siRNA sense strand
ccucagagcuuuguccauu

SEQ ID NO: 1817842 - RNA, 19 nt, Homo sapiens
  misc_RNA (1)...(19): siRNA sense strand
ugaauacccuagagaguga

SEQ ID NO: 1817843 - RNA, 19 nt, Homo sapiens
  misc_RNA (1)...(19): siRNA sense strand
gaagauggaauuaaugaca

SEQ ID NO: 1817844 - RNA, 19 nt, Homo sapiens
  misc_RNA (1)...(19): siRNA sense strand
guucuuaucugucucaaca

SEQ ID NO: 1817845 - RNA, 19 nt, Homo sapiens
  misc_RNA (1)...(19): siRNA sense strand
acaagcagcccaaauauga

SEQ ID NO: 1817846 - RNA, 19 nt, Homo sapiens
  misc_RNA (1)...(19): siRNA sense strand
gcuaugugccuuauuguuu

SEQ ID NO: 1817847 - RNA, 19 nt, Homo sapiens
  misc_RNA (1)...(19): siRNA sense strand
cauccaaacugagcucuaa

SEQ ID NO: 1817848 - RNA, 19 nt, Homo sapiens
  misc_RNA (1)...(19): siRNA sense strand
gcaccuauucuuaacagua

SEQ ID NO: 1817849 - RNA, 19 nt, Homo sapiens
  misc_RNA (1)...(19): siRNA sense strand
guugauguuucuuugguua

SEQ ID NO: 1817850 - RNA, 19 nt, Homo sapiens
  misc_RNA (1)...(19): siRNA sense strand
ggacaaacacuugauggaa

SEQ ID NO: 1817851 - RNA, 19 nt, Homo sapiens
  misc_RNA (1)...(19): siRNA sense strand
gcacaugaacgacuucuuc

SEQ ID NO: 1817852 - RNA, 19 nt, Homo sapiens
  misc_RNA (1)...(19): siRNA sense strand
cauugaacaugcugauuaa

SEQ ID NO: 1817853 - RNA, 19 nt, Homo sapiens
  misc_RNA (1)...(19): siRNA sense strand
uagcagauguggaaggauu

SEQ ID NO: 1817854 - RNA, 19 nt, Homo sapiens
  misc_RNA (1)...(19): siRNA sense strand
gaggacagcaucagaagaa

SEQ ID NO: 1817855 - RNA, 19 nt, Homo sapiens
  misc_RNA (1)...(19): siRNA sense strand
gggagaugcugagaaauug

SEQ ID NO: 1817856 - RNA, 19 nt, Homo sapiens
  misc_RNA (1)...(19): siRNA sense strand
ggaauugcucuccauauug

SEQ ID NO: 1817857 - RNA, 19 nt, Homo sapiens
  misc_RNA (1)...(19): siRNA sense strand
caucauauccuuccugguu

SEQ ID NO: 1817858 - RNA, 19 nt, Homo sapiens
  misc_RNA (1)...(19): siRNA sense strand
guuucuagcugauuugauu

SEQ ID NO: 1817859 - RNA, 19 nt, Homo sapiens
  misc_RNA (1)...(19): siRNA sense strand
aaacauauuucaccaaugc

SEQ ID NO: 1817860 - RNA, 19 nt, Homo sapiens
  misc_RNA (1)...(19): siRNA sense strand
caaacaaccuccagauugc

SEQ ID NO: 1817861 - RNA, 19 nt, Homo sapiens
  misc_RNA (1)...(19): siRNA sense strand
gaaauaugaacaagacaga

SEQ ID NO: 1817862 - RNA, 19 nt, Homo sapiens
  misc_RNA (1)...(19): siRNA sense strand
caacaaaguccagcucauu

SEQ ID NO: 1817863 - RNA, 19 nt, Homo sapiens
  misc_RNA (1)...(19): siRNA sense strand
gaggaugacuuugagaugu

SEQ ID NO: 1817864 - RNA, 19 nt, Homo sapiens
  misc_RNA (1)...(19): siRNA sense strand
caccuauucuuaacaguaa

SEQ ID NO: 1817865 - RNA, 19 nt, Homo sapiens
  misc_RNA (1)...(19): siRNA sense strand
ggaagacagugauggucaa

SEQ ID NO: 1817866 - RNA, 19 nt, Homo sapiens
  misc_RNA (1)...(19): siRNA sense strand
aaacugagcucuaaaagug

SEQ ID NO: 1817867 - RNA, 19 nt, Homo sapiens
  misc_RNA (1)...(19): siRNA sense strand
gccucuacauguauauuua

SEQ ID NO: 1817868 - RNA, 19 nt, Homo sapiens
  misc_RNA (1)...(19): siRNA sense strand
uagacaagcagcccaaaua

SEQ ID NO: 1817869 - RNA, 19 nt, Homo sapiens
  misc_RNA (1)...(19): siRNA sense strand
gaagaucugaauacuaaga

SEQ ID NO: 1817870 - RNA, 19 nt, Homo sapiens
  misc_RNA (1)...(19): siRNA sense strand
ggagauaagacaagcagaa

SEQ ID NO: 1817871 - RNA, 19 nt, Homo sapiens
  misc_RNA (1)...(19): siRNA sense strand
agacagagagcaaugagua

SEQ ID NO: 1817872 - RNA, 19 nt, Homo sapiens
  misc_RNA (1)...(19): siRNA sense strand
guuccuaucuccuuucaga

SEQ ID NO: 1817873 - RNA, 19 nt, Homo sapiens
  misc_RNA (1)...(19): siRNA sense strand
gauaaugucggacuugguu

SEQ ID NO: 1817874 - RNA, 19 nt, Homo sapiens
  misc_RNA (1)...(19): siRNA sense strand
uagcuuugcucauccacua

SEQ ID NO: 1817875 - RNA, 19 nt, Homo sapiens
  misc_RNA (1)...(19): siRNA sense strand
gagcugugguaguaauuca

SEQ ID NO: 1817876 - RNA, 19 nt, Homo sapiens
  misc_RNA (1)...(19): siRNA sense strand
gccaaaggcucaggaugga

SEQ ID NO: 1817877 - RNA, 19 nt, Homo sapiens
  misc_RNA (1)...(19): siRNA sense strand
gugacgaaaugcaacauca

SEQ ID NO: 1817878 - RNA, 19 nt, Homo sapiens
  misc_RNA (1)...(19): siRNA sense strand
caaacgcgcaaucaucuug

SEQ ID NO: 1817879 - RNA, 19 nt, Homo sapiens
  misc_RNA (1)...(19): siRNA sense strand
aaagauggcaggagagaug

SEQ ID NO: 1817880 - RNA, 19 nt, Homo sapiens
  misc_RNA (1)...(19): siRNA sense strand
gcugugguaguaauucaua

SEQ ID NO: 1817881 - RNA, 19 nt, Homo sapiens
  misc_RNA (1)...(19): siRNA sense strand
ggagggccuucgcuacauc

SEQ ID NO: 1817882 - RNA, 19 nt, Homo sapiens
  misc_RNA (1)...(19): siRNA sense strand
cagcauggcccacgucucu

SEQ ID NO: 1817883 - RNA, 19 nt, Homo sapiens
  misc_RNA (1)...(19): siRNA sense strand
ucaaagauaccuguagcuu

SEQ ID NO: 1817884 - RNA, 19 nt, Homo sapiens
  misc_RNA (1)...(19): siRNA sense strand
gaaauggcggcaccuucga

SEQ ID NO: 1817885 - RNA, 19 nt, Homo sapiens
  misc_RNA (1)...(19): siRNA sense strand
caacagaaccaggcaucau

SEQ ID NO: 1817886 - RNA, 19 nt, Homo sapiens
  misc_RNA (1)...(19): siRNA sense strand
gcaaacgcgcaaucaucuu

SEQ ID NO: 1817887 - RNA, 19 nt, Homo sapiens
  misc_RNA (1)...(19): siRNA sense strand
cgaaagauggcaggagaga

SEQ ID NO: 1817888 - RNA, 19 nt, Homo sapiens
  misc_RNA (1)...(19): siRNA sense strand
ggcaaacgcgcaaucaucu

SEQ ID NO: 1817889 - RNA, 19 nt, Homo sapiens
  misc_RNA (1)...(19): siRNA sense strand
gcagaucggcgaggugaag

SEQ ID NO: 1817890 - RNA, 19 nt, Homo sapiens
  misc_RNA (1)...(19): siRNA sense strand
gagaaugcuccgucugaag

SEQ ID NO: 1817891 - RNA, 19 nt, Homo sapiens
  misc_RNA (1)...(19): siRNA sense strand
cugcugcccuaacucgaaa

SEQ ID NO: 1817892 - RNA, 19 nt, Homo sapiens
  misc_RNA (1)...(19): siRNA sense strand
gcucauccacuaucaacag

SEQ ID NO: 1817893 - RNA, 19 nt, Homo sapiens
  misc_RNA (1)...(19): siRNA sense strand
cggcaaacgcgcaaucauc

SEQ ID NO: 1817894 - RNA, 19 nt, Homo sapiens
  misc_RNA (1)...(19): siRNA sense strand
ccggagcugugguaguaau

SEQ ID NO: 1817895 - RNA, 19 nt, Homo sapiens
  misc_RNA (1)...(19): siRNA sense strand
gccaccuucugccaucuga

SEQ ID NO: 1817896 - RNA, 19 nt, Homo sapiens
  misc_RNA (1)...(19): siRNA sense strand
gcauggcccacgucucugu

SEQ ID NO: 1817897 - RNA, 19 nt, Homo sapiens
  misc_RNA (1)...(19): siRNA sense strand
aacaucacgugcagcaaga

SEQ ID NO: 1817898 - RNA, 19 nt, Homo sapiens
  misc_RNA (1)...(19): siRNA sense strand
ccaggcugcugcccuaacu

SEQ ID NO: 1817899 - RNA, 19 nt, Homo sapiens
  misc_RNA (1)...(19): siRNA sense strand
gacaucaaagauaccugua

SEQ ID NO: 1817900 - RNA, 19 nt, Homo sapiens
  misc_RNA (1)...(19): siRNA sense strand
gaaagauggcaggagagau

SEQ ID NO: 1817901 - RNA, 19 nt, Homo sapiens
  misc_RNA (1)...(19): siRNA sense strand
cauccacuaucaacagaac

SEQ ID NO: 1817902 - RNA, 19 nt, Homo sapiens
  misc_RNA (1)...(19): siRNA sense strand
ccccggagcugugguagua

SEQ ID NO: 1817903 - RNA, 19 nt, Homo sapiens
  misc_RNA (1)...(19): siRNA sense strand
gcugcugcccuaacucgaa

SEQ ID NO: 1817904 - RNA, 19 nt, Homo sapiens
  misc_RNA (1)...(19): siRNA sense strand
gccacaggcgaaagcagua

SEQ ID NO: 1817905 - RNA, 19 nt, Homo sapiens
  misc_RNA (1)...(19): siRNA sense strand
gggaacagcucaccuauua

SEQ ID NO: 1817906 - RNA, 19 nt, Homo sapiens
  misc_RNA (1)...(19): siRNA sense strand
gaagagcuuucacgacuaa

SEQ ID NO: 1817907 - RNA, 19 nt, Homo sapiens
  misc_RNA (1)...(19): siRNA sense strand
aaagagaaauacccucaua

SEQ ID NO: 1817908 - RNA, 19 nt, Homo sapiens
  misc_RNA (1)...(19): siRNA sense strand
uaaaggcaaucuuaaggua

SEQ ID NO: 1817909 - RNA, 19 nt, Homo sapiens
  misc_RNA (1)...(19): siRNA sense strand
gagaggcccuuuaagugua

SEQ ID NO: 1817910 - RNA, 19 nt, Homo sapiens
  misc_RNA (1)...(19): siRNA sense strand
gaacaacugcagaggauuu

SEQ ID NO: 1817911 - RNA, 19 nt, Homo sapiens
  misc_RNA (1)...(19): siRNA sense strand
gaacagauucgucaccaaa

SEQ ID NO: 1817912 - RNA, 19 nt, Homo sapiens
  misc_RNA (1)...(19): siRNA sense strand
ggacucagcucaggcauca

SEQ ID NO: 1817913 - RNA, 19 nt, Homo sapiens
  misc_RNA (1)...(19): siRNA sense strand
aaacacugcuugugacauu

SEQ ID NO: 1817914 - RNA, 19 nt, Homo sapiens
  misc_RNA (1)...(19): siRNA sense strand
ggaagagcuuucacgacua

SEQ ID NO: 1817915 - RNA, 19 nt, Homo sapiens
  misc_RNA (1)...(19): siRNA sense strand
gcagcgaccuuucagaaca

SEQ ID NO: 1817916 - RNA, 19 nt, Homo sapiens
  misc_RNA (1)...(19): siRNA sense strand
gggauguccugaccaauga

SEQ ID NO: 1817917 - RNA, 19 nt, Homo sapiens
  misc_RNA (1)...(19): siRNA sense strand
gaacacaacggacuugaca

SEQ ID NO: 1817918 - RNA, 19 nt, Homo sapiens
  misc_RNA (1)...(19): siRNA sense strand
gaacagcucaccuauuagu

SEQ ID NO: 1817919 - RNA, 19 nt, Homo sapiens
  misc_RNA (1)...(19): siRNA sense strand
caaaugaaugacacaguua

SEQ ID NO: 1817920 - RNA, 19 nt, Homo sapiens
  misc_RNA (1)...(19): siRNA sense strand
ccauuuauuugcacaguuu

SEQ ID NO: 1817921 - RNA, 19 nt, Homo sapiens
  misc_RNA (1)...(19): siRNA sense strand
acaaaugaaugacacaguu

SEQ ID NO: 1817922 - RNA, 19 nt, Homo sapiens
  misc_RNA (1)...(19): siRNA sense strand
gcacucacauguggaauag

SEQ ID NO: 1817923 - RNA, 19 nt, Homo sapiens
  misc_RNA (1)...(19): siRNA sense strand
aagcgaagccucaacauuu

SEQ ID NO: 1817924 - RNA, 19 nt, Homo sapiens
  misc_RNA (1)...(19): siRNA sense strand
acagauucgucaccaaaua

SEQ ID NO: 1817925 - RNA, 19 nt, Homo sapiens
  misc_RNA (1)...(19): siRNA sense strand
gaaugacacaguuaacaaa

SEQ ID NO: 1817926 - RNA, 19 nt, Homo sapiens
  misc_RNA (1)...(19): siRNA sense strand
cuagacaacuucucugaug

SEQ ID NO: 1817927 - RNA, 19 nt, Homo sapiens
  misc_RNA (1)...(19): siRNA sense strand
ggagagaggccauucaagu

SEQ ID NO: 1817928 - RNA, 19 nt, Homo sapiens
  misc_RNA (1)...(19): siRNA sense strand
ugacacagguuccuuugau

SEQ ID NO: 1817929 - RNA, 19 nt, Homo sapiens
  misc_RNA (1)...(19): siRNA sense strand
ggagaggcccuuuaagugu

SEQ ID NO: 1817930 - RNA, 19 nt, Homo sapiens
  misc_RNA (1)...(19): siRNA sense strand
ccaacgggcuggcgaugaa

SEQ ID NO: 1817931 - RNA, 19 nt, Homo sapiens
  misc_RNA (1)...(19): siRNA sense strand
cagcacauccgaaugcaua

SEQ ID NO: 1817932 - RNA, 19 nt, Homo sapiens
  misc_RNA (1)...(19): siRNA sense strand
gcaauugaucgaacagauu

SEQ ID NO: 1817933 - RNA, 19 nt, Homo sapiens
  misc_RNA (1)...(19): siRNA sense strand
gaaauguuccagaaggauu

SEQ ID NO: 1817934 - RNA, 19 nt, Homo sapiens
  misc_RNA (1)...(19): siRNA sense strand
ggagagaaacccuuugcuu

SEQ ID NO: 1817935 - RNA, 19 nt, Homo sapiens
  misc_RNA (1)...(19): siRNA sense strand
cuauagaagucauaccaaa

SEQ ID NO: 1817936 - RNA, 19 nt, Homo sapiens
  misc_RNA (1)...(19): siRNA sense strand
gcagacgccucccaagaca

SEQ ID NO: 1817937 - RNA, 19 nt, Homo sapiens
  misc_RNA (1)...(19): siRNA sense strand
caagaagaacuguacuaaa

SEQ ID NO: 1817938 - RNA, 19 nt, Homo sapiens
  misc_RNA (1)...(19): siRNA sense strand
ccaaagagagaccauuuau

SEQ ID NO: 1817939 - RNA, 19 nt, Homo sapiens
  misc_RNA (1)...(19): siRNA sense strand
guacuggcaucccauaugg

SEQ ID NO: 1817940 - RNA, 19 nt, Homo sapiens
  misc_RNA (1)...(19): siRNA sense strand
cagccaaucugccagcauu

SEQ ID NO: 1817941 - RNA, 19 nt, Homo sapiens
  misc_RNA (1)...(19): siRNA sense strand
cacgcuaaguucccauuua

SEQ ID NO: 1817942 - RNA, 19 nt, Homo sapiens
  misc_RNA (1)...(19): siRNA sense strand
cgaguucuuugaauuauca

SEQ ID NO: 1817943 - RNA, 19 nt, Homo sapiens
  misc_RNA (1)...(19): siRNA sense strand
ugacaacacugggcaacuu

SEQ ID NO: 1817944 - RNA, 19 nt, Homo sapiens
  misc_RNA (1)...(19): siRNA sense strand
caagguacuuuacgaacau

SEQ ID NO: 1817945 - RNA, 19 nt, Homo sapiens
  misc_RNA (1)...(19): siRNA sense strand
cgacuaaaggcaaucuuaa

SEQ ID NO: 1817946 - RNA, 19 nt, Homo sapiens
  misc_RNA (1)...(19): siRNA sense strand
gagagaccauuuauuugca

SEQ ID NO: 1817947 - RNA, 19 nt, Homo sapiens
  misc_RNA (1)...(19): siRNA sense strand
cagcauuaguggugugaaa

SEQ ID NO: 1817948 - RNA, 19 nt, Homo sapiens
  misc_RNA (1)...(19): siRNA sense strand
gugccgaguucuuugaauu

SEQ ID NO: 1817949 - RNA, 19 nt, Homo sapiens
  misc_RNA (1)...(19): siRNA sense strand
gagaaacccuuugcuugca

SEQ ID NO: 1817950 - RNA, 19 nt, Homo sapiens
  misc_RNA (1)...(19): siRNA sense strand
cgagugcccugcagauuca

SEQ ID NO: 1817951 - RNA, 19 nt, Homo sapiens
  misc_RNA (1)...(19): siRNA sense strand
gacauucacuauagaaguc

SEQ ID NO: 1817952 - RNA, 19 nt, Homo sapiens
  misc_RNA (1)...(19): siRNA sense strand
gcaacgucaucaucgagaa

SEQ ID NO: 1817953 - RNA, 19 nt, Homo sapiens
  misc_RNA (1)...(19): siRNA sense strand
caaagagagaccauuuauu

SEQ ID NO: 1817954 - RNA, 19 nt, Homo sapiens
  misc_RNA (1)...(19): siRNA sense strand
caagcgaguuugccaaugg

SEQ ID NO: 1817955 - RNA, 19 nt, Homo sapiens
  misc_RNA (1)...(19): siRNA sense strand
aaaugucacugccuuugaa

SEQ ID NO: 1817956 - RNA, 19 nt, Homo sapiens
  misc_RNA (1)...(19): siRNA sense strand
gagagaggccauucaagug

SEQ ID NO: 1817957 - RNA, 19 nt, Homo sapiens
  misc_RNA (1)...(19): siRNA sense strand
caaccgagucgcccuacua

SEQ ID NO: 1817958 - RNA, 19 nt, Homo sapiens
  misc_RNA (1)...(19): siRNA sense strand
ccacgaaagggaaucuuaa

SEQ ID NO: 1817959 - RNA, 19 nt, Homo sapiens
  misc_RNA (1)...(19): siRNA sense strand
gcaguucaaggccaaguuu

SEQ ID NO: 1817960 - RNA, 19 nt, Homo sapiens
  misc_RNA (1)...(19): siRNA sense strand
gcucuucucccaauaugaa

SEQ ID NO: 1817961 - RNA, 19 nt, Homo sapiens
  misc_RNA (1)...(19): siRNA sense strand
uuagugggcugacgggaaa

SEQ ID NO: 1817962 - RNA, 19 nt, Homo sapiens
  misc_RNA (1)...(19): siRNA sense strand
gaggcaaucccgucaaguu

SEQ ID NO: 1817963 - RNA, 19 nt, Homo sapiens
  misc_RNA (1)...(19): siRNA sense strand
gggagaggcccuuuaagug

SEQ ID NO: 1817964 - RNA, 19 nt, Homo sapiens
  misc_RNA (1)...(19): siRNA sense strand
caacugcagaggauuuaaa

SEQ ID NO: 1817965 - RNA, 19 nt, Homo sapiens
  misc_RNA (1)...(19): siRNA sense strand
ugauaauccugaugaacaa

SEQ ID NO: 1817966 - RNA, 19 nt, Homo sapiens
  misc_RNA (1)...(19): siRNA sense strand
gaacucacacuggagagaa

SEQ ID NO: 1817967 - RNA, 19 nt, Homo sapiens
  misc_RNA (1)...(19): siRNA sense strand
gacaacuucucugaugaaa

SEQ ID NO: 1817968 - RNA, 19 nt, Homo sapiens
  misc_RNA (1)...(19): siRNA sense strand
gaugaggcauucuucaaac

SEQ ID NO: 1817969 - RNA, 19 nt, Homo sapiens
  misc_RNA (1)...(19): siRNA sense strand
caacagcaacgucaucauc

SEQ ID NO: 1817970 - RNA, 19 nt, Homo sapiens
  misc_RNA (1)...(19): siRNA sense strand
cagaaauguuccagaagga

SEQ ID NO: 1817971 - RNA, 19 nt, Homo sapiens
  misc_RNA (1)...(19): siRNA sense strand
ugaagucaguggagaaugg

SEQ ID NO: 1817972 - RNA, 19 nt, Homo sapiens
  misc_RNA (1)...(19): siRNA sense strand
gaaaaucagaugaagauga

SEQ ID NO: 1817973 - RNA, 19 nt, Homo sapiens
  misc_RNA (1)...(19): siRNA sense strand
ucaagguacuuuacgaaca

SEQ ID NO: 1817974 - RNA, 19 nt, Homo sapiens
  misc_RNA (1)...(19): siRNA sense strand
ggacugcagcgaccuuuca

SEQ ID NO: 1817975 - RNA, 19 nt, Homo sapiens
  misc_RNA (1)...(19): siRNA sense strand
ggacauucacuauagaagu

SEQ ID NO: 1817976 - RNA, 19 nt, Homo sapiens
  misc_RNA (1)...(19): siRNA sense strand
ccacaagucacccagcauu

SEQ ID NO: 1817977 - RNA, 19 nt, Homo sapiens
  misc_RNA (1)...(19): siRNA sense strand
uagacaacuucucugauga

SEQ ID NO: 1817978 - RNA, 19 nt, Homo sapiens
  misc_RNA (1)...(19): siRNA sense strand
cggaacaacugcagaggau

SEQ ID NO: 1817979 - RNA, 19 nt, Homo sapiens
  misc_RNA (1)...(19): siRNA sense strand
acgcuaaguucccauuuau

SEQ ID NO: 1817980 - RNA, 19 nt, Homo sapiens
  misc_RNA (1)...(19): siRNA sense strand
ucccagaaauguuccagaa

SEQ ID NO: 1817981 - RNA, 19 nt, Homo sapiens
  misc_RNA (1)...(19): siRNA sense strand
acaagaagaacuguacuaa

SEQ ID NO: 1817982 - RNA, 19 nt, Homo sapiens
  misc_RNA (1)...(19): siRNA sense strand
caagcgaagccucaacauu

SEQ ID NO: 1817983 - RNA, 19 nt, Homo sapiens
  misc_RNA (1)...(19): siRNA sense strand
aaacacaagugcagguucu

SEQ ID NO: 1817984 - RNA, 19 nt, Homo sapiens
  misc_RNA (1)...(19): siRNA sense strand
gcagcuggauuggcacaga

SEQ ID NO: 1817985 - RNA, 19 nt, Homo sapiens
  misc_RNA (1)...(19): siRNA sense strand
caacuucuccguaaucaac

SEQ ID NO: 1817986 - RNA, 19 nt, Homo sapiens
  misc_RNA (1)...(19): siRNA sense strand
caacgagaucuccgucauu

SEQ ID NO: 1817987 - RNA, 19 nt, Homo sapiens
  misc_RNA (1)...(19): siRNA sense strand
gaugaaggccaacgagauc

SEQ ID NO: 1817988 - RNA, 19 nt, Homo sapiens
  misc_RNA (1)...(19): siRNA sense strand
ggauuuggcggcaagauca

SEQ ID NO: 1817989 - RNA, 19 nt, Homo sapiens
  misc_RNA (1)...(19): siRNA sense strand
caaguucccagaaauguuc

SEQ ID NO: 1817990 - RNA, 19 nt, Homo sapiens
  misc_RNA (1)...(19): siRNA sense strand
gaacucccaagcagcacua

SEQ ID NO: 1817991 - RNA, 19 nt, Homo sapiens
  misc_RNA (1)...(19): siRNA sense strand
cagagaaaaucaucaaaga

SEQ ID NO: 1817992 - RNA, 19 nt, Homo sapiens
  misc_RNA (1)...(19): siRNA sense strand
gacaauauccccacgagua

SEQ ID NO: 1817993 - RNA, 19 nt, Homo sapiens
  misc_RNA (1)...(19): siRNA sense strand
gaaaaguacuuccgaugag

SEQ ID NO: 1817994 - RNA, 19 nt, Homo sapiens
  misc_RNA (1)...(19): siRNA sense strand
gcuaaguucccauuuaucu

SEQ ID NO: 1817995 - RNA, 19 nt, Homo sapiens
  misc_RNA (1)...(19): siRNA sense strand
gacacagguuccuuugaug

SEQ ID NO: 1817996 - RNA, 19 nt, Homo sapiens
  misc_RNA (1)...(19): siRNA sense strand
uauuaaguccugcgucuaa

SEQ ID NO: 1817997 - RNA, 19 nt, Homo sapiens
  misc_RNA (1)...(19): siRNA sense strand
cagcggcucuucucccaau

SEQ ID NO: 1817998 - RNA, 19 nt, Homo sapiens
  misc_RNA (1)...(19): siRNA sense strand
aaagcaagccaccaaaugu

SEQ ID NO: 1817999 - RNA, 19 nt, Homo sapiens
  misc_RNA (1)...(19): siRNA sense strand
ccgagucgcccuacuaaga

SEQ ID NO: 1818000 - RNA, 19 nt, Homo sapiens
  misc_RNA (1)...(19): siRNA sense strand
cagagugccuuggacauuc

SEQ ID NO: 1818001 - RNA, 19 nt, Homo sapiens
  misc_RNA (1)...(19): siRNA sense strand
gcacgcaggaguuccacaa

SEQ ID NO: 1818002 - RNA, 19 nt, Homo sapiens
  misc_RNA (1)...(19): siRNA sense strand
agaugaagaugaucaaugc

SEQ ID NO: 1818003 - RNA, 19 nt, Homo sapiens
  misc_RNA (1)...(19): siRNA sense strand
caacuucucugaugaaaac

SEQ ID NO: 1818004 - RNA, 19 nt, Homo sapiens
  misc_RNA (1)...(19): siRNA sense strand
cgaugaggcauucuucaaa

SEQ ID NO: 1818005 - RNA, 19 nt, Homo sapiens
  misc_RNA (1)...(19): siRNA sense strand
caacugagguggaaauuaa

SEQ ID NO: 1818006 - RNA, 19 nt, Homo sapiens
  misc_RNA (1)...(19): siRNA sense strand
gaaggaagcaccauugaua

SEQ ID NO: 1818007 - RNA, 19 nt, Homo sapiens
  misc_RNA (1)...(19): siRNA sense strand
ggaagaaggugaagaagga

SEQ ID NO: 1818008 - RNA, 19 nt, Homo sapiens
  misc_RNA (1)...(19): siRNA sense strand
gacaaagucuucaccuaua

SEQ ID NO: 1818009 - RNA, 19 nt, Homo sapiens
  misc_RNA (1)...(19): siRNA sense strand
caucaucucuuuccuaauu

SEQ ID NO: 1818010 - RNA, 19 nt, Homo sapiens
  misc_RNA (1)...(19): siRNA sense strand
ugaaagagauugugaacuu

SEQ ID NO: 1818011 - RNA, 19 nt, Homo sapiens
  misc_RNA (1)...(19): siRNA sense strand
caagaagguuggaacauuu

SEQ ID NO: 1818012 - RNA, 19 nt, Homo sapiens
  misc_RNA (1)...(19): siRNA sense strand
ucacagggauuuauacauu

SEQ ID NO: 1818013 - RNA, 19 nt, Homo sapiens
  misc_RNA (1)...(19): siRNA sense strand
gagcacaacugguuugaga

SEQ ID NO: 1818014 - RNA, 19 nt, Homo sapiens
  misc_RNA (1)...(19): siRNA sense strand
gaacaugucuuggcuguag

SEQ ID NO: 1818015 - RNA, 19 nt, Homo sapiens
  misc_RNA (1)...(19): siRNA sense strand
ggccauggcuuaugaagaa

SEQ ID NO: 1818016 - RNA, 19 nt, Homo sapiens
  misc_RNA (1)...(19): siRNA sense strand
ggaagaacgugaagaucaa

SEQ ID NO: 1818017 - RNA, 19 nt, Homo sapiens
  misc_RNA (1)...(19): siRNA sense strand
ggaacuaggugccauaaag

SEQ ID NO: 1818018 - RNA, 19 nt, Homo sapiens
  misc_RNA (1)...(19): siRNA sense strand
caaauacacuaguagaaga

SEQ ID NO: 1818019 - RNA, 19 nt, Homo sapiens
  misc_RNA (1)...(19): siRNA sense strand
cuaauaagcuggagaaugg

SEQ ID NO: 1818020 - RNA, 19 nt, Homo sapiens
  misc_RNA (1)...(19): siRNA sense strand
gcacgaggcugguaucgau

SEQ ID NO: 1818021 - RNA, 19 nt, Homo sapiens
  misc_RNA (1)...(19): siRNA sense strand
ggaauaugcugacaaaguc

SEQ ID NO: 1818022 - RNA, 19 nt, Homo sapiens
  misc_RNA (1)...(19): siRNA sense strand
ugaagaaacugucagaugu

SEQ ID NO: 1818023 - RNA, 19 nt, Homo sapiens
  misc_RNA (1)...(19): siRNA sense strand
ggauuaaccugguguuugu

SEQ ID NO: 1818024 - RNA, 19 nt, Homo sapiens
  misc_RNA (1)...(19): siRNA sense strand
guacuacaaugccaugaaa

SEQ ID NO: 1818025 - RNA, 19 nt, Homo sapiens
  misc_RNA (1)...(19): siRNA sense strand
ccauggaucccuacuauua

SEQ ID NO: 1818026 - RNA, 19 nt, Homo sapiens
  misc_RNA (1)...(19): siRNA sense strand
gaaaggcccuggaucucuu

SEQ ID NO: 1818027 - RNA, 19 nt, Homo sapiens
  misc_RNA (1)...(19): siRNA sense strand
ggaaaacucucuucagauu

SEQ ID NO: 1818028 - RNA, 19 nt, Homo sapiens
  misc_RNA (1)...(19): siRNA sense strand
gaagauggcaugagaagga

SEQ ID NO: 1818029 - RNA, 19 nt, Homo sapiens
  misc_RNA (1)...(19): siRNA sense strand
ccucggagcucuucugaaa

SEQ ID NO: 1818030 - RNA, 19 nt, Homo sapiens
  misc_RNA (1)...(19): siRNA sense strand
gggaagaguuugccuuuca

SEQ ID NO: 1818031 - RNA, 19 nt, Homo sapiens
  misc_RNA (1)...(19): siRNA sense strand
gcaagcagauggagaacau

SEQ ID NO: 1818032 - RNA, 19 nt, Homo sapiens
  misc_RNA (1)...(19): siRNA sense strand
gaaagagauugugaacuug

SEQ ID NO: 1818033 - RNA, 19 nt, Homo sapiens
  misc_RNA (1)...(19): siRNA sense strand
gcaagagguuucugcauag

SEQ ID NO: 1818034 - RNA, 19 nt, Homo sapiens
  misc_RNA (1)...(19): siRNA sense strand
cauuguggcugucucuuua

SEQ ID NO: 1818035 - RNA, 19 nt, Homo sapiens
  misc_RNA (1)...(19): siRNA sense strand
gcaaagauaaacuagauga

SEQ ID NO: 1818036 - RNA, 19 nt, Homo sapiens
  misc_RNA (1)...(19): siRNA sense strand
cagcaaagauaaacuagau

SEQ ID NO: 1818037 - RNA, 19 nt, Homo sapiens
  misc_RNA (1)...(19): siRNA sense strand
ggaugcaacucuuuggaaa

SEQ ID NO: 1818038 - RNA, 19 nt, Homo sapiens
  misc_RNA (1)...(19): siRNA sense strand
ccauggaacugguuagauu

SEQ ID NO: 1818039 - RNA, 19 nt, Homo sapiens
  misc_RNA (1)...(19): siRNA sense strand
ggacagaaucaacaguaua

SEQ ID NO: 1818040 - RNA, 19 nt, Homo sapiens
  misc_RNA (1)...(19): siRNA sense strand
gaugacauguucaacuuug

SEQ ID NO: 1818041 - RNA, 19 nt, Homo sapiens
  misc_RNA (1)...(19): siRNA sense strand
gcagaaaaccuuuguagua

SEQ ID NO: 1818042 - RNA, 19 nt, Homo sapiens
  misc_RNA (1)...(19): siRNA sense strand
gaauguuccuggcagauau

SEQ ID NO: 1818043 - RNA, 19 nt, Homo sapiens
  misc_RNA (1)...(19): siRNA sense strand
ggaagaguauaucaacaau

SEQ ID NO: 1818044 - RNA, 19 nt, Homo sapiens
  misc_RNA (1)...(19): siRNA sense strand
ccauugagcucaucgcuau

SEQ ID NO: 1818045 - RNA, 19 nt, Homo sapiens
  misc_RNA (1)...(19): siRNA sense strand
gaagaaaggcccuggaucu

SEQ ID NO: 1818046 - RNA, 19 nt, Homo sapiens
  misc_RNA (1)...(19): siRNA sense strand
gacaauaucuacauguaca

SEQ ID NO: 1818047 - RNA, 19 nt, Homo sapiens
  misc_RNA (1)...(19): siRNA sense strand
gcagcagcguggagaagua

SEQ ID NO: 1818048 - RNA, 19 nt, Homo sapiens
  misc_RNA (1)...(19): siRNA sense strand
gcuggaaccuuuacucugu

SEQ ID NO: 1818049 - RNA, 19 nt, Homo sapiens
  misc_RNA (1)...(19): siRNA sense strand
gacagaaucaacaguauaa

SEQ ID NO: 1818050 - RNA, 19 nt, Homo sapiens
  misc_RNA (1)...(19): siRNA sense strand
gaccaacuguguauucaug

SEQ ID NO: 1818051 - RNA, 19 nt, Homo sapiens
  misc_RNA (1)...(19): siRNA sense strand
agaaugaguucgcggauga

SEQ ID NO: 1818052 - RNA, 19 nt, Homo sapiens
  misc_RNA (1)...(19): siRNA sense strand
ucagagaauccaaguguua

SEQ ID NO: 1818053 - RNA, 19 nt, Homo sapiens
  misc_RNA (1)...(19): siRNA sense strand
caucauguaugcagcugua

SEQ ID NO: 1818054 - RNA, 19 nt, Homo sapiens
  misc_RNA (1)...(19): siRNA sense strand
gaacgugaagaucaacuuu

SEQ ID NO: 1818055 - RNA, 19 nt, Homo sapiens
  misc_RNA (1)...(19): siRNA sense strand
ucugaaaucucuaaacuca

SEQ ID NO: 1818056 - RNA, 19 nt, Homo sapiens
  misc_RNA (1)...(19): siRNA sense strand
cagaagaaguacuacaaug

SEQ ID NO: 1818057 - RNA, 19 nt, Homo sapiens
  misc_RNA (1)...(19): siRNA sense strand
gcugcgaucuuuccgauug

SEQ ID NO: 1818058 - RNA, 19 nt, Homo sapiens
  misc_RNA (1)...(19): siRNA sense strand
guucauuggugucaucauu

SEQ ID NO: 1818059 - RNA, 19 nt, Homo sapiens
  misc_RNA (1)...(19): siRNA sense strand
ccgaagaacagaagaagua

SEQ ID NO: 1818060 - RNA, 19 nt, Homo sapiens
  misc_RNA (1)...(19): siRNA sense strand
ggaacugucucagaagaug

SEQ ID NO: 1818061 - RNA, 19 nt, Homo sapiens
  misc_RNA (1)...(19): siRNA sense strand
cagcaagccuuugacauug

SEQ ID NO: 1818062 - RNA, 19 nt, Homo sapiens
  misc_RNA (1)...(19): siRNA sense strand
uaaugagacuucugaaauc

SEQ ID NO: 1818063 - RNA, 19 nt, Homo sapiens
  misc_RNA (1)...(19): siRNA sense strand
gaccacauguccuucauca

SEQ ID NO: 1818064 - RNA, 19 nt, Homo sapiens
  misc_RNA (1)...(19): siRNA sense strand
caacuaugguuacacaagu

SEQ ID NO: 1818065 - RNA, 19 nt, Homo sapiens
  misc_RNA (1)...(19): siRNA sense strand
ccacccaguucauugagua

SEQ ID NO: 1818066 - RNA, 19 nt, Homo sapiens
  misc_RNA (1)...(19): siRNA sense strand
caugggaguuaacuuguuu

SEQ ID NO: 1818067 - RNA, 19 nt, Homo sapiens
  misc_RNA (1)...(19): siRNA sense strand
uggaacagccugaggaaua

SEQ ID NO: 1818068 - RNA, 19 nt, Homo sapiens
  misc_RNA (1)...(19): siRNA sense strand
aacgagagcuaucuugaaa

SEQ ID NO: 1818069 - RNA, 19 nt, Homo sapiens
  misc_RNA (1)...(19): siRNA sense strand
uaucaaaccagaaguagaa

SEQ ID NO: 1818070 - RNA, 19 nt, Homo sapiens
  misc_RNA (1)...(19): siRNA sense strand
ccagagggauaccagugua

SEQ ID NO: 1818071 - RNA, 19 nt, Homo sapiens
  misc_RNA (1)...(19): siRNA sense strand
ggucgaagaauguggagua

SEQ ID NO: 1818072 - RNA, 19 nt, Homo sapiens
  misc_RNA (1)...(19): siRNA sense strand
gcacuacuacuucaccauu

SEQ ID NO: 1818073 - RNA, 19 nt, Homo sapiens
  misc_RNA (1)...(19): siRNA sense strand
ggacuuugacccauacuau

SEQ ID NO: 1818074 - RNA, 19 nt, Homo sapiens
  misc_RNA (1)...(19): siRNA sense strand
gaaacugucagaugugaug

SEQ ID NO: 1818075 - RNA, 19 nt, Homo sapiens
  misc_RNA (1)...(19): siRNA sense strand
gcucaaagagugcaaagga

SEQ ID NO: 1818076 - RNA, 19 nt, Homo sapiens
  misc_RNA (1)...(19): siRNA sense strand
gcaagccuuugacauuguu

SEQ ID NO: 1818077 - RNA, 19 nt, Homo sapiens
  misc_RNA (1)...(19): siRNA sense strand
ucaaguagcaaccuucaaa

SEQ ID NO: 1818078 - RNA, 19 nt, Homo sapiens
  misc_RNA (1)...(19): siRNA sense strand
gccauaaagucccuuagga

SEQ ID NO: 1818079 - RNA, 19 nt, Homo sapiens
  misc_RNA (1)...(19): siRNA sense strand
gaaagaagaggaagcaaaa

SEQ ID NO: 1818080 - RNA, 19 nt, Homo sapiens
  misc_RNA (1)...(19): siRNA sense strand
gagugugucugcaagauca

SEQ ID NO: 1818081 - RNA, 19 nt, Homo sapiens
  misc_RNA (1)...(19): siRNA sense strand
gcucaaagaagccacagaa

SEQ ID NO: 1818082 - RNA, 19 nt, Homo sapiens
  misc_RNA (1)...(19): siRNA sense strand
gcaaaggaaagacguaaca

SEQ ID NO: 1818083 - RNA, 19 nt, Homo sapiens
  misc_RNA (1)...(19): siRNA sense strand
ggcaucuucuucuuuguaa

SEQ ID NO: 1818084 - RNA, 19 nt, Homo sapiens
  misc_RNA (1)...(19): siRNA sense strand
caaaggcgccaaagggauu

SEQ ID NO: 1818085 - RNA, 19 nt, Homo sapiens
  misc_RNA (1)...(19): siRNA sense strand
ggucaggacaucuucauga

SEQ ID NO: 1818086 - RNA, 19 nt, Homo sapiens
  misc_RNA (1)...(19): siRNA sense strand
auacagagaucagauggaa

SEQ ID NO: 1818087 - RNA, 19 nt, Homo sapiens
  misc_RNA (1)...(19): siRNA sense strand
guggagaaguacaucauug

SEQ ID NO: 1818088 - RNA, 19 nt, Homo sapiens
  misc_RNA (1)...(19): siRNA sense strand
gucagaagauggcaugaga

SEQ ID NO: 1818089 - RNA, 19 nt, Homo sapiens
  misc_RNA (1)...(19): siRNA sense strand
ucucuaaacucagcucaaa

SEQ ID NO: 1818090 - RNA, 19 nt, Homo sapiens
  misc_RNA (1)...(19): siRNA sense strand
guagucauccucuccauug

SEQ ID NO: 1818091 - RNA, 19 nt, Homo sapiens
  misc_RNA (1)...(19): siRNA sense strand
ucagcaagccuuugacauu

SEQ ID NO: 1818092 - RNA, 19 nt, Homo sapiens
  misc_RNA (1)...(19): siRNA sense strand
gaacaauacagagaucaga

SEQ ID NO: 1818093 - RNA, 19 nt, Homo sapiens
  misc_RNA (1)...(19): siRNA sense strand
gaacuaggugccauaaagu

SEQ ID NO: 1818094 - RNA, 19 nt, Homo sapiens
  misc_RNA (1)...(19): siRNA sense strand
ugacaaagucuucaccuau

SEQ ID NO: 1818095 - RNA, 19 nt, Homo sapiens
  misc_RNA (1)...(19): siRNA sense strand
ucgaggacaucuacauuga

SEQ ID NO: 1818096 - RNA, 19 nt, Homo sapiens
  misc_RNA (1)...(19): siRNA sense strand
ggaacagccugaggaauac

SEQ ID NO: 1818097 - RNA, 19 nt, Homo sapiens
  misc_RNA (1)...(19): siRNA sense strand
ccaacuguaucgccaauca

SEQ ID NO: 1818098 - RNA, 19 nt, Homo sapiens
  misc_RNA (1)...(19): siRNA sense strand
ggauaaaacugaaagagau

SEQ ID NO: 1818099 - RNA, 19 nt, Homo sapiens
  misc_RNA (1)...(19): siRNA sense strand
ugucuuggcuguaggaaau

SEQ ID NO: 1818100 - RNA, 19 nt, Homo sapiens
  misc_RNA (1)...(19): siRNA sense strand
gcuacaucaucaucucuuu

SEQ ID NO: 1818101 - RNA, 19 nt, Homo sapiens
  misc_RNA (1)...(19): siRNA sense strand
gaacagaagaaguacuaca

SEQ ID NO: 1818102 - RNA, 19 nt, Homo sapiens
  misc_RNA (1)...(19): siRNA sense strand
ggaugagggugguggugaa

SEQ ID NO: 1818103 - RNA, 19 nt, Homo sapiens
  misc_RNA (1)...(19): siRNA sense strand
ccuggaauaugcugacaaa

SEQ ID NO: 1818104 - RNA, 19 nt, Homo sapiens
  misc_RNA (1)...(19): siRNA sense strand
ugaagccucuggaugaguu

SEQ ID NO: 1818105 - RNA, 19 nt, Homo sapiens
  misc_RNA (1)...(19): siRNA sense strand
gaaauacccuggaucuuua

SEQ ID NO: 1818106 - RNA, 19 nt, Homo sapiens
  misc_RNA (1)...(19): siRNA sense strand
gagaguaccuccagauuua

SEQ ID NO: 1818107 - RNA, 19 nt, Homo sapiens
  misc_RNA (1)...(19): siRNA sense strand
gaaauggaauggagugaua

SEQ ID NO: 1818108 - RNA, 19 nt, Homo sapiens
  misc_RNA (1)...(19): siRNA sense strand
gaaguuaucuggcugcuuu

SEQ ID NO: 1818109 - RNA, 19 nt, Homo sapiens
  misc_RNA (1)...(19): siRNA sense strand
gcuaaucccucuauaguua

SEQ ID NO: 1818110 - RNA, 19 nt, Homo sapiens
  misc_RNA (1)...(19): siRNA sense strand
ggaaauuggugaaaguuua

SEQ ID NO: 1818111 - RNA, 19 nt, Homo sapiens
  misc_RNA (1)...(19): siRNA sense strand
caaagaugcugcuacauua

SEQ ID NO: 1818112 - RNA, 19 nt, Homo sapiens
  misc_RNA (1)...(19): siRNA sense strand
ggaguucucugcugaguua

SEQ ID NO: 1818113 - RNA, 19 nt, Homo sapiens
  misc_RNA (1)...(19): siRNA sense strand
gauuagaucugguacuuua

SEQ ID NO: 1818114 - RNA, 19 nt, Homo sapiens
  misc_RNA (1)...(19): siRNA sense strand
acacagaaguugaguaaua

SEQ ID NO: 1818115 - RNA, 19 nt, Homo sapiens
  misc_RNA (1)...(19): siRNA sense strand
gcacagcucugaguaguuu

SEQ ID NO: 1818116 - RNA, 19 nt, Homo sapiens
  misc_RNA (1)...(19): siRNA sense strand
caaaugaucuggcugaguu

SEQ ID NO: 1818117 - RNA, 19 nt, Homo sapiens
  misc_RNA (1)...(19): siRNA sense strand
caagaagucuguagauuug

SEQ ID NO: 1818118 - RNA, 19 nt, Homo sapiens
  misc_RNA (1)...(19): siRNA sense strand
gaaauucucuugcugauac

SEQ ID NO: 1818119 - RNA, 19 nt, Homo sapiens
  misc_RNA (1)...(19): siRNA sense strand
cuagugauaucuccaauua

SEQ ID NO: 1818120 - RNA, 19 nt, Homo sapiens
  misc_RNA (1)...(19): siRNA sense strand
gaaacuaucuccugucaca

SEQ ID NO: 1818121 - RNA, 19 nt, Homo sapiens
  misc_RNA (1)...(19): siRNA sense strand
gaacagauuugcagcugaa

SEQ ID NO: 1818122 - RNA, 19 nt, Homo sapiens
  misc_RNA (1)...(19): siRNA sense strand
gaaagcacuuauucuauga

SEQ ID NO: 1818123 - RNA, 19 nt, Homo sapiens
  misc_RNA (1)...(19): siRNA sense strand
ucacuuugcuuucauagua

SEQ ID NO: 1818124 - RNA, 19 nt, Homo sapiens
  misc_RNA (1)...(19): siRNA sense strand
ggacagcaauauugaagaa

SEQ ID NO: 1818125 - RNA, 19 nt, Homo sapiens
  misc_RNA (1)...(19): siRNA sense strand
cagcugguaucaugaauua

SEQ ID NO: 1818126 - RNA, 19 nt, Homo sapiens
  misc_RNA (1)...(19): siRNA sense strand
cagcaaagaucccagauga

SEQ ID NO: 1818127 - RNA, 19 nt, Homo sapiens
  misc_RNA (1)...(19): siRNA sense strand
gcacaagucccauaaauuc

SEQ ID NO: 1818128 - RNA, 19 nt, Homo sapiens
  misc_RNA (1)...(19): siRNA sense strand
caagacagaucuauacaga

SEQ ID NO: 1818129 - RNA, 19 nt, Homo sapiens
  misc_RNA (1)...(19): siRNA sense strand
ggauguaaguccauguaua

SEQ ID NO: 1818130 - RNA, 19 nt, Homo sapiens
  misc_RNA (1)...(19): siRNA sense strand
caacaaaggacaaauaaug

SEQ ID NO: 1818131 - RNA, 19 nt, Homo sapiens
  misc_RNA (1)...(19): siRNA sense strand
ccaaggaguugucaauaaa

SEQ ID NO: 1818132 - RNA, 19 nt, Homo sapiens
  misc_RNA (1)...(19): siRNA sense strand
ccucaaagauagaagauaa

SEQ ID NO: 1818133 - RNA, 19 nt, Homo sapiens
  misc_RNA (1)...(19): siRNA sense strand
caagacccauuauccaaua

SEQ ID NO: 1818134 - RNA, 19 nt, Homo sapiens
  misc_RNA (1)...(19): siRNA sense strand
ggagcaacuuguaaagaua

SEQ ID NO: 1818135 - RNA, 19 nt, Homo sapiens
  misc_RNA (1)...(19): siRNA sense strand
ggaaaaugcugacuuauga

SEQ ID NO: 1818136 - RNA, 19 nt, Homo sapiens
  misc_RNA (1)...(19): siRNA sense strand
gaugaaaguggacuaaaua

SEQ ID NO: 1818137 - RNA, 19 nt, Homo sapiens
  misc_RNA (1)...(19): siRNA sense strand
gaagaguacuguuaacaca

SEQ ID NO: 1818138 - RNA, 19 nt, Homo sapiens
  misc_RNA (1)...(19): siRNA sense strand
guaagaagacuguuaauuc

SEQ ID NO: 1818139 - RNA, 19 nt, Homo sapiens
  misc_RNA (1)...(19): siRNA sense strand
cagacuccauuacuuauua

SEQ ID NO: 1818140 - RNA, 19 nt, Homo sapiens
  misc_RNA (1)...(19): siRNA sense strand
uagaggagcugccuucauu

SEQ ID NO: 1818141 - RNA, 19 nt, Homo sapiens
  misc_RNA (1)...(19): siRNA sense strand
cgaaagcacuuauucuaug

SEQ ID NO: 1818142 - RNA, 19 nt, Homo sapiens
  misc_RNA (1)...(19): siRNA sense strand
gaaaugagguggcucuaac

SEQ ID NO: 1818143 - RNA, 19 nt, Homo sapiens
  misc_RNA (1)...(19): siRNA sense strand
gccaaggaguugucaauaa

SEQ ID NO: 1818144 - RNA, 19 nt, Homo sapiens
  misc_RNA (1)...(19): siRNA sense strand
gaucagaauuugccucaga

SEQ ID NO: 1818145 - RNA, 19 nt, Homo sapiens
  misc_RNA (1)...(19): siRNA sense strand
gaaauaccaagcucuuuaa

SEQ ID NO: 1818146 - RNA, 19 nt, Homo sapiens
  misc_RNA (1)...(19): siRNA sense strand
gauaacaguuugcuucuag

SEQ ID NO: 1818147 - RNA, 19 nt, Homo sapiens
  misc_RNA (1)...(19): siRNA sense strand
ggaaauugccgaagcugua

SEQ ID NO: 1818148 - RNA, 19 nt, Homo sapiens
  misc_RNA (1)...(19): siRNA sense strand
aaacucgacuugcaaauga

SEQ ID NO: 1818149 - RNA, 19 nt, Homo sapiens
  misc_RNA (1)...(19): siRNA sense strand
gaaaugugaugaagacaag

SEQ ID NO: 1818150 - RNA, 19 nt, Homo sapiens
  misc_RNA (1)...(19): siRNA sense strand
ggaacaagaugaaauacca

SEQ ID NO: 1818151 - RNA, 19 nt, Homo sapiens
  misc_RNA (1)...(19): siRNA sense strand
cuauuaaacuggugaauga

SEQ ID NO: 1818152 - RNA, 19 nt, Homo sapiens
  misc_RNA (1)...(19): siRNA sense strand
gauaugagauucagaugca

SEQ ID NO: 1818153 - RNA, 19 nt, Homo sapiens
  misc_RNA (1)...(19): siRNA sense strand
gauuaugccuugcaaaugu

SEQ ID NO: 1818154 - RNA, 19 nt, Homo sapiens
  misc_RNA (1)...(19): siRNA sense strand
uaaaucgucuggacauuga

SEQ ID NO: 1818155 - RNA, 19 nt, Homo sapiens
  misc_RNA (1)...(19): siRNA sense strand
gaaagccaaaugccuaaua

SEQ ID NO: 1818156 - RNA, 19 nt, Homo sapiens
  misc_RNA (1)...(19): siRNA sense strand
gacuuaagcugauagcaaa

SEQ ID NO: 1818157 - RNA, 19 nt, Homo sapiens
  misc_RNA (1)...(19): siRNA sense strand
gagcauaacaaagcaaaua

SEQ ID NO: 1818158 - RNA, 19 nt, Homo sapiens
  misc_RNA (1)...(19): siRNA sense strand
gauguuaugucuaaacuag

SEQ ID NO: 1818159 - RNA, 19 nt, Homo sapiens
  misc_RNA (1)...(19): siRNA sense strand
gaaucaauuugcagcagua

SEQ ID NO: 1818160 - RNA, 19 nt, Homo sapiens
  misc_RNA (1)...(19): siRNA sense strand
cuaaaggaaucaacguuaa

SEQ ID NO: 1818161 - RNA, 19 nt, Homo sapiens
  misc_RNA (1)...(19): siRNA sense strand
gcaacuggauccugcaaga

SEQ ID NO: 1818162 - RNA, 19 nt, Homo sapiens
  misc_RNA (1)...(19): siRNA sense strand
guaaagauaugcaagaacu

SEQ ID NO: 1818163 - RNA, 19 nt, Homo sapiens
  misc_RNA (1)...(19): siRNA sense strand
ugccauacgucaucauuua

SEQ ID NO: 1818164 - RNA, 19 nt, Homo sapiens
  misc_RNA (1)...(19): siRNA sense strand
gcaaagaucccagaugaga

SEQ ID NO: 1818165 - RNA, 19 nt, Homo sapiens
  misc_RNA (1)...(19): siRNA sense strand
gaaucacuuugcuuucaua

SEQ ID NO: 1818166 - RNA, 19 nt, Homo sapiens
  misc_RNA (1)...(19): siRNA sense strand
aaauacagcuucagaggaa

SEQ ID NO: 1818167 - RNA, 19 nt, Homo sapiens
  misc_RNA (1)...(19): siRNA sense strand
aagauuaccuuucagugua

SEQ ID NO: 1818168 - RNA, 19 nt, Homo sapiens
  misc_RNA (1)...(19): siRNA sense strand
gaaauuauggcaacuuugu

SEQ ID NO: 1818169 - RNA, 19 nt, Homo sapiens
  misc_RNA (1)...(19): siRNA sense strand
gucaacaccuucagcauuu

SEQ ID NO: 1818170 - RNA, 19 nt, Homo sapiens
  misc_RNA (1)...(19): siRNA sense strand
ucaaaggccucauaaucaa

SEQ ID NO: 1818171 - RNA, 19 nt, Homo sapiens
  misc_RNA (1)...(19): siRNA sense strand
gaaaguggacuaaauaaac

SEQ ID NO: 1818172 - RNA, 19 nt, Homo sapiens
  misc_RNA (1)...(19): siRNA sense strand
gaacuauggugcauucucu

SEQ ID NO: 1818173 - RNA, 19 nt, Homo sapiens
  misc_RNA (1)...(19): siRNA sense strand
gcggagccauaaugaauaa

SEQ ID NO: 1818174 - RNA, 19 nt, Homo sapiens
  misc_RNA (1)...(19): siRNA sense strand
caaggaaaaugcugacuua

SEQ ID NO: 1818175 - RNA, 19 nt, Homo sapiens
  misc_RNA (1)...(19): siRNA sense strand
ggaccaucuuuaaacaaua

SEQ ID NO: 1818176 - RNA, 19 nt, Homo sapiens
  misc_RNA (1)...(19): siRNA sense strand
caaggaggauguugauaau

SEQ ID NO: 1818177 - RNA, 19 nt, Homo sapiens
  misc_RNA (1)...(19): siRNA sense strand
ugaagaacauugugccaaa

SEQ ID NO: 1818178 - RNA, 19 nt, Homo sapiens
  misc_RNA (1)...(19): siRNA sense strand
ugaaauaccaagcucuuua

SEQ ID NO: 1818179 - RNA, 19 nt, Homo sapiens
  misc_RNA (1)...(19): siRNA sense strand
cgaagaaacagaaaugaaa

SEQ ID NO: 1818180 - RNA, 19 nt, Homo sapiens
  misc_RNA (1)...(19): siRNA sense strand
ccacuuauccagcuuguaa

SEQ ID NO: 1818181 - RNA, 19 nt, Homo sapiens
  misc_RNA (1)...(19): siRNA sense strand
cuaagaugguugaagauaa

SEQ ID NO: 1818182 - RNA, 19 nt, Homo sapiens
  misc_RNA (1)...(19): siRNA sense strand
gcaguaauccuucugaugu

SEQ ID NO: 1818183 - RNA, 19 nt, Homo sapiens
  misc_RNA (1)...(19): siRNA sense strand
ggaaauggagcuuaguuug

SEQ ID NO: 1818184 - RNA, 19 nt, Homo sapiens
  misc_RNA (1)...(19): siRNA sense strand
gaaacagucagaagagauu

SEQ ID NO: 1818185 - RNA, 19 nt, Homo sapiens
  misc_RNA (1)...(19): siRNA sense strand
ccagugaaauugaaguuug

SEQ ID NO: 1818186 - RNA, 19 nt, Homo sapiens
  misc_RNA (1)...(19): siRNA sense strand
gggaaaguaugaugaguuc

SEQ ID NO: 1818187 - RNA, 19 nt, Homo sapiens
  misc_RNA (1)...(19): siRNA sense strand
gauaaagacaagacaguuu

SEQ ID NO: 1818188 - RNA, 19 nt, Homo sapiens
  misc_RNA (1)...(19): siRNA sense strand
ccaaggaggauguugauaa

SEQ ID NO: 1818189 - RNA, 19 nt, Homo sapiens
  misc_RNA (1)...(19): siRNA sense strand
ugaaauacccuggaucuuu

SEQ ID NO: 1818190 - RNA, 19 nt, Homo sapiens
  misc_RNA (1)...(19): siRNA sense strand
ucacaaagaugcugcuaca

SEQ ID NO: 1818191 - RNA, 19 nt, Homo sapiens
  misc_RNA (1)...(19): siRNA sense strand
ggaauggagugauaacagu

SEQ ID NO: 1818192 - RNA, 19 nt, Homo sapiens
  misc_RNA (1)...(19): siRNA sense strand
ugacucaucuucaggagaa

SEQ ID NO: 1818193 - RNA, 19 nt, Homo sapiens
  misc_RNA (1)...(19): siRNA sense strand
gagguuaaguuuguacuga

SEQ ID NO: 1818194 - RNA, 19 nt, Homo sapiens
  misc_RNA (1)...(19): siRNA sense strand
cagcauggcaucuguagua

SEQ ID NO: 1818195 - RNA, 19 nt, Homo sapiens
  misc_RNA (1)...(19): siRNA sense strand
gaaaguaugaugaguucaa

SEQ ID NO: 1818196 - RNA, 19 nt, Homo sapiens
  misc_RNA (1)...(19): siRNA sense strand
aaacacagaaguugaguaa

SEQ ID NO: 1818197 - RNA, 19 nt, Homo sapiens
  misc_RNA (1)...(19): siRNA sense strand
gcaaagcggagccauaaug

SEQ ID NO: 1818198 - RNA, 19 nt, Homo sapiens
  misc_RNA (1)...(19): siRNA sense strand
gcugagaacuuuagcucuu

SEQ ID NO: 1818199 - RNA, 19 nt, Homo sapiens
  misc_RNA (1)...(19): siRNA sense strand
gcccuaagaugguugaaga

SEQ ID NO: 1818200 - RNA, 19 nt, Homo sapiens
  misc_RNA (1)...(19): siRNA sense strand
gcaaauaaacggacacgau

SEQ ID NO: 1818201 - RNA, 19 nt, Homo sapiens
  misc_RNA (1)...(19): siRNA sense strand
gaaugugucugaauuugca

SEQ ID NO: 1818202 - RNA, 19 nt, Homo sapiens
  misc_RNA (1)...(19): siRNA sense strand
uaucagacuccauuacuua

SEQ ID NO: 1818203 - RNA, 19 nt, Homo sapiens
  misc_RNA (1)...(19): siRNA sense strand
ggaaggaaaggccagcaua

SEQ ID NO: 1818204 - RNA, 19 nt, Homo sapiens
  misc_RNA (1)...(19): siRNA sense strand
ugaaagagaugaguaugga

SEQ ID NO: 1818205 - RNA, 19 nt, Homo sapiens
  misc_RNA (1)...(19): siRNA sense strand
ggaaggugcuggaauguga

SEQ ID NO: 1818206 - RNA, 19 nt, Homo sapiens
  misc_RNA (1)...(19): siRNA sense strand
gaaagauuaugccuucgua

SEQ ID NO: 1818207 - RNA, 19 nt, Homo sapiens
  misc_RNA (1)...(19): siRNA sense strand
gagccaaguuugaggagua

SEQ ID NO: 1818208 - RNA, 19 nt, Homo sapiens
  misc_RNA (1)...(19): siRNA sense strand
ggaauucucuguacgacau

SEQ ID NO: 1818209 - RNA, 19 nt, Homo sapiens
  misc_RNA (1)...(19): siRNA sense strand
cagcuuccacuucauauua

SEQ ID NO: 1818210 - RNA, 19 nt, Homo sapiens
  misc_RNA (1)...(19): siRNA sense strand
gagcagugcguacgccuua

SEQ ID NO: 1818211 - RNA, 19 nt, Homo sapiens
  misc_RNA (1)...(19): siRNA sense strand
gguaugagcgggagcagua

SEQ ID NO: 1818212 - RNA, 19 nt, Homo sapiens
  misc_RNA (1)...(19): siRNA sense strand
uacgcaaccugcaccauua

SEQ ID NO: 1818213 - RNA, 19 nt, Homo sapiens
  misc_RNA (1)...(19): siRNA sense strand
gcagcugccuccguguaua

SEQ ID NO: 1818214 - RNA, 19 nt, Homo sapiens
  misc_RNA (1)...(19): siRNA sense strand
gaagccagcaagaauaaga

SEQ ID NO: 1818215 - RNA, 19 nt, Homo sapiens
  misc_RNA (1)...(19): siRNA sense strand
cauuaagaauuacggcuuu

SEQ ID NO: 1818216 - RNA, 19 nt, Homo sapiens
  misc_RNA (1)...(19): siRNA sense strand
ugaccgagcaauauaauga

SEQ ID NO: 1818217 - RNA, 19 nt, Homo sapiens
  misc_RNA (1)...(19): siRNA sense strand
gugacaucgugaaagauua

SEQ ID NO: 1818218 - RNA, 19 nt, Homo sapiens
  misc_RNA (1)...(19): siRNA sense strand
cugccuccguguauaauua

SEQ ID NO: 1818219 - RNA, 19 nt, Homo sapiens
  misc_RNA (1)...(19): siRNA sense strand
gcaauauaaugagcaauac

SEQ ID NO: 1818220 - RNA, 19 nt, Homo sapiens
  misc_RNA (1)...(19): siRNA sense strand
caaagaguguccgauagau

SEQ ID NO: 1818221 - RNA, 19 nt, Homo sapiens
  misc_RNA (1)...(19): siRNA sense strand
ccaaagaguguccgauaga

SEQ ID NO: 1818222 - RNA, 19 nt, Homo sapiens
  misc_RNA (1)...(19): siRNA sense strand
gauuaugccuucguacaca

SEQ ID NO: 1818223 - RNA, 19 nt, Homo sapiens
  misc_RNA (1)...(19): siRNA sense strand
guccaaagaguguccgaua

SEQ ID NO: 1818224 - RNA, 19 nt, Homo sapiens
  misc_RNA (1)...(19): siRNA sense strand
guggaagccagcaagaaua

SEQ ID NO: 1818225 - RNA, 19 nt, Homo sapiens
  misc_RNA (1)...(19): siRNA sense strand
gagcuucgagccaaguuug

SEQ ID NO: 1818226 - RNA, 19 nt, Homo sapiens
  misc_RNA (1)...(19): siRNA sense strand
gaccagagcggcugcuauc

SEQ ID NO: 1818227 - RNA, 19 nt, Homo sapiens
  misc_RNA (1)...(19): siRNA sense strand
cgagcaauauaaugagcaa

SEQ ID NO: 1818228 - RNA, 19 nt, Homo sapiens
  misc_RNA (1)...(19): siRNA sense strand
ggagauucgcucacucuuc

SEQ ID NO: 1818229 - RNA, 19 nt, Homo sapiens
  misc_RNA (1)...(19): siRNA sense strand
cagcaagaauaagagcaaa

SEQ ID NO: 1818230 - RNA, 19 nt, Homo sapiens
  misc_RNA (1)...(19): siRNA sense strand
gacuugaccgagcaauaua

SEQ ID NO: 1818231 - RNA, 19 nt, Homo sapiens
  misc_RNA (1)...(19): siRNA sense strand
auacagccauggccaguca

SEQ ID NO: 1818232 - RNA, 19 nt, Homo sapiens
  misc_RNA (1)...(19): siRNA sense strand
uuacggcuuugugcacaua

SEQ ID NO: 1818233 - RNA, 19 nt, Homo sapiens
  misc_RNA (1)...(19): siRNA sense strand
cagcugccuccguguauaa

SEQ ID NO: 1818234 - RNA, 19 nt, Homo sapiens
  misc_RNA (1)...(19): siRNA sense strand
uggaagccagcaagaauaa

SEQ ID NO: 1818235 - RNA, 19 nt, Homo sapiens
  misc_RNA (1)...(19): siRNA sense strand
ggaguaugguccggucauc

SEQ ID NO: 1818236 - RNA, 19 nt, Homo sapiens
  misc_RNA (1)...(19): siRNA sense strand
cuacagagcaggagauucg

SEQ ID NO: 1818237 - RNA, 19 nt, Homo sapiens
  misc_RNA (1)...(19): siRNA sense strand
agacuugaccgagcaauau

SEQ ID NO: 1818238 - RNA, 19 nt, Homo sapiens
  misc_RNA (1)...(19): siRNA sense strand
gggcacugguccaaagagu

SEQ ID NO: 1818239 - RNA, 19 nt, Homo sapiens
  misc_RNA (1)...(19): siRNA sense strand
ggagagggcuacgguuacg

SEQ ID NO: 1818240 - RNA, 19 nt, Homo sapiens
  misc_RNA (1)...(19): siRNA sense strand
gcagcuuccacuucauauu

SEQ ID NO: 1818241 - RNA, 19 nt, Homo sapiens
  misc_RNA (1)...(19): siRNA sense strand
gcaaccugcaccauuacaa

SEQ ID NO: 1818242 - RNA, 19 nt, Homo sapiens
  misc_RNA (1)...(19): siRNA sense strand
gugcugcccgguccuauga

SEQ ID NO: 1818243 - RNA, 19 nt, Homo sapiens
  misc_RNA (1)...(19): siRNA sense strand
cagacuugaccgagcaaua

SEQ ID NO: 1818244 - RNA, 19 nt, Homo sapiens
  misc_RNA (1)...(19): siRNA sense strand
cacagaguuucaaggcaaa

SEQ ID NO: 1818245 - RNA, 19 nt, Homo sapiens
  misc_RNA (1)...(19): siRNA sense strand
ugacaucgugaaagauuau

SEQ ID NO: 1818246 - RNA, 19 nt, Homo sapiens
  misc_RNA (1)...(19): siRNA sense strand
caagacggcagcugaggau

SEQ ID NO: 1818247 - RNA, 19 nt, Homo sapiens
  misc_RNA (1)...(19): siRNA sense strand
gcucgaugccuacuacaag

SEQ ID NO: 1818248 - RNA, 19 nt, Homo sapiens
  misc_RNA (1)...(19): siRNA sense strand
guuacgggcaugagaguga

SEQ ID NO: 1818249 - RNA, 19 nt, Homo sapiens
  misc_RNA (1)...(19): siRNA sense strand
ccacaaguccagaauacag

SEQ ID NO: 1818250 - RNA, 19 nt, Homo sapiens
  misc_RNA (1)...(19): siRNA sense strand
gauaacacagaguuucaag

SEQ ID NO: 1818251 - RNA, 19 nt, Homo sapiens
  misc_RNA (1)...(19): siRNA sense strand
ugugacaucgugaaagauu

SEQ ID NO: 1818252 - RNA, 19 nt, Homo sapiens
  misc_RNA (1)...(19): siRNA sense strand
uuggagagggcuacgguua

SEQ ID NO: 1818253 - RNA, 19 nt, Homo sapiens
  misc_RNA (1)...(19): siRNA sense strand
ccagcaagaauaagagcaa

SEQ ID NO: 1818254 - RNA, 19 nt, Homo sapiens
  misc_RNA (1)...(19): siRNA sense strand
uccaaagaguguccgauag

SEQ ID NO: 1818255 - RNA, 19 nt, Homo sapiens
  misc_RNA (1)...(19): siRNA sense strand
guccggucaucgaauguga

SEQ ID NO: 1818256 - RNA, 19 nt, Homo sapiens
  misc_RNA (1)...(19): siRNA sense strand
ugaguugucccaagcuuca

SEQ ID NO: 1818257 - RNA, 19 nt, Homo sapiens
  misc_RNA (1)...(19): siRNA sense strand
caaccugcaccauuacaag

SEQ ID NO: 1818258 - RNA, 19 nt, Homo sapiens
  misc_RNA (1)...(19): siRNA sense strand
ugccacaaguccagaauac

SEQ ID NO: 1818259 - RNA, 19 nt, Homo sapiens
  misc_RNA (1)...(19): siRNA sense strand
ugucccagcugccacaagu

SEQ ID NO: 1818260 - RNA, 19 nt, Homo sapiens
  misc_RNA (1)...(19): siRNA sense strand
uaagaauuacggcuuugug

SEQ ID NO: 1818261 - RNA, 19 nt, Homo sapiens
  misc_RNA (1)...(19): siRNA sense strand
cguggaagccagcaagaau

SEQ ID NO: 1818262 - RNA, 19 nt, Homo sapiens
  misc_RNA (1)...(19): siRNA sense strand
cugcagcuuccacuucaua

SEQ ID NO: 1818263 - RNA, 19 nt, Homo sapiens
  misc_RNA (1)...(19): siRNA sense strand
auacgcaaccugcaccauu

SEQ ID NO: 1818264 - RNA, 19 nt, Homo sapiens
  misc_RNA (1)...(19): siRNA sense strand
ggagcuucgagccaaguuu

SEQ ID NO: 1818265 - RNA, 19 nt, Homo sapiens
  misc_RNA (1)...(19): siRNA sense strand
uacugcagcuuccacuuca

SEQ ID NO: 1818266 - RNA, 19 nt, Homo sapiens
  misc_RNA (1)...(19): siRNA sense strand
augggaaggugcuggaaug

SEQ ID NO: 1818267 - RNA, 19 nt, Homo sapiens
  misc_RNA (1)...(19): siRNA sense strand
gcagugcguacgccuuaca

SEQ ID NO: 1818268 - RNA, 19 nt, Homo sapiens
  misc_RNA (1)...(19): siRNA sense strand
cgccuuacaccaugagcua

SEQ ID NO: 1818269 - RNA, 19 nt, Homo sapiens
  misc_RNA (1)...(19): siRNA sense strand
ucaugaaccugaucuguga

SEQ ID NO: 1818270 - RNA, 19 nt, Homo sapiens
  misc_RNA (1)...(19): siRNA sense strand
ggguggagaugcacguuaa

SEQ ID NO: 1818271 - RNA, 19 nt, Homo sapiens
  misc_RNA (1)...(19): siRNA sense strand
gcuacugugucuccaaauu

SEQ ID NO: 1818272 - RNA, 19 nt, Homo sapiens
  misc_RNA (1)...(19): siRNA sense strand
ggagaugcacguuaaggaa

SEQ ID NO: 1818273 - RNA, 19 nt, Homo sapiens
  misc_RNA (1)...(19): siRNA sense strand
gggccuuccucaccaagua

SEQ ID NO: 1818274 - RNA, 19 nt, Homo sapiens
  misc_RNA (1)...(19): siRNA sense strand
gggcuacugugucuccaaa

SEQ ID NO: 1818275 - RNA, 19 nt, Homo sapiens
  misc_RNA (1)...(19): siRNA sense strand
gcaaugccuuugucuucau

SEQ ID NO: 1818276 - RNA, 19 nt, Homo sapiens
  misc_RNA (1)...(19): siRNA sense strand
acaccacccuguuggauau

SEQ ID NO: 1818277 - RNA, 19 nt, Homo sapiens
  misc_RNA (1)...(19): siRNA sense strand
ggcgggauguagcucauuu

SEQ ID NO: 1818278 - RNA, 19 nt, Homo sapiens
  misc_RNA (1)...(19): siRNA sense strand
ccaaguggguggagaugca

SEQ ID NO: 1818279 - RNA, 19 nt, Homo sapiens
  misc_RNA (1)...(19): siRNA sense strand
cagcaaugccuuugucuuc

SEQ ID NO: 1818280 - RNA, 19 nt, Homo sapiens
  misc_RNA (1)...(19): siRNA sense strand
ccacacaggcccacuaugg

SEQ ID NO: 1818281 - RNA, 19 nt, Homo sapiens
  misc_RNA (1)...(19): siRNA sense strand
cuacugugucuccaaauuu

SEQ ID NO: 1818282 - RNA, 19 nt, Homo sapiens
  misc_RNA (1)...(19): siRNA sense strand
cguggagccugguuucuuc

SEQ ID NO: 1818283 - RNA, 19 nt, Homo sapiens
  misc_RNA (1)...(19): siRNA sense strand
ccaaguaccugaaaaugca

SEQ ID NO: 1818284 - RNA, 19 nt, Homo sapiens
  misc_RNA (1)...(19): siRNA sense strand
uacugugucuccaaauuug

SEQ ID NO: 1818285 - RNA, 19 nt, Homo sapiens
  misc_RNA (1)...(19): siRNA sense strand
cuggaggccuucucugaca

SEQ ID NO: 1818286 - RNA, 19 nt, Homo sapiens
  misc_RNA (1)...(19): siRNA sense strand
ugguguggcugguaucauc

SEQ ID NO: 1818287 - RNA, 19 nt, Homo sapiens
  misc_RNA (1)...(19): siRNA sense strand
ucccaagccugcccaagca

SEQ ID NO: 1818288 - RNA, 19 nt, Homo sapiens
  misc_RNA (1)...(19): siRNA sense strand
gaucugugacccggaccua

SEQ ID NO: 1818289 - RNA, 19 nt, Homo sapiens
  misc_RNA (1)...(19): siRNA sense strand
caaugccuuugucuucauc

SEQ ID NO: 1818290 - RNA, 19 nt, Homo sapiens
  misc_RNA (1)...(19): siRNA sense strand
gaggcgggauguagcucau

SEQ ID NO: 1818291 - RNA, 19 nt, Homo sapiens
  misc_RNA (1)...(19): siRNA sense strand
ugcaacagcgcaucaugaa

SEQ ID NO: 1818292 - RNA, 19 nt, Homo sapiens
  misc_RNA (1)...(19): siRNA sense strand
gggcagugcugugguugcu

SEQ ID NO: 1818293 - RNA, 19 nt, Homo sapiens
  misc_RNA (1)...(19): siRNA sense strand
gaaaucagcugagccuuca

SEQ ID NO: 1818294 - RNA, 19 nt, Homo sapiens
  misc_RNA (1)...(19): siRNA sense strand
uggcuucgcugucggauuu

SEQ ID NO: 1818295 - RNA, 19 nt, Homo sapiens
  misc_RNA (1)...(19): siRNA sense strand
caacuggaaaccacacaua

SEQ ID NO: 1818296 - RNA, 19 nt, Homo sapiens
  misc_RNA (1)...(19): siRNA sense strand
caaacggccuguguucuug

SEQ ID NO: 1818297 - RNA, 19 nt, Homo sapiens
  misc_RNA (1)...(19): siRNA sense strand
gcagcaaccuuucugaacu

SEQ ID NO: 1818298 - RNA, 19 nt, Homo sapiens
  misc_RNA (1)...(19): siRNA sense strand
gaacgacaagccuuacugu

SEQ ID NO: 1818299 - RNA, 19 nt, Homo sapiens
  misc_RNA (1)...(19): siRNA sense strand
ggacguggcacccugaaca

SEQ ID NO: 1818300 - RNA, 19 nt, Homo sapiens
  misc_RNA (1)...(19): siRNA sense strand
gggccauccuggagaacua

SEQ ID NO: 1818301 - RNA, 19 nt, Homo sapiens
  misc_RNA (1)...(19): siRNA sense strand
ucaaggagcagaacgacaa

SEQ ID NO: 1818302 - RNA, 19 nt, Homo sapiens
  misc_RNA (1)...(19): siRNA sense strand
ccaaacggccuguguucuu

SEQ ID NO: 1818303 - RNA, 19 nt, Homo sapiens
  misc_RNA (1)...(19): siRNA sense strand
gcugucggauuucaaguuc

SEQ ID NO: 1818304 - RNA, 19 nt, Homo sapiens
  misc_RNA (1)...(19): siRNA sense strand
ggacuacuucgacauguuc

SEQ ID NO: 1818305 - RNA, 19 nt, Homo sapiens
  misc_RNA (1)...(19): siRNA sense strand
ugacgaaagagaagccuaa

SEQ ID NO: 1818306 - RNA, 19 nt, Homo sapiens
  misc_RNA (1)...(19): siRNA sense strand
ccgaaggguuccacgagaa

SEQ ID NO: 1818307 - RNA, 19 nt, Homo sapiens
  misc_RNA (1)...(19): siRNA sense strand
ucaccgccauggccaagaa

SEQ ID NO: 1818308 - RNA, 19 nt, Homo sapiens
  misc_RNA (1)...(19): siRNA sense strand
ggacuaccacaaccucuuc

SEQ ID NO: 1818309 - RNA, 19 nt, Homo sapiens
  misc_RNA (1)...(19): siRNA sense strand
ccacacauaccaggagauu

SEQ ID NO: 1818310 - RNA, 19 nt, Homo sapiens
  misc_RNA (1)...(19): siRNA sense strand
caaggacuacuucgacaug

SEQ ID NO: 1818311 - RNA, 19 nt, Homo sapiens
  misc_RNA (1)...(19): siRNA sense strand
guacggcuccagugccaaa

SEQ ID NO: 1818312 - RNA, 19 nt, Homo sapiens
  misc_RNA (1)...(19): siRNA sense strand
gggcagcaaccuuucugaa

SEQ ID NO: 1818313 - RNA, 19 nt, Homo sapiens
  misc_RNA (1)...(19): siRNA sense strand
cauccugagugcuuugugu

SEQ ID NO: 1818314 - RNA, 19 nt, Homo sapiens
  misc_RNA (1)...(19): siRNA sense strand
ggacggcaaggccuacugu

SEQ ID NO: 1818315 - RNA, 19 nt, Homo sapiens
  misc_RNA (1)...(19): siRNA sense strand
cagcaaccuuucugaacuc

SEQ ID NO: 1818316 - RNA, 19 nt, Homo sapiens
  misc_RNA (1)...(19): siRNA sense strand
caacagcagacacgcaucu

SEQ ID NO: 1818317 - RNA, 19 nt, Homo sapiens
  misc_RNA (1)...(19): siRNA sense strand
acucauacccaacuggaaa

SEQ ID NO: 1818318 - RNA, 19 nt, Homo sapiens
  misc_RNA (1)...(19): siRNA sense strand
guggcacccugaacacuuc

SEQ ID NO: 1818319 - RNA, 19 nt, Homo sapiens
  misc_RNA (1)...(19): siRNA sense strand
acacauaccaggagauugc

SEQ ID NO: 1818320 - RNA, 19 nt, Homo sapiens
  misc_RNA (1)...(19): siRNA sense strand
uccucaagcucuucugcua

SEQ ID NO: 1818321 - RNA, 19 nt, Homo sapiens
  misc_RNA (1)...(19): siRNA sense strand
gcaaggacuacuucgacau

SEQ ID NO: 1818322 - RNA, 19 nt, Homo sapiens
  misc_RNA (1)...(19): siRNA sense strand
agucugaccugaacaagcu

SEQ ID NO: 1818323 - RNA, 19 nt, Homo sapiens
  misc_RNA (1)...(19): siRNA sense strand
gugaggaggagcacgucua

SEQ ID NO: 1818324 - RNA, 19 nt, Homo sapiens
  misc_RNA (1)...(19): siRNA sense strand
cauguucgcacccaagugu

SEQ ID NO: 1818325 - RNA, 19 nt, Homo sapiens
  misc_RNA (1)...(19): siRNA sense strand
cacaauccuugaccccuua

SEQ ID NO: 1818326 - RNA, 19 nt, Homo sapiens
  misc_RNA (1)...(19): siRNA sense strand
cagcggcucccgauucauc

SEQ ID NO: 1818327 - RNA, 19 nt, Homo sapiens
  misc_RNA (1)...(19): siRNA sense strand
ggaacugaacgcuguacag

SEQ ID NO: 1818328 - RNA, 19 nt, Homo sapiens
  misc_RNA (1)...(19): siRNA sense strand
gagccuucacccaccguaa

SEQ ID NO: 1818329 - RNA, 19 nt, Homo sapiens
  misc_RNA (1)...(19): siRNA sense strand
aaacuuccagugucuccaa

SEQ ID NO: 1818330 - RNA, 19 nt, Homo sapiens
  misc_RNA (1)...(19): siRNA sense strand
ggcccucaauggcacaauc

SEQ ID NO: 1818331 - RNA, 19 nt, Homo sapiens
  misc_RNA (1)...(19): siRNA sense strand
ucagaacugcuuccucaag

SEQ ID NO: 1818332 - RNA, 19 nt, Homo sapiens
  misc_RNA (1)...(19): siRNA sense strand
gggauggacagcccuacug

SEQ ID NO: 1818333 - RNA, 19 nt, Homo sapiens
  misc_RNA (1)...(19): siRNA sense strand
ugucggauuucaaguucau

SEQ ID NO: 1818334 - RNA, 19 nt, Homo sapiens
  misc_RNA (1)...(19): siRNA sense strand
agagaagccuaagcggaau

SEQ ID NO: 1818335 - RNA, 19 nt, Homo sapiens
  misc_RNA (1)...(19): siRNA sense strand
gcuaugacauggugcauua

SEQ ID NO: 1818336 - RNA, 19 nt, Homo sapiens
  misc_RNA (1)...(19): siRNA sense strand
cagcagagcuccuaaguca

SEQ ID NO: 1818337 - RNA, 19 nt, Homo sapiens
  misc_RNA (1)...(19): siRNA sense strand
uagagacccuggacaaaua

SEQ ID NO: 1818338 - RNA, 19 nt, Homo sapiens
  misc_RNA (1)...(19): siRNA sense strand
ggacaccuaugaggaagua

SEQ ID NO: 1818339 - RNA, 19 nt, Homo sapiens
  misc_RNA (1)...(19): siRNA sense strand
gcagcaaccucaccacaga

SEQ ID NO: 1818340 - RNA, 19 nt, Homo sapiens
  misc_RNA (1)...(19): siRNA sense strand
gcagagaggcccuacauca

SEQ ID NO: 1818341 - RNA, 19 nt, Homo sapiens
  misc_RNA (1)...(19): siRNA sense strand
gcgcgauggugacuucuaa

SEQ ID NO: 1818342 - RNA, 19 nt, Homo sapiens
  misc_RNA (1)...(19): siRNA sense strand
gggagacagucaucuaugu

SEQ ID NO: 1818343 - RNA, 19 nt, Homo sapiens
  misc_RNA (1)...(19): siRNA sense strand
ggaggucaaucacuacaag

SEQ ID NO: 1818344 - RNA, 19 nt, Homo sapiens
  misc_RNA (1)...(19): siRNA sense strand
ggagcgcgauggugacuuc

SEQ ID NO: 1818345 - RNA, 19 nt, Homo sapiens
  misc_RNA (1)...(19): siRNA sense strand
gcacaccgaugaggagauc

SEQ ID NO: 1818346 - RNA, 19 nt, Homo sapiens
  misc_RNA (1)...(19): siRNA sense strand
caaauacaacugugacuuc

SEQ ID NO: 1818347 - RNA, 19 nt, Homo sapiens
  misc_RNA (1)...(19): siRNA sense strand
ggagauguccucugaguac

SEQ ID NO: 1818348 - RNA, 19 nt, Homo sapiens
  misc_RNA (1)...(19): siRNA sense strand
cagaagaucauccaguuug

SEQ ID NO: 1818349 - RNA, 19 nt, Homo sapiens
  misc_RNA (1)...(19): siRNA sense strand
ucacucaggaggagagaua

SEQ ID NO: 1818350 - RNA, 19 nt, Homo sapiens
  misc_RNA (1)...(19): siRNA sense strand
gggaguaugcagacaguuu

SEQ ID NO: 1818351 - RNA, 19 nt, Homo sapiens
  misc_RNA (1)...(19): siRNA sense strand
gcugggagguacagagaau

SEQ ID NO: 1818352 - RNA, 19 nt, Homo sapiens
  misc_RNA (1)...(19): siRNA sense strand
cugcagacaucucagaaga

SEQ ID NO: 1818353 - RNA, 19 nt, Homo sapiens
  misc_RNA (1)...(19): siRNA sense strand
auacaacugugacuucugu

SEQ ID NO: 1818354 - RNA, 19 nt, Homo sapiens
  misc_RNA (1)...(19): siRNA sense strand
uaaagcaggcugggaggua

SEQ ID NO: 1818355 - RNA, 19 nt, Homo sapiens
  misc_RNA (1)...(19): siRNA sense strand
gcagagcuccuaagucacu

SEQ ID NO: 1818356 - RNA, 19 nt, Homo sapiens
  misc_RNA (1)...(19): siRNA sense strand
ugacaucacccugacugua

SEQ ID NO: 1818357 - RNA, 19 nt, Homo sapiens
  misc_RNA (1)...(19): siRNA sense strand
ugucagaaguggugauugg

SEQ ID NO: 1818358 - RNA, 19 nt, Homo sapiens
  misc_RNA (1)...(19): siRNA sense strand
cucagaagaucauccaguu

SEQ ID NO: 1818359 - RNA, 19 nt, Homo sapiens
  misc_RNA (1)...(19): siRNA sense strand
caacugugacuucuguguu

SEQ ID NO: 1818360 - RNA, 19 nt, Homo sapiens
  misc_RNA (1)...(19): siRNA sense strand
gggaagaacuaccccauca

SEQ ID NO: 1818361 - RNA, 19 nt, Homo sapiens
  misc_RNA (1)...(19): siRNA sense strand
accaggaggucaaucacua

SEQ ID NO: 1818362 - RNA, 19 nt, Homo sapiens
  misc_RNA (1)...(19): siRNA sense strand
gacaucacccugacuguag

SEQ ID NO: 1818363 - RNA, 19 nt, Homo sapiens
  misc_RNA (1)...(19): siRNA sense strand
ggucacagcagagcuccua

SEQ ID NO: 1818364 - RNA, 19 nt, Homo sapiens
  misc_RNA (1)...(19): siRNA sense strand
cuacgucacuacacuagag

SEQ ID NO: 1818365 - RNA, 19 nt, Homo sapiens
  misc_RNA (1)...(19): siRNA sense strand
ggaggagagauacaagaug

SEQ ID NO: 1818366 - RNA, 19 nt, Homo sapiens
  misc_RNA (1)...(19): siRNA sense strand
ggagacagucaucuaugug

SEQ ID NO: 1818367 - RNA, 19 nt, Homo sapiens
  misc_RNA (1)...(19): siRNA sense strand
guggugcgauggcugcuau

SEQ ID NO: 1818368 - RNA, 19 nt, Homo sapiens
  misc_RNA (1)...(19): siRNA sense strand
ggagaucgccaagcacaag

SEQ ID NO: 1818369 - RNA, 19 nt, Homo sapiens
  misc_RNA (1)...(19): siRNA sense strand
ggagguacagagaaugcaa

SEQ ID NO: 1818370 - RNA, 19 nt, Homo sapiens
  misc_RNA (1)...(19): siRNA sense strand
gaacuaccccaucaugaau

SEQ ID NO: 1818371 - RNA, 19 nt, Homo sapiens
  misc_RNA (1)...(19): siRNA sense strand
gaagaacuaccccaucaug

SEQ ID NO: 1818372 - RNA, 19 nt, Homo sapiens
  misc_RNA (1)...(19): siRNA sense strand
ugcgauggcugcuaugaca

SEQ ID NO: 1818373 - RNA, 19 nt, Homo sapiens
  misc_RNA (1)...(19): siRNA sense strand
ucagaagaucauccaguuu

SEQ ID NO: 1818374 - RNA, 19 nt, Homo sapiens
  misc_RNA (1)...(19): siRNA sense strand
cuagagacccuggacaaau

SEQ ID NO: 1818375 - RNA, 19 nt, Homo sapiens
  misc_RNA (1)...(19): siRNA sense strand
gccgguacgugucagaagu

SEQ ID NO: 1818376 - RNA, 19 nt, Homo sapiens
  misc_RNA (1)...(19): siRNA sense strand
aaauacaacugugacuucu

SEQ ID NO: 1818377 - RNA, 19 nt, Homo sapiens
  misc_RNA (1)...(19): siRNA sense strand
cagcggaucaucaccaaca

SEQ ID NO: 1818378 - RNA, 19 nt, Homo sapiens
  misc_RNA (1)...(19): siRNA sense strand
ucacggcaagacagaaauu

SEQ ID NO: 1818379 - RNA, 19 nt, Homo sapiens
  misc_RNA (1)...(19): siRNA sense strand
gaucauccaguuugcuucu

SEQ ID NO: 1818380 - RNA, 19 nt, Homo sapiens
  misc_RNA (1)...(19): siRNA sense strand
cagagaggcccuacaucau

SEQ ID NO: 1818381 - RNA, 19 nt, Homo sapiens
  misc_RNA (1)...(19): siRNA sense strand
caucgggcauguggacuuc

SEQ ID NO: 1818382 - RNA, 19 nt, Homo sapiens
  misc_RNA (1)...(19): siRNA sense strand
agagaggcccuacaucauc

SEQ ID NO: 1818383 - RNA, 19 nt, Homo sapiens
  misc_RNA (1)...(19): siRNA sense strand
agaagaaggaagccaagga

SEQ ID NO: 1818384 - RNA, 19 nt, Homo sapiens
  misc_RNA (1)...(19): siRNA sense strand
gggugacuaccucaucgua

SEQ ID NO: 1818385 - RNA, 19 nt, Homo sapiens
  misc_RNA (1)...(19): siRNA sense strand
cggcaagacagaaauuauc

SEQ ID NO: 1818386 - RNA, 19 nt, Homo sapiens
  misc_RNA (1)...(19): siRNA sense strand
ggccgcaugcugcugguaa

SEQ ID NO: 1818387 - RNA, 19 nt, Homo sapiens
  misc_RNA (1)...(19): siRNA sense strand
ggaguaugcagacaguuuu

SEQ ID NO: 1818388 - RNA, 19 nt, Homo sapiens
  misc_RNA (1)...(19): siRNA sense strand
augaggagaucgccaagca

SEQ ID NO: 1818389 - RNA, 19 nt, Homo sapiens
  misc_RNA (1)...(19): siRNA sense strand
acaaauacaacugugacuu

SEQ ID NO: 1818390 - RNA, 19 nt, Homo sapiens
  misc_RNA (1)...(19): siRNA sense strand
cugcaugaacggacucuga

SEQ ID NO: 1818391 - RNA, 19 nt, Homo sapiens
  misc_RNA (1)...(19): siRNA sense strand
ggaccgggguaucccaguu

SEQ ID NO: 1818392 - RNA, 19 nt, Homo sapiens
  misc_RNA (1)...(19): siRNA sense strand
acaccuaugaggaaguaaa

SEQ ID NO: 1818393 - RNA, 19 nt, Homo sapiens
  misc_RNA (1)...(19): siRNA sense strand
acaucacccugacuguaga

SEQ ID NO: 1818394 - RNA, 19 nt, Homo sapiens
  misc_RNA (1)...(19): siRNA sense strand
ggaagucuguuguauauca

SEQ ID NO: 1818395 - RNA, 19 nt, Homo sapiens
  misc_RNA (1)...(19): siRNA sense strand
gcacggaacuggacaugga

SEQ ID NO: 1818396 - RNA, 19 nt, Homo sapiens
  misc_RNA (1)...(19): siRNA sense strand
cgaauacugucccucauga

SEQ ID NO: 1818397 - RNA, 19 nt, Homo sapiens
  misc_RNA (1)...(19): siRNA sense strand
aaagagaagccaccgauaa

SEQ ID NO: 1818398 - RNA, 19 nt, Homo sapiens
  misc_RNA (1)...(19): siRNA sense strand
ccgcggagauccugaaaga

SEQ ID NO: 1818399 - RNA, 19 nt, Homo sapiens
  misc_RNA (1)...(19): siRNA sense strand
gagagaggcgccuauaaga

SEQ ID NO: 1818400 - RNA, 19 nt, Homo sapiens
  misc_RNA (1)...(19): siRNA sense strand
gcagguuuaacucacauua

SEQ ID NO: 1818401 - RNA, 19 nt, Homo sapiens
  misc_RNA (1)...(19): siRNA sense strand
gcggagauccugaaagaga

SEQ ID NO: 1818402 - RNA, 19 nt, Homo sapiens
  misc_RNA (1)...(19): siRNA sense strand
ggagaaacaagaguugaaa

SEQ ID NO: 1818403 - RNA, 19 nt, Homo sapiens
  misc_RNA (1)...(19): siRNA sense strand
gagaggcgccuauaagauc

SEQ ID NO: 1818404 - RNA, 19 nt, Homo sapiens
  misc_RNA (1)...(19): siRNA sense strand
caaagagggcccaguccua

SEQ ID NO: 1818405 - RNA, 19 nt, Homo sapiens
  misc_RNA (1)...(19): siRNA sense strand
guagcuaagucuccugaug

SEQ ID NO: 1818406 - RNA, 19 nt, Homo sapiens
  misc_RNA (1)...(19): siRNA sense strand
gaagucuguuguauaucaa

SEQ ID NO: 1818407 - RNA, 19 nt, Homo sapiens
  misc_RNA (1)...(19): siRNA sense strand
gaagagggguuccauugug

SEQ ID NO: 1818408 - RNA, 19 nt, Homo sapiens
  misc_RNA (1)...(19): siRNA sense strand
gccuauaagaucuauguua

SEQ ID NO: 1818409 - RNA, 19 nt, Homo sapiens
  misc_RNA (1)...(19): siRNA sense strand
caaagagaagccaccgaua

SEQ ID NO: 1818410 - RNA, 19 nt, Homo sapiens
  misc_RNA (1)...(19): siRNA sense strand
gcgccuuggugcugaauug

SEQ ID NO: 1818411 - RNA, 19 nt, Homo sapiens
  misc_RNA (1)...(19): siRNA sense strand
ggggaagucuguuguauau

SEQ ID NO: 1818412 - RNA, 19 nt, Homo sapiens
  misc_RNA (1)...(19): siRNA sense strand
caccuuuccugcuucagua

SEQ ID NO: 1818413 - RNA, 19 nt, Homo sapiens
  misc_RNA (1)...(19): siRNA sense strand
gaaagagagaggcgccuau

SEQ ID NO: 1818414 - RNA, 19 nt, Homo sapiens
  misc_RNA (1)...(19): siRNA sense strand
agauaaagacuguggauau

SEQ ID NO: 1818415 - RNA, 19 nt, Homo sapiens
  misc_RNA (1)...(19): siRNA sense strand
gacaauacccagagaugug

SEQ ID NO: 1818416 - RNA, 19 nt, Homo sapiens
  misc_RNA (1)...(19): siRNA sense strand
ggccuggaguugccauuga

SEQ ID NO: 1818417 - RNA, 19 nt, Homo sapiens
  misc_RNA (1)...(19): siRNA sense strand
guauauccaggaagaaauu

SEQ ID NO: 1818418 - RNA, 19 nt, Homo sapiens
  misc_RNA (1)...(19): siRNA sense strand
caagagaccaauggagaaa

SEQ ID NO: 1818419 - RNA, 19 nt, Homo sapiens
  misc_RNA (1)...(19): siRNA sense strand
auacagcugugauggaguu

SEQ ID NO: 1818420 - RNA, 19 nt, Homo sapiens
  misc_RNA (1)...(19): siRNA sense strand
gaugauggccaaagagaag

SEQ ID NO: 1818421 - RNA, 19 nt, Homo sapiens
  misc_RNA (1)...(19): siRNA sense strand
guucguggccaagauauuu

SEQ ID NO: 1818422 - RNA, 19 nt, Homo sapiens
  misc_RNA (1)...(19): siRNA sense strand
gagaagccaccgauaacug

SEQ ID NO: 1818423 - RNA, 19 nt, Homo sapiens
  misc_RNA (1)...(19): siRNA sense strand
gaggugguggugacgaaua

SEQ ID NO: 1818424 - RNA, 19 nt, Homo sapiens
  misc_RNA (1)...(19): siRNA sense strand
gcaagcugcuagcauccau

SEQ ID NO: 1818425 - RNA, 19 nt, Homo sapiens
  misc_RNA (1)...(19): siRNA sense strand
uaaagacuguggauaucag

SEQ ID NO: 1818426 - RNA, 19 nt, Homo sapiens
  misc_RNA (1)...(19): siRNA sense strand
aaagagagaggcgccuaua

SEQ ID NO: 1818427 - RNA, 19 nt, Homo sapiens
  misc_RNA (1)...(19): siRNA sense strand
gaagccaccgauaacugua

SEQ ID NO: 1818428 - RNA, 19 nt, Homo sapiens
  misc_RNA (1)...(19): siRNA sense strand
cgaaagcagguuuaacuca

SEQ ID NO: 1818429 - RNA, 19 nt, Homo sapiens
  misc_RNA (1)...(19): siRNA sense strand
gauucuuucugaagccauu

SEQ ID NO: 1818430 - RNA, 19 nt, Homo sapiens
  misc_RNA (1)...(19): siRNA sense strand
gagaaacaagaguugaaau

SEQ ID NO: 1818431 - RNA, 19 nt, Homo sapiens
  misc_RNA (1)...(19): siRNA sense strand
uugacgauguggagaguuu

SEQ ID NO: 1818432 - RNA, 19 nt, Homo sapiens
  misc_RNA (1)...(19): siRNA sense strand
ucaagagaccaauggagaa

SEQ ID NO: 1818433 - RNA, 19 nt, Homo sapiens
  misc_RNA (1)...(19): siRNA sense strand
cauugaugauggccaaaga

SEQ ID NO: 1818434 - RNA, 19 nt, Homo sapiens
  misc_RNA (1)...(19): siRNA sense strand
agagaccaauggagaaaca

SEQ ID NO: 1818435 - RNA, 19 nt, Homo sapiens
  misc_RNA (1)...(19): siRNA sense strand
cuauggaucuucaucaaaa

SEQ ID NO: 1818436 - RNA, 19 nt, Homo sapiens
  misc_RNA (1)...(19): siRNA sense strand
cacuauggaucuucaucaa

SEQ ID NO: 1818437 - RNA, 19 nt, Homo sapiens
  misc_RNA (1)...(19): siRNA sense strand
caauggagaaacaagaguu

SEQ ID NO: 1818438 - RNA, 19 nt, Homo sapiens
  misc_RNA (1)...(19): siRNA sense strand
caagauaaagacuguggau

SEQ ID NO: 1818439 - RNA, 19 nt, Homo sapiens
  misc_RNA (1)...(19): siRNA sense strand
gcaagcagagcaagaugag

SEQ ID NO: 1818440 - RNA, 19 nt, Homo sapiens
  misc_RNA (1)...(19): siRNA sense strand
gaccaauggagaaacaaga

SEQ ID NO: 1818441 - RNA, 19 nt, Homo sapiens
  misc_RNA (1)...(19): siRNA sense strand
ggaguugccauugaugaug

SEQ ID NO: 1818442 - RNA, 19 nt, Homo sapiens
  misc_RNA (1)...(19): siRNA sense strand
aaagagggcccaguccuau

SEQ ID NO: 1818443 - RNA, 19 nt, Homo sapiens
  misc_RNA (1)...(19): siRNA sense strand
aaagcagguuuaacucaca

SEQ ID NO: 1818444 - RNA, 19 nt, Homo sapiens
  misc_RNA (1)...(19): siRNA sense strand
gucccaagauaaagacugu

SEQ ID NO: 1818445 - RNA, 19 nt, Homo sapiens
  misc_RNA (1)...(19): siRNA sense strand
gcgccuauaagaucuaugu

SEQ ID NO: 1818446 - RNA, 19 nt, Homo sapiens
  misc_RNA (1)...(19): siRNA sense strand
ggaugacauuauugacgau

SEQ ID NO: 1818447 - RNA, 19 nt, Homo sapiens
  misc_RNA (1)...(19): siRNA sense strand
agguuuaacucacauuauc

SEQ ID NO: 1818448 - RNA, 19 nt, Homo sapiens
  misc_RNA (1)...(19): siRNA sense strand
agagagaggcgccuauaag

SEQ ID NO: 1818449 - RNA, 19 nt, Homo sapiens
  misc_RNA (1)...(19): siRNA sense strand
ccuuagagccucaccuuuc

SEQ ID NO: 1818450 - RNA, 19 nt, Homo sapiens
  misc_RNA (1)...(19): siRNA sense strand
cagacaauacccagagaug

SEQ ID NO: 1818451 - RNA, 19 nt, Homo sapiens
  misc_RNA (1)...(19): siRNA sense strand
ggaggccgcaucgcaauca

SEQ ID NO: 1818452 - RNA, 19 nt, Homo sapiens
  misc_RNA (1)...(19): siRNA sense strand
caguauauccaggaagaaa

SEQ ID NO: 1818453 - RNA, 19 nt, Homo sapiens
  misc_RNA (1)...(19): siRNA sense strand
uucaguauauccaggaaga

SEQ ID NO: 1818454 - RNA, 19 nt, Homo sapiens
  misc_RNA (1)...(19): siRNA sense strand
ugaauacagcugugaugga

SEQ ID NO: 1818455 - RNA, 19 nt, Homo sapiens
  misc_RNA (1)...(19): siRNA sense strand
ggagauccugaaagagaga

SEQ ID NO: 1818456 - RNA, 19 nt, Homo sapiens
  misc_RNA (1)...(19): siRNA sense strand
gacgaauacugucccucau

SEQ ID NO: 1818457 - RNA, 19 nt, Homo sapiens
  misc_RNA (1)...(19): siRNA sense strand
aagagagaggcgccuauaa

SEQ ID NO: 1818458 - RNA, 19 nt, Homo sapiens
  misc_RNA (1)...(19): siRNA sense strand
cauuaucacuauggaucuu

SEQ ID NO: 1818459 - RNA, 19 nt, Homo sapiens
  misc_RNA (1)...(19): siRNA sense strand
gagcuggccaagcgcauca

SEQ ID NO: 1818460 - RNA, 19 nt, Homo sapiens
  misc_RNA (1)...(19): siRNA sense strand
augcagucauuguagcuaa

SEQ ID NO: 1818461 - RNA, 19 nt, Homo sapiens
  misc_RNA (1)...(19): siRNA sense strand
gaugugaauacagcuguga

SEQ ID NO: 1818462 - RNA, 19 nt, Homo sapiens
  misc_RNA (1)...(19): siRNA sense strand
ucuguuguauaucaagaga

SEQ ID NO: 1818463 - RNA, 19 nt, Homo sapiens
  misc_RNA (1)...(19): siRNA sense strand
uacagacaauacccagaga

SEQ ID NO: 1818464 - RNA, 19 nt, Homo sapiens
  misc_RNA (1)...(19): siRNA sense strand
ucacuauggaucuucauca

SEQ ID NO: 1818465 - RNA, 19 nt, Homo sapiens
  misc_RNA (1)...(19): siRNA sense strand
acaauacccagagauguga

SEQ ID NO: 1818466 - RNA, 19 nt, Homo sapiens
  misc_RNA (1)...(19): siRNA sense strand
acccagagaugugaauaca

SEQ ID NO: 1818467 - RNA, 19 nt, Homo sapiens
  misc_RNA (1)...(19): siRNA sense strand
caguuugauucuuucugaa

SEQ ID NO: 1818468 - RNA, 19 nt, Homo sapiens
  misc_RNA (1)...(19): siRNA sense strand
agaagccaccgauaacugu

SEQ ID NO: 1818469 - RNA, 19 nt, Homo sapiens
  misc_RNA (1)...(19): siRNA sense strand
gguuuaacucacauuauca

SEQ ID NO: 1818470 - RNA, 19 nt, Homo sapiens
  misc_RNA (1)...(19): siRNA sense strand
aagauaaagacuguggaua

SEQ ID NO: 1818471 - RNA, 19 nt, Homo sapiens
  misc_RNA (1)...(19): siRNA sense strand
gccuggaguugccauugau

SEQ ID NO: 1818472 - RNA, 19 nt, Homo sapiens
  misc_RNA (1)...(19): siRNA sense strand
agagcaagaugaggaagag

SEQ ID NO: 1818473 - RNA, 19 nt, Homo sapiens
  misc_RNA (1)...(19): siRNA sense strand
uggagaaacaagaguugaa

SEQ ID NO: 1818474 - RNA, 19 nt, Homo sapiens
  misc_RNA (1)...(19): siRNA sense strand
agagaggcgccuauaagau

SEQ ID NO: 1818475 - RNA, 19 nt, Homo sapiens
  misc_RNA (1)...(19): siRNA sense strand
caacauauuuggcuucuua

SEQ ID NO: 1818476 - RNA, 19 nt, Homo sapiens
  misc_RNA (1)...(19): siRNA sense strand
gcacaagaaucgauacaua

SEQ ID NO: 1818477 - RNA, 19 nt, Homo sapiens
  misc_RNA (1)...(19): siRNA sense strand
gaacacaaaugucuaucua

SEQ ID NO: 1818478 - RNA, 19 nt, Homo sapiens
  misc_RNA (1)...(19): siRNA sense strand
ggaaagaccucgagucguu

SEQ ID NO: 1818479 - RNA, 19 nt, Homo sapiens
  misc_RNA (1)...(19): siRNA sense strand
cgaaggaacugucaacaua

SEQ ID NO: 1818480 - RNA, 19 nt, Homo sapiens
  misc_RNA (1)...(19): siRNA sense strand
gagauuggcugguccuaua

SEQ ID NO: 1818481 - RNA, 19 nt, Homo sapiens
  misc_RNA (1)...(19): siRNA sense strand
uaacaaaccucguggagaa

SEQ ID NO: 1818482 - RNA, 19 nt, Homo sapiens
  misc_RNA (1)...(19): siRNA sense strand
guuaagagcuuuauccauu

SEQ ID NO: 1818483 - RNA, 19 nt, Homo sapiens
  misc_RNA (1)...(19): siRNA sense strand
gaacauaucccaaggguau

SEQ ID NO: 1818484 - RNA, 19 nt, Homo sapiens
  misc_RNA (1)...(19): siRNA sense strand
gagcuguacuguugacuua

SEQ ID NO: 1818485 - RNA, 19 nt, Homo sapiens
  misc_RNA (1)...(19): siRNA sense strand
caacucagcucuuauuuua

SEQ ID NO: 1818486 - RNA, 19 nt, Homo sapiens
  misc_RNA (1)...(19): siRNA sense strand
aaacaaagcuagagaaaca

SEQ ID NO: 1818487 - RNA, 19 nt, Homo sapiens
  misc_RNA (1)...(19): siRNA sense strand
guucuuagaucuccacaua

SEQ ID NO: 1818488 - RNA, 19 nt, Homo sapiens
  misc_RNA (1)...(19): siRNA sense strand
gugcagagcuguacuguug

SEQ ID NO: 1818489 - RNA, 19 nt, Homo sapiens
  misc_RNA (1)...(19): siRNA sense strand
gcaaauuccuucuuucaau

SEQ ID NO: 1818490 - RNA, 19 nt, Homo sapiens
  misc_RNA (1)...(19): siRNA sense strand
caaagcauguugcagauuu

SEQ ID NO: 1818491 - RNA, 19 nt, Homo sapiens
  misc_RNA (1)...(19): siRNA sense strand
gcaggugacucagaaauaa

SEQ ID NO: 1818492 - RNA, 19 nt, Homo sapiens
  misc_RNA (1)...(19): siRNA sense strand
gaaaugguguuuaaagcaa

SEQ ID NO: 1818493 - RNA, 19 nt, Homo sapiens
  misc_RNA (1)...(19): siRNA sense strand
acaccuaucuuuccaauuu

SEQ ID NO: 1818494 - RNA, 19 nt, Homo sapiens
  misc_RNA (1)...(19): siRNA sense strand
gaagaaggcgcuauuguga

SEQ ID NO: 1818495 - RNA, 19 nt, Homo sapiens
  misc_RNA (1)...(19): siRNA sense strand
gaagugaauucucuggaaa

SEQ ID NO: 1818496 - RNA, 19 nt, Homo sapiens
  misc_RNA (1)...(19): siRNA sense strand
uaucaggguuccuuauuua

SEQ ID NO: 1818497 - RNA, 19 nt, Homo sapiens
  misc_RNA (1)...(19): siRNA sense strand
agaaauaacuccuggauuc

SEQ ID NO: 1818498 - RNA, 19 nt, Homo sapiens
  misc_RNA (1)...(19): siRNA sense strand
ggaaagaaauauccaacau

SEQ ID NO: 1818499 - RNA, 19 nt, Homo sapiens
  misc_RNA (1)...(19): siRNA sense strand
ggaaguuauugucaugaua

SEQ ID NO: 1818500 - RNA, 19 nt, Homo sapiens
  misc_RNA (1)...(19): siRNA sense strand
gaaaggaagagauucauga

SEQ ID NO: 1818501 - RNA, 19 nt, Homo sapiens
  misc_RNA (1)...(19): siRNA sense strand
ggagcaauaugucuucauu

SEQ ID NO: 1818502 - RNA, 19 nt, Homo sapiens
  misc_RNA (1)...(19): siRNA sense strand
ggaagugaauucucuggaa

SEQ ID NO: 1818503 - RNA, 19 nt, Homo sapiens
  misc_RNA (1)...(19): siRNA sense strand
aaacucaacugacaaguau

SEQ ID NO: 1818504 - RNA, 19 nt, Homo sapiens
  misc_RNA (1)...(19): siRNA sense strand
caauaugucuucauucaug

SEQ ID NO: 1818505 - RNA, 19 nt, Homo sapiens
  misc_RNA (1)...(19): siRNA sense strand
ggaagaacaggcacauaua

SEQ ID NO: 1818506 - RNA, 19 nt, Homo sapiens
  misc_RNA (1)...(19): siRNA sense strand
ggaaaacaguggaaauuaa

SEQ ID NO: 1818507 - RNA, 19 nt, Homo sapiens
  misc_RNA (1)...(19): siRNA sense strand
gcagaggccaguaauagua

SEQ ID NO: 1818508 - RNA, 19 nt, Homo sapiens
  misc_RNA (1)...(19): siRNA sense strand
caaaucugaugccgguuua

SEQ ID NO: 1818509 - RNA, 19 nt, Homo sapiens
  misc_RNA (1)...(19): siRNA sense strand
cauaugcacuaauggcuua

SEQ ID NO: 1818510 - RNA, 19 nt, Homo sapiens
  misc_RNA (1)...(19): siRNA sense strand
gcaacaaucugguuauguc

SEQ ID NO: 1818511 - RNA, 19 nt, Homo sapiens
  misc_RNA (1)...(19): siRNA sense strand
ugacagcccuuaacauuuc

SEQ ID NO: 1818512 - RNA, 19 nt, Homo sapiens
  misc_RNA (1)...(19): siRNA sense strand
gaaauguuaucuccuucaa

SEQ ID NO: 1818513 - RNA, 19 nt, Homo sapiens
  misc_RNA (1)...(19): siRNA sense strand
gcacaaggcaggaagagaa

SEQ ID NO: 1818514 - RNA, 19 nt, Homo sapiens
  misc_RNA (1)...(19): siRNA sense strand
guacaguaaugaugaguug

SEQ ID NO: 1818515 - RNA, 19 nt, Homo sapiens
  misc_RNA (1)...(19): siRNA sense strand
ugagaaauaugaaccaguu

SEQ ID NO: 1818516 - RNA, 19 nt, Homo sapiens
  misc_RNA (1)...(19): siRNA sense strand
ccaccucucuggacaguaa

SEQ ID NO: 1818517 - RNA, 19 nt, Homo sapiens
  misc_RNA (1)...(19): siRNA sense strand
uaaauaucguugccuauga

SEQ ID NO: 1818518 - RNA, 19 nt, Homo sapiens
  misc_RNA (1)...(19): siRNA sense strand
gcauucagcuccucugugu

SEQ ID NO: 1818519 - RNA, 19 nt, Homo sapiens
  misc_RNA (1)...(19): siRNA sense strand
ggcagaagaugaauuuguu

SEQ ID NO: 1818520 - RNA, 19 nt, Homo sapiens
  misc_RNA (1)...(19): siRNA sense strand
gaagaacaggcacauauau

SEQ ID NO: 1818521 - RNA, 19 nt, Homo sapiens
  misc_RNA (1)...(19): siRNA sense strand
ucagauagccuuaaugaga

SEQ ID NO: 1818522 - RNA, 19 nt, Homo sapiens
  misc_RNA (1)...(19): siRNA sense strand
gauaauagagucacaagug

SEQ ID NO: 1818523 - RNA, 19 nt, Homo sapiens
  misc_RNA (1)...(19): siRNA sense strand
ggagggaaaugugugguuu

SEQ ID NO: 1818524 - RNA, 19 nt, Homo sapiens
  misc_RNA (1)...(19): siRNA sense strand
aagaugagccuauaaauug

SEQ ID NO: 1818525 - RNA, 19 nt, Homo sapiens
  misc_RNA (1)...(19): siRNA sense strand
caaacugacugauuauauc

SEQ ID NO: 1818526 - RNA, 19 nt, Homo sapiens
  misc_RNA (1)...(19): siRNA sense strand
gcauacaguuucucaaauc

SEQ ID NO: 1818527 - RNA, 19 nt, Homo sapiens
  misc_RNA (1)...(19): siRNA sense strand
ugagauacguguugaugaa

SEQ ID NO: 1818528 - RNA, 19 nt, Homo sapiens
  misc_RNA (1)...(19): siRNA sense strand
gagcuuagagucuuuaguu

SEQ ID NO: 1818529 - RNA, 19 nt, Homo sapiens
  misc_RNA (1)...(19): siRNA sense strand
gcaaacugacugauuauau

SEQ ID NO: 1818530 - RNA, 19 nt, Homo sapiens
  misc_RNA (1)...(19): siRNA sense strand
gaaugagacuuccacagau

SEQ ID NO: 1818531 - RNA, 19 nt, Homo sapiens
  misc_RNA (1)...(19): siRNA sense strand
gggcaguucugacaaguga

SEQ ID NO: 1818532 - RNA, 19 nt, Homo sapiens
  misc_RNA (1)...(19): siRNA sense strand
caaauuccuucuuucaaug

SEQ ID NO: 1818533 - RNA, 19 nt, Homo sapiens
  misc_RNA (1)...(19): siRNA sense strand
gaagaacacaaaugucuau

SEQ ID NO: 1818534 - RNA, 19 nt, Homo sapiens
  misc_RNA (1)...(19): siRNA sense strand
gaaucgaacuucuucuauc

SEQ ID NO: 1818535 - RNA, 19 nt, Homo sapiens
  misc_RNA (1)...(19): siRNA sense strand
aaacacauccguucacaaa

SEQ ID NO: 1818536 - RNA, 19 nt, Homo sapiens
  misc_RNA (1)...(19): siRNA sense strand
cagauagccuuaaugagaa

SEQ ID NO: 1818537 - RNA, 19 nt, Homo sapiens
  misc_RNA (1)...(19): siRNA sense strand
gaucagagcauaguuuaga

SEQ ID NO: 1818538 - RNA, 19 nt, Homo sapiens
  misc_RNA (1)...(19): siRNA sense strand
gaucaaggguuggcauuuc

SEQ ID NO: 1818539 - RNA, 19 nt, Homo sapiens
  misc_RNA (1)...(19): siRNA sense strand
cgacaugccuacugauaau

SEQ ID NO: 1818540 - RNA, 19 nt, Homo sapiens
  misc_RNA (1)...(19): siRNA sense strand
acuaauggcuuauauggaa

SEQ ID NO: 1818541 - RNA, 19 nt, Homo sapiens
  misc_RNA (1)...(19): siRNA sense strand
gcacucugcuucacuucaa

SEQ ID NO: 1818542 - RNA, 19 nt, Homo sapiens
  misc_RNA (1)...(19): siRNA sense strand
gaaagaaauauccaacaug

SEQ ID NO: 1818543 - RNA, 19 nt, Homo sapiens
  misc_RNA (1)...(19): siRNA sense strand
acacauccguucacaaaga

SEQ ID NO: 1818544 - RNA, 19 nt, Homo sapiens
  misc_RNA (1)...(19): siRNA sense strand
cagaaguccugguaaauca

SEQ ID NO: 1818545 - RNA, 19 nt, Homo sapiens
  misc_RNA (1)...(19): siRNA sense strand
gguaagguauuugcuggua

SEQ ID NO: 1818546 - RNA, 19 nt, Homo sapiens
  misc_RNA (1)...(19): siRNA sense strand
gcccagugauccaauauug

SEQ ID NO: 1818547 - RNA, 19 nt, Homo sapiens
  misc_RNA (1)...(19): siRNA sense strand
uaaguugaaugcgucuuua

SEQ ID NO: 1818548 - RNA, 19 nt, Homo sapiens
  misc_RNA (1)...(19): siRNA sense strand
gauaauaaggcgcuuucua

SEQ ID NO: 1818549 - RNA, 19 nt, Homo sapiens
  misc_RNA (1)...(19): siRNA sense strand
uauaccagccuucuuguua

SEQ ID NO: 1818550 - RNA, 19 nt, Homo sapiens
  misc_RNA (1)...(19): siRNA sense strand
gcuuagagucuuuaguuua

SEQ ID NO: 1818551 - RNA, 19 nt, Homo sapiens
  misc_RNA (1)...(19): siRNA sense strand
gaacaggcacauauauugu

SEQ ID NO: 1818552 - RNA, 19 nt, Homo sapiens
  misc_RNA (1)...(19): siRNA sense strand
ucaaauccuuccacaaguu

SEQ ID NO: 1818553 - RNA, 19 nt, Homo sapiens
  misc_RNA (1)...(19): siRNA sense strand
gcagaauccuuaaauacag

SEQ ID NO: 1818554 - RNA, 19 nt, Homo sapiens
  misc_RNA (1)...(19): siRNA sense strand
ggaacuuucuggucacuca

SEQ ID NO: 1818555 - RNA, 19 nt, Homo sapiens
  misc_RNA (1)...(19): siRNA sense strand
ucagaaguguuccacguuu

SEQ ID NO: 1818556 - RNA, 19 nt, Homo sapiens
  misc_RNA (1)...(19): siRNA sense strand
gcuuauacauuccgaugaa

SEQ ID NO: 1818557 - RNA, 19 nt, Homo sapiens
  misc_RNA (1)...(19): siRNA sense strand
caaauucugcuucaaguga

SEQ ID NO: 1818558 - RNA, 19 nt, Homo sapiens
  misc_RNA (1)...(19): siRNA sense strand
cagagacaauaacauauga

SEQ ID NO: 1818559 - RNA, 19 nt, Homo sapiens
  misc_RNA (1)...(19): siRNA sense strand
caaacucaacugacaagua

SEQ ID NO: 1818560 - RNA, 19 nt, Homo sapiens
  misc_RNA (1)...(19): siRNA sense strand
caacaccuaucuuuccaau

SEQ ID NO: 1818561 - RNA, 19 nt, Homo sapiens
  misc_RNA (1)...(19): siRNA sense strand
gacaagugaugaagaaagu

SEQ ID NO: 1818562 - RNA, 19 nt, Homo sapiens
  misc_RNA (1)...(19): siRNA sense strand
uaagguauuugcugguauu

SEQ ID NO: 1818563 - RNA, 19 nt, Homo sapiens
  misc_RNA (1)...(19): siRNA sense strand
ggaauuugguagugaaucu

SEQ ID NO: 1818564 - RNA, 19 nt, Homo sapiens
  misc_RNA (1)...(19): siRNA sense strand
ggaagagauucaugaagca

SEQ ID NO: 1818565 - RNA, 19 nt, Homo sapiens
  misc_RNA (1)...(19): siRNA sense strand
aaacauggcagaagaugaa

SEQ ID NO: 1818566 - RNA, 19 nt, Homo sapiens
  misc_RNA (1)...(19): siRNA sense strand
guaaaucaccaucagcaaa

SEQ ID NO: 1818567 - RNA, 19 nt, Homo sapiens
  misc_RNA (1)...(19): siRNA sense strand
gauguugacaccuugcuua

SEQ ID NO: 1818568 - RNA, 19 nt, Homo sapiens
  misc_RNA (1)...(19): siRNA sense strand
gaagacaaccaaguccuuu

SEQ ID NO: 1818569 - RNA, 19 nt, Homo sapiens
  misc_RNA (1)...(19): siRNA sense strand
gaguuauguucuucagaua

SEQ ID NO: 1818570 - RNA, 19 nt, Homo sapiens
  misc_RNA (1)...(19): siRNA sense strand
caaauccuuccacaaguua

SEQ ID NO: 1818571 - RNA, 19 nt, Homo sapiens
  misc_RNA (1)...(19): siRNA sense strand
agaagaagcugccaauagg

SEQ ID NO: 1818572 - RNA, 19 nt, Homo sapiens
  misc_RNA (1)...(19): siRNA sense strand
guaguggguuuacugaaga

SEQ ID NO: 1818573 - RNA, 19 nt, Homo sapiens
  misc_RNA (1)...(19): siRNA sense strand
auaauaaggcgcuuucuaa

SEQ ID NO: 1818574 - RNA, 19 nt, Homo sapiens
  misc_RNA (1)...(19): siRNA sense strand
gcugagagcuuagagucuu

SEQ ID NO: 1818575 - RNA, 19 nt, Homo sapiens
  misc_RNA (1)...(19): siRNA sense strand
ggacaucuacuccaaguuu

SEQ ID NO: 1818576 - RNA, 19 nt, Homo sapiens
  misc_RNA (1)...(19): siRNA sense strand
gaugcugucucuucauuaa

SEQ ID NO: 1818577 - RNA, 19 nt, Homo sapiens
  misc_RNA (1)...(19): siRNA sense strand
gaagaacacaagauagaaa

SEQ ID NO: 1818578 - RNA, 19 nt, Homo sapiens
  misc_RNA (1)...(19): siRNA sense strand
gcuagaagaacacaagaua

SEQ ID NO: 1818579 - RNA, 19 nt, Homo sapiens
  misc_RNA (1)...(19): siRNA sense strand
caacaucgaucacauuacu

SEQ ID NO: 1818580 - RNA, 19 nt, Homo sapiens
  misc_RNA (1)...(19): siRNA sense strand
ugaaguuccucaaauuguu

SEQ ID NO: 1818581 - RNA, 19 nt, Homo sapiens
  misc_RNA (1)...(19): siRNA sense strand
gaaguuccucaaauuguuu

SEQ ID NO: 1818582 - RNA, 19 nt, Homo sapiens
  misc_RNA (1)...(19): siRNA sense strand
gcucacagguggagagaag

SEQ ID NO: 1818583 - RNA, 19 nt, Homo sapiens
  misc_RNA (1)...(19): siRNA sense strand
gaacacaagauagaaacuu

SEQ ID NO: 1818584 - RNA, 19 nt, Homo sapiens
  misc_RNA (1)...(19): siRNA sense strand
gcaccgcuacuauaaauca

SEQ ID NO: 1818585 - RNA, 19 nt, Homo sapiens
  misc_RNA (1)...(19): siRNA sense strand
acaauagcguguauacuuc

SEQ ID NO: 1818586 - RNA, 19 nt, Homo sapiens
  misc_RNA (1)...(19): siRNA sense strand
uggaagagcuacagauugg

SEQ ID NO: 1818587 - RNA, 19 nt, Homo sapiens
  misc_RNA (1)...(19): siRNA sense strand
uagaagaacacaagauaga

SEQ ID NO: 1818588 - RNA, 19 nt, Homo sapiens
  misc_RNA (1)...(19): siRNA sense strand
gauaguaagaagcaaaguu

SEQ ID NO: 1818589 - RNA, 19 nt, Homo sapiens
  misc_RNA (1)...(19): siRNA sense strand
guguauacuuccuucauga

SEQ ID NO: 1818590 - RNA, 19 nt, Homo sapiens
  misc_RNA (1)...(19): siRNA sense strand
gaagucucaucgcugcuau

SEQ ID NO: 1818591 - RNA, 19 nt, Homo sapiens
  misc_RNA (1)...(19): siRNA sense strand
cagaaucaggcaauacuuu

SEQ ID NO: 1818592 - RNA, 19 nt, Homo sapiens
  misc_RNA (1)...(19): siRNA sense strand
cuauaaaucagccuuggua

SEQ ID NO: 1818593 - RNA, 19 nt, Homo sapiens
  misc_RNA (1)...(19): siRNA sense strand
gacccagaaucaggcaaua

SEQ ID NO: 1818594 - RNA, 19 nt, Homo sapiens
  misc_RNA (1)...(19): siRNA sense strand
gacaucuacuccaaguuug

SEQ ID NO: 1818595 - RNA, 19 nt, Homo sapiens
  misc_RNA (1)...(19): siRNA sense strand
aacaauagcguguauacuu

SEQ ID NO: 1818596 - RNA, 19 nt, Homo sapiens
  misc_RNA (1)...(19): siRNA sense strand
acaagcgcauucugaaguu

SEQ ID NO: 1818597 - RNA, 19 nt, Homo sapiens
  misc_RNA (1)...(19): siRNA sense strand
uuaaaccgcuugucugcau

SEQ ID NO: 1818598 - RNA, 19 nt, Homo sapiens
  misc_RNA (1)...(19): siRNA sense strand
cugcaccgcuacuauaaau

SEQ ID NO: 1818599 - RNA, 19 nt, Homo sapiens
  misc_RNA (1)...(19): siRNA sense strand
ggucaagggaauuguauca

SEQ ID NO: 1818600 - RNA, 19 nt, Homo sapiens
  misc_RNA (1)...(19): siRNA sense strand
acuaaagccuugcaacauc

SEQ ID NO: 1818601 - RNA, 19 nt, Homo sapiens
  misc_RNA (1)...(19): siRNA sense strand
ggucauuucuucagauagc

SEQ ID NO: 1818602 - RNA, 19 nt, Homo sapiens
  misc_RNA (1)...(19): siRNA sense strand
gagguucaccgacuuguag

SEQ ID NO: 1818603 - RNA, 19 nt, Homo sapiens
  misc_RNA (1)...(19): siRNA sense strand
aaugccagcuuguuugaug

SEQ ID NO: 1818604 - RNA, 19 nt, Homo sapiens
  misc_RNA (1)...(19): siRNA sense strand
ucgcugcuaugaccugauu

SEQ ID NO: 1818605 - RNA, 19 nt, Homo sapiens
  misc_RNA (1)...(19): siRNA sense strand
acaacaaccuagauguauc

SEQ ID NO: 1818606 - RNA, 19 nt, Homo sapiens
  misc_RNA (1)...(19): siRNA sense strand
ucaagggaauuguaucacu

SEQ ID NO: 1818607 - RNA, 19 nt, Homo sapiens
  misc_RNA (1)...(19): siRNA sense strand
uguacgagcugccccuuua

SEQ ID NO: 1818608 - RNA, 19 nt, Homo sapiens
  misc_RNA (1)...(19): siRNA sense strand
ugacuaaagccuugcaaca

SEQ ID NO: 1818609 - RNA, 19 nt, Homo sapiens
  misc_RNA (1)...(19): siRNA sense strand
gcaccuaugccaauauugc

SEQ ID NO: 1818610 - RNA, 19 nt, Homo sapiens
  misc_RNA (1)...(19): siRNA sense strand
gcaauacuuuguacauccu

SEQ ID NO: 1818611 - RNA, 19 nt, Homo sapiens
  misc_RNA (1)...(19): siRNA sense strand
gaaucaggcaauacuuugu

SEQ ID NO: 1818612 - RNA, 19 nt, Homo sapiens
  misc_RNA (1)...(19): siRNA sense strand
ugcugucucuucauuaauu

SEQ ID NO: 1818613 - RNA, 19 nt, Homo sapiens
  misc_RNA (1)...(19): siRNA sense strand
agacggucauuucuucaga

SEQ ID NO: 1818614 - RNA, 19 nt, Homo sapiens
  misc_RNA (1)...(19): siRNA sense strand
auacgucccugcaggugaa

SEQ ID NO: 1818615 - RNA, 19 nt, Homo sapiens
  misc_RNA (1)...(19): siRNA sense strand
gcagagguucaccgacuug

SEQ ID NO: 1818616 - RNA, 19 nt, Homo sapiens
  misc_RNA (1)...(19): siRNA sense strand
ugcaacaucgaucacauua

SEQ ID NO: 1818617 - RNA, 19 nt, Homo sapiens
  misc_RNA (1)...(19): siRNA sense strand
cguguauacuuccuucaug

SEQ ID NO: 1818618 - RNA, 19 nt, Homo sapiens
  misc_RNA (1)...(19): siRNA sense strand
aaucaggcaauacuuugua

SEQ ID NO: 1818619 - RNA, 19 nt, Homo sapiens
  misc_RNA (1)...(19): siRNA sense strand
uugaugcugucucuucauu

SEQ ID NO: 1818620 - RNA, 19 nt, Homo sapiens
  misc_RNA (1)...(19): siRNA sense strand
acggucauuucuucagaua

SEQ ID NO: 1818621 - RNA, 19 nt, Homo sapiens
  misc_RNA (1)...(19): siRNA sense strand
gcuaguggaagcagagguu

SEQ ID NO: 1818622 - RNA, 19 nt, Homo sapiens
  misc_RNA (1)...(19): siRNA sense strand
gcuacagauuggcaccuau

SEQ ID NO: 1818623 - RNA, 19 nt, Homo sapiens
  misc_RNA (1)...(19): siRNA sense strand
uaaaccgcuugucugcauu

SEQ ID NO: 1818624 - RNA, 19 nt, Homo sapiens
  misc_RNA (1)...(19): siRNA sense strand
uaaaucagccuugguacag

SEQ ID NO: 1818625 - RNA, 19 nt, Homo sapiens
  misc_RNA (1)...(19): siRNA sense strand
acaucgaucacauuacuuu

SEQ ID NO: 1818626 - RNA, 19 nt, Homo sapiens
  misc_RNA (1)...(19): siRNA sense strand
gacuaaagccuugcaacau

SEQ ID NO: 1818627 - RNA, 19 nt, Homo sapiens
  misc_RNA (1)...(19): siRNA sense strand
cagaaaagaccuacaacaa

SEQ ID NO: 1818628 - RNA, 19 nt, Homo sapiens
  misc_RNA (1)...(19): siRNA sense strand
acuccaaguuugauguuau

SEQ ID NO: 1818629 - RNA, 19 nt, Homo sapiens
  misc_RNA (1)...(19): siRNA sense strand
ccacaggcugccaguuauu

SEQ ID NO: 1818630 - RNA, 19 nt, Homo sapiens
  misc_RNA (1)...(19): siRNA sense strand
aaacuuggagagaggugua

SEQ ID NO: 1818631 - RNA, 19 nt, Homo sapiens
  misc_RNA (1)...(19): siRNA sense strand
ccuaaugccagcuuguuug

SEQ ID NO: 1818632 - RNA, 19 nt, Homo sapiens
  misc_RNA (1)...(19): siRNA sense strand
gacuuguagugguggauga

SEQ ID NO: 1818633 - RNA, 19 nt, Homo sapiens
  misc_RNA (1)...(19): siRNA sense strand
ggcgugugguggacaucua

SEQ ID NO: 1818634 - RNA, 19 nt, Homo sapiens
  misc_RNA (1)...(19): siRNA sense strand
auucugaaguuccucaaau

SEQ ID NO: 1818635 - RNA, 19 nt, Homo sapiens
  misc_RNA (1)...(19): siRNA sense strand
agaaucaggcaauacuuug

SEQ ID NO: 1818636 - RNA, 19 nt, Homo sapiens
  misc_RNA (1)...(19): siRNA sense strand
gagcuagaagaacacaaga

SEQ ID NO: 1818637 - RNA, 19 nt, Homo sapiens
  misc_RNA (1)...(19): siRNA sense strand
ccaacaauagcguguauac

SEQ ID NO: 1818638 - RNA, 19 nt, Homo sapiens
  misc_RNA (1)...(19): siRNA sense strand
caucaacaggcuaguggaa

SEQ ID NO: 1818639 - RNA, 19 nt, Homo sapiens
  misc_RNA (1)...(19): siRNA sense strand
cuaaugccagcuuguuuga

SEQ ID NO: 1818640 - RNA, 19 nt, Homo sapiens
  misc_RNA (1)...(19): siRNA sense strand
guuugaugcugucucuuca

SEQ ID NO: 1818641 - RNA, 19 nt, Homo sapiens
  misc_RNA (1)...(19): siRNA sense strand
ucacagguggagagaagaa

SEQ ID NO: 1818642 - RNA, 19 nt, Homo sapiens
  misc_RNA (1)...(19): siRNA sense strand
gacggucauuucuucagau

SEQ ID NO: 1818643 - RNA, 19 nt, Homo sapiens
  misc_RNA (1)...(19): siRNA sense strand
cagaguucauguccaaguc

SEQ ID NO: 1818644 - RNA, 19 nt, Homo sapiens
  misc_RNA (1)...(19): siRNA sense strand
agccagaguucauguccaa

SEQ ID NO: 1818645 - RNA, 19 nt, Homo sapiens
  misc_RNA (1)...(19): siRNA sense strand
cagccuugguacagaucua

SEQ ID NO: 1818646 - RNA, 19 nt, Homo sapiens
  misc_RNA (1)...(19): siRNA sense strand
cacaagcgcauucugaagu

SEQ ID NO: 1818647 - RNA, 19 nt, Homo sapiens
  misc_RNA (1)...(19): siRNA sense strand
gcugucucuucauuaauuc

SEQ ID NO: 1818648 - RNA, 19 nt, Homo sapiens
  misc_RNA (1)...(19): siRNA sense strand
agaagaacacaagauagaa

SEQ ID NO: 1818649 - RNA, 19 nt, Homo sapiens
  misc_RNA (1)...(19): siRNA sense strand
aaucagccuugguacagau

SEQ ID NO: 1818650 - RNA, 19 nt, Homo sapiens
  misc_RNA (1)...(19): siRNA sense strand
gaauuguaucacugucuga

SEQ ID NO: 1818651 - RNA, 19 nt, Homo sapiens
  misc_RNA (1)...(19): siRNA sense strand
gauguggucaagggaauug

SEQ ID NO: 1818652 - RNA, 19 nt, Homo sapiens
  misc_RNA (1)...(19): siRNA sense strand
ccgcuugucugcauuucuc

SEQ ID NO: 1818653 - RNA, 19 nt, Homo sapiens
  misc_RNA (1)...(19): siRNA sense strand
aaaucagccuugguacaga

SEQ ID NO: 1818654 - RNA, 19 nt, Homo sapiens
  misc_RNA (1)...(19): siRNA sense strand
ggagacggucauuucuuca

SEQ ID NO: 1818655 - RNA, 19 nt, Homo sapiens
  misc_RNA (1)...(19): siRNA sense strand
ugccagugguggaugagaa

SEQ ID NO: 1818656 - RNA, 19 nt, Homo sapiens
  misc_RNA (1)...(19): siRNA sense strand
uccacaggcugccaguuau

SEQ ID NO: 1818657 - RNA, 19 nt, Homo sapiens
  misc_RNA (1)...(19): siRNA sense strand
ucccacaagcuccaaauug

SEQ ID NO: 1818658 - RNA, 19 nt, Homo sapiens
  misc_RNA (1)...(19): siRNA sense strand
uucugaaguuccucaaauu

SEQ ID NO: 1818659 - RNA, 19 nt, Homo sapiens
  misc_RNA (1)...(19): siRNA sense strand
caagcgcauucugaaguuc

SEQ ID NO: 1818660 - RNA, 19 nt, Homo sapiens
  misc_RNA (1)...(19): siRNA sense strand
gccaguuauugacccagaa

SEQ ID NO: 1818661 - RNA, 19 nt, Homo sapiens
  misc_RNA (1)...(19): siRNA sense strand
auccacaggcugccaguua

SEQ ID NO: 1818662 - RNA, 19 nt, Homo sapiens
  misc_RNA (1)...(19): siRNA sense strand
ucauuaauucggaacaaga

SEQ ID NO: 1818663 - RNA, 19 nt, Homo sapiens
  misc_RNA (1)...(19): siRNA sense strand
gguacagaucuaugagcua

SEQ ID NO: 1818664 - RNA, 19 nt, Homo sapiens
  misc_RNA (1)...(19): siRNA sense strand
ugaagucucaucgcugcua

SEQ ID NO: 1818665 - RNA, 19 nt, Homo sapiens
  misc_RNA (1)...(19): siRNA sense strand
aaagaccuacaacaaccua

SEQ ID NO: 1818666 - RNA, 19 nt, Homo sapiens
  misc_RNA (1)...(19): siRNA sense strand
ucugaaguuccucaaauug

SEQ ID NO: 1818667 - RNA, 19 nt, Homo sapiens
  misc_RNA (1)...(19): siRNA sense strand
ccacaagcgcauucugaag

SEQ ID NO: 1818668 - RNA, 19 nt, Homo sapiens
  misc_RNA (1)...(19): siRNA sense strand
aaaccgcuugucugcauuu

SEQ ID NO: 1818669 - RNA, 19 nt, Homo sapiens
  misc_RNA (1)...(19): siRNA sense strand
gaccuacaacaaccuagau

SEQ ID NO: 1818670 - RNA, 19 nt, Homo sapiens
  misc_RNA (1)...(19): siRNA sense strand
uguacagcaucgagucuca

SEQ ID NO: 1818671 - RNA, 19 nt, Homo sapiens
  misc_RNA (1)...(19): siRNA sense strand
ucaagugcuaccugcauga

SEQ ID NO: 1818672 - RNA, 19 nt, Homo sapiens
  misc_RNA (1)...(19): siRNA sense strand
aggguguucucaagugcua

SEQ ID NO: 1818673 - RNA, 19 nt, Homo sapiens
  misc_RNA (1)...(19): siRNA sense strand
ucgaucacauuacuuugag

SEQ ID NO: 1818674 - RNA, 19 nt, Homo sapiens
  misc_RNA (1)...(19): siRNA sense strand
uacuccaaguuugauguua

SEQ ID NO: 1818675 - RNA, 19 nt, Homo sapiens
  misc_RNA (1)...(19): siRNA sense strand
cgagagagaugcagaagau

SEQ ID NO: 1818676 - RNA, 19 nt, Homo sapiens
  misc_RNA (1)...(19): siRNA sense strand
caucaaggcucugaagaaa

SEQ ID NO: 1818677 - RNA, 19 nt, Homo sapiens
  misc_RNA (1)...(19): siRNA sense strand
cagaagaugugaagaaaca

SEQ ID NO: 1818678 - RNA, 19 nt, Homo sapiens
  misc_RNA (1)...(19): siRNA sense strand
gaaguuggaggauuucuug

SEQ ID NO: 1818679 - RNA, 19 nt, Homo sapiens
  misc_RNA (1)...(19): siRNA sense strand
ccauugagcugaaggugaa

SEQ ID NO: 1818680 - RNA, 19 nt, Homo sapiens
  misc_RNA (1)...(19): siRNA sense strand
ccucgaagauuucaaguuc

SEQ ID NO: 1818681 - RNA, 19 nt, Homo sapiens
  misc_RNA (1)...(19): siRNA sense strand
gagaagcaguuggccauug

SEQ ID NO: 1818682 - RNA, 19 nt, Homo sapiens
  misc_RNA (1)...(19): siRNA sense strand
caggagaaauugacagaau

SEQ ID NO: 1818683 - RNA, 19 nt, Homo sapiens
  misc_RNA (1)...(19): siRNA sense strand
gaaggagggugcugagaac

SEQ ID NO: 1818684 - RNA, 19 nt, Homo sapiens
  misc_RNA (1)...(19): siRNA sense strand
ucaaauuccugaaguugga

SEQ ID NO: 1818685 - RNA, 19 nt, Homo sapiens
  misc_RNA (1)...(19): siRNA sense strand
gaccugaaguuggacaauu

SEQ ID NO: 1818686 - RNA, 19 nt, Homo sapiens
  misc_RNA (1)...(19): siRNA sense strand
gcugggaucuagcgagaga

SEQ ID NO: 1818687 - RNA, 19 nt, Homo sapiens
  misc_RNA (1)...(19): siRNA sense strand
ucaaggcucugaagaaagg

SEQ ID NO: 1818688 - RNA, 19 nt, Homo sapiens
  misc_RNA (1)...(19): siRNA sense strand
agaagcaguuggccauuga

SEQ ID NO: 1818689 - RNA, 19 nt, Homo sapiens
  misc_RNA (1)...(19): siRNA sense strand
gaagccaucggcaucauga

SEQ ID NO: 1818690 - RNA, 19 nt, Homo sapiens
  misc_RNA (1)...(19): siRNA sense strand
gaggauuucuuggacaaug

SEQ ID NO: 1818691 - RNA, 19 nt, Homo sapiens
  misc_RNA (1)...(19): siRNA sense strand
acaguaagaccaagauuga

SEQ ID NO: 1818692 - RNA, 19 nt, Homo sapiens
  misc_RNA (1)...(19): siRNA sense strand
uggagagccugauguguga

SEQ ID NO: 1818693 - RNA, 19 nt, Homo sapiens
  misc_RNA (1)...(19): siRNA sense strand
gaccaagauugacaucauc

SEQ ID NO: 1818694 - RNA, 19 nt, Homo sapiens
  misc_RNA (1)...(19): siRNA sense strand
ggacagcucaccucagaag

SEQ ID NO: 1818695 - RNA, 19 nt, Homo sapiens
  misc_RNA (1)...(19): siRNA sense strand
ucggacagcucaccucaga

SEQ ID NO: 1818696 - RNA, 19 nt, Homo sapiens
  misc_RNA (1)...(19): siRNA sense strand
gacaguaagaccaagauug

SEQ ID NO: 1818697 - RNA, 19 nt, Homo sapiens
  misc_RNA (1)...(19): siRNA sense strand
ugacagaauccaaccagaa

SEQ ID NO: 1818698 - RNA, 19 nt, Homo sapiens
  misc_RNA (1)...(19): siRNA sense strand
gcgaggcccaggagaaauu

SEQ ID NO: 1818699 - RNA, 19 nt, Homo sapiens
  misc_RNA (1)...(19): siRNA sense strand
cagagaccaucccguggaa

SEQ ID NO: 1818700 - RNA, 19 nt, Homo sapiens
  misc_RNA (1)...(19): siRNA sense strand
gagcggaggcugggaucua

SEQ ID NO: 1818701 - RNA, 19 nt, Homo sapiens
  misc_RNA (1)...(19): siRNA sense strand
ggaaagggcacgggaacug

SEQ ID NO: 1818702 - RNA, 19 nt, Homo sapiens
  misc_RNA (1)...(19): siRNA sense strand
agaccaagauugacaucau

SEQ ID NO: 1818703 - RNA, 19 nt, Homo sapiens
  misc_RNA (1)...(19): siRNA sense strand
acagcgacguguucucuga

SEQ ID NO: 1818704 - RNA, 19 nt, Homo sapiens
  misc_RNA (1)...(19): siRNA sense strand
gaccacgggugacauaucg

SEQ ID NO: 1818705 - RNA, 19 nt, Homo sapiens
  misc_RNA (1)...(19): siRNA sense strand
ggacaguaagaccaagauu

SEQ ID NO: 1818706 - RNA, 19 nt, Homo sapiens
  misc_RNA (1)...(19): siRNA sense strand
ugcagaagaugugaagaaa

SEQ ID NO: 1818707 - RNA, 19 nt, Homo sapiens
  misc_RNA (1)...(19): siRNA sense strand
gcaauggcagcaccaagga

SEQ ID NO: 1818708 - RNA, 19 nt, Homo sapiens
  misc_RNA (1)...(19): siRNA sense strand
ugaaggagggugcugagaa

SEQ ID NO: 1818709 - RNA, 19 nt, Homo sapiens
  misc_RNA (1)...(19): siRNA sense strand
agaacaugauccagaccua

SEQ ID NO: 1818710 - RNA, 19 nt, Homo sapiens
  misc_RNA (1)...(19): siRNA sense strand
gagaacaccagugaaguca

SEQ ID NO: 1818711 - RNA, 19 nt, Homo sapiens
  misc_RNA (1)...(19): siRNA sense strand
ugacagcccagcagauguu

SEQ ID NO: 1818712 - RNA, 19 nt, Homo sapiens
  misc_RNA (1)...(19): siRNA sense strand
ccaucaaggcucugaagaa

SEQ ID NO: 1818713 - RNA, 19 nt, Homo sapiens
  misc_RNA (1)...(19): siRNA sense strand
ccgcaacccugucauugag

SEQ ID NO: 1818714 - RNA, 19 nt, Homo sapiens
  misc_RNA (1)...(19): siRNA sense strand
gagagaugcagaagaugug

SEQ ID NO: 1818715 - RNA, 19 nt, Homo sapiens
  misc_RNA (1)...(19): siRNA sense strand
ggaccggaccagcacauuc

SEQ ID NO: 1818716 - RNA, 19 nt, Homo sapiens
  misc_RNA (1)...(19): siRNA sense strand
gaagaaaggggacauugug

SEQ ID NO: 1818717 - RNA, 19 nt, Homo sapiens
  misc_RNA (1)...(19): siRNA sense strand
gacagaauccaaccagaag

SEQ ID NO: 1818718 - RNA, 19 nt, Homo sapiens
  misc_RNA (1)...(19): siRNA sense strand
gauccagaccuacagcaau

SEQ ID NO: 1818719 - RNA, 19 nt, Homo sapiens
  misc_RNA (1)...(19): siRNA sense strand
gaacacaagaucgucuaca

SEQ ID NO: 1818720 - RNA, 19 nt, Homo sapiens
  misc_RNA (1)...(19): siRNA sense strand
gcccucaaauuccugaagu

SEQ ID NO: 1818721 - RNA, 19 nt, Homo sapiens
  misc_RNA (1)...(19): siRNA sense strand
ggugcugggccuacaguuu

SEQ ID NO: 1818722 - RNA, 19 nt, Homo sapiens
  misc_RNA (1)...(19): siRNA sense strand
accugaaguuggacaauuu

SEQ ID NO: 1818723 - RNA, 19 nt, Homo sapiens
  misc_RNA (1)...(19): siRNA sense strand
cagcgaggcccaggagaaa

SEQ ID NO: 1818724 - RNA, 19 nt, Homo sapiens
  misc_RNA (1)...(19): siRNA sense strand
cgucaagaucgcagacuuu

SEQ ID NO: 1818725 - RNA, 19 nt, Homo sapiens
  misc_RNA (1)...(19): siRNA sense strand
gaaccucuucggcuguuuc

SEQ ID NO: 1818726 - RNA, 19 nt, Homo sapiens
  misc_RNA (1)...(19): siRNA sense strand
gugcugggccuacaguuuc

SEQ ID NO: 1818727 - RNA, 19 nt, Homo sapiens
  misc_RNA (1)...(19): siRNA sense strand
gagcagccucaaagcagaa

SEQ ID NO: 1818728 - RNA, 19 nt, Homo sapiens
  misc_RNA (1)...(19): siRNA sense strand
ccucugacccucgaagauu

SEQ ID NO: 1818729 - RNA, 19 nt, Homo sapiens
  misc_RNA (1)...(19): siRNA sense strand
ggaccacgggugacauauc

SEQ ID NO: 1818730 - RNA, 19 nt, Homo sapiens
  misc_RNA (1)...(19): siRNA sense strand
uggaggauuucuuggacaa

SEQ ID NO: 1818731 - RNA, 19 nt, Homo sapiens
  misc_RNA (1)...(19): siRNA sense strand
cgagaacaccagugaaguc

SEQ ID NO: 1818732 - RNA, 19 nt, Homo sapiens
  misc_RNA (1)...(19): siRNA sense strand
ugacauaucgguggagaag

SEQ ID NO: 1818733 - RNA, 19 nt, Homo sapiens
  misc_RNA (1)...(19): siRNA sense strand
ggagaagcaguuggccauu

SEQ ID NO: 1818734 - RNA, 19 nt, Homo sapiens
  misc_RNA (1)...(19): siRNA sense strand
gugaaccucuucggcuguu

SEQ ID NO: 1818735 - RNA, 19 nt, Homo sapiens
  misc_RNA (1)...(19): siRNA sense strand
aggagaaauugacagaauc

SEQ ID NO: 1818736 - RNA, 19 nt, Homo sapiens
  misc_RNA (1)...(19): siRNA sense strand
gaccggaccagcacauucu

SEQ ID NO: 1818737 - RNA, 19 nt, Homo sapiens
  misc_RNA (1)...(19): siRNA sense strand
caaagcagaagccgagaac

SEQ ID NO: 1818738 - RNA, 19 nt, Homo sapiens
  misc_RNA (1)...(19): siRNA sense strand
ccucaaauuccugaaguug

SEQ ID NO: 1818739 - RNA, 19 nt, Homo sapiens
  misc_RNA (1)...(19): siRNA sense strand
agagagaugcagaagaugu

SEQ ID NO: 1818740 - RNA, 19 nt, Homo sapiens
  misc_RNA (1)...(19): siRNA sense strand
gacugggugugcugcucua

SEQ ID NO: 1818741 - RNA, 19 nt, Homo sapiens
  misc_RNA (1)...(19): siRNA sense strand
ccgaccagcuggagaacca

SEQ ID NO: 1818742 - RNA, 19 nt, Homo sapiens
  misc_RNA (1)...(19): siRNA sense strand
aggauuucuuggacaauga

SEQ ID NO: 1818743 - RNA, 19 nt, Homo sapiens
  misc_RNA (1)...(19): siRNA sense strand
ugacaucauccgcaugcaa

SEQ ID NO: 1818744 - RNA, 19 nt, Homo sapiens
  misc_RNA (1)...(19): siRNA sense strand
gcgagagagaugcagaaga

SEQ ID NO: 1818745 - RNA, 19 nt, Homo sapiens
  misc_RNA (1)...(19): siRNA sense strand
gccaucggcaucaugagaa

SEQ ID NO: 1818746 - RNA, 19 nt, Homo sapiens
  misc_RNA (1)...(19): siRNA sense strand
cucugacccucgaagauuu

SEQ ID NO: 1818747 - RNA, 19 nt, Homo sapiens
  misc_RNA (1)...(19): siRNA sense strand
ucagcgaggcccaggagaa

SEQ ID NO: 1818748 - RNA, 19 nt, Homo sapiens
  misc_RNA (1)...(19): siRNA sense strand
acauaucgguggagaagcu

SEQ ID NO: 1818749 - RNA, 19 nt, Homo sapiens
  misc_RNA (1)...(19): siRNA sense strand
gugcuaggcagaugaacau

SEQ ID NO: 1818750 - RNA, 19 nt, Homo sapiens
  misc_RNA (1)...(19): siRNA sense strand
auccagaccuacagcaaug

SEQ ID NO: 1818751 - RNA, 19 nt, Homo sapiens
  misc_RNA (1)...(19): siRNA sense strand
agaaauugacagaauccaa

SEQ ID NO: 1818752 - RNA, 19 nt, Homo sapiens
  misc_RNA (1)...(19): siRNA sense strand
ccacagcgacguguucucu

SEQ ID NO: 1818753 - RNA, 19 nt, Homo sapiens
  misc_RNA (1)...(19): siRNA sense strand
agauguugcaggacaguaa

SEQ ID NO: 1818754 - RNA, 19 nt, Homo sapiens
  misc_RNA (1)...(19): siRNA sense strand
ccugugugcccucaaauuc

SEQ ID NO: 1818755 - RNA, 19 nt, Homo sapiens
  misc_RNA (1)...(19): siRNA sense strand
gagagccugaugugugaga

SEQ ID NO: 1818756 - RNA, 19 nt, Homo sapiens
  misc_RNA (1)...(19): siRNA sense strand
gcagaagaugugaagaaac

SEQ ID NO: 1818757 - RNA, 19 nt, Homo sapiens
  misc_RNA (1)...(19): siRNA sense strand
guaagaccaagauugacau

SEQ ID NO: 1818758 - RNA, 19 nt, Homo sapiens
  misc_RNA (1)...(19): siRNA sense strand
ucaaagcagaagccgagaa

SEQ ID NO: 1818759 - RNA, 19 nt, Homo sapiens
  misc_RNA (1)...(19): siRNA sense strand
gagaugcagaagaugugaa

SEQ ID NO: 1818760 - RNA, 19 nt, Homo sapiens
  misc_RNA (1)...(19): siRNA sense strand
gucaagaucgcagacuuug

SEQ ID NO: 1818761 - RNA, 19 nt, Homo sapiens
  misc_RNA (1)...(19): siRNA sense strand
ccggaccacgggugacaua

SEQ ID NO: 1818762 - RNA, 19 nt, Homo sapiens
  misc_RNA (1)...(19): siRNA sense strand
gugcuuaagcuggauaaca

SEQ ID NO: 1818763 - RNA, 19 nt, Homo sapiens
  misc_RNA (1)...(19): siRNA sense strand
gccgagaacaccagugaag

SEQ ID NO: 1818764 - RNA, 19 nt, Homo sapiens
  misc_RNA (1)...(19): siRNA sense strand
gaacuccgcugcaugugua

SEQ ID NO: 1818765 - RNA, 19 nt, Homo sapiens
  misc_RNA (1)...(19): siRNA sense strand
gaagugaucgggaaaggaa

SEQ ID NO: 1818766 - RNA, 19 nt, Homo sapiens
  misc_RNA (1)...(19): siRNA sense strand
caaccaagucgaagugaua

SEQ ID NO: 1818767 - RNA, 19 nt, Homo sapiens
  misc_RNA (1)...(19): siRNA sense strand
aaagacaaccucuggaauu

SEQ ID NO: 1818768 - RNA, 19 nt, Homo sapiens
  misc_RNA (1)...(19): siRNA sense strand
ggaaaggaacccauugcaa

SEQ ID NO: 1818769 - RNA, 19 nt, Homo sapiens
  misc_RNA (1)...(19): siRNA sense strand
aggaaagucuagacaguga

SEQ ID NO: 1818770 - RNA, 19 nt, Homo sapiens
  misc_RNA (1)...(19): siRNA sense strand
gacaaccucuggaauucau

SEQ ID NO: 1818771 - RNA, 19 nt, Homo sapiens
  misc_RNA (1)...(19): siRNA sense strand
gcaaccaagucgaagugau

SEQ ID NO: 1818772 - RNA, 19 nt, Homo sapiens
  misc_RNA (1)...(19): siRNA sense strand
caaaggacaaacuaagaga

SEQ ID NO: 1818773 - RNA, 19 nt, Homo sapiens
  misc_RNA (1)...(19): siRNA sense strand
gcaaagaggaaagucuaga

SEQ ID NO: 1818774 - RNA, 19 nt, Homo sapiens
  misc_RNA (1)...(19): siRNA sense strand
uaagagaaacuuggcgaaa

SEQ ID NO: 1818775 - RNA, 19 nt, Homo sapiens
  misc_RNA (1)...(19): siRNA sense strand
ucuagacagugacuuguau

SEQ ID NO: 1818776 - RNA, 19 nt, Homo sapiens
  misc_RNA (1)...(19): siRNA sense strand
aagacaaccucuggaauuc

SEQ ID NO: 1818777 - RNA, 19 nt, Homo sapiens
  misc_RNA (1)...(19): siRNA sense strand
aaacuuggcgaaaggcaaa

SEQ ID NO: 1818778 - RNA, 19 nt, Homo sapiens
  misc_RNA (1)...(19): siRNA sense strand
ugacuuguaugcugaacuc

SEQ ID NO: 1818779 - RNA, 19 nt, Homo sapiens
  misc_RNA (1)...(19): siRNA sense strand
agaggaaagucuagacagu

SEQ ID NO: 1818780 - RNA, 19 nt, Homo sapiens
  misc_RNA (1)...(19): siRNA sense strand
ccaccaaaggacaaacuaa

SEQ ID NO: 1818781 - RNA, 19 nt, Homo sapiens
  misc_RNA (1)...(19): siRNA sense strand
gcugaacuccgcugcaugu

SEQ ID NO: 1818782 - RNA, 19 nt, Homo sapiens
  misc_RNA (1)...(19): siRNA sense strand
gaaaggcaaagaggaaagu

SEQ ID NO: 1818783 - RNA, 19 nt, Homo sapiens
  misc_RNA (1)...(19): siRNA sense strand
ggacaaacuaagagaaacu

SEQ ID NO: 1818784 - RNA, 19 nt, Homo sapiens
  misc_RNA (1)...(19): siRNA sense strand
agagaaacuuggcgaaagg

SEQ ID NO: 1818785 - RNA, 19 nt, Homo sapiens
  misc_RNA (1)...(19): siRNA sense strand
uaaagacaaccucuggaau

SEQ ID NO: 1818786 - RNA, 19 nt, Homo sapiens
  misc_RNA (1)...(19): siRNA sense strand
aagagaaacuuggcgaaag

SEQ ID NO: 1818787 - RNA, 19 nt, Homo sapiens
  misc_RNA (1)...(19): siRNA sense strand
gcauguguauaaagacaac

SEQ ID NO: 1818788 - RNA, 19 nt, Homo sapiens
  misc_RNA (1)...(19): siRNA sense strand
ggcgaaaggcaaagaggaa

SEQ ID NO: 1818789 - RNA, 19 nt, Homo sapiens
  misc_RNA (1)...(19): siRNA sense strand
aaggacaaacuaagagaaa

SEQ ID NO: 1818790 - RNA, 19 nt, Homo sapiens
  misc_RNA (1)...(19): siRNA sense strand
ccagaugcucccagaauca

SEQ ID NO: 1818791 - RNA, 19 nt, Homo sapiens
  misc_RNA (1)...(19): siRNA sense strand
gcgaaaggcaaagaggaaa

SEQ ID NO: 1818792 - RNA, 19 nt, Homo sapiens
  misc_RNA (1)...(19): siRNA sense strand
ccaaaggacaaacuaagag

SEQ ID NO: 1818793 - RNA, 19 nt, Homo sapiens
  misc_RNA (1)...(19): siRNA sense strand
auaaagacaaccucuggaa

SEQ ID NO: 1818794 - RNA, 19 nt, Homo sapiens
  misc_RNA (1)...(19): siRNA sense strand
ggaagugaucgggaaagga

SEQ ID NO: 1818795 - RNA, 19 nt, Homo sapiens
  misc_RNA (1)...(19): siRNA sense strand
gaugcucccagaaucaaga

SEQ ID NO: 1818796 - RNA, 19 nt, Homo sapiens
  misc_RNA (1)...(19): siRNA sense strand
aggcaaagaggaaagucua

SEQ ID NO: 1818797 - RNA, 19 nt, Homo sapiens
  misc_RNA (1)...(19): siRNA sense strand
aaaggacaaacuaagagaa

SEQ ID NO: 1818798 - RNA, 19 nt, Homo sapiens
  misc_RNA (1)...(19): siRNA sense strand
gacaaacuaagagaaacuu

SEQ ID NO: 1818799 - RNA, 19 nt, Homo sapiens
  misc_RNA (1)...(19): siRNA sense strand
gggaaaggaacccauugca

SEQ ID NO: 1818800 - RNA, 19 nt, Homo sapiens
  misc_RNA (1)...(19): siRNA sense strand
cugcauguguauaaagaca

SEQ ID NO: 1818801 - RNA, 19 nt, Homo sapiens
  misc_RNA (1)...(19): siRNA sense strand
cccagaugcucccagaauc

SEQ ID NO: 1818802 - RNA, 19 nt, Homo sapiens
  misc_RNA (1)...(19): siRNA sense strand
gaacccauugcaaccaagu

SEQ ID NO: 1818803 - RNA, 19 nt, Homo sapiens
  misc_RNA (1)...(19): siRNA sense strand
caccaaaggacaaacuaag

SEQ ID NO: 1818804 - RNA, 19 nt, Homo sapiens
  misc_RNA (1)...(19): siRNA sense strand
acugaaggaugggaggaaa

SEQ ID NO: 1818805 - RNA, 19 nt, Homo sapiens
  misc_RNA (1)...(19): siRNA sense strand
aaagaggaaagucuagaca

SEQ ID NO: 1818806 - RNA, 19 nt, Homo sapiens
  misc_RNA (1)...(19): siRNA sense strand
caaagaggaaagucuagac

SEQ ID NO: 1818807 - RNA, 19 nt, Homo sapiens
  misc_RNA (1)...(19): siRNA sense strand
cgcugcauguguauaaaga

SEQ ID NO: 1818808 - RNA, 19 nt, Homo sapiens
  misc_RNA (1)...(19): siRNA sense strand
ccauugcaaccaagucgaa

SEQ ID NO: 1818809 - RNA, 19 nt, Homo sapiens
  misc_RNA (1)...(19): siRNA sense strand
uaacagagcugcaagaguu

SEQ ID NO: 1818810 - RNA, 19 nt, Homo sapiens
  misc_RNA (1)...(19): siRNA sense strand
ggacagagaugcagaggau

SEQ ID NO: 1818811 - RNA, 19 nt, Homo sapiens
  misc_RNA (1)...(19): siRNA sense strand
uaacagagcuggagauucu

SEQ ID NO: 1818812 - RNA, 19 nt, Homo sapiens
  misc_RNA (1)...(19): siRNA sense strand
uaaccaaccuggagaguuu

SEQ ID NO: 1818813 - RNA, 19 nt, Homo sapiens
  misc_RNA (1)...(19): siRNA sense strand
gaaaauaucagccaucuaa

SEQ ID NO: 1818814 - RNA, 19 nt, Homo sapiens
  misc_RNA (1)...(19): siRNA sense strand
gacauugcaucaaauagaa

SEQ ID NO: 1818815 - RNA, 19 nt, Homo sapiens
  misc_RNA (1)...(19): siRNA sense strand
gauuugagguacugaagaa

SEQ ID NO: 1818816 - RNA, 19 nt, Homo sapiens
  misc_RNA (1)...(19): siRNA sense strand
ggacauugcaucaaauaga

SEQ ID NO: 1818817 - RNA, 19 nt, Homo sapiens
  misc_RNA (1)...(19): siRNA sense strand
caacuuacaucaacuacag

SEQ ID NO: 1818818 - RNA, 19 nt, Homo sapiens
  misc_RNA (1)...(19): siRNA sense strand
cagaggauguugauuugaa

SEQ ID NO: 1818819 - RNA, 19 nt, Homo sapiens
  misc_RNA (1)...(19): siRNA sense strand
gaacgacaaucuccuugag

SEQ ID NO: 1818820 - RNA, 19 nt, Homo sapiens
  misc_RNA (1)...(19): siRNA sense strand
gcaaccggcugaccaagau

SEQ ID NO: 1818821 - RNA, 19 nt, Homo sapiens
  misc_RNA (1)...(19): siRNA sense strand
uucgagagcuggaucuuua

SEQ ID NO: 1818822 - RNA, 19 nt, Homo sapiens
  misc_RNA (1)...(19): siRNA sense strand
gaaaauaucgacaccuuaa

SEQ ID NO: 1818823 - RNA, 19 nt, Homo sapiens
  misc_RNA (1)...(19): siRNA sense strand
uagggaagauugaaggauu

SEQ ID NO: 1818824 - RNA, 19 nt, Homo sapiens
  misc_RNA (1)...(19): siRNA sense strand
ggaggaggacccagaagaa

SEQ ID NO: 1818825 - RNA, 19 nt, Homo sapiens
  misc_RNA (1)...(19): siRNA sense strand
ugaagaaagugaagacucu

SEQ ID NO: 1818826 - RNA, 19 nt, Homo sapiens
  misc_RNA (1)...(19): siRNA sense strand
ggagaacaauaacaaacuc

SEQ ID NO: 1818827 - RNA, 19 nt, Homo sapiens
  misc_RNA (1)...(19): siRNA sense strand
gagcuggagauucuagaua

SEQ ID NO: 1818828 - RNA, 19 nt, Homo sapiens
  misc_RNA (1)...(19): siRNA sense strand
ugaagaauccggcgaugaa

SEQ ID NO: 1818829 - RNA, 19 nt, Homo sapiens
  misc_RNA (1)...(19): siRNA sense strand
gauugaaggauuugaggua

SEQ ID NO: 1818830 - RNA, 19 nt, Homo sapiens
  misc_RNA (1)...(19): siRNA sense strand
ggaggacccagaagaagaa

SEQ ID NO: 1818831 - RNA, 19 nt, Homo sapiens
  misc_RNA (1)...(19): siRNA sense strand
caaguugacacgacugaaa

SEQ ID NO: 1818832 - RNA, 19 nt, Homo sapiens
  misc_RNA (1)...(19): siRNA sense strand
ccaucaaccuggacagaga

SEQ ID NO: 1818833 - RNA, 19 nt, Homo sapiens
  misc_RNA (1)...(19): siRNA sense strand
gcuggagauucuagauauu

SEQ ID NO: 1818834 - RNA, 19 nt, Homo sapiens
  misc_RNA (1)...(19): siRNA sense strand
gaagaagggaagaaacaca

SEQ ID NO: 1818835 - RNA, 19 nt, Homo sapiens
  misc_RNA (1)...(19): siRNA sense strand
acaaccagaucaagaagau

SEQ ID NO: 1818836 - RNA, 19 nt, Homo sapiens
  misc_RNA (1)...(19): siRNA sense strand
cugcaagaguucuggauga

SEQ ID NO: 1818837 - RNA, 19 nt, Homo sapiens
  misc_RNA (1)...(19): siRNA sense strand
ggucgagucugaagaaucc

SEQ ID NO: 1818838 - RNA, 19 nt, Homo sapiens
  misc_RNA (1)...(19): siRNA sense strand
uuacuaaacuucagaaccu

SEQ ID NO: 1818839 - RNA, 19 nt, Homo sapiens
  misc_RNA (1)...(19): siRNA sense strand
caaccuggagaguuuguuu

SEQ ID NO: 1818840 - RNA, 19 nt, Homo sapiens
  misc_RNA (1)...(19): siRNA sense strand
ugcagaggauguugauuug

SEQ ID NO: 1818841 - RNA, 19 nt, Homo sapiens
  misc_RNA (1)...(19): siRNA sense strand
gaagauugaaggauuugag

SEQ ID NO: 1818842 - RNA, 19 nt, Homo sapiens
  misc_RNA (1)...(19): siRNA sense strand
gaugaacgacaaucuccuu

SEQ ID NO: 1818843 - RNA, 19 nt, Homo sapiens
  misc_RNA (1)...(19): siRNA sense strand
gggaggaggacccagaaga

SEQ ID NO: 1818844 - RNA, 19 nt, Homo sapiens
  misc_RNA (1)...(19): siRNA sense strand
uguuggacauugcaucaaa

SEQ ID NO: 1818845 - RNA, 19 nt, Homo sapiens
  misc_RNA (1)...(19): siRNA sense strand
ucgagggccuggagaacaa

SEQ ID NO: 1818846 - RNA, 19 nt, Homo sapiens
  misc_RNA (1)...(19): siRNA sense strand
uggaggagcuacagagucu

SEQ ID NO: 1818847 - RNA, 19 nt, Homo sapiens
  misc_RNA (1)...(19): siRNA sense strand
agggaagauugaaggauuu

SEQ ID NO: 1818848 - RNA, 19 nt, Homo sapiens
  misc_RNA (1)...(19): siRNA sense strand
gcuaacagagcuggagauu

SEQ ID NO: 1818849 - RNA, 19 nt, Homo sapiens
  misc_RNA (1)...(19): siRNA sense strand
gagaugcagaggauguuga

SEQ ID NO: 1818850 - RNA, 19 nt, Homo sapiens
  misc_RNA (1)...(19): siRNA sense strand
acaggcgggucgagucuga

SEQ ID NO: 1818851 - RNA, 19 nt, Homo sapiens
  misc_RNA (1)...(19): siRNA sense strand
gaucgagggucugcagaac

SEQ ID NO: 1818852 - RNA, 19 nt, Homo sapiens
  misc_RNA (1)...(19): siRNA sense strand
augcagaggauguugauuu

SEQ ID NO: 1818853 - RNA, 19 nt, Homo sapiens
  misc_RNA (1)...(19): siRNA sense strand
ugaaggauuugagguacug

SEQ ID NO: 1818854 - RNA, 19 nt, Homo sapiens
  misc_RNA (1)...(19): siRNA sense strand
ggacccagaagaagaacau

SEQ ID NO: 1818855 - RNA, 19 nt, Homo sapiens
  misc_RNA (1)...(19): siRNA sense strand
gcagaggauguugauuuga

SEQ ID NO: 1818856 - RNA, 19 nt, Homo sapiens
  misc_RNA (1)...(19): siRNA sense strand
ggauuugagguacugaaga

SEQ ID NO: 1818857 - RNA, 19 nt, Homo sapiens
  misc_RNA (1)...(19): siRNA sense strand
gagaacaauaacaaacuca

SEQ ID NO: 1818858 - RNA, 19 nt, Homo sapiens
  misc_RNA (1)...(19): siRNA sense strand
gugaacagagccugaagga

SEQ ID NO: 1818859 - RNA, 19 nt, Homo sapiens
  misc_RNA (1)...(19): siRNA sense strand
cgaagggguugacaaguug

SEQ ID NO: 1818860 - RNA, 19 nt, Homo sapiens
  misc_RNA (1)...(19): siRNA sense strand
agaauccggcgaugaagaa

SEQ ID NO: 1818861 - RNA, 19 nt, Homo sapiens
  misc_RNA (1)...(19): siRNA sense strand
uaaaugcauugagaaucug

SEQ ID NO: 1818862 - RNA, 19 nt, Homo sapiens
  misc_RNA (1)...(19): siRNA sense strand
aaauaucagccaucuaaca

SEQ ID NO: 1818863 - RNA, 19 nt, Homo sapiens
  misc_RNA (1)...(19): siRNA sense strand
ucuucuuggucaacaauaa

SEQ ID NO: 1818864 - RNA, 19 nt, Homo sapiens
  misc_RNA (1)...(19): siRNA sense strand
gaggagcuacagagucuuc

SEQ ID NO: 1818865 - RNA, 19 nt, Homo sapiens
  misc_RNA (1)...(19): siRNA sense strand
gcgggucgagucugaagaa

SEQ ID NO: 1818866 - RNA, 19 nt, Homo sapiens
  misc_RNA (1)...(19): siRNA sense strand
ugcaagaguucuggaugaa

SEQ ID NO: 1818867 - RNA, 19 nt, Homo sapiens
  misc_RNA (1)...(19): siRNA sense strand
aauaacaaacucacgaugu

SEQ ID NO: 1818868 - RNA, 19 nt, Homo sapiens
  misc_RNA (1)...(19): siRNA sense strand
uggagauucuagauauuuc

SEQ ID NO: 1818869 - RNA, 19 nt, Homo sapiens
  misc_RNA (1)...(19): siRNA sense strand
caucguggccgaccucagu

SEQ ID NO: 1818870 - RNA, 19 nt, Homo sapiens
  misc_RNA (1)...(19): siRNA sense strand
agaggauguugauuugaau

SEQ ID NO: 1818871 - RNA, 19 nt, Homo sapiens
  misc_RNA (1)...(19): siRNA sense strand
aaccagaucaagaagauug

SEQ ID NO: 1818872 - RNA, 19 nt, Homo sapiens
  misc_RNA (1)...(19): siRNA sense strand
guuggacauugcaucaaau

SEQ ID NO: 1818873 - RNA, 19 nt, Homo sapiens
  misc_RNA (1)...(19): siRNA sense strand
ugcgggagcuguaccuuag

SEQ ID NO: 1818874 - RNA, 19 nt, Homo sapiens
  misc_RNA (1)...(19): siRNA sense strand
ugacaguccucaguaugca

SEQ ID NO: 1818875 - RNA, 19 nt, Homo sapiens
  misc_RNA (1)...(19): siRNA sense strand
gacaaguugacacgacuga

SEQ ID NO: 1818876 - RNA, 19 nt, Homo sapiens
  misc_RNA (1)...(19): siRNA sense strand
gagguacugaagaaaguga

SEQ ID NO: 1818877 - RNA, 19 nt, Homo sapiens
  misc_RNA (1)...(19): siRNA sense strand
guacugaagaaagugaaga

SEQ ID NO: 1818878 - RNA, 19 nt, Homo sapiens
  misc_RNA (1)...(19): siRNA sense strand
ugaacgacaaucuccuuga

SEQ ID NO: 1818879 - RNA, 19 nt, Homo sapiens
  misc_RNA (1)...(19): siRNA sense strand
cgaugaagaagggaagaaa

SEQ ID NO: 1818880 - RNA, 19 nt, Homo sapiens
  misc_RNA (1)...(19): siRNA sense strand
auugagaacuuaagcaacu

SEQ ID NO: 1818881 - RNA, 19 nt, Homo sapiens
  misc_RNA (1)...(19): siRNA sense strand
agcuggagauucuagauau

SEQ ID NO: 1818882 - RNA, 19 nt, Homo sapiens
  misc_RNA (1)...(19): siRNA sense strand
gcaacagucgcaggagaug

SEQ ID NO: 1818883 - RNA, 19 nt, Homo sapiens
  misc_RNA (1)...(19): siRNA sense strand
gacaaccagaucaagaaga

SEQ ID NO: 1818884 - RNA, 19 nt, Homo sapiens
  misc_RNA (1)...(19): siRNA sense strand
ucgaagggguugacaaguu

SEQ ID NO: 1818885 - RNA, 19 nt, Homo sapiens
  misc_RNA (1)...(19): siRNA sense strand
gaagaauccggcgaugaag

SEQ ID NO: 1818886 - RNA, 19 nt, Homo sapiens
  misc_RNA (1)...(19): siRNA sense strand
aaacucuucuuggucaaca

SEQ ID NO: 1818887 - RNA, 19 nt, Homo sapiens
  misc_RNA (1)...(19): siRNA sense strand
aggagaugauggagguuga

SEQ ID NO: 1818888 - RNA, 19 nt, Homo sapiens
  misc_RNA (1)...(19): siRNA sense strand
gcaacuuacaucaacuaca

SEQ ID NO: 1818889 - RNA, 19 nt, Homo sapiens
  misc_RNA (1)...(19): siRNA sense strand
aagcaacuuacaucaacua

SEQ ID NO: 1818890 - RNA, 19 nt, Homo sapiens
  misc_RNA (1)...(19): siRNA sense strand
gaggaggacccagaagaag

SEQ ID NO: 1818891 - RNA, 19 nt, Homo sapiens
  misc_RNA (1)...(19): siRNA sense strand
cuggagauucuagauauuu

SEQ ID NO: 1818892 - RNA, 19 nt, Homo sapiens
  misc_RNA (1)...(19): siRNA sense strand
gagaaucuggaggcgcuaa

SEQ ID NO: 1818893 - RNA, 19 nt, Homo sapiens
  misc_RNA (1)...(19): siRNA sense strand
caacagucgcaggagauga

SEQ ID NO: 1818894 - RNA, 19 nt, Homo sapiens
  misc_RNA (1)...(19): siRNA sense strand
gcuguaccuuagccacaau

SEQ ID NO: 1818895 - RNA, 19 nt, Homo sapiens
  misc_RNA (1)...(19): siRNA sense strand
uaucgcauagggaagauug

SEQ ID NO: 1818896 - RNA, 19 nt, Homo sapiens
  misc_RNA (1)...(19): siRNA sense strand
ugagcugccuguggacaug

SEQ ID NO: 1818897 - RNA, 19 nt, Homo sapiens
  misc_RNA (1)...(19): siRNA sense strand
uugagguacugaagaaagu

SEQ ID NO: 1818898 - RNA, 19 nt, Homo sapiens
  misc_RNA (1)...(19): siRNA sense strand
acagagaugcagaggaugu

SEQ ID NO: 1818899 - RNA, 19 nt, Homo sapiens
  misc_RNA (1)...(19): siRNA sense strand
ggaagauugaaggauuuga

SEQ ID NO: 1818900 - RNA, 19 nt, Homo sapiens
  misc_RNA (1)...(19): siRNA sense strand
gggaagauugaaggauuug

SEQ ID NO: 1818901 - RNA, 19 nt, Homo sapiens
  misc_RNA (1)...(19): siRNA sense strand
gagggccuggagaacaaua

SEQ ID NO: 1818902 - RNA, 19 nt, Homo sapiens
  misc_RNA (1)...(19): siRNA sense strand
cugcgggagcuguaccuua

SEQ ID NO: 1818903 - RNA, 19 nt, Homo sapiens
  misc_RNA (1)...(19): siRNA sense strand
gaugaagaagggaagaaac

SEQ ID NO: 1818904 - RNA, 19 nt, Homo sapiens
  misc_RNA (1)...(19): siRNA sense strand
ggucaacaauaaaaucagu

SEQ ID NO: 1818905 - RNA, 19 nt, Homo sapiens
  misc_RNA (1)...(19): siRNA sense strand
uuaaucugcugagaaacau

SEQ ID NO: 1818906 - RNA, 19 nt, Homo sapiens
  misc_RNA (1)...(19): siRNA sense strand
gcagagaccucaccuuuga

SEQ ID NO: 1818907 - RNA, 19 nt, Homo sapiens
  misc_RNA (1)...(19): siRNA sense strand
gcaaacaucugauaacaug

SEQ ID NO: 1818908 - RNA, 19 nt, Homo sapiens
  misc_RNA (1)...(19): siRNA sense strand
ucacagaccucaugacuga

SEQ ID NO: 1818909 - RNA, 19 nt, Homo sapiens
  misc_RNA (1)...(19): siRNA sense strand
acaaguacaucaacaagua

SEQ ID NO: 1818910 - RNA, 19 nt, Homo sapiens
  misc_RNA (1)...(19): siRNA sense strand
gagaggagccgacuacgua

SEQ ID NO: 1818911 - RNA, 19 nt, Homo sapiens
  misc_RNA (1)...(19): siRNA sense strand
ugaacacacugcagcauua

SEQ ID NO: 1818912 - RNA, 19 nt, Homo sapiens
  misc_RNA (1)...(19): siRNA sense strand
gagcagagaccucaccuuu

SEQ ID NO: 1818913 - RNA, 19 nt, Homo sapiens
  misc_RNA (1)...(19): siRNA sense strand
aaacuucccucucuuucua

SEQ ID NO: 1818914 - RNA, 19 nt, Homo sapiens
  misc_RNA (1)...(19): siRNA sense strand
gaccuugaaugcacuauug

SEQ ID NO: 1818915 - RNA, 19 nt, Homo sapiens
  misc_RNA (1)...(19): siRNA sense strand
gaacaacugcggugugaga

SEQ ID NO: 1818916 - RNA, 19 nt, Homo sapiens
  misc_RNA (1)...(19): siRNA sense strand
guucagggcuccacguuga

SEQ ID NO: 1818917 - RNA, 19 nt, Homo sapiens
  misc_RNA (1)...(19): siRNA sense strand
ugcaugaacucuacaagua

SEQ ID NO: 1818918 - RNA, 19 nt, Homo sapiens
  misc_RNA (1)...(19): siRNA sense strand
augggaagcuugaguauuu

SEQ ID NO: 1818919 - RNA, 19 nt, Homo sapiens
  misc_RNA (1)...(19): siRNA sense strand
ggaccgagguggccuacau

SEQ ID NO: 1818920 - RNA, 19 nt, Homo sapiens
  misc_RNA (1)...(19): siRNA sense strand
ccacaccuuucuccuauga

SEQ ID NO: 1818921 - RNA, 19 nt, Homo sapiens
  misc_RNA (1)...(19): siRNA sense strand
cagaacaacugcgguguga

SEQ ID NO: 1818922 - RNA, 19 nt, Homo sapiens
  misc_RNA (1)...(19): siRNA sense strand
ucaacaaacuucuguaugc

SEQ ID NO: 1818923 - RNA, 19 nt, Homo sapiens
  misc_RNA (1)...(19): siRNA sense strand
gcaagaaggaauucacaga

SEQ ID NO: 1818924 - RNA, 19 nt, Homo sapiens
  misc_RNA (1)...(19): siRNA sense strand
gaaccuggaccuugcaaug

SEQ ID NO: 1818925 - RNA, 19 nt, Homo sapiens
  misc_RNA (1)...(19): siRNA sense strand
ggaauucacagaccucaug

SEQ ID NO: 1818926 - RNA, 19 nt, Homo sapiens
  misc_RNA (1)...(19): siRNA sense strand
gcaguagccagcaauuuga

SEQ ID NO: 1818927 - RNA, 19 nt, Homo sapiens
  misc_RNA (1)...(19): siRNA sense strand
gaucaacaaacuucuguau

SEQ ID NO: 1818928 - RNA, 19 nt, Homo sapiens
  misc_RNA (1)...(19): siRNA sense strand
aguaugaugucaauucuga

SEQ ID NO: 1818929 - RNA, 19 nt, Homo sapiens
  misc_RNA (1)...(19): siRNA sense strand
caaguacuaugaccagauc

SEQ ID NO: 1818930 - RNA, 19 nt, Homo sapiens
  misc_RNA (1)...(19): siRNA sense strand
gaacuguccuggaacuacu

SEQ ID NO: 1818931 - RNA, 19 nt, Homo sapiens
  misc_RNA (1)...(19): siRNA sense strand
ccaaauacaccuugaacga

SEQ ID NO: 1818932 - RNA, 19 nt, Homo sapiens
  misc_RNA (1)...(19): siRNA sense strand
ugacaggcaaggccaaaua

SEQ ID NO: 1818933 - RNA, 19 nt, Homo sapiens
  misc_RNA (1)...(19): siRNA sense strand
uggagaagcugcucaccaa

SEQ ID NO: 1818934 - RNA, 19 nt, Homo sapiens
  misc_RNA (1)...(19): siRNA sense strand
gcucagauuuggcgcuguu

SEQ ID NO: 1818935 - RNA, 19 nt, Homo sapiens
  misc_RNA (1)...(19): siRNA sense strand
gaggagccgugccauguca

SEQ ID NO: 1818936 - RNA, 19 nt, Homo sapiens
  misc_RNA (1)...(19): siRNA sense strand
ucagagaggauguggagua

SEQ ID NO: 1818937 - RNA, 19 nt, Homo sapiens
  misc_RNA (1)...(19): siRNA sense strand
caaccuggucuuugacuuu

SEQ ID NO: 1818938 - RNA, 19 nt, Homo sapiens
  misc_RNA (1)...(19): siRNA sense strand
ggaggugguggcuaugaua

SEQ ID NO: 1818939 - RNA, 19 nt, Homo sapiens
  misc_RNA (1)...(19): siRNA sense strand
uggcugaacuguccuggaa

SEQ ID NO: 1818940 - RNA, 19 nt, Homo sapiens
  misc_RNA (1)...(19): siRNA sense strand
caacaaacuucuguaugca

SEQ ID NO: 1818941 - RNA, 19 nt, Homo sapiens
  misc_RNA (1)...(19): siRNA sense strand
gugcaaacaucugauaaca

SEQ ID NO: 1818942 - RNA, 19 nt, Homo sapiens
  misc_RNA (1)...(19): siRNA sense strand
gcuggaagccacaccaauu

SEQ ID NO: 1818943 - RNA, 19 nt, Homo sapiens
  misc_RNA (1)...(19): siRNA sense strand
gaaagguacuaugcagaca

SEQ ID NO: 1818944 - RNA, 19 nt, Homo sapiens
  misc_RNA (1)...(19): siRNA sense strand
gcggacaguucaaguauac

SEQ ID NO: 1818945 - RNA, 19 nt, Homo sapiens
  misc_RNA (1)...(19): siRNA sense strand
cuauguaucucgagugugu

SEQ ID NO: 1818946 - RNA, 19 nt, Homo sapiens
  misc_RNA (1)...(19): siRNA sense strand
accaacagcuugccucuga

SEQ ID NO: 1818947 - RNA, 19 nt, Homo sapiens
  misc_RNA (1)...(19): siRNA sense strand
guucguggaugaccuguuc

SEQ ID NO: 1818948 - RNA, 19 nt, Homo sapiens
  misc_RNA (1)...(19): siRNA sense strand
caucaucauuguccucaug

SEQ ID NO: 1818949 - RNA, 19 nt, Homo sapiens
  misc_RNA (1)...(19): siRNA sense strand
agaccagccuugucacuug

SEQ ID NO: 1818950 - RNA, 19 nt, Homo sapiens
  misc_RNA (1)...(19): siRNA sense strand
caagcugccuucuccuaug

SEQ ID NO: 1818951 - RNA, 19 nt, Homo sapiens
  misc_RNA (1)...(19): siRNA sense strand
gcuaucggcuccagcagau

SEQ ID NO: 1818952 - RNA, 19 nt, Homo sapiens
  misc_RNA (1)...(19): siRNA sense strand
gcacccgucucacccugaa

SEQ ID NO: 1818953 - RNA, 19 nt, Homo sapiens
  misc_RNA (1)...(19): siRNA sense strand
ggcagguucuggcuccaua

SEQ ID NO: 1818954 - RNA, 19 nt, Homo sapiens
  misc_RNA (1)...(19): siRNA sense strand
caucagagcccgcuugucu

SEQ ID NO: 1818955 - RNA, 19 nt, Homo sapiens
  misc_RNA (1)...(19): siRNA sense strand
uggacacccuggaugcuua

SEQ ID NO: 1818956 - RNA, 19 nt, Homo sapiens
  misc_RNA (1)...(19): siRNA sense strand
gcacccgccuucuccacuu

SEQ ID NO: 1818957 - RNA, 19 nt, Homo sapiens
  misc_RNA (1)...(19): siRNA sense strand
cugagguucuggaucaaua

SEQ ID NO: 1818958 - RNA, 19 nt, Homo sapiens
  misc_RNA (1)...(19): siRNA sense strand
ugaagguccuagacuguga

SEQ ID NO: 1818959 - RNA, 19 nt, Homo sapiens
  misc_RNA (1)...(19): siRNA sense strand
gcacuacuacuccuaugug

SEQ ID NO: 1818960 - RNA, 19 nt, Homo sapiens
  misc_RNA (1)...(19): siRNA sense strand
caaggucacagaucuauag

SEQ ID NO: 1818961 - RNA, 19 nt, Homo sapiens
  misc_RNA (1)...(19): siRNA sense strand
uggccuacaucgaguauga

SEQ ID NO: 1818962 - RNA, 19 nt, Homo sapiens
  misc_RNA (1)...(19): siRNA sense strand
ccagagcaguggcuaugga

SEQ ID NO: 1818963 - RNA, 19 nt, Homo sapiens
  misc_RNA (1)...(19): siRNA sense strand
guacuaugcagacaucaga

SEQ ID NO: 1818964 - RNA, 19 nt, Homo sapiens
  misc_RNA (1)...(19): siRNA sense strand
cagagacugugguggagaa

SEQ ID NO: 1818965 - RNA, 19 nt, Homo sapiens
  misc_RNA (1)...(19): siRNA sense strand
gagcguccacguuguguga

SEQ ID NO: 1818966 - RNA, 19 nt, Homo sapiens
  misc_RNA (1)...(19): siRNA sense strand
gagcaccuguaugucauga

SEQ ID NO: 1818967 - RNA, 19 nt, Homo sapiens
  misc_RNA (1)...(19): siRNA sense strand
acgaggaugucacuucuga

SEQ ID NO: 1818968 - RNA, 19 nt, Homo sapiens
  misc_RNA (1)...(19): siRNA sense strand
ggagagccagcgcaccuuu

SEQ ID NO: 1818969 - RNA, 19 nt, Homo sapiens
  misc_RNA (1)...(19): siRNA sense strand
ucuuugaccugcuggauga

SEQ ID NO: 1818970 - RNA, 19 nt, Homo sapiens
  misc_RNA (1)...(19): siRNA sense strand
cccaguauguggccaagaa

SEQ ID NO: 1818971 - RNA, 19 nt, Homo sapiens
  misc_RNA (1)...(19): siRNA sense strand
ucauauuccugccacuuug

SEQ ID NO: 1818972 - RNA, 19 nt, Homo sapiens
  misc_RNA (1)...(19): siRNA sense strand
uugacaaccuggucuuuga

SEQ ID NO: 1818973 - RNA, 19 nt, Homo sapiens
  misc_RNA (1)...(19): siRNA sense strand
ggguguaacuggugugucu

SEQ ID NO: 1818974 - RNA, 19 nt, Homo sapiens
  misc_RNA (1)...(19): siRNA sense strand
gaggugcucuuugcagcuu

SEQ ID NO: 1818975 - RNA, 19 nt, Homo sapiens
  misc_RNA (1)...(19): siRNA sense strand
ccaaggccaucccugagau

SEQ ID NO: 1818976 - RNA, 19 nt, Homo sapiens
  misc_RNA (1)...(19): siRNA sense strand
ggguggaauuuauccuuga

SEQ ID NO: 1818977 - RNA, 19 nt, Homo sapiens
  misc_RNA (1)...(19): siRNA sense strand
gagguggaccggcuugcua

SEQ ID NO: 1818978 - RNA, 19 nt, Homo sapiens
  misc_RNA (1)...(19): siRNA sense strand
aagaggacguggugucuca

SEQ ID NO: 1818979 - RNA, 19 nt, Homo sapiens
  misc_RNA (1)...(19): siRNA sense strand
aaacaaggucacagaucua

SEQ ID NO: 1818980 - RNA, 19 nt, Homo sapiens
  misc_RNA (1)...(19): siRNA sense strand
ugcagaaguucguggauga

SEQ ID NO: 1818981 - RNA, 19 nt, Homo sapiens
  misc_RNA (1)...(19): siRNA sense strand
cgaguaugaugucaauucu

SEQ ID NO: 1818982 - RNA, 19 nt, Homo sapiens
  misc_RNA (1)...(19): siRNA sense strand
aagcugccuucuccuauga

SEQ ID NO: 1818983 - RNA, 19 nt, Homo sapiens
  misc_RNA (1)...(19): siRNA sense strand
caugaacucuacaaguaca

SEQ ID NO: 1818984 - RNA, 19 nt, Homo sapiens
  misc_RNA (1)...(19): siRNA sense strand
gguucuggaucaauauaau

SEQ ID NO: 1818985 - RNA, 19 nt, Homo sapiens
  misc_RNA (1)...(19): siRNA sense strand
gagguucuggaucaauaua

SEQ ID NO: 1818986 - RNA, 19 nt, Homo sapiens
  misc_RNA (1)...(19): siRNA sense strand
caccugugaugccugauga

SEQ ID NO: 1818987 - RNA, 19 nt, Homo sapiens
  misc_RNA (1)...(19): siRNA sense strand
cagggucgccucuccauga

SEQ ID NO: 1818988 - RNA, 19 nt, Homo sapiens
  misc_RNA (1)...(19): siRNA sense strand
gguucuggcuccauaucuu

SEQ ID NO: 1818989 - RNA, 19 nt, Homo sapiens
  misc_RNA (1)...(19): siRNA sense strand
guacagacgccaagaaucc

SEQ ID NO: 1818990 - RNA, 19 nt, Homo sapiens
  misc_RNA (1)...(19): siRNA sense strand
gauacccagugccauguca

SEQ ID NO: 1818991 - RNA, 19 nt, Homo sapiens
  misc_RNA (1)...(19): siRNA sense strand
uggacuggcucacgagaga

SEQ ID NO: 1818992 - RNA, 19 nt, Homo sapiens
  misc_RNA (1)...(19): siRNA sense strand
ggaggcgccugaacacacu

SEQ ID NO: 1818993 - RNA, 19 nt, Homo sapiens
  misc_RNA (1)...(19): siRNA sense strand
caugaguccugccaacauc

SEQ ID NO: 1818994 - RNA, 19 nt, Homo sapiens
  misc_RNA (1)...(19): siRNA sense strand
gaacucuacaaguacauca

SEQ ID NO: 1818995 - RNA, 19 nt, Homo sapiens
  misc_RNA (1)...(19): siRNA sense strand
gacgugcaaacaucugaua

SEQ ID NO: 1818996 - RNA, 19 nt, Homo sapiens
  misc_RNA (1)...(19): siRNA sense strand
ccaucugucuguauaccuu

SEQ ID NO: 1818997 - RNA, 19 nt, Homo sapiens
  misc_RNA (1)...(19): siRNA sense strand
ucucuaaccugcucaacag

SEQ ID NO: 1818998 - RNA, 19 nt, Homo sapiens
  misc_RNA (1)...(19): siRNA sense strand
gaauucacagaccucauga

SEQ ID NO: 1818999 - RNA, 19 nt, Homo sapiens
  misc_RNA (1)...(19): siRNA sense strand
auaagaagguucagaucca

SEQ ID NO: 1819000 - RNA, 19 nt, Homo sapiens
  misc_RNA (1)...(19): siRNA sense strand
aggaggaggugguggcuau

SEQ ID NO: 1819001 - RNA, 19 nt, Homo sapiens
  misc_RNA (1)...(19): siRNA sense strand
cuuggacccuccugcagua

SEQ ID NO: 1819002 - RNA, 19 nt, Homo sapiens
  misc_RNA (1)...(19): siRNA sense strand
gagcagcagucagaacaac

SEQ ID NO: 1819003 - RNA, 19 nt, Homo sapiens
  misc_RNA (1)...(19): siRNA sense strand
gcguggagcucagauuugg

SEQ ID NO: 1819004 - RNA, 19 nt, Homo sapiens
  misc_RNA (1)...(19): siRNA sense strand
gcuggaggauguagaugag

SEQ ID NO: 1819005 - RNA, 19 nt, Homo sapiens
  misc_RNA (1)...(19): siRNA sense strand
aaacaucugauaacaugga

SEQ ID NO: 1819006 - RNA, 19 nt, Homo sapiens
  misc_RNA (1)...(19): siRNA sense strand
ggaggaagcugacaacaau

SEQ ID NO: 1819007 - RNA, 19 nt, Homo sapiens
  misc_RNA (1)...(19): siRNA sense strand
agaaagaacucgagcaauu

SEQ ID NO: 1819008 - RNA, 19 nt, Homo sapiens
  misc_RNA (1)...(19): siRNA sense strand
gaggcaaccuggagaauuu

SEQ ID NO: 1819009 - RNA, 19 nt, Homo sapiens
  misc_RNA (1)...(19): siRNA sense strand
caucaaagcucugcagaaa

SEQ ID NO: 1819010 - RNA, 19 nt, Homo sapiens
  misc_RNA (1)...(19): siRNA sense strand
ucaaagcucugcagaaaga

SEQ ID NO: 1819011 - RNA, 19 nt, Homo sapiens
  misc_RNA (1)...(19): siRNA sense strand
gaaagaacucgagcaauuu

SEQ ID NO: 1819012 - RNA, 19 nt, Homo sapiens
  misc_RNA (1)...(19): siRNA sense strand
uuacaagucuucugccuuu

SEQ ID NO: 1819013 - RNA, 19 nt, Homo sapiens
  misc_RNA (1)...(19): siRNA sense strand
uaacugguguguuuauguu

SEQ ID NO: 1819014 - RNA, 19 nt, Homo sapiens
  misc_RNA (1)...(19): siRNA sense strand
acacguagguucuugaauc

SEQ ID NO: 1819015 - RNA, 19 nt, Homo sapiens
  misc_RNA (1)...(19): siRNA sense strand
auugauaacugguguguuu

SEQ ID NO: 1819016 - RNA, 19 nt, Homo sapiens
  misc_RNA (1)...(19): siRNA sense strand
gcagaaagaacucgagcaa

SEQ ID NO: 1819017 - RNA, 19 nt, Homo sapiens
  misc_RNA (1)...(19): siRNA sense strand
ggagauaugcaaagcagaa

SEQ ID NO: 1819018 - RNA, 19 nt, Homo sapiens
  misc_RNA (1)...(19): siRNA sense strand
gcacuucuacagacuauuc

SEQ ID NO: 1819019 - RNA, 19 nt, Homo sapiens
  misc_RNA (1)...(19): siRNA sense strand
ucacuucacugcacuguac

SEQ ID NO: 1819020 - RNA, 19 nt, Homo sapiens
  misc_RNA (1)...(19): siRNA sense strand
ggaaaggggagauugauaa

SEQ ID NO: 1819021 - RNA, 19 nt, Homo sapiens
  misc_RNA (1)...(19): siRNA sense strand
gaagcugacaacaaugaaa

SEQ ID NO: 1819022 - RNA, 19 nt, Homo sapiens
  misc_RNA (1)...(19): siRNA sense strand
ccaagcuccugaagcagaa

SEQ ID NO: 1819023 - RNA, 19 nt, Homo sapiens
  misc_RNA (1)...(19): siRNA sense strand
agagaaagcgaaccaguau

SEQ ID NO: 1819024 - RNA, 19 nt, Homo sapiens
  misc_RNA (1)...(19): siRNA sense strand
gauauacacaggccgaugu

SEQ ID NO: 1819025 - RNA, 19 nt, Homo sapiens
  misc_RNA (1)...(19): siRNA sense strand
gcucucccuugcauucaaa

SEQ ID NO: 1819026 - RNA, 19 nt, Homo sapiens
  misc_RNA (1)...(19): siRNA sense strand
gaggaucacccugggauau

SEQ ID NO: 1819027 - RNA, 19 nt, Homo sapiens
  misc_RNA (1)...(19): siRNA sense strand
guucuugaaucccgaaugg

SEQ ID NO: 1819028 - RNA, 19 nt, Homo sapiens
  misc_RNA (1)...(19): siRNA sense strand
aagagaaagcgaaccagua

SEQ ID NO: 1819029 - RNA, 19 nt, Homo sapiens
  misc_RNA (1)...(19): siRNA sense strand
aaagaacucgagcaauuug

SEQ ID NO: 1819030 - RNA, 19 nt, Homo sapiens
  misc_RNA (1)...(19): siRNA sense strand
cagcgacuaugcacaacga

SEQ ID NO: 1819031 - RNA, 19 nt, Homo sapiens
  misc_RNA (1)...(19): siRNA sense strand
gcuucaagaacauguguaa

SEQ ID NO: 1819032 - RNA, 19 nt, Homo sapiens
  misc_RNA (1)...(19): siRNA sense strand
ccacaucgcccagcagcuu

SEQ ID NO: 1819033 - RNA, 19 nt, Homo sapiens
  misc_RNA (1)...(19): siRNA sense strand
caagucuucugccuuuuaa

SEQ ID NO: 1819034 - RNA, 19 nt, Homo sapiens
  misc_RNA (1)...(19): siRNA sense strand
guguuuauguucuuacaag

SEQ ID NO: 1819035 - RNA, 19 nt, Homo sapiens
  misc_RNA (1)...(19): siRNA sense strand
guccgagugugguucugua

SEQ ID NO: 1819036 - RNA, 19 nt, Homo sapiens
  misc_RNA (1)...(19): siRNA sense strand
ggaucacccugggauauac

SEQ ID NO: 1819037 - RNA, 19 nt, Homo sapiens
  misc_RNA (1)...(19): siRNA sense strand
ucaagaacauguguaagcu

SEQ ID NO: 1819038 - RNA, 19 nt, Homo sapiens
  misc_RNA (1)...(19): siRNA sense strand
ucccuugcauucaaacuga

SEQ ID NO: 1819039 - RNA, 19 nt, Homo sapiens
  misc_RNA (1)...(19): siRNA sense strand
ggaagcugacaacaaugaa

SEQ ID NO: 1819040 - RNA, 19 nt, Homo sapiens
  misc_RNA (1)...(19): siRNA sense strand
ggcccuugcugcagaagug

SEQ ID NO: 1819041 - RNA, 19 nt, Homo sapiens
  misc_RNA (1)...(19): siRNA sense strand
uaugggagcccucacuuca

SEQ ID NO: 1819042 - RNA, 19 nt, Homo sapiens
  misc_RNA (1)...(19): siRNA sense strand
gagauaugcaaagcagaaa

SEQ ID NO: 1819043 - RNA, 19 nt, Homo sapiens
  misc_RNA (1)...(19): siRNA sense strand
cgaaagagaaagcgaacca

SEQ ID NO: 1819044 - RNA, 19 nt, Homo sapiens
  misc_RNA (1)...(19): siRNA sense strand
uugccaagcuccugaagca

SEQ ID NO: 1819045 - RNA, 19 nt, Homo sapiens
  misc_RNA (1)...(19): siRNA sense strand
gaucaagcagcgacuaugc

SEQ ID NO: 1819046 - RNA, 19 nt, Homo sapiens
  misc_RNA (1)...(19): siRNA sense strand
caaccuggagaauuuguuc

SEQ ID NO: 1819047 - RNA, 19 nt, Homo sapiens
  misc_RNA (1)...(19): siRNA sense strand
ggccacacguagguucuug

SEQ ID NO: 1819048 - RNA, 19 nt, Homo sapiens
  misc_RNA (1)...(19): siRNA sense strand
ccacacguagguucuugaa

SEQ ID NO: 1819049 - RNA, 19 nt, Homo sapiens
  misc_RNA (1)...(19): siRNA sense strand
cagaagggcaagcgaucaa

SEQ ID NO: 1819050 - RNA, 19 nt, Homo sapiens
  misc_RNA (1)...(19): siRNA sense strand
gcagaaguggguggaggaa

SEQ ID NO: 1819051 - RNA, 19 nt, Homo sapiens
  misc_RNA (1)...(19): siRNA sense strand
gcugcugggucuccuuucu

SEQ ID NO: 1819052 - RNA, 19 nt, Homo sapiens
  misc_RNA (1)...(19): siRNA sense strand
aagcagcgacuaugcacaa

SEQ ID NO: 1819053 - RNA, 19 nt, Homo sapiens
  misc_RNA (1)...(19): siRNA sense strand
gaagguauucagccaaacg

SEQ ID NO: 1819054 - RNA, 19 nt, Homo sapiens
  misc_RNA (1)...(19): siRNA sense strand
gcgaucaagcagcgacuau

SEQ ID NO: 1819055 - RNA, 19 nt, Homo sapiens
  misc_RNA (1)...(19): siRNA sense strand
uggaggaagcugacaacaa

SEQ ID NO: 1819056 - RNA, 19 nt, Homo sapiens
  misc_RNA (1)...(19): siRNA sense strand
gcuaugggagcccucacuu

SEQ ID NO: 1819057 - RNA, 19 nt, Homo sapiens
  misc_RNA (1)...(19): siRNA sense strand
gcaaccuggagaauuuguu

SEQ ID NO: 1819058 - RNA, 19 nt, Homo sapiens
  misc_RNA (1)...(19): siRNA sense strand
aggaagcugacaacaauga

SEQ ID NO: 1819059 - RNA, 19 nt, Homo sapiens
  misc_RNA (1)...(19): siRNA sense strand
gagaggcaaccuggagaau

SEQ ID NO: 1819060 - RNA, 19 nt, Homo sapiens
  misc_RNA (1)...(19): siRNA sense strand
guacuccucggucccuuuc

SEQ ID NO: 1819061 - RNA, 19 nt, Homo sapiens
  misc_RNA (1)...(19): siRNA sense strand
acgaccaucugccgcuuug

SEQ ID NO: 1819062 - RNA, 19 nt, Homo sapiens
  misc_RNA (1)...(19): siRNA sense strand
gaaagggaauccuccuguu

SEQ ID NO: 1819063 - RNA, 19 nt, Homo sapiens
  misc_RNA (1)...(19): siRNA sense strand
gcaauccucuaccugauca

SEQ ID NO: 1819064 - RNA, 19 nt, Homo sapiens
  misc_RNA (1)...(19): siRNA sense strand
gaugauccuugcugcuauu

SEQ ID NO: 1819065 - RNA, 19 nt, Homo sapiens
  misc_RNA (1)...(19): siRNA sense strand
gagaugauccuugcugcua

SEQ ID NO: 1819066 - RNA, 19 nt, Homo sapiens
  misc_RNA (1)...(19): siRNA sense strand
gagaggaaaccacuccaaa

SEQ ID NO: 1819067 - RNA, 19 nt, Homo sapiens
  misc_RNA (1)...(19): siRNA sense strand
ccuguuugcugagauuaua

SEQ ID NO: 1819068 - RNA, 19 nt, Homo sapiens
  misc_RNA (1)...(19): siRNA sense strand
caagauaccauucaucaac

SEQ ID NO: 1819069 - RNA, 19 nt, Homo sapiens
  misc_RNA (1)...(19): siRNA sense strand
cugaucaccuccauuguug

SEQ ID NO: 1819070 - RNA, 19 nt, Homo sapiens
  misc_RNA (1)...(19): siRNA sense strand
aaagggaauccuccuguuu

SEQ ID NO: 1819071 - RNA, 19 nt, Homo sapiens
  misc_RNA (1)...(19): siRNA sense strand
gcccuggagugauuucuuc

SEQ ID NO: 1819072 - RNA, 19 nt, Homo sapiens
  misc_RNA (1)...(19): siRNA sense strand
ggaaaccacuccaaaaucg

SEQ ID NO: 1819073 - RNA, 19 nt, Homo sapiens
  misc_RNA (1)...(19): siRNA sense strand
guucggcagccaagacaua

SEQ ID NO: 1819074 - RNA, 19 nt, Homo sapiens
  misc_RNA (1)...(19): siRNA sense strand
gcacaccaagauaccauuc

SEQ ID NO: 1819075 - RNA, 19 nt, Homo sapiens
  misc_RNA (1)...(19): siRNA sense strand
gauccuugcugcuauuuuc

SEQ ID NO: 1819076 - RNA, 19 nt, Homo sapiens
  misc_RNA (1)...(19): siRNA sense strand
acaccaagauaccauucau

SEQ ID NO: 1819077 - RNA, 19 nt, Homo sapiens
  misc_RNA (1)...(19): siRNA sense strand
ccauuguuguccuuguuga

SEQ ID NO: 1819078 - RNA, 19 nt, Homo sapiens
  misc_RNA (1)...(19): siRNA sense strand
uaccugaucaccuccauug

SEQ ID NO: 1819079 - RNA, 19 nt, Homo sapiens
  misc_RNA (1)...(19): siRNA sense strand
gaggaaaccacuccaaaau

SEQ ID NO: 1819080 - RNA, 19 nt, Homo sapiens
  misc_RNA (1)...(19): siRNA sense strand
ccugaucaccuccauuguu

SEQ ID NO: 1819081 - RNA, 19 nt, Homo sapiens
  misc_RNA (1)...(19): siRNA sense strand
ucaacuggcccuggaguga

SEQ ID NO: 1819082 - RNA, 19 nt, Homo sapiens
  misc_RNA (1)...(19): siRNA sense strand
ugaccugcacaccaagaua

SEQ ID NO: 1819083 - RNA, 19 nt, Homo sapiens
  misc_RNA (1)...(19): siRNA sense strand
gaucaccuccauuguuguc

SEQ ID NO: 1819084 - RNA, 19 nt, Homo sapiens
  misc_RNA (1)...(19): siRNA sense strand
aagggaauccuccuguuug

SEQ ID NO: 1819085 - RNA, 19 nt, Homo sapiens
  misc_RNA (1)...(19): siRNA sense strand
ccaagauaccauucaucaa

SEQ ID NO: 1819086 - RNA, 19 nt, Homo sapiens
  misc_RNA (1)...(19): siRNA sense strand
ccuccuguuugcugagauu

SEQ ID NO: 1819087 - RNA, 19 nt, Homo sapiens
  misc_RNA (1)...(19): siRNA sense strand
cggcaauccucuaccugau

SEQ ID NO: 1819088 - RNA, 19 nt, Homo sapiens
  misc_RNA (1)...(19): siRNA sense strand
agaugauccuugcugcuau

SEQ ID NO: 1819089 - RNA, 19 nt, Homo sapiens
  misc_RNA (1)...(19): siRNA sense strand
aagauaccauucaucaacu

SEQ ID NO: 1819090 - RNA, 19 nt, Homo sapiens
  misc_RNA (1)...(19): siRNA sense strand
gaccugcacaccaagauac

SEQ ID NO: 1819091 - RNA, 19 nt, Homo sapiens
  misc_RNA (1)...(19): siRNA sense strand
ugucggugauugagaugau

SEQ ID NO: 1819092 - RNA, 19 nt, Homo sapiens
  misc_RNA (1)...(19): siRNA sense strand
ggaaaucagugguuuguua

SEQ ID NO: 1819093 - RNA, 19 nt, Homo sapiens
  misc_RNA (1)...(19): siRNA sense strand
gcagaaccacaaauuauua

SEQ ID NO: 1819094 - RNA, 19 nt, Homo sapiens
  misc_RNA (1)...(19): siRNA sense strand
ggacuuggcuaguggcaaa

SEQ ID NO: 1819095 - RNA, 19 nt, Homo sapiens
  misc_RNA (1)...(19): siRNA sense strand
gauggaaguuucauucaaa

SEQ ID NO: 1819096 - RNA, 19 nt, Homo sapiens
  misc_RNA (1)...(19): siRNA sense strand
gcccauaucuguucucuug

SEQ ID NO: 1819097 - RNA, 19 nt, Homo sapiens
  misc_RNA (1)...(19): siRNA sense strand
gaaagucgauuacuaacag

SEQ ID NO: 1819098 - RNA, 19 nt, Homo sapiens
  misc_RNA (1)...(19): siRNA sense strand
gaccaaggcugaugcaaau

SEQ ID NO: 1819099 - RNA, 19 nt, Homo sapiens
  misc_RNA (1)...(19): siRNA sense strand
caagaacucugcacugaug

SEQ ID NO: 1819100 - RNA, 19 nt, Homo sapiens
  misc_RNA (1)...(19): siRNA sense strand
gcauuaucauggacauuua

SEQ ID NO: 1819101 - RNA, 19 nt, Homo sapiens
  misc_RNA (1)...(19): siRNA sense strand
caaucaagcuucguaauga

SEQ ID NO: 1819102 - RNA, 19 nt, Homo sapiens
  misc_RNA (1)...(19): siRNA sense strand
ugacagaacuauaaagauc

SEQ ID NO: 1819103 - RNA, 19 nt, Homo sapiens
  misc_RNA (1)...(19): siRNA sense strand
gacaaucgauguguuggua

SEQ ID NO: 1819104 - RNA, 19 nt, Homo sapiens
  misc_RNA (1)...(19): siRNA sense strand
ggacagugaaucaggaaua

SEQ ID NO: 1819105 - RNA, 19 nt, Homo sapiens
  misc_RNA (1)...(19): siRNA sense strand
gcugggaucucgaauacaa

SEQ ID NO: 1819106 - RNA, 19 nt, Homo sapiens
  misc_RNA (1)...(19): siRNA sense strand
ggagaacuggcuacaauuu

SEQ ID NO: 1819107 - RNA, 19 nt, Homo sapiens
  misc_RNA (1)...(19): siRNA sense strand
gaagagagucacaaacgaa

SEQ ID NO: 1819108 - RNA, 19 nt, Homo sapiens
  misc_RNA (1)...(19): siRNA sense strand
cuacagcgaugaauucaau

SEQ ID NO: 1819109 - RNA, 19 nt, Homo sapiens
  misc_RNA (1)...(19): siRNA sense strand
gcacggauuugggauguga

SEQ ID NO: 1819110 - RNA, 19 nt, Homo sapiens
  misc_RNA (1)...(19): siRNA sense strand
uaagugcaguguaugguuu

SEQ ID NO: 1819111 - RNA, 19 nt, Homo sapiens
  misc_RNA (1)...(19): siRNA sense strand
gcaaucaagcuucguaaug

SEQ ID NO: 1819112 - RNA, 19 nt, Homo sapiens
  misc_RNA (1)...(19): siRNA sense strand
uccaagacauuacacauuu

SEQ ID NO: 1819113 - RNA, 19 nt, Homo sapiens
  misc_RNA (1)...(19): siRNA sense strand
uggaaacucuacaggguua

SEQ ID NO: 1819114 - RNA, 19 nt, Homo sapiens
  misc_RNA (1)...(19): siRNA sense strand
caaaugcaguugcuacagu

SEQ ID NO: 1819115 - RNA, 19 nt, Homo sapiens
  misc_RNA (1)...(19): siRNA sense strand
auacuaagauccagagaau

SEQ ID NO: 1819116 - RNA, 19 nt, Homo sapiens
  misc_RNA (1)...(19): siRNA sense strand
gcaacggauucauauguuc

SEQ ID NO: 1819117 - RNA, 19 nt, Homo sapiens
  misc_RNA (1)...(19): siRNA sense strand
ggagaagacaaacaaguga

SEQ ID NO: 1819118 - RNA, 19 nt, Homo sapiens
  misc_RNA (1)...(19): siRNA sense strand
ggaagugaauaccgacauc

SEQ ID NO: 1819119 - RNA, 19 nt, Homo sapiens
  misc_RNA (1)...(19): siRNA sense strand
guuuguagcugauaaugga

SEQ ID NO: 1819120 - RNA, 19 nt, Homo sapiens
  misc_RNA (1)...(19): siRNA sense strand
cacauuaucuggacauaca

SEQ ID NO: 1819121 - RNA, 19 nt, Homo sapiens
  misc_RNA (1)...(19): siRNA sense strand
gaaaugcugggaucucgaa

SEQ ID NO: 1819122 - RNA, 19 nt, Homo sapiens
  misc_RNA (1)...(19): siRNA sense strand
gaagaaacucauccaguca

SEQ ID NO: 1819123 - RNA, 19 nt, Homo sapiens
  misc_RNA (1)...(19): siRNA sense strand
agagugacauuaacaaauc

SEQ ID NO: 1819124 - RNA, 19 nt, Homo sapiens
  misc_RNA (1)...(19): siRNA sense strand
gcacaaggagcccauaucu

SEQ ID NO: 1819125 - RNA, 19 nt, Homo sapiens
  misc_RNA (1)...(19): siRNA sense strand
gacagugaaucaggaauau

SEQ ID NO: 1819126 - RNA, 19 nt, Homo sapiens
  misc_RNA (1)...(19): siRNA sense strand
acaaggagcccauaucugu

SEQ ID NO: 1819127 - RNA, 19 nt, Homo sapiens
  misc_RNA (1)...(19): siRNA sense strand
gagaaugccaagugaauca

SEQ ID NO: 1819128 - RNA, 19 nt, Homo sapiens
  misc_RNA (1)...(19): siRNA sense strand
gaaaaccugugccuuuaga

SEQ ID NO: 1819129 - RNA, 19 nt, Homo sapiens
  misc_RNA (1)...(19): siRNA sense strand
gacgguaaauucugaugga

SEQ ID NO: 1819130 - RNA, 19 nt, Homo sapiens
  misc_RNA (1)...(19): siRNA sense strand
aaacaagagugacauuaac

SEQ ID NO: 1819131 - RNA, 19 nt, Homo sapiens
  misc_RNA (1)...(19): siRNA sense strand
gcugcagaaccacaaauua

SEQ ID NO: 1819132 - RNA, 19 nt, Homo sapiens
  misc_RNA (1)...(19): siRNA sense strand
cagugaaucaggaauauuu

SEQ ID NO: 1819133 - RNA, 19 nt, Homo sapiens
  misc_RNA (1)...(19): siRNA sense strand
ccaagacauuacacauuug

SEQ ID NO: 1819134 - RNA, 19 nt, Homo sapiens
  misc_RNA (1)...(19): siRNA sense strand
agagaaggguccucagaau

SEQ ID NO: 1819135 - RNA, 19 nt, Homo sapiens
  misc_RNA (1)...(19): siRNA sense strand
ccauuaaaguauacagaga

SEQ ID NO: 1819136 - RNA, 19 nt, Homo sapiens
  misc_RNA (1)...(19): siRNA sense strand
caagagugacauuaacaaa

SEQ ID NO: 1819137 - RNA, 19 nt, Homo sapiens
  misc_RNA (1)...(19): siRNA sense strand
gagaaggguccucagaaug

SEQ ID NO: 1819138 - RNA, 19 nt, Homo sapiens
  misc_RNA (1)...(19): siRNA sense strand
ccacaaauuauuacaggaa

SEQ ID NO: 1819139 - RNA, 19 nt, Homo sapiens
  misc_RNA (1)...(19): siRNA sense strand
ggacauacaaaugcaguug

SEQ ID NO: 1819140 - RNA, 19 nt, Homo sapiens
  misc_RNA (1)...(19): siRNA sense strand
acauuuaagugcaguguau

SEQ ID NO: 1819141 - RNA, 19 nt, Homo sapiens
  misc_RNA (1)...(19): siRNA sense strand
gcugacagaacuauaaaga

SEQ ID NO: 1819142 - RNA, 19 nt, Homo sapiens
  misc_RNA (1)...(19): siRNA sense strand
gacagcagauacuaagauc

SEQ ID NO: 1819143 - RNA, 19 nt, Homo sapiens
  misc_RNA (1)...(19): siRNA sense strand
ugaagagagucacaaacga

SEQ ID NO: 1819144 - RNA, 19 nt, Homo sapiens
  misc_RNA (1)...(19): siRNA sense strand
ugaguaugguccuguguug

SEQ ID NO: 1819145 - RNA, 19 nt, Homo sapiens
  misc_RNA (1)...(19): siRNA sense strand
ucugaaagucgauuacuaa

SEQ ID NO: 1819146 - RNA, 19 nt, Homo sapiens
  misc_RNA (1)...(19): siRNA sense strand
gcauaugccuacuucaaaa

SEQ ID NO: 1819147 - RNA, 19 nt, Homo sapiens
  misc_RNA (1)...(19): siRNA sense strand
acucugcacugauggcuaa

SEQ ID NO: 1819148 - RNA, 19 nt, Homo sapiens
  misc_RNA (1)...(19): siRNA sense strand
cuggagaacuggcuacaau

SEQ ID NO: 1819149 - RNA, 19 nt, Homo sapiens
  misc_RNA (1)...(19): siRNA sense strand
uaacauaaagcaguggaaa

SEQ ID NO: 1819150 - RNA, 19 nt, Homo sapiens
  misc_RNA (1)...(19): siRNA sense strand
gaacuaaagccaguguaca

SEQ ID NO: 1819151 - RNA, 19 nt, Homo sapiens
  misc_RNA (1)...(19): siRNA sense strand
ugauggaaguuucauucaa

SEQ ID NO: 1819152 - RNA, 19 nt, Homo sapiens
  misc_RNA (1)...(19): siRNA sense strand
guccuuagcgguggcauua

SEQ ID NO: 1819153 - RNA, 19 nt, Homo sapiens
  misc_RNA (1)...(19): siRNA sense strand
caaaaucuuuccggucaua

SEQ ID NO: 1819154 - RNA, 19 nt, Homo sapiens
  misc_RNA (1)...(19): siRNA sense strand
acauaaagcaguggaaauu

SEQ ID NO: 1819155 - RNA, 19 nt, Homo sapiens
  misc_RNA (1)...(19): siRNA sense strand
ccauaucuguucucuugug

SEQ ID NO: 1819156 - RNA, 19 nt, Homo sapiens
  misc_RNA (1)...(19): siRNA sense strand
gaaaucagugguuuguuac

SEQ ID NO: 1819157 - RNA, 19 nt, Homo sapiens
  misc_RNA (1)...(19): siRNA sense strand
cauugacgguaaauucuga

SEQ ID NO: 1819158 - RNA, 19 nt, Homo sapiens
  misc_RNA (1)...(19): siRNA sense strand
acacauugacgguaaauuc

SEQ ID NO: 1819159 - RNA, 19 nt, Homo sapiens
  misc_RNA (1)...(19): siRNA sense strand
ggcauuaucauggacauuu

SEQ ID NO: 1819160 - RNA, 19 nt, Homo sapiens
  misc_RNA (1)...(19): siRNA sense strand
gaagacaaacaagugaaau

SEQ ID NO: 1819161 - RNA, 19 nt, Homo sapiens
  misc_RNA (1)...(19): siRNA sense strand
gagaagacaaacaagugaa

SEQ ID NO: 1819162 - RNA, 19 nt, Homo sapiens
  misc_RNA (1)...(19): siRNA sense strand
ucauugacugggcauauua

SEQ ID NO: 1819163 - RNA, 19 nt, Homo sapiens
  misc_RNA (1)...(19): siRNA sense strand
gaggagguacagaaacauu

SEQ ID NO: 1819164 - RNA, 19 nt, Homo sapiens
  misc_RNA (1)...(19): siRNA sense strand
gauacuaagauccagagaa

SEQ ID NO: 1819165 - RNA, 19 nt, Homo sapiens
  misc_RNA (1)...(19): siRNA sense strand
aaccagaaauuaucaagag

SEQ ID NO: 1819166 - RNA, 19 nt, Homo sapiens
  misc_RNA (1)...(19): siRNA sense strand
gucugaaagucgauuacua

SEQ ID NO: 1819167 - RNA, 19 nt, Homo sapiens
  misc_RNA (1)...(19): siRNA sense strand
gaauauuugcuugugcuuu

SEQ ID NO: 1819168 - RNA, 19 nt, Homo sapiens
  misc_RNA (1)...(19): siRNA sense strand
acaguacccugccaaucaa

SEQ ID NO: 1819169 - RNA, 19 nt, Homo sapiens
  misc_RNA (1)...(19): siRNA sense strand
ccagaaauuaucaagagaa

SEQ ID NO: 1819170 - RNA, 19 nt, Homo sapiens
  misc_RNA (1)...(19): siRNA sense strand
gaaaccagaaauuaucaag

SEQ ID NO: 1819171 - RNA, 19 nt, Homo sapiens
  misc_RNA (1)...(19): siRNA sense strand
auuaacacauugacgguaa

SEQ ID NO: 1819172 - RNA, 19 nt, Homo sapiens
  misc_RNA (1)...(19): siRNA sense strand
agauucaacugcacggauu

SEQ ID NO: 1819173 - RNA, 19 nt, Homo sapiens
  misc_RNA (1)...(19): siRNA sense strand
cuauaaagaucugggacuu

SEQ ID NO: 1819174 - RNA, 19 nt, Homo sapiens
  misc_RNA (1)...(19): siRNA sense strand
ggucgaggagguacagaaa

SEQ ID NO: 1819175 - RNA, 19 nt, Homo sapiens
  misc_RNA (1)...(19): siRNA sense strand
caucuuggcuggguucgau

SEQ ID NO: 1819176 - RNA, 19 nt, Homo sapiens
  misc_RNA (1)...(19): siRNA sense strand
caaucaaggacaagaaguu

SEQ ID NO: 1819177 - RNA, 19 nt, Homo sapiens
  misc_RNA (1)...(19): siRNA sense strand
gaaggguccucagaaugca

SEQ ID NO: 1819178 - RNA, 19 nt, Homo sapiens
  misc_RNA (1)...(19): siRNA sense strand
ucgaggagguacagaaaca

SEQ ID NO: 1819179 - RNA, 19 nt, Homo sapiens
  misc_RNA (1)...(19): siRNA sense strand
gagugacauuaacaaauca

SEQ ID NO: 1819180 - RNA, 19 nt, Homo sapiens
  misc_RNA (1)...(19): siRNA sense strand
accaagaacucugcacuga

SEQ ID NO: 1819181 - RNA, 19 nt, Homo sapiens
  misc_RNA (1)...(19): siRNA sense strand
gccuuuagaugaagagagu

SEQ ID NO: 1819182 - RNA, 19 nt, Homo sapiens
  misc_RNA (1)...(19): siRNA sense strand
uaaaguauacagagaggau

SEQ ID NO: 1819183 - RNA, 19 nt, Homo sapiens
  misc_RNA (1)...(19): siRNA sense strand
ugacauguuuguagcugau

SEQ ID NO: 1819184 - RNA, 19 nt, Homo sapiens
  misc_RNA (1)...(19): siRNA sense strand
gaucucgaauacaauaagg

SEQ ID NO: 1819185 - RNA, 19 nt, Homo sapiens
  misc_RNA (1)...(19): siRNA sense strand
cagagaaugccaagugaau

SEQ ID NO: 1819186 - RNA, 19 nt, Homo sapiens
  misc_RNA (1)...(19): siRNA sense strand
ucaggaauauuugcuugug

SEQ ID NO: 1819187 - RNA, 19 nt, Homo sapiens
  misc_RNA (1)...(19): siRNA sense strand
uggaaaaccugugccuuua

SEQ ID NO: 1819188 - RNA, 19 nt, Homo sapiens
  misc_RNA (1)...(19): siRNA sense strand
uaucauggacauuuaagug

SEQ ID NO: 1819189 - RNA, 19 nt, Homo sapiens
  misc_RNA (1)...(19): siRNA sense strand
acaggaagccaugauacua

SEQ ID NO: 1819190 - RNA, 19 nt, Homo sapiens
  misc_RNA (1)...(19): siRNA sense strand
gggaucugguggcuggaaa

SEQ ID NO: 1819191 - RNA, 19 nt, Homo sapiens
  misc_RNA (1)...(19): siRNA sense strand
gaagccaugauacuacaau

SEQ ID NO: 1819192 - RNA, 19 nt, Homo sapiens
  misc_RNA (1)...(19): siRNA sense strand
ugacuuaggugccuuauau

SEQ ID NO: 1819193 - RNA, 19 nt, Homo sapiens
  misc_RNA (1)...(19): siRNA sense strand
gaagagaauuccagugaug

SEQ ID NO: 1819194 - RNA, 19 nt, Homo sapiens
  misc_RNA (1)...(19): siRNA sense strand
cagaugaagugcacuauuu

SEQ ID NO: 1819195 - RNA, 19 nt, Homo sapiens
  misc_RNA (1)...(19): siRNA sense strand
guuagaagauggaauugaa

SEQ ID NO: 1819196 - RNA, 19 nt, Homo sapiens
  misc_RNA (1)...(19): siRNA sense strand
cauguggguuguauuguua

SEQ ID NO: 1819197 - RNA, 19 nt, Homo sapiens
  misc_RNA (1)...(19): siRNA sense strand
gaaggaggccagaaauuug

SEQ ID NO: 1819198 - RNA, 19 nt, Homo sapiens
  misc_RNA (1)...(19): siRNA sense strand
gcagggauguuuacugaag

SEQ ID NO: 1819199 - RNA, 19 nt, Homo sapiens
  misc_RNA (1)...(19): siRNA sense strand
ggaaguucaucuugagaga

SEQ ID NO: 1819200 - RNA, 19 nt, Homo sapiens
  misc_RNA (1)...(19): siRNA sense strand
gccagaaaccauugacuua

SEQ ID NO: 1819201 - RNA, 19 nt, Homo sapiens
  misc_RNA (1)...(19): siRNA sense strand
ccagaaauuugccaggaaa

SEQ ID NO: 1819202 - RNA, 19 nt, Homo sapiens
  misc_RNA (1)...(19): siRNA sense strand
aagcagggauguuuacuga

SEQ ID NO: 1819203 - RNA, 19 nt, Homo sapiens
  misc_RNA (1)...(19): siRNA sense strand
gagaaggacaagaagauuu

SEQ ID NO: 1819204 - RNA, 19 nt, Homo sapiens
  misc_RNA (1)...(19): siRNA sense strand
ggaaugaucccgcugaaag

SEQ ID NO: 1819205 - RNA, 19 nt, Homo sapiens
  misc_RNA (1)...(19): siRNA sense strand
guaacugcgucauugauug

SEQ ID NO: 1819206 - RNA, 19 nt, Homo sapiens
  misc_RNA (1)...(19): siRNA sense strand
caaccagucuguuaggaau

SEQ ID NO: 1819207 - RNA, 19 nt, Homo sapiens
  misc_RNA (1)...(19): siRNA sense strand
agagagggcuaccuuguga

SEQ ID NO: 1819208 - RNA, 19 nt, Homo sapiens
  misc_RNA (1)...(19): siRNA sense strand
ugaaggaggccagaaauuu

SEQ ID NO: 1819209 - RNA, 19 nt, Homo sapiens
  misc_RNA (1)...(19): siRNA sense strand
gugaggaaguucaucuuga

SEQ ID NO: 1819210 - RNA, 19 nt, Homo sapiens
  misc_RNA (1)...(19): siRNA sense strand
aaucacugcuucacaggua

SEQ ID NO: 1819211 - RNA, 19 nt, Homo sapiens
  misc_RNA (1)...(19): siRNA sense strand
gcaggaagagugaggaaga

SEQ ID NO: 1819212 - RNA, 19 nt, Homo sapiens
  misc_RNA (1)...(19): siRNA sense strand
gugaagagaauuccaguga

SEQ ID NO: 1819213 - RNA, 19 nt, Homo sapiens
  misc_RNA (1)...(19): siRNA sense strand
gaucagagagggcuaccuu

SEQ ID NO: 1819214 - RNA, 19 nt, Homo sapiens
  misc_RNA (1)...(19): siRNA sense strand
caggaaggccucaugauug

SEQ ID NO: 1819215 - RNA, 19 nt, Homo sapiens
  misc_RNA (1)...(19): siRNA sense strand
ccaggaaggccucaugauu

SEQ ID NO: 1819216 - RNA, 19 nt, Homo sapiens
  misc_RNA (1)...(19): siRNA sense strand
uaagaucacuacgaccaaa

SEQ ID NO: 1819217 - RNA, 19 nt, Homo sapiens
  misc_RNA (1)...(19): siRNA sense strand
ccauguggguuguauuguu

SEQ ID NO: 1819218 - RNA, 19 nt, Homo sapiens
  misc_RNA (1)...(19): siRNA sense strand
acagguaacugcgucauug

SEQ ID NO: 1819219 - RNA, 19 nt, Homo sapiens
  misc_RNA (1)...(19): siRNA sense strand
aaagggagcacucugacua

SEQ ID NO: 1819220 - RNA, 19 nt, Homo sapiens
  misc_RNA (1)...(19): siRNA sense strand
ggauguuuguguuuaagau

SEQ ID NO: 1819221 - RNA, 19 nt, Homo sapiens
  misc_RNA (1)...(19): siRNA sense strand
gcagaugaagugcacuauu

SEQ ID NO: 1819222 - RNA, 19 nt, Homo sapiens
  misc_RNA (1)...(19): siRNA sense strand
gaauuccagugaugaugau

SEQ ID NO: 1819223 - RNA, 19 nt, Homo sapiens
  misc_RNA (1)...(19): siRNA sense strand
uuaggugccuuauauuugu

SEQ ID NO: 1819224 - RNA, 19 nt, Homo sapiens
  misc_RNA (1)...(19): siRNA sense strand
ccaaacagcaggaccacuu

SEQ ID NO: 1819225 - RNA, 19 nt, Homo sapiens
  misc_RNA (1)...(19): siRNA sense strand
gccagaaauuugccaggaa

SEQ ID NO: 1819226 - RNA, 19 nt, Homo sapiens
  misc_RNA (1)...(19): siRNA sense strand
caaauggcaggaagaguga

SEQ ID NO: 1819227 - RNA, 19 nt, Homo sapiens
  misc_RNA (1)...(19): siRNA sense strand
gggagcaauucacuugaga

SEQ ID NO: 1819228 - RNA, 19 nt, Homo sapiens
  misc_RNA (1)...(19): siRNA sense strand
cugccuaccugcacuacua

SEQ ID NO: 1819229 - RNA, 19 nt, Homo sapiens
  misc_RNA (1)...(19): siRNA sense strand
ggaagagugaggaagagaa

SEQ ID NO: 1819230 - RNA, 19 nt, Homo sapiens
  misc_RNA (1)...(19): siRNA sense strand
uaucaagcagggauguuua

SEQ ID NO: 1819231 - RNA, 19 nt, Homo sapiens
  misc_RNA (1)...(19): siRNA sense strand
ugaagugcacuauuucuug

SEQ ID NO: 1819232 - RNA, 19 nt, Homo sapiens
  misc_RNA (1)...(19): siRNA sense strand
ugacuucaguggagagcaa

SEQ ID NO: 1819233 - RNA, 19 nt, Homo sapiens
  misc_RNA (1)...(19): siRNA sense strand
gguaacugcgucauugauu

SEQ ID NO: 1819234 - RNA, 19 nt, Homo sapiens
  misc_RNA (1)...(19): siRNA sense strand
cagauggccucccgaacug

SEQ ID NO: 1819235 - RNA, 19 nt, Homo sapiens
  misc_RNA (1)...(19): siRNA sense strand
guauccaaccagucuguua

SEQ ID NO: 1819236 - RNA, 19 nt, Homo sapiens
  misc_RNA (1)...(19): siRNA sense strand
cagaaaccauugacuuagg

SEQ ID NO: 1819237 - RNA, 19 nt, Homo sapiens
  misc_RNA (1)...(19): siRNA sense strand
guggagagcaacucaaaug

SEQ ID NO: 1819238 - RNA, 19 nt, Homo sapiens
  misc_RNA (1)...(19): siRNA sense strand
cgucauugauuggcuggua

SEQ ID NO: 1819239 - RNA, 19 nt, Homo sapiens
  misc_RNA (1)...(19): siRNA sense strand
gaugaugaugugauucuga

SEQ ID NO: 1819240 - RNA, 19 nt, Homo sapiens
  misc_RNA (1)...(19): siRNA sense strand
gagaagacccugccuaccu

SEQ ID NO: 1819241 - RNA, 19 nt, Homo sapiens
  misc_RNA (1)...(19): siRNA sense strand
ccuuauauuuguccaugaa

SEQ ID NO: 1819242 - RNA, 19 nt, Homo sapiens
  misc_RNA (1)...(19): siRNA sense strand
ugaagagaauuccagugau

SEQ ID NO: 1819243 - RNA, 19 nt, Homo sapiens
  misc_RNA (1)...(19): siRNA sense strand
gaaggccucaugauugcuu

SEQ ID NO: 1819244 - RNA, 19 nt, Homo sapiens
  misc_RNA (1)...(19): siRNA sense strand
gaggcuguguggugacuuc

SEQ ID NO: 1819245 - RNA, 19 nt, Homo sapiens
  misc_RNA (1)...(19): siRNA sense strand
ugaggaaguucaucuugag

SEQ ID NO: 1819246 - RNA, 19 nt, Homo sapiens
  misc_RNA (1)...(19): siRNA sense strand
cagugaugaugaugugauu

SEQ ID NO: 1819247 - RNA, 19 nt, Homo sapiens
  misc_RNA (1)...(19): siRNA sense strand
gaaguucaucuugagagaa

SEQ ID NO: 1819248 - RNA, 19 nt, Homo sapiens
  misc_RNA (1)...(19): siRNA sense strand
aaccaaagcggaucagaga

SEQ ID NO: 1819249 - RNA, 19 nt, Homo sapiens
  misc_RNA (1)...(19): siRNA sense strand
agggcuaccuugugaagaa

SEQ ID NO: 1819250 - RNA, 19 nt, Homo sapiens
  misc_RNA (1)...(19): siRNA sense strand
ggaaagugaggaaguucau

SEQ ID NO: 1819251 - RNA, 19 nt, Homo sapiens
  misc_RNA (1)...(19): siRNA sense strand
ggauggaacugcugaaaac

SEQ ID NO: 1819252 - RNA, 19 nt, Homo sapiens
  misc_RNA (1)...(19): siRNA sense strand
uagagaaggacaagaagau

SEQ ID NO: 1819253 - RNA, 19 nt, Homo sapiens
  misc_RNA (1)...(19): siRNA sense strand
gaagagugaggaagagaac

SEQ ID NO: 1819254 - RNA, 19 nt, Homo sapiens
  misc_RNA (1)...(19): siRNA sense strand
agaauuccagugaugauga

SEQ ID NO: 1819255 - RNA, 19 nt, Homo sapiens
  misc_RNA (1)...(19): siRNA sense strand
cagcagaugaagugcacua

SEQ ID NO: 1819256 - RNA, 19 nt, Homo sapiens
  misc_RNA (1)...(19): siRNA sense strand
agaacugaaucuagagaag

SEQ ID NO: 1819257 - RNA, 19 nt, Homo sapiens
  misc_RNA (1)...(19): siRNA sense strand
ccagauggccucccgaacu

SEQ ID NO: 1819258 - RNA, 19 nt, Homo sapiens
  misc_RNA (1)...(19): siRNA sense strand
gcuguguggugacuucagu

SEQ ID NO: 1819259 - RNA, 19 nt, Homo sapiens
  misc_RNA (1)...(19): siRNA sense strand
gaugaugugauucugaaag

SEQ ID NO: 1819260 - RNA, 19 nt, Homo sapiens
  misc_RNA (1)...(19): siRNA sense strand
gagaauuccagugaugaug

SEQ ID NO: 1819261 - RNA, 19 nt, Homo sapiens
  misc_RNA (1)...(19): siRNA sense strand
cuacuacuuuccagacagu

SEQ ID NO: 1819262 - RNA, 19 nt, Homo sapiens
  misc_RNA (1)...(19): siRNA sense strand
ucagagagggcuaccuugu

SEQ ID NO: 1819263 - RNA, 19 nt, Homo sapiens
  misc_RNA (1)...(19): siRNA sense strand
gaaagggagcacucugacu

SEQ ID NO: 1819264 - RNA, 19 nt, Homo sapiens
  misc_RNA (1)...(19): siRNA sense strand
gacaacagccccaaaggaa

SEQ ID NO: 1819265 - RNA, 19 nt, Homo sapiens
  misc_RNA (1)...(19): siRNA sense strand
caacccugaugccuucuac

SEQ ID NO: 1819266 - RNA, 19 nt, Homo sapiens
  misc_RNA (1)...(19): siRNA sense strand
ccaaccagucuguuaggaa

SEQ ID NO: 1819267 - RNA, 19 nt, Homo sapiens
  misc_RNA (1)...(19): siRNA sense strand
cuuaggugccuuauauuug

SEQ ID NO: 1819268 - RNA, 19 nt, Homo sapiens
  misc_RNA (1)...(19): siRNA sense strand
gaaugaucccgcugaaagg

SEQ ID NO: 1819269 - RNA, 19 nt, Homo sapiens
  misc_RNA (1)...(19): siRNA sense strand
agaaaccauugacuuaggu

SEQ ID NO: 1819270 - RNA, 19 nt, Homo sapiens
  misc_RNA (1)...(19): siRNA sense strand
ccagaaaccauugacuuag

SEQ ID NO: 1819271 - RNA, 19 nt, Homo sapiens
  misc_RNA (1)...(19): siRNA sense strand
augaugaugugauucugaa

SEQ ID NO: 1819272 - RNA, 19 nt, Homo sapiens
  misc_RNA (1)...(19): siRNA sense strand
caguggagagcaacucaaa

SEQ ID NO: 1819273 - RNA, 19 nt, Homo sapiens
  misc_RNA (1)...(19): siRNA sense strand
gaggaaguucaucuugaga

SEQ ID NO: 1819274 - RNA, 19 nt, Homo sapiens
  misc_RNA (1)...(19): siRNA sense strand
augaugugauucugaaaga

SEQ ID NO: 1819275 - RNA, 19 nt, Homo sapiens
  misc_RNA (1)...(19): siRNA sense strand
cauugaaggaggccagaaa

SEQ ID NO: 1819276 - RNA, 19 nt, Homo sapiens
  misc_RNA (1)...(19): siRNA sense strand
ccugggagcaauucacuug

SEQ ID NO: 1819277 - RNA, 19 nt, Homo sapiens
  misc_RNA (1)...(19): siRNA sense strand
gaauucagaggggucauua

SEQ ID NO: 1819278 - RNA, 19 nt, Homo sapiens
  misc_RNA (1)...(19): siRNA sense strand
gaugaagugcacuauuucu

SEQ ID NO: 1819279 - RNA, 19 nt, Homo sapiens
  misc_RNA (1)...(19): siRNA sense strand
acuuaggugccuuauauuu

SEQ ID NO: 1819280 - RNA, 19 nt, Homo sapiens
  misc_RNA (1)...(19): siRNA sense strand
caaacagcaggaccacuuc

SEQ ID NO: 1819281 - RNA, 19 nt, Homo sapiens
  misc_RNA (1)...(19): siRNA sense strand
gaaagugaggaaguucauc

SEQ ID NO: 1819282 - RNA, 19 nt, Homo sapiens
  misc_RNA (1)...(19): siRNA sense strand
ucagaggggucauuaucaa

SEQ ID NO: 1819283 - RNA, 19 nt, Homo sapiens
  misc_RNA (1)...(19): siRNA sense strand
aaggaaugaucccgcugaa

SEQ ID NO: 1819284 - RNA, 19 nt, Homo sapiens
  misc_RNA (1)...(19): siRNA sense strand
aggaaggccucaugauugc

SEQ ID NO: 1819285 - RNA, 19 nt, Homo sapiens
  misc_RNA (1)...(19): siRNA sense strand
cgacugccagaaaccauug

SEQ ID NO: 1819286 - RNA, 19 nt, Homo sapiens
  misc_RNA (1)...(19): siRNA sense strand
cagagagggcuaccuugug

SEQ ID NO: 1819287 - RNA, 19 nt, Homo sapiens
  misc_RNA (1)...(19): siRNA sense strand
gggagcguguucaauacgu

SEQ ID NO: 1819288 - RNA, 19 nt, Homo sapiens
  misc_RNA (1)...(19): siRNA sense strand
ccugaugccuucuacuacu

SEQ ID NO: 1819289 - RNA, 19 nt, Homo sapiens
  misc_RNA (1)...(19): siRNA sense strand
gucauugauuggcugguau

SEQ ID NO: 1819290 - RNA, 19 nt, Homo sapiens
  misc_RNA (1)...(19): siRNA sense strand
aacugaaucuagagaagga

SEQ ID NO: 1819291 - RNA, 19 nt, Homo sapiens
  misc_RNA (1)...(19): siRNA sense strand
aaagaacugaaucuagaga

SEQ ID NO: 1819292 - RNA, 19 nt, Homo sapiens
  misc_RNA (1)...(19): siRNA sense strand
gcacauacccugcagaaga

SEQ ID NO: 1819293 - RNA, 19 nt, Homo sapiens
  misc_RNA (1)...(19): siRNA sense strand
ccaacacccucucucgaua

SEQ ID NO: 1819294 - RNA, 19 nt, Homo sapiens
  misc_RNA (1)...(19): siRNA sense strand
cagagacacugcggaauuu

SEQ ID NO: 1819295 - RNA, 19 nt, Homo sapiens
  misc_RNA (1)...(19): siRNA sense strand
ggaauuugcugccaacacu

SEQ ID NO: 1819296 - RNA, 19 nt, Homo sapiens
  misc_RNA (1)...(19): siRNA sense strand
ggaggaggaggaagaauug

SEQ ID NO: 1819297 - RNA, 19 nt, Homo sapiens
  misc_RNA (1)...(19): siRNA sense strand
guucacagcugccaaugag

SEQ ID NO: 1819298 - RNA, 19 nt, Homo sapiens
  misc_RNA (1)...(19): siRNA sense strand
uugagaaggugguggagua

SEQ ID NO: 1819299 - RNA, 19 nt, Homo sapiens
  misc_RNA (1)...(19): siRNA sense strand
ccagagacacugcggaauu

SEQ ID NO: 1819300 - RNA, 19 nt, Homo sapiens
  misc_RNA (1)...(19): siRNA sense strand
aggaagaauuggagacuga

SEQ ID NO: 1819301 - RNA, 19 nt, Homo sapiens
  misc_RNA (1)...(19): siRNA sense strand
uggacacaguggugcauua

SEQ ID NO: 1819302 - RNA, 19 nt, Homo sapiens
  misc_RNA (1)...(19): siRNA sense strand
agacugaggagaacaaguu

SEQ ID NO: 1819303 - RNA, 19 nt, Homo sapiens
  misc_RNA (1)...(19): siRNA sense strand
ugaagggcguuacugacaa

SEQ ID NO: 1819304 - RNA, 19 nt, Homo sapiens
  misc_RNA (1)...(19): siRNA sense strand
gaagggcguuacugacaac

SEQ ID NO: 1819305 - RNA, 19 nt, Homo sapiens
  misc_RNA (1)...(19): siRNA sense strand
cugaaaagauugcuucuga

SEQ ID NO: 1819306 - RNA, 19 nt, Homo sapiens
  misc_RNA (1)...(19): siRNA sense strand
ggucagcgacagcuucuuc

SEQ ID NO: 1819307 - RNA, 19 nt, Homo sapiens
  misc_RNA (1)...(19): siRNA sense strand
caaguucagugagguagca

SEQ ID NO: 1819308 - RNA, 19 nt, Homo sapiens
  misc_RNA (1)...(19): siRNA sense strand
cggaggaggaggaagaauu

SEQ ID NO: 1819309 - RNA, 19 nt, Homo sapiens
  misc_RNA (1)...(19): siRNA sense strand
gauacaccgugcagaccau

SEQ ID NO: 1819310 - RNA, 19 nt, Homo sapiens
  misc_RNA (1)...(19): siRNA sense strand
acacaguggugcauuacgu

SEQ ID NO: 1819311 - RNA, 19 nt, Homo sapiens
  misc_RNA (1)...(19): siRNA sense strand
ggccaugucccuaucagau

SEQ ID NO: 1819312 - RNA, 19 nt, Homo sapiens
  misc_RNA (1)...(19): siRNA sense strand
gugcaaugccuaugagaag

SEQ ID NO: 1819313 - RNA, 19 nt, Homo sapiens
  misc_RNA (1)...(19): siRNA sense strand
acacggaggaggaggaaga

SEQ ID NO: 1819314 - RNA, 19 nt, Homo sapiens
  misc_RNA (1)...(19): siRNA sense strand
ggacacggaggaggaggaa

SEQ ID NO: 1819315 - RNA, 19 nt, Homo sapiens
  misc_RNA (1)...(19): siRNA sense strand
cacauacccugcagaagac

SEQ ID NO: 1819316 - RNA, 19 nt, Homo sapiens
  misc_RNA (1)...(19): siRNA sense strand
gugcagagcgccaguagcu

SEQ ID NO: 1819317 - RNA, 19 nt, Homo sapiens
  misc_RNA (1)...(19): siRNA sense strand
agaccuacaccagcacuaa

SEQ ID NO: 1819318 - RNA, 19 nt, Homo sapiens
  misc_RNA (1)...(19): siRNA sense strand
ggacacaguggugcauuac

SEQ ID NO: 1819319 - RNA, 19 nt, Homo sapiens
  misc_RNA (1)...(19): siRNA sense strand
cgcgagcacuucagacaag

SEQ ID NO: 1819320 - RNA, 19 nt, Homo sapiens
  misc_RNA (1)...(19): siRNA sense strand
caacacccucucucgauac

SEQ ID NO: 1819321 - RNA, 19 nt, Homo sapiens
  misc_RNA (1)...(19): siRNA sense strand
ggaggaagaauuggagacu

SEQ ID NO: 1819322 - RNA, 19 nt, Homo sapiens
  misc_RNA (1)...(19): siRNA sense strand
cccaggaggaggaucauga

SEQ ID NO: 1819323 - RNA, 19 nt, Homo sapiens
  misc_RNA (1)...(19): siRNA sense strand
ccuccucccugcagacaag

SEQ ID NO: 1819324 - RNA, 19 nt, Homo sapiens
  misc_RNA (1)...(19): siRNA sense strand
gccaugucccuaucagaug

SEQ ID NO: 1819325 - RNA, 19 nt, Homo sapiens
  misc_RNA (1)...(19): siRNA sense strand
aaagagagguuccacauga

SEQ ID NO: 1819326 - RNA, 19 nt, Homo sapiens
  misc_RNA (1)...(19): siRNA sense strand
ggacgugggugaugccauu

SEQ ID NO: 1819327 - RNA, 19 nt, Homo sapiens
  misc_RNA (1)...(19): siRNA sense strand
gcaccgagaguauugauaa

SEQ ID NO: 1819328 - RNA, 19 nt, Homo sapiens
  misc_RNA (1)...(19): siRNA sense strand
ggaaacacauggacaaggu

SEQ ID NO: 1819329 - RNA, 19 nt, Homo sapiens
  misc_RNA (1)...(19): siRNA sense strand
caacucagcuaaacagucu

SEQ ID NO: 1819330 - RNA, 19 nt, Homo sapiens
  misc_RNA (1)...(19): siRNA sense strand
caacagcugugacaacauc

SEQ ID NO: 1819331 - RNA, 19 nt, Homo sapiens
  misc_RNA (1)...(19): siRNA sense strand
gaacagccagcaacccuaa

SEQ ID NO: 1819332 - RNA, 19 nt, Homo sapiens
  misc_RNA (1)...(19): siRNA sense strand
caaggagccuggaguacaa

SEQ ID NO: 1819333 - RNA, 19 nt, Homo sapiens
  misc_RNA (1)...(19): siRNA sense strand
gaucaagccauacaagauu

SEQ ID NO: 1819334 - RNA, 19 nt, Homo sapiens
  misc_RNA (1)...(19): siRNA sense strand
gcagcaagguucucagcuu

SEQ ID NO: 1819335 - RNA, 19 nt, Homo sapiens
  misc_RNA (1)...(19): siRNA sense strand
gcaaggagccuguguucau

SEQ ID NO: 1819336 - RNA, 19 nt, Homo sapiens
  misc_RNA (1)...(19): siRNA sense strand
ggaaguccuugaaugugaa

SEQ ID NO: 1819337 - RNA, 19 nt, Homo sapiens
  misc_RNA (1)...(19): siRNA sense strand
caaggagccuguguucauu

SEQ ID NO: 1819338 - RNA, 19 nt, Homo sapiens
  misc_RNA (1)...(19): siRNA sense strand
gcaaccggcucuucugcuu

SEQ ID NO: 1819339 - RNA, 19 nt, Homo sapiens
  misc_RNA (1)...(19): siRNA sense strand
gccaggagguguuggagaa

SEQ ID NO: 1819340 - RNA, 19 nt, Homo sapiens
  misc_RNA (1)...(19): siRNA sense strand
gagagagaauucaucaagu

SEQ ID NO: 1819341 - RNA, 19 nt, Homo sapiens
  misc_RNA (1)...(19): siRNA sense strand
gaacaacucagcuaaacag

SEQ ID NO: 1819342 - RNA, 19 nt, Homo sapiens
  misc_RNA (1)...(19): siRNA sense strand
gggaugguguggacaguga

SEQ ID NO: 1819343 - RNA, 19 nt, Homo sapiens
  misc_RNA (1)...(19): siRNA sense strand
guucucagcuuccuugcuu

SEQ ID NO: 1819344 - RNA, 19 nt, Homo sapiens
  misc_RNA (1)...(19): siRNA sense strand
gggaugaccuucggcaaga

SEQ ID NO: 1819345 - RNA, 19 nt, Homo sapiens
  misc_RNA (1)...(19): siRNA sense strand
gcagaacaacucagcuaaa

SEQ ID NO: 1819346 - RNA, 19 nt, Homo sapiens
  misc_RNA (1)...(19): siRNA sense strand
gcauaagucucagcagcaa

SEQ ID NO: 1819347 - RNA, 19 nt, Homo sapiens
  misc_RNA (1)...(19): siRNA sense strand
gaugguggauggcaguaug

SEQ ID NO: 1819348 - RNA, 19 nt, Homo sapiens
  misc_RNA (1)...(19): siRNA sense strand
gcaagagcuucuggccuuu

SEQ ID NO: 1819349 - RNA, 19 nt, Homo sapiens
  misc_RNA (1)...(19): siRNA sense strand
gacaacaucucccaguucu

SEQ ID NO: 1819350 - RNA, 19 nt, Homo sapiens
  misc_RNA (1)...(19): siRNA sense strand
ccuuuaagcugaccacaga

SEQ ID NO: 1819351 - RNA, 19 nt, Homo sapiens
  misc_RNA (1)...(19): siRNA sense strand
ccgagaguauugauaauuc

SEQ ID NO: 1819352 - RNA, 19 nt, Homo sapiens
  misc_RNA (1)...(19): siRNA sense strand
ggacagacacaaugggaau

SEQ ID NO: 1819353 - RNA, 19 nt, Homo sapiens
  misc_RNA (1)...(19): siRNA sense strand
caaacgagacccagaagau

SEQ ID NO: 1819354 - RNA, 19 nt, Homo sapiens
  misc_RNA (1)...(19): siRNA sense strand
cggaacagcuggcucauac

SEQ ID NO: 1819355 - RNA, 19 nt, Homo sapiens
  misc_RNA (1)...(19): siRNA sense strand
cccaguugcuuaacaugua

SEQ ID NO: 1819356 - RNA, 19 nt, Homo sapiens
  misc_RNA (1)...(19): siRNA sense strand
uggaaguccuugaauguga

SEQ ID NO: 1819357 - RNA, 19 nt, Homo sapiens
  misc_RNA (1)...(19): siRNA sense strand
gagauccguugccuagaug

SEQ ID NO: 1819358 - RNA, 19 nt, Homo sapiens
  misc_RNA (1)...(19): siRNA sense strand
ggacucaccagcgcucuaa

SEQ ID NO: 1819359 - RNA, 19 nt, Homo sapiens
  misc_RNA (1)...(19): siRNA sense strand
caugggagauacaguagug

SEQ ID NO: 1819360 - RNA, 19 nt, Homo sapiens
  misc_RNA (1)...(19): siRNA sense strand
cuucagacaugcacauuuc

SEQ ID NO: 1819361 - RNA, 19 nt, Homo sapiens
  misc_RNA (1)...(19): siRNA sense strand
gagaaaguacggcggauca

SEQ ID NO: 1819362 - RNA, 19 nt, Homo sapiens
  misc_RNA (1)...(19): siRNA sense strand
gaaaguacggcggaucaga

SEQ ID NO: 1819363 - RNA, 19 nt, Homo sapiens
  misc_RNA (1)...(19): siRNA sense strand
ugagauccguugccuagau

SEQ ID NO: 1819364 - RNA, 19 nt, Homo sapiens
  misc_RNA (1)...(19): siRNA sense strand
gagcaaggagccuguguuc

SEQ ID NO: 1819365 - RNA, 19 nt, Homo sapiens
  misc_RNA (1)...(19): siRNA sense strand
ggacguggacuucuaucug

SEQ ID NO: 1819366 - RNA, 19 nt, Homo sapiens
  misc_RNA (1)...(19): siRNA sense strand
gcgacauguucaacuacua

SEQ ID NO: 1819367 - RNA, 19 nt, Homo sapiens
  misc_RNA (1)...(19): siRNA sense strand
guagaaaacuugcccgaau

SEQ ID NO: 1819368 - RNA, 19 nt, Homo sapiens
  misc_RNA (1)...(19): siRNA sense strand
cagaacaacucagcuaaac

SEQ ID NO: 1819369 - RNA, 19 nt, Homo sapiens
  misc_RNA (1)...(19): siRNA sense strand
gcugauaguggcaugauug

SEQ ID NO: 1819370 - RNA, 19 nt, Homo sapiens
  misc_RNA (1)...(19): siRNA sense strand
ggaucaagccauacaagau

SEQ ID NO: 1819371 - RNA, 19 nt, Homo sapiens
  misc_RNA (1)...(19): siRNA sense strand
ugaagcaacugcaguccau

SEQ ID NO: 1819372 - RNA, 19 nt, Homo sapiens
  misc_RNA (1)...(19): siRNA sense strand
agagagaauucaucaaguc

SEQ ID NO: 1819373 - RNA, 19 nt, Homo sapiens
  misc_RNA (1)...(19): siRNA sense strand
gcacauuuccacucaacga

SEQ ID NO: 1819374 - RNA, 19 nt, Homo sapiens
  misc_RNA (1)...(19): siRNA sense strand
ggaguacaagccuacauug

SEQ ID NO: 1819375 - RNA, 19 nt, Homo sapiens
  misc_RNA (1)...(19): siRNA sense strand
ggccuauucuucagacaug

SEQ ID NO: 1819376 - RNA, 19 nt, Homo sapiens
  misc_RNA (1)...(19): siRNA sense strand
gugacaacaucucccaguu

SEQ ID NO: 1819377 - RNA, 19 nt, Homo sapiens
  misc_RNA (1)...(19): siRNA sense strand
cgagaguauugauaauuca

SEQ ID NO: 1819378 - RNA, 19 nt, Homo sapiens
  misc_RNA (1)...(19): siRNA sense strand
acccuaaaguggagaauga

SEQ ID NO: 1819379 - RNA, 19 nt, Homo sapiens
  misc_RNA (1)...(19): siRNA sense strand
ggaggaggaagaugagaug

SEQ ID NO: 1819380 - RNA, 19 nt, Homo sapiens
  misc_RNA (1)...(19): siRNA sense strand
caucauccacaucgacuuu

SEQ ID NO: 1819381 - RNA, 19 nt, Homo sapiens
  misc_RNA (1)...(19): siRNA sense strand
gcccaacuaugacaacgau

SEQ ID NO: 1819382 - RNA, 19 nt, Homo sapiens
  misc_RNA (1)...(19): siRNA sense strand
ccauuaagcccuacauagu

SEQ ID NO: 1819383 - RNA, 19 nt, Homo sapiens
  misc_RNA (1)...(19): siRNA sense strand
ggccaugggagauacagua

SEQ ID NO: 1819384 - RNA, 19 nt, Homo sapiens
  misc_RNA (1)...(19): siRNA sense strand
guucaacuacuauaagaug

SEQ ID NO: 1819385 - RNA, 19 nt, Homo sapiens
  misc_RNA (1)...(19): siRNA sense strand
gcaacgaggacguggacuu

SEQ ID NO: 1819386 - RNA, 19 nt, Homo sapiens
  misc_RNA (1)...(19): siRNA sense strand
cccgaaaucugggcuuuga

SEQ ID NO: 1819387 - RNA, 19 nt, Homo sapiens
  misc_RNA (1)...(19): siRNA sense strand
gauaguggcaugauugaac

SEQ ID NO: 1819388 - RNA, 19 nt, Homo sapiens
  misc_RNA (1)...(19): siRNA sense strand
ccaacuaugacaacgauga

SEQ ID NO: 1819389 - RNA, 19 nt, Homo sapiens
  misc_RNA (1)...(19): siRNA sense strand
ccacuggaguuggucaaug

SEQ ID NO: 1819390 - RNA, 19 nt, Homo sapiens
  misc_RNA (1)...(19): siRNA sense strand
caacaucucccaguucucu

SEQ ID NO: 1819391 - RNA, 19 nt, Homo sapiens
  misc_RNA (1)...(19): siRNA sense strand
cgaaaucugggcuuugaga

SEQ ID NO: 1819392 - RNA, 19 nt, Homo sapiens
  misc_RNA (1)...(19): siRNA sense strand
uacaggagcacggcaguua

SEQ ID NO: 1819393 - RNA, 19 nt, Homo sapiens
  misc_RNA (1)...(19): siRNA sense strand
ucagggaggaggaagauga

SEQ ID NO: 1819394 - RNA, 19 nt, Homo sapiens
  misc_RNA (1)...(19): siRNA sense strand
caaagagagguuccacaug

SEQ ID NO: 1819395 - RNA, 19 nt, Homo sapiens
  misc_RNA (1)...(19): siRNA sense strand
gcugauugccgcucggaaa

SEQ ID NO: 1819396 - RNA, 19 nt, Homo sapiens
  misc_RNA (1)...(19): siRNA sense strand
uaagcugaccacagaguuu

SEQ ID NO: 1819397 - RNA, 19 nt, Homo sapiens
  misc_RNA (1)...(19): siRNA sense strand
ucgacuggcuccugagaga

SEQ ID NO: 1819398 - RNA, 19 nt, Homo sapiens
  misc_RNA (1)...(19): siRNA sense strand
ggcaguaugcggucuauca

SEQ ID NO: 1819399 - RNA, 19 nt, Homo sapiens
  misc_RNA (1)...(19): siRNA sense strand
uuugagacgucagccuuua

SEQ ID NO: 1819400 - RNA, 19 nt, Homo sapiens
  misc_RNA (1)...(19): siRNA sense strand
ggacgcagaaggccacauc

SEQ ID NO: 1819401 - RNA, 19 nt, Homo sapiens
  misc_RNA (1)...(19): siRNA sense strand
ugagagagaauucaucaag

SEQ ID NO: 1819402 - RNA, 19 nt, Homo sapiens
  misc_RNA (1)...(19): siRNA sense strand
acgaggacguggacuucua

SEQ ID NO: 1819403 - RNA, 19 nt, Homo sapiens
  misc_RNA (1)...(19): siRNA sense strand
ucaaagagagguuccacau

SEQ ID NO: 1819404 - RNA, 19 nt, Homo sapiens
  misc_RNA (1)...(19): siRNA sense strand
cgacauguucaacuacuau

SEQ ID NO: 1819405 - RNA, 19 nt, Homo sapiens
  misc_RNA (1)...(19): siRNA sense strand
gguacugcuuggucugcua

SEQ ID NO: 1819406 - RNA, 19 nt, Homo sapiens
  misc_RNA (1)...(19): siRNA sense strand
caacgaggacguggacuuc

SEQ ID NO: 1819407 - RNA, 19 nt, Homo sapiens
  misc_RNA (1)...(19): siRNA sense strand
ugacauaggcgagcugcaa

SEQ ID NO: 1819408 - RNA, 19 nt, Homo sapiens
  misc_RNA (1)...(19): siRNA sense strand
cucccuaccugauuuaugu

SEQ ID NO: 1819409 - RNA, 19 nt, Homo sapiens
  misc_RNA (1)...(19): siRNA sense strand
gcugcccacugcuggcuuu

SEQ ID NO: 1819410 - RNA, 19 nt, Homo sapiens
  misc_RNA (1)...(19): siRNA sense strand
ucucccugcucaaccauaa

SEQ ID NO: 1819411 - RNA, 19 nt, Homo sapiens
  misc_RNA (1)...(19): siRNA sense strand
uuacaccacugaggcauuc

SEQ ID NO: 1819412 - RNA, 19 nt, Homo sapiens
  misc_RNA (1)...(19): siRNA sense strand
caacuucugagcccacuuc

SEQ ID NO: 1819413 - RNA, 19 nt, Homo sapiens
  misc_RNA (1)...(19): siRNA sense strand
ggcagaacaacucagcuaa

SEQ ID NO: 1819414 - RNA, 19 nt, Homo sapiens
  misc_RNA (1)...(19): siRNA sense strand
cuaccugauuuauguggaa

SEQ ID NO: 1819415 - RNA, 19 nt, Homo sapiens
  misc_RNA (1)...(19): siRNA sense strand
ccaaggagccuggaguaca

SEQ ID NO: 1819416 - RNA, 19 nt, Homo sapiens
  misc_RNA (1)...(19): siRNA sense strand
gagaucaugcagcaagguu

SEQ ID NO: 1819417 - RNA, 19 nt, Homo sapiens
  misc_RNA (1)...(19): siRNA sense strand
cagcucuccuugcucgauu

SEQ ID NO: 1819418 - RNA, 19 nt, Homo sapiens
  misc_RNA (1)...(19): siRNA sense strand
gccauuaagcccuacauag

SEQ ID NO: 1819419 - RNA, 19 nt, Homo sapiens
  misc_RNA (1)...(19): siRNA sense strand
gacauguucaacuacuaua

SEQ ID NO: 1819420 - RNA, 19 nt, Homo sapiens
  misc_RNA (1)...(19): siRNA sense strand
ucuccuugcucgauuacuu

SEQ ID NO: 1819421 - RNA, 19 nt, Homo sapiens
  misc_RNA (1)...(19): siRNA sense strand
uccaucaggugaagaaaca

SEQ ID NO: 1819422 - RNA, 19 nt, Homo sapiens
  misc_RNA (1)...(19): siRNA sense strand
ccaaagagcagaaaacaca

SEQ ID NO: 1819423 - RNA, 19 nt, Homo sapiens
  misc_RNA (1)...(19): siRNA sense strand
caucgacuuuggcuucauc

SEQ ID NO: 1819424 - RNA, 19 nt, Homo sapiens
  misc_RNA (1)...(19): siRNA sense strand
gaucagggaggaggaagau

SEQ ID NO: 1819425 - RNA, 19 nt, Homo sapiens
  misc_RNA (1)...(19): siRNA sense strand
gaaaacaacuggaagauua

SEQ ID NO: 1819426 - RNA, 19 nt, Homo sapiens
  misc_RNA (1)...(19): siRNA sense strand
uaacugagcuuaucuaugu

SEQ ID NO: 1819427 - RNA, 19 nt, Homo sapiens
  misc_RNA (1)...(19): siRNA sense strand
gaagaacaauuccuuggua

SEQ ID NO: 1819428 - RNA, 19 nt, Homo sapiens
  misc_RNA (1)...(19): siRNA sense strand
gaagauuacuugacaaaga

SEQ ID NO: 1819429 - RNA, 19 nt, Homo sapiens
  misc_RNA (1)...(19): siRNA sense strand
caacagaguuucuugauau

SEQ ID NO: 1819430 - RNA, 19 nt, Homo sapiens
  misc_RNA (1)...(19): siRNA sense strand
ggaaaggacuacugcaauu

SEQ ID NO: 1819431 - RNA, 19 nt, Homo sapiens
  misc_RNA (1)...(19): siRNA sense strand
gguaaucaguggauaaauu

SEQ ID NO: 1819432 - RNA, 19 nt, Homo sapiens
  misc_RNA (1)...(19): siRNA sense strand
guaccaagcuggccgguuu

SEQ ID NO: 1819433 - RNA, 19 nt, Homo sapiens
  misc_RNA (1)...(19): siRNA sense strand
ucucaaagaucaucgauuu

SEQ ID NO: 1819434 - RNA, 19 nt, Homo sapiens
  misc_RNA (1)...(19): siRNA sense strand
caacaaggguaccaaguau

SEQ ID NO: 1819435 - RNA, 19 nt, Homo sapiens
  misc_RNA (1)...(19): siRNA sense strand
gauaagagaagaacaauuc

SEQ ID NO: 1819436 - RNA, 19 nt, Homo sapiens
  misc_RNA (1)...(19): siRNA sense strand
gaaaugcucuacaggcaau

SEQ ID NO: 1819437 - RNA, 19 nt, Homo sapiens
  misc_RNA (1)...(19): siRNA sense strand
ggagugaggaucuucauaa

SEQ ID NO: 1819438 - RNA, 19 nt, Homo sapiens
  misc_RNA (1)...(19): siRNA sense strand
gagaacagcaggcacuaua

SEQ ID NO: 1819439 - RNA, 19 nt, Homo sapiens
  misc_RNA (1)...(19): siRNA sense strand
ggaagagccugcuacagau

SEQ ID NO: 1819440 - RNA, 19 nt, Homo sapiens
  misc_RNA (1)...(19): siRNA sense strand
gaaaauugcugcugacaug

SEQ ID NO: 1819441 - RNA, 19 nt, Homo sapiens
  misc_RNA (1)...(19): siRNA sense strand
gggaagagccugcuacaga

SEQ ID NO: 1819442 - RNA, 19 nt, Homo sapiens
  misc_RNA (1)...(19): siRNA sense strand
ccauggagguuuggacuua

SEQ ID NO: 1819443 - RNA, 19 nt, Homo sapiens
  misc_RNA (1)...(19): siRNA sense strand
gacagcaccuccaguuauu

SEQ ID NO: 1819444 - RNA, 19 nt, Homo sapiens
  misc_RNA (1)...(19): siRNA sense strand
gaacaauuccuugguagaa

SEQ ID NO: 1819445 - RNA, 19 nt, Homo sapiens
  misc_RNA (1)...(19): siRNA sense strand
guggaacgcuucacaucua

SEQ ID NO: 1819446 - RNA, 19 nt, Homo sapiens
  misc_RNA (1)...(19): siRNA sense strand
gaaggcggcucgugaugug

SEQ ID NO: 1819447 - RNA, 19 nt, Homo sapiens
  misc_RNA (1)...(19): siRNA sense strand
ggauugaccuggccuaugg

SEQ ID NO: 1819448 - RNA, 19 nt, Homo sapiens
  misc_RNA (1)...(19): siRNA sense strand
gcaauggagucuauggaau

SEQ ID NO: 1819449 - RNA, 19 nt, Homo sapiens
  misc_RNA (1)...(19): siRNA sense strand
caagauaggcgaugccauu

SEQ ID NO: 1819450 - RNA, 19 nt, Homo sapiens
  misc_RNA (1)...(19): siRNA sense strand
ccagaaaucuuccugaaac

SEQ ID NO: 1819451 - RNA, 19 nt, Homo sapiens
  misc_RNA (1)...(19): siRNA sense strand
gaaaggacuacugcaauuu

SEQ ID NO: 1819452 - RNA, 19 nt, Homo sapiens
  misc_RNA (1)...(19): siRNA sense strand
gaaggugggacgacaauga

SEQ ID NO: 1819453 - RNA, 19 nt, Homo sapiens
  misc_RNA (1)...(19): siRNA sense strand
ucauaaugcucuacaaaga

SEQ ID NO: 1819454 - RNA, 19 nt, Homo sapiens
  misc_RNA (1)...(19): siRNA sense strand
ccuuaagacucaaagauaa

SEQ ID NO: 1819455 - RNA, 19 nt, Homo sapiens
  misc_RNA (1)...(19): siRNA sense strand
acaaggguaccaaguauua

SEQ ID NO: 1819456 - RNA, 19 nt, Homo sapiens
  misc_RNA (1)...(19): siRNA sense strand
acaacagaguuucuugaua

SEQ ID NO: 1819457 - RNA, 19 nt, Homo sapiens
  misc_RNA (1)...(19): siRNA sense strand
uauaaacaagcccguauua

SEQ ID NO: 1819458 - RNA, 19 nt, Homo sapiens
  misc_RNA (1)...(19): siRNA sense strand
ggacugcauucuuaaacga

SEQ ID NO: 1819459 - RNA, 19 nt, Homo sapiens
  misc_RNA (1)...(19): siRNA sense strand
uauggaauccgaauugaua

SEQ ID NO: 1819460 - RNA, 19 nt, Homo sapiens
  misc_RNA (1)...(19): siRNA sense strand
gaaggagacagaaacgaaa

SEQ ID NO: 1819461 - RNA, 19 nt, Homo sapiens
  misc_RNA (1)...(19): siRNA sense strand
uaaggaagaucccauucga

SEQ ID NO: 1819462 - RNA, 19 nt, Homo sapiens
  misc_RNA (1)...(19): siRNA sense strand
aaggaaaccuaguaacuga

SEQ ID NO: 1819463 - RNA, 19 nt, Homo sapiens
  misc_RNA (1)...(19): siRNA sense strand
uagaagaauucauccagaa

SEQ ID NO: 1819464 - RNA, 19 nt, Homo sapiens
  misc_RNA (1)...(19): siRNA sense strand
gaagaguauugaugaugug

SEQ ID NO: 1819465 - RNA, 19 nt, Homo sapiens
  misc_RNA (1)...(19): siRNA sense strand
ccggguauaugucgugaua

SEQ ID NO: 1819466 - RNA, 19 nt, Homo sapiens
  misc_RNA (1)...(19): siRNA sense strand
gugaggaucuucauaaugc

SEQ ID NO: 1819467 - RNA, 19 nt, Homo sapiens
  misc_RNA (1)...(19): siRNA sense strand
ggauuuaaggagccuaaua

SEQ ID NO: 1819468 - RNA, 19 nt, Homo sapiens
  misc_RNA (1)...(19): siRNA sense strand
cacagcaaguuguuaauug

SEQ ID NO: 1819469 - RNA, 19 nt, Homo sapiens
  misc_RNA (1)...(19): siRNA sense strand
gaaggaaaccuaguaacug

SEQ ID NO: 1819470 - RNA, 19 nt, Homo sapiens
  misc_RNA (1)...(19): siRNA sense strand
ugauuggucugcugguaua

SEQ ID NO: 1819471 - RNA, 19 nt, Homo sapiens
  misc_RNA (1)...(19): siRNA sense strand
ggacgacaaugagcacaga

SEQ ID NO: 1819472 - RNA, 19 nt, Homo sapiens
  misc_RNA (1)...(19): siRNA sense strand
caaagggcauagaagguau

SEQ ID NO: 1819473 - RNA, 19 nt, Homo sapiens
  misc_RNA (1)...(19): siRNA sense strand
cagcugagagacuuuauaa

SEQ ID NO: 1819474 - RNA, 19 nt, Homo sapiens
  misc_RNA (1)...(19): siRNA sense strand
gaauaggaaagccaagaaa

SEQ ID NO: 1819475 - RNA, 19 nt, Homo sapiens
  misc_RNA (1)...(19): siRNA sense strand
ccaaagggcauagaaggua

SEQ ID NO: 1819476 - RNA, 19 nt, Homo sapiens
  misc_RNA (1)...(19): siRNA sense strand
augcagagcucgaaggaaa

SEQ ID NO: 1819477 - RNA, 19 nt, Homo sapiens
  misc_RNA (1)...(19): siRNA sense strand
gagugaggaucuucauaau

SEQ ID NO: 1819478 - RNA, 19 nt, Homo sapiens
  misc_RNA (1)...(19): siRNA sense strand
gaaacauggcaccaacuuu

SEQ ID NO: 1819479 - RNA, 19 nt, Homo sapiens
  misc_RNA (1)...(19): siRNA sense strand
gaaauauggaauccgaauu

SEQ ID NO: 1819480 - RNA, 19 nt, Homo sapiens
  misc_RNA (1)...(19): siRNA sense strand
gauuuaaggagccuaauau

SEQ ID NO: 1819481 - RNA, 19 nt, Homo sapiens
  misc_RNA (1)...(19): siRNA sense strand
ucccagcgaucccaagaua

SEQ ID NO: 1819482 - RNA, 19 nt, Homo sapiens
  misc_RNA (1)...(19): siRNA sense strand
gggaaagcgugacagugaa

SEQ ID NO: 1819483 - RNA, 19 nt, Homo sapiens
  misc_RNA (1)...(19): siRNA sense strand
gaacagcaggcacuauauc

SEQ ID NO: 1819484 - RNA, 19 nt, Homo sapiens
  misc_RNA (1)...(19): siRNA sense strand
ggaauaggaaagccaagaa

SEQ ID NO: 1819485 - RNA, 19 nt, Homo sapiens
  misc_RNA (1)...(19): siRNA sense strand
ugagaagcuugucaucauu

SEQ ID NO: 1819486 - RNA, 19 nt, Homo sapiens
  misc_RNA (1)...(19): siRNA sense strand
gcgucuacaucccaacaua

SEQ ID NO: 1819487 - RNA, 19 nt, Homo sapiens
  misc_RNA (1)...(19): siRNA sense strand
aagaggaaauucaagcauu

SEQ ID NO: 1819488 - RNA, 19 nt, Homo sapiens
  misc_RNA (1)...(19): siRNA sense strand
gauauaagccagcugucuu

SEQ ID NO: 1819489 - RNA, 19 nt, Homo sapiens
  misc_RNA (1)...(19): siRNA sense strand
gcucgaaggaaaccuagua

SEQ ID NO: 1819490 - RNA, 19 nt, Homo sapiens
  misc_RNA (1)...(19): siRNA sense strand
aagcugugcugaugacaaa

SEQ ID NO: 1819491 - RNA, 19 nt, Homo sapiens
  misc_RNA (1)...(19): siRNA sense strand
gauagcaucagcagcauug

SEQ ID NO: 1819492 - RNA, 19 nt, Homo sapiens
  misc_RNA (1)...(19): siRNA sense strand
caaauuuagucucuacaag

SEQ ID NO: 1819493 - RNA, 19 nt, Homo sapiens
  misc_RNA (1)...(19): siRNA sense strand
acauaaaggugaugagaca

SEQ ID NO: 1819494 - RNA, 19 nt, Homo sapiens
  misc_RNA (1)...(19): siRNA sense strand
cuauagaagucaucacaau

SEQ ID NO: 1819495 - RNA, 19 nt, Homo sapiens
  misc_RNA (1)...(19): siRNA sense strand
gaauucauccagaaacaug

SEQ ID NO: 1819496 - RNA, 19 nt, Homo sapiens
  misc_RNA (1)...(19): siRNA sense strand
ggaaagcgugacagugaaa

SEQ ID NO: 1819497 - RNA, 19 nt, Homo sapiens
  misc_RNA (1)...(19): siRNA sense strand
uuaaggagccuaauauaca

SEQ ID NO: 1819498 - RNA, 19 nt, Homo sapiens
  misc_RNA (1)...(19): siRNA sense strand
agaagaguauugaugaugu

SEQ ID NO: 1819499 - RNA, 19 nt, Homo sapiens
  misc_RNA (1)...(19): siRNA sense strand
gaagauguggcaaaugcaa

SEQ ID NO: 1819500 - RNA, 19 nt, Homo sapiens
  misc_RNA (1)...(19): siRNA sense strand
gcuaaaugguauguuaaug

SEQ ID NO: 1819501 - RNA, 19 nt, Homo sapiens
  misc_RNA (1)...(19): siRNA sense strand
gaaacuaucaugccacaac

SEQ ID NO: 1819502 - RNA, 19 nt, Homo sapiens
  misc_RNA (1)...(19): siRNA sense strand
gaccaaagaggccauagug

SEQ ID NO: 1819503 - RNA, 19 nt, Homo sapiens
  misc_RNA (1)...(19): siRNA sense strand
gcugagagacuuuauaaac

SEQ ID NO: 1819504 - RNA, 19 nt, Homo sapiens
  misc_RNA (1)...(19): siRNA sense strand
aaauaucggucccuuucuu

SEQ ID NO: 1819505 - RNA, 19 nt, Homo sapiens
  misc_RNA (1)...(19): siRNA sense strand
cuacugcaauuucgucuuc

SEQ ID NO: 1819506 - RNA, 19 nt, Homo sapiens
  misc_RNA (1)...(19): siRNA sense strand
aaaaugagccuguucaaaa

SEQ ID NO: 1819507 - RNA, 19 nt, Homo sapiens
  misc_RNA (1)...(19): siRNA sense strand
caacauaaaggugaugaga

SEQ ID NO: 1819508 - RNA, 19 nt, Homo sapiens
  misc_RNA (1)...(19): siRNA sense strand
caagagaaugcuuuagcua

SEQ ID NO: 1819509 - RNA, 19 nt, Homo sapiens
  misc_RNA (1)...(19): siRNA sense strand
gaauaccaggcuugaauug

SEQ ID NO: 1819510 - RNA, 19 nt, Homo sapiens
  misc_RNA (1)...(19): siRNA sense strand
gaugguuaauagugaaaga

SEQ ID NO: 1819511 - RNA, 19 nt, Homo sapiens
  misc_RNA (1)...(19): siRNA sense strand
guccagaaaucuuccugaa

SEQ ID NO: 1819512 - RNA, 19 nt, Homo sapiens
  misc_RNA (1)...(19): siRNA sense strand
agaggcaaaugaagagauu

SEQ ID NO: 1819513 - RNA, 19 nt, Homo sapiens
  misc_RNA (1)...(19): siRNA sense strand
aaacauggcaccaacuuuc

SEQ ID NO: 1819514 - RNA, 19 nt, Homo sapiens
  misc_RNA (1)...(19): siRNA sense strand
cucgagagaugcccaguuu

SEQ ID NO: 1819515 - RNA, 19 nt, Homo sapiens
  misc_RNA (1)...(19): siRNA sense strand
cguauuagcuaaggaagau

SEQ ID NO: 1819516 - RNA, 19 nt, Homo sapiens
  misc_RNA (1)...(19): siRNA sense strand
ggucugcugguauaaagua

SEQ ID NO: 1819517 - RNA, 19 nt, Homo sapiens
  misc_RNA (1)...(19): siRNA sense strand
cagaauaccaggcuugaau

SEQ ID NO: 1819518 - RNA, 19 nt, Homo sapiens
  misc_RNA (1)...(19): siRNA sense strand
agacagaaacgaaauaugg

SEQ ID NO: 1819519 - RNA, 19 nt, Homo sapiens
  misc_RNA (1)...(19): siRNA sense strand
aggaggaacugaagaagau

SEQ ID NO: 1819520 - RNA, 19 nt, Homo sapiens
  misc_RNA (1)...(19): siRNA sense strand
cugagagacuuuauaaaca

SEQ ID NO: 1819521 - RNA, 19 nt, Homo sapiens
  misc_RNA (1)...(19): siRNA sense strand
ugacagcaccuccaguuau

SEQ ID NO: 1819522 - RNA, 19 nt, Homo sapiens
  misc_RNA (1)...(19): siRNA sense strand
gcucuuggcaucaauagug

SEQ ID NO: 1819523 - RNA, 19 nt, Homo sapiens
  misc_RNA (1)...(19): siRNA sense strand
agguuggacugcauucuua

SEQ ID NO: 1819524 - RNA, 19 nt, Homo sapiens
  misc_RNA (1)...(19): siRNA sense strand
caauggaagaggcaaauga

SEQ ID NO: 1819525 - RNA, 19 nt, Homo sapiens
  misc_RNA (1)...(19): siRNA sense strand
uagccacgcugaagaaugg

SEQ ID NO: 1819526 - RNA, 19 nt, Homo sapiens
  misc_RNA (1)...(19): siRNA sense strand
gcgcugaagcugaagaaga

SEQ ID NO: 1819527 - RNA, 19 nt, Homo sapiens
  misc_RNA (1)...(19): siRNA sense strand
cgcugaagcugaagaagau

SEQ ID NO: 1819528 - RNA, 19 nt, Homo sapiens
  misc_RNA (1)...(19): siRNA sense strand
ugauagccacgcugaagaa

SEQ ID NO: 1819529 - RNA, 19 nt, Homo sapiens
  misc_RNA (1)...(19): siRNA sense strand
cugcagugccuguguguga

SEQ ID NO: 1819530 - RNA, 19 nt, Homo sapiens
  misc_RNA (1)...(19): siRNA sense strand
ggaccugcagugccugugu

SEQ ID NO: 1819531 - RNA, 19 nt, Homo sapiens
  misc_RNA (1)...(19): siRNA sense strand
aggaacauuuggagaguua

SEQ ID NO: 1819532 - RNA, 19 nt, Homo sapiens
  misc_RNA (1)...(19): siRNA sense strand
gccaggagaugcuguucuu

SEQ ID NO: 1819533 - RNA, 19 nt, Homo sapiens
  misc_RNA (1)...(19): siRNA sense strand
uagccacgcugaagaaugg

SEQ ID NO: 1819534 - RNA, 19 nt, Homo sapiens
  misc_RNA (1)...(19): siRNA sense strand
uaaggaacauuuggagagu

SEQ ID NO: 1819535 - RNA, 19 nt, Homo sapiens
  misc_RNA (1)...(19): siRNA sense strand
gcugaagaaugggaggaaa

SEQ ID NO: 1819536 - RNA, 19 nt, Homo sapiens
  misc_RNA (1)...(19): siRNA sense strand
ugcaagcccugcuguacaa

SEQ ID NO: 1819537 - RNA, 19 nt, Homo sapiens
  misc_RNA (1)...(19): siRNA sense strand
gaggaaaauuugcuuggau

SEQ ID NO: 1819538 - RNA, 19 nt, Homo sapiens
  misc_RNA (1)...(19): siRNA sense strand
aagcccugcuguacaagaa

SEQ ID NO: 1819539 - RNA, 19 nt, Homo sapiens
  misc_RNA (1)...(19): siRNA sense strand
ucauagccacgcugaagaa

SEQ ID NO: 1819540 - RNA, 19 nt, Homo sapiens
  misc_RNA (1)...(19): siRNA sense strand
cugcagugccuguguguga

SEQ ID NO: 1819541 - RNA, 19 nt, Homo sapiens
  misc_RNA (1)...(19): siRNA sense strand
ggaggaaaauuugcuugga

SEQ ID NO: 1819542 - RNA, 19 nt, Homo sapiens
  misc_RNA (1)...(19): siRNA sense strand
ggaccugcagugccugugu

SEQ ID NO: 1819543 - RNA, 19 nt, Homo sapiens
  misc_RNA (1)...(19): siRNA sense strand
aagaaugggaggaaaauuu

SEQ ID NO: 1819544 - RNA, 19 nt, Homo sapiens
  misc_RNA (1)...(19): siRNA sense strand
gcagaaaccuuaucaccaa

SEQ ID NO: 1819545 - RNA, 19 nt, Homo sapiens
  misc_RNA (1)...(19): siRNA sense strand
gaagacaugugcaauuaca

SEQ ID NO: 1819546 - RNA, 19 nt, Homo sapiens
  misc_RNA (1)...(19): siRNA sense strand
gaugguagcagaaaccuua

SEQ ID NO: 1819547 - RNA, 19 nt, Homo sapiens
  misc_RNA (1)...(19): siRNA sense strand
ggagcugacuucuuccaaa

SEQ ID NO: 1819548 - RNA, 19 nt, Homo sapiens
  misc_RNA (1)...(19): siRNA sense strand
cacgagaacugcugucuga

SEQ ID NO: 1819549 - RNA, 19 nt, Homo sapiens
  misc_RNA (1)...(19): siRNA sense strand
gaagcuggaauucguauga

SEQ ID NO: 1819550 - RNA, 19 nt, Homo sapiens
  misc_RNA (1)...(19): siRNA sense strand
augaagacaugugcaauua

SEQ ID NO: 1819551 - RNA, 19 nt, Homo sapiens
  misc_RNA (1)...(19): siRNA sense strand
gcaccaccauacccacauu

SEQ ID NO: 1819552 - RNA, 19 nt, Homo sapiens
  misc_RNA (1)...(19): siRNA sense strand
acagagggcugcacgaugu

SEQ ID NO: 1819553 - RNA, 19 nt, Homo sapiens
  misc_RNA (1)...(19): siRNA sense strand
ggaaugcugucaugaagac

SEQ ID NO: 1819554 - RNA, 19 nt, Homo sapiens
  misc_RNA (1)...(19): siRNA sense strand
gaaacagguaucagcauga

SEQ ID NO: 1819555 - RNA, 19 nt, Homo sapiens
  misc_RNA (1)...(19): siRNA sense strand
gcagaccucagcaacgaua

SEQ ID NO: 1819556 - RNA, 19 nt, Homo sapiens
  misc_RNA (1)...(19): siRNA sense strand
gagcugacuucuuccaaag

SEQ ID NO: 1819557 - RNA, 19 nt, Homo sapiens
  misc_RNA (1)...(19): siRNA sense strand
auaagaggcugcaggauca

SEQ ID NO: 1819558 - RNA, 19 nt, Homo sapiens
  misc_RNA (1)...(19): siRNA sense strand
gguuauauguguaaaucug

SEQ ID NO: 1819559 - RNA, 19 nt, Homo sapiens
  misc_RNA (1)...(19): siRNA sense strand
ugcaggagcugacuucuuc

SEQ ID NO: 1819560 - RNA, 19 nt, Homo sapiens
  misc_RNA (1)...(19): siRNA sense strand
gaggaugcuucgaagugaa

SEQ ID NO: 1819561 - RNA, 19 nt, Homo sapiens
  misc_RNA (1)...(19): siRNA sense strand
ugaggaugcuucgaaguga

SEQ ID NO: 1819562 - RNA, 19 nt, Homo sapiens
  misc_RNA (1)...(19): siRNA sense strand
gcucagcgccugcuucucu

SEQ ID NO: 1819563 - RNA, 19 nt, Homo sapiens
  misc_RNA (1)...(19): siRNA sense strand
ucacggacaccauuccaaa

SEQ ID NO: 1819564 - RNA, 19 nt, Homo sapiens
  misc_RNA (1)...(19): siRNA sense strand
gaucgccacuccagcuaca

SEQ ID NO: 1819565 - RNA, 19 nt, Homo sapiens
  misc_RNA (1)...(19): siRNA sense strand
ccacugguuauauguguaa

SEQ ID NO: 1819566 - RNA, 19 nt, Homo sapiens
  misc_RNA (1)...(19): siRNA sense strand
aagcagaccucagcaacga

SEQ ID NO: 1819567 - RNA, 19 nt, Homo sapiens
  misc_RNA (1)...(19): siRNA sense strand
aacagaugcucucccguuu

SEQ ID NO: 1819568 - RNA, 19 nt, Homo sapiens
  misc_RNA (1)...(19): siRNA sense strand
caccauacccacauuggaa

SEQ ID NO: 1819569 - RNA, 19 nt, Homo sapiens
  misc_RNA (1)...(19): siRNA sense strand
ggacaaggaaacagguauc

SEQ ID NO: 1819570 - RNA, 19 nt, Homo sapiens
  misc_RNA (1)...(19): siRNA sense strand
uguagccacugguuauaug

SEQ ID NO: 1819571 - RNA, 19 nt, Homo sapiens
  misc_RNA (1)...(19): siRNA sense strand
aagauccucucgcuuguuc

SEQ ID NO: 1819572 - RNA, 19 nt, Homo sapiens
  misc_RNA (1)...(19): siRNA sense strand
ccagcuacaucuucaucug

SEQ ID NO: 1819573 - RNA, 19 nt, Homo sapiens
  misc_RNA (1)...(19): siRNA sense strand
cagaugcucucccguuugc

SEQ ID NO: 1819574 - RNA, 19 nt, Homo sapiens
  misc_RNA (1)...(19): siRNA sense strand
agacaucugccaagccaaa

SEQ ID NO: 1819575 - RNA, 19 nt, Homo sapiens
  misc_RNA (1)...(19): siRNA sense strand
gguagcagaaaccuuauca

SEQ ID NO: 1819576 - RNA, 19 nt, Homo sapiens
  misc_RNA (1)...(19): siRNA sense strand
gauccucagaacucaaauu

SEQ ID NO: 1819577 - RNA, 19 nt, Homo sapiens
  misc_RNA (1)...(19): siRNA sense strand
aaggugaaauucgaugcua

SEQ ID NO: 1819578 - RNA, 19 nt, Homo sapiens
  misc_RNA (1)...(19): siRNA sense strand
gccacugguuauaugugua

SEQ ID NO: 1819579 - RNA, 19 nt, Homo sapiens
  misc_RNA (1)...(19): siRNA sense strand
gcacgggaagcuggaauuc

SEQ ID NO: 1819580 - RNA, 19 nt, Homo sapiens
  misc_RNA (1)...(19): siRNA sense strand
ggucauugccgugcccauu

SEQ ID NO: 1819581 - RNA, 19 nt, Homo sapiens
  misc_RNA (1)...(19): siRNA sense strand
agacaugugcaauuacaga

SEQ ID NO: 1819582 - RNA, 19 nt, Homo sapiens
  misc_RNA (1)...(19): siRNA sense strand
gcccugaggaugcuucgaa

SEQ ID NO: 1819583 - RNA, 19 nt, Homo sapiens
  misc_RNA (1)...(19): siRNA sense strand
gcugcacgauguucucucu

SEQ ID NO: 1819584 - RNA, 19 nt, Homo sapiens
  misc_RNA (1)...(19): siRNA sense strand
ugucugaccugugauaaaa

SEQ ID NO: 1819585 - RNA, 19 nt, Homo sapiens
  misc_RNA (1)...(19): siRNA sense strand
gagcucagcgccugcuucu

SEQ ID NO: 1819586 - RNA, 19 nt, Homo sapiens
  misc_RNA (1)...(19): siRNA sense strand
gaccucagcaacgauaaga

SEQ ID NO: 1819587 - RNA, 19 nt, Homo sapiens
  misc_RNA (1)...(19): siRNA sense strand
ggggcagguugcaaaguua

SEQ ID NO: 1819588 - RNA, 19 nt, Homo sapiens
  misc_RNA (1)...(19): siRNA sense strand
gacaaggaaacagguauca

SEQ ID NO: 1819589 - RNA, 19 nt, Homo sapiens
  misc_RNA (1)...(19): siRNA sense strand
auaagauccucucgcuugu

SEQ ID NO: 1819590 - RNA, 19 nt, Homo sapiens
  misc_RNA (1)...(19): siRNA sense strand
ccacuccagcuacaucuuc

SEQ ID NO: 1819591 - RNA, 19 nt, Homo sapiens
  misc_RNA (1)...(19): siRNA sense strand
cugcuucucuagacuucuu

SEQ ID NO: 1819592 - RNA, 19 nt, Homo sapiens
  misc_RNA (1)...(19): siRNA sense strand
acugcugucugaccuguga

SEQ ID NO: 1819593 - RNA, 19 nt, Homo sapiens
  misc_RNA (1)...(19): siRNA sense strand
cugguuauauguguaaauc

SEQ ID NO: 1819594 - RNA, 19 nt, Homo sapiens
  misc_RNA (1)...(19): siRNA sense strand
gcaugaugguagcagaaac

SEQ ID NO: 1819595 - RNA, 19 nt, Homo sapiens
  misc_RNA (1)...(19): siRNA sense strand
ugccuggacucucuugcaa

SEQ ID NO: 1819596 - RNA, 19 nt, Homo sapiens
  misc_RNA (1)...(19): siRNA sense strand
caggaucagcggcaacaga

SEQ ID NO: 1819597 - RNA, 19 nt, Homo sapiens
  misc_RNA (1)...(19): siRNA sense strand
gacaagcagaccucagcaa

SEQ ID NO: 1819598 - RNA, 19 nt, Homo sapiens
  misc_RNA (1)...(19): siRNA sense strand
uuggaaugcugucaugaag

SEQ ID NO: 1819599 - RNA, 19 nt, Homo sapiens
  misc_RNA (1)...(19): siRNA sense strand
gggaagcuggaauucguau

SEQ ID NO: 1819600 - RNA, 19 nt, Homo sapiens
  misc_RNA (1)...(19): siRNA sense strand
caggacaaggaaacaggua

SEQ ID NO: 1819601 - RNA, 19 nt, Homo sapiens
  misc_RNA (1)...(19): siRNA sense strand
acgggaagcuggaauucgu

SEQ ID NO: 1819602 - RNA, 19 nt, Homo sapiens
  misc_RNA (1)...(19): siRNA sense strand
ccucagcaacgauaagauc

SEQ ID NO: 1819603 - RNA, 19 nt, Homo sapiens
  misc_RNA (1)...(19): siRNA sense strand
ugaaauucgaugcuacugu

SEQ ID NO: 1819604 - RNA, 19 nt, Homo sapiens
  misc_RNA (1)...(19): siRNA sense strand
gugcaggagcugacuucuu

SEQ ID NO: 1819605 - RNA, 19 nt, Homo sapiens
  misc_RNA (1)...(19): siRNA sense strand
ggacaucgauggacgcauu

SEQ ID NO: 1819606 - RNA, 19 nt, Homo sapiens
  misc_RNA (1)...(19): siRNA sense strand
ggcaagacaugcagaaauu

SEQ ID NO: 1819607 - RNA, 19 nt, Homo sapiens
  misc_RNA (1)...(19): siRNA sense strand
ggagguggcuguucugugu

SEQ ID NO: 1819608 - RNA, 19 nt, Homo sapiens
  misc_RNA (1)...(19): siRNA sense strand
ugaaagaguuacagaagaa

SEQ ID NO: 1819609 - RNA, 19 nt, Homo sapiens
  misc_RNA (1)...(19): siRNA sense strand
ggaaggagcauuugaaagu

SEQ ID NO: 1819610 - RNA, 19 nt, Homo sapiens
  misc_RNA (1)...(19): siRNA sense strand
gcgcaucccuccagagaga

SEQ ID NO: 1819611 - RNA, 19 nt, Homo sapiens
  misc_RNA (1)...(19): siRNA sense strand
gacgcgauguucccacuua

SEQ ID NO: 1819612 - RNA, 19 nt, Homo sapiens
  misc_RNA (1)...(19): siRNA sense strand
gaaggagcauuugaaagug

SEQ ID NO: 1819613 - RNA, 19 nt, Homo sapiens
  misc_RNA (1)...(19): siRNA sense strand
gcagagcaguucucaagag

SEQ ID NO: 1819614 - RNA, 19 nt, Homo sapiens
  misc_RNA (1)...(19): siRNA sense strand
gcaagacaugcagaaauua

SEQ ID NO: 1819615 - RNA, 19 nt, Homo sapiens
  misc_RNA (1)...(19): siRNA sense strand
gagagaagcagagauguga

SEQ ID NO: 1819616 - RNA, 19 nt, Homo sapiens
  misc_RNA (1)...(19): siRNA sense strand
ucacuuggcuguccuagag

SEQ ID NO: 1819617 - RNA, 19 nt, Homo sapiens
  misc_RNA (1)...(19): siRNA sense strand
gcaagagugacauuaagaa

SEQ ID NO: 1819618 - RNA, 19 nt, Homo sapiens
  misc_RNA (1)...(19): siRNA sense strand
ccacugacauggcaagaca

SEQ ID NO: 1819619 - RNA, 19 nt, Homo sapiens
  misc_RNA (1)...(19): siRNA sense strand
aagcugaaguugcaaauca

SEQ ID NO: 1819620 - RNA, 19 nt, Homo sapiens
  misc_RNA (1)...(19): siRNA sense strand
gcugugauaucucuaacga

SEQ ID NO: 1819621 - RNA, 19 nt, Homo sapiens
  misc_RNA (1)...(19): siRNA sense strand
gagcaguucucaagagcau

SEQ ID NO: 1819622 - RNA, 19 nt, Homo sapiens
  misc_RNA (1)...(19): siRNA sense strand
gagaagcagagaugugaaa

SEQ ID NO: 1819623 - RNA, 19 nt, Homo sapiens
  misc_RNA (1)...(19): siRNA sense strand
agagugacauuaagaagau

SEQ ID NO: 1819624 - RNA, 19 nt, Homo sapiens
  misc_RNA (1)...(19): siRNA sense strand
caacaacacguaccagauc

SEQ ID NO: 1819625 - RNA, 19 nt, Homo sapiens
  misc_RNA (1)...(19): siRNA sense strand
gauagaugacgccaugaaa

SEQ ID NO: 1819626 - RNA, 19 nt, Homo sapiens
  misc_RNA (1)...(19): siRNA sense strand
gagcugaagcggauagaug

SEQ ID NO: 1819627 - RNA, 19 nt, Homo sapiens
  misc_RNA (1)...(19): siRNA sense strand
cagauuggguucaucaagu

SEQ ID NO: 1819628 - RNA, 19 nt, Homo sapiens
  misc_RNA (1)...(19): siRNA sense strand
guucauggaccgagacaaa

SEQ ID NO: 1819629 - RNA, 19 nt, Homo sapiens
  misc_RNA (1)...(19): siRNA sense strand
caagacaugcagaaauuau

SEQ ID NO: 1819630 - RNA, 19 nt, Homo sapiens
  misc_RNA (1)...(19): siRNA sense strand
uaaaagugguggagauuga

SEQ ID NO: 1819631 - RNA, 19 nt, Homo sapiens
  misc_RNA (1)...(19): siRNA sense strand
gagggaaggagcauuugaa

SEQ ID NO: 1819632 - RNA, 19 nt, Homo sapiens
  misc_RNA (1)...(19): siRNA sense strand
ccagagagagaagaauuaa

SEQ ID NO: 1819633 - RNA, 19 nt, Homo sapiens
  misc_RNA (1)...(19): siRNA sense strand
ggauagaugacgccaugaa

SEQ ID NO: 1819634 - RNA, 19 nt, Homo sapiens
  misc_RNA (1)...(19): siRNA sense strand
gauauccugauccuaauga

SEQ ID NO: 1819635 - RNA, 19 nt, Homo sapiens
  misc_RNA (1)...(19): siRNA sense strand
gaaacgcguggaauuggaa

SEQ ID NO: 1819636 - RNA, 19 nt, Homo sapiens
  misc_RNA (1)...(19): siRNA sense strand
acugaaagcugaaguugca

SEQ ID NO: 1819637 - RNA, 19 nt, Homo sapiens
  misc_RNA (1)...(19): siRNA sense strand
agagagagaagaauuaauc

SEQ ID NO: 1819638 - RNA, 19 nt, Homo sapiens
  misc_RNA (1)...(19): siRNA sense strand
aagguaaucuucagcaagu

SEQ ID NO: 1819639 - RNA, 19 nt, Homo sapiens
  misc_RNA (1)...(19): siRNA sense strand
gcagagcgaccgugagaag

SEQ ID NO: 1819640 - RNA, 19 nt, Homo sapiens
  misc_RNA (1)...(19): siRNA sense strand
uagagaaacgcguggaauu

SEQ ID NO: 1819641 - RNA, 19 nt, Homo sapiens
  misc_RNA (1)...(19): siRNA sense strand
ggaauuggaaggacuaaaa

SEQ ID NO: 1819642 - RNA, 19 nt, Homo sapiens
  misc_RNA (1)...(19): siRNA sense strand
ggacgcauucagaagguaa

SEQ ID NO: 1819643 - RNA, 19 nt, Homo sapiens
  misc_RNA (1)...(19): siRNA sense strand
gcacaugacccugcugaag

SEQ ID NO: 1819644 - RNA, 19 nt, Homo sapiens
  misc_RNA (1)...(19): siRNA sense strand
augcagaaauuauggauuc

SEQ ID NO: 1819645 - RNA, 19 nt, Homo sapiens
  misc_RNA (1)...(19): siRNA sense strand
ugguggagauugagaaaug

SEQ ID NO: 1819646 - RNA, 19 nt, Homo sapiens
  misc_RNA (1)...(19): siRNA sense strand
ggagggaaggagcauuuga

SEQ ID NO: 1819647 - RNA, 19 nt, Homo sapiens
  misc_RNA (1)...(19): siRNA sense strand
uagaugacgccaugaaaga

SEQ ID NO: 1819648 - RNA, 19 nt, Homo sapiens
  misc_RNA (1)...(19): siRNA sense strand
gagcgaccgugagaaguca

SEQ ID NO: 1819649 - RNA, 19 nt, Homo sapiens
  misc_RNA (1)...(19): siRNA sense strand
caacaucuucuccaacauc

SEQ ID NO: 1819650 - RNA, 19 nt, Homo sapiens
  misc_RNA (1)...(19): siRNA sense strand
gaaagcugaaguugcaaau

SEQ ID NO: 1819651 - RNA, 19 nt, Homo sapiens
  misc_RNA (1)...(19): siRNA sense strand
gauaaccacaagaaguuga

SEQ ID NO: 1819652 - RNA, 19 nt, Homo sapiens
  misc_RNA (1)...(19): siRNA sense strand
agaagaagacugacagcuu

SEQ ID NO: 1819653 - RNA, 19 nt, Homo sapiens
  misc_RNA (1)...(19): siRNA sense strand
gucagggacuucagcauca

SEQ ID NO: 1819654 - RNA, 19 nt, Homo sapiens
  misc_RNA (1)...(19): siRNA sense strand
gaacgcacuccguacaaag

SEQ ID NO: 1819655 - RNA, 19 nt, Homo sapiens
  misc_RNA (1)...(19): siRNA sense strand
gguggacuguuuauuagag

SEQ ID NO: 1819656 - RNA, 19 nt, Homo sapiens
  misc_RNA (1)...(19): siRNA sense strand
uuggguggacuguuuauua

SEQ ID NO: 1819657 - RNA, 19 nt, Homo sapiens
  misc_RNA (1)...(19): siRNA sense strand
cacgacaacuacagaaaca

SEQ ID NO: 1819658 - RNA, 19 nt, Homo sapiens
  misc_RNA (1)...(19): siRNA sense strand
agaacgcacuccguacaaa

SEQ ID NO: 1819659 - RNA, 19 nt, Homo sapiens
  misc_RNA (1)...(19): siRNA sense strand
agauuggguucaucaaguu

SEQ ID NO: 1819660 - RNA, 19 nt, Homo sapiens
  misc_RNA (1)...(19): siRNA sense strand
ccgcuacaaugacaucuca

SEQ ID NO: 1819661 - RNA, 19 nt, Homo sapiens
  misc_RNA (1)...(19): siRNA sense strand
gcaguucucaagagcauuc

SEQ ID NO: 1819662 - RNA, 19 nt, Homo sapiens
  misc_RNA (1)...(19): siRNA sense strand
cgagaaguccagagagaga

SEQ ID NO: 1819663 - RNA, 19 nt, Homo sapiens
  misc_RNA (1)...(19): siRNA sense strand
cacaugacccugcugaaga

SEQ ID NO: 1819664 - RNA, 19 nt, Homo sapiens
  misc_RNA (1)...(19): siRNA sense strand
gagccugagugcaacaucu

SEQ ID NO: 1819665 - RNA, 19 nt, Homo sapiens
  misc_RNA (1)...(19): siRNA sense strand
acaaacggauauccugauc

SEQ ID NO: 1819666 - RNA, 19 nt, Homo sapiens
  misc_RNA (1)...(19): siRNA sense strand
uggauaaccacaagaaguu

SEQ ID NO: 1819667 - RNA, 19 nt, Homo sapiens
  misc_RNA (1)...(19): siRNA sense strand
gagaaacgcguggaauugg

SEQ ID NO: 1819668 - RNA, 19 nt, Homo sapiens
  misc_RNA (1)...(19): siRNA sense strand
uaacgagguccguccaaug

SEQ ID NO: 1819669 - RNA, 19 nt, Homo sapiens
  misc_RNA (1)...(19): siRNA sense strand
ucauggaccuguucugcau

SEQ ID NO: 1819670 - RNA, 19 nt, Homo sapiens
  misc_RNA (1)...(19): siRNA sense strand
ugcaacaucuucuccaaca

SEQ ID NO: 1819671 - RNA, 19 nt, Homo sapiens
  misc_RNA (1)...(19): siRNA sense strand
gaaacaaccccuuccacaa

SEQ ID NO: 1819672 - RNA, 19 nt, Homo sapiens
  misc_RNA (1)...(19): siRNA sense strand
agaaacgcguggaauugga

SEQ ID NO: 1819673 - RNA, 19 nt, Homo sapiens
  misc_RNA (1)...(19): siRNA sense strand
gagaaaugcaagagugaca

SEQ ID NO: 1819674 - RNA, 19 nt, Homo sapiens
  misc_RNA (1)...(19): siRNA sense strand
agagagagaagcagagaug

SEQ ID NO: 1819675 - RNA, 19 nt, Homo sapiens
  misc_RNA (1)...(19): siRNA sense strand
caugaaagaguuacagaag

SEQ ID NO: 1819676 - RNA, 19 nt, Homo sapiens
  misc_RNA (1)...(19): siRNA sense strand
guccugaucccaauguuug

SEQ ID NO: 1819677 - RNA, 19 nt, Homo sapiens
  misc_RNA (1)...(19): siRNA sense strand
agccuuggguggacuguuu

SEQ ID NO: 1819678 - RNA, 19 nt, Homo sapiens
  misc_RNA (1)...(19): siRNA sense strand
ucaagagcauucaaaauca

SEQ ID NO: 1819679 - RNA, 19 nt, Homo sapiens
  misc_RNA (1)...(19): siRNA sense strand
ccaucuaccuggacaucga

SEQ ID NO: 1819680 - RNA, 19 nt, Homo sapiens
  misc_RNA (1)...(19): siRNA sense strand
uggguggacuguuuauuag

SEQ ID NO: 1819681 - RNA, 19 nt, Homo sapiens
  misc_RNA (1)...(19): siRNA sense strand
agagaaacgcguggaauug

SEQ ID NO: 1819682 - RNA, 19 nt, Homo sapiens
  misc_RNA (1)...(19): siRNA sense strand
gcaacaucuucuccaacau

SEQ ID NO: 1819683 - RNA, 19 nt, Homo sapiens
  misc_RNA (1)...(19): siRNA sense strand
ccaccgagaaguccagaga

SEQ ID NO: 1819684 - RNA, 19 nt, Homo sapiens
  misc_RNA (1)...(19): siRNA sense strand
augaaagaguuacagaaga

SEQ ID NO: 1819685 - RNA, 19 nt, Homo sapiens
  misc_RNA (1)...(19): siRNA sense strand
gcauucagaagguaaucuu

SEQ ID NO: 1819686 - RNA, 19 nt, Homo sapiens
  misc_RNA (1)...(19): siRNA sense strand
caacuccagcgacaucaug

SEQ ID NO: 1819687 - RNA, 19 nt, Homo sapiens
  misc_RNA (1)...(19): siRNA sense strand
acaugacccugcugaagau

SEQ ID NO: 1819688 - RNA, 19 nt, Homo sapiens
  misc_RNA (1)...(19): siRNA sense strand
gagauugagaaaugcaaga

SEQ ID NO: 1819689 - RNA, 19 nt, Homo sapiens
  misc_RNA (1)...(19): siRNA sense strand
cagcgcaucccuccagaga

SEQ ID NO: 1819690 - RNA, 19 nt, Homo sapiens
  misc_RNA (1)...(19): siRNA sense strand
uccagagagagaagaauua

SEQ ID NO: 1819691 - RNA, 19 nt, Homo sapiens
  misc_RNA (1)...(19): siRNA sense strand
caaggccacagcccagauu

SEQ ID NO: 1819692 - RNA, 19 nt, Homo sapiens
  misc_RNA (1)...(19): siRNA sense strand
ggacuguuuauuagaggaa

SEQ ID NO: 1819693 - RNA, 19 nt, Homo sapiens
  misc_RNA (1)...(19): siRNA sense strand
gaccaucccggcuacaaca

SEQ ID NO: 1819694 - RNA, 19 nt, Homo sapiens
  misc_RNA (1)...(19): siRNA sense strand
ugagaccuguggccaucaa

SEQ ID NO: 1819695 - RNA, 19 nt, Homo sapiens
  misc_RNA (1)...(19): siRNA sense strand
caagagugacauuaagaag

SEQ ID NO: 1819696 - RNA, 19 nt, Homo sapiens
  misc_RNA (1)...(19): siRNA sense strand
cgacagggaaugaucacau

SEQ ID NO: 1819697 - RNA, 19 nt, Homo sapiens
  misc_RNA (1)...(19): siRNA sense strand
caacacguaccagaucaau

SEQ ID NO: 1819698 - RNA, 19 nt, Homo sapiens
  misc_RNA (1)...(19): siRNA sense strand
ggauaaccacaagaaguug

SEQ ID NO: 1819699 - RNA, 19 nt, Homo sapiens
  misc_RNA (1)...(19): siRNA sense strand
caagagcauucaaaaucaa

SEQ ID NO: 1819700 - RNA, 19 nt, Homo sapiens
  misc_RNA (1)...(19): siRNA sense strand
gagaaguccagagagagaa

SEQ ID NO: 1819701 - RNA, 19 nt, Homo sapiens
  misc_RNA (1)...(19): siRNA sense strand
gaggacaagagaaccacaa

SEQ ID NO: 1819702 - RNA, 19 nt, Homo sapiens
  misc_RNA (1)...(19): siRNA sense strand
ccaugaaagaguuacagaa

SEQ ID NO: 1819703 - RNA, 19 nt, Homo sapiens
  misc_RNA (1)...(19): siRNA sense strand
cuaacgagguccguccaau

SEQ ID NO: 1819704 - RNA, 19 nt, Homo sapiens
  misc_RNA (1)...(19): siRNA sense strand
uggccagucugcugagaga

SEQ ID NO: 1819705 - RNA, 19 nt, Homo sapiens
  misc_RNA (1)...(19): siRNA sense strand
caagagaccucguggagaa

SEQ ID NO: 1819706 - RNA, 19 nt, Homo sapiens
  misc_RNA (1)...(19): siRNA sense strand
gaccagaggccaagaauuu

SEQ ID NO: 1819707 - RNA, 19 nt, Homo sapiens
  misc_RNA (1)...(19): siRNA sense strand
gcucuuggaugcauaauau

SEQ ID NO: 1819708 - RNA, 19 nt, Homo sapiens
  misc_RNA (1)...(19): siRNA sense strand
ggaaacgaguaucuuauau

SEQ ID NO: 1819709 - RNA, 19 nt, Homo sapiens
  misc_RNA (1)...(19): siRNA sense strand
ggacugcuauggcaauuau

SEQ ID NO: 1819710 - RNA, 19 nt, Homo sapiens
  misc_RNA (1)...(19): siRNA sense strand
gagaagcgacauaucauaa

SEQ ID NO: 1819711 - RNA, 19 nt, Homo sapiens
  misc_RNA (1)...(19): siRNA sense strand
gaacagcgcaguacguuuc

SEQ ID NO: 1819712 - RNA, 19 nt, Homo sapiens
  misc_RNA (1)...(19): siRNA sense strand
gaucaccccuucuuuguua

SEQ ID NO: 1819713 - RNA, 19 nt, Homo sapiens
  misc_RNA (1)...(19): siRNA sense strand
gaaggauacggaccucuua

SEQ ID NO: 1819714 - RNA, 19 nt, Homo sapiens
  misc_RNA (1)...(19): siRNA sense strand
gugaggaaauggaaggaua

SEQ ID NO: 1819715 - RNA, 19 nt, Homo sapiens
  misc_RNA (1)...(19): siRNA sense strand
gcagcaacauagagcagua

SEQ ID NO: 1819716 - RNA, 19 nt, Homo sapiens
  misc_RNA (1)...(19): siRNA sense strand
caacaaaguucugaaaggu

SEQ ID NO: 1819717 - RNA, 19 nt, Homo sapiens
  misc_RNA (1)...(19): siRNA sense strand
ggagaagcgacauaucaua

SEQ ID NO: 1819718 - RNA, 19 nt, Homo sapiens
  misc_RNA (1)...(19): siRNA sense strand
caacauagagcaguacauu

SEQ ID NO: 1819719 - RNA, 19 nt, Homo sapiens
  misc_RNA (1)...(19): siRNA sense strand
ggaccacauuuauauuaug

SEQ ID NO: 1819720 - RNA, 19 nt, Homo sapiens
  misc_RNA (1)...(19): siRNA sense strand
cagaaggaccacauuuaua

SEQ ID NO: 1819721 - RNA, 19 nt, Homo sapiens
  misc_RNA (1)...(19): siRNA sense strand
cagagaauaugcgauuaaa

SEQ ID NO: 1819722 - RNA, 19 nt, Homo sapiens
  misc_RNA (1)...(19): siRNA sense strand
gcuggaaacgaguaucuua

SEQ ID NO: 1819723 - RNA, 19 nt, Homo sapiens
  misc_RNA (1)...(19): siRNA sense strand
gaaggaccacauuuauauu

SEQ ID NO: 1819724 - RNA, 19 nt, Homo sapiens
  misc_RNA (1)...(19): siRNA sense strand
gaagaucauuaaguuggaa

SEQ ID NO: 1819725 - RNA, 19 nt, Homo sapiens
  misc_RNA (1)...(19): siRNA sense strand
gaagcaggcuggcggaaac

SEQ ID NO: 1819726 - RNA, 19 nt, Homo sapiens
  misc_RNA (1)...(19): siRNA sense strand
agaaggaccacauuuauau

SEQ ID NO: 1819727 - RNA, 19 nt, Homo sapiens
  misc_RNA (1)...(19): siRNA sense strand
gaagcgacauaucauaaaa

SEQ ID NO: 1819728 - RNA, 19 nt, Homo sapiens
  misc_RNA (1)...(19): siRNA sense strand
cacagaaggaccacauuua

SEQ ID NO: 1819729 - RNA, 19 nt, Homo sapiens
  misc_RNA (1)...(19): siRNA sense strand
gaaguccgccuguaagagu

SEQ ID NO: 1819730 - RNA, 19 nt, Homo sapiens
  misc_RNA (1)...(19): siRNA sense strand
ccagagaauaugcgauuaa

SEQ ID NO: 1819731 - RNA, 19 nt, Homo sapiens
  misc_RNA (1)...(19): siRNA sense strand
auacggaccucuuaaagca

SEQ ID NO: 1819732 - RNA, 19 nt, Homo sapiens
  misc_RNA (1)...(19): siRNA sense strand
uguaagaguucagaccuuu

SEQ ID NO: 1819733 - RNA, 19 nt, Homo sapiens
  misc_RNA (1)...(19): siRNA sense strand
gaacaagguccccuaugua

SEQ ID NO: 1819734 - RNA, 19 nt, Homo sapiens
  misc_RNA (1)...(19): siRNA sense strand
ccgcuuaccugccggcuau

SEQ ID NO: 1819735 - RNA, 19 nt, Homo sapiens
  misc_RNA (1)...(19): siRNA sense strand
gcggaaggguuuauuugca

SEQ ID NO: 1819736 - RNA, 19 nt, Homo sapiens
  misc_RNA (1)...(19): siRNA sense strand
gaggucaggcagcaacaua

SEQ ID NO: 1819737 - RNA, 19 nt, Homo sapiens
  misc_RNA (1)...(19): siRNA sense strand
gauaugcacauccagauca

SEQ ID NO: 1819738 - RNA, 19 nt, Homo sapiens
  misc_RNA (1)...(19): siRNA sense strand
ucacagaaggaccacauuu

SEQ ID NO: 1819739 - RNA, 19 nt, Homo sapiens
  misc_RNA (1)...(19): siRNA sense strand
uggaaacgaguaucuuaua

SEQ ID NO: 1819740 - RNA, 19 nt, Homo sapiens
  misc_RNA (1)...(19): siRNA sense strand
gaucacagauuuuggaaca

SEQ ID NO: 1819741 - RNA, 19 nt, Homo sapiens
  misc_RNA (1)...(19): siRNA sense strand
gagaaguccgccuguaaga

SEQ ID NO: 1819742 - RNA, 19 nt, Homo sapiens
  misc_RNA (1)...(19): siRNA sense strand
ucaacaaaguucugaaagg

SEQ ID NO: 1819743 - RNA, 19 nt, Homo sapiens
  misc_RNA (1)...(19): siRNA sense strand
ggaaggauacggaccucuu

SEQ ID NO: 1819744 - RNA, 19 nt, Homo sapiens
  misc_RNA (1)...(19): siRNA sense strand
gcacggcaagggcaucauu

SEQ ID NO: 1819745 - RNA, 19 nt, Homo sapiens
  misc_RNA (1)...(19): siRNA sense strand
uggcaggacucccaccauu

SEQ ID NO: 1819746 - RNA, 19 nt, Homo sapiens
  misc_RNA (1)...(19): siRNA sense strand
acauccagaucacagauuu

SEQ ID NO: 1819747 - RNA, 19 nt, Homo sapiens
  misc_RNA (1)...(19): siRNA sense strand
cggaaggguuuauuugcaa

SEQ ID NO: 1819748 - RNA, 19 nt, Homo sapiens
  misc_RNA (1)...(19): siRNA sense strand
ugagaccuguacccgauuu

SEQ ID NO: 1819749 - RNA, 19 nt, Homo sapiens
  misc_RNA (1)...(19): siRNA sense strand
ugaaauuccuuggucacaa

SEQ ID NO: 1819750 - RNA, 19 nt, Homo sapiens
  misc_RNA (1)...(19): siRNA sense strand
ggacucgaacuccuuugaa

SEQ ID NO: 1819751 - RNA, 19 nt, Homo sapiens
  misc_RNA (1)...(19): siRNA sense strand
gaggacugcuauggcaauu

SEQ ID NO: 1819752 - RNA, 19 nt, Homo sapiens
  misc_RNA (1)...(19): siRNA sense strand
ggacguauuaucugaugga

SEQ ID NO: 1819753 - RNA, 19 nt, Homo sapiens
  misc_RNA (1)...(19): siRNA sense strand
uaacaggacguauuaucug

SEQ ID NO: 1819754 - RNA, 19 nt, Homo sapiens
  misc_RNA (1)...(19): siRNA sense strand
cgccuaacaggacguauua

SEQ ID NO: 1819755 - RNA, 19 nt, Homo sapiens
  misc_RNA (1)...(19): siRNA sense strand
acagaaggaccacauuuau

SEQ ID NO: 1819756 - RNA, 19 nt, Homo sapiens
  misc_RNA (1)...(19): siRNA sense strand
uggauaagcggaaggguuu

SEQ ID NO: 1819757 - RNA, 19 nt, Homo sapiens
  misc_RNA (1)...(19): siRNA sense strand
aagcuuuacuucacauuuc

SEQ ID NO: 1819758 - RNA, 19 nt, Homo sapiens
  misc_RNA (1)...(19): siRNA sense strand
agaagagguuguuguugga

SEQ ID NO: 1819759 - RNA, 19 nt, Homo sapiens
  misc_RNA (1)...(19): siRNA sense strand
gcaguacauucacgaucug

SEQ ID NO: 1819760 - RNA, 19 nt, Homo sapiens
  misc_RNA (1)...(19): siRNA sense strand
gcgguuaggcugugaggaa

SEQ ID NO: 1819761 - RNA, 19 nt, Homo sapiens
  misc_RNA (1)...(19): siRNA sense strand
ggagaaguccgccuguaag

SEQ ID NO: 1819762 - RNA, 19 nt, Homo sapiens
  misc_RNA (1)...(19): siRNA sense strand
acauagagcaguacauuca

SEQ ID NO: 1819763 - RNA, 19 nt, Homo sapiens
  misc_RNA (1)...(19): siRNA sense strand
ggaagauccaggagguuug

SEQ ID NO: 1819764 - RNA, 19 nt, Homo sapiens
  misc_RNA (1)...(19): siRNA sense strand
cacaaguggugcaggaaga

SEQ ID NO: 1819765 - RNA, 19 nt, Homo sapiens
  misc_RNA (1)...(19): siRNA sense strand
caggacguauuaucugaug

SEQ ID NO: 1819766 - RNA, 19 nt, Homo sapiens
  misc_RNA (1)...(19): siRNA sense strand
ggauacggaccucuuaaag

SEQ ID NO: 1819767 - RNA, 19 nt, Homo sapiens
  misc_RNA (1)...(19): siRNA sense strand
aacaggacguauuaucuga

SEQ ID NO: 1819768 - RNA, 19 nt, Homo sapiens
  misc_RNA (1)...(19): siRNA sense strand
cgacauaucauaaaagaga

SEQ ID NO: 1819769 - RNA, 19 nt, Homo sapiens
  misc_RNA (1)...(19): siRNA sense strand
uaagcggaaggguuuauuu

SEQ ID NO: 1819770 - RNA, 19 nt, Homo sapiens
  misc_RNA (1)...(19): siRNA sense strand
ggaacagcgcaguacguuu

SEQ ID NO: 1819771 - RNA, 19 nt, Homo sapiens
  misc_RNA (1)...(19): siRNA sense strand
gaugagaagagguuguugu

SEQ ID NO: 1819772 - RNA, 19 nt, Homo sapiens
  misc_RNA (1)...(19): siRNA sense strand
caaagcgguuaggcuguga

SEQ ID NO: 1819773 - RNA, 19 nt, Homo sapiens
  misc_RNA (1)...(19): siRNA sense strand
ccuuugaacuggacuuaca

SEQ ID NO: 1819774 - RNA, 19 nt, Homo sapiens
  misc_RNA (1)...(19): siRNA sense strand
guauuucggccuuaguuau

SEQ ID NO: 1819775 - RNA, 19 nt, Homo sapiens
  misc_RNA (1)...(19): siRNA sense strand
gaagaugagaagagguugu

SEQ ID NO: 1819776 - RNA, 19 nt, Homo sapiens
  misc_RNA (1)...(19): siRNA sense strand
guuaggcugugaggaaaug

SEQ ID NO: 1819777 - RNA, 19 nt, Homo sapiens
  misc_RNA (1)...(19): siRNA sense strand
agaagaucauuaaguugga

SEQ ID NO: 1819778 - RNA, 19 nt, Homo sapiens
  misc_RNA (1)...(19): siRNA sense strand
gggaacagcgcaguacguu

SEQ ID NO: 1819779 - RNA, 19 nt, Homo sapiens
  misc_RNA (1)...(19): siRNA sense strand
ggcaagggcaucauucaca

SEQ ID NO: 1819780 - RNA, 19 nt, Homo sapiens
  misc_RNA (1)...(19): siRNA sense strand
uguggauccugucaacaaa

SEQ ID NO: 1819781 - RNA, 19 nt, Homo sapiens
  misc_RNA (1)...(19): siRNA sense strand
ggcaaccuccagagaauau

SEQ ID NO: 1819782 - RNA, 19 nt, Homo sapiens
  misc_RNA (1)...(19): siRNA sense strand
cuauggcaauuaugacaau

SEQ ID NO: 1819783 - RNA, 19 nt, Homo sapiens
  misc_RNA (1)...(19): siRNA sense strand
ccagcgugguguuauguuc

SEQ ID NO: 1819784 - RNA, 19 nt, Homo sapiens
  misc_RNA (1)...(19): siRNA sense strand
gcacauccagaucacagau

SEQ ID NO: 1819785 - RNA, 19 nt, Homo sapiens
  misc_RNA (1)...(19): siRNA sense strand
agaagcgacauaucauaaa

SEQ ID NO: 1819786 - RNA, 19 nt, Homo sapiens
  misc_RNA (1)...(19): siRNA sense strand
ggucaggcagcaacauaga

SEQ ID NO: 1819787 - RNA, 19 nt, Homo sapiens
  misc_RNA (1)...(19): siRNA sense strand
aaaugaagauaugcacauc

SEQ ID NO: 1819788 - RNA, 19 nt, Homo sapiens
  misc_RNA (1)...(19): siRNA sense strand
gcaccaguuuguagaaaau

SEQ ID NO: 1819789 - RNA, 19 nt, Homo sapiens
  misc_RNA (1)...(19): siRNA sense strand
cauaauauaccagcuugug

SEQ ID NO: 1819790 - RNA, 19 nt, Homo sapiens
  misc_RNA (1)...(19): siRNA sense strand
ggacgacgagaagcuguau

SEQ ID NO: 1819791 - RNA, 19 nt, Homo sapiens
  misc_RNA (1)...(19): siRNA sense strand
ccagagagcgggaugucau

SEQ ID NO: 1819792 - RNA, 19 nt, Homo sapiens
  misc_RNA (1)...(19): siRNA sense strand
gaaggguuuauuugcaaga

SEQ ID NO: 1819793 - RNA, 19 nt, Homo sapiens
  misc_RNA (1)...(19): siRNA sense strand
acgacgagaagcuguauuu

SEQ ID NO: 1819794 - RNA, 19 nt, Homo sapiens
  misc_RNA (1)...(19): siRNA sense strand
aagaugggcccaguggaua

SEQ ID NO: 1819795 - RNA, 19 nt, Homo sapiens
  misc_RNA (1)...(19): siRNA sense strand
aaagaugggcccaguggau

SEQ ID NO: 1819796 - RNA, 19 nt, Homo sapiens
  misc_RNA (1)...(19): siRNA sense strand
uguccuggcucgagaacug

SEQ ID NO: 1819797 - RNA, 19 nt, Homo sapiens
  misc_RNA (1)...(19): siRNA sense strand
ccgaagaugagaagagguu

SEQ ID NO: 1819798 - RNA, 19 nt, Homo sapiens
  misc_RNA (1)...(19): siRNA sense strand
gagcuggaaacgaguaucu

SEQ ID NO: 1819799 - RNA, 19 nt, Homo sapiens
  misc_RNA (1)...(19): siRNA sense strand
ugucaacaaaguucugaaa

SEQ ID NO: 1819800 - RNA, 19 nt, Homo sapiens
  misc_RNA (1)...(19): siRNA sense strand
gauccugucaacaaaguuc

SEQ ID NO: 1819801 - RNA, 19 nt, Homo sapiens
  misc_RNA (1)...(19): siRNA sense strand
ggauaagcggaaggguuua

SEQ ID NO: 1819802 - RNA, 19 nt, Homo sapiens
  misc_RNA (1)...(19): siRNA sense strand
agagguuguuguuggagaa

SEQ ID NO: 1819803 - RNA, 19 nt, Homo sapiens
  misc_RNA (1)...(19): siRNA sense strand
gacucgaacuccuuugaac

SEQ ID NO: 1819804 - RNA, 19 nt, Homo sapiens
  misc_RNA (1)...(19): siRNA sense strand
ucagaagaucauuaaguug

SEQ ID NO: 1819805 - RNA, 19 nt, Homo sapiens
  misc_RNA (1)...(19): siRNA sense strand
agacagagguggugaugaa

SEQ ID NO: 1819806 - RNA, 19 nt, Homo sapiens
  misc_RNA (1)...(19): siRNA sense strand
gaagaagcaccguuguaaa

SEQ ID NO: 1819807 - RNA, 19 nt, Homo sapiens
  misc_RNA (1)...(19): siRNA sense strand
gugcugggccuucaagaua

SEQ ID NO: 1819808 - RNA, 19 nt, Homo sapiens
  misc_RNA (1)...(19): siRNA sense strand
ugaagaagcaccguuguaa

SEQ ID NO: 1819809 - RNA, 19 nt, Homo sapiens
  misc_RNA (1)...(19): siRNA sense strand
gaagcaccguuguaaaugc

SEQ ID NO: 1819810 - RNA, 19 nt, Homo sapiens
  misc_RNA (1)...(19): siRNA sense strand
ggacgaacucauccacaaa

SEQ ID NO: 1819811 - RNA, 19 nt, Homo sapiens
  misc_RNA (1)...(19): siRNA sense strand
cagagguggugaugaauuc

SEQ ID NO: 1819812 - RNA, 19 nt, Homo sapiens
  misc_RNA (1)...(19): siRNA sense strand
uguaaaugcugcuccauca

SEQ ID NO: 1819813 - RNA, 19 nt, Homo sapiens
  misc_RNA (1)...(19): siRNA sense strand
cccaggaccucgacaugaa

SEQ ID NO: 1819814 - RNA, 19 nt, Homo sapiens
  misc_RNA (1)...(19): siRNA sense strand
aggcggagaucgagaacaa

SEQ ID NO: 1819815 - RNA, 19 nt, Homo sapiens
  misc_RNA (1)...(19): siRNA sense strand
uaaaugcugcuccaucaug

SEQ ID NO: 1819816 - RNA, 19 nt, Homo sapiens
  misc_RNA (1)...(19): siRNA sense strand
aagaagcaccguuguaaau

SEQ ID NO: 1819817 - RNA, 19 nt, Homo sapiens
  misc_RNA (1)...(19): siRNA sense strand
gaugaaggcagccauguac

SEQ ID NO: 1819818 - RNA, 19 nt, Homo sapiens
  misc_RNA (1)...(19): siRNA sense strand
gguuggagaaggaaauuga

SEQ ID NO: 1819819 - RNA, 19 nt, Homo sapiens
  misc_RNA (1)...(19): siRNA sense strand
ugagaucacuguggagaag

SEQ ID NO: 1819820 - RNA, 19 nt, Homo sapiens
  misc_RNA (1)...(19): siRNA sense strand
ugaugaaggcagccaugua

SEQ ID NO: 1819821 - RNA, 19 nt, Homo sapiens
  misc_RNA (1)...(19): siRNA sense strand
aaaugcugcuccaucaugu

SEQ ID NO: 1819822 - RNA, 19 nt, Homo sapiens
  misc_RNA (1)...(19): siRNA sense strand
gacaagcgagucuccaaca

SEQ ID NO: 1819823 - RNA, 19 nt, Homo sapiens
  misc_RNA (1)...(19): siRNA sense strand
gaugaggccgagaccaaga

SEQ ID NO: 1819824 - RNA, 19 nt, Homo sapiens
  misc_RNA (1)...(19): siRNA sense strand
accagaacguggaggauga

SEQ ID NO: 1819825 - RNA, 19 nt, Homo sapiens
  misc_RNA (1)...(19): siRNA sense strand
caagacagagguggugaug

SEQ ID NO: 1819826 - RNA, 19 nt, Homo sapiens
  misc_RNA (1)...(19): siRNA sense strand
cuucauggguuaccagaac

SEQ ID NO: 1819827 - RNA, 19 nt, Homo sapiens
  misc_RNA (1)...(19): siRNA sense strand
gccauguacucgguugaga

SEQ ID NO: 1819828 - RNA, 19 nt, Homo sapiens
  misc_RNA (1)...(19): siRNA sense strand
ggagaaggacaaggugaca

SEQ ID NO: 1819829 - RNA, 19 nt, Homo sapiens
  misc_RNA (1)...(19): siRNA sense strand
acagagguggugaugaauu

SEQ ID NO: 1819830 - RNA, 19 nt, Homo sapiens
  misc_RNA (1)...(19): siRNA sense strand
cgagguggacgaacucauc

SEQ ID NO: 1819831 - RNA, 19 nt, Homo sapiens
  misc_RNA (1)...(19): siRNA sense strand
ggacgacgagcagaagaca

SEQ ID NO: 1819832 - RNA, 19 nt, Homo sapiens
  misc_RNA (1)...(19): siRNA sense strand
caaggaggagcgcaagaca

SEQ ID NO: 1819833 - RNA, 19 nt, Homo sapiens
  misc_RNA (1)...(19): siRNA sense strand
gacgaacucauccacaaag

SEQ ID NO: 1819834 - RNA, 19 nt, Homo sapiens
  misc_RNA (1)...(19): siRNA sense strand
gcaagacagagguggugau

SEQ ID NO: 1819835 - RNA, 19 nt, Homo sapiens
  misc_RNA (1)...(19): siRNA sense strand
ugcagcaccugaaguccaa

SEQ ID NO: 1819836 - RNA, 19 nt, Homo sapiens
  misc_RNA (1)...(19): siRNA sense strand
aggaggagcgcaagacaga

SEQ ID NO: 1819837 - RNA, 19 nt, Homo sapiens
  misc_RNA (1)...(19): siRNA sense strand
agaagcaccguuguaaaug

SEQ ID NO: 1819838 - RNA, 19 nt, Homo sapiens
  misc_RNA (1)...(19): siRNA sense strand
ggagcugguggucaucgaa

SEQ ID NO: 1819839 - RNA, 19 nt, Homo sapiens
  misc_RNA (1)...(19): siRNA sense strand
gcaggacgacgagcagaag

SEQ ID NO: 1819840 - RNA, 19 nt, Homo sapiens
  misc_RNA (1)...(19): siRNA sense strand
gaacaucccugacgcauau

SEQ ID NO: 1819841 - RNA, 19 nt, Homo sapiens
  misc_RNA (1)...(19): siRNA sense strand
ccaaugagaugaugaugua

SEQ ID NO: 1819842 - RNA, 19 nt, Homo sapiens
  misc_RNA (1)...(19): siRNA sense strand
gagcugaucuacaaagaau

SEQ ID NO: 1819843 - RNA, 19 nt, Homo sapiens
  misc_RNA (1)...(19): siRNA sense strand
gaggucagcuuucccuuga

SEQ ID NO: 1819844 - RNA, 19 nt, Homo sapiens
  misc_RNA (1)...(19): siRNA sense strand
caacaucuuugaucauuuc

SEQ ID NO: 1819845 - RNA, 19 nt, Homo sapiens
  misc_RNA (1)...(19): siRNA sense strand
ucaaggaccuccagaagau

SEQ ID NO: 1819846 - RNA, 19 nt, Homo sapiens
  misc_RNA (1)...(19): siRNA sense strand
cgagaucuuugccuuguuu

SEQ ID NO: 1819847 - RNA, 19 nt, Homo sapiens
  misc_RNA (1)...(19): siRNA sense strand
gcaacaucuuugaucauuu

SEQ ID NO: 1819848 - RNA, 19 nt, Homo sapiens
  misc_RNA (1)...(19): siRNA sense strand
aacagaaacucaaguguga

SEQ ID NO: 1819849 - RNA, 19 nt, Homo sapiens
  misc_RNA (1)...(19): siRNA sense strand
ucgcggagcugaucuacaa

SEQ ID NO: 1819850 - RNA, 19 nt, Homo sapiens
  misc_RNA (1)...(19): siRNA sense strand
auaccaaacuucuccauga

SEQ ID NO: 1819851 - RNA, 19 nt, Homo sapiens
  misc_RNA (1)...(19): siRNA sense strand
gcuggaagacuacgagaaa

SEQ ID NO: 1819852 - RNA, 19 nt, Homo sapiens
  misc_RNA (1)...(19): siRNA sense strand
cguggcagcugucaucuug

SEQ ID NO: 1819853 - RNA, 19 nt, Homo sapiens
  misc_RNA (1)...(19): siRNA sense strand
gaucuuugccuuguuuauu

SEQ ID NO: 1819854 - RNA, 19 nt, Homo sapiens
  misc_RNA (1)...(19): siRNA sense strand
gcuaccugcucuacaagaa

SEQ ID NO: 1819855 - RNA, 19 nt, Homo sapiens
  misc_RNA (1)...(19): siRNA sense strand
gcaaugggcugggcuucuc

SEQ ID NO: 1819856 - RNA, 19 nt, Homo sapiens
  misc_RNA (1)...(19): siRNA sense strand
gcugcaacaucuuugauca

SEQ ID NO: 1819857 - RNA, 19 nt, Homo sapiens
  misc_RNA (1)...(19): siRNA sense strand
ccaacuaccucgaggacau

SEQ ID NO: 1819858 - RNA, 19 nt, Homo sapiens
  misc_RNA (1)...(19): siRNA sense strand
gcauaugcccauccgcuuu

SEQ ID NO: 1819859 - RNA, 19 nt, Homo sapiens
  misc_RNA (1)...(19): siRNA sense strand
uggaaacugucuacaccua

SEQ ID NO: 1819860 - RNA, 19 nt, Homo sapiens
  misc_RNA (1)...(19): siRNA sense strand
gcaacaggccgauggagau

SEQ ID NO: 1819861 - RNA, 19 nt, Homo sapiens
  misc_RNA (1)...(19): siRNA sense strand
uggccgagcuggugaacaa

SEQ ID NO: 1819862 - RNA, 19 nt, Homo sapiens
  misc_RNA (1)...(19): siRNA sense strand
caaggugucccacaaguuc

SEQ ID NO: 1819863 - RNA, 19 nt, Homo sapiens
  misc_RNA (1)...(19): siRNA sense strand
gcugagugauaaugaggaa

SEQ ID NO: 1819864 - RNA, 19 nt, Homo sapiens
  misc_RNA (1)...(19): siRNA sense strand
accaagggcuggaagacua

SEQ ID NO: 1819865 - RNA, 19 nt, Homo sapiens
  misc_RNA (1)...(19): siRNA sense strand
cgacggccuucuccaucua

SEQ ID NO: 1819866 - RNA, 19 nt, Homo sapiens
  misc_RNA (1)...(19): siRNA sense strand
gcuagaaggagacuuguuc

SEQ ID NO: 1819867 - RNA, 19 nt, Homo sapiens
  misc_RNA (1)...(19): siRNA sense strand
caacaagcagcaccacaga

SEQ ID NO: 1819868 - RNA, 19 nt, Homo sapiens
  misc_RNA (1)...(19): siRNA sense strand
cgaggugccugaucuggau

SEQ ID NO: 1819869 - RNA, 19 nt, Homo sapiens
  misc_RNA (1)...(19): siRNA sense strand
ggaaaguccgggaggcuau

SEQ ID NO: 1819870 - RNA, 19 nt, Homo sapiens
  misc_RNA (1)...(19): siRNA sense strand
ccaaagcggcagagcugua

SEQ ID NO: 1819871 - RNA, 19 nt, Homo sapiens
  misc_RNA (1)...(19): siRNA sense strand
gcacaaacaacucuuucca

SEQ ID NO: 1819872 - RNA, 19 nt, Homo sapiens
  misc_RNA (1)...(19): siRNA sense strand
cccauucucuccuauacaa

SEQ ID NO: 1819873 - RNA, 19 nt, Homo sapiens
  misc_RNA (1)...(19): siRNA sense strand
ucaaagugcuccaauaccu

SEQ ID NO: 1819874 - RNA, 19 nt, Homo sapiens
  misc_RNA (1)...(19): siRNA sense strand
guggccagcugagugauaa

SEQ ID NO: 1819875 - RNA, 19 nt, Homo sapiens
  misc_RNA (1)...(19): siRNA sense strand
ugcaacaucuuugaucauu

SEQ ID NO: 1819876 - RNA, 19 nt, Homo sapiens
  misc_RNA (1)...(19): siRNA sense strand
gcucaaagugcuccaauac

SEQ ID NO: 1819877 - RNA, 19 nt, Homo sapiens
  misc_RNA (1)...(19): siRNA sense strand
gaaggucuccgacgaugag

SEQ ID NO: 1819878 - RNA, 19 nt, Homo sapiens
  misc_RNA (1)...(19): siRNA sense strand
ggccaugguucagcaaguu

SEQ ID NO: 1819879 - RNA, 19 nt, Homo sapiens
  misc_RNA (1)...(19): siRNA sense strand
gugccaggcucuucuccaa

SEQ ID NO: 1819880 - RNA, 19 nt, Homo sapiens
  misc_RNA (1)...(19): siRNA sense strand
uacaacagcugcagagcau

SEQ ID NO: 1819881 - RNA, 19 nt, Homo sapiens
  misc_RNA (1)...(19): siRNA sense strand
gaggacaaucuccagcuuu

SEQ ID NO: 1819882 - RNA, 19 nt, Homo sapiens
  misc_RNA (1)...(19): siRNA sense strand
ggucaucggagacaaagug

SEQ ID NO: 1819883 - RNA, 19 nt, Homo sapiens
  misc_RNA (1)...(19): siRNA sense strand
gccaggcucuucuccaagu

SEQ ID NO: 1819884 - RNA, 19 nt, Homo sapiens
  misc_RNA (1)...(19): siRNA sense strand
agucccagcugguguguga

SEQ ID NO: 1819885 - RNA, 19 nt, Homo sapiens
  misc_RNA (1)...(19): siRNA sense strand
ggaagacuacgagaaagau

SEQ ID NO: 1819886 - RNA, 19 nt, Homo sapiens
  misc_RNA (1)...(19): siRNA sense strand
ccacggcugcaacaucuuu

SEQ ID NO: 1819887 - RNA, 19 nt, Homo sapiens
  misc_RNA (1)...(19): siRNA sense strand
caucgcccauucucuccua

SEQ ID NO: 1819888 - RNA, 19 nt, Homo sapiens
  misc_RNA (1)...(19): siRNA sense strand
gcaucagcaucgcccauuc

SEQ ID NO: 1819889 - RNA, 19 nt, Homo sapiens
  misc_RNA (1)...(19): siRNA sense strand
gaugaugagagcuaugaga

SEQ ID NO: 1819890 - RNA, 19 nt, Homo sapiens
  misc_RNA (1)...(19): siRNA sense strand
ccaccuggaugacgucucu

SEQ ID NO: 1819891 - RNA, 19 nt, Homo sapiens
  misc_RNA (1)...(19): siRNA sense strand
gaaggaacagaaacucaag

SEQ ID NO: 1819892 - RNA, 19 nt, Homo sapiens
  misc_RNA (1)...(19): siRNA sense strand
caacagcugcagagcaugu

SEQ ID NO: 1819893 - RNA, 19 nt, Homo sapiens
  misc_RNA (1)...(19): siRNA sense strand
agaaguccauccagcugaa

SEQ ID NO: 1819894 - RNA, 19 nt, Homo sapiens
  misc_RNA (1)...(19): siRNA sense strand
gacaaucuccagcuuucuu

SEQ ID NO: 1819895 - RNA, 19 nt, Homo sapiens
  misc_RNA (1)...(19): siRNA sense strand
gcugaucuacaaagaauuc

SEQ ID NO: 1819896 - RNA, 19 nt, Homo sapiens
  misc_RNA (1)...(19): siRNA sense strand
gaccacagaggcacaaaca

SEQ ID NO: 1819897 - RNA, 19 nt, Homo sapiens
  misc_RNA (1)...(19): siRNA sense strand
gcaaggucaucggagacaa

SEQ ID NO: 1819898 - RNA, 19 nt, Homo sapiens
  misc_RNA (1)...(19): siRNA sense strand
caaggucaucggagacaaa

SEQ ID NO: 1819899 - RNA, 19 nt, Homo sapiens
  misc_RNA (1)...(19): siRNA sense strand
uaacaacucgcuggacuuc

SEQ ID NO: 1819900 - RNA, 19 nt, Homo sapiens
  misc_RNA (1)...(19): siRNA sense strand
ggagcugaucuacaaagaa

SEQ ID NO: 1819901 - RNA, 19 nt, Homo sapiens
  misc_RNA (1)...(19): siRNA sense strand
gaggacaucgagaucuuug

SEQ ID NO: 1819902 - RNA, 19 nt, Homo sapiens
  misc_RNA (1)...(19): siRNA sense strand
ggacggcggaagaccagaa

SEQ ID NO: 1819903 - RNA, 19 nt, Homo sapiens
  misc_RNA (1)...(19): siRNA sense strand
ccacagaggcacaaacaac

SEQ ID NO: 1819904 - RNA, 19 nt, Homo sapiens
  misc_RNA (1)...(19): siRNA sense strand
accuggagcucaccaacua

SEQ ID NO: 1819905 - RNA, 19 nt, Homo sapiens
  misc_RNA (1)...(19): siRNA sense strand
ucugcuaccugcucuacaa

SEQ ID NO: 1819906 - RNA, 19 nt, Homo sapiens
  misc_RNA (1)...(19): siRNA sense strand
ggaacagaaacucaagugu

SEQ ID NO: 1819907 - RNA, 19 nt, Homo sapiens
  misc_RNA (1)...(19): siRNA sense strand
gccagcaggucuuccucaa

SEQ ID NO: 1819908 - RNA, 19 nt, Homo sapiens
  misc_RNA (1)...(19): siRNA sense strand
ucuguuugauggugaagaa

SEQ ID NO: 1819909 - RNA, 19 nt, Homo sapiens
  misc_RNA (1)...(19): siRNA sense strand
uaccaaacuucuccaugau

SEQ ID NO: 1819910 - RNA, 19 nt, Homo sapiens
  misc_RNA (1)...(19): siRNA sense strand
cgaugaguauaccaaacuu

SEQ ID NO: 1819911 - RNA, 19 nt, Homo sapiens
  misc_RNA (1)...(19): siRNA sense strand
ggucuccgacgaugaguau

SEQ ID NO: 1819912 - RNA, 19 nt, Homo sapiens
  misc_RNA (1)...(19): siRNA sense strand
gcgacggccuucuccaucu

SEQ ID NO: 1819913 - RNA, 19 nt, Homo sapiens
  misc_RNA (1)...(19): siRNA sense strand
cgcaagauccuccaacugu

SEQ ID NO: 1819914 - RNA, 19 nt, Homo sapiens
  misc_RNA (1)...(19): siRNA sense strand
cggagcugaucuacaaaga

SEQ ID NO: 1819915 - RNA, 19 nt, Homo sapiens
  misc_RNA (1)...(19): siRNA sense strand
caacuggaugcacgccuuu

SEQ ID NO: 1819916 - RNA, 19 nt, Homo sapiens
  misc_RNA (1)...(19): siRNA sense strand
gcaggacgccuugcugagu

SEQ ID NO: 1819917 - RNA, 19 nt, Homo sapiens
  misc_RNA (1)...(19): siRNA sense strand
gaggcacaaacaacucuuu

SEQ ID NO: 1819918 - RNA, 19 nt, Homo sapiens
  misc_RNA (1)...(19): siRNA sense strand
uuugcaaguuucaccuaua

SEQ ID NO: 1819919 - RNA, 19 nt, Homo sapiens
  misc_RNA (1)...(19): siRNA sense strand
ccaccuggccaaugagaug

SEQ ID NO: 1819920 - RNA, 19 nt, Homo sapiens
  misc_RNA (1)...(19): siRNA sense strand
ccucuucccugcagcucaa

SEQ ID NO: 1819921 - RNA, 19 nt, Homo sapiens
  misc_RNA (1)...(19): siRNA sense strand
cgacgaugaguauaccaaa

SEQ ID NO: 1819922 - RNA, 19 nt, Homo sapiens
  misc_RNA (1)...(19): siRNA sense strand
ugaacaucccugacgcaua

SEQ ID NO: 1819923 - RNA, 19 nt, Homo sapiens
  misc_RNA (1)...(19): siRNA sense strand
ggaacucuacgaccuggau

SEQ ID NO: 1819924 - RNA, 19 nt, Homo sapiens
  misc_RNA (1)...(19): siRNA sense strand
ugagugauaaugaggaaug

SEQ ID NO: 1819925 - RNA, 19 nt, Homo sapiens
  misc_RNA (1)...(19): siRNA sense strand
cagguggccucgaaaucug

SEQ ID NO: 1819926 - RNA, 19 nt, Homo sapiens
  misc_RNA (1)...(19): siRNA sense strand
agaaggaacagaaacucaa

SEQ ID NO: 1819927 - RNA, 19 nt, Homo sapiens
  misc_RNA (1)...(19): siRNA sense strand
aggacaaucuccagcuuuc

SEQ ID NO: 1819928 - RNA, 19 nt, Homo sapiens
  misc_RNA (1)...(19): siRNA sense strand
gccaggugguggaagacaa

SEQ ID NO: 1819929 - RNA, 19 nt, Homo sapiens
  misc_RNA (1)...(19): siRNA sense strand
ccaaggugucccacaaguu

SEQ ID NO: 1819930 - RNA, 19 nt, Homo sapiens
  misc_RNA (1)...(19): siRNA sense strand
gaaagaucgcggagcugau

SEQ ID NO: 1819931 - RNA, 19 nt, Homo sapiens
  misc_RNA (1)...(19): siRNA sense strand
gacgaggacgagcauguga

SEQ ID NO: 1819932 - RNA, 19 nt, Homo sapiens
  misc_RNA (1)...(19): siRNA sense strand
gaagacuacgagaaagauc

SEQ ID NO: 1819933 - RNA, 19 nt, Homo sapiens
  misc_RNA (1)...(19): siRNA sense strand
gcuacgaccgaaacaacaa

SEQ ID NO: 1819934 - RNA, 19 nt, Homo sapiens
  misc_RNA (1)...(19): siRNA sense strand
gacgaugaguauaccaaac

SEQ ID NO: 1819935 - RNA, 19 nt, Homo sapiens
  misc_RNA (1)...(19): siRNA sense strand
gcuccacuggcuccugaua

SEQ ID NO: 1819936 - RNA, 19 nt, Homo sapiens
  misc_RNA (1)...(19): siRNA sense strand
cagaaggaacagaaacuca

SEQ ID NO: 1819937 - RNA, 19 nt, Homo sapiens
  misc_RNA (1)...(19): siRNA sense strand
caacaggccgauggagaug

SEQ ID NO: 1819938 - RNA, 19 nt, Homo sapiens
  misc_RNA (1)...(19): siRNA sense strand
ucauggagcacauugcaau

SEQ ID NO: 1819939 - RNA, 19 nt, Homo sapiens
  misc_RNA (1)...(19): siRNA sense strand
cuauaucccugagcugcaa

SEQ ID NO: 1819940 - RNA, 19 nt, Homo sapiens
  misc_RNA (1)...(19): siRNA sense strand
gaaaggagcucaauggaaa

SEQ ID NO: 1819941 - RNA, 19 nt, Homo sapiens
  misc_RNA (1)...(19): siRNA sense strand
gaacggcuguuuccucuua

SEQ ID NO: 1819942 - RNA, 19 nt, Homo sapiens
  misc_RNA (1)...(19): siRNA sense strand
gaaaugaacgguagaauug

SEQ ID NO: 1819943 - RNA, 19 nt, Homo sapiens
  misc_RNA (1)...(19): siRNA sense strand
gagaagacauggaugauga

SEQ ID NO: 1819944 - RNA, 19 nt, Homo sapiens
  misc_RNA (1)...(19): siRNA sense strand
gaacagaugaaacaagaua

SEQ ID NO: 1819945 - RNA, 19 nt, Homo sapiens
  misc_RNA (1)...(19): siRNA sense strand
uaaagaggcugcccagaaa

SEQ ID NO: 1819946 - RNA, 19 nt, Homo sapiens
  misc_RNA (1)...(19): siRNA sense strand
gaacuuaagcgcaaauuug

SEQ ID NO: 1819947 - RNA, 19 nt, Homo sapiens
  misc_RNA (1)...(19): siRNA sense strand
gaaccgugcugcauacuau

SEQ ID NO: 1819948 - RNA, 19 nt, Homo sapiens
  misc_RNA (1)...(19): siRNA sense strand
ggacaaauccauugauaau

SEQ ID NO: 1819949 - RNA, 19 nt, Homo sapiens
  misc_RNA (1)...(19): siRNA sense strand
uaaauaugcugcaggaguu

SEQ ID NO: 1819950 - RNA, 19 nt, Homo sapiens
  misc_RNA (1)...(19): siRNA sense strand
gcaggaagcagcugaaaga

SEQ ID NO: 1819951 - RNA, 19 nt, Homo sapiens
  misc_RNA (1)...(19): siRNA sense strand
guaggcaacauauucauua

SEQ ID NO: 1819952 - RNA, 19 nt, Homo sapiens
  misc_RNA (1)...(19): siRNA sense strand
ggagauugauaauucagaa

SEQ ID NO: 1819953 - RNA, 19 nt, Homo sapiens
  misc_RNA (1)...(19): siRNA sense strand
cauguaaggugguuuguga

SEQ ID NO: 1819954 - RNA, 19 nt, Homo sapiens
  misc_RNA (1)...(19): siRNA sense strand
ccuaaaugaucgcaaagua

SEQ ID NO: 1819955 - RNA, 19 nt, Homo sapiens
  misc_RNA (1)...(19): siRNA sense strand
gcuccuagaccaccauuua

SEQ ID NO: 1819956 - RNA, 19 nt, Homo sapiens
  misc_RNA (1)...(19): siRNA sense strand
gccauuguauguagcuuua

SEQ ID NO: 1819957 - RNA, 19 nt, Homo sapiens
  misc_RNA (1)...(19): siRNA sense strand
gugcaaagguuaugaugga

SEQ ID NO: 1819958 - RNA, 19 nt, Homo sapiens
  misc_RNA (1)...(19): siRNA sense strand
cuacggauuuguacacuuu

SEQ ID NO: 1819959 - RNA, 19 nt, Homo sapiens
  misc_RNA (1)...(19): siRNA sense strand
gcuaacacaucaacacaga

SEQ ID NO: 1819960 - RNA, 19 nt, Homo sapiens
  misc_RNA (1)...(19): siRNA sense strand
gcgcaaauuugaacagaug

SEQ ID NO: 1819961 - RNA, 19 nt, Homo sapiens
  misc_RNA (1)...(19): siRNA sense strand
ugaaaguaaugacugauga

SEQ ID NO: 1819962 - RNA, 19 nt, Homo sapiens
  misc_RNA (1)...(19): siRNA sense strand
uaaagcaguuacagaaaug

SEQ ID NO: 1819963 - RNA, 19 nt, Homo sapiens
  misc_RNA (1)...(19): siRNA sense strand
ggaaaggagcucaauggaa

SEQ ID NO: 1819964 - RNA, 19 nt, Homo sapiens
  misc_RNA (1)...(19): siRNA sense strand
ggaaugcuccuaaaugauc

SEQ ID NO: 1819965 - RNA, 19 nt, Homo sapiens
  misc_RNA (1)...(19): siRNA sense strand
uaaaaucacuggcauguug

SEQ ID NO: 1819966 - RNA, 19 nt, Homo sapiens
  misc_RNA (1)...(19): siRNA sense strand
gcugaaagagcuauugaaa

SEQ ID NO: 1819967 - RNA, 19 nt, Homo sapiens
  misc_RNA (1)...(19): siRNA sense strand
cuaaagcaguuacagaaau

SEQ ID NO: 1819968 - RNA, 19 nt, Homo sapiens
  misc_RNA (1)...(19): siRNA sense strand
gaacgucuccggaaagagu

SEQ ID NO: 1819969 - RNA, 19 nt, Homo sapiens
  misc_RNA (1)...(19): siRNA sense strand
gaacggcagacggaacuua

SEQ ID NO: 1819970 - RNA, 19 nt, Homo sapiens
  misc_RNA (1)...(19): siRNA sense strand
gcuccuaaaugaucgcaaa

SEQ ID NO: 1819971 - RNA, 19 nt, Homo sapiens
  misc_RNA (1)...(19): siRNA sense strand
gcucgagucuccagaguca

SEQ ID NO: 1819972 - RNA, 19 nt, Homo sapiens
  misc_RNA (1)...(19): siRNA sense strand
gggccugccuuaaguguga

SEQ ID NO: 1819973 - RNA, 19 nt, Homo sapiens
  misc_RNA (1)...(19): siRNA sense strand
uaagguugaugaagcugua

SEQ ID NO: 1819974 - RNA, 19 nt, Homo sapiens
  misc_RNA (1)...(19): siRNA sense strand
uaaggugguuugugaugaa

SEQ ID NO: 1819975 - RNA, 19 nt, Homo sapiens
  misc_RNA (1)...(19): siRNA sense strand
caaaagaauucaccaaugu

SEQ ID NO: 1819976 - RNA, 19 nt, Homo sapiens
  misc_RNA (1)...(19): siRNA sense strand
gcaaaagaauucaccaaug

SEQ ID NO: 1819977 - RNA, 19 nt, Homo sapiens
  misc_RNA (1)...(19): siRNA sense strand
ugaauggaaugcuccuaaa

SEQ ID NO: 1819978 - RNA, 19 nt, Homo sapiens
  misc_RNA (1)...(19): siRNA sense strand
gauaauaaagcacuguaug

SEQ ID NO: 1819979 - RNA, 19 nt, Homo sapiens
  misc_RNA (1)...(19): siRNA sense strand
uggaugagaugaacggaaa

SEQ ID NO: 1819980 - RNA, 19 nt, Homo sapiens
  misc_RNA (1)...(19): siRNA sense strand
guaaggugguuugugauga

SEQ ID NO: 1819981 - RNA, 19 nt, Homo sapiens
  misc_RNA (1)...(19): siRNA sense strand
gaaaguaaugacugaugaa

SEQ ID NO: 1819982 - RNA, 19 nt, Homo sapiens
  misc_RNA (1)...(19): siRNA sense strand
ggaggguggucgcagcaaa

SEQ ID NO: 1819983 - RNA, 19 nt, Homo sapiens
  misc_RNA (1)...(19): siRNA sense strand
gcaccguuccacaguauaa

SEQ ID NO: 1819984 - RNA, 19 nt, Homo sapiens
  misc_RNA (1)...(19): siRNA sense strand
ccagaaagcaguuaacagu

SEQ ID NO: 1819985 - RNA, 19 nt, Homo sapiens
  misc_RNA (1)...(19): siRNA sense strand
cuaaagaggcugcccagaa

SEQ ID NO: 1819986 - RNA, 19 nt, Homo sapiens
  misc_RNA (1)...(19): siRNA sense strand
gcauguuguuggagauuga

SEQ ID NO: 1819987 - RNA, 19 nt, Homo sapiens
  misc_RNA (1)...(19): siRNA sense strand
acgagaagcugaacuugga

SEQ ID NO: 1819988 - RNA, 19 nt, Homo sapiens
  misc_RNA (1)...(19): siRNA sense strand
agaccaccauuuaguacua

SEQ ID NO: 1819989 - RNA, 19 nt, Homo sapiens
  misc_RNA (1)...(19): siRNA sense strand
gcagagaauggcaagugua

SEQ ID NO: 1819990 - RNA, 19 nt, Homo sapiens
  misc_RNA (1)...(19): siRNA sense strand
aguaaugacugaugaaagu

SEQ ID NO: 1819991 - RNA, 19 nt, Homo sapiens
  misc_RNA (1)...(19): siRNA sense strand
caagggcuacggauuugua

SEQ ID NO: 1819992 - RNA, 19 nt, Homo sapiens
  misc_RNA (1)...(19): siRNA sense strand
uguuggagauugauaauuc

SEQ ID NO: 1819993 - RNA, 19 nt, Homo sapiens
  misc_RNA (1)...(19): siRNA sense strand
ugccagaccucauccauuc

SEQ ID NO: 1819994 - RNA, 19 nt, Homo sapiens
  misc_RNA (1)...(19): siRNA sense strand
agaaaugaacgguagaauu

SEQ ID NO: 1819995 - RNA, 19 nt, Homo sapiens
  misc_RNA (1)...(19): siRNA sense strand
uugaacagaugaaacaaga

SEQ ID NO: 1819996 - RNA, 19 nt, Homo sapiens
  misc_RNA (1)...(19): siRNA sense strand
ggaacuuaagcgcaaauuu

SEQ ID NO: 1819997 - RNA, 19 nt, Homo sapiens
  misc_RNA (1)...(19): siRNA sense strand
ggaguaggcaacauauuca

SEQ ID NO: 1819998 - RNA, 19 nt, Homo sapiens
  misc_RNA (1)...(19): siRNA sense strand
ucaccucacuaaccaguau

SEQ ID NO: 1819999 - RNA, 19 nt, Homo sapiens
  misc_RNA (1)...(19): siRNA sense strand
gaacgagaagcugaacuug

SEQ ID NO: 1820000 - RNA, 19 nt, Homo sapiens
  misc_RNA (1)...(19): siRNA sense strand
ccucauccauuccaaaaua

SEQ ID NO: 1820001 - RNA, 19 nt, Homo sapiens
  misc_RNA (1)...(19): siRNA sense strand
gagaauggcaaguguacga

SEQ ID NO: 1820002 - RNA, 19 nt, Homo sapiens
  misc_RNA (1)...(19): siRNA sense strand
agaaagcuguggaugagau

SEQ ID NO: 1820003 - RNA, 19 nt, Homo sapiens
  misc_RNA (1)...(19): siRNA sense strand
gguguuaaucuuuauguga

SEQ ID NO: 1820004 - RNA, 19 nt, Homo sapiens
  misc_RNA (1)...(19): siRNA sense strand
gaacggaaaggagcucaau

SEQ ID NO: 1820005 - RNA, 19 nt, Homo sapiens
  misc_RNA (1)...(19): siRNA sense strand
gaauggaaugcuccuaaau

SEQ ID NO: 1820006 - RNA, 19 nt, Homo sapiens
  misc_RNA (1)...(19): siRNA sense strand
ucacuggcauguuguugga

SEQ ID NO: 1820007 - RNA, 19 nt, Homo sapiens
  misc_RNA (1)...(19): siRNA sense strand
gcuguuuccucuuauucaa

SEQ ID NO: 1820008 - RNA, 19 nt, Homo sapiens
  misc_RNA (1)...(19): siRNA sense strand
auggaaugcuccuaaauga

SEQ ID NO: 1820009 - RNA, 19 nt, Homo sapiens
  misc_RNA (1)...(19): siRNA sense strand
ugaugaacgucuccggaaa

SEQ ID NO: 1820010 - RNA, 19 nt, Homo sapiens
  misc_RNA (1)...(19): siRNA sense strand
ggauuuguaagcuuugaaa

SEQ ID NO: 1820011 - RNA, 19 nt, Homo sapiens
  misc_RNA (1)...(19): siRNA sense strand
ccacuaaagcaguuacaga

SEQ ID NO: 1820012 - RNA, 19 nt, Homo sapiens
  misc_RNA (1)...(19): siRNA sense strand
ggagaagacauggaugaug

SEQ ID NO: 1820013 - RNA, 19 nt, Homo sapiens
  misc_RNA (1)...(19): siRNA sense strand
ugccuuaagugugaaagua

SEQ ID NO: 1820014 - RNA, 19 nt, Homo sapiens
  misc_RNA (1)...(19): siRNA sense strand
uaaagaacgagaagcugaa

SEQ ID NO: 1820015 - RNA, 19 nt, Homo sapiens
  misc_RNA (1)...(19): siRNA sense strand
ccuagaccaccauuuagua

SEQ ID NO: 1820016 - RNA, 19 nt, Homo sapiens
  misc_RNA (1)...(19): siRNA sense strand
agaagaagccacuaaagca

SEQ ID NO: 1820017 - RNA, 19 nt, Homo sapiens
  misc_RNA (1)...(19): siRNA sense strand
guauuuguuggacgauuua

SEQ ID NO: 1820018 - RNA, 19 nt, Homo sapiens
  misc_RNA (1)...(19): siRNA sense strand
accaggguguuaaucuuua

SEQ ID NO: 1820019 - RNA, 19 nt, Homo sapiens
  misc_RNA (1)...(19): siRNA sense strand
gcaaauuugaacagaugaa

SEQ ID NO: 1820020 - RNA, 19 nt, Homo sapiens
  misc_RNA (1)...(19): siRNA sense strand
gugugaaaguaaugacuga

SEQ ID NO: 1820021 - RNA, 19 nt, Homo sapiens
  misc_RNA (1)...(19): siRNA sense strand
cuaaaugaucgcaaaguau

SEQ ID NO: 1820022 - RNA, 19 nt, Homo sapiens
  misc_RNA (1)...(19): siRNA sense strand
ccaccgguguuccaacugu

SEQ ID NO: 1820023 - RNA, 19 nt, Homo sapiens
  misc_RNA (1)...(19): siRNA sense strand
agaagccacuaaagcaguu

SEQ ID NO: 1820024 - RNA, 19 nt, Homo sapiens
  misc_RNA (1)...(19): siRNA sense strand
gauuuggauuuguaagcuu

SEQ ID NO: 1820025 - RNA, 19 nt, Homo sapiens
  misc_RNA (1)...(19): siRNA sense strand
cuacaagcccaccaagcua

SEQ ID NO: 1820026 - RNA, 19 nt, Homo sapiens
  misc_RNA (1)...(19): siRNA sense strand
gccaugcacccuacucuug

SEQ ID NO: 1820027 - RNA, 19 nt, Homo sapiens
  misc_RNA (1)...(19): siRNA sense strand
gcacagccacaaguuacaa

SEQ ID NO: 1820028 - RNA, 19 nt, Homo sapiens
  misc_RNA (1)...(19): siRNA sense strand
uaacacaucaacacagaca

SEQ ID NO: 1820029 - RNA, 19 nt, Homo sapiens
  misc_RNA (1)...(19): siRNA sense strand
ucagaaccgugcugcauac

SEQ ID NO: 1820030 - RNA, 19 nt, Homo sapiens
  misc_RNA (1)...(19): siRNA sense strand
aguauuuguuggacgauuu

SEQ ID NO: 1820031 - RNA, 19 nt, Homo sapiens
  misc_RNA (1)...(19): siRNA sense strand
gaccaccauuuaguacuau

SEQ ID NO: 1820032 - RNA, 19 nt, Homo sapiens
  misc_RNA (1)...(19): siRNA sense strand
gcaaguguacgagcuguuc

SEQ ID NO: 1820033 - RNA, 19 nt, Homo sapiens
  misc_RNA (1)...(19): siRNA sense strand
cacuaaagcaguuacagaa

SEQ ID NO: 1820034 - RNA, 19 nt, Homo sapiens
  misc_RNA (1)...(19): siRNA sense strand
ggauuuggauuuguaagcu

SEQ ID NO: 1820035 - RNA, 19 nt, Homo sapiens
  misc_RNA (1)...(19): siRNA sense strand
caucaagaauuuuggagaa

SEQ ID NO: 1820036 - RNA, 19 nt, Homo sapiens
  misc_RNA (1)...(19): siRNA sense strand
acccuacucuugcugguaa

SEQ ID NO: 1820037 - RNA, 19 nt, Homo sapiens
  misc_RNA (1)...(19): siRNA sense strand
gccaggcucaccucacuaa

SEQ ID NO: 1820038 - RNA, 19 nt, Homo sapiens
  misc_RNA (1)...(19): siRNA sense strand
uacaaucacuagugcaaag

SEQ ID NO: 1820039 - RNA, 19 nt, Homo sapiens
  misc_RNA (1)...(19): siRNA sense strand
ccaggguguuaaucuuuau

SEQ ID NO: 1820040 - RNA, 19 nt, Homo sapiens
  misc_RNA (1)...(19): siRNA sense strand
ggaaacaccugaggagaaa

SEQ ID NO: 1820041 - RNA, 19 nt, Homo sapiens
  misc_RNA (1)...(19): siRNA sense strand
ggagaacuggagaauauua

SEQ ID NO: 1820042 - RNA, 19 nt, Homo sapiens
  misc_RNA (1)...(19): siRNA sense strand
caaagagccugauguacug

SEQ ID NO: 1820043 - RNA, 19 nt, Homo sapiens
  misc_RNA (1)...(19): siRNA sense strand
aaauacagcagaagaagua

SEQ ID NO: 1820044 - RNA, 19 nt, Homo sapiens
  misc_RNA (1)...(19): siRNA sense strand
gccacgacauguuugauuu

SEQ ID NO: 1820045 - RNA, 19 nt, Homo sapiens
  misc_RNA (1)...(19): siRNA sense strand
uggagaauauuaagccuaa

SEQ ID NO: 1820046 - RNA, 19 nt, Homo sapiens
  misc_RNA (1)...(19): siRNA sense strand
ggagaugaccgauggaugu

SEQ ID NO: 1820047 - RNA, 19 nt, Homo sapiens
  misc_RNA (1)...(19): siRNA sense strand
agacaaagagccugaugua

SEQ ID NO: 1820048 - RNA, 19 nt, Homo sapiens
  misc_RNA (1)...(19): siRNA sense strand
ggagauacaacaagacaug

SEQ ID NO: 1820049 - RNA, 19 nt, Homo sapiens
  misc_RNA (1)...(19): siRNA sense strand
gaacaaauaaccacgaaaa

SEQ ID NO: 1820050 - RNA, 19 nt, Homo sapiens
  misc_RNA (1)...(19): siRNA sense strand
gugagaaacccaauccuuu

SEQ ID NO: 1820051 - RNA, 19 nt, Homo sapiens
  misc_RNA (1)...(19): siRNA sense strand
gcaugcagcagaagauauu

SEQ ID NO: 1820052 - RNA, 19 nt, Homo sapiens
  misc_RNA (1)...(19): siRNA sense strand
gaucgaggccauuguacaa

SEQ ID NO: 1820053 - RNA, 19 nt, Homo sapiens
  misc_RNA (1)...(19): siRNA sense strand
gagaaacccaauccuuuga

SEQ ID NO: 1820054 - RNA, 19 nt, Homo sapiens
  misc_RNA (1)...(19): siRNA sense strand
gagaaacaaaccaccauug

SEQ ID NO: 1820055 - RNA, 19 nt, Homo sapiens
  misc_RNA (1)...(19): siRNA sense strand
auggagaacuggagaauau

SEQ ID NO: 1820056 - RNA, 19 nt, Homo sapiens
  misc_RNA (1)...(19): siRNA sense strand
gagaacuggagaauauuaa

SEQ ID NO: 1820057 - RNA, 19 nt, Homo sapiens
  misc_RNA (1)...(19): siRNA sense strand
gagacuccauggugcaguu

SEQ ID NO: 1820058 - RNA, 19 nt, Homo sapiens
  misc_RNA (1)...(19): siRNA sense strand
ggagaaacaaaccaccauu

SEQ ID NO: 1820059 - RNA, 19 nt, Homo sapiens
  misc_RNA (1)...(19): siRNA sense strand
ugagaaacccaauccuuug

SEQ ID NO: 1820060 - RNA, 19 nt, Homo sapiens
  misc_RNA (1)...(19): siRNA sense strand
gaagauauucaaggagaug

SEQ ID NO: 1820061 - RNA, 19 nt, Homo sapiens
  misc_RNA (1)...(19): siRNA sense strand
ugaaccaacuccucaaggu

SEQ ID NO: 1820062 - RNA, 19 nt, Homo sapiens
  misc_RNA (1)...(19): siRNA sense strand
acaaagagccugauguacu

SEQ ID NO: 1820063 - RNA, 19 nt, Homo sapiens
  misc_RNA (1)...(19): siRNA sense strand
gcaguuaaugcagcaauau

SEQ ID NO: 1820064 - RNA, 19 nt, Homo sapiens
  misc_RNA (1)...(19): siRNA sense strand
gaauggagaacuggagaau

SEQ ID NO: 1820065 - RNA, 19 nt, Homo sapiens
  misc_RNA (1)...(19): siRNA sense strand
ggugagaaacccaauccuu

SEQ ID NO: 1820066 - RNA, 19 nt, Homo sapiens
  misc_RNA (1)...(19): siRNA sense strand
cauuguauuggguuuguua

SEQ ID NO: 1820067 - RNA, 19 nt, Homo sapiens
  misc_RNA (1)...(19): siRNA sense strand
gaggccauuguacaacuua

SEQ ID NO: 1820068 - RNA, 19 nt, Homo sapiens
  misc_RNA (1)...(19): siRNA sense strand
guacaacuuaucaacacaa

SEQ ID NO: 1820069 - RNA, 19 nt, Homo sapiens
  misc_RNA (1)...(19): siRNA sense strand
ugucucagcacaacagauu

SEQ ID NO: 1820070 - RNA, 19 nt, Homo sapiens
  misc_RNA (1)...(19): siRNA sense strand
caaauaaccacgaaaauac

SEQ ID NO: 1820071 - RNA, 19 nt, Homo sapiens
  misc_RNA (1)...(19): siRNA sense strand
acuaaagaauggagaacug

SEQ ID NO: 1820072 - RNA, 19 nt, Homo sapiens
  misc_RNA (1)...(19): siRNA sense strand
gagauauggcgagagcuuu

SEQ ID NO: 1820073 - RNA, 19 nt, Homo sapiens
  misc_RNA (1)...(19): siRNA sense strand
gagacuaaagaauggagaa

SEQ ID NO: 1820074 - RNA, 19 nt, Homo sapiens
  misc_RNA (1)...(19): siRNA sense strand
agcagaagauauucaagga

SEQ ID NO: 1820075 - RNA, 19 nt, Homo sapiens
  misc_RNA (1)...(19): siRNA sense strand
ggaacaaauaaccacgaaa

SEQ ID NO: 1820076 - RNA, 19 nt, Homo sapiens
  misc_RNA (1)...(19): siRNA sense strand
uauuaagccuaaggucauu

SEQ ID NO: 1820077 - RNA, 19 nt, Homo sapiens
  misc_RNA (1)...(19): siRNA sense strand
gaacuggagaauauuaagc

SEQ ID NO: 1820078 - RNA, 19 nt, Homo sapiens
  misc_RNA (1)...(19): siRNA sense strand
ccacgaaaauacagcagaa

SEQ ID NO: 1820079 - RNA, 19 nt, Homo sapiens
  misc_RNA (1)...(19): siRNA sense strand
aggaacaaauaaccacgaa

SEQ ID NO: 1820080 - RNA, 19 nt, Homo sapiens
  misc_RNA (1)...(19): siRNA sense strand
gagaauauuaagccuaagg

SEQ ID NO: 1820081 - RNA, 19 nt, Homo sapiens
  misc_RNA (1)...(19): siRNA sense strand
gcaaaccccugcaugaacu

SEQ ID NO: 1820082 - RNA, 19 nt, Homo sapiens
  misc_RNA (1)...(19): siRNA sense strand
ugccgaagcuugccaacgu

SEQ ID NO: 1820083 - RNA, 19 nt, Homo sapiens
  misc_RNA (1)...(19): siRNA sense strand
cgaggccauuguacaacuu

SEQ ID NO: 1820084 - RNA, 19 nt, Homo sapiens
  misc_RNA (1)...(19): siRNA sense strand
agccuaaggucauuguugu

SEQ ID NO: 1820085 - RNA, 19 nt, Homo sapiens
  misc_RNA (1)...(19): siRNA sense strand
aggaaacaccugaggagaa

SEQ ID NO: 1820086 - RNA, 19 nt, Homo sapiens
  misc_RNA (1)...(19): siRNA sense strand
ugagauauggcgagagcuu

SEQ ID NO: 1820087 - RNA, 19 nt, Homo sapiens
  misc_RNA (1)...(19): siRNA sense strand
gccauuguacaacuuauca

SEQ ID NO: 1820088 - RNA, 19 nt, Homo sapiens
  misc_RNA (1)...(19): siRNA sense strand
ggaucgaggccauuguaca

SEQ ID NO: 1820089 - RNA, 19 nt, Homo sapiens
  misc_RNA (1)...(19): siRNA sense strand
ggacuguaaagacaaagag

SEQ ID NO: 1820090 - RNA, 19 nt, Homo sapiens
  misc_RNA (1)...(19): siRNA sense strand
uguggagacuaaagaaugg

SEQ ID NO: 1820091 - RNA, 19 nt, Homo sapiens
  misc_RNA (1)...(19): siRNA sense strand
gaaaauacagcagaagaag

SEQ ID NO: 1820092 - RNA, 19 nt, Homo sapiens
  misc_RNA (1)...(19): siRNA sense strand
aaacaccugaggagaaaca

SEQ ID NO: 1820093 - RNA, 19 nt, Homo sapiens
  misc_RNA (1)...(19): siRNA sense strand
gagccaaggagacucaaac

SEQ ID NO: 1820094 - RNA, 19 nt, Homo sapiens
  misc_RNA (1)...(19): siRNA sense strand
acucaaacccagcagcuau

SEQ ID NO: 1820095 - RNA, 19 nt, Homo sapiens
  misc_RNA (1)...(19): siRNA sense strand
gagauacaacaagacaugu

SEQ ID NO: 1820096 - RNA, 19 nt, Homo sapiens
  misc_RNA (1)...(19): siRNA sense strand
caacgugcagcuccuggau

SEQ ID NO: 1820097 - RNA, 19 nt, Homo sapiens
  misc_RNA (1)...(19): siRNA sense strand
agaagauauucaaggagau

SEQ ID NO: 1820098 - RNA, 19 nt, Homo sapiens
  misc_RNA (1)...(19): siRNA sense strand
ucucagcacaacagauuug

SEQ ID NO: 1820099 - RNA, 19 nt, Homo sapiens
  misc_RNA (1)...(19): siRNA sense strand
uaaugcagcaauaugagau

SEQ ID NO: 1820100 - RNA, 19 nt, Homo sapiens
  misc_RNA (1)...(19): siRNA sense strand
ugggaucgaggccauugua

SEQ ID NO: 1820101 - RNA, 19 nt, Homo sapiens
  misc_RNA (1)...(19): siRNA sense strand
gauaaugccucaacugauu

SEQ ID NO: 1820102 - RNA, 19 nt, Homo sapiens
  misc_RNA (1)...(19): siRNA sense strand
gaaacagaauacccaguua

SEQ ID NO: 1820103 - RNA, 19 nt, Homo sapiens
  misc_RNA (1)...(19): siRNA sense strand
gaaaggauuuaaccacaaa

SEQ ID NO: 1820104 - RNA, 19 nt, Homo sapiens
  misc_RNA (1)...(19): siRNA sense strand
gaaaggaaauguuguuugg

SEQ ID NO: 1820105 - RNA, 19 nt, Homo sapiens
  misc_RNA (1)...(19): siRNA sense strand
gaacuggaaugaagugguu

SEQ ID NO: 1820106 - RNA, 19 nt, Homo sapiens
  misc_RNA (1)...(19): siRNA sense strand
uggcacagcuggaguauaa

SEQ ID NO: 1820107 - RNA, 19 nt, Homo sapiens
  misc_RNA (1)...(19): siRNA sense strand
ggaaugaagugguuacaca

SEQ ID NO: 1820108 - RNA, 19 nt, Homo sapiens
  misc_RNA (1)...(19): siRNA sense strand
gagcugaaauagaagauga

SEQ ID NO: 1820109 - RNA, 19 nt, Homo sapiens
  misc_RNA (1)...(19): siRNA sense strand
gauaggaacuggaaugaag

SEQ ID NO: 1820110 - RNA, 19 nt, Homo sapiens
  misc_RNA (1)...(19): siRNA sense strand
aagaaacacuggauacuuu

SEQ ID NO: 1820111 - RNA, 19 nt, Homo sapiens
  misc_RNA (1)...(19): siRNA sense strand
ggacucaggcaaccaaaua

SEQ ID NO: 1820112 - RNA, 19 nt, Homo sapiens
  misc_RNA (1)...(19): siRNA sense strand
ggagaacaugguuuaauua

SEQ ID NO: 1820113 - RNA, 19 nt, Homo sapiens
  misc_RNA (1)...(19): siRNA sense strand
gcugaacuguggaauagua

SEQ ID NO: 1820114 - RNA, 19 nt, Homo sapiens
  misc_RNA (1)...(19): siRNA sense strand
ggucuaugauugacaagua

SEQ ID NO: 1820115 - RNA, 19 nt, Homo sapiens
  misc_RNA (1)...(19): siRNA sense strand
gcucauuauugacuacuua

SEQ ID NO: 1820116 - RNA, 19 nt, Homo sapiens
  misc_RNA (1)...(19): siRNA sense strand
agaagaagaugaugaugaa

SEQ ID NO: 1820117 - RNA, 19 nt, Homo sapiens
  misc_RNA (1)...(19): siRNA sense strand
gcacugaagucauucucaa

SEQ ID NO: 1820118 - RNA, 19 nt, Homo sapiens
  misc_RNA (1)...(19): siRNA sense strand
ugaagaagaccuacuuuaa

SEQ ID NO: 1820119 - RNA, 19 nt, Homo sapiens
  misc_RNA (1)...(19): siRNA sense strand
ucaauauccuuacgcauaa

SEQ ID NO: 1820120 - RNA, 19 nt, Homo sapiens
  misc_RNA (1)...(19): siRNA sense strand
gaagaugaguuugaugaug

SEQ ID NO: 1820121 - RNA, 19 nt, Homo sapiens
  misc_RNA (1)...(19): siRNA sense strand
guacauagccacggacuuu

SEQ ID NO: 1820122 - RNA, 19 nt, Homo sapiens
  misc_RNA (1)...(19): siRNA sense strand
ggucacagcucucaucaag

SEQ ID NO: 1820123 - RNA, 19 nt, Homo sapiens
  misc_RNA (1)...(19): siRNA sense strand
gaaauacaacagaugauga

SEQ ID NO: 1820124 - RNA, 19 nt, Homo sapiens
  misc_RNA (1)...(19): siRNA sense strand
caacaacacucaaccuucu

SEQ ID NO: 1820125 - RNA, 19 nt, Homo sapiens
  misc_RNA (1)...(19): siRNA sense strand
gggaggagguggauaggaa

SEQ ID NO: 1820126 - RNA, 19 nt, Homo sapiens
  misc_RNA (1)...(19): siRNA sense strand
cgaauuaaauccagaucuu

SEQ ID NO: 1820127 - RNA, 19 nt, Homo sapiens
  misc_RNA (1)...(19): siRNA sense strand
gaacagacagauccaguug

SEQ ID NO: 1820128 - RNA, 19 nt, Homo sapiens
  misc_RNA (1)...(19): siRNA sense strand
gaucagagaugcaauugac

SEQ ID NO: 1820129 - RNA, 19 nt, Homo sapiens
  misc_RNA (1)...(19): siRNA sense strand
uuacaugacuuuagugguu

SEQ ID NO: 1820130 - RNA, 19 nt, Homo sapiens
  misc_RNA (1)...(19): siRNA sense strand
ccagcugucuuuacaauga

SEQ ID NO: 1820131 - RNA, 19 nt, Homo sapiens
  misc_RNA (1)...(19): siRNA sense strand
gagccaagaaagaauaaua

SEQ ID NO: 1820132 - RNA, 19 nt, Homo sapiens
  misc_RNA (1)...(19): siRNA sense strand
ugacugaaaucuucucuca

SEQ ID NO: 1820133 - RNA, 19 nt, Homo sapiens
  misc_RNA (1)...(19): siRNA sense strand
gauagacugugguuuaagu

SEQ ID NO: 1820134 - RNA, 19 nt, Homo sapiens
  misc_RNA (1)...(19): siRNA sense strand
cuacuuagcugaguucaau

SEQ ID NO: 1820135 - RNA, 19 nt, Homo sapiens
  misc_RNA (1)...(19): siRNA sense strand
ggaaacagaauacccaguu

SEQ ID NO: 1820136 - RNA, 19 nt, Homo sapiens
  misc_RNA (1)...(19): siRNA sense strand
gaaaugguuuggaacucaa

SEQ ID NO: 1820137 - RNA, 19 nt, Homo sapiens
  misc_RNA (1)...(19): siRNA sense strand
uacaacagaugaugaagaa

SEQ ID NO: 1820138 - RNA, 19 nt, Homo sapiens
  misc_RNA (1)...(19): siRNA sense strand
uaucagggcuuucacaaca

SEQ ID NO: 1820139 - RNA, 19 nt, Homo sapiens
  misc_RNA (1)...(19): siRNA sense strand
ggagaugccugugcaguuc

SEQ ID NO: 1820140 - RNA, 19 nt, Homo sapiens
  misc_RNA (1)...(19): siRNA sense strand
uggagaacaugguuuaauu

SEQ ID NO: 1820141 - RNA, 19 nt, Homo sapiens
  misc_RNA (1)...(19): siRNA sense strand
caacagaugaugaagaaga

SEQ ID NO: 1820142 - RNA, 19 nt, Homo sapiens
  misc_RNA (1)...(19): siRNA sense strand
gaagagagagcagaagcua

SEQ ID NO: 1820143 - RNA, 19 nt, Homo sapiens
  misc_RNA (1)...(19): siRNA sense strand
aauagaagaugacgaugaa

SEQ ID NO: 1820144 - RNA, 19 nt, Homo sapiens
  misc_RNA (1)...(19): siRNA sense strand
aagaugaguuugaugauga

SEQ ID NO: 1820145 - RNA, 19 nt, Homo sapiens
  misc_RNA (1)...(19): siRNA sense strand
gcucagcguucauguuguu

SEQ ID NO: 1820146 - RNA, 19 nt, Homo sapiens
  misc_RNA (1)...(19): siRNA sense strand
gagaauauacgcuuaugga

SEQ ID NO: 1820147 - RNA, 19 nt, Homo sapiens
  misc_RNA (1)...(19): siRNA sense strand
gggcugaacuguggaauag

SEQ ID NO: 1820148 - RNA, 19 nt, Homo sapiens
  misc_RNA (1)...(19): siRNA sense strand
ugaaauauccagaugagaa

SEQ ID NO: 1820149 - RNA, 19 nt, Homo sapiens
  misc_RNA (1)...(19): siRNA sense strand
aagaagaccuacuuuaaca

SEQ ID NO: 1820150 - RNA, 19 nt, Homo sapiens
  misc_RNA (1)...(19): siRNA sense strand
gaagaagaccuacuuuaac

SEQ ID NO: 1820151 - RNA, 19 nt, Homo sapiens
  misc_RNA (1)...(19): siRNA sense strand
gucaauauccuuacgcaua

SEQ ID NO: 1820152 - RNA, 19 nt, Homo sapiens
  misc_RNA (1)...(19): siRNA sense strand
gaacuguggaauaguaauu

SEQ ID NO: 1820153 - RNA, 19 nt, Homo sapiens
  misc_RNA (1)...(19): siRNA sense strand
cagcauuucuauuacauug

SEQ ID NO: 1820154 - RNA, 19 nt, Homo sapiens
  misc_RNA (1)...(19): siRNA sense strand
gaauaugcccguuggucua

SEQ ID NO: 1820155 - RNA, 19 nt, Homo sapiens
  misc_RNA (1)...(19): siRNA sense strand
ggaagaagaagaagaugau

SEQ ID NO: 1820156 - RNA, 19 nt, Homo sapiens
  misc_RNA (1)...(19): siRNA sense strand
gccagacccuuuccuauuc

SEQ ID NO: 1820157 - RNA, 19 nt, Homo sapiens
  misc_RNA (1)...(19): siRNA sense strand
ccacggacuuuacguugaa

SEQ ID NO: 1820158 - RNA, 19 nt, Homo sapiens
  misc_RNA (1)...(19): siRNA sense strand
agacagauccaguugagua

SEQ ID NO: 1820159 - RNA, 19 nt, Homo sapiens
  misc_RNA (1)...(19): siRNA sense strand
gcaauaccgauacaucaaa

SEQ ID NO: 1820160 - RNA, 19 nt, Homo sapiens
  misc_RNA (1)...(19): siRNA sense strand
caaagcauauauacguuuc

SEQ ID NO: 1820161 - RNA, 19 nt, Homo sapiens
  misc_RNA (1)...(19): siRNA sense strand
gugagaacaugcagcugua

SEQ ID NO: 1820162 - RNA, 19 nt, Homo sapiens
  misc_RNA (1)...(19): siRNA sense strand
gcaauugaccgugaaguug

SEQ ID NO: 1820163 - RNA, 19 nt, Homo sapiens
  misc_RNA (1)...(19): siRNA sense strand
gaaauauccagaugagaau

SEQ ID NO: 1820164 - RNA, 19 nt, Homo sapiens
  misc_RNA (1)...(19): siRNA sense strand
ccaggagucuaagagaaua

SEQ ID NO: 1820165 - RNA, 19 nt, Homo sapiens
  misc_RNA (1)...(19): siRNA sense strand
caccaucuaugcaaaguga

SEQ ID NO: 1820166 - RNA, 19 nt, Homo sapiens
  misc_RNA (1)...(19): siRNA sense strand
caagguugccugugguaua

SEQ ID NO: 1820167 - RNA, 19 nt, Homo sapiens
  misc_RNA (1)...(19): siRNA sense strand
guguucagcauuucuauua

SEQ ID NO: 1820168 - RNA, 19 nt, Homo sapiens
  misc_RNA (1)...(19): siRNA sense strand
gaaauggugagacaggauu

SEQ ID NO: 1820169 - RNA, 19 nt, Homo sapiens
  misc_RNA (1)...(19): siRNA sense strand
caucuaauuucaccguuga

SEQ ID NO: 1820170 - RNA, 19 nt, Homo sapiens
  misc_RNA (1)...(19): siRNA sense strand
ggaaauacaacagaugaug

SEQ ID NO: 1820171 - RNA, 19 nt, Homo sapiens
  misc_RNA (1)...(19): siRNA sense strand
gacaggaucugggcgagaa

SEQ ID NO: 1820172 - RNA, 19 nt, Homo sapiens
  misc_RNA (1)...(19): siRNA sense strand
gguccucuuugauaucuuu

SEQ ID NO: 1820173 - RNA, 19 nt, Homo sapiens
  misc_RNA (1)...(19): siRNA sense strand
aaggaaauguuguuuggaa

SEQ ID NO: 1820174 - RNA, 19 nt, Homo sapiens
  misc_RNA (1)...(19): siRNA sense strand
gaaguugaagcuguugaua

SEQ ID NO: 1820175 - RNA, 19 nt, Homo sapiens
  misc_RNA (1)...(19): siRNA sense strand
gaguuucgcugauccagau

SEQ ID NO: 1820176 - RNA, 19 nt, Homo sapiens
  misc_RNA (1)...(19): siRNA sense strand
ggaggaagaagaagaagau

SEQ ID NO: 1820177 - RNA, 19 nt, Homo sapiens
  misc_RNA (1)...(19): siRNA sense strand
augaugaucuugauacuga

SEQ ID NO: 1820178 - RNA, 19 nt, Homo sapiens
  misc_RNA (1)...(19): siRNA sense strand
ugauacacaugcuagauug

SEQ ID NO: 1820179 - RNA, 19 nt, Homo sapiens
  misc_RNA (1)...(19): siRNA sense strand
ggaagaauuagaagagaga

SEQ ID NO: 1820180 - RNA, 19 nt, Homo sapiens
  misc_RNA (1)...(19): siRNA sense strand
uugaagcacugaagucauu

SEQ ID NO: 1820181 - RNA, 19 nt, Homo sapiens
  misc_RNA (1)...(19): siRNA sense strand
ugaaaggauuuaaccacaa

SEQ ID NO: 1820182 - RNA, 19 nt, Homo sapiens
  misc_RNA (1)...(19): siRNA sense strand
ccauuuaacggauccauuu

SEQ ID NO: 1820183 - RNA, 19 nt, Homo sapiens
  misc_RNA (1)...(19): siRNA sense strand
aagaggagguggaggaaga

SEQ ID NO: 1820184 - RNA, 19 nt, Homo sapiens
  misc_RNA (1)...(19): siRNA sense strand
gcacauggaagaaccuugu

SEQ ID NO: 1820185 - RNA, 19 nt, Homo sapiens
  misc_RNA (1)...(19): siRNA sense strand
cagcaaaugugguccucuu

SEQ ID NO: 1820186 - RNA, 19 nt, Homo sapiens
  misc_RNA (1)...(19): siRNA sense strand
aaggagaaaugguuuggaa

SEQ ID NO: 1820187 - RNA, 19 nt, Homo sapiens
  misc_RNA (1)...(19): siRNA sense strand
aaugugaccucaaggagaa

SEQ ID NO: 1820188 - RNA, 19 nt, Homo sapiens
  misc_RNA (1)...(19): siRNA sense strand
gaagagauucggaaaauug

SEQ ID NO: 1820189 - RNA, 19 nt, Homo sapiens
  misc_RNA (1)...(19): siRNA sense strand
ucuauuacauugacugaug

SEQ ID NO: 1820190 - RNA, 19 nt, Homo sapiens
  misc_RNA (1)...(19): siRNA sense strand
ggaugaaucugaggaagag

SEQ ID NO: 1820191 - RNA, 19 nt, Homo sapiens
  misc_RNA (1)...(19): siRNA sense strand
ggagguggaggaagaagaa

SEQ ID NO: 1820192 - RNA, 19 nt, Homo sapiens
  misc_RNA (1)...(19): siRNA sense strand
gaagaccuacuuuaacauc

SEQ ID NO: 1820193 - RNA, 19 nt, Homo sapiens
  misc_RNA (1)...(19): siRNA sense strand
uguuucagcucauuauuga

SEQ ID NO: 1820194 - RNA, 19 nt, Homo sapiens
  misc_RNA (1)...(19): siRNA sense strand
gaugaggguuaugaacauu

SEQ ID NO: 1820195 - RNA, 19 nt, Homo sapiens
  misc_RNA (1)...(19): siRNA sense strand
caugcuagauugagagaau

SEQ ID NO: 1820196 - RNA, 19 nt, Homo sapiens
  misc_RNA (1)...(19): siRNA sense strand
acugauagacugugguuua

SEQ ID NO: 1820197 - RNA, 19 nt, Homo sapiens
  misc_RNA (1)...(19): siRNA sense strand
gcucauagagggccaggaa

SEQ ID NO: 1820198 - RNA, 19 nt, Homo sapiens
  misc_RNA (1)...(19): siRNA sense strand
ucagguaccaggagucuaa

SEQ ID NO: 1820199 - RNA, 19 nt, Homo sapiens
  misc_RNA (1)...(19): siRNA sense strand
aaacagaauacccaguuaa

SEQ ID NO: 1820200 - RNA, 19 nt, Homo sapiens
  misc_RNA (1)...(19): siRNA sense strand
ggaacaaggcgaagucuac

SEQ ID NO: 1820201 - RNA, 19 nt, Homo sapiens
  misc_RNA (1)...(19): siRNA sense strand
ggauaaagcuguuggaauu

SEQ ID NO: 1820202 - RNA, 19 nt, Homo sapiens
  misc_RNA (1)...(19): siRNA sense strand
caaccaagcuuucagacaa

SEQ ID NO: 1820203 - RNA, 19 nt, Homo sapiens
  misc_RNA (1)...(19): siRNA sense strand
gaacagucauugcugaguu

SEQ ID NO: 1820204 - RNA, 19 nt, Homo sapiens
  misc_RNA (1)...(19): siRNA sense strand
guucagguaucuuuaacua

SEQ ID NO: 1820205 - RNA, 19 nt, Homo sapiens
  misc_RNA (1)...(19): siRNA sense strand
ucaaugagcugcugcuuuu

SEQ ID NO: 1820206 - RNA, 19 nt, Homo sapiens
  misc_RNA (1)...(19): siRNA sense strand
ucacugugguugccauauu

SEQ ID NO: 1820207 - RNA, 19 nt, Homo sapiens
  misc_RNA (1)...(19): siRNA sense strand
cagcgucacuguuccauca

SEQ ID NO: 1820208 - RNA, 19 nt, Homo sapiens
  misc_RNA (1)...(19): siRNA sense strand
ccaaucaucuacagcuuca

SEQ ID NO: 1820209 - RNA, 19 nt, Homo sapiens
  misc_RNA (1)...(19): siRNA sense strand
agacaaggauaaagcuguu

SEQ ID NO: 1820210 - RNA, 19 nt, Homo sapiens
  misc_RNA (1)...(19): siRNA sense strand
ugaccgccauggccuauga

SEQ ID NO: 1820211 - RNA, 19 nt, Homo sapiens
  misc_RNA (1)...(19): siRNA sense strand
gauaaagcuguuggaauuu

SEQ ID NO: 1820212 - RNA, 19 nt, Homo sapiens
  misc_RNA (1)...(19): siRNA sense strand
uuucaacacugucaucaau

SEQ ID NO: 1820213 - RNA, 19 nt, Homo sapiens
  misc_RNA (1)...(19): siRNA sense strand
gcagccaguugucuuugug

SEQ ID NO: 1820214 - RNA, 19 nt, Homo sapiens
  misc_RNA (1)...(19): siRNA sense strand
uuacccagcucuucuucuu

SEQ ID NO: 1820215 - RNA, 19 nt, Homo sapiens
  misc_RNA (1)...(19): siRNA sense strand
gaucaaucacuucuacugu

SEQ ID NO: 1820216 - RNA, 19 nt, Homo sapiens
  misc_RNA (1)...(19): siRNA sense strand
guccugggcuugugcuuuc

SEQ ID NO: 1820217 - RNA, 19 nt, Homo sapiens
  misc_RNA (1)...(19): siRNA sense strand
guagagggcaggaagaaag

SEQ ID NO: 1820218 - RNA, 19 nt, Homo sapiens
  misc_RNA (1)...(19): siRNA sense strand
gaaccuaucagugcuggau

SEQ ID NO: 1820219 - RNA, 19 nt, Homo sapiens
  misc_RNA (1)...(19): siRNA sense strand
gaaagccuucuccacaugu

SEQ ID NO: 1820220 - RNA, 19 nt, Homo sapiens
  misc_RNA (1)...(19): siRNA sense strand
ucauugucaucuccuauau

SEQ ID NO: 1820221 - RNA, 19 nt, Homo sapiens
  misc_RNA (1)...(19): siRNA sense strand
cauggccuaugaccaauuc

SEQ ID NO: 1820222 - RNA, 19 nt, Homo sapiens
  misc_RNA (1)...(19): siRNA sense strand
cauccuggcagcugucuug

SEQ ID NO: 1820223 - RNA, 19 nt, Homo sapiens
  misc_RNA (1)...(19): siRNA sense strand
cuacagcacccgcaugagu

SEQ ID NO: 1820224 - RNA, 19 nt, Homo sapiens
  misc_RNA (1)...(19): siRNA sense strand
gcugcagccaguugucuuu

SEQ ID NO: 1820225 - RNA, 19 nt, Homo sapiens
  misc_RNA (1)...(19): siRNA sense strand
uuugugcucuuccucuuug

SEQ ID NO: 1820226 - RNA, 19 nt, Homo sapiens
  misc_RNA (1)...(19): siRNA sense strand
guucaaccaagcuuucaga

SEQ ID NO: 1820227 - RNA, 19 nt, Homo sapiens
  misc_RNA (1)...(19): siRNA sense strand
cgccauggccuaugaccaa

SEQ ID NO: 1820228 - RNA, 19 nt, Homo sapiens
  misc_RNA (1)...(19): siRNA sense strand
ccauggcucucauugucau

SEQ ID NO: 1820229 - RNA, 19 nt, Homo sapiens
  misc_RNA (1)...(19): siRNA sense strand
gggcuugugcuuucaccaa

SEQ ID NO: 1820230 - RNA, 19 nt, Homo sapiens
  misc_RNA (1)...(19): siRNA sense strand
cgucacuguuccaucaaug

SEQ ID NO: 1820231 - RNA, 19 nt, Homo sapiens
  misc_RNA (1)...(19): siRNA sense strand
cacugugguugccauauuc

SEQ ID NO: 1820232 - RNA, 19 nt, Homo sapiens
  misc_RNA (1)...(19): siRNA sense strand
uguccacgcucaacuucug

SEQ ID NO: 1820233 - RNA, 19 nt, Homo sapiens
  misc_RNA (1)...(19): siRNA sense strand
ucacuguuccaucaauguu

SEQ ID NO: 1820234 - RNA, 19 nt, Homo sapiens
  misc_RNA (1)...(19): siRNA sense strand
agucauugcugaguucauc

SEQ ID NO: 1820235 - RNA, 19 nt, Homo sapiens
  misc_RNA (1)...(19): siRNA sense strand
ucaacacugucaucaaucc

SEQ ID NO: 1820236 - RNA, 19 nt, Homo sapiens
  misc_RNA (1)...(19): siRNA sense strand
ccagcacccaacucaauga

SEQ ID NO: 1820237 - RNA, 19 nt, Homo sapiens
  misc_RNA (1)...(19): siRNA sense strand
gugcaucagcgucacuguu

SEQ ID NO: 1820238 - RNA, 19 nt, Homo sapiens
  misc_RNA (1)...(19): siRNA sense strand
caacuucuguggccccaau

SEQ ID NO: 1820239 - RNA, 19 nt, Homo sapiens
  misc_RNA (1)...(19): siRNA sense strand
gcgucacuguuccaucaau

SEQ ID NO: 1820240 - RNA, 19 nt, Homo sapiens
  misc_RNA (1)...(19): siRNA sense strand
ucaucaaucccaugcugaa

SEQ ID NO: 1820241 - RNA, 19 nt, Homo sapiens
  misc_RNA (1)...(19): siRNA sense strand
ggaacagucauugcugagu

SEQ ID NO: 1820242 - RNA, 19 nt, Homo sapiens
  misc_RNA (1)...(19): siRNA sense strand
gaaagcacaugccaguuua

SEQ ID NO: 1820243 - RNA, 19 nt, Homo sapiens
  misc_RNA (1)...(19): siRNA sense strand
gcaauaaugucaucucuau

SEQ ID NO: 1820244 - RNA, 19 nt, Homo sapiens
  misc_RNA (1)...(19): siRNA sense strand
acaaggaucugccauaaua

SEQ ID NO: 1820245 - RNA, 19 nt, Homo sapiens
  misc_RNA (1)...(19): siRNA sense strand
gaacagaagugugacauug

SEQ ID NO: 1820246 - RNA, 19 nt, Homo sapiens
  misc_RNA (1)...(19): siRNA sense strand
caacagaaauugugcuuga

SEQ ID NO: 1820247 - RNA, 19 nt, Homo sapiens
  misc_RNA (1)...(19): siRNA sense strand
caacuccucugaaagauaa

SEQ ID NO: 1820248 - RNA, 19 nt, Homo sapiens
  misc_RNA (1)...(19): siRNA sense strand
gaauggauguagacaaauu

SEQ ID NO: 1820249 - RNA, 19 nt, Homo sapiens
  misc_RNA (1)...(19): siRNA sense strand
gaacuggaauugcagaaau

SEQ ID NO: 1820250 - RNA, 19 nt, Homo sapiens
  misc_RNA (1)...(19): siRNA sense strand
ccaaauaaguaccagcaua

SEQ ID NO: 1820251 - RNA, 19 nt, Homo sapiens
  misc_RNA (1)...(19): siRNA sense strand
caacaacucagcagagaua

SEQ ID NO: 1820252 - RNA, 19 nt, Homo sapiens
  misc_RNA (1)...(19): siRNA sense strand
ggaauccaaucccaguaua

SEQ ID NO: 1820253 - RNA, 19 nt, Homo sapiens
  misc_RNA (1)...(19): siRNA sense strand
gaacuuaccagugcuguuu

SEQ ID NO: 1820254 - RNA, 19 nt, Homo sapiens
  misc_RNA (1)...(19): siRNA sense strand
gugcagaguugcucacuuu

SEQ ID NO: 1820255 - RNA, 19 nt, Homo sapiens
  misc_RNA (1)...(19): siRNA sense strand
acagaaauguuacaggaua

SEQ ID NO: 1820256 - RNA, 19 nt, Homo sapiens
  misc_RNA (1)...(19): siRNA sense strand
gagcgaaacucucguccuu

SEQ ID NO: 1820257 - RNA, 19 nt, Homo sapiens
  misc_RNA (1)...(19): siRNA sense strand
gagauucgcugucuucuac

SEQ ID NO: 1820258 - RNA, 19 nt, Homo sapiens
  misc_RNA (1)...(19): siRNA sense strand
gcuugaaucuuuccauaaa

SEQ ID NO: 1820259 - RNA, 19 nt, Homo sapiens
  misc_RNA (1)...(19): siRNA sense strand
gcaccuguaugcaauagaa

SEQ ID NO: 1820260 - RNA, 19 nt, Homo sapiens
  misc_RNA (1)...(19): siRNA sense strand
caaauaaugucccagcaau

SEQ ID NO: 1820261 - RNA, 19 nt, Homo sapiens
  misc_RNA (1)...(19): siRNA sense strand
gcacaucuucaaacaauaa

SEQ ID NO: 1820262 - RNA, 19 nt, Homo sapiens
  misc_RNA (1)...(19): siRNA sense strand
uaacaauauugcccaagua

SEQ ID NO: 1820263 - RNA, 19 nt, Homo sapiens
  misc_RNA (1)...(19): siRNA sense strand
ucacaaggaucugccauaa

SEQ ID NO: 1820264 - RNA, 19 nt, Homo sapiens
  misc_RNA (1)...(19): siRNA sense strand
uaaguaggcuugcugauag

SEQ ID NO: 1820265 - RNA, 19 nt, Homo sapiens
  misc_RNA (1)...(19): siRNA sense strand
gaaauuggaccauacacuu

SEQ ID NO: 1820266 - RNA, 19 nt, Homo sapiens
  misc_RNA (1)...(19): siRNA sense strand
ugucacagcuaucaaauug

SEQ ID NO: 1820267 - RNA, 19 nt, Homo sapiens
  misc_RNA (1)...(19): siRNA sense strand
caacaaccaugaugugcuu

SEQ ID NO: 1820268 - RNA, 19 nt, Homo sapiens
  misc_RNA (1)...(19): siRNA sense strand
ggagaagcuuuaaauguca

SEQ ID NO: 1820269 - RNA, 19 nt, Homo sapiens
  misc_RNA (1)...(19): siRNA sense strand
agagauagaugcaucaaau

SEQ ID NO: 1820270 - RNA, 19 nt, Homo sapiens
  misc_RNA (1)...(19): siRNA sense strand
caagauacuucauuaacug

SEQ ID NO: 1820271 - RNA, 19 nt, Homo sapiens
  misc_RNA (1)...(19): siRNA sense strand
cagcaucuguugaguuaaa

SEQ ID NO: 1820272 - RNA, 19 nt, Homo sapiens
  misc_RNA (1)...(19): siRNA sense strand
gauaacacacaacaguuua

SEQ ID NO: 1820273 - RNA, 19 nt, Homo sapiens
  misc_RNA (1)...(19): siRNA sense strand
guaaguaggcuugcugaua

SEQ ID NO: 1820274 - RNA, 19 nt, Homo sapiens
  misc_RNA (1)...(19): siRNA sense strand
gagaaaaccugccaacuau

SEQ ID NO: 1820275 - RNA, 19 nt, Homo sapiens
  misc_RNA (1)...(19): siRNA sense strand
gcagaacauuguacagaug

SEQ ID NO: 1820276 - RNA, 19 nt, Homo sapiens
  misc_RNA (1)...(19): siRNA sense strand
ggaagaaauuggaccauac

SEQ ID NO: 1820277 - RNA, 19 nt, Homo sapiens
  misc_RNA (1)...(19): siRNA sense strand
gaaaucaaacggcagagaa

SEQ ID NO: 1820278 - RNA, 19 nt, Homo sapiens
  misc_RNA (1)...(19): siRNA sense strand
aagagaaacucaaucagaa

SEQ ID NO: 1820279 - RNA, 19 nt, Homo sapiens
  misc_RNA (1)...(19): siRNA sense strand
gaauuaaacaccaaucaga

SEQ ID NO: 1820280 - RNA, 19 nt, Homo sapiens
  misc_RNA (1)...(19): siRNA sense strand
guaagucagucuaauguag

SEQ ID NO: 1820281 - RNA, 19 nt, Homo sapiens
  misc_RNA (1)...(19): siRNA sense strand
uaucgucucucucaaaguu

SEQ ID NO: 1820282 - RNA, 19 nt, Homo sapiens
  misc_RNA (1)...(19): siRNA sense strand
agaaggcacuccuguagaa

SEQ ID NO: 1820283 - RNA, 19 nt, Homo sapiens
  misc_RNA (1)...(19): siRNA sense strand
ugagaaaucuauagcuuca

SEQ ID NO: 1820284 - RNA, 19 nt, Homo sapiens
  misc_RNA (1)...(19): siRNA sense strand
caacuauaaucuugucuuc

SEQ ID NO: 1820285 - RNA, 19 nt, Homo sapiens
  misc_RNA (1)...(19): siRNA sense strand
gaggauauauacaguugau

SEQ ID NO: 1820286 - RNA, 19 nt, Homo sapiens
  misc_RNA (1)...(19): siRNA sense strand
gugcuugaaucuuuccaua

SEQ ID NO: 1820287 - RNA, 19 nt, Homo sapiens
  misc_RNA (1)...(19): siRNA sense strand
caaauaacauucugauagc

SEQ ID NO: 1820288 - RNA, 19 nt, Homo sapiens
  misc_RNA (1)...(19): siRNA sense strand
ccaguuaugucacagcuau

SEQ ID NO: 1820289 - RNA, 19 nt, Homo sapiens
  misc_RNA (1)...(19): siRNA sense strand
uaagagaaacucaaucaga

SEQ ID NO: 1820290 - RNA, 19 nt, Homo sapiens
  misc_RNA (1)...(19): siRNA sense strand
caucaaauaucgucucucu

SEQ ID NO: 1820291 - RNA, 19 nt, Homo sapiens
  misc_RNA (1)...(19): siRNA sense strand
gauaaaccuucuagcaaca

SEQ ID NO: 1820292 - RNA, 19 nt, Homo sapiens
  misc_RNA (1)...(19): siRNA sense strand
cuaaacaaccaucuaauga

SEQ ID NO: 1820293 - RNA, 19 nt, Homo sapiens
  misc_RNA (1)...(19): siRNA sense strand
aaacagcuguacccacuga

SEQ ID NO: 1820294 - RNA, 19 nt, Homo sapiens
  misc_RNA (1)...(19): siRNA sense strand
gauuaccacagaaauguua

SEQ ID NO: 1820295 - RNA, 19 nt, Homo sapiens
  misc_RNA (1)...(19): siRNA sense strand
caaggcacaucuucaaaca

SEQ ID NO: 1820296 - RNA, 19 nt, Homo sapiens
  misc_RNA (1)...(19): siRNA sense strand
uuaaaugccuaucuucaga

SEQ ID NO: 1820297 - RNA, 19 nt, Homo sapiens
  misc_RNA (1)...(19): siRNA sense strand
gagauagaugcaucaaaua

SEQ ID NO: 1820298 - RNA, 19 nt, Homo sapiens
  misc_RNA (1)...(19): siRNA sense strand
gagccuucaucuucuguaa

SEQ ID NO: 1820299 - RNA, 19 nt, Homo sapiens
  misc_RNA (1)...(19): siRNA sense strand
aggcacagcucaguaagua

SEQ ID NO: 1820300 - RNA, 19 nt, Homo sapiens
  misc_RNA (1)...(19): siRNA sense strand
guacagcugugaaggaucu

SEQ ID NO: 1820301 - RNA, 19 nt, Homo sapiens
  misc_RNA (1)...(19): siRNA sense strand
caauguguccuccaccuua

SEQ ID NO: 1820302 - RNA, 19 nt, Homo sapiens
  misc_RNA (1)...(19): siRNA sense strand
ucagaaggcucagggacua

SEQ ID NO: 1820303 - RNA, 19 nt, Homo sapiens
  misc_RNA (1)...(19): siRNA sense strand
ucaaauaucgucucucuca

SEQ ID NO: 1820304 - RNA, 19 nt, Homo sapiens
  misc_RNA (1)...(19): siRNA sense strand
gcuaucaaauugccaagau

SEQ ID NO: 1820305 - RNA, 19 nt, Homo sapiens
  misc_RNA (1)...(19): siRNA sense strand
aggaauggauguagacaaa

SEQ ID NO: 1820306 - RNA, 19 nt, Homo sapiens
  misc_RNA (1)...(19): siRNA sense strand
ggauucagccucaauggaa

SEQ ID NO: 1820307 - RNA, 19 nt, Homo sapiens
  misc_RNA (1)...(19): siRNA sense strand
cauuagugaugauccauuu

SEQ ID NO: 1820308 - RNA, 19 nt, Homo sapiens
  misc_RNA (1)...(19): siRNA sense strand
gaccauacacuuucucaga

SEQ ID NO: 1820309 - RNA, 19 nt, Homo sapiens
  misc_RNA (1)...(19): siRNA sense strand
aaaagaagcuucccaguuc

SEQ ID NO: 1820310 - RNA, 19 nt, Homo sapiens
  misc_RNA (1)...(19): siRNA sense strand
gcccacacauuaaugauuc

SEQ ID NO: 1820311 - RNA, 19 nt, Homo sapiens
  misc_RNA (1)...(19): siRNA sense strand
uguaggugcuguuguauau

SEQ ID NO: 1820312 - RNA, 19 nt, Homo sapiens
  misc_RNA (1)...(19): siRNA sense strand
ccuacuaaaucaccuacua

SEQ ID NO: 1820313 - RNA, 19 nt, Homo sapiens
  misc_RNA (1)...(19): siRNA sense strand
gaaaaccugccaacuauaa

SEQ ID NO: 1820314 - RNA, 19 nt, Homo sapiens
  misc_RNA (1)...(19): siRNA sense strand
ccagugcuguuucuaguau

SEQ ID NO: 1820315 - RNA, 19 nt, Homo sapiens
  misc_RNA (1)...(19): siRNA sense strand
caaaguauuuccagucaac

SEQ ID NO: 1820316 - RNA, 19 nt, Homo sapiens
  misc_RNA (1)...(19): siRNA sense strand
guaccuaagcaaacagaua

SEQ ID NO: 1820317 - RNA, 19 nt, Homo sapiens
  misc_RNA (1)...(19): siRNA sense strand
ccaaguaccuaagcaaaca

SEQ ID NO: 1820318 - RNA, 19 nt, Homo sapiens
  misc_RNA (1)...(19): siRNA sense strand
uggagaagcuuuaaauguc

SEQ ID NO: 1820319 - RNA, 19 nt, Homo sapiens
  misc_RNA (1)...(19): siRNA sense strand
gcaacuccucugaaagaua

SEQ ID NO: 1820320 - RNA, 19 nt, Homo sapiens
  misc_RNA (1)...(19): siRNA sense strand
cagcaacuccucugaaaga

SEQ ID NO: 1820321 - RNA, 19 nt, Homo sapiens
  misc_RNA (1)...(19): siRNA sense strand
aaauauggcugcccacaca

SEQ ID NO: 1820322 - RNA, 19 nt, Homo sapiens
  misc_RNA (1)...(19): siRNA sense strand
ggagaaaaccugccaacua

SEQ ID NO: 1820323 - RNA, 19 nt, Homo sapiens
  misc_RNA (1)...(19): siRNA sense strand
uggaagaaauuggaccaua

SEQ ID NO: 1820324 - RNA, 19 nt, Homo sapiens
  misc_RNA (1)...(19): siRNA sense strand
uagcuucacugcaagaaau

SEQ ID NO: 1820325 - RNA, 19 nt, Homo sapiens
  misc_RNA (1)...(19): siRNA sense strand
ugaagacucugcaguaaac

SEQ ID NO: 1820326 - RNA, 19 nt, Homo sapiens
  misc_RNA (1)...(19): siRNA sense strand
ccauuuguuuccucagaua

SEQ ID NO: 1820327 - RNA, 19 nt, Homo sapiens
  misc_RNA (1)...(19): siRNA sense strand
ucacaugucugaagaagcu

SEQ ID NO: 1820328 - RNA, 19 nt, Homo sapiens
  misc_RNA (1)...(19): siRNA sense strand
gaauaugcagaacauugua

SEQ ID NO: 1820329 - RNA, 19 nt, Homo sapiens
  misc_RNA (1)...(19): siRNA sense strand
caacagcuaauaaggagaa

SEQ ID NO: 1820330 - RNA, 19 nt, Homo sapiens
  misc_RNA (1)...(19): siRNA sense strand
uucagcaucuguugaguua

SEQ ID NO: 1820331 - RNA, 19 nt, Homo sapiens
  misc_RNA (1)...(19): siRNA sense strand
cuacuaaacaaccaucuaa

SEQ ID NO: 1820332 - RNA, 19 nt, Homo sapiens
  misc_RNA (1)...(19): siRNA sense strand
ccaagauacuucauuaacu

SEQ ID NO: 1820333 - RNA, 19 nt, Homo sapiens
  misc_RNA (1)...(19): siRNA sense strand
gauguccacugaaacugaa

SEQ ID NO: 1820334 - RNA, 19 nt, Homo sapiens
  misc_RNA (1)...(19): siRNA sense strand
acauugacauuaccuuuga

SEQ ID NO: 1820335 - RNA, 19 nt, Homo sapiens
  misc_RNA (1)...(19): siRNA sense strand
gaagugugacauugacauu

SEQ ID NO: 1820336 - RNA, 19 nt, Homo sapiens
  misc_RNA (1)...(19): siRNA sense strand
guacauccuaucagaauga

SEQ ID NO: 1820337 - RNA, 19 nt, Homo sapiens
  misc_RNA (1)...(19): siRNA sense strand
guagugguguugccuggaa

SEQ ID NO: 1820338 - RNA, 19 nt, Homo sapiens
  misc_RNA (1)...(19): siRNA sense strand
gaaacucucguccuucuag

SEQ ID NO: 1820339 - RNA, 19 nt, Homo sapiens
  misc_RNA (1)...(19): siRNA sense strand
gcgaaacucucguccuucu

SEQ ID NO: 1820340 - RNA, 19 nt, Homo sapiens
  misc_RNA (1)...(19): siRNA sense strand
gaagacaguaguacaucaa

SEQ ID NO: 1820341 - RNA, 19 nt, Homo sapiens
  misc_RNA (1)...(19): siRNA sense strand
aaacaaggcacaucuucaa

SEQ ID NO: 1820342 - RNA, 19 nt, Homo sapiens
  misc_RNA (1)...(19): siRNA sense strand
cauccaggcugacuacuug

SEQ ID NO: 1820343 - RNA, 19 nt, Homo sapiens
  misc_RNA (1)...(19): siRNA sense strand
gcagccaccuacaaguaug

SEQ ID NO: 1820344 - RNA, 19 nt, Homo sapiens
  misc_RNA (1)...(19): siRNA sense strand
augaggagcugcuguacaa

SEQ ID NO: 1820345 - RNA, 19 nt, Homo sapiens
  misc_RNA (1)...(19): siRNA sense strand
gcacccugcuguggacuga

SEQ ID NO: 1820346 - RNA, 19 nt, Homo sapiens
  misc_RNA (1)...(19): siRNA sense strand
ucaacuacccguucgagaa

SEQ ID NO: 1820347 - RNA, 19 nt, Homo sapiens
  misc_RNA (1)...(19): siRNA sense strand
gcuaugacaucgacaugac

SEQ ID NO: 1820348 - RNA, 19 nt, Homo sapiens
  misc_RNA (1)...(19): siRNA sense strand
gcuguggacugagcucuuc

SEQ ID NO: 1820349 - RNA, 19 nt, Homo sapiens
  misc_RNA (1)...(19): siRNA sense strand
caacuacccguucgagaag

SEQ ID NO: 1820350 - RNA, 19 nt, Homo sapiens
  misc_RNA (1)...(19): siRNA sense strand
caacauccaggcugacuac

SEQ ID NO: 1820351 - RNA, 19 nt, Homo sapiens
  misc_RNA (1)...(19): siRNA sense strand
caugcaggaucccgagaug

SEQ ID NO: 1820352 - RNA, 19 nt, Homo sapiens
  misc_RNA (1)...(19): siRNA sense strand
gaggagcugcuguacaaca

SEQ ID NO: 1820353 - RNA, 19 nt, Homo sapiens
  misc_RNA (1)...(19): siRNA sense strand
agauggacaugaagucagu

SEQ ID NO: 1820354 - RNA, 19 nt, Homo sapiens
  misc_RNA (1)...(19): siRNA sense strand
gaaccggccaccaucaacu

SEQ ID NO: 1820355 - RNA, 19 nt, Homo sapiens
  misc_RNA (1)...(19): siRNA sense strand
gggaaccggccaccaucaa

SEQ ID NO: 1820356 - RNA, 19 nt, Homo sapiens
  misc_RNA (1)...(19): siRNA sense strand
ccaccuacaaguaugugaa

SEQ ID NO: 1820357 - RNA, 19 nt, Homo sapiens
  misc_RNA (1)...(19): siRNA sense strand
acaucgacaugaccaagug

SEQ ID NO: 1820358 - RNA, 19 nt, Homo sapiens
  misc_RNA (1)...(19): siRNA sense strand
ggcagccaccuacaaguau

SEQ ID NO: 1820359 - RNA, 19 nt, Homo sapiens
  misc_RNA (1)...(19): siRNA sense strand
acaaggagaaguugcucaa

SEQ ID NO: 1820360 - RNA, 19 nt, Homo sapiens
  misc_RNA (1)...(19): siRNA sense strand
aggagcugcuguacaacaa

SEQ ID NO: 1820361 - RNA, 19 nt, Homo sapiens
  misc_RNA (1)...(19): siRNA sense strand
ggaccacccgcuaugacau

SEQ ID NO: 1820362 - RNA, 19 nt, Homo sapiens
  misc_RNA (1)...(19): siRNA sense strand
gacaugaccaagugcaucu

SEQ ID NO: 1820363 - RNA, 19 nt, Homo sapiens
  misc_RNA (1)...(19): siRNA sense strand
cgagauggacaugaaguca

SEQ ID NO: 1820364 - RNA, 19 nt, Homo sapiens
  misc_RNA (1)...(19): siRNA sense strand
ggaaagaacuugacuaugg

SEQ ID NO: 1820365 - RNA, 19 nt, Homo sapiens
  misc_RNA (1)...(19): siRNA sense strand
gaagagugauggcaagaua

SEQ ID NO: 1820366 - RNA, 19 nt, Homo sapiens
  misc_RNA (1)...(19): siRNA sense strand
gagaagagggcgacaauua

SEQ ID NO: 1820367 - RNA, 19 nt, Homo sapiens
  misc_RNA (1)...(19): siRNA sense strand
gaaaggcaauacuuagaug

SEQ ID NO: 1820368 - RNA, 19 nt, Homo sapiens
  misc_RNA (1)...(19): siRNA sense strand
agagucagcucacaucuaa

SEQ ID NO: 1820369 - RNA, 19 nt, Homo sapiens
  misc_RNA (1)...(19): siRNA sense strand
aaacaucguucguuacuau

SEQ ID NO: 1820370 - RNA, 19 nt, Homo sapiens
  misc_RNA (1)...(19): siRNA sense strand
caaggaaaggcaauacuua

SEQ ID NO: 1820371 - RNA, 19 nt, Homo sapiens
  misc_RNA (1)...(19): siRNA sense strand
ugggcuagcuagaauauua

SEQ ID NO: 1820372 - RNA, 19 nt, Homo sapiens
  misc_RNA (1)...(19): siRNA sense strand
ggaucuggcuaguguaauu

SEQ ID NO: 1820373 - RNA, 19 nt, Homo sapiens
  misc_RNA (1)...(19): siRNA sense strand
ugagugagcugaaacugaa

SEQ ID NO: 1820374 - RNA, 19 nt, Homo sapiens
  misc_RNA (1)...(19): siRNA sense strand
gcucaagcccugucagaua

SEQ ID NO: 1820375 - RNA, 19 nt, Homo sapiens
  misc_RNA (1)...(19): siRNA sense strand
ugaguuaugugcauuaaug

SEQ ID NO: 1820376 - RNA, 19 nt, Homo sapiens
  misc_RNA (1)...(19): siRNA sense strand
caaacuggcuagagcagaa

SEQ ID NO: 1820377 - RNA, 19 nt, Homo sapiens
  misc_RNA (1)...(19): siRNA sense strand
gaacugaaacauccaaaca

SEQ ID NO: 1820378 - RNA, 19 nt, Homo sapiens
  misc_RNA (1)...(19): siRNA sense strand
uuacaugucuccugaacaa

SEQ ID NO: 1820379 - RNA, 19 nt, Homo sapiens
  misc_RNA (1)...(19): siRNA sense strand
gaacaaaugaaucgcaugu

SEQ ID NO: 1820380 - RNA, 19 nt, Homo sapiens
  misc_RNA (1)...(19): siRNA sense strand
gaaagaacucgcugggaaa

SEQ ID NO: 1820381 - RNA, 19 nt, Homo sapiens
  misc_RNA (1)...(19): siRNA sense strand
gaaaguaaagagaacauca

SEQ ID NO: 1820382 - RNA, 19 nt, Homo sapiens
  misc_RNA (1)...(19): siRNA sense strand
gaaauuauuacgaggaugu

SEQ ID NO: 1820383 - RNA, 19 nt, Homo sapiens
  misc_RNA (1)...(19): siRNA sense strand
gcaaggaccugaagaaaag

SEQ ID NO: 1820384 - RNA, 19 nt, Homo sapiens
  misc_RNA (1)...(19): siRNA sense strand
ugagaacccuuuaauagca

SEQ ID NO: 1820385 - RNA, 19 nt, Homo sapiens
  misc_RNA (1)...(19): siRNA sense strand
gaaccaaggaaaggcaaua

SEQ ID NO: 1820386 - RNA, 19 nt, Homo sapiens
  misc_RNA (1)...(19): siRNA sense strand
gagcugaaacugaaggaaa

SEQ ID NO: 1820387 - RNA, 19 nt, Homo sapiens
  misc_RNA (1)...(19): siRNA sense strand
uuacgaggauguuaaacuu

SEQ ID NO: 1820388 - RNA, 19 nt, Homo sapiens
  misc_RNA (1)...(19): siRNA sense strand
cagaagauccggaggaaga

SEQ ID NO: 1820389 - RNA, 19 nt, Homo sapiens
  misc_RNA (1)...(19): siRNA sense strand
ggaaaggcaauacuuagau

SEQ ID NO: 1820390 - RNA, 19 nt, Homo sapiens
  misc_RNA (1)...(19): siRNA sense strand
aaucuuccauccucaguaa

SEQ ID NO: 1820391 - RNA, 19 nt, Homo sapiens
  misc_RNA (1)...(19): siRNA sense strand
uggcacaccuuauuacaug

SEQ ID NO: 1820392 - RNA, 19 nt, Homo sapiens
  misc_RNA (1)...(19): siRNA sense strand
ugaggacuaugaaguguug

SEQ ID NO: 1820393 - RNA, 19 nt, Homo sapiens
  misc_RNA (1)...(19): siRNA sense strand
gcaagauauuaguuuggaa

SEQ ID NO: 1820394 - RNA, 19 nt, Homo sapiens
  misc_RNA (1)...(19): siRNA sense strand
ccucaguaauuaagaagaa

SEQ ID NO: 1820395 - RNA, 19 nt, Homo sapiens
  misc_RNA (1)...(19): siRNA sense strand
cgucaagcuuggagacuuu

SEQ ID NO: 1820396 - RNA, 19 nt, Homo sapiens
  misc_RNA (1)...(19): siRNA sense strand
gacagaagcugagaaacag

SEQ ID NO: 1820397 - RNA, 19 nt, Homo sapiens
  misc_RNA (1)...(19): siRNA sense strand
ugacagaagcugagaaaca

SEQ ID NO: 1820398 - RNA, 19 nt, Homo sapiens
  misc_RNA (1)...(19): siRNA sense strand
caaagcaagagaagaaaga

SEQ ID NO: 1820399 - RNA, 19 nt, Homo sapiens
  misc_RNA (1)...(19): siRNA sense strand
ccaucgaccuucuguugaa

SEQ ID NO: 1820400 - RNA, 19 nt, Homo sapiens
  misc_RNA (1)...(19): siRNA sense strand
ggcaauacuuagaugaaga

SEQ ID NO: 1820401 - RNA, 19 nt, Homo sapiens
  misc_RNA (1)...(19): siRNA sense strand
guaauggaauauugugaag

SEQ ID NO: 1820402 - RNA, 19 nt, Homo sapiens
  misc_RNA (1)...(19): siRNA sense strand
gaauuugcuucgugaacug

SEQ ID NO: 1820403 - RNA, 19 nt, Homo sapiens
  misc_RNA (1)...(19): siRNA sense strand
guaaagagaacaucaugag

SEQ ID NO: 1820404 - RNA, 19 nt, Homo sapiens
  misc_RNA (1)...(19): siRNA sense strand
ggcaagauauuaguuugga

SEQ ID NO: 1820405 - RNA, 19 nt, Homo sapiens
  misc_RNA (1)...(19): siRNA sense strand
gaaggaaauucaguuacag

SEQ ID NO: 1820406 - RNA, 19 nt, Homo sapiens
  misc_RNA (1)...(19): siRNA sense strand
ccguuacucugaugaauug

SEQ ID NO: 1820407 - RNA, 19 nt, Homo sapiens
  misc_RNA (1)...(19): siRNA sense strand
gauggcaagauauuaguuu

SEQ ID NO: 1820408 - RNA, 19 nt, Homo sapiens
  misc_RNA (1)...(19): siRNA sense strand
auccaaacaucguucguua

SEQ ID NO: 1820409 - RNA, 19 nt, Homo sapiens
  misc_RNA (1)...(19): siRNA sense strand
gagacuagcagaggacaaa

SEQ ID NO: 1820410 - RNA, 19 nt, Homo sapiens
  misc_RNA (1)...(19): siRNA sense strand
gagagaagagggcgacaau

SEQ ID NO: 1820411 - RNA, 19 nt, Homo sapiens
  misc_RNA (1)...(19): siRNA sense strand
gaucuggcuaguguaauua

SEQ ID NO: 1820412 - RNA, 19 nt, Homo sapiens
  misc_RNA (1)...(19): siRNA sense strand
aauggaauauugugaagga

SEQ ID NO: 1820413 - RNA, 19 nt, Homo sapiens
  misc_RNA (1)...(19): siRNA sense strand
gagagucagcucacaucua

SEQ ID NO: 1820414 - RNA, 19 nt, Homo sapiens
  misc_RNA (1)...(19): siRNA sense strand
caaacaucguucguuacua

SEQ ID NO: 1820415 - RNA, 19 nt, Homo sapiens
  misc_RNA (1)...(19): siRNA sense strand
aaucagagaaggcaaauuc

SEQ ID NO: 1820416 - RNA, 19 nt, Homo sapiens
  misc_RNA (1)...(19): siRNA sense strand
gcugcuugcuguaugaguu

SEQ ID NO: 1820417 - RNA, 19 nt, Homo sapiens
  misc_RNA (1)...(19): siRNA sense strand
gccagaagauccggaggaa

SEQ ID NO: 1820418 - RNA, 19 nt, Homo sapiens
  misc_RNA (1)...(19): siRNA sense strand
ugaaucgcauguccuacaa

SEQ ID NO: 1820419 - RNA, 19 nt, Homo sapiens
  misc_RNA (1)...(19): siRNA sense strand
ccugucagauauugagaaa

SEQ ID NO: 1820420 - RNA, 19 nt, Homo sapiens
  misc_RNA (1)...(19): siRNA sense strand
cauccucaguaauuaagaa

SEQ ID NO: 1820421 - RNA, 19 nt, Homo sapiens
  misc_RNA (1)...(19): siRNA sense strand
gaagagggcgacaauuagg

SEQ ID NO: 1820422 - RNA, 19 nt, Homo sapiens
  misc_RNA (1)...(19): siRNA sense strand
ccaaggaaaggcaauacuu

SEQ ID NO: 1820423 - RNA, 19 nt, Homo sapiens
  misc_RNA (1)...(19): siRNA sense strand
gcagaaagaacaggagcuu

SEQ ID NO: 1820424 - RNA, 19 nt, Homo sapiens
  misc_RNA (1)...(19): siRNA sense strand
gauuggagcagaaagaaca

SEQ ID NO: 1820425 - RNA, 19 nt, Homo sapiens
  misc_RNA (1)...(19): siRNA sense strand
gcagacgagcaaagaagaa

SEQ ID NO: 1820426 - RNA, 19 nt, Homo sapiens
  misc_RNA (1)...(19): siRNA sense strand
cucaagcccugucagauau

SEQ ID NO: 1820427 - RNA, 19 nt, Homo sapiens
  misc_RNA (1)...(19): siRNA sense strand
aagaaagauuggagcagaa

SEQ ID NO: 1820428 - RNA, 19 nt, Homo sapiens
  misc_RNA (1)...(19): siRNA sense strand
guaugaguuaugugcauua

SEQ ID NO: 1820429 - RNA, 19 nt, Homo sapiens
  misc_RNA (1)...(19): siRNA sense strand
cuuccauccucaguaauua

SEQ ID NO: 1820430 - RNA, 19 nt, Homo sapiens
  misc_RNA (1)...(19): siRNA sense strand
cuugagaacccuuuaauag

SEQ ID NO: 1820431 - RNA, 19 nt, Homo sapiens
  misc_RNA (1)...(19): siRNA sense strand
aaaugaaucgcauguccua

SEQ ID NO: 1820432 - RNA, 19 nt, Homo sapiens
  misc_RNA (1)...(19): siRNA sense strand
gcugaggacuaugaagugu

SEQ ID NO: 1820433 - RNA, 19 nt, Homo sapiens
  misc_RNA (1)...(19): siRNA sense strand
cuuaaaggauuaccaucga

SEQ ID NO: 1820434 - RNA, 19 nt, Homo sapiens
  misc_RNA (1)...(19): siRNA sense strand
caugacagaagcugagaaa

SEQ ID NO: 1820435 - RNA, 19 nt, Homo sapiens
  misc_RNA (1)...(19): siRNA sense strand
gaaacauccaaacaucguu

SEQ ID NO: 1820436 - RNA, 19 nt, Homo sapiens
  misc_RNA (1)...(19): siRNA sense strand
gagugagaauucugagagu

SEQ ID NO: 1820437 - RNA, 19 nt, Homo sapiens
  misc_RNA (1)...(19): siRNA sense strand
gcuuguuucugaagugaau

SEQ ID NO: 1820438 - RNA, 19 nt, Homo sapiens
  misc_RNA (1)...(19): siRNA sense strand
gaaaaucagagaaggcaaa

SEQ ID NO: 1820439 - RNA, 19 nt, Homo sapiens
  misc_RNA (1)...(19): siRNA sense strand
aaucgcauguccuacaaug

SEQ ID NO: 1820440 - RNA, 19 nt, Homo sapiens
  misc_RNA (1)...(19): siRNA sense strand
caugucuccugaacaaaug

SEQ ID NO: 1820441 - RNA, 19 nt, Homo sapiens
  misc_RNA (1)...(19): siRNA sense strand
acaaagggaaccaaggaaa

SEQ ID NO: 1820442 - RNA, 19 nt, Homo sapiens
  misc_RNA (1)...(19): siRNA sense strand
acuaugaucggauuauuga

SEQ ID NO: 1820443 - RNA, 19 nt, Homo sapiens
  misc_RNA (1)...(19): siRNA sense strand
caagcccugucagauauug

SEQ ID NO: 1820444 - RNA, 19 nt, Homo sapiens
  misc_RNA (1)...(19): siRNA sense strand
gggcuagcuagaauauuaa

SEQ ID NO: 1820445 - RNA, 19 nt, Homo sapiens
  misc_RNA (1)...(19): siRNA sense strand
caaagggaaccaaggaaag

SEQ ID NO: 1820446 - RNA, 19 nt, Homo sapiens
  misc_RNA (1)...(19): siRNA sense strand
gaggggaucuggcuagugu

SEQ ID NO: 1820447 - RNA, 19 nt, Homo sapiens
  misc_RNA (1)...(19): siRNA sense strand
ggauuaccaucgaccuucu

SEQ ID NO: 1820448 - RNA, 19 nt, Homo sapiens
  misc_RNA (1)...(19): siRNA sense strand
acugaaacauccaaacauc

SEQ ID NO: 1820449 - RNA, 19 nt, Homo sapiens
  misc_RNA (1)...(19): siRNA sense strand
caucuaaguccaagugcaa

SEQ ID NO: 1820450 - RNA, 19 nt, Homo sapiens
  misc_RNA (1)...(19): siRNA sense strand
gaugcuuguuucugaagug

SEQ ID NO: 1820451 - RNA, 19 nt, Homo sapiens
  misc_RNA (1)...(19): siRNA sense strand
ggauuccagcccuguauug

SEQ ID NO: 1820452 - RNA, 19 nt, Homo sapiens
  misc_RNA (1)...(19): siRNA sense strand
uaccaucgaccuucuguug

SEQ ID NO: 1820453 - RNA, 19 nt, Homo sapiens
  misc_RNA (1)...(19): siRNA sense strand
gagugauggcaagauauua

SEQ ID NO: 1820454 - RNA, 19 nt, Homo sapiens
  misc_RNA (1)...(19): siRNA sense strand
gugcaaggaccugaagaaa

SEQ ID NO: 1820455 - RNA, 19 nt, Homo sapiens
  misc_RNA (1)...(19): siRNA sense strand
aaagauuggagcagaaaga

SEQ ID NO: 1820456 - RNA, 19 nt, Homo sapiens
  misc_RNA (1)...(19): siRNA sense strand
uuacaaagggaaccaagga

SEQ ID NO: 1820457 - RNA, 19 nt, Homo sapiens
  misc_RNA (1)...(19): siRNA sense strand
ucacaucuaaguccaagug

SEQ ID NO: 1820458 - RNA, 19 nt, Homo sapiens
  misc_RNA (1)...(19): siRNA sense strand
gaaugccacagacgaagug

SEQ ID NO: 1820459 - RNA, 19 nt, Homo sapiens
  misc_RNA (1)...(19): siRNA sense strand
ccaaacaucguucguuacu

SEQ ID NO: 1820460 - RNA, 19 nt, Homo sapiens
  misc_RNA (1)...(19): siRNA sense strand
gggcugaggacuaugaagu

SEQ ID NO: 1820461 - RNA, 19 nt, Homo sapiens
  misc_RNA (1)...(19): siRNA sense strand
ggcgaauuccauaccguua

SEQ ID NO: 1820462 - RNA, 19 nt, Homo sapiens
  misc_RNA (1)...(19): siRNA sense strand
ugaauuugcuucgugaacu

SEQ ID NO: 1820463 - RNA, 19 nt, Homo sapiens
  misc_RNA (1)...(19): siRNA sense strand
uguauugagugagcugaaa

SEQ ID NO: 1820464 - RNA, 19 nt, Homo sapiens
  misc_RNA (1)...(19): siRNA sense strand
gaagaaaugggcuggaaua

SEQ ID NO: 1820465 - RNA, 19 nt, Homo sapiens
  misc_RNA (1)...(19): siRNA sense strand
ggaucuaucucaucaaaca

SEQ ID NO: 1820466 - RNA, 19 nt, Homo sapiens
  misc_RNA (1)...(19): siRNA sense strand
gggcaccacugucuucuug

SEQ ID NO: 1820467 - RNA, 19 nt, Homo sapiens
  misc_RNA (1)...(19): siRNA sense strand
guggaucuaucucaucaaa

SEQ ID NO: 1820468 - RNA, 19 nt, Homo sapiens
  misc_RNA (1)...(19): siRNA sense strand
gcaccacugucuucuugug

SEQ ID NO: 1820469 - RNA, 19 nt, Homo sapiens
  misc_RNA (1)...(19): siRNA sense strand
ucaaacaacacaaugaaga

SEQ ID NO: 1820470 - RNA, 19 nt, Homo sapiens
  misc_RNA (1)...(19): siRNA sense strand
caucaaacaacacaaugaa

SEQ ID NO: 1820471 - RNA, 19 nt, Homo sapiens
  misc_RNA (1)...(19): siRNA sense strand
aaaccugacuggcugaaag

SEQ ID NO: 1820472 - RNA, 19 nt, Homo sapiens
  misc_RNA (1)...(19): siRNA sense strand
aagaagaaaugggcuggaa

SEQ ID NO: 1820473 - RNA, 19 nt, Homo sapiens
  misc_RNA (1)...(19): siRNA sense strand
caaacaacacaaugaagau

SEQ ID NO: 1820474 - RNA, 19 nt, Homo sapiens
  misc_RNA (1)...(19): siRNA sense strand
ucagugcgaucaaaguucu

SEQ ID NO: 1820475 - RNA, 19 nt, Homo sapiens
  misc_RNA (1)...(19): siRNA sense strand
gcccuucagugcgaucaaa

SEQ ID NO: 1820476 - RNA, 19 nt, Homo sapiens
  misc_RNA (1)...(19): siRNA sense strand
aagaaaugggcuggaauaa

SEQ ID NO: 1820477 - RNA, 19 nt, Homo sapiens
  misc_RNA (1)...(19): siRNA sense strand
gaucuaucucaucaaacaa

SEQ ID NO: 1820478 - RNA, 19 nt, Homo sapiens
  misc_RNA (1)...(19): siRNA sense strand
guucuaaccuucaguacua

SEQ ID NO: 1820479 - RNA, 19 nt, Homo sapiens
  misc_RNA (1)...(19): siRNA sense strand
ggauggagcuaugacauug

SEQ ID NO: 1820480 - RNA, 19 nt, Homo sapiens
  misc_RNA (1)...(19): siRNA sense strand
ggaccagacucaagacaca

SEQ ID NO: 1820481 - RNA, 19 nt, Homo sapiens
  misc_RNA (1)...(19): siRNA sense strand
ggaguaaacaacacaaaga

SEQ ID NO: 1820482 - RNA, 19 nt, Homo sapiens
  misc_RNA (1)...(19): siRNA sense strand
acacacaacucauaacagu

SEQ ID NO: 1820483 - RNA, 19 nt, Homo sapiens
  misc_RNA (1)...(19): siRNA sense strand
ggauaucacuacuuuaacu

SEQ ID NO: 1820484 - RNA, 19 nt, Homo sapiens
  misc_RNA (1)...(19): siRNA sense strand
aauggaagauggaguuuga

SEQ ID NO: 1820485 - RNA, 19 nt, Homo sapiens
  misc_RNA (1)...(19): siRNA sense strand
gcugaucccuuauccaaca

SEQ ID NO: 1820486 - RNA, 19 nt, Homo sapiens
  misc_RNA (1)...(19): siRNA sense strand
uaaagaagaugcaguuucc

SEQ ID NO: 1820487 - RNA, 19 nt, Homo sapiens
  misc_RNA (1)...(19): siRNA sense strand
ucaagacacacaacucaua

SEQ ID NO: 1820488 - RNA, 19 nt, Homo sapiens
  misc_RNA (1)...(19): siRNA sense strand
caagacacacaacucauaa

SEQ ID NO: 1820489 - RNA, 19 nt, Homo sapiens
  misc_RNA (1)...(19): siRNA sense strand
uaacaugcagucuggagua

SEQ ID NO: 1820490 - RNA, 19 nt, Homo sapiens
  misc_RNA (1)...(19): siRNA sense strand
gaguaaacaacacaaagaa

SEQ ID NO: 1820491 - RNA, 19 nt, Homo sapiens
  misc_RNA (1)...(19): siRNA sense strand
gaacaaaagaacaagagua

SEQ ID NO: 1820492 - RNA, 19 nt, Homo sapiens
  misc_RNA (1)...(19): siRNA sense strand
gaaauggaagauggaguuu

SEQ ID NO: 1820493 - RNA, 19 nt, Homo sapiens
  misc_RNA (1)...(19): siRNA sense strand
gcacaggaccagacucaag

SEQ ID NO: 1820494 - RNA, 19 nt, Homo sapiens
  misc_RNA (1)...(19): siRNA sense strand
gagaagggcaguggcugua

SEQ ID NO: 1820495 - RNA, 19 nt, Homo sapiens
  misc_RNA (1)...(19): siRNA sense strand
uagcugcccuuuccguuuc

SEQ ID NO: 1820496 - RNA, 19 nt, Homo sapiens
  misc_RNA (1)...(19): siRNA sense strand
ggagcuaugacauugaaga

SEQ ID NO: 1820497 - RNA, 19 nt, Homo sapiens
  misc_RNA (1)...(19): siRNA sense strand
caaagaaauggaagaugga

SEQ ID NO: 1820498 - RNA, 19 nt, Homo sapiens
  misc_RNA (1)...(19): siRNA sense strand
guagcugcccuuuccguuu

SEQ ID NO: 1820499 - RNA, 19 nt, Homo sapiens
  misc_RNA (1)...(19): siRNA sense strand
agaaauggaagauggaguu

SEQ ID NO: 1820500 - RNA, 19 nt, Homo sapiens
  misc_RNA (1)...(19): siRNA sense strand
guacugaggcagacguugu

SEQ ID NO: 1820501 - RNA, 19 nt, Homo sapiens
  misc_RNA (1)...(19): siRNA sense strand
agaagaugcaguuuccuuu

SEQ ID NO: 1820502 - RNA, 19 nt, Homo sapiens
  misc_RNA (1)...(19): siRNA sense strand
uggaagauggaguuugaua

SEQ ID NO: 1820503 - RNA, 19 nt, Homo sapiens
  misc_RNA (1)...(19): siRNA sense strand
cuaaagaagaugcaguuuc

SEQ ID NO: 1820504 - RNA, 19 nt, Homo sapiens
  misc_RNA (1)...(19): siRNA sense strand
ggaagauggaguuugauac

SEQ ID NO: 1820505 - RNA, 19 nt, Homo sapiens
  misc_RNA (1)...(19): siRNA sense strand
gaagauggaguuugauacc

SEQ ID NO: 1820506 - RNA, 19 nt, Homo sapiens
  misc_RNA (1)...(19): siRNA sense strand
aacccaaguccaagucuua

SEQ ID NO: 1820507 - RNA, 19 nt, Homo sapiens
  misc_RNA (1)...(19): siRNA sense strand
cggcugaucccuuauccaa

SEQ ID NO: 1820508 - RNA, 19 nt, Homo sapiens
  misc_RNA (1)...(19): siRNA sense strand
aaacccaaguccaagucuu

SEQ ID NO: 1820509 - RNA, 19 nt, Homo sapiens
  misc_RNA (1)...(19): siRNA sense strand
gucuuauggugcaaacuuu

SEQ ID NO: 1820510 - RNA, 19 nt, Homo sapiens
  misc_RNA (1)...(19): siRNA sense strand
aaccuucaguacuaaagaa

SEQ ID NO: 1820511 - RNA, 19 nt, Homo sapiens
  misc_RNA (1)...(19): siRNA sense strand
caugcagucuggaguaaac

SEQ ID NO: 1820512 - RNA, 19 nt, Homo sapiens
  misc_RNA (1)...(19): siRNA sense strand
gugcaaacuuuucuuggaa

SEQ ID NO: 1820513 - RNA, 19 nt, Homo sapiens
  misc_RNA (1)...(19): siRNA sense strand
ggucucaaugucaguggua

SEQ ID NO: 1820514 - RNA, 19 nt, Homo sapiens
  misc_RNA (1)...(19): siRNA sense strand
ccaggucguugaggacuuc

SEQ ID NO: 1820515 - RNA, 19 nt, Homo sapiens
  misc_RNA (1)...(19): siRNA sense strand
agacacacaacucauaaca

SEQ ID NO: 1820516 - RNA, 19 nt, Homo sapiens
  misc_RNA (1)...(19): siRNA sense strand
cacaggaccagacucaaga

SEQ ID NO: 1820517 - RNA, 19 nt, Homo sapiens
  misc_RNA (1)...(19): siRNA sense strand
gauaucacuacuuuaacug

SEQ ID NO: 1820518 - RNA, 19 nt, Homo sapiens
  misc_RNA (1)...(19): siRNA sense strand
gauggagcuaugacauuga

SEQ ID NO: 1820519 - RNA, 19 nt, Homo sapiens
  misc_RNA (1)...(19): siRNA sense strand
aacaugcagucuggaguaa

SEQ ID NO: 1820520 - RNA, 19 nt, Homo sapiens
  misc_RNA (1)...(19): siRNA sense strand
caacggcugaucccuuauc

SEQ ID NO: 1820521 - RNA, 19 nt, Homo sapiens
  misc_RNA (1)...(19): siRNA sense strand
ccaaguccaagucuuaugg

SEQ ID NO: 1820522 - RNA, 19 nt, Homo sapiens
  misc_RNA (1)...(19): siRNA sense strand
aaacaacacaaagaaaugg

SEQ ID NO: 1820523 - RNA, 19 nt, Homo sapiens
  misc_RNA (1)...(19): siRNA sense strand
uaaccuucaguacuaaaga

SEQ ID NO: 1820524 - RNA, 19 nt, Homo sapiens
  misc_RNA (1)...(19): siRNA sense strand
acacaaagaaauggaagau

SEQ ID NO: 1820525 - RNA, 19 nt, Homo sapiens
  misc_RNA (1)...(19): siRNA sense strand
ggugcaaacuuuucuugga

SEQ ID NO: 1820526 - RNA, 19 nt, Homo sapiens
  misc_RNA (1)...(19): siRNA sense strand
gagcuaugacauugaagag

SEQ ID NO: 1820527 - RNA, 19 nt, Homo sapiens
  misc_RNA (1)...(19): siRNA sense strand
guuccagaagagcauauaa

SEQ ID NO: 1820528 - RNA, 19 nt, Homo sapiens
  misc_RNA (1)...(19): siRNA sense strand
uggauggagcuaugacauu

SEQ ID NO: 1820529 - RNA, 19 nt, Homo sapiens
  misc_RNA (1)...(19): siRNA sense strand
aagaagaugcaguuuccuu

SEQ ID NO: 1820530 - RNA, 19 nt, Homo sapiens
  misc_RNA (1)...(19): siRNA sense strand
uauccaacaugguucuaac

SEQ ID NO: 1820531 - RNA, 19 nt, Homo sapiens
  misc_RNA (1)...(19): siRNA sense strand
ggcuguagcugcccuuucc

SEQ ID NO: 1820532 - RNA, 19 nt, Homo sapiens
  misc_RNA (1)...(19): siRNA sense strand
caagucuuauggugcaaac

SEQ ID NO: 1820533 - RNA, 19 nt, Homo sapiens
  misc_RNA (1)...(19): siRNA sense strand
auggagcuaugacauugaa

SEQ ID NO: 1820534 - RNA, 19 nt, Homo sapiens
  misc_RNA (1)...(19): siRNA sense strand
gaaaggcgguguugggaaa

SEQ ID NO: 1820535 - RNA, 19 nt, Homo sapiens
  misc_RNA (1)...(19): siRNA sense strand
gaagagaaccucaucaguu

SEQ ID NO: 1820536 - RNA, 19 nt, Homo sapiens
  misc_RNA (1)...(19): siRNA sense strand
ggacacggcuauagaggaa

SEQ ID NO: 1820537 - RNA, 19 nt, Homo sapiens
  misc_RNA (1)...(19): siRNA sense strand
uagaggaaaucaaagagaa

SEQ ID NO: 1820538 - RNA, 19 nt, Homo sapiens
  misc_RNA (1)...(19): siRNA sense strand
gcucauagguaagaauugu

SEQ ID NO: 1820539 - RNA, 19 nt, Homo sapiens
  misc_RNA (1)...(19): siRNA sense strand
ggccaucgauucccaagau

SEQ ID NO: 1820540 - RNA, 19 nt, Homo sapiens
  misc_RNA (1)...(19): siRNA sense strand
ucagagaauccaagaguuu

SEQ ID NO: 1820541 - RNA, 19 nt, Homo sapiens
  misc_RNA (1)...(19): siRNA sense strand
uggauccgcucauagguaa

SEQ ID NO: 1820542 - RNA, 19 nt, Homo sapiens
  misc_RNA (1)...(19): siRNA sense strand
caagauaaugggauuggaa

SEQ ID NO: 1820543 - RNA, 19 nt, Homo sapiens
  misc_RNA (1)...(19): siRNA sense strand
caggauguccggaaagaaa

SEQ ID NO: 1820544 - RNA, 19 nt, Homo sapiens
  misc_RNA (1)...(19): siRNA sense strand
acacacagauugcucuucu

SEQ ID NO: 1820545 - RNA, 19 nt, Homo sapiens
  misc_RNA (1)...(19): siRNA sense strand
gccaucgauucccaagaua

SEQ ID NO: 1820546 - RNA, 19 nt, Homo sapiens
  misc_RNA (1)...(19): siRNA sense strand
gauaaugggauuggaagga

SEQ ID NO: 1820547 - RNA, 19 nt, Homo sapiens
  misc_RNA (1)...(19): siRNA sense strand
ggcuauagaggaaaucaaa

SEQ ID NO: 1820548 - RNA, 19 nt, Homo sapiens
  misc_RNA (1)...(19): siRNA sense strand
cuacagaaguauaauucag

SEQ ID NO: 1820549 - RNA, 19 nt, Homo sapiens
  misc_RNA (1)...(19): siRNA sense strand
gaugaaaacacacagauug

SEQ ID NO: 1820550 - RNA, 19 nt, Homo sapiens
  misc_RNA (1)...(19): siRNA sense strand
acagauugcucuucuagac

SEQ ID NO: 1820551 - RNA, 19 nt, Homo sapiens
  misc_RNA (1)...(19): siRNA sense strand
gagaaaaugaagacuguaa

SEQ ID NO: 1820552 - RNA, 19 nt, Homo sapiens
  misc_RNA (1)...(19): siRNA sense strand
guaaucuccaucagucaaa

SEQ ID NO: 1820553 - RNA, 19 nt, Homo sapiens
  misc_RNA (1)...(19): siRNA sense strand
acacggcuauagaggaaau

SEQ ID NO: 1820554 - RNA, 19 nt, Homo sapiens
  misc_RNA (1)...(19): siRNA sense strand
cuauagaggaaaucaaaga

SEQ ID NO: 1820555 - RNA, 19 nt, Homo sapiens
  misc_RNA (1)...(19): siRNA sense strand
caguguacguggaagacaa

SEQ ID NO: 1820556 - RNA, 19 nt, Homo sapiens
  misc_RNA (1)...(19): siRNA sense strand
gcucuucuagacaucgaua

SEQ ID NO: 1820557 - RNA, 19 nt, Homo sapiens
  misc_RNA (1)...(19): siRNA sense strand
gcucaugugccaggacuug

SEQ ID NO: 1820558 - RNA, 19 nt, Homo sapiens
  misc_RNA (1)...(19): siRNA sense strand
cacguuagccuacagaagu

SEQ ID NO: 1820559 - RNA, 19 nt, Homo sapiens
  misc_RNA (1)...(19): siRNA sense strand
ucauagguaagaauuguga

SEQ ID NO: 1820560 - RNA, 19 nt, Homo sapiens
  misc_RNA (1)...(19): siRNA sense strand
acguuagccuacagaagua

SEQ ID NO: 1820561 - RNA, 19 nt, Homo sapiens
  misc_RNA (1)...(19): siRNA sense strand
ccaucgauucccaagauaa

SEQ ID NO: 1820562 - RNA, 19 nt, Homo sapiens
  misc_RNA (1)...(19): siRNA sense strand
gauccgcucauagguaaga

SEQ ID NO: 1820563 - RNA, 19 nt, Homo sapiens
  misc_RNA (1)...(19): siRNA sense strand
ccguucaucuguccuaagu

SEQ ID NO: 1820564 - RNA, 19 nt, Homo sapiens
  misc_RNA (1)...(19): siRNA sense strand
ggccacagcacacaucgau

SEQ ID NO: 1820565 - RNA, 19 nt, Homo sapiens
  misc_RNA (1)...(19): siRNA sense strand
caucgauucccaagauaau

SEQ ID NO: 1820566 - RNA, 19 nt, Homo sapiens
  misc_RNA (1)...(19): siRNA sense strand
gccuacagaaguauaauuc

SEQ ID NO: 1820567 - RNA, 19 nt, Homo sapiens
  misc_RNA (1)...(19): siRNA sense strand
acacagauugcucuucuag

SEQ ID NO: 1820568 - RNA, 19 nt, Homo sapiens
  misc_RNA (1)...(19): siRNA sense strand
guccuaagugcaagaaaga

SEQ ID NO: 1820569 - RNA, 19 nt, Homo sapiens
  misc_RNA (1)...(19): siRNA sense strand
caccugggacgucggauga

SEQ ID NO: 1820570 - RNA, 19 nt, Homo sapiens
  misc_RNA (1)...(19): siRNA sense strand
agauugcucuucuagacau

SEQ ID NO: 1820571 - RNA, 19 nt, Homo sapiens
  misc_RNA (1)...(19): siRNA sense strand
gcagaggggcuucauguca

SEQ ID NO: 1820572 - RNA, 19 nt, Homo sapiens
  misc_RNA (1)...(19): siRNA sense strand
uguccuaagugcaagaaag

SEQ ID NO: 1820573 - RNA, 19 nt, Homo sapiens
  misc_RNA (1)...(19): siRNA sense strand
ggucgacuaccucauugug

SEQ ID NO: 1820574 - RNA, 19 nt, Homo sapiens
  misc_RNA (1)...(19): siRNA sense strand
cacacagauugcucuucua

SEQ ID NO: 1820575 - RNA, 19 nt, Homo sapiens
  misc_RNA (1)...(19): siRNA sense strand
agaggaaaucaaagagaaa

SEQ ID NO: 1820576 - RNA, 19 nt, Homo sapiens
  misc_RNA (1)...(19): siRNA sense strand
gcaguuccuccgagaugug

SEQ ID NO: 1820577 - RNA, 19 nt, Homo sapiens
  misc_RNA (1)...(19): siRNA sense strand
ggaaaucaaagagaaaaug

SEQ ID NO: 1820578 - RNA, 19 nt, Homo sapiens
  misc_RNA (1)...(19): siRNA sense strand
ccggaaagaaaucaacuuc

SEQ ID NO: 1820579 - RNA, 19 nt, Homo sapiens
  misc_RNA (1)...(19): siRNA sense strand
acuccaggauguccggaaa

SEQ ID NO: 1820580 - RNA, 19 nt, Homo sapiens
  misc_RNA (1)...(19): siRNA sense strand
uccaggauguccggaaaga

SEQ ID NO: 1820581 - RNA, 19 nt, Homo sapiens
  misc_RNA (1)...(19): siRNA sense strand
cagauauucccucccacaa

SEQ ID NO: 1820582 - RNA, 19 nt, Homo sapiens
  misc_RNA (1)...(19): siRNA sense strand
ccgcucauagguaagaauu

SEQ ID NO: 1820583 - RNA, 19 nt, Homo sapiens
  misc_RNA (1)...(19): siRNA sense strand
agaagaagcuggcugcaaa

SEQ ID NO: 1820584 - RNA, 19 nt, Homo sapiens
  misc_RNA (1)...(19): siRNA sense strand
gaagggacaccauuagaaa

SEQ ID NO: 1820585 - RNA, 19 nt, Homo sapiens
  misc_RNA (1)...(19): siRNA sense strand
gauagaagggacaccauua

SEQ ID NO: 1820586 - RNA, 19 nt, Homo sapiens
  misc_RNA (1)...(19): siRNA sense strand
gcaaugaagcuuggagaua

SEQ ID NO: 1820587 - RNA, 19 nt, Homo sapiens
  misc_RNA (1)...(19): siRNA sense strand
uagaaacuauccagaagaa

SEQ ID NO: 1820588 - RNA, 19 nt, Homo sapiens
  misc_RNA (1)...(19): siRNA sense strand
ggacaccauuagaaacuau

SEQ ID NO: 1820589 - RNA, 19 nt, Homo sapiens
  misc_RNA (1)...(19): siRNA sense strand
uguaggagcugaauauuac

SEQ ID NO: 1820590 - RNA, 19 nt, Homo sapiens
  misc_RNA (1)...(19): siRNA sense strand
caaugaagcuuggagauac

SEQ ID NO: 1820591 - RNA, 19 nt, Homo sapiens
  misc_RNA (1)...(19): siRNA sense strand
gggauuugcugcauuugug

SEQ ID NO: 1820592 - RNA, 19 nt, Homo sapiens
  misc_RNA (1)...(19): siRNA sense strand
uggagucccugaauaaaga

SEQ ID NO: 1820593 - RNA, 19 nt, Homo sapiens
  misc_RNA (1)...(19): siRNA sense strand
gauuauagacaauggaaga

SEQ ID NO: 1820594 - RNA, 19 nt, Homo sapiens
  misc_RNA (1)...(19): siRNA sense strand
uaccuggagucccugaaua

SEQ ID NO: 1820595 - RNA, 19 nt, Homo sapiens
  misc_RNA (1)...(19): siRNA sense strand
uauagacaauggaagauag

SEQ ID NO: 1820596 - RNA, 19 nt, Homo sapiens
  misc_RNA (1)...(19): siRNA sense strand
gcauggacaucauaaaaug

SEQ ID NO: 1820597 - RNA, 19 nt, Homo sapiens
  misc_RNA (1)...(19): siRNA sense strand
gggacaccauuagaaacua

SEQ ID NO: 1820598 - RNA, 19 nt, Homo sapiens
  misc_RNA (1)...(19): siRNA sense strand
gagcauggacaucauaaaa

SEQ ID NO: 1820599 - RNA, 19 nt, Homo sapiens
  misc_RNA (1)...(19): siRNA sense strand
cauuagaaacuauccagaa

SEQ ID NO: 1820600 - RNA, 19 nt, Homo sapiens
  misc_RNA (1)...(19): siRNA sense strand
agaagggacaccauuagaa

SEQ ID NO: 1820601 - RNA, 19 nt, Homo sapiens
  misc_RNA (1)...(19): siRNA sense strand
auacauggguggcuuugca

SEQ ID NO: 1820602 - RNA, 19 nt, Homo sapiens
  misc_RNA (1)...(19): siRNA sense strand
cuguaggagcugaauauua

SEQ ID NO: 1820603 - RNA, 19 nt, Homo sapiens
  misc_RNA (1)...(19): siRNA sense strand
gagauacauggguggcuuu

SEQ ID NO: 1820604 - RNA, 19 nt, Homo sapiens
  misc_RNA (1)...(19): siRNA sense strand
gaacuuccagauuauagac

SEQ ID NO: 1820605 - RNA, 19 nt, Homo sapiens
  misc_RNA (1)...(19): siRNA sense strand
uagaagggacaccauuaga

SEQ ID NO: 1820606 - RNA, 19 nt, Homo sapiens
  misc_RNA (1)...(19): siRNA sense strand
cagauuauagacaauggaa

SEQ ID NO: 1820607 - RNA, 19 nt, Homo sapiens
  misc_RNA (1)...(19): siRNA sense strand
auuagaaacuauccagaag

SEQ ID NO: 1820608 - RNA, 19 nt, Homo sapiens
  misc_RNA (1)...(19): siRNA sense strand
cagaagaagcuggcugcaa

SEQ ID NO: 1820609 - RNA, 19 nt, Homo sapiens
  misc_RNA (1)...(19): siRNA sense strand
uuagaaacuauccagaaga

SEQ ID NO: 1820610 - RNA, 19 nt, Homo sapiens
  misc_RNA (1)...(19): siRNA sense strand
gcuguaggagcugaauauu

SEQ ID NO: 1820611 - RNA, 19 nt, Homo sapiens
  misc_RNA (1)...(19): siRNA sense strand
aaugaagcuuggagauaca

SEQ ID NO: 1820612 - RNA, 19 nt, Homo sapiens
  misc_RNA (1)...(19): siRNA sense strand
gaagaagcuggcugcaaaa

SEQ ID NO: 1820613 - RNA, 19 nt, Homo sapiens
  misc_RNA (1)...(19): siRNA sense strand
agauaagaagcaucacuga

SEQ ID NO: 1820614 - RNA, 19 nt, Homo sapiens
  misc_RNA (1)...(19): siRNA sense strand
ucacaacuaucaaacguua

SEQ ID NO: 1820615 - RNA, 19 nt, Homo sapiens
  misc_RNA (1)...(19): siRNA sense strand
gaagagaggagcaguauug

SEQ ID NO: 1820616 - RNA, 19 nt, Homo sapiens
  misc_RNA (1)...(19): siRNA sense strand
ggucaaagccuuccucuga

SEQ ID NO: 1820617 - RNA, 19 nt, Homo sapiens
  misc_RNA (1)...(19): siRNA sense strand
ugaagaagaucaaguuaga

SEQ ID NO: 1820618 - RNA, 19 nt, Homo sapiens
  misc_RNA (1)...(19): siRNA sense strand
gcaagaaucacaaauggaa

SEQ ID NO: 1820619 - RNA, 19 nt, Homo sapiens
  misc_RNA (1)...(19): siRNA sense strand
gauguuaaagcaacuguua

SEQ ID NO: 1820620 - RNA, 19 nt, Homo sapiens
  misc_RNA (1)...(19): siRNA sense strand
aaacaaacccuaagaggaa

SEQ ID NO: 1820621 - RNA, 19 nt, Homo sapiens
  misc_RNA (1)...(19): siRNA sense strand
gaaaggaagaagaaguuaa

SEQ ID NO: 1820622 - RNA, 19 nt, Homo sapiens
  misc_RNA (1)...(19): siRNA sense strand
gaacacaccauccauaucu

SEQ ID NO: 1820623 - RNA, 19 nt, Homo sapiens
  misc_RNA (1)...(19): siRNA sense strand
gcccuaugcucacuaauga

SEQ ID NO: 1820624 - RNA, 19 nt, Homo sapiens
  misc_RNA (1)...(19): siRNA sense strand
gaagaaacucccaucaaga

SEQ ID NO: 1820625 - RNA, 19 nt, Homo sapiens
  misc_RNA (1)...(19): siRNA sense strand
cgagcugacucccacguua

SEQ ID NO: 1820626 - RNA, 19 nt, Homo sapiens
  misc_RNA (1)...(19): siRNA sense strand
caagaacacaccauccaua

SEQ ID NO: 1820627 - RNA, 19 nt, Homo sapiens
  misc_RNA (1)...(19): siRNA sense strand
gaggagaaaccacaacauu

SEQ ID NO: 1820628 - RNA, 19 nt, Homo sapiens
  misc_RNA (1)...(19): siRNA sense strand
cagcuuaccucccaguaga

SEQ ID NO: 1820629 - RNA, 19 nt, Homo sapiens
  misc_RNA (1)...(19): siRNA sense strand
cgacaauucuagacagaga

SEQ ID NO: 1820630 - RNA, 19 nt, Homo sapiens
  misc_RNA (1)...(19): siRNA sense strand
agaagaaacucccaucaag

SEQ ID NO: 1820631 - RNA, 19 nt, Homo sapiens
  misc_RNA (1)...(19): siRNA sense strand
gcaugaagaagaucaaguu

SEQ ID NO: 1820632 - RNA, 19 nt, Homo sapiens
  misc_RNA (1)...(19): siRNA sense strand
ggagcaguauugacaacaa

SEQ ID NO: 1820633 - RNA, 19 nt, Homo sapiens
  misc_RNA (1)...(19): siRNA sense strand
cuucaacccugcaguuaaa

SEQ ID NO: 1820634 - RNA, 19 nt, Homo sapiens
  misc_RNA (1)...(19): siRNA sense strand
gagaggagcaguauugaca

SEQ ID NO: 1820635 - RNA, 19 nt, Homo sapiens
  misc_RNA (1)...(19): siRNA sense strand
guuagacacuccagaggaa

SEQ ID NO: 1820636 - RNA, 19 nt, Homo sapiens
  misc_RNA (1)...(19): siRNA sense strand
aaacucccaucaagacuga

SEQ ID NO: 1820637 - RNA, 19 nt, Homo sapiens
  misc_RNA (1)...(19): siRNA sense strand
uguguucgguacaucauua

SEQ ID NO: 1820638 - RNA, 19 nt, Homo sapiens
  misc_RNA (1)...(19): siRNA sense strand
ggagaagagaggagcagua

SEQ ID NO: 1820639 - RNA, 19 nt, Homo sapiens
  misc_RNA (1)...(19): siRNA sense strand
gagaagagaggagcaguau

SEQ ID NO: 1820640 - RNA, 19 nt, Homo sapiens
  misc_RNA (1)...(19): siRNA sense strand
aaacagugauucugagucu

SEQ ID NO: 1820641 - RNA, 19 nt, Homo sapiens
  misc_RNA (1)...(19): siRNA sense strand
acaaacacaugucugaaca

SEQ ID NO: 1820642 - RNA, 19 nt, Homo sapiens
  misc_RNA (1)...(19): siRNA sense strand
ggacauucgacaugaaaga

SEQ ID NO: 1820643 - RNA, 19 nt, Homo sapiens
  misc_RNA (1)...(19): siRNA sense strand
gcaaaugcagauccucuug

SEQ ID NO: 1820644 - RNA, 19 nt, Homo sapiens
  misc_RNA (1)...(19): siRNA sense strand
cagaaguccuggcaagaau

SEQ ID NO: 1820645 - RNA, 19 nt, Homo sapiens
  misc_RNA (1)...(19): siRNA sense strand
acgagaagauuguccaguu

SEQ ID NO: 1820646 - RNA, 19 nt, Homo sapiens
  misc_RNA (1)...(19): siRNA sense strand
cgagaagauuguccaguuc

SEQ ID NO: 1820647 - RNA, 19 nt, Homo sapiens
  misc_RNA (1)...(19): siRNA sense strand
gaaaagaaaggaaccaguu

SEQ ID NO: 1820648 - RNA, 19 nt, Homo sapiens
  misc_RNA (1)...(19): siRNA sense strand
ggauacuaauucugcgaaa

SEQ ID NO: 1820649 - RNA, 19 nt, Homo sapiens
  misc_RNA (1)...(19): siRNA sense strand
ucacaaauggcaaagauca

SEQ ID NO: 1820650 - RNA, 19 nt, Homo sapiens
  misc_RNA (1)...(19): siRNA sense strand
gcuucuagcuccggacauu

SEQ ID NO: 1820651 - RNA, 19 nt, Homo sapiens
  misc_RNA (1)...(19): siRNA sense strand
caugaagaagaucaaguua

SEQ ID NO: 1820652 - RNA, 19 nt, Homo sapiens
  misc_RNA (1)...(19): siRNA sense strand
gaagugacaccagcccuau

SEQ ID NO: 1820653 - RNA, 19 nt, Homo sapiens
  misc_RNA (1)...(19): siRNA sense strand
gcagauccucuugguguuu

SEQ ID NO: 1820654 - RNA, 19 nt, Homo sapiens
  misc_RNA (1)...(19): siRNA sense strand
ccaccgccaccaccacuua

SEQ ID NO: 1820655 - RNA, 19 nt, Homo sapiens
  misc_RNA (1)...(19): siRNA sense strand
caacucuggccaauauuga

SEQ ID NO: 1820656 - RNA, 19 nt, Homo sapiens
  misc_RNA (1)...(19): siRNA sense strand
cagaagaaacucccaucaa

SEQ ID NO: 1820657 - RNA, 19 nt, Homo sapiens
  misc_RNA (1)...(19): siRNA sense strand
caaaaugcccugaauuaga

SEQ ID NO: 1820658 - RNA, 19 nt, Homo sapiens
  misc_RNA (1)...(19): siRNA sense strand
uaucacaacuaucaaacgu

SEQ ID NO: 1820659 - RNA, 19 nt, Homo sapiens
  misc_RNA (1)...(19): siRNA sense strand
ccacgaaaguaugaugcaa

SEQ ID NO: 1820660 - RNA, 19 nt, Homo sapiens
  misc_RNA (1)...(19): siRNA sense strand
ccagcccuaugcucacuaa

SEQ ID NO: 1820661 - RNA, 19 nt, Homo sapiens
  misc_RNA (1)...(19): siRNA sense strand
ugauaaacagugauucuga

SEQ ID NO: 1820662 - RNA, 19 nt, Homo sapiens
  misc_RNA (1)...(19): siRNA sense strand
uggcaagaaucacaaaugg

SEQ ID NO: 1820663 - RNA, 19 nt, Homo sapiens
  misc_RNA (1)...(19): siRNA sense strand
gaaguccuggcaagaauca

SEQ ID NO: 1820664 - RNA, 19 nt, Homo sapiens
  misc_RNA (1)...(19): siRNA sense strand
ugaaaggaagaagaaguua

SEQ ID NO: 1820665 - RNA, 19 nt, Homo sapiens
  misc_RNA (1)...(19): siRNA sense strand
gaagaucaaguuagacacu

SEQ ID NO: 1820666 - RNA, 19 nt, Homo sapiens
  misc_RNA (1)...(19): siRNA sense strand
gagggaagaaagaaggaaa

SEQ ID NO: 1820667 - RNA, 19 nt, Homo sapiens
  misc_RNA (1)...(19): siRNA sense strand
ucaaagccuuccucugagu

SEQ ID NO: 1820668 - RNA, 19 nt, Homo sapiens
  misc_RNA (1)...(19): siRNA sense strand
uggccaauauugaaaggaa

SEQ ID NO: 1820669 - RNA, 19 nt, Homo sapiens
  misc_RNA (1)...(19): siRNA sense strand
uacaaaaugcccugaauua

SEQ ID NO: 1820670 - RNA, 19 nt, Homo sapiens
  misc_RNA (1)...(19): siRNA sense strand
gaguagcuauggcagucuu

SEQ ID NO: 1820671 - RNA, 19 nt, Homo sapiens
  misc_RNA (1)...(19): siRNA sense strand
acagucuucugauagguuu

SEQ ID NO: 1820672 - RNA, 19 nt, Homo sapiens
  misc_RNA (1)...(19): siRNA sense strand
aaaaugcccugaauuagau

SEQ ID NO: 1820673 - RNA, 19 nt, Homo sapiens
  misc_RNA (1)...(19): siRNA sense strand
auucacagacuucagcuua

SEQ ID NO: 1820674 - RNA, 19 nt, Homo sapiens
  misc_RNA (1)...(19): siRNA sense strand
ccauaucucuuggaaaugc

SEQ ID NO: 1820675 - RNA, 19 nt, Homo sapiens
  misc_RNA (1)...(19): siRNA sense strand
auccaacucuggccaauau

SEQ ID NO: 1820676 - RNA, 19 nt, Homo sapiens
  misc_RNA (1)...(19): siRNA sense strand
gaguccaagucaagauguu

SEQ ID NO: 1820677 - RNA, 19 nt, Homo sapiens
  misc_RNA (1)...(19): siRNA sense strand
gagagugagccagaagaaa

SEQ ID NO: 1820678 - RNA, 19 nt, Homo sapiens
  misc_RNA (1)...(19): siRNA sense strand
gcggccagccuuggaauuu

SEQ ID NO: 1820679 - RNA, 19 nt, Homo sapiens
  misc_RNA (1)...(19): siRNA sense strand
gaggagcaguauugacaac

SEQ ID NO: 1820680 - RNA, 19 nt, Homo sapiens
  misc_RNA (1)...(19): siRNA sense strand
gagugagaaccgaaagaaa

SEQ ID NO: 1820681 - RNA, 19 nt, Homo sapiens
  misc_RNA (1)...(19): siRNA sense strand
gugauucugagucugauaa

SEQ ID NO: 1820682 - RNA, 19 nt, Homo sapiens
  misc_RNA (1)...(19): siRNA sense strand
ucagaaguccuggcaagaa

SEQ ID NO: 1820683 - RNA, 19 nt, Homo sapiens
  misc_RNA (1)...(19): siRNA sense strand
gagcaguauugacaacaac

SEQ ID NO: 1820684 - RNA, 19 nt, Homo sapiens
  misc_RNA (1)...(19): siRNA sense strand
gcuccuggcaugaagaaga

SEQ ID NO: 1820685 - RNA, 19 nt, Homo sapiens
  misc_RNA (1)...(19): siRNA sense strand
cauucgacaugaaagaaau

SEQ ID NO: 1820686 - RNA, 19 nt, Homo sapiens
  misc_RNA (1)...(19): siRNA sense strand
caagaaucacaaauggaaa

SEQ ID NO: 1820687 - RNA, 19 nt, Homo sapiens
  misc_RNA (1)...(19): siRNA sense strand
caaauggcaaagaucagaa

SEQ ID NO: 1820688 - RNA, 19 nt, Homo sapiens
  misc_RNA (1)...(19): siRNA sense strand
cacaauauggcaagaugaa

SEQ ID NO: 1820689 - RNA, 19 nt, Homo sapiens
  misc_RNA (1)...(19): siRNA sense strand
ccaacucuggccaauauug

SEQ ID NO: 1820690 - RNA, 19 nt, Homo sapiens
  misc_RNA (1)...(19): siRNA sense strand
gaucaggcagucacuugug

SEQ ID NO: 1820691 - RNA, 19 nt, Homo sapiens
  misc_RNA (1)...(19): siRNA sense strand
ugacaacaacacaauaugg

SEQ ID NO: 1820692 - RNA, 19 nt, Homo sapiens
  misc_RNA (1)...(19): siRNA sense strand
aagaacacaccauccauau

SEQ ID NO: 1820693 - RNA, 19 nt, Homo sapiens
  misc_RNA (1)...(19): siRNA sense strand
cuuauuauccacgaaagua

SEQ ID NO: 1820694 - RNA, 19 nt, Homo sapiens
  misc_RNA (1)...(19): siRNA sense strand
ucacuaaugaguagcuaug

SEQ ID NO: 1820695 - RNA, 19 nt, Homo sapiens
  misc_RNA (1)...(19): siRNA sense strand
gacauucgacaugaaagaa

SEQ ID NO: 1820696 - RNA, 19 nt, Homo sapiens
  misc_RNA (1)...(19): siRNA sense strand
uuucagaagccaagaguga

SEQ ID NO: 1820697 - RNA, 19 nt, Homo sapiens
  misc_RNA (1)...(19): siRNA sense strand
aacacaauauggcaagaug

SEQ ID NO: 1820698 - RNA, 19 nt, Homo sapiens
  misc_RNA (1)...(19): siRNA sense strand
ccaagagugagaaccgaaa

SEQ ID NO: 1820699 - RNA, 19 nt, Homo sapiens
  misc_RNA (1)...(19): siRNA sense strand
aaaugcagauccucuuggu

SEQ ID NO: 1820700 - RNA, 19 nt, Homo sapiens
  misc_RNA (1)...(19): siRNA sense strand
caaacguuauucgaaccaa

SEQ ID NO: 1820701 - RNA, 19 nt, Homo sapiens
  misc_RNA (1)...(19): siRNA sense strand
gcugagccgacuagugauu

SEQ ID NO: 1820702 - RNA, 19 nt, Homo sapiens
  misc_RNA (1)...(19): siRNA sense strand
acagugauucugagucuga

SEQ ID NO: 1820703 - RNA, 19 nt, Homo sapiens
  misc_RNA (1)...(19): siRNA sense strand
gcacgguggagggaagaaa

SEQ ID NO: 1820704 - RNA, 19 nt, Homo sapiens
  misc_RNA (1)...(19): siRNA sense strand
gcaguguguucgguacauc

SEQ ID NO: 1820705 - RNA, 19 nt, Homo sapiens
  misc_RNA (1)...(19): siRNA sense strand
ccuaagaguccaagucaag

SEQ ID NO: 1820706 - RNA, 19 nt, Homo sapiens
  misc_RNA (1)...(19): siRNA sense strand
ccagaagaaacucccauca

SEQ ID NO: 1820707 - RNA, 19 nt, Homo sapiens
  misc_RNA (1)...(19): siRNA sense strand
gagcugacucccacguuag

SEQ ID NO: 1820708 - RNA, 19 nt, Homo sapiens
  misc_RNA (1)...(19): siRNA sense strand
ggaggcaaaugcagauccu

SEQ ID NO: 1820709 - RNA, 19 nt, Homo sapiens
  misc_RNA (1)...(19): siRNA sense strand
auucacaaauggcaaagau

SEQ ID NO: 1820710 - RNA, 19 nt, Homo sapiens
  misc_RNA (1)...(19): siRNA sense strand
acaaauggcaaagaucaga

SEQ ID NO: 1820711 - RNA, 19 nt, Homo sapiens
  misc_RNA (1)...(19): siRNA sense strand
guccaagucaagauguuaa

SEQ ID NO: 1820712 - RNA, 19 nt, Homo sapiens
  misc_RNA (1)...(19): siRNA sense strand
gacagucuucugauagguu

SEQ ID NO: 1820713 - RNA, 19 nt, Homo sapiens
  misc_RNA (1)...(19): siRNA sense strand
aacaaacccuaagaggaaa

SEQ ID NO: 1820714 - RNA, 19 nt, Homo sapiens
  misc_RNA (1)...(19): siRNA sense strand
gaccaucaauuccgacaua

SEQ ID NO: 1820715 - RNA, 19 nt, Homo sapiens
  misc_RNA (1)...(19): siRNA sense strand
gguguaauaugaagaguaa

SEQ ID NO: 1820716 - RNA, 19 nt, Homo sapiens
  misc_RNA (1)...(19): siRNA sense strand
cgacauaucuauaccugaa

SEQ ID NO: 1820717 - RNA, 19 nt, Homo sapiens
  misc_RNA (1)...(19): siRNA sense strand
gacagcauuugguguaaua

SEQ ID NO: 1820718 - RNA, 19 nt, Homo sapiens
  misc_RNA (1)...(19): siRNA sense strand
ggaaauucaagcaguguuu

SEQ ID NO: 1820719 - RNA, 19 nt, Homo sapiens
  misc_RNA (1)...(19): siRNA sense strand
ggacugaugaugcauacag

SEQ ID NO: 1820720 - RNA, 19 nt, Homo sapiens
  misc_RNA (1)...(19): siRNA sense strand
caauuccgacauaucuaua

SEQ ID NO: 1820721 - RNA, 19 nt, Homo sapiens
  misc_RNA (1)...(19): siRNA sense strand
gcauuugguguaauaugaa

SEQ ID NO: 1820722 - RNA, 19 nt, Homo sapiens
  misc_RNA (1)...(19): siRNA sense strand
agcauuugguguaauauga

SEQ ID NO: 1820723 - RNA, 19 nt, Homo sapiens
  misc_RNA (1)...(19): siRNA sense strand
caucaauuccgacauaucu

SEQ ID NO: 1820724 - RNA, 19 nt, Homo sapiens
  misc_RNA (1)...(19): siRNA sense strand
ucacauagaacucugaaaa

SEQ ID NO: 1820725 - RNA, 19 nt, Homo sapiens
  misc_RNA (1)...(19): siRNA sense strand
ucaauuccgacauaucuau

SEQ ID NO: 1820726 - RNA, 19 nt, Homo sapiens
  misc_RNA (1)...(19): siRNA sense strand
cgacagcauuugguguaau

SEQ ID NO: 1820727 - RNA, 19 nt, Homo sapiens
  misc_RNA (1)...(19): siRNA sense strand
cuucaagaguucauagaca

SEQ ID NO: 1820728 - RNA, 19 nt, Homo sapiens
  misc_RNA (1)...(19): siRNA sense strand
caagcaguguuuccucaac

SEQ ID NO: 1820729 - RNA, 19 nt, Homo sapiens
  misc_RNA (1)...(19): siRNA sense strand
uacgacagcauuuggugua

SEQ ID NO: 1820730 - RNA, 19 nt, Homo sapiens
  misc_RNA (1)...(19): siRNA sense strand
aagaguucauagacaguga

SEQ ID NO: 1820731 - RNA, 19 nt, Homo sapiens
  misc_RNA (1)...(19): siRNA sense strand
cucaaccagucacauagaa

SEQ ID NO: 1820732 - RNA, 19 nt, Homo sapiens
  misc_RNA (1)...(19): siRNA sense strand
uggaggacaugguugaaaa

SEQ ID NO: 1820733 - RNA, 19 nt, Homo sapiens
  misc_RNA (1)...(19): siRNA sense strand
caaccagucacauagaacu

SEQ ID NO: 1820734 - RNA, 19 nt, Homo sapiens
  misc_RNA (1)...(19): siRNA sense strand
cagcauuugguguaauaug

SEQ ID NO: 1820735 - RNA, 19 nt, Homo sapiens
  misc_RNA (1)...(19): siRNA sense strand
ggaaggagaaggaauauga

SEQ ID NO: 1820736 - RNA, 19 nt, Homo sapiens
  misc_RNA (1)...(19): siRNA sense strand
gaaggaauaugagcaugaa

SEQ ID NO: 1820737 - RNA, 19 nt, Homo sapiens
  misc_RNA (1)...(19): siRNA sense strand
ccagagaaguccacaacaa

SEQ ID NO: 1820738 - RNA, 19 nt, Homo sapiens
  misc_RNA (1)...(19): siRNA sense strand
gaacagaagaaggccaaua

SEQ ID NO: 1820739 - RNA, 19 nt, Homo sapiens
  misc_RNA (1)...(19): siRNA sense strand
gcucccagcugcccuugua

SEQ ID NO: 1820740 - RNA, 19 nt, Homo sapiens
  misc_RNA (1)...(19): siRNA sense strand
caacguggaugacaagaag

SEQ ID NO: 1820741 - RNA, 19 nt, Homo sapiens
  misc_RNA (1)...(19): siRNA sense strand
aagaagacguccaaucuga

SEQ ID NO: 1820742 - RNA, 19 nt, Homo sapiens
  misc_RNA (1)...(19): siRNA sense strand
gagaaguccacaacaaauu

SEQ ID NO: 1820743 - RNA, 19 nt, Homo sapiens
  misc_RNA (1)...(19): siRNA sense strand
gaagucaaauccagugaac

SEQ ID NO: 1820744 - RNA, 19 nt, Homo sapiens
  misc_RNA (1)...(19): siRNA sense strand
gaaguuggcaccagcugaa

SEQ ID NO: 1820745 - RNA, 19 nt, Homo sapiens
  misc_RNA (1)...(19): siRNA sense strand
ggaauaugagcaugaaaug

SEQ ID NO: 1820746 - RNA, 19 nt, Homo sapiens
  misc_RNA (1)...(19): siRNA sense strand
acaacaaauuggagaagaa

SEQ ID NO: 1820747 - RNA, 19 nt, Homo sapiens
  misc_RNA (1)...(19): siRNA sense strand
caggagggcccaucugaaa

SEQ ID NO: 1820748 - RNA, 19 nt, Homo sapiens
  misc_RNA (1)...(19): siRNA sense strand
gcaagcacaucgcccacau

SEQ ID NO: 1820749 - RNA, 19 nt, Homo sapiens
  misc_RNA (1)...(19): siRNA sense strand
caaauccagugaacagaag

SEQ ID NO: 1820750 - RNA, 19 nt, Homo sapiens
  misc_RNA (1)...(19): siRNA sense strand
ggagggcccaucugaaaga

SEQ ID NO: 1820751 - RNA, 19 nt, Homo sapiens
  misc_RNA (1)...(19): siRNA sense strand
cagagaaguccacaacaaa

SEQ ID NO: 1820752 - RNA, 19 nt, Homo sapiens
  misc_RNA (1)...(19): siRNA sense strand
agaggaaggagaaggaaua

SEQ ID NO: 1820753 - RNA, 19 nt, Homo sapiens
  misc_RNA (1)...(19): siRNA sense strand
gaucggaaccagagaaguc

SEQ ID NO: 1820754 - RNA, 19 nt, Homo sapiens
  misc_RNA (1)...(19): siRNA sense strand
ggcaccagcugaagaaguc

SEQ ID NO: 1820755 - RNA, 19 nt, Homo sapiens
  misc_RNA (1)...(19): siRNA sense strand
ggauggacguacuggagau

SEQ ID NO: 1820756 - RNA, 19 nt, Homo sapiens
  misc_RNA (1)...(19): siRNA sense strand
acaagaagacguccaaucu

SEQ ID NO: 1820757 - RNA, 19 nt, Homo sapiens
  misc_RNA (1)...(19): siRNA sense strand
gagagcaggaacagaagaa

SEQ ID NO: 1820758 - RNA, 19 nt, Homo sapiens
  misc_RNA (1)...(19): siRNA sense strand
gaagaggaaggagaaggaa

SEQ ID NO: 1820759 - RNA, 19 nt, Homo sapiens
  misc_RNA (1)...(19): siRNA sense strand
ggagaaggaauaugagcau

SEQ ID NO: 1820760 - RNA, 19 nt, Homo sapiens
  misc_RNA (1)...(19): siRNA sense strand
aauaugagcaugaaaugga

SEQ ID NO: 1820761 - RNA, 19 nt, Homo sapiens
  misc_RNA (1)...(19): siRNA sense strand
ucaaauccagugaacagaa

SEQ ID NO: 1820762 - RNA, 19 nt, Homo sapiens
  misc_RNA (1)...(19): siRNA sense strand
gaacaggagggcccaucug

SEQ ID NO: 1820763 - RNA, 19 nt, Homo sapiens
  misc_RNA (1)...(19): siRNA sense strand
cacaacaaauuggagaaga

SEQ ID NO: 1820764 - RNA, 19 nt, Homo sapiens
  misc_RNA (1)...(19): siRNA sense strand
cggcuacugucauggcaaa

SEQ ID NO: 1820765 - RNA, 19 nt, Homo sapiens
  misc_RNA (1)...(19): siRNA sense strand
gacaagaagacguccaauc

SEQ ID NO: 1820766 - RNA, 19 nt, Homo sapiens
  misc_RNA (1)...(19): siRNA sense strand
gcuggcacgugagaagauu

SEQ ID NO: 1820767 - RNA, 19 nt, Homo sapiens
  misc_RNA (1)...(19): siRNA sense strand
caagaagacguccaaucug

SEQ ID NO: 1820768 - RNA, 19 nt, Homo sapiens
  misc_RNA (1)...(19): siRNA sense strand
agaaguccacaacaaauug

SEQ ID NO: 1820769 - RNA, 19 nt, Homo sapiens
  misc_RNA (1)...(19): siRNA sense strand
ggacaacauagacgaggau

SEQ ID NO: 1820770 - RNA, 19 nt, Homo sapiens
  misc_RNA (1)...(19): siRNA sense strand
ccagugaacagaagaagag

SEQ ID NO: 1820771 - RNA, 19 nt, Homo sapiens
  misc_RNA (1)...(19): siRNA sense strand
gaggaaggagaaggaauau

SEQ ID NO: 1820772 - RNA, 19 nt, Homo sapiens
  misc_RNA (1)...(19): siRNA sense strand
ugaagaggaaggagaagga

SEQ ID NO: 1820773 - RNA, 19 nt, Homo sapiens
  misc_RNA (1)...(19): siRNA sense strand
uccagucccugaagaggaa

SEQ ID NO: 1820774 - RNA, 19 nt, Homo sapiens
  misc_RNA (1)...(19): siRNA sense strand
agaaggaauaugagcauga

SEQ ID NO: 1820775 - RNA, 19 nt, Homo sapiens
  misc_RNA (1)...(19): siRNA sense strand
gaaggagaaggaauaugag

SEQ ID NO: 1820776 - RNA, 19 nt, Homo sapiens
  misc_RNA (1)...(19): siRNA sense strand
ggcaagcgcagcaacaaca

SEQ ID NO: 1820777 - RNA, 19 nt, Homo sapiens
  misc_RNA (1)...(19): siRNA sense strand
agccggagcugcugaaguc

SEQ ID NO: 1820778 - RNA, 19 nt, Homo sapiens
  misc_RNA (1)...(19): siRNA sense strand
gaauaugagcaugaaaugg

SEQ ID NO: 1820779 - RNA, 19 nt, Homo sapiens
  misc_RNA (1)...(19): siRNA sense strand
ggacucgaaggccaccauu

SEQ ID NO: 1820780 - RNA, 19 nt, Homo sapiens
  misc_RNA (1)...(19): siRNA sense strand
ugagggugaggacaacaua

SEQ ID NO: 1820781 - RNA, 19 nt, Homo sapiens
  misc_RNA (1)...(19): siRNA sense strand
guacauccagucccugaag

SEQ ID NO: 1820782 - RNA, 19 nt, Homo sapiens
  misc_RNA (1)...(19): siRNA sense strand
agagaaguccacaacaaau

SEQ ID NO: 1820783 - RNA, 19 nt, Homo sapiens
  misc_RNA (1)...(19): siRNA sense strand
uggacguacuggagauuga

SEQ ID NO: 1820784 - RNA, 19 nt, Homo sapiens
  misc_RNA (1)...(19): siRNA sense strand
gagcauagagacgcuacug

SEQ ID NO: 1820785 - RNA, 19 nt, Homo sapiens
  misc_RNA (1)...(19): siRNA sense strand
gaaguccacaacaaauugg

SEQ ID NO: 1820786 - RNA, 19 nt, Homo sapiens
  misc_RNA (1)...(19): siRNA sense strand
gaaccagagaaguccacaa

SEQ ID NO: 1820787 - RNA, 19 nt, Homo sapiens
  misc_RNA (1)...(19): siRNA sense strand
ccauugggcacaucacugu

SEQ ID NO: 1820788 - RNA, 19 nt, Homo sapiens
  misc_RNA (1)...(19): siRNA sense strand
ccaacguggaugacaagaa

SEQ ID NO: 1820789 - RNA, 19 nt, Homo sapiens
  misc_RNA (1)...(19): siRNA sense strand
gacaacauagacgaggaua

SEQ ID NO: 1820790 - RNA, 19 nt, Homo sapiens
  misc_RNA (1)...(19): siRNA sense strand
guuggcaccagcugaagaa

SEQ ID NO: 1820791 - RNA, 19 nt, Homo sapiens
  misc_RNA (1)...(19): siRNA sense strand
caacaaauuggagaagaac

SEQ ID NO: 1820792 - RNA, 19 nt, Homo sapiens
  misc_RNA (1)...(19): siRNA sense strand
aacagaagaaggccaauag

SEQ ID NO: 1820793 - RNA, 19 nt, Homo sapiens
  misc_RNA (1)...(19): siRNA sense strand
cagcagccacagcagaaga

SEQ ID NO: 1820794 - RNA, 19 nt, Homo sapiens
  misc_RNA (1)...(19): siRNA sense strand
cagcugaagaagucaaauc

SEQ ID NO: 1820795 - RNA, 19 nt, Homo sapiens
  misc_RNA (1)...(19): siRNA sense strand
gccaguggauggacguacu

SEQ ID NO: 1820796 - RNA, 19 nt, Homo sapiens
  misc_RNA (1)...(19): siRNA sense strand
aggaauaugagcaugaaau

SEQ ID NO: 1820797 - RNA, 19 nt, Homo sapiens
  misc_RNA (1)...(19): siRNA sense strand
ccacgccuguccugaccau

SEQ ID NO: 1820798 - RNA, 19 nt, Homo sapiens
  misc_RNA (1)...(19): siRNA sense strand
uacauccagucccugaaga

SEQ ID NO: 1820799 - RNA, 19 nt, Homo sapiens
  misc_RNA (1)...(19): siRNA sense strand
gcaccagccugacggauga

SEQ ID NO: 1820800 - RNA, 19 nt, Homo sapiens
  misc_RNA (1)...(19): siRNA sense strand
uggagaagcuggccucaga

SEQ ID NO: 1820801 - RNA, 19 nt, Homo sapiens
  misc_RNA (1)...(19): siRNA sense strand
ucagagaacgccagcauga

SEQ ID NO: 1820802 - RNA, 19 nt, Homo sapiens
  misc_RNA (1)...(19): siRNA sense strand
ugaagcgggugacgcagaa

SEQ ID NO: 1820803 - RNA, 19 nt, Homo sapiens
  misc_RNA (1)...(19): siRNA sense strand
aggaggagcuggagaagca

SEQ ID NO: 1820804 - RNA, 19 nt, Homo sapiens
  misc_RNA (1)...(19): siRNA sense strand
gaagcuggccucagagaac

SEQ ID NO: 1820805 - RNA, 19 nt, Homo sapiens
  misc_RNA (1)...(19): siRNA sense strand
ccaccagcgucaucacaau

SEQ ID NO: 1820806 - RNA, 19 nt, Homo sapiens
  misc_RNA (1)...(19): siRNA sense strand
ucacaauaguaaaguccaa

SEQ ID NO: 1820807 - RNA, 19 nt, Homo sapiens
  misc_RNA (1)...(19): siRNA sense strand
gagaagcuggccucagaga

SEQ ID NO: 1820808 - RNA, 19 nt, Homo sapiens
  misc_RNA (1)...(19): siRNA sense strand
agaaggaggagcuggagaa

SEQ ID NO: 1820809 - RNA, 19 nt, Homo sapiens
  misc_RNA (1)...(19): siRNA sense strand
caccagcgucaucacaaua

SEQ ID NO: 1820810 - RNA, 19 nt, Homo sapiens
  misc_RNA (1)...(19): siRNA sense strand
acgaggcgcugcagaccuu

SEQ ID NO: 1820811 - RNA, 19 nt, Homo sapiens
  misc_RNA (1)...(19): siRNA sense strand
cagcgucaucacaauagua

SEQ ID NO: 1820812 - RNA, 19 nt, Homo sapiens
  misc_RNA (1)...(19): siRNA sense strand
agacggaugcccgaucgua

SEQ ID NO: 1820813 - RNA, 19 nt, Homo sapiens
  misc_RNA (1)...(19): siRNA sense strand
gaaggaggagcuggagaag

SEQ ID NO: 1820814 - RNA, 19 nt, Homo sapiens
  misc_RNA (1)...(19): siRNA sense strand
ggagaucguccagcugaag

SEQ ID NO: 1820815 - RNA, 19 nt, Homo sapiens
  misc_RNA (1)...(19): siRNA sense strand
agagaacgccagcaugaag

SEQ ID NO: 1820816 - RNA, 19 nt, Homo sapiens
  misc_RNA (1)...(19): siRNA sense strand
cgucaucacaauaguaaag

SEQ ID NO: 1820817 - RNA, 19 nt, Homo sapiens
  misc_RNA (1)...(19): siRNA sense strand
cagagaacgccagcaugaa

SEQ ID NO: 1820818 - RNA, 19 nt, Homo sapiens
  misc_RNA (1)...(19): siRNA sense strand
cauuaaaggucaagaagga

SEQ ID NO: 1820819 - RNA, 19 nt, Homo sapiens
  misc_RNA (1)...(19): siRNA sense strand
caaaccgaauaaggcauua

SEQ ID NO: 1820820 - RNA, 19 nt, Homo sapiens
  misc_RNA (1)...(19): siRNA sense strand
ucaagcgggugacgcagaa

SEQ ID NO: 1820821 - RNA, 19 nt, Homo sapiens
  misc_RNA (1)...(19): siRNA sense strand
cgaauaaggcauuaaaggu

SEQ ID NO: 1820822 - RNA, 19 nt, Homo sapiens
  misc_RNA (1)...(19): siRNA sense strand
ccaaaccgaauaaggcauu

SEQ ID NO: 1820823 - RNA, 19 nt, Homo sapiens
  misc_RNA (1)...(19): siRNA sense strand
gagaagcuggcgcgugaga

SEQ ID NO: 1820824 - RNA, 19 nt, Homo sapiens
  misc_RNA (1)...(19): siRNA sense strand
acuaaucccaaaccgaaua

SEQ ID NO: 1820825 - RNA, 19 nt, Homo sapiens
  misc_RNA (1)...(19): siRNA sense strand
acgaggcgcugcagaccuu

SEQ ID NO: 1820826 - RNA, 19 nt, Homo sapiens
  misc_RNA (1)...(19): siRNA sense strand
gaugagcugguguccaugu

SEQ ID NO: 1820827 - RNA, 19 nt, Homo sapiens
  misc_RNA (1)...(19): siRNA sense strand
gaagcuggcgcgugagaac

SEQ ID NO: 1820828 - RNA, 19 nt, Homo sapiens
  misc_RNA (1)...(19): siRNA sense strand
augaugagcugguguccau

SEQ ID NO: 1820829 - RNA, 19 nt, Homo sapiens
  misc_RNA (1)...(19): siRNA sense strand
cuaaucccaaaccgaauaa

SEQ ID NO: 1820830 - RNA, 19 nt, Homo sapiens
  misc_RNA (1)...(19): siRNA sense strand
ccaccagcgucaucaccau

SEQ ID NO: 1820831 - RNA, 19 nt, Homo sapiens
  misc_RNA (1)...(19): siRNA sense strand
ccgaauaaggcauuaaagg

SEQ ID NO: 1820832 - RNA, 19 nt, Homo sapiens
  misc_RNA (1)...(19): siRNA sense strand
cgucggcgcacacucaaga

SEQ ID NO: 1820833 - RNA, 19 nt, Homo sapiens
  misc_RNA (1)...(19): siRNA sense strand
aaccgaauaaggcauuaaa

SEQ ID NO: 1820834 - RNA, 19 nt, Homo sapiens
  misc_RNA (1)...(19): siRNA sense strand
caacagugcugcugaauua

SEQ ID NO: 1820835 - RNA, 19 nt, Homo sapiens
  misc_RNA (1)...(19): siRNA sense strand
ggacagaagugguggauaa

SEQ ID NO: 1820836 - RNA, 19 nt, Homo sapiens
  misc_RNA (1)...(19): siRNA sense strand
ggaagaagcugaacgauuc

SEQ ID NO: 1820837 - RNA, 19 nt, Homo sapiens
  misc_RNA (1)...(19): siRNA sense strand
ggaaguugcuaccaauuua

SEQ ID NO: 1820838 - RNA, 19 nt, Homo sapiens
  misc_RNA (1)...(19): siRNA sense strand
gaaaguaauuccugggaua

SEQ ID NO: 1820839 - RNA, 19 nt, Homo sapiens
  misc_RNA (1)...(19): siRNA sense strand
ggagaaaccuguuacaaga

SEQ ID NO: 1820840 - RNA, 19 nt, Homo sapiens
  misc_RNA (1)...(19): siRNA sense strand
ggaacaaacugcaaucuga

SEQ ID NO: 1820841 - RNA, 19 nt, Homo sapiens
  misc_RNA (1)...(19): siRNA sense strand
cgaagacuguguaguauua

SEQ ID NO: 1820842 - RNA, 19 nt, Homo sapiens
  misc_RNA (1)...(19): siRNA sense strand
gcaggaagaccaacuauaa

SEQ ID NO: 1820843 - RNA, 19 nt, Homo sapiens
  misc_RNA (1)...(19): siRNA sense strand
gcaggaaaccauuaaauaa

SEQ ID NO: 1820844 - RNA, 19 nt, Homo sapiens
  misc_RNA (1)...(19): siRNA sense strand
caacuguguuuccuacuua

SEQ ID NO: 1820845 - RNA, 19 nt, Homo sapiens
  misc_RNA (1)...(19): siRNA sense strand
uaaaugagcugagaauguu

SEQ ID NO: 1820846 - RNA, 19 nt, Homo sapiens
  misc_RNA (1)...(19): siRNA sense strand
gaucagaagugacauuugu

SEQ ID NO: 1820847 - RNA, 19 nt, Homo sapiens
  misc_RNA (1)...(19): siRNA sense strand
gcaaauauaucuggugaug

SEQ ID NO: 1820848 - RNA, 19 nt, Homo sapiens
  misc_RNA (1)...(19): siRNA sense strand
ccacaaaccauuaaacuuu

SEQ ID NO: 1820849 - RNA, 19 nt, Homo sapiens
  misc_RNA (1)...(19): siRNA sense strand
gaaauuguguucucuugga

SEQ ID NO: 1820850 - RNA, 19 nt, Homo sapiens
  misc_RNA (1)...(19): siRNA sense strand
gaaaggaggcucagaggaa

SEQ ID NO: 1820851 - RNA, 19 nt, Homo sapiens
  misc_RNA (1)...(19): siRNA sense strand
gaugguauuuacaguguua

SEQ ID NO: 1820852 - RNA, 19 nt, Homo sapiens
  misc_RNA (1)...(19): siRNA sense strand
ucaaggagcugauuuacug

SEQ ID NO: 1820853 - RNA, 19 nt, Homo sapiens
  misc_RNA (1)...(19): siRNA sense strand
gcaacuaucguuuccauaa

SEQ ID NO: 1820854 - RNA, 19 nt, Homo sapiens
  misc_RNA (1)...(19): siRNA sense strand
gaagcuacuuuauggauug

SEQ ID NO: 1820855 - RNA, 19 nt, Homo sapiens
  misc_RNA (1)...(19): siRNA sense strand
ugggagaccuugugaauuu

SEQ ID NO: 1820856 - RNA, 19 nt, Homo sapiens
  misc_RNA (1)...(19): siRNA sense strand
gaaugaagaugagauuaug

SEQ ID NO: 1820857 - RNA, 19 nt, Homo sapiens
  misc_RNA (1)...(19): siRNA sense strand
ccaaacaucuccuggaaau

SEQ ID NO: 1820858 - RNA, 19 nt, Homo sapiens
  misc_RNA (1)...(19): siRNA sense strand
caaauguucccuacaauaa

SEQ ID NO: 1820859 - RNA, 19 nt, Homo sapiens
  misc_RNA (1)...(19): siRNA sense strand
ugaaaugguugacuacaaa

SEQ ID NO: 1820860 - RNA, 19 nt, Homo sapiens
  misc_RNA (1)...(19): siRNA sense strand
gagcacaccuuucuagcuu

SEQ ID NO: 1820861 - RNA, 19 nt, Homo sapiens
  misc_RNA (1)...(19): siRNA sense strand
ucacaaaacuccauaauga

SEQ ID NO: 1820862 - RNA, 19 nt, Homo sapiens
  misc_RNA (1)...(19): siRNA sense strand
gagcaagaauaccuaaaug

SEQ ID NO: 1820863 - RNA, 19 nt, Homo sapiens
  misc_RNA (1)...(19): siRNA sense strand
gcacagcaaucucaaaugc

SEQ ID NO: 1820864 - RNA, 19 nt, Homo sapiens
  misc_RNA (1)...(19): siRNA sense strand
gaucaggcauugcacaguu

SEQ ID NO: 1820865 - RNA, 19 nt, Homo sapiens
  misc_RNA (1)...(19): siRNA sense strand
gcagaaugcuucagaaacu

SEQ ID NO: 1820866 - RNA, 19 nt, Homo sapiens
  misc_RNA (1)...(19): siRNA sense strand
gaggaaugcuuguacaugu

SEQ ID NO: 1820867 - RNA, 19 nt, Homo sapiens
  misc_RNA (1)...(19): siRNA sense strand
gcuaucugcugguaaauga

SEQ ID NO: 1820868 - RNA, 19 nt, Homo sapiens
  misc_RNA (1)...(19): siRNA sense strand
ucaauuauauggcuucaug

SEQ ID NO: 1820869 - RNA, 19 nt, Homo sapiens
  misc_RNA (1)...(19): siRNA sense strand
gccagaaacugaauccaaa

SEQ ID NO: 1820870 - RNA, 19 nt, Homo sapiens
  misc_RNA (1)...(19): siRNA sense strand
ucacaacucuuccuuaugg

SEQ ID NO: 1820871 - RNA, 19 nt, Homo sapiens
  misc_RNA (1)...(19): siRNA sense strand
gaaagucuguuggaaagug

SEQ ID NO: 1820872 - RNA, 19 nt, Homo sapiens
  misc_RNA (1)...(19): siRNA sense strand
ggaagugaauauugguuug

SEQ ID NO: 1820873 - RNA, 19 nt, Homo sapiens
  misc_RNA (1)...(19): siRNA sense strand
caacuaucguuuccauaaa

SEQ ID NO: 1820874 - RNA, 19 nt, Homo sapiens
  misc_RNA (1)...(19): siRNA sense strand
ucucuuaugugguuugaua

SEQ ID NO: 1820875 - RNA, 19 nt, Homo sapiens
  misc_RNA (1)...(19): siRNA sense strand
ggaagcuacuuuauggauu

SEQ ID NO: 1820876 - RNA, 19 nt, Homo sapiens
  misc_RNA (1)...(19): siRNA sense strand
caacugcuguacuucaauu

SEQ ID NO: 1820877 - RNA, 19 nt, Homo sapiens
  misc_RNA (1)...(19): siRNA sense strand
gaccuccacuuauaauuga

SEQ ID NO: 1820878 - RNA, 19 nt, Homo sapiens
  misc_RNA (1)...(19): siRNA sense strand
gcagacgacugugaugaaa

SEQ ID NO: 1820879 - RNA, 19 nt, Homo sapiens
  misc_RNA (1)...(19): siRNA sense strand
ggauauggaagcuacuuua

SEQ ID NO: 1820880 - RNA, 19 nt, Homo sapiens
  misc_RNA (1)...(19): siRNA sense strand
aaauauaucuggugaugga

SEQ ID NO: 1820881 - RNA, 19 nt, Homo sapiens
  misc_RNA (1)...(19): siRNA sense strand
gcaaagccuucaguaguga

SEQ ID NO: 1820882 - RNA, 19 nt, Homo sapiens
  misc_RNA (1)...(19): siRNA sense strand
gcagaaagaauuguaagaa

SEQ ID NO: 1820883 - RNA, 19 nt, Homo sapiens
  misc_RNA (1)...(19): siRNA sense strand
ggauaggccuuaagaacau

SEQ ID NO: 1820884 - RNA, 19 nt, Homo sapiens
  misc_RNA (1)...(19): siRNA sense strand
gaagagacauggagaaacc

SEQ ID NO: 1820885 - RNA, 19 nt, Homo sapiens
  misc_RNA (1)...(19): siRNA sense strand
gguauuccaugcagaaaga

SEQ ID NO: 1820886 - RNA, 19 nt, Homo sapiens
  misc_RNA (1)...(19): siRNA sense strand
ugagagauguagauucuug

SEQ ID NO: 1820887 - RNA, 19 nt, Homo sapiens
  misc_RNA (1)...(19): siRNA sense strand
gacuaucacuagcagauuu

SEQ ID NO: 1820888 - RNA, 19 nt, Homo sapiens
  misc_RNA (1)...(19): siRNA sense strand
agacagacguugcagaaug

SEQ ID NO: 1820889 - RNA, 19 nt, Homo sapiens
  misc_RNA (1)...(19): siRNA sense strand
gccaauagaugaucauuuu

SEQ ID NO: 1820890 - RNA, 19 nt, Homo sapiens
  misc_RNA (1)...(19): siRNA sense strand
cagaagugguggauaagaa

SEQ ID NO: 1820891 - RNA, 19 nt, Homo sapiens
  misc_RNA (1)...(19): siRNA sense strand
gagcccagauuuacaagga

SEQ ID NO: 1820892 - RNA, 19 nt, Homo sapiens
  misc_RNA (1)...(19): siRNA sense strand
gcaagaauaccuaaaugau

SEQ ID NO: 1820893 - RNA, 19 nt, Homo sapiens
  misc_RNA (1)...(19): siRNA sense strand
guacaagggucacuguuac

SEQ ID NO: 1820894 - RNA, 19 nt, Homo sapiens
  misc_RNA (1)...(19): siRNA sense strand
gauaguagcagacgacugu

SEQ ID NO: 1820895 - RNA, 19 nt, Homo sapiens
  misc_RNA (1)...(19): siRNA sense strand
cgacuuagguaaaccaaca

SEQ ID NO: 1820896 - RNA, 19 nt, Homo sapiens
  misc_RNA (1)...(19): siRNA sense strand
cgaagaggcuggcauuucu

SEQ ID NO: 1820897 - RNA, 19 nt, Homo sapiens
  misc_RNA (1)...(19): siRNA sense strand
ccaaauguucccuacaaua

SEQ ID NO: 1820898 - RNA, 19 nt, Homo sapiens
  misc_RNA (1)...(19): siRNA sense strand
ggccaaacaucuccuggaa

SEQ ID NO: 1820899 - RNA, 19 nt, Homo sapiens
  misc_RNA (1)...(19): siRNA sense strand
gcagacagacguugcagaa

SEQ ID NO: 1820900 - RNA, 19 nt, Homo sapiens
  misc_RNA (1)...(19): siRNA sense strand
cagcuaaagugcaauguuc

SEQ ID NO: 1820901 - RNA, 19 nt, Homo sapiens
  misc_RNA (1)...(19): siRNA sense strand
agacuuggcuuaucgacuu

SEQ ID NO: 1820902 - RNA, 19 nt, Homo sapiens
  misc_RNA (1)...(19): siRNA sense strand
ggacuggccugagagaugu

SEQ ID NO: 1820903 - RNA, 19 nt, Homo sapiens
  misc_RNA (1)...(19): siRNA sense strand
gaaaccuguuacaagauuu

SEQ ID NO: 1820904 - RNA, 19 nt, Homo sapiens
  misc_RNA (1)...(19): siRNA sense strand
caucaugauugcauucuug

SEQ ID NO: 1820905 - RNA, 19 nt, Homo sapiens
  misc_RNA (1)...(19): siRNA sense strand
uaagagugguguuggaaga

SEQ ID NO: 1820906 - RNA, 19 nt, Homo sapiens
  misc_RNA (1)...(19): siRNA sense strand
cuaccacugugcccuaaua

SEQ ID NO: 1820907 - RNA, 19 nt, Homo sapiens
  misc_RNA (1)...(19): siRNA sense strand
gcgcuggacugccuaugaa

SEQ ID NO: 1820908 - RNA, 19 nt, Homo sapiens
  misc_RNA (1)...(19): siRNA sense strand
ggaccuccacuuauaauug

SEQ ID NO: 1820909 - RNA, 19 nt, Homo sapiens
  misc_RNA (1)...(19): siRNA sense strand
gaaagugggaggugaagga

SEQ ID NO: 1820910 - RNA, 19 nt, Homo sapiens
  misc_RNA (1)...(19): siRNA sense strand
gaacauaaacauaccaacu

SEQ ID NO: 1820911 - RNA, 19 nt, Homo sapiens
  misc_RNA (1)...(19): siRNA sense strand
caaagaagaaguguggaua

SEQ ID NO: 1820912 - RNA, 19 nt, Homo sapiens
  misc_RNA (1)...(19): siRNA sense strand
guaaaugagcugagaaugu

SEQ ID NO: 1820913 - RNA, 19 nt, Homo sapiens
  misc_RNA (1)...(19): siRNA sense strand
ggaccuggcaucaugauug

SEQ ID NO: 1820914 - RNA, 19 nt, Homo sapiens
  misc_RNA (1)...(19): siRNA sense strand
caguaacuuucacccauua

SEQ ID NO: 1820915 - RNA, 19 nt, Homo sapiens
  misc_RNA (1)...(19): siRNA sense strand
gaaaacgguugugaagaua

SEQ ID NO: 1820916 - RNA, 19 nt, Homo sapiens
  misc_RNA (1)...(19): siRNA sense strand
caugaucacucugcaacua

SEQ ID NO: 1820917 - RNA, 19 nt, Homo sapiens
  misc_RNA (1)...(19): siRNA sense strand
aaacaucuccuggaaauug

SEQ ID NO: 1820918 - RNA, 19 nt, Homo sapiens
  misc_RNA (1)...(19): siRNA sense strand
aacaugguaugaagcauua

SEQ ID NO: 1820919 - RNA, 19 nt, Homo sapiens
  misc_RNA (1)...(19): siRNA sense strand
gaaaacaguugauugcaau

SEQ ID NO: 1820920 - RNA, 19 nt, Homo sapiens
  misc_RNA (1)...(19): siRNA sense strand
ggagaggaaugcuuguaca

SEQ ID NO: 1820921 - RNA, 19 nt, Homo sapiens
  misc_RNA (1)...(19): siRNA sense strand
gcaauggagugaucguaca

SEQ ID NO: 1820922 - RNA, 19 nt, Homo sapiens
  misc_RNA (1)...(19): siRNA sense strand
agaaaccuguuacaagauu

SEQ ID NO: 1820923 - RNA, 19 nt, Homo sapiens
  misc_RNA (1)...(19): siRNA sense strand
gaccuaaucagcauucauu

SEQ ID NO: 1820924 - RNA, 19 nt, Homo sapiens
  misc_RNA (1)...(19): siRNA sense strand
gaaguugcuaccaauuuaa

SEQ ID NO: 1820925 - RNA, 19 nt, Homo sapiens
  misc_RNA (1)...(19): siRNA sense strand
agacggcucuuucuuggaa

SEQ ID NO: 1820926 - RNA, 19 nt, Homo sapiens
  misc_RNA (1)...(19): siRNA sense strand
agauuaugcuuccuucuuu

SEQ ID NO: 1820927 - RNA, 19 nt, Homo sapiens
  misc_RNA (1)...(19): siRNA sense strand
ugaaggaagugaauauugg

SEQ ID NO: 1820928 - RNA, 19 nt, Homo sapiens
  misc_RNA (1)...(19): siRNA sense strand
gcaggauuaugacaucaga

SEQ ID NO: 1820929 - RNA, 19 nt, Homo sapiens
  misc_RNA (1)...(19): siRNA sense strand
gcagauuugagcaagaaua

SEQ ID NO: 1820930 - RNA, 19 nt, Homo sapiens
  misc_RNA (1)...(19): siRNA sense strand
ucacauauucugaguauuc

SEQ ID NO: 1820931 - RNA, 19 nt, Homo sapiens
  misc_RNA (1)...(19): siRNA sense strand
caaauggacagauaacaga

SEQ ID NO: 1820932 - RNA, 19 nt, Homo sapiens
  misc_RNA (1)...(19): siRNA sense strand
uauggaagcuacuuuaugg

SEQ ID NO: 1820933 - RNA, 19 nt, Homo sapiens
  misc_RNA (1)...(19): siRNA sense strand
gaacugggaagaagcugaa

SEQ ID NO: 1820934 - RNA, 19 nt, Homo sapiens
  misc_RNA (1)...(19): siRNA sense strand
gagaagaaguccucagcua

SEQ ID NO: 1820935 - RNA, 19 nt, Homo sapiens
  misc_RNA (1)...(19): siRNA sense strand
gaagccagaucaaggcauu

SEQ ID NO: 1820936 - RNA, 19 nt, Homo sapiens
  misc_RNA (1)...(19): siRNA sense strand
gaagaaguccucagcuaga

SEQ ID NO: 1820937 - RNA, 19 nt, Homo sapiens
  misc_RNA (1)...(19): siRNA sense strand
guaucacgguuacauuuau

SEQ ID NO: 1820938 - RNA, 19 nt, Homo sapiens
  misc_RNA (1)...(19): siRNA sense strand
gaucaaggcauuguaauac

SEQ ID NO: 1820939 - RNA, 19 nt, Homo sapiens
  misc_RNA (1)...(19): siRNA sense strand
gauaagagaagauccugau

SEQ ID NO: 1820940 - RNA, 19 nt, Homo sapiens
  misc_RNA (1)...(19): siRNA sense strand
gcuagaaguacacaaggua

SEQ ID NO: 1820941 - RNA, 19 nt, Homo sapiens
  misc_RNA (1)...(19): siRNA sense strand
ccagaucaaggcauuguaa

SEQ ID NO: 1820942 - RNA, 19 nt, Homo sapiens
  misc_RNA (1)...(19): siRNA sense strand
acaagguacuacagggaua

SEQ ID NO: 1820943 - RNA, 19 nt, Homo sapiens
  misc_RNA (1)...(19): siRNA sense strand
cuacagggauaagagaaga

SEQ ID NO: 1820944 - RNA, 19 nt, Homo sapiens
  misc_RNA (1)...(19): siRNA sense strand
uaagagaagauccugaugu

SEQ ID NO: 1820945 - RNA, 19 nt, Homo sapiens
  misc_RNA (1)...(19): siRNA sense strand
ggacgcaguggcuguguau

SEQ ID NO: 1820946 - RNA, 19 nt, Homo sapiens
  misc_RNA (1)...(19): siRNA sense strand
aagagaagauccugauguc

SEQ ID NO: 1820947 - RNA, 19 nt, Homo sapiens
  misc_RNA (1)...(19): siRNA sense strand
gccuaugugugcuguauca

SEQ ID NO: 1820948 - RNA, 19 nt, Homo sapiens
  misc_RNA (1)...(19): siRNA sense strand
agaucaaggcauuguaaua

SEQ ID NO: 1820949 - RNA, 19 nt, Homo sapiens
  misc_RNA (1)...(19): siRNA sense strand
guacuacagggauaagaga

SEQ ID NO: 1820950 - RNA, 19 nt, Homo sapiens
  misc_RNA (1)...(19): siRNA sense strand
aagaaguccucagcuagaa

SEQ ID NO: 1820951 - RNA, 19 nt, Homo sapiens
  misc_RNA (1)...(19): siRNA sense strand
ccugaugucugccugaaag

SEQ ID NO: 1820952 - RNA, 19 nt, Homo sapiens
  misc_RNA (1)...(19): siRNA sense strand
gaaguccucagcuagaagu

SEQ ID NO: 1820953 - RNA, 19 nt, Homo sapiens
  misc_RNA (1)...(19): siRNA sense strand
ccucugcaguauccaguug

SEQ ID NO: 1820954 - RNA, 19 nt, Homo sapiens
  misc_RNA (1)...(19): siRNA sense strand
gcagggaaaccggcgagaa

SEQ ID NO: 1820955 - RNA, 19 nt, Homo sapiens
  misc_RNA (1)...(19): siRNA sense strand
caagguacuacagggauaa

SEQ ID NO: 1820956 - RNA, 19 nt, Homo sapiens
  misc_RNA (1)...(19): siRNA sense strand
aguauccaguugagaagaa

SEQ ID NO: 1820957 - RNA, 19 nt, Homo sapiens
  misc_RNA (1)...(19): siRNA sense strand
guccucagcuagaaguaca

SEQ ID NO: 1820958 - RNA, 19 nt, Homo sapiens
  misc_RNA (1)...(19): siRNA sense strand
gcaccugggguacauaaaa

SEQ ID NO: 1820959 - RNA, 19 nt, Homo sapiens
  misc_RNA (1)...(19): siRNA sense strand
ggcuguguaucauggcaaa

SEQ ID NO: 1820960 - RNA, 19 nt, Homo sapiens
  misc_RNA (1)...(19): siRNA sense strand
gcaguauccaguugagaag

SEQ ID NO: 1820961 - RNA, 19 nt, Homo sapiens
  misc_RNA (1)...(19): siRNA sense strand
gcaguggcuguguaucaug

SEQ ID NO: 1820962 - RNA, 19 nt, Homo sapiens
  misc_RNA (1)...(19): siRNA sense strand
cagggaaaccggcgagaag

SEQ ID NO: 1820963 - RNA, 19 nt, Homo sapiens
  misc_RNA (1)...(19): siRNA sense strand
ggcguguacugccuaugug

SEQ ID NO: 1820964 - RNA, 19 nt, Homo sapiens
  misc_RNA (1)...(19): siRNA sense strand
ucaaggcauuguaauaccu

SEQ ID NO: 1820965 - RNA, 19 nt, Homo sapiens
  misc_RNA (1)...(19): siRNA sense strand
ucaagucgcuucauuauaa

SEQ ID NO: 1820966 - RNA, 19 nt, Homo sapiens
  misc_RNA (1)...(19): siRNA sense strand
cagaugaacuggauuguua

SEQ ID NO: 1820967 - RNA, 19 nt, Homo sapiens
  misc_RNA (1)...(19): siRNA sense strand
ggacagaccucgagccauu

SEQ ID NO: 1820968 - RNA, 19 nt, Homo sapiens
  misc_RNA (1)...(19): siRNA sense strand
gcagauaucagacgaauuu

SEQ ID NO: 1820969 - RNA, 19 nt, Homo sapiens
  misc_RNA (1)...(19): siRNA sense strand
ggacagaccuggacaccaa

SEQ ID NO: 1820970 - RNA, 19 nt, Homo sapiens
  misc_RNA (1)...(19): siRNA sense strand
gaagugcuuuguuuaauug

SEQ ID NO: 1820971 - RNA, 19 nt, Homo sapiens
  misc_RNA (1)...(19): siRNA sense strand
gcaaacggccuaacuauug

SEQ ID NO: 1820972 - RNA, 19 nt, Homo sapiens
  misc_RNA (1)...(19): siRNA sense strand
gggaaacuaugacuaauga

SEQ ID NO: 1820973 - RNA, 19 nt, Homo sapiens
  misc_RNA (1)...(19): siRNA sense strand
ccacagagcgaucacauua

SEQ ID NO: 1820974 - RNA, 19 nt, Homo sapiens
  misc_RNA (1)...(19): siRNA sense strand
gcucaaccgugaaguuaua

SEQ ID NO: 1820975 - RNA, 19 nt, Homo sapiens
  misc_RNA (1)...(19): siRNA sense strand
gaacucaauuguccuguau

SEQ ID NO: 1820976 - RNA, 19 nt, Homo sapiens
  misc_RNA (1)...(19): siRNA sense strand
ggaaaggucuccuaaaauu

SEQ ID NO: 1820977 - RNA, 19 nt, Homo sapiens
  misc_RNA (1)...(19): siRNA sense strand
gagaaaggguauauguauu

SEQ ID NO: 1820978 - RNA, 19 nt, Homo sapiens
  misc_RNA (1)...(19): siRNA sense strand
gaagaacugugaagugcuu

SEQ ID NO: 1820979 - RNA, 19 nt, Homo sapiens
  misc_RNA (1)...(19): siRNA sense strand
gauagaacgugcuggaaug

SEQ ID NO: 1820980 - RNA, 19 nt, Homo sapiens
  misc_RNA (1)...(19): siRNA sense strand
agacagagcugcaauggau

SEQ ID NO: 1820981 - RNA, 19 nt, Homo sapiens
  misc_RNA (1)...(19): siRNA sense strand
caaagagaaugcuacgauu

SEQ ID NO: 1820982 - RNA, 19 nt, Homo sapiens
  misc_RNA (1)...(19): siRNA sense strand
gaagaagccauuaaacgaa

SEQ ID NO: 1820983 - RNA, 19 nt, Homo sapiens
  misc_RNA (1)...(19): siRNA sense strand
caagaagugugaucauaau

SEQ ID NO: 1820984 - RNA, 19 nt, Homo sapiens
  misc_RNA (1)...(19): siRNA sense strand
gccauacgccguucauuua

SEQ ID NO: 1820985 - RNA, 19 nt, Homo sapiens
  misc_RNA (1)...(19): siRNA sense strand
gaagugugaucauaaugug

SEQ ID NO: 1820986 - RNA, 19 nt, Homo sapiens
  misc_RNA (1)...(19): siRNA sense strand
gcuuugaacucaucaguga

SEQ ID NO: 1820987 - RNA, 19 nt, Homo sapiens
  misc_RNA (1)...(19): siRNA sense strand
ccaggaaugucucgaggua

SEQ ID NO: 1820988 - RNA, 19 nt, Homo sapiens
  misc_RNA (1)...(19): siRNA sense strand
ccagugacuugaacuauga

SEQ ID NO: 1820989 - RNA, 19 nt, Homo sapiens
  misc_RNA (1)...(19): siRNA sense strand
caacagaggcagccaaaug

SEQ ID NO: 1820990 - RNA, 19 nt, Homo sapiens
  misc_RNA (1)...(19): siRNA sense strand
ggacaaaucagaugagaag

SEQ ID NO: 1820991 - RNA, 19 nt, Homo sapiens
  misc_RNA (1)...(19): siRNA sense strand
aaugguggcuguucacaua

SEQ ID NO: 1820992 - RNA, 19 nt, Homo sapiens
  misc_RNA (1)...(19): siRNA sense strand
caaacggccuaacuauuga

SEQ ID NO: 1820993 - RNA, 19 nt, Homo sapiens
  misc_RNA (1)...(19): siRNA sense strand
ugaggaagaucuugauuuc

SEQ ID NO: 1820994 - RNA, 19 nt, Homo sapiens
  misc_RNA (1)...(19): siRNA sense strand
ggacuggguugcacgaaau

SEQ ID NO: 1820995 - RNA, 19 nt, Homo sapiens
  misc_RNA (1)...(19): siRNA sense strand
cagcagagccuuuaugaau

SEQ ID NO: 1820996 - RNA, 19 nt, Homo sapiens
  misc_RNA (1)...(19): siRNA sense strand
ccucacauauuuggauuua

SEQ ID NO: 1820997 - RNA, 19 nt, Homo sapiens
  misc_RNA (1)...(19): siRNA sense strand
gcaaagagaaugcuacgau

SEQ ID NO: 1820998 - RNA, 19 nt, Homo sapiens
  misc_RNA (1)...(19): siRNA sense strand
ggacaccaacuuaauagaa

SEQ ID NO: 1820999 - RNA, 19 nt, Homo sapiens
  misc_RNA (1)...(19): siRNA sense strand
caaagauggugccacagaa

SEQ ID NO: 1821000 - RNA, 19 nt, Homo sapiens
  misc_RNA (1)...(19): siRNA sense strand
uaugaaagcugcccaccuu

SEQ ID NO: 1821001 - RNA, 19 nt, Homo sapiens
  misc_RNA (1)...(19): siRNA sense strand
gcacuuacuucccugcaau

SEQ ID NO: 1821002 - RNA, 19 nt, Homo sapiens
  misc_RNA (1)...(19): siRNA sense strand
uaacucaguaccaagauua

SEQ ID NO: 1821003 - RNA, 19 nt, Homo sapiens
  misc_RNA (1)...(19): siRNA sense strand
acccagagcuauugccuua

SEQ ID NO: 1821004 - RNA, 19 nt, Homo sapiens
  misc_RNA (1)...(19): siRNA sense strand
gaagugaacguacuaccuu

SEQ ID NO: 1821005 - RNA, 19 nt, Homo sapiens
  misc_RNA (1)...(19): siRNA sense strand
cggcuuagauuauccagaa

SEQ ID NO: 1821006 - RNA, 19 nt, Homo sapiens
  misc_RNA (1)...(19): siRNA sense strand
cgaauuuauuggacugaua

SEQ ID NO: 1821007 - RNA, 19 nt, Homo sapiens
  misc_RNA (1)...(19): siRNA sense strand
ccuaaaggcuacaaauguu

SEQ ID NO: 1821008 - RNA, 19 nt, Homo sapiens
  misc_RNA (1)...(19): siRNA sense strand
ggacugacuuuggauuaug

SEQ ID NO: 1821009 - RNA, 19 nt, Homo sapiens
  misc_RNA (1)...(19): siRNA sense strand
ccacagugaugaacucaau

SEQ ID NO: 1821010 - RNA, 19 nt, Homo sapiens
  misc_RNA (1)...(19): siRNA sense strand
gauaaacagcagcaaauga

SEQ ID NO: 1821011 - RNA, 19 nt, Homo sapiens
  misc_RNA (1)...(19): siRNA sense strand
gggcagcaccgacaaguuu

SEQ ID NO: 1821012 - RNA, 19 nt, Homo sapiens
  misc_RNA (1)...(19): siRNA sense strand
gcaaagauggugccacaga

SEQ ID NO: 1821013 - RNA, 19 nt, Homo sapiens
  misc_RNA (1)...(19): siRNA sense strand
gcgguggacuuuguguuua

SEQ ID NO: 1821014 - RNA, 19 nt, Homo sapiens
  misc_RNA (1)...(19): siRNA sense strand
cagcagaggagaacuauga

SEQ ID NO: 1821015 - RNA, 19 nt, Homo sapiens
  misc_RNA (1)...(19): siRNA sense strand
ugaaagcagugaucucuca

SEQ ID NO: 1821016 - RNA, 19 nt, Homo sapiens
  misc_RNA (1)...(19): siRNA sense strand
ucacucaucucgacaguca

SEQ ID NO: 1821017 - RNA, 19 nt, Homo sapiens
  misc_RNA (1)...(19): siRNA sense strand
gcagagccuuuaugaaugg

SEQ ID NO: 1821018 - RNA, 19 nt, Homo sapiens
  misc_RNA (1)...(19): siRNA sense strand
cuacuggacugaugaugaa

SEQ ID NO: 1821019 - RNA, 19 nt, Homo sapiens
  misc_RNA (1)...(19): siRNA sense strand
gacuuuggauuaugaagaa

SEQ ID NO: 1821020 - RNA, 19 nt, Homo sapiens
  misc_RNA (1)...(19): siRNA sense strand
caagucagaugaacuggau

SEQ ID NO: 1821021 - RNA, 19 nt, Homo sapiens
  misc_RNA (1)...(19): siRNA sense strand
ggacuuacuguguuugaaa

SEQ ID NO: 1821022 - RNA, 19 nt, Homo sapiens
  misc_RNA (1)...(19): siRNA sense strand
gagcagauaucagacgaau

SEQ ID NO: 1821023 - RNA, 19 nt, Homo sapiens
  misc_RNA (1)...(19): siRNA sense strand
gcagaggcguagcauugaa

SEQ ID NO: 1821024 - RNA, 19 nt, Homo sapiens
  misc_RNA (1)...(19): siRNA sense strand
ggacagacacuggcacuga

SEQ ID NO: 1821025 - RNA, 19 nt, Homo sapiens
  misc_RNA (1)...(19): siRNA sense strand
cauacgccguucauuuaua

SEQ ID NO: 1821026 - RNA, 19 nt, Homo sapiens
  misc_RNA (1)...(19): siRNA sense strand
ggagugaugucagcgaaga

SEQ ID NO: 1821027 - RNA, 19 nt, Homo sapiens
  misc_RNA (1)...(19): siRNA sense strand
ucaaguaguucuucaagca

SEQ ID NO: 1821028 - RNA, 19 nt, Homo sapiens
  misc_RNA (1)...(19): siRNA sense strand
gacaccaacuuaauagaau

SEQ ID NO: 1821029 - RNA, 19 nt, Homo sapiens
  misc_RNA (1)...(19): siRNA sense strand
gccgaaggauuuauguauu

SEQ ID NO: 1821030 - RNA, 19 nt, Homo sapiens
  misc_RNA (1)...(19): siRNA sense strand
cagacaagauugagguuau

SEQ ID NO: 1821031 - RNA, 19 nt, Homo sapiens
  misc_RNA (1)...(19): siRNA sense strand
ggauuaugaugaaggcaaa

SEQ ID NO: 1821032 - RNA, 19 nt, Homo sapiens
  misc_RNA (1)...(19): siRNA sense strand
ggaagaucuugauuucaga

SEQ ID NO: 1821033 - RNA, 19 nt, Homo sapiens
  misc_RNA (1)...(19): siRNA sense strand
ccgaugggcuggcauguga

SEQ ID NO: 1821034 - RNA, 19 nt, Homo sapiens
  misc_RNA (1)...(19): siRNA sense strand
ccagagcuauugccuuaga

SEQ ID NO: 1821035 - RNA, 19 nt, Homo sapiens
  misc_RNA (1)...(19): siRNA sense strand
gaacuaugauucagaaccu

SEQ ID NO: 1821036 - RNA, 19 nt, Homo sapiens
  misc_RNA (1)...(19): siRNA sense strand
ccgaaggauuuauguauug

SEQ ID NO: 1821037 - RNA, 19 nt, Homo sapiens
  misc_RNA (1)...(19): siRNA sense strand
ugaaauccauucugacauc

SEQ ID NO: 1821038 - RNA, 19 nt, Homo sapiens
  misc_RNA (1)...(19): siRNA sense strand
agacauuguucugcaguua

SEQ ID NO: 1821039 - RNA, 19 nt, Homo sapiens
  misc_RNA (1)...(19): siRNA sense strand
acaggagcaucaucaagua

SEQ ID NO: 1821040 - RNA, 19 nt, Homo sapiens
  misc_RNA (1)...(19): siRNA sense strand
aagcaacucuauuggauug

SEQ ID NO: 1821041 - RNA, 19 nt, Homo sapiens
  misc_RNA (1)...(19): siRNA sense strand
gaauucggcuuagauuauc

SEQ ID NO: 1821042 - RNA, 19 nt, Homo sapiens
  misc_RNA (1)...(19): siRNA sense strand
cgaagaagccauuaaacga

SEQ ID NO: 1821043 - RNA, 19 nt, Homo sapiens
  misc_RNA (1)...(19): siRNA sense strand
ggaacuguauacuuuaucu

SEQ ID NO: 1821044 - RNA, 19 nt, Homo sapiens
  misc_RNA (1)...(19): siRNA sense strand
gucuggaacuguauacuuu

SEQ ID NO: 1821045 - RNA, 19 nt, Homo sapiens
  misc_RNA (1)...(19): siRNA sense strand
gcaccugguucuacuucaa

SEQ ID NO: 1821046 - RNA, 19 nt, Homo sapiens
  misc_RNA (1)...(19): siRNA sense strand
gaccucagcauugauauuu

SEQ ID NO: 1821047 - RNA, 19 nt, Homo sapiens
  misc_RNA (1)...(19): siRNA sense strand
ugacagacaaccgaauuua

SEQ ID NO: 1821048 - RNA, 19 nt, Homo sapiens
  misc_RNA (1)...(19): siRNA sense strand
gggagaagugccaaagaua

SEQ ID NO: 1821049 - RNA, 19 nt, Homo sapiens
  misc_RNA (1)...(19): siRNA sense strand
gcgauggguuuacugaaug

SEQ ID NO: 1821050 - RNA, 19 nt, Homo sapiens
  misc_RNA (1)...(19): siRNA sense strand
ccauuuggauuaugugaug

SEQ ID NO: 1821051 - RNA, 19 nt, Homo sapiens
  misc_RNA (1)...(19): siRNA sense strand
gcauugagcgugccaacaa

SEQ ID NO: 1821052 - RNA, 19 nt, Homo sapiens
  misc_RNA (1)...(19): siRNA sense strand
ggaugguucugaccgugua

SEQ ID NO: 1821053 - RNA, 19 nt, Homo sapiens
  misc_RNA (1)...(19): siRNA sense strand
gaagugacaaggcucaaug

SEQ ID NO: 1821054 - RNA, 19 nt, Homo sapiens
  misc_RNA (1)...(19): siRNA sense strand
gcacgaaaucuuuauugga

SEQ ID NO: 1821055 - RNA, 19 nt, Homo sapiens
  misc_RNA (1)...(19): siRNA sense strand
gacguuauuugaggacaua

SEQ ID NO: 1821056 - RNA, 19 nt, Homo sapiens
  misc_RNA (1)...(19): siRNA sense strand
ggccauacgccguucauuu

SEQ ID NO: 1821057 - RNA, 19 nt, Homo sapiens
  misc_RNA (1)...(19): siRNA sense strand
gaauugcccagcuuaguga

SEQ ID NO: 1821058 - RNA, 19 nt, Homo sapiens
  misc_RNA (1)...(19): siRNA sense strand
uuagaagacuccaauaucu

SEQ ID NO: 1821059 - RNA, 19 nt, Homo sapiens
  misc_RNA (1)...(19): siRNA sense strand
ccuaugaccucagcauuga

SEQ ID NO: 1821060 - RNA, 19 nt, Homo sapiens
  misc_RNA (1)...(19): siRNA sense strand
uggauugacucacgacaaa

SEQ ID NO: 1821061 - RNA, 19 nt, Homo sapiens
  misc_RNA (1)...(19): siRNA sense strand
gggcucaaccgugaaguua

SEQ ID NO: 1821062 - RNA, 19 nt, Homo sapiens
  misc_RNA (1)...(19): siRNA sense strand
ccagagcucucgcguugga

SEQ ID NO: 1821063 - RNA, 19 nt, Homo sapiens
  misc_RNA (1)...(19): siRNA sense strand
uggaacaugugguagaauu

SEQ ID NO: 1821064 - RNA, 19 nt, Homo sapiens
  misc_RNA (1)...(19): siRNA sense strand
ucagaucuccggcgaauug

SEQ ID NO: 1821065 - RNA, 19 nt, Homo sapiens
  misc_RNA (1)...(19): siRNA sense strand
gagaaggauuugugcaaug

SEQ ID NO: 1821066 - RNA, 19 nt, Homo sapiens
  misc_RNA (1)...(19): siRNA sense strand
uauuaacucugggaucuua

SEQ ID NO: 1821067 - RNA, 19 nt, Homo sapiens
  misc_RNA (1)...(19): siRNA sense strand
cgagaaggauuugugcaau

SEQ ID NO: 1821068 - RNA, 19 nt, Homo sapiens
  misc_RNA (1)...(19): siRNA sense strand
gcgagaaggauuugugcaa

SEQ ID NO: 1821069 - RNA, 19 nt, Homo sapiens
  misc_RNA (1)...(19): siRNA sense strand
uaucugaugggguuuauua

SEQ ID NO: 1821070 - RNA, 19 nt, Homo sapiens
  misc_RNA (1)...(19): siRNA sense strand
agaaggauuugugcaaugg

SEQ ID NO: 1821071 - RNA, 19 nt, Homo sapiens
  misc_RNA (1)...(19): siRNA sense strand
acucugggaucuuaaaggu

SEQ ID NO: 1821072 - RNA, 19 nt, Homo sapiens
  misc_RNA (1)...(19): siRNA sense strand
uuuauuaacucugggaucu

SEQ ID NO: 1821073 - RNA, 19 nt, Homo sapiens
  misc_RNA (1)...(19): siRNA sense strand
ggacugcugcgagaaggau

SEQ ID NO: 1821074 - RNA, 19 nt, Homo sapiens
  misc_RNA (1)...(19): siRNA sense strand
guaccaaccugugcaucuu

SEQ ID NO: 1821075 - RNA, 19 nt, Homo sapiens
  misc_RNA (1)...(19): siRNA sense strand
ugugauggcugguggcauu

SEQ ID NO: 1821076 - RNA, 19 nt, Homo sapiens
  misc_RNA (1)...(19): siRNA sense strand
gcacagccaugcggagaca

SEQ ID NO: 1821077 - RNA, 19 nt, Homo sapiens
  misc_RNA (1)...(19): siRNA sense strand
cagaugaguuccgcuguga

SEQ ID NO: 1821078 - RNA, 19 nt, Homo sapiens
  misc_RNA (1)...(19): siRNA sense strand
cgaccguggugacaugauu

SEQ ID NO: 1821079 - RNA, 19 nt, Homo sapiens
  misc_RNA (1)...(19): siRNA sense strand
caucagcuuccgcaacuuu

SEQ ID NO: 1821080 - RNA, 19 nt, Homo sapiens
  misc_RNA (1)...(19): siRNA sense strand
gaacugcggcugggcuaug

SEQ ID NO: 1821081 - RNA, 19 nt, Homo sapiens
  misc_RNA (1)...(19): siRNA sense strand
gaccguggugacaugauua

SEQ ID NO: 1821082 - RNA, 19 nt, Homo sapiens
  misc_RNA (1)...(19): siRNA sense strand
acgacuacgugcagguaua

SEQ ID NO: 1821083 - RNA, 19 nt, Homo sapiens
  misc_RNA (1)...(19): siRNA sense strand
caucccaccugccuucauc

SEQ ID NO: 1821084 - RNA, 19 nt, Homo sapiens
  misc_RNA (1)...(19): siRNA sense strand
ccgcgaccaugucuggauu

SEQ ID NO: 1821085 - RNA, 19 nt, Homo sapiens
  misc_RNA (1)...(19): siRNA sense strand
cagcuucuacggcuccuuu

SEQ ID NO: 1821086 - RNA, 19 nt, Homo sapiens
  misc_RNA (1)...(19): siRNA sense strand
ggagcaguagugacaguga

SEQ ID NO: 1821087 - RNA, 19 nt, Homo sapiens
  misc_RNA (1)...(19): siRNA sense strand
gaccaugucuggauuuucu

SEQ ID NO: 1821088 - RNA, 19 nt, Homo sapiens
  misc_RNA (1)...(19): siRNA sense strand
gcaguggucugugcuacac

SEQ ID NO: 1821089 - RNA, 19 nt, Homo sapiens
  misc_RNA (1)...(19): siRNA sense strand
gaugaguuccgcugugaca

SEQ ID NO: 1821090 - RNA, 19 nt, Homo sapiens
  misc_RNA (1)...(19): siRNA sense strand
cagugcgguuccugccuua

SEQ ID NO: 1821091 - RNA, 19 nt, Homo sapiens
  misc_RNA (1)...(19): siRNA sense strand
gcugggcuaugacgacuac

SEQ ID NO: 1821092 - RNA, 19 nt, Homo sapiens
  misc_RNA (1)...(19): siRNA sense strand
guggagacggcucugauga

SEQ ID NO: 1821093 - RNA, 19 nt, Homo sapiens
  misc_RNA (1)...(19): siRNA sense strand
gauggcugguggcauugug

SEQ ID NO: 1821094 - RNA, 19 nt, Homo sapiens
  misc_RNA (1)...(19): siRNA sense strand
cgaccagggcugcuucuca

SEQ ID NO: 1821095 - RNA, 19 nt, Homo sapiens
  misc_RNA (1)...(19): siRNA sense strand
ggacggcagcgaugagcau

SEQ ID NO: 1821096 - RNA, 19 nt, Homo sapiens
  misc_RNA (1)...(19): siRNA sense strand
ugacgacuacgugcaggua

SEQ ID NO: 1821097 - RNA, 19 nt, Homo sapiens
  misc_RNA (1)...(19): siRNA sense strand
gcgaugaugaggcccuguu

SEQ ID NO: 1821098 - RNA, 19 nt, Homo sapiens
  misc_RNA (1)...(19): siRNA sense strand
ccuucaagcucuacucacu

SEQ ID NO: 1821099 - RNA, 19 nt, Homo sapiens
  misc_RNA (1)...(19): siRNA sense strand
caacugcagcugguacauc

SEQ ID NO: 1821100 - RNA, 19 nt, Homo sapiens
  misc_RNA (1)...(19): siRNA sense strand
gguaccaaccugugcaucu

SEQ ID NO: 1821101 - RNA, 19 nt, Homo sapiens
  misc_RNA (1)...(19): siRNA sense strand
gcugugacggccaggaaga

SEQ ID NO: 1821102 - RNA, 19 nt, Homo sapiens
  misc_RNA (1)...(19): siRNA sense strand
ucaaagccaucgacuauga

SEQ ID NO: 1821103 - RNA, 19 nt, Homo sapiens
  misc_RNA (1)...(19): siRNA sense strand
guacagcgauuauaucuac

SEQ ID NO: 1821104 - RNA, 19 nt, Homo sapiens
  misc_RNA (1)...(19): siRNA sense strand
gcaagcaucucuacuggau

SEQ ID NO: 1821105 - RNA, 19 nt, Homo sapiens
  misc_RNA (1)...(19): siRNA sense strand
ccaacgaccucaccauuga

SEQ ID NO: 1821106 - RNA, 19 nt, Homo sapiens
  misc_RNA (1)...(19): siRNA sense strand
gcucaaagcugugaaugug

SEQ ID NO: 1821107 - RNA, 19 nt, Homo sapiens
  misc_RNA (1)...(19): siRNA sense strand
guucuacucuucaaacauu

SEQ ID NO: 1821108 - RNA, 19 nt, Homo sapiens
  misc_RNA (1)...(19): siRNA sense strand
ggaccgaccuggacaccaa

SEQ ID NO: 1821109 - RNA, 19 nt, Homo sapiens
  misc_RNA (1)...(19): siRNA sense strand
gcacgaaggccacgcugua

SEQ ID NO: 1821110 - RNA, 19 nt, Homo sapiens
  misc_RNA (1)...(19): siRNA sense strand
guacaggcccuacaucauu

SEQ ID NO: 1821111 - RNA, 19 nt, Homo sapiens
  misc_RNA (1)...(19): siRNA sense strand
gacaagcucccgcacauuu

SEQ ID NO: 1821112 - RNA, 19 nt, Homo sapiens
  misc_RNA (1)...(19): siRNA sense strand
gcaugacgcugguggacaa

SEQ ID NO: 1821113 - RNA, 19 nt, Homo sapiens
  misc_RNA (1)...(19): siRNA sense strand
ccgacgagcucauguguga

SEQ ID NO: 1821114 - RNA, 19 nt, Homo sapiens
  misc_RNA (1)...(19): siRNA sense strand
gcaaguacuaccuggauuu

SEQ ID NO: 1821115 - RNA, 19 nt, Homo sapiens
  misc_RNA (1)...(19): siRNA sense strand
ccucagcccuggacuuuga

SEQ ID NO: 1821116 - RNA, 19 nt, Homo sapiens
  misc_RNA (1)...(19): siRNA sense strand
gagcucaugugugaaauca

SEQ ID NO: 1821117 - RNA, 19 nt, Homo sapiens
  misc_RNA (1)...(19): siRNA sense strand
cgucauggguggugucuau

SEQ ID NO: 1821118 - RNA, 19 nt, Homo sapiens
  misc_RNA (1)...(19): siRNA sense strand
gccuggagcugcugaguga

SEQ ID NO: 1821119 - RNA, 19 nt, Homo sapiens
  misc_RNA (1)...(19): siRNA sense strand
ggaaggccagcaaguacua

SEQ ID NO: 1821120 - RNA, 19 nt, Homo sapiens
  misc_RNA (1)...(19): siRNA sense strand
cgucaaagccaucgacuau

SEQ ID NO: 1821121 - RNA, 19 nt, Homo sapiens
  misc_RNA (1)...(19): siRNA sense strand
ggacggaccuacggaggau

SEQ ID NO: 1821122 - RNA, 19 nt, Homo sapiens
  misc_RNA (1)...(19): siRNA sense strand
gcacagcccggaucucauc

SEQ ID NO: 1821123 - RNA, 19 nt, Homo sapiens
  misc_RNA (1)...(19): siRNA sense strand
gccgggacgucaucauuga

SEQ ID NO: 1821124 - RNA, 19 nt, Homo sapiens
  misc_RNA (1)...(19): siRNA sense strand
ggacauguucuacucuuca

SEQ ID NO: 1821125 - RNA, 19 nt, Homo sapiens
  misc_RNA (1)...(19): siRNA sense strand
gaucgagucguccaacaug

SEQ ID NO: 1821126 - RNA, 19 nt, Homo sapiens
  misc_RNA (1)...(19): siRNA sense strand
aguacuaccuggauuugaa

SEQ ID NO: 1821127 - RNA, 19 nt, Homo sapiens
  misc_RNA (1)...(19): siRNA sense strand
gacgagcucaugugugaaa

SEQ ID NO: 1821128 - RNA, 19 nt, Homo sapiens
  misc_RNA (1)...(19): siRNA sense strand
aaucgagugugccaacuug

SEQ ID NO: 1821129 - RNA, 19 nt, Homo sapiens
  misc_RNA (1)...(19): siRNA sense strand
ggagcuacuuccaucucuu

SEQ ID NO: 1821130 - RNA, 19 nt, Homo sapiens
  misc_RNA (1)...(19): siRNA sense strand
gaccugaagcgcauugaga

SEQ ID NO: 1821131 - RNA, 19 nt, Homo sapiens
  misc_RNA (1)...(19): siRNA sense strand
gacaacggcaggacgugua

SEQ ID NO: 1821132 - RNA, 19 nt, Homo sapiens
  misc_RNA (1)...(19): siRNA sense strand
gacauguucuacucuucaa

SEQ ID NO: 1821133 - RNA, 19 nt, Homo sapiens
  misc_RNA (1)...(19): siRNA sense strand
gcaguacagcgauuauauc

SEQ ID NO: 1821134 - RNA, 19 nt, Homo sapiens
  misc_RNA (1)...(19): siRNA sense strand
gaccuggacaccaacauga

SEQ ID NO: 1821135 - RNA, 19 nt, Homo sapiens
  misc_RNA (1)...(19): siRNA sense strand
cagacaagaucgaggugau

SEQ ID NO: 1821136 - RNA, 19 nt, Homo sapiens
  misc_RNA (1)...(19): siRNA sense strand
ccucgccgcuccugcuauu

SEQ ID NO: 1821137 - RNA, 19 nt, Homo sapiens
  misc_RNA (1)...(19): siRNA sense strand
ccaccaagggcuacaucua

SEQ ID NO: 1821138 - RNA, 19 nt, Homo sapiens
  misc_RNA (1)...(19): siRNA sense strand
gauggcagcacccggaaga

SEQ ID NO: 1821139 - RNA, 19 nt, Homo sapiens
  misc_RNA (1)...(19): siRNA sense strand
gcacaacaacgggcagugu

SEQ ID NO: 1821140 - RNA, 19 nt, Homo sapiens
  misc_RNA (1)...(19): siRNA sense strand
gcauggccguugacuggau

SEQ ID NO: 1821141 - RNA, 19 nt, Homo sapiens
  misc_RNA (1)...(19): siRNA sense strand
ggacaagcucccgcacauu

SEQ ID NO: 1821142 - RNA, 19 nt, Homo sapiens
  misc_RNA (1)...(19): siRNA sense strand
aagcgagccuuucuacaca

SEQ ID NO: 1821143 - RNA, 19 nt, Homo sapiens
  misc_RNA (1)...(19): siRNA sense strand
gcgaggaggccaucaagca

SEQ ID NO: 1821144 - RNA, 19 nt, Homo sapiens
  misc_RNA (1)...(19): siRNA sense strand
gcgacugggugggcaagaa

SEQ ID NO: 1821145 - RNA, 19 nt, Homo sapiens
  misc_RNA (1)...(19): siRNA sense strand
gcagccaccugugcuucuu

SEQ ID NO: 1821146 - RNA, 19 nt, Homo sapiens
  misc_RNA (1)...(19): siRNA sense strand
gauccugagugcccucuac

SEQ ID NO: 1821147 - RNA, 19 nt, Homo sapiens
  misc_RNA (1)...(19): siRNA sense strand
cagacgaggcggacuguga

SEQ ID NO: 1821148 - RNA, 19 nt, Homo sapiens
  misc_RNA (1)...(19): siRNA sense strand
ggacccagcccuuuguuuu

SEQ ID NO: 1821149 - RNA, 19 nt, Homo sapiens
  misc_RNA (1)...(19): siRNA sense strand
ggccaacgaccucaccauu

SEQ ID NO: 1821150 - RNA, 19 nt, Homo sapiens
  misc_RNA (1)...(19): siRNA sense strand
ggccucagcccuggacuuu

SEQ ID NO: 1821151 - RNA, 19 nt, Homo sapiens
  misc_RNA (1)...(19): siRNA sense strand
guucucagcccacccaugu

SEQ ID NO: 1821152 - RNA, 19 nt, Homo sapiens
  misc_RNA (1)...(19): siRNA sense strand
ccaccucacuggcauccau

SEQ ID NO: 1821153 - RNA, 19 nt, Homo sapiens
  misc_RNA (1)...(19): siRNA sense strand
ggaaucugcacagcauuga

SEQ ID NO: 1821154 - RNA, 19 nt, Homo sapiens
  misc_RNA (1)...(19): siRNA sense strand
gccaacgaccucaccauug

SEQ ID NO: 1821155 - RNA, 19 nt, Homo sapiens
  misc_RNA (1)...(19): siRNA sense strand
gcccuggacuuugaugugu

SEQ ID NO: 1821156 - RNA, 19 nt, Homo sapiens
  misc_RNA (1)...(19): siRNA sense strand
gccaguguguccucaucaa

SEQ ID NO: 1821157 - RNA, 19 nt, Homo sapiens
  misc_RNA (1)...(19): siRNA sense strand
gagcuacuuccaucucuuc

SEQ ID NO: 1821158 - RNA, 19 nt, Homo sapiens
  misc_RNA (1)...(19): siRNA sense strand
ucaagcagaccuaccugaa

SEQ ID NO: 1821159 - RNA, 19 nt, Homo sapiens
  misc_RNA (1)...(19): siRNA sense strand
ugaugggccucauguacug

SEQ ID NO: 1821160 - RNA, 19 nt, Homo sapiens
  misc_RNA (1)...(19): siRNA sense strand
caaguacuaccuggauuug

SEQ ID NO: 1821161 - RNA, 19 nt, Homo sapiens
  misc_RNA (1)...(19): siRNA sense strand
ccaacaaccacaucuacug

SEQ ID NO: 1821162 - RNA, 19 nt, Homo sapiens
  misc_RNA (1)...(19): siRNA sense strand
gcgagccuuucuacacaug

SEQ ID NO: 1821163 - RNA, 19 nt, Homo sapiens
  misc_RNA (1)...(19): siRNA sense strand
ugcggaaaguccaugauga

SEQ ID NO: 1821164 - RNA, 19 nt, Homo sapiens
  misc_RNA (1)...(19): siRNA sense strand
gaucgagcguguggagaag

SEQ ID NO: 1821165 - RNA, 19 nt, Homo sapiens
  misc_RNA (1)...(19): siRNA sense strand
cagcacagcccggaucuca

SEQ ID NO: 1821166 - RNA, 19 nt, Homo sapiens
  misc_RNA (1)...(19): siRNA sense strand
ugacgcaguacagcgauua

SEQ ID NO: 1821167 - RNA, 19 nt, Homo sapiens
  misc_RNA (1)...(19): siRNA sense strand
ggacggacucagagaccaa

SEQ ID NO: 1821168 - RNA, 19 nt, Homo sapiens
  misc_RNA (1)...(19): siRNA sense strand
gcaucgagcgggugcacaa

SEQ ID NO: 1821169 - RNA, 19 nt, Homo sapiens
  misc_RNA (1)...(19): siRNA sense strand
ggagagaacccuaaaaucg

SEQ ID NO: 1821170 - RNA, 19 nt, Homo sapiens
  misc_RNA (1)...(19): siRNA sense strand
caagcgagccuuucuacac

SEQ ID NO: 1821171 - RNA, 19 nt, Homo sapiens
  misc_RNA (1)...(19): siRNA sense strand
uacaggcccuacaucauuc

SEQ ID NO: 1821172 - RNA, 19 nt, Homo sapiens
  misc_RNA (1)...(19): siRNA sense strand
ccaccuggacuucgugaug

SEQ ID NO: 1821173 - RNA, 19 nt, Homo sapiens
  misc_RNA (1)...(19): siRNA sense strand
ccauugccaucgacuacga

SEQ ID NO: 1821174 - RNA, 19 nt, Homo sapiens
  misc_RNA (1)...(19): siRNA sense strand
cgacauccggcacgccauu

SEQ ID NO: 1821175 - RNA, 19 nt, Homo sapiens
  misc_RNA (1)...(19): siRNA sense strand
gcaucauccucucucucuu

SEQ ID NO: 1821176 - RNA, 19 nt, Homo sapiens
  misc_RNA (1)...(19): siRNA sense strand
gacgggaccaacugcauga

SEQ ID NO: 1821177 - RNA, 19 nt, Homo sapiens
  misc_RNA (1)...(19): siRNA sense strand
ggaguuuggccuugacuac

SEQ ID NO: 1821178 - RNA, 19 nt, Homo sapiens
  misc_RNA (1)...(19): siRNA sense strand
gcugugaggaggacaaugg

SEQ ID NO: 1821179 - RNA, 19 nt, Homo sapiens
  misc_RNA (1)...(19): siRNA sense strand
caggggagaucgacuguau

SEQ ID NO: 1821180 - RNA, 19 nt, Homo sapiens
  misc_RNA (1)...(19): siRNA sense strand
uggacaaguucaucuacug

SEQ ID NO: 1821181 - RNA, 19 nt, Homo sapiens
  misc_RNA (1)...(19): siRNA sense strand
ccaccaccuucuugcuguu

SEQ ID NO: 1821182 - RNA, 19 nt, Homo sapiens
  misc_RNA (1)...(19): siRNA sense strand
cagccgggacgucaucauu

SEQ ID NO: 1821183 - RNA, 19 nt, Homo sapiens
  misc_RNA (1)...(19): siRNA sense strand
gcacgugccccucaauuuc

SEQ ID NO: 1821184 - RNA, 19 nt, Homo sapiens
  misc_RNA (1)...(19): siRNA sense strand
ucauggguggugucuauuu

SEQ ID NO: 1821185 - RNA, 19 nt, Homo sapiens
  misc_RNA (1)...(19): siRNA sense strand
caucauccucucucucuuc

SEQ ID NO: 1821186 - RNA, 19 nt, Homo sapiens
  misc_RNA (1)...(19): siRNA sense strand
ccagggccaucgucgucaa

SEQ ID NO: 1821187 - RNA, 19 nt, Homo sapiens
  misc_RNA (1)...(19): siRNA sense strand
cguucggucugacgcagua

SEQ ID NO: 1821188 - RNA, 19 nt, Homo sapiens
  misc_RNA (1)...(19): siRNA sense strand
uggagcacgugguggaguu

SEQ ID NO: 1821189 - RNA, 19 nt, Homo sapiens
  misc_RNA (1)...(19): siRNA sense strand
gcacccggaagaucauugu

SEQ ID NO: 1821190 - RNA, 19 nt, Homo sapiens
  misc_RNA (1)...(19): siRNA sense strand
cagcaaguacuaccuggau

SEQ ID NO: 1821191 - RNA, 19 nt, Homo sapiens
  misc_RNA (1)...(19): siRNA sense strand
ggacugaggaacgucaaag

SEQ ID NO: 1821192 - RNA, 19 nt, Homo sapiens
  misc_RNA (1)...(19): siRNA sense strand
caggauggccucaaugacu

SEQ ID NO: 1821193 - RNA, 19 nt, Homo sapiens
  misc_RNA (1)...(19): siRNA sense strand
ggcagcacccggaagauca

SEQ ID NO: 1821194 - RNA, 19 nt, Homo sapiens
  misc_RNA (1)...(19): siRNA sense strand
ggcgugugcuggucaaugc

SEQ ID NO: 1821195 - RNA, 19 nt, Homo sapiens
  misc_RNA (1)...(19): siRNA sense strand
gagcgaggaggccaucaag

SEQ ID NO: 1821196 - RNA, 19 nt, Homo sapiens
  misc_RNA (1)...(19): siRNA sense strand
gcagcaccgacguguguga

SEQ ID NO: 1821197 - RNA, 19 nt, Homo sapiens
  misc_RNA (1)...(19): siRNA sense strand
gcggaaaguccaugaugag

SEQ ID NO: 1821198 - RNA, 19 nt, Homo sapiens
  misc_RNA (1)...(19): siRNA sense strand
ccaguguguccucaucaaa

SEQ ID NO: 1821199 - RNA, 19 nt, Homo sapiens
  misc_RNA (1)...(19): siRNA sense strand
ggacauuuacuggcccaau

SEQ ID NO: 1821200 - RNA, 19 nt, Homo sapiens
  misc_RNA (1)...(19): siRNA sense strand
gagcugcugagugacauga

SEQ ID NO: 1821201 - RNA, 19 nt, Homo sapiens
  misc_RNA (1)...(19): siRNA sense strand
uaccuguacuucaccaaca

SEQ ID NO: 1821202 - RNA, 19 nt, Homo sapiens
  misc_RNA (1)...(19): siRNA sense strand
gcaaggaggucaauucugu

SEQ ID NO: 1821203 - RNA, 19 nt, Homo sapiens
  misc_RNA (1)...(19): siRNA sense strand
gaacauggaugcccacaag

SEQ ID NO: 1821204 - RNA, 19 nt, Homo sapiens
  misc_RNA (1)...(19): siRNA sense strand
gcaaguacgucaagaagug

SEQ ID NO: 1821205 - RNA, 19 nt, Homo sapiens
  misc_RNA (1)...(19): siRNA sense strand
gaagcaaguuugaggagaa

SEQ ID NO: 1821206 - RNA, 19 nt, Homo sapiens
  misc_RNA (1)...(19): siRNA sense strand
gaaccagacuugcauugug

SEQ ID NO: 1821207 - RNA, 19 nt, Homo sapiens
  misc_RNA (1)...(19): siRNA sense strand
acacagagauccagaaauc

SEQ ID NO: 1821208 - RNA, 19 nt, Homo sapiens
  misc_RNA (1)...(19): siRNA sense strand
ugacaucgccucucucuuu

SEQ ID NO: 1821209 - RNA, 19 nt, Homo sapiens
  misc_RNA (1)...(19): siRNA sense strand
gcacuucccugcagacaca

SEQ ID NO: 1821210 - RNA, 19 nt, Homo sapiens
  misc_RNA (1)...(19): siRNA sense strand
acauggagcugcugcauuu

SEQ ID NO: 1821211 - RNA, 19 nt, Homo sapiens
  misc_RNA (1)...(19): siRNA sense strand
gcaaugacaucgccucucu

SEQ ID NO: 1821212 - RNA, 19 nt, Homo sapiens
  misc_RNA (1)...(19): siRNA sense strand
ggacaaguuugauaacaag

SEQ ID NO: 1821213 - RNA, 19 nt, Homo sapiens
  misc_RNA (1)...(19): siRNA sense strand
ugacugagcugaccaaugc

SEQ ID NO: 1821214 - RNA, 19 nt, Homo sapiens
  misc_RNA (1)...(19): siRNA sense strand
gggagaagaucaaguacug

SEQ ID NO: 1821215 - RNA, 19 nt, Homo sapiens
  misc_RNA (1)...(19): siRNA sense strand
gcacugauccucaaugaca

SEQ ID NO: 1821216 - RNA, 19 nt, Homo sapiens
  misc_RNA (1)...(19): siRNA sense strand
acaagaacaucauugagaa

SEQ ID NO: 1821217 - RNA, 19 nt, Homo sapiens
  misc_RNA (1)...(19): siRNA sense strand
gagcagggcagcaaaguga

SEQ ID NO: 1821218 - RNA, 19 nt, Homo sapiens
  misc_RNA (1)...(19): siRNA sense strand
acaaguaccugacagugaa

SEQ ID NO: 1821219 - RNA, 19 nt, Homo sapiens
  misc_RNA (1)...(19): siRNA sense strand
aaacaggucuuuggcauuc

SEQ ID NO: 1821220 - RNA, 19 nt, Homo sapiens
  misc_RNA (1)...(19): siRNA sense strand
gggacaaguuugauaacaa

SEQ ID NO: 1821221 - RNA, 19 nt, Homo sapiens
  misc_RNA (1)...(19): siRNA sense strand
acacggagguggagaugaa

SEQ ID NO: 1821222 - RNA, 19 nt, Homo sapiens
  misc_RNA (1)...(19): siRNA sense strand
gcacuggaauggcuuguac

SEQ ID NO: 1821223 - RNA, 19 nt, Homo sapiens
  misc_RNA (1)...(19): siRNA sense strand
gaacuacuuguacuucauu

SEQ ID NO: 1821224 - RNA, 19 nt, Homo sapiens
  misc_RNA (1)...(19): siRNA sense strand
uggaaaggcugaacaagau

SEQ ID NO: 1821225 - RNA, 19 nt, Homo sapiens
  misc_RNA (1)...(19): siRNA sense strand
ugaaggagauggcccaauc

SEQ ID NO: 1821226 - RNA, 19 nt, Homo sapiens
  misc_RNA (1)...(19): siRNA sense strand
gcuggaagaucaaccuguu

SEQ ID NO: 1821227 - RNA, 19 nt, Homo sapiens
  misc_RNA (1)...(19): siRNA sense strand
gcaaccagcugcgcaagau

SEQ ID NO: 1821228 - RNA, 19 nt, Homo sapiens
  misc_RNA (1)...(19): siRNA sense strand
cagcacaucuuccugaaca

SEQ ID NO: 1821229 - RNA, 19 nt, Homo sapiens
  misc_RNA (1)...(19): siRNA sense strand
cccaagagcucaucugcaa

SEQ ID NO: 1821230 - RNA, 19 nt, Homo sapiens
  misc_RNA (1)...(19): siRNA sense strand
gcacauugccaagcaguuu

SEQ ID NO: 1821231 - RNA, 19 nt, Homo sapiens
  misc_RNA (1)...(19): siRNA sense strand
gcaagaugcugcugcaaaa

SEQ ID NO: 1821232 - RNA, 19 nt, Homo sapiens
  misc_RNA (1)...(19): siRNA sense strand
gggacaagauggacugugu

SEQ ID NO: 1821233 - RNA, 19 nt, Homo sapiens
  misc_RNA (1)...(19): siRNA sense strand
ggaaggccaagcagacuaa

SEQ ID NO: 1821234 - RNA, 19 nt, Homo sapiens
  misc_RNA (1)...(19): siRNA sense strand
gagagggacaaguuugaua

SEQ ID NO: 1821235 - RNA, 19 nt, Homo sapiens
  misc_RNA (1)...(19): siRNA sense strand
gaugaugagugacaagaag

SEQ ID NO: 1821236 - RNA, 19 nt, Homo sapiens
  misc_RNA (1)...(19): siRNA sense strand
caacacagagauccagaaa

SEQ ID NO: 1821237 - RNA, 19 nt, Homo sapiens
  misc_RNA (1)...(19): siRNA sense strand
gaacuucacccuggacaug

SEQ ID NO: 1821238 - RNA, 19 nt, Homo sapiens
  misc_RNA (1)...(19): siRNA sense strand
ccacagccaucaccaucaa

SEQ ID NO: 1821239 - RNA, 19 nt, Homo sapiens
  misc_RNA (1)...(19): siRNA sense strand
gggacaaggugauccugaa

SEQ ID NO: 1821240 - RNA, 19 nt, Homo sapiens
  misc_RNA (1)...(19): siRNA sense strand
guagugagaagcagaagaa

SEQ ID NO: 1821241 - RNA, 19 nt, Homo sapiens
  misc_RNA (1)...(19): siRNA sense strand
caagauggacugugucuca

SEQ ID NO: 1821242 - RNA, 19 nt, Homo sapiens
  misc_RNA (1)...(19): siRNA sense strand
gagcaucgaguacucagaa

SEQ ID NO: 1821243 - RNA, 19 nt, Homo sapiens
  misc_RNA (1)...(19): siRNA sense strand
aagcucaacuccaccauga

SEQ ID NO: 1821244 - RNA, 19 nt, Homo sapiens
  misc_RNA (1)...(19): siRNA sense strand
gaucagcgagccuguguug

SEQ ID NO: 1821245 - RNA, 19 nt, Homo sapiens
  misc_RNA (1)...(19): siRNA sense strand
ggaaauccuucaguucauc

SEQ ID NO: 1821246 - RNA, 19 nt, Homo sapiens
  misc_RNA (1)...(19): siRNA sense strand
gaagaucaaccuguuuaug

SEQ ID NO: 1821247 - RNA, 19 nt, Homo sapiens
  misc_RNA (1)...(19): siRNA sense strand
gaacagugacauucucauc

SEQ ID NO: 1821248 - RNA, 19 nt, Homo sapiens
  misc_RNA (1)...(19): siRNA sense strand
caaaggugaugccucagau

SEQ ID NO: 1821249 - RNA, 19 nt, Homo sapiens
  misc_RNA (1)...(19): siRNA sense strand
gauccugaauccugucaau

SEQ ID NO: 1821250 - RNA, 19 nt, Homo sapiens
  misc_RNA (1)...(19): siRNA sense strand
ggaacuacuuguacuucau

SEQ ID NO: 1821251 - RNA, 19 nt, Homo sapiens
  misc_RNA (1)...(19): siRNA sense strand
ggacauggaauuccucuac

SEQ ID NO: 1821252 - RNA, 19 nt, Homo sapiens
  misc_RNA (1)...(19): siRNA sense strand
gcaugccgcugaucuacug

SEQ ID NO: 1821253 - RNA, 19 nt, Homo sapiens
  misc_RNA (1)...(19): siRNA sense strand
gaagugggccauaacaucu

SEQ ID NO: 1821254 - RNA, 19 nt, Homo sapiens
  misc_RNA (1)...(19): siRNA sense strand
gcaaguaccgcauggaucu

SEQ ID NO: 1821255 - RNA, 19 nt, Homo sapiens
  misc_RNA (1)...(19): siRNA sense strand
caagggugaugccaagaug

SEQ ID NO: 1821256 - RNA, 19 nt, Homo sapiens
  misc_RNA (1)...(19): siRNA sense strand
agaaugugcucagcuacua

SEQ ID NO: 1821257 - RNA, 19 nt, Homo sapiens
  misc_RNA (1)...(19): siRNA sense strand
uaacgagcaucaugagaag

SEQ ID NO: 1821258 - RNA, 19 nt, Homo sapiens
  misc_RNA (1)...(19): siRNA sense strand
ggacugacaagaauaacga

SEQ ID NO: 1821259 - RNA, 19 nt, Homo sapiens
  misc_RNA (1)...(19): siRNA sense strand
gaccugguguucuuuguca

SEQ ID NO: 1821260 - RNA, 19 nt, Homo sapiens
  misc_RNA (1)...(19): siRNA sense strand
agaaguuccugacguguga

SEQ ID NO: 1821261 - RNA, 19 nt, Homo sapiens
  misc_RNA (1)...(19): siRNA sense strand
ucaauucugugaacugcaa

SEQ ID NO: 1821262 - RNA, 19 nt, Homo sapiens
  misc_RNA (1)...(19): siRNA sense strand
gagaugacaagaagaacaa

SEQ ID NO: 1821263 - RNA, 19 nt, Homo sapiens
  misc_RNA (1)...(19): siRNA sense strand
gacaucgccucucucuuug

SEQ ID NO: 1821264 - RNA, 19 nt, Homo sapiens
  misc_RNA (1)...(19): siRNA sense strand
ucacugcccugcugcacaa

SEQ ID NO: 1821265 - RNA, 19 nt, Homo sapiens
  misc_RNA (1)...(19): siRNA sense strand
caucaucauugccuucuuc

SEQ ID NO: 1821266 - RNA, 19 nt, Homo sapiens
  misc_RNA (1)...(19): siRNA sense strand
gcaccaagaacgagaagau

SEQ ID NO: 1821267 - RNA, 19 nt, Homo sapiens
  misc_RNA (1)...(19): siRNA sense strand
gaggagaagcugugcauca

SEQ ID NO: 1821268 - RNA, 19 nt, Homo sapiens
  misc_RNA (1)...(19): siRNA sense strand
acaaacaccugcaccucuu

SEQ ID NO: 1821269 - RNA, 19 nt, Homo sapiens
  misc_RNA (1)...(19): siRNA sense strand
gcaaguuugaggagaauga

SEQ ID NO: 1821270 - RNA, 19 nt, Homo sapiens
  misc_RNA (1)...(19): siRNA sense strand
gagaagaacaagcucacuu

SEQ ID NO: 1821271 - RNA, 19 nt, Homo sapiens
  misc_RNA (1)...(19): siRNA sense strand
gauccgagaccuggacuuu

SEQ ID NO: 1821272 - RNA, 19 nt, Homo sapiens
  misc_RNA (1)...(19): siRNA sense strand
ucuaugaccuccuguucuu

SEQ ID NO: 1821273 - RNA, 19 nt, Homo sapiens
  misc_RNA (1)...(19): siRNA sense strand
uauccuaccugcugucugu

SEQ ID NO: 1821274 - RNA, 19 nt, Homo sapiens
  misc_RNA (1)...(19): siRNA sense strand
ggaggucaauucugugaac

SEQ ID NO: 1821275 - RNA, 19 nt, Homo sapiens
  misc_RNA (1)...(19): siRNA sense strand
agacuaagcaggacaagga

SEQ ID NO: 1821276 - RNA, 19 nt, Homo sapiens
  misc_RNA (1)...(19): siRNA sense strand
ggacuacaagaacaucauu

SEQ ID NO: 1821277 - RNA, 19 nt, Homo sapiens
  misc_RNA (1)...(19): siRNA sense strand
gggagcaaaugaggaagaa

SEQ ID NO: 1821278 - RNA, 19 nt, Homo sapiens
  misc_RNA (1)...(19): siRNA sense strand
agaacaagcucacuuuuga

SEQ ID NO: 1821279 - RNA, 19 nt, Homo sapiens
  misc_RNA (1)...(19): siRNA sense strand
ggacuaccucaacaaugua

SEQ ID NO: 1821280 - RNA, 19 nt, Homo sapiens
  misc_RNA (1)...(19): siRNA sense strand
ucacguggacugacaagaa

SEQ ID NO: 1821281 - RNA, 19 nt, Homo sapiens
  misc_RNA (1)...(19): siRNA sense strand
gaacggcagaagcugauga

SEQ ID NO: 1821282 - RNA, 19 nt, Homo sapiens
  misc_RNA (1)...(19): siRNA sense strand
uggaagaucaaccuguuua

SEQ ID NO: 1821283 - RNA, 19 nt, Homo sapiens
  misc_RNA (1)...(19): siRNA sense strand
caacauguggaacuacuug

SEQ ID NO: 1821284 - RNA, 19 nt, Homo sapiens
  misc_RNA (1)...(19): siRNA sense strand
gugagaagcagaagaagga

SEQ ID NO: 1821285 - RNA, 19 nt, Homo sapiens
  misc_RNA (1)...(19): siRNA sense strand
caccggcucuucaccacua

SEQ ID NO: 1821286 - RNA, 19 nt, Homo sapiens
  misc_RNA (1)...(19): siRNA sense strand
gcauggagcagaucguguu

SEQ ID NO: 1821287 - RNA, 19 nt, Homo sapiens
  misc_RNA (1)...(19): siRNA sense strand
gaggugagcccacgugaag

SEQ ID NO: 1821288 - RNA, 19 nt, Homo sapiens
  misc_RNA (1)...(19): siRNA sense strand
agacuugcauugugacuca

SEQ ID NO: 1821289 - RNA, 19 nt, Homo sapiens
  misc_RNA (1)...(19): siRNA sense strand
caaugcaggugacgaugug

SEQ ID NO: 1821290 - RNA, 19 nt, Homo sapiens
  misc_RNA (1)...(19): siRNA sense strand
ggaccaugguggagaaguc

SEQ ID NO: 1821291 - RNA, 19 nt, Homo sapiens
  misc_RNA (1)...(19): siRNA sense strand
gagcagaacauccucaaac

SEQ ID NO: 1821292 - RNA, 19 nt, Homo sapiens
  misc_RNA (1)...(19): siRNA sense strand
gaccuggacuuugccaaug

SEQ ID NO: 1821293 - RNA, 19 nt, Homo sapiens
  misc_RNA (1)...(19): siRNA sense strand
gaaaagcacaucaccaaga

SEQ ID NO: 1821294 - RNA, 19 nt, Homo sapiens
  misc_RNA (1)...(19): siRNA sense strand
caaguuugauaacaagaca

SEQ ID NO: 1821295 - RNA, 19 nt, Homo sapiens
  misc_RNA (1)...(19): siRNA sense strand
ggacaucgucucccuguac

SEQ ID NO: 1821296 - RNA, 19 nt, Homo sapiens
  misc_RNA (1)...(19): siRNA sense strand
gugcugaaccucaucuuug

SEQ ID NO: 1821297 - RNA, 19 nt, Homo sapiens
  misc_RNA (1)...(19): siRNA sense strand
ccgcacugauccucaauga

SEQ ID NO: 1821298 - RNA, 19 nt, Homo sapiens
  misc_RNA (1)...(19): siRNA sense strand
ucuggacgcucuuugagaa

SEQ ID NO: 1821299 - RNA, 19 nt, Homo sapiens
  misc_RNA (1)...(19): siRNA sense strand
gaaaauggccuaugugaac

SEQ ID NO: 1821300 - RNA, 19 nt, Homo sapiens
  misc_RNA (1)...(19): siRNA sense strand
gcagugagaacuaccagau

SEQ ID NO: 1821301 - RNA, 19 nt, Homo sapiens
  misc_RNA (1)...(19): siRNA sense strand
agaagaacaagcucacuuu

SEQ ID NO: 1821302 - RNA, 19 nt, Homo sapiens
  misc_RNA (1)...(19): siRNA sense strand
ggaguugccugcucagaaa

SEQ ID NO: 1821303 - RNA, 19 nt, Homo sapiens
  misc_RNA (1)...(19): siRNA sense strand
gcaaccggcuccugaguau

SEQ ID NO: 1821304 - RNA, 19 nt, Homo sapiens
  misc_RNA (1)...(19): siRNA sense strand
ccaacaacaucaugaaaug

SEQ ID NO: 1821305 - RNA, 19 nt, Homo sapiens
  misc_RNA (1)...(19): siRNA sense strand
gcagagagcugggcuuugg

SEQ ID NO: 1821306 - RNA, 19 nt, Homo sapiens
  misc_RNA (1)...(19): siRNA sense strand
ggaggaugcuggugugaga

SEQ ID NO: 1821307 - RNA, 19 nt, Homo sapiens
  misc_RNA (1)...(19): siRNA sense strand
ggguggagguguacuauga

SEQ ID NO: 1821308 - RNA, 19 nt, Homo sapiens
  misc_RNA (1)...(19): siRNA sense strand
gagaagggcccaucugguu

SEQ ID NO: 1821309 - RNA, 19 nt, Homo sapiens
  misc_RNA (1)...(19): siRNA sense strand
ggacauacaauaccaaagu

SEQ ID NO: 1821310 - RNA, 19 nt, Homo sapiens
  misc_RNA (1)...(19): siRNA sense strand
ggagacauccagaagaauu

SEQ ID NO: 1821311 - RNA, 19 nt, Homo sapiens
  misc_RNA (1)...(19): siRNA sense strand
ggaagcagaucugugacaa

SEQ ID NO: 1821312 - RNA, 19 nt, Homo sapiens
  misc_RNA (1)...(19): siRNA sense strand
gccaugggcuugcagaaga

SEQ ID NO: 1821313 - RNA, 19 nt, Homo sapiens
  misc_RNA (1)...(19): siRNA sense strand
gagacauccagaagaauua

SEQ ID NO: 1821314 - RNA, 19 nt, Homo sapiens
  misc_RNA (1)...(19): siRNA sense strand
ccagaagaauuacgagugu

SEQ ID NO: 1821315 - RNA, 19 nt, Homo sapiens
  misc_RNA (1)...(19): siRNA sense strand
gcacuucagcgggcucuua

SEQ ID NO: 1821316 - RNA, 19 nt, Homo sapiens
  misc_RNA (1)...(19): siRNA sense strand
gaaggagacauccagaaga

SEQ ID NO: 1821317 - RNA, 19 nt, Homo sapiens
  misc_RNA (1)...(19): siRNA sense strand
aaggagacauccagaagaa

SEQ ID NO: 1821318 - RNA, 19 nt, Homo sapiens
  misc_RNA (1)...(19): siRNA sense strand
gagccauccucucaaccua

SEQ ID NO: 1821319 - RNA, 19 nt, Homo sapiens
  misc_RNA (1)...(19): siRNA sense strand
ucagcgggcucuuaaacaa

SEQ ID NO: 1821320 - RNA, 19 nt, Homo sapiens
  misc_RNA (1)...(19): siRNA sense strand
agaagaagcugcgccugaa

SEQ ID NO: 1821321 - RNA, 19 nt, Homo sapiens
  misc_RNA (1)...(19): siRNA sense strand
gagaggacauacaauacca

SEQ ID NO: 1821322 - RNA, 19 nt, Homo sapiens
  misc_RNA (1)...(19): siRNA sense strand
gaaugucaccugcgagaau

SEQ ID NO: 1821323 - RNA, 19 nt, Homo sapiens
  misc_RNA (1)...(19): siRNA sense strand
gcacagaggcccacaucuc

SEQ ID NO: 1821324 - RNA, 19 nt, Homo sapiens
  misc_RNA (1)...(19): siRNA sense strand
ggucaugaguggagugaag

SEQ ID NO: 1821325 - RNA, 19 nt, Homo sapiens
  misc_RNA (1)...(19): siRNA sense strand
gacauacaauaccaaagug

SEQ ID NO: 1821326 - RNA, 19 nt, Homo sapiens
  misc_RNA (1)...(19): siRNA sense strand
gcacuggacggccaagaau

SEQ ID NO: 1821327 - RNA, 19 nt, Homo sapiens
  misc_RNA (1)...(19): siRNA sense strand
uagagaaccugaauaucca

SEQ ID NO: 1821328 - RNA, 19 nt, Homo sapiens
  misc_RNA (1)...(19): siRNA sense strand
agaaacgggucccuugugu

SEQ ID NO: 1821329 - RNA, 19 nt, Homo sapiens
  misc_RNA (1)...(19): siRNA sense strand
caaguucaaugccgagucu

SEQ ID NO: 1821330 - RNA, 19 nt, Homo sapiens
  misc_RNA (1)...(19): siRNA sense strand
uagacaaucuccacuguac

SEQ ID NO: 1821331 - RNA, 19 nt, Homo sapiens
  misc_RNA (1)...(19): siRNA sense strand
gcaagcacacggaggaugu

SEQ ID NO: 1821332 - RNA, 19 nt, Homo sapiens
  misc_RNA (1)...(19): siRNA sense strand
guuagacaaucuccacugu

SEQ ID NO: 1821333 - RNA, 19 nt, Homo sapiens
  misc_RNA (1)...(19): siRNA sense strand
cauuauagacugcaaguuc

SEQ ID NO: 1821334 - RNA, 19 nt, Homo sapiens
  misc_RNA (1)...(19): siRNA sense strand
agauagagaaccugaauau

SEQ ID NO: 1821335 - RNA, 19 nt, Homo sapiens
  misc_RNA (1)...(19): siRNA sense strand
gcacaggcaaugagaaguc

SEQ ID NO: 1821336 - RNA, 19 nt, Homo sapiens
  misc_RNA (1)...(19): siRNA sense strand
agaagggcccaucugguua

SEQ ID NO: 1821337 - RNA, 19 nt, Homo sapiens
  misc_RNA (1)...(19): siRNA sense strand
gggcccaucugguuagaca

SEQ ID NO: 1821338 - RNA, 19 nt, Homo sapiens
  misc_RNA (1)...(19): siRNA sense strand
ggacugccagcuccuccua

SEQ ID NO: 1821339 - RNA, 19 nt, Homo sapiens
  misc_RNA (1)...(19): siRNA sense strand
guacaacugccacauaggu

SEQ ID NO: 1821340 - RNA, 19 nt, Homo sapiens
  misc_RNA (1)...(19): siRNA sense strand
cgagauuccggaaagcaua

SEQ ID NO: 1821341 - RNA, 19 nt, Homo sapiens
  misc_RNA (1)...(19): siRNA sense strand
gaggacauacaauaccaaa

SEQ ID NO: 1821342 - RNA, 19 nt, Homo sapiens
  misc_RNA (1)...(19): siRNA sense strand
gaagggcccaucugguuag

SEQ ID NO: 1821343 - RNA, 19 nt, Homo sapiens
  misc_RNA (1)...(19): siRNA sense strand
uuacgagugugccaacuuc

SEQ ID NO: 1821344 - RNA, 19 nt, Homo sapiens
  misc_RNA (1)...(19): siRNA sense strand
gagaaacgggucccuugug

SEQ ID NO: 1821345 - RNA, 19 nt, Homo sapiens
  misc_RNA (1)...(19): siRNA sense strand
ccagauagagaaccugaau

SEQ ID NO: 1821346 - RNA, 19 nt, Homo sapiens
  misc_RNA (1)...(19): siRNA sense strand
ccuggaagcagaucuguga

SEQ ID NO: 1821347 - RNA, 19 nt, Homo sapiens
  misc_RNA (1)...(19): siRNA sense strand
ggagaugucaacagcaaca

SEQ ID NO: 1821348 - RNA, 19 nt, Homo sapiens
  misc_RNA (1)...(19): siRNA sense strand
gaaaugcaggagccgcuau

SEQ ID NO: 1821349 - RNA, 19 nt, Homo sapiens
  misc_RNA (1)...(19): siRNA sense strand
ggaggaagcagcgcuacug

SEQ ID NO: 1821350 - RNA, 19 nt, Homo sapiens
  misc_RNA (1)...(19): siRNA sense strand
gacaaucuccacuguacug

SEQ ID NO: 1821351 - RNA, 19 nt, Homo sapiens
  misc_RNA (1)...(19): siRNA sense strand
uguuccagguuguuauuaa

SEQ ID NO: 1821352 - RNA, 19 nt, Homo sapiens
  misc_RNA (1)...(19): siRNA sense strand
ccucccagauccacaacaa

SEQ ID NO: 1821353 - RNA, 19 nt, Homo sapiens
  misc_RNA (1)...(19): siRNA sense strand
gggaugguguguggccaaa

SEQ ID NO: 1821354 - RNA, 19 nt, Homo sapiens
  misc_RNA (1)...(19): siRNA sense strand
cgugugcgaugacgacuuc

SEQ ID NO: 1821355 - RNA, 19 nt, Homo sapiens
  misc_RNA (1)...(19): siRNA sense strand
ccaugggcuugcagaagaa

SEQ ID NO: 1821356 - RNA, 19 nt, Homo sapiens
  misc_RNA (1)...(19): siRNA sense strand
guggagguguacuaugaug

SEQ ID NO: 1821357 - RNA, 19 nt, Homo sapiens
  misc_RNA (1)...(19): siRNA sense strand
ggauuccuggguucaaauu

SEQ ID NO: 1821358 - RNA, 19 nt, Homo sapiens
  misc_RNA (1)...(19): siRNA sense strand
ugacggacccucgagauuc

SEQ ID NO: 1821359 - RNA, 19 nt, Homo sapiens
  misc_RNA (1)...(19): siRNA sense strand
ggggagaggacauacaaua

SEQ ID NO: 1821360 - RNA, 19 nt, Homo sapiens
  misc_RNA (1)...(19): siRNA sense strand
cagauagagaaccugaaua

SEQ ID NO: 1821361 - RNA, 19 nt, Homo sapiens
  misc_RNA (1)...(19): siRNA sense strand
gauucgagccauccucuca

SEQ ID NO: 1821362 - RNA, 19 nt, Homo sapiens
  misc_RNA (1)...(19): siRNA sense strand
gggagaggacauacaauac

SEQ ID NO: 1821363 - RNA, 19 nt, Homo sapiens
  misc_RNA (1)...(19): siRNA sense strand
ugaaggagacauccagaag

SEQ ID NO: 1821364 - RNA, 19 nt, Homo sapiens
  misc_RNA (1)...(19): siRNA sense strand
gcgcuucuccucccagauc

SEQ ID NO: 1821365 - RNA, 19 nt, Homo sapiens
  misc_RNA (1)...(19): siRNA sense strand
acggagaugucaacagcaa

SEQ ID NO: 1821366 - RNA, 19 nt, Homo sapiens
  misc_RNA (1)...(19): siRNA sense strand
gcagcugccuggcuaugcu

SEQ ID NO: 1821367 - RNA, 19 nt, Homo sapiens
  misc_RNA (1)...(19): siRNA sense strand
ggaucuggcacgacuguca

SEQ ID NO: 1821368 - RNA, 19 nt, Homo sapiens
  misc_RNA (1)...(19): siRNA sense strand
gcagcaugcaccuccaaug

SEQ ID NO: 1821369 - RNA, 19 nt, Homo sapiens
  misc_RNA (1)...(19): siRNA sense strand
ccaguguggucugcagaga

SEQ ID NO: 1821370 - RNA, 19 nt, Homo sapiens
  misc_RNA (1)...(19): siRNA sense strand
uaugacagcuggccccauu

SEQ ID NO: 1821371 - RNA, 19 nt, Homo sapiens
  misc_RNA (1)...(19): siRNA sense strand
cagcaugcaccuccaaugg

SEQ ID NO: 1821372 - RNA, 19 nt, Homo sapiens
  misc_RNA (1)...(19): siRNA sense strand
auuauagacugcaaguuca

SEQ ID NO: 1821373 - RNA, 19 nt, Homo sapiens
  misc_RNA (1)...(19): siRNA sense strand
ccauccaccucaacgagau

SEQ ID NO: 1821374 - RNA, 19 nt, Homo sapiens
  misc_RNA (1)...(19): siRNA sense strand
auuccuggguucaaauuug

SEQ ID NO: 1821375 - RNA, 19 nt, Homo sapiens
  misc_RNA (1)...(19): siRNA sense strand
gguauuggcacggagaugu

SEQ ID NO: 1821376 - RNA, 19 nt, Homo sapiens
  misc_RNA (1)...(19): siRNA sense strand
ggaggacauucggauucga

SEQ ID NO: 1821377 - RNA, 19 nt, Homo sapiens
  misc_RNA (1)...(19): siRNA sense strand
gaagcagaucugugacaag

SEQ ID NO: 1821378 - RNA, 19 nt, Homo sapiens
  misc_RNA (1)...(19): siRNA sense strand
gugaaggagacauccagaa

SEQ ID NO: 1821379 - RNA, 19 nt, Homo sapiens
  misc_RNA (1)...(19): siRNA sense strand
gcuuggaggacacagaaug

SEQ ID NO: 1821380 - RNA, 19 nt, Homo sapiens
  misc_RNA (1)...(19): siRNA sense strand
gguccucaaugcggagaug

SEQ ID NO: 1821381 - RNA, 19 nt, Homo sapiens
  misc_RNA (1)...(19): siRNA sense strand
cccugagccuggcacagua

SEQ ID NO: 1821382 - RNA, 19 nt, Homo sapiens
  misc_RNA (1)...(19): siRNA sense strand
caacgaggcgacccuugca

SEQ ID NO: 1821383 - RNA, 19 nt, Homo sapiens
  misc_RNA (1)...(19): siRNA sense strand
gguggaggacauucggauu

SEQ ID NO: 1821384 - RNA, 19 nt, Homo sapiens
  misc_RNA (1)...(19): siRNA sense strand
cggaguugccugcucagaa

SEQ ID NO: 1821385 - RNA, 19 nt, Homo sapiens
  misc_RNA (1)...(19): siRNA sense strand
aaugucaccugcgagaaug

SEQ ID NO: 1821386 - RNA, 19 nt, Homo sapiens
  misc_RNA (1)...(19): siRNA sense strand
gcaagaccuggaagcagau

SEQ ID NO: 1821387 - RNA, 19 nt, Homo sapiens
  misc_RNA (1)...(19): siRNA sense strand
guggaggacauucggauuc

SEQ ID NO: 1821388 - RNA, 19 nt, Homo sapiens
  misc_RNA (1)...(19): siRNA sense strand
ugaucaaccagauagagaa

SEQ ID NO: 1821389 - RNA, 19 nt, Homo sapiens
  misc_RNA (1)...(19): siRNA sense strand
ucccagauccacaacaaug

SEQ ID NO: 1821390 - RNA, 19 nt, Homo sapiens
  misc_RNA (1)...(19): siRNA sense strand
ggagaggacauacaauacc

SEQ ID NO: 1821391 - RNA, 19 nt, Homo sapiens
  misc_RNA (1)...(19): siRNA sense strand
auagagaaccugaauaucc

SEQ ID NO: 1821392 - RNA, 19 nt, Homo sapiens
  misc_RNA (1)...(19): siRNA sense strand
uuagacaaucuccacugua

SEQ ID NO: 1821393 - RNA, 19 nt, Homo sapiens
  misc_RNA (1)...(19): siRNA sense strand
gcccaucugguuagacaau

SEQ ID NO: 1821394 - RNA, 19 nt, Homo sapiens
  misc_RNA (1)...(19): siRNA sense strand
acuaugaccugcugaaccu

SEQ ID NO: 1821395 - RNA, 19 nt, Homo sapiens
  misc_RNA (1)...(19): siRNA sense strand
gaagaagcugcgccugaac

SEQ ID NO: 1821396 - RNA, 19 nt, Homo sapiens
  misc_RNA (1)...(19): siRNA sense strand
ugagaaguccauuauagac

SEQ ID NO: 1821397 - RNA, 19 nt, Homo sapiens
  misc_RNA (1)...(19): siRNA sense strand
ggacugagauuucuucaug

SEQ ID NO: 1821398 - RNA, 19 nt, Homo sapiens
  misc_RNA (1)...(19): siRNA sense strand
ggaagagguugaucaagua

SEQ ID NO: 1821399 - RNA, 19 nt, Homo sapiens
  misc_RNA (1)...(19): siRNA sense strand
gcaaaguggugaacaauuc

SEQ ID NO: 1821400 - RNA, 19 nt, Homo sapiens
  misc_RNA (1)...(19): siRNA sense strand
gaacggaucuaguguuugg

SEQ ID NO: 1821401 - RNA, 19 nt, Homo sapiens
  misc_RNA (1)...(19): siRNA sense strand
caaacaaguucucaccuaa

SEQ ID NO: 1821402 - RNA, 19 nt, Homo sapiens
  misc_RNA (1)...(19): siRNA sense strand
ugaagagacuguccaauga

SEQ ID NO: 1821403 - RNA, 19 nt, Homo sapiens
  misc_RNA (1)...(19): siRNA sense strand
gcacaaaggauuuauggaa

SEQ ID NO: 1821404 - RNA, 19 nt, Homo sapiens
  misc_RNA (1)...(19): siRNA sense strand
gcaaagugguuccagauuc

SEQ ID NO: 1821405 - RNA, 19 nt, Homo sapiens
  misc_RNA (1)...(19): siRNA sense strand
gaaugaagccaauaacuug

SEQ ID NO: 1821406 - RNA, 19 nt, Homo sapiens
  misc_RNA (1)...(19): siRNA sense strand
gaagaagcaucccgucaau

SEQ ID NO: 1821407 - RNA, 19 nt, Homo sapiens
  misc_RNA (1)...(19): siRNA sense strand
gauuugauguggacuauga

SEQ ID NO: 1821408 - RNA, 19 nt, Homo sapiens
  misc_RNA (1)...(19): siRNA sense strand
aaaguccagucuacuauua

SEQ ID NO: 1821409 - RNA, 19 nt, Homo sapiens
  misc_RNA (1)...(19): siRNA sense strand
gagcaaaggugcaguucga

SEQ ID NO: 1821410 - RNA, 19 nt, Homo sapiens
  misc_RNA (1)...(19): siRNA sense strand
gaaacaaacuguggaagca

SEQ ID NO: 1821411 - RNA, 19 nt, Homo sapiens
  misc_RNA (1)...(19): siRNA sense strand
gaagaccauuucucuguga

SEQ ID NO: 1821412 - RNA, 19 nt, Homo sapiens
  misc_RNA (1)...(19): siRNA sense strand
caagagguauauugagaaa

SEQ ID NO: 1821413 - RNA, 19 nt, Homo sapiens
  misc_RNA (1)...(19): siRNA sense strand
cagaacggaucuaguguuu

SEQ ID NO: 1821414 - RNA, 19 nt, Homo sapiens
  misc_RNA (1)...(19): siRNA sense strand
aaacacagguugcagauag

SEQ ID NO: 1821415 - RNA, 19 nt, Homo sapiens
  misc_RNA (1)...(19): siRNA sense strand
ggacacgucuucccagcuu

SEQ ID NO: 1821416 - RNA, 19 nt, Homo sapiens
  misc_RNA (1)...(19): siRNA sense strand
gaucaaauagagagcguua

SEQ ID NO: 1821417 - RNA, 19 nt, Homo sapiens
  misc_RNA (1)...(19): siRNA sense strand
gccaagagguauauugaga

SEQ ID NO: 1821418 - RNA, 19 nt, Homo sapiens
  misc_RNA (1)...(19): siRNA sense strand
cacaaaggauuuauggaaa

SEQ ID NO: 1821419 - RNA, 19 nt, Homo sapiens
  misc_RNA (1)...(19): siRNA sense strand
caagaucgauccugcagau

SEQ ID NO: 1821420 - RNA, 19 nt, Homo sapiens
  misc_RNA (1)...(19): siRNA sense strand
gcagagaaccggagauauc

SEQ ID NO: 1821421 - RNA, 19 nt, Homo sapiens
  misc_RNA (1)...(19): siRNA sense strand
gagcauucauuuccaacuu

SEQ ID NO: 1821422 - RNA, 19 nt, Homo sapiens
  misc_RNA (1)...(19): siRNA sense strand
gaacuggagguguuuaaug

SEQ ID NO: 1821423 - RNA, 19 nt, Homo sapiens
  misc_RNA (1)...(19): siRNA sense strand
gacguuaccugcugguuug

SEQ ID NO: 1821424 - RNA, 19 nt, Homo sapiens
  misc_RNA (1)...(19): siRNA sense strand
auacacaucuucaaugaga

SEQ ID NO: 1821425 - RNA, 19 nt, Homo sapiens
  misc_RNA (1)...(19): siRNA sense strand
acaaacaaguucucaccua

SEQ ID NO: 1821426 - RNA, 19 nt, Homo sapiens
  misc_RNA (1)...(19): siRNA sense strand
ccaagaagcccaacaaugg

SEQ ID NO: 1821427 - RNA, 19 nt, Homo sapiens
  misc_RNA (1)...(19): siRNA sense strand
ggaauugcacaaaggauuu

SEQ ID NO: 1821428 - RNA, 19 nt, Homo sapiens
  misc_RNA (1)...(19): siRNA sense strand
cggaagaaaugauggaaga

SEQ ID NO: 1821429 - RNA, 19 nt, Homo sapiens
  misc_RNA (1)...(19): siRNA sense strand
gagaacauccaagacaaua

SEQ ID NO: 1821430 - RNA, 19 nt, Homo sapiens
  misc_RNA (1)...(19): siRNA sense strand
cauauuggaugaccucaga

SEQ ID NO: 1821431 - RNA, 19 nt, Homo sapiens
  misc_RNA (1)...(19): siRNA sense strand
gcaugcagaucccgauuuc

SEQ ID NO: 1821432 - RNA, 19 nt, Homo sapiens
  misc_RNA (1)...(19): siRNA sense strand
gugcagaucucagugaaga

SEQ ID NO: 1821433 - RNA, 19 nt, Homo sapiens
  misc_RNA (1)...(19): siRNA sense strand
ggagcucuauuaaggagaa

SEQ ID NO: 1821434 - RNA, 19 nt, Homo sapiens
  misc_RNA (1)...(19): siRNA sense strand
ggaagaagcaucccgucaa

SEQ ID NO: 1821435 - RNA, 19 nt, Homo sapiens
  misc_RNA (1)...(19): siRNA sense strand
gaacauccaagacaauauc

SEQ ID NO: 1821436 - RNA, 19 nt, Homo sapiens
  misc_RNA (1)...(19): siRNA sense strand
gcuauaaaguccagucuac

SEQ ID NO: 1821437 - RNA, 19 nt, Homo sapiens
  misc_RNA (1)...(19): siRNA sense strand
gaagagacuguccaaugaa

SEQ ID NO: 1821438 - RNA, 19 nt, Homo sapiens
  misc_RNA (1)...(19): siRNA sense strand
ucaaguaacucuuuauagc

SEQ ID NO: 1821439 - RNA, 19 nt, Homo sapiens
  misc_RNA (1)...(19): siRNA sense strand
ggacguuaccugcugguuu

SEQ ID NO: 1821440 - RNA, 19 nt, Homo sapiens
  misc_RNA (1)...(19): siRNA sense strand
cuucccagcuuaagaaauu

SEQ ID NO: 1821441 - RNA, 19 nt, Homo sapiens
  misc_RNA (1)...(19): siRNA sense strand
gcagauagccaagagguau

SEQ ID NO: 1821442 - RNA, 19 nt, Homo sapiens
  misc_RNA (1)...(19): siRNA sense strand
gcagcgcucuugauaugga

SEQ ID NO: 1821443 - RNA, 19 nt, Homo sapiens
  misc_RNA (1)...(19): siRNA sense strand
acauuuaggagcucuauua

SEQ ID NO: 1821444 - RNA, 19 nt, Homo sapiens
  misc_RNA (1)...(19): siRNA sense strand
gaccauuucucugugauug

SEQ ID NO: 1821445 - RNA, 19 nt, Homo sapiens
  misc_RNA (1)...(19): siRNA sense strand
uaaagcccacggacuaaua

SEQ ID NO: 1821446 - RNA, 19 nt, Homo sapiens
  misc_RNA (1)...(19): siRNA sense strand
acaaggaucucaggugcua

SEQ ID NO: 1821447 - RNA, 19 nt, Homo sapiens
  misc_RNA (1)...(19): siRNA sense strand
gaagagguugaucaaguaa

SEQ ID NO: 1821448 - RNA, 19 nt, Homo sapiens
  misc_RNA (1)...(19): siRNA sense strand
cuaugaagaucuuguggaa

SEQ ID NO: 1821449 - RNA, 19 nt, Homo sapiens
  misc_RNA (1)...(19): siRNA sense strand
ugaagaccauauuggauga

SEQ ID NO: 1821450 - RNA, 19 nt, Homo sapiens
  misc_RNA (1)...(19): siRNA sense strand
ggagguguuuaauggauau

SEQ ID NO: 1821451 - RNA, 19 nt, Homo sapiens
  misc_RNA (1)...(19): siRNA sense strand
agagaaggcuggugaacug

SEQ ID NO: 1821452 - RNA, 19 nt, Homo sapiens
  misc_RNA (1)...(19): siRNA sense strand
ggccaaacacuuagaggua

SEQ ID NO: 1821453 - RNA, 19 nt, Homo sapiens
  misc_RNA (1)...(19): siRNA sense strand
gggccgagcucuuuaugca

SEQ ID NO: 1821454 - RNA, 19 nt, Homo sapiens
  misc_RNA (1)...(19): siRNA sense strand
gaauugcacaaaggauuua

SEQ ID NO: 1821455 - RNA, 19 nt, Homo sapiens
  misc_RNA (1)...(19): siRNA sense strand
uggaagagguugaucaagu

SEQ ID NO: 1821456 - RNA, 19 nt, Homo sapiens
  misc_RNA (1)...(19): siRNA sense strand
gacccacauuucaucauuu

SEQ ID NO: 1821457 - RNA, 19 nt, Homo sapiens
  misc_RNA (1)...(19): siRNA sense strand
ugacccacauuucaucauu

SEQ ID NO: 1821458 - RNA, 19 nt, Homo sapiens
  misc_RNA (1)...(19): siRNA sense strand
ggacgucacucaaaacaau

SEQ ID NO: 1821459 - RNA, 19 nt, Homo sapiens
  misc_RNA (1)...(19): siRNA sense strand
ccacagggacugagauuuc

SEQ ID NO: 1821460 - RNA, 19 nt, Homo sapiens
  misc_RNA (1)...(19): siRNA sense strand
gcacaacaguggaaaagga

SEQ ID NO: 1821461 - RNA, 19 nt, Homo sapiens
  misc_RNA (1)...(19): siRNA sense strand
gcagaucucagugaagaaa

SEQ ID NO: 1821462 - RNA, 19 nt, Homo sapiens
  misc_RNA (1)...(19): siRNA sense strand
ggucauuucuaaaggacaa

SEQ ID NO: 1821463 - RNA, 19 nt, Homo sapiens
  misc_RNA (1)...(19): siRNA sense strand
gagauguccuuuucuguuu

SEQ ID NO: 1821464 - RNA, 19 nt, Homo sapiens
  misc_RNA (1)...(19): siRNA sense strand
uauaaaguccagucuacua

SEQ ID NO: 1821465 - RNA, 19 nt, Homo sapiens
  misc_RNA (1)...(19): siRNA sense strand
gccaagagaagaauuacaa

SEQ ID NO: 1821466 - RNA, 19 nt, Homo sapiens
  misc_RNA (1)...(19): siRNA sense strand
ugaaugaagccaauaacuu

SEQ ID NO: 1821467 - RNA, 19 nt, Homo sapiens
  misc_RNA (1)...(19): siRNA sense strand
gaaaccaggacacgucuuc

SEQ ID NO: 1821468 - RNA, 19 nt, Homo sapiens
  misc_RNA (1)...(19): siRNA sense strand
cuacagaacggaucuagug

SEQ ID NO: 1821469 - RNA, 19 nt, Homo sapiens
  misc_RNA (1)...(19): siRNA sense strand
gggccuaucuaaccaucaa

SEQ ID NO: 1821470 - RNA, 19 nt, Homo sapiens
  misc_RNA (1)...(19): siRNA sense strand
uuuaggagcucuauuaagg

SEQ ID NO: 1821471 - RNA, 19 nt, Homo sapiens
  misc_RNA (1)...(19): siRNA sense strand
ggacuaauaggccaguuca

SEQ ID NO: 1821472 - RNA, 19 nt, Homo sapiens
  misc_RNA (1)...(19): siRNA sense strand
uuuccaaagugaagacaua

SEQ ID NO: 1821473 - RNA, 19 nt, Homo sapiens
  misc_RNA (1)...(19): siRNA sense strand
acccacauuucaucauuua

SEQ ID NO: 1821474 - RNA, 19 nt, Homo sapiens
  misc_RNA (1)...(19): siRNA sense strand
caagagaagaauuacaaga

SEQ ID NO: 1821475 - RNA, 19 nt, Homo sapiens
  misc_RNA (1)...(19): siRNA sense strand
aagagacuguccaaugaaa

SEQ ID NO: 1821476 - RNA, 19 nt, Homo sapiens
  misc_RNA (1)...(19): siRNA sense strand
gggaacugguggugcugua

SEQ ID NO: 1821477 - RNA, 19 nt, Homo sapiens
  misc_RNA (1)...(19): siRNA sense strand
gcacaggaucuaucugcaa

SEQ ID NO: 1821478 - RNA, 19 nt, Homo sapiens
  misc_RNA (1)...(19): siRNA sense strand
gcucaagucacgaaucaga

SEQ ID NO: 1821479 - RNA, 19 nt, Homo sapiens
  misc_RNA (1)...(19): siRNA sense strand
agagaagaauuacaagauc

SEQ ID NO: 1821480 - RNA, 19 nt, Homo sapiens
  misc_RNA (1)...(19): siRNA sense strand
gaaacugugggccuaucua

SEQ ID NO: 1821481 - RNA, 19 nt, Homo sapiens
  misc_RNA (1)...(19): siRNA sense strand
gaaagacaagcaugcagau

SEQ ID NO: 1821482 - RNA, 19 nt, Homo sapiens
  misc_RNA (1)...(19): siRNA sense strand
gcucuacagcuuucucaaa

SEQ ID NO: 1821483 - RNA, 19 nt, Homo sapiens
  misc_RNA (1)...(19): siRNA sense strand
caaaggagcauucauuucc

SEQ ID NO: 1821484 - RNA, 19 nt, Homo sapiens
  misc_RNA (1)...(19): siRNA sense strand
ccacaugugaugagaguug

SEQ ID NO: 1821485 - RNA, 19 nt, Homo sapiens
  misc_RNA (1)...(19): siRNA sense strand
gaucgauccugcagauguc

SEQ ID NO: 1821486 - RNA, 19 nt, Homo sapiens
  misc_RNA (1)...(19): siRNA sense strand
ccaaacacuuagagguaga

SEQ ID NO: 1821487 - RNA, 19 nt, Homo sapiens
  misc_RNA (1)...(19): siRNA sense strand
gggauuugauguggacuau

SEQ ID NO: 1821488 - RNA, 19 nt, Homo sapiens
  misc_RNA (1)...(19): siRNA sense strand
ggagaacauccaagacaau

SEQ ID NO: 1821489 - RNA, 19 nt, Homo sapiens
  misc_RNA (1)...(19): siRNA sense strand
caacagugggcgaacuaaa

SEQ ID NO: 1821490 - RNA, 19 nt, Homo sapiens
  misc_RNA (1)...(19): siRNA sense strand
gaaccggagauaucagaga

SEQ ID NO: 1821491 - RNA, 19 nt, Homo sapiens
  misc_RNA (1)...(19): siRNA sense strand
gaagcaaugaagaccauau

SEQ ID NO: 1821492 - RNA, 19 nt, Homo sapiens
  misc_RNA (1)...(19): siRNA sense strand
ggugcuguaugacgugaaa

SEQ ID NO: 1821493 - RNA, 19 nt, Homo sapiens
  misc_RNA (1)...(19): siRNA sense strand
gaacugguggugcuguaug

SEQ ID NO: 1821494 - RNA, 19 nt, Homo sapiens
  misc_RNA (1)...(19): siRNA sense strand
ucacggcgacuucggcuaa

SEQ ID NO: 1821495 - RNA, 19 nt, Homo sapiens
  misc_RNA (1)...(19): siRNA sense strand
gauggaagagguugaucaa

SEQ ID NO: 1821496 - RNA, 19 nt, Homo sapiens
  misc_RNA (1)...(19): siRNA sense strand
gagaaccggagauaucaga

SEQ ID NO: 1821497 - RNA, 19 nt, Homo sapiens
  misc_RNA (1)...(19): siRNA sense strand
gaaauaagaucaacaguga

SEQ ID NO: 1821498 - RNA, 19 nt, Homo sapiens
  misc_RNA (1)...(19): siRNA sense strand
gaaaugauaugaagaggaa

SEQ ID NO: 1821499 - RNA, 19 nt, Homo sapiens
  misc_RNA (1)...(19): siRNA sense strand
ggaagaggguaacacauua

SEQ ID NO: 1821500 - RNA, 19 nt, Homo sapiens
  misc_RNA (1)...(19): siRNA sense strand
gaagaucucuacaaugaaa

SEQ ID NO: 1821501 - RNA, 19 nt, Homo sapiens
  misc_RNA (1)...(19): siRNA sense strand
cagaagaucucuacaauga

SEQ ID NO: 1821502 - RNA, 19 nt, Homo sapiens
  misc_RNA (1)...(19): siRNA sense strand
cgaaauggccgcucuauua

SEQ ID NO: 1821503 - RNA, 19 nt, Homo sapiens
  misc_RNA (1)...(19): siRNA sense strand
gaaaugaaguggcagaaga

SEQ ID NO: 1821504 - RNA, 19 nt, Homo sapiens
  misc_RNA (1)...(19): siRNA sense strand
agaaauggauccagaaaua

SEQ ID NO: 1821505 - RNA, 19 nt, Homo sapiens
  misc_RNA (1)...(19): siRNA sense strand
ccacaaagaucacaauuca

SEQ ID NO: 1821506 - RNA, 19 nt, Homo sapiens
  misc_RNA (1)...(19): siRNA sense strand
gggaagcgaugcaagaaua

SEQ ID NO: 1821507 - RNA, 19 nt, Homo sapiens
  misc_RNA (1)...(19): siRNA sense strand
acauagagcuucuugauaa

SEQ ID NO: 1821508 - RNA, 19 nt, Homo sapiens
  misc_RNA (1)...(19): siRNA sense strand
caaagaaacuaauggagaa

SEQ ID NO: 1821509 - RNA, 19 nt, Homo sapiens
  misc_RNA (1)...(19): siRNA sense strand
caccaaagcugacuuagaa

SEQ ID NO: 1821510 - RNA, 19 nt, Homo sapiens
  misc_RNA (1)...(19): siRNA sense strand
gaagagccauucaaauaug

SEQ ID NO: 1821511 - RNA, 19 nt, Homo sapiens
  misc_RNA (1)...(19): siRNA sense strand
uaaagaaggugcaucagaa

SEQ ID NO: 1821512 - RNA, 19 nt, Homo sapiens
  misc_RNA (1)...(19): siRNA sense strand
gaagagacuuugcugaaug

SEQ ID NO: 1821513 - RNA, 19 nt, Homo sapiens
  misc_RNA (1)...(19): siRNA sense strand
gaaauuagcgagagaguug

SEQ ID NO: 1821514 - RNA, 19 nt, Homo sapiens
  misc_RNA (1)...(19): siRNA sense strand
gaacaaggaaguaaaguga

SEQ ID NO: 1821515 - RNA, 19 nt, Homo sapiens
  misc_RNA (1)...(19): siRNA sense strand
gaucaacagugacaguuaa

SEQ ID NO: 1821516 - RNA, 19 nt, Homo sapiens
  misc_RNA (1)...(19): siRNA sense strand
agagaggccuguuauguua

SEQ ID NO: 1821517 - RNA, 19 nt, Homo sapiens
  misc_RNA (1)...(19): siRNA sense strand
gaaucuagcccauacauuu

SEQ ID NO: 1821518 - RNA, 19 nt, Homo sapiens
  misc_RNA (1)...(19): siRNA sense strand
gcagaaagccucaguggaa

SEQ ID NO: 1821519 - RNA, 19 nt, Homo sapiens
  misc_RNA (1)...(19): siRNA sense strand
gaauaacccugcacuguuc

SEQ ID NO: 1821520 - RNA, 19 nt, Homo sapiens
  misc_RNA (1)...(19): siRNA sense strand
gaugaagccuuaaaguauu

SEQ ID NO: 1821521 - RNA, 19 nt, Homo sapiens
  misc_RNA (1)...(19): siRNA sense strand
caaagaaaccucagauuga

SEQ ID NO: 1821522 - RNA, 19 nt, Homo sapiens
  misc_RNA (1)...(19): siRNA sense strand
gagauuaccugcuuuacug

SEQ ID NO: 1821523 - RNA, 19 nt, Homo sapiens
  misc_RNA (1)...(19): siRNA sense strand
gaacuugucaucgauguua

SEQ ID NO: 1821524 - RNA, 19 nt, Homo sapiens
  misc_RNA (1)...(19): siRNA sense strand
caaggaaccucauggcaaa

SEQ ID NO: 1821525 - RNA, 19 nt, Homo sapiens
  misc_RNA (1)...(19): siRNA sense strand
ggacguuguuagauuauuu

SEQ ID NO: 1821526 - RNA, 19 nt, Homo sapiens
  misc_RNA (1)...(19): siRNA sense strand
gguaacacauuaagaaaga

SEQ ID NO: 1821527 - RNA, 19 nt, Homo sapiens
  misc_RNA (1)...(19): siRNA sense strand
guuaaucacuguuauguug

SEQ ID NO: 1821528 - RNA, 19 nt, Homo sapiens
  misc_RNA (1)...(19): siRNA sense strand
gaucucauauucuuuguug

SEQ ID NO: 1821529 - RNA, 19 nt, Homo sapiens
  misc_RNA (1)...(19): siRNA sense strand
gcaacaagagcaauaagua

SEQ ID NO: 1821530 - RNA, 19 nt, Homo sapiens
  misc_RNA (1)...(19): siRNA sense strand
gaagaaguuuggcucuauu

SEQ ID NO: 1821531 - RNA, 19 nt, Homo sapiens
  misc_RNA (1)...(19): siRNA sense strand
gagaugaagccuuaaagua

SEQ ID NO: 1821532 - RNA, 19 nt, Homo sapiens
  misc_RNA (1)...(19): siRNA sense strand
gaacaaugcaucuaaacuu

SEQ ID NO: 1821533 - RNA, 19 nt, Homo sapiens
  misc_RNA (1)...(19): siRNA sense strand
gcacagguauuuggaauuc

SEQ ID NO: 1821534 - RNA, 19 nt, Homo sapiens
  misc_RNA (1)...(19): siRNA sense strand
gcaauggguuggagacuau

SEQ ID NO: 1821535 - RNA, 19 nt, Homo sapiens
  misc_RNA (1)...(19): siRNA sense strand
gugaagaaaugccaggaua

SEQ ID NO: 1821536 - RNA, 19 nt, Homo sapiens
  misc_RNA (1)...(19): siRNA sense strand
gauaugcacccuacaagua

SEQ ID NO: 1821537 - RNA, 19 nt, Homo sapiens
  misc_RNA (1)...(19): siRNA sense strand
ggaaugaaagggcaauuaa

SEQ ID NO: 1821538 - RNA, 19 nt, Homo sapiens
  misc_RNA (1)...(19): siRNA sense strand
aaacuaagguggucucaau

SEQ ID NO: 1821539 - RNA, 19 nt, Homo sapiens
  misc_RNA (1)...(19): siRNA sense strand
gaaauacacaaacacagua

SEQ ID NO: 1821540 - RNA, 19 nt, Homo sapiens
  misc_RNA (1)...(19): siRNA sense strand
gaaagauacuucugaaucg

SEQ ID NO: 1821541 - RNA, 19 nt, Homo sapiens
  misc_RNA (1)...(19): siRNA sense strand
gggagaagaucauguauac

SEQ ID NO: 1821542 - RNA, 19 nt, Homo sapiens
  misc_RNA (1)...(19): siRNA sense strand
caaccacacugcacagauu

SEQ ID NO: 1821543 - RNA, 19 nt, Homo sapiens
  misc_RNA (1)...(19): siRNA sense strand
cauaaacccucuugguaaa

SEQ ID NO: 1821544 - RNA, 19 nt, Homo sapiens
  misc_RNA (1)...(19): siRNA sense strand
gagaagaucauguauacuu

SEQ ID NO: 1821545 - RNA, 19 nt, Homo sapiens
  misc_RNA (1)...(19): siRNA sense strand
guaugaagauggaauugaa

SEQ ID NO: 1821546 - RNA, 19 nt, Homo sapiens
  misc_RNA (1)...(19): siRNA sense strand
ugaaagggaugaacaagga

SEQ ID NO: 1821547 - RNA, 19 nt, Homo sapiens
  misc_RNA (1)...(19): siRNA sense strand
gagauuguccggcaugaua

SEQ ID NO: 1821548 - RNA, 19 nt, Homo sapiens
  misc_RNA (1)...(19): siRNA sense strand
ugacagaguugauaaaugg

SEQ ID NO: 1821549 - RNA, 19 nt, Homo sapiens
  misc_RNA (1)...(19): siRNA sense strand
ugacauugaugaugaagaa

SEQ ID NO: 1821550 - RNA, 19 nt, Homo sapiens
  misc_RNA (1)...(19): siRNA sense strand
cagauuggcuaugauauuu

SEQ ID NO: 1821551 - RNA, 19 nt, Homo sapiens
  misc_RNA (1)...(19): siRNA sense strand
ggacaagauucagauaaga

SEQ ID NO: 1821552 - RNA, 19 nt, Homo sapiens
  misc_RNA (1)...(19): siRNA sense strand
caaagcauauuguguauac

SEQ ID NO: 1821553 - RNA, 19 nt, Homo sapiens
  misc_RNA (1)...(19): siRNA sense strand
gaucauguauacuuugguu

SEQ ID NO: 1821554 - RNA, 19 nt, Homo sapiens
  misc_RNA (1)...(19): siRNA sense strand
gaaauggccgcucuauuau

SEQ ID NO: 1821555 - RNA, 19 nt, Homo sapiens
  misc_RNA (1)...(19): siRNA sense strand
ggauauggccuuucucuau

SEQ ID NO: 1821556 - RNA, 19 nt, Homo sapiens
  misc_RNA (1)...(19): siRNA sense strand
gaagaaugccuauaaccaa

SEQ ID NO: 1821557 - RNA, 19 nt, Homo sapiens
  misc_RNA (1)...(19): siRNA sense strand
gugaagacgugcugauauu

SEQ ID NO: 1821558 - RNA, 19 nt, Homo sapiens
  misc_RNA (1)...(19): siRNA sense strand
gaaacaaugugaugagaac

SEQ ID NO: 1821559 - RNA, 19 nt, Homo sapiens
  misc_RNA (1)...(19): siRNA sense strand
gcacaauaacucagaauga

SEQ ID NO: 1821560 - RNA, 19 nt, Homo sapiens
  misc_RNA (1)...(19): siRNA sense strand
gaagagaggccuguuaugu

SEQ ID NO: 1821561 - RNA, 19 nt, Homo sapiens
  misc_RNA (1)...(19): siRNA sense strand
caacaucaacgauuacuga

SEQ ID NO: 1821562 - RNA, 19 nt, Homo sapiens
  misc_RNA (1)...(19): siRNA sense strand
ggaagagacuuugcugaau

SEQ ID NO: 1821563 - RNA, 19 nt, Homo sapiens
  misc_RNA (1)...(19): siRNA sense strand
gcagcuaaucuuuguaaua

SEQ ID NO: 1821564 - RNA, 19 nt, Homo sapiens
  misc_RNA (1)...(19): siRNA sense strand
gacauaaacccucuuggua

SEQ ID NO: 1821565 - RNA, 19 nt, Homo sapiens
  misc_RNA (1)...(19): siRNA sense strand
gugagcggcuucuuuaauu

SEQ ID NO: 1821566 - RNA, 19 nt, Homo sapiens
  misc_RNA (1)...(19): siRNA sense strand
cucaagaacucaucuguaa

SEQ ID NO: 1821567 - RNA, 19 nt, Homo sapiens
  misc_RNA (1)...(19): siRNA sense strand
ggaauaacccugcacuguu

SEQ ID NO: 1821568 - RNA, 19 nt, Homo sapiens
  misc_RNA (1)...(19): siRNA sense strand
uaaacccucuugguaaaua

SEQ ID NO: 1821569 - RNA, 19 nt, Homo sapiens
  misc_RNA (1)...(19): siRNA sense strand
gaaaugccaggauauggua

SEQ ID NO: 1821570 - RNA, 19 nt, Homo sapiens
  misc_RNA (1)...(19): siRNA sense strand
ggacagaaauccccacaaa

SEQ ID NO: 1821571 - RNA, 19 nt, Homo sapiens
  misc_RNA (1)...(19): siRNA sense strand
gaaaugaagggucuugguu

SEQ ID NO: 1821572 - RNA, 19 nt, Homo sapiens
  misc_RNA (1)...(19): siRNA sense strand
aguaagagauucaacacua

SEQ ID NO: 1821573 - RNA, 19 nt, Homo sapiens
  misc_RNA (1)...(19): siRNA sense strand
caucagaacuugucaucga

SEQ ID NO: 1821574 - RNA, 19 nt, Homo sapiens
  misc_RNA (1)...(19): siRNA sense strand
aaauagaggugguucauca

SEQ ID NO: 1821575 - RNA, 19 nt, Homo sapiens
  misc_RNA (1)...(19): siRNA sense strand
gaacacuucuggcuauuuu

SEQ ID NO: 1821576 - RNA, 19 nt, Homo sapiens
  misc_RNA (1)...(19): siRNA sense strand
uuaaagacccaacagaaua

SEQ ID NO: 1821577 - RNA, 19 nt, Homo sapiens
  misc_RNA (1)...(19): siRNA sense strand
gaaggugcaucagaacuug

SEQ ID NO: 1821578 - RNA, 19 nt, Homo sapiens
  misc_RNA (1)...(19): siRNA sense strand
gaacaaagaaaccucagau

SEQ ID NO: 1821579 - RNA, 19 nt, Homo sapiens
  misc_RNA (1)...(19): siRNA sense strand
gagaagagcagcaacuaug

SEQ ID NO: 1821580 - RNA, 19 nt, Homo sapiens
  misc_RNA (1)...(19): siRNA sense strand
cauaugauguguucagaga

SEQ ID NO: 1821581 - RNA, 19 nt, Homo sapiens
  misc_RNA (1)...(19): siRNA sense strand
aaugaaggcugcucagaaa

SEQ ID NO: 1821582 - RNA, 19 nt, Homo sapiens
  misc_RNA (1)...(19): siRNA sense strand
gagaaauguuagagaagaa

SEQ ID NO: 1821583 - RNA, 19 nt, Homo sapiens
  misc_RNA (1)...(19): siRNA sense strand
gaacuuuguuaaucacugu

SEQ ID NO: 1821584 - RNA, 19 nt, Homo sapiens
  misc_RNA (1)...(19): siRNA sense strand
gaagcgagggugacaauau

SEQ ID NO: 1821585 - RNA, 19 nt, Homo sapiens
  misc_RNA (1)...(19): siRNA sense strand
acacuggaccugaaaguua

SEQ ID NO: 1821586 - RNA, 19 nt, Homo sapiens
  misc_RNA (1)...(19): siRNA sense strand
gaaggcugcucagaaagaa

SEQ ID NO: 1821587 - RNA, 19 nt, Homo sapiens
  misc_RNA (1)...(19): siRNA sense strand
gaaugaaggcugcucagaa

SEQ ID NO: 1821588 - RNA, 19 nt, Homo sapiens
  misc_RNA (1)...(19): siRNA sense strand
gaugcaggcugaauucuca

SEQ ID NO: 1821589 - RNA, 19 nt, Homo sapiens
  misc_RNA (1)...(19): siRNA sense strand
agaaacauaucacagcaaa

SEQ ID NO: 1821590 - RNA, 19 nt, Homo sapiens
  misc_RNA (1)...(19): siRNA sense strand
gcagaggaaguaacaauga

SEQ ID NO: 1821591 - RNA, 19 nt, Homo sapiens
  misc_RNA (1)...(19): siRNA sense strand
gauagagcaucauuuccaa

SEQ ID NO: 1821592 - RNA, 19 nt, Homo sapiens
  misc_RNA (1)...(19): siRNA sense strand
gaggaaauccacagaauca

SEQ ID NO: 1821593 - RNA, 19 nt, Homo sapiens
  misc_RNA (1)...(19): siRNA sense strand
ugaaagaaguuguaaacca

SEQ ID NO: 1821594 - RNA, 19 nt, Homo sapiens
  misc_RNA (1)...(19): siRNA sense strand
gaagaggguaacacauuaa

SEQ ID NO: 1821595 - RNA, 19 nt, Homo sapiens
  misc_RNA (1)...(19): siRNA sense strand
ggagaugaagguacacuuu

SEQ ID NO: 1821596 - RNA, 19 nt, Homo sapiens
  misc_RNA (1)...(19): siRNA sense strand
cgaaugagaguaagagauu

SEQ ID NO: 1821597 - RNA, 19 nt, Homo sapiens
  misc_RNA (1)...(19): siRNA sense strand
gaacaugacuccagaagaa

SEQ ID NO: 1821598 - RNA, 19 nt, Homo sapiens
  misc_RNA (1)...(19): siRNA sense strand
gcagauaaauugaacauga

SEQ ID NO: 1821599 - RNA, 19 nt, Homo sapiens
  misc_RNA (1)...(19): siRNA sense strand
gcugaaagguggauuguaa

SEQ ID NO: 1821600 - RNA, 19 nt, Homo sapiens
  misc_RNA (1)...(19): siRNA sense strand
uaaauuaggucaugugguu

SEQ ID NO: 1821601 - RNA, 19 nt, Homo sapiens
  misc_RNA (1)...(19): siRNA sense strand
gcaggaauauuuagauaca

SEQ ID NO: 1821602 - RNA, 19 nt, Homo sapiens
  misc_RNA (1)...(19): siRNA sense strand
gcuggccucugaaaucuua

SEQ ID NO: 1821603 - RNA, 19 nt, Homo sapiens
  misc_RNA (1)...(19): siRNA sense strand
gagaagaaacuuaaucaga

SEQ ID NO: 1821604 - RNA, 19 nt, Homo sapiens
  misc_RNA (1)...(19): siRNA sense strand
ggaagaccuuacacgguua

SEQ ID NO: 1821605 - RNA, 19 nt, Homo sapiens
  misc_RNA (1)...(19): siRNA sense strand
aaucagugcuugugaauga

SEQ ID NO: 1821606 - RNA, 19 nt, Homo sapiens
  misc_RNA (1)...(19): siRNA sense strand
guaggaugcucuuugacua

SEQ ID NO: 1821607 - RNA, 19 nt, Homo sapiens
  misc_RNA (1)...(19): siRNA sense strand
uuauugaccucuuccuuua

SEQ ID NO: 1821608 - RNA, 19 nt, Homo sapiens
  misc_RNA (1)...(19): siRNA sense strand
cuacagcagucauaacaaa

SEQ ID NO: 1821609 - RNA, 19 nt, Homo sapiens
  misc_RNA (1)...(19): siRNA sense strand
aaaggucgcgauaauauua

SEQ ID NO: 1821610 - RNA, 19 nt, Homo sapiens
  misc_RNA (1)...(19): siRNA sense strand
gaaacagaaccaauuguga

SEQ ID NO: 1821611 - RNA, 19 nt, Homo sapiens
  misc_RNA (1)...(19): siRNA sense strand
ccaugaauauugagaagaa

SEQ ID NO: 1821612 - RNA, 19 nt, Homo sapiens
  misc_RNA (1)...(19): siRNA sense strand
caacagauagaaaugcuuu

SEQ ID NO: 1821613 - RNA, 19 nt, Homo sapiens
  misc_RNA (1)...(19): siRNA sense strand
gcagaaacagaaccaauug

SEQ ID NO: 1821614 - RNA, 19 nt, Homo sapiens
  misc_RNA (1)...(19): siRNA sense strand
gcccgucucuucauauuug

SEQ ID NO: 1821615 - RNA, 19 nt, Homo sapiens
  misc_RNA (1)...(19): siRNA sense strand
ccaaaggucgcgauaauau

SEQ ID NO: 1821616 - RNA, 19 nt, Homo sapiens
  misc_RNA (1)...(19): siRNA sense strand
caacaggagucuuacacau

SEQ ID NO: 1821617 - RNA, 19 nt, Homo sapiens
  misc_RNA (1)...(19): siRNA sense strand
uggcuugucuugaggauuu

SEQ ID NO: 1821618 - RNA, 19 nt, Homo sapiens
  misc_RNA (1)...(19): siRNA sense strand
gauacacucuacagauaug

SEQ ID NO: 1821619 - RNA, 19 nt, Homo sapiens
  misc_RNA (1)...(19): siRNA sense strand
ggaaagcuggccucugaaa

SEQ ID NO: 1821620 - RNA, 19 nt, Homo sapiens
  misc_RNA (1)...(19): siRNA sense strand
cagagaacauggcucauuc

SEQ ID NO: 1821621 - RNA, 19 nt, Homo sapiens
  misc_RNA (1)...(19): siRNA sense strand
gcagagaacauggcucauu

SEQ ID NO: 1821622 - RNA, 19 nt, Homo sapiens
  misc_RNA (1)...(19): siRNA sense strand
ggaucggcaucuagucuuu

SEQ ID NO: 1821623 - RNA, 19 nt, Homo sapiens
  misc_RNA (1)...(19): siRNA sense strand
acaggagucuuacacauau

SEQ ID NO: 1821624 - RNA, 19 nt, Homo sapiens
  misc_RNA (1)...(19): siRNA sense strand
gaaagguggauuguaaauu

SEQ ID NO: 1821625 - RNA, 19 nt, Homo sapiens
  misc_RNA (1)...(19): siRNA sense strand
aaacagaaccaauugugaa

SEQ ID NO: 1821626 - RNA, 19 nt, Homo sapiens
  misc_RNA (1)...(19): siRNA sense strand
gaauuucucucuguaaagg

SEQ ID NO: 1821627 - RNA, 19 nt, Homo sapiens
  misc_RNA (1)...(19): siRNA sense strand
gagcagcagaauaucuuua

SEQ ID NO: 1821628 - RNA, 19 nt, Homo sapiens
  misc_RNA (1)...(19): siRNA sense strand
gaagauguuugaagaucca

SEQ ID NO: 1821629 - RNA, 19 nt, Homo sapiens
  misc_RNA (1)...(19): siRNA sense strand
ggggaaagcuggccucuga

SEQ ID NO: 1821630 - RNA, 19 nt, Homo sapiens
  misc_RNA (1)...(19): siRNA sense strand
uaucagccacaauaucuua

SEQ ID NO: 1821631 - RNA, 19 nt, Homo sapiens
  misc_RNA (1)...(19): siRNA sense strand
aauuggaccuucuuaguga

SEQ ID NO: 1821632 - RNA, 19 nt, Homo sapiens
  misc_RNA (1)...(19): siRNA sense strand
aggcaggaauauuuagaua

SEQ ID NO: 1821633 - RNA, 19 nt, Homo sapiens
  misc_RNA (1)...(19): siRNA sense strand
cauguuggcagauaaauug

SEQ ID NO: 1821634 - RNA, 19 nt, Homo sapiens
  misc_RNA (1)...(19): siRNA sense strand
gaagauccagaaacuacaa

SEQ ID NO: 1821635 - RNA, 19 nt, Homo sapiens
  misc_RNA (1)...(19): siRNA sense strand
ggucagaggcuccuaacug

SEQ ID NO: 1821636 - RNA, 19 nt, Homo sapiens
  misc_RNA (1)...(19): siRNA sense strand
ucacuggucucuguuuguu

SEQ ID NO: 1821637 - RNA, 19 nt, Homo sapiens
  misc_RNA (1)...(19): siRNA sense strand
guacgaaugugggaauuac

SEQ ID NO: 1821638 - RNA, 19 nt, Homo sapiens
  misc_RNA (1)...(19): siRNA sense strand
cuacagauaugcaaaauuc

SEQ ID NO: 1821639 - RNA, 19 nt, Homo sapiens
  misc_RNA (1)...(19): siRNA sense strand
gaaacagcuucaggcagaa

SEQ ID NO: 1821640 - RNA, 19 nt, Homo sapiens
  misc_RNA (1)...(19): siRNA sense strand
gugaaucagugcuugugaa

SEQ ID NO: 1821641 - RNA, 19 nt, Homo sapiens
  misc_RNA (1)...(19): siRNA sense strand
cagaaccaauugugaagau

SEQ ID NO: 1821642 - RNA, 19 nt, Homo sapiens
  misc_RNA (1)...(19): siRNA sense strand
augccaagauugauucuaa

SEQ ID NO: 1821643 - RNA, 19 nt, Homo sapiens
  misc_RNA (1)...(19): siRNA sense strand
gaaccaauugugaagaugu

SEQ ID NO: 1821644 - RNA, 19 nt, Homo sapiens
  misc_RNA (1)...(19): siRNA sense strand
ggcagaaacagaaccaauu

SEQ ID NO: 1821645 - RNA, 19 nt, Homo sapiens
  misc_RNA (1)...(19): siRNA sense strand
uaaauuggaccuucuuagu

SEQ ID NO: 1821646 - RNA, 19 nt, Homo sapiens
  misc_RNA (1)...(19): siRNA sense strand
gugaagauguuugaagauc

SEQ ID NO: 1821647 - RNA, 19 nt, Homo sapiens
  misc_RNA (1)...(19): siRNA sense strand
gaaacuacaaggcaaaugc

SEQ ID NO: 1821648 - RNA, 19 nt, Homo sapiens
  misc_RNA (1)...(19): siRNA sense strand
uaacauguuggcagauaaa

SEQ ID NO: 1821649 - RNA, 19 nt, Homo sapiens
  misc_RNA (1)...(19): siRNA sense strand
uaucagcauuaacauguug

SEQ ID NO: 1821650 - RNA, 19 nt, Homo sapiens
  misc_RNA (1)...(19): siRNA sense strand
caaaggucgcgauaauauu

SEQ ID NO: 1821651 - RNA, 19 nt, Homo sapiens
  misc_RNA (1)...(19): siRNA sense strand
ugauauuccucaugcuuug

SEQ ID NO: 1821652 - RNA, 19 nt, Homo sapiens
  misc_RNA (1)...(19): siRNA sense strand
gaugguaggaugcucuuug

SEQ ID NO: 1821653 - RNA, 19 nt, Homo sapiens
  misc_RNA (1)...(19): siRNA sense strand
gaaagcuggccucugaaau

SEQ ID NO: 1821654 - RNA, 19 nt, Homo sapiens
  misc_RNA (1)...(19): siRNA sense strand
aaaugcccgucucuucaua

SEQ ID NO: 1821655 - RNA, 19 nt, Homo sapiens
  misc_RNA (1)...(19): siRNA sense strand
gguaaauuggaccuucuua

SEQ ID NO: 1821656 - RNA, 19 nt, Homo sapiens
  misc_RNA (1)...(19): siRNA sense strand
auaaagacccaauuacaga

SEQ ID NO: 1821657 - RNA, 19 nt, Homo sapiens
  misc_RNA (1)...(19): siRNA sense strand
acacauucuucgcuauuug

SEQ ID NO: 1821658 - RNA, 19 nt, Homo sapiens
  misc_RNA (1)...(19): siRNA sense strand
gaagaccuuacacgguuaa

SEQ ID NO: 1821659 - RNA, 19 nt, Homo sapiens
  misc_RNA (1)...(19): siRNA sense strand
gaaaaugcccgucucuuca

SEQ ID NO: 1821660 - RNA, 19 nt, Homo sapiens
  misc_RNA (1)...(19): siRNA sense strand
ucaagauucuggcuucuac

SEQ ID NO: 1821661 - RNA, 19 nt, Homo sapiens
  misc_RNA (1)...(19): siRNA sense strand
gauguuggccaugaauauu

SEQ ID NO: 1821662 - RNA, 19 nt, Homo sapiens
  misc_RNA (1)...(19): siRNA sense strand
aagacuggaugccaagauu

SEQ ID NO: 1821663 - RNA, 19 nt, Homo sapiens
  misc_RNA (1)...(19): siRNA sense strand
uaaagacccaauuacagaa

SEQ ID NO: 1821664 - RNA, 19 nt, Homo sapiens
  misc_RNA (1)...(19): siRNA sense strand
gucaugugguuauggguaa

SEQ ID NO: 1821665 - RNA, 19 nt, Homo sapiens
  misc_RNA (1)...(19): siRNA sense strand
gaagcugaaagguggauug

SEQ ID NO: 1821666 - RNA, 19 nt, Homo sapiens
  misc_RNA (1)...(19): siRNA sense strand
guaucagcauuaacauguu

SEQ ID NO: 1821667 - RNA, 19 nt, Homo sapiens
  misc_RNA (1)...(19): siRNA sense strand
caaggcaaaugcagucaac

SEQ ID NO: 1821668 - RNA, 19 nt, Homo sapiens
  misc_RNA (1)...(19): siRNA sense strand
uuaacauguuggcagauaa

SEQ ID NO: 1821669 - RNA, 19 nt, Homo sapiens
  misc_RNA (1)...(19): siRNA sense strand
ugaaugacuucuucuuggu

SEQ ID NO: 1821670 - RNA, 19 nt, Homo sapiens
  misc_RNA (1)...(19): siRNA sense strand
gcugagggaaugugaauca

SEQ ID NO: 1821671 - RNA, 19 nt, Homo sapiens
  misc_RNA (1)...(19): siRNA sense strand
ccucugaaaucuuaaugca

SEQ ID NO: 1821672 - RNA, 19 nt, Homo sapiens
  misc_RNA (1)...(19): siRNA sense strand
cagccacaauaucuuaaug

SEQ ID NO: 1821673 - RNA, 19 nt, Homo sapiens
  misc_RNA (1)...(19): siRNA sense strand
uaacugggcaacucaagau

SEQ ID NO: 1821674 - RNA, 19 nt, Homo sapiens
  misc_RNA (1)...(19): siRNA sense strand
gcuugugaaugacuucuuc

SEQ ID NO: 1821675 - RNA, 19 nt, Homo sapiens
  misc_RNA (1)...(19): siRNA sense strand
cagcagucauaacaaacaa

SEQ ID NO: 1821676 - RNA, 19 nt, Homo sapiens
  misc_RNA (1)...(19): siRNA sense strand
ccacacauucuucgcuauu

SEQ ID NO: 1821677 - RNA, 19 nt, Homo sapiens
  misc_RNA (1)...(19): siRNA sense strand
auucuucgcuauuugacua

SEQ ID NO: 1821678 - RNA, 19 nt, Homo sapiens
  misc_RNA (1)...(19): siRNA sense strand
gcaggucagaggcuccuaa

SEQ ID NO: 1821679 - RNA, 19 nt, Homo sapiens
  misc_RNA (1)...(19): siRNA sense strand
gguagacuuugcuauggau

SEQ ID NO: 1821680 - RNA, 19 nt, Homo sapiens
  misc_RNA (1)...(19): siRNA sense strand
caggagucuuacacauaua

SEQ ID NO: 1821681 - RNA, 19 nt, Homo sapiens
  misc_RNA (1)...(19): siRNA sense strand
aacaggagucuuacacaua

SEQ ID NO: 1821682 - RNA, 19 nt, Homo sapiens
  misc_RNA (1)...(19): siRNA sense strand
gaaaugcuuuaaguucacu

SEQ ID NO: 1821683 - RNA, 19 nt, Homo sapiens
  misc_RNA (1)...(19): siRNA sense strand
ccaccaguguaucagcauu

SEQ ID NO: 1821684 - RNA, 19 nt, Homo sapiens
  misc_RNA (1)...(19): siRNA sense strand
ggaaugugaaucagugcuu

SEQ ID NO: 1821685 - RNA, 19 nt, Homo sapiens
  misc_RNA (1)...(19): siRNA sense strand
uuauucaacaggagucuua

SEQ ID NO: 1821686 - RNA, 19 nt, Homo sapiens
  misc_RNA (1)...(19): siRNA sense strand
cacacauucuucgcuauuu

SEQ ID NO: 1821687 - RNA, 19 nt, Homo sapiens
  misc_RNA (1)...(19): siRNA sense strand
ucuuuccgcuucuugaauu

SEQ ID NO: 1821688 - RNA, 19 nt, Homo sapiens
  misc_RNA (1)...(19): siRNA sense strand
gccacaauaucuuaaugca

SEQ ID NO: 1821689 - RNA, 19 nt, Homo sapiens
  misc_RNA (1)...(19): siRNA sense strand
ggccaugaauauugagaag

SEQ ID NO: 1821690 - RNA, 19 nt, Homo sapiens
  misc_RNA (1)...(19): siRNA sense strand
auuaacauguuggcagaua

SEQ ID NO: 1821691 - RNA, 19 nt, Homo sapiens
  misc_RNA (1)...(19): siRNA sense strand
caugguagacuuugcuaug

SEQ ID NO: 1821692 - RNA, 19 nt, Homo sapiens
  misc_RNA (1)...(19): siRNA sense strand
ccagaaacuacaaggcaaa

SEQ ID NO: 1821693 - RNA, 19 nt, Homo sapiens
  misc_RNA (1)...(19): siRNA sense strand
guaaauuggaccuucuuag

SEQ ID NO: 1821694 - RNA, 19 nt, Homo sapiens
  misc_RNA (1)...(19): siRNA sense strand
ucugugaguucuccacuuc

SEQ ID NO: 1821695 - RNA, 19 nt, Homo sapiens
  misc_RNA (1)...(19): siRNA sense strand
aaagcuggccucugaaauc

SEQ ID NO: 1821696 - RNA, 19 nt, Homo sapiens
  misc_RNA (1)...(19): siRNA sense strand
cagauaaauugaacaugac

SEQ ID NO: 1821697 - RNA, 19 nt, Homo sapiens
  misc_RNA (1)...(19): siRNA sense strand
ggacaagaauucaguauaa

SEQ ID NO: 1821698 - RNA, 19 nt, Homo sapiens
  misc_RNA (1)...(19): siRNA sense strand
ugacaaacaugaacaagaa

SEQ ID NO: 1821699 - RNA, 19 nt, Homo sapiens
  misc_RNA (1)...(19): siRNA sense strand
ggagaacuauggagcaauu

SEQ ID NO: 1821700 - RNA, 19 nt, Homo sapiens
  misc_RNA (1)...(19): siRNA sense strand
acaagcagcucaagacuuu

SEQ ID NO: 1821701 - RNA, 19 nt, Homo sapiens
  misc_RNA (1)...(19): siRNA sense strand
gcgcauugcugacaacaaa

SEQ ID NO: 1821702 - RNA, 19 nt, Homo sapiens
  misc_RNA (1)...(19): siRNA sense strand
ggucaacacugccaaugaa

SEQ ID NO: 1821703 - RNA, 19 nt, Homo sapiens
  misc_RNA (1)...(19): siRNA sense strand
gaauugagaucuugaacca

SEQ ID NO: 1821704 - RNA, 19 nt, Homo sapiens
  misc_RNA (1)...(19): siRNA sense strand
cagcaaccaugccucaaua

SEQ ID NO: 1821705 - RNA, 19 nt, Homo sapiens
  misc_RNA (1)...(19): siRNA sense strand
gaaauugucaucaaaguca

SEQ ID NO: 1821706 - RNA, 19 nt, Homo sapiens
  misc_RNA (1)...(19): siRNA sense strand
ccaagcagcuggugcauca

SEQ ID NO: 1821707 - RNA, 19 nt, Homo sapiens
  misc_RNA (1)...(19): siRNA sense strand
ggacacagacccucacuuc

SEQ ID NO: 1821708 - RNA, 19 nt, Homo sapiens
  misc_RNA (1)...(19): siRNA sense strand
ggacuacuuugaccugguu

SEQ ID NO: 1821709 - RNA, 19 nt, Homo sapiens
  misc_RNA (1)...(19): siRNA sense strand
ggaagugacuccucagaac

SEQ ID NO: 1821710 - RNA, 19 nt, Homo sapiens
  misc_RNA (1)...(19): siRNA sense strand
gauggugccuacacugauu

SEQ ID NO: 1821711 - RNA, 19 nt, Homo sapiens
  misc_RNA (1)...(19): siRNA sense strand
aaagucaacugcaaaguca

SEQ ID NO: 1821712 - RNA, 19 nt, Homo sapiens
  misc_RNA (1)...(19): siRNA sense strand
gaacuggcagcccaaacua

SEQ ID NO: 1821713 - RNA, 19 nt, Homo sapiens
  misc_RNA (1)...(19): siRNA sense strand
cacaugcucuacauccuua

SEQ ID NO: 1821714 - RNA, 19 nt, Homo sapiens
  misc_RNA (1)...(19): siRNA sense strand
caauguggacuuuaacuuu

SEQ ID NO: 1821715 - RNA, 19 nt, Homo sapiens
  misc_RNA (1)...(19): siRNA sense strand
ccacuuugcccacuucuuu

SEQ ID NO: 1821716 - RNA, 19 nt, Homo sapiens
  misc_RNA (1)...(19): siRNA sense strand
cguuucagcugacuuauga

SEQ ID NO: 1821717 - RNA, 19 nt, Homo sapiens
  misc_RNA (1)...(19): siRNA sense strand
gaaagucaacugcaaaguc

SEQ ID NO: 1821718 - RNA, 19 nt, Homo sapiens
  misc_RNA (1)...(19): siRNA sense strand
uaaccugccuaguggauga

SEQ ID NO: 1821719 - RNA, 19 nt, Homo sapiens
  misc_RNA (1)...(19): siRNA sense strand
gcagauggaaacgcauuua

SEQ ID NO: 1821720 - RNA, 19 nt, Homo sapiens
  misc_RNA (1)...(19): siRNA sense strand
gagaaaccauaugcaguau

SEQ ID NO: 1821721 - RNA, 19 nt, Homo sapiens
  misc_RNA (1)...(19): siRNA sense strand
agacagcauucaucaguga

SEQ ID NO: 1821722 - RNA, 19 nt, Homo sapiens
  misc_RNA (1)...(19): siRNA sense strand
agagaaaccauaugcagua

SEQ ID NO: 1821723 - RNA, 19 nt, Homo sapiens
  misc_RNA (1)...(19): siRNA sense strand
gaaccaccauaaacaguac

SEQ ID NO: 1821724 - RNA, 19 nt, Homo sapiens
  misc_RNA (1)...(19): siRNA sense strand
aggaagugcugaagagaaa

SEQ ID NO: 1821725 - RNA, 19 nt, Homo sapiens
  misc_RNA (1)...(19): siRNA sense strand
cuacgaaggcucagagauu

SEQ ID NO: 1821726 - RNA, 19 nt, Homo sapiens
  misc_RNA (1)...(19): siRNA sense strand
ccucaauacucaucauguu

SEQ ID NO: 1821727 - RNA, 19 nt, Homo sapiens
  misc_RNA (1)...(19): siRNA sense strand
gggacaagaauucaguaua

SEQ ID NO: 1821728 - RNA, 19 nt, Homo sapiens
  misc_RNA (1)...(19): siRNA sense strand
caagacagcauucaucagu

SEQ ID NO: 1821729 - RNA, 19 nt, Homo sapiens
  misc_RNA (1)...(19): siRNA sense strand
ccacggacuuucaguugga

SEQ ID NO: 1821730 - RNA, 19 nt, Homo sapiens
  misc_RNA (1)...(19): siRNA sense strand
ucacguuucagcugacuua

SEQ ID NO: 1821731 - RNA, 19 nt, Homo sapiens
  misc_RNA (1)...(19): siRNA sense strand
ucagcugacuuaugaggaa

SEQ ID NO: 1821732 - RNA, 19 nt, Homo sapiens
  misc_RNA (1)...(19): siRNA sense strand
gaagugacuccucagaaca

SEQ ID NO: 1821733 - RNA, 19 nt, Homo sapiens
  misc_RNA (1)...(19): siRNA sense strand
aaccaugccucaauacuca

SEQ ID NO: 1821734 - RNA, 19 nt, Homo sapiens
  misc_RNA (1)...(19): siRNA sense strand
gggcugcuguugugcaugu

SEQ ID NO: 1821735 - RNA, 19 nt, Homo sapiens
  misc_RNA (1)...(19): siRNA sense strand
gaggaagugcugaagagaa

SEQ ID NO: 1821736 - RNA, 19 nt, Homo sapiens
  misc_RNA (1)...(19): siRNA sense strand
gcugguggauguggauuug

SEQ ID NO: 1821737 - RNA, 19 nt, Homo sapiens
  misc_RNA (1)...(19): siRNA sense strand
gaaagccucccagaacuca

SEQ ID NO: 1821738 - RNA, 19 nt, Homo sapiens
  misc_RNA (1)...(19): siRNA sense strand
agagcaaggucacguuuca

SEQ ID NO: 1821739 - RNA, 19 nt, Homo sapiens
  misc_RNA (1)...(19): siRNA sense strand
uacgaaggcucagagauug

SEQ ID NO: 1821740 - RNA, 19 nt, Homo sapiens
  misc_RNA (1)...(19): siRNA sense strand
guucccaaauccucaagaa

SEQ ID NO: 1821741 - RNA, 19 nt, Homo sapiens
  misc_RNA (1)...(19): siRNA sense strand
ccugguaucucuccucauc

SEQ ID NO: 1821742 - RNA, 19 nt, Homo sapiens
  misc_RNA (1)...(19): siRNA sense strand
aacacaggcuucucaguga

SEQ ID NO: 1821743 - RNA, 19 nt, Homo sapiens
  misc_RNA (1)...(19): siRNA sense strand
gaaucuacgaggaccauga

SEQ ID NO: 1821744 - RNA, 19 nt, Homo sapiens
  misc_RNA (1)...(19): siRNA sense strand
gaggacacccugugcuuca

SEQ ID NO: 1821745 - RNA, 19 nt, Homo sapiens
  misc_RNA (1)...(19): siRNA sense strand
ggaaccugguggugucugu

SEQ ID NO: 1821746 - RNA, 19 nt, Homo sapiens
  misc_RNA (1)...(19): siRNA sense strand
gauggaaacgcauuuaucg

SEQ ID NO: 1821747 - RNA, 19 nt, Homo sapiens
  misc_RNA (1)...(19): siRNA sense strand
gugccuacacugauuauau

SEQ ID NO: 1821748 - RNA, 19 nt, Homo sapiens
  misc_RNA (1)...(19): siRNA sense strand
gagguguccugcugguuca

SEQ ID NO: 1821749 - RNA, 19 nt, Homo sapiens
  misc_RNA (1)...(19): siRNA sense strand
ucuaugugcuggacaguca

SEQ ID NO: 1821750 - RNA, 19 nt, Homo sapiens
  misc_RNA (1)...(19): siRNA sense strand
caguauaaccugccuagug

SEQ ID NO: 1821751 - RNA, 19 nt, Homo sapiens
  misc_RNA (1)...(19): siRNA sense strand
ggauguggauuugcaguac

SEQ ID NO: 1821752 - RNA, 19 nt, Homo sapiens
  misc_RNA (1)...(19): siRNA sense strand
aauguggacuuuaacuuuc

SEQ ID NO: 1821753 - RNA, 19 nt, Homo sapiens
  misc_RNA (1)...(19): siRNA sense strand
uaaccacuuugcccacuuc

SEQ ID NO: 1821754 - RNA, 19 nt, Homo sapiens
  misc_RNA (1)...(19): siRNA sense strand
gugcugaagagaaaccaua

SEQ ID NO: 1821755 - RNA, 19 nt, Homo sapiens
  misc_RNA (1)...(19): siRNA sense strand
gcagguucccgcucuacaa

SEQ ID NO: 1821756 - RNA, 19 nt, Homo sapiens
  misc_RNA (1)...(19): siRNA sense strand
ggacagcucauuggcaaca

SEQ ID NO: 1821757 - RNA, 19 nt, Homo sapiens
  misc_RNA (1)...(19): siRNA sense strand
cacagacccucacuucauc

SEQ ID NO: 1821758 - RNA, 19 nt, Homo sapiens
  misc_RNA (1)...(19): siRNA sense strand
gacaagaauucaguauaac

SEQ ID NO: 1821759 - RNA, 19 nt, Homo sapiens
  misc_RNA (1)...(19): siRNA sense strand
ccggaaagcagcuaucuca

SEQ ID NO: 1821760 - RNA, 19 nt, Homo sapiens
  misc_RNA (1)...(19): siRNA sense strand
gcugguucauucacaacaa

SEQ ID NO: 1821761 - RNA, 19 nt, Homo sapiens
  misc_RNA (1)...(19): siRNA sense strand
acacaggcuucucagugaa

SEQ ID NO: 1821762 - RNA, 19 nt, Homo sapiens
  misc_RNA (1)...(19): siRNA sense strand
ccauaaacaguacuacgaa

SEQ ID NO: 1821763 - RNA, 19 nt, Homo sapiens
  misc_RNA (1)...(19): siRNA sense strand
ggagggacaagaauucagu

SEQ ID NO: 1821764 - RNA, 19 nt, Homo sapiens
  misc_RNA (1)...(19): siRNA sense strand
ggacuuccugggcuucuau

SEQ ID NO: 1821765 - RNA, 19 nt, Homo sapiens
  misc_RNA (1)...(19): siRNA sense strand
acacagacccucacuucau

SEQ ID NO: 1821766 - RNA, 19 nt, Homo sapiens
  misc_RNA (1)...(19): siRNA sense strand
ggaacuggcagcccaaacu

SEQ ID NO: 1821767 - RNA, 19 nt, Homo sapiens
  misc_RNA (1)...(19): siRNA sense strand
aggaggagaugaagaaacu

SEQ ID NO: 1821768 - RNA, 19 nt, Homo sapiens
  misc_RNA (1)...(19): siRNA sense strand
ugacccagaaccaccauaa

SEQ ID NO: 1821769 - RNA, 19 nt, Homo sapiens
  misc_RNA (1)...(19): siRNA sense strand
caggaaagccucccagaac

SEQ ID NO: 1821770 - RNA, 19 nt, Homo sapiens
  misc_RNA (1)...(19): siRNA sense strand
ccagagcaaggucacguuu

SEQ ID NO: 1821771 - RNA, 19 nt, Homo sapiens
  misc_RNA (1)...(19): siRNA sense strand
gggccuaccucaccaucca

SEQ ID NO: 1821772 - RNA, 19 nt, Homo sapiens
  misc_RNA (1)...(19): siRNA sense strand
agaaccaccauaaacagua

SEQ ID NO: 1821773 - RNA, 19 nt, Homo sapiens
  misc_RNA (1)...(19): siRNA sense strand
cccaaacuaucaagaaguc

SEQ ID NO: 1821774 - RNA, 19 nt, Homo sapiens
  misc_RNA (1)...(19): siRNA sense strand
cagaggauucuccgccuuu

SEQ ID NO: 1821775 - RNA, 19 nt, Homo sapiens
  misc_RNA (1)...(19): siRNA sense strand
ggaaagccucccagaacuc

SEQ ID NO: 1821776 - RNA, 19 nt, Homo sapiens
  misc_RNA (1)...(19): siRNA sense strand
ugaccggcguggacacaga

SEQ ID NO: 1821777 - RNA, 19 nt, Homo sapiens
  misc_RNA (1)...(19): siRNA sense strand
caaugaagccagggaagug

SEQ ID NO: 1821778 - RNA, 19 nt, Homo sapiens
  misc_RNA (1)...(19): siRNA sense strand
ugccuacacugauuauauc

SEQ ID NO: 1821779 - RNA, 19 nt, Homo sapiens
  misc_RNA (1)...(19): siRNA sense strand
gagggacaagaauucagua

SEQ ID NO: 1821780 - RNA, 19 nt, Homo sapiens
  misc_RNA (1)...(19): siRNA sense strand
ucaggaaagccucccagaa

SEQ ID NO: 1821781 - RNA, 19 nt, Homo sapiens
  misc_RNA (1)...(19): siRNA sense strand
caucaguggcuccaugaga

SEQ ID NO: 1821782 - RNA, 19 nt, Homo sapiens
  misc_RNA (1)...(19): siRNA sense strand
gcuacaggcagguccaaga

SEQ ID NO: 1821783 - RNA, 19 nt, Homo sapiens
  misc_RNA (1)...(19): siRNA sense strand
ccacaugcucuacauccuu

SEQ ID NO: 1821784 - RNA, 19 nt, Homo sapiens
  misc_RNA (1)...(19): siRNA sense strand
caaccaugccucaauacuc

SEQ ID NO: 1821785 - RNA, 19 nt, Homo sapiens
  misc_RNA (1)...(19): siRNA sense strand
caugagaggccagaaagug

SEQ ID NO: 1821786 - RNA, 19 nt, Homo sapiens
  misc_RNA (1)...(19): siRNA sense strand
gacaucaguggcuccauga

SEQ ID NO: 1821787 - RNA, 19 nt, Homo sapiens
  misc_RNA (1)...(19): siRNA sense strand
ucggagacauaaaggacaa

SEQ ID NO: 1821788 - RNA, 19 nt, Homo sapiens
  misc_RNA (1)...(19): siRNA sense strand
gacccagaaccaccauaaa

SEQ ID NO: 1821789 - RNA, 19 nt, Homo sapiens
  misc_RNA (1)...(19): siRNA sense strand
ucgcuucgcccacuauguu

SEQ ID NO: 1821790 - RNA, 19 nt, Homo sapiens
  misc_RNA (1)...(19): siRNA sense strand
caucugaggccaaccuaca

SEQ ID NO: 1821791 - RNA, 19 nt, Homo sapiens
  misc_RNA (1)...(19): siRNA sense strand
cagcccaaacuaucaagaa

SEQ ID NO: 1821792 - RNA, 19 nt, Homo sapiens
  misc_RNA (1)...(19): siRNA sense strand
cagcagauggaaacgcauu

SEQ ID NO: 1821793 - RNA, 19 nt, Homo sapiens
  misc_RNA (1)...(19): siRNA sense strand
ugagaggccagaaagugaa

SEQ ID NO: 1821794 - RNA, 19 nt, Homo sapiens
  misc_RNA (1)...(19): siRNA sense strand
cagauggaaacgcauuuau

SEQ ID NO: 1821795 - RNA, 19 nt, Homo sapiens
  misc_RNA (1)...(19): siRNA sense strand
gcauugcugacaacaaaca

SEQ ID NO: 1821796 - RNA, 19 nt, Homo sapiens
  misc_RNA (1)...(19): siRNA sense strand
gaagggcucgcuggugcaa

SEQ ID NO: 1821797 - RNA, 19 nt, Homo sapiens
  misc_RNA (1)...(19): siRNA sense strand
ggaauuacguucugaauga

SEQ ID NO: 1821798 - RNA, 19 nt, Homo sapiens
  misc_RNA (1)...(19): siRNA sense strand
ggaaugaccuuugcucuaa

SEQ ID NO: 1821799 - RNA, 19 nt, Homo sapiens
  misc_RNA (1)...(19): siRNA sense strand
gaacucagcugacuuccuu

SEQ ID NO: 1821800 - RNA, 19 nt, Homo sapiens
  misc_RNA (1)...(19): siRNA sense strand
gcaagaaccuguccagcaa

SEQ ID NO: 1821801 - RNA, 19 nt, Homo sapiens
  misc_RNA (1)...(19): siRNA sense strand
cacaagaccuuccaaguuu

SEQ ID NO: 1821802 - RNA, 19 nt, Homo sapiens
  misc_RNA (1)...(19): siRNA sense strand
gcuaucagguugucucuaa

SEQ ID NO: 1821803 - RNA, 19 nt, Homo sapiens
  misc_RNA (1)...(19): siRNA sense strand
gauagaagagacugaaaua

SEQ ID NO: 1821804 - RNA, 19 nt, Homo sapiens
  misc_RNA (1)...(19): siRNA sense strand
gguaugacaucgauaguga

SEQ ID NO: 1821805 - RNA, 19 nt, Homo sapiens
  misc_RNA (1)...(19): siRNA sense strand
gaaauagcauccagugaca

SEQ ID NO: 1821806 - RNA, 19 nt, Homo sapiens
  misc_RNA (1)...(19): siRNA sense strand
agacaaaccacuucaauuu

SEQ ID NO: 1821807 - RNA, 19 nt, Homo sapiens
  misc_RNA (1)...(19): siRNA sense strand
gcagcucacuuucuaauca

SEQ ID NO: 1821808 - RNA, 19 nt, Homo sapiens
  misc_RNA (1)...(19): siRNA sense strand
ccgaguaucucauccagua

SEQ ID NO: 1821809 - RNA, 19 nt, Homo sapiens
  misc_RNA (1)...(19): siRNA sense strand
gcacagggaccuacaguug

SEQ ID NO: 1821810 - RNA, 19 nt, Homo sapiens
  misc_RNA (1)...(19): siRNA sense strand
uuacaaagauggaagugaa

SEQ ID NO: 1821811 - RNA, 19 nt, Homo sapiens
  misc_RNA (1)...(19): siRNA sense strand
ccaguaaaguucuagaguu

SEQ ID NO: 1821812 - RNA, 19 nt, Homo sapiens
  misc_RNA (1)...(19): siRNA sense strand
uaagaaaggagaagacaaa

SEQ ID NO: 1821813 - RNA, 19 nt, Homo sapiens
  misc_RNA (1)...(19): siRNA sense strand
uauagagguucacuccuua

SEQ ID NO: 1821814 - RNA, 19 nt, Homo sapiens
  misc_RNA (1)...(19): siRNA sense strand
gauacauucugcacaaaga

SEQ ID NO: 1821815 - RNA, 19 nt, Homo sapiens
  misc_RNA (1)...(19): siRNA sense strand
ccacaagaccuuccaaguu

SEQ ID NO: 1821816 - RNA, 19 nt, Homo sapiens
  misc_RNA (1)...(19): siRNA sense strand
gcaaguuccugcugcugaa

SEQ ID NO: 1821817 - RNA, 19 nt, Homo sapiens
  misc_RNA (1)...(19): siRNA sense strand
gaaagagaaacauuccaaa

SEQ ID NO: 1821818 - RNA, 19 nt, Homo sapiens
  misc_RNA (1)...(19): siRNA sense strand
gggagaacaucacgcuuug

SEQ ID NO: 1821819 - RNA, 19 nt, Homo sapiens
  misc_RNA (1)...(19): siRNA sense strand
ccaccaugcugaagacauu

SEQ ID NO: 1821820 - RNA, 19 nt, Homo sapiens
  misc_RNA (1)...(19): siRNA sense strand
caguaaaguucuagaguug

SEQ ID NO: 1821821 - RNA, 19 nt, Homo sapiens
  misc_RNA (1)...(19): siRNA sense strand
gaaaaggcauuggaaacua

SEQ ID NO: 1821822 - RNA, 19 nt, Homo sapiens
  misc_RNA (1)...(19): siRNA sense strand
gagacuucaucaucaguaa

SEQ ID NO: 1821823 - RNA, 19 nt, Homo sapiens
  misc_RNA (1)...(19): siRNA sense strand
ggaagaaagagaaacauuc

SEQ ID NO: 1821824 - RNA, 19 nt, Homo sapiens
  misc_RNA (1)...(19): siRNA sense strand
gaaaggagaagacaaacca

SEQ ID NO: 1821825 - RNA, 19 nt, Homo sapiens
  misc_RNA (1)...(19): siRNA sense strand
aaauaugacucuucagugu

SEQ ID NO: 1821826 - RNA, 19 nt, Homo sapiens
  misc_RNA (1)...(19): siRNA sense strand
guaaaguucuagaguugga

SEQ ID NO: 1821827 - RNA, 19 nt, Homo sapiens
  misc_RNA (1)...(19): siRNA sense strand
ggaagagaccagaccauug

SEQ ID NO: 1821828 - RNA, 19 nt, Homo sapiens
  misc_RNA (1)...(19): siRNA sense strand
augcagagccuguggauua

SEQ ID NO: 1821829 - RNA, 19 nt, Homo sapiens
  misc_RNA (1)...(19): siRNA sense strand
caaguuucauuccuuauag

SEQ ID NO: 1821830 - RNA, 19 nt, Homo sapiens
  misc_RNA (1)...(19): siRNA sense strand
gaauuacguucugaaugaa

SEQ ID NO: 1821831 - RNA, 19 nt, Homo sapiens
  misc_RNA (1)...(19): siRNA sense strand
ggaaugggaagaaagagaa

SEQ ID NO: 1821832 - RNA, 19 nt, Homo sapiens
  misc_RNA (1)...(19): siRNA sense strand
cagcaucgaugacaacaca

SEQ ID NO: 1821833 - RNA, 19 nt, Homo sapiens
  misc_RNA (1)...(19): siRNA sense strand
caaagauggaagugaaaua

SEQ ID NO: 1821834 - RNA, 19 nt, Homo sapiens
  misc_RNA (1)...(19): siRNA sense strand
gaaccuguccagcaacuug

SEQ ID NO: 1821835 - RNA, 19 nt, Homo sapiens
  misc_RNA (1)...(19): siRNA sense strand
ggucaaagcccaguaaagu

SEQ ID NO: 1821836 - RNA, 19 nt, Homo sapiens
  misc_RNA (1)...(19): siRNA sense strand
aauuacagcugccgauauu

SEQ ID NO: 1821837 - RNA, 19 nt, Homo sapiens
  misc_RNA (1)...(19): siRNA sense strand
ggauaaagacgaaggcaau

SEQ ID NO: 1821838 - RNA, 19 nt, Homo sapiens
  misc_RNA (1)...(19): siRNA sense strand
gggccaaucuauggaauga

SEQ ID NO: 1821839 - RNA, 19 nt, Homo sapiens
  misc_RNA (1)...(19): siRNA sense strand
cuuccuggguguaauguua

SEQ ID NO: 1821840 - RNA, 19 nt, Homo sapiens
  misc_RNA (1)...(19): siRNA sense strand
agaagcaccucagcaguuu

SEQ ID NO: 1821841 - RNA, 19 nt, Homo sapiens
  misc_RNA (1)...(19): siRNA sense strand
gagcuuaugguuguagaua

SEQ ID NO: 1821842 - RNA, 19 nt, Homo sapiens
  misc_RNA (1)...(19): siRNA sense strand
ccaaguuucauuccuuaua

SEQ ID NO: 1821843 - RNA, 19 nt, Homo sapiens
  misc_RNA (1)...(19): siRNA sense strand
ugaagaguguaaccaagaa

SEQ ID NO: 1821844 - RNA, 19 nt, Homo sapiens
  misc_RNA (1)...(19): siRNA sense strand
gaagagaccagaccauugc

SEQ ID NO: 1821845 - RNA, 19 nt, Homo sapiens
  misc_RNA (1)...(19): siRNA sense strand
gcucaggagugcacuguag

SEQ ID NO: 1821846 - RNA, 19 nt, Homo sapiens
  misc_RNA (1)...(19): siRNA sense strand
ugaagacucugggaucuau

SEQ ID NO: 1821847 - RNA, 19 nt, Homo sapiens
  misc_RNA (1)...(19): siRNA sense strand
gggaggagauggcuguauc

SEQ ID NO: 1821848 - RNA, 19 nt, Homo sapiens
  misc_RNA (1)...(19): siRNA sense strand
cagguugucucuaaucaug

SEQ ID NO: 1821849 - RNA, 19 nt, Homo sapiens
  misc_RNA (1)...(19): siRNA sense strand
ccaaaugggucagaaugug

SEQ ID NO: 1821850 - RNA, 19 nt, Homo sapiens
  misc_RNA (1)...(19): siRNA sense strand
ggaauuacagcugccgaua

SEQ ID NO: 1821851 - RNA, 19 nt, Homo sapiens
  misc_RNA (1)...(19): siRNA sense strand
caacuccggugcaaaggau

SEQ ID NO: 1821852 - RNA, 19 nt, Homo sapiens
  misc_RNA (1)...(19): siRNA sense strand
gguuugcucuguauaagga

SEQ ID NO: 1821853 - RNA, 19 nt, Homo sapiens
  misc_RNA (1)...(19): siRNA sense strand
uaggauacauucugcacaa

SEQ ID NO: 1821854 - RNA, 19 nt, Homo sapiens
  misc_RNA (1)...(19): siRNA sense strand
gagacaggcuggucaaagc

SEQ ID NO: 1821855 - RNA, 19 nt, Homo sapiens
  misc_RNA (1)...(19): siRNA sense strand
ucuagaacaugauggagaa

SEQ ID NO: 1821856 - RNA, 19 nt, Homo sapiens
  misc_RNA (1)...(19): siRNA sense strand
gaauuacagcugccgauau

SEQ ID NO: 1821857 - RNA, 19 nt, Homo sapiens
  misc_RNA (1)...(19): siRNA sense strand
cagcauaugagcuuuauuc

SEQ ID NO: 1821858 - RNA, 19 nt, Homo sapiens
  misc_RNA (1)...(19): siRNA sense strand
gaccuacaguugcagcuau

SEQ ID NO: 1821859 - RNA, 19 nt, Homo sapiens
  misc_RNA (1)...(19): siRNA sense strand
gaaugaccuuugcucuaau

SEQ ID NO: 1821860 - RNA, 19 nt, Homo sapiens
  misc_RNA (1)...(19): siRNA sense strand
aaacggagacuucaucauc

SEQ ID NO: 1821861 - RNA, 19 nt, Homo sapiens
  misc_RNA (1)...(19): siRNA sense strand
ccaagauacuggacauuac

SEQ ID NO: 1821862 - RNA, 19 nt, Homo sapiens
  misc_RNA (1)...(19): siRNA sense strand
ugaggcaaauuucuucuuc

SEQ ID NO: 1821863 - RNA, 19 nt, Homo sapiens
  misc_RNA (1)...(19): siRNA sense strand
uaaugaggguugaagacuu

SEQ ID NO: 1821864 - RNA, 19 nt, Homo sapiens
  misc_RNA (1)...(19): siRNA sense strand
caaaugggucagaauguga

SEQ ID NO: 1821865 - RNA, 19 nt, Homo sapiens
  misc_RNA (1)...(19): siRNA sense strand
ucaacaacguagaaggaaa

SEQ ID NO: 1821866 - RNA, 19 nt, Homo sapiens
  misc_RNA (1)...(19): siRNA sense strand
ucaggagccuuuagagcaa

SEQ ID NO: 1821867 - RNA, 19 nt, Homo sapiens
  misc_RNA (1)...(19): siRNA sense strand
ccuaagccaugguuguuug

SEQ ID NO: 1821868 - RNA, 19 nt, Homo sapiens
  misc_RNA (1)...(19): siRNA sense strand
cugccgauauuaugacuuu

SEQ ID NO: 1821869 - RNA, 19 nt, Homo sapiens
  misc_RNA (1)...(19): siRNA sense strand
cgcuggagcuugucauaaa

SEQ ID NO: 1821870 - RNA, 19 nt, Homo sapiens
  misc_RNA (1)...(19): siRNA sense strand
ugaaugaagcuaucagguu

SEQ ID NO: 1821871 - RNA, 19 nt, Homo sapiens
  misc_RNA (1)...(19): siRNA sense strand
ggagacuucaucaucagua

SEQ ID NO: 1821872 - RNA, 19 nt, Homo sapiens
  misc_RNA (1)...(19): siRNA sense strand
gggaagaaagagaaacauu

SEQ ID NO: 1821873 - RNA, 19 nt, Homo sapiens
  misc_RNA (1)...(19): siRNA sense strand
ugacaacacaucauucuuc

SEQ ID NO: 1821874 - RNA, 19 nt, Homo sapiens
  misc_RNA (1)...(19): siRNA sense strand
gcacucauauccagaugcu

SEQ ID NO: 1821875 - RNA, 19 nt, Homo sapiens
  misc_RNA (1)...(19): siRNA sense strand
cauguucccuuacaguuuc

SEQ ID NO: 1821876 - RNA, 19 nt, Homo sapiens
  misc_RNA (1)...(19): siRNA sense strand
uagaagagacugaaauagu

SEQ ID NO: 1821877 - RNA, 19 nt, Homo sapiens
  misc_RNA (1)...(19): siRNA sense strand
caucauggcaccuggagaa

SEQ ID NO: 1821878 - RNA, 19 nt, Homo sapiens
  misc_RNA (1)...(19): siRNA sense strand
ccagcaccauguucaaguu

SEQ ID NO: 1821879 - RNA, 19 nt, Homo sapiens
  misc_RNA (1)...(19): siRNA sense strand
gaacuauagcuguaucuac

SEQ ID NO: 1821880 - RNA, 19 nt, Homo sapiens
  misc_RNA (1)...(19): siRNA sense strand
agacacaaaugaccuggau

SEQ ID NO: 1821881 - RNA, 19 nt, Homo sapiens
  misc_RNA (1)...(19): siRNA sense strand
ucaaagcccaguaaaguuc

SEQ ID NO: 1821882 - RNA, 19 nt, Homo sapiens
  misc_RNA (1)...(19): siRNA sense strand
agaacaugauggagaagaa

SEQ ID NO: 1821883 - RNA, 19 nt, Homo sapiens
  misc_RNA (1)...(19): siRNA sense strand
gcauaugagcuuuauucuu

SEQ ID NO: 1821884 - RNA, 19 nt, Homo sapiens
  misc_RNA (1)...(19): siRNA sense strand
aaugaggguugaagacuug

SEQ ID NO: 1821885 - RNA, 19 nt, Homo sapiens
  misc_RNA (1)...(19): siRNA sense strand
gauccgcccuucccacaag

SEQ ID NO: 1821886 - RNA, 19 nt, Homo sapiens
  misc_RNA (1)...(19): siRNA sense strand
guagagacacauccuaaca

SEQ ID NO: 1821887 - RNA, 19 nt, Homo sapiens
  misc_RNA (1)...(19): siRNA sense strand
gggaacauuguccgaagua

SEQ ID NO: 1821888 - RNA, 19 nt, Homo sapiens
  misc_RNA (1)...(19): siRNA sense strand
ggacucuacucccuuugca

SEQ ID NO: 1821889 - RNA, 19 nt, Homo sapiens
  misc_RNA (1)...(19): siRNA sense strand
guagugcuguggauaaggu

SEQ ID NO: 1821890 - RNA, 19 nt, Homo sapiens
  misc_RNA (1)...(19): siRNA sense strand
gaagaaagagaaacauucc

SEQ ID NO: 1821891 - RNA, 19 nt, Homo sapiens
  misc_RNA (1)...(19): siRNA sense strand
agaucugggugacugauaa

SEQ ID NO: 1821892 - RNA, 19 nt, Homo sapiens
  misc_RNA (1)...(19): siRNA sense strand
gaucuauagcuguguuuau

SEQ ID NO: 1821893 - RNA, 19 nt, Homo sapiens
  misc_RNA (1)...(19): siRNA sense strand
ugacugacacauucccuaa

SEQ ID NO: 1821894 - RNA, 19 nt, Homo sapiens
  misc_RNA (1)...(19): siRNA sense strand
ucugggaacuauagcugua

SEQ ID NO: 1821895 - RNA, 19 nt, Homo sapiens
  misc_RNA (1)...(19): siRNA sense strand
gauaaagacgaaggcaauu

SEQ ID NO: 1821896 - RNA, 19 nt, Homo sapiens
  misc_RNA (1)...(19): siRNA sense strand
gcguagagacacauccuaa

SEQ ID NO: 1821897 - RNA, 19 nt, Homo sapiens
  misc_RNA (1)...(19): siRNA sense strand
ccaaagauaucuccauuaa

SEQ ID NO: 1821898 - RNA, 19 nt, Homo sapiens
  misc_RNA (1)...(19): siRNA sense strand
caagugaccuccugucuuu

SEQ ID NO: 1821899 - RNA, 19 nt, Homo sapiens
  misc_RNA (1)...(19): siRNA sense strand
gcaaagcacuagaggaaga

SEQ ID NO: 1821900 - RNA, 19 nt, Homo sapiens
  misc_RNA (1)...(19): siRNA sense strand
uaucuacgauccaaucuua

SEQ ID NO: 1821901 - RNA, 19 nt, Homo sapiens
  misc_RNA (1)...(19): siRNA sense strand
gaucaaggcaccacagaua

SEQ ID NO: 1821902 - RNA, 19 nt, Homo sapiens
  misc_RNA (1)...(19): siRNA sense strand
uaacagaggaugcuacuuu

SEQ ID NO: 1821903 - RNA, 19 nt, Homo sapiens
  misc_RNA (1)...(19): siRNA sense strand
ugaaauaucugcagagaag

SEQ ID NO: 1821904 - RNA, 19 nt, Homo sapiens
  misc_RNA (1)...(19): siRNA sense strand
gaaacuagaagagcuauuu

SEQ ID NO: 1821905 - RNA, 19 nt, Homo sapiens
  misc_RNA (1)...(19): siRNA sense strand
ggaagcauaucggaucuuu

SEQ ID NO: 1821906 - RNA, 19 nt, Homo sapiens
  misc_RNA (1)...(19): siRNA sense strand
ucaagcaucuucucucuga

SEQ ID NO: 1821907 - RNA, 19 nt, Homo sapiens
  misc_RNA (1)...(19): siRNA sense strand
gaucauuucuuggaggaua

SEQ ID NO: 1821908 - RNA, 19 nt, Homo sapiens
  misc_RNA (1)...(19): siRNA sense strand
uaccagagcucagcgaaua

SEQ ID NO: 1821909 - RNA, 19 nt, Homo sapiens
  misc_RNA (1)...(19): siRNA sense strand
caagaugccuacaacagaa

SEQ ID NO: 1821910 - RNA, 19 nt, Homo sapiens
  misc_RNA (1)...(19): siRNA sense strand
uuaagaaacuuccaggauu

SEQ ID NO: 1821911 - RNA, 19 nt, Homo sapiens
  misc_RNA (1)...(19): siRNA sense strand
cuaagucugugccguauaa

SEQ ID NO: 1821912 - RNA, 19 nt, Homo sapiens
  misc_RNA (1)...(19): siRNA sense strand
caacuuacggccaucuuua

SEQ ID NO: 1821913 - RNA, 19 nt, Homo sapiens
  misc_RNA (1)...(19): siRNA sense strand
ccacagagaugcaacuuac

SEQ ID NO: 1821914 - RNA, 19 nt, Homo sapiens
  misc_RNA (1)...(19): siRNA sense strand
cagcuacucucucaacauu

SEQ ID NO: 1821915 - RNA, 19 nt, Homo sapiens
  misc_RNA (1)...(19): siRNA sense strand
ggagugugauugugaauag

SEQ ID NO: 1821916 - RNA, 19 nt, Homo sapiens
  misc_RNA (1)...(19): siRNA sense strand
gaggaagucuaucauggaa

SEQ ID NO: 1821917 - RNA, 19 nt, Homo sapiens
  misc_RNA (1)...(19): siRNA sense strand
gaugaaauaucugcagaga

SEQ ID NO: 1821918 - RNA, 19 nt, Homo sapiens
  misc_RNA (1)...(19): siRNA sense strand
uaagaaacuuccaggauuc

SEQ ID NO: 1821919 - RNA, 19 nt, Homo sapiens
  misc_RNA (1)...(19): siRNA sense strand
gaauuugcccaauguguaa

SEQ ID NO: 1821920 - RNA, 19 nt, Homo sapiens
  misc_RNA (1)...(19): siRNA sense strand
gaagcuccaccuuucuuua

SEQ ID NO: 1821921 - RNA, 19 nt, Homo sapiens
  misc_RNA (1)...(19): siRNA sense strand
aaucagagcugcccacauc

SEQ ID NO: 1821922 - RNA, 19 nt, Homo sapiens
  misc_RNA (1)...(19): siRNA sense strand
gagcucagcgaauauguuu

SEQ ID NO: 1821923 - RNA, 19 nt, Homo sapiens
  misc_RNA (1)...(19): siRNA sense strand
ggaaauagacagcuacucu

SEQ ID NO: 1821924 - RNA, 19 nt, Homo sapiens
  misc_RNA (1)...(19): siRNA sense strand
gccgagagcugguaguguu

SEQ ID NO: 1821925 - RNA, 19 nt, Homo sapiens
  misc_RNA (1)...(19): siRNA sense strand
ugucucagcuuuacaguau

SEQ ID NO: 1821926 - RNA, 19 nt, Homo sapiens
  misc_RNA (1)...(19): siRNA sense strand
gaaaugaaacaacugaaag

SEQ ID NO: 1821927 - RNA, 19 nt, Homo sapiens
  misc_RNA (1)...(19): siRNA sense strand
gaugacagccgaucaagug

SEQ ID NO: 1821928 - RNA, 19 nt, Homo sapiens
  misc_RNA (1)...(19): siRNA sense strand
ggauaccacuccugucuca

SEQ ID NO: 1821929 - RNA, 19 nt, Homo sapiens
  misc_RNA (1)...(19): siRNA sense strand
cagcaaagcacuagaggaa

SEQ ID NO: 1821930 - RNA, 19 nt, Homo sapiens
  misc_RNA (1)...(19): siRNA sense strand
ccaacuggcucugggaauu

SEQ ID NO: 1821931 - RNA, 19 nt, Homo sapiens
  misc_RNA (1)...(19): siRNA sense strand
gaccguagaauaugaagaa

SEQ ID NO: 1821932 - RNA, 19 nt, Homo sapiens
  misc_RNA (1)...(19): siRNA sense strand
cagauacaauggccacuga

SEQ ID NO: 1821933 - RNA, 19 nt, Homo sapiens
  misc_RNA (1)...(19): siRNA sense strand
caagaaaugaaacaacuga

SEQ ID NO: 1821934 - RNA, 19 nt, Homo sapiens
  misc_RNA (1)...(19): siRNA sense strand
gaaacuuccaggauucaaa

SEQ ID NO: 1821935 - RNA, 19 nt, Homo sapiens
  misc_RNA (1)...(19): siRNA sense strand
caacagaaagagaaacaga

SEQ ID NO: 1821936 - RNA, 19 nt, Homo sapiens
  misc_RNA (1)...(19): siRNA sense strand
cgaauuugcccaaugugua

SEQ ID NO: 1821937 - RNA, 19 nt, Homo sapiens
  misc_RNA (1)...(19): siRNA sense strand
gucagaagcuccaccuuuc

SEQ ID NO: 1821938 - RNA, 19 nt, Homo sapiens
  misc_RNA (1)...(19): siRNA sense strand
ggugaaaccauugucauuu

SEQ ID NO: 1821939 - RNA, 19 nt, Homo sapiens
  misc_RNA (1)...(19): siRNA sense strand
ugaaccagcugaucaagca

SEQ ID NO: 1821940 - RNA, 19 nt, Homo sapiens
  misc_RNA (1)...(19): siRNA sense strand
ugaaacaacugaaaguacu

SEQ ID NO: 1821941 - RNA, 19 nt, Homo sapiens
  misc_RNA (1)...(19): siRNA sense strand
gaugacacccuccucaaug

SEQ ID NO: 1821942 - RNA, 19 nt, Homo sapiens
  misc_RNA (1)...(19): siRNA sense strand
gaacgaacggacugaggaa

SEQ ID NO: 1821943 - RNA, 19 nt, Homo sapiens
  misc_RNA (1)...(19): siRNA sense strand
ggauuuaagcaacuugaaa

SEQ ID NO: 1821944 - RNA, 19 nt, Homo sapiens
  misc_RNA (1)...(19): siRNA sense strand
ccacuccugucucagcuuu

SEQ ID NO: 1821945 - RNA, 19 nt, Homo sapiens
  misc_RNA (1)...(19): siRNA sense strand
ggacaagcaaccagaaauc

SEQ ID NO: 1821946 - RNA, 19 nt, Homo sapiens
  misc_RNA (1)...(19): siRNA sense strand
ggauuuagaccaaagaaag

SEQ ID NO: 1821947 - RNA, 19 nt, Homo sapiens
  misc_RNA (1)...(19): siRNA sense strand
aaccaaagauaucuccauu

SEQ ID NO: 1821948 - RNA, 19 nt, Homo sapiens
  misc_RNA (1)...(19): siRNA sense strand
cagagaaguuucccugaca

SEQ ID NO: 1821949 - RNA, 19 nt, Homo sapiens
  misc_RNA (1)...(19): siRNA sense strand
caagcaaccagaaaucuau

SEQ ID NO: 1821950 - RNA, 19 nt, Homo sapiens
  misc_RNA (1)...(19): siRNA sense strand
ccacaggaauccaugaaac

SEQ ID NO: 1821951 - RNA, 19 nt, Homo sapiens
  misc_RNA (1)...(19): siRNA sense strand
gaaacgggagugugauugu

SEQ ID NO: 1821952 - RNA, 19 nt, Homo sapiens
  misc_RNA (1)...(19): siRNA sense strand
ccauuaacauauaccauuc

SEQ ID NO: 1821953 - RNA, 19 nt, Homo sapiens
  misc_RNA (1)...(19): siRNA sense strand
gcucagcgucucucuggua

SEQ ID NO: 1821954 - RNA, 19 nt, Homo sapiens
  misc_RNA (1)...(19): siRNA sense strand
agaaagagaaacagaauuc

SEQ ID NO: 1821955 - RNA, 19 nt, Homo sapiens
  misc_RNA (1)...(19): siRNA sense strand
ccaagaugccuacaacaga

SEQ ID NO: 1821956 - RNA, 19 nt, Homo sapiens
  misc_RNA (1)...(19): siRNA sense strand
gcaagugaccuccugucuu

SEQ ID NO: 1821957 - RNA, 19 nt, Homo sapiens
  misc_RNA (1)...(19): siRNA sense strand
gcaacuuacggccaucuuu

SEQ ID NO: 1821958 - RNA, 19 nt, Homo sapiens
  misc_RNA (1)...(19): siRNA sense strand
caucaagcaucuucucucu

SEQ ID NO: 1821959 - RNA, 19 nt, Homo sapiens
  misc_RNA (1)...(19): siRNA sense strand
aaaugaaguuugcuaaguc

SEQ ID NO: 1821960 - RNA, 19 nt, Homo sapiens
  misc_RNA (1)...(19): siRNA sense strand
auagacagcuacucucuca

SEQ ID NO: 1821961 - RNA, 19 nt, Homo sapiens
  misc_RNA (1)...(19): siRNA sense strand
ggagaccuucugccucuuu

SEQ ID NO: 1821962 - RNA, 19 nt, Homo sapiens
  misc_RNA (1)...(19): siRNA sense strand
auacuuaacuucagaaacg

SEQ ID NO: 1821963 - RNA, 19 nt, Homo sapiens
  misc_RNA (1)...(19): siRNA sense strand
ccaacaaaauugaaaguga

SEQ ID NO: 1821964 - RNA, 19 nt, Homo sapiens
  misc_RNA (1)...(19): siRNA sense strand
gaaacuaaagacauagaca

SEQ ID NO: 1821965 - RNA, 19 nt, Homo sapiens
  misc_RNA (1)...(19): siRNA sense strand
uaagagacacagugcagaa

SEQ ID NO: 1821966 - RNA, 19 nt, Homo sapiens
  misc_RNA (1)...(19): siRNA sense strand
cauauaccauucugaaacu

SEQ ID NO: 1821967 - RNA, 19 nt, Homo sapiens
  misc_RNA (1)...(19): siRNA sense strand
uacaguauaucaccacuag

SEQ ID NO: 1821968 - RNA, 19 nt, Homo sapiens
  misc_RNA (1)...(19): siRNA sense strand
gauuuagaccaaagaaaga

SEQ ID NO: 1821969 - RNA, 19 nt, Homo sapiens
  misc_RNA (1)...(19): siRNA sense strand
caguauaucaccacuaguu

SEQ ID NO: 1821970 - RNA, 19 nt, Homo sapiens
  misc_RNA (1)...(19): siRNA sense strand
caacuggcucugggaauuu

SEQ ID NO: 1821971 - RNA, 19 nt, Homo sapiens
  misc_RNA (1)...(19): siRNA sense strand
gaaccaaagauaucuccau

SEQ ID NO: 1821972 - RNA, 19 nt, Homo sapiens
  misc_RNA (1)...(19): siRNA sense strand
ggaaagggagcuccaugca

SEQ ID NO: 1821973 - RNA, 19 nt, Homo sapiens
  misc_RNA (1)...(19): siRNA sense strand
ugucccagaucauuucuug

SEQ ID NO: 1821974 - RNA, 19 nt, Homo sapiens
  misc_RNA (1)...(19): siRNA sense strand
cuaaagacauagacaaucc

SEQ ID NO: 1821975 - RNA, 19 nt, Homo sapiens
  misc_RNA (1)...(19): siRNA sense strand
gagacacagugcagaagca

SEQ ID NO: 1821976 - RNA, 19 nt, Homo sapiens
  misc_RNA (1)...(19): siRNA sense strand
ggcucaagcuccacagaga

SEQ ID NO: 1821977 - RNA, 19 nt, Homo sapiens
  misc_RNA (1)...(19): siRNA sense strand
gaggacaagcaaccagaaa

SEQ ID NO: 1821978 - RNA, 19 nt, Homo sapiens
  misc_RNA (1)...(19): siRNA sense strand
cggcgaauuugcccaaugu

SEQ ID NO: 1821979 - RNA, 19 nt, Homo sapiens
  misc_RNA (1)...(19): siRNA sense strand
ucaaggaaccaaagauauc

SEQ ID NO: 1821980 - RNA, 19 nt, Homo sapiens
  misc_RNA (1)...(19): siRNA sense strand
gagcauggucuaccugaca

SEQ ID NO: 1821981 - RNA, 19 nt, Homo sapiens
  misc_RNA (1)...(19): siRNA sense strand
agaacaaucuuuggaugug

SEQ ID NO: 1821982 - RNA, 19 nt, Homo sapiens
  misc_RNA (1)...(19): siRNA sense strand
gaaaucuaucucacagcua

SEQ ID NO: 1821983 - RNA, 19 nt, Homo sapiens
  misc_RNA (1)...(19): siRNA sense strand
ucaacuaugagacgaauau

SEQ ID NO: 1821984 - RNA, 19 nt, Homo sapiens
  misc_RNA (1)...(19): siRNA sense strand
gaaauucucgauaauacac

SEQ ID NO: 1821985 - RNA, 19 nt, Homo sapiens
  misc_RNA (1)...(19): siRNA sense strand
gcugcugguuccauaucua

SEQ ID NO: 1821986 - RNA, 19 nt, Homo sapiens
  misc_RNA (1)...(19): siRNA sense strand
ucucagcuuuacaguauau

SEQ ID NO: 1821987 - RNA, 19 nt, Homo sapiens
  misc_RNA (1)...(19): siRNA sense strand
gagaccuucugccucuuug

SEQ ID NO: 1821988 - RNA, 19 nt, Homo sapiens
  misc_RNA (1)...(19): siRNA sense strand
uaucaccacuaguucuaug

SEQ ID NO: 1821989 - RNA, 19 nt, Homo sapiens
  misc_RNA (1)...(19): siRNA sense strand
ugucagaagcuccaccuuu

SEQ ID NO: 1821990 - RNA, 19 nt, Homo sapiens
  misc_RNA (1)...(19): siRNA sense strand
uggcaaagcaucgaacaaa

SEQ ID NO: 1821991 - RNA, 19 nt, Homo sapiens
  misc_RNA (1)...(19): siRNA sense strand
ugaaagugaggaagucuau

SEQ ID NO: 1821992 - RNA, 19 nt, Homo sapiens
  misc_RNA (1)...(19): siRNA sense strand
gcauacaaaacuaguguua

SEQ ID NO: 1821993 - RNA, 19 nt, Homo sapiens
  misc_RNA (1)...(19): siRNA sense strand
gagagugugucaggaagca

SEQ ID NO: 1821994 - RNA, 19 nt, Homo sapiens
  misc_RNA (1)...(19): siRNA sense strand
aacagaggaugcuacuuug

SEQ ID NO: 1821995 - RNA, 19 nt, Homo sapiens
  misc_RNA (1)...(19): siRNA sense strand
caucaagauugggaaggaa

SEQ ID NO: 1821996 - RNA, 19 nt, Homo sapiens
  misc_RNA (1)...(19): siRNA sense strand
agaacuuccuccuguugaa

SEQ ID NO: 1821997 - RNA, 19 nt, Homo sapiens
  misc_RNA (1)...(19): siRNA sense strand
gaauugaucuucaucuuca

SEQ ID NO: 1821998 - RNA, 19 nt, Homo sapiens
  misc_RNA (1)...(19): siRNA sense strand
ucaaugaaauccugacuuu

SEQ ID NO: 1821999 - RNA, 19 nt, Homo sapiens
  misc_RNA (1)...(19): siRNA sense strand
gaaauaaagaggucaaaga

SEQ ID NO: 1822000 - RNA, 19 nt, Homo sapiens
  misc_RNA (1)...(19): siRNA sense strand
guauacacccugagaaaua

SEQ ID NO: 1822001 - RNA, 19 nt, Homo sapiens
  misc_RNA (1)...(19): siRNA sense strand
gaacuuuacucucaucacu

SEQ ID NO: 1822002 - RNA, 19 nt, Homo sapiens
  misc_RNA (1)...(19): siRNA sense strand
gcaagugacaucuguauuc

SEQ ID NO: 1822003 - RNA, 19 nt, Homo sapiens
  misc_RNA (1)...(19): siRNA sense strand
ucacagcaaugggauauga

SEQ ID NO: 1822004 - RNA, 19 nt, Homo sapiens
  misc_RNA (1)...(19): siRNA sense strand
caagauugcuucaguugag

SEQ ID NO: 1822005 - RNA, 19 nt, Homo sapiens
  misc_RNA (1)...(19): siRNA sense strand
uaacgcaagugacaucugu

SEQ ID NO: 1822006 - RNA, 19 nt, Homo sapiens
  misc_RNA (1)...(19): siRNA sense strand
gaacaugaccagcugaucu

SEQ ID NO: 1822007 - RNA, 19 nt, Homo sapiens
  misc_RNA (1)...(19): siRNA sense strand
caagugacaucuguauuca

SEQ ID NO: 1822008 - RNA, 19 nt, Homo sapiens
  misc_RNA (1)...(19): siRNA sense strand
ucucaucacugacuuuguu

SEQ ID NO: 1822009 - RNA, 19 nt, Homo sapiens
  misc_RNA (1)...(19): siRNA sense strand
uauacacccugagaaauaa

SEQ ID NO: 1822010 - RNA, 19 nt, Homo sapiens
  misc_RNA (1)...(19): siRNA sense strand
guauauacauuggucauuc

SEQ ID NO: 1822011 - RNA, 19 nt, Homo sapiens
  misc_RNA (1)...(19): siRNA sense strand
ugacaucuguauucagguu

SEQ ID NO: 1822012 - RNA, 19 nt, Homo sapiens
  misc_RNA (1)...(19): siRNA sense strand
aaugaaauccugacuuuga

SEQ ID NO: 1822013 - RNA, 19 nt, Homo sapiens
  misc_RNA (1)...(19): siRNA sense strand
cuacagcugugccuccauu

SEQ ID NO: 1822014 - RNA, 19 nt, Homo sapiens
  misc_RNA (1)...(19): siRNA sense strand
gagcagcagaucacccuuu

SEQ ID NO: 1822015 - RNA, 19 nt, Homo sapiens
  misc_RNA (1)...(19): siRNA sense strand
gguaugagccagcccaugu

SEQ ID NO: 1822016 - RNA, 19 nt, Homo sapiens
  misc_RNA (1)...(19): siRNA sense strand
cuauacaucuuaaccuuag

SEQ ID NO: 1822017 - RNA, 19 nt, Homo sapiens
  misc_RNA (1)...(19): siRNA sense strand
gcguguuccuugcacuaua

SEQ ID NO: 1822018 - RNA, 19 nt, Homo sapiens
  misc_RNA (1)...(19): siRNA sense strand
ugaugaagcucuccugcau

SEQ ID NO: 1822019 - RNA, 19 nt, Homo sapiens
  misc_RNA (1)...(19): siRNA sense strand
gaccuacacugucaucacu

SEQ ID NO: 1822020 - RNA, 19 nt, Homo sapiens
  misc_RNA (1)...(19): siRNA sense strand
ccgaauugaucuucaucuu

SEQ ID NO: 1822021 - RNA, 19 nt, Homo sapiens
  misc_RNA (1)...(19): siRNA sense strand
ccacuucagagacuguaua

SEQ ID NO: 1822022 - RNA, 19 nt, Homo sapiens
  misc_RNA (1)...(19): siRNA sense strand
augaagcucuccugcauug

SEQ ID NO: 1822023 - RNA, 19 nt, Homo sapiens
  misc_RNA (1)...(19): siRNA sense strand
ccucaagauugcuucaguu

SEQ ID NO: 1822024 - RNA, 19 nt, Homo sapiens
  misc_RNA (1)...(19): siRNA sense strand
guaccuaugggucugguuu

SEQ ID NO: 1822025 - RNA, 19 nt, Homo sapiens
  misc_RNA (1)...(19): siRNA sense strand
cacuauacaucuuaaccuu

SEQ ID NO: 1822026 - RNA, 19 nt, Homo sapiens
  misc_RNA (1)...(19): siRNA sense strand
gagaacaccagagaacaug

SEQ ID NO: 1822027 - RNA, 19 nt, Homo sapiens
  misc_RNA (1)...(19): siRNA sense strand
cuucagagacuguauauac

SEQ ID NO: 1822028 - RNA, 19 nt, Homo sapiens
  misc_RNA (1)...(19): siRNA sense strand
acacacccauguacuucuu

SEQ ID NO: 1822029 - RNA, 19 nt, Homo sapiens
  misc_RNA (1)...(19): siRNA sense strand
ucagugugcuggugcuugu

SEQ ID NO: 1822030 - RNA, 19 nt, Homo sapiens
  misc_RNA (1)...(19): siRNA sense strand
ugagcaugcuguccacuuc

SEQ ID NO: 1822031 - RNA, 19 nt, Homo sapiens
  misc_RNA (1)...(19): siRNA sense strand
ugagccagcccaugucauu

SEQ ID NO: 1822032 - RNA, 19 nt, Homo sapiens
  misc_RNA (1)...(19): siRNA sense strand
acaccacugucaaugaaau

SEQ ID NO: 1822033 - RNA, 19 nt, Homo sapiens
  misc_RNA (1)...(19): siRNA sense strand
guauucagguuacccuucu

SEQ ID NO: 1822034 - RNA, 19 nt, Homo sapiens
  misc_RNA (1)...(19): siRNA sense strand
guagcaauaacgcaaguga

SEQ ID NO: 1822035 - RNA, 19 nt, Homo sapiens
  misc_RNA (1)...(19): siRNA sense strand
aaugggauaugaccgcuau

SEQ ID NO: 1822036 - RNA, 19 nt, Homo sapiens
  misc_RNA (1)...(19): siRNA sense strand
cgaauugaucuucaucuuc

SEQ ID NO: 1822037 - RNA, 19 nt, Homo sapiens
  misc_RNA (1)...(19): siRNA sense strand
gagauacaugguuauuaug

SEQ ID NO: 1822038 - RNA, 19 nt, Homo sapiens
  misc_RNA (1)...(19): siRNA sense strand
ucucuacaauccucaagau

SEQ ID NO: 1822039 - RNA, 19 nt, Homo sapiens
  misc_RNA (1)...(19): siRNA sense strand
gaugaagcucuccugcauu

SEQ ID NO: 1822040 - RNA, 19 nt, Homo sapiens
  misc_RNA (1)...(19): siRNA sense strand
gcucacagcaaugggauau

SEQ ID NO: 1822041 - RNA, 19 nt, Homo sapiens
  misc_RNA (1)...(19): siRNA sense strand
acuuuacucucaucacuga

SEQ ID NO: 1822042 - RNA, 19 nt, Homo sapiens
  misc_RNA (1)...(19): siRNA sense strand
caauaacgcaagugacauc

SEQ ID NO: 1822043 - RNA, 19 nt, Homo sapiens
  misc_RNA (1)...(19): siRNA sense strand
gagaaauaaagaggucaaa

SEQ ID NO: 1822044 - RNA, 19 nt, Homo sapiens
  misc_RNA (1)...(19): siRNA sense strand
gggaaccaauccaugaaaa

SEQ ID NO: 1822045 - RNA, 19 nt, Homo sapiens
  misc_RNA (1)...(19): siRNA sense strand
gaaccaauccaugaaaaga

SEQ ID NO: 1822046 - RNA, 19 nt, Homo sapiens
  misc_RNA (1)...(19): siRNA sense strand
gguauacacccugagaaau

SEQ ID NO: 1822047 - RNA, 19 nt, Homo sapiens
  misc_RNA (1)...(19): siRNA sense strand
cuacugaacccugugguau

SEQ ID NO: 1822048 - RNA, 19 nt, Homo sapiens
  misc_RNA (1)...(19): siRNA sense strand
gaacaagaggcugcguauc

SEQ ID NO: 1822049 - RNA, 19 nt, Homo sapiens
  misc_RNA (1)...(19): siRNA sense strand
gaggcugcguauccaacuu

SEQ ID NO: 1822050 - RNA, 19 nt, Homo sapiens
  misc_RNA (1)...(19): siRNA sense strand
gugaccaucauccgaauug

SEQ ID NO: 1822051 - RNA, 19 nt, Homo sapiens
  misc_RNA (1)...(19): siRNA sense strand
ugaacaagaggcugcguau

SEQ ID NO: 1822052 - RNA, 19 nt, Homo sapiens
  misc_RNA (1)...(19): siRNA sense strand
uaaccuuuggcaucacuaa

SEQ ID NO: 1822053 - RNA, 19 nt, Homo sapiens
  misc_RNA (1)...(19): siRNA sense strand
gaaaggugccccacuucuu

SEQ ID NO: 1822054 - RNA, 19 nt, Homo sapiens
  misc_RNA (1)...(19): siRNA sense strand
caucuucacacacccaugu

SEQ ID NO: 1822055 - RNA, 19 nt, Homo sapiens
  misc_RNA (1)...(19): siRNA sense strand
uacugaacccugugguaua

SEQ ID NO: 1822056 - RNA, 19 nt, Homo sapiens
  misc_RNA (1)...(19): siRNA sense strand
gaagcucuccugcauugac

SEQ ID NO: 1822057 - RNA, 19 nt, Homo sapiens
  misc_RNA (1)...(19): siRNA sense strand
ucuccagccucguagguau

SEQ ID NO: 1822058 - RNA, 19 nt, Homo sapiens
  misc_RNA (1)...(19): siRNA sense strand
cauccgaauugaucuucau

SEQ ID NO: 1822059 - RNA, 19 nt, Homo sapiens
  misc_RNA (1)...(19): siRNA sense strand
gaacaccagagaacaugac

SEQ ID NO: 1822060 - RNA, 19 nt, Homo sapiens
  misc_RNA (1)...(19): siRNA sense strand
ucagagaacaccagagaac

SEQ ID NO: 1822061 - RNA, 19 nt, Homo sapiens
  misc_RNA (1)...(19): siRNA sense strand
agucagagaacaccagaga

SEQ ID NO: 1822062 - RNA, 19 nt, Homo sapiens
  misc_RNA (1)...(19): siRNA sense strand
cucauuaucucuacaaucc

SEQ ID NO: 1822063 - RNA, 19 nt, Homo sapiens
  misc_RNA (1)...(19): siRNA sense strand
ugugacauccgcccuguga

SEQ ID NO: 1822064 - RNA, 19 nt, Homo sapiens
  misc_RNA (1)...(19): siRNA sense strand
gacaucuguauucagguua

SEQ ID NO: 1822065 - RNA, 19 nt, Homo sapiens
  misc_RNA (1)...(19): siRNA sense strand
ccccugagauacaugguua

SEQ ID NO: 1822066 - RNA, 19 nt, Homo sapiens
  misc_RNA (1)...(19): siRNA sense strand
ucacacacccauguacuuc

SEQ ID NO: 1822067 - RNA, 19 nt, Homo sapiens
  misc_RNA (1)...(19): siRNA sense strand
gcuguccacuucagagacu

SEQ ID NO: 1822068 - RNA, 19 nt, Homo sapiens
  misc_RNA (1)...(19): siRNA sense strand
gagaacaugaccagcugau

SEQ ID NO: 1822069 - RNA, 19 nt, Homo sapiens
  misc_RNA (1)...(19): siRNA sense strand
gugcaucccaccucacugu

SEQ ID NO: 1822070 - RNA, 19 nt, Homo sapiens
  misc_RNA (1)...(19): siRNA sense strand
cuagaaaggugccccacuu

SEQ ID NO: 1822071 - RNA, 19 nt, Homo sapiens
  misc_RNA (1)...(19): siRNA sense strand
gcaauaacgcaagugacau

SEQ ID NO: 1822072 - RNA, 19 nt, Homo sapiens
  misc_RNA (1)...(19): siRNA sense strand
acaagaggcugcguaucca

SEQ ID NO: 1822073 - RNA, 19 nt, Homo sapiens
  misc_RNA (1)...(19): siRNA sense strand
uuuguaaccuuuggcauca

SEQ ID NO: 1822074 - RNA, 19 nt, Homo sapiens
  misc_RNA (1)...(19): siRNA sense strand
ugaccaucauccgaauuga

SEQ ID NO: 1822075 - RNA, 19 nt, Homo sapiens
  misc_RNA (1)...(19): siRNA sense strand
aauaaagaggucaaagaug

SEQ ID NO: 1822076 - RNA, 19 nt, Homo sapiens
  misc_RNA (1)...(19): siRNA sense strand
cugagauacaugguuauua

SEQ ID NO: 1822077 - RNA, 19 nt, Homo sapiens
  misc_RNA (1)...(19): siRNA sense strand
gagcaugcuguccacuuca

SEQ ID NO: 1822078 - RNA, 19 nt, Homo sapiens
  misc_RNA (1)...(19): siRNA sense strand
ugguauacacccugagaaa

SEQ ID NO: 1822079 - RNA, 19 nt, Homo sapiens
  misc_RNA (1)...(19): siRNA sense strand
gcacuauacaucuuaaccu

SEQ ID NO: 1822080 - RNA, 19 nt, Homo sapiens
  misc_RNA (1)...(19): siRNA sense strand
agguuacccuucugugcua

SEQ ID NO: 1822081 - RNA, 19 nt, Homo sapiens
  misc_RNA (1)...(19): siRNA sense strand
gcuauguggccaucugcaa

SEQ ID NO: 1822082 - RNA, 19 nt, Homo sapiens
  misc_RNA (1)...(19): siRNA sense strand
gggauaugaccgcuaugug

SEQ ID NO: 1822083 - RNA, 19 nt, Homo sapiens
  misc_RNA (1)...(19): siRNA sense strand
ccacuucuucugugacauc

SEQ ID NO: 1822084 - RNA, 19 nt, Homo sapiens
  misc_RNA (1)...(19): siRNA sense strand
gagccagcccaugucauug

SEQ ID NO: 1822085 - RNA, 19 nt, Homo sapiens
  misc_RNA (1)...(19): siRNA sense strand
aaccuuagcaggcaauauc

SEQ ID NO: 1822086 - RNA, 19 nt, Homo sapiens
  misc_RNA (1)...(19): siRNA sense strand
caaugaaauccugacuuug

SEQ ID NO: 1822087 - RNA, 19 nt, Homo sapiens
  misc_RNA (1)...(19): siRNA sense strand
gaagaugcaucaauugaaa

SEQ ID NO: 1822088 - RNA, 19 nt, Homo sapiens
  misc_RNA (1)...(19): siRNA sense strand
gaaagacacuacuguuauu

SEQ ID NO: 1822089 - RNA, 19 nt, Homo sapiens
  misc_RNA (1)...(19): siRNA sense strand
gagaauagcugcuggugaa

SEQ ID NO: 1822090 - RNA, 19 nt, Homo sapiens
  misc_RNA (1)...(19): siRNA sense strand
gaagauuucucguuucgaa

SEQ ID NO: 1822091 - RNA, 19 nt, Homo sapiens
  misc_RNA (1)...(19): siRNA sense strand
gaacgcauguauauugauu

SEQ ID NO: 1822092 - RNA, 19 nt, Homo sapiens
  misc_RNA (1)...(19): siRNA sense strand
gagaaagacacuacuguua

SEQ ID NO: 1822093 - RNA, 19 nt, Homo sapiens
  misc_RNA (1)...(19): siRNA sense strand
gaccagaaguccuugauga

SEQ ID NO: 1822094 - RNA, 19 nt, Homo sapiens
  misc_RNA (1)...(19): siRNA sense strand
cauaucagcucucuucuug

SEQ ID NO: 1822095 - RNA, 19 nt, Homo sapiens
  misc_RNA (1)...(19): siRNA sense strand
ggaaggaacucaagaagac

SEQ ID NO: 1822096 - RNA, 19 nt, Homo sapiens
  misc_RNA (1)...(19): siRNA sense strand
gagcagauguuggagaauu

SEQ ID NO: 1822097 - RNA, 19 nt, Homo sapiens
  misc_RNA (1)...(19): siRNA sense strand
gagaaugacuuuaacugau

SEQ ID NO: 1822098 - RNA, 19 nt, Homo sapiens
  misc_RNA (1)...(19): siRNA sense strand
ggcaacagauggaaauaaa

SEQ ID NO: 1822099 - RNA, 19 nt, Homo sapiens
  misc_RNA (1)...(19): siRNA sense strand
gagagcagauguuggagaa

SEQ ID NO: 1822100 - RNA, 19 nt, Homo sapiens
  misc_RNA (1)...(19): siRNA sense strand
cgaugaagauuucucguuu

SEQ ID NO: 1822101 - RNA, 19 nt, Homo sapiens
  misc_RNA (1)...(19): siRNA sense strand
cuucaaagcucgaaccaaa

SEQ ID NO: 1822102 - RNA, 19 nt, Homo sapiens
  misc_RNA (1)...(19): siRNA sense strand
caagagaaagggauuaauu

SEQ ID NO: 1822103 - RNA, 19 nt, Homo sapiens
  misc_RNA (1)...(19): siRNA sense strand
agaagcaaaugucgagaua

SEQ ID NO: 1822104 - RNA, 19 nt, Homo sapiens
  misc_RNA (1)...(19): siRNA sense strand
ggagaaugacuuuaacuga

SEQ ID NO: 1822105 - RNA, 19 nt, Homo sapiens
  misc_RNA (1)...(19): siRNA sense strand
acucaacucuggaauguuu

SEQ ID NO: 1822106 - RNA, 19 nt, Homo sapiens
  misc_RNA (1)...(19): siRNA sense strand
gacuuuaacugauagcauu

SEQ ID NO: 1822107 - RNA, 19 nt, Homo sapiens
  misc_RNA (1)...(19): siRNA sense strand
ugacauuacugaacuauac

SEQ ID NO: 1822108 - RNA, 19 nt, Homo sapiens
  misc_RNA (1)...(19): siRNA sense strand
gcacuucucuuugaauugg

SEQ ID NO: 1822109 - RNA, 19 nt, Homo sapiens
  misc_RNA (1)...(19): siRNA sense strand
ugaauuggccagaggaaua

SEQ ID NO: 1822110 - RNA, 19 nt, Homo sapiens
  misc_RNA (1)...(19): siRNA sense strand
uagcaucuguucuuuguau

SEQ ID NO: 1822111 - RNA, 19 nt, Homo sapiens
  misc_RNA (1)...(19): siRNA sense strand
aagaagaccuagaguacaa

SEQ ID NO: 1822112 - RNA, 19 nt, Homo sapiens
  misc_RNA (1)...(19): siRNA sense strand
aaccaaagcuagaagcaaa

SEQ ID NO: 1822113 - RNA, 19 nt, Homo sapiens
  misc_RNA (1)...(19): siRNA sense strand
ccacagaugacauuacuga

SEQ ID NO: 1822114 - RNA, 19 nt, Homo sapiens
  misc_RNA (1)...(19): siRNA sense strand
gauaagagagcagauguug

SEQ ID NO: 1822115 - RNA, 19 nt, Homo sapiens
  misc_RNA (1)...(19): siRNA sense strand
cuaauacagugcuucauau

SEQ ID NO: 1822116 - RNA, 19 nt, Homo sapiens
  misc_RNA (1)...(19): siRNA sense strand
uaagagagcagauguugga

SEQ ID NO: 1822117 - RNA, 19 nt, Homo sapiens
  misc_RNA (1)...(19): siRNA sense strand
guuagcaucuguucuuugu

SEQ ID NO: 1822118 - RNA, 19 nt, Homo sapiens
  misc_RNA (1)...(19): siRNA sense strand
cgaaaggcauuuauauaac

SEQ ID NO: 1822119 - RNA, 19 nt, Homo sapiens
  misc_RNA (1)...(19): siRNA sense strand
ccagaggaauagagaguga

SEQ ID NO: 1822120 - RNA, 19 nt, Homo sapiens
  misc_RNA (1)...(19): siRNA sense strand
cagaaaccauuaaauuugg

SEQ ID NO: 1822121 - RNA, 19 nt, Homo sapiens
  misc_RNA (1)...(19): siRNA sense strand
aagcagcucuugaagguau

SEQ ID NO: 1822122 - RNA, 19 nt, Homo sapiens
  misc_RNA (1)...(19): siRNA sense strand
caacagauggaaauaaaca

SEQ ID NO: 1822123 - RNA, 19 nt, Homo sapiens
  misc_RNA (1)...(19): siRNA sense strand
ccuaauacagugcuucaua

SEQ ID NO: 1822124 - RNA, 19 nt, Homo sapiens
  misc_RNA (1)...(19): siRNA sense strand
gcccuggaauugaaaguga

SEQ ID NO: 1822125 - RNA, 19 nt, Homo sapiens
  misc_RNA (1)...(19): siRNA sense strand
gaugaagauuucucguuuc

SEQ ID NO: 1822126 - RNA, 19 nt, Homo sapiens
  misc_RNA (1)...(19): siRNA sense strand
uaaggagguucuuggauca

SEQ ID NO: 1822127 - RNA, 19 nt, Homo sapiens
  misc_RNA (1)...(19): siRNA sense strand
acacaccuaugacaccuuu

SEQ ID NO: 1822128 - RNA, 19 nt, Homo sapiens
  misc_RNA (1)...(19): siRNA sense strand
gcugggcccuggaauugaa

SEQ ID NO: 1822129 - RNA, 19 nt, Homo sapiens
  misc_RNA (1)...(19): siRNA sense strand
gauaagagugcgaagacaa

SEQ ID NO: 1822130 - RNA, 19 nt, Homo sapiens
  misc_RNA (1)...(19): siRNA sense strand
gaccauaugcccaaucaau

SEQ ID NO: 1822131 - RNA, 19 nt, Homo sapiens
  misc_RNA (1)...(19): siRNA sense strand
gaaugacuuuaacugauag

SEQ ID NO: 1822132 - RNA, 19 nt, Homo sapiens
  misc_RNA (1)...(19): siRNA sense strand
guacccacuugcagucaaa

SEQ ID NO: 1822133 - RNA, 19 nt, Homo sapiens
  misc_RNA (1)...(19): siRNA sense strand
gaaagcagcggucaguuuu

SEQ ID NO: 1822134 - RNA, 19 nt, Homo sapiens
  misc_RNA (1)...(19): siRNA sense strand
ggacacuacugcugaccau

SEQ ID NO: 1822135 - RNA, 19 nt, Homo sapiens
  misc_RNA (1)...(19): siRNA sense strand
agaaagacacuacuguuau

SEQ ID NO: 1822136 - RNA, 19 nt, Homo sapiens
  misc_RNA (1)...(19): siRNA sense strand
uauauugauugcuggguaa

SEQ ID NO: 1822137 - RNA, 19 nt, Homo sapiens
  misc_RNA (1)...(19): siRNA sense strand
guacaagagaaagggauua

SEQ ID NO: 1822138 - RNA, 19 nt, Homo sapiens
  misc_RNA (1)...(19): siRNA sense strand
gcaaaugucgagauaagag

SEQ ID NO: 1822139 - RNA, 19 nt, Homo sapiens
  misc_RNA (1)...(19): siRNA sense strand
aagcaaaugucgagauaag

SEQ ID NO: 1822140 - RNA, 19 nt, Homo sapiens
  misc_RNA (1)...(19): siRNA sense strand
ccugaacgcauguauauug

SEQ ID NO: 1822141 - RNA, 19 nt, Homo sapiens
  misc_RNA (1)...(19): siRNA sense strand
uaucagcucucuucuugca

SEQ ID NO: 1822142 - RNA, 19 nt, Homo sapiens
  misc_RNA (1)...(19): siRNA sense strand
gcagguggccagcaucgaa

SEQ ID NO: 1822143 - RNA, 19 nt, Homo sapiens
  misc_RNA (1)...(19): siRNA sense strand
uaaauccuaucucaaagag

SEQ ID NO: 1822144 - RNA, 19 nt, Homo sapiens
  misc_RNA (1)...(19): siRNA sense strand
ggaccaauccuaaagaaaa

SEQ ID NO: 1822145 - RNA, 19 nt, Homo sapiens
  misc_RNA (1)...(19): siRNA sense strand
gaccuaacccuggauaaga

SEQ ID NO: 1822146 - RNA, 19 nt, Homo sapiens
  misc_RNA (1)...(19): siRNA sense strand
gaccuagaguacaagagaa

SEQ ID NO: 1822147 - RNA, 19 nt, Homo sapiens
  misc_RNA (1)...(19): siRNA sense strand
agaaagcagcggucaguuu

SEQ ID NO: 1822148 - RNA, 19 nt, Homo sapiens
  misc_RNA (1)...(19): siRNA sense strand
ccauaugcccaaucaauga

SEQ ID NO: 1822149 - RNA, 19 nt, Homo sapiens
  misc_RNA (1)...(19): siRNA sense strand
aaaaugcacuggcuucaaa

SEQ ID NO: 1822150 - RNA, 19 nt, Homo sapiens
  misc_RNA (1)...(19): siRNA sense strand
caacuugcuuugguguuug

SEQ ID NO: 1822151 - RNA, 19 nt, Homo sapiens
  misc_RNA (1)...(19): siRNA sense strand
gggaugcaguacccacuug

SEQ ID NO: 1822152 - RNA, 19 nt, Homo sapiens
  misc_RNA (1)...(19): siRNA sense strand
ugagaugcauuuccauaag

SEQ ID NO: 1822153 - RNA, 19 nt, Homo sapiens
  misc_RNA (1)...(19): siRNA sense strand
cacuaaauccuaucucaaa

SEQ ID NO: 1822154 - RNA, 19 nt, Homo sapiens
  misc_RNA (1)...(19): siRNA sense strand
gaauugaaagugaagagau

SEQ ID NO: 1822155 - RNA, 19 nt, Homo sapiens
  misc_RNA (1)...(19): siRNA sense strand
gagauaagagagcagaugu

SEQ ID NO: 1822156 - RNA, 19 nt, Homo sapiens
  misc_RNA (1)...(19): siRNA sense strand
gaaccaaagcuagaagcaa

SEQ ID NO: 1822157 - RNA, 19 nt, Homo sapiens
  misc_RNA (1)...(19): siRNA sense strand
ccaaaguggacaagagaaa

SEQ ID NO: 1822158 - RNA, 19 nt, Homo sapiens
  misc_RNA (1)...(19): siRNA sense strand
gaagacauggaguccuuga

SEQ ID NO: 1822159 - RNA, 19 nt, Homo sapiens
  misc_RNA (1)...(19): siRNA sense strand
cagaugacauuacugaacu

SEQ ID NO: 1822160 - RNA, 19 nt, Homo sapiens
  misc_RNA (1)...(19): siRNA sense strand
ugugaugggucagcuagua

SEQ ID NO: 1822161 - RNA, 19 nt, Homo sapiens
  misc_RNA (1)...(19): siRNA sense strand
gguguuugcuguuuuauug

SEQ ID NO: 1822162 - RNA, 19 nt, Homo sapiens
  misc_RNA (1)...(19): siRNA sense strand
ucaagaagaccuagaguac

SEQ ID NO: 1822163 - RNA, 19 nt, Homo sapiens
  misc_RNA (1)...(19): siRNA sense strand
agagaaagggauuaauuga

SEQ ID NO: 1822164 - RNA, 19 nt, Homo sapiens
  misc_RNA (1)...(19): siRNA sense strand
gaagcaaaugucgagauaa

SEQ ID NO: 1822165 - RNA, 19 nt, Homo sapiens
  misc_RNA (1)...(19): siRNA sense strand
uuacugaacuauacucaac

SEQ ID NO: 1822166 - RNA, 19 nt, Homo sapiens
  misc_RNA (1)...(19): siRNA sense strand
uggcacuucucuuugaauu

SEQ ID NO: 1822167 - RNA, 19 nt, Homo sapiens
  misc_RNA (1)...(19): siRNA sense strand
cauuaaauuugguccugaa

SEQ ID NO: 1822168 - RNA, 19 nt, Homo sapiens
  misc_RNA (1)...(19): siRNA sense strand
ggauaagagugcgaagaca

SEQ ID NO: 1822169 - RNA, 19 nt, Homo sapiens
  misc_RNA (1)...(19): siRNA sense strand
caucuguucuuuguauuca

SEQ ID NO: 1822170 - RNA, 19 nt, Homo sapiens
  misc_RNA (1)...(19): siRNA sense strand
gaacucaagaagaccuaga

SEQ ID NO: 1822171 - RNA, 19 nt, Homo sapiens
  misc_RNA (1)...(19): siRNA sense strand
cugaacgcauguauauuga

SEQ ID NO: 1822172 - RNA, 19 nt, Homo sapiens
  misc_RNA (1)...(19): siRNA sense strand
guccugaacgcauguauau

SEQ ID NO: 1822173 - RNA, 19 nt, Homo sapiens
  misc_RNA (1)...(19): siRNA sense strand
ugaagaugcaucaauugaa

SEQ ID NO: 1822174 - RNA, 19 nt, Homo sapiens
  misc_RNA (1)...(19): siRNA sense strand
gagaugcauuuccauaagc

SEQ ID NO: 1822175 - RNA, 19 nt, Homo sapiens
  misc_RNA (1)...(19): siRNA sense strand
aagagaaagggauuaauug

SEQ ID NO: 1822176 - RNA, 19 nt, Homo sapiens
  misc_RNA (1)...(19): siRNA sense strand
auacucaacucuggaaugu

SEQ ID NO: 1822177 - RNA, 19 nt, Homo sapiens
  misc_RNA (1)...(19): siRNA sense strand
gcguuagcaucuguucuuu

SEQ ID NO: 1822178 - RNA, 19 nt, Homo sapiens
  misc_RNA (1)...(19): siRNA sense strand
uaacucugcagccuucaaa

SEQ ID NO: 1822179 - RNA, 19 nt, Homo sapiens
  misc_RNA (1)...(19): siRNA sense strand
gggccaaaguggacaagag

SEQ ID NO: 1822180 - RNA, 19 nt, Homo sapiens
  misc_RNA (1)...(19): siRNA sense strand
gcuuugguguuugcuguuu

SEQ ID NO: 1822181 - RNA, 19 nt, Homo sapiens
  misc_RNA (1)...(19): siRNA sense strand
cagcugggcccuggaauug

SEQ ID NO: 1822182 - RNA, 19 nt, Homo sapiens
  misc_RNA (1)...(19): siRNA sense strand
ggaauugaaagugaagaga

SEQ ID NO: 1822183 - RNA, 19 nt, Homo sapiens
  misc_RNA (1)...(19): siRNA sense strand
gaagaccuagaguacaaga

SEQ ID NO: 1822184 - RNA, 19 nt, Homo sapiens
  misc_RNA (1)...(19): siRNA sense strand
gcagcacuccuaauacagu

SEQ ID NO: 1822185 - RNA, 19 nt, Homo sapiens
  misc_RNA (1)...(19): siRNA sense strand
acaccuaugacaccuuuaa

SEQ ID NO: 1822186 - RNA, 19 nt, Homo sapiens
  misc_RNA (1)...(19): siRNA sense strand
gacagcagguggccagcau

SEQ ID NO: 1822187 - RNA, 19 nt, Homo sapiens
  misc_RNA (1)...(19): siRNA sense strand
guugaugccuuacaugaaa

SEQ ID NO: 1822188 - RNA, 19 nt, Homo sapiens
  misc_RNA (1)...(19): siRNA sense strand
gcugguaucuccucuaagu

SEQ ID NO: 1822189 - RNA, 19 nt, Homo sapiens
  misc_RNA (1)...(19): siRNA sense strand
gggacaaccuggccauuca

SEQ ID NO: 1822190 - RNA, 19 nt, Homo sapiens
  misc_RNA (1)...(19): siRNA sense strand
gugcugguaucuccucuaa

SEQ ID NO: 1822191 - RNA, 19 nt, Homo sapiens
  misc_RNA (1)...(19): siRNA sense strand
gaauaugagugccaugcau

SEQ ID NO: 1822192 - RNA, 19 nt, Homo sapiens
  misc_RNA (1)...(19): siRNA sense strand
gcugugaggucaucggaau

SEQ ID NO: 1822193 - RNA, 19 nt, Homo sapiens
  misc_RNA (1)...(19): siRNA sense strand
uacagugguugaugccuua

SEQ ID NO: 1822194 - RNA, 19 nt, Homo sapiens
  misc_RNA (1)...(19): siRNA sense strand
ugaaggugccgagcuauaa

SEQ ID NO: 1822195 - RNA, 19 nt, Homo sapiens
  misc_RNA (1)...(19): siRNA sense strand
gugaaggugccgagcuaua

SEQ ID NO: 1822196 - RNA, 19 nt, Homo sapiens
  misc_RNA (1)...(19): siRNA sense strand
uuacaugaaauaccaguga

SEQ ID NO: 1822197 - RNA, 19 nt, Homo sapiens
  misc_RNA (1)...(19): siRNA sense strand
caagggcaccugcgagcaa

SEQ ID NO: 1822198 - RNA, 19 nt, Homo sapiens
  misc_RNA (1)...(19): siRNA sense strand
ugguaucuccucuaaguaa

SEQ ID NO: 1822199 - RNA, 19 nt, Homo sapiens
  misc_RNA (1)...(19): siRNA sense strand
caccuguccucaucuggaa

SEQ ID NO: 1822200 - RNA, 19 nt, Homo sapiens
  misc_RNA (1)...(19): siRNA sense strand
uacaugaaauaccagugaa

SEQ ID NO: 1822201 - RNA, 19 nt, Homo sapiens
  misc_RNA (1)...(19): siRNA sense strand
ugagugccaugcauccaau

SEQ ID NO: 1822202 - RNA, 19 nt, Homo sapiens
  misc_RNA (1)...(19): siRNA sense strand
aggacaggcuucagcauca

SEQ ID NO: 1822203 - RNA, 19 nt, Homo sapiens
  misc_RNA (1)...(19): siRNA sense strand
gguaucuccucuaaguaag

SEQ ID NO: 1822204 - RNA, 19 nt, Homo sapiens
  misc_RNA (1)...(19): siRNA sense strand
gguugaugccuuacaugaa

SEQ ID NO: 1822205 - RNA, 19 nt, Homo sapiens
  misc_RNA (1)...(19): siRNA sense strand
ggacaggcuucagcaucag

SEQ ID NO: 1822206 - RNA, 19 nt, Homo sapiens
  misc_RNA (1)...(19): siRNA sense strand
aggugaaggugccgagcua

SEQ ID NO: 1822207 - RNA, 19 nt, Homo sapiens
  misc_RNA (1)...(19): siRNA sense strand
gggcauggagugcgugaag

SEQ ID NO: 1822208 - RNA, 19 nt, Homo sapiens
  misc_RNA (1)...(19): siRNA sense strand
ggcauggagugcgugaaga

SEQ ID NO: 1822209 - RNA, 19 nt, Homo sapiens
  misc_RNA (1)...(19): siRNA sense strand
ugccuuacaugaaauacca

SEQ ID NO: 1822210 - RNA, 19 nt, Homo sapiens
  misc_RNA (1)...(19): siRNA sense strand
ccucaucuggaacaaggua

SEQ ID NO: 1822211 - RNA, 19 nt, Homo sapiens
  misc_RNA (1)...(19): siRNA sense strand
gcauggagugcgugaagag

SEQ ID NO: 1822212 - RNA, 19 nt, Homo sapiens
  misc_RNA (1)...(19): siRNA sense strand
gacaaccuggccauucaga

SEQ ID NO: 1822213 - RNA, 19 nt, Homo sapiens
  misc_RNA (1)...(19): siRNA sense strand
ggaaauaucccgagaugga

SEQ ID NO: 1822214 - RNA, 19 nt, Homo sapiens
  misc_RNA (1)...(19): siRNA sense strand
gcacagaaccugccaaagu

SEQ ID NO: 1822215 - RNA, 19 nt, Homo sapiens
  misc_RNA (1)...(19): siRNA sense strand
ucuccaagcugcuguauaa

SEQ ID NO: 1822216 - RNA, 19 nt, Homo sapiens
  misc_RNA (1)...(19): siRNA sense strand
ggacaaacgucacaaagac

SEQ ID NO: 1822217 - RNA, 19 nt, Homo sapiens
  misc_RNA (1)...(19): siRNA sense strand
gaaguucgcugucgagcau

SEQ ID NO: 1822218 - RNA, 19 nt, Homo sapiens
  misc_RNA (1)...(19): siRNA sense strand
gcaacaaccugaacuucug

SEQ ID NO: 1822219 - RNA, 19 nt, Homo sapiens
  misc_RNA (1)...(19): siRNA sense strand
ugacgcaccuguccaacua

SEQ ID NO: 1822220 - RNA, 19 nt, Homo sapiens
  misc_RNA (1)...(19): siRNA sense strand
caacuacuuugauucagaa

SEQ ID NO: 1822221 - RNA, 19 nt, Homo sapiens
  misc_RNA (1)...(19): siRNA sense strand
ucaaaucacuccaccuaug

SEQ ID NO: 1822222 - RNA, 19 nt, Homo sapiens
  misc_RNA (1)...(19): siRNA sense strand
gcacacaucccaaacuuca

SEQ ID NO: 1822223 - RNA, 19 nt, Homo sapiens
  misc_RNA (1)...(19): siRNA sense strand
gggagcugcuggacaagua

SEQ ID NO: 1822224 - RNA, 19 nt, Homo sapiens
  misc_RNA (1)...(19): siRNA sense strand
uaaaguacaccuuccauga

SEQ ID NO: 1822225 - RNA, 19 nt, Homo sapiens
  misc_RNA (1)...(19): siRNA sense strand
acaaaggcaucgacuggua

SEQ ID NO: 1822226 - RNA, 19 nt, Homo sapiens
  misc_RNA (1)...(19): siRNA sense strand
gcaaacugcuucgcacaga

SEQ ID NO: 1822227 - RNA, 19 nt, Homo sapiens
  misc_RNA (1)...(19): siRNA sense strand
gagaacauccucaaguaug

SEQ ID NO: 1822228 - RNA, 19 nt, Homo sapiens
  misc_RNA (1)...(19): siRNA sense strand
gcgcacacaucccaaacuu

SEQ ID NO: 1822229 - RNA, 19 nt, Homo sapiens
  misc_RNA (1)...(19): siRNA sense strand
gccagacacuucccacuug

SEQ ID NO: 1822230 - RNA, 19 nt, Homo sapiens
  misc_RNA (1)...(19): siRNA sense strand
ccacugcccucuaccuguu

SEQ ID NO: 1822231 - RNA, 19 nt, Homo sapiens
  misc_RNA (1)...(19): siRNA sense strand
cacagaaccugccaaagug

SEQ ID NO: 1822232 - RNA, 19 nt, Homo sapiens
  misc_RNA (1)...(19): siRNA sense strand
ccaacuacuuugauucaga

SEQ ID NO: 1822233 - RNA, 19 nt, Homo sapiens
  misc_RNA (1)...(19): siRNA sense strand
caaaucacuccaccuauga

SEQ ID NO: 1822234 - RNA, 19 nt, Homo sapiens
  misc_RNA (1)...(19): siRNA sense strand
ccaagcugcuguauaagau

SEQ ID NO: 1822235 - RNA, 19 nt, Homo sapiens
  misc_RNA (1)...(19): siRNA sense strand
ggcgaggacuggacgguuu

SEQ ID NO: 1822236 - RNA, 19 nt, Homo sapiens
  misc_RNA (1)...(19): siRNA sense strand
ggucuuggauggcaaacug

SEQ ID NO: 1822237 - RNA, 19 nt, Homo sapiens
  misc_RNA (1)...(19): siRNA sense strand
ccaaggagaagacguguga

SEQ ID NO: 1822238 - RNA, 19 nt, Homo sapiens
  misc_RNA (1)...(19): siRNA sense strand
ggacgugaaggcccuguuu

SEQ ID NO: 1822239 - RNA, 19 nt, Homo sapiens
  misc_RNA (1)...(19): siRNA sense strand
gggcaucauuggcuucuuc

SEQ ID NO: 1822240 - RNA, 19 nt, Homo sapiens
  misc_RNA (1)...(19): siRNA sense strand
caacaccaccuccgacuuc

SEQ ID NO: 1822241 - RNA, 19 nt, Homo sapiens
  misc_RNA (1)...(19): siRNA sense strand
caaacugcuucgcacagaa

SEQ ID NO: 1822242 - RNA, 19 nt, Homo sapiens
  misc_RNA (1)...(19): siRNA sense strand
ugaaggaguucuggugguu

SEQ ID NO: 1822243 - RNA, 19 nt, Homo sapiens
  misc_RNA (1)...(19): siRNA sense strand
ccggaaauaucccgagaug

SEQ ID NO: 1822244 - RNA, 19 nt, Homo sapiens
  misc_RNA (1)...(19): siRNA sense strand
ucaaauaccgcacagagau

SEQ ID NO: 1822245 - RNA, 19 nt, Homo sapiens
  misc_RNA (1)...(19): siRNA sense strand
ccaaagugauggacauggu

SEQ ID NO: 1822246 - RNA, 19 nt, Homo sapiens
  misc_RNA (1)...(19): siRNA sense strand
acaaagacaucugguccaa

SEQ ID NO: 1822247 - RNA, 19 nt, Homo sapiens
  misc_RNA (1)...(19): siRNA sense strand
ucacacacaccaucuucua

SEQ ID NO: 1822248 - RNA, 19 nt, Homo sapiens
  misc_RNA (1)...(19): siRNA sense strand
ugucguaugugaaggaguu

SEQ ID NO: 1822249 - RNA, 19 nt, Homo sapiens
  misc_RNA (1)...(19): siRNA sense strand
caaauaccgcacagagauu

SEQ ID NO: 1822250 - RNA, 19 nt, Homo sapiens
  misc_RNA (1)...(19): siRNA sense strand
ggaagcagguguggagcau

SEQ ID NO: 1822251 - RNA, 19 nt, Homo sapiens
  misc_RNA (1)...(19): siRNA sense strand
cugaaggacugcagcauca

SEQ ID NO: 1822252 - RNA, 19 nt, Homo sapiens
  misc_RNA (1)...(19): siRNA sense strand
ugauggacauggugcagaa

SEQ ID NO: 1822253 - RNA, 19 nt, Homo sapiens
  misc_RNA (1)...(19): siRNA sense strand
ggccacaacuaucacaaag

SEQ ID NO: 1822254 - RNA, 19 nt, Homo sapiens
  misc_RNA (1)...(19): siRNA sense strand
ccgagcagauggccuugaa

SEQ ID NO: 1822255 - RNA, 19 nt, Homo sapiens
  misc_RNA (1)...(19): siRNA sense strand
ucccaaagcuccucaucau

SEQ ID NO: 1822256 - RNA, 19 nt, Homo sapiens
  misc_RNA (1)...(19): siRNA sense strand
ccuaucagcaucuucauga

SEQ ID NO: 1822257 - RNA, 19 nt, Homo sapiens
  misc_RNA (1)...(19): siRNA sense strand
gagcagauggccuugaaca

SEQ ID NO: 1822258 - RNA, 19 nt, Homo sapiens
  misc_RNA (1)...(19): siRNA sense strand
caucucggccuacuaccua

SEQ ID NO: 1822259 - RNA, 19 nt, Homo sapiens
  misc_RNA (1)...(19): siRNA sense strand
gaagguggaggacgugaag

SEQ ID NO: 1822260 - RNA, 19 nt, Homo sapiens
  misc_RNA (1)...(19): siRNA sense strand
ugaccaacaccauugacua

SEQ ID NO: 1822261 - RNA, 19 nt, Homo sapiens
  misc_RNA (1)...(19): siRNA sense strand
gggcaugcacccugaccua

SEQ ID NO: 1822262 - RNA, 19 nt, Homo sapiens
  misc_RNA (1)...(19): siRNA sense strand
gcuucgcccucaucaucua

SEQ ID NO: 1822263 - RNA, 19 nt, Homo sapiens
  misc_RNA (1)...(19): siRNA sense strand
ccuccgacuucuacuuuga

SEQ ID NO: 1822264 - RNA, 19 nt, Homo sapiens
  misc_RNA (1)...(19): siRNA sense strand
cauccacaauggcaucaug

SEQ ID NO: 1822265 - RNA, 19 nt, Homo sapiens
  misc_RNA (1)...(19): siRNA sense strand
ggaguccagccgcuucaaa

SEQ ID NO: 1822266 - RNA, 19 nt, Homo sapiens
  misc_RNA (1)...(19): siRNA sense strand
ggacauggugcagaaguuc

SEQ ID NO: 1822267 - RNA, 19 nt, Homo sapiens
  misc_RNA (1)...(19): siRNA sense strand
gcagcccucuugcccaaag

SEQ ID NO: 1822268 - RNA, 19 nt, Homo sapiens
  misc_RNA (1)...(19): siRNA sense strand
ccacacagguaccaaugcu

SEQ ID NO: 1822269 - RNA, 19 nt, Homo sapiens
  misc_RNA (1)...(19): siRNA sense strand
agucaaaucacuccaccua

SEQ ID NO: 1822270 - RNA, 19 nt, Homo sapiens
  misc_RNA (1)...(19): siRNA sense strand
ugacacacagaacgaacua

SEQ ID NO: 1822271 - RNA, 19 nt, Homo sapiens
  misc_RNA (1)...(19): siRNA sense strand
gaucugcugcugucguaug

SEQ ID NO: 1822272 - RNA, 19 nt, Homo sapiens
  misc_RNA (1)...(19): siRNA sense strand
caccauugacuaccacaaa

SEQ ID NO: 1822273 - RNA, 19 nt, Homo sapiens
  misc_RNA (1)...(19): siRNA sense strand
uuaauggccacaacuauca

SEQ ID NO: 1822274 - RNA, 19 nt, Homo sapiens
  misc_RNA (1)...(19): siRNA sense strand
gaggacaaacgucacaaag

SEQ ID NO: 1822275 - RNA, 19 nt, Homo sapiens
  misc_RNA (1)...(19): siRNA sense strand
ccacaauggcaucaugguu

SEQ ID NO: 1822276 - RNA, 19 nt, Homo sapiens
  misc_RNA (1)...(19): siRNA sense strand
cugcugcugucguauguga

SEQ ID NO: 1822277 - RNA, 19 nt, Homo sapiens
  misc_RNA (1)...(19): siRNA sense strand
acucaaaccugggccugaa

SEQ ID NO: 1822278 - RNA, 19 nt, Homo sapiens
  misc_RNA (1)...(19): siRNA sense strand
ccaacaccauugacuacca

SEQ ID NO: 1822279 - RNA, 19 nt, Homo sapiens
  misc_RNA (1)...(19): siRNA sense strand
gaccaacaccauugacuac

SEQ ID NO: 1822280 - RNA, 19 nt, Homo sapiens
  misc_RNA (1)...(19): siRNA sense strand
gugaaggcccuguuugaca

SEQ ID NO: 1822281 - RNA, 19 nt, Homo sapiens
  misc_RNA (1)...(19): siRNA sense strand
cuagcgagguggagaaagg

SEQ ID NO: 1822282 - RNA, 19 nt, Homo sapiens
  misc_RNA (1)...(19): siRNA sense strand
cacacaccaucuucuacaa

SEQ ID NO: 1822283 - RNA, 19 nt, Homo sapiens
  misc_RNA (1)...(19): siRNA sense strand
ggccagacacuucccacuu

SEQ ID NO: 1822284 - RNA, 19 nt, Homo sapiens
  misc_RNA (1)...(19): siRNA sense strand
gcucugacgcauccucgaa

SEQ ID NO: 1822285 - RNA, 19 nt, Homo sapiens
  misc_RNA (1)...(19): siRNA sense strand
caccuccgacuucuacuuu

SEQ ID NO: 1822286 - RNA, 19 nt, Homo sapiens
  misc_RNA (1)...(19): siRNA sense strand
ggacgguuuuccagucaaa

SEQ ID NO: 1822287 - RNA, 19 nt, Homo sapiens
  misc_RNA (1)...(19): siRNA sense strand
cgaggacaaacgucacaaa

SEQ ID NO: 1822288 - RNA, 19 nt, Homo sapiens
  misc_RNA (1)...(19): siRNA sense strand
acaauggcaucaugguucu

SEQ ID NO: 1822289 - RNA, 19 nt, Homo sapiens
  misc_RNA (1)...(19): siRNA sense strand
gaguccagccgcuucaaau

SEQ ID NO: 1822290 - RNA, 19 nt, Homo sapiens
  misc_RNA (1)...(19): siRNA sense strand
ggagggcacacgcaugaag

SEQ ID NO: 1822291 - RNA, 19 nt, Homo sapiens
  misc_RNA (1)...(19): siRNA sense strand
aaggagggcacacgcauga

SEQ ID NO: 1822292 - RNA, 19 nt, Homo sapiens
  misc_RNA (1)...(19): siRNA sense strand
ucccaaacuucaccuucaa

SEQ ID NO: 1822293 - RNA, 19 nt, Homo sapiens
  misc_RNA (1)...(19): siRNA sense strand
uaagaugggccagacacuu

SEQ ID NO: 1822294 - RNA, 19 nt, Homo sapiens
  misc_RNA (1)...(19): siRNA sense strand
gcaguuggcgcagaaguac

SEQ ID NO: 1822295 - RNA, 19 nt, Homo sapiens
  misc_RNA (1)...(19): siRNA sense strand
caucauuggcuucuucaag

SEQ ID NO: 1822296 - RNA, 19 nt, Homo sapiens
  misc_RNA (1)...(19): siRNA sense strand
gacaaacgucacaaagaca

SEQ ID NO: 1822297 - RNA, 19 nt, Homo sapiens
  misc_RNA (1)...(19): siRNA sense strand
ugaccagcacggaggagua

SEQ ID NO: 1822298 - RNA, 19 nt, Homo sapiens
  misc_RNA (1)...(19): siRNA sense strand
gggcuacucagggaaauuc

SEQ ID NO: 1822299 - RNA, 19 nt, Homo sapiens
  misc_RNA (1)...(19): siRNA sense strand
gaacuucuggcugcacaag

SEQ ID NO: 1822300 - RNA, 19 nt, Homo sapiens
  misc_RNA (1)...(19): siRNA sense strand
ggcaacaaccugaacuucu

SEQ ID NO: 1822301 - RNA, 19 nt, Homo sapiens
  misc_RNA (1)...(19): siRNA sense strand
uggacauggugcagaaguu

SEQ ID NO: 1822302 - RNA, 19 nt, Homo sapiens
  misc_RNA (1)...(19): siRNA sense strand
gaccugcggccucuucaca

SEQ ID NO: 1822303 - RNA, 19 nt, Homo sapiens
  misc_RNA (1)...(19): siRNA sense strand
cgaacuacgcgcacacauc

SEQ ID NO: 1822304 - RNA, 19 nt, Homo sapiens
  misc_RNA (1)...(19): siRNA sense strand
augaucugcugcugucgua

SEQ ID NO: 1822305 - RNA, 19 nt, Homo sapiens
  misc_RNA (1)...(19): siRNA sense strand
ccgcuucgcccucaucauc

SEQ ID NO: 1822306 - RNA, 19 nt, Homo sapiens
  misc_RNA (1)...(19): siRNA sense strand
ggcaugcacccugaccuaa

SEQ ID NO: 1822307 - RNA, 19 nt, Homo sapiens
  misc_RNA (1)...(19): siRNA sense strand
ucaauccuaucagcaucuu

SEQ ID NO: 1822308 - RNA, 19 nt, Homo sapiens
  misc_RNA (1)...(19): siRNA sense strand
gcaugcacccugaccuaag

SEQ ID NO: 1822309 - RNA, 19 nt, Homo sapiens
  misc_RNA (1)...(19): siRNA sense strand
guucaucuucugccuguuc

SEQ ID NO: 1822310 - RNA, 19 nt, Homo sapiens
  misc_RNA (1)...(19): siRNA sense strand
ccaguggcccuaaaguaca

SEQ ID NO: 1822311 - RNA, 19 nt, Homo sapiens
  misc_RNA (1)...(19): siRNA sense strand
aguccagccgcuucaaaua

SEQ ID NO: 1822312 - RNA, 19 nt, Homo sapiens
  misc_RNA (1)...(19): siRNA sense strand
acugguacauggaguucuu

SEQ ID NO: 1822313 - RNA, 19 nt, Homo sapiens
  misc_RNA (1)...(19): siRNA sense strand
ggauaaagcucuugaguua

SEQ ID NO: 1822314 - RNA, 19 nt, Homo sapiens
  misc_RNA (1)...(19): siRNA sense strand
gaacaggcaucauuaacaa

SEQ ID NO: 1822315 - RNA, 19 nt, Homo sapiens
  misc_RNA (1)...(19): siRNA sense strand
caauugagaugucacuuua

SEQ ID NO: 1822316 - RNA, 19 nt, Homo sapiens
  misc_RNA (1)...(19): siRNA sense strand
gauaagaucagccauauuu

SEQ ID NO: 1822317 - RNA, 19 nt, Homo sapiens
  misc_RNA (1)...(19): siRNA sense strand
gcaagaagcuuucaaaucc

SEQ ID NO: 1822318 - RNA, 19 nt, Homo sapiens
  misc_RNA (1)...(19): siRNA sense strand
ucaaaucccuuccgcuaua

SEQ ID NO: 1822319 - RNA, 19 nt, Homo sapiens
  misc_RNA (1)...(19): siRNA sense strand
gagacuggcugcugacuuu

SEQ ID NO: 1822320 - RNA, 19 nt, Homo sapiens
  misc_RNA (1)...(19): siRNA sense strand
gaucagccauauuucauuu

SEQ ID NO: 1822321 - RNA, 19 nt, Homo sapiens
  misc_RNA (1)...(19): siRNA sense strand
ggaagaacaugacaaccaa

SEQ ID NO: 1822322 - RNA, 19 nt, Homo sapiens
  misc_RNA (1)...(19): siRNA sense strand
aaagaaaucugacgucaau

SEQ ID NO: 1822323 - RNA, 19 nt, Homo sapiens
  misc_RNA (1)...(19): siRNA sense strand
caaauacagugugggaaua

SEQ ID NO: 1822324 - RNA, 19 nt, Homo sapiens
  misc_RNA (1)...(19): siRNA sense strand
gagaaaagcuagacaaaau

SEQ ID NO: 1822325 - RNA, 19 nt, Homo sapiens
  misc_RNA (1)...(19): siRNA sense strand
gcaagaauguauauagaag

SEQ ID NO: 1822326 - RNA, 19 nt, Homo sapiens
  misc_RNA (1)...(19): siRNA sense strand
uaaggaaacuucggagaaa

SEQ ID NO: 1822327 - RNA, 19 nt, Homo sapiens
  misc_RNA (1)...(19): siRNA sense strand
gccaaggccugcuuugaaa

SEQ ID NO: 1822328 - RNA, 19 nt, Homo sapiens
  misc_RNA (1)...(19): siRNA sense strand
ggaaggaaauaugaaugaa

SEQ ID NO: 1822329 - RNA, 19 nt, Homo sapiens
  misc_RNA (1)...(19): siRNA sense strand
acaggaagcugaaggagaa

SEQ ID NO: 1822330 - RNA, 19 nt, Homo sapiens
  misc_RNA (1)...(19): siRNA sense strand
gcaauugagaugucacuuu

SEQ ID NO: 1822331 - RNA, 19 nt, Homo sapiens
  misc_RNA (1)...(19): siRNA sense strand
gaagaaacaaugcaagaca

SEQ ID NO: 1822332 - RNA, 19 nt, Homo sapiens
  misc_RNA (1)...(19): siRNA sense strand
agaaauagacugugaggaa

SEQ ID NO: 1822333 - RNA, 19 nt, Homo sapiens
  misc_RNA (1)...(19): siRNA sense strand
gaacaugacaaccaagcaa

SEQ ID NO: 1822334 - RNA, 19 nt, Homo sapiens
  misc_RNA (1)...(19): siRNA sense strand
gaucaucaggucaaggaua

SEQ ID NO: 1822335 - RNA, 19 nt, Homo sapiens
  misc_RNA (1)...(19): siRNA sense strand
cauuagaucuggaaagcuu

SEQ ID NO: 1822336 - RNA, 19 nt, Homo sapiens
  misc_RNA (1)...(19): siRNA sense strand
cagaaaagcugaagagaau

SEQ ID NO: 1822337 - RNA, 19 nt, Homo sapiens
  misc_RNA (1)...(19): siRNA sense strand
gggaauacacaaccuacua

SEQ ID NO: 1822338 - RNA, 19 nt, Homo sapiens
  misc_RNA (1)...(19): siRNA sense strand
ggagaacauuugcaagaag

SEQ ID NO: 1822339 - RNA, 19 nt, Homo sapiens
  misc_RNA (1)...(19): siRNA sense strand
ggagaaaggcauuagaucu

SEQ ID NO: 1822340 - RNA, 19 nt, Homo sapiens
  misc_RNA (1)...(19): siRNA sense strand
uggcagaagcccagacuua

SEQ ID NO: 1822341 - RNA, 19 nt, Homo sapiens
  misc_RNA (1)...(19): siRNA sense strand
ugaaugaagcccuggagua

SEQ ID NO: 1822342 - RNA, 19 nt, Homo sapiens
  misc_RNA (1)...(19): siRNA sense strand
guccagaaauagacuguga

SEQ ID NO: 1822343 - RNA, 19 nt, Homo sapiens
  misc_RNA (1)...(19): siRNA sense strand
gagaaaggcauuagaucug

SEQ ID NO: 1822344 - RNA, 19 nt, Homo sapiens
  misc_RNA (1)...(19): siRNA sense strand
ccuacuagccuaugugaaa

SEQ ID NO: 1822345 - RNA, 19 nt, Homo sapiens
  misc_RNA (1)...(19): siRNA sense strand
aauagaacaggcaucauua

SEQ ID NO: 1822346 - RNA, 19 nt, Homo sapiens
  misc_RNA (1)...(19): siRNA sense strand
aaauagaacaggcaucauu

SEQ ID NO: 1822347 - RNA, 19 nt, Homo sapiens
  misc_RNA (1)...(19): siRNA sense strand
gccaacauguccucacaga

SEQ ID NO: 1822348 - RNA, 19 nt, Homo sapiens
  misc_RNA (1)...(19): siRNA sense strand
cuggauggcuuuaaauuag

SEQ ID NO: 1822349 - RNA, 19 nt, Homo sapiens
  misc_RNA (1)...(19): siRNA sense strand
ggaugggccuugcugaagu

SEQ ID NO: 1822350 - RNA, 19 nt, Homo sapiens
  misc_RNA (1)...(19): siRNA sense strand
uggcaagaauguauauaga

SEQ ID NO: 1822351 - RNA, 19 nt, Homo sapiens
  misc_RNA (1)...(19): siRNA sense strand
aaggcaggcuguccgcuua

SEQ ID NO: 1822352 - RNA, 19 nt, Homo sapiens
  misc_RNA (1)...(19): siRNA sense strand
ugacgucaaugcaauuauc

SEQ ID NO: 1822353 - RNA, 19 nt, Homo sapiens
  misc_RNA (1)...(19): siRNA sense strand
gaaaagcugaagagaauuu

SEQ ID NO: 1822354 - RNA, 19 nt, Homo sapiens
  misc_RNA (1)...(19): siRNA sense strand
gaaaaggcucuguggauaa

SEQ ID NO: 1822355 - RNA, 19 nt, Homo sapiens
  misc_RNA (1)...(19): siRNA sense strand
gaguacaaauggugaugau

SEQ ID NO: 1822356 - RNA, 19 nt, Homo sapiens
  misc_RNA (1)...(19): siRNA sense strand
caacuuugccuggauguau

SEQ ID NO: 1822357 - RNA, 19 nt, Homo sapiens
  misc_RNA (1)...(19): siRNA sense strand
gaaugaagcccuggaguac

SEQ ID NO: 1822358 - RNA, 19 nt, Homo sapiens
  misc_RNA (1)...(19): siRNA sense strand
aggauagucuggagcaauu

SEQ ID NO: 1822359 - RNA, 19 nt, Homo sapiens
  misc_RNA (1)...(19): siRNA sense strand
uaagaucagccauauuuca

SEQ ID NO: 1822360 - RNA, 19 nt, Homo sapiens
  misc_RNA (1)...(19): siRNA sense strand
ggaucagauugaauuccua

SEQ ID NO: 1822361 - RNA, 19 nt, Homo sapiens
  misc_RNA (1)...(19): siRNA sense strand
gaagcaggcaaucacagaa

SEQ ID NO: 1822362 - RNA, 19 nt, Homo sapiens
  misc_RNA (1)...(19): siRNA sense strand
ccuggauggcuuuaaauua

SEQ ID NO: 1822363 - RNA, 19 nt, Homo sapiens
  misc_RNA (1)...(19): siRNA sense strand
ggacaagguggagaacauu

SEQ ID NO: 1822364 - RNA, 19 nt, Homo sapiens
  misc_RNA (1)...(19): siRNA sense strand
ggaauacacaaccuacuag

SEQ ID NO: 1822365 - RNA, 19 nt, Homo sapiens
  misc_RNA (1)...(19): siRNA sense strand
cagauugaauuccuagaca

SEQ ID NO: 1822366 - RNA, 19 nt, Homo sapiens
  misc_RNA (1)...(19): siRNA sense strand
gaaaggccagaaugaggaa

SEQ ID NO: 1822367 - RNA, 19 nt, Homo sapiens
  misc_RNA (1)...(19): siRNA sense strand
ugagaacucugugagacaa

SEQ ID NO: 1822368 - RNA, 19 nt, Homo sapiens
  misc_RNA (1)...(19): siRNA sense strand
augaagcccuggaguacua

SEQ ID NO: 1822369 - RNA, 19 nt, Homo sapiens
  misc_RNA (1)...(19): siRNA sense strand
gaaggaaauaugaaugaag

SEQ ID NO: 1822370 - RNA, 19 nt, Homo sapiens
  misc_RNA (1)...(19): siRNA sense strand
gaaaagcuagacaaaauga

SEQ ID NO: 1822371 - RNA, 19 nt, Homo sapiens
  misc_RNA (1)...(19): siRNA sense strand
gcuuuaaauuagccacaaa

SEQ ID NO: 1822372 - RNA, 19 nt, Homo sapiens
  misc_RNA (1)...(19): siRNA sense strand
guucgucuauaaauuggaa

SEQ ID NO: 1822373 - RNA, 19 nt, Homo sapiens
  misc_RNA (1)...(19): siRNA sense strand
gauagggcuuugcuacaag

SEQ ID NO: 1822374 - RNA, 19 nt, Homo sapiens
  misc_RNA (1)...(19): siRNA sense strand
agauagggcuuugcuacaa

SEQ ID NO: 1822375 - RNA, 19 nt, Homo sapiens
  misc_RNA (1)...(19): siRNA sense strand
gauaugcagccaaguuuua

SEQ ID NO: 1822376 - RNA, 19 nt, Homo sapiens
  misc_RNA (1)...(19): siRNA sense strand
agaaacaaugcaagacaua

SEQ ID NO: 1822377 - RNA, 19 nt, Homo sapiens
  misc_RNA (1)...(19): siRNA sense strand
ggcaagaauguauauagaa

SEQ ID NO: 1822378 - RNA, 19 nt, Homo sapiens
  misc_RNA (1)...(19): siRNA sense strand
cuacaaggcacaaaugauc

SEQ ID NO: 1822379 - RNA, 19 nt, Homo sapiens
  misc_RNA (1)...(19): siRNA sense strand
aacacccacuucugucuua

SEQ ID NO: 1822380 - RNA, 19 nt, Homo sapiens
  misc_RNA (1)...(19): siRNA sense strand
agaaaaggcucuguggaua

SEQ ID NO: 1822381 - RNA, 19 nt, Homo sapiens
  misc_RNA (1)...(19): siRNA sense strand
ccaaauacagugugggaau

SEQ ID NO: 1822382 - RNA, 19 nt, Homo sapiens
  misc_RNA (1)...(19): siRNA sense strand
gaaacacccacuucugucu

SEQ ID NO: 1822383 - RNA, 19 nt, Homo sapiens
  misc_RNA (1)...(19): siRNA sense strand
guacauugaagaagcucua

SEQ ID NO: 1822384 - RNA, 19 nt, Homo sapiens
  misc_RNA (1)...(19): siRNA sense strand
uggagaacauuugcaagaa

SEQ ID NO: 1822385 - RNA, 19 nt, Homo sapiens
  misc_RNA (1)...(19): siRNA sense strand
guggagaacauuugcaaga

SEQ ID NO: 1822386 - RNA, 19 nt, Homo sapiens
  misc_RNA (1)...(19): siRNA sense strand
aaucugacgucaaugcaau

SEQ ID NO: 1822387 - RNA, 19 nt, Homo sapiens
  misc_RNA (1)...(19): siRNA sense strand
gacaagguggagaacauuu

SEQ ID NO: 1822388 - RNA, 19 nt, Homo sapiens
  misc_RNA (1)...(19): siRNA sense strand
uagaagaaacaaugcaaga

SEQ ID NO: 1822389 - RNA, 19 nt, Homo sapiens
  misc_RNA (1)...(19): siRNA sense strand
gaugggccuugcugaagug

SEQ ID NO: 1822390 - RNA, 19 nt, Homo sapiens
  misc_RNA (1)...(19): siRNA sense strand
gcaggaagaacaugacaac

SEQ ID NO: 1822391 - RNA, 19 nt, Homo sapiens
  misc_RNA (1)...(19): siRNA sense strand
guauauagaagcaggcaau

SEQ ID NO: 1822392 - RNA, 19 nt, Homo sapiens
  misc_RNA (1)...(19): siRNA sense strand
cuuacugcaucaccagaua

SEQ ID NO: 1822393 - RNA, 19 nt, Homo sapiens
  misc_RNA (1)...(19): siRNA sense strand
ggagaaaaguacauugaag

SEQ ID NO: 1822394 - RNA, 19 nt, Homo sapiens
  misc_RNA (1)...(19): siRNA sense strand
ucgccuggauggcuuuaaa

SEQ ID NO: 1822395 - RNA, 19 nt, Homo sapiens
  misc_RNA (1)...(19): siRNA sense strand
ucacuuuacaugggaguua

SEQ ID NO: 1822396 - RNA, 19 nt, Homo sapiens
  misc_RNA (1)...(19): siRNA sense strand
uuaaggaaacuucggagaa

SEQ ID NO: 1822397 - RNA, 19 nt, Homo sapiens
  misc_RNA (1)...(19): siRNA sense strand
gaccuggcaagaauguaua

SEQ ID NO: 1822398 - RNA, 19 nt, Homo sapiens
  misc_RNA (1)...(19): siRNA sense strand
aggcacaaaugauccaaau

SEQ ID NO: 1822399 - RNA, 19 nt, Homo sapiens
  misc_RNA (1)...(19): siRNA sense strand
gaaaucugacgucaaugca

SEQ ID NO: 1822400 - RNA, 19 nt, Homo sapiens
  misc_RNA (1)...(19): siRNA sense strand
cuagagggcagaacagaga

SEQ ID NO: 1822401 - RNA, 19 nt, Homo sapiens
  misc_RNA (1)...(19): siRNA sense strand
caaaucccuuccgcuauag

SEQ ID NO: 1822402 - RNA, 19 nt, Homo sapiens
  misc_RNA (1)...(19): siRNA sense strand
uggaaggaaauaugaauga

SEQ ID NO: 1822403 - RNA, 19 nt, Homo sapiens
  misc_RNA (1)...(19): siRNA sense strand
gguagaagaaacaaugcaa

SEQ ID NO: 1822404 - RNA, 19 nt, Homo sapiens
  misc_RNA (1)...(19): siRNA sense strand
gauagucuggagcaauuga

SEQ ID NO: 1822405 - RNA, 19 nt, Homo sapiens
  misc_RNA (1)...(19): siRNA sense strand
gcaggaaacacccacuucu

SEQ ID NO: 1822406 - RNA, 19 nt, Homo sapiens
  misc_RNA (1)...(19): siRNA sense strand
ggaguuauccauugaugac

SEQ ID NO: 1822407 - RNA, 19 nt, Homo sapiens
  misc_RNA (1)...(19): siRNA sense strand
aagaagcucuagccaacau

SEQ ID NO: 1822408 - RNA, 19 nt, Homo sapiens
  misc_RNA (1)...(19): siRNA sense strand
gacaaccaagcaaauguga

SEQ ID NO: 1822409 - RNA, 19 nt, Homo sapiens
  misc_RNA (1)...(19): siRNA sense strand
uauggucgguuucaggaau

SEQ ID NO: 1822410 - RNA, 19 nt, Homo sapiens
  misc_RNA (1)...(19): siRNA sense strand
aagaaacaaugcaagacau

SEQ ID NO: 1822411 - RNA, 19 nt, Homo sapiens
  misc_RNA (1)...(19): siRNA sense strand
gacgaugaaaugccugauu

SEQ ID NO: 1822412 - RNA, 19 nt, Homo sapiens
  misc_RNA (1)...(19): siRNA sense strand
gaaacaaugcaagacauac

SEQ ID NO: 1822413 - RNA, 19 nt, Homo sapiens
  misc_RNA (1)...(19): siRNA sense strand
ggaauuauaugacaaagga

SEQ ID NO: 1822414 - RNA, 19 nt, Homo sapiens
  misc_RNA (1)...(19): siRNA sense strand
ggagagaaguuuaaacaga

SEQ ID NO: 1822415 - RNA, 19 nt, Homo sapiens
  misc_RNA (1)...(19): siRNA sense strand
gauaggaccuggaaugguu

SEQ ID NO: 1822416 - RNA, 19 nt, Homo sapiens
  misc_RNA (1)...(19): siRNA sense strand
ggaagagacugaugagaug

SEQ ID NO: 1822417 - RNA, 19 nt, Homo sapiens
  misc_RNA (1)...(19): siRNA sense strand
gaagauaguucgagagaag

SEQ ID NO: 1822418 - RNA, 19 nt, Homo sapiens
  misc_RNA (1)...(19): siRNA sense strand
guagagugcugucccaauu

SEQ ID NO: 1822419 - RNA, 19 nt, Homo sapiens
  misc_RNA (1)...(19): siRNA sense strand
gagagaaguuuaaacagau

SEQ ID NO: 1822420 - RNA, 19 nt, Homo sapiens
  misc_RNA (1)...(19): siRNA sense strand
gauaucaaguguguacuaa

SEQ ID NO: 1822421 - RNA, 19 nt, Homo sapiens
  misc_RNA (1)...(19): siRNA sense strand
gaggagaacaggcaauuaa

SEQ ID NO: 1822422 - RNA, 19 nt, Homo sapiens
  misc_RNA (1)...(19): siRNA sense strand
gaggaaggaugcagagaga

SEQ ID NO: 1822423 - RNA, 19 nt, Homo sapiens
  misc_RNA (1)...(19): siRNA sense strand
gauaagaacccaaaugaag

SEQ ID NO: 1822424 - RNA, 19 nt, Homo sapiens
  misc_RNA (1)...(19): siRNA sense strand
ugacaaaugugaagguaga

SEQ ID NO: 1822425 - RNA, 19 nt, Homo sapiens
  misc_RNA (1)...(19): siRNA sense strand
guacaucagcucucaguaa

SEQ ID NO: 1822426 - RNA, 19 nt, Homo sapiens
  misc_RNA (1)...(19): siRNA sense strand
gaaguucucucugaugcaa

SEQ ID NO: 1822427 - RNA, 19 nt, Homo sapiens
  misc_RNA (1)...(19): siRNA sense strand
gaucaguccuaaagauaga

SEQ ID NO: 1822428 - RNA, 19 nt, Homo sapiens
  misc_RNA (1)...(19): siRNA sense strand
gaaguaccauccugauaag

SEQ ID NO: 1822429 - RNA, 19 nt, Homo sapiens
  misc_RNA (1)...(19): siRNA sense strand
gaaagauggccagaagaua

SEQ ID NO: 1822430 - RNA, 19 nt, Homo sapiens
  misc_RNA (1)...(19): siRNA sense strand
ugaaguaccauccugauaa

SEQ ID NO: 1822431 - RNA, 19 nt, Homo sapiens
  misc_RNA (1)...(19): siRNA sense strand
ucaaguguguacuaaauga

SEQ ID NO: 1822432 - RNA, 19 nt, Homo sapiens
  misc_RNA (1)...(19): siRNA sense strand
gcauggagauaucaagugu

SEQ ID NO: 1822433 - RNA, 19 nt, Homo sapiens
  misc_RNA (1)...(19): siRNA sense strand
ggacauacagcucguugaa

SEQ ID NO: 1822434 - RNA, 19 nt, Homo sapiens
  misc_RNA (1)...(19): siRNA sense strand
aaagauggccagaagauaa

SEQ ID NO: 1822435 - RNA, 19 nt, Homo sapiens
  misc_RNA (1)...(19): siRNA sense strand
gagaacaggcaauuaaaga

SEQ ID NO: 1822436 - RNA, 19 nt, Homo sapiens
  misc_RNA (1)...(19): siRNA sense strand
aaacagauuucucaagcuu

SEQ ID NO: 1822437 - RNA, 19 nt, Homo sapiens
  misc_RNA (1)...(19): siRNA sense strand
agaaacaacuuacuacgau

SEQ ID NO: 1822438 - RNA, 19 nt, Homo sapiens
  misc_RNA (1)...(19): siRNA sense strand
gaaagaaacaacuuacuac

SEQ ID NO: 1822439 - RNA, 19 nt, Homo sapiens
  misc_RNA (1)...(19): siRNA sense strand
gaagauaacauuccauggu

SEQ ID NO: 1822440 - RNA, 19 nt, Homo sapiens
  misc_RNA (1)...(19): siRNA sense strand
ggaaggaugcagagagaaa

SEQ ID NO: 1822441 - RNA, 19 nt, Homo sapiens
  misc_RNA (1)...(19): siRNA sense strand
ccauggacaucuuugauau

SEQ ID NO: 1822442 - RNA, 19 nt, Homo sapiens
  misc_RNA (1)...(19): siRNA sense strand
gaagguagaggagguaaga

SEQ ID NO: 1822443 - RNA, 19 nt, Homo sapiens
  misc_RNA (1)...(19): siRNA sense strand
gagaagaccuuuucaugug

SEQ ID NO: 1822444 - RNA, 19 nt, Homo sapiens
  misc_RNA (1)...(19): siRNA sense strand
guacuggaaugcaaauaag

SEQ ID NO: 1822445 - RNA, 19 nt, Homo sapiens
  misc_RNA (1)...(19): siRNA sense strand
uaucguagaccauaugaaa

SEQ ID NO: 1822446 - RNA, 19 nt, Homo sapiens
  misc_RNA (1)...(19): siRNA sense strand
caugaaagauggccagaag

SEQ ID NO: 1822447 - RNA, 19 nt, Homo sapiens
  misc_RNA (1)...(19): siRNA sense strand
gacaaaggcaugaaagaug

SEQ ID NO: 1822448 - RNA, 19 nt, Homo sapiens
  misc_RNA (1)...(19): siRNA sense strand
gguaaacuuuccugagaau

SEQ ID NO: 1822449 - RNA, 19 nt, Homo sapiens
  misc_RNA (1)...(19): siRNA sense strand
aagguaaacuuuccugaga

SEQ ID NO: 1822450 - RNA, 19 nt, Homo sapiens
  misc_RNA (1)...(19): siRNA sense strand
ggcuuucucucuccugaua

SEQ ID NO: 1822451 - RNA, 19 nt, Homo sapiens
  misc_RNA (1)...(19): siRNA sense strand
augaaggcaugccaauuua

SEQ ID NO: 1822452 - RNA, 19 nt, Homo sapiens
  misc_RNA (1)...(19): siRNA sense strand
uaaacugucuuugcuggaa

SEQ ID NO: 1822453 - RNA, 19 nt, Homo sapiens
  misc_RNA (1)...(19): siRNA sense strand
ggaggagaacaggcaauua

SEQ ID NO: 1822454 - RNA, 19 nt, Homo sapiens
  misc_RNA (1)...(19): siRNA sense strand
aaugaaggcaugccaauuu

SEQ ID NO: 1822455 - RNA, 19 nt, Homo sapiens
  misc_RNA (1)...(19): siRNA sense strand
gguacuggaaugcaaauaa

SEQ ID NO: 1822456 - RNA, 19 nt, Homo sapiens
  misc_RNA (1)...(19): siRNA sense strand
caaaugaaggagagaaguu

SEQ ID NO: 1822457 - RNA, 19 nt, Homo sapiens
  misc_RNA (1)...(19): siRNA sense strand
ugagauggaccaaguagaa

SEQ ID NO: 1822458 - RNA, 19 nt, Homo sapiens
  misc_RNA (1)...(19): siRNA sense strand
ggaagauaguucgagagaa

SEQ ID NO: 1822459 - RNA, 19 nt, Homo sapiens
  misc_RNA (1)...(19): siRNA sense strand
gcggaucaguccuaaagau

SEQ ID NO: 1822460 - RNA, 19 nt, Homo sapiens
  misc_RNA (1)...(19): siRNA sense strand
ccacuacaauggagaagca

SEQ ID NO: 1822461 - RNA, 19 nt, Homo sapiens
  misc_RNA (1)...(19): siRNA sense strand
gagcggaucaguccuaaag

SEQ ID NO: 1822462 - RNA, 19 nt, Homo sapiens
  misc_RNA (1)...(19): siRNA sense strand
gaaggcaugccaauuuauc

SEQ ID NO: 1822463 - RNA, 19 nt, Homo sapiens
  misc_RNA (1)...(19): siRNA sense strand
ggagauaucaaguguguac

SEQ ID NO: 1822464 - RNA, 19 nt, Homo sapiens
  misc_RNA (1)...(19): siRNA sense strand
aagccaauaucuacucuug

SEQ ID NO: 1822465 - RNA, 19 nt, Homo sapiens
  misc_RNA (1)...(19): siRNA sense strand
caauuuaucguagaccaua

SEQ ID NO: 1822466 - RNA, 19 nt, Homo sapiens
  misc_RNA (1)...(19): siRNA sense strand
uagaacugguggacuuuga

SEQ ID NO: 1822467 - RNA, 19 nt, Homo sapiens
  misc_RNA (1)...(19): siRNA sense strand
ggagaacaggcaauuaaag

SEQ ID NO: 1822468 - RNA, 19 nt, Homo sapiens
  misc_RNA (1)...(19): siRNA sense strand
gagaagcauaugaggauga

SEQ ID NO: 1822469 - RNA, 19 nt, Homo sapiens
  misc_RNA (1)...(19): siRNA sense strand
gccuaaucaucgaauuuaa

SEQ ID NO: 1822470 - RNA, 19 nt, Homo sapiens
  misc_RNA (1)...(19): siRNA sense strand
gaaaagggucgccuaauca

SEQ ID NO: 1822471 - RNA, 19 nt, Homo sapiens
  misc_RNA (1)...(19): siRNA sense strand
uggaaugguucagcaaauu

SEQ ID NO: 1822472 - RNA, 19 nt, Homo sapiens
  misc_RNA (1)...(19): siRNA sense strand
uaagaaaggagcaguagag

SEQ ID NO: 1822473 - RNA, 19 nt, Homo sapiens
  misc_RNA (1)...(19): siRNA sense strand
gccaauaucuacucuugac

SEQ ID NO: 1822474 - RNA, 19 nt, Homo sapiens
  misc_RNA (1)...(19): siRNA sense strand
gauaacauuccauggugaa

SEQ ID NO: 1822475 - RNA, 19 nt, Homo sapiens
  misc_RNA (1)...(19): siRNA sense strand
ucagauaggaccuggaaug

SEQ ID NO: 1822476 - RNA, 19 nt, Homo sapiens
  misc_RNA (1)...(19): siRNA sense strand
gaagaccuuuucaugugua

SEQ ID NO: 1822477 - RNA, 19 nt, Homo sapiens
  misc_RNA (1)...(19): siRNA sense strand
gggagcggaucaguccuaa

SEQ ID NO: 1822478 - RNA, 19 nt, Homo sapiens
  misc_RNA (1)...(19): siRNA sense strand
cggaucaguccuaaagaua

SEQ ID NO: 1822479 - RNA, 19 nt, Homo sapiens
  misc_RNA (1)...(19): siRNA sense strand
caggucagauugucaagca

SEQ ID NO: 1822480 - RNA, 19 nt, Homo sapiens
  misc_RNA (1)...(19): siRNA sense strand
ugaaagauggccagaagau

SEQ ID NO: 1822481 - RNA, 19 nt, Homo sapiens
  misc_RNA (1)...(19): siRNA sense strand
uagaggagguaagaaagga

SEQ ID NO: 1822482 - RNA, 19 nt, Homo sapiens
  misc_RNA (1)...(19): siRNA sense strand
cugauaagaacccaaauga

SEQ ID NO: 1822483 - RNA, 19 nt, Homo sapiens
  misc_RNA (1)...(19): siRNA sense strand
caauaucuacucuugacaa

SEQ ID NO: 1822484 - RNA, 19 nt, Homo sapiens
  misc_RNA (1)...(19): siRNA sense strand
cuuacgaaguucucucuga

SEQ ID NO: 1822485 - RNA, 19 nt, Homo sapiens
  misc_RNA (1)...(19): siRNA sense strand
ccaaugcuacucaggaaga

SEQ ID NO: 1822486 - RNA, 19 nt, Homo sapiens
  misc_RNA (1)...(19): siRNA sense strand
caucagauaggaccuggaa

SEQ ID NO: 1822487 - RNA, 19 nt, Homo sapiens
  misc_RNA (1)...(19): siRNA sense strand
gagagaaaggagagguaaa

SEQ ID NO: 1822488 - RNA, 19 nt, Homo sapiens
  misc_RNA (1)...(19): siRNA sense strand
aagcauaugaggaugauga

SEQ ID NO: 1822489 - RNA, 19 nt, Homo sapiens
  misc_RNA (1)...(19): siRNA sense strand
aaacugucuuugcuggaaa

SEQ ID NO: 1822490 - RNA, 19 nt, Homo sapiens
  misc_RNA (1)...(19): siRNA sense strand
uaagaacccaaaugaagga

SEQ ID NO: 1822491 - RNA, 19 nt, Homo sapiens
  misc_RNA (1)...(19): siRNA sense strand
uuacgaaguucucucugau

SEQ ID NO: 1822492 - RNA, 19 nt, Homo sapiens
  misc_RNA (1)...(19): siRNA sense strand
uauaauggugcaacaagaa

SEQ ID NO: 1822493 - RNA, 19 nt, Homo sapiens
  misc_RNA (1)...(19): siRNA sense strand
cugaugagauggaccaagu

SEQ ID NO: 1822494 - RNA, 19 nt, Homo sapiens
  misc_RNA (1)...(19): siRNA sense strand
cgccuaaucaucgaauuua

SEQ ID NO: 1822495 - RNA, 19 nt, Homo sapiens
  misc_RNA (1)...(19): siRNA sense strand
uaaaugaaggcaugccaau

SEQ ID NO: 1822496 - RNA, 19 nt, Homo sapiens
  misc_RNA (1)...(19): siRNA sense strand
caaccgaaccaucgucauc

SEQ ID NO: 1822497 - RNA, 19 nt, Homo sapiens
  misc_RNA (1)...(19): siRNA sense strand
gcaaauaagaauucaucag

SEQ ID NO: 1822498 - RNA, 19 nt, Homo sapiens
  misc_RNA (1)...(19): siRNA sense strand
gaaaacuggcucugcaaaa

SEQ ID NO: 1822499 - RNA, 19 nt, Homo sapiens
  misc_RNA (1)...(19): siRNA sense strand
cauaugaggaugaugaaca

SEQ ID NO: 1822500 - RNA, 19 nt, Homo sapiens
  misc_RNA (1)...(19): siRNA sense strand
gaacugguggacuuugauc

SEQ ID NO: 1822501 - RNA, 19 nt, Homo sapiens
  misc_RNA (1)...(19): siRNA sense strand
gaaggaaguggaagagacu

SEQ ID NO: 1822502 - RNA, 19 nt, Homo sapiens
  misc_RNA (1)...(19): siRNA sense strand
ugaaaagggucgccuaauc

SEQ ID NO: 1822503 - RNA, 19 nt, Homo sapiens
  misc_RNA (1)...(19): siRNA sense strand
cagaaggaccaugcuguuu

SEQ ID NO: 1822504 - RNA, 19 nt, Homo sapiens
  misc_RNA (1)...(19): siRNA sense strand
ugacaaaggcaugaaagau

SEQ ID NO: 1822505 - RNA, 19 nt, Homo sapiens
  misc_RNA (1)...(19): siRNA sense strand
ggaucaguccuaaagauag

SEQ ID NO: 1822506 - RNA, 19 nt, Homo sapiens
  misc_RNA (1)...(19): siRNA sense strand
guaccauccugauaagaac

SEQ ID NO: 1822507 - RNA, 19 nt, Homo sapiens
  misc_RNA (1)...(19): siRNA sense strand
ugugacaaaugugaaggua

SEQ ID NO: 1822508 - RNA, 19 nt, Homo sapiens
  misc_RNA (1)...(19): siRNA sense strand
gaaguggaagagacugaug

SEQ ID NO: 1822509 - RNA, 19 nt, Homo sapiens
  misc_RNA (1)...(19): siRNA sense strand
ugucaagcauggagauauc

SEQ ID NO: 1822510 - RNA, 19 nt, Homo sapiens
  misc_RNA (1)...(19): siRNA sense strand
ugaaggagaccaagaacca

SEQ ID NO: 1822511 - RNA, 19 nt, Homo sapiens
  misc_RNA (1)...(19): siRNA sense strand
gccagaagauaacauucca

SEQ ID NO: 1822512 - RNA, 19 nt, Homo sapiens
  misc_RNA (1)...(19): siRNA sense strand
ggagaagaccuuuucaugu

SEQ ID NO: 1822513 - RNA, 19 nt, Homo sapiens
  misc_RNA (1)...(19): siRNA sense strand
caucacagcucuugaaaug

SEQ ID NO: 1822514 - RNA, 19 nt, Homo sapiens
  misc_RNA (1)...(19): siRNA sense strand
gaaaugggcuucgcaguca

SEQ ID NO: 1822515 - RNA, 19 nt, Homo sapiens
  misc_RNA (1)...(19): siRNA sense strand
gaagauagcgggaaauaca

SEQ ID NO: 1822516 - RNA, 19 nt, Homo sapiens
  misc_RNA (1)...(19): siRNA sense strand
gcagaaaguuggcgagaag

SEQ ID NO: 1822517 - RNA, 19 nt, Homo sapiens
  misc_RNA (1)...(19): siRNA sense strand
gacaaagaauucacuguuc

SEQ ID NO: 1822518 - RNA, 19 nt, Homo sapiens
  misc_RNA (1)...(19): siRNA sense strand
gguauucccugaggacuaa

SEQ ID NO: 1822519 - RNA, 19 nt, Homo sapiens
  misc_RNA (1)...(19): siRNA sense strand
gagccgagauuucaugcuu

SEQ ID NO: 1822520 - RNA, 19 nt, Homo sapiens
  misc_RNA (1)...(19): siRNA sense strand
gcagagcuguggcggaaga

SEQ ID NO: 1822521 - RNA, 19 nt, Homo sapiens
  misc_RNA (1)...(19): siRNA sense strand
gggcccagaugcugucuuu

SEQ ID NO: 1822522 - RNA, 19 nt, Homo sapiens
  misc_RNA (1)...(19): siRNA sense strand
gcacugauaagcaauacuu

SEQ ID NO: 1822523 - RNA, 19 nt, Homo sapiens
  misc_RNA (1)...(19): siRNA sense strand
ccagccaacugacaaagaa

SEQ ID NO: 1822524 - RNA, 19 nt, Homo sapiens
  misc_RNA (1)...(19): siRNA sense strand
gggaauucauugauaagga

SEQ ID NO: 1822525 - RNA, 19 nt, Homo sapiens
  misc_RNA (1)...(19): siRNA sense strand
gugcaaagaugaaccuagu

SEQ ID NO: 1822526 - RNA, 19 nt, Homo sapiens
  misc_RNA (1)...(19): siRNA sense strand
ccaggaagauagcgggaaa

SEQ ID NO: 1822527 - RNA, 19 nt, Homo sapiens
  misc_RNA (1)...(19): siRNA sense strand
gguaugcuaugacccgaaa

SEQ ID NO: 1822528 - RNA, 19 nt, Homo sapiens
  misc_RNA (1)...(19): siRNA sense strand
ccacaacuccgccuuugaa

SEQ ID NO: 1822529 - RNA, 19 nt, Homo sapiens
  misc_RNA (1)...(19): siRNA sense strand
cggaagaacuacaacaaca

SEQ ID NO: 1822530 - RNA, 19 nt, Homo sapiens
  misc_RNA (1)...(19): siRNA sense strand
cagggucgcuucucuguca

SEQ ID NO: 1822531 - RNA, 19 nt, Homo sapiens
  misc_RNA (1)...(19): siRNA sense strand
gaacucugaugggaagaau

SEQ ID NO: 1822532 - RNA, 19 nt, Homo sapiens
  misc_RNA (1)...(19): siRNA sense strand
caacuccgccuuugaauac

SEQ ID NO: 1822533 - RNA, 19 nt, Homo sapiens
  misc_RNA (1)...(19): siRNA sense strand
aaacaagcccauucaguug

SEQ ID NO: 1822534 - RNA, 19 nt, Homo sapiens
  misc_RNA (1)...(19): siRNA sense strand
gcaggucaccguucaggaa

SEQ ID NO: 1822535 - RNA, 19 nt, Homo sapiens
  misc_RNA (1)...(19): siRNA sense strand
ccaaagagagcgacagugu

SEQ ID NO: 1822536 - RNA, 19 nt, Homo sapiens
  misc_RNA (1)...(19): siRNA sense strand
ugacaaagaauucacuguu

SEQ ID NO: 1822537 - RNA, 19 nt, Homo sapiens
  misc_RNA (1)...(19): siRNA sense strand
caguaugaaugccauguga

SEQ ID NO: 1822538 - RNA, 19 nt, Homo sapiens
  misc_RNA (1)...(19): siRNA sense strand
gaguuacagugcaaagaug

SEQ ID NO: 1822539 - RNA, 19 nt, Homo sapiens
  misc_RNA (1)...(19): siRNA sense strand
uggaaugguuuguauggaa

SEQ ID NO: 1822540 - RNA, 19 nt, Homo sapiens
  misc_RNA (1)...(19): siRNA sense strand
gagcaagcgucccaagaac

SEQ ID NO: 1822541 - RNA, 19 nt, Homo sapiens
  misc_RNA (1)...(19): siRNA sense strand
ggaguuacagugcaaagau

SEQ ID NO: 1822542 - RNA, 19 nt, Homo sapiens
  misc_RNA (1)...(19): siRNA sense strand
ucaaagagccacaccucaa

SEQ ID NO: 1822543 - RNA, 19 nt, Homo sapiens
  misc_RNA (1)...(19): siRNA sense strand
ccaguggcauguggucuaa

SEQ ID NO: 1822544 - RNA, 19 nt, Homo sapiens
  misc_RNA (1)...(19): siRNA sense strand
gauggcgaguggcagauug

SEQ ID NO: 1822545 - RNA, 19 nt, Homo sapiens
  misc_RNA (1)...(19): siRNA sense strand
caacgacgcacucuucuac

SEQ ID NO: 1822546 - RNA, 19 nt, Homo sapiens
  misc_RNA (1)...(19): siRNA sense strand
gaugggucgugguaugcua

SEQ ID NO: 1822547 - RNA, 19 nt, Homo sapiens
  misc_RNA (1)...(19): siRNA sense strand
gagagcaggcagccaagaa

SEQ ID NO: 1822548 - RNA, 19 nt, Homo sapiens
  misc_RNA (1)...(19): siRNA sense strand
cagcgacuccuuugacuug

SEQ ID NO: 1822549 - RNA, 19 nt, Homo sapiens
  misc_RNA (1)...(19): siRNA sense strand
gcaauaucauguggcuaga

SEQ ID NO: 1822550 - RNA, 19 nt, Homo sapiens
  misc_RNA (1)...(19): siRNA sense strand
agaauguucccgaccguua

SEQ ID NO: 1822551 - RNA, 19 nt, Homo sapiens
  misc_RNA (1)...(19): siRNA sense strand
gcucaugguggaaugguuu

SEQ ID NO: 1822552 - RNA, 19 nt, Homo sapiens
  misc_RNA (1)...(19): siRNA sense strand
agccagaacucccacuuug

SEQ ID NO: 1822553 - RNA, 19 nt, Homo sapiens
  misc_RNA (1)...(19): siRNA sense strand
ggacgagggccaguaugaa

SEQ ID NO: 1822554 - RNA, 19 nt, Homo sapiens
  misc_RNA (1)...(19): siRNA sense strand
agcaauacuuugggaguua

SEQ ID NO: 1822555 - RNA, 19 nt, Homo sapiens
  misc_RNA (1)...(19): siRNA sense strand
gcccagcccucagaaggaa

SEQ ID NO: 1822556 - RNA, 19 nt, Homo sapiens
  misc_RNA (1)...(19): siRNA sense strand
gcucugguauguccacaag

SEQ ID NO: 1822557 - RNA, 19 nt, Homo sapiens
  misc_RNA (1)...(19): siRNA sense strand
gcaagcgucccaagaacau

SEQ ID NO: 1822558 - RNA, 19 nt, Homo sapiens
  misc_RNA (1)...(19): siRNA sense strand
cggcauccguguucuagau

SEQ ID NO: 1822559 - RNA, 19 nt, Homo sapiens
  misc_RNA (1)...(19): siRNA sense strand
ccaaugccacggucucuga

SEQ ID NO: 1822560 - RNA, 19 nt, Homo sapiens
  misc_RNA (1)...(19): siRNA sense strand
ggaggacgagggccaguau

SEQ ID NO: 1822561 - RNA, 19 nt, Homo sapiens
  misc_RNA (1)...(19): siRNA sense strand
gcacaucacagaucuucag

SEQ ID NO: 1822562 - RNA, 19 nt, Homo sapiens
  misc_RNA (1)...(19): siRNA sense strand
caacuacgccugguacaag

SEQ ID NO: 1822563 - RNA, 19 nt, Homo sapiens
  misc_RNA (1)...(19): siRNA sense strand
ggcagaaaguuggcgagaa

SEQ ID NO: 1822564 - RNA, 19 nt, Homo sapiens
  misc_RNA (1)...(19): siRNA sense strand
gagagcaagcgucccaaga

SEQ ID NO: 1822565 - RNA, 19 nt, Homo sapiens
  misc_RNA (1)...(19): siRNA sense strand
gccgagauuucaugcuuca

SEQ ID NO: 1822566 - RNA, 19 nt, Homo sapiens
  misc_RNA (1)...(19): siRNA sense strand
gcaauuacuccugccaugu

SEQ ID NO: 1822567 - RNA, 19 nt, Homo sapiens
  misc_RNA (1)...(19): siRNA sense strand
cccaagauacaggcaauua

SEQ ID NO: 1822568 - RNA, 19 nt, Homo sapiens
  misc_RNA (1)...(19): siRNA sense strand
gaccuacagcgacuccuuu

SEQ ID NO: 1822569 - RNA, 19 nt, Homo sapiens
  misc_RNA (1)...(19): siRNA sense strand
gacgagggccaguaugaau

SEQ ID NO: 1822570 - RNA, 19 nt, Homo sapiens
  misc_RNA (1)...(19): siRNA sense strand
gacuugcaguguaucauca

SEQ ID NO: 1822571 - RNA, 19 nt, Homo sapiens
  misc_RNA (1)...(19): siRNA sense strand
gcaauacuuugggaguuac

SEQ ID NO: 1822572 - RNA, 19 nt, Homo sapiens
  misc_RNA (1)...(19): siRNA sense strand
acaacuccgccuuugaaua

SEQ ID NO: 1822573 - RNA, 19 nt, Homo sapiens
  misc_RNA (1)...(19): siRNA sense strand
gcaacaacguccgccuaag

SEQ ID NO: 1822574 - RNA, 19 nt, Homo sapiens
  misc_RNA (1)...(19): siRNA sense strand
gcaggcagccaagaacaau

SEQ ID NO: 1822575 - RNA, 19 nt, Homo sapiens
  misc_RNA (1)...(19): siRNA sense strand
caagauacaggcaauuacu

SEQ ID NO: 1822576 - RNA, 19 nt, Homo sapiens
  misc_RNA (1)...(19): siRNA sense strand
aagcaauacuuugggaguu

SEQ ID NO: 1822577 - RNA, 19 nt, Homo sapiens
  misc_RNA (1)...(19): siRNA sense strand
gcccucagaaggaauggua

SEQ ID NO: 1822578 - RNA, 19 nt, Homo sapiens
  misc_RNA (1)...(19): siRNA sense strand
gcaagcuuauccugaagac

SEQ ID NO: 1822579 - RNA, 19 nt, Homo sapiens
  misc_RNA (1)...(19): siRNA sense strand
ugaaugccaugugacugaa

SEQ ID NO: 1822580 - RNA, 19 nt, Homo sapiens
  misc_RNA (1)...(19): siRNA sense strand
gaacauccccaucauaguc

SEQ ID NO: 1822581 - RNA, 19 nt, Homo sapiens
  misc_RNA (1)...(19): siRNA sense strand
agagcaagcgucccaagaa

SEQ ID NO: 1822582 - RNA, 19 nt, Homo sapiens
  misc_RNA (1)...(19): siRNA sense strand
ccuggaggcucagaauguu

SEQ ID NO: 1822583 - RNA, 19 nt, Homo sapiens
  misc_RNA (1)...(19): siRNA sense strand
ggucaccguucaggaagga

SEQ ID NO: 1822584 - RNA, 19 nt, Homo sapiens
  misc_RNA (1)...(19): siRNA sense strand
ccggaugggucgugguaug

SEQ ID NO: 1822585 - RNA, 19 nt, Homo sapiens
  misc_RNA (1)...(19): siRNA sense strand
agccggaacuccagcaaga

SEQ ID NO: 1822586 - RNA, 19 nt, Homo sapiens
  misc_RNA (1)...(19): siRNA sense strand
caauuacuccugccaugug

SEQ ID NO: 1822587 - RNA, 19 nt, Homo sapiens
  misc_RNA (1)...(19): siRNA sense strand
gacgccaccuuccacuaug

SEQ ID NO: 1822588 - RNA, 19 nt, Homo sapiens
  misc_RNA (1)...(19): siRNA sense strand
ugacgccaccuuccacuau

SEQ ID NO: 1822589 - RNA, 19 nt, Homo sapiens
  misc_RNA (1)...(19): siRNA sense strand
gaaaacaagcccauucagu

SEQ ID NO: 1822590 - RNA, 19 nt, Homo sapiens
  misc_RNA (1)...(19): siRNA sense strand
caggugagcaaaucgaaga

SEQ ID NO: 1822591 - RNA, 19 nt, Homo sapiens
  misc_RNA (1)...(19): siRNA sense strand
ucaacccuauugcacauca

SEQ ID NO: 1822592 - RNA, 19 nt, Homo sapiens
  misc_RNA (1)...(19): siRNA sense strand
ccagcacugauaagcaaua

SEQ ID NO: 1822593 - RNA, 19 nt, Homo sapiens
  misc_RNA (1)...(19): siRNA sense strand
caacaacguccgccuaagc

SEQ ID NO: 1822594 - RNA, 19 nt, Homo sapiens
  misc_RNA (1)...(19): siRNA sense strand
agguacagcuggagugugu

SEQ ID NO: 1822595 - RNA, 19 nt, Homo sapiens
  misc_RNA (1)...(19): siRNA sense strand
cgacgacgacgacccaaca

SEQ ID NO: 1822596 - RNA, 19 nt, Homo sapiens
  misc_RNA (1)...(19): siRNA sense strand
aggaagauagcgggaaaua

SEQ ID NO: 1822597 - RNA, 19 nt, Homo sapiens
  misc_RNA (1)...(19): siRNA sense strand
acacacccagcacugauaa

SEQ ID NO: 1822598 - RNA, 19 nt, Homo sapiens
  misc_RNA (1)...(19): siRNA sense strand
gagcaggcagccaagaaca

SEQ ID NO: 1822599 - RNA, 19 nt, Homo sapiens
  misc_RNA (1)...(19): siRNA sense strand
ucagcaccauggacucuuc

SEQ ID NO: 1822600 - RNA, 19 nt, Homo sapiens
  misc_RNA (1)...(19): siRNA sense strand
aaaacaagcccauucaguu

SEQ ID NO: 1822601 - RNA, 19 nt, Homo sapiens
  misc_RNA (1)...(19): siRNA sense strand
acccagcacugauaagcaa

SEQ ID NO: 1822602 - RNA, 19 nt, Homo sapiens
  misc_RNA (1)...(19): siRNA sense strand
ccuuugacuugcaguguau

SEQ ID NO: 1822603 - RNA, 19 nt, Homo sapiens
  misc_RNA (1)...(19): siRNA sense strand
caaagagccacaccucaac

SEQ ID NO: 1822604 - RNA, 19 nt, Homo sapiens
  misc_RNA (1)...(19): siRNA sense strand
ccaacgacgcacucuucua

SEQ ID NO: 1822605 - RNA, 19 nt, Homo sapiens
  misc_RNA (1)...(19): siRNA sense strand
ggaacucaacccuauugca

SEQ ID NO: 1822606 - RNA, 19 nt, Homo sapiens
  misc_RNA (1)...(19): siRNA sense strand
gcuucgcuguggccuggua

SEQ ID NO: 1822607 - RNA, 19 nt, Homo sapiens
  misc_RNA (1)...(19): siRNA sense strand
caccugagcgggagacugu

SEQ ID NO: 1822608 - RNA, 19 nt, Homo sapiens
  misc_RNA (1)...(19): siRNA sense strand
caagaacauccccaucaua

SEQ ID NO: 1822609 - RNA, 19 nt, Homo sapiens
  misc_RNA (1)...(19): siRNA sense strand
gcccagaugcugucuuugg

SEQ ID NO: 1822610 - RNA, 19 nt, Homo sapiens
  misc_RNA (1)...(19): siRNA sense strand
ggcggaagaacuacaacaa

SEQ ID NO: 1822611 - RNA, 19 nt, Homo sapiens
  misc_RNA (1)...(19): siRNA sense strand
gcucccacaucacuaucug

SEQ ID NO: 1822612 - RNA, 19 nt, Homo sapiens
  misc_RNA (1)...(19): siRNA sense strand
ccucugcuguggaucaaag

SEQ ID NO: 1822613 - RNA, 19 nt, Homo sapiens
  misc_RNA (1)...(19): siRNA sense strand
ggaagcacguggaugagua

SEQ ID NO: 1822614 - RNA, 19 nt, Homo sapiens
  misc_RNA (1)...(19): siRNA sense strand
gcaaauuucugaucuagag

SEQ ID NO: 1822615 - RNA, 19 nt, Homo sapiens
  misc_RNA (1)...(19): siRNA sense strand
ggaccugccugcuguuuga

SEQ ID NO: 1822616 - RNA, 19 nt, Homo sapiens
  misc_RNA (1)...(19): siRNA sense strand
gaucaucagucucuucugu

SEQ ID NO: 1822617 - RNA, 19 nt, Homo sapiens
  misc_RNA (1)...(19): siRNA sense strand
uuucaaagcccaaguauaa

SEQ ID NO: 1822618 - RNA, 19 nt, Homo sapiens
  misc_RNA (1)...(19): siRNA sense strand
ggacaacgcguacgaguuc

SEQ ID NO: 1822619 - RNA, 19 nt, Homo sapiens
  misc_RNA (1)...(19): siRNA sense strand
ucugaaaucuuuagcaguu

SEQ ID NO: 1822620 - RNA, 19 nt, Homo sapiens
  misc_RNA (1)...(19): siRNA sense strand
gaacggcuuugcugacauc

SEQ ID NO: 1822621 - RNA, 19 nt, Homo sapiens
  misc_RNA (1)...(19): siRNA sense strand
gagcugcgcuucgacauca

SEQ ID NO: 1822622 - RNA, 19 nt, Homo sapiens
  misc_RNA (1)...(19): siRNA sense strand
ggagaaggcacaugucugu

SEQ ID NO: 1822623 - RNA, 19 nt, Homo sapiens
  misc_RNA (1)...(19): siRNA sense strand
ugagaaccgugcaaauuuc

SEQ ID NO: 1822624 - RNA, 19 nt, Homo sapiens
  misc_RNA (1)...(19): siRNA sense strand
gcccaaguauaaccacauu

SEQ ID NO: 1822625 - RNA, 19 nt, Homo sapiens
  misc_RNA (1)...(19): siRNA sense strand
ucaggugacugucccagaa

SEQ ID NO: 1822626 - RNA, 19 nt, Homo sapiens
  misc_RNA (1)...(19): siRNA sense strand
gaaccgugcaaauuucuga

SEQ ID NO: 1822627 - RNA, 19 nt, Homo sapiens
  misc_RNA (1)...(19): siRNA sense strand
caugagaaccgugcaaauu

SEQ ID NO: 1822628 - RNA, 19 nt, Homo sapiens
  misc_RNA (1)...(19): siRNA sense strand
gacaaaccacugcagauug

SEQ ID NO: 1822629 - RNA, 19 nt, Homo sapiens
  misc_RNA (1)...(19): siRNA sense strand
ggucacggguucaguugug

SEQ ID NO: 1822630 - RNA, 19 nt, Homo sapiens
  misc_RNA (1)...(19): siRNA sense strand
gcacuauauugcaguugga

SEQ ID NO: 1822631 - RNA, 19 nt, Homo sapiens
  misc_RNA (1)...(19): siRNA sense strand
gaccagccacgaacaacua

SEQ ID NO: 1822632 - RNA, 19 nt, Homo sapiens
  misc_RNA (1)...(19): siRNA sense strand
gaucgaguccauccuguau

SEQ ID NO: 1822633 - RNA, 19 nt, Homo sapiens
  misc_RNA (1)...(19): siRNA sense strand
ucaguuguguugcagagaa

SEQ ID NO: 1822634 - RNA, 19 nt, Homo sapiens
  misc_RNA (1)...(19): siRNA sense strand
cugcagugcugauaggauu

SEQ ID NO: 1822635 - RNA, 19 nt, Homo sapiens
  misc_RNA (1)...(19): siRNA sense strand
ucugaaccgugcacuauau

SEQ ID NO: 1822636 - RNA, 19 nt, Homo sapiens
  misc_RNA (1)...(19): siRNA sense strand
acaaaccacugcagauugg

SEQ ID NO: 1822637 - RNA, 19 nt, Homo sapiens
  misc_RNA (1)...(19): siRNA sense strand
guggguacauuccggcaaa

SEQ ID NO: 1822638 - RNA, 19 nt, Homo sapiens
  misc_RNA (1)...(19): siRNA sense strand
caacuaaauaccacagugu

SEQ ID NO: 1822639 - RNA, 19 nt, Homo sapiens
  misc_RNA (1)...(19): siRNA sense strand
aagcagacgcuguucauga

SEQ ID NO: 1822640 - RNA, 19 nt, Homo sapiens
  misc_RNA (1)...(19): siRNA sense strand
ggaagcagacgcuguucau

SEQ ID NO: 1822641 - RNA, 19 nt, Homo sapiens
  misc_RNA (1)...(19): siRNA sense strand
gugcaaauuucugaucuag

SEQ ID NO: 1822642 - RNA, 19 nt, Homo sapiens
  misc_RNA (1)...(19): siRNA sense strand
agacaaaccacugcagauu

SEQ ID NO: 1822643 - RNA, 19 nt, Homo sapiens
  misc_RNA (1)...(19): siRNA sense strand
gaguacagccagaggaguu

SEQ ID NO: 1822644 - RNA, 19 nt, Homo sapiens
  misc_RNA (1)...(19): siRNA sense strand
cagaacggcuuugcugaca

SEQ ID NO: 1822645 - RNA, 19 nt, Homo sapiens
  misc_RNA (1)...(19): siRNA sense strand
gggcugcuguggguacauu

SEQ ID NO: 1822646 - RNA, 19 nt, Homo sapiens
  misc_RNA (1)...(19): siRNA sense strand
ucucuucugugcacacuau

SEQ ID NO: 1822647 - RNA, 19 nt, Homo sapiens
  misc_RNA (1)...(19): siRNA sense strand
gcagaccagccacgaacaa

SEQ ID NO: 1822648 - RNA, 19 nt, Homo sapiens
  misc_RNA (1)...(19): siRNA sense strand
cggcuuugcugacaucauc

SEQ ID NO: 1822649 - RNA, 19 nt, Homo sapiens
  misc_RNA (1)...(19): siRNA sense strand
gugucauccugcagaauaa

SEQ ID NO: 1822650 - RNA, 19 nt, Homo sapiens
  misc_RNA (1)...(19): siRNA sense strand
acacguggcaggaugaaga

SEQ ID NO: 1822651 - RNA, 19 nt, Homo sapiens
  misc_RNA (1)...(19): siRNA sense strand
augagaaccgugcaaauuu

SEQ ID NO: 1822652 - RNA, 19 nt, Homo sapiens
  misc_RNA (1)...(19): siRNA sense strand
cugaaaucuuuagcaguua

SEQ ID NO: 1822653 - RNA, 19 nt, Homo sapiens
  misc_RNA (1)...(19): siRNA sense strand
gagacaaaccacugcagau

SEQ ID NO: 1822654 - RNA, 19 nt, Homo sapiens
  misc_RNA (1)...(19): siRNA sense strand
auucuuauccugagacaaa

SEQ ID NO: 1822655 - RNA, 19 nt, Homo sapiens
  misc_RNA (1)...(19): siRNA sense strand
gaaacccaguguggagaag

SEQ ID NO: 1822656 - RNA, 19 nt, Homo sapiens
  misc_RNA (1)...(19): siRNA sense strand
ggacaugagaaccgugcaa

SEQ ID NO: 1822657 - RNA, 19 nt, Homo sapiens
  misc_RNA (1)...(19): siRNA sense strand
gaaccgugcacuauauugc

SEQ ID NO: 1822658 - RNA, 19 nt, Homo sapiens
  misc_RNA (1)...(19): siRNA sense strand
guacuucggcagcuaugga

SEQ ID NO: 1822659 - RNA, 19 nt, Homo sapiens
  misc_RNA (1)...(19): siRNA sense strand
uagccaaggugcucuucug

SEQ ID NO: 1822660 - RNA, 19 nt, Homo sapiens
  misc_RNA (1)...(19): siRNA sense strand
uggacgugcuggugucuga

SEQ ID NO: 1822661 - RNA, 19 nt, Homo sapiens
  misc_RNA (1)...(19): siRNA sense strand
cgugcaaauuucugaucua

SEQ ID NO: 1822662 - RNA, 19 nt, Homo sapiens
  misc_RNA (1)...(19): siRNA sense strand
agugucauccugcagaaua

SEQ ID NO: 1822663 - RNA, 19 nt, Homo sapiens
  misc_RNA (1)...(19): siRNA sense strand
gacaugagaaccgugcaaa

SEQ ID NO: 1822664 - RNA, 19 nt, Homo sapiens
  misc_RNA (1)...(19): siRNA sense strand
ccaaguauaaccacauuuu

SEQ ID NO: 1822665 - RNA, 19 nt, Homo sapiens
  misc_RNA (1)...(19): siRNA sense strand
ggcaacaucaggugacugu

SEQ ID NO: 1822666 - RNA, 19 nt, Homo sapiens
  misc_RNA (1)...(19): siRNA sense strand
gaagcagacgcuguucaug

SEQ ID NO: 1822667 - RNA, 19 nt, Homo sapiens
  misc_RNA (1)...(19): siRNA sense strand
gggacaacgcguacgaguu

SEQ ID NO: 1822668 - RNA, 19 nt, Homo sapiens
  misc_RNA (1)...(19): siRNA sense strand
agcagaagguggaggaugu

SEQ ID NO: 1822669 - RNA, 19 nt, Homo sapiens
  misc_RNA (1)...(19): siRNA sense strand
uaaauaccacagugucauc

SEQ ID NO: 1822670 - RNA, 19 nt, Homo sapiens
  misc_RNA (1)...(19): siRNA sense strand
gacaagaccccacaucuca

SEQ ID NO: 1822671 - RNA, 19 nt, Homo sapiens
  misc_RNA (1)...(19): siRNA sense strand
gguggaggccagugagaug

SEQ ID NO: 1822672 - RNA, 19 nt, Homo sapiens
  misc_RNA (1)...(19): siRNA sense strand
gcagugcugauaggauuau

SEQ ID NO: 1822673 - RNA, 19 nt, Homo sapiens
  misc_RNA (1)...(19): siRNA sense strand
caguuguguugcagagaaa

SEQ ID NO: 1822674 - RNA, 19 nt, Homo sapiens
  misc_RNA (1)...(19): siRNA sense strand
gugaaucgcagggagaaga

SEQ ID NO: 1822675 - RNA, 19 nt, Homo sapiens
  misc_RNA (1)...(19): siRNA sense strand
gcuauggaacucugaaacu

SEQ ID NO: 1822676 - RNA, 19 nt, Homo sapiens
  misc_RNA (1)...(19): siRNA sense strand
cccagucccuguccauaca

SEQ ID NO: 1822677 - RNA, 19 nt, Homo sapiens
  misc_RNA (1)...(19): siRNA sense strand
gacccagucccuguccaua

SEQ ID NO: 1822678 - RNA, 19 nt, Homo sapiens
  misc_RNA (1)...(19): siRNA sense strand
agcagacgcuguucaugau

SEQ ID NO: 1822679 - RNA, 19 nt, Homo sapiens
  misc_RNA (1)...(19): siRNA sense strand
acagugucauccugcagaa

SEQ ID NO: 1822680 - RNA, 19 nt, Homo sapiens
  misc_RNA (1)...(19): siRNA sense strand
aagaguacuucggcagcua

SEQ ID NO: 1822681 - RNA, 19 nt, Homo sapiens
  misc_RNA (1)...(19): siRNA sense strand
gaacucugaaacuccacuu

SEQ ID NO: 1822682 - RNA, 19 nt, Homo sapiens
  misc_RNA (1)...(19): siRNA sense strand
cuauggaacucugaaacuc

SEQ ID NO: 1822683 - RNA, 19 nt, Homo sapiens
  misc_RNA (1)...(19): siRNA sense strand
cuuuagcaguuaaggaguu

SEQ ID NO: 1822684 - RNA, 19 nt, Homo sapiens
  misc_RNA (1)...(19): siRNA sense strand
guacauuccggcaaaccau

SEQ ID NO: 1822685 - RNA, 19 nt, Homo sapiens
  misc_RNA (1)...(19): siRNA sense strand
cagccacgaacaacuaaau

SEQ ID NO: 1822686 - RNA, 19 nt, Homo sapiens
  misc_RNA (1)...(19): siRNA sense strand
ggacacguggcaggaugaa

SEQ ID NO: 1822687 - RNA, 19 nt, Homo sapiens
  misc_RNA (1)...(19): siRNA sense strand
gcagacgcuguucaugaug

SEQ ID NO: 1822688 - RNA, 19 nt, Homo sapiens
  misc_RNA (1)...(19): siRNA sense strand
ggagaagagccugcugagu

SEQ ID NO: 1822689 - RNA, 19 nt, Homo sapiens
  misc_RNA (1)...(19): siRNA sense strand
ucucugaaccgugcacuau

SEQ ID NO: 1822690 - RNA, 19 nt, Homo sapiens
  misc_RNA (1)...(19): siRNA sense strand
ggauuaucguagccaaggu

SEQ ID NO: 1822691 - RNA, 19 nt, Homo sapiens
  misc_RNA (1)...(19): siRNA sense strand
gaagcacguggaugaguac

SEQ ID NO: 1822692 - RNA, 19 nt, Homo sapiens
  misc_RNA (1)...(19): siRNA sense strand
gcagcuauggaacucugaa

SEQ ID NO: 1822693 - RNA, 19 nt, Homo sapiens
  misc_RNA (1)...(19): siRNA sense strand
guggcaggaugaagaguac

SEQ ID NO: 1822694 - RNA, 19 nt, Homo sapiens
  misc_RNA (1)...(19): siRNA sense strand
cggcuucacggccugguuu

SEQ ID NO: 1822695 - RNA, 19 nt, Homo sapiens
  misc_RNA (1)...(19): siRNA sense strand
ucaaagauguggccauuaa

SEQ ID NO: 1822696 - RNA, 19 nt, Homo sapiens
  misc_RNA (1)...(19): siRNA sense strand
cgacaugucuugcaucaaa

SEQ ID NO: 1822697 - RNA, 19 nt, Homo sapiens
  misc_RNA (1)...(19): siRNA sense strand
uaaaggagguggacaucua

SEQ ID NO: 1822698 - RNA, 19 nt, Homo sapiens
  misc_RNA (1)...(19): siRNA sense strand
gcaacuccauguuucauaa

SEQ ID NO: 1822699 - RNA, 19 nt, Homo sapiens
  misc_RNA (1)...(19): siRNA sense strand
cgucaaagccaacaaguua

SEQ ID NO: 1822700 - RNA, 19 nt, Homo sapiens
  misc_RNA (1)...(19): siRNA sense strand
gacaugacauccaaagauu

SEQ ID NO: 1822701 - RNA, 19 nt, Homo sapiens
  misc_RNA (1)...(19): siRNA sense strand
guacaaagacuacaagauc

SEQ ID NO: 1822702 - RNA, 19 nt, Homo sapiens
  misc_RNA (1)...(19): siRNA sense strand
guuccaguaucucugauua

SEQ ID NO: 1822703 - RNA, 19 nt, Homo sapiens
  misc_RNA (1)...(19): siRNA sense strand
ggacaugacauccaaagau

SEQ ID NO: 1822704 - RNA, 19 nt, Homo sapiens
  misc_RNA (1)...(19): siRNA sense strand
ggaagcagacgguguucua

SEQ ID NO: 1822705 - RNA, 19 nt, Homo sapiens
  misc_RNA (1)...(19): siRNA sense strand
ggacaucuauaccgucaag

SEQ ID NO: 1822706 - RNA, 19 nt, Homo sapiens
  misc_RNA (1)...(19): siRNA sense strand
caccaacgccugccucaua

SEQ ID NO: 1822707 - RNA, 19 nt, Homo sapiens
  misc_RNA (1)...(19): siRNA sense strand
gggaucguguguuccagua

SEQ ID NO: 1822708 - RNA, 19 nt, Homo sapiens
  misc_RNA (1)...(19): siRNA sense strand
gcccaacgcugaggacaug

SEQ ID NO: 1822709 - RNA, 19 nt, Homo sapiens
  misc_RNA (1)...(19): siRNA sense strand
gaucguguguuccaguauc

SEQ ID NO: 1822710 - RNA, 19 nt, Homo sapiens
  misc_RNA (1)...(19): siRNA sense strand
gcuacugccucuucuacga

SEQ ID NO: 1822711 - RNA, 19 nt, Homo sapiens
  misc_RNA (1)...(19): siRNA sense strand
gaagguggacaucaucauc

SEQ ID NO: 1822712 - RNA, 19 nt, Homo sapiens
  misc_RNA (1)...(19): siRNA sense strand
acgaggagaugcugaagga

SEQ ID NO: 1822713 - RNA, 19 nt, Homo sapiens
  misc_RNA (1)...(19): siRNA sense strand
ggcauccucugcauguuug

SEQ ID NO: 1822714 - RNA, 19 nt, Homo sapiens
  misc_RNA (1)...(19): siRNA sense strand
gcucaacaccgugcucuau

SEQ ID NO: 1822715 - RNA, 19 nt, Homo sapiens
  misc_RNA (1)...(19): siRNA sense strand
ccaucgaccuggacuucaa

SEQ ID NO: 1822716 - RNA, 19 nt, Homo sapiens
  misc_RNA (1)...(19): siRNA sense strand
ugacauccaaagauuacua

SEQ ID NO: 1822717 - RNA, 19 nt, Homo sapiens
  misc_RNA (1)...(19): siRNA sense strand
gcaccggcauccucugcau

SEQ ID NO: 1822718 - RNA, 19 nt, Homo sapiens
  misc_RNA (1)...(19): siRNA sense strand
accaacgccugccucauaa

SEQ ID NO: 1822719 - RNA, 19 nt, Homo sapiens
  misc_RNA (1)...(19): siRNA sense strand
guguauggcuucgacaugu

SEQ ID NO: 1822720 - RNA, 19 nt, Homo sapiens
  misc_RNA (1)...(19): siRNA sense strand
ucaaagccaacaaguuaga

SEQ ID NO: 1822721 - RNA, 19 nt, Homo sapiens
  misc_RNA (1)...(19): siRNA sense strand
ggagaagguggacaucauc

SEQ ID NO: 1822722 - RNA, 19 nt, Homo sapiens
  misc_RNA (1)...(19): siRNA sense strand
ugacuccuacgcacacuuu

SEQ ID NO: 1822723 - RNA, 19 nt, Homo sapiens
  misc_RNA (1)...(19): siRNA sense strand
uccaguaucucugauuaug

SEQ ID NO: 1822724 - RNA, 19 nt, Homo sapiens
  misc_RNA (1)...(19): siRNA sense strand
uaccgcaacuccauguuuc

SEQ ID NO: 1822725 - RNA, 19 nt, Homo sapiens
  misc_RNA (1)...(19): siRNA sense strand
uggagaagguggacaucau

SEQ ID NO: 1822726 - RNA, 19 nt, Homo sapiens
  misc_RNA (1)...(19): siRNA sense strand
gcgaguggaugggcuacug

SEQ ID NO: 1822727 - RNA, 19 nt, Homo sapiens
  misc_RNA (1)...(19): siRNA sense strand
gagaagguggacaucauca

SEQ ID NO: 1822728 - RNA, 19 nt, Homo sapiens
  misc_RNA (1)...(19): siRNA sense strand
gcagacgguguucuacaug

SEQ ID NO: 1822729 - RNA, 19 nt, Homo sapiens
  misc_RNA (1)...(19): siRNA sense strand
cugaggacaugacauccaa

SEQ ID NO: 1822730 - RNA, 19 nt, Homo sapiens
  misc_RNA (1)...(19): siRNA sense strand
acaugacauccaaagauua

SEQ ID NO: 1822731 - RNA, 19 nt, Homo sapiens
  misc_RNA (1)...(19): siRNA sense strand
gaagacgggcgaggagauc

SEQ ID NO: 1822732 - RNA, 19 nt, Homo sapiens
  misc_RNA (1)...(19): siRNA sense strand
cggcauccucugcauguuu

SEQ ID NO: 1822733 - RNA, 19 nt, Homo sapiens
  misc_RNA (1)...(19): siRNA sense strand
caagugaagcggaaugacu

SEQ ID NO: 1822734 - RNA, 19 nt, Homo sapiens
  misc_RNA (1)...(19): siRNA sense strand
caacgccugccucauaaag

SEQ ID NO: 1822735 - RNA, 19 nt, Homo sapiens
  misc_RNA (1)...(19): siRNA sense strand
gcaguacaaagacuacaag

SEQ ID NO: 1822736 - RNA, 19 nt, Homo sapiens
  misc_RNA (1)...(19): siRNA sense strand
gaugggcuacugccucuuc

SEQ ID NO: 1822737 - RNA, 19 nt, Homo sapiens
  misc_RNA (1)...(19): siRNA sense strand
ucaucgggaucguguguuc

SEQ ID NO: 1822738 - RNA, 19 nt, Homo sapiens
  misc_RNA (1)...(19): siRNA sense strand
aggacuaccugaccgugaa

SEQ ID NO: 1822739 - RNA, 19 nt, Homo sapiens
  misc_RNA (1)...(19): siRNA sense strand
ggugggagaacguguaugg

SEQ ID NO: 1822740 - RNA, 19 nt, Homo sapiens
  misc_RNA (1)...(19): siRNA sense strand
cauccaaagauuacuacuu

SEQ ID NO: 1822741 - RNA, 19 nt, Homo sapiens
  misc_RNA (1)...(19): siRNA sense strand
ucaacaccgugcucuaugc

SEQ ID NO: 1822742 - RNA, 19 nt, Homo sapiens
  misc_RNA (1)...(19): siRNA sense strand
ucacuuaccgcaacuccau

SEQ ID NO: 1822743 - RNA, 19 nt, Homo sapiens
  misc_RNA (1)...(19): siRNA sense strand
uuaccgcaacuccauguuu

SEQ ID NO: 1822744 - RNA, 19 nt, Homo sapiens
  misc_RNA (1)...(19): siRNA sense strand
agacgguguucuacaugga

SEQ ID NO: 1822745 - RNA, 19 nt, Homo sapiens
  misc_RNA (1)...(19): siRNA sense strand
aagugaagcggaaugacua

SEQ ID NO: 1822746 - RNA, 19 nt, Homo sapiens
  misc_RNA (1)...(19): siRNA sense strand
ggucaucgggaucgugugu

SEQ ID NO: 1822747 - RNA, 19 nt, Homo sapiens
  misc_RNA (1)...(19): siRNA sense strand
acgccugccucauaaagga

SEQ ID NO: 1822748 - RNA, 19 nt, Homo sapiens
  misc_RNA (1)...(19): siRNA sense strand
gaucgucaaagccaacaag

SEQ ID NO: 1822749 - RNA, 19 nt, Homo sapiens
  misc_RNA (1)...(19): siRNA sense strand
gacaugucuugcaucaaag

SEQ ID NO: 1822750 - RNA, 19 nt, Homo sapiens
  misc_RNA (1)...(19): siRNA sense strand
caugacauccaaagauuac

SEQ ID NO: 1822751 - RNA, 19 nt, Homo sapiens
  misc_RNA (1)...(19): siRNA sense strand
gaggacaugacauccaaag

SEQ ID NO: 1822752 - RNA, 19 nt, Homo sapiens
  misc_RNA (1)...(19): siRNA sense strand
aaaggagguggacaucuau

SEQ ID NO: 1822753 - RNA, 19 nt, Homo sapiens
  misc_RNA (1)...(19): siRNA sense strand
caaccgggaccuggacuuc

SEQ ID NO: 1822754 - RNA, 19 nt, Homo sapiens
  misc_RNA (1)...(19): siRNA sense strand
uguucuacauggaggacua

SEQ ID NO: 1822755 - RNA, 19 nt, Homo sapiens
  misc_RNA (1)...(19): siRNA sense strand
ucaaagauguggccauuaa

SEQ ID NO: 1822756 - RNA, 19 nt, Homo sapiens
  misc_RNA (1)...(19): siRNA sense strand
cgacaugucuugcaucaaa

SEQ ID NO: 1822757 - RNA, 19 nt, Homo sapiens
  misc_RNA (1)...(19): siRNA sense strand
uaaaggagguggacaucua

SEQ ID NO: 1822758 - RNA, 19 nt, Homo sapiens
  misc_RNA (1)...(19): siRNA sense strand
gcaacuccauguuucauaa

SEQ ID NO: 1822759 - RNA, 19 nt, Homo sapiens
  misc_RNA (1)...(19): siRNA sense strand
cgucaaagccaacaaguua

SEQ ID NO: 1822760 - RNA, 19 nt, Homo sapiens
  misc_RNA (1)...(19): siRNA sense strand
gacaugacauccaaagauu

SEQ ID NO: 1822761 - RNA, 19 nt, Homo sapiens
  misc_RNA (1)...(19): siRNA sense strand
guacaaagacuacaagauc

SEQ ID NO: 1822762 - RNA, 19 nt, Homo sapiens
  misc_RNA (1)...(19): siRNA sense strand
guuccaguaucucugauua

SEQ ID NO: 1822763 - RNA, 19 nt, Homo sapiens
  misc_RNA (1)...(19): siRNA sense strand
ggacaugacauccaaagau

SEQ ID NO: 1822764 - RNA, 19 nt, Homo sapiens
  misc_RNA (1)...(19): siRNA sense strand
ggaagcagacgguguucua

SEQ ID NO: 1822765 - RNA, 19 nt, Homo sapiens
  misc_RNA (1)...(19): siRNA sense strand
ggacaucuauaccgucaag

SEQ ID NO: 1822766 - RNA, 19 nt, Homo sapiens
  misc_RNA (1)...(19): siRNA sense strand
caccaacgccugccucaua

SEQ ID NO: 1822767 - RNA, 19 nt, Homo sapiens
  misc_RNA (1)...(19): siRNA sense strand
gggaucguguguuccagua

SEQ ID NO: 1822768 - RNA, 19 nt, Homo sapiens
  misc_RNA (1)...(19): siRNA sense strand
gcccaacgcugaggacaug

SEQ ID NO: 1822769 - RNA, 19 nt, Homo sapiens
  misc_RNA (1)...(19): siRNA sense strand
gaucguguguuccaguauc

SEQ ID NO: 1822770 - RNA, 19 nt, Homo sapiens
  misc_RNA (1)...(19): siRNA sense strand
gcuacugccucuucuacga

SEQ ID NO: 1822771 - RNA, 19 nt, Homo sapiens
  misc_RNA (1)...(19): siRNA sense strand
gaagguggacaucaucauc

SEQ ID NO: 1822772 - RNA, 19 nt, Homo sapiens
  misc_RNA (1)...(19): siRNA sense strand
acgaggagaugcugaagga

SEQ ID NO: 1822773 - RNA, 19 nt, Homo sapiens
  misc_RNA (1)...(19): siRNA sense strand
ggcauccucugcauguuug

SEQ ID NO: 1822774 - RNA, 19 nt, Homo sapiens
  misc_RNA (1)...(19): siRNA sense strand
gcucaacaccgugcucuau

SEQ ID NO: 1822775 - RNA, 19 nt, Homo sapiens
  misc_RNA (1)...(19): siRNA sense strand
ccaucgaccuggacuucaa

SEQ ID NO: 1822776 - RNA, 19 nt, Homo sapiens
  misc_RNA (1)...(19): siRNA sense strand
ugacauccaaagauuacua

SEQ ID NO: 1822777 - RNA, 19 nt, Homo sapiens
  misc_RNA (1)...(19): siRNA sense strand
gcaccggcauccucugcau

SEQ ID NO: 1822778 - RNA, 19 nt, Homo sapiens
  misc_RNA (1)...(19): siRNA sense strand
accaacgccugccucauaa

SEQ ID NO: 1822779 - RNA, 19 nt, Homo sapiens
  misc_RNA (1)...(19): siRNA sense strand
guguauggcuucgacaugu

SEQ ID NO: 1822780 - RNA, 19 nt, Homo sapiens
  misc_RNA (1)...(19): siRNA sense strand
ucaaagccaacaaguuaga

SEQ ID NO: 1822781 - RNA, 19 nt, Homo sapiens
  misc_RNA (1)...(19): siRNA sense strand
ggagaagguggacaucauc

SEQ ID NO: 1822782 - RNA, 19 nt, Homo sapiens
  misc_RNA (1)...(19): siRNA sense strand
ugacuccuacgcacacuuu

SEQ ID NO: 1822783 - RNA, 19 nt, Homo sapiens
  misc_RNA (1)...(19): siRNA sense strand
uccaguaucucugauuaug

SEQ ID NO: 1822784 - RNA, 19 nt, Homo sapiens
  misc_RNA (1)...(19): siRNA sense strand
uaccgcaacuccauguuuc

SEQ ID NO: 1822785 - RNA, 19 nt, Homo sapiens
  misc_RNA (1)...(19): siRNA sense strand
uggagaagguggacaucau

SEQ ID NO: 1822786 - RNA, 19 nt, Homo sapiens
  misc_RNA (1)...(19): siRNA sense strand
gcgaguggaugggcuacug

SEQ ID NO: 1822787 - RNA, 19 nt, Homo sapiens
  misc_RNA (1)...(19): siRNA sense strand
gagaagguggacaucauca

SEQ ID NO: 1822788 - RNA, 19 nt, Homo sapiens
  misc_RNA (1)...(19): siRNA sense strand
gcagacgguguucuacaug

SEQ ID NO: 1822789 - RNA, 19 nt, Homo sapiens
  misc_RNA (1)...(19): siRNA sense strand
cugaggacaugacauccaa

SEQ ID NO: 1822790 - RNA, 19 nt, Homo sapiens
  misc_RNA (1)...(19): siRNA sense strand
acaugacauccaaagauua

SEQ ID NO: 1822791 - RNA, 19 nt, Homo sapiens
  misc_RNA (1)...(19): siRNA sense strand
gaagacgggcgaggagauc

SEQ ID NO: 1822792 - RNA, 19 nt, Homo sapiens
  misc_RNA (1)...(19): siRNA sense strand
cggcauccucugcauguuu

SEQ ID NO: 1822793 - RNA, 19 nt, Homo sapiens
  misc_RNA (1)...(19): siRNA sense strand
caagugaagcggaaugacu

SEQ ID NO: 1822794 - RNA, 19 nt, Homo sapiens
  misc_RNA (1)...(19): siRNA sense strand
caacgccugccucauaaag

SEQ ID NO: 1822795 - RNA, 19 nt, Homo sapiens
  misc_RNA (1)...(19): siRNA sense strand
gcaguacaaagacuacaag

SEQ ID NO: 1822796 - RNA, 19 nt, Homo sapiens
  misc_RNA (1)...(19): siRNA sense strand
gaugggcuacugccucuuc

SEQ ID NO: 1822797 - RNA, 19 nt, Homo sapiens
  misc_RNA (1)...(19): siRNA sense strand
ucaucgggaucguguguuc

SEQ ID NO: 1822798 - RNA, 19 nt, Homo sapiens
  misc_RNA (1)...(19): siRNA sense strand
aggacuaccugaccgugaa

SEQ ID NO: 1822799 - RNA, 19 nt, Homo sapiens
  misc_RNA (1)...(19): siRNA sense strand
ggugggagaacguguaugg

SEQ ID NO: 1822800 - RNA, 19 nt, Homo sapiens
  misc_RNA (1)...(19): siRNA sense strand
cauccaaagauuacuacuu

SEQ ID NO: 1822801 - RNA, 19 nt, Homo sapiens
  misc_RNA (1)...(19): siRNA sense strand
ucaacaccgugcucuaugc

SEQ ID NO: 1822802 - RNA, 19 nt, Homo sapiens
  misc_RNA (1)...(19): siRNA sense strand
ucacuuaccgcaacuccau

SEQ ID NO: 1822803 - RNA, 19 nt, Homo sapiens
  misc_RNA (1)...(19): siRNA sense strand
uuaccgcaacuccauguuu

SEQ ID NO: 1822804 - RNA, 19 nt, Homo sapiens
  misc_RNA (1)...(19): siRNA sense strand
agacgguguucuacaugga

SEQ ID NO: 1822805 - RNA, 19 nt, Homo sapiens
  misc_RNA (1)...(19): siRNA sense strand
aagugaagcggaaugacua

SEQ ID NO: 1822806 - RNA, 19 nt, Homo sapiens
  misc_RNA (1)...(19): siRNA sense strand
ggucaucgggaucgugugu

SEQ ID NO: 1822807 - RNA, 19 nt, Homo sapiens
  misc_RNA (1)...(19): siRNA sense strand
acgccugccucauaaagga

SEQ ID NO: 1822808 - RNA, 19 nt, Homo sapiens
  misc_RNA (1)...(19): siRNA sense strand
gaucgucaaagccaacaag

SEQ ID NO: 1822809 - RNA, 19 nt, Homo sapiens
  misc_RNA (1)...(19): siRNA sense strand
gacaugucuugcaucaaag

SEQ ID NO: 1822810 - RNA, 19 nt, Homo sapiens
  misc_RNA (1)...(19): siRNA sense strand
caugacauccaaagauuac

SEQ ID NO: 1822811 - RNA, 19 nt, Homo sapiens
  misc_RNA (1)...(19): siRNA sense strand
gaggacaugacauccaaag

SEQ ID NO: 1822812 - RNA, 19 nt, Homo sapiens
  misc_RNA (1)...(19): siRNA sense strand
aaaggagguggacaucuau

SEQ ID NO: 1822813 - RNA, 19 nt, Homo sapiens
  misc_RNA (1)...(19): siRNA sense strand
caaccgggaccuggacuuc

SEQ ID NO: 1822814 - RNA, 19 nt, Homo sapiens
  misc_RNA (1)...(19): siRNA sense strand
uguucuacauggaggacua

SEQ ID NO: 1822815 - RNA, 19 nt, Homo sapiens
  misc_RNA (1)...(19): siRNA sense strand
ucaaagauguggccauuaa

SEQ ID NO: 1822816 - RNA, 19 nt, Homo sapiens
  misc_RNA (1)...(19): siRNA sense strand
cgacaugucuugcaucaaa

SEQ ID NO: 1822817 - RNA, 19 nt, Homo sapiens
  misc_RNA (1)...(19): siRNA sense strand
uaaaggagguggacaucua

SEQ ID NO: 1822818 - RNA, 19 nt, Homo sapiens
  misc_RNA (1)...(19): siRNA sense strand
gcaacuccauguuucauaa

SEQ ID NO: 1822819 - RNA, 19 nt, Homo sapiens
  misc_RNA (1)...(19): siRNA sense strand
cgucaaagccaacaaguua

SEQ ID NO: 1822820 - RNA, 19 nt, Homo sapiens
  misc_RNA (1)...(19): siRNA sense strand
gacaugacauccaaagauu

SEQ ID NO: 1822821 - RNA, 19 nt, Homo sapiens
  misc_RNA (1)...(19): siRNA sense strand
guacaaagacuacaagauc

SEQ ID NO: 1822822 - RNA, 19 nt, Homo sapiens
  misc_RNA (1)...(19): siRNA sense strand
guuccaguaucucugauua

SEQ ID NO: 1822823 - RNA, 19 nt, Homo sapiens
  misc_RNA (1)...(19): siRNA sense strand
ggacaugacauccaaagau

SEQ ID NO: 1822824 - RNA, 19 nt, Homo sapiens
  misc_RNA (1)...(19): siRNA sense strand
ggaagcagacgguguucua

SEQ ID NO: 1822825 - RNA, 19 nt, Homo sapiens
  misc_RNA (1)...(19): siRNA sense strand
ggacaucuauaccgucaag

SEQ ID NO: 1822826 - RNA, 19 nt, Homo sapiens
  misc_RNA (1)...(19): siRNA sense strand
caccaacgccugccucaua

SEQ ID NO: 1822827 - RNA, 19 nt, Homo sapiens
  misc_RNA (1)...(19): siRNA sense strand
gggaucguguguuccagua

SEQ ID NO: 1822828 - RNA, 19 nt, Homo sapiens
  misc_RNA (1)...(19): siRNA sense strand
gcccaacgcugaggacaug

SEQ ID NO: 1822829 - RNA, 19 nt, Homo sapiens
  misc_RNA (1)...(19): siRNA sense strand
gaucguguguuccaguauc

SEQ ID NO: 1822830 - RNA, 19 nt, Homo sapiens
  misc_RNA (1)...(19): siRNA sense strand
gcuacugccucuucuacga

SEQ ID NO: 1822831 - RNA, 19 nt, Homo sapiens
  misc_RNA (1)...(19): siRNA sense strand
gaagguggacaucaucauc

SEQ ID NO: 1822832 - RNA, 19 nt, Homo sapiens
  misc_RNA (1)...(19): siRNA sense strand
acgaggagaugcugaagga

SEQ ID NO: 1822833 - RNA, 19 nt, Homo sapiens
  misc_RNA (1)...(19): siRNA sense strand
ggcauccucugcauguuug

SEQ ID NO: 1822834 - RNA, 19 nt, Homo sapiens
  misc_RNA (1)...(19): siRNA sense strand
gcucaacaccgugcucuau

SEQ ID NO: 1822835 - RNA, 19 nt, Homo sapiens
  misc_RNA (1)...(19): siRNA sense strand
ccaucgaccuggacuucaa

SEQ ID NO: 1822836 - RNA, 19 nt, Homo sapiens
  misc_RNA (1)...(19): siRNA sense strand
ugacauccaaagauuacua

SEQ ID NO: 1822837 - RNA, 19 nt, Homo sapiens
  misc_RNA (1)...(19): siRNA sense strand
gcaccggcauccucugcau

SEQ ID NO: 1822838 - RNA, 19 nt, Homo sapiens
  misc_RNA (1)...(19): siRNA sense strand
accaacgccugccucauaa

SEQ ID NO: 1822839 - RNA, 19 nt, Homo sapiens
  misc_RNA (1)...(19): siRNA sense strand
guguauggcuucgacaugu

SEQ ID NO: 1822840 - RNA, 19 nt, Homo sapiens
  misc_RNA (1)...(19): siRNA sense strand
ucaaagccaacaaguuaga

SEQ ID NO: 1822841 - RNA, 19 nt, Homo sapiens
  misc_RNA (1)...(19): siRNA sense strand
ggagaagguggacaucauc

SEQ ID NO: 1822842 - RNA, 19 nt, Homo sapiens
  misc_RNA (1)...(19): siRNA sense strand
ugacuccuacgcacacuuu

SEQ ID NO: 1822843 - RNA, 19 nt, Homo sapiens
  misc_RNA (1)...(19): siRNA sense strand
uccaguaucucugauuaug

SEQ ID NO: 1822844 - RNA, 19 nt, Homo sapiens
  misc_RNA (1)...(19): siRNA sense strand
uaccgcaacuccauguuuc

SEQ ID NO: 1822845 - RNA, 19 nt, Homo sapiens
  misc_RNA (1)...(19): siRNA sense strand
uggagaagguggacaucau

SEQ ID NO: 1822846 - RNA, 19 nt, Homo sapiens
  misc_RNA (1)...(19): siRNA sense strand
gcgaguggaugggcuacug

SEQ ID NO: 1822847 - RNA, 19 nt, Homo sapiens
  misc_RNA (1)...(19): siRNA sense strand
gagaagguggacaucauca

SEQ ID NO: 1822848 - RNA, 19 nt, Homo sapiens
  misc_RNA (1)...(19): siRNA sense strand
gcagacgguguucuacaug

SEQ ID NO: 1822849 - RNA, 19 nt, Homo sapiens
  misc_RNA (1)...(19): siRNA sense strand
cugaggacaugacauccaa

SEQ ID NO: 1822850 - RNA, 19 nt, Homo sapiens
  misc_RNA (1)...(19): siRNA sense strand
acaugacauccaaagauua

SEQ ID NO: 1822851 - RNA, 19 nt, Homo sapiens
  misc_RNA (1)...(19): siRNA sense strand
gaagacgggcgaggagauc

SEQ ID NO: 1822852 - RNA, 19 nt, Homo sapiens
  misc_RNA (1)...(19): siRNA sense strand
cggcauccucugcauguuu

SEQ ID NO: 1822853 - RNA, 19 nt, Homo sapiens
  misc_RNA (1)...(19): siRNA sense strand
caagugaagcggaaugacu

SEQ ID NO: 1822854 - RNA, 19 nt, Homo sapiens
  misc_RNA (1)...(19): siRNA sense strand
caacgccugccucauaaag

SEQ ID NO: 1822855 - RNA, 19 nt, Homo sapiens
  misc_RNA (1)...(19): siRNA sense strand
gcaguacaaagacuacaag

SEQ ID NO: 1822856 - RNA, 19 nt, Homo sapiens
  misc_RNA (1)...(19): siRNA sense strand
gaugggcuacugccucuuc

SEQ ID NO: 1822857 - RNA, 19 nt, Homo sapiens
  misc_RNA (1)...(19): siRNA sense strand
ucaucgggaucguguguuc

SEQ ID NO: 1822858 - RNA, 19 nt, Homo sapiens
  misc_RNA (1)...(19): siRNA sense strand
aggacuaccugaccgugaa

SEQ ID NO: 1822859 - RNA, 19 nt, Homo sapiens
  misc_RNA (1)...(19): siRNA sense strand
ggugggagaacguguaugg

SEQ ID NO: 1822860 - RNA, 19 nt, Homo sapiens
  misc_RNA (1)...(19): siRNA sense strand
cauccaaagauuacuacuu

SEQ ID NO: 1822861 - RNA, 19 nt, Homo sapiens
  misc_RNA (1)...(19): siRNA sense strand
ucaacaccgugcucuaugc

SEQ ID NO: 1822862 - RNA, 19 nt, Homo sapiens
  misc_RNA (1)...(19): siRNA sense strand
ucacuuaccgcaacuccau

SEQ ID NO: 1822863 - RNA, 19 nt, Homo sapiens
  misc_RNA (1)...(19): siRNA sense strand
uuaccgcaacuccauguuu

SEQ ID NO: 1822864 - RNA, 19 nt, Homo sapiens
  misc_RNA (1)...(19): siRNA sense strand
agacgguguucuacaugga

SEQ ID NO: 1822865 - RNA, 19 nt, Homo sapiens
  misc_RNA (1)...(19): siRNA sense strand
aagugaagcggaaugacua

SEQ ID NO: 1822866 - RNA, 19 nt, Homo sapiens
  misc_RNA (1)...(19): siRNA sense strand
ggucaucgggaucgugugu

SEQ ID NO: 1822867 - RNA, 19 nt, Homo sapiens
  misc_RNA (1)...(19): siRNA sense strand
acgccugccucauaaagga

SEQ ID NO: 1822868 - RNA, 19 nt, Homo sapiens
  misc_RNA (1)...(19): siRNA sense strand
gaucgucaaagccaacaag

SEQ ID NO: 1822869 - RNA, 19 nt, Homo sapiens
  misc_RNA (1)...(19): siRNA sense strand
gacaugucuugcaucaaag

SEQ ID NO: 1822870 - RNA, 19 nt, Homo sapiens
  misc_RNA (1)...(19): siRNA sense strand
caugacauccaaagauuac

SEQ ID NO: 1822871 - RNA, 19 nt, Homo sapiens
  misc_RNA (1)...(19): siRNA sense strand
gaggacaugacauccaaag

SEQ ID NO: 1822872 - RNA, 19 nt, Homo sapiens
  misc_RNA (1)...(19): siRNA sense strand
aaaggagguggacaucuau

SEQ ID NO: 1822873 - RNA, 19 nt, Homo sapiens
  misc_RNA (1)...(19): siRNA sense strand
caaccgggaccuggacuuc

SEQ ID NO: 1822874 - RNA, 19 nt, Homo sapiens
  misc_RNA (1)...(19): siRNA sense strand
uguucuacauggaggacua

SEQ ID NO: 1822875 - RNA, 19 nt, Homo sapiens
  misc_RNA (1)...(19): siRNA sense strand
gcaaacauguccuuagaua

SEQ ID NO: 1822876 - RNA, 19 nt, Homo sapiens
  misc_RNA (1)...(19): siRNA sense strand
gauggaaucuacaggcuua

SEQ ID NO: 1822877 - RNA, 19 nt, Homo sapiens
  misc_RNA (1)...(19): siRNA sense strand
ggaagaagaccaauauuau

SEQ ID NO: 1822878 - RNA, 19 nt, Homo sapiens
  misc_RNA (1)...(19): siRNA sense strand
ggacaaagaugggcaagug

SEQ ID NO: 1822879 - RNA, 19 nt, Homo sapiens
  misc_RNA (1)...(19): siRNA sense strand
gggaagaagaccaauauua

SEQ ID NO: 1822880 - RNA, 19 nt, Homo sapiens
  misc_RNA (1)...(19): siRNA sense strand
aguguaagcuuccagauua

SEQ ID NO: 1822881 - RNA, 19 nt, Homo sapiens
  misc_RNA (1)...(19): siRNA sense strand
ggagaugucuauagcuuug

SEQ ID NO: 1822882 - RNA, 19 nt, Homo sapiens
  misc_RNA (1)...(19): siRNA sense strand
cugaagagcuggaaauuga

SEQ ID NO: 1822883 - RNA, 19 nt, Homo sapiens
  misc_RNA (1)...(19): siRNA sense strand
gaaaagaccuucuaucaag

SEQ ID NO: 1822884 - RNA, 19 nt, Homo sapiens
  misc_RNA (1)...(19): siRNA sense strand
ggaguucgaucaaguuuca

SEQ ID NO: 1822885 - RNA, 19 nt, Homo sapiens
  misc_RNA (1)...(19): siRNA sense strand
gcaauauucuagcaacuug

SEQ ID NO: 1822886 - RNA, 19 nt, Homo sapiens
  misc_RNA (1)...(19): siRNA sense strand
aaauggagcugcuacguuu

SEQ ID NO: 1822887 - RNA, 19 nt, Homo sapiens
  misc_RNA (1)...(19): siRNA sense strand
ggaaacagcugggacaaag

SEQ ID NO: 1822888 - RNA, 19 nt, Homo sapiens
  misc_RNA (1)...(19): siRNA sense strand
gcuaaagucucgaaacugu

SEQ ID NO: 1822889 - RNA, 19 nt, Homo sapiens
  misc_RNA (1)...(19): siRNA sense strand
gcacaagccaugaauaaug

SEQ ID NO: 1822890 - RNA, 19 nt, Homo sapiens
  misc_RNA (1)...(19): siRNA sense strand
gggcuugugugaauuauga

SEQ ID NO: 1822891 - RNA, 19 nt, Homo sapiens
  misc_RNA (1)...(19): siRNA sense strand
gaugcaguguugaccauua

SEQ ID NO: 1822892 - RNA, 19 nt, Homo sapiens
  misc_RNA (1)...(19): siRNA sense strand
gaagacauuugggugcaua

SEQ ID NO: 1822893 - RNA, 19 nt, Homo sapiens
  misc_RNA (1)...(19): siRNA sense strand
gcuuguaacugucaugaaa

SEQ ID NO: 1822894 - RNA, 19 nt, Homo sapiens
  misc_RNA (1)...(19): siRNA sense strand
gcagacagaauucgcauaa

SEQ ID NO: 1822895 - RNA, 19 nt, Homo sapiens
  misc_RNA (1)...(19): siRNA sense strand
caaaggacccaauagaauu

SEQ ID NO: 1822896 - RNA, 19 nt, Homo sapiens
  misc_RNA (1)...(19): siRNA sense strand
caagugauguguucgaaau

SEQ ID NO: 1822897 - RNA, 19 nt, Homo sapiens
  misc_RNA (1)...(19): siRNA sense strand
ccagauggccucaggauuu

SEQ ID NO: 1822898 - RNA, 19 nt, Homo sapiens
  misc_RNA (1)...(19): siRNA sense strand
ggacuugcgucaugagaau

SEQ ID NO: 1822899 - RNA, 19 nt, Homo sapiens
  misc_RNA (1)...(19): siRNA sense strand
gaggacagauucaaaugga

SEQ ID NO: 1822900 - RNA, 19 nt, Homo sapiens
  misc_RNA (1)...(19): siRNA sense strand
gaggugaaauuccugagaa

SEQ ID NO: 1822901 - RNA, 19 nt, Homo sapiens
  misc_RNA (1)...(19): siRNA sense strand
cgagggcucucuccaguuu

SEQ ID NO: 1822902 - RNA, 19 nt, Homo sapiens
  misc_RNA (1)...(19): siRNA sense strand
gaaaggcaguuggugagaa

SEQ ID NO: 1822903 - RNA, 19 nt, Homo sapiens
  misc_RNA (1)...(19): siRNA sense strand
cagauggccucaggauuua

SEQ ID NO: 1822904 - RNA, 19 nt, Homo sapiens
  misc_RNA (1)...(19): siRNA sense strand
ggaaugugcucaugaucug

SEQ ID NO: 1822905 - RNA, 19 nt, Homo sapiens
  misc_RNA (1)...(19): siRNA sense strand
gaaaccuucuggcugauug

SEQ ID NO: 1822906 - RNA, 19 nt, Homo sapiens
  misc_RNA (1)...(19): siRNA sense strand
gaagacauacugacaaauc

SEQ ID NO: 1822907 - RNA, 19 nt, Homo sapiens
  misc_RNA (1)...(19): siRNA sense strand
gauguaacguuuaucaauc

SEQ ID NO: 1822908 - RNA, 19 nt, Homo sapiens
  misc_RNA (1)...(19): siRNA sense strand
gaucaaaggacccaauaga

SEQ ID NO: 1822909 - RNA, 19 nt, Homo sapiens
  misc_RNA (1)...(19): siRNA sense strand
agaggaaucuucuauggaa

SEQ ID NO: 1822910 - RNA, 19 nt, Homo sapiens
  misc_RNA (1)...(19): siRNA sense strand
uagaagacauacugacaaa

SEQ ID NO: 1822911 - RNA, 19 nt, Homo sapiens
  misc_RNA (1)...(19): siRNA sense strand
gaccuuaaguccaucaaau

SEQ ID NO: 1822912 - RNA, 19 nt, Homo sapiens
  misc_RNA (1)...(19): siRNA sense strand
uaaagggcaugaaguacuu

SEQ ID NO: 1822913 - RNA, 19 nt, Homo sapiens
  misc_RNA (1)...(19): siRNA sense strand
ucucagcacuguuacaauu

SEQ ID NO: 1822914 - RNA, 19 nt, Homo sapiens
  misc_RNA (1)...(19): siRNA sense strand
gcauaaucaucauguguau

SEQ ID NO: 1822915 - RNA, 19 nt, Homo sapiens
  misc_RNA (1)...(19): siRNA sense strand
ggaaccaucuacaauucaa

SEQ ID NO: 1822916 - RNA, 19 nt, Homo sapiens
  misc_RNA (1)...(19): siRNA sense strand
gaaauggagcugcuacguu

SEQ ID NO: 1822917 - RNA, 19 nt, Homo sapiens
  misc_RNA (1)...(19): siRNA sense strand
caacuuggaagauuugauu

SEQ ID NO: 1822918 - RNA, 19 nt, Homo sapiens
  misc_RNA (1)...(19): siRNA sense strand
ggacagauucaaauggaaa

SEQ ID NO: 1822919 - RNA, 19 nt, Homo sapiens
  misc_RNA (1)...(19): siRNA sense strand
ggucguggaucuucugaau

SEQ ID NO: 1822920 - RNA, 19 nt, Homo sapiens
  misc_RNA (1)...(19): siRNA sense strand
agacagaauucgcauaauc

SEQ ID NO: 1822921 - RNA, 19 nt, Homo sapiens
  misc_RNA (1)...(19): siRNA sense strand
cagcugagauugcaaacau

SEQ ID NO: 1822922 - RNA, 19 nt, Homo sapiens
  misc_RNA (1)...(19): siRNA sense strand
ugagguugcugcgcgauua

SEQ ID NO: 1822923 - RNA, 19 nt, Homo sapiens
  misc_RNA (1)...(19): siRNA sense strand
gaacaacgaccaacuuuug

SEQ ID NO: 1822924 - RNA, 19 nt, Homo sapiens
  misc_RNA (1)...(19): siRNA sense strand
gcucuacaguuuaccuuau

SEQ ID NO: 1822925 - RNA, 19 nt, Homo sapiens
  misc_RNA (1)...(19): siRNA sense strand
gcccagauacugcuuguuu

SEQ ID NO: 1822926 - RNA, 19 nt, Homo sapiens
  misc_RNA (1)...(19): siRNA sense strand
gaagagcuggaaauugaaa

SEQ ID NO: 1822927 - RNA, 19 nt, Homo sapiens
  misc_RNA (1)...(19): siRNA sense strand
ggaagucgugccaguguaa

SEQ ID NO: 1822928 - RNA, 19 nt, Homo sapiens
  misc_RNA (1)...(19): siRNA sense strand
ggagucauuuccucagaug

SEQ ID NO: 1822929 - RNA, 19 nt, Homo sapiens
  misc_RNA (1)...(19): siRNA sense strand
ugaaugaccuguacacacu

SEQ ID NO: 1822930 - RNA, 19 nt, Homo sapiens
  misc_RNA (1)...(19): siRNA sense strand
gacaccaacuugaaagaau

SEQ ID NO: 1822931 - RNA, 19 nt, Homo sapiens
  misc_RNA (1)...(19): siRNA sense strand
gaucaaguuucaccguugu

SEQ ID NO: 1822932 - RNA, 19 nt, Homo sapiens
  misc_RNA (1)...(19): siRNA sense strand
aaaggcaguuggugagaaa

SEQ ID NO: 1822933 - RNA, 19 nt, Homo sapiens
  misc_RNA (1)...(19): siRNA sense strand
uaaggcgucguauaaauaa

SEQ ID NO: 1822934 - RNA, 19 nt, Homo sapiens
  misc_RNA (1)...(19): siRNA sense strand
aaacauguccuuagauauc

SEQ ID NO: 1822935 - RNA, 19 nt, Homo sapiens
  misc_RNA (1)...(19): siRNA sense strand
caggagaugucuauagcuu

SEQ ID NO: 1822936 - RNA, 19 nt, Homo sapiens
  misc_RNA (1)...(19): siRNA sense strand
ggauguaacguuuaucaau

SEQ ID NO: 1822937 - RNA, 19 nt, Homo sapiens
  misc_RNA (1)...(19): siRNA sense strand
ggacaagacagccaaagca

SEQ ID NO: 1822938 - RNA, 19 nt, Homo sapiens
  misc_RNA (1)...(19): siRNA sense strand
gauugcagccuuccaaaga

SEQ ID NO: 1822939 - RNA, 19 nt, Homo sapiens
  misc_RNA (1)...(19): siRNA sense strand
ucguggaucuucugaauga

SEQ ID NO: 1822940 - RNA, 19 nt, Homo sapiens
  misc_RNA (1)...(19): siRNA sense strand
gcagaacaacgaccaacuu

SEQ ID NO: 1822941 - RNA, 19 nt, Homo sapiens
  misc_RNA (1)...(19): siRNA sense strand
gaaugucuccagcugauga

SEQ ID NO: 1822942 - RNA, 19 nt, Homo sapiens
  misc_RNA (1)...(19): siRNA sense strand
ucaaaggacccaauagaau

SEQ ID NO: 1822943 - RNA, 19 nt, Homo sapiens
  misc_RNA (1)...(19): siRNA sense strand
gauggaaccuacgucuuug

SEQ ID NO: 1822944 - RNA, 19 nt, Homo sapiens
  misc_RNA (1)...(19): siRNA sense strand
gaauucuacugacuuugga

SEQ ID NO: 1822945 - RNA, 19 nt, Homo sapiens
  misc_RNA (1)...(19): siRNA sense strand
ugauggaaccuacgucuuu

SEQ ID NO: 1822946 - RNA, 19 nt, Homo sapiens
  misc_RNA (1)...(19): siRNA sense strand
aggcuuaccuuaucgcauu

SEQ ID NO: 1822947 - RNA, 19 nt, Homo sapiens
  misc_RNA (1)...(19): siRNA sense strand
ggacugaagagcuggaaau

SEQ ID NO: 1822948 - RNA, 19 nt, Homo sapiens
  misc_RNA (1)...(19): siRNA sense strand
gcccugcugucuauuaaug

SEQ ID NO: 1822949 - RNA, 19 nt, Homo sapiens
  misc_RNA (1)...(19): siRNA sense strand
cagccucgcuccugggaaa

SEQ ID NO: 1822950 - RNA, 19 nt, Homo sapiens
  misc_RNA (1)...(19): siRNA sense strand
cagaaugucuccagcugau

SEQ ID NO: 1822951 - RNA, 19 nt, Homo sapiens
  misc_RNA (1)...(19): siRNA sense strand
agugacagauuauggcuuu

SEQ ID NO: 1822952 - RNA, 19 nt, Homo sapiens
  misc_RNA (1)...(19): siRNA sense strand
cauuggagaugccuacaug

SEQ ID NO: 1822953 - RNA, 19 nt, Homo sapiens
  misc_RNA (1)...(19): siRNA sense strand
cuagcaacuuggaagauuu

SEQ ID NO: 1822954 - RNA, 19 nt, Homo sapiens
  misc_RNA (1)...(19): siRNA sense strand
gcaguuccauggauucaac

SEQ ID NO: 1822955 - RNA, 19 nt, Homo sapiens
  misc_RNA (1)...(19): siRNA sense strand
gggcaaaggcacagaggaa

SEQ ID NO: 1822956 - RNA, 19 nt, Homo sapiens
  misc_RNA (1)...(19): siRNA sense strand
ggacaccaacuugaaagaa

SEQ ID NO: 1822957 - RNA, 19 nt, Homo sapiens
  misc_RNA (1)...(19): siRNA sense strand
gaugaggacagauucaaau

SEQ ID NO: 1822958 - RNA, 19 nt, Homo sapiens
  misc_RNA (1)...(19): siRNA sense strand
gugauucgcuguuuucaaa

SEQ ID NO: 1822959 - RNA, 19 nt, Homo sapiens
  misc_RNA (1)...(19): siRNA sense strand
uaacuccagcuaccuauga

SEQ ID NO: 1822960 - RNA, 19 nt, Homo sapiens
  misc_RNA (1)...(19): siRNA sense strand
auaaggcgucguauaaaua

SEQ ID NO: 1822961 - RNA, 19 nt, Homo sapiens
  misc_RNA (1)...(19): siRNA sense strand
gacagaauucgcauaauca

SEQ ID NO: 1822962 - RNA, 19 nt, Homo sapiens
  misc_RNA (1)...(19): siRNA sense strand
gaagugccgguccgaauuc

SEQ ID NO: 1822963 - RNA, 19 nt, Homo sapiens
  misc_RNA (1)...(19): siRNA sense strand
uugcaaacauguccuuaga

SEQ ID NO: 1822964 - RNA, 19 nt, Homo sapiens
  misc_RNA (1)...(19): siRNA sense strand
cagaacaacgaccaacuuu

SEQ ID NO: 1822965 - RNA, 19 nt, Homo sapiens
  misc_RNA (1)...(19): siRNA sense strand
uaacgacaucuuagaaaug

SEQ ID NO: 1822966 - RNA, 19 nt, Homo sapiens
  misc_RNA (1)...(19): siRNA sense strand
ugaaggacuugcgucauga

SEQ ID NO: 1822967 - RNA, 19 nt, Homo sapiens
  misc_RNA (1)...(19): siRNA sense strand
acuccaacauagcgauuua

SEQ ID NO: 1822968 - RNA, 19 nt, Homo sapiens
  misc_RNA (1)...(19): siRNA sense strand
gaggauguaacguuuauca

SEQ ID NO: 1822969 - RNA, 19 nt, Homo sapiens
  misc_RNA (1)...(19): siRNA sense strand
ccagaaacaugcaguucca

SEQ ID NO: 1822970 - RNA, 19 nt, Homo sapiens
  misc_RNA (1)...(19): siRNA sense strand
gauuagccauugagcgaau

SEQ ID NO: 1822971 - RNA, 19 nt, Homo sapiens
  misc_RNA (1)...(19): siRNA sense strand
ucgcacaagccaugaauaa

SEQ ID NO: 1822972 - RNA, 19 nt, Homo sapiens
  misc_RNA (1)...(19): siRNA sense strand
ugacaaaucaagaugugaa

SEQ ID NO: 1822973 - RNA, 19 nt, Homo sapiens
  misc_RNA (1)...(19): siRNA sense strand
uagcccugcugucuauuaa

SEQ ID NO: 1822974 - RNA, 19 nt, Homo sapiens
  misc_RNA (1)...(19): siRNA sense strand
aauacgugauucucaauga

SEQ ID NO: 1822975 - RNA, 19 nt, Homo sapiens
  misc_RNA (1)...(19): siRNA sense strand
ggaagaaauuguccaagaa

SEQ ID NO: 1822976 - RNA, 19 nt, Homo sapiens
  misc_RNA (1)...(19): siRNA sense strand
gaaacuaucccucuuguga

SEQ ID NO: 1822977 - RNA, 19 nt, Homo sapiens
  misc_RNA (1)...(19): siRNA sense strand
gaaagacacccuacaaaga

SEQ ID NO: 1822978 - RNA, 19 nt, Homo sapiens
  misc_RNA (1)...(19): siRNA sense strand
gggaagaaauuguccaaga

SEQ ID NO: 1822979 - RNA, 19 nt, Homo sapiens
  misc_RNA (1)...(19): siRNA sense strand
gcacugcgguguccacaug

SEQ ID NO: 1822980 - RNA, 19 nt, Homo sapiens
  misc_RNA (1)...(19): siRNA sense strand
cagaguaaaucgcaaagaa

SEQ ID NO: 1822981 - RNA, 19 nt, Homo sapiens
  misc_RNA (1)...(19): siRNA sense strand
gaagaaauuguccaagaaa

SEQ ID NO: 1822982 - RNA, 19 nt, Homo sapiens
  misc_RNA (1)...(19): siRNA sense strand
gaacugaagcgccuacaga

SEQ ID NO: 1822983 - RNA, 19 nt, Homo sapiens
  misc_RNA (1)...(19): siRNA sense strand
agaauuggcuggaagaaga

SEQ ID NO: 1822984 - RNA, 19 nt, Homo sapiens
  misc_RNA (1)...(19): siRNA sense strand
ccacaggauuucugcagua

SEQ ID NO: 1822985 - RNA, 19 nt, Homo sapiens
  misc_RNA (1)...(19): siRNA sense strand
uaaagagauuccuggagua

SEQ ID NO: 1822986 - RNA, 19 nt, Homo sapiens
  misc_RNA (1)...(19): siRNA sense strand
ccuguuaccucucaucauu

SEQ ID NO: 1822987 - RNA, 19 nt, Homo sapiens
  misc_RNA (1)...(19): siRNA sense strand
ccaagaaauugauuaugga

SEQ ID NO: 1822988 - RNA, 19 nt, Homo sapiens
  misc_RNA (1)...(19): siRNA sense strand
ggaaagacacccuacaaag

SEQ ID NO: 1822989 - RNA, 19 nt, Homo sapiens
  misc_RNA (1)...(19): siRNA sense strand
aaagacacccuacaaagaa

SEQ ID NO: 1822990 - RNA, 19 nt, Homo sapiens
  misc_RNA (1)...(19): siRNA sense strand
uuacagcucucuucugcaa

SEQ ID NO: 1822991 - RNA, 19 nt, Homo sapiens
  misc_RNA (1)...(19): siRNA sense strand
uguauugccuggcuaaaga

SEQ ID NO: 1822992 - RNA, 19 nt, Homo sapiens
  misc_RNA (1)...(19): siRNA sense strand
ccucagagcagcaaccuuu

SEQ ID NO: 1822993 - RNA, 19 nt, Homo sapiens
  misc_RNA (1)...(19): siRNA sense strand
gggaaagacacccuacaaa

SEQ ID NO: 1822994 - RNA, 19 nt, Homo sapiens
  misc_RNA (1)...(19): siRNA sense strand
gaaauugauuauggagaca

SEQ ID NO: 1822995 - RNA, 19 nt, Homo sapiens
  misc_RNA (1)...(19): siRNA sense strand
cagaaacuaucccucuugu

SEQ ID NO: 1822996 - RNA, 19 nt, Homo sapiens
  misc_RNA (1)...(19): siRNA sense strand
gaauguauugccuggcuaa

SEQ ID NO: 1822997 - RNA, 19 nt, Homo sapiens
  misc_RNA (1)...(19): siRNA sense strand
uccaagaaauugauuaugg

SEQ ID NO: 1822998 - RNA, 19 nt, Homo sapiens
  misc_RNA (1)...(19): siRNA sense strand
ggagccaucuaccuuccaa

SEQ ID NO: 1822999 - RNA, 19 nt, Homo sapiens
  misc_RNA (1)...(19): siRNA sense strand
guaaaucgcaaagaaacuu

SEQ ID NO: 1823000 - RNA, 19 nt, Homo sapiens
  misc_RNA (1)...(19): siRNA sense strand
gauggaagcaccacaggau

SEQ ID NO: 1823001 - RNA, 19 nt, Homo sapiens
  misc_RNA (1)...(19): siRNA sense strand
acugauggcguuccuguua

SEQ ID NO: 1823002 - RNA, 19 nt, Homo sapiens
  misc_RNA (1)...(19): siRNA sense strand
cauaugacgggcaggauuu

SEQ ID NO: 1823003 - RNA, 19 nt, Homo sapiens
  misc_RNA (1)...(19): siRNA sense strand
gcauaugacgggcaggauu

SEQ ID NO: 1823004 - RNA, 19 nt, Homo sapiens
  misc_RNA (1)...(19): siRNA sense strand
gcuggaagaagaauguauu

SEQ ID NO: 1823005 - RNA, 19 nt, Homo sapiens
  misc_RNA (1)...(19): siRNA sense strand
ggcagcagauguucaaggu

SEQ ID NO: 1823006 - RNA, 19 nt, Homo sapiens
  misc_RNA (1)...(19): siRNA sense strand
ccagaaauuuacaugacau

SEQ ID NO: 1823007 - RNA, 19 nt, Homo sapiens
  misc_RNA (1)...(19): siRNA sense strand
agagauuccuggaguaugg

SEQ ID NO: 1823008 - RNA, 19 nt, Homo sapiens
  misc_RNA (1)...(19): siRNA sense strand
acucagggucucacacuua

SEQ ID NO: 1823009 - RNA, 19 nt, Homo sapiens
  misc_RNA (1)...(19): siRNA sense strand
agagaaugauuggcuguga

SEQ ID NO: 1823010 - RNA, 19 nt, Homo sapiens
  misc_RNA (1)...(19): siRNA sense strand
ggucagaguaaaucgcaaa

SEQ ID NO: 1823011 - RNA, 19 nt, Homo sapiens
  misc_RNA (1)...(19): siRNA sense strand
cuacagaggcacuacaauc

SEQ ID NO: 1823012 - RNA, 19 nt, Homo sapiens
  misc_RNA (1)...(19): siRNA sense strand
ccauuguccuugucauugu

SEQ ID NO: 1823013 - RNA, 19 nt, Homo sapiens
  misc_RNA (1)...(19): siRNA sense strand
uuccugaucuucaauaaag

SEQ ID NO: 1823014 - RNA, 19 nt, Homo sapiens
  misc_RNA (1)...(19): siRNA sense strand
ggaagcaccacaggauuuc

SEQ ID NO: 1823015 - RNA, 19 nt, Homo sapiens
  misc_RNA (1)...(19): siRNA sense strand
caggauuucugcaguaugc

SEQ ID NO: 1823016 - RNA, 19 nt, Homo sapiens
  misc_RNA (1)...(19): siRNA sense strand
ggcuggaguugguguucua

SEQ ID NO: 1823017 - RNA, 19 nt, Homo sapiens
  misc_RNA (1)...(19): siRNA sense strand
gaauuggcuggaagaagaa

SEQ ID NO: 1823018 - RNA, 19 nt, Homo sapiens
  misc_RNA (1)...(19): siRNA sense strand
uggaagcaccacaggauuu

SEQ ID NO: 1823019 - RNA, 19 nt, Homo sapiens
  misc_RNA (1)...(19): siRNA sense strand
gaguaaaucgcaaagaaac

SEQ ID NO: 1823020 - RNA, 19 nt, Homo sapiens
  misc_RNA (1)...(19): siRNA sense strand
agaguaaaucgcaaagaaa

SEQ ID NO: 1823021 - RNA, 19 nt, Homo sapiens
  misc_RNA (1)...(19): siRNA sense strand
ucagaaacuaucccucuug

SEQ ID NO: 1823022 - RNA, 19 nt, Homo sapiens
  misc_RNA (1)...(19): siRNA sense strand
gauuuccugaucuucaaua

SEQ ID NO: 1823023 - RNA, 19 nt, Homo sapiens
  misc_RNA (1)...(19): siRNA sense strand
ccaggaaucagaaacuauc

SEQ ID NO: 1823024 - RNA, 19 nt, Homo sapiens
  misc_RNA (1)...(19): siRNA sense strand
uacagaggcacuacaauca

SEQ ID NO: 1823025 - RNA, 19 nt, Homo sapiens
  misc_RNA (1)...(19): siRNA sense strand
gauuauggagacauucuuc

SEQ ID NO: 1823026 - RNA, 19 nt, Homo sapiens
  misc_RNA (1)...(19): siRNA sense strand
uugccuggcuaaagagauu

SEQ ID NO: 1823027 - RNA, 19 nt, Homo sapiens
  misc_RNA (1)...(19): siRNA sense strand
ucuccuggcuggcuguaga

SEQ ID NO: 1823028 - RNA, 19 nt, Homo sapiens
  misc_RNA (1)...(19): siRNA sense strand
cacaggauuucugcaguau

SEQ ID NO: 1823029 - RNA, 19 nt, Homo sapiens
  misc_RNA (1)...(19): siRNA sense strand
cagaggcacuacaaucacu

SEQ ID NO: 1823030 - RNA, 19 nt, Homo sapiens
  misc_RNA (1)...(19): siRNA sense strand
aaagagauuccuggaguau

SEQ ID NO: 1823031 - RNA, 19 nt, Homo sapiens
  misc_RNA (1)...(19): siRNA sense strand
caugaguugcuguaucaaa

SEQ ID NO: 1823032 - RNA, 19 nt, Homo sapiens
  misc_RNA (1)...(19): siRNA sense strand
gggaggccaaucagcauga

SEQ ID NO: 1823033 - RNA, 19 nt, Homo sapiens
  misc_RNA (1)...(19): siRNA sense strand
aacuaucccucuugugaug

SEQ ID NO: 1823034 - RNA, 19 nt, Homo sapiens
  misc_RNA (1)...(19): siRNA sense strand
cccagaaauuuacaugaca

SEQ ID NO: 1823035 - RNA, 19 nt, Homo sapiens
  misc_RNA (1)...(19): siRNA sense strand
acagcucucuucugcaaag

SEQ ID NO: 1823036 - RNA, 19 nt, Homo sapiens
  misc_RNA (1)...(19): siRNA sense strand
aaccuuuacuccugucaug

SEQ ID NO: 1823037 - RNA, 19 nt, Homo sapiens
  misc_RNA (1)...(19): siRNA sense strand
cuggcuggcuguagauaau

SEQ ID NO: 1823038 - RNA, 19 nt, Homo sapiens
  misc_RNA (1)...(19): siRNA sense strand
ggaguugguguucuagucu

SEQ ID NO: 1823039 - RNA, 19 nt, Homo sapiens
  misc_RNA (1)...(19): siRNA sense strand
ccacuggucagaguaaauc

SEQ ID NO: 1823040 - RNA, 19 nt, Homo sapiens
  misc_RNA (1)...(19): siRNA sense strand
uguuaccucucaucauugu

SEQ ID NO: 1823041 - RNA, 19 nt, Homo sapiens
  misc_RNA (1)...(19): siRNA sense strand
uaucaggcgugggcaucaa

SEQ ID NO: 1823042 - RNA, 19 nt, Homo sapiens
  misc_RNA (1)...(19): siRNA sense strand
cgcacccuaucaccacaua

SEQ ID NO: 1823043 - RNA, 19 nt, Homo sapiens
  misc_RNA (1)...(19): siRNA sense strand
ugggaaagacacccuacaa

SEQ ID NO: 1823044 - RNA, 19 nt, Homo sapiens
  misc_RNA (1)...(19): siRNA sense strand
uggaguugguguucuaguc

SEQ ID NO: 1823045 - RNA, 19 nt, Homo sapiens
  misc_RNA (1)...(19): siRNA sense strand
cuaucccucuugugaugaa

SEQ ID NO: 1823046 - RNA, 19 nt, Homo sapiens
  misc_RNA (1)...(19): siRNA sense strand
gcguuccuguuaccucuca

SEQ ID NO: 1823047 - RNA, 19 nt, Homo sapiens
  misc_RNA (1)...(19): siRNA sense strand
gcagauguucaagguggaa

SEQ ID NO: 1823048 - RNA, 19 nt, Homo sapiens
  misc_RNA (1)...(19): siRNA sense strand
uccaacaccagaucgauga

SEQ ID NO: 1823049 - RNA, 19 nt, Homo sapiens
  misc_RNA (1)...(19): siRNA sense strand
aaacuaucccucuugugau

SEQ ID NO: 1823050 - RNA, 19 nt, Homo sapiens
  misc_RNA (1)...(19): siRNA sense strand
ccucucaucauuguguuaa

SEQ ID NO: 1823051 - RNA, 19 nt, Homo sapiens
  misc_RNA (1)...(19): siRNA sense strand
ucaaaagaauuggcuggaa

SEQ ID NO: 1823052 - RNA, 19 nt, Homo sapiens
  misc_RNA (1)...(19): siRNA sense strand
gcacugcccuugcuguuug

SEQ ID NO: 1823053 - RNA, 19 nt, Homo sapiens
  misc_RNA (1)...(19): siRNA sense strand
gcagaagaaaggauacuug

SEQ ID NO: 1823054 - RNA, 19 nt, Homo sapiens
  misc_RNA (1)...(19): siRNA sense strand
gcucggacaucuugguguu

SEQ ID NO: 1823055 - RNA, 19 nt, Homo sapiens
  misc_RNA (1)...(19): siRNA sense strand
aaggagaacugagaagauu

SEQ ID NO: 1823056 - RNA, 19 nt, Homo sapiens
  misc_RNA (1)...(19): siRNA sense strand
ucaggagcaugaaguuuga

SEQ ID NO: 1823057 - RNA, 19 nt, Homo sapiens
  misc_RNA (1)...(19): siRNA sense strand
ugacugcucccaaaucauu

SEQ ID NO: 1823058 - RNA, 19 nt, Homo sapiens
  misc_RNA (1)...(19): siRNA sense strand
gaaaggauacuugcagaag

SEQ ID NO: 1823059 - RNA, 19 nt, Homo sapiens
  misc_RNA (1)...(19): siRNA sense strand
gcaaggagaacugagaaga

SEQ ID NO: 1823060 - RNA, 19 nt, Homo sapiens
  misc_RNA (1)...(19): siRNA sense strand
uccaauauguccaucugua

SEQ ID NO: 1823061 - RNA, 19 nt, Homo sapiens
  misc_RNA (1)...(19): siRNA sense strand
cccgagaccuccaauaugu

SEQ ID NO: 1823062 - RNA, 19 nt, Homo sapiens
  misc_RNA (1)...(19): siRNA sense strand
gggaacagcgccaccauuc

SEQ ID NO: 1823063 - RNA, 19 nt, Homo sapiens
  misc_RNA (1)...(19): siRNA sense strand
gcgcgaaaccagccaauuc

SEQ ID NO: 1823064 - RNA, 19 nt, Homo sapiens
  misc_RNA (1)...(19): siRNA sense strand
gcugcacacuuuccucuuc

SEQ ID NO: 1823065 - RNA, 19 nt, Homo sapiens
  misc_RNA (1)...(19): siRNA sense strand
gcuacacccuguccugcaa

SEQ ID NO: 1823066 - RNA, 19 nt, Homo sapiens
  misc_RNA (1)...(19): siRNA sense strand
ggaggcagaccaucaucuu

SEQ ID NO: 1823067 - RNA, 19 nt, Homo sapiens
  misc_RNA (1)...(19): siRNA sense strand
ggaggugacagaccacaug

SEQ ID NO: 1823068 - RNA, 19 nt, Homo sapiens
  misc_RNA (1)...(19): siRNA sense strand
ugaugcaggugcucaugaa

SEQ ID NO: 1823069 - RNA, 19 nt, Homo sapiens
  misc_RNA (1)...(19): siRNA sense strand
aaggauacuugcagaagga

SEQ ID NO: 1823070 - RNA, 19 nt, Homo sapiens
  misc_RNA (1)...(19): siRNA sense strand
cccaggugcugcagaagaa

SEQ ID NO: 1823071 - RNA, 19 nt, Homo sapiens
  misc_RNA (1)...(19): siRNA sense strand
gcugauuguugugacauug

SEQ ID NO: 1823072 - RNA, 19 nt, Homo sapiens
  misc_RNA (1)...(19): siRNA sense strand
caaggagaacugagaagau

SEQ ID NO: 1823073 - RNA, 19 nt, Homo sapiens
  misc_RNA (1)...(19): siRNA sense strand
caggugaagcugcugauug

SEQ ID NO: 1823074 - RNA, 19 nt, Homo sapiens
  misc_RNA (1)...(19): siRNA sense strand
ccauggaguucuacagcau

SEQ ID NO: 1823075 - RNA, 19 nt, Homo sapiens
  misc_RNA (1)...(19): siRNA sense strand
gucauugagucucgaguca

SEQ ID NO: 1823076 - RNA, 19 nt, Homo sapiens
  misc_RNA (1)...(19): siRNA sense strand
ggagaacugagaagauuuu

SEQ ID NO: 1823077 - RNA, 19 nt, Homo sapiens
  misc_RNA (1)...(19): siRNA sense strand
uaccucagcucggucauca

SEQ ID NO: 1823078 - RNA, 19 nt, Homo sapiens
  misc_RNA (1)...(19): siRNA sense strand
ugguguaccugaucaucuu

SEQ ID NO: 1823079 - RNA, 19 nt, Homo sapiens
  misc_RNA (1)...(19): siRNA sense strand
agugacugcucccaaauca

SEQ ID NO: 1823080 - RNA, 19 nt, Homo sapiens
  misc_RNA (1)...(19): siRNA sense strand
ccaaccagauucggaggau

SEQ ID NO: 1823081 - RNA, 19 nt, Homo sapiens
  misc_RNA (1)...(19): siRNA sense strand
gcccgagaccuccaauaug

SEQ ID NO: 1823082 - RNA, 19 nt, Homo sapiens
  misc_RNA (1)...(19): siRNA sense strand
ggaguucuacagcaucauc

SEQ ID NO: 1823083 - RNA, 19 nt, Homo sapiens
  misc_RNA (1)...(19): siRNA sense strand
guugugacauuggccguau

SEQ ID NO: 1823084 - RNA, 19 nt, Homo sapiens
  misc_RNA (1)...(19): siRNA sense strand
gaggcugauuguugugaca

SEQ ID NO: 1823085 - RNA, 19 nt, Homo sapiens
  misc_RNA (1)...(19): siRNA sense strand
gcccaacucaggcgcgaaa

SEQ ID NO: 1823086 - RNA, 19 nt, Homo sapiens
  misc_RNA (1)...(19): siRNA sense strand
caaaaucacccuuauucug

SEQ ID NO: 1823087 - RNA, 19 nt, Homo sapiens
  misc_RNA (1)...(19): siRNA sense strand
gaucaaaaucacccuuauu

SEQ ID NO: 1823088 - RNA, 19 nt, Homo sapiens
  misc_RNA (1)...(19): siRNA sense strand
agucuaagucccagucauu

SEQ ID NO: 1823089 - RNA, 19 nt, Homo sapiens
  misc_RNA (1)...(19): siRNA sense strand
ggaucaaaaucacccuuau

SEQ ID NO: 1823090 - RNA, 19 nt, Homo sapiens
  misc_RNA (1)...(19): siRNA sense strand
ucuacagcaucaucuggaa

SEQ ID NO: 1823091 - RNA, 19 nt, Homo sapiens
  misc_RNA (1)...(19): siRNA sense strand
aggugaagcugcugauugg

SEQ ID NO: 1823092 - RNA, 19 nt, Homo sapiens
  misc_RNA (1)...(19): siRNA sense strand
ucaucaacccgcuccugua

SEQ ID NO: 1823093 - RNA, 19 nt, Homo sapiens
  misc_RNA (1)...(19): siRNA sense strand
ggaaguccgagagcgaaga

SEQ ID NO: 1823094 - RNA, 19 nt, Homo sapiens
  misc_RNA (1)...(19): siRNA sense strand
ccuccaauauguccaucug

SEQ ID NO: 1823095 - RNA, 19 nt, Homo sapiens
  misc_RNA (1)...(19): siRNA sense strand
gaugcaggugcucaugaaa

SEQ ID NO: 1823096 - RNA, 19 nt, Homo sapiens
  misc_RNA (1)...(19): siRNA sense strand
gcacgccaaccacgagaag

SEQ ID NO: 1823097 - RNA, 19 nt, Homo sapiens
  misc_RNA (1)...(19): siRNA sense strand
gccaggaggcagaccauca

SEQ ID NO: 1823098 - RNA, 19 nt, Homo sapiens
  misc_RNA (1)...(19): siRNA sense strand
gaggcagaccaucaucuuc

SEQ ID NO: 1823099 - RNA, 19 nt, Homo sapiens
  misc_RNA (1)...(19): siRNA sense strand
caucaacccgcuccuguac

SEQ ID NO: 1823100 - RNA, 19 nt, Homo sapiens
  misc_RNA (1)...(19): siRNA sense strand
ggcugauuguugugacauu

SEQ ID NO: 1823101 - RNA, 19 nt, Homo sapiens
  misc_RNA (1)...(19): siRNA sense strand
agaaaggauacuugcagaa

SEQ ID NO: 1823102 - RNA, 19 nt, Homo sapiens
  misc_RNA (1)...(19): siRNA sense strand
cauugagucucgagucacu

SEQ ID NO: 1823103 - RNA, 19 nt, Homo sapiens
  misc_RNA (1)...(19): siRNA sense strand
gcucauugcugcuauauua

SEQ ID NO: 1823104 - RNA, 19 nt, Homo sapiens
  misc_RNA (1)...(19): siRNA sense strand
gagcgaagauuuccuauau

SEQ ID NO: 1823105 - RNA, 19 nt, Homo sapiens
  misc_RNA (1)...(19): siRNA sense strand
gacaagaggugcuaaauca

SEQ ID NO: 1823106 - RNA, 19 nt, Homo sapiens
  misc_RNA (1)...(19): siRNA sense strand
guagagaugucauuaccua

SEQ ID NO: 1823107 - RNA, 19 nt, Homo sapiens
  misc_RNA (1)...(19): siRNA sense strand
gcgaagauuuccuauauau

SEQ ID NO: 1823108 - RNA, 19 nt, Homo sapiens
  misc_RNA (1)...(19): siRNA sense strand
gacaauagcugcaggagau

SEQ ID NO: 1823109 - RNA, 19 nt, Homo sapiens
  misc_RNA (1)...(19): siRNA sense strand
gaacuuacacugaaacugu

SEQ ID NO: 1823110 - RNA, 19 nt, Homo sapiens
  misc_RNA (1)...(19): siRNA sense strand
gcccaaaccuggacuccua

SEQ ID NO: 1823111 - RNA, 19 nt, Homo sapiens
  misc_RNA (1)...(19): siRNA sense strand
gcugcuauauuaccagaua

SEQ ID NO: 1823112 - RNA, 19 nt, Homo sapiens
  misc_RNA (1)...(19): siRNA sense strand
gcaggagccucgcaauaug

SEQ ID NO: 1823113 - RNA, 19 nt, Homo sapiens
  misc_RNA (1)...(19): siRNA sense strand
gaacaugacugugguagac

SEQ ID NO: 1823114 - RNA, 19 nt, Homo sapiens
  misc_RNA (1)...(19): siRNA sense strand
acaccuagcugcuggauau

SEQ ID NO: 1823115 - RNA, 19 nt, Homo sapiens
  misc_RNA (1)...(19): siRNA sense strand
gcacugaauccaauaaaug

SEQ ID NO: 1823116 - RNA, 19 nt, Homo sapiens
  misc_RNA (1)...(19): siRNA sense strand
gaaucucaaucuccaaaga

SEQ ID NO: 1823117 - RNA, 19 nt, Homo sapiens
  misc_RNA (1)...(19): siRNA sense strand
caacugcuaugccucuuau

SEQ ID NO: 1823118 - RNA, 19 nt, Homo sapiens
  misc_RNA (1)...(19): siRNA sense strand
ccacugagccagcuucauu

SEQ ID NO: 1823119 - RNA, 19 nt, Homo sapiens
  misc_RNA (1)...(19): siRNA sense strand
ccacuucaaugcuauguuc

SEQ ID NO: 1823120 - RNA, 19 nt, Homo sapiens
  misc_RNA (1)...(19): siRNA sense strand
gugaagggcuaccugaaga

SEQ ID NO: 1823121 - RNA, 19 nt, Homo sapiens
  misc_RNA (1)...(19): siRNA sense strand
uaucauggcuccuguuugg

SEQ ID NO: 1823122 - RNA, 19 nt, Homo sapiens
  misc_RNA (1)...(19): siRNA sense strand
ggaaaguacugcuauucag

SEQ ID NO: 1823123 - RNA, 19 nt, Homo sapiens
  misc_RNA (1)...(19): siRNA sense strand
ggaguuugcugaguggauu

SEQ ID NO: 1823124 - RNA, 19 nt, Homo sapiens
  misc_RNA (1)...(19): siRNA sense strand
cccaauggcuuaccaaauc

SEQ ID NO: 1823125 - RNA, 19 nt, Homo sapiens
  misc_RNA (1)...(19): siRNA sense strand
gguagacucuccuggacaa

SEQ ID NO: 1823126 - RNA, 19 nt, Homo sapiens
  misc_RNA (1)...(19): siRNA sense strand
gcucucugauggcuccuua

SEQ ID NO: 1823127 - RNA, 19 nt, Homo sapiens
  misc_RNA (1)...(19): siRNA sense strand
cagugaagccugccauaua

SEQ ID NO: 1823128 - RNA, 19 nt, Homo sapiens
  misc_RNA (1)...(19): siRNA sense strand
gagagcagaaacauucaua

SEQ ID NO: 1823129 - RNA, 19 nt, Homo sapiens
  misc_RNA (1)...(19): siRNA sense strand
uaacagccauuuccuuguc

SEQ ID NO: 1823130 - RNA, 19 nt, Homo sapiens
  misc_RNA (1)...(19): siRNA sense strand
gcucgaacuuacacugaaa

SEQ ID NO: 1823131 - RNA, 19 nt, Homo sapiens
  misc_RNA (1)...(19): siRNA sense strand
ggagcucauugcugcuaua

SEQ ID NO: 1823132 - RNA, 19 nt, Homo sapiens
  misc_RNA (1)...(19): siRNA sense strand
caacagggcccacuuuguc

SEQ ID NO: 1823133 - RNA, 19 nt, Homo sapiens
  misc_RNA (1)...(19): siRNA sense strand
gcaaagcuaacagccauuu

SEQ ID NO: 1823134 - RNA, 19 nt, Homo sapiens
  misc_RNA (1)...(19): siRNA sense strand
ccagaucuuucuucagaga

SEQ ID NO: 1823135 - RNA, 19 nt, Homo sapiens
  misc_RNA (1)...(19): siRNA sense strand
ggacaagaggugcuaaauc

SEQ ID NO: 1823136 - RNA, 19 nt, Homo sapiens
  misc_RNA (1)...(19): siRNA sense strand
ucuaugggauugcuuguga

SEQ ID NO: 1823137 - RNA, 19 nt, Homo sapiens
  misc_RNA (1)...(19): siRNA sense strand
aaaccacacugccgaggaa

SEQ ID NO: 1823138 - RNA, 19 nt, Homo sapiens
  misc_RNA (1)...(19): siRNA sense strand
acacagauuuggguucauu

SEQ ID NO: 1823139 - RNA, 19 nt, Homo sapiens
  misc_RNA (1)...(19): siRNA sense strand
ucugugggauucauuauau

SEQ ID NO: 1823140 - RNA, 19 nt, Homo sapiens
  misc_RNA (1)...(19): siRNA sense strand
gggcaggagccucgcaaua

SEQ ID NO: 1823141 - RNA, 19 nt, Homo sapiens
  misc_RNA (1)...(19): siRNA sense strand
ugucaaccaucacuacuug

SEQ ID NO: 1823142 - RNA, 19 nt, Homo sapiens
  misc_RNA (1)...(19): siRNA sense strand
agccagaucuuucuucaga

SEQ ID NO: 1823143 - RNA, 19 nt, Homo sapiens
  misc_RNA (1)...(19): siRNA sense strand
guagagcgaagauuuccua

SEQ ID NO: 1823144 - RNA, 19 nt, Homo sapiens
  misc_RNA (1)...(19): siRNA sense strand
agugaagccugccauauau

SEQ ID NO: 1823145 - RNA, 19 nt, Homo sapiens
  misc_RNA (1)...(19): siRNA sense strand
cuucagagaugucaaaggu

SEQ ID NO: 1823146 - RNA, 19 nt, Homo sapiens
  misc_RNA (1)...(19): siRNA sense strand
cgacuggcuugggacaaua

SEQ ID NO: 1823147 - RNA, 19 nt, Homo sapiens
  misc_RNA (1)...(19): siRNA sense strand
gaaagugagggcccaagug

SEQ ID NO: 1823148 - RNA, 19 nt, Homo sapiens
  misc_RNA (1)...(19): siRNA sense strand
ggaggcuauucauaaggua

SEQ ID NO: 1823149 - RNA, 19 nt, Homo sapiens
  misc_RNA (1)...(19): siRNA sense strand
gcugcuggauauuauaaug

SEQ ID NO: 1823150 - RNA, 19 nt, Homo sapiens
  misc_RNA (1)...(19): siRNA sense strand
ugaagccugccauauauaa

SEQ ID NO: 1823151 - RNA, 19 nt, Homo sapiens
  misc_RNA (1)...(19): siRNA sense strand
gaacagccagaucuuucuu

SEQ ID NO: 1823152 - RNA, 19 nt, Homo sapiens
  misc_RNA (1)...(19): siRNA sense strand
ccaauggcuuaccaaauca

SEQ ID NO: 1823153 - RNA, 19 nt, Homo sapiens
  misc_RNA (1)...(19): siRNA sense strand
gguugaggcugaagaugug

SEQ ID NO: 1823154 - RNA, 19 nt, Homo sapiens
  misc_RNA (1)...(19): siRNA sense strand
ccaccaaaccgaagaagau

SEQ ID NO: 1823155 - RNA, 19 nt, Homo sapiens
  misc_RNA (1)...(19): siRNA sense strand
gcuggaggcuauucauaag

SEQ ID NO: 1823156 - RNA, 19 nt, Homo sapiens
  misc_RNA (1)...(19): siRNA sense strand
uaccagauauggcacugaa

SEQ ID NO: 1823157 - RNA, 19 nt, Homo sapiens
  misc_RNA (1)...(19): siRNA sense strand
gcugggauguguccuucuu

SEQ ID NO: 1823158 - RNA, 19 nt, Homo sapiens
  misc_RNA (1)...(19): siRNA sense strand
gcagaggcuuccguagaga

SEQ ID NO: 1823159 - RNA, 19 nt, Homo sapiens
  misc_RNA (1)...(19): siRNA sense strand
gggaaaguacugcuauuca

SEQ ID NO: 1823160 - RNA, 19 nt, Homo sapiens
  misc_RNA (1)...(19): siRNA sense strand
ggcaggagccucgcaauau

SEQ ID NO: 1823161 - RNA, 19 nt, Homo sapiens
  misc_RNA (1)...(19): siRNA sense strand
gaacccauaaacucuauca

SEQ ID NO: 1823162 - RNA, 19 nt, Homo sapiens
  misc_RNA (1)...(19): siRNA sense strand
ggcacccucuaccgaauaa

SEQ ID NO: 1823163 - RNA, 19 nt, Homo sapiens
  misc_RNA (1)...(19): siRNA sense strand
agacacagauuuggguuca

SEQ ID NO: 1823164 - RNA, 19 nt, Homo sapiens
  misc_RNA (1)...(19): siRNA sense strand
ggcacugaauccaauaaau

SEQ ID NO: 1823165 - RNA, 19 nt, Homo sapiens
  misc_RNA (1)...(19): siRNA sense strand
ccuagcugcuggauauuau

SEQ ID NO: 1823166 - RNA, 19 nt, Homo sapiens
  misc_RNA (1)...(19): siRNA sense strand
gcaacagggcccacuuugu

SEQ ID NO: 1823167 - RNA, 19 nt, Homo sapiens
  misc_RNA (1)...(19): siRNA sense strand
acugguuccuggucucuua

SEQ ID NO: 1823168 - RNA, 19 nt, Homo sapiens
  misc_RNA (1)...(19): siRNA sense strand
cgagcccacuucaaugcua

SEQ ID NO: 1823169 - RNA, 19 nt, Homo sapiens
  misc_RNA (1)...(19): siRNA sense strand
agucagggcugguucgaau

SEQ ID NO: 1823170 - RNA, 19 nt, Homo sapiens
  misc_RNA (1)...(19): siRNA sense strand
aaagugagggcccaaguga

SEQ ID NO: 1823171 - RNA, 19 nt, Homo sapiens
  misc_RNA (1)...(19): siRNA sense strand
cuucaauggugcaaagcua

SEQ ID NO: 1823172 - RNA, 19 nt, Homo sapiens
  misc_RNA (1)...(19): siRNA sense strand
gagcccacuucaaugcuau

SEQ ID NO: 1823173 - RNA, 19 nt, Homo sapiens
  misc_RNA (1)...(19): siRNA sense strand
caucacuacuugcucuuuc

SEQ ID NO: 1823174 - RNA, 19 nt, Homo sapiens
  misc_RNA (1)...(19): siRNA sense strand
gauauggcacugaauccaa

SEQ ID NO: 1823175 - RNA, 19 nt, Homo sapiens
  misc_RNA (1)...(19): siRNA sense strand
cugaagauguggaagaaag

SEQ ID NO: 1823176 - RNA, 19 nt, Homo sapiens
  misc_RNA (1)...(19): siRNA sense strand
gugcagaggcuuccguaga

SEQ ID NO: 1823177 - RNA, 19 nt, Homo sapiens
  misc_RNA (1)...(19): siRNA sense strand
gaaccuucccacuaacuca

SEQ ID NO: 1823178 - RNA, 19 nt, Homo sapiens
  misc_RNA (1)...(19): siRNA sense strand
uauaauggcauggugguuu

SEQ ID NO: 1823179 - RNA, 19 nt, Homo sapiens
  misc_RNA (1)...(19): siRNA sense strand
ccacgaggaucuacuucag

SEQ ID NO: 1823180 - RNA, 19 nt, Homo sapiens
  misc_RNA (1)...(19): siRNA sense strand
ggcugaagauguggaagaa

SEQ ID NO: 1823181 - RNA, 19 nt, Homo sapiens
  misc_RNA (1)...(19): siRNA sense strand
gaaagccgagcccacuuca

SEQ ID NO: 1823182 - RNA, 19 nt, Homo sapiens
  misc_RNA (1)...(19): siRNA sense strand
cugaaacugucaaccauca

SEQ ID NO: 1823183 - RNA, 19 nt, Homo sapiens
  misc_RNA (1)...(19): siRNA sense strand
ccauauauaagguacaaug

SEQ ID NO: 1823184 - RNA, 19 nt, Homo sapiens
  misc_RNA (1)...(19): siRNA sense strand
agaccuagaucggccagaa

SEQ ID NO: 1823185 - RNA, 19 nt, Homo sapiens
  misc_RNA (1)...(19): siRNA sense strand
cagcuggaggcuauucaua

SEQ ID NO: 1823186 - RNA, 19 nt, Homo sapiens
  misc_RNA (1)...(19): siRNA sense strand
gagcagaaacauucauacu

SEQ ID NO: 1823187 - RNA, 19 nt, Homo sapiens
  misc_RNA (1)...(19): siRNA sense strand
cauaucauggcuccuguuu

SEQ ID NO: 1823188 - RNA, 19 nt, Homo sapiens
  misc_RNA (1)...(19): siRNA sense strand
gaagggcuaccugaagaug

SEQ ID NO: 1823189 - RNA, 19 nt, Homo sapiens
  misc_RNA (1)...(19): siRNA sense strand
cagaaucucaaucuccaaa

SEQ ID NO: 1823190 - RNA, 19 nt, Homo sapiens
  misc_RNA (1)...(19): siRNA sense strand
ucugauggcuccuuaaagc

SEQ ID NO: 1823191 - RNA, 19 nt, Homo sapiens
  misc_RNA (1)...(19): siRNA sense strand
uccacgggaugaagacuuu

SEQ ID NO: 1823192 - RNA, 19 nt, Homo sapiens
  misc_RNA (1)...(19): siRNA sense strand
cggccuggcuucucuccaa

SEQ ID NO: 1823193 - RNA, 19 nt, Homo sapiens
  misc_RNA (1)...(19): siRNA sense strand
ggcugcagcuggaggcuau

SEQ ID NO: 1823194 - RNA, 19 nt, Homo sapiens
  misc_RNA (1)...(19): siRNA sense strand
gaucugcuccguagagaac

SEQ ID NO: 1823195 - RNA, 19 nt, Homo sapiens
  misc_RNA (1)...(19): siRNA sense strand
ggaacaugacugugguaga

SEQ ID NO: 1823196 - RNA, 19 nt, Homo sapiens
  misc_RNA (1)...(19): siRNA sense strand
gugaagccugccauauaua

SEQ ID NO: 1823197 - RNA, 19 nt, Homo sapiens
  misc_RNA (1)...(19): siRNA sense strand
caucugggaccucaaguuc

SEQ ID NO: 1823198 - RNA, 19 nt, Homo sapiens
  misc_RNA (1)...(19): siRNA sense strand
ggacuuccgagagcagaaa

SEQ ID NO: 1823199 - RNA, 19 nt, Homo sapiens
  misc_RNA (1)...(19): siRNA sense strand
uaagaaacgaggucgaaag

SEQ ID NO: 1823200 - RNA, 19 nt, Homo sapiens
  misc_RNA (1)...(19): siRNA sense strand
ccagauauggcacugaauc

SEQ ID NO: 1823201 - RNA, 19 nt, Homo sapiens
  misc_RNA (1)...(19): siRNA sense strand
cagagcugcugcugcugaa

SEQ ID NO: 1823202 - RNA, 19 nt, Homo sapiens
  misc_RNA (1)...(19): siRNA sense strand
agcgaagauuuccuauaua

SEQ ID NO: 1823203 - RNA, 19 nt, Homo sapiens
  misc_RNA (1)...(19): siRNA sense strand
uggcagagauuuccaagaa

SEQ ID NO: 1823204 - RNA, 19 nt, Homo sapiens
  misc_RNA (1)...(19): siRNA sense strand
ggugagcgcuuucuuuauc

SEQ ID NO: 1823205 - RNA, 19 nt, Homo sapiens
  misc_RNA (1)...(19): siRNA sense strand
caaugagacugcccagauu

SEQ ID NO: 1823206 - RNA, 19 nt, Homo sapiens
  misc_RNA (1)...(19): siRNA sense strand
gcucugcgcaccugaaauu

SEQ ID NO: 1823207 - RNA, 19 nt, Homo sapiens
  misc_RNA (1)...(19): siRNA sense strand
ccauugccauguacuauau

SEQ ID NO: 1823208 - RNA, 19 nt, Homo sapiens
  misc_RNA (1)...(19): siRNA sense strand
ggaugacugucuuccguau

SEQ ID NO: 1823209 - RNA, 19 nt, Homo sapiens
  misc_RNA (1)...(19): siRNA sense strand
cuacaucaccuuuguguuc

SEQ ID NO: 1823210 - RNA, 19 nt, Homo sapiens
  misc_RNA (1)...(19): siRNA sense strand
guaacugccuccuugucuu

SEQ ID NO: 1823211 - RNA, 19 nt, Homo sapiens
  misc_RNA (1)...(19): siRNA sense strand
guucaacucugacaaugag

SEQ ID NO: 1823212 - RNA, 19 nt, Homo sapiens
  misc_RNA (1)...(19): siRNA sense strand
gcccagauuuggauugaag

SEQ ID NO: 1823213 - RNA, 19 nt, Homo sapiens
  misc_RNA (1)...(19): siRNA sense strand
caccugaaauuccggacaa

SEQ ID NO: 1823214 - RNA, 19 nt, Homo sapiens
  misc_RNA (1)...(19): siRNA sense strand
cuggugagcgcuuucuuua

SEQ ID NO: 1823215 - RNA, 19 nt, Homo sapiens
  misc_RNA (1)...(19): siRNA sense strand
gggugaugcucaaggaaau

SEQ ID NO: 1823216 - RNA, 19 nt, Homo sapiens
  misc_RNA (1)...(19): siRNA sense strand
caaacucuacaucaccuuu

SEQ ID NO: 1823217 - RNA, 19 nt, Homo sapiens
  misc_RNA (1)...(19): siRNA sense strand
gaggaggaguuucugucau

SEQ ID NO: 1823218 - RNA, 19 nt, Homo sapiens
  misc_RNA (1)...(19): siRNA sense strand
gcuggugagcgcuuucuuu

SEQ ID NO: 1823219 - RNA, 19 nt, Homo sapiens
  misc_RNA (1)...(19): siRNA sense strand
ggucguggagggacacauu

SEQ ID NO: 1823220 - RNA, 19 nt, Homo sapiens
  misc_RNA (1)...(19): siRNA sense strand
gacgggugaugcucaagga

SEQ ID NO: 1823221 - RNA, 19 nt, Homo sapiens
  misc_RNA (1)...(19): siRNA sense strand
gggcuggugcuguggauga

SEQ ID NO: 1823222 - RNA, 19 nt, Homo sapiens
  misc_RNA (1)...(19): siRNA sense strand
cgugaucgcucuuguucca

SEQ ID NO: 1823223 - RNA, 19 nt, Homo sapiens
  misc_RNA (1)...(19): siRNA sense strand
acaaugagacugcccagau

SEQ ID NO: 1823224 - RNA, 19 nt, Homo sapiens
  misc_RNA (1)...(19): siRNA sense strand
gcguucaacucugacaaug

SEQ ID NO: 1823225 - RNA, 19 nt, Homo sapiens
  misc_RNA (1)...(19): siRNA sense strand
uaacugccuccuugucuuc

SEQ ID NO: 1823226 - RNA, 19 nt, Homo sapiens
  misc_RNA (1)...(19): siRNA sense strand
cacauuauagggaccauug

SEQ ID NO: 1823227 - RNA, 19 nt, Homo sapiens
  misc_RNA (1)...(19): siRNA sense strand
uugcaucucuguccucuac

SEQ ID NO: 1823228 - RNA, 19 nt, Homo sapiens
  misc_RNA (1)...(19): siRNA sense strand
ggagaggaggaguuucugu

SEQ ID NO: 1823229 - RNA, 19 nt, Homo sapiens
  misc_RNA (1)...(19): siRNA sense strand
aggaggaguuucugucauc

SEQ ID NO: 1823230 - RNA, 19 nt, Homo sapiens
  misc_RNA (1)...(19): siRNA sense strand
cguggagggacacauuaua

SEQ ID NO: 1823231 - RNA, 19 nt, Homo sapiens
  misc_RNA (1)...(19): siRNA sense strand
gccauguacuauauugucu

SEQ ID NO: 1823232 - RNA, 19 nt, Homo sapiens
  misc_RNA (1)...(19): siRNA sense strand
uauccugucugcguccauu

SEQ ID NO: 1823233 - RNA, 19 nt, Homo sapiens
  misc_RNA (1)...(19): siRNA sense strand
cuacuuggcguucaacucu

SEQ ID NO: 1823234 - RNA, 19 nt, Homo sapiens
  misc_RNA (1)...(19): siRNA sense strand
gacacgugaucgcucuugu

SEQ ID NO: 1823235 - RNA, 19 nt, Homo sapiens
  misc_RNA (1)...(19): siRNA sense strand
cgucuucguuggcagagau

SEQ ID NO: 1823236 - RNA, 19 nt, Homo sapiens
  misc_RNA (1)...(19): siRNA sense strand
guggagggacacauuauag

SEQ ID NO: 1823237 - RNA, 19 nt, Homo sapiens
  misc_RNA (1)...(19): siRNA sense strand
gauuucaugcucucacugu

SEQ ID NO: 1823238 - RNA, 19 nt, Homo sapiens
  misc_RNA (1)...(19): siRNA sense strand
gagacugcccagauuugga

SEQ ID NO: 1823239 - RNA, 19 nt, Homo sapiens
  misc_RNA (1)...(19): siRNA sense strand
cccauugccauguacuaua

SEQ ID NO: 1823240 - RNA, 19 nt, Homo sapiens
  misc_RNA (1)...(19): siRNA sense strand
aaugagacugcccagauuu

SEQ ID NO: 1823241 - RNA, 19 nt, Homo sapiens
  misc_RNA (1)...(19): siRNA sense strand
accagaggcugcagugaca

SEQ ID NO: 1823242 - RNA, 19 nt, Homo sapiens
  misc_RNA (1)...(19): siRNA sense strand
gcgcuuucuuuaucuucug

SEQ ID NO: 1823243 - RNA, 19 nt, Homo sapiens
  misc_RNA (1)...(19): siRNA sense strand
gugagcgcuuucuuuaucu

SEQ ID NO: 1823244 - RNA, 19 nt, Homo sapiens
  misc_RNA (1)...(19): siRNA sense strand
ggcgacgggugaugcucaa

SEQ ID NO: 1823245 - RNA, 19 nt, Homo sapiens
  misc_RNA (1)...(19): siRNA sense strand
ugagcgcuuucuuuaucuu

SEQ ID NO: 1823246 - RNA, 19 nt, Homo sapiens
  misc_RNA (1)...(19): siRNA sense strand
ggcagaaucauuuacauaa

SEQ ID NO: 1823247 - RNA, 19 nt, Homo sapiens
  misc_RNA (1)...(19): siRNA sense strand
ucuacaaccucauuucaaa

SEQ ID NO: 1823248 - RNA, 19 nt, Homo sapiens
  misc_RNA (1)...(19): siRNA sense strand
gacaagcgcuaacgugaag

SEQ ID NO: 1823249 - RNA, 19 nt, Homo sapiens
  misc_RNA (1)...(19): siRNA sense strand
ccgagaggcuuccacagaa

SEQ ID NO: 1823250 - RNA, 19 nt, Homo sapiens
  misc_RNA (1)...(19): siRNA sense strand
gcgcaucuaucaacccaau

SEQ ID NO: 1823251 - RNA, 19 nt, Homo sapiens
  misc_RNA (1)...(19): siRNA sense strand
uaucugagcgcaucuauca

SEQ ID NO: 1823252 - RNA, 19 nt, Homo sapiens
  misc_RNA (1)...(19): siRNA sense strand
gcgcuaacgugaagacgau

SEQ ID NO: 1823253 - RNA, 19 nt, Homo sapiens
  misc_RNA (1)...(19): siRNA sense strand
ggaccaccaccaacuugua

SEQ ID NO: 1823254 - RNA, 19 nt, Homo sapiens
  misc_RNA (1)...(19): siRNA sense strand
caucgucgcucugcaacuu

SEQ ID NO: 1823255 - RNA, 19 nt, Homo sapiens
  misc_RNA (1)...(19): siRNA sense strand
gaagauucgcggaugaugu

SEQ ID NO: 1823256 - RNA, 19 nt, Homo sapiens
  misc_RNA (1)...(19): siRNA sense strand
gguggugguucuggcauuu

SEQ ID NO: 1823257 - RNA, 19 nt, Homo sapiens
  misc_RNA (1)...(19): siRNA sense strand
caaccucauuucaaagaag

SEQ ID NO: 1823258 - RNA, 19 nt, Homo sapiens
  misc_RNA (1)...(19): siRNA sense strand
uaacaucgucgcucugcaa

SEQ ID NO: 1823259 - RNA, 19 nt, Homo sapiens
  misc_RNA (1)...(19): siRNA sense strand
aagauucgcggaugaugua

SEQ ID NO: 1823260 - RNA, 19 nt, Homo sapiens
  misc_RNA (1)...(19): siRNA sense strand
gguucuggcauuuauaauu

SEQ ID NO: 1823261 - RNA, 19 nt, Homo sapiens
  misc_RNA (1)...(19): siRNA sense strand
uggcagaaucauuuacaua

SEQ ID NO: 1823262 - RNA, 19 nt, Homo sapiens
  misc_RNA (1)...(19): siRNA sense strand
cacguuggcagaaucauuu

SEQ ID NO: 1823263 - RNA, 19 nt, Homo sapiens
  misc_RNA (1)...(19): siRNA sense strand
gccgagaggcuuccacaga

SEQ ID NO: 1823264 - RNA, 19 nt, Homo sapiens
  misc_RNA (1)...(19): siRNA sense strand
gcaacguggugaccgugau

SEQ ID NO: 1823265 - RNA, 19 nt, Homo sapiens
  misc_RNA (1)...(19): siRNA sense strand
ggucaccaccgccuacuuc

SEQ ID NO: 1823266 - RNA, 19 nt, Homo sapiens
  misc_RNA (1)...(19): siRNA sense strand
gugguucuggcauuuauaa

SEQ ID NO: 1823267 - RNA, 19 nt, Homo sapiens
  misc_RNA (1)...(19): siRNA sense strand
ucaacccaauccucuacaa

SEQ ID NO: 1823268 - RNA, 19 nt, Homo sapiens
  misc_RNA (1)...(19): siRNA sense strand
ccacguuggcagaaucauu

SEQ ID NO: 1823269 - RNA, 19 nt, Homo sapiens
  misc_RNA (1)...(19): siRNA sense strand
acauaaacacggaagauuc

SEQ ID NO: 1823270 - RNA, 19 nt, Homo sapiens
  misc_RNA (1)...(19): siRNA sense strand
caccaccgccuacuucuuc

SEQ ID NO: 1823271 - RNA, 19 nt, Homo sapiens
  misc_RNA (1)...(19): siRNA sense strand
acaaccucauuucaaagaa

SEQ ID NO: 1823272 - RNA, 19 nt, Homo sapiens
  misc_RNA (1)...(19): siRNA sense strand
ggaagauucgcggaugaug

SEQ ID NO: 1823273 - RNA, 19 nt, Homo sapiens
  misc_RNA (1)...(19): siRNA sense strand
agacaagcgcuaacgugaa

SEQ ID NO: 1823274 - RNA, 19 nt, Homo sapiens
  misc_RNA (1)...(19): siRNA sense strand
uacaaccucauuucaaaga

SEQ ID NO: 1823275 - RNA, 19 nt, Homo sapiens
  misc_RNA (1)...(19): siRNA sense strand
gcggaccaccaccaacuug

SEQ ID NO: 1823276 - RNA, 19 nt, Homo sapiens
  misc_RNA (1)...(19): siRNA sense strand
uacauaaacacggaagauu

SEQ ID NO: 1823277 - RNA, 19 nt, Homo sapiens
  misc_RNA (1)...(19): siRNA sense strand
cauaaacacggaagauucg

SEQ ID NO: 1823278 - RNA, 19 nt, Homo sapiens
  misc_RNA (1)...(19): siRNA sense strand
acggaagauucgcggauga

SEQ ID NO: 1823279 - RNA, 19 nt, Homo sapiens
  misc_RNA (1)...(19): siRNA sense strand
caacguggugaccgugaug

SEQ ID NO: 1823280 - RNA, 19 nt, Homo sapiens
  misc_RNA (1)...(19): siRNA sense strand
ccacgcugcugcacaugac

SEQ ID NO: 1823281 - RNA, 19 nt, Homo sapiens
  misc_RNA (1)...(19): siRNA sense strand
ccucuacaaccucauuuca

SEQ ID NO: 1823282 - RNA, 19 nt, Homo sapiens
  misc_RNA (1)...(19): siRNA sense strand
gaugacagaccaaaguuaa

SEQ ID NO: 1823283 - RNA, 19 nt, Homo sapiens
  misc_RNA (1)...(19): siRNA sense strand
uagaggagauucagaagca

SEQ ID NO: 1823284 - RNA, 19 nt, Homo sapiens
  misc_RNA (1)...(19): siRNA sense strand
ugaccaaauuucuggaaga

SEQ ID NO: 1823285 - RNA, 19 nt, Homo sapiens
  misc_RNA (1)...(19): siRNA sense strand
aaacaagccuccagaaccu

SEQ ID NO: 1823286 - RNA, 19 nt, Homo sapiens
  misc_RNA (1)...(19): siRNA sense strand
ccacaagguguacgauuug

SEQ ID NO: 1823287 - RNA, 19 nt, Homo sapiens
  misc_RNA (1)...(19): siRNA sense strand
ggaggugacgcuacugaga

SEQ ID NO: 1823288 - RNA, 19 nt, Homo sapiens
  misc_RNA (1)...(19): siRNA sense strand
gaggugacgcuacugagaa

SEQ ID NO: 1823289 - RNA, 19 nt, Homo sapiens
  misc_RNA (1)...(19): siRNA sense strand
accacaagguguacgauuu

SEQ ID NO: 1823290 - RNA, 19 nt, Homo sapiens
  misc_RNA (1)...(19): siRNA sense strand
ugacgcuacugagaacuuu

SEQ ID NO: 1823291 - RNA, 19 nt, Homo sapiens
  misc_RNA (1)...(19): siRNA sense strand
gaccaaauuucuggaagag

SEQ ID NO: 1823292 - RNA, 19 nt, Homo sapiens
  misc_RNA (1)...(19): siRNA sense strand
ggacgaggccgugaaguac

SEQ ID NO: 1823293 - RNA, 19 nt, Homo sapiens
  misc_RNA (1)...(19): siRNA sense strand
cggacgaggccgugaagua

SEQ ID NO: 1823294 - RNA, 19 nt, Homo sapiens
  misc_RNA (1)...(19): siRNA sense strand
gaggaugucgggcacucua

SEQ ID NO: 1823295 - RNA, 19 nt, Homo sapiens
  misc_RNA (1)...(19): siRNA sense strand
ccagaugacagaccaaagu

SEQ ID NO: 1823296 - RNA, 19 nt, Homo sapiens
  misc_RNA (1)...(19): siRNA sense strand
acaagccuccagaaccuua

SEQ ID NO: 1823297 - RNA, 19 nt, Homo sapiens
  misc_RNA (1)...(19): siRNA sense strand
gaaguacuacacccuagag

SEQ ID NO: 1823298 - RNA, 19 nt, Homo sapiens
  misc_RNA (1)...(19): siRNA sense strand
acgaggccgugaaguacua

SEQ ID NO: 1823299 - RNA, 19 nt, Homo sapiens
  misc_RNA (1)...(19): siRNA sense strand
cacaagguguacgauuuga

SEQ ID NO: 1823300 - RNA, 19 nt, Homo sapiens
  misc_RNA (1)...(19): siRNA sense strand
caagagcaccuggcugauc

SEQ ID NO: 1823301 - RNA, 19 nt, Homo sapiens
  misc_RNA (1)...(19): siRNA sense strand
gucgggcacucuacagaug

SEQ ID NO: 1823302 - RNA, 19 nt, Homo sapiens
  misc_RNA (1)...(19): siRNA sense strand
cugagaacuuugaggaugu

SEQ ID NO: 1823303 - RNA, 19 nt, Homo sapiens
  misc_RNA (1)...(19): siRNA sense strand
cagaugacagaccaaaguu

SEQ ID NO: 1823304 - RNA, 19 nt, Homo sapiens
  misc_RNA (1)...(19): siRNA sense strand
agaugacagaccaaaguua

SEQ ID NO: 1823305 - RNA, 19 nt, Homo sapiens
  misc_RNA (1)...(19): siRNA sense strand
guuaaacaagccuccagaa

SEQ ID NO: 1823306 - RNA, 19 nt, Homo sapiens
  misc_RNA (1)...(19): siRNA sense strand
cuacagaugccagggaaau

SEQ ID NO: 1823307 - RNA, 19 nt, Homo sapiens
  misc_RNA (1)...(19): siRNA sense strand
uccaaaacauucaucauug

SEQ ID NO: 1823308 - RNA, 19 nt, Homo sapiens
  misc_RNA (1)...(19): siRNA sense strand
aagcacaaccacagcaaga

SEQ ID NO: 1823309 - RNA, 19 nt, Homo sapiens
  misc_RNA (1)...(19): siRNA sense strand
ugacagaccaaaguuaaac

SEQ ID NO: 1823310 - RNA, 19 nt, Homo sapiens
  misc_RNA (1)...(19): siRNA sense strand
ggaggaacauuuacucuuu

SEQ ID NO: 1823311 - RNA, 19 nt, Homo sapiens
  misc_RNA (1)...(19): siRNA sense strand
gaagauauccucaacuauu

SEQ ID NO: 1823312 - RNA, 19 nt, Homo sapiens
  misc_RNA (1)...(19): siRNA sense strand
guucagaucugcucuauau

SEQ ID NO: 1823313 - RNA, 19 nt, Homo sapiens
  misc_RNA (1)...(19): siRNA sense strand
gcagaauacuuaaagaaga

SEQ ID NO: 1823314 - RNA, 19 nt, Homo sapiens
  misc_RNA (1)...(19): siRNA sense strand
agacaugacuguuccuaua

SEQ ID NO: 1823315 - RNA, 19 nt, Homo sapiens
  misc_RNA (1)...(19): siRNA sense strand
aaagauggcagaauacuua

SEQ ID NO: 1823316 - RNA, 19 nt, Homo sapiens
  misc_RNA (1)...(19): siRNA sense strand
gaugaaaacugccagaaua

SEQ ID NO: 1823317 - RNA, 19 nt, Homo sapiens
  misc_RNA (1)...(19): siRNA sense strand
gaacauacacaccaagaga

SEQ ID NO: 1823318 - RNA, 19 nt, Homo sapiens
  misc_RNA (1)...(19): siRNA sense strand
gauaaugccaccugaagua

SEQ ID NO: 1823319 - RNA, 19 nt, Homo sapiens
  misc_RNA (1)...(19): siRNA sense strand
ggauagcaauggauacuga

SEQ ID NO: 1823320 - RNA, 19 nt, Homo sapiens
  misc_RNA (1)...(19): siRNA sense strand
agaagaagauguuguugaa

SEQ ID NO: 1823321 - RNA, 19 nt, Homo sapiens
  misc_RNA (1)...(19): siRNA sense strand
aagaagauauccucaacua

SEQ ID NO: 1823322 - RNA, 19 nt, Homo sapiens
  misc_RNA (1)...(19): siRNA sense strand
cauauaaggcuucucauaa

SEQ ID NO: 1823323 - RNA, 19 nt, Homo sapiens
  misc_RNA (1)...(19): siRNA sense strand
gaaaggagaaguauauaag

SEQ ID NO: 1823324 - RNA, 19 nt, Homo sapiens
  misc_RNA (1)...(19): siRNA sense strand
gcuacuagaucugaaauga

SEQ ID NO: 1823325 - RNA, 19 nt, Homo sapiens
  misc_RNA (1)...(19): siRNA sense strand
gcagacaggagcuauauug

SEQ ID NO: 1823326 - RNA, 19 nt, Homo sapiens
  misc_RNA (1)...(19): siRNA sense strand
gaagccaaauuaugugugu

SEQ ID NO: 1823327 - RNA, 19 nt, Homo sapiens
  misc_RNA (1)...(19): siRNA sense strand
cauagaaacggaagcuuua

SEQ ID NO: 1823328 - RNA, 19 nt, Homo sapiens
  misc_RNA (1)...(19): siRNA sense strand
ccagaaaggagaaguauau

SEQ ID NO: 1823329 - RNA, 19 nt, Homo sapiens
  misc_RNA (1)...(19): siRNA sense strand
gauagcaucugugaaguuc

SEQ ID NO: 1823330 - RNA, 19 nt, Homo sapiens
  misc_RNA (1)...(19): siRNA sense strand
cuuuaugccuuucuucuua

SEQ ID NO: 1823331 - RNA, 19 nt, Homo sapiens
  misc_RNA (1)...(19): siRNA sense strand
gaagauaccucauuuuggu

SEQ ID NO: 1823332 - RNA, 19 nt, Homo sapiens
  misc_RNA (1)...(19): siRNA sense strand
gaacauuuacucuuuccaa

SEQ ID NO: 1823333 - RNA, 19 nt, Homo sapiens
  misc_RNA (1)...(19): siRNA sense strand
uaaagaagauauccucaac

SEQ ID NO: 1823334 - RNA, 19 nt, Homo sapiens
  misc_RNA (1)...(19): siRNA sense strand
ucagaucugcucuauauuu

SEQ ID NO: 1823335 - RNA, 19 nt, Homo sapiens
  misc_RNA (1)...(19): siRNA sense strand
gagaagggauuagagaagu

SEQ ID NO: 1823336 - RNA, 19 nt, Homo sapiens
  misc_RNA (1)...(19): siRNA sense strand
gauugucccuaaugugaaa

SEQ ID NO: 1823337 - RNA, 19 nt, Homo sapiens
  misc_RNA (1)...(19): siRNA sense strand
cagaucugcucuauauuug

SEQ ID NO: 1823338 - RNA, 19 nt, Homo sapiens
  misc_RNA (1)...(19): siRNA sense strand
guauauaaggcacagauaa

SEQ ID NO: 1823339 - RNA, 19 nt, Homo sapiens
  misc_RNA (1)...(19): siRNA sense strand
ccacaucacuuccugaaaa

SEQ ID NO: 1823340 - RNA, 19 nt, Homo sapiens
  misc_RNA (1)...(19): siRNA sense strand
uaacauauaaggcuucuca

SEQ ID NO: 1823341 - RNA, 19 nt, Homo sapiens
  misc_RNA (1)...(19): siRNA sense strand
gaaaacugccagaauauaa

SEQ ID NO: 1823342 - RNA, 19 nt, Homo sapiens
  misc_RNA (1)...(19): siRNA sense strand
gauacagugucucaguuug

SEQ ID NO: 1823343 - RNA, 19 nt, Homo sapiens
  misc_RNA (1)...(19): siRNA sense strand
uaaggcuucucauaacauu

SEQ ID NO: 1823344 - RNA, 19 nt, Homo sapiens
  misc_RNA (1)...(19): siRNA sense strand
ugaaccgccuccagaaauu

SEQ ID NO: 1823345 - RNA, 19 nt, Homo sapiens
  misc_RNA (1)...(19): siRNA sense strand
guggacagguuguucaguu

SEQ ID NO: 1823346 - RNA, 19 nt, Homo sapiens
  misc_RNA (1)...(19): siRNA sense strand
gaggaacauuuacucuuuc

SEQ ID NO: 1823347 - RNA, 19 nt, Homo sapiens
  misc_RNA (1)...(19): siRNA sense strand
gaagggauuagagaaguaa

SEQ ID NO: 1823348 - RNA, 19 nt, Homo sapiens
  misc_RNA (1)...(19): siRNA sense strand
gcaauggucaagacuaugu

SEQ ID NO: 1823349 - RNA, 19 nt, Homo sapiens
  misc_RNA (1)...(19): siRNA sense strand
uagacgauauugccuaugu

SEQ ID NO: 1823350 - RNA, 19 nt, Homo sapiens
  misc_RNA (1)...(19): siRNA sense strand
agaagggauuagagaagua

SEQ ID NO: 1823351 - RNA, 19 nt, Homo sapiens
  misc_RNA (1)...(19): siRNA sense strand
uaagcuccgagaagaauua

SEQ ID NO: 1823352 - RNA, 19 nt, Homo sapiens
  misc_RNA (1)...(19): siRNA sense strand
gugaugagauugaccuuac

SEQ ID NO: 1823353 - RNA, 19 nt, Homo sapiens
  misc_RNA (1)...(19): siRNA sense strand
aagcaauggucaagacuau

SEQ ID NO: 1823354 - RNA, 19 nt, Homo sapiens
  misc_RNA (1)...(19): siRNA sense strand
cacccaaaguugaaauuau

SEQ ID NO: 1823355 - RNA, 19 nt, Homo sapiens
  misc_RNA (1)...(19): siRNA sense strand
gaagccauuaguagacaua

SEQ ID NO: 1823356 - RNA, 19 nt, Homo sapiens
  misc_RNA (1)...(19): siRNA sense strand
uuacugaacugguuaagcu

SEQ ID NO: 1823357 - RNA, 19 nt, Homo sapiens
  misc_RNA (1)...(19): siRNA sense strand
ucacagaguuauugauggu

SEQ ID NO: 1823358 - RNA, 19 nt, Homo sapiens
  misc_RNA (1)...(19): siRNA sense strand
cagcaccacugaucuuaca

SEQ ID NO: 1823359 - RNA, 19 nt, Homo sapiens
  misc_RNA (1)...(19): siRNA sense strand
gaagaagauguuguugaaa

SEQ ID NO: 1823360 - RNA, 19 nt, Homo sapiens
  misc_RNA (1)...(19): siRNA sense strand
ugauuuguguucgcuauuu

SEQ ID NO: 1823361 - RNA, 19 nt, Homo sapiens
  misc_RNA (1)...(19): siRNA sense strand
uauaaggcuucucauaaca

SEQ ID NO: 1823362 - RNA, 19 nt, Homo sapiens
  misc_RNA (1)...(19): siRNA sense strand
caaaacagaacccauaaaa

SEQ ID NO: 1823363 - RNA, 19 nt, Homo sapiens
  misc_RNA (1)...(19): siRNA sense strand
gacuguuccuauacuagua

SEQ ID NO: 1823364 - RNA, 19 nt, Homo sapiens
  misc_RNA (1)...(19): siRNA sense strand
aggaaaagauggcagaaua

SEQ ID NO: 1823365 - RNA, 19 nt, Homo sapiens
  misc_RNA (1)...(19): siRNA sense strand
gauuagagaaguaacuguu

SEQ ID NO: 1823366 - RNA, 19 nt, Homo sapiens
  misc_RNA (1)...(19): siRNA sense strand
gaucugcucuauauuugac

SEQ ID NO: 1823367 - RNA, 19 nt, Homo sapiens
  misc_RNA (1)...(19): siRNA sense strand
gcauuugcucguggaauua

SEQ ID NO: 1823368 - RNA, 19 nt, Homo sapiens
  misc_RNA (1)...(19): siRNA sense strand
uaagcugagugaaguuguu

SEQ ID NO: 1823369 - RNA, 19 nt, Homo sapiens
  misc_RNA (1)...(19): siRNA sense strand
agaaggagauacagugucu

SEQ ID NO: 1823370 - RNA, 19 nt, Homo sapiens
  misc_RNA (1)...(19): siRNA sense strand
aagaagauguuguugaaac

SEQ ID NO: 1823371 - RNA, 19 nt, Homo sapiens
  misc_RNA (1)...(19): siRNA sense strand
cagaagaagauguuguuga

SEQ ID NO: 1823372 - RNA, 19 nt, Homo sapiens
  misc_RNA (1)...(19): siRNA sense strand
ggagaagggauuagagaag

SEQ ID NO: 1823373 - RNA, 19 nt, Homo sapiens
  misc_RNA (1)...(19): siRNA sense strand
ugucacgcuucuccaauuu

SEQ ID NO: 1823374 - RNA, 19 nt, Homo sapiens
  misc_RNA (1)...(19): siRNA sense strand
uaaccagaaaggagaagua

SEQ ID NO: 1823375 - RNA, 19 nt, Homo sapiens
  misc_RNA (1)...(19): siRNA sense strand
uauuugacaucgccacuga

SEQ ID NO: 1823376 - RNA, 19 nt, Homo sapiens
  misc_RNA (1)...(19): siRNA sense strand
acauauaaggcuucucaua

SEQ ID NO: 1823377 - RNA, 19 nt, Homo sapiens
  misc_RNA (1)...(19): siRNA sense strand
ugauaaagcuucuguuacc

SEQ ID NO: 1823378 - RNA, 19 nt, Homo sapiens
  misc_RNA (1)...(19): siRNA sense strand
agugauaaagcuucuguua

SEQ ID NO: 1823379 - RNA, 19 nt, Homo sapiens
  misc_RNA (1)...(19): siRNA sense strand
aaacccagcuuuuaugcua

SEQ ID NO: 1823380 - RNA, 19 nt, Homo sapiens
  misc_RNA (1)...(19): siRNA sense strand
aggcacagauaaugaaugu

SEQ ID NO: 1823381 - RNA, 19 nt, Homo sapiens
  misc_RNA (1)...(19): siRNA sense strand
uauaaggcacagauaauga

SEQ ID NO: 1823382 - RNA, 19 nt, Homo sapiens
  misc_RNA (1)...(19): siRNA sense strand
gcugauuuguguucgcuau

SEQ ID NO: 1823383 - RNA, 19 nt, Homo sapiens
  misc_RNA (1)...(19): siRNA sense strand
ugaccuuacugaacugguu

SEQ ID NO: 1823384 - RNA, 19 nt, Homo sapiens
  misc_RNA (1)...(19): siRNA sense strand
acccaaaguugaaauuaug

SEQ ID NO: 1823385 - RNA, 19 nt, Homo sapiens
  misc_RNA (1)...(19): siRNA sense strand
uaccaucacuagucguuau

SEQ ID NO: 1823386 - RNA, 19 nt, Homo sapiens
  misc_RNA (1)...(19): siRNA sense strand
caugacuguuccuauacua

SEQ ID NO: 1823387 - RNA, 19 nt, Homo sapiens
  misc_RNA (1)...(19): siRNA sense strand
gggaagccauuaguagaca

SEQ ID NO: 1823388 - RNA, 19 nt, Homo sapiens
  misc_RNA (1)...(19): siRNA sense strand
uuucaaacaugugguaaug

SEQ ID NO: 1823389 - RNA, 19 nt, Homo sapiens
  misc_RNA (1)...(19): siRNA sense strand
gagauugaccuuacugaac

SEQ ID NO: 1823390 - RNA, 19 nt, Homo sapiens
  misc_RNA (1)...(19): siRNA sense strand
gccauuaguagacauagaa

SEQ ID NO: 1823391 - RNA, 19 nt, Homo sapiens
  misc_RNA (1)...(19): siRNA sense strand
gcugaucacagaguuauug

SEQ ID NO: 1823392 - RNA, 19 nt, Homo sapiens
  misc_RNA (1)...(19): siRNA sense strand
ugacaucgccacugaacug

SEQ ID NO: 1823393 - RNA, 19 nt, Homo sapiens
  misc_RNA (1)...(19): siRNA sense strand
ccuuaacgcuucuguggau

SEQ ID NO: 1823394 - RNA, 19 nt, Homo sapiens
  misc_RNA (1)...(19): siRNA sense strand
ugcauuugcucguggaauu

SEQ ID NO: 1823395 - RNA, 19 nt, Homo sapiens
  misc_RNA (1)...(19): siRNA sense strand
gauaaagcuucuguuacca

SEQ ID NO: 1823396 - RNA, 19 nt, Homo sapiens
  misc_RNA (1)...(19): siRNA sense strand
ucacgcuucuccaauuugu

SEQ ID NO: 1823397 - RNA, 19 nt, Homo sapiens
  misc_RNA (1)...(19): siRNA sense strand
cuggucagcugaucacaga

SEQ ID NO: 1823398 - RNA, 19 nt, Homo sapiens
  misc_RNA (1)...(19): siRNA sense strand
cagaaaggagaaguauaua

SEQ ID NO: 1823399 - RNA, 19 nt, Homo sapiens
  misc_RNA (1)...(19): siRNA sense strand
cauuuacucuuuccaacau

SEQ ID NO: 1823400 - RNA, 19 nt, Homo sapiens
  misc_RNA (1)...(19): siRNA sense strand
gaaccgccuccagaaauug

SEQ ID NO: 1823401 - RNA, 19 nt, Homo sapiens
  misc_RNA (1)...(19): siRNA sense strand
cuacaguuuccuauccuua

SEQ ID NO: 1823402 - RNA, 19 nt, Homo sapiens
  misc_RNA (1)...(19): siRNA sense strand
ucacccaaaguugaaauua

SEQ ID NO: 1823403 - RNA, 19 nt, Homo sapiens
  misc_RNA (1)...(19): siRNA sense strand
acauacacaccaagagaua

SEQ ID NO: 1823404 - RNA, 19 nt, Homo sapiens
  misc_RNA (1)...(19): siRNA sense strand
acauagaaacggaagcuuu

SEQ ID NO: 1823405 - RNA, 19 nt, Homo sapiens
  misc_RNA (1)...(19): siRNA sense strand
gacauuggagaagggauua

SEQ ID NO: 1823406 - RNA, 19 nt, Homo sapiens
  misc_RNA (1)...(19): siRNA sense strand
gaccuuacugaacugguua

SEQ ID NO: 1823407 - RNA, 19 nt, Homo sapiens
  misc_RNA (1)...(19): siRNA sense strand
gauggcagaauacuuaaag

SEQ ID NO: 1823408 - RNA, 19 nt, Homo sapiens
  misc_RNA (1)...(19): siRNA sense strand
gaaguuguuggcucaggaa

SEQ ID NO: 1823409 - RNA, 19 nt, Homo sapiens
  misc_RNA (1)...(19): siRNA sense strand
ggacagguuguucaguuca

SEQ ID NO: 1823410 - RNA, 19 nt, Homo sapiens
  misc_RNA (1)...(19): siRNA sense strand
uggagaagcuggagaauga

SEQ ID NO: 1823411 - RNA, 19 nt, Homo sapiens
  misc_RNA (1)...(19): siRNA sense strand
agaagucccugcagaugua

SEQ ID NO: 1823412 - RNA, 19 nt, Homo sapiens
  misc_RNA (1)...(19): siRNA sense strand
uagagaggcucaaagaaga

SEQ ID NO: 1823413 - RNA, 19 nt, Homo sapiens
  misc_RNA (1)...(19): siRNA sense strand
ccaaggccaugaugcgaaa

SEQ ID NO: 1823414 - RNA, 19 nt, Homo sapiens
  misc_RNA (1)...(19): siRNA sense strand
ugaaagacacccuggagaa

SEQ ID NO: 1823415 - RNA, 19 nt, Homo sapiens
  misc_RNA (1)...(19): siRNA sense strand
ccaaagacuccauccagaa

SEQ ID NO: 1823416 - RNA, 19 nt, Homo sapiens
  misc_RNA (1)...(19): siRNA sense strand
gaacuucgucagcuucauc

SEQ ID NO: 1823417 - RNA, 19 nt, Homo sapiens
  misc_RNA (1)...(19): siRNA sense strand
gagcuuccgcggugucauu

SEQ ID NO: 1823418 - RNA, 19 nt, Homo sapiens
  misc_RNA (1)...(19): siRNA sense strand
cugcagauguacuuagaga

SEQ ID NO: 1823419 - RNA, 19 nt, Homo sapiens
  misc_RNA (1)...(19): siRNA sense strand
guacuuagagaggcucaaa

SEQ ID NO: 1823420 - RNA, 19 nt, Homo sapiens
  misc_RNA (1)...(19): siRNA sense strand
gggucgcugugaugaaauu

SEQ ID NO: 1823421 - RNA, 19 nt, Homo sapiens
  misc_RNA (1)...(19): siRNA sense strand
gaaagacacccuggagaac

SEQ ID NO: 1823422 - RNA, 19 nt, Homo sapiens
  misc_RNA (1)...(19): siRNA sense strand
caaagacuccauccagaag

SEQ ID NO: 1823423 - RNA, 19 nt, Homo sapiens
  misc_RNA (1)...(19): siRNA sense strand
uuagagaggcucaaagaag

SEQ ID NO: 1823424 - RNA, 19 nt, Homo sapiens
  misc_RNA (1)...(19): siRNA sense strand
gagaggcucaaagaagaaa

SEQ ID NO: 1823425 - RNA, 19 nt, Homo sapiens
  misc_RNA (1)...(19): siRNA sense strand
gugcuggucuccgccauca

SEQ ID NO: 1823426 - RNA, 19 nt, Homo sapiens
  misc_RNA (1)...(19): siRNA sense strand
ucagcuucaucuccaaaga

SEQ ID NO: 1823427 - RNA, 19 nt, Homo sapiens
  misc_RNA (1)...(19): siRNA sense strand
ccagaagucccugcagaug

SEQ ID NO: 1823428 - RNA, 19 nt, Homo sapiens
  misc_RNA (1)...(19): siRNA sense strand
cagaagucccugcagaugu

SEQ ID NO: 1823429 - RNA, 19 nt, Homo sapiens
  misc_RNA (1)...(19): siRNA sense strand
gccuggaccugacggagau

SEQ ID NO: 1823430 - RNA, 19 nt, Homo sapiens
  misc_RNA (1)...(19): siRNA sense strand
gcgaugcggacgugcagaa

SEQ ID NO: 1823431 - RNA, 19 nt, Homo sapiens
  misc_RNA (1)...(19): siRNA sense strand
gagaagcuggagaaugaca

SEQ ID NO: 1823432 - RNA, 19 nt, Homo sapiens
  misc_RNA (1)...(19): siRNA sense strand
gaagcuggagaaugacaag

SEQ ID NO: 1823433 - RNA, 19 nt, Homo sapiens
  misc_RNA (1)...(19): siRNA sense strand
ugguggcccugaccuguga

SEQ ID NO: 1823434 - RNA, 19 nt, Homo sapiens
  misc_RNA (1)...(19): siRNA sense strand
ggaccugacggagaugugu

SEQ ID NO: 1823435 - RNA, 19 nt, Homo sapiens
  misc_RNA (1)...(19): siRNA sense strand
guacugcauaggacucaau

SEQ ID NO: 1823436 - RNA, 19 nt, Homo sapiens
  misc_RNA (1)...(19): siRNA sense strand
aaagacacccuggagaaca

SEQ ID NO: 1823437 - RNA, 19 nt, Homo sapiens
  misc_RNA (1)...(19): siRNA sense strand
gagcuguggcugcgguugu

SEQ ID NO: 1823438 - RNA, 19 nt, Homo sapiens
  misc_RNA (1)...(19): siRNA sense strand
augcggacgugcagaacuu

SEQ ID NO: 1823439 - RNA, 19 nt, Homo sapiens
  misc_RNA (1)...(19): siRNA sense strand
gcagcaagauugucauuga

SEQ ID NO: 1823440 - RNA, 19 nt, Homo sapiens
  misc_RNA (1)...(19): siRNA sense strand
gaaaggcuguaguauguau

SEQ ID NO: 1823441 - RNA, 19 nt, Homo sapiens
  misc_RNA (1)...(19): siRNA sense strand
gugaaaggcuguaguaugu

SEQ ID NO: 1823442 - RNA, 19 nt, Homo sapiens
  misc_RNA (1)...(19): siRNA sense strand
ccaaaugggugcagugaug

SEQ ID NO: 1823443 - RNA, 19 nt, Homo sapiens
  misc_RNA (1)...(19): siRNA sense strand
agaauaagcuggacaccaa

SEQ ID NO: 1823444 - RNA, 19 nt, Homo sapiens
  misc_RNA (1)...(19): siRNA sense strand
gcgaggcuccuguuuaaua

SEQ ID NO: 1823445 - RNA, 19 nt, Homo sapiens
  misc_RNA (1)...(19): siRNA sense strand
gcaagaaacgggacgacua

SEQ ID NO: 1823446 - RNA, 19 nt, Homo sapiens
  misc_RNA (1)...(19): siRNA sense strand
gaaggacagcagagaauaa

SEQ ID NO: 1823447 - RNA, 19 nt, Homo sapiens
  misc_RNA (1)...(19): siRNA sense strand
gaaacgggacgacuauuug

SEQ ID NO: 1823448 - RNA, 19 nt, Homo sapiens
  misc_RNA (1)...(19): siRNA sense strand
gcacagagaagcaaagauc

SEQ ID NO: 1823449 - RNA, 19 nt, Homo sapiens
  misc_RNA (1)...(19): siRNA sense strand
ggaaauucauaccgaagug

SEQ ID NO: 1823450 - RNA, 19 nt, Homo sapiens
  misc_RNA (1)...(19): siRNA sense strand
gcgcuaagcucaucaucca

SEQ ID NO: 1823451 - RNA, 19 nt, Homo sapiens
  misc_RNA (1)...(19): siRNA sense strand
cugcgaggcuccuguuuaa

SEQ ID NO: 1823452 - RNA, 19 nt, Homo sapiens
  misc_RNA (1)...(19): siRNA sense strand
gaugugaaaggcuguagua

SEQ ID NO: 1823453 - RNA, 19 nt, Homo sapiens
  misc_RNA (1)...(19): siRNA sense strand
gaagcaaagauccaaauuc

SEQ ID NO: 1823454 - RNA, 19 nt, Homo sapiens
  misc_RNA (1)...(19): siRNA sense strand
ugaaugccaucaugaacaa

SEQ ID NO: 1823455 - RNA, 19 nt, Homo sapiens
  misc_RNA (1)...(19): siRNA sense strand
ggacgacuauuuggaaugg

SEQ ID NO: 1823456 - RNA, 19 nt, Homo sapiens
  misc_RNA (1)...(19): siRNA sense strand
uggaauggccagaguauuu

SEQ ID NO: 1823457 - RNA, 19 nt, Homo sapiens
  misc_RNA (1)...(19): siRNA sense strand
gugcagugaugacguguug

SEQ ID NO: 1823458 - RNA, 19 nt, Homo sapiens
  misc_RNA (1)...(19): siRNA sense strand
caagaaacgggacgacuau

SEQ ID NO: 1823459 - RNA, 19 nt, Homo sapiens
  misc_RNA (1)...(19): siRNA sense strand
ggagcugaaugccaucaug

SEQ ID NO: 1823460 - RNA, 19 nt, Homo sapiens
  misc_RNA (1)...(19): siRNA sense strand
acaaugggaugccaaaugg

SEQ ID NO: 1823461 - RNA, 19 nt, Homo sapiens
  misc_RNA (1)...(19): siRNA sense strand
cgaggcuccuguuuaauau

SEQ ID NO: 1823462 - RNA, 19 nt, Homo sapiens
  misc_RNA (1)...(19): siRNA sense strand
ggagaaggacagcagagaa

SEQ ID NO: 1823463 - RNA, 19 nt, Homo sapiens
  misc_RNA (1)...(19): siRNA sense strand
gagaaggacagcagagaau

SEQ ID NO: 1823464 - RNA, 19 nt, Homo sapiens
  misc_RNA (1)...(19): siRNA sense strand
gcugcgaggcuccuguuua

SEQ ID NO: 1823465 - RNA, 19 nt, Homo sapiens
  misc_RNA (1)...(19): siRNA sense strand
agaaacgggacgacuauuu

SEQ ID NO: 1823466 - RNA, 19 nt, Homo sapiens
  misc_RNA (1)...(19): siRNA sense strand
gagaagcaaagauccaaau

SEQ ID NO: 1823467 - RNA, 19 nt, Homo sapiens
  misc_RNA (1)...(19): siRNA sense strand
gagcugaaugccaucauga

SEQ ID NO: 1823468 - RNA, 19 nt, Homo sapiens
  misc_RNA (1)...(19): siRNA sense strand
gcgccugcaucgugaauuc

SEQ ID NO: 1823469 - RNA, 19 nt, Homo sapiens
  misc_RNA (1)...(19): siRNA sense strand
gaugacguguugccuugga

SEQ ID NO: 1823470 - RNA, 19 nt, Homo sapiens
  misc_RNA (1)...(19): siRNA sense strand
aagcaaagauccaaauucc

SEQ ID NO: 1823471 - RNA, 19 nt, Homo sapiens
  misc_RNA (1)...(19): siRNA sense strand
ugaaugcgcuaagcucauc

SEQ ID NO: 1823472 - RNA, 19 nt, Homo sapiens
  misc_RNA (1)...(19): siRNA sense strand
gaauaagcuggacaccaaa

SEQ ID NO: 1823473 - RNA, 19 nt, Homo sapiens
  misc_RNA (1)...(19): siRNA sense strand
gacauuccggaaauucaua

SEQ ID NO: 1823474 - RNA, 19 nt, Homo sapiens
  misc_RNA (1)...(19): siRNA sense strand
caucauccaggcagguaua

SEQ ID NO: 1823475 - RNA, 19 nt, Homo sapiens
  misc_RNA (1)...(19): siRNA sense strand
cuuguucccuuguaaugaa

SEQ ID NO: 1823476 - RNA, 19 nt, Homo sapiens
  misc_RNA (1)...(19): siRNA sense strand
uuucacgucugauaaauac

SEQ ID NO: 1823477 - RNA, 19 nt, Homo sapiens
  misc_RNA (1)...(19): siRNA sense strand
gauaaauaccaugauagug

SEQ ID NO: 1823478 - RNA, 19 nt, Homo sapiens
  misc_RNA (1)...(19): siRNA sense strand
auaccgaagugcagcaaga

SEQ ID NO: 1823479 - RNA, 19 nt, Homo sapiens
  misc_RNA (1)...(19): siRNA sense strand
agaaggacagcagagaaua

SEQ ID NO: 1823480 - RNA, 19 nt, Homo sapiens
  misc_RNA (1)...(19): siRNA sense strand
ggacagcagagaauaagcu

SEQ ID NO: 1823481 - RNA, 19 nt, Homo sapiens
  misc_RNA (1)...(19): siRNA sense strand
caaaugggugcagugauga

SEQ ID NO: 1823482 - RNA, 19 nt, Homo sapiens
  misc_RNA (1)...(19): siRNA sense strand
ccgaagugcagcaagauug

SEQ ID NO: 1823483 - RNA, 19 nt, Homo sapiens
  misc_RNA (1)...(19): siRNA sense strand
gcuguggccuucuuaucag

SEQ ID NO: 1823484 - RNA, 19 nt, Homo sapiens
  misc_RNA (1)...(19): siRNA sense strand
ggcuguggccuucuuauca

SEQ ID NO: 1823485 - RNA, 19 nt, Homo sapiens
  misc_RNA (1)...(19): siRNA sense strand
aaauucgaccgaugugaaa

SEQ ID NO: 1823486 - RNA, 19 nt, Homo sapiens
  misc_RNA (1)...(19): siRNA sense strand
gguacaaugggaugccaaa

SEQ ID NO: 1823487 - RNA, 19 nt, Homo sapiens
  misc_RNA (1)...(19): siRNA sense strand
agaagcaaagauccaaauu

SEQ ID NO: 1823488 - RNA, 19 nt, Homo sapiens
  misc_RNA (1)...(19): siRNA sense strand
ccaggcagguauaaaagaa

SEQ ID NO: 1823489 - RNA, 19 nt, Homo sapiens
  misc_RNA (1)...(19): siRNA sense strand
ugugaaaggcuguaguaug

SEQ ID NO: 1823490 - RNA, 19 nt, Homo sapiens
  misc_RNA (1)...(19): siRNA sense strand
uacaaugggaugccaaaug

SEQ ID NO: 1823491 - RNA, 19 nt, Homo sapiens
  misc_RNA (1)...(19): siRNA sense strand
ggaauggccagaguauuuu

SEQ ID NO: 1823492 - RNA, 19 nt, Homo sapiens
  misc_RNA (1)...(19): siRNA sense strand
cgaagugcagcaagauugu

SEQ ID NO: 1823493 - RNA, 19 nt, Homo sapiens
  misc_RNA (1)...(19): siRNA sense strand
cuucuuaucagcacagaga

SEQ ID NO: 1823494 - RNA, 19 nt, Homo sapiens
  misc_RNA (1)...(19): siRNA sense strand
gggugacauuccggaaauu

SEQ ID NO: 1823495 - RNA, 19 nt, Homo sapiens
  misc_RNA (1)...(19): siRNA sense strand
cgucugauaaauaccauga

SEQ ID NO: 1823496 - RNA, 19 nt, Homo sapiens
  misc_RNA (1)...(19): siRNA sense strand
gaauggccagaguauuuua

SEQ ID NO: 1823497 - RNA, 19 nt, Homo sapiens
  misc_RNA (1)...(19): siRNA sense strand
ugaaaggcuguaguaugua

SEQ ID NO: 1823498 - RNA, 19 nt, Homo sapiens
  misc_RNA (1)...(19): siRNA sense strand
gugcagcaagauugucauu

SEQ ID NO: 1823499 - RNA, 19 nt, Homo sapiens
  misc_RNA (1)...(19): siRNA sense strand
cagagaagcaaagauccaa

SEQ ID NO: 1823500 - RNA, 19 nt, Homo sapiens
  misc_RNA (1)...(19): siRNA sense strand
auaagcuggacaccaaaua

SEQ ID NO: 1823501 - RNA, 19 nt, Homo sapiens
  misc_RNA (1)...(19): siRNA sense strand
aacagcagaccgagucaaa

SEQ ID NO: 1823502 - RNA, 19 nt, Homo sapiens
  misc_RNA (1)...(19): siRNA sense strand
agugaaguuuccugcaaga

SEQ ID NO: 1823503 - RNA, 19 nt, Homo sapiens
  misc_RNA (1)...(19): siRNA sense strand
ggaagaagcuguuaaagca

SEQ ID NO: 1823504 - RNA, 19 nt, Homo sapiens
  misc_RNA (1)...(19): siRNA sense strand
ggaaggaccggaugacuua

SEQ ID NO: 1823505 - RNA, 19 nt, Homo sapiens
  misc_RNA (1)...(19): siRNA sense strand
gaacauagggcauccugua

SEQ ID NO: 1823506 - RNA, 19 nt, Homo sapiens
  misc_RNA (1)...(19): siRNA sense strand
gaaccaugcuugugagaug

SEQ ID NO: 1823507 - RNA, 19 nt, Homo sapiens
  misc_RNA (1)...(19): siRNA sense strand
gaagagaccaguaaccaaa

SEQ ID NO: 1823508 - RNA, 19 nt, Homo sapiens
  misc_RNA (1)...(19): siRNA sense strand
gccaaaguaucaacuguaa

SEQ ID NO: 1823509 - RNA, 19 nt, Homo sapiens
  misc_RNA (1)...(19): siRNA sense strand
cacuuaagcugucauguaa

SEQ ID NO: 1823510 - RNA, 19 nt, Homo sapiens
  misc_RNA (1)...(19): siRNA sense strand
caucacaucuccaaugaau

SEQ ID NO: 1823511 - RNA, 19 nt, Homo sapiens
  misc_RNA (1)...(19): siRNA sense strand
ccaguaagccugucaagaa

SEQ ID NO: 1823512 - RNA, 19 nt, Homo sapiens
  misc_RNA (1)...(19): siRNA sense strand
gcaaugagcaugagaaguc

SEQ ID NO: 1823513 - RNA, 19 nt, Homo sapiens
  misc_RNA (1)...(19): siRNA sense strand
gggcagagccaaaguauca

SEQ ID NO: 1823514 - RNA, 19 nt, Homo sapiens
  misc_RNA (1)...(19): siRNA sense strand
caugagaaguccaguaaau

SEQ ID NO: 1823515 - RNA, 19 nt, Homo sapiens
  misc_RNA (1)...(19): siRNA sense strand
guaaacaaggcaucaguaa

SEQ ID NO: 1823516 - RNA, 19 nt, Homo sapiens
  misc_RNA (1)...(19): siRNA sense strand
guaagccugucaagaagaa

SEQ ID NO: 1823517 - RNA, 19 nt, Homo sapiens
  misc_RNA (1)...(19): siRNA sense strand
uaacauaaccagcccaaug

SEQ ID NO: 1823518 - RNA, 19 nt, Homo sapiens
  misc_RNA (1)...(19): siRNA sense strand
ccacuuaagcugucaugua

SEQ ID NO: 1823519 - RNA, 19 nt, Homo sapiens
  misc_RNA (1)...(19): siRNA sense strand
gacccagucugucaagaaa

SEQ ID NO: 1823520 - RNA, 19 nt, Homo sapiens
  misc_RNA (1)...(19): siRNA sense strand
uccaugaccucuccuuuaa

SEQ ID NO: 1823521 - RNA, 19 nt, Homo sapiens
  misc_RNA (1)...(19): siRNA sense strand
gcaaugagaccuguagaga

SEQ ID NO: 1823522 - RNA, 19 nt, Homo sapiens
  misc_RNA (1)...(19): siRNA sense strand
cucaaggccugaccacuua

SEQ ID NO: 1823523 - RNA, 19 nt, Homo sapiens
  misc_RNA (1)...(19): siRNA sense strand
caacaacaacaacauguga

SEQ ID NO: 1823524 - RNA, 19 nt, Homo sapiens
  misc_RNA (1)...(19): siRNA sense strand
gaaggcaagguaucaugua

SEQ ID NO: 1823525 - RNA, 19 nt, Homo sapiens
  misc_RNA (1)...(19): siRNA sense strand
cagaaagacccuucaaaug

SEQ ID NO: 1823526 - RNA, 19 nt, Homo sapiens
  misc_RNA (1)...(19): siRNA sense strand
gcaggcaucuugucaacag

SEQ ID NO: 1823527 - RNA, 19 nt, Homo sapiens
  misc_RNA (1)...(19): siRNA sense strand
ggaagaaagaagcugcuaa

SEQ ID NO: 1823528 - RNA, 19 nt, Homo sapiens
  misc_RNA (1)...(19): siRNA sense strand
cuacaucaccgccuuggua

SEQ ID NO: 1823529 - RNA, 19 nt, Homo sapiens
  misc_RNA (1)...(19): siRNA sense strand
ggcaagguaucauguaaca

SEQ ID NO: 1823530 - RNA, 19 nt, Homo sapiens
  misc_RNA (1)...(19): siRNA sense strand
aaacaugcaugagugaaga

SEQ ID NO: 1823531 - RNA, 19 nt, Homo sapiens
  misc_RNA (1)...(19): siRNA sense strand
cagaaaccauugcuuccaa

SEQ ID NO: 1823532 - RNA, 19 nt, Homo sapiens
  misc_RNA (1)...(19): siRNA sense strand
gagccaaaguaucaacugu

SEQ ID NO: 1823533 - RNA, 19 nt, Homo sapiens
  misc_RNA (1)...(19): siRNA sense strand
ucaccaaacccuauacuug

SEQ ID NO: 1823534 - RNA, 19 nt, Homo sapiens
  misc_RNA (1)...(19): siRNA sense strand
ugagaaacccuuugagugu

SEQ ID NO: 1823535 - RNA, 19 nt, Homo sapiens
  misc_RNA (1)...(19): siRNA sense strand
gaaguccaguaaauguuuc

SEQ ID NO: 1823536 - RNA, 19 nt, Homo sapiens
  misc_RNA (1)...(19): siRNA sense strand
auacaucaccagccacuua

SEQ ID NO: 1823537 - RNA, 19 nt, Homo sapiens
  misc_RNA (1)...(19): siRNA sense strand
guagagagcaugccuuucu

SEQ ID NO: 1823538 - RNA, 19 nt, Homo sapiens
  misc_RNA (1)...(19): siRNA sense strand
gaagaaagaagcugcuaac

SEQ ID NO: 1823539 - RNA, 19 nt, Homo sapiens
  misc_RNA (1)...(19): siRNA sense strand
caacaacaacaacaacaug

SEQ ID NO: 1823540 - RNA, 19 nt, Homo sapiens
  misc_RNA (1)...(19): siRNA sense strand
gggcauccuguaacuauaa

SEQ ID NO: 1823541 - RNA, 19 nt, Homo sapiens
  misc_RNA (1)...(19): siRNA sense strand
caugaccucuccuuuaaca

SEQ ID NO: 1823542 - RNA, 19 nt, Homo sapiens
  misc_RNA (1)...(19): siRNA sense strand
agaagaaccaugcuuguga

SEQ ID NO: 1823543 - RNA, 19 nt, Homo sapiens
  misc_RNA (1)...(19): siRNA sense strand
agaaagacccuucaaaugc

SEQ ID NO: 1823544 - RNA, 19 nt, Homo sapiens
  misc_RNA (1)...(19): siRNA sense strand
uaaacaaggcaucaguaaa

SEQ ID NO: 1823545 - RNA, 19 nt, Homo sapiens
  misc_RNA (1)...(19): siRNA sense strand
gaugagaaacccuuugagu

SEQ ID NO: 1823546 - RNA, 19 nt, Homo sapiens
  misc_RNA (1)...(19): siRNA sense strand
ucaagugcaguuaacauaa

SEQ ID NO: 1823547 - RNA, 19 nt, Homo sapiens
  misc_RNA (1)...(19): siRNA sense strand
gagaaguccaguaaauguu

SEQ ID NO: 1823548 - RNA, 19 nt, Homo sapiens
  misc_RNA (1)...(19): siRNA sense strand
ggaagcaaguagaaacacu

SEQ ID NO: 1823549 - RNA, 19 nt, Homo sapiens
  misc_RNA (1)...(19): siRNA sense strand
acagaaagacccuucaaau

SEQ ID NO: 1823550 - RNA, 19 nt, Homo sapiens
  misc_RNA (1)...(19): siRNA sense strand
ccacgaauccugccacaca

SEQ ID NO: 1823551 - RNA, 19 nt, Homo sapiens
  misc_RNA (1)...(19): siRNA sense strand
aaggcaagguaucauguaa

SEQ ID NO: 1823552 - RNA, 19 nt, Homo sapiens
  misc_RNA (1)...(19): siRNA sense strand
caacagucacuacaucuuc

SEQ ID NO: 1823553 - RNA, 19 nt, Homo sapiens
  misc_RNA (1)...(19): siRNA sense strand
caauaccaauaacucagaa

SEQ ID NO: 1823554 - RNA, 19 nt, Homo sapiens
  misc_RNA (1)...(19): siRNA sense strand
acacagggaucaaguuggu

SEQ ID NO: 1823555 - RNA, 19 nt, Homo sapiens
  misc_RNA (1)...(19): siRNA sense strand
gaagaagcuguuaaagcaa

SEQ ID NO: 1823556 - RNA, 19 nt, Homo sapiens
  misc_RNA (1)...(19): siRNA sense strand
aaacaaggcaucaguaaaa

SEQ ID NO: 1823557 - RNA, 19 nt, Homo sapiens
  misc_RNA (1)...(19): siRNA sense strand
gaaggaggcaucaccaaac

SEQ ID NO: 1823558 - RNA, 19 nt, Homo sapiens
  misc_RNA (1)...(19): siRNA sense strand
guaaucagcgcuucaagag

SEQ ID NO: 1823559 - RNA, 19 nt, Homo sapiens
  misc_RNA (1)...(19): siRNA sense strand
gaccauugcaggcaucuug

SEQ ID NO: 1823560 - RNA, 19 nt, Homo sapiens
  misc_RNA (1)...(19): siRNA sense strand
gggugcaccagaaacauua

SEQ ID NO: 1823561 - RNA, 19 nt, Homo sapiens
  misc_RNA (1)...(19): siRNA sense strand
gagcaugagaaguccagua

SEQ ID NO: 1823562 - RNA, 19 nt, Homo sapiens
  misc_RNA (1)...(19): siRNA sense strand
caacagaaagacccuucaa

SEQ ID NO: 1823563 - RNA, 19 nt, Homo sapiens
  misc_RNA (1)...(19): siRNA sense strand
ccacacagggaucaaguug

SEQ ID NO: 1823564 - RNA, 19 nt, Homo sapiens
  misc_RNA (1)...(19): siRNA sense strand
ugagaaguccaguaaaugu

SEQ ID NO: 1823565 - RNA, 19 nt, Homo sapiens
  misc_RNA (1)...(19): siRNA sense strand
ugagugaagagaccaguaa

SEQ ID NO: 1823566 - RNA, 19 nt, Homo sapiens
  misc_RNA (1)...(19): siRNA sense strand
ugaaggaggcaucaccaaa

SEQ ID NO: 1823567 - RNA, 19 nt, Homo sapiens
  misc_RNA (1)...(19): siRNA sense strand
ccggaugacuuaccaugug

SEQ ID NO: 1823568 - RNA, 19 nt, Homo sapiens
  misc_RNA (1)...(19): siRNA sense strand
ucacaucuccaaugaaucu

SEQ ID NO: 1823569 - RNA, 19 nt, Homo sapiens
  misc_RNA (1)...(19): siRNA sense strand
cuucauuugugugcacuua

SEQ ID NO: 1823570 - RNA, 19 nt, Homo sapiens
  misc_RNA (1)...(19): siRNA sense strand
aguauaacauccucugugu

SEQ ID NO: 1823571 - RNA, 19 nt, Homo sapiens
  misc_RNA (1)...(19): siRNA sense strand
aacuauaaccaguccauua

SEQ ID NO: 1823572 - RNA, 19 nt, Homo sapiens
  misc_RNA (1)...(19): siRNA sense strand
agaaguccaguaaauguuu

SEQ ID NO: 1823573 - RNA, 19 nt, Homo sapiens
  misc_RNA (1)...(19): siRNA sense strand
caguaagccugucaagaag

SEQ ID NO: 1823574 - RNA, 19 nt, Homo sapiens
  misc_RNA (1)...(19): siRNA sense strand
acccacaccuaugacauua

SEQ ID NO: 1823575 - RNA, 19 nt, Homo sapiens
  misc_RNA (1)...(19): siRNA sense strand
cggaugacuuaccauguga

SEQ ID NO: 1823576 - RNA, 19 nt, Homo sapiens
  misc_RNA (1)...(19): siRNA sense strand
cagaugagaaacccuuuga

SEQ ID NO: 1823577 - RNA, 19 nt, Homo sapiens
  misc_RNA (1)...(19): siRNA sense strand
gaaucuacccacaccuaug

SEQ ID NO: 1823578 - RNA, 19 nt, Homo sapiens
  misc_RNA (1)...(19): siRNA sense strand
ugucaacagucacuacauc

SEQ ID NO: 1823579 - RNA, 19 nt, Homo sapiens
  misc_RNA (1)...(19): siRNA sense strand
gcugcuaaccugugccaaa

SEQ ID NO: 1823580 - RNA, 19 nt, Homo sapiens
  misc_RNA (1)...(19): siRNA sense strand
uuaaagcaaggaagaaaga

SEQ ID NO: 1823581 - RNA, 19 nt, Homo sapiens
  misc_RNA (1)...(19): siRNA sense strand
gggaagaagcuguuaaagc

SEQ ID NO: 1823582 - RNA, 19 nt, Homo sapiens
  misc_RNA (1)...(19): siRNA sense strand
cccuauacuugcaguguuu

SEQ ID NO: 1823583 - RNA, 19 nt, Homo sapiens
  misc_RNA (1)...(19): siRNA sense strand
uugaguguccuauuuguaa

SEQ ID NO: 1823584 - RNA, 19 nt, Homo sapiens
  misc_RNA (1)...(19): siRNA sense strand
ccaauaccaauaacucaga

SEQ ID NO: 1823585 - RNA, 19 nt, Homo sapiens
  misc_RNA (1)...(19): siRNA sense strand
gugggaagaagcuguuaaa

SEQ ID NO: 1823586 - RNA, 19 nt, Homo sapiens
  misc_RNA (1)...(19): siRNA sense strand
uagagagcaugccuuucuu

SEQ ID NO: 1823587 - RNA, 19 nt, Homo sapiens
  misc_RNA (1)...(19): siRNA sense strand
ccaugaagcuucccaucac

SEQ ID NO: 1823588 - RNA, 19 nt, Homo sapiens
  misc_RNA (1)...(19): siRNA sense strand
aacauaaccagcccaauga

SEQ ID NO: 1823589 - RNA, 19 nt, Homo sapiens
  misc_RNA (1)...(19): siRNA sense strand
aaucuacccacaccuauga

SEQ ID NO: 1823590 - RNA, 19 nt, Homo sapiens
  misc_RNA (1)...(19): siRNA sense strand
cauagggcauccuguaacu

SEQ ID NO: 1823591 - RNA, 19 nt, Homo sapiens
  misc_RNA (1)...(19): siRNA sense strand
caccagaaacauuaaagga

SEQ ID NO: 1823592 - RNA, 19 nt, Homo sapiens
  misc_RNA (1)...(19): siRNA sense strand
accaucacaucuccaauga

SEQ ID NO: 1823593 - RNA, 19 nt, Homo sapiens
  misc_RNA (1)...(19): siRNA sense strand
gcuguuaaagcaaggaaga

SEQ ID NO: 1823594 - RNA, 19 nt, Homo sapiens
  misc_RNA (1)...(19): siRNA sense strand
cauguccauucaacagaaa

SEQ ID NO: 1823595 - RNA, 19 nt, Homo sapiens
  misc_RNA (1)...(19): siRNA sense strand
acauguccauucaacagaa

SEQ ID NO: 1823596 - RNA, 19 nt, Homo sapiens
  misc_RNA (1)...(19): siRNA sense strand
cccuuugaguguccuauuu

SEQ ID NO: 1823597 - RNA, 19 nt, Homo sapiens
  misc_RNA (1)...(19): siRNA sense strand
ucucaaggccugaccacuu

SEQ ID NO: 1823598 - RNA, 19 nt, Homo sapiens
  misc_RNA (1)...(19): siRNA sense strand
ccacaccuaugacauuagc

SEQ ID NO: 1823599 - RNA, 19 nt, Homo sapiens
  misc_RNA (1)...(19): siRNA sense strand
uccaguaaauguuucaagu

SEQ ID NO: 1823600 - RNA, 19 nt, Homo sapiens
  misc_RNA (1)...(19): siRNA sense strand
gcagcugcaaugagcauga

SEQ ID NO: 1823601 - RNA, 19 nt, Homo sapiens
  misc_RNA (1)...(19): siRNA sense strand
aacgugcacugcugccuuu

SEQ ID NO: 1823602 - RNA, 19 nt, Homo sapiens
  misc_RNA (1)...(19): siRNA sense strand
aaacauguccauucaacag

SEQ ID NO: 1823603 - RNA, 19 nt, Homo sapiens
  misc_RNA (1)...(19): siRNA sense strand
gagaggagguuaugaugug

SEQ ID NO: 1823604 - RNA, 19 nt, Homo sapiens
  misc_RNA (1)...(19): siRNA sense strand
gaaaaucgcuuauauaccu

SEQ ID NO: 1823605 - RNA, 19 nt, Homo sapiens
  misc_RNA (1)...(19): siRNA sense strand
ggacccaugucuucggaaa

SEQ ID NO: 1823606 - RNA, 19 nt, Homo sapiens
  misc_RNA (1)...(19): siRNA sense strand
ggagaaugcaaauauguga

SEQ ID NO: 1823607 - RNA, 19 nt, Homo sapiens
  misc_RNA (1)...(19): siRNA sense strand
ggaaauacaaggacuucug

SEQ ID NO: 1823608 - RNA, 19 nt, Homo sapiens
  misc_RNA (1)...(19): siRNA sense strand
aaagugaaguugggcauga

SEQ ID NO: 1823609 - RNA, 19 nt, Homo sapiens
  misc_RNA (1)...(19): siRNA sense strand
gcacuggccacaccaaaca

SEQ ID NO: 1823610 - RNA, 19 nt, Homo sapiens
  misc_RNA (1)...(19): siRNA sense strand
acccaugucuucggaaaua

SEQ ID NO: 1823611 - RNA, 19 nt, Homo sapiens
  misc_RNA (1)...(19): siRNA sense strand
gaagaagagggacccaugu

SEQ ID NO: 1823612 - RNA, 19 nt, Homo sapiens
  misc_RNA (1)...(19): siRNA sense strand
guuaugauguggaaaauga

SEQ ID NO: 1823613 - RNA, 19 nt, Homo sapiens
  misc_RNA (1)...(19): siRNA sense strand
ccauggagaaugcaaauau

SEQ ID NO: 1823614 - RNA, 19 nt, Homo sapiens
  misc_RNA (1)...(19): siRNA sense strand
cauggagaaugcaaauaug

SEQ ID NO: 1823615 - RNA, 19 nt, Homo sapiens
  misc_RNA (1)...(19): siRNA sense strand
ggagaggagguuaugaugu

SEQ ID NO: 1823616 - RNA, 19 nt, Homo sapiens
  misc_RNA (1)...(19): siRNA sense strand
gcaaggggcuagggaagaa

SEQ ID NO: 1823617 - RNA, 19 nt, Homo sapiens
  misc_RNA (1)...(19): siRNA sense strand
gaaaaugaagagaaaguga

SEQ ID NO: 1823618 - RNA, 19 nt, Homo sapiens
  misc_RNA (1)...(19): siRNA sense strand
ugaaguugggcaugacuaa

SEQ ID NO: 1823619 - RNA, 19 nt, Homo sapiens
  misc_RNA (1)...(19): siRNA sense strand
gcaucugccacccggguua

SEQ ID NO: 1823620 - RNA, 19 nt, Homo sapiens
  misc_RNA (1)...(19): siRNA sense strand
caugacuaauucccacuga

SEQ ID NO: 1823621 - RNA, 19 nt, Homo sapiens
  misc_RNA (1)...(19): siRNA sense strand
gagaaugcaaauaugugaa

SEQ ID NO: 1823622 - RNA, 19 nt, Homo sapiens
  misc_RNA (1)...(19): siRNA sense strand
ggacuucugcauccaugga

SEQ ID NO: 1823623 - RNA, 19 nt, Homo sapiens
  misc_RNA (1)...(19): siRNA sense strand
aggcagaucuggaccuuuu

SEQ ID NO: 1823624 - RNA, 19 nt, Homo sapiens
  misc_RNA (1)...(19): siRNA sense strand
ccacccggguuaccaugga

SEQ ID NO: 1823625 - RNA, 19 nt, Homo sapiens
  misc_RNA (1)...(19): siRNA sense strand
gaaguugggcaugacuaau

SEQ ID NO: 1823626 - RNA, 19 nt, Homo sapiens
  misc_RNA (1)...(19): siRNA sense strand
gggcuucucauguuuaggu

SEQ ID NO: 1823627 - RNA, 19 nt, Homo sapiens
  misc_RNA (1)...(19): siRNA sense strand
aaguugggcaugacuaauu

SEQ ID NO: 1823628 - RNA, 19 nt, Homo sapiens
  misc_RNA (1)...(19): siRNA sense strand
uaggagaggagguuaugau

SEQ ID NO: 1823629 - RNA, 19 nt, Homo sapiens
  misc_RNA (1)...(19): siRNA sense strand
agaggcagaucuggaccuu

SEQ ID NO: 1823630 - RNA, 19 nt, Homo sapiens
  misc_RNA (1)...(19): siRNA sense strand
ugaagagaaagugaaguug

SEQ ID NO: 1823631 - RNA, 19 nt, Homo sapiens
  misc_RNA (1)...(19): siRNA sense strand
gcacaaaucuaagcaauca

SEQ ID NO: 1823632 - RNA, 19 nt, Homo sapiens
  misc_RNA (1)...(19): siRNA sense strand
gaaccgaugugaauuacuu

SEQ ID NO: 1823633 - RNA, 19 nt, Homo sapiens
  misc_RNA (1)...(19): siRNA sense strand
gaacaaauguaugaggaau

SEQ ID NO: 1823634 - RNA, 19 nt, Homo sapiens
  misc_RNA (1)...(19): siRNA sense strand
caagaaccgaugugaauua

SEQ ID NO: 1823635 - RNA, 19 nt, Homo sapiens
  misc_RNA (1)...(19): siRNA sense strand
gugauaauccugagagaua

SEQ ID NO: 1823636 - RNA, 19 nt, Homo sapiens
  misc_RNA (1)...(19): siRNA sense strand
caaugacuuuggcguauuu

SEQ ID NO: 1823637 - RNA, 19 nt, Homo sapiens
  misc_RNA (1)...(19): siRNA sense strand
uaacugccauugaaauugu

SEQ ID NO: 1823638 - RNA, 19 nt, Homo sapiens
  misc_RNA (1)...(19): siRNA sense strand
aauggcagcuugagaauug

SEQ ID NO: 1823639 - RNA, 19 nt, Homo sapiens
  misc_RNA (1)...(19): siRNA sense strand
uuacaucgguauuaacuug

SEQ ID NO: 1823640 - RNA, 19 nt, Homo sapiens
  misc_RNA (1)...(19): siRNA sense strand
gacaagaaccgaugugaau

SEQ ID NO: 1823641 - RNA, 19 nt, Homo sapiens
  misc_RNA (1)...(19): siRNA sense strand
ggaguucuaccaagaugua

SEQ ID NO: 1823642 - RNA, 19 nt, Homo sapiens
  misc_RNA (1)...(19): siRNA sense strand
caugguacccuuugaauau

SEQ ID NO: 1823643 - RNA, 19 nt, Homo sapiens
  misc_RNA (1)...(19): siRNA sense strand
ggacaagaaccgaugugaa

SEQ ID NO: 1823644 - RNA, 19 nt, Homo sapiens
  misc_RNA (1)...(19): siRNA sense strand
gcacugcgaucuucuacac

SEQ ID NO: 1823645 - RNA, 19 nt, Homo sapiens
  misc_RNA (1)...(19): siRNA sense strand
cgaugugaauuacuuaguu

SEQ ID NO: 1823646 - RNA, 19 nt, Homo sapiens
  misc_RNA (1)...(19): siRNA sense strand
gagaauugcccucagugaa

SEQ ID NO: 1823647 - RNA, 19 nt, Homo sapiens
  misc_RNA (1)...(19): siRNA sense strand
uggaugauuucaccacuuu

SEQ ID NO: 1823648 - RNA, 19 nt, Homo sapiens
  misc_RNA (1)...(19): siRNA sense strand
cagcacaaaucuaagcaau

SEQ ID NO: 1823649 - RNA, 19 nt, Homo sapiens
  misc_RNA (1)...(19): siRNA sense strand
gaauugcccucagugaaca

SEQ ID NO: 1823650 - RNA, 19 nt, Homo sapiens
  misc_RNA (1)...(19): siRNA sense strand
uuggagaccuuaucuaugu

SEQ ID NO: 1823651 - RNA, 19 nt, Homo sapiens
  misc_RNA (1)...(19): siRNA sense strand
gcacugguuggauguguaa

SEQ ID NO: 1823652 - RNA, 19 nt, Homo sapiens
  misc_RNA (1)...(19): siRNA sense strand
uggauuacaucgguauuaa

SEQ ID NO: 1823653 - RNA, 19 nt, Homo sapiens
  misc_RNA (1)...(19): siRNA sense strand
ucuuacugcucauggauua

SEQ ID NO: 1823654 - RNA, 19 nt, Homo sapiens
  misc_RNA (1)...(19): siRNA sense strand
ccucugcgcucuuaguguu

SEQ ID NO: 1823655 - RNA, 19 nt, Homo sapiens
  misc_RNA (1)...(19): siRNA sense strand
gguauuaacuuggcaacca

SEQ ID NO: 1823656 - RNA, 19 nt, Homo sapiens
  misc_RNA (1)...(19): siRNA sense strand
gguaacugccauugaaauu

SEQ ID NO: 1823657 - RNA, 19 nt, Homo sapiens
  misc_RNA (1)...(19): siRNA sense strand
ggccauuccugaagcgauu

SEQ ID NO: 1823658 - RNA, 19 nt, Homo sapiens
  misc_RNA (1)...(19): siRNA sense strand
gaagaaaacuguguauaac

SEQ ID NO: 1823659 - RNA, 19 nt, Homo sapiens
  misc_RNA (1)...(19): siRNA sense strand
acugugauaucuuguacua

SEQ ID NO: 1823660 - RNA, 19 nt, Homo sapiens
  misc_RNA (1)...(19): siRNA sense strand
gacuuuggcguauuucuuu

SEQ ID NO: 1823661 - RNA, 19 nt, Homo sapiens
  misc_RNA (1)...(19): siRNA sense strand
ucauggaguucuaccaaga

SEQ ID NO: 1823662 - RNA, 19 nt, Homo sapiens
  misc_RNA (1)...(19): siRNA sense strand
uuaacacugugauaucuug

SEQ ID NO: 1823663 - RNA, 19 nt, Homo sapiens
  misc_RNA (1)...(19): siRNA sense strand
ggaagaaccacgaucaaaa

SEQ ID NO: 1823664 - RNA, 19 nt, Homo sapiens
  misc_RNA (1)...(19): siRNA sense strand
ggucauugaucucccuauc

SEQ ID NO: 1823665 - RNA, 19 nt, Homo sapiens
  misc_RNA (1)...(19): siRNA sense strand
ccacucaucaacccacuaa

SEQ ID NO: 1823666 - RNA, 19 nt, Homo sapiens
  misc_RNA (1)...(19): siRNA sense strand
uaccagaacaaauguauga

SEQ ID NO: 1823667 - RNA, 19 nt, Homo sapiens
  misc_RNA (1)...(19): siRNA sense strand
ccacagcagacuaaaauua

SEQ ID NO: 1823668 - RNA, 19 nt, Homo sapiens
  misc_RNA (1)...(19): siRNA sense strand
caaaauucauggaguucua

SEQ ID NO: 1823669 - RNA, 19 nt, Homo sapiens
  misc_RNA (1)...(19): siRNA sense strand
cacaaugacuuuggcguau

SEQ ID NO: 1823670 - RNA, 19 nt, Homo sapiens
  misc_RNA (1)...(19): siRNA sense strand
uaacuuggcaaccaugaau

SEQ ID NO: 1823671 - RNA, 19 nt, Homo sapiens
  misc_RNA (1)...(19): siRNA sense strand
ccugagagauacagcacaa

SEQ ID NO: 1823672 - RNA, 19 nt, Homo sapiens
  misc_RNA (1)...(19): siRNA sense strand
gaucauuuaccagaacaaa

SEQ ID NO: 1823673 - RNA, 19 nt, Homo sapiens
  misc_RNA (1)...(19): siRNA sense strand
ggaauggcagcuugagaau

SEQ ID NO: 1823674 - RNA, 19 nt, Homo sapiens
  misc_RNA (1)...(19): siRNA sense strand
ggagucguguucagggaau

SEQ ID NO: 1823675 - RNA, 19 nt, Homo sapiens
  misc_RNA (1)...(19): siRNA sense strand
acaaauguaugaggaaugg

SEQ ID NO: 1823676 - RNA, 19 nt, Homo sapiens
  misc_RNA (1)...(19): siRNA sense strand
uuugguaacugccauugaa

SEQ ID NO: 1823677 - RNA, 19 nt, Homo sapiens
  misc_RNA (1)...(19): siRNA sense strand
ucuacacccucaugacuug

SEQ ID NO: 1823678 - RNA, 19 nt, Homo sapiens
  misc_RNA (1)...(19): siRNA sense strand
gcaacucugcucaggauca

SEQ ID NO: 1823679 - RNA, 19 nt, Homo sapiens
  misc_RNA (1)...(19): siRNA sense strand
gguuggauguguaaucagu

SEQ ID NO: 1823680 - RNA, 19 nt, Homo sapiens
  misc_RNA (1)...(19): siRNA sense strand
guaacugccauugaaauug

SEQ ID NO: 1823681 - RNA, 19 nt, Homo sapiens
  misc_RNA (1)...(19): siRNA sense strand
gcgcugauagccagucuug

SEQ ID NO: 1823682 - RNA, 19 nt, Homo sapiens
  misc_RNA (1)...(19): siRNA sense strand
ccccauagcucuguauuuu

SEQ ID NO: 1823683 - RNA, 19 nt, Homo sapiens
  misc_RNA (1)...(19): siRNA sense strand
gaauggcagcuugagaauu

SEQ ID NO: 1823684 - RNA, 19 nt, Homo sapiens
  misc_RNA (1)...(19): siRNA sense strand
ccauugaaauugucuccau

SEQ ID NO: 1823685 - RNA, 19 nt, Homo sapiens
  misc_RNA (1)...(19): siRNA sense strand
uacuucagcuuucaaauac

SEQ ID NO: 1823686 - RNA, 19 nt, Homo sapiens
  misc_RNA (1)...(19): siRNA sense strand
uaagcagcgucgagaagug

SEQ ID NO: 1823687 - RNA, 19 nt, Homo sapiens
  misc_RNA (1)...(19): siRNA sense strand
ggugugcacugcgaucuuc

SEQ ID NO: 1823688 - RNA, 19 nt, Homo sapiens
  misc_RNA (1)...(19): siRNA sense strand
uuaucuauguggucauuga

SEQ ID NO: 1823689 - RNA, 19 nt, Homo sapiens
  misc_RNA (1)...(19): siRNA sense strand
ucaggaucauuuaccagaa

SEQ ID NO: 1823690 - RNA, 19 nt, Homo sapiens
  misc_RNA (1)...(19): siRNA sense strand
cauuaacacugugauaucu

SEQ ID NO: 1823691 - RNA, 19 nt, Homo sapiens
  misc_RNA (1)...(19): siRNA sense strand
ucuaagcaaucauguggau

SEQ ID NO: 1823692 - RNA, 19 nt, Homo sapiens
  misc_RNA (1)...(19): siRNA sense strand
uaagccguauauugaagaa

SEQ ID NO: 1823693 - RNA, 19 nt, Homo sapiens
  misc_RNA (1)...(19): siRNA sense strand
acaaugacuuuggcguauu

SEQ ID NO: 1823694 - RNA, 19 nt, Homo sapiens
  misc_RNA (1)...(19): siRNA sense strand
gagagauacagcacaaauc

SEQ ID NO: 1823695 - RNA, 19 nt, Homo sapiens
  misc_RNA (1)...(19): siRNA sense strand
gaccggagcagccauaagg

SEQ ID NO: 1823696 - RNA, 19 nt, Homo sapiens
  misc_RNA (1)...(19): siRNA sense strand
gaaccacgaucaaaacaac

SEQ ID NO: 1823697 - RNA, 19 nt, Homo sapiens
  misc_RNA (1)...(19): siRNA sense strand
ggcacugguuggaugugua

SEQ ID NO: 1823698 - RNA, 19 nt, Homo sapiens
  misc_RNA (1)...(19): siRNA sense strand
gcucuucggguucuauuuc

SEQ ID NO: 1823699 - RNA, 19 nt, Homo sapiens
  misc_RNA (1)...(19): siRNA sense strand
caucaaaauucauggaguu

SEQ ID NO: 1823700 - RNA, 19 nt, Homo sapiens
  misc_RNA (1)...(19): siRNA sense strand
aaaccuguaugcucaaugc

SEQ ID NO: 1823701 - RNA, 19 nt, Homo sapiens
  misc_RNA (1)...(19): siRNA sense strand
ucaugguacccuuugaaua

SEQ ID NO: 1823702 - RNA, 19 nt, Homo sapiens
  misc_RNA (1)...(19): siRNA sense strand
cucaucaacccacuaauuu

SEQ ID NO: 1823703 - RNA, 19 nt, Homo sapiens
  misc_RNA (1)...(19): siRNA sense strand
cucaaccucugcgcucuua

SEQ ID NO: 1823704 - RNA, 19 nt, Homo sapiens
  misc_RNA (1)...(19): siRNA sense strand
acaaaucuaagcaaucaug

SEQ ID NO: 1823705 - RNA, 19 nt, Homo sapiens
  misc_RNA (1)...(19): siRNA sense strand
guauuaacuuggcaaccau

SEQ ID NO: 1823706 - RNA, 19 nt, Homo sapiens
  misc_RNA (1)...(19): siRNA sense strand
ucagugaacaucuuaagca

SEQ ID NO: 1823707 - RNA, 19 nt, Homo sapiens
  misc_RNA (1)...(19): siRNA sense strand
gaucuucuacacccucaug

SEQ ID NO: 1823708 - RNA, 19 nt, Homo sapiens
  misc_RNA (1)...(19): siRNA sense strand
acucaucaacccacuaauu

SEQ ID NO: 1823709 - RNA, 19 nt, Homo sapiens
  misc_RNA (1)...(19): siRNA sense strand
ugagagauacagcacaaau

SEQ ID NO: 1823710 - RNA, 19 nt, Homo sapiens
  misc_RNA (1)...(19): siRNA sense strand
gauuacaucgguauuaacu

SEQ ID NO: 1823711 - RNA, 19 nt, Homo sapiens
  misc_RNA (1)...(19): siRNA sense strand
caacucugcucaggaucau

SEQ ID NO: 1823712 - RNA, 19 nt, Homo sapiens
  misc_RNA (1)...(19): siRNA sense strand
caucaacccacuaauuugg

SEQ ID NO: 1823713 - RNA, 19 nt, Homo sapiens
  misc_RNA (1)...(19): siRNA sense strand
gcccucagugaacaucuua

SEQ ID NO: 1823714 - RNA, 19 nt, Homo sapiens
  misc_RNA (1)...(19): siRNA sense strand
ccauagcucuguauuuugu

SEQ ID NO: 1823715 - RNA, 19 nt, Homo sapiens
  misc_RNA (1)...(19): siRNA sense strand
ugacagguacagagcaguu

SEQ ID NO: 1823716 - RNA, 19 nt, Homo sapiens
  misc_RNA (1)...(19): siRNA sense strand
augguacccuuugaauaua

SEQ ID NO: 1823717 - RNA, 19 nt, Homo sapiens
  misc_RNA (1)...(19): siRNA sense strand
ccaucuggauccuguccuu

SEQ ID NO: 1823718 - RNA, 19 nt, Homo sapiens
  misc_RNA (1)...(19): siRNA sense strand
uggaagaaccacgaucaaa

SEQ ID NO: 1823719 - RNA, 19 nt, Homo sapiens
  misc_RNA (1)...(19): siRNA sense strand
ugacuugugagauguugaa

SEQ ID NO: 1823720 - RNA, 19 nt, Homo sapiens
  misc_RNA (1)...(19): siRNA sense strand
gcaauggcucaaugcacaa

SEQ ID NO: 1823721 - RNA, 19 nt, Homo sapiens
  misc_RNA (1)...(19): siRNA sense strand
ucuggauccuguccuuuau

SEQ ID NO: 1823722 - RNA, 19 nt, Homo sapiens
  misc_RNA (1)...(19): siRNA sense strand
ccuuggagaccuuaucuau

SEQ ID NO: 1823723 - RNA, 19 nt, Homo sapiens
  misc_RNA (1)...(19): siRNA sense strand
aggaauggcagcuugagaa

SEQ ID NO: 1823724 - RNA, 19 nt, Homo sapiens
  misc_RNA (1)...(19): siRNA sense strand
cggguucuauuucuguaug

SEQ ID NO: 1823725 - RNA, 19 nt, Homo sapiens
  misc_RNA (1)...(19): siRNA sense strand
gauuggcuucgucauggua

SEQ ID NO: 1823726 - RNA, 19 nt, Homo sapiens
  misc_RNA (1)...(19): siRNA sense strand
acacugugauaucuuguac

SEQ ID NO: 1823727 - RNA, 19 nt, Homo sapiens
  misc_RNA (1)...(19): siRNA sense strand
ccuuaucuauguggucauu

SEQ ID NO: 1823728 - RNA, 19 nt, Homo sapiens
  misc_RNA (1)...(19): siRNA sense strand
ucaucaacccacuaauuug

SEQ ID NO: 1823729 - RNA, 19 nt, Homo sapiens
  misc_RNA (1)...(19): siRNA sense strand
acaagaaccgaugugaauu

SEQ ID NO: 1823730 - RNA, 19 nt, Homo sapiens
  misc_RNA (1)...(19): siRNA sense strand
ugacuuuggcguauuucuu

SEQ ID NO: 1823731 - RNA, 19 nt, Homo sapiens
  misc_RNA (1)...(19): siRNA sense strand
gaacaucacuuauuguaca

SEQ ID NO: 1823732 - RNA, 19 nt, Homo sapiens
  misc_RNA (1)...(19): siRNA sense strand
gagaagcccuuuguaugua

SEQ ID NO: 1823733 - RNA, 19 nt, Homo sapiens
  misc_RNA (1)...(19): siRNA sense strand
cagaagaaguaccucauaa

SEQ ID NO: 1823734 - RNA, 19 nt, Homo sapiens
  misc_RNA (1)...(19): siRNA sense strand
gagaaacccuaugaaugua

SEQ ID NO: 1823735 - RNA, 19 nt, Homo sapiens
  misc_RNA (1)...(19): siRNA sense strand
cagcgaacaucacuuauug

SEQ ID NO: 1823736 - RNA, 19 nt, Homo sapiens
  misc_RNA (1)...(19): siRNA sense strand
ucacugagcaugagcauuu

SEQ ID NO: 1823737 - RNA, 19 nt, Homo sapiens
  misc_RNA (1)...(19): siRNA sense strand
gagagaaacccuaugaaug

SEQ ID NO: 1823738 - RNA, 19 nt, Homo sapiens
  misc_RNA (1)...(19): siRNA sense strand
gagaagcccuaugguugua

SEQ ID NO: 1823739 - RNA, 19 nt, Homo sapiens
  misc_RNA (1)...(19): siRNA sense strand
ggagagaagcccuuuguau

SEQ ID NO: 1823740 - RNA, 19 nt, Homo sapiens
  misc_RNA (1)...(19): siRNA sense strand
gagagaagcccuuuguaug

SEQ ID NO: 1823741 - RNA, 19 nt, Homo sapiens
  misc_RNA (1)...(19): siRNA sense strand
gcaaauccaaccuuacuga

SEQ ID NO: 1823742 - RNA, 19 nt, Homo sapiens
  misc_RNA (1)...(19): siRNA sense strand
gaacagccuuuggccagaa

SEQ ID NO: 1823743 - RNA, 19 nt, Homo sapiens
  misc_RNA (1)...(19): siRNA sense strand
ggagagaaacccuaugaau

SEQ ID NO: 1823744 - RNA, 19 nt, Homo sapiens
  misc_RNA (1)...(19): siRNA sense strand
ggaaaagccuucucucaga

SEQ ID NO: 1823745 - RNA, 19 nt, Homo sapiens
  misc_RNA (1)...(19): siRNA sense strand
gcgaacaucacuuauugua

SEQ ID NO: 1823746 - RNA, 19 nt, Homo sapiens
  misc_RNA (1)...(19): siRNA sense strand
gaagucaaaccucaucaga

SEQ ID NO: 1823747 - RNA, 19 nt, Homo sapiens
  misc_RNA (1)...(19): siRNA sense strand
ugauaaaccuuacgaaugc

SEQ ID NO: 1823748 - RNA, 19 nt, Homo sapiens
  misc_RNA (1)...(19): siRNA sense strand
guguaaagauugcgggaaa

SEQ ID NO: 1823749 - RNA, 19 nt, Homo sapiens
  misc_RNA (1)...(19): siRNA sense strand
gaagucacaccacauuaga

SEQ ID NO: 1823750 - RNA, 19 nt, Homo sapiens
  misc_RNA (1)...(19): siRNA sense strand
gagagaagccuuuuaaaug

SEQ ID NO: 1823751 - RNA, 19 nt, Homo sapiens
  misc_RNA (1)...(19): siRNA sense strand
agagaaacccuaugaaugu

SEQ ID NO: 1823752 - RNA, 19 nt, Homo sapiens
  misc_RNA (1)...(19): siRNA sense strand
gcgagaagcuuuucgaaug

SEQ ID NO: 1823753 - RNA, 19 nt, Homo sapiens
  misc_RNA (1)...(19): siRNA sense strand
gaagaaguaccucauaaaa

SEQ ID NO: 1823754 - RNA, 19 nt, Homo sapiens
  misc_RNA (1)...(19): siRNA sense strand
guacaugugaggauucauu

SEQ ID NO: 1823755 - RNA, 19 nt, Homo sapiens
  misc_RNA (1)...(19): siRNA sense strand
gaauguaacgaauguggaa

SEQ ID NO: 1823756 - RNA, 19 nt, Homo sapiens
  misc_RNA (1)...(19): siRNA sense strand
caaaagcaguaugucauua

SEQ ID NO: 1823757 - RNA, 19 nt, Homo sapiens
  misc_RNA (1)...(19): siRNA sense strand
gugauaaaccuuacgaaug

SEQ ID NO: 1823758 - RNA, 19 nt, Homo sapiens
  misc_RNA (1)...(19): siRNA sense strand
ggagaagcccuaugguugu

SEQ ID NO: 1823759 - RNA, 19 nt, Homo sapiens
  misc_RNA (1)...(19): siRNA sense strand
gaauguaacgaguguggaa

SEQ ID NO: 1823760 - RNA, 19 nt, Homo sapiens
  misc_RNA (1)...(19): siRNA sense strand
ccagaagaaguaccucaua

SEQ ID NO: 1823761 - RNA, 19 nt, Homo sapiens
  misc_RNA (1)...(19): siRNA sense strand
gagaagccuuuuaaaugua

SEQ ID NO: 1823762 - RNA, 19 nt, Homo sapiens
  misc_RNA (1)...(19): siRNA sense strand
agucaaaccucaucagaca

SEQ ID NO: 1823763 - RNA, 19 nt, Homo sapiens
  misc_RNA (1)...(19): siRNA sense strand
gaaaaccccuuugccugua

SEQ ID NO: 1823764 - RNA, 19 nt, Homo sapiens
  misc_RNA (1)...(19): siRNA sense strand
ucucagcgaacaucacuua

SEQ ID NO: 1823765 - RNA, 19 nt, Homo sapiens
  misc_RNA (1)...(19): siRNA sense strand
agagaaaccuuuugaaugu

SEQ ID NO: 1823766 - RNA, 19 nt, Homo sapiens
  misc_RNA (1)...(19): siRNA sense strand
ccagaagucacaccacauu

SEQ ID NO: 1823767 - RNA, 19 nt, Homo sapiens
  misc_RNA (1)...(19): siRNA sense strand
agaagcccuuuguauguaa

SEQ ID NO: 1823768 - RNA, 19 nt, Homo sapiens
  misc_RNA (1)...(19): siRNA sense strand
gaagcccuaugguuguaau

SEQ ID NO: 1823769 - RNA, 19 nt, Homo sapiens
  misc_RNA (1)...(19): siRNA sense strand
gcucugcauuugagaauac

SEQ ID NO: 1823770 - RNA, 19 nt, Homo sapiens
  misc_RNA (1)...(19): siRNA sense strand
gcccuaugguuguaaugaa

SEQ ID NO: 1823771 - RNA, 19 nt, Homo sapiens
  misc_RNA (1)...(19): siRNA sense strand
agagaagcccuuuguaugu

SEQ ID NO: 1823772 - RNA, 19 nt, Homo sapiens
  misc_RNA (1)...(19): siRNA sense strand
gaaacccuaugaauguaac

SEQ ID NO: 1823773 - RNA, 19 nt, Homo sapiens
  misc_RNA (1)...(19): siRNA sense strand
agaaguaccucauaaaaca

SEQ ID NO: 1823774 - RNA, 19 nt, Homo sapiens
  misc_RNA (1)...(19): siRNA sense strand
caucagaacacccauacug

SEQ ID NO: 1823775 - RNA, 19 nt, Homo sapiens
  misc_RNA (1)...(19): siRNA sense strand
cagaagucacaccacauua

SEQ ID NO: 1823776 - RNA, 19 nt, Homo sapiens
  misc_RNA (1)...(19): siRNA sense strand
ggugauaaaccuuacgaau

SEQ ID NO: 1823777 - RNA, 19 nt, Homo sapiens
  misc_RNA (1)...(19): siRNA sense strand
agaagaaguaccucauaaa

SEQ ID NO: 1823778 - RNA, 19 nt, Homo sapiens
  misc_RNA (1)...(19): siRNA sense strand
ggagagaagccuuuuaaau

SEQ ID NO: 1823779 - RNA, 19 nt, Homo sapiens
  misc_RNA (1)...(19): siRNA sense strand
ucauuuagccagaaggaaa

SEQ ID NO: 1823780 - RNA, 19 nt, Homo sapiens
  misc_RNA (1)...(19): siRNA sense strand
gaauacacacagguaagaa

SEQ ID NO: 1823781 - RNA, 19 nt, Homo sapiens
  misc_RNA (1)...(19): siRNA sense strand
gagagaaaccuuuugaaug

SEQ ID NO: 1823782 - RNA, 19 nt, Homo sapiens
  misc_RNA (1)...(19): siRNA sense strand
cuaugaauguaacgaaugu

SEQ ID NO: 1823783 - RNA, 19 nt, Homo sapiens
  misc_RNA (1)...(19): siRNA sense strand
cauucacacuggagagaaa

SEQ ID NO: 1823784 - RNA, 19 nt, Homo sapiens
  misc_RNA (1)...(19): siRNA sense strand
aaacaucagaacacccaua

SEQ ID NO: 1823785 - RNA, 19 nt, Homo sapiens
  misc_RNA (1)...(19): siRNA sense strand
caucacuuauuguacaugu

SEQ ID NO: 1823786 - RNA, 19 nt, Homo sapiens
  misc_RNA (1)...(19): siRNA sense strand
aguggcaaauccaaccuua

SEQ ID NO: 1823787 - RNA, 19 nt, Homo sapiens
  misc_RNA (1)...(19): siRNA sense strand
gaacucacacaggagagaa

SEQ ID NO: 1823788 - RNA, 19 nt, Homo sapiens
  misc_RNA (1)...(19): siRNA sense strand
ccuuacgaaugcaauguuu

SEQ ID NO: 1823789 - RNA, 19 nt, Homo sapiens
  misc_RNA (1)...(19): siRNA sense strand
acaaaucaaaccucacuga

SEQ ID NO: 1823790 - RNA, 19 nt, Homo sapiens
  misc_RNA (1)...(19): siRNA sense strand
agagaagccuuuuaaaugu

SEQ ID NO: 1823791 - RNA, 19 nt, Homo sapiens
  misc_RNA (1)...(19): siRNA sense strand
gagaauacacacagguaag

SEQ ID NO: 1823792 - RNA, 19 nt, Homo sapiens
  misc_RNA (1)...(19): siRNA sense strand
gaauguaaugaauguggaa

SEQ ID NO: 1823793 - RNA, 19 nt, Homo sapiens
  misc_RNA (1)...(19): siRNA sense strand
gaggauucauucaggugau

SEQ ID NO: 1823794 - RNA, 19 nt, Homo sapiens
  misc_RNA (1)...(19): siRNA sense strand
ucagcgaacaucacuuauu

SEQ ID NO: 1823795 - RNA, 19 nt, Homo sapiens
  misc_RNA (1)...(19): siRNA sense strand
gagaaaccuuuugaaugua

SEQ ID NO: 1823796 - RNA, 19 nt, Homo sapiens
  misc_RNA (1)...(19): siRNA sense strand
ugagaauacacacagguaa

SEQ ID NO: 1823797 - RNA, 19 nt, Homo sapiens
  misc_RNA (1)...(19): siRNA sense strand
ccacauuagacaccagaaa

SEQ ID NO: 1823798 - RNA, 19 nt, Homo sapiens
  misc_RNA (1)...(19): siRNA sense strand
gugcaugugagaagccaua

SEQ ID NO: 1823799 - RNA, 19 nt, Homo sapiens
  misc_RNA (1)...(19): siRNA sense strand
gugaaugugggaaagcuuu

SEQ ID NO: 1823800 - RNA, 19 nt, Homo sapiens
  misc_RNA (1)...(19): siRNA sense strand
gagaagcuuuucgaaugua

SEQ ID NO: 1823801 - RNA, 19 nt, Homo sapiens
  misc_RNA (1)...(19): siRNA sense strand
agcaguaugucauuaaaca

SEQ ID NO: 1823802 - RNA, 19 nt, Homo sapiens
  misc_RNA (1)...(19): siRNA sense strand
gaaugcaauguuuguggaa

SEQ ID NO: 1823803 - RNA, 19 nt, Homo sapiens
  misc_RNA (1)...(19): siRNA sense strand
ccacaaaucaaaccucacu

SEQ ID NO: 1823804 - RNA, 19 nt, Homo sapiens
  misc_RNA (1)...(19): siRNA sense strand
caggagagaagcccuuugu

SEQ ID NO: 1823805 - RNA, 19 nt, Homo sapiens
  misc_RNA (1)...(19): siRNA sense strand
ccuguaagguauguggaaa

SEQ ID NO: 1823806 - RNA, 19 nt, Homo sapiens
  misc_RNA (1)...(19): siRNA sense strand
aaagauugcgggaaagcuu

SEQ ID NO: 1823807 - RNA, 19 nt, Homo sapiens
  misc_RNA (1)...(19): siRNA sense strand
uaagguauguggaaaaguc

SEQ ID NO: 1823808 - RNA, 19 nt, Homo sapiens
  misc_RNA (1)...(19): siRNA sense strand
gaauguggaacagccuuug

SEQ ID NO: 1823809 - RNA, 19 nt, Homo sapiens
  misc_RNA (1)...(19): siRNA sense strand
gaagcccuuuguauguaag

SEQ ID NO: 1823810 - RNA, 19 nt, Homo sapiens
  misc_RNA (1)...(19): siRNA sense strand
agaaacccuaugaauguaa

SEQ ID NO: 1823811 - RNA, 19 nt, Homo sapiens
  misc_RNA (1)...(19): siRNA sense strand
ccuuaucagugcagugaau

SEQ ID NO: 1823812 - RNA, 19 nt, Homo sapiens
  misc_RNA (1)...(19): siRNA sense strand
gauaaaccuuacgaaugca

SEQ ID NO: 1823813 - RNA, 19 nt, Homo sapiens
  misc_RNA (1)...(19): siRNA sense strand
uauuguacaugugaggauu

SEQ ID NO: 1823814 - RNA, 19 nt, Homo sapiens
  misc_RNA (1)...(19): siRNA sense strand
caacccuugcucugcauuu

SEQ ID NO: 1823815 - RNA, 19 nt, Homo sapiens
  misc_RNA (1)...(19): siRNA sense strand
cauacuggcgagaagcuuu

SEQ ID NO: 1823816 - RNA, 19 nt, Homo sapiens
  misc_RNA (1)...(19): siRNA sense strand
acacgagagagaaaccuuu

SEQ ID NO: 1823817 - RNA, 19 nt, Homo sapiens
  misc_RNA (1)...(19): siRNA sense strand
agaagucacaccacauuag

SEQ ID NO: 1823818 - RNA, 19 nt, Homo sapiens
  misc_RNA (1)...(19): siRNA sense strand
agaauacacacagguaaga

SEQ ID NO: 1823819 - RNA, 19 nt, Homo sapiens
  misc_RNA (1)...(19): siRNA sense strand
aggauucauucaggugaua

SEQ ID NO: 1823820 - RNA, 19 nt, Homo sapiens
  misc_RNA (1)...(19): siRNA sense strand
uuacgaaugcaauguuugu

SEQ ID NO: 1823821 - RNA, 19 nt, Homo sapiens
  misc_RNA (1)...(19): siRNA sense strand
gaaaauucacacuggagaa

SEQ ID NO: 1823822 - RNA, 19 nt, Homo sapiens
  misc_RNA (1)...(19): siRNA sense strand
cgagaagcuuuucgaaugu

SEQ ID NO: 1823823 - RNA, 19 nt, Homo sapiens
  misc_RNA (1)...(19): siRNA sense strand
caaccuuacugagcaugag

SEQ ID NO: 1823824 - RNA, 19 nt, Homo sapiens
  misc_RNA (1)...(19): siRNA sense strand
uaaugaaugugggaaagcu

SEQ ID NO: 1823825 - RNA, 19 nt, Homo sapiens
  misc_RNA (1)...(19): siRNA sense strand
cuggagagaaacccuauga

SEQ ID NO: 1823826 - RNA, 19 nt, Homo sapiens
  misc_RNA (1)...(19): siRNA sense strand
aaacaucagaacauucaca

SEQ ID NO: 1823827 - RNA, 19 nt, Homo sapiens
  misc_RNA (1)...(19): siRNA sense strand
uuacugagcaugagaaaau

SEQ ID NO: 1823828 - RNA, 19 nt, Homo sapiens
  misc_RNA (1)...(19): siRNA sense strand
uguaaugaaugugggaaag

SEQ ID NO: 1823829 - RNA, 19 nt, Homo sapiens
  misc_RNA (1)...(19): siRNA sense strand
aaugcaauguuuguggaaa

SEQ ID NO: 1823830 - RNA, 19 nt, Homo sapiens
  misc_RNA (1)...(19): siRNA sense strand
ggauucauucaggugauaa

SEQ ID NO: 1823831 - RNA, 19 nt, Homo sapiens
  misc_RNA (1)...(19): siRNA sense strand
ggaccaagauugaggacuu

SEQ ID NO: 1823832 - RNA, 19 nt, Homo sapiens
  misc_RNA (1)...(19): siRNA sense strand
gcgcagcgaugagaagaaa

SEQ ID NO: 1823833 - RNA, 19 nt, Homo sapiens
  misc_RNA (1)...(19): siRNA sense strand
ccugggagcugcuuucugu

SEQ ID NO: 1823834 - RNA, 19 nt, Homo sapiens
  misc_RNA (1)...(19): siRNA sense strand
guaauagggaccaagauug

SEQ ID NO: 1823835 - RNA, 19 nt, Homo sapiens
  misc_RNA (1)...(19): siRNA sense strand
uaauagggaccaagauuga

SEQ ID NO: 1823836 - RNA, 19 nt, Homo sapiens
  misc_RNA (1)...(19): siRNA sense strand
gcucaagggccucggcuuu

SEQ ID NO: 1823837 - RNA, 19 nt, Homo sapiens
  misc_RNA (1)...(19): siRNA sense strand
ccucaugucgggcgucuua

SEQ ID NO: 1823838 - RNA, 19 nt, Homo sapiens
  misc_RNA (1)...(19): siRNA sense strand
guacgcagccucagcuuuc

SEQ ID NO: 1823839 - RNA, 19 nt, Homo sapiens
  misc_RNA (1)...(19): siRNA sense strand
gagaguuucuggccaguac

SEQ ID NO: 1823840 - RNA, 19 nt, Homo sapiens
  misc_RNA (1)...(19): siRNA sense strand
cuccuucgcuucucucuga

SEQ ID NO: 1823841 - RNA, 19 nt, Homo sapiens
  misc_RNA (1)...(19): siRNA sense strand
agcgguagcuucuucauuc

SEQ ID NO: 1823842 - RNA, 19 nt, Homo sapiens
  misc_RNA (1)...(19): siRNA sense strand
cguaauagggaccaagauu

SEQ ID NO: 1823843 - RNA, 19 nt, Homo sapiens
  misc_RNA (1)...(19): siRNA sense strand
ucaagggccucggcuuuua

SEQ ID NO: 1823844 - RNA, 19 nt, Homo sapiens
  misc_RNA (1)...(19): siRNA sense strand
gcgguagcuucuucauuca

SEQ ID NO: 1823845 - RNA, 19 nt, Homo sapiens
  misc_RNA (1)...(19): siRNA sense strand
gcuccaccuuagcgaguuu

SEQ ID NO: 1823846 - RNA, 19 nt, Homo sapiens
  misc_RNA (1)...(19): siRNA sense strand
gcaucugccuccgcaacuu

SEQ ID NO: 1823847 - RNA, 19 nt, Homo sapiens
  misc_RNA (1)...(19): siRNA sense strand
ggagcaggcgacuucuuga

SEQ ID NO: 1823848 - RNA, 19 nt, Homo sapiens
  misc_RNA (1)...(19): siRNA sense strand
agaagaaacggcacagcaa

SEQ ID NO: 1823849 - RNA, 19 nt, Homo sapiens
  misc_RNA (1)...(19): siRNA sense strand
gaacccagcgcugaauugc

SEQ ID NO: 1823850 - RNA, 19 nt, Homo sapiens
  misc_RNA (1)...(19): siRNA sense strand
ggagaguuucuggccagua

SEQ ID NO: 1823851 - RNA, 19 nt, Homo sapiens
  misc_RNA (1)...(19): siRNA sense strand
cgaacccagcgcugaauug

SEQ ID NO: 1823852 - RNA, 19 nt, Homo sapiens
  misc_RNA (1)...(19): siRNA sense strand
uggagcaggcgacuucuug

SEQ ID NO: 1823853 - RNA, 19 nt, Homo sapiens
  misc_RNA (1)...(19): siRNA sense strand
cagcgguagcuucuucauu

SEQ ID NO: 1823854 - RNA, 19 nt, Homo sapiens
  misc_RNA (1)...(19): siRNA sense strand
cauccacacgggccacaaa

SEQ ID NO: 1823855 - RNA, 19 nt, Homo sapiens
  misc_RNA (1)...(19): siRNA sense strand
gcaaauaaguggucaacuc

SEQ ID NO: 1823856 - RNA, 19 nt, Homo sapiens
  misc_RNA (1)...(19): siRNA sense strand
gaugugggcuggaaaucua

SEQ ID NO: 1823857 - RNA, 19 nt, Homo sapiens
  misc_RNA (1)...(19): siRNA sense strand
ucaggcauauuucuuguua

SEQ ID NO: 1823858 - RNA, 19 nt, Homo sapiens
  misc_RNA (1)...(19): siRNA sense strand
gaugauaaccucugucuug

SEQ ID NO: 1823859 - RNA, 19 nt, Homo sapiens
  misc_RNA (1)...(19): siRNA sense strand
aggaggagcuguuucuaua

SEQ ID NO: 1823860 - RNA, 19 nt, Homo sapiens
  misc_RNA (1)...(19): siRNA sense strand
gaaaggaaagcaaauaagu

SEQ ID NO: 1823861 - RNA, 19 nt, Homo sapiens
  misc_RNA (1)...(19): siRNA sense strand
caaguuggcuuaccagaag

SEQ ID NO: 1823862 - RNA, 19 nt, Homo sapiens
  misc_RNA (1)...(19): siRNA sense strand
gaaggagcuugguggugua

SEQ ID NO: 1823863 - RNA, 19 nt, Homo sapiens
  misc_RNA (1)...(19): siRNA sense strand
gcacuugacuuaauuaccu

SEQ ID NO: 1823864 - RNA, 19 nt, Homo sapiens
  misc_RNA (1)...(19): siRNA sense strand
gaaauacagagaaaugaga

SEQ ID NO: 1823865 - RNA, 19 nt, Homo sapiens
  misc_RNA (1)...(19): siRNA sense strand
ggucuuugcugaacucuca

SEQ ID NO: 1823866 - RNA, 19 nt, Homo sapiens
  misc_RNA (1)...(19): siRNA sense strand
cuagagaaauugcagaaau

SEQ ID NO: 1823867 - RNA, 19 nt, Homo sapiens
  misc_RNA (1)...(19): siRNA sense strand
gguaaggguugguaucaau

SEQ ID NO: 1823868 - RNA, 19 nt, Homo sapiens
  misc_RNA (1)...(19): siRNA sense strand
gugcaaaccagaagcauuu

SEQ ID NO: 1823869 - RNA, 19 nt, Homo sapiens
  misc_RNA (1)...(19): siRNA sense strand
ucagagaguuucagaucaa

SEQ ID NO: 1823870 - RNA, 19 nt, Homo sapiens
  misc_RNA (1)...(19): siRNA sense strand
cuugaacgcugcuuauauu

SEQ ID NO: 1823871 - RNA, 19 nt, Homo sapiens
  misc_RNA (1)...(19): siRNA sense strand
gcuuggugguguagauuua

SEQ ID NO: 1823872 - RNA, 19 nt, Homo sapiens
  misc_RNA (1)...(19): siRNA sense strand
gaugaaauacagagaaaug

SEQ ID NO: 1823873 - RNA, 19 nt, Homo sapiens
  misc_RNA (1)...(19): siRNA sense strand
gaggagcuguuucuauauc

SEQ ID NO: 1823874 - RNA, 19 nt, Homo sapiens
  misc_RNA (1)...(19): siRNA sense strand
ggagccaagugacuaucua

SEQ ID NO: 1823875 - RNA, 19 nt, Homo sapiens
  misc_RNA (1)...(19): siRNA sense strand
gcuagcaacugcaaacaag

SEQ ID NO: 1823876 - RNA, 19 nt, Homo sapiens
  misc_RNA (1)...(19): siRNA sense strand
gaagcaguauuugaggaaa

SEQ ID NO: 1823877 - RNA, 19 nt, Homo sapiens
  misc_RNA (1)...(19): siRNA sense strand
guucuaugcuuccacaguu

SEQ ID NO: 1823878 - RNA, 19 nt, Homo sapiens
  misc_RNA (1)...(19): siRNA sense strand
ccuaggacauuuggccuua

SEQ ID NO: 1823879 - RNA, 19 nt, Homo sapiens
  misc_RNA (1)...(19): siRNA sense strand
ggacauguaguagaugaaa

SEQ ID NO: 1823880 - RNA, 19 nt, Homo sapiens
  misc_RNA (1)...(19): siRNA sense strand
gaggcauugucauuucuuu

SEQ ID NO: 1823881 - RNA, 19 nt, Homo sapiens
  misc_RNA (1)...(19): siRNA sense strand
ccacuaccauugccacugu

SEQ ID NO: 1823882 - RNA, 19 nt, Homo sapiens
  misc_RNA (1)...(19): siRNA sense strand
uaaaagccauugugauuug

SEQ ID NO: 1823883 - RNA, 19 nt, Homo sapiens
  misc_RNA (1)...(19): siRNA sense strand
gaaggaggaggagcuguuu

SEQ ID NO: 1823884 - RNA, 19 nt, Homo sapiens
  misc_RNA (1)...(19): siRNA sense strand
gaacgcugcuuauauucac

SEQ ID NO: 1823885 - RNA, 19 nt, Homo sapiens
  misc_RNA (1)...(19): siRNA sense strand
gaugugcucugugaauuag

SEQ ID NO: 1823886 - RNA, 19 nt, Homo sapiens
  misc_RNA (1)...(19): siRNA sense strand
uagaucaggugcuggaaga

SEQ ID NO: 1823887 - RNA, 19 nt, Homo sapiens
  misc_RNA (1)...(19): siRNA sense strand
gaauguugaauccuuacua

SEQ ID NO: 1823888 - RNA, 19 nt, Homo sapiens
  misc_RNA (1)...(19): siRNA sense strand
ugguguagauuuagucauu

SEQ ID NO: 1823889 - RNA, 19 nt, Homo sapiens
  misc_RNA (1)...(19): siRNA sense strand
guaaggguugguaucaaua

SEQ ID NO: 1823890 - RNA, 19 nt, Homo sapiens
  misc_RNA (1)...(19): siRNA sense strand
ggaagaguuugguuuuaaa

SEQ ID NO: 1823891 - RNA, 19 nt, Homo sapiens
  misc_RNA (1)...(19): siRNA sense strand
gcucagagaguuucagauc

SEQ ID NO: 1823892 - RNA, 19 nt, Homo sapiens
  misc_RNA (1)...(19): siRNA sense strand
guugaauccuuacuacaau

SEQ ID NO: 1823893 - RNA, 19 nt, Homo sapiens
  misc_RNA (1)...(19): siRNA sense strand
aagcugggcauucuagaua

SEQ ID NO: 1823894 - RNA, 19 nt, Homo sapiens
  misc_RNA (1)...(19): siRNA sense strand
aaucgaauguugaauccuu

SEQ ID NO: 1823895 - RNA, 19 nt, Homo sapiens
  misc_RNA (1)...(19): siRNA sense strand
ggaaucgaauguugaaucc

SEQ ID NO: 1823896 - RNA, 19 nt, Homo sapiens
  misc_RNA (1)...(19): siRNA sense strand
uugaugagauugcuucuuc

SEQ ID NO: 1823897 - RNA, 19 nt, Homo sapiens
  misc_RNA (1)...(19): siRNA sense strand
gaggaggagcuguuucuau

SEQ ID NO: 1823898 - RNA, 19 nt, Homo sapiens
  misc_RNA (1)...(19): siRNA sense strand
gcugggcauucuagauaaa

SEQ ID NO: 1823899 - RNA, 19 nt, Homo sapiens
  misc_RNA (1)...(19): siRNA sense strand
auucagagcuugcccaaca

SEQ ID NO: 1823900 - RNA, 19 nt, Homo sapiens
  misc_RNA (1)...(19): siRNA sense strand
cuucagcccuggauguuga

SEQ ID NO: 1823901 - RNA, 19 nt, Homo sapiens
  misc_RNA (1)...(19): siRNA sense strand
gaggaaaugagccugaaga

SEQ ID NO: 1823902 - RNA, 19 nt, Homo sapiens
  misc_RNA (1)...(19): siRNA sense strand
cagauuugcucagagaguu

SEQ ID NO: 1823903 - RNA, 19 nt, Homo sapiens
  misc_RNA (1)...(19): siRNA sense strand
gacaagccauuggguagga

SEQ ID NO: 1823904 - RNA, 19 nt, Homo sapiens
  misc_RNA (1)...(19): siRNA sense strand
aggcauauuucuuguuaga

SEQ ID NO: 1823905 - RNA, 19 nt, Homo sapiens
  misc_RNA (1)...(19): siRNA sense strand
ggagcuuggugguguagau

SEQ ID NO: 1823906 - RNA, 19 nt, Homo sapiens
  misc_RNA (1)...(19): siRNA sense strand
cuagagcccugcaauaugc

SEQ ID NO: 1823907 - RNA, 19 nt, Homo sapiens
  misc_RNA (1)...(19): siRNA sense strand
gagcuguuucuauaucuuu

SEQ ID NO: 1823908 - RNA, 19 nt, Homo sapiens
  misc_RNA (1)...(19): siRNA sense strand
gcaguaucccuaugaagug

SEQ ID NO: 1823909 - RNA, 19 nt, Homo sapiens
  misc_RNA (1)...(19): siRNA sense strand
guagaugaaauacagagaa

SEQ ID NO: 1823910 - RNA, 19 nt, Homo sapiens
  misc_RNA (1)...(19): siRNA sense strand
ccacuguuaugaacuuauc

SEQ ID NO: 1823911 - RNA, 19 nt, Homo sapiens
  misc_RNA (1)...(19): siRNA sense strand
ggagcuguuucuauaucuu

SEQ ID NO: 1823912 - RNA, 19 nt, Homo sapiens
  misc_RNA (1)...(19): siRNA sense strand
gcuagagcccugcaauaug

SEQ ID NO: 1823913 - RNA, 19 nt, Homo sapiens
  misc_RNA (1)...(19): siRNA sense strand
gagccaagugacuaucuaa

SEQ ID NO: 1823914 - RNA, 19 nt, Homo sapiens
  misc_RNA (1)...(19): siRNA sense strand
cagcaaaccagaggaggua

SEQ ID NO: 1823915 - RNA, 19 nt, Homo sapiens
  misc_RNA (1)...(19): siRNA sense strand
caaucaggcauauuucuug

SEQ ID NO: 1823916 - RNA, 19 nt, Homo sapiens
  misc_RNA (1)...(19): siRNA sense strand
ccacugaucguccucacuu

SEQ ID NO: 1823917 - RNA, 19 nt, Homo sapiens
  misc_RNA (1)...(19): siRNA sense strand
cuauuuacauggauaugga

SEQ ID NO: 1823918 - RNA, 19 nt, Homo sapiens
  misc_RNA (1)...(19): siRNA sense strand
ggaggagcuguuucuauau

SEQ ID NO: 1823919 - RNA, 19 nt, Homo sapiens
  misc_RNA (1)...(19): siRNA sense strand
ugaugugcucugugaauua

SEQ ID NO: 1823920 - RNA, 19 nt, Homo sapiens
  misc_RNA (1)...(19): siRNA sense strand
aaaugagccugaagaagca

SEQ ID NO: 1823921 - RNA, 19 nt, Homo sapiens
  misc_RNA (1)...(19): siRNA sense strand
guguagauuuagucauuga

SEQ ID NO: 1823922 - RNA, 19 nt, Homo sapiens
  misc_RNA (1)...(19): siRNA sense strand
gccgaggcauugucauuuc

SEQ ID NO: 1823923 - RNA, 19 nt, Homo sapiens
  misc_RNA (1)...(19): siRNA sense strand
gggaaucgaauguugaauc

SEQ ID NO: 1823924 - RNA, 19 nt, Homo sapiens
  misc_RNA (1)...(19): siRNA sense strand
cugcuuauauucacuuauc

SEQ ID NO: 1823925 - RNA, 19 nt, Homo sapiens
  misc_RNA (1)...(19): siRNA sense strand
gauccuugaacgcugcuua

SEQ ID NO: 1823926 - RNA, 19 nt, Homo sapiens
  misc_RNA (1)...(19): siRNA sense strand
ggacuucucccuggugcaa

SEQ ID NO: 1823927 - RNA, 19 nt, Homo sapiens
  misc_RNA (1)...(19): siRNA sense strand
guuagaagaaggcagcaaa

SEQ ID NO: 1823928 - RNA, 19 nt, Homo sapiens
  misc_RNA (1)...(19): siRNA sense strand
gcaggucuuugcugaacuc

SEQ ID NO: 1823929 - RNA, 19 nt, Homo sapiens
  misc_RNA (1)...(19): siRNA sense strand
cggccugucuccucaguug

SEQ ID NO: 1823930 - RNA, 19 nt, Homo sapiens
  misc_RNA (1)...(19): siRNA sense strand
aaagaaggacuacagaaag

SEQ ID NO: 1823931 - RNA, 19 nt, Homo sapiens
  misc_RNA (1)...(19): siRNA sense strand
cugcugcacuugacuuaau

SEQ ID NO: 1823932 - RNA, 19 nt, Homo sapiens
  misc_RNA (1)...(19): siRNA sense strand
acuacaaucaggcauauuu

SEQ ID NO: 1823933 - RNA, 19 nt, Homo sapiens
  misc_RNA (1)...(19): siRNA sense strand
uuacuacaaucaggcauau

SEQ ID NO: 1823934 - RNA, 19 nt, Homo sapiens
  misc_RNA (1)...(19): siRNA sense strand
aaagauuggagucguugua

SEQ ID NO: 1823935 - RNA, 19 nt, Homo sapiens
  misc_RNA (1)...(19): siRNA sense strand
ggaaaugagccugaagaag

SEQ ID NO: 1823936 - RNA, 19 nt, Homo sapiens
  misc_RNA (1)...(19): siRNA sense strand
cugaaaggaaagcaaauaa

SEQ ID NO: 1823937 - RNA, 19 nt, Homo sapiens
  misc_RNA (1)...(19): siRNA sense strand
gguguagauuuagucauug

SEQ ID NO: 1823938 - RNA, 19 nt, Homo sapiens
  misc_RNA (1)...(19): siRNA sense strand
uuaauuaccucaggaagac

SEQ ID NO: 1823939 - RNA, 19 nt, Homo sapiens
  misc_RNA (1)...(19): siRNA sense strand
gaaguuguuagagguuauu

SEQ ID NO: 1823940 - RNA, 19 nt, Homo sapiens
  misc_RNA (1)...(19): siRNA sense strand
gcaacugcaaacaagauga

SEQ ID NO: 1823941 - RNA, 19 nt, Homo sapiens
  misc_RNA (1)...(19): siRNA sense strand
gacauguaguagaugaaau

SEQ ID NO: 1823942 - RNA, 19 nt, Homo sapiens
  misc_RNA (1)...(19): siRNA sense strand
cagaucaaccucuagaauc

SEQ ID NO: 1823943 - RNA, 19 nt, Homo sapiens
  misc_RNA (1)...(19): siRNA sense strand
acucagacccgguugaaga

SEQ ID NO: 1823944 - RNA, 19 nt, Homo sapiens
  misc_RNA (1)...(19): siRNA sense strand
gggcccauguucuaugcuu

SEQ ID NO: 1823945 - RNA, 19 nt, Homo sapiens
  misc_RNA (1)...(19): siRNA sense strand
cauuggcacccacuucuuu

SEQ ID NO: 1823946 - RNA, 19 nt, Homo sapiens
  misc_RNA (1)...(19): siRNA sense strand
acaagaugauaaccucugu

SEQ ID NO: 1823947 - RNA, 19 nt, Homo sapiens
  misc_RNA (1)...(19): siRNA sense strand
gggccgaggcauugucauu

SEQ ID NO: 1823948 - RNA, 19 nt, Homo sapiens
  misc_RNA (1)...(19): siRNA sense strand
ggcugucacuauaggauug

SEQ ID NO: 1823949 - RNA, 19 nt, Homo sapiens
  misc_RNA (1)...(19): siRNA sense strand
aaaggaaagcaaauaagug

SEQ ID NO: 1823950 - RNA, 19 nt, Homo sapiens
  misc_RNA (1)...(19): siRNA sense strand
ccugcaauaugcuuucuuc

SEQ ID NO: 1823951 - RNA, 19 nt, Homo sapiens
  misc_RNA (1)...(19): siRNA sense strand
uggagcagagggcaaauuu

SEQ ID NO: 1823952 - RNA, 19 nt, Homo sapiens
  misc_RNA (1)...(19): siRNA sense strand
gcaaaccagaggagguaga

SEQ ID NO: 1823953 - RNA, 19 nt, Homo sapiens
  misc_RNA (1)...(19): siRNA sense strand
ugaaguuguuagagguuau

SEQ ID NO: 1823954 - RNA, 19 nt, Homo sapiens
  misc_RNA (1)...(19): siRNA sense strand
acucucagcugugugcaaa

SEQ ID NO: 1823955 - RNA, 19 nt, Homo sapiens
  misc_RNA (1)...(19): siRNA sense strand
gugcagcucuccaagauaa

SEQ ID NO: 1823956 - RNA, 19 nt, Homo sapiens
  misc_RNA (1)...(19): siRNA sense strand
gagacaagaucaacaacug

SEQ ID NO: 1823957 - RNA, 19 nt, Homo sapiens
  misc_RNA (1)...(19): siRNA sense strand
gauuagaggucgucaucaa

SEQ ID NO: 1823958 - RNA, 19 nt, Homo sapiens
  misc_RNA (1)...(19): siRNA sense strand
gaguaaaggugggauucua

SEQ ID NO: 1823959 - RNA, 19 nt, Homo sapiens
  misc_RNA (1)...(19): siRNA sense strand
ggucaauucuuugugauga

SEQ ID NO: 1823960 - RNA, 19 nt, Homo sapiens
  misc_RNA (1)...(19): siRNA sense strand
gcagggcucagcauaauga

SEQ ID NO: 1823961 - RNA, 19 nt, Homo sapiens
  misc_RNA (1)...(19): siRNA sense strand
gaugucaccacaagaagua

SEQ ID NO: 1823962 - RNA, 19 nt, Homo sapiens
  misc_RNA (1)...(19): siRNA sense strand
gacaacagguggaagaucu

SEQ ID NO: 1823963 - RNA, 19 nt, Homo sapiens
  misc_RNA (1)...(19): siRNA sense strand
gaugaugucaccacaagaa

SEQ ID NO: 1823964 - RNA, 19 nt, Homo sapiens
  misc_RNA (1)...(19): siRNA sense strand
auccaaagcuugugauuau

SEQ ID NO: 1823965 - RNA, 19 nt, Homo sapiens
  misc_RNA (1)...(19): siRNA sense strand
caagaaugacagcaacuaa

SEQ ID NO: 1823966 - RNA, 19 nt, Homo sapiens
  misc_RNA (1)...(19): siRNA sense strand
gcagggacuugaccaacug

SEQ ID NO: 1823967 - RNA, 19 nt, Homo sapiens
  misc_RNA (1)...(19): siRNA sense strand
ggacgacucgggaugagaa

SEQ ID NO: 1823968 - RNA, 19 nt, Homo sapiens
  misc_RNA (1)...(19): siRNA sense strand
ggaagccagcgcucaauug

SEQ ID NO: 1823969 - RNA, 19 nt, Homo sapiens
  misc_RNA (1)...(19): siRNA sense strand
caacagguggaagaucuua

SEQ ID NO: 1823970 - RNA, 19 nt, Homo sapiens
  misc_RNA (1)...(19): siRNA sense strand
cugagacgcacuauacuua

SEQ ID NO: 1823971 - RNA, 19 nt, Homo sapiens
  misc_RNA (1)...(19): siRNA sense strand
ccaaagcuugugauuauau

SEQ ID NO: 1823972 - RNA, 19 nt, Homo sapiens
  misc_RNA (1)...(19): siRNA sense strand
gggaagacccaaccagugu

SEQ ID NO: 1823973 - RNA, 19 nt, Homo sapiens
  misc_RNA (1)...(19): siRNA sense strand
aaacaagaaucugcugcuu

SEQ ID NO: 1823974 - RNA, 19 nt, Homo sapiens
  misc_RNA (1)...(19): siRNA sense strand
gcagcuggauggccaaacu

SEQ ID NO: 1823975 - RNA, 19 nt, Homo sapiens
  misc_RNA (1)...(19): siRNA sense strand
caaagcuugugauuauauc

SEQ ID NO: 1823976 - RNA, 19 nt, Homo sapiens
  misc_RNA (1)...(19): siRNA sense strand
gcacuggucaauucuuugu

SEQ ID NO: 1823977 - RNA, 19 nt, Homo sapiens
  misc_RNA (1)...(19): siRNA sense strand
uggcacuggucaauucuuu

SEQ ID NO: 1823978 - RNA, 19 nt, Homo sapiens
  misc_RNA (1)...(19): siRNA sense strand
ggaggaagccagcgcucaa

SEQ ID NO: 1823979 - RNA, 19 nt, Homo sapiens
  misc_RNA (1)...(19): siRNA sense strand
caccagugaugaugcaguu

SEQ ID NO: 1823980 - RNA, 19 nt, Homo sapiens
  misc_RNA (1)...(19): siRNA sense strand
aaacgcagggcucagcaua

SEQ ID NO: 1823981 - RNA, 19 nt, Homo sapiens
  misc_RNA (1)...(19): siRNA sense strand
gaagaacugcagggacuug

SEQ ID NO: 1823982 - RNA, 19 nt, Homo sapiens
  misc_RNA (1)...(19): siRNA sense strand
uauccaaagcuugugauua

SEQ ID NO: 1823983 - RNA, 19 nt, Homo sapiens
  misc_RNA (1)...(19): siRNA sense strand
aacugcagcuggacaauga

SEQ ID NO: 1823984 - RNA, 19 nt, Homo sapiens
  misc_RNA (1)...(19): siRNA sense strand
ccgcuugucugaagaacug

SEQ ID NO: 1823985 - RNA, 19 nt, Homo sapiens
  misc_RNA (1)...(19): siRNA sense strand
guaaccaccgcuugucuga

SEQ ID NO: 1823986 - RNA, 19 nt, Homo sapiens
  misc_RNA (1)...(19): siRNA sense strand
uagaggucgucaucaagaa

SEQ ID NO: 1823987 - RNA, 19 nt, Homo sapiens
  misc_RNA (1)...(19): siRNA sense strand
gagacgcacuauacuuacu

SEQ ID NO: 1823988 - RNA, 19 nt, Homo sapiens
  misc_RNA (1)...(19): siRNA sense strand
gcuggacaaugacgugcuu

SEQ ID NO: 1823989 - RNA, 19 nt, Homo sapiens
  misc_RNA (1)...(19): siRNA sense strand
gggcucagcauaaugaagu

SEQ ID NO: 1823990 - RNA, 19 nt, Homo sapiens
  misc_RNA (1)...(19): siRNA sense strand
ucaauucuuugugaugaug

SEQ ID NO: 1823991 - RNA, 19 nt, Homo sapiens
  misc_RNA (1)...(19): siRNA sense strand
caaccaguguggcuauugc

SEQ ID NO: 1823992 - RNA, 19 nt, Homo sapiens
  misc_RNA (1)...(19): siRNA sense strand
gcugagacgcacuauacuu

SEQ ID NO: 1823993 - RNA, 19 nt, Homo sapiens
  misc_RNA (1)...(19): siRNA sense strand
ucaagaaugacagcaacua

SEQ ID NO: 1823994 - RNA, 19 nt, Homo sapiens
  misc_RNA (1)...(19): siRNA sense strand
ccagugaugaugcaguuga

SEQ ID NO: 1823995 - RNA, 19 nt, Homo sapiens
  misc_RNA (1)...(19): siRNA sense strand
uccaaagcuugugauuaua

SEQ ID NO: 1823996 - RNA, 19 nt, Homo sapiens
  misc_RNA (1)...(19): siRNA sense strand
acgcagggcucagcauaau

SEQ ID NO: 1823997 - RNA, 19 nt, Homo sapiens
  misc_RNA (1)...(19): siRNA sense strand
gaagccagcgcucaauugc

SEQ ID NO: 1823998 - RNA, 19 nt, Homo sapiens
  misc_RNA (1)...(19): siRNA sense strand
acuggucaauucuuuguga

SEQ ID NO: 1823999 - RNA, 19 nt, Homo sapiens
  misc_RNA (1)...(19): siRNA sense strand
guaaaggugggauucuauc

SEQ ID NO: 1824000 - RNA, 19 nt, Homo sapiens
  misc_RNA (1)...(19): siRNA sense strand
aaccaccgcuugucugaag

SEQ ID NO: 1824001 - RNA, 19 nt, Homo sapiens
  misc_RNA (1)...(19): siRNA sense strand
acagguggaagaucuuaaa

SEQ ID NO: 1824002 - RNA, 19 nt, Homo sapiens
  misc_RNA (1)...(19): siRNA sense strand
caacugcagcuggacaaug

SEQ ID NO: 1824003 - RNA, 19 nt, Homo sapiens
  misc_RNA (1)...(19): siRNA sense strand
ggacaaugacgugcuucga

SEQ ID NO: 1824004 - RNA, 19 nt, Homo sapiens
  misc_RNA (1)...(19): siRNA sense strand
gacgcacuauacuuacuuc

SEQ ID NO: 1824005 - RNA, 19 nt, Homo sapiens
  misc_RNA (1)...(19): siRNA sense strand
gaggucgucaucaagaaug

SEQ ID NO: 1824006 - RNA, 19 nt, Homo sapiens
  misc_RNA (1)...(19): siRNA sense strand
uuagaggucgucaucaaga

SEQ ID NO: 1824007 - RNA, 19 nt, Homo sapiens
  misc_RNA (1)...(19): siRNA sense strand
ucgugcagcucuccaagau

SEQ ID NO: 1824008 - RNA, 19 nt, Homo sapiens
  misc_RNA (1)...(19): siRNA sense strand
cuaggacucacccuuauuc

SEQ ID NO: 1824009 - RNA, 19 nt, Homo sapiens
  misc_RNA (1)...(19): siRNA sense strand
gaaguacugcagggaggaa

SEQ ID NO: 1824010 - RNA, 19 nt, Homo sapiens
  misc_RNA (1)...(19): siRNA sense strand
aaacagcugaaacggaaga

SEQ ID NO: 1824011 - RNA, 19 nt, Homo sapiens
  misc_RNA (1)...(19): siRNA sense strand
cagaguaaccaccgcuugu

SEQ ID NO: 1824012 - RNA, 19 nt, Homo sapiens
  misc_RNA (1)...(19): siRNA sense strand
gccgagacaagaucaacaa

SEQ ID NO: 1824013 - RNA, 19 nt, Homo sapiens
  misc_RNA (1)...(19): siRNA sense strand
caggagcuucggcagagua

SEQ ID NO: 1824014 - RNA, 19 nt, Homo sapiens
  misc_RNA (1)...(19): siRNA sense strand
guugcggcaccacggauua

SEQ ID NO: 1824015 - RNA, 19 nt, Homo sapiens
  misc_RNA (1)...(19): siRNA sense strand
cccuaggacucacccuuau

SEQ ID NO: 1824016 - RNA, 19 nt, Homo sapiens
  misc_RNA (1)...(19): siRNA sense strand
gauucuauccaaagcuugu

SEQ ID NO: 1824017 - RNA, 19 nt, Homo sapiens
  misc_RNA (1)...(19): siRNA sense strand
cugcugagacgcacuauac

SEQ ID NO: 1824018 - RNA, 19 nt, Homo sapiens
  misc_RNA (1)...(19): siRNA sense strand
cggauuagaggucgucauc

SEQ ID NO: 1824019 - RNA, 19 nt, Homo sapiens
  misc_RNA (1)...(19): siRNA sense strand
ugacgugcuucgacaacag

SEQ ID NO: 1824020 - RNA, 19 nt, Homo sapiens
  misc_RNA (1)...(19): siRNA sense strand
gcagcucuccaagauaauc

SEQ ID NO: 1824021 - RNA, 19 nt, Homo sapiens
  misc_RNA (1)...(19): siRNA sense strand
gaggaagccagcgcucaau

SEQ ID NO: 1824022 - RNA, 19 nt, Homo sapiens
  misc_RNA (1)...(19): siRNA sense strand
ggaggacgauggcuaauua

SEQ ID NO: 1824023 - RNA, 19 nt, Homo sapiens
  misc_RNA (1)...(19): siRNA sense strand
ccaguugucuaguaauuua

SEQ ID NO: 1824024 - RNA, 19 nt, Homo sapiens
  misc_RNA (1)...(19): siRNA sense strand
caaagauagugauugguua

SEQ ID NO: 1824025 - RNA, 19 nt, Homo sapiens
  misc_RNA (1)...(19): siRNA sense strand
gagaagcuguuacacauau

SEQ ID NO: 1824026 - RNA, 19 nt, Homo sapiens
  misc_RNA (1)...(19): siRNA sense strand
gacgauggcuaauuacauu

SEQ ID NO: 1824027 - RNA, 19 nt, Homo sapiens
  misc_RNA (1)...(19): siRNA sense strand
cagagaagcuguuacacau

SEQ ID NO: 1824028 - RNA, 19 nt, Homo sapiens
  misc_RNA (1)...(19): siRNA sense strand
cauauccaguugucuagua

SEQ ID NO: 1824029 - RNA, 19 nt, Homo sapiens
  misc_RNA (1)...(19): siRNA sense strand
gugauaagauagcaauaug

SEQ ID NO: 1824030 - RNA, 19 nt, Homo sapiens
  misc_RNA (1)...(19): siRNA sense strand
acacuucugugccuuauug

SEQ ID NO: 1824031 - RNA, 19 nt, Homo sapiens
  misc_RNA (1)...(19): siRNA sense strand
cggcugaucuccaaguuug

SEQ ID NO: 1824032 - RNA, 19 nt, Homo sapiens
  misc_RNA (1)...(19): siRNA sense strand
ccagaacacuauauuaaac

SEQ ID NO: 1824033 - RNA, 19 nt, Homo sapiens
  misc_RNA (1)...(19): siRNA sense strand
gauaagauagcaauaugga

SEQ ID NO: 1824034 - RNA, 19 nt, Homo sapiens
  misc_RNA (1)...(19): siRNA sense strand
caaguuugauacuguugaa

SEQ ID NO: 1824035 - RNA, 19 nt, Homo sapiens
  misc_RNA (1)...(19): siRNA sense strand
gcagacacagcuacuaaga

SEQ ID NO: 1824036 - RNA, 19 nt, Homo sapiens
  misc_RNA (1)...(19): siRNA sense strand
agcuaaaggugauaagaua

SEQ ID NO: 1824037 - RNA, 19 nt, Homo sapiens
  misc_RNA (1)...(19): siRNA sense strand
gguauacaaggaaagguua

SEQ ID NO: 1824038 - RNA, 19 nt, Homo sapiens
  misc_RNA (1)...(19): siRNA sense strand
caauauggacuacugaaug

SEQ ID NO: 1824039 - RNA, 19 nt, Homo sapiens
  misc_RNA (1)...(19): siRNA sense strand
gagcuaaaggugauaagau

SEQ ID NO: 1824040 - RNA, 19 nt, Homo sapiens
  misc_RNA (1)...(19): siRNA sense strand
aauauggacuacugaaugu

SEQ ID NO: 1824041 - RNA, 19 nt, Homo sapiens
  misc_RNA (1)...(19): siRNA sense strand
guauguggcgcuguuguua

SEQ ID NO: 1824042 - RNA, 19 nt, Homo sapiens
  misc_RNA (1)...(19): siRNA sense strand
gagccuaugugggaagaug

SEQ ID NO: 1824043 - RNA, 19 nt, Homo sapiens
  misc_RNA (1)...(19): siRNA sense strand
gggaggguauacaaggaaa

SEQ ID NO: 1824044 - RNA, 19 nt, Homo sapiens
  misc_RNA (1)...(19): siRNA sense strand
gagaaucuuuugaugacua

SEQ ID NO: 1824045 - RNA, 19 nt, Homo sapiens
  misc_RNA (1)...(19): siRNA sense strand
uaacccagaacacuauauu

SEQ ID NO: 1824046 - RNA, 19 nt, Homo sapiens
  misc_RNA (1)...(19): siRNA sense strand
gcaauauggacuacugaau

SEQ ID NO: 1824047 - RNA, 19 nt, Homo sapiens
  misc_RNA (1)...(19): siRNA sense strand
ggacgauggcuaauuacau

SEQ ID NO: 1824048 - RNA, 19 nt, Homo sapiens
  misc_RNA (1)...(19): siRNA sense strand
aaggaaagguuaggacuuc

SEQ ID NO: 1824049 - RNA, 19 nt, Homo sapiens
  misc_RNA (1)...(19): siRNA sense strand
gagacacuucugugccuua

SEQ ID NO: 1824050 - RNA, 19 nt, Homo sapiens
  misc_RNA (1)...(19): siRNA sense strand
gauggcuaauuacauugaa

SEQ ID NO: 1824051 - RNA, 19 nt, Homo sapiens
  misc_RNA (1)...(19): siRNA sense strand
ggacuuccuccaaagauag

SEQ ID NO: 1824052 - RNA, 19 nt, Homo sapiens
  misc_RNA (1)...(19): siRNA sense strand
ugauacuguugaagacuuu

SEQ ID NO: 1824053 - RNA, 19 nt, Homo sapiens
  misc_RNA (1)...(19): siRNA sense strand
ggugauaagauagcaauau

SEQ ID NO: 1824054 - RNA, 19 nt, Homo sapiens
  misc_RNA (1)...(19): siRNA sense strand
acccagaacacuauauuaa

SEQ ID NO: 1824055 - RNA, 19 nt, Homo sapiens
  misc_RNA (1)...(19): siRNA sense strand
ggaaucuaaucaggagguu

SEQ ID NO: 1824056 - RNA, 19 nt, Homo sapiens
  misc_RNA (1)...(19): siRNA sense strand
cuaaucaggagguugcuaa

SEQ ID NO: 1824057 - RNA, 19 nt, Homo sapiens
  misc_RNA (1)...(19): siRNA sense strand
agaagcuguuacacauaua

SEQ ID NO: 1824058 - RNA, 19 nt, Homo sapiens
  misc_RNA (1)...(19): siRNA sense strand
caaggaaagguuaggacuu

SEQ ID NO: 1824059 - RNA, 19 nt, Homo sapiens
  misc_RNA (1)...(19): siRNA sense strand
cagaacagaugggcacucu

SEQ ID NO: 1824060 - RNA, 19 nt, Homo sapiens
  misc_RNA (1)...(19): siRNA sense strand
cccagaacacuauauuaaa

SEQ ID NO: 1824061 - RNA, 19 nt, Homo sapiens
  misc_RNA (1)...(19): siRNA sense strand
acacauauagggaggguau

SEQ ID NO: 1824062 - RNA, 19 nt, Homo sapiens
  misc_RNA (1)...(19): siRNA sense strand
gcgcuguuguuaauguuag

SEQ ID NO: 1824063 - RNA, 19 nt, Homo sapiens
  misc_RNA (1)...(19): siRNA sense strand
ugauguauguggcgcuguu

SEQ ID NO: 1824064 - RNA, 19 nt, Homo sapiens
  misc_RNA (1)...(19): siRNA sense strand
ucuccaaguuugauacugu

SEQ ID NO: 1824065 - RNA, 19 nt, Homo sapiens
  misc_RNA (1)...(19): siRNA sense strand
gaagcuguuacacauauag

SEQ ID NO: 1824066 - RNA, 19 nt, Homo sapiens
  misc_RNA (1)...(19): siRNA sense strand
gcaaaccugcggcugaucu

SEQ ID NO: 1824067 - RNA, 19 nt, Homo sapiens
  misc_RNA (1)...(19): siRNA sense strand
gaaaccaccccuacuccua

SEQ ID NO: 1824068 - RNA, 19 nt, Homo sapiens
  misc_RNA (1)...(19): siRNA sense strand
aaacagcagagacgaagug

SEQ ID NO: 1824069 - RNA, 19 nt, Homo sapiens
  misc_RNA (1)...(19): siRNA sense strand
uagggaggguauacaagga

SEQ ID NO: 1824070 - RNA, 19 nt, Homo sapiens
  misc_RNA (1)...(19): siRNA sense strand
uaaaggugauaagauagca

SEQ ID NO: 1824071 - RNA, 19 nt, Homo sapiens
  misc_RNA (1)...(19): siRNA sense strand
gggaggacgauggcuaauu

SEQ ID NO: 1824072 - RNA, 19 nt, Homo sapiens
  misc_RNA (1)...(19): siRNA sense strand
agagaagcuguuacacaua

SEQ ID NO: 1824073 - RNA, 19 nt, Homo sapiens
  misc_RNA (1)...(19): siRNA sense strand
ggagaaaacggaaucuaau

SEQ ID NO: 1824074 - RNA, 19 nt, Homo sapiens
  misc_RNA (1)...(19): siRNA sense strand
aagcaaaccugcggcugau

SEQ ID NO: 1824075 - RNA, 19 nt, Homo sapiens
  misc_RNA (1)...(19): siRNA sense strand
acgcagacacagcuacuaa

SEQ ID NO: 1824076 - RNA, 19 nt, Homo sapiens
  misc_RNA (1)...(19): siRNA sense strand
ggguauacaaggaaagguu

SEQ ID NO: 1824077 - RNA, 19 nt, Homo sapiens
  misc_RNA (1)...(19): siRNA sense strand
gcuaacccagaacacuaua

SEQ ID NO: 1824078 - RNA, 19 nt, Homo sapiens
  misc_RNA (1)...(19): siRNA sense strand
gcuaaaggugauaagauag

SEQ ID NO: 1824079 - RNA, 19 nt, Homo sapiens
  misc_RNA (1)...(19): siRNA sense strand
guggcgcuguuguuaaugu

SEQ ID NO: 1824080 - RNA, 19 nt, Homo sapiens
  misc_RNA (1)...(19): siRNA sense strand
uuugaugacuacagugaug

SEQ ID NO: 1824081 - RNA, 19 nt, Homo sapiens
  misc_RNA (1)...(19): siRNA sense strand
auauccaguugucuaguaa

SEQ ID NO: 1824082 - RNA, 19 nt, Homo sapiens
  misc_RNA (1)...(19): siRNA sense strand
aaccauauccaguugucua

SEQ ID NO: 1824083 - RNA, 19 nt, Homo sapiens
  misc_RNA (1)...(19): siRNA sense strand
uauggacuacugaauguga

SEQ ID NO: 1824084 - RNA, 19 nt, Homo sapiens
  misc_RNA (1)...(19): siRNA sense strand
aggaugguauugagccuau

SEQ ID NO: 1824085 - RNA, 19 nt, Homo sapiens
  misc_RNA (1)...(19): siRNA sense strand
agacacuucugugccuuau

SEQ ID NO: 1824086 - RNA, 19 nt, Homo sapiens
  misc_RNA (1)...(19): siRNA sense strand
uaugugggaagaugagaaa

SEQ ID NO: 1824087 - RNA, 19 nt, Homo sapiens
  misc_RNA (1)...(19): siRNA sense strand
ccaaguuugauacuguuga

SEQ ID NO: 1824088 - RNA, 19 nt, Homo sapiens
  misc_RNA (1)...(19): siRNA sense strand
auagcaauauggacuacug

SEQ ID NO: 1824089 - RNA, 19 nt, Homo sapiens
  misc_RNA (1)...(19): siRNA sense strand
aacccagaacacuauauua

SEQ ID NO: 1824090 - RNA, 19 nt, Homo sapiens
  misc_RNA (1)...(19): siRNA sense strand
cgauggcuaauuacauuga

SEQ ID NO: 1824091 - RNA, 19 nt, Homo sapiens
  misc_RNA (1)...(19): siRNA sense strand
gaugguauugagccuaugu

SEQ ID NO: 1824092 - RNA, 19 nt, Homo sapiens
  misc_RNA (1)...(19): siRNA sense strand
uugauacuguugaagacuu

SEQ ID NO: 1824093 - RNA, 19 nt, Homo sapiens
  misc_RNA (1)...(19): siRNA sense strand
uauguggcgcuguuguuaa

SEQ ID NO: 1824094 - RNA, 19 nt, Homo sapiens
  misc_RNA (1)...(19): siRNA sense strand
auccaguugucuaguaauu

SEQ ID NO: 1824095 - RNA, 19 nt, Homo sapiens
  misc_RNA (1)...(19): siRNA sense strand
guuguuaauguuagagcua

SEQ ID NO: 1824096 - RNA, 19 nt, Homo sapiens
  misc_RNA (1)...(19): siRNA sense strand
uguacaaccauauccaguu

SEQ ID NO: 1824097 - RNA, 19 nt, Homo sapiens
  misc_RNA (1)...(19): siRNA sense strand
uaaacuggaucgacucuau

SEQ ID NO: 1824098 - RNA, 19 nt, Homo sapiens
  misc_RNA (1)...(19): siRNA sense strand
gaucgacucuaucauccaa

SEQ ID NO: 1824099 - RNA, 19 nt, Homo sapiens
  misc_RNA (1)...(19): siRNA sense strand
uaaacuugcucaacgacau

SEQ ID NO: 1824100 - RNA, 19 nt, Homo sapiens
  misc_RNA (1)...(19): siRNA sense strand
gggcuaauccacggaauug

SEQ ID NO: 1824101 - RNA, 19 nt, Homo sapiens
  misc_RNA (1)...(19): siRNA sense strand
gugcagcgcaucuucgaaa

SEQ ID NO: 1824102 - RNA, 19 nt, Homo sapiens
  misc_RNA (1)...(19): siRNA sense strand
gcacugcguggcgaaugua

SEQ ID NO: 1824103 - RNA, 19 nt, Homo sapiens
  misc_RNA (1)...(19): siRNA sense strand
gcgcccaacuucgucaugu

SEQ ID NO: 1824104 - RNA, 19 nt, Homo sapiens
  misc_RNA (1)...(19): siRNA sense strand
ccguaaacuugcucaacga

SEQ ID NO: 1824105 - RNA, 19 nt, Homo sapiens
  misc_RNA (1)...(19): siRNA sense strand
ucacagcucuuaauaauug

SEQ ID NO: 1824106 - RNA, 19 nt, Homo sapiens
  misc_RNA (1)...(19): siRNA sense strand
gaagaugaccucuggguua

SEQ ID NO: 1824107 - RNA, 19 nt, Homo sapiens
  misc_RNA (1)...(19): siRNA sense strand
gcagaagauugcaugaaua

SEQ ID NO: 1824108 - RNA, 19 nt, Homo sapiens
  misc_RNA (1)...(19): siRNA sense strand
gaaggaaagacaucacuua

SEQ ID NO: 1824109 - RNA, 19 nt, Homo sapiens
  misc_RNA (1)...(19): siRNA sense strand
gaaggcgaauggaagauaa

SEQ ID NO: 1824110 - RNA, 19 nt, Homo sapiens
  misc_RNA (1)...(19): siRNA sense strand
gauccagaauguaaagaua

SEQ ID NO: 1824111 - RNA, 19 nt, Homo sapiens
  misc_RNA (1)...(19): siRNA sense strand
caaagucuguagauuguuu

SEQ ID NO: 1824112 - RNA, 19 nt, Homo sapiens
  misc_RNA (1)...(19): siRNA sense strand
acccagagcuaauuauuua

SEQ ID NO: 1824113 - RNA, 19 nt, Homo sapiens
  misc_RNA (1)...(19): siRNA sense strand
ugaauaaacccaaggauaa

SEQ ID NO: 1824114 - RNA, 19 nt, Homo sapiens
  misc_RNA (1)...(19): siRNA sense strand
gacagaaggugaaagauuc

SEQ ID NO: 1824115 - RNA, 19 nt, Homo sapiens
  misc_RNA (1)...(19): siRNA sense strand
ggauaaagucuccuuaauu

SEQ ID NO: 1824116 - RNA, 19 nt, Homo sapiens
  misc_RNA (1)...(19): siRNA sense strand
ggucaaagcugauuguuuu

SEQ ID NO: 1824117 - RNA, 19 nt, Homo sapiens
  misc_RNA (1)...(19): siRNA sense strand
guaaaucggagaacaagua

SEQ ID NO: 1824118 - RNA, 19 nt, Homo sapiens
  misc_RNA (1)...(19): siRNA sense strand
cauaaauccugugaaguua

SEQ ID NO: 1824119 - RNA, 19 nt, Homo sapiens
  misc_RNA (1)...(19): siRNA sense strand
gaaauucccaagcuuauga

SEQ ID NO: 1824120 - RNA, 19 nt, Homo sapiens
  misc_RNA (1)...(19): siRNA sense strand
aacaauggcugaccagaua

SEQ ID NO: 1824121 - RNA, 19 nt, Homo sapiens
  misc_RNA (1)...(19): siRNA sense strand
ggacagaaggugaaagauu

SEQ ID NO: 1824122 - RNA, 19 nt, Homo sapiens
  misc_RNA (1)...(19): siRNA sense strand
gaagacuacuacaagauug

SEQ ID NO: 1824123 - RNA, 19 nt, Homo sapiens
  misc_RNA (1)...(19): siRNA sense strand
gaauuuaccacuaagcuuu

SEQ ID NO: 1824124 - RNA, 19 nt, Homo sapiens
  misc_RNA (1)...(19): siRNA sense strand
gaaaacagauuacuaagca

SEQ ID NO: 1824125 - RNA, 19 nt, Homo sapiens
  misc_RNA (1)...(19): siRNA sense strand
gucuguagauuguuucuua

SEQ ID NO: 1824126 - RNA, 19 nt, Homo sapiens
  misc_RNA (1)...(19): siRNA sense strand
gaagaagguauuacuguug

SEQ ID NO: 1824127 - RNA, 19 nt, Homo sapiens
  misc_RNA (1)...(19): siRNA sense strand
caacaaggcaaaccguuaa

SEQ ID NO: 1824128 - RNA, 19 nt, Homo sapiens
  misc_RNA (1)...(19): siRNA sense strand
gaaaagcucugcaaaacug

SEQ ID NO: 1824129 - RNA, 19 nt, Homo sapiens
  misc_RNA (1)...(19): siRNA sense strand
gaagauugcaugaauaagu

SEQ ID NO: 1824130 - RNA, 19 nt, Homo sapiens
  misc_RNA (1)...(19): siRNA sense strand
gaaaagagccuaauaaagg

SEQ ID NO: 1824131 - RNA, 19 nt, Homo sapiens
  misc_RNA (1)...(19): siRNA sense strand
gcaaguaaaucggagaaca

SEQ ID NO: 1824132 - RNA, 19 nt, Homo sapiens
  misc_RNA (1)...(19): siRNA sense strand
gaauaaacccaaggauaaa

SEQ ID NO: 1824133 - RNA, 19 nt, Homo sapiens
  misc_RNA (1)...(19): siRNA sense strand
ggaggaugcuauugauaau

SEQ ID NO: 1824134 - RNA, 19 nt, Homo sapiens
  misc_RNA (1)...(19): siRNA sense strand
gguguauacucuugaugua

SEQ ID NO: 1824135 - RNA, 19 nt, Homo sapiens
  misc_RNA (1)...(19): siRNA sense strand
caacaaagaaagcaacaga

SEQ ID NO: 1824136 - RNA, 19 nt, Homo sapiens
  misc_RNA (1)...(19): siRNA sense strand
gaauggaagauaaugcuuu

SEQ ID NO: 1824137 - RNA, 19 nt, Homo sapiens
  misc_RNA (1)...(19): siRNA sense strand
agagugacaugauucguaa

SEQ ID NO: 1824138 - RNA, 19 nt, Homo sapiens
  misc_RNA (1)...(19): siRNA sense strand
aaugacagaucuucuagaa

SEQ ID NO: 1824139 - RNA, 19 nt, Homo sapiens
  misc_RNA (1)...(19): siRNA sense strand
ggaucggucugcagaagaa

SEQ ID NO: 1824140 - RNA, 19 nt, Homo sapiens
  misc_RNA (1)...(19): siRNA sense strand
gagagugacaugauucgua

SEQ ID NO: 1824141 - RNA, 19 nt, Homo sapiens
  misc_RNA (1)...(19): siRNA sense strand
caucaaagucuguagauug

SEQ ID NO: 1824142 - RNA, 19 nt, Homo sapiens
  misc_RNA (1)...(19): siRNA sense strand
guagauuguuucuuacaug

SEQ ID NO: 1824143 - RNA, 19 nt, Homo sapiens
  misc_RNA (1)...(19): siRNA sense strand
cagaagauugcaugaauaa

SEQ ID NO: 1824144 - RNA, 19 nt, Homo sapiens
  misc_RNA (1)...(19): siRNA sense strand
uaccagaugcauucuauua

SEQ ID NO: 1824145 - RNA, 19 nt, Homo sapiens
  misc_RNA (1)...(19): siRNA sense strand
ccagauaguuacagugugu

SEQ ID NO: 1824146 - RNA, 19 nt, Homo sapiens
  misc_RNA (1)...(19): siRNA sense strand
gcuguuggaugauauaaag

SEQ ID NO: 1824147 - RNA, 19 nt, Homo sapiens
  misc_RNA (1)...(19): siRNA sense strand
cauaugaucuacuaccaau

SEQ ID NO: 1824148 - RNA, 19 nt, Homo sapiens
  misc_RNA (1)...(19): siRNA sense strand
guaaaccucuagauaaugc

SEQ ID NO: 1824149 - RNA, 19 nt, Homo sapiens
  misc_RNA (1)...(19): siRNA sense strand
gaaagcaacagaaggaaag

SEQ ID NO: 1824150 - RNA, 19 nt, Homo sapiens
  misc_RNA (1)...(19): siRNA sense strand
gaugaccucuggguuagaa

SEQ ID NO: 1824151 - RNA, 19 nt, Homo sapiens
  misc_RNA (1)...(19): siRNA sense strand
agaagaagguauuacuguu

SEQ ID NO: 1824152 - RNA, 19 nt, Homo sapiens
  misc_RNA (1)...(19): siRNA sense strand
uguaagugcucgccagaaa

SEQ ID NO: 1824153 - RNA, 19 nt, Homo sapiens
  misc_RNA (1)...(19): siRNA sense strand
aauaauugaucguggcuuu

SEQ ID NO: 1824154 - RNA, 19 nt, Homo sapiens
  misc_RNA (1)...(19): siRNA sense strand
aaucggagaacaaguauaa

SEQ ID NO: 1824155 - RNA, 19 nt, Homo sapiens
  misc_RNA (1)...(19): siRNA sense strand
gaucacauacucugaagug

SEQ ID NO: 1824156 - RNA, 19 nt, Homo sapiens
  misc_RNA (1)...(19): siRNA sense strand
caagaaagaaggcgaaugg

SEQ ID NO: 1824157 - RNA, 19 nt, Homo sapiens
  misc_RNA (1)...(19): siRNA sense strand
gggaaaagaugccauuaug

SEQ ID NO: 1824158 - RNA, 19 nt, Homo sapiens
  misc_RNA (1)...(19): siRNA sense strand
guauuacuguuguagagaa

SEQ ID NO: 1824159 - RNA, 19 nt, Homo sapiens
  misc_RNA (1)...(19): siRNA sense strand
aaagaaagcaacagaagga

SEQ ID NO: 1824160 - RNA, 19 nt, Homo sapiens
  misc_RNA (1)...(19): siRNA sense strand
acauaaauccugugaaguu

SEQ ID NO: 1824161 - RNA, 19 nt, Homo sapiens
  misc_RNA (1)...(19): siRNA sense strand
ucaacaaggcaaaccguua

SEQ ID NO: 1824162 - RNA, 19 nt, Homo sapiens
  misc_RNA (1)...(19): siRNA sense strand
gcucuuacccagcugauga

SEQ ID NO: 1824163 - RNA, 19 nt, Homo sapiens
  misc_RNA (1)...(19): siRNA sense strand
ggcaauggcauaugaucua

SEQ ID NO: 1824164 - RNA, 19 nt, Homo sapiens
  misc_RNA (1)...(19): siRNA sense strand
gcaaaccguuaagaaagga

SEQ ID NO: 1824165 - RNA, 19 nt, Homo sapiens
  misc_RNA (1)...(19): siRNA sense strand
uaauggaacuacggaagaa

SEQ ID NO: 1824166 - RNA, 19 nt, Homo sapiens
  misc_RNA (1)...(19): siRNA sense strand
gaaagauuccaugcgagua

SEQ ID NO: 1824167 - RNA, 19 nt, Homo sapiens
  misc_RNA (1)...(19): siRNA sense strand
caucuuaacuuagcagaag

SEQ ID NO: 1824168 - RNA, 19 nt, Homo sapiens
  misc_RNA (1)...(19): siRNA sense strand
ggccauccuugaagaagaa

SEQ ID NO: 1824169 - RNA, 19 nt, Homo sapiens
  misc_RNA (1)...(19): siRNA sense strand
gaucuacuaccaauugaga

SEQ ID NO: 1824170 - RNA, 19 nt, Homo sapiens
  misc_RNA (1)...(19): siRNA sense strand
uaacuuagcagaagauugc

SEQ ID NO: 1824171 - RNA, 19 nt, Homo sapiens
  misc_RNA (1)...(19): siRNA sense strand
uaaagaugcugaauaaacc

SEQ ID NO: 1824172 - RNA, 19 nt, Homo sapiens
  misc_RNA (1)...(19): siRNA sense strand
aaaugagagugacaugauu

SEQ ID NO: 1824173 - RNA, 19 nt, Homo sapiens
  misc_RNA (1)...(19): siRNA sense strand
gaacuacggaagaaaauuu

SEQ ID NO: 1824174 - RNA, 19 nt, Homo sapiens
  misc_RNA (1)...(19): siRNA sense strand
uaagcaaguuguccaucuu

SEQ ID NO: 1824175 - RNA, 19 nt, Homo sapiens
  misc_RNA (1)...(19): siRNA sense strand
caaggcaaaccguuaagaa

SEQ ID NO: 1824176 - RNA, 19 nt, Homo sapiens
  misc_RNA (1)...(19): siRNA sense strand
ugaagacuacuacaagauu

SEQ ID NO: 1824177 - RNA, 19 nt, Homo sapiens
  misc_RNA (1)...(19): siRNA sense strand
caaguaaaucggagaacaa

SEQ ID NO: 1824178 - RNA, 19 nt, Homo sapiens
  misc_RNA (1)...(19): siRNA sense strand
acauauugcgguuguguua

SEQ ID NO: 1824179 - RNA, 19 nt, Homo sapiens
  misc_RNA (1)...(19): siRNA sense strand
aauggcauaugaucuacua

SEQ ID NO: 1824180 - RNA, 19 nt, Homo sapiens
  misc_RNA (1)...(19): siRNA sense strand
gcccugauaaucucuuuaa

SEQ ID NO: 1824181 - RNA, 19 nt, Homo sapiens
  misc_RNA (1)...(19): siRNA sense strand
uucccaagcuuaugaaaga

SEQ ID NO: 1824182 - RNA, 19 nt, Homo sapiens
  misc_RNA (1)...(19): siRNA sense strand
cugaauaaacccaaggaua

SEQ ID NO: 1824183 - RNA, 19 nt, Homo sapiens
  misc_RNA (1)...(19): siRNA sense strand
ggagaacaaguauaaagca

SEQ ID NO: 1824184 - RNA, 19 nt, Homo sapiens
  misc_RNA (1)...(19): siRNA sense strand
uggaggaugcuauugauaa

SEQ ID NO: 1824185 - RNA, 19 nt, Homo sapiens
  misc_RNA (1)...(19): siRNA sense strand
uaugaucuacuaccaauug

SEQ ID NO: 1824186 - RNA, 19 nt, Homo sapiens
  misc_RNA (1)...(19): siRNA sense strand
gaugaaaagagccuaauaa

SEQ ID NO: 1824187 - RNA, 19 nt, Homo sapiens
  misc_RNA (1)...(19): siRNA sense strand
gaccagauaguuacagugu

SEQ ID NO: 1824188 - RNA, 19 nt, Homo sapiens
  misc_RNA (1)...(19): siRNA sense strand
ccagaugcauucuauuacu

SEQ ID NO: 1824189 - RNA, 19 nt, Homo sapiens
  misc_RNA (1)...(19): siRNA sense strand
cagcauauauuuacuucac

SEQ ID NO: 1824190 - RNA, 19 nt, Homo sapiens
  misc_RNA (1)...(19): siRNA sense strand
acaugaaucucagguguau

SEQ ID NO: 1824191 - RNA, 19 nt, Homo sapiens
  misc_RNA (1)...(19): siRNA sense strand
ucaaaagaauggccauauu

SEQ ID NO: 1824192 - RNA, 19 nt, Homo sapiens
  misc_RNA (1)...(19): siRNA sense strand
ggcaaaccguuaagaaagg

SEQ ID NO: 1824193 - RNA, 19 nt, Homo sapiens
  misc_RNA (1)...(19): siRNA sense strand
caacagaaggaaagacauc

SEQ ID NO: 1824194 - RNA, 19 nt, Homo sapiens
  misc_RNA (1)...(19): siRNA sense strand
aagaagguauuacuguugu

SEQ ID NO: 1824195 - RNA, 19 nt, Homo sapiens
  misc_RNA (1)...(19): siRNA sense strand
agaaacccagagcuaauua

SEQ ID NO: 1824196 - RNA, 19 nt, Homo sapiens
  misc_RNA (1)...(19): siRNA sense strand
gcaauggcauaugaucuac

SEQ ID NO: 1824197 - RNA, 19 nt, Homo sapiens
  misc_RNA (1)...(19): siRNA sense strand
ucucagguguauacucuug

SEQ ID NO: 1824198 - RNA, 19 nt, Homo sapiens
  misc_RNA (1)...(19): siRNA sense strand
gaaacccagagcuaauuau

SEQ ID NO: 1824199 - RNA, 19 nt, Homo sapiens
  misc_RNA (1)...(19): siRNA sense strand
ccaagcuuaugaaagaaau

SEQ ID NO: 1824200 - RNA, 19 nt, Homo sapiens
  misc_RNA (1)...(19): siRNA sense strand
uguaccagaugcauucuau

SEQ ID NO: 1824201 - RNA, 19 nt, Homo sapiens
  misc_RNA (1)...(19): siRNA sense strand
agaaagaaggcgaauggaa

SEQ ID NO: 1824202 - RNA, 19 nt, Homo sapiens
  misc_RNA (1)...(19): siRNA sense strand
cagaaacccagagcuaauu

SEQ ID NO: 1824203 - RNA, 19 nt, Homo sapiens
  misc_RNA (1)...(19): siRNA sense strand
ccagcaguauggaaugguu

SEQ ID NO: 1824204 - RNA, 19 nt, Homo sapiens
  misc_RNA (1)...(19): siRNA sense strand
aagaauggccauauuguuc

SEQ ID NO: 1824205 - RNA, 19 nt, Homo sapiens
  misc_RNA (1)...(19): siRNA sense strand
ggaaugagcucaagaagaa

SEQ ID NO: 1824206 - RNA, 19 nt, Homo sapiens
  misc_RNA (1)...(19): siRNA sense strand
gaagaucuaucccuaugaa

SEQ ID NO: 1824207 - RNA, 19 nt, Homo sapiens
  misc_RNA (1)...(19): siRNA sense strand
caagaagccucccaucuau

SEQ ID NO: 1824208 - RNA, 19 nt, Homo sapiens
  misc_RNA (1)...(19): siRNA sense strand
gagccucacuucacuuauu

SEQ ID NO: 1824209 - RNA, 19 nt, Homo sapiens
  misc_RNA (1)...(19): siRNA sense strand
ggaggaagaugacgacucu

SEQ ID NO: 1824210 - RNA, 19 nt, Homo sapiens
  misc_RNA (1)...(19): siRNA sense strand
gaggaacucaguaagguua

SEQ ID NO: 1824211 - RNA, 19 nt, Homo sapiens
  misc_RNA (1)...(19): siRNA sense strand
uaagguuacuuccaacuug

SEQ ID NO: 1824212 - RNA, 19 nt, Homo sapiens
  misc_RNA (1)...(19): siRNA sense strand
cagaagaucuaucccuaug

SEQ ID NO: 1824213 - RNA, 19 nt, Homo sapiens
  misc_RNA (1)...(19): siRNA sense strand
ggaacucccugcccugugu

SEQ ID NO: 1824214 - RNA, 19 nt, Homo sapiens
  misc_RNA (1)...(19): siRNA sense strand
gagaggaacucaguaaggu

SEQ ID NO: 1824215 - RNA, 19 nt, Homo sapiens
  misc_RNA (1)...(19): siRNA sense strand
acaagaagccucccaucua

SEQ ID NO: 1824216 - RNA, 19 nt, Homo sapiens
  misc_RNA (1)...(19): siRNA sense strand
gaucuaucccuaugaaaug

SEQ ID NO: 1824217 - RNA, 19 nt, Homo sapiens
  misc_RNA (1)...(19): siRNA sense strand
ggacuucucaaggguauuu

SEQ ID NO: 1824218 - RNA, 19 nt, Homo sapiens
  misc_RNA (1)...(19): siRNA sense strand
ggcccgaccucaugaucua

SEQ ID NO: 1824219 - RNA, 19 nt, Homo sapiens
  misc_RNA (1)...(19): siRNA sense strand
agaagccucccaucuauaa

SEQ ID NO: 1824220 - RNA, 19 nt, Homo sapiens
  misc_RNA (1)...(19): siRNA sense strand
caucgaggaucucaucauc

SEQ ID NO: 1824221 - RNA, 19 nt, Homo sapiens
  misc_RNA (1)...(19): siRNA sense strand
gaccggacacccuuccaua

SEQ ID NO: 1824222 - RNA, 19 nt, Homo sapiens
  misc_RNA (1)...(19): siRNA sense strand
gaggacuucucaaggguau

SEQ ID NO: 1824223 - RNA, 19 nt, Homo sapiens
  misc_RNA (1)...(19): siRNA sense strand
gaucggaugcggcuugaga

SEQ ID NO: 1824224 - RNA, 19 nt, Homo sapiens
  misc_RNA (1)...(19): siRNA sense strand
ggaccagccugccccauuu

SEQ ID NO: 1824225 - RNA, 19 nt, Homo sapiens
  misc_RNA (1)...(19): siRNA sense strand
caucgagucauccaaguuu

SEQ ID NO: 1824226 - RNA, 19 nt, Homo sapiens
  misc_RNA (1)...(19): siRNA sense strand
uggccaagauggacaauca

SEQ ID NO: 1824227 - RNA, 19 nt, Homo sapiens
  misc_RNA (1)...(19): siRNA sense strand
cagggaacgucuaaaucuu

SEQ ID NO: 1824228 - RNA, 19 nt, Homo sapiens
  misc_RNA (1)...(19): siRNA sense strand
gcagaagaucuaucccuau

SEQ ID NO: 1824229 - RNA, 19 nt, Homo sapiens
  misc_RNA (1)...(19): siRNA sense strand
agagagaggaacucaguaa

SEQ ID NO: 1824230 - RNA, 19 nt, Homo sapiens
  misc_RNA (1)...(19): siRNA sense strand
gaucuacgagccucacuuc

SEQ ID NO: 1824231 - RNA, 19 nt, Homo sapiens
  misc_RNA (1)...(19): siRNA sense strand
cugcagaagcaaccacuua

SEQ ID NO: 1824232 - RNA, 19 nt, Homo sapiens
  misc_RNA (1)...(19): siRNA sense strand
ucagggagcgucagagaga

SEQ ID NO: 1824233 - RNA, 19 nt, Homo sapiens
  misc_RNA (1)...(19): siRNA sense strand
ccagggaacgucuaaaucu

SEQ ID NO: 1824234 - RNA, 19 nt, Homo sapiens
  misc_RNA (1)...(19): siRNA sense strand
ucaaggguauuugccaugu

SEQ ID NO: 1824235 - RNA, 19 nt, Homo sapiens
  misc_RNA (1)...(19): siRNA sense strand
cuacgagccucacuucacu

SEQ ID NO: 1824236 - RNA, 19 nt, Homo sapiens
  misc_RNA (1)...(19): siRNA sense strand
gaagcggaaugagcucaag

SEQ ID NO: 1824237 - RNA, 19 nt, Homo sapiens
  misc_RNA (1)...(19): siRNA sense strand
gcaagcuggcucuguggaa

SEQ ID NO: 1824238 - RNA, 19 nt, Homo sapiens
  misc_RNA (1)...(19): siRNA sense strand
ggaagaggaggaggaggaa

SEQ ID NO: 1824239 - RNA, 19 nt, Homo sapiens
  misc_RNA (1)...(19): siRNA sense strand
ucagagagaggaacucagu

SEQ ID NO: 1824240 - RNA, 19 nt, Homo sapiens
  misc_RNA (1)...(19): siRNA sense strand
auuccaacaucuacaagaa

SEQ ID NO: 1824241 - RNA, 19 nt, Homo sapiens
  misc_RNA (1)...(19): siRNA sense strand
aagaagagauggaaaaguc

SEQ ID NO: 1824242 - RNA, 19 nt, Homo sapiens
  misc_RNA (1)...(19): siRNA sense strand
cggaaugagcucaagaaga

SEQ ID NO: 1824243 - RNA, 19 nt, Homo sapiens
  misc_RNA (1)...(19): siRNA sense strand
ucaagaagaaggccucucu

SEQ ID NO: 1824244 - RNA, 19 nt, Homo sapiens
  misc_RNA (1)...(19): siRNA sense strand
caccagggaacgucuaaau

SEQ ID NO: 1824245 - RNA, 19 nt, Homo sapiens
  misc_RNA (1)...(19): siRNA sense strand
aagaagccucccaucuaua

SEQ ID NO: 1824246 - RNA, 19 nt, Homo sapiens
  misc_RNA (1)...(19): siRNA sense strand
ggaagcggaaugagcucaa

SEQ ID NO: 1824247 - RNA, 19 nt, Homo sapiens
  misc_RNA (1)...(19): siRNA sense strand
gagagaggaacucaguaag

SEQ ID NO: 1824248 - RNA, 19 nt, Homo sapiens
  misc_RNA (1)...(19): siRNA sense strand
ugaaagaagagauggaaaa

SEQ ID NO: 1824249 - RNA, 19 nt, Homo sapiens
  misc_RNA (1)...(19): siRNA sense strand
cgccuggaaucaucucuca

SEQ ID NO: 1824250 - RNA, 19 nt, Homo sapiens
  misc_RNA (1)...(19): siRNA sense strand
ccgcccagauuccaacauc

SEQ ID NO: 1824251 - RNA, 19 nt, Homo sapiens
  misc_RNA (1)...(19): siRNA sense strand
gauuccaacaucuacaaga

SEQ ID NO: 1824252 - RNA, 19 nt, Homo sapiens
  misc_RNA (1)...(19): siRNA sense strand
acaaggccauccuggacau

SEQ ID NO: 1824253 - RNA, 19 nt, Homo sapiens
  misc_RNA (1)...(19): siRNA sense strand
aagaggaggaggaggaaga

SEQ ID NO: 1824254 - RNA, 19 nt, Homo sapiens
  misc_RNA (1)...(19): siRNA sense strand
acgagccucacuucacuua

SEQ ID NO: 1824255 - RNA, 19 nt, Homo sapiens
  misc_RNA (1)...(19): siRNA sense strand
cauguccccugaagaguuu

SEQ ID NO: 1824256 - RNA, 19 nt, Homo sapiens
  misc_RNA (1)...(19): siRNA sense strand
agaucuaucccuaugaaau

SEQ ID NO: 1824257 - RNA, 19 nt, Homo sapiens
  misc_RNA (1)...(19): siRNA sense strand
gcuacaguccacagaguuc

SEQ ID NO: 1824258 - RNA, 19 nt, Homo sapiens
  misc_RNA (1)...(19): siRNA sense strand
cggcuacaguccacagagu

SEQ ID NO: 1824259 - RNA, 19 nt, Homo sapiens
  misc_RNA (1)...(19): siRNA sense strand
aggaggaggaggaagauga

SEQ ID NO: 1824260 - RNA, 19 nt, Homo sapiens
  misc_RNA (1)...(19): siRNA sense strand
caaggguauuugccauguc

SEQ ID NO: 1824261 - RNA, 19 nt, Homo sapiens
  misc_RNA (1)...(19): siRNA sense strand
cagagagaggaacucagua

SEQ ID NO: 1824262 - RNA, 19 nt, Homo sapiens
  misc_RNA (1)...(19): siRNA sense strand
caacugaucucuucucuga

SEQ ID NO: 1824263 - RNA, 19 nt, Homo sapiens
  misc_RNA (1)...(19): siRNA sense strand
ccaccaagauuucaugaua

SEQ ID NO: 1824264 - RNA, 19 nt, Homo sapiens
  misc_RNA (1)...(19): siRNA sense strand
gaaagaaccugugccaaug

SEQ ID NO: 1824265 - RNA, 19 nt, Homo sapiens
  misc_RNA (1)...(19): siRNA sense strand
ggccaaauaugaugcaaua

SEQ ID NO: 1824266 - RNA, 19 nt, Homo sapiens
  misc_RNA (1)...(19): siRNA sense strand
gaucggaacuccaacaaga

SEQ ID NO: 1824267 - RNA, 19 nt, Homo sapiens
  misc_RNA (1)...(19): siRNA sense strand
gcaaagguauccugaacaa

SEQ ID NO: 1824268 - RNA, 19 nt, Homo sapiens
  misc_RNA (1)...(19): siRNA sense strand
gcaagaaacagcagaauug

SEQ ID NO: 1824269 - RNA, 19 nt, Homo sapiens
  misc_RNA (1)...(19): siRNA sense strand
aaacggagcuacagauuau

SEQ ID NO: 1824270 - RNA, 19 nt, Homo sapiens
  misc_RNA (1)...(19): siRNA sense strand
ugucaaaggucaacaauga

SEQ ID NO: 1824271 - RNA, 19 nt, Homo sapiens
  misc_RNA (1)...(19): siRNA sense strand
ccacacagcauucuuguaa

SEQ ID NO: 1824272 - RNA, 19 nt, Homo sapiens
  misc_RNA (1)...(19): siRNA sense strand
gcaggaacaagaagacuua

SEQ ID NO: 1824273 - RNA, 19 nt, Homo sapiens
  misc_RNA (1)...(19): siRNA sense strand
gagaaggaagauacuauua

SEQ ID NO: 1824274 - RNA, 19 nt, Homo sapiens
  misc_RNA (1)...(19): siRNA sense strand
ugaauuaacuagucaggaa

SEQ ID NO: 1824275 - RNA, 19 nt, Homo sapiens
  misc_RNA (1)...(19): siRNA sense strand
ggaaauuaguucaaugcaa

SEQ ID NO: 1824276 - RNA, 19 nt, Homo sapiens
  misc_RNA (1)...(19): siRNA sense strand
ggagguccgugaaauauuc

SEQ ID NO: 1824277 - RNA, 19 nt, Homo sapiens
  misc_RNA (1)...(19): siRNA sense strand
aaucgcagaucuccacuua

SEQ ID NO: 1824278 - RNA, 19 nt, Homo sapiens
  misc_RNA (1)...(19): siRNA sense strand
ggaaagauuugggauuuag

SEQ ID NO: 1824279 - RNA, 19 nt, Homo sapiens
  misc_RNA (1)...(19): siRNA sense strand
gaugaaaucuuccugaaaa

SEQ ID NO: 1824280 - RNA, 19 nt, Homo sapiens
  misc_RNA (1)...(19): siRNA sense strand
cagaauggauuggaaguuu

SEQ ID NO: 1824281 - RNA, 19 nt, Homo sapiens
  misc_RNA (1)...(19): siRNA sense strand
gaagauaaggccaaauaug

SEQ ID NO: 1824282 - RNA, 19 nt, Homo sapiens
  misc_RNA (1)...(19): siRNA sense strand
ccaggaaucuccagcaaga

SEQ ID NO: 1824283 - RNA, 19 nt, Homo sapiens
  misc_RNA (1)...(19): siRNA sense strand
ugagugauauugaccauga

SEQ ID NO: 1824284 - RNA, 19 nt, Homo sapiens
  misc_RNA (1)...(19): siRNA sense strand
ggaacaagaagacuuagaa

SEQ ID NO: 1824285 - RNA, 19 nt, Homo sapiens
  misc_RNA (1)...(19): siRNA sense strand
gaaaagauccaucaacaaa

SEQ ID NO: 1824286 - RNA, 19 nt, Homo sapiens
  misc_RNA (1)...(19): siRNA sense strand
caaaugaaacugauggaaa

SEQ ID NO: 1824287 - RNA, 19 nt, Homo sapiens
  misc_RNA (1)...(19): siRNA sense strand
caagugagguucaggaucu

SEQ ID NO: 1824288 - RNA, 19 nt, Homo sapiens
  misc_RNA (1)...(19): siRNA sense strand
caaguccuguugcagauuu

SEQ ID NO: 1824289 - RNA, 19 nt, Homo sapiens
  misc_RNA (1)...(19): siRNA sense strand
caaauuggauucuccugau

SEQ ID NO: 1824290 - RNA, 19 nt, Homo sapiens
  misc_RNA (1)...(19): siRNA sense strand
gcaacguagugauuacaaa

SEQ ID NO: 1824291 - RNA, 19 nt, Homo sapiens
  misc_RNA (1)...(19): siRNA sense strand
ggagaauacuaaucugcaa

SEQ ID NO: 1824292 - RNA, 19 nt, Homo sapiens
  misc_RNA (1)...(19): siRNA sense strand
aagaagauaugaucgaaug

SEQ ID NO: 1824293 - RNA, 19 nt, Homo sapiens
  misc_RNA (1)...(19): siRNA sense strand
ccugaucccuuuaaacuga

SEQ ID NO: 1824294 - RNA, 19 nt, Homo sapiens
  misc_RNA (1)...(19): siRNA sense strand
ggauuucugucuggugaua

SEQ ID NO: 1824295 - RNA, 19 nt, Homo sapiens
  misc_RNA (1)...(19): siRNA sense strand
ggaggagaguguagaguca

SEQ ID NO: 1824296 - RNA, 19 nt, Homo sapiens
  misc_RNA (1)...(19): siRNA sense strand
auaaagauauggacggauu

SEQ ID NO: 1824297 - RNA, 19 nt, Homo sapiens
  misc_RNA (1)...(19): siRNA sense strand
ggaacuagauacucuuaac

SEQ ID NO: 1824298 - RNA, 19 nt, Homo sapiens
  misc_RNA (1)...(19): siRNA sense strand
agaggaagauccauuuaau

SEQ ID NO: 1824299 - RNA, 19 nt, Homo sapiens
  misc_RNA (1)...(19): siRNA sense strand
gacuacagcuguuacugaa

SEQ ID NO: 1824300 - RNA, 19 nt, Homo sapiens
  misc_RNA (1)...(19): siRNA sense strand
uaaacggagcuacagauua

SEQ ID NO: 1824301 - RNA, 19 nt, Homo sapiens
  misc_RNA (1)...(19): siRNA sense strand
ucaaggaagucagaaagaa

SEQ ID NO: 1824302 - RNA, 19 nt, Homo sapiens
  misc_RNA (1)...(19): siRNA sense strand
ggagaaggaagauacuauu

SEQ ID NO: 1824303 - RNA, 19 nt, Homo sapiens
  misc_RNA (1)...(19): siRNA sense strand
gcagaggcuugcccgacua

SEQ ID NO: 1824304 - RNA, 19 nt, Homo sapiens
  misc_RNA (1)...(19): siRNA sense strand
ucugaaagcugaauuaacu

SEQ ID NO: 1824305 - RNA, 19 nt, Homo sapiens
  misc_RNA (1)...(19): siRNA sense strand
aagauaaggccaaauauga

SEQ ID NO: 1824306 - RNA, 19 nt, Homo sapiens
  misc_RNA (1)...(19): siRNA sense strand
ugagauaucagaagcauga

SEQ ID NO: 1824307 - RNA, 19 nt, Homo sapiens
  misc_RNA (1)...(19): siRNA sense strand
uaaaucagcaggaacaaga

SEQ ID NO: 1824308 - RNA, 19 nt, Homo sapiens
  misc_RNA (1)...(19): siRNA sense strand
gcuacuaccacuaccaaua

SEQ ID NO: 1824309 - RNA, 19 nt, Homo sapiens
  misc_RNA (1)...(19): siRNA sense strand
ugaaauaguugaccuacag

SEQ ID NO: 1824310 - RNA, 19 nt, Homo sapiens
  misc_RNA (1)...(19): siRNA sense strand
ggauauccuuggaagaguu

SEQ ID NO: 1824311 - RNA, 19 nt, Homo sapiens
  misc_RNA (1)...(19): siRNA sense strand
uaaguuaccuguggauauc

SEQ ID NO: 1824312 - RNA, 19 nt, Homo sapiens
  misc_RNA (1)...(19): siRNA sense strand
ugaagaagauaugaucgaa

SEQ ID NO: 1824313 - RNA, 19 nt, Homo sapiens
  misc_RNA (1)...(19): siRNA sense strand
aaucagggcuuccagacuu

SEQ ID NO: 1824314 - RNA, 19 nt, Homo sapiens
  misc_RNA (1)...(19): siRNA sense strand
caaagguucagauccauuu

SEQ ID NO: 1824315 - RNA, 19 nt, Homo sapiens
  misc_RNA (1)...(19): siRNA sense strand
cuuaaucagucagaaguua

SEQ ID NO: 1824316 - RNA, 19 nt, Homo sapiens
  misc_RNA (1)...(19): siRNA sense strand
ugaaacugauggaaaugaa

SEQ ID NO: 1824317 - RNA, 19 nt, Homo sapiens
  misc_RNA (1)...(19): siRNA sense strand
gugggaauccuguauauga

SEQ ID NO: 1824318 - RNA, 19 nt, Homo sapiens
  misc_RNA (1)...(19): siRNA sense strand
gcuauuaaggaacuagaua

SEQ ID NO: 1824319 - RNA, 19 nt, Homo sapiens
  misc_RNA (1)...(19): siRNA sense strand
cuacuaccacuaccaauaa

SEQ ID NO: 1824320 - RNA, 19 nt, Homo sapiens
  misc_RNA (1)...(19): siRNA sense strand
ccaaagaucggaacuccaa

SEQ ID NO: 1824321 - RNA, 19 nt, Homo sapiens
  misc_RNA (1)...(19): siRNA sense strand
aaacaucggucaaaaguga

SEQ ID NO: 1824322 - RNA, 19 nt, Homo sapiens
  misc_RNA (1)...(19): siRNA sense strand
cagccaaccuuaaugaaca

SEQ ID NO: 1824323 - RNA, 19 nt, Homo sapiens
  misc_RNA (1)...(19): siRNA sense strand
cagcagcaccuacaagauu

SEQ ID NO: 1824324 - RNA, 19 nt, Homo sapiens
  misc_RNA (1)...(19): siRNA sense strand
gaaguucaaagggagaaua

SEQ ID NO: 1824325 - RNA, 19 nt, Homo sapiens
  misc_RNA (1)...(19): siRNA sense strand
ggaagauacuauuaaacag

SEQ ID NO: 1824326 - RNA, 19 nt, Homo sapiens
  misc_RNA (1)...(19): siRNA sense strand
gaaacagccaaccuuaaug

SEQ ID NO: 1824327 - RNA, 19 nt, Homo sapiens
  misc_RNA (1)...(19): siRNA sense strand
uuacaucgguagaaacguu

SEQ ID NO: 1824328 - RNA, 19 nt, Homo sapiens
  misc_RNA (1)...(19): siRNA sense strand
aaacagccaaccuuaauga

SEQ ID NO: 1824329 - RNA, 19 nt, Homo sapiens
  misc_RNA (1)...(19): siRNA sense strand
ugacagagaugaguuugca

SEQ ID NO: 1824330 - RNA, 19 nt, Homo sapiens
  misc_RNA (1)...(19): siRNA sense strand
caaccuuaaugaacauguu

SEQ ID NO: 1824331 - RNA, 19 nt, Homo sapiens
  misc_RNA (1)...(19): siRNA sense strand
caagugggaauccuguaua

SEQ ID NO: 1824332 - RNA, 19 nt, Homo sapiens
  misc_RNA (1)...(19): siRNA sense strand
caaggaagucagaaagaaa

SEQ ID NO: 1824333 - RNA, 19 nt, Homo sapiens
  misc_RNA (1)...(19): siRNA sense strand
ggaagaguuugggaguuga

SEQ ID NO: 1824334 - RNA, 19 nt, Homo sapiens
  misc_RNA (1)...(19): siRNA sense strand
gcaucagacuguuucuuca

SEQ ID NO: 1824335 - RNA, 19 nt, Homo sapiens
  misc_RNA (1)...(19): siRNA sense strand
gcagauacaaacuuggauu

SEQ ID NO: 1824336 - RNA, 19 nt, Homo sapiens
  misc_RNA (1)...(19): siRNA sense strand
cgacaauaauagacauuca

SEQ ID NO: 1824337 - RNA, 19 nt, Homo sapiens
  misc_RNA (1)...(19): siRNA sense strand
ugaaacagccaaccuuaau

SEQ ID NO: 1824338 - RNA, 19 nt, Homo sapiens
  misc_RNA (1)...(19): siRNA sense strand
guaaacggagcuacagauu

SEQ ID NO: 1824339 - RNA, 19 nt, Homo sapiens
  misc_RNA (1)...(19): siRNA sense strand
gaaacugauggaaaugaaa

SEQ ID NO: 1824340 - RNA, 19 nt, Homo sapiens
  misc_RNA (1)...(19): siRNA sense strand
acugaucucuucucugaaa

SEQ ID NO: 1824341 - RNA, 19 nt, Homo sapiens
  misc_RNA (1)...(19): siRNA sense strand
ggaaaagaauaauguggaa

SEQ ID NO: 1824342 - RNA, 19 nt, Homo sapiens
  misc_RNA (1)...(19): siRNA sense strand
gaacuagauacucuuaaca

SEQ ID NO: 1824343 - RNA, 19 nt, Homo sapiens
  misc_RNA (1)...(19): siRNA sense strand
gauaaggccaaauaugaug

SEQ ID NO: 1824344 - RNA, 19 nt, Homo sapiens
  misc_RNA (1)...(19): siRNA sense strand
uggaaagauuugggauuua

SEQ ID NO: 1824345 - RNA, 19 nt, Homo sapiens
  misc_RNA (1)...(19): siRNA sense strand
guucaaagggagaauacua

SEQ ID NO: 1824346 - RNA, 19 nt, Homo sapiens
  misc_RNA (1)...(19): siRNA sense strand
aacaggaccuuaaggagaa

SEQ ID NO: 1824347 - RNA, 19 nt, Homo sapiens
  misc_RNA (1)...(19): siRNA sense strand
caucagacagggccaguuu

SEQ ID NO: 1824348 - RNA, 19 nt, Homo sapiens
  misc_RNA (1)...(19): siRNA sense strand
ggucaaaagugaagaugaa

SEQ ID NO: 1824349 - RNA, 19 nt, Homo sapiens
  misc_RNA (1)...(19): siRNA sense strand
uagaaacguugaagcacaa

SEQ ID NO: 1824350 - RNA, 19 nt, Homo sapiens
  misc_RNA (1)...(19): siRNA sense strand
uuggaaagauuugggauuu

SEQ ID NO: 1824351 - RNA, 19 nt, Homo sapiens
  misc_RNA (1)...(19): siRNA sense strand
ggauuggaaguuucacuaa

SEQ ID NO: 1824352 - RNA, 19 nt, Homo sapiens
  misc_RNA (1)...(19): siRNA sense strand
aaagaggaagauccauuua

SEQ ID NO: 1824353 - RNA, 19 nt, Homo sapiens
  misc_RNA (1)...(19): siRNA sense strand
caguuaaauuggugcagua

SEQ ID NO: 1824354 - RNA, 19 nt, Homo sapiens
  misc_RNA (1)...(19): siRNA sense strand
caacaggaaauuaguucaa

SEQ ID NO: 1824355 - RNA, 19 nt, Homo sapiens
  misc_RNA (1)...(19): siRNA sense strand
uuaaggaacuagauacucu

SEQ ID NO: 1824356 - RNA, 19 nt, Homo sapiens
  misc_RNA (1)...(19): siRNA sense strand
gaacaucauaggaucaagu

SEQ ID NO: 1824357 - RNA, 19 nt, Homo sapiens
  misc_RNA (1)...(19): siRNA sense strand
agaaagaaccugugccaau

SEQ ID NO: 1824358 - RNA, 19 nt, Homo sapiens
  misc_RNA (1)...(19): siRNA sense strand
cugaagauaaggccaaaua

SEQ ID NO: 1824359 - RNA, 19 nt, Homo sapiens
  misc_RNA (1)...(19): siRNA sense strand
ggaacuccuugaugaacug

SEQ ID NO: 1824360 - RNA, 19 nt, Homo sapiens
  misc_RNA (1)...(19): siRNA sense strand
gugcuuaucccucugaaga

SEQ ID NO: 1824361 - RNA, 19 nt, Homo sapiens
  misc_RNA (1)...(19): siRNA sense strand
gggaaaagauccaucaaca

SEQ ID NO: 1824362 - RNA, 19 nt, Homo sapiens
  misc_RNA (1)...(19): siRNA sense strand
gaagaaagcuauggcaauu

SEQ ID NO: 1824363 - RNA, 19 nt, Homo sapiens
  misc_RNA (1)...(19): siRNA sense strand
gaagagauauucuagaagu

SEQ ID NO: 1824364 - RNA, 19 nt, Homo sapiens
  misc_RNA (1)...(19): siRNA sense strand
caucgaaucuugcgaacaa

SEQ ID NO: 1824365 - RNA, 19 nt, Homo sapiens
  misc_RNA (1)...(19): siRNA sense strand
gggcggugcuggcuaagua

SEQ ID NO: 1824366 - RNA, 19 nt, Homo sapiens
  misc_RNA (1)...(19): siRNA sense strand
ccaaauccuuccuccuaua

SEQ ID NO: 1824367 - RNA, 19 nt, Homo sapiens
  misc_RNA (1)...(19): siRNA sense strand
caaagcgcauggagacuaa

SEQ ID NO: 1824368 - RNA, 19 nt, Homo sapiens
  misc_RNA (1)...(19): siRNA sense strand
gaucaauggucucagaaau

SEQ ID NO: 1824369 - RNA, 19 nt, Homo sapiens
  misc_RNA (1)...(19): siRNA sense strand
gaauuugaagccuacauua

SEQ ID NO: 1824370 - RNA, 19 nt, Homo sapiens
  misc_RNA (1)...(19): siRNA sense strand
gaacauggaauugugguuu

SEQ ID NO: 1824371 - RNA, 19 nt, Homo sapiens
  misc_RNA (1)...(19): siRNA sense strand
gcacaucaaagaagagaaa

SEQ ID NO: 1824372 - RNA, 19 nt, Homo sapiens
  misc_RNA (1)...(19): siRNA sense strand
gccacuaucucaggaauuu

SEQ ID NO: 1824373 - RNA, 19 nt, Homo sapiens
  misc_RNA (1)...(19): siRNA sense strand
ggagugacccugaauguuc

SEQ ID NO: 1824374 - RNA, 19 nt, Homo sapiens
  misc_RNA (1)...(19): siRNA sense strand
cugaagagauauucuagaa

SEQ ID NO: 1824375 - RNA, 19 nt, Homo sapiens
  misc_RNA (1)...(19): siRNA sense strand
ggcaauugcugaugcuuug

SEQ ID NO: 1824376 - RNA, 19 nt, Homo sapiens
  misc_RNA (1)...(19): siRNA sense strand
guguggagcuacugcauaa

SEQ ID NO: 1824377 - RNA, 19 nt, Homo sapiens
  misc_RNA (1)...(19): siRNA sense strand
gcaaagcgcauggagacua

SEQ ID NO: 1824378 - RNA, 19 nt, Homo sapiens
  misc_RNA (1)...(19): siRNA sense strand
ucaauggucucagaaauuc

SEQ ID NO: 1824379 - RNA, 19 nt, Homo sapiens
  misc_RNA (1)...(19): siRNA sense strand
ccaugugacuuagacuuua

SEQ ID NO: 1824380 - RNA, 19 nt, Homo sapiens
  misc_RNA (1)...(19): siRNA sense strand
gaauaugcacaucaaagaa

SEQ ID NO: 1824381 - RNA, 19 nt, Homo sapiens
  misc_RNA (1)...(19): siRNA sense strand
cuagaaguauggcaauuau

SEQ ID NO: 1824382 - RNA, 19 nt, Homo sapiens
  misc_RNA (1)...(19): siRNA sense strand
gagauauucuagaaguaug

SEQ ID NO: 1824383 - RNA, 19 nt, Homo sapiens
  misc_RNA (1)...(19): siRNA sense strand
uaagaaagcccacaaaucc

SEQ ID NO: 1824384 - RNA, 19 nt, Homo sapiens
  misc_RNA (1)...(19): siRNA sense strand
ggaauuugaagccuacauu

SEQ ID NO: 1824385 - RNA, 19 nt, Homo sapiens
  misc_RNA (1)...(19): siRNA sense strand
guauggcaauuaugaacaa

SEQ ID NO: 1824386 - RNA, 19 nt, Homo sapiens
  misc_RNA (1)...(19): siRNA sense strand
gcgaacaacacgauacuug

SEQ ID NO: 1824387 - RNA, 19 nt, Homo sapiens
  misc_RNA (1)...(19): siRNA sense strand
caugugacuuagacuuuaa

SEQ ID NO: 1824388 - RNA, 19 nt, Homo sapiens
  misc_RNA (1)...(19): siRNA sense strand
ccuccuauauuccuaaguu

SEQ ID NO: 1824389 - RNA, 19 nt, Homo sapiens
  misc_RNA (1)...(19): siRNA sense strand
gaauugugguuuucucuuu

SEQ ID NO: 1824390 - RNA, 19 nt, Homo sapiens
  misc_RNA (1)...(19): siRNA sense strand
cacaugacauuccugcaaa

SEQ ID NO: 1824391 - RNA, 19 nt, Homo sapiens
  misc_RNA (1)...(19): siRNA sense strand
ggacccagaaggaauuuga

SEQ ID NO: 1824392 - RNA, 19 nt, Homo sapiens
  misc_RNA (1)...(19): siRNA sense strand
gagcuggagugacccugaa

SEQ ID NO: 1824393 - RNA, 19 nt, Homo sapiens
  misc_RNA (1)...(19): siRNA sense strand
agaaguauggcaauuauga

SEQ ID NO: 1824394 - RNA, 19 nt, Homo sapiens
  misc_RNA (1)...(19): siRNA sense strand
gaaguauggcaauuaugaa

SEQ ID NO: 1824395 - RNA, 19 nt, Homo sapiens
  misc_RNA (1)...(19): siRNA sense strand
ccugaaugcuacuuccuuu

SEQ ID NO: 1824396 - RNA, 19 nt, Homo sapiens
  misc_RNA (1)...(19): siRNA sense strand
guccaaauccuuccuccua

SEQ ID NO: 1824397 - RNA, 19 nt, Homo sapiens
  misc_RNA (1)...(19): siRNA sense strand
ugaauaugcacaucaaaga

SEQ ID NO: 1824398 - RNA, 19 nt, Homo sapiens
  misc_RNA (1)...(19): siRNA sense strand
gaaugcuacuuccuuugau

SEQ ID NO: 1824399 - RNA, 19 nt, Homo sapiens
  misc_RNA (1)...(19): siRNA sense strand
gucgauuccugcuguguuu

SEQ ID NO: 1824400 - RNA, 19 nt, Homo sapiens
  misc_RNA (1)...(19): siRNA sense strand
ugaaugcuacuuccuuuga

SEQ ID NO: 1824401 - RNA, 19 nt, Homo sapiens
  misc_RNA (1)...(19): siRNA sense strand
ggaauuugaucgcguuacg

SEQ ID NO: 1824402 - RNA, 19 nt, Homo sapiens
  misc_RNA (1)...(19): siRNA sense strand
cgugauugguuuccucuug

SEQ ID NO: 1824403 - RNA, 19 nt, Homo sapiens
  misc_RNA (1)...(19): siRNA sense strand
gacccugaauguucuggaa

SEQ ID NO: 1824404 - RNA, 19 nt, Homo sapiens
  misc_RNA (1)...(19): siRNA sense strand
gcuaaguaccugucgauuc

SEQ ID NO: 1824405 - RNA, 19 nt, Homo sapiens
  misc_RNA (1)...(19): siRNA sense strand
cccacgaccucaccuggua

SEQ ID NO: 1824406 - RNA, 19 nt, Homo sapiens
  misc_RNA (1)...(19): siRNA sense strand
gugaucagauggacaaugc

SEQ ID NO: 1824407 - RNA, 19 nt, Homo sapiens
  misc_RNA (1)...(19): siRNA sense strand
ccacaugacauuccugcaa

SEQ ID NO: 1824408 - RNA, 19 nt, Homo sapiens
  misc_RNA (1)...(19): siRNA sense strand
caaauccuuccuccuauau

SEQ ID NO: 1824409 - RNA, 19 nt, Homo sapiens
  misc_RNA (1)...(19): siRNA sense strand
cuaaguaccugucgauucc

SEQ ID NO: 1824410 - RNA, 19 nt, Homo sapiens
  misc_RNA (1)...(19): siRNA sense strand
gaugacccgugccuuuauc

SEQ ID NO: 1824411 - RNA, 19 nt, Homo sapiens
  misc_RNA (1)...(19): siRNA sense strand
uggcaauuaugaacaaugu

SEQ ID NO: 1824412 - RNA, 19 nt, Homo sapiens
  misc_RNA (1)...(19): siRNA sense strand
cuucaucaccuuuaaaugu

SEQ ID NO: 1824413 - RNA, 19 nt, Homo sapiens
  misc_RNA (1)...(19): siRNA sense strand
gaucagauggacaaugcaa

SEQ ID NO: 1824414 - RNA, 19 nt, Homo sapiens
  misc_RNA (1)...(19): siRNA sense strand
ucuagaaguauggcaauua

SEQ ID NO: 1824415 - RNA, 19 nt, Homo sapiens
  misc_RNA (1)...(19): siRNA sense strand
gaaauuccagagaagaaag

SEQ ID NO: 1824416 - RNA, 19 nt, Homo sapiens
  misc_RNA (1)...(19): siRNA sense strand
ugguggaucuugucagcua

SEQ ID NO: 1824417 - RNA, 19 nt, Homo sapiens
  misc_RNA (1)...(19): siRNA sense strand
uggagcuacugcauaauga

SEQ ID NO: 1824418 - RNA, 19 nt, Homo sapiens
  misc_RNA (1)...(19): siRNA sense strand
ccuuggacgugauugguuu

SEQ ID NO: 1824419 - RNA, 19 nt, Homo sapiens
  misc_RNA (1)...(19): siRNA sense strand
ccgaugacccgugccuuua

SEQ ID NO: 1824420 - RNA, 19 nt, Homo sapiens
  misc_RNA (1)...(19): siRNA sense strand
agaaagcuauggcaauugc

SEQ ID NO: 1824421 - RNA, 19 nt, Homo sapiens
  misc_RNA (1)...(19): siRNA sense strand
cagaaauuccagagaagaa

SEQ ID NO: 1824422 - RNA, 19 nt, Homo sapiens
  misc_RNA (1)...(19): siRNA sense strand
uggagaacauggaauugug

SEQ ID NO: 1824423 - RNA, 19 nt, Homo sapiens
  misc_RNA (1)...(19): siRNA sense strand
gcaaagggucaagaacaug

SEQ ID NO: 1824424 - RNA, 19 nt, Homo sapiens
  misc_RNA (1)...(19): siRNA sense strand
ggaucaauggucucagaaa

SEQ ID NO: 1824425 - RNA, 19 nt, Homo sapiens
  misc_RNA (1)...(19): siRNA sense strand
uuugaagccuacauuaaug

SEQ ID NO: 1824426 - RNA, 19 nt, Homo sapiens
  misc_RNA (1)...(19): siRNA sense strand
gggacuuugugauggacua

SEQ ID NO: 1824427 - RNA, 19 nt, Homo sapiens
  misc_RNA (1)...(19): siRNA sense strand
guuaagaaagcccacaaau

SEQ ID NO: 1824428 - RNA, 19 nt, Homo sapiens
  misc_RNA (1)...(19): siRNA sense strand
gagugacccugaauguucu

SEQ ID NO: 1824429 - RNA, 19 nt, Homo sapiens
  misc_RNA (1)...(19): siRNA sense strand
aauccuuccuccuauauuc

SEQ ID NO: 1824430 - RNA, 19 nt, Homo sapiens
  misc_RNA (1)...(19): siRNA sense strand
uuaagaaagcccacaaauc

SEQ ID NO: 1824431 - RNA, 19 nt, Homo sapiens
  misc_RNA (1)...(19): siRNA sense strand
ggccagaggacuccagguu

SEQ ID NO: 1824432 - RNA, 19 nt, Homo sapiens
  misc_RNA (1)...(19): siRNA sense strand
acaaauccaagacccauug

SEQ ID NO: 1824433 - RNA, 19 nt, Homo sapiens
  misc_RNA (1)...(19): siRNA sense strand
gugaugaugcccuuguuug

SEQ ID NO: 1824434 - RNA, 19 nt, Homo sapiens
  misc_RNA (1)...(19): siRNA sense strand
ugggaucaauggucucaga

SEQ ID NO: 1824435 - RNA, 19 nt, Homo sapiens
  misc_RNA (1)...(19): siRNA sense strand
gaacccgaccaucgaaucu

SEQ ID NO: 1824436 - RNA, 19 nt, Homo sapiens
  misc_RNA (1)...(19): siRNA sense strand
caauucagaccacaugaca

SEQ ID NO: 1824437 - RNA, 19 nt, Homo sapiens
  misc_RNA (1)...(19): siRNA sense strand
agaaagcccacaaauccaa

SEQ ID NO: 1824438 - RNA, 19 nt, Homo sapiens
  misc_RNA (1)...(19): siRNA sense strand
gaccaauucagaccacaug

SEQ ID NO: 1824439 - RNA, 19 nt, Homo sapiens
  misc_RNA (1)...(19): siRNA sense strand
ugaauguucuggaaaugac

SEQ ID NO: 1824440 - RNA, 19 nt, Homo sapiens
  misc_RNA (1)...(19): siRNA sense strand
ggugaugaugcccuuguuu

SEQ ID NO: 1824441 - RNA, 19 nt, Homo sapiens
  misc_RNA (1)...(19): siRNA sense strand
agaagaaagcuauggcaau

SEQ ID NO: 1824442 - RNA, 19 nt, Homo sapiens
  misc_RNA (1)...(19): siRNA sense strand
gaucuugucagcuaugcau

SEQ ID NO: 1824443 - RNA, 19 nt, Homo sapiens
  misc_RNA (1)...(19): siRNA sense strand
ugcaaagggucaagaacau

SEQ ID NO: 1824444 - RNA, 19 nt, Homo sapiens
  misc_RNA (1)...(19): siRNA sense strand
guggagcuacugcauaaug

SEQ ID NO: 1824445 - RNA, 19 nt, Homo sapiens
  misc_RNA (1)...(19): siRNA sense strand
agucuugccucugagcuuu

SEQ ID NO: 1824446 - RNA, 19 nt, Homo sapiens
  misc_RNA (1)...(19): siRNA sense strand
cuccuauauuccuaaguua

SEQ ID NO: 1824447 - RNA, 19 nt, Homo sapiens
  misc_RNA (1)...(19): siRNA sense strand
uccaaauccuuccuccuau

SEQ ID NO: 1824448 - RNA, 19 nt, Homo sapiens
  misc_RNA (1)...(19): siRNA sense strand
ucaucaccuuuaaauguug

SEQ ID NO: 1824449 - RNA, 19 nt, Homo sapiens
  misc_RNA (1)...(19): siRNA sense strand
gaggugaauaugcacauca

SEQ ID NO: 1824450 - RNA, 19 nt, Homo sapiens
  misc_RNA (1)...(19): siRNA sense strand
uuaaguggcuaccccaaaa

SEQ ID NO: 1824451 - RNA, 19 nt, Homo sapiens
  misc_RNA (1)...(19): siRNA sense strand
ggaacccgaccaucgaauc

SEQ ID NO: 1824452 - RNA, 19 nt, Homo sapiens
  misc_RNA (1)...(19): siRNA sense strand
caacgggaagccacuaucu

SEQ ID NO: 1824453 - RNA, 19 nt, Homo sapiens
  misc_RNA (1)...(19): siRNA sense strand
gugaauaugcacaucaaag

SEQ ID NO: 1824454 - RNA, 19 nt, Homo sapiens
  misc_RNA (1)...(19): siRNA sense strand
caaauccaagacccauuga

SEQ ID NO: 1824455 - RNA, 19 nt, Homo sapiens
  misc_RNA (1)...(19): siRNA sense strand
auucagaccacaugacauu

SEQ ID NO: 1824456 - RNA, 19 nt, Homo sapiens
  misc_RNA (1)...(19): siRNA sense strand
caaggguucuuugaaacag

SEQ ID NO: 1824457 - RNA, 19 nt, Homo sapiens
  misc_RNA (1)...(19): siRNA sense strand
cauggacccagaaggaauu

SEQ ID NO: 1824458 - RNA, 19 nt, Homo sapiens
  misc_RNA (1)...(19): siRNA sense strand
cauaaugaggcccugauca

SEQ ID NO: 1824459 - RNA, 19 nt, Homo sapiens
  misc_RNA (1)...(19): siRNA sense strand
ugucagugguggaucuugu

SEQ ID NO: 1824460 - RNA, 19 nt, Homo sapiens
  misc_RNA (1)...(19): siRNA sense strand
ggguggaguuugugaugag

SEQ ID NO: 1824461 - RNA, 19 nt, Homo sapiens
  misc_RNA (1)...(19): siRNA sense strand
uggccuucaucaccuuuaa

SEQ ID NO: 1824462 - RNA, 19 nt, Homo sapiens
  misc_RNA (1)...(19): siRNA sense strand
ggaccgagaugcugagaua

SEQ ID NO: 1824463 - RNA, 19 nt, Homo sapiens
  misc_RNA (1)...(19): siRNA sense strand
gaucaaacauccuguguca

SEQ ID NO: 1824464 - RNA, 19 nt, Homo sapiens
  misc_RNA (1)...(19): siRNA sense strand
uuaaagaacuagccaauga

SEQ ID NO: 1824465 - RNA, 19 nt, Homo sapiens
  misc_RNA (1)...(19): siRNA sense strand
gagcaacauugauggauuu

SEQ ID NO: 1824466 - RNA, 19 nt, Homo sapiens
  misc_RNA (1)...(19): siRNA sense strand
gagaaagugucaaugugua

SEQ ID NO: 1824467 - RNA, 19 nt, Homo sapiens
  misc_RNA (1)...(19): siRNA sense strand
gacuagacaucaagcauaa

SEQ ID NO: 1824468 - RNA, 19 nt, Homo sapiens
  misc_RNA (1)...(19): siRNA sense strand
gcaaggguaugaagagaug

SEQ ID NO: 1824469 - RNA, 19 nt, Homo sapiens
  misc_RNA (1)...(19): siRNA sense strand
ggagauagcgccuaccauu

SEQ ID NO: 1824470 - RNA, 19 nt, Homo sapiens
  misc_RNA (1)...(19): siRNA sense strand
caacauugauggauuugug

SEQ ID NO: 1824471 - RNA, 19 nt, Homo sapiens
  misc_RNA (1)...(19): siRNA sense strand
gggcguaucuauauaagug

SEQ ID NO: 1824472 - RNA, 19 nt, Homo sapiens
  misc_RNA (1)...(19): siRNA sense strand
gagaagaacgauaagcuuu

SEQ ID NO: 1824473 - RNA, 19 nt, Homo sapiens
  misc_RNA (1)...(19): siRNA sense strand
gaagaacgauaagcuuugu

SEQ ID NO: 1824474 - RNA, 19 nt, Homo sapiens
  misc_RNA (1)...(19): siRNA sense strand
cagagaagcucaaugucuu

SEQ ID NO: 1824475 - RNA, 19 nt, Homo sapiens
  misc_RNA (1)...(19): siRNA sense strand
ggauggcccuugagaguau

SEQ ID NO: 1824476 - RNA, 19 nt, Homo sapiens
  misc_RNA (1)...(19): siRNA sense strand
aagaggaugucaacgguua

SEQ ID NO: 1824477 - RNA, 19 nt, Homo sapiens
  misc_RNA (1)...(19): siRNA sense strand
gaacauucgcccaaccuuu

SEQ ID NO: 1824478 - RNA, 19 nt, Homo sapiens
  misc_RNA (1)...(19): siRNA sense strand
gcacaacuccagaugaaga

SEQ ID NO: 1824479 - RNA, 19 nt, Homo sapiens
  misc_RNA (1)...(19): siRNA sense strand
ggucuacgaugggaaguuu

SEQ ID NO: 1824480 - RNA, 19 nt, Homo sapiens
  misc_RNA (1)...(19): siRNA sense strand
caagauggaaguagauaaa

SEQ ID NO: 1824481 - RNA, 19 nt, Homo sapiens
  misc_RNA (1)...(19): siRNA sense strand
gaaacgugcuacucaaguc

SEQ ID NO: 1824482 - RNA, 19 nt, Homo sapiens
  misc_RNA (1)...(19): siRNA sense strand
ggucaucucugcagcuugu

SEQ ID NO: 1824483 - RNA, 19 nt, Homo sapiens
  misc_RNA (1)...(19): siRNA sense strand
gaugauugaugagaacauu

SEQ ID NO: 1824484 - RNA, 19 nt, Homo sapiens
  misc_RNA (1)...(19): siRNA sense strand
uaccagaccugcuagagaa

SEQ ID NO: 1824485 - RNA, 19 nt, Homo sapiens
  misc_RNA (1)...(19): siRNA sense strand
uacgggagaucacagguua

SEQ ID NO: 1824486 - RNA, 19 nt, Homo sapiens
  misc_RNA (1)...(19): siRNA sense strand
cacgguaucuggucauaaa

SEQ ID NO: 1824487 - RNA, 19 nt, Homo sapiens
  misc_RNA (1)...(19): siRNA sense strand
gcuugucacucaauauuug

SEQ ID NO: 1824488 - RNA, 19 nt, Homo sapiens
  misc_RNA (1)...(19): siRNA sense strand
guacccagauguucagaau

SEQ ID NO: 1824489 - RNA, 19 nt, Homo sapiens
  misc_RNA (1)...(19): siRNA sense strand
gagggugaaucaaucaaga

SEQ ID NO: 1824490 - RNA, 19 nt, Homo sapiens
  misc_RNA (1)...(19): siRNA sense strand
ggaccaugcccacauugua

SEQ ID NO: 1824491 - RNA, 19 nt, Homo sapiens
  misc_RNA (1)...(19): siRNA sense strand
ugacucagcucaccgagau

SEQ ID NO: 1824492 - RNA, 19 nt, Homo sapiens
  misc_RNA (1)...(19): siRNA sense strand
acaagaagcuagaggaagu

SEQ ID NO: 1824493 - RNA, 19 nt, Homo sapiens
  misc_RNA (1)...(19): siRNA sense strand
ccaaugaguucaccaggau

SEQ ID NO: 1824494 - RNA, 19 nt, Homo sapiens
  misc_RNA (1)...(19): siRNA sense strand
ggucaaguguuggaugauu

SEQ ID NO: 1824495 - RNA, 19 nt, Homo sapiens
  misc_RNA (1)...(19): siRNA sense strand
gaagacugccagacauuga

SEQ ID NO: 1824496 - RNA, 19 nt, Homo sapiens
  misc_RNA (1)...(19): siRNA sense strand
gagcaaggguaugaagaga

SEQ ID NO: 1824497 - RNA, 19 nt, Homo sapiens
  misc_RNA (1)...(19): siRNA sense strand
gaaauacacacaccagagu

SEQ ID NO: 1824498 - RNA, 19 nt, Homo sapiens
  misc_RNA (1)...(19): siRNA sense strand
gaccaugcccacauuguaa

SEQ ID NO: 1824499 - RNA, 19 nt, Homo sapiens
  misc_RNA (1)...(19): siRNA sense strand
ugagaaggcuaacaaaguc

SEQ ID NO: 1824500 - RNA, 19 nt, Homo sapiens
  misc_RNA (1)...(19): siRNA sense strand
gaagagcgacuagacauca

SEQ ID NO: 1824501 - RNA, 19 nt, Homo sapiens
  misc_RNA (1)...(19): siRNA sense strand
cagaugaagacuaugaaua

SEQ ID NO: 1824502 - RNA, 19 nt, Homo sapiens
  misc_RNA (1)...(19): siRNA sense strand
ggagaaagugucaaugugu

SEQ ID NO: 1824503 - RNA, 19 nt, Homo sapiens
  misc_RNA (1)...(19): siRNA sense strand
cgacuagacaucaagcaua

SEQ ID NO: 1824504 - RNA, 19 nt, Homo sapiens
  misc_RNA (1)...(19): siRNA sense strand
gcuauggugugacaguuug

SEQ ID NO: 1824505 - RNA, 19 nt, Homo sapiens
  misc_RNA (1)...(19): siRNA sense strand
gaucauaugcuggccauug

SEQ ID NO: 1824506 - RNA, 19 nt, Homo sapiens
  misc_RNA (1)...(19): siRNA sense strand
gacaaacacuggugcugau

SEQ ID NO: 1824507 - RNA, 19 nt, Homo sapiens
  misc_RNA (1)...(19): siRNA sense strand
augcacaacuucaguguuu

SEQ ID NO: 1824508 - RNA, 19 nt, Homo sapiens
  misc_RNA (1)...(19): siRNA sense strand
gcaguggauucgagaagug

SEQ ID NO: 1824509 - RNA, 19 nt, Homo sapiens
  misc_RNA (1)...(19): siRNA sense strand
agaagaagaugaagaugag

SEQ ID NO: 1824510 - RNA, 19 nt, Homo sapiens
  misc_RNA (1)...(19): siRNA sense strand
ugucaacgguuaugucaug

SEQ ID NO: 1824511 - RNA, 19 nt, Homo sapiens
  misc_RNA (1)...(19): siRNA sense strand
ggccaagacuccaauuaag

SEQ ID NO: 1824512 - RNA, 19 nt, Homo sapiens
  misc_RNA (1)...(19): siRNA sense strand
cgagcaacauugauggauu

SEQ ID NO: 1824513 - RNA, 19 nt, Homo sapiens
  misc_RNA (1)...(19): siRNA sense strand
acccagauguucagaauga

SEQ ID NO: 1824514 - RNA, 19 nt, Homo sapiens
  misc_RNA (1)...(19): siRNA sense strand
uugaggagcuggguuauga

SEQ ID NO: 1824515 - RNA, 19 nt, Homo sapiens
  misc_RNA (1)...(19): siRNA sense strand
aagaugaggaguaugaaua

SEQ ID NO: 1824516 - RNA, 19 nt, Homo sapiens
  misc_RNA (1)...(19): siRNA sense strand
ucaagacuguuuaggacaa

SEQ ID NO: 1824517 - RNA, 19 nt, Homo sapiens
  misc_RNA (1)...(19): siRNA sense strand
ggagcuggguuaugaguac

SEQ ID NO: 1824518 - RNA, 19 nt, Homo sapiens
  misc_RNA (1)...(19): siRNA sense strand
caucugugcuccucagugu

SEQ ID NO: 1824519 - RNA, 19 nt, Homo sapiens
  misc_RNA (1)...(19): siRNA sense strand
uuaaguggauggcccuuga

SEQ ID NO: 1824520 - RNA, 19 nt, Homo sapiens
  misc_RNA (1)...(19): siRNA sense strand
ugacagugauagcaggauu

SEQ ID NO: 1824521 - RNA, 19 nt, Homo sapiens
  misc_RNA (1)...(19): siRNA sense strand
ugaaguaccagaccugcua

SEQ ID NO: 1824522 - RNA, 19 nt, Homo sapiens
  misc_RNA (1)...(19): siRNA sense strand
guacugaagaagaagauga

SEQ ID NO: 1824523 - RNA, 19 nt, Homo sapiens
  misc_RNA (1)...(19): siRNA sense strand
gguuaugucaugccagaua

SEQ ID NO: 1824524 - RNA, 19 nt, Homo sapiens
  misc_RNA (1)...(19): siRNA sense strand
acaauggcuuugacaguga

SEQ ID NO: 1824525 - RNA, 19 nt, Homo sapiens
  misc_RNA (1)...(19): siRNA sense strand
ugaagaagaagaugaagau

SEQ ID NO: 1824526 - RNA, 19 nt, Homo sapiens
  misc_RNA (1)...(19): siRNA sense strand
gaggccaagacuccaauua

SEQ ID NO: 1824527 - RNA, 19 nt, Homo sapiens
  misc_RNA (1)...(19): siRNA sense strand
gugcugggcguaucuauau

SEQ ID NO: 1824528 - RNA, 19 nt, Homo sapiens
  misc_RNA (1)...(19): siRNA sense strand
aggcacaacuccagaugaa

SEQ ID NO: 1824529 - RNA, 19 nt, Homo sapiens
  misc_RNA (1)...(19): siRNA sense strand
gaagaugaggaguaugaau

SEQ ID NO: 1824530 - RNA, 19 nt, Homo sapiens
  misc_RNA (1)...(19): siRNA sense strand
aacauucgcccaaccuuua

SEQ ID NO: 1824531 - RNA, 19 nt, Homo sapiens
  misc_RNA (1)...(19): siRNA sense strand
gagcuauggugugacaguu

SEQ ID NO: 1824532 - RNA, 19 nt, Homo sapiens
  misc_RNA (1)...(19): siRNA sense strand
ucagaagacugccagacau

SEQ ID NO: 1824533 - RNA, 19 nt, Homo sapiens
  misc_RNA (1)...(19): siRNA sense strand
ccaggagucugcaguuucu

SEQ ID NO: 1824534 - RNA, 19 nt, Homo sapiens
  misc_RNA (1)...(19): siRNA sense strand
gaagcuagaggaaguagag

SEQ ID NO: 1824535 - RNA, 19 nt, Homo sapiens
  misc_RNA (1)...(19): siRNA sense strand
guaaaggaccagagcuuca

SEQ ID NO: 1824536 - RNA, 19 nt, Homo sapiens
  misc_RNA (1)...(19): siRNA sense strand
gcccucagccuaccaguug

SEQ ID NO: 1824537 - RNA, 19 nt, Homo sapiens
  misc_RNA (1)...(19): siRNA sense strand
gcgaugcugagaaccaaua

SEQ ID NO: 1824538 - RNA, 19 nt, Homo sapiens
  misc_RNA (1)...(19): siRNA sense strand
gacaagauggaaguagaua

SEQ ID NO: 1824539 - RNA, 19 nt, Homo sapiens
  misc_RNA (1)...(19): siRNA sense strand
ugaauucucuacucuacca

SEQ ID NO: 1824540 - RNA, 19 nt, Homo sapiens
  misc_RNA (1)...(19): siRNA sense strand
ccaagacuccaauuaagug

SEQ ID NO: 1824541 - RNA, 19 nt, Homo sapiens
  misc_RNA (1)...(19): siRNA sense strand
gugagaaggcuaacaaagu

SEQ ID NO: 1824542 - RNA, 19 nt, Homo sapiens
  misc_RNA (1)...(19): siRNA sense strand
agugauagcaggauuggua

SEQ ID NO: 1824543 - RNA, 19 nt, Homo sapiens
  misc_RNA (1)...(19): siRNA sense strand
caagacuguuuaggacaaa

SEQ ID NO: 1824544 - RNA, 19 nt, Homo sapiens
  misc_RNA (1)...(19): siRNA sense strand
cauuguugaucaugaagaa

SEQ ID NO: 1824545 - RNA, 19 nt, Homo sapiens
  misc_RNA (1)...(19): siRNA sense strand
cugaauggccugaguguga

SEQ ID NO: 1824546 - RNA, 19 nt, Homo sapiens
  misc_RNA (1)...(19): siRNA sense strand
cgauaagcuuugucacaug

SEQ ID NO: 1824547 - RNA, 19 nt, Homo sapiens
  misc_RNA (1)...(19): siRNA sense strand
augaagagaugagagcuuu

SEQ ID NO: 1824548 - RNA, 19 nt, Homo sapiens
  misc_RNA (1)...(19): siRNA sense strand
aagaagaagaugaagauga

SEQ ID NO: 1824549 - RNA, 19 nt, Homo sapiens
  misc_RNA (1)...(19): siRNA sense strand
aguguuggaugauugauga

SEQ ID NO: 1824550 - RNA, 19 nt, Homo sapiens
  misc_RNA (1)...(19): siRNA sense strand
guaccagaccugcuagaga

SEQ ID NO: 1824551 - RNA, 19 nt, Homo sapiens
  misc_RNA (1)...(19): siRNA sense strand
cagcuugucacucaauauu

SEQ ID NO: 1824552 - RNA, 19 nt, Homo sapiens
  misc_RNA (1)...(19): siRNA sense strand
aaagggcuaugaggcgaua

SEQ ID NO: 1824553 - RNA, 19 nt, Homo sapiens
  misc_RNA (1)...(19): siRNA sense strand
gcugggcguaucuauauaa

SEQ ID NO: 1824554 - RNA, 19 nt, Homo sapiens
  misc_RNA (1)...(19): siRNA sense strand
guauggaggaguuugugua

SEQ ID NO: 1824555 - RNA, 19 nt, Homo sapiens
  misc_RNA (1)...(19): siRNA sense strand
ugccagacauugaccaaga

SEQ ID NO: 1824556 - RNA, 19 nt, Homo sapiens
  misc_RNA (1)...(19): siRNA sense strand
cccauggucugacaaacaa

SEQ ID NO: 1824557 - RNA, 19 nt, Homo sapiens
  misc_RNA (1)...(19): siRNA sense strand
agaugaagaugaggaguau

SEQ ID NO: 1824558 - RNA, 19 nt, Homo sapiens
  misc_RNA (1)...(19): siRNA sense strand
gaugucaacgguuauguca

SEQ ID NO: 1824559 - RNA, 19 nt, Homo sapiens
  misc_RNA (1)...(19): siRNA sense strand
gagauagcgccuaccauuc

SEQ ID NO: 1824560 - RNA, 19 nt, Homo sapiens
  misc_RNA (1)...(19): siRNA sense strand
aaacaagaagcuagaggaa

SEQ ID NO: 1824561 - RNA, 19 nt, Homo sapiens
  misc_RNA (1)...(19): siRNA sense strand
ugacaaacaagaagcuaga

SEQ ID NO: 1824562 - RNA, 19 nt, Homo sapiens
  misc_RNA (1)...(19): siRNA sense strand
gagaagaucuggccuuaug

SEQ ID NO: 1824563 - RNA, 19 nt, Homo sapiens
  misc_RNA (1)...(19): siRNA sense strand
ucaaggagcuggcuaagau

SEQ ID NO: 1824564 - RNA, 19 nt, Homo sapiens
  misc_RNA (1)...(19): siRNA sense strand
gcacgagcccuucuugaaa

SEQ ID NO: 1824565 - RNA, 19 nt, Homo sapiens
  misc_RNA (1)...(19): siRNA sense strand
cgacguaauucccgacuau

SEQ ID NO: 1824566 - RNA, 19 nt, Homo sapiens
  misc_RNA (1)...(19): siRNA sense strand
aagagaagaucuggccuua

SEQ ID NO: 1824567 - RNA, 19 nt, Homo sapiens
  misc_RNA (1)...(19): siRNA sense strand
gcaaggaagaaauuuguga

SEQ ID NO: 1824568 - RNA, 19 nt, Homo sapiens
  misc_RNA (1)...(19): siRNA sense strand
gcucaucgccgcaucaaga

SEQ ID NO: 1824569 - RNA, 19 nt, Homo sapiens
  misc_RNA (1)...(19): siRNA sense strand
gcaaucccguacugaaguu

SEQ ID NO: 1824570 - RNA, 19 nt, Homo sapiens
  misc_RNA (1)...(19): siRNA sense strand
cagcggaccuccugaugga

SEQ ID NO: 1824571 - RNA, 19 nt, Homo sapiens
  misc_RNA (1)...(19): siRNA sense strand
ggcgguaccuggagaccua

SEQ ID NO: 1824572 - RNA, 19 nt, Homo sapiens
  misc_RNA (1)...(19): siRNA sense strand
ggaagaaauuugugauacc

SEQ ID NO: 1824573 - RNA, 19 nt, Homo sapiens
  misc_RNA (1)...(19): siRNA sense strand
ggagcuggcuaagaugugu

SEQ ID NO: 1824574 - RNA, 19 nt, Homo sapiens
  misc_RNA (1)...(19): siRNA sense strand
ccagguggaugugaaagau

SEQ ID NO: 1824575 - RNA, 19 nt, Homo sapiens
  misc_RNA (1)...(19): siRNA sense strand
caaggccuaugagcagaaa

SEQ ID NO: 1824576 - RNA, 19 nt, Homo sapiens
  misc_RNA (1)...(19): siRNA sense strand
cagcaaggaagaaauuugu

SEQ ID NO: 1824577 - RNA, 19 nt, Homo sapiens
  misc_RNA (1)...(19): siRNA sense strand
cgccgaauaugccaucuca

SEQ ID NO: 1824578 - RNA, 19 nt, Homo sapiens
  misc_RNA (1)...(19): siRNA sense strand
cacgagcccuucuugaaag

SEQ ID NO: 1824579 - RNA, 19 nt, Homo sapiens
  misc_RNA (1)...(19): siRNA sense strand
gcccggaggcuguuugaug

SEQ ID NO: 1824580 - RNA, 19 nt, Homo sapiens
  misc_RNA (1)...(19): siRNA sense strand
uccaacagcaucauuguga

SEQ ID NO: 1824581 - RNA, 19 nt, Homo sapiens
  misc_RNA (1)...(19): siRNA sense strand
gcgacguaauucccgacua

SEQ ID NO: 1824582 - RNA, 19 nt, Homo sapiens
  misc_RNA (1)...(19): siRNA sense strand
gcacccagacuacauccau

SEQ ID NO: 1824583 - RNA, 19 nt, Homo sapiens
  misc_RNA (1)...(19): siRNA sense strand
cccggaggcuguuugaugu

SEQ ID NO: 1824584 - RNA, 19 nt, Homo sapiens
  misc_RNA (1)...(19): siRNA sense strand
cgugaagucagucaacaaa

SEQ ID NO: 1824585 - RNA, 19 nt, Homo sapiens
  misc_RNA (1)...(19): siRNA sense strand
gagcccuucuugaaaguac

SEQ ID NO: 1824586 - RNA, 19 nt, Homo sapiens
  misc_RNA (1)...(19): siRNA sense strand
ucagaccuacgccgaauau

SEQ ID NO: 1824587 - RNA, 19 nt, Homo sapiens
  misc_RNA (1)...(19): siRNA sense strand
caaggaagaaauuugugau

SEQ ID NO: 1824588 - RNA, 19 nt, Homo sapiens
  misc_RNA (1)...(19): siRNA sense strand
agaccuacaaggccuauga

SEQ ID NO: 1824589 - RNA, 19 nt, Homo sapiens
  misc_RNA (1)...(19): siRNA sense strand
ccgaauaugccaucucaca

SEQ ID NO: 1824590 - RNA, 19 nt, Homo sapiens
  misc_RNA (1)...(19): siRNA sense strand
cugggaauuuggcgacgua

SEQ ID NO: 1824591 - RNA, 19 nt, Homo sapiens
  misc_RNA (1)...(19): siRNA sense strand
ccagcaaggaagaaauuug

SEQ ID NO: 1824592 - RNA, 19 nt, Homo sapiens
  misc_RNA (1)...(19): siRNA sense strand
aggaagaaauuugugauac

SEQ ID NO: 1824593 - RNA, 19 nt, Homo sapiens
  misc_RNA (1)...(19): siRNA sense strand
ccucagaccuacgccgaau

SEQ ID NO: 1824594 - RNA, 19 nt, Homo sapiens
  misc_RNA (1)...(19): siRNA sense strand
uuauuccgaucuacacaga

SEQ ID NO: 1824595 - RNA, 19 nt, Homo sapiens
  misc_RNA (1)...(19): siRNA sense strand
ggaguggccaagcccuuau

SEQ ID NO: 1824596 - RNA, 19 nt, Homo sapiens
  misc_RNA (1)...(19): siRNA sense strand
caucgccgcaucaagagaa

SEQ ID NO: 1824597 - RNA, 19 nt, Homo sapiens
  misc_RNA (1)...(19): siRNA sense strand
gggcaaucccguacugaag

SEQ ID NO: 1824598 - RNA, 19 nt, Homo sapiens
  misc_RNA (1)...(19): siRNA sense strand
agacccuccugaccacauu

SEQ ID NO: 1824599 - RNA, 19 nt, Homo sapiens
  misc_RNA (1)...(19): siRNA sense strand
caggagagacgcccaacca

SEQ ID NO: 1824600 - RNA, 19 nt, Homo sapiens
  misc_RNA (1)...(19): siRNA sense strand
ggcaaucccguacugaagu

SEQ ID NO: 1824601 - RNA, 19 nt, Homo sapiens
  misc_RNA (1)...(19): siRNA sense strand
cgccagcaaggaagaaauu

SEQ ID NO: 1824602 - RNA, 19 nt, Homo sapiens
  misc_RNA (1)...(19): siRNA sense strand
uggaguggccaagcccuua

SEQ ID NO: 1824603 - RNA, 19 nt, Homo sapiens
  misc_RNA (1)...(19): siRNA sense strand
guacauagcuuauugucaa

SEQ ID NO: 1824604 - RNA, 19 nt, Homo sapiens
  misc_RNA (1)...(19): siRNA sense strand
gauaagagguacagagauu

SEQ ID NO: 1824605 - RNA, 19 nt, Homo sapiens
  misc_RNA (1)...(19): siRNA sense strand
gaagagaccugccugaaca

SEQ ID NO: 1824606 - RNA, 19 nt, Homo sapiens
  misc_RNA (1)...(19): siRNA sense strand
guaaagaagugaaagauuc

SEQ ID NO: 1824607 - RNA, 19 nt, Homo sapiens
  misc_RNA (1)...(19): siRNA sense strand
gaacaacgauggucacuac

SEQ ID NO: 1824608 - RNA, 19 nt, Homo sapiens
  misc_RNA (1)...(19): siRNA sense strand
gcacacagcacuccguuua

SEQ ID NO: 1824609 - RNA, 19 nt, Homo sapiens
  misc_RNA (1)...(19): siRNA sense strand
ggcaagaucuucugcagua

SEQ ID NO: 1824610 - RNA, 19 nt, Homo sapiens
  misc_RNA (1)...(19): siRNA sense strand
ggaagucgcuccuugacaa

SEQ ID NO: 1824611 - RNA, 19 nt, Homo sapiens
  misc_RNA (1)...(19): siRNA sense strand
gcagaaacgucaugaagau

SEQ ID NO: 1824612 - RNA, 19 nt, Homo sapiens
  misc_RNA (1)...(19): siRNA sense strand
caacggagaguccauguua

SEQ ID NO: 1824613 - RNA, 19 nt, Homo sapiens
  misc_RNA (1)...(19): siRNA sense strand
gaacauaucacucuugcuu

SEQ ID NO: 1824614 - RNA, 19 nt, Homo sapiens
  misc_RNA (1)...(19): siRNA sense strand
gacaaagccuugaccauga

SEQ ID NO: 1824615 - RNA, 19 nt, Homo sapiens
  misc_RNA (1)...(19): siRNA sense strand
gaaaggaaauccagcucuu

SEQ ID NO: 1824616 - RNA, 19 nt, Homo sapiens
  misc_RNA (1)...(19): siRNA sense strand
gcaagcaccuggagcagaa

SEQ ID NO: 1824617 - RNA, 19 nt, Homo sapiens
  misc_RNA (1)...(19): siRNA sense strand
gagagaagguugcacaugu

SEQ ID NO: 1824618 - RNA, 19 nt, Homo sapiens
  misc_RNA (1)...(19): siRNA sense strand
ccagauaacugcaaagcaa

SEQ ID NO: 1824619 - RNA, 19 nt, Homo sapiens
  misc_RNA (1)...(19): siRNA sense strand
gcaaauuguuuaccucaga

SEQ ID NO: 1824620 - RNA, 19 nt, Homo sapiens
  misc_RNA (1)...(19): siRNA sense strand
gaagcaaguaccuuuauaa

SEQ ID NO: 1824621 - RNA, 19 nt, Homo sapiens
  misc_RNA (1)...(19): siRNA sense strand
cgaccuauccguagcauua

SEQ ID NO: 1824622 - RNA, 19 nt, Homo sapiens
  misc_RNA (1)...(19): siRNA sense strand
caaggccucuucucgguua

SEQ ID NO: 1824623 - RNA, 19 nt, Homo sapiens
  misc_RNA (1)...(19): siRNA sense strand
gcagacaaguuucagaugu

SEQ ID NO: 1824624 - RNA, 19 nt, Homo sapiens
  misc_RNA (1)...(19): siRNA sense strand
gaacaagcaggacuggaua

SEQ ID NO: 1824625 - RNA, 19 nt, Homo sapiens
  misc_RNA (1)...(19): siRNA sense strand
caaauauggucucuuuaga

SEQ ID NO: 1824626 - RNA, 19 nt, Homo sapiens
  misc_RNA (1)...(19): siRNA sense strand
ugaagaagcuggcgcacaa

SEQ ID NO: 1824627 - RNA, 19 nt, Homo sapiens
  misc_RNA (1)...(19): siRNA sense strand
ggagcugccucaggauuua

SEQ ID NO: 1824628 - RNA, 19 nt, Homo sapiens
  misc_RNA (1)...(19): siRNA sense strand
gaaaugugaucagaaagga

SEQ ID NO: 1824629 - RNA, 19 nt, Homo sapiens
  misc_RNA (1)...(19): siRNA sense strand
acaaaggccuguuucuaaa

SEQ ID NO: 1824630 - RNA, 19 nt, Homo sapiens
  misc_RNA (1)...(19): siRNA sense strand
gaaagaagaugguguuccu

SEQ ID NO: 1824631 - RNA, 19 nt, Homo sapiens
  misc_RNA (1)...(19): siRNA sense strand
gaaguagcauggaaaugga

SEQ ID NO: 1824632 - RNA, 19 nt, Homo sapiens
  misc_RNA (1)...(19): siRNA sense strand
cgacauggauuagccaauu

SEQ ID NO: 1824633 - RNA, 19 nt, Homo sapiens
  misc_RNA (1)...(19): siRNA sense strand
gcagacgucuuccugaaau

SEQ ID NO: 1824634 - RNA, 19 nt, Homo sapiens
  misc_RNA (1)...(19): siRNA sense strand
cuaaacagcuacacagaga

SEQ ID NO: 1824635 - RNA, 19 nt, Homo sapiens
  misc_RNA (1)...(19): siRNA sense strand
gcaacaagguaucugugaa

SEQ ID NO: 1824636 - RNA, 19 nt, Homo sapiens
  misc_RNA (1)...(19): siRNA sense strand
gaaggaaagggagagauua

SEQ ID NO: 1824637 - RNA, 19 nt, Homo sapiens
  misc_RNA (1)...(19): siRNA sense strand
gcacgaggaguuccagaua

SEQ ID NO: 1824638 - RNA, 19 nt, Homo sapiens
  misc_RNA (1)...(19): siRNA sense strand
caucaaagcuccugaacag

SEQ ID NO: 1824639 - RNA, 19 nt, Homo sapiens
  misc_RNA (1)...(19): siRNA sense strand
ccaauuccauuucuuccua

SEQ ID NO: 1824640 - RNA, 19 nt, Homo sapiens
  misc_RNA (1)...(19): siRNA sense strand
ggacgggacucucaagaag

SEQ ID NO: 1824641 - RNA, 19 nt, Homo sapiens
  misc_RNA (1)...(19): siRNA sense strand
cagaauacauugauaccuu

SEQ ID NO: 1824642 - RNA, 19 nt, Homo sapiens
  misc_RNA (1)...(19): siRNA sense strand
cagcaaucaugacagaaua

SEQ ID NO: 1824643 - RNA, 19 nt, Homo sapiens
  misc_RNA (1)...(19): siRNA sense strand
gaacacaacaccuugaaca

SEQ ID NO: 1824644 - RNA, 19 nt, Homo sapiens
  misc_RNA (1)...(19): siRNA sense strand
aaacuuggauccaugaaau

SEQ ID NO: 1824645 - RNA, 19 nt, Homo sapiens
  misc_RNA (1)...(19): siRNA sense strand
gaaagggagagauuaaaga

SEQ ID NO: 1824646 - RNA, 19 nt, Homo sapiens
  misc_RNA (1)...(19): siRNA sense strand
caacuacauuuaugacguu

SEQ ID NO: 1824647 - RNA, 19 nt, Homo sapiens
  misc_RNA (1)...(19): siRNA sense strand
gagcagaucgucauauuca

SEQ ID NO: 1824648 - RNA, 19 nt, Homo sapiens
  misc_RNA (1)...(19): siRNA sense strand
gaagucaugugcauaguac

SEQ ID NO: 1824649 - RNA, 19 nt, Homo sapiens
  misc_RNA (1)...(19): siRNA sense strand
ggaaauccagcucuuuaaa

SEQ ID NO: 1824650 - RNA, 19 nt, Homo sapiens
  misc_RNA (1)...(19): siRNA sense strand
ggaauaugaucgaggaaca

SEQ ID NO: 1824651 - RNA, 19 nt, Homo sapiens
  misc_RNA (1)...(19): siRNA sense strand
gacuuuagcuucccagaug

SEQ ID NO: 1824652 - RNA, 19 nt, Homo sapiens
  misc_RNA (1)...(19): siRNA sense strand
ggagaagcaaguaccuuua

SEQ ID NO: 1824653 - RNA, 19 nt, Homo sapiens
  misc_RNA (1)...(19): siRNA sense strand
gaaccacggagaagcauuu

SEQ ID NO: 1824654 - RNA, 19 nt, Homo sapiens
  misc_RNA (1)...(19): siRNA sense strand
ggaauacaaccacgaagaa

SEQ ID NO: 1824655 - RNA, 19 nt, Homo sapiens
  misc_RNA (1)...(19): siRNA sense strand
gcaaacaccagaaugaugu

SEQ ID NO: 1824656 - RNA, 19 nt, Homo sapiens
  misc_RNA (1)...(19): siRNA sense strand
gaggacgggugacguggua

SEQ ID NO: 1824657 - RNA, 19 nt, Homo sapiens
  misc_RNA (1)...(19): siRNA sense strand
caugaaguaucagcuguua

SEQ ID NO: 1824658 - RNA, 19 nt, Homo sapiens
  misc_RNA (1)...(19): siRNA sense strand
ugacaguggugauccauga

SEQ ID NO: 1824659 - RNA, 19 nt, Homo sapiens
  misc_RNA (1)...(19): siRNA sense strand
cuacucagcugauauugga

SEQ ID NO: 1824660 - RNA, 19 nt, Homo sapiens
  misc_RNA (1)...(19): siRNA sense strand
cagacaaguuucagaugua

SEQ ID NO: 1824661 - RNA, 19 nt, Homo sapiens
  misc_RNA (1)...(19): siRNA sense strand
agaacaggguauugcauua

SEQ ID NO: 1824662 - RNA, 19 nt, Homo sapiens
  misc_RNA (1)...(19): siRNA sense strand
ugaagaagaaggugauuaa

SEQ ID NO: 1824663 - RNA, 19 nt, Homo sapiens
  misc_RNA (1)...(19): siRNA sense strand
agaaacagaggacuaauuu

SEQ ID NO: 1824664 - RNA, 19 nt, Homo sapiens
  misc_RNA (1)...(19): siRNA sense strand
ggagaccguuguucuuaga

SEQ ID NO: 1824665 - RNA, 19 nt, Homo sapiens
  misc_RNA (1)...(19): siRNA sense strand
ggagaggucguucaaauuc

SEQ ID NO: 1824666 - RNA, 19 nt, Homo sapiens
  misc_RNA (1)...(19): siRNA sense strand
gcaacauccaucagauuua

SEQ ID NO: 1824667 - RNA, 19 nt, Homo sapiens
  misc_RNA (1)...(19): siRNA sense strand
uaagagaccuccgggaaug

SEQ ID NO: 1824668 - RNA, 19 nt, Homo sapiens
  misc_RNA (1)...(19): siRNA sense strand
guacaggaccucuuuggaa

SEQ ID NO: 1824669 - RNA, 19 nt, Homo sapiens
  misc_RNA (1)...(19): siRNA sense strand
caccaaugcggauaaauua

SEQ ID NO: 1824670 - RNA, 19 nt, Homo sapiens
  misc_RNA (1)...(19): siRNA sense strand
guaugaacguguauguaaa

SEQ ID NO: 1824671 - RNA, 19 nt, Homo sapiens
  misc_RNA (1)...(19): siRNA sense strand
caaaguaguugauccuucu

SEQ ID NO: 1824672 - RNA, 19 nt, Homo sapiens
  misc_RNA (1)...(19): siRNA sense strand
gagugaagcuauugauaca

SEQ ID NO: 1824673 - RNA, 19 nt, Homo sapiens
  misc_RNA (1)...(19): siRNA sense strand
gaaagcagcagcaguagca

SEQ ID NO: 1824674 - RNA, 19 nt, Homo sapiens
  misc_RNA (1)...(19): siRNA sense strand
ggaaggaaagggagagauu

SEQ ID NO: 1824675 - RNA, 19 nt, Homo sapiens
  misc_RNA (1)...(19): siRNA sense strand
caccagauguggcauguga

SEQ ID NO: 1824676 - RNA, 19 nt, Homo sapiens
  misc_RNA (1)...(19): siRNA sense strand
ccagaugacuacuuuaaag

SEQ ID NO: 1824677 - RNA, 19 nt, Homo sapiens
  misc_RNA (1)...(19): siRNA sense strand
gaagggcccugaacacaac

SEQ ID NO: 1824678 - RNA, 19 nt, Homo sapiens
  misc_RNA (1)...(19): siRNA sense strand
caagguaucugugaagcuu

SEQ ID NO: 1824679 - RNA, 19 nt, Homo sapiens
  misc_RNA (1)...(19): siRNA sense strand
ugacaucgccaaucgagua

SEQ ID NO: 1824680 - RNA, 19 nt, Homo sapiens
  misc_RNA (1)...(19): siRNA sense strand
aaugaucccuguaaauuug

SEQ ID NO: 1824681 - RNA, 19 nt, Homo sapiens
  misc_RNA (1)...(19): siRNA sense strand
ccuuaaggcuuccagcaua

SEQ ID NO: 1824682 - RNA, 19 nt, Homo sapiens
  misc_RNA (1)...(19): siRNA sense strand
gaacaugcaggguccuauu

SEQ ID NO: 1824683 - RNA, 19 nt, Homo sapiens
  misc_RNA (1)...(19): siRNA sense strand
ugaaagagcacgaggaguu

SEQ ID NO: 1824684 - RNA, 19 nt, Homo sapiens
  misc_RNA (1)...(19): siRNA sense strand
gauggaagaucgccucaag

SEQ ID NO: 1824685 - RNA, 19 nt, Homo sapiens
  misc_RNA (1)...(19): siRNA sense strand
gaagaccggauucaagauu

SEQ ID NO: 1824686 - RNA, 19 nt, Homo sapiens
  misc_RNA (1)...(19): siRNA sense strand
cacagaagaucucacgauu

SEQ ID NO: 1824687 - RNA, 19 nt, Homo sapiens
  misc_RNA (1)...(19): siRNA sense strand
uagcacaccuggaccuaaa

SEQ ID NO: 1824688 - RNA, 19 nt, Homo sapiens
  misc_RNA (1)...(19): siRNA sense strand
cuacauggcacuuaugaaa

SEQ ID NO: 1824689 - RNA, 19 nt, Homo sapiens
  misc_RNA (1)...(19): siRNA sense strand
ggaaauggagggcaucuuc

SEQ ID NO: 1824690 - RNA, 19 nt, Homo sapiens
  misc_RNA (1)...(19): siRNA sense strand
ggagacccuugcaaauuug

SEQ ID NO: 1824691 - RNA, 19 nt, Homo sapiens
  misc_RNA (1)...(19): siRNA sense strand
aggagacccuugcaaauuu

SEQ ID NO: 1824692 - RNA, 19 nt, Homo sapiens
  misc_RNA (1)...(19): siRNA sense strand
agaagcaaguaccuuuaua

SEQ ID NO: 1824693 - RNA, 19 nt, Homo sapiens
  misc_RNA (1)...(19): siRNA sense strand
gaacggcaucucuuccuuu

SEQ ID NO: 1824694 - RNA, 19 nt, Homo sapiens
  misc_RNA (1)...(19): siRNA sense strand
cagaagaucucacgauugc

SEQ ID NO: 1824695 - RNA, 19 nt, Homo sapiens
  misc_RNA (1)...(19): siRNA sense strand
uagaaggccuuaccaaagu

SEQ ID NO: 1824696 - RNA, 19 nt, Homo sapiens
  misc_RNA (1)...(19): siRNA sense strand
agacagagcgugacuaugu

SEQ ID NO: 1824697 - RNA, 19 nt, Homo sapiens
  misc_RNA (1)...(19): siRNA sense strand
gagagugaagcuauugaua

SEQ ID NO: 1824698 - RNA, 19 nt, Homo sapiens
  misc_RNA (1)...(19): siRNA sense strand
uaaaccaguucagcgaaua

SEQ ID NO: 1824699 - RNA, 19 nt, Homo sapiens
  misc_RNA (1)...(19): siRNA sense strand
cagacugacuuccuucauu

SEQ ID NO: 1824700 - RNA, 19 nt, Homo sapiens
  misc_RNA (1)...(19): siRNA sense strand
ccaaggaguucgugugcuu

SEQ ID NO: 1824701 - RNA, 19 nt, Homo sapiens
  misc_RNA (1)...(19): siRNA sense strand
guuaagaaaugugaucaga

SEQ ID NO: 1824702 - RNA, 19 nt, Homo sapiens
  misc_RNA (1)...(19): siRNA sense strand
agagaagguugcacaugua

SEQ ID NO: 1824703 - RNA, 19 nt, Homo sapiens
  misc_RNA (1)...(19): siRNA sense strand
gguauaagcugguagauaa

SEQ ID NO: 1824704 - RNA, 19 nt, Homo sapiens
  misc_RNA (1)...(19): siRNA sense strand
ccacagagcugcugcaaca

SEQ ID NO: 1824705 - RNA, 19 nt, Homo sapiens
  misc_RNA (1)...(19): siRNA sense strand
gagaacaccuccacacaga

SEQ ID NO: 1824706 - RNA, 19 nt, Homo sapiens
  misc_RNA (1)...(19): siRNA sense strand
ggagggagcugcuggaaca

SEQ ID NO: 1824707 - RNA, 19 nt, Homo sapiens
  misc_RNA (1)...(19): siRNA sense strand
ggagaagaaucuggaaaug

SEQ ID NO: 1824708 - RNA, 19 nt, Homo sapiens
  misc_RNA (1)...(19): siRNA sense strand
gaugacagcuucccuaucg

SEQ ID NO: 1824709 - RNA, 19 nt, Homo sapiens
  misc_RNA (1)...(19): siRNA sense strand
ggaggaagcccgaggagaa

SEQ ID NO: 1824710 - RNA, 19 nt, Homo sapiens
  misc_RNA (1)...(19): siRNA sense strand
ugaaagagguagucaaggu

SEQ ID NO: 1824711 - RNA, 19 nt, Homo sapiens
  misc_RNA (1)...(19): siRNA sense strand
gcuacaggcucgcaucgaa

SEQ ID NO: 1824712 - RNA, 19 nt, Homo sapiens
  misc_RNA (1)...(19): siRNA sense strand
gacaacaagugcagcauca

SEQ ID NO: 1824713 - RNA, 19 nt, Homo sapiens
  misc_RNA (1)...(19): siRNA sense strand
ugaaggaggugaagaaggu

SEQ ID NO: 1824714 - RNA, 19 nt, Homo sapiens
  misc_RNA (1)...(19): siRNA sense strand
uggaagggcugaagaagga

SEQ ID NO: 1824715 - RNA, 19 nt, Homo sapiens
  misc_RNA (1)...(19): siRNA sense strand
uucaagaacugcaaggaua

SEQ ID NO: 1824716 - RNA, 19 nt, Homo sapiens
  misc_RNA (1)...(19): siRNA sense strand
agaaggaagugguagaguu

SEQ ID NO: 1824717 - RNA, 19 nt, Homo sapiens
  misc_RNA (1)...(19): siRNA sense strand
gaaggacccaugaugcaaa

SEQ ID NO: 1824718 - RNA, 19 nt, Homo sapiens
  misc_RNA (1)...(19): siRNA sense strand
gaaggaagugguagaguuc

SEQ ID NO: 1824719 - RNA, 19 nt, Homo sapiens
  misc_RNA (1)...(19): siRNA sense strand
agaagaaucuggaaauggu

SEQ ID NO: 1824720 - RNA, 19 nt, Homo sapiens
  misc_RNA (1)...(19): siRNA sense strand
ugcaggagcucgaguguga

SEQ ID NO: 1824721 - RNA, 19 nt, Homo sapiens
  misc_RNA (1)...(19): siRNA sense strand
uggcgaagcucaacuccaa

SEQ ID NO: 1824722 - RNA, 19 nt, Homo sapiens
  misc_RNA (1)...(19): siRNA sense strand
ggagaucacucggcucaag

SEQ ID NO: 1824723 - RNA, 19 nt, Homo sapiens
  misc_RNA (1)...(19): siRNA sense strand
gcugguagauaacacugaa

SEQ ID NO: 1824724 - RNA, 19 nt, Homo sapiens
  misc_RNA (1)...(19): siRNA sense strand
ccacacagaggcugcuuaa

SEQ ID NO: 1824725 - RNA, 19 nt, Homo sapiens
  misc_RNA (1)...(19): siRNA sense strand
gaagcucaacuccaacuug

SEQ ID NO: 1824726 - RNA, 19 nt, Homo sapiens
  misc_RNA (1)...(19): siRNA sense strand
gcaagagcgggaagcagua

SEQ ID NO: 1824727 - RNA, 19 nt, Homo sapiens
  misc_RNA (1)...(19): siRNA sense strand
aggcagcgcuccaggacua

SEQ ID NO: 1824728 - RNA, 19 nt, Homo sapiens
  misc_RNA (1)...(19): siRNA sense strand
ccaaggaacggcugagcua

SEQ ID NO: 1824729 - RNA, 19 nt, Homo sapiens
  misc_RNA (1)...(19): siRNA sense strand
agaccaaccuuuccaccaa

SEQ ID NO: 1824730 - RNA, 19 nt, Homo sapiens
  misc_RNA (1)...(19): siRNA sense strand
cugaggagauugagaagga

SEQ ID NO: 1824731 - RNA, 19 nt, Homo sapiens
  misc_RNA (1)...(19): siRNA sense strand
gagcaccaguuucuucucu

SEQ ID NO: 1824732 - RNA, 19 nt, Homo sapiens
  misc_RNA (1)...(19): siRNA sense strand
agaagaccaucuacaagga

SEQ ID NO: 1824733 - RNA, 19 nt, Homo sapiens
  misc_RNA (1)...(19): siRNA sense strand
gggccaagguggagaccaa

SEQ ID NO: 1824734 - RNA, 19 nt, Homo sapiens
  misc_RNA (1)...(19): siRNA sense strand
uggagaggcuggaggagaa

SEQ ID NO: 1824735 - RNA, 19 nt, Homo sapiens
  misc_RNA (1)...(19): siRNA sense strand
ccaagacggugagcaagga

SEQ ID NO: 1824736 - RNA, 19 nt, Homo sapiens
  misc_RNA (1)...(19): siRNA sense strand
ggagcgguguggagaagga

SEQ ID NO: 1824737 - RNA, 19 nt, Homo sapiens
  misc_RNA (1)...(19): siRNA sense strand
gaagaccaucuacaaggaa

SEQ ID NO: 1824738 - RNA, 19 nt, Homo sapiens
  misc_RNA (1)...(19): siRNA sense strand
uggcggagcuggagcaaca

SEQ ID NO: 1824739 - RNA, 19 nt, Homo sapiens
  misc_RNA (1)...(19): siRNA sense strand
gcgagaaggaccagaucua

SEQ ID NO: 1824740 - RNA, 19 nt, Homo sapiens
  misc_RNA (1)...(19): siRNA sense strand
ggaaguggcagcccagaag

SEQ ID NO: 1824741 - RNA, 19 nt, Homo sapiens
  misc_RNA (1)...(19): siRNA sense strand
ggaggagaaggaaguggua

SEQ ID NO: 1824742 - RNA, 19 nt, Homo sapiens
  misc_RNA (1)...(19): siRNA sense strand
cagaagcuccugacacaga

SEQ ID NO: 1824743 - RNA, 19 nt, Homo sapiens
  misc_RNA (1)...(19): siRNA sense strand
cccagaagcuccugacaca

SEQ ID NO: 1824744 - RNA, 19 nt, Homo sapiens
  misc_RNA (1)...(19): siRNA sense strand
gagccaauaccgagaccua

SEQ ID NO: 1824745 - RNA, 19 nt, Homo sapiens
  misc_RNA (1)...(19): siRNA sense strand
ggagaagaccaucuacaag

SEQ ID NO: 1824746 - RNA, 19 nt, Homo sapiens
  misc_RNA (1)...(19): siRNA sense strand
ucaagaacugcaaggauaa

SEQ ID NO: 1824747 - RNA, 19 nt, Homo sapiens
  misc_RNA (1)...(19): siRNA sense strand
ggacuggagcgaccucaug

SEQ ID NO: 1824748 - RNA, 19 nt, Homo sapiens
  misc_RNA (1)...(19): siRNA sense strand
ucaacagcgugaagaacaa

SEQ ID NO: 1824749 - RNA, 19 nt, Homo sapiens
  misc_RNA (1)...(19): siRNA sense strand
uguacgagcugcagagcaa

SEQ ID NO: 1824750 - RNA, 19 nt, Homo sapiens
  misc_RNA (1)...(19): siRNA sense strand
ccaaggucaucgugaagga

SEQ ID NO: 1824751 - RNA, 19 nt, Homo sapiens
  misc_RNA (1)...(19): siRNA sense strand
ggagaaggucguggugaaa

SEQ ID NO: 1824752 - RNA, 19 nt, Homo sapiens
  misc_RNA (1)...(19): siRNA sense strand
agagggagguggacgugaa

SEQ ID NO: 1824753 - RNA, 19 nt, Homo sapiens
  misc_RNA (1)...(19): siRNA sense strand
agaagaaggagcucaguga

SEQ ID NO: 1824754 - RNA, 19 nt, Homo sapiens
  misc_RNA (1)...(19): siRNA sense strand
ggagaagaaccuugcaaag

SEQ ID NO: 1824755 - RNA, 19 nt, Homo sapiens
  misc_RNA (1)...(19): siRNA sense strand
cgacugggacucaggagaa

SEQ ID NO: 1824756 - RNA, 19 nt, Homo sapiens
  misc_RNA (1)...(19): siRNA sense strand
aggagaagaucaucaugga

SEQ ID NO: 1824757 - RNA, 19 nt, Homo sapiens
  misc_RNA (1)...(19): siRNA sense strand
ccagccagaucgccuacaa

SEQ ID NO: 1824758 - RNA, 19 nt, Homo sapiens
  misc_RNA (1)...(19): siRNA sense strand
uagucaagguggagaagaa

SEQ ID NO: 1824759 - RNA, 19 nt, Homo sapiens
  misc_RNA (1)...(19): siRNA sense strand
agaaggagguggagaagcu

SEQ ID NO: 1824760 - RNA, 19 nt, Homo sapiens
  misc_RNA (1)...(19): siRNA sense strand
ugagcgaccugcacagcaa

SEQ ID NO: 1824761 - RNA, 19 nt, Homo sapiens
  misc_RNA (1)...(19): siRNA sense strand
gaaggagugcgaggcguuu

SEQ ID NO: 1824762 - RNA, 19 nt, Homo sapiens
  misc_RNA (1)...(19): siRNA sense strand
cagcuggaguuugcuagaa

SEQ ID NO: 1824763 - RNA, 19 nt, Homo sapiens
  misc_RNA (1)...(19): siRNA sense strand
uugcaaaggccuauacuga

SEQ ID NO: 1824764 - RNA, 19 nt, Homo sapiens
  misc_RNA (1)...(19): siRNA sense strand
gaaggagacagcccagaag

SEQ ID NO: 1824765 - RNA, 19 nt, Homo sapiens
  misc_RNA (1)...(19): siRNA sense strand
aagccaagcuccucacucu

SEQ ID NO: 1824766 - RNA, 19 nt, Homo sapiens
  misc_RNA (1)...(19): siRNA sense strand
ggagcuggcccuucucauc

SEQ ID NO: 1824767 - RNA, 19 nt, Homo sapiens
  misc_RNA (1)...(19): siRNA sense strand
agaaggucguggugaaaga

SEQ ID NO: 1824768 - RNA, 19 nt, Homo sapiens
  misc_RNA (1)...(19): siRNA sense strand
gaaggagaucgacgccuau

SEQ ID NO: 1824769 - RNA, 19 nt, Homo sapiens
  misc_RNA (1)...(19): siRNA sense strand
gaggagcgguguggagaag

SEQ ID NO: 1824770 - RNA, 19 nt, Homo sapiens
  misc_RNA (1)...(19): siRNA sense strand
gagaagaaucuggaaaugg

SEQ ID NO: 1824771 - RNA, 19 nt, Homo sapiens
  misc_RNA (1)...(19): siRNA sense strand
agauugacguccuccagaa

SEQ ID NO: 1824772 - RNA, 19 nt, Homo sapiens
  misc_RNA (1)...(19): siRNA sense strand
ccaaaucgcaggagaagac

SEQ ID NO: 1824773 - RNA, 19 nt, Homo sapiens
  misc_RNA (1)...(19): siRNA sense strand
aggagaaggucguggugaa

SEQ ID NO: 1824774 - RNA, 19 nt, Homo sapiens
  misc_RNA (1)...(19): siRNA sense strand
ucuccgggaugaucaguga

SEQ ID NO: 1824775 - RNA, 19 nt, Homo sapiens
  misc_RNA (1)...(19): siRNA sense strand
ccagagcaccaguuucuuc

SEQ ID NO: 1824776 - RNA, 19 nt, Homo sapiens
  misc_RNA (1)...(19): siRNA sense strand
gagcuggcccuucucaucu

SEQ ID NO: 1824777 - RNA, 19 nt, Homo sapiens
  misc_RNA (1)...(19): siRNA sense strand
ggugaaagagguagucaag

SEQ ID NO: 1824778 - RNA, 19 nt, Homo sapiens
  misc_RNA (1)...(19): siRNA sense strand
gcaagaggaagaccaugca

SEQ ID NO: 1824779 - RNA, 19 nt, Homo sapiens
  misc_RNA (1)...(19): siRNA sense strand
gcgcuacucugugcacaag

SEQ ID NO: 1824780 - RNA, 19 nt, Homo sapiens
  misc_RNA (1)...(19): siRNA sense strand
gcucuaucaucuccaaguc

SEQ ID NO: 1824781 - RNA, 19 nt, Homo sapiens
  misc_RNA (1)...(19): siRNA sense strand
ggagagcgagcgacagaag

SEQ ID NO: 1824782 - RNA, 19 nt, Homo sapiens
  misc_RNA (1)...(19): siRNA sense strand
caggagaagacccagguaa

SEQ ID NO: 1824783 - RNA, 19 nt, Homo sapiens
  misc_RNA (1)...(19): siRNA sense strand
ccagcuacgagaaggauuu

SEQ ID NO: 1824784 - RNA, 19 nt, Homo sapiens
  misc_RNA (1)...(19): siRNA sense strand
caacaagugcagcaucaag

SEQ ID NO: 1824785 - RNA, 19 nt, Homo sapiens
  misc_RNA (1)...(19): siRNA sense strand
ccacacccuuggaggacuu

SEQ ID NO: 1824786 - RNA, 19 nt, Homo sapiens
  misc_RNA (1)...(19): siRNA sense strand
ggaguacgagcacuucaag

SEQ ID NO: 1824787 - RNA, 19 nt, Homo sapiens
  misc_RNA (1)...(19): siRNA sense strand
agaaggagacagcccagaa

SEQ ID NO: 1824788 - RNA, 19 nt, Homo sapiens
  misc_RNA (1)...(19): siRNA sense strand
gauugacguccuccagaaa

SEQ ID NO: 1824789 - RNA, 19 nt, Homo sapiens
  misc_RNA (1)...(19): siRNA sense strand
uggucaagcuggagaagga

SEQ ID NO: 1824790 - RNA, 19 nt, Homo sapiens
  misc_RNA (1)...(19): siRNA sense strand
gaagaucaucauggaggaa

SEQ ID NO: 1824791 - RNA, 19 nt, Homo sapiens
  misc_RNA (1)...(19): siRNA sense strand
gaacuuccugaaccugugu

SEQ ID NO: 1824792 - RNA, 19 nt, Homo sapiens
  misc_RNA (1)...(19): siRNA sense strand
agaaggaccagaucuacga

SEQ ID NO: 1824793 - RNA, 19 nt, Homo sapiens
  misc_RNA (1)...(19): siRNA sense strand
caggaggaccgcagcaaga

SEQ ID NO: 1824794 - RNA, 19 nt, Homo sapiens
  misc_RNA (1)...(19): siRNA sense strand
ccagugcuguggagucucu

SEQ ID NO: 1824795 - RNA, 19 nt, Homo sapiens
  misc_RNA (1)...(19): siRNA sense strand
ccaggaagaggccgacuca

SEQ ID NO: 1824796 - RNA, 19 nt, Homo sapiens
  misc_RNA (1)...(19): siRNA sense strand
gaccugggacagauagaga

SEQ ID NO: 1824797 - RNA, 19 nt, Homo sapiens
  misc_RNA (1)...(19): siRNA sense strand
acacagaggcugcuuaacg

SEQ ID NO: 1824798 - RNA, 19 nt, Homo sapiens
  misc_RNA (1)...(19): siRNA sense strand
ccaccaagaucuccauccu

SEQ ID NO: 1824799 - RNA, 19 nt, Homo sapiens
  misc_RNA (1)...(19): siRNA sense strand
ccagguaaccgagcugaau

SEQ ID NO: 1824800 - RNA, 19 nt, Homo sapiens
  misc_RNA (1)...(19): siRNA sense strand
aggccaagcugcaggagau

SEQ ID NO: 1824801 - RNA, 19 nt, Homo sapiens
  misc_RNA (1)...(19): siRNA sense strand
gagcuacuggcccuugaga

SEQ ID NO: 1824802 - RNA, 19 nt, Homo sapiens
  misc_RNA (1)...(19): siRNA sense strand
ucagugacgugcagguucu

SEQ ID NO: 1824803 - RNA, 19 nt, Homo sapiens
  misc_RNA (1)...(19): siRNA sense strand
gaacauggauggcaaggaa

SEQ ID NO: 1824804 - RNA, 19 nt, Homo sapiens
  misc_RNA (1)...(19): siRNA sense strand
ccacgugccuucacacuua

SEQ ID NO: 1824805 - RNA, 19 nt, Homo sapiens
  misc_RNA (1)...(19): siRNA sense strand
caaacgaucaguaagaaua

SEQ ID NO: 1824806 - RNA, 19 nt, Homo sapiens
  misc_RNA (1)...(19): siRNA sense strand
gcacaaacgaucaguaaga

SEQ ID NO: 1824807 - RNA, 19 nt, Homo sapiens
  misc_RNA (1)...(19): siRNA sense strand
guucacugcuggccuauaa

SEQ ID NO: 1824808 - RNA, 19 nt, Homo sapiens
  misc_RNA (1)...(19): siRNA sense strand
caacaugaauuacgacaag

SEQ ID NO: 1824809 - RNA, 19 nt, Homo sapiens
  misc_RNA (1)...(19): siRNA sense strand
gcaagcccaacaugaauua

SEQ ID NO: 1824810 - RNA, 19 nt, Homo sapiens
  misc_RNA (1)...(19): siRNA sense strand
caaguacccuucugacauc

SEQ ID NO: 1824811 - RNA, 19 nt, Homo sapiens
  misc_RNA (1)...(19): siRNA sense strand
ggagaucgacacauccuuu

SEQ ID NO: 1824812 - RNA, 19 nt, Homo sapiens
  misc_RNA (1)...(19): siRNA sense strand
gcaaggaacuguguaaaau

SEQ ID NO: 1824813 - RNA, 19 nt, Homo sapiens
  misc_RNA (1)...(19): siRNA sense strand
gggcacaaacgaucaguaa

SEQ ID NO: 1824814 - RNA, 19 nt, Homo sapiens
  misc_RNA (1)...(19): siRNA sense strand
gaacuacaacagcuauaug

SEQ ID NO: 1824815 - RNA, 19 nt, Homo sapiens
  misc_RNA (1)...(19): siRNA sense strand
cacaaacgaucaguaagaa

SEQ ID NO: 1824816 - RNA, 19 nt, Homo sapiens
  misc_RNA (1)...(19): siRNA sense strand
ccgguggacugcagcguua

SEQ ID NO: 1824817 - RNA, 19 nt, Homo sapiens
  misc_RNA (1)...(19): siRNA sense strand
ggacugcagcguuagcaaa

SEQ ID NO: 1824818 - RNA, 19 nt, Homo sapiens
  misc_RNA (1)...(19): siRNA sense strand
ucacugcuggccuauaaua

SEQ ID NO: 1824819 - RNA, 19 nt, Homo sapiens
  misc_RNA (1)...(19): siRNA sense strand
aaagcaagcccaacaugaa

SEQ ID NO: 1824820 - RNA, 19 nt, Homo sapiens
  misc_RNA (1)...(19): siRNA sense strand
agucguccauguacaagua

SEQ ID NO: 1824821 - RNA, 19 nt, Homo sapiens
  misc_RNA (1)...(19): siRNA sense strand
cagcaggaguggaucaauc

SEQ ID NO: 1824822 - RNA, 19 nt, Homo sapiens
  misc_RNA (1)...(19): siRNA sense strand
cggaagugcuguugucaca

SEQ ID NO: 1824823 - RNA, 19 nt, Homo sapiens
  misc_RNA (1)...(19): siRNA sense strand
gaccaaagugcacggcaaa

SEQ ID NO: 1824824 - RNA, 19 nt, Homo sapiens
  misc_RNA (1)...(19): siRNA sense strand
acagcuauauggacgagaa

SEQ ID NO: 1824825 - RNA, 19 nt, Homo sapiens
  misc_RNA (1)...(19): siRNA sense strand
gaauucuggccucaacaaa

SEQ ID NO: 1824826 - RNA, 19 nt, Homo sapiens
  misc_RNA (1)...(19): siRNA sense strand
ucaguuaccucagggaaag

SEQ ID NO: 1824827 - RNA, 19 nt, Homo sapiens
  misc_RNA (1)...(19): siRNA sense strand
auaaaggaguacagcuuga

SEQ ID NO: 1824828 - RNA, 19 nt, Homo sapiens
  misc_RNA (1)...(19): siRNA sense strand
cagcagaaggugaacuuug

SEQ ID NO: 1824829 - RNA, 19 nt, Homo sapiens
  misc_RNA (1)...(19): siRNA sense strand
acacggaagugcuguuguc

SEQ ID NO: 1824830 - RNA, 19 nt, Homo sapiens
  misc_RNA (1)...(19): siRNA sense strand
ggcccuccguuauuacuau

SEQ ID NO: 1824831 - RNA, 19 nt, Homo sapiens
  misc_RNA (1)...(19): siRNA sense strand
ggcaauaacaugaauucug

SEQ ID NO: 1824832 - RNA, 19 nt, Homo sapiens
  misc_RNA (1)...(19): siRNA sense strand
ccauaaaggaguacagcuu

SEQ ID NO: 1824833 - RNA, 19 nt, Homo sapiens
  misc_RNA (1)...(19): siRNA sense strand
agcagaaggugaacuuugu

SEQ ID NO: 1824834 - RNA, 19 nt, Homo sapiens
  misc_RNA (1)...(19): siRNA sense strand
gcuauauggacgagaagaa

SEQ ID NO: 1824835 - RNA, 19 nt, Homo sapiens
  misc_RNA (1)...(19): siRNA sense strand
caaaaguccuccccuugga

SEQ ID NO: 1824836 - RNA, 19 nt, Homo sapiens
  misc_RNA (1)...(19): siRNA sense strand
cugcuggccuauaauacaa

SEQ ID NO: 1824837 - RNA, 19 nt, Homo sapiens
  misc_RNA (1)...(19): siRNA sense strand
acaaguacccuucugacau

SEQ ID NO: 1824838 - RNA, 19 nt, Homo sapiens
  misc_RNA (1)...(19): siRNA sense strand
gaaaagcaagcccaacaug

SEQ ID NO: 1824839 - RNA, 19 nt, Homo sapiens
  misc_RNA (1)...(19): siRNA sense strand
cuucugacaucuccuacau

SEQ ID NO: 1824840 - RNA, 19 nt, Homo sapiens
  misc_RNA (1)...(19): siRNA sense strand
caugaauucuggccucaac

SEQ ID NO: 1824841 - RNA, 19 nt, Homo sapiens
  misc_RNA (1)...(19): siRNA sense strand
ccaccacccucuacaacac

SEQ ID NO: 1824842 - RNA, 19 nt, Homo sapiens
  misc_RNA (1)...(19): siRNA sense strand
agauccagcuguggcaauu

SEQ ID NO: 1824843 - RNA, 19 nt, Homo sapiens
  misc_RNA (1)...(19): siRNA sense strand
aaggaacuguguaaaauga

SEQ ID NO: 1824844 - RNA, 19 nt, Homo sapiens
  misc_RNA (1)...(19): siRNA sense strand
caguaagaauacagagcaa

SEQ ID NO: 1824845 - RNA, 19 nt, Homo sapiens
  misc_RNA (1)...(19): siRNA sense strand
ugaacuacaacagcuauau

SEQ ID NO: 1824846 - RNA, 19 nt, Homo sapiens
  misc_RNA (1)...(19): siRNA sense strand
ugaauucuggccucaacaa

SEQ ID NO: 1824847 - RNA, 19 nt, Homo sapiens
  misc_RNA (1)...(19): siRNA sense strand
gaauggauccagggagucu

SEQ ID NO: 1824848 - RNA, 19 nt, Homo sapiens
  misc_RNA (1)...(19): siRNA sense strand
agacccuucuuaugacuca

SEQ ID NO: 1824849 - RNA, 19 nt, Homo sapiens
  misc_RNA (1)...(19): siRNA sense strand
uguugucacaccucaguua

SEQ ID NO: 1824850 - RNA, 19 nt, Homo sapiens
  misc_RNA (1)...(19): siRNA sense strand
acacuuaggcagcuacuac

SEQ ID NO: 1824851 - RNA, 19 nt, Homo sapiens
  misc_RNA (1)...(19): siRNA sense strand
gccaacgccagcuguauca

SEQ ID NO: 1824852 - RNA, 19 nt, Homo sapiens
  misc_RNA (1)...(19): siRNA sense strand
caacggggaguucaaaaug

SEQ ID NO: 1824853 - RNA, 19 nt, Homo sapiens
  misc_RNA (1)...(19): siRNA sense strand
gacugcagcguuagcaaau

SEQ ID NO: 1824854 - RNA, 19 nt, Homo sapiens
  misc_RNA (1)...(19): siRNA sense strand
caaagugcacggcaaaaga

SEQ ID NO: 1824855 - RNA, 19 nt, Homo sapiens
  misc_RNA (1)...(19): siRNA sense strand
aagcaagcccaacaugaau

SEQ ID NO: 1824856 - RNA, 19 nt, Homo sapiens
  misc_RNA (1)...(19): siRNA sense strand
gcaaaagauaugcuuacaa

SEQ ID NO: 1824857 - RNA, 19 nt, Homo sapiens
  misc_RNA (1)...(19): siRNA sense strand
cagugagggucaacgucaa

SEQ ID NO: 1824858 - RNA, 19 nt, Homo sapiens
  misc_RNA (1)...(19): siRNA sense strand
uaaaggaguacagcuugau

SEQ ID NO: 1824859 - RNA, 19 nt, Homo sapiens
  misc_RNA (1)...(19): siRNA sense strand
caugaacuacaacagcuau

SEQ ID NO: 1824860 - RNA, 19 nt, Homo sapiens
  misc_RNA (1)...(19): siRNA sense strand
ggagccgcaucacaauacu

SEQ ID NO: 1824861 - RNA, 19 nt, Homo sapiens
  misc_RNA (1)...(19): siRNA sense strand
gcagaaggugaacuuuguc

SEQ ID NO: 1824862 - RNA, 19 nt, Homo sapiens
  misc_RNA (1)...(19): siRNA sense strand
gauggcaaggaacugugua

SEQ ID NO: 1824863 - RNA, 19 nt, Homo sapiens
  misc_RNA (1)...(19): siRNA sense strand
ggauggcaaggaacugugu

SEQ ID NO: 1824864 - RNA, 19 nt, Homo sapiens
  misc_RNA (1)...(19): siRNA sense strand
caaaggagcugggaagaag

SEQ ID NO: 1824865 - RNA, 19 nt, Homo sapiens
  misc_RNA (1)...(19): siRNA sense strand
ggaagagggaguugaagaa

SEQ ID NO: 1824866 - RNA, 19 nt, Homo sapiens
  misc_RNA (1)...(19): siRNA sense strand
ggaggaagagggaguugaa

SEQ ID NO: 1824867 - RNA, 19 nt, Homo sapiens
  misc_RNA (1)...(19): siRNA sense strand
gaagaccugaugccugaaa

SEQ ID NO: 1824868 - RNA, 19 nt, Homo sapiens
  misc_RNA (1)...(19): siRNA sense strand
gagaggaggaggaggaaga

SEQ ID NO: 1824869 - RNA, 19 nt, Homo sapiens
  misc_RNA (1)...(19): siRNA sense strand
ugaagaagaggaagaggaa

SEQ ID NO: 1824870 - RNA, 19 nt, Homo sapiens
  misc_RNA (1)...(19): siRNA sense strand
ggaggaagagagagaggaa

SEQ ID NO: 1824871 - RNA, 19 nt, Homo sapiens
  misc_RNA (1)...(19): siRNA sense strand
ggaggaggaggaagagaga

SEQ ID NO: 1824872 - RNA, 19 nt, Homo sapiens
  misc_RNA (1)...(19): siRNA sense strand
ccagggagccuauggucaa

SEQ ID NO: 1824873 - RNA, 19 nt, Homo sapiens
  misc_RNA (1)...(19): siRNA sense strand
gagagaggaagaccugaug

SEQ ID NO: 1824874 - RNA, 19 nt, Homo sapiens
  misc_RNA (1)...(19): siRNA sense strand
gaagagggaguugaagaag

SEQ ID NO: 1824875 - RNA, 19 nt, Homo sapiens
  misc_RNA (1)...(19): siRNA sense strand
aagagggaguugaagaaga

SEQ ID NO: 1824876 - RNA, 19 nt, Homo sapiens
  misc_RNA (1)...(19): siRNA sense strand
gcuccuggaugaccugagu

SEQ ID NO: 1824877 - RNA, 19 nt, Homo sapiens
  misc_RNA (1)...(19): siRNA sense strand
agagggaguugaagaagag

SEQ ID NO: 1824878 - RNA, 19 nt, Homo sapiens
  misc_RNA (1)...(19): siRNA sense strand
gcagaucccaaggcucaaa

SEQ ID NO: 1824879 - RNA, 19 nt, Homo sapiens
  misc_RNA (1)...(19): siRNA sense strand
gcugcucgcucuggcuuug

SEQ ID NO: 1824880 - RNA, 19 nt, Homo sapiens
  misc_RNA (1)...(19): siRNA sense strand
ucaaaggagcugggaagaa

SEQ ID NO: 1824881 - RNA, 19 nt, Homo sapiens
  misc_RNA (1)...(19): siRNA sense strand
cgucccagaucuuucaauc

SEQ ID NO: 1824882 - RNA, 19 nt, Homo sapiens
  misc_RNA (1)...(19): siRNA sense strand
aagaagaggaagaggaaga

SEQ ID NO: 1824883 - RNA, 19 nt, Homo sapiens
  misc_RNA (1)...(19): siRNA sense strand
ggaggaggaagagggaguu

SEQ ID NO: 1824884 - RNA, 19 nt, Homo sapiens
  misc_RNA (1)...(19): siRNA sense strand
ccagggagcugaggaaaag

SEQ ID NO: 1824885 - RNA, 19 nt, Homo sapiens
  misc_RNA (1)...(19): siRNA sense strand
gagccagggagcugaggaa

SEQ ID NO: 1824886 - RNA, 19 nt, Homo sapiens
  misc_RNA (1)...(19): siRNA sense strand
gggaguugaagaagaggaa

SEQ ID NO: 1824887 - RNA, 19 nt, Homo sapiens
  misc_RNA (1)...(19): siRNA sense strand
gaucccaaggcucaaagga

SEQ ID NO: 1824888 - RNA, 19 nt, Homo sapiens
  misc_RNA (1)...(19): siRNA sense strand
aagaggaggaggaggaaga

SEQ ID NO: 1824889 - RNA, 19 nt, Homo sapiens
  misc_RNA (1)...(19): siRNA sense strand
agaagaggaagaggaagaa

SEQ ID NO: 1824890 - RNA, 19 nt, Homo sapiens
  misc_RNA (1)...(19): siRNA sense strand
gagcaaacgugacuuauuu

SEQ ID NO: 1824891 - RNA, 19 nt, Homo sapiens
  misc_RNA (1)...(19): siRNA sense strand
ccaaauggguuucauguua

SEQ ID NO: 1824892 - RNA, 19 nt, Homo sapiens
  misc_RNA (1)...(19): siRNA sense strand
gaacacagcucaagcaaac

SEQ ID NO: 1824893 - RNA, 19 nt, Homo sapiens
  misc_RNA (1)...(19): siRNA sense strand
gaagaaauccuccagaaga

SEQ ID NO: 1824894 - RNA, 19 nt, Homo sapiens
  misc_RNA (1)...(19): siRNA sense strand
caacaaggaugcagcacua

SEQ ID NO: 1824895 - RNA, 19 nt, Homo sapiens
  misc_RNA (1)...(19): siRNA sense strand
acaaugcacuacaguauua

SEQ ID NO: 1824896 - RNA, 19 nt, Homo sapiens
  misc_RNA (1)...(19): siRNA sense strand
ggacguaacugaagaggau

SEQ ID NO: 1824897 - RNA, 19 nt, Homo sapiens
  misc_RNA (1)...(19): siRNA sense strand
agaaagggcuucaucauau

SEQ ID NO: 1824898 - RNA, 19 nt, Homo sapiens
  misc_RNA (1)...(19): siRNA sense strand
caaauggguuucauguuaa

SEQ ID NO: 1824899 - RNA, 19 nt, Homo sapiens
  misc_RNA (1)...(19): siRNA sense strand
gcagacaaauccugacuug

SEQ ID NO: 1824900 - RNA, 19 nt, Homo sapiens
  misc_RNA (1)...(19): siRNA sense strand
gaaauaguggguuuacaua

SEQ ID NO: 1824901 - RNA, 19 nt, Homo sapiens
  misc_RNA (1)...(19): siRNA sense strand
gaugagagcuccugaguac

SEQ ID NO: 1824902 - RNA, 19 nt, Homo sapiens
  misc_RNA (1)...(19): siRNA sense strand
gaagaaauggcaaacaauu

SEQ ID NO: 1824903 - RNA, 19 nt, Homo sapiens
  misc_RNA (1)...(19): siRNA sense strand
uaagagagcuuccguaagg

SEQ ID NO: 1824904 - RNA, 19 nt, Homo sapiens
  misc_RNA (1)...(19): siRNA sense strand
gaacaaagacaaaggacuu

SEQ ID NO: 1824905 - RNA, 19 nt, Homo sapiens
  misc_RNA (1)...(19): siRNA sense strand
gaacaaugcacuacaguau

SEQ ID NO: 1824906 - RNA, 19 nt, Homo sapiens
  misc_RNA (1)...(19): siRNA sense strand
guagagauguacagugaaa

SEQ ID NO: 1824907 - RNA, 19 nt, Homo sapiens
  misc_RNA (1)...(19): siRNA sense strand
acaaagcucugaugacuga

SEQ ID NO: 1824908 - RNA, 19 nt, Homo sapiens
  misc_RNA (1)...(19): siRNA sense strand
uugcauagcuuccaauaaa

SEQ ID NO: 1824909 - RNA, 19 nt, Homo sapiens
  misc_RNA (1)...(19): siRNA sense strand
gggaagaaauccuccagaa

SEQ ID NO: 1824910 - RNA, 19 nt, Homo sapiens
  misc_RNA (1)...(19): siRNA sense strand
caacaagagccuggaauua

SEQ ID NO: 1824911 - RNA, 19 nt, Homo sapiens
  misc_RNA (1)...(19): siRNA sense strand
gaucugauuucuuacaguu

SEQ ID NO: 1824912 - RNA, 19 nt, Homo sapiens
  misc_RNA (1)...(19): siRNA sense strand
ugagaaaucugcucgcuau

SEQ ID NO: 1824913 - RNA, 19 nt, Homo sapiens
  misc_RNA (1)...(19): siRNA sense strand
gaagggagcucgucauucc

SEQ ID NO: 1824914 - RNA, 19 nt, Homo sapiens
  misc_RNA (1)...(19): siRNA sense strand
gaaaaggucuucuucugaa

SEQ ID NO: 1824915 - RNA, 19 nt, Homo sapiens
  misc_RNA (1)...(19): siRNA sense strand
guacaaagcucugaugacu

SEQ ID NO: 1824916 - RNA, 19 nt, Homo sapiens
  misc_RNA (1)...(19): siRNA sense strand
ggaaggagaggaccugaaa

SEQ ID NO: 1824917 - RNA, 19 nt, Homo sapiens
  misc_RNA (1)...(19): siRNA sense strand
aagauugacuugagaguaa

SEQ ID NO: 1824918 - RNA, 19 nt, Homo sapiens
  misc_RNA (1)...(19): siRNA sense strand
gaugaugucagauauguaa

SEQ ID NO: 1824919 - RNA, 19 nt, Homo sapiens
  misc_RNA (1)...(19): siRNA sense strand
cagcauaccucacuguuca

SEQ ID NO: 1824920 - RNA, 19 nt, Homo sapiens
  misc_RNA (1)...(19): siRNA sense strand
aaacaauucugcaguacuu

SEQ ID NO: 1824921 - RNA, 19 nt, Homo sapiens
  misc_RNA (1)...(19): siRNA sense strand
gaacaaggcaagaaaccaa

SEQ ID NO: 1824922 - RNA, 19 nt, Homo sapiens
  misc_RNA (1)...(19): siRNA sense strand
ggcaaacaauucugcagua

SEQ ID NO: 1824923 - RNA, 19 nt, Homo sapiens
  misc_RNA (1)...(19): siRNA sense strand
acaaauggaugaggacuuu

SEQ ID NO: 1824924 - RNA, 19 nt, Homo sapiens
  misc_RNA (1)...(19): siRNA sense strand
aauaaagacugacuaccua

SEQ ID NO: 1824925 - RNA, 19 nt, Homo sapiens
  misc_RNA (1)...(19): siRNA sense strand
acaagagccuggaauuauu

SEQ ID NO: 1824926 - RNA, 19 nt, Homo sapiens
  misc_RNA (1)...(19): siRNA sense strand
gaaagggcuucaucauauc

SEQ ID NO: 1824927 - RNA, 19 nt, Homo sapiens
  misc_RNA (1)...(19): siRNA sense strand
gaaaggcugagcauaacua

SEQ ID NO: 1824928 - RNA, 19 nt, Homo sapiens
  misc_RNA (1)...(19): siRNA sense strand
gaaccucggacaagucuaa

SEQ ID NO: 1824929 - RNA, 19 nt, Homo sapiens
  misc_RNA (1)...(19): siRNA sense strand
gccggaaguuguaugguua

SEQ ID NO: 1824930 - RNA, 19 nt, Homo sapiens
  misc_RNA (1)...(19): siRNA sense strand
aaagaaaggccaagauuug

SEQ ID NO: 1824931 - RNA, 19 nt, Homo sapiens
  misc_RNA (1)...(19): siRNA sense strand
caagagcaaacgugacuua

SEQ ID NO: 1824932 - RNA, 19 nt, Homo sapiens
  misc_RNA (1)...(19): siRNA sense strand
caccauaccuccugcgaaa

SEQ ID NO: 1824933 - RNA, 19 nt, Homo sapiens
  misc_RNA (1)...(19): siRNA sense strand
gaaauuacaaucagagauc

SEQ ID NO: 1824934 - RNA, 19 nt, Homo sapiens
  misc_RNA (1)...(19): siRNA sense strand
caaagaagaaggaaacaga

SEQ ID NO: 1824935 - RNA, 19 nt, Homo sapiens
  misc_RNA (1)...(19): siRNA sense strand
ccaauacaaucauagaugu

SEQ ID NO: 1824936 - RNA, 19 nt, Homo sapiens
  misc_RNA (1)...(19): siRNA sense strand
guuaacaccucagugcaua

SEQ ID NO: 1824937 - RNA, 19 nt, Homo sapiens
  misc_RNA (1)...(19): siRNA sense strand
gacaggaaauaguggguuu

SEQ ID NO: 1824938 - RNA, 19 nt, Homo sapiens
  misc_RNA (1)...(19): siRNA sense strand
ccaacuaccucaagagcaa

SEQ ID NO: 1824939 - RNA, 19 nt, Homo sapiens
  misc_RNA (1)...(19): siRNA sense strand
gaagggcucuguggaaagu

SEQ ID NO: 1824940 - RNA, 19 nt, Homo sapiens
  misc_RNA (1)...(19): siRNA sense strand
ucagaucacuugguuuaaa

SEQ ID NO: 1824941 - RNA, 19 nt, Homo sapiens
  misc_RNA (1)...(19): siRNA sense strand
uagaaagggcuucaucaua

SEQ ID NO: 1824942 - RNA, 19 nt, Homo sapiens
  misc_RNA (1)...(19): siRNA sense strand
guaaaugcuuucaaguuca

SEQ ID NO: 1824943 - RNA, 19 nt, Homo sapiens
  misc_RNA (1)...(19): siRNA sense strand
gcauggaguuccugucuuc

SEQ ID NO: 1824944 - RNA, 19 nt, Homo sapiens
  misc_RNA (1)...(19): siRNA sense strand
ccucagaucacuugguuua

SEQ ID NO: 1824945 - RNA, 19 nt, Homo sapiens
  misc_RNA (1)...(19): siRNA sense strand
gaaauggugaguaaggaaa

SEQ ID NO: 1824946 - RNA, 19 nt, Homo sapiens
  misc_RNA (1)...(19): siRNA sense strand
gcaaagccaccaaccagaa

SEQ ID NO: 1824947 - RNA, 19 nt, Homo sapiens
  misc_RNA (1)...(19): siRNA sense strand
gaaacagaauugagagcau

SEQ ID NO: 1824948 - RNA, 19 nt, Homo sapiens
  misc_RNA (1)...(19): siRNA sense strand
cgacaaaccaauacaauca

SEQ ID NO: 1824949 - RNA, 19 nt, Homo sapiens
  misc_RNA (1)...(19): siRNA sense strand
caaaugcaacguacaaaga

SEQ ID NO: 1824950 - RNA, 19 nt, Homo sapiens
  misc_RNA (1)...(19): siRNA sense strand
guggcugacucuagaauuu

SEQ ID NO: 1824951 - RNA, 19 nt, Homo sapiens
  misc_RNA (1)...(19): siRNA sense strand
ggaaauaguggguuuacau

SEQ ID NO: 1824952 - RNA, 19 nt, Homo sapiens
  misc_RNA (1)...(19): siRNA sense strand
acaaggagcccaucacuau

SEQ ID NO: 1824953 - RNA, 19 nt, Homo sapiens
  misc_RNA (1)...(19): siRNA sense strand
ggagaggaccugaaacugu

SEQ ID NO: 1824954 - RNA, 19 nt, Homo sapiens
  misc_RNA (1)...(19): siRNA sense strand
caauucccaugccaacaua

SEQ ID NO: 1824955 - RNA, 19 nt, Homo sapiens
  misc_RNA (1)...(19): siRNA sense strand
gaaugccaccuccauguuu

SEQ ID NO: 1824956 - RNA, 19 nt, Homo sapiens
  misc_RNA (1)...(19): siRNA sense strand
uguaaaugcuuucaaguuc

SEQ ID NO: 1824957 - RNA, 19 nt, Homo sapiens
  misc_RNA (1)...(19): siRNA sense strand
gcacagagacccaaaagaa

SEQ ID NO: 1824958 - RNA, 19 nt, Homo sapiens
  misc_RNA (1)...(19): siRNA sense strand
gcaucagcauuuggcauua

SEQ ID NO: 1824959 - RNA, 19 nt, Homo sapiens
  misc_RNA (1)...(19): siRNA sense strand
uggaagaaauggcaaacaa

SEQ ID NO: 1824960 - RNA, 19 nt, Homo sapiens
  misc_RNA (1)...(19): siRNA sense strand
gaacaacguggugaagauu

SEQ ID NO: 1824961 - RNA, 19 nt, Homo sapiens
  misc_RNA (1)...(19): siRNA sense strand
ugagugauguugaggaaga

SEQ ID NO: 1824962 - RNA, 19 nt, Homo sapiens
  misc_RNA (1)...(19): siRNA sense strand
gggcaaaucacuuggaaga

SEQ ID NO: 1824963 - RNA, 19 nt, Homo sapiens
  misc_RNA (1)...(19): siRNA sense strand
gggaagaaacauaagcuuu

SEQ ID NO: 1824964 - RNA, 19 nt, Homo sapiens
  misc_RNA (1)...(19): siRNA sense strand
caacaugggaaacagaauu

SEQ ID NO: 1824965 - RNA, 19 nt, Homo sapiens
  misc_RNA (1)...(19): siRNA sense strand
acaccucagugcauauaua

SEQ ID NO: 1824966 - RNA, 19 nt, Homo sapiens
  misc_RNA (1)...(19): siRNA sense strand
gucauucccugccggguua

SEQ ID NO: 1824967 - RNA, 19 nt, Homo sapiens
  misc_RNA (1)...(19): siRNA sense strand
cugcaaauaucuagcugua

SEQ ID NO: 1824968 - RNA, 19 nt, Homo sapiens
  misc_RNA (1)...(19): siRNA sense strand
acacaucgacaaaccaaua

SEQ ID NO: 1824969 - RNA, 19 nt, Homo sapiens
  misc_RNA (1)...(19): siRNA sense strand
ccaccuccauguuugauga

SEQ ID NO: 1824970 - RNA, 19 nt, Homo sapiens
  misc_RNA (1)...(19): siRNA sense strand
gaggacuucuucaaggaaa

SEQ ID NO: 1824971 - RNA, 19 nt, Homo sapiens
  misc_RNA (1)...(19): siRNA sense strand
gccaagauuugcagaacuu

SEQ ID NO: 1824972 - RNA, 19 nt, Homo sapiens
  misc_RNA (1)...(19): siRNA sense strand
uaaauggucuuugccugaa

SEQ ID NO: 1824973 - RNA, 19 nt, Homo sapiens
  misc_RNA (1)...(19): siRNA sense strand
ugauggugauuguugaaua

SEQ ID NO: 1824974 - RNA, 19 nt, Homo sapiens
  misc_RNA (1)...(19): siRNA sense strand
gcagagccaggaauguaua

SEQ ID NO: 1824975 - RNA, 19 nt, Homo sapiens
  misc_RNA (1)...(19): siRNA sense strand
gagcacuccaucacucuua

SEQ ID NO: 1824976 - RNA, 19 nt, Homo sapiens
  misc_RNA (1)...(19): siRNA sense strand
gcagggaauuauacaaucu

SEQ ID NO: 1824977 - RNA, 19 nt, Homo sapiens
  misc_RNA (1)...(19): siRNA sense strand
gaccaucauucaaaucugu

SEQ ID NO: 1824978 - RNA, 19 nt, Homo sapiens
  misc_RNA (1)...(19): siRNA sense strand
acgcugagcuggaaaggaa

SEQ ID NO: 1824979 - RNA, 19 nt, Homo sapiens
  misc_RNA (1)...(19): siRNA sense strand
gaugucagauauguaaaug

SEQ ID NO: 1824980 - RNA, 19 nt, Homo sapiens
  misc_RNA (1)...(19): siRNA sense strand
cagaugaaguuccuuugga

SEQ ID NO: 1824981 - RNA, 19 nt, Homo sapiens
  misc_RNA (1)...(19): siRNA sense strand
caagagccuggaauuauuu

SEQ ID NO: 1824982 - RNA, 19 nt, Homo sapiens
  misc_RNA (1)...(19): siRNA sense strand
aagaaauccuccagaagaa

SEQ ID NO: 1824983 - RNA, 19 nt, Homo sapiens
  misc_RNA (1)...(19): siRNA sense strand
gcgcauggcaauaauagaa

SEQ ID NO: 1824984 - RNA, 19 nt, Homo sapiens
  misc_RNA (1)...(19): siRNA sense strand
gaggaugcagggaauuaua

SEQ ID NO: 1824985 - RNA, 19 nt, Homo sapiens
  misc_RNA (1)...(19): siRNA sense strand
ucaaggacguaacugaaga

SEQ ID NO: 1824986 - RNA, 19 nt, Homo sapiens
  misc_RNA (1)...(19): siRNA sense strand
caaaugaccuggaguuacc

SEQ ID NO: 1824987 - RNA, 19 nt, Homo sapiens
  misc_RNA (1)...(19): siRNA sense strand
ggaggauucugacgguuuc

SEQ ID NO: 1824988 - RNA, 19 nt, Homo sapiens
  misc_RNA (1)...(19): siRNA sense strand
cguggcuacucguuaauua

SEQ ID NO: 1824989 - RNA, 19 nt, Homo sapiens
  misc_RNA (1)...(19): siRNA sense strand
guacucuacuccugaaauc

SEQ ID NO: 1824990 - RNA, 19 nt, Homo sapiens
  misc_RNA (1)...(19): siRNA sense strand
gaaagugcauccacagaga

SEQ ID NO: 1824991 - RNA, 19 nt, Homo sapiens
  misc_RNA (1)...(19): siRNA sense strand
gcaacgagcucuaugacau

SEQ ID NO: 1824992 - RNA, 19 nt, Homo sapiens
  misc_RNA (1)...(19): siRNA sense strand
gcaagaacgugcaucuguu

SEQ ID NO: 1824993 - RNA, 19 nt, Homo sapiens
  misc_RNA (1)...(19): siRNA sense strand
gcgaauaccuguccuacga

SEQ ID NO: 1824994 - RNA, 19 nt, Homo sapiens
  misc_RNA (1)...(19): siRNA sense strand
gacaagcacugccacaaga

SEQ ID NO: 1824995 - RNA, 19 nt, Homo sapiens
  misc_RNA (1)...(19): siRNA sense strand
gaagacauuugaggaauuc

SEQ ID NO: 1824996 - RNA, 19 nt, Homo sapiens
  misc_RNA (1)...(19): siRNA sense strand
uggaagaucuugucugcua

SEQ ID NO: 1824997 - RNA, 19 nt, Homo sapiens
  misc_RNA (1)...(19): siRNA sense strand
gagcaggcauagacaagaa

SEQ ID NO: 1824998 - RNA, 19 nt, Homo sapiens
  misc_RNA (1)...(19): siRNA sense strand
cgucaucgcugucuucuuc

SEQ ID NO: 1824999 - RNA, 19 nt, Homo sapiens
  misc_RNA (1)...(19): siRNA sense strand
gaccugggcucguaugugu

SEQ ID NO: 1825000 - RNA, 19 nt, Homo sapiens
  misc_RNA (1)...(19): siRNA sense strand
caacgugucugccauguac

SEQ ID NO: 1825001 - RNA, 19 nt, Homo sapiens
  misc_RNA (1)...(19): siRNA sense strand
gagcagccauucaucaaca

SEQ ID NO: 1825002 - RNA, 19 nt, Homo sapiens
  misc_RNA (1)...(19): siRNA sense strand
gugaagaucugugacuuug

SEQ ID NO: 1825003 - RNA, 19 nt, Homo sapiens
  misc_RNA (1)...(19): siRNA sense strand
gcagaucaaugaggaguuc

SEQ ID NO: 1825004 - RNA, 19 nt, Homo sapiens
  misc_RNA (1)...(19): siRNA sense strand
ggaggaguuugagcagaua

SEQ ID NO: 1825005 - RNA, 19 nt, Homo sapiens
  misc_RNA (1)...(19): siRNA sense strand
ggaaagaauaagacuguga

SEQ ID NO: 1825006 - RNA, 19 nt, Homo sapiens
  misc_RNA (1)...(19): siRNA sense strand
acacagaacucuccagcau

SEQ ID NO: 1825007 - RNA, 19 nt, Homo sapiens
  misc_RNA (1)...(19): siRNA sense strand
ugaagacauuugaggaauu

SEQ ID NO: 1825008 - RNA, 19 nt, Homo sapiens
  misc_RNA (1)...(19): siRNA sense strand
gaacaucacggaggaguca

SEQ ID NO: 1825009 - RNA, 19 nt, Homo sapiens
  misc_RNA (1)...(19): siRNA sense strand
guggaaggcuccgaggaua

SEQ ID NO: 1825010 - RNA, 19 nt, Homo sapiens
  misc_RNA (1)...(19): siRNA sense strand
gaugaagacauuugaggaa

SEQ ID NO: 1825011 - RNA, 19 nt, Homo sapiens
  misc_RNA (1)...(19): siRNA sense strand
ggagagcaccgaggucauu

SEQ ID NO: 1825012 - RNA, 19 nt, Homo sapiens
  misc_RNA (1)...(19): siRNA sense strand
ugaccgaccuccuggugaa

SEQ ID NO: 1825013 - RNA, 19 nt, Homo sapiens
  misc_RNA (1)...(19): siRNA sense strand
gcacgagggccacuaugug

SEQ ID NO: 1825014 - RNA, 19 nt, Homo sapiens
  misc_RNA (1)...(19): siRNA sense strand
agaauaagacugugagcaa

SEQ ID NO: 1825015 - RNA, 19 nt, Homo sapiens
  misc_RNA (1)...(19): siRNA sense strand
ccuccaggaugaagacauu

SEQ ID NO: 1825016 - RNA, 19 nt, Homo sapiens
  misc_RNA (1)...(19): siRNA sense strand
ggugaagaucugugacuuu

SEQ ID NO: 1825017 - RNA, 19 nt, Homo sapiens
  misc_RNA (1)...(19): siRNA sense strand
caaaggcucuguggacaac

SEQ ID NO: 1825018 - RNA, 19 nt, Homo sapiens
  misc_RNA (1)...(19): siRNA sense strand
gccuggagcugguggugaa

SEQ ID NO: 1825019 - RNA, 19 nt, Homo sapiens
  misc_RNA (1)...(19): siRNA sense strand
ggacaccuggaccgaguuu

SEQ ID NO: 1825020 - RNA, 19 nt, Homo sapiens
  misc_RNA (1)...(19): siRNA sense strand
aaagcgacguggugaagau

SEQ ID NO: 1825021 - RNA, 19 nt, Homo sapiens
  misc_RNA (1)...(19): siRNA sense strand
ggaaagcgacguggugaag

SEQ ID NO: 1825022 - RNA, 19 nt, Homo sapiens
  misc_RNA (1)...(19): siRNA sense strand
gcucaucuacuucuaugug

SEQ ID NO: 1825023 - RNA, 19 nt, Homo sapiens
  misc_RNA (1)...(19): siRNA sense strand
ucuaugacauccagcuguu

SEQ ID NO: 1825024 - RNA, 19 nt, Homo sapiens
  misc_RNA (1)...(19): siRNA sense strand
gaaagcgacguggugaaga

SEQ ID NO: 1825025 - RNA, 19 nt, Homo sapiens
  misc_RNA (1)...(19): siRNA sense strand
ucaagauccucauucacau

SEQ ID NO: 1825026 - RNA, 19 nt, Homo sapiens
  misc_RNA (1)...(19): siRNA sense strand
acaaguguguggucuccaa

SEQ ID NO: 1825027 - RNA, 19 nt, Homo sapiens
  misc_RNA (1)...(19): siRNA sense strand
ugagcaagcuggugaucca

SEQ ID NO: 1825028 - RNA, 19 nt, Homo sapiens
  misc_RNA (1)...(19): siRNA sense strand
guuccuggcuucccgaaag

SEQ ID NO: 1825029 - RNA, 19 nt, Homo sapiens
  misc_RNA (1)...(19): siRNA sense strand
cggaggaguuugagcagau

SEQ ID NO: 1825030 - RNA, 19 nt, Homo sapiens
  misc_RNA (1)...(19): siRNA sense strand
cccgggacaucuacaaaga

SEQ ID NO: 1825031 - RNA, 19 nt, Homo sapiens
  misc_RNA (1)...(19): siRNA sense strand
gagcucaagauccucauuc

SEQ ID NO: 1825032 - RNA, 19 nt, Homo sapiens
  misc_RNA (1)...(19): siRNA sense strand
ggaggagucacacgucauc

SEQ ID NO: 1825033 - RNA, 19 nt, Homo sapiens
  misc_RNA (1)...(19): siRNA sense strand
caacggcauccagcgauuu

SEQ ID NO: 1825034 - RNA, 19 nt, Homo sapiens
  misc_RNA (1)...(19): siRNA sense strand
caccauggcccuacacauc

SEQ ID NO: 1825035 - RNA, 19 nt, Homo sapiens
  misc_RNA (1)...(19): siRNA sense strand
cugaaagcaucuucgacaa

SEQ ID NO: 1825036 - RNA, 19 nt, Homo sapiens
  misc_RNA (1)...(19): siRNA sense strand
ggaaggcuccgaggauaag

SEQ ID NO: 1825037 - RNA, 19 nt, Homo sapiens
  misc_RNA (1)...(19): siRNA sense strand
ggaggaugcgggaccguau

SEQ ID NO: 1825038 - RNA, 19 nt, Homo sapiens
  misc_RNA (1)...(19): siRNA sense strand
cggcucaucuacuucuaug

SEQ ID NO: 1825039 - RNA, 19 nt, Homo sapiens
  misc_RNA (1)...(19): siRNA sense strand
uggugaagcugcccgugaa

SEQ ID NO: 1825040 - RNA, 19 nt, Homo sapiens
  misc_RNA (1)...(19): siRNA sense strand
gaagaucuugucugcuaca

SEQ ID NO: 1825041 - RNA, 19 nt, Homo sapiens
  misc_RNA (1)...(19): siRNA sense strand
ugucugccauguacaagug

SEQ ID NO: 1825042 - RNA, 19 nt, Homo sapiens
  misc_RNA (1)...(19): siRNA sense strand
acaacggcauccagcgauu

SEQ ID NO: 1825043 - RNA, 19 nt, Homo sapiens
  misc_RNA (1)...(19): siRNA sense strand
agagacggcacaaggauga

SEQ ID NO: 1825044 - RNA, 19 nt, Homo sapiens
  misc_RNA (1)...(19): siRNA sense strand
gggcuucuccagaccaaga

SEQ ID NO: 1825045 - RNA, 19 nt, Homo sapiens
  misc_RNA (1)...(19): siRNA sense strand
cgcccgaguuccaguggua

SEQ ID NO: 1825046 - RNA, 19 nt, Homo sapiens
  misc_RNA (1)...(19): siRNA sense strand
caacgagcucuaugacauc

SEQ ID NO: 1825047 - RNA, 19 nt, Homo sapiens
  misc_RNA (1)...(19): siRNA sense strand
cagauagagagcaggcaua

SEQ ID NO: 1825048 - RNA, 19 nt, Homo sapiens
  misc_RNA (1)...(19): siRNA sense strand
ggacaaccagacagacagu

SEQ ID NO: 1825049 - RNA, 19 nt, Homo sapiens
  misc_RNA (1)...(19): siRNA sense strand
cuccucaucuucuguaaca

SEQ ID NO: 1825050 - RNA, 19 nt, Homo sapiens
  misc_RNA (1)...(19): siRNA sense strand
caacaaggugggccaggau

SEQ ID NO: 1825051 - RNA, 19 nt, Homo sapiens
  misc_RNA (1)...(19): siRNA sense strand
ggacacccugcaagauguu

SEQ ID NO: 1825052 - RNA, 19 nt, Homo sapiens
  misc_RNA (1)...(19): siRNA sense strand
gagcaccgaggucauugug

SEQ ID NO: 1825053 - RNA, 19 nt, Homo sapiens
  misc_RNA (1)...(19): siRNA sense strand
gagagcaggcauagacaag

SEQ ID NO: 1825054 - RNA, 19 nt, Homo sapiens
  misc_RNA (1)...(19): siRNA sense strand
ucauggugaucguggaguu

SEQ ID NO: 1825055 - RNA, 19 nt, Homo sapiens
  misc_RNA (1)...(19): siRNA sense strand
ggaggagcaaugcgaauac

SEQ ID NO: 1825056 - RNA, 19 nt, Homo sapiens
  misc_RNA (1)...(19): siRNA sense strand
cacaugcccuggugcucaa

SEQ ID NO: 1825057 - RNA, 19 nt, Homo sapiens
  misc_RNA (1)...(19): siRNA sense strand
gacacgcucuuggucaaca

SEQ ID NO: 1825058 - RNA, 19 nt, Homo sapiens
  misc_RNA (1)...(19): siRNA sense strand
ccaggaugaagacauuuga

SEQ ID NO: 1825059 - RNA, 19 nt, Homo sapiens
  misc_RNA (1)...(19): siRNA sense strand
acgagcaucugcgcuggua

SEQ ID NO: 1825060 - RNA, 19 nt, Homo sapiens
  misc_RNA (1)...(19): siRNA sense strand
uggacacccugcaagaugu

SEQ ID NO: 1825061 - RNA, 19 nt, Homo sapiens
  misc_RNA (1)...(19): siRNA sense strand
ccaugugggugcccugucu

SEQ ID NO: 1825062 - RNA, 19 nt, Homo sapiens
  misc_RNA (1)...(19): siRNA sense strand
ccagagggauggaguuccu

SEQ ID NO: 1825063 - RNA, 19 nt, Homo sapiens
  misc_RNA (1)...(19): siRNA sense strand
gaccauggaagaucuuguc

SEQ ID NO: 1825064 - RNA, 19 nt, Homo sapiens
  misc_RNA (1)...(19): siRNA sense strand
ugagcccgcugaccaugga

SEQ ID NO: 1825065 - RNA, 19 nt, Homo sapiens
  misc_RNA (1)...(19): siRNA sense strand
ucguggaguucugcaagua

SEQ ID NO: 1825066 - RNA, 19 nt, Homo sapiens
  misc_RNA (1)...(19): siRNA sense strand
uggaggagcaaugcgaaua

SEQ ID NO: 1825067 - RNA, 19 nt, Homo sapiens
  misc_RNA (1)...(19): siRNA sense strand
ugacaagcacugccacaag

SEQ ID NO: 1825068 - RNA, 19 nt, Homo sapiens
  misc_RNA (1)...(19): siRNA sense strand
gcugcacgaugcccuguac

SEQ ID NO: 1825069 - RNA, 19 nt, Homo sapiens
  misc_RNA (1)...(19): siRNA sense strand
ugucggagcucaagauccu

SEQ ID NO: 1825070 - RNA, 19 nt, Homo sapiens
  misc_RNA (1)...(19): siRNA sense strand
caagaccucaugccacagu

SEQ ID NO: 1825071 - RNA, 19 nt, Homo sapiens
  misc_RNA (1)...(19): siRNA sense strand
acggcaaccucuccaacuu

SEQ ID NO: 1825072 - RNA, 19 nt, Homo sapiens
  misc_RNA (1)...(19): siRNA sense strand
gaugcgggaccguaucugu

SEQ ID NO: 1825073 - RNA, 19 nt, Homo sapiens
  misc_RNA (1)...(19): siRNA sense strand
ccgaguuuguggagggaaa

SEQ ID NO: 1825074 - RNA, 19 nt, Homo sapiens
  misc_RNA (1)...(19): siRNA sense strand
guggagggaaagaauaaga

SEQ ID NO: 1825075 - RNA, 19 nt, Homo sapiens
  misc_RNA (1)...(19): siRNA sense strand
ucacaggcaacgagcucua

SEQ ID NO: 1825076 - RNA, 19 nt, Homo sapiens
  misc_RNA (1)...(19): siRNA sense strand
gagaggcugcuggaggaaa

SEQ ID NO: 1825077 - RNA, 19 nt, Homo sapiens
  misc_RNA (1)...(19): siRNA sense strand
aagccgacagcuacaagua

SEQ ID NO: 1825078 - RNA, 19 nt, Homo sapiens
  misc_RNA (1)...(19): siRNA sense strand
gagagcaccgaggucauug

SEQ ID NO: 1825079 - RNA, 19 nt, Homo sapiens
  misc_RNA (1)...(19): siRNA sense strand
ccaaggcgagaccugcauu

SEQ ID NO: 1825080 - RNA, 19 nt, Homo sapiens
  misc_RNA (1)...(19): siRNA sense strand
ugaaagcaucuucgacaag

SEQ ID NO: 1825081 - RNA, 19 nt, Homo sapiens
  misc_RNA (1)...(19): siRNA sense strand
caagauccucauucacauc

SEQ ID NO: 1825082 - RNA, 19 nt, Homo sapiens
  misc_RNA (1)...(19): siRNA sense strand
cucaagauccucauucaca

SEQ ID NO: 1825083 - RNA, 19 nt, Homo sapiens
  misc_RNA (1)...(19): siRNA sense strand
ggagcucaagauccucauu

SEQ ID NO: 1825084 - RNA, 19 nt, Homo sapiens
  misc_RNA (1)...(19): siRNA sense strand
uggaaggcuccgaggauaa

SEQ ID NO: 1825085 - RNA, 19 nt, Homo sapiens
  misc_RNA (1)...(19): siRNA sense strand
caagccauccgaggagcua

SEQ ID NO: 1825086 - RNA, 19 nt, Homo sapiens
  misc_RNA (1)...(19): siRNA sense strand
ccaacgugucugccaugua

SEQ ID NO: 1825087 - RNA, 19 nt, Homo sapiens
  misc_RNA (1)...(19): siRNA sense strand
ugacaccguggccgugaaa

SEQ ID NO: 1825088 - RNA, 19 nt, Homo sapiens
  misc_RNA (1)...(19): siRNA sense strand
gugagagacggcacaagga

SEQ ID NO: 1825089 - RNA, 19 nt, Homo sapiens
  misc_RNA (1)...(19): siRNA sense strand
agagugacgugugguccuu

SEQ ID NO: 1825090 - RNA, 19 nt, Homo sapiens
  misc_RNA (1)...(19): siRNA sense strand
gaaagugcauccacagaga

SEQ ID NO: 1825091 - RNA, 19 nt, Homo sapiens
  misc_RNA (1)...(19): siRNA sense strand
gcaacgagcucuaugacau

SEQ ID NO: 1825092 - RNA, 19 nt, Homo sapiens
  misc_RNA (1)...(19): siRNA sense strand
gcaagaacgugcaucuguu

SEQ ID NO: 1825093 - RNA, 19 nt, Homo sapiens
  misc_RNA (1)...(19): siRNA sense strand
gcgaauaccuguccuacga

SEQ ID NO: 1825094 - RNA, 19 nt, Homo sapiens
  misc_RNA (1)...(19): siRNA sense strand
gacaagcacugccacaaga

SEQ ID NO: 1825095 - RNA, 19 nt, Homo sapiens
  misc_RNA (1)...(19): siRNA sense strand
gaagacauuugaggaauuc

SEQ ID NO: 1825096 - RNA, 19 nt, Homo sapiens
  misc_RNA (1)...(19): siRNA sense strand
uggaagaucuugucugcua

SEQ ID NO: 1825097 - RNA, 19 nt, Homo sapiens
  misc_RNA (1)...(19): siRNA sense strand
gagcaggcauagacaagaa

SEQ ID NO: 1825098 - RNA, 19 nt, Homo sapiens
  misc_RNA (1)...(19): siRNA sense strand
cgucaucgcugucuucuuc

SEQ ID NO: 1825099 - RNA, 19 nt, Homo sapiens
  misc_RNA (1)...(19): siRNA sense strand
gaccugggcucguaugugu

SEQ ID NO: 1825100 - RNA, 19 nt, Homo sapiens
  misc_RNA (1)...(19): siRNA sense strand
caacgugucugccauguac

SEQ ID NO: 1825101 - RNA, 19 nt, Homo sapiens
  misc_RNA (1)...(19): siRNA sense strand
gagcagccauucaucaaca

SEQ ID NO: 1825102 - RNA, 19 nt, Homo sapiens
  misc_RNA (1)...(19): siRNA sense strand
gugaagaucugugacuuug

SEQ ID NO: 1825103 - RNA, 19 nt, Homo sapiens
  misc_RNA (1)...(19): siRNA sense strand
gcagaucaaugaggaguuc

SEQ ID NO: 1825104 - RNA, 19 nt, Homo sapiens
  misc_RNA (1)...(19): siRNA sense strand
ggaggaguuugagcagaua

SEQ ID NO: 1825105 - RNA, 19 nt, Homo sapiens
  misc_RNA (1)...(19): siRNA sense strand
ggaaagaauaagacuguga

SEQ ID NO: 1825106 - RNA, 19 nt, Homo sapiens
  misc_RNA (1)...(19): siRNA sense strand
acacagaacucuccagcau

SEQ ID NO: 1825107 - RNA, 19 nt, Homo sapiens
  misc_RNA (1)...(19): siRNA sense strand
ugaagacauuugaggaauu

SEQ ID NO: 1825108 - RNA, 19 nt, Homo sapiens
  misc_RNA (1)...(19): siRNA sense strand
gaacaucacggaggaguca

SEQ ID NO: 1825109 - RNA, 19 nt, Homo sapiens
  misc_RNA (1)...(19): siRNA sense strand
guggaaggcuccgaggaua

SEQ ID NO: 1825110 - RNA, 19 nt, Homo sapiens
  misc_RNA (1)...(19): siRNA sense strand
gaugaagacauuugaggaa

SEQ ID NO: 1825111 - RNA, 19 nt, Homo sapiens
  misc_RNA (1)...(19): siRNA sense strand
ggagagcaccgaggucauu

SEQ ID NO: 1825112 - RNA, 19 nt, Homo sapiens
  misc_RNA (1)...(19): siRNA sense strand
ugaccgaccuccuggugaa

SEQ ID NO: 1825113 - RNA, 19 nt, Homo sapiens
  misc_RNA (1)...(19): siRNA sense strand
gcacgagggccacuaugug

SEQ ID NO: 1825114 - RNA, 19 nt, Homo sapiens
  misc_RNA (1)...(19): siRNA sense strand
agaauaagacugugagcaa

SEQ ID NO: 1825115 - RNA, 19 nt, Homo sapiens
  misc_RNA (1)...(19): siRNA sense strand
ccuccaggaugaagacauu

SEQ ID NO: 1825116 - RNA, 19 nt, Homo sapiens
  misc_RNA (1)...(19): siRNA sense strand
ggugaagaucugugacuuu

SEQ ID NO: 1825117 - RNA, 19 nt, Homo sapiens
  misc_RNA (1)...(19): siRNA sense strand
caaaggcucuguggacaac

SEQ ID NO: 1825118 - RNA, 19 nt, Homo sapiens
  misc_RNA (1)...(19): siRNA sense strand
gccuggagcugguggugaa

SEQ ID NO: 1825119 - RNA, 19 nt, Homo sapiens
  misc_RNA (1)...(19): siRNA sense strand
ggacaccuggaccgaguuu

SEQ ID NO: 1825120 - RNA, 19 nt, Homo sapiens
  misc_RNA (1)...(19): siRNA sense strand
aaagcgacguggugaagau

SEQ ID NO: 1825121 - RNA, 19 nt, Homo sapiens
  misc_RNA (1)...(19): siRNA sense strand
ggaaagcgacguggugaag

SEQ ID NO: 1825122 - RNA, 19 nt, Homo sapiens
  misc_RNA (1)...(19): siRNA sense strand
gcucaucuacuucuaugug

SEQ ID NO: 1825123 - RNA, 19 nt, Homo sapiens
  misc_RNA (1)...(19): siRNA sense strand
ucuaugacauccagcuguu

SEQ ID NO: 1825124 - RNA, 19 nt, Homo sapiens
  misc_RNA (1)...(19): siRNA sense strand
gaaagcgacguggugaaga

SEQ ID NO: 1825125 - RNA, 19 nt, Homo sapiens
  misc_RNA (1)...(19): siRNA sense strand
ucaagauccucauucacau

SEQ ID NO: 1825126 - RNA, 19 nt, Homo sapiens
  misc_RNA (1)...(19): siRNA sense strand
acaaguguguggucuccaa

SEQ ID NO: 1825127 - RNA, 19 nt, Homo sapiens
  misc_RNA (1)...(19): siRNA sense strand
ugagcaagcuggugaucca

SEQ ID NO: 1825128 - RNA, 19 nt, Homo sapiens
  misc_RNA (1)...(19): siRNA sense strand
guuccuggcuucccgaaag

SEQ ID NO: 1825129 - RNA, 19 nt, Homo sapiens
  misc_RNA (1)...(19): siRNA sense strand
cggaggaguuugagcagau

SEQ ID NO: 1825130 - RNA, 19 nt, Homo sapiens
  misc_RNA (1)...(19): siRNA sense strand
cccgggacaucuacaaaga

SEQ ID NO: 1825131 - RNA, 19 nt, Homo sapiens
  misc_RNA (1)...(19): siRNA sense strand
gagcucaagauccucauuc

SEQ ID NO: 1825132 - RNA, 19 nt, Homo sapiens
  misc_RNA (1)...(19): siRNA sense strand
ggaggagucacacgucauc

SEQ ID NO: 1825133 - RNA, 19 nt, Homo sapiens
  misc_RNA (1)...(19): siRNA sense strand
caacggcauccagcgauuu

SEQ ID NO: 1825134 - RNA, 19 nt, Homo sapiens
  misc_RNA (1)...(19): siRNA sense strand
caccauggcccuacacauc

SEQ ID NO: 1825135 - RNA, 19 nt, Homo sapiens
  misc_RNA (1)...(19): siRNA sense strand
cugaaagcaucuucgacaa

SEQ ID NO: 1825136 - RNA, 19 nt, Homo sapiens
  misc_RNA (1)...(19): siRNA sense strand
ggaaggcuccgaggauaag

SEQ ID NO: 1825137 - RNA, 19 nt, Homo sapiens
  misc_RNA (1)...(19): siRNA sense strand
ggaggaugcgggaccguau

SEQ ID NO: 1825138 - RNA, 19 nt, Homo sapiens
  misc_RNA (1)...(19): siRNA sense strand
cggcucaucuacuucuaug

SEQ ID NO: 1825139 - RNA, 19 nt, Homo sapiens
  misc_RNA (1)...(19): siRNA sense strand
uggugaagcugcccgugaa

SEQ ID NO: 1825140 - RNA, 19 nt, Homo sapiens
  misc_RNA (1)...(19): siRNA sense strand
gaagaucuugucugcuaca

SEQ ID NO: 1825141 - RNA, 19 nt, Homo sapiens
  misc_RNA (1)...(19): siRNA sense strand
ugucugccauguacaagug

SEQ ID NO: 1825142 - RNA, 19 nt, Homo sapiens
  misc_RNA (1)...(19): siRNA sense strand
acaacggcauccagcgauu

SEQ ID NO: 1825143 - RNA, 19 nt, Homo sapiens
  misc_RNA (1)...(19): siRNA sense strand
agagacggcacaaggauga

SEQ ID NO: 1825144 - RNA, 19 nt, Homo sapiens
  misc_RNA (1)...(19): siRNA sense strand
gggcuucuccagaccaaga

SEQ ID NO: 1825145 - RNA, 19 nt, Homo sapiens
  misc_RNA (1)...(19): siRNA sense strand
cgcccgaguuccaguggua

SEQ ID NO: 1825146 - RNA, 19 nt, Homo sapiens
  misc_RNA (1)...(19): siRNA sense strand
caacgagcucuaugacauc

SEQ ID NO: 1825147 - RNA, 19 nt, Homo sapiens
  misc_RNA (1)...(19): siRNA sense strand
cagauagagagcaggcaua

SEQ ID NO: 1825148 - RNA, 19 nt, Homo sapiens
  misc_RNA (1)...(19): siRNA sense strand
ggacaaccagacagacagu

SEQ ID NO: 1825149 - RNA, 19 nt, Homo sapiens
  misc_RNA (1)...(19): siRNA sense strand
cuccucaucuucuguaaca

SEQ ID NO: 1825150 - RNA, 19 nt, Homo sapiens
  misc_RNA (1)...(19): siRNA sense strand
caacaaggugggccaggau

SEQ ID NO: 1825151 - RNA, 19 nt, Homo sapiens
  misc_RNA (1)...(19): siRNA sense strand
ggacacccugcaagauguu

SEQ ID NO: 1825152 - RNA, 19 nt, Homo sapiens
  misc_RNA (1)...(19): siRNA sense strand
gagcaccgaggucauugug

SEQ ID NO: 1825153 - RNA, 19 nt, Homo sapiens
  misc_RNA (1)...(19): siRNA sense strand
gagagcaggcauagacaag

SEQ ID NO: 1825154 - RNA, 19 nt, Homo sapiens
  misc_RNA (1)...(19): siRNA sense strand
ucauggugaucguggaguu

SEQ ID NO: 1825155 - RNA, 19 nt, Homo sapiens
  misc_RNA (1)...(19): siRNA sense strand
ggaggagcaaugcgaauac

SEQ ID NO: 1825156 - RNA, 19 nt, Homo sapiens
  misc_RNA (1)...(19): siRNA sense strand
cacaugcccuggugcucaa

SEQ ID NO: 1825157 - RNA, 19 nt, Homo sapiens
  misc_RNA (1)...(19): siRNA sense strand
gacacgcucuuggucaaca

SEQ ID NO: 1825158 - RNA, 19 nt, Homo sapiens
  misc_RNA (1)...(19): siRNA sense strand
ccaggaugaagacauuuga

SEQ ID NO: 1825159 - RNA, 19 nt, Homo sapiens
  misc_RNA (1)...(19): siRNA sense strand
acgagcaucugcgcuggua

SEQ ID NO: 1825160 - RNA, 19 nt, Homo sapiens
  misc_RNA (1)...(19): siRNA sense strand
uggacacccugcaagaugu

SEQ ID NO: 1825161 - RNA, 19 nt, Homo sapiens
  misc_RNA (1)...(19): siRNA sense strand
ccaugugggugcccugucu

SEQ ID NO: 1825162 - RNA, 19 nt, Homo sapiens
  misc_RNA (1)...(19): siRNA sense strand
ccagagggauggaguuccu

SEQ ID NO: 1825163 - RNA, 19 nt, Homo sapiens
  misc_RNA (1)...(19): siRNA sense strand
gaccauggaagaucuuguc

SEQ ID NO: 1825164 - RNA, 19 nt, Homo sapiens
  misc_RNA (1)...(19): siRNA sense strand
ugagcccgcugaccaugga

SEQ ID NO: 1825165 - RNA, 19 nt, Homo sapiens
  misc_RNA (1)...(19): siRNA sense strand
ucguggaguucugcaagua

SEQ ID NO: 1825166 - RNA, 19 nt, Homo sapiens
  misc_RNA (1)...(19): siRNA sense strand
uggaggagcaaugcgaaua

SEQ ID NO: 1825167 - RNA, 19 nt, Homo sapiens
  misc_RNA (1)...(19): siRNA sense strand
ugacaagcacugccacaag

SEQ ID NO: 1825168 - RNA, 19 nt, Homo sapiens
  misc_RNA (1)...(19): siRNA sense strand
gcugcacgaugcccuguac

SEQ ID NO: 1825169 - RNA, 19 nt, Homo sapiens
  misc_RNA (1)...(19): siRNA sense strand
ugucggagcucaagauccu

SEQ ID NO: 1825170 - RNA, 19 nt, Homo sapiens
  misc_RNA (1)...(19): siRNA sense strand
caagaccucaugccacagu

SEQ ID NO: 1825171 - RNA, 19 nt, Homo sapiens
  misc_RNA (1)...(19): siRNA sense strand
acggcaaccucuccaacuu

SEQ ID NO: 1825172 - RNA, 19 nt, Homo sapiens
  misc_RNA (1)...(19): siRNA sense strand
gaugcgggaccguaucugu

SEQ ID NO: 1825173 - RNA, 19 nt, Homo sapiens
  misc_RNA (1)...(19): siRNA sense strand
ccgaguuuguggagggaaa

SEQ ID NO: 1825174 - RNA, 19 nt, Homo sapiens
  misc_RNA (1)...(19): siRNA sense strand
guggagggaaagaauaaga

SEQ ID NO: 1825175 - RNA, 19 nt, Homo sapiens
  misc_RNA (1)...(19): siRNA sense strand
ucacaggcaacgagcucua

SEQ ID NO: 1825176 - RNA, 19 nt, Homo sapiens
  misc_RNA (1)...(19): siRNA sense strand
gagaggcugcuggaggaaa

SEQ ID NO: 1825177 - RNA, 19 nt, Homo sapiens
  misc_RNA (1)...(19): siRNA sense strand
aagccgacagcuacaagua

SEQ ID NO: 1825178 - RNA, 19 nt, Homo sapiens
  misc_RNA (1)...(19): siRNA sense strand
gagagcaccgaggucauug

SEQ ID NO: 1825179 - RNA, 19 nt, Homo sapiens
  misc_RNA (1)...(19): siRNA sense strand
ccaaggcgagaccugcauu

SEQ ID NO: 1825180 - RNA, 19 nt, Homo sapiens
  misc_RNA (1)...(19): siRNA sense strand
ugaaagcaucuucgacaag

SEQ ID NO: 1825181 - RNA, 19 nt, Homo sapiens
  misc_RNA (1)...(19): siRNA sense strand
caagauccucauucacauc

SEQ ID NO: 1825182 - RNA, 19 nt, Homo sapiens
  misc_RNA (1)...(19): siRNA sense strand
cucaagauccucauucaca

SEQ ID NO: 1825183 - RNA, 19 nt, Homo sapiens
  misc_RNA (1)...(19): siRNA sense strand
ggagcucaagauccucauu

SEQ ID NO: 1825184 - RNA, 19 nt, Homo sapiens
  misc_RNA (1)...(19): siRNA sense strand
uggaaggcuccgaggauaa

SEQ ID NO: 1825185 - RNA, 19 nt, Homo sapiens
  misc_RNA (1)...(19): siRNA sense strand
caagccauccgaggagcua

SEQ ID NO: 1825186 - RNA, 19 nt, Homo sapiens
  misc_RNA (1)...(19): siRNA sense strand
ccaacgugucugccaugua

SEQ ID NO: 1825187 - RNA, 19 nt, Homo sapiens
  misc_RNA (1)...(19): siRNA sense strand
ugacaccguggccgugaaa

SEQ ID NO: 1825188 - RNA, 19 nt, Homo sapiens
  misc_RNA (1)...(19): siRNA sense strand
gugagagacggcacaagga

SEQ ID NO: 1825189 - RNA, 19 nt, Homo sapiens
  misc_RNA (1)...(19): siRNA sense strand
agagugacgugugguccuu

SEQ ID NO: 1825190 - RNA, 19 nt, Homo sapiens
  misc_RNA (1)...(19): siRNA sense strand
ggacaaggcucugaaauac

SEQ ID NO: 1825191 - RNA, 19 nt, Homo sapiens
  misc_RNA (1)...(19): siRNA sense strand
ugaaauaccuggaggacaa

SEQ ID NO: 1825192 - RNA, 19 nt, Homo sapiens
  misc_RNA (1)...(19): siRNA sense strand
gauccugacuuaccaguau

SEQ ID NO: 1825193 - RNA, 19 nt, Homo sapiens
  misc_RNA (1)...(19): siRNA sense strand
cagaggagcugaugagcaa

SEQ ID NO: 1825194 - RNA, 19 nt, Homo sapiens
  misc_RNA (1)...(19): siRNA sense strand
cagcaaagauguggaguug

SEQ ID NO: 1825195 - RNA, 19 nt, Homo sapiens
  misc_RNA (1)...(19): siRNA sense strand
caugauggauugcuacuug

SEQ ID NO: 1825196 - RNA, 19 nt, Homo sapiens
  misc_RNA (1)...(19): siRNA sense strand
gcaaacuggugccuguuga

SEQ ID NO: 1825197 - RNA, 19 nt, Homo sapiens
  misc_RNA (1)...(19): siRNA sense strand
gagcgguucucucucauau

SEQ ID NO: 1825198 - RNA, 19 nt, Homo sapiens
  misc_RNA (1)...(19): siRNA sense strand
gcuauuaugucccuuaugg

SEQ ID NO: 1825199 - RNA, 19 nt, Homo sapiens
  misc_RNA (1)...(19): siRNA sense strand
ggaagaagcuggggaagaa

SEQ ID NO: 1825200 - RNA, 19 nt, Homo sapiens
  misc_RNA (1)...(19): siRNA sense strand
gaagauuucagaugccaaa

SEQ ID NO: 1825201 - RNA, 19 nt, Homo sapiens
  misc_RNA (1)...(19): siRNA sense strand
gcagaagucagccauguau

SEQ ID NO: 1825202 - RNA, 19 nt, Homo sapiens
  misc_RNA (1)...(19): siRNA sense strand
acaaccggauccugacuua

SEQ ID NO: 1825203 - RNA, 19 nt, Homo sapiens
  misc_RNA (1)...(19): siRNA sense strand
gucuauagcuccagaacaa

SEQ ID NO: 1825204 - RNA, 19 nt, Homo sapiens
  misc_RNA (1)...(19): siRNA sense strand
ggaaaacauugaaacacua

SEQ ID NO: 1825205 - RNA, 19 nt, Homo sapiens
  misc_RNA (1)...(19): siRNA sense strand
gggaggagaauaugaaguu

SEQ ID NO: 1825206 - RNA, 19 nt, Homo sapiens
  misc_RNA (1)...(19): siRNA sense strand
gaagaugaagccagagguu

SEQ ID NO: 1825207 - RNA, 19 nt, Homo sapiens
  misc_RNA (1)...(19): siRNA sense strand
gcgguucucucucauauac

SEQ ID NO: 1825208 - RNA, 19 nt, Homo sapiens
  misc_RNA (1)...(19): siRNA sense strand
cggacaaggcucugaaaua

SEQ ID NO: 1825209 - RNA, 19 nt, Homo sapiens
  misc_RNA (1)...(19): siRNA sense strand
cuacuugacucacaccaau

SEQ ID NO: 1825210 - RNA, 19 nt, Homo sapiens
  misc_RNA (1)...(19): siRNA sense strand
gaaagaacuaccuccugaa

SEQ ID NO: 1825211 - RNA, 19 nt, Homo sapiens
  misc_RNA (1)...(19): siRNA sense strand
gauuucagaugccaaacug

SEQ ID NO: 1825212 - RNA, 19 nt, Homo sapiens
  misc_RNA (1)...(19): siRNA sense strand
gcugacaccuugccagaag

SEQ ID NO: 1825213 - RNA, 19 nt, Homo sapiens
  misc_RNA (1)...(19): siRNA sense strand
cagaacauccuuucauugu

SEQ ID NO: 1825214 - RNA, 19 nt, Homo sapiens
  misc_RNA (1)...(19): siRNA sense strand
ccugugagagugagauuua

SEQ ID NO: 1825215 - RNA, 19 nt, Homo sapiens
  misc_RNA (1)...(19): siRNA sense strand
ugaagggcaugcugcagaa

SEQ ID NO: 1825216 - RNA, 19 nt, Homo sapiens
  misc_RNA (1)...(19): siRNA sense strand
gaaccaauuuugaugucua

SEQ ID NO: 1825217 - RNA, 19 nt, Homo sapiens
  misc_RNA (1)...(19): siRNA sense strand
ugaccugaaugccuuccua

SEQ ID NO: 1825218 - RNA, 19 nt, Homo sapiens
  misc_RNA (1)...(19): siRNA sense strand
agaacuaccuccugaaucg

SEQ ID NO: 1825219 - RNA, 19 nt, Homo sapiens
  misc_RNA (1)...(19): siRNA sense strand
ggaggagaauaugaaguuc

SEQ ID NO: 1825220 - RNA, 19 nt, Homo sapiens
  misc_RNA (1)...(19): siRNA sense strand
gagccugguucgauuacga

SEQ ID NO: 1825221 - RNA, 19 nt, Homo sapiens
  misc_RNA (1)...(19): siRNA sense strand
caaugacaccgccuuucua

SEQ ID NO: 1825222 - RNA, 19 nt, Homo sapiens
  misc_RNA (1)...(19): siRNA sense strand
agaagucagccauguauga

SEQ ID NO: 1825223 - RNA, 19 nt, Homo sapiens
  misc_RNA (1)...(19): siRNA sense strand
ccauguaugagaaguauga

SEQ ID NO: 1825224 - RNA, 19 nt, Homo sapiens
  misc_RNA (1)...(19): siRNA sense strand
gcaggcguuuguccacgaa

SEQ ID NO: 1825225 - RNA, 19 nt, Homo sapiens
  misc_RNA (1)...(19): siRNA sense strand
cucagaacauccuuucauu

SEQ ID NO: 1825226 - RNA, 19 nt, Homo sapiens
  misc_RNA (1)...(19): siRNA sense strand
auuacgaccuugagaagaa

SEQ ID NO: 1825227 - RNA, 19 nt, Homo sapiens
  misc_RNA (1)...(19): siRNA sense strand
gacccaggccugaguccua

SEQ ID NO: 1825228 - RNA, 19 nt, Homo sapiens
  misc_RNA (1)...(19): siRNA sense strand
agucagccauguaugagaa

SEQ ID NO: 1825229 - RNA, 19 nt, Homo sapiens
  misc_RNA (1)...(19): siRNA sense strand
gaaacacuagccuuggaau

SEQ ID NO: 1825230 - RNA, 19 nt, Homo sapiens
  misc_RNA (1)...(19): siRNA sense strand
ugcaucagcucuggaagaa

SEQ ID NO: 1825231 - RNA, 19 nt, Homo sapiens
  misc_RNA (1)...(19): siRNA sense strand
cgaccucucuccagaagac

SEQ ID NO: 1825232 - RNA, 19 nt, Homo sapiens
  misc_RNA (1)...(19): siRNA sense strand
aaagaacuaccuccugaau

SEQ ID NO: 1825233 - RNA, 19 nt, Homo sapiens
  misc_RNA (1)...(19): siRNA sense strand
ucagaacauccuuucauug

SEQ ID NO: 1825234 - RNA, 19 nt, Homo sapiens
  misc_RNA (1)...(19): siRNA sense strand
ccuccugaaucgcuauuau

SEQ ID NO: 1825235 - RNA, 19 nt, Homo sapiens
  misc_RNA (1)...(19): siRNA sense strand
gaugucuacucgcagaagu

SEQ ID NO: 1825236 - RNA, 19 nt, Homo sapiens
  misc_RNA (1)...(19): siRNA sense strand
agaacauccuuucauugug

SEQ ID NO: 1825237 - RNA, 19 nt, Homo sapiens
  misc_RNA (1)...(19): siRNA sense strand
gaagucagccauguaugag

SEQ ID NO: 1825238 - RNA, 19 nt, Homo sapiens
  misc_RNA (1)...(19): siRNA sense strand
acaaggcucugaaauaccu

SEQ ID NO: 1825239 - RNA, 19 nt, Homo sapiens
  misc_RNA (1)...(19): siRNA sense strand
ccaaugacaccgccuuucu

SEQ ID NO: 1825240 - RNA, 19 nt, Homo sapiens
  misc_RNA (1)...(19): siRNA sense strand
gcuccuaaaccaaguucaa

SEQ ID NO: 1825241 - RNA, 19 nt, Homo sapiens
  misc_RNA (1)...(19): siRNA sense strand
gcugaugagcaacuucuau

SEQ ID NO: 1825242 - RNA, 19 nt, Homo sapiens
  misc_RNA (1)...(19): siRNA sense strand
acacuagccuuggaauugg

SEQ ID NO: 1825243 - RNA, 19 nt, Homo sapiens
  misc_RNA (1)...(19): siRNA sense strand
aaacacuagccuuggaauu

SEQ ID NO: 1825244 - RNA, 19 nt, Homo sapiens
  misc_RNA (1)...(19): siRNA sense strand
ccuaaaccaaguucaaaug

SEQ ID NO: 1825245 - RNA, 19 nt, Homo sapiens
  misc_RNA (1)...(19): siRNA sense strand
gaccggagccugguucgau

SEQ ID NO: 1825246 - RNA, 19 nt, Homo sapiens
  misc_RNA (1)...(19): siRNA sense strand
ucgcagaagucagccaugu

SEQ ID NO: 1825247 - RNA, 19 nt, Homo sapiens
  misc_RNA (1)...(19): siRNA sense strand
ucucauauacucagaacau

SEQ ID NO: 1825248 - RNA, 19 nt, Homo sapiens
  misc_RNA (1)...(19): siRNA sense strand
ccagcuggcucagaauugg

SEQ ID NO: 1825249 - RNA, 19 nt, Homo sapiens
  misc_RNA (1)...(19): siRNA sense strand
gauguggaguuggcugaca

SEQ ID NO: 1825250 - RNA, 19 nt, Homo sapiens
  misc_RNA (1)...(19): siRNA sense strand
ugacaccgccuuucuacag

SEQ ID NO: 1825251 - RNA, 19 nt, Homo sapiens
  misc_RNA (1)...(19): siRNA sense strand
gauugcuacuugacucaca

SEQ ID NO: 1825252 - RNA, 19 nt, Homo sapiens
  misc_RNA (1)...(19): siRNA sense strand
ucuucacgcuggcucauug

SEQ ID NO: 1825253 - RNA, 19 nt, Homo sapiens
  misc_RNA (1)...(19): siRNA sense strand
gcuuggagggaaagaacua

SEQ ID NO: 1825254 - RNA, 19 nt, Homo sapiens
  misc_RNA (1)...(19): siRNA sense strand
uugaaacacuagccuugga

SEQ ID NO: 1825255 - RNA, 19 nt, Homo sapiens
  misc_RNA (1)...(19): siRNA sense strand
gaaguucaggagggauuug

SEQ ID NO: 1825256 - RNA, 19 nt, Homo sapiens
  misc_RNA (1)...(19): siRNA sense strand
aacacuagccuuggaauug

SEQ ID NO: 1825257 - RNA, 19 nt, Homo sapiens
  misc_RNA (1)...(19): siRNA sense strand
gguucucucucauauacuc

SEQ ID NO: 1825258 - RNA, 19 nt, Homo sapiens
  misc_RNA (1)...(19): siRNA sense strand
ggcggucgcuuuguugagu

SEQ ID NO: 1825259 - RNA, 19 nt, Homo sapiens
  misc_RNA (1)...(19): siRNA sense strand
gccuggcggucgcuuuguu

SEQ ID NO: 1825260 - RNA, 19 nt, Homo sapiens
  misc_RNA (1)...(19): siRNA sense strand
ucaaauggccaagcucuac

SEQ ID NO: 1825261 - RNA, 19 nt, Homo sapiens
  misc_RNA (1)...(19): siRNA sense strand
cugaugagcaacuucuauu

SEQ ID NO: 1825262 - RNA, 19 nt, Homo sapiens
  misc_RNA (1)...(19): siRNA sense strand
gagcugaugagcaacuucu

SEQ ID NO: 1825263 - RNA, 19 nt, Homo sapiens
  misc_RNA (1)...(19): siRNA sense strand
ugaaacacuagccuuggaa

SEQ ID NO: 1825264 - RNA, 19 nt, Homo sapiens
  misc_RNA (1)...(19): siRNA sense strand
ugacccucaugauggauug

SEQ ID NO: 1825265 - RNA, 19 nt, Homo sapiens
  misc_RNA (1)...(19): siRNA sense strand
gcggucgcuuuguugaguu

SEQ ID NO: 1825266 - RNA, 19 nt, Homo sapiens
  misc_RNA (1)...(19): siRNA sense strand
gauuacgaccuugagaaga

SEQ ID NO: 1825267 - RNA, 19 nt, Homo sapiens
  misc_RNA (1)...(19): siRNA sense strand
caagcaguuuguggacaug

SEQ ID NO: 1825268 - RNA, 19 nt, Homo sapiens
  misc_RNA (1)...(19): siRNA sense strand
gagcuuggagggaaagaac

SEQ ID NO: 1825269 - RNA, 19 nt, Homo sapiens
  misc_RNA (1)...(19): siRNA sense strand
aacaaguccugcagaccuu

SEQ ID NO: 1825270 - RNA, 19 nt, Homo sapiens
  misc_RNA (1)...(19): siRNA sense strand
ggacuccuacugggucaug

SEQ ID NO: 1825271 - RNA, 19 nt, Homo sapiens
  misc_RNA (1)...(19): siRNA sense strand
agaaguaugacgucagcaa

SEQ ID NO: 1825272 - RNA, 19 nt, Homo sapiens
  misc_RNA (1)...(19): siRNA sense strand
ggauccugacuuaccagua

SEQ ID NO: 1825273 - RNA, 19 nt, Homo sapiens
  misc_RNA (1)...(19): siRNA sense strand
gaccugaaugccuuccuau

SEQ ID NO: 1825274 - RNA, 19 nt, Homo sapiens
  misc_RNA (1)...(19): siRNA sense strand
ggccugaguccuacagcaa

SEQ ID NO: 1825275 - RNA, 19 nt, Homo sapiens
  misc_RNA (1)...(19): siRNA sense strand
ggacugucucugugagcuu

SEQ ID NO: 1825276 - RNA, 19 nt, Homo sapiens
  misc_RNA (1)...(19): siRNA sense strand
cugguucgauuacgaccuu

SEQ ID NO: 1825277 - RNA, 19 nt, Homo sapiens
  misc_RNA (1)...(19): siRNA sense strand
ucgcuauuaugucccuuau

SEQ ID NO: 1825278 - RNA, 19 nt, Homo sapiens
  misc_RNA (1)...(19): siRNA sense strand
ccugcagacuggaaagaca

SEQ ID NO: 1825279 - RNA, 19 nt, Homo sapiens
  misc_RNA (1)...(19): siRNA sense strand
gacaaccggauccugacuu

SEQ ID NO: 1825280 - RNA, 19 nt, Homo sapiens
  misc_RNA (1)...(19): siRNA sense strand
ccggagccugguucgauua

SEQ ID NO: 1825281 - RNA, 19 nt, Homo sapiens
  misc_RNA (1)...(19): siRNA sense strand
cccaguuccugcagaagau

SEQ ID NO: 1825282 - RNA, 19 nt, Homo sapiens
  misc_RNA (1)...(19): siRNA sense strand
cugcagaagauuucagaug

SEQ ID NO: 1825283 - RNA, 19 nt, Homo sapiens
  misc_RNA (1)...(19): siRNA sense strand
gaagauaccugcacauuuc

SEQ ID NO: 1825284 - RNA, 19 nt, Homo sapiens
  misc_RNA (1)...(19): siRNA sense strand
gaacgucuaagaucuguua

SEQ ID NO: 1825285 - RNA, 19 nt, Homo sapiens
  misc_RNA (1)...(19): siRNA sense strand
ggaggaggcuucaaaggaa

SEQ ID NO: 1825286 - RNA, 19 nt, Homo sapiens
  misc_RNA (1)...(19): siRNA sense strand
cgaauuugcugaagaugua

SEQ ID NO: 1825287 - RNA, 19 nt, Homo sapiens
  misc_RNA (1)...(19): siRNA sense strand
uaaaggauguucaugaaga

SEQ ID NO: 1825288 - RNA, 19 nt, Homo sapiens
  misc_RNA (1)...(19): siRNA sense strand
guaagcagcuggagaguuc

SEQ ID NO: 1825289 - RNA, 19 nt, Homo sapiens
  misc_RNA (1)...(19): siRNA sense strand
ccaaagaggcggcacauaa

SEQ ID NO: 1825290 - RNA, 19 nt, Homo sapiens
  misc_RNA (1)...(19): siRNA sense strand
gaaaugaagaagcuaguaa

SEQ ID NO: 1825291 - RNA, 19 nt, Homo sapiens
  misc_RNA (1)...(19): siRNA sense strand
caacaaaccugccacaaaa

SEQ ID NO: 1825292 - RNA, 19 nt, Homo sapiens
  misc_RNA (1)...(19): siRNA sense strand
ucaaugaagucaccucaaa

SEQ ID NO: 1825293 - RNA, 19 nt, Homo sapiens
  misc_RNA (1)...(19): siRNA sense strand
gaucagaguugacugcaau

SEQ ID NO: 1825294 - RNA, 19 nt, Homo sapiens
  misc_RNA (1)...(19): siRNA sense strand
caaauucccuuccuuccaa

SEQ ID NO: 1825295 - RNA, 19 nt, Homo sapiens
  misc_RNA (1)...(19): siRNA sense strand
gagauuucaugaacaguuu

SEQ ID NO: 1825296 - RNA, 19 nt, Homo sapiens
  misc_RNA (1)...(19): siRNA sense strand
caauaacaguugcauuuga

SEQ ID NO: 1825297 - RNA, 19 nt, Homo sapiens
  misc_RNA (1)...(19): siRNA sense strand
gcaaaugugugccaaagag

SEQ ID NO: 1825298 - RNA, 19 nt, Homo sapiens
  misc_RNA (1)...(19): siRNA sense strand
guaaagaucguaaccagaa

SEQ ID NO: 1825299 - RNA, 19 nt, Homo sapiens
  misc_RNA (1)...(19): siRNA sense strand
ccagaagacuuacggcaaa

SEQ ID NO: 1825300 - RNA, 19 nt, Homo sapiens
  misc_RNA (1)...(19): siRNA sense strand
gcacuaaguugucucugau

SEQ ID NO: 1825301 - RNA, 19 nt, Homo sapiens
  misc_RNA (1)...(19): siRNA sense strand
ccagaaaccugaacucaag

SEQ ID NO: 1825302 - RNA, 19 nt, Homo sapiens
  misc_RNA (1)...(19): siRNA sense strand
gcacauaugcugauugaca

SEQ ID NO: 1825303 - RNA, 19 nt, Homo sapiens
  misc_RNA (1)...(19): siRNA sense strand
cagaauaccuccagugaag

SEQ ID NO: 1825304 - RNA, 19 nt, Homo sapiens
  misc_RNA (1)...(19): siRNA sense strand
gagacgaacucagugauug

SEQ ID NO: 1825305 - RNA, 19 nt, Homo sapiens
  misc_RNA (1)...(19): siRNA sense strand
guuaguggcuucaucaguu

SEQ ID NO: 1825306 - RNA, 19 nt, Homo sapiens
  misc_RNA (1)...(19): siRNA sense strand
ggauauacuucaggaacua

SEQ ID NO: 1825307 - RNA, 19 nt, Homo sapiens
  misc_RNA (1)...(19): siRNA sense strand
gaugauaaagggugaguuu

SEQ ID NO: 1825308 - RNA, 19 nt, Homo sapiens
  misc_RNA (1)...(19): siRNA sense strand
uaaaggaaguagaccaguu

SEQ ID NO: 1825309 - RNA, 19 nt, Homo sapiens
  misc_RNA (1)...(19): siRNA sense strand
caugaacaguuuaucguaa

SEQ ID NO: 1825310 - RNA, 19 nt, Homo sapiens
  misc_RNA (1)...(19): siRNA sense strand
uaaguugucucugauaaug

SEQ ID NO: 1825311 - RNA, 19 nt, Homo sapiens
  misc_RNA (1)...(19): siRNA sense strand
uuggagagauuacaaauug

SEQ ID NO: 1825312 - RNA, 19 nt, Homo sapiens
  misc_RNA (1)...(19): siRNA sense strand
ggaugugccagaagacuua

SEQ ID NO: 1825313 - RNA, 19 nt, Homo sapiens
  misc_RNA (1)...(19): siRNA sense strand
gugaugaaguugaggugua

SEQ ID NO: 1825314 - RNA, 19 nt, Homo sapiens
  misc_RNA (1)...(19): siRNA sense strand
gaugagcaguugcgacaga

SEQ ID NO: 1825315 - RNA, 19 nt, Homo sapiens
  misc_RNA (1)...(19): siRNA sense strand
ggaucaggaugcagugaaa

SEQ ID NO: 1825316 - RNA, 19 nt, Homo sapiens
  misc_RNA (1)...(19): siRNA sense strand
caccaaaucguacagauaa

SEQ ID NO: 1825317 - RNA, 19 nt, Homo sapiens
  misc_RNA (1)...(19): siRNA sense strand
agaguugacugcaauaaug

SEQ ID NO: 1825318 - RNA, 19 nt, Homo sapiens
  misc_RNA (1)...(19): siRNA sense strand
uguaaaggauguucaugaa

SEQ ID NO: 1825319 - RNA, 19 nt, Homo sapiens
  misc_RNA (1)...(19): siRNA sense strand
guaguagaccuuacagaaa

SEQ ID NO: 1825320 - RNA, 19 nt, Homo sapiens
  misc_RNA (1)...(19): siRNA sense strand
gguaguagaccuuacagaa

SEQ ID NO: 1825321 - RNA, 19 nt, Homo sapiens
  misc_RNA (1)...(19): siRNA sense strand
aaagcuaugugacugauga

SEQ ID NO: 1825322 - RNA, 19 nt, Homo sapiens
  misc_RNA (1)...(19): siRNA sense strand
caauggcgcuuucuacaag

SEQ ID NO: 1825323 - RNA, 19 nt, Homo sapiens
  misc_RNA (1)...(19): siRNA sense strand
gaucacucccgaacagaua

SEQ ID NO: 1825324 - RNA, 19 nt, Homo sapiens
  misc_RNA (1)...(19): siRNA sense strand
ccaacaaaccugccacaaa

SEQ ID NO: 1825325 - RNA, 19 nt, Homo sapiens
  misc_RNA (1)...(19): siRNA sense strand
uaguagaccuuacagaaau

SEQ ID NO: 1825326 - RNA, 19 nt, Homo sapiens
  misc_RNA (1)...(19): siRNA sense strand
gaagauucaauaacaguug

SEQ ID NO: 1825327 - RNA, 19 nt, Homo sapiens
  misc_RNA (1)...(19): siRNA sense strand
ccacuguucuuuuggauua

SEQ ID NO: 1825328 - RNA, 19 nt, Homo sapiens
  misc_RNA (1)...(19): siRNA sense strand
caaaggacagcaucgcuaa

SEQ ID NO: 1825329 - RNA, 19 nt, Homo sapiens
  misc_RNA (1)...(19): siRNA sense strand
ggucacugcuauugaucua

SEQ ID NO: 1825330 - RNA, 19 nt, Homo sapiens
  misc_RNA (1)...(19): siRNA sense strand
gcuaaagugaggaugauaa

SEQ ID NO: 1825331 - RNA, 19 nt, Homo sapiens
  misc_RNA (1)...(19): siRNA sense strand
acagauggaucccuucaga

SEQ ID NO: 1825332 - RNA, 19 nt, Homo sapiens
  misc_RNA (1)...(19): siRNA sense strand
gaggaggcuucaaaggaaa

SEQ ID NO: 1825333 - RNA, 19 nt, Homo sapiens
  misc_RNA (1)...(19): siRNA sense strand
cagcuugccucgagauuuc

SEQ ID NO: 1825334 - RNA, 19 nt, Homo sapiens
  misc_RNA (1)...(19): siRNA sense strand
cagauuccauuucaugaug

SEQ ID NO: 1825335 - RNA, 19 nt, Homo sapiens
  misc_RNA (1)...(19): siRNA sense strand
gauaaucguccacguaauc

SEQ ID NO: 1825336 - RNA, 19 nt, Homo sapiens
  misc_RNA (1)...(19): siRNA sense strand
ggaaugggucgagguagua

SEQ ID NO: 1825337 - RNA, 19 nt, Homo sapiens
  misc_RNA (1)...(19): siRNA sense strand
ugaugcaacuuacaaugaa

SEQ ID NO: 1825338 - RNA, 19 nt, Homo sapiens
  misc_RNA (1)...(19): siRNA sense strand
cagauaaucguccacguaa

SEQ ID NO: 1825339 - RNA, 19 nt, Homo sapiens
  misc_RNA (1)...(19): siRNA sense strand
ccacagagacgaacucagu

SEQ ID NO: 1825340 - RNA, 19 nt, Homo sapiens
  misc_RNA (1)...(19): siRNA sense strand
gauuaucaccugaacuauu

SEQ ID NO: 1825341 - RNA, 19 nt, Homo sapiens
  misc_RNA (1)...(19): siRNA sense strand
gaugcaacuuacaaugaaa

SEQ ID NO: 1825342 - RNA, 19 nt, Homo sapiens
  misc_RNA (1)...(19): siRNA sense strand
ucacugcuauugaucuaga

SEQ ID NO: 1825343 - RNA, 19 nt, Homo sapiens
  misc_RNA (1)...(19): siRNA sense strand
ccacaagaagaggaaauua

SEQ ID NO: 1825344 - RNA, 19 nt, Homo sapiens
  misc_RNA (1)...(19): siRNA sense strand
cuuaguaggcaaaguaaua

SEQ ID NO: 1825345 - RNA, 19 nt, Homo sapiens
  misc_RNA (1)...(19): siRNA sense strand
cgucuaagaucuguuaauc

SEQ ID NO: 1825346 - RNA, 19 nt, Homo sapiens
  misc_RNA (1)...(19): siRNA sense strand
ccaccaaaucguacagaua

SEQ ID NO: 1825347 - RNA, 19 nt, Homo sapiens
  misc_RNA (1)...(19): siRNA sense strand
ccugaacuauuuaaaggaa

SEQ ID NO: 1825348 - RNA, 19 nt, Homo sapiens
  misc_RNA (1)...(19): siRNA sense strand
ugaagauaccugcacauuu

SEQ ID NO: 1825349 - RNA, 19 nt, Homo sapiens
  misc_RNA (1)...(19): siRNA sense strand
cuauugaucuagaugaaga

SEQ ID NO: 1825350 - RNA, 19 nt, Homo sapiens
  misc_RNA (1)...(19): siRNA sense strand
guacucauggugcuaauau

SEQ ID NO: 1825351 - RNA, 19 nt, Homo sapiens
  misc_RNA (1)...(19): siRNA sense strand
gaucugaugggucuagcua

SEQ ID NO: 1825352 - RNA, 19 nt, Homo sapiens
  misc_RNA (1)...(19): siRNA sense strand
acaaauugaugagcaguug

SEQ ID NO: 1825353 - RNA, 19 nt, Homo sapiens
  misc_RNA (1)...(19): siRNA sense strand
aagagaggcuaaaggaaga

SEQ ID NO: 1825354 - RNA, 19 nt, Homo sapiens
  misc_RNA (1)...(19): siRNA sense strand
caaggaaugggucgaggua

SEQ ID NO: 1825355 - RNA, 19 nt, Homo sapiens
  misc_RNA (1)...(19): siRNA sense strand
gaagcuuucucgaauuugc

SEQ ID NO: 1825356 - RNA, 19 nt, Homo sapiens
  misc_RNA (1)...(19): siRNA sense strand
gaucguaaccagaagaaag

SEQ ID NO: 1825357 - RNA, 19 nt, Homo sapiens
  misc_RNA (1)...(19): siRNA sense strand
acucagugauuggucauua

SEQ ID NO: 1825358 - RNA, 19 nt, Homo sapiens
  misc_RNA (1)...(19): siRNA sense strand
gcuaaugccacuguucuuu

SEQ ID NO: 1825359 - RNA, 19 nt, Homo sapiens
  misc_RNA (1)...(19): siRNA sense strand
gaagacuuacggcaaaugu

SEQ ID NO: 1825360 - RNA, 19 nt, Homo sapiens
  misc_RNA (1)...(19): siRNA sense strand
gauaccugcacauuucaua

SEQ ID NO: 1825361 - RNA, 19 nt, Homo sapiens
  misc_RNA (1)...(19): siRNA sense strand
ucagcaagcuagaaaagua

SEQ ID NO: 1825362 - RNA, 19 nt, Homo sapiens
  misc_RNA (1)...(19): siRNA sense strand
acuaaguugucucugauaa

SEQ ID NO: 1825363 - RNA, 19 nt, Homo sapiens
  misc_RNA (1)...(19): siRNA sense strand
gugaugcaacuuacaauga

SEQ ID NO: 1825364 - RNA, 19 nt, Homo sapiens
  misc_RNA (1)...(19): siRNA sense strand
cagcguggauggucagcaa

SEQ ID NO: 1825365 - RNA, 19 nt, Homo sapiens
  misc_RNA (1)...(19): siRNA sense strand
caaggcauuuguaaaggau

SEQ ID NO: 1825366 - RNA, 19 nt, Homo sapiens
  misc_RNA (1)...(19): siRNA sense strand
ugaaagugaugaaguugag

SEQ ID NO: 1825367 - RNA, 19 nt, Homo sapiens
  misc_RNA (1)...(19): siRNA sense strand
caccugaacuauuuaaagg

SEQ ID NO: 1825368 - RNA, 19 nt, Homo sapiens
  misc_RNA (1)...(19): siRNA sense strand
acaagaagaggaaauuaug

SEQ ID NO: 1825369 - RNA, 19 nt, Homo sapiens
  misc_RNA (1)...(19): siRNA sense strand
ccugcacauuucauauuua

SEQ ID NO: 1825370 - RNA, 19 nt, Homo sapiens
  misc_RNA (1)...(19): siRNA sense strand
gcuaauauucagcaagcua

SEQ ID NO: 1825371 - RNA, 19 nt, Homo sapiens
  misc_RNA (1)...(19): siRNA sense strand
caaagaggcggcacauaag

SEQ ID NO: 1825372 - RNA, 19 nt, Homo sapiens
  misc_RNA (1)...(19): siRNA sense strand
ccucaaagcgagcacauau

SEQ ID NO: 1825373 - RNA, 19 nt, Homo sapiens
  misc_RNA (1)...(19): siRNA sense strand
cagacgcgguccuggauau

SEQ ID NO: 1825374 - RNA, 19 nt, Homo sapiens
  misc_RNA (1)...(19): siRNA sense strand
gagcaguugcgacagauug

SEQ ID NO: 1825375 - RNA, 19 nt, Homo sapiens
  misc_RNA (1)...(19): siRNA sense strand
ggagagauuacaaauugau

SEQ ID NO: 1825376 - RNA, 19 nt, Homo sapiens
  misc_RNA (1)...(19): siRNA sense strand
ucugaugggucuagcuauu

SEQ ID NO: 1825377 - RNA, 19 nt, Homo sapiens
  misc_RNA (1)...(19): siRNA sense strand
gcacggguaaagaucguaa

SEQ ID NO: 1825378 - RNA, 19 nt, Homo sapiens
  misc_RNA (1)...(19): siRNA sense strand
guaauacaaguuccaagga

SEQ ID NO: 1825379 - RNA, 19 nt, Homo sapiens
  misc_RNA (1)...(19): siRNA sense strand
aaaggaagaacaacagaug

SEQ ID NO: 1825380 - RNA, 19 nt, Homo sapiens
  misc_RNA (1)...(19): siRNA sense strand
uggauuaucaccugaacua

SEQ ID NO: 1825381 - RNA, 19 nt, Homo sapiens
  misc_RNA (1)...(19): siRNA sense strand
ccaccaaauucccuuccuu

SEQ ID NO: 1825382 - RNA, 19 nt, Homo sapiens
  misc_RNA (1)...(19): siRNA sense strand
ggauugaggcugaaaauga

SEQ ID NO: 1825383 - RNA, 19 nt, Homo sapiens
  misc_RNA (1)...(19): siRNA sense strand
caaacaagaugcagacuuu

SEQ ID NO: 1825384 - RNA, 19 nt, Homo sapiens
  misc_RNA (1)...(19): siRNA sense strand
gaagauugaccuugacuua

SEQ ID NO: 1825385 - RNA, 19 nt, Homo sapiens
  misc_RNA (1)...(19): siRNA sense strand
gaagagacccugcaaauca

SEQ ID NO: 1825386 - RNA, 19 nt, Homo sapiens
  misc_RNA (1)...(19): siRNA sense strand
uaagagaacugaaggcaaa

SEQ ID NO: 1825387 - RNA, 19 nt, Homo sapiens
  misc_RNA (1)...(19): siRNA sense strand
caagguagcugaauauaca

SEQ ID NO: 1825388 - RNA, 19 nt, Homo sapiens
  misc_RNA (1)...(19): siRNA sense strand
gaaggcaaauucugugcua

SEQ ID NO: 1825389 - RNA, 19 nt, Homo sapiens
  misc_RNA (1)...(19): siRNA sense strand
aaacaaaggugaugcacuu

SEQ ID NO: 1825390 - RNA, 19 nt, Homo sapiens
  misc_RNA (1)...(19): siRNA sense strand
ccuaguggcuuccucuuua

SEQ ID NO: 1825391 - RNA, 19 nt, Homo sapiens
  misc_RNA (1)...(19): siRNA sense strand
gaacacgcuuggaaacuau

SEQ ID NO: 1825392 - RNA, 19 nt, Homo sapiens
  misc_RNA (1)...(19): siRNA sense strand
gaaaguagcaccacugaca

SEQ ID NO: 1825393 - RNA, 19 nt, Homo sapiens
  misc_RNA (1)...(19): siRNA sense strand
cuaagaagcugaagcacaa

SEQ ID NO: 1825394 - RNA, 19 nt, Homo sapiens
  misc_RNA (1)...(19): siRNA sense strand
gcaaagcugugaauuaugc

SEQ ID NO: 1825395 - RNA, 19 nt, Homo sapiens
  misc_RNA (1)...(19): siRNA sense strand
caauagaaguugcagagaa

SEQ ID NO: 1825396 - RNA, 19 nt, Homo sapiens
  misc_RNA (1)...(19): siRNA sense strand
guuuaucacuccucuauuu

SEQ ID NO: 1825397 - RNA, 19 nt, Homo sapiens
  misc_RNA (1)...(19): siRNA sense strand
ggaccagucucaagccaaa

SEQ ID NO: 1825398 - RNA, 19 nt, Homo sapiens
  misc_RNA (1)...(19): siRNA sense strand
cagcagcacucccaaagaa

SEQ ID NO: 1825399 - RNA, 19 nt, Homo sapiens
  misc_RNA (1)...(19): siRNA sense strand
caaagccacugcccacaaa

SEQ ID NO: 1825400 - RNA, 19 nt, Homo sapiens
  misc_RNA (1)...(19): siRNA sense strand
cauacaagguagcugaaua

SEQ ID NO: 1825401 - RNA, 19 nt, Homo sapiens
  misc_RNA (1)...(19): siRNA sense strand
caaugaggcugaagaacuu

SEQ ID NO: 1825402 - RNA, 19 nt, Homo sapiens
  misc_RNA (1)...(19): siRNA sense strand
ggaaagaaccaagaccuaa

SEQ ID NO: 1825403 - RNA, 19 nt, Homo sapiens
  misc_RNA (1)...(19): siRNA sense strand
gagaacagcuuugggaauc

SEQ ID NO: 1825404 - RNA, 19 nt, Homo sapiens
  misc_RNA (1)...(19): siRNA sense strand
cagagaagaucccugagaa

SEQ ID NO: 1825405 - RNA, 19 nt, Homo sapiens
  misc_RNA (1)...(19): siRNA sense strand
gaagaucccugagaagaag

SEQ ID NO: 1825406 - RNA, 19 nt, Homo sapiens
  misc_RNA (1)...(19): siRNA sense strand
gggaaucugucauuuggaa

SEQ ID NO: 1825407 - RNA, 19 nt, Homo sapiens
  misc_RNA (1)...(19): siRNA sense strand
caccagcacugacgaguuu

SEQ ID NO: 1825408 - RNA, 19 nt, Homo sapiens
  misc_RNA (1)...(19): siRNA sense strand
caccagagcuucuacaaag

SEQ ID NO: 1825409 - RNA, 19 nt, Homo sapiens
  misc_RNA (1)...(19): siRNA sense strand
uggagaagaugcuuucaaa

SEQ ID NO: 1825410 - RNA, 19 nt, Homo sapiens
  misc_RNA (1)...(19): siRNA sense strand
uggcaaagcugugaauuau

SEQ ID NO: 1825411 - RNA, 19 nt, Homo sapiens
  misc_RNA (1)...(19): siRNA sense strand
ucacaaugcugauuauuac

SEQ ID NO: 1825412 - RNA, 19 nt, Homo sapiens
  misc_RNA (1)...(19): siRNA sense strand
caaauucugugcuacuuuc

SEQ ID NO: 1825413 - RNA, 19 nt, Homo sapiens
  misc_RNA (1)...(19): siRNA sense strand
gcaguggccuuucaguuca

SEQ ID NO: 1825414 - RNA, 19 nt, Homo sapiens
  misc_RNA (1)...(19): siRNA sense strand
gacaguaacccuaauucua

SEQ ID NO: 1825415 - RNA, 19 nt, Homo sapiens
  misc_RNA (1)...(19): siRNA sense strand
gaagaaggaccaugcuaug

SEQ ID NO: 1825416 - RNA, 19 nt, Homo sapiens
  misc_RNA (1)...(19): siRNA sense strand
ucaaagggauaucgguaaa

SEQ ID NO: 1825417 - RNA, 19 nt, Homo sapiens
  misc_RNA (1)...(19): siRNA sense strand
gaccuugacuuacucucua

SEQ ID NO: 1825418 - RNA, 19 nt, Homo sapiens
  misc_RNA (1)...(19): siRNA sense strand
gcacaagccaauagaaguu

SEQ ID NO: 1825419 - RNA, 19 nt, Homo sapiens
  misc_RNA (1)...(19): siRNA sense strand
gaaggaccaugcuaugaag

SEQ ID NO: 1825420 - RNA, 19 nt, Homo sapiens
  misc_RNA (1)...(19): siRNA sense strand
gaacacucuuggauggaaa

SEQ ID NO: 1825421 - RNA, 19 nt, Homo sapiens
  misc_RNA (1)...(19): siRNA sense strand
guacuaugcuaccgauguu

SEQ ID NO: 1825422 - RNA, 19 nt, Homo sapiens
  misc_RNA (1)...(19): siRNA sense strand
ggacaaaucacaucuacca

SEQ ID NO: 1825423 - RNA, 19 nt, Homo sapiens
  misc_RNA (1)...(19): siRNA sense strand
ggauaaauggcuuaacaaa

SEQ ID NO: 1825424 - RNA, 19 nt, Homo sapiens
  misc_RNA (1)...(19): siRNA sense strand
gaagacaguaacccuaauu

SEQ ID NO: 1825425 - RNA, 19 nt, Homo sapiens
  misc_RNA (1)...(19): siRNA sense strand
ggaacacucuuggauggaa

SEQ ID NO: 1825426 - RNA, 19 nt, Homo sapiens
  misc_RNA (1)...(19): siRNA sense strand
ggucccagcugaacccaaa

SEQ ID NO: 1825427 - RNA, 19 nt, Homo sapiens
  misc_RNA (1)...(19): siRNA sense strand
gagaagaucccugagaaga

SEQ ID NO: 1825428 - RNA, 19 nt, Homo sapiens
  misc_RNA (1)...(19): siRNA sense strand
gauacugaauucaacucua

SEQ ID NO: 1825429 - RNA, 19 nt, Homo sapiens
  misc_RNA (1)...(19): siRNA sense strand
caacacagaucaggaagag

SEQ ID NO: 1825430 - RNA, 19 nt, Homo sapiens
  misc_RNA (1)...(19): siRNA sense strand
cagagggccuggcaagauu

SEQ ID NO: 1825431 - RNA, 19 nt, Homo sapiens
  misc_RNA (1)...(19): siRNA sense strand
gauccaagcuguguugaag

SEQ ID NO: 1825432 - RNA, 19 nt, Homo sapiens
  misc_RNA (1)...(19): siRNA sense strand
gcagccaguucaaagacua

SEQ ID NO: 1825433 - RNA, 19 nt, Homo sapiens
  misc_RNA (1)...(19): siRNA sense strand
gaauucaacucuaauacac

SEQ ID NO: 1825434 - RNA, 19 nt, Homo sapiens
  misc_RNA (1)...(19): siRNA sense strand
aaacccaucugcaaaggaa

SEQ ID NO: 1825435 - RNA, 19 nt, Homo sapiens
  misc_RNA (1)...(19): siRNA sense strand
gcaaaaugcuucaaaaguc

SEQ ID NO: 1825436 - RNA, 19 nt, Homo sapiens
  misc_RNA (1)...(19): siRNA sense strand
caccagggcuuuacugcaa

SEQ ID NO: 1825437 - RNA, 19 nt, Homo sapiens
  misc_RNA (1)...(19): siRNA sense strand
gggugaagauugaccuuga

SEQ ID NO: 1825438 - RNA, 19 nt, Homo sapiens
  misc_RNA (1)...(19): siRNA sense strand
aaacacccauggagacuau

SEQ ID NO: 1825439 - RNA, 19 nt, Homo sapiens
  misc_RNA (1)...(19): siRNA sense strand
uggaaacuaugaugaaaug

SEQ ID NO: 1825440 - RNA, 19 nt, Homo sapiens
  misc_RNA (1)...(19): siRNA sense strand
caacuuauccaucaguaau

SEQ ID NO: 1825441 - RNA, 19 nt, Homo sapiens
  misc_RNA (1)...(19): siRNA sense strand
ggaagacaguaacccuaau

SEQ ID NO: 1825442 - RNA, 19 nt, Homo sapiens
  misc_RNA (1)...(19): siRNA sense strand
caaaucacaucuaccaaac

SEQ ID NO: 1825443 - RNA, 19 nt, Homo sapiens
  misc_RNA (1)...(19): siRNA sense strand
ccacugacagcgaaucuaa

SEQ ID NO: 1825444 - RNA, 19 nt, Homo sapiens
  misc_RNA (1)...(19): siRNA sense strand
agaacacgcuuggaaacua

SEQ ID NO: 1825445 - RNA, 19 nt, Homo sapiens
  misc_RNA (1)...(19): siRNA sense strand
ggauauggccgacaaacug

SEQ ID NO: 1825446 - RNA, 19 nt, Homo sapiens
  misc_RNA (1)...(19): siRNA sense strand
gcaaugaggcugaagaacu

SEQ ID NO: 1825447 - RNA, 19 nt, Homo sapiens
  misc_RNA (1)...(19): siRNA sense strand
ucacaucuaccaaaccuaa

SEQ ID NO: 1825448 - RNA, 19 nt, Homo sapiens
  misc_RNA (1)...(19): siRNA sense strand
gaaaugucaguggcaauaa

SEQ ID NO: 1825449 - RNA, 19 nt, Homo sapiens
  misc_RNA (1)...(19): siRNA sense strand
gcaagauugugccaaaguc

SEQ ID NO: 1825450 - RNA, 19 nt, Homo sapiens
  misc_RNA (1)...(19): siRNA sense strand
aaucgaugcuugaggauga

SEQ ID NO: 1825451 - RNA, 19 nt, Homo sapiens
  misc_RNA (1)...(19): siRNA sense strand
gccaaagucucgggaauuc

SEQ ID NO: 1825452 - RNA, 19 nt, Homo sapiens
  misc_RNA (1)...(19): siRNA sense strand
caaagcugaugcacuguuc

SEQ ID NO: 1825453 - RNA, 19 nt, Homo sapiens
  misc_RNA (1)...(19): siRNA sense strand
aaagggauaucgguaaaug

SEQ ID NO: 1825454 - RNA, 19 nt, Homo sapiens
  misc_RNA (1)...(19): siRNA sense strand
gaacugaaggcaaauucug

SEQ ID NO: 1825455 - RNA, 19 nt, Homo sapiens
  misc_RNA (1)...(19): siRNA sense strand
gcagagaagaucccugaga

SEQ ID NO: 1825456 - RNA, 19 nt, Homo sapiens
  misc_RNA (1)...(19): siRNA sense strand
gaacagcuuugggaaucug

SEQ ID NO: 1825457 - RNA, 19 nt, Homo sapiens
  misc_RNA (1)...(19): siRNA sense strand
ccgacaaacugacaagaga

SEQ ID NO: 1825458 - RNA, 19 nt, Homo sapiens
  misc_RNA (1)...(19): siRNA sense strand
gcacagauacccucuccau

SEQ ID NO: 1825459 - RNA, 19 nt, Homo sapiens
  misc_RNA (1)...(19): siRNA sense strand
uguuuaagcugaagaagga

SEQ ID NO: 1825460 - RNA, 19 nt, Homo sapiens
  misc_RNA (1)...(19): siRNA sense strand
cuacuggccucauggauag

SEQ ID NO: 1825461 - RNA, 19 nt, Homo sapiens
  misc_RNA (1)...(19): siRNA sense strand
gcaaauucugugcuacuuu

SEQ ID NO: 1825462 - RNA, 19 nt, Homo sapiens
  misc_RNA (1)...(19): siRNA sense strand
ccacaagccucccaacacu

SEQ ID NO: 1825463 - RNA, 19 nt, Homo sapiens
  misc_RNA (1)...(19): siRNA sense strand
acaaggagacugccacaaa

SEQ ID NO: 1825464 - RNA, 19 nt, Homo sapiens
  misc_RNA (1)...(19): siRNA sense strand
aacaacaacuuauccauca

SEQ ID NO: 1825465 - RNA, 19 nt, Homo sapiens
  misc_RNA (1)...(19): siRNA sense strand
ccaaacaagugaaguaagc

SEQ ID NO: 1825466 - RNA, 19 nt, Homo sapiens
  misc_RNA (1)...(19): siRNA sense strand
ccugaguggucacgugaua

SEQ ID NO: 1825467 - RNA, 19 nt, Homo sapiens
  misc_RNA (1)...(19): siRNA sense strand
agaaaggccucuccucagu

SEQ ID NO: 1825468 - RNA, 19 nt, Homo sapiens
  misc_RNA (1)...(19): siRNA sense strand
gcugagcagugaugaagau

SEQ ID NO: 1825469 - RNA, 19 nt, Homo sapiens
  misc_RNA (1)...(19): siRNA sense strand
caagcuguguugaagaaau

SEQ ID NO: 1825470 - RNA, 19 nt, Homo sapiens
  misc_RNA (1)...(19): siRNA sense strand
gacccaagcucacuuuuga

SEQ ID NO: 1825471 - RNA, 19 nt, Homo sapiens
  misc_RNA (1)...(19): siRNA sense strand
aaagugacaucccagaaca

SEQ ID NO: 1825472 - RNA, 19 nt, Homo sapiens
  misc_RNA (1)...(19): siRNA sense strand
gagccacccucaaccaaca

SEQ ID NO: 1825473 - RNA, 19 nt, Homo sapiens
  misc_RNA (1)...(19): siRNA sense strand
ucauaacccuagcacugua

SEQ ID NO: 1825474 - RNA, 19 nt, Homo sapiens
  misc_RNA (1)...(19): siRNA sense strand
gguaagcaauggaaagaac

SEQ ID NO: 1825475 - RNA, 19 nt, Homo sapiens
  misc_RNA (1)...(19): siRNA sense strand
ucacuccucuauuugagaa

SEQ ID NO: 1825476 - RNA, 19 nt, Homo sapiens
  misc_RNA (1)...(19): siRNA sense strand
gagagcaaauagaagaaag

SEQ ID NO: 1825477 - RNA, 19 nt, Homo sapiens
  misc_RNA (1)...(19): siRNA sense strand
uaaauggcuuaacaaagug

SEQ ID NO: 1825478 - RNA, 19 nt, Homo sapiens
  misc_RNA (1)...(19): siRNA sense strand
gauaaauggcuuaacaaag

SEQ ID NO: 1825479 - RNA, 19 nt, Homo sapiens
  misc_RNA (1)...(19): siRNA sense strand
gcuaugaaguacuccagau

SEQ ID NO: 1825480 - RNA, 19 nt, Homo sapiens
  misc_RNA (1)...(19): siRNA sense strand
gagguaauacugccaaauc

SEQ ID NO: 1825481 - RNA, 19 nt, Homo sapiens
  misc_RNA (1)...(19): siRNA sense strand
ggaagagacccugcaaauc

SEQ ID NO: 1825482 - RNA, 19 nt, Homo sapiens
  misc_RNA (1)...(19): siRNA sense strand
caccaucacugucaccaau

SEQ ID NO: 1825483 - RNA, 19 nt, Homo sapiens
  misc_RNA (1)...(19): siRNA sense strand
guaaaggaaucuuauuguc

SEQ ID NO: 1825484 - RNA, 19 nt, Homo sapiens
  misc_RNA (1)...(19): siRNA sense strand
ccgcaggucuggcuuacca

SEQ ID NO: 1825485 - RNA, 19 nt, Homo sapiens
  misc_RNA (1)...(19): siRNA sense strand
gcaggaagcgaugguuaag

SEQ ID NO: 1825486 - RNA, 19 nt, Homo sapiens
  misc_RNA (1)...(19): siRNA sense strand
ccaacccucugggauagau

SEQ ID NO: 1825487 - RNA, 19 nt, Homo sapiens
  misc_RNA (1)...(19): siRNA sense strand
aggaagcgaugguuaagac

SEQ ID NO: 1825488 - RNA, 19 nt, Homo sapiens
  misc_RNA (1)...(19): siRNA sense strand
gcaccaggcgaacacuuac

SEQ ID NO: 1825489 - RNA, 19 nt, Homo sapiens
  misc_RNA (1)...(19): siRNA sense strand
caacaaauguacagcaaua

SEQ ID NO: 1825490 - RNA, 19 nt, Homo sapiens
  misc_RNA (1)...(19): siRNA sense strand
cuacaucacugcaauaauu

SEQ ID NO: 1825491 - RNA, 19 nt, Homo sapiens
  misc_RNA (1)...(19): siRNA sense strand
gaaagugcauggaacuauu

SEQ ID NO: 1825492 - RNA, 19 nt, Homo sapiens
  misc_RNA (1)...(19): siRNA sense strand
gaaagaggaugugagaaau

SEQ ID NO: 1825493 - RNA, 19 nt, Homo sapiens
  misc_RNA (1)...(19): siRNA sense strand
gaaaaugacucaccaacaa

SEQ ID NO: 1825494 - RNA, 19 nt, Homo sapiens
  misc_RNA (1)...(19): siRNA sense strand
auaaugagcugcaguaugu

SEQ ID NO: 1825495 - RNA, 19 nt, Homo sapiens
  misc_RNA (1)...(19): siRNA sense strand
ccaaagauacuucguuauu

SEQ ID NO: 1825496 - RNA, 19 nt, Homo sapiens
  misc_RNA (1)...(19): siRNA sense strand
gcauuagaguuaugugaaa

SEQ ID NO: 1825497 - RNA, 19 nt, Homo sapiens
  misc_RNA (1)...(19): siRNA sense strand
gaaaaucagugugacaaua

SEQ ID NO: 1825498 - RNA, 19 nt, Homo sapiens
  misc_RNA (1)...(19): siRNA sense strand
gaaauaacucugucuggaa

SEQ ID NO: 1825499 - RNA, 19 nt, Homo sapiens
  misc_RNA (1)...(19): siRNA sense strand
ccaaauauccuaaucuguu

SEQ ID NO: 1825500 - RNA, 19 nt, Homo sapiens
  misc_RNA (1)...(19): siRNA sense strand
aaccaaagauacuucguua

SEQ ID NO: 1825501 - RNA, 19 nt, Homo sapiens
  misc_RNA (1)...(19): siRNA sense strand
ggauaucuaugaagacaug

SEQ ID NO: 1825502 - RNA, 19 nt, Homo sapiens
  misc_RNA (1)...(19): siRNA sense strand
agaaugggcugauauagau

SEQ ID NO: 1825503 - RNA, 19 nt, Homo sapiens
  misc_RNA (1)...(19): siRNA sense strand
gggaugcuauugaguuaaa

SEQ ID NO: 1825504 - RNA, 19 nt, Homo sapiens
  misc_RNA (1)...(19): siRNA sense strand
gaacuacaucacugcaaua

SEQ ID NO: 1825505 - RNA, 19 nt, Homo sapiens
  misc_RNA (1)...(19): siRNA sense strand
gaaaggaauauuggagaua

SEQ ID NO: 1825506 - RNA, 19 nt, Homo sapiens
  misc_RNA (1)...(19): siRNA sense strand
uaucaaguuuggcaucaua

SEQ ID NO: 1825507 - RNA, 19 nt, Homo sapiens
  misc_RNA (1)...(19): siRNA sense strand
ggagauacauuggaagauc

SEQ ID NO: 1825508 - RNA, 19 nt, Homo sapiens
  misc_RNA (1)...(19): siRNA sense strand
ccaauacacucuggaaaug

SEQ ID NO: 1825509 - RNA, 19 nt, Homo sapiens
  misc_RNA (1)...(19): siRNA sense strand
ugaaagaggaugugagaaa

SEQ ID NO: 1825510 - RNA, 19 nt, Homo sapiens
  misc_RNA (1)...(19): siRNA sense strand
gcauggaacuauuugaaag

SEQ ID NO: 1825511 - RNA, 19 nt, Homo sapiens
  misc_RNA (1)...(19): siRNA sense strand
aagaggaugugagaaauaa

SEQ ID NO: 1825512 - RNA, 19 nt, Homo sapiens
  misc_RNA (1)...(19): siRNA sense strand
gaaauccuagcuaaagaaa

SEQ ID NO: 1825513 - RNA, 19 nt, Homo sapiens
  misc_RNA (1)...(19): siRNA sense strand
uaugugaaauccuagcuaa

SEQ ID NO: 1825514 - RNA, 19 nt, Homo sapiens
  misc_RNA (1)...(19): siRNA sense strand
agaguuaugugaaauccua

SEQ ID NO: 1825515 - RNA, 19 nt, Homo sapiens
  misc_RNA (1)...(19): siRNA sense strand
ggagagagaaguccaauac

SEQ ID NO: 1825516 - RNA, 19 nt, Homo sapiens
  misc_RNA (1)...(19): siRNA sense strand
gaaccaaagauacuucguu

SEQ ID NO: 1825517 - RNA, 19 nt, Homo sapiens
  misc_RNA (1)...(19): siRNA sense strand
gaaaaggacacuauaagaa

SEQ ID NO: 1825518 - RNA, 19 nt, Homo sapiens
  misc_RNA (1)...(19): siRNA sense strand
cucaggagcuugaauuuau

SEQ ID NO: 1825519 - RNA, 19 nt, Homo sapiens
  misc_RNA (1)...(19): siRNA sense strand
gaauauuggagauacauug

SEQ ID NO: 1825520 - RNA, 19 nt, Homo sapiens
  misc_RNA (1)...(19): siRNA sense strand
ccgggaugcuauugaguua

SEQ ID NO: 1825521 - RNA, 19 nt, Homo sapiens
  misc_RNA (1)...(19): siRNA sense strand
gugaaauccuagcuaaaga

SEQ ID NO: 1825522 - RNA, 19 nt, Homo sapiens
  misc_RNA (1)...(19): siRNA sense strand
cagcaucgacaauggguua

SEQ ID NO: 1825523 - RNA, 19 nt, Homo sapiens
  misc_RNA (1)...(19): siRNA sense strand
gauuuacaaccaagucaua

SEQ ID NO: 1825524 - RNA, 19 nt, Homo sapiens
  misc_RNA (1)...(19): siRNA sense strand
gaaagaagugaacgagcuu

SEQ ID NO: 1825525 - RNA, 19 nt, Homo sapiens
  misc_RNA (1)...(19): siRNA sense strand
ggaucuacaugaggaaaug

SEQ ID NO: 1825526 - RNA, 19 nt, Homo sapiens
  misc_RNA (1)...(19): siRNA sense strand
ugaguuaaaugcagccaau

SEQ ID NO: 1825527 - RNA, 19 nt, Homo sapiens
  misc_RNA (1)...(19): siRNA sense strand
aaacuaguaccacauaaug

SEQ ID NO: 1825528 - RNA, 19 nt, Homo sapiens
  misc_RNA (1)...(19): siRNA sense strand
aaagaggaugugagaaaua

SEQ ID NO: 1825529 - RNA, 19 nt, Homo sapiens
  misc_RNA (1)...(19): siRNA sense strand
cagaaugggcugauauaga

SEQ ID NO: 1825530 - RNA, 19 nt, Homo sapiens
  misc_RNA (1)...(19): siRNA sense strand
ggaaaugaacuacaucacu

SEQ ID NO: 1825531 - RNA, 19 nt, Homo sapiens
  misc_RNA (1)...(19): siRNA sense strand
ucaggagcuugaauuuauu

SEQ ID NO: 1825532 - RNA, 19 nt, Homo sapiens
  misc_RNA (1)...(19): siRNA sense strand
gagcagaaugggcugauau

SEQ ID NO: 1825533 - RNA, 19 nt, Homo sapiens
  misc_RNA (1)...(19): siRNA sense strand
guacagggacagagcagaa

SEQ ID NO: 1825534 - RNA, 19 nt, Homo sapiens
  misc_RNA (1)...(19): siRNA sense strand
gauaaugagcugcaguaug

SEQ ID NO: 1825535 - RNA, 19 nt, Homo sapiens
  misc_RNA (1)...(19): siRNA sense strand
gggauaaugagcugcagua

SEQ ID NO: 1825536 - RNA, 19 nt, Homo sapiens
  misc_RNA (1)...(19): siRNA sense strand
ugaacuacaucacugcaau

SEQ ID NO: 1825537 - RNA, 19 nt, Homo sapiens
  misc_RNA (1)...(19): siRNA sense strand
gaagugaacgagcuuuuaa

SEQ ID NO: 1825538 - RNA, 19 nt, Homo sapiens
  misc_RNA (1)...(19): siRNA sense strand
ucagaaggaucuacaugag

SEQ ID NO: 1825539 - RNA, 19 nt, Homo sapiens
  misc_RNA (1)...(19): siRNA sense strand
uaaaugcagccaauuauac

SEQ ID NO: 1825540 - RNA, 19 nt, Homo sapiens
  misc_RNA (1)...(19): siRNA sense strand
aaaggacacuauaagaaag

SEQ ID NO: 1825541 - RNA, 19 nt, Homo sapiens
  misc_RNA (1)...(19): siRNA sense strand
uaaucaggaugcaaagaau

SEQ ID NO: 1825542 - RNA, 19 nt, Homo sapiens
  misc_RNA (1)...(19): siRNA sense strand
uggaccaacuucugaaaga

SEQ ID NO: 1825543 - RNA, 19 nt, Homo sapiens
  misc_RNA (1)...(19): siRNA sense strand
acaaugaucgugcuguauu

SEQ ID NO: 1825544 - RNA, 19 nt, Homo sapiens
  misc_RNA (1)...(19): siRNA sense strand
guuaaaugcagccaauuau

SEQ ID NO: 1825545 - RNA, 19 nt, Homo sapiens
  misc_RNA (1)...(19): siRNA sense strand
gaucguggucuuuccaaau

SEQ ID NO: 1825546 - RNA, 19 nt, Homo sapiens
  misc_RNA (1)...(19): siRNA sense strand
ggaucguggucuuuccaaa

SEQ ID NO: 1825547 - RNA, 19 nt, Homo sapiens
  misc_RNA (1)...(19): siRNA sense strand
caucgacaauggguuauuc

SEQ ID NO: 1825548 - RNA, 19 nt, Homo sapiens
  misc_RNA (1)...(19): siRNA sense strand
gcagcgugaugaaagaagu

SEQ ID NO: 1825549 - RNA, 19 nt, Homo sapiens
  misc_RNA (1)...(19): siRNA sense strand
uauuggagauacauuggaa

SEQ ID NO: 1825550 - RNA, 19 nt, Homo sapiens
  misc_RNA (1)...(19): siRNA sense strand
agaaaggaauauuggagau

SEQ ID NO: 1825551 - RNA, 19 nt, Homo sapiens
  misc_RNA (1)...(19): siRNA sense strand
acaauggguuauucaggaa

SEQ ID NO: 1825552 - RNA, 19 nt, Homo sapiens
  misc_RNA (1)...(19): siRNA sense strand
guccagaucauuuauagug

SEQ ID NO: 1825553 - RNA, 19 nt, Homo sapiens
  misc_RNA (1)...(19): siRNA sense strand
caucauaggcgaguauuag

SEQ ID NO: 1825554 - RNA, 19 nt, Homo sapiens
  misc_RNA (1)...(19): siRNA sense strand
gaggaaaugaacuacauca

SEQ ID NO: 1825555 - RNA, 19 nt, Homo sapiens
  misc_RNA (1)...(19): siRNA sense strand
ugacucaccaacaaaugua

SEQ ID NO: 1825556 - RNA, 19 nt, Homo sapiens
  misc_RNA (1)...(19): siRNA sense strand
aaaggaauauuggagauac

SEQ ID NO: 1825557 - RNA, 19 nt, Homo sapiens
  misc_RNA (1)...(19): siRNA sense strand
uaugaagacaugcuagaaa

SEQ ID NO: 1825558 - RNA, 19 nt, Homo sapiens
  misc_RNA (1)...(19): siRNA sense strand
ggaccaacuucugaaagag

SEQ ID NO: 1825559 - RNA, 19 nt, Homo sapiens
  misc_RNA (1)...(19): siRNA sense strand
gcaucauaggcgaguauua

SEQ ID NO: 1825560 - RNA, 19 nt, Homo sapiens
  misc_RNA (1)...(19): siRNA sense strand
ggaauauuggagauacauu

SEQ ID NO: 1825561 - RNA, 19 nt, Homo sapiens
  misc_RNA (1)...(19): siRNA sense strand
guggauaucuaugaagaca

SEQ ID NO: 1825562 - RNA, 19 nt, Homo sapiens
  misc_RNA (1)...(19): siRNA sense strand
gugcauggaacuauuugaa

SEQ ID NO: 1825563 - RNA, 19 nt, Homo sapiens
  misc_RNA (1)...(19): siRNA sense strand
ggagaguucuuuugaaguc

SEQ ID NO: 1825564 - RNA, 19 nt, Homo sapiens
  misc_RNA (1)...(19): siRNA sense strand
ugaaauccuagcuaaagaa

SEQ ID NO: 1825565 - RNA, 19 nt, Homo sapiens
  misc_RNA (1)...(19): siRNA sense strand
aucguggucuuuccaaaua

SEQ ID NO: 1825566 - RNA, 19 nt, Homo sapiens
  misc_RNA (1)...(19): siRNA sense strand
gagagaaguccaauacacu

SEQ ID NO: 1825567 - RNA, 19 nt, Homo sapiens
  misc_RNA (1)...(19): siRNA sense strand
caucucaggagcuugaauu

SEQ ID NO: 1825568 - RNA, 19 nt, Homo sapiens
  misc_RNA (1)...(19): siRNA sense strand
aguuaaaugcagccaauua

SEQ ID NO: 1825569 - RNA, 19 nt, Homo sapiens
  misc_RNA (1)...(19): siRNA sense strand
aaagugcauggaacuauuu

SEQ ID NO: 1825570 - RNA, 19 nt, Homo sapiens
  misc_RNA (1)...(19): siRNA sense strand
uuaaucaggaugcaaagaa

SEQ ID NO: 1825571 - RNA, 19 nt, Homo sapiens
  misc_RNA (1)...(19): siRNA sense strand
ucucaggagcuugaauuua

SEQ ID NO: 1825572 - RNA, 19 nt, Homo sapiens
  misc_RNA (1)...(19): siRNA sense strand
gcagccaauuauacagugu

SEQ ID NO: 1825573 - RNA, 19 nt, Homo sapiens
  misc_RNA (1)...(19): siRNA sense strand
agugacaaauuuagagaug

SEQ ID NO: 1825574 - RNA, 19 nt, Homo sapiens
  misc_RNA (1)...(19): siRNA sense strand
uagauccggugccgcagaa

SEQ ID NO: 1825575 - RNA, 19 nt, Homo sapiens
  misc_RNA (1)...(19): siRNA sense strand
ugacaauaaggaagacauu

SEQ ID NO: 1825576 - RNA, 19 nt, Homo sapiens
  misc_RNA (1)...(19): siRNA sense strand
uuacaaccaagucauaguu

SEQ ID NO: 1825577 - RNA, 19 nt, Homo sapiens
  misc_RNA (1)...(19): siRNA sense strand
agagagaaguccaauacac

SEQ ID NO: 1825578 - RNA, 19 nt, Homo sapiens
  misc_RNA (1)...(19): siRNA sense strand
gcaaacacagcacagaaaa

SEQ ID NO: 1825579 - RNA, 19 nt, Homo sapiens
  misc_RNA (1)...(19): siRNA sense strand
ugaaagugcauggaacuau

SEQ ID NO: 1825580 - RNA, 19 nt, Homo sapiens
  misc_RNA (1)...(19): siRNA sense strand
aauacacucuggaaaugau

SEQ ID NO: 1825581 - RNA, 19 nt, Homo sapiens
  misc_RNA (1)...(19): siRNA sense strand
caauacacucuggaaauga

SEQ ID NO: 1825582 - RNA, 19 nt, Homo sapiens
  misc_RNA (1)...(19): siRNA sense strand
ucaggaauuuaaacuuugg

SEQ ID NO: 1825583 - RNA, 19 nt, Homo sapiens
  misc_RNA (1)...(19): siRNA sense strand
ccuaauugccuuucuugug

SEQ ID NO: 1825584 - RNA, 19 nt, Homo sapiens
  misc_RNA (1)...(19): siRNA sense strand
ccaaucccgugguccagau

SEQ ID NO: 1825585 - RNA, 19 nt, Homo sapiens
  misc_RNA (1)...(19): siRNA sense strand
ggacucgcccuccuauguc

SEQ ID NO: 1825586 - RNA, 19 nt, Homo sapiens
  misc_RNA (1)...(19): siRNA sense strand
gcagaaugggcugauauag

SEQ ID NO: 1825587 - RNA, 19 nt, Homo sapiens
  misc_RNA (1)...(19): siRNA sense strand
gaacuauuugaaagggauu

SEQ ID NO: 1825588 - RNA, 19 nt, Homo sapiens
  misc_RNA (1)...(19): siRNA sense strand
uacaugaggaaaugaacua

SEQ ID NO: 1825589 - RNA, 19 nt, Homo sapiens
  misc_RNA (1)...(19): siRNA sense strand
ugaaagccaucaaagaauu

SEQ ID NO: 1825590 - RNA, 19 nt, Homo sapiens
  misc_RNA (1)...(19): siRNA sense strand
guccaugucuuacuacuuu

SEQ ID NO: 1825591 - RNA, 19 nt, Homo sapiens
  misc_RNA (1)...(19): siRNA sense strand
gagggaacaugcugagaaa

SEQ ID NO: 1825592 - RNA, 19 nt, Homo sapiens
  misc_RNA (1)...(19): siRNA sense strand
ggugaaagccaucaaagaa

SEQ ID NO: 1825593 - RNA, 19 nt, Homo sapiens
  misc_RNA (1)...(19): siRNA sense strand
gcgaugauguggcuuugaa

SEQ ID NO: 1825594 - RNA, 19 nt, Homo sapiens
  misc_RNA (1)...(19): siRNA sense strand
caaauacuuucuucaccaa

SEQ ID NO: 1825595 - RNA, 19 nt, Homo sapiens
  misc_RNA (1)...(19): siRNA sense strand
gggagacagugauaaugaa

SEQ ID NO: 1825596 - RNA, 19 nt, Homo sapiens
  misc_RNA (1)...(19): siRNA sense strand
gaacaugcugagaaacuga

SEQ ID NO: 1825597 - RNA, 19 nt, Homo sapiens
  misc_RNA (1)...(19): siRNA sense strand
ucaagaaaccagacuguga

SEQ ID NO: 1825598 - RNA, 19 nt, Homo sapiens
  misc_RNA (1)...(19): siRNA sense strand
ccauuugugugacuucauu

SEQ ID NO: 1825599 - RNA, 19 nt, Homo sapiens
  misc_RNA (1)...(19): siRNA sense strand
gaaagccaucaaagaauug

SEQ ID NO: 1825600 - RNA, 19 nt, Homo sapiens
  misc_RNA (1)...(19): siRNA sense strand
gcucuacgccuccuacguu

SEQ ID NO: 1825601 - RNA, 19 nt, Homo sapiens
  misc_RNA (1)...(19): siRNA sense strand
ggaacaugcugagaaacug

SEQ ID NO: 1825602 - RNA, 19 nt, Homo sapiens
  misc_RNA (1)...(19): siRNA sense strand
ggagacagugauaaugaaa

SEQ ID NO: 1825603 - RNA, 19 nt, Homo sapiens
  misc_RNA (1)...(19): siRNA sense strand
ugaugaagcugcagaacca

SEQ ID NO: 1825604 - RNA, 19 nt, Homo sapiens
  misc_RNA (1)...(19): siRNA sense strand
caagaaaccagacugugau

SEQ ID NO: 1825605 - RNA, 19 nt, Homo sapiens
  misc_RNA (1)...(19): siRNA sense strand
gaacuaccaccaggacuca

SEQ ID NO: 1825606 - RNA, 19 nt, Homo sapiens
  misc_RNA (1)...(19): siRNA sense strand
gcaggugaaagccaucaaa

SEQ ID NO: 1825607 - RNA, 19 nt, Homo sapiens
  misc_RNA (1)...(19): siRNA sense strand
gaugauguggcuuugaaga

SEQ ID NO: 1825608 - RNA, 19 nt, Homo sapiens
  misc_RNA (1)...(19): siRNA sense strand
gaaaccagacugugaugac

SEQ ID NO: 1825609 - RNA, 19 nt, Homo sapiens
  misc_RNA (1)...(19): siRNA sense strand
gugaaagccaucaaagaau

SEQ ID NO: 1825610 - RNA, 19 nt, Homo sapiens
  misc_RNA (1)...(19): siRNA sense strand
agaucaaccuggagcucua

SEQ ID NO: 1825611 - RNA, 19 nt, Homo sapiens
  misc_RNA (1)...(19): siRNA sense strand
cagugauaaugaaagcuaa

SEQ ID NO: 1825612 - RNA, 19 nt, Homo sapiens
  misc_RNA (1)...(19): siRNA sense strand
cugagaaacugaugaagcu

SEQ ID NO: 1825613 - RNA, 19 nt, Homo sapiens
  misc_RNA (1)...(19): siRNA sense strand
ugggagacagugauaauga

SEQ ID NO: 1825614 - RNA, 19 nt, Homo sapiens
  misc_RNA (1)...(19): siRNA sense strand
acagugauaaugaaagcua

SEQ ID NO: 1825615 - RNA, 19 nt, Homo sapiens
  misc_RNA (1)...(19): siRNA sense strand
agagggaacaugcugagaa

SEQ ID NO: 1825616 - RNA, 19 nt, Homo sapiens
  misc_RNA (1)...(19): siRNA sense strand
gggaacaugcugagaaacu

SEQ ID NO: 1825617 - RNA, 19 nt, Homo sapiens
  misc_RNA (1)...(19): siRNA sense strand
gauguggcuuugaagaacu

SEQ ID NO: 1825618 - RNA, 19 nt, Homo sapiens
  misc_RNA (1)...(19): siRNA sense strand
gccaucaaccgccagauca

SEQ ID NO: 1825619 - RNA, 19 nt, Homo sapiens
  misc_RNA (1)...(19): siRNA sense strand
gugaccacgugaccaacuu

SEQ ID NO: 1825620 - RNA, 19 nt, Homo sapiens
  misc_RNA (1)...(19): siRNA sense strand
agacagugauaaugaaagc

SEQ ID NO: 1825621 - RNA, 19 nt, Homo sapiens
  misc_RNA (1)...(19): siRNA sense strand
ugggagagcgggcugaaug

SEQ ID NO: 1825622 - RNA, 19 nt, Homo sapiens
  misc_RNA (1)...(19): siRNA sense strand
aauacuuucuucaccaauc

SEQ ID NO: 1825623 - RNA, 19 nt, Homo sapiens
  misc_RNA (1)...(19): siRNA sense strand
ugauguggcuuugaagaac

SEQ ID NO: 1825624 - RNA, 19 nt, Homo sapiens
  misc_RNA (1)...(19): siRNA sense strand
ccuucaggauaucaagaaa

SEQ ID NO: 1825625 - RNA, 19 nt, Homo sapiens
  misc_RNA (1)...(19): siRNA sense strand
caccugggagacagugaua

SEQ ID NO: 1825626 - RNA, 19 nt, Homo sapiens
  misc_RNA (1)...(19): siRNA sense strand
aaaccagacugugaugacu

SEQ ID NO: 1825627 - RNA, 19 nt, Homo sapiens
  misc_RNA (1)...(19): siRNA sense strand
uaucaagaaaccagacugu

SEQ ID NO: 1825628 - RNA, 19 nt, Homo sapiens
  misc_RNA (1)...(19): siRNA sense strand
uugugugacuucauugaga

SEQ ID NO: 1825629 - RNA, 19 nt, Homo sapiens
  misc_RNA (1)...(19): siRNA sense strand
gaaaguaucugaaagugua

SEQ ID NO: 1825630 - RNA, 19 nt, Homo sapiens
  misc_RNA (1)...(19): siRNA sense strand
gaagaaagcaguagcauuu

SEQ ID NO: 1825631 - RNA, 19 nt, Homo sapiens
  misc_RNA (1)...(19): siRNA sense strand
gaacucagcuaagagauuu

SEQ ID NO: 1825632 - RNA, 19 nt, Homo sapiens
  misc_RNA (1)...(19): siRNA sense strand
gaucaaagguacaacacua

SEQ ID NO: 1825633 - RNA, 19 nt, Homo sapiens
  misc_RNA (1)...(19): siRNA sense strand
cagaagaacuccuugcuaa

SEQ ID NO: 1825634 - RNA, 19 nt, Homo sapiens
  misc_RNA (1)...(19): siRNA sense strand
gcucaguuauuaucucuua

SEQ ID NO: 1825635 - RNA, 19 nt, Homo sapiens
  misc_RNA (1)...(19): siRNA sense strand
gaacuugccacuagauuaa

SEQ ID NO: 1825636 - RNA, 19 nt, Homo sapiens
  misc_RNA (1)...(19): siRNA sense strand
gaaugaaaguugaacaaga

SEQ ID NO: 1825637 - RNA, 19 nt, Homo sapiens
  misc_RNA (1)...(19): siRNA sense strand
aauaauggcugaagaacua

SEQ ID NO: 1825638 - RNA, 19 nt, Homo sapiens
  misc_RNA (1)...(19): siRNA sense strand
gaagaggaguugcagcauu

SEQ ID NO: 1825639 - RNA, 19 nt, Homo sapiens
  misc_RNA (1)...(19): siRNA sense strand
gaacugagucaaaguguuu

SEQ ID NO: 1825640 - RNA, 19 nt, Homo sapiens
  misc_RNA (1)...(19): siRNA sense strand
gaagacaggcagagcaaua

SEQ ID NO: 1825641 - RNA, 19 nt, Homo sapiens
  misc_RNA (1)...(19): siRNA sense strand
caacuagccugcaaagaga

SEQ ID NO: 1825642 - RNA, 19 nt, Homo sapiens
  misc_RNA (1)...(19): siRNA sense strand
ccagaaaggaggauuauuu

SEQ ID NO: 1825643 - RNA, 19 nt, Homo sapiens
  misc_RNA (1)...(19): siRNA sense strand
ugaaacaacugaaucacaa

SEQ ID NO: 1825644 - RNA, 19 nt, Homo sapiens
  misc_RNA (1)...(19): siRNA sense strand
gaagagacgaggaaagaaa

SEQ ID NO: 1825645 - RNA, 19 nt, Homo sapiens
  misc_RNA (1)...(19): siRNA sense strand
gaaaagaaccgaaguauuc

SEQ ID NO: 1825646 - RNA, 19 nt, Homo sapiens
  misc_RNA (1)...(19): siRNA sense strand
ggaagaaaguggacgaagu

SEQ ID NO: 1825647 - RNA, 19 nt, Homo sapiens
  misc_RNA (1)...(19): siRNA sense strand
gcaagaaacauuagccauu

SEQ ID NO: 1825648 - RNA, 19 nt, Homo sapiens
  misc_RNA (1)...(19): siRNA sense strand
ggacauagcuuuggaaccu

SEQ ID NO: 1825649 - RNA, 19 nt, Homo sapiens
  misc_RNA (1)...(19): siRNA sense strand
acaaagaacuuacugaucu

SEQ ID NO: 1825650 - RNA, 19 nt, Homo sapiens
  misc_RNA (1)...(19): siRNA sense strand
caaagaagagguugagaaa

SEQ ID NO: 1825651 - RNA, 19 nt, Homo sapiens
  misc_RNA (1)...(19): siRNA sense strand
caagggauaugcuuuagug

SEQ ID NO: 1825652 - RNA, 19 nt, Homo sapiens
  misc_RNA (1)...(19): siRNA sense strand
cagaaaggaggauuauuua

SEQ ID NO: 1825653 - RNA, 19 nt, Homo sapiens
  misc_RNA (1)...(19): siRNA sense strand
ccaaauggaagcaucuuua

SEQ ID NO: 1825654 - RNA, 19 nt, Homo sapiens
  misc_RNA (1)...(19): siRNA sense strand
gcacaauucuaacaucauc

SEQ ID NO: 1825655 - RNA, 19 nt, Homo sapiens
  misc_RNA (1)...(19): siRNA sense strand
uuagauagccggaguguaa

SEQ ID NO: 1825656 - RNA, 19 nt, Homo sapiens
  misc_RNA (1)...(19): siRNA sense strand
ggagauacccaaacuuaga

SEQ ID NO: 1825657 - RNA, 19 nt, Homo sapiens
  misc_RNA (1)...(19): siRNA sense strand
caagaaacauuagccauuc

SEQ ID NO: 1825658 - RNA, 19 nt, Homo sapiens
  misc_RNA (1)...(19): siRNA sense strand
agacauggaugaacuugaa

SEQ ID NO: 1825659 - RNA, 19 nt, Homo sapiens
  misc_RNA (1)...(19): siRNA sense strand
ggaggacuguggucgauga

SEQ ID NO: 1825660 - RNA, 19 nt, Homo sapiens
  misc_RNA (1)...(19): siRNA sense strand
gcuaagagauuuggaucaa

SEQ ID NO: 1825661 - RNA, 19 nt, Homo sapiens
  misc_RNA (1)...(19): siRNA sense strand
ggagcaggaucaagcauau

SEQ ID NO: 1825662 - RNA, 19 nt, Homo sapiens
  misc_RNA (1)...(19): siRNA sense strand
gcaaagaagagguugagaa

SEQ ID NO: 1825663 - RNA, 19 nt, Homo sapiens
  misc_RNA (1)...(19): siRNA sense strand
agagagagaugcugcuaaa

SEQ ID NO: 1825664 - RNA, 19 nt, Homo sapiens
  misc_RNA (1)...(19): siRNA sense strand
caacuccuguuaacuguga

SEQ ID NO: 1825665 - RNA, 19 nt, Homo sapiens
  misc_RNA (1)...(19): siRNA sense strand
gcaagacaguugaauuucu

SEQ ID NO: 1825666 - RNA, 19 nt, Homo sapiens
  misc_RNA (1)...(19): siRNA sense strand
gaucaauaauggcugaaga

SEQ ID NO: 1825667 - RNA, 19 nt, Homo sapiens
  misc_RNA (1)...(19): siRNA sense strand
aagaagagguugagaaaca

SEQ ID NO: 1825668 - RNA, 19 nt, Homo sapiens
  misc_RNA (1)...(19): siRNA sense strand
aagggaggcucaguuauua

SEQ ID NO: 1825669 - RNA, 19 nt, Homo sapiens
  misc_RNA (1)...(19): siRNA sense strand
ccaauagccucuccuaaag

SEQ ID NO: 1825670 - RNA, 19 nt, Homo sapiens
  misc_RNA (1)...(19): siRNA sense strand
ccugaaagaugaaauguuc

SEQ ID NO: 1825671 - RNA, 19 nt, Homo sapiens
  misc_RNA (1)...(19): siRNA sense strand
gaaaguggacgaagugcaa

SEQ ID NO: 1825672 - RNA, 19 nt, Homo sapiens
  misc_RNA (1)...(19): siRNA sense strand
agaauagacucauuuagug

SEQ ID NO: 1825673 - RNA, 19 nt, Homo sapiens
  misc_RNA (1)...(19): siRNA sense strand
gucaagaacuccugaaaca

SEQ ID NO: 1825674 - RNA, 19 nt, Homo sapiens
  misc_RNA (1)...(19): siRNA sense strand
aagaagaacuugccacuag

SEQ ID NO: 1825675 - RNA, 19 nt, Homo sapiens
  misc_RNA (1)...(19): siRNA sense strand
gaagugcaacuccuguuaa

SEQ ID NO: 1825676 - RNA, 19 nt, Homo sapiens
  misc_RNA (1)...(19): siRNA sense strand
gaagaaaguggacgaagug

SEQ ID NO: 1825677 - RNA, 19 nt, Homo sapiens
  misc_RNA (1)...(19): siRNA sense strand
gacaagagacuacagauuc

SEQ ID NO: 1825678 - RNA, 19 nt, Homo sapiens
  misc_RNA (1)...(19): siRNA sense strand
gaaaguguaauaagugaga

SEQ ID NO: 1825679 - RNA, 19 nt, Homo sapiens
  misc_RNA (1)...(19): siRNA sense strand
gaaaugaaagcuaaagaag

SEQ ID NO: 1825680 - RNA, 19 nt, Homo sapiens
  misc_RNA (1)...(19): siRNA sense strand
gagcagauccgaggguuaa

SEQ ID NO: 1825681 - RNA, 19 nt, Homo sapiens
  misc_RNA (1)...(19): siRNA sense strand
ucagaagaguccaguggua

SEQ ID NO: 1825682 - RNA, 19 nt, Homo sapiens
  misc_RNA (1)...(19): siRNA sense strand
ugaacagccugauaucuug

SEQ ID NO: 1825683 - RNA, 19 nt, Homo sapiens
  misc_RNA (1)...(19): siRNA sense strand
gcaguagcauuucuuccuu

SEQ ID NO: 1825684 - RNA, 19 nt, Homo sapiens
  misc_RNA (1)...(19): siRNA sense strand
aagaggaguugcagcauuu

SEQ ID NO: 1825685 - RNA, 19 nt, Homo sapiens
  misc_RNA (1)...(19): siRNA sense strand
ggacuguggucgaugaauc

SEQ ID NO: 1825686 - RNA, 19 nt, Homo sapiens
  misc_RNA (1)...(19): siRNA sense strand
acacuauucugcagaugua

SEQ ID NO: 1825687 - RNA, 19 nt, Homo sapiens
  misc_RNA (1)...(19): siRNA sense strand
gaagaacuccuugcuaaca

SEQ ID NO: 1825688 - RNA, 19 nt, Homo sapiens
  misc_RNA (1)...(19): siRNA sense strand
uugauaaccugaaagauga

SEQ ID NO: 1825689 - RNA, 19 nt, Homo sapiens
  misc_RNA (1)...(19): siRNA sense strand
gaguguaagugaaaucaau

SEQ ID NO: 1825690 - RNA, 19 nt, Homo sapiens
  misc_RNA (1)...(19): siRNA sense strand
ggaacugagucaaaguguu

SEQ ID NO: 1825691 - RNA, 19 nt, Homo sapiens
  misc_RNA (1)...(19): siRNA sense strand
gaauauguaagaacacuug

SEQ ID NO: 1825692 - RNA, 19 nt, Homo sapiens
  misc_RNA (1)...(19): siRNA sense strand
gggagaaauuagagaagaa

SEQ ID NO: 1825693 - RNA, 19 nt, Homo sapiens
  misc_RNA (1)...(19): siRNA sense strand
acaacugaaucacaaguaa

SEQ ID NO: 1825694 - RNA, 19 nt, Homo sapiens
  misc_RNA (1)...(19): siRNA sense strand
gaaaggaagaaagccauuu

SEQ ID NO: 1825695 - RNA, 19 nt, Homo sapiens
  misc_RNA (1)...(19): siRNA sense strand
gccgugaaaugaaagcuaa

SEQ ID NO: 1825696 - RNA, 19 nt, Homo sapiens
  misc_RNA (1)...(19): siRNA sense strand
gagaaacaacauagagaaa

SEQ ID NO: 1825697 - RNA, 19 nt, Homo sapiens
  misc_RNA (1)...(19): siRNA sense strand
ucaaagaauugcagaagca

SEQ ID NO: 1825698 - RNA, 19 nt, Homo sapiens
  misc_RNA (1)...(19): siRNA sense strand
caagacaguugaauuucug

SEQ ID NO: 1825699 - RNA, 19 nt, Homo sapiens
  misc_RNA (1)...(19): siRNA sense strand
caugaauccuugcacauug

SEQ ID NO: 1825700 - RNA, 19 nt, Homo sapiens
  misc_RNA (1)...(19): siRNA sense strand
gaacaagaaaggaagaaag

SEQ ID NO: 1825701 - RNA, 19 nt, Homo sapiens
  misc_RNA (1)...(19): siRNA sense strand
uguguaaacuggaggauga

SEQ ID NO: 1825702 - RNA, 19 nt, Homo sapiens
  misc_RNA (1)...(19): siRNA sense strand
cuaaagacaaggagaauga

SEQ ID NO: 1825703 - RNA, 19 nt, Homo sapiens
  misc_RNA (1)...(19): siRNA sense strand
gagaguugcuguucaucug

SEQ ID NO: 1825704 - RNA, 19 nt, Homo sapiens
  misc_RNA (1)...(19): siRNA sense strand
gaaaguguaauugauguga

SEQ ID NO: 1825705 - RNA, 19 nt, Homo sapiens
  misc_RNA (1)...(19): siRNA sense strand
aaggagauacccaaacuua

SEQ ID NO: 1825706 - RNA, 19 nt, Homo sapiens
  misc_RNA (1)...(19): siRNA sense strand
guaccagguugaauuggaa

SEQ ID NO: 1825707 - RNA, 19 nt, Homo sapiens
  misc_RNA (1)...(19): siRNA sense strand
ggauagugcauacaaagaa

SEQ ID NO: 1825708 - RNA, 19 nt, Homo sapiens
  misc_RNA (1)...(19): siRNA sense strand
ggaagauguuugcaagaca

SEQ ID NO: 1825709 - RNA, 19 nt, Homo sapiens
  misc_RNA (1)...(19): siRNA sense strand
gcacgaagaaacuguuaau

SEQ ID NO: 1825710 - RNA, 19 nt, Homo sapiens
  misc_RNA (1)...(19): siRNA sense strand
gagagaacgugcagcuaca

SEQ ID NO: 1825711 - RNA, 19 nt, Homo sapiens
  misc_RNA (1)...(19): siRNA sense strand
gcccagaagucuauugaca

SEQ ID NO: 1825712 - RNA, 19 nt, Homo sapiens
  misc_RNA (1)...(19): siRNA sense strand
gaaauuaagagcuaaagac

SEQ ID NO: 1825713 - RNA, 19 nt, Homo sapiens
  misc_RNA (1)...(19): siRNA sense strand
caagguggcugagcagugu

SEQ ID NO: 1825714 - RNA, 19 nt, Homo sapiens
  misc_RNA (1)...(19): siRNA sense strand
cgaagugcaacuccuguua

SEQ ID NO: 1825715 - RNA, 19 nt, Homo sapiens
  misc_RNA (1)...(19): siRNA sense strand
ggaaagaaugaaaguugaa

SEQ ID NO: 1825716 - RNA, 19 nt, Homo sapiens
  misc_RNA (1)...(19): siRNA sense strand
cagcagcaguugagagaga

SEQ ID NO: 1825717 - RNA, 19 nt, Homo sapiens
  misc_RNA (1)...(19): siRNA sense strand
gaccauugcuucgacaaau

SEQ ID NO: 1825718 - RNA, 19 nt, Homo sapiens
  misc_RNA (1)...(19): siRNA sense strand
caguugaauuucugaauga

SEQ ID NO: 1825719 - RNA, 19 nt, Homo sapiens
  misc_RNA (1)...(19): siRNA sense strand
aaagggaggcucaguuauu

SEQ ID NO: 1825720 - RNA, 19 nt, Homo sapiens
  misc_RNA (1)...(19): siRNA sense strand
gaacaauagguaccagguu

SEQ ID NO: 1825721 - RNA, 19 nt, Homo sapiens
  misc_RNA (1)...(19): siRNA sense strand
agagaaggcccaagaagaa

SEQ ID NO: 1825722 - RNA, 19 nt, Homo sapiens
  misc_RNA (1)...(19): siRNA sense strand
gguagaacgccaagagaaa

SEQ ID NO: 1825723 - RNA, 19 nt, Homo sapiens
  misc_RNA (1)...(19): siRNA sense strand
uaaagaaucggauaugaag

SEQ ID NO: 1825724 - RNA, 19 nt, Homo sapiens
  misc_RNA (1)...(19): siRNA sense strand
gaaauggaaagaaugaaag

SEQ ID NO: 1825725 - RNA, 19 nt, Homo sapiens
  misc_RNA (1)...(19): siRNA sense strand
gaaaggaggauuauuuacg

SEQ ID NO: 1825726 - RNA, 19 nt, Homo sapiens
  misc_RNA (1)...(19): siRNA sense strand
aggaaaaucugaagaagua

SEQ ID NO: 1825727 - RNA, 19 nt, Homo sapiens
  misc_RNA (1)...(19): siRNA sense strand
guacuucuaccaccaguga

SEQ ID NO: 1825728 - RNA, 19 nt, Homo sapiens
  misc_RNA (1)...(19): siRNA sense strand
uggaaagaaugaaaguuga

SEQ ID NO: 1825729 - RNA, 19 nt, Homo sapiens
  misc_RNA (1)...(19): siRNA sense strand
guacggcgcugaucaccua

SEQ ID NO: 1825730 - RNA, 19 nt, Homo sapiens
  misc_RNA (1)...(19): siRNA sense strand
caaguaaccucuucaacug

SEQ ID NO: 1825731 - RNA, 19 nt, Homo sapiens
  misc_RNA (1)...(19): siRNA sense strand
caacugagccaacauguga

SEQ ID NO: 1825732 - RNA, 19 nt, Homo sapiens
  misc_RNA (1)...(19): siRNA sense strand
gagcuacgcuguccacauc

SEQ ID NO: 1825733 - RNA, 19 nt, Homo sapiens
  misc_RNA (1)...(19): siRNA sense strand
gcaaguaaccucuucaacu

SEQ ID NO: 1825734 - RNA, 19 nt, Homo sapiens
  misc_RNA (1)...(19): siRNA sense strand
cggcugcgcuucaacauca

SEQ ID NO: 1825735 - RNA, 19 nt, Homo sapiens
  misc_RNA (1)...(19): siRNA sense strand
cgcagcaccuggauuauau

SEQ ID NO: 1825736 - RNA, 19 nt, Homo sapiens
  misc_RNA (1)...(19): siRNA sense strand
uggauuauaucaccgagaa

SEQ ID NO: 1825737 - RNA, 19 nt, Homo sapiens
  misc_RNA (1)...(19): siRNA sense strand
gcccagaccgugccaacua

SEQ ID NO: 1825738 - RNA, 19 nt, Homo sapiens
  misc_RNA (1)...(19): siRNA sense strand
ggacgucuuugugccuuau

SEQ ID NO: 1825739 - RNA, 19 nt, Homo sapiens
  misc_RNA (1)...(19): siRNA sense strand
ugcgaagccuggcaaguaa

SEQ ID NO: 1825740 - RNA, 19 nt, Homo sapiens
  misc_RNA (1)...(19): siRNA sense strand
ggacucggacgucuuugug

SEQ ID NO: 1825741 - RNA, 19 nt, Homo sapiens
  misc_RNA (1)...(19): siRNA sense strand
acucgcagcaccuggauua

SEQ ID NO: 1825742 - RNA, 19 nt, Homo sapiens
  misc_RNA (1)...(19): siRNA sense strand
caacuacgagcgcuuugug

SEQ ID NO: 1825743 - RNA, 19 nt, Homo sapiens
  misc_RNA (1)...(19): siRNA sense strand
cugcgaagccuggcaagua

SEQ ID NO: 1825744 - RNA, 19 nt, Homo sapiens
  misc_RNA (1)...(19): siRNA sense strand
cuaccuggcuuucgagaac

SEQ ID NO: 1825745 - RNA, 19 nt, Homo sapiens
  misc_RNA (1)...(19): siRNA sense strand
ucgcagcaccuggauuaua

SEQ ID NO: 1825746 - RNA, 19 nt, Homo sapiens
  misc_RNA (1)...(19): siRNA sense strand
ggguuuggaugaacuucga

SEQ ID NO: 1825747 - RNA, 19 nt, Homo sapiens
  misc_RNA (1)...(19): siRNA sense strand
ccaagagcauacggaacuu

SEQ ID NO: 1825748 - RNA, 19 nt, Homo sapiens
  misc_RNA (1)...(19): siRNA sense strand
ucaacuggacgcucuccua

SEQ ID NO: 1825749 - RNA, 19 nt, Homo sapiens
  misc_RNA (1)...(19): siRNA sense strand
agccgcagcuacagcauga

SEQ ID NO: 1825750 - RNA, 19 nt, Homo sapiens
  misc_RNA (1)...(19): siRNA sense strand
gaacucgcagcaccuggau

SEQ ID NO: 1825751 - RNA, 19 nt, Homo sapiens
  misc_RNA (1)...(19): siRNA sense strand
ggcggacucggacgucuuu

SEQ ID NO: 1825752 - RNA, 19 nt, Homo sapiens
  misc_RNA (1)...(19): siRNA sense strand
cggacgucuuugugccuua

SEQ ID NO: 1825753 - RNA, 19 nt, Homo sapiens
  misc_RNA (1)...(19): siRNA sense strand
ggagcuacgcuguccacau

SEQ ID NO: 1825754 - RNA, 19 nt, Homo sapiens
  misc_RNA (1)...(19): siRNA sense strand
uggaagcccuggacggaua

SEQ ID NO: 1825755 - RNA, 19 nt, Homo sapiens
  misc_RNA (1)...(19): siRNA sense strand
ccgagaagcuguggaggaa

SEQ ID NO: 1825756 - RNA, 19 nt, Homo sapiens
  misc_RNA (1)...(19): siRNA sense strand
ugcaggagcuggacaagga

SEQ ID NO: 1825757 - RNA, 19 nt, Homo sapiens
  misc_RNA (1)...(19): siRNA sense strand
ccacugggauaucauguac

SEQ ID NO: 1825758 - RNA, 19 nt, Homo sapiens
  misc_RNA (1)...(19): siRNA sense strand
gacggauacuucaaucuca

SEQ ID NO: 1825759 - RNA, 19 nt, Homo sapiens
  misc_RNA (1)...(19): siRNA sense strand
ggacggauacuucaaucuc

SEQ ID NO: 1825760 - RNA, 19 nt, Homo sapiens
  misc_RNA (1)...(19): siRNA sense strand
gugcaccacugggauauca

SEQ ID NO: 1825761 - RNA, 19 nt, Homo sapiens
  misc_RNA (1)...(19): siRNA sense strand
gcugguggcuguguguuuc

SEQ ID NO: 1825762 - RNA, 19 nt, Homo sapiens
  misc_RNA (1)...(19): siRNA sense strand
ccgacuacaucaccgagaa

SEQ ID NO: 1825763 - RNA, 19 nt, Homo sapiens
  misc_RNA (1)...(19): siRNA sense strand
gaagcaacuacgagagguu

SEQ ID NO: 1825764 - RNA, 19 nt, Homo sapiens
  misc_RNA (1)...(19): siRNA sense strand
acugggauaucauguacaa

SEQ ID NO: 1825765 - RNA, 19 nt, Homo sapiens
  misc_RNA (1)...(19): siRNA sense strand
gcugggcacuggcuuucug

SEQ ID NO: 1825766 - RNA, 19 nt, Homo sapiens
  misc_RNA (1)...(19): siRNA sense strand
cagcgacuccgacaucuuc

SEQ ID NO: 1825767 - RNA, 19 nt, Homo sapiens
  misc_RNA (1)...(19): siRNA sense strand
guacggacgcucccacaag

SEQ ID NO: 1825768 - RNA, 19 nt, Homo sapiens
  misc_RNA (1)...(19): siRNA sense strand
gcaccacugggauaucaug

SEQ ID NO: 1825769 - RNA, 19 nt, Homo sapiens
  misc_RNA (1)...(19): siRNA sense strand
caacugccggcaccuggaa

SEQ ID NO: 1825770 - RNA, 19 nt, Homo sapiens
  misc_RNA (1)...(19): siRNA sense strand
gagacgcugucccgguaca

SEQ ID NO: 1825771 - RNA, 19 nt, Homo sapiens
  misc_RNA (1)...(19): siRNA sense strand
ccugcaggcucaucucaag

SEQ ID NO: 1825772 - RNA, 19 nt, Homo sapiens
  misc_RNA (1)...(19): siRNA sense strand
gcagcgacuccgacaucuu

SEQ ID NO: 1825773 - RNA, 19 nt, Homo sapiens
  misc_RNA (1)...(19): siRNA sense strand
ccagacggugcgcagcaua

SEQ ID NO: 1825774 - RNA, 19 nt, Homo sapiens
  misc_RNA (1)...(19): siRNA sense strand
ggaucugguucagcaugga

SEQ ID NO: 1825775 - RNA, 19 nt, Homo sapiens
  misc_RNA (1)...(19): siRNA sense strand
gaaggaagcugcucagaau

SEQ ID NO: 1825776 - RNA, 19 nt, Homo sapiens
  misc_RNA (1)...(19): siRNA sense strand
gaaccuaaauugaucauug

SEQ ID NO: 1825777 - RNA, 19 nt, Homo sapiens
  misc_RNA (1)...(19): siRNA sense strand
ggaaaacucucugauauua

SEQ ID NO: 1825778 - RNA, 19 nt, Homo sapiens
  misc_RNA (1)...(19): siRNA sense strand
guaauaggaugauuugaga

SEQ ID NO: 1825779 - RNA, 19 nt, Homo sapiens
  misc_RNA (1)...(19): siRNA sense strand
uaagugauguugccaauau

SEQ ID NO: 1825780 - RNA, 19 nt, Homo sapiens
  misc_RNA (1)...(19): siRNA sense strand
aaacucaacuccacuuaaa

SEQ ID NO: 1825781 - RNA, 19 nt, Homo sapiens
  misc_RNA (1)...(19): siRNA sense strand
gcagaaacgucgccaggaa

SEQ ID NO: 1825782 - RNA, 19 nt, Homo sapiens
  misc_RNA (1)...(19): siRNA sense strand
uaacaagguuuacugcaaa

SEQ ID NO: 1825783 - RNA, 19 nt, Homo sapiens
  misc_RNA (1)...(19): siRNA sense strand
ugaaauaauuggacuguga

SEQ ID NO: 1825784 - RNA, 19 nt, Homo sapiens
  misc_RNA (1)...(19): siRNA sense strand
caaaguggcucaagcuugu

SEQ ID NO: 1825785 - RNA, 19 nt, Homo sapiens
  misc_RNA (1)...(19): siRNA sense strand
cacauaaucucaugaagaa

SEQ ID NO: 1825786 - RNA, 19 nt, Homo sapiens
  misc_RNA (1)...(19): siRNA sense strand
gaacagcugcgccaagaaa

SEQ ID NO: 1825787 - RNA, 19 nt, Homo sapiens
  misc_RNA (1)...(19): siRNA sense strand
caacgaauuccuccuauuu

SEQ ID NO: 1825788 - RNA, 19 nt, Homo sapiens
  misc_RNA (1)...(19): siRNA sense strand
gcaaaggucacgaaacuga

SEQ ID NO: 1825789 - RNA, 19 nt, Homo sapiens
  misc_RNA (1)...(19): siRNA sense strand
aagaauagguuuagcuuug

SEQ ID NO: 1825790 - RNA, 19 nt, Homo sapiens
  misc_RNA (1)...(19): siRNA sense strand
guaaugggcgugucgauuu

SEQ ID NO: 1825791 - RNA, 19 nt, Homo sapiens
  misc_RNA (1)...(19): siRNA sense strand
aaacagcauuucauccuuu

SEQ ID NO: 1825792 - RNA, 19 nt, Homo sapiens
  misc_RNA (1)...(19): siRNA sense strand
gaacagcugcuccaggaaa

SEQ ID NO: 1825793 - RNA, 19 nt, Homo sapiens
  misc_RNA (1)...(19): siRNA sense strand
gaacagcugcuccaggaaa

SEQ ID NO: 1825794 - RNA, 19 nt, Homo sapiens
  misc_RNA (1)...(19): siRNA sense strand
gaacagcugcuccaggaaa

SEQ ID NO: 1825795 - RNA, 19 nt, Homo sapiens
  misc_RNA (1)...(19): siRNA sense strand
gaagagaaggcgccaagaa

SEQ ID NO: 1825796 - RNA, 19 nt, Homo sapiens
  misc_RNA (1)...(19): siRNA sense strand
gcagagagaaugaacaguu

SEQ ID NO: 1825797 - RNA, 19 nt, Homo sapiens
  misc_RNA (1)...(19): siRNA sense strand
aaacaucugucuuacucua

SEQ ID NO: 1825798 - RNA, 19 nt, Homo sapiens
  misc_RNA (1)...(19): siRNA sense strand
gauguggugugcauuuaaa

SEQ ID NO: 1825799 - RNA, 19 nt, Homo sapiens
  misc_RNA (1)...(19): siRNA sense strand
gaagagucgucgugaggaa

SEQ ID NO: 1825800 - RNA, 19 nt, Homo sapiens
  misc_RNA (1)...(19): siRNA sense strand
ggagcagcauuaacuaaga

SEQ ID NO: 1825801 - RNA, 19 nt, Homo sapiens
  misc_RNA (1)...(19): siRNA sense strand
ugaagaaccuccuugaaag

SEQ ID NO: 1825802 - RNA, 19 nt, Homo sapiens
  misc_RNA (1)...(19): siRNA sense strand
gagcagcauuaacuaagaa

SEQ ID NO: 1825803 - RNA, 19 nt, Homo sapiens
  misc_RNA (1)...(19): siRNA sense strand
ggagcagcauuaacuaaga

SEQ ID NO: 1825804 - RNA, 19 nt, Homo sapiens
  misc_RNA (1)...(19): siRNA sense strand
ugaagaaccuccuugaaag

SEQ ID NO: 1825805 - RNA, 19 nt, Homo sapiens
  misc_RNA (1)...(19): siRNA sense strand
gagcagcauuaacuaagaa

SEQ ID NO: 1825806 - RNA, 19 nt, Homo sapiens
  misc_RNA (1)...(19): siRNA sense strand
gaaaggagagccuguuaca

SEQ ID NO: 1825807 - RNA, 19 nt, Homo sapiens
  misc_RNA (1)...(19): siRNA sense strand
uagcacaaauuccagguaa

SEQ ID NO: 1825808 - RNA, 19 nt, Homo sapiens
  misc_RNA (1)...(19): siRNA sense strand
ggaaagagaagagaagaga

SEQ ID NO: 1825809 - RNA, 19 nt, Homo sapiens
  misc_RNA (1)...(19): siRNA sense strand
gagaaacacuggguaccaa

SEQ ID NO: 1825810 - RNA, 19 nt, Homo sapiens
  misc_RNA (1)...(19): siRNA sense strand
gaaaguaucgcugggaaga

SEQ ID NO: 1825811 - RNA, 19 nt, Homo sapiens
  misc_RNA (1)...(19): siRNA sense strand
caguaugucucucaugauu

SEQ ID NO: 1825812 - RNA, 19 nt, Homo sapiens
  misc_RNA (1)...(19): siRNA sense strand
aauaagagaucacauagag

SEQ ID NO: 1825813 - RNA, 19 nt, Homo sapiens
  misc_RNA (1)...(19): siRNA sense strand
gaauagguuuagcuuugaa

SEQ ID NO: 1825814 - RNA, 19 nt, Homo sapiens
  misc_RNA (1)...(19): siRNA sense strand
caguaugucucucaugauu

SEQ ID NO: 1825815 - RNA, 19 nt, Homo sapiens
  misc_RNA (1)...(19): siRNA sense strand
acagacaacuggaagaaga

SEQ ID NO: 1825816 - RNA, 19 nt, Homo sapiens
  misc_RNA (1)...(19): siRNA sense strand
gccaagagcgugacagaaa

SEQ ID NO: 1825817 - RNA, 19 nt, Homo sapiens
  misc_RNA (1)...(19): siRNA sense strand
gccaagagcgugacagaaa

SEQ ID NO: 1825818 - RNA, 19 nt, Homo sapiens
  misc_RNA (1)...(19): siRNA sense strand
gccaagagcgugacagaaa

SEQ ID NO: 1825819 - RNA, 19 nt, Homo sapiens
  misc_RNA (1)...(19): siRNA sense strand
gccaagagcgugacagaaa

SEQ ID NO: 1825820 - RNA, 19 nt, Homo sapiens
  misc_RNA (1)...(19): siRNA sense strand
gccaagagcgugacagaaa

SEQ ID NO: 1825821 - RNA, 19 nt, Homo sapiens
  misc_RNA (1)...(19): siRNA sense strand
gccaagagcgugacagaaa

SEQ ID NO: 1825822 - RNA, 19 nt, Homo sapiens
  misc_RNA (1)...(19): siRNA sense strand
gccaagagcgugacagaaa

SEQ ID NO: 1825823 - RNA, 19 nt, Homo sapiens
  misc_RNA (1)...(19): siRNA sense strand
gaaggaagaagagaaguug

SEQ ID NO: 1825824 - RNA, 19 nt, Homo sapiens
  misc_RNA (1)...(19): siRNA sense strand
gaagagcagcugcagaguu

SEQ ID NO: 1825825 - RNA, 19 nt, Homo sapiens
  misc_RNA (1)...(19): siRNA sense strand
gcagauguggugugcauuu

SEQ ID NO: 1825826 - RNA, 19 nt, Homo sapiens
  misc_RNA (1)...(19): siRNA sense strand
caagaacuauggcaagaag

SEQ ID NO: 1825827 - RNA, 19 nt, Homo sapiens
  misc_RNA (1)...(19): siRNA sense strand
aagagcagcugcagaguug

SEQ ID NO: 1825828 - RNA, 19 nt, Homo sapiens
  misc_RNA (1)...(19): siRNA sense strand
gcaaaggcagagagaauga

SEQ ID NO: 1825829 - RNA, 19 nt, Homo sapiens
  misc_RNA (1)...(19): siRNA sense strand
gaaauaauuggacugugaa

SEQ ID NO: 1825830 - RNA, 19 nt, Homo sapiens
  misc_RNA (1)...(19): siRNA sense strand
gccaauaagagaucacaua

SEQ ID NO: 1825831 - RNA, 19 nt, Homo sapiens
  misc_RNA (1)...(19): siRNA sense strand
gcaagaagaggagcagaaa

SEQ ID NO: 1825832 - RNA, 19 nt, Homo sapiens
  misc_RNA (1)...(19): siRNA sense strand
agagagagaucgugagcaa

SEQ ID NO: 1825833 - RNA, 19 nt, Homo sapiens
  misc_RNA (1)...(19): siRNA sense strand
guaugucucucaugauugu

SEQ ID NO: 1825834 - RNA, 19 nt, Homo sapiens
  misc_RNA (1)...(19): siRNA sense strand
cagauguggugugcauuua

SEQ ID NO: 1825835 - RNA, 19 nt, Homo sapiens
  misc_RNA (1)...(19): siRNA sense strand
gagcagagaucucaauacc

SEQ ID NO: 1825836 - RNA, 19 nt, Homo sapiens
  misc_RNA (1)...(19): siRNA sense strand
guaugucucucaugauugu

SEQ ID NO: 1825837 - RNA, 19 nt, Homo sapiens
  misc_RNA (1)...(19): siRNA sense strand
gaagaagaccaaaggagau

SEQ ID NO: 1825838 - RNA, 19 nt, Homo sapiens
  misc_RNA (1)...(19): siRNA sense strand
caacuccacuuaaacacau

SEQ ID NO: 1825839 - RNA, 19 nt, Homo sapiens
  misc_RNA (1)...(19): siRNA sense strand
agugauaacucagauguuu

SEQ ID NO: 1825840 - RNA, 19 nt, Homo sapiens
  misc_RNA (1)...(19): siRNA sense strand
ggacagacaacuggaagaa

SEQ ID NO: 1825841 - RNA, 19 nt, Homo sapiens
  misc_RNA (1)...(19): siRNA sense strand
gaggagcuguggcggcaaa

SEQ ID NO: 1825842 - RNA, 19 nt, Homo sapiens
  misc_RNA (1)...(19): siRNA sense strand
caaacagcauuucauccuu

SEQ ID NO: 1825843 - RNA, 19 nt, Homo sapiens
  misc_RNA (1)...(19): siRNA sense strand
caauaccgcccuuaaguga

SEQ ID NO: 1825844 - RNA, 19 nt, Homo sapiens
  misc_RNA (1)...(19): siRNA sense strand
aagaggaacugcuccauca

SEQ ID NO: 1825845 - RNA, 19 nt, Homo sapiens
  misc_RNA (1)...(19): siRNA sense strand
gaaaaugcaguucgugaua

SEQ ID NO: 1825846 - RNA, 19 nt, Homo sapiens
  misc_RNA (1)...(19): siRNA sense strand
ggagcaaagugagaaacaa

SEQ ID NO: 1825847 - RNA, 19 nt, Homo sapiens
  misc_RNA (1)...(19): siRNA sense strand
gccaagaacgcuacagaaa

SEQ ID NO: 1825848 - RNA, 19 nt, Homo sapiens
  misc_RNA (1)...(19): siRNA sense strand
ggaaggaagaagagaaguu

SEQ ID NO: 1825849 - RNA, 19 nt, Homo sapiens
  misc_RNA (1)...(19): siRNA sense strand
ggcucaagcuuguuacuau

SEQ ID NO: 1825850 - RNA, 19 nt, Homo sapiens
  misc_RNA (1)...(19): siRNA sense strand
cauuugaggccuauugaua

SEQ ID NO: 1825851 - RNA, 19 nt, Homo sapiens
  misc_RNA (1)...(19): siRNA sense strand
gaacauaggggcaaauuuc

SEQ ID NO: 1825852 - RNA, 19 nt, Homo sapiens
  misc_RNA (1)...(19): siRNA sense strand
cccauaaacaucugucuua

SEQ ID NO: 1825853 - RNA, 19 nt, Homo sapiens
  misc_RNA (1)...(19): siRNA sense strand
gcagauacuuuuaauguuc

SEQ ID NO: 1825854 - RNA, 19 nt, Homo sapiens
  misc_RNA (1)...(19): siRNA sense strand
gaaguaacaagaguaauag

SEQ ID NO: 1825855 - RNA, 19 nt, Homo sapiens
  misc_RNA (1)...(19): siRNA sense strand
ggaacgggaaaggaaauua

SEQ ID NO: 1825856 - RNA, 19 nt, Homo sapiens
  misc_RNA (1)...(19): siRNA sense strand
gacaauaccgcgaggaaga

SEQ ID NO: 1825857 - RNA, 19 nt, Homo sapiens
  misc_RNA (1)...(19): siRNA sense strand
caacgacgcaggcagaaga

SEQ ID NO: 1825858 - RNA, 19 nt, Homo sapiens
  misc_RNA (1)...(19): siRNA sense strand
gaggagcgagcaacaacua

SEQ ID NO: 1825859 - RNA, 19 nt, Homo sapiens
  misc_RNA (1)...(19): siRNA sense strand
caaugggucgguuuguuua

SEQ ID NO: 1825860 - RNA, 19 nt, Homo sapiens
  misc_RNA (1)...(19): siRNA sense strand
agaaagaccugaagaaccu

SEQ ID NO: 1825861 - RNA, 19 nt, Homo sapiens
  misc_RNA (1)...(19): siRNA sense strand
gcccauuacuggaagaaau

SEQ ID NO: 1825862 - RNA, 19 nt, Homo sapiens
  misc_RNA (1)...(19): siRNA sense strand
aaauggagguggcaacuag

SEQ ID NO: 1825863 - RNA, 19 nt, Homo sapiens
  misc_RNA (1)...(19): siRNA sense strand
agaaagaccugaagaaccu

SEQ ID NO: 1825864 - RNA, 19 nt, Homo sapiens
  misc_RNA (1)...(19): siRNA sense strand
ggagaccacaugacccuaa

SEQ ID NO: 1825865 - RNA, 19 nt, Homo sapiens
  misc_RNA (1)...(19): siRNA sense strand
gcucaagcuuguuacuaug

SEQ ID NO: 1825866 - RNA, 19 nt, Homo sapiens
  misc_RNA (1)...(19): siRNA sense strand
gguuuagcuuugaagauuu

SEQ ID NO: 1825867 - RNA, 19 nt, Homo sapiens
  misc_RNA (1)...(19): siRNA sense strand
uuauaacccuugaauagug

SEQ ID NO: 1825868 - RNA, 19 nt, Homo sapiens
  misc_RNA (1)...(19): siRNA sense strand
gcgaggaacgggagagaaa

SEQ ID NO: 1825869 - RNA, 19 nt, Homo sapiens
  misc_RNA (1)...(19): siRNA sense strand
agaaagagcugcaguuccu

SEQ ID NO: 1825870 - RNA, 19 nt, Homo sapiens
  misc_RNA (1)...(19): siRNA sense strand
gaagagcagcagcagcaaa

SEQ ID NO: 1825871 - RNA, 19 nt, Homo sapiens
  misc_RNA (1)...(19): siRNA sense strand
gagaggaaccggagaagag

SEQ ID NO: 1825872 - RNA, 19 nt, Homo sapiens
  misc_RNA (1)...(19): siRNA sense strand
ccagcccucucuaugagua

SEQ ID NO: 1825873 - RNA, 19 nt, Homo sapiens
  misc_RNA (1)...(19): siRNA sense strand
gccaggagcgucacagaaa

SEQ ID NO: 1825874 - RNA, 19 nt, Homo sapiens
  misc_RNA (1)...(19): siRNA sense strand
cugaagaaccuccuugaaa

SEQ ID NO: 1825875 - RNA, 19 nt, Homo sapiens
  misc_RNA (1)...(19): siRNA sense strand
acuacaagcuucacaauau

SEQ ID NO: 1825876 - RNA, 19 nt, Homo sapiens
  misc_RNA (1)...(19): siRNA sense strand
gagaaagagugccucaagu

SEQ ID NO: 1825877 - RNA, 19 nt, Homo sapiens
  misc_RNA (1)...(19): siRNA sense strand
cuacaagcuucacaauauu

SEQ ID NO: 1825878 - RNA, 19 nt, Homo sapiens
  misc_RNA (1)...(19): siRNA sense strand
ccaagaacagcucguuuaa

SEQ ID NO: 1825879 - RNA, 19 nt, Homo sapiens
  misc_RNA (1)...(19): siRNA sense strand
agaaagagugccucaagua

SEQ ID NO: 1825880 - RNA, 19 nt, Homo sapiens
  misc_RNA (1)...(19): siRNA sense strand
guacagcuccggacucuuc

SEQ ID NO: 1825881 - RNA, 19 nt, Homo sapiens
  misc_RNA (1)...(19): siRNA sense strand
gaaggcauccagaccagaa

SEQ ID NO: 1825882 - RNA, 19 nt, Homo sapiens
  misc_RNA (1)...(19): siRNA sense strand
gaaagagugccucaaguac

SEQ ID NO: 1825883 - RNA, 19 nt, Homo sapiens
  misc_RNA (1)...(19): siRNA sense strand
ccugugggcucuacuacaa

SEQ ID NO: 1825884 - RNA, 19 nt, Homo sapiens
  misc_RNA (1)...(19): siRNA sense strand
cccaagaacagcucguuua

SEQ ID NO: 1825885 - RNA, 19 nt, Homo sapiens
  misc_RNA (1)...(19): siRNA sense strand
gcccgcaccucuucaccuu

SEQ ID NO: 1825886 - RNA, 19 nt, Homo sapiens
  misc_RNA (1)...(19): siRNA sense strand
aagaacagcucguuuaacc

SEQ ID NO: 1825887 - RNA, 19 nt, Homo sapiens
  misc_RNA (1)...(19): siRNA sense strand
cgagaaagagugccucaag

SEQ ID NO: 1825888 - RNA, 19 nt, Homo sapiens
  misc_RNA (1)...(19): siRNA sense strand
ggaggaggaaugccaaugg

SEQ ID NO: 1825889 - RNA, 19 nt, Homo sapiens
  misc_RNA (1)...(19): siRNA sense strand
gcagggagugugugaacug

SEQ ID NO: 1825890 - RNA, 19 nt, Homo sapiens
  misc_RNA (1)...(19): siRNA sense strand
cauccagccuguccuuugg

SEQ ID NO: 1825891 - RNA, 19 nt, Homo sapiens
  misc_RNA (1)...(19): siRNA sense strand
aagagugccucaaguacca

SEQ ID NO: 1825892 - RNA, 19 nt, Homo sapiens
  misc_RNA (1)...(19): siRNA sense strand
ccugcgggcucuaucacaa

SEQ ID NO: 1825893 - RNA, 19 nt, Homo sapiens
  misc_RNA (1)...(19): siRNA sense strand
gagauggcacgggacacua

SEQ ID NO: 1825894 - RNA, 19 nt, Homo sapiens
  misc_RNA (1)...(19): siRNA sense strand
uacuacaagcuucacaaua

SEQ ID NO: 1825895 - RNA, 19 nt, Homo sapiens
  misc_RNA (1)...(19): siRNA sense strand
gcuucacaauauuaacaga

SEQ ID NO: 1825896 - RNA, 19 nt, Homo sapiens
  misc_RNA (1)...(19): siRNA sense strand
ggaggagguggaugugcuu

SEQ ID NO: 1825897 - RNA, 19 nt, Homo sapiens
  misc_RNA (1)...(19): siRNA sense strand
ccauccagccuguccuuug

SEQ ID NO: 1825898 - RNA, 19 nt, Homo sapiens
  misc_RNA (1)...(19): siRNA sense strand
ccucagccacuccuacaug

SEQ ID NO: 1825899 - RNA, 19 nt, Homo sapiens
  misc_RNA (1)...(19): siRNA sense strand
cuacuacaagcuucacaau

SEQ ID NO: 1825900 - RNA, 19 nt, Homo sapiens
  misc_RNA (1)...(19): siRNA sense strand
agccacaucucgcccuuca

SEQ ID NO: 1825901 - RNA, 19 nt, Homo sapiens
  misc_RNA (1)...(19): siRNA sense strand
gcaaagugcucuacaguau

SEQ ID NO: 1825902 - RNA, 19 nt, Homo sapiens
  misc_RNA (1)...(19): siRNA sense strand
gaacuuggcuacuguacaa

SEQ ID NO: 1825903 - RNA, 19 nt, Homo sapiens
  misc_RNA (1)...(19): siRNA sense strand
ccaaaggucuccuauguaa

SEQ ID NO: 1825904 - RNA, 19 nt, Homo sapiens
  misc_RNA (1)...(19): siRNA sense strand
gaaaccagauuuguucuuu

SEQ ID NO: 1825905 - RNA, 19 nt, Homo sapiens
  misc_RNA (1)...(19): siRNA sense strand
ugaaugaccugauauuuga

SEQ ID NO: 1825906 - RNA, 19 nt, Homo sapiens
  misc_RNA (1)...(19): siRNA sense strand
cuacaacacuggaaaguuu

SEQ ID NO: 1825907 - RNA, 19 nt, Homo sapiens
  misc_RNA (1)...(19): siRNA sense strand
gcaagaaucaggccaaauu

SEQ ID NO: 1825908 - RNA, 19 nt, Homo sapiens
  misc_RNA (1)...(19): siRNA sense strand
caaugcagcuggagaguuu

SEQ ID NO: 1825909 - RNA, 19 nt, Homo sapiens
  misc_RNA (1)...(19): siRNA sense strand
gagaugcuaucaagaagaa

SEQ ID NO: 1825910 - RNA, 19 nt, Homo sapiens
  misc_RNA (1)...(19): siRNA sense strand
gaaggaacuuggcuacugu

SEQ ID NO: 1825911 - RNA, 19 nt, Homo sapiens
  misc_RNA (1)...(19): siRNA sense strand
ggaaggacaucaggauaug

SEQ ID NO: 1825912 - RNA, 19 nt, Homo sapiens
  misc_RNA (1)...(19): siRNA sense strand
gacagaagaggcagaauaa

SEQ ID NO: 1825913 - RNA, 19 nt, Homo sapiens
  misc_RNA (1)...(19): siRNA sense strand
gggcaucaccacagucuua

SEQ ID NO: 1825914 - RNA, 19 nt, Homo sapiens
  misc_RNA (1)...(19): siRNA sense strand
agacaacaguggaaugauu

SEQ ID NO: 1825915 - RNA, 19 nt, Homo sapiens
  misc_RNA (1)...(19): siRNA sense strand
gaagauguccacaagaaau

SEQ ID NO: 1825916 - RNA, 19 nt, Homo sapiens
  misc_RNA (1)...(19): siRNA sense strand
ccauuggccuuccucauuu

SEQ ID NO: 1825917 - RNA, 19 nt, Homo sapiens
  misc_RNA (1)...(19): siRNA sense strand
gcaugaagauguccacaag

SEQ ID NO: 1825918 - RNA, 19 nt, Homo sapiens
  misc_RNA (1)...(19): siRNA sense strand
cacgaugaaugaccugaua

SEQ ID NO: 1825919 - RNA, 19 nt, Homo sapiens
  misc_RNA (1)...(19): siRNA sense strand
gaauaaggaagaagacguu

SEQ ID NO: 1825920 - RNA, 19 nt, Homo sapiens
  misc_RNA (1)...(19): siRNA sense strand
ggucaaguuucaucuggaa

SEQ ID NO: 1825921 - RNA, 19 nt, Homo sapiens
  misc_RNA (1)...(19): siRNA sense strand
aaagugcucuacaguauca

SEQ ID NO: 1825922 - RNA, 19 nt, Homo sapiens
  misc_RNA (1)...(19): siRNA sense strand
caggacggcuuucugcaaa

SEQ ID NO: 1825923 - RNA, 19 nt, Homo sapiens
  misc_RNA (1)...(19): siRNA sense strand
agacucaccuugaccuuau

SEQ ID NO: 1825924 - RNA, 19 nt, Homo sapiens
  misc_RNA (1)...(19): siRNA sense strand
agacagaagaggcagaaua

SEQ ID NO: 1825925 - RNA, 19 nt, Homo sapiens
  misc_RNA (1)...(19): siRNA sense strand
gaugaaugaccugauauuu

SEQ ID NO: 1825926 - RNA, 19 nt, Homo sapiens
  misc_RNA (1)...(19): siRNA sense strand
ucacagacccuaucuccuu

SEQ ID NO: 1825927 - RNA, 19 nt, Homo sapiens
  misc_RNA (1)...(19): siRNA sense strand
gaaagaagagaaggaacuu

SEQ ID NO: 1825928 - RNA, 19 nt, Homo sapiens
  misc_RNA (1)...(19): siRNA sense strand
caacaaauugcuacggauu

SEQ ID NO: 1825929 - RNA, 19 nt, Homo sapiens
  misc_RNA (1)...(19): siRNA sense strand
ugccaaaggucuccuaugu

SEQ ID NO: 1825930 - RNA, 19 nt, Homo sapiens
  misc_RNA (1)...(19): siRNA sense strand
ugacagccuuguuugcauu

SEQ ID NO: 1825931 - RNA, 19 nt, Homo sapiens
  misc_RNA (1)...(19): siRNA sense strand
caagaaucaggccaaauuu

SEQ ID NO: 1825932 - RNA, 19 nt, Homo sapiens
  misc_RNA (1)...(19): siRNA sense strand
gaagaacuuuccgauggau

SEQ ID NO: 1825933 - RNA, 19 nt, Homo sapiens
  misc_RNA (1)...(19): siRNA sense strand
guacaaagcacuacaacac

SEQ ID NO: 1825934 - RNA, 19 nt, Homo sapiens
  misc_RNA (1)...(19): siRNA sense strand
ccugauauuugagugguua

SEQ ID NO: 1825935 - RNA, 19 nt, Homo sapiens
  misc_RNA (1)...(19): siRNA sense strand
uaaagguccuccaguaaac

SEQ ID NO: 1825936 - RNA, 19 nt, Homo sapiens
  misc_RNA (1)...(19): siRNA sense strand
guccagaccuguacaaugc

SEQ ID NO: 1825937 - RNA, 19 nt, Homo sapiens
  misc_RNA (1)...(19): siRNA sense strand
cagaaacgaccauggacua

SEQ ID NO: 1825938 - RNA, 19 nt, Homo sapiens
  misc_RNA (1)...(19): siRNA sense strand
gggaaggacaucaggauau

SEQ ID NO: 1825939 - RNA, 19 nt, Homo sapiens
  misc_RNA (1)...(19): siRNA sense strand
gaagacagaagaggcagaa

SEQ ID NO: 1825940 - RNA, 19 nt, Homo sapiens
  misc_RNA (1)...(19): siRNA sense strand
gaaaguuuaccugcauuga

SEQ ID NO: 1825941 - RNA, 19 nt, Homo sapiens
  misc_RNA (1)...(19): siRNA sense strand
ugaagaacuuuccgaugga

SEQ ID NO: 1825942 - RNA, 19 nt, Homo sapiens
  misc_RNA (1)...(19): siRNA sense strand
gaagaggcagaauaaggaa

SEQ ID NO: 1825943 - RNA, 19 nt, Homo sapiens
  misc_RNA (1)...(19): siRNA sense strand
augaagauguccacaagaa

SEQ ID NO: 1825944 - RNA, 19 nt, Homo sapiens
  misc_RNA (1)...(19): siRNA sense strand
uuaaagguccuccaguaaa

SEQ ID NO: 1825945 - RNA, 19 nt, Homo sapiens
  misc_RNA (1)...(19): siRNA sense strand
ggcaaagugcucuacagua

SEQ ID NO: 1825946 - RNA, 19 nt, Homo sapiens
  misc_RNA (1)...(19): siRNA sense strand
agaaggaacuuggcuacug

SEQ ID NO: 1825947 - RNA, 19 nt, Homo sapiens
  misc_RNA (1)...(19): siRNA sense strand
ucacagaaacgaccaugga

SEQ ID NO: 1825948 - RNA, 19 nt, Homo sapiens
  misc_RNA (1)...(19): siRNA sense strand
gaagacguuacucgugaaa

SEQ ID NO: 1825949 - RNA, 19 nt, Homo sapiens
  misc_RNA (1)...(19): siRNA sense strand
gccaaaggucuccuaugua

SEQ ID NO: 1825950 - RNA, 19 nt, Homo sapiens
  misc_RNA (1)...(19): siRNA sense strand
aaaccagauuuguucuuug

SEQ ID NO: 1825951 - RNA, 19 nt, Homo sapiens
  misc_RNA (1)...(19): siRNA sense strand
agacguuacucgugaaagu

SEQ ID NO: 1825952 - RNA, 19 nt, Homo sapiens
  misc_RNA (1)...(19): siRNA sense strand
ccauggacuugaagaacuu

SEQ ID NO: 1825953 - RNA, 19 nt, Homo sapiens
  misc_RNA (1)...(19): siRNA sense strand
ggaaaguuuaccugcauug

SEQ ID NO: 1825954 - RNA, 19 nt, Homo sapiens
  misc_RNA (1)...(19): siRNA sense strand
ggaaaccagauuuguucuu

SEQ ID NO: 1825955 - RNA, 19 nt, Homo sapiens
  misc_RNA (1)...(19): siRNA sense strand
agaagaggcagaauaagga

SEQ ID NO: 1825956 - RNA, 19 nt, Homo sapiens
  misc_RNA (1)...(19): siRNA sense strand
gacuaccgagugaauauuu

SEQ ID NO: 1825957 - RNA, 19 nt, Homo sapiens
  misc_RNA (1)...(19): siRNA sense strand
ggagaugcuaucaagaaga

SEQ ID NO: 1825958 - RNA, 19 nt, Homo sapiens
  misc_RNA (1)...(19): siRNA sense strand
ggacuaccgagugaauauu

SEQ ID NO: 1825959 - RNA, 19 nt, Homo sapiens
  misc_RNA (1)...(19): siRNA sense strand
agauggagaugcuaucaag

SEQ ID NO: 1825960 - RNA, 19 nt, Homo sapiens
  misc_RNA (1)...(19): siRNA sense strand
gaaggacaucaggauauga

SEQ ID NO: 1825961 - RNA, 19 nt, Homo sapiens
  misc_RNA (1)...(19): siRNA sense strand
aagauguccacaagaaaua

SEQ ID NO: 1825962 - RNA, 19 nt, Homo sapiens
  misc_RNA (1)...(19): siRNA sense strand
cuucagauuucuuggacaa

SEQ ID NO: 1825963 - RNA, 19 nt, Homo sapiens
  misc_RNA (1)...(19): siRNA sense strand
guuuguguuugcugccuua

SEQ ID NO: 1825964 - RNA, 19 nt, Homo sapiens
  misc_RNA (1)...(19): siRNA sense strand
uaaaagcgauugacaucug

SEQ ID NO: 1825965 - RNA, 19 nt, Homo sapiens
  misc_RNA (1)...(19): siRNA sense strand
agaaucaggccaaauuuua

SEQ ID NO: 1825966 - RNA, 19 nt, Homo sapiens
  misc_RNA (1)...(19): siRNA sense strand
gaacgccaaaugggauauu

SEQ ID NO: 1825967 - RNA, 19 nt, Homo sapiens
  misc_RNA (1)...(19): siRNA sense strand
ugagacaacaguggaauga

SEQ ID NO: 1825968 - RNA, 19 nt, Homo sapiens
  misc_RNA (1)...(19): siRNA sense strand
ggaaaacaaccuucacaga

SEQ ID NO: 1825969 - RNA, 19 nt, Homo sapiens
  misc_RNA (1)...(19): siRNA sense strand
cagaagaggcagaauaagg

SEQ ID NO: 1825970 - RNA, 19 nt, Homo sapiens
  misc_RNA (1)...(19): siRNA sense strand
gauuuguucuuugccaaug

SEQ ID NO: 1825971 - RNA, 19 nt, Homo sapiens
  misc_RNA (1)...(19): siRNA sense strand
gaaucaggccaaauuuuaa

SEQ ID NO: 1825972 - RNA, 19 nt, Homo sapiens
  misc_RNA (1)...(19): siRNA sense strand
gguccuccaguaaacguua

SEQ ID NO: 1825973 - RNA, 19 nt, Homo sapiens
  misc_RNA (1)...(19): siRNA sense strand
cggcagcuagugaacauuu

SEQ ID NO: 1825974 - RNA, 19 nt, Homo sapiens
  misc_RNA (1)...(19): siRNA sense strand
cccauuggccuuccucauu

SEQ ID NO: 1825975 - RNA, 19 nt, Homo sapiens
  misc_RNA (1)...(19): siRNA sense strand
ucaccacagucuuaacgau

SEQ ID NO: 1825976 - RNA, 19 nt, Homo sapiens
  misc_RNA (1)...(19): siRNA sense strand
gcacuacaacacuggaaag

SEQ ID NO: 1825977 - RNA, 19 nt, Homo sapiens
  misc_RNA (1)...(19): siRNA sense strand
cagacucaccuugaccuua

SEQ ID NO: 1825978 - RNA, 19 nt, Homo sapiens
  misc_RNA (1)...(19): siRNA sense strand
cgaugaaugaccugauauu

SEQ ID NO: 1825979 - RNA, 19 nt, Homo sapiens
  misc_RNA (1)...(19): siRNA sense strand
ugaagauguccacaagaaa

SEQ ID NO: 1825980 - RNA, 19 nt, Homo sapiens
  misc_RNA (1)...(19): siRNA sense strand
guaauuuuguccuggguuu

SEQ ID NO: 1825981 - RNA, 19 nt, Homo sapiens
  misc_RNA (1)...(19): siRNA sense strand
caggauaugaugcaagaau

SEQ ID NO: 1825982 - RNA, 19 nt, Homo sapiens
  misc_RNA (1)...(19): siRNA sense strand
cgagcugccuucccauugg

SEQ ID NO: 1825983 - RNA, 19 nt, Homo sapiens
  misc_RNA (1)...(19): siRNA sense strand
agaagacguuacucgugaa

SEQ ID NO: 1825984 - RNA, 19 nt, Homo sapiens
  misc_RNA (1)...(19): siRNA sense strand
caaaggucuccuauguaaa

SEQ ID NO: 1825985 - RNA, 19 nt, Homo sapiens
  misc_RNA (1)...(19): siRNA sense strand
cgccaaaugggauauuauu

SEQ ID NO: 1825986 - RNA, 19 nt, Homo sapiens
  misc_RNA (1)...(19): siRNA sense strand
gaugguccagugcaaguug

SEQ ID NO: 1825987 - RNA, 19 nt, Homo sapiens
  misc_RNA (1)...(19): siRNA sense strand
ucaccacugacaacaaauu

SEQ ID NO: 1825988 - RNA, 19 nt, Homo sapiens
  misc_RNA (1)...(19): siRNA sense strand
ggcagaauaaggaagaaga

SEQ ID NO: 1825989 - RNA, 19 nt, Homo sapiens
  misc_RNA (1)...(19): siRNA sense strand
gaggcagaauaaggaagaa

SEQ ID NO: 1825990 - RNA, 19 nt, Homo sapiens
  misc_RNA (1)...(19): siRNA sense strand
uuuaaagguccuccaguaa

SEQ ID NO: 1825991 - RNA, 19 nt, Homo sapiens
  misc_RNA (1)...(19): siRNA sense strand
augaaugaccugauauuug

SEQ ID NO: 1825992 - RNA, 19 nt, Homo sapiens
  misc_RNA (1)...(19): siRNA sense strand
ccauuuggaaaccagauuu

SEQ ID NO: 1825993 - RNA, 19 nt, Homo sapiens
  misc_RNA (1)...(19): siRNA sense strand
uuuacuggaucacauacaa

SEQ ID NO: 1825994 - RNA, 19 nt, Homo sapiens
  misc_RNA (1)...(19): siRNA sense strand
ccaggcaacacaaggaguu

SEQ ID NO: 1825995 - RNA, 19 nt, Homo sapiens
  misc_RNA (1)...(19): siRNA sense strand
gcggugugccuucuguuug

SEQ ID NO: 1825996 - RNA, 19 nt, Homo sapiens
  misc_RNA (1)...(19): siRNA sense strand
gugccaacuuccacgaugu

SEQ ID NO: 1825997 - RNA, 19 nt, Homo sapiens
  misc_RNA (1)...(19): siRNA sense strand
aaaggucuccuauguaaaa

SEQ ID NO: 1825998 - RNA, 19 nt, Homo sapiens
  misc_RNA (1)...(19): siRNA sense strand
accacagucuuaacgauga

SEQ ID NO: 1825999 - RNA, 19 nt, Homo sapiens
  misc_RNA (1)...(19): siRNA sense strand
aacgccaaaugggauauua

SEQ ID NO: 1826000 - RNA, 19 nt, Homo sapiens
  misc_RNA (1)...(19): siRNA sense strand
uacaacacuggaaaguuua

SEQ ID NO: 1826001 - RNA, 19 nt, Homo sapiens
  misc_RNA (1)...(19): siRNA sense strand
gcaaacaggucugcaauga

SEQ ID NO: 1826002 - RNA, 19 nt, Homo sapiens
  misc_RNA (1)...(19): siRNA sense strand
gcaaugacaucgaugaaug

SEQ ID NO: 1826003 - RNA, 19 nt, Homo sapiens
  misc_RNA (1)...(19): siRNA sense strand
gaacucagauacagauuca

SEQ ID NO: 1826004 - RNA, 19 nt, Homo sapiens
  misc_RNA (1)...(19): siRNA sense strand
gcaggaagaugcugauaau

SEQ ID NO: 1826005 - RNA, 19 nt, Homo sapiens
  misc_RNA (1)...(19): siRNA sense strand
gcacugcacuccauucuag

SEQ ID NO: 1826006 - RNA, 19 nt, Homo sapiens
  misc_RNA (1)...(19): siRNA sense strand
gcauggaaguguacgagua

SEQ ID NO: 1826007 - RNA, 19 nt, Homo sapiens
  misc_RNA (1)...(19): siRNA sense strand
ggaagaugcugauaaugau

SEQ ID NO: 1826008 - RNA, 19 nt, Homo sapiens
  misc_RNA (1)...(19): siRNA sense strand
ggacagaaggcguauuuga

SEQ ID NO: 1826009 - RNA, 19 nt, Homo sapiens
  misc_RNA (1)...(19): siRNA sense strand
gcccacagcugccaaauag

SEQ ID NO: 1826010 - RNA, 19 nt, Homo sapiens
  misc_RNA (1)...(19): siRNA sense strand
gcagggugguguccucuuu

SEQ ID NO: 1826011 - RNA, 19 nt, Homo sapiens
  misc_RNA (1)...(19): siRNA sense strand
aaacaggucugcaaugaca

SEQ ID NO: 1826012 - RNA, 19 nt, Homo sapiens
  misc_RNA (1)...(19): siRNA sense strand
gggaugggaucaagaaugu

SEQ ID NO: 1826013 - RNA, 19 nt, Homo sapiens
  misc_RNA (1)...(19): siRNA sense strand
acaaaguacuggugcgaua

SEQ ID NO: 1826014 - RNA, 19 nt, Homo sapiens
  misc_RNA (1)...(19): siRNA sense strand
gcucccagcuggacucuga

SEQ ID NO: 1826015 - RNA, 19 nt, Homo sapiens
  misc_RNA (1)...(19): siRNA sense strand
gaggaugacuuugacaaug

SEQ ID NO: 1826016 - RNA, 19 nt, Homo sapiens
  misc_RNA (1)...(19): siRNA sense strand
uaauugaccugcugacugu

SEQ ID NO: 1826017 - RNA, 19 nt, Homo sapiens
  misc_RNA (1)...(19): siRNA sense strand
ccacauccaugcucacugu

SEQ ID NO: 1826018 - RNA, 19 nt, Homo sapiens
  misc_RNA (1)...(19): siRNA sense strand
ggacagacccacgaaaugu

SEQ ID NO: 1826019 - RNA, 19 nt, Homo sapiens
  misc_RNA (1)...(19): siRNA sense strand
gagaccaggugaaggaaau

SEQ ID NO: 1826020 - RNA, 19 nt, Homo sapiens
  misc_RNA (1)...(19): siRNA sense strand
ggugaugccugugacaauu

SEQ ID NO: 1826021 - RNA, 19 nt, Homo sapiens
  misc_RNA (1)...(19): siRNA sense strand
caggcuuucucuucaguua

SEQ ID NO: 1826022 - RNA, 19 nt, Homo sapiens
  misc_RNA (1)...(19): siRNA sense strand
caaacugggugaccaacau

SEQ ID NO: 1826023 - RNA, 19 nt, Homo sapiens
  misc_RNA (1)...(19): siRNA sense strand
gauuaggacuggacagaag

SEQ ID NO: 1826024 - RNA, 19 nt, Homo sapiens
  misc_RNA (1)...(19): siRNA sense strand
caacaacaaacacugcaaa

SEQ ID NO: 1826025 - RNA, 19 nt, Homo sapiens
  misc_RNA (1)...(19): siRNA sense strand
gcaauggcguuggugaugu

SEQ ID NO: 1826026 - RNA, 19 nt, Homo sapiens
  misc_RNA (1)...(19): siRNA sense strand
gcuggaggccucuguugua

SEQ ID NO: 1826027 - RNA, 19 nt, Homo sapiens
  misc_RNA (1)...(19): siRNA sense strand
caaacuggguugugcucaa

SEQ ID NO: 1826028 - RNA, 19 nt, Homo sapiens
  misc_RNA (1)...(19): siRNA sense strand
ggaccagugugaugaugau

SEQ ID NO: 1826029 - RNA, 19 nt, Homo sapiens
  misc_RNA (1)...(19): siRNA sense strand
caacaaacacugcaaacag

SEQ ID NO: 1826030 - RNA, 19 nt, Homo sapiens
  misc_RNA (1)...(19): siRNA sense strand
gguccaaucuccaguaucg

SEQ ID NO: 1826031 - RNA, 19 nt, Homo sapiens
  misc_RNA (1)...(19): siRNA sense strand
ggauguguguccugaaagu

SEQ ID NO: 1826032 - RNA, 19 nt, Homo sapiens
  misc_RNA (1)...(19): siRNA sense strand
aaaugucccugauccgaaa

SEQ ID NO: 1826033 - RNA, 19 nt, Homo sapiens
  misc_RNA (1)...(19): siRNA sense strand
ggaugucugugauacuaau

SEQ ID NO: 1826034 - RNA, 19 nt, Homo sapiens
  misc_RNA (1)...(19): siRNA sense strand
gcagaacucagauacagau

SEQ ID NO: 1826035 - RNA, 19 nt, Homo sapiens
  misc_RNA (1)...(19): siRNA sense strand
gagcaauccuacccagaca

SEQ ID NO: 1826036 - RNA, 19 nt, Homo sapiens
  misc_RNA (1)...(19): siRNA sense strand
gaugggaucaagaauguug

SEQ ID NO: 1826037 - RNA, 19 nt, Homo sapiens
  misc_RNA (1)...(19): siRNA sense strand
aggaugacuuugacaauga

SEQ ID NO: 1826038 - RNA, 19 nt, Homo sapiens
  misc_RNA (1)...(19): siRNA sense strand
gcuggacucugauaacgau

SEQ ID NO: 1826039 - RNA, 19 nt, Homo sapiens
  misc_RNA (1)...(19): siRNA sense strand
ugaaggaaaugucccugau

SEQ ID NO: 1826040 - RNA, 19 nt, Homo sapiens
  misc_RNA (1)...(19): siRNA sense strand
gacccuggcuuggcaguug

SEQ ID NO: 1826041 - RNA, 19 nt, Homo sapiens
  misc_RNA (1)...(19): siRNA sense strand
ugauaacgauggacuugga

SEQ ID NO: 1826042 - RNA, 19 nt, Homo sapiens
  misc_RNA (1)...(19): siRNA sense strand
cgacagcugcccugaaaug

SEQ ID NO: 1826043 - RNA, 19 nt, Homo sapiens
  misc_RNA (1)...(19): siRNA sense strand
ucgaugggcuggagauuag

SEQ ID NO: 1826044 - RNA, 19 nt, Homo sapiens
  misc_RNA (1)...(19): siRNA sense strand
gaaggacucagauggcaau

SEQ ID NO: 1826045 - RNA, 19 nt, Homo sapiens
  misc_RNA (1)...(19): siRNA sense strand
gaaggacacagauggcaau

SEQ ID NO: 1826046 - RNA, 19 nt, Homo sapiens
  misc_RNA (1)...(19): siRNA sense strand
cagcagaacucagauacag

SEQ ID NO: 1826047 - RNA, 19 nt, Homo sapiens
  misc_RNA (1)...(19): siRNA sense strand
aggaagaugcugauaauga

SEQ ID NO: 1826048 - RNA, 19 nt, Homo sapiens
  misc_RNA (1)...(19): siRNA sense strand
ggucugcaaugacaucgau

SEQ ID NO: 1826049 - RNA, 19 nt, Homo sapiens
  misc_RNA (1)...(19): siRNA sense strand
cacagugccugaggacuuu

SEQ ID NO: 1826050 - RNA, 19 nt, Homo sapiens
  misc_RNA (1)...(19): siRNA sense strand
uaggcaagaucaacaaagu

SEQ ID NO: 1826051 - RNA, 19 nt, Homo sapiens
  misc_RNA (1)...(19): siRNA sense strand
gaaaucguucagaccauga

SEQ ID NO: 1826052 - RNA, 19 nt, Homo sapiens
  misc_RNA (1)...(19): siRNA sense strand
gucaggaucugcagguaau

SEQ ID NO: 1826053 - RNA, 19 nt, Homo sapiens
  misc_RNA (1)...(19): siRNA sense strand
ggacucugauaacgaugga

SEQ ID NO: 1826054 - RNA, 19 nt, Homo sapiens
  misc_RNA (1)...(19): siRNA sense strand
ugcgacagcugcccugaaa

SEQ ID NO: 1826055 - RNA, 19 nt, Homo sapiens
  misc_RNA (1)...(19): siRNA sense strand
aaacaggacaacugccuuu

SEQ ID NO: 1826056 - RNA, 19 nt, Homo sapiens
  misc_RNA (1)...(19): siRNA sense strand
ccaacacugugggcucuuu

SEQ ID NO: 1826057 - RNA, 19 nt, Homo sapiens
  misc_RNA (1)...(19): siRNA sense strand
caacaaagaccagcagaac

SEQ ID NO: 1826058 - RNA, 19 nt, Homo sapiens
  misc_RNA (1)...(19): siRNA sense strand
ggacaucuaccucuuaucc

SEQ ID NO: 1826059 - RNA, 19 nt, Homo sapiens
  misc_RNA (1)...(19): siRNA sense strand
ggacaauugcccuaaaguc

SEQ ID NO: 1826060 - RNA, 19 nt, Homo sapiens
  misc_RNA (1)...(19): siRNA sense strand
ccaacguucccaacaauga

SEQ ID NO: 1826061 - RNA, 19 nt, Homo sapiens
  misc_RNA (1)...(19): siRNA sense strand
caguaucgaugcaaugaca

SEQ ID NO: 1826062 - RNA, 19 nt, Homo sapiens
  misc_RNA (1)...(19): siRNA sense strand
gcaauccuacccagacaga

SEQ ID NO: 1826063 - RNA, 19 nt, Homo sapiens
  misc_RNA (1)...(19): siRNA sense strand
gagauuaggacuggacaga

SEQ ID NO: 1826064 - RNA, 19 nt, Homo sapiens
  misc_RNA (1)...(19): siRNA sense strand
ucaaggcagugacaucagu

SEQ ID NO: 1826065 - RNA, 19 nt, Homo sapiens
  misc_RNA (1)...(19): siRNA sense strand
ggaugacuuugacaaugau

SEQ ID NO: 1826066 - RNA, 19 nt, Homo sapiens
  misc_RNA (1)...(19): siRNA sense strand
gaagaugcugauaaugaug

SEQ ID NO: 1826067 - RNA, 19 nt, Homo sapiens
  misc_RNA (1)...(19): siRNA sense strand
ggcaggaagaugcugauaa

SEQ ID NO: 1826068 - RNA, 19 nt, Homo sapiens
  misc_RNA (1)...(19): siRNA sense strand
caugcucacugucucuuug

SEQ ID NO: 1826069 - RNA, 19 nt, Homo sapiens
  misc_RNA (1)...(19): siRNA sense strand
ggagcugcgggaugauaua

SEQ ID NO: 1826070 - RNA, 19 nt, Homo sapiens
  misc_RNA (1)...(19): siRNA sense strand
gcgggaggauggcaaaguc

SEQ ID NO: 1826071 - RNA, 19 nt, Homo sapiens
  misc_RNA (1)...(19): siRNA sense strand
ccaaucagaaggacucaga

SEQ ID NO: 1826072 - RNA, 19 nt, Homo sapiens
  misc_RNA (1)...(19): siRNA sense strand
gaccagcagaacucagaua

SEQ ID NO: 1826073 - RNA, 19 nt, Homo sapiens
  misc_RNA (1)...(19): siRNA sense strand
gcaacgauggcaacaaugg

SEQ ID NO: 1826074 - RNA, 19 nt, Homo sapiens
  misc_RNA (1)...(19): siRNA sense strand
gaaggaaaugucccugauc

SEQ ID NO: 1826075 - RNA, 19 nt, Homo sapiens
  misc_RNA (1)...(19): siRNA sense strand
gagugaguguccauuccaa

SEQ ID NO: 1826076 - RNA, 19 nt, Homo sapiens
  misc_RNA (1)...(19): siRNA sense strand
ucagauacagauucauuug

SEQ ID NO: 1826077 - RNA, 19 nt, Homo sapiens
  misc_RNA (1)...(19): siRNA sense strand
ggacaacugccggcuguuc

SEQ ID NO: 1826078 - RNA, 19 nt, Homo sapiens
  misc_RNA (1)...(19): siRNA sense strand
ggacugacacagacaucga

SEQ ID NO: 1826079 - RNA, 19 nt, Homo sapiens
  misc_RNA (1)...(19): siRNA sense strand
caauggcguuggugaugug

SEQ ID NO: 1826080 - RNA, 19 nt, Homo sapiens
  misc_RNA (1)...(19): siRNA sense strand
gcauggacaacaacaaaca

SEQ ID NO: 1826081 - RNA, 19 nt, Homo sapiens
  misc_RNA (1)...(19): siRNA sense strand
gcccugcccuacaucucua

SEQ ID NO: 1826082 - RNA, 19 nt, Homo sapiens
  misc_RNA (1)...(19): siRNA sense strand
gcucaaggcagugacauca

SEQ ID NO: 1826083 - RNA, 19 nt, Homo sapiens
  misc_RNA (1)...(19): siRNA sense strand
gauacacggccuucaaugg

SEQ ID NO: 1826084 - RNA, 19 nt, Homo sapiens
  misc_RNA (1)...(19): siRNA sense strand
ccaacccacuacagacaga

SEQ ID NO: 1826085 - RNA, 19 nt, Homo sapiens
  misc_RNA (1)...(19): siRNA sense strand
gggaaggagaugccuguga

SEQ ID NO: 1826086 - RNA, 19 nt, Homo sapiens
  misc_RNA (1)...(19): siRNA sense strand
gcaacaaugguggcuguga

SEQ ID NO: 1826087 - RNA, 19 nt, Homo sapiens
  misc_RNA (1)...(19): siRNA sense strand
gcugcgggaugauauacga

SEQ ID NO: 1826088 - RNA, 19 nt, Homo sapiens
  misc_RNA (1)...(19): siRNA sense strand
gacagaaggcguauuugag

SEQ ID NO: 1826089 - RNA, 19 nt, Homo sapiens
  misc_RNA (1)...(19): siRNA sense strand
cuucaaugguguggacuuu

SEQ ID NO: 1826090 - RNA, 19 nt, Homo sapiens
  misc_RNA (1)...(19): siRNA sense strand
cuggauguguguccugaaa

SEQ ID NO: 1826091 - RNA, 19 nt, Homo sapiens
  misc_RNA (1)...(19): siRNA sense strand
agauacagauucauuuggu

SEQ ID NO: 1826092 - RNA, 19 nt, Homo sapiens
  misc_RNA (1)...(19): siRNA sense strand
caggacaacugccuuuuga

SEQ ID NO: 1826093 - RNA, 19 nt, Homo sapiens
  misc_RNA (1)...(19): siRNA sense strand
caagaucaacaaaguacug

SEQ ID NO: 1826094 - RNA, 19 nt, Homo sapiens
  misc_RNA (1)...(19): siRNA sense strand
caaacuccaucugcaccaa

SEQ ID NO: 1826095 - RNA, 19 nt, Homo sapiens
  misc_RNA (1)...(19): siRNA sense strand
gauccgaaacaccauuaug

SEQ ID NO: 1826096 - RNA, 19 nt, Homo sapiens
  misc_RNA (1)...(19): siRNA sense strand
ucacccaacucacccucuu

SEQ ID NO: 1826097 - RNA, 19 nt, Homo sapiens
  misc_RNA (1)...(19): siRNA sense strand
cgauaacugccgccuggua

SEQ ID NO: 1826098 - RNA, 19 nt, Homo sapiens
  misc_RNA (1)...(19): siRNA sense strand
cuacgcaggcuuucucuuc

SEQ ID NO: 1826099 - RNA, 19 nt, Homo sapiens
  misc_RNA (1)...(19): siRNA sense strand
ggcuuucucuucaguuauc

SEQ ID NO: 1826100 - RNA, 19 nt, Homo sapiens
  misc_RNA (1)...(19): siRNA sense strand
gccucaaguuggcuacauu

SEQ ID NO: 1826101 - RNA, 19 nt, Homo sapiens
  misc_RNA (1)...(19): siRNA sense strand
cauaaauucucgugaacua

SEQ ID NO: 1826102 - RNA, 19 nt, Homo sapiens
  misc_RNA (1)...(19): siRNA sense strand
caacugcacauuuguauau

SEQ ID NO: 1826103 - RNA, 19 nt, Homo sapiens
  misc_RNA (1)...(19): siRNA sense strand
guaauagcaugguuugcaa

SEQ ID NO: 1826104 - RNA, 19 nt, Homo sapiens
  misc_RNA (1)...(19): siRNA sense strand
cauguuacccgaugaagua

SEQ ID NO: 1826105 - RNA, 19 nt, Homo sapiens
  misc_RNA (1)...(19): siRNA sense strand
ggacuuacaguuugagaug

SEQ ID NO: 1826106 - RNA, 19 nt, Homo sapiens
  misc_RNA (1)...(19): siRNA sense strand
ucaguggacuuacaguuug

SEQ ID NO: 1826107 - RNA, 19 nt, Homo sapiens
  misc_RNA (1)...(19): siRNA sense strand
gacaaucuccauucgcaua

SEQ ID NO: 1826108 - RNA, 19 nt, Homo sapiens
  misc_RNA (1)...(19): siRNA sense strand
ucgcauaaauucucgugaa

SEQ ID NO: 1826109 - RNA, 19 nt, Homo sapiens
  misc_RNA (1)...(19): siRNA sense strand
gcaggaggaccuacuaauc

SEQ ID NO: 1826110 - RNA, 19 nt, Homo sapiens
  misc_RNA (1)...(19): siRNA sense strand
guacaaacaacugcacauu

SEQ ID NO: 1826111 - RNA, 19 nt, Homo sapiens
  misc_RNA (1)...(19): siRNA sense strand
cuucaacugucccaacauu

SEQ ID NO: 1826112 - RNA, 19 nt, Homo sapiens
  misc_RNA (1)...(19): siRNA sense strand
cucgugaacuacuuguuua

SEQ ID NO: 1826113 - RNA, 19 nt, Homo sapiens
  misc_RNA (1)...(19): siRNA sense strand
uggguuuguuguuguaaua

SEQ ID NO: 1826114 - RNA, 19 nt, Homo sapiens
  misc_RNA (1)...(19): siRNA sense strand
ggacauguuacccgaugaa

SEQ ID NO: 1826115 - RNA, 19 nt, Homo sapiens
  misc_RNA (1)...(19): siRNA sense strand
uacaaacaacugcacauuu

SEQ ID NO: 1826116 - RNA, 19 nt, Homo sapiens
  misc_RNA (1)...(19): siRNA sense strand
uaagaacuguacaaacaac

SEQ ID NO: 1826117 - RNA, 19 nt, Homo sapiens
  misc_RNA (1)...(19): siRNA sense strand
cauaaaugacuucaacugu

SEQ ID NO: 1826118 - RNA, 19 nt, Homo sapiens
  misc_RNA (1)...(19): siRNA sense strand
cuacuggguuuguuguugu

SEQ ID NO: 1826119 - RNA, 19 nt, Homo sapiens
  misc_RNA (1)...(19): siRNA sense strand
caacugucccaacauuaga

SEQ ID NO: 1826120 - RNA, 19 nt, Homo sapiens
  misc_RNA (1)...(19): siRNA sense strand
ggaccuacuaaucuugaaa

SEQ ID NO: 1826121 - RNA, 19 nt, Homo sapiens
  misc_RNA (1)...(19): siRNA sense strand
gacuucaacugucccaaca

SEQ ID NO: 1826122 - RNA, 19 nt, Homo sapiens
  misc_RNA (1)...(19): siRNA sense strand
gaggaccuacuaaucuuga

SEQ ID NO: 1826123 - RNA, 19 nt, Homo sapiens
  misc_RNA (1)...(19): siRNA sense strand
aaacuaauagcuucuacug

SEQ ID NO: 1826124 - RNA, 19 nt, Homo sapiens
  misc_RNA (1)...(19): siRNA sense strand
caaucuccauucgcauaaa

SEQ ID NO: 1826125 - RNA, 19 nt, Homo sapiens
  misc_RNA (1)...(19): siRNA sense strand
ggaggaccuacuaaucuug

SEQ ID NO: 1826126 - RNA, 19 nt, Homo sapiens
  misc_RNA (1)...(19): siRNA sense strand
caggaggaccuacuaaucu

SEQ ID NO: 1826127 - RNA, 19 nt, Homo sapiens
  misc_RNA (1)...(19): siRNA sense strand
auuaggcgcuguaugacaa

SEQ ID NO: 1826128 - RNA, 19 nt, Homo sapiens
  misc_RNA (1)...(19): siRNA sense strand
aggaggaccuacuaaucuu

SEQ ID NO: 1826129 - RNA, 19 nt, Homo sapiens
  misc_RNA (1)...(19): siRNA sense strand
ccucuuugccuuacuccua

SEQ ID NO: 1826130 - RNA, 19 nt, Homo sapiens
  misc_RNA (1)...(19): siRNA sense strand
ucucgugaacuacuuguuu

SEQ ID NO: 1826131 - RNA, 19 nt, Homo sapiens
  misc_RNA (1)...(19): siRNA sense strand
uaucauauuaggcgcugua

SEQ ID NO: 1826132 - RNA, 19 nt, Homo sapiens
  misc_RNA (1)...(19): siRNA sense strand
ucaacugucccaacauuag

SEQ ID NO: 1826133 - RNA, 19 nt, Homo sapiens
  misc_RNA (1)...(19): siRNA sense strand
gcucaguggacuuacaguu

SEQ ID NO: 1826134 - RNA, 19 nt, Homo sapiens
  misc_RNA (1)...(19): siRNA sense strand
cgugaacuacuuguuuaua

SEQ ID NO: 1826135 - RNA, 19 nt, Homo sapiens
  misc_RNA (1)...(19): siRNA sense strand
caguggacuuacaguuuga

SEQ ID NO: 1826136 - RNA, 19 nt, Homo sapiens
  misc_RNA (1)...(19): siRNA sense strand
guaugacaaucuccauucg

SEQ ID NO: 1826137 - RNA, 19 nt, Homo sapiens
  misc_RNA (1)...(19): siRNA sense strand
gggacauguuacccgauga

SEQ ID NO: 1826138 - RNA, 19 nt, Homo sapiens
  misc_RNA (1)...(19): siRNA sense strand
ucuugaaagggacauguua

SEQ ID NO: 1826139 - RNA, 19 nt, Homo sapiens
  misc_RNA (1)...(19): siRNA sense strand
ucuacuggguuuguuguug

SEQ ID NO: 1826140 - RNA, 19 nt, Homo sapiens
  misc_RNA (1)...(19): siRNA sense strand
aaucuccauucgcauaaau

SEQ ID NO: 1826141 - RNA, 19 nt, Homo sapiens
  misc_RNA (1)...(19): siRNA sense strand
gaguuuugccucuaucaua

SEQ ID NO: 1826142 - RNA, 19 nt, Homo sapiens
  misc_RNA (1)...(19): siRNA sense strand
aauagcuucuacuggguuu

SEQ ID NO: 1826143 - RNA, 19 nt, Homo sapiens
  misc_RNA (1)...(19): siRNA sense strand
acaaucuccauucgcauaa

SEQ ID NO: 1826144 - RNA, 19 nt, Homo sapiens
  misc_RNA (1)...(19): siRNA sense strand
uaaauucucgugaacuacu

SEQ ID NO: 1826145 - RNA, 19 nt, Homo sapiens
  misc_RNA (1)...(19): siRNA sense strand
uagaguauguccguaucau

SEQ ID NO: 1826146 - RNA, 19 nt, Homo sapiens
  misc_RNA (1)...(19): siRNA sense strand
cucaguggacuuacaguuu

SEQ ID NO: 1826147 - RNA, 19 nt, Homo sapiens
  misc_RNA (1)...(19): siRNA sense strand
guuguaauagcaugguuug

SEQ ID NO: 1826148 - RNA, 19 nt, Homo sapiens
  misc_RNA (1)...(19): siRNA sense strand
cauuagaguauguccguau

SEQ ID NO: 1826149 - RNA, 19 nt, Homo sapiens
  misc_RNA (1)...(19): siRNA sense strand
ugaggaggagcuuccagaa

SEQ ID NO: 1826150 - RNA, 19 nt, Homo sapiens
  misc_RNA (1)...(19): siRNA sense strand
ucaagauccucuacaagua

SEQ ID NO: 1826151 - RNA, 19 nt, Homo sapiens
  misc_RNA (1)...(19): siRNA sense strand
gaacgugacauccaucaug

SEQ ID NO: 1826152 - RNA, 19 nt, Homo sapiens
  misc_RNA (1)...(19): siRNA sense strand
gggaagagcacguucauca

SEQ ID NO: 1826153 - RNA, 19 nt, Homo sapiens
  misc_RNA (1)...(19): siRNA sense strand
gaagagcacguucaucaag

SEQ ID NO: 1826154 - RNA, 19 nt, Homo sapiens
  misc_RNA (1)...(19): siRNA sense strand
gaucaucuacucacacuuc

SEQ ID NO: 1826155 - RNA, 19 nt, Homo sapiens
  misc_RNA (1)...(19): siRNA sense strand
ucaccaagcucgucuacca

SEQ ID NO: 1826156 - RNA, 19 nt, Homo sapiens
  misc_RNA (1)...(19): siRNA sense strand
ccaccggcaucaucgagua

SEQ ID NO: 1826157 - RNA, 19 nt, Homo sapiens
  misc_RNA (1)...(19): siRNA sense strand
gcacguucaucaagcagau

SEQ ID NO: 1826158 - RNA, 19 nt, Homo sapiens
  misc_RNA (1)...(19): siRNA sense strand
guacgucagugccaucaag

SEQ ID NO: 1826159 - RNA, 19 nt, Homo sapiens
  misc_RNA (1)...(19): siRNA sense strand
ggaagagcacguucaucaa

SEQ ID NO: 1826160 - RNA, 19 nt, Homo sapiens
  misc_RNA (1)...(19): siRNA sense strand
ggagagcaaagcccuguuc

SEQ ID NO: 1826161 - RNA, 19 nt, Homo sapiens
  misc_RNA (1)...(19): siRNA sense strand
gagcagaacaaggccaaug

SEQ ID NO: 1826162 - RNA, 19 nt, Homo sapiens
  misc_RNA (1)...(19): siRNA sense strand
ggaguacaaccuggucuga

SEQ ID NO: 1826163 - RNA, 19 nt, Homo sapiens
  misc_RNA (1)...(19): siRNA sense strand
ccagaacuccuccgucauc

SEQ ID NO: 1826164 - RNA, 19 nt, Homo sapiens
  misc_RNA (1)...(19): siRNA sense strand
uggauccacugcuuugaga

SEQ ID NO: 1826165 - RNA, 19 nt, Homo sapiens
  misc_RNA (1)...(19): siRNA sense strand
ccaagcucgucuaccagaa

SEQ ID NO: 1826166 - RNA, 19 nt, Homo sapiens
  misc_RNA (1)...(19): siRNA sense strand
ccauggagacgcucaagau

SEQ ID NO: 1826167 - RNA, 19 nt, Homo sapiens
  misc_RNA (1)...(19): siRNA sense strand
gagaacgugacauccauca

SEQ ID NO: 1826168 - RNA, 19 nt, Homo sapiens
  misc_RNA (1)...(19): siRNA sense strand
cguguugccugagcgauga

SEQ ID NO: 1826169 - RNA, 19 nt, Homo sapiens
  misc_RNA (1)...(19): siRNA sense strand
caucaucgaguacccuuuc

SEQ ID NO: 1826170 - RNA, 19 nt, Homo sapiens
  misc_RNA (1)...(19): siRNA sense strand
caagauccucuacaaguac

SEQ ID NO: 1826171 - RNA, 19 nt, Homo sapiens
  misc_RNA (1)...(19): siRNA sense strand
acaaguacgagcagaacaa

SEQ ID NO: 1826172 - RNA, 19 nt, Homo sapiens
  misc_RNA (1)...(19): siRNA sense strand
cagcgaauacgaccaaguc

SEQ ID NO: 1826173 - RNA, 19 nt, Homo sapiens
  misc_RNA (1)...(19): siRNA sense strand
ugaccaccuucgagcauca

SEQ ID NO: 1826174 - RNA, 19 nt, Homo sapiens
  misc_RNA (1)...(19): siRNA sense strand
gucauccucuuccucaaca

SEQ ID NO: 1826175 - RNA, 19 nt, Homo sapiens
  misc_RNA (1)...(19): siRNA sense strand
gcucaagauccucuacaag

SEQ ID NO: 1826176 - RNA, 19 nt, Homo sapiens
  misc_RNA (1)...(19): siRNA sense strand
cucaagauccucuacaagu

SEQ ID NO: 1826177 - RNA, 19 nt, Homo sapiens
  misc_RNA (1)...(19): siRNA sense strand
ccaccgacacggagaacau

SEQ ID NO: 1826178 - RNA, 19 nt, Homo sapiens
  misc_RNA (1)...(19): siRNA sense strand
cgacagcgacaagaucauc

SEQ ID NO: 1826179 - RNA, 19 nt, Homo sapiens
  misc_RNA (1)...(19): siRNA sense strand
acgccgagaucgagaagca

SEQ ID NO: 1826180 - RNA, 19 nt, Homo sapiens
  misc_RNA (1)...(19): siRNA sense strand
ggagguggacguggagaag

SEQ ID NO: 1826181 - RNA, 19 nt, Homo sapiens
  misc_RNA (1)...(19): siRNA sense strand
ggaaauggcagcaaacgaa

SEQ ID NO: 1826182 - RNA, 19 nt, Homo sapiens
  misc_RNA (1)...(19): siRNA sense strand
ccugauggcuccacgcauu

SEQ ID NO: 1826183 - RNA, 19 nt, Homo sapiens
  misc_RNA (1)...(19): siRNA sense strand
cgugggaaauggcagcaaa

SEQ ID NO: 1826184 - RNA, 19 nt, Homo sapiens
  misc_RNA (1)...(19): siRNA sense strand
gcagcaaacgaaccucuca

SEQ ID NO: 1826185 - RNA, 19 nt, Homo sapiens
  misc_RNA (1)...(19): siRNA sense strand
gcaaacgaaccucucaaaa

SEQ ID NO: 1826186 - RNA, 19 nt, Homo sapiens
  misc_RNA (1)...(19): siRNA sense strand
caaaacccacagagaauaa

SEQ ID NO: 1826187 - RNA, 19 nt, Homo sapiens
  misc_RNA (1)...(19): siRNA sense strand
gcgcgugacccucuucaag

SEQ ID NO: 1826188 - RNA, 19 nt, Homo sapiens
  misc_RNA (1)...(19): siRNA sense strand
gcgugacccucuucaagcu

SEQ ID NO: 1826189 - RNA, 19 nt, Homo sapiens
  misc_RNA (1)...(19): siRNA sense strand
gggaaauggcagcaaacga

SEQ ID NO: 1826190 - RNA, 19 nt, Homo sapiens
  misc_RNA (1)...(19): siRNA sense strand
ccacuggcaucaacgagua

SEQ ID NO: 1826191 - RNA, 19 nt, Homo sapiens
  misc_RNA (1)...(19): siRNA sense strand
gaagucagagcguaagaaa

SEQ ID NO: 1826192 - RNA, 19 nt, Homo sapiens
  misc_RNA (1)...(19): siRNA sense strand
gcacauccgucauccucuu

SEQ ID NO: 1826193 - RNA, 19 nt, Homo sapiens
  misc_RNA (1)...(19): siRNA sense strand
gaaggagagccucgcauug

SEQ ID NO: 1826194 - RNA, 19 nt, Homo sapiens
  misc_RNA (1)...(19): siRNA sense strand
ggagagccucgcauuguuu

SEQ ID NO: 1826195 - RNA, 19 nt, Homo sapiens
  misc_RNA (1)...(19): siRNA sense strand
ccaccuggcuaccuauuuc

SEQ ID NO: 1826196 - RNA, 19 nt, Homo sapiens
  misc_RNA (1)...(19): siRNA sense strand
ccuauaaagugaccacguu

SEQ ID NO: 1826197 - RNA, 19 nt, Homo sapiens
  misc_RNA (1)...(19): siRNA sense strand
agucagagcguaagaaaug

SEQ ID NO: 1826198 - RNA, 19 nt, Homo sapiens
  misc_RNA (1)...(19): siRNA sense strand
gaauuccaccugcucgauu

SEQ ID NO: 1826199 - RNA, 19 nt, Homo sapiens
  misc_RNA (1)...(19): siRNA sense strand
ucaacaggauccucuugga

SEQ ID NO: 1826200 - RNA, 19 nt, Homo sapiens
  misc_RNA (1)...(19): siRNA sense strand
gaacauccgcaaggucuuc

SEQ ID NO: 1826201 - RNA, 19 nt, Homo sapiens
  misc_RNA (1)...(19): siRNA sense strand
aaagugaccacguuugaga

SEQ ID NO: 1826202 - RNA, 19 nt, Homo sapiens
  misc_RNA (1)...(19): siRNA sense strand
cauccucuuucucaacaaa

SEQ ID NO: 1826203 - RNA, 19 nt, Homo sapiens
  misc_RNA (1)...(19): siRNA sense strand
gcaccuucaucaagcagau

SEQ ID NO: 1826204 - RNA, 19 nt, Homo sapiens
  misc_RNA (1)...(19): siRNA sense strand
gaacgugaucgcccucauc

SEQ ID NO: 1826205 - RNA, 19 nt, Homo sapiens
  misc_RNA (1)...(19): siRNA sense strand
ugaaggagagccucgcauu

SEQ ID NO: 1826206 - RNA, 19 nt, Homo sapiens
  misc_RNA (1)...(19): siRNA sense strand
ccucccaccuggcuaccua

SEQ ID NO: 1826207 - RNA, 19 nt, Homo sapiens
  misc_RNA (1)...(19): siRNA sense strand
ccacagacacacagaacau

SEQ ID NO: 1826208 - RNA, 19 nt, Homo sapiens
  misc_RNA (1)...(19): siRNA sense strand
gguucauccuggacaugua

SEQ ID NO: 1826209 - RNA, 19 nt, Homo sapiens
  misc_RNA (1)...(19): siRNA sense strand
aggagagccucgcauuguu

SEQ ID NO: 1826210 - RNA, 19 nt, Homo sapiens
  misc_RNA (1)...(19): siRNA sense strand
gagagccucgcauuguuug

SEQ ID NO: 1826211 - RNA, 19 nt, Homo sapiens
  misc_RNA (1)...(19): siRNA sense strand
auaaagugaccacguuuga

SEQ ID NO: 1826212 - RNA, 19 nt, Homo sapiens
  misc_RNA (1)...(19): siRNA sense strand
gccagaagucagagcguaa

SEQ ID NO: 1826213 - RNA, 19 nt, Homo sapiens
  misc_RNA (1)...(19): siRNA sense strand
gucauccucuuucucaaca

SEQ ID NO: 1826214 - RNA, 19 nt, Homo sapiens
  misc_RNA (1)...(19): siRNA sense strand
cgagaucaaccugcuguga

SEQ ID NO: 1826215 - RNA, 19 nt, Homo sapiens
  misc_RNA (1)...(19): siRNA sense strand
ucaagcagaugcggaucau

SEQ ID NO: 1826216 - RNA, 19 nt, Homo sapiens
  misc_RNA (1)...(19): siRNA sense strand
guuugggacuauccuggaa

SEQ ID NO: 1826217 - RNA, 19 nt, Homo sapiens
  misc_RNA (1)...(19): siRNA sense strand
uauaaagugaccacguuug

SEQ ID NO: 1826218 - RNA, 19 nt, Homo sapiens
  misc_RNA (1)...(19): siRNA sense strand
gauccauuguuucgagaac

SEQ ID NO: 1826219 - RNA, 19 nt, Homo sapiens
  misc_RNA (1)...(19): siRNA sense strand
ggaauuccaccugcucgau

SEQ ID NO: 1826220 - RNA, 19 nt, Homo sapiens
  misc_RNA (1)...(19): siRNA sense strand
accaggagaucaacaggau

SEQ ID NO: 1826221 - RNA, 19 nt, Homo sapiens
  misc_RNA (1)...(19): siRNA sense strand
cgugaucgcccucaucuac

SEQ ID NO: 1826222 - RNA, 19 nt, Homo sapiens
  misc_RNA (1)...(19): siRNA sense strand
aaggagagccucgcauugu

SEQ ID NO: 1826223 - RNA, 19 nt, Homo sapiens
  misc_RNA (1)...(19): siRNA sense strand
ucgauucagccguguacua

SEQ ID NO: 1826224 - RNA, 19 nt, Homo sapiens
  misc_RNA (1)...(19): siRNA sense strand
ccauggagcggcugcagau

SEQ ID NO: 1826225 - RNA, 19 nt, Homo sapiens
  misc_RNA (1)...(19): siRNA sense strand
cuaccuauuuccccaguuu

SEQ ID NO: 1826226 - RNA, 19 nt, Homo sapiens
  misc_RNA (1)...(19): siRNA sense strand
cuauaaagugaccacguuu

SEQ ID NO: 1826227 - RNA, 19 nt, Homo sapiens
  misc_RNA (1)...(19): siRNA sense strand
aaaccaaccugcggaucgu

SEQ ID NO: 1826228 - RNA, 19 nt, Homo sapiens
  misc_RNA (1)...(19): siRNA sense strand
uccgcaaggucuucaagga

SEQ ID NO: 1826229 - RNA, 19 nt, Homo sapiens
  misc_RNA (1)...(19): siRNA sense strand
gcucuaagaugaucgacaa

SEQ ID NO: 1826230 - RNA, 19 nt, Homo sapiens
  misc_RNA (1)...(19): siRNA sense strand
gauagcaucugcaacaaca

SEQ ID NO: 1826231 - RNA, 19 nt, Homo sapiens
  misc_RNA (1)...(19): siRNA sense strand
gccgagcgcucuaagauga

SEQ ID NO: 1826232 - RNA, 19 nt, Homo sapiens
  misc_RNA (1)...(19): siRNA sense strand
gaccuacacuucaagaugu

SEQ ID NO: 1826233 - RNA, 19 nt, Homo sapiens
  misc_RNA (1)...(19): siRNA sense strand
ccagcuacauccagaguaa

SEQ ID NO: 1826234 - RNA, 19 nt, Homo sapiens
  misc_RNA (1)...(19): siRNA sense strand
cgacucagcugccuacuac

SEQ ID NO: 1826235 - RNA, 19 nt, Homo sapiens
  misc_RNA (1)...(19): siRNA sense strand
ggacugcggccucuucuga

SEQ ID NO: 1826236 - RNA, 19 nt, Homo sapiens
  misc_RNA (1)...(19): siRNA sense strand
gcaaagacaccaaggagau

SEQ ID NO: 1826237 - RNA, 19 nt, Homo sapiens
  misc_RNA (1)...(19): siRNA sense strand
ucaaggaccuacacuucaa

SEQ ID NO: 1826238 - RNA, 19 nt, Homo sapiens
  misc_RNA (1)...(19): siRNA sense strand
cuaagaugaucgacaagaa

SEQ ID NO: 1826239 - RNA, 19 nt, Homo sapiens
  misc_RNA (1)...(19): siRNA sense strand
caucauggccauugucaaa

SEQ ID NO: 1826240 - RNA, 19 nt, Homo sapiens
  misc_RNA (1)...(19): siRNA sense strand
ugaacgaccuggagcguau

SEQ ID NO: 1826241 - RNA, 19 nt, Homo sapiens
  misc_RNA (1)...(19): siRNA sense strand
gagacacacuucaccuuca

SEQ ID NO: 1826242 - RNA, 19 nt, Homo sapiens
  misc_RNA (1)...(19): siRNA sense strand
ggaccuacacuucaagaug

SEQ ID NO: 1826243 - RNA, 19 nt, Homo sapiens
  misc_RNA (1)...(19): siRNA sense strand
ggucugagcggaagaagug

SEQ ID NO: 1826244 - RNA, 19 nt, Homo sapiens
  misc_RNA (1)...(19): siRNA sense strand
gaagagcaccaucgucaag

SEQ ID NO: 1826245 - RNA, 19 nt, Homo sapiens
  misc_RNA (1)...(19): siRNA sense strand
gcucugggcugaccauggu

SEQ ID NO: 1826246 - RNA, 19 nt, Homo sapiens
  misc_RNA (1)...(19): siRNA sense strand
gggaauaccagcucaacga

SEQ ID NO: 1826247 - RNA, 19 nt, Homo sapiens
  misc_RNA (1)...(19): siRNA sense strand
acaagaaggaccuguuuga

SEQ ID NO: 1826248 - RNA, 19 nt, Homo sapiens
  misc_RNA (1)...(19): siRNA sense strand
ucacagccaucaucuucug

SEQ ID NO: 1826249 - RNA, 19 nt, Homo sapiens
  misc_RNA (1)...(19): siRNA sense strand
gcaacaccauccaguccau

SEQ ID NO: 1826250 - RNA, 19 nt, Homo sapiens
  misc_RNA (1)...(19): siRNA sense strand
agacacacuucaccuucaa

SEQ ID NO: 1826251 - RNA, 19 nt, Homo sapiens
  misc_RNA (1)...(19): siRNA sense strand
ggaccugaauaagcgcaaa

SEQ ID NO: 1826252 - RNA, 19 nt, Homo sapiens
  misc_RNA (1)...(19): siRNA sense strand
gcaccaucgucaagcagau

SEQ ID NO: 1826253 - RNA, 19 nt, Homo sapiens
  misc_RNA (1)...(19): siRNA sense strand
ggaagagcaccaucgucaa

SEQ ID NO: 1826254 - RNA, 19 nt, Homo sapiens
  misc_RNA (1)...(19): siRNA sense strand
gagcaugaagcuauucgau

SEQ ID NO: 1826255 - RNA, 19 nt, Homo sapiens
  misc_RNA (1)...(19): siRNA sense strand
ucaagaacaaccugaagga

SEQ ID NO: 1826256 - RNA, 19 nt, Homo sapiens
  misc_RNA (1)...(19): siRNA sense strand
cuacauccagaguaaguuu

SEQ ID NO: 1826257 - RNA, 19 nt, Homo sapiens
  misc_RNA (1)...(19): siRNA sense strand
gaggagaagaucacacaca

SEQ ID NO: 1826258 - RNA, 19 nt, Homo sapiens
  misc_RNA (1)...(19): siRNA sense strand
cgucacagccaucaucuuc

SEQ ID NO: 1826259 - RNA, 19 nt, Homo sapiens
  misc_RNA (1)...(19): siRNA sense strand
acacaggggccaacaaaua

SEQ ID NO: 1826260 - RNA, 19 nt, Homo sapiens
  misc_RNA (1)...(19): siRNA sense strand
cuugagcgccuaugacuug

SEQ ID NO: 1826261 - RNA, 19 nt, Homo sapiens
  misc_RNA (1)...(19): siRNA sense strand
ggagaugaaccgcaugcau

SEQ ID NO: 1826262 - RNA, 19 nt, Homo sapiens
  misc_RNA (1)...(19): siRNA sense strand
gaucguggagacacacuuc

SEQ ID NO: 1826263 - RNA, 19 nt, Homo sapiens
  misc_RNA (1)...(19): siRNA sense strand
ucacagacacguccaucau

SEQ ID NO: 1826264 - RNA, 19 nt, Homo sapiens
  misc_RNA (1)...(19): siRNA sense strand
gggcgguugucuacagcaa

SEQ ID NO: 1826265 - RNA, 19 nt, Homo sapiens
  misc_RNA (1)...(19): siRNA sense strand
acacguccaucauccucuu

SEQ ID NO: 1826266 - RNA, 19 nt, Homo sapiens
  misc_RNA (1)...(19): siRNA sense strand
agaugaaccgcaugcauga

SEQ ID NO: 1826267 - RNA, 19 nt, Homo sapiens
  misc_RNA (1)...(19): siRNA sense strand
ccaucugcuucccugagua

SEQ ID NO: 1826268 - RNA, 19 nt, Homo sapiens
  misc_RNA (1)...(19): siRNA sense strand
caacaacaagugguucaca

SEQ ID NO: 1826269 - RNA, 19 nt, Homo sapiens
  misc_RNA (1)...(19): siRNA sense strand
gggccaacaaauaugauga

SEQ ID NO: 1826270 - RNA, 19 nt, Homo sapiens
  misc_RNA (1)...(19): siRNA sense strand
aaggcgugcucccugauga

SEQ ID NO: 1826271 - RNA, 19 nt, Homo sapiens
  misc_RNA (1)...(19): siRNA sense strand
ggagaucuacacgcacuuc

SEQ ID NO: 1826272 - RNA, 19 nt, Homo sapiens
  misc_RNA (1)...(19): siRNA sense strand
caaagacaccaaggagauc

SEQ ID NO: 1826273 - RNA, 19 nt, Homo sapiens
  misc_RNA (1)...(19): siRNA sense strand
ggaccuguuugaggagaag

SEQ ID NO: 1826274 - RNA, 19 nt, Homo sapiens
  misc_RNA (1)...(19): siRNA sense strand
cuucaaggaccuacacuuc

SEQ ID NO: 1826275 - RNA, 19 nt, Homo sapiens
  misc_RNA (1)...(19): siRNA sense strand
gaacgaccuggagcguauu

SEQ ID NO: 1826276 - RNA, 19 nt, Homo sapiens
  misc_RNA (1)...(19): siRNA sense strand
guacacaggggccaacaaa

SEQ ID NO: 1826277 - RNA, 19 nt, Homo sapiens
  misc_RNA (1)...(19): siRNA sense strand
acaccaagaacgugcaguu

SEQ ID NO: 1826278 - RNA, 19 nt, Homo sapiens
  misc_RNA (1)...(19): siRNA sense strand
aguuugaggaccugaauaa

SEQ ID NO: 1826279 - RNA, 19 nt, Homo sapiens
  misc_RNA (1)...(19): siRNA sense strand
agcaugaagcuauucgaua

SEQ ID NO: 1826280 - RNA, 19 nt, Homo sapiens
  misc_RNA (1)...(19): siRNA sense strand
ggagaagaucacacacagu

SEQ ID NO: 1826281 - RNA, 19 nt, Homo sapiens
  misc_RNA (1)...(19): siRNA sense strand
caagaaggaccuguuugag

SEQ ID NO: 1826282 - RNA, 19 nt, Homo sapiens
  misc_RNA (1)...(19): siRNA sense strand
aacaagugguucacagaca

SEQ ID NO: 1826283 - RNA, 19 nt, Homo sapiens
  misc_RNA (1)...(19): siRNA sense strand
ggaggaaugccggcaguac

SEQ ID NO: 1826284 - RNA, 19 nt, Homo sapiens
  misc_RNA (1)...(19): siRNA sense strand
cugaauaagcgcaaagaca

SEQ ID NO: 1826285 - RNA, 19 nt, Homo sapiens
  misc_RNA (1)...(19): siRNA sense strand
uaaguuugaggaccugaau

SEQ ID NO: 1826286 - RNA, 19 nt, Homo sapiens
  misc_RNA (1)...(19): siRNA sense strand
gggcgucacagccaucauc

SEQ ID NO: 1826287 - RNA, 19 nt, Homo sapiens
  misc_RNA (1)...(19): siRNA sense strand
acaacaagugguucacaga

SEQ ID NO: 1826288 - RNA, 19 nt, Homo sapiens
  misc_RNA (1)...(19): siRNA sense strand
ucgauagcaucugcaacaa

SEQ ID NO: 1826289 - RNA, 19 nt, Homo sapiens
  misc_RNA (1)...(19): siRNA sense strand
gaaacuccguguagacaaa

SEQ ID NO: 1826290 - RNA, 19 nt, Homo sapiens
  misc_RNA (1)...(19): siRNA sense strand
ggaagaaacuccguguaga

SEQ ID NO: 1826291 - RNA, 19 nt, Homo sapiens
  misc_RNA (1)...(19): siRNA sense strand
guacuuuggucaauaaugu

SEQ ID NO: 1826292 - RNA, 19 nt, Homo sapiens
  misc_RNA (1)...(19): siRNA sense strand
ccaaagagccugccuguuc

SEQ ID NO: 1826293 - RNA, 19 nt, Homo sapiens
  misc_RNA (1)...(19): siRNA sense strand
caagguacuuuggucaaua

SEQ ID NO: 1826294 - RNA, 19 nt, Homo sapiens
  misc_RNA (1)...(19): siRNA sense strand
ggacacaccugcccaugag

SEQ ID NO: 1826295 - RNA, 19 nt, Homo sapiens
  misc_RNA (1)...(19): siRNA sense strand
ggaacuggaugaugagagu

SEQ ID NO: 1826296 - RNA, 19 nt, Homo sapiens
  misc_RNA (1)...(19): siRNA sense strand
uggcggaacuggaugauga

SEQ ID NO: 1826297 - RNA, 19 nt, Homo sapiens
  misc_RNA (1)...(19): siRNA sense strand
gaccacagcagccaaggua

SEQ ID NO: 1826298 - RNA, 19 nt, Homo sapiens
  misc_RNA (1)...(19): siRNA sense strand
ggaguucuacuucauguuc

SEQ ID NO: 1826299 - RNA, 19 nt, Homo sapiens
  misc_RNA (1)...(19): siRNA sense strand
aagguacuuuggucaauaa

SEQ ID NO: 1826300 - RNA, 19 nt, Homo sapiens
  misc_RNA (1)...(19): siRNA sense strand
gaagaaacuccguguagac

SEQ ID NO: 1826301 - RNA, 19 nt, Homo sapiens
  misc_RNA (1)...(19): siRNA sense strand
ggacuuugcugccauuacc

SEQ ID NO: 1826302 - RNA, 19 nt, Homo sapiens
  misc_RNA (1)...(19): siRNA sense strand
ggucacaggcuggaauuga

SEQ ID NO: 1826303 - RNA, 19 nt, Homo sapiens
  misc_RNA (1)...(19): siRNA sense strand
gcaaucggaggaaaucugu

SEQ ID NO: 1826304 - RNA, 19 nt, Homo sapiens
  misc_RNA (1)...(19): siRNA sense strand
ccucggaaguacccaguga

SEQ ID NO: 1826305 - RNA, 19 nt, Homo sapiens
  misc_RNA (1)...(19): siRNA sense strand
gggccgaccugugugaugu

SEQ ID NO: 1826306 - RNA, 19 nt, Homo sapiens
  misc_RNA (1)...(19): siRNA sense strand
ccacacugauccuaaacuc

SEQ ID NO: 1826307 - RNA, 19 nt, Homo sapiens
  misc_RNA (1)...(19): siRNA sense strand
ccacugacucccacuggaa

SEQ ID NO: 1826308 - RNA, 19 nt, Homo sapiens
  misc_RNA (1)...(19): siRNA sense strand
ucaggacuuugcugccauu

SEQ ID NO: 1826309 - RNA, 19 nt, Homo sapiens
  misc_RNA (1)...(19): siRNA sense strand
uggccuggguucaguguga

SEQ ID NO: 1826310 - RNA, 19 nt, Homo sapiens
  misc_RNA (1)...(19): siRNA sense strand
caacgcaaucggaggaaau

SEQ ID NO: 1826311 - RNA, 19 nt, Homo sapiens
  misc_RNA (1)...(19): siRNA sense strand
ccucggaguucuacuucau

SEQ ID NO: 1826312 - RNA, 19 nt, Homo sapiens
  misc_RNA (1)...(19): siRNA sense strand
acacaccugcccaugagua

SEQ ID NO: 1826313 - RNA, 19 nt, Homo sapiens
  misc_RNA (1)...(19): siRNA sense strand
gaggucacaggcuggaauu

SEQ ID NO: 1826314 - RNA, 19 nt, Homo sapiens
  misc_RNA (1)...(19): siRNA sense strand
gauccacgccgaacugcau

SEQ ID NO: 1826315 - RNA, 19 nt, Homo sapiens
  misc_RNA (1)...(19): siRNA sense strand
aggccacacugauccuaaa

SEQ ID NO: 1826316 - RNA, 19 nt, Homo sapiens
  misc_RNA (1)...(19): siRNA sense strand
aggcuggaauugagugaug

SEQ ID NO: 1826317 - RNA, 19 nt, Homo sapiens
  misc_RNA (1)...(19): siRNA sense strand
gagaccuccugaccuuugg

SEQ ID NO: 1826318 - RNA, 19 nt, Homo sapiens
  misc_RNA (1)...(19): siRNA sense strand
uuauggagcccaggaagaa

SEQ ID NO: 1826319 - RNA, 19 nt, Homo sapiens
  misc_RNA (1)...(19): siRNA sense strand
cagcagccaagguacuuug

SEQ ID NO: 1826320 - RNA, 19 nt, Homo sapiens
  misc_RNA (1)...(19): siRNA sense strand
gucacaggcuggaauugag

SEQ ID NO: 1826321 - RNA, 19 nt, Homo sapiens
  misc_RNA (1)...(19): siRNA sense strand
caggaagaaacuccgugua

SEQ ID NO: 1826322 - RNA, 19 nt, Homo sapiens
  misc_RNA (1)...(19): siRNA sense strand
gaaccagccccucggaguu

SEQ ID NO: 1826323 - RNA, 19 nt, Homo sapiens
  misc_RNA (1)...(19): siRNA sense strand
aggaagaaacuccguguag

SEQ ID NO: 1826324 - RNA, 19 nt, Homo sapiens
  misc_RNA (1)...(19): siRNA sense strand
ucggaguucuacuucaugu

SEQ ID NO: 1826325 - RNA, 19 nt, Homo sapiens
  misc_RNA (1)...(19): siRNA sense strand
cgccaccgguccuuaugga

SEQ ID NO: 1826326 - RNA, 19 nt, Homo sapiens
  misc_RNA (1)...(19): siRNA sense strand
gaaagcaucuggaacaaca

SEQ ID NO: 1826327 - RNA, 19 nt, Homo sapiens
  misc_RNA (1)...(19): siRNA sense strand
ggaugcaccucaagcagua

SEQ ID NO: 1826328 - RNA, 19 nt, Homo sapiens
  misc_RNA (1)...(19): siRNA sense strand
ggagaagaucccaaaguua

SEQ ID NO: 1826329 - RNA, 19 nt, Homo sapiens
  misc_RNA (1)...(19): siRNA sense strand
ucacugacuuugaauauuc

SEQ ID NO: 1826330 - RNA, 19 nt, Homo sapiens
  misc_RNA (1)...(19): siRNA sense strand
gaaaauggauccagugcuu

SEQ ID NO: 1826331 - RNA, 19 nt, Homo sapiens
  misc_RNA (1)...(19): siRNA sense strand
gaccauuucuaucaucuug

SEQ ID NO: 1826332 - RNA, 19 nt, Homo sapiens
  misc_RNA (1)...(19): siRNA sense strand
gaagauaacaacaccaaca

SEQ ID NO: 1826333 - RNA, 19 nt, Homo sapiens
  misc_RNA (1)...(19): siRNA sense strand
gcaaugaguacuauaauac

SEQ ID NO: 1826334 - RNA, 19 nt, Homo sapiens
  misc_RNA (1)...(19): siRNA sense strand
ggaauucuuugaccaugug

SEQ ID NO: 1826335 - RNA, 19 nt, Homo sapiens
  misc_RNA (1)...(19): siRNA sense strand
gagaagaucccaaaguuac

SEQ ID NO: 1826336 - RNA, 19 nt, Homo sapiens
  misc_RNA (1)...(19): siRNA sense strand
ugaagacuauuucccagaa

SEQ ID NO: 1826337 - RNA, 19 nt, Homo sapiens
  misc_RNA (1)...(19): siRNA sense strand
gcacgucaauggguuuaau

SEQ ID NO: 1826338 - RNA, 19 nt, Homo sapiens
  misc_RNA (1)...(19): siRNA sense strand
guucugacaucugggauuu

SEQ ID NO: 1826339 - RNA, 19 nt, Homo sapiens
  misc_RNA (1)...(19): siRNA sense strand
uaaagaugcuaucgugaca

SEQ ID NO: 1826340 - RNA, 19 nt, Homo sapiens
  misc_RNA (1)...(19): siRNA sense strand
aggagaagaucccaaaguu

SEQ ID NO: 1826341 - RNA, 19 nt, Homo sapiens
  misc_RNA (1)...(19): siRNA sense strand
gaaggcaugcuuugagaga

SEQ ID NO: 1826342 - RNA, 19 nt, Homo sapiens
  misc_RNA (1)...(19): siRNA sense strand
gaugcuaucgugacaauug

SEQ ID NO: 1826343 - RNA, 19 nt, Homo sapiens
  misc_RNA (1)...(19): siRNA sense strand
ucuaucaucuuguucuuga

SEQ ID NO: 1826344 - RNA, 19 nt, Homo sapiens
  misc_RNA (1)...(19): siRNA sense strand
gugaaggcaugcuuugaga

SEQ ID NO: 1826345 - RNA, 19 nt, Homo sapiens
  misc_RNA (1)...(19): siRNA sense strand
caagauaugcuggcagaaa

SEQ ID NO: 1826346 - RNA, 19 nt, Homo sapiens
  misc_RNA (1)...(19): siRNA sense strand
gagaagauaacaacaccaa

SEQ ID NO: 1826347 - RNA, 19 nt, Homo sapiens
  misc_RNA (1)...(19): siRNA sense strand
caacgaauaccagcugauu

SEQ ID NO: 1826348 - RNA, 19 nt, Homo sapiens
  misc_RNA (1)...(19): siRNA sense strand
gaagacuauuucccagaau

SEQ ID NO: 1826349 - RNA, 19 nt, Homo sapiens
  misc_RNA (1)...(19): siRNA sense strand
cccagaauaugcaaauuau

SEQ ID NO: 1826350 - RNA, 19 nt, Homo sapiens
  misc_RNA (1)...(19): siRNA sense strand
aaauggauccagugcuuua

SEQ ID NO: 1826351 - RNA, 19 nt, Homo sapiens
  misc_RNA (1)...(19): siRNA sense strand
gagagucccuggaucuuuu

SEQ ID NO: 1826352 - RNA, 19 nt, Homo sapiens
  misc_RNA (1)...(19): siRNA sense strand
ucacagcuaucauuuacgu

SEQ ID NO: 1826353 - RNA, 19 nt, Homo sapiens
  misc_RNA (1)...(19): siRNA sense strand
ccauuucuaucaucuuguu

SEQ ID NO: 1826354 - RNA, 19 nt, Homo sapiens
  misc_RNA (1)...(19): siRNA sense strand
gaugucacagcuaucauuu

SEQ ID NO: 1826355 - RNA, 19 nt, Homo sapiens
  misc_RNA (1)...(19): siRNA sense strand
ugucacagcuaucauuuac

SEQ ID NO: 1826356 - RNA, 19 nt, Homo sapiens
  misc_RNA (1)...(19): siRNA sense strand
gaagaucccaaaguuacaa

SEQ ID NO: 1826357 - RNA, 19 nt, Homo sapiens
  misc_RNA (1)...(19): siRNA sense strand
ucagcaaugaguacuauaa

SEQ ID NO: 1826358 - RNA, 19 nt, Homo sapiens
  misc_RNA (1)...(19): siRNA sense strand
uuacggaccauuucuauca

SEQ ID NO: 1826359 - RNA, 19 nt, Homo sapiens
  misc_RNA (1)...(19): siRNA sense strand
uuaacgaugucacagcuau

SEQ ID NO: 1826360 - RNA, 19 nt, Homo sapiens
  misc_RNA (1)...(19): siRNA sense strand
gcaguaugagcucuuguga

SEQ ID NO: 1826361 - RNA, 19 nt, Homo sapiens
  misc_RNA (1)...(19): siRNA sense strand
ucccagaauaugcaaauua

SEQ ID NO: 1826362 - RNA, 19 nt, Homo sapiens
  misc_RNA (1)...(19): siRNA sense strand
ugagagauccaacgaauac

SEQ ID NO: 1826363 - RNA, 19 nt, Homo sapiens
  misc_RNA (1)...(19): siRNA sense strand
caacauggugauucgagaa

SEQ ID NO: 1826364 - RNA, 19 nt, Homo sapiens
  misc_RNA (1)...(19): siRNA sense strand
cagcuugguugacuacaca

SEQ ID NO: 1826365 - RNA, 19 nt, Homo sapiens
  misc_RNA (1)...(19): siRNA sense strand
gaagacgcaacaccagaug

SEQ ID NO: 1826366 - RNA, 19 nt, Homo sapiens
  misc_RNA (1)...(19): siRNA sense strand
acgaauaccagcugauuga

SEQ ID NO: 1826367 - RNA, 19 nt, Homo sapiens
  misc_RNA (1)...(19): siRNA sense strand
gaucagacuacaucaagag

SEQ ID NO: 1826368 - RNA, 19 nt, Homo sapiens
  misc_RNA (1)...(19): siRNA sense strand
aagaugcuaucgugacaau

SEQ ID NO: 1826369 - RNA, 19 nt, Homo sapiens
  misc_RNA (1)...(19): siRNA sense strand
uuugagagauccaacgaau

SEQ ID NO: 1826370 - RNA, 19 nt, Homo sapiens
  misc_RNA (1)...(19): siRNA sense strand
gcuaucgugacaauuguuu

SEQ ID NO: 1826371 - RNA, 19 nt, Homo sapiens
  misc_RNA (1)...(19): siRNA sense strand
ccggugacggcaaacauua

SEQ ID NO: 1826372 - RNA, 19 nt, Homo sapiens
  misc_RNA (1)...(19): siRNA sense strand
gcuacaacauggugauucg

SEQ ID NO: 1826373 - RNA, 19 nt, Homo sapiens
  misc_RNA (1)...(19): siRNA sense strand
cgaucagacuacaucaaga

SEQ ID NO: 1826374 - RNA, 19 nt, Homo sapiens
  misc_RNA (1)...(19): siRNA sense strand
caauuucgaucagacuaca

SEQ ID NO: 1826375 - RNA, 19 nt, Homo sapiens
  misc_RNA (1)...(19): siRNA sense strand
ugacugugcacaauacuuc

SEQ ID NO: 1826376 - RNA, 19 nt, Homo sapiens
  misc_RNA (1)...(19): siRNA sense strand
cccuaucacugacuuugaa

SEQ ID NO: 1826377 - RNA, 19 nt, Homo sapiens
  misc_RNA (1)...(19): siRNA sense strand
cagacuacaucaagagcau

SEQ ID NO: 1826378 - RNA, 19 nt, Homo sapiens
  misc_RNA (1)...(19): siRNA sense strand
cgaugucacagcuaucauu

SEQ ID NO: 1826379 - RNA, 19 nt, Homo sapiens
  misc_RNA (1)...(19): siRNA sense strand
cgacagcgucagcuugguu

SEQ ID NO: 1826380 - RNA, 19 nt, Homo sapiens
  misc_RNA (1)...(19): siRNA sense strand
caacgacugccgcgacauc

SEQ ID NO: 1826381 - RNA, 19 nt, Homo sapiens
  misc_RNA (1)...(19): siRNA sense strand
gguuacggaccauuucuau

SEQ ID NO: 1826382 - RNA, 19 nt, Homo sapiens
  misc_RNA (1)...(19): siRNA sense strand
gcugagagagucccuggau

SEQ ID NO: 1826383 - RNA, 19 nt, Homo sapiens
  misc_RNA (1)...(19): siRNA sense strand
ccaaguggacaaaguaaac

SEQ ID NO: 1826384 - RNA, 19 nt, Homo sapiens
  misc_RNA (1)...(19): siRNA sense strand
cagcaaugaguacuauaau

SEQ ID NO: 1826385 - RNA, 19 nt, Homo sapiens
  misc_RNA (1)...(19): siRNA sense strand
gagagagucccuggaucuu

SEQ ID NO: 1826386 - RNA, 19 nt, Homo sapiens
  misc_RNA (1)...(19): siRNA sense strand
cauggugauucgagaagau

SEQ ID NO: 1826387 - RNA, 19 nt, Homo sapiens
  misc_RNA (1)...(19): siRNA sense strand
uuucagcaaugaguacuau

SEQ ID NO: 1826388 - RNA, 19 nt, Homo sapiens
  misc_RNA (1)...(19): siRNA sense strand
gcugauugacugugcacaa

SEQ ID NO: 1826389 - RNA, 19 nt, Homo sapiens
  misc_RNA (1)...(19): siRNA sense strand
ugagagagucccuggaucu

SEQ ID NO: 1826390 - RNA, 19 nt, Homo sapiens
  misc_RNA (1)...(19): siRNA sense strand
gauccagugcuuuaacgau

SEQ ID NO: 1826391 - RNA, 19 nt, Homo sapiens
  misc_RNA (1)...(19): siRNA sense strand
ugaggauccugcacgucaa

SEQ ID NO: 1826392 - RNA, 19 nt, Homo sapiens
  misc_RNA (1)...(19): siRNA sense strand
caggagaagaucccaaagu

SEQ ID NO: 1826393 - RNA, 19 nt, Homo sapiens
  misc_RNA (1)...(19): siRNA sense strand
auuauacuguuccugaaga

SEQ ID NO: 1826394 - RNA, 19 nt, Homo sapiens
  misc_RNA (1)...(19): siRNA sense strand
aagauaugcuggcagaaaa

SEQ ID NO: 1826395 - RNA, 19 nt, Homo sapiens
  misc_RNA (1)...(19): siRNA sense strand
gaaucgacagcgucagcuu

SEQ ID NO: 1826396 - RNA, 19 nt, Homo sapiens
  misc_RNA (1)...(19): siRNA sense strand
gaauaccagcugauugacu

SEQ ID NO: 1826397 - RNA, 19 nt, Homo sapiens
  misc_RNA (1)...(19): siRNA sense strand
ggacgaugaaggcgugaag

SEQ ID NO: 1826398 - RNA, 19 nt, Homo sapiens
  misc_RNA (1)...(19): siRNA sense strand
ggccaacccugaaaaccaa

SEQ ID NO: 1826399 - RNA, 19 nt, Homo sapiens
  misc_RNA (1)...(19): siRNA sense strand
aacaccagaugcaggagaa

SEQ ID NO: 1826400 - RNA, 19 nt, Homo sapiens
  misc_RNA (1)...(19): siRNA sense strand
cuccucagaugcagaguuc

SEQ ID NO: 1826401 - RNA, 19 nt, Homo sapiens
  misc_RNA (1)...(19): siRNA sense strand
ucaaacagaugaggauccu

SEQ ID NO: 1826402 - RNA, 19 nt, Homo sapiens
  misc_RNA (1)...(19): siRNA sense strand
acuauaauaccuccaguuc

SEQ ID NO: 1826403 - RNA, 19 nt, Homo sapiens
  misc_RNA (1)...(19): siRNA sense strand
agagagucccuggaucuuu

SEQ ID NO: 1826404 - RNA, 19 nt, Homo sapiens
  misc_RNA (1)...(19): siRNA sense strand
ugagacacgauuccaagug

SEQ ID NO: 1826405 - RNA, 19 nt, Homo sapiens
  misc_RNA (1)...(19): siRNA sense strand
cgacugccgcgacaucauc

SEQ ID NO: 1826406 - RNA, 19 nt, Homo sapiens
  misc_RNA (1)...(19): siRNA sense strand
ugaagacgcaacaccagau

SEQ ID NO: 1826407 - RNA, 19 nt, Homo sapiens
  misc_RNA (1)...(19): siRNA sense strand
uuugaaagcaucuggaaca

SEQ ID NO: 1826408 - RNA, 19 nt, Homo sapiens
  misc_RNA (1)...(19): siRNA sense strand
uugaaagcaucuggaacaa

SEQ ID NO: 1826409 - RNA, 19 nt, Homo sapiens
  misc_RNA (1)...(19): siRNA sense strand
gaaagcaucuggaacaaca

SEQ ID NO: 1826410 - RNA, 19 nt, Homo sapiens
  misc_RNA (1)...(19): siRNA sense strand
ggaugcaccucaagcagua

SEQ ID NO: 1826411 - RNA, 19 nt, Homo sapiens
  misc_RNA (1)...(19): siRNA sense strand
ggagaagaucccaaaguua

SEQ ID NO: 1826412 - RNA, 19 nt, Homo sapiens
  misc_RNA (1)...(19): siRNA sense strand
ucacugacuuugaauauuc

SEQ ID NO: 1826413 - RNA, 19 nt, Homo sapiens
  misc_RNA (1)...(19): siRNA sense strand
gaaaauggauccagugcuu

SEQ ID NO: 1826414 - RNA, 19 nt, Homo sapiens
  misc_RNA (1)...(19): siRNA sense strand
gaccauuucuaucaucuug

SEQ ID NO: 1826415 - RNA, 19 nt, Homo sapiens
  misc_RNA (1)...(19): siRNA sense strand
gaagauaacaacaccaaca

SEQ ID NO: 1826416 - RNA, 19 nt, Homo sapiens
  misc_RNA (1)...(19): siRNA sense strand
gcaaugaguacuauaauac

SEQ ID NO: 1826417 - RNA, 19 nt, Homo sapiens
  misc_RNA (1)...(19): siRNA sense strand
ggaauucuuugaccaugug

SEQ ID NO: 1826418 - RNA, 19 nt, Homo sapiens
  misc_RNA (1)...(19): siRNA sense strand
gagaagaucccaaaguuac

SEQ ID NO: 1826419 - RNA, 19 nt, Homo sapiens
  misc_RNA (1)...(19): siRNA sense strand
ugaagacuauuucccagaa

SEQ ID NO: 1826420 - RNA, 19 nt, Homo sapiens
  misc_RNA (1)...(19): siRNA sense strand
gcacgucaauggguuuaau

SEQ ID NO: 1826421 - RNA, 19 nt, Homo sapiens
  misc_RNA (1)...(19): siRNA sense strand
guucugacaucugggauuu

SEQ ID NO: 1826422 - RNA, 19 nt, Homo sapiens
  misc_RNA (1)...(19): siRNA sense strand
uaaagaugcuaucgugaca

SEQ ID NO: 1826423 - RNA, 19 nt, Homo sapiens
  misc_RNA (1)...(19): siRNA sense strand
aggagaagaucccaaaguu

SEQ ID NO: 1826424 - RNA, 19 nt, Homo sapiens
  misc_RNA (1)...(19): siRNA sense strand
gaaggcaugcuuugagaga

SEQ ID NO: 1826425 - RNA, 19 nt, Homo sapiens
  misc_RNA (1)...(19): siRNA sense strand
gaugcuaucgugacaauug

SEQ ID NO: 1826426 - RNA, 19 nt, Homo sapiens
  misc_RNA (1)...(19): siRNA sense strand
ucuaucaucuuguucuuga

SEQ ID NO: 1826427 - RNA, 19 nt, Homo sapiens
  misc_RNA (1)...(19): siRNA sense strand
gugaaggcaugcuuugaga

SEQ ID NO: 1826428 - RNA, 19 nt, Homo sapiens
  misc_RNA (1)...(19): siRNA sense strand
caagauaugcuggcagaaa

SEQ ID NO: 1826429 - RNA, 19 nt, Homo sapiens
  misc_RNA (1)...(19): siRNA sense strand
gagaagauaacaacaccaa

SEQ ID NO: 1826430 - RNA, 19 nt, Homo sapiens
  misc_RNA (1)...(19): siRNA sense strand
caacgaauaccagcugauu

SEQ ID NO: 1826431 - RNA, 19 nt, Homo sapiens
  misc_RNA (1)...(19): siRNA sense strand
gaagacuauuucccagaau

SEQ ID NO: 1826432 - RNA, 19 nt, Homo sapiens
  misc_RNA (1)...(19): siRNA sense strand
cccagaauaugcaaauuau

SEQ ID NO: 1826433 - RNA, 19 nt, Homo sapiens
  misc_RNA (1)...(19): siRNA sense strand
aaauggauccagugcuuua

SEQ ID NO: 1826434 - RNA, 19 nt, Homo sapiens
  misc_RNA (1)...(19): siRNA sense strand
gagagucccuggaucuuuu

SEQ ID NO: 1826435 - RNA, 19 nt, Homo sapiens
  misc_RNA (1)...(19): siRNA sense strand
ucacagcuaucauuuacgu

SEQ ID NO: 1826436 - RNA, 19 nt, Homo sapiens
  misc_RNA (1)...(19): siRNA sense strand
ccauuucuaucaucuuguu

SEQ ID NO: 1826437 - RNA, 19 nt, Homo sapiens
  misc_RNA (1)...(19): siRNA sense strand
gaugucacagcuaucauuu

SEQ ID NO: 1826438 - RNA, 19 nt, Homo sapiens
  misc_RNA (1)...(19): siRNA sense strand
ugucacagcuaucauuuac

SEQ ID NO: 1826439 - RNA, 19 nt, Homo sapiens
  misc_RNA (1)...(19): siRNA sense strand
gaagaucccaaaguuacaa

SEQ ID NO: 1826440 - RNA, 19 nt, Homo sapiens
  misc_RNA (1)...(19): siRNA sense strand
ucagcaaugaguacuauaa

SEQ ID NO: 1826441 - RNA, 19 nt, Homo sapiens
  misc_RNA (1)...(19): siRNA sense strand
uuacggaccauuucuauca

SEQ ID NO: 1826442 - RNA, 19 nt, Homo sapiens
  misc_RNA (1)...(19): siRNA sense strand
uuaacgaugucacagcuau

SEQ ID NO: 1826443 - RNA, 19 nt, Homo sapiens
  misc_RNA (1)...(19): siRNA sense strand
gcaguaugagcucuuguga

SEQ ID NO: 1826444 - RNA, 19 nt, Homo sapiens
  misc_RNA (1)...(19): siRNA sense strand
ucccagaauaugcaaauua

SEQ ID NO: 1826445 - RNA, 19 nt, Homo sapiens
  misc_RNA (1)...(19): siRNA sense strand
ugagagauccaacgaauac

SEQ ID NO: 1826446 - RNA, 19 nt, Homo sapiens
  misc_RNA (1)...(19): siRNA sense strand
caacauggugauucgagaa

SEQ ID NO: 1826447 - RNA, 19 nt, Homo sapiens
  misc_RNA (1)...(19): siRNA sense strand
cagcuugguugacuacaca

SEQ ID NO: 1826448 - RNA, 19 nt, Homo sapiens
  misc_RNA (1)...(19): siRNA sense strand
gaagacgcaacaccagaug

SEQ ID NO: 1826449 - RNA, 19 nt, Homo sapiens
  misc_RNA (1)...(19): siRNA sense strand
acgaauaccagcugauuga

SEQ ID NO: 1826450 - RNA, 19 nt, Homo sapiens
  misc_RNA (1)...(19): siRNA sense strand
gaucagacuacaucaagag

SEQ ID NO: 1826451 - RNA, 19 nt, Homo sapiens
  misc_RNA (1)...(19): siRNA sense strand
aagaugcuaucgugacaau

SEQ ID NO: 1826452 - RNA, 19 nt, Homo sapiens
  misc_RNA (1)...(19): siRNA sense strand
uuugagagauccaacgaau

SEQ ID NO: 1826453 - RNA, 19 nt, Homo sapiens
  misc_RNA (1)...(19): siRNA sense strand
gcuaucgugacaauuguuu

SEQ ID NO: 1826454 - RNA, 19 nt, Homo sapiens
  misc_RNA (1)...(19): siRNA sense strand
ccggugacggcaaacauua

SEQ ID NO: 1826455 - RNA, 19 nt, Homo sapiens
  misc_RNA (1)...(19): siRNA sense strand
gcuacaacauggugauucg

SEQ ID NO: 1826456 - RNA, 19 nt, Homo sapiens
  misc_RNA (1)...(19): siRNA sense strand
cgaucagacuacaucaaga

SEQ ID NO: 1826457 - RNA, 19 nt, Homo sapiens
  misc_RNA (1)...(19): siRNA sense strand
caauuucgaucagacuaca

SEQ ID NO: 1826458 - RNA, 19 nt, Homo sapiens
  misc_RNA (1)...(19): siRNA sense strand
ugacugugcacaauacuuc

SEQ ID NO: 1826459 - RNA, 19 nt, Homo sapiens
  misc_RNA (1)...(19): siRNA sense strand
cccuaucacugacuuugaa

SEQ ID NO: 1826460 - RNA, 19 nt, Homo sapiens
  misc_RNA (1)...(19): siRNA sense strand
cagacuacaucaagagcau

SEQ ID NO: 1826461 - RNA, 19 nt, Homo sapiens
  misc_RNA (1)...(19): siRNA sense strand
cgaugucacagcuaucauu

SEQ ID NO: 1826462 - RNA, 19 nt, Homo sapiens
  misc_RNA (1)...(19): siRNA sense strand
cgacagcgucagcuugguu

SEQ ID NO: 1826463 - RNA, 19 nt, Homo sapiens
  misc_RNA (1)...(19): siRNA sense strand
caacgacugccgcgacauc

SEQ ID NO: 1826464 - RNA, 19 nt, Homo sapiens
  misc_RNA (1)...(19): siRNA sense strand
gguuacggaccauuucuau

SEQ ID NO: 1826465 - RNA, 19 nt, Homo sapiens
  misc_RNA (1)...(19): siRNA sense strand
gcugagagagucccuggau

SEQ ID NO: 1826466 - RNA, 19 nt, Homo sapiens
  misc_RNA (1)...(19): siRNA sense strand
ccaaguggacaaaguaaac

SEQ ID NO: 1826467 - RNA, 19 nt, Homo sapiens
  misc_RNA (1)...(19): siRNA sense strand
cagcaaugaguacuauaau

SEQ ID NO: 1826468 - RNA, 19 nt, Homo sapiens
  misc_RNA (1)...(19): siRNA sense strand
gagagagucccuggaucuu

SEQ ID NO: 1826469 - RNA, 19 nt, Homo sapiens
  misc_RNA (1)...(19): siRNA sense strand
cauggugauucgagaagau

SEQ ID NO: 1826470 - RNA, 19 nt, Homo sapiens
  misc_RNA (1)...(19): siRNA sense strand
uuucagcaaugaguacuau

SEQ ID NO: 1826471 - RNA, 19 nt, Homo sapiens
  misc_RNA (1)...(19): siRNA sense strand
gcugauugacugugcacaa

SEQ ID NO: 1826472 - RNA, 19 nt, Homo sapiens
  misc_RNA (1)...(19): siRNA sense strand
ugagagagucccuggaucu

SEQ ID NO: 1826473 - RNA, 19 nt, Homo sapiens
  misc_RNA (1)...(19): siRNA sense strand
gauccagugcuuuaacgau

SEQ ID NO: 1826474 - RNA, 19 nt, Homo sapiens
  misc_RNA (1)...(19): siRNA sense strand
ugaggauccugcacgucaa

SEQ ID NO: 1826475 - RNA, 19 nt, Homo sapiens
  misc_RNA (1)...(19): siRNA sense strand
caggagaagaucccaaagu

SEQ ID NO: 1826476 - RNA, 19 nt, Homo sapiens
  misc_RNA (1)...(19): siRNA sense strand
auuauacuguuccugaaga

SEQ ID NO: 1826477 - RNA, 19 nt, Homo sapiens
  misc_RNA (1)...(19): siRNA sense strand
aagauaugcuggcagaaaa

SEQ ID NO: 1826478 - RNA, 19 nt, Homo sapiens
  misc_RNA (1)...(19): siRNA sense strand
gaaucgacagcgucagcuu

SEQ ID NO: 1826479 - RNA, 19 nt, Homo sapiens
  misc_RNA (1)...(19): siRNA sense strand
gaauaccagcugauugacu

SEQ ID NO: 1826480 - RNA, 19 nt, Homo sapiens
  misc_RNA (1)...(19): siRNA sense strand
ggacgaugaaggcgugaag

SEQ ID NO: 1826481 - RNA, 19 nt, Homo sapiens
  misc_RNA (1)...(19): siRNA sense strand
ggccaacccugaaaaccaa

SEQ ID NO: 1826482 - RNA, 19 nt, Homo sapiens
  misc_RNA (1)...(19): siRNA sense strand
aacaccagaugcaggagaa

SEQ ID NO: 1826483 - RNA, 19 nt, Homo sapiens
  misc_RNA (1)...(19): siRNA sense strand
cuccucagaugcagaguuc

SEQ ID NO: 1826484 - RNA, 19 nt, Homo sapiens
  misc_RNA (1)...(19): siRNA sense strand
ucaaacagaugaggauccu

SEQ ID NO: 1826485 - RNA, 19 nt, Homo sapiens
  misc_RNA (1)...(19): siRNA sense strand
acuauaauaccuccaguuc

SEQ ID NO: 1826486 - RNA, 19 nt, Homo sapiens
  misc_RNA (1)...(19): siRNA sense strand
agagagucccuggaucuuu

SEQ ID NO: 1826487 - RNA, 19 nt, Homo sapiens
  misc_RNA (1)...(19): siRNA sense strand
ugagacacgauuccaagug

SEQ ID NO: 1826488 - RNA, 19 nt, Homo sapiens
  misc_RNA (1)...(19): siRNA sense strand
cgacugccgcgacaucauc

SEQ ID NO: 1826489 - RNA, 19 nt, Homo sapiens
  misc_RNA (1)...(19): siRNA sense strand
ugaagacgcaacaccagau

SEQ ID NO: 1826490 - RNA, 19 nt, Homo sapiens
  misc_RNA (1)...(19): siRNA sense strand
uuugaaagcaucuggaaca

SEQ ID NO: 1826491 - RNA, 19 nt, Homo sapiens
  misc_RNA (1)...(19): siRNA sense strand
uugaaagcaucuggaacaa

SEQ ID NO: 1826492 - RNA, 19 nt, Homo sapiens
  misc_RNA (1)...(19): siRNA sense strand
ccacagggaucaucgaaua

SEQ ID NO: 1826493 - RNA, 19 nt, Homo sapiens
  misc_RNA (1)...(19): siRNA sense strand
caauaaggcucaugcacaa

SEQ ID NO: 1826494 - RNA, 19 nt, Homo sapiens
  misc_RNA (1)...(19): siRNA sense strand
gcaacaagaugugcuuaga

SEQ ID NO: 1826495 - RNA, 19 nt, Homo sapiens
  misc_RNA (1)...(19): siRNA sense strand
gaauauccgcuuugucuuu

SEQ ID NO: 1826496 - RNA, 19 nt, Homo sapiens
  misc_RNA (1)...(19): siRNA sense strand
acaauuaguucgagaaguu

SEQ ID NO: 1826497 - RNA, 19 nt, Homo sapiens
  misc_RNA (1)...(19): siRNA sense strand
ggaguacaaucuggucuaa

SEQ ID NO: 1826498 - RNA, 19 nt, Homo sapiens
  misc_RNA (1)...(19): siRNA sense strand
gcaaggcucucuuuagaac

SEQ ID NO: 1826499 - RNA, 19 nt, Homo sapiens
  misc_RNA (1)...(19): siRNA sense strand
aagcaaggcucucuuuaga

SEQ ID NO: 1826500 - RNA, 19 nt, Homo sapiens
  misc_RNA (1)...(19): siRNA sense strand
ccacagacaccgagaauau

SEQ ID NO: 1826501 - RNA, 19 nt, Homo sapiens
  misc_RNA (1)...(19): siRNA sense strand
uaaggcucaugcacaauua

SEQ ID NO: 1826502 - RNA, 19 nt, Homo sapiens
  misc_RNA (1)...(19): siRNA sense strand
ggagagaguggcaagagua

SEQ ID NO: 1826503 - RNA, 19 nt, Homo sapiens
  misc_RNA (1)...(19): siRNA sense strand
gagaauauccgcuuugucu

SEQ ID NO: 1826504 - RNA, 19 nt, Homo sapiens
  misc_RNA (1)...(19): siRNA sense strand
uaguagcgcuuagugaaua

SEQ ID NO: 1826505 - RNA, 19 nt, Homo sapiens
  misc_RNA (1)...(19): siRNA sense strand
uggagaaggugucugcuuu

SEQ ID NO: 1826506 - RNA, 19 nt, Homo sapiens
  misc_RNA (1)...(19): siRNA sense strand
uuccagaacuccucgguua

SEQ ID NO: 1826507 - RNA, 19 nt, Homo sapiens
  misc_RNA (1)...(19): siRNA sense strand
cgacgagaauaucaauuau

SEQ ID NO: 1826508 - RNA, 19 nt, Homo sapiens
  misc_RNA (1)...(19): siRNA sense strand
gaacccagacagugacaaa

SEQ ID NO: 1826509 - RNA, 19 nt, Homo sapiens
  misc_RNA (1)...(19): siRNA sense strand
gaaaauggauacacugcuu

SEQ ID NO: 1826510 - RNA, 19 nt, Homo sapiens
  misc_RNA (1)...(19): siRNA sense strand
uggauacacugcuuugaaa

SEQ ID NO: 1826511 - RNA, 19 nt, Homo sapiens
  misc_RNA (1)...(19): siRNA sense strand
acaaguaugagcacaauaa

SEQ ID NO: 1826512 - RNA, 19 nt, Homo sapiens
  misc_RNA (1)...(19): siRNA sense strand
ggccaaaggucagagagaa

SEQ ID NO: 1826513 - RNA, 19 nt, Homo sapiens
  misc_RNA (1)...(19): siRNA sense strand
uaucugacucuaccaaaua

SEQ ID NO: 1826514 - RNA, 19 nt, Homo sapiens
  misc_RNA (1)...(19): siRNA sense strand
aaucauguauucccaucua

SEQ ID NO: 1826515 - RNA, 19 nt, Homo sapiens
  misc_RNA (1)...(19): siRNA sense strand
gagaauccauauguagaug

SEQ ID NO: 1826516 - RNA, 19 nt, Homo sapiens
  misc_RNA (1)...(19): siRNA sense strand
gaaaaugucaccucuauca

SEQ ID NO: 1826517 - RNA, 19 nt, Homo sapiens
  misc_RNA (1)...(19): siRNA sense strand
gcaagaguacguuuaucaa

SEQ ID NO: 1826518 - RNA, 19 nt, Homo sapiens
  misc_RNA (1)...(19): siRNA sense strand
ugucaccucuaucauguuu

SEQ ID NO: 1826519 - RNA, 19 nt, Homo sapiens
  misc_RNA (1)...(19): siRNA sense strand
caagaugugcuuagaguuc

SEQ ID NO: 1826520 - RNA, 19 nt, Homo sapiens
  misc_RNA (1)...(19): siRNA sense strand
gauacucugaugaagauaa

SEQ ID NO: 1826521 - RNA, 19 nt, Homo sapiens
  misc_RNA (1)...(19): siRNA sense strand
ccaggcagcccgagaauuc

SEQ ID NO: 1826522 - RNA, 19 nt, Homo sapiens
  misc_RNA (1)...(19): siRNA sense strand
gaucagagccauggacaca

SEQ ID NO: 1826523 - RNA, 19 nt, Homo sapiens
  misc_RNA (1)...(19): siRNA sense strand
cgaauaccccuuugacuua

SEQ ID NO: 1826524 - RNA, 19 nt, Homo sapiens
  misc_RNA (1)...(19): siRNA sense strand
acgacgagaauaucaauua

SEQ ID NO: 1826525 - RNA, 19 nt, Homo sapiens
  misc_RNA (1)...(19): siRNA sense strand
ccaagcugguguaucagaa

SEQ ID NO: 1826526 - RNA, 19 nt, Homo sapiens
  misc_RNA (1)...(19): siRNA sense strand
guacguuuaucaagcagau

SEQ ID NO: 1826527 - RNA, 19 nt, Homo sapiens
  misc_RNA (1)...(19): siRNA sense strand
ucaagaucccauacaagua

SEQ ID NO: 1826528 - RNA, 19 nt, Homo sapiens
  misc_RNA (1)...(19): siRNA sense strand
aguugaaccugaaggagua

SEQ ID NO: 1826529 - RNA, 19 nt, Homo sapiens
  misc_RNA (1)...(19): siRNA sense strand
ggacaccauccuccaguug

SEQ ID NO: 1826530 - RNA, 19 nt, Homo sapiens
  misc_RNA (1)...(19): siRNA sense strand
ucgacuacuucccagaaua

SEQ ID NO: 1826531 - RNA, 19 nt, Homo sapiens
  misc_RNA (1)...(19): siRNA sense strand
gaauccauauguagaugca

SEQ ID NO: 1826532 - RNA, 19 nt, Homo sapiens
  misc_RNA (1)...(19): siRNA sense strand
guagaugcaauaaagaguu

SEQ ID NO: 1826533 - RNA, 19 nt, Homo sapiens
  misc_RNA (1)...(19): siRNA sense strand
ggcaagaguacguuuauca

SEQ ID NO: 1826534 - RNA, 19 nt, Homo sapiens
  misc_RNA (1)...(19): siRNA sense strand
uaugauagacgacgagaau

SEQ ID NO: 1826535 - RNA, 19 nt, Homo sapiens
  misc_RNA (1)...(19): siRNA sense strand
cgacuacuucccagaauau

SEQ ID NO: 1826536 - RNA, 19 nt, Homo sapiens
  misc_RNA (1)...(19): siRNA sense strand
aaugucaccucuaucaugu

SEQ ID NO: 1826537 - RNA, 19 nt, Homo sapiens
  misc_RNA (1)...(19): siRNA sense strand
gaacuccucgguuauucug

SEQ ID NO: 1826538 - RNA, 19 nt, Homo sapiens
  misc_RNA (1)...(19): siRNA sense strand
ccagaacuccucgguuauu

SEQ ID NO: 1826539 - RNA, 19 nt, Homo sapiens
  misc_RNA (1)...(19): siRNA sense strand
aggauacucugaugaagau

SEQ ID NO: 1826540 - RNA, 19 nt, Homo sapiens
  misc_RNA (1)...(19): siRNA sense strand
aacaagaugugcuuagagu

SEQ ID NO: 1826541 - RNA, 19 nt, Homo sapiens
  misc_RNA (1)...(19): siRNA sense strand
ucuaucauguuucuaguag

SEQ ID NO: 1826542 - RNA, 19 nt, Homo sapiens
  misc_RNA (1)...(19): siRNA sense strand
ugauagacgacgagaauau

SEQ ID NO: 1826543 - RNA, 19 nt, Homo sapiens
  misc_RNA (1)...(19): siRNA sense strand
gagcgaggaggccaaggaa

SEQ ID NO: 1826544 - RNA, 19 nt, Homo sapiens
  misc_RNA (1)...(19): siRNA sense strand
aauauccgcuuugucuuug

SEQ ID NO: 1826545 - RNA, 19 nt, Homo sapiens
  misc_RNA (1)...(19): siRNA sense strand
cagaacuccucgguuauuc

SEQ ID NO: 1826546 - RNA, 19 nt, Homo sapiens
  misc_RNA (1)...(19): siRNA sense strand
auccaggaaugcuaugaua

SEQ ID NO: 1826547 - RNA, 19 nt, Homo sapiens
  misc_RNA (1)...(19): siRNA sense strand
gaaggugucugcuuuugag

SEQ ID NO: 1826548 - RNA, 19 nt, Homo sapiens
  misc_RNA (1)...(19): siRNA sense strand
gcucaugcacaauuaguuc

SEQ ID NO: 1826549 - RNA, 19 nt, Homo sapiens
  misc_RNA (1)...(19): siRNA sense strand
ccaaaggucagagagaaga

SEQ ID NO: 1826550 - RNA, 19 nt, Homo sapiens
  misc_RNA (1)...(19): siRNA sense strand
cgguuauucuguucuuaaa

SEQ ID NO: 1826551 - RNA, 19 nt, Homo sapiens
  misc_RNA (1)...(19): siRNA sense strand
ugaauaugaucaaguucuc

SEQ ID NO: 1826552 - RNA, 19 nt, Homo sapiens
  misc_RNA (1)...(19): siRNA sense strand
gcacaauuaguucgagaag

SEQ ID NO: 1826553 - RNA, 19 nt, Homo sapiens
  misc_RNA (1)...(19): siRNA sense strand
caccgagaauauccgcuuu

SEQ ID NO: 1826554 - RNA, 19 nt, Homo sapiens
  misc_RNA (1)...(19): siRNA sense strand
gcucucuuuagaacaauua

SEQ ID NO: 1826555 - RNA, 19 nt, Homo sapiens
  misc_RNA (1)...(19): siRNA sense strand
agaguacguuuaucaagca

SEQ ID NO: 1826556 - RNA, 19 nt, Homo sapiens
  misc_RNA (1)...(19): siRNA sense strand
gagaaguugauguggagaa

SEQ ID NO: 1826557 - RNA, 19 nt, Homo sapiens
  misc_RNA (1)...(19): siRNA sense strand
caggauacucugaugaaga

SEQ ID NO: 1826558 - RNA, 19 nt, Homo sapiens
  misc_RNA (1)...(19): siRNA sense strand
acaccauccuccaguugaa

SEQ ID NO: 1826559 - RNA, 19 nt, Homo sapiens
  misc_RNA (1)...(19): siRNA sense strand
aaggcucucuuuagaacaa

SEQ ID NO: 1826560 - RNA, 19 nt, Homo sapiens
  misc_RNA (1)...(19): siRNA sense strand
ucaccucuaucauguuucu

SEQ ID NO: 1826561 - RNA, 19 nt, Homo sapiens
  misc_RNA (1)...(19): siRNA sense strand
caagaguacguuuaucaag

SEQ ID NO: 1826562 - RNA, 19 nt, Homo sapiens
  misc_RNA (1)...(19): siRNA sense strand
gagaaggugucugcuuuug

SEQ ID NO: 1826563 - RNA, 19 nt, Homo sapiens
  misc_RNA (1)...(19): siRNA sense strand
gacaccauccuccaguuga

SEQ ID NO: 1826564 - RNA, 19 nt, Homo sapiens
  misc_RNA (1)...(19): siRNA sense strand
ucuaguagcgcuuagugaa

SEQ ID NO: 1826565 - RNA, 19 nt, Homo sapiens
  misc_RNA (1)...(19): siRNA sense strand
aaaugucaccucuaucaug

SEQ ID NO: 1826566 - RNA, 19 nt, Homo sapiens
  misc_RNA (1)...(19): siRNA sense strand
gaucaucgaauaccccuuu

SEQ ID NO: 1826567 - RNA, 19 nt, Homo sapiens
  misc_RNA (1)...(19): siRNA sense strand
ccgagaauauccgcuuugu

SEQ ID NO: 1826568 - RNA, 19 nt, Homo sapiens
  misc_RNA (1)...(19): siRNA sense strand
cacucaagaucccauacaa

SEQ ID NO: 1826569 - RNA, 19 nt, Homo sapiens
  misc_RNA (1)...(19): siRNA sense strand
caacaagaugugcuuagag

SEQ ID NO: 1826570 - RNA, 19 nt, Homo sapiens
  misc_RNA (1)...(19): siRNA sense strand
caaagugucauuuucagaa

SEQ ID NO: 1826571 - RNA, 19 nt, Homo sapiens
  misc_RNA (1)...(19): siRNA sense strand
gaaccugaaggaguacaau

SEQ ID NO: 1826572 - RNA, 19 nt, Homo sapiens
  misc_RNA (1)...(19): siRNA sense strand
ucagagccauggacacacu

SEQ ID NO: 1826573 - RNA, 19 nt, Homo sapiens
  misc_RNA (1)...(19): siRNA sense strand
gagaaccgaauggaggaaa

SEQ ID NO: 1826574 - RNA, 19 nt, Homo sapiens
  misc_RNA (1)...(19): siRNA sense strand
auaaggcucaugcacaauu

SEQ ID NO: 1826575 - RNA, 19 nt, Homo sapiens
  misc_RNA (1)...(19): siRNA sense strand
uuaucugacucuaccaaau

SEQ ID NO: 1826576 - RNA, 19 nt, Homo sapiens
  misc_RNA (1)...(19): siRNA sense strand
ugucuuugcugccgucaag

SEQ ID NO: 1826577 - RNA, 19 nt, Homo sapiens
  misc_RNA (1)...(19): siRNA sense strand
ggaccugaacccagacagu

SEQ ID NO: 1826578 - RNA, 19 nt, Homo sapiens
  misc_RNA (1)...(19): siRNA sense strand
ggagucagacaaugagaac

SEQ ID NO: 1826579 - RNA, 19 nt, Homo sapiens
  misc_RNA (1)...(19): siRNA sense strand
ugagaauccauauguagau

SEQ ID NO: 1826580 - RNA, 19 nt, Homo sapiens
  misc_RNA (1)...(19): siRNA sense strand
ccagacagugacaaaauua

SEQ ID NO: 1826581 - RNA, 19 nt, Homo sapiens
  misc_RNA (1)...(19): siRNA sense strand
caaaggucagagagaagaa

SEQ ID NO: 1826582 - RNA, 19 nt, Homo sapiens
  misc_RNA (1)...(19): siRNA sense strand
gacgagaauaucaauuauc

SEQ ID NO: 1826583 - RNA, 19 nt, Homo sapiens
  misc_RNA (1)...(19): siRNA sense strand
gcacaauaaggcucaugca

SEQ ID NO: 1826584 - RNA, 19 nt, Homo sapiens
  misc_RNA (1)...(19): siRNA sense strand
gaauccaggaaugcuauga

SEQ ID NO: 1826585 - RNA, 19 nt, Homo sapiens
  misc_RNA (1)...(19): siRNA sense strand
ccauauguagaugcaauaa

SEQ ID NO: 1826586 - RNA, 19 nt, Homo sapiens
  misc_RNA (1)...(19): siRNA sense strand
gcugguguaucagaacauc

SEQ ID NO: 1826587 - RNA, 19 nt, Homo sapiens
  misc_RNA (1)...(19): siRNA sense strand
gaggaaagcaaggcucucu

SEQ ID NO: 1826588 - RNA, 19 nt, Homo sapiens
  misc_RNA (1)...(19): siRNA sense strand
gccauggacacacucaaga

SEQ ID NO: 1826589 - RNA, 19 nt, Homo sapiens
  misc_RNA (1)...(19): siRNA sense strand
aagaguuuauggaaugauc

SEQ ID NO: 1826590 - RNA, 19 nt, Homo sapiens
  misc_RNA (1)...(19): siRNA sense strand
gagaguggcaagaguacgu

SEQ ID NO: 1826591 - RNA, 19 nt, Homo sapiens
  misc_RNA (1)...(19): siRNA sense strand
cuacuucccagaauaugau

SEQ ID NO: 1826592 - RNA, 19 nt, Homo sapiens
  misc_RNA (1)...(19): siRNA sense strand
caagauaacuggaaaaugu

SEQ ID NO: 1826593 - RNA, 19 nt, Homo sapiens
  misc_RNA (1)...(19): siRNA sense strand
cgacaguucugccggauga

SEQ ID NO: 1826594 - RNA, 19 nt, Homo sapiens
  misc_RNA (1)...(19): siRNA sense strand
guacagcguuccugacaac

SEQ ID NO: 1826595 - RNA, 19 nt, Homo sapiens
  misc_RNA (1)...(19): siRNA sense strand
gaagggcuuuggcucaucu

SEQ ID NO: 1826596 - RNA, 19 nt, Homo sapiens
  misc_RNA (1)...(19): siRNA sense strand
ugcaaaggcugguggaugu

SEQ ID NO: 1826597 - RNA, 19 nt, Homo sapiens
  misc_RNA (1)...(19): siRNA sense strand
gacaggacgugaacaugca

SEQ ID NO: 1826598 - RNA, 19 nt, Homo sapiens
  misc_RNA (1)...(19): siRNA sense strand
gaagcaaggcgacaguucu

SEQ ID NO: 1826599 - RNA, 19 nt, Homo sapiens
  misc_RNA (1)...(19): siRNA sense strand
uaggcugggugaagaagaa

SEQ ID NO: 1826600 - RNA, 19 nt, Homo sapiens
  misc_RNA (1)...(19): siRNA sense strand
caucugggcucagguuugg

SEQ ID NO: 1826601 - RNA, 19 nt, Homo sapiens
  misc_RNA (1)...(19): siRNA sense strand
gcaaaggcugguggaugua

SEQ ID NO: 1826602 - RNA, 19 nt, Homo sapiens
  misc_RNA (1)...(19): siRNA sense strand
gcauucaccgcuucagaga

SEQ ID NO: 1826603 - RNA, 19 nt, Homo sapiens
  misc_RNA (1)...(19): siRNA sense strand
ggaagggcuuuggcucauc

SEQ ID NO: 1826604 - RNA, 19 nt, Homo sapiens
  misc_RNA (1)...(19): siRNA sense strand
gagggaaugugggaaaauu

SEQ ID NO: 1826605 - RNA, 19 nt, Homo sapiens
  misc_RNA (1)...(19): siRNA sense strand
gugggaaaauugcccuuua

SEQ ID NO: 1826606 - RNA, 19 nt, Homo sapiens
  misc_RNA (1)...(19): siRNA sense strand
aagaagaaagcaaguggaa

SEQ ID NO: 1826607 - RNA, 19 nt, Homo sapiens
  misc_RNA (1)...(19): siRNA sense strand
gacgugaacaugcacacaa

SEQ ID NO: 1826608 - RNA, 19 nt, Homo sapiens
  misc_RNA (1)...(19): siRNA sense strand
ugugcaagauaacuggaaa

SEQ ID NO: 1826609 - RNA, 19 nt, Homo sapiens
  misc_RNA (1)...(19): siRNA sense strand
gcucaucugggcucagguu

SEQ ID NO: 1826610 - RNA, 19 nt, Homo sapiens
  misc_RNA (1)...(19): siRNA sense strand
gcagaaggcgcagaaagac

SEQ ID NO: 1826611 - RNA, 19 nt, Homo sapiens
  misc_RNA (1)...(19): siRNA sense strand
gggcauucaccgcuucaga

SEQ ID NO: 1826612 - RNA, 19 nt, Homo sapiens
  misc_RNA (1)...(19): siRNA sense strand
gcucagguuugggagagau

SEQ ID NO: 1826613 - RNA, 19 nt, Homo sapiens
  misc_RNA (1)...(19): siRNA sense strand
gagaagcaaggcgacaguu

SEQ ID NO: 1826614 - RNA, 19 nt, Homo sapiens
  misc_RNA (1)...(19): siRNA sense strand
ggaggaaggaagggcuuug

SEQ ID NO: 1826615 - RNA, 19 nt, Homo sapiens
  misc_RNA (1)...(19): siRNA sense strand
ccuuuaggcugggugaaga

SEQ ID NO: 1826616 - RNA, 19 nt, Homo sapiens
  misc_RNA (1)...(19): siRNA sense strand
cagcagaaggcgcagaaag

SEQ ID NO: 1826617 - RNA, 19 nt, Homo sapiens
  misc_RNA (1)...(19): siRNA sense strand
aagaaugacaggacgugaa

SEQ ID NO: 1826618 - RNA, 19 nt, Homo sapiens
  misc_RNA (1)...(19): siRNA sense strand
ugguggauguagugccuuu

SEQ ID NO: 1826619 - RNA, 19 nt, Homo sapiens
  misc_RNA (1)...(19): siRNA sense strand
gcucacagcuccucugcaa

SEQ ID NO: 1826620 - RNA, 19 nt, Homo sapiens
  misc_RNA (1)...(19): siRNA sense strand
gaaagugaacaguagguuu

SEQ ID NO: 1826621 - RNA, 19 nt, Homo sapiens
  misc_RNA (1)...(19): siRNA sense strand
gcaucuacuucaaccguuu

SEQ ID NO: 1826622 - RNA, 19 nt, Homo sapiens
  misc_RNA (1)...(19): siRNA sense strand
ccauggcgcugaacgagaa

SEQ ID NO: 1826623 - RNA, 19 nt, Homo sapiens
  misc_RNA (1)...(19): siRNA sense strand
gagcuuggccuacgccuau

SEQ ID NO: 1826624 - RNA, 19 nt, Homo sapiens
  misc_RNA (1)...(19): siRNA sense strand
agaagcagauccuggagaa

SEQ ID NO: 1826625 - RNA, 19 nt, Homo sapiens
  misc_RNA (1)...(19): siRNA sense strand
gaacaguagguuuguagug

SEQ ID NO: 1826626 - RNA, 19 nt, Homo sapiens
  misc_RNA (1)...(19): siRNA sense strand
caagauugcuguggaaacu

SEQ ID NO: 1826627 - RNA, 19 nt, Homo sapiens
  misc_RNA (1)...(19): siRNA sense strand
gggacuagcugugcaugug

SEQ ID NO: 1826628 - RNA, 19 nt, Homo sapiens
  misc_RNA (1)...(19): siRNA sense strand
cggagguggugaagaauga

SEQ ID NO: 1826629 - RNA, 19 nt, Homo sapiens
  misc_RNA (1)...(19): siRNA sense strand
aaagugaacaguagguuug

SEQ ID NO: 1826630 - RNA, 19 nt, Homo sapiens
  misc_RNA (1)...(19): siRNA sense strand
aacaguagguuuguaguga

SEQ ID NO: 1826631 - RNA, 19 nt, Homo sapiens
  misc_RNA (1)...(19): siRNA sense strand
uggagaaagugaacaguag

SEQ ID NO: 1826632 - RNA, 19 nt, Homo sapiens
  misc_RNA (1)...(19): siRNA sense strand
ggccacagguaagauguau

SEQ ID NO: 1826633 - RNA, 19 nt, Homo sapiens
  misc_RNA (1)...(19): siRNA sense strand
gaccucaaguuccacaucu

SEQ ID NO: 1826634 - RNA, 19 nt, Homo sapiens
  misc_RNA (1)...(19): siRNA sense strand
cgaacacggugcuacucaa

SEQ ID NO: 1826635 - RNA, 19 nt, Homo sapiens
  misc_RNA (1)...(19): siRNA sense strand
gaacacggugcuacucaag

SEQ ID NO: 1826636 - RNA, 19 nt, Homo sapiens
  misc_RNA (1)...(19): siRNA sense strand
cuccggagguggugaagaa

SEQ ID NO: 1826637 - RNA, 19 nt, Homo sapiens
  misc_RNA (1)...(19): siRNA sense strand
gcacguaacgcagaauuuu

SEQ ID NO: 1826638 - RNA, 19 nt, Homo sapiens
  misc_RNA (1)...(19): siRNA sense strand
cagcagaggaagaagaaga

SEQ ID NO: 1826639 - RNA, 19 nt, Homo sapiens
  misc_RNA (1)...(19): siRNA sense strand
caguggaaguggcuggaaa

SEQ ID NO: 1826640 - RNA, 19 nt, Homo sapiens
  misc_RNA (1)...(19): siRNA sense strand
ggcggcagaugcuccaguu

SEQ ID NO: 1826641 - RNA, 19 nt, Homo sapiens
  misc_RNA (1)...(19): siRNA sense strand
uggagcggcuggugaagga

SEQ ID NO: 1826642 - RNA, 19 nt, Homo sapiens
  misc_RNA (1)...(19): siRNA sense strand
ggagcucgagaacaucgua

SEQ ID NO: 1826643 - RNA, 19 nt, Homo sapiens
  misc_RNA (1)...(19): siRNA sense strand
ggaguauuccgagcgcuuu

SEQ ID NO: 1826644 - RNA, 19 nt, Homo sapiens
  misc_RNA (1)...(19): siRNA sense strand
gauguaugccugcaagaag

SEQ ID NO: 1826645 - RNA, 19 nt, Homo sapiens
  misc_RNA (1)...(19): siRNA sense strand
gagaacaucguagcgaaca

SEQ ID NO: 1826646 - RNA, 19 nt, Homo sapiens
  misc_RNA (1)...(19): siRNA sense strand
ggagaccgagugcuuccaa

SEQ ID NO: 1826647 - RNA, 19 nt, Homo sapiens
  misc_RNA (1)...(19): siRNA sense strand
caagaaauggcggcagaug

SEQ ID NO: 1826648 - RNA, 19 nt, Homo sapiens
  misc_RNA (1)...(19): siRNA sense strand
cuaccgaccaggacuucua

SEQ ID NO: 1826649 - RNA, 19 nt, Homo sapiens
  misc_RNA (1)...(19): siRNA sense strand
gcagcgacagcgaggaaga

SEQ ID NO: 1826650 - RNA, 19 nt, Homo sapiens
  misc_RNA (1)...(19): siRNA sense strand
gaaugucuuugggcuggau

SEQ ID NO: 1826651 - RNA, 19 nt, Homo sapiens
  misc_RNA (1)...(19): siRNA sense strand
gcgaacacggugcuacuca

SEQ ID NO: 1826652 - RNA, 19 nt, Homo sapiens
  misc_RNA (1)...(19): siRNA sense strand
ggaaaucgcaaaggcaaaa

SEQ ID NO: 1826653 - RNA, 19 nt, Homo sapiens
  misc_RNA (1)...(19): siRNA sense strand
gaagcccgagaacaucuug

SEQ ID NO: 1826654 - RNA, 19 nt, Homo sapiens
  misc_RNA (1)...(19): siRNA sense strand
ccgacuaccucgacagcau

SEQ ID NO: 1826655 - RNA, 19 nt, Homo sapiens
  misc_RNA (1)...(19): siRNA sense strand
guagguuuguagugagcuu

SEQ ID NO: 1826656 - RNA, 19 nt, Homo sapiens
  misc_RNA (1)...(19): siRNA sense strand
gaagcagauccuggagaaa

SEQ ID NO: 1826657 - RNA, 19 nt, Homo sapiens
  misc_RNA (1)...(19): siRNA sense strand
ccacagguaagauguaugc

SEQ ID NO: 1826658 - RNA, 19 nt, Homo sapiens
  misc_RNA (1)...(19): siRNA sense strand
aaaggcagccagugaccaa

SEQ ID NO: 1826659 - RNA, 19 nt, Homo sapiens
  misc_RNA (1)...(19): siRNA sense strand
cgccaagauugcuguggaa

SEQ ID NO: 1826660 - RNA, 19 nt, Homo sapiens
  misc_RNA (1)...(19): siRNA sense strand
agaggaagaagaagaucaa

SEQ ID NO: 1826661 - RNA, 19 nt, Homo sapiens
  misc_RNA (1)...(19): siRNA sense strand
cuggagaaagugaacagua

SEQ ID NO: 1826662 - RNA, 19 nt, Homo sapiens
  misc_RNA (1)...(19): siRNA sense strand
gagaaagugaacaguaggu

SEQ ID NO: 1826663 - RNA, 19 nt, Homo sapiens
  misc_RNA (1)...(19): siRNA sense strand
gggccacagguaagaugua

SEQ ID NO: 1826664 - RNA, 19 nt, Homo sapiens
  misc_RNA (1)...(19): siRNA sense strand
gugaacaguagguuuguag

SEQ ID NO: 1826665 - RNA, 19 nt, Homo sapiens
  misc_RNA (1)...(19): siRNA sense strand
ggcacguaacgcagaauuu

SEQ ID NO: 1826666 - RNA, 19 nt, Homo sapiens
  misc_RNA (1)...(19): siRNA sense strand
cagaggaagaagaagauca

SEQ ID NO: 1826667 - RNA, 19 nt, Homo sapiens
  misc_RNA (1)...(19): siRNA sense strand
gcagaaagcuugucucaac

SEQ ID NO: 1826668 - RNA, 19 nt, Homo sapiens
  misc_RNA (1)...(19): siRNA sense strand
gaauucaccucaagaacau

SEQ ID NO: 1826669 - RNA, 19 nt, Homo sapiens
  misc_RNA (1)...(19): siRNA sense strand
ucaagaacauccaaagugu

SEQ ID NO: 1826670 - RNA, 19 nt, Homo sapiens
  misc_RNA (1)...(19): siRNA sense strand
ggaauucaccucaagaaca

SEQ ID NO: 1826671 - RNA, 19 nt, Homo sapiens
  misc_RNA (1)...(19): siRNA sense strand
gcagggaauucaccucaag

SEQ ID NO: 1826672 - RNA, 19 nt, Homo sapiens
  misc_RNA (1)...(19): siRNA sense strand
ccgcaucgcccaugguuaa

SEQ ID NO: 1826673 - RNA, 19 nt, Homo sapiens
  misc_RNA (1)...(19): siRNA sense strand
gaagucauagccacacuca

SEQ ID NO: 1826674 - RNA, 19 nt, Homo sapiens
  misc_RNA (1)...(19): siRNA sense strand
caucgcccaugguuaagaa

SEQ ID NO: 1826675 - RNA, 19 nt, Homo sapiens
  misc_RNA (1)...(19): siRNA sense strand
gaacauccaaagugugaag

SEQ ID NO: 1826676 - RNA, 19 nt, Homo sapiens
  misc_RNA (1)...(19): siRNA sense strand
gggcagaaagcuugucuca

SEQ ID NO: 1826677 - RNA, 19 nt, Homo sapiens
  misc_RNA (1)...(19): siRNA sense strand
aagaacauccaaaguguga

SEQ ID NO: 1826678 - RNA, 19 nt, Homo sapiens
  misc_RNA (1)...(19): siRNA sense strand
uagccacacucaagaaugg

SEQ ID NO: 1826679 - RNA, 19 nt, Homo sapiens
  misc_RNA (1)...(19): siRNA sense strand
cgcccaaaccgaagucaua

SEQ ID NO: 1826680 - RNA, 19 nt, Homo sapiens
  misc_RNA (1)...(19): siRNA sense strand
acucaagaaugggcagaaa

SEQ ID NO: 1826681 - RNA, 19 nt, Homo sapiens
  misc_RNA (1)...(19): siRNA sense strand
uccaaagugugaaggugaa

SEQ ID NO: 1826682 - RNA, 19 nt, Homo sapiens
  misc_RNA (1)...(19): siRNA sense strand
agucauagccacacucaag

SEQ ID NO: 1826683 - RNA, 19 nt, Homo sapiens
  misc_RNA (1)...(19): siRNA sense strand
cucaagaacauccaaagug

SEQ ID NO: 1826684 - RNA, 19 nt, Homo sapiens
  misc_RNA (1)...(19): siRNA sense strand
ucauagccacacucaagaa

SEQ ID NO: 1826685 - RNA, 19 nt, Homo sapiens
  misc_RNA (1)...(19): siRNA sense strand
ggaaagaacuugagaauca

SEQ ID NO: 1826686 - RNA, 19 nt, Homo sapiens
  misc_RNA (1)...(19): siRNA sense strand
gcuaacagcuuuacaagaa

SEQ ID NO: 1826687 - RNA, 19 nt, Homo sapiens
  misc_RNA (1)...(19): siRNA sense strand
ggaauccacuaaacaaaua

SEQ ID NO: 1826688 - RNA, 19 nt, Homo sapiens
  misc_RNA (1)...(19): siRNA sense strand
gaaagcagcgucugaauau

SEQ ID NO: 1826689 - RNA, 19 nt, Homo sapiens
  misc_RNA (1)...(19): siRNA sense strand
caaaggaugugcagaaaga

SEQ ID NO: 1826690 - RNA, 19 nt, Homo sapiens
  misc_RNA (1)...(19): siRNA sense strand
ggccagagcuucuccauga

SEQ ID NO: 1826691 - RNA, 19 nt, Homo sapiens
  misc_RNA (1)...(19): siRNA sense strand
ggaaagcagcgucugaaua

SEQ ID NO: 1826692 - RNA, 19 nt, Homo sapiens
  misc_RNA (1)...(19): siRNA sense strand
ugacauugcuucuuuacaa

SEQ ID NO: 1826693 - RNA, 19 nt, Homo sapiens
  misc_RNA (1)...(19): siRNA sense strand
guuuagagcuuaccaguga

SEQ ID NO: 1826694 - RNA, 19 nt, Homo sapiens
  misc_RNA (1)...(19): siRNA sense strand
acacugacauugcuucuuu

SEQ ID NO: 1826695 - RNA, 19 nt, Homo sapiens
  misc_RNA (1)...(19): siRNA sense strand
gauaaugauuucaccaaug

SEQ ID NO: 1826696 - RNA, 19 nt, Homo sapiens
  misc_RNA (1)...(19): siRNA sense strand
aagaagagcuuaagaaggu

SEQ ID NO: 1826697 - RNA, 19 nt, Homo sapiens
  misc_RNA (1)...(19): siRNA sense strand
gaacugcaacggcaagaaa

SEQ ID NO: 1826698 - RNA, 19 nt, Homo sapiens
  misc_RNA (1)...(19): siRNA sense strand
ggauucagcugauuuaaaa

SEQ ID NO: 1826699 - RNA, 19 nt, Homo sapiens
  misc_RNA (1)...(19): siRNA sense strand
ggagcuagcuagaacaagu

SEQ ID NO: 1826700 - RNA, 19 nt, Homo sapiens
  misc_RNA (1)...(19): siRNA sense strand
gaucucagcauccuucaaa

SEQ ID NO: 1826701 - RNA, 19 nt, Homo sapiens
  misc_RNA (1)...(19): siRNA sense strand
ucaaaugucuaggaaagaa

SEQ ID NO: 1826702 - RNA, 19 nt, Homo sapiens
  misc_RNA (1)...(19): siRNA sense strand
gaacagcaucuucgggauu

SEQ ID NO: 1826703 - RNA, 19 nt, Homo sapiens
  misc_RNA (1)...(19): siRNA sense strand
gaaguugaaguuugaaaug

SEQ ID NO: 1826704 - RNA, 19 nt, Homo sapiens
  misc_RNA (1)...(19): siRNA sense strand
agaaagaaaucacaagucu

SEQ ID NO: 1826705 - RNA, 19 nt, Homo sapiens
  misc_RNA (1)...(19): siRNA sense strand
ugaaaugacugagcaggaa

SEQ ID NO: 1826706 - RNA, 19 nt, Homo sapiens
  misc_RNA (1)...(19): siRNA sense strand
cagcuuagaugucaacagu

SEQ ID NO: 1826707 - RNA, 19 nt, Homo sapiens
  misc_RNA (1)...(19): siRNA sense strand
gaaaucacaagucugcaaa

SEQ ID NO: 1826708 - RNA, 19 nt, Homo sapiens
  misc_RNA (1)...(19): siRNA sense strand
gaaauacagcaucuucgaa

SEQ ID NO: 1826709 - RNA, 19 nt, Homo sapiens
  misc_RNA (1)...(19): siRNA sense strand
gaucgaagcccaggagcua

SEQ ID NO: 1826710 - RNA, 19 nt, Homo sapiens
  misc_RNA (1)...(19): siRNA sense strand
gguuacacaucgauacuga

SEQ ID NO: 1826711 - RNA, 19 nt, Homo sapiens
  misc_RNA (1)...(19): siRNA sense strand
gcagagagaagaagcaaca

SEQ ID NO: 1826712 - RNA, 19 nt, Homo sapiens
  misc_RNA (1)...(19): siRNA sense strand
gcaagcugauaaugauuuc

SEQ ID NO: 1826713 - RNA, 19 nt, Homo sapiens
  misc_RNA (1)...(19): siRNA sense strand
gagaagaagcaacaagguu

SEQ ID NO: 1826714 - RNA, 19 nt, Homo sapiens
  misc_RNA (1)...(19): siRNA sense strand
gcuuagaugucaacagugu

SEQ ID NO: 1826715 - RNA, 19 nt, Homo sapiens
  misc_RNA (1)...(19): siRNA sense strand
acacaucgauacugagaau

SEQ ID NO: 1826716 - RNA, 19 nt, Homo sapiens
  misc_RNA (1)...(19): siRNA sense strand
gcuagaacaaguaaacaaa

SEQ ID NO: 1826717 - RNA, 19 nt, Homo sapiens
  misc_RNA (1)...(19): siRNA sense strand
aacaggagcuccaggcaaa

SEQ ID NO: 1826718 - RNA, 19 nt, Homo sapiens
  misc_RNA (1)...(19): siRNA sense strand
agucagaaauugaggcaaa

SEQ ID NO: 1826719 - RNA, 19 nt, Homo sapiens
  misc_RNA (1)...(19): siRNA sense strand
gaaagaguaugaaaagaca

SEQ ID NO: 1826720 - RNA, 19 nt, Homo sapiens
  misc_RNA (1)...(19): siRNA sense strand
ggagaaggacagugaaauc

SEQ ID NO: 1826721 - RNA, 19 nt, Homo sapiens
  misc_RNA (1)...(19): siRNA sense strand
agagaugaauugcuuagug

SEQ ID NO: 1826722 - RNA, 19 nt, Homo sapiens
  misc_RNA (1)...(19): siRNA sense strand
aaucacagaugagcucaaa

SEQ ID NO: 1826723 - RNA, 19 nt, Homo sapiens
  misc_RNA (1)...(19): siRNA sense strand
aaaugagccucuugccaaa

SEQ ID NO: 1826724 - RNA, 19 nt, Homo sapiens
  misc_RNA (1)...(19): siRNA sense strand
cuagagaaguugagaaagg

SEQ ID NO: 1826725 - RNA, 19 nt, Homo sapiens
  misc_RNA (1)...(19): siRNA sense strand
gaaaucacaaguacuagag

SEQ ID NO: 1826726 - RNA, 19 nt, Homo sapiens
  misc_RNA (1)...(19): siRNA sense strand
gaaaugacugagcaggaaa

SEQ ID NO: 1826727 - RNA, 19 nt, Homo sapiens
  misc_RNA (1)...(19): siRNA sense strand
gggaggagaaggacaguga

SEQ ID NO: 1826728 - RNA, 19 nt, Homo sapiens
  misc_RNA (1)...(19): siRNA sense strand
gggauucagcugauuuaaa

SEQ ID NO: 1826729 - RNA, 19 nt, Homo sapiens
  misc_RNA (1)...(19): siRNA sense strand
gagaaggacagugaaauca

SEQ ID NO: 1826730 - RNA, 19 nt, Homo sapiens
  misc_RNA (1)...(19): siRNA sense strand
gaggaauccacuaaacaaa

SEQ ID NO: 1826731 - RNA, 19 nt, Homo sapiens
  misc_RNA (1)...(19): siRNA sense strand
gagcuagcuagaacaagua

SEQ ID NO: 1826732 - RNA, 19 nt, Homo sapiens
  misc_RNA (1)...(19): siRNA sense strand
auuccuggcuuuccugaua

SEQ ID NO: 1826733 - RNA, 19 nt, Homo sapiens
  misc_RNA (1)...(19): siRNA sense strand
cgagagaaaggaaauaauc

SEQ ID NO: 1826734 - RNA, 19 nt, Homo sapiens
  misc_RNA (1)...(19): siRNA sense strand
ugaggcaaagcaagaaaua

SEQ ID NO: 1826735 - RNA, 19 nt, Homo sapiens
  misc_RNA (1)...(19): siRNA sense strand
aaauacagcaucuucgaaa

SEQ ID NO: 1826736 - RNA, 19 nt, Homo sapiens
  misc_RNA (1)...(19): siRNA sense strand
ccaaauggaugagcaagac

SEQ ID NO: 1826737 - RNA, 19 nt, Homo sapiens
  misc_RNA (1)...(19): siRNA sense strand
cuaacagcuuuacaagaaa

SEQ ID NO: 1826738 - RNA, 19 nt, Homo sapiens
  misc_RNA (1)...(19): siRNA sense strand
uagagaaguugagaaagga

SEQ ID NO: 1826739 - RNA, 19 nt, Homo sapiens
  misc_RNA (1)...(19): siRNA sense strand
cacuacagaugcccaaaug

SEQ ID NO: 1826740 - RNA, 19 nt, Homo sapiens
  misc_RNA (1)...(19): siRNA sense strand
gaugagcucaaacagugua

SEQ ID NO: 1826741 - RNA, 19 nt, Homo sapiens
  misc_RNA (1)...(19): siRNA sense strand
cuucaaaugucuaggaaag

SEQ ID NO: 1826742 - RNA, 19 nt, Homo sapiens
  misc_RNA (1)...(19): siRNA sense strand
ucaagcagcagcaaagguu

SEQ ID NO: 1826743 - RNA, 19 nt, Homo sapiens
  misc_RNA (1)...(19): siRNA sense strand
gaggagaaggacagugaaa

SEQ ID NO: 1826744 - RNA, 19 nt, Homo sapiens
  misc_RNA (1)...(19): siRNA sense strand
uacuagagaugaauugcuu

SEQ ID NO: 1826745 - RNA, 19 nt, Homo sapiens
  misc_RNA (1)...(19): siRNA sense strand
ucacagaugagcucaaaca

SEQ ID NO: 1826746 - RNA, 19 nt, Homo sapiens
  misc_RNA (1)...(19): siRNA sense strand
agaaaggaauggaaugcau

SEQ ID NO: 1826747 - RNA, 19 nt, Homo sapiens
  misc_RNA (1)...(19): siRNA sense strand
gagaaagaaaucacaaguc

SEQ ID NO: 1826748 - RNA, 19 nt, Homo sapiens
  misc_RNA (1)...(19): siRNA sense strand
ccucugagcgggacacuga

SEQ ID NO: 1826749 - RNA, 19 nt, Homo sapiens
  misc_RNA (1)...(19): siRNA sense strand
gaaagaaaagccuaucgaa

SEQ ID NO: 1826750 - RNA, 19 nt, Homo sapiens
  misc_RNA (1)...(19): siRNA sense strand
gagcuuaccagugaucuca

SEQ ID NO: 1826751 - RNA, 19 nt, Homo sapiens
  misc_RNA (1)...(19): siRNA sense strand
aagcagcgucugaauauga

SEQ ID NO: 1826752 - RNA, 19 nt, Homo sapiens
  misc_RNA (1)...(19): siRNA sense strand
cacaaguacuagagaugaa

SEQ ID NO: 1826753 - RNA, 19 nt, Homo sapiens
  misc_RNA (1)...(19): siRNA sense strand
ugaggaauccacuaaacaa

SEQ ID NO: 1826754 - RNA, 19 nt, Homo sapiens
  misc_RNA (1)...(19): siRNA sense strand
ucacaaguacuagagauga

SEQ ID NO: 1826755 - RNA, 19 nt, Homo sapiens
  misc_RNA (1)...(19): siRNA sense strand
cuacagaugcccaaaugga

SEQ ID NO: 1826756 - RNA, 19 nt, Homo sapiens
  misc_RNA (1)...(19): siRNA sense strand
gacauugcuucuuuacaag

SEQ ID NO: 1826757 - RNA, 19 nt, Homo sapiens
  misc_RNA (1)...(19): siRNA sense strand
gaagcugcuccgagagaaa

SEQ ID NO: 1826758 - RNA, 19 nt, Homo sapiens
  misc_RNA (1)...(19): siRNA sense strand
acaaauacagguucuucaa

SEQ ID NO: 1826759 - RNA, 19 nt, Homo sapiens
  misc_RNA (1)...(19): siRNA sense strand
gugcagaaagaguaugaaa

SEQ ID NO: 1826760 - RNA, 19 nt, Homo sapiens
  misc_RNA (1)...(19): siRNA sense strand
aagcaaaggaugugcagaa

SEQ ID NO: 1826761 - RNA, 19 nt, Homo sapiens
  misc_RNA (1)...(19): siRNA sense strand
cagcauccuucaaaugucu

SEQ ID NO: 1826762 - RNA, 19 nt, Homo sapiens
  misc_RNA (1)...(19): siRNA sense strand
aaacaaauacagguucuuc

SEQ ID NO: 1826763 - RNA, 19 nt, Homo sapiens
  misc_RNA (1)...(19): siRNA sense strand
gcagaaagaguaugaaaag

SEQ ID NO: 1826764 - RNA, 19 nt, Homo sapiens
  misc_RNA (1)...(19): siRNA sense strand
uaggaaagaacuugagaau

SEQ ID NO: 1826765 - RNA, 19 nt, Homo sapiens
  misc_RNA (1)...(19): siRNA sense strand
uacaagaagagcuuaagaa

SEQ ID NO: 1826766 - RNA, 19 nt, Homo sapiens
  misc_RNA (1)...(19): siRNA sense strand
guugaggaauccacuaaac

SEQ ID NO: 1826767 - RNA, 19 nt, Homo sapiens
  misc_RNA (1)...(19): siRNA sense strand
ggugcacagucagaaauug

SEQ ID NO: 1826768 - RNA, 19 nt, Homo sapiens
  misc_RNA (1)...(19): siRNA sense strand
caaguacuagagaugaauu

SEQ ID NO: 1826769 - RNA, 19 nt, Homo sapiens
  misc_RNA (1)...(19): siRNA sense strand
gaugagcaagaccuaaaug

SEQ ID NO: 1826770 - RNA, 19 nt, Homo sapiens
  misc_RNA (1)...(19): siRNA sense strand
gcaaaggaugugcagaaag

SEQ ID NO: 1826771 - RNA, 19 nt, Homo sapiens
  misc_RNA (1)...(19): siRNA sense strand
gcuaucaucagaacugcaa

SEQ ID NO: 1826772 - RNA, 19 nt, Homo sapiens
  misc_RNA (1)...(19): siRNA sense strand
guugcaaggugaacuagag

SEQ ID NO: 1826773 - RNA, 19 nt, Homo sapiens
  misc_RNA (1)...(19): siRNA sense strand
ugaaaucacaaguacuaga

SEQ ID NO: 1826774 - RNA, 19 nt, Homo sapiens
  misc_RNA (1)...(19): siRNA sense strand
caaauacagguucuucaag

SEQ ID NO: 1826775 - RNA, 19 nt, Homo sapiens
  misc_RNA (1)...(19): siRNA sense strand
cuaaacaaauacagguucu

SEQ ID NO: 1826776 - RNA, 19 nt, Homo sapiens
  misc_RNA (1)...(19): siRNA sense strand
cacugacauugcuucuuua

SEQ ID NO: 1826777 - RNA, 19 nt, Homo sapiens
  misc_RNA (1)...(19): siRNA sense strand
ggcccuggaugcccauguu

SEQ ID NO: 1826778 - RNA, 19 nt, Homo sapiens
  misc_RNA (1)...(19): siRNA sense strand
aaugaaaggcuaacagcuu

SEQ ID NO: 1826779 - RNA, 19 nt, Homo sapiens
  misc_RNA (1)...(19): siRNA sense strand
gagcgggacacugacauug

SEQ ID NO: 1826780 - RNA, 19 nt, Homo sapiens
  misc_RNA (1)...(19): siRNA sense strand
ugaagcugcuccgagagaa

SEQ ID NO: 1826781 - RNA, 19 nt, Homo sapiens
  misc_RNA (1)...(19): siRNA sense strand
gugcacagucagaaauuga

SEQ ID NO: 1826782 - RNA, 19 nt, Homo sapiens
  misc_RNA (1)...(19): siRNA sense strand
acaagaagagcuuaagaag

SEQ ID NO: 1826783 - RNA, 19 nt, Homo sapiens
  misc_RNA (1)...(19): siRNA sense strand
uuugcaagcugauaaugau

SEQ ID NO: 1826784 - RNA, 19 nt, Homo sapiens
  misc_RNA (1)...(19): siRNA sense strand
uacagcaucuucgaaagga

SEQ ID NO: 1826785 - RNA, 19 nt, Homo sapiens
  misc_RNA (1)...(19): siRNA sense strand
gaagaaagcuugucucaac

SEQ ID NO: 1826786 - RNA, 19 nt, Homo sapiens
  misc_RNA (1)...(19): siRNA sense strand
gaauucaccucaagaacau

SEQ ID NO: 1826787 - RNA, 19 nt, Homo sapiens
  misc_RNA (1)...(19): siRNA sense strand
ucaagaacauccaaagugu

SEQ ID NO: 1826788 - RNA, 19 nt, Homo sapiens
  misc_RNA (1)...(19): siRNA sense strand
gagcguccguggucacuga

SEQ ID NO: 1826789 - RNA, 19 nt, Homo sapiens
  misc_RNA (1)...(19): siRNA sense strand
ggaauucaccucaagaaca

SEQ ID NO: 1826790 - RNA, 19 nt, Homo sapiens
  misc_RNA (1)...(19): siRNA sense strand
gcagggaauucaccucaag

SEQ ID NO: 1826791 - RNA, 19 nt, Homo sapiens
  misc_RNA (1)...(19): siRNA sense strand
gaacauccaaagugugaau

SEQ ID NO: 1826792 - RNA, 19 nt, Homo sapiens
  misc_RNA (1)...(19): siRNA sense strand
cauccaaagugugaaugua

SEQ ID NO: 1826793 - RNA, 19 nt, Homo sapiens
  misc_RNA (1)...(19): siRNA sense strand
gaagucauagccacacuca

SEQ ID NO: 1826794 - RNA, 19 nt, Homo sapiens
  misc_RNA (1)...(19): siRNA sense strand
gggaagaaagcuugucuca

SEQ ID NO: 1826795 - RNA, 19 nt, Homo sapiens
  misc_RNA (1)...(19): siRNA sense strand
ggaagaaagcuugucucaa

SEQ ID NO: 1826796 - RNA, 19 nt, Homo sapiens
  misc_RNA (1)...(19): siRNA sense strand
aagaacauccaaaguguga

SEQ ID NO: 1826797 - RNA, 19 nt, Homo sapiens
  misc_RNA (1)...(19): siRNA sense strand
uagccacacucaagaaugg

SEQ ID NO: 1826798 - RNA, 19 nt, Homo sapiens
  misc_RNA (1)...(19): siRNA sense strand
cgcccaaaccgaagucaua

SEQ ID NO: 1826799 - RNA, 19 nt, Homo sapiens
  misc_RNA (1)...(19): siRNA sense strand
acucaagaaugggaagaaa

SEQ ID NO: 1826800 - RNA, 19 nt, Homo sapiens
  misc_RNA (1)...(19): siRNA sense strand
ucgaaaagauacugaacaa

SEQ ID NO: 1826801 - RNA, 19 nt, Homo sapiens
  misc_RNA (1)...(19): siRNA sense strand
agucauagccacacucaag

SEQ ID NO: 1826802 - RNA, 19 nt, Homo sapiens
  misc_RNA (1)...(19): siRNA sense strand
cucaagaacauccaaagug

SEQ ID NO: 1826803 - RNA, 19 nt, Homo sapiens
  misc_RNA (1)...(19): siRNA sense strand
ucauagccacacucaagaa

SEQ ID NO: 1826804 - RNA, 19 nt, Homo sapiens
  misc_RNA (1)...(19): siRNA sense strand
gaaagagcauguaaaugua

SEQ ID NO: 1826805 - RNA, 19 nt, Homo sapiens
  misc_RNA (1)...(19): siRNA sense strand
gaaucaggaucuauuugua

SEQ ID NO: 1826806 - RNA, 19 nt, Homo sapiens
  misc_RNA (1)...(19): siRNA sense strand
gcauguaaauguaguauuc

SEQ ID NO: 1826807 - RNA, 19 nt, Homo sapiens
  misc_RNA (1)...(19): siRNA sense strand
ggaaauaacagccuuaauc

SEQ ID NO: 1826808 - RNA, 19 nt, Homo sapiens
  misc_RNA (1)...(19): siRNA sense strand
gaaaggaauugaagaagag

SEQ ID NO: 1826809 - RNA, 19 nt, Homo sapiens
  misc_RNA (1)...(19): siRNA sense strand
agaaaugucuccagaagaa

SEQ ID NO: 1826810 - RNA, 19 nt, Homo sapiens
  misc_RNA (1)...(19): siRNA sense strand
ucaaagagcagucggauuu

SEQ ID NO: 1826811 - RNA, 19 nt, Homo sapiens
  misc_RNA (1)...(19): siRNA sense strand
guacuugucuugggccuua

SEQ ID NO: 1826812 - RNA, 19 nt, Homo sapiens
  misc_RNA (1)...(19): siRNA sense strand
gcacaaagaagaaauaagu

SEQ ID NO: 1826813 - RNA, 19 nt, Homo sapiens
  misc_RNA (1)...(19): siRNA sense strand
ggaaagugcccaugaaaug

SEQ ID NO: 1826814 - RNA, 19 nt, Homo sapiens
  misc_RNA (1)...(19): siRNA sense strand
ugagagauaugaagaaugu

SEQ ID NO: 1826815 - RNA, 19 nt, Homo sapiens
  misc_RNA (1)...(19): siRNA sense strand
ggaaccaucugccuugaga

SEQ ID NO: 1826816 - RNA, 19 nt, Homo sapiens
  misc_RNA (1)...(19): siRNA sense strand
aagagaagcuaaagagaaa

SEQ ID NO: 1826817 - RNA, 19 nt, Homo sapiens
  misc_RNA (1)...(19): siRNA sense strand
ugaaaggaauugaagaaga

SEQ ID NO: 1826818 - RNA, 19 nt, Homo sapiens
  misc_RNA (1)...(19): siRNA sense strand
agaaagagcauguaaaugu

SEQ ID NO: 1826819 - RNA, 19 nt, Homo sapiens
  misc_RNA (1)...(19): siRNA sense strand
gaaauaacagccuuaaucu

SEQ ID NO: 1826820 - RNA, 19 nt, Homo sapiens
  misc_RNA (1)...(19): siRNA sense strand
gaaagugcccaugaaauga

SEQ ID NO: 1826821 - RNA, 19 nt, Homo sapiens
  misc_RNA (1)...(19): siRNA sense strand
uacauuggauuaccguuua

SEQ ID NO: 1826822 - RNA, 19 nt, Homo sapiens
  misc_RNA (1)...(19): siRNA sense strand
cagagaaacuugguacuug

SEQ ID NO: 1826823 - RNA, 19 nt, Homo sapiens
  misc_RNA (1)...(19): siRNA sense strand
gcacugugguccugggaaa

SEQ ID NO: 1826824 - RNA, 19 nt, Homo sapiens
  misc_RNA (1)...(19): siRNA sense strand
gcaaagacagcagguguaa

SEQ ID NO: 1826825 - RNA, 19 nt, Homo sapiens
  misc_RNA (1)...(19): siRNA sense strand
gauuaccguuuauuccaua

SEQ ID NO: 1826826 - RNA, 19 nt, Homo sapiens
  misc_RNA (1)...(19): siRNA sense strand
gcaaugagagauaugaaga

SEQ ID NO: 1826827 - RNA, 19 nt, Homo sapiens
  misc_RNA (1)...(19): siRNA sense strand
gagcacaaauccaucaucu

SEQ ID NO: 1826828 - RNA, 19 nt, Homo sapiens
  misc_RNA (1)...(19): siRNA sense strand
cguggaaguucuuggaaua

SEQ ID NO: 1826829 - RNA, 19 nt, Homo sapiens
  misc_RNA (1)...(19): siRNA sense strand
guauuugacuggaaugguu

SEQ ID NO: 1826830 - RNA, 19 nt, Homo sapiens
  misc_RNA (1)...(19): siRNA sense strand
gaugggucguuucaccuua

SEQ ID NO: 1826831 - RNA, 19 nt, Homo sapiens
  misc_RNA (1)...(19): siRNA sense strand
guggauaaguacaaggaua

SEQ ID NO: 1826832 - RNA, 19 nt, Homo sapiens
  misc_RNA (1)...(19): siRNA sense strand
gaaagagaagcuaaagaga

SEQ ID NO: 1826833 - RNA, 19 nt, Homo sapiens
  misc_RNA (1)...(19): siRNA sense strand
ggagauucuuccaggguuu

SEQ ID NO: 1826834 - RNA, 19 nt, Homo sapiens
  misc_RNA (1)...(19): siRNA sense strand
aaaggacgcuugaaaagua

SEQ ID NO: 1826835 - RNA, 19 nt, Homo sapiens
  misc_RNA (1)...(19): siRNA sense strand
gguaagaccauugcaauug

SEQ ID NO: 1826836 - RNA, 19 nt, Homo sapiens
  misc_RNA (1)...(19): siRNA sense strand
gccaggugcuccuaagaaa

SEQ ID NO: 1826837 - RNA, 19 nt, Homo sapiens
  misc_RNA (1)...(19): siRNA sense strand
ggagcacaaagaagaaaua

SEQ ID NO: 1826838 - RNA, 19 nt, Homo sapiens
  misc_RNA (1)...(19): siRNA sense strand
ggaaucaggaucuauuugu

SEQ ID NO: 1826839 - RNA, 19 nt, Homo sapiens
  misc_RNA (1)...(19): siRNA sense strand
gacaagagaacaugcaaug

SEQ ID NO: 1826840 - RNA, 19 nt, Homo sapiens
  misc_RNA (1)...(19): siRNA sense strand
guaagaccauugcaauugg

SEQ ID NO: 1826841 - RNA, 19 nt, Homo sapiens
  misc_RNA (1)...(19): siRNA sense strand
cacauuugaugcccagaua

SEQ ID NO: 1826842 - RNA, 19 nt, Homo sapiens
  misc_RNA (1)...(19): siRNA sense strand
aaagagaagcuaaagagaa

SEQ ID NO: 1826843 - RNA, 19 nt, Homo sapiens
  misc_RNA (1)...(19): siRNA sense strand
gaggaaagugcccaugaaa

SEQ ID NO: 1826844 - RNA, 19 nt, Homo sapiens
  misc_RNA (1)...(19): siRNA sense strand
ugaagaauguaaggagaaa

SEQ ID NO: 1826845 - RNA, 19 nt, Homo sapiens
  misc_RNA (1)...(19): siRNA sense strand
agacacaaaucaggaagaa

SEQ ID NO: 1826846 - RNA, 19 nt, Homo sapiens
  misc_RNA (1)...(19): siRNA sense strand
caagaucaaguaugcauug

SEQ ID NO: 1826847 - RNA, 19 nt, Homo sapiens
  misc_RNA (1)...(19): siRNA sense strand
guacauuggauuaccguuu

SEQ ID NO: 1826848 - RNA, 19 nt, Homo sapiens
  misc_RNA (1)...(19): siRNA sense strand
gcuggcaagucaaccauug

SEQ ID NO: 1826849 - RNA, 19 nt, Homo sapiens
  misc_RNA (1)...(19): siRNA sense strand
gccagcagcuugugaugau

SEQ ID NO: 1826850 - RNA, 19 nt, Homo sapiens
  misc_RNA (1)...(19): siRNA sense strand
gaacuuucagaaccuauug

SEQ ID NO: 1826851 - RNA, 19 nt, Homo sapiens
  misc_RNA (1)...(19): siRNA sense strand
gaaacuugguacuugucuu

SEQ ID NO: 1826852 - RNA, 19 nt, Homo sapiens
  misc_RNA (1)...(19): siRNA sense strand
ugauuuggcugugcuggua

SEQ ID NO: 1826853 - RNA, 19 nt, Homo sapiens
  misc_RNA (1)...(19): siRNA sense strand
aagaagcauuucacaauuc

SEQ ID NO: 1826854 - RNA, 19 nt, Homo sapiens
  misc_RNA (1)...(19): siRNA sense strand
gaugauguagagacugaua

SEQ ID NO: 1826855 - RNA, 19 nt, Homo sapiens
  misc_RNA (1)...(19): siRNA sense strand
gagcacaaagaagaaauaa

SEQ ID NO: 1826856 - RNA, 19 nt, Homo sapiens
  misc_RNA (1)...(19): siRNA sense strand
ggacagacaagagaacaug

SEQ ID NO: 1826857 - RNA, 19 nt, Homo sapiens
  misc_RNA (1)...(19): siRNA sense strand
ugacuggaaugguugacaa

SEQ ID NO: 1826858 - RNA, 19 nt, Homo sapiens
  misc_RNA (1)...(19): siRNA sense strand
uuuaaagacuucccucaga

SEQ ID NO: 1826859 - RNA, 19 nt, Homo sapiens
  misc_RNA (1)...(19): siRNA sense strand
ccgaugauguagagacuga

SEQ ID NO: 1826860 - RNA, 19 nt, Homo sapiens
  misc_RNA (1)...(19): siRNA sense strand
ggagaaacuagugccauuu

SEQ ID NO: 1826861 - RNA, 19 nt, Homo sapiens
  misc_RNA (1)...(19): siRNA sense strand
acagaaaugucuccagaag

SEQ ID NO: 1826862 - RNA, 19 nt, Homo sapiens
  misc_RNA (1)...(19): siRNA sense strand
agaagugggucgugccuau

SEQ ID NO: 1826863 - RNA, 19 nt, Homo sapiens
  misc_RNA (1)...(19): siRNA sense strand
agaggaaagugcccaugaa

SEQ ID NO: 1826864 - RNA, 19 nt, Homo sapiens
  misc_RNA (1)...(19): siRNA sense strand
uaacagccuuaaucugcuu

SEQ ID NO: 1826865 - RNA, 19 nt, Homo sapiens
  misc_RNA (1)...(19): siRNA sense strand
cuuccaggguuuauacuuu

SEQ ID NO: 1826866 - RNA, 19 nt, Homo sapiens
  misc_RNA (1)...(19): siRNA sense strand
gguaaucucagccaggaaa

SEQ ID NO: 1826867 - RNA, 19 nt, Homo sapiens
  misc_RNA (1)...(19): siRNA sense strand
ugaaagagaagcuaaagag

SEQ ID NO: 1826868 - RNA, 19 nt, Homo sapiens
  misc_RNA (1)...(19): siRNA sense strand
gcacaacguggaaguucuu

SEQ ID NO: 1826869 - RNA, 19 nt, Homo sapiens
  misc_RNA (1)...(19): siRNA sense strand
uuaaagacuucccucagau

SEQ ID NO: 1826870 - RNA, 19 nt, Homo sapiens
  misc_RNA (1)...(19): siRNA sense strand
cguagaugcuggcaaguca

SEQ ID NO: 1826871 - RNA, 19 nt, Homo sapiens
  misc_RNA (1)...(19): siRNA sense strand
ggauuaccguuuauuccau

SEQ ID NO: 1826872 - RNA, 19 nt, Homo sapiens
  misc_RNA (1)...(19): siRNA sense strand
gaaaauggagagacagaaa

SEQ ID NO: 1826873 - RNA, 19 nt, Homo sapiens
  misc_RNA (1)...(19): siRNA sense strand
caugggagcacaaagaaga

SEQ ID NO: 1826874 - RNA, 19 nt, Homo sapiens
  misc_RNA (1)...(19): siRNA sense strand
gaggaaaucccaaaaccua

SEQ ID NO: 1826875 - RNA, 19 nt, Homo sapiens
  misc_RNA (1)...(19): siRNA sense strand
gcccagauagugauuauag

SEQ ID NO: 1826876 - RNA, 19 nt, Homo sapiens
  misc_RNA (1)...(19): siRNA sense strand
gcuggaaucaggaucuauu

SEQ ID NO: 1826877 - RNA, 19 nt, Homo sapiens
  misc_RNA (1)...(19): siRNA sense strand
ugccaauuguggauaagua

SEQ ID NO: 1826878 - RNA, 19 nt, Homo sapiens
  misc_RNA (1)...(19): siRNA sense strand
gaugauccaacaguaaauu

SEQ ID NO: 1826879 - RNA, 19 nt, Homo sapiens
  misc_RNA (1)...(19): siRNA sense strand
agagaaacuugguacuugu

SEQ ID NO: 1826880 - RNA, 19 nt, Homo sapiens
  misc_RNA (1)...(19): siRNA sense strand
ccuaagaaagagcauguaa

SEQ ID NO: 1826881 - RNA, 19 nt, Homo sapiens
  misc_RNA (1)...(19): siRNA sense strand
gagauucuuccaggguuua

SEQ ID NO: 1826882 - RNA, 19 nt, Homo sapiens
  misc_RNA (1)...(19): siRNA sense strand
caacguggaaguucuugga

SEQ ID NO: 1826883 - RNA, 19 nt, Homo sapiens
  misc_RNA (1)...(19): siRNA sense strand
aggagaaacuagugccauu

SEQ ID NO: 1826884 - RNA, 19 nt, Homo sapiens
  misc_RNA (1)...(19): siRNA sense strand
ggagcaaugagagauauga

SEQ ID NO: 1826885 - RNA, 19 nt, Homo sapiens
  misc_RNA (1)...(19): siRNA sense strand
uaagaccauugcaauugga

SEQ ID NO: 1826886 - RNA, 19 nt, Homo sapiens
  misc_RNA (1)...(19): siRNA sense strand
guaaaggccagcagcuugu

SEQ ID NO: 1826887 - RNA, 19 nt, Homo sapiens
  misc_RNA (1)...(19): siRNA sense strand
ggaacuuucagaaccuauu

SEQ ID NO: 1826888 - RNA, 19 nt, Homo sapiens
  misc_RNA (1)...(19): siRNA sense strand
aguaugcauugcucgcuua

SEQ ID NO: 1826889 - RNA, 19 nt, Homo sapiens
  misc_RNA (1)...(19): siRNA sense strand
caggugcuccuaagaaaga

SEQ ID NO: 1826890 - RNA, 19 nt, Homo sapiens
  misc_RNA (1)...(19): siRNA sense strand
uggauaauuugccgaacuu

SEQ ID NO: 1826891 - RNA, 19 nt, Homo sapiens
  misc_RNA (1)...(19): siRNA sense strand
gaauguaaggagaaacuag

SEQ ID NO: 1826892 - RNA, 19 nt, Homo sapiens
  misc_RNA (1)...(19): siRNA sense strand
agacaaggguaaaacagua

SEQ ID NO: 1826893 - RNA, 19 nt, Homo sapiens
  misc_RNA (1)...(19): siRNA sense strand
uucagaaccuauuguagaa

SEQ ID NO: 1826894 - RNA, 19 nt, Homo sapiens
  misc_RNA (1)...(19): siRNA sense strand
aaacuugguacuugucuug

SEQ ID NO: 1826895 - RNA, 19 nt, Homo sapiens
  misc_RNA (1)...(19): siRNA sense strand
gagaugaggguaagaccau

SEQ ID NO: 1826896 - RNA, 19 nt, Homo sapiens
  misc_RNA (1)...(19): siRNA sense strand
ggugaaaaccucaaaauca

SEQ ID NO: 1826897 - RNA, 19 nt, Homo sapiens
  misc_RNA (1)...(19): siRNA sense strand
acaaggauaugggcacugu

SEQ ID NO: 1826898 - RNA, 19 nt, Homo sapiens
  misc_RNA (1)...(19): siRNA sense strand
gauaauuugccgaacuuca

SEQ ID NO: 1826899 - RNA, 19 nt, Homo sapiens
  misc_RNA (1)...(19): siRNA sense strand
cuaagaaagagcauguaaa

SEQ ID NO: 1826900 - RNA, 19 nt, Homo sapiens
  misc_RNA (1)...(19): siRNA sense strand
ggcaaagacagcaggugua

SEQ ID NO: 1826901 - RNA, 19 nt, Homo sapiens
  misc_RNA (1)...(19): siRNA sense strand
cuugagaccuuuaaagacu

SEQ ID NO: 1826902 - RNA, 19 nt, Homo sapiens
  misc_RNA (1)...(19): siRNA sense strand
gccuugagaccuuuaaaga

SEQ ID NO: 1826903 - RNA, 19 nt, Homo sapiens
  misc_RNA (1)...(19): siRNA sense strand
gagcaaugagagauaugaa

SEQ ID NO: 1826904 - RNA, 19 nt, Homo sapiens
  misc_RNA (1)...(19): siRNA sense strand
gaacacaauuaaacgcuua

SEQ ID NO: 1826905 - RNA, 19 nt, Homo sapiens
  misc_RNA (1)...(19): siRNA sense strand
ggacaaggcugcuacuuca

SEQ ID NO: 1826906 - RNA, 19 nt, Homo sapiens
  misc_RNA (1)...(19): siRNA sense strand
gaacuaugaccgagaagua

SEQ ID NO: 1826907 - RNA, 19 nt, Homo sapiens
  misc_RNA (1)...(19): siRNA sense strand
ggucacaggucaacuaguu

SEQ ID NO: 1826908 - RNA, 19 nt, Homo sapiens
  misc_RNA (1)...(19): siRNA sense strand
cugagaagcugaacuauga

SEQ ID NO: 1826909 - RNA, 19 nt, Homo sapiens
  misc_RNA (1)...(19): siRNA sense strand
gcagaaaccuagucagucu

SEQ ID NO: 1826910 - RNA, 19 nt, Homo sapiens
  misc_RNA (1)...(19): siRNA sense strand
gaucaucgccacagucauu

SEQ ID NO: 1826911 - RNA, 19 nt, Homo sapiens
  misc_RNA (1)...(19): siRNA sense strand
gccaugagcuccauagcaa

SEQ ID NO: 1826912 - RNA, 19 nt, Homo sapiens
  misc_RNA (1)...(19): siRNA sense strand
gauccucaaugcccacuuu

SEQ ID NO: 1826913 - RNA, 19 nt, Homo sapiens
  misc_RNA (1)...(19): siRNA sense strand
gcaaugcccucuccagucu

SEQ ID NO: 1826914 - RNA, 19 nt, Homo sapiens
  misc_RNA (1)...(19): siRNA sense strand
caacauggcgggacagcua

SEQ ID NO: 1826915 - RNA, 19 nt, Homo sapiens
  misc_RNA (1)...(19): siRNA sense strand
uagaggaaacccagcauua

SEQ ID NO: 1826916 - RNA, 19 nt, Homo sapiens
  misc_RNA (1)...(19): siRNA sense strand
cagcgaaucucaccaacau

SEQ ID NO: 1826917 - RNA, 19 nt, Homo sapiens
  misc_RNA (1)...(19): siRNA sense strand
gaggagauccgagaauuug

SEQ ID NO: 1826918 - RNA, 19 nt, Homo sapiens
  misc_RNA (1)...(19): siRNA sense strand
gaguuugguucugcaauaa

SEQ ID NO: 1826919 - RNA, 19 nt, Homo sapiens
  misc_RNA (1)...(19): siRNA sense strand
agaguuugguucugcaaua

SEQ ID NO: 1826920 - RNA, 19 nt, Homo sapiens
  misc_RNA (1)...(19): siRNA sense strand
ggaggagauccgagaauuu

SEQ ID NO: 1826921 - RNA, 19 nt, Homo sapiens
  misc_RNA (1)...(19): siRNA sense strand
gcugaacuaugaccgagaa

SEQ ID NO: 1826922 - RNA, 19 nt, Homo sapiens
  misc_RNA (1)...(19): siRNA sense strand
ugaaaugaaugcggaguug

SEQ ID NO: 1826923 - RNA, 19 nt, Homo sapiens
  misc_RNA (1)...(19): siRNA sense strand
cucuacagcugguuaauaa

SEQ ID NO: 1826924 - RNA, 19 nt, Homo sapiens
  misc_RNA (1)...(19): siRNA sense strand
ucacaggccuuuggcaaug

SEQ ID NO: 1826925 - RNA, 19 nt, Homo sapiens
  misc_RNA (1)...(19): siRNA sense strand
ggacaggcucucagugcua

SEQ ID NO: 1826926 - RNA, 19 nt, Homo sapiens
  misc_RNA (1)...(19): siRNA sense strand
gagaaguaguuagaguuug

SEQ ID NO: 1826927 - RNA, 19 nt, Homo sapiens
  misc_RNA (1)...(19): siRNA sense strand
gcacagcaguuagcuucug

SEQ ID NO: 1826928 - RNA, 19 nt, Homo sapiens
  misc_RNA (1)...(19): siRNA sense strand
gcccugaagaacacaauua

SEQ ID NO: 1826929 - RNA, 19 nt, Homo sapiens
  misc_RNA (1)...(19): siRNA sense strand
cgagaaguaguuagaguuu

SEQ ID NO: 1826930 - RNA, 19 nt, Homo sapiens
  misc_RNA (1)...(19): siRNA sense strand
caacagcgaaucucaccaa

SEQ ID NO: 1826931 - RNA, 19 nt, Homo sapiens
  misc_RNA (1)...(19): siRNA sense strand
ccauuccacugaugccuaa

SEQ ID NO: 1826932 - RNA, 19 nt, Homo sapiens
  misc_RNA (1)...(19): siRNA sense strand
gcacaaggacagauuaucg

SEQ ID NO: 1826933 - RNA, 19 nt, Homo sapiens
  misc_RNA (1)...(19): siRNA sense strand
gaggaaacccagcauuauc

SEQ ID NO: 1826934 - RNA, 19 nt, Homo sapiens
  misc_RNA (1)...(19): siRNA sense strand
gaaaugaaugcggaguuga

SEQ ID NO: 1826935 - RNA, 19 nt, Homo sapiens
  misc_RNA (1)...(19): siRNA sense strand
uggaggagauccgagaauu

SEQ ID NO: 1826936 - RNA, 19 nt, Homo sapiens
  misc_RNA (1)...(19): siRNA sense strand
ccacggcagucccuuugga

SEQ ID NO: 1826937 - RNA, 19 nt, Homo sapiens
  misc_RNA (1)...(19): siRNA sense strand
ggacauggccugccuucac

SEQ ID NO: 1826938 - RNA, 19 nt, Homo sapiens
  misc_RNA (1)...(19): siRNA sense strand
cagauuaucgggaccauuc

SEQ ID NO: 1826939 - RNA, 19 nt, Homo sapiens
  misc_RNA (1)...(19): siRNA sense strand
ugcagaaccugaccgaguu

SEQ ID NO: 1826940 - RNA, 19 nt, Homo sapiens
  misc_RNA (1)...(19): siRNA sense strand
agaaguaguuagaguuugg

SEQ ID NO: 1826941 - RNA, 19 nt, Homo sapiens
  misc_RNA (1)...(19): siRNA sense strand
gaaccugaccgaguuuauc

SEQ ID NO: 1826942 - RNA, 19 nt, Homo sapiens
  misc_RNA (1)...(19): siRNA sense strand
gcacucagggcuugcaagu

SEQ ID NO: 1826943 - RNA, 19 nt, Homo sapiens
  misc_RNA (1)...(19): siRNA sense strand
gcugagaagcugaacuaug

SEQ ID NO: 1826944 - RNA, 19 nt, Homo sapiens
  misc_RNA (1)...(19): siRNA sense strand
ggacaucaccccuaaaagu

SEQ ID NO: 1826945 - RNA, 19 nt, Homo sapiens
  misc_RNA (1)...(19): siRNA sense strand
ugccaaagcuuuuaaaauc

SEQ ID NO: 1826946 - RNA, 19 nt, Homo sapiens
  misc_RNA (1)...(19): siRNA sense strand
gcauccaugucucaaaguc

SEQ ID NO: 1826947 - RNA, 19 nt, Homo sapiens
  misc_RNA (1)...(19): siRNA sense strand
guuugguucugcaauaaga

SEQ ID NO: 1826948 - RNA, 19 nt, Homo sapiens
  misc_RNA (1)...(19): siRNA sense strand
guuaauaauccacuagcaa

SEQ ID NO: 1826949 - RNA, 19 nt, Homo sapiens
  misc_RNA (1)...(19): siRNA sense strand
gcagaaccugaccgaguuu

SEQ ID NO: 1826950 - RNA, 19 nt, Homo sapiens
  misc_RNA (1)...(19): siRNA sense strand
gaaacccagcauuaucaga

SEQ ID NO: 1826951 - RNA, 19 nt, Homo sapiens
  misc_RNA (1)...(19): siRNA sense strand
guugagaggugaggacaag

SEQ ID NO: 1826952 - RNA, 19 nt, Homo sapiens
  misc_RNA (1)...(19): siRNA sense strand
aagcauccaugucucaaag

SEQ ID NO: 1826953 - RNA, 19 nt, Homo sapiens
  misc_RNA (1)...(19): siRNA sense strand
gcaaggacugguucucaca

SEQ ID NO: 1826954 - RNA, 19 nt, Homo sapiens
  misc_RNA (1)...(19): siRNA sense strand
caaccagccaauccucauu

SEQ ID NO: 1826955 - RNA, 19 nt, Homo sapiens
  misc_RNA (1)...(19): siRNA sense strand
ugaccgagaaguaguuaga

SEQ ID NO: 1826956 - RNA, 19 nt, Homo sapiens
  misc_RNA (1)...(19): siRNA sense strand
gcugguuaauaauccacua

SEQ ID NO: 1826957 - RNA, 19 nt, Homo sapiens
  misc_RNA (1)...(19): siRNA sense strand
gcagccggaggcauuauga

SEQ ID NO: 1826958 - RNA, 19 nt, Homo sapiens
  misc_RNA (1)...(19): siRNA sense strand
ggcaagcccugaagaacac

SEQ ID NO: 1826959 - RNA, 19 nt, Homo sapiens
  misc_RNA (1)...(19): siRNA sense strand
gcuaggaggccagcaagga

SEQ ID NO: 1826960 - RNA, 19 nt, Homo sapiens
  misc_RNA (1)...(19): siRNA sense strand
guaguuagaguuugguucu

SEQ ID NO: 1826961 - RNA, 19 nt, Homo sapiens
  misc_RNA (1)...(19): siRNA sense strand
cuacagcugguuaauaauc

SEQ ID NO: 1826962 - RNA, 19 nt, Homo sapiens
  misc_RNA (1)...(19): siRNA sense strand
ccucuacagcugguuaaua

SEQ ID NO: 1826963 - RNA, 19 nt, Homo sapiens
  misc_RNA (1)...(19): siRNA sense strand
caacaccaggccagucaga

SEQ ID NO: 1826964 - RNA, 19 nt, Homo sapiens
  misc_RNA (1)...(19): siRNA sense strand
gaaucucaccaacauccaa

SEQ ID NO: 1826965 - RNA, 19 nt, Homo sapiens
  misc_RNA (1)...(19): siRNA sense strand
gguuaauaauccacuagca

SEQ ID NO: 1826966 - RNA, 19 nt, Homo sapiens
  misc_RNA (1)...(19): siRNA sense strand
gcgaggacacucccagcaa

SEQ ID NO: 1826967 - RNA, 19 nt, Homo sapiens
  misc_RNA (1)...(19): siRNA sense strand
uagcuggacaagucaguaa

SEQ ID NO: 1826968 - RNA, 19 nt, Homo sapiens
  misc_RNA (1)...(19): siRNA sense strand
cuacaucucagcugcaaca

SEQ ID NO: 1826969 - RNA, 19 nt, Homo sapiens
  misc_RNA (1)...(19): siRNA sense strand
guaagcccuugcugucagu

SEQ ID NO: 1826970 - RNA, 19 nt, Homo sapiens
  misc_RNA (1)...(19): siRNA sense strand
auaauccacuagcaaguca

SEQ ID NO: 1826971 - RNA, 19 nt, Homo sapiens
  misc_RNA (1)...(19): siRNA sense strand
agaggaaacccagcauuau

SEQ ID NO: 1826972 - RNA, 19 nt, Homo sapiens
  misc_RNA (1)...(19): siRNA sense strand
caagcauccaugucucaaa

SEQ ID NO: 1826973 - RNA, 19 nt, Homo sapiens
  misc_RNA (1)...(19): siRNA sense strand
ccucauucccuucaacaug

SEQ ID NO: 1826974 - RNA, 19 nt, Homo sapiens
  misc_RNA (1)...(19): siRNA sense strand
cugaagaacacaauuaaac

SEQ ID NO: 1826975 - RNA, 19 nt, Homo sapiens
  misc_RNA (1)...(19): siRNA sense strand
cagaucaucgccacaguca

SEQ ID NO: 1826976 - RNA, 19 nt, Homo sapiens
  misc_RNA (1)...(19): siRNA sense strand
cagcaaggacugguucuca

SEQ ID NO: 1826977 - RNA, 19 nt, Homo sapiens
  misc_RNA (1)...(19): siRNA sense strand
uuagucagcaauccucaaa

SEQ ID NO: 1826978 - RNA, 19 nt, Homo sapiens
  misc_RNA (1)...(19): siRNA sense strand
ccuguggaaucaaaugaca

SEQ ID NO: 1826979 - RNA, 19 nt, Homo sapiens
  misc_RNA (1)...(19): siRNA sense strand
acaaggcugcuacuucaga

SEQ ID NO: 1826980 - RNA, 19 nt, Homo sapiens
  misc_RNA (1)...(19): siRNA sense strand
aggaaacccagcauuauca

SEQ ID NO: 1826981 - RNA, 19 nt, Homo sapiens
  misc_RNA (1)...(19): siRNA sense strand
ccugaagaacacaauuaaa

SEQ ID NO: 1826982 - RNA, 19 nt, Homo sapiens
  misc_RNA (1)...(19): siRNA sense strand
uugcugagaagcugaacua

SEQ ID NO: 1826983 - RNA, 19 nt, Homo sapiens
  misc_RNA (1)...(19): siRNA sense strand
ccgcagaaaccuagucagu

SEQ ID NO: 1826984 - RNA, 19 nt, Homo sapiens
  misc_RNA (1)...(19): siRNA sense strand
gccgccagcuccuacaucu

SEQ ID NO: 1826985 - RNA, 19 nt, Homo sapiens
  misc_RNA (1)...(19): siRNA sense strand
ccggaggcauuaugacucu

SEQ ID NO: 1826986 - RNA, 19 nt, Homo sapiens
  misc_RNA (1)...(19): siRNA sense strand
gggccacagccacuucuga

SEQ ID NO: 1826987 - RNA, 19 nt, Homo sapiens
  misc_RNA (1)...(19): siRNA sense strand
ccgagaaguaguuagaguu

SEQ ID NO: 1826988 - RNA, 19 nt, Homo sapiens
  misc_RNA (1)...(19): siRNA sense strand
cggcaggcuuccucuucuu

SEQ ID NO: 1826989 - RNA, 19 nt, Homo sapiens
  misc_RNA (1)...(19): siRNA sense strand
cagccaagcauccaugucu

SEQ ID NO: 1826990 - RNA, 19 nt, Homo sapiens
  misc_RNA (1)...(19): siRNA sense strand
uaaugcacaaggacagauu

SEQ ID NO: 1826991 - RNA, 19 nt, Homo sapiens
  misc_RNA (1)...(19): siRNA sense strand
caaccagaaccaaccaucu

SEQ ID NO: 1826992 - RNA, 19 nt, Homo sapiens
  misc_RNA (1)...(19): siRNA sense strand
gugaaaugaaugcggaguu

SEQ ID NO: 1826993 - RNA, 19 nt, Homo sapiens
  misc_RNA (1)...(19): siRNA sense strand
ucagugcggagugaaauga

SEQ ID NO: 1826994 - RNA, 19 nt, Homo sapiens
  misc_RNA (1)...(19): siRNA sense strand
aaagugcccagaagaucaa

SEQ ID NO: 1826995 - RNA, 19 nt, Homo sapiens
  misc_RNA (1)...(19): siRNA sense strand
cgccagcuccuacaucuca

SEQ ID NO: 1826996 - RNA, 19 nt, Homo sapiens
  misc_RNA (1)...(19): siRNA sense strand
cuuuggagcccuuaacaga

SEQ ID NO: 1826997 - RNA, 19 nt, Homo sapiens
  misc_RNA (1)...(19): siRNA sense strand
gcuugcgccuguggaauca

SEQ ID NO: 1826998 - RNA, 19 nt, Homo sapiens
  misc_RNA (1)...(19): siRNA sense strand
gagcgugggccaguuaguc

SEQ ID NO: 1826999 - RNA, 19 nt, Homo sapiens
  misc_RNA (1)...(19): siRNA sense strand
ccaauccucauucccuuca

SEQ ID NO: 1827000 - RNA, 19 nt, Homo sapiens
  misc_RNA (1)...(19): siRNA sense strand
agaggcaagcccugaagaa

SEQ ID NO: 1827001 - RNA, 19 nt, Homo sapiens
  misc_RNA (1)...(19): siRNA sense strand
ugaagaacacaauuaaacg

SEQ ID NO: 1827002 - RNA, 19 nt, Homo sapiens
  misc_RNA (1)...(19): siRNA sense strand
ucugacggcacagcaguua

SEQ ID NO: 1827003 - RNA, 19 nt, Homo sapiens
  misc_RNA (1)...(19): siRNA sense strand
cccugaagaacacaauuaa

SEQ ID NO: 1827004 - RNA, 19 nt, Homo sapiens
  misc_RNA (1)...(19): siRNA sense strand
gccagaaugucacugaaua

SEQ ID NO: 1827005 - RNA, 19 nt, Homo sapiens
  misc_RNA (1)...(19): siRNA sense strand
ggaagcccaugaccacuaa

SEQ ID NO: 1827006 - RNA, 19 nt, Homo sapiens
  misc_RNA (1)...(19): siRNA sense strand
gugcacaacugguacaauu

SEQ ID NO: 1827007 - RNA, 19 nt, Homo sapiens
  misc_RNA (1)...(19): siRNA sense strand
gcaagaugaucaacgacaa

SEQ ID NO: 1827008 - RNA, 19 nt, Homo sapiens
  misc_RNA (1)...(19): siRNA sense strand
uaacagagaacacguccua

SEQ ID NO: 1827009 - RNA, 19 nt, Homo sapiens
  misc_RNA (1)...(19): siRNA sense strand
gaacacguccuacuacauc

SEQ ID NO: 1827010 - RNA, 19 nt, Homo sapiens
  misc_RNA (1)...(19): siRNA sense strand
ggaacaaggugcugaacca

SEQ ID NO: 1827011 - RNA, 19 nt, Homo sapiens
  misc_RNA (1)...(19): siRNA sense strand
gagcgggacuugagcaaca

SEQ ID NO: 1827012 - RNA, 19 nt, Homo sapiens
  misc_RNA (1)...(19): siRNA sense strand
gccaagagguggacuacau

SEQ ID NO: 1827013 - RNA, 19 nt, Homo sapiens
  misc_RNA (1)...(19): siRNA sense strand
gagcagagcgacaguagug

SEQ ID NO: 1827014 - RNA, 19 nt, Homo sapiens
  misc_RNA (1)...(19): siRNA sense strand
gagaacacguccuacuaca

SEQ ID NO: 1827015 - RNA, 19 nt, Homo sapiens
  misc_RNA (1)...(19): siRNA sense strand
gcacaacugguacaauuuc

SEQ ID NO: 1827016 - RNA, 19 nt, Homo sapiens
  misc_RNA (1)...(19): siRNA sense strand
cagagaacacguccuacua

SEQ ID NO: 1827017 - RNA, 19 nt, Homo sapiens
  misc_RNA (1)...(19): siRNA sense strand
gaagacgccacccaagaga

SEQ ID NO: 1827018 - RNA, 19 nt, Homo sapiens
  misc_RNA (1)...(19): siRNA sense strand
gagaagaagcgcaggaaag

SEQ ID NO: 1827019 - RNA, 19 nt, Homo sapiens
  misc_RNA (1)...(19): siRNA sense strand
aagaagagccugagagcaa

SEQ ID NO: 1827020 - RNA, 19 nt, Homo sapiens
  misc_RNA (1)...(19): siRNA sense strand
gcaaaucaggcaggaaguu

SEQ ID NO: 1827021 - RNA, 19 nt, Homo sapiens
  misc_RNA (1)...(19): siRNA sense strand
acaaggugcugaaccacuu

SEQ ID NO: 1827022 - RNA, 19 nt, Homo sapiens
  misc_RNA (1)...(19): siRNA sense strand
gaauacgucguucgaguuc

SEQ ID NO: 1827023 - RNA, 19 nt, Homo sapiens
  misc_RNA (1)...(19): siRNA sense strand
gcagcgagcagacagugaa

SEQ ID NO: 1827024 - RNA, 19 nt, Homo sapiens
  misc_RNA (1)...(19): siRNA sense strand
gaggagagcgacauugaca

SEQ ID NO: 1827025 - RNA, 19 nt, Homo sapiens
  misc_RNA (1)...(19): siRNA sense strand
ggagaagaagcgcaggaaa

SEQ ID NO: 1827026 - RNA, 19 nt, Homo sapiens
  misc_RNA (1)...(19): siRNA sense strand
cagaggagagcgacauuga

SEQ ID NO: 1827027 - RNA, 19 nt, Homo sapiens
  misc_RNA (1)...(19): siRNA sense strand
caacuuugcuacguggaau

SEQ ID NO: 1827028 - RNA, 19 nt, Homo sapiens
  misc_RNA (1)...(19): siRNA sense strand
caagaagggaggcguaaca

SEQ ID NO: 1827029 - RNA, 19 nt, Homo sapiens
  misc_RNA (1)...(19): siRNA sense strand
gcagccagaaugucacuga

SEQ ID NO: 1827030 - RNA, 19 nt, Homo sapiens
  misc_RNA (1)...(19): siRNA sense strand
caagaugaucaacgacaaa

SEQ ID NO: 1827031 - RNA, 19 nt, Homo sapiens
  misc_RNA (1)...(19): siRNA sense strand
agaagaagcgcaggaaaga

SEQ ID NO: 1827032 - RNA, 19 nt, Homo sapiens
  misc_RNA (1)...(19): siRNA sense strand
uccaguagcucccaagaag

SEQ ID NO: 1827033 - RNA, 19 nt, Homo sapiens
  misc_RNA (1)...(19): siRNA sense strand
gcagacagugaacguguug

SEQ ID NO: 1827034 - RNA, 19 nt, Homo sapiens
  misc_RNA (1)...(19): siRNA sense strand
ccacuaaggaccugcugaa

SEQ ID NO: 1827035 - RNA, 19 nt, Homo sapiens
  misc_RNA (1)...(19): siRNA sense strand
guucgaguuccuaagaaua

SEQ ID NO: 1827036 - RNA, 19 nt, Homo sapiens
  misc_RNA (1)...(19): siRNA sense strand
ggaagcgggugagcgagau

SEQ ID NO: 1827037 - RNA, 19 nt, Homo sapiens
  misc_RNA (1)...(19): siRNA sense strand
ggaggaacaaggugcugaa

SEQ ID NO: 1827038 - RNA, 19 nt, Homo sapiens
  misc_RNA (1)...(19): siRNA sense strand
caucauggcuuuuaaugca

SEQ ID NO: 1827039 - RNA, 19 nt, Homo sapiens
  misc_RNA (1)...(19): siRNA sense strand
gaaguucaagggcaucaag

SEQ ID NO: 1827040 - RNA, 19 nt, Homo sapiens
  misc_RNA (1)...(19): siRNA sense strand
gcccaagggugucgaugag

SEQ ID NO: 1827041 - RNA, 19 nt, Homo sapiens
  misc_RNA (1)...(19): siRNA sense strand
ucagacggcuccaguagcu

SEQ ID NO: 1827042 - RNA, 19 nt, Homo sapiens
  misc_RNA (1)...(19): siRNA sense strand
ggacuucgagggccaagag

SEQ ID NO: 1827043 - RNA, 19 nt, Homo sapiens
  misc_RNA (1)...(19): siRNA sense strand
acaagaaaaucuaccaaga

SEQ ID NO: 1827044 - RNA, 19 nt, Homo sapiens
  misc_RNA (1)...(19): siRNA sense strand
ugaauacgucguucgaguu

SEQ ID NO: 1827045 - RNA, 19 nt, Homo sapiens
  misc_RNA (1)...(19): siRNA sense strand
caacugguacaauuucaca

SEQ ID NO: 1827046 - RNA, 19 nt, Homo sapiens
  misc_RNA (1)...(19): siRNA sense strand
uaaugcagccgacaaaguc

SEQ ID NO: 1827047 - RNA, 19 nt, Homo sapiens
  misc_RNA (1)...(19): siRNA sense strand
aggaggagaugcccgaauc

SEQ ID NO: 1827048 - RNA, 19 nt, Homo sapiens
  misc_RNA (1)...(19): siRNA sense strand
gaaccacuucagcaucaug

SEQ ID NO: 1827049 - RNA, 19 nt, Homo sapiens
  misc_RNA (1)...(19): siRNA sense strand
cagccagaaugucacugaa

SEQ ID NO: 1827050 - RNA, 19 nt, Homo sapiens
  misc_RNA (1)...(19): siRNA sense strand
gaacguguuggcccagauc

SEQ ID NO: 1827051 - RNA, 19 nt, Homo sapiens
  misc_RNA (1)...(19): siRNA sense strand
aagaagacgccacccaaga

SEQ ID NO: 1827052 - RNA, 19 nt, Homo sapiens
  misc_RNA (1)...(19): siRNA sense strand
ggaggacgaccuggagaug

SEQ ID NO: 1827053 - RNA, 19 nt, Homo sapiens
  misc_RNA (1)...(19): siRNA sense strand
caaaucaggcaggaaguuc

SEQ ID NO: 1827054 - RNA, 19 nt, Homo sapiens
  misc_RNA (1)...(19): siRNA sense strand
gaugagcagagcgacagua

SEQ ID NO: 1827055 - RNA, 19 nt, Homo sapiens
  misc_RNA (1)...(19): siRNA sense strand
cggaagcccaugaccacua

SEQ ID NO: 1827056 - RNA, 19 nt, Homo sapiens
  misc_RNA (1)...(19): siRNA sense strand
ccaagagguggacuacaug

SEQ ID NO: 1827057 - RNA, 19 nt, Homo sapiens
  misc_RNA (1)...(19): siRNA sense strand
ggcccuagcagccagaaug

SEQ ID NO: 1827058 - RNA, 19 nt, Homo sapiens
  misc_RNA (1)...(19): siRNA sense strand
gaggaggcucggaggaaga

SEQ ID NO: 1827059 - RNA, 19 nt, Homo sapiens
  misc_RNA (1)...(19): siRNA sense strand
aagaagcgcaggaaagaca

SEQ ID NO: 1827060 - RNA, 19 nt, Homo sapiens
  misc_RNA (1)...(19): siRNA sense strand
cgacaguagugaggagagu

SEQ ID NO: 1827061 - RNA, 19 nt, Homo sapiens
  misc_RNA (1)...(19): siRNA sense strand
cacaacugguacaauuuca

SEQ ID NO: 1827062 - RNA, 19 nt, Homo sapiens
  misc_RNA (1)...(19): siRNA sense strand
ccuagcagccagaauguca

SEQ ID NO: 1827063 - RNA, 19 nt, Homo sapiens
  misc_RNA (1)...(19): siRNA sense strand
agaagaagaaggguucaga

SEQ ID NO: 1827064 - RNA, 19 nt, Homo sapiens
  misc_RNA (1)...(19): siRNA sense strand
gaugaucaacgacaaaaug

SEQ ID NO: 1827065 - RNA, 19 nt, Homo sapiens
  misc_RNA (1)...(19): siRNA sense strand
ggcccaagggugucgauga

SEQ ID NO: 1827066 - RNA, 19 nt, Homo sapiens
  misc_RNA (1)...(19): siRNA sense strand
agagguggacuacauguca

SEQ ID NO: 1827067 - RNA, 19 nt, Homo sapiens
  misc_RNA (1)...(19): siRNA sense strand
caagagguggacuacaugu

SEQ ID NO: 1827068 - RNA, 19 nt, Homo sapiens
  misc_RNA (1)...(19): siRNA sense strand
gaagaagaagaaggguuca

SEQ ID NO: 1827069 - RNA, 19 nt, Homo sapiens
  misc_RNA (1)...(19): siRNA sense strand
ggcaagacaacacccaaca

SEQ ID NO: 1827070 - RNA, 19 nt, Homo sapiens
  misc_RNA (1)...(19): siRNA sense strand
gcgacgugcaggugacuga

SEQ ID NO: 1827071 - RNA, 19 nt, Homo sapiens
  misc_RNA (1)...(19): siRNA sense strand
gcaagacaacacccaacag

SEQ ID NO: 1827072 - RNA, 19 nt, Homo sapiens
  misc_RNA (1)...(19): siRNA sense strand
guucaagggcaucaagaag

SEQ ID NO: 1827073 - RNA, 19 nt, Homo sapiens
  misc_RNA (1)...(19): siRNA sense strand
agacgccacccaagagaga

SEQ ID NO: 1827074 - RNA, 19 nt, Homo sapiens
  misc_RNA (1)...(19): siRNA sense strand
aggaggaggaggagaagaa

SEQ ID NO: 1827075 - RNA, 19 nt, Homo sapiens
  misc_RNA (1)...(19): siRNA sense strand
gaggacgaccuggagaugu

SEQ ID NO: 1827076 - RNA, 19 nt, Homo sapiens
  misc_RNA (1)...(19): siRNA sense strand
ggagagagaugguggauua

SEQ ID NO: 1827077 - RNA, 19 nt, Homo sapiens
  misc_RNA (1)...(19): siRNA sense strand
guacugaaauggcuaaaua

SEQ ID NO: 1827078 - RNA, 19 nt, Homo sapiens
  misc_RNA (1)...(19): siRNA sense strand
guacagagcuggagaugaa

SEQ ID NO: 1827079 - RNA, 19 nt, Homo sapiens
  misc_RNA (1)...(19): siRNA sense strand
gaacgucccuucagucugu

SEQ ID NO: 1827080 - RNA, 19 nt, Homo sapiens
  misc_RNA (1)...(19): siRNA sense strand
cagcagaccuucaguguga

SEQ ID NO: 1827081 - RNA, 19 nt, Homo sapiens
  misc_RNA (1)...(19): siRNA sense strand
ggaaaaggcugguuugauu

SEQ ID NO: 1827082 - RNA, 19 nt, Homo sapiens
  misc_RNA (1)...(19): siRNA sense strand
gaaacgacccuuccuuuga

SEQ ID NO: 1827083 - RNA, 19 nt, Homo sapiens
  misc_RNA (1)...(19): siRNA sense strand
ccacaucgaugcugcuuau

SEQ ID NO: 1827084 - RNA, 19 nt, Homo sapiens
  misc_RNA (1)...(19): siRNA sense strand
gaugaguccugccuaaaug

SEQ ID NO: 1827085 - RNA, 19 nt, Homo sapiens
  misc_RNA (1)...(19): siRNA sense strand
aaacgacccuuccuuugaa

SEQ ID NO: 1827086 - RNA, 19 nt, Homo sapiens
  misc_RNA (1)...(19): siRNA sense strand
ccaggaagaucaucaagca

SEQ ID NO: 1827087 - RNA, 19 nt, Homo sapiens
  misc_RNA (1)...(19): siRNA sense strand
gcugaugaguccugccuaa

SEQ ID NO: 1827088 - RNA, 19 nt, Homo sapiens
  misc_RNA (1)...(19): siRNA sense strand
cagaaacgacccuuccuuu

SEQ ID NO: 1827089 - RNA, 19 nt, Homo sapiens
  misc_RNA (1)...(19): siRNA sense strand
ccuccuuccuguucaguua

SEQ ID NO: 1827090 - RNA, 19 nt, Homo sapiens
  misc_RNA (1)...(19): siRNA sense strand
gagagaugguggauuacau

SEQ ID NO: 1827091 - RNA, 19 nt, Homo sapiens
  misc_RNA (1)...(19): siRNA sense strand
ucuaaaggguccuaauugu

SEQ ID NO: 1827092 - RNA, 19 nt, Homo sapiens
  misc_RNA (1)...(19): siRNA sense strand
uaaaggaaauagcuaaagc

SEQ ID NO: 1827093 - RNA, 19 nt, Homo sapiens
  misc_RNA (1)...(19): siRNA sense strand
gguuugauuucccuuguga

SEQ ID NO: 1827094 - RNA, 19 nt, Homo sapiens
  misc_RNA (1)...(19): siRNA sense strand
acaaguuaaucauccguuu

SEQ ID NO: 1827095 - RNA, 19 nt, Homo sapiens
  misc_RNA (1)...(19): siRNA sense strand
gccgacuccuucaccuuua

SEQ ID NO: 1827096 - RNA, 19 nt, Homo sapiens
  misc_RNA (1)...(19): siRNA sense strand
ggacauugaacgaaucauc

SEQ ID NO: 1827097 - RNA, 19 nt, Homo sapiens
  misc_RNA (1)...(19): siRNA sense strand
cagaaaauguguuaaagga

SEQ ID NO: 1827098 - RNA, 19 nt, Homo sapiens
  misc_RNA (1)...(19): siRNA sense strand
ugauuucccuugugaagau

SEQ ID NO: 1827099 - RNA, 19 nt, Homo sapiens
  misc_RNA (1)...(19): siRNA sense strand
uaaaggguccuaauugucu

SEQ ID NO: 1827100 - RNA, 19 nt, Homo sapiens
  misc_RNA (1)...(19): siRNA sense strand
cuaauugucucacagaaaa

SEQ ID NO: 1827101 - RNA, 19 nt, Homo sapiens
  misc_RNA (1)...(19): siRNA sense strand
aaccucaucucccaaauca

SEQ ID NO: 1827102 - RNA, 19 nt, Homo sapiens
  misc_RNA (1)...(19): siRNA sense strand
uggauuacaucugccagua

SEQ ID NO: 1827103 - RNA, 19 nt, Homo sapiens
  misc_RNA (1)...(19): siRNA sense strand
gacuccagcugcccuguug

SEQ ID NO: 1827104 - RNA, 19 nt, Homo sapiens
  misc_RNA (1)...(19): siRNA sense strand
cagaagacaugaugaugcu

SEQ ID NO: 1827105 - RNA, 19 nt, Homo sapiens
  misc_RNA (1)...(19): siRNA sense strand
agaaggccaucgaggaaga

SEQ ID NO: 1827106 - RNA, 19 nt, Homo sapiens
  misc_RNA (1)...(19): siRNA sense strand
gaaaaggcugguuugauuu

SEQ ID NO: 1827107 - RNA, 19 nt, Homo sapiens
  misc_RNA (1)...(19): siRNA sense strand
gaaccucaucucccaaauc

SEQ ID NO: 1827108 - RNA, 19 nt, Homo sapiens
  misc_RNA (1)...(19): siRNA sense strand
caucgaugcugcuuaugca

SEQ ID NO: 1827109 - RNA, 19 nt, Homo sapiens
  misc_RNA (1)...(19): siRNA sense strand
agaagccacugcccacaga

SEQ ID NO: 1827110 - RNA, 19 nt, Homo sapiens
  misc_RNA (1)...(19): siRNA sense strand
ccucaggcaugccaacuca

SEQ ID NO: 1827111 - RNA, 19 nt, Homo sapiens
  misc_RNA (1)...(19): siRNA sense strand
ucagaaggccaucgaggaa

SEQ ID NO: 1827112 - RNA, 19 nt, Homo sapiens
  misc_RNA (1)...(19): siRNA sense strand
gaacaaaauccuggaaaug

SEQ ID NO: 1827113 - RNA, 19 nt, Homo sapiens
  misc_RNA (1)...(19): siRNA sense strand
gacaugaugaugcugaaga

SEQ ID NO: 1827114 - RNA, 19 nt, Homo sapiens
  misc_RNA (1)...(19): siRNA sense strand
gacauugaacgaaucauca

SEQ ID NO: 1827115 - RNA, 19 nt, Homo sapiens
  misc_RNA (1)...(19): siRNA sense strand
cgacgguuucgcucuguua

SEQ ID NO: 1827116 - RNA, 19 nt, Homo sapiens
  misc_RNA (1)...(19): siRNA sense strand
cgucuaaaggguccuaauu

SEQ ID NO: 1827117 - RNA, 19 nt, Homo sapiens
  misc_RNA (1)...(19): siRNA sense strand
gacccuuccuuugaaauuc

SEQ ID NO: 1827118 - RNA, 19 nt, Homo sapiens
  misc_RNA (1)...(19): siRNA sense strand
acaugaugaugcugaagaa

SEQ ID NO: 1827119 - RNA, 19 nt, Homo sapiens
  misc_RNA (1)...(19): siRNA sense strand
ggaaccucaucucccaaau

SEQ ID NO: 1827120 - RNA, 19 nt, Homo sapiens
  misc_RNA (1)...(19): siRNA sense strand
gcucacuccucuguggaaa

SEQ ID NO: 1827121 - RNA, 19 nt, Homo sapiens
  misc_RNA (1)...(19): siRNA sense strand
gauggagccugaggaguac

SEQ ID NO: 1827122 - RNA, 19 nt, Homo sapiens
  misc_RNA (1)...(19): siRNA sense strand
agagagagagggagagaga

SEQ ID NO: 1827123 - RNA, 19 nt, Homo sapiens
  misc_RNA (1)...(19): siRNA sense strand
caucccaguuuaccacuag

SEQ ID NO: 1827124 - RNA, 19 nt, Homo sapiens
  misc_RNA (1)...(19): siRNA sense strand
ccacuauccaggacaaguu

SEQ ID NO: 1827125 - RNA, 19 nt, Homo sapiens
  misc_RNA (1)...(19): siRNA sense strand
agaaacgacccuuccuuug

SEQ ID NO: 1827126 - RNA, 19 nt, Homo sapiens
  misc_RNA (1)...(19): siRNA sense strand
ggagacaugcuggcugaug

SEQ ID NO: 1827127 - RNA, 19 nt, Homo sapiens
  misc_RNA (1)...(19): siRNA sense strand
cagacaugguacugaaaug

SEQ ID NO: 1827128 - RNA, 19 nt, Homo sapiens
  misc_RNA (1)...(19): siRNA sense strand
uaaacucugguucgugauu

SEQ ID NO: 1827129 - RNA, 19 nt, Homo sapiens
  misc_RNA (1)...(19): siRNA sense strand
ccgacuccuucaccuuuaa

SEQ ID NO: 1827130 - RNA, 19 nt, Homo sapiens
  misc_RNA (1)...(19): siRNA sense strand
acccagcccucaccucuug

SEQ ID NO: 1827131 - RNA, 19 nt, Homo sapiens
  misc_RNA (1)...(19): siRNA sense strand
gccuguggaugacaacuuc

SEQ ID NO: 1827132 - RNA, 19 nt, Homo sapiens
  misc_RNA (1)...(19): siRNA sense strand
cgacccuuccuuugaaauu

SEQ ID NO: 1827133 - RNA, 19 nt, Homo sapiens
  misc_RNA (1)...(19): siRNA sense strand
cagcagacggucagugaau

SEQ ID NO: 1827134 - RNA, 19 nt, Homo sapiens
  misc_RNA (1)...(19): siRNA sense strand
gucuaaaggguccuaauug

SEQ ID NO: 1827135 - RNA, 19 nt, Homo sapiens
  misc_RNA (1)...(19): siRNA sense strand
guacuggguucugggucaa

SEQ ID NO: 1827136 - RNA, 19 nt, Homo sapiens
  misc_RNA (1)...(19): siRNA sense strand
ggaugauggugcauuuuga

SEQ ID NO: 1827137 - RNA, 19 nt, Homo sapiens
  misc_RNA (1)...(19): siRNA sense strand
aguggaugauggugcauuu

SEQ ID NO: 1827138 - RNA, 19 nt, Homo sapiens
  misc_RNA (1)...(19): siRNA sense strand
acaaaauccuggaaaugaa

SEQ ID NO: 1827139 - RNA, 19 nt, Homo sapiens
  misc_RNA (1)...(19): siRNA sense strand
ugaugaguccugccuaaau

SEQ ID NO: 1827140 - RNA, 19 nt, Homo sapiens
  misc_RNA (1)...(19): siRNA sense strand
cagaaucuuuuccagguuu

SEQ ID NO: 1827141 - RNA, 19 nt, Homo sapiens
  misc_RNA (1)...(19): siRNA sense strand
acggugcgcucccucaguu

SEQ ID NO: 1827142 - RNA, 19 nt, Homo sapiens
  misc_RNA (1)...(19): siRNA sense strand
ccuaauugucucacagaaa

SEQ ID NO: 1827143 - RNA, 19 nt, Homo sapiens
  misc_RNA (1)...(19): siRNA sense strand
ugaacgucauggacugguu

SEQ ID NO: 1827144 - RNA, 19 nt, Homo sapiens
  misc_RNA (1)...(19): siRNA sense strand
caaguuaaucauccguuuc

SEQ ID NO: 1827145 - RNA, 19 nt, Homo sapiens
  misc_RNA (1)...(19): siRNA sense strand
aaacucugguucgugauuc

SEQ ID NO: 1827146 - RNA, 19 nt, Homo sapiens
  misc_RNA (1)...(19): siRNA sense strand
caucaugccugggguggua

SEQ ID NO: 1827147 - RNA, 19 nt, Homo sapiens
  misc_RNA (1)...(19): siRNA sense strand
ggacuccagcugcccuguu

SEQ ID NO: 1827148 - RNA, 19 nt, Homo sapiens
  misc_RNA (1)...(19): siRNA sense strand
cacuauccaggacaaguua

SEQ ID NO: 1827149 - RNA, 19 nt, Homo sapiens
  misc_RNA (1)...(19): siRNA sense strand
ccugaggaguacagagaga

SEQ ID NO: 1827150 - RNA, 19 nt, Homo sapiens
  misc_RNA (1)...(19): siRNA sense strand
gcagcagacggucagugaa

SEQ ID NO: 1827151 - RNA, 19 nt, Homo sapiens
  misc_RNA (1)...(19): siRNA sense strand
agcacaagcuguccuccuu

SEQ ID NO: 1827152 - RNA, 19 nt, Homo sapiens
  misc_RNA (1)...(19): siRNA sense strand
gguucugggucaaggacaa

SEQ ID NO: 1827153 - RNA, 19 nt, Homo sapiens
  misc_RNA (1)...(19): siRNA sense strand
gcauccagcccugcgugua

SEQ ID NO: 1827154 - RNA, 19 nt, Homo sapiens
  misc_RNA (1)...(19): siRNA sense strand
ccuuuaauccuuccaagug

SEQ ID NO: 1827155 - RNA, 19 nt, Homo sapiens
  misc_RNA (1)...(19): siRNA sense strand
gaaauuucugccuguggau

SEQ ID NO: 1827156 - RNA, 19 nt, Homo sapiens
  misc_RNA (1)...(19): siRNA sense strand
ucagaaacgacccuuccuu

SEQ ID NO: 1827157 - RNA, 19 nt, Homo sapiens
  misc_RNA (1)...(19): siRNA sense strand
gauggugcauuuugacugu

SEQ ID NO: 1827158 - RNA, 19 nt, Homo sapiens
  misc_RNA (1)...(19): siRNA sense strand
cuaaaggguccuaauuguc

SEQ ID NO: 1827159 - RNA, 19 nt, Homo sapiens
  misc_RNA (1)...(19): siRNA sense strand
caaaauccuggaaaugaaa

SEQ ID NO: 1827160 - RNA, 19 nt, Homo sapiens
  misc_RNA (1)...(19): siRNA sense strand
gaugacugcuuuucagaag

SEQ ID NO: 1827161 - RNA, 19 nt, Homo sapiens
  misc_RNA (1)...(19): siRNA sense strand
agagagagggagagagaug

SEQ ID NO: 1827162 - RNA, 19 nt, Homo sapiens
  misc_RNA (1)...(19): siRNA sense strand
uaaagcuggccgucucuuc

SEQ ID NO: 1827163 - RNA, 19 nt, Homo sapiens
  misc_RNA (1)...(19): siRNA sense strand
gacgguuucgcucuguuaa

SEQ ID NO: 1827164 - RNA, 19 nt, Homo sapiens
  misc_RNA (1)...(19): siRNA sense strand
caucaacugcuugggauuc

SEQ ID NO: 1827165 - RNA, 19 nt, Homo sapiens
  misc_RNA (1)...(19): siRNA sense strand
ccuguucaguuacuugucu

SEQ ID NO: 1827166 - RNA, 19 nt, Homo sapiens
  misc_RNA (1)...(19): siRNA sense strand
gcuguccuccuuccuguuc

SEQ ID NO: 1827167 - RNA, 19 nt, Homo sapiens
  misc_RNA (1)...(19): siRNA sense strand
uguggaacgucccuucagu

SEQ ID NO: 1827168 - RNA, 19 nt, Homo sapiens
  misc_RNA (1)...(19): siRNA sense strand
aagacaugaugaugcugaa

SEQ ID NO: 1827169 - RNA, 19 nt, Homo sapiens
  misc_RNA (1)...(19): siRNA sense strand
caacagugugccagugagu

SEQ ID NO: 1827170 - RNA, 19 nt, Homo sapiens
  misc_RNA (1)...(19): siRNA sense strand
ggacagcccucaagacuua

SEQ ID NO: 1827171 - RNA, 19 nt, Homo sapiens
  misc_RNA (1)...(19): siRNA sense strand
ggacagaucugcagaauca

SEQ ID NO: 1827172 - RNA, 19 nt, Homo sapiens
  misc_RNA (1)...(19): siRNA sense strand
uaagaaaccuagcauguua

SEQ ID NO: 1827173 - RNA, 19 nt, Homo sapiens
  misc_RNA (1)...(19): siRNA sense strand
gaacagaagcagcaaauaa

SEQ ID NO: 1827174 - RNA, 19 nt, Homo sapiens
  misc_RNA (1)...(19): siRNA sense strand
gcaaauaguuuagacauug

SEQ ID NO: 1827175 - RNA, 19 nt, Homo sapiens
  misc_RNA (1)...(19): siRNA sense strand
gcagucagcuucucauuug

SEQ ID NO: 1827176 - RNA, 19 nt, Homo sapiens
  misc_RNA (1)...(19): siRNA sense strand
gagcggauaucgaagcuua

SEQ ID NO: 1827177 - RNA, 19 nt, Homo sapiens
  misc_RNA (1)...(19): siRNA sense strand
guaaugaggcuguuaauuu

SEQ ID NO: 1827178 - RNA, 19 nt, Homo sapiens
  misc_RNA (1)...(19): siRNA sense strand
aaagaugccucugaaauua

SEQ ID NO: 1827179 - RNA, 19 nt, Homo sapiens
  misc_RNA (1)...(19): siRNA sense strand
aaacagagauucaguuaug

SEQ ID NO: 1827180 - RNA, 19 nt, Homo sapiens
  misc_RNA (1)...(19): siRNA sense strand
gaacaagacucuggaagga

SEQ ID NO: 1827181 - RNA, 19 nt, Homo sapiens
  misc_RNA (1)...(19): siRNA sense strand
caacaccacuuacugaauu

SEQ ID NO: 1827182 - RNA, 19 nt, Homo sapiens
  misc_RNA (1)...(19): siRNA sense strand
gaaauccucuucaggcaaa

SEQ ID NO: 1827183 - RNA, 19 nt, Homo sapiens
  misc_RNA (1)...(19): siRNA sense strand
agaaacaccuggaauaauu

SEQ ID NO: 1827184 - RNA, 19 nt, Homo sapiens
  misc_RNA (1)...(19): siRNA sense strand
caggaaagcuccagaaaga

SEQ ID NO: 1827185 - RNA, 19 nt, Homo sapiens
  misc_RNA (1)...(19): siRNA sense strand
gcaaauggauucugcuuca

SEQ ID NO: 1827186 - RNA, 19 nt, Homo sapiens
  misc_RNA (1)...(19): siRNA sense strand
gagcaaaugugcaaucuuc

SEQ ID NO: 1827187 - RNA, 19 nt, Homo sapiens
  misc_RNA (1)...(19): siRNA sense strand
gcaagacucucacguagga

SEQ ID NO: 1827188 - RNA, 19 nt, Homo sapiens
  misc_RNA (1)...(19): siRNA sense strand
gaaggcacauucugaaguu

SEQ ID NO: 1827189 - RNA, 19 nt, Homo sapiens
  misc_RNA (1)...(19): siRNA sense strand
gcacaaggcccacauauag

SEQ ID NO: 1827190 - RNA, 19 nt, Homo sapiens
  misc_RNA (1)...(19): siRNA sense strand
ggaauugguugcugaauca

SEQ ID NO: 1827191 - RNA, 19 nt, Homo sapiens
  misc_RNA (1)...(19): siRNA sense strand
ggacaauguuugaguguga

SEQ ID NO: 1827192 - RNA, 19 nt, Homo sapiens
  misc_RNA (1)...(19): siRNA sense strand
guaguugaauucagcaaua

SEQ ID NO: 1827193 - RNA, 19 nt, Homo sapiens
  misc_RNA (1)...(19): siRNA sense strand
gaagugaccagcagcauaa

SEQ ID NO: 1827194 - RNA, 19 nt, Homo sapiens
  misc_RNA (1)...(19): siRNA sense strand
gaggacaccuuauaauaug

SEQ ID NO: 1827195 - RNA, 19 nt, Homo sapiens
  misc_RNA (1)...(19): siRNA sense strand
uaucgaagcuuaucucaga

SEQ ID NO: 1827196 - RNA, 19 nt, Homo sapiens
  misc_RNA (1)...(19): siRNA sense strand
gaaggaauuucuaugugaa

SEQ ID NO: 1827197 - RNA, 19 nt, Homo sapiens
  misc_RNA (1)...(19): siRNA sense strand
gaaguucuauggcaggaaa

SEQ ID NO: 1827198 - RNA, 19 nt, Homo sapiens
  misc_RNA (1)...(19): siRNA sense strand
caacagacgugagaccuuu

SEQ ID NO: 1827199 - RNA, 19 nt, Homo sapiens
  misc_RNA (1)...(19): siRNA sense strand
gucaaaugcugaaacuuua

SEQ ID NO: 1827200 - RNA, 19 nt, Homo sapiens
  misc_RNA (1)...(19): siRNA sense strand
uaaugaggcuguuaauuug

SEQ ID NO: 1827201 - RNA, 19 nt, Homo sapiens
  misc_RNA (1)...(19): siRNA sense strand
ggaagucagucauuugaug

SEQ ID NO: 1827202 - RNA, 19 nt, Homo sapiens
  misc_RNA (1)...(19): siRNA sense strand
gaaguacggauucugguua

SEQ ID NO: 1827203 - RNA, 19 nt, Homo sapiens
  misc_RNA (1)...(19): siRNA sense strand
caauaaagaugccucugaa

SEQ ID NO: 1827204 - RNA, 19 nt, Homo sapiens
  misc_RNA (1)...(19): siRNA sense strand
gaggagaacuucaggaaag

SEQ ID NO: 1827205 - RNA, 19 nt, Homo sapiens
  misc_RNA (1)...(19): siRNA sense strand
gcuuugaguucgagaguua

SEQ ID NO: 1827206 - RNA, 19 nt, Homo sapiens
  misc_RNA (1)...(19): siRNA sense strand
ggagaaacaccuggaauaa

SEQ ID NO: 1827207 - RNA, 19 nt, Homo sapiens
  misc_RNA (1)...(19): siRNA sense strand
gcaugugccucucuuagaa

SEQ ID NO: 1827208 - RNA, 19 nt, Homo sapiens
  misc_RNA (1)...(19): siRNA sense strand
gcagugacaucaucuguag

SEQ ID NO: 1827209 - RNA, 19 nt, Homo sapiens
  misc_RNA (1)...(19): siRNA sense strand
gcaaacccuucaucacaaa

SEQ ID NO: 1827210 - RNA, 19 nt, Homo sapiens
  misc_RNA (1)...(19): siRNA sense strand
ggauauaagucaaaugaag

SEQ ID NO: 1827211 - RNA, 19 nt, Homo sapiens
  misc_RNA (1)...(19): siRNA sense strand
gaaagagccuccccaguuu

SEQ ID NO: 1827212 - RNA, 19 nt, Homo sapiens
  misc_RNA (1)...(19): siRNA sense strand
ucacuugacuguuuaccua

SEQ ID NO: 1827213 - RNA, 19 nt, Homo sapiens
  misc_RNA (1)...(19): siRNA sense strand
caaacugggucuugucuug

SEQ ID NO: 1827214 - RNA, 19 nt, Homo sapiens
  misc_RNA (1)...(19): siRNA sense strand
gauagaacauuccucaaca

SEQ ID NO: 1827215 - RNA, 19 nt, Homo sapiens
  misc_RNA (1)...(19): siRNA sense strand
caucagaacagauuaauug

SEQ ID NO: 1827216 - RNA, 19 nt, Homo sapiens
  misc_RNA (1)...(19): siRNA sense strand
ccauggagcugcagaaugu

SEQ ID NO: 1827217 - RNA, 19 nt, Homo sapiens
  misc_RNA (1)...(19): siRNA sense strand
acagggagcuccagaaaug

SEQ ID NO: 1827218 - RNA, 19 nt, Homo sapiens
  misc_RNA (1)...(19): siRNA sense strand
ucacuucucuuucauuguu

SEQ ID NO: 1827219 - RNA, 19 nt, Homo sapiens
  misc_RNA (1)...(19): siRNA sense strand
caagucauccacaucauua

SEQ ID NO: 1827220 - RNA, 19 nt, Homo sapiens
  misc_RNA (1)...(19): siRNA sense strand
gggcucaccuugugcaauu

SEQ ID NO: 1827221 - RNA, 19 nt, Homo sapiens
  misc_RNA (1)...(19): siRNA sense strand
uaaagaugccucugaaauu

SEQ ID NO: 1827222 - RNA, 19 nt, Homo sapiens
  misc_RNA (1)...(19): siRNA sense strand
gaagucaggugcagaaggu

SEQ ID NO: 1827223 - RNA, 19 nt, Homo sapiens
  misc_RNA (1)...(19): siRNA sense strand
gaaucacagucuucuugua

SEQ ID NO: 1827224 - RNA, 19 nt, Homo sapiens
  misc_RNA (1)...(19): siRNA sense strand
gaaaaucacuauacuguca

SEQ ID NO: 1827225 - RNA, 19 nt, Homo sapiens
  misc_RNA (1)...(19): siRNA sense strand
gaggauauaagucaaauga

SEQ ID NO: 1827226 - RNA, 19 nt, Homo sapiens
  misc_RNA (1)...(19): siRNA sense strand
ccaaagcacuuaguauuca

SEQ ID NO: 1827227 - RNA, 19 nt, Homo sapiens
  misc_RNA (1)...(19): siRNA sense strand
uggaauacguuguaagaaa

SEQ ID NO: 1827228 - RNA, 19 nt, Homo sapiens
  misc_RNA (1)...(19): siRNA sense strand
ucagaauccuugcccauaa

SEQ ID NO: 1827229 - RNA, 19 nt, Homo sapiens
  misc_RNA (1)...(19): siRNA sense strand
gcgcugauccugccaaauu

SEQ ID NO: 1827230 - RNA, 19 nt, Homo sapiens
  misc_RNA (1)...(19): siRNA sense strand
gcaauaaagaugccucuga

SEQ ID NO: 1827231 - RNA, 19 nt, Homo sapiens
  misc_RNA (1)...(19): siRNA sense strand
ucacaucccugccacaaau

SEQ ID NO: 1827232 - RNA, 19 nt, Homo sapiens
  misc_RNA (1)...(19): siRNA sense strand
caaugaagcuuugguagau

SEQ ID NO: 1827233 - RNA, 19 nt, Homo sapiens
  misc_RNA (1)...(19): siRNA sense strand
caacauuaccaaccaaauu

SEQ ID NO: 1827234 - RNA, 19 nt, Homo sapiens
  misc_RNA (1)...(19): siRNA sense strand
ugacaaaucugcaaaauca

SEQ ID NO: 1827235 - RNA, 19 nt, Homo sapiens
  misc_RNA (1)...(19): siRNA sense strand
gcacagggagcuccagaaa

SEQ ID NO: 1827236 - RNA, 19 nt, Homo sapiens
  misc_RNA (1)...(19): siRNA sense strand
ccucugaaauuaacaguga

SEQ ID NO: 1827237 - RNA, 19 nt, Homo sapiens
  misc_RNA (1)...(19): siRNA sense strand
uacaugguguuaucucuua

SEQ ID NO: 1827238 - RNA, 19 nt, Homo sapiens
  misc_RNA (1)...(19): siRNA sense strand
gaaaugaggcguacugcau

SEQ ID NO: 1827239 - RNA, 19 nt, Homo sapiens
  misc_RNA (1)...(19): siRNA sense strand
ucaaugccaugaucaagaa

SEQ ID NO: 1827240 - RNA, 19 nt, Homo sapiens
  misc_RNA (1)...(19): siRNA sense strand
uaaagaggaugucaaaugc

SEQ ID NO: 1827241 - RNA, 19 nt, Homo sapiens
  misc_RNA (1)...(19): siRNA sense strand
cauguugccucuguuguua

SEQ ID NO: 1827242 - RNA, 19 nt, Homo sapiens
  misc_RNA (1)...(19): siRNA sense strand
uccaguagaucucagguua

SEQ ID NO: 1827243 - RNA, 19 nt, Homo sapiens
  misc_RNA (1)...(19): siRNA sense strand
gagcaggcccaacucauuu

SEQ ID NO: 1827244 - RNA, 19 nt, Homo sapiens
  misc_RNA (1)...(19): siRNA sense strand
gcgaaugcaucucuucuca

SEQ ID NO: 1827245 - RNA, 19 nt, Homo sapiens
  misc_RNA (1)...(19): siRNA sense strand
ggaauacguuguaagaaac

SEQ ID NO: 1827246 - RNA, 19 nt, Homo sapiens
  misc_RNA (1)...(19): siRNA sense strand
gaacuucggaaucccuuaa

SEQ ID NO: 1827247 - RNA, 19 nt, Homo sapiens
  misc_RNA (1)...(19): siRNA sense strand
gaaagucauguucuuggua

SEQ ID NO: 1827248 - RNA, 19 nt, Homo sapiens
  misc_RNA (1)...(19): siRNA sense strand
gagacaagcagccauagaa

SEQ ID NO: 1827249 - RNA, 19 nt, Homo sapiens
  misc_RNA (1)...(19): siRNA sense strand
uaccuucacuugacuguuu

SEQ ID NO: 1827250 - RNA, 19 nt, Homo sapiens
  misc_RNA (1)...(19): siRNA sense strand
aaaccuagcauguuaaaga

SEQ ID NO: 1827251 - RNA, 19 nt, Homo sapiens
  misc_RNA (1)...(19): siRNA sense strand
gcucuaaauuugucguuau

SEQ ID NO: 1827252 - RNA, 19 nt, Homo sapiens
  misc_RNA (1)...(19): siRNA sense strand
aaacagaagaagccuauuu

SEQ ID NO: 1827253 - RNA, 19 nt, Homo sapiens
  misc_RNA (1)...(19): siRNA sense strand
cccaagaucugcccaauca

SEQ ID NO: 1827254 - RNA, 19 nt, Homo sapiens
  misc_RNA (1)...(19): siRNA sense strand
gaacagacgccccagauaa

SEQ ID NO: 1827255 - RNA, 19 nt, Homo sapiens
  misc_RNA (1)...(19): siRNA sense strand
caucauggaacaacagaua

SEQ ID NO: 1827256 - RNA, 19 nt, Homo sapiens
  misc_RNA (1)...(19): siRNA sense strand
uacuguaacuucuccuuua

SEQ ID NO: 1827257 - RNA, 19 nt, Homo sapiens
  misc_RNA (1)...(19): siRNA sense strand
gaauguggaauacguugua

SEQ ID NO: 1827258 - RNA, 19 nt, Homo sapiens
  misc_RNA (1)...(19): siRNA sense strand
gcacuugcucuccuuaauu

SEQ ID NO: 1827259 - RNA, 19 nt, Homo sapiens
  misc_RNA (1)...(19): siRNA sense strand
gaacuggaaucucugucau

SEQ ID NO: 1827260 - RNA, 19 nt, Homo sapiens
  misc_RNA (1)...(19): siRNA sense strand
caaauucagugaccucgau

SEQ ID NO: 1827261 - RNA, 19 nt, Homo sapiens
  misc_RNA (1)...(19): siRNA sense strand
ggauuuaggcaucucagua

SEQ ID NO: 1827262 - RNA, 19 nt, Homo sapiens
  misc_RNA (1)...(19): siRNA sense strand
aaacacauacgaacccaua

SEQ ID NO: 1827263 - RNA, 19 nt, Homo sapiens
  misc_RNA (1)...(19): siRNA sense strand
guacagacaauaaccaaga

SEQ ID NO: 1827264 - RNA, 19 nt, Homo sapiens
  misc_RNA (1)...(19): siRNA sense strand
gcccauaacucagaaaaua

SEQ ID NO: 1827265 - RNA, 19 nt, Homo sapiens
  misc_RNA (1)...(19): siRNA sense strand
ugaaugcagugccauauca

SEQ ID NO: 1827266 - RNA, 19 nt, Homo sapiens
  misc_RNA (1)...(19): siRNA sense strand
ugaaagaucagaagccaaa

SEQ ID NO: 1827267 - RNA, 19 nt, Homo sapiens
  misc_RNA (1)...(19): siRNA sense strand
caaggcacauagcaagaaa

SEQ ID NO: 1827268 - RNA, 19 nt, Homo sapiens
  misc_RNA (1)...(19): siRNA sense strand
ggaaaccgucaauauugua

SEQ ID NO: 1827269 - RNA, 19 nt, Homo sapiens
  misc_RNA (1)...(19): siRNA sense strand
gcauggaaaccgucaauau

SEQ ID NO: 1827270 - RNA, 19 nt, Homo sapiens
  misc_RNA (1)...(19): siRNA sense strand
aggaauauguggacuauaa

SEQ ID NO: 1827271 - RNA, 19 nt, Homo sapiens
  misc_RNA (1)...(19): siRNA sense strand
ggucagccauguaaucaaa

SEQ ID NO: 1827272 - RNA, 19 nt, Homo sapiens
  misc_RNA (1)...(19): siRNA sense strand
gcagcaagaugggcuuuga

SEQ ID NO: 1827273 - RNA, 19 nt, Homo sapiens
  misc_RNA (1)...(19): siRNA sense strand
gaacuacaucggccaauuc

SEQ ID NO: 1827274 - RNA, 19 nt, Homo sapiens
  misc_RNA (1)...(19): siRNA sense strand
acaaagagaugggcgauca

SEQ ID NO: 1827275 - RNA, 19 nt, Homo sapiens
  misc_RNA (1)...(19): siRNA sense strand
ggaagauugugacuacauc

SEQ ID NO: 1827276 - RNA, 19 nt, Homo sapiens
  misc_RNA (1)...(19): siRNA sense strand
gguggaagauugugacuac

SEQ ID NO: 1827277 - RNA, 19 nt, Homo sapiens
  misc_RNA (1)...(19): siRNA sense strand
gagaugaucgaccacauug

SEQ ID NO: 1827278 - RNA, 19 nt, Homo sapiens
  misc_RNA (1)...(19): siRNA sense strand
gcaagaagaagucccagau

SEQ ID NO: 1827279 - RNA, 19 nt, Homo sapiens
  misc_RNA (1)...(19): siRNA sense strand
cuacaucggccaauucuug

SEQ ID NO: 1827280 - RNA, 19 nt, Homo sapiens
  misc_RNA (1)...(19): siRNA sense strand
ccaggaauauguggacuau

SEQ ID NO: 1827281 - RNA, 19 nt, Homo sapiens
  misc_RNA (1)...(19): siRNA sense strand
caaaugcagucuggagaug

SEQ ID NO: 1827282 - RNA, 19 nt, Homo sapiens
  misc_RNA (1)...(19): siRNA sense strand
ggagaugaucgaccacauu

SEQ ID NO: 1827283 - RNA, 19 nt, Homo sapiens
  misc_RNA (1)...(19): siRNA sense strand
acaaacaacugcgggagaa

SEQ ID NO: 1827284 - RNA, 19 nt, Homo sapiens
  misc_RNA (1)...(19): siRNA sense strand
caacuucaacucacuguuc

SEQ ID NO: 1827285 - RNA, 19 nt, Homo sapiens
  misc_RNA (1)...(19): siRNA sense strand
gagguggucagccauguaa

SEQ ID NO: 1827286 - RNA, 19 nt, Homo sapiens
  misc_RNA (1)...(19): siRNA sense strand
aagggaagauuguguuugu

SEQ ID NO: 1827287 - RNA, 19 nt, Homo sapiens
  misc_RNA (1)...(19): siRNA sense strand
uaugaagaguccaucaaga

SEQ ID NO: 1827288 - RNA, 19 nt, Homo sapiens
  misc_RNA (1)...(19): siRNA sense strand
ugaaggacauugcguucga

SEQ ID NO: 1827289 - RNA, 19 nt, Homo sapiens
  misc_RNA (1)...(19): siRNA sense strand
uggagaagaugaacuacau

SEQ ID NO: 1827290 - RNA, 19 nt, Homo sapiens
  misc_RNA (1)...(19): siRNA sense strand
ugaacuacaucggccaauu

SEQ ID NO: 1827291 - RNA, 19 nt, Homo sapiens
  misc_RNA (1)...(19): siRNA sense strand
gugacuacaucgugcagaa

SEQ ID NO: 1827292 - RNA, 19 nt, Homo sapiens
  misc_RNA (1)...(19): siRNA sense strand
ucaccaacauggagaccaa

SEQ ID NO: 1827293 - RNA, 19 nt, Homo sapiens
  misc_RNA (1)...(19): siRNA sense strand
agagaggccuggaguucuu

SEQ ID NO: 1827294 - RNA, 19 nt, Homo sapiens
  misc_RNA (1)...(19): siRNA sense strand
ccauugugguggccaacua

SEQ ID NO: 1827295 - RNA, 19 nt, Homo sapiens
  misc_RNA (1)...(19): siRNA sense strand
gaugggcuuugaaccucua

SEQ ID NO: 1827296 - RNA, 19 nt, Homo sapiens
  misc_RNA (1)...(19): siRNA sense strand
agucccagauccaggaaua

SEQ ID NO: 1827297 - RNA, 19 nt, Homo sapiens
  misc_RNA (1)...(19): siRNA sense strand
gccaauucuugccuggaua

SEQ ID NO: 1827298 - RNA, 19 nt, Homo sapiens
  misc_RNA (1)...(19): siRNA sense strand
gguagagcaagacaaguuu

SEQ ID NO: 1827299 - RNA, 19 nt, Homo sapiens
  misc_RNA (1)...(19): siRNA sense strand
ggguagagcaagacaaguu

SEQ ID NO: 1827300 - RNA, 19 nt, Homo sapiens
  misc_RNA (1)...(19): siRNA sense strand
uuccuaaacugcccaaaug

SEQ ID NO: 1827301 - RNA, 19 nt, Homo sapiens
  misc_RNA (1)...(19): siRNA sense strand
cugcagaucuucaccaaac

SEQ ID NO: 1827302 - RNA, 19 nt, Homo sapiens
  misc_RNA (1)...(19): siRNA sense strand
ggagguggucagccaugua

SEQ ID NO: 1827303 - RNA, 19 nt, Homo sapiens
  misc_RNA (1)...(19): siRNA sense strand
agaucaaggugaaggagaa

SEQ ID NO: 1827304 - RNA, 19 nt, Homo sapiens
  misc_RNA (1)...(19): siRNA sense strand
cggccaagaucaaggugaa

SEQ ID NO: 1827305 - RNA, 19 nt, Homo sapiens
  misc_RNA (1)...(19): siRNA sense strand
ggccaauucuugccuggau

SEQ ID NO: 1827306 - RNA, 19 nt, Homo sapiens
  misc_RNA (1)...(19): siRNA sense strand
uugcugugcugcagacgua

SEQ ID NO: 1827307 - RNA, 19 nt, Homo sapiens
  misc_RNA (1)...(19): siRNA sense strand
cagcacaucgcucucaaga

SEQ ID NO: 1827308 - RNA, 19 nt, Homo sapiens
  misc_RNA (1)...(19): siRNA sense strand
cguucgagguggaagauug

SEQ ID NO: 1827309 - RNA, 19 nt, Homo sapiens
  misc_RNA (1)...(19): siRNA sense strand
ugaaaauccugguggacua

SEQ ID NO: 1827310 - RNA, 19 nt, Homo sapiens
  misc_RNA (1)...(19): siRNA sense strand
gaagacggccaagaucaag

SEQ ID NO: 1827311 - RNA, 19 nt, Homo sapiens
  misc_RNA (1)...(19): siRNA sense strand
gaccgaagacaucaucaca

SEQ ID NO: 1827312 - RNA, 19 nt, Homo sapiens
  misc_RNA (1)...(19): siRNA sense strand
gagaggccuggaguucuua

SEQ ID NO: 1827313 - RNA, 19 nt, Homo sapiens
  misc_RNA (1)...(19): siRNA sense strand
ugaagacggccaagaucaa

SEQ ID NO: 1827314 - RNA, 19 nt, Homo sapiens
  misc_RNA (1)...(19): siRNA sense strand
gccuggaguucuuaucugu

SEQ ID NO: 1827315 - RNA, 19 nt, Homo sapiens
  misc_RNA (1)...(19): siRNA sense strand
caagaagaagucccagauc

SEQ ID NO: 1827316 - RNA, 19 nt, Homo sapiens
  misc_RNA (1)...(19): siRNA sense strand
gguggacuacgacgagaaa

SEQ ID NO: 1827317 - RNA, 19 nt, Homo sapiens
  misc_RNA (1)...(19): siRNA sense strand
uaucuguucccuccacgua

SEQ ID NO: 1827318 - RNA, 19 nt, Homo sapiens
  misc_RNA (1)...(19): siRNA sense strand
cgacuuacagugacaaagg

SEQ ID NO: 1827319 - RNA, 19 nt, Homo sapiens
  misc_RNA (1)...(19): siRNA sense strand
cuggaguucuuaucuguuc

SEQ ID NO: 1827320 - RNA, 19 nt, Homo sapiens
  misc_RNA (1)...(19): siRNA sense strand
caagaugggcuuugaaccu

SEQ ID NO: 1827321 - RNA, 19 nt, Homo sapiens
  misc_RNA (1)...(19): siRNA sense strand
gagagagaggccuggaguu

SEQ ID NO: 1827322 - RNA, 19 nt, Homo sapiens
  misc_RNA (1)...(19): siRNA sense strand
caagaccgaagacaucauc

SEQ ID NO: 1827323 - RNA, 19 nt, Homo sapiens
  misc_RNA (1)...(19): siRNA sense strand
ccaaaugcagucuggagau

SEQ ID NO: 1827324 - RNA, 19 nt, Homo sapiens
  misc_RNA (1)...(19): siRNA sense strand
caagggaagauuguguuug

SEQ ID NO: 1827325 - RNA, 19 nt, Homo sapiens
  misc_RNA (1)...(19): siRNA sense strand
guagagcaagacaaguuug

SEQ ID NO: 1827326 - RNA, 19 nt, Homo sapiens
  misc_RNA (1)...(19): siRNA sense strand
ggccuggaguucuuaucug

SEQ ID NO: 1827327 - RNA, 19 nt, Homo sapiens
  misc_RNA (1)...(19): siRNA sense strand
gcaggugcacacggaauau

SEQ ID NO: 1827328 - RNA, 19 nt, Homo sapiens
  misc_RNA (1)...(19): siRNA sense strand
ccaauucuugccuggauau

SEQ ID NO: 1827329 - RNA, 19 nt, Homo sapiens
  misc_RNA (1)...(19): siRNA sense strand
ucagccauguaaucaaaca

SEQ ID NO: 1827330 - RNA, 19 nt, Homo sapiens
  misc_RNA (1)...(19): siRNA sense strand
ucauucuacugcagcaaga

SEQ ID NO: 1827331 - RNA, 19 nt, Homo sapiens
  misc_RNA (1)...(19): siRNA sense strand
caaggugaaggagaacauu

SEQ ID NO: 1827332 - RNA, 19 nt, Homo sapiens
  misc_RNA (1)...(19): siRNA sense strand
gggagguggucagccaugu

SEQ ID NO: 1827333 - RNA, 19 nt, Homo sapiens
  misc_RNA (1)...(19): siRNA sense strand
gcugaagacggccaagauc

SEQ ID NO: 1827334 - RNA, 19 nt, Homo sapiens
  misc_RNA (1)...(19): siRNA sense strand
guaaucaaacaagggaaga

SEQ ID NO: 1827335 - RNA, 19 nt, Homo sapiens
  misc_RNA (1)...(19): siRNA sense strand
ucucaagaccgaagacauc

SEQ ID NO: 1827336 - RNA, 19 nt, Homo sapiens
  misc_RNA (1)...(19): siRNA sense strand
caggugcacacggaauaua

SEQ ID NO: 1827337 - RNA, 19 nt, Homo sapiens
  misc_RNA (1)...(19): siRNA sense strand
aaggcuaccuccugcagau

SEQ ID NO: 1827338 - RNA, 19 nt, Homo sapiens
  misc_RNA (1)...(19): siRNA sense strand
gagagaggccuggaguucu

SEQ ID NO: 1827339 - RNA, 19 nt, Homo sapiens
  misc_RNA (1)...(19): siRNA sense strand
agagagaggccuggaguuc

SEQ ID NO: 1827340 - RNA, 19 nt, Homo sapiens
  misc_RNA (1)...(19): siRNA sense strand
gaagucccagauccaggaa

SEQ ID NO: 1827341 - RNA, 19 nt, Homo sapiens
  misc_RNA (1)...(19): siRNA sense strand
gggguaaccucaccaacau

SEQ ID NO: 1827342 - RNA, 19 nt, Homo sapiens
  misc_RNA (1)...(19): siRNA sense strand
gguggucagccauguaauc

SEQ ID NO: 1827343 - RNA, 19 nt, Homo sapiens
  misc_RNA (1)...(19): siRNA sense strand
ccagauccaggaauaugug

SEQ ID NO: 1827344 - RNA, 19 nt, Homo sapiens
  misc_RNA (1)...(19): siRNA sense strand
gcuaccuccugcagaucuu

SEQ ID NO: 1827345 - RNA, 19 nt, Homo sapiens
  misc_RNA (1)...(19): siRNA sense strand
acucacuguucaaggcuuu

SEQ ID NO: 1827346 - RNA, 19 nt, Homo sapiens
  misc_RNA (1)...(19): siRNA sense strand
ugggaaaccagccugauca

SEQ ID NO: 1827347 - RNA, 19 nt, Homo sapiens
  misc_RNA (1)...(19): siRNA sense strand
gacaucaucacagcgauuc

SEQ ID NO: 1827348 - RNA, 19 nt, Homo sapiens
  misc_RNA (1)...(19): siRNA sense strand
ggaauauguggacuauaac

SEQ ID NO: 1827349 - RNA, 19 nt, Homo sapiens
  misc_RNA (1)...(19): siRNA sense strand
ggacaagcguuuagaaagu

SEQ ID NO: 1827350 - RNA, 19 nt, Homo sapiens
  misc_RNA (1)...(19): siRNA sense strand
ccaaaguaguucuagauga

SEQ ID NO: 1827351 - RNA, 19 nt, Homo sapiens
  misc_RNA (1)...(19): siRNA sense strand
gcaccaaaguaguucuaga

SEQ ID NO: 1827352 - RNA, 19 nt, Homo sapiens
  misc_RNA (1)...(19): siRNA sense strand
gacaagcguuuagaaaguu

SEQ ID NO: 1827353 - RNA, 19 nt, Homo sapiens
  misc_RNA (1)...(19): siRNA sense strand
caaaguaguucuagaugac

SEQ ID NO: 1827354 - RNA, 19 nt, Homo sapiens
  misc_RNA (1)...(19): siRNA sense strand
gaaaggagugcugcugaaa

SEQ ID NO: 1827355 - RNA, 19 nt, Homo sapiens
  misc_RNA (1)...(19): siRNA sense strand
ugaaaggagugcugcugaa

SEQ ID NO: 1827356 - RNA, 19 nt, Homo sapiens
  misc_RNA (1)...(19): siRNA sense strand
aggaaaggguggagagauu

SEQ ID NO: 1827357 - RNA, 19 nt, Homo sapiens
  misc_RNA (1)...(19): siRNA sense strand
gaccgaguauugguugaaa

SEQ ID NO: 1827358 - RNA, 19 nt, Homo sapiens
  misc_RNA (1)...(19): siRNA sense strand
gagugcugcugaaacugua

SEQ ID NO: 1827359 - RNA, 19 nt, Homo sapiens
  misc_RNA (1)...(19): siRNA sense strand
ggaucggguucuaaaggaa

SEQ ID NO: 1827360 - RNA, 19 nt, Homo sapiens
  misc_RNA (1)...(19): siRNA sense strand
gcaggacaagcguuuagaa

SEQ ID NO: 1827361 - RNA, 19 nt, Homo sapiens
  misc_RNA (1)...(19): siRNA sense strand
gaauauggaggcaccaaag

SEQ ID NO: 1827362 - RNA, 19 nt, Homo sapiens
  misc_RNA (1)...(19): siRNA sense strand
gcuguuggaucggguucua

SEQ ID NO: 1827363 - RNA, 19 nt, Homo sapiens
  misc_RNA (1)...(19): siRNA sense strand
gugacauucuuggaaagua

SEQ ID NO: 1827364 - RNA, 19 nt, Homo sapiens
  misc_RNA (1)...(19): siRNA sense strand
gauggugacauucuuggaa

SEQ ID NO: 1827365 - RNA, 19 nt, Homo sapiens
  misc_RNA (1)...(19): siRNA sense strand
gaaaggguggagagauuca

SEQ ID NO: 1827366 - RNA, 19 nt, Homo sapiens
  misc_RNA (1)...(19): siRNA sense strand
ggagugcugcugaaacugu

SEQ ID NO: 1827367 - RNA, 19 nt, Homo sapiens
  misc_RNA (1)...(19): siRNA sense strand
auuuagagauggugacauu

SEQ ID NO: 1827368 - RNA, 19 nt, Homo sapiens
  misc_RNA (1)...(19): siRNA sense strand
gaucggguucuaaaggaaa

SEQ ID NO: 1827369 - RNA, 19 nt, Homo sapiens
  misc_RNA (1)...(19): siRNA sense strand
caggacaagcguuuagaaa

SEQ ID NO: 1827370 - RNA, 19 nt, Homo sapiens
  misc_RNA (1)...(19): siRNA sense strand
guaaccaaaggaggcauua

SEQ ID NO: 1827371 - RNA, 19 nt, Homo sapiens
  misc_RNA (1)...(19): siRNA sense strand
acaagcguuuagaaaguuu

SEQ ID NO: 1827372 - RNA, 19 nt, Homo sapiens
  misc_RNA (1)...(19): siRNA sense strand
ggaaaggguggagagauuc

SEQ ID NO: 1827373 - RNA, 19 nt, Homo sapiens
  misc_RNA (1)...(19): siRNA sense strand
uagagauggugacauucuu

SEQ ID NO: 1827374 - RNA, 19 nt, Homo sapiens
  misc_RNA (1)...(19): siRNA sense strand
ugacauucuuggaaaguac

SEQ ID NO: 1827375 - RNA, 19 nt, Homo sapiens
  misc_RNA (1)...(19): siRNA sense strand
ugcugaaacuguaaccaaa

SEQ ID NO: 1827376 - RNA, 19 nt, Homo sapiens
  misc_RNA (1)...(19): siRNA sense strand
uggaaaguacguagacuga

SEQ ID NO: 1827377 - RNA, 19 nt, Homo sapiens
  misc_RNA (1)...(19): siRNA sense strand
uggaucggguucuaaagga

SEQ ID NO: 1827378 - RNA, 19 nt, Homo sapiens
  misc_RNA (1)...(19): siRNA sense strand
aaggagugcugcugaaacu

SEQ ID NO: 1827379 - RNA, 19 nt, Homo sapiens
  misc_RNA (1)...(19): siRNA sense strand
caccaaaguaguucuagau

SEQ ID NO: 1827380 - RNA, 19 nt, Homo sapiens
  misc_RNA (1)...(19): siRNA sense strand
uggagagauucaaccaguu

SEQ ID NO: 1827381 - RNA, 19 nt, Homo sapiens
  misc_RNA (1)...(19): siRNA sense strand
aaccaaaggaggcauuaug

SEQ ID NO: 1827382 - RNA, 19 nt, Homo sapiens
  misc_RNA (1)...(19): siRNA sense strand
auauggaggcaccaaagua

SEQ ID NO: 1827383 - RNA, 19 nt, Homo sapiens
  misc_RNA (1)...(19): siRNA sense strand
auggugacauucuuggaaa

SEQ ID NO: 1827384 - RNA, 19 nt, Homo sapiens
  misc_RNA (1)...(19): siRNA sense strand
gcugaaacuguaaccaaag

SEQ ID NO: 1827385 - RNA, 19 nt, Homo sapiens
  misc_RNA (1)...(19): siRNA sense strand
uauggaggcaccaaaguag

SEQ ID NO: 1827386 - RNA, 19 nt, Homo sapiens
  misc_RNA (1)...(19): siRNA sense strand
guggagagcuuccggauua

SEQ ID NO: 1827387 - RNA, 19 nt, Homo sapiens
  misc_RNA (1)...(19): siRNA sense strand
gcaggaggcugacacagua

SEQ ID NO: 1827388 - RNA, 19 nt, Homo sapiens
  misc_RNA (1)...(19): siRNA sense strand
caaagaaccugaaauugga

SEQ ID NO: 1827389 - RNA, 19 nt, Homo sapiens
  misc_RNA (1)...(19): siRNA sense strand
gacaugagcugcccuaaug

SEQ ID NO: 1827390 - RNA, 19 nt, Homo sapiens
  misc_RNA (1)...(19): siRNA sense strand
cagaagagcucaaccauca

SEQ ID NO: 1827391 - RNA, 19 nt, Homo sapiens
  misc_RNA (1)...(19): siRNA sense strand
guagauggcuugugugugu

SEQ ID NO: 1827392 - RNA, 19 nt, Homo sapiens
  misc_RNA (1)...(19): siRNA sense strand
guacuuaccugcaccugaa

SEQ ID NO: 1827393 - RNA, 19 nt, Homo sapiens
  misc_RNA (1)...(19): siRNA sense strand
gaacucuccuguccaaaug

SEQ ID NO: 1827394 - RNA, 19 nt, Homo sapiens
  misc_RNA (1)...(19): siRNA sense strand
gcagaacucuccuguccaa

SEQ ID NO: 1827395 - RNA, 19 nt, Homo sapiens
  misc_RNA (1)...(19): siRNA sense strand
gggcaucagucaccgguua

SEQ ID NO: 1827396 - RNA, 19 nt, Homo sapiens
  misc_RNA (1)...(19): siRNA sense strand
gagaaucuuugcagagaaa

SEQ ID NO: 1827397 - RNA, 19 nt, Homo sapiens
  misc_RNA (1)...(19): siRNA sense strand
gggcugagauuguuacaga

SEQ ID NO: 1827398 - RNA, 19 nt, Homo sapiens
  misc_RNA (1)...(19): siRNA sense strand
gagaaagugccagaaauua

SEQ ID NO: 1827399 - RNA, 19 nt, Homo sapiens
  misc_RNA (1)...(19): siRNA sense strand
cagaguaccuugucgugua

SEQ ID NO: 1827400 - RNA, 19 nt, Homo sapiens
  misc_RNA (1)...(19): siRNA sense strand
gagugcagcuuccaagaaa

SEQ ID NO: 1827401 - RNA, 19 nt, Homo sapiens
  misc_RNA (1)...(19): siRNA sense strand
gaaauugaacucuauggaa

SEQ ID NO: 1827402 - RNA, 19 nt, Homo sapiens
  misc_RNA (1)...(19): siRNA sense strand
ccaagcaacuucagaaauc

SEQ ID NO: 1827403 - RNA, 19 nt, Homo sapiens
  misc_RNA (1)...(19): siRNA sense strand
ugacagaagugacggaaga

SEQ ID NO: 1827404 - RNA, 19 nt, Homo sapiens
  misc_RNA (1)...(19): siRNA sense strand
cagaggagguuccagauau

SEQ ID NO: 1827405 - RNA, 19 nt, Homo sapiens
  misc_RNA (1)...(19): siRNA sense strand
ggaagaggcucacaaucuc

SEQ ID NO: 1827406 - RNA, 19 nt, Homo sapiens
  misc_RNA (1)...(19): siRNA sense strand
gcaggugucuuucuugcuu

SEQ ID NO: 1827407 - RNA, 19 nt, Homo sapiens
  misc_RNA (1)...(19): siRNA sense strand
gagcuuagaggccucauaa

SEQ ID NO: 1827408 - RNA, 19 nt, Homo sapiens
  misc_RNA (1)...(19): siRNA sense strand
ggagacaucuguggaagug

SEQ ID NO: 1827409 - RNA, 19 nt, Homo sapiens
  misc_RNA (1)...(19): siRNA sense strand
ggacuuaacaggucucaga

SEQ ID NO: 1827410 - RNA, 19 nt, Homo sapiens
  misc_RNA (1)...(19): siRNA sense strand
gaacguaccagggacuuaa

SEQ ID NO: 1827411 - RNA, 19 nt, Homo sapiens
  misc_RNA (1)...(19): siRNA sense strand
ucaaagcagccacucauua

SEQ ID NO: 1827412 - RNA, 19 nt, Homo sapiens
  misc_RNA (1)...(19): siRNA sense strand
ggcauaugcugcuggauuu

SEQ ID NO: 1827413 - RNA, 19 nt, Homo sapiens
  misc_RNA (1)...(19): siRNA sense strand
uuugacagcuuucuaguaa

SEQ ID NO: 1827414 - RNA, 19 nt, Homo sapiens
  misc_RNA (1)...(19): siRNA sense strand
gacgaugcguggagaauga

SEQ ID NO: 1827415 - RNA, 19 nt, Homo sapiens
  misc_RNA (1)...(19): siRNA sense strand
gagaaaggcagacacaaga

SEQ ID NO: 1827416 - RNA, 19 nt, Homo sapiens
  misc_RNA (1)...(19): siRNA sense strand
caagaaacaccacuuccua

SEQ ID NO: 1827417 - RNA, 19 nt, Homo sapiens
  misc_RNA (1)...(19): siRNA sense strand
gaccagacguccaccauca

SEQ ID NO: 1827418 - RNA, 19 nt, Homo sapiens
  misc_RNA (1)...(19): siRNA sense strand
aggcagcuauugacaguua

SEQ ID NO: 1827419 - RNA, 19 nt, Homo sapiens
  misc_RNA (1)...(19): siRNA sense strand
uaacuggcauuggcuauga

SEQ ID NO: 1827420 - RNA, 19 nt, Homo sapiens
  misc_RNA (1)...(19): siRNA sense strand
caaagcagccacucauuau

SEQ ID NO: 1827421 - RNA, 19 nt, Homo sapiens
  misc_RNA (1)...(19): siRNA sense strand
gguacacccuccaugguaa

SEQ ID NO: 1827422 - RNA, 19 nt, Homo sapiens
  misc_RNA (1)...(19): siRNA sense strand
gaaagugccagaaauuaca

SEQ ID NO: 1827423 - RNA, 19 nt, Homo sapiens
  misc_RNA (1)...(19): siRNA sense strand
gcgagaaagugccagaaau

SEQ ID NO: 1827424 - RNA, 19 nt, Homo sapiens
  misc_RNA (1)...(19): siRNA sense strand
gagcucaagugucccaaug

SEQ ID NO: 1827425 - RNA, 19 nt, Homo sapiens
  misc_RNA (1)...(19): siRNA sense strand
uaauaucucuggugcugaa

SEQ ID NO: 1827426 - RNA, 19 nt, Homo sapiens
  misc_RNA (1)...(19): siRNA sense strand
aaagagaccuucacaacag

SEQ ID NO: 1827427 - RNA, 19 nt, Homo sapiens
  misc_RNA (1)...(19): siRNA sense strand
gugaauggcauguguguuu

SEQ ID NO: 1827428 - RNA, 19 nt, Homo sapiens
  misc_RNA (1)...(19): siRNA sense strand
gcaacaagccucugugucu

SEQ ID NO: 1827429 - RNA, 19 nt, Homo sapiens
  misc_RNA (1)...(19): siRNA sense strand
ggcauuggcuaugagguua

SEQ ID NO: 1827430 - RNA, 19 nt, Homo sapiens
  misc_RNA (1)...(19): siRNA sense strand
uggagacuguggaauauaa

SEQ ID NO: 1827431 - RNA, 19 nt, Homo sapiens
  misc_RNA (1)...(19): siRNA sense strand
gcaagaguaugagauaucu

SEQ ID NO: 1827432 - RNA, 19 nt, Homo sapiens
  misc_RNA (1)...(19): siRNA sense strand
gagcugcccuaaugacugu

SEQ ID NO: 1827433 - RNA, 19 nt, Homo sapiens
  misc_RNA (1)...(19): siRNA sense strand
gaaacaccacuuccuaugu

SEQ ID NO: 1827434 - RNA, 19 nt, Homo sapiens
  misc_RNA (1)...(19): siRNA sense strand
caaggcagcuauugacagu

SEQ ID NO: 1827435 - RNA, 19 nt, Homo sapiens
  misc_RNA (1)...(19): siRNA sense strand
gaauaugggauuggaguuu

SEQ ID NO: 1827436 - RNA, 19 nt, Homo sapiens
  misc_RNA (1)...(19): siRNA sense strand
acaguuaugucaucuccua

SEQ ID NO: 1827437 - RNA, 19 nt, Homo sapiens
  misc_RNA (1)...(19): siRNA sense strand
cgagaaagugccagaaauu

SEQ ID NO: 1827438 - RNA, 19 nt, Homo sapiens
  misc_RNA (1)...(19): siRNA sense strand
gcaauaugauccagaccau

SEQ ID NO: 1827439 - RNA, 19 nt, Homo sapiens
  misc_RNA (1)...(19): siRNA sense strand
cagauugucuucacacauc

SEQ ID NO: 1827440 - RNA, 19 nt, Homo sapiens
  misc_RNA (1)...(19): siRNA sense strand
gaaggcauccacugaacaa

SEQ ID NO: 1827441 - RNA, 19 nt, Homo sapiens
  misc_RNA (1)...(19): siRNA sense strand
agacaccguuggccaaauu

SEQ ID NO: 1827442 - RNA, 19 nt, Homo sapiens
  misc_RNA (1)...(19): siRNA sense strand
ugaacgaacugcccauauc

SEQ ID NO: 1827443 - RNA, 19 nt, Homo sapiens
  misc_RNA (1)...(19): siRNA sense strand
gcagauccuucuccaccuu

SEQ ID NO: 1827444 - RNA, 19 nt, Homo sapiens
  misc_RNA (1)...(19): siRNA sense strand
cagagaggcuacugaauac

SEQ ID NO: 1827445 - RNA, 19 nt, Homo sapiens
  misc_RNA (1)...(19): siRNA sense strand
gaaugccuuugacagcuuu

SEQ ID NO: 1827446 - RNA, 19 nt, Homo sapiens
  misc_RNA (1)...(19): siRNA sense strand
ggaguacuuuauccgugua

SEQ ID NO: 1827447 - RNA, 19 nt, Homo sapiens
  misc_RNA (1)...(19): siRNA sense strand
gcuggagacuguggaauau

SEQ ID NO: 1827448 - RNA, 19 nt, Homo sapiens
  misc_RNA (1)...(19): siRNA sense strand
caaagagaccuucacaaca

SEQ ID NO: 1827449 - RNA, 19 nt, Homo sapiens
  misc_RNA (1)...(19): siRNA sense strand
gagcugaccuacggcauca

SEQ ID NO: 1827450 - RNA, 19 nt, Homo sapiens
  misc_RNA (1)...(19): siRNA sense strand
gcauguguguuugugauga

SEQ ID NO: 1827451 - RNA, 19 nt, Homo sapiens
  misc_RNA (1)...(19): siRNA sense strand
gaauacacacugagaaucu

SEQ ID NO: 1827452 - RNA, 19 nt, Homo sapiens
  misc_RNA (1)...(19): siRNA sense strand
ggaccacgcugagguugau

SEQ ID NO: 1827453 - RNA, 19 nt, Homo sapiens
  misc_RNA (1)...(19): siRNA sense strand
uggagaaccuggugucuuc

SEQ ID NO: 1827454 - RNA, 19 nt, Homo sapiens
  misc_RNA (1)...(19): siRNA sense strand
gaauucacacuuucaggaa

SEQ ID NO: 1827455 - RNA, 19 nt, Homo sapiens
  misc_RNA (1)...(19): siRNA sense strand
ggccaugacucagcuguug

SEQ ID NO: 1827456 - RNA, 19 nt, Homo sapiens
  misc_RNA (1)...(19): siRNA sense strand
aaacaccacuuccuauguc

SEQ ID NO: 1827457 - RNA, 19 nt, Homo sapiens
  misc_RNA (1)...(19): siRNA sense strand
ggagugggauccucuagac

SEQ ID NO: 1827458 - RNA, 19 nt, Homo sapiens
  misc_RNA (1)...(19): siRNA sense strand
gaauggagucugcaucugu

SEQ ID NO: 1827459 - RNA, 19 nt, Homo sapiens
  misc_RNA (1)...(19): siRNA sense strand
guacuuuauccguguauuu

SEQ ID NO: 1827460 - RNA, 19 nt, Homo sapiens
  misc_RNA (1)...(19): siRNA sense strand
ggaacacaguggaguaugc

SEQ ID NO: 1827461 - RNA, 19 nt, Homo sapiens
  misc_RNA (1)...(19): siRNA sense strand
gggaugcccucaaacucaa

SEQ ID NO: 1827462 - RNA, 19 nt, Homo sapiens
  misc_RNA (1)...(19): siRNA sense strand
ggagugcagcuuccaagaa

SEQ ID NO: 1827463 - RNA, 19 nt, Homo sapiens
  misc_RNA (1)...(19): siRNA sense strand
ccaacaagccacaaccaaa

SEQ ID NO: 1827464 - RNA, 19 nt, Homo sapiens
  misc_RNA (1)...(19): siRNA sense strand
gaaauucaaguccaucaag

SEQ ID NO: 1827465 - RNA, 19 nt, Homo sapiens
  misc_RNA (1)...(19): siRNA sense strand
gcacggcacauguguagau

SEQ ID NO: 1827466 - RNA, 19 nt, Homo sapiens
  misc_RNA (1)...(19): siRNA sense strand
ggagauauggggacaauaa

SEQ ID NO: 1827467 - RNA, 19 nt, Homo sapiens
  misc_RNA (1)...(19): siRNA sense strand
gcuguuggcaggugucuuu

SEQ ID NO: 1827468 - RNA, 19 nt, Homo sapiens
  misc_RNA (1)...(19): siRNA sense strand
ggaaagugaaccugucuca

SEQ ID NO: 1827469 - RNA, 19 nt, Homo sapiens
  misc_RNA (1)...(19): siRNA sense strand
gaacgaacugcccauaucu

SEQ ID NO: 1827470 - RNA, 19 nt, Homo sapiens
  misc_RNA (1)...(19): siRNA sense strand
gaagacaccguuggccaaa

SEQ ID NO: 1827471 - RNA, 19 nt, Homo sapiens
  misc_RNA (1)...(19): siRNA sense strand
ggaacugaauaugggauug

SEQ ID NO: 1827472 - RNA, 19 nt, Homo sapiens
  misc_RNA (1)...(19): siRNA sense strand
ccaaagagaccuucacaac

SEQ ID NO: 1827473 - RNA, 19 nt, Homo sapiens
  misc_RNA (1)...(19): siRNA sense strand
aaacccaccugcccacaug

SEQ ID NO: 1827474 - RNA, 19 nt, Homo sapiens
  misc_RNA (1)...(19): siRNA sense strand
gagaugaagcugagaccaa

SEQ ID NO: 1827475 - RNA, 19 nt, Homo sapiens
  misc_RNA (1)...(19): siRNA sense strand
uaaccacguuuacaacauc

SEQ ID NO: 1827476 - RNA, 19 nt, Homo sapiens
  misc_RNA (1)...(19): siRNA sense strand
gagacuguggaauauaaua

SEQ ID NO: 1827477 - RNA, 19 nt, Homo sapiens
  misc_RNA (1)...(19): siRNA sense strand
uagcugggaugcucucaga

SEQ ID NO: 1827478 - RNA, 19 nt, Homo sapiens
  misc_RNA (1)...(19): siRNA sense strand
aagaagagcauuccuguca

SEQ ID NO: 1827479 - RNA, 19 nt, Homo sapiens
  misc_RNA (1)...(19): siRNA sense strand
gaagggccacgaacacuca

SEQ ID NO: 1827480 - RNA, 19 nt, Homo sapiens
  misc_RNA (1)...(19): siRNA sense strand
uggaaccuaugaccaguuu

SEQ ID NO: 1827481 - RNA, 19 nt, Homo sapiens
  misc_RNA (1)...(19): siRNA sense strand
gcaaugaccagggcaagug

SEQ ID NO: 1827482 - RNA, 19 nt, Homo sapiens
  misc_RNA (1)...(19): siRNA sense strand
guuaccugcuggucuauga

SEQ ID NO: 1827483 - RNA, 19 nt, Homo sapiens
  misc_RNA (1)...(19): siRNA sense strand
caucggagaaugccuuuga

SEQ ID NO: 1827484 - RNA, 19 nt, Homo sapiens
  misc_RNA (1)...(19): siRNA sense strand
uaugaccaguuuacuauuc

SEQ ID NO: 1827485 - RNA, 19 nt, Homo sapiens
  misc_RNA (1)...(19): siRNA sense strand
agaccucgauucuccaaga

SEQ ID NO: 1827486 - RNA, 19 nt, Homo sapiens
  misc_RNA (1)...(19): siRNA sense strand
agaaagggcuuauugauua

SEQ ID NO: 1827487 - RNA, 19 nt, Homo sapiens
  misc_RNA (1)...(19): siRNA sense strand
gaaagacacucauauggaa

SEQ ID NO: 1827488 - RNA, 19 nt, Homo sapiens
  misc_RNA (1)...(19): siRNA sense strand
uaacagaaaugguugagaa

SEQ ID NO: 1827489 - RNA, 19 nt, Homo sapiens
  misc_RNA (1)...(19): siRNA sense strand
uaaagaaccucaaggauuc

SEQ ID NO: 1827490 - RNA, 19 nt, Homo sapiens
  misc_RNA (1)...(19): siRNA sense strand
gaaauauggugaaugugaa

SEQ ID NO: 1827491 - RNA, 19 nt, Homo sapiens
  misc_RNA (1)...(19): siRNA sense strand
cuaauaaacuguuggcaaa

SEQ ID NO: 1827492 - RNA, 19 nt, Homo sapiens
  misc_RNA (1)...(19): siRNA sense strand
ccucaaggauuccacuuua

SEQ ID NO: 1827493 - RNA, 19 nt, Homo sapiens
  misc_RNA (1)...(19): siRNA sense strand
ggauuccacuuuacaaauu

SEQ ID NO: 1827494 - RNA, 19 nt, Homo sapiens
  misc_RNA (1)...(19): siRNA sense strand
gaaggaagccucauacagu

SEQ ID NO: 1827495 - RNA, 19 nt, Homo sapiens
  misc_RNA (1)...(19): siRNA sense strand
gaaagggcuuauugauuau

SEQ ID NO: 1827496 - RNA, 19 nt, Homo sapiens
  misc_RNA (1)...(19): siRNA sense strand
caucugaaguugaagcuaa

SEQ ID NO: 1827497 - RNA, 19 nt, Homo sapiens
  misc_RNA (1)...(19): siRNA sense strand
gggaagccauguauaauca

SEQ ID NO: 1827498 - RNA, 19 nt, Homo sapiens
  misc_RNA (1)...(19): siRNA sense strand
gaacaucaggcuuuaauag

SEQ ID NO: 1827499 - RNA, 19 nt, Homo sapiens
  misc_RNA (1)...(19): siRNA sense strand
gaucucaaauccagagcua

SEQ ID NO: 1827500 - RNA, 19 nt, Homo sapiens
  misc_RNA (1)...(19): siRNA sense strand
ggaagaauuuaguccaguu

SEQ ID NO: 1827501 - RNA, 19 nt, Homo sapiens
  misc_RNA (1)...(19): siRNA sense strand
gcagggaguucaugaucaa

SEQ ID NO: 1827502 - RNA, 19 nt, Homo sapiens
  misc_RNA (1)...(19): siRNA sense strand
acacucauauggaagauuu

SEQ ID NO: 1827503 - RNA, 19 nt, Homo sapiens
  misc_RNA (1)...(19): siRNA sense strand
uggaguggcuucuaauaaa

SEQ ID NO: 1827504 - RNA, 19 nt, Homo sapiens
  misc_RNA (1)...(19): siRNA sense strand
gaucagauuuccacauugg

SEQ ID NO: 1827505 - RNA, 19 nt, Homo sapiens
  misc_RNA (1)...(19): siRNA sense strand
gaaauuagggacaggaaau

SEQ ID NO: 1827506 - RNA, 19 nt, Homo sapiens
  misc_RNA (1)...(19): siRNA sense strand
gcaacagacucucaugaag

SEQ ID NO: 1827507 - RNA, 19 nt, Homo sapiens
  misc_RNA (1)...(19): siRNA sense strand
ccacauuggacauaaauaa

SEQ ID NO: 1827508 - RNA, 19 nt, Homo sapiens
  misc_RNA (1)...(19): siRNA sense strand
cgaaauauggugaauguga

SEQ ID NO: 1827509 - RNA, 19 nt, Homo sapiens
  misc_RNA (1)...(19): siRNA sense strand
cuaaagaaccucaaggauu

SEQ ID NO: 1827510 - RNA, 19 nt, Homo sapiens
  misc_RNA (1)...(19): siRNA sense strand
gcaagauauucccauaaau

SEQ ID NO: 1827511 - RNA, 19 nt, Homo sapiens
  misc_RNA (1)...(19): siRNA sense strand
gacaggaaauuaugaugug

SEQ ID NO: 1827512 - RNA, 19 nt, Homo sapiens
  misc_RNA (1)...(19): siRNA sense strand
ggucauguauacaauaauc

SEQ ID NO: 1827513 - RNA, 19 nt, Homo sapiens
  misc_RNA (1)...(19): siRNA sense strand
gaagaugccauuucaccuu

SEQ ID NO: 1827514 - RNA, 19 nt, Homo sapiens
  misc_RNA (1)...(19): siRNA sense strand
gucaacaucuuauucauag

SEQ ID NO: 1827515 - RNA, 19 nt, Homo sapiens
  misc_RNA (1)...(19): siRNA sense strand
gauauucccauaaauccua

SEQ ID NO: 1827516 - RNA, 19 nt, Homo sapiens
  misc_RNA (1)...(19): siRNA sense strand
cuagaggaguauuaucuuu

SEQ ID NO: 1827517 - RNA, 19 nt, Homo sapiens
  misc_RNA (1)...(19): siRNA sense strand
aagaugccauuucaccuua

SEQ ID NO: 1827518 - RNA, 19 nt, Homo sapiens
  misc_RNA (1)...(19): siRNA sense strand
gaggauaacuccccuguga

SEQ ID NO: 1827519 - RNA, 19 nt, Homo sapiens
  misc_RNA (1)...(19): siRNA sense strand
caguagauauucaagaaga

SEQ ID NO: 1827520 - RNA, 19 nt, Homo sapiens
  misc_RNA (1)...(19): siRNA sense strand
ccacaguugguauuaguua

SEQ ID NO: 1827521 - RNA, 19 nt, Homo sapiens
  misc_RNA (1)...(19): siRNA sense strand
gaucauuuauccaguagca

SEQ ID NO: 1827522 - RNA, 19 nt, Homo sapiens
  misc_RNA (1)...(19): siRNA sense strand
gcacuauggucgugagagu

SEQ ID NO: 1827523 - RNA, 19 nt, Homo sapiens
  misc_RNA (1)...(19): siRNA sense strand
agacuuggauuugaugaaa

SEQ ID NO: 1827524 - RNA, 19 nt, Homo sapiens
  misc_RNA (1)...(19): siRNA sense strand
agagaucauuuauccagua

SEQ ID NO: 1827525 - RNA, 19 nt, Homo sapiens
  misc_RNA (1)...(19): siRNA sense strand
caagauauucccauaaauc

SEQ ID NO: 1827526 - RNA, 19 nt, Homo sapiens
  misc_RNA (1)...(19): siRNA sense strand
ugcaagauauucccauaaa

SEQ ID NO: 1827527 - RNA, 19 nt, Homo sapiens
  misc_RNA (1)...(19): siRNA sense strand
ggacaggaaauuaugaugu

SEQ ID NO: 1827528 - RNA, 19 nt, Homo sapiens
  misc_RNA (1)...(19): siRNA sense strand
gaagcacuggguaucaaua

SEQ ID NO: 1827529 - RNA, 19 nt, Homo sapiens
  misc_RNA (1)...(19): siRNA sense strand
gcacaucagacuacuuguu

SEQ ID NO: 1827530 - RNA, 19 nt, Homo sapiens
  misc_RNA (1)...(19): siRNA sense strand
caacaaacagucuuauuac

SEQ ID NO: 1827531 - RNA, 19 nt, Homo sapiens
  misc_RNA (1)...(19): siRNA sense strand
gugcuggaguggcuucuaa

SEQ ID NO: 1827532 - RNA, 19 nt, Homo sapiens
  misc_RNA (1)...(19): siRNA sense strand
agagaaaugucuuauaagg

SEQ ID NO: 1827533 - RNA, 19 nt, Homo sapiens
  misc_RNA (1)...(19): siRNA sense strand
ccaaagacaaagaaacaaa

SEQ ID NO: 1827534 - RNA, 19 nt, Homo sapiens
  misc_RNA (1)...(19): siRNA sense strand
gaauuuaguccaguuguug

SEQ ID NO: 1827535 - RNA, 19 nt, Homo sapiens
  misc_RNA (1)...(19): siRNA sense strand
gaaaauagagagccagauu

SEQ ID NO: 1827536 - RNA, 19 nt, Homo sapiens
  misc_RNA (1)...(19): siRNA sense strand
acagauagccauaagcaaa

SEQ ID NO: 1827537 - RNA, 19 nt, Homo sapiens
  misc_RNA (1)...(19): siRNA sense strand
ggaacaucaggcuuuaaua

SEQ ID NO: 1827538 - RNA, 19 nt, Homo sapiens
  misc_RNA (1)...(19): siRNA sense strand
gauggaaggaagccucaua

SEQ ID NO: 1827539 - RNA, 19 nt, Homo sapiens
  misc_RNA (1)...(19): siRNA sense strand
guagaaaugaucucaaauc

SEQ ID NO: 1827540 - RNA, 19 nt, Homo sapiens
  misc_RNA (1)...(19): siRNA sense strand
gaaaccacacuacagauag

SEQ ID NO: 1827541 - RNA, 19 nt, Homo sapiens
  misc_RNA (1)...(19): siRNA sense strand
ccagaaaccacacuacaga

SEQ ID NO: 1827542 - RNA, 19 nt, Homo sapiens
  misc_RNA (1)...(19): siRNA sense strand
ccaaguggaagaauugaaa

SEQ ID NO: 1827543 - RNA, 19 nt, Homo sapiens
  misc_RNA (1)...(19): siRNA sense strand
ccuauuccuucacauguaa

SEQ ID NO: 1827544 - RNA, 19 nt, Homo sapiens
  misc_RNA (1)...(19): siRNA sense strand
caugaaggacuuacagaaa

SEQ ID NO: 1827545 - RNA, 19 nt, Homo sapiens
  misc_RNA (1)...(19): siRNA sense strand
acagaaauauuuggugguu

SEQ ID NO: 1827546 - RNA, 19 nt, Homo sapiens
  misc_RNA (1)...(19): siRNA sense strand
ugaaagacacucauaugga

SEQ ID NO: 1827547 - RNA, 19 nt, Homo sapiens
  misc_RNA (1)...(19): siRNA sense strand
gugguuaccugcaacuaug

SEQ ID NO: 1827548 - RNA, 19 nt, Homo sapiens
  misc_RNA (1)...(19): siRNA sense strand
uuacagaauuacuggaaga

SEQ ID NO: 1827549 - RNA, 19 nt, Homo sapiens
  misc_RNA (1)...(19): siRNA sense strand
agaaaccacacuacagaua

SEQ ID NO: 1827550 - RNA, 19 nt, Homo sapiens
  misc_RNA (1)...(19): siRNA sense strand
caagggaaaggaaguguga

SEQ ID NO: 1827551 - RNA, 19 nt, Homo sapiens
  misc_RNA (1)...(19): siRNA sense strand
ugaagguguugaccaagaa

SEQ ID NO: 1827552 - RNA, 19 nt, Homo sapiens
  misc_RNA (1)...(19): siRNA sense strand
cuuauuaccugaaaguugu

SEQ ID NO: 1827553 - RNA, 19 nt, Homo sapiens
  misc_RNA (1)...(19): siRNA sense strand
gaagccauguauaaucagu

SEQ ID NO: 1827554 - RNA, 19 nt, Homo sapiens
  misc_RNA (1)...(19): siRNA sense strand
ggguucaacagaaauauuu

SEQ ID NO: 1827555 - RNA, 19 nt, Homo sapiens
  misc_RNA (1)...(19): siRNA sense strand
aggaucagauuuccacauu

SEQ ID NO: 1827556 - RNA, 19 nt, Homo sapiens
  misc_RNA (1)...(19): siRNA sense strand
ugaacuaccagaagcagua

SEQ ID NO: 1827557 - RNA, 19 nt, Homo sapiens
  misc_RNA (1)...(19): siRNA sense strand
uccaguagauauucaagaa

SEQ ID NO: 1827558 - RNA, 19 nt, Homo sapiens
  misc_RNA (1)...(19): siRNA sense strand
aagaaagggcuuauugauu

SEQ ID NO: 1827559 - RNA, 19 nt, Homo sapiens
  misc_RNA (1)...(19): siRNA sense strand
gaaauuaugaugugaugac

SEQ ID NO: 1827560 - RNA, 19 nt, Homo sapiens
  misc_RNA (1)...(19): siRNA sense strand
ggaguggcuucuaauaaac

SEQ ID NO: 1827561 - RNA, 19 nt, Homo sapiens
  misc_RNA (1)...(19): siRNA sense strand
cgggucauguauacaauaa

SEQ ID NO: 1827562 - RNA, 19 nt, Homo sapiens
  misc_RNA (1)...(19): siRNA sense strand
cagaaauauuuggugguua

SEQ ID NO: 1827563 - RNA, 19 nt, Homo sapiens
  misc_RNA (1)...(19): siRNA sense strand
ugagagacuuggauuugau

SEQ ID NO: 1827564 - RNA, 19 nt, Homo sapiens
  misc_RNA (1)...(19): siRNA sense strand
gagaucauuuauccaguag

SEQ ID NO: 1827565 - RNA, 19 nt, Homo sapiens
  misc_RNA (1)...(19): siRNA sense strand
cacuagauaccacaaauuu

SEQ ID NO: 1827566 - RNA, 19 nt, Homo sapiens
  misc_RNA (1)...(19): siRNA sense strand
agaaauauuuggugguuac

SEQ ID NO: 1827567 - RNA, 19 nt, Homo sapiens
  misc_RNA (1)...(19): siRNA sense strand
ggaucagauuuccacauug

SEQ ID NO: 1827568 - RNA, 19 nt, Homo sapiens
  misc_RNA (1)...(19): siRNA sense strand
aaugcaagauauucccaua

SEQ ID NO: 1827569 - RNA, 19 nt, Homo sapiens
  misc_RNA (1)...(19): siRNA sense strand
ggaagaauugaaaguacaa

SEQ ID NO: 1827570 - RNA, 19 nt, Homo sapiens
  misc_RNA (1)...(19): siRNA sense strand
agaaaugguugagaagaga

SEQ ID NO: 1827571 - RNA, 19 nt, Homo sapiens
  misc_RNA (1)...(19): siRNA sense strand
cagaaaugguugagaagag

SEQ ID NO: 1827572 - RNA, 19 nt, Homo sapiens
  misc_RNA (1)...(19): siRNA sense strand
gaagaauuuaguccaguug

SEQ ID NO: 1827573 - RNA, 19 nt, Homo sapiens
  misc_RNA (1)...(19): siRNA sense strand
gcacuaaauacugcuaaga

SEQ ID NO: 1827574 - RNA, 19 nt, Homo sapiens
  misc_RNA (1)...(19): siRNA sense strand
ccaaugguugauauacuua

SEQ ID NO: 1827575 - RNA, 19 nt, Homo sapiens
  misc_RNA (1)...(19): siRNA sense strand
aaacagaguaugccaagau

SEQ ID NO: 1827576 - RNA, 19 nt, Homo sapiens
  misc_RNA (1)...(19): siRNA sense strand
ccaccucaguccuuuagug

SEQ ID NO: 1827577 - RNA, 19 nt, Homo sapiens
  misc_RNA (1)...(19): siRNA sense strand
ggaucuaacagaaaugguu

SEQ ID NO: 1827578 - RNA, 19 nt, Homo sapiens
  misc_RNA (1)...(19): siRNA sense strand
gaauaagucaaggaccuaa

SEQ ID NO: 1827579 - RNA, 19 nt, Homo sapiens
  misc_RNA (1)...(19): siRNA sense strand
gggaacaucaggcuuuaau

SEQ ID NO: 1827580 - RNA, 19 nt, Homo sapiens
  misc_RNA (1)...(19): siRNA sense strand
ggaaggaagccucauacag

SEQ ID NO: 1827581 - RNA, 19 nt, Homo sapiens
  misc_RNA (1)...(19): siRNA sense strand
gcuggaguggcuucuaaua

SEQ ID NO: 1827582 - RNA, 19 nt, Homo sapiens
  misc_RNA (1)...(19): siRNA sense strand
aaauuacuuucccuucuga

SEQ ID NO: 1827583 - RNA, 19 nt, Homo sapiens
  misc_RNA (1)...(19): siRNA sense strand
caguaguucuucuuacaug

SEQ ID NO: 1827584 - RNA, 19 nt, Homo sapiens
  misc_RNA (1)...(19): siRNA sense strand
gggaguucaugaucaagug

SEQ ID NO: 1827585 - RNA, 19 nt, Homo sapiens
  misc_RNA (1)...(19): siRNA sense strand
cccaaugguugauauacuu

SEQ ID NO: 1827586 - RNA, 19 nt, Homo sapiens
  misc_RNA (1)...(19): siRNA sense strand
gaacagagccuccuagaaa

SEQ ID NO: 1827587 - RNA, 19 nt, Homo sapiens
  misc_RNA (1)...(19): siRNA sense strand
gagcagaaaucaugagauc

SEQ ID NO: 1827588 - RNA, 19 nt, Homo sapiens
  misc_RNA (1)...(19): siRNA sense strand
cagcagaccuucaaucucu

SEQ ID NO: 1827589 - RNA, 19 nt, Homo sapiens
  misc_RNA (1)...(19): siRNA sense strand
gaacuuuaccagcaacuga

SEQ ID NO: 1827590 - RNA, 19 nt, Homo sapiens
  misc_RNA (1)...(19): siRNA sense strand
gaaauacuuccaaagaauc

SEQ ID NO: 1827591 - RNA, 19 nt, Homo sapiens
  misc_RNA (1)...(19): siRNA sense strand
ggaacagagccuccuagaa

SEQ ID NO: 1827592 - RNA, 19 nt, Homo sapiens
  misc_RNA (1)...(19): siRNA sense strand
ggaagagacuccccugaug

SEQ ID NO: 1827593 - RNA, 19 nt, Homo sapiens
  misc_RNA (1)...(19): siRNA sense strand
gaaggacagacaugauuuc

SEQ ID NO: 1827594 - RNA, 19 nt, Homo sapiens
  misc_RNA (1)...(19): siRNA sense strand
ugucagagcagaaaucaug

SEQ ID NO: 1827595 - RNA, 19 nt, Homo sapiens
  misc_RNA (1)...(19): siRNA sense strand
ugggaagaaucucuccuuu

SEQ ID NO: 1827596 - RNA, 19 nt, Homo sapiens
  misc_RNA (1)...(19): siRNA sense strand
ugaaggacagacaugauuu

SEQ ID NO: 1827597 - RNA, 19 nt, Homo sapiens
  misc_RNA (1)...(19): siRNA sense strand
uaauaggagggccuugaua

SEQ ID NO: 1827598 - RNA, 19 nt, Homo sapiens
  misc_RNA (1)...(19): siRNA sense strand
ggaagcaugugugauacag

SEQ ID NO: 1827599 - RNA, 19 nt, Homo sapiens
  misc_RNA (1)...(19): siRNA sense strand
gggaagaaucucuccuuuc

SEQ ID NO: 1827600 - RNA, 19 nt, Homo sapiens
  misc_RNA (1)...(19): siRNA sense strand
gaagagacuccccugauga

SEQ ID NO: 1827601 - RNA, 19 nt, Homo sapiens
  misc_RNA (1)...(19): siRNA sense strand
gguaauaggagggccuuga

SEQ ID NO: 1827602 - RNA, 19 nt, Homo sapiens
  misc_RNA (1)...(19): siRNA sense strand
ccaucucuguccuccauga

SEQ ID NO: 1827603 - RNA, 19 nt, Homo sapiens
  misc_RNA (1)...(19): siRNA sense strand
gaggaaauacagcccuugu

SEQ ID NO: 1827604 - RNA, 19 nt, Homo sapiens
  misc_RNA (1)...(19): siRNA sense strand
gggaacagagccuccuaga

SEQ ID NO: 1827605 - RNA, 19 nt, Homo sapiens
  misc_RNA (1)...(19): siRNA sense strand
guaauaggagggccuugau

SEQ ID NO: 1827606 - RNA, 19 nt, Homo sapiens
  misc_RNA (1)...(19): siRNA sense strand
acccacagccucgguaaua

SEQ ID NO: 1827607 - RNA, 19 nt, Homo sapiens
  misc_RNA (1)...(19): siRNA sense strand
gagguugucagagcagaaa

SEQ ID NO: 1827608 - RNA, 19 nt, Homo sapiens
  misc_RNA (1)...(19): siRNA sense strand
agacuccccugaugaauga

SEQ ID NO: 1827609 - RNA, 19 nt, Homo sapiens
  misc_RNA (1)...(19): siRNA sense strand
gcagaccuucaaucucuuc

SEQ ID NO: 1827610 - RNA, 19 nt, Homo sapiens
  misc_RNA (1)...(19): siRNA sense strand
cagcacagaggacucaucu

SEQ ID NO: 1827611 - RNA, 19 nt, Homo sapiens
  misc_RNA (1)...(19): siRNA sense strand
cagagcagaaaucaugaga

SEQ ID NO: 1827612 - RNA, 19 nt, Homo sapiens
  misc_RNA (1)...(19): siRNA sense strand
ggagguugucagagcagaa

SEQ ID NO: 1827613 - RNA, 19 nt, Homo sapiens
  misc_RNA (1)...(19): siRNA sense strand
ggacagacaugacuuugaa

SEQ ID NO: 1827614 - RNA, 19 nt, Homo sapiens
  misc_RNA (1)...(19): siRNA sense strand
gcaaaugaaugaccuggaa

SEQ ID NO: 1827615 - RNA, 19 nt, Homo sapiens
  misc_RNA (1)...(19): siRNA sense strand
gagcagaaaucaugagauc

SEQ ID NO: 1827616 - RNA, 19 nt, Homo sapiens
  misc_RNA (1)...(19): siRNA sense strand
gaugagacccuccuagaaa

SEQ ID NO: 1827617 - RNA, 19 nt, Homo sapiens
  misc_RNA (1)...(19): siRNA sense strand
gcauugcccuuugcuuuaa

SEQ ID NO: 1827618 - RNA, 19 nt, Homo sapiens
  misc_RNA (1)...(19): siRNA sense strand
cagcagaccuucaaucucu

SEQ ID NO: 1827619 - RNA, 19 nt, Homo sapiens
  misc_RNA (1)...(19): siRNA sense strand
gaaggacagacaugacuuu

SEQ ID NO: 1827620 - RNA, 19 nt, Homo sapiens
  misc_RNA (1)...(19): siRNA sense strand
gcacaaaugaggagaaucu

SEQ ID NO: 1827621 - RNA, 19 nt, Homo sapiens
  misc_RNA (1)...(19): siRNA sense strand
agacaugacuuugaauuuc

SEQ ID NO: 1827622 - RNA, 19 nt, Homo sapiens
  misc_RNA (1)...(19): siRNA sense strand
ccuggaagccugugugaua

SEQ ID NO: 1827623 - RNA, 19 nt, Homo sapiens
  misc_RNA (1)...(19): siRNA sense strand
gcccuuugcuuuaaugaug

SEQ ID NO: 1827624 - RNA, 19 nt, Homo sapiens
  misc_RNA (1)...(19): siRNA sense strand
gaaauacuuccaaagaauc

SEQ ID NO: 1827625 - RNA, 19 nt, Homo sapiens
  misc_RNA (1)...(19): siRNA sense strand
gaagaaauacagcccuugu

SEQ ID NO: 1827626 - RNA, 19 nt, Homo sapiens
  misc_RNA (1)...(19): siRNA sense strand
gcuguaaucugucucaaac

SEQ ID NO: 1827627 - RNA, 19 nt, Homo sapiens
  misc_RNA (1)...(19): siRNA sense strand
ggaugagacccuccuagaa

SEQ ID NO: 1827628 - RNA, 19 nt, Homo sapiens
  misc_RNA (1)...(19): siRNA sense strand
ucucugggcuguaaucugu

SEQ ID NO: 1827629 - RNA, 19 nt, Homo sapiens
  misc_RNA (1)...(19): siRNA sense strand
gugcucagcugcaagucaa

SEQ ID NO: 1827630 - RNA, 19 nt, Homo sapiens
  misc_RNA (1)...(19): siRNA sense strand
ggaagagacuccccugaug

SEQ ID NO: 1827631 - RNA, 19 nt, Homo sapiens
  misc_RNA (1)...(19): siRNA sense strand
caaacccacagccugaaua

SEQ ID NO: 1827632 - RNA, 19 nt, Homo sapiens
  misc_RNA (1)...(19): siRNA sense strand
ugucagagcagaaaucaug

SEQ ID NO: 1827633 - RNA, 19 nt, Homo sapiens
  misc_RNA (1)...(19): siRNA sense strand
cagacaugacuuugaauuu

SEQ ID NO: 1827634 - RNA, 19 nt, Homo sapiens
  misc_RNA (1)...(19): siRNA sense strand
gcaaccaguuccagaaagc

SEQ ID NO: 1827635 - RNA, 19 nt, Homo sapiens
  misc_RNA (1)...(19): siRNA sense strand
gggaugagacccuccuaga

SEQ ID NO: 1827636 - RNA, 19 nt, Homo sapiens
  misc_RNA (1)...(19): siRNA sense strand
gcugcucucugggcuguaa

SEQ ID NO: 1827637 - RNA, 19 nt, Homo sapiens
  misc_RNA (1)...(19): siRNA sense strand
gaacuuuuccagcaaauga

SEQ ID NO: 1827638 - RNA, 19 nt, Homo sapiens
  misc_RNA (1)...(19): siRNA sense strand
aaacccacagccugaauaa

SEQ ID NO: 1827639 - RNA, 19 nt, Homo sapiens
  misc_RNA (1)...(19): siRNA sense strand
ugaauaacaggaggacuuu

SEQ ID NO: 1827640 - RNA, 19 nt, Homo sapiens
  misc_RNA (1)...(19): siRNA sense strand
gaagagacuccccugauga

SEQ ID NO: 1827641 - RNA, 19 nt, Homo sapiens
  misc_RNA (1)...(19): siRNA sense strand
aauaacaggaggacuuuga

SEQ ID NO: 1827642 - RNA, 19 nt, Homo sapiens
  misc_RNA (1)...(19): siRNA sense strand
ccaucucuguccuccauga

SEQ ID NO: 1827643 - RNA, 19 nt, Homo sapiens
  misc_RNA (1)...(19): siRNA sense strand
gacaugacuuugaauuucc

SEQ ID NO: 1827644 - RNA, 19 nt, Homo sapiens
  misc_RNA (1)...(19): siRNA sense strand
agaaucacucuuuaucuga

SEQ ID NO: 1827645 - RNA, 19 nt, Homo sapiens
  misc_RNA (1)...(19): siRNA sense strand
uaacaggaggacuuugaug

SEQ ID NO: 1827646 - RNA, 19 nt, Homo sapiens
  misc_RNA (1)...(19): siRNA sense strand
ggaggacuuugaugcucau

SEQ ID NO: 1827647 - RNA, 19 nt, Homo sapiens
  misc_RNA (1)...(19): siRNA sense strand
acagacaugacuuugaauu

SEQ ID NO: 1827648 - RNA, 19 nt, Homo sapiens
  misc_RNA (1)...(19): siRNA sense strand
uucaaucucuucagcacaa

SEQ ID NO: 1827649 - RNA, 19 nt, Homo sapiens
  misc_RNA (1)...(19): siRNA sense strand
gagguugucagagcagaaa

SEQ ID NO: 1827650 - RNA, 19 nt, Homo sapiens
  misc_RNA (1)...(19): siRNA sense strand
ggcaaccaguuccagaaag

SEQ ID NO: 1827651 - RNA, 19 nt, Homo sapiens
  misc_RNA (1)...(19): siRNA sense strand
agacuccccugaugaauga

SEQ ID NO: 1827652 - RNA, 19 nt, Homo sapiens
  misc_RNA (1)...(19): siRNA sense strand
cucuuuaucugauggagaa

SEQ ID NO: 1827653 - RNA, 19 nt, Homo sapiens
  misc_RNA (1)...(19): siRNA sense strand
gaccuggaagccuguguga

SEQ ID NO: 1827654 - RNA, 19 nt, Homo sapiens
  misc_RNA (1)...(19): siRNA sense strand
uggcacaaaugaggagaau

SEQ ID NO: 1827655 - RNA, 19 nt, Homo sapiens
  misc_RNA (1)...(19): siRNA sense strand
cugaauaacaggaggacuu

SEQ ID NO: 1827656 - RNA, 19 nt, Homo sapiens
  misc_RNA (1)...(19): siRNA sense strand
gcagaccuucaaucucuuc

SEQ ID NO: 1827657 - RNA, 19 nt, Homo sapiens
  misc_RNA (1)...(19): siRNA sense strand
uuuaucugauggagaagaa

SEQ ID NO: 1827658 - RNA, 19 nt, Homo sapiens
  misc_RNA (1)...(19): siRNA sense strand
acccacagccugaauaaca

SEQ ID NO: 1827659 - RNA, 19 nt, Homo sapiens
  misc_RNA (1)...(19): siRNA sense strand
gcagcagaccuucaaucuc

SEQ ID NO: 1827660 - RNA, 19 nt, Homo sapiens
  misc_RNA (1)...(19): siRNA sense strand
cagagcagaaaucaugaga

SEQ ID NO: 1827661 - RNA, 19 nt, Homo sapiens
  misc_RNA (1)...(19): siRNA sense strand
gaauaacaggaggacuuug

SEQ ID NO: 1827662 - RNA, 19 nt, Homo sapiens
  misc_RNA (1)...(19): siRNA sense strand
ggagguugucagagcagaa

SEQ ID NO: 1827663 - RNA, 19 nt, Homo sapiens
  misc_RNA (1)...(19): siRNA sense strand
gagcagaaaucaugagauc

SEQ ID NO: 1827664 - RNA, 19 nt, Homo sapiens
  misc_RNA (1)...(19): siRNA sense strand
gcaacugaaugaccuagaa

SEQ ID NO: 1827665 - RNA, 19 nt, Homo sapiens
  misc_RNA (1)...(19): siRNA sense strand
cagcagaccuucaaucucu

SEQ ID NO: 1827666 - RNA, 19 nt, Homo sapiens
  misc_RNA (1)...(19): siRNA sense strand
gaagagauugcccugauga

SEQ ID NO: 1827667 - RNA, 19 nt, Homo sapiens
  misc_RNA (1)...(19): siRNA sense strand
gcacaaaugggaagaaucu

SEQ ID NO: 1827668 - RNA, 19 nt, Homo sapiens
  misc_RNA (1)...(19): siRNA sense strand
ggaagagauugcccugaug

SEQ ID NO: 1827669 - RNA, 19 nt, Homo sapiens
  misc_RNA (1)...(19): siRNA sense strand
gagauugcccugaugaaug

SEQ ID NO: 1827670 - RNA, 19 nt, Homo sapiens
  misc_RNA (1)...(19): siRNA sense strand
gaagaaauacagcccuugu

SEQ ID NO: 1827671 - RNA, 19 nt, Homo sapiens
  misc_RNA (1)...(19): siRNA sense strand
agauugcccugaugaauga

SEQ ID NO: 1827672 - RNA, 19 nt, Homo sapiens
  misc_RNA (1)...(19): siRNA sense strand
gaugagacccuccuagaca

SEQ ID NO: 1827673 - RNA, 19 nt, Homo sapiens
  misc_RNA (1)...(19): siRNA sense strand
ugggaagaaucucucauuu

SEQ ID NO: 1827674 - RNA, 19 nt, Homo sapiens
  misc_RNA (1)...(19): siRNA sense strand
ggauuaagaaggaaggauu

SEQ ID NO: 1827675 - RNA, 19 nt, Homo sapiens
  misc_RNA (1)...(19): siRNA sense strand
cagauaugauuucggauuc

SEQ ID NO: 1827676 - RNA, 19 nt, Homo sapiens
  misc_RNA (1)...(19): siRNA sense strand
gaaggacagauaugauuuc

SEQ ID NO: 1827677 - RNA, 19 nt, Homo sapiens
  misc_RNA (1)...(19): siRNA sense strand
gggaagaaucucucauuuc

SEQ ID NO: 1827678 - RNA, 19 nt, Homo sapiens
  misc_RNA (1)...(19): siRNA sense strand
ugaaggacagauaugauuu

SEQ ID NO: 1827679 - RNA, 19 nt, Homo sapiens
  misc_RNA (1)...(19): siRNA sense strand
ugucagagcagaaaucaug

SEQ ID NO: 1827680 - RNA, 19 nt, Homo sapiens
  misc_RNA (1)...(19): siRNA sense strand
acucacagccuggguaaua

SEQ ID NO: 1827681 - RNA, 19 nt, Homo sapiens
  misc_RNA (1)...(19): siRNA sense strand
gggaugagacccuccuaga

SEQ ID NO: 1827682 - RNA, 19 nt, Homo sapiens
  misc_RNA (1)...(19): siRNA sense strand
uggaagagauugcccugau

SEQ ID NO: 1827683 - RNA, 19 nt, Homo sapiens
  misc_RNA (1)...(19): siRNA sense strand
uaauaggagggccuugaua

SEQ ID NO: 1827684 - RNA, 19 nt, Homo sapiens
  misc_RNA (1)...(19): siRNA sense strand
gacaaauucuacauugaac

SEQ ID NO: 1827685 - RNA, 19 nt, Homo sapiens
  misc_RNA (1)...(19): siRNA sense strand
ccuagaagccugugugaca

SEQ ID NO: 1827686 - RNA, 19 nt, Homo sapiens
  misc_RNA (1)...(19): siRNA sense strand
gauuaagaaggaaggauug

SEQ ID NO: 1827687 - RNA, 19 nt, Homo sapiens
  misc_RNA (1)...(19): siRNA sense strand
gguaauaggagggccuuga

SEQ ID NO: 1827688 - RNA, 19 nt, Homo sapiens
  misc_RNA (1)...(19): siRNA sense strand
acagauaugauuucggauu

SEQ ID NO: 1827689 - RNA, 19 nt, Homo sapiens
  misc_RNA (1)...(19): siRNA sense strand
agaaucacucuuuaucuga

SEQ ID NO: 1827690 - RNA, 19 nt, Homo sapiens
  misc_RNA (1)...(19): siRNA sense strand
guaauaggagggccuugau

SEQ ID NO: 1827691 - RNA, 19 nt, Homo sapiens
  misc_RNA (1)...(19): siRNA sense strand
cugaaggacagauaugauu

SEQ ID NO: 1827692 - RNA, 19 nt, Homo sapiens
  misc_RNA (1)...(19): siRNA sense strand
gaacuuuuccagcaacuga

SEQ ID NO: 1827693 - RNA, 19 nt, Homo sapiens
  misc_RNA (1)...(19): siRNA sense strand
uucaaucucuucagcacaa

SEQ ID NO: 1827694 - RNA, 19 nt, Homo sapiens
  misc_RNA (1)...(19): siRNA sense strand
gagguugucagagcagaaa

SEQ ID NO: 1827695 - RNA, 19 nt, Homo sapiens
  misc_RNA (1)...(19): siRNA sense strand
gaccuagaagccuguguga

SEQ ID NO: 1827696 - RNA, 19 nt, Homo sapiens
  misc_RNA (1)...(19): siRNA sense strand
ugauacuccuggcacaaau

SEQ ID NO: 1827697 - RNA, 19 nt, Homo sapiens
  misc_RNA (1)...(19): siRNA sense strand
agacccuccuagacaaauu

SEQ ID NO: 1827698 - RNA, 19 nt, Homo sapiens
  misc_RNA (1)...(19): siRNA sense strand
uggcacaaaugggaagaau

SEQ ID NO: 1827699 - RNA, 19 nt, Homo sapiens
  misc_RNA (1)...(19): siRNA sense strand
gcagaccuucaaucucuuc

SEQ ID NO: 1827700 - RNA, 19 nt, Homo sapiens
  misc_RNA (1)...(19): siRNA sense strand
ggaugagacccuccuagac

SEQ ID NO: 1827701 - RNA, 19 nt, Homo sapiens
  misc_RNA (1)...(19): siRNA sense strand
gauacuccuggcacaaaug

SEQ ID NO: 1827702 - RNA, 19 nt, Homo sapiens
  misc_RNA (1)...(19): siRNA sense strand
cagagcagaaaucaugaga

SEQ ID NO: 1827703 - RNA, 19 nt, Homo sapiens
  misc_RNA (1)...(19): siRNA sense strand
agacucacagccuggguaa

SEQ ID NO: 1827704 - RNA, 19 nt, Homo sapiens
  misc_RNA (1)...(19): siRNA sense strand
caacugaaugaccuagaag

SEQ ID NO: 1827705 - RNA, 19 nt, Homo sapiens
  misc_RNA (1)...(19): siRNA sense strand
ggagguugucagagcagaa

SEQ ID NO: 1827706 - RNA, 19 nt, Homo sapiens
  misc_RNA (1)...(19): siRNA sense strand
gaacagagccuccuagaaa

SEQ ID NO: 1827707 - RNA, 19 nt, Homo sapiens
  misc_RNA (1)...(19): siRNA sense strand
ggacagacaugacuuugga

SEQ ID NO: 1827708 - RNA, 19 nt, Homo sapiens
  misc_RNA (1)...(19): siRNA sense strand
gagcagaaaucaugagauc

SEQ ID NO: 1827709 - RNA, 19 nt, Homo sapiens
  misc_RNA (1)...(19): siRNA sense strand
acaaaggacucaucugcua

SEQ ID NO: 1827710 - RNA, 19 nt, Homo sapiens
  misc_RNA (1)...(19): siRNA sense strand
cagcagaccuucaaucucu

SEQ ID NO: 1827711 - RNA, 19 nt, Homo sapiens
  misc_RNA (1)...(19): siRNA sense strand
gaaggacagacaugacuuu

SEQ ID NO: 1827712 - RNA, 19 nt, Homo sapiens
  misc_RNA (1)...(19): siRNA sense strand
gaaauacuuccaaagaauc

SEQ ID NO: 1827713 - RNA, 19 nt, Homo sapiens
  misc_RNA (1)...(19): siRNA sense strand
gaagaaauacagcccuugu

SEQ ID NO: 1827714 - RNA, 19 nt, Homo sapiens
  misc_RNA (1)...(19): siRNA sense strand
ggaacagagccuccuagaa

SEQ ID NO: 1827715 - RNA, 19 nt, Homo sapiens
  misc_RNA (1)...(19): siRNA sense strand
ggaagagacuccccugaug

SEQ ID NO: 1827716 - RNA, 19 nt, Homo sapiens
  misc_RNA (1)...(19): siRNA sense strand
ugucagagcagaaaucaug

SEQ ID NO: 1827717 - RNA, 19 nt, Homo sapiens
  misc_RNA (1)...(19): siRNA sense strand
uaauaggagggccuugaua

SEQ ID NO: 1827718 - RNA, 19 nt, Homo sapiens
  misc_RNA (1)...(19): siRNA sense strand
gaaaucaugagauccuucu

SEQ ID NO: 1827719 - RNA, 19 nt, Homo sapiens
  misc_RNA (1)...(19): siRNA sense strand
ugacagagaagaaauacag

SEQ ID NO: 1827720 - RNA, 19 nt, Homo sapiens
  misc_RNA (1)...(19): siRNA sense strand
gaagagacuccccugauga

SEQ ID NO: 1827721 - RNA, 19 nt, Homo sapiens
  misc_RNA (1)...(19): siRNA sense strand
gauuaaggaggaaggaaug

SEQ ID NO: 1827722 - RNA, 19 nt, Homo sapiens
  misc_RNA (1)...(19): siRNA sense strand
gguaauaggagggccuuga

SEQ ID NO: 1827723 - RNA, 19 nt, Homo sapiens
  misc_RNA (1)...(19): siRNA sense strand
gcagaaaucaugagauccu

SEQ ID NO: 1827724 - RNA, 19 nt, Homo sapiens
  misc_RNA (1)...(19): siRNA sense strand
ccaucucuguccuccauga

SEQ ID NO: 1827725 - RNA, 19 nt, Homo sapiens
  misc_RNA (1)...(19): siRNA sense strand
agaaucacucuuuaucuga

SEQ ID NO: 1827726 - RNA, 19 nt, Homo sapiens
  misc_RNA (1)...(19): siRNA sense strand
gggaacagagccuccuaga

SEQ ID NO: 1827727 - RNA, 19 nt, Homo sapiens
  misc_RNA (1)...(19): siRNA sense strand
guaauaggagggccuugau

SEQ ID NO: 1827728 - RNA, 19 nt, Homo sapiens
  misc_RNA (1)...(19): siRNA sense strand
uucaaucucuucagcacaa

SEQ ID NO: 1827729 - RNA, 19 nt, Homo sapiens
  misc_RNA (1)...(19): siRNA sense strand
gagguugucagagcagaaa

SEQ ID NO: 1827730 - RNA, 19 nt, Homo sapiens
  misc_RNA (1)...(19): siRNA sense strand
cagaaaucaugagauccuu

SEQ ID NO: 1827731 - RNA, 19 nt, Homo sapiens
  misc_RNA (1)...(19): siRNA sense strand
gauccuucucuuuaucaaa

SEQ ID NO: 1827732 - RNA, 19 nt, Homo sapiens
  misc_RNA (1)...(19): siRNA sense strand
agacaugacuuuggauucc

SEQ ID NO: 1827733 - RNA, 19 nt, Homo sapiens
  misc_RNA (1)...(19): siRNA sense strand
gcagaccuucaaucucuuc

SEQ ID NO: 1827734 - RNA, 19 nt, Homo sapiens
  misc_RNA (1)...(19): siRNA sense strand
acagacaugacuuuggauu

SEQ ID NO: 1827735 - RNA, 19 nt, Homo sapiens
  misc_RNA (1)...(19): siRNA sense strand
cagagcagaaaucaugaga

SEQ ID NO: 1827736 - RNA, 19 nt, Homo sapiens
  misc_RNA (1)...(19): siRNA sense strand
ggagguugucagagcagaa

SEQ ID NO: 1827737 - RNA, 19 nt, Homo sapiens
  misc_RNA (1)...(19): siRNA sense strand
ggacagacaugacuuugaa

SEQ ID NO: 1827738 - RNA, 19 nt, Homo sapiens
  misc_RNA (1)...(19): siRNA sense strand
ggacucaucugcugcuuug

SEQ ID NO: 1827739 - RNA, 19 nt, Homo sapiens
  misc_RNA (1)...(19): siRNA sense strand
gagcagaaaucaugagauc

SEQ ID NO: 1827740 - RNA, 19 nt, Homo sapiens
  misc_RNA (1)...(19): siRNA sense strand
gcacaaaugcgaagaaucu

SEQ ID NO: 1827741 - RNA, 19 nt, Homo sapiens
  misc_RNA (1)...(19): siRNA sense strand
gaugagacccuucuagaug

SEQ ID NO: 1827742 - RNA, 19 nt, Homo sapiens
  misc_RNA (1)...(19): siRNA sense strand
gaaggacagacaugacuuu

SEQ ID NO: 1827743 - RNA, 19 nt, Homo sapiens
  misc_RNA (1)...(19): siRNA sense strand
caaagaaucacucuauauc

SEQ ID NO: 1827744 - RNA, 19 nt, Homo sapiens
  misc_RNA (1)...(19): siRNA sense strand
uaacaggagggccuugaua

SEQ ID NO: 1827745 - RNA, 19 nt, Homo sapiens
  misc_RNA (1)...(19): siRNA sense strand
ccaaagaaucacucuauau

SEQ ID NO: 1827746 - RNA, 19 nt, Homo sapiens
  misc_RNA (1)...(19): siRNA sense strand
gaaauacuuccaaagaauc

SEQ ID NO: 1827747 - RNA, 19 nt, Homo sapiens
  misc_RNA (1)...(19): siRNA sense strand
gcagcugaaugaccuggaa

SEQ ID NO: 1827748 - RNA, 19 nt, Homo sapiens
  misc_RNA (1)...(19): siRNA sense strand
uccaaagaaucacucuaua

SEQ ID NO: 1827749 - RNA, 19 nt, Homo sapiens
  misc_RNA (1)...(19): siRNA sense strand
aagaaucacucuauaucug

SEQ ID NO: 1827750 - RNA, 19 nt, Homo sapiens
  misc_RNA (1)...(19): siRNA sense strand
ugucagagcagaaaucaug

SEQ ID NO: 1827751 - RNA, 19 nt, Homo sapiens
  misc_RNA (1)...(19): siRNA sense strand
ggaugagacccuucuagau

SEQ ID NO: 1827752 - RNA, 19 nt, Homo sapiens
  misc_RNA (1)...(19): siRNA sense strand
gauugaagaguaaggaaug

SEQ ID NO: 1827753 - RNA, 19 nt, Homo sapiens
  misc_RNA (1)...(19): siRNA sense strand
gauagagucuccccugaug

SEQ ID NO: 1827754 - RNA, 19 nt, Homo sapiens
  misc_RNA (1)...(19): siRNA sense strand
gaaaucaugagauccuucu

SEQ ID NO: 1827755 - RNA, 19 nt, Homo sapiens
  misc_RNA (1)...(19): siRNA sense strand
ugacagagaagaaauacag

SEQ ID NO: 1827756 - RNA, 19 nt, Homo sapiens
  misc_RNA (1)...(19): siRNA sense strand
augagacccuucuagauga

SEQ ID NO: 1827757 - RNA, 19 nt, Homo sapiens
  misc_RNA (1)...(19): siRNA sense strand
gcagaaaucaugagauccu

SEQ ID NO: 1827758 - RNA, 19 nt, Homo sapiens
  misc_RNA (1)...(19): siRNA sense strand
ccaucucuguccuccauga

SEQ ID NO: 1827759 - RNA, 19 nt, Homo sapiens
  misc_RNA (1)...(19): siRNA sense strand
ugagacccuucuagaugaa

SEQ ID NO: 1827760 - RNA, 19 nt, Homo sapiens
  misc_RNA (1)...(19): siRNA sense strand
agaaucacucuauaucuga

SEQ ID NO: 1827761 - RNA, 19 nt, Homo sapiens
  misc_RNA (1)...(19): siRNA sense strand
acagacaugacuuugaauu

SEQ ID NO: 1827762 - RNA, 19 nt, Homo sapiens
  misc_RNA (1)...(19): siRNA sense strand
gagguugucagagcagaaa

SEQ ID NO: 1827763 - RNA, 19 nt, Homo sapiens
  misc_RNA (1)...(19): siRNA sense strand
agacaugacuuugaauucc

SEQ ID NO: 1827764 - RNA, 19 nt, Homo sapiens
  misc_RNA (1)...(19): siRNA sense strand
gugcucagcuacaagucau

SEQ ID NO: 1827765 - RNA, 19 nt, Homo sapiens
  misc_RNA (1)...(19): siRNA sense strand
ugaauucuacaucgaacuu

SEQ ID NO: 1827766 - RNA, 19 nt, Homo sapiens
  misc_RNA (1)...(19): siRNA sense strand
ugauacuccuggcacaaau

SEQ ID NO: 1827767 - RNA, 19 nt, Homo sapiens
  misc_RNA (1)...(19): siRNA sense strand
cagaaaucaugagauccuu

SEQ ID NO: 1827768 - RNA, 19 nt, Homo sapiens
  misc_RNA (1)...(19): siRNA sense strand
cagacaugacuuugaauuc

SEQ ID NO: 1827769 - RNA, 19 nt, Homo sapiens
  misc_RNA (1)...(19): siRNA sense strand
uggaugagacccuucuaga

SEQ ID NO: 1827770 - RNA, 19 nt, Homo sapiens
  misc_RNA (1)...(19): siRNA sense strand
aauucuacaucgaacuuga

SEQ ID NO: 1827771 - RNA, 19 nt, Homo sapiens
  misc_RNA (1)...(19): siRNA sense strand
uggcacaaaugcgaagaau

SEQ ID NO: 1827772 - RNA, 19 nt, Homo sapiens
  misc_RNA (1)...(19): siRNA sense strand
agacccuucuagaugaauu

SEQ ID NO: 1827773 - RNA, 19 nt, Homo sapiens
  misc_RNA (1)...(19): siRNA sense strand
gguaacaggagggccuuga

SEQ ID NO: 1827774 - RNA, 19 nt, Homo sapiens
  misc_RNA (1)...(19): siRNA sense strand
uggaaguccugugugauca

SEQ ID NO: 1827775 - RNA, 19 nt, Homo sapiens
  misc_RNA (1)...(19): siRNA sense strand
gauacuccuggcacaaaug

SEQ ID NO: 1827776 - RNA, 19 nt, Homo sapiens
  misc_RNA (1)...(19): siRNA sense strand
cagagcagaaaucaugaga

SEQ ID NO: 1827777 - RNA, 19 nt, Homo sapiens
  misc_RNA (1)...(19): siRNA sense strand
agacucacagccuggguaa

SEQ ID NO: 1827778 - RNA, 19 nt, Homo sapiens
  misc_RNA (1)...(19): siRNA sense strand
uuccaaagaaucacucuau

SEQ ID NO: 1827779 - RNA, 19 nt, Homo sapiens
  misc_RNA (1)...(19): siRNA sense strand
gaauucuacaucgaacuug

SEQ ID NO: 1827780 - RNA, 19 nt, Homo sapiens
  misc_RNA (1)...(19): siRNA sense strand
gcagaccuucaaccucuuc

SEQ ID NO: 1827781 - RNA, 19 nt, Homo sapiens
  misc_RNA (1)...(19): siRNA sense strand
ggagguugucagagcagaa

SEQ ID NO: 1827782 - RNA, 19 nt, Homo sapiens
  misc_RNA (1)...(19): siRNA sense strand
ccaaauugcucuccuguug

SEQ ID NO: 1827783 - RNA, 19 nt, Homo sapiens
  misc_RNA (1)...(19): siRNA sense strand
cagaacaucuuugcuauuu

SEQ ID NO: 1827784 - RNA, 19 nt, Homo sapiens
  misc_RNA (1)...(19): siRNA sense strand
ggaaugagacuauuguuga

SEQ ID NO: 1827785 - RNA, 19 nt, Homo sapiens
  misc_RNA (1)...(19): siRNA sense strand
gcuaaugucuaucaucaga

SEQ ID NO: 1827786 - RNA, 19 nt, Homo sapiens
  misc_RNA (1)...(19): siRNA sense strand
caacaagugucuccuccaa

SEQ ID NO: 1827787 - RNA, 19 nt, Homo sapiens
  misc_RNA (1)...(19): siRNA sense strand
caacuugcuuggauuccua

SEQ ID NO: 1827788 - RNA, 19 nt, Homo sapiens
  misc_RNA (1)...(19): siRNA sense strand
ugacaucccugaggagauu

SEQ ID NO: 1827789 - RNA, 19 nt, Homo sapiens
  misc_RNA (1)...(19): siRNA sense strand
cuacaaagaagcagcaauu

SEQ ID NO: 1827790 - RNA, 19 nt, Homo sapiens
  misc_RNA (1)...(19): siRNA sense strand
gaacaucuuugcuauuuuc

SEQ ID NO: 1827791 - RNA, 19 nt, Homo sapiens
  misc_RNA (1)...(19): siRNA sense strand
ucuaugagaugcuccagaa

SEQ ID NO: 1827792 - RNA, 19 nt, Homo sapiens
  misc_RNA (1)...(19): siRNA sense strand
uaaaccaucugaagacagu

SEQ ID NO: 1827793 - RNA, 19 nt, Homo sapiens
  misc_RNA (1)...(19): siRNA sense strand
acaagugucuccuccaaau

SEQ ID NO: 1827794 - RNA, 19 nt, Homo sapiens
  misc_RNA (1)...(19): siRNA sense strand
gaagacaguccuggaagaa

SEQ ID NO: 1827795 - RNA, 19 nt, Homo sapiens
  misc_RNA (1)...(19): siRNA sense strand
gauaaaccaucugaagaca

SEQ ID NO: 1827796 - RNA, 19 nt, Homo sapiens
  misc_RNA (1)...(19): siRNA sense strand
ugaaugggaggcuugaaua

SEQ ID NO: 1827797 - RNA, 19 nt, Homo sapiens
  misc_RNA (1)...(19): siRNA sense strand
gaaugagacuauuguugag

SEQ ID NO: 1827798 - RNA, 19 nt, Homo sapiens
  misc_RNA (1)...(19): siRNA sense strand
gcauugaccaucuaugaga

SEQ ID NO: 1827799 - RNA, 19 nt, Homo sapiens
  misc_RNA (1)...(19): siRNA sense strand
ugaagacaguccuggaaga

SEQ ID NO: 1827800 - RNA, 19 nt, Homo sapiens
  misc_RNA (1)...(19): siRNA sense strand
uugagaaccuccuggcuaa

SEQ ID NO: 1827801 - RNA, 19 nt, Homo sapiens
  misc_RNA (1)...(19): siRNA sense strand
cuacagcucuuuccaugag

SEQ ID NO: 1827802 - RNA, 19 nt, Homo sapiens
  misc_RNA (1)...(19): siRNA sense strand
gcuacaacuugcuuggauu

SEQ ID NO: 1827803 - RNA, 19 nt, Homo sapiens
  misc_RNA (1)...(19): siRNA sense strand
uggcuaaugucuaucauca

SEQ ID NO: 1827804 - RNA, 19 nt, Homo sapiens
  misc_RNA (1)...(19): siRNA sense strand
uugcuuggauuccuacaaa

SEQ ID NO: 1827805 - RNA, 19 nt, Homo sapiens
  misc_RNA (1)...(19): siRNA sense strand
augggaggauucugcauua

SEQ ID NO: 1827806 - RNA, 19 nt, Homo sapiens
  misc_RNA (1)...(19): siRNA sense strand
caaagaagcagcaauuuuc

SEQ ID NO: 1827807 - RNA, 19 nt, Homo sapiens
  misc_RNA (1)...(19): siRNA sense strand
gaccauagucagaguggaa

SEQ ID NO: 1827808 - RNA, 19 nt, Homo sapiens
  misc_RNA (1)...(19): siRNA sense strand
ccuccuggcuaaugucuau

SEQ ID NO: 1827809 - RNA, 19 nt, Homo sapiens
  misc_RNA (1)...(19): siRNA sense strand
aaauugcucuccuguugug

SEQ ID NO: 1827810 - RNA, 19 nt, Homo sapiens
  misc_RNA (1)...(19): siRNA sense strand
gagaaccuccuggcuaaug

SEQ ID NO: 1827811 - RNA, 19 nt, Homo sapiens
  misc_RNA (1)...(19): siRNA sense strand
cuaaggaacuuuuacuuca

SEQ ID NO: 1827812 - RNA, 19 nt, Homo sapiens
  misc_RNA (1)...(19): siRNA sense strand
ggaggauucugcauuaccu

SEQ ID NO: 1827813 - RNA, 19 nt, Homo sapiens
  misc_RNA (1)...(19): siRNA sense strand
ucaaggacaggaugaacuu

SEQ ID NO: 1827814 - RNA, 19 nt, Homo sapiens
  misc_RNA (1)...(19): siRNA sense strand
uccagaacaucuuugcuau

SEQ ID NO: 1827815 - RNA, 19 nt, Homo sapiens
  misc_RNA (1)...(19): siRNA sense strand
aggacaggaugaacuuuga

SEQ ID NO: 1827816 - RNA, 19 nt, Homo sapiens
  misc_RNA (1)...(19): siRNA sense strand
cagaagcuccuguggcaau

SEQ ID NO: 1827817 - RNA, 19 nt, Homo sapiens
  misc_RNA (1)...(19): siRNA sense strand
ccagaacaucuuugcuauu

SEQ ID NO: 1827818 - RNA, 19 nt, Homo sapiens
  misc_RNA (1)...(19): siRNA sense strand
ucacugugccuggaccaua

SEQ ID NO: 1827819 - RNA, 19 nt, Homo sapiens
  misc_RNA (1)...(19): siRNA sense strand
caagugucuccuccaaauu

SEQ ID NO: 1827820 - RNA, 19 nt, Homo sapiens
  misc_RNA (1)...(19): siRNA sense strand
aagcuccuguggcaauuga

SEQ ID NO: 1827821 - RNA, 19 nt, Homo sapiens
  misc_RNA (1)...(19): siRNA sense strand
agacaguccuggaagaaaa

SEQ ID NO: 1827822 - RNA, 19 nt, Homo sapiens
  misc_RNA (1)...(19): siRNA sense strand
caaauugcucuccuguugu

SEQ ID NO: 1827823 - RNA, 19 nt, Homo sapiens
  misc_RNA (1)...(19): siRNA sense strand
gcuuggauuccuacaaaga

SEQ ID NO: 1827824 - RNA, 19 nt, Homo sapiens
  misc_RNA (1)...(19): siRNA sense strand
gcagcaauuuucaguguca

SEQ ID NO: 1827825 - RNA, 19 nt, Homo sapiens
  misc_RNA (1)...(19): siRNA sense strand
gauucugcauuaccugaag

SEQ ID NO: 1827826 - RNA, 19 nt, Homo sapiens
  misc_RNA (1)...(19): siRNA sense strand
gcuggaaugagacuauugu

SEQ ID NO: 1827827 - RNA, 19 nt, Homo sapiens
  misc_RNA (1)...(19): siRNA sense strand
uaugagaugcuccagaaca

SEQ ID NO: 1827828 - RNA, 19 nt, Homo sapiens
  misc_RNA (1)...(19): siRNA sense strand
uaugggaggauucugcauu

SEQ ID NO: 1827829 - RNA, 19 nt, Homo sapiens
  misc_RNA (1)...(19): siRNA sense strand
agaaccuccuggcuaaugu

SEQ ID NO: 1827830 - RNA, 19 nt, Homo sapiens
  misc_RNA (1)...(19): siRNA sense strand
cuccagaacaucuuugcua

SEQ ID NO: 1827831 - RNA, 19 nt, Homo sapiens
  misc_RNA (1)...(19): siRNA sense strand
agaagcuccuguggcaauu

SEQ ID NO: 1827832 - RNA, 19 nt, Homo sapiens
  misc_RNA (1)...(19): siRNA sense strand
augagacuauuguugagaa

SEQ ID NO: 1827833 - RNA, 19 nt, Homo sapiens
  misc_RNA (1)...(19): siRNA sense strand
uggaaugagacuauuguug

SEQ ID NO: 1827834 - RNA, 19 nt, Homo sapiens
  misc_RNA (1)...(19): siRNA sense strand
caucuuugcuauuuucaga

SEQ ID NO: 1827835 - RNA, 19 nt, Homo sapiens
  misc_RNA (1)...(19): siRNA sense strand
uacaaagaagcagcaauuu

SEQ ID NO: 1827836 - RNA, 19 nt, Homo sapiens
  misc_RNA (1)...(19): siRNA sense strand
aagugucuccuccaaauug

SEQ ID NO: 1827837 - RNA, 19 nt, Homo sapiens
  misc_RNA (1)...(19): siRNA sense strand
agucagaguggaaauccua

SEQ ID NO: 1827838 - RNA, 19 nt, Homo sapiens
  misc_RNA (1)...(19): siRNA sense strand
gauauuaugggaggauucu

SEQ ID NO: 1827839 - RNA, 19 nt, Homo sapiens
  misc_RNA (1)...(19): siRNA sense strand
agcacuggcuggaaugaga

SEQ ID NO: 1827840 - RNA, 19 nt, Homo sapiens
  misc_RNA (1)...(19): siRNA sense strand
acaaagaagcagcaauuuu

SEQ ID NO: 1827841 - RNA, 19 nt, Homo sapiens
  misc_RNA (1)...(19): siRNA sense strand
gagcuacaacuugcuugga

SEQ ID NO: 1827842 - RNA, 19 nt, Homo sapiens
  misc_RNA (1)...(19): siRNA sense strand
gaagcuccuguggcaauug

SEQ ID NO: 1827843 - RNA, 19 nt, Homo sapiens
  misc_RNA (1)...(19): siRNA sense strand
auuaacagacuuacagguu

SEQ ID NO: 1827844 - RNA, 19 nt, Homo sapiens
  misc_RNA (1)...(19): siRNA sense strand
gcucuccuguugugcuucu

SEQ ID NO: 1827845 - RNA, 19 nt, Homo sapiens
  misc_RNA (1)...(19): siRNA sense strand
cuguugugcuucuccacua

SEQ ID NO: 1827846 - RNA, 19 nt, Homo sapiens
  misc_RNA (1)...(19): siRNA sense strand
caaggacaggaugaacuuu

SEQ ID NO: 1827847 - RNA, 19 nt, Homo sapiens
  misc_RNA (1)...(19): siRNA sense strand
ggauucugcauuaccugaa

SEQ ID NO: 1827848 - RNA, 19 nt, Homo sapiens
  misc_RNA (1)...(19): siRNA sense strand
cacugugccuggaccauag

SEQ ID NO: 1827849 - RNA, 19 nt, Homo sapiens
  misc_RNA (1)...(19): siRNA sense strand
cuacaacuugcuuggauuc

SEQ ID NO: 1827850 - RNA, 19 nt, Homo sapiens
  misc_RNA (1)...(19): siRNA sense strand
ccacuacagcucuuuccau

SEQ ID NO: 1827851 - RNA, 19 nt, Homo sapiens
  misc_RNA (1)...(19): siRNA sense strand
ccugaaagguuaaagguua

SEQ ID NO: 1827852 - RNA, 19 nt, Homo sapiens
  misc_RNA (1)...(19): siRNA sense strand
gcacauaaacgccaagugu

SEQ ID NO: 1827853 - RNA, 19 nt, Homo sapiens
  misc_RNA (1)...(19): siRNA sense strand
gcacuucauuggccaccua

SEQ ID NO: 1827854 - RNA, 19 nt, Homo sapiens
  misc_RNA (1)...(19): siRNA sense strand
gaaguuggcagacaaagug

SEQ ID NO: 1827855 - RNA, 19 nt, Homo sapiens
  misc_RNA (1)...(19): siRNA sense strand
gagaucaaauggcacuuca

SEQ ID NO: 1827856 - RNA, 19 nt, Homo sapiens
  misc_RNA (1)...(19): siRNA sense strand
aaacauggccuuccaccuu

SEQ ID NO: 1827857 - RNA, 19 nt, Homo sapiens
  misc_RNA (1)...(19): siRNA sense strand
cgaauaggaagcacgauuu

SEQ ID NO: 1827858 - RNA, 19 nt, Homo sapiens
  misc_RNA (1)...(19): siRNA sense strand
aaccaaaccugcagacaug

SEQ ID NO: 1827859 - RNA, 19 nt, Homo sapiens
  misc_RNA (1)...(19): siRNA sense strand
acaaauguccgaauaggaa

SEQ ID NO: 1827860 - RNA, 19 nt, Homo sapiens
  misc_RNA (1)...(19): siRNA sense strand
guccuaaccuggaguuugu

SEQ ID NO: 1827861 - RNA, 19 nt, Homo sapiens
  misc_RNA (1)...(19): siRNA sense strand
gagcgggauuacucaaaga

SEQ ID NO: 1827862 - RNA, 19 nt, Homo sapiens
  misc_RNA (1)...(19): siRNA sense strand
gcagacaaagugaacaguu

SEQ ID NO: 1827863 - RNA, 19 nt, Homo sapiens
  misc_RNA (1)...(19): siRNA sense strand
ggagaagagaguaaacaug

SEQ ID NO: 1827864 - RNA, 19 nt, Homo sapiens
  misc_RNA (1)...(19): siRNA sense strand
ggacaugggcagcgcacuu

SEQ ID NO: 1827865 - RNA, 19 nt, Homo sapiens
  misc_RNA (1)...(19): siRNA sense strand
gaucgaggccuauggacau

SEQ ID NO: 1827866 - RNA, 19 nt, Homo sapiens
  misc_RNA (1)...(19): siRNA sense strand
gcuaguggcggucagcaaa

SEQ ID NO: 1827867 - RNA, 19 nt, Homo sapiens
  misc_RNA (1)...(19): siRNA sense strand
gcaugcgguugaaguagga

SEQ ID NO: 1827868 - RNA, 19 nt, Homo sapiens
  misc_RNA (1)...(19): siRNA sense strand
uaaagguuaugguccagau

SEQ ID NO: 1827869 - RNA, 19 nt, Homo sapiens
  misc_RNA (1)...(19): siRNA sense strand
gaguaaacauggccuucca

SEQ ID NO: 1827870 - RNA, 19 nt, Homo sapiens
  misc_RNA (1)...(19): siRNA sense strand
gagagcgggauuacucaaa

SEQ ID NO: 1827871 - RNA, 19 nt, Homo sapiens
  misc_RNA (1)...(19): siRNA sense strand
aagguuaugguccagauua

SEQ ID NO: 1827872 - RNA, 19 nt, Homo sapiens
  misc_RNA (1)...(19): siRNA sense strand
gacaugggcagcgcacuuu

SEQ ID NO: 1827873 - RNA, 19 nt, Homo sapiens
  misc_RNA (1)...(19): siRNA sense strand
cuacaaauguccgaauagg

SEQ ID NO: 1827874 - RNA, 19 nt, Homo sapiens
  misc_RNA (1)...(19): siRNA sense strand
gauuaacaccagcggagaa

SEQ ID NO: 1827875 - RNA, 19 nt, Homo sapiens
  misc_RNA (1)...(19): siRNA sense strand
gggcugaugaccauaggaa

SEQ ID NO: 1827876 - RNA, 19 nt, Homo sapiens
  misc_RNA (1)...(19): siRNA sense strand
ccagcaugcgguugaagua

SEQ ID NO: 1827877 - RNA, 19 nt, Homo sapiens
  misc_RNA (1)...(19): siRNA sense strand
cugaaagguuaaagguuau

SEQ ID NO: 1827878 - RNA, 19 nt, Homo sapiens
  misc_RNA (1)...(19): siRNA sense strand
gaauaggaagcacgauuuu

SEQ ID NO: 1827879 - RNA, 19 nt, Homo sapiens
  misc_RNA (1)...(19): siRNA sense strand
aaaccaaaccugcagacau

SEQ ID NO: 1827880 - RNA, 19 nt, Homo sapiens
  misc_RNA (1)...(19): siRNA sense strand
cugcagacauggugaucga

SEQ ID NO: 1827881 - RNA, 19 nt, Homo sapiens
  misc_RNA (1)...(19): siRNA sense strand
gaucuacaaauguccgaau

SEQ ID NO: 1827882 - RNA, 19 nt, Homo sapiens
  misc_RNA (1)...(19): siRNA sense strand
gggcauguccgcggauuuc

SEQ ID NO: 1827883 - RNA, 19 nt, Homo sapiens
  misc_RNA (1)...(19): siRNA sense strand
gaccaaauccagacuucca

SEQ ID NO: 1827884 - RNA, 19 nt, Homo sapiens
  misc_RNA (1)...(19): siRNA sense strand
ccgaauaggaagcacgauu

SEQ ID NO: 1827885 - RNA, 19 nt, Homo sapiens
  misc_RNA (1)...(19): siRNA sense strand
ggagagcgggauuacucaa

SEQ ID NO: 1827886 - RNA, 19 nt, Homo sapiens
  misc_RNA (1)...(19): siRNA sense strand
gcaugaucuuagucaagga

SEQ ID NO: 1827887 - RNA, 19 nt, Homo sapiens
  misc_RNA (1)...(19): siRNA sense strand
gaucuuagucaaggaccaa

SEQ ID NO: 1827888 - RNA, 19 nt, Homo sapiens
  misc_RNA (1)...(19): siRNA sense strand
gaugaccauaggaagcuuu

SEQ ID NO: 1827889 - RNA, 19 nt, Homo sapiens
  misc_RNA (1)...(19): siRNA sense strand
gcgggauuacucaaagaaa

SEQ ID NO: 1827890 - RNA, 19 nt, Homo sapiens
  misc_RNA (1)...(19): siRNA sense strand
agagcgggauuacucaaag

SEQ ID NO: 1827891 - RNA, 19 nt, Homo sapiens
  misc_RNA (1)...(19): siRNA sense strand
uaggaagcuuugggcauga

SEQ ID NO: 1827892 - RNA, 19 nt, Homo sapiens
  misc_RNA (1)...(19): siRNA sense strand
aacaguuccuggcagagaa

SEQ ID NO: 1827893 - RNA, 19 nt, Homo sapiens
  misc_RNA (1)...(19): siRNA sense strand
cgggauuacucaaagaaac

SEQ ID NO: 1827894 - RNA, 19 nt, Homo sapiens
  misc_RNA (1)...(19): siRNA sense strand
ggugaucgaggccuaugga

SEQ ID NO: 1827895 - RNA, 19 nt, Homo sapiens
  misc_RNA (1)...(19): siRNA sense strand
gggcaugaucuuagucaag

SEQ ID NO: 1827896 - RNA, 19 nt, Homo sapiens
  misc_RNA (1)...(19): siRNA sense strand
cagcggagaagagaguaaa

SEQ ID NO: 1827897 - RNA, 19 nt, Homo sapiens
  misc_RNA (1)...(19): siRNA sense strand
uaacaccagcggagaagag

SEQ ID NO: 1827898 - RNA, 19 nt, Homo sapiens
  misc_RNA (1)...(19): siRNA sense strand
agguuaugguccagauuaa

SEQ ID NO: 1827899 - RNA, 19 nt, Homo sapiens
  misc_RNA (1)...(19): siRNA sense strand
gaaaagguucuccugaaag

SEQ ID NO: 1827900 - RNA, 19 nt, Homo sapiens
  misc_RNA (1)...(19): siRNA sense strand
caucaaaucccaaaauucu

SEQ ID NO: 1827901 - RNA, 19 nt, Homo sapiens
  misc_RNA (1)...(19): siRNA sense strand
aagguucuccugaaagguu

SEQ ID NO: 1827902 - RNA, 19 nt, Homo sapiens
  misc_RNA (1)...(19): siRNA sense strand
aucuacaaauguccgaaua

SEQ ID NO: 1827903 - RNA, 19 nt, Homo sapiens
  misc_RNA (1)...(19): siRNA sense strand
ggaagucucuggccucuga

SEQ ID NO: 1827904 - RNA, 19 nt, Homo sapiens
  misc_RNA (1)...(19): siRNA sense strand
gcaagaagaugcaguugga

SEQ ID NO: 1827905 - RNA, 19 nt, Homo sapiens
  misc_RNA (1)...(19): siRNA sense strand
gaaagaacuugccaucauc

SEQ ID NO: 1827906 - RNA, 19 nt, Homo sapiens
  misc_RNA (1)...(19): siRNA sense strand
gaaacaaggcuuaaagguu

SEQ ID NO: 1827907 - RNA, 19 nt, Homo sapiens
  misc_RNA (1)...(19): siRNA sense strand
ugaagacccugguggagua

SEQ ID NO: 1827908 - RNA, 19 nt, Homo sapiens
  misc_RNA (1)...(19): siRNA sense strand
cggcagcucuucccaguaa

SEQ ID NO: 1827909 - RNA, 19 nt, Homo sapiens
  misc_RNA (1)...(19): siRNA sense strand
gauaacaccugcggcuuug

SEQ ID NO: 1827910 - RNA, 19 nt, Homo sapiens
  misc_RNA (1)...(19): siRNA sense strand
agaggaggcuggauaagaa

SEQ ID NO: 1827911 - RNA, 19 nt, Homo sapiens
  misc_RNA (1)...(19): siRNA sense strand
agaaagaacuugccaucau

SEQ ID NO: 1827912 - RNA, 19 nt, Homo sapiens
  misc_RNA (1)...(19): siRNA sense strand
ugauugcucuaaagaagua

SEQ ID NO: 1827913 - RNA, 19 nt, Homo sapiens
  misc_RNA (1)...(19): siRNA sense strand
gaagugcucuuuggcagau

SEQ ID NO: 1827914 - RNA, 19 nt, Homo sapiens
  misc_RNA (1)...(19): siRNA sense strand
cagcagaaacuuccagaaa

SEQ ID NO: 1827915 - RNA, 19 nt, Homo sapiens
  misc_RNA (1)...(19): siRNA sense strand
gaaauacacccgcugacau

SEQ ID NO: 1827916 - RNA, 19 nt, Homo sapiens
  misc_RNA (1)...(19): siRNA sense strand
gaagaugcaguuggaguuu

SEQ ID NO: 1827917 - RNA, 19 nt, Homo sapiens
  misc_RNA (1)...(19): siRNA sense strand
caacaggaaaggugaaguu

SEQ ID NO: 1827918 - RNA, 19 nt, Homo sapiens
  misc_RNA (1)...(19): siRNA sense strand
gcacggccuuugaguaucu

SEQ ID NO: 1827919 - RNA, 19 nt, Homo sapiens
  misc_RNA (1)...(19): siRNA sense strand
ccaaugaugucacuuacag

SEQ ID NO: 1827920 - RNA, 19 nt, Homo sapiens
  misc_RNA (1)...(19): siRNA sense strand
caacaucgccguggacaau

SEQ ID NO: 1827921 - RNA, 19 nt, Homo sapiens
  misc_RNA (1)...(19): siRNA sense strand
guacgaugcugcuaaugag

SEQ ID NO: 1827922 - RNA, 19 nt, Homo sapiens
  misc_RNA (1)...(19): siRNA sense strand
ggaaaggugaaguugguuu

SEQ ID NO: 1827923 - RNA, 19 nt, Homo sapiens
  misc_RNA (1)...(19): siRNA sense strand
gagcgacagugcccagaau

SEQ ID NO: 1827924 - RNA, 19 nt, Homo sapiens
  misc_RNA (1)...(19): siRNA sense strand
ggacaccucccagaaagaa

SEQ ID NO: 1827925 - RNA, 19 nt, Homo sapiens
  misc_RNA (1)...(19): siRNA sense strand
caggaaaggugaaguuggu

SEQ ID NO: 1827926 - RNA, 19 nt, Homo sapiens
  misc_RNA (1)...(19): siRNA sense strand
ccacggaggaggacuuuga

SEQ ID NO: 1827927 - RNA, 19 nt, Homo sapiens
  misc_RNA (1)...(19): siRNA sense strand
gggaagaggagguucauca

SEQ ID NO: 1827928 - RNA, 19 nt, Homo sapiens
  misc_RNA (1)...(19): siRNA sense strand
gauaagagagagaaaagua

SEQ ID NO: 1827929 - RNA, 19 nt, Homo sapiens
  misc_RNA (1)...(19): siRNA sense strand
gaaggaggccgugauacug

SEQ ID NO: 1827930 - RNA, 19 nt, Homo sapiens
  misc_RNA (1)...(19): siRNA sense strand
gagcuuggaccgagagaau

SEQ ID NO: 1827931 - RNA, 19 nt, Homo sapiens
  misc_RNA (1)...(19): siRNA sense strand
gauacuguccuucgucaga

SEQ ID NO: 1827932 - RNA, 19 nt, Homo sapiens
  misc_RNA (1)...(19): siRNA sense strand
cccagaauguugcagauau

SEQ ID NO: 1827933 - RNA, 19 nt, Homo sapiens
  misc_RNA (1)...(19): siRNA sense strand
gaaguacgcacggccuuug

SEQ ID NO: 1827934 - RNA, 19 nt, Homo sapiens
  misc_RNA (1)...(19): siRNA sense strand
ucauagaagugcucuuugg

SEQ ID NO: 1827935 - RNA, 19 nt, Homo sapiens
  misc_RNA (1)...(19): siRNA sense strand
gaagggaagaggagguuca

SEQ ID NO: 1827936 - RNA, 19 nt, Homo sapiens
  misc_RNA (1)...(19): siRNA sense strand
gaaguccgccucgucaguu

SEQ ID NO: 1827937 - RNA, 19 nt, Homo sapiens
  misc_RNA (1)...(19): siRNA sense strand
aaauacacccgcugacauu

SEQ ID NO: 1827938 - RNA, 19 nt, Homo sapiens
  misc_RNA (1)...(19): siRNA sense strand
gcuguggucucgccauaca

SEQ ID NO: 1827939 - RNA, 19 nt, Homo sapiens
  misc_RNA (1)...(19): siRNA sense strand
gcagaaacuuccagaaaag

SEQ ID NO: 1827940 - RNA, 19 nt, Homo sapiens
  misc_RNA (1)...(19): siRNA sense strand
gcucuaaagaaguaucauu

SEQ ID NO: 1827941 - RNA, 19 nt, Homo sapiens
  misc_RNA (1)...(19): siRNA sense strand
ccgcugacauucuucaaca

SEQ ID NO: 1827942 - RNA, 19 nt, Homo sapiens
  misc_RNA (1)...(19): siRNA sense strand
ccgagagaauuccuacaga

SEQ ID NO: 1827943 - RNA, 19 nt, Homo sapiens
  misc_RNA (1)...(19): siRNA sense strand
ggaaguacgcacggccuuu

SEQ ID NO: 1827944 - RNA, 19 nt, Homo sapiens
  misc_RNA (1)...(19): siRNA sense strand
agacccugguggaguauuu

SEQ ID NO: 1827945 - RNA, 19 nt, Homo sapiens
  misc_RNA (1)...(19): siRNA sense strand
ugucaacaaccaugcauuu

SEQ ID NO: 1827946 - RNA, 19 nt, Homo sapiens
  misc_RNA (1)...(19): siRNA sense strand
cgucagauccaacaggaaa

SEQ ID NO: 1827947 - RNA, 19 nt, Homo sapiens
  misc_RNA (1)...(19): siRNA sense strand
agagaaggaggccgugaua

SEQ ID NO: 1827948 - RNA, 19 nt, Homo sapiens
  misc_RNA (1)...(19): siRNA sense strand
ccagaauguugcagauauc

SEQ ID NO: 1827949 - RNA, 19 nt, Homo sapiens
  misc_RNA (1)...(19): siRNA sense strand
ccugauugcucuaaagaag

SEQ ID NO: 1827950 - RNA, 19 nt, Homo sapiens
  misc_RNA (1)...(19): siRNA sense strand
ugauaacaccugcggcuuu

SEQ ID NO: 1827951 - RNA, 19 nt, Homo sapiens
  misc_RNA (1)...(19): siRNA sense strand
gacagugcccagaauguug

SEQ ID NO: 1827952 - RNA, 19 nt, Homo sapiens
  misc_RNA (1)...(19): siRNA sense strand
ccacguggcggucaucugu

SEQ ID NO: 1827953 - RNA, 19 nt, Homo sapiens
  misc_RNA (1)...(19): siRNA sense strand
ccaccacagucucucacaa

SEQ ID NO: 1827954 - RNA, 19 nt, Homo sapiens
  misc_RNA (1)...(19): siRNA sense strand
gaagccggcugggaagucu

SEQ ID NO: 1827955 - RNA, 19 nt, Homo sapiens
  misc_RNA (1)...(19): siRNA sense strand
cagaggaggcuggauaaga

SEQ ID NO: 1827956 - RNA, 19 nt, Homo sapiens
  misc_RNA (1)...(19): siRNA sense strand
ggacauccggccacagauc

SEQ ID NO: 1827957 - RNA, 19 nt, Homo sapiens
  misc_RNA (1)...(19): siRNA sense strand
uguuaaaacuugccaauga

SEQ ID NO: 1827958 - RNA, 19 nt, Homo sapiens
  misc_RNA (1)...(19): siRNA sense strand
ggacuuugaggcccugguu

SEQ ID NO: 1827959 - RNA, 19 nt, Homo sapiens
  misc_RNA (1)...(19): siRNA sense strand
gacgauauugucccagaaa

SEQ ID NO: 1827960 - RNA, 19 nt, Homo sapiens
  misc_RNA (1)...(19): siRNA sense strand
gcugaggaccggaggauca

SEQ ID NO: 1827961 - RNA, 19 nt, Homo sapiens
  misc_RNA (1)...(19): siRNA sense strand
cgacagugcccagaauguu

SEQ ID NO: 1827962 - RNA, 19 nt, Homo sapiens
  misc_RNA (1)...(19): siRNA sense strand
cgacugugguugagaucau

SEQ ID NO: 1827963 - RNA, 19 nt, Homo sapiens
  misc_RNA (1)...(19): siRNA sense strand
gagggaagaagcagcuaug

SEQ ID NO: 1827964 - RNA, 19 nt, Homo sapiens
  misc_RNA (1)...(19): siRNA sense strand
gaaggagagggaagaagca

SEQ ID NO: 1827965 - RNA, 19 nt, Homo sapiens
  misc_RNA (1)...(19): siRNA sense strand
uggauaagaagcugaguga

SEQ ID NO: 1827966 - RNA, 19 nt, Homo sapiens
  misc_RNA (1)...(19): siRNA sense strand
gaagaggagguucaucacu

SEQ ID NO: 1827967 - RNA, 19 nt, Homo sapiens
  misc_RNA (1)...(19): siRNA sense strand
gcugcggguccaccaaaua

SEQ ID NO: 1827968 - RNA, 19 nt, Homo sapiens
  misc_RNA (1)...(19): siRNA sense strand
gaaaacuauucccaugaga

SEQ ID NO: 1827969 - RNA, 19 nt, Homo sapiens
  misc_RNA (1)...(19): siRNA sense strand
ugacgauauugucccagaa

SEQ ID NO: 1827970 - RNA, 19 nt, Homo sapiens
  misc_RNA (1)...(19): siRNA sense strand
agaggagguucaucacugu

SEQ ID NO: 1827971 - RNA, 19 nt, Homo sapiens
  misc_RNA (1)...(19): siRNA sense strand
ucacgguggccuuugauga

SEQ ID NO: 1827972 - RNA, 19 nt, Homo sapiens
  misc_RNA (1)...(19): siRNA sense strand
cagcuuuacuucuggugau

SEQ ID NO: 1827973 - RNA, 19 nt, Homo sapiens
  misc_RNA (1)...(19): siRNA sense strand
ugcuggagcuugagagaga

SEQ ID NO: 1827974 - RNA, 19 nt, Homo sapiens
  misc_RNA (1)...(19): siRNA sense strand
cugcagaggaggcuggaua

SEQ ID NO: 1827975 - RNA, 19 nt, Homo sapiens
  misc_RNA (1)...(19): siRNA sense strand
ugguugagaucauucuuca

SEQ ID NO: 1827976 - RNA, 19 nt, Homo sapiens
  misc_RNA (1)...(19): siRNA sense strand
gcuggccacugggaucuug

SEQ ID NO: 1827977 - RNA, 19 nt, Homo sapiens
  misc_RNA (1)...(19): siRNA sense strand
gaaaggugaaguugguuuu

SEQ ID NO: 1827978 - RNA, 19 nt, Homo sapiens
  misc_RNA (1)...(19): siRNA sense strand
ccuccucacucauagaagu

SEQ ID NO: 1827979 - RNA, 19 nt, Homo sapiens
  misc_RNA (1)...(19): siRNA sense strand
ccagcaagaagaugcaguu

SEQ ID NO: 1827980 - RNA, 19 nt, Homo sapiens
  misc_RNA (1)...(19): siRNA sense strand
ggaguggagagccaagaug

SEQ ID NO: 1827981 - RNA, 19 nt, Homo sapiens
  misc_RNA (1)...(19): siRNA sense strand
gagagaaggaggccgugau

SEQ ID NO: 1827982 - RNA, 19 nt, Homo sapiens
  misc_RNA (1)...(19): siRNA sense strand
uguacgaugcugcuaauga

SEQ ID NO: 1827983 - RNA, 19 nt, Homo sapiens
  misc_RNA (1)...(19): siRNA sense strand
acucauagaagugcucuuu

SEQ ID NO: 1827984 - RNA, 19 nt, Homo sapiens
  misc_RNA (1)...(19): siRNA sense strand
gacugugguugagaucauu

SEQ ID NO: 1827985 - RNA, 19 nt, Homo sapiens
  misc_RNA (1)...(19): siRNA sense strand
gagccgaggcguguguuug

SEQ ID NO: 1827986 - RNA, 19 nt, Homo sapiens
  misc_RNA (1)...(19): siRNA sense strand
guucauggccagcaagaag

SEQ ID NO: 1827987 - RNA, 19 nt, Homo sapiens
  misc_RNA (1)...(19): siRNA sense strand
ccuguacgaugcugcuaau

SEQ ID NO: 1827988 - RNA, 19 nt, Homo sapiens
  misc_RNA (1)...(19): siRNA sense strand
ggaggacgaacagucgaaa

SEQ ID NO: 1827989 - RNA, 19 nt, Homo sapiens
  misc_RNA (1)...(19): siRNA sense strand
uugcagauaucaggaagga

SEQ ID NO: 1827990 - RNA, 19 nt, Homo sapiens
  misc_RNA (1)...(19): siRNA sense strand
gcccagaauguugcagaua

SEQ ID NO: 1827991 - RNA, 19 nt, Homo sapiens
  misc_RNA (1)...(19): siRNA sense strand
ggagcgacagugcccagaa

SEQ ID NO: 1827992 - RNA, 19 nt, Homo sapiens
  misc_RNA (1)...(19): siRNA sense strand
ugagaucauucuucaagcu

SEQ ID NO: 1827993 - RNA, 19 nt, Homo sapiens
  misc_RNA (1)...(19): siRNA sense strand
gggccaugauaguggaguu

SEQ ID NO: 1827994 - RNA, 19 nt, Homo sapiens
  misc_RNA (1)...(19): siRNA sense strand
gagagaauuccuacagacu

SEQ ID NO: 1827995 - RNA, 19 nt, Homo sapiens
  misc_RNA (1)...(19): siRNA sense strand
ugaaauacacccgcugaca

SEQ ID NO: 1827996 - RNA, 19 nt, Homo sapiens
  misc_RNA (1)...(19): siRNA sense strand
gaaacuuccagaaaagaaa

SEQ ID NO: 1827997 - RNA, 19 nt, Homo sapiens
  misc_RNA (1)...(19): siRNA sense strand
gcagcagaaacuuccagaa

SEQ ID NO: 1827998 - RNA, 19 nt, Homo sapiens
  misc_RNA (1)...(19): siRNA sense strand
agaagaugcaguuggaguu

SEQ ID NO: 1827999 - RNA, 19 nt, Homo sapiens
  misc_RNA (1)...(19): siRNA sense strand
ugaaaucaagucugucgau

SEQ ID NO: 1828000 - RNA, 19 nt, Homo sapiens
  misc_RNA (1)...(19): siRNA sense strand
ugaaacaaggcuuaaaggu

SEQ ID NO: 1828001 - RNA, 19 nt, Homo sapiens
  misc_RNA (1)...(19): siRNA sense strand
ccucugaagcuccaucuca

SEQ ID NO: 1828002 - RNA, 19 nt, Homo sapiens
  misc_RNA (1)...(19): siRNA sense strand
gacggcugcuggucaccuu

SEQ ID NO: 1828003 - RNA, 19 nt, Homo sapiens
  misc_RNA (1)...(19): siRNA sense strand
gaagaucucuggaaacaua

SEQ ID NO: 1828004 - RNA, 19 nt, Homo sapiens
  misc_RNA (1)...(19): siRNA sense strand
ugagaagccugaagaaaua

SEQ ID NO: 1828005 - RNA, 19 nt, Homo sapiens
  misc_RNA (1)...(19): siRNA sense strand
cugcaaaccucaauaauuu

SEQ ID NO: 1828006 - RNA, 19 nt, Homo sapiens
  misc_RNA (1)...(19): siRNA sense strand
aaacauagauacaccagaa

SEQ ID NO: 1828007 - RNA, 19 nt, Homo sapiens
  misc_RNA (1)...(19): siRNA sense strand
ggaaacgauuuaucuagaa

SEQ ID NO: 1828008 - RNA, 19 nt, Homo sapiens
  misc_RNA (1)...(19): siRNA sense strand
cgaccaaacuucagaaugu

SEQ ID NO: 1828009 - RNA, 19 nt, Homo sapiens
  misc_RNA (1)...(19): siRNA sense strand
gaaaagaggcuaaaagauu

SEQ ID NO: 1828010 - RNA, 19 nt, Homo sapiens
  misc_RNA (1)...(19): siRNA sense strand
gcagaaacgugacgagcaa

SEQ ID NO: 1828011 - RNA, 19 nt, Homo sapiens
  misc_RNA (1)...(19): siRNA sense strand
gacggaaacugucaucuga

SEQ ID NO: 1828012 - RNA, 19 nt, Homo sapiens
  misc_RNA (1)...(19): siRNA sense strand
gaauguggaugguguguuc

SEQ ID NO: 1828013 - RNA, 19 nt, Homo sapiens
  misc_RNA (1)...(19): siRNA sense strand
gaacaucacugaguuugag

SEQ ID NO: 1828014 - RNA, 19 nt, Homo sapiens
  misc_RNA (1)...(19): siRNA sense strand
gcauaguggugcccaauga

SEQ ID NO: 1828015 - RNA, 19 nt, Homo sapiens
  misc_RNA (1)...(19): siRNA sense strand
gaaauguucaugucacaaa

SEQ ID NO: 1828016 - RNA, 19 nt, Homo sapiens
  misc_RNA (1)...(19): siRNA sense strand
ucaagaggauuucauuuca

SEQ ID NO: 1828017 - RNA, 19 nt, Homo sapiens
  misc_RNA (1)...(19): siRNA sense strand
gagcaaugaugaaguucuu

SEQ ID NO: 1828018 - RNA, 19 nt, Homo sapiens
  misc_RNA (1)...(19): siRNA sense strand
caacagaggaccuaaagga

SEQ ID NO: 1828019 - RNA, 19 nt, Homo sapiens
  misc_RNA (1)...(19): siRNA sense strand
guacaaggcaucuauuuua

SEQ ID NO: 1828020 - RNA, 19 nt, Homo sapiens
  misc_RNA (1)...(19): siRNA sense strand
gaagugaacguugugauau

SEQ ID NO: 1828021 - RNA, 19 nt, Homo sapiens
  misc_RNA (1)...(19): siRNA sense strand
cuuaaaguccugaucauua

SEQ ID NO: 1828022 - RNA, 19 nt, Homo sapiens
  misc_RNA (1)...(19): siRNA sense strand
gacgagcaaugaugaaguu

SEQ ID NO: 1828023 - RNA, 19 nt, Homo sapiens
  misc_RNA (1)...(19): siRNA sense strand
ugacagagaacaucacuga

SEQ ID NO: 1828024 - RNA, 19 nt, Homo sapiens
  misc_RNA (1)...(19): siRNA sense strand
caauuugucucaggcuaua

SEQ ID NO: 1828025 - RNA, 19 nt, Homo sapiens
  misc_RNA (1)...(19): siRNA sense strand
cagagaacaucacugaguu

SEQ ID NO: 1828026 - RNA, 19 nt, Homo sapiens
  misc_RNA (1)...(19): siRNA sense strand
gaaaguguguagaugaaac

SEQ ID NO: 1828027 - RNA, 19 nt, Homo sapiens
  misc_RNA (1)...(19): siRNA sense strand
ugagaaagcaguucauaga

SEQ ID NO: 1828028 - RNA, 19 nt, Homo sapiens
  misc_RNA (1)...(19): siRNA sense strand
ugacuuucgucuuggauuu

SEQ ID NO: 1828029 - RNA, 19 nt, Homo sapiens
  misc_RNA (1)...(19): siRNA sense strand
gcaaauuaaaugcucauga

SEQ ID NO: 1828030 - RNA, 19 nt, Homo sapiens
  misc_RNA (1)...(19): siRNA sense strand
cggaaacugucaucugaaa

SEQ ID NO: 1828031 - RNA, 19 nt, Homo sapiens
  misc_RNA (1)...(19): siRNA sense strand
caaauuggcaggcauagug

SEQ ID NO: 1828032 - RNA, 19 nt, Homo sapiens
  misc_RNA (1)...(19): siRNA sense strand
gcugcaaaccucaauaauu

SEQ ID NO: 1828033 - RNA, 19 nt, Homo sapiens
  misc_RNA (1)...(19): siRNA sense strand
gggccaaggugaagacaau

SEQ ID NO: 1828034 - RNA, 19 nt, Homo sapiens
  misc_RNA (1)...(19): siRNA sense strand
ccaaguguuuccaguguga

SEQ ID NO: 1828035 - RNA, 19 nt, Homo sapiens
  misc_RNA (1)...(19): siRNA sense strand
gaagcucauuucagaagug

SEQ ID NO: 1828036 - RNA, 19 nt, Homo sapiens
  misc_RNA (1)...(19): siRNA sense strand
ggaagaggcacgugugugu

SEQ ID NO: 1828037 - RNA, 19 nt, Homo sapiens
  misc_RNA (1)...(19): siRNA sense strand
aaacuggaauuguaugcaa

SEQ ID NO: 1828038 - RNA, 19 nt, Homo sapiens
  misc_RNA (1)...(19): siRNA sense strand
gcaagucacacaaggauca

SEQ ID NO: 1828039 - RNA, 19 nt, Homo sapiens
  misc_RNA (1)...(19): siRNA sense strand
gaacguugugauauuguuu

SEQ ID NO: 1828040 - RNA, 19 nt, Homo sapiens
  misc_RNA (1)...(19): siRNA sense strand
gugagaagccugaagaaau

SEQ ID NO: 1828041 - RNA, 19 nt, Homo sapiens
  misc_RNA (1)...(19): siRNA sense strand
ucaggcagcugucugugaa

SEQ ID NO: 1828042 - RNA, 19 nt, Homo sapiens
  misc_RNA (1)...(19): siRNA sense strand
uggaaacgauuuaucuaga

SEQ ID NO: 1828043 - RNA, 19 nt, Homo sapiens
  misc_RNA (1)...(19): siRNA sense strand
gcacaagagcagucaccua

SEQ ID NO: 1828044 - RNA, 19 nt, Homo sapiens
  misc_RNA (1)...(19): siRNA sense strand
gaccaaacuucagaauguu

SEQ ID NO: 1828045 - RNA, 19 nt, Homo sapiens
  misc_RNA (1)...(19): siRNA sense strand
gcccagcacugugucaauu

SEQ ID NO: 1828046 - RNA, 19 nt, Homo sapiens
  misc_RNA (1)...(19): siRNA sense strand
ggacaacagaggaccuaaa

SEQ ID NO: 1828047 - RNA, 19 nt, Homo sapiens
  misc_RNA (1)...(19): siRNA sense strand
ucaaugcagugacuacaau

SEQ ID NO: 1828048 - RNA, 19 nt, Homo sapiens
  misc_RNA (1)...(19): siRNA sense strand
ucagguggaucaagaagug

SEQ ID NO: 1828049 - RNA, 19 nt, Homo sapiens
  misc_RNA (1)...(19): siRNA sense strand
uuaaaguccugaucauuag

SEQ ID NO: 1828050 - RNA, 19 nt, Homo sapiens
  misc_RNA (1)...(19): siRNA sense strand
guuauaauacccacugaaa

SEQ ID NO: 1828051 - RNA, 19 nt, Homo sapiens
  misc_RNA (1)...(19): siRNA sense strand
ugacagaucagacgucuca

SEQ ID NO: 1828052 - RNA, 19 nt, Homo sapiens
  misc_RNA (1)...(19): siRNA sense strand
agaaagcaguucauagaca

SEQ ID NO: 1828053 - RNA, 19 nt, Homo sapiens
  misc_RNA (1)...(19): siRNA sense strand
ggucgaggaguuuguguuu

SEQ ID NO: 1828054 - RNA, 19 nt, Homo sapiens
  misc_RNA (1)...(19): siRNA sense strand
agaagugaacguugugaua

SEQ ID NO: 1828055 - RNA, 19 nt, Homo sapiens
  misc_RNA (1)...(19): siRNA sense strand
cagaggaccuaaaggaaag

SEQ ID NO: 1828056 - RNA, 19 nt, Homo sapiens
  misc_RNA (1)...(19): siRNA sense strand
gaaacgugacgagcaauga

SEQ ID NO: 1828057 - RNA, 19 nt, Homo sapiens
  misc_RNA (1)...(19): siRNA sense strand
cgucucaucucgcucuuga

SEQ ID NO: 1828058 - RNA, 19 nt, Homo sapiens
  misc_RNA (1)...(19): siRNA sense strand
aaaagaggcuaaaagauug

SEQ ID NO: 1828059 - RNA, 19 nt, Homo sapiens
  misc_RNA (1)...(19): siRNA sense strand
guugugauauuguuuccaa

SEQ ID NO: 1828060 - RNA, 19 nt, Homo sapiens
  misc_RNA (1)...(19): siRNA sense strand
ggccaagugugcaguggaa

SEQ ID NO: 1828061 - RNA, 19 nt, Homo sapiens
  misc_RNA (1)...(19): siRNA sense strand
ucacugaguuugagaaagc

SEQ ID NO: 1828062 - RNA, 19 nt, Homo sapiens
  misc_RNA (1)...(19): siRNA sense strand
aaaggaaaguguguagaug

SEQ ID NO: 1828063 - RNA, 19 nt, Homo sapiens
  misc_RNA (1)...(19): siRNA sense strand
uaaaggaaaguguguagau

SEQ ID NO: 1828064 - RNA, 19 nt, Homo sapiens
  misc_RNA (1)...(19): siRNA sense strand
uaacauuaccgccaucugu

SEQ ID NO: 1828065 - RNA, 19 nt, Homo sapiens
  misc_RNA (1)...(19): siRNA sense strand
aaagauugcugcuggugau

SEQ ID NO: 1828066 - RNA, 19 nt, Homo sapiens
  misc_RNA (1)...(19): siRNA sense strand
gggaaauguucaugucaca

SEQ ID NO: 1828067 - RNA, 19 nt, Homo sapiens
  misc_RNA (1)...(19): siRNA sense strand
ucauggaacaacagcauua

SEQ ID NO: 1828068 - RNA, 19 nt, Homo sapiens
  misc_RNA (1)...(19): siRNA sense strand
uauacagccugcaaggaaa

SEQ ID NO: 1828069 - RNA, 19 nt, Homo sapiens
  misc_RNA (1)...(19): siRNA sense strand
ucucaucucgcucuugaua

SEQ ID NO: 1828070 - RNA, 19 nt, Homo sapiens
  misc_RNA (1)...(19): siRNA sense strand
aaggaaaacuggaauugua

SEQ ID NO: 1828071 - RNA, 19 nt, Homo sapiens
  misc_RNA (1)...(19): siRNA sense strand
ccagugugaugagaauaaa

SEQ ID NO: 1828072 - RNA, 19 nt, Homo sapiens
  misc_RNA (1)...(19): siRNA sense strand
gcagugacuacaauuuaga

SEQ ID NO: 1828073 - RNA, 19 nt, Homo sapiens
  misc_RNA (1)...(19): siRNA sense strand
ccagauggguccagaaagc

SEQ ID NO: 1828074 - RNA, 19 nt, Homo sapiens
  misc_RNA (1)...(19): siRNA sense strand
gcaaaggcugcucaguuga

SEQ ID NO: 1828075 - RNA, 19 nt, Homo sapiens
  misc_RNA (1)...(19): siRNA sense strand
gacaggugauacuacaaug

SEQ ID NO: 1828076 - RNA, 19 nt, Homo sapiens
  misc_RNA (1)...(19): siRNA sense strand
cauuucagguggaucaaga

SEQ ID NO: 1828077 - RNA, 19 nt, Homo sapiens
  misc_RNA (1)...(19): siRNA sense strand
gaaaauacugugaaaagga

SEQ ID NO: 1828078 - RNA, 19 nt, Homo sapiens
  misc_RNA (1)...(19): siRNA sense strand
gugaugagaauaaauguca

SEQ ID NO: 1828079 - RNA, 19 nt, Homo sapiens
  misc_RNA (1)...(19): siRNA sense strand
aucagaagcucauuucaga

SEQ ID NO: 1828080 - RNA, 19 nt, Homo sapiens
  misc_RNA (1)...(19): siRNA sense strand
gagaacaucacugaguuug

SEQ ID NO: 1828081 - RNA, 19 nt, Homo sapiens
  misc_RNA (1)...(19): siRNA sense strand
cauaaucaaugcagugacu

SEQ ID NO: 1828082 - RNA, 19 nt, Homo sapiens
  misc_RNA (1)...(19): siRNA sense strand
gcagcugucugugaaaguc

SEQ ID NO: 1828083 - RNA, 19 nt, Homo sapiens
  misc_RNA (1)...(19): siRNA sense strand
ucgaggaguuuguguuugu

SEQ ID NO: 1828084 - RNA, 19 nt, Homo sapiens
  misc_RNA (1)...(19): siRNA sense strand
guggaucuuuauuaucuug

SEQ ID NO: 1828085 - RNA, 19 nt, Homo sapiens
  misc_RNA (1)...(19): siRNA sense strand
gauaaguugauucugcaaa

SEQ ID NO: 1828086 - RNA, 19 nt, Homo sapiens
  misc_RNA (1)...(19): siRNA sense strand
gugauacuacaauggaaua

SEQ ID NO: 1828087 - RNA, 19 nt, Homo sapiens
  misc_RNA (1)...(19): siRNA sense strand
aagugaacguugugauauu

SEQ ID NO: 1828088 - RNA, 19 nt, Homo sapiens
  misc_RNA (1)...(19): siRNA sense strand
acacaaggaucagccuguu

SEQ ID NO: 1828089 - RNA, 19 nt, Homo sapiens
  misc_RNA (1)...(19): siRNA sense strand
ggaaaguguguagaugaaa

SEQ ID NO: 1828090 - RNA, 19 nt, Homo sapiens
  misc_RNA (1)...(19): siRNA sense strand
aggaaaguguguagaugaa

SEQ ID NO: 1828091 - RNA, 19 nt, Homo sapiens
  misc_RNA (1)...(19): siRNA sense strand
acagaggaccuaaaggaaa

SEQ ID NO: 1828092 - RNA, 19 nt, Homo sapiens
  misc_RNA (1)...(19): siRNA sense strand
uuagacaggugauacuaca

SEQ ID NO: 1828093 - RNA, 19 nt, Homo sapiens
  misc_RNA (1)...(19): siRNA sense strand
acaguuucaccauacauua

SEQ ID NO: 1828094 - RNA, 19 nt, Homo sapiens
  misc_RNA (1)...(19): siRNA sense strand
gacaacagaggaccuaaag

SEQ ID NO: 1828095 - RNA, 19 nt, Homo sapiens
  misc_RNA (1)...(19): siRNA sense strand
caagaggauuucauuucag

SEQ ID NO: 1828096 - RNA, 19 nt, Homo sapiens
  misc_RNA (1)...(19): siRNA sense strand
uaggccaacuuucagagaa

SEQ ID NO: 1828097 - RNA, 19 nt, Homo sapiens
  misc_RNA (1)...(19): siRNA sense strand
auuaaguccucaucagauu

SEQ ID NO: 1828098 - RNA, 19 nt, Homo sapiens
  misc_RNA (1)...(19): siRNA sense strand
gccuucacccucacaauuu

SEQ ID NO: 1828099 - RNA, 19 nt, Homo sapiens
  misc_RNA (1)...(19): siRNA sense strand
ccagcacugugucaauuca

SEQ ID NO: 1828100 - RNA, 19 nt, Homo sapiens
  misc_RNA (1)...(19): siRNA sense strand
ggaaaaguguauggaaaau

SEQ ID NO: 1828101 - RNA, 19 nt, Homo sapiens
  misc_RNA (1)...(19): siRNA sense strand
acaaggaucagccuguuug

SEQ ID NO: 1828102 - RNA, 19 nt, Homo sapiens
  misc_RNA (1)...(19): siRNA sense strand
aaaggcugcucaguugauu

SEQ ID NO: 1828103 - RNA, 19 nt, Homo sapiens
  misc_RNA (1)...(19): siRNA sense strand
guggagagcuggccauuaa

SEQ ID NO: 1828104 - RNA, 19 nt, Homo sapiens
  misc_RNA (1)...(19): siRNA sense strand
guacagagauggagaacga

SEQ ID NO: 1828105 - RNA, 19 nt, Homo sapiens
  misc_RNA (1)...(19): siRNA sense strand
gaacgaauuuguccucauc

SEQ ID NO: 1828106 - RNA, 19 nt, Homo sapiens
  misc_RNA (1)...(19): siRNA sense strand
ggaugaagcuuacaugaac

SEQ ID NO: 1828107 - RNA, 19 nt, Homo sapiens
  misc_RNA (1)...(19): siRNA sense strand
caaguuugccuccuucaua

SEQ ID NO: 1828108 - RNA, 19 nt, Homo sapiens
  misc_RNA (1)...(19): siRNA sense strand
ggacauggacagcaucauu

SEQ ID NO: 1828109 - RNA, 19 nt, Homo sapiens
  misc_RNA (1)...(19): siRNA sense strand
ucaagacccucaacaacaa

SEQ ID NO: 1828110 - RNA, 19 nt, Homo sapiens
  misc_RNA (1)...(19): siRNA sense strand
gaagcaacauggacaacau

SEQ ID NO: 1828111 - RNA, 19 nt, Homo sapiens
  misc_RNA (1)...(19): siRNA sense strand
caagaaggauguggaugaa

SEQ ID NO: 1828112 - RNA, 19 nt, Homo sapiens
  misc_RNA (1)...(19): siRNA sense strand
gaauuuguccucaucaaga

SEQ ID NO: 1828113 - RNA, 19 nt, Homo sapiens
  misc_RNA (1)...(19): siRNA sense strand
gaacaaguaugaggaugag

SEQ ID NO: 1828114 - RNA, 19 nt, Homo sapiens
  misc_RNA (1)...(19): siRNA sense strand
gcacaaagacugagaucuc

SEQ ID NO: 1828115 - RNA, 19 nt, Homo sapiens
  misc_RNA (1)...(19): siRNA sense strand
ucaagaaggauguggauga

SEQ ID NO: 1828116 - RNA, 19 nt, Homo sapiens
  misc_RNA (1)...(19): siRNA sense strand
ggaggcaucaccgcaguua

SEQ ID NO: 1828117 - RNA, 19 nt, Homo sapiens
  misc_RNA (1)...(19): siRNA sense strand
ucaauaagcguacagagau

SEQ ID NO: 1828118 - RNA, 19 nt, Homo sapiens
  misc_RNA (1)...(19): siRNA sense strand
gcuggagucucgccuggaa

SEQ ID NO: 1828119 - RNA, 19 nt, Homo sapiens
  misc_RNA (1)...(19): siRNA sense strand
caauaagcguacagagaug

SEQ ID NO: 1828120 - RNA, 19 nt, Homo sapiens
  misc_RNA (1)...(19): siRNA sense strand
acaagaugcuggagaccaa

SEQ ID NO: 1828121 - RNA, 19 nt, Homo sapiens
  misc_RNA (1)...(19): siRNA sense strand
ggauguggaugaagcuuac

SEQ ID NO: 1828122 - RNA, 19 nt, Homo sapiens
  misc_RNA (1)...(19): siRNA sense strand
guggaggacuucaagaaca

SEQ ID NO: 1828123 - RNA, 19 nt, Homo sapiens
  misc_RNA (1)...(19): siRNA sense strand
gaucaagacccucaacaac

SEQ ID NO: 1828124 - RNA, 19 nt, Homo sapiens
  misc_RNA (1)...(19): siRNA sense strand
gagcugcagucccagaucu

SEQ ID NO: 1828125 - RNA, 19 nt, Homo sapiens
  misc_RNA (1)...(19): siRNA sense strand
gagaaggagcagaucaaga

SEQ ID NO: 1828126 - RNA, 19 nt, Homo sapiens
  misc_RNA (1)...(19): siRNA sense strand
augggaagcuggugucuga

SEQ ID NO: 1828127 - RNA, 19 nt, Homo sapiens
  misc_RNA (1)...(19): siRNA sense strand
gggccgugguugugaagaa

SEQ ID NO: 1828128 - RNA, 19 nt, Homo sapiens
  misc_RNA (1)...(19): siRNA sense strand
gacauggacagcaucauug

SEQ ID NO: 1828129 - RNA, 19 nt, Homo sapiens
  misc_RNA (1)...(19): siRNA sense strand
agagauggagaacgaauuu

SEQ ID NO: 1828130 - RNA, 19 nt, Homo sapiens
  misc_RNA (1)...(19): siRNA sense strand
ggaugcagaacaugaguau

SEQ ID NO: 1828131 - RNA, 19 nt, Homo sapiens
  misc_RNA (1)...(19): siRNA sense strand
gcacaguacgaggauauug

SEQ ID NO: 1828132 - RNA, 19 nt, Homo sapiens
  misc_RNA (1)...(19): siRNA sense strand
gaugaagcuuacaugaaca

SEQ ID NO: 1828133 - RNA, 19 nt, Homo sapiens
  misc_RNA (1)...(19): siRNA sense strand
acaacaaguuugccuccuu

SEQ ID NO: 1828134 - RNA, 19 nt, Homo sapiens
  misc_RNA (1)...(19): siRNA sense strand
aagcuuacaugaacaaggu

SEQ ID NO: 1828135 - RNA, 19 nt, Homo sapiens
  misc_RNA (1)...(19): siRNA sense strand
guaugaggaugagaucaau

SEQ ID NO: 1828136 - RNA, 19 nt, Homo sapiens
  misc_RNA (1)...(19): siRNA sense strand
caucauugcugaggucaag

SEQ ID NO: 1828137 - RNA, 19 nt, Homo sapiens
  misc_RNA (1)...(19): siRNA sense strand
uggaggacuucaagaacaa

SEQ ID NO: 1828138 - RNA, 19 nt, Homo sapiens
  misc_RNA (1)...(19): siRNA sense strand
gaagaucgagacacgugau

SEQ ID NO: 1828139 - RNA, 19 nt, Homo sapiens
  misc_RNA (1)...(19): siRNA sense strand
caagaacaaguaugaggau

SEQ ID NO: 1828140 - RNA, 19 nt, Homo sapiens
  misc_RNA (1)...(19): siRNA sense strand
ccagggccgugguugugaa

SEQ ID NO: 1828141 - RNA, 19 nt, Homo sapiens
  misc_RNA (1)...(19): siRNA sense strand
aauuuguccucaucaagaa

SEQ ID NO: 1828142 - RNA, 19 nt, Homo sapiens
  misc_RNA (1)...(19): siRNA sense strand
agaacaaguaugaggauga

SEQ ID NO: 1828143 - RNA, 19 nt, Homo sapiens
  misc_RNA (1)...(19): siRNA sense strand
acaacauguucgagagcua

SEQ ID NO: 1828144 - RNA, 19 nt, Homo sapiens
  misc_RNA (1)...(19): siRNA sense strand
ggagagcuggccauuaagg

SEQ ID NO: 1828145 - RNA, 19 nt, Homo sapiens
  misc_RNA (1)...(19): siRNA sense strand
agaaggagcagaucaagac

SEQ ID NO: 1828146 - RNA, 19 nt, Homo sapiens
  misc_RNA (1)...(19): siRNA sense strand
uggaugaagcuuacaugaa

SEQ ID NO: 1828147 - RNA, 19 nt, Homo sapiens
  misc_RNA (1)...(19): siRNA sense strand
gacccucaacaacaaguuu

SEQ ID NO: 1828148 - RNA, 19 nt, Homo sapiens
  misc_RNA (1)...(19): siRNA sense strand
gggcugaggcugagagcau

SEQ ID NO: 1828149 - RNA, 19 nt, Homo sapiens
  misc_RNA (1)...(19): siRNA sense strand
augcagaacaugaguauuc

SEQ ID NO: 1828150 - RNA, 19 nt, Homo sapiens
  misc_RNA (1)...(19): siRNA sense strand
gagagcuggccauuaagga

SEQ ID NO: 1828151 - RNA, 19 nt, Homo sapiens
  misc_RNA (1)...(19): siRNA sense strand
guggaugaagcuuacauga

SEQ ID NO: 1828152 - RNA, 19 nt, Homo sapiens
  misc_RNA (1)...(19): siRNA sense strand
ggagaaggagcagaucaag

SEQ ID NO: 1828153 - RNA, 19 nt, Homo sapiens
  misc_RNA (1)...(19): siRNA sense strand
gggaugcagaacaugagua

SEQ ID NO: 1828154 - RNA, 19 nt, Homo sapiens
  misc_RNA (1)...(19): siRNA sense strand
aaguuugccuccuucauag

SEQ ID NO: 1828155 - RNA, 19 nt, Homo sapiens
  misc_RNA (1)...(19): siRNA sense strand
gcuccaggcugagauugag

SEQ ID NO: 1828156 - RNA, 19 nt, Homo sapiens
  misc_RNA (1)...(19): siRNA sense strand
uucgagagcuacaucaaca

SEQ ID NO: 1828157 - RNA, 19 nt, Homo sapiens
  misc_RNA (1)...(19): siRNA sense strand
augaggaugagaucaauaa

SEQ ID NO: 1828158 - RNA, 19 nt, Homo sapiens
  misc_RNA (1)...(19): siRNA sense strand
aggcggagcuuggcaacau

SEQ ID NO: 1828159 - RNA, 19 nt, Homo sapiens
  misc_RNA (1)...(19): siRNA sense strand
cagagauggagaacgaauu

SEQ ID NO: 1828160 - RNA, 19 nt, Homo sapiens
  misc_RNA (1)...(19): siRNA sense strand
gauggagaacgaauuuguc

SEQ ID NO: 1828161 - RNA, 19 nt, Homo sapiens
  misc_RNA (1)...(19): siRNA sense strand
caucuguggugcuguccau

SEQ ID NO: 1828162 - RNA, 19 nt, Homo sapiens
  misc_RNA (1)...(19): siRNA sense strand
caaguaugaggaugagauc

SEQ ID NO: 1828163 - RNA, 19 nt, Homo sapiens
  misc_RNA (1)...(19): siRNA sense strand
acaaguaugaggaugagau

SEQ ID NO: 1828164 - RNA, 19 nt, Homo sapiens
  misc_RNA (1)...(19): siRNA sense strand
ugcagaacaugaguauuca

SEQ ID NO: 1828165 - RNA, 19 nt, Homo sapiens
  misc_RNA (1)...(19): siRNA sense strand
ugacccagaaguccuacaa

SEQ ID NO: 1828166 - RNA, 19 nt, Homo sapiens
  misc_RNA (1)...(19): siRNA sense strand
gaccgacgagaucaacuuc

SEQ ID NO: 1828167 - RNA, 19 nt, Homo sapiens
  misc_RNA (1)...(19): siRNA sense strand
ugaccgacgagaucaacuu

SEQ ID NO: 1828168 - RNA, 19 nt, Homo sapiens
  misc_RNA (1)...(19): siRNA sense strand
acgaauuuguccucaucaa

SEQ ID NO: 1828169 - RNA, 19 nt, Homo sapiens
  misc_RNA (1)...(19): siRNA sense strand
gaacaagggcuuauaaaua

SEQ ID NO: 1828170 - RNA, 19 nt, Homo sapiens
  misc_RNA (1)...(19): siRNA sense strand
gaggaaaguuuaccuauga

SEQ ID NO: 1828171 - RNA, 19 nt, Homo sapiens
  misc_RNA (1)...(19): siRNA sense strand
cagagaagcugacaagauu

SEQ ID NO: 1828172 - RNA, 19 nt, Homo sapiens
  misc_RNA (1)...(19): siRNA sense strand
gauagaaacugcuccuuau

SEQ ID NO: 1828173 - RNA, 19 nt, Homo sapiens
  misc_RNA (1)...(19): siRNA sense strand
ggacugggauauuggagua

SEQ ID NO: 1828174 - RNA, 19 nt, Homo sapiens
  misc_RNA (1)...(19): siRNA sense strand
gaagaacaagggcuuauaa

SEQ ID NO: 1828175 - RNA, 19 nt, Homo sapiens
  misc_RNA (1)...(19): siRNA sense strand
gcuggacucucaaagaaua

SEQ ID NO: 1828176 - RNA, 19 nt, Homo sapiens
  misc_RNA (1)...(19): siRNA sense strand
gaagauguaugagguuuau

SEQ ID NO: 1828177 - RNA, 19 nt, Homo sapiens
  misc_RNA (1)...(19): siRNA sense strand
gaaggaaagacauuuguuu

SEQ ID NO: 1828178 - RNA, 19 nt, Homo sapiens
  misc_RNA (1)...(19): siRNA sense strand
caacgacacucuccuuaug

SEQ ID NO: 1828179 - RNA, 19 nt, Homo sapiens
  misc_RNA (1)...(19): siRNA sense strand
gaaguacaauggaagaugu

SEQ ID NO: 1828180 - RNA, 19 nt, Homo sapiens
  misc_RNA (1)...(19): siRNA sense strand
gaagccugauccaccauua

SEQ ID NO: 1828181 - RNA, 19 nt, Homo sapiens
  misc_RNA (1)...(19): siRNA sense strand
aaacagcaguugugugauu

SEQ ID NO: 1828182 - RNA, 19 nt, Homo sapiens
  misc_RNA (1)...(19): siRNA sense strand
ccagagugaugcagguuua

SEQ ID NO: 1828183 - RNA, 19 nt, Homo sapiens
  misc_RNA (1)...(19): siRNA sense strand
gaaaauaucuugggaaaag

SEQ ID NO: 1828184 - RNA, 19 nt, Homo sapiens
  misc_RNA (1)...(19): siRNA sense strand
guucagagauaugugauaa

SEQ ID NO: 1828185 - RNA, 19 nt, Homo sapiens
  misc_RNA (1)...(19): siRNA sense strand
caucuuacaugccucaauu

SEQ ID NO: 1828186 - RNA, 19 nt, Homo sapiens
  misc_RNA (1)...(19): siRNA sense strand
gaaggauucuuucucuaau

SEQ ID NO: 1828187 - RNA, 19 nt, Homo sapiens
  misc_RNA (1)...(19): siRNA sense strand
gaaaagaaguacaauggaa

SEQ ID NO: 1828188 - RNA, 19 nt, Homo sapiens
  misc_RNA (1)...(19): siRNA sense strand
gugcuucuguugcaaauuu

SEQ ID NO: 1828189 - RNA, 19 nt, Homo sapiens
  misc_RNA (1)...(19): siRNA sense strand
gagcaagcacauacuguua

SEQ ID NO: 1828190 - RNA, 19 nt, Homo sapiens
  misc_RNA (1)...(19): siRNA sense strand
aaucacaucugguggagua

SEQ ID NO: 1828191 - RNA, 19 nt, Homo sapiens
  misc_RNA (1)...(19): siRNA sense strand
gaugcagguuuauauguaa

SEQ ID NO: 1828192 - RNA, 19 nt, Homo sapiens
  misc_RNA (1)...(19): siRNA sense strand
ggaaaucacacgaaauuca

SEQ ID NO: 1828193 - RNA, 19 nt, Homo sapiens
  misc_RNA (1)...(19): siRNA sense strand
ggagugagcaagauagaaa

SEQ ID NO: 1828194 - RNA, 19 nt, Homo sapiens
  misc_RNA (1)...(19): siRNA sense strand
cagccaaucuuccuauuau

SEQ ID NO: 1828195 - RNA, 19 nt, Homo sapiens
  misc_RNA (1)...(19): siRNA sense strand
gaucauguuagcaaaguua

SEQ ID NO: 1828196 - RNA, 19 nt, Homo sapiens
  misc_RNA (1)...(19): siRNA sense strand
cacagaugaugguaauuua

SEQ ID NO: 1828197 - RNA, 19 nt, Homo sapiens
  misc_RNA (1)...(19): siRNA sense strand
guucugauauuccaucuau

SEQ ID NO: 1828198 - RNA, 19 nt, Homo sapiens
  misc_RNA (1)...(19): siRNA sense strand
acucagugcuuauccuuua

SEQ ID NO: 1828199 - RNA, 19 nt, Homo sapiens
  misc_RNA (1)...(19): siRNA sense strand
gagauuguuugguggauga

SEQ ID NO: 1828200 - RNA, 19 nt, Homo sapiens
  misc_RNA (1)...(19): siRNA sense strand
aacaagggcuuauaaauag

SEQ ID NO: 1828201 - RNA, 19 nt, Homo sapiens
  misc_RNA (1)...(19): siRNA sense strand
gauauuccaucuauucauc

SEQ ID NO: 1828202 - RNA, 19 nt, Homo sapiens
  misc_RNA (1)...(19): siRNA sense strand
agacagcuguugaaccuaa

SEQ ID NO: 1828203 - RNA, 19 nt, Homo sapiens
  misc_RNA (1)...(19): siRNA sense strand
caauugagguaucauagga

SEQ ID NO: 1828204 - RNA, 19 nt, Homo sapiens
  misc_RNA (1)...(19): siRNA sense strand
cacaagaugucauauacuu

SEQ ID NO: 1828205 - RNA, 19 nt, Homo sapiens
  misc_RNA (1)...(19): siRNA sense strand
ggagcagccuuuacuguuc

SEQ ID NO: 1828206 - RNA, 19 nt, Homo sapiens
  misc_RNA (1)...(19): siRNA sense strand
ggacaguugcucacacuuu

SEQ ID NO: 1828207 - RNA, 19 nt, Homo sapiens
  misc_RNA (1)...(19): siRNA sense strand
cagauucgcuaugguuuaa

SEQ ID NO: 1828208 - RNA, 19 nt, Homo sapiens
  misc_RNA (1)...(19): siRNA sense strand
cuacaacaguuaucagaga

SEQ ID NO: 1828209 - RNA, 19 nt, Homo sapiens
  misc_RNA (1)...(19): siRNA sense strand
caacaacuguggucucucu

SEQ ID NO: 1828210 - RNA, 19 nt, Homo sapiens
  misc_RNA (1)...(19): siRNA sense strand
uagaaucucuucaucuguu

SEQ ID NO: 1828211 - RNA, 19 nt, Homo sapiens
  misc_RNA (1)...(19): siRNA sense strand
ugaaacugauggguacuua

SEQ ID NO: 1828212 - RNA, 19 nt, Homo sapiens
  misc_RNA (1)...(19): siRNA sense strand
ugacaaguguugggucuaa

SEQ ID NO: 1828213 - RNA, 19 nt, Homo sapiens
  misc_RNA (1)...(19): siRNA sense strand
gcaguugugugauuguuuc

SEQ ID NO: 1828214 - RNA, 19 nt, Homo sapiens
  misc_RNA (1)...(19): siRNA sense strand
gacaguugcucacacuuug

SEQ ID NO: 1828215 - RNA, 19 nt, Homo sapiens
  misc_RNA (1)...(19): siRNA sense strand
gaaaaggguucuguuugua

SEQ ID NO: 1828216 - RNA, 19 nt, Homo sapiens
  misc_RNA (1)...(19): siRNA sense strand
ugaugcagguuuauaugua

SEQ ID NO: 1828217 - RNA, 19 nt, Homo sapiens
  misc_RNA (1)...(19): siRNA sense strand
ccagucaccucuaauguca

SEQ ID NO: 1828218 - RNA, 19 nt, Homo sapiens
  misc_RNA (1)...(19): siRNA sense strand
gaucagcaucccaacauaa

SEQ ID NO: 1828219 - RNA, 19 nt, Homo sapiens
  misc_RNA (1)...(19): siRNA sense strand
gauagaggcccaggcauuu

SEQ ID NO: 1828220 - RNA, 19 nt, Homo sapiens
  misc_RNA (1)...(19): siRNA sense strand
ggacagagcaagcacauac

SEQ ID NO: 1828221 - RNA, 19 nt, Homo sapiens
  misc_RNA (1)...(19): siRNA sense strand
cagaagaugugggaaauca

SEQ ID NO: 1828222 - RNA, 19 nt, Homo sapiens
  misc_RNA (1)...(19): siRNA sense strand
caucauacuuccugcaaug

SEQ ID NO: 1828223 - RNA, 19 nt, Homo sapiens
  misc_RNA (1)...(19): siRNA sense strand
caaauucaaccuaugacua

SEQ ID NO: 1828224 - RNA, 19 nt, Homo sapiens
  misc_RNA (1)...(19): siRNA sense strand
ccacacaagaugucauaua

SEQ ID NO: 1828225 - RNA, 19 nt, Homo sapiens
  misc_RNA (1)...(19): siRNA sense strand
gaugcaaacuggaacauac

SEQ ID NO: 1828226 - RNA, 19 nt, Homo sapiens
  misc_RNA (1)...(19): siRNA sense strand
uuacaugccucaauuccaa

SEQ ID NO: 1828227 - RNA, 19 nt, Homo sapiens
  misc_RNA (1)...(19): siRNA sense strand
cagaagauaucaguguuga

SEQ ID NO: 1828228 - RNA, 19 nt, Homo sapiens
  misc_RNA (1)...(19): siRNA sense strand
ucgcuaugcugaauuauau

SEQ ID NO: 1828229 - RNA, 19 nt, Homo sapiens
  misc_RNA (1)...(19): siRNA sense strand
ucaucgcuaugcugaauua

SEQ ID NO: 1828230 - RNA, 19 nt, Homo sapiens
  misc_RNA (1)...(19): siRNA sense strand
ucauauacuuuccaccuaa

SEQ ID NO: 1828231 - RNA, 19 nt, Homo sapiens
  misc_RNA (1)...(19): siRNA sense strand
caaaacaacuuuccacugu

SEQ ID NO: 1828232 - RNA, 19 nt, Homo sapiens
  misc_RNA (1)...(19): siRNA sense strand
gcaauugcaguguucauga

SEQ ID NO: 1828233 - RNA, 19 nt, Homo sapiens
  misc_RNA (1)...(19): siRNA sense strand
uauuuccucuuccaucuua

SEQ ID NO: 1828234 - RNA, 19 nt, Homo sapiens
  misc_RNA (1)...(19): siRNA sense strand
uaugagaggaccugaauuu

SEQ ID NO: 1828235 - RNA, 19 nt, Homo sapiens
  misc_RNA (1)...(19): siRNA sense strand
gcacuuugcaauugaggua

SEQ ID NO: 1828236 - RNA, 19 nt, Homo sapiens
  misc_RNA (1)...(19): siRNA sense strand
cgaggaaaguuuaccuaug

SEQ ID NO: 1828237 - RNA, 19 nt, Homo sapiens
  misc_RNA (1)...(19): siRNA sense strand
caagaugugugaccuaacu

SEQ ID NO: 1828238 - RNA, 19 nt, Homo sapiens
  misc_RNA (1)...(19): siRNA sense strand
ugaaggauucuuucucuaa

SEQ ID NO: 1828239 - RNA, 19 nt, Homo sapiens
  misc_RNA (1)...(19): siRNA sense strand
gcguuuaacuugucauauc

SEQ ID NO: 1828240 - RNA, 19 nt, Homo sapiens
  misc_RNA (1)...(19): siRNA sense strand
ggaagauguaugagguuua

SEQ ID NO: 1828241 - RNA, 19 nt, Homo sapiens
  misc_RNA (1)...(19): siRNA sense strand
ucacuugacucuccaccaa

SEQ ID NO: 1828242 - RNA, 19 nt, Homo sapiens
  misc_RNA (1)...(19): siRNA sense strand
ccuauuaucuggcuacaca

SEQ ID NO: 1828243 - RNA, 19 nt, Homo sapiens
  misc_RNA (1)...(19): siRNA sense strand
cagacaacauugaaggaaa

SEQ ID NO: 1828244 - RNA, 19 nt, Homo sapiens
  misc_RNA (1)...(19): siRNA sense strand
gauaacugcguuuaacuug

SEQ ID NO: 1828245 - RNA, 19 nt, Homo sapiens
  misc_RNA (1)...(19): siRNA sense strand
gaguacuccucgugucuuu

SEQ ID NO: 1828246 - RNA, 19 nt, Homo sapiens
  misc_RNA (1)...(19): siRNA sense strand
gagaauucuacaacaguua

SEQ ID NO: 1828247 - RNA, 19 nt, Homo sapiens
  misc_RNA (1)...(19): siRNA sense strand
ucacagaugaugguaauuu

SEQ ID NO: 1828248 - RNA, 19 nt, Homo sapiens
  misc_RNA (1)...(19): siRNA sense strand
ucaugaauguugugaaugu

SEQ ID NO: 1828249 - RNA, 19 nt, Homo sapiens
  misc_RNA (1)...(19): siRNA sense strand
caauugcaguguucaugaa

SEQ ID NO: 1828250 - RNA, 19 nt, Homo sapiens
  misc_RNA (1)...(19): siRNA sense strand
cagcaucccaacauaauuu

SEQ ID NO: 1828251 - RNA, 19 nt, Homo sapiens
  misc_RNA (1)...(19): siRNA sense strand
guucagucuuuacccaaua

SEQ ID NO: 1828252 - RNA, 19 nt, Homo sapiens
  misc_RNA (1)...(19): siRNA sense strand
uuaaacagcaguuguguga

SEQ ID NO: 1828253 - RNA, 19 nt, Homo sapiens
  misc_RNA (1)...(19): siRNA sense strand
uagauggacugggauauug

SEQ ID NO: 1828254 - RNA, 19 nt, Homo sapiens
  misc_RNA (1)...(19): siRNA sense strand
ucaguucagcccauaaaua

SEQ ID NO: 1828255 - RNA, 19 nt, Homo sapiens
  misc_RNA (1)...(19): siRNA sense strand
gagagagaguggugugcuu

SEQ ID NO: 1828256 - RNA, 19 nt, Homo sapiens
  misc_RNA (1)...(19): siRNA sense strand
cuuauugcuuggaacauua

SEQ ID NO: 1828257 - RNA, 19 nt, Homo sapiens
  misc_RNA (1)...(19): siRNA sense strand
gaaaccaaaccucgaggaa

SEQ ID NO: 1828258 - RNA, 19 nt, Homo sapiens
  misc_RNA (1)...(19): siRNA sense strand
ggaugaauuuagcugagaa

SEQ ID NO: 1828259 - RNA, 19 nt, Homo sapiens
  misc_RNA (1)...(19): siRNA sense strand
aaaggguucuguuuguauu

SEQ ID NO: 1828260 - RNA, 19 nt, Homo sapiens
  misc_RNA (1)...(19): siRNA sense strand
ugaaacuggugaagaacaa

SEQ ID NO: 1828261 - RNA, 19 nt, Homo sapiens
  misc_RNA (1)...(19): siRNA sense strand
aguaugauguugugaguga

SEQ ID NO: 1828262 - RNA, 19 nt, Homo sapiens
  misc_RNA (1)...(19): siRNA sense strand
caaacuuguucuacucaga

SEQ ID NO: 1828263 - RNA, 19 nt, Homo sapiens
  misc_RNA (1)...(19): siRNA sense strand
aagugaaacuggugaagaa

SEQ ID NO: 1828264 - RNA, 19 nt, Homo sapiens
  misc_RNA (1)...(19): siRNA sense strand
gcuguugaaccuaaguuua

SEQ ID NO: 1828265 - RNA, 19 nt, Homo sapiens
  misc_RNA (1)...(19): siRNA sense strand
gcagguuuauauguaauug

SEQ ID NO: 1828266 - RNA, 19 nt, Homo sapiens
  misc_RNA (1)...(19): siRNA sense strand
uaacugcguuuaacuuguc

SEQ ID NO: 1828267 - RNA, 19 nt, Homo sapiens
  misc_RNA (1)...(19): siRNA sense strand
caucaucgcuaugcugaau

SEQ ID NO: 1828268 - RNA, 19 nt, Homo sapiens
  misc_RNA (1)...(19): siRNA sense strand
ugaaugccaucaucgcuau

SEQ ID NO: 1828269 - RNA, 19 nt, Homo sapiens
  misc_RNA (1)...(19): siRNA sense strand
ggaaaggaguuaauagaaa

SEQ ID NO: 1828270 - RNA, 19 nt, Homo sapiens
  misc_RNA (1)...(19): siRNA sense strand
ggaacaaacuuuacuacaa

SEQ ID NO: 1828271 - RNA, 19 nt, Homo sapiens
  misc_RNA (1)...(19): siRNA sense strand
ggacagugccuucagguua

SEQ ID NO: 1828272 - RNA, 19 nt, Homo sapiens
  misc_RNA (1)...(19): siRNA sense strand
gagaauggauuaauacauc

SEQ ID NO: 1828273 - RNA, 19 nt, Homo sapiens
  misc_RNA (1)...(19): siRNA sense strand
gaaagguacuuaaacuuca

SEQ ID NO: 1828274 - RNA, 19 nt, Homo sapiens
  misc_RNA (1)...(19): siRNA sense strand
gaagaaggccggaaaggaa

SEQ ID NO: 1828275 - RNA, 19 nt, Homo sapiens
  misc_RNA (1)...(19): siRNA sense strand
gauacgaaaugguguuaaa

SEQ ID NO: 1828276 - RNA, 19 nt, Homo sapiens
  misc_RNA (1)...(19): siRNA sense strand
gaacuuaggagaucacgaa

SEQ ID NO: 1828277 - RNA, 19 nt, Homo sapiens
  misc_RNA (1)...(19): siRNA sense strand
acaaagagcugaguaagga

SEQ ID NO: 1828278 - RNA, 19 nt, Homo sapiens
  misc_RNA (1)...(19): siRNA sense strand
ugaaggaaaugaugcauau

SEQ ID NO: 1828279 - RNA, 19 nt, Homo sapiens
  misc_RNA (1)...(19): siRNA sense strand
gagaacuccuuuacaagaa

SEQ ID NO: 1828280 - RNA, 19 nt, Homo sapiens
  misc_RNA (1)...(19): siRNA sense strand
gaaaggaguuaauagaaac

SEQ ID NO: 1828281 - RNA, 19 nt, Homo sapiens
  misc_RNA (1)...(19): siRNA sense strand
acagagaacuccuuuacaa

SEQ ID NO: 1828282 - RNA, 19 nt, Homo sapiens
  misc_RNA (1)...(19): siRNA sense strand
gucaagggcuauuuaauga

SEQ ID NO: 1828283 - RNA, 19 nt, Homo sapiens
  misc_RNA (1)...(19): siRNA sense strand
gacugaagcuucguuagua

SEQ ID NO: 1828284 - RNA, 19 nt, Homo sapiens
  misc_RNA (1)...(19): siRNA sense strand
gaaguaugaugaaaugagu

SEQ ID NO: 1828285 - RNA, 19 nt, Homo sapiens
  misc_RNA (1)...(19): siRNA sense strand
ggagaaaguuugccaugag

SEQ ID NO: 1828286 - RNA, 19 nt, Homo sapiens
  misc_RNA (1)...(19): siRNA sense strand
uaaacaagaggcuaccuua

SEQ ID NO: 1828287 - RNA, 19 nt, Homo sapiens
  misc_RNA (1)...(19): siRNA sense strand
uaaauuacauggccgagau

SEQ ID NO: 1828288 - RNA, 19 nt, Homo sapiens
  misc_RNA (1)...(19): siRNA sense strand
gaaaugaguauucucuuca

SEQ ID NO: 1828289 - RNA, 19 nt, Homo sapiens
  misc_RNA (1)...(19): siRNA sense strand
gcagagacaccacaaugaa

SEQ ID NO: 1828290 - RNA, 19 nt, Homo sapiens
  misc_RNA (1)...(19): siRNA sense strand
gaaacuacuuuggagaaug

SEQ ID NO: 1828291 - RNA, 19 nt, Homo sapiens
  misc_RNA (1)...(19): siRNA sense strand
uggaacaacuuuauucgaa

SEQ ID NO: 1828292 - RNA, 19 nt, Homo sapiens
  misc_RNA (1)...(19): siRNA sense strand
uaagguugcuuuggaugua

SEQ ID NO: 1828293 - RNA, 19 nt, Homo sapiens
  misc_RNA (1)...(19): siRNA sense strand
aguauucucuucacaguuu

SEQ ID NO: 1828294 - RNA, 19 nt, Homo sapiens
  misc_RNA (1)...(19): siRNA sense strand
gggaaaggaguuaauagaa

SEQ ID NO: 1828295 - RNA, 19 nt, Homo sapiens
  misc_RNA (1)...(19): siRNA sense strand
ugaaaugaguauucucuuc

SEQ ID NO: 1828296 - RNA, 19 nt, Homo sapiens
  misc_RNA (1)...(19): siRNA sense strand
ggaccucgguggugguguu

SEQ ID NO: 1828297 - RNA, 19 nt, Homo sapiens
  misc_RNA (1)...(19): siRNA sense strand
gcagaaacucuacgcgaaa

SEQ ID NO: 1828298 - RNA, 19 nt, Homo sapiens
  misc_RNA (1)...(19): siRNA sense strand
gagaaaguuugccaugagu

SEQ ID NO: 1828299 - RNA, 19 nt, Homo sapiens
  misc_RNA (1)...(19): siRNA sense strand
acacuaagcagauacgaaa

SEQ ID NO: 1828300 - RNA, 19 nt, Homo sapiens
  misc_RNA (1)...(19): siRNA sense strand
caagggcuauuuaaugagu

SEQ ID NO: 1828301 - RNA, 19 nt, Homo sapiens
  misc_RNA (1)...(19): siRNA sense strand
acaagaggcuaccuuaugg

SEQ ID NO: 1828302 - RNA, 19 nt, Homo sapiens
  misc_RNA (1)...(19): siRNA sense strand
gacagugccuucagguuag

SEQ ID NO: 1828303 - RNA, 19 nt, Homo sapiens
  misc_RNA (1)...(19): siRNA sense strand
gaaacccuguggaacuuag

SEQ ID NO: 1828304 - RNA, 19 nt, Homo sapiens
  misc_RNA (1)...(19): siRNA sense strand
cuuaggagaucacgaacuu

SEQ ID NO: 1828305 - RNA, 19 nt, Homo sapiens
  misc_RNA (1)...(19): siRNA sense strand
gaaaugaugcauauaucca

SEQ ID NO: 1828306 - RNA, 19 nt, Homo sapiens
  misc_RNA (1)...(19): siRNA sense strand
gccuggaucugguaaacaa

SEQ ID NO: 1828307 - RNA, 19 nt, Homo sapiens
  misc_RNA (1)...(19): siRNA sense strand
gaaggaaaugaugcauaua

SEQ ID NO: 1828308 - RNA, 19 nt, Homo sapiens
  misc_RNA (1)...(19): siRNA sense strand
cuauuaagguugcuuugga

SEQ ID NO: 1828309 - RNA, 19 nt, Homo sapiens
  misc_RNA (1)...(19): siRNA sense strand
ggcaaugugucuaaauuac

SEQ ID NO: 1828310 - RNA, 19 nt, Homo sapiens
  misc_RNA (1)...(19): siRNA sense strand
uagaaacccuguggaacuu

SEQ ID NO: 1828311 - RNA, 19 nt, Homo sapiens
  misc_RNA (1)...(19): siRNA sense strand
uaauagaaacccuguggaa

SEQ ID NO: 1828312 - RNA, 19 nt, Homo sapiens
  misc_RNA (1)...(19): siRNA sense strand
caucagcuaagaauguaua

SEQ ID NO: 1828313 - RNA, 19 nt, Homo sapiens
  misc_RNA (1)...(19): siRNA sense strand
aaacuacuuuggagaaugg

SEQ ID NO: 1828314 - RNA, 19 nt, Homo sapiens
  misc_RNA (1)...(19): siRNA sense strand
acacauguauccuggcaau

SEQ ID NO: 1828315 - RNA, 19 nt, Homo sapiens
  misc_RNA (1)...(19): siRNA sense strand
ggauuaauacaucugagaa

SEQ ID NO: 1828316 - RNA, 19 nt, Homo sapiens
  misc_RNA (1)...(19): siRNA sense strand
cuaguagcauuucuugaga

SEQ ID NO: 1828317 - RNA, 19 nt, Homo sapiens
  misc_RNA (1)...(19): siRNA sense strand
caaaccaguggcuugauuu

SEQ ID NO: 1828318 - RNA, 19 nt, Homo sapiens
  misc_RNA (1)...(19): siRNA sense strand
aaacuaugcaguccucauu

SEQ ID NO: 1828319 - RNA, 19 nt, Homo sapiens
  misc_RNA (1)...(19): siRNA sense strand
guggcuugauuucugguua

SEQ ID NO: 1828320 - RNA, 19 nt, Homo sapiens
  misc_RNA (1)...(19): siRNA sense strand
agagaacuccuuuacaaga

SEQ ID NO: 1828321 - RNA, 19 nt, Homo sapiens
  misc_RNA (1)...(19): siRNA sense strand
uggccuaccucuaugauuc

SEQ ID NO: 1828322 - RNA, 19 nt, Homo sapiens
  misc_RNA (1)...(19): siRNA sense strand
ggaugaagaaggccggaaa

SEQ ID NO: 1828323 - RNA, 19 nt, Homo sapiens
  misc_RNA (1)...(19): siRNA sense strand
caagacaaagagcugagua

SEQ ID NO: 1828324 - RNA, 19 nt, Homo sapiens
  misc_RNA (1)...(19): siRNA sense strand
ugucaagggcuauuuaaug

SEQ ID NO: 1828325 - RNA, 19 nt, Homo sapiens
  misc_RNA (1)...(19): siRNA sense strand
agaaagguacuuaaacuuc

SEQ ID NO: 1828326 - RNA, 19 nt, Homo sapiens
  misc_RNA (1)...(19): siRNA sense strand
gcaaugugucuaaauuaca

SEQ ID NO: 1828327 - RNA, 19 nt, Homo sapiens
  misc_RNA (1)...(19): siRNA sense strand
uaucaucagcuaagaaugu

SEQ ID NO: 1828328 - RNA, 19 nt, Homo sapiens
  misc_RNA (1)...(19): siRNA sense strand
cagaaacucuacgcgaaau

SEQ ID NO: 1828329 - RNA, 19 nt, Homo sapiens
  misc_RNA (1)...(19): siRNA sense strand
gaugaaaugaguauucucu

SEQ ID NO: 1828330 - RNA, 19 nt, Homo sapiens
  misc_RNA (1)...(19): siRNA sense strand
uguguggccugguuauuug

SEQ ID NO: 1828331 - RNA, 19 nt, Homo sapiens
  misc_RNA (1)...(19): siRNA sense strand
agaacuccuuuacaagaaa

SEQ ID NO: 1828332 - RNA, 19 nt, Homo sapiens
  misc_RNA (1)...(19): siRNA sense strand
ugacagagaacuccuuuac

SEQ ID NO: 1828333 - RNA, 19 nt, Homo sapiens
  misc_RNA (1)...(19): siRNA sense strand
gcagauacgaaaugguguu

SEQ ID NO: 1828334 - RNA, 19 nt, Homo sapiens
  misc_RNA (1)...(19): siRNA sense strand
uggcaaugugucuaaauua

SEQ ID NO: 1828335 - RNA, 19 nt, Homo sapiens
  misc_RNA (1)...(19): siRNA sense strand
uggagaaaguuugccauga

SEQ ID NO: 1828336 - RNA, 19 nt, Homo sapiens
  misc_RNA (1)...(19): siRNA sense strand
ggagaauggauuaauacau

SEQ ID NO: 1828337 - RNA, 19 nt, Homo sapiens
  misc_RNA (1)...(19): siRNA sense strand
gaguaaggaacagcuagua

SEQ ID NO: 1828338 - RNA, 19 nt, Homo sapiens
  misc_RNA (1)...(19): siRNA sense strand
cuggcaaugugucuaaauu

SEQ ID NO: 1828339 - RNA, 19 nt, Homo sapiens
  misc_RNA (1)...(19): siRNA sense strand
ugaaacuacuuuggagaau

SEQ ID NO: 1828340 - RNA, 19 nt, Homo sapiens
  misc_RNA (1)...(19): siRNA sense strand
guaaacaagaggcuaccuu

SEQ ID NO: 1828341 - RNA, 19 nt, Homo sapiens
  misc_RNA (1)...(19): siRNA sense strand
ugaguauucucuucacagu

SEQ ID NO: 1828342 - RNA, 19 nt, Homo sapiens
  misc_RNA (1)...(19): siRNA sense strand
cuucauagaaagguacuua

SEQ ID NO: 1828343 - RNA, 19 nt, Homo sapiens
  misc_RNA (1)...(19): siRNA sense strand
guauauaucaucagcuaag

SEQ ID NO: 1828344 - RNA, 19 nt, Homo sapiens
  misc_RNA (1)...(19): siRNA sense strand
acaccacaaugaaggaaau

SEQ ID NO: 1828345 - RNA, 19 nt, Homo sapiens
  misc_RNA (1)...(19): siRNA sense strand
aaacaagaggcuaccuuau

SEQ ID NO: 1828346 - RNA, 19 nt, Homo sapiens
  misc_RNA (1)...(19): siRNA sense strand
cuaccucuaugauucuuuc

SEQ ID NO: 1828347 - RNA, 19 nt, Homo sapiens
  misc_RNA (1)...(19): siRNA sense strand
cagauacgaaaugguguua

SEQ ID NO: 1828348 - RNA, 19 nt, Homo sapiens
  misc_RNA (1)...(19): siRNA sense strand
aacaagaggcuaccuuaug

SEQ ID NO: 1828349 - RNA, 19 nt, Homo sapiens
  misc_RNA (1)...(19): siRNA sense strand
gaaacucuacgcgaaaucu

SEQ ID NO: 1828350 - RNA, 19 nt, Homo sapiens
  misc_RNA (1)...(19): siRNA sense strand
ugaagaaggccggaaagga

SEQ ID NO: 1828351 - RNA, 19 nt, Homo sapiens
  misc_RNA (1)...(19): siRNA sense strand
cgaaaugguguuaaaagua

SEQ ID NO: 1828352 - RNA, 19 nt, Homo sapiens
  misc_RNA (1)...(19): siRNA sense strand
aaaugugguuccuuguguu

SEQ ID NO: 1828353 - RNA, 19 nt, Homo sapiens
  misc_RNA (1)...(19): siRNA sense strand
uuacugaaacuacuuugga

SEQ ID NO: 1828354 - RNA, 19 nt, Homo sapiens
  misc_RNA (1)...(19): siRNA sense strand
cugguuauuuggaaacuau

SEQ ID NO: 1828355 - RNA, 19 nt, Homo sapiens
  misc_RNA (1)...(19): siRNA sense strand
gcugacagagaacuccuuu

SEQ ID NO: 1828356 - RNA, 19 nt, Homo sapiens
  misc_RNA (1)...(19): siRNA sense strand
uguguucucucuguaaaug

SEQ ID NO: 1828357 - RNA, 19 nt, Homo sapiens
  misc_RNA (1)...(19): siRNA sense strand
agggcuauuuaaugaguua

SEQ ID NO: 1828358 - RNA, 19 nt, Homo sapiens
  misc_RNA (1)...(19): siRNA sense strand
aggaaaugaugcauauauc

SEQ ID NO: 1828359 - RNA, 19 nt, Homo sapiens
  misc_RNA (1)...(19): siRNA sense strand
ggacgcccuccaccacaaa

SEQ ID NO: 1828360 - RNA, 19 nt, Homo sapiens
  misc_RNA (1)...(19): siRNA sense strand
aagcagagacaccacaaug

SEQ ID NO: 1828361 - RNA, 19 nt, Homo sapiens
  misc_RNA (1)...(19): siRNA sense strand
gaaacuacgggagaaccuu

SEQ ID NO: 1828362 - RNA, 19 nt, Homo sapiens
  misc_RNA (1)...(19): siRNA sense strand
cuaagcagauacgaaaugg

SEQ ID NO: 1828363 - RNA, 19 nt, Homo sapiens
  misc_RNA (1)...(19): siRNA sense strand
ggaaaugaugcauauaucc

SEQ ID NO: 1828364 - RNA, 19 nt, Homo sapiens
  misc_RNA (1)...(19): siRNA sense strand
cauguauccuggcaaugug

SEQ ID NO: 1828365 - RNA, 19 nt, Homo sapiens
  misc_RNA (1)...(19): siRNA sense strand
gacaaagagcugaguaagg

SEQ ID NO: 1828366 - RNA, 19 nt, Homo sapiens
  misc_RNA (1)...(19): siRNA sense strand
gaagaggccccacauugga

SEQ ID NO: 1828367 - RNA, 19 nt, Homo sapiens
  misc_RNA (1)...(19): siRNA sense strand
gaagcagagacaccacaau

SEQ ID NO: 1828368 - RNA, 19 nt, Homo sapiens
  misc_RNA (1)...(19): siRNA sense strand
gaaacuaugcaguccucau

SEQ ID NO: 1828369 - RNA, 19 nt, Homo sapiens
  misc_RNA (1)...(19): siRNA sense strand
gauguugccuuccacuuua

SEQ ID NO: 1828370 - RNA, 19 nt, Homo sapiens
  misc_RNA (1)...(19): siRNA sense strand
gaagaaagacagucgguuu

SEQ ID NO: 1828371 - RNA, 19 nt, Homo sapiens
  misc_RNA (1)...(19): siRNA sense strand
gaaugaugcucacuuguug

SEQ ID NO: 1828372 - RNA, 19 nt, Homo sapiens
  misc_RNA (1)...(19): siRNA sense strand
cagaauugcuuuagauuuc

SEQ ID NO: 1828373 - RNA, 19 nt, Homo sapiens
  misc_RNA (1)...(19): siRNA sense strand
caaacagaauugcuuuaga

SEQ ID NO: 1828374 - RNA, 19 nt, Homo sapiens
  misc_RNA (1)...(19): siRNA sense strand
gcaauacaaagcuggauaa

SEQ ID NO: 1828375 - RNA, 19 nt, Homo sapiens
  misc_RNA (1)...(19): siRNA sense strand
gaacaacaggagagucauu

SEQ ID NO: 1828376 - RNA, 19 nt, Homo sapiens
  misc_RNA (1)...(19): siRNA sense strand
ggagagucauuguuugcaa

SEQ ID NO: 1828377 - RNA, 19 nt, Homo sapiens
  misc_RNA (1)...(19): siRNA sense strand
guacaaucaucggguuaaa

SEQ ID NO: 1828378 - RNA, 19 nt, Homo sapiens
  misc_RNA (1)...(19): siRNA sense strand
ggccacugauugugccuua

SEQ ID NO: 1828379 - RNA, 19 nt, Homo sapiens
  misc_RNA (1)...(19): siRNA sense strand
gaagcccaaugcaaacaga

SEQ ID NO: 1828380 - RNA, 19 nt, Homo sapiens
  misc_RNA (1)...(19): siRNA sense strand
gagaacaacaggagaguca

SEQ ID NO: 1828381 - RNA, 19 nt, Homo sapiens
  misc_RNA (1)...(19): siRNA sense strand
gaaagugggaaaccauuca

SEQ ID NO: 1828382 - RNA, 19 nt, Homo sapiens
  misc_RNA (1)...(19): siRNA sense strand
ccacugauugugccuuaua

SEQ ID NO: 1828383 - RNA, 19 nt, Homo sapiens
  misc_RNA (1)...(19): siRNA sense strand
ccaaagagggaaugauguu

SEQ ID NO: 1828384 - RNA, 19 nt, Homo sapiens
  misc_RNA (1)...(19): siRNA sense strand
ugaaugaugcucacuuguu

SEQ ID NO: 1828385 - RNA, 19 nt, Homo sapiens
  misc_RNA (1)...(19): siRNA sense strand
ucaaugaaaucagcaaacu

SEQ ID NO: 1828386 - RNA, 19 nt, Homo sapiens
  misc_RNA (1)...(19): siRNA sense strand
ccucaccagugcuucauau

SEQ ID NO: 1828387 - RNA, 19 nt, Homo sapiens
  misc_RNA (1)...(19): siRNA sense strand
acaggagagucauuguuug

SEQ ID NO: 1828388 - RNA, 19 nt, Homo sapiens
  misc_RNA (1)...(19): siRNA sense strand
ugauguugccuuccacuuu

SEQ ID NO: 1828389 - RNA, 19 nt, Homo sapiens
  misc_RNA (1)...(19): siRNA sense strand
gugccucgcaugcugauaa

SEQ ID NO: 1828390 - RNA, 19 nt, Homo sapiens
  misc_RNA (1)...(19): siRNA sense strand
uggagcaccuggagcuuau

SEQ ID NO: 1828391 - RNA, 19 nt, Homo sapiens
  misc_RNA (1)...(19): siRNA sense strand
aacccacgcuucaaugaga

SEQ ID NO: 1828392 - RNA, 19 nt, Homo sapiens
  misc_RNA (1)...(19): siRNA sense strand
gggaaaccauucaaaauac

SEQ ID NO: 1828393 - RNA, 19 nt, Homo sapiens
  misc_RNA (1)...(19): siRNA sense strand
cacugauugugccuuauaa

SEQ ID NO: 1828394 - RNA, 19 nt, Homo sapiens
  misc_RNA (1)...(19): siRNA sense strand
caaagagggaaugauguug

SEQ ID NO: 1828395 - RNA, 19 nt, Homo sapiens
  misc_RNA (1)...(19): siRNA sense strand
gcccaaugcaaacagaauu

SEQ ID NO: 1828396 - RNA, 19 nt, Homo sapiens
  misc_RNA (1)...(19): siRNA sense strand
ggaaaccauucaaaauaca

SEQ ID NO: 1828397 - RNA, 19 nt, Homo sapiens
  misc_RNA (1)...(19): siRNA sense strand
gacagucgguuuucccauu

SEQ ID NO: 1828398 - RNA, 19 nt, Homo sapiens
  misc_RNA (1)...(19): siRNA sense strand
cggugaagcccaaugcaaa

SEQ ID NO: 1828399 - RNA, 19 nt, Homo sapiens
  misc_RNA (1)...(19): siRNA sense strand
gaauugcuuuagauuucca

SEQ ID NO: 1828400 - RNA, 19 nt, Homo sapiens
  misc_RNA (1)...(19): siRNA sense strand
ugggaaaccauucaaaaua

SEQ ID NO: 1828401 - RNA, 19 nt, Homo sapiens
  misc_RNA (1)...(19): siRNA sense strand
ucaagguugcagugaauga

SEQ ID NO: 1828402 - RNA, 19 nt, Homo sapiens
  misc_RNA (1)...(19): siRNA sense strand
ggaagggaagaaagacagu

SEQ ID NO: 1828403 - RNA, 19 nt, Homo sapiens
  misc_RNA (1)...(19): siRNA sense strand
gcaugcugauaacaauucu

SEQ ID NO: 1828404 - RNA, 19 nt, Homo sapiens
  misc_RNA (1)...(19): siRNA sense strand
aaacccaaacccucaagga

SEQ ID NO: 1828405 - RNA, 19 nt, Homo sapiens
  misc_RNA (1)...(19): siRNA sense strand
caaagcuggauaauaacug

SEQ ID NO: 1828406 - RNA, 19 nt, Homo sapiens
  misc_RNA (1)...(19): siRNA sense strand
gcacggugaagcccaaugc

SEQ ID NO: 1828407 - RNA, 19 nt, Homo sapiens
  misc_RNA (1)...(19): siRNA sense strand
gcuccaugaugcguuaucu

SEQ ID NO: 1828408 - RNA, 19 nt, Homo sapiens
  misc_RNA (1)...(19): siRNA sense strand
ugaaagugggaaaccauuc

SEQ ID NO: 1828409 - RNA, 19 nt, Homo sapiens
  misc_RNA (1)...(19): siRNA sense strand
gcaagaagccggagcauga

SEQ ID NO: 1828410 - RNA, 19 nt, Homo sapiens
  misc_RNA (1)...(19): siRNA sense strand
caaauaaccuguaucucaa

SEQ ID NO: 1828411 - RNA, 19 nt, Homo sapiens
  misc_RNA (1)...(19): siRNA sense strand
gaacaaacacacuggcuaa

SEQ ID NO: 1828412 - RNA, 19 nt, Homo sapiens
  misc_RNA (1)...(19): siRNA sense strand
ggcaagaccugcaaagauu

SEQ ID NO: 1828413 - RNA, 19 nt, Homo sapiens
  misc_RNA (1)...(19): siRNA sense strand
gcuaugaguuuaagaaguu

SEQ ID NO: 1828414 - RNA, 19 nt, Homo sapiens
  misc_RNA (1)...(19): siRNA sense strand
gcgcaucgaucuucacaaa

SEQ ID NO: 1828415 - RNA, 19 nt, Homo sapiens
  misc_RNA (1)...(19): siRNA sense strand
ugacuguguuugagaauua

SEQ ID NO: 1828416 - RNA, 19 nt, Homo sapiens
  misc_RNA (1)...(19): siRNA sense strand
ggagugguauucugguaua

SEQ ID NO: 1828417 - RNA, 19 nt, Homo sapiens
  misc_RNA (1)...(19): siRNA sense strand
gcuauugacuucccugaaa

SEQ ID NO: 1828418 - RNA, 19 nt, Homo sapiens
  misc_RNA (1)...(19): siRNA sense strand
ggacaucccgcacaucuuu

SEQ ID NO: 1828419 - RNA, 19 nt, Homo sapiens
  misc_RNA (1)...(19): siRNA sense strand
caacauggauggcagcaau

SEQ ID NO: 1828420 - RNA, 19 nt, Homo sapiens
  misc_RNA (1)...(19): siRNA sense strand
gacaaugacugugaggaua

SEQ ID NO: 1828421 - RNA, 19 nt, Homo sapiens
  misc_RNA (1)...(19): siRNA sense strand
caaagaggaugacugugaa

SEQ ID NO: 1828422 - RNA, 19 nt, Homo sapiens
  misc_RNA (1)...(19): siRNA sense strand
gcaaccaguuuguggauug

SEQ ID NO: 1828423 - RNA, 19 nt, Homo sapiens
  misc_RNA (1)...(19): siRNA sense strand
cauauagccuccauccuaa

SEQ ID NO: 1828424 - RNA, 19 nt, Homo sapiens
  misc_RNA (1)...(19): siRNA sense strand
ucaaauaaccuguaucuca

SEQ ID NO: 1828425 - RNA, 19 nt, Homo sapiens
  misc_RNA (1)...(19): siRNA sense strand
gcacagaccggaagauugu

SEQ ID NO: 1828426 - RNA, 19 nt, Homo sapiens
  misc_RNA (1)...(19): siRNA sense strand
gcaccauucucaagaguau

SEQ ID NO: 1828427 - RNA, 19 nt, Homo sapiens
  misc_RNA (1)...(19): siRNA sense strand
ugacuucccugaaagcaaa

SEQ ID NO: 1828428 - RNA, 19 nt, Homo sapiens
  misc_RNA (1)...(19): siRNA sense strand
gcaaagacaagaaggaguu

SEQ ID NO: 1828429 - RNA, 19 nt, Homo sapiens
  misc_RNA (1)...(19): siRNA sense strand
gaagugcgauggcgaggau

SEQ ID NO: 1828430 - RNA, 19 nt, Homo sapiens
  misc_RNA (1)...(19): siRNA sense strand
ggagaaaggguacuuguuc

SEQ ID NO: 1828431 - RNA, 19 nt, Homo sapiens
  misc_RNA (1)...(19): siRNA sense strand
gcugauggcucccgacaau

SEQ ID NO: 1828432 - RNA, 19 nt, Homo sapiens
  misc_RNA (1)...(19): siRNA sense strand
gagaucaaauaaccuguau

SEQ ID NO: 1828433 - RNA, 19 nt, Homo sapiens
  misc_RNA (1)...(19): siRNA sense strand
ucaugaagcuccacaagga

SEQ ID NO: 1828434 - RNA, 19 nt, Homo sapiens
  misc_RNA (1)...(19): siRNA sense strand
ccucugacgugguccuuua

SEQ ID NO: 1828435 - RNA, 19 nt, Homo sapiens
  misc_RNA (1)...(19): siRNA sense strand
gcucagaggcccaguuuga

SEQ ID NO: 1828436 - RNA, 19 nt, Homo sapiens
  misc_RNA (1)...(19): siRNA sense strand
gcaaagacaaugccacaga

SEQ ID NO: 1828437 - RNA, 19 nt, Homo sapiens
  misc_RNA (1)...(19): siRNA sense strand
gaccagggcuuugauguca

SEQ ID NO: 1828438 - RNA, 19 nt, Homo sapiens
  misc_RNA (1)...(19): siRNA sense strand
ggugugaggugaacaagug

SEQ ID NO: 1828439 - RNA, 19 nt, Homo sapiens
  misc_RNA (1)...(19): siRNA sense strand
gcgggaagcugcuggacaa

SEQ ID NO: 1828440 - RNA, 19 nt, Homo sapiens
  misc_RNA (1)...(19): siRNA sense strand
gcacaaacccugccuucau

SEQ ID NO: 1828441 - RNA, 19 nt, Homo sapiens
  misc_RNA (1)...(19): siRNA sense strand
caacagcugugaacucucu

SEQ ID NO: 1828442 - RNA, 19 nt, Homo sapiens
  misc_RNA (1)...(19): siRNA sense strand
gcacaggcguggagacagu

SEQ ID NO: 1828443 - RNA, 19 nt, Homo sapiens
  misc_RNA (1)...(19): siRNA sense strand
ggacagaccagggcuuuga

SEQ ID NO: 1828444 - RNA, 19 nt, Homo sapiens
  misc_RNA (1)...(19): siRNA sense strand
gaaacaaaguccauuaacc

SEQ ID NO: 1828445 - RNA, 19 nt, Homo sapiens
  misc_RNA (1)...(19): siRNA sense strand
gcgaaggcauuguguguuc

SEQ ID NO: 1828446 - RNA, 19 nt, Homo sapiens
  misc_RNA (1)...(19): siRNA sense strand
gaggaugacugugaacaug

SEQ ID NO: 1828447 - RNA, 19 nt, Homo sapiens
  misc_RNA (1)...(19): siRNA sense strand
gccaauguccugacccuua

SEQ ID NO: 1828448 - RNA, 19 nt, Homo sapiens
  misc_RNA (1)...(19): siRNA sense strand
uuaagaaguuccugcugua

SEQ ID NO: 1828449 - RNA, 19 nt, Homo sapiens
  misc_RNA (1)...(19): siRNA sense strand
gcuaugacaccaauaagaa

SEQ ID NO: 1828450 - RNA, 19 nt, Homo sapiens
  misc_RNA (1)...(19): siRNA sense strand
ccacagguaucugcacaaa

SEQ ID NO: 1828451 - RNA, 19 nt, Homo sapiens
  misc_RNA (1)...(19): siRNA sense strand
acagacggcuccuucauau

SEQ ID NO: 1828452 - RNA, 19 nt, Homo sapiens
  misc_RNA (1)...(19): siRNA sense strand
ccgcugcacugccuacuuu

SEQ ID NO: 1828453 - RNA, 19 nt, Homo sapiens
  misc_RNA (1)...(19): siRNA sense strand
caacacccauggcagcuau

SEQ ID NO: 1828454 - RNA, 19 nt, Homo sapiens
  misc_RNA (1)...(19): siRNA sense strand
gacaaagacugugcugaug

SEQ ID NO: 1828455 - RNA, 19 nt, Homo sapiens
  misc_RNA (1)...(19): siRNA sense strand
uaaagggcuucguggauga

SEQ ID NO: 1828456 - RNA, 19 nt, Homo sapiens
  misc_RNA (1)...(19): siRNA sense strand
ggacaacaccaccugcuau

SEQ ID NO: 1828457 - RNA, 19 nt, Homo sapiens
  misc_RNA (1)...(19): siRNA sense strand
gcggagagccugaugaugu

SEQ ID NO: 1828458 - RNA, 19 nt, Homo sapiens
  misc_RNA (1)...(19): siRNA sense strand
ggaccgcucugaugagucu

SEQ ID NO: 1828459 - RNA, 19 nt, Homo sapiens
  misc_RNA (1)...(19): siRNA sense strand
agacgaggcugcucacugu

SEQ ID NO: 1828460 - RNA, 19 nt, Homo sapiens
  misc_RNA (1)...(19): siRNA sense strand
gaucaaauaaccuguaucu

SEQ ID NO: 1828461 - RNA, 19 nt, Homo sapiens
  misc_RNA (1)...(19): siRNA sense strand
caagcuaugacaccaauaa

SEQ ID NO: 1828462 - RNA, 19 nt, Homo sapiens
  misc_RNA (1)...(19): siRNA sense strand
gcaucgaucuucacaaagg

SEQ ID NO: 1828463 - RNA, 19 nt, Homo sapiens
  misc_RNA (1)...(19): siRNA sense strand
gcaaagcguggguguguga

SEQ ID NO: 1828464 - RNA, 19 nt, Homo sapiens
  misc_RNA (1)...(19): siRNA sense strand
acaaagaggaugacuguga

SEQ ID NO: 1828465 - RNA, 19 nt, Homo sapiens
  misc_RNA (1)...(19): siRNA sense strand
gcugcaacauguucgauga

SEQ ID NO: 1828466 - RNA, 19 nt, Homo sapiens
  misc_RNA (1)...(19): siRNA sense strand
ggagugugauggcgagaau

SEQ ID NO: 1828467 - RNA, 19 nt, Homo sapiens
  misc_RNA (1)...(19): siRNA sense strand
caguuuaccugcaacaaug

SEQ ID NO: 1828468 - RNA, 19 nt, Homo sapiens
  misc_RNA (1)...(19): siRNA sense strand
gcugugacauggaccaguu

SEQ ID NO: 1828469 - RNA, 19 nt, Homo sapiens
  misc_RNA (1)...(19): siRNA sense strand
ggacugcccugaguucaag

SEQ ID NO: 1828470 - RNA, 19 nt, Homo sapiens
  misc_RNA (1)...(19): siRNA sense strand
gggaaacaaaguccauuaa

SEQ ID NO: 1828471 - RNA, 19 nt, Homo sapiens
  misc_RNA (1)...(19): siRNA sense strand
ccaagcacuucguguguga

SEQ ID NO: 1828472 - RNA, 19 nt, Homo sapiens
  misc_RNA (1)...(19): siRNA sense strand
gacaagcuaugacaccaau

SEQ ID NO: 1828473 - RNA, 19 nt, Homo sapiens
  misc_RNA (1)...(19): siRNA sense strand
gagaagcgcauccuuugga

SEQ ID NO: 1828474 - RNA, 19 nt, Homo sapiens
  misc_RNA (1)...(19): siRNA sense strand
gcaagaccugcaaagauuu

SEQ ID NO: 1828475 - RNA, 19 nt, Homo sapiens
  misc_RNA (1)...(19): siRNA sense strand
acauauagccuccauccua

SEQ ID NO: 1828476 - RNA, 19 nt, Homo sapiens
  misc_RNA (1)...(19): siRNA sense strand
ggaugggacugaugaagag

SEQ ID NO: 1828477 - RNA, 19 nt, Homo sapiens
  misc_RNA (1)...(19): siRNA sense strand
caaggaagagugugaugaa

SEQ ID NO: 1828478 - RNA, 19 nt, Homo sapiens
  misc_RNA (1)...(19): siRNA sense strand
ggauggcucugacgagauc

SEQ ID NO: 1828479 - RNA, 19 nt, Homo sapiens
  misc_RNA (1)...(19): siRNA sense strand
gagcacaagaugaguuuga

SEQ ID NO: 1828480 - RNA, 19 nt, Homo sapiens
  misc_RNA (1)...(19): siRNA sense strand
ccaauguccugacccuuau

SEQ ID NO: 1828481 - RNA, 19 nt, Homo sapiens
  misc_RNA (1)...(19): siRNA sense strand
gacgggaagucaugcaaga

SEQ ID NO: 1828482 - RNA, 19 nt, Homo sapiens
  misc_RNA (1)...(19): siRNA sense strand
gcucagacccgcaagacuu

SEQ ID NO: 1828483 - RNA, 19 nt, Homo sapiens
  misc_RNA (1)...(19): siRNA sense strand
gagaguguccgcauugaug

SEQ ID NO: 1828484 - RNA, 19 nt, Homo sapiens
  misc_RNA (1)...(19): siRNA sense strand
cgagaaagcggccuacugu

SEQ ID NO: 1828485 - RNA, 19 nt, Homo sapiens
  misc_RNA (1)...(19): siRNA sense strand
gaguuccgcugcaaggauu

SEQ ID NO: 1828486 - RNA, 19 nt, Homo sapiens
  misc_RNA (1)...(19): siRNA sense strand
gcaaugggcaggacaacug

SEQ ID NO: 1828487 - RNA, 19 nt, Homo sapiens
  misc_RNA (1)...(19): siRNA sense strand
ccaacuacacguuacuuaa

SEQ ID NO: 1828488 - RNA, 19 nt, Homo sapiens
  misc_RNA (1)...(19): siRNA sense strand
ccaggaggaucaccauugu

SEQ ID NO: 1828489 - RNA, 19 nt, Homo sapiens
  misc_RNA (1)...(19): siRNA sense strand
gaccagacguggcgugaag

SEQ ID NO: 1828490 - RNA, 19 nt, Homo sapiens
  misc_RNA (1)...(19): siRNA sense strand
ggagugggcuggaggucau

SEQ ID NO: 1828491 - RNA, 19 nt, Homo sapiens
  misc_RNA (1)...(19): siRNA sense strand
aaagcaaacucuacuggau

SEQ ID NO: 1828492 - RNA, 19 nt, Homo sapiens
  misc_RNA (1)...(19): siRNA sense strand
gagaguaaccuggaucaga

SEQ ID NO: 1828493 - RNA, 19 nt, Homo sapiens
  misc_RNA (1)...(19): siRNA sense strand
caucucaaaugcagccaaa

SEQ ID NO: 1828494 - RNA, 19 nt, Homo sapiens
  misc_RNA (1)...(19): siRNA sense strand
acaggcaacuucuacuuug

SEQ ID NO: 1828495 - RNA, 19 nt, Homo sapiens
  misc_RNA (1)...(19): siRNA sense strand
gcagcagccaggacauaua

SEQ ID NO: 1828496 - RNA, 19 nt, Homo sapiens
  misc_RNA (1)...(19): siRNA sense strand
ucacccaccucaacauuuc

SEQ ID NO: 1828497 - RNA, 19 nt, Homo sapiens
  misc_RNA (1)...(19): siRNA sense strand
gaggaaccguuucugaucu

SEQ ID NO: 1828498 - RNA, 19 nt, Homo sapiens
  misc_RNA (1)...(19): siRNA sense strand
ugacaaagaggaugacugu

SEQ ID NO: 1828499 - RNA, 19 nt, Homo sapiens
  misc_RNA (1)...(19): siRNA sense strand
ucacagugcuagacuacga

SEQ ID NO: 1828500 - RNA, 19 nt, Homo sapiens
  misc_RNA (1)...(19): siRNA sense strand
agaguaaccuggaucagau

SEQ ID NO: 1828501 - RNA, 19 nt, Homo sapiens
  misc_RNA (1)...(19): siRNA sense strand
gaggagccaugccugugaa

SEQ ID NO: 1828502 - RNA, 19 nt, Homo sapiens
  misc_RNA (1)...(19): siRNA sense strand
ggacgugugaucuggauga

SEQ ID NO: 1828503 - RNA, 19 nt, Homo sapiens
  misc_RNA (1)...(19): siRNA sense strand
caucaauaaucgugucuuc

SEQ ID NO: 1828504 - RNA, 19 nt, Homo sapiens
  misc_RNA (1)...(19): siRNA sense strand
ggccguggauuaucacaau

SEQ ID NO: 1828505 - RNA, 19 nt, Homo sapiens
  misc_RNA (1)...(19): siRNA sense strand
gcaccuguguguccaacug

SEQ ID NO: 1828506 - RNA, 19 nt, Homo sapiens
  misc_RNA (1)...(19): siRNA sense strand
ccgcacaucuuugcacuga

SEQ ID NO: 1828507 - RNA, 19 nt, Homo sapiens
  misc_RNA (1)...(19): siRNA sense strand
gcacggacagacaagauug

SEQ ID NO: 1828508 - RNA, 19 nt, Homo sapiens
  misc_RNA (1)...(19): siRNA sense strand
cgaaaccuguucuggacaa

SEQ ID NO: 1828509 - RNA, 19 nt, Homo sapiens
  misc_RNA (1)...(19): siRNA sense strand
ggaagaaacuaaagcuuga

SEQ ID NO: 1828510 - RNA, 19 nt, Homo sapiens
  misc_RNA (1)...(19): siRNA sense strand
gaaggaagcgagacucaua

SEQ ID NO: 1828511 - RNA, 19 nt, Homo sapiens
  misc_RNA (1)...(19): siRNA sense strand
gaagaccucugggaaauuc

SEQ ID NO: 1828512 - RNA, 19 nt, Homo sapiens
  misc_RNA (1)...(19): siRNA sense strand
acacggagcugaaggagaa

SEQ ID NO: 1828513 - RNA, 19 nt, Homo sapiens
  misc_RNA (1)...(19): siRNA sense strand
gggaggagcucaagcacuu

SEQ ID NO: 1828514 - RNA, 19 nt, Homo sapiens
  misc_RNA (1)...(19): siRNA sense strand
gcgaagaccucugggaaau

SEQ ID NO: 1828515 - RNA, 19 nt, Homo sapiens
  misc_RNA (1)...(19): siRNA sense strand
gaacucgccuggaagaaac

SEQ ID NO: 1828516 - RNA, 19 nt, Homo sapiens
  misc_RNA (1)...(19): siRNA sense strand
aagagaaaguucacgagua

SEQ ID NO: 1828517 - RNA, 19 nt, Homo sapiens
  misc_RNA (1)...(19): siRNA sense strand
gcgaagaacuggacaagcu

SEQ ID NO: 1828518 - RNA, 19 nt, Homo sapiens
  misc_RNA (1)...(19): siRNA sense strand
gagcaggaccgaagaaauc

SEQ ID NO: 1828519 - RNA, 19 nt, Homo sapiens
  misc_RNA (1)...(19): siRNA sense strand
ccgaagaaauccacgagaa

SEQ ID NO: 1828520 - RNA, 19 nt, Homo sapiens
  misc_RNA (1)...(19): siRNA sense strand
gggacgaacucgccuggaa

SEQ ID NO: 1828521 - RNA, 19 nt, Homo sapiens
  misc_RNA (1)...(19): siRNA sense strand
gcuccacgcugaucugaag

SEQ ID NO: 1828522 - RNA, 19 nt, Homo sapiens
  misc_RNA (1)...(19): siRNA sense strand
gcacaaccacuaccagaag

SEQ ID NO: 1828523 - RNA, 19 nt, Homo sapiens
  misc_RNA (1)...(19): siRNA sense strand
agagaaaguucacgaguac

SEQ ID NO: 1828524 - RNA, 19 nt, Homo sapiens
  misc_RNA (1)...(19): siRNA sense strand
gagaggaguuccgcaugga

SEQ ID NO: 1828525 - RNA, 19 nt, Homo sapiens
  misc_RNA (1)...(19): siRNA sense strand
ugaaccagcugugggagaa

SEQ ID NO: 1828526 - RNA, 19 nt, Homo sapiens
  misc_RNA (1)...(19): siRNA sense strand
agaagcagcuggagauugc

SEQ ID NO: 1828527 - RNA, 19 nt, Homo sapiens
  misc_RNA (1)...(19): siRNA sense strand
gggaguuccugcaucacaa

SEQ ID NO: 1828528 - RNA, 19 nt, Homo sapiens
  misc_RNA (1)...(19): siRNA sense strand
gcuacacggugaagaagca

SEQ ID NO: 1828529 - RNA, 19 nt, Homo sapiens
  misc_RNA (1)...(19): siRNA sense strand
ccaaggagcugggcuacac

SEQ ID NO: 1828530 - RNA, 19 nt, Homo sapiens
  misc_RNA (1)...(19): siRNA sense strand
gagaaggaagcgagacuca

SEQ ID NO: 1828531 - RNA, 19 nt, Homo sapiens
  misc_RNA (1)...(19): siRNA sense strand
cgaacucgccuggaagaaa

SEQ ID NO: 1828532 - RNA, 19 nt, Homo sapiens
  misc_RNA (1)...(19): siRNA sense strand
ucgagaagcacaaccacua

SEQ ID NO: 1828533 - RNA, 19 nt, Homo sapiens
  misc_RNA (1)...(19): siRNA sense strand
aguauggucuggacggaaa

SEQ ID NO: 1828534 - RNA, 19 nt, Homo sapiens
  misc_RNA (1)...(19): siRNA sense strand
ggagauugcgcacgagaag

SEQ ID NO: 1828535 - RNA, 19 nt, Homo sapiens
  misc_RNA (1)...(19): siRNA sense strand
ggcgggaguuccugcauca

SEQ ID NO: 1828536 - RNA, 19 nt, Homo sapiens
  misc_RNA (1)...(19): siRNA sense strand
gcaaguacucgcgggagaa

SEQ ID NO: 1828537 - RNA, 19 nt, Homo sapiens
  misc_RNA (1)...(19): siRNA sense strand
ccgccaaccucacggacaa

SEQ ID NO: 1828538 - RNA, 19 nt, Homo sapiens
  misc_RNA (1)...(19): siRNA sense strand
ggaguuccugcaucacaaa

SEQ ID NO: 1828539 - RNA, 19 nt, Homo sapiens
  misc_RNA (1)...(19): siRNA sense strand
gcccagcgacugcaucuuc

SEQ ID NO: 1828540 - RNA, 19 nt, Homo sapiens
  misc_RNA (1)...(19): siRNA sense strand
gacgaacucgccuggaaga

SEQ ID NO: 1828541 - RNA, 19 nt, Homo sapiens
  misc_RNA (1)...(19): siRNA sense strand
ggcgaagaccucugggaaa

SEQ ID NO: 1828542 - RNA, 19 nt, Homo sapiens
  misc_RNA (1)...(19): siRNA sense strand
ggacgaagauggggagaag

SEQ ID NO: 1828543 - RNA, 19 nt, Homo sapiens
  misc_RNA (1)...(19): siRNA sense strand
gcauggagaaguugaacca

SEQ ID NO: 1828544 - RNA, 19 nt, Homo sapiens
  misc_RNA (1)...(19): siRNA sense strand
gcaggcacacggagcugaa

SEQ ID NO: 1828545 - RNA, 19 nt, Homo sapiens
  misc_RNA (1)...(19): siRNA sense strand
agaaaguucacgaguacaa

SEQ ID NO: 1828546 - RNA, 19 nt, Homo sapiens
  misc_RNA (1)...(19): siRNA sense strand
gaggagcccagggugauug

SEQ ID NO: 1828547 - RNA, 19 nt, Homo sapiens
  misc_RNA (1)...(19): siRNA sense strand
cgaagaccucugggaaauu

SEQ ID NO: 1828548 - RNA, 19 nt, Homo sapiens
  misc_RNA (1)...(19): siRNA sense strand
ggaccugagcgacaucaag

SEQ ID NO: 1828549 - RNA, 19 nt, Homo sapiens
  misc_RNA (1)...(19): siRNA sense strand
cagaagcagcuggagauug

SEQ ID NO: 1828550 - RNA, 19 nt, Homo sapiens
  misc_RNA (1)...(19): siRNA sense strand
ccagagcucggcacaacga

SEQ ID NO: 1828551 - RNA, 19 nt, Homo sapiens
  misc_RNA (1)...(19): siRNA sense strand
gaccagcaacucccucagu

SEQ ID NO: 1828552 - RNA, 19 nt, Homo sapiens
  misc_RNA (1)...(19): siRNA sense strand
ggagcucaagcacuucgaa

SEQ ID NO: 1828553 - RNA, 19 nt, Homo sapiens
  misc_RNA (1)...(19): siRNA sense strand
ggaaauucuccggcgaaga

SEQ ID NO: 1828554 - RNA, 19 nt, Homo sapiens
  misc_RNA (1)...(19): siRNA sense strand
gagcuccacgcugaucuga

SEQ ID NO: 1828555 - RNA, 19 nt, Homo sapiens
  misc_RNA (1)...(19): siRNA sense strand
caucacaaagagaaaguuc

SEQ ID NO: 1828556 - RNA, 19 nt, Homo sapiens
  misc_RNA (1)...(19): siRNA sense strand
guuccugcaucacaaagag

SEQ ID NO: 1828557 - RNA, 19 nt, Homo sapiens
  misc_RNA (1)...(19): siRNA sense strand
cgaagaaauccacgagaac

SEQ ID NO: 1828558 - RNA, 19 nt, Homo sapiens
  misc_RNA (1)...(19): siRNA sense strand
gcacuucgaagccaaaauc

SEQ ID NO: 1828559 - RNA, 19 nt, Homo sapiens
  misc_RNA (1)...(19): siRNA sense strand
gaaaguucacgaguacaac

SEQ ID NO: 1828560 - RNA, 19 nt, Homo sapiens
  misc_RNA (1)...(19): siRNA sense strand
gcuagaagcugccaucuug

SEQ ID NO: 1828561 - RNA, 19 nt, Homo sapiens
  misc_RNA (1)...(19): siRNA sense strand
gcagaacacugauggaaau

SEQ ID NO: 1828562 - RNA, 19 nt, Homo sapiens
  misc_RNA (1)...(19): siRNA sense strand
agaaagaucugcuguucaa

SEQ ID NO: 1828563 - RNA, 19 nt, Homo sapiens
  misc_RNA (1)...(19): siRNA sense strand
gcagugacccugauccuaa

SEQ ID NO: 1828564 - RNA, 19 nt, Homo sapiens
  misc_RNA (1)...(19): siRNA sense strand
ggauagaccuguggaagga

SEQ ID NO: 1828565 - RNA, 19 nt, Homo sapiens
  misc_RNA (1)...(19): siRNA sense strand
ggaagccaguggacaaguu

SEQ ID NO: 1828566 - RNA, 19 nt, Homo sapiens
  misc_RNA (1)...(19): siRNA sense strand
gaacacugauggaaauaac

SEQ ID NO: 1828567 - RNA, 19 nt, Homo sapiens
  misc_RNA (1)...(19): siRNA sense strand
gccacgaacucacuauuau

SEQ ID NO: 1828568 - RNA, 19 nt, Homo sapiens
  misc_RNA (1)...(19): siRNA sense strand
gaguuuggauggaggauau

SEQ ID NO: 1828569 - RNA, 19 nt, Homo sapiens
  misc_RNA (1)...(19): siRNA sense strand
ccugucagcugcauaaaga

SEQ ID NO: 1828570 - RNA, 19 nt, Homo sapiens
  misc_RNA (1)...(19): siRNA sense strand
ugagaaugcuggagacguu

SEQ ID NO: 1828571 - RNA, 19 nt, Homo sapiens
  misc_RNA (1)...(19): siRNA sense strand
gaacuacaaaucccaacaa

SEQ ID NO: 1828572 - RNA, 19 nt, Homo sapiens
  misc_RNA (1)...(19): siRNA sense strand
acacuagccuuaccuggaa

SEQ ID NO: 1828573 - RNA, 19 nt, Homo sapiens
  misc_RNA (1)...(19): siRNA sense strand
ggacaagucaccgaaauuc

SEQ ID NO: 1828574 - RNA, 19 nt, Homo sapiens
  misc_RNA (1)...(19): siRNA sense strand
ggacaaguuuugcuuauuc

SEQ ID NO: 1828575 - RNA, 19 nt, Homo sapiens
  misc_RNA (1)...(19): siRNA sense strand
gacgggcuccugcaaauuu

SEQ ID NO: 1828576 - RNA, 19 nt, Homo sapiens
  misc_RNA (1)...(19): siRNA sense strand
ccaccaacaggcuaaauuu

SEQ ID NO: 1828577 - RNA, 19 nt, Homo sapiens
  misc_RNA (1)...(19): siRNA sense strand
ucacugccauccagaacuu

SEQ ID NO: 1828578 - RNA, 19 nt, Homo sapiens
  misc_RNA (1)...(19): siRNA sense strand
ccugcaaauuugaugaaua

SEQ ID NO: 1828579 - RNA, 19 nt, Homo sapiens
  misc_RNA (1)...(19): siRNA sense strand
cagacgggcuccugcaaau

SEQ ID NO: 1828580 - RNA, 19 nt, Homo sapiens
  misc_RNA (1)...(19): siRNA sense strand
ggcaaaggaauaugagaaa

SEQ ID NO: 1828581 - RNA, 19 nt, Homo sapiens
  misc_RNA (1)...(19): siRNA sense strand
caaccugugucgccugugu

SEQ ID NO: 1828582 - RNA, 19 nt, Homo sapiens
  misc_RNA (1)...(19): siRNA sense strand
ggacucugccauuggguuu

SEQ ID NO: 1828583 - RNA, 19 nt, Homo sapiens
  misc_RNA (1)...(19): siRNA sense strand
ccuggaagccugugaauuc

SEQ ID NO: 1828584 - RNA, 19 nt, Homo sapiens
  misc_RNA (1)...(19): siRNA sense strand
gaaagacagccacgaacuc

SEQ ID NO: 1828585 - RNA, 19 nt, Homo sapiens
  misc_RNA (1)...(19): siRNA sense strand
ugacugcccggacaaguuu

SEQ ID NO: 1828586 - RNA, 19 nt, Homo sapiens
  misc_RNA (1)...(19): siRNA sense strand
gaaagggacgaguaugagu

SEQ ID NO: 1828587 - RNA, 19 nt, Homo sapiens
  misc_RNA (1)...(19): siRNA sense strand
gaacugcaaggucugaagu

SEQ ID NO: 1828588 - RNA, 19 nt, Homo sapiens
  misc_RNA (1)...(19): siRNA sense strand
ggcaugggcuaaggauuug

SEQ ID NO: 1828589 - RNA, 19 nt, Homo sapiens
  misc_RNA (1)...(19): siRNA sense strand
gaaccguacuucagcuacu

SEQ ID NO: 1828590 - RNA, 19 nt, Homo sapiens
  misc_RNA (1)...(19): siRNA sense strand
gcaaaggaauaugagaaaa

SEQ ID NO: 1828591 - RNA, 19 nt, Homo sapiens
  misc_RNA (1)...(19): siRNA sense strand
cuacaaaucccaacaaagc

SEQ ID NO: 1828592 - RNA, 19 nt, Homo sapiens
  misc_RNA (1)...(19): siRNA sense strand
caggaccgcuggauggaau

SEQ ID NO: 1828593 - RNA, 19 nt, Homo sapiens
  misc_RNA (1)...(19): siRNA sense strand
aagcugaugccaugaguuu

SEQ ID NO: 1828594 - RNA, 19 nt, Homo sapiens
  misc_RNA (1)...(19): siRNA sense strand
guucaaggacucugccauu

SEQ ID NO: 1828595 - RNA, 19 nt, Homo sapiens
  misc_RNA (1)...(19): siRNA sense strand
gagagagcacaguguuuga

SEQ ID NO: 1828596 - RNA, 19 nt, Homo sapiens
  misc_RNA (1)...(19): siRNA sense strand
caauggcaaaggaauauga

SEQ ID NO: 1828597 - RNA, 19 nt, Homo sapiens
  misc_RNA (1)...(19): siRNA sense strand
ccuugauggugguuucaua

SEQ ID NO: 1828598 - RNA, 19 nt, Homo sapiens
  misc_RNA (1)...(19): siRNA sense strand
uaagguggaacgccugaaa

SEQ ID NO: 1828599 - RNA, 19 nt, Homo sapiens
  misc_RNA (1)...(19): siRNA sense strand
agacguggcuuuuaucaga

SEQ ID NO: 1828600 - RNA, 19 nt, Homo sapiens
  misc_RNA (1)...(19): siRNA sense strand
gacacuucguccauucuug

SEQ ID NO: 1828601 - RNA, 19 nt, Homo sapiens
  misc_RNA (1)...(19): siRNA sense strand
aggcaugggcuaaggauuu

SEQ ID NO: 1828602 - RNA, 19 nt, Homo sapiens
  misc_RNA (1)...(19): siRNA sense strand
agacguugcauuugugaaa

SEQ ID NO: 1828603 - RNA, 19 nt, Homo sapiens
  misc_RNA (1)...(19): siRNA sense strand
ucuaaucucugugcucugu

SEQ ID NO: 1828604 - RNA, 19 nt, Homo sapiens
  misc_RNA (1)...(19): siRNA sense strand
ccaugggccugcucuucaa

SEQ ID NO: 1828605 - RNA, 19 nt, Homo sapiens
  misc_RNA (1)...(19): siRNA sense strand
ggacugcaggcuggaauau

SEQ ID NO: 1828606 - RNA, 19 nt, Homo sapiens
  misc_RNA (1)...(19): siRNA sense strand
auagaccuguggaaggaua

SEQ ID NO: 1828607 - RNA, 19 nt, Homo sapiens
  misc_RNA (1)...(19): siRNA sense strand
gauagauucugggcuguac

SEQ ID NO: 1828608 - RNA, 19 nt, Homo sapiens
  misc_RNA (1)...(19): siRNA sense strand
guucaaagacugccaucug

SEQ ID NO: 1828609 - RNA, 19 nt, Homo sapiens
  misc_RNA (1)...(19): siRNA sense strand
aagaucugcuguucaagga

SEQ ID NO: 1828610 - RNA, 19 nt, Homo sapiens
  misc_RNA (1)...(19): siRNA sense strand
ccaacagcaacgagagaua

SEQ ID NO: 1828611 - RNA, 19 nt, Homo sapiens
  misc_RNA (1)...(19): siRNA sense strand
ucagagagagcacaguguu

SEQ ID NO: 1828612 - RNA, 19 nt, Homo sapiens
  misc_RNA (1)...(19): siRNA sense strand
acaaagcagugacccugau

SEQ ID NO: 1828613 - RNA, 19 nt, Homo sapiens
  misc_RNA (1)...(19): siRNA sense strand
ggauggaggauauguguac

SEQ ID NO: 1828614 - RNA, 19 nt, Homo sapiens
  misc_RNA (1)...(19): siRNA sense strand
aagggacgaguaugaguua

SEQ ID NO: 1828615 - RNA, 19 nt, Homo sapiens
  misc_RNA (1)...(19): siRNA sense strand
ccgaugcugugacccuuga

SEQ ID NO: 1828616 - RNA, 19 nt, Homo sapiens
  misc_RNA (1)...(19): siRNA sense strand
ggagacguugcauuuguga

SEQ ID NO: 1828617 - RNA, 19 nt, Homo sapiens
  misc_RNA (1)...(19): siRNA sense strand
cuggagacguugcauuugu

SEQ ID NO: 1828618 - RNA, 19 nt, Homo sapiens
  misc_RNA (1)...(19): siRNA sense strand
ggauagauucugggcugua

SEQ ID NO: 1828619 - RNA, 19 nt, Homo sapiens
  misc_RNA (1)...(19): siRNA sense strand
aaggacaagucaccgaaau

SEQ ID NO: 1828620 - RNA, 19 nt, Homo sapiens
  misc_RNA (1)...(19): siRNA sense strand
uggcagagaacuacaaauc

SEQ ID NO: 1828621 - RNA, 19 nt, Homo sapiens
  misc_RNA (1)...(19): siRNA sense strand
gaagucuacgggaccgaaa

SEQ ID NO: 1828622 - RNA, 19 nt, Homo sapiens
  misc_RNA (1)...(19): siRNA sense strand
aacggaagccugugacuga

SEQ ID NO: 1828623 - RNA, 19 nt, Homo sapiens
  misc_RNA (1)...(19): siRNA sense strand
gaagccaguggacaaguuc

SEQ ID NO: 1828624 - RNA, 19 nt, Homo sapiens
  misc_RNA (1)...(19): siRNA sense strand
agagagagcacaguguuug

SEQ ID NO: 1828625 - RNA, 19 nt, Homo sapiens
  misc_RNA (1)...(19): siRNA sense strand
ugauggugguuucauauac

SEQ ID NO: 1828626 - RNA, 19 nt, Homo sapiens
  misc_RNA (1)...(19): siRNA sense strand
caguaugucgcaggcauua

SEQ ID NO: 1828627 - RNA, 19 nt, Homo sapiens
  misc_RNA (1)...(19): siRNA sense strand
gaauauuucagucaaagcu

SEQ ID NO: 1828628 - RNA, 19 nt, Homo sapiens
  misc_RNA (1)...(19): siRNA sense strand
cugaaagggacgaguauga

SEQ ID NO: 1828629 - RNA, 19 nt, Homo sapiens
  misc_RNA (1)...(19): siRNA sense strand
cagagagagcacaguguuu

SEQ ID NO: 1828630 - RNA, 19 nt, Homo sapiens
  misc_RNA (1)...(19): siRNA sense strand
gaaaacaaaugugccuucu

SEQ ID NO: 1828631 - RNA, 19 nt, Homo sapiens
  misc_RNA (1)...(19): siRNA sense strand
ccacgaacucacuauuaug

SEQ ID NO: 1828632 - RNA, 19 nt, Homo sapiens
  misc_RNA (1)...(19): siRNA sense strand
gauggugguuucauauacg

SEQ ID NO: 1828633 - RNA, 19 nt, Homo sapiens
  misc_RNA (1)...(19): siRNA sense strand
aacuacaaaucccaacaaa

SEQ ID NO: 1828634 - RNA, 19 nt, Homo sapiens
  misc_RNA (1)...(19): siRNA sense strand
caacagcaacgagagauac

SEQ ID NO: 1828635 - RNA, 19 nt, Homo sapiens
  misc_RNA (1)...(19): siRNA sense strand
uaaucucugugcucugugu

SEQ ID NO: 1828636 - RNA, 19 nt, Homo sapiens
  misc_RNA (1)...(19): siRNA sense strand
acacuucguccauucuuga

SEQ ID NO: 1828637 - RNA, 19 nt, Homo sapiens
  misc_RNA (1)...(19): siRNA sense strand
gacccuugauggugguuuc

SEQ ID NO: 1828638 - RNA, 19 nt, Homo sapiens
  misc_RNA (1)...(19): siRNA sense strand
caggcuaaauuugggagaa

SEQ ID NO: 1828639 - RNA, 19 nt, Homo sapiens
  misc_RNA (1)...(19): siRNA sense strand
gagcagggugagaauaagu

SEQ ID NO: 1828640 - RNA, 19 nt, Homo sapiens
  misc_RNA (1)...(19): siRNA sense strand
ccagacgggcuccugcaaa

SEQ ID NO: 1828641 - RNA, 19 nt, Homo sapiens
  misc_RNA (1)...(19): siRNA sense strand
gaggaaaagugaggaggaa

SEQ ID NO: 1828642 - RNA, 19 nt, Homo sapiens
  misc_RNA (1)...(19): siRNA sense strand
aaagggacgaguaugaguu

SEQ ID NO: 1828643 - RNA, 19 nt, Homo sapiens
  misc_RNA (1)...(19): siRNA sense strand
uggcaaaggaauaugagaa

SEQ ID NO: 1828644 - RNA, 19 nt, Homo sapiens
  misc_RNA (1)...(19): siRNA sense strand
acaaugaggcaugggcuaa

SEQ ID NO: 1828645 - RNA, 19 nt, Homo sapiens
  misc_RNA (1)...(19): siRNA sense strand
acgagcagggugagaauaa

SEQ ID NO: 1828646 - RNA, 19 nt, Homo sapiens
  misc_RNA (1)...(19): siRNA sense strand
ucucugugcucuguguauu

SEQ ID NO: 1828647 - RNA, 19 nt, Homo sapiens
  misc_RNA (1)...(19): siRNA sense strand
gcugaaaggagaagcugau

SEQ ID NO: 1828648 - RNA, 19 nt, Homo sapiens
  misc_RNA (1)...(19): siRNA sense strand
agccacgaacucacuauua

SEQ ID NO: 1828649 - RNA, 19 nt, Homo sapiens
  misc_RNA (1)...(19): siRNA sense strand
gaagugugaauggcaagga

SEQ ID NO: 1828650 - RNA, 19 nt, Homo sapiens
  misc_RNA (1)...(19): siRNA sense strand
aaagacagccacgaacuca

SEQ ID NO: 1828651 - RNA, 19 nt, Homo sapiens
  misc_RNA (1)...(19): siRNA sense strand
ggacaggggaaaacaaaug

SEQ ID NO: 1828652 - RNA, 19 nt, Homo sapiens
  misc_RNA (1)...(19): siRNA sense strand
caccaacaggcuaaauuug

SEQ ID NO: 1828653 - RNA, 19 nt, Homo sapiens
  misc_RNA (1)...(19): siRNA sense strand
cguaggagaaggaguguuc

SEQ ID NO: 1828654 - RNA, 19 nt, Homo sapiens
  misc_RNA (1)...(19): siRNA sense strand
gauggaggauauguguaca

SEQ ID NO: 1828655 - RNA, 19 nt, Homo sapiens
  misc_RNA (1)...(19): siRNA sense strand
guggacaaguucaaagacu

SEQ ID NO: 1828656 - RNA, 19 nt, Homo sapiens
  misc_RNA (1)...(19): siRNA sense strand
gucacugucuugcagaaca

SEQ ID NO: 1828657 - RNA, 19 nt, Homo sapiens
  misc_RNA (1)...(19): siRNA sense strand
aggcuaaauuugggagaaa

SEQ ID NO: 1828658 - RNA, 19 nt, Homo sapiens
  misc_RNA (1)...(19): siRNA sense strand
gggcuaaggauuugaagcu

SEQ ID NO: 1828659 - RNA, 19 nt, Homo sapiens
  misc_RNA (1)...(19): siRNA sense strand
acacugauggaaauaacaa

SEQ ID NO: 1828660 - RNA, 19 nt, Homo sapiens
  misc_RNA (1)...(19): siRNA sense strand
ugaauucacuccugccaau

SEQ ID NO: 1828661 - RNA, 19 nt, Homo sapiens
  misc_RNA (1)...(19): siRNA sense strand
guggcaaccucaacacuga

SEQ ID NO: 1828662 - RNA, 19 nt, Homo sapiens
  misc_RNA (1)...(19): siRNA sense strand
ggagcuagcuguggauaac

SEQ ID NO: 1828663 - RNA, 19 nt, Homo sapiens
  misc_RNA (1)...(19): siRNA sense strand
ggaacugaguccagagaag

SEQ ID NO: 1828664 - RNA, 19 nt, Homo sapiens
  misc_RNA (1)...(19): siRNA sense strand
acacugagccuccuuaugg

SEQ ID NO: 1828665 - RNA, 19 nt, Homo sapiens
  misc_RNA (1)...(19): siRNA sense strand
gaggggacaugaagaguuu

SEQ ID NO: 1828666 - RNA, 19 nt, Homo sapiens
  misc_RNA (1)...(19): siRNA sense strand
gaacugaguccagagaagu

SEQ ID NO: 1828667 - RNA, 19 nt, Homo sapiens
  misc_RNA (1)...(19): siRNA sense strand
gggcgacgcuucagagacu

SEQ ID NO: 1828668 - RNA, 19 nt, Homo sapiens
  misc_RNA (1)...(19): siRNA sense strand
gcaaguuucgccaucagaa

SEQ ID NO: 1828669 - RNA, 19 nt, Homo sapiens
  misc_RNA (1)...(19): siRNA sense strand
cgagaaccacggagaggua

SEQ ID NO: 1828670 - RNA, 19 nt, Homo sapiens
  misc_RNA (1)...(19): siRNA sense strand
ccucagaaccuuuggaauc

SEQ ID NO: 1828671 - RNA, 19 nt, Homo sapiens
  misc_RNA (1)...(19): siRNA sense strand
gacaaccucugggcugaug

SEQ ID NO: 1828672 - RNA, 19 nt, Homo sapiens
  misc_RNA (1)...(19): siRNA sense strand
gcacucaggacccggaugu

SEQ ID NO: 1828673 - RNA, 19 nt, Homo sapiens
  misc_RNA (1)...(19): siRNA sense strand
gcaaaggcgccaagaacca

SEQ ID NO: 1828674 - RNA, 19 nt, Homo sapiens
  misc_RNA (1)...(19): siRNA sense strand
gagggcaucuucacaucca

SEQ ID NO: 1828675 - RNA, 19 nt, Homo sapiens
  misc_RNA (1)...(19): siRNA sense strand
ggaggaaaaucacuucauc

SEQ ID NO: 1828676 - RNA, 19 nt, Homo sapiens
  misc_RNA (1)...(19): siRNA sense strand
ucaagacccugccagaacu

SEQ ID NO: 1828677 - RNA, 19 nt, Homo sapiens
  misc_RNA (1)...(19): siRNA sense strand
ggacccggaugugcugaau

SEQ ID NO: 1828678 - RNA, 19 nt, Homo sapiens
  misc_RNA (1)...(19): siRNA sense strand
ccacggagagguagagauc

SEQ ID NO: 1828679 - RNA, 19 nt, Homo sapiens
  misc_RNA (1)...(19): siRNA sense strand
gaaugccugugcccagaag

SEQ ID NO: 1828680 - RNA, 19 nt, Homo sapiens
  misc_RNA (1)...(19): siRNA sense strand
gggagucgcuguacauccu

SEQ ID NO: 1828681 - RNA, 19 nt, Homo sapiens
  misc_RNA (1)...(19): siRNA sense strand
gccaucaccucuggucaug

SEQ ID NO: 1828682 - RNA, 19 nt, Homo sapiens
  misc_RNA (1)...(19): siRNA sense strand
ggucuuggcuguuuucuac

SEQ ID NO: 1828683 - RNA, 19 nt, Homo sapiens
  misc_RNA (1)...(19): siRNA sense strand
ucacauccaagacagauuc

SEQ ID NO: 1828684 - RNA, 19 nt, Homo sapiens
  misc_RNA (1)...(19): siRNA sense strand
uaugagggacugguaauug

SEQ ID NO: 1828685 - RNA, 19 nt, Homo sapiens
  misc_RNA (1)...(19): siRNA sense strand
agauggaguauccuucaua

SEQ ID NO: 1828686 - RNA, 19 nt, Homo sapiens
  misc_RNA (1)...(19): siRNA sense strand
ggauggcacgagauaucua

SEQ ID NO: 1828687 - RNA, 19 nt, Homo sapiens
  misc_RNA (1)...(19): siRNA sense strand
cuucgaaccucugccauca

SEQ ID NO: 1828688 - RNA, 19 nt, Homo sapiens
  misc_RNA (1)...(19): siRNA sense strand
ucaacacugagccuccuua

SEQ ID NO: 1828689 - RNA, 19 nt, Homo sapiens
  misc_RNA (1)...(19): siRNA sense strand
gggccuugcucccagucaa

SEQ ID NO: 1828690 - RNA, 19 nt, Homo sapiens
  misc_RNA (1)...(19): siRNA sense strand
caacacugagccuccuuau

SEQ ID NO: 1828691 - RNA, 19 nt, Homo sapiens
  misc_RNA (1)...(19): siRNA sense strand
acccggaugugcugaauuc

SEQ ID NO: 1828692 - RNA, 19 nt, Homo sapiens
  misc_RNA (1)...(19): siRNA sense strand
gccacuaccuggaggaaaa

SEQ ID NO: 1828693 - RNA, 19 nt, Homo sapiens
  misc_RNA (1)...(19): siRNA sense strand
ccugggccauggugccuuu

SEQ ID NO: 1828694 - RNA, 19 nt, Homo sapiens
  misc_RNA (1)...(19): siRNA sense strand
gggaagauggaguauccuu

SEQ ID NO: 1828695 - RNA, 19 nt, Homo sapiens
  misc_RNA (1)...(19): siRNA sense strand
gcuguccucuggccucaag

SEQ ID NO: 1828696 - RNA, 19 nt, Homo sapiens
  misc_RNA (1)...(19): siRNA sense strand
cggaugugcugaauucacu

SEQ ID NO: 1828697 - RNA, 19 nt, Homo sapiens
  misc_RNA (1)...(19): siRNA sense strand
gcauggcgucuucgucuca

SEQ ID NO: 1828698 - RNA, 19 nt, Homo sapiens
  misc_RNA (1)...(19): siRNA sense strand
uaucaagacccugccagaa

SEQ ID NO: 1828699 - RNA, 19 nt, Homo sapiens
  misc_RNA (1)...(19): siRNA sense strand
ucagcaaguuucgccauca

SEQ ID NO: 1828700 - RNA, 19 nt, Homo sapiens
  misc_RNA (1)...(19): siRNA sense strand
caccucaacugcagucacu

SEQ ID NO: 1828701 - RNA, 19 nt, Homo sapiens
  misc_RNA (1)...(19): siRNA sense strand
ccuccaaccucagaaccuu

SEQ ID NO: 1828702 - RNA, 19 nt, Homo sapiens
  misc_RNA (1)...(19): siRNA sense strand
uugaaaagcuggggaggua

SEQ ID NO: 1828703 - RNA, 19 nt, Homo sapiens
  misc_RNA (1)...(19): siRNA sense strand
uagcuuugccagcaucuug

SEQ ID NO: 1828704 - RNA, 19 nt, Homo sapiens
  misc_RNA (1)...(19): siRNA sense strand
gcaucaugacccaguguug

SEQ ID NO: 1828705 - RNA, 19 nt, Homo sapiens
  misc_RNA (1)...(19): siRNA sense strand
uggauaacgucaccugcau

SEQ ID NO: 1828706 - RNA, 19 nt, Homo sapiens
  misc_RNA (1)...(19): siRNA sense strand
ucuuggagcgucugcagua

SEQ ID NO: 1828707 - RNA, 19 nt, Homo sapiens
  misc_RNA (1)...(19): siRNA sense strand
ccucaucaucagcaaguuu

SEQ ID NO: 1828708 - RNA, 19 nt, Homo sapiens
  misc_RNA (1)...(19): siRNA sense strand
guaugagggacugguaauu

SEQ ID NO: 1828709 - RNA, 19 nt, Homo sapiens
  misc_RNA (1)...(19): siRNA sense strand
gguguaugagggacuggua

SEQ ID NO: 1828710 - RNA, 19 nt, Homo sapiens
  misc_RNA (1)...(19): siRNA sense strand
gggccuguguaccgcauca

SEQ ID NO: 1828711 - RNA, 19 nt, Homo sapiens
  misc_RNA (1)...(19): siRNA sense strand
cgaggggucuuggcuguuu

SEQ ID NO: 1828712 - RNA, 19 nt, Homo sapiens
  misc_RNA (1)...(19): siRNA sense strand
uggagggcaucuucacauc

SEQ ID NO: 1828713 - RNA, 19 nt, Homo sapiens
  misc_RNA (1)...(19): siRNA sense strand
gugcugcucugggagaucu

SEQ ID NO: 1828714 - RNA, 19 nt, Homo sapiens
  misc_RNA (1)...(19): siRNA sense strand
acagauuccuggucuuuug

SEQ ID NO: 1828715 - RNA, 19 nt, Homo sapiens
  misc_RNA (1)...(19): siRNA sense strand
gaaccacggagagguagag

SEQ ID NO: 1828716 - RNA, 19 nt, Homo sapiens
  misc_RNA (1)...(19): siRNA sense strand
ccagagaaguugaaaagcu

SEQ ID NO: 1828717 - RNA, 19 nt, Homo sapiens
  misc_RNA (1)...(19): siRNA sense strand
cggcaaaggcgccaagaac

SEQ ID NO: 1828718 - RNA, 19 nt, Homo sapiens
  misc_RNA (1)...(19): siRNA sense strand
gcagauggcuugugcagaa

SEQ ID NO: 1828719 - RNA, 19 nt, Homo sapiens
  misc_RNA (1)...(19): siRNA sense strand
gcaaagugcugcuuccaaa

SEQ ID NO: 1828720 - RNA, 19 nt, Homo sapiens
  misc_RNA (1)...(19): siRNA sense strand
ggagaaggcuuguauuagu

SEQ ID NO: 1828721 - RNA, 19 nt, Homo sapiens
  misc_RNA (1)...(19): siRNA sense strand
gaagagagaccaacguuug

SEQ ID NO: 1828722 - RNA, 19 nt, Homo sapiens
  misc_RNA (1)...(19): siRNA sense strand
ggugcuaaguucccuauua

SEQ ID NO: 1828723 - RNA, 19 nt, Homo sapiens
  misc_RNA (1)...(19): siRNA sense strand
gaugagcucuaugacauua

SEQ ID NO: 1828724 - RNA, 19 nt, Homo sapiens
  misc_RNA (1)...(19): siRNA sense strand
aaaggaagcuucucucugu

SEQ ID NO: 1828725 - RNA, 19 nt, Homo sapiens
  misc_RNA (1)...(19): siRNA sense strand
gcaaucaacuuuggauguu

SEQ ID NO: 1828726 - RNA, 19 nt, Homo sapiens
  misc_RNA (1)...(19): siRNA sense strand
gcgacaugauuaaacauua

SEQ ID NO: 1828727 - RNA, 19 nt, Homo sapiens
  misc_RNA (1)...(19): siRNA sense strand
gugcuaaguucccuauuaa

SEQ ID NO: 1828728 - RNA, 19 nt, Homo sapiens
  misc_RNA (1)...(19): siRNA sense strand
ggaaagacagcuugaguga

SEQ ID NO: 1828729 - RNA, 19 nt, Homo sapiens
  misc_RNA (1)...(19): siRNA sense strand
gcuggagcuuuccuuauua

SEQ ID NO: 1828730 - RNA, 19 nt, Homo sapiens
  misc_RNA (1)...(19): siRNA sense strand
ggaagaagccaaccucaug

SEQ ID NO: 1828731 - RNA, 19 nt, Homo sapiens
  misc_RNA (1)...(19): siRNA sense strand
gagcuuuccuuauuagaga

SEQ ID NO: 1828732 - RNA, 19 nt, Homo sapiens
  misc_RNA (1)...(19): siRNA sense strand
ugaagacccugcagcauga

SEQ ID NO: 1828733 - RNA, 19 nt, Homo sapiens
  misc_RNA (1)...(19): siRNA sense strand
ggagaaugguggaaagcaa

SEQ ID NO: 1828734 - RNA, 19 nt, Homo sapiens
  misc_RNA (1)...(19): siRNA sense strand
cagaugagcucuaugacau

SEQ ID NO: 1828735 - RNA, 19 nt, Homo sapiens
  misc_RNA (1)...(19): siRNA sense strand
gaccaacguuugacuacuu

SEQ ID NO: 1828736 - RNA, 19 nt, Homo sapiens
  misc_RNA (1)...(19): siRNA sense strand
gcaaaggccaguuccagaa

SEQ ID NO: 1828737 - RNA, 19 nt, Homo sapiens
  misc_RNA (1)...(19): siRNA sense strand
gaagaagccaaccucauga

SEQ ID NO: 1828738 - RNA, 19 nt, Homo sapiens
  misc_RNA (1)...(19): siRNA sense strand
guaccaagguggcugugaa

SEQ ID NO: 1828739 - RNA, 19 nt, Homo sapiens
  misc_RNA (1)...(19): siRNA sense strand
gaaaggagagaagaugaaa

SEQ ID NO: 1828740 - RNA, 19 nt, Homo sapiens
  misc_RNA (1)...(19): siRNA sense strand
gauaaugaguacacagcaa

SEQ ID NO: 1828741 - RNA, 19 nt, Homo sapiens
  misc_RNA (1)...(19): siRNA sense strand
gcaacuauguggccaaacu

SEQ ID NO: 1828742 - RNA, 19 nt, Homo sapiens
  misc_RNA (1)...(19): siRNA sense strand
ggaaauagcgcuggagcuu

SEQ ID NO: 1828743 - RNA, 19 nt, Homo sapiens
  misc_RNA (1)...(19): siRNA sense strand
ggaauccuccuauacgaaa

SEQ ID NO: 1828744 - RNA, 19 nt, Homo sapiens
  misc_RNA (1)...(19): siRNA sense strand
guggagaacugcccagaug

SEQ ID NO: 1828745 - RNA, 19 nt, Homo sapiens
  misc_RNA (1)...(19): siRNA sense strand
ucaaggauauaaccaggaa

SEQ ID NO: 1828746 - RNA, 19 nt, Homo sapiens
  misc_RNA (1)...(19): siRNA sense strand
ccagggaggagcccauuua

SEQ ID NO: 1828747 - RNA, 19 nt, Homo sapiens
  misc_RNA (1)...(19): siRNA sense strand
gagaaggcuuguauuaguc

SEQ ID NO: 1828748 - RNA, 19 nt, Homo sapiens
  misc_RNA (1)...(19): siRNA sense strand
gagauccaacguccaauaa

SEQ ID NO: 1828749 - RNA, 19 nt, Homo sapiens
  misc_RNA (1)...(19): siRNA sense strand
ggaggagcauggagaaugg

SEQ ID NO: 1828750 - RNA, 19 nt, Homo sapiens
  misc_RNA (1)...(19): siRNA sense strand
cgaugaagguggcaaagug

SEQ ID NO: 1828751 - RNA, 19 nt, Homo sapiens
  misc_RNA (1)...(19): siRNA sense strand
gaagccaaccucaugaaga

SEQ ID NO: 1828752 - RNA, 19 nt, Homo sapiens
  misc_RNA (1)...(19): siRNA sense strand
aaauagcgcuggagcuuuc

SEQ ID NO: 1828753 - RNA, 19 nt, Homo sapiens
  misc_RNA (1)...(19): siRNA sense strand
gauccaacguccaauaaac

SEQ ID NO: 1828754 - RNA, 19 nt, Homo sapiens
  misc_RNA (1)...(19): siRNA sense strand
gaacuaaugccgacgugau

SEQ ID NO: 1828755 - RNA, 19 nt, Homo sapiens
  misc_RNA (1)...(19): siRNA sense strand
uuacaucucuccacgaauc

SEQ ID NO: 1828756 - RNA, 19 nt, Homo sapiens
  misc_RNA (1)...(19): siRNA sense strand
gaaauagcgcuggagcuuu

SEQ ID NO: 1828757 - RNA, 19 nt, Homo sapiens
  misc_RNA (1)...(19): siRNA sense strand
uuagaagucuggauaaugg

SEQ ID NO: 1828758 - RNA, 19 nt, Homo sapiens
  misc_RNA (1)...(19): siRNA sense strand
uauacgaaauugucaccua

SEQ ID NO: 1828759 - RNA, 19 nt, Homo sapiens
  misc_RNA (1)...(19): siRNA sense strand
gaugugugguccuuuggaa

SEQ ID NO: 1828760 - RNA, 19 nt, Homo sapiens
  misc_RNA (1)...(19): siRNA sense strand
aaacucaacaccuuagaaa

SEQ ID NO: 1828761 - RNA, 19 nt, Homo sapiens
  misc_RNA (1)...(19): siRNA sense strand
gggaggagcccauuuacau

SEQ ID NO: 1828762 - RNA, 19 nt, Homo sapiens
  misc_RNA (1)...(19): siRNA sense strand
gagugacgauggaguagau

SEQ ID NO: 1828763 - RNA, 19 nt, Homo sapiens
  misc_RNA (1)...(19): siRNA sense strand
uauuacaucucuccacgaa

SEQ ID NO: 1828764 - RNA, 19 nt, Homo sapiens
  misc_RNA (1)...(19): siRNA sense strand
cagaagcaaucaacuuugg

SEQ ID NO: 1828765 - RNA, 19 nt, Homo sapiens
  misc_RNA (1)...(19): siRNA sense strand
uuccaaagcucauugacuu

SEQ ID NO: 1828766 - RNA, 19 nt, Homo sapiens
  misc_RNA (1)...(19): siRNA sense strand
gagaaugguggaaagcaaa

SEQ ID NO: 1828767 - RNA, 19 nt, Homo sapiens
  misc_RNA (1)...(19): siRNA sense strand
gcgagcagcuaauguucug

SEQ ID NO: 1828768 - RNA, 19 nt, Homo sapiens
  misc_RNA (1)...(19): siRNA sense strand
cgcuggagcuuuccuuauu

SEQ ID NO: 1828769 - RNA, 19 nt, Homo sapiens
  misc_RNA (1)...(19): siRNA sense strand
aaaaugugcuggaaagaaa

SEQ ID NO: 1828770 - RNA, 19 nt, Homo sapiens
  misc_RNA (1)...(19): siRNA sense strand
caaucaacuuuggauguuu

SEQ ID NO: 1828771 - RNA, 19 nt, Homo sapiens
  misc_RNA (1)...(19): siRNA sense strand
caagggaaggugcuaaguu

SEQ ID NO: 1828772 - RNA, 19 nt, Homo sapiens
  misc_RNA (1)...(19): siRNA sense strand
ucagcgacaugauuaaaca

SEQ ID NO: 1828773 - RNA, 19 nt, Homo sapiens
  misc_RNA (1)...(19): siRNA sense strand
gcauggugauguuauuaag

SEQ ID NO: 1828774 - RNA, 19 nt, Homo sapiens
  misc_RNA (1)...(19): siRNA sense strand
caagaaaggagagaagaug

SEQ ID NO: 1828775 - RNA, 19 nt, Homo sapiens
  misc_RNA (1)...(19): siRNA sense strand
gcccagaugagcucuauga

SEQ ID NO: 1828776 - RNA, 19 nt, Homo sapiens
  misc_RNA (1)...(19): siRNA sense strand
aagggaaggugcuaaguuc

SEQ ID NO: 1828777 - RNA, 19 nt, Homo sapiens
  misc_RNA (1)...(19): siRNA sense strand
gugauguuauuaagcacua

SEQ ID NO: 1828778 - RNA, 19 nt, Homo sapiens
  misc_RNA (1)...(19): siRNA sense strand
gcuaaguucccuauuaagu

SEQ ID NO: 1828779 - RNA, 19 nt, Homo sapiens
  misc_RNA (1)...(19): siRNA sense strand
gaggagcccauuuacauca

SEQ ID NO: 1828780 - RNA, 19 nt, Homo sapiens
  misc_RNA (1)...(19): siRNA sense strand
cgacaugauuaaacauuac

SEQ ID NO: 1828781 - RNA, 19 nt, Homo sapiens
  misc_RNA (1)...(19): siRNA sense strand
guuccagaaucucagcuuu

SEQ ID NO: 1828782 - RNA, 19 nt, Homo sapiens
  misc_RNA (1)...(19): siRNA sense strand
cagcaacuauguggccaaa

SEQ ID NO: 1828783 - RNA, 19 nt, Homo sapiens
  misc_RNA (1)...(19): siRNA sense strand
ggccaaacucaacaccuua

SEQ ID NO: 1828784 - RNA, 19 nt, Homo sapiens
  misc_RNA (1)...(19): siRNA sense strand
cuaaagauccagaggaaca

SEQ ID NO: 1828785 - RNA, 19 nt, Homo sapiens
  misc_RNA (1)...(19): siRNA sense strand
gaagcaaucaacuuuggau

SEQ ID NO: 1828786 - RNA, 19 nt, Homo sapiens
  misc_RNA (1)...(19): siRNA sense strand
gaacuauuuaugugagaga

SEQ ID NO: 1828787 - RNA, 19 nt, Homo sapiens
  misc_RNA (1)...(19): siRNA sense strand
gauuggagaaggcuuguau

SEQ ID NO: 1828788 - RNA, 19 nt, Homo sapiens
  misc_RNA (1)...(19): siRNA sense strand
uuggagaaggcuuguauua

SEQ ID NO: 1828789 - RNA, 19 nt, Homo sapiens
  misc_RNA (1)...(19): siRNA sense strand
auacgaaauugucaccuau

SEQ ID NO: 1828790 - RNA, 19 nt, Homo sapiens
  misc_RNA (1)...(19): siRNA sense strand
aacuaaagauccagaggaa

SEQ ID NO: 1828791 - RNA, 19 nt, Homo sapiens
  misc_RNA (1)...(19): siRNA sense strand
caaacucaacaccuuagaa

SEQ ID NO: 1828792 - RNA, 19 nt, Homo sapiens
  misc_RNA (1)...(19): siRNA sense strand
gcaguuugcuggauuuccu

SEQ ID NO: 1828793 - RNA, 19 nt, Homo sapiens
  misc_RNA (1)...(19): siRNA sense strand
cagcuugagugacgaugga

SEQ ID NO: 1828794 - RNA, 19 nt, Homo sapiens
  misc_RNA (1)...(19): siRNA sense strand
agagcguccuggaugauuu

SEQ ID NO: 1828795 - RNA, 19 nt, Homo sapiens
  misc_RNA (1)...(19): siRNA sense strand
gaaaaugugcuggaaagaa

SEQ ID NO: 1828796 - RNA, 19 nt, Homo sapiens
  misc_RNA (1)...(19): siRNA sense strand
gcucuaugacauuaugaaa

SEQ ID NO: 1828797 - RNA, 19 nt, Homo sapiens
  misc_RNA (1)...(19): siRNA sense strand
ggacggcuccagaagcaau

SEQ ID NO: 1828798 - RNA, 19 nt, Homo sapiens
  misc_RNA (1)...(19): siRNA sense strand
gcuagaguaauugaagaua

SEQ ID NO: 1828799 - RNA, 19 nt, Homo sapiens
  misc_RNA (1)...(19): siRNA sense strand
agacucaaccaguacguaa

SEQ ID NO: 1828800 - RNA, 19 nt, Homo sapiens
  misc_RNA (1)...(19): siRNA sense strand
cagaagagagaccaacguu

SEQ ID NO: 1828801 - RNA, 19 nt, Homo sapiens
  misc_RNA (1)...(19): siRNA sense strand
ugagcucuaugacauuaug

SEQ ID NO: 1828802 - RNA, 19 nt, Homo sapiens
  misc_RNA (1)...(19): siRNA sense strand
uggccaaacucaacaccuu

SEQ ID NO: 1828803 - RNA, 19 nt, Homo sapiens
  misc_RNA (1)...(19): siRNA sense strand
ggaaagaaaaggcagaaga

SEQ ID NO: 1828804 - RNA, 19 nt, Homo sapiens
  misc_RNA (1)...(19): siRNA sense strand
agagauccaacguccaaua

SEQ ID NO: 1828805 - RNA, 19 nt, Homo sapiens
  misc_RNA (1)...(19): siRNA sense strand
acucaaccaguacguaaua

SEQ ID NO: 1828806 - RNA, 19 nt, Homo sapiens
  misc_RNA (1)...(19): siRNA sense strand
cagagggaauggcauacau

SEQ ID NO: 1828807 - RNA, 19 nt, Homo sapiens
  misc_RNA (1)...(19): siRNA sense strand
ggaggagcccauuuacauc

SEQ ID NO: 1828808 - RNA, 19 nt, Homo sapiens
  misc_RNA (1)...(19): siRNA sense strand
guacguaauacugaaagaa

SEQ ID NO: 1828809 - RNA, 19 nt, Homo sapiens
  misc_RNA (1)...(19): siRNA sense strand
gugcauggugauguuauua

SEQ ID NO: 1828810 - RNA, 19 nt, Homo sapiens
  misc_RNA (1)...(19): siRNA sense strand
ugagagauccaacguccaa

SEQ ID NO: 1828811 - RNA, 19 nt, Homo sapiens
  misc_RNA (1)...(19): siRNA sense strand
ccggacgacuugucuuuca

SEQ ID NO: 1828812 - RNA, 19 nt, Homo sapiens
  misc_RNA (1)...(19): siRNA sense strand
uacagagcguccuggauga

SEQ ID NO: 1828813 - RNA, 19 nt, Homo sapiens
  misc_RNA (1)...(19): siRNA sense strand
accaacguuugacuacuua

SEQ ID NO: 1828814 - RNA, 19 nt, Homo sapiens
  misc_RNA (1)...(19): siRNA sense strand
aaucaacuuuggauguuuc

SEQ ID NO: 1828815 - RNA, 19 nt, Homo sapiens
  misc_RNA (1)...(19): siRNA sense strand
uggccuugcuagaguaauu

SEQ ID NO: 1828816 - RNA, 19 nt, Homo sapiens
  misc_RNA (1)...(19): siRNA sense strand
gagcccauuuacaucauca

SEQ ID NO: 1828817 - RNA, 19 nt, Homo sapiens
  misc_RNA (1)...(19): siRNA sense strand
aauaccagcagcagccuua

SEQ ID NO: 1828818 - RNA, 19 nt, Homo sapiens
  misc_RNA (1)...(19): siRNA sense strand
ggaaaucucugacaucaaa

SEQ ID NO: 1828819 - RNA, 19 nt, Homo sapiens
  misc_RNA (1)...(19): siRNA sense strand
gcgaaucuaugacaaguuu

SEQ ID NO: 1828820 - RNA, 19 nt, Homo sapiens
  misc_RNA (1)...(19): siRNA sense strand
gagauucacugacugcuau

SEQ ID NO: 1828821 - RNA, 19 nt, Homo sapiens
  misc_RNA (1)...(19): siRNA sense strand
gaggaaaucucugacauca

SEQ ID NO: 1828822 - RNA, 19 nt, Homo sapiens
  misc_RNA (1)...(19): siRNA sense strand
gaaccuagaagcugucuug

SEQ ID NO: 1828823 - RNA, 19 nt, Homo sapiens
  misc_RNA (1)...(19): siRNA sense strand
ccuagaagcugucuugaau

SEQ ID NO: 1828824 - RNA, 19 nt, Homo sapiens
  misc_RNA (1)...(19): siRNA sense strand
agaaggaucugcacagugu

SEQ ID NO: 1828825 - RNA, 19 nt, Homo sapiens
  misc_RNA (1)...(19): siRNA sense strand
ugacacagcgaaucuauga

SEQ ID NO: 1828826 - RNA, 19 nt, Homo sapiens
  misc_RNA (1)...(19): siRNA sense strand
gggaggaaaucucugacau

SEQ ID NO: 1828827 - RNA, 19 nt, Homo sapiens
  misc_RNA (1)...(19): siRNA sense strand
gaugacacagcgaaucuau

SEQ ID NO: 1828828 - RNA, 19 nt, Homo sapiens
  misc_RNA (1)...(19): siRNA sense strand
uagaagcugucuugaaugc

SEQ ID NO: 1828829 - RNA, 19 nt, Homo sapiens
  misc_RNA (1)...(19): siRNA sense strand
uaccagagauucacugacu

SEQ ID NO: 1828830 - RNA, 19 nt, Homo sapiens
  misc_RNA (1)...(19): siRNA sense strand
ccagcgggaucccagagaa

SEQ ID NO: 1828831 - RNA, 19 nt, Homo sapiens
  misc_RNA (1)...(19): siRNA sense strand
ggaggaaaucucugacauc

SEQ ID NO: 1828832 - RNA, 19 nt, Homo sapiens
  misc_RNA (1)...(19): siRNA sense strand
cagcgaaucuaugacaagu

SEQ ID NO: 1828833 - RNA, 19 nt, Homo sapiens
  misc_RNA (1)...(19): siRNA sense strand
gaucugcacaguguuauag

SEQ ID NO: 1828834 - RNA, 19 nt, Homo sapiens
  misc_RNA (1)...(19): siRNA sense strand
ggauaaaauuguggaagaa

SEQ ID NO: 1828835 - RNA, 19 nt, Homo sapiens
  misc_RNA (1)...(19): siRNA sense strand
gcugagggagccugaguga

SEQ ID NO: 1828836 - RNA, 19 nt, Homo sapiens
  misc_RNA (1)...(19): siRNA sense strand
ggaucugcacaguguuaua

SEQ ID NO: 1828837 - RNA, 19 nt, Homo sapiens
  misc_RNA (1)...(19): siRNA sense strand
uagcucaguugcagacauc

SEQ ID NO: 1828838 - RNA, 19 nt, Homo sapiens
  misc_RNA (1)...(19): siRNA sense strand
uaagugcuucuaccaguug

SEQ ID NO: 1828839 - RNA, 19 nt, Homo sapiens
  misc_RNA (1)...(19): siRNA sense strand
aaggaucugcacaguguua

SEQ ID NO: 1828840 - RNA, 19 nt, Homo sapiens
  misc_RNA (1)...(19): siRNA sense strand
gaaggcaaaguccgcaaag

SEQ ID NO: 1828841 - RNA, 19 nt, Homo sapiens
  misc_RNA (1)...(19): siRNA sense strand
acaaguuuauagcucaguu

SEQ ID NO: 1828842 - RNA, 19 nt, Homo sapiens
  misc_RNA (1)...(19): siRNA sense strand
agaaacaggaggccgagaa

SEQ ID NO: 1828843 - RNA, 19 nt, Homo sapiens
  misc_RNA (1)...(19): siRNA sense strand
auaagugcuucuaccaguu

SEQ ID NO: 1828844 - RNA, 19 nt, Homo sapiens
  misc_RNA (1)...(19): siRNA sense strand
agagaaggaucugcacagu

SEQ ID NO: 1828845 - RNA, 19 nt, Homo sapiens
  misc_RNA (1)...(19): siRNA sense strand
gaaacaggaggccgagaac

SEQ ID NO: 1828846 - RNA, 19 nt, Homo sapiens
  misc_RNA (1)...(19): siRNA sense strand
acacagcgaaucuaugaca

SEQ ID NO: 1828847 - RNA, 19 nt, Homo sapiens
  misc_RNA (1)...(19): siRNA sense strand
gccggcagcuaccagagau

SEQ ID NO: 1828848 - RNA, 19 nt, Homo sapiens
  misc_RNA (1)...(19): siRNA sense strand
uguuauagcacccuacuuc

SEQ ID NO: 1828849 - RNA, 19 nt, Homo sapiens
  misc_RNA (1)...(19): siRNA sense strand
gcgaugacacagcgaaucu

SEQ ID NO: 1828850 - RNA, 19 nt, Homo sapiens
  misc_RNA (1)...(19): siRNA sense strand
ugucuugaaugccuuggau

SEQ ID NO: 1828851 - RNA, 19 nt, Homo sapiens
  misc_RNA (1)...(19): siRNA sense strand
cuggcaggcucuacacaga

SEQ ID NO: 1828852 - RNA, 19 nt, Homo sapiens
  misc_RNA (1)...(19): siRNA sense strand
gcuauaagugcuucuacca

SEQ ID NO: 1828853 - RNA, 19 nt, Homo sapiens
  misc_RNA (1)...(19): siRNA sense strand
ucuugaaugccuuggauaa

SEQ ID NO: 1828854 - RNA, 19 nt, Homo sapiens
  misc_RNA (1)...(19): siRNA sense strand
gcucaguugcagacaucua

SEQ ID NO: 1828855 - RNA, 19 nt, Homo sapiens
  misc_RNA (1)...(19): siRNA sense strand
cacagcgaaucuaugacaa

SEQ ID NO: 1828856 - RNA, 19 nt, Homo sapiens
  misc_RNA (1)...(19): siRNA sense strand
gcuaccagagauucacuga

SEQ ID NO: 1828857 - RNA, 19 nt, Homo sapiens
  misc_RNA (1)...(19): siRNA sense strand
ugaaugccuuggauaaaau

SEQ ID NO: 1828858 - RNA, 19 nt, Homo sapiens
  misc_RNA (1)...(19): siRNA sense strand
uggauaaaauuguggaaga

SEQ ID NO: 1828859 - RNA, 19 nt, Homo sapiens
  misc_RNA (1)...(19): siRNA sense strand
caaguuuauagcucaguug

SEQ ID NO: 1828860 - RNA, 19 nt, Homo sapiens
  misc_RNA (1)...(19): siRNA sense strand
gcagagcguccgacuauaa

SEQ ID NO: 1828861 - RNA, 19 nt, Homo sapiens
  misc_RNA (1)...(19): siRNA sense strand
ggcaagaacugcucacuac

SEQ ID NO: 1828862 - RNA, 19 nt, Homo sapiens
  misc_RNA (1)...(19): siRNA sense strand
caagguacccuggcuaaag

SEQ ID NO: 1828863 - RNA, 19 nt, Homo sapiens
  misc_RNA (1)...(19): siRNA sense strand
ggccagagaccaggauuug

SEQ ID NO: 1828864 - RNA, 19 nt, Homo sapiens
  misc_RNA (1)...(19): siRNA sense strand
ggcaagguacccuggcuaa

SEQ ID NO: 1828865 - RNA, 19 nt, Homo sapiens
  misc_RNA (1)...(19): siRNA sense strand
cagagcguccgacuauaaa

SEQ ID NO: 1828866 - RNA, 19 nt, Homo sapiens
  misc_RNA (1)...(19): siRNA sense strand
gcaagguacccuggcuaaa

SEQ ID NO: 1828867 - RNA, 19 nt, Homo sapiens
  misc_RNA (1)...(19): siRNA sense strand
aggcagagcguccgacuau

SEQ ID NO: 1828868 - RNA, 19 nt, Homo sapiens
  misc_RNA (1)...(19): siRNA sense strand
gauagucgcucuggaucac

SEQ ID NO: 1828869 - RNA, 19 nt, Homo sapiens
  misc_RNA (1)...(19): siRNA sense strand
ggcagagcguccgacuaua

SEQ ID NO: 1828870 - RNA, 19 nt, Homo sapiens
  misc_RNA (1)...(19): siRNA sense strand
gagcguccgacuauaaauc

SEQ ID NO: 1828871 - RNA, 19 nt, Homo sapiens
  misc_RNA (1)...(19): siRNA sense strand
aagcugggaggaagagaua

SEQ ID NO: 1828872 - RNA, 19 nt, Homo sapiens
  misc_RNA (1)...(19): siRNA sense strand
gacuauaaaucggcucaca

SEQ ID NO: 1828873 - RNA, 19 nt, Homo sapiens
  misc_RNA (1)...(19): siRNA sense strand
caacauguacaaggacuca

SEQ ID NO: 1828874 - RNA, 19 nt, Homo sapiens
  misc_RNA (1)...(19): siRNA sense strand
ccacagcaaguaccaugga

SEQ ID NO: 1828875 - RNA, 19 nt, Homo sapiens
  misc_RNA (1)...(19): siRNA sense strand
gagacacgggcauccuuga

SEQ ID NO: 1828876 - RNA, 19 nt, Homo sapiens
  misc_RNA (1)...(19): siRNA sense strand
cggcaagaacugcucacua

SEQ ID NO: 1828877 - RNA, 19 nt, Homo sapiens
  misc_RNA (1)...(19): siRNA sense strand
ugugcaacauguacaagga

SEQ ID NO: 1828878 - RNA, 19 nt, Homo sapiens
  misc_RNA (1)...(19): siRNA sense strand
ccagggcacgcuuuccaaa

SEQ ID NO: 1828879 - RNA, 19 nt, Homo sapiens
  misc_RNA (1)...(19): siRNA sense strand
ucacaccacccggcaagaa

SEQ ID NO: 1828880 - RNA, 19 nt, Homo sapiens
  misc_RNA (1)...(19): siRNA sense strand
guaccuggccacagcaagu

SEQ ID NO: 1828881 - RNA, 19 nt, Homo sapiens
  misc_RNA (1)...(19): siRNA sense strand
gggcacgcuuuccaaaauu

SEQ ID NO: 1828882 - RNA, 19 nt, Homo sapiens
  misc_RNA (1)...(19): siRNA sense strand
ggccggacccaagaugaaa

SEQ ID NO: 1828883 - RNA, 19 nt, Homo sapiens
  misc_RNA (1)...(19): siRNA sense strand
cuauaaaucggcucacaag

SEQ ID NO: 1828884 - RNA, 19 nt, Homo sapiens
  misc_RNA (1)...(19): siRNA sense strand
ccugggcugugcaacaugu

SEQ ID NO: 1828885 - RNA, 19 nt, Homo sapiens
  misc_RNA (1)...(19): siRNA sense strand
gaaauucggagaagugauu

SEQ ID NO: 1828886 - RNA, 19 nt, Homo sapiens
  misc_RNA (1)...(19): siRNA sense strand
ccagacagguguuauggaa

SEQ ID NO: 1828887 - RNA, 19 nt, Homo sapiens
  misc_RNA (1)...(19): siRNA sense strand
caaggauugugaaaugaaa

SEQ ID NO: 1828888 - RNA, 19 nt, Homo sapiens
  misc_RNA (1)...(19): siRNA sense strand
ggaagcugcugaagguugu

SEQ ID NO: 1828889 - RNA, 19 nt, Homo sapiens
  misc_RNA (1)...(19): siRNA sense strand
uauggaagcugcugaaggu

SEQ ID NO: 1828890 - RNA, 19 nt, Homo sapiens
  misc_RNA (1)...(19): siRNA sense strand
gcugaagguugugaaauuc

SEQ ID NO: 1828891 - RNA, 19 nt, Homo sapiens
  misc_RNA (1)...(19): siRNA sense strand
ugcugaagguugugaaauu

SEQ ID NO: 1828892 - RNA, 19 nt, Homo sapiens
  misc_RNA (1)...(19): siRNA sense strand
gcagugggaggagcaauga

SEQ ID NO: 1828893 - RNA, 19 nt, Homo sapiens
  misc_RNA (1)...(19): siRNA sense strand
ccgaggcuaucgaagaguu

SEQ ID NO: 1828894 - RNA, 19 nt, Homo sapiens
  misc_RNA (1)...(19): siRNA sense strand
gcccgaggcuaucgaagag

SEQ ID NO: 1828895 - RNA, 19 nt, Homo sapiens
  misc_RNA (1)...(19): siRNA sense strand
gauuucuuaccagcaauua

SEQ ID NO: 1828896 - RNA, 19 nt, Homo sapiens
  misc_RNA (1)...(19): siRNA sense strand
aagagucguucaccagaca

SEQ ID NO: 1828897 - RNA, 19 nt, Homo sapiens
  misc_RNA (1)...(19): siRNA sense strand
agugauuucuuaccagcaa

SEQ ID NO: 1828898 - RNA, 19 nt, Homo sapiens
  misc_RNA (1)...(19): siRNA sense strand
guugugaaauucggagaag

SEQ ID NO: 1828899 - RNA, 19 nt, Homo sapiens
  misc_RNA (1)...(19): siRNA sense strand
ccucaucccgugccacaga

SEQ ID NO: 1828900 - RNA, 19 nt, Homo sapiens
  misc_RNA (1)...(19): siRNA sense strand
cgacaacgcugacaacaag

SEQ ID NO: 1828901 - RNA, 19 nt, Homo sapiens
  misc_RNA (1)...(19): siRNA sense strand
cccgagaccugcuguauuu

SEQ ID NO: 1828902 - RNA, 19 nt, Homo sapiens
  misc_RNA (1)...(19): siRNA sense strand
ugacuggccucauccgaaa

SEQ ID NO: 1828903 - RNA, 19 nt, Homo sapiens
  misc_RNA (1)...(19): siRNA sense strand
gcuacagccuggugucuga

SEQ ID NO: 1828904 - RNA, 19 nt, Homo sapiens
  misc_RNA (1)...(19): siRNA sense strand
gaaagcucaucuucaucaa

SEQ ID NO: 1828905 - RNA, 19 nt, Homo sapiens
  misc_RNA (1)...(19): siRNA sense strand
gagcaggagcguauucuga

SEQ ID NO: 1828906 - RNA, 19 nt, Homo sapiens
  misc_RNA (1)...(19): siRNA sense strand
caucauagcugugcucaac

SEQ ID NO: 1828907 - RNA, 19 nt, Homo sapiens
  misc_RNA (1)...(19): siRNA sense strand
ggagcaggaugaugagcuu

SEQ ID NO: 1828908 - RNA, 19 nt, Homo sapiens
  misc_RNA (1)...(19): siRNA sense strand
cgaaagcucaucuucauca

SEQ ID NO: 1828909 - RNA, 19 nt, Homo sapiens
  misc_RNA (1)...(19): siRNA sense strand
gggauccuguggaaccuuu

SEQ ID NO: 1828910 - RNA, 19 nt, Homo sapiens
  misc_RNA (1)...(19): siRNA sense strand
aggcggagaucuucuacaa

SEQ ID NO: 1828911 - RNA, 19 nt, Homo sapiens
  misc_RNA (1)...(19): siRNA sense strand
ucgcggagguguccaagga

SEQ ID NO: 1828912 - RNA, 19 nt, Homo sapiens
  misc_RNA (1)...(19): siRNA sense strand
ucauagcugugcucaacaa

SEQ ID NO: 1828913 - RNA, 19 nt, Homo sapiens
  misc_RNA (1)...(19): siRNA sense strand
caaccacgccaaccaggaa

SEQ ID NO: 1828914 - RNA, 19 nt, Homo sapiens
  misc_RNA (1)...(19): siRNA sense strand
ugagccaccugaucgagaa

SEQ ID NO: 1828915 - RNA, 19 nt, Homo sapiens
  misc_RNA (1)...(19): siRNA sense strand
gcaaaugcgaggacaagag

SEQ ID NO: 1828916 - RNA, 19 nt, Homo sapiens
  misc_RNA (1)...(19): siRNA sense strand
uccgaaagcucaucuucau

SEQ ID NO: 1828917 - RNA, 19 nt, Homo sapiens
  misc_RNA (1)...(19): siRNA sense strand
ggaacaaggacgagauguc

SEQ ID NO: 1828918 - RNA, 19 nt, Homo sapiens
  misc_RNA (1)...(19): siRNA sense strand
ggacgugcauggguucaac

SEQ ID NO: 1828919 - RNA, 19 nt, Homo sapiens
  misc_RNA (1)...(19): siRNA sense strand
gcaaccucaucuacgacaa

SEQ ID NO: 1828920 - RNA, 19 nt, Homo sapiens
  misc_RNA (1)...(19): siRNA sense strand
gcaggagcguauucugaac

SEQ ID NO: 1828921 - RNA, 19 nt, Homo sapiens
  misc_RNA (1)...(19): siRNA sense strand
gcgaugcagccgccaagaa

SEQ ID NO: 1828922 - RNA, 19 nt, Homo sapiens
  misc_RNA (1)...(19): siRNA sense strand
ggaacgcuaggaacaagga

SEQ ID NO: 1828923 - RNA, 19 nt, Homo sapiens
  misc_RNA (1)...(19): siRNA sense strand
ccgaggugcuggucaacau

SEQ ID NO: 1828924 - RNA, 19 nt, Homo sapiens
  misc_RNA (1)...(19): siRNA sense strand
gagaccugcuguauuuuga

SEQ ID NO: 1828925 - RNA, 19 nt, Homo sapiens
  misc_RNA (1)...(19): siRNA sense strand
gcccgagaccugcuguauu

SEQ ID NO: 1828926 - RNA, 19 nt, Homo sapiens
  misc_RNA (1)...(19): siRNA sense strand
ccaccgaacccugcagaga

SEQ ID NO: 1828927 - RNA, 19 nt, Homo sapiens
  misc_RNA (1)...(19): siRNA sense strand
gcagucggaggcugaguuc

SEQ ID NO: 1828928 - RNA, 19 nt, Homo sapiens
  misc_RNA (1)...(19): siRNA sense strand
cggccuacauccagcacaa

SEQ ID NO: 1828929 - RNA, 19 nt, Homo sapiens
  misc_RNA (1)...(19): siRNA sense strand
ugcauggguucaacagcua

SEQ ID NO: 1828930 - RNA, 19 nt, Homo sapiens
  misc_RNA (1)...(19): siRNA sense strand
gcccuggucaccucuauca

SEQ ID NO: 1828931 - RNA, 19 nt, Homo sapiens
  misc_RNA (1)...(19): siRNA sense strand
ggaggagaacgggaucuuc

SEQ ID NO: 1828932 - RNA, 19 nt, Homo sapiens
  misc_RNA (1)...(19): siRNA sense strand
caccagcugcgcucacuga

SEQ ID NO: 1828933 - RNA, 19 nt, Homo sapiens
  misc_RNA (1)...(19): siRNA sense strand
ggaugaugagcuucgcaaa

SEQ ID NO: 1828934 - RNA, 19 nt, Homo sapiens
  misc_RNA (1)...(19): siRNA sense strand
ccagcgaccaccugaagga

SEQ ID NO: 1828935 - RNA, 19 nt, Homo sapiens
  misc_RNA (1)...(19): siRNA sense strand
ggacuuccugggcccauag

SEQ ID NO: 1828936 - RNA, 19 nt, Homo sapiens
  misc_RNA (1)...(19): siRNA sense strand
ggugcuggucaacaucaua

SEQ ID NO: 1828937 - RNA, 19 nt, Homo sapiens
  misc_RNA (1)...(19): siRNA sense strand
ggacaagagcguggagaac

SEQ ID NO: 1828938 - RNA, 19 nt, Homo sapiens
  misc_RNA (1)...(19): siRNA sense strand
ucaggccacucgccagaag

SEQ ID NO: 1828939 - RNA, 19 nt, Homo sapiens
  misc_RNA (1)...(19): siRNA sense strand
gaugaugagcuucgcaaaa

SEQ ID NO: 1828940 - RNA, 19 nt, Homo sapiens
  misc_RNA (1)...(19): siRNA sense strand
gaggugcuggucaacauca

SEQ ID NO: 1828941 - RNA, 19 nt, Homo sapiens
  misc_RNA (1)...(19): siRNA sense strand
gggcaaaugcgaggacaag

SEQ ID NO: 1828942 - RNA, 19 nt, Homo sapiens
  misc_RNA (1)...(19): siRNA sense strand
uagcugugcucaacaaccu

SEQ ID NO: 1828943 - RNA, 19 nt, Homo sapiens
  misc_RNA (1)...(19): siRNA sense strand
cgaugcagccgccaagaag

SEQ ID NO: 1828944 - RNA, 19 nt, Homo sapiens
  misc_RNA (1)...(19): siRNA sense strand
ugaagaaaccaaagcaguu

SEQ ID NO: 1828945 - RNA, 19 nt, Homo sapiens
  misc_RNA (1)...(19): siRNA sense strand
ccagugagccggcuguagu

SEQ ID NO: 1828946 - RNA, 19 nt, Homo sapiens
  misc_RNA (1)...(19): siRNA sense strand
ggaaaccccuccgcuucua

SEQ ID NO: 1828947 - RNA, 19 nt, Homo sapiens
  misc_RNA (1)...(19): siRNA sense strand
gcccauaccgcagcaucua

SEQ ID NO: 1828948 - RNA, 19 nt, Homo sapiens
  misc_RNA (1)...(19): siRNA sense strand
gcagaugaagaaaccaaag

SEQ ID NO: 1828949 - RNA, 19 nt, Homo sapiens
  misc_RNA (1)...(19): siRNA sense strand
ccauaccgcagcaucuauu

SEQ ID NO: 1828950 - RNA, 19 nt, Homo sapiens
  misc_RNA (1)...(19): siRNA sense strand
ccgcuuugcagaugaagaa

SEQ ID NO: 1828951 - RNA, 19 nt, Homo sapiens
  misc_RNA (1)...(19): siRNA sense strand
ucaguguggucgacagagu

SEQ ID NO: 1828952 - RNA, 19 nt, Homo sapiens
  misc_RNA (1)...(19): siRNA sense strand
aagaagcagcgaccagcua

SEQ ID NO: 1828953 - RNA, 19 nt, Homo sapiens
  misc_RNA (1)...(19): siRNA sense strand
ucgcagcacccuccggaaa

SEQ ID NO: 1828954 - RNA, 19 nt, Homo sapiens
  misc_RNA (1)...(19): siRNA sense strand
guccggcgacuuccuaaug

SEQ ID NO: 1828955 - RNA, 19 nt, Homo sapiens
  misc_RNA (1)...(19): siRNA sense strand
gaagcagcgaccagcuaga

SEQ ID NO: 1828956 - RNA, 19 nt, Homo sapiens
  misc_RNA (1)...(19): siRNA sense strand
gcccuggccaucaacaaga

SEQ ID NO: 1828957 - RNA, 19 nt, Homo sapiens
  misc_RNA (1)...(19): siRNA sense strand
cauaccgcagcaucuauuu

SEQ ID NO: 1828958 - RNA, 19 nt, Homo sapiens
  misc_RNA (1)...(19): siRNA sense strand
ggaaagagcuccuacauaa

SEQ ID NO: 1828959 - RNA, 19 nt, Homo sapiens
  misc_RNA (1)...(19): siRNA sense strand
gaaagagacucaaguauuu

SEQ ID NO: 1828960 - RNA, 19 nt, Homo sapiens
  misc_RNA (1)...(19): siRNA sense strand
gcacguagcuacagaaauu

SEQ ID NO: 1828961 - RNA, 19 nt, Homo sapiens
  misc_RNA (1)...(19): siRNA sense strand
caacagaaguucacucuuu

SEQ ID NO: 1828962 - RNA, 19 nt, Homo sapiens
  misc_RNA (1)...(19): siRNA sense strand
gaaauugacugcccuuuau

SEQ ID NO: 1828963 - RNA, 19 nt, Homo sapiens
  misc_RNA (1)...(19): siRNA sense strand
gaaagcagcucacaaguca

SEQ ID NO: 1828964 - RNA, 19 nt, Homo sapiens
  misc_RNA (1)...(19): siRNA sense strand
caucaaagguucucaaauu

SEQ ID NO: 1828965 - RNA, 19 nt, Homo sapiens
  misc_RNA (1)...(19): siRNA sense strand
ccaaauaacuagaggaauu

SEQ ID NO: 1828966 - RNA, 19 nt, Homo sapiens
  misc_RNA (1)...(19): siRNA sense strand
agacuucucuucuucauua

SEQ ID NO: 1828967 - RNA, 19 nt, Homo sapiens
  misc_RNA (1)...(19): siRNA sense strand
cccgagagcucaauauuua

SEQ ID NO: 1828968 - RNA, 19 nt, Homo sapiens
  misc_RNA (1)...(19): siRNA sense strand
ccauuuagaucacaacuuu

SEQ ID NO: 1828969 - RNA, 19 nt, Homo sapiens
  misc_RNA (1)...(19): siRNA sense strand
ggacaggaguuuaugauag

SEQ ID NO: 1828970 - RNA, 19 nt, Homo sapiens
  misc_RNA (1)...(19): siRNA sense strand
gaaauugacagaagaaaga

SEQ ID NO: 1828971 - RNA, 19 nt, Homo sapiens
  misc_RNA (1)...(19): siRNA sense strand
ugaacaagcugccaaaguu

SEQ ID NO: 1828972 - RNA, 19 nt, Homo sapiens
  misc_RNA (1)...(19): siRNA sense strand
gcaauaauaccugcuguua

SEQ ID NO: 1828973 - RNA, 19 nt, Homo sapiens
  misc_RNA (1)...(19): siRNA sense strand
ggaaauugacugcccuuua

SEQ ID NO: 1828974 - RNA, 19 nt, Homo sapiens
  misc_RNA (1)...(19): siRNA sense strand
gcaaggaguuauggauuaa

SEQ ID NO: 1828975 - RNA, 19 nt, Homo sapiens
  misc_RNA (1)...(19): siRNA sense strand
caaaagagcuggaaggauu

SEQ ID NO: 1828976 - RNA, 19 nt, Homo sapiens
  misc_RNA (1)...(19): siRNA sense strand
gaaaggauggauaacauuu

SEQ ID NO: 1828977 - RNA, 19 nt, Homo sapiens
  misc_RNA (1)...(19): siRNA sense strand
ugacugcccuuuauacaaa

SEQ ID NO: 1828978 - RNA, 19 nt, Homo sapiens
  misc_RNA (1)...(19): siRNA sense strand
gaagaaagcagcucacaag

SEQ ID NO: 1828979 - RNA, 19 nt, Homo sapiens
  misc_RNA (1)...(19): siRNA sense strand
gauaaugacugauacuucu

SEQ ID NO: 1828980 - RNA, 19 nt, Homo sapiens
  misc_RNA (1)...(19): siRNA sense strand
cagaacaagucccugauuu

SEQ ID NO: 1828981 - RNA, 19 nt, Homo sapiens
  misc_RNA (1)...(19): siRNA sense strand
cagcagaaauaaucagaaa

SEQ ID NO: 1828982 - RNA, 19 nt, Homo sapiens
  misc_RNA (1)...(19): siRNA sense strand
gaacucugcuguaucuugu

SEQ ID NO: 1828983 - RNA, 19 nt, Homo sapiens
  misc_RNA (1)...(19): siRNA sense strand
ggaacaacauuaaggaauc

SEQ ID NO: 1828984 - RNA, 19 nt, Homo sapiens
  misc_RNA (1)...(19): siRNA sense strand
gaugagauaaugacugaua

SEQ ID NO: 1828985 - RNA, 19 nt, Homo sapiens
  misc_RNA (1)...(19): siRNA sense strand
guaaagaaaguccaacaaa

SEQ ID NO: 1828986 - RNA, 19 nt, Homo sapiens
  misc_RNA (1)...(19): siRNA sense strand
ggaauuaccacaugggauu

SEQ ID NO: 1828987 - RNA, 19 nt, Homo sapiens
  misc_RNA (1)...(19): siRNA sense strand
gaaggcacccugugauuga

SEQ ID NO: 1828988 - RNA, 19 nt, Homo sapiens
  misc_RNA (1)...(19): siRNA sense strand
gacaggaguuuaugauaga

SEQ ID NO: 1828989 - RNA, 19 nt, Homo sapiens
  misc_RNA (1)...(19): siRNA sense strand
gagcauuacuuaaagauac

SEQ ID NO: 1828990 - RNA, 19 nt, Homo sapiens
  misc_RNA (1)...(19): siRNA sense strand
gaaaacugcuuccaaauca

SEQ ID NO: 1828991 - RNA, 19 nt, Homo sapiens
  misc_RNA (1)...(19): siRNA sense strand
cagauuggcuccuauguuc

SEQ ID NO: 1828992 - RNA, 19 nt, Homo sapiens
  misc_RNA (1)...(19): siRNA sense strand
ggaugaugcuguaaauguu

SEQ ID NO: 1828993 - RNA, 19 nt, Homo sapiens
  misc_RNA (1)...(19): siRNA sense strand
gaagugaucugggaauguc

SEQ ID NO: 1828994 - RNA, 19 nt, Homo sapiens
  misc_RNA (1)...(19): siRNA sense strand
ucagagagaguaaugauaa

SEQ ID NO: 1828995 - RNA, 19 nt, Homo sapiens
  misc_RNA (1)...(19): siRNA sense strand
ggagauuacugcagaccaa

SEQ ID NO: 1828996 - RNA, 19 nt, Homo sapiens
  misc_RNA (1)...(19): siRNA sense strand
gauucgaaacgucaaauua

SEQ ID NO: 1828997 - RNA, 19 nt, Homo sapiens
  misc_RNA (1)...(19): siRNA sense strand
gaaagagcuccuacauaaa

SEQ ID NO: 1828998 - RNA, 19 nt, Homo sapiens
  misc_RNA (1)...(19): siRNA sense strand
gaagaaagaagagaccauu

SEQ ID NO: 1828999 - RNA, 19 nt, Homo sapiens
  misc_RNA (1)...(19): siRNA sense strand
cacaagaccugcagaagug

SEQ ID NO: 1829000 - RNA, 19 nt, Homo sapiens
  misc_RNA (1)...(19): siRNA sense strand
aaagaacucugcuguaucu

SEQ ID NO: 1829001 - RNA, 19 nt, Homo sapiens
  misc_RNA (1)...(19): siRNA sense strand
gaaugcaguuucuucugaa

SEQ ID NO: 1829002 - RNA, 19 nt, Homo sapiens
  misc_RNA (1)...(19): siRNA sense strand
ucaaagaauucaacuugga

SEQ ID NO: 1829003 - RNA, 19 nt, Homo sapiens
  misc_RNA (1)...(19): siRNA sense strand
guaaauugcccgacauaga

SEQ ID NO: 1829004 - RNA, 19 nt, Homo sapiens
  misc_RNA (1)...(19): siRNA sense strand
gagcuggaaggauuaauaa

SEQ ID NO: 1829005 - RNA, 19 nt, Homo sapiens
  misc_RNA (1)...(19): siRNA sense strand
gaaauucaagguguuauug

SEQ ID NO: 1829006 - RNA, 19 nt, Homo sapiens
  misc_RNA (1)...(19): siRNA sense strand
cuacagaaauugacagaag

SEQ ID NO: 1829007 - RNA, 19 nt, Homo sapiens
  misc_RNA (1)...(19): siRNA sense strand
ggacagaggaguucaacau

SEQ ID NO: 1829008 - RNA, 19 nt, Homo sapiens
  misc_RNA (1)...(19): siRNA sense strand
agaaagagacucaaguauu

SEQ ID NO: 1829009 - RNA, 19 nt, Homo sapiens
  misc_RNA (1)...(19): siRNA sense strand
aaagaaagagacucaagua

SEQ ID NO: 1829010 - RNA, 19 nt, Homo sapiens
  misc_RNA (1)...(19): siRNA sense strand
gagaacaggaucaauaugu

SEQ ID NO: 1829011 - RNA, 19 nt, Homo sapiens
  misc_RNA (1)...(19): siRNA sense strand
auaaagaacucugcuguau

SEQ ID NO: 1829012 - RNA, 19 nt, Homo sapiens
  misc_RNA (1)...(19): siRNA sense strand
gucagaauuucaagcaaua

SEQ ID NO: 1829013 - RNA, 19 nt, Homo sapiens
  misc_RNA (1)...(19): siRNA sense strand
uagagaagccugugauuug

SEQ ID NO: 1829014 - RNA, 19 nt, Homo sapiens
  misc_RNA (1)...(19): siRNA sense strand
caagcuggaugaugcugua

SEQ ID NO: 1829015 - RNA, 19 nt, Homo sapiens
  misc_RNA (1)...(19): siRNA sense strand
gauauaaggugggaguugu

SEQ ID NO: 1829016 - RNA, 19 nt, Homo sapiens
  misc_RNA (1)...(19): siRNA sense strand
ggagagauuugcaguucug

SEQ ID NO: 1829017 - RNA, 19 nt, Homo sapiens
  misc_RNA (1)...(19): siRNA sense strand
gcacaagaccugcagaagu

SEQ ID NO: 1829018 - RNA, 19 nt, Homo sapiens
  misc_RNA (1)...(19): siRNA sense strand
gaaagaagagaccauugga

SEQ ID NO: 1829019 - RNA, 19 nt, Homo sapiens
  misc_RNA (1)...(19): siRNA sense strand
ucagagaugugaaauccuu

SEQ ID NO: 1829020 - RNA, 19 nt, Homo sapiens
  misc_RNA (1)...(19): siRNA sense strand
gggagcagcuaguccuuga

SEQ ID NO: 1829021 - RNA, 19 nt, Homo sapiens
  misc_RNA (1)...(19): siRNA sense strand
gaacaagcugccaaaguug

SEQ ID NO: 1829022 - RNA, 19 nt, Homo sapiens
  misc_RNA (1)...(19): siRNA sense strand
ggacucugcuucucguuca

SEQ ID NO: 1829023 - RNA, 19 nt, Homo sapiens
  misc_RNA (1)...(19): siRNA sense strand
gggaaugucuggcaacucu

SEQ ID NO: 1829024 - RNA, 19 nt, Homo sapiens
  misc_RNA (1)...(19): siRNA sense strand
gauuaaauguggcuaaacu

SEQ ID NO: 1829025 - RNA, 19 nt, Homo sapiens
  misc_RNA (1)...(19): siRNA sense strand
gcagaagaagcgacaauug

SEQ ID NO: 1829026 - RNA, 19 nt, Homo sapiens
  misc_RNA (1)...(19): siRNA sense strand
cagaccaacuguacaagaa

SEQ ID NO: 1829027 - RNA, 19 nt, Homo sapiens
  misc_RNA (1)...(19): siRNA sense strand
cauuaucacuccuugugua

SEQ ID NO: 1829028 - RNA, 19 nt, Homo sapiens
  misc_RNA (1)...(19): siRNA sense strand
gaacaacauuaaggaaucu

SEQ ID NO: 1829029 - RNA, 19 nt, Homo sapiens
  misc_RNA (1)...(19): siRNA sense strand
aaagaauucugcugcgauu

SEQ ID NO: 1829030 - RNA, 19 nt, Homo sapiens
  misc_RNA (1)...(19): siRNA sense strand
gagcacucaugauggaauu

SEQ ID NO: 1829031 - RNA, 19 nt, Homo sapiens
  misc_RNA (1)...(19): siRNA sense strand
gaccaaacauggguggaaa

SEQ ID NO: 1829032 - RNA, 19 nt, Homo sapiens
  misc_RNA (1)...(19): siRNA sense strand
aacugaaacugcagcauua

SEQ ID NO: 1829033 - RNA, 19 nt, Homo sapiens
  misc_RNA (1)...(19): siRNA sense strand
gaaaguaaagaaaguccaa

SEQ ID NO: 1829034 - RNA, 19 nt, Homo sapiens
  misc_RNA (1)...(19): siRNA sense strand
acacagacuucucuucuuc

SEQ ID NO: 1829035 - RNA, 19 nt, Homo sapiens
  misc_RNA (1)...(19): siRNA sense strand
uaucuuggaugaacuagga

SEQ ID NO: 1829036 - RNA, 19 nt, Homo sapiens
  misc_RNA (1)...(19): siRNA sense strand
ggaucaauaugucccaaau

SEQ ID NO: 1829037 - RNA, 19 nt, Homo sapiens
  misc_RNA (1)...(19): siRNA sense strand
gaugggugcugcagacaau

SEQ ID NO: 1829038 - RNA, 19 nt, Homo sapiens
  misc_RNA (1)...(19): siRNA sense strand
ugacacagcagaaauaauc

SEQ ID NO: 1829039 - RNA, 19 nt, Homo sapiens
  misc_RNA (1)...(19): siRNA sense strand
gacgagauccgaaugcauu

SEQ ID NO: 1829040 - RNA, 19 nt, Homo sapiens
  misc_RNA (1)...(19): siRNA sense strand
agcaaggaguuauggauua

SEQ ID NO: 1829041 - RNA, 19 nt, Homo sapiens
  misc_RNA (1)...(19): siRNA sense strand
augcuacacuugaguauuu

SEQ ID NO: 1829042 - RNA, 19 nt, Homo sapiens
  misc_RNA (1)...(19): siRNA sense strand
gacgagcacucaugaugga

SEQ ID NO: 1829043 - RNA, 19 nt, Homo sapiens
  misc_RNA (1)...(19): siRNA sense strand
gaucaauaugucccaaaua

SEQ ID NO: 1829044 - RNA, 19 nt, Homo sapiens
  misc_RNA (1)...(19): siRNA sense strand
gaccaacuguacaagaaga

SEQ ID NO: 1829045 - RNA, 19 nt, Homo sapiens
  misc_RNA (1)...(19): siRNA sense strand
ggaauguggauauaaguau

SEQ ID NO: 1829046 - RNA, 19 nt, Homo sapiens
  misc_RNA (1)...(19): siRNA sense strand
uaucggaaguucuccauuc

SEQ ID NO: 1829047 - RNA, 19 nt, Homo sapiens
  misc_RNA (1)...(19): siRNA sense strand
ggagacggaaguuaaagaa

SEQ ID NO: 1829048 - RNA, 19 nt, Homo sapiens
  misc_RNA (1)...(19): siRNA sense strand
caggagagauuugcaguuc

SEQ ID NO: 1829049 - RNA, 19 nt, Homo sapiens
  misc_RNA (1)...(19): siRNA sense strand
gaauugccauugccuaugc

SEQ ID NO: 1829050 - RNA, 19 nt, Homo sapiens
  misc_RNA (1)...(19): siRNA sense strand
ccaggcaguuacagaguuu

SEQ ID NO: 1829051 - RNA, 19 nt, Homo sapiens
  misc_RNA (1)...(19): siRNA sense strand
gagguuguguuugauaguu

SEQ ID NO: 1829052 - RNA, 19 nt, Homo sapiens
  misc_RNA (1)...(19): siRNA sense strand
caggcgagguuguguuuga

SEQ ID NO: 1829053 - RNA, 19 nt, Homo sapiens
  misc_RNA (1)...(19): siRNA sense strand
caauaauaccugcuguuaa

SEQ ID NO: 1829054 - RNA, 19 nt, Homo sapiens
  misc_RNA (1)...(19): siRNA sense strand
cagaggaguucaacaugga

SEQ ID NO: 1829055 - RNA, 19 nt, Homo sapiens
  misc_RNA (1)...(19): siRNA sense strand
gcagaacaagucccugauu

SEQ ID NO: 1829056 - RNA, 19 nt, Homo sapiens
  misc_RNA (1)...(19): siRNA sense strand
ggaaggcacccugugauug

SEQ ID NO: 1829057 - RNA, 19 nt, Homo sapiens
  misc_RNA (1)...(19): siRNA sense strand
caaggucgcuaagcaagga

SEQ ID NO: 1829058 - RNA, 19 nt, Homo sapiens
  misc_RNA (1)...(19): siRNA sense strand
ggaggcagcuuguggagaa

SEQ ID NO: 1829059 - RNA, 19 nt, Homo sapiens
  misc_RNA (1)...(19): siRNA sense strand
caauguggcugguuacaaa

SEQ ID NO: 1829060 - RNA, 19 nt, Homo sapiens
  misc_RNA (1)...(19): siRNA sense strand
gggaugagcugaccaagau

SEQ ID NO: 1829061 - RNA, 19 nt, Homo sapiens
  misc_RNA (1)...(19): siRNA sense strand
cugaacagcucaagaaauu

SEQ ID NO: 1829062 - RNA, 19 nt, Homo sapiens
  misc_RNA (1)...(19): siRNA sense strand
gguagaagcagcaaagaaa

SEQ ID NO: 1829063 - RNA, 19 nt, Homo sapiens
  misc_RNA (1)...(19): siRNA sense strand
gccuauacccggcaaauua

SEQ ID NO: 1829064 - RNA, 19 nt, Homo sapiens
  misc_RNA (1)...(19): siRNA sense strand
acaaagccauuuaccauga

SEQ ID NO: 1829065 - RNA, 19 nt, Homo sapiens
  misc_RNA (1)...(19): siRNA sense strand
ccaaagagaaguaugagaa

SEQ ID NO: 1829066 - RNA, 19 nt, Homo sapiens
  misc_RNA (1)...(19): siRNA sense strand
gcagcgaccucaugaacug

SEQ ID NO: 1829067 - RNA, 19 nt, Homo sapiens
  misc_RNA (1)...(19): siRNA sense strand
gaaacgccuucgcuucuuc

SEQ ID NO: 1829068 - RNA, 19 nt, Homo sapiens
  misc_RNA (1)...(19): siRNA sense strand
caagaaauugcaagacaaa

SEQ ID NO: 1829069 - RNA, 19 nt, Homo sapiens
  misc_RNA (1)...(19): siRNA sense strand
ucaagaaauugcaagacaa

SEQ ID NO: 1829070 - RNA, 19 nt, Homo sapiens
  misc_RNA (1)...(19): siRNA sense strand
ccagacaggcgaccaguuu

SEQ ID NO: 1829071 - RNA, 19 nt, Homo sapiens
  misc_RNA (1)...(19): siRNA sense strand
uguccaauguggcugguua

SEQ ID NO: 1829072 - RNA, 19 nt, Homo sapiens
  misc_RNA (1)...(19): siRNA sense strand
gugagaaggaggacauuaa

SEQ ID NO: 1829073 - RNA, 19 nt, Homo sapiens
  misc_RNA (1)...(19): siRNA sense strand
aaagaaagcccaccaugca

SEQ ID NO: 1829074 - RNA, 19 nt, Homo sapiens
  misc_RNA (1)...(19): siRNA sense strand
ucgagaagaucaagaacug

SEQ ID NO: 1829075 - RNA, 19 nt, Homo sapiens
  misc_RNA (1)...(19): siRNA sense strand
gaacagcucaagaaauugc

SEQ ID NO: 1829076 - RNA, 19 nt, Homo sapiens
  misc_RNA (1)...(19): siRNA sense strand
gagaagacccagagcuauc

SEQ ID NO: 1829077 - RNA, 19 nt, Homo sapiens
  misc_RNA (1)...(19): siRNA sense strand
agaagaagaaggccacuga

SEQ ID NO: 1829078 - RNA, 19 nt, Homo sapiens
  misc_RNA (1)...(19): siRNA sense strand
ccucacugaugaacgauga

SEQ ID NO: 1829079 - RNA, 19 nt, Homo sapiens
  misc_RNA (1)...(19): siRNA sense strand
uuacaaagccauuuaccau

SEQ ID NO: 1829080 - RNA, 19 nt, Homo sapiens
  misc_RNA (1)...(19): siRNA sense strand
gggccaagaagcugaaaga

SEQ ID NO: 1829081 - RNA, 19 nt, Homo sapiens
  misc_RNA (1)...(19): siRNA sense strand
caccuaaaccuguccaaug

SEQ ID NO: 1829082 - RNA, 19 nt, Homo sapiens
  misc_RNA (1)...(19): siRNA sense strand
gccagcaguucgaggagaa

SEQ ID NO: 1829083 - RNA, 19 nt, Homo sapiens
  misc_RNA (1)...(19): siRNA sense strand
gcugaaagagguagaagca

SEQ ID NO: 1829084 - RNA, 19 nt, Homo sapiens
  misc_RNA (1)...(19): siRNA sense strand
aaagagaaguaugagaagu

SEQ ID NO: 1829085 - RNA, 19 nt, Homo sapiens
  misc_RNA (1)...(19): siRNA sense strand
gugagcagcuacgagaaga

SEQ ID NO: 1829086 - RNA, 19 nt, Homo sapiens
  misc_RNA (1)...(19): siRNA sense strand
agaccaaagagaaguauga

SEQ ID NO: 1829087 - RNA, 19 nt, Homo sapiens
  misc_RNA (1)...(19): siRNA sense strand
acauggagcagguguuuga

SEQ ID NO: 1829088 - RNA, 19 nt, Homo sapiens
  misc_RNA (1)...(19): siRNA sense strand
gcagcaccgucagugagaa

SEQ ID NO: 1829089 - RNA, 19 nt, Homo sapiens
  misc_RNA (1)...(19): siRNA sense strand
cucaagaaauugcaagaca

SEQ ID NO: 1829090 - RNA, 19 nt, Homo sapiens
  misc_RNA (1)...(19): siRNA sense strand
caagauggaggacgaggau

SEQ ID NO: 1829091 - RNA, 19 nt, Homo sapiens
  misc_RNA (1)...(19): siRNA sense strand
caaagagaaguaugagaag

SEQ ID NO: 1829092 - RNA, 19 nt, Homo sapiens
  misc_RNA (1)...(19): siRNA sense strand
caagaagcugaaagaggua

SEQ ID NO: 1829093 - RNA, 19 nt, Homo sapiens
  misc_RNA (1)...(19): siRNA sense strand
ucugggaggucgggaacua

SEQ ID NO: 1829094 - RNA, 19 nt, Homo sapiens
  misc_RNA (1)...(19): siRNA sense strand
accuaaaccuguccaaugu

SEQ ID NO: 1829095 - RNA, 19 nt, Homo sapiens
  misc_RNA (1)...(19): siRNA sense strand
ugauuccguuggaguagaa

SEQ ID NO: 1829096 - RNA, 19 nt, Homo sapiens
  misc_RNA (1)...(19): siRNA sense strand
ggaggacauuaaggccaaa

SEQ ID NO: 1829097 - RNA, 19 nt, Homo sapiens
  misc_RNA (1)...(19): siRNA sense strand
gaaaagugcaagcaagaug

SEQ ID NO: 1829098 - RNA, 19 nt, Homo sapiens
  misc_RNA (1)...(19): siRNA sense strand
gaagcugaaagagguagaa

SEQ ID NO: 1829099 - RNA, 19 nt, Homo sapiens
  misc_RNA (1)...(19): siRNA sense strand
cagcagcacccuuaauguc

SEQ ID NO: 1829100 - RNA, 19 nt, Homo sapiens
  misc_RNA (1)...(19): siRNA sense strand
gaggagaagcuggcuaucu

SEQ ID NO: 1829101 - RNA, 19 nt, Homo sapiens
  misc_RNA (1)...(19): siRNA sense strand
gcaccuaaaccuguccaau

SEQ ID NO: 1829102 - RNA, 19 nt, Homo sapiens
  misc_RNA (1)...(19): siRNA sense strand
cgagaagacccagagcuau

SEQ ID NO: 1829103 - RNA, 19 nt, Homo sapiens
  misc_RNA (1)...(19): siRNA sense strand
cccaguacauggagaacau

SEQ ID NO: 1829104 - RNA, 19 nt, Homo sapiens
  misc_RNA (1)...(19): siRNA sense strand
ccuauacccggcaaauuau

SEQ ID NO: 1829105 - RNA, 19 nt, Homo sapiens
  misc_RNA (1)...(19): siRNA sense strand
aagcccagcagcacccuua

SEQ ID NO: 1829106 - RNA, 19 nt, Homo sapiens
  misc_RNA (1)...(19): siRNA sense strand
gaucaagaacuggcagaag

SEQ ID NO: 1829107 - RNA, 19 nt, Homo sapiens
  misc_RNA (1)...(19): siRNA sense strand
acgagaagacccagagcua

SEQ ID NO: 1829108 - RNA, 19 nt, Homo sapiens
  misc_RNA (1)...(19): siRNA sense strand
uuaagaccaaagagaagua

SEQ ID NO: 1829109 - RNA, 19 nt, Homo sapiens
  misc_RNA (1)...(19): siRNA sense strand
guagaagcagcaaagaaag

SEQ ID NO: 1829110 - RNA, 19 nt, Homo sapiens
  misc_RNA (1)...(19): siRNA sense strand
ugaacgaugacuucgagaa

SEQ ID NO: 1829111 - RNA, 19 nt, Homo sapiens
  misc_RNA (1)...(19): siRNA sense strand
ugaugauuccguuggagua

SEQ ID NO: 1829112 - RNA, 19 nt, Homo sapiens
  misc_RNA (1)...(19): siRNA sense strand
ucaagaacuggcagaagga

SEQ ID NO: 1829113 - RNA, 19 nt, Homo sapiens
  misc_RNA (1)...(19): siRNA sense strand
gaggcagcuuguggagaaa

SEQ ID NO: 1829114 - RNA, 19 nt, Homo sapiens
  misc_RNA (1)...(19): siRNA sense strand
caaagccauuuaccaugac

SEQ ID NO: 1829115 - RNA, 19 nt, Homo sapiens
  misc_RNA (1)...(19): siRNA sense strand
caagaacuggcagaaggaa

SEQ ID NO: 1829116 - RNA, 19 nt, Homo sapiens
  misc_RNA (1)...(19): siRNA sense strand
ggaacuacaagcggacugu

SEQ ID NO: 1829117 - RNA, 19 nt, Homo sapiens
  misc_RNA (1)...(19): siRNA sense strand
ugagaaggaggacauuaag

SEQ ID NO: 1829118 - RNA, 19 nt, Homo sapiens
  misc_RNA (1)...(19): siRNA sense strand
gagaaggaggacauuaagg

SEQ ID NO: 1829119 - RNA, 19 nt, Homo sapiens
  misc_RNA (1)...(19): siRNA sense strand
aagaggagaagcuggcuau

SEQ ID NO: 1829120 - RNA, 19 nt, Homo sapiens
  misc_RNA (1)...(19): siRNA sense strand
agauggaggacgaggauga

SEQ ID NO: 1829121 - RNA, 19 nt, Homo sapiens
  misc_RNA (1)...(19): siRNA sense strand
aaagugcaagcaagauguu

SEQ ID NO: 1829122 - RNA, 19 nt, Homo sapiens
  misc_RNA (1)...(19): siRNA sense strand
ccaauguggcugguuacaa

SEQ ID NO: 1829123 - RNA, 19 nt, Homo sapiens
  misc_RNA (1)...(19): siRNA sense strand
cgggcaaguuggccuauac

SEQ ID NO: 1829124 - RNA, 19 nt, Homo sapiens
  misc_RNA (1)...(19): siRNA sense strand
cccagcagcacccuuaaug

SEQ ID NO: 1829125 - RNA, 19 nt, Homo sapiens
  misc_RNA (1)...(19): siRNA sense strand
cugguuacaaagccauuua

SEQ ID NO: 1829126 - RNA, 19 nt, Homo sapiens
  misc_RNA (1)...(19): siRNA sense strand
ggauggagcugcuggcuuu

SEQ ID NO: 1829127 - RNA, 19 nt, Homo sapiens
  misc_RNA (1)...(19): siRNA sense strand
cugcagaccuauagauuua

SEQ ID NO: 1829128 - RNA, 19 nt, Homo sapiens
  misc_RNA (1)...(19): siRNA sense strand
caucuugucuccuacagua

SEQ ID NO: 1829129 - RNA, 19 nt, Homo sapiens
  misc_RNA (1)...(19): siRNA sense strand
gcaccugucucacucuuga

SEQ ID NO: 1829130 - RNA, 19 nt, Homo sapiens
  misc_RNA (1)...(19): siRNA sense strand
caccuaagcuuacugaguu

SEQ ID NO: 1829131 - RNA, 19 nt, Homo sapiens
  misc_RNA (1)...(19): siRNA sense strand
gaaaugagagugcuguguu

SEQ ID NO: 1829132 - RNA, 19 nt, Homo sapiens
  misc_RNA (1)...(19): siRNA sense strand
gaaagaguccauccagcua

SEQ ID NO: 1829133 - RNA, 19 nt, Homo sapiens
  misc_RNA (1)...(19): siRNA sense strand
ugaaggaccucaucagcuu

SEQ ID NO: 1829134 - RNA, 19 nt, Homo sapiens
  misc_RNA (1)...(19): siRNA sense strand
ggucaaggaugugcugauu

SEQ ID NO: 1829135 - RNA, 19 nt, Homo sapiens
  misc_RNA (1)...(19): siRNA sense strand
uaaacuacuugcuguaugu

SEQ ID NO: 1829136 - RNA, 19 nt, Homo sapiens
  misc_RNA (1)...(19): siRNA sense strand
uagaggaguuugaguguga

SEQ ID NO: 1829137 - RNA, 19 nt, Homo sapiens
  misc_RNA (1)...(19): siRNA sense strand
gccauuaaguuugaguaua

SEQ ID NO: 1829138 - RNA, 19 nt, Homo sapiens
  misc_RNA (1)...(19): siRNA sense strand
ugagagugcuguguuugua

SEQ ID NO: 1829139 - RNA, 19 nt, Homo sapiens
  misc_RNA (1)...(19): siRNA sense strand
caagguggcugacuuuggu

SEQ ID NO: 1829140 - RNA, 19 nt, Homo sapiens
  misc_RNA (1)...(19): siRNA sense strand
ggccugaccugaagucugu

SEQ ID NO: 1829141 - RNA, 19 nt, Homo sapiens
  misc_RNA (1)...(19): siRNA sense strand
gagcaugccauuaaguuug

SEQ ID NO: 1829142 - RNA, 19 nt, Homo sapiens
  misc_RNA (1)...(19): siRNA sense strand
agaagacccugucgugcua

SEQ ID NO: 1829143 - RNA, 19 nt, Homo sapiens
  misc_RNA (1)...(19): siRNA sense strand
gagcuggucaggucacuaa

SEQ ID NO: 1829144 - RNA, 19 nt, Homo sapiens
  misc_RNA (1)...(19): siRNA sense strand
guggagcgcuguugugaau

SEQ ID NO: 1829145 - RNA, 19 nt, Homo sapiens
  misc_RNA (1)...(19): siRNA sense strand
caaccuaguuccacugaag

SEQ ID NO: 1829146 - RNA, 19 nt, Homo sapiens
  misc_RNA (1)...(19): siRNA sense strand
gagcauccuucuccgauag

SEQ ID NO: 1829147 - RNA, 19 nt, Homo sapiens
  misc_RNA (1)...(19): siRNA sense strand
gcacuggucuucagcuacu

SEQ ID NO: 1829148 - RNA, 19 nt, Homo sapiens
  misc_RNA (1)...(19): siRNA sense strand
aaaugagagugcuguguuu

SEQ ID NO: 1829149 - RNA, 19 nt, Homo sapiens
  misc_RNA (1)...(19): siRNA sense strand
ggaguacuauaguguucaa

SEQ ID NO: 1829150 - RNA, 19 nt, Homo sapiens
  misc_RNA (1)...(19): siRNA sense strand
acaggucacugcauuguau

SEQ ID NO: 1829151 - RNA, 19 nt, Homo sapiens
  misc_RNA (1)...(19): siRNA sense strand
ggacagggaguacuauagu

SEQ ID NO: 1829152 - RNA, 19 nt, Homo sapiens
  misc_RNA (1)...(19): siRNA sense strand
gcaccucgcaugagaugaa

SEQ ID NO: 1829153 - RNA, 19 nt, Homo sapiens
  misc_RNA (1)...(19): siRNA sense strand
gggcugugcuggucaaugg

SEQ ID NO: 1829154 - RNA, 19 nt, Homo sapiens
  misc_RNA (1)...(19): siRNA sense strand
cugcguagauggugaaugu

SEQ ID NO: 1829155 - RNA, 19 nt, Homo sapiens
  misc_RNA (1)...(19): siRNA sense strand
ggagcaugccauuaaguuu

SEQ ID NO: 1829156 - RNA, 19 nt, Homo sapiens
  misc_RNA (1)...(19): siRNA sense strand
ucaggucacuaaacuacuu

SEQ ID NO: 1829157 - RNA, 19 nt, Homo sapiens
  misc_RNA (1)...(19): siRNA sense strand
gaacccaucaggucacugu

SEQ ID NO: 1829158 - RNA, 19 nt, Homo sapiens
  misc_RNA (1)...(19): siRNA sense strand
guagauggugaaugucaua

SEQ ID NO: 1829159 - RNA, 19 nt, Homo sapiens
  misc_RNA (1)...(19): siRNA sense strand
gugcccaacuugccacuga

SEQ ID NO: 1829160 - RNA, 19 nt, Homo sapiens
  misc_RNA (1)...(19): siRNA sense strand
cuacagaaguggccuugca

SEQ ID NO: 1829161 - RNA, 19 nt, Homo sapiens
  misc_RNA (1)...(19): siRNA sense strand
uggcugaggucaaggaugu

SEQ ID NO: 1829162 - RNA, 19 nt, Homo sapiens
  misc_RNA (1)...(19): siRNA sense strand
gguccucgacugcagauuu

SEQ ID NO: 1829163 - RNA, 19 nt, Homo sapiens
  misc_RNA (1)...(19): siRNA sense strand
ggaggaagcagcuaguucu

SEQ ID NO: 1829164 - RNA, 19 nt, Homo sapiens
  misc_RNA (1)...(19): siRNA sense strand
cuaagggcauggcauuuca

SEQ ID NO: 1829165 - RNA, 19 nt, Homo sapiens
  misc_RNA (1)...(19): siRNA sense strand
gcacacaugggcacaaugg

SEQ ID NO: 1829166 - RNA, 19 nt, Homo sapiens
  misc_RNA (1)...(19): siRNA sense strand
gggccaggaaguacuauuu

SEQ ID NO: 1829167 - RNA, 19 nt, Homo sapiens
  misc_RNA (1)...(19): siRNA sense strand
caggaccacugcccaccua

SEQ ID NO: 1829168 - RNA, 19 nt, Homo sapiens
  misc_RNA (1)...(19): siRNA sense strand
caccauaccgccacauuga

SEQ ID NO: 1829169 - RNA, 19 nt, Homo sapiens
  misc_RNA (1)...(19): siRNA sense strand
cugaggagcaugccauuaa

SEQ ID NO: 1829170 - RNA, 19 nt, Homo sapiens
  misc_RNA (1)...(19): siRNA sense strand
guggaaagcaggugugaga

SEQ ID NO: 1829171 - RNA, 19 nt, Homo sapiens
  misc_RNA (1)...(19): siRNA sense strand
uacaucaacucccacauca

SEQ ID NO: 1829172 - RNA, 19 nt, Homo sapiens
  misc_RNA (1)...(19): siRNA sense strand
cuaaacuacuugcuguaug

SEQ ID NO: 1829173 - RNA, 19 nt, Homo sapiens
  misc_RNA (1)...(19): siRNA sense strand
gaaugugcguccagaacag

SEQ ID NO: 1829174 - RNA, 19 nt, Homo sapiens
  misc_RNA (1)...(19): siRNA sense strand
gacagggaguacuauagug

SEQ ID NO: 1829175 - RNA, 19 nt, Homo sapiens
  misc_RNA (1)...(19): siRNA sense strand
gaaggaccucaucagcuuu

SEQ ID NO: 1829176 - RNA, 19 nt, Homo sapiens
  misc_RNA (1)...(19): siRNA sense strand
ucugauguguggucauuug

SEQ ID NO: 1829177 - RNA, 19 nt, Homo sapiens
  misc_RNA (1)...(19): siRNA sense strand
uggagagccugcagaccua

SEQ ID NO: 1829178 - RNA, 19 nt, Homo sapiens
  misc_RNA (1)...(19): siRNA sense strand
ugccugcgcuggucaguug

SEQ ID NO: 1829179 - RNA, 19 nt, Homo sapiens
  misc_RNA (1)...(19): siRNA sense strand
ucucauugguaucauguug

SEQ ID NO: 1829180 - RNA, 19 nt, Homo sapiens
  misc_RNA (1)...(19): siRNA sense strand
ggaccagguuuuccaggua

SEQ ID NO: 1829181 - RNA, 19 nt, Homo sapiens
  misc_RNA (1)...(19): siRNA sense strand
ccauugggcacccguguaa

SEQ ID NO: 1829182 - RNA, 19 nt, Homo sapiens
  misc_RNA (1)...(19): siRNA sense strand
gacgagucauucacaguca

SEQ ID NO: 1829183 - RNA, 19 nt, Homo sapiens
  misc_RNA (1)...(19): siRNA sense strand
cuaagucgcaucacagaga

SEQ ID NO: 1829184 - RNA, 19 nt, Homo sapiens
  misc_RNA (1)...(19): siRNA sense strand
ugacacgccuugacaacgu

SEQ ID NO: 1829185 - RNA, 19 nt, Homo sapiens
  misc_RNA (1)...(19): siRNA sense strand
ccacacgggagccuucgua

SEQ ID NO: 1829186 - RNA, 19 nt, Homo sapiens
  misc_RNA (1)...(19): siRNA sense strand
uggcagagcagaaguuugu

SEQ ID NO: 1829187 - RNA, 19 nt, Homo sapiens
  misc_RNA (1)...(19): siRNA sense strand
cgaaugugcuggcucucau

SEQ ID NO: 1829188 - RNA, 19 nt, Homo sapiens
  misc_RNA (1)...(19): siRNA sense strand
cgacugcacuggucuucag

SEQ ID NO: 1829189 - RNA, 19 nt, Homo sapiens
  misc_RNA (1)...(19): siRNA sense strand
gauggugaaugucauaucc

SEQ ID NO: 1829190 - RNA, 19 nt, Homo sapiens
  misc_RNA (1)...(19): siRNA sense strand
guccucgacugcagauuug

SEQ ID NO: 1829191 - RNA, 19 nt, Homo sapiens
  misc_RNA (1)...(19): siRNA sense strand
gccaucaagucacuaaguc

SEQ ID NO: 1829192 - RNA, 19 nt, Homo sapiens
  misc_RNA (1)...(19): siRNA sense strand
gaccaggcccagaaucgaa

SEQ ID NO: 1829193 - RNA, 19 nt, Homo sapiens
  misc_RNA (1)...(19): siRNA sense strand
cuaccacggagaauacaua

SEQ ID NO: 1829194 - RNA, 19 nt, Homo sapiens
  misc_RNA (1)...(19): siRNA sense strand
gcaagcacuuccggguaga

SEQ ID NO: 1829195 - RNA, 19 nt, Homo sapiens
  misc_RNA (1)...(19): siRNA sense strand
gcuccaacuucuaccuuca

SEQ ID NO: 1829196 - RNA, 19 nt, Homo sapiens
  misc_RNA (1)...(19): siRNA sense strand
uggacacacuaauugauga

SEQ ID NO: 1829197 - RNA, 19 nt, Homo sapiens
  misc_RNA (1)...(19): siRNA sense strand
gcucaugcguggccugaac

SEQ ID NO: 1829198 - RNA, 19 nt, Homo sapiens
  misc_RNA (1)...(19): siRNA sense strand
gauuuaccaccaagucuga

SEQ ID NO: 1829199 - RNA, 19 nt, Homo sapiens
  misc_RNA (1)...(19): siRNA sense strand
uugaauacgugcacagcuu

SEQ ID NO: 1829200 - RNA, 19 nt, Homo sapiens
  misc_RNA (1)...(19): siRNA sense strand
gauucucuguaccaaguga

SEQ ID NO: 1829201 - RNA, 19 nt, Homo sapiens
  misc_RNA (1)...(19): siRNA sense strand
ccaaugugccaucaaguca

SEQ ID NO: 1829202 - RNA, 19 nt, Homo sapiens
  misc_RNA (1)...(19): siRNA sense strand
ggucaggucacuaaacuac

SEQ ID NO: 1829203 - RNA, 19 nt, Homo sapiens
  misc_RNA (1)...(19): siRNA sense strand
gccaggaaguacuauuugg

SEQ ID NO: 1829204 - RNA, 19 nt, Homo sapiens
  misc_RNA (1)...(19): siRNA sense strand
ucaaggaugugcugauucc

SEQ ID NO: 1829205 - RNA, 19 nt, Homo sapiens
  misc_RNA (1)...(19): siRNA sense strand
aaagaguccauccagcuaa

SEQ ID NO: 1829206 - RNA, 19 nt, Homo sapiens
  misc_RNA (1)...(19): siRNA sense strand
guacaggucacugcauugu

SEQ ID NO: 1829207 - RNA, 19 nt, Homo sapiens
  misc_RNA (1)...(19): siRNA sense strand
uaagucgcaucacagagau

SEQ ID NO: 1829208 - RNA, 19 nt, Homo sapiens
  misc_RNA (1)...(19): siRNA sense strand
acggugaccugcuccaguu

SEQ ID NO: 1829209 - RNA, 19 nt, Homo sapiens
  misc_RNA (1)...(19): siRNA sense strand
acacgggagccuucguaua

SEQ ID NO: 1829210 - RNA, 19 nt, Homo sapiens
  misc_RNA (1)...(19): siRNA sense strand
cccagcaccucgcaugaga

SEQ ID NO: 1829211 - RNA, 19 nt, Homo sapiens
  misc_RNA (1)...(19): siRNA sense strand
cugauucucuguaccaagu

SEQ ID NO: 1829212 - RNA, 19 nt, Homo sapiens
  misc_RNA (1)...(19): siRNA sense strand
cgaauccaaugugccauca

SEQ ID NO: 1829213 - RNA, 19 nt, Homo sapiens
  misc_RNA (1)...(19): siRNA sense strand
cagaaucgaauccaaugug

SEQ ID NO: 1829214 - RNA, 19 nt, Homo sapiens
  misc_RNA (1)...(19): siRNA sense strand
cgugacagaugauccuagu

SEQ ID NO: 1829215 - RNA, 19 nt, Homo sapiens
  misc_RNA (1)...(19): siRNA sense strand
ccagcaaccuacaugaacu

SEQ ID NO: 1829216 - RNA, 19 nt, Homo sapiens
  misc_RNA (1)...(19): siRNA sense strand
agucugauguguggucauu

SEQ ID NO: 1829217 - RNA, 19 nt, Homo sapiens
  misc_RNA (1)...(19): siRNA sense strand
ccacggagaauacauagac

SEQ ID NO: 1829218 - RNA, 19 nt, Homo sapiens
  misc_RNA (1)...(19): siRNA sense strand
uacaggccauggugaccua

SEQ ID NO: 1829219 - RNA, 19 nt, Homo sapiens
  misc_RNA (1)...(19): siRNA sense strand
ugaggagcaugccauuaag

SEQ ID NO: 1829220 - RNA, 19 nt, Homo sapiens
  misc_RNA (1)...(19): siRNA sense strand
ggaccuuccaguacagaga

SEQ ID NO: 1829221 - RNA, 19 nt, Homo sapiens
  misc_RNA (1)...(19): siRNA sense strand
ggccaggaaguacuauuug

SEQ ID NO: 1829222 - RNA, 19 nt, Homo sapiens
  misc_RNA (1)...(19): siRNA sense strand
cacgggagccuucguauac

SEQ ID NO: 1829223 - RNA, 19 nt, Homo sapiens
  misc_RNA (1)...(19): siRNA sense strand
ccuauagauuuaccaccaa

SEQ ID NO: 1829224 - RNA, 19 nt, Homo sapiens
  misc_RNA (1)...(19): siRNA sense strand
gagagccugcagaccuaua

SEQ ID NO: 1829225 - RNA, 19 nt, Homo sapiens
  misc_RNA (1)...(19): siRNA sense strand
gugccgccuuccugaauau

SEQ ID NO: 1829226 - RNA, 19 nt, Homo sapiens
  misc_RNA (1)...(19): siRNA sense strand
ggauagacaccaagaacua

SEQ ID NO: 1829227 - RNA, 19 nt, Homo sapiens
  misc_RNA (1)...(19): siRNA sense strand
aggaagagcuggagaagga

SEQ ID NO: 1829228 - RNA, 19 nt, Homo sapiens
  misc_RNA (1)...(19): siRNA sense strand
gcagagcccuucaggaacu

SEQ ID NO: 1829229 - RNA, 19 nt, Homo sapiens
  misc_RNA (1)...(19): siRNA sense strand
gcugaccuaugccagauuu

SEQ ID NO: 1829230 - RNA, 19 nt, Homo sapiens
  misc_RNA (1)...(19): siRNA sense strand
ugaggaggaugaagaggaa

SEQ ID NO: 1829231 - RNA, 19 nt, Homo sapiens
  misc_RNA (1)...(19): siRNA sense strand
caaccucugugccuauugu

SEQ ID NO: 1829232 - RNA, 19 nt, Homo sapiens
  misc_RNA (1)...(19): siRNA sense strand
ggacagagggugggcaaga

SEQ ID NO: 1829233 - RNA, 19 nt, Homo sapiens
  misc_RNA (1)...(19): siRNA sense strand
ggauggagcugagguacca

SEQ ID NO: 1829234 - RNA, 19 nt, Homo sapiens
  misc_RNA (1)...(19): siRNA sense strand
gggcauggcugaggaggau

SEQ ID NO: 1829235 - RNA, 19 nt, Homo sapiens
  misc_RNA (1)...(19): siRNA sense strand
uggcagagcccuucaggaa

SEQ ID NO: 1829236 - RNA, 19 nt, Homo sapiens
  misc_RNA (1)...(19): siRNA sense strand
guacaggccacgugcaguu

SEQ ID NO: 1829237 - RNA, 19 nt, Homo sapiens
  misc_RNA (1)...(19): siRNA sense strand
gaucaucacccaccuucga

SEQ ID NO: 1829238 - RNA, 19 nt, Homo sapiens
  misc_RNA (1)...(19): siRNA sense strand
ggcagaagcacacaaggaa

SEQ ID NO: 1829239 - RNA, 19 nt, Homo sapiens
  misc_RNA (1)...(19): siRNA sense strand
agacugaggaggagccaua

SEQ ID NO: 1829240 - RNA, 19 nt, Homo sapiens
  misc_RNA (1)...(19): siRNA sense strand
ccacugaagguacacaaga

SEQ ID NO: 1829241 - RNA, 19 nt, Homo sapiens
  misc_RNA (1)...(19): siRNA sense strand
guacccacauucucagucu

SEQ ID NO: 1829242 - RNA, 19 nt, Homo sapiens
  misc_RNA (1)...(19): siRNA sense strand
gggcagaagcacacaagga

SEQ ID NO: 1829243 - RNA, 19 nt, Homo sapiens
  misc_RNA (1)...(19): siRNA sense strand
gacagagggugggcaagau

SEQ ID NO: 1829244 - RNA, 19 nt, Homo sapiens
  misc_RNA (1)...(19): siRNA sense strand
caucucaguuccacacaag

SEQ ID NO: 1829245 - RNA, 19 nt, Homo sapiens
  misc_RNA (1)...(19): siRNA sense strand
cagcaggcccagagacuga

SEQ ID NO: 1829246 - RNA, 19 nt, Homo sapiens
  misc_RNA (1)...(19): siRNA sense strand
ggaggaugaagaggaauga

SEQ ID NO: 1829247 - RNA, 19 nt, Homo sapiens
  misc_RNA (1)...(19): siRNA sense strand
caagaacuacguggaagug

SEQ ID NO: 1829248 - RNA, 19 nt, Homo sapiens
  misc_RNA (1)...(19): siRNA sense strand
gcaugcagcggcaguacau

SEQ ID NO: 1829249 - RNA, 19 nt, Homo sapiens
  misc_RNA (1)...(19): siRNA sense strand
cagaagcacacaaggaagu

SEQ ID NO: 1829250 - RNA, 19 nt, Homo sapiens
  misc_RNA (1)...(19): siRNA sense strand
gcauggcugaggaggauga

SEQ ID NO: 1829251 - RNA, 19 nt, Homo sapiens
  misc_RNA (1)...(19): siRNA sense strand
cacugaagguacacaagau

SEQ ID NO: 1829252 - RNA, 19 nt, Homo sapiens
  misc_RNA (1)...(19): siRNA sense strand
ggccugaggacgaggaaga

SEQ ID NO: 1829253 - RNA, 19 nt, Homo sapiens
  misc_RNA (1)...(19): siRNA sense strand
gugcugaccuaugccagau

SEQ ID NO: 1829254 - RNA, 19 nt, Homo sapiens
  misc_RNA (1)...(19): siRNA sense strand
caccaagaacuacguggaa

SEQ ID NO: 1829255 - RNA, 19 nt, Homo sapiens
  misc_RNA (1)...(19): siRNA sense strand
gugcuccacugaagguaca

SEQ ID NO: 1829256 - RNA, 19 nt, Homo sapiens
  misc_RNA (1)...(19): siRNA sense strand
gagaggcucgggagugucu

SEQ ID NO: 1829257 - RNA, 19 nt, Homo sapiens
  misc_RNA (1)...(19): siRNA sense strand
gccagucgggccagaagaa

SEQ ID NO: 1829258 - RNA, 19 nt, Homo sapiens
  misc_RNA (1)...(19): siRNA sense strand
gauagacaccaagaacuac

SEQ ID NO: 1829259 - RNA, 19 nt, Homo sapiens
  misc_RNA (1)...(19): siRNA sense strand
ugcagaggcuaugcccuuu

SEQ ID NO: 1829260 - RNA, 19 nt, Homo sapiens
  misc_RNA (1)...(19): siRNA sense strand
cauucucagucucuacuuc

SEQ ID NO: 1829261 - RNA, 19 nt, Homo sapiens
  misc_RNA (1)...(19): siRNA sense strand
gcagcggcaguacauggaa

SEQ ID NO: 1829262 - RNA, 19 nt, Homo sapiens
  misc_RNA (1)...(19): siRNA sense strand
gcagaggcuaugcccuuuc

SEQ ID NO: 1829263 - RNA, 19 nt, Homo sapiens
  misc_RNA (1)...(19): siRNA sense strand
uggcugaggaggaugaaga

SEQ ID NO: 1829264 - RNA, 19 nt, Homo sapiens
  misc_RNA (1)...(19): siRNA sense strand
ggauagacaccaagaacua

SEQ ID NO: 1829265 - RNA, 19 nt, Homo sapiens
  misc_RNA (1)...(19): siRNA sense strand
aggaagagcuggagaagga

SEQ ID NO: 1829266 - RNA, 19 nt, Homo sapiens
  misc_RNA (1)...(19): siRNA sense strand
gcagagcccuucaggaacu

SEQ ID NO: 1829267 - RNA, 19 nt, Homo sapiens
  misc_RNA (1)...(19): siRNA sense strand
gcugaccuaugccagauuu

SEQ ID NO: 1829268 - RNA, 19 nt, Homo sapiens
  misc_RNA (1)...(19): siRNA sense strand
ugaggaggaugaagaggaa

SEQ ID NO: 1829269 - RNA, 19 nt, Homo sapiens
  misc_RNA (1)...(19): siRNA sense strand
caaccucugugccuauugu

SEQ ID NO: 1829270 - RNA, 19 nt, Homo sapiens
  misc_RNA (1)...(19): siRNA sense strand
ggacagagggugggcaaga

SEQ ID NO: 1829271 - RNA, 19 nt, Homo sapiens
  misc_RNA (1)...(19): siRNA sense strand
ggauggagcugagguacca

SEQ ID NO: 1829272 - RNA, 19 nt, Homo sapiens
  misc_RNA (1)...(19): siRNA sense strand
gggcauggcugaggaggau

SEQ ID NO: 1829273 - RNA, 19 nt, Homo sapiens
  misc_RNA (1)...(19): siRNA sense strand
uggcagagcccuucaggaa

SEQ ID NO: 1829274 - RNA, 19 nt, Homo sapiens
  misc_RNA (1)...(19): siRNA sense strand
guacaggccacgugcaguu

SEQ ID NO: 1829275 - RNA, 19 nt, Homo sapiens
  misc_RNA (1)...(19): siRNA sense strand
gaucaucacccaccuucga

SEQ ID NO: 1829276 - RNA, 19 nt, Homo sapiens
  misc_RNA (1)...(19): siRNA sense strand
ggcagaagcacacaaggaa

SEQ ID NO: 1829277 - RNA, 19 nt, Homo sapiens
  misc_RNA (1)...(19): siRNA sense strand
agacugaggaggagccaua

SEQ ID NO: 1829278 - RNA, 19 nt, Homo sapiens
  misc_RNA (1)...(19): siRNA sense strand
ccacugaagguacacaaga

SEQ ID NO: 1829279 - RNA, 19 nt, Homo sapiens
  misc_RNA (1)...(19): siRNA sense strand
guacccacauucucagucu

SEQ ID NO: 1829280 - RNA, 19 nt, Homo sapiens
  misc_RNA (1)...(19): siRNA sense strand
gggcagaagcacacaagga

SEQ ID NO: 1829281 - RNA, 19 nt, Homo sapiens
  misc_RNA (1)...(19): siRNA sense strand
gacagagggugggcaagau

SEQ ID NO: 1829282 - RNA, 19 nt, Homo sapiens
  misc_RNA (1)...(19): siRNA sense strand
caucucaguuccacacaag

SEQ ID NO: 1829283 - RNA, 19 nt, Homo sapiens
  misc_RNA (1)...(19): siRNA sense strand
cagcaggcccagagacuga

SEQ ID NO: 1829284 - RNA, 19 nt, Homo sapiens
  misc_RNA (1)...(19): siRNA sense strand
ggaggaugaagaggaauga

SEQ ID NO: 1829285 - RNA, 19 nt, Homo sapiens
  misc_RNA (1)...(19): siRNA sense strand
caagaacuacguggaagug

SEQ ID NO: 1829286 - RNA, 19 nt, Homo sapiens
  misc_RNA (1)...(19): siRNA sense strand
gcaugcagcggcaguacau

SEQ ID NO: 1829287 - RNA, 19 nt, Homo sapiens
  misc_RNA (1)...(19): siRNA sense strand
cagaagcacacaaggaagu

SEQ ID NO: 1829288 - RNA, 19 nt, Homo sapiens
  misc_RNA (1)...(19): siRNA sense strand
gcauggcugaggaggauga

SEQ ID NO: 1829289 - RNA, 19 nt, Homo sapiens
  misc_RNA (1)...(19): siRNA sense strand
cacugaagguacacaagau

SEQ ID NO: 1829290 - RNA, 19 nt, Homo sapiens
  misc_RNA (1)...(19): siRNA sense strand
ggccugaggacgaggaaga

SEQ ID NO: 1829291 - RNA, 19 nt, Homo sapiens
  misc_RNA (1)...(19): siRNA sense strand
gugcugaccuaugccagau

SEQ ID NO: 1829292 - RNA, 19 nt, Homo sapiens
  misc_RNA (1)...(19): siRNA sense strand
caccaagaacuacguggaa

SEQ ID NO: 1829293 - RNA, 19 nt, Homo sapiens
  misc_RNA (1)...(19): siRNA sense strand
gugcuccacugaagguaca

SEQ ID NO: 1829294 - RNA, 19 nt, Homo sapiens
  misc_RNA (1)...(19): siRNA sense strand
gagaggcucgggagugucu

SEQ ID NO: 1829295 - RNA, 19 nt, Homo sapiens
  misc_RNA (1)...(19): siRNA sense strand
gccagucgggccagaagaa

SEQ ID NO: 1829296 - RNA, 19 nt, Homo sapiens
  misc_RNA (1)...(19): siRNA sense strand
gauagacaccaagaacuac

SEQ ID NO: 1829297 - RNA, 19 nt, Homo sapiens
  misc_RNA (1)...(19): siRNA sense strand
ugcagaggcuaugcccuuu

SEQ ID NO: 1829298 - RNA, 19 nt, Homo sapiens
  misc_RNA (1)...(19): siRNA sense strand
cauucucagucucuacuuc

SEQ ID NO: 1829299 - RNA, 19 nt, Homo sapiens
  misc_RNA (1)...(19): siRNA sense strand
gcagcggcaguacauggaa

SEQ ID NO: 1829300 - RNA, 19 nt, Homo sapiens
  misc_RNA (1)...(19): siRNA sense strand
gcagaggcuaugcccuuuc

SEQ ID NO: 1829301 - RNA, 19 nt, Homo sapiens
  misc_RNA (1)...(19): siRNA sense strand
uggcugaggaggaugaaga

SEQ ID NO: 1829302 - RNA, 19 nt, Homo sapiens
  misc_RNA (1)...(19): siRNA sense strand
ggacacaccuccuccacuu

SEQ ID NO: 1829303 - RNA, 19 nt, Homo sapiens
  misc_RNA (1)...(19): siRNA sense strand
gagcuaacauccucaucaa

SEQ ID NO: 1829304 - RNA, 19 nt, Homo sapiens
  misc_RNA (1)...(19): siRNA sense strand
ugucagagcuccagauuag

SEQ ID NO: 1829305 - RNA, 19 nt, Homo sapiens
  misc_RNA (1)...(19): siRNA sense strand
gaugugcccuucucguaaa

SEQ ID NO: 1829306 - RNA, 19 nt, Homo sapiens
  misc_RNA (1)...(19): siRNA sense strand
caacaacguucucaugucu

SEQ ID NO: 1829307 - RNA, 19 nt, Homo sapiens
  misc_RNA (1)...(19): siRNA sense strand
ggaccacuaugaccugcua

SEQ ID NO: 1829308 - RNA, 19 nt, Homo sapiens
  misc_RNA (1)...(19): siRNA sense strand
ccaccaagaugcucaguca

SEQ ID NO: 1829309 - RNA, 19 nt, Homo sapiens
  misc_RNA (1)...(19): siRNA sense strand
ggacacaucccuccaccaa

SEQ ID NO: 1829310 - RNA, 19 nt, Homo sapiens
  misc_RNA (1)...(19): siRNA sense strand
ggacuucgcacaccugaga

SEQ ID NO: 1829311 - RNA, 19 nt, Homo sapiens
  misc_RNA (1)...(19): siRNA sense strand
ggaaauccucauauugaaa

SEQ ID NO: 1829312 - RNA, 19 nt, Homo sapiens
  misc_RNA (1)...(19): siRNA sense strand
gcuaacauccucaucaaug

SEQ ID NO: 1829313 - RNA, 19 nt, Homo sapiens
  misc_RNA (1)...(19): siRNA sense strand
caacaccgcucgccuacag

SEQ ID NO: 1829314 - RNA, 19 nt, Homo sapiens
  misc_RNA (1)...(19): siRNA sense strand
ggaguuaucucugguugca

SEQ ID NO: 1829315 - RNA, 19 nt, Homo sapiens
  misc_RNA (1)...(19): siRNA sense strand
caaguuccguucuccauca

SEQ ID NO: 1829316 - RNA, 19 nt, Homo sapiens
  misc_RNA (1)...(19): siRNA sense strand
ggaaaggacccuccauugg

SEQ ID NO: 1829317 - RNA, 19 nt, Homo sapiens
  misc_RNA (1)...(19): siRNA sense strand
caggacaucuaccaaguga

SEQ ID NO: 1829318 - RNA, 19 nt, Homo sapiens
  misc_RNA (1)...(19): siRNA sense strand
gauggagccugaugaugau

SEQ ID NO: 1829319 - RNA, 19 nt, Homo sapiens
  misc_RNA (1)...(19): siRNA sense strand
gcaaggaagaacaugguuu

SEQ ID NO: 1829320 - RNA, 19 nt, Homo sapiens
  misc_RNA (1)...(19): siRNA sense strand
ggacaucuaccaagugaca

SEQ ID NO: 1829321 - RNA, 19 nt, Homo sapiens
  misc_RNA (1)...(19): siRNA sense strand
gggaaaggacccuccauug

SEQ ID NO: 1829322 - RNA, 19 nt, Homo sapiens
  misc_RNA (1)...(19): siRNA sense strand
agacgccucucuuucauug

SEQ ID NO: 1829323 - RNA, 19 nt, Homo sapiens
  misc_RNA (1)...(19): siRNA sense strand
gaagauggagccugaugau

SEQ ID NO: 1829324 - RNA, 19 nt, Homo sapiens
  misc_RNA (1)...(19): siRNA sense strand
ggaugugcccuucucguaa

SEQ ID NO: 1829325 - RNA, 19 nt, Homo sapiens
  misc_RNA (1)...(19): siRNA sense strand
gggaugugcccuucucgua

SEQ ID NO: 1829326 - RNA, 19 nt, Homo sapiens
  misc_RNA (1)...(19): siRNA sense strand
ucaugucucucucaggaaa

SEQ ID NO: 1829327 - RNA, 19 nt, Homo sapiens
  misc_RNA (1)...(19): siRNA sense strand
ggagcuaacauccucauca

SEQ ID NO: 1829328 - RNA, 19 nt, Homo sapiens
  misc_RNA (1)...(19): siRNA sense strand
acaaugagcugugugacau

SEQ ID NO: 1829329 - RNA, 19 nt, Homo sapiens
  misc_RNA (1)...(19): siRNA sense strand
gaagggaggauacaaugag

SEQ ID NO: 1829330 - RNA, 19 nt, Homo sapiens
  misc_RNA (1)...(19): siRNA sense strand
agauggagccugaugauga

SEQ ID NO: 1829331 - RNA, 19 nt, Homo sapiens
  misc_RNA (1)...(19): siRNA sense strand
ucaggaagcuccgaggaau

SEQ ID NO: 1829332 - RNA, 19 nt, Homo sapiens
  misc_RNA (1)...(19): siRNA sense strand
gauacaaugagcuguguga

SEQ ID NO: 1829333 - RNA, 19 nt, Homo sapiens
  misc_RNA (1)...(19): siRNA sense strand
ugaagauggugaagaugga

SEQ ID NO: 1829334 - RNA, 19 nt, Homo sapiens
  misc_RNA (1)...(19): siRNA sense strand
caaggaagaacaugguuuc

SEQ ID NO: 1829335 - RNA, 19 nt, Homo sapiens
  misc_RNA (1)...(19): siRNA sense strand
gaagaaucccgggaaagga

SEQ ID NO: 1829336 - RNA, 19 nt, Homo sapiens
  misc_RNA (1)...(19): siRNA sense strand
ccgaguagcugggauuaca

SEQ ID NO: 1829337 - RNA, 19 nt, Homo sapiens
  misc_RNA (1)...(19): siRNA sense strand
gguaccagcccaugaacaa

SEQ ID NO: 1829338 - RNA, 19 nt, Homo sapiens
  misc_RNA (1)...(19): siRNA sense strand
cgacgccucuguccguguu

SEQ ID NO: 1829339 - RNA, 19 nt, Homo sapiens
  misc_RNA (1)...(19): siRNA sense strand
gcacugaagauggugaaga

SEQ ID NO: 1829340 - RNA, 19 nt, Homo sapiens
  misc_RNA (1)...(19): siRNA sense strand
gcacucacagaagaagaua

SEQ ID NO: 1829341 - RNA, 19 nt, Homo sapiens
  misc_RNA (1)...(19): siRNA sense strand
uauuugcacucacagaaga

SEQ ID NO: 1829342 - RNA, 19 nt, Homo sapiens
  misc_RNA (1)...(19): siRNA sense strand
ccagguagaggaagauaug

SEQ ID NO: 1829343 - RNA, 19 nt, Homo sapiens
  misc_RNA (1)...(19): siRNA sense strand
gaagauacacagggacauc

SEQ ID NO: 1829344 - RNA, 19 nt, Homo sapiens
  misc_RNA (1)...(19): siRNA sense strand
ccaggaagcaacugucaga

SEQ ID NO: 1829345 - RNA, 19 nt, Homo sapiens
  misc_RNA (1)...(19): siRNA sense strand
caagauccaggacaccaaa

SEQ ID NO: 1829346 - RNA, 19 nt, Homo sapiens
  misc_RNA (1)...(19): siRNA sense strand
ucaacaacguucucauguc

SEQ ID NO: 1829347 - RNA, 19 nt, Homo sapiens
  misc_RNA (1)...(19): siRNA sense strand
caucaacaacguucucaug

SEQ ID NO: 1829348 - RNA, 19 nt, Homo sapiens
  misc_RNA (1)...(19): siRNA sense strand
aggaaaagaugaagagaaa

SEQ ID NO: 1829349 - RNA, 19 nt, Homo sapiens
  misc_RNA (1)...(19): siRNA sense strand
gggcaucacggccaucgaa

SEQ ID NO: 1829350 - RNA, 19 nt, Homo sapiens
  misc_RNA (1)...(19): siRNA sense strand
gagagacccuacccucacu

SEQ ID NO: 1829351 - RNA, 19 nt, Homo sapiens
  misc_RNA (1)...(19): siRNA sense strand
cacugaagauggugaagau

SEQ ID NO: 1829352 - RNA, 19 nt, Homo sapiens
  misc_RNA (1)...(19): siRNA sense strand
ugacccagguagaggaaga

SEQ ID NO: 1829353 - RNA, 19 nt, Homo sapiens
  misc_RNA (1)...(19): siRNA sense strand
ccagacgccucucuuucau

SEQ ID NO: 1829354 - RNA, 19 nt, Homo sapiens
  misc_RNA (1)...(19): siRNA sense strand
gccagacgccucucuuuca

SEQ ID NO: 1829355 - RNA, 19 nt, Homo sapiens
  misc_RNA (1)...(19): siRNA sense strand
ucguaaaguuguucaaugg

SEQ ID NO: 1829356 - RNA, 19 nt, Homo sapiens
  misc_RNA (1)...(19): siRNA sense strand
cuacguggguguacuccau

SEQ ID NO: 1829357 - RNA, 19 nt, Homo sapiens
  misc_RNA (1)...(19): siRNA sense strand
agaggaagauauggugaug

SEQ ID NO: 1829358 - RNA, 19 nt, Homo sapiens
  misc_RNA (1)...(19): siRNA sense strand
ccucaccgcccauucagaa

SEQ ID NO: 1829359 - RNA, 19 nt, Homo sapiens
  misc_RNA (1)...(19): siRNA sense strand
gagacccuacccucacuuu

SEQ ID NO: 1829360 - RNA, 19 nt, Homo sapiens
  misc_RNA (1)...(19): siRNA sense strand
aaagagaccagagcaggaa

SEQ ID NO: 1829361 - RNA, 19 nt, Homo sapiens
  misc_RNA (1)...(19): siRNA sense strand
ggaugaggagcccgagcua

SEQ ID NO: 1829362 - RNA, 19 nt, Homo sapiens
  misc_RNA (1)...(19): siRNA sense strand
ggaucugcauggaauucug

SEQ ID NO: 1829363 - RNA, 19 nt, Homo sapiens
  misc_RNA (1)...(19): siRNA sense strand
aagauauggugaugguguu

SEQ ID NO: 1829364 - RNA, 19 nt, Homo sapiens
  misc_RNA (1)...(19): siRNA sense strand
aggaagauauggugauggu

SEQ ID NO: 1829365 - RNA, 19 nt, Homo sapiens
  misc_RNA (1)...(19): siRNA sense strand
gaucuucuugacaaacuga

SEQ ID NO: 1829366 - RNA, 19 nt, Homo sapiens
  misc_RNA (1)...(19): siRNA sense strand
ugaagggaggauacaauga

SEQ ID NO: 1829367 - RNA, 19 nt, Homo sapiens
  misc_RNA (1)...(19): siRNA sense strand
cgucguggacccugacauu

SEQ ID NO: 1829368 - RNA, 19 nt, Homo sapiens
  misc_RNA (1)...(19): siRNA sense strand
cuacagccaccgcucuuug

SEQ ID NO: 1829369 - RNA, 19 nt, Homo sapiens
  misc_RNA (1)...(19): siRNA sense strand
caucaagggagcuaacauc

SEQ ID NO: 1829370 - RNA, 19 nt, Homo sapiens
  misc_RNA (1)...(19): siRNA sense strand
ucacagaagaagauacaca

SEQ ID NO: 1829371 - RNA, 19 nt, Homo sapiens
  misc_RNA (1)...(19): siRNA sense strand
gugcccuucucguaaaguu

SEQ ID NO: 1829372 - RNA, 19 nt, Homo sapiens
  misc_RNA (1)...(19): siRNA sense strand
ccaccucaccgcccauuca

SEQ ID NO: 1829373 - RNA, 19 nt, Homo sapiens
  misc_RNA (1)...(19): siRNA sense strand
agccaccgcucuuugaugu

SEQ ID NO: 1829374 - RNA, 19 nt, Homo sapiens
  misc_RNA (1)...(19): siRNA sense strand
cuuuaaggcucgagacaag

SEQ ID NO: 1829375 - RNA, 19 nt, Homo sapiens
  misc_RNA (1)...(19): siRNA sense strand
ggccagacgccucucuuuc

SEQ ID NO: 1829376 - RNA, 19 nt, Homo sapiens
  misc_RNA (1)...(19): siRNA sense strand
ggcacgaucucgccucacu

SEQ ID NO: 1829377 - RNA, 19 nt, Homo sapiens
  misc_RNA (1)...(19): siRNA sense strand
ugaagauggagccugauga

SEQ ID NO: 1829378 - RNA, 19 nt, Homo sapiens
  misc_RNA (1)...(19): siRNA sense strand
acugaagaaucccgggaaa

SEQ ID NO: 1829379 - RNA, 19 nt, Homo sapiens
  misc_RNA (1)...(19): siRNA sense strand
ggacaucaagggagcuaac

SEQ ID NO: 1829380 - RNA, 19 nt, Homo sapiens
  misc_RNA (1)...(19): siRNA sense strand
gcucggaucagcugcuaca

SEQ ID NO: 1829381 - RNA, 19 nt, Homo sapiens
  misc_RNA (1)...(19): siRNA sense strand
guaccagcccaugaacaaa

SEQ ID NO: 1829382 - RNA, 19 nt, Homo sapiens
  misc_RNA (1)...(19): siRNA sense strand
cucguaaaguuguucaaug

SEQ ID NO: 1829383 - RNA, 19 nt, Homo sapiens
  misc_RNA (1)...(19): siRNA sense strand
gaaaagaugaagagaaagg

SEQ ID NO: 1829384 - RNA, 19 nt, Homo sapiens
  misc_RNA (1)...(19): siRNA sense strand
gaucugcauggaauucugu

SEQ ID NO: 1829385 - RNA, 19 nt, Homo sapiens
  misc_RNA (1)...(19): siRNA sense strand
caacaucguggccuaccau

SEQ ID NO: 1829386 - RNA, 19 nt, Homo sapiens
  misc_RNA (1)...(19): siRNA sense strand
uuccacaacuucaucaaag

SEQ ID NO: 1829387 - RNA, 19 nt, Homo sapiens
  misc_RNA (1)...(19): siRNA sense strand
cuggauggcuccggaagug

SEQ ID NO: 1829388 - RNA, 19 nt, Homo sapiens
  misc_RNA (1)...(19): siRNA sense strand
ugccucagccucccgagua

SEQ ID NO: 1829389 - RNA, 19 nt, Homo sapiens
  misc_RNA (1)...(19): siRNA sense strand
ccucccagguucaagcaau

SEQ ID NO: 1829390 - RNA, 19 nt, Homo sapiens
  misc_RNA (1)...(19): siRNA sense strand
gugcaggugugggcucuag

SEQ ID NO: 1829391 - RNA, 19 nt, Homo sapiens
  misc_RNA (1)...(19): siRNA sense strand
ggccguggcuaugguugga

SEQ ID NO: 1829392 - RNA, 19 nt, Homo sapiens
  misc_RNA (1)...(19): siRNA sense strand
ggacuacguggguguacuc

SEQ ID NO: 1829393 - RNA, 19 nt, Homo sapiens
  misc_RNA (1)...(19): siRNA sense strand
ugaagaaucccgggaaagg

SEQ ID NO: 1829394 - RNA, 19 nt, Homo sapiens
  misc_RNA (1)...(19): siRNA sense strand
uggcagcuguggcccugaa

SEQ ID NO: 1829395 - RNA, 19 nt, Homo sapiens
  misc_RNA (1)...(19): siRNA sense strand
ggagccugaugaugauguc

SEQ ID NO: 1829396 - RNA, 19 nt, Homo sapiens
  misc_RNA (1)...(19): siRNA sense strand
gauauggugaugguguuga

SEQ ID NO: 1829397 - RNA, 19 nt, Homo sapiens
  misc_RNA (1)...(19): siRNA sense strand
acaacguucucaugucucu

SEQ ID NO: 1829398 - RNA, 19 nt, Homo sapiens
  misc_RNA (1)...(19): siRNA sense strand
cgggaaaggacccuccauu

SEQ ID NO: 1829399 - RNA, 19 nt, Homo sapiens
  misc_RNA (1)...(19): siRNA sense strand
cggcugccuuccacaacuu

SEQ ID NO: 1829400 - RNA, 19 nt, Homo sapiens
  misc_RNA (1)...(19): siRNA sense strand
gcaggugacccagguagag

SEQ ID NO: 1829401 - RNA, 19 nt, Homo sapiens
  misc_RNA (1)...(19): siRNA sense strand
ccaccuguauucucauagc

SEQ ID NO: 1829402 - RNA, 19 nt, Homo sapiens
  misc_RNA (1)...(19): siRNA sense strand
caucacagcucacguagaa

SEQ ID NO: 1829403 - RNA, 19 nt, Homo sapiens
  misc_RNA (1)...(19): siRNA sense strand
gaacaagagcaaugacuuu

SEQ ID NO: 1829404 - RNA, 19 nt, Homo sapiens
  misc_RNA (1)...(19): siRNA sense strand
ccaacaaacuggagagaga

SEQ ID NO: 1829405 - RNA, 19 nt, Homo sapiens
  misc_RNA (1)...(19): siRNA sense strand
ggaaaucccguaccaaugu

SEQ ID NO: 1829406 - RNA, 19 nt, Homo sapiens
  misc_RNA (1)...(19): siRNA sense strand
ccaggugacucuaugcuuu

SEQ ID NO: 1829407 - RNA, 19 nt, Homo sapiens
  misc_RNA (1)...(19): siRNA sense strand
gggcuacgauuuaccagaa

SEQ ID NO: 1829408 - RNA, 19 nt, Homo sapiens
  misc_RNA (1)...(19): siRNA sense strand
gcaaagaaagcucaucaca

SEQ ID NO: 1829409 - RNA, 19 nt, Homo sapiens
  misc_RNA (1)...(19): siRNA sense strand
gcaaugacuuugaggaacu

SEQ ID NO: 1829410 - RNA, 19 nt, Homo sapiens
  misc_RNA (1)...(19): siRNA sense strand
caucagcaauccagaagau

SEQ ID NO: 1829411 - RNA, 19 nt, Homo sapiens
  misc_RNA (1)...(19): siRNA sense strand
gcucaucacagcucacgua

SEQ ID NO: 1829412 - RNA, 19 nt, Homo sapiens
  misc_RNA (1)...(19): siRNA sense strand
gagcaaugacuuugaggaa

SEQ ID NO: 1829413 - RNA, 19 nt, Homo sapiens
  misc_RNA (1)...(19): siRNA sense strand
caagagcaaugacuuugag

SEQ ID NO: 1829414 - RNA, 19 nt, Homo sapiens
  misc_RNA (1)...(19): siRNA sense strand
gaaaucccguaccaauguc

SEQ ID NO: 1829415 - RNA, 19 nt, Homo sapiens
  misc_RNA (1)...(19): siRNA sense strand
cccagcagguucacaacua

SEQ ID NO: 1829416 - RNA, 19 nt, Homo sapiens
  misc_RNA (1)...(19): siRNA sense strand
uccagaagauuaccacaga

SEQ ID NO: 1829417 - RNA, 19 nt, Homo sapiens
  misc_RNA (1)...(19): siRNA sense strand
ucacguagaaccucugcua

SEQ ID NO: 1829418 - RNA, 19 nt, Homo sapiens
  misc_RNA (1)...(19): siRNA sense strand
gggcacuguuuaaaggaaa

SEQ ID NO: 1829419 - RNA, 19 nt, Homo sapiens
  misc_RNA (1)...(19): siRNA sense strand
ggagccagcuggacaucuc

SEQ ID NO: 1829420 - RNA, 19 nt, Homo sapiens
  misc_RNA (1)...(19): siRNA sense strand
ccauuccucuauucaagaa

SEQ ID NO: 1829421 - RNA, 19 nt, Homo sapiens
  misc_RNA (1)...(19): siRNA sense strand
uagccagacaacuauauua

SEQ ID NO: 1829422 - RNA, 19 nt, Homo sapiens
  misc_RNA (1)...(19): siRNA sense strand
gccagacaacuauauuauu

SEQ ID NO: 1829423 - RNA, 19 nt, Homo sapiens
  misc_RNA (1)...(19): siRNA sense strand
ucucagacccguacaaagu

SEQ ID NO: 1829424 - RNA, 19 nt, Homo sapiens
  misc_RNA (1)...(19): siRNA sense strand
cacagcaguucuugucaga

SEQ ID NO: 1829425 - RNA, 19 nt, Homo sapiens
  misc_RNA (1)...(19): siRNA sense strand
ccacagagccaagcauaag

SEQ ID NO: 1829426 - RNA, 19 nt, Homo sapiens
  misc_RNA (1)...(19): siRNA sense strand
gcggugcgcuuugaacaag

SEQ ID NO: 1829427 - RNA, 19 nt, Homo sapiens
  misc_RNA (1)...(19): siRNA sense strand
gauuccaggugacucuaug

SEQ ID NO: 1829428 - RNA, 19 nt, Homo sapiens
  misc_RNA (1)...(19): siRNA sense strand
gaucagccacacccggaaa

SEQ ID NO: 1829429 - RNA, 19 nt, Homo sapiens
  misc_RNA (1)...(19): siRNA sense strand
gcacaucugccuguacuac

SEQ ID NO: 1829430 - RNA, 19 nt, Homo sapiens
  misc_RNA (1)...(19): siRNA sense strand
caacaaaacaguggacauu

SEQ ID NO: 1829431 - RNA, 19 nt, Homo sapiens
  misc_RNA (1)...(19): siRNA sense strand
gccgcucccugccaagauu

SEQ ID NO: 1829432 - RNA, 19 nt, Homo sapiens
  misc_RNA (1)...(19): siRNA sense strand
gcaagcucuuugacacaca

SEQ ID NO: 1829433 - RNA, 19 nt, Homo sapiens
  misc_RNA (1)...(19): siRNA sense strand
ccagaacacaucagcaauc

SEQ ID NO: 1829434 - RNA, 19 nt, Homo sapiens
  misc_RNA (1)...(19): siRNA sense strand
uauccgccauuccucuauu

SEQ ID NO: 1829435 - RNA, 19 nt, Homo sapiens
  misc_RNA (1)...(19): siRNA sense strand
ugaacaagagcaaugacuu

SEQ ID NO: 1829436 - RNA, 19 nt, Homo sapiens
  misc_RNA (1)...(19): siRNA sense strand
ccagaagauuaccacagau

SEQ ID NO: 1829437 - RNA, 19 nt, Homo sapiens
  misc_RNA (1)...(19): siRNA sense strand
caucucagacccguacaaa

SEQ ID NO: 1829438 - RNA, 19 nt, Homo sapiens
  misc_RNA (1)...(19): siRNA sense strand
acagaucuauccgccauuc

SEQ ID NO: 1829439 - RNA, 19 nt, Homo sapiens
  misc_RNA (1)...(19): siRNA sense strand
gcuacgauuuaccagaaca

SEQ ID NO: 1829440 - RNA, 19 nt, Homo sapiens
  misc_RNA (1)...(19): siRNA sense strand
acacacagcaguucuuguc

SEQ ID NO: 1829441 - RNA, 19 nt, Homo sapiens
  misc_RNA (1)...(19): siRNA sense strand
caaugucccaugacguuug

SEQ ID NO: 1829442 - RNA, 19 nt, Homo sapiens
  misc_RNA (1)...(19): siRNA sense strand
acaagagcaaugacuuuga

SEQ ID NO: 1829443 - RNA, 19 nt, Homo sapiens
  misc_RNA (1)...(19): siRNA sense strand
ccggaaaucccguaccaau

SEQ ID NO: 1829444 - RNA, 19 nt, Homo sapiens
  misc_RNA (1)...(19): siRNA sense strand
uaccagaacacaucagcaa

SEQ ID NO: 1829445 - RNA, 19 nt, Homo sapiens
  misc_RNA (1)...(19): siRNA sense strand
cgauuuaccagaacacauc

SEQ ID NO: 1829446 - RNA, 19 nt, Homo sapiens
  misc_RNA (1)...(19): siRNA sense strand
gcuagccagacaacuauau

SEQ ID NO: 1829447 - RNA, 19 nt, Homo sapiens
  misc_RNA (1)...(19): siRNA sense strand
agagagaccagaccugcaa

SEQ ID NO: 1829448 - RNA, 19 nt, Homo sapiens
  misc_RNA (1)...(19): siRNA sense strand
ucagacccguacaaagugu

SEQ ID NO: 1829449 - RNA, 19 nt, Homo sapiens
  misc_RNA (1)...(19): siRNA sense strand
acacaucagcaauccagaa

SEQ ID NO: 1829450 - RNA, 19 nt, Homo sapiens
  misc_RNA (1)...(19): siRNA sense strand
gaucgacagcggcaaguac

SEQ ID NO: 1829451 - RNA, 19 nt, Homo sapiens
  misc_RNA (1)...(19): siRNA sense strand
acaaaacaguggacauuuc

SEQ ID NO: 1829452 - RNA, 19 nt, Homo sapiens
  misc_RNA (1)...(19): siRNA sense strand
caaaguguacaggauuguu

SEQ ID NO: 1829453 - RNA, 19 nt, Homo sapiens
  misc_RNA (1)...(19): siRNA sense strand
ccagcagguucacaacuac

SEQ ID NO: 1829454 - RNA, 19 nt, Homo sapiens
  misc_RNA (1)...(19): siRNA sense strand
cgccauuccucuauucaag

SEQ ID NO: 1829455 - RNA, 19 nt, Homo sapiens
  misc_RNA (1)...(19): siRNA sense strand
acaggaaccuuuuaugcuu

SEQ ID NO: 1829456 - RNA, 19 nt, Homo sapiens
  misc_RNA (1)...(19): siRNA sense strand
cggaaaucccguaccaaug

SEQ ID NO: 1829457 - RNA, 19 nt, Homo sapiens
  misc_RNA (1)...(19): siRNA sense strand
cagaagauuaccacagauc

SEQ ID NO: 1829458 - RNA, 19 nt, Homo sapiens
  misc_RNA (1)...(19): siRNA sense strand
gcggagaguucggcaugag

SEQ ID NO: 1829459 - RNA, 19 nt, Homo sapiens
  misc_RNA (1)...(19): siRNA sense strand
caagauuccaggugacucu

SEQ ID NO: 1829460 - RNA, 19 nt, Homo sapiens
  misc_RNA (1)...(19): siRNA sense strand
ugacacacagcaguucuug

SEQ ID NO: 1829461 - RNA, 19 nt, Homo sapiens
  misc_RNA (1)...(19): siRNA sense strand
cgacgggcucuaugcgaaa

SEQ ID NO: 1829462 - RNA, 19 nt, Homo sapiens
  misc_RNA (1)...(19): siRNA sense strand
ccguaccaaugucccauga

SEQ ID NO: 1829463 - RNA, 19 nt, Homo sapiens
  misc_RNA (1)...(19): siRNA sense strand
gcagguucacaacuacaug

SEQ ID NO: 1829464 - RNA, 19 nt, Homo sapiens
  misc_RNA (1)...(19): siRNA sense strand
ugacuuugaggaacugguu

SEQ ID NO: 1829465 - RNA, 19 nt, Homo sapiens
  misc_RNA (1)...(19): siRNA sense strand
gaucucccauggacauacg

SEQ ID NO: 1829466 - RNA, 19 nt, Homo sapiens
  misc_RNA (1)...(19): siRNA sense strand
cagguucacaacuacauga

SEQ ID NO: 1829467 - RNA, 19 nt, Homo sapiens
  misc_RNA (1)...(19): siRNA sense strand
gcuuugaacaagagcaaug

SEQ ID NO: 1829468 - RNA, 19 nt, Homo sapiens
  misc_RNA (1)...(19): siRNA sense strand
cagaacacaucagcaaucc

SEQ ID NO: 1829469 - RNA, 19 nt, Homo sapiens
  misc_RNA (1)...(19): siRNA sense strand
aaaguguacaggauuguuc

SEQ ID NO: 1829470 - RNA, 19 nt, Homo sapiens
  misc_RNA (1)...(19): siRNA sense strand
ggcggagaguucggcauga

SEQ ID NO: 1829471 - RNA, 19 nt, Homo sapiens
  misc_RNA (1)...(19): siRNA sense strand
caggugacucuaugcuuug

SEQ ID NO: 1829472 - RNA, 19 nt, Homo sapiens
  misc_RNA (1)...(19): siRNA sense strand
cuugggcacuguuuaaagg

SEQ ID NO: 1829473 - RNA, 19 nt, Homo sapiens
  misc_RNA (1)...(19): siRNA sense strand
gaagcuggagggacuacgu

SEQ ID NO: 1829474 - RNA, 19 nt, Homo sapiens
  misc_RNA (1)...(19): siRNA sense strand
gaagaaggauggugcagaa

SEQ ID NO: 1829475 - RNA, 19 nt, Homo sapiens
  misc_RNA (1)...(19): siRNA sense strand
ggagaugacugguguauca

SEQ ID NO: 1829476 - RNA, 19 nt, Homo sapiens
  misc_RNA (1)...(19): siRNA sense strand
gaaggauggugcagaaauu

SEQ ID NO: 1829477 - RNA, 19 nt, Homo sapiens
  misc_RNA (1)...(19): siRNA sense strand
cauagaaccuccaaagauu

SEQ ID NO: 1829478 - RNA, 19 nt, Homo sapiens
  misc_RNA (1)...(19): siRNA sense strand
uaagagagccuccaauuau

SEQ ID NO: 1829479 - RNA, 19 nt, Homo sapiens
  misc_RNA (1)...(19): siRNA sense strand
gugcagaaauugauaagaa

SEQ ID NO: 1829480 - RNA, 19 nt, Homo sapiens
  misc_RNA (1)...(19): siRNA sense strand
aaacacaucuugaucauag

SEQ ID NO: 1829481 - RNA, 19 nt, Homo sapiens
  misc_RNA (1)...(19): siRNA sense strand
gaauuagaguugaggguaa

SEQ ID NO: 1829482 - RNA, 19 nt, Homo sapiens
  misc_RNA (1)...(19): siRNA sense strand
acaaagaucugauugacaa

SEQ ID NO: 1829483 - RNA, 19 nt, Homo sapiens
  misc_RNA (1)...(19): siRNA sense strand
gaaaguuggugaagauauc

SEQ ID NO: 1829484 - RNA, 19 nt, Homo sapiens
  misc_RNA (1)...(19): siRNA sense strand
ccaaacagcuggaagauac

SEQ ID NO: 1829485 - RNA, 19 nt, Homo sapiens
  misc_RNA (1)...(19): siRNA sense strand
guaagagagccuccaauua

SEQ ID NO: 1829486 - RNA, 19 nt, Homo sapiens
  misc_RNA (1)...(19): siRNA sense strand
ggaaggcaguggccggaua

SEQ ID NO: 1829487 - RNA, 19 nt, Homo sapiens
  misc_RNA (1)...(19): siRNA sense strand
uaagaauggugaagagauu

SEQ ID NO: 1829488 - RNA, 19 nt, Homo sapiens
  misc_RNA (1)...(19): siRNA sense strand
caucagaucugcuuucaag

SEQ ID NO: 1829489 - RNA, 19 nt, Homo sapiens
  misc_RNA (1)...(19): siRNA sense strand
ugauauagcugaaagagau

SEQ ID NO: 1829490 - RNA, 19 nt, Homo sapiens
  misc_RNA (1)...(19): siRNA sense strand
gcagcacucuggucauuga

SEQ ID NO: 1829491 - RNA, 19 nt, Homo sapiens
  misc_RNA (1)...(19): siRNA sense strand
aaagaaaucugccugaagu

SEQ ID NO: 1829492 - RNA, 19 nt, Homo sapiens
  misc_RNA (1)...(19): siRNA sense strand
ucaaaugguucaaaggaaa

SEQ ID NO: 1829493 - RNA, 19 nt, Homo sapiens
  misc_RNA (1)...(19): siRNA sense strand
gcuaugugcuagaguauug

SEQ ID NO: 1829494 - RNA, 19 nt, Homo sapiens
  misc_RNA (1)...(19): siRNA sense strand
ugacagaggugggagauga

SEQ ID NO: 1829495 - RNA, 19 nt, Homo sapiens
  misc_RNA (1)...(19): siRNA sense strand
ggaggacaaucaucugcua

SEQ ID NO: 1829496 - RNA, 19 nt, Homo sapiens
  misc_RNA (1)...(19): siRNA sense strand
caggagaacuugacuuuag

SEQ ID NO: 1829497 - RNA, 19 nt, Homo sapiens
  misc_RNA (1)...(19): siRNA sense strand
ccugaugccuacaauguua

SEQ ID NO: 1829498 - RNA, 19 nt, Homo sapiens
  misc_RNA (1)...(19): siRNA sense strand
ccacugagcucuucguaag

SEQ ID NO: 1829499 - RNA, 19 nt, Homo sapiens
  misc_RNA (1)...(19): siRNA sense strand
ccaaugcccucacugaaga

SEQ ID NO: 1829500 - RNA, 19 nt, Homo sapiens
  misc_RNA (1)...(19): siRNA sense strand
caagagaaguggagaaggu

SEQ ID NO: 1829501 - RNA, 19 nt, Homo sapiens
  misc_RNA (1)...(19): siRNA sense strand
gcacucuggucauugauau

SEQ ID NO: 1829502 - RNA, 19 nt, Homo sapiens
  misc_RNA (1)...(19): siRNA sense strand
ggagagaguggaauuagaa

SEQ ID NO: 1829503 - RNA, 19 nt, Homo sapiens
  misc_RNA (1)...(19): siRNA sense strand
ggacuacuccaaacauuga

SEQ ID NO: 1829504 - RNA, 19 nt, Homo sapiens
  misc_RNA (1)...(19): siRNA sense strand
agaugaaggugauuaugua

SEQ ID NO: 1829505 - RNA, 19 nt, Homo sapiens
  misc_RNA (1)...(19): siRNA sense strand
gaagaugaugccaauguaa

SEQ ID NO: 1829506 - RNA, 19 nt, Homo sapiens
  misc_RNA (1)...(19): siRNA sense strand
ugaagaugaugccaaugua

SEQ ID NO: 1829507 - RNA, 19 nt, Homo sapiens
  misc_RNA (1)...(19): siRNA sense strand
acaaucaucugcuaaacuu

SEQ ID NO: 1829508 - RNA, 19 nt, Homo sapiens
  misc_RNA (1)...(19): siRNA sense strand
gaagauacaacugcuuauu

SEQ ID NO: 1829509 - RNA, 19 nt, Homo sapiens
  misc_RNA (1)...(19): siRNA sense strand
gaaauaugaucugcaaguc

SEQ ID NO: 1829510 - RNA, 19 nt, Homo sapiens
  misc_RNA (1)...(19): siRNA sense strand
gaacaagccaagcagaaug

SEQ ID NO: 1829511 - RNA, 19 nt, Homo sapiens
  misc_RNA (1)...(19): siRNA sense strand
caagaaauucgacccagua

SEQ ID NO: 1829512 - RNA, 19 nt, Homo sapiens
  misc_RNA (1)...(19): siRNA sense strand
ggauggaccuggccagcaa

SEQ ID NO: 1829513 - RNA, 19 nt, Homo sapiens
  misc_RNA (1)...(19): siRNA sense strand
uuacugucauugagcauua

SEQ ID NO: 1829514 - RNA, 19 nt, Homo sapiens
  misc_RNA (1)...(19): siRNA sense strand
gcuagaguauugcuuugaa

SEQ ID NO: 1829515 - RNA, 19 nt, Homo sapiens
  misc_RNA (1)...(19): siRNA sense strand
gcagaauauucaguaauga

SEQ ID NO: 1829516 - RNA, 19 nt, Homo sapiens
  misc_RNA (1)...(19): siRNA sense strand
cagagaauccuguuuauca

SEQ ID NO: 1829517 - RNA, 19 nt, Homo sapiens
  misc_RNA (1)...(19): siRNA sense strand
ucaagaggaugcaggagaa

SEQ ID NO: 1829518 - RNA, 19 nt, Homo sapiens
  misc_RNA (1)...(19): siRNA sense strand
gcuggcagauccaaaguug

SEQ ID NO: 1829519 - RNA, 19 nt, Homo sapiens
  misc_RNA (1)...(19): siRNA sense strand
caaaguugcuauuguggau

SEQ ID NO: 1829520 - RNA, 19 nt, Homo sapiens
  misc_RNA (1)...(19): siRNA sense strand
ugccauagcugguuacaau

SEQ ID NO: 1829521 - RNA, 19 nt, Homo sapiens
  misc_RNA (1)...(19): siRNA sense strand
caagacaccugaagcaaac

SEQ ID NO: 1829522 - RNA, 19 nt, Homo sapiens
  misc_RNA (1)...(19): siRNA sense strand
gaagaaccaaguaaagaga

SEQ ID NO: 1829523 - RNA, 19 nt, Homo sapiens
  misc_RNA (1)...(19): siRNA sense strand
gcaucaagguuaaaguugu

SEQ ID NO: 1829524 - RNA, 19 nt, Homo sapiens
  misc_RNA (1)...(19): siRNA sense strand
ugacagugauugcaggaaa

SEQ ID NO: 1829525 - RNA, 19 nt, Homo sapiens
  misc_RNA (1)...(19): siRNA sense strand
gacagaugauucagaguau

SEQ ID NO: 1829526 - RNA, 19 nt, Homo sapiens
  misc_RNA (1)...(19): siRNA sense strand
gauacaggauguucagcaa

SEQ ID NO: 1829527 - RNA, 19 nt, Homo sapiens
  misc_RNA (1)...(19): siRNA sense strand
ggaaauaugaucugcaagu

SEQ ID NO: 1829528 - RNA, 19 nt, Homo sapiens
  misc_RNA (1)...(19): siRNA sense strand
gagccacucugggaaauau

SEQ ID NO: 1829529 - RNA, 19 nt, Homo sapiens
  misc_RNA (1)...(19): siRNA sense strand
gaccagaauuaacuuggaa

SEQ ID NO: 1829530 - RNA, 19 nt, Homo sapiens
  misc_RNA (1)...(19): siRNA sense strand
gggaaggauccacaaguua

SEQ ID NO: 1829531 - RNA, 19 nt, Homo sapiens
  misc_RNA (1)...(19): siRNA sense strand
ugacaccucugacugauca

SEQ ID NO: 1829532 - RNA, 19 nt, Homo sapiens
  misc_RNA (1)...(19): siRNA sense strand
cagaugauucagaguauua

SEQ ID NO: 1829533 - RNA, 19 nt, Homo sapiens
  misc_RNA (1)...(19): siRNA sense strand
ugacagaugauucagagua

SEQ ID NO: 1829534 - RNA, 19 nt, Homo sapiens
  misc_RNA (1)...(19): siRNA sense strand
gaucagacuguaaaucuug

SEQ ID NO: 1829535 - RNA, 19 nt, Homo sapiens
  misc_RNA (1)...(19): siRNA sense strand
gaggugaaaugguauaaaa

SEQ ID NO: 1829536 - RNA, 19 nt, Homo sapiens
  misc_RNA (1)...(19): siRNA sense strand
gaagcugucaaucugguua

SEQ ID NO: 1829537 - RNA, 19 nt, Homo sapiens
  misc_RNA (1)...(19): siRNA sense strand
gcaaacaaagaucugauug

SEQ ID NO: 1829538 - RNA, 19 nt, Homo sapiens
  misc_RNA (1)...(19): siRNA sense strand
gaaauucgacccaguacca

SEQ ID NO: 1829539 - RNA, 19 nt, Homo sapiens
  misc_RNA (1)...(19): siRNA sense strand
gacagccggugaugagaaa

SEQ ID NO: 1829540 - RNA, 19 nt, Homo sapiens
  misc_RNA (1)...(19): siRNA sense strand
cacaaaggaugccagagaa

SEQ ID NO: 1829541 - RNA, 19 nt, Homo sapiens
  misc_RNA (1)...(19): siRNA sense strand
ggaggaacagugaaaguug

SEQ ID NO: 1829542 - RNA, 19 nt, Homo sapiens
  misc_RNA (1)...(19): siRNA sense strand
uaaagagagugcagugauc

SEQ ID NO: 1829543 - RNA, 19 nt, Homo sapiens
  misc_RNA (1)...(19): siRNA sense strand
gaagagcauggaaugguuu

SEQ ID NO: 1829544 - RNA, 19 nt, Homo sapiens
  misc_RNA (1)...(19): siRNA sense strand
ccagcgagcccaaguacua

SEQ ID NO: 1829545 - RNA, 19 nt, Homo sapiens
  misc_RNA (1)...(19): siRNA sense strand
gccaacagaugcaaagauc

SEQ ID NO: 1829546 - RNA, 19 nt, Homo sapiens
  misc_RNA (1)...(19): siRNA sense strand
ggaugaggcugaauuuuga

SEQ ID NO: 1829547 - RNA, 19 nt, Homo sapiens
  misc_RNA (1)...(19): siRNA sense strand
ugccaaaguucauguuauu

SEQ ID NO: 1829548 - RNA, 19 nt, Homo sapiens
  misc_RNA (1)...(19): siRNA sense strand
gaaggugauuauguauuug

SEQ ID NO: 1829549 - RNA, 19 nt, Homo sapiens
  misc_RNA (1)...(19): siRNA sense strand
ggaaggauccacaaguuag

SEQ ID NO: 1829550 - RNA, 19 nt, Homo sapiens
  misc_RNA (1)...(19): siRNA sense strand
gaaaagaaaucugccugaa

SEQ ID NO: 1829551 - RNA, 19 nt, Homo sapiens
  misc_RNA (1)...(19): siRNA sense strand
gaucauagagggagcaaca

SEQ ID NO: 1829552 - RNA, 19 nt, Homo sapiens
  misc_RNA (1)...(19): siRNA sense strand
gggagagaguggaauuaga

SEQ ID NO: 1829553 - RNA, 19 nt, Homo sapiens
  misc_RNA (1)...(19): siRNA sense strand
uuugacagcuguucauuug

SEQ ID NO: 1829554 - RNA, 19 nt, Homo sapiens
  misc_RNA (1)...(19): siRNA sense strand
uuacucagccuuugguuaa

SEQ ID NO: 1829555 - RNA, 19 nt, Homo sapiens
  misc_RNA (1)...(19): siRNA sense strand
ucaaucugguuauaccuuu

SEQ ID NO: 1829556 - RNA, 19 nt, Homo sapiens
  misc_RNA (1)...(19): siRNA sense strand
caaacaaagaucugauuga

SEQ ID NO: 1829557 - RNA, 19 nt, Homo sapiens
  misc_RNA (1)...(19): siRNA sense strand
gaguauugcuuugaaggaa

SEQ ID NO: 1829558 - RNA, 19 nt, Homo sapiens
  misc_RNA (1)...(19): siRNA sense strand
gaaggcaguggccggauaa

SEQ ID NO: 1829559 - RNA, 19 nt, Homo sapiens
  misc_RNA (1)...(19): siRNA sense strand
ugacagcuguucauuugau

SEQ ID NO: 1829560 - RNA, 19 nt, Homo sapiens
  misc_RNA (1)...(19): siRNA sense strand
uaugggaguugcugaagaa

SEQ ID NO: 1829561 - RNA, 19 nt, Homo sapiens
  misc_RNA (1)...(19): siRNA sense strand
ccaaaguucauguuauuga

SEQ ID NO: 1829562 - RNA, 19 nt, Homo sapiens
  misc_RNA (1)...(19): siRNA sense strand
gaaggaggccggaacuaca

SEQ ID NO: 1829563 - RNA, 19 nt, Homo sapiens
  misc_RNA (1)...(19): siRNA sense strand
uaaacuuaguguugacuug

SEQ ID NO: 1829564 - RNA, 19 nt, Homo sapiens
  misc_RNA (1)...(19): siRNA sense strand
gagaguggaauuagaaugu

SEQ ID NO: 1829565 - RNA, 19 nt, Homo sapiens
  misc_RNA (1)...(19): siRNA sense strand
gcaggagaacuugacuuua

SEQ ID NO: 1829566 - RNA, 19 nt, Homo sapiens
  misc_RNA (1)...(19): siRNA sense strand
guaugaagacuuugauuuc

SEQ ID NO: 1829567 - RNA, 19 nt, Homo sapiens
  misc_RNA (1)...(19): siRNA sense strand
aauaugaucugcaagucaa

SEQ ID NO: 1829568 - RNA, 19 nt, Homo sapiens
  misc_RNA (1)...(19): siRNA sense strand
cuggauaguugcaaacaaa

SEQ ID NO: 1829569 - RNA, 19 nt, Homo sapiens
  misc_RNA (1)...(19): siRNA sense strand
uagcagcacucuggucauu

SEQ ID NO: 1829570 - RNA, 19 nt, Homo sapiens
  misc_RNA (1)...(19): siRNA sense strand
aucaauaacugucagauga

SEQ ID NO: 1829571 - RNA, 19 nt, Homo sapiens
  misc_RNA (1)...(19): siRNA sense strand
aaaccaagaccagaauuaa

SEQ ID NO: 1829572 - RNA, 19 nt, Homo sapiens
  misc_RNA (1)...(19): siRNA sense strand
aaacauguguggccucagu

SEQ ID NO: 1829573 - RNA, 19 nt, Homo sapiens
  misc_RNA (1)...(19): siRNA sense strand
agaauuaacuuggaagaag

SEQ ID NO: 1829574 - RNA, 19 nt, Homo sapiens
  misc_RNA (1)...(19): siRNA sense strand
ggaagcaacugucgagauu

SEQ ID NO: 1829575 - RNA, 19 nt, Homo sapiens
  misc_RNA (1)...(19): siRNA sense strand
gaaaggauaccgcaaguuu

SEQ ID NO: 1829576 - RNA, 19 nt, Homo sapiens
  misc_RNA (1)...(19): siRNA sense strand
gaacaucgguacuggaguu

SEQ ID NO: 1829577 - RNA, 19 nt, Homo sapiens
  misc_RNA (1)...(19): siRNA sense strand
ggaagugggugucgaagaa

SEQ ID NO: 1829578 - RNA, 19 nt, Homo sapiens
  misc_RNA (1)...(19): siRNA sense strand
ccaguaagcucaccuuugu

SEQ ID NO: 1829579 - RNA, 19 nt, Homo sapiens
  misc_RNA (1)...(19): siRNA sense strand
ggacuccucuucuacauca

SEQ ID NO: 1829580 - RNA, 19 nt, Homo sapiens
  misc_RNA (1)...(19): siRNA sense strand
caacuuggcugaccauugg

SEQ ID NO: 1829581 - RNA, 19 nt, Homo sapiens
  misc_RNA (1)...(19): siRNA sense strand
gaacuuaccugagauuucg

SEQ ID NO: 1829582 - RNA, 19 nt, Homo sapiens
  misc_RNA (1)...(19): siRNA sense strand
gcuaaugccugccuucaga

SEQ ID NO: 1829583 - RNA, 19 nt, Homo sapiens
  misc_RNA (1)...(19): siRNA sense strand
gaagaugaggccagaaauu

SEQ ID NO: 1829584 - RNA, 19 nt, Homo sapiens
  misc_RNA (1)...(19): siRNA sense strand
gagcagaagugcccaccaa

SEQ ID NO: 1829585 - RNA, 19 nt, Homo sapiens
  misc_RNA (1)...(19): siRNA sense strand
gggagacgcucaaguaucu

SEQ ID NO: 1829586 - RNA, 19 nt, Homo sapiens
  misc_RNA (1)...(19): siRNA sense strand
gaggaaagcugaggauuuu

SEQ ID NO: 1829587 - RNA, 19 nt, Homo sapiens
  misc_RNA (1)...(19): siRNA sense strand
ccugagaacuuaccugaga

SEQ ID NO: 1829588 - RNA, 19 nt, Homo sapiens
  misc_RNA (1)...(19): siRNA sense strand
ccaccucaccugcagauua

SEQ ID NO: 1829589 - RNA, 19 nt, Homo sapiens
  misc_RNA (1)...(19): siRNA sense strand
gaggaaagaauuugaggaa

SEQ ID NO: 1829590 - RNA, 19 nt, Homo sapiens
  misc_RNA (1)...(19): siRNA sense strand
gaucuugggucugaggaaa

SEQ ID NO: 1829591 - RNA, 19 nt, Homo sapiens
  misc_RNA (1)...(19): siRNA sense strand
caccgacccugagaacuua

SEQ ID NO: 1829592 - RNA, 19 nt, Homo sapiens
  misc_RNA (1)...(19): siRNA sense strand
gagauuucgucacagaaga

SEQ ID NO: 1829593 - RNA, 19 nt, Homo sapiens
  misc_RNA (1)...(19): siRNA sense strand
gugcccauguucaucaaua

SEQ ID NO: 1829594 - RNA, 19 nt, Homo sapiens
  misc_RNA (1)...(19): siRNA sense strand
gggacaagauggagagcuu

SEQ ID NO: 1829595 - RNA, 19 nt, Homo sapiens
  misc_RNA (1)...(19): siRNA sense strand
ggagacuuguuaccagaug

SEQ ID NO: 1829596 - RNA, 19 nt, Homo sapiens
  misc_RNA (1)...(19): siRNA sense strand
ugaggaaagcugaggauuu

SEQ ID NO: 1829597 - RNA, 19 nt, Homo sapiens
  misc_RNA (1)...(19): siRNA sense strand
caucaacaauguccaggau

SEQ ID NO: 1829598 - RNA, 19 nt, Homo sapiens
  misc_RNA (1)...(19): siRNA sense strand
cagaacaccauccaagauu

SEQ ID NO: 1829599 - RNA, 19 nt, Homo sapiens
  misc_RNA (1)...(19): siRNA sense strand
cauccaagauuccuuacuc

SEQ ID NO: 1829600 - RNA, 19 nt, Homo sapiens
  misc_RNA (1)...(19): siRNA sense strand
cagaagaugaggccagaaa

SEQ ID NO: 1829601 - RNA, 19 nt, Homo sapiens
  misc_RNA (1)...(19): siRNA sense strand
gcuggaagacuacguggaa

SEQ ID NO: 1829602 - RNA, 19 nt, Homo sapiens
  misc_RNA (1)...(19): siRNA sense strand
uaccugagauuucgucaca

SEQ ID NO: 1829603 - RNA, 19 nt, Homo sapiens
  misc_RNA (1)...(19): siRNA sense strand
gggagauucugcagagcuu

SEQ ID NO: 1829604 - RNA, 19 nt, Homo sapiens
  misc_RNA (1)...(19): siRNA sense strand
gaggaagagcagaagauga

SEQ ID NO: 1829605 - RNA, 19 nt, Homo sapiens
  misc_RNA (1)...(19): siRNA sense strand
gagacuuguuaccagauga

SEQ ID NO: 1829606 - RNA, 19 nt, Homo sapiens
  misc_RNA (1)...(19): siRNA sense strand
gccgacagcuacuaugagu

SEQ ID NO: 1829607 - RNA, 19 nt, Homo sapiens
  misc_RNA (1)...(19): siRNA sense strand
caccucaccugcagauuag

SEQ ID NO: 1829608 - RNA, 19 nt, Homo sapiens
  misc_RNA (1)...(19): siRNA sense strand
ccugagauuucgucacaga

SEQ ID NO: 1829609 - RNA, 19 nt, Homo sapiens
  misc_RNA (1)...(19): siRNA sense strand
gcacauccacggccugucu

SEQ ID NO: 1829610 - RNA, 19 nt, Homo sapiens
  misc_RNA (1)...(19): siRNA sense strand
gggcgugauugacgucuuc

SEQ ID NO: 1829611 - RNA, 19 nt, Homo sapiens
  misc_RNA (1)...(19): siRNA sense strand
ggcgagagcuaugacaaca

SEQ ID NO: 1829612 - RNA, 19 nt, Homo sapiens
  misc_RNA (1)...(19): siRNA sense strand
ucuguggacuccucuucua

SEQ ID NO: 1829613 - RNA, 19 nt, Homo sapiens
  misc_RNA (1)...(19): siRNA sense strand
caccauccaagauuccuua

SEQ ID NO: 1829614 - RNA, 19 nt, Homo sapiens
  misc_RNA (1)...(19): siRNA sense strand
gaagacacaaagacacauc

SEQ ID NO: 1829615 - RNA, 19 nt, Homo sapiens
  misc_RNA (1)...(19): siRNA sense strand
agaaauugcuggguuaaaa

SEQ ID NO: 1829616 - RNA, 19 nt, Homo sapiens
  misc_RNA (1)...(19): siRNA sense strand
gcaagaagccccuguggau

SEQ ID NO: 1829617 - RNA, 19 nt, Homo sapiens
  misc_RNA (1)...(19): siRNA sense strand
agaacaccauccaagauuc

SEQ ID NO: 1829618 - RNA, 19 nt, Homo sapiens
  misc_RNA (1)...(19): siRNA sense strand
gccagaagggcgugauuga

SEQ ID NO: 1829619 - RNA, 19 nt, Homo sapiens
  misc_RNA (1)...(19): siRNA sense strand
cuccuugccuuucugcuuu

SEQ ID NO: 1829620 - RNA, 19 nt, Homo sapiens
  misc_RNA (1)...(19): siRNA sense strand
gaucgugcacuucaaccuu

SEQ ID NO: 1829621 - RNA, 19 nt, Homo sapiens
  misc_RNA (1)...(19): siRNA sense strand
aagaugaggccagaaauug

SEQ ID NO: 1829622 - RNA, 19 nt, Homo sapiens
  misc_RNA (1)...(19): siRNA sense strand
caccagugcaucugaacua

SEQ ID NO: 1829623 - RNA, 19 nt, Homo sapiens
  misc_RNA (1)...(19): siRNA sense strand
gggccgacagcuacuauga

SEQ ID NO: 1829624 - RNA, 19 nt, Homo sapiens
  misc_RNA (1)...(19): siRNA sense strand
ggaaaggauaccgcaaguu

SEQ ID NO: 1829625 - RNA, 19 nt, Homo sapiens
  misc_RNA (1)...(19): siRNA sense strand
ggacaccgacccugagaac

SEQ ID NO: 1829626 - RNA, 19 nt, Homo sapiens
  misc_RNA (1)...(19): siRNA sense strand
guucaucaauacccacagu

SEQ ID NO: 1829627 - RNA, 19 nt, Homo sapiens
  misc_RNA (1)...(19): siRNA sense strand
gagaacuuaccugagauuu

SEQ ID NO: 1829628 - RNA, 19 nt, Homo sapiens
  misc_RNA (1)...(19): siRNA sense strand
ccgcuucagugccaagaug

SEQ ID NO: 1829629 - RNA, 19 nt, Homo sapiens
  misc_RNA (1)...(19): siRNA sense strand
acaccgacccugagaacuu

SEQ ID NO: 1829630 - RNA, 19 nt, Homo sapiens
  misc_RNA (1)...(19): siRNA sense strand
gcuauucuuccaucaacaa

SEQ ID NO: 1829631 - RNA, 19 nt, Homo sapiens
  misc_RNA (1)...(19): siRNA sense strand
gagcuucagccgauucaca

SEQ ID NO: 1829632 - RNA, 19 nt, Homo sapiens
  misc_RNA (1)...(19): siRNA sense strand
cgagauugcagcggaauau

SEQ ID NO: 1829633 - RNA, 19 nt, Homo sapiens
  misc_RNA (1)...(19): siRNA sense strand
cagaagacacaaagacaca

SEQ ID NO: 1829634 - RNA, 19 nt, Homo sapiens
  misc_RNA (1)...(19): siRNA sense strand
gcgggaagcaggagacaca

SEQ ID NO: 1829635 - RNA, 19 nt, Homo sapiens
  misc_RNA (1)...(19): siRNA sense strand
gaaggugacacagcacauc

SEQ ID NO: 1829636 - RNA, 19 nt, Homo sapiens
  misc_RNA (1)...(19): siRNA sense strand
ucagaacaccauccaagau

SEQ ID NO: 1829637 - RNA, 19 nt, Homo sapiens
  misc_RNA (1)...(19): siRNA sense strand
cagcaaauccacccgucuu

SEQ ID NO: 1829638 - RNA, 19 nt, Homo sapiens
  misc_RNA (1)...(19): siRNA sense strand
ggucugaggaaagaauuug

SEQ ID NO: 1829639 - RNA, 19 nt, Homo sapiens
  misc_RNA (1)...(19): siRNA sense strand
gaagcaacugucgagauug

SEQ ID NO: 1829640 - RNA, 19 nt, Homo sapiens
  misc_RNA (1)...(19): siRNA sense strand
gucccgagaucgugcacuu

SEQ ID NO: 1829641 - RNA, 19 nt, Homo sapiens
  misc_RNA (1)...(19): siRNA sense strand
uaugacaacagcaagaguu

SEQ ID NO: 1829642 - RNA, 19 nt, Homo sapiens
  misc_RNA (1)...(19): siRNA sense strand
uggaaaggauaccgcaagu

SEQ ID NO: 1829643 - RNA, 19 nt, Homo sapiens
  misc_RNA (1)...(19): siRNA sense strand
gauugcagcggaauaugau

SEQ ID NO: 1829644 - RNA, 19 nt, Homo sapiens
  misc_RNA (1)...(19): siRNA sense strand
cagugcaucugaacuaucg

SEQ ID NO: 1829645 - RNA, 19 nt, Homo sapiens
  misc_RNA (1)...(19): siRNA sense strand
gcagagcuucagccgauuc

SEQ ID NO: 1829646 - RNA, 19 nt, Homo sapiens
  misc_RNA (1)...(19): siRNA sense strand
gcaaauccacccgucuuac

SEQ ID NO: 1829647 - RNA, 19 nt, Homo sapiens
  misc_RNA (1)...(19): siRNA sense strand
auucuuccaucaacaaugu

SEQ ID NO: 1829648 - RNA, 19 nt, Homo sapiens
  misc_RNA (1)...(19): siRNA sense strand
ccaggaagugggugucgaa

SEQ ID NO: 1829649 - RNA, 19 nt, Homo sapiens
  misc_RNA (1)...(19): siRNA sense strand
aaaggauaccgcaaguuug

SEQ ID NO: 1829650 - RNA, 19 nt, Homo sapiens
  misc_RNA (1)...(19): siRNA sense strand
ucacagaagacacaaagac

SEQ ID NO: 1829651 - RNA, 19 nt, Homo sapiens
  misc_RNA (1)...(19): siRNA sense strand
uaucuguucuugcucuucu

SEQ ID NO: 1829652 - RNA, 19 nt, Homo sapiens
  misc_RNA (1)...(19): siRNA sense strand
guccuucagugagugguuu

SEQ ID NO: 1829653 - RNA, 19 nt, Homo sapiens
  misc_RNA (1)...(19): siRNA sense strand
cugcaugcauggaaaggau

SEQ ID NO: 1829654 - RNA, 19 nt, Homo sapiens
  misc_RNA (1)...(19): siRNA sense strand
cuuaccagcuccucagaag

SEQ ID NO: 1829655 - RNA, 19 nt, Homo sapiens
  misc_RNA (1)...(19): siRNA sense strand
ucaacuuggcugaccauug

SEQ ID NO: 1829656 - RNA, 19 nt, Homo sapiens
  misc_RNA (1)...(19): siRNA sense strand
gagauucugcagagcuuca

SEQ ID NO: 1829657 - RNA, 19 nt, Homo sapiens
  misc_RNA (1)...(19): siRNA sense strand
ucgugcacuucaaccuuua

SEQ ID NO: 1829658 - RNA, 19 nt, Homo sapiens
  misc_RNA (1)...(19): siRNA sense strand
ugagaacuuaccugagauu

SEQ ID NO: 1829659 - RNA, 19 nt, Homo sapiens
  misc_RNA (1)...(19): siRNA sense strand
agauugcagcggaauauga

SEQ ID NO: 1829660 - RNA, 19 nt, Homo sapiens
  misc_RNA (1)...(19): siRNA sense strand
gagcucauggagacuuguu

SEQ ID NO: 1829661 - RNA, 19 nt, Homo sapiens
  misc_RNA (1)...(19): siRNA sense strand
gaacaccauccaagauucc

SEQ ID NO: 1829662 - RNA, 19 nt, Homo sapiens
  misc_RNA (1)...(19): siRNA sense strand
ggacaccauguggaucuug

SEQ ID NO: 1829663 - RNA, 19 nt, Homo sapiens
  misc_RNA (1)...(19): siRNA sense strand
cagaaauugcuggguuaaa

SEQ ID NO: 1829664 - RNA, 19 nt, Homo sapiens
  misc_RNA (1)...(19): siRNA sense strand
gagacgcucaaguaucugu

SEQ ID NO: 1829665 - RNA, 19 nt, Homo sapiens
  misc_RNA (1)...(19): siRNA sense strand
cacagaagacacaaagaca

SEQ ID NO: 1829666 - RNA, 19 nt, Homo sapiens
  misc_RNA (1)...(19): siRNA sense strand
uagaggaagagcagaagau

SEQ ID NO: 1829667 - RNA, 19 nt, Homo sapiens
  misc_RNA (1)...(19): siRNA sense strand
guggacuccucuucuacau

SEQ ID NO: 1829668 - RNA, 19 nt, Homo sapiens
  misc_RNA (1)...(19): siRNA sense strand
ggaagcaacugucgagauu

SEQ ID NO: 1829669 - RNA, 19 nt, Homo sapiens
  misc_RNA (1)...(19): siRNA sense strand
gaaaggauaccgcaaguuu

SEQ ID NO: 1829670 - RNA, 19 nt, Homo sapiens
  misc_RNA (1)...(19): siRNA sense strand
gaacaucgguacuggaguu

SEQ ID NO: 1829671 - RNA, 19 nt, Homo sapiens
  misc_RNA (1)...(19): siRNA sense strand
ggaagugggugucgaagaa

SEQ ID NO: 1829672 - RNA, 19 nt, Homo sapiens
  misc_RNA (1)...(19): siRNA sense strand
ccaguaagcucaccuuugu

SEQ ID NO: 1829673 - RNA, 19 nt, Homo sapiens
  misc_RNA (1)...(19): siRNA sense strand
ggacuccucuucuacauca

SEQ ID NO: 1829674 - RNA, 19 nt, Homo sapiens
  misc_RNA (1)...(19): siRNA sense strand
caacuuggcugaccauugg

SEQ ID NO: 1829675 - RNA, 19 nt, Homo sapiens
  misc_RNA (1)...(19): siRNA sense strand
gaacuuaccugagauuucg

SEQ ID NO: 1829676 - RNA, 19 nt, Homo sapiens
  misc_RNA (1)...(19): siRNA sense strand
gcuaaugccugccuucaga

SEQ ID NO: 1829677 - RNA, 19 nt, Homo sapiens
  misc_RNA (1)...(19): siRNA sense strand
gaagaugaggccagaaauu

SEQ ID NO: 1829678 - RNA, 19 nt, Homo sapiens
  misc_RNA (1)...(19): siRNA sense strand
gagcagaagugcccaccaa

SEQ ID NO: 1829679 - RNA, 19 nt, Homo sapiens
  misc_RNA (1)...(19): siRNA sense strand
gggagacgcucaaguaucu

SEQ ID NO: 1829680 - RNA, 19 nt, Homo sapiens
  misc_RNA (1)...(19): siRNA sense strand
gaggaaagcugaggauuuu

SEQ ID NO: 1829681 - RNA, 19 nt, Homo sapiens
  misc_RNA (1)...(19): siRNA sense strand
ccugagaacuuaccugaga

SEQ ID NO: 1829682 - RNA, 19 nt, Homo sapiens
  misc_RNA (1)...(19): siRNA sense strand
ccaccucaccugcagauua

SEQ ID NO: 1829683 - RNA, 19 nt, Homo sapiens
  misc_RNA (1)...(19): siRNA sense strand
gaggaaagaauuugaggaa

SEQ ID NO: 1829684 - RNA, 19 nt, Homo sapiens
  misc_RNA (1)...(19): siRNA sense strand
gaucuugggucugaggaaa

SEQ ID NO: 1829685 - RNA, 19 nt, Homo sapiens
  misc_RNA (1)...(19): siRNA sense strand
caccgacccugagaacuua

SEQ ID NO: 1829686 - RNA, 19 nt, Homo sapiens
  misc_RNA (1)...(19): siRNA sense strand
gagauuucgucacagaaga

SEQ ID NO: 1829687 - RNA, 19 nt, Homo sapiens
  misc_RNA (1)...(19): siRNA sense strand
gugcccauguucaucaaua

SEQ ID NO: 1829688 - RNA, 19 nt, Homo sapiens
  misc_RNA (1)...(19): siRNA sense strand
gggacaagauggagagcuu

SEQ ID NO: 1829689 - RNA, 19 nt, Homo sapiens
  misc_RNA (1)...(19): siRNA sense strand
ggagacuuguuaccagaug

SEQ ID NO: 1829690 - RNA, 19 nt, Homo sapiens
  misc_RNA (1)...(19): siRNA sense strand
ugaggaaagcugaggauuu

SEQ ID NO: 1829691 - RNA, 19 nt, Homo sapiens
  misc_RNA (1)...(19): siRNA sense strand
caucaacaauguccaggau

SEQ ID NO: 1829692 - RNA, 19 nt, Homo sapiens
  misc_RNA (1)...(19): siRNA sense strand
ccaccacuguagucaugua

SEQ ID NO: 1829693 - RNA, 19 nt, Homo sapiens
  misc_RNA (1)...(19): siRNA sense strand
cagaacaccauccaagauu

SEQ ID NO: 1829694 - RNA, 19 nt, Homo sapiens
  misc_RNA (1)...(19): siRNA sense strand
cauccaagauuccuuacuc

SEQ ID NO: 1829695 - RNA, 19 nt, Homo sapiens
  misc_RNA (1)...(19): siRNA sense strand
cagaagaugaggccagaaa

SEQ ID NO: 1829696 - RNA, 19 nt, Homo sapiens
  misc_RNA (1)...(19): siRNA sense strand
gcuggaagacuacguggaa

SEQ ID NO: 1829697 - RNA, 19 nt, Homo sapiens
  misc_RNA (1)...(19): siRNA sense strand
uaccugagauuucgucaca

SEQ ID NO: 1829698 - RNA, 19 nt, Homo sapiens
  misc_RNA (1)...(19): siRNA sense strand
gggagauucugcagagcuu

SEQ ID NO: 1829699 - RNA, 19 nt, Homo sapiens
  misc_RNA (1)...(19): siRNA sense strand
gaggaagagcagaagauga

SEQ ID NO: 1829700 - RNA, 19 nt, Homo sapiens
  misc_RNA (1)...(19): siRNA sense strand
gagacuuguuaccagauga

SEQ ID NO: 1829701 - RNA, 19 nt, Homo sapiens
  misc_RNA (1)...(19): siRNA sense strand
gccgacagcuacuaugagu

SEQ ID NO: 1829702 - RNA, 19 nt, Homo sapiens
  misc_RNA (1)...(19): siRNA sense strand
caccucaccugcagauuag

SEQ ID NO: 1829703 - RNA, 19 nt, Homo sapiens
  misc_RNA (1)...(19): siRNA sense strand
ccugagauuucgucacaga

SEQ ID NO: 1829704 - RNA, 19 nt, Homo sapiens
  misc_RNA (1)...(19): siRNA sense strand
gcacauccacggccugucu

SEQ ID NO: 1829705 - RNA, 19 nt, Homo sapiens
  misc_RNA (1)...(19): siRNA sense strand
ggcgagagcuaugacaaca

SEQ ID NO: 1829706 - RNA, 19 nt, Homo sapiens
  misc_RNA (1)...(19): siRNA sense strand
gggcgugauugacgucuuc

SEQ ID NO: 1829707 - RNA, 19 nt, Homo sapiens
  misc_RNA (1)...(19): siRNA sense strand
ucuguggacuccucuucua

SEQ ID NO: 1829708 - RNA, 19 nt, Homo sapiens
  misc_RNA (1)...(19): siRNA sense strand
caccauccaagauuccuua

SEQ ID NO: 1829709 - RNA, 19 nt, Homo sapiens
  misc_RNA (1)...(19): siRNA sense strand
gaagacacaaagacacauc

SEQ ID NO: 1829710 - RNA, 19 nt, Homo sapiens
  misc_RNA (1)...(19): siRNA sense strand
agaaauugcuggguuaaaa

SEQ ID NO: 1829711 - RNA, 19 nt, Homo sapiens
  misc_RNA (1)...(19): siRNA sense strand
gcaagaagccccuguggau

SEQ ID NO: 1829712 - RNA, 19 nt, Homo sapiens
  misc_RNA (1)...(19): siRNA sense strand
agaacaccauccaagauuc

SEQ ID NO: 1829713 - RNA, 19 nt, Homo sapiens
  misc_RNA (1)...(19): siRNA sense strand
gccagaagggcgugauuga

SEQ ID NO: 1829714 - RNA, 19 nt, Homo sapiens
  misc_RNA (1)...(19): siRNA sense strand
cuccuugccuuucugcuuu

SEQ ID NO: 1829715 - RNA, 19 nt, Homo sapiens
  misc_RNA (1)...(19): siRNA sense strand
gaucgugcacuucaaccuu

SEQ ID NO: 1829716 - RNA, 19 nt, Homo sapiens
  misc_RNA (1)...(19): siRNA sense strand
aagaugaggccagaaauug

SEQ ID NO: 1829717 - RNA, 19 nt, Homo sapiens
  misc_RNA (1)...(19): siRNA sense strand
caccagugcaucugaacua

SEQ ID NO: 1829718 - RNA, 19 nt, Homo sapiens
  misc_RNA (1)...(19): siRNA sense strand
gggccgacagcuacuauga

SEQ ID NO: 1829719 - RNA, 19 nt, Homo sapiens
  misc_RNA (1)...(19): siRNA sense strand
ggaaaggauaccgcaaguu

SEQ ID NO: 1829720 - RNA, 19 nt, Homo sapiens
  misc_RNA (1)...(19): siRNA sense strand
ggacaccgacccugagaac

SEQ ID NO: 1829721 - RNA, 19 nt, Homo sapiens
  misc_RNA (1)...(19): siRNA sense strand
guucaucaauacccacagu

SEQ ID NO: 1829722 - RNA, 19 nt, Homo sapiens
  misc_RNA (1)...(19): siRNA sense strand
gagaacuuaccugagauuu

SEQ ID NO: 1829723 - RNA, 19 nt, Homo sapiens
  misc_RNA (1)...(19): siRNA sense strand
ccgcuucagugccaagaug

SEQ ID NO: 1829724 - RNA, 19 nt, Homo sapiens
  misc_RNA (1)...(19): siRNA sense strand
cgagauugcagcggaauau

SEQ ID NO: 1829725 - RNA, 19 nt, Homo sapiens
  misc_RNA (1)...(19): siRNA sense strand
gcuauucuuccaucaacaa

SEQ ID NO: 1829726 - RNA, 19 nt, Homo sapiens
  misc_RNA (1)...(19): siRNA sense strand
gagcuucagccgauucaca

SEQ ID NO: 1829727 - RNA, 19 nt, Homo sapiens
  misc_RNA (1)...(19): siRNA sense strand
cgccaccacuguagucaug

SEQ ID NO: 1829728 - RNA, 19 nt, Homo sapiens
  misc_RNA (1)...(19): siRNA sense strand
acaccgacccugagaacuu

SEQ ID NO: 1829729 - RNA, 19 nt, Homo sapiens
  misc_RNA (1)...(19): siRNA sense strand
cagaagacacaaagacaca

SEQ ID NO: 1829730 - RNA, 19 nt, Homo sapiens
  misc_RNA (1)...(19): siRNA sense strand
gcgggaagcaggagacaca

SEQ ID NO: 1829731 - RNA, 19 nt, Homo sapiens
  misc_RNA (1)...(19): siRNA sense strand
gaaggugacacagcacauc

SEQ ID NO: 1829732 - RNA, 19 nt, Homo sapiens
  misc_RNA (1)...(19): siRNA sense strand
ucagaacaccauccaagau

SEQ ID NO: 1829733 - RNA, 19 nt, Homo sapiens
  misc_RNA (1)...(19): siRNA sense strand
cagcaaauccacccgucuu

SEQ ID NO: 1829734 - RNA, 19 nt, Homo sapiens
  misc_RNA (1)...(19): siRNA sense strand
ggucugaggaaagaauuug

SEQ ID NO: 1829735 - RNA, 19 nt, Homo sapiens
  misc_RNA (1)...(19): siRNA sense strand
gaagcaacugucgagauug

SEQ ID NO: 1829736 - RNA, 19 nt, Homo sapiens
  misc_RNA (1)...(19): siRNA sense strand
gucccgagaucgugcacuu

SEQ ID NO: 1829737 - RNA, 19 nt, Homo sapiens
  misc_RNA (1)...(19): siRNA sense strand
uaugacaacagcaagaguu

SEQ ID NO: 1829738 - RNA, 19 nt, Homo sapiens
  misc_RNA (1)...(19): siRNA sense strand
uggaaaggauaccgcaagu

SEQ ID NO: 1829739 - RNA, 19 nt, Homo sapiens
  misc_RNA (1)...(19): siRNA sense strand
gauugcagcggaauaugau

SEQ ID NO: 1829740 - RNA, 19 nt, Homo sapiens
  misc_RNA (1)...(19): siRNA sense strand
cagugcaucugaacuaucg

SEQ ID NO: 1829741 - RNA, 19 nt, Homo sapiens
  misc_RNA (1)...(19): siRNA sense strand
gcagagcuucagccgauuc

SEQ ID NO: 1829742 - RNA, 19 nt, Homo sapiens
  misc_RNA (1)...(19): siRNA sense strand
gcucucgguuccucucagu

SEQ ID NO: 1829743 - RNA, 19 nt, Homo sapiens
  misc_RNA (1)...(19): siRNA sense strand
gcaaauccacccgucuuac

SEQ ID NO: 1829744 - RNA, 19 nt, Homo sapiens
  misc_RNA (1)...(19): siRNA sense strand
auucuuccaucaacaaugu

SEQ ID NO: 1829745 - RNA, 19 nt, Homo sapiens
  misc_RNA (1)...(19): siRNA sense strand
ccaggaagugggugucgaa

SEQ ID NO: 1829746 - RNA, 19 nt, Homo sapiens
  misc_RNA (1)...(19): siRNA sense strand
aaaggauaccgcaaguuug

SEQ ID NO: 1829747 - RNA, 19 nt, Homo sapiens
  misc_RNA (1)...(19): siRNA sense strand
ucacagaagacacaaagac

SEQ ID NO: 1829748 - RNA, 19 nt, Homo sapiens
  misc_RNA (1)...(19): siRNA sense strand
uaucuguucuugcucuucu

SEQ ID NO: 1829749 - RNA, 19 nt, Homo sapiens
  misc_RNA (1)...(19): siRNA sense strand
guccuucagugagugguuu

SEQ ID NO: 1829750 - RNA, 19 nt, Homo sapiens
  misc_RNA (1)...(19): siRNA sense strand
cugcaugcauggaaaggau

SEQ ID NO: 1829751 - RNA, 19 nt, Homo sapiens
  misc_RNA (1)...(19): siRNA sense strand
cuuaccagcuccucagaag

SEQ ID NO: 1829752 - RNA, 19 nt, Homo sapiens
  misc_RNA (1)...(19): siRNA sense strand
gagauucugcagagcuuca

SEQ ID NO: 1829753 - RNA, 19 nt, Homo sapiens
  misc_RNA (1)...(19): siRNA sense strand
ucgugcacuucaaccuuua

SEQ ID NO: 1829754 - RNA, 19 nt, Homo sapiens
  misc_RNA (1)...(19): siRNA sense strand
ucaacuuggcugaccauug

SEQ ID NO: 1829755 - RNA, 19 nt, Homo sapiens
  misc_RNA (1)...(19): siRNA sense strand
ugagaacuuaccugagauu

SEQ ID NO: 1829756 - RNA, 19 nt, Homo sapiens
  misc_RNA (1)...(19): siRNA sense strand
agauugcagcggaauauga

SEQ ID NO: 1829757 - RNA, 19 nt, Homo sapiens
  misc_RNA (1)...(19): siRNA sense strand
gagcucauggagacuuguu

SEQ ID NO: 1829758 - RNA, 19 nt, Homo sapiens
  misc_RNA (1)...(19): siRNA sense strand
gaacaccauccaagauucc

SEQ ID NO: 1829759 - RNA, 19 nt, Homo sapiens
  misc_RNA (1)...(19): siRNA sense strand
ggacaccauguggaucuug

SEQ ID NO: 1829760 - RNA, 19 nt, Homo sapiens
  misc_RNA (1)...(19): siRNA sense strand
cagaaauugcuggguuaaa

SEQ ID NO: 1829761 - RNA, 19 nt, Homo sapiens
  misc_RNA (1)...(19): siRNA sense strand
gagacgcucaaguaucugu

SEQ ID NO: 1829762 - RNA, 19 nt, Homo sapiens
  misc_RNA (1)...(19): siRNA sense strand
cacagaagacacaaagaca

SEQ ID NO: 1829763 - RNA, 19 nt, Homo sapiens
  misc_RNA (1)...(19): siRNA sense strand
uagaggaagagcagaagau

SEQ ID NO: 1829764 - RNA, 19 nt, Homo sapiens
  misc_RNA (1)...(19): siRNA sense strand
guggacuccucuucuacau

SEQ ID NO: 1829765 - RNA, 19 nt, Homo sapiens
  misc_RNA (1)...(19): siRNA sense strand
gcaaugagguccagcuuug

SEQ ID NO: 1829766 - RNA, 19 nt, Homo sapiens
  misc_RNA (1)...(19): siRNA sense strand
gaguuaaaguccuauguua

SEQ ID NO: 1829767 - RNA, 19 nt, Homo sapiens
  misc_RNA (1)...(19): siRNA sense strand
cuacagagaugcauucaaa

SEQ ID NO: 1829768 - RNA, 19 nt, Homo sapiens
  misc_RNA (1)...(19): siRNA sense strand
ggauugcucuguacaaaga

SEQ ID NO: 1829769 - RNA, 19 nt, Homo sapiens
  misc_RNA (1)...(19): siRNA sense strand
uaacagagcacuccuaugu

SEQ ID NO: 1829770 - RNA, 19 nt, Homo sapiens
  misc_RNA (1)...(19): siRNA sense strand
uaacagauccuucccuaaa

SEQ ID NO: 1829771 - RNA, 19 nt, Homo sapiens
  misc_RNA (1)...(19): siRNA sense strand
cgaggcaucuggucgaaua

SEQ ID NO: 1829772 - RNA, 19 nt, Homo sapiens
  misc_RNA (1)...(19): siRNA sense strand
ggaauguacuggaugaugu

SEQ ID NO: 1829773 - RNA, 19 nt, Homo sapiens
  misc_RNA (1)...(19): siRNA sense strand
ggaucuugcucuggaauua

SEQ ID NO: 1829774 - RNA, 19 nt, Homo sapiens
  misc_RNA (1)...(19): siRNA sense strand
caugacaacugaugacuug

SEQ ID NO: 1829775 - RNA, 19 nt, Homo sapiens
  misc_RNA (1)...(19): siRNA sense strand
cguaaagucuugcaucuug

SEQ ID NO: 1829776 - RNA, 19 nt, Homo sapiens
  misc_RNA (1)...(19): siRNA sense strand
uaagaaguaucaaggcaaa

SEQ ID NO: 1829777 - RNA, 19 nt, Homo sapiens
  misc_RNA (1)...(19): siRNA sense strand
gaccauauauaggaaugua

SEQ ID NO: 1829778 - RNA, 19 nt, Homo sapiens
  misc_RNA (1)...(19): siRNA sense strand
cgaugugccuuauuucaaa

SEQ ID NO: 1829779 - RNA, 19 nt, Homo sapiens
  misc_RNA (1)...(19): siRNA sense strand
ucacaaagccuacagagau

SEQ ID NO: 1829780 - RNA, 19 nt, Homo sapiens
  misc_RNA (1)...(19): siRNA sense strand
cagagacccuccuggauga

SEQ ID NO: 1829781 - RNA, 19 nt, Homo sapiens
  misc_RNA (1)...(19): siRNA sense strand
agcaagagcugaucuacuu

SEQ ID NO: 1829782 - RNA, 19 nt, Homo sapiens
  misc_RNA (1)...(19): siRNA sense strand
cagcauagaggaacuguga

SEQ ID NO: 1829783 - RNA, 19 nt, Homo sapiens
  misc_RNA (1)...(19): siRNA sense strand
aaaagagcaucaagaguua

SEQ ID NO: 1829784 - RNA, 19 nt, Homo sapiens
  misc_RNA (1)...(19): siRNA sense strand
acagagcacuccuauguca

SEQ ID NO: 1829785 - RNA, 19 nt, Homo sapiens
  misc_RNA (1)...(19): siRNA sense strand
gaacacacugcaaaucuca

SEQ ID NO: 1829786 - RNA, 19 nt, Homo sapiens
  misc_RNA (1)...(19): siRNA sense strand
uaggaaacguaaagucuug

SEQ ID NO: 1829787 - RNA, 19 nt, Homo sapiens
  misc_RNA (1)...(19): siRNA sense strand
ggaacacacugcaaaucuc

SEQ ID NO: 1829788 - RNA, 19 nt, Homo sapiens
  misc_RNA (1)...(19): siRNA sense strand
caaaagagcaucaagaguu

SEQ ID NO: 1829789 - RNA, 19 nt, Homo sapiens
  misc_RNA (1)...(19): siRNA sense strand
uuaaggcacuauucugcua

SEQ ID NO: 1829790 - RNA, 19 nt, Homo sapiens
  misc_RNA (1)...(19): siRNA sense strand
cugcaggacuaaccaguuu

SEQ ID NO: 1829791 - RNA, 19 nt, Homo sapiens
  misc_RNA (1)...(19): siRNA sense strand
gcaaaaguuuccaguauag

SEQ ID NO: 1829792 - RNA, 19 nt, Homo sapiens
  misc_RNA (1)...(19): siRNA sense strand
ggaaugcaccgucgucaca

SEQ ID NO: 1829793 - RNA, 19 nt, Homo sapiens
  misc_RNA (1)...(19): siRNA sense strand
gcaccgucgucacacugua

SEQ ID NO: 1829794 - RNA, 19 nt, Homo sapiens
  misc_RNA (1)...(19): siRNA sense strand
guuaaucaccuguauguca

SEQ ID NO: 1829795 - RNA, 19 nt, Homo sapiens
  misc_RNA (1)...(19): siRNA sense strand
ggcaaaaguuuccaguaua

SEQ ID NO: 1829796 - RNA, 19 nt, Homo sapiens
  misc_RNA (1)...(19): siRNA sense strand
guggauugcucuguacaaa

SEQ ID NO: 1829797 - RNA, 19 nt, Homo sapiens
  misc_RNA (1)...(19): siRNA sense strand
cacaaagccuacagagaug

SEQ ID NO: 1829798 - RNA, 19 nt, Homo sapiens
  misc_RNA (1)...(19): siRNA sense strand
uucaugcccuuauugcuua

SEQ ID NO: 1829799 - RNA, 19 nt, Homo sapiens
  misc_RNA (1)...(19): siRNA sense strand
gaggaacugugacugaaac

SEQ ID NO: 1829800 - RNA, 19 nt, Homo sapiens
  misc_RNA (1)...(19): siRNA sense strand
gaacuucagccaaaugacu

SEQ ID NO: 1829801 - RNA, 19 nt, Homo sapiens
  misc_RNA (1)...(19): siRNA sense strand
guaaagucuugcaucuugu

SEQ ID NO: 1829802 - RNA, 19 nt, Homo sapiens
  misc_RNA (1)...(19): siRNA sense strand
uagaggaacugugacugaa

SEQ ID NO: 1829803 - RNA, 19 nt, Homo sapiens
  misc_RNA (1)...(19): siRNA sense strand
cugguuaccugaagaugaa

SEQ ID NO: 1829804 - RNA, 19 nt, Homo sapiens
  misc_RNA (1)...(19): siRNA sense strand
ggcaucuggucgaauauau

SEQ ID NO: 1829805 - RNA, 19 nt, Homo sapiens
  misc_RNA (1)...(19): siRNA sense strand
ccuuauugcuuaaagaugu

SEQ ID NO: 1829806 - RNA, 19 nt, Homo sapiens
  misc_RNA (1)...(19): siRNA sense strand
ccuucgaugugccuuauuu

SEQ ID NO: 1829807 - RNA, 19 nt, Homo sapiens
  misc_RNA (1)...(19): siRNA sense strand
uguacuggaugauguuuau

SEQ ID NO: 1829808 - RNA, 19 nt, Homo sapiens
  misc_RNA (1)...(19): siRNA sense strand
gauccaguaugcagaagag

SEQ ID NO: 1829809 - RNA, 19 nt, Homo sapiens
  misc_RNA (1)...(19): siRNA sense strand
gaauguacuggaugauguu

SEQ ID NO: 1829810 - RNA, 19 nt, Homo sapiens
  misc_RNA (1)...(19): siRNA sense strand
caaaggucgaugaggauuu

SEQ ID NO: 1829811 - RNA, 19 nt, Homo sapiens
  misc_RNA (1)...(19): siRNA sense strand
aaugaggaaucacagcaaa

SEQ ID NO: 1829812 - RNA, 19 nt, Homo sapiens
  misc_RNA (1)...(19): siRNA sense strand
caguauagcccaagagauc

SEQ ID NO: 1829813 - RNA, 19 nt, Homo sapiens
  misc_RNA (1)...(19): siRNA sense strand
cacguacacugucuucaug

SEQ ID NO: 1829814 - RNA, 19 nt, Homo sapiens
  misc_RNA (1)...(19): siRNA sense strand
cugagacacugcaggacua

SEQ ID NO: 1829815 - RNA, 19 nt, Homo sapiens
  misc_RNA (1)...(19): siRNA sense strand
cuugaaaguuuaacagauc

SEQ ID NO: 1829816 - RNA, 19 nt, Homo sapiens
  misc_RNA (1)...(19): siRNA sense strand
gcaaaggucgaugaggauu

SEQ ID NO: 1829817 - RNA, 19 nt, Homo sapiens
  misc_RNA (1)...(19): siRNA sense strand
ugacugaaacggaggaaau

SEQ ID NO: 1829818 - RNA, 19 nt, Homo sapiens
  misc_RNA (1)...(19): siRNA sense strand
guaggaaacguaaagucuu

SEQ ID NO: 1829819 - RNA, 19 nt, Homo sapiens
  misc_RNA (1)...(19): siRNA sense strand
gcccagagaaaccugaauu

SEQ ID NO: 1829820 - RNA, 19 nt, Homo sapiens
  misc_RNA (1)...(19): siRNA sense strand
gaucuugcucuggaauuaa

SEQ ID NO: 1829821 - RNA, 19 nt, Homo sapiens
  misc_RNA (1)...(19): siRNA sense strand
uuccaccaauucagucuua

SEQ ID NO: 1829822 - RNA, 19 nt, Homo sapiens
  misc_RNA (1)...(19): siRNA sense strand
auaggaauguacuggauga

SEQ ID NO: 1829823 - RNA, 19 nt, Homo sapiens
  misc_RNA (1)...(19): siRNA sense strand
cccaguggauugcucugua

SEQ ID NO: 1829824 - RNA, 19 nt, Homo sapiens
  misc_RNA (1)...(19): siRNA sense strand
cuggaugacuuccuucuca

SEQ ID NO: 1829825 - RNA, 19 nt, Homo sapiens
  misc_RNA (1)...(19): siRNA sense strand
ggagucuauucaauucaau

SEQ ID NO: 1829826 - RNA, 19 nt, Homo sapiens
  misc_RNA (1)...(19): siRNA sense strand
ucacagcaaaggucgauga

SEQ ID NO: 1829827 - RNA, 19 nt, Homo sapiens
  misc_RNA (1)...(19): siRNA sense strand
uggacucucugcucucuga

SEQ ID NO: 1829828 - RNA, 19 nt, Homo sapiens
  misc_RNA (1)...(19): siRNA sense strand
ggaugaggacgaugaaugg

SEQ ID NO: 1829829 - RNA, 19 nt, Homo sapiens
  misc_RNA (1)...(19): siRNA sense strand
gagcugcccuugccuaccu

SEQ ID NO: 1829830 - RNA, 19 nt, Homo sapiens
  misc_RNA (1)...(19): siRNA sense strand
uaaaagucguggcagaaaa

SEQ ID NO: 1829831 - RNA, 19 nt, Homo sapiens
  misc_RNA (1)...(19): siRNA sense strand
acagauccuucccuaaauc

SEQ ID NO: 1829832 - RNA, 19 nt, Homo sapiens
  misc_RNA (1)...(19): siRNA sense strand
gggaacacacugcaaaucu

SEQ ID NO: 1829833 - RNA, 19 nt, Homo sapiens
  misc_RNA (1)...(19): siRNA sense strand
cagaaaagauccaguaugc

SEQ ID NO: 1829834 - RNA, 19 nt, Homo sapiens
  misc_RNA (1)...(19): siRNA sense strand
gucacacuguagaugaaua

SEQ ID NO: 1829835 - RNA, 19 nt, Homo sapiens
  misc_RNA (1)...(19): siRNA sense strand
gcaaagaggaaaacucaga

SEQ ID NO: 1829836 - RNA, 19 nt, Homo sapiens
  misc_RNA (1)...(19): siRNA sense strand
gccagcaggcucuguuuga

SEQ ID NO: 1829837 - RNA, 19 nt, Homo sapiens
  misc_RNA (1)...(19): siRNA sense strand
uuaaucaccuguaugucau

SEQ ID NO: 1829838 - RNA, 19 nt, Homo sapiens
  misc_RNA (1)...(19): siRNA sense strand
gagcaucaagaguuaaagu

SEQ ID NO: 1829839 - RNA, 19 nt, Homo sapiens
  misc_RNA (1)...(19): siRNA sense strand
gagcagccguucgcagucu

SEQ ID NO: 1829840 - RNA, 19 nt, Homo sapiens
  misc_RNA (1)...(19): siRNA sense strand
caaagacugguuaccugaa

SEQ ID NO: 1829841 - RNA, 19 nt, Homo sapiens
  misc_RNA (1)...(19): siRNA sense strand
uggagucuauucaauucaa

SEQ ID NO: 1829842 - RNA, 19 nt, Homo sapiens
  misc_RNA (1)...(19): siRNA sense strand
aaccugaauucuuucuuug

SEQ ID NO: 1829843 - RNA, 19 nt, Homo sapiens
  misc_RNA (1)...(19): siRNA sense strand
uauaacagagcacuccuau

SEQ ID NO: 1829844 - RNA, 19 nt, Homo sapiens
  misc_RNA (1)...(19): siRNA sense strand
guacaaagacugguuaccu

SEQ ID NO: 1829845 - RNA, 19 nt, Homo sapiens
  misc_RNA (1)...(19): siRNA sense strand
caagagcugaucuacuuca

SEQ ID NO: 1829846 - RNA, 19 nt, Homo sapiens
  misc_RNA (1)...(19): siRNA sense strand
aaagauccaguaugcagaa

SEQ ID NO: 1829847 - RNA, 19 nt, Homo sapiens
  misc_RNA (1)...(19): siRNA sense strand
aaagacugguuaccugaag

SEQ ID NO: 1829848 - RNA, 19 nt, Homo sapiens
  misc_RNA (1)...(19): siRNA sense strand
ggaggaugaggacgaugaa

SEQ ID NO: 1829849 - RNA, 19 nt, Homo sapiens
  misc_RNA (1)...(19): siRNA sense strand
ccaguuuggugaccugucu

SEQ ID NO: 1829850 - RNA, 19 nt, Homo sapiens
  misc_RNA (1)...(19): siRNA sense strand
aacagauccuucccuaaau

SEQ ID NO: 1829851 - RNA, 19 nt, Homo sapiens
  misc_RNA (1)...(19): siRNA sense strand
uaaagucuugcaucuuguu

SEQ ID NO: 1829852 - RNA, 19 nt, Homo sapiens
  misc_RNA (1)...(19): siRNA sense strand
gaaugaacacuugggaucu

SEQ ID NO: 1829853 - RNA, 19 nt, Homo sapiens
  misc_RNA (1)...(19): siRNA sense strand
uggagcaccuuuugaauga

SEQ ID NO: 1829854 - RNA, 19 nt, Homo sapiens
  misc_RNA (1)...(19): siRNA sense strand
caucuggucgaauauaugu

SEQ ID NO: 1829855 - RNA, 19 nt, Homo sapiens
  misc_RNA (1)...(19): siRNA sense strand
gacugaaacggaggaaauu

SEQ ID NO: 1829856 - RNA, 19 nt, Homo sapiens
  misc_RNA (1)...(19): siRNA sense strand
gcccuugccuaccuucgau

SEQ ID NO: 1829857 - RNA, 19 nt, Homo sapiens
  misc_RNA (1)...(19): siRNA sense strand
aaugaacacuugggaucuu

SEQ ID NO: 1829858 - RNA, 19 nt, Homo sapiens
  misc_RNA (1)...(19): siRNA sense strand
cgaggaggaugaggacgau

SEQ ID NO: 1829859 - RNA, 19 nt, Homo sapiens
  misc_RNA (1)...(19): siRNA sense strand
cuauguuaaucaccuguau

SEQ ID NO: 1829860 - RNA, 19 nt, Homo sapiens
  misc_RNA (1)...(19): siRNA sense strand
gaaaguuuaacagauccuu

SEQ ID NO: 1829861 - RNA, 19 nt, Homo sapiens
  misc_RNA (1)...(19): siRNA sense strand
ggacacuuugaacccauuu

SEQ ID NO: 1829862 - RNA, 19 nt, Homo sapiens
  misc_RNA (1)...(19): siRNA sense strand
ccuccuggaugacuuccuu

SEQ ID NO: 1829863 - RNA, 19 nt, Homo sapiens
  misc_RNA (1)...(19): siRNA sense strand
uugaaaagcugcauaugau

SEQ ID NO: 1829864 - RNA, 19 nt, Homo sapiens
  misc_RNA (1)...(19): siRNA sense strand
agaguuaaaguccuauguu

SEQ ID NO: 1829865 - RNA, 19 nt, Homo sapiens
  misc_RNA (1)...(19): siRNA sense strand
gaaaggaggaggcuaaaga

SEQ ID NO: 1829866 - RNA, 19 nt, Homo sapiens
  misc_RNA (1)...(19): siRNA sense strand
gaaggaggagcaaguauug

SEQ ID NO: 1829867 - RNA, 19 nt, Homo sapiens
  misc_RNA (1)...(19): siRNA sense strand
ggaaggaggagcaaguauu

SEQ ID NO: 1829868 - RNA, 19 nt, Homo sapiens
  misc_RNA (1)...(19): siRNA sense strand
gauaacggcuaaggaagga

SEQ ID NO: 1829869 - RNA, 19 nt, Homo sapiens
  misc_RNA (1)...(19): siRNA sense strand
cuacagacccaaacaagaa

SEQ ID NO: 1829870 - RNA, 19 nt, Homo sapiens
  misc_RNA (1)...(19): siRNA sense strand
gcuccuauuucuucuacuu

SEQ ID NO: 1829871 - RNA, 19 nt, Homo sapiens
  misc_RNA (1)...(19): siRNA sense strand
ggaggaggcuaaagaaaau

SEQ ID NO: 1829872 - RNA, 19 nt, Homo sapiens
  misc_RNA (1)...(19): siRNA sense strand
ggccaaguguuuccgauca

SEQ ID NO: 1829873 - RNA, 19 nt, Homo sapiens
  misc_RNA (1)...(19): siRNA sense strand
aggaagugguggagaagua

SEQ ID NO: 1829874 - RNA, 19 nt, Homo sapiens
  misc_RNA (1)...(19): siRNA sense strand
gcacugaagcggcgaacug

SEQ ID NO: 1829875 - RNA, 19 nt, Homo sapiens
  misc_RNA (1)...(19): siRNA sense strand
ggagcgccaucagcuauau

SEQ ID NO: 1829876 - RNA, 19 nt, Homo sapiens
  misc_RNA (1)...(19): siRNA sense strand
ggaggagcaaguauugauu

SEQ ID NO: 1829877 - RNA, 19 nt, Homo sapiens
  misc_RNA (1)...(19): siRNA sense strand
ggaagugguggagaaguaa

SEQ ID NO: 1829878 - RNA, 19 nt, Homo sapiens
  misc_RNA (1)...(19): siRNA sense strand
gcaagaccugcaagagaaa

SEQ ID NO: 1829879 - RNA, 19 nt, Homo sapiens
  misc_RNA (1)...(19): siRNA sense strand
ccaaguguuuccgaucauu

SEQ ID NO: 1829880 - RNA, 19 nt, Homo sapiens
  misc_RNA (1)...(19): siRNA sense strand
uggaggaagugguggagaa

SEQ ID NO: 1829881 - RNA, 19 nt, Homo sapiens
  misc_RNA (1)...(19): siRNA sense strand
cgacagcagcggagaggaa

SEQ ID NO: 1829882 - RNA, 19 nt, Homo sapiens
  misc_RNA (1)...(19): siRNA sense strand
gaggagcaaguauugauuc

SEQ ID NO: 1829883 - RNA, 19 nt, Homo sapiens
  misc_RNA (1)...(19): siRNA sense strand
gcuacagacccaaacaaga

SEQ ID NO: 1829884 - RNA, 19 nt, Homo sapiens
  misc_RNA (1)...(19): siRNA sense strand
aaaggaggaggcuaaagaa

SEQ ID NO: 1829885 - RNA, 19 nt, Homo sapiens
  misc_RNA (1)...(19): siRNA sense strand
cgugauaacggcuaaggaa

SEQ ID NO: 1829886 - RNA, 19 nt, Homo sapiens
  misc_RNA (1)...(19): siRNA sense strand
gcggagcgccaucagcuau

SEQ ID NO: 1829887 - RNA, 19 nt, Homo sapiens
  misc_RNA (1)...(19): siRNA sense strand
uaaggaaggaggagcaagu

SEQ ID NO: 1829888 - RNA, 19 nt, Homo sapiens
  misc_RNA (1)...(19): siRNA sense strand
ggagugaugguaccuuguc

SEQ ID NO: 1829889 - RNA, 19 nt, Homo sapiens
  misc_RNA (1)...(19): siRNA sense strand
gcgaaaggaggaggcuaaa

SEQ ID NO: 1829890 - RNA, 19 nt, Homo sapiens
  misc_RNA (1)...(19): siRNA sense strand
uugaaacuggcuccuauuu

SEQ ID NO: 1829891 - RNA, 19 nt, Homo sapiens
  misc_RNA (1)...(19): siRNA sense strand
cgcgaaaggaggaggcuaa

SEQ ID NO: 1829892 - RNA, 19 nt, Homo sapiens
  misc_RNA (1)...(19): siRNA sense strand
aaacuggcuccuauuucuu

SEQ ID NO: 1829893 - RNA, 19 nt, Homo sapiens
  misc_RNA (1)...(19): siRNA sense strand
gccaaguguuuccgaucau

SEQ ID NO: 1829894 - RNA, 19 nt, Homo sapiens
  misc_RNA (1)...(19): siRNA sense strand
ugucugaucugggcuugca

SEQ ID NO: 1829895 - RNA, 19 nt, Homo sapiens
  misc_RNA (1)...(19): siRNA sense strand
gaagucagcucccuaaaga

SEQ ID NO: 1829896 - RNA, 19 nt, Homo sapiens
  misc_RNA (1)...(19): siRNA sense strand
gcacagagcuggccgacaa

SEQ ID NO: 1829897 - RNA, 19 nt, Homo sapiens
  misc_RNA (1)...(19): siRNA sense strand
ggaagaagcuggagaugga

SEQ ID NO: 1829898 - RNA, 19 nt, Homo sapiens
  misc_RNA (1)...(19): siRNA sense strand
ggccaaaccugccgaauaa

SEQ ID NO: 1829899 - RNA, 19 nt, Homo sapiens
  misc_RNA (1)...(19): siRNA sense strand
gagccaacauugagacuua

SEQ ID NO: 1829900 - RNA, 19 nt, Homo sapiens
  misc_RNA (1)...(19): siRNA sense strand
ccaagaaggucauccagua

SEQ ID NO: 1829901 - RNA, 19 nt, Homo sapiens
  misc_RNA (1)...(19): siRNA sense strand
gaacggaccuuccacaucu

SEQ ID NO: 1829902 - RNA, 19 nt, Homo sapiens
  misc_RNA (1)...(19): siRNA sense strand
ggaagaaggugaaggugaa

SEQ ID NO: 1829903 - RNA, 19 nt, Homo sapiens
  misc_RNA (1)...(19): siRNA sense strand
gaagaccgaucuccuguug

SEQ ID NO: 1829904 - RNA, 19 nt, Homo sapiens
  misc_RNA (1)...(19): siRNA sense strand
gagcagcugugcaucaauu

SEQ ID NO: 1829905 - RNA, 19 nt, Homo sapiens
  misc_RNA (1)...(19): siRNA sense strand
gaacauggcccucaagaag

SEQ ID NO: 1829906 - RNA, 19 nt, Homo sapiens
  misc_RNA (1)...(19): siRNA sense strand
gaacaagcaugaggcaaug

SEQ ID NO: 1829907 - RNA, 19 nt, Homo sapiens
  misc_RNA (1)...(19): siRNA sense strand
agaagaagcugaaggaugu

SEQ ID NO: 1829908 - RNA, 19 nt, Homo sapiens
  misc_RNA (1)...(19): siRNA sense strand
caaaggagcccuggcguua

SEQ ID NO: 1829909 - RNA, 19 nt, Homo sapiens
  misc_RNA (1)...(19): siRNA sense strand
gaccaucucugccaaguau

SEQ ID NO: 1829910 - RNA, 19 nt, Homo sapiens
  misc_RNA (1)...(19): siRNA sense strand
ccaagaccgugaagaauga

SEQ ID NO: 1829911 - RNA, 19 nt, Homo sapiens
  misc_RNA (1)...(19): siRNA sense strand
acaagaaccugcccaucua

SEQ ID NO: 1829912 - RNA, 19 nt, Homo sapiens
  misc_RNA (1)...(19): siRNA sense strand
ccaagcagcugaaggacaa

SEQ ID NO: 1829913 - RNA, 19 nt, Homo sapiens
  misc_RNA (1)...(19): siRNA sense strand
gaucaccgacgucaucaua

SEQ ID NO: 1829914 - RNA, 19 nt, Homo sapiens
  misc_RNA (1)...(19): siRNA sense strand
agaagaagaugcagcagaa

SEQ ID NO: 1829915 - RNA, 19 nt, Homo sapiens
  misc_RNA (1)...(19): siRNA sense strand
caacaaggcucuggacaag

SEQ ID NO: 1829916 - RNA, 19 nt, Homo sapiens
  misc_RNA (1)...(19): siRNA sense strand
ccaaagagaacgagaagaa

SEQ ID NO: 1829917 - RNA, 19 nt, Homo sapiens
  misc_RNA (1)...(19): siRNA sense strand
ccaccaaccucacagaaga

SEQ ID NO: 1829918 - RNA, 19 nt, Homo sapiens
  misc_RNA (1)...(19): siRNA sense strand
acacggagcugaucaacga

SEQ ID NO: 1829919 - RNA, 19 nt, Homo sapiens
  misc_RNA (1)...(19): siRNA sense strand
uagaagagaucugccauga

SEQ ID NO: 1829920 - RNA, 19 nt, Homo sapiens
  misc_RNA (1)...(19): siRNA sense strand
acaaggagcuuaaggucaa

SEQ ID NO: 1829921 - RNA, 19 nt, Homo sapiens
  misc_RNA (1)...(19): siRNA sense strand
agaggaagcuccagaagga

SEQ ID NO: 1829922 - RNA, 19 nt, Homo sapiens
  misc_RNA (1)...(19): siRNA sense strand
ccagcaagcucaccaagga

SEQ ID NO: 1829923 - RNA, 19 nt, Homo sapiens
  misc_RNA (1)...(19): siRNA sense strand
gaacauggauccccugaau

SEQ ID NO: 1829924 - RNA, 19 nt, Homo sapiens
  misc_RNA (1)...(19): siRNA sense strand
ccaguccucugacaaguuu

SEQ ID NO: 1829925 - RNA, 19 nt, Homo sapiens
  misc_RNA (1)...(19): siRNA sense strand
guaucaaugugaccgauuu

SEQ ID NO: 1829926 - RNA, 19 nt, Homo sapiens
  misc_RNA (1)...(19): siRNA sense strand
ccaagaagcaggaauuaga

SEQ ID NO: 1829927 - RNA, 19 nt, Homo sapiens
  misc_RNA (1)...(19): siRNA sense strand
gaagaucaccgacgucauc

SEQ ID NO: 1829928 - RNA, 19 nt, Homo sapiens
  misc_RNA (1)...(19): siRNA sense strand
agaagaagcugaagagcau

SEQ ID NO: 1829929 - RNA, 19 nt, Homo sapiens
  misc_RNA (1)...(19): siRNA sense strand
gacaggagcuggagaagac

SEQ ID NO: 1829930 - RNA, 19 nt, Homo sapiens
  misc_RNA (1)...(19): siRNA sense strand
cgacugggcugccaagaag

SEQ ID NO: 1829931 - RNA, 19 nt, Homo sapiens
  misc_RNA (1)...(19): siRNA sense strand
agaagaagcagaagaaguu

SEQ ID NO: 1829932 - RNA, 19 nt, Homo sapiens
  misc_RNA (1)...(19): siRNA sense strand
ggaauaaagcugagaagca

SEQ ID NO: 1829933 - RNA, 19 nt, Homo sapiens
  misc_RNA (1)...(19): siRNA sense strand
aaagcugauuucugcauua

SEQ ID NO: 1829934 - RNA, 19 nt, Homo sapiens
  misc_RNA (1)...(19): siRNA sense strand
caaagcugauuucugcauu

SEQ ID NO: 1829935 - RNA, 19 nt, Homo sapiens
  misc_RNA (1)...(19): siRNA sense strand
cugaagagauuguggaaau

SEQ ID NO: 1829936 - RNA, 19 nt, Homo sapiens
  misc_RNA (1)...(19): siRNA sense strand
ggaggaacgccgagcagua

SEQ ID NO: 1829937 - RNA, 19 nt, Homo sapiens
  misc_RNA (1)...(19): siRNA sense strand
caaggagcguuacuacuca

SEQ ID NO: 1829938 - RNA, 19 nt, Homo sapiens
  misc_RNA (1)...(19): siRNA sense strand
caacacagcugcccaaaag

SEQ ID NO: 1829939 - RNA, 19 nt, Homo sapiens
  misc_RNA (1)...(19): siRNA sense strand
ggucaucaauccuuacaag

SEQ ID NO: 1829940 - RNA, 19 nt, Homo sapiens
  misc_RNA (1)...(19): siRNA sense strand
gggcucaucuacaccuauu

SEQ ID NO: 1829941 - RNA, 19 nt, Homo sapiens
  misc_RNA (1)...(19): siRNA sense strand
gcaagcugccgauaaguau

SEQ ID NO: 1829942 - RNA, 19 nt, Homo sapiens
  misc_RNA (1)...(19): siRNA sense strand
cgaagcgggugaaagcaaa

SEQ ID NO: 1829943 - RNA, 19 nt, Homo sapiens
  misc_RNA (1)...(19): siRNA sense strand
ucucugaacuccaggaaga

SEQ ID NO: 1829944 - RNA, 19 nt, Homo sapiens
  misc_RNA (1)...(19): siRNA sense strand
ucacaucuaugccaucaca

SEQ ID NO: 1829945 - RNA, 19 nt, Homo sapiens
  misc_RNA (1)...(19): siRNA sense strand
ggacgaagccaucaaacag

SEQ ID NO: 1829946 - RNA, 19 nt, Homo sapiens
  misc_RNA (1)...(19): siRNA sense strand
agaagcagcuggucagaca

SEQ ID NO: 1829947 - RNA, 19 nt, Homo sapiens
  misc_RNA (1)...(19): siRNA sense strand
gcucauggcagagaaauug

SEQ ID NO: 1829948 - RNA, 19 nt, Homo sapiens
  misc_RNA (1)...(19): siRNA sense strand
acgaguggcugaugaagaa

SEQ ID NO: 1829949 - RNA, 19 nt, Homo sapiens
  misc_RNA (1)...(19): siRNA sense strand
gcaaauucauucgcaucaa

SEQ ID NO: 1829950 - RNA, 19 nt, Homo sapiens
  misc_RNA (1)...(19): siRNA sense strand
agaaggagcggaacacuga

SEQ ID NO: 1829951 - RNA, 19 nt, Homo sapiens
  misc_RNA (1)...(19): siRNA sense strand
aaugaucacugacuuggaa

SEQ ID NO: 1829952 - RNA, 19 nt, Homo sapiens
  misc_RNA (1)...(19): siRNA sense strand
ucgccaagcucaagaacaa

SEQ ID NO: 1829953 - RNA, 19 nt, Homo sapiens
  misc_RNA (1)...(19): siRNA sense strand
gcaagaagaggcacgagau

SEQ ID NO: 1829954 - RNA, 19 nt, Homo sapiens
  misc_RNA (1)...(19): siRNA sense strand
ccagguggccgacaugaaa

SEQ ID NO: 1829955 - RNA, 19 nt, Homo sapiens
  misc_RNA (1)...(19): siRNA sense strand
gaaagcaaaccucgagaag

SEQ ID NO: 1829956 - RNA, 19 nt, Homo sapiens
  misc_RNA (1)...(19): siRNA sense strand
caagaagcaggaauuagaa

SEQ ID NO: 1829957 - RNA, 19 nt, Homo sapiens
  misc_RNA (1)...(19): siRNA sense strand
ucaauuacaccaaugagaa

SEQ ID NO: 1829958 - RNA, 19 nt, Homo sapiens
  misc_RNA (1)...(19): siRNA sense strand
caagguggauuacaaagcu

SEQ ID NO: 1829959 - RNA, 19 nt, Homo sapiens
  misc_RNA (1)...(19): siRNA sense strand
ggagauggaggaccuuaug

SEQ ID NO: 1829960 - RNA, 19 nt, Homo sapiens
  misc_RNA (1)...(19): siRNA sense strand
agaggaagcugcccagaag

SEQ ID NO: 1829961 - RNA, 19 nt, Homo sapiens
  misc_RNA (1)...(19): siRNA sense strand
agaugcagcuggccaagaa

SEQ ID NO: 1829962 - RNA, 19 nt, Homo sapiens
  misc_RNA (1)...(19): siRNA sense strand
aaaagaaacugcuggaaga

SEQ ID NO: 1829963 - RNA, 19 nt, Homo sapiens
  misc_RNA (1)...(19): siRNA sense strand
gagcgagaccugaagauca

SEQ ID NO: 1829964 - RNA, 19 nt, Homo sapiens
  misc_RNA (1)...(19): siRNA sense strand
gaagagauuguggaaaugu

SEQ ID NO: 1829965 - RNA, 19 nt, Homo sapiens
  misc_RNA (1)...(19): siRNA sense strand
gcacugucaaguccaagua

SEQ ID NO: 1829966 - RNA, 19 nt, Homo sapiens
  misc_RNA (1)...(19): siRNA sense strand
caacagcagcggcaaagga

SEQ ID NO: 1829967 - RNA, 19 nt, Homo sapiens
  misc_RNA (1)...(19): siRNA sense strand
gaagaggaggagaaaucua

SEQ ID NO: 1829968 - RNA, 19 nt, Homo sapiens
  misc_RNA (1)...(19): siRNA sense strand
gaucugccaugaccuagag

SEQ ID NO: 1829969 - RNA, 19 nt, Homo sapiens
  misc_RNA (1)...(19): siRNA sense strand
cuaaagagcaggcugacuu

SEQ ID NO: 1829970 - RNA, 19 nt, Homo sapiens
  misc_RNA (1)...(19): siRNA sense strand
gaggugaacauccugaaga

SEQ ID NO: 1829971 - RNA, 19 nt, Homo sapiens
  misc_RNA (1)...(19): siRNA sense strand
gaagaagcagaagaaguuu

SEQ ID NO: 1829972 - RNA, 19 nt, Homo sapiens
  misc_RNA (1)...(19): siRNA sense strand
ccuuccacaucuucuauua

SEQ ID NO: 1829973 - RNA, 19 nt, Homo sapiens
  misc_RNA (1)...(19): siRNA sense strand
gugaacauccugaagaaga

SEQ ID NO: 1829974 - RNA, 19 nt, Homo sapiens
  misc_RNA (1)...(19): siRNA sense strand
gugcaucaauuacaccaau

SEQ ID NO: 1829975 - RNA, 19 nt, Homo sapiens
  misc_RNA (1)...(19): siRNA sense strand
agaccgaucuccuguugga

SEQ ID NO: 1829976 - RNA, 19 nt, Homo sapiens
  misc_RNA (1)...(19): siRNA sense strand
cgugcaaccuggagaagaa

SEQ ID NO: 1829977 - RNA, 19 nt, Homo sapiens
  misc_RNA (1)...(19): siRNA sense strand
gcugacgaguggcugauga

SEQ ID NO: 1829978 - RNA, 19 nt, Homo sapiens
  misc_RNA (1)...(19): siRNA sense strand
gaaggacaaagcugauuuc

SEQ ID NO: 1829979 - RNA, 19 nt, Homo sapiens
  misc_RNA (1)...(19): siRNA sense strand
gcgagggcaucgaguggaa

SEQ ID NO: 1829980 - RNA, 19 nt, Homo sapiens
  misc_RNA (1)...(19): siRNA sense strand
caaauucauucgcaucaac

SEQ ID NO: 1829981 - RNA, 19 nt, Homo sapiens
  misc_RNA (1)...(19): siRNA sense strand
cugaggaggugaagaggaa

SEQ ID NO: 1829982 - RNA, 19 nt, Homo sapiens
  misc_RNA (1)...(19): siRNA sense strand
aagaggaggagaaaucuaa

SEQ ID NO: 1829983 - RNA, 19 nt, Homo sapiens
  misc_RNA (1)...(19): siRNA sense strand
cagaagaggaggagaaauc

SEQ ID NO: 1829984 - RNA, 19 nt, Homo sapiens
  misc_RNA (1)...(19): siRNA sense strand
cgacaagaguggcuuugag

SEQ ID NO: 1829985 - RNA, 19 nt, Homo sapiens
  misc_RNA (1)...(19): siRNA sense strand
agacuuaucuuuuggagaa

SEQ ID NO: 1829986 - RNA, 19 nt, Homo sapiens
  misc_RNA (1)...(19): siRNA sense strand
gcaagacggagaacaccaa

SEQ ID NO: 1829987 - RNA, 19 nt, Homo sapiens
  misc_RNA (1)...(19): siRNA sense strand
ggaccgagaagaagcugaa

SEQ ID NO: 1829988 - RNA, 19 nt, Homo sapiens
  misc_RNA (1)...(19): siRNA sense strand
gagcagagcgaggagaaga

SEQ ID NO: 1829989 - RNA, 19 nt, Homo sapiens
  misc_RNA (1)...(19): siRNA sense strand
gagaagaagcagaagaagu

SEQ ID NO: 1829990 - RNA, 19 nt, Homo sapiens
  misc_RNA (1)...(19): siRNA sense strand
uagcugaguucaccaccaa

SEQ ID NO: 1829991 - RNA, 19 nt, Homo sapiens
  misc_RNA (1)...(19): siRNA sense strand
agaaggcgcagacuaaaga

SEQ ID NO: 1829992 - RNA, 19 nt, Homo sapiens
  misc_RNA (1)...(19): siRNA sense strand
gagcauggaggccgagaug

SEQ ID NO: 1829993 - RNA, 19 nt, Homo sapiens
  misc_RNA (1)...(19): siRNA sense strand
caucaauccuuacaagaac

SEQ ID NO: 1829994 - RNA, 19 nt, Homo sapiens
  misc_RNA (1)...(19): siRNA sense strand
ucucggagcuguggaagga

SEQ ID NO: 1829995 - RNA, 19 nt, Homo sapiens
  misc_RNA (1)...(19): siRNA sense strand
ucaacaaccuccucuacua

SEQ ID NO: 1829996 - RNA, 19 nt, Homo sapiens
  misc_RNA (1)...(19): siRNA sense strand
agaacaagauugagaacaa

SEQ ID NO: 1829997 - RNA, 19 nt, Homo sapiens
  misc_RNA (1)...(19): siRNA sense strand
ccaacuaccuucucugcuu

SEQ ID NO: 1829998 - RNA, 19 nt, Homo sapiens
  misc_RNA (1)...(19): siRNA sense strand
gaacaagauugagaacaag

SEQ ID NO: 1829999 - RNA, 19 nt, Homo sapiens
  misc_RNA (1)...(19): siRNA sense strand
gaacaagaucgagagcauu

SEQ ID NO: 1830000 - RNA, 19 nt, Homo sapiens
  misc_RNA (1)...(19): siRNA sense strand
caaugggccugcuacuaga

SEQ ID NO: 1830001 - RNA, 19 nt, Homo sapiens
  misc_RNA (1)...(19): siRNA sense strand
ccaaugggccugcuacuag

SEQ ID NO: 1830002 - RNA, 19 nt, Homo sapiens
  misc_RNA (1)...(19): siRNA sense strand
caaaccaacuaccuucucu

SEQ ID NO: 1830003 - RNA, 19 nt, Homo sapiens
  misc_RNA (1)...(19): siRNA sense strand
gcaccuuccuguucagcau

SEQ ID NO: 1830004 - RNA, 19 nt, Homo sapiens
  misc_RNA (1)...(19): siRNA sense strand
agaacaagaucgagagcau

SEQ ID NO: 1830005 - RNA, 19 nt, Homo sapiens
  misc_RNA (1)...(19): siRNA sense strand
gcuugcaccuuccuguuca

SEQ ID NO: 1830006 - RNA, 19 nt, Homo sapiens
  misc_RNA (1)...(19): siRNA sense strand
caacaaccuccucuacuac

SEQ ID NO: 1830007 - RNA, 19 nt, Homo sapiens
  misc_RNA (1)...(19): siRNA sense strand
uagaggcacugggacaaga

SEQ ID NO: 1830008 - RNA, 19 nt, Homo sapiens
  misc_RNA (1)...(19): siRNA sense strand
gccaaugggccugcuacua

SEQ ID NO: 1830009 - RNA, 19 nt, Homo sapiens
  misc_RNA (1)...(19): siRNA sense strand
cuuaagaacaagauugaga

SEQ ID NO: 1830010 - RNA, 19 nt, Homo sapiens
  misc_RNA (1)...(19): siRNA sense strand
ugcgcaaccuuaagaacaa

SEQ ID NO: 1830011 - RNA, 19 nt, Homo sapiens
  misc_RNA (1)...(19): siRNA sense strand
uacgugcggccacuucaua

SEQ ID NO: 1830012 - RNA, 19 nt, Homo sapiens
  misc_RNA (1)...(19): siRNA sense strand
caucaacaaccuccucuac

SEQ ID NO: 1830013 - RNA, 19 nt, Homo sapiens
  misc_RNA (1)...(19): siRNA sense strand
aacaagaucgagagcauug

SEQ ID NO: 1830014 - RNA, 19 nt, Homo sapiens
  misc_RNA (1)...(19): siRNA sense strand
cuaccaaaccaacuaccuu

SEQ ID NO: 1830015 - RNA, 19 nt, Homo sapiens
  misc_RNA (1)...(19): siRNA sense strand
caagauugagaacaagauc

SEQ ID NO: 1830016 - RNA, 19 nt, Homo sapiens
  misc_RNA (1)...(19): siRNA sense strand
gcgcuugcaccuuccuguu

SEQ ID NO: 1830017 - RNA, 19 nt, Homo sapiens
  misc_RNA (1)...(19): siRNA sense strand
ucuacuaccaaaccaacua

SEQ ID NO: 1830018 - RNA, 19 nt, Homo sapiens
  misc_RNA (1)...(19): siRNA sense strand
caaccuccucuacuaccaa

SEQ ID NO: 1830019 - RNA, 19 nt, Homo sapiens
  misc_RNA (1)...(19): siRNA sense strand
caaccuuaagaacaagauu

SEQ ID NO: 1830020 - RNA, 19 nt, Homo sapiens
  misc_RNA (1)...(19): siRNA sense strand
ggaagaagcuaaagagaaa

SEQ ID NO: 1830021 - RNA, 19 nt, Homo sapiens
  misc_RNA (1)...(19): siRNA sense strand
gaacaaacauguccugaag

SEQ ID NO: 1830022 - RNA, 19 nt, Homo sapiens
  misc_RNA (1)...(19): siRNA sense strand
cugagaagcugacaauuua

SEQ ID NO: 1830023 - RNA, 19 nt, Homo sapiens
  misc_RNA (1)...(19): siRNA sense strand
ggaaaggaguuguacgaaa

SEQ ID NO: 1830024 - RNA, 19 nt, Homo sapiens
  misc_RNA (1)...(19): siRNA sense strand
uaucugaucuugugaauug

SEQ ID NO: 1830025 - RNA, 19 nt, Homo sapiens
  misc_RNA (1)...(19): siRNA sense strand
gaccuuaucuugccuuuga

SEQ ID NO: 1830026 - RNA, 19 nt, Homo sapiens
  misc_RNA (1)...(19): siRNA sense strand
caaauuggaucuucucuuc

SEQ ID NO: 1830027 - RNA, 19 nt, Homo sapiens
  misc_RNA (1)...(19): siRNA sense strand
aaucuucacugcaucauua

SEQ ID NO: 1830028 - RNA, 19 nt, Homo sapiens
  misc_RNA (1)...(19): siRNA sense strand
gaaaguagcaauucucuuc

SEQ ID NO: 1830029 - RNA, 19 nt, Homo sapiens
  misc_RNA (1)...(19): siRNA sense strand
caaccugcauuuacaagua

SEQ ID NO: 1830030 - RNA, 19 nt, Homo sapiens
  misc_RNA (1)...(19): siRNA sense strand
aaagaaagaugcagagaug

SEQ ID NO: 1830031 - RNA, 19 nt, Homo sapiens
  misc_RNA (1)...(19): siRNA sense strand
guacacaaauaguugauug

SEQ ID NO: 1830032 - RNA, 19 nt, Homo sapiens
  misc_RNA (1)...(19): siRNA sense strand
gguauggacugcugauaaa

SEQ ID NO: 1830033 - RNA, 19 nt, Homo sapiens
  misc_RNA (1)...(19): siRNA sense strand
agaacuaucucgugacuuu

SEQ ID NO: 1830034 - RNA, 19 nt, Homo sapiens
  misc_RNA (1)...(19): siRNA sense strand
gaaaggaguuguacgaaaa

SEQ ID NO: 1830035 - RNA, 19 nt, Homo sapiens
  misc_RNA (1)...(19): siRNA sense strand
gaugauugcuguacuagug

SEQ ID NO: 1830036 - RNA, 19 nt, Homo sapiens
  misc_RNA (1)...(19): siRNA sense strand
caacugaaaugcuauacau

SEQ ID NO: 1830037 - RNA, 19 nt, Homo sapiens
  misc_RNA (1)...(19): siRNA sense strand
acacaacacuccucauuga

SEQ ID NO: 1830038 - RNA, 19 nt, Homo sapiens
  misc_RNA (1)...(19): siRNA sense strand
gcagagcuguuucaacuuc

SEQ ID NO: 1830039 - RNA, 19 nt, Homo sapiens
  misc_RNA (1)...(19): siRNA sense strand
gaugauucguacacaaaua

SEQ ID NO: 1830040 - RNA, 19 nt, Homo sapiens
  misc_RNA (1)...(19): siRNA sense strand
aagcugaucuuccuaacua

SEQ ID NO: 1830041 - RNA, 19 nt, Homo sapiens
  misc_RNA (1)...(19): siRNA sense strand
gagaagcugacaauuuaua

SEQ ID NO: 1830042 - RNA, 19 nt, Homo sapiens
  misc_RNA (1)...(19): siRNA sense strand
gaacaaauagaacgacuuc

SEQ ID NO: 1830043 - RNA, 19 nt, Homo sapiens
  misc_RNA (1)...(19): siRNA sense strand
gggcccagauucagaaauu

SEQ ID NO: 1830044 - RNA, 19 nt, Homo sapiens
  misc_RNA (1)...(19): siRNA sense strand
caaaugaaacugaagauca

SEQ ID NO: 1830045 - RNA, 19 nt, Homo sapiens
  misc_RNA (1)...(19): siRNA sense strand
ggaaggaaaggaagacuug

SEQ ID NO: 1830046 - RNA, 19 nt, Homo sapiens
  misc_RNA (1)...(19): siRNA sense strand
ucagugcucuugcaaaguu

SEQ ID NO: 1830047 - RNA, 19 nt, Homo sapiens
  misc_RNA (1)...(19): siRNA sense strand
uaaaccacauccacaagaa

SEQ ID NO: 1830048 - RNA, 19 nt, Homo sapiens
  misc_RNA (1)...(19): siRNA sense strand
uuacaugugcuaagaguua

SEQ ID NO: 1830049 - RNA, 19 nt, Homo sapiens
  misc_RNA (1)...(19): siRNA sense strand
guacacaacacuccucauu

SEQ ID NO: 1830050 - RNA, 19 nt, Homo sapiens
  misc_RNA (1)...(19): siRNA sense strand
gcacgccuauuaccugaga

SEQ ID NO: 1830051 - RNA, 19 nt, Homo sapiens
  misc_RNA (1)...(19): siRNA sense strand
guggaaagauuuguaauag

SEQ ID NO: 1830052 - RNA, 19 nt, Homo sapiens
  misc_RNA (1)...(19): siRNA sense strand
ugacgacgaugaaggauuc

SEQ ID NO: 1830053 - RNA, 19 nt, Homo sapiens
  misc_RNA (1)...(19): siRNA sense strand
caucaaugguugcuauguu

SEQ ID NO: 1830054 - RNA, 19 nt, Homo sapiens
  misc_RNA (1)...(19): siRNA sense strand
gaaagaccucugaugcaaa

SEQ ID NO: 1830055 - RNA, 19 nt, Homo sapiens
  misc_RNA (1)...(19): siRNA sense strand
cagaagcagugacaggaaa

SEQ ID NO: 1830056 - RNA, 19 nt, Homo sapiens
  misc_RNA (1)...(19): siRNA sense strand
aaaguuacaugugcuaaga

SEQ ID NO: 1830057 - RNA, 19 nt, Homo sapiens
  misc_RNA (1)...(19): siRNA sense strand
ucugaaagauguaccaaau

SEQ ID NO: 1830058 - RNA, 19 nt, Homo sapiens
  misc_RNA (1)...(19): siRNA sense strand
ggagaugaaaguagcaauu

SEQ ID NO: 1830059 - RNA, 19 nt, Homo sapiens
  misc_RNA (1)...(19): siRNA sense strand
uuacaaguauggagaugaa

SEQ ID NO: 1830060 - RNA, 19 nt, Homo sapiens
  misc_RNA (1)...(19): siRNA sense strand
agaaagaccucugaugcaa

SEQ ID NO: 1830061 - RNA, 19 nt, Homo sapiens
  misc_RNA (1)...(19): siRNA sense strand
gcaaacccaaccugcauuu

SEQ ID NO: 1830062 - RNA, 19 nt, Homo sapiens
  misc_RNA (1)...(19): siRNA sense strand
ccuacagcaucaccaaaua

SEQ ID NO: 1830063 - RNA, 19 nt, Homo sapiens
  misc_RNA (1)...(19): siRNA sense strand
aaagaccucugaugcaaau

SEQ ID NO: 1830064 - RNA, 19 nt, Homo sapiens
  misc_RNA (1)...(19): siRNA sense strand
ccacauaguugaggugauc

SEQ ID NO: 1830065 - RNA, 19 nt, Homo sapiens
  misc_RNA (1)...(19): siRNA sense strand
gaauuagacccucauaucu

SEQ ID NO: 1830066 - RNA, 19 nt, Homo sapiens
  misc_RNA (1)...(19): siRNA sense strand
acaaacauguccugaagau

SEQ ID NO: 1830067 - RNA, 19 nt, Homo sapiens
  misc_RNA (1)...(19): siRNA sense strand
aaaguaaggcaaccaauga

SEQ ID NO: 1830068 - RNA, 19 nt, Homo sapiens
  misc_RNA (1)...(19): siRNA sense strand
acaggcaacugaaaugcua

SEQ ID NO: 1830069 - RNA, 19 nt, Homo sapiens
  misc_RNA (1)...(19): siRNA sense strand
gccaugauucgucaacuua

SEQ ID NO: 1830070 - RNA, 19 nt, Homo sapiens
  misc_RNA (1)...(19): siRNA sense strand
guauuaacaccaugguaua

SEQ ID NO: 1830071 - RNA, 19 nt, Homo sapiens
  misc_RNA (1)...(19): siRNA sense strand
guaaggcaaccaaugauga

SEQ ID NO: 1830072 - RNA, 19 nt, Homo sapiens
  misc_RNA (1)...(19): siRNA sense strand
caucagcguauauuagaua

SEQ ID NO: 1830073 - RNA, 19 nt, Homo sapiens
  misc_RNA (1)...(19): siRNA sense strand
gugaagcacugcagcacaa

SEQ ID NO: 1830074 - RNA, 19 nt, Homo sapiens
  misc_RNA (1)...(19): siRNA sense strand
ccugagaagcugacaauuu

SEQ ID NO: 1830075 - RNA, 19 nt, Homo sapiens
  misc_RNA (1)...(19): siRNA sense strand
uuucagcgguuuaucauga

SEQ ID NO: 1830076 - RNA, 19 nt, Homo sapiens
  misc_RNA (1)...(19): siRNA sense strand
uaagaugauucguacacaa

SEQ ID NO: 1830077 - RNA, 19 nt, Homo sapiens
  misc_RNA (1)...(19): siRNA sense strand
guuuagcuguugccuuuaa

SEQ ID NO: 1830078 - RNA, 19 nt, Homo sapiens
  misc_RNA (1)...(19): siRNA sense strand
gaagauuggucagauuguc

SEQ ID NO: 1830079 - RNA, 19 nt, Homo sapiens
  misc_RNA (1)...(19): siRNA sense strand
auaaugaagccguguauuu

SEQ ID NO: 1830080 - RNA, 19 nt, Homo sapiens
  misc_RNA (1)...(19): siRNA sense strand
aagcguaacucaggaagaa

SEQ ID NO: 1830081 - RNA, 19 nt, Homo sapiens
  misc_RNA (1)...(19): siRNA sense strand
caacacaaacggcgaagug

SEQ ID NO: 1830082 - RNA, 19 nt, Homo sapiens
  misc_RNA (1)...(19): siRNA sense strand
ugaaagugaugaaggaaag

SEQ ID NO: 1830083 - RNA, 19 nt, Homo sapiens
  misc_RNA (1)...(19): siRNA sense strand
caugauucgucaacuuaaa

SEQ ID NO: 1830084 - RNA, 19 nt, Homo sapiens
  misc_RNA (1)...(19): siRNA sense strand
cuguuuagcuguugccuuu

SEQ ID NO: 1830085 - RNA, 19 nt, Homo sapiens
  misc_RNA (1)...(19): siRNA sense strand
uaaugaagccguguauuug

SEQ ID NO: 1830086 - RNA, 19 nt, Homo sapiens
  misc_RNA (1)...(19): siRNA sense strand
gaugggaccaguguauuaa

SEQ ID NO: 1830087 - RNA, 19 nt, Homo sapiens
  misc_RNA (1)...(19): siRNA sense strand
gaacuaucucgugacuuua

SEQ ID NO: 1830088 - RNA, 19 nt, Homo sapiens
  misc_RNA (1)...(19): siRNA sense strand
gaagcuaaagagaaacuug

SEQ ID NO: 1830089 - RNA, 19 nt, Homo sapiens
  misc_RNA (1)...(19): siRNA sense strand
ugaauuagacccucauauc

SEQ ID NO: 1830090 - RNA, 19 nt, Homo sapiens
  misc_RNA (1)...(19): siRNA sense strand
caaauaauccagcaguaca

SEQ ID NO: 1830091 - RNA, 19 nt, Homo sapiens
  misc_RNA (1)...(19): siRNA sense strand
cagaauguuugauuacaca

SEQ ID NO: 1830092 - RNA, 19 nt, Homo sapiens
  misc_RNA (1)...(19): siRNA sense strand
ugaugggaccaguguauua

SEQ ID NO: 1830093 - RNA, 19 nt, Homo sapiens
  misc_RNA (1)...(19): siRNA sense strand
gaucuuaaggcuucuuugu

SEQ ID NO: 1830094 - RNA, 19 nt, Homo sapiens
  misc_RNA (1)...(19): siRNA sense strand
gagaaagaccucugaugca

SEQ ID NO: 1830095 - RNA, 19 nt, Homo sapiens
  misc_RNA (1)...(19): siRNA sense strand
gcugacaauuuauacaaca

SEQ ID NO: 1830096 - RNA, 19 nt, Homo sapiens
  misc_RNA (1)...(19): siRNA sense strand
aaagauguaccaaauccua

SEQ ID NO: 1830097 - RNA, 19 nt, Homo sapiens
  misc_RNA (1)...(19): siRNA sense strand
uguguagacagguuuauua

SEQ ID NO: 1830098 - RNA, 19 nt, Homo sapiens
  misc_RNA (1)...(19): siRNA sense strand
caacacuccucauugaacu

SEQ ID NO: 1830099 - RNA, 19 nt, Homo sapiens
  misc_RNA (1)...(19): siRNA sense strand
cgacgagauugguaugugu

SEQ ID NO: 1830100 - RNA, 19 nt, Homo sapiens
  misc_RNA (1)...(19): siRNA sense strand
uuaacaccaugguauaaga

SEQ ID NO: 1830101 - RNA, 19 nt, Homo sapiens
  misc_RNA (1)...(19): siRNA sense strand
ugaaagauguaccaaaucc

SEQ ID NO: 1830102 - RNA, 19 nt, Homo sapiens
  misc_RNA (1)...(19): siRNA sense strand
gucauucaguggaaagauu

SEQ ID NO: 1830103 - RNA, 19 nt, Homo sapiens
  misc_RNA (1)...(19): siRNA sense strand
augcauuucugucaucuuu

SEQ ID NO: 1830104 - RNA, 19 nt, Homo sapiens
  misc_RNA (1)...(19): siRNA sense strand
ggaggaaccauccacagau

SEQ ID NO: 1830105 - RNA, 19 nt, Homo sapiens
  misc_RNA (1)...(19): siRNA sense strand
ggcaaccaaugaugaaauc

SEQ ID NO: 1830106 - RNA, 19 nt, Homo sapiens
  misc_RNA (1)...(19): siRNA sense strand
gaucuuugcagagcuguuu

SEQ ID NO: 1830107 - RNA, 19 nt, Homo sapiens
  misc_RNA (1)...(19): siRNA sense strand
caagggucaucuucagaau

SEQ ID NO: 1830108 - RNA, 19 nt, Homo sapiens
  misc_RNA (1)...(19): siRNA sense strand
acacugaaagcuaucuuaa

SEQ ID NO: 1830109 - RNA, 19 nt, Homo sapiens
  misc_RNA (1)...(19): siRNA sense strand
gagaugaaaguagcaauuc

SEQ ID NO: 1830110 - RNA, 19 nt, Homo sapiens
  misc_RNA (1)...(19): siRNA sense strand
gaaagucccaaaccgaagu

SEQ ID NO: 1830111 - RNA, 19 nt, Homo sapiens
  misc_RNA (1)...(19): siRNA sense strand
gggaagauuggucagauug

SEQ ID NO: 1830112 - RNA, 19 nt, Homo sapiens
  misc_RNA (1)...(19): siRNA sense strand
uugcagagcuguuucaacu

SEQ ID NO: 1830113 - RNA, 19 nt, Homo sapiens
  misc_RNA (1)...(19): siRNA sense strand
uacaguugcacgccuauua

SEQ ID NO: 1830114 - RNA, 19 nt, Homo sapiens
  misc_RNA (1)...(19): siRNA sense strand
ggucaucuucagaauguuu

SEQ ID NO: 1830115 - RNA, 19 nt, Homo sapiens
  misc_RNA (1)...(19): siRNA sense strand
gaacggcacauccuaagac

SEQ ID NO: 1830116 - RNA, 19 nt, Homo sapiens
  misc_RNA (1)...(19): siRNA sense strand
guggauaagaugauucgua

SEQ ID NO: 1830117 - RNA, 19 nt, Homo sapiens
  misc_RNA (1)...(19): siRNA sense strand
cuacagcaucaccaaauaa

SEQ ID NO: 1830118 - RNA, 19 nt, Homo sapiens
  misc_RNA (1)...(19): siRNA sense strand
gaccucugaugcaaaugaa

SEQ ID NO: 1830119 - RNA, 19 nt, Homo sapiens
  misc_RNA (1)...(19): siRNA sense strand
ugacuuuaccagauuguuu

SEQ ID NO: 1830120 - RNA, 19 nt, Homo sapiens
  misc_RNA (1)...(19): siRNA sense strand
gaaacagccuucucccuua

SEQ ID NO: 1830121 - RNA, 19 nt, Homo sapiens
  misc_RNA (1)...(19): siRNA sense strand
gaaacgagcugccugcaaa

SEQ ID NO: 1830122 - RNA, 19 nt, Homo sapiens
  misc_RNA (1)...(19): siRNA sense strand
gaagcagccuacuaauaua

SEQ ID NO: 1830123 - RNA, 19 nt, Homo sapiens
  misc_RNA (1)...(19): siRNA sense strand
cagaugagcugaccaaaga

SEQ ID NO: 1830124 - RNA, 19 nt, Homo sapiens
  misc_RNA (1)...(19): siRNA sense strand
cgaauacacucuaugaauu

SEQ ID NO: 1830125 - RNA, 19 nt, Homo sapiens
  misc_RNA (1)...(19): siRNA sense strand
ucaaguacauggaguauga

SEQ ID NO: 1830126 - RNA, 19 nt, Homo sapiens
  misc_RNA (1)...(19): siRNA sense strand
ggucagagguuacgccauu

SEQ ID NO: 1830127 - RNA, 19 nt, Homo sapiens
  misc_RNA (1)...(19): siRNA sense strand
ccggauggaucuuuauuua

SEQ ID NO: 1830128 - RNA, 19 nt, Homo sapiens
  misc_RNA (1)...(19): siRNA sense strand
cgaaaggccucccgaaaga

SEQ ID NO: 1830129 - RNA, 19 nt, Homo sapiens
  misc_RNA (1)...(19): siRNA sense strand
guguacaucuuuagaguua

SEQ ID NO: 1830130 - RNA, 19 nt, Homo sapiens
  misc_RNA (1)...(19): siRNA sense strand
ggauggaucuuuauuuauc

SEQ ID NO: 1830131 - RNA, 19 nt, Homo sapiens
  misc_RNA (1)...(19): siRNA sense strand
agaaagcucugaaagauug

SEQ ID NO: 1830132 - RNA, 19 nt, Homo sapiens
  misc_RNA (1)...(19): siRNA sense strand
ccacaaggauguuggaaga

SEQ ID NO: 1830133 - RNA, 19 nt, Homo sapiens
  misc_RNA (1)...(19): siRNA sense strand
gagcugaaacccauugaua

SEQ ID NO: 1830134 - RNA, 19 nt, Homo sapiens
  misc_RNA (1)...(19): siRNA sense strand
gaaagugaccuagaugaaa

SEQ ID NO: 1830135 - RNA, 19 nt, Homo sapiens
  misc_RNA (1)...(19): siRNA sense strand
gugaauggcucucauaagu

SEQ ID NO: 1830136 - RNA, 19 nt, Homo sapiens
  misc_RNA (1)...(19): siRNA sense strand
gaagugagaaauucaaaga

SEQ ID NO: 1830137 - RNA, 19 nt, Homo sapiens
  misc_RNA (1)...(19): siRNA sense strand
caagauaucacaccaguug

SEQ ID NO: 1830138 - RNA, 19 nt, Homo sapiens
  misc_RNA (1)...(19): siRNA sense strand
caaagggaauuccaaagau

SEQ ID NO: 1830139 - RNA, 19 nt, Homo sapiens
  misc_RNA (1)...(19): siRNA sense strand
ccucgcaacucucaagaua

SEQ ID NO: 1830140 - RNA, 19 nt, Homo sapiens
  misc_RNA (1)...(19): siRNA sense strand
gauaucagacuugguauuu

SEQ ID NO: 1830141 - RNA, 19 nt, Homo sapiens
  misc_RNA (1)...(19): siRNA sense strand
ggacagcaauauccaucaa

SEQ ID NO: 1830142 - RNA, 19 nt, Homo sapiens
  misc_RNA (1)...(19): siRNA sense strand
gaauggcucucauaaguac

SEQ ID NO: 1830143 - RNA, 19 nt, Homo sapiens
  misc_RNA (1)...(19): siRNA sense strand
gcucacgaaucuauggaua

SEQ ID NO: 1830144 - RNA, 19 nt, Homo sapiens
  misc_RNA (1)...(19): siRNA sense strand
ugaagcagccuacuaauau

SEQ ID NO: 1830145 - RNA, 19 nt, Homo sapiens
  misc_RNA (1)...(19): siRNA sense strand
ggaacauaaucuucaaguu

SEQ ID NO: 1830146 - RNA, 19 nt, Homo sapiens
  misc_RNA (1)...(19): siRNA sense strand
ggucauaauuguuucuguu

SEQ ID NO: 1830147 - RNA, 19 nt, Homo sapiens
  misc_RNA (1)...(19): siRNA sense strand
cagacugacucaccagaua

SEQ ID NO: 1830148 - RNA, 19 nt, Homo sapiens
  misc_RNA (1)...(19): siRNA sense strand
ggucgaagaucaaguacau

SEQ ID NO: 1830149 - RNA, 19 nt, Homo sapiens
  misc_RNA (1)...(19): siRNA sense strand
ccaucaaaguggacuauaa

SEQ ID NO: 1830150 - RNA, 19 nt, Homo sapiens
  misc_RNA (1)...(19): siRNA sense strand
gaugaaggguucuaucagu

SEQ ID NO: 1830151 - RNA, 19 nt, Homo sapiens
  misc_RNA (1)...(19): siRNA sense strand
gcaaccacuuugaguuauu

SEQ ID NO: 1830152 - RNA, 19 nt, Homo sapiens
  misc_RNA (1)...(19): siRNA sense strand
gugagaaauucaaagagua

SEQ ID NO: 1830153 - RNA, 19 nt, Homo sapiens
  misc_RNA (1)...(19): siRNA sense strand
gagguuacgccauugguua

SEQ ID NO: 1830154 - RNA, 19 nt, Homo sapiens
  misc_RNA (1)...(19): siRNA sense strand
gagagucuuggaacuauua

SEQ ID NO: 1830155 - RNA, 19 nt, Homo sapiens
  misc_RNA (1)...(19): siRNA sense strand
aaagcggacuccucugaua

SEQ ID NO: 1830156 - RNA, 19 nt, Homo sapiens
  misc_RNA (1)...(19): siRNA sense strand
gaucccagcucucacuaug

SEQ ID NO: 1830157 - RNA, 19 nt, Homo sapiens
  misc_RNA (1)...(19): siRNA sense strand
gugaugaaguugaauugaa

SEQ ID NO: 1830158 - RNA, 19 nt, Homo sapiens
  misc_RNA (1)...(19): siRNA sense strand
ccagaaccuuccucaguuu

SEQ ID NO: 1830159 - RNA, 19 nt, Homo sapiens
  misc_RNA (1)...(19): siRNA sense strand
ugaaggaccuaaacgcuau

SEQ ID NO: 1830160 - RNA, 19 nt, Homo sapiens
  misc_RNA (1)...(19): siRNA sense strand
gcagauuacuggcuacaag

SEQ ID NO: 1830161 - RNA, 19 nt, Homo sapiens
  misc_RNA (1)...(19): siRNA sense strand
guggauacacucucaguua

SEQ ID NO: 1830162 - RNA, 19 nt, Homo sapiens
  misc_RNA (1)...(19): siRNA sense strand
ucacgaaucuauggauauu

SEQ ID NO: 1830163 - RNA, 19 nt, Homo sapiens
  misc_RNA (1)...(19): siRNA sense strand
ggugauaucagacuuggua

SEQ ID NO: 1830164 - RNA, 19 nt, Homo sapiens
  misc_RNA (1)...(19): siRNA sense strand
caaccacuuugaguuauuu

SEQ ID NO: 1830165 - RNA, 19 nt, Homo sapiens
  misc_RNA (1)...(19): siRNA sense strand
gagacaaccuuaccuacuc

SEQ ID NO: 1830166 - RNA, 19 nt, Homo sapiens
  misc_RNA (1)...(19): siRNA sense strand
gaacagcgaagcucauagu

SEQ ID NO: 1830167 - RNA, 19 nt, Homo sapiens
  misc_RNA (1)...(19): siRNA sense strand
guacaaagggaauuccaaa

SEQ ID NO: 1830168 - RNA, 19 nt, Homo sapiens
  misc_RNA (1)...(19): siRNA sense strand
guacaucuuuagaguuaug

SEQ ID NO: 1830169 - RNA, 19 nt, Homo sapiens
  misc_RNA (1)...(19): siRNA sense strand
gaaccuuccucaguuuaug

SEQ ID NO: 1830170 - RNA, 19 nt, Homo sapiens
  misc_RNA (1)...(19): siRNA sense strand
auacaugacuggguuauug

SEQ ID NO: 1830171 - RNA, 19 nt, Homo sapiens
  misc_RNA (1)...(19): siRNA sense strand
ccaaggaugugacuguugu

SEQ ID NO: 1830172 - RNA, 19 nt, Homo sapiens
  misc_RNA (1)...(19): siRNA sense strand
gcaaacaccaaguacaaga

SEQ ID NO: 1830173 - RNA, 19 nt, Homo sapiens
  misc_RNA (1)...(19): siRNA sense strand
caugacaccaucaggauua

SEQ ID NO: 1830174 - RNA, 19 nt, Homo sapiens
  misc_RNA (1)...(19): siRNA sense strand
guauagugaugaaguugaa

SEQ ID NO: 1830175 - RNA, 19 nt, Homo sapiens
  misc_RNA (1)...(19): siRNA sense strand
ccaaguggaaugcugguua

SEQ ID NO: 1830176 - RNA, 19 nt, Homo sapiens
  misc_RNA (1)...(19): siRNA sense strand
caaacaugcugcacugauc

SEQ ID NO: 1830177 - RNA, 19 nt, Homo sapiens
  misc_RNA (1)...(19): siRNA sense strand
aaaccaacaucccagcaaa

SEQ ID NO: 1830178 - RNA, 19 nt, Homo sapiens
  misc_RNA (1)...(19): siRNA sense strand
guucgaacauugucagaug

SEQ ID NO: 1830179 - RNA, 19 nt, Homo sapiens
  misc_RNA (1)...(19): siRNA sense strand
caaguggaaugcugguuau

SEQ ID NO: 1830180 - RNA, 19 nt, Homo sapiens
  misc_RNA (1)...(19): siRNA sense strand
caccuaaccuucgugcaua

SEQ ID NO: 1830181 - RNA, 19 nt, Homo sapiens
  misc_RNA (1)...(19): siRNA sense strand
ccaaugagcggcaguaaca

SEQ ID NO: 1830182 - RNA, 19 nt, Homo sapiens
  misc_RNA (1)...(19): siRNA sense strand
ggaugugacuguugugagu

SEQ ID NO: 1830183 - RNA, 19 nt, Homo sapiens
  misc_RNA (1)...(19): siRNA sense strand
aggcucuucuguuauauua

SEQ ID NO: 1830184 - RNA, 19 nt, Homo sapiens
  misc_RNA (1)...(19): siRNA sense strand
ccuaagaccauaauuguga

SEQ ID NO: 1830185 - RNA, 19 nt, Homo sapiens
  misc_RNA (1)...(19): siRNA sense strand
gcucguuacuagcaucgua

SEQ ID NO: 1830186 - RNA, 19 nt, Homo sapiens
  misc_RNA (1)...(19): siRNA sense strand
ugaaguuaaugcagauuug

SEQ ID NO: 1830187 - RNA, 19 nt, Homo sapiens
  misc_RNA (1)...(19): siRNA sense strand
gaccaccuuugaauuaguu

SEQ ID NO: 1830188 - RNA, 19 nt, Homo sapiens
  misc_RNA (1)...(19): siRNA sense strand
guuauuuggugacugguuu

SEQ ID NO: 1830189 - RNA, 19 nt, Homo sapiens
  misc_RNA (1)...(19): siRNA sense strand
caucaaaguggacuauaaa

SEQ ID NO: 1830190 - RNA, 19 nt, Homo sapiens
  misc_RNA (1)...(19): siRNA sense strand
gccuagcucucuucacgua

SEQ ID NO: 1830191 - RNA, 19 nt, Homo sapiens
  misc_RNA (1)...(19): siRNA sense strand
gcucuaacaaucaauggua

SEQ ID NO: 1830192 - RNA, 19 nt, Homo sapiens
  misc_RNA (1)...(19): siRNA sense strand
ggaggcacuugacacagaa

SEQ ID NO: 1830193 - RNA, 19 nt, Homo sapiens
  misc_RNA (1)...(19): siRNA sense strand
gauaauccuugaacaugca

SEQ ID NO: 1830194 - RNA, 19 nt, Homo sapiens
  misc_RNA (1)...(19): siRNA sense strand
ccuaaacgcuaucacaaca

SEQ ID NO: 1830195 - RNA, 19 nt, Homo sapiens
  misc_RNA (1)...(19): siRNA sense strand
ggacuccucugauaaaaug

SEQ ID NO: 1830196 - RNA, 19 nt, Homo sapiens
  misc_RNA (1)...(19): siRNA sense strand
ggaacuauuaucaguagaa

SEQ ID NO: 1830197 - RNA, 19 nt, Homo sapiens
  misc_RNA (1)...(19): siRNA sense strand
aaagggaauuccaaagaug

SEQ ID NO: 1830198 - RNA, 19 nt, Homo sapiens
  misc_RNA (1)...(19): siRNA sense strand
ccucuccucuggacaguaa

SEQ ID NO: 1830199 - RNA, 19 nt, Homo sapiens
  misc_RNA (1)...(19): siRNA sense strand
gucugaagcuguccaauuc

SEQ ID NO: 1830200 - RNA, 19 nt, Homo sapiens
  misc_RNA (1)...(19): siRNA sense strand
ccgaguggcugcucuaaca

SEQ ID NO: 1830201 - RNA, 19 nt, Homo sapiens
  misc_RNA (1)...(19): siRNA sense strand
gaugaagguuauuaucagu

SEQ ID NO: 1830202 - RNA, 19 nt, Homo sapiens
  misc_RNA (1)...(19): siRNA sense strand
uauauaugcucacgaaucu

SEQ ID NO: 1830203 - RNA, 19 nt, Homo sapiens
  misc_RNA (1)...(19): siRNA sense strand
gcagccuacuaauauauau

SEQ ID NO: 1830204 - RNA, 19 nt, Homo sapiens
  misc_RNA (1)...(19): siRNA sense strand
caaugcaacugaaggagau

SEQ ID NO: 1830205 - RNA, 19 nt, Homo sapiens
  misc_RNA (1)...(19): siRNA sense strand
ccaccaaaguauagugaug

SEQ ID NO: 1830206 - RNA, 19 nt, Homo sapiens
  misc_RNA (1)...(19): siRNA sense strand
guaaaggaacauaaucuuc

SEQ ID NO: 1830207 - RNA, 19 nt, Homo sapiens
  misc_RNA (1)...(19): siRNA sense strand
agaugugaaugcagagaua

SEQ ID NO: 1830208 - RNA, 19 nt, Homo sapiens
  misc_RNA (1)...(19): siRNA sense strand
cagcaaacaccaaguacaa

SEQ ID NO: 1830209 - RNA, 19 nt, Homo sapiens
  misc_RNA (1)...(19): siRNA sense strand
ugauuacccugaaagcauu

SEQ ID NO: 1830210 - RNA, 19 nt, Homo sapiens
  misc_RNA (1)...(19): siRNA sense strand
gcggacaccugcaucagau

SEQ ID NO: 1830211 - RNA, 19 nt, Homo sapiens
  misc_RNA (1)...(19): siRNA sense strand
ggaaaugagacaauugaag

SEQ ID NO: 1830212 - RNA, 19 nt, Homo sapiens
  misc_RNA (1)...(19): siRNA sense strand
ccacagaauccguucgaaa

SEQ ID NO: 1830213 - RNA, 19 nt, Homo sapiens
  misc_RNA (1)...(19): siRNA sense strand
gaacguucacuccauuuua

SEQ ID NO: 1830214 - RNA, 19 nt, Homo sapiens
  misc_RNA (1)...(19): siRNA sense strand
guaauaugcugcuggucau

SEQ ID NO: 1830215 - RNA, 19 nt, Homo sapiens
  misc_RNA (1)...(19): siRNA sense strand
ccuaggauccgacuacaaa

SEQ ID NO: 1830216 - RNA, 19 nt, Homo sapiens
  misc_RNA (1)...(19): siRNA sense strand
gaagcuguccaauucagaa

SEQ ID NO: 1830217 - RNA, 19 nt, Homo sapiens
  misc_RNA (1)...(19): siRNA sense strand
aaaggucgaagaucaagua

SEQ ID NO: 1830218 - RNA, 19 nt, Homo sapiens
  misc_RNA (1)...(19): siRNA sense strand
uaaacaugguccuggaguu

SEQ ID NO: 1830219 - RNA, 19 nt, Homo sapiens
  misc_RNA (1)...(19): siRNA sense strand
gggaacguguugagaauac

SEQ ID NO: 1830220 - RNA, 19 nt, Homo sapiens
  misc_RNA (1)...(19): siRNA sense strand
caucagaguuguaccauaa

SEQ ID NO: 1830221 - RNA, 19 nt, Homo sapiens
  misc_RNA (1)...(19): siRNA sense strand
ccacaaagacuuccuaauu

SEQ ID NO: 1830222 - RNA, 19 nt, Homo sapiens
  misc_RNA (1)...(19): siRNA sense strand
cacaaagacuuccuaauug

SEQ ID NO: 1830223 - RNA, 19 nt, Homo sapiens
  misc_RNA (1)...(19): siRNA sense strand
ggauucaugucucucauuu

SEQ ID NO: 1830224 - RNA, 19 nt, Homo sapiens
  misc_RNA (1)...(19): siRNA sense strand
ggucaucuguggcaguaua

SEQ ID NO: 1830225 - RNA, 19 nt, Homo sapiens
  misc_RNA (1)...(19): siRNA sense strand
ugaggaagcuugcaacaug

SEQ ID NO: 1830226 - RNA, 19 nt, Homo sapiens
  misc_RNA (1)...(19): siRNA sense strand
gcaguaaacaucuguggua

SEQ ID NO: 1830227 - RNA, 19 nt, Homo sapiens
  misc_RNA (1)...(19): siRNA sense strand
gaaguucugucugauuuau

SEQ ID NO: 1830228 - RNA, 19 nt, Homo sapiens
  misc_RNA (1)...(19): siRNA sense strand
aaacagaugucuacagcuu

SEQ ID NO: 1830229 - RNA, 19 nt, Homo sapiens
  misc_RNA (1)...(19): siRNA sense strand
gagcagcuguuccuccaaa

SEQ ID NO: 1830230 - RNA, 19 nt, Homo sapiens
  misc_RNA (1)...(19): siRNA sense strand
gaugaaagccagaauaaca

SEQ ID NO: 1830231 - RNA, 19 nt, Homo sapiens
  misc_RNA (1)...(19): siRNA sense strand
ggaacaagagaauuacuuu

SEQ ID NO: 1830232 - RNA, 19 nt, Homo sapiens
  misc_RNA (1)...(19): siRNA sense strand
gcagagagacuuucaagca

SEQ ID NO: 1830233 - RNA, 19 nt, Homo sapiens
  misc_RNA (1)...(19): siRNA sense strand
agaaggaacuagaaauuuc

SEQ ID NO: 1830234 - RNA, 19 nt, Homo sapiens
  misc_RNA (1)...(19): siRNA sense strand
guagaguaguguuagauga

SEQ ID NO: 1830235 - RNA, 19 nt, Homo sapiens
  misc_RNA (1)...(19): siRNA sense strand
cuagaaauuuccacaaaga

SEQ ID NO: 1830236 - RNA, 19 nt, Homo sapiens
  misc_RNA (1)...(19): siRNA sense strand
gaccaucggugaccuuuua

SEQ ID NO: 1830237 - RNA, 19 nt, Homo sapiens
  misc_RNA (1)...(19): siRNA sense strand
ccacaucacuaaaguccuu

SEQ ID NO: 1830238 - RNA, 19 nt, Homo sapiens
  misc_RNA (1)...(19): siRNA sense strand
guaaacaucugugguacau

SEQ ID NO: 1830239 - RNA, 19 nt, Homo sapiens
  misc_RNA (1)...(19): siRNA sense strand
cugccaagcucuucuguuu

SEQ ID NO: 1830240 - RNA, 19 nt, Homo sapiens
  misc_RNA (1)...(19): siRNA sense strand
gaagagaggccuggauuca

SEQ ID NO: 1830241 - RNA, 19 nt, Homo sapiens
  misc_RNA (1)...(19): siRNA sense strand
ggagagcucugcgcuguuc

SEQ ID NO: 1830242 - RNA, 19 nt, Homo sapiens
  misc_RNA (1)...(19): siRNA sense strand
ggaugaauaugaacaguac

SEQ ID NO: 1830243 - RNA, 19 nt, Homo sapiens
  misc_RNA (1)...(19): siRNA sense strand
gagaauugauggagaagag

SEQ ID NO: 1830244 - RNA, 19 nt, Homo sapiens
  misc_RNA (1)...(19): siRNA sense strand
ccuaacauaugcugucaaa

SEQ ID NO: 1830245 - RNA, 19 nt, Homo sapiens
  misc_RNA (1)...(19): siRNA sense strand
gaacaagagaauuacuuug

SEQ ID NO: 1830246 - RNA, 19 nt, Homo sapiens
  misc_RNA (1)...(19): siRNA sense strand
gagaagagaggccuggauu

SEQ ID NO: 1830247 - RNA, 19 nt, Homo sapiens
  misc_RNA (1)...(19): siRNA sense strand
uuacagagacugagaaguu

SEQ ID NO: 1830248 - RNA, 19 nt, Homo sapiens
  misc_RNA (1)...(19): siRNA sense strand
gaaaugaggaagcuugcaa

SEQ ID NO: 1830249 - RNA, 19 nt, Homo sapiens
  misc_RNA (1)...(19): siRNA sense strand
gaugaugaaagccagaaua

SEQ ID NO: 1830250 - RNA, 19 nt, Homo sapiens
  misc_RNA (1)...(19): siRNA sense strand
gaugaaggccugaggauag

SEQ ID NO: 1830251 - RNA, 19 nt, Homo sapiens
  misc_RNA (1)...(19): siRNA sense strand
gaguacugcuuaaaucuuc

SEQ ID NO: 1830252 - RNA, 19 nt, Homo sapiens
  misc_RNA (1)...(19): siRNA sense strand
caugagaaauggaacacuu

SEQ ID NO: 1830253 - RNA, 19 nt, Homo sapiens
  misc_RNA (1)...(19): siRNA sense strand
gaacuagaaauuuccacaa

SEQ ID NO: 1830254 - RNA, 19 nt, Homo sapiens
  misc_RNA (1)...(19): siRNA sense strand
ccagagagcaagagaaaug

SEQ ID NO: 1830255 - RNA, 19 nt, Homo sapiens
  misc_RNA (1)...(19): siRNA sense strand
uaucugagcuugaaguuuu

SEQ ID NO: 1830256 - RNA, 19 nt, Homo sapiens
  misc_RNA (1)...(19): siRNA sense strand
uuaaggcccuauaagguaa

SEQ ID NO: 1830257 - RNA, 19 nt, Homo sapiens
  misc_RNA (1)...(19): siRNA sense strand
ucgucgagcuauucauuua

SEQ ID NO: 1830258 - RNA, 19 nt, Homo sapiens
  misc_RNA (1)...(19): siRNA sense strand
gaaauuuccacaaagacuu

SEQ ID NO: 1830259 - RNA, 19 nt, Homo sapiens
  misc_RNA (1)...(19): siRNA sense strand
agagaggccuggauucaug

SEQ ID NO: 1830260 - RNA, 19 nt, Homo sapiens
  misc_RNA (1)...(19): siRNA sense strand
agagaagaguuaucaggaa

SEQ ID NO: 1830261 - RNA, 19 nt, Homo sapiens
  misc_RNA (1)...(19): siRNA sense strand
ggcaguauaucaagugcaa

SEQ ID NO: 1830262 - RNA, 19 nt, Homo sapiens
  misc_RNA (1)...(19): siRNA sense strand
ggacaucgucgagcuauuc

SEQ ID NO: 1830263 - RNA, 19 nt, Homo sapiens
  misc_RNA (1)...(19): siRNA sense strand
acaauuuacuaccuucuga

SEQ ID NO: 1830264 - RNA, 19 nt, Homo sapiens
  misc_RNA (1)...(19): siRNA sense strand
uuagagaauugauggagaa

SEQ ID NO: 1830265 - RNA, 19 nt, Homo sapiens
  misc_RNA (1)...(19): siRNA sense strand
gauguagaguaguguuaga

SEQ ID NO: 1830266 - RNA, 19 nt, Homo sapiens
  misc_RNA (1)...(19): siRNA sense strand
acaaagacuuccuaauugg

SEQ ID NO: 1830267 - RNA, 19 nt, Homo sapiens
  misc_RNA (1)...(19): siRNA sense strand
cagcuguuccuccaaauuu

SEQ ID NO: 1830268 - RNA, 19 nt, Homo sapiens
  misc_RNA (1)...(19): siRNA sense strand
gauccucccacaucacuaa

SEQ ID NO: 1830269 - RNA, 19 nt, Homo sapiens
  misc_RNA (1)...(19): siRNA sense strand
guauguagaccaagguaaa

SEQ ID NO: 1830270 - RNA, 19 nt, Homo sapiens
  misc_RNA (1)...(19): siRNA sense strand
caacccaaacuaacugauu

SEQ ID NO: 1830271 - RNA, 19 nt, Homo sapiens
  misc_RNA (1)...(19): siRNA sense strand
ugaagauccucccacauca

SEQ ID NO: 1830272 - RNA, 19 nt, Homo sapiens
  misc_RNA (1)...(19): siRNA sense strand
ggauguucgucauauugaa

SEQ ID NO: 1830273 - RNA, 19 nt, Homo sapiens
  misc_RNA (1)...(19): siRNA sense strand
acagaugucuacagcuuug

SEQ ID NO: 1830274 - RNA, 19 nt, Homo sapiens
  misc_RNA (1)...(19): siRNA sense strand
gaacaucagaguuguacca

SEQ ID NO: 1830275 - RNA, 19 nt, Homo sapiens
  misc_RNA (1)...(19): siRNA sense strand
gaagaguuaucaggaaggu

SEQ ID NO: 1830276 - RNA, 19 nt, Homo sapiens
  misc_RNA (1)...(19): siRNA sense strand
gaaagccagaauaacaauu

SEQ ID NO: 1830277 - RNA, 19 nt, Homo sapiens
  misc_RNA (1)...(19): siRNA sense strand
aacccaaacuaacugauuu

SEQ ID NO: 1830278 - RNA, 19 nt, Homo sapiens
  misc_RNA (1)...(19): siRNA sense strand
gaaguucuaacaggaugua

SEQ ID NO: 1830279 - RNA, 19 nt, Homo sapiens
  misc_RNA (1)...(19): siRNA sense strand
ucaugucucucauuucuag

SEQ ID NO: 1830280 - RNA, 19 nt, Homo sapiens
  misc_RNA (1)...(19): siRNA sense strand
gucuacagcuuuggaauug

SEQ ID NO: 1830281 - RNA, 19 nt, Homo sapiens
  misc_RNA (1)...(19): siRNA sense strand
gcccaguucuucuugugaa

SEQ ID NO: 1830282 - RNA, 19 nt, Homo sapiens
  misc_RNA (1)...(19): siRNA sense strand
caagagaaaugaggaagcu

SEQ ID NO: 1830283 - RNA, 19 nt, Homo sapiens
  misc_RNA (1)...(19): siRNA sense strand
cuaacaggauguagaguag

SEQ ID NO: 1830284 - RNA, 19 nt, Homo sapiens
  misc_RNA (1)...(19): siRNA sense strand
ggagcaguguugaguccuu

SEQ ID NO: 1830285 - RNA, 19 nt, Homo sapiens
  misc_RNA (1)...(19): siRNA sense strand
gggaugaauaugaacagua

SEQ ID NO: 1830286 - RNA, 19 nt, Homo sapiens
  misc_RNA (1)...(19): siRNA sense strand
agaguuggcugcauauuuu

SEQ ID NO: 1830287 - RNA, 19 nt, Homo sapiens
  misc_RNA (1)...(19): siRNA sense strand
uacuagaguuggcugcaua

SEQ ID NO: 1830288 - RNA, 19 nt, Homo sapiens
  misc_RNA (1)...(19): siRNA sense strand
uccaucagcuuucaaaaua

SEQ ID NO: 1830289 - RNA, 19 nt, Homo sapiens
  misc_RNA (1)...(19): siRNA sense strand
ggaguacugcuuaaaucuu

SEQ ID NO: 1830290 - RNA, 19 nt, Homo sapiens
  misc_RNA (1)...(19): siRNA sense strand
gcacauucgaaucgguaua

SEQ ID NO: 1830291 - RNA, 19 nt, Homo sapiens
  misc_RNA (1)...(19): siRNA sense strand
uagaguuggcugcauauuu

SEQ ID NO: 1830292 - RNA, 19 nt, Homo sapiens
  misc_RNA (1)...(19): siRNA sense strand
cugcuuaaaucuuccauca

SEQ ID NO: 1830293 - RNA, 19 nt, Homo sapiens
  misc_RNA (1)...(19): siRNA sense strand
uaucauagaaggaacuaga

SEQ ID NO: 1830294 - RNA, 19 nt, Homo sapiens
  misc_RNA (1)...(19): siRNA sense strand
uauaucaagugcaaacauc

SEQ ID NO: 1830295 - RNA, 19 nt, Homo sapiens
  misc_RNA (1)...(19): siRNA sense strand
guaagaagcauuggaagag

SEQ ID NO: 1830296 - RNA, 19 nt, Homo sapiens
  misc_RNA (1)...(19): siRNA sense strand
gcuggauguucgucauauu

SEQ ID NO: 1830297 - RNA, 19 nt, Homo sapiens
  misc_RNA (1)...(19): siRNA sense strand
ggucccaccuagaacauca

SEQ ID NO: 1830298 - RNA, 19 nt, Homo sapiens
  misc_RNA (1)...(19): siRNA sense strand
uuuacuaccuucugaugaa

SEQ ID NO: 1830299 - RNA, 19 nt, Homo sapiens
  misc_RNA (1)...(19): siRNA sense strand
uggagaauguaccaaguau

SEQ ID NO: 1830300 - RNA, 19 nt, Homo sapiens
  misc_RNA (1)...(19): siRNA sense strand
gauguucgucauauugaaa

SEQ ID NO: 1830301 - RNA, 19 nt, Homo sapiens
  misc_RNA (1)...(19): siRNA sense strand
ccaaugucaccguggauaa

SEQ ID NO: 1830302 - RNA, 19 nt, Homo sapiens
  misc_RNA (1)...(19): siRNA sense strand
cauucgaaucgguauauua

SEQ ID NO: 1830303 - RNA, 19 nt, Homo sapiens
  misc_RNA (1)...(19): siRNA sense strand
ccaaagccauucacuaccu

SEQ ID NO: 1830304 - RNA, 19 nt, Homo sapiens
  misc_RNA (1)...(19): siRNA sense strand
gcaaaguuaagaccaucaa

SEQ ID NO: 1830305 - RNA, 19 nt, Homo sapiens
  misc_RNA (1)...(19): siRNA sense strand
gcugcgggaucuccuuaga

SEQ ID NO: 1830306 - RNA, 19 nt, Homo sapiens
  misc_RNA (1)...(19): siRNA sense strand
cagaguuguaccauaaaua

SEQ ID NO: 1830307 - RNA, 19 nt, Homo sapiens
  misc_RNA (1)...(19): siRNA sense strand
ucagaguuguaccauaaau

SEQ ID NO: 1830308 - RNA, 19 nt, Homo sapiens
  misc_RNA (1)...(19): siRNA sense strand
aaggaguacugcuuaaauc

SEQ ID NO: 1830309 - RNA, 19 nt, Homo sapiens
  misc_RNA (1)...(19): siRNA sense strand
gcagcuguuccuccaaauu

SEQ ID NO: 1830310 - RNA, 19 nt, Homo sapiens
  misc_RNA (1)...(19): siRNA sense strand
agucugagguuauguuucu

SEQ ID NO: 1830311 - RNA, 19 nt, Homo sapiens
  misc_RNA (1)...(19): siRNA sense strand
aaguggaacaagagaauua

SEQ ID NO: 1830312 - RNA, 19 nt, Homo sapiens
  misc_RNA (1)...(19): siRNA sense strand
cagcuuuggaauuguaaua

SEQ ID NO: 1830313 - RNA, 19 nt, Homo sapiens
  misc_RNA (1)...(19): siRNA sense strand
caucgucgagcuauucauu

SEQ ID NO: 1830314 - RNA, 19 nt, Homo sapiens
  misc_RNA (1)...(19): siRNA sense strand
ucaaggaaacagccaaugu

SEQ ID NO: 1830315 - RNA, 19 nt, Homo sapiens
  misc_RNA (1)...(19): siRNA sense strand
uagacagaaugacucagaa

SEQ ID NO: 1830316 - RNA, 19 nt, Homo sapiens
  misc_RNA (1)...(19): siRNA sense strand
ggauagacagaaugacuca

SEQ ID NO: 1830317 - RNA, 19 nt, Homo sapiens
  misc_RNA (1)...(19): siRNA sense strand
ggagaauguaccaaguauu

SEQ ID NO: 1830318 - RNA, 19 nt, Homo sapiens
  misc_RNA (1)...(19): siRNA sense strand
gccagaagaguacaucaga

SEQ ID NO: 1830319 - RNA, 19 nt, Homo sapiens
  misc_RNA (1)...(19): siRNA sense strand
gucgagcuauucauuuaau

SEQ ID NO: 1830320 - RNA, 19 nt, Homo sapiens
  misc_RNA (1)...(19): siRNA sense strand
ccagcucaaugccauauuu

SEQ ID NO: 1830321 - RNA, 19 nt, Homo sapiens
  misc_RNA (1)...(19): siRNA sense strand
ucccaugucuuccacguua

SEQ ID NO: 1830322 - RNA, 19 nt, Homo sapiens
  misc_RNA (1)...(19): siRNA sense strand
caacuucucuuucaaacac

SEQ ID NO: 1830323 - RNA, 19 nt, Homo sapiens
  misc_RNA (1)...(19): siRNA sense strand
ucaaugccauauuucauga

SEQ ID NO: 1830324 - RNA, 19 nt, Homo sapiens
  misc_RNA (1)...(19): siRNA sense strand
gcaccagcccuuccuuuga

SEQ ID NO: 1830325 - RNA, 19 nt, Homo sapiens
  misc_RNA (1)...(19): siRNA sense strand
cagcaucaauggcaacuuc

SEQ ID NO: 1830326 - RNA, 19 nt, Homo sapiens
  misc_RNA (1)...(19): siRNA sense strand
gcacgaggcagacaagaag

SEQ ID NO: 1830327 - RNA, 19 nt, Homo sapiens
  misc_RNA (1)...(19): siRNA sense strand
gaaagcccucugacugauu

SEQ ID NO: 1830328 - RNA, 19 nt, Homo sapiens
  misc_RNA (1)...(19): siRNA sense strand
ugagacgcaugaaggcuaa

SEQ ID NO: 1830329 - RNA, 19 nt, Homo sapiens
  misc_RNA (1)...(19): siRNA sense strand
gagaggaggaggacgaaga

SEQ ID NO: 1830330 - RNA, 19 nt, Homo sapiens
  misc_RNA (1)...(19): siRNA sense strand
cuggagcccuucuuugaaa

SEQ ID NO: 1830331 - RNA, 19 nt, Homo sapiens
  misc_RNA (1)...(19): siRNA sense strand
gauagccauucacaucaug

SEQ ID NO: 1830332 - RNA, 19 nt, Homo sapiens
  misc_RNA (1)...(19): siRNA sense strand
aaagcccucugacugauug

SEQ ID NO: 1830333 - RNA, 19 nt, Homo sapiens
  misc_RNA (1)...(19): siRNA sense strand
caccagcccuuccuuugau

SEQ ID NO: 1830334 - RNA, 19 nt, Homo sapiens
  misc_RNA (1)...(19): siRNA sense strand
ggaagaggaggaagaagag

SEQ ID NO: 1830335 - RNA, 19 nt, Homo sapiens
  misc_RNA (1)...(19): siRNA sense strand
aauggcaacuucucuuuca

SEQ ID NO: 1830336 - RNA, 19 nt, Homo sapiens
  misc_RNA (1)...(19): siRNA sense strand
ucaauggcaacuucucuuu

SEQ ID NO: 1830337 - RNA, 19 nt, Homo sapiens
  misc_RNA (1)...(19): siRNA sense strand
gaacgcagaggaggacuca

SEQ ID NO: 1830338 - RNA, 19 nt, Homo sapiens
  misc_RNA (1)...(19): siRNA sense strand
gugccuugcuauucuaaga

SEQ ID NO: 1830339 - RNA, 19 nt, Homo sapiens
  misc_RNA (1)...(19): siRNA sense strand
gguggugccuugcuauucu

SEQ ID NO: 1830340 - RNA, 19 nt, Homo sapiens
  misc_RNA (1)...(19): siRNA sense strand
ggaagaggaggaugacgau

SEQ ID NO: 1830341 - RNA, 19 nt, Homo sapiens
  misc_RNA (1)...(19): siRNA sense strand
ccacggaucaaucuucuca

SEQ ID NO: 1830342 - RNA, 19 nt, Homo sapiens
  misc_RNA (1)...(19): siRNA sense strand
agaggaggaugacgaucaa

SEQ ID NO: 1830343 - RNA, 19 nt, Homo sapiens
  misc_RNA (1)...(19): siRNA sense strand
ugaaagcccucugacugau

SEQ ID NO: 1830344 - RNA, 19 nt, Homo sapiens
  misc_RNA (1)...(19): siRNA sense strand
gcagaggaggacucacuga

SEQ ID NO: 1830345 - RNA, 19 nt, Homo sapiens
  misc_RNA (1)...(19): siRNA sense strand
ccaaagccacggaucaauc

SEQ ID NO: 1830346 - RNA, 19 nt, Homo sapiens
  misc_RNA (1)...(19): siRNA sense strand
ugccauauuucaugauuag

SEQ ID NO: 1830347 - RNA, 19 nt, Homo sapiens
  misc_RNA (1)...(19): siRNA sense strand
gcuggagcccuucuuugaa

SEQ ID NO: 1830348 - RNA, 19 nt, Homo sapiens
  misc_RNA (1)...(19): siRNA sense strand
cgaaccguccgccgaguuu

SEQ ID NO: 1830349 - RNA, 19 nt, Homo sapiens
  misc_RNA (1)...(19): siRNA sense strand
caaagccacggaucaaucu

SEQ ID NO: 1830350 - RNA, 19 nt, Homo sapiens
  misc_RNA (1)...(19): siRNA sense strand
uggaagaggaggaagaaga

SEQ ID NO: 1830351 - RNA, 19 nt, Homo sapiens
  misc_RNA (1)...(19): siRNA sense strand
cgauagccauucacaucau

SEQ ID NO: 1830352 - RNA, 19 nt, Homo sapiens
  misc_RNA (1)...(19): siRNA sense strand
cgcagaagcuguccaaaau

SEQ ID NO: 1830353 - RNA, 19 nt, Homo sapiens
  misc_RNA (1)...(19): siRNA sense strand
ggaggaggacgaagaugag

SEQ ID NO: 1830354 - RNA, 19 nt, Homo sapiens
  misc_RNA (1)...(19): siRNA sense strand
caacucaauccucggacuu

SEQ ID NO: 1830355 - RNA, 19 nt, Homo sapiens
  misc_RNA (1)...(19): siRNA sense strand
guccuucgauagccauuca

SEQ ID NO: 1830356 - RNA, 19 nt, Homo sapiens
  misc_RNA (1)...(19): siRNA sense strand
guggugccuugcuauucua

SEQ ID NO: 1830357 - RNA, 19 nt, Homo sapiens
  misc_RNA (1)...(19): siRNA sense strand
gcucaaugccauauuucau

SEQ ID NO: 1830358 - RNA, 19 nt, Homo sapiens
  misc_RNA (1)...(19): siRNA sense strand
uugaaagcccucugacuga

SEQ ID NO: 1830359 - RNA, 19 nt, Homo sapiens
  misc_RNA (1)...(19): siRNA sense strand
ggaggaagaagaggaagag

SEQ ID NO: 1830360 - RNA, 19 nt, Homo sapiens
  misc_RNA (1)...(19): siRNA sense strand
acaauauuauguccuucga

SEQ ID NO: 1830361 - RNA, 19 nt, Homo sapiens
  misc_RNA (1)...(19): siRNA sense strand
ggcaacuucucuuucaaac

SEQ ID NO: 1830362 - RNA, 19 nt, Homo sapiens
  misc_RNA (1)...(19): siRNA sense strand
uaaauugagacgcaugaag

SEQ ID NO: 1830363 - RNA, 19 nt, Homo sapiens
  misc_RNA (1)...(19): siRNA sense strand
aagaugaggaccuggaaga

SEQ ID NO: 1830364 - RNA, 19 nt, Homo sapiens
  misc_RNA (1)...(19): siRNA sense strand
gcccaaagccacggaucaa

SEQ ID NO: 1830365 - RNA, 19 nt, Homo sapiens
  misc_RNA (1)...(19): siRNA sense strand
gcaacuucucuuucaaaca

SEQ ID NO: 1830366 - RNA, 19 nt, Homo sapiens
  misc_RNA (1)...(19): siRNA sense strand
gcgcuggagcccuucuuug

SEQ ID NO: 1830367 - RNA, 19 nt, Homo sapiens
  misc_RNA (1)...(19): siRNA sense strand
cgaagaugaggaccuggaa

SEQ ID NO: 1830368 - RNA, 19 nt, Homo sapiens
  misc_RNA (1)...(19): siRNA sense strand
uggcaacuucucuuucaaa

SEQ ID NO: 1830369 - RNA, 19 nt, Homo sapiens
  misc_RNA (1)...(19): siRNA sense strand
aagaggaggaugacgauca

SEQ ID NO: 1830370 - RNA, 19 nt, Homo sapiens
  misc_RNA (1)...(19): siRNA sense strand
ggaccuggaagaggaggaa

SEQ ID NO: 1830371 - RNA, 19 nt, Homo sapiens
  misc_RNA (1)...(19): siRNA sense strand
caauggcaacuucucuuuc

SEQ ID NO: 1830372 - RNA, 19 nt, Homo sapiens
  misc_RNA (1)...(19): siRNA sense strand
gcgcuuccuucccuguaca

SEQ ID NO: 1830373 - RNA, 19 nt, Homo sapiens
  misc_RNA (1)...(19): siRNA sense strand
aagaggaagaggaggauga

SEQ ID NO: 1830374 - RNA, 19 nt, Homo sapiens
  misc_RNA (1)...(19): siRNA sense strand
cgcuggagcccuucuuuga

SEQ ID NO: 1830375 - RNA, 19 nt, Homo sapiens
  misc_RNA (1)...(19): siRNA sense strand
acgagugucucaguucuca

SEQ ID NO: 1830376 - RNA, 19 nt, Homo sapiens
  misc_RNA (1)...(19): siRNA sense strand
aggaggaggacgaagauga

SEQ ID NO: 1830377 - RNA, 19 nt, Homo sapiens
  misc_RNA (1)...(19): siRNA sense strand
gcagugcccucuccucuca

SEQ ID NO: 1830378 - RNA, 19 nt, Homo sapiens
  misc_RNA (1)...(19): siRNA sense strand
gaaggaguuugugcaguuu

SEQ ID NO: 1830379 - RNA, 19 nt, Homo sapiens
  misc_RNA (1)...(19): siRNA sense strand
ugacggagcuggugagagu

SEQ ID NO: 1830380 - RNA, 19 nt, Homo sapiens
  misc_RNA (1)...(19): siRNA sense strand
ugaaggaguuugugcaguu

SEQ ID NO: 1830381 - RNA, 19 nt, Homo sapiens
  misc_RNA (1)...(19): siRNA sense strand
caggaaagcuggacuucug

SEQ ID NO: 1830382 - RNA, 19 nt, Homo sapiens
  misc_RNA (1)...(19): siRNA sense strand
ggagagcccuguugaugac

SEQ ID NO: 1830383 - RNA, 19 nt, Homo sapiens
  misc_RNA (1)...(19): siRNA sense strand
gcgagaagcccgagaucaa

SEQ ID NO: 1830384 - RNA, 19 nt, Homo sapiens
  misc_RNA (1)...(19): siRNA sense strand
gaauccggacaaucagaua

SEQ ID NO: 1830385 - RNA, 19 nt, Homo sapiens
  misc_RNA (1)...(19): siRNA sense strand
uaaguuuccaggacuguuu

SEQ ID NO: 1830386 - RNA, 19 nt, Homo sapiens
  misc_RNA (1)...(19): siRNA sense strand
cuaaagaagucaggaaagc

SEQ ID NO: 1830387 - RNA, 19 nt, Homo sapiens
  misc_RNA (1)...(19): siRNA sense strand
agaacuggaucuuuaucug

SEQ ID NO: 1830388 - RNA, 19 nt, Homo sapiens
  misc_RNA (1)...(19): siRNA sense strand
acaaucagauaguucaaac

SEQ ID NO: 1830389 - RNA, 19 nt, Homo sapiens
  misc_RNA (1)...(19): siRNA sense strand
gacaaucagauaguucaaa

SEQ ID NO: 1830390 - RNA, 19 nt, Homo sapiens
  misc_RNA (1)...(19): siRNA sense strand
ccacaucacauuggaguca

SEQ ID NO: 1830391 - RNA, 19 nt, Homo sapiens
  misc_RNA (1)...(19): siRNA sense strand
ggaauccggacaaucagau

SEQ ID NO: 1830392 - RNA, 19 nt, Homo sapiens
  misc_RNA (1)...(19): siRNA sense strand
uggccaagcugcgcaagga

SEQ ID NO: 1830393 - RNA, 19 nt, Homo sapiens
  misc_RNA (1)...(19): siRNA sense strand
ggacaaucagauaguucaa

SEQ ID NO: 1830394 - RNA, 19 nt, Homo sapiens
  misc_RNA (1)...(19): siRNA sense strand
ccagccacaucacauugga

SEQ ID NO: 1830395 - RNA, 19 nt, Homo sapiens
  misc_RNA (1)...(19): siRNA sense strand
caucagggcccaacuucuc

SEQ ID NO: 1830396 - RNA, 19 nt, Homo sapiens
  misc_RNA (1)...(19): siRNA sense strand
uggagagcccuguugauga

SEQ ID NO: 1830397 - RNA, 19 nt, Homo sapiens
  misc_RNA (1)...(19): siRNA sense strand
aagcgcaaguacuucaaga

SEQ ID NO: 1830398 - RNA, 19 nt, Homo sapiens
  misc_RNA (1)...(19): siRNA sense strand
gaccaucacgggcaagaag

SEQ ID NO: 1830399 - RNA, 19 nt, Homo sapiens
  misc_RNA (1)...(19): siRNA sense strand
gagagucccagcuacuaca

SEQ ID NO: 1830400 - RNA, 19 nt, Homo sapiens
  misc_RNA (1)...(19): siRNA sense strand
ggagagucccagcuacuac

SEQ ID NO: 1830401 - RNA, 19 nt, Homo sapiens
  misc_RNA (1)...(19): siRNA sense strand
gcccaacgauguggaugca

SEQ ID NO: 1830402 - RNA, 19 nt, Homo sapiens
  misc_RNA (1)...(19): siRNA sense strand
cagucgagcccguauuuca

SEQ ID NO: 1830403 - RNA, 19 nt, Homo sapiens
  misc_RNA (1)...(19): siRNA sense strand
agcccgagaucaagcagaa

SEQ ID NO: 1830404 - RNA, 19 nt, Homo sapiens
  misc_RNA (1)...(19): siRNA sense strand
cagcaucagcccugcacuu

SEQ ID NO: 1830405 - RNA, 19 nt, Homo sapiens
  misc_RNA (1)...(19): siRNA sense strand
uuaucuggcuuacuuuguc

SEQ ID NO: 1830406 - RNA, 19 nt, Homo sapiens
  misc_RNA (1)...(19): siRNA sense strand
ggagucacaaucaaagaac

SEQ ID NO: 1830407 - RNA, 19 nt, Homo sapiens
  misc_RNA (1)...(19): siRNA sense strand
aaaagcggaugucgaagga

SEQ ID NO: 1830408 - RNA, 19 nt, Homo sapiens
  misc_RNA (1)...(19): siRNA sense strand
gagucacaaucaaagaacu

SEQ ID NO: 1830409 - RNA, 19 nt, Homo sapiens
  misc_RNA (1)...(19): siRNA sense strand
gaugaguuccacccguuca

SEQ ID NO: 1830410 - RNA, 19 nt, Homo sapiens
  misc_RNA (1)...(19): siRNA sense strand
cagcaucagggcccaacuu

SEQ ID NO: 1830411 - RNA, 19 nt, Homo sapiens
  misc_RNA (1)...(19): siRNA sense strand
ggacuaaacuucagcauuc

SEQ ID NO: 1830412 - RNA, 19 nt, Homo sapiens
  misc_RNA (1)...(19): siRNA sense strand
gggcagacccgcaacauua

SEQ ID NO: 1830413 - RNA, 19 nt, Homo sapiens
  misc_RNA (1)...(19): siRNA sense strand
gcaaggaggugaugguguu

SEQ ID NO: 1830414 - RNA, 19 nt, Homo sapiens
  misc_RNA (1)...(19): siRNA sense strand
ugggagaggugaacauuaa

SEQ ID NO: 1830415 - RNA, 19 nt, Homo sapiens
  misc_RNA (1)...(19): siRNA sense strand
gaacauuaacaacagugua

SEQ ID NO: 1830416 - RNA, 19 nt, Homo sapiens
  misc_RNA (1)...(19): siRNA sense strand
ucaaggcgcugaccaugga

SEQ ID NO: 1830417 - RNA, 19 nt, Homo sapiens
  misc_RNA (1)...(19): siRNA sense strand
cacuggaacucauauugua

SEQ ID NO: 1830418 - RNA, 19 nt, Homo sapiens
  misc_RNA (1)...(19): siRNA sense strand
gcacuggaacucauauugu

SEQ ID NO: 1830419 - RNA, 19 nt, Homo sapiens
  misc_RNA (1)...(19): siRNA sense strand
caggaaggcugugagaaga

SEQ ID NO: 1830420 - RNA, 19 nt, Homo sapiens
  misc_RNA (1)...(19): siRNA sense strand
caaagcacuggaacucaua

SEQ ID NO: 1830421 - RNA, 19 nt, Homo sapiens
  misc_RNA (1)...(19): siRNA sense strand
ucaaagcacuggaacucau

SEQ ID NO: 1830422 - RNA, 19 nt, Homo sapiens
  misc_RNA (1)...(19): siRNA sense strand
gcaggaaggcugugagaag

SEQ ID NO: 1830423 - RNA, 19 nt, Homo sapiens
  misc_RNA (1)...(19): siRNA sense strand
ggauagauacggccugugu

SEQ ID NO: 1830424 - RNA, 19 nt, Homo sapiens
  misc_RNA (1)...(19): siRNA sense strand
uaccacgacucacaccuuu

SEQ ID NO: 1830425 - RNA, 19 nt, Homo sapiens
  misc_RNA (1)...(19): siRNA sense strand
gaggugaacauuaacaaca

SEQ ID NO: 1830426 - RNA, 19 nt, Homo sapiens
  misc_RNA (1)...(19): siRNA sense strand
ggagcaagcggucaucauc

SEQ ID NO: 1830427 - RNA, 19 nt, Homo sapiens
  misc_RNA (1)...(19): siRNA sense strand
acacucugaucacagcuuu

SEQ ID NO: 1830428 - RNA, 19 nt, Homo sapiens
  misc_RNA (1)...(19): siRNA sense strand
gagaggugaacauuaacaa

SEQ ID NO: 1830429 - RNA, 19 nt, Homo sapiens
  misc_RNA (1)...(19): siRNA sense strand
ggagaggugaacauuaaca

SEQ ID NO: 1830430 - RNA, 19 nt, Homo sapiens
  misc_RNA (1)...(19): siRNA sense strand
guucuacacucugaucaca

SEQ ID NO: 1830431 - RNA, 19 nt, Homo sapiens
  misc_RNA (1)...(19): siRNA sense strand
acaguguauucaaacagua

SEQ ID NO: 1830432 - RNA, 19 nt, Homo sapiens
  misc_RNA (1)...(19): siRNA sense strand
ccacuggacuaaacuucag

SEQ ID NO: 1830433 - RNA, 19 nt, Homo sapiens
  misc_RNA (1)...(19): siRNA sense strand
ccaagugccgggacccaaa

SEQ ID NO: 1830434 - RNA, 19 nt, Homo sapiens
  misc_RNA (1)...(19): siRNA sense strand
ccacgacucacaccuuugu

SEQ ID NO: 1830435 - RNA, 19 nt, Homo sapiens
  misc_RNA (1)...(19): siRNA sense strand
ggacccaaaucccguugac

SEQ ID NO: 1830436 - RNA, 19 nt, Homo sapiens
  misc_RNA (1)...(19): siRNA sense strand
ggugaacauuaacaacagu

SEQ ID NO: 1830437 - RNA, 19 nt, Homo sapiens
  misc_RNA (1)...(19): siRNA sense strand
guaccacgacucacaccuu

SEQ ID NO: 1830438 - RNA, 19 nt, Homo sapiens
  misc_RNA (1)...(19): siRNA sense strand
acaacaguguauucaaaca

SEQ ID NO: 1830439 - RNA, 19 nt, Homo sapiens
  misc_RNA (1)...(19): siRNA sense strand
caucaucccaucccaucuu

SEQ ID NO: 1830440 - RNA, 19 nt, Homo sapiens
  misc_RNA (1)...(19): siRNA sense strand
cauauuguaccacgacuca

SEQ ID NO: 1830441 - RNA, 19 nt, Homo sapiens
  misc_RNA (1)...(19): siRNA sense strand
gcgaauucucgguguguga

SEQ ID NO: 1830442 - RNA, 19 nt, Homo sapiens
  misc_RNA (1)...(19): siRNA sense strand
ccgugaagcugcagacacu

SEQ ID NO: 1830443 - RNA, 19 nt, Homo sapiens
  misc_RNA (1)...(19): siRNA sense strand
gaccaccgccacagacauc

SEQ ID NO: 1830444 - RNA, 19 nt, Homo sapiens
  misc_RNA (1)...(19): siRNA sense strand
cgacucacaccuuugucaa

SEQ ID NO: 1830445 - RNA, 19 nt, Homo sapiens
  misc_RNA (1)...(19): siRNA sense strand
cucaggaucuggacuucga

SEQ ID NO: 1830446 - RNA, 19 nt, Homo sapiens
  misc_RNA (1)...(19): siRNA sense strand
aacaguguauucaaacagu

SEQ ID NO: 1830447 - RNA, 19 nt, Homo sapiens
  misc_RNA (1)...(19): siRNA sense strand
cauuaacaacaguguauuc

SEQ ID NO: 1830448 - RNA, 19 nt, Homo sapiens
  misc_RNA (1)...(19): siRNA sense strand
caacaguguauucaaacag

SEQ ID NO: 1830449 - RNA, 19 nt, Homo sapiens
  misc_RNA (1)...(19): siRNA sense strand
caacggagcuuauaacaua

SEQ ID NO: 1830450 - RNA, 19 nt, Homo sapiens
  misc_RNA (1)...(19): siRNA sense strand
acacugaccuccacucuua

SEQ ID NO: 1830451 - RNA, 19 nt, Homo sapiens
  misc_RNA (1)...(19): siRNA sense strand
gggcgaaccugcuaugaua

SEQ ID NO: 1830452 - RNA, 19 nt, Homo sapiens
  misc_RNA (1)...(19): siRNA sense strand
gaagaugaauuccgugguu

SEQ ID NO: 1830453 - RNA, 19 nt, Homo sapiens
  misc_RNA (1)...(19): siRNA sense strand
ggaaauaccaugaggaaga

SEQ ID NO: 1830454 - RNA, 19 nt, Homo sapiens
  misc_RNA (1)...(19): siRNA sense strand
acacggagcuguaccacua

SEQ ID NO: 1830455 - RNA, 19 nt, Homo sapiens
  misc_RNA (1)...(19): siRNA sense strand
gcuaugauauugaugaaug

SEQ ID NO: 1830456 - RNA, 19 nt, Homo sapiens
  misc_RNA (1)...(19): siRNA sense strand
gauugaaacuuccuacaug

SEQ ID NO: 1830457 - RNA, 19 nt, Homo sapiens
  misc_RNA (1)...(19): siRNA sense strand
gaagguuuauuaucgagaa

SEQ ID NO: 1830458 - RNA, 19 nt, Homo sapiens
  misc_RNA (1)...(19): siRNA sense strand
uaaccuggaucgaauagaa

SEQ ID NO: 1830459 - RNA, 19 nt, Homo sapiens
  misc_RNA (1)...(19): siRNA sense strand
gagccaaccaccaucauua

SEQ ID NO: 1830460 - RNA, 19 nt, Homo sapiens
  misc_RNA (1)...(19): siRNA sense strand
ggaagaaucuguauuucac

SEQ ID NO: 1830461 - RNA, 19 nt, Homo sapiens
  misc_RNA (1)...(19): siRNA sense strand
gacagggaaucaauugaaa

SEQ ID NO: 1830462 - RNA, 19 nt, Homo sapiens
  misc_RNA (1)...(19): siRNA sense strand
gcacuucgaugcguucuca

SEQ ID NO: 1830463 - RNA, 19 nt, Homo sapiens
  misc_RNA (1)...(19): siRNA sense strand
gcagcacccucaggucaua

SEQ ID NO: 1830464 - RNA, 19 nt, Homo sapiens
  misc_RNA (1)...(19): siRNA sense strand
ggagacggaugcuuuccaa

SEQ ID NO: 1830465 - RNA, 19 nt, Homo sapiens
  misc_RNA (1)...(19): siRNA sense strand
gaaacuggccuucauaacu

SEQ ID NO: 1830466 - RNA, 19 nt, Homo sapiens
  misc_RNA (1)...(19): siRNA sense strand
ccaaggagacggaugcuuu

SEQ ID NO: 1830467 - RNA, 19 nt, Homo sapiens
  misc_RNA (1)...(19): siRNA sense strand
gaauagaaguggcgaagcu

SEQ ID NO: 1830468 - RNA, 19 nt, Homo sapiens
  misc_RNA (1)...(19): siRNA sense strand
guucuagccuccucugauu

SEQ ID NO: 1830469 - RNA, 19 nt, Homo sapiens
  misc_RNA (1)...(19): siRNA sense strand
cauacgacauucucaaaga

SEQ ID NO: 1830470 - RNA, 19 nt, Homo sapiens
  misc_RNA (1)...(19): siRNA sense strand
aaacuggccuucauaacug

SEQ ID NO: 1830471 - RNA, 19 nt, Homo sapiens
  misc_RNA (1)...(19): siRNA sense strand
gcaccacgcccuucuccua

SEQ ID NO: 1830472 - RNA, 19 nt, Homo sapiens
  misc_RNA (1)...(19): siRNA sense strand
gaagagcaacggagcuuau

SEQ ID NO: 1830473 - RNA, 19 nt, Homo sapiens
  misc_RNA (1)...(19): siRNA sense strand
ccuccacucuuacguagua

SEQ ID NO: 1830474 - RNA, 19 nt, Homo sapiens
  misc_RNA (1)...(19): siRNA sense strand
cagaagguaucgcuguuga

SEQ ID NO: 1830475 - RNA, 19 nt, Homo sapiens
  misc_RNA (1)...(19): siRNA sense strand
cgggcaaucuggucauuaa

SEQ ID NO: 1830476 - RNA, 19 nt, Homo sapiens
  misc_RNA (1)...(19): siRNA sense strand
gccaagauguagaugaaug

SEQ ID NO: 1830477 - RNA, 19 nt, Homo sapiens
  misc_RNA (1)...(19): siRNA sense strand
gcaaucuggucauuaagca

SEQ ID NO: 1830478 - RNA, 19 nt, Homo sapiens
  misc_RNA (1)...(19): siRNA sense strand
ggccaagccugccaagaug

SEQ ID NO: 1830479 - RNA, 19 nt, Homo sapiens
  misc_RNA (1)...(19): siRNA sense strand
aagaauggguucagcauca

SEQ ID NO: 1830480 - RNA, 19 nt, Homo sapiens
  misc_RNA (1)...(19): siRNA sense strand
cacacaaucugcaauaauc

SEQ ID NO: 1830481 - RNA, 19 nt, Homo sapiens
  misc_RNA (1)...(19): siRNA sense strand
cuucacgcaucuacacuua

SEQ ID NO: 1830482 - RNA, 19 nt, Homo sapiens
  misc_RNA (1)...(19): siRNA sense strand
gggcagaguaugaugauga

SEQ ID NO: 1830483 - RNA, 19 nt, Homo sapiens
  misc_RNA (1)...(19): siRNA sense strand
ccaauggacugcacuucga

SEQ ID NO: 1830484 - RNA, 19 nt, Homo sapiens
  misc_RNA (1)...(19): siRNA sense strand
ggacagacuggaacagaga

SEQ ID NO: 1830485 - RNA, 19 nt, Homo sapiens
  misc_RNA (1)...(19): siRNA sense strand
gaaauaccaugaggaagac

SEQ ID NO: 1830486 - RNA, 19 nt, Homo sapiens
  misc_RNA (1)...(19): siRNA sense strand
gagcaggacggauucaaga

SEQ ID NO: 1830487 - RNA, 19 nt, Homo sapiens
  misc_RNA (1)...(19): siRNA sense strand
ugaugaggaugaagauuau

SEQ ID NO: 1830488 - RNA, 19 nt, Homo sapiens
  misc_RNA (1)...(19): siRNA sense strand
gaaccaggucuuuccaguu

SEQ ID NO: 1830489 - RNA, 19 nt, Homo sapiens
  misc_RNA (1)...(19): siRNA sense strand
ggaugaaguugaggaaaca

SEQ ID NO: 1830490 - RNA, 19 nt, Homo sapiens
  misc_RNA (1)...(19): siRNA sense strand
ccaaguuccugccgugguu

SEQ ID NO: 1830491 - RNA, 19 nt, Homo sapiens
  misc_RNA (1)...(19): siRNA sense strand
caaccaccaucauuagaca

SEQ ID NO: 1830492 - RNA, 19 nt, Homo sapiens
  misc_RNA (1)...(19): siRNA sense strand
ucauuggacuggccuuuga

SEQ ID NO: 1830493 - RNA, 19 nt, Homo sapiens
  misc_RNA (1)...(19): siRNA sense strand
aaccaggucuuuccaguug

SEQ ID NO: 1830494 - RNA, 19 nt, Homo sapiens
  misc_RNA (1)...(19): siRNA sense strand
gcgcggugguugucacuug

SEQ ID NO: 1830495 - RNA, 19 nt, Homo sapiens
  misc_RNA (1)...(19): siRNA sense strand
gcagggacccagaccagaa

SEQ ID NO: 1830496 - RNA, 19 nt, Homo sapiens
  misc_RNA (1)...(19): siRNA sense strand
gggaagaaucuguauuuca

SEQ ID NO: 1830497 - RNA, 19 nt, Homo sapiens
  misc_RNA (1)...(19): siRNA sense strand
ucacugagccuuccauugg

SEQ ID NO: 1830498 - RNA, 19 nt, Homo sapiens
  misc_RNA (1)...(19): siRNA sense strand
ucagugggauucuuaugga

SEQ ID NO: 1830499 - RNA, 19 nt, Homo sapiens
  misc_RNA (1)...(19): siRNA sense strand
gggaguacacggugacuga

SEQ ID NO: 1830500 - RNA, 19 nt, Homo sapiens
  misc_RNA (1)...(19): siRNA sense strand
gcacgagcgagaacacauu

SEQ ID NO: 1830501 - RNA, 19 nt, Homo sapiens
  misc_RNA (1)...(19): siRNA sense strand
gggaggugcugacacauac

SEQ ID NO: 1830502 - RNA, 19 nt, Homo sapiens
  misc_RNA (1)...(19): siRNA sense strand
gaaccugcuaugauauuga

SEQ ID NO: 1830503 - RNA, 19 nt, Homo sapiens
  misc_RNA (1)...(19): siRNA sense strand
ggucugcaguuccauacga

SEQ ID NO: 1830504 - RNA, 19 nt, Homo sapiens
  misc_RNA (1)...(19): siRNA sense strand
gaagguaucgcuguugauc

SEQ ID NO: 1830505 - RNA, 19 nt, Homo sapiens
  misc_RNA (1)...(19): siRNA sense strand
gcuccuccgugcacauuga

SEQ ID NO: 1830506 - RNA, 19 nt, Homo sapiens
  misc_RNA (1)...(19): siRNA sense strand
ugacagggaaucaauugaa

SEQ ID NO: 1830507 - RNA, 19 nt, Homo sapiens
  misc_RNA (1)...(19): siRNA sense strand
ggaagagcaacggagcuua

SEQ ID NO: 1830508 - RNA, 19 nt, Homo sapiens
  misc_RNA (1)...(19): siRNA sense strand
gaccagaaaggcaagagaa

SEQ ID NO: 1830509 - RNA, 19 nt, Homo sapiens
  misc_RNA (1)...(19): siRNA sense strand
gagauaaccccaagauuga

SEQ ID NO: 1830510 - RNA, 19 nt, Homo sapiens
  misc_RNA (1)...(19): siRNA sense strand
gacgugugcuaacaacaga

SEQ ID NO: 1830511 - RNA, 19 nt, Homo sapiens
  misc_RNA (1)...(19): siRNA sense strand
agacugaccuggugaaucc

SEQ ID NO: 1830512 - RNA, 19 nt, Homo sapiens
  misc_RNA (1)...(19): siRNA sense strand
gacagacucuaaccuggau

SEQ ID NO: 1830513 - RNA, 19 nt, Homo sapiens
  misc_RNA (1)...(19): siRNA sense strand
gccacacaaucugcaauaa

SEQ ID NO: 1830514 - RNA, 19 nt, Homo sapiens
  misc_RNA (1)...(19): siRNA sense strand
ggaguuguuuucagcuaua

SEQ ID NO: 1830515 - RNA, 19 nt, Homo sapiens
  misc_RNA (1)...(19): siRNA sense strand
ugggagagcuagucuacau

SEQ ID NO: 1830516 - RNA, 19 nt, Homo sapiens
  misc_RNA (1)...(19): siRNA sense strand
gcgaaccugcuaugauauu

SEQ ID NO: 1830517 - RNA, 19 nt, Homo sapiens
  misc_RNA (1)...(19): siRNA sense strand
gaacacugaccuccacucu

SEQ ID NO: 1830518 - RNA, 19 nt, Homo sapiens
  misc_RNA (1)...(19): siRNA sense strand
gcaguuccauacgacauuc

SEQ ID NO: 1830519 - RNA, 19 nt, Homo sapiens
  misc_RNA (1)...(19): siRNA sense strand
acucuaaccuggaucgaau

SEQ ID NO: 1830520 - RNA, 19 nt, Homo sapiens
  misc_RNA (1)...(19): siRNA sense strand
cugccaagauguagaugaa

SEQ ID NO: 1830521 - RNA, 19 nt, Homo sapiens
  misc_RNA (1)...(19): siRNA sense strand
cccaucaacuacugugaaa

SEQ ID NO: 1830522 - RNA, 19 nt, Homo sapiens
  misc_RNA (1)...(19): siRNA sense strand
augaugaggaugaagauua

SEQ ID NO: 1830523 - RNA, 19 nt, Homo sapiens
  misc_RNA (1)...(19): siRNA sense strand
cggcuaaagucaucauugg

SEQ ID NO: 1830524 - RNA, 19 nt, Homo sapiens
  misc_RNA (1)...(19): siRNA sense strand
aggaaugcguccacgauga

SEQ ID NO: 1830525 - RNA, 19 nt, Homo sapiens
  misc_RNA (1)...(19): siRNA sense strand
gcaauggcaggcaaugugu

SEQ ID NO: 1830526 - RNA, 19 nt, Homo sapiens
  misc_RNA (1)...(19): siRNA sense strand
cgacaucgacgcagucuac

SEQ ID NO: 1830527 - RNA, 19 nt, Homo sapiens
  misc_RNA (1)...(19): siRNA sense strand
cagaaaggcaagagaaaca

SEQ ID NO: 1830528 - RNA, 19 nt, Homo sapiens
  misc_RNA (1)...(19): siRNA sense strand
ccacacaaucugcaauaau

SEQ ID NO: 1830529 - RNA, 19 nt, Homo sapiens
  misc_RNA (1)...(19): siRNA sense strand
cgaaccugcuaugauauug

SEQ ID NO: 1830530 - RNA, 19 nt, Homo sapiens
  misc_RNA (1)...(19): siRNA sense strand
ggagagccaaccaccauca

SEQ ID NO: 1830531 - RNA, 19 nt, Homo sapiens
  misc_RNA (1)...(19): siRNA sense strand
uggacaagaugguuuacug

SEQ ID NO: 1830532 - RNA, 19 nt, Homo sapiens
  misc_RNA (1)...(19): siRNA sense strand
gagcuuauaacauauuugc

SEQ ID NO: 1830533 - RNA, 19 nt, Homo sapiens
  misc_RNA (1)...(19): siRNA sense strand
ugacaacaccuugggaguu

SEQ ID NO: 1830534 - RNA, 19 nt, Homo sapiens
  misc_RNA (1)...(19): siRNA sense strand
caucauugcuacgagugaa

SEQ ID NO: 1830535 - RNA, 19 nt, Homo sapiens
  misc_RNA (1)...(19): siRNA sense strand
ugaggaagacagaagcaaa

SEQ ID NO: 1830536 - RNA, 19 nt, Homo sapiens
  misc_RNA (1)...(19): siRNA sense strand
cuucauaacugcgacauac

SEQ ID NO: 1830537 - RNA, 19 nt, Homo sapiens
  misc_RNA (1)...(19): siRNA sense strand
cagucuacgucaccacaaa

SEQ ID NO: 1830538 - RNA, 19 nt, Homo sapiens
  misc_RNA (1)...(19): siRNA sense strand
gaaaauuuggccaagagua

SEQ ID NO: 1830539 - RNA, 19 nt, Homo sapiens
  misc_RNA (1)...(19): siRNA sense strand
gaaggaaaacaaccaaguu

SEQ ID NO: 1830540 - RNA, 19 nt, Homo sapiens
  misc_RNA (1)...(19): siRNA sense strand
ucacagacuggaagaugaa

SEQ ID NO: 1830541 - RNA, 19 nt, Homo sapiens
  misc_RNA (1)...(19): siRNA sense strand
ucgaagggcuccaguaucc

SEQ ID NO: 1830542 - RNA, 19 nt, Homo sapiens
  misc_RNA (1)...(19): siRNA sense strand
gcguggacaagaugguuua

SEQ ID NO: 1830543 - RNA, 19 nt, Homo sapiens
  misc_RNA (1)...(19): siRNA sense strand
gaggaagacagaagcaaag

SEQ ID NO: 1830544 - RNA, 19 nt, Homo sapiens
  misc_RNA (1)...(19): siRNA sense strand
ccaagccugccaagaugua

SEQ ID NO: 1830545 - RNA, 19 nt, Homo sapiens
  misc_RNA (1)...(19): siRNA sense strand
ccaguuggaggcaucauug

SEQ ID NO: 1830546 - RNA, 19 nt, Homo sapiens
  misc_RNA (1)...(19): siRNA sense strand
cggagcuuauaacauauuu

SEQ ID NO: 1830547 - RNA, 19 nt, Homo sapiens
  misc_RNA (1)...(19): siRNA sense strand
gcaacggagcuuauaacau

SEQ ID NO: 1830548 - RNA, 19 nt, Homo sapiens
  misc_RNA (1)...(19): siRNA sense strand
acgggaagaaucuguauuu

SEQ ID NO: 1830549 - RNA, 19 nt, Homo sapiens
  misc_RNA (1)...(19): siRNA sense strand
gaucaucacuuguaacuaa

SEQ ID NO: 1830550 - RNA, 19 nt, Homo sapiens
  misc_RNA (1)...(19): siRNA sense strand
gaagaaacguagaaacaaa

SEQ ID NO: 1830551 - RNA, 19 nt, Homo sapiens
  misc_RNA (1)...(19): siRNA sense strand
gcagguacuuggugaaaga

SEQ ID NO: 1830552 - RNA, 19 nt, Homo sapiens
  misc_RNA (1)...(19): siRNA sense strand
ggaagaagcaguaaacagu

SEQ ID NO: 1830553 - RNA, 19 nt, Homo sapiens
  misc_RNA (1)...(19): siRNA sense strand
ucagaaaaguguugucuua

SEQ ID NO: 1830554 - RNA, 19 nt, Homo sapiens
  misc_RNA (1)...(19): siRNA sense strand
gcaguaaacaguugggaaa

SEQ ID NO: 1830555 - RNA, 19 nt, Homo sapiens
  misc_RNA (1)...(19): siRNA sense strand
gcacaaacccagugucuac

SEQ ID NO: 1830556 - RNA, 19 nt, Homo sapiens
  misc_RNA (1)...(19): siRNA sense strand
gaagaagcaguaaacaguu

SEQ ID NO: 1830557 - RNA, 19 nt, Homo sapiens
  misc_RNA (1)...(19): siRNA sense strand
uugcaugucuuccauauau

SEQ ID NO: 1830558 - RNA, 19 nt, Homo sapiens
  misc_RNA (1)...(19): siRNA sense strand
gaacuuagcauugcauguc

SEQ ID NO: 1830559 - RNA, 19 nt, Homo sapiens
  misc_RNA (1)...(19): siRNA sense strand
guacuuggugaaagaaaua

SEQ ID NO: 1830560 - RNA, 19 nt, Homo sapiens
  misc_RNA (1)...(19): siRNA sense strand
cagaagaaacguagaaaca

SEQ ID NO: 1830561 - RNA, 19 nt, Homo sapiens
  misc_RNA (1)...(19): siRNA sense strand
aaagaagaacuuagcauug

SEQ ID NO: 1830562 - RNA, 19 nt, Homo sapiens
  misc_RNA (1)...(19): siRNA sense strand
guaaacaguugggaaaugc

SEQ ID NO: 1830563 - RNA, 19 nt, Homo sapiens
  misc_RNA (1)...(19): siRNA sense strand
caaacccagugucuacuuc

SEQ ID NO: 1830564 - RNA, 19 nt, Homo sapiens
  misc_RNA (1)...(19): siRNA sense strand
gcaugucuuccauauauug

SEQ ID NO: 1830565 - RNA, 19 nt, Homo sapiens
  misc_RNA (1)...(19): siRNA sense strand
aagaagcaguaaacaguug

SEQ ID NO: 1830566 - RNA, 19 nt, Homo sapiens
  misc_RNA (1)...(19): siRNA sense strand
gguacuuggugaaagaaau

SEQ ID NO: 1830567 - RNA, 19 nt, Homo sapiens
  misc_RNA (1)...(19): siRNA sense strand
cuaccugaguauaaggaua

SEQ ID NO: 1830568 - RNA, 19 nt, Homo sapiens
  misc_RNA (1)...(19): siRNA sense strand
cgcagaggauauucagaaa

SEQ ID NO: 1830569 - RNA, 19 nt, Homo sapiens
  misc_RNA (1)...(19): siRNA sense strand
cauugcaugucuuccauau

SEQ ID NO: 1830570 - RNA, 19 nt, Homo sapiens
  misc_RNA (1)...(19): siRNA sense strand
aagaagaacuuagcauugc

SEQ ID NO: 1830571 - RNA, 19 nt, Homo sapiens
  misc_RNA (1)...(19): siRNA sense strand
uaccugaguauaaggauaa

SEQ ID NO: 1830572 - RNA, 19 nt, Homo sapiens
  misc_RNA (1)...(19): siRNA sense strand
gaaaaguguugucuuacag

SEQ ID NO: 1830573 - RNA, 19 nt, Homo sapiens
  misc_RNA (1)...(19): siRNA sense strand
gauauucaccccuugguaa

SEQ ID NO: 1830574 - RNA, 19 nt, Homo sapiens
  misc_RNA (1)...(19): siRNA sense strand
cuacagcccauaccaguuc

SEQ ID NO: 1830575 - RNA, 19 nt, Homo sapiens
  misc_RNA (1)...(19): siRNA sense strand
ugcagucacuaccugagua

SEQ ID NO: 1830576 - RNA, 19 nt, Homo sapiens
  misc_RNA (1)...(19): siRNA sense strand
agaagaaacguagaaacaa

SEQ ID NO: 1830577 - RNA, 19 nt, Homo sapiens
  misc_RNA (1)...(19): siRNA sense strand
gcccauaccaguucgaaag

SEQ ID NO: 1830578 - RNA, 19 nt, Homo sapiens
  misc_RNA (1)...(19): siRNA sense strand
gcauugcaugucuuccaua

SEQ ID NO: 1830579 - RNA, 19 nt, Homo sapiens
  misc_RNA (1)...(19): siRNA sense strand
gaagaacuuagcauugcau

SEQ ID NO: 1830580 - RNA, 19 nt, Homo sapiens
  misc_RNA (1)...(19): siRNA sense strand
aguaaacaguugggaaaug

SEQ ID NO: 1830581 - RNA, 19 nt, Homo sapiens
  misc_RNA (1)...(19): siRNA sense strand
gcagucacuaccugaguau

SEQ ID NO: 1830582 - RNA, 19 nt, Homo sapiens
  misc_RNA (1)...(19): siRNA sense strand
agucacuaccugaguauaa

SEQ ID NO: 1830583 - RNA, 19 nt, Homo sapiens
  misc_RNA (1)...(19): siRNA sense strand
acgcagaggauauucagaa

SEQ ID NO: 1830584 - RNA, 19 nt, Homo sapiens
  misc_RNA (1)...(19): siRNA sense strand
cagaggauauucagaaaag

SEQ ID NO: 1830585 - RNA, 19 nt, Homo sapiens
  misc_RNA (1)...(19): siRNA sense strand
caucacuuguaacuaagau

SEQ ID NO: 1830586 - RNA, 19 nt, Homo sapiens
  misc_RNA (1)...(19): siRNA sense strand
ggaaaugcagucacuaccu

SEQ ID NO: 1830587 - RNA, 19 nt, Homo sapiens
  misc_RNA (1)...(19): siRNA sense strand
gggaagaagcaguaaacag

SEQ ID NO: 1830588 - RNA, 19 nt, Homo sapiens
  misc_RNA (1)...(19): siRNA sense strand
agaagaacuuagcauugca

SEQ ID NO: 1830589 - RNA, 19 nt, Homo sapiens
  misc_RNA (1)...(19): siRNA sense strand
guugggaaaugcagucacu

SEQ ID NO: 1830590 - RNA, 19 nt, Homo sapiens
  misc_RNA (1)...(19): siRNA sense strand
ugguaagacaagagaauuu

SEQ ID NO: 1830591 - RNA, 19 nt, Homo sapiens
  misc_RNA (1)...(19): siRNA sense strand
gucacuaccugaguauaag

SEQ ID NO: 1830592 - RNA, 19 nt, Homo sapiens
  misc_RNA (1)...(19): siRNA sense strand
agaaaaguguugucuuaca

SEQ ID NO: 1830593 - RNA, 19 nt, Homo sapiens
  misc_RNA (1)...(19): siRNA sense strand
gguaagacaagagaauuuu

SEQ ID NO: 1830594 - RNA, 19 nt, Homo sapiens
  misc_RNA (1)...(19): siRNA sense strand
ggagccaguuccguuucga

SEQ ID NO: 1830595 - RNA, 19 nt, Homo sapiens
  misc_RNA (1)...(19): siRNA sense strand
gcaagggucuggcugcuuu

SEQ ID NO: 1830596 - RNA, 19 nt, Homo sapiens
  misc_RNA (1)...(19): siRNA sense strand
ccacaggugucuggaaguc

SEQ ID NO: 1830597 - RNA, 19 nt, Homo sapiens
  misc_RNA (1)...(19): siRNA sense strand
cuuggaaacguccggguua

SEQ ID NO: 1830598 - RNA, 19 nt, Homo sapiens
  misc_RNA (1)...(19): siRNA sense strand
ggaaacguccggguuacag

SEQ ID NO: 1830599 - RNA, 19 nt, Homo sapiens
  misc_RNA (1)...(19): siRNA sense strand
gagaaccgcuacuuugaaa

SEQ ID NO: 1830600 - RNA, 19 nt, Homo sapiens
  misc_RNA (1)...(19): siRNA sense strand
gagaacacgcucuucauua

SEQ ID NO: 1830601 - RNA, 19 nt, Homo sapiens
  misc_RNA (1)...(19): siRNA sense strand
gcagagagaaagauugaua

SEQ ID NO: 1830602 - RNA, 19 nt, Homo sapiens
  misc_RNA (1)...(19): siRNA sense strand
caacagcccuuuccacauc

SEQ ID NO: 1830603 - RNA, 19 nt, Homo sapiens
  misc_RNA (1)...(19): siRNA sense strand
gaagaaggguggugaagac

SEQ ID NO: 1830604 - RNA, 19 nt, Homo sapiens
  misc_RNA (1)...(19): siRNA sense strand
agaaggagcuggacacugu

SEQ ID NO: 1830605 - RNA, 19 nt, Homo sapiens
  misc_RNA (1)...(19): siRNA sense strand
cagggaagauggagaacua

SEQ ID NO: 1830606 - RNA, 19 nt, Homo sapiens
  misc_RNA (1)...(19): siRNA sense strand
aaacugaucccaaagauug

SEQ ID NO: 1830607 - RNA, 19 nt, Homo sapiens
  misc_RNA (1)...(19): siRNA sense strand
ccaaggaggucaaguccaa

SEQ ID NO: 1830608 - RNA, 19 nt, Homo sapiens
  misc_RNA (1)...(19): siRNA sense strand
gaccugcgcucaugcuuug

SEQ ID NO: 1830609 - RNA, 19 nt, Homo sapiens
  misc_RNA (1)...(19): siRNA sense strand
gcccagggauguucugauu

SEQ ID NO: 1830610 - RNA, 19 nt, Homo sapiens
  misc_RNA (1)...(19): siRNA sense strand
caccaaggcuguguacuuu

SEQ ID NO: 1830611 - RNA, 19 nt, Homo sapiens
  misc_RNA (1)...(19): siRNA sense strand
agaaggaucuggaggucua

SEQ ID NO: 1830612 - RNA, 19 nt, Homo sapiens
  misc_RNA (1)...(19): siRNA sense strand
agaacacgcucuucauuau

SEQ ID NO: 1830613 - RNA, 19 nt, Homo sapiens
  misc_RNA (1)...(19): siRNA sense strand
gaggucaaguccaaacuga

SEQ ID NO: 1830614 - RNA, 19 nt, Homo sapiens
  misc_RNA (1)...(19): siRNA sense strand
gacuucaccugucgccuua

SEQ ID NO: 1830615 - RNA, 19 nt, Homo sapiens
  misc_RNA (1)...(19): siRNA sense strand
gaaccgcuacuuugaaaug

SEQ ID NO: 1830616 - RNA, 19 nt, Homo sapiens
  misc_RNA (1)...(19): siRNA sense strand
ccaaggugcuggcucaguu

SEQ ID NO: 1830617 - RNA, 19 nt, Homo sapiens
  misc_RNA (1)...(19): siRNA sense strand
cagagccacugcaggauuu

SEQ ID NO: 1830618 - RNA, 19 nt, Homo sapiens
  misc_RNA (1)...(19): siRNA sense strand
acaacaagcucuccuccuu

SEQ ID NO: 1830619 - RNA, 19 nt, Homo sapiens
  misc_RNA (1)...(19): siRNA sense strand
caaccucgaugaaggaagu

SEQ ID NO: 1830620 - RNA, 19 nt, Homo sapiens
  misc_RNA (1)...(19): siRNA sense strand
gaaacugaucccaaagauu

SEQ ID NO: 1830621 - RNA, 19 nt, Homo sapiens
  misc_RNA (1)...(19): siRNA sense strand
ggaccugagucacaaugga

SEQ ID NO: 1830622 - RNA, 19 nt, Homo sapiens
  misc_RNA (1)...(19): siRNA sense strand
ccaaggcuguguacuuugu

SEQ ID NO: 1830623 - RNA, 19 nt, Homo sapiens
  misc_RNA (1)...(19): siRNA sense strand
gcagaggccucaacuucag

SEQ ID NO: 1830624 - RNA, 19 nt, Homo sapiens
  misc_RNA (1)...(19): siRNA sense strand
gcugagaaccgcuacuuug

SEQ ID NO: 1830625 - RNA, 19 nt, Homo sapiens
  misc_RNA (1)...(19): siRNA sense strand
ggccucaacuucagcuuug

SEQ ID NO: 1830626 - RNA, 19 nt, Homo sapiens
  misc_RNA (1)...(19): siRNA sense strand
gaucgacgagucugugaaa

SEQ ID NO: 1830627 - RNA, 19 nt, Homo sapiens
  misc_RNA (1)...(19): siRNA sense strand
gcaggcaaccuccuagaga

SEQ ID NO: 1830628 - RNA, 19 nt, Homo sapiens
  misc_RNA (1)...(19): siRNA sense strand
gguccucggugguguucua

SEQ ID NO: 1830629 - RNA, 19 nt, Homo sapiens
  misc_RNA (1)...(19): siRNA sense strand
cagcagaggccucaacuuc

SEQ ID NO: 1830630 - RNA, 19 nt, Homo sapiens
  misc_RNA (1)...(19): siRNA sense strand
ugaaacugaucccaaagau

SEQ ID NO: 1830631 - RNA, 19 nt, Homo sapiens
  misc_RNA (1)...(19): siRNA sense strand
uguauaaccuugugcaucu

SEQ ID NO: 1830632 - RNA, 19 nt, Homo sapiens
  misc_RNA (1)...(19): siRNA sense strand
gaagcuugguggagaagag

SEQ ID NO: 1830633 - RNA, 19 nt, Homo sapiens
  misc_RNA (1)...(19): siRNA sense strand
gcacgugucucugcugaac

SEQ ID NO: 1830634 - RNA, 19 nt, Homo sapiens
  misc_RNA (1)...(19): siRNA sense strand
gaacaucaagaccuuaaac

SEQ ID NO: 1830635 - RNA, 19 nt, Homo sapiens
  misc_RNA (1)...(19): siRNA sense strand
gcaccuguauaaccuugug

SEQ ID NO: 1830636 - RNA, 19 nt, Homo sapiens
  misc_RNA (1)...(19): siRNA sense strand
ucuagucgcgucaaguuua

SEQ ID NO: 1830637 - RNA, 19 nt, Homo sapiens
  misc_RNA (1)...(19): siRNA sense strand
ggacuacucaggcaacauc

SEQ ID NO: 1830638 - RNA, 19 nt, Homo sapiens
  misc_RNA (1)...(19): siRNA sense strand
gaacacgcucuucauuauc

SEQ ID NO: 1830639 - RNA, 19 nt, Homo sapiens
  misc_RNA (1)...(19): siRNA sense strand
aaacugagcaacccagaga

SEQ ID NO: 1830640 - RNA, 19 nt, Homo sapiens
  misc_RNA (1)...(19): siRNA sense strand
caacaggaucgaacagaug

SEQ ID NO: 1830641 - RNA, 19 nt, Homo sapiens
  misc_RNA (1)...(19): siRNA sense strand
gggaacaucaagaccuuaa

SEQ ID NO: 1830642 - RNA, 19 nt, Homo sapiens
  misc_RNA (1)...(19): siRNA sense strand
cgacgagucugugaaacug

SEQ ID NO: 1830643 - RNA, 19 nt, Homo sapiens
  misc_RNA (1)...(19): siRNA sense strand
gagcugauccacucuaguc

SEQ ID NO: 1830644 - RNA, 19 nt, Homo sapiens
  misc_RNA (1)...(19): siRNA sense strand
ccacagggaagauggagaa

SEQ ID NO: 1830645 - RNA, 19 nt, Homo sapiens
  misc_RNA (1)...(19): siRNA sense strand
ggaccugcgcucaugcuuu

SEQ ID NO: 1830646 - RNA, 19 nt, Homo sapiens
  misc_RNA (1)...(19): siRNA sense strand
gagcuuguggacacuuaua

SEQ ID NO: 1830647 - RNA, 19 nt, Homo sapiens
  misc_RNA (1)...(19): siRNA sense strand
gccguucgaccuaucaaua

SEQ ID NO: 1830648 - RNA, 19 nt, Homo sapiens
  misc_RNA (1)...(19): siRNA sense strand
ccaccaaggcuguguacuu

SEQ ID NO: 1830649 - RNA, 19 nt, Homo sapiens
  misc_RNA (1)...(19): siRNA sense strand
ugagaacacgcucuucauu

SEQ ID NO: 1830650 - RNA, 19 nt, Homo sapiens
  misc_RNA (1)...(19): siRNA sense strand
ggcgaggucuuugccauug

SEQ ID NO: 1830651 - RNA, 19 nt, Homo sapiens
  misc_RNA (1)...(19): siRNA sense strand
acaggcagcuuccgaugau

SEQ ID NO: 1830652 - RNA, 19 nt, Homo sapiens
  misc_RNA (1)...(19): siRNA sense strand
cagagagaaagauugauaa

SEQ ID NO: 1830653 - RNA, 19 nt, Homo sapiens
  misc_RNA (1)...(19): siRNA sense strand
gaggagguccggagcauag

SEQ ID NO: 1830654 - RNA, 19 nt, Homo sapiens
  misc_RNA (1)...(19): siRNA sense strand
ucaccugucgccuuaagua

SEQ ID NO: 1830655 - RNA, 19 nt, Homo sapiens
  misc_RNA (1)...(19): siRNA sense strand
ccgccaaccugcacgaguu

SEQ ID NO: 1830656 - RNA, 19 nt, Homo sapiens
  misc_RNA (1)...(19): siRNA sense strand
ggaagaggaggaugaagag

SEQ ID NO: 1830657 - RNA, 19 nt, Homo sapiens
  misc_RNA (1)...(19): siRNA sense strand
ggacgugccaggagcuguu

SEQ ID NO: 1830658 - RNA, 19 nt, Homo sapiens
  misc_RNA (1)...(19): siRNA sense strand
gccagcugcucaccuucua

SEQ ID NO: 1830659 - RNA, 19 nt, Homo sapiens
  misc_RNA (1)...(19): siRNA sense strand
acaccagccugcaggaguu

SEQ ID NO: 1830660 - RNA, 19 nt, Homo sapiens
  misc_RNA (1)...(19): siRNA sense strand
ggaggaagaggaggaugaa

SEQ ID NO: 1830661 - RNA, 19 nt, Homo sapiens
  misc_RNA (1)...(19): siRNA sense strand
agccaugaguggacaguaa

SEQ ID NO: 1830662 - RNA, 19 nt, Homo sapiens
  misc_RNA (1)...(19): siRNA sense strand
cggagcuuguggacacuua

SEQ ID NO: 1830663 - RNA, 19 nt, Homo sapiens
  misc_RNA (1)...(19): siRNA sense strand
ggcagcuuccgaugauuua

SEQ ID NO: 1830664 - RNA, 19 nt, Homo sapiens
  misc_RNA (1)...(19): siRNA sense strand
cgacuuccaugaccugcau

SEQ ID NO: 1830665 - RNA, 19 nt, Homo sapiens
  misc_RNA (1)...(19): siRNA sense strand
ggaggaagaggaggaggaa

SEQ ID NO: 1830666 - RNA, 19 nt, Homo sapiens
  misc_RNA (1)...(19): siRNA sense strand
acaacaggaucgaacagau

SEQ ID NO: 1830667 - RNA, 19 nt, Homo sapiens
  misc_RNA (1)...(19): siRNA sense strand
caucaaggccgacuucaac

SEQ ID NO: 1830668 - RNA, 19 nt, Homo sapiens
  misc_RNA (1)...(19): siRNA sense strand
cugugaaacugaucccaaa

SEQ ID NO: 1830669 - RNA, 19 nt, Homo sapiens
  misc_RNA (1)...(19): siRNA sense strand
ggaagauggagaacuacga

SEQ ID NO: 1830670 - RNA, 19 nt, Homo sapiens
  misc_RNA (1)...(19): siRNA sense strand
gaccugcagucagucaaug

SEQ ID NO: 1830671 - RNA, 19 nt, Homo sapiens
  misc_RNA (1)...(19): siRNA sense strand
gcacauccgcauccucaag

SEQ ID NO: 1830672 - RNA, 19 nt, Homo sapiens
  misc_RNA (1)...(19): siRNA sense strand
aaagcucguugcagagaga

SEQ ID NO: 1830673 - RNA, 19 nt, Homo sapiens
  misc_RNA (1)...(19): siRNA sense strand
gacaggcagcuuccgauga

SEQ ID NO: 1830674 - RNA, 19 nt, Homo sapiens
  misc_RNA (1)...(19): siRNA sense strand
uaaccaaggaaucauguuc

SEQ ID NO: 1830675 - RNA, 19 nt, Homo sapiens
  misc_RNA (1)...(19): siRNA sense strand
ggaacaucaagaccuuaaa

SEQ ID NO: 1830676 - RNA, 19 nt, Homo sapiens
  misc_RNA (1)...(19): siRNA sense strand
ucaaggugcuguggugcuu

SEQ ID NO: 1830677 - RNA, 19 nt, Homo sapiens
  misc_RNA (1)...(19): siRNA sense strand
ugagaaccgcuacuuugaa

SEQ ID NO: 1830678 - RNA, 19 nt, Homo sapiens
  misc_RNA (1)...(19): siRNA sense strand
guggacacuuauacgguuu

SEQ ID NO: 1830679 - RNA, 19 nt, Homo sapiens
  misc_RNA (1)...(19): siRNA sense strand
cguucgaccuaucaauauu

SEQ ID NO: 1830680 - RNA, 19 nt, Homo sapiens
  misc_RNA (1)...(19): siRNA sense strand
gcuacacggccaccaauca

SEQ ID NO: 1830681 - RNA, 19 nt, Homo sapiens
  misc_RNA (1)...(19): siRNA sense strand
acacuuauacgguuuacau

SEQ ID NO: 1830682 - RNA, 19 nt, Homo sapiens
  misc_RNA (1)...(19): siRNA sense strand
ggaggagguccggagcaua

SEQ ID NO: 1830683 - RNA, 19 nt, Homo sapiens
  misc_RNA (1)...(19): siRNA sense strand
gugaaacugaucccaaaga

SEQ ID NO: 1830684 - RNA, 19 nt, Homo sapiens
  misc_RNA (1)...(19): siRNA sense strand
gagggcuggucgcaucgaa

SEQ ID NO: 1830685 - RNA, 19 nt, Homo sapiens
  misc_RNA (1)...(19): siRNA sense strand
gaaggcacaacccuagaag

SEQ ID NO: 1830686 - RNA, 19 nt, Homo sapiens
  misc_RNA (1)...(19): siRNA sense strand
gcaucgcagucuucgagau

SEQ ID NO: 1830687 - RNA, 19 nt, Homo sapiens
  misc_RNA (1)...(19): siRNA sense strand
aggaggacguggcugagaa

SEQ ID NO: 1830688 - RNA, 19 nt, Homo sapiens
  misc_RNA (1)...(19): siRNA sense strand
ugagcaacccagagaagaa

SEQ ID NO: 1830689 - RNA, 19 nt, Homo sapiens
  misc_RNA (1)...(19): siRNA sense strand
acacagugaccacagagaa

SEQ ID NO: 1830690 - RNA, 19 nt, Homo sapiens
  misc_RNA (1)...(19): siRNA sense strand
cgaggucuuugccauugga

SEQ ID NO: 1830691 - RNA, 19 nt, Homo sapiens
  misc_RNA (1)...(19): siRNA sense strand
gagaucgacgagucuguga

SEQ ID NO: 1830692 - RNA, 19 nt, Homo sapiens
  misc_RNA (1)...(19): siRNA sense strand
ugaaggcacaacccuagaa

SEQ ID NO: 1830693 - RNA, 19 nt, Homo sapiens
  misc_RNA (1)...(19): siRNA sense strand
gcaccucaacgucaucaag

SEQ ID NO: 1830694 - RNA, 19 nt, Homo sapiens
  misc_RNA (1)...(19): siRNA sense strand
ccagggauguucugauucc

SEQ ID NO: 1830695 - RNA, 19 nt, Homo sapiens
  misc_RNA (1)...(19): siRNA sense strand
cugagaaccgcuacuuuga

SEQ ID NO: 1830696 - RNA, 19 nt, Homo sapiens
  misc_RNA (1)...(19): siRNA sense strand
ggagaacuacgagcugauc

SEQ ID NO: 1830697 - RNA, 19 nt, Homo sapiens
  misc_RNA (1)...(19): siRNA sense strand
ucccagugcuucgugcuaa

SEQ ID NO: 1830698 - RNA, 19 nt, Homo sapiens
  misc_RNA (1)...(19): siRNA sense strand
ggugcuuccugauccaugu

SEQ ID NO: 1830699 - RNA, 19 nt, Homo sapiens
  misc_RNA (1)...(19): siRNA sense strand
gaaccuggcugcuguauug

SEQ ID NO: 1830700 - RNA, 19 nt, Homo sapiens
  misc_RNA (1)...(19): siRNA sense strand
ggagauggguuccagauga

SEQ ID NO: 1830701 - RNA, 19 nt, Homo sapiens
  misc_RNA (1)...(19): siRNA sense strand
ggaaaucccauucuucuaa

SEQ ID NO: 1830702 - RNA, 19 nt, Homo sapiens
  misc_RNA (1)...(19): siRNA sense strand
ggaagucacugccauggaa

SEQ ID NO: 1830703 - RNA, 19 nt, Homo sapiens
  misc_RNA (1)...(19): siRNA sense strand
gaaaucccauucuucuaaa

SEQ ID NO: 1830704 - RNA, 19 nt, Homo sapiens
  misc_RNA (1)...(19): siRNA sense strand
ugaaaucacugcauuacaa

SEQ ID NO: 1830705 - RNA, 19 nt, Homo sapiens
  misc_RNA (1)...(19): siRNA sense strand
ggacuuuauuugccauaua

SEQ ID NO: 1830706 - RNA, 19 nt, Homo sapiens
  misc_RNA (1)...(19): siRNA sense strand
gcaaauaccuaggcuaucu

SEQ ID NO: 1830707 - RNA, 19 nt, Homo sapiens
  misc_RNA (1)...(19): siRNA sense strand
caacgugguuucuacauau

SEQ ID NO: 1830708 - RNA, 19 nt, Homo sapiens
  misc_RNA (1)...(19): siRNA sense strand
agacagaguagucaaauua

SEQ ID NO: 1830709 - RNA, 19 nt, Homo sapiens
  misc_RNA (1)...(19): siRNA sense strand
ccacuagcaucucaaauau

SEQ ID NO: 1830710 - RNA, 19 nt, Homo sapiens
  misc_RNA (1)...(19): siRNA sense strand
gaggaaacgucaucucuuc

SEQ ID NO: 1830711 - RNA, 19 nt, Homo sapiens
  misc_RNA (1)...(19): siRNA sense strand
gugcaaacauuaaagcaaa

SEQ ID NO: 1830712 - RNA, 19 nt, Homo sapiens
  misc_RNA (1)...(19): siRNA sense strand
gaauccaugugguguauga

SEQ ID NO: 1830713 - RNA, 19 nt, Homo sapiens
  misc_RNA (1)...(19): siRNA sense strand
gaagaucgaguuugaugaa

SEQ ID NO: 1830714 - RNA, 19 nt, Homo sapiens
  misc_RNA (1)...(19): siRNA sense strand
ggauacacuuccaaagaaa

SEQ ID NO: 1830715 - RNA, 19 nt, Homo sapiens
  misc_RNA (1)...(19): siRNA sense strand
gaucgaguuugaugaaaga

SEQ ID NO: 1830716 - RNA, 19 nt, Homo sapiens
  misc_RNA (1)...(19): siRNA sense strand
caacacauuucuuuacaca

SEQ ID NO: 1830717 - RNA, 19 nt, Homo sapiens
  misc_RNA (1)...(19): siRNA sense strand
gaagaaggccuuugagcau

SEQ ID NO: 1830718 - RNA, 19 nt, Homo sapiens
  misc_RNA (1)...(19): siRNA sense strand
gccacuagcaucucaaaua

SEQ ID NO: 1830719 - RNA, 19 nt, Homo sapiens
  misc_RNA (1)...(19): siRNA sense strand
gcaauccaccuuccaaaga

SEQ ID NO: 1830720 - RNA, 19 nt, Homo sapiens
  misc_RNA (1)...(19): siRNA sense strand
cauggaagcuuuucuuuaa

SEQ ID NO: 1830721 - RNA, 19 nt, Homo sapiens
  misc_RNA (1)...(19): siRNA sense strand
gagacagaguagucaaauu

SEQ ID NO: 1830722 - RNA, 19 nt, Homo sapiens
  misc_RNA (1)...(19): siRNA sense strand
ucaacgugguuucuacaua

SEQ ID NO: 1830723 - RNA, 19 nt, Homo sapiens
  misc_RNA (1)...(19): siRNA sense strand
ugaaauggauaaacucauc

SEQ ID NO: 1830724 - RNA, 19 nt, Homo sapiens
  misc_RNA (1)...(19): siRNA sense strand
caacaugggcaaccugauu

SEQ ID NO: 1830725 - RNA, 19 nt, Homo sapiens
  misc_RNA (1)...(19): siRNA sense strand
ucucaaauaucaggacuuu

SEQ ID NO: 1830726 - RNA, 19 nt, Homo sapiens
  misc_RNA (1)...(19): siRNA sense strand
ucacugccauggaagcuuu

SEQ ID NO: 1830727 - RNA, 19 nt, Homo sapiens
  misc_RNA (1)...(19): siRNA sense strand
ggaaguacccauucauagu

SEQ ID NO: 1830728 - RNA, 19 nt, Homo sapiens
  misc_RNA (1)...(19): siRNA sense strand
gauuugugaugcaaugauu

SEQ ID NO: 1830729 - RNA, 19 nt, Homo sapiens
  misc_RNA (1)...(19): siRNA sense strand
aagaugaaaucacugcauu

SEQ ID NO: 1830730 - RNA, 19 nt, Homo sapiens
  misc_RNA (1)...(19): siRNA sense strand
aagaaggccuuugagcaua

SEQ ID NO: 1830731 - RNA, 19 nt, Homo sapiens
  misc_RNA (1)...(19): siRNA sense strand
ggaaaacaauugucuaucu

SEQ ID NO: 1830732 - RNA, 19 nt, Homo sapiens
  misc_RNA (1)...(19): siRNA sense strand
cauagucacuucugaugau

SEQ ID NO: 1830733 - RNA, 19 nt, Homo sapiens
  misc_RNA (1)...(19): siRNA sense strand
gugaugcaaugauuaacaa

SEQ ID NO: 1830734 - RNA, 19 nt, Homo sapiens
  misc_RNA (1)...(19): siRNA sense strand
gcagugaucuuuguuuuau

SEQ ID NO: 1830735 - RNA, 19 nt, Homo sapiens
  misc_RNA (1)...(19): siRNA sense strand
acuagcaucucaaauauca

SEQ ID NO: 1830736 - RNA, 19 nt, Homo sapiens
  misc_RNA (1)...(19): siRNA sense strand
gagauggguuccagaugau

SEQ ID NO: 1830737 - RNA, 19 nt, Homo sapiens
  misc_RNA (1)...(19): siRNA sense strand
gguauccggucgcccauug

SEQ ID NO: 1830738 - RNA, 19 nt, Homo sapiens
  misc_RNA (1)...(19): siRNA sense strand
gaaguacccauucauaguc

SEQ ID NO: 1830739 - RNA, 19 nt, Homo sapiens
  misc_RNA (1)...(19): siRNA sense strand
gaucgagccacuccucaaa

SEQ ID NO: 1830740 - RNA, 19 nt, Homo sapiens
  misc_RNA (1)...(19): siRNA sense strand
cgucaucucuucccaugga

SEQ ID NO: 1830741 - RNA, 19 nt, Homo sapiens
  misc_RNA (1)...(19): siRNA sense strand
ucaaauccagggacaaauu

SEQ ID NO: 1830742 - RNA, 19 nt, Homo sapiens
  misc_RNA (1)...(19): siRNA sense strand
ucaccaagguucagcagau

SEQ ID NO: 1830743 - RNA, 19 nt, Homo sapiens
  misc_RNA (1)...(19): siRNA sense strand
agggacaaauuuaguguuu

SEQ ID NO: 1830744 - RNA, 19 nt, Homo sapiens
  misc_RNA (1)...(19): siRNA sense strand
caaacuuccuggccaaugg

SEQ ID NO: 1830745 - RNA, 19 nt, Homo sapiens
  misc_RNA (1)...(19): siRNA sense strand
guagucaaauuagauguuc

SEQ ID NO: 1830746 - RNA, 19 nt, Homo sapiens
  misc_RNA (1)...(19): siRNA sense strand
ucucaaucaugccgcuuua

SEQ ID NO: 1830747 - RNA, 19 nt, Homo sapiens
  misc_RNA (1)...(19): siRNA sense strand
caagauaucaacgugguuu

SEQ ID NO: 1830748 - RNA, 19 nt, Homo sapiens
  misc_RNA (1)...(19): siRNA sense strand
gugaugaaguugugggaau

SEQ ID NO: 1830749 - RNA, 19 nt, Homo sapiens
  misc_RNA (1)...(19): siRNA sense strand
aaauggacgagguauauaa

SEQ ID NO: 1830750 - RNA, 19 nt, Homo sapiens
  misc_RNA (1)...(19): siRNA sense strand
uaccuaggcuaucugaaga

SEQ ID NO: 1830751 - RNA, 19 nt, Homo sapiens
  misc_RNA (1)...(19): siRNA sense strand
gaaaacaauugucuaucug

SEQ ID NO: 1830752 - RNA, 19 nt, Homo sapiens
  misc_RNA (1)...(19): siRNA sense strand
gggaaucguuggauacacu

SEQ ID NO: 1830753 - RNA, 19 nt, Homo sapiens
  misc_RNA (1)...(19): siRNA sense strand
ccugggagcuuacgauuuu

SEQ ID NO: 1830754 - RNA, 19 nt, Homo sapiens
  misc_RNA (1)...(19): siRNA sense strand
cauuugaccuaguccaguu

SEQ ID NO: 1830755 - RNA, 19 nt, Homo sapiens
  misc_RNA (1)...(19): siRNA sense strand
acgcaacaauggcacaauu

SEQ ID NO: 1830756 - RNA, 19 nt, Homo sapiens
  misc_RNA (1)...(19): siRNA sense strand
ugggcaaccugauuuguga

SEQ ID NO: 1830757 - RNA, 19 nt, Homo sapiens
  misc_RNA (1)...(19): siRNA sense strand
gauaaacucaucgcucaga

SEQ ID NO: 1830758 - RNA, 19 nt, Homo sapiens
  misc_RNA (1)...(19): siRNA sense strand
cagcagcauuccugaagau

SEQ ID NO: 1830759 - RNA, 19 nt, Homo sapiens
  misc_RNA (1)...(19): siRNA sense strand
uaauuuauccagcaguuga

SEQ ID NO: 1830760 - RNA, 19 nt, Homo sapiens
  misc_RNA (1)...(19): siRNA sense strand
ggaaccacguauccaugug

SEQ ID NO: 1830761 - RNA, 19 nt, Homo sapiens
  misc_RNA (1)...(19): siRNA sense strand
gcacugggaaaucaugaau

SEQ ID NO: 1830762 - RNA, 19 nt, Homo sapiens
  misc_RNA (1)...(19): siRNA sense strand
gaagaugaaaucacugcau

SEQ ID NO: 1830763 - RNA, 19 nt, Homo sapiens
  misc_RNA (1)...(19): siRNA sense strand
gauaucaacgugguuucua

SEQ ID NO: 1830764 - RNA, 19 nt, Homo sapiens
  misc_RNA (1)...(19): siRNA sense strand
gauggguuccagaugauaa

SEQ ID NO: 1830765 - RNA, 19 nt, Homo sapiens
  misc_RNA (1)...(19): siRNA sense strand
acagaguagucaaauuaga

SEQ ID NO: 1830766 - RNA, 19 nt, Homo sapiens
  misc_RNA (1)...(19): siRNA sense strand
ucaugccgcuuuagagaau

SEQ ID NO: 1830767 - RNA, 19 nt, Homo sapiens
  misc_RNA (1)...(19): siRNA sense strand
acucaucgcucagaaagug

SEQ ID NO: 1830768 - RNA, 19 nt, Homo sapiens
  misc_RNA (1)...(19): siRNA sense strand
gaggacacuccaacacauu

SEQ ID NO: 1830769 - RNA, 19 nt, Homo sapiens
  misc_RNA (1)...(19): siRNA sense strand
aaccugaaguagauaaguu

SEQ ID NO: 1830770 - RNA, 19 nt, Homo sapiens
  misc_RNA (1)...(19): siRNA sense strand
ggagacagaguagucaaau

SEQ ID NO: 1830771 - RNA, 19 nt, Homo sapiens
  misc_RNA (1)...(19): siRNA sense strand
uaauuauucuacccaggaa

SEQ ID NO: 1830772 - RNA, 19 nt, Homo sapiens
  misc_RNA (1)...(19): siRNA sense strand
gggaaguacccauucauag

SEQ ID NO: 1830773 - RNA, 19 nt, Homo sapiens
  misc_RNA (1)...(19): siRNA sense strand
ccauggcacugggaaauca

SEQ ID NO: 1830774 - RNA, 19 nt, Homo sapiens
  misc_RNA (1)...(19): siRNA sense strand
gggcagugaucuuuguuuu

SEQ ID NO: 1830775 - RNA, 19 nt, Homo sapiens
  misc_RNA (1)...(19): siRNA sense strand
gauguucuuugcaccaagu

SEQ ID NO: 1830776 - RNA, 19 nt, Homo sapiens
  misc_RNA (1)...(19): siRNA sense strand
caauccaccuuccaaagag

SEQ ID NO: 1830777 - RNA, 19 nt, Homo sapiens
  misc_RNA (1)...(19): siRNA sense strand
ucgagccacuccucaaaga

SEQ ID NO: 1830778 - RNA, 19 nt, Homo sapiens
  misc_RNA (1)...(19): siRNA sense strand
gcaacaauggcacaauuac

SEQ ID NO: 1830779 - RNA, 19 nt, Homo sapiens
  misc_RNA (1)...(19): siRNA sense strand
caaagaggccaaauuucca

SEQ ID NO: 1830780 - RNA, 19 nt, Homo sapiens
  misc_RNA (1)...(19): siRNA sense strand
uccugaagauccaagcaua

SEQ ID NO: 1830781 - RNA, 19 nt, Homo sapiens
  misc_RNA (1)...(19): siRNA sense strand
uauaaaguucuuccuguug

SEQ ID NO: 1830782 - RNA, 19 nt, Homo sapiens
  misc_RNA (1)...(19): siRNA sense strand
ccgaaaaccuggagacaga

SEQ ID NO: 1830783 - RNA, 19 nt, Homo sapiens
  misc_RNA (1)...(19): siRNA sense strand
cggaauccaugugguguau

SEQ ID NO: 1830784 - RNA, 19 nt, Homo sapiens
  misc_RNA (1)...(19): siRNA sense strand
gcacaauuaccugggagaa

SEQ ID NO: 1830785 - RNA, 19 nt, Homo sapiens
  misc_RNA (1)...(19): siRNA sense strand
gaugaaaucacugcauuac

SEQ ID NO: 1830786 - RNA, 19 nt, Homo sapiens
  misc_RNA (1)...(19): siRNA sense strand
ugaaagaggaaacgucauc

SEQ ID NO: 1830787 - RNA, 19 nt, Homo sapiens
  misc_RNA (1)...(19): siRNA sense strand
ccacguauccaugugcauu

SEQ ID NO: 1830788 - RNA, 19 nt, Homo sapiens
  misc_RNA (1)...(19): siRNA sense strand
ucaaagaggccaaauuucc

SEQ ID NO: 1830789 - RNA, 19 nt, Homo sapiens
  misc_RNA (1)...(19): siRNA sense strand
gcauaaaagcagacauuaa

SEQ ID NO: 1830790 - RNA, 19 nt, Homo sapiens
  misc_RNA (1)...(19): siRNA sense strand
guuugaagaugaaaucacu

SEQ ID NO: 1830791 - RNA, 19 nt, Homo sapiens
  misc_RNA (1)...(19): siRNA sense strand
auaaggugauccucccaaa

SEQ ID NO: 1830792 - RNA, 19 nt, Homo sapiens
  misc_RNA (1)...(19): siRNA sense strand
caaaauggacgagguauau

SEQ ID NO: 1830793 - RNA, 19 nt, Homo sapiens
  misc_RNA (1)...(19): siRNA sense strand
caugugguguaugaucuuu

SEQ ID NO: 1830794 - RNA, 19 nt, Homo sapiens
  misc_RNA (1)...(19): siRNA sense strand
ggagaaccuggcugcugua

SEQ ID NO: 1830795 - RNA, 19 nt, Homo sapiens
  misc_RNA (1)...(19): siRNA sense strand
cgcaacaauggcacaauua

SEQ ID NO: 1830796 - RNA, 19 nt, Homo sapiens
  misc_RNA (1)...(19): siRNA sense strand
caaccugauuugugaugca

SEQ ID NO: 1830797 - RNA, 19 nt, Homo sapiens
  misc_RNA (1)...(19): siRNA sense strand
ucaaucaugccgcuuuaga

SEQ ID NO: 1830798 - RNA, 19 nt, Homo sapiens
  misc_RNA (1)...(19): siRNA sense strand
cgagguggcgcacuucaug

SEQ ID NO: 1830799 - RNA, 19 nt, Homo sapiens
  misc_RNA (1)...(19): siRNA sense strand
ccaaagagguguacgaugu

SEQ ID NO: 1830800 - RNA, 19 nt, Homo sapiens
  misc_RNA (1)...(19): siRNA sense strand
gagcgaaucugcuagugaa

SEQ ID NO: 1830801 - RNA, 19 nt, Homo sapiens
  misc_RNA (1)...(19): siRNA sense strand
ggagagacaucgugcugaa

SEQ ID NO: 1830802 - RNA, 19 nt, Homo sapiens
  misc_RNA (1)...(19): siRNA sense strand
ggucgacgguccaaauuug

SEQ ID NO: 1830803 - RNA, 19 nt, Homo sapiens
  misc_RNA (1)...(19): siRNA sense strand
gaaguucacuacagagagu

SEQ ID NO: 1830804 - RNA, 19 nt, Homo sapiens
  misc_RNA (1)...(19): siRNA sense strand
ucaccaaccugcagcauga

SEQ ID NO: 1830805 - RNA, 19 nt, Homo sapiens
  misc_RNA (1)...(19): siRNA sense strand
gaauaucacuuccauacac

SEQ ID NO: 1830806 - RNA, 19 nt, Homo sapiens
  misc_RNA (1)...(19): siRNA sense strand
cuacaacaauggcaacuau

SEQ ID NO: 1830807 - RNA, 19 nt, Homo sapiens
  misc_RNA (1)...(19): siRNA sense strand
ucacggacaucucaaggaa

SEQ ID NO: 1830808 - RNA, 19 nt, Homo sapiens
  misc_RNA (1)...(19): siRNA sense strand
caaaugcaaugauccuugu

SEQ ID NO: 1830809 - RNA, 19 nt, Homo sapiens
  misc_RNA (1)...(19): siRNA sense strand
gcaagacugagaucaauug

SEQ ID NO: 1830810 - RNA, 19 nt, Homo sapiens
  misc_RNA (1)...(19): siRNA sense strand
cagcagcgguugaacauca

SEQ ID NO: 1830811 - RNA, 19 nt, Homo sapiens
  misc_RNA (1)...(19): siRNA sense strand
aaucugaacuggaccaaug

SEQ ID NO: 1830812 - RNA, 19 nt, Homo sapiens
  misc_RNA (1)...(19): siRNA sense strand
acggacaucucaaggaaua

SEQ ID NO: 1830813 - RNA, 19 nt, Homo sapiens
  misc_RNA (1)...(19): siRNA sense strand
acaaugcuguuaucacuug

SEQ ID NO: 1830814 - RNA, 19 nt, Homo sapiens
  misc_RNA (1)...(19): siRNA sense strand
caacaucacggacaucuca

SEQ ID NO: 1830815 - RNA, 19 nt, Homo sapiens
  misc_RNA (1)...(19): siRNA sense strand
gcaaugggaacgccaguau

SEQ ID NO: 1830816 - RNA, 19 nt, Homo sapiens
  misc_RNA (1)...(19): siRNA sense strand
ugacaaugcuguuaucacu

SEQ ID NO: 1830817 - RNA, 19 nt, Homo sapiens
  misc_RNA (1)...(19): siRNA sense strand
gaacgccaguaucaacauc

SEQ ID NO: 1830818 - RNA, 19 nt, Homo sapiens
  misc_RNA (1)...(19): siRNA sense strand
ccagagccuuugccaagaa

SEQ ID NO: 1830819 - RNA, 19 nt, Homo sapiens
  misc_RNA (1)...(19): siRNA sense strand
ucaacaagcccacccacua

SEQ ID NO: 1830820 - RNA, 19 nt, Homo sapiens
  misc_RNA (1)...(19): siRNA sense strand
cagcaagacugagaucaau

SEQ ID NO: 1830821 - RNA, 19 nt, Homo sapiens
  misc_RNA (1)...(19): siRNA sense strand
ucaaggagaucuacaaaau

SEQ ID NO: 1830822 - RNA, 19 nt, Homo sapiens
  misc_RNA (1)...(19): siRNA sense strand
caaauugugucugcagcaa

SEQ ID NO: 1830823 - RNA, 19 nt, Homo sapiens
  misc_RNA (1)...(19): siRNA sense strand
caaucuaccuggacauucu

SEQ ID NO: 1830824 - RNA, 19 nt, Homo sapiens
  misc_RNA (1)...(19): siRNA sense strand
auggagaccugaauaaguu

SEQ ID NO: 1830825 - RNA, 19 nt, Homo sapiens
  misc_RNA (1)...(19): siRNA sense strand
gcagcaagacugagaucaa

SEQ ID NO: 1830826 - RNA, 19 nt, Homo sapiens
  misc_RNA (1)...(19): siRNA sense strand
gaucuucaccuauggaaag

SEQ ID NO: 1830827 - RNA, 19 nt, Homo sapiens
  misc_RNA (1)...(19): siRNA sense strand
ucugggagaucuucaccua

SEQ ID NO: 1830828 - RNA, 19 nt, Homo sapiens
  misc_RNA (1)...(19): siRNA sense strand
gccacaagccggacacgua

SEQ ID NO: 1830829 - RNA, 19 nt, Homo sapiens
  misc_RNA (1)...(19): siRNA sense strand
caguuggacuugcugcuuu

SEQ ID NO: 1830830 - RNA, 19 nt, Homo sapiens
  misc_RNA (1)...(19): siRNA sense strand
uguaguuucuggcggauuu

SEQ ID NO: 1830831 - RNA, 19 nt, Homo sapiens
  misc_RNA (1)...(19): siRNA sense strand
ucacuuccauacacauaga

SEQ ID NO: 1830832 - RNA, 19 nt, Homo sapiens
  misc_RNA (1)...(19): siRNA sense strand
ugggagaucuucaccuaug

SEQ ID NO: 1830833 - RNA, 19 nt, Homo sapiens
  misc_RNA (1)...(19): siRNA sense strand
gccagaaccucuacugcau

SEQ ID NO: 1830834 - RNA, 19 nt, Homo sapiens
  misc_RNA (1)...(19): siRNA sense strand
ucaucauggucuuugaaua

SEQ ID NO: 1830835 - RNA, 19 nt, Homo sapiens
  misc_RNA (1)...(19): siRNA sense strand
gagagcacggauaacuuua

SEQ ID NO: 1830836 - RNA, 19 nt, Homo sapiens
  misc_RNA (1)...(19): siRNA sense strand
cagaaccucuacugcauca

SEQ ID NO: 1830837 - RNA, 19 nt, Homo sapiens
  misc_RNA (1)...(19): siRNA sense strand
gcucccagcuuccucucuu

SEQ ID NO: 1830838 - RNA, 19 nt, Homo sapiens
  misc_RNA (1)...(19): siRNA sense strand
agagagcacggauaacuuu

SEQ ID NO: 1830839 - RNA, 19 nt, Homo sapiens
  misc_RNA (1)...(19): siRNA sense strand
caaacacggaggucauuga

SEQ ID NO: 1830840 - RNA, 19 nt, Homo sapiens
  misc_RNA (1)...(19): siRNA sense strand
gcgucuggcuggacuaugu

SEQ ID NO: 1830841 - RNA, 19 nt, Homo sapiens
  misc_RNA (1)...(19): siRNA sense strand
gcuguuaucacuugcaaug

SEQ ID NO: 1830842 - RNA, 19 nt, Homo sapiens
  misc_RNA (1)...(19): siRNA sense strand
ccacaccuccuaucacugu

SEQ ID NO: 1830843 - RNA, 19 nt, Homo sapiens
  misc_RNA (1)...(19): siRNA sense strand
ggaggucauugagugcauu

SEQ ID NO: 1830844 - RNA, 19 nt, Homo sapiens
  misc_RNA (1)...(19): siRNA sense strand
ggagcgaaucugcuaguga

SEQ ID NO: 1830845 - RNA, 19 nt, Homo sapiens
  misc_RNA (1)...(19): siRNA sense strand
gcccgacacuguggucauu

SEQ ID NO: 1830846 - RNA, 19 nt, Homo sapiens
  misc_RNA (1)...(19): siRNA sense strand
ccacaaaccagaagaagac

SEQ ID NO: 1830847 - RNA, 19 nt, Homo sapiens
  misc_RNA (1)...(19): siRNA sense strand
gcucaacgccguggacaug

SEQ ID NO: 1830848 - RNA, 19 nt, Homo sapiens
  misc_RNA (1)...(19): siRNA sense strand
caucaaggagaucuacaaa

SEQ ID NO: 1830849 - RNA, 19 nt, Homo sapiens
  misc_RNA (1)...(19): siRNA sense strand
gaacaucaaggagaucuac

SEQ ID NO: 1830850 - RNA, 19 nt, Homo sapiens
  misc_RNA (1)...(19): siRNA sense strand
ccacaagccggacacguau

SEQ ID NO: 1830851 - RNA, 19 nt, Homo sapiens
  misc_RNA (1)...(19): siRNA sense strand
gugguucucuucgucauga

SEQ ID NO: 1830852 - RNA, 19 nt, Homo sapiens
  misc_RNA (1)...(19): siRNA sense strand
caugagcaaugccaguguu

SEQ ID NO: 1830853 - RNA, 19 nt, Homo sapiens
  misc_RNA (1)...(19): siRNA sense strand
gggcugcaguccaucaaca

SEQ ID NO: 1830854 - RNA, 19 nt, Homo sapiens
  misc_RNA (1)...(19): siRNA sense strand
caacaagcccacccacuac

SEQ ID NO: 1830855 - RNA, 19 nt, Homo sapiens
  misc_RNA (1)...(19): siRNA sense strand
ucuacagcacggauuauua

SEQ ID NO: 1830856 - RNA, 19 nt, Homo sapiens
  misc_RNA (1)...(19): siRNA sense strand
uggcaacuauacccucauu

SEQ ID NO: 1830857 - RNA, 19 nt, Homo sapiens
  misc_RNA (1)...(19): siRNA sense strand
caucauggucuuugaauac

SEQ ID NO: 1830858 - RNA, 19 nt, Homo sapiens
  misc_RNA (1)...(19): siRNA sense strand
ccauuugcguuauauaaac

SEQ ID NO: 1830859 - RNA, 19 nt, Homo sapiens
  misc_RNA (1)...(19): siRNA sense strand
uaucuuguuugacgaagug

SEQ ID NO: 1830860 - RNA, 19 nt, Homo sapiens
  misc_RNA (1)...(19): siRNA sense strand
gagggugacaaugcuguua

SEQ ID NO: 1830861 - RNA, 19 nt, Homo sapiens
  misc_RNA (1)...(19): siRNA sense strand
gcucuacaccggacuucaa

SEQ ID NO: 1830862 - RNA, 19 nt, Homo sapiens
  misc_RNA (1)...(19): siRNA sense strand
caacugcagcugugacauc

SEQ ID NO: 1830863 - RNA, 19 nt, Homo sapiens
  misc_RNA (1)...(19): siRNA sense strand
guaaccggcucaccacacu

SEQ ID NO: 1830864 - RNA, 19 nt, Homo sapiens
  misc_RNA (1)...(19): siRNA sense strand
ggagcacugcaucgaguuu

SEQ ID NO: 1830865 - RNA, 19 nt, Homo sapiens
  misc_RNA (1)...(19): siRNA sense strand
gaggucauugagugcauua

SEQ ID NO: 1830866 - RNA, 19 nt, Homo sapiens
  misc_RNA (1)...(19): siRNA sense strand
gcaucccugucauugagaa

SEQ ID NO: 1830867 - RNA, 19 nt, Homo sapiens
  misc_RNA (1)...(19): siRNA sense strand
aguccaagaucauccaugu

SEQ ID NO: 1830868 - RNA, 19 nt, Homo sapiens
  misc_RNA (1)...(19): siRNA sense strand
uaucacuuccauacacaua

SEQ ID NO: 1830869 - RNA, 19 nt, Homo sapiens
  misc_RNA (1)...(19): siRNA sense strand
acaaaauccuccaugcuuu

SEQ ID NO: 1830870 - RNA, 19 nt, Homo sapiens
  misc_RNA (1)...(19): siRNA sense strand
ccacauugccagucagauc

SEQ ID NO: 1830871 - RNA, 19 nt, Homo sapiens
  misc_RNA (1)...(19): siRNA sense strand
aagcauggagaccugaaua

SEQ ID NO: 1830872 - RNA, 19 nt, Homo sapiens
  misc_RNA (1)...(19): siRNA sense strand
gcacauugucaaguucuau

SEQ ID NO: 1830873 - RNA, 19 nt, Homo sapiens
  misc_RNA (1)...(19): siRNA sense strand
cuaccaagagggagagauu

SEQ ID NO: 1830874 - RNA, 19 nt, Homo sapiens
  misc_RNA (1)...(19): siRNA sense strand
ggacaucucaaggaauauc

SEQ ID NO: 1830875 - RNA, 19 nt, Homo sapiens
  misc_RNA (1)...(19): siRNA sense strand
cuuccucucuuccgcauga

SEQ ID NO: 1830876 - RNA, 19 nt, Homo sapiens
  misc_RNA (1)...(19): siRNA sense strand
ccauacacauagagaacug

SEQ ID NO: 1830877 - RNA, 19 nt, Homo sapiens
  misc_RNA (1)...(19): siRNA sense strand
ucgucaugaucaacaaaua

SEQ ID NO: 1830878 - RNA, 19 nt, Homo sapiens
  misc_RNA (1)...(19): siRNA sense strand
caucaagaacucaggacuu

SEQ ID NO: 1830879 - RNA, 19 nt, Homo sapiens
  misc_RNA (1)...(19): siRNA sense strand
ccacagcagcgguugaaca

SEQ ID NO: 1830880 - RNA, 19 nt, Homo sapiens
  misc_RNA (1)...(19): siRNA sense strand
gaaagcagccaugguucca

SEQ ID NO: 1830881 - RNA, 19 nt, Homo sapiens
  misc_RNA (1)...(19): siRNA sense strand
uggugaaugugacgaguga

SEQ ID NO: 1830882 - RNA, 19 nt, Homo sapiens
  misc_RNA (1)...(19): siRNA sense strand
caacuugacgcuggugaau

SEQ ID NO: 1830883 - RNA, 19 nt, Homo sapiens
  misc_RNA (1)...(19): siRNA sense strand
aauugugucugcagcaaga

SEQ ID NO: 1830884 - RNA, 19 nt, Homo sapiens
  misc_RNA (1)...(19): siRNA sense strand
ggugagggagccuuuggaa

SEQ ID NO: 1830885 - RNA, 19 nt, Homo sapiens
  misc_RNA (1)...(19): siRNA sense strand
ucgcaucccugucauugag

SEQ ID NO: 1830886 - RNA, 19 nt, Homo sapiens
  misc_RNA (1)...(19): siRNA sense strand
gcugccugcucuucaacaa

SEQ ID NO: 1830887 - RNA, 19 nt, Homo sapiens
  misc_RNA (1)...(19): siRNA sense strand
acuugacgcuggugaaugu

SEQ ID NO: 1830888 - RNA, 19 nt, Homo sapiens
  misc_RNA (1)...(19): siRNA sense strand
guguugcccucacugucua

SEQ ID NO: 1830889 - RNA, 19 nt, Homo sapiens
  misc_RNA (1)...(19): siRNA sense strand
aaagagguguacgauguca

SEQ ID NO: 1830890 - RNA, 19 nt, Homo sapiens
  misc_RNA (1)...(19): siRNA sense strand
cuacagcacggauuauuac

SEQ ID NO: 1830891 - RNA, 19 nt, Homo sapiens
  misc_RNA (1)...(19): siRNA sense strand
gcgaaucugcuagugaaga

SEQ ID NO: 1830892 - RNA, 19 nt, Homo sapiens
  misc_RNA (1)...(19): siRNA sense strand
gguuggagcgaaucugcua

SEQ ID NO: 1830893 - RNA, 19 nt, Homo sapiens
  misc_RNA (1)...(19): siRNA sense strand
cauggagaccugaauaagu

SEQ ID NO: 1830894 - RNA, 19 nt, Homo sapiens
  misc_RNA (1)...(19): siRNA sense strand
agugugaccuuccugagau

SEQ ID NO: 1830895 - RNA, 19 nt, Homo sapiens
  misc_RNA (1)...(19): siRNA sense strand
guaucaacaucacggacau

SEQ ID NO: 1830896 - RNA, 19 nt, Homo sapiens
  misc_RNA (1)...(19): siRNA sense strand
gcauggagaccugaauaag

SEQ ID NO: 1830897 - RNA, 19 nt, Homo sapiens
  misc_RNA (1)...(19): siRNA sense strand
ccagagagcacggauaacu

SEQ ID NO: 1830898 - RNA, 19 nt, Homo sapiens
  misc_RNA (1)...(19): siRNA sense strand
gcacagccaaccagaccau

SEQ ID NO: 1830899 - RNA, 19 nt, Homo sapiens
  misc_RNA (1)...(19): siRNA sense strand
ccacaagcauugaauauaa

SEQ ID NO: 1830900 - RNA, 19 nt, Homo sapiens
  misc_RNA (1)...(19): siRNA sense strand
gcaggaagcuguuggcaaa

SEQ ID NO: 1830901 - RNA, 19 nt, Homo sapiens
  misc_RNA (1)...(19): siRNA sense strand
ggacucagauaaacauaaa

SEQ ID NO: 1830902 - RNA, 19 nt, Homo sapiens
  misc_RNA (1)...(19): siRNA sense strand
uagaagaccuuaagaaaga

SEQ ID NO: 1830903 - RNA, 19 nt, Homo sapiens
  misc_RNA (1)...(19): siRNA sense strand
aauagaagcugcugacuuu

SEQ ID NO: 1830904 - RNA, 19 nt, Homo sapiens
  misc_RNA (1)...(19): siRNA sense strand
gaggaugaaugguuuauug

SEQ ID NO: 1830905 - RNA, 19 nt, Homo sapiens
  misc_RNA (1)...(19): siRNA sense strand
gagcagaacuaugacuuaa

SEQ ID NO: 1830906 - RNA, 19 nt, Homo sapiens
  misc_RNA (1)...(19): siRNA sense strand
gaucacagaccaacaagua

SEQ ID NO: 1830907 - RNA, 19 nt, Homo sapiens
  misc_RNA (1)...(19): siRNA sense strand
gaaaggaacacuugauaau

SEQ ID NO: 1830908 - RNA, 19 nt, Homo sapiens
  misc_RNA (1)...(19): siRNA sense strand
gaaguacauugagagaaua

SEQ ID NO: 1830909 - RNA, 19 nt, Homo sapiens
  misc_RNA (1)...(19): siRNA sense strand
gggauaacauugaggauga

SEQ ID NO: 1830910 - RNA, 19 nt, Homo sapiens
  misc_RNA (1)...(19): siRNA sense strand
uaaagcagaucacaaagga

SEQ ID NO: 1830911 - RNA, 19 nt, Homo sapiens
  misc_RNA (1)...(19): siRNA sense strand
gaaccuguaucccagacua

SEQ ID NO: 1830912 - RNA, 19 nt, Homo sapiens
  misc_RNA (1)...(19): siRNA sense strand
guaccgagcccaugaauug

SEQ ID NO: 1830913 - RNA, 19 nt, Homo sapiens
  misc_RNA (1)...(19): siRNA sense strand
gauggugaauucuuguuaa

SEQ ID NO: 1830914 - RNA, 19 nt, Homo sapiens
  misc_RNA (1)...(19): siRNA sense strand
gaugaagacuuugaauguu

SEQ ID NO: 1830915 - RNA, 19 nt, Homo sapiens
  misc_RNA (1)...(19): siRNA sense strand
aaucagccuuucaaucuua

SEQ ID NO: 1830916 - RNA, 19 nt, Homo sapiens
  misc_RNA (1)...(19): siRNA sense strand
ggaccugcuuccaaucuuu

SEQ ID NO: 1830917 - RNA, 19 nt, Homo sapiens
  misc_RNA (1)...(19): siRNA sense strand
ggugaauucuuguuaauag

SEQ ID NO: 1830918 - RNA, 19 nt, Homo sapiens
  misc_RNA (1)...(19): siRNA sense strand
gcagaacuaugacuuaacu

SEQ ID NO: 1830919 - RNA, 19 nt, Homo sapiens
  misc_RNA (1)...(19): siRNA sense strand
agaaggagcagaacuauga

SEQ ID NO: 1830920 - RNA, 19 nt, Homo sapiens
  misc_RNA (1)...(19): siRNA sense strand
gaucuuaugcuccaaaugu

SEQ ID NO: 1830921 - RNA, 19 nt, Homo sapiens
  misc_RNA (1)...(19): siRNA sense strand
gaugaugacuuggacuuug

SEQ ID NO: 1830922 - RNA, 19 nt, Homo sapiens
  misc_RNA (1)...(19): siRNA sense strand
ggagcagaacuaugacuua

SEQ ID NO: 1830923 - RNA, 19 nt, Homo sapiens
  misc_RNA (1)...(19): siRNA sense strand
gaaucagccuuucaaucuu

SEQ ID NO: 1830924 - RNA, 19 nt, Homo sapiens
  misc_RNA (1)...(19): siRNA sense strand
gaacuaugacuuaacugaa

SEQ ID NO: 1830925 - RNA, 19 nt, Homo sapiens
  misc_RNA (1)...(19): siRNA sense strand
agacaaugauggugaauuc

SEQ ID NO: 1830926 - RNA, 19 nt, Homo sapiens
  misc_RNA (1)...(19): siRNA sense strand
cugaugaucuggaugauga

SEQ ID NO: 1830927 - RNA, 19 nt, Homo sapiens
  misc_RNA (1)...(19): siRNA sense strand
agaaguacauugagagaau

SEQ ID NO: 1830928 - RNA, 19 nt, Homo sapiens
  misc_RNA (1)...(19): siRNA sense strand
uauacgagcugcugugaau

SEQ ID NO: 1830929 - RNA, 19 nt, Homo sapiens
  misc_RNA (1)...(19): siRNA sense strand
ccaugaagcuugcuacgau

SEQ ID NO: 1830930 - RNA, 19 nt, Homo sapiens
  misc_RNA (1)...(19): siRNA sense strand
uaugagcccuggugaagaa

SEQ ID NO: 1830931 - RNA, 19 nt, Homo sapiens
  misc_RNA (1)...(19): siRNA sense strand
caacaaguaagccaacaaa

SEQ ID NO: 1830932 - RNA, 19 nt, Homo sapiens
  misc_RNA (1)...(19): siRNA sense strand
uagcaaggauugaagacaa

SEQ ID NO: 1830933 - RNA, 19 nt, Homo sapiens
  misc_RNA (1)...(19): siRNA sense strand
gaaccaaguggaaccugua

SEQ ID NO: 1830934 - RNA, 19 nt, Homo sapiens
  misc_RNA (1)...(19): siRNA sense strand
cagagagcaugaaagcuuu

SEQ ID NO: 1830935 - RNA, 19 nt, Homo sapiens
  misc_RNA (1)...(19): siRNA sense strand
caaugauggugaauucuug

SEQ ID NO: 1830936 - RNA, 19 nt, Homo sapiens
  misc_RNA (1)...(19): siRNA sense strand
gcagaucacaaaggaauuu

SEQ ID NO: 1830937 - RNA, 19 nt, Homo sapiens
  misc_RNA (1)...(19): siRNA sense strand
gagaauaaucacucgguuu

SEQ ID NO: 1830938 - RNA, 19 nt, Homo sapiens
  misc_RNA (1)...(19): siRNA sense strand
uagaaauggcagagaauua

SEQ ID NO: 1830939 - RNA, 19 nt, Homo sapiens
  misc_RNA (1)...(19): siRNA sense strand
cagacaauaccauuugaua

SEQ ID NO: 1830940 - RNA, 19 nt, Homo sapiens
  misc_RNA (1)...(19): siRNA sense strand
ucauggauuugagaucuua

SEQ ID NO: 1830941 - RNA, 19 nt, Homo sapiens
  misc_RNA (1)...(19): siRNA sense strand
gagugcagcugccugacaa

SEQ ID NO: 1830942 - RNA, 19 nt, Homo sapiens
  misc_RNA (1)...(19): siRNA sense strand
ugaaaggaacacuugauaa

SEQ ID NO: 1830943 - RNA, 19 nt, Homo sapiens
  misc_RNA (1)...(19): siRNA sense strand
ugacaacaccgaucacaga

SEQ ID NO: 1830944 - RNA, 19 nt, Homo sapiens
  misc_RNA (1)...(19): siRNA sense strand
ugaagacaaugauggugaa

SEQ ID NO: 1830945 - RNA, 19 nt, Homo sapiens
  misc_RNA (1)...(19): siRNA sense strand
ccugaaacacgaauaauga

SEQ ID NO: 1830946 - RNA, 19 nt, Homo sapiens
  misc_RNA (1)...(19): siRNA sense strand
caacaauuccacaagcauu

SEQ ID NO: 1830947 - RNA, 19 nt, Homo sapiens
  misc_RNA (1)...(19): siRNA sense strand
acacgaaccuggcgaagag

SEQ ID NO: 1830948 - RNA, 19 nt, Homo sapiens
  misc_RNA (1)...(19): siRNA sense strand
gccaaggccuaaugaguca

SEQ ID NO: 1830949 - RNA, 19 nt, Homo sapiens
  misc_RNA (1)...(19): siRNA sense strand
ucagagagcaugaaagcuu

SEQ ID NO: 1830950 - RNA, 19 nt, Homo sapiens
  misc_RNA (1)...(19): siRNA sense strand
aaggaacacuugauaaucu

SEQ ID NO: 1830951 - RNA, 19 nt, Homo sapiens
  misc_RNA (1)...(19): siRNA sense strand
uaagaaagaagcagcuaau

SEQ ID NO: 1830952 - RNA, 19 nt, Homo sapiens
  misc_RNA (1)...(19): siRNA sense strand
gaagcuugcuacgauggaa

SEQ ID NO: 1830953 - RNA, 19 nt, Homo sapiens
  misc_RNA (1)...(19): siRNA sense strand
uaacaauucagaugaggaa

SEQ ID NO: 1830954 - RNA, 19 nt, Homo sapiens
  misc_RNA (1)...(19): siRNA sense strand
ggaagaaaccaugaagcuu

SEQ ID NO: 1830955 - RNA, 19 nt, Homo sapiens
  misc_RNA (1)...(19): siRNA sense strand
gaaaguucucuugcuauga

SEQ ID NO: 1830956 - RNA, 19 nt, Homo sapiens
  misc_RNA (1)...(19): siRNA sense strand
agaaucagccuuucaaucu

SEQ ID NO: 1830957 - RNA, 19 nt, Homo sapiens
  misc_RNA (1)...(19): siRNA sense strand
ggcuagaaauggcagagaa

SEQ ID NO: 1830958 - RNA, 19 nt, Homo sapiens
  misc_RNA (1)...(19): siRNA sense strand
caucagaggguacccagaa

SEQ ID NO: 1830959 - RNA, 19 nt, Homo sapiens
  misc_RNA (1)...(19): siRNA sense strand
uauuaucccugcaccaaga

SEQ ID NO: 1830960 - RNA, 19 nt, Homo sapiens
  misc_RNA (1)...(19): siRNA sense strand
cauggggaauuguguauua

SEQ ID NO: 1830961 - RNA, 19 nt, Homo sapiens
  misc_RNA (1)...(19): siRNA sense strand
guaauaaagcagaucacaa

SEQ ID NO: 1830962 - RNA, 19 nt, Homo sapiens
  misc_RNA (1)...(19): siRNA sense strand
ggaugaaugguuuauuguu

SEQ ID NO: 1830963 - RNA, 19 nt, Homo sapiens
  misc_RNA (1)...(19): siRNA sense strand
ggauaacauugaggaugaa

SEQ ID NO: 1830964 - RNA, 19 nt, Homo sapiens
  misc_RNA (1)...(19): siRNA sense strand
aaaguucucuugcuaugag

SEQ ID NO: 1830965 - RNA, 19 nt, Homo sapiens
  misc_RNA (1)...(19): siRNA sense strand
caauucagaugaggaagau

SEQ ID NO: 1830966 - RNA, 19 nt, Homo sapiens
  misc_RNA (1)...(19): siRNA sense strand
ugacuuggacuuugaaaca

SEQ ID NO: 1830967 - RNA, 19 nt, Homo sapiens
  misc_RNA (1)...(19): siRNA sense strand
agauagugaugaugacuug

SEQ ID NO: 1830968 - RNA, 19 nt, Homo sapiens
  misc_RNA (1)...(19): siRNA sense strand
ugaugaagacuuugaaugu

SEQ ID NO: 1830969 - RNA, 19 nt, Homo sapiens
  misc_RNA (1)...(19): siRNA sense strand
uuacagacaauaccauuug

SEQ ID NO: 1830970 - RNA, 19 nt, Homo sapiens
  misc_RNA (1)...(19): siRNA sense strand
gaaacacgaauaaugacau

SEQ ID NO: 1830971 - RNA, 19 nt, Homo sapiens
  misc_RNA (1)...(19): siRNA sense strand
gauaaucucaagucauaca

SEQ ID NO: 1830972 - RNA, 19 nt, Homo sapiens
  misc_RNA (1)...(19): siRNA sense strand
agaauaaucacucgguuug

SEQ ID NO: 1830973 - RNA, 19 nt, Homo sapiens
  misc_RNA (1)...(19): siRNA sense strand
ggagaaggagcagaacuau

SEQ ID NO: 1830974 - RNA, 19 nt, Homo sapiens
  misc_RNA (1)...(19): siRNA sense strand
aaacacgaauaaugacauc

SEQ ID NO: 1830975 - RNA, 19 nt, Homo sapiens
  misc_RNA (1)...(19): siRNA sense strand
guacugccuguuccugaua

SEQ ID NO: 1830976 - RNA, 19 nt, Homo sapiens
  misc_RNA (1)...(19): siRNA sense strand
gagaucuuaugcuccaaau

SEQ ID NO: 1830977 - RNA, 19 nt, Homo sapiens
  misc_RNA (1)...(19): siRNA sense strand
ugaaauuggcucauggauu

SEQ ID NO: 1830978 - RNA, 19 nt, Homo sapiens
  misc_RNA (1)...(19): siRNA sense strand
aaucacagcacauucagaa

SEQ ID NO: 1830979 - RNA, 19 nt, Homo sapiens
  misc_RNA (1)...(19): siRNA sense strand
gcaaaaguuucaccacuag

SEQ ID NO: 1830980 - RNA, 19 nt, Homo sapiens
  misc_RNA (1)...(19): siRNA sense strand
gauauagaagaccuuaaga

SEQ ID NO: 1830981 - RNA, 19 nt, Homo sapiens
  misc_RNA (1)...(19): siRNA sense strand
ucuggaugaugaagacuuu

SEQ ID NO: 1830982 - RNA, 19 nt, Homo sapiens
  misc_RNA (1)...(19): siRNA sense strand
gucaagggacucagauaaa

SEQ ID NO: 1830983 - RNA, 19 nt, Homo sapiens
  misc_RNA (1)...(19): siRNA sense strand
gguacgggagaaucuguua

SEQ ID NO: 1830984 - RNA, 19 nt, Homo sapiens
  misc_RNA (1)...(19): siRNA sense strand
ccagauggaccaggaacua

SEQ ID NO: 1830985 - RNA, 19 nt, Homo sapiens
  misc_RNA (1)...(19): siRNA sense strand
cugaaaggaacacuugaua

SEQ ID NO: 1830986 - RNA, 19 nt, Homo sapiens
  misc_RNA (1)...(19): siRNA sense strand
gaaaccaugaagcuugcua

SEQ ID NO: 1830987 - RNA, 19 nt, Homo sapiens
  misc_RNA (1)...(19): siRNA sense strand
ucaagggacucagauaaac

SEQ ID NO: 1830988 - RNA, 19 nt, Homo sapiens
  misc_RNA (1)...(19): siRNA sense strand
gaugaggaagauucuggua

SEQ ID NO: 1830989 - RNA, 19 nt, Homo sapiens
  misc_RNA (1)...(19): siRNA sense strand
uaauagaagcugcugacuu

SEQ ID NO: 1830990 - RNA, 19 nt, Homo sapiens
  misc_RNA (1)...(19): siRNA sense strand
gaugcagauucuuuucuua

SEQ ID NO: 1830991 - RNA, 19 nt, Homo sapiens
  misc_RNA (1)...(19): siRNA sense strand
ccugcgagcuugucguguu

SEQ ID NO: 1830992 - RNA, 19 nt, Homo sapiens
  misc_RNA (1)...(19): siRNA sense strand
uauaaucacagcacauuca

SEQ ID NO: 1830993 - RNA, 19 nt, Homo sapiens
  misc_RNA (1)...(19): siRNA sense strand
ggagcagaaucuugguuac

SEQ ID NO: 1830994 - RNA, 19 nt, Homo sapiens
  misc_RNA (1)...(19): siRNA sense strand
ucacucgguuugcaccuau

SEQ ID NO: 1830995 - RNA, 19 nt, Homo sapiens
  misc_RNA (1)...(19): siRNA sense strand
auauaaaccugggaaagga

SEQ ID NO: 1830996 - RNA, 19 nt, Homo sapiens
  misc_RNA (1)...(19): siRNA sense strand
ccgagucuguuuccaagga

SEQ ID NO: 1830997 - RNA, 19 nt, Homo sapiens
  misc_RNA (1)...(19): siRNA sense strand
gagguguuccugcucauau

SEQ ID NO: 1830998 - RNA, 19 nt, Homo sapiens
  misc_RNA (1)...(19): siRNA sense strand
guacauugagagaauaauc

SEQ ID NO: 1830999 - RNA, 19 nt, Homo sapiens
  misc_RNA (1)...(19): siRNA sense strand
ggaaggagcugcuuacaaa

SEQ ID NO: 1831000 - RNA, 19 nt, Homo sapiens
  misc_RNA (1)...(19): siRNA sense strand
gaaggaggcugaagaguug

SEQ ID NO: 1831001 - RNA, 19 nt, Homo sapiens
  misc_RNA (1)...(19): siRNA sense strand
ucaaugaccugaacuauga

SEQ ID NO: 1831002 - RNA, 19 nt, Homo sapiens
  misc_RNA (1)...(19): siRNA sense strand
ggacugcccugcacaccua

SEQ ID NO: 1831003 - RNA, 19 nt, Homo sapiens
  misc_RNA (1)...(19): siRNA sense strand
gaagaucguuuccuauaca

SEQ ID NO: 1831004 - RNA, 19 nt, Homo sapiens
  misc_RNA (1)...(19): siRNA sense strand
gaaagcagcuguggagaca

SEQ ID NO: 1831005 - RNA, 19 nt, Homo sapiens
  misc_RNA (1)...(19): siRNA sense strand
gaacuucagugaugacagu

SEQ ID NO: 1831006 - RNA, 19 nt, Homo sapiens
  misc_RNA (1)...(19): siRNA sense strand
ggagaaggcucacaguuac

SEQ ID NO: 1831007 - RNA, 19 nt, Homo sapiens
  misc_RNA (1)...(19): siRNA sense strand
gaccugaacuaugaagaua

SEQ ID NO: 1831008 - RNA, 19 nt, Homo sapiens
  misc_RNA (1)...(19): siRNA sense strand
caacaaagcugcagauacc

SEQ ID NO: 1831009 - RNA, 19 nt, Homo sapiens
  misc_RNA (1)...(19): siRNA sense strand
uggcagagcuggccuguga

SEQ ID NO: 1831010 - RNA, 19 nt, Homo sapiens
  misc_RNA (1)...(19): siRNA sense strand
gacauucucucaacucaga

SEQ ID NO: 1831011 - RNA, 19 nt, Homo sapiens
  misc_RNA (1)...(19): siRNA sense strand
gguaaucucugggauguga

SEQ ID NO: 1831012 - RNA, 19 nt, Homo sapiens
  misc_RNA (1)...(19): siRNA sense strand
caggaacgcuucaacauca

SEQ ID NO: 1831013 - RNA, 19 nt, Homo sapiens
  misc_RNA (1)...(19): siRNA sense strand
cgacucaaguaucuuauug

SEQ ID NO: 1831014 - RNA, 19 nt, Homo sapiens
  misc_RNA (1)...(19): siRNA sense strand
acacauaccugcuccuuuc

SEQ ID NO: 1831015 - RNA, 19 nt, Homo sapiens
  misc_RNA (1)...(19): siRNA sense strand
aagcuucccugaaucauaa

SEQ ID NO: 1831016 - RNA, 19 nt, Homo sapiens
  misc_RNA (1)...(19): siRNA sense strand
gcugucagauaguugauuu

SEQ ID NO: 1831017 - RNA, 19 nt, Homo sapiens
  misc_RNA (1)...(19): siRNA sense strand
gcccaaggcugucagauag

SEQ ID NO: 1831018 - RNA, 19 nt, Homo sapiens
  misc_RNA (1)...(19): siRNA sense strand
ggagaugccuggagauguc

SEQ ID NO: 1831019 - RNA, 19 nt, Homo sapiens
  misc_RNA (1)...(19): siRNA sense strand
ccaagaagguggcaucaag

SEQ ID NO: 1831020 - RNA, 19 nt, Homo sapiens
  misc_RNA (1)...(19): siRNA sense strand
ggaagggccugagccuaaa

SEQ ID NO: 1831021 - RNA, 19 nt, Homo sapiens
  misc_RNA (1)...(19): siRNA sense strand
caacugcucugcucuggau

SEQ ID NO: 1831022 - RNA, 19 nt, Homo sapiens
  misc_RNA (1)...(19): siRNA sense strand
ggccugugauggcuacuua

SEQ ID NO: 1831023 - RNA, 19 nt, Homo sapiens
  misc_RNA (1)...(19): siRNA sense strand
aauaauaccucucagaaag

SEQ ID NO: 1831024 - RNA, 19 nt, Homo sapiens
  misc_RNA (1)...(19): siRNA sense strand
aagauaaacuccaggaaga

SEQ ID NO: 1831025 - RNA, 19 nt, Homo sapiens
  misc_RNA (1)...(19): siRNA sense strand
ugaagaaacuggguaaaca

SEQ ID NO: 1831026 - RNA, 19 nt, Homo sapiens
  misc_RNA (1)...(19): siRNA sense strand
gaccaucccugaggaagaa

SEQ ID NO: 1831027 - RNA, 19 nt, Homo sapiens
  misc_RNA (1)...(19): siRNA sense strand
gcucugcucuggaugcuau

SEQ ID NO: 1831028 - RNA, 19 nt, Homo sapiens
  misc_RNA (1)...(19): siRNA sense strand
gaucguuuccuauacagua

SEQ ID NO: 1831029 - RNA, 19 nt, Homo sapiens
  misc_RNA (1)...(19): siRNA sense strand
gaaugcugcugcacaagga

SEQ ID NO: 1831030 - RNA, 19 nt, Homo sapiens
  misc_RNA (1)...(19): siRNA sense strand
ccgaggaucacuugaaaua

SEQ ID NO: 1831031 - RNA, 19 nt, Homo sapiens
  misc_RNA (1)...(19): siRNA sense strand
gugaaaaucugguacaaaa

SEQ ID NO: 1831032 - RNA, 19 nt, Homo sapiens
  misc_RNA (1)...(19): siRNA sense strand
acacuguggugguuuauga

SEQ ID NO: 1831033 - RNA, 19 nt, Homo sapiens
  misc_RNA (1)...(19): siRNA sense strand
ggaggguacugcucucuuc

SEQ ID NO: 1831034 - RNA, 19 nt, Homo sapiens
  misc_RNA (1)...(19): siRNA sense strand
gcagugacauucucucaac

SEQ ID NO: 1831035 - RNA, 19 nt, Homo sapiens
  misc_RNA (1)...(19): siRNA sense strand
gaacgaauucucuuugucu

SEQ ID NO: 1831036 - RNA, 19 nt, Homo sapiens
  misc_RNA (1)...(19): siRNA sense strand
gcagauaccacgccagugu

SEQ ID NO: 1831037 - RNA, 19 nt, Homo sapiens
  misc_RNA (1)...(19): siRNA sense strand
uggagaaggcucacaguua

SEQ ID NO: 1831038 - RNA, 19 nt, Homo sapiens
  misc_RNA (1)...(19): siRNA sense strand
cuacucagcuacuccauca

SEQ ID NO: 1831039 - RNA, 19 nt, Homo sapiens
  misc_RNA (1)...(19): siRNA sense strand
ccugaacuaugaagauaaa

SEQ ID NO: 1831040 - RNA, 19 nt, Homo sapiens
  misc_RNA (1)...(19): siRNA sense strand
gcuacuccaucaucaaaga

SEQ ID NO: 1831041 - RNA, 19 nt, Homo sapiens
  misc_RNA (1)...(19): siRNA sense strand
ucacuuugcuucuccaaca

SEQ ID NO: 1831042 - RNA, 19 nt, Homo sapiens
  misc_RNA (1)...(19): siRNA sense strand
caccgaggaucacuugaaa

SEQ ID NO: 1831043 - RNA, 19 nt, Homo sapiens
  misc_RNA (1)...(19): siRNA sense strand
ccaagcaacagcagucuuu

SEQ ID NO: 1831044 - RNA, 19 nt, Homo sapiens
  misc_RNA (1)...(19): siRNA sense strand
gcucacaguuaccuaagga

SEQ ID NO: 1831045 - RNA, 19 nt, Homo sapiens
  misc_RNA (1)...(19): siRNA sense strand
ggaacgaauucucuuuguc

SEQ ID NO: 1831046 - RNA, 19 nt, Homo sapiens
  misc_RNA (1)...(19): siRNA sense strand
guccugaacccucacaaua

SEQ ID NO: 1831047 - RNA, 19 nt, Homo sapiens
  misc_RNA (1)...(19): siRNA sense strand
gaggaucacuugaaauagc

SEQ ID NO: 1831048 - RNA, 19 nt, Homo sapiens
  misc_RNA (1)...(19): siRNA sense strand
aggaagaacugacugacaa

SEQ ID NO: 1831049 - RNA, 19 nt, Homo sapiens
  misc_RNA (1)...(19): siRNA sense strand
guggacaguuguaaaucua

SEQ ID NO: 1831050 - RNA, 19 nt, Homo sapiens
  misc_RNA (1)...(19): siRNA sense strand
uaugagagcugccaguucu

SEQ ID NO: 1831051 - RNA, 19 nt, Homo sapiens
  misc_RNA (1)...(19): siRNA sense strand
caauaauaccucucagaaa

SEQ ID NO: 1831052 - RNA, 19 nt, Homo sapiens
  misc_RNA (1)...(19): siRNA sense strand
ucaauaauaccucucagaa

SEQ ID NO: 1831053 - RNA, 19 nt, Homo sapiens
  misc_RNA (1)...(19): siRNA sense strand
ucccagcuaugcccaguua

SEQ ID NO: 1831054 - RNA, 19 nt, Homo sapiens
  misc_RNA (1)...(19): siRNA sense strand
aagaggcgcuauagacuug

SEQ ID NO: 1831055 - RNA, 19 nt, Homo sapiens
  misc_RNA (1)...(19): siRNA sense strand
gcggaaugcugcugcacaa

SEQ ID NO: 1831056 - RNA, 19 nt, Homo sapiens
  misc_RNA (1)...(19): siRNA sense strand
gcaccgaggaucacuugaa

SEQ ID NO: 1831057 - RNA, 19 nt, Homo sapiens
  misc_RNA (1)...(19): siRNA sense strand
gaggaagucugcccuacag

SEQ ID NO: 1831058 - RNA, 19 nt, Homo sapiens
  misc_RNA (1)...(19): siRNA sense strand
ggacaggaacgcuucaaca

SEQ ID NO: 1831059 - RNA, 19 nt, Homo sapiens
  misc_RNA (1)...(19): siRNA sense strand
ccaaggcugucagauaguu

SEQ ID NO: 1831060 - RNA, 19 nt, Homo sapiens
  misc_RNA (1)...(19): siRNA sense strand
gcacagaggagcaauuucg

SEQ ID NO: 1831061 - RNA, 19 nt, Homo sapiens
  misc_RNA (1)...(19): siRNA sense strand
gcucaagcauacacacugu

SEQ ID NO: 1831062 - RNA, 19 nt, Homo sapiens
  misc_RNA (1)...(19): siRNA sense strand
ccauagcaccuucuacaaa

SEQ ID NO: 1831063 - RNA, 19 nt, Homo sapiens
  misc_RNA (1)...(19): siRNA sense strand
uaacuuggaggaauuugaa

SEQ ID NO: 1831064 - RNA, 19 nt, Homo sapiens
  misc_RNA (1)...(19): siRNA sense strand
gaacggcgagcugcauuug

SEQ ID NO: 1831065 - RNA, 19 nt, Homo sapiens
  misc_RNA (1)...(19): siRNA sense strand
ugacugaccgcgacauuga

SEQ ID NO: 1831066 - RNA, 19 nt, Homo sapiens
  misc_RNA (1)...(19): siRNA sense strand
ucuccaagcuucccugaau

SEQ ID NO: 1831067 - RNA, 19 nt, Homo sapiens
  misc_RNA (1)...(19): siRNA sense strand
gccuacagcuucuauaguc

SEQ ID NO: 1831068 - RNA, 19 nt, Homo sapiens
  misc_RNA (1)...(19): siRNA sense strand
gagccaauuucagcaguga

SEQ ID NO: 1831069 - RNA, 19 nt, Homo sapiens
  misc_RNA (1)...(19): siRNA sense strand
ucucaucgcuucccuagag

SEQ ID NO: 1831070 - RNA, 19 nt, Homo sapiens
  misc_RNA (1)...(19): siRNA sense strand
gaagguggcaucaagacau

SEQ ID NO: 1831071 - RNA, 19 nt, Homo sapiens
  misc_RNA (1)...(19): siRNA sense strand
caagcuucccugaaucaua

SEQ ID NO: 1831072 - RNA, 19 nt, Homo sapiens
  misc_RNA (1)...(19): siRNA sense strand
gcagacaccugagauagcu

SEQ ID NO: 1831073 - RNA, 19 nt, Homo sapiens
  misc_RNA (1)...(19): siRNA sense strand
gcuucaacaucaucuguga

SEQ ID NO: 1831074 - RNA, 19 nt, Homo sapiens
  misc_RNA (1)...(19): siRNA sense strand
ggccgacacuggacaggaa

SEQ ID NO: 1831075 - RNA, 19 nt, Homo sapiens
  misc_RNA (1)...(19): siRNA sense strand
caacagcagucuuuucuuc

SEQ ID NO: 1831076 - RNA, 19 nt, Homo sapiens
  misc_RNA (1)...(19): siRNA sense strand
gacuguggcuggaaauauc

SEQ ID NO: 1831077 - RNA, 19 nt, Homo sapiens
  misc_RNA (1)...(19): siRNA sense strand
uggccaagcuucugaucaa

SEQ ID NO: 1831078 - RNA, 19 nt, Homo sapiens
  misc_RNA (1)...(19): siRNA sense strand
ggagcaauuucgagccaau

SEQ ID NO: 1831079 - RNA, 19 nt, Homo sapiens
  misc_RNA (1)...(19): siRNA sense strand
ggacuguggcuggaaauau

SEQ ID NO: 1831080 - RNA, 19 nt, Homo sapiens
  misc_RNA (1)...(19): siRNA sense strand
caaacgagagccugcagaa

SEQ ID NO: 1831081 - RNA, 19 nt, Homo sapiens
  misc_RNA (1)...(19): siRNA sense strand
acaguaacauugccuucaa

SEQ ID NO: 1831082 - RNA, 19 nt, Homo sapiens
  misc_RNA (1)...(19): siRNA sense strand
gcucugcuaccacgacuuu

SEQ ID NO: 1831083 - RNA, 19 nt, Homo sapiens
  misc_RNA (1)...(19): siRNA sense strand
ggaacacugccgucgcuuu

SEQ ID NO: 1831084 - RNA, 19 nt, Homo sapiens
  misc_RNA (1)...(19): siRNA sense strand
cauagcaccuucuacaaac

SEQ ID NO: 1831085 - RNA, 19 nt, Homo sapiens
  misc_RNA (1)...(19): siRNA sense strand
gcagcagguucuguucuug

SEQ ID NO: 1831086 - RNA, 19 nt, Homo sapiens
  misc_RNA (1)...(19): siRNA sense strand
agaaggaggcugaagaguu

SEQ ID NO: 1831087 - RNA, 19 nt, Homo sapiens
  misc_RNA (1)...(19): siRNA sense strand
gaacuaugaagauaaacuc

SEQ ID NO: 1831088 - RNA, 19 nt, Homo sapiens
  misc_RNA (1)...(19): siRNA sense strand
gccuugagcuuccuaguac

SEQ ID NO: 1831089 - RNA, 19 nt, Homo sapiens
  misc_RNA (1)...(19): siRNA sense strand
caauagccaccuugucuug

SEQ ID NO: 1831090 - RNA, 19 nt, Homo sapiens
  misc_RNA (1)...(19): siRNA sense strand
cgaauucucuuugucuuac

SEQ ID NO: 1831091 - RNA, 19 nt, Homo sapiens
  misc_RNA (1)...(19): siRNA sense strand
ccaacuuccugucccauuc

SEQ ID NO: 1831092 - RNA, 19 nt, Homo sapiens
  misc_RNA (1)...(19): siRNA sense strand
caucgagccugaagcaucu

SEQ ID NO: 1831093 - RNA, 19 nt, Homo sapiens
  misc_RNA (1)...(19): siRNA sense strand
caaccuggcugcagaugcu

SEQ ID NO: 1831094 - RNA, 19 nt, Homo sapiens
  misc_RNA (1)...(19): siRNA sense strand
uguggugguuuaugacuuu

SEQ ID NO: 1831095 - RNA, 19 nt, Homo sapiens
  misc_RNA (1)...(19): siRNA sense strand
gcgggaugaugguguguau

SEQ ID NO: 1831096 - RNA, 19 nt, Homo sapiens
  misc_RNA (1)...(19): siRNA sense strand
cuauagacuugaugccauu

SEQ ID NO: 1831097 - RNA, 19 nt, Homo sapiens
  misc_RNA (1)...(19): siRNA sense strand
ugugauggcuacuuagugu

SEQ ID NO: 1831098 - RNA, 19 nt, Homo sapiens
  misc_RNA (1)...(19): siRNA sense strand
cacaauaaccugucaagca

SEQ ID NO: 1831099 - RNA, 19 nt, Homo sapiens
  misc_RNA (1)...(19): siRNA sense strand
ggaaguagauggagaaauu

SEQ ID NO: 1831100 - RNA, 19 nt, Homo sapiens
  misc_RNA (1)...(19): siRNA sense strand
gaaggaggaugguuuauug

SEQ ID NO: 1831101 - RNA, 19 nt, Homo sapiens
  misc_RNA (1)...(19): siRNA sense strand
gaacugagcccacuucuga

SEQ ID NO: 1831102 - RNA, 19 nt, Homo sapiens
  misc_RNA (1)...(19): siRNA sense strand
gaacuugaccugccaauuu

SEQ ID NO: 1831103 - RNA, 19 nt, Homo sapiens
  misc_RNA (1)...(19): siRNA sense strand
guucaaagcucuuggauug

SEQ ID NO: 1831104 - RNA, 19 nt, Homo sapiens
  misc_RNA (1)...(19): siRNA sense strand
cgagaaauaugccuaggua

SEQ ID NO: 1831105 - RNA, 19 nt, Homo sapiens
  misc_RNA (1)...(19): siRNA sense strand
gaacucaagguuagucaua

SEQ ID NO: 1831106 - RNA, 19 nt, Homo sapiens
  misc_RNA (1)...(19): siRNA sense strand
ggaugcagauguaaauuug

SEQ ID NO: 1831107 - RNA, 19 nt, Homo sapiens
  misc_RNA (1)...(19): siRNA sense strand
uaacugagauacaggauuc

SEQ ID NO: 1831108 - RNA, 19 nt, Homo sapiens
  misc_RNA (1)...(19): siRNA sense strand
cgaaggcuguugcaaauga

SEQ ID NO: 1831109 - RNA, 19 nt, Homo sapiens
  misc_RNA (1)...(19): siRNA sense strand
ugaaacacaggaugaauua

SEQ ID NO: 1831110 - RNA, 19 nt, Homo sapiens
  misc_RNA (1)...(19): siRNA sense strand
uaacaggccagauauaauu

SEQ ID NO: 1831111 - RNA, 19 nt, Homo sapiens
  misc_RNA (1)...(19): siRNA sense strand
gcaaaucacaugaacaguu

SEQ ID NO: 1831112 - RNA, 19 nt, Homo sapiens
  misc_RNA (1)...(19): siRNA sense strand
ugaaguggaugcuuuaugu

SEQ ID NO: 1831113 - RNA, 19 nt, Homo sapiens
  misc_RNA (1)...(19): siRNA sense strand
ugaaucagcuacuuacaga

SEQ ID NO: 1831114 - RNA, 19 nt, Homo sapiens
  misc_RNA (1)...(19): siRNA sense strand
gcaagaugcucauacacau

SEQ ID NO: 1831115 - RNA, 19 nt, Homo sapiens
  misc_RNA (1)...(19): siRNA sense strand
aaggcaagcuaaagaauaa

SEQ ID NO: 1831116 - RNA, 19 nt, Homo sapiens
  misc_RNA (1)...(19): siRNA sense strand
uggaugaucugaauaaugu

SEQ ID NO: 1831117 - RNA, 19 nt, Homo sapiens
  misc_RNA (1)...(19): siRNA sense strand
gaggaugguuuauugacaa

SEQ ID NO: 1831118 - RNA, 19 nt, Homo sapiens
  misc_RNA (1)...(19): siRNA sense strand
gauauucuuugaugaagug

SEQ ID NO: 1831119 - RNA, 19 nt, Homo sapiens
  misc_RNA (1)...(19): siRNA sense strand
acaccuaacuccaggcuuu

SEQ ID NO: 1831120 - RNA, 19 nt, Homo sapiens
  misc_RNA (1)...(19): siRNA sense strand
gcauggaugaucugaauaa

SEQ ID NO: 1831121 - RNA, 19 nt, Homo sapiens
  misc_RNA (1)...(19): siRNA sense strand
gauauggaacgaagaauug

SEQ ID NO: 1831122 - RNA, 19 nt, Homo sapiens
  misc_RNA (1)...(19): siRNA sense strand
ggaaaggcaagcuaaagaa

SEQ ID NO: 1831123 - RNA, 19 nt, Homo sapiens
  misc_RNA (1)...(19): siRNA sense strand
cuaagaagccaauaacuga

SEQ ID NO: 1831124 - RNA, 19 nt, Homo sapiens
  misc_RNA (1)...(19): siRNA sense strand
ggaaagaauacuucaaaca

SEQ ID NO: 1831125 - RNA, 19 nt, Homo sapiens
  misc_RNA (1)...(19): siRNA sense strand
gaagcugagagaacuauuu

SEQ ID NO: 1831126 - RNA, 19 nt, Homo sapiens
  misc_RNA (1)...(19): siRNA sense strand
uaaugaagcuacaggaaca

SEQ ID NO: 1831127 - RNA, 19 nt, Homo sapiens
  misc_RNA (1)...(19): siRNA sense strand
gaaaccaccucuucaacac

SEQ ID NO: 1831128 - RNA, 19 nt, Homo sapiens
  misc_RNA (1)...(19): siRNA sense strand
ggcgaaggcuguugcaaau

SEQ ID NO: 1831129 - RNA, 19 nt, Homo sapiens
  misc_RNA (1)...(19): siRNA sense strand
ggaggaugguuuauugaca

SEQ ID NO: 1831130 - RNA, 19 nt, Homo sapiens
  misc_RNA (1)...(19): siRNA sense strand
gaaauggcaagacagaaga

SEQ ID NO: 1831131 - RNA, 19 nt, Homo sapiens
  misc_RNA (1)...(19): siRNA sense strand
gucaauagagucuuaauga

SEQ ID NO: 1831132 - RNA, 19 nt, Homo sapiens
  misc_RNA (1)...(19): siRNA sense strand
gaaaggcaagcuaaagaau

SEQ ID NO: 1831133 - RNA, 19 nt, Homo sapiens
  misc_RNA (1)...(19): siRNA sense strand
ccgaauuacuaaacaugua

SEQ ID NO: 1831134 - RNA, 19 nt, Homo sapiens
  misc_RNA (1)...(19): siRNA sense strand
guuagacccugcuuugaga

SEQ ID NO: 1831135 - RNA, 19 nt, Homo sapiens
  misc_RNA (1)...(19): siRNA sense strand
gagauugugucuggaguau

SEQ ID NO: 1831136 - RNA, 19 nt, Homo sapiens
  misc_RNA (1)...(19): siRNA sense strand
gacaggaaauggcaagaca

SEQ ID NO: 1831137 - RNA, 19 nt, Homo sapiens
  misc_RNA (1)...(19): siRNA sense strand
caaauacuccugagaugga

SEQ ID NO: 1831138 - RNA, 19 nt, Homo sapiens
  misc_RNA (1)...(19): siRNA sense strand
gaagcacgccagcagguuu

SEQ ID NO: 1831139 - RNA, 19 nt, Homo sapiens
  misc_RNA (1)...(19): siRNA sense strand
agagauggauggucuggaa

SEQ ID NO: 1831140 - RNA, 19 nt, Homo sapiens
  misc_RNA (1)...(19): siRNA sense strand
ugccaaagauucugaagga

SEQ ID NO: 1831141 - RNA, 19 nt, Homo sapiens
  misc_RNA (1)...(19): siRNA sense strand
cuucaaacauugugcagaa

SEQ ID NO: 1831142 - RNA, 19 nt, Homo sapiens
  misc_RNA (1)...(19): siRNA sense strand
gaugugggaggcaaugaua

SEQ ID NO: 1831143 - RNA, 19 nt, Homo sapiens
  misc_RNA (1)...(19): siRNA sense strand
ggaccugucaugugagaaa

SEQ ID NO: 1831144 - RNA, 19 nt, Homo sapiens
  misc_RNA (1)...(19): siRNA sense strand
ggaaauggcaagacagaag

SEQ ID NO: 1831145 - RNA, 19 nt, Homo sapiens
  misc_RNA (1)...(19): siRNA sense strand
aauugaagcuguccuacaa

SEQ ID NO: 1831146 - RNA, 19 nt, Homo sapiens
  misc_RNA (1)...(19): siRNA sense strand
aaaggcaagcuaaagaaua

SEQ ID NO: 1831147 - RNA, 19 nt, Homo sapiens
  misc_RNA (1)...(19): siRNA sense strand
cagaagaguggaaaugaaa

SEQ ID NO: 1831148 - RNA, 19 nt, Homo sapiens
  misc_RNA (1)...(19): siRNA sense strand
ucaaaugcaccauguauca

SEQ ID NO: 1831149 - RNA, 19 nt, Homo sapiens
  misc_RNA (1)...(19): siRNA sense strand
acagaagaguggaaaugaa

SEQ ID NO: 1831150 - RNA, 19 nt, Homo sapiens
  misc_RNA (1)...(19): siRNA sense strand
guucccugcugucuuuaua

SEQ ID NO: 1831151 - RNA, 19 nt, Homo sapiens
  misc_RNA (1)...(19): siRNA sense strand
gacaaaaccccaaguguaa

SEQ ID NO: 1831152 - RNA, 19 nt, Homo sapiens
  misc_RNA (1)...(19): siRNA sense strand
aaaggugaacucaagguua

SEQ ID NO: 1831153 - RNA, 19 nt, Homo sapiens
  misc_RNA (1)...(19): siRNA sense strand
ugagcaagcugugucaaau

SEQ ID NO: 1831154 - RNA, 19 nt, Homo sapiens
  misc_RNA (1)...(19): siRNA sense strand
gacagaagaguggaaauga

SEQ ID NO: 1831155 - RNA, 19 nt, Homo sapiens
  misc_RNA (1)...(19): siRNA sense strand
gggaaggcuuugucacugu

SEQ ID NO: 1831156 - RNA, 19 nt, Homo sapiens
  misc_RNA (1)...(19): siRNA sense strand
gaaacggaaaggcaagcua

SEQ ID NO: 1831157 - RNA, 19 nt, Homo sapiens
  misc_RNA (1)...(19): siRNA sense strand
ggacugugcauugaacuga

SEQ ID NO: 1831158 - RNA, 19 nt, Homo sapiens
  misc_RNA (1)...(19): siRNA sense strand
gcaaggacugugcauugaa

SEQ ID NO: 1831159 - RNA, 19 nt, Homo sapiens
  misc_RNA (1)...(19): siRNA sense strand
gcagcaaugugugcaguca

SEQ ID NO: 1831160 - RNA, 19 nt, Homo sapiens
  misc_RNA (1)...(19): siRNA sense strand
gggaggcaaugauaugaca

SEQ ID NO: 1831161 - RNA, 19 nt, Homo sapiens
  misc_RNA (1)...(19): siRNA sense strand
aaacggaaaggcaagcuaa

SEQ ID NO: 1831162 - RNA, 19 nt, Homo sapiens
  misc_RNA (1)...(19): siRNA sense strand
gaaaaguaauccuaagaag

SEQ ID NO: 1831163 - RNA, 19 nt, Homo sapiens
  misc_RNA (1)...(19): siRNA sense strand
aggaaaggcugggaacuga

SEQ ID NO: 1831164 - RNA, 19 nt, Homo sapiens
  misc_RNA (1)...(19): siRNA sense strand
caauagagucuuaaugaag

SEQ ID NO: 1831165 - RNA, 19 nt, Homo sapiens
  misc_RNA (1)...(19): siRNA sense strand
gccaauaacugagauacag

SEQ ID NO: 1831166 - RNA, 19 nt, Homo sapiens
  misc_RNA (1)...(19): siRNA sense strand
gaagaccccugccaaagau

SEQ ID NO: 1831167 - RNA, 19 nt, Homo sapiens
  misc_RNA (1)...(19): siRNA sense strand
gauguaaauuuggaagcaa

SEQ ID NO: 1831168 - RNA, 19 nt, Homo sapiens
  misc_RNA (1)...(19): siRNA sense strand
uugaugaaguggaugcuuu

SEQ ID NO: 1831169 - RNA, 19 nt, Homo sapiens
  misc_RNA (1)...(19): siRNA sense strand
uaaucgaccagacucguua

SEQ ID NO: 1831170 - RNA, 19 nt, Homo sapiens
  misc_RNA (1)...(19): siRNA sense strand
cugcauggaugaucugaau

SEQ ID NO: 1831171 - RNA, 19 nt, Homo sapiens
  misc_RNA (1)...(19): siRNA sense strand
ucuuggaccugucauguga

SEQ ID NO: 1831172 - RNA, 19 nt, Homo sapiens
  misc_RNA (1)...(19): siRNA sense strand
ccacuaacaggccagauau

SEQ ID NO: 1831173 - RNA, 19 nt, Homo sapiens
  misc_RNA (1)...(19): siRNA sense strand
ugugugauauucuuugaug

SEQ ID NO: 1831174 - RNA, 19 nt, Homo sapiens
  misc_RNA (1)...(19): siRNA sense strand
gagauggagcaaagagaaa

SEQ ID NO: 1831175 - RNA, 19 nt, Homo sapiens
  misc_RNA (1)...(19): siRNA sense strand
uaaaagaggucugcaagau

SEQ ID NO: 1831176 - RNA, 19 nt, Homo sapiens
  misc_RNA (1)...(19): siRNA sense strand
ucuccaacgugaaguuuga

SEQ ID NO: 1831177 - RNA, 19 nt, Homo sapiens
  misc_RNA (1)...(19): siRNA sense strand
ugcagucaauagagucuua

SEQ ID NO: 1831178 - RNA, 19 nt, Homo sapiens
  misc_RNA (1)...(19): siRNA sense strand
aagguucgaccgagaaaua

SEQ ID NO: 1831179 - RNA, 19 nt, Homo sapiens
  misc_RNA (1)...(19): siRNA sense strand
gaagaauuguagcccaacu

SEQ ID NO: 1831180 - RNA, 19 nt, Homo sapiens
  misc_RNA (1)...(19): siRNA sense strand
gaaguagauggagaaauug

SEQ ID NO: 1831181 - RNA, 19 nt, Homo sapiens
  misc_RNA (1)...(19): siRNA sense strand
agaucucucugcuuuggua

SEQ ID NO: 1831182 - RNA, 19 nt, Homo sapiens
  misc_RNA (1)...(19): siRNA sense strand
gccacuaacaggccagaua

SEQ ID NO: 1831183 - RNA, 19 nt, Homo sapiens
  misc_RNA (1)...(19): siRNA sense strand
ucaaagcucuuggauuggu

SEQ ID NO: 1831184 - RNA, 19 nt, Homo sapiens
  misc_RNA (1)...(19): siRNA sense strand
aaacacaggaugaauuaca

SEQ ID NO: 1831185 - RNA, 19 nt, Homo sapiens
  misc_RNA (1)...(19): siRNA sense strand
cuacccagauccacaguca

SEQ ID NO: 1831186 - RNA, 19 nt, Homo sapiens
  misc_RNA (1)...(19): siRNA sense strand
gggaaagaauacuucaaac

SEQ ID NO: 1831187 - RNA, 19 nt, Homo sapiens
  misc_RNA (1)...(19): siRNA sense strand
aaagauauggaacgaagaa

SEQ ID NO: 1831188 - RNA, 19 nt, Homo sapiens
  misc_RNA (1)...(19): siRNA sense strand
gagcagaagcugagagaac

SEQ ID NO: 1831189 - RNA, 19 nt, Homo sapiens
  misc_RNA (1)...(19): siRNA sense strand
caacgugaaguuugaagau

SEQ ID NO: 1831190 - RNA, 19 nt, Homo sapiens
  misc_RNA (1)...(19): siRNA sense strand
aaggugaacucaagguuag

SEQ ID NO: 1831191 - RNA, 19 nt, Homo sapiens
  misc_RNA (1)...(19): siRNA sense strand
gagcucaccauggcaauau

SEQ ID NO: 1831192 - RNA, 19 nt, Homo sapiens
  misc_RNA (1)...(19): siRNA sense strand
caacaccacgaauaaguuc

SEQ ID NO: 1831193 - RNA, 19 nt, Homo sapiens
  misc_RNA (1)...(19): siRNA sense strand
caaggacugugcauugaac

SEQ ID NO: 1831194 - RNA, 19 nt, Homo sapiens
  misc_RNA (1)...(19): siRNA sense strand
gagcaagcugugucaaaug

SEQ ID NO: 1831195 - RNA, 19 nt, Homo sapiens
  misc_RNA (1)...(19): siRNA sense strand
uaaccugcauggaugaucu

SEQ ID NO: 1831196 - RNA, 19 nt, Homo sapiens
  misc_RNA (1)...(19): siRNA sense strand
gcaaugugugcagucaaua

SEQ ID NO: 1831197 - RNA, 19 nt, Homo sapiens
  misc_RNA (1)...(19): siRNA sense strand
gccuagguaucccagauga

SEQ ID NO: 1831198 - RNA, 19 nt, Homo sapiens
  misc_RNA (1)...(19): siRNA sense strand
gaaauaugccuagguaucc

SEQ ID NO: 1831199 - RNA, 19 nt, Homo sapiens
  misc_RNA (1)...(19): siRNA sense strand
gagaagaucuugcacauua

SEQ ID NO: 1831200 - RNA, 19 nt, Homo sapiens
  misc_RNA (1)...(19): siRNA sense strand
ugaaggaggugcagaagua

SEQ ID NO: 1831201 - RNA, 19 nt, Homo sapiens
  misc_RNA (1)...(19): siRNA sense strand
gaccaaagccgaacaguuu

SEQ ID NO: 1831202 - RNA, 19 nt, Homo sapiens
  misc_RNA (1)...(19): siRNA sense strand
ggacgugguugucgauuug

SEQ ID NO: 1831203 - RNA, 19 nt, Homo sapiens
  misc_RNA (1)...(19): siRNA sense strand
gcaauuggguuguugucaa

SEQ ID NO: 1831204 - RNA, 19 nt, Homo sapiens
  misc_RNA (1)...(19): siRNA sense strand
gagaagcgcuuuggucuag

SEQ ID NO: 1831205 - RNA, 19 nt, Homo sapiens
  misc_RNA (1)...(19): siRNA sense strand
gcuaggacauuucaacaga

SEQ ID NO: 1831206 - RNA, 19 nt, Homo sapiens
  misc_RNA (1)...(19): siRNA sense strand
cgacaucaaucagcuauau

SEQ ID NO: 1831207 - RNA, 19 nt, Homo sapiens
  misc_RNA (1)...(19): siRNA sense strand
ggacaggaaucagcacuuc

SEQ ID NO: 1831208 - RNA, 19 nt, Homo sapiens
  misc_RNA (1)...(19): siRNA sense strand
ugacaagucuagugagaau

SEQ ID NO: 1831209 - RNA, 19 nt, Homo sapiens
  misc_RNA (1)...(19): siRNA sense strand
gaagcgcuuuggucuagaa

SEQ ID NO: 1831210 - RNA, 19 nt, Homo sapiens
  misc_RNA (1)...(19): siRNA sense strand
gaugagggcuccggagaug

SEQ ID NO: 1831211 - RNA, 19 nt, Homo sapiens
  misc_RNA (1)...(19): siRNA sense strand
caacagauucggugcuauu

SEQ ID NO: 1831212 - RNA, 19 nt, Homo sapiens
  misc_RNA (1)...(19): siRNA sense strand
gaacgugcuugcaaauguc

SEQ ID NO: 1831213 - RNA, 19 nt, Homo sapiens
  misc_RNA (1)...(19): siRNA sense strand
gaggagauguacugugcuu

SEQ ID NO: 1831214 - RNA, 19 nt, Homo sapiens
  misc_RNA (1)...(19): siRNA sense strand
gcgcaaagcacgcgacaug

SEQ ID NO: 1831215 - RNA, 19 nt, Homo sapiens
  misc_RNA (1)...(19): siRNA sense strand
gagcgguucuugcagaugu

SEQ ID NO: 1831216 - RNA, 19 nt, Homo sapiens
  misc_RNA (1)...(19): siRNA sense strand
gaaggagggcauccacauu

SEQ ID NO: 1831217 - RNA, 19 nt, Homo sapiens
  misc_RNA (1)...(19): siRNA sense strand
ucaaccagccugaguauga

SEQ ID NO: 1831218 - RNA, 19 nt, Homo sapiens
  misc_RNA (1)...(19): siRNA sense strand
ucacgcagccgcucaugua

SEQ ID NO: 1831219 - RNA, 19 nt, Homo sapiens
  misc_RNA (1)...(19): siRNA sense strand
ugaacgugcuugcaaaugu

SEQ ID NO: 1831220 - RNA, 19 nt, Homo sapiens
  misc_RNA (1)...(19): siRNA sense strand
gcaccggcaaaguguauua

SEQ ID NO: 1831221 - RNA, 19 nt, Homo sapiens
  misc_RNA (1)...(19): siRNA sense strand
gggcauggguccagaacau

SEQ ID NO: 1831222 - RNA, 19 nt, Homo sapiens
  misc_RNA (1)...(19): siRNA sense strand
guacugugcuuggcuggaa

SEQ ID NO: 1831223 - RNA, 19 nt, Homo sapiens
  misc_RNA (1)...(19): siRNA sense strand
gauacgagggcaccaugua

SEQ ID NO: 1831224 - RNA, 19 nt, Homo sapiens
  misc_RNA (1)...(19): siRNA sense strand
ucagcgaccugccauccua

SEQ ID NO: 1831225 - RNA, 19 nt, Homo sapiens
  misc_RNA (1)...(19): siRNA sense strand
gaagugguccucugagaag

SEQ ID NO: 1831226 - RNA, 19 nt, Homo sapiens
  misc_RNA (1)...(19): siRNA sense strand
ggaagugguccucugagaa

SEQ ID NO: 1831227 - RNA, 19 nt, Homo sapiens
  misc_RNA (1)...(19): siRNA sense strand
cagacaaacuuggguucua

SEQ ID NO: 1831228 - RNA, 19 nt, Homo sapiens
  misc_RNA (1)...(19): siRNA sense strand
ggaagccguuaauuaucuu

SEQ ID NO: 1831229 - RNA, 19 nt, Homo sapiens
  misc_RNA (1)...(19): siRNA sense strand
guucacaaaugaggagaaa

SEQ ID NO: 1831230 - RNA, 19 nt, Homo sapiens
  misc_RNA (1)...(19): siRNA sense strand
gaguucauguucaucaaug

SEQ ID NO: 1831231 - RNA, 19 nt, Homo sapiens
  misc_RNA (1)...(19): siRNA sense strand
guggaaaacuuuacuauuc

SEQ ID NO: 1831232 - RNA, 19 nt, Homo sapiens
  misc_RNA (1)...(19): siRNA sense strand
cauaagucaugggacauuu

SEQ ID NO: 1831233 - RNA, 19 nt, Homo sapiens
  misc_RNA (1)...(19): siRNA sense strand
ccggcaaaguguauuauga

SEQ ID NO: 1831234 - RNA, 19 nt, Homo sapiens
  misc_RNA (1)...(19): siRNA sense strand
ggucauguccauccuguug

SEQ ID NO: 1831235 - RNA, 19 nt, Homo sapiens
  misc_RNA (1)...(19): siRNA sense strand
agacaaacuuggguucuau

SEQ ID NO: 1831236 - RNA, 19 nt, Homo sapiens
  misc_RNA (1)...(19): siRNA sense strand
ggccaacccuucccaccuu

SEQ ID NO: 1831237 - RNA, 19 nt, Homo sapiens
  misc_RNA (1)...(19): siRNA sense strand
gaggccagauccagcuuug

SEQ ID NO: 1831238 - RNA, 19 nt, Homo sapiens
  misc_RNA (1)...(19): siRNA sense strand
gugcaacgaugacccagau

SEQ ID NO: 1831239 - RNA, 19 nt, Homo sapiens
  misc_RNA (1)...(19): siRNA sense strand
uugcaaaugucaucaggaa

SEQ ID NO: 1831240 - RNA, 19 nt, Homo sapiens
  misc_RNA (1)...(19): siRNA sense strand
gaaccaaggcuacuaugac

SEQ ID NO: 1831241 - RNA, 19 nt, Homo sapiens
  misc_RNA (1)...(19): siRNA sense strand
uaggacauuucaacagauu

SEQ ID NO: 1831242 - RNA, 19 nt, Homo sapiens
  misc_RNA (1)...(19): siRNA sense strand
gaucaugcaguucacaaau

SEQ ID NO: 1831243 - RNA, 19 nt, Homo sapiens
  misc_RNA (1)...(19): siRNA sense strand
agaagaucuugcacauuaa

SEQ ID NO: 1831244 - RNA, 19 nt, Homo sapiens
  misc_RNA (1)...(19): siRNA sense strand
ccaccagguuugaggaguu

SEQ ID NO: 1831245 - RNA, 19 nt, Homo sapiens
  misc_RNA (1)...(19): siRNA sense strand
caacaagaagacccacuga

SEQ ID NO: 1831246 - RNA, 19 nt, Homo sapiens
  misc_RNA (1)...(19): siRNA sense strand
cggaagccguuaauuaucu

SEQ ID NO: 1831247 - RNA, 19 nt, Homo sapiens
  misc_RNA (1)...(19): siRNA sense strand
gcagaauggcaucguguug

SEQ ID NO: 1831248 - RNA, 19 nt, Homo sapiens
  misc_RNA (1)...(19): siRNA sense strand
ccaagugggugcggcagaa

SEQ ID NO: 1831249 - RNA, 19 nt, Homo sapiens
  misc_RNA (1)...(19): siRNA sense strand
caagcagaagccuguguua

SEQ ID NO: 1831250 - RNA, 19 nt, Homo sapiens
  misc_RNA (1)...(19): siRNA sense strand
caaaugucaucaggaagga

SEQ ID NO: 1831251 - RNA, 19 nt, Homo sapiens
  misc_RNA (1)...(19): siRNA sense strand
caagaaccaaggcuacuau

SEQ ID NO: 1831252 - RNA, 19 nt, Homo sapiens
  misc_RNA (1)...(19): siRNA sense strand
gcaagcagaagccuguguu

SEQ ID NO: 1831253 - RNA, 19 nt, Homo sapiens
  misc_RNA (1)...(19): siRNA sense strand
gaccugccauccuacacaa

SEQ ID NO: 1831254 - RNA, 19 nt, Homo sapiens
  misc_RNA (1)...(19): siRNA sense strand
ccgcugacauuaucucauc

SEQ ID NO: 1831255 - RNA, 19 nt, Homo sapiens
  misc_RNA (1)...(19): siRNA sense strand
gaccaucauugacaagucu

SEQ ID NO: 1831256 - RNA, 19 nt, Homo sapiens
  misc_RNA (1)...(19): siRNA sense strand
uggcgacacugaagggaaa

SEQ ID NO: 1831257 - RNA, 19 nt, Homo sapiens
  misc_RNA (1)...(19): siRNA sense strand
gcaaagcacgcgacauggu

SEQ ID NO: 1831258 - RNA, 19 nt, Homo sapiens
  misc_RNA (1)...(19): siRNA sense strand
caacuucuuccacgugcua

SEQ ID NO: 1831259 - RNA, 19 nt, Homo sapiens
  misc_RNA (1)...(19): siRNA sense strand
cggaggauauucugacaca

SEQ ID NO: 1831260 - RNA, 19 nt, Homo sapiens
  misc_RNA (1)...(19): siRNA sense strand
ucuagaaggcugcgaggua

SEQ ID NO: 1831261 - RNA, 19 nt, Homo sapiens
  misc_RNA (1)...(19): siRNA sense strand
ggaaaaccccaaaagugua

SEQ ID NO: 1831262 - RNA, 19 nt, Homo sapiens
  misc_RNA (1)...(19): siRNA sense strand
gaggauauucugacacaca

SEQ ID NO: 1831263 - RNA, 19 nt, Homo sapiens
  misc_RNA (1)...(19): siRNA sense strand
gaagaucuugcacauuaag

SEQ ID NO: 1831264 - RNA, 19 nt, Homo sapiens
  misc_RNA (1)...(19): siRNA sense strand
cggaagugguccucugaga

SEQ ID NO: 1831265 - RNA, 19 nt, Homo sapiens
  misc_RNA (1)...(19): siRNA sense strand
gacaggaacauuaccuugu

SEQ ID NO: 1831266 - RNA, 19 nt, Homo sapiens
  misc_RNA (1)...(19): siRNA sense strand
uugagcagcugucgccauu

SEQ ID NO: 1831267 - RNA, 19 nt, Homo sapiens
  misc_RNA (1)...(19): siRNA sense strand
cccagacuguuaagacauu

SEQ ID NO: 1831268 - RNA, 19 nt, Homo sapiens
  misc_RNA (1)...(19): siRNA sense strand
ccagauccagcuuugauga

SEQ ID NO: 1831269 - RNA, 19 nt, Homo sapiens
  misc_RNA (1)...(19): siRNA sense strand
ugacugcaauuggguuguu

SEQ ID NO: 1831270 - RNA, 19 nt, Homo sapiens
  misc_RNA (1)...(19): siRNA sense strand
ucagcuauaugacugcaau

SEQ ID NO: 1831271 - RNA, 19 nt, Homo sapiens
  misc_RNA (1)...(19): siRNA sense strand
gcaacgaugacccagaugu

SEQ ID NO: 1831272 - RNA, 19 nt, Homo sapiens
  misc_RNA (1)...(19): siRNA sense strand
gaaccugcauccccaugaa

SEQ ID NO: 1831273 - RNA, 19 nt, Homo sapiens
  misc_RNA (1)...(19): siRNA sense strand
ucaaaaggcuucucuucug

SEQ ID NO: 1831274 - RNA, 19 nt, Homo sapiens
  misc_RNA (1)...(19): siRNA sense strand
gccagauccugcugccauu

SEQ ID NO: 1831275 - RNA, 19 nt, Homo sapiens
  misc_RNA (1)...(19): siRNA sense strand
caaguaugauaagaucugu

SEQ ID NO: 1831276 - RNA, 19 nt, Homo sapiens
  misc_RNA (1)...(19): siRNA sense strand
gccaggaggagcacaagaa

SEQ ID NO: 1831277 - RNA, 19 nt, Homo sapiens
  misc_RNA (1)...(19): siRNA sense strand
gauccagcuuugaugagau

SEQ ID NO: 1831278 - RNA, 19 nt, Homo sapiens
  misc_RNA (1)...(19): siRNA sense strand
uaucucauccacagacaaa

SEQ ID NO: 1831279 - RNA, 19 nt, Homo sapiens
  misc_RNA (1)...(19): siRNA sense strand
gagcagcugucgccauucc

SEQ ID NO: 1831280 - RNA, 19 nt, Homo sapiens
  misc_RNA (1)...(19): siRNA sense strand
uuccggaagccguuaauua

SEQ ID NO: 1831281 - RNA, 19 nt, Homo sapiens
  misc_RNA (1)...(19): siRNA sense strand
gacggaggauauucugaca

SEQ ID NO: 1831282 - RNA, 19 nt, Homo sapiens
  misc_RNA (1)...(19): siRNA sense strand
ggucaaccagccugaguau

SEQ ID NO: 1831283 - RNA, 19 nt, Homo sapiens
  misc_RNA (1)...(19): siRNA sense strand
acaggaacauuaccuuguc

SEQ ID NO: 1831284 - RNA, 19 nt, Homo sapiens
  misc_RNA (1)...(19): siRNA sense strand
ucgacaaggucuuccacuu

SEQ ID NO: 1831285 - RNA, 19 nt, Homo sapiens
  misc_RNA (1)...(19): siRNA sense strand
ggcugaacgugcuugcaaa

SEQ ID NO: 1831286 - RNA, 19 nt, Homo sapiens
  misc_RNA (1)...(19): siRNA sense strand
ggaucaugcaguucacaaa

SEQ ID NO: 1831287 - RNA, 19 nt, Homo sapiens
  misc_RNA (1)...(19): siRNA sense strand
uuaaggacuugugcugcua

SEQ ID NO: 1831288 - RNA, 19 nt, Homo sapiens
  misc_RNA (1)...(19): siRNA sense strand
ccuuugaccuccugcugaa

SEQ ID NO: 1831289 - RNA, 19 nt, Homo sapiens
  misc_RNA (1)...(19): siRNA sense strand
gcauggguccagaacauuc

SEQ ID NO: 1831290 - RNA, 19 nt, Homo sapiens
  misc_RNA (1)...(19): siRNA sense strand
aaccaucucuggcccaauc

SEQ ID NO: 1831291 - RNA, 19 nt, Homo sapiens
  misc_RNA (1)...(19): siRNA sense strand
cggaguacauggcguuugg

SEQ ID NO: 1831292 - RNA, 19 nt, Homo sapiens
  misc_RNA (1)...(19): siRNA sense strand
ggaauguggcuaguucugu

SEQ ID NO: 1831293 - RNA, 19 nt, Homo sapiens
  misc_RNA (1)...(19): siRNA sense strand
cgcagccgcucauguacaa

SEQ ID NO: 1831294 - RNA, 19 nt, Homo sapiens
  misc_RNA (1)...(19): siRNA sense strand
gccagggcauuguguacga

SEQ ID NO: 1831295 - RNA, 19 nt, Homo sapiens
  misc_RNA (1)...(19): siRNA sense strand
acaucaaucagcuauauga

SEQ ID NO: 1831296 - RNA, 19 nt, Homo sapiens
  misc_RNA (1)...(19): siRNA sense strand
caaccagccugaguaugag

SEQ ID NO: 1831297 - RNA, 19 nt, Homo sapiens
  misc_RNA (1)...(19): siRNA sense strand
ucgggaauguggcuaguuc

SEQ ID NO: 1831298 - RNA, 19 nt, Homo sapiens
  misc_RNA (1)...(19): siRNA sense strand
gcccagagcgguucuugca

SEQ ID NO: 1831299 - RNA, 19 nt, Homo sapiens
  misc_RNA (1)...(19): siRNA sense strand
gcacaaccguguucaaauc

SEQ ID NO: 1831300 - RNA, 19 nt, Homo sapiens
  misc_RNA (1)...(19): siRNA sense strand
gaagaagaaggucaucaua

SEQ ID NO: 1831301 - RNA, 19 nt, Homo sapiens
  misc_RNA (1)...(19): siRNA sense strand
ggcaaacccuguucucuuu

SEQ ID NO: 1831302 - RNA, 19 nt, Homo sapiens
  misc_RNA (1)...(19): siRNA sense strand
ccugaaacauucccugaua

SEQ ID NO: 1831303 - RNA, 19 nt, Homo sapiens
  misc_RNA (1)...(19): siRNA sense strand
aaacauucccugauaagua

SEQ ID NO: 1831304 - RNA, 19 nt, Homo sapiens
  misc_RNA (1)...(19): siRNA sense strand
gaaacuucaugguguuaug

SEQ ID NO: 1831305 - RNA, 19 nt, Homo sapiens
  misc_RNA (1)...(19): siRNA sense strand
aagaugagcagaaacaaua

SEQ ID NO: 1831306 - RNA, 19 nt, Homo sapiens
  misc_RNA (1)...(19): siRNA sense strand
agacaaaggugcccaaggu

SEQ ID NO: 1831307 - RNA, 19 nt, Homo sapiens
  misc_RNA (1)...(19): siRNA sense strand
aaaguauucugcucuguga

SEQ ID NO: 1831308 - RNA, 19 nt, Homo sapiens
  misc_RNA (1)...(19): siRNA sense strand
gagcagaaacaauaaagug

SEQ ID NO: 1831309 - RNA, 19 nt, Homo sapiens
  misc_RNA (1)...(19): siRNA sense strand
gcacggaagucuggagcaa

SEQ ID NO: 1831310 - RNA, 19 nt, Homo sapiens
  misc_RNA (1)...(19): siRNA sense strand
ccacagaacaccaucucua

SEQ ID NO: 1831311 - RNA, 19 nt, Homo sapiens
  misc_RNA (1)...(19): siRNA sense strand
ccacagaggaugaggaaga

SEQ ID NO: 1831312 - RNA, 19 nt, Homo sapiens
  misc_RNA (1)...(19): siRNA sense strand
gaagaugagcagaaacaau

SEQ ID NO: 1831313 - RNA, 19 nt, Homo sapiens
  misc_RNA (1)...(19): siRNA sense strand
gcaggucgucaucuucaua

SEQ ID NO: 1831314 - RNA, 19 nt, Homo sapiens
  misc_RNA (1)...(19): siRNA sense strand
guacuacucaguccucuau

SEQ ID NO: 1831315 - RNA, 19 nt, Homo sapiens
  misc_RNA (1)...(19): siRNA sense strand
cccgugaacuggugaugua

SEQ ID NO: 1831316 - RNA, 19 nt, Homo sapiens
  misc_RNA (1)...(19): siRNA sense strand
ggcagcagcagaucuuuaa

SEQ ID NO: 1831317 - RNA, 19 nt, Homo sapiens
  misc_RNA (1)...(19): siRNA sense strand
ucugcaaggucgucaaauu

SEQ ID NO: 1831318 - RNA, 19 nt, Homo sapiens
  misc_RNA (1)...(19): siRNA sense strand
uguggaaccugaaacauuc

SEQ ID NO: 1831319 - RNA, 19 nt, Homo sapiens
  misc_RNA (1)...(19): siRNA sense strand
uguacguucugguguauaa

SEQ ID NO: 1831320 - RNA, 19 nt, Homo sapiens
  misc_RNA (1)...(19): siRNA sense strand
aacauucccugauaaguau

SEQ ID NO: 1831321 - RNA, 19 nt, Homo sapiens
  misc_RNA (1)...(19): siRNA sense strand
cugaaacauucccugauaa

SEQ ID NO: 1831322 - RNA, 19 nt, Homo sapiens
  misc_RNA (1)...(19): siRNA sense strand
gggcagcagcagaucuuua

SEQ ID NO: 1831323 - RNA, 19 nt, Homo sapiens
  misc_RNA (1)...(19): siRNA sense strand
cagaacaccaucucuauuc

SEQ ID NO: 1831324 - RNA, 19 nt, Homo sapiens
  misc_RNA (1)...(19): siRNA sense strand
gaagaaggucaucauagca

SEQ ID NO: 1831325 - RNA, 19 nt, Homo sapiens
  misc_RNA (1)...(19): siRNA sense strand
gaagagcugauccagacaa

SEQ ID NO: 1831326 - RNA, 19 nt, Homo sapiens
  misc_RNA (1)...(19): siRNA sense strand
caccaucucuauucccuau

SEQ ID NO: 1831327 - RNA, 19 nt, Homo sapiens
  misc_RNA (1)...(19): siRNA sense strand
caaccguguucaaaucugu

SEQ ID NO: 1831328 - RNA, 19 nt, Homo sapiens
  misc_RNA (1)...(19): siRNA sense strand
uaacaucaccacggucauu

SEQ ID NO: 1831329 - RNA, 19 nt, Homo sapiens
  misc_RNA (1)...(19): siRNA sense strand
ucaccaacagguucauuaa

SEQ ID NO: 1831330 - RNA, 19 nt, Homo sapiens
  misc_RNA (1)...(19): siRNA sense strand
gagcggaagaugagcagaa

SEQ ID NO: 1831331 - RNA, 19 nt, Homo sapiens
  misc_RNA (1)...(19): siRNA sense strand
agaagaaggucaucauagc

SEQ ID NO: 1831332 - RNA, 19 nt, Homo sapiens
  misc_RNA (1)...(19): siRNA sense strand
gagcugauccagacaaagg

SEQ ID NO: 1831333 - RNA, 19 nt, Homo sapiens
  misc_RNA (1)...(19): siRNA sense strand
gacaaaggugcccaaggua

SEQ ID NO: 1831334 - RNA, 19 nt, Homo sapiens
  misc_RNA (1)...(19): siRNA sense strand
cugcaaggucgucaaauuu

SEQ ID NO: 1831335 - RNA, 19 nt, Homo sapiens
  misc_RNA (1)...(19): siRNA sense strand
gaugagcagaaacaauaaa

SEQ ID NO: 1831336 - RNA, 19 nt, Homo sapiens
  misc_RNA (1)...(19): siRNA sense strand
guucugguguauaacauca

SEQ ID NO: 1831337 - RNA, 19 nt, Homo sapiens
  misc_RNA (1)...(19): siRNA sense strand
gaaacauucccugauaagu

SEQ ID NO: 1831338 - RNA, 19 nt, Homo sapiens
  misc_RNA (1)...(19): siRNA sense strand
ccuguucucuuucuuacug

SEQ ID NO: 1831339 - RNA, 19 nt, Homo sapiens
  misc_RNA (1)...(19): siRNA sense strand
gguguuccucuucuugaua

SEQ ID NO: 1831340 - RNA, 19 nt, Homo sapiens
  misc_RNA (1)...(19): siRNA sense strand
uaggcucgcugcucggaaa

SEQ ID NO: 1831341 - RNA, 19 nt, Homo sapiens
  misc_RNA (1)...(19): siRNA sense strand
acaccaugcucuucugcaa

SEQ ID NO: 1831342 - RNA, 19 nt, Homo sapiens
  misc_RNA (1)...(19): siRNA sense strand
gguguacguucugguguau

SEQ ID NO: 1831343 - RNA, 19 nt, Homo sapiens
  misc_RNA (1)...(19): siRNA sense strand
uaaguauucccugcaguuu

SEQ ID NO: 1831344 - RNA, 19 nt, Homo sapiens
  misc_RNA (1)...(19): siRNA sense strand
caaacccuguucucuuucu

SEQ ID NO: 1831345 - RNA, 19 nt, Homo sapiens
  misc_RNA (1)...(19): siRNA sense strand
ugacacuuccgucuucuug

SEQ ID NO: 1831346 - RNA, 19 nt, Homo sapiens
  misc_RNA (1)...(19): siRNA sense strand
cacagaacaccaucucuau

SEQ ID NO: 1831347 - RNA, 19 nt, Homo sapiens
  misc_RNA (1)...(19): siRNA sense strand
gaaacaauaaagugagcau

SEQ ID NO: 1831348 - RNA, 19 nt, Homo sapiens
  misc_RNA (1)...(19): siRNA sense strand
gucaccaacagguucauua

SEQ ID NO: 1831349 - RNA, 19 nt, Homo sapiens
  misc_RNA (1)...(19): siRNA sense strand
gccguaauguggucaguac

SEQ ID NO: 1831350 - RNA, 19 nt, Homo sapiens
  misc_RNA (1)...(19): siRNA sense strand
cuauugcuuuggacaggua

SEQ ID NO: 1831351 - RNA, 19 nt, Homo sapiens
  misc_RNA (1)...(19): siRNA sense strand
acagaacaccaucucuauu

SEQ ID NO: 1831352 - RNA, 19 nt, Homo sapiens
  misc_RNA (1)...(19): siRNA sense strand
ggaagaugagcagaaacaa

SEQ ID NO: 1831353 - RNA, 19 nt, Homo sapiens
  misc_RNA (1)...(19): siRNA sense strand
aagagcugauccagacaaa

SEQ ID NO: 1831354 - RNA, 19 nt, Homo sapiens
  misc_RNA (1)...(19): siRNA sense strand
gcucgcugcucggaaacuu

SEQ ID NO: 1831355 - RNA, 19 nt, Homo sapiens
  misc_RNA (1)...(19): siRNA sense strand
gcugcucacugcuguuugg

SEQ ID NO: 1831356 - RNA, 19 nt, Homo sapiens
  misc_RNA (1)...(19): siRNA sense strand
gaucuacaccaugcucuuc

SEQ ID NO: 1831357 - RNA, 19 nt, Homo sapiens
  misc_RNA (1)...(19): siRNA sense strand
gugaacuggugauguacau

SEQ ID NO: 1831358 - RNA, 19 nt, Homo sapiens
  misc_RNA (1)...(19): siRNA sense strand
caccaacagguucauuaaa

SEQ ID NO: 1831359 - RNA, 19 nt, Homo sapiens
  misc_RNA (1)...(19): siRNA sense strand
cagcuucccugcuauugcu

SEQ ID NO: 1831360 - RNA, 19 nt, Homo sapiens
  misc_RNA (1)...(19): siRNA sense strand
ggaaacuucaugguguuau

SEQ ID NO: 1831361 - RNA, 19 nt, Homo sapiens
  misc_RNA (1)...(19): siRNA sense strand
gcccacagaggaugaggaa

SEQ ID NO: 1831362 - RNA, 19 nt, Homo sapiens
  misc_RNA (1)...(19): siRNA sense strand
caacuacaccaccgguaca

SEQ ID NO: 1831363 - RNA, 19 nt, Homo sapiens
  misc_RNA (1)...(19): siRNA sense strand
ccgcacaaccguguucaaa

SEQ ID NO: 1831364 - RNA, 19 nt, Homo sapiens
  misc_RNA (1)...(19): siRNA sense strand
cuaccagacugugcucaau

SEQ ID NO: 1831365 - RNA, 19 nt, Homo sapiens
  misc_RNA (1)...(19): siRNA sense strand
ucggaaacuucaugguguu

SEQ ID NO: 1831366 - RNA, 19 nt, Homo sapiens
  misc_RNA (1)...(19): siRNA sense strand
ggccagugucccuguguuu

SEQ ID NO: 1831367 - RNA, 19 nt, Homo sapiens
  misc_RNA (1)...(19): siRNA sense strand
guacagucgccguaaugug

SEQ ID NO: 1831368 - RNA, 19 nt, Homo sapiens
  misc_RNA (1)...(19): siRNA sense strand
ggacccuggugcaacuaca

SEQ ID NO: 1831369 - RNA, 19 nt, Homo sapiens
  misc_RNA (1)...(19): siRNA sense strand
uggcaaacccuguucucuu

SEQ ID NO: 1831370 - RNA, 19 nt, Homo sapiens
  misc_RNA (1)...(19): siRNA sense strand
aagaagaaggucaucauag

SEQ ID NO: 1831371 - RNA, 19 nt, Homo sapiens
  misc_RNA (1)...(19): siRNA sense strand
ugguguacguucuggugua

SEQ ID NO: 1831372 - RNA, 19 nt, Homo sapiens
  misc_RNA (1)...(19): siRNA sense strand
gcaaacccuguucucuuuc

SEQ ID NO: 1831373 - RNA, 19 nt, Homo sapiens
  misc_RNA (1)...(19): siRNA sense strand
cggaagaugagcagaaaca

SEQ ID NO: 1831374 - RNA, 19 nt, Homo sapiens
  misc_RNA (1)...(19): siRNA sense strand
aguauucccugcaguuugg

SEQ ID NO: 1831375 - RNA, 19 nt, Homo sapiens
  misc_RNA (1)...(19): siRNA sense strand
gagugaggccaaguacauu

SEQ ID NO: 1831376 - RNA, 19 nt, Homo sapiens
  misc_RNA (1)...(19): siRNA sense strand
auccucagcuucccugcua

SEQ ID NO: 1831377 - RNA, 19 nt, Homo sapiens
  misc_RNA (1)...(19): siRNA sense strand
gcagcuguaccgccaguuc

SEQ ID NO: 1831378 - RNA, 19 nt, Homo sapiens
  misc_RNA (1)...(19): siRNA sense strand
gaagagagugaggccaagu

SEQ ID NO: 1831379 - RNA, 19 nt, Homo sapiens
  misc_RNA (1)...(19): siRNA sense strand
accaacagguucauuaaaa

SEQ ID NO: 1831380 - RNA, 19 nt, Homo sapiens
  misc_RNA (1)...(19): siRNA sense strand
ugaaacauucccugauaag

SEQ ID NO: 1831381 - RNA, 19 nt, Homo sapiens
  misc_RNA (1)...(19): siRNA sense strand
agagugaggccaaguacau

SEQ ID NO: 1831382 - RNA, 19 nt, Homo sapiens
  misc_RNA (1)...(19): siRNA sense strand
gugcaggucgucaucuuca

SEQ ID NO: 1831383 - RNA, 19 nt, Homo sapiens
  misc_RNA (1)...(19): siRNA sense strand
gucccuguguuugcaguaa

SEQ ID NO: 1831384 - RNA, 19 nt, Homo sapiens
  misc_RNA (1)...(19): siRNA sense strand
aagagagugaggccaagua

SEQ ID NO: 1831385 - RNA, 19 nt, Homo sapiens
  misc_RNA (1)...(19): siRNA sense strand
agaagaagaaggucaucau

SEQ ID NO: 1831386 - RNA, 19 nt, Homo sapiens
  misc_RNA (1)...(19): siRNA sense strand
cggaaacuucaugguguua

SEQ ID NO: 1831387 - RNA, 19 nt, Homo sapiens
  misc_RNA (1)...(19): siRNA sense strand
ggugguguuccucuucuug

SEQ ID NO: 1831388 - RNA, 19 nt, Homo sapiens
  misc_RNA (1)...(19): siRNA sense strand
gaugccaagucccgugaac

SEQ ID NO: 1831389 - RNA, 19 nt, Homo sapiens
  misc_RNA (1)...(19): siRNA sense strand
ggaucuacaccaugcucuu

SEQ ID NO: 1831390 - RNA, 19 nt, Homo sapiens
  misc_RNA (1)...(19): siRNA sense strand
auaaguauucccugcaguu

SEQ ID NO: 1831391 - RNA, 19 nt, Homo sapiens
  misc_RNA (1)...(19): siRNA sense strand
cuguggaaccugaaacauu

SEQ ID NO: 1831392 - RNA, 19 nt, Homo sapiens
  misc_RNA (1)...(19): siRNA sense strand
gagcaggggccacaguuug

SEQ ID NO: 1831393 - RNA, 19 nt, Homo sapiens
  misc_RNA (1)...(19): siRNA sense strand
guacaucugggcccaugca

SEQ ID NO: 1831394 - RNA, 19 nt, Homo sapiens
  misc_RNA (1)...(19): siRNA sense strand
ccaaagaaguucaagauca

SEQ ID NO: 1831395 - RNA, 19 nt, Homo sapiens
  misc_RNA (1)...(19): siRNA sense strand
caaagaaguucaagaucaa

SEQ ID NO: 1831396 - RNA, 19 nt, Homo sapiens
  misc_RNA (1)...(19): siRNA sense strand
cuacgacaauuuccuguuu

SEQ ID NO: 1831397 - RNA, 19 nt, Homo sapiens
  misc_RNA (1)...(19): siRNA sense strand
ccacaucaccucacuguug

SEQ ID NO: 1831398 - RNA, 19 nt, Homo sapiens
  misc_RNA (1)...(19): siRNA sense strand
gaagagccgugccguuucu

SEQ ID NO: 1831399 - RNA, 19 nt, Homo sapiens
  misc_RNA (1)...(19): siRNA sense strand
ccacgcugcucgauacuga

SEQ ID NO: 1831400 - RNA, 19 nt, Homo sapiens
  misc_RNA (1)...(19): siRNA sense strand
gguacuugcuggacuugaa

SEQ ID NO: 1831401 - RNA, 19 nt, Homo sapiens
  misc_RNA (1)...(19): siRNA sense strand
gauacugacuacgacaauu

SEQ ID NO: 1831402 - RNA, 19 nt, Homo sapiens
  misc_RNA (1)...(19): siRNA sense strand
caacaacaucucccucaug

SEQ ID NO: 1831403 - RNA, 19 nt, Homo sapiens
  misc_RNA (1)...(19): siRNA sense strand
ggaagagccgugccguuuc

SEQ ID NO: 1831404 - RNA, 19 nt, Homo sapiens
  misc_RNA (1)...(19): siRNA sense strand
gagaagacugggaauccaa

SEQ ID NO: 1831405 - RNA, 19 nt, Homo sapiens
  misc_RNA (1)...(19): siRNA sense strand
uggaagagccgugccguuu

SEQ ID NO: 1831406 - RNA, 19 nt, Homo sapiens
  misc_RNA (1)...(19): siRNA sense strand
acagcuguguugagaagaa

SEQ ID NO: 1831407 - RNA, 19 nt, Homo sapiens
  misc_RNA (1)...(19): siRNA sense strand
uugcuggacuugaaacaga

SEQ ID NO: 1831408 - RNA, 19 nt, Homo sapiens
  misc_RNA (1)...(19): siRNA sense strand
gaucaugcagggauucauc

SEQ ID NO: 1831409 - RNA, 19 nt, Homo sapiens
  misc_RNA (1)...(19): siRNA sense strand
agacugggaauccaaagaa

SEQ ID NO: 1831410 - RNA, 19 nt, Homo sapiens
  misc_RNA (1)...(19): siRNA sense strand
guacuugcuggacuugaaa

SEQ ID NO: 1831411 - RNA, 19 nt, Homo sapiens
  misc_RNA (1)...(19): siRNA sense strand
auacugacuacgacaauuu

SEQ ID NO: 1831412 - RNA, 19 nt, Homo sapiens
  misc_RNA (1)...(19): siRNA sense strand
ggacuugaaacagauggaa

SEQ ID NO: 1831413 - RNA, 19 nt, Homo sapiens
  misc_RNA (1)...(19): siRNA sense strand
gacaauuuccuguuucucu

SEQ ID NO: 1831414 - RNA, 19 nt, Homo sapiens
  misc_RNA (1)...(19): siRNA sense strand
ggaauccaaagaaguucaa

SEQ ID NO: 1831415 - RNA, 19 nt, Homo sapiens
  misc_RNA (1)...(19): siRNA sense strand
ccaacaacaucucccucau

SEQ ID NO: 1831416 - RNA, 19 nt, Homo sapiens
  misc_RNA (1)...(19): siRNA sense strand
ccaggcaccuaugguacuu

SEQ ID NO: 1831417 - RNA, 19 nt, Homo sapiens
  misc_RNA (1)...(19): siRNA sense strand
accuggagcucccaaaguu

SEQ ID NO: 1831418 - RNA, 19 nt, Homo sapiens
  misc_RNA (1)...(19): siRNA sense strand
ggagagaagacugggaauc

SEQ ID NO: 1831419 - RNA, 19 nt, Homo sapiens
  misc_RNA (1)...(19): siRNA sense strand
gcacagaugggagaacaac

SEQ ID NO: 1831420 - RNA, 19 nt, Homo sapiens
  misc_RNA (1)...(19): siRNA sense strand
uaugguacuugcuggacuu

SEQ ID NO: 1831421 - RNA, 19 nt, Homo sapiens
  misc_RNA (1)...(19): siRNA sense strand
ggacaaccuggagaucguu

SEQ ID NO: 1831422 - RNA, 19 nt, Homo sapiens
  misc_RNA (1)...(19): siRNA sense strand
gaggccacgcugcucgaua

SEQ ID NO: 1831423 - RNA, 19 nt, Homo sapiens
  misc_RNA (1)...(19): siRNA sense strand
gagagaagacugggaaucc

SEQ ID NO: 1831424 - RNA, 19 nt, Homo sapiens
  misc_RNA (1)...(19): siRNA sense strand
acuauacgguggcgaacga

SEQ ID NO: 1831425 - RNA, 19 nt, Homo sapiens
  misc_RNA (1)...(19): siRNA sense strand
ggaccuggagcucccaaag

SEQ ID NO: 1831426 - RNA, 19 nt, Homo sapiens
  misc_RNA (1)...(19): siRNA sense strand
gacugggaauccaaagaag

SEQ ID NO: 1831427 - RNA, 19 nt, Homo sapiens
  misc_RNA (1)...(19): siRNA sense strand
gaccuggagcucccaaagu

SEQ ID NO: 1831428 - RNA, 19 nt, Homo sapiens
  misc_RNA (1)...(19): siRNA sense strand
gguggaggacgaugagauc

SEQ ID NO: 1831429 - RNA, 19 nt, Homo sapiens
  misc_RNA (1)...(19): siRNA sense strand
gcugcucgauacugacuac

SEQ ID NO: 1831430 - RNA, 19 nt, Homo sapiens
  misc_RNA (1)...(19): siRNA sense strand
agaagacugggaauccaaa

SEQ ID NO: 1831431 - RNA, 19 nt, Homo sapiens
  misc_RNA (1)...(19): siRNA sense strand
ggauucaucagggcuuuca

SEQ ID NO: 1831432 - RNA, 19 nt, Homo sapiens
  misc_RNA (1)...(19): siRNA sense strand
gagcaugaugugccaguac

SEQ ID NO: 1831433 - RNA, 19 nt, Homo sapiens
  misc_RNA (1)...(19): siRNA sense strand
cugggaauccaaagaaguu

SEQ ID NO: 1831434 - RNA, 19 nt, Homo sapiens
  misc_RNA (1)...(19): siRNA sense strand
ggaaugaccuguuucuuuc

SEQ ID NO: 1831435 - RNA, 19 nt, Homo sapiens
  misc_RNA (1)...(19): siRNA sense strand
ggagaggaaugaccuguuu

SEQ ID NO: 1831436 - RNA, 19 nt, Homo sapiens
  misc_RNA (1)...(19): siRNA sense strand
ccaaggugcuucaguuuaa

SEQ ID NO: 1831437 - RNA, 19 nt, Homo sapiens
  misc_RNA (1)...(19): siRNA sense strand
gcuaaacauuggauacaua

SEQ ID NO: 1831438 - RNA, 19 nt, Homo sapiens
  misc_RNA (1)...(19): siRNA sense strand
ggcacaagcugcagauaaa

SEQ ID NO: 1831439 - RNA, 19 nt, Homo sapiens
  misc_RNA (1)...(19): siRNA sense strand
gaaauaaccuaugacaaac

SEQ ID NO: 1831440 - RNA, 19 nt, Homo sapiens
  misc_RNA (1)...(19): siRNA sense strand
caaaauggcugaagaugaa

SEQ ID NO: 1831441 - RNA, 19 nt, Homo sapiens
  misc_RNA (1)...(19): siRNA sense strand
aagaugaaguugagguaua

SEQ ID NO: 1831442 - RNA, 19 nt, Homo sapiens
  misc_RNA (1)...(19): siRNA sense strand
ggugaaugcugucuacuuc

SEQ ID NO: 1831443 - RNA, 19 nt, Homo sapiens
  misc_RNA (1)...(19): siRNA sense strand
gaaauauuacuccucagaa

SEQ ID NO: 1831444 - RNA, 19 nt, Homo sapiens
  misc_RNA (1)...(19): siRNA sense strand
ccuaaaggcucagauucua

SEQ ID NO: 1831445 - RNA, 19 nt, Homo sapiens
  misc_RNA (1)...(19): siRNA sense strand
ccuagaaugugcagaagaa

SEQ ID NO: 1831446 - RNA, 19 nt, Homo sapiens
  misc_RNA (1)...(19): siRNA sense strand
cagaugaaauugccgaugu

SEQ ID NO: 1831447 - RNA, 19 nt, Homo sapiens
  misc_RNA (1)...(19): siRNA sense strand
gaaagugaaauaaccuaug

SEQ ID NO: 1831448 - RNA, 19 nt, Homo sapiens
  misc_RNA (1)...(19): siRNA sense strand
gauguuagcauguucuugu

SEQ ID NO: 1831449 - RNA, 19 nt, Homo sapiens
  misc_RNA (1)...(19): siRNA sense strand
gaagagcauuaugaacuca

SEQ ID NO: 1831450 - RNA, 19 nt, Homo sapiens
  misc_RNA (1)...(19): siRNA sense strand
gccaaggugcuucaguuua

SEQ ID NO: 1831451 - RNA, 19 nt, Homo sapiens
  misc_RNA (1)...(19): siRNA sense strand
gcuuggagcugcuggaaag

SEQ ID NO: 1831452 - RNA, 19 nt, Homo sapiens
  misc_RNA (1)...(19): siRNA sense strand
ucucagcucugcaaucaau

SEQ ID NO: 1831453 - RNA, 19 nt, Homo sapiens
  misc_RNA (1)...(19): siRNA sense strand
caaaaucccaaacuuguua

SEQ ID NO: 1831454 - RNA, 19 nt, Homo sapiens
  misc_RNA (1)...(19): siRNA sense strand
aaacuccauuugagaagaa

SEQ ID NO: 1831455 - RNA, 19 nt, Homo sapiens
  misc_RNA (1)...(19): siRNA sense strand
cacaggagguguuaugaca

SEQ ID NO: 1831456 - RNA, 19 nt, Homo sapiens
  misc_RNA (1)...(19): siRNA sense strand
gaaggguaguuauccugau

SEQ ID NO: 1831457 - RNA, 19 nt, Homo sapiens
  misc_RNA (1)...(19): siRNA sense strand
ugaaguugagguauacaua

SEQ ID NO: 1831458 - RNA, 19 nt, Homo sapiens
  misc_RNA (1)...(19): siRNA sense strand
ggaaagugaaauaaccuau

SEQ ID NO: 1831459 - RNA, 19 nt, Homo sapiens
  misc_RNA (1)...(19): siRNA sense strand
aggaaugaccuguuucuuu

SEQ ID NO: 1831460 - RNA, 19 nt, Homo sapiens
  misc_RNA (1)...(19): siRNA sense strand
acucuuugcccucaauuua

SEQ ID NO: 1831461 - RNA, 19 nt, Homo sapiens
  misc_RNA (1)...(19): siRNA sense strand
acaagggacgggccaauuu

SEQ ID NO: 1831462 - RNA, 19 nt, Homo sapiens
  misc_RNA (1)...(19): siRNA sense strand
ucucucagcucugcaauca

SEQ ID NO: 1831463 - RNA, 19 nt, Homo sapiens
  misc_RNA (1)...(19): siRNA sense strand
ggacauggaggcccacagu

SEQ ID NO: 1831464 - RNA, 19 nt, Homo sapiens
  misc_RNA (1)...(19): siRNA sense strand
gcuuuauccuuuccgugua

SEQ ID NO: 1831465 - RNA, 19 nt, Homo sapiens
  misc_RNA (1)...(19): siRNA sense strand
gaagaugaaguugagguau

SEQ ID NO: 1831466 - RNA, 19 nt, Homo sapiens
  misc_RNA (1)...(19): siRNA sense strand
uaaaggcucagauucuaga

SEQ ID NO: 1831467 - RNA, 19 nt, Homo sapiens
  misc_RNA (1)...(19): siRNA sense strand
uagaagagcauuaugaacu

SEQ ID NO: 1831468 - RNA, 19 nt, Homo sapiens
  misc_RNA (1)...(19): siRNA sense strand
gcugucuacuucaaaggaa

SEQ ID NO: 1831469 - RNA, 19 nt, Homo sapiens
  misc_RNA (1)...(19): siRNA sense strand
ucuuugcccucaauuuauu

SEQ ID NO: 1831470 - RNA, 19 nt, Homo sapiens
  misc_RNA (1)...(19): siRNA sense strand
ggaaaacuccauuugagaa

SEQ ID NO: 1831471 - RNA, 19 nt, Homo sapiens
  misc_RNA (1)...(19): siRNA sense strand
uggccaaggugcuucaguu

SEQ ID NO: 1831472 - RNA, 19 nt, Homo sapiens
  misc_RNA (1)...(19): siRNA sense strand
agggagaacuggacaugga

SEQ ID NO: 1831473 - RNA, 19 nt, Homo sapiens
  misc_RNA (1)...(19): siRNA sense strand
guacuugcgugaaaagcua

SEQ ID NO: 1831474 - RNA, 19 nt, Homo sapiens
  misc_RNA (1)...(19): siRNA sense strand
ggaugguccuggugaaugc

SEQ ID NO: 1831475 - RNA, 19 nt, Homo sapiens
  misc_RNA (1)...(19): siRNA sense strand
caacaaguggaccagcaaa

SEQ ID NO: 1831476 - RNA, 19 nt, Homo sapiens
  misc_RNA (1)...(19): siRNA sense strand
auacauagaagaccuaaag

SEQ ID NO: 1831477 - RNA, 19 nt, Homo sapiens
  misc_RNA (1)...(19): siRNA sense strand
gugaaaagcuaaacauugg

SEQ ID NO: 1831478 - RNA, 19 nt, Homo sapiens
  misc_RNA (1)...(19): siRNA sense strand
ccaaacuuguuaccugaag

SEQ ID NO: 1831479 - RNA, 19 nt, Homo sapiens
  misc_RNA (1)...(19): siRNA sense strand
acauggaggcccacaguuu

SEQ ID NO: 1831480 - RNA, 19 nt, Homo sapiens
  misc_RNA (1)...(19): siRNA sense strand
agaagagcauuaugaacuc

SEQ ID NO: 1831481 - RNA, 19 nt, Homo sapiens
  misc_RNA (1)...(19): siRNA sense strand
ugaagaugaaguugaggua

SEQ ID NO: 1831482 - RNA, 19 nt, Homo sapiens
  misc_RNA (1)...(19): siRNA sense strand
cccauaugcuggagauguu

SEQ ID NO: 1831483 - RNA, 19 nt, Homo sapiens
  misc_RNA (1)...(19): siRNA sense strand
aauaagcuguuuggugaga

SEQ ID NO: 1831484 - RNA, 19 nt, Homo sapiens
  misc_RNA (1)...(19): siRNA sense strand
gaaugaggagggcacugaa

SEQ ID NO: 1831485 - RNA, 19 nt, Homo sapiens
  misc_RNA (1)...(19): siRNA sense strand
uggagcugcuggaaaguga

SEQ ID NO: 1831486 - RNA, 19 nt, Homo sapiens
  misc_RNA (1)...(19): siRNA sense strand
gaccuaaaggcucagauuc

SEQ ID NO: 1831487 - RNA, 19 nt, Homo sapiens
  misc_RNA (1)...(19): siRNA sense strand
caaggugcuucaguuuaau

SEQ ID NO: 1831488 - RNA, 19 nt, Homo sapiens
  misc_RNA (1)...(19): siRNA sense strand
ggccaaggugcuucaguuu

SEQ ID NO: 1831489 - RNA, 19 nt, Homo sapiens
  misc_RNA (1)...(19): siRNA sense strand
agaaauauuacuccucaga

SEQ ID NO: 1831490 - RNA, 19 nt, Homo sapiens
  misc_RNA (1)...(19): siRNA sense strand
gaaugcugucuacuucaaa

SEQ ID NO: 1831491 - RNA, 19 nt, Homo sapiens
  misc_RNA (1)...(19): siRNA sense strand
cauggaggcccacaguuug

SEQ ID NO: 1831492 - RNA, 19 nt, Homo sapiens
  misc_RNA (1)...(19): siRNA sense strand
gccaauuucucagggaugu

SEQ ID NO: 1831493 - RNA, 19 nt, Homo sapiens
  misc_RNA (1)...(19): siRNA sense strand
gauucuagaacucccauau

SEQ ID NO: 1831494 - RNA, 19 nt, Homo sapiens
  misc_RNA (1)...(19): siRNA sense strand
aaauauuacuccucagaac

SEQ ID NO: 1831495 - RNA, 19 nt, Homo sapiens
  misc_RNA (1)...(19): siRNA sense strand
caagggacgggccaauuuc

SEQ ID NO: 1831496 - RNA, 19 nt, Homo sapiens
  misc_RNA (1)...(19): siRNA sense strand
gcuggaaagugaaauaacc

SEQ ID NO: 1831497 - RNA, 19 nt, Homo sapiens
  misc_RNA (1)...(19): siRNA sense strand
gcugcuggaaagugaaaua

SEQ ID NO: 1831498 - RNA, 19 nt, Homo sapiens
  misc_RNA (1)...(19): siRNA sense strand
ucuuguugcuuccagauga

SEQ ID NO: 1831499 - RNA, 19 nt, Homo sapiens
  misc_RNA (1)...(19): siRNA sense strand
gugcagaagaagcuagaaa

SEQ ID NO: 1831500 - RNA, 19 nt, Homo sapiens
  misc_RNA (1)...(19): siRNA sense strand
gagcugcuggaaagugaaa

SEQ ID NO: 1831501 - RNA, 19 nt, Homo sapiens
  misc_RNA (1)...(19): siRNA sense strand
ugaaugaggagggcacuga

SEQ ID NO: 1831502 - RNA, 19 nt, Homo sapiens
  misc_RNA (1)...(19): siRNA sense strand
ggaugucggagaggaauga

SEQ ID NO: 1831503 - RNA, 19 nt, Homo sapiens
  misc_RNA (1)...(19): siRNA sense strand
augacaaacucaacaagug

SEQ ID NO: 1831504 - RNA, 19 nt, Homo sapiens
  misc_RNA (1)...(19): siRNA sense strand
ugaccuguuucuuucugaa

SEQ ID NO: 1831505 - RNA, 19 nt, Homo sapiens
  misc_RNA (1)...(19): siRNA sense strand
aaggguaguuauccugaug

SEQ ID NO: 1831506 - RNA, 19 nt, Homo sapiens
  misc_RNA (1)...(19): siRNA sense strand
uaugaacucagauccauuc

SEQ ID NO: 1831507 - RNA, 19 nt, Homo sapiens
  misc_RNA (1)...(19): siRNA sense strand
cuuuauccuuuccguguaa

SEQ ID NO: 1831508 - RNA, 19 nt, Homo sapiens
  misc_RNA (1)...(19): siRNA sense strand
cagauaaaauccauucauc

SEQ ID NO: 1831509 - RNA, 19 nt, Homo sapiens
  misc_RNA (1)...(19): siRNA sense strand
aggcacaagcugcagauaa

SEQ ID NO: 1831510 - RNA, 19 nt, Homo sapiens
  misc_RNA (1)...(19): siRNA sense strand
ggcugaagaugaaguugag

SEQ ID NO: 1831511 - RNA, 19 nt, Homo sapiens
  misc_RNA (1)...(19): siRNA sense strand
gggacgggccaauuucuca

SEQ ID NO: 1831512 - RNA, 19 nt, Homo sapiens
  misc_RNA (1)...(19): siRNA sense strand
uggaaagugucaauaagcu

SEQ ID NO: 1831513 - RNA, 19 nt, Homo sapiens
  misc_RNA (1)...(19): siRNA sense strand
acaaguggaccagcaaaga

SEQ ID NO: 1831514 - RNA, 19 nt, Homo sapiens
  misc_RNA (1)...(19): siRNA sense strand
aauaaccuaugacaaacuc

SEQ ID NO: 1831515 - RNA, 19 nt, Homo sapiens
  misc_RNA (1)...(19): siRNA sense strand
augauguacuugcgugaaa

SEQ ID NO: 1831516 - RNA, 19 nt, Homo sapiens
  misc_RNA (1)...(19): siRNA sense strand
gaugauguacuugcgugaa

SEQ ID NO: 1831517 - RNA, 19 nt, Homo sapiens
  misc_RNA (1)...(19): siRNA sense strand
gcacaggagguguuaugac

SEQ ID NO: 1831518 - RNA, 19 nt, Homo sapiens
  misc_RNA (1)...(19): siRNA sense strand
uaaccuaugacaaacucaa

SEQ ID NO: 1831519 - RNA, 19 nt, Homo sapiens
  misc_RNA (1)...(19): siRNA sense strand
cuggagauguuagcauguu

SEQ ID NO: 1831520 - RNA, 19 nt, Homo sapiens
  misc_RNA (1)...(19): siRNA sense strand
agaccuaaaggcucagauu

SEQ ID NO: 1831521 - RNA, 19 nt, Homo sapiens
  misc_RNA (1)...(19): siRNA sense strand
ucaugcagcagauccagaa

SEQ ID NO: 1831522 - RNA, 19 nt, Homo sapiens
  misc_RNA (1)...(19): siRNA sense strand
ggauacauagaagaccuaa

SEQ ID NO: 1831523 - RNA, 19 nt, Homo sapiens
  misc_RNA (1)...(19): siRNA sense strand
ccugaagguucuguagaug

SEQ ID NO: 1831524 - RNA, 19 nt, Homo sapiens
  misc_RNA (1)...(19): siRNA sense strand
gcaaaaucccaaacuuguu

SEQ ID NO: 1831525 - RNA, 19 nt, Homo sapiens
  misc_RNA (1)...(19): siRNA sense strand
uaagcuguuuggugagaag

SEQ ID NO: 1831526 - RNA, 19 nt, Homo sapiens
  misc_RNA (1)...(19): siRNA sense strand
gauccagaaggguaguuau

SEQ ID NO: 1831527 - RNA, 19 nt, Homo sapiens
  misc_RNA (1)...(19): siRNA sense strand
caacaagggacgggccaau

SEQ ID NO: 1831528 - RNA, 19 nt, Homo sapiens
  misc_RNA (1)...(19): siRNA sense strand
agaugaaguugagguauac

SEQ ID NO: 1831529 - RNA, 19 nt, Homo sapiens
  misc_RNA (1)...(19): siRNA sense strand
ccauaugcuggagauguua

SEQ ID NO: 1831530 - RNA, 19 nt, Homo sapiens
  misc_RNA (1)...(19): siRNA sense strand
cuaaacauuggauacauag

SEQ ID NO: 1831531 - RNA, 19 nt, Homo sapiens
  misc_RNA (1)...(19): siRNA sense strand
aaaugggcuuuauccuuuc

SEQ ID NO: 1831532 - RNA, 19 nt, Homo sapiens
  misc_RNA (1)...(19): siRNA sense strand
ccauuugagaagaaacuaa

SEQ ID NO: 1831533 - RNA, 19 nt, Homo sapiens
  misc_RNA (1)...(19): siRNA sense strand
gugagaagucugcgagcuu

SEQ ID NO: 1831534 - RNA, 19 nt, Homo sapiens
  misc_RNA (1)...(19): siRNA sense strand
gcacaguccucuccgauua

SEQ ID NO: 1831535 - RNA, 19 nt, Homo sapiens
  misc_RNA (1)...(19): siRNA sense strand
gcaggaaggaucccaaaua

SEQ ID NO: 1831536 - RNA, 19 nt, Homo sapiens
  misc_RNA (1)...(19): siRNA sense strand
gaauagacccaccagcauu

SEQ ID NO: 1831537 - RNA, 19 nt, Homo sapiens
  misc_RNA (1)...(19): siRNA sense strand
ccacccagguuaagaauag

SEQ ID NO: 1831538 - RNA, 19 nt, Homo sapiens
  misc_RNA (1)...(19): siRNA sense strand
cagggaagcucuacaccuu

SEQ ID NO: 1831539 - RNA, 19 nt, Homo sapiens
  misc_RNA (1)...(19): siRNA sense strand
ggaaggaucccaaauacag

SEQ ID NO: 1831540 - RNA, 19 nt, Homo sapiens
  misc_RNA (1)...(19): siRNA sense strand
ggacaggccgcuaaagugu

SEQ ID NO: 1831541 - RNA, 19 nt, Homo sapiens
  misc_RNA (1)...(19): siRNA sense strand
caggaaggaucccaaauac

SEQ ID NO: 1831542 - RNA, 19 nt, Homo sapiens
  misc_RNA (1)...(19): siRNA sense strand
gagcaggacaggccgcuaa

SEQ ID NO: 1831543 - RNA, 19 nt, Homo sapiens
  misc_RNA (1)...(19): siRNA sense strand
cgagugggaugacuaugug

SEQ ID NO: 1831544 - RNA, 19 nt, Homo sapiens
  misc_RNA (1)...(19): siRNA sense strand
gaaggaucccaaauacaga

SEQ ID NO: 1831545 - RNA, 19 nt, Homo sapiens
  misc_RNA (1)...(19): siRNA sense strand
gaucccaaauacagagaau

SEQ ID NO: 1831546 - RNA, 19 nt, Homo sapiens
  misc_RNA (1)...(19): siRNA sense strand
gcagcugucugggaaguag

SEQ ID NO: 1831547 - RNA, 19 nt, Homo sapiens
  misc_RNA (1)...(19): siRNA sense strand
acaggccgcuaaaguguga

SEQ ID NO: 1831548 - RNA, 19 nt, Homo sapiens
  misc_RNA (1)...(19): siRNA sense strand
ggaugacuaugugcccaaa

SEQ ID NO: 1831549 - RNA, 19 nt, Homo sapiens
  misc_RNA (1)...(19): siRNA sense strand
gagcagcugucugggaagu

SEQ ID NO: 1831550 - RNA, 19 nt, Homo sapiens
  misc_RNA (1)...(19): siRNA sense strand
cgcuaugucuggcugguuu

SEQ ID NO: 1831551 - RNA, 19 nt, Homo sapiens
  misc_RNA (1)...(19): siRNA sense strand
aauagacccaccagcauuu

SEQ ID NO: 1831552 - RNA, 19 nt, Homo sapiens
  misc_RNA (1)...(19): siRNA sense strand
gugggauggucuugauuca

SEQ ID NO: 1831553 - RNA, 19 nt, Homo sapiens
  misc_RNA (1)...(19): siRNA sense strand
acaccuugguccugacaga

SEQ ID NO: 1831554 - RNA, 19 nt, Homo sapiens
  misc_RNA (1)...(19): siRNA sense strand
uggacgagcugggcaaagu

SEQ ID NO: 1831555 - RNA, 19 nt, Homo sapiens
  misc_RNA (1)...(19): siRNA sense strand
caggacaggccgcuaaagu

SEQ ID NO: 1831556 - RNA, 19 nt, Homo sapiens
  misc_RNA (1)...(19): siRNA sense strand
ggacgagcugggcaaagug

SEQ ID NO: 1831557 - RNA, 19 nt, Homo sapiens
  misc_RNA (1)...(19): siRNA sense strand
cagcaggaaggaucccaaa

SEQ ID NO: 1831558 - RNA, 19 nt, Homo sapiens
  misc_RNA (1)...(19): siRNA sense strand
gcuaugucuggcugguuua

SEQ ID NO: 1831559 - RNA, 19 nt, Homo sapiens
  misc_RNA (1)...(19): siRNA sense strand
ugacgcccacccagguuaa

SEQ ID NO: 1831560 - RNA, 19 nt, Homo sapiens
  misc_RNA (1)...(19): siRNA sense strand
acuaugugcccaaacugua

SEQ ID NO: 1831561 - RNA, 19 nt, Homo sapiens
  misc_RNA (1)...(19): siRNA sense strand
gguggcguccuuccguaaa

SEQ ID NO: 1831562 - RNA, 19 nt, Homo sapiens
  misc_RNA (1)...(19): siRNA sense strand
acaguccucuccgauuaug

SEQ ID NO: 1831563 - RNA, 19 nt, Homo sapiens
  misc_RNA (1)...(19): siRNA sense strand
caacaugaagggcaaugac

SEQ ID NO: 1831564 - RNA, 19 nt, Homo sapiens
  misc_RNA (1)...(19): siRNA sense strand
cgacagaaauccugaauga

SEQ ID NO: 1831565 - RNA, 19 nt, Homo sapiens
  misc_RNA (1)...(19): siRNA sense strand
auacggagcuggagaaaua

SEQ ID NO: 1831566 - RNA, 19 nt, Homo sapiens
  misc_RNA (1)...(19): siRNA sense strand
cagaaauccugaaugaaua

SEQ ID NO: 1831567 - RNA, 19 nt, Homo sapiens
  misc_RNA (1)...(19): siRNA sense strand
gaaugaagccugccuuguu

SEQ ID NO: 1831568 - RNA, 19 nt, Homo sapiens
  misc_RNA (1)...(19): siRNA sense strand
gagccaaacucucacagau

SEQ ID NO: 1831569 - RNA, 19 nt, Homo sapiens
  misc_RNA (1)...(19): siRNA sense strand
caagaggaagccaauauuu

SEQ ID NO: 1831570 - RNA, 19 nt, Homo sapiens
  misc_RNA (1)...(19): siRNA sense strand
gccaaacucucacagauca

SEQ ID NO: 1831571 - RNA, 19 nt, Homo sapiens
  misc_RNA (1)...(19): siRNA sense strand
gauccugcguucccgauuu

SEQ ID NO: 1831572 - RNA, 19 nt, Homo sapiens
  misc_RNA (1)...(19): siRNA sense strand
gcaggacauuggagacauu

SEQ ID NO: 1831573 - RNA, 19 nt, Homo sapiens
  misc_RNA (1)...(19): siRNA sense strand
aaugaagccugccuuguuu

SEQ ID NO: 1831574 - RNA, 19 nt, Homo sapiens
  misc_RNA (1)...(19): siRNA sense strand
gcuuuaaacugccacagaa

SEQ ID NO: 1831575 - RNA, 19 nt, Homo sapiens
  misc_RNA (1)...(19): siRNA sense strand
caguggagcauucagauua

SEQ ID NO: 1831576 - RNA, 19 nt, Homo sapiens
  misc_RNA (1)...(19): siRNA sense strand
aagaggaagccaauauuua

SEQ ID NO: 1831577 - RNA, 19 nt, Homo sapiens
  misc_RNA (1)...(19): siRNA sense strand
caauauuuaugcugccaaa

SEQ ID NO: 1831578 - RNA, 19 nt, Homo sapiens
  misc_RNA (1)...(19): siRNA sense strand
gggcaucagugcuaaugga

SEQ ID NO: 1831579 - RNA, 19 nt, Homo sapiens
  misc_RNA (1)...(19): siRNA sense strand
ggaagagacggaauuucaa

SEQ ID NO: 1831580 - RNA, 19 nt, Homo sapiens
  misc_RNA (1)...(19): siRNA sense strand
caagcuaacucgcccucaa

SEQ ID NO: 1831581 - RNA, 19 nt, Homo sapiens
  misc_RNA (1)...(19): siRNA sense strand
acaagaagaacauagguaa

SEQ ID NO: 1831582 - RNA, 19 nt, Homo sapiens
  misc_RNA (1)...(19): siRNA sense strand
acagaaauccugaaugaau

SEQ ID NO: 1831583 - RNA, 19 nt, Homo sapiens
  misc_RNA (1)...(19): siRNA sense strand
gagccaacgugcaaucaca

SEQ ID NO: 1831584 - RNA, 19 nt, Homo sapiens
  misc_RNA (1)...(19): siRNA sense strand
ggaggaagcaggacauugg

SEQ ID NO: 1831585 - RNA, 19 nt, Homo sapiens
  misc_RNA (1)...(19): siRNA sense strand
ggaguuagccaagaagugu

SEQ ID NO: 1831586 - RNA, 19 nt, Homo sapiens
  misc_RNA (1)...(19): siRNA sense strand
ggacauuggagacauuuua

SEQ ID NO: 1831587 - RNA, 19 nt, Homo sapiens
  misc_RNA (1)...(19): siRNA sense strand
agaggaagccaauauuuau

SEQ ID NO: 1831588 - RNA, 19 nt, Homo sapiens
  misc_RNA (1)...(19): siRNA sense strand
cgaauccgguacaagaaga

SEQ ID NO: 1831589 - RNA, 19 nt, Homo sapiens
  misc_RNA (1)...(19): siRNA sense strand
ucagacaaaucuaccauac

SEQ ID NO: 1831590 - RNA, 19 nt, Homo sapiens
  misc_RNA (1)...(19): siRNA sense strand
cggaagagacggaauuuca

SEQ ID NO: 1831591 - RNA, 19 nt, Homo sapiens
  misc_RNA (1)...(19): siRNA sense strand
caagaagaacauagguaaa

SEQ ID NO: 1831592 - RNA, 19 nt, Homo sapiens
  misc_RNA (1)...(19): siRNA sense strand
gagacggaauuucaacaag

SEQ ID NO: 1831593 - RNA, 19 nt, Homo sapiens
  misc_RNA (1)...(19): siRNA sense strand
aagccugccuuguuuaaug

SEQ ID NO: 1831594 - RNA, 19 nt, Homo sapiens
  misc_RNA (1)...(19): siRNA sense strand
caucacagucucccaggua

SEQ ID NO: 1831595 - RNA, 19 nt, Homo sapiens
  misc_RNA (1)...(19): siRNA sense strand
aagaggaguuagccaagaa

SEQ ID NO: 1831596 - RNA, 19 nt, Homo sapiens
  misc_RNA (1)...(19): siRNA sense strand
ggaagccaaagaggaguua

SEQ ID NO: 1831597 - RNA, 19 nt, Homo sapiens
  misc_RNA (1)...(19): siRNA sense strand
aaagaggaguuagccaaga

SEQ ID NO: 1831598 - RNA, 19 nt, Homo sapiens
  misc_RNA (1)...(19): siRNA sense strand
agaaggcccuggcaguguu

SEQ ID NO: 1831599 - RNA, 19 nt, Homo sapiens
  misc_RNA (1)...(19): siRNA sense strand
ucaagaggaagccaauauu

SEQ ID NO: 1831600 - RNA, 19 nt, Homo sapiens
  misc_RNA (1)...(19): siRNA sense strand
gaaaacaugcuuuaaacug

SEQ ID NO: 1831601 - RNA, 19 nt, Homo sapiens
  misc_RNA (1)...(19): siRNA sense strand
uguuuaauguguuguguga

SEQ ID NO: 1831602 - RNA, 19 nt, Homo sapiens
  misc_RNA (1)...(19): siRNA sense strand
uguguugugugaaaucaaa

SEQ ID NO: 1831603 - RNA, 19 nt, Homo sapiens
  misc_RNA (1)...(19): siRNA sense strand
ggagacauuuuacagcaaa

SEQ ID NO: 1831604 - RNA, 19 nt, Homo sapiens
  misc_RNA (1)...(19): siRNA sense strand
gaggaagccaauauuuaug

SEQ ID NO: 1831605 - RNA, 19 nt, Homo sapiens
  misc_RNA (1)...(19): siRNA sense strand
gacggaauuucaacaagca

SEQ ID NO: 1831606 - RNA, 19 nt, Homo sapiens
  misc_RNA (1)...(19): siRNA sense strand
gaagagacggaauuucaac

SEQ ID NO: 1831607 - RNA, 19 nt, Homo sapiens
  misc_RNA (1)...(19): siRNA sense strand
ggauacccuucgccauguu

SEQ ID NO: 1831608 - RNA, 19 nt, Homo sapiens
  misc_RNA (1)...(19): siRNA sense strand
caagcaagcgacagaaauc

SEQ ID NO: 1831609 - RNA, 19 nt, Homo sapiens
  misc_RNA (1)...(19): siRNA sense strand
ccacccacgugaugaaucu

SEQ ID NO: 1831610 - RNA, 19 nt, Homo sapiens
  misc_RNA (1)...(19): siRNA sense strand
gauacccuucgccauguua

SEQ ID NO: 1831611 - RNA, 19 nt, Homo sapiens
  misc_RNA (1)...(19): siRNA sense strand
ugaagccugccuuguuuaa

SEQ ID NO: 1831612 - RNA, 19 nt, Homo sapiens
  misc_RNA (1)...(19): siRNA sense strand
aagcgaauccgguacaaga

SEQ ID NO: 1831613 - RNA, 19 nt, Homo sapiens
  misc_RNA (1)...(19): siRNA sense strand
ucucacagaucagacaaau

SEQ ID NO: 1831614 - RNA, 19 nt, Homo sapiens
  misc_RNA (1)...(19): siRNA sense strand
uuaaacugccacagaauga

SEQ ID NO: 1831615 - RNA, 19 nt, Homo sapiens
  misc_RNA (1)...(19): siRNA sense strand
ccagaaaacaugcuuuaaa

SEQ ID NO: 1831616 - RNA, 19 nt, Homo sapiens
  misc_RNA (1)...(19): siRNA sense strand
uaauggagguuggcaggau

SEQ ID NO: 1831617 - RNA, 19 nt, Homo sapiens
  misc_RNA (1)...(19): siRNA sense strand
acaggaggauacagugaug

SEQ ID NO: 1831618 - RNA, 19 nt, Homo sapiens
  misc_RNA (1)...(19): siRNA sense strand
acaacucaguggagcauuc

SEQ ID NO: 1831619 - RNA, 19 nt, Homo sapiens
  misc_RNA (1)...(19): siRNA sense strand
ccgcagggcaucagugcua

SEQ ID NO: 1831620 - RNA, 19 nt, Homo sapiens
  misc_RNA (1)...(19): siRNA sense strand
ccagugaggaagccaaaga

SEQ ID NO: 1831621 - RNA, 19 nt, Homo sapiens
  misc_RNA (1)...(19): siRNA sense strand
cagaaaacaugcuuuaaac

SEQ ID NO: 1831622 - RNA, 19 nt, Homo sapiens
  misc_RNA (1)...(19): siRNA sense strand
ucaacaagcaagcgacaga

SEQ ID NO: 1831623 - RNA, 19 nt, Homo sapiens
  misc_RNA (1)...(19): siRNA sense strand
cagcaaauuaugaccauca

SEQ ID NO: 1831624 - RNA, 19 nt, Homo sapiens
  misc_RNA (1)...(19): siRNA sense strand
caucauccaccgcaaguuc

SEQ ID NO: 1831625 - RNA, 19 nt, Homo sapiens
  misc_RNA (1)...(19): siRNA sense strand
caacaagcaagcgacagaa

SEQ ID NO: 1831626 - RNA, 19 nt, Homo sapiens
  misc_RNA (1)...(19): siRNA sense strand
ggaagccaauauuuaugcu

SEQ ID NO: 1831627 - RNA, 19 nt, Homo sapiens
  misc_RNA (1)...(19): siRNA sense strand
gaucagacaaaucuaccau

SEQ ID NO: 1831628 - RNA, 19 nt, Homo sapiens
  misc_RNA (1)...(19): siRNA sense strand
gcccauggaagccaagcua

SEQ ID NO: 1831629 - RNA, 19 nt, Homo sapiens
  misc_RNA (1)...(19): siRNA sense strand
ucacagaccagaguuugga

SEQ ID NO: 1831630 - RNA, 19 nt, Homo sapiens
  misc_RNA (1)...(19): siRNA sense strand
caucacagaccagaguuug

SEQ ID NO: 1831631 - RNA, 19 nt, Homo sapiens
  misc_RNA (1)...(19): siRNA sense strand
gaccaucacagaccagagu

SEQ ID NO: 1831632 - RNA, 19 nt, Homo sapiens
  misc_RNA (1)...(19): siRNA sense strand
uacaagaagaacauaggua

SEQ ID NO: 1831633 - RNA, 19 nt, Homo sapiens
  misc_RNA (1)...(19): siRNA sense strand
ggagcauucagauuacaga

SEQ ID NO: 1831634 - RNA, 19 nt, Homo sapiens
  misc_RNA (1)...(19): siRNA sense strand
ucuggagauuuguucauga

SEQ ID NO: 1831635 - RNA, 19 nt, Homo sapiens
  misc_RNA (1)...(19): siRNA sense strand
ugaugcggcuggacaacau

SEQ ID NO: 1831636 - RNA, 19 nt, Homo sapiens
  misc_RNA (1)...(19): siRNA sense strand
gagcgugcagucacucaau

SEQ ID NO: 1831637 - RNA, 19 nt, Homo sapiens
  misc_RNA (1)...(19): siRNA sense strand
guacaagaagaacauaggu

SEQ ID NO: 1831638 - RNA, 19 nt, Homo sapiens
  misc_RNA (1)...(19): siRNA sense strand
caaacucucacagaucaga

SEQ ID NO: 1831639 - RNA, 19 nt, Homo sapiens
  misc_RNA (1)...(19): siRNA sense strand
cagaccagaguuuggauga

SEQ ID NO: 1831640 - RNA, 19 nt, Homo sapiens
  misc_RNA (1)...(19): siRNA sense strand
ugucaaacucuggagauuu

SEQ ID NO: 1831641 - RNA, 19 nt, Homo sapiens
  misc_RNA (1)...(19): siRNA sense strand
agguaaauuucaagaggaa

SEQ ID NO: 1831642 - RNA, 19 nt, Homo sapiens
  misc_RNA (1)...(19): siRNA sense strand
gaggaagcaggacauugga

SEQ ID NO: 1831643 - RNA, 19 nt, Homo sapiens
  misc_RNA (1)...(19): siRNA sense strand
gacaggaggauacagugau

SEQ ID NO: 1831644 - RNA, 19 nt, Homo sapiens
  misc_RNA (1)...(19): siRNA sense strand
gacagaaauccugaaugaa

SEQ ID NO: 1831645 - RNA, 19 nt, Homo sapiens
  misc_RNA (1)...(19): siRNA sense strand
gaagccugccuuguuuaau

SEQ ID NO: 1831646 - RNA, 19 nt, Homo sapiens
  misc_RNA (1)...(19): siRNA sense strand
ccagacaggaggauacagu

SEQ ID NO: 1831647 - RNA, 19 nt, Homo sapiens
  misc_RNA (1)...(19): siRNA sense strand
acaagcaagcgacagaaau

SEQ ID NO: 1831648 - RNA, 19 nt, Homo sapiens
  misc_RNA (1)...(19): siRNA sense strand
gaauccgguacaagaagaa

SEQ ID NO: 1831649 - RNA, 19 nt, Homo sapiens
  misc_RNA (1)...(19): siRNA sense strand
ggccagaaaacaugcuuua

SEQ ID NO: 1831650 - RNA, 19 nt, Homo sapiens
  misc_RNA (1)...(19): siRNA sense strand
caauggggauucuuaccaa

SEQ ID NO: 1831651 - RNA, 19 nt, Homo sapiens
  misc_RNA (1)...(19): siRNA sense strand
agacaggaggauacaguga

SEQ ID NO: 1831652 - RNA, 19 nt, Homo sapiens
  misc_RNA (1)...(19): siRNA sense strand
uaaacugccacagaaugaa

SEQ ID NO: 1831653 - RNA, 19 nt, Homo sapiens
  misc_RNA (1)...(19): siRNA sense strand
uggauacccuucgccaugu

SEQ ID NO: 1831654 - RNA, 19 nt, Homo sapiens
  misc_RNA (1)...(19): siRNA sense strand
caacucaguggagcauuca

SEQ ID NO: 1831655 - RNA, 19 nt, Homo sapiens
  misc_RNA (1)...(19): siRNA sense strand
gcgaauccgguacaagaag

SEQ ID NO: 1831656 - RNA, 19 nt, Homo sapiens
  misc_RNA (1)...(19): siRNA sense strand
aaauuaugaccaucacaga

SEQ ID NO: 1831657 - RNA, 19 nt, Homo sapiens
  misc_RNA (1)...(19): siRNA sense strand
uacagcaaauuaugaccau

SEQ ID NO: 1831658 - RNA, 19 nt, Homo sapiens
  misc_RNA (1)...(19): siRNA sense strand
gggaggaagcaggacauug

SEQ ID NO: 1831659 - RNA, 19 nt, Homo sapiens
  misc_RNA (1)...(19): siRNA sense strand
ucaguggagcauucagauu

SEQ ID NO: 1831660 - RNA, 19 nt, Homo sapiens
  misc_RNA (1)...(19): siRNA sense strand
gguacaagaagaacauagg

SEQ ID NO: 1831661 - RNA, 19 nt, Homo sapiens
  misc_RNA (1)...(19): siRNA sense strand
cagaaggcccuggcagugu

SEQ ID NO: 1831662 - RNA, 19 nt, Homo sapiens
  misc_RNA (1)...(19): siRNA sense strand
caaugugucagcccaugga

SEQ ID NO: 1831663 - RNA, 19 nt, Homo sapiens
  misc_RNA (1)...(19): siRNA sense strand
ugucacugcuaccaaugug

SEQ ID NO: 1831664 - RNA, 19 nt, Homo sapiens
  misc_RNA (1)...(19): siRNA sense strand
ccacaaagcucacacgaua

SEQ ID NO: 1831665 - RNA, 19 nt, Homo sapiens
  misc_RNA (1)...(19): siRNA sense strand
gugaggagaugaccuauga

SEQ ID NO: 1831666 - RNA, 19 nt, Homo sapiens
  misc_RNA (1)...(19): siRNA sense strand
ggagaugaccuaugaagaa

SEQ ID NO: 1831667 - RNA, 19 nt, Homo sapiens
  misc_RNA (1)...(19): siRNA sense strand
gagaugaccuaugaagaaa

SEQ ID NO: 1831668 - RNA, 19 nt, Homo sapiens
  misc_RNA (1)...(19): siRNA sense strand
uaaagagaauugagugcua

SEQ ID NO: 1831669 - RNA, 19 nt, Homo sapiens
  misc_RNA (1)...(19): siRNA sense strand
uggcagcccugauuauaua

SEQ ID NO: 1831670 - RNA, 19 nt, Homo sapiens
  misc_RNA (1)...(19): siRNA sense strand
gaagaaauccaggaacauu

SEQ ID NO: 1831671 - RNA, 19 nt, Homo sapiens
  misc_RNA (1)...(19): siRNA sense strand
ggaaggcccugaaugagau

SEQ ID NO: 1831672 - RNA, 19 nt, Homo sapiens
  misc_RNA (1)...(19): siRNA sense strand
gaaggauguucacaacuau

SEQ ID NO: 1831673 - RNA, 19 nt, Homo sapiens
  misc_RNA (1)...(19): siRNA sense strand
uaaugacccuggcauaauu

SEQ ID NO: 1831674 - RNA, 19 nt, Homo sapiens
  misc_RNA (1)...(19): siRNA sense strand
gcagugagcuacaagaacu

SEQ ID NO: 1831675 - RNA, 19 nt, Homo sapiens
  misc_RNA (1)...(19): siRNA sense strand
gggagaagccugagaaugu

SEQ ID NO: 1831676 - RNA, 19 nt, Homo sapiens
  misc_RNA (1)...(19): siRNA sense strand
acauuacccugaagaauuu

SEQ ID NO: 1831677 - RNA, 19 nt, Homo sapiens
  misc_RNA (1)...(19): siRNA sense strand
gauaggaacaccaacuaaa

SEQ ID NO: 1831678 - RNA, 19 nt, Homo sapiens
  misc_RNA (1)...(19): siRNA sense strand
ucuacuaccucaugaauau

SEQ ID NO: 1831679 - RNA, 19 nt, Homo sapiens
  misc_RNA (1)...(19): siRNA sense strand
ggagaagccugagaaugug

SEQ ID NO: 1831680 - RNA, 19 nt, Homo sapiens
  misc_RNA (1)...(19): siRNA sense strand
gcuaugaggucaacuacca

SEQ ID NO: 1831681 - RNA, 19 nt, Homo sapiens
  misc_RNA (1)...(19): siRNA sense strand
gcacugcgagaccaagaua

SEQ ID NO: 1831682 - RNA, 19 nt, Homo sapiens
  misc_RNA (1)...(19): siRNA sense strand
agaccuauaucuccacaaa

SEQ ID NO: 1831683 - RNA, 19 nt, Homo sapiens
  misc_RNA (1)...(19): siRNA sense strand
gaugaccuaugaagaaauc

SEQ ID NO: 1831684 - RNA, 19 nt, Homo sapiens
  misc_RNA (1)...(19): siRNA sense strand
gaacauuacccugaagaau

SEQ ID NO: 1831685 - RNA, 19 nt, Homo sapiens
  misc_RNA (1)...(19): siRNA sense strand
gaauccaucuaccugaaug

SEQ ID NO: 1831686 - RNA, 19 nt, Homo sapiens
  misc_RNA (1)...(19): siRNA sense strand
acaacuaucucagccauga

SEQ ID NO: 1831687 - RNA, 19 nt, Homo sapiens
  misc_RNA (1)...(19): siRNA sense strand
gggaaaagguucuggaaga

SEQ ID NO: 1831688 - RNA, 19 nt, Homo sapiens
  misc_RNA (1)...(19): siRNA sense strand
gaaaacaucaggcaaguga

SEQ ID NO: 1831689 - RNA, 19 nt, Homo sapiens
  misc_RNA (1)...(19): siRNA sense strand
cacgauaucucaacuggau

SEQ ID NO: 1831690 - RNA, 19 nt, Homo sapiens
  misc_RNA (1)...(19): siRNA sense strand
gaagaggaccauccagaca

SEQ ID NO: 1831691 - RNA, 19 nt, Homo sapiens
  misc_RNA (1)...(19): siRNA sense strand
ggauaggaacaccaacuaa

SEQ ID NO: 1831692 - RNA, 19 nt, Homo sapiens
  misc_RNA (1)...(19): siRNA sense strand
aaacuuggcagcccugauu

SEQ ID NO: 1831693 - RNA, 19 nt, Homo sapiens
  misc_RNA (1)...(19): siRNA sense strand
cuacaagaacuaugaauuc

SEQ ID NO: 1831694 - RNA, 19 nt, Homo sapiens
  misc_RNA (1)...(19): siRNA sense strand
gcuacaagaacuaugaauu

SEQ ID NO: 1831695 - RNA, 19 nt, Homo sapiens
  misc_RNA (1)...(19): siRNA sense strand
gauaauggagcuagaacga

SEQ ID NO: 1831696 - RNA, 19 nt, Homo sapiens
  misc_RNA (1)...(19): siRNA sense strand
caccaacacuaccagagaa

SEQ ID NO: 1831697 - RNA, 19 nt, Homo sapiens
  misc_RNA (1)...(19): siRNA sense strand
guucagaugagcuuccaua

SEQ ID NO: 1831698 - RNA, 19 nt, Homo sapiens
  misc_RNA (1)...(19): siRNA sense strand
guaaugacccuggcauaau

SEQ ID NO: 1831699 - RNA, 19 nt, Homo sapiens
  misc_RNA (1)...(19): siRNA sense strand
ucauugaguccauuuguaa

SEQ ID NO: 1831700 - RNA, 19 nt, Homo sapiens
  misc_RNA (1)...(19): siRNA sense strand
aagaaauccaggaacauua

SEQ ID NO: 1831701 - RNA, 19 nt, Homo sapiens
  misc_RNA (1)...(19): siRNA sense strand
aaacaucaggcaagugaaa

SEQ ID NO: 1831702 - RNA, 19 nt, Homo sapiens
  misc_RNA (1)...(19): siRNA sense strand
gagaggcagugagcuacaa

SEQ ID NO: 1831703 - RNA, 19 nt, Homo sapiens
  misc_RNA (1)...(19): siRNA sense strand
gagcuuccauaucucaagu

SEQ ID NO: 1831704 - RNA, 19 nt, Homo sapiens
  misc_RNA (1)...(19): siRNA sense strand
aaagagaauugagugcuau

SEQ ID NO: 1831705 - RNA, 19 nt, Homo sapiens
  misc_RNA (1)...(19): siRNA sense strand
ccacaauggugaucauggu

SEQ ID NO: 1831706 - RNA, 19 nt, Homo sapiens
  misc_RNA (1)...(19): siRNA sense strand
cugauuauauagacuguga

SEQ ID NO: 1831707 - RNA, 19 nt, Homo sapiens
  misc_RNA (1)...(19): siRNA sense strand
caacauggaagcccugcaa

SEQ ID NO: 1831708 - RNA, 19 nt, Homo sapiens
  misc_RNA (1)...(19): siRNA sense strand
ccuaugcccuggccaacuu

SEQ ID NO: 1831709 - RNA, 19 nt, Homo sapiens
  misc_RNA (1)...(19): siRNA sense strand
gcucgaggcaagaccuaua

SEQ ID NO: 1831710 - RNA, 19 nt, Homo sapiens
  misc_RNA (1)...(19): siRNA sense strand
uggcagcccugaaggaugu

SEQ ID NO: 1831711 - RNA, 19 nt, Homo sapiens
  misc_RNA (1)...(19): siRNA sense strand
ggaacauuacccugaagaa

SEQ ID NO: 1831712 - RNA, 19 nt, Homo sapiens
  misc_RNA (1)...(19): siRNA sense strand
aaauaucgcuaccgcuauc

SEQ ID NO: 1831713 - RNA, 19 nt, Homo sapiens
  misc_RNA (1)...(19): siRNA sense strand
gcgagaccaagauaaauau

SEQ ID NO: 1831714 - RNA, 19 nt, Homo sapiens
  misc_RNA (1)...(19): siRNA sense strand
aacauuacccugaagaauu

SEQ ID NO: 1831715 - RNA, 19 nt, Homo sapiens
  misc_RNA (1)...(19): siRNA sense strand
gacgagaggcagugagcua

SEQ ID NO: 1831716 - RNA, 19 nt, Homo sapiens
  misc_RNA (1)...(19): siRNA sense strand
uggccuauuuccuggauaa

SEQ ID NO: 1831717 - RNA, 19 nt, Homo sapiens
  misc_RNA (1)...(19): siRNA sense strand
ccaagggagaguccuauga

SEQ ID NO: 1831718 - RNA, 19 nt, Homo sapiens
  misc_RNA (1)...(19): siRNA sense strand
agagaacgacggucacuga

SEQ ID NO: 1831719 - RNA, 19 nt, Homo sapiens
  misc_RNA (1)...(19): siRNA sense strand
aggaagcccuggauacugu

SEQ ID NO: 1831720 - RNA, 19 nt, Homo sapiens
  misc_RNA (1)...(19): siRNA sense strand
gaacacacaccgggagaag

SEQ ID NO: 1831721 - RNA, 19 nt, Homo sapiens
  misc_RNA (1)...(19): siRNA sense strand
gagaaggggcucauccaua

SEQ ID NO: 1831722 - RNA, 19 nt, Homo sapiens
  misc_RNA (1)...(19): siRNA sense strand
ggugccuccuggccuauuu

SEQ ID NO: 1831723 - RNA, 19 nt, Homo sapiens
  misc_RNA (1)...(19): siRNA sense strand
ccaccaacacuaccagaga

SEQ ID NO: 1831724 - RNA, 19 nt, Homo sapiens
  misc_RNA (1)...(19): siRNA sense strand
uguaaugacccuggcauaa

SEQ ID NO: 1831725 - RNA, 19 nt, Homo sapiens
  misc_RNA (1)...(19): siRNA sense strand
ugagcuacaagaacuauga

SEQ ID NO: 1831726 - RNA, 19 nt, Homo sapiens
  misc_RNA (1)...(19): siRNA sense strand
ucacuccuguggcuuaugg

SEQ ID NO: 1831727 - RNA, 19 nt, Homo sapiens
  misc_RNA (1)...(19): siRNA sense strand
ugcgagaccaagauaaaua

SEQ ID NO: 1831728 - RNA, 19 nt, Homo sapiens
  misc_RNA (1)...(19): siRNA sense strand
gaggagaugaccuaugaag

SEQ ID NO: 1831729 - RNA, 19 nt, Homo sapiens
  misc_RNA (1)...(19): siRNA sense strand
ggagagcucacccaaacca

SEQ ID NO: 1831730 - RNA, 19 nt, Homo sapiens
  misc_RNA (1)...(19): siRNA sense strand
gaacgacaggagaauguac

SEQ ID NO: 1831731 - RNA, 19 nt, Homo sapiens
  misc_RNA (1)...(19): siRNA sense strand
ggaauccaucuaccugaau

SEQ ID NO: 1831732 - RNA, 19 nt, Homo sapiens
  misc_RNA (1)...(19): siRNA sense strand
cauggaagcccugcaaauc

SEQ ID NO: 1831733 - RNA, 19 nt, Homo sapiens
  misc_RNA (1)...(19): siRNA sense strand
agaauguacuggugaucug

SEQ ID NO: 1831734 - RNA, 19 nt, Homo sapiens
  misc_RNA (1)...(19): siRNA sense strand
ucacaccucgcuccaucua

SEQ ID NO: 1831735 - RNA, 19 nt, Homo sapiens
  misc_RNA (1)...(19): siRNA sense strand
gauguucacaacuaucuca

SEQ ID NO: 1831736 - RNA, 19 nt, Homo sapiens
  misc_RNA (1)...(19): siRNA sense strand
gagcuacaagaacuaugaa

SEQ ID NO: 1831737 - RNA, 19 nt, Homo sapiens
  misc_RNA (1)...(19): siRNA sense strand
ggauaaaaguucagaugag

SEQ ID NO: 1831738 - RNA, 19 nt, Homo sapiens
  misc_RNA (1)...(19): siRNA sense strand
augaagaaauccaggaaca

SEQ ID NO: 1831739 - RNA, 19 nt, Homo sapiens
  misc_RNA (1)...(19): siRNA sense strand
gcaagcaguaugccuaugc

SEQ ID NO: 1831740 - RNA, 19 nt, Homo sapiens
  misc_RNA (1)...(19): siRNA sense strand
aaaagaacaugguuacaag

SEQ ID NO: 1831741 - RNA, 19 nt, Homo sapiens
  misc_RNA (1)...(19): siRNA sense strand
caaaagaacaugguuacaa

SEQ ID NO: 1831742 - RNA, 19 nt, Homo sapiens
  misc_RNA (1)...(19): siRNA sense strand
uucauugaguccauuugua

SEQ ID NO: 1831743 - RNA, 19 nt, Homo sapiens
  misc_RNA (1)...(19): siRNA sense strand
uaaauaucgcuaccgcuau

SEQ ID NO: 1831744 - RNA, 19 nt, Homo sapiens
  misc_RNA (1)...(19): siRNA sense strand
uggaaggcccugaaugaga

SEQ ID NO: 1831745 - RNA, 19 nt, Homo sapiens
  misc_RNA (1)...(19): siRNA sense strand
acaaagcucacacgauauc

SEQ ID NO: 1831746 - RNA, 19 nt, Homo sapiens
  misc_RNA (1)...(19): siRNA sense strand
uguccuacaucaagaucuu

SEQ ID NO: 1831747 - RNA, 19 nt, Homo sapiens
  misc_RNA (1)...(19): siRNA sense strand
gaaggucauguugcgguuu

SEQ ID NO: 1831748 - RNA, 19 nt, Homo sapiens
  misc_RNA (1)...(19): siRNA sense strand
caagggagaguccuaugag

SEQ ID NO: 1831749 - RNA, 19 nt, Homo sapiens
  misc_RNA (1)...(19): siRNA sense strand
aguggaaggcccugaauga

SEQ ID NO: 1831750 - RNA, 19 nt, Homo sapiens
  misc_RNA (1)...(19): siRNA sense strand
gagaauguacuggugaucu

SEQ ID NO: 1831751 - RNA, 19 nt, Homo sapiens
  misc_RNA (1)...(19): siRNA sense strand
caacacuaccagagaacga

SEQ ID NO: 1831752 - RNA, 19 nt, Homo sapiens
  misc_RNA (1)...(19): siRNA sense strand
gaggaagcccuggauacug

SEQ ID NO: 1831753 - RNA, 19 nt, Homo sapiens
  misc_RNA (1)...(19): siRNA sense strand
uagaacgacaggagaaugu

SEQ ID NO: 1831754 - RNA, 19 nt, Homo sapiens
  misc_RNA (1)...(19): siRNA sense strand
gcaguggaaggcccugaau

SEQ ID NO: 1831755 - RNA, 19 nt, Homo sapiens
  misc_RNA (1)...(19): siRNA sense strand
caccuguccuacaucaaga

SEQ ID NO: 1831756 - RNA, 19 nt, Homo sapiens
  misc_RNA (1)...(19): siRNA sense strand
uggauaggaacaccaacua

SEQ ID NO: 1831757 - RNA, 19 nt, Homo sapiens
  misc_RNA (1)...(19): siRNA sense strand
ucagaugagcuuccauauc

SEQ ID NO: 1831758 - RNA, 19 nt, Homo sapiens
  misc_RNA (1)...(19): siRNA sense strand
acagucuacuaccucauga

SEQ ID NO: 1831759 - RNA, 19 nt, Homo sapiens
  misc_RNA (1)...(19): siRNA sense strand
ugaaccgagugcaggauca

SEQ ID NO: 1831760 - RNA, 19 nt, Homo sapiens
  misc_RNA (1)...(19): siRNA sense strand
ccaccuguccuacaucaag

SEQ ID NO: 1831761 - RNA, 19 nt, Homo sapiens
  misc_RNA (1)...(19): siRNA sense strand
gagaauugagugcuaugag

SEQ ID NO: 1831762 - RNA, 19 nt, Homo sapiens
  misc_RNA (1)...(19): siRNA sense strand
guucuggaagacuuucuaa

SEQ ID NO: 1831763 - RNA, 19 nt, Homo sapiens
  misc_RNA (1)...(19): siRNA sense strand
ugucccagcccacuacuga

SEQ ID NO: 1831764 - RNA, 19 nt, Homo sapiens
  misc_RNA (1)...(19): siRNA sense strand
caucaaagcugcccaauga

SEQ ID NO: 1831765 - RNA, 19 nt, Homo sapiens
  misc_RNA (1)...(19): siRNA sense strand
ccaaugaucugcuugauuu

SEQ ID NO: 1831766 - RNA, 19 nt, Homo sapiens
  misc_RNA (1)...(19): siRNA sense strand
gcaaugaacuuacaaaugg

SEQ ID NO: 1831767 - RNA, 19 nt, Homo sapiens
  misc_RNA (1)...(19): siRNA sense strand
gcagacaguuuauuugaaa

SEQ ID NO: 1831768 - RNA, 19 nt, Homo sapiens
  misc_RNA (1)...(19): siRNA sense strand
caaaugagaugaaugugaa

SEQ ID NO: 1831769 - RNA, 19 nt, Homo sapiens
  misc_RNA (1)...(19): siRNA sense strand
caacaggcaugauaggaua

SEQ ID NO: 1831770 - RNA, 19 nt, Homo sapiens
  misc_RNA (1)...(19): siRNA sense strand
ugacuuggauucaucuuua

SEQ ID NO: 1831771 - RNA, 19 nt, Homo sapiens
  misc_RNA (1)...(19): siRNA sense strand
guuaguaucugaugacuug

SEQ ID NO: 1831772 - RNA, 19 nt, Homo sapiens
  misc_RNA (1)...(19): siRNA sense strand
gagcacagauacaguuuau

SEQ ID NO: 1831773 - RNA, 19 nt, Homo sapiens
  misc_RNA (1)...(19): siRNA sense strand
guucaaagaugccauuaga

SEQ ID NO: 1831774 - RNA, 19 nt, Homo sapiens
  misc_RNA (1)...(19): siRNA sense strand
caaccaaccuuaauauaca

SEQ ID NO: 1831775 - RNA, 19 nt, Homo sapiens
  misc_RNA (1)...(19): siRNA sense strand
ccucauaccucuuuaacaa

SEQ ID NO: 1831776 - RNA, 19 nt, Homo sapiens
  misc_RNA (1)...(19): siRNA sense strand
gaaauggaaccacuaagaa

SEQ ID NO: 1831777 - RNA, 19 nt, Homo sapiens
  misc_RNA (1)...(19): siRNA sense strand
gcaaggauaugacaugucu

SEQ ID NO: 1831778 - RNA, 19 nt, Homo sapiens
  misc_RNA (1)...(19): siRNA sense strand
uaacuaggaugacaagaau

SEQ ID NO: 1831779 - RNA, 19 nt, Homo sapiens
  misc_RNA (1)...(19): siRNA sense strand
gcacaaaugagaugaaugu

SEQ ID NO: 1831780 - RNA, 19 nt, Homo sapiens
  misc_RNA (1)...(19): siRNA sense strand
ggaaauggaaccacuaaga

SEQ ID NO: 1831781 - RNA, 19 nt, Homo sapiens
  misc_RNA (1)...(19): siRNA sense strand
gaaucuguguuuggaaaua

SEQ ID NO: 1831782 - RNA, 19 nt, Homo sapiens
  misc_RNA (1)...(19): siRNA sense strand
gcacagauacaguuuaugu

SEQ ID NO: 1831783 - RNA, 19 nt, Homo sapiens
  misc_RNA (1)...(19): siRNA sense strand
gaaccuuccuguugccaaa

SEQ ID NO: 1831784 - RNA, 19 nt, Homo sapiens
  misc_RNA (1)...(19): siRNA sense strand
caacuacacuuuccaaugc

SEQ ID NO: 1831785 - RNA, 19 nt, Homo sapiens
  misc_RNA (1)...(19): siRNA sense strand
gcaccuggacuacuuaauu

SEQ ID NO: 1831786 - RNA, 19 nt, Homo sapiens
  misc_RNA (1)...(19): siRNA sense strand
ggaguuaugagaacaauga

SEQ ID NO: 1831787 - RNA, 19 nt, Homo sapiens
  misc_RNA (1)...(19): siRNA sense strand
guaauggccuauccugcua

SEQ ID NO: 1831788 - RNA, 19 nt, Homo sapiens
  misc_RNA (1)...(19): siRNA sense strand
ucaaauggaugcacuucuu

SEQ ID NO: 1831789 - RNA, 19 nt, Homo sapiens
  misc_RNA (1)...(19): siRNA sense strand
gauguucaccuuuccauuu

SEQ ID NO: 1831790 - RNA, 19 nt, Homo sapiens
  misc_RNA (1)...(19): siRNA sense strand
ugacagaggugauauacca

SEQ ID NO: 1831791 - RNA, 19 nt, Homo sapiens
  misc_RNA (1)...(19): siRNA sense strand
ugacaagaaucucagaguu

SEQ ID NO: 1831792 - RNA, 19 nt, Homo sapiens
  misc_RNA (1)...(19): siRNA sense strand
gcaaguuaguaucugauga

SEQ ID NO: 1831793 - RNA, 19 nt, Homo sapiens
  misc_RNA (1)...(19): siRNA sense strand
cauuacaacucaucauuug

SEQ ID NO: 1831794 - RNA, 19 nt, Homo sapiens
  misc_RNA (1)...(19): siRNA sense strand
gcagucuucuugaugcuuu

SEQ ID NO: 1831795 - RNA, 19 nt, Homo sapiens
  misc_RNA (1)...(19): siRNA sense strand
uggaugcacuucuugauuu

SEQ ID NO: 1831796 - RNA, 19 nt, Homo sapiens
  misc_RNA (1)...(19): siRNA sense strand
ucaaaucucucauuacaac

SEQ ID NO: 1831797 - RNA, 19 nt, Homo sapiens
  misc_RNA (1)...(19): siRNA sense strand
gaaaccucauaccucuuua

SEQ ID NO: 1831798 - RNA, 19 nt, Homo sapiens
  misc_RNA (1)...(19): siRNA sense strand
ggaauugacagaggugaua

SEQ ID NO: 1831799 - RNA, 19 nt, Homo sapiens
  misc_RNA (1)...(19): siRNA sense strand
gaaaugagcguuuuauuca

SEQ ID NO: 1831800 - RNA, 19 nt, Homo sapiens
  misc_RNA (1)...(19): siRNA sense strand
gaagaacaggcacguuuga

SEQ ID NO: 1831801 - RNA, 19 nt, Homo sapiens
  misc_RNA (1)...(19): siRNA sense strand
gaacaggcacguuugaaag

SEQ ID NO: 1831802 - RNA, 19 nt, Homo sapiens
  misc_RNA (1)...(19): siRNA sense strand
cagcuggccuuaauguuga

SEQ ID NO: 1831803 - RNA, 19 nt, Homo sapiens
  misc_RNA (1)...(19): siRNA sense strand
ugaaauguuuguuggauuc

SEQ ID NO: 1831804 - RNA, 19 nt, Homo sapiens
  misc_RNA (1)...(19): siRNA sense strand
cuucaaaucucucauuaca

SEQ ID NO: 1831805 - RNA, 19 nt, Homo sapiens
  misc_RNA (1)...(19): siRNA sense strand
ccacuaagaaugauguaaa

SEQ ID NO: 1831806 - RNA, 19 nt, Homo sapiens
  misc_RNA (1)...(19): siRNA sense strand
ugagaacaaugaacacaga

SEQ ID NO: 1831807 - RNA, 19 nt, Homo sapiens
  misc_RNA (1)...(19): siRNA sense strand
acagacaaguugcauuuga

SEQ ID NO: 1831808 - RNA, 19 nt, Homo sapiens
  misc_RNA (1)...(19): siRNA sense strand
gcgguauaguagauauuua

SEQ ID NO: 1831809 - RNA, 19 nt, Homo sapiens
  misc_RNA (1)...(19): siRNA sense strand
gcaaccaaccuuaauauac

SEQ ID NO: 1831810 - RNA, 19 nt, Homo sapiens
  misc_RNA (1)...(19): siRNA sense strand
gcaacuacacuuuccaaug

SEQ ID NO: 1831811 - RNA, 19 nt, Homo sapiens
  misc_RNA (1)...(19): siRNA sense strand
aauaaaugcugccuucaug

SEQ ID NO: 1831812 - RNA, 19 nt, Homo sapiens
  misc_RNA (1)...(19): siRNA sense strand
uaaauccuuuccucacaaa

SEQ ID NO: 1831813 - RNA, 19 nt, Homo sapiens
  misc_RNA (1)...(19): siRNA sense strand
uuaauucagugcacaaaug

SEQ ID NO: 1831814 - RNA, 19 nt, Homo sapiens
  misc_RNA (1)...(19): siRNA sense strand
gcaggcagcauuagaggaa

SEQ ID NO: 1831815 - RNA, 19 nt, Homo sapiens
  misc_RNA (1)...(19): siRNA sense strand
ggcaagcacuggucuaucu

SEQ ID NO: 1831816 - RNA, 19 nt, Homo sapiens
  misc_RNA (1)...(19): siRNA sense strand
caccagccauugacauauu

SEQ ID NO: 1831817 - RNA, 19 nt, Homo sapiens
  misc_RNA (1)...(19): siRNA sense strand
caugauaggauauggaauu

SEQ ID NO: 1831818 - RNA, 19 nt, Homo sapiens
  misc_RNA (1)...(19): siRNA sense strand
guauuuggcuucaagaaac

SEQ ID NO: 1831819 - RNA, 19 nt, Homo sapiens
  misc_RNA (1)...(19): siRNA sense strand
gaacuagguggacuucuca

SEQ ID NO: 1831820 - RNA, 19 nt, Homo sapiens
  misc_RNA (1)...(19): siRNA sense strand
ggaagaacaggcacguuug

SEQ ID NO: 1831821 - RNA, 19 nt, Homo sapiens
  misc_RNA (1)...(19): siRNA sense strand
aaaguggauugcaaggaua

SEQ ID NO: 1831822 - RNA, 19 nt, Homo sapiens
  misc_RNA (1)...(19): siRNA sense strand
ggcagacaguuuauuugaa

SEQ ID NO: 1831823 - RNA, 19 nt, Homo sapiens
  misc_RNA (1)...(19): siRNA sense strand
ggacaccuacucaugaaau

SEQ ID NO: 1831824 - RNA, 19 nt, Homo sapiens
  misc_RNA (1)...(19): siRNA sense strand
gucaacugcuucucaggua

SEQ ID NO: 1831825 - RNA, 19 nt, Homo sapiens
  misc_RNA (1)...(19): siRNA sense strand
caaguugcauuugauuuca

SEQ ID NO: 1831826 - RNA, 19 nt, Homo sapiens
  misc_RNA (1)...(19): siRNA sense strand
ucucagaguuccucaaagu

SEQ ID NO: 1831827 - RNA, 19 nt, Homo sapiens
  misc_RNA (1)...(19): siRNA sense strand
caacaguggccucucagaa

SEQ ID NO: 1831828 - RNA, 19 nt, Homo sapiens
  misc_RNA (1)...(19): siRNA sense strand
gccuuaauguugacuuuga

SEQ ID NO: 1831829 - RNA, 19 nt, Homo sapiens
  misc_RNA (1)...(19): siRNA sense strand
gucuucaaaucucucauua

SEQ ID NO: 1831830 - RNA, 19 nt, Homo sapiens
  misc_RNA (1)...(19): siRNA sense strand
ccacaaaugggaaguguuc

SEQ ID NO: 1831831 - RNA, 19 nt, Homo sapiens
  misc_RNA (1)...(19): siRNA sense strand
gcaaagaaaccucauaccu

SEQ ID NO: 1831832 - RNA, 19 nt, Homo sapiens
  misc_RNA (1)...(19): siRNA sense strand
acaguuggcagacaguuua

SEQ ID NO: 1831833 - RNA, 19 nt, Homo sapiens
  misc_RNA (1)...(19): siRNA sense strand
uuuauuaggcgguauagua

SEQ ID NO: 1831834 - RNA, 19 nt, Homo sapiens
  misc_RNA (1)...(19): siRNA sense strand
caccuggacuacuuaauuc

SEQ ID NO: 1831835 - RNA, 19 nt, Homo sapiens
  misc_RNA (1)...(19): siRNA sense strand
ggaaaagcaggcagcauua

SEQ ID NO: 1831836 - RNA, 19 nt, Homo sapiens
  misc_RNA (1)...(19): siRNA sense strand
gagaggggcugauggaguu

SEQ ID NO: 1831837 - RNA, 19 nt, Homo sapiens
  misc_RNA (1)...(19): siRNA sense strand
ggagcacagauacaguuua

SEQ ID NO: 1831838 - RNA, 19 nt, Homo sapiens
  misc_RNA (1)...(19): siRNA sense strand
auacagacaaguugcauuu

SEQ ID NO: 1831839 - RNA, 19 nt, Homo sapiens
  misc_RNA (1)...(19): siRNA sense strand
gaaccacuaagaaugaugu

SEQ ID NO: 1831840 - RNA, 19 nt, Homo sapiens
  misc_RNA (1)...(19): siRNA sense strand
ccaccuagcaaguuaguau

SEQ ID NO: 1831841 - RNA, 19 nt, Homo sapiens
  misc_RNA (1)...(19): siRNA sense strand
guaguugggugguggucuu

SEQ ID NO: 1831842 - RNA, 19 nt, Homo sapiens
  misc_RNA (1)...(19): siRNA sense strand
gacaagaaucucagaguuc

SEQ ID NO: 1831843 - RNA, 19 nt, Homo sapiens
  misc_RNA (1)...(19): siRNA sense strand
gaaccaaugcaaagaaggu

SEQ ID NO: 1831844 - RNA, 19 nt, Homo sapiens
  misc_RNA (1)...(19): siRNA sense strand
gauguaaauuggagucaac

SEQ ID NO: 1831845 - RNA, 19 nt, Homo sapiens
  misc_RNA (1)...(19): siRNA sense strand
gaaccagaaccuuccuguu

SEQ ID NO: 1831846 - RNA, 19 nt, Homo sapiens
  misc_RNA (1)...(19): siRNA sense strand
agaaaccucauaccucuuu

SEQ ID NO: 1831847 - RNA, 19 nt, Homo sapiens
  misc_RNA (1)...(19): siRNA sense strand
gcagagcaaguuggaauug

SEQ ID NO: 1831848 - RNA, 19 nt, Homo sapiens
  misc_RNA (1)...(19): siRNA sense strand
ggaaaugagcguuuuauuc

SEQ ID NO: 1831849 - RNA, 19 nt, Homo sapiens
  misc_RNA (1)...(19): siRNA sense strand
cagccagccugucaugaga

SEQ ID NO: 1831850 - RNA, 19 nt, Homo sapiens
  misc_RNA (1)...(19): siRNA sense strand
gacgcaaccaaccuuaaua

SEQ ID NO: 1831851 - RNA, 19 nt, Homo sapiens
  misc_RNA (1)...(19): siRNA sense strand
cauccuaugucaacugcuu

SEQ ID NO: 1831852 - RNA, 19 nt, Homo sapiens
  misc_RNA (1)...(19): siRNA sense strand
ugaccaaaguggaugaaag

SEQ ID NO: 1831853 - RNA, 19 nt, Homo sapiens
  misc_RNA (1)...(19): siRNA sense strand
cagagcaaguuggaauuga

SEQ ID NO: 1831854 - RNA, 19 nt, Homo sapiens
  misc_RNA (1)...(19): siRNA sense strand
ugacaucuauaagaaguuc

SEQ ID NO: 1831855 - RNA, 19 nt, Homo sapiens
  misc_RNA (1)...(19): siRNA sense strand
gaacaaugaacacagaaaa

SEQ ID NO: 1831856 - RNA, 19 nt, Homo sapiens
  misc_RNA (1)...(19): siRNA sense strand
ggauaaaaguggauugcaa

SEQ ID NO: 1831857 - RNA, 19 nt, Homo sapiens
  misc_RNA (1)...(19): siRNA sense strand
cuagcaaguuaguaucuga

SEQ ID NO: 1831858 - RNA, 19 nt, Homo sapiens
  misc_RNA (1)...(19): siRNA sense strand
caugaaauguuuguuggau

SEQ ID NO: 1831859 - RNA, 19 nt, Homo sapiens
  misc_RNA (1)...(19): siRNA sense strand
gaacagcgccuaaaagaac

SEQ ID NO: 1831860 - RNA, 19 nt, Homo sapiens
  misc_RNA (1)...(19): siRNA sense strand
gaaggucuugacaucuaua

SEQ ID NO: 1831861 - RNA, 19 nt, Homo sapiens
  misc_RNA (1)...(19): siRNA sense strand
cagacaaguugcauuugau

SEQ ID NO: 1831862 - RNA, 19 nt, Homo sapiens
  misc_RNA (1)...(19): siRNA sense strand
acucccaccuagcaaguua

SEQ ID NO: 1831863 - RNA, 19 nt, Homo sapiens
  misc_RNA (1)...(19): siRNA sense strand
ggaauuccuccacaaaugg

SEQ ID NO: 1831864 - RNA, 19 nt, Homo sapiens
  misc_RNA (1)...(19): siRNA sense strand
gcauauagcuggagcauac

SEQ ID NO: 1831865 - RNA, 19 nt, Homo sapiens
  misc_RNA (1)...(19): siRNA sense strand
caagacugccuuucuauuu

SEQ ID NO: 1831866 - RNA, 19 nt, Homo sapiens
  misc_RNA (1)...(19): siRNA sense strand
gagcauaccucuuaaaccu

SEQ ID NO: 1831867 - RNA, 19 nt, Homo sapiens
  misc_RNA (1)...(19): siRNA sense strand
aagacugccuuucuauuua

SEQ ID NO: 1831868 - RNA, 19 nt, Homo sapiens
  misc_RNA (1)...(19): siRNA sense strand
aaagggaacuucaacacuu

SEQ ID NO: 1831869 - RNA, 19 nt, Homo sapiens
  misc_RNA (1)...(19): siRNA sense strand
gcacgcacuuccugagcua

SEQ ID NO: 1831870 - RNA, 19 nt, Homo sapiens
  misc_RNA (1)...(19): siRNA sense strand
ggaaugagcagagugcaaa

SEQ ID NO: 1831871 - RNA, 19 nt, Homo sapiens
  misc_RNA (1)...(19): siRNA sense strand
caagaagccucugggaaga

SEQ ID NO: 1831872 - RNA, 19 nt, Homo sapiens
  misc_RNA (1)...(19): siRNA sense strand
ccacacggcuagacucuuc

SEQ ID NO: 1831873 - RNA, 19 nt, Homo sapiens
  misc_RNA (1)...(19): siRNA sense strand
gaaacucaagucucccuaa

SEQ ID NO: 1831874 - RNA, 19 nt, Homo sapiens
  misc_RNA (1)...(19): siRNA sense strand
ggaaggauacuuaacaaac

SEQ ID NO: 1831875 - RNA, 19 nt, Homo sapiens
  misc_RNA (1)...(19): siRNA sense strand
gaaggauacuuaacaaacc

SEQ ID NO: 1831876 - RNA, 19 nt, Homo sapiens
  misc_RNA (1)...(19): siRNA sense strand
cuucaucucuccaaaguca

SEQ ID NO: 1831877 - RNA, 19 nt, Homo sapiens
  misc_RNA (1)...(19): siRNA sense strand
ggugacggaaggauacuua

SEQ ID NO: 1831878 - RNA, 19 nt, Homo sapiens
  misc_RNA (1)...(19): siRNA sense strand
aaacacagcaaguucaaug

SEQ ID NO: 1831879 - RNA, 19 nt, Homo sapiens
  misc_RNA (1)...(19): siRNA sense strand
gcaggaggacgaaaaguua

SEQ ID NO: 1831880 - RNA, 19 nt, Homo sapiens
  misc_RNA (1)...(19): siRNA sense strand
ggcauuugaucccgagaaa

SEQ ID NO: 1831881 - RNA, 19 nt, Homo sapiens
  misc_RNA (1)...(19): siRNA sense strand
caucuugcaugcugugguu

SEQ ID NO: 1831882 - RNA, 19 nt, Homo sapiens
  misc_RNA (1)...(19): siRNA sense strand
gccuguaccuggugcauau

SEQ ID NO: 1831883 - RNA, 19 nt, Homo sapiens
  misc_RNA (1)...(19): siRNA sense strand
agacugccuuucuauuuau

SEQ ID NO: 1831884 - RNA, 19 nt, Homo sapiens
  misc_RNA (1)...(19): siRNA sense strand
aagggaacuucaacacuuu

SEQ ID NO: 1831885 - RNA, 19 nt, Homo sapiens
  misc_RNA (1)...(19): siRNA sense strand
gaaagggaacuucaacacu

SEQ ID NO: 1831886 - RNA, 19 nt, Homo sapiens
  misc_RNA (1)...(19): siRNA sense strand
gcuggagcauaccucuuaa

SEQ ID NO: 1831887 - RNA, 19 nt, Homo sapiens
  misc_RNA (1)...(19): siRNA sense strand
ucaagagggaaucugguua

SEQ ID NO: 1831888 - RNA, 19 nt, Homo sapiens
  misc_RNA (1)...(19): siRNA sense strand
ccaagacugccuuucuauu

SEQ ID NO: 1831889 - RNA, 19 nt, Homo sapiens
  misc_RNA (1)...(19): siRNA sense strand
ggacuggcucgcauggaaa

SEQ ID NO: 1831890 - RNA, 19 nt, Homo sapiens
  misc_RNA (1)...(19): siRNA sense strand
agccaagacugccuuucua

SEQ ID NO: 1831891 - RNA, 19 nt, Homo sapiens
  misc_RNA (1)...(19): siRNA sense strand
ccacaaccaugcggacauc

SEQ ID NO: 1831892 - RNA, 19 nt, Homo sapiens
  misc_RNA (1)...(19): siRNA sense strand
cgccagcuccaguauauuu

SEQ ID NO: 1831893 - RNA, 19 nt, Homo sapiens
  misc_RNA (1)...(19): siRNA sense strand
cagcuggucgucuuucauu

SEQ ID NO: 1831894 - RNA, 19 nt, Homo sapiens
  misc_RNA (1)...(19): siRNA sense strand
uggacuggcucgcauggaa

SEQ ID NO: 1831895 - RNA, 19 nt, Homo sapiens
  misc_RNA (1)...(19): siRNA sense strand
gacggaaggauacuuaaca

SEQ ID NO: 1831896 - RNA, 19 nt, Homo sapiens
  misc_RNA (1)...(19): siRNA sense strand
gagaaagggaacuucaaca

SEQ ID NO: 1831897 - RNA, 19 nt, Homo sapiens
  misc_RNA (1)...(19): siRNA sense strand
gaaaacaacgagaaacugu

SEQ ID NO: 1831898 - RNA, 19 nt, Homo sapiens
  misc_RNA (1)...(19): siRNA sense strand
gacagcuggucgucuuuca

SEQ ID NO: 1831899 - RNA, 19 nt, Homo sapiens
  misc_RNA (1)...(19): siRNA sense strand
cccgccagcuccaguauau

SEQ ID NO: 1831900 - RNA, 19 nt, Homo sapiens
  misc_RNA (1)...(19): siRNA sense strand
gaccgugcacuaccacuau

SEQ ID NO: 1831901 - RNA, 19 nt, Homo sapiens
  misc_RNA (1)...(19): siRNA sense strand
ggcuucaucucuccaaagu

SEQ ID NO: 1831902 - RNA, 19 nt, Homo sapiens
  misc_RNA (1)...(19): siRNA sense strand
acggaaggauacuuaacaa

SEQ ID NO: 1831903 - RNA, 19 nt, Homo sapiens
  misc_RNA (1)...(19): siRNA sense strand
ucaaacacagcaaguucaa

SEQ ID NO: 1831904 - RNA, 19 nt, Homo sapiens
  misc_RNA (1)...(19): siRNA sense strand
gccaagacugccuuucuau

SEQ ID NO: 1831905 - RNA, 19 nt, Homo sapiens
  misc_RNA (1)...(19): siRNA sense strand
caagagggaaucugguuac

SEQ ID NO: 1831906 - RNA, 19 nt, Homo sapiens
  misc_RNA (1)...(19): siRNA sense strand
ucaucgggcuuauguucga

SEQ ID NO: 1831907 - RNA, 19 nt, Homo sapiens
  misc_RNA (1)...(19): siRNA sense strand
gaagguacggaaggaggaa

SEQ ID NO: 1831908 - RNA, 19 nt, Homo sapiens
  misc_RNA (1)...(19): siRNA sense strand
gacugccuuucuauuuauu

SEQ ID NO: 1831909 - RNA, 19 nt, Homo sapiens
  misc_RNA (1)...(19): siRNA sense strand
cuucaucaccaucaucuug

SEQ ID NO: 1831910 - RNA, 19 nt, Homo sapiens
  misc_RNA (1)...(19): siRNA sense strand
uccaguauauuugccugua

SEQ ID NO: 1831911 - RNA, 19 nt, Homo sapiens
  misc_RNA (1)...(19): siRNA sense strand
cuggacagcuggucgucuu

SEQ ID NO: 1831912 - RNA, 19 nt, Homo sapiens
  misc_RNA (1)...(19): siRNA sense strand
caaucuuguucuacaucuu

SEQ ID NO: 1831913 - RNA, 19 nt, Homo sapiens
  misc_RNA (1)...(19): siRNA sense strand
ccucaucgggcuuauguuc

SEQ ID NO: 1831914 - RNA, 19 nt, Homo sapiens
  misc_RNA (1)...(19): siRNA sense strand
gccaggaguucgucaucca

SEQ ID NO: 1831915 - RNA, 19 nt, Homo sapiens
  misc_RNA (1)...(19): siRNA sense strand
guacggaaggaggaaauuc

SEQ ID NO: 1831916 - RNA, 19 nt, Homo sapiens
  misc_RNA (1)...(19): siRNA sense strand
ggaagacuacccgcaugug

SEQ ID NO: 1831917 - RNA, 19 nt, Homo sapiens
  misc_RNA (1)...(19): siRNA sense strand
gggaagacuacccgcaugu

SEQ ID NO: 1831918 - RNA, 19 nt, Homo sapiens
  misc_RNA (1)...(19): siRNA sense strand
auacuuaacaaacccaaga

SEQ ID NO: 1831919 - RNA, 19 nt, Homo sapiens
  misc_RNA (1)...(19): siRNA sense strand
gcuggucgucuuucauuuc

SEQ ID NO: 1831920 - RNA, 19 nt, Homo sapiens
  misc_RNA (1)...(19): siRNA sense strand
ggacagcuggucgucuuuc

SEQ ID NO: 1831921 - RNA, 19 nt, Homo sapiens
  misc_RNA (1)...(19): siRNA sense strand
cuucuacuuugcagaugaa

SEQ ID NO: 1831922 - RNA, 19 nt, Homo sapiens
  misc_RNA (1)...(19): siRNA sense strand
agcuggagcauaccucuua

SEQ ID NO: 1831923 - RNA, 19 nt, Homo sapiens
  misc_RNA (1)...(19): siRNA sense strand
augcugugguucaggagua

SEQ ID NO: 1831924 - RNA, 19 nt, Homo sapiens
  misc_RNA (1)...(19): siRNA sense strand
cggaaggauacuuaacaaa

SEQ ID NO: 1831925 - RNA, 19 nt, Homo sapiens
  misc_RNA (1)...(19): siRNA sense strand
cuggucgucuuucauuuca

SEQ ID NO: 1831926 - RNA, 19 nt, Homo sapiens
  misc_RNA (1)...(19): siRNA sense strand
gcucauguggcgcuucauc

SEQ ID NO: 1831927 - RNA, 19 nt, Homo sapiens
  misc_RNA (1)...(19): siRNA sense strand
cgagaaagggaacuucaac

SEQ ID NO: 1831928 - RNA, 19 nt, Homo sapiens
  misc_RNA (1)...(19): siRNA sense strand
gugagaccgugcacuacca

SEQ ID NO: 1831929 - RNA, 19 nt, Homo sapiens
  misc_RNA (1)...(19): siRNA sense strand
aaaguuacccgcucuucag

SEQ ID NO: 1831930 - RNA, 19 nt, Homo sapiens
  misc_RNA (1)...(19): siRNA sense strand
cagccaagacugccuuucu

SEQ ID NO: 1831931 - RNA, 19 nt, Homo sapiens
  misc_RNA (1)...(19): siRNA sense strand
cauuugaucccgagaaagg

SEQ ID NO: 1831932 - RNA, 19 nt, Homo sapiens
  misc_RNA (1)...(19): siRNA sense strand
ccaguauauuugccuguac

SEQ ID NO: 1831933 - RNA, 19 nt, Homo sapiens
  misc_RNA (1)...(19): siRNA sense strand
gaacucuacuggcagauug

SEQ ID NO: 1831934 - RNA, 19 nt, Homo sapiens
  misc_RNA (1)...(19): siRNA sense strand
ggaugaguauggacaguuu

SEQ ID NO: 1831935 - RNA, 19 nt, Homo sapiens
  misc_RNA (1)...(19): siRNA sense strand
gcaccucucugcuaacugu

SEQ ID NO: 1831936 - RNA, 19 nt, Homo sapiens
  misc_RNA (1)...(19): siRNA sense strand
cauggaugcugccuacuuu

SEQ ID NO: 1831937 - RNA, 19 nt, Homo sapiens
  misc_RNA (1)...(19): siRNA sense strand
ccuccuauauccucaguaa

SEQ ID NO: 1831938 - RNA, 19 nt, Homo sapiens
  misc_RNA (1)...(19): siRNA sense strand
guacaugagugcucuucug

SEQ ID NO: 1831939 - RNA, 19 nt, Homo sapiens
  misc_RNA (1)...(19): siRNA sense strand
caacaacagaguaggcuuu

SEQ ID NO: 1831940 - RNA, 19 nt, Homo sapiens
  misc_RNA (1)...(19): siRNA sense strand
gaguucggcuugagugaga

SEQ ID NO: 1831941 - RNA, 19 nt, Homo sapiens
  misc_RNA (1)...(19): siRNA sense strand
acaggcaccucucugcuaa

SEQ ID NO: 1831942 - RNA, 19 nt, Homo sapiens
  misc_RNA (1)...(19): siRNA sense strand
gugagaccaugaaggagaa

SEQ ID NO: 1831943 - RNA, 19 nt, Homo sapiens
  misc_RNA (1)...(19): siRNA sense strand
gaugaggccaccacagcua

SEQ ID NO: 1831944 - RNA, 19 nt, Homo sapiens
  misc_RNA (1)...(19): siRNA sense strand
ggaggcagcaguggucaaa

SEQ ID NO: 1831945 - RNA, 19 nt, Homo sapiens
  misc_RNA (1)...(19): siRNA sense strand
guaccaacuucgucuaugc

SEQ ID NO: 1831946 - RNA, 19 nt, Homo sapiens
  misc_RNA (1)...(19): siRNA sense strand
ugaggacccacaaguauga

SEQ ID NO: 1831947 - RNA, 19 nt, Homo sapiens
  misc_RNA (1)...(19): siRNA sense strand
gcuaugacacccugacugu

SEQ ID NO: 1831948 - RNA, 19 nt, Homo sapiens
  misc_RNA (1)...(19): siRNA sense strand
gauuggcauugaagaguuc

SEQ ID NO: 1831949 - RNA, 19 nt, Homo sapiens
  misc_RNA (1)...(19): siRNA sense strand
caucaaugguguggaguuc

SEQ ID NO: 1831950 - RNA, 19 nt, Homo sapiens
  misc_RNA (1)...(19): siRNA sense strand
agaaugagccugguaccaa

SEQ ID NO: 1831951 - RNA, 19 nt, Homo sapiens
  misc_RNA (1)...(19): siRNA sense strand
cgacuugggcaacaacaga

SEQ ID NO: 1831952 - RNA, 19 nt, Homo sapiens
  misc_RNA (1)...(19): siRNA sense strand
ccaggaggaugaguaugga

SEQ ID NO: 1831953 - RNA, 19 nt, Homo sapiens
  misc_RNA (1)...(19): siRNA sense strand
ggaacucuacuggcagauu

SEQ ID NO: 1831954 - RNA, 19 nt, Homo sapiens
  misc_RNA (1)...(19): siRNA sense strand
gguaccaacuucgucuaug

SEQ ID NO: 1831955 - RNA, 19 nt, Homo sapiens
  misc_RNA (1)...(19): siRNA sense strand
gcuuggaaguaccgcuuug

SEQ ID NO: 1831956 - RNA, 19 nt, Homo sapiens
  misc_RNA (1)...(19): siRNA sense strand
aguaugauccugcuuggaa

SEQ ID NO: 1831957 - RNA, 19 nt, Homo sapiens
  misc_RNA (1)...(19): siRNA sense strand
cagcuugaccuucaucauc

SEQ ID NO: 1831958 - RNA, 19 nt, Homo sapiens
  misc_RNA (1)...(19): siRNA sense strand
agauuggcauugaagaguu

SEQ ID NO: 1831959 - RNA, 19 nt, Homo sapiens
  misc_RNA (1)...(19): siRNA sense strand
ccugaggacccacaaguau

SEQ ID NO: 1831960 - RNA, 19 nt, Homo sapiens
  misc_RNA (1)...(19): siRNA sense strand
gaccuucucccugcaguau

SEQ ID NO: 1831961 - RNA, 19 nt, Homo sapiens
  misc_RNA (1)...(19): siRNA sense strand
ccuauauccucaguaacaa

SEQ ID NO: 1831962 - RNA, 19 nt, Homo sapiens
  misc_RNA (1)...(19): siRNA sense strand
gcagauuggcauugaagag

SEQ ID NO: 1831963 - RNA, 19 nt, Homo sapiens
  misc_RNA (1)...(19): siRNA sense strand
ggauggugguggucuuggu

SEQ ID NO: 1831964 - RNA, 19 nt, Homo sapiens
  misc_RNA (1)...(19): siRNA sense strand
ugaccuucaucaucaaugg

SEQ ID NO: 1831965 - RNA, 19 nt, Homo sapiens
  misc_RNA (1)...(19): siRNA sense strand
gaggaugaguauggacagu

SEQ ID NO: 1831966 - RNA, 19 nt, Homo sapiens
  misc_RNA (1)...(19): siRNA sense strand
caccggcuccuccaacuug

SEQ ID NO: 1831967 - RNA, 19 nt, Homo sapiens
  misc_RNA (1)...(19): siRNA sense strand
gggcccaggaggaugagua

SEQ ID NO: 1831968 - RNA, 19 nt, Homo sapiens
  misc_RNA (1)...(19): siRNA sense strand
cacaggcaccucucugcua

SEQ ID NO: 1831969 - RNA, 19 nt, Homo sapiens
  misc_RNA (1)...(19): siRNA sense strand
guggauagcagccuguaca

SEQ ID NO: 1831970 - RNA, 19 nt, Homo sapiens
  misc_RNA (1)...(19): siRNA sense strand
cuucgucuaugcgcaguuu

SEQ ID NO: 1831971 - RNA, 19 nt, Homo sapiens
  misc_RNA (1)...(19): siRNA sense strand
aggcagcaguggucaaagu

SEQ ID NO: 1831972 - RNA, 19 nt, Homo sapiens
  misc_RNA (1)...(19): siRNA sense strand
ccagcgagucguccaccua

SEQ ID NO: 1831973 - RNA, 19 nt, Homo sapiens
  misc_RNA (1)...(19): siRNA sense strand
gacaccggcuccuccaacu

SEQ ID NO: 1831974 - RNA, 19 nt, Homo sapiens
  misc_RNA (1)...(19): siRNA sense strand
ccaccuuccuccuauaucc

SEQ ID NO: 1831975 - RNA, 19 nt, Homo sapiens
  misc_RNA (1)...(19): siRNA sense strand
cugcccagcuugaccuuca

SEQ ID NO: 1831976 - RNA, 19 nt, Homo sapiens
  misc_RNA (1)...(19): siRNA sense strand
ucaaagugccccugaagaa

SEQ ID NO: 1831977 - RNA, 19 nt, Homo sapiens
  misc_RNA (1)...(19): siRNA sense strand
guccuacuauuccgucuac

SEQ ID NO: 1831978 - RNA, 19 nt, Homo sapiens
  misc_RNA (1)...(19): siRNA sense strand
ccaaugggcagaccuucuc

SEQ ID NO: 1831979 - RNA, 19 nt, Homo sapiens
  misc_RNA (1)...(19): siRNA sense strand
acuauuccgucuacgacuu

SEQ ID NO: 1831980 - RNA, 19 nt, Homo sapiens
  misc_RNA (1)...(19): siRNA sense strand
uuccucagguccuacuauu

SEQ ID NO: 1831981 - RNA, 19 nt, Homo sapiens
  misc_RNA (1)...(19): siRNA sense strand
agcuugaccuucaucauca

SEQ ID NO: 1831982 - RNA, 19 nt, Homo sapiens
  misc_RNA (1)...(19): siRNA sense strand
gcaacuggaugaaugauua

SEQ ID NO: 1831983 - RNA, 19 nt, Homo sapiens
  misc_RNA (1)...(19): siRNA sense strand
gcaaacaaccugcgacuua

SEQ ID NO: 1831984 - RNA, 19 nt, Homo sapiens
  misc_RNA (1)...(19): siRNA sense strand
ggacauacuuuauucuuga

SEQ ID NO: 1831985 - RNA, 19 nt, Homo sapiens
  misc_RNA (1)...(19): siRNA sense strand
ugaaguugcucguuauuua

SEQ ID NO: 1831986 - RNA, 19 nt, Homo sapiens
  misc_RNA (1)...(19): siRNA sense strand
gaaggagaccucaagcuua

SEQ ID NO: 1831987 - RNA, 19 nt, Homo sapiens
  misc_RNA (1)...(19): siRNA sense strand
ucacucagcugauagauga

SEQ ID NO: 1831988 - RNA, 19 nt, Homo sapiens
  misc_RNA (1)...(19): siRNA sense strand
gaacagaccucuccuaccu

SEQ ID NO: 1831989 - RNA, 19 nt, Homo sapiens
  misc_RNA (1)...(19): siRNA sense strand
ggucugaucauacaaguua

SEQ ID NO: 1831990 - RNA, 19 nt, Homo sapiens
  misc_RNA (1)...(19): siRNA sense strand
cagaaaguauggaaaguuu

SEQ ID NO: 1831991 - RNA, 19 nt, Homo sapiens
  misc_RNA (1)...(19): siRNA sense strand
ccaaucgucuguacuauga

SEQ ID NO: 1831992 - RNA, 19 nt, Homo sapiens
  misc_RNA (1)...(19): siRNA sense strand
cauugaagcugcauauaaa

SEQ ID NO: 1831993 - RNA, 19 nt, Homo sapiens
  misc_RNA (1)...(19): siRNA sense strand
gugaugaaguugcucguua

SEQ ID NO: 1831994 - RNA, 19 nt, Homo sapiens
  misc_RNA (1)...(19): siRNA sense strand
gaagucaauuucauacaga

SEQ ID NO: 1831995 - RNA, 19 nt, Homo sapiens
  misc_RNA (1)...(19): siRNA sense strand
ugaagaaucuccugcauca

SEQ ID NO: 1831996 - RNA, 19 nt, Homo sapiens
  misc_RNA (1)...(19): siRNA sense strand
caaacaaccugcgacuuaa

SEQ ID NO: 1831997 - RNA, 19 nt, Homo sapiens
  misc_RNA (1)...(19): siRNA sense strand
uaaauucucuguucaugug

SEQ ID NO: 1831998 - RNA, 19 nt, Homo sapiens
  misc_RNA (1)...(19): siRNA sense strand
ccagaaacauuugacagua

SEQ ID NO: 1831999 - RNA, 19 nt, Homo sapiens
  misc_RNA (1)...(19): siRNA sense strand
gaauuggucugaucauaca

SEQ ID NO: 1832000 - RNA, 19 nt, Homo sapiens
  misc_RNA (1)...(19): siRNA sense strand
caacuaugauuaccuggaa

SEQ ID NO: 1832001 - RNA, 19 nt, Homo sapiens
  misc_RNA (1)...(19): siRNA sense strand
gaucagcagucaucuaaag

SEQ ID NO: 1832002 - RNA, 19 nt, Homo sapiens
  misc_RNA (1)...(19): siRNA sense strand
gaacggagugcuacaguga

SEQ ID NO: 1832003 - RNA, 19 nt, Homo sapiens
  misc_RNA (1)...(19): siRNA sense strand
ggcaaaggccuaugaauug

SEQ ID NO: 1832004 - RNA, 19 nt, Homo sapiens
  misc_RNA (1)...(19): siRNA sense strand
ccucuuugcugaaauguuu

SEQ ID NO: 1832005 - RNA, 19 nt, Homo sapiens
  misc_RNA (1)...(19): siRNA sense strand
caagggaucucagaguuga

SEQ ID NO: 1832006 - RNA, 19 nt, Homo sapiens
  misc_RNA (1)...(19): siRNA sense strand
agaaauacaucuuccuaga

SEQ ID NO: 1832007 - RNA, 19 nt, Homo sapiens
  misc_RNA (1)...(19): siRNA sense strand
ucaaacagguaaauuguca

SEQ ID NO: 1832008 - RNA, 19 nt, Homo sapiens
  misc_RNA (1)...(19): siRNA sense strand
gaagauggaacaagcuuga

SEQ ID NO: 1832009 - RNA, 19 nt, Homo sapiens
  misc_RNA (1)...(19): siRNA sense strand
ccaaggaacugcauguaca

SEQ ID NO: 1832010 - RNA, 19 nt, Homo sapiens
  misc_RNA (1)...(19): siRNA sense strand
gcuggcagauauugaaauu

SEQ ID NO: 1832011 - RNA, 19 nt, Homo sapiens
  misc_RNA (1)...(19): siRNA sense strand
aaauacaucuuccuagaga

SEQ ID NO: 1832012 - RNA, 19 nt, Homo sapiens
  misc_RNA (1)...(19): siRNA sense strand
ggaaauugccucacaugug

SEQ ID NO: 1832013 - RNA, 19 nt, Homo sapiens
  misc_RNA (1)...(19): siRNA sense strand
guucaagucuccauucuag

SEQ ID NO: 1832014 - RNA, 19 nt, Homo sapiens
  misc_RNA (1)...(19): siRNA sense strand
gagauaauguguacagcau

SEQ ID NO: 1832015 - RNA, 19 nt, Homo sapiens
  misc_RNA (1)...(19): siRNA sense strand
ggaacugcauguacagaau

SEQ ID NO: 1832016 - RNA, 19 nt, Homo sapiens
  misc_RNA (1)...(19): siRNA sense strand
ggagaccauugcugaggua

SEQ ID NO: 1832017 - RNA, 19 nt, Homo sapiens
  misc_RNA (1)...(19): siRNA sense strand
cagggucgaugaagaauau

SEQ ID NO: 1832018 - RNA, 19 nt, Homo sapiens
  misc_RNA (1)...(19): siRNA sense strand
gagagucagucaccuggaa

SEQ ID NO: 1832019 - RNA, 19 nt, Homo sapiens
  misc_RNA (1)...(19): siRNA sense strand
uguccuggcugaugaagua

SEQ ID NO: 1832020 - RNA, 19 nt, Homo sapiens
  misc_RNA (1)...(19): siRNA sense strand
auacauuucugggaucuua

SEQ ID NO: 1832021 - RNA, 19 nt, Homo sapiens
  misc_RNA (1)...(19): siRNA sense strand
ggccugauccgauacauuu

SEQ ID NO: 1832022 - RNA, 19 nt, Homo sapiens
  misc_RNA (1)...(19): siRNA sense strand
ggacgacccuacagacaca

SEQ ID NO: 1832023 - RNA, 19 nt, Homo sapiens
  misc_RNA (1)...(19): siRNA sense strand
ucagacagguggauaaagu

SEQ ID NO: 1832024 - RNA, 19 nt, Homo sapiens
  misc_RNA (1)...(19): siRNA sense strand
gaauuuacguggagaccau

SEQ ID NO: 1832025 - RNA, 19 nt, Homo sapiens
  misc_RNA (1)...(19): siRNA sense strand
gaagcccgauguugugguu

SEQ ID NO: 1832026 - RNA, 19 nt, Homo sapiens
  misc_RNA (1)...(19): siRNA sense strand
gcaaaggccuaugaauugg

SEQ ID NO: 1832027 - RNA, 19 nt, Homo sapiens
  misc_RNA (1)...(19): siRNA sense strand
ucuacgagauggauauaaa

SEQ ID NO: 1832028 - RNA, 19 nt, Homo sapiens
  misc_RNA (1)...(19): siRNA sense strand
cacaggaaauaaugguaua

SEQ ID NO: 1832029 - RNA, 19 nt, Homo sapiens
  misc_RNA (1)...(19): siRNA sense strand
aggguaagcuguacaguga

SEQ ID NO: 1832030 - RNA, 19 nt, Homo sapiens
  misc_RNA (1)...(19): siRNA sense strand
cagccuagaugaagucaau

SEQ ID NO: 1832031 - RNA, 19 nt, Homo sapiens
  misc_RNA (1)...(19): siRNA sense strand
ucuguacucuucuguauga

SEQ ID NO: 1832032 - RNA, 19 nt, Homo sapiens
  misc_RNA (1)...(19): siRNA sense strand
caucuguacucuucuguau

SEQ ID NO: 1832033 - RNA, 19 nt, Homo sapiens
  misc_RNA (1)...(19): siRNA sense strand
guagaaauacaucuuccua

SEQ ID NO: 1832034 - RNA, 19 nt, Homo sapiens
  misc_RNA (1)...(19): siRNA sense strand
ugccagagcuguacagugu

SEQ ID NO: 1832035 - RNA, 19 nt, Homo sapiens
  misc_RNA (1)...(19): siRNA sense strand
ucacggacuuucuguugaa

SEQ ID NO: 1832036 - RNA, 19 nt, Homo sapiens
  misc_RNA (1)...(19): siRNA sense strand
gauaaagcagguggaauuu

SEQ ID NO: 1832037 - RNA, 19 nt, Homo sapiens
  misc_RNA (1)...(19): siRNA sense strand
gauaauguguacagcaucu

SEQ ID NO: 1832038 - RNA, 19 nt, Homo sapiens
  misc_RNA (1)...(19): siRNA sense strand
acauguaucuuccuacgaa

SEQ ID NO: 1832039 - RNA, 19 nt, Homo sapiens
  misc_RNA (1)...(19): siRNA sense strand
guuccaagcugcugugcaa

SEQ ID NO: 1832040 - RNA, 19 nt, Homo sapiens
  misc_RNA (1)...(19): siRNA sense strand
gcuguacagugaagauuau

SEQ ID NO: 1832041 - RNA, 19 nt, Homo sapiens
  misc_RNA (1)...(19): siRNA sense strand
cagaagaaaucaagaccau

SEQ ID NO: 1832042 - RNA, 19 nt, Homo sapiens
  misc_RNA (1)...(19): siRNA sense strand
gaugaagaauaucagaauc

SEQ ID NO: 1832043 - RNA, 19 nt, Homo sapiens
  misc_RNA (1)...(19): siRNA sense strand
uacagaaccuuguguuuua

SEQ ID NO: 1832044 - RNA, 19 nt, Homo sapiens
  misc_RNA (1)...(19): siRNA sense strand
ccaaugacuuguuccuuca

SEQ ID NO: 1832045 - RNA, 19 nt, Homo sapiens
  misc_RNA (1)...(19): siRNA sense strand
ggaacacugaauuguauaa

SEQ ID NO: 1832046 - RNA, 19 nt, Homo sapiens
  misc_RNA (1)...(19): siRNA sense strand
gccagucuauccuaaauuc

SEQ ID NO: 1832047 - RNA, 19 nt, Homo sapiens
  misc_RNA (1)...(19): siRNA sense strand
gaaaggugggccucaauca

SEQ ID NO: 1832048 - RNA, 19 nt, Homo sapiens
  misc_RNA (1)...(19): siRNA sense strand
ggaauuucguagacuguca

SEQ ID NO: 1832049 - RNA, 19 nt, Homo sapiens
  misc_RNA (1)...(19): siRNA sense strand
gcauuucaauccuuacaca

SEQ ID NO: 1832050 - RNA, 19 nt, Homo sapiens
  misc_RNA (1)...(19): siRNA sense strand
guucacauguaucuuccua

SEQ ID NO: 1832051 - RNA, 19 nt, Homo sapiens
  misc_RNA (1)...(19): siRNA sense strand
ccaccuacgugcaggaguu

SEQ ID NO: 1832052 - RNA, 19 nt, Homo sapiens
  misc_RNA (1)...(19): siRNA sense strand
ucaccaugcuggcagauau

SEQ ID NO: 1832053 - RNA, 19 nt, Homo sapiens
  misc_RNA (1)...(19): siRNA sense strand
uaaagcagguggaauuucg

SEQ ID NO: 1832054 - RNA, 19 nt, Homo sapiens
  misc_RNA (1)...(19): siRNA sense strand
ccacagagggccugaugaa

SEQ ID NO: 1832055 - RNA, 19 nt, Homo sapiens
  misc_RNA (1)...(19): siRNA sense strand
gauaugagcauuucaaucc

SEQ ID NO: 1832056 - RNA, 19 nt, Homo sapiens
  misc_RNA (1)...(19): siRNA sense strand
ugaaaggaccugacuggaa

SEQ ID NO: 1832057 - RNA, 19 nt, Homo sapiens
  misc_RNA (1)...(19): siRNA sense strand
gaccauugcugagguauac

SEQ ID NO: 1832058 - RNA, 19 nt, Homo sapiens
  misc_RNA (1)...(19): siRNA sense strand
cagaaacauuugacaguag

SEQ ID NO: 1832059 - RNA, 19 nt, Homo sapiens
  misc_RNA (1)...(19): siRNA sense strand
caaggaguuuggaguggaa

SEQ ID NO: 1832060 - RNA, 19 nt, Homo sapiens
  misc_RNA (1)...(19): siRNA sense strand
cagagggccugaugaaucu

SEQ ID NO: 1832061 - RNA, 19 nt, Homo sapiens
  misc_RNA (1)...(19): siRNA sense strand
ugguauaucuagccaugua

SEQ ID NO: 1832062 - RNA, 19 nt, Homo sapiens
  misc_RNA (1)...(19): siRNA sense strand
gaucagacagguggauaaa

SEQ ID NO: 1832063 - RNA, 19 nt, Homo sapiens
  misc_RNA (1)...(19): siRNA sense strand
agauaaagcagguggaauu

SEQ ID NO: 1832064 - RNA, 19 nt, Homo sapiens
  misc_RNA (1)...(19): siRNA sense strand
ucaaaugucaguccugcua

SEQ ID NO: 1832065 - RNA, 19 nt, Homo sapiens
  misc_RNA (1)...(19): siRNA sense strand
cuggaacacugaauuguau

SEQ ID NO: 1832066 - RNA, 19 nt, Homo sapiens
  misc_RNA (1)...(19): siRNA sense strand
gaaauacaucuuccuagag

SEQ ID NO: 1832067 - RNA, 19 nt, Homo sapiens
  misc_RNA (1)...(19): siRNA sense strand
gauggaacaagcuugaauu

SEQ ID NO: 1832068 - RNA, 19 nt, Homo sapiens
  misc_RNA (1)...(19): siRNA sense strand
cauacagcaugcuugauga

SEQ ID NO: 1832069 - RNA, 19 nt, Homo sapiens
  misc_RNA (1)...(19): siRNA sense strand
guacaaccagcucguauuc

SEQ ID NO: 1832070 - RNA, 19 nt, Homo sapiens
  misc_RNA (1)...(19): siRNA sense strand
acagguggauaaaguagaa

SEQ ID NO: 1832071 - RNA, 19 nt, Homo sapiens
  misc_RNA (1)...(19): siRNA sense strand
ugaaggacaagggaauuua

SEQ ID NO: 1832072 - RNA, 19 nt, Homo sapiens
  misc_RNA (1)...(19): siRNA sense strand
gaacugcauguacagaaug

SEQ ID NO: 1832073 - RNA, 19 nt, Homo sapiens
  misc_RNA (1)...(19): siRNA sense strand
ggaugcaacaauagaauga

SEQ ID NO: 1832074 - RNA, 19 nt, Homo sapiens
  misc_RNA (1)...(19): siRNA sense strand
gggaugaggauaaggcaaa

SEQ ID NO: 1832075 - RNA, 19 nt, Homo sapiens
  misc_RNA (1)...(19): siRNA sense strand
ucgaauuggucugaucaua

SEQ ID NO: 1832076 - RNA, 19 nt, Homo sapiens
  misc_RNA (1)...(19): siRNA sense strand
ggagguggacuuuaaagca

SEQ ID NO: 1832077 - RNA, 19 nt, Homo sapiens
  misc_RNA (1)...(19): siRNA sense strand
gaaguugcucguuauuuag

SEQ ID NO: 1832078 - RNA, 19 nt, Homo sapiens
  misc_RNA (1)...(19): siRNA sense strand
cagguaaauugucagaguu

SEQ ID NO: 1832079 - RNA, 19 nt, Homo sapiens
  misc_RNA (1)...(19): siRNA sense strand
gggucagucucuauacauu

SEQ ID NO: 1832080 - RNA, 19 nt, Homo sapiens
  misc_RNA (1)...(19): siRNA sense strand
ugacagggucgaugaagaa

SEQ ID NO: 1832081 - RNA, 19 nt, Homo sapiens
  misc_RNA (1)...(19): siRNA sense strand
uaaagaggaucccaaucgu

SEQ ID NO: 1832082 - RNA, 19 nt, Homo sapiens
  misc_RNA (1)...(19): siRNA sense strand
gaaguuggcugguuauggu

SEQ ID NO: 1832083 - RNA, 19 nt, Homo sapiens
  misc_RNA (1)...(19): siRNA sense strand
uuaagaaguuggcugguua

SEQ ID NO: 1832084 - RNA, 19 nt, Homo sapiens
  misc_RNA (1)...(19): siRNA sense strand
gaaccaguauccagacaga

SEQ ID NO: 1832085 - RNA, 19 nt, Homo sapiens
  misc_RNA (1)...(19): siRNA sense strand
ggaacacgcugcagagcuu

SEQ ID NO: 1832086 - RNA, 19 nt, Homo sapiens
  misc_RNA (1)...(19): siRNA sense strand
gcuccgguaucuagaagua

SEQ ID NO: 1832087 - RNA, 19 nt, Homo sapiens
  misc_RNA (1)...(19): siRNA sense strand
ccauugacauucacaacaa

SEQ ID NO: 1832088 - RNA, 19 nt, Homo sapiens
  misc_RNA (1)...(19): siRNA sense strand
ggacgcugcucucaucagu

SEQ ID NO: 1832089 - RNA, 19 nt, Homo sapiens
  misc_RNA (1)...(19): siRNA sense strand
cugaauguguuaagaaguu

SEQ ID NO: 1832090 - RNA, 19 nt, Homo sapiens
  misc_RNA (1)...(19): siRNA sense strand
guuaagaaguuggcugguu

SEQ ID NO: 1832091 - RNA, 19 nt, Homo sapiens
  misc_RNA (1)...(19): siRNA sense strand
acaagacgcucuaucacau

SEQ ID NO: 1832092 - RNA, 19 nt, Homo sapiens
  misc_RNA (1)...(19): siRNA sense strand
ccagacagaagaagagaaa

SEQ ID NO: 1832093 - RNA, 19 nt, Homo sapiens
  misc_RNA (1)...(19): siRNA sense strand
ccuccaagcucggaccuuu

SEQ ID NO: 1832094 - RNA, 19 nt, Homo sapiens
  misc_RNA (1)...(19): siRNA sense strand
ucucugaguuguuugucua

SEQ ID NO: 1832095 - RNA, 19 nt, Homo sapiens
  misc_RNA (1)...(19): siRNA sense strand
gaacugcagcucccacgau

SEQ ID NO: 1832096 - RNA, 19 nt, Homo sapiens
  misc_RNA (1)...(19): siRNA sense strand
gcucggaccuuugggaucu

SEQ ID NO: 1832097 - RNA, 19 nt, Homo sapiens
  misc_RNA (1)...(19): siRNA sense strand
ggcauuuccucucugaguu

SEQ ID NO: 1832098 - RNA, 19 nt, Homo sapiens
  misc_RNA (1)...(19): siRNA sense strand
agccaaaccuugugaaugg

SEQ ID NO: 1832099 - RNA, 19 nt, Homo sapiens
  misc_RNA (1)...(19): siRNA sense strand
acaacaagacgcucuauca

SEQ ID NO: 1832100 - RNA, 19 nt, Homo sapiens
  misc_RNA (1)...(19): siRNA sense strand
acgcugcucucaucaguga

SEQ ID NO: 1832101 - RNA, 19 nt, Homo sapiens
  misc_RNA (1)...(19): siRNA sense strand
gcauuuccucucugaguug

SEQ ID NO: 1832102 - RNA, 19 nt, Homo sapiens
  misc_RNA (1)...(19): siRNA sense strand
ugaguuguuugucuaugga

SEQ ID NO: 1832103 - RNA, 19 nt, Homo sapiens
  misc_RNA (1)...(19): siRNA sense strand
ucuggacgcugcucucauc

SEQ ID NO: 1832104 - RNA, 19 nt, Homo sapiens
  misc_RNA (1)...(19): siRNA sense strand
ugaauguguuaagaaguug

SEQ ID NO: 1832105 - RNA, 19 nt, Homo sapiens
  misc_RNA (1)...(19): siRNA sense strand
gggcauuuccucucugagu

SEQ ID NO: 1832106 - RNA, 19 nt, Homo sapiens
  misc_RNA (1)...(19): siRNA sense strand
gccguuuccugaauguguu

SEQ ID NO: 1832107 - RNA, 19 nt, Homo sapiens
  misc_RNA (1)...(19): siRNA sense strand
aagacgcucuaucacauca

SEQ ID NO: 1832108 - RNA, 19 nt, Homo sapiens
  misc_RNA (1)...(19): siRNA sense strand
gggcuccgguaucuagaag

SEQ ID NO: 1832109 - RNA, 19 nt, Homo sapiens
  misc_RNA (1)...(19): siRNA sense strand
uuuccucucugaguuguuu

SEQ ID NO: 1832110 - RNA, 19 nt, Homo sapiens
  misc_RNA (1)...(19): siRNA sense strand
caacaagacgcucuaucac

SEQ ID NO: 1832111 - RNA, 19 nt, Homo sapiens
  misc_RNA (1)...(19): siRNA sense strand
gacgcucuaucacaucaca

SEQ ID NO: 1832112 - RNA, 19 nt, Homo sapiens
  misc_RNA (1)...(19): siRNA sense strand
gaucuggacgcugcucuca

SEQ ID NO: 1832113 - RNA, 19 nt, Homo sapiens
  misc_RNA (1)...(19): siRNA sense strand
gacagaagaagagaaacug

SEQ ID NO: 1832114 - RNA, 19 nt, Homo sapiens
  misc_RNA (1)...(19): siRNA sense strand
ucugugccauugacauuca

SEQ ID NO: 1832115 - RNA, 19 nt, Homo sapiens
  misc_RNA (1)...(19): siRNA sense strand
ccucugugccauugacauu

SEQ ID NO: 1832116 - RNA, 19 nt, Homo sapiens
  misc_RNA (1)...(19): siRNA sense strand
uaagaaguuggcugguuau

SEQ ID NO: 1832117 - RNA, 19 nt, Homo sapiens
  misc_RNA (1)...(19): siRNA sense strand
agaccacacuuuucucuau

SEQ ID NO: 1832118 - RNA, 19 nt, Homo sapiens
  misc_RNA (1)...(19): siRNA sense strand
aacugcagcucccacgauu

SEQ ID NO: 1832119 - RNA, 19 nt, Homo sapiens
  misc_RNA (1)...(19): siRNA sense strand
uagaaccaguauccagaca

SEQ ID NO: 1832120 - RNA, 19 nt, Homo sapiens
  misc_RNA (1)...(19): siRNA sense strand
gccauugacauucacaaca

SEQ ID NO: 1832121 - RNA, 19 nt, Homo sapiens
  misc_RNA (1)...(19): siRNA sense strand
ccaguauccagacagaaga

SEQ ID NO: 1832122 - RNA, 19 nt, Homo sapiens
  misc_RNA (1)...(19): siRNA sense strand
acagaagaagagaaacuga

SEQ ID NO: 1832123 - RNA, 19 nt, Homo sapiens
  misc_RNA (1)...(19): siRNA sense strand
gcacaaggaugaauugaau

SEQ ID NO: 1832124 - RNA, 19 nt, Homo sapiens
  misc_RNA (1)...(19): siRNA sense strand
caaauucuguucuccuuaa

SEQ ID NO: 1832125 - RNA, 19 nt, Homo sapiens
  misc_RNA (1)...(19): siRNA sense strand
caaagugugcuuagaaaua

SEQ ID NO: 1832126 - RNA, 19 nt, Homo sapiens
  misc_RNA (1)...(19): siRNA sense strand
gaagagacccuaugcaaag

SEQ ID NO: 1832127 - RNA, 19 nt, Homo sapiens
  misc_RNA (1)...(19): siRNA sense strand
ccaaggauguggaggauga

SEQ ID NO: 1832128 - RNA, 19 nt, Homo sapiens
  misc_RNA (1)...(19): siRNA sense strand
caaaggaauuggaaacugu

SEQ ID NO: 1832129 - RNA, 19 nt, Homo sapiens
  misc_RNA (1)...(19): siRNA sense strand
gguuaaugcugccuacuuu

SEQ ID NO: 1832130 - RNA, 19 nt, Homo sapiens
  misc_RNA (1)...(19): siRNA sense strand
gaccaucccuuuauuuaca

SEQ ID NO: 1832131 - RNA, 19 nt, Homo sapiens
  misc_RNA (1)...(19): siRNA sense strand
acaaaucucugaaucuuuc

SEQ ID NO: 1832132 - RNA, 19 nt, Homo sapiens
  misc_RNA (1)...(19): siRNA sense strand
agaaauaacugaagauggu

SEQ ID NO: 1832133 - RNA, 19 nt, Homo sapiens
  misc_RNA (1)...(19): siRNA sense strand
gauauacccuuuggauuuc

SEQ ID NO: 1832134 - RNA, 19 nt, Homo sapiens
  misc_RNA (1)...(19): siRNA sense strand
gcaaaggaauuggaaacug

SEQ ID NO: 1832135 - RNA, 19 nt, Homo sapiens
  misc_RNA (1)...(19): siRNA sense strand
ucucacagauggccacuuu

SEQ ID NO: 1832136 - RNA, 19 nt, Homo sapiens
  misc_RNA (1)...(19): siRNA sense strand
guagacaaaucucugaauc

SEQ ID NO: 1832137 - RNA, 19 nt, Homo sapiens
  misc_RNA (1)...(19): siRNA sense strand
caacaagacagacaccaaa

SEQ ID NO: 1832138 - RNA, 19 nt, Homo sapiens
  misc_RNA (1)...(19): siRNA sense strand
agacaaaucucugaaucuu

SEQ ID NO: 1832139 - RNA, 19 nt, Homo sapiens
  misc_RNA (1)...(19): siRNA sense strand
cagaucaacaacucaauua

SEQ ID NO: 1832140 - RNA, 19 nt, Homo sapiens
  misc_RNA (1)...(19): siRNA sense strand
ggaguggcccuaucaaaug

SEQ ID NO: 1832141 - RNA, 19 nt, Homo sapiens
  misc_RNA (1)...(19): siRNA sense strand
gaagacacaucugauuucu

SEQ ID NO: 1832142 - RNA, 19 nt, Homo sapiens
  misc_RNA (1)...(19): siRNA sense strand
agauauacccuuuggauuu

SEQ ID NO: 1832143 - RNA, 19 nt, Homo sapiens
  misc_RNA (1)...(19): siRNA sense strand
caaauguuauccacaaagu

SEQ ID NO: 1832144 - RNA, 19 nt, Homo sapiens
  misc_RNA (1)...(19): siRNA sense strand
agacacaucugauuucucu

SEQ ID NO: 1832145 - RNA, 19 nt, Homo sapiens
  misc_RNA (1)...(19): siRNA sense strand
gcaaauucuguucuccuua

SEQ ID NO: 1832146 - RNA, 19 nt, Homo sapiens
  misc_RNA (1)...(19): siRNA sense strand
gaaacgaaaggucagauca

SEQ ID NO: 1832147 - RNA, 19 nt, Homo sapiens
  misc_RNA (1)...(19): siRNA sense strand
gaauguccuuucagacuca

SEQ ID NO: 1832148 - RNA, 19 nt, Homo sapiens
  misc_RNA (1)...(19): siRNA sense strand
gcuuagaaauaacugaaga

SEQ ID NO: 1832149 - RNA, 19 nt, Homo sapiens
  misc_RNA (1)...(19): siRNA sense strand
cgaaaggucagaucaacaa

SEQ ID NO: 1832150 - RNA, 19 nt, Homo sapiens
  misc_RNA (1)...(19): siRNA sense strand
gugaagacacaucugauuu

SEQ ID NO: 1832151 - RNA, 19 nt, Homo sapiens
  misc_RNA (1)...(19): siRNA sense strand
gacaguaucaauuguaaga

SEQ ID NO: 1832152 - RNA, 19 nt, Homo sapiens
  misc_RNA (1)...(19): siRNA sense strand
ugggaaacauugacaguau

SEQ ID NO: 1832153 - RNA, 19 nt, Homo sapiens
  misc_RNA (1)...(19): siRNA sense strand
cgaagagacccuaugcaaa

SEQ ID NO: 1832154 - RNA, 19 nt, Homo sapiens
  misc_RNA (1)...(19): siRNA sense strand
ucaagugggugcuaaaggu

SEQ ID NO: 1832155 - RNA, 19 nt, Homo sapiens
  misc_RNA (1)...(19): siRNA sense strand
gucaaacucuccauuccaa

SEQ ID NO: 1832156 - RNA, 19 nt, Homo sapiens
  misc_RNA (1)...(19): siRNA sense strand
ccacaggcuuggagaagau

SEQ ID NO: 1832157 - RNA, 19 nt, Homo sapiens
  misc_RNA (1)...(19): siRNA sense strand
gaucaacaacucaauuaag

SEQ ID NO: 1832158 - RNA, 19 nt, Homo sapiens
  misc_RNA (1)...(19): siRNA sense strand
uuggacagguucuucauuu

SEQ ID NO: 1832159 - RNA, 19 nt, Homo sapiens
  misc_RNA (1)...(19): siRNA sense strand
gaaauuggacagguucuuc

SEQ ID NO: 1832160 - RNA, 19 nt, Homo sapiens
  misc_RNA (1)...(19): siRNA sense strand
ucacagauggccacuuuga

SEQ ID NO: 1832161 - RNA, 19 nt, Homo sapiens
  misc_RNA (1)...(19): siRNA sense strand
gaguggcccuaucaaaugu

SEQ ID NO: 1832162 - RNA, 19 nt, Homo sapiens
  misc_RNA (1)...(19): siRNA sense strand
gggaguggcccuaucaaau

SEQ ID NO: 1832163 - RNA, 19 nt, Homo sapiens
  misc_RNA (1)...(19): siRNA sense strand
ugauuucucuggaauguca

SEQ ID NO: 1832164 - RNA, 19 nt, Homo sapiens
  misc_RNA (1)...(19): siRNA sense strand
gaaucuuucuacagaguuc

SEQ ID NO: 1832165 - RNA, 19 nt, Homo sapiens
  misc_RNA (1)...(19): siRNA sense strand
ggcaaauucuguucuccuu

SEQ ID NO: 1832166 - RNA, 19 nt, Homo sapiens
  misc_RNA (1)...(19): siRNA sense strand
ccucuucucuccaaucugu

SEQ ID NO: 1832167 - RNA, 19 nt, Homo sapiens
  misc_RNA (1)...(19): siRNA sense strand
aaucuagggcugaaacaua

SEQ ID NO: 1832168 - RNA, 19 nt, Homo sapiens
  misc_RNA (1)...(19): siRNA sense strand
ccaaaauccuugugguuaa

SEQ ID NO: 1832169 - RNA, 19 nt, Homo sapiens
  misc_RNA (1)...(19): siRNA sense strand
caacaacucaauuaaggau

SEQ ID NO: 1832170 - RNA, 19 nt, Homo sapiens
  misc_RNA (1)...(19): siRNA sense strand
ggaaacauugacaguauca

SEQ ID NO: 1832171 - RNA, 19 nt, Homo sapiens
  misc_RNA (1)...(19): siRNA sense strand
caauuaaggaucucacaga

SEQ ID NO: 1832172 - RNA, 19 nt, Homo sapiens
  misc_RNA (1)...(19): siRNA sense strand
aaaugaaauuggacagguu

SEQ ID NO: 1832173 - RNA, 19 nt, Homo sapiens
  misc_RNA (1)...(19): siRNA sense strand
caucugauuucucuggaau

SEQ ID NO: 1832174 - RNA, 19 nt, Homo sapiens
  misc_RNA (1)...(19): siRNA sense strand
ucauagagcuuccuuuuca

SEQ ID NO: 1832175 - RNA, 19 nt, Homo sapiens
  misc_RNA (1)...(19): siRNA sense strand
gaucauagagcuuccuuuu

SEQ ID NO: 1832176 - RNA, 19 nt, Homo sapiens
  misc_RNA (1)...(19): siRNA sense strand
ccaaaccagugcagaugau

SEQ ID NO: 1832177 - RNA, 19 nt, Homo sapiens
  misc_RNA (1)...(19): siRNA sense strand
gagacccuaugcaaaggaa

SEQ ID NO: 1832178 - RNA, 19 nt, Homo sapiens
  misc_RNA (1)...(19): siRNA sense strand
gacaaaucucugaaucuuu

SEQ ID NO: 1832179 - RNA, 19 nt, Homo sapiens
  misc_RNA (1)...(19): siRNA sense strand
guggcccuaucaaauguua

SEQ ID NO: 1832180 - RNA, 19 nt, Homo sapiens
  misc_RNA (1)...(19): siRNA sense strand
gggaaacauugacaguauc

SEQ ID NO: 1832181 - RNA, 19 nt, Homo sapiens
  misc_RNA (1)...(19): siRNA sense strand
gaagaaacgaaaggucaga

SEQ ID NO: 1832182 - RNA, 19 nt, Homo sapiens
  misc_RNA (1)...(19): siRNA sense strand
ggacuaaucccagcaccau

SEQ ID NO: 1832183 - RNA, 19 nt, Homo sapiens
  misc_RNA (1)...(19): siRNA sense strand
gcagcacaaggaugaauug

SEQ ID NO: 1832184 - RNA, 19 nt, Homo sapiens
  misc_RNA (1)...(19): siRNA sense strand
ugacacugcaaaugaaauu

SEQ ID NO: 1832185 - RNA, 19 nt, Homo sapiens
  misc_RNA (1)...(19): siRNA sense strand
cugaccaucccuuuauuua

SEQ ID NO: 1832186 - RNA, 19 nt, Homo sapiens
  misc_RNA (1)...(19): siRNA sense strand
ugaauugaaugcugaccau

SEQ ID NO: 1832187 - RNA, 19 nt, Homo sapiens
  misc_RNA (1)...(19): siRNA sense strand
caguaucaauuguaagauc

SEQ ID NO: 1832188 - RNA, 19 nt, Homo sapiens
  misc_RNA (1)...(19): siRNA sense strand
ugaagacacaucugauuuc

SEQ ID NO: 1832189 - RNA, 19 nt, Homo sapiens
  misc_RNA (1)...(19): siRNA sense strand
caucaucaggcacaacaaa

SEQ ID NO: 1832190 - RNA, 19 nt, Homo sapiens
  misc_RNA (1)...(19): siRNA sense strand
gcugaccaucccuuuauuu

SEQ ID NO: 1832191 - RNA, 19 nt, Homo sapiens
  misc_RNA (1)...(19): siRNA sense strand
gaaugcugaccaucccuuu

SEQ ID NO: 1832192 - RNA, 19 nt, Homo sapiens
  misc_RNA (1)...(19): siRNA sense strand
ucagaucaacaacucaauu

SEQ ID NO: 1832193 - RNA, 19 nt, Homo sapiens
  misc_RNA (1)...(19): siRNA sense strand
acagauggccacuuugaga

SEQ ID NO: 1832194 - RNA, 19 nt, Homo sapiens
  misc_RNA (1)...(19): siRNA sense strand
uucaucagcucuacgaaga

SEQ ID NO: 1832195 - RNA, 19 nt, Homo sapiens
  misc_RNA (1)...(19): siRNA sense strand
auaagcaucucagcauguu

SEQ ID NO: 1832196 - RNA, 19 nt, Homo sapiens
  misc_RNA (1)...(19): siRNA sense strand
gaggccacguucuguaugg

SEQ ID NO: 1832197 - RNA, 19 nt, Homo sapiens
  misc_RNA (1)...(19): siRNA sense strand
ggucagaucaacaacucaa

SEQ ID NO: 1832198 - RNA, 19 nt, Homo sapiens
  misc_RNA (1)...(19): siRNA sense strand
auuggaaacuguugacuuc

SEQ ID NO: 1832199 - RNA, 19 nt, Homo sapiens
  misc_RNA (1)...(19): siRNA sense strand
gacagguucuucauuuuga

SEQ ID NO: 1832200 - RNA, 19 nt, Homo sapiens
  misc_RNA (1)...(19): siRNA sense strand
aaggugacacugcaaauga

SEQ ID NO: 1832201 - RNA, 19 nt, Homo sapiens
  misc_RNA (1)...(19): siRNA sense strand
aaacgaaaggucagaucaa

SEQ ID NO: 1832202 - RNA, 19 nt, Homo sapiens
  misc_RNA (1)...(19): siRNA sense strand
ggauguaaacaaacuuagu

SEQ ID NO: 1832203 - RNA, 19 nt, Homo sapiens
  misc_RNA (1)...(19): siRNA sense strand
gauggccacuuugagaaca

SEQ ID NO: 1832204 - RNA, 19 nt, Homo sapiens
  misc_RNA (1)...(19): siRNA sense strand
gacccuaugcaaaggaauu

SEQ ID NO: 1832205 - RNA, 19 nt, Homo sapiens
  misc_RNA (1)...(19): siRNA sense strand
caaggucaaacucuccauu

SEQ ID NO: 1832206 - RNA, 19 nt, Homo sapiens
  misc_RNA (1)...(19): siRNA sense strand
acaacucaauuaaggaucu

SEQ ID NO: 1832207 - RNA, 19 nt, Homo sapiens
  misc_RNA (1)...(19): siRNA sense strand
ggacagguucuucauuuug

SEQ ID NO: 1832208 - RNA, 19 nt, Homo sapiens
  misc_RNA (1)...(19): siRNA sense strand
cagauggccacuuugagaa

SEQ ID NO: 1832209 - RNA, 19 nt, Homo sapiens
  misc_RNA (1)...(19): siRNA sense strand
cuaaaggugacacugcaaa

SEQ ID NO: 1832210 - RNA, 19 nt, Homo sapiens
  misc_RNA (1)...(19): siRNA sense strand
cagcauguucauccuacua

SEQ ID NO: 1832211 - RNA, 19 nt, Homo sapiens
  misc_RNA (1)...(19): siRNA sense strand
cagugcagaugaugaacau

SEQ ID NO: 1832212 - RNA, 19 nt, Homo sapiens
  misc_RNA (1)...(19): siRNA sense strand
caagacagacaccaaacca

SEQ ID NO: 1832213 - RNA, 19 nt, Homo sapiens
  misc_RNA (1)...(19): siRNA sense strand
acgaagagacccuaugcaa

SEQ ID NO: 1832214 - RNA, 19 nt, Homo sapiens
  misc_RNA (1)...(19): siRNA sense strand
ggugacacugcaaaugaaa

SEQ ID NO: 1832215 - RNA, 19 nt, Homo sapiens
  misc_RNA (1)...(19): siRNA sense strand
uaaaggugacacugcaaau

SEQ ID NO: 1832216 - RNA, 19 nt, Homo sapiens
  misc_RNA (1)...(19): siRNA sense strand
ucggauguaaacaaacuua

SEQ ID NO: 1832217 - RNA, 19 nt, Homo sapiens
  misc_RNA (1)...(19): siRNA sense strand
gugcuuagaaauaacugaa

SEQ ID NO: 1832218 - RNA, 19 nt, Homo sapiens
  misc_RNA (1)...(19): siRNA sense strand
ucaacaagacagacaccaa

SEQ ID NO: 1832219 - RNA, 19 nt, Homo sapiens
  misc_RNA (1)...(19): siRNA sense strand
aaugcugccuacuuuguug

SEQ ID NO: 1832220 - RNA, 19 nt, Homo sapiens
  misc_RNA (1)...(19): siRNA sense strand
aaucaagcggcucuacgua

SEQ ID NO: 1832221 - RNA, 19 nt, Homo sapiens
  misc_RNA (1)...(19): siRNA sense strand
ucugauuucucuggaaugu

SEQ ID NO: 1832222 - RNA, 19 nt, Homo sapiens
  misc_RNA (1)...(19): siRNA sense strand
ggaggccacguucuguaug

SEQ ID NO: 1832223 - RNA, 19 nt, Homo sapiens
  misc_RNA (1)...(19): siRNA sense strand
gaacauguguguccaacaa

SEQ ID NO: 1832224 - RNA, 19 nt, Homo sapiens
  misc_RNA (1)...(19): siRNA sense strand
gcucaaggcuuaacuccaa

SEQ ID NO: 1832225 - RNA, 19 nt, Homo sapiens
  misc_RNA (1)...(19): siRNA sense strand
ccacagaucugaugcucuu

SEQ ID NO: 1832226 - RNA, 19 nt, Homo sapiens
  misc_RNA (1)...(19): siRNA sense strand
gaacugugacugucuaaau

SEQ ID NO: 1832227 - RNA, 19 nt, Homo sapiens
  misc_RNA (1)...(19): siRNA sense strand
gaaaaugacuguugugaag

SEQ ID NO: 1832228 - RNA, 19 nt, Homo sapiens
  misc_RNA (1)...(19): siRNA sense strand
gacauugccuugcugaaga

SEQ ID NO: 1832229 - RNA, 19 nt, Homo sapiens
  misc_RNA (1)...(19): siRNA sense strand
acacacugcuucauugauu

SEQ ID NO: 1832230 - RNA, 19 nt, Homo sapiens
  misc_RNA (1)...(19): siRNA sense strand
gcaacugcccaaagaaauu

SEQ ID NO: 1832231 - RNA, 19 nt, Homo sapiens
  misc_RNA (1)...(19): siRNA sense strand
gggcagcacugugaaauag

SEQ ID NO: 1832232 - RNA, 19 nt, Homo sapiens
  misc_RNA (1)...(19): siRNA sense strand
gaugugcccugaaggacaa

SEQ ID NO: 1832233 - RNA, 19 nt, Homo sapiens
  misc_RNA (1)...(19): siRNA sense strand
ugagaucacuggcuuugga

SEQ ID NO: 1832234 - RNA, 19 nt, Homo sapiens
  misc_RNA (1)...(19): siRNA sense strand
gcucugaagucaccaccaa

SEQ ID NO: 1832235 - RNA, 19 nt, Homo sapiens
  misc_RNA (1)...(19): siRNA sense strand
gcagcacugugaaauagau

SEQ ID NO: 1832236 - RNA, 19 nt, Homo sapiens
  misc_RNA (1)...(19): siRNA sense strand
cugggucgcucaaggcuua

SEQ ID NO: 1832237 - RNA, 19 nt, Homo sapiens
  misc_RNA (1)...(19): siRNA sense strand
gaggaaaggccagcacuga

SEQ ID NO: 1832238 - RNA, 19 nt, Homo sapiens
  misc_RNA (1)...(19): siRNA sense strand
ggaaaggccagcacugaca

SEQ ID NO: 1832239 - RNA, 19 nt, Homo sapiens
  misc_RNA (1)...(19): siRNA sense strand
gccacacacugcuucauug

SEQ ID NO: 1832240 - RNA, 19 nt, Homo sapiens
  misc_RNA (1)...(19): siRNA sense strand
cacacugcuucauugauua

SEQ ID NO: 1832241 - RNA, 19 nt, Homo sapiens
  misc_RNA (1)...(19): siRNA sense strand
caaagaaggaggacuacau

SEQ ID NO: 1832242 - RNA, 19 nt, Homo sapiens
  misc_RNA (1)...(19): siRNA sense strand
guauaacgauccccaguuu

SEQ ID NO: 1832243 - RNA, 19 nt, Homo sapiens
  misc_RNA (1)...(19): siRNA sense strand
ggacaagccaggcgucuac

SEQ ID NO: 1832244 - RNA, 19 nt, Homo sapiens
  misc_RNA (1)...(19): siRNA sense strand
gaugaaguuugagguggaa

SEQ ID NO: 1832245 - RNA, 19 nt, Homo sapiens
  misc_RNA (1)...(19): siRNA sense strand
gcagucacaccaaggaaga

SEQ ID NO: 1832246 - RNA, 19 nt, Homo sapiens
  misc_RNA (1)...(19): siRNA sense strand
caaggccgcaugacuuuga

SEQ ID NO: 1832247 - RNA, 19 nt, Homo sapiens
  misc_RNA (1)...(19): siRNA sense strand
gugcaugacugcgcagaug

SEQ ID NO: 1832248 - RNA, 19 nt, Homo sapiens
  misc_RNA (1)...(19): siRNA sense strand
agagaauucuaccgacuau

SEQ ID NO: 1832249 - RNA, 19 nt, Homo sapiens
  misc_RNA (1)...(19): siRNA sense strand
caaguacuucuccaacauu

SEQ ID NO: 1832250 - RNA, 19 nt, Homo sapiens
  misc_RNA (1)...(19): siRNA sense strand
gacuuugacuggaauugug

SEQ ID NO: 1832251 - RNA, 19 nt, Homo sapiens
  misc_RNA (1)...(19): siRNA sense strand
acaaguacuucuccaacau

SEQ ID NO: 1832252 - RNA, 19 nt, Homo sapiens
  misc_RNA (1)...(19): siRNA sense strand
ugccugcccucgauguaua

SEQ ID NO: 1832253 - RNA, 19 nt, Homo sapiens
  misc_RNA (1)...(19): siRNA sense strand
gugcaacugcccaaagaaa

SEQ ID NO: 1832254 - RNA, 19 nt, Homo sapiens
  misc_RNA (1)...(19): siRNA sense strand
gaacucugccacuguccuu

SEQ ID NO: 1832255 - RNA, 19 nt, Homo sapiens
  misc_RNA (1)...(19): siRNA sense strand
caaaggcagcaaugaacuu

SEQ ID NO: 1832256 - RNA, 19 nt, Homo sapiens
  misc_RNA (1)...(19): siRNA sense strand
gcaugacuuugacuggaau

SEQ ID NO: 1832257 - RNA, 19 nt, Homo sapiens
  misc_RNA (1)...(19): siRNA sense strand
gcccuccucuccuccagaa

SEQ ID NO: 1832258 - RNA, 19 nt, Homo sapiens
  misc_RNA (1)...(19): siRNA sense strand
ggagggcagcacugugaaa

SEQ ID NO: 1832259 - RNA, 19 nt, Homo sapiens
  misc_RNA (1)...(19): siRNA sense strand
gcagccaucccggacuaua

SEQ ID NO: 1832260 - RNA, 19 nt, Homo sapiens
  misc_RNA (1)...(19): siRNA sense strand
ccacacacugcuucauuga

SEQ ID NO: 1832261 - RNA, 19 nt, Homo sapiens
  misc_RNA (1)...(19): siRNA sense strand
ccacuguccuucagcaaac

SEQ ID NO: 1832262 - RNA, 19 nt, Homo sapiens
  misc_RNA (1)...(19): siRNA sense strand
caacugcccaaagaaauuc

SEQ ID NO: 1832263 - RNA, 19 nt, Homo sapiens
  misc_RNA (1)...(19): siRNA sense strand
cuaaauggaggaacaugug

SEQ ID NO: 1832264 - RNA, 19 nt, Homo sapiens
  misc_RNA (1)...(19): siRNA sense strand
cgcaugacuuugacuggaa

SEQ ID NO: 1832265 - RNA, 19 nt, Homo sapiens
  misc_RNA (1)...(19): siRNA sense strand
aaagaaggaggacuacauc

SEQ ID NO: 1832266 - RNA, 19 nt, Homo sapiens
  misc_RNA (1)...(19): siRNA sense strand
uggugcaacugcccaaaga

SEQ ID NO: 1832267 - RNA, 19 nt, Homo sapiens
  misc_RNA (1)...(19): siRNA sense strand
ccacuacuacggcucugaa

SEQ ID NO: 1832268 - RNA, 19 nt, Homo sapiens
  misc_RNA (1)...(19): siRNA sense strand
aacaaguacuucuccaaca

SEQ ID NO: 1832269 - RNA, 19 nt, Homo sapiens
  misc_RNA (1)...(19): siRNA sense strand
cuucauugauuacccaaag

SEQ ID NO: 1832270 - RNA, 19 nt, Homo sapiens
  misc_RNA (1)...(19): siRNA sense strand
aacugugacugucuaaaug

SEQ ID NO: 1832271 - RNA, 19 nt, Homo sapiens
  misc_RNA (1)...(19): siRNA sense strand
cauguguguccaacaagua

SEQ ID NO: 1832272 - RNA, 19 nt, Homo sapiens
  misc_RNA (1)...(19): siRNA sense strand
aaauuucaguguggccaaa

SEQ ID NO: 1832273 - RNA, 19 nt, Homo sapiens
  misc_RNA (1)...(19): siRNA sense strand
ccucgucuguucccuccaa

SEQ ID NO: 1832274 - RNA, 19 nt, Homo sapiens
  misc_RNA (1)...(19): siRNA sense strand
gagaucacuggcuuuggaa

SEQ ID NO: 1832275 - RNA, 19 nt, Homo sapiens
  misc_RNA (1)...(19): siRNA sense strand
cgacauugccuugcugaag

SEQ ID NO: 1832276 - RNA, 19 nt, Homo sapiens
  misc_RNA (1)...(19): siRNA sense strand
gcacugugaaauagauaag

SEQ ID NO: 1832277 - RNA, 19 nt, Homo sapiens
  misc_RNA (1)...(19): siRNA sense strand
ccaacaaguacuucuccaa

SEQ ID NO: 1832278 - RNA, 19 nt, Homo sapiens
  misc_RNA (1)...(19): siRNA sense strand
cuacuacggcucugaaguc

SEQ ID NO: 1832279 - RNA, 19 nt, Homo sapiens
  misc_RNA (1)...(19): siRNA sense strand
aagagaauucuaccgacua

SEQ ID NO: 1832280 - RNA, 19 nt, Homo sapiens
  misc_RNA (1)...(19): siRNA sense strand
gaaaaccucauccuacaca

SEQ ID NO: 1832281 - RNA, 19 nt, Homo sapiens
  misc_RNA (1)...(19): siRNA sense strand
gagaauucaccaccaucga

SEQ ID NO: 1832282 - RNA, 19 nt, Homo sapiens
  misc_RNA (1)...(19): siRNA sense strand
gagggcagcacugugaaau

SEQ ID NO: 1832283 - RNA, 19 nt, Homo sapiens
  misc_RNA (1)...(19): siRNA sense strand
agaauucuaccgacuaucu

SEQ ID NO: 1832284 - RNA, 19 nt, Homo sapiens
  misc_RNA (1)...(19): siRNA sense strand
aaggggagaugaaguuuga

SEQ ID NO: 1832285 - RNA, 19 nt, Homo sapiens
  misc_RNA (1)...(19): siRNA sense strand
guaccaugcccacagaucu

SEQ ID NO: 1832286 - RNA, 19 nt, Homo sapiens
  misc_RNA (1)...(19): siRNA sense strand
ugaggggaauggucacuuu

SEQ ID NO: 1832287 - RNA, 19 nt, Homo sapiens
  misc_RNA (1)...(19): siRNA sense strand
gccacuguccuucagcaaa

SEQ ID NO: 1832288 - RNA, 19 nt, Homo sapiens
  misc_RNA (1)...(19): siRNA sense strand
uccaaggccgcaugacuuu

SEQ ID NO: 1832289 - RNA, 19 nt, Homo sapiens
  misc_RNA (1)...(19): siRNA sense strand
ugacuguugugaagcugau

SEQ ID NO: 1832290 - RNA, 19 nt, Homo sapiens
  misc_RNA (1)...(19): siRNA sense strand
uaaauggaggaacaugugu

SEQ ID NO: 1832291 - RNA, 19 nt, Homo sapiens
  misc_RNA (1)...(19): siRNA sense strand
ucggagggcagcacuguga

SEQ ID NO: 1832292 - RNA, 19 nt, Homo sapiens
  misc_RNA (1)...(19): siRNA sense strand
ugaagauccguuccaagga

SEQ ID NO: 1832293 - RNA, 19 nt, Homo sapiens
  misc_RNA (1)...(19): siRNA sense strand
gcaugacugcgcagaugga

SEQ ID NO: 1832294 - RNA, 19 nt, Homo sapiens
  misc_RNA (1)...(19): siRNA sense strand
ucaccaccaucgagaacca

SEQ ID NO: 1832295 - RNA, 19 nt, Homo sapiens
  misc_RNA (1)...(19): siRNA sense strand
ggaggacuacaucgucuac

SEQ ID NO: 1832296 - RNA, 19 nt, Homo sapiens
  misc_RNA (1)...(19): siRNA sense strand
aggcgacccuggugcuaug

SEQ ID NO: 1832297 - RNA, 19 nt, Homo sapiens
  misc_RNA (1)...(19): siRNA sense strand
aaaugacuguugugaagcu

SEQ ID NO: 1832298 - RNA, 19 nt, Homo sapiens
  misc_RNA (1)...(19): siRNA sense strand
ccaucugccugcccucgau

SEQ ID NO: 1832299 - RNA, 19 nt, Homo sapiens
  misc_RNA (1)...(19): siRNA sense strand
ucauugauuacccaaagaa

SEQ ID NO: 1832300 - RNA, 19 nt, Homo sapiens
  misc_RNA (1)...(19): siRNA sense strand
cgccacacacugcuucauu

SEQ ID NO: 1832301 - RNA, 19 nt, Homo sapiens
  misc_RNA (1)...(19): siRNA sense strand
gggaagaacuccaaagauu

SEQ ID NO: 1832302 - RNA, 19 nt, Homo sapiens
  misc_RNA (1)...(19): siRNA sense strand
gaaccaggauccagcagua

SEQ ID NO: 1832303 - RNA, 19 nt, Homo sapiens
  misc_RNA (1)...(19): siRNA sense strand
guuaaagaguucaguguua

SEQ ID NO: 1832304 - RNA, 19 nt, Homo sapiens
  misc_RNA (1)...(19): siRNA sense strand
ggaaauaggagcacacaaa

SEQ ID NO: 1832305 - RNA, 19 nt, Homo sapiens
  misc_RNA (1)...(19): siRNA sense strand
ccaaguuccuuaaagauaa

SEQ ID NO: 1832306 - RNA, 19 nt, Homo sapiens
  misc_RNA (1)...(19): siRNA sense strand
gcagaugaaucacgcauug

SEQ ID NO: 1832307 - RNA, 19 nt, Homo sapiens
  misc_RNA (1)...(19): siRNA sense strand
ugaaagcucuguaugacua

SEQ ID NO: 1832308 - RNA, 19 nt, Homo sapiens
  misc_RNA (1)...(19): siRNA sense strand
ucacauaacacguaccuua

SEQ ID NO: 1832309 - RNA, 19 nt, Homo sapiens
  misc_RNA (1)...(19): siRNA sense strand
ggaagaacuccaaagauuu

SEQ ID NO: 1832310 - RNA, 19 nt, Homo sapiens
  misc_RNA (1)...(19): siRNA sense strand
guucagcgaucccaacuuu

SEQ ID NO: 1832311 - RNA, 19 nt, Homo sapiens
  misc_RNA (1)...(19): siRNA sense strand
gagaagagccagaucaaga

SEQ ID NO: 1832312 - RNA, 19 nt, Homo sapiens
  misc_RNA (1)...(19): siRNA sense strand
gagaaccacuccagcugua

SEQ ID NO: 1832313 - RNA, 19 nt, Homo sapiens
  misc_RNA (1)...(19): siRNA sense strand
agaaguugcugcaggaaua

SEQ ID NO: 1832314 - RNA, 19 nt, Homo sapiens
  misc_RNA (1)...(19): siRNA sense strand
gagaaaugguuccacaaga

SEQ ID NO: 1832315 - RNA, 19 nt, Homo sapiens
  misc_RNA (1)...(19): siRNA sense strand
gggagaagaucaucaucaa

SEQ ID NO: 1832316 - RNA, 19 nt, Homo sapiens
  misc_RNA (1)...(19): siRNA sense strand
gggaugcccugguuaaaga

SEQ ID NO: 1832317 - RNA, 19 nt, Homo sapiens
  misc_RNA (1)...(19): siRNA sense strand
gaagaacuccaaagauuuc

SEQ ID NO: 1832318 - RNA, 19 nt, Homo sapiens
  misc_RNA (1)...(19): siRNA sense strand
agacgacgguugugaauga

SEQ ID NO: 1832319 - RNA, 19 nt, Homo sapiens
  misc_RNA (1)...(19): siRNA sense strand
gaucaaaccagaagaaaca

SEQ ID NO: 1832320 - RNA, 19 nt, Homo sapiens
  misc_RNA (1)...(19): siRNA sense strand
ugagaaagcagauauauuc

SEQ ID NO: 1832321 - RNA, 19 nt, Homo sapiens
  misc_RNA (1)...(19): siRNA sense strand
gcaaggagaacaacaugaa

SEQ ID NO: 1832322 - RNA, 19 nt, Homo sapiens
  misc_RNA (1)...(19): siRNA sense strand
agaaaugguuccacaagaa

SEQ ID NO: 1832323 - RNA, 19 nt, Homo sapiens
  misc_RNA (1)...(19): siRNA sense strand
ugguggagcucgucaguua

SEQ ID NO: 1832324 - RNA, 19 nt, Homo sapiens
  misc_RNA (1)...(19): siRNA sense strand
gaaauggacucggcacuac

SEQ ID NO: 1832325 - RNA, 19 nt, Homo sapiens
  misc_RNA (1)...(19): siRNA sense strand
gcgggacccugaaauacua

SEQ ID NO: 1832326 - RNA, 19 nt, Homo sapiens
  misc_RNA (1)...(19): siRNA sense strand
caccagaacuugcgcaaug

SEQ ID NO: 1832327 - RNA, 19 nt, Homo sapiens
  misc_RNA (1)...(19): siRNA sense strand
guaaagcauugucgcauca

SEQ ID NO: 1832328 - RNA, 19 nt, Homo sapiens
  misc_RNA (1)...(19): siRNA sense strand
cgacgguugugaaugauaa

SEQ ID NO: 1832329 - RNA, 19 nt, Homo sapiens
  misc_RNA (1)...(19): siRNA sense strand
acaaccagcucuuucugua

SEQ ID NO: 1832330 - RNA, 19 nt, Homo sapiens
  misc_RNA (1)...(19): siRNA sense strand
gaaaugcaacaagagguua

SEQ ID NO: 1832331 - RNA, 19 nt, Homo sapiens
  misc_RNA (1)...(19): siRNA sense strand
caggagaaaugcaacaaga

SEQ ID NO: 1832332 - RNA, 19 nt, Homo sapiens
  misc_RNA (1)...(19): siRNA sense strand
gcagaggacaugcugauga

SEQ ID NO: 1832333 - RNA, 19 nt, Homo sapiens
  misc_RNA (1)...(19): siRNA sense strand
gcaugaggacagagaaaua

SEQ ID NO: 1832334 - RNA, 19 nt, Homo sapiens
  misc_RNA (1)...(19): siRNA sense strand
ggacggugaugacuguguu

SEQ ID NO: 1832335 - RNA, 19 nt, Homo sapiens
  misc_RNA (1)...(19): siRNA sense strand
cuaaagaggaugcaguuaa

SEQ ID NO: 1832336 - RNA, 19 nt, Homo sapiens
  misc_RNA (1)...(19): siRNA sense strand
caucucaacugcagacuuc

SEQ ID NO: 1832337 - RNA, 19 nt, Homo sapiens
  misc_RNA (1)...(19): siRNA sense strand
cgagaaauccgcuccuuug

SEQ ID NO: 1832338 - RNA, 19 nt, Homo sapiens
  misc_RNA (1)...(19): siRNA sense strand
uaaagaggaugcaguuaac

SEQ ID NO: 1832339 - RNA, 19 nt, Homo sapiens
  misc_RNA (1)...(19): siRNA sense strand
gagaaggugacauuugaaa

SEQ ID NO: 1832340 - RNA, 19 nt, Homo sapiens
  misc_RNA (1)...(19): siRNA sense strand
aggagaaggugacauuuga

SEQ ID NO: 1832341 - RNA, 19 nt, Homo sapiens
  misc_RNA (1)...(19): siRNA sense strand
gauaaguacaugcagauga

SEQ ID NO: 1832342 - RNA, 19 nt, Homo sapiens
  misc_RNA (1)...(19): siRNA sense strand
gggauuccauugaccagaa

SEQ ID NO: 1832343 - RNA, 19 nt, Homo sapiens
  misc_RNA (1)...(19): siRNA sense strand
gaaauaggagcacacaaag

SEQ ID NO: 1832344 - RNA, 19 nt, Homo sapiens
  misc_RNA (1)...(19): siRNA sense strand
gccaaguuccuuaaagaua

SEQ ID NO: 1832345 - RNA, 19 nt, Homo sapiens
  misc_RNA (1)...(19): siRNA sense strand
gaagaaacagcaucagucu

SEQ ID NO: 1832346 - RNA, 19 nt, Homo sapiens
  misc_RNA (1)...(19): siRNA sense strand
aagaagaacugaacaacca

SEQ ID NO: 1832347 - RNA, 19 nt, Homo sapiens
  misc_RNA (1)...(19): siRNA sense strand
gugccaaguuccuuaaaga

SEQ ID NO: 1832348 - RNA, 19 nt, Homo sapiens
  misc_RNA (1)...(19): siRNA sense strand
cauuaaagcagucaaauca

SEQ ID NO: 1832349 - RNA, 19 nt, Homo sapiens
  misc_RNA (1)...(19): siRNA sense strand
ggacgagugccgagaaguu

SEQ ID NO: 1832350 - RNA, 19 nt, Homo sapiens
  misc_RNA (1)...(19): siRNA sense strand
acaagaagguggagaagag

SEQ ID NO: 1832351 - RNA, 19 nt, Homo sapiens
  misc_RNA (1)...(19): siRNA sense strand
ggacuaccaagaucaaguu

SEQ ID NO: 1832352 - RNA, 19 nt, Homo sapiens
  misc_RNA (1)...(19): siRNA sense strand
gaaauccgcccagggaaga

SEQ ID NO: 1832353 - RNA, 19 nt, Homo sapiens
  misc_RNA (1)...(19): siRNA sense strand
auaaguacaugcagaugaa

SEQ ID NO: 1832354 - RNA, 19 nt, Homo sapiens
  misc_RNA (1)...(19): siRNA sense strand
ccaaagggacaaagaguug

SEQ ID NO: 1832355 - RNA, 19 nt, Homo sapiens
  misc_RNA (1)...(19): siRNA sense strand
gaugacaccaugcgugaaa

SEQ ID NO: 1832356 - RNA, 19 nt, Homo sapiens
  misc_RNA (1)...(19): siRNA sense strand
ggaagccggucaucuacca

SEQ ID NO: 1832357 - RNA, 19 nt, Homo sapiens
  misc_RNA (1)...(19): siRNA sense strand
gaugaaucacgcauuguuu

SEQ ID NO: 1832358 - RNA, 19 nt, Homo sapiens
  misc_RNA (1)...(19): siRNA sense strand
ucucugaccugguugucua

SEQ ID NO: 1832359 - RNA, 19 nt, Homo sapiens
  misc_RNA (1)...(19): siRNA sense strand
gauauauucuguggaucaa

SEQ ID NO: 1832360 - RNA, 19 nt, Homo sapiens
  misc_RNA (1)...(19): siRNA sense strand
ggagaaccguccaggugau

SEQ ID NO: 1832361 - RNA, 19 nt, Homo sapiens
  misc_RNA (1)...(19): siRNA sense strand
gcugugcgguucucagaug

SEQ ID NO: 1832362 - RNA, 19 nt, Homo sapiens
  misc_RNA (1)...(19): siRNA sense strand
ugaaauacuacuugacuga

SEQ ID NO: 1832363 - RNA, 19 nt, Homo sapiens
  misc_RNA (1)...(19): siRNA sense strand
gaaggacgaacacaagcaa

SEQ ID NO: 1832364 - RNA, 19 nt, Homo sapiens
  misc_RNA (1)...(19): siRNA sense strand
ccaccacggucaauguaga

SEQ ID NO: 1832365 - RNA, 19 nt, Homo sapiens
  misc_RNA (1)...(19): siRNA sense strand
gaacaaccagcucuuucug

SEQ ID NO: 1832366 - RNA, 19 nt, Homo sapiens
  misc_RNA (1)...(19): siRNA sense strand
cgagaagcauucacucuac

SEQ ID NO: 1832367 - RNA, 19 nt, Homo sapiens
  misc_RNA (1)...(19): siRNA sense strand
guauguggaucccagugaa

SEQ ID NO: 1832368 - RNA, 19 nt, Homo sapiens
  misc_RNA (1)...(19): siRNA sense strand
acaguuccaucucuucuau

SEQ ID NO: 1832369 - RNA, 19 nt, Homo sapiens
  misc_RNA (1)...(19): siRNA sense strand
gaugguggcacucaauuuc

SEQ ID NO: 1832370 - RNA, 19 nt, Homo sapiens
  misc_RNA (1)...(19): siRNA sense strand
aauccugacuuccgagaaa

SEQ ID NO: 1832371 - RNA, 19 nt, Homo sapiens
  misc_RNA (1)...(19): siRNA sense strand
gaaaugguuccacaagaag

SEQ ID NO: 1832372 - RNA, 19 nt, Homo sapiens
  misc_RNA (1)...(19): siRNA sense strand
ggagaaaugguuccacaag

SEQ ID NO: 1832373 - RNA, 19 nt, Homo sapiens
  misc_RNA (1)...(19): siRNA sense strand
ggauuccauugaccagaaa

SEQ ID NO: 1832374 - RNA, 19 nt, Homo sapiens
  misc_RNA (1)...(19): siRNA sense strand
guacaugugggauuccauu

SEQ ID NO: 1832375 - RNA, 19 nt, Homo sapiens
  misc_RNA (1)...(19): siRNA sense strand
caagaaggacgaacacaag

SEQ ID NO: 1832376 - RNA, 19 nt, Homo sapiens
  misc_RNA (1)...(19): siRNA sense strand
caacauggaggacaagaag

SEQ ID NO: 1832377 - RNA, 19 nt, Homo sapiens
  misc_RNA (1)...(19): siRNA sense strand
gcugagccuuucuuguuug

SEQ ID NO: 1832378 - RNA, 19 nt, Homo sapiens
  misc_RNA (1)...(19): siRNA sense strand
gaagagccagaucaagaga

SEQ ID NO: 1832379 - RNA, 19 nt, Homo sapiens
  misc_RNA (1)...(19): siRNA sense strand
cgagcucucugaccugguu

SEQ ID NO: 1832380 - RNA, 19 nt, Homo sapiens
  misc_RNA (1)...(19): siRNA sense strand
gcagugccaaguuccuuaa

SEQ ID NO: 1832381 - RNA, 19 nt, Homo sapiens
  misc_RNA (1)...(19): siRNA sense strand
gagcgaagaggaacuuuac

SEQ ID NO: 1832382 - RNA, 19 nt, Homo sapiens
  misc_RNA (1)...(19): siRNA sense strand
agaacaacaugaaguacug

SEQ ID NO: 1832383 - RNA, 19 nt, Homo sapiens
  misc_RNA (1)...(19): siRNA sense strand
ccggaugccucugcuguuu

SEQ ID NO: 1832384 - RNA, 19 nt, Homo sapiens
  misc_RNA (1)...(19): siRNA sense strand
ccaccauuaucgagaguug

SEQ ID NO: 1832385 - RNA, 19 nt, Homo sapiens
  misc_RNA (1)...(19): siRNA sense strand
guccuucagugaugacauu

SEQ ID NO: 1832386 - RNA, 19 nt, Homo sapiens
  misc_RNA (1)...(19): siRNA sense strand
ggacgcggacuaccaagau

SEQ ID NO: 1832387 - RNA, 19 nt, Homo sapiens
  misc_RNA (1)...(19): siRNA sense strand
gcaguucgccagaaagaag

SEQ ID NO: 1832388 - RNA, 19 nt, Homo sapiens
  misc_RNA (1)...(19): siRNA sense strand
ggaugccucugcuguuuac

SEQ ID NO: 1832389 - RNA, 19 nt, Homo sapiens
  misc_RNA (1)...(19): siRNA sense strand
caauacggaaagagauaua

SEQ ID NO: 1832390 - RNA, 19 nt, Homo sapiens
  misc_RNA (1)...(19): siRNA sense strand
ccagagguuucucauacau

SEQ ID NO: 1832391 - RNA, 19 nt, Homo sapiens
  misc_RNA (1)...(19): siRNA sense strand
gcuuugugguuuaugaaga

SEQ ID NO: 1832392 - RNA, 19 nt, Homo sapiens
  misc_RNA (1)...(19): siRNA sense strand
gagcaugaggacagagaaa

SEQ ID NO: 1832393 - RNA, 19 nt, Homo sapiens
  misc_RNA (1)...(19): siRNA sense strand
cuuggcagcugacucuaaa

SEQ ID NO: 1832394 - RNA, 19 nt, Homo sapiens
  misc_RNA (1)...(19): siRNA sense strand
ggauggcaccuuccugguu

SEQ ID NO: 1832395 - RNA, 19 nt, Homo sapiens
  misc_RNA (1)...(19): siRNA sense strand
gcauugggcucaggaucug

SEQ ID NO: 1832396 - RNA, 19 nt, Homo sapiens
  misc_RNA (1)...(19): siRNA sense strand
gaucgagggcuucuuggau

SEQ ID NO: 1832397 - RNA, 19 nt, Homo sapiens
  misc_RNA (1)...(19): siRNA sense strand
aaccagcucuuucuguaug

SEQ ID NO: 1832398 - RNA, 19 nt, Homo sapiens
  misc_RNA (1)...(19): siRNA sense strand
aaaccaaggacaacuuaga

SEQ ID NO: 1832399 - RNA, 19 nt, Homo sapiens
  misc_RNA (1)...(19): siRNA sense strand
gcuacaauacggaaagaga

SEQ ID NO: 1832400 - RNA, 19 nt, Homo sapiens
  misc_RNA (1)...(19): siRNA sense strand
gugaaacugcugagccuuu

SEQ ID NO: 1832401 - RNA, 19 nt, Homo sapiens
  misc_RNA (1)...(19): siRNA sense strand
gaaucucucuuccuauaua

SEQ ID NO: 1832402 - RNA, 19 nt, Homo sapiens
  misc_RNA (1)...(19): siRNA sense strand
gagaauggaguucagaaua

SEQ ID NO: 1832403 - RNA, 19 nt, Homo sapiens
  misc_RNA (1)...(19): siRNA sense strand
gaagaaaacucagcuaaau

SEQ ID NO: 1832404 - RNA, 19 nt, Homo sapiens
  misc_RNA (1)...(19): siRNA sense strand
gaacacaggcuccaaacau

SEQ ID NO: 1832405 - RNA, 19 nt, Homo sapiens
  misc_RNA (1)...(19): siRNA sense strand
gaugaugacaugguauuua

SEQ ID NO: 1832406 - RNA, 19 nt, Homo sapiens
  misc_RNA (1)...(19): siRNA sense strand
gaaggaagacacugcagaa

SEQ ID NO: 1832407 - RNA, 19 nt, Homo sapiens
  misc_RNA (1)...(19): siRNA sense strand
ccaaguccauaagaaauuu

SEQ ID NO: 1832408 - RNA, 19 nt, Homo sapiens
  misc_RNA (1)...(19): siRNA sense strand
gaacgaagaggaaaauaaa

SEQ ID NO: 1832409 - RNA, 19 nt, Homo sapiens
  misc_RNA (1)...(19): siRNA sense strand
gcaguuucaugaacgaaga

SEQ ID NO: 1832410 - RNA, 19 nt, Homo sapiens
  misc_RNA (1)...(19): siRNA sense strand
gcauccaaguccauaagaa

SEQ ID NO: 1832411 - RNA, 19 nt, Homo sapiens
  misc_RNA (1)...(19): siRNA sense strand
ucagcuaaauuuccuauag

SEQ ID NO: 1832412 - RNA, 19 nt, Homo sapiens
  misc_RNA (1)...(19): siRNA sense strand
aacacaggcuccaaacaua

SEQ ID NO: 1832413 - RNA, 19 nt, Homo sapiens
  misc_RNA (1)...(19): siRNA sense strand
augaaucucucuuccuaua

SEQ ID NO: 1832414 - RNA, 19 nt, Homo sapiens
  misc_RNA (1)...(19): siRNA sense strand
agaauggaguucagaauac

SEQ ID NO: 1832415 - RNA, 19 nt, Homo sapiens
  misc_RNA (1)...(19): siRNA sense strand
aaaaggauaucaagcacua

SEQ ID NO: 1832416 - RNA, 19 nt, Homo sapiens
  misc_RNA (1)...(19): siRNA sense strand
gaauggaguucagaauacu

SEQ ID NO: 1832417 - RNA, 19 nt, Homo sapiens
  misc_RNA (1)...(19): siRNA sense strand
cacucaaucuggcuauaaa

SEQ ID NO: 1832418 - RNA, 19 nt, Homo sapiens
  misc_RNA (1)...(19): siRNA sense strand
cauccaaguccauaagaaa

SEQ ID NO: 1832419 - RNA, 19 nt, Homo sapiens
  misc_RNA (1)...(19): siRNA sense strand
acacaggcuccaaacauaa

SEQ ID NO: 1832420 - RNA, 19 nt, Homo sapiens
  misc_RNA (1)...(19): siRNA sense strand
aaagaacacaggcuccaaa

SEQ ID NO: 1832421 - RNA, 19 nt, Homo sapiens
  misc_RNA (1)...(19): siRNA sense strand
uuuagaugaugacauggua

SEQ ID NO: 1832422 - RNA, 19 nt, Homo sapiens
  misc_RNA (1)...(19): siRNA sense strand
gauguaugcucggaagagu

SEQ ID NO: 1832423 - RNA, 19 nt, Homo sapiens
  misc_RNA (1)...(19): siRNA sense strand
aaacucagcuaaauuuccu

SEQ ID NO: 1832424 - RNA, 19 nt, Homo sapiens
  misc_RNA (1)...(19): siRNA sense strand
ccacucaaucuggcuauaa

SEQ ID NO: 1832425 - RNA, 19 nt, Homo sapiens
  misc_RNA (1)...(19): siRNA sense strand
gcuccaaacauaauuucuu

SEQ ID NO: 1832426 - RNA, 19 nt, Homo sapiens
  misc_RNA (1)...(19): siRNA sense strand
cagcuaaauuuccuauagg

SEQ ID NO: 1832427 - RNA, 19 nt, Homo sapiens
  misc_RNA (1)...(19): siRNA sense strand
ugagagcaguuucaugaac

SEQ ID NO: 1832428 - RNA, 19 nt, Homo sapiens
  misc_RNA (1)...(19): siRNA sense strand
gaauacugaaucaacacaa

SEQ ID NO: 1832429 - RNA, 19 nt, Homo sapiens
  misc_RNA (1)...(19): siRNA sense strand
uagaugaugacaugguauu

SEQ ID NO: 1832430 - RNA, 19 nt, Homo sapiens
  misc_RNA (1)...(19): siRNA sense strand
ccuauaggaaggagagauu

SEQ ID NO: 1832431 - RNA, 19 nt, Homo sapiens
  misc_RNA (1)...(19): siRNA sense strand
aaggagagauuuugacaug

SEQ ID NO: 1832432 - RNA, 19 nt, Homo sapiens
  misc_RNA (1)...(19): siRNA sense strand
guagauuucccagcugaga

SEQ ID NO: 1832433 - RNA, 19 nt, Homo sapiens
  misc_RNA (1)...(19): siRNA sense strand
caaagaacacaggcuccaa

SEQ ID NO: 1832434 - RNA, 19 nt, Homo sapiens
  misc_RNA (1)...(19): siRNA sense strand
aaggauaucaagcacuaaa

SEQ ID NO: 1832435 - RNA, 19 nt, Homo sapiens
  misc_RNA (1)...(19): siRNA sense strand
gaugaaucucucuuccuau

SEQ ID NO: 1832436 - RNA, 19 nt, Homo sapiens
  misc_RNA (1)...(19): siRNA sense strand
caagaaaagagagaaauug

SEQ ID NO: 1832437 - RNA, 19 nt, Homo sapiens
  misc_RNA (1)...(19): siRNA sense strand
gcacuaaaaggaucuguag

SEQ ID NO: 1832438 - RNA, 19 nt, Homo sapiens
  misc_RNA (1)...(19): siRNA sense strand
caaucuggcuauaaaagga

SEQ ID NO: 1832439 - RNA, 19 nt, Homo sapiens
  misc_RNA (1)...(19): siRNA sense strand
aauacugaaucaacacaag

SEQ ID NO: 1832440 - RNA, 19 nt, Homo sapiens
  misc_RNA (1)...(19): siRNA sense strand
aaucauggucugccacuca

SEQ ID NO: 1832441 - RNA, 19 nt, Homo sapiens
  misc_RNA (1)...(19): siRNA sense strand
uccaaguccauaagaaauu

SEQ ID NO: 1832442 - RNA, 19 nt, Homo sapiens
  misc_RNA (1)...(19): siRNA sense strand
gagagaaauuggggaugaa

SEQ ID NO: 1832443 - RNA, 19 nt, Homo sapiens
  misc_RNA (1)...(19): siRNA sense strand
ugaacgaagaggaaaauaa

SEQ ID NO: 1832444 - RNA, 19 nt, Homo sapiens
  misc_RNA (1)...(19): siRNA sense strand
gaaauuggggaugaagaaa

SEQ ID NO: 1832445 - RNA, 19 nt, Homo sapiens
  misc_RNA (1)...(19): siRNA sense strand
agagagaaauuggggauga

SEQ ID NO: 1832446 - RNA, 19 nt, Homo sapiens
  misc_RNA (1)...(19): siRNA sense strand
ugagaauggaguucagaau

SEQ ID NO: 1832447 - RNA, 19 nt, Homo sapiens
  misc_RNA (1)...(19): siRNA sense strand
gagcaggaacuccacuaug

SEQ ID NO: 1832448 - RNA, 19 nt, Homo sapiens
  misc_RNA (1)...(19): siRNA sense strand
cugcauugcugagaacaaa

SEQ ID NO: 1832449 - RNA, 19 nt, Homo sapiens
  misc_RNA (1)...(19): siRNA sense strand
gaacuccacuaugcaucuc

SEQ ID NO: 1832450 - RNA, 19 nt, Homo sapiens
  misc_RNA (1)...(19): siRNA sense strand
ggaacuccacuaugcaucu

SEQ ID NO: 1832451 - RNA, 19 nt, Homo sapiens
  misc_RNA (1)...(19): siRNA sense strand
gcaggaacuccacuaugca

SEQ ID NO: 1832452 - RNA, 19 nt, Homo sapiens
  misc_RNA (1)...(19): siRNA sense strand
caccaaggaggauccaaga

SEQ ID NO: 1832453 - RNA, 19 nt, Homo sapiens
  misc_RNA (1)...(19): siRNA sense strand
agcaggaacuccacuaugc

SEQ ID NO: 1832454 - RNA, 19 nt, Homo sapiens
  misc_RNA (1)...(19): siRNA sense strand
gauccaagagcugacuaug

SEQ ID NO: 1832455 - RNA, 19 nt, Homo sapiens
  misc_RNA (1)...(19): siRNA sense strand
gaauugggcugaaauauuu

SEQ ID NO: 1832456 - RNA, 19 nt, Homo sapiens
  misc_RNA (1)...(19): siRNA sense strand
gaaauugccuggaguagga

SEQ ID NO: 1832457 - RNA, 19 nt, Homo sapiens
  misc_RNA (1)...(19): siRNA sense strand
gaagagauguuacaaaugc

SEQ ID NO: 1832458 - RNA, 19 nt, Homo sapiens
  misc_RNA (1)...(19): siRNA sense strand
ucacagaacucgcaaacuu

SEQ ID NO: 1832459 - RNA, 19 nt, Homo sapiens
  misc_RNA (1)...(19): siRNA sense strand
caaggaaguuuguagauga

SEQ ID NO: 1832460 - RNA, 19 nt, Homo sapiens
  misc_RNA (1)...(19): siRNA sense strand
gugaagagauguuacaaau

SEQ ID NO: 1832461 - RNA, 19 nt, Homo sapiens
  misc_RNA (1)...(19): siRNA sense strand
gcaaggaaguuuguagaug

SEQ ID NO: 1832462 - RNA, 19 nt, Homo sapiens
  misc_RNA (1)...(19): siRNA sense strand
gccaagcuauccacaagua

SEQ ID NO: 1832463 - RNA, 19 nt, Homo sapiens
  misc_RNA (1)...(19): siRNA sense strand
ccacacagaagaauugaua

SEQ ID NO: 1832464 - RNA, 19 nt, Homo sapiens
  misc_RNA (1)...(19): siRNA sense strand
cagcuucacuucagaauca

SEQ ID NO: 1832465 - RNA, 19 nt, Homo sapiens
  misc_RNA (1)...(19): siRNA sense strand
caaguacaaugcuuacaga

SEQ ID NO: 1832466 - RNA, 19 nt, Homo sapiens
  misc_RNA (1)...(19): siRNA sense strand
gauacgaguucauccauca

SEQ ID NO: 1832467 - RNA, 19 nt, Homo sapiens
  misc_RNA (1)...(19): siRNA sense strand
guacaaugcuuacagaaaa

SEQ ID NO: 1832468 - RNA, 19 nt, Homo sapiens
  misc_RNA (1)...(19): siRNA sense strand
cagcaucuguuauagcaaa

SEQ ID NO: 1832469 - RNA, 19 nt, Homo sapiens
  misc_RNA (1)...(19): siRNA sense strand
gagccaagcuauccacaag

SEQ ID NO: 1832470 - RNA, 19 nt, Homo sapiens
  misc_RNA (1)...(19): siRNA sense strand
guuuguagaugaaggaauu

SEQ ID NO: 1832471 - RNA, 19 nt, Homo sapiens
  misc_RNA (1)...(19): siRNA sense strand
cgaauugggcugaaauauu

SEQ ID NO: 1832472 - RNA, 19 nt, Homo sapiens
  misc_RNA (1)...(19): siRNA sense strand
gaauauccacacagaagaa

SEQ ID NO: 1832473 - RNA, 19 nt, Homo sapiens
  misc_RNA (1)...(19): siRNA sense strand
gaaccaucaucagcgaauu

SEQ ID NO: 1832474 - RNA, 19 nt, Homo sapiens
  misc_RNA (1)...(19): siRNA sense strand
uaagaaauugccuggagua

SEQ ID NO: 1832475 - RNA, 19 nt, Homo sapiens
  misc_RNA (1)...(19): siRNA sense strand
gaagaauugauaucagguu

SEQ ID NO: 1832476 - RNA, 19 nt, Homo sapiens
  misc_RNA (1)...(19): siRNA sense strand
ucaccgacaugcucacaga

SEQ ID NO: 1832477 - RNA, 19 nt, Homo sapiens
  misc_RNA (1)...(19): siRNA sense strand
caaaauacccacacaaaau

SEQ ID NO: 1832478 - RNA, 19 nt, Homo sapiens
  misc_RNA (1)...(19): siRNA sense strand
caaagggugagacaaaguu

SEQ ID NO: 1832479 - RNA, 19 nt, Homo sapiens
  misc_RNA (1)...(19): siRNA sense strand
cgaguucauccaucaauuu

SEQ ID NO: 1832480 - RNA, 19 nt, Homo sapiens
  misc_RNA (1)...(19): siRNA sense strand
uuacugugguguucucuau

SEQ ID NO: 1832481 - RNA, 19 nt, Homo sapiens
  misc_RNA (1)...(19): siRNA sense strand
agacaucuuugauuacauc

SEQ ID NO: 1832482 - RNA, 19 nt, Homo sapiens
  misc_RNA (1)...(19): siRNA sense strand
gaacgugagccaagcuauc

SEQ ID NO: 1832483 - RNA, 19 nt, Homo sapiens
  misc_RNA (1)...(19): siRNA sense strand
gggagucacuggaguugca

SEQ ID NO: 1832484 - RNA, 19 nt, Homo sapiens
  misc_RNA (1)...(19): siRNA sense strand
gcaaaauacccacacaaaa

SEQ ID NO: 1832485 - RNA, 19 nt, Homo sapiens
  misc_RNA (1)...(19): siRNA sense strand
acugugguguucucuauuu

SEQ ID NO: 1832486 - RNA, 19 nt, Homo sapiens
  misc_RNA (1)...(19): siRNA sense strand
aauaaagaguggagcugaa

SEQ ID NO: 1832487 - RNA, 19 nt, Homo sapiens
  misc_RNA (1)...(19): siRNA sense strand
aaaagaauauccacacaga

SEQ ID NO: 1832488 - RNA, 19 nt, Homo sapiens
  misc_RNA (1)...(19): siRNA sense strand
cugaauacauugcuacagu

SEQ ID NO: 1832489 - RNA, 19 nt, Homo sapiens
  misc_RNA (1)...(19): siRNA sense strand
uacccaaagaucaguauua

SEQ ID NO: 1832490 - RNA, 19 nt, Homo sapiens
  misc_RNA (1)...(19): siRNA sense strand
aaaagcagcaucuguuaua

SEQ ID NO: 1832491 - RNA, 19 nt, Homo sapiens
  misc_RNA (1)...(19): siRNA sense strand
ucagguugauacccaaaga

SEQ ID NO: 1832492 - RNA, 19 nt, Homo sapiens
  misc_RNA (1)...(19): siRNA sense strand
gaaguuuguagaugaagga

SEQ ID NO: 1832493 - RNA, 19 nt, Homo sapiens
  misc_RNA (1)...(19): siRNA sense strand
gaaauauuuuggggacuuu

SEQ ID NO: 1832494 - RNA, 19 nt, Homo sapiens
  misc_RNA (1)...(19): siRNA sense strand
uuugccagcuucccaguaa

SEQ ID NO: 1832495 - RNA, 19 nt, Homo sapiens
  misc_RNA (1)...(19): siRNA sense strand
cacagaacucgcaaacuuu

SEQ ID NO: 1832496 - RNA, 19 nt, Homo sapiens
  misc_RNA (1)...(19): siRNA sense strand
guuucacaaucaaugagua

SEQ ID NO: 1832497 - RNA, 19 nt, Homo sapiens
  misc_RNA (1)...(19): siRNA sense strand
cugaaaagauugaugaguu

SEQ ID NO: 1832498 - RNA, 19 nt, Homo sapiens
  misc_RNA (1)...(19): siRNA sense strand
aagaauuccucgugaagag

SEQ ID NO: 1832499 - RNA, 19 nt, Homo sapiens
  misc_RNA (1)...(19): siRNA sense strand
aaggaaguuuguagaugaa

SEQ ID NO: 1832500 - RNA, 19 nt, Homo sapiens
  misc_RNA (1)...(19): siRNA sense strand
uauccacacagaagaauug

SEQ ID NO: 1832501 - RNA, 19 nt, Homo sapiens
  misc_RNA (1)...(19): siRNA sense strand
gaguucauccaucaauuuc

SEQ ID NO: 1832502 - RNA, 19 nt, Homo sapiens
  misc_RNA (1)...(19): siRNA sense strand
gaaaagcagcaucuguuau

SEQ ID NO: 1832503 - RNA, 19 nt, Homo sapiens
  misc_RNA (1)...(19): siRNA sense strand
acuagaagaucucagaaaa

SEQ ID NO: 1832504 - RNA, 19 nt, Homo sapiens
  misc_RNA (1)...(19): siRNA sense strand
gcgaauugggcugaaauau

SEQ ID NO: 1832505 - RNA, 19 nt, Homo sapiens
  misc_RNA (1)...(19): siRNA sense strand
aagaauauccacacagaag

SEQ ID NO: 1832506 - RNA, 19 nt, Homo sapiens
  misc_RNA (1)...(19): siRNA sense strand
caucccagcuucacuucag

SEQ ID NO: 1832507 - RNA, 19 nt, Homo sapiens
  misc_RNA (1)...(19): siRNA sense strand
gcaggaugauacgaguuca

SEQ ID NO: 1832508 - RNA, 19 nt, Homo sapiens
  misc_RNA (1)...(19): siRNA sense strand
acagaagaauugauaucag

SEQ ID NO: 1832509 - RNA, 19 nt, Homo sapiens
  misc_RNA (1)...(19): siRNA sense strand
ugaagagauguuacaaaug

SEQ ID NO: 1832510 - RNA, 19 nt, Homo sapiens
  misc_RNA (1)...(19): siRNA sense strand
gaauuccucgugaagagau

SEQ ID NO: 1832511 - RNA, 19 nt, Homo sapiens
  misc_RNA (1)...(19): siRNA sense strand
aaagcagcaucuguuauag

SEQ ID NO: 1832512 - RNA, 19 nt, Homo sapiens
  misc_RNA (1)...(19): siRNA sense strand
gaauacauugcuacagucu

SEQ ID NO: 1832513 - RNA, 19 nt, Homo sapiens
  misc_RNA (1)...(19): siRNA sense strand
caaggaccggagcgaauga

SEQ ID NO: 1832514 - RNA, 19 nt, Homo sapiens
  misc_RNA (1)...(19): siRNA sense strand
ccaaggaccggagcgaaug

SEQ ID NO: 1832515 - RNA, 19 nt, Homo sapiens
  misc_RNA (1)...(19): siRNA sense strand
cacagaagaauugauauca

SEQ ID NO: 1832516 - RNA, 19 nt, Homo sapiens
  misc_RNA (1)...(19): siRNA sense strand
acaaaguucauggguguuu

SEQ ID NO: 1832517 - RNA, 19 nt, Homo sapiens
  misc_RNA (1)...(19): siRNA sense strand
caagcuauccacaaguaca

SEQ ID NO: 1832518 - RNA, 19 nt, Homo sapiens
  misc_RNA (1)...(19): siRNA sense strand
cacuggaguugcaggagaa

SEQ ID NO: 1832519 - RNA, 19 nt, Homo sapiens
  misc_RNA (1)...(19): siRNA sense strand
caaaugcaagauauuguac

SEQ ID NO: 1832520 - RNA, 19 nt, Homo sapiens
  misc_RNA (1)...(19): siRNA sense strand
acgaguucauccaucaauu

SEQ ID NO: 1832521 - RNA, 19 nt, Homo sapiens
  misc_RNA (1)...(19): siRNA sense strand
gucaaagggugagacaaag

SEQ ID NO: 1832522 - RNA, 19 nt, Homo sapiens
  misc_RNA (1)...(19): siRNA sense strand
aaagaauuccucgugaaga

SEQ ID NO: 1832523 - RNA, 19 nt, Homo sapiens
  misc_RNA (1)...(19): siRNA sense strand
agaaaagcagcaucuguua

SEQ ID NO: 1832524 - RNA, 19 nt, Homo sapiens
  misc_RNA (1)...(19): siRNA sense strand
guauuacugugguguucuc

SEQ ID NO: 1832525 - RNA, 19 nt, Homo sapiens
  misc_RNA (1)...(19): siRNA sense strand
acacagaagaauugauauc

SEQ ID NO: 1832526 - RNA, 19 nt, Homo sapiens
  misc_RNA (1)...(19): siRNA sense strand
guucauccaucaauuuccu

SEQ ID NO: 1832527 - RNA, 19 nt, Homo sapiens
  misc_RNA (1)...(19): siRNA sense strand
acccaaagaucaguauuac

SEQ ID NO: 1832528 - RNA, 19 nt, Homo sapiens
  misc_RNA (1)...(19): siRNA sense strand
cgugaagagauguuacaaa

SEQ ID NO: 1832529 - RNA, 19 nt, Homo sapiens
  misc_RNA (1)...(19): siRNA sense strand
uaaauugaaccaucaucag

SEQ ID NO: 1832530 - RNA, 19 nt, Homo sapiens
  misc_RNA (1)...(19): siRNA sense strand
gacucgaguuaguggcauu

SEQ ID NO: 1832531 - RNA, 19 nt, Homo sapiens
  misc_RNA (1)...(19): siRNA sense strand
ggcaggaugauacgaguuc

SEQ ID NO: 1832532 - RNA, 19 nt, Homo sapiens
  misc_RNA (1)...(19): siRNA sense strand
agaguccaguggugacaug

SEQ ID NO: 1832533 - RNA, 19 nt, Homo sapiens
  misc_RNA (1)...(19): siRNA sense strand
gcucacagaacucgcaaac

SEQ ID NO: 1832534 - RNA, 19 nt, Homo sapiens
  misc_RNA (1)...(19): siRNA sense strand
ggaauuaaaacacuagaag

SEQ ID NO: 1832535 - RNA, 19 nt, Homo sapiens
  misc_RNA (1)...(19): siRNA sense strand
aguacaaugcuuacagaaa

SEQ ID NO: 1832536 - RNA, 19 nt, Homo sapiens
  misc_RNA (1)...(19): siRNA sense strand
cacuagaagaucucagaaa

SEQ ID NO: 1832537 - RNA, 19 nt, Homo sapiens
  misc_RNA (1)...(19): siRNA sense strand
agcagcaucuguuauagca

SEQ ID NO: 1832538 - RNA, 19 nt, Homo sapiens
  misc_RNA (1)...(19): siRNA sense strand
agaauauccacacagaaga

SEQ ID NO: 1832539 - RNA, 19 nt, Homo sapiens
  misc_RNA (1)...(19): siRNA sense strand
aaagaauauccacacagaa

SEQ ID NO: 1832540 - RNA, 19 nt, Homo sapiens
  misc_RNA (1)...(19): siRNA sense strand
ccacaaguacaaugcuuac

SEQ ID NO: 1832541 - RNA, 19 nt, Homo sapiens
  misc_RNA (1)...(19): siRNA sense strand
gauaaauugaaccaucauc

SEQ ID NO: 1832542 - RNA, 19 nt, Homo sapiens
  misc_RNA (1)...(19): siRNA sense strand
gaagaacgugagccaagcu

SEQ ID NO: 1832543 - RNA, 19 nt, Homo sapiens
  misc_RNA (1)...(19): siRNA sense strand
gaacugugcucccgagaga

SEQ ID NO: 1832544 - RNA, 19 nt, Homo sapiens
  misc_RNA (1)...(19): siRNA sense strand
gcacaugggugaccugcaa

SEQ ID NO: 1832545 - RNA, 19 nt, Homo sapiens
  misc_RNA (1)...(19): siRNA sense strand
gcaagaaggugcggaagga

SEQ ID NO: 1832546 - RNA, 19 nt, Homo sapiens
  misc_RNA (1)...(19): siRNA sense strand
gagcacagccugcccauug

SEQ ID NO: 1832547 - RNA, 19 nt, Homo sapiens
  misc_RNA (1)...(19): siRNA sense strand
gagcugaacuuggccauca

SEQ ID NO: 1832548 - RNA, 19 nt, Homo sapiens
  misc_RNA (1)...(19): siRNA sense strand
gaucaccgguuacaacauc

SEQ ID NO: 1832549 - RNA, 19 nt, Homo sapiens
  misc_RNA (1)...(19): siRNA sense strand
ggagguaucccaucugaau

SEQ ID NO: 1832550 - RNA, 19 nt, Homo sapiens
  misc_RNA (1)...(19): siRNA sense strand
aguuggagauugaccauua

SEQ ID NO: 1832551 - RNA, 19 nt, Homo sapiens
  misc_RNA (1)...(19): siRNA sense strand
guacaaacauucccuuucc

SEQ ID NO: 1832552 - RNA, 19 nt, Homo sapiens
  misc_RNA (1)...(19): siRNA sense strand
gacgucagaugaucgagaa

SEQ ID NO: 1832553 - RNA, 19 nt, Homo sapiens
  misc_RNA (1)...(19): siRNA sense strand
cggcuucgcucccuacuuc

SEQ ID NO: 1832554 - RNA, 19 nt, Homo sapiens
  misc_RNA (1)...(19): siRNA sense strand
gugccaaggugcagagcua

SEQ ID NO: 1832555 - RNA, 19 nt, Homo sapiens
  misc_RNA (1)...(19): siRNA sense strand
caacgucgacuuugagauc

SEQ ID NO: 1832556 - RNA, 19 nt, Homo sapiens
  misc_RNA (1)...(19): siRNA sense strand
guuacaacauccagaacuu

SEQ ID NO: 1832557 - RNA, 19 nt, Homo sapiens
  misc_RNA (1)...(19): siRNA sense strand
ggagauugaccauuaugug

SEQ ID NO: 1832558 - RNA, 19 nt, Homo sapiens
  misc_RNA (1)...(19): siRNA sense strand
gugccaaggugguguaugg

SEQ ID NO: 1832559 - RNA, 19 nt, Homo sapiens
  misc_RNA (1)...(19): siRNA sense strand
aaggagguaucccaucuga

SEQ ID NO: 1832560 - RNA, 19 nt, Homo sapiens
  misc_RNA (1)...(19): siRNA sense strand
ucucggaccugcugugcaa

SEQ ID NO: 1832561 - RNA, 19 nt, Homo sapiens
  misc_RNA (1)...(19): siRNA sense strand
agaaggagguaucccaucu

SEQ ID NO: 1832562 - RNA, 19 nt, Homo sapiens
  misc_RNA (1)...(19): siRNA sense strand
aggaggagcugcagucagu

SEQ ID NO: 1832563 - RNA, 19 nt, Homo sapiens
  misc_RNA (1)...(19): siRNA sense strand
ccauugacacgcaguacua

SEQ ID NO: 1832564 - RNA, 19 nt, Homo sapiens
  misc_RNA (1)...(19): siRNA sense strand
ccauccggcuggaguuuga

SEQ ID NO: 1832565 - RNA, 19 nt, Homo sapiens
  misc_RNA (1)...(19): siRNA sense strand
gaggaggaccuggcacuga

SEQ ID NO: 1832566 - RNA, 19 nt, Homo sapiens
  misc_RNA (1)...(19): siRNA sense strand
cgccgcaacugcugcauug

SEQ ID NO: 1832567 - RNA, 19 nt, Homo sapiens
  misc_RNA (1)...(19): siRNA sense strand
ccucugggaugaugaugau

SEQ ID NO: 1832568 - RNA, 19 nt, Homo sapiens
  misc_RNA (1)...(19): siRNA sense strand
acaccaagguugucagcau

SEQ ID NO: 1832569 - RNA, 19 nt, Homo sapiens
  misc_RNA (1)...(19): siRNA sense strand
caacauccgggacucuuca

SEQ ID NO: 1832570 - RNA, 19 nt, Homo sapiens
  misc_RNA (1)...(19): siRNA sense strand
gagcuggccgagaggauga

SEQ ID NO: 1832571 - RNA, 19 nt, Homo sapiens
  misc_RNA (1)...(19): siRNA sense strand
guuggagauugaccauuau

SEQ ID NO: 1832572 - RNA, 19 nt, Homo sapiens
  misc_RNA (1)...(19): siRNA sense strand
gggacgaguuugugaagac

SEQ ID NO: 1832573 - RNA, 19 nt, Homo sapiens
  misc_RNA (1)...(19): siRNA sense strand
ggacuucuccucgcuguac

SEQ ID NO: 1832574 - RNA, 19 nt, Homo sapiens
  misc_RNA (1)...(19): siRNA sense strand
gugcucagcuucgauaucg

SEQ ID NO: 1832575 - RNA, 19 nt, Homo sapiens
  misc_RNA (1)...(19): siRNA sense strand
gguacaaacauucccuuuc

SEQ ID NO: 1832576 - RNA, 19 nt, Homo sapiens
  misc_RNA (1)...(19): siRNA sense strand
gaccacacgcgcugcaaga

SEQ ID NO: 1832577 - RNA, 19 nt, Homo sapiens
  misc_RNA (1)...(19): siRNA sense strand
ggucccaccaucagccaua

SEQ ID NO: 1832578 - RNA, 19 nt, Homo sapiens
  misc_RNA (1)...(19): siRNA sense strand
ggugaacgccguggagaug

SEQ ID NO: 1832579 - RNA, 19 nt, Homo sapiens
  misc_RNA (1)...(19): siRNA sense strand
gcaacgggagcugaacuug

SEQ ID NO: 1832580 - RNA, 19 nt, Homo sapiens
  misc_RNA (1)...(19): siRNA sense strand
cuaaguacacaguggagaa

SEQ ID NO: 1832581 - RNA, 19 nt, Homo sapiens
  misc_RNA (1)...(19): siRNA sense strand
aggccaacgucgacuuuga

SEQ ID NO: 1832582 - RNA, 19 nt, Homo sapiens
  misc_RNA (1)...(19): siRNA sense strand
gguccaccuucauccguau

SEQ ID NO: 1832583 - RNA, 19 nt, Homo sapiens
  misc_RNA (1)...(19): siRNA sense strand
guucggacgucagaugauc

SEQ ID NO: 1832584 - RNA, 19 nt, Homo sapiens
  misc_RNA (1)...(19): siRNA sense strand
ggcccagacccucaaggua

SEQ ID NO: 1832585 - RNA, 19 nt, Homo sapiens
  misc_RNA (1)...(19): siRNA sense strand
gggagucugagcuguauca

SEQ ID NO: 1832586 - RNA, 19 nt, Homo sapiens
  misc_RNA (1)...(19): siRNA sense strand
gcaaccgcaucgauaucuc

SEQ ID NO: 1832587 - RNA, 19 nt, Homo sapiens
  misc_RNA (1)...(19): siRNA sense strand
cgaggccaacgucgacuuu

SEQ ID NO: 1832588 - RNA, 19 nt, Homo sapiens
  misc_RNA (1)...(19): siRNA sense strand
gaaggagguaucccaucug

SEQ ID NO: 1832589 - RNA, 19 nt, Homo sapiens
  misc_RNA (1)...(19): siRNA sense strand
ucccauaccugcuuaucag

SEQ ID NO: 1832590 - RNA, 19 nt, Homo sapiens
  misc_RNA (1)...(19): siRNA sense strand
gaccuuccguaccucaucu

SEQ ID NO: 1832591 - RNA, 19 nt, Homo sapiens
  misc_RNA (1)...(19): siRNA sense strand
gaugagggguucucugucu

SEQ ID NO: 1832592 - RNA, 19 nt, Homo sapiens
  misc_RNA (1)...(19): siRNA sense strand
cccugaggcugaaggagaa

SEQ ID NO: 1832593 - RNA, 19 nt, Homo sapiens
  misc_RNA (1)...(19): siRNA sense strand
gguggagucuaaguacaca

SEQ ID NO: 1832594 - RNA, 19 nt, Homo sapiens
  misc_RNA (1)...(19): siRNA sense strand
ccgggagucugagcuguau

SEQ ID NO: 1832595 - RNA, 19 nt, Homo sapiens
  misc_RNA (1)...(19): siRNA sense strand
cauccgggacucuucauuc

SEQ ID NO: 1832596 - RNA, 19 nt, Homo sapiens
  misc_RNA (1)...(19): siRNA sense strand
gagguaucccaucugaaug

SEQ ID NO: 1832597 - RNA, 19 nt, Homo sapiens
  misc_RNA (1)...(19): siRNA sense strand
ggagauggaggcagaacac

SEQ ID NO: 1832598 - RNA, 19 nt, Homo sapiens
  misc_RNA (1)...(19): siRNA sense strand
aggaggaccuggcacugau

SEQ ID NO: 1832599 - RNA, 19 nt, Homo sapiens
  misc_RNA (1)...(19): siRNA sense strand
gcuguacccguccaucaug

SEQ ID NO: 1832600 - RNA, 19 nt, Homo sapiens
  misc_RNA (1)...(19): siRNA sense strand
gagcgccaacuccguauac

SEQ ID NO: 1832601 - RNA, 19 nt, Homo sapiens
  misc_RNA (1)...(19): siRNA sense strand
ggcuggaguuugagaaggu

SEQ ID NO: 1832602 - RNA, 19 nt, Homo sapiens
  misc_RNA (1)...(19): siRNA sense strand
cggacgugcuguggucuga

SEQ ID NO: 1832603 - RNA, 19 nt, Homo sapiens
  misc_RNA (1)...(19): siRNA sense strand
agacagagccccucaucuu

SEQ ID NO: 1832604 - RNA, 19 nt, Homo sapiens
  misc_RNA (1)...(19): siRNA sense strand
cuacuucccauaccugcuu

SEQ ID NO: 1832605 - RNA, 19 nt, Homo sapiens
  misc_RNA (1)...(19): siRNA sense strand
ggaggaggagcugcaguca

SEQ ID NO: 1832606 - RNA, 19 nt, Homo sapiens
  misc_RNA (1)...(19): siRNA sense strand
ccucaagguacaaacauuc

SEQ ID NO: 1832607 - RNA, 19 nt, Homo sapiens
  misc_RNA (1)...(19): siRNA sense strand
uaaguacacaguggagaau

SEQ ID NO: 1832608 - RNA, 19 nt, Homo sapiens
  misc_RNA (1)...(19): siRNA sense strand
gaagcaggaugaacugaaa

SEQ ID NO: 1832609 - RNA, 19 nt, Homo sapiens
  misc_RNA (1)...(19): siRNA sense strand
gagccacgcgcuacaauua

SEQ ID NO: 1832610 - RNA, 19 nt, Homo sapiens
  misc_RNA (1)...(19): siRNA sense strand
gaaacggauugccagagaa

SEQ ID NO: 1832611 - RNA, 19 nt, Homo sapiens
  misc_RNA (1)...(19): siRNA sense strand
ugaaacggauugccagaga

SEQ ID NO: 1832612 - RNA, 19 nt, Homo sapiens
  misc_RNA (1)...(19): siRNA sense strand
gaggauagcagcagaagag

SEQ ID NO: 1832613 - RNA, 19 nt, Homo sapiens
  misc_RNA (1)...(19): siRNA sense strand
cagcagaagagaagaagaa

SEQ ID NO: 1832614 - RNA, 19 nt, Homo sapiens
  misc_RNA (1)...(19): siRNA sense strand
gaagaggagaggaggauag

SEQ ID NO: 1832615 - RNA, 19 nt, Homo sapiens
  misc_RNA (1)...(19): siRNA sense strand
gaagaagcaggaugaacug

SEQ ID NO: 1832616 - RNA, 19 nt, Homo sapiens
  misc_RNA (1)...(19): siRNA sense strand
agaagaagaagcaggauga

SEQ ID NO: 1832617 - RNA, 19 nt, Homo sapiens
  misc_RNA (1)...(19): siRNA sense strand
gcaggucucuccgcucauc

SEQ ID NO: 1832618 - RNA, 19 nt, Homo sapiens
  misc_RNA (1)...(19): siRNA sense strand
gauagcagcagaagagaag

SEQ ID NO: 1832619 - RNA, 19 nt, Homo sapiens
  misc_RNA (1)...(19): siRNA sense strand
gcgcuacaauuaccuaaaa

SEQ ID NO: 1832620 - RNA, 19 nt, Homo sapiens
  misc_RNA (1)...(19): siRNA sense strand
gaagaagaagcaggaugaa

SEQ ID NO: 1832621 - RNA, 19 nt, Homo sapiens
  misc_RNA (1)...(19): siRNA sense strand
cagaagagaagaagaagca

SEQ ID NO: 1832622 - RNA, 19 nt, Homo sapiens
  misc_RNA (1)...(19): siRNA sense strand
ggagccacgcgcuacaauu

SEQ ID NO: 1832623 - RNA, 19 nt, Homo sapiens
  misc_RNA (1)...(19): siRNA sense strand
ggauagcagcagaagagaa

SEQ ID NO: 1832624 - RNA, 19 nt, Homo sapiens
  misc_RNA (1)...(19): siRNA sense strand
gaugaacugaaacggauug

SEQ ID NO: 1832625 - RNA, 19 nt, Homo sapiens
  misc_RNA (1)...(19): siRNA sense strand
agaagaagcaggaugaacu

SEQ ID NO: 1832626 - RNA, 19 nt, Homo sapiens
  misc_RNA (1)...(19): siRNA sense strand
aaacggauugccagagaau

SEQ ID NO: 1832627 - RNA, 19 nt, Homo sapiens
  misc_RNA (1)...(19): siRNA sense strand
gaggaggauagcagcagaa

SEQ ID NO: 1832628 - RNA, 19 nt, Homo sapiens
  misc_RNA (1)...(19): siRNA sense strand
ccuaaaaccucgggcagaa

SEQ ID NO: 1832629 - RNA, 19 nt, Homo sapiens
  misc_RNA (1)...(19): siRNA sense strand
agaagcaggaugaacugaa

SEQ ID NO: 1832630 - RNA, 19 nt, Homo sapiens
  misc_RNA (1)...(19): siRNA sense strand
ggaggauagcagcagaaga

SEQ ID NO: 1832631 - RNA, 19 nt, Homo sapiens
  misc_RNA (1)...(19): siRNA sense strand
ggaugaacugaaacggauu

SEQ ID NO: 1832632 - RNA, 19 nt, Homo sapiens
  misc_RNA (1)...(19): siRNA sense strand
ggaaaugacuucagccaaa

SEQ ID NO: 1832633 - RNA, 19 nt, Homo sapiens
  misc_RNA (1)...(19): siRNA sense strand
ucaaggagcugcacaguug

SEQ ID NO: 1832634 - RNA, 19 nt, Homo sapiens
  misc_RNA (1)...(19): siRNA sense strand
gccaagaccuucaaacaaa

SEQ ID NO: 1832635 - RNA, 19 nt, Homo sapiens
  misc_RNA (1)...(19): siRNA sense strand
caacauccguguggccuua

SEQ ID NO: 1832636 - RNA, 19 nt, Homo sapiens
  misc_RNA (1)...(19): siRNA sense strand
gaagaaacgcaccagcaua

SEQ ID NO: 1832637 - RNA, 19 nt, Homo sapiens
  misc_RNA (1)...(19): siRNA sense strand
ccaauggucuggacuuuca

SEQ ID NO: 1832638 - RNA, 19 nt, Homo sapiens
  misc_RNA (1)...(19): siRNA sense strand
accagcagcucaccuauua

SEQ ID NO: 1832639 - RNA, 19 nt, Homo sapiens
  misc_RNA (1)...(19): siRNA sense strand
ggacagauaacugggcuua

SEQ ID NO: 1832640 - RNA, 19 nt, Homo sapiens
  misc_RNA (1)...(19): siRNA sense strand
gaaacuauauggaaaugac

SEQ ID NO: 1832641 - RNA, 19 nt, Homo sapiens
  misc_RNA (1)...(19): siRNA sense strand
caacacagcaaccgugauu

SEQ ID NO: 1832642 - RNA, 19 nt, Homo sapiens
  misc_RNA (1)...(19): siRNA sense strand
gcaacuacccucacaguca

SEQ ID NO: 1832643 - RNA, 19 nt, Homo sapiens
  misc_RNA (1)...(19): siRNA sense strand
ccagaacucucucuucaca

SEQ ID NO: 1832644 - RNA, 19 nt, Homo sapiens
  misc_RNA (1)...(19): siRNA sense strand
ugacgaaucuuucaguuac

SEQ ID NO: 1832645 - RNA, 19 nt, Homo sapiens
  misc_RNA (1)...(19): siRNA sense strand
caaagacgaaucaaacuug

SEQ ID NO: 1832646 - RNA, 19 nt, Homo sapiens
  misc_RNA (1)...(19): siRNA sense strand
aaacuaccaucucucgauu

SEQ ID NO: 1832647 - RNA, 19 nt, Homo sapiens
  misc_RNA (1)...(19): siRNA sense strand
gaagcagccugugccugua

SEQ ID NO: 1832648 - RNA, 19 nt, Homo sapiens
  misc_RNA (1)...(19): siRNA sense strand
uaacugggcuuacuuugac

SEQ ID NO: 1832649 - RNA, 19 nt, Homo sapiens
  misc_RNA (1)...(19): siRNA sense strand
gauggcacccucacaguuu

SEQ ID NO: 1832650 - RNA, 19 nt, Homo sapiens
  misc_RNA (1)...(19): siRNA sense strand
uaccaucucucgauuugaa

SEQ ID NO: 1832651 - RNA, 19 nt, Homo sapiens
  misc_RNA (1)...(19): siRNA sense strand
ccaacucgcuggaacaagu

SEQ ID NO: 1832652 - RNA, 19 nt, Homo sapiens
  misc_RNA (1)...(19): siRNA sense strand
caaacaaagacgaaucaaa

SEQ ID NO: 1832653 - RNA, 19 nt, Homo sapiens
  misc_RNA (1)...(19): siRNA sense strand
gaaaugacuucagccaaac

SEQ ID NO: 1832654 - RNA, 19 nt, Homo sapiens
  misc_RNA (1)...(19): siRNA sense strand
gaguggagauggcaacaca

SEQ ID NO: 1832655 - RNA, 19 nt, Homo sapiens
  misc_RNA (1)...(19): siRNA sense strand
aaacaaagacgaaucaaac

SEQ ID NO: 1832656 - RNA, 19 nt, Homo sapiens
  misc_RNA (1)...(19): siRNA sense strand
uugaggagcuugagcaguu

SEQ ID NO: 1832657 - RNA, 19 nt, Homo sapiens
  misc_RNA (1)...(19): siRNA sense strand
gagaaguggcuaaaugaug

SEQ ID NO: 1832658 - RNA, 19 nt, Homo sapiens
  misc_RNA (1)...(19): siRNA sense strand
gggaaacuauauggaaaug

SEQ ID NO: 1832659 - RNA, 19 nt, Homo sapiens
  misc_RNA (1)...(19): siRNA sense strand
gaucagcucaauauggaaa

SEQ ID NO: 1832660 - RNA, 19 nt, Homo sapiens
  misc_RNA (1)...(19): siRNA sense strand
uuaagaacaugugcaaguu

SEQ ID NO: 1832661 - RNA, 19 nt, Homo sapiens
  misc_RNA (1)...(19): siRNA sense strand
gcaacuaccucagcaaagc

SEQ ID NO: 1832662 - RNA, 19 nt, Homo sapiens
  misc_RNA (1)...(19): siRNA sense strand
gcucucagcccagcucuaa

SEQ ID NO: 1832663 - RNA, 19 nt, Homo sapiens
  misc_RNA (1)...(19): siRNA sense strand
aagaacaugugcaaguuga

SEQ ID NO: 1832664 - RNA, 19 nt, Homo sapiens
  misc_RNA (1)...(19): siRNA sense strand
gaauugauacucccagcuu

SEQ ID NO: 1832665 - RNA, 19 nt, Homo sapiens
  misc_RNA (1)...(19): siRNA sense strand
acaccaaagcgaauugaua

SEQ ID NO: 1832666 - RNA, 19 nt, Homo sapiens
  misc_RNA (1)...(19): siRNA sense strand
gcucaccuauuaaagcaau

SEQ ID NO: 1832667 - RNA, 19 nt, Homo sapiens
  misc_RNA (1)...(19): siRNA sense strand
cagcagcucaccuauuaaa

SEQ ID NO: 1832668 - RNA, 19 nt, Homo sapiens
  misc_RNA (1)...(19): siRNA sense strand
ggaagaaacgcaccagcau

SEQ ID NO: 1832669 - RNA, 19 nt, Homo sapiens
  misc_RNA (1)...(19): siRNA sense strand
gcugcucagucuuuaaaug

SEQ ID NO: 1832670 - RNA, 19 nt, Homo sapiens
  misc_RNA (1)...(19): siRNA sense strand
caacugggaaccugguauu

SEQ ID NO: 1832671 - RNA, 19 nt, Homo sapiens
  misc_RNA (1)...(19): siRNA sense strand
gugacgaaucuuucaguua

SEQ ID NO: 1832672 - RNA, 19 nt, Homo sapiens
  misc_RNA (1)...(19): siRNA sense strand
cugaucagcucaauaugga

SEQ ID NO: 1832673 - RNA, 19 nt, Homo sapiens
  misc_RNA (1)...(19): siRNA sense strand
gcuaaaugaugcagagaac

SEQ ID NO: 1832674 - RNA, 19 nt, Homo sapiens
  misc_RNA (1)...(19): siRNA sense strand
gccuugaaccucagcuuua

SEQ ID NO: 1832675 - RNA, 19 nt, Homo sapiens
  misc_RNA (1)...(19): siRNA sense strand
ccuugaaccucagcuuuaa

SEQ ID NO: 1832676 - RNA, 19 nt, Homo sapiens
  misc_RNA (1)...(19): siRNA sense strand
uagagaaguggcuaaauga

SEQ ID NO: 1832677 - RNA, 19 nt, Homo sapiens
  misc_RNA (1)...(19): siRNA sense strand
ggugacagcaucagguuug

SEQ ID NO: 1832678 - RNA, 19 nt, Homo sapiens
  misc_RNA (1)...(19): siRNA sense strand
cagcucaccuauuaaagca

SEQ ID NO: 1832679 - RNA, 19 nt, Homo sapiens
  misc_RNA (1)...(19): siRNA sense strand
aaagaggugauucguguuu

SEQ ID NO: 1832680 - RNA, 19 nt, Homo sapiens
  misc_RNA (1)...(19): siRNA sense strand
gcaccagcauagagaccaa

SEQ ID NO: 1832681 - RNA, 19 nt, Homo sapiens
  misc_RNA (1)...(19): siRNA sense strand
cacaggaucuucaacaacu

SEQ ID NO: 1832682 - RNA, 19 nt, Homo sapiens
  misc_RNA (1)...(19): siRNA sense strand
ugguggcucucuuccaaua

SEQ ID NO: 1832683 - RNA, 19 nt, Homo sapiens
  misc_RNA (1)...(19): siRNA sense strand
gagaccagcacaacacaga

SEQ ID NO: 1832684 - RNA, 19 nt, Homo sapiens
  misc_RNA (1)...(19): siRNA sense strand
gacaccaccuccaacaaca

SEQ ID NO: 1832685 - RNA, 19 nt, Homo sapiens
  misc_RNA (1)...(19): siRNA sense strand
aaccucagcuuuaagaaca

SEQ ID NO: 1832686 - RNA, 19 nt, Homo sapiens
  misc_RNA (1)...(19): siRNA sense strand
ccaagaccuucaaacaaag

SEQ ID NO: 1832687 - RNA, 19 nt, Homo sapiens
  misc_RNA (1)...(19): siRNA sense strand
gaaaccaguaaaccaucua

SEQ ID NO: 1832688 - RNA, 19 nt, Homo sapiens
  misc_RNA (1)...(19): siRNA sense strand
caaacuaccaucucucgau

SEQ ID NO: 1832689 - RNA, 19 nt, Homo sapiens
  misc_RNA (1)...(19): siRNA sense strand
gaaacgcaccagcauagag

SEQ ID NO: 1832690 - RNA, 19 nt, Homo sapiens
  misc_RNA (1)...(19): siRNA sense strand
gaacaugugcaaguugaag

SEQ ID NO: 1832691 - RNA, 19 nt, Homo sapiens
  misc_RNA (1)...(19): siRNA sense strand
agaacucucucuucacagu

SEQ ID NO: 1832692 - RNA, 19 nt, Homo sapiens
  misc_RNA (1)...(19): siRNA sense strand
agggaacucugcaccugua

SEQ ID NO: 1832693 - RNA, 19 nt, Homo sapiens
  misc_RNA (1)...(19): siRNA sense strand
gcucagucuuuaaauguac

SEQ ID NO: 1832694 - RNA, 19 nt, Homo sapiens
  misc_RNA (1)...(19): siRNA sense strand
gaccagcagcucaccuauu

SEQ ID NO: 1832695 - RNA, 19 nt, Homo sapiens
  misc_RNA (1)...(19): siRNA sense strand
gaaccucagcuuuaagaac

SEQ ID NO: 1832696 - RNA, 19 nt, Homo sapiens
  misc_RNA (1)...(19): siRNA sense strand
ccacagagccagucaacac

SEQ ID NO: 1832697 - RNA, 19 nt, Homo sapiens
  misc_RNA (1)...(19): siRNA sense strand
aaacgcaccagcauagaga

SEQ ID NO: 1832698 - RNA, 19 nt, Homo sapiens
  misc_RNA (1)...(19): siRNA sense strand
acuaccaucucucgauuug

SEQ ID NO: 1832699 - RNA, 19 nt, Homo sapiens
  misc_RNA (1)...(19): siRNA sense strand
cagccaaacuaccaucucu

SEQ ID NO: 1832700 - RNA, 19 nt, Homo sapiens
  misc_RNA (1)...(19): siRNA sense strand
gcacaggaucuucaacaac

SEQ ID NO: 1832701 - RNA, 19 nt, Homo sapiens
  misc_RNA (1)...(19): siRNA sense strand
gaaccugguauuugccaau

SEQ ID NO: 1832702 - RNA, 19 nt, Homo sapiens
  misc_RNA (1)...(19): siRNA sense strand
ucugguggcucucuuccaa

SEQ ID NO: 1832703 - RNA, 19 nt, Homo sapiens
  misc_RNA (1)...(19): siRNA sense strand
cagaccaccuccacuccuu

SEQ ID NO: 1832704 - RNA, 19 nt, Homo sapiens
  misc_RNA (1)...(19): siRNA sense strand
uaagaacaugugcaaguug

SEQ ID NO: 1832705 - RNA, 19 nt, Homo sapiens
  misc_RNA (1)...(19): siRNA sense strand
acagauaacugggcuuacu

SEQ ID NO: 1832706 - RNA, 19 nt, Homo sapiens
  misc_RNA (1)...(19): siRNA sense strand
gugcugcugugacgaaucu

SEQ ID NO: 1832707 - RNA, 19 nt, Homo sapiens
  misc_RNA (1)...(19): siRNA sense strand
gaaccucucaucugauucg

SEQ ID NO: 1832708 - RNA, 19 nt, Homo sapiens
  misc_RNA (1)...(19): siRNA sense strand
gaacaauccgucagaaacc

SEQ ID NO: 1832709 - RNA, 19 nt, Homo sapiens
  misc_RNA (1)...(19): siRNA sense strand
gauaacugggcuuacuuug

SEQ ID NO: 1832710 - RNA, 19 nt, Homo sapiens
  misc_RNA (1)...(19): siRNA sense strand
gcccaagugcccugaauuc

SEQ ID NO: 1832711 - RNA, 19 nt, Homo sapiens
  misc_RNA (1)...(19): siRNA sense strand
gcauccaaccaccaauuug

SEQ ID NO: 1832712 - RNA, 19 nt, Homo sapiens
  misc_RNA (1)...(19): siRNA sense strand
acacagcaaccgugauuuc

SEQ ID NO: 1832713 - RNA, 19 nt, Homo sapiens
  misc_RNA (1)...(19): siRNA sense strand
ucagaaaccaguaaaccau

SEQ ID NO: 1832714 - RNA, 19 nt, Homo sapiens
  misc_RNA (1)...(19): siRNA sense strand
acaaagacgaaucaaacuu

SEQ ID NO: 1832715 - RNA, 19 nt, Homo sapiens
  misc_RNA (1)...(19): siRNA sense strand
ugaggagcuugagcaguuu

SEQ ID NO: 1832716 - RNA, 19 nt, Homo sapiens
  misc_RNA (1)...(19): siRNA sense strand
caacaccaaagcgaauuga

SEQ ID NO: 1832717 - RNA, 19 nt, Homo sapiens
  misc_RNA (1)...(19): siRNA sense strand
ccagcaacccuguuagcuu

SEQ ID NO: 1832718 - RNA, 19 nt, Homo sapiens
  misc_RNA (1)...(19): siRNA sense strand
gggaccagcagcucaccua

SEQ ID NO: 1832719 - RNA, 19 nt, Homo sapiens
  misc_RNA (1)...(19): siRNA sense strand
aagaaacgcaccagcauag

SEQ ID NO: 1832720 - RNA, 19 nt, Homo sapiens
  misc_RNA (1)...(19): siRNA sense strand
ggcgcaggcuuuccuugga

SEQ ID NO: 1832721 - RNA, 19 nt, Homo sapiens
  misc_RNA (1)...(19): siRNA sense strand
caccaaagcgaauugauac

SEQ ID NO: 1832722 - RNA, 19 nt, Homo sapiens
  misc_RNA (1)...(19): siRNA sense strand
ggaggagcccagugaccuu

SEQ ID NO: 1832723 - RNA, 19 nt, Homo sapiens
  misc_RNA (1)...(19): siRNA sense strand
cagcauagagaccaacauc

SEQ ID NO: 1832724 - RNA, 19 nt, Homo sapiens
  misc_RNA (1)...(19): siRNA sense strand
ggaaacuauauggaaauga

SEQ ID NO: 1832725 - RNA, 19 nt, Homo sapiens
  misc_RNA (1)...(19): siRNA sense strand
caagaccuucaaacaaaga

SEQ ID NO: 1832726 - RNA, 19 nt, Homo sapiens
  misc_RNA (1)...(19): siRNA sense strand
caguuuaucaucucacaga

SEQ ID NO: 1832727 - RNA, 19 nt, Homo sapiens
  misc_RNA (1)...(19): siRNA sense strand
auccagaacucucucuuca

SEQ ID NO: 1832728 - RNA, 19 nt, Homo sapiens
  misc_RNA (1)...(19): siRNA sense strand
gacagcaucagguuugcaa

SEQ ID NO: 1832729 - RNA, 19 nt, Homo sapiens
  misc_RNA (1)...(19): siRNA sense strand
ggcaacacaggcacacaaa

SEQ ID NO: 1832730 - RNA, 19 nt, Homo sapiens
  misc_RNA (1)...(19): siRNA sense strand
gcagcucaccuauuaaagc

SEQ ID NO: 1832731 - RNA, 19 nt, Homo sapiens
  misc_RNA (1)...(19): siRNA sense strand
aagccuaccucggaagaga

SEQ ID NO: 1832732 - RNA, 19 nt, Homo sapiens
  misc_RNA (1)...(19): siRNA sense strand
gaaauggaccagacacuaa

SEQ ID NO: 1832733 - RNA, 19 nt, Homo sapiens
  misc_RNA (1)...(19): siRNA sense strand
gcacaacaguuacuaccuu

SEQ ID NO: 1832734 - RNA, 19 nt, Homo sapiens
  misc_RNA (1)...(19): siRNA sense strand
ggaccagcaucgagacaaa

SEQ ID NO: 1832735 - RNA, 19 nt, Homo sapiens
  misc_RNA (1)...(19): siRNA sense strand
uggaggagcuggagcaauu

SEQ ID NO: 1832736 - RNA, 19 nt, Homo sapiens
  misc_RNA (1)...(19): siRNA sense strand
gcacacagacaccgaaaga

SEQ ID NO: 1832737 - RNA, 19 nt, Homo sapiens
  misc_RNA (1)...(19): siRNA sense strand
gaaauaagaaugucuaagc

SEQ ID NO: 1832738 - RNA, 19 nt, Homo sapiens
  misc_RNA (1)...(19): siRNA sense strand
cacaacaguuacuaccuua

SEQ ID NO: 1832739 - RNA, 19 nt, Homo sapiens
  misc_RNA (1)...(19): siRNA sense strand
agucugagcacaacaguua

SEQ ID NO: 1832740 - RNA, 19 nt, Homo sapiens
  misc_RNA (1)...(19): siRNA sense strand
acacagacaccgaaagaaa

SEQ ID NO: 1832741 - RNA, 19 nt, Homo sapiens
  misc_RNA (1)...(19): siRNA sense strand
gaccagacacuaaucauca

SEQ ID NO: 1832742 - RNA, 19 nt, Homo sapiens
  misc_RNA (1)...(19): siRNA sense strand
gaacaugugcaaacucaag

SEQ ID NO: 1832743 - RNA, 19 nt, Homo sapiens
  misc_RNA (1)...(19): siRNA sense strand
gaaagaaauggaccagaca

SEQ ID NO: 1832744 - RNA, 19 nt, Homo sapiens
  misc_RNA (1)...(19): siRNA sense strand
gcucaacgaugcagagacu

SEQ ID NO: 1832745 - RNA, 19 nt, Homo sapiens
  misc_RNA (1)...(19): siRNA sense strand
aaccugagcuucaagaaca

SEQ ID NO: 1832746 - RNA, 19 nt, Homo sapiens
  misc_RNA (1)...(19): siRNA sense strand
aaacguccgcuucgccuua

SEQ ID NO: 1832747 - RNA, 19 nt, Homo sapiens
  misc_RNA (1)...(19): siRNA sense strand
aagaacaugugcaaacuca

SEQ ID NO: 1832748 - RNA, 19 nt, Homo sapiens
  misc_RNA (1)...(19): siRNA sense strand
ccagaaauaagaaugucua

SEQ ID NO: 1832749 - RNA, 19 nt, Homo sapiens
  misc_RNA (1)...(19): siRNA sense strand
gcaagaagaggaccagcau

SEQ ID NO: 1832750 - RNA, 19 nt, Homo sapiens
  misc_RNA (1)...(19): siRNA sense strand
ccgagcagcugcacaugga

SEQ ID NO: 1832751 - RNA, 19 nt, Homo sapiens
  misc_RNA (1)...(19): siRNA sense strand
ccagccaccugcucaguuc

SEQ ID NO: 1832752 - RNA, 19 nt, Homo sapiens
  misc_RNA (1)...(19): siRNA sense strand
caacaguuacuaccuuauc

SEQ ID NO: 1832753 - RNA, 19 nt, Homo sapiens
  misc_RNA (1)...(19): siRNA sense strand
ucaagaacaugugcaaacu

SEQ ID NO: 1832754 - RNA, 19 nt, Homo sapiens
  misc_RNA (1)...(19): siRNA sense strand
ggaccagacacuaaucauc

SEQ ID NO: 1832755 - RNA, 19 nt, Homo sapiens
  misc_RNA (1)...(19): siRNA sense strand
gacuaugucuguggacuca

SEQ ID NO: 1832756 - RNA, 19 nt, Homo sapiens
  misc_RNA (1)...(19): siRNA sense strand
ggccggagacgcaagaaga

SEQ ID NO: 1832757 - RNA, 19 nt, Homo sapiens
  misc_RNA (1)...(19): siRNA sense strand
agaaauggaccagacacua

SEQ ID NO: 1832758 - RNA, 19 nt, Homo sapiens
  misc_RNA (1)...(19): siRNA sense strand
gcacauggagaaggaagug

SEQ ID NO: 1832759 - RNA, 19 nt, Homo sapiens
  misc_RNA (1)...(19): siRNA sense strand
cuaccgacaccaaaucuau

SEQ ID NO: 1832760 - RNA, 19 nt, Homo sapiens
  misc_RNA (1)...(19): siRNA sense strand
ggagaaguggcucaacgau

SEQ ID NO: 1832761 - RNA, 19 nt, Homo sapiens
  misc_RNA (1)...(19): siRNA sense strand
gagcacacagacaccgaaa

SEQ ID NO: 1832762 - RNA, 19 nt, Homo sapiens
  misc_RNA (1)...(19): siRNA sense strand
caaagaucaaggcugaaga

SEQ ID NO: 1832763 - RNA, 19 nt, Homo sapiens
  misc_RNA (1)...(19): siRNA sense strand
aaaauaagaccuccccauu

SEQ ID NO: 1832764 - RNA, 19 nt, Homo sapiens
  misc_RNA (1)...(19): siRNA sense strand
cacagacaccgaaagaaau

SEQ ID NO: 1832765 - RNA, 19 nt, Homo sapiens
  misc_RNA (1)...(19): siRNA sense strand
gcucuacggcaacgacuuc

SEQ ID NO: 1832766 - RNA, 19 nt, Homo sapiens
  misc_RNA (1)...(19): siRNA sense strand
acagacaccgaaagaaaug

SEQ ID NO: 1832767 - RNA, 19 nt, Homo sapiens
  misc_RNA (1)...(19): siRNA sense strand
gguggaacccugccccuua

SEQ ID NO: 1832768 - RNA, 19 nt, Homo sapiens
  misc_RNA (1)...(19): siRNA sense strand
gaaggagaaacgcaucaac

SEQ ID NO: 1832769 - RNA, 19 nt, Homo sapiens
  misc_RNA (1)...(19): siRNA sense strand
ucaacgaugcagagacuau

SEQ ID NO: 1832770 - RNA, 19 nt, Homo sapiens
  misc_RNA (1)...(19): siRNA sense strand
gcuccagaaauaagaaugu

SEQ ID NO: 1832771 - RNA, 19 nt, Homo sapiens
  misc_RNA (1)...(19): siRNA sense strand
accagaagccuaccucaga

SEQ ID NO: 1832772 - RNA, 19 nt, Homo sapiens
  misc_RNA (1)...(19): siRNA sense strand
caacgaugcagagacuaug

SEQ ID NO: 1832773 - RNA, 19 nt, Homo sapiens
  misc_RNA (1)...(19): siRNA sense strand
gcaaacccagggagcucuu

SEQ ID NO: 1832774 - RNA, 19 nt, Homo sapiens
  misc_RNA (1)...(19): siRNA sense strand
caagcuuccagcagucuga

SEQ ID NO: 1832775 - RNA, 19 nt, Homo sapiens
  misc_RNA (1)...(19): siRNA sense strand
aauaagaccuccccauucu

SEQ ID NO: 1832776 - RNA, 19 nt, Homo sapiens
  misc_RNA (1)...(19): siRNA sense strand
caagcaacgccgcaucaag

SEQ ID NO: 1832777 - RNA, 19 nt, Homo sapiens
  misc_RNA (1)...(19): siRNA sense strand
aaauggaccagacacuaau

SEQ ID NO: 1832778 - RNA, 19 nt, Homo sapiens
  misc_RNA (1)...(19): siRNA sense strand
gcagaugacugaagcagaa

SEQ ID NO: 1832779 - RNA, 19 nt, Homo sapiens
  misc_RNA (1)...(19): siRNA sense strand
gaaugcaaacgaagauuua

SEQ ID NO: 1832780 - RNA, 19 nt, Homo sapiens
  misc_RNA (1)...(19): siRNA sense strand
guucgaggcuuauguauca

SEQ ID NO: 1832781 - RNA, 19 nt, Homo sapiens
  misc_RNA (1)...(19): siRNA sense strand
caccagaccugcaaucuau

SEQ ID NO: 1832782 - RNA, 19 nt, Homo sapiens
  misc_RNA (1)...(19): siRNA sense strand
ggaagauggauaugaauuu

SEQ ID NO: 1832783 - RNA, 19 nt, Homo sapiens
  misc_RNA (1)...(19): siRNA sense strand
gguggaagauggauaugaa

SEQ ID NO: 1832784 - RNA, 19 nt, Homo sapiens
  misc_RNA (1)...(19): siRNA sense strand
gaaguucgaggcuuaugua

SEQ ID NO: 1832785 - RNA, 19 nt, Homo sapiens
  misc_RNA (1)...(19): siRNA sense strand
gaaaccaucugaaaagaaa

SEQ ID NO: 1832786 - RNA, 19 nt, Homo sapiens
  misc_RNA (1)...(19): siRNA sense strand
ggaaagauugugcagauga

SEQ ID NO: 1832787 - RNA, 19 nt, Homo sapiens
  misc_RNA (1)...(19): siRNA sense strand
gaugaaacuuugauguguu

SEQ ID NO: 1832788 - RNA, 19 nt, Homo sapiens
  misc_RNA (1)...(19): siRNA sense strand
ggaugaaacuuugaugugu

SEQ ID NO: 1832789 - RNA, 19 nt, Homo sapiens
  misc_RNA (1)...(19): siRNA sense strand
caggaaagauugugcagau

SEQ ID NO: 1832790 - RNA, 19 nt, Homo sapiens
  misc_RNA (1)...(19): siRNA sense strand
gaucuucuguugucaugga

SEQ ID NO: 1832791 - RNA, 19 nt, Homo sapiens
  misc_RNA (1)...(19): siRNA sense strand
uagcaucaaucgcauuuau

SEQ ID NO: 1832792 - RNA, 19 nt, Homo sapiens
  misc_RNA (1)...(19): siRNA sense strand
ucaaauauccagagaacuu

SEQ ID NO: 1832793 - RNA, 19 nt, Homo sapiens
  misc_RNA (1)...(19): siRNA sense strand
uagcagccauuguggauga

SEQ ID NO: 1832794 - RNA, 19 nt, Homo sapiens
  misc_RNA (1)...(19): siRNA sense strand
gaguguggaugaaacuuug

SEQ ID NO: 1832795 - RNA, 19 nt, Homo sapiens
  misc_RNA (1)...(19): siRNA sense strand
gaucgugguguuuccuuua

SEQ ID NO: 1832796 - RNA, 19 nt, Homo sapiens
  misc_RNA (1)...(19): siRNA sense strand
gcuaaacgacaguugguaa

SEQ ID NO: 1832797 - RNA, 19 nt, Homo sapiens
  misc_RNA (1)...(19): siRNA sense strand
cagcuaauccgccgaagaa

SEQ ID NO: 1832798 - RNA, 19 nt, Homo sapiens
  misc_RNA (1)...(19): siRNA sense strand
aaauuacuguggcgaguuu

SEQ ID NO: 1832799 - RNA, 19 nt, Homo sapiens
  misc_RNA (1)...(19): siRNA sense strand
gcuauuggcuuauaaaauc

SEQ ID NO: 1832800 - RNA, 19 nt, Homo sapiens
  misc_RNA (1)...(19): siRNA sense strand
ugauaaugcugguggaaug

SEQ ID NO: 1832801 - RNA, 19 nt, Homo sapiens
  misc_RNA (1)...(19): siRNA sense strand
gauguguucauuucagaua

SEQ ID NO: 1832802 - RNA, 19 nt, Homo sapiens
  misc_RNA (1)...(19): siRNA sense strand
gcauuuauggauucuauga

SEQ ID NO: 1832803 - RNA, 19 nt, Homo sapiens
  misc_RNA (1)...(19): siRNA sense strand
gacaguugguaaccuuauu

SEQ ID NO: 1832804 - RNA, 19 nt, Homo sapiens
  misc_RNA (1)...(19): siRNA sense strand
uaugaugaaugcaaacgaa

SEQ ID NO: 1832805 - RNA, 19 nt, Homo sapiens
  misc_RNA (1)...(19): siRNA sense strand
cagguuugcucugugauuu

SEQ ID NO: 1832806 - RNA, 19 nt, Homo sapiens
  misc_RNA (1)...(19): siRNA sense strand
gaacguggacagccucauc

SEQ ID NO: 1832807 - RNA, 19 nt, Homo sapiens
  misc_RNA (1)...(19): siRNA sense strand
gaaagauugugcagaugac

SEQ ID NO: 1832808 - RNA, 19 nt, Homo sapiens
  misc_RNA (1)...(19): siRNA sense strand
ccagaagccaacuaucuuu

SEQ ID NO: 1832809 - RNA, 19 nt, Homo sapiens
  misc_RNA (1)...(19): siRNA sense strand
cuacugaugucccugauac

SEQ ID NO: 1832810 - RNA, 19 nt, Homo sapiens
  misc_RNA (1)...(19): siRNA sense strand
gaccuucacugauuguuuu

SEQ ID NO: 1832811 - RNA, 19 nt, Homo sapiens
  misc_RNA (1)...(19): siRNA sense strand
gauguagucaguaaauuuc

SEQ ID NO: 1832812 - RNA, 19 nt, Homo sapiens
  misc_RNA (1)...(19): siRNA sense strand
agcagaaguucgaggcuua

SEQ ID NO: 1832813 - RNA, 19 nt, Homo sapiens
  misc_RNA (1)...(19): siRNA sense strand
gaggaugucguccaggaaa

SEQ ID NO: 1832814 - RNA, 19 nt, Homo sapiens
  misc_RNA (1)...(19): siRNA sense strand
ugaaugcaaacgaagauuu

SEQ ID NO: 1832815 - RNA, 19 nt, Homo sapiens
  misc_RNA (1)...(19): siRNA sense strand
aaucaaauauccagagaac

SEQ ID NO: 1832816 - RNA, 19 nt, Homo sapiens
  misc_RNA (1)...(19): siRNA sense strand
gcuagcaucaaucgcauuu

SEQ ID NO: 1832817 - RNA, 19 nt, Homo sapiens
  misc_RNA (1)...(19): siRNA sense strand
gaaugaugaguguggauga

SEQ ID NO: 1832818 - RNA, 19 nt, Homo sapiens
  misc_RNA (1)...(19): siRNA sense strand
ucgcauuuauggauucuau

SEQ ID NO: 1832819 - RNA, 19 nt, Homo sapiens
  misc_RNA (1)...(19): siRNA sense strand
cgucaugauuuagauuuga

SEQ ID NO: 1832820 - RNA, 19 nt, Homo sapiens
  misc_RNA (1)...(19): siRNA sense strand
gauuugcuauggucugauc

SEQ ID NO: 1832821 - RNA, 19 nt, Homo sapiens
  misc_RNA (1)...(19): siRNA sense strand
uaugagaccuacugauguc

SEQ ID NO: 1832822 - RNA, 19 nt, Homo sapiens
  misc_RNA (1)...(19): siRNA sense strand
ugagugugcuagcaucaau

SEQ ID NO: 1832823 - RNA, 19 nt, Homo sapiens
  misc_RNA (1)...(19): siRNA sense strand
uuuguuugcuauuggcuua

SEQ ID NO: 1832824 - RNA, 19 nt, Homo sapiens
  misc_RNA (1)...(19): siRNA sense strand
gugauuugcuauggucuga

SEQ ID NO: 1832825 - RNA, 19 nt, Homo sapiens
  misc_RNA (1)...(19): siRNA sense strand
gcaucaaucgcauuuaugg

SEQ ID NO: 1832826 - RNA, 19 nt, Homo sapiens
  misc_RNA (1)...(19): siRNA sense strand
gauaaugcugguggaauga

SEQ ID NO: 1832827 - RNA, 19 nt, Homo sapiens
  misc_RNA (1)...(19): siRNA sense strand
gauauugaaaccaucugaa

SEQ ID NO: 1832828 - RNA, 19 nt, Homo sapiens
  misc_RNA (1)...(19): siRNA sense strand
gaauuaugagaccuacuga

SEQ ID NO: 1832829 - RNA, 19 nt, Homo sapiens
  misc_RNA (1)...(19): siRNA sense strand
gaagcaccgcugaaaauuu

SEQ ID NO: 1832830 - RNA, 19 nt, Homo sapiens
  misc_RNA (1)...(19): siRNA sense strand
gaaaaugaucgugguguuu

SEQ ID NO: 1832831 - RNA, 19 nt, Homo sapiens
  misc_RNA (1)...(19): siRNA sense strand
ucaccagaccugcaaucua

SEQ ID NO: 1832832 - RNA, 19 nt, Homo sapiens
  misc_RNA (1)...(19): siRNA sense strand
gaugaaugcaaacgaagau

SEQ ID NO: 1832833 - RNA, 19 nt, Homo sapiens
  misc_RNA (1)...(19): siRNA sense strand
agaaagcuaaauaccagua

SEQ ID NO: 1832834 - RNA, 19 nt, Homo sapiens
  misc_RNA (1)...(19): siRNA sense strand
gcucugugauuugcuaugg

SEQ ID NO: 1832835 - RNA, 19 nt, Homo sapiens
  misc_RNA (1)...(19): siRNA sense strand
ggacagaggaaagcagucu

SEQ ID NO: 1832836 - RNA, 19 nt, Homo sapiens
  misc_RNA (1)...(19): siRNA sense strand
aagcaccgcugaaaauuug

SEQ ID NO: 1832837 - RNA, 19 nt, Homo sapiens
  misc_RNA (1)...(19): siRNA sense strand
caccagaagccaacuaucu

SEQ ID NO: 1832838 - RNA, 19 nt, Homo sapiens
  misc_RNA (1)...(19): siRNA sense strand
ugaguguggaugaaacuuu

SEQ ID NO: 1832839 - RNA, 19 nt, Homo sapiens
  misc_RNA (1)...(19): siRNA sense strand
uaaugcugguggaaugaug

SEQ ID NO: 1832840 - RNA, 19 nt, Homo sapiens
  misc_RNA (1)...(19): siRNA sense strand
gaugacugaagcagaaguu

SEQ ID NO: 1832841 - RNA, 19 nt, Homo sapiens
  misc_RNA (1)...(19): siRNA sense strand
ggugguggaagauggauau

SEQ ID NO: 1832842 - RNA, 19 nt, Homo sapiens
  misc_RNA (1)...(19): siRNA sense strand
aagaucuucuguugucaug

SEQ ID NO: 1832843 - RNA, 19 nt, Homo sapiens
  misc_RNA (1)...(19): siRNA sense strand
ugaucgugguguuuccuuu

SEQ ID NO: 1832844 - RNA, 19 nt, Homo sapiens
  misc_RNA (1)...(19): siRNA sense strand
ggagguuucccaccagaag

SEQ ID NO: 1832845 - RNA, 19 nt, Homo sapiens
  misc_RNA (1)...(19): siRNA sense strand
caaauuacuguggcgaguu

SEQ ID NO: 1832846 - RNA, 19 nt, Homo sapiens
  misc_RNA (1)...(19): siRNA sense strand
uggaagauggauaugaauu

SEQ ID NO: 1832847 - RNA, 19 nt, Homo sapiens
  misc_RNA (1)...(19): siRNA sense strand
gugcaaggcuggggagaaa

SEQ ID NO: 1832848 - RNA, 19 nt, Homo sapiens
  misc_RNA (1)...(19): siRNA sense strand
ggaaaccaugagugugcua

SEQ ID NO: 1832849 - RNA, 19 nt, Homo sapiens
  misc_RNA (1)...(19): siRNA sense strand
caaauauccagagaacuuc

SEQ ID NO: 1832850 - RNA, 19 nt, Homo sapiens
  misc_RNA (1)...(19): siRNA sense strand
aaccauuuguuugcuauug

SEQ ID NO: 1832851 - RNA, 19 nt, Homo sapiens
  misc_RNA (1)...(19): siRNA sense strand
agccaacuaucuuuucuua

SEQ ID NO: 1832852 - RNA, 19 nt, Homo sapiens
  misc_RNA (1)...(19): siRNA sense strand
gguguuuccuuuacuuuug

SEQ ID NO: 1832853 - RNA, 19 nt, Homo sapiens
  misc_RNA (1)...(19): siRNA sense strand
ccaacuaucuuuucuuagg

SEQ ID NO: 1832854 - RNA, 19 nt, Homo sapiens
  misc_RNA (1)...(19): siRNA sense strand
gaagccaacuaucuuuucu

SEQ ID NO: 1832855 - RNA, 19 nt, Homo sapiens
  misc_RNA (1)...(19): siRNA sense strand
acuuugauguguucauuuc

SEQ ID NO: 1832856 - RNA, 19 nt, Homo sapiens
  misc_RNA (1)...(19): siRNA sense strand
aaugaugaguguggaugaa

SEQ ID NO: 1832857 - RNA, 19 nt, Homo sapiens
  misc_RNA (1)...(19): siRNA sense strand
acaguugguaaccuuauuu

SEQ ID NO: 1832858 - RNA, 19 nt, Homo sapiens
  misc_RNA (1)...(19): siRNA sense strand
gcagaaguucgaggcuuau

SEQ ID NO: 1832859 - RNA, 19 nt, Homo sapiens
  misc_RNA (1)...(19): siRNA sense strand
cagccauuguggaugagaa

SEQ ID NO: 1832860 - RNA, 19 nt, Homo sapiens
  misc_RNA (1)...(19): siRNA sense strand
gccuauagcagccauugug

SEQ ID NO: 1832861 - RNA, 19 nt, Homo sapiens
  misc_RNA (1)...(19): siRNA sense strand
uguuugcuauuggcuuaua

SEQ ID NO: 1832862 - RNA, 19 nt, Homo sapiens
  misc_RNA (1)...(19): siRNA sense strand
ggaugucguccaggaaaga

SEQ ID NO: 1832863 - RNA, 19 nt, Homo sapiens
  misc_RNA (1)...(19): siRNA sense strand
guggcgaguuugauaaugc

SEQ ID NO: 1832864 - RNA, 19 nt, Homo sapiens
  misc_RNA (1)...(19): siRNA sense strand
cgacaguugguaaccuuau

SEQ ID NO: 1832865 - RNA, 19 nt, Homo sapiens
  misc_RNA (1)...(19): siRNA sense strand
cucaucaggugguggaaga

SEQ ID NO: 1832866 - RNA, 19 nt, Homo sapiens
  misc_RNA (1)...(19): siRNA sense strand
agaauuaugagaccuacug

SEQ ID NO: 1832867 - RNA, 19 nt, Homo sapiens
  misc_RNA (1)...(19): siRNA sense strand
aagaggaaaccaugagugu

SEQ ID NO: 1832868 - RNA, 19 nt, Homo sapiens
  misc_RNA (1)...(19): siRNA sense strand
uauagcagccauuguggau

SEQ ID NO: 1832869 - RNA, 19 nt, Homo sapiens
  misc_RNA (1)...(19): siRNA sense strand
guguucauuucagauauug

SEQ ID NO: 1832870 - RNA, 19 nt, Homo sapiens
  misc_RNA (1)...(19): siRNA sense strand
ggaagcaccgcugaaaauu

SEQ ID NO: 1832871 - RNA, 19 nt, Homo sapiens
  misc_RNA (1)...(19): siRNA sense strand
cgugguguuuccuuuacuu

SEQ ID NO: 1832872 - RNA, 19 nt, Homo sapiens
  misc_RNA (1)...(19): siRNA sense strand
caacuaucuuuucuuagga

SEQ ID NO: 1832873 - RNA, 19 nt, Homo sapiens
  misc_RNA (1)...(19): siRNA sense strand
guuugcuauuggcuuauaa

SEQ ID NO: 1832874 - RNA, 19 nt, Homo sapiens
  misc_RNA (1)...(19): siRNA sense strand
augaaacuuugauguguuc

SEQ ID NO: 1832875 - RNA, 19 nt, Homo sapiens
  misc_RNA (1)...(19): siRNA sense strand
gacugaagcagaaguucga

SEQ ID NO: 1832876 - RNA, 19 nt, Homo sapiens
  misc_RNA (1)...(19): siRNA sense strand
agaccuucacugauuguuu

SEQ ID NO: 1832877 - RNA, 19 nt, Homo sapiens
  misc_RNA (1)...(19): siRNA sense strand
uggaugaaacuuugaugug

SEQ ID NO: 1832878 - RNA, 19 nt, Homo sapiens
  misc_RNA (1)...(19): siRNA sense strand
ggaguguccuucacauuug

SEQ ID NO: 1832879 - RNA, 19 nt, Homo sapiens
  misc_RNA (1)...(19): siRNA sense strand
caaagcaagcaaagaaaua

SEQ ID NO: 1832880 - RNA, 19 nt, Homo sapiens
  misc_RNA (1)...(19): siRNA sense strand
guaagaauguccagcuuca

SEQ ID NO: 1832881 - RNA, 19 nt, Homo sapiens
  misc_RNA (1)...(19): siRNA sense strand
ucacaaagcaagcaaagaa

SEQ ID NO: 1832882 - RNA, 19 nt, Homo sapiens
  misc_RNA (1)...(19): siRNA sense strand
gguugaagauggauaugaa

SEQ ID NO: 1832883 - RNA, 19 nt, Homo sapiens
  misc_RNA (1)...(19): siRNA sense strand
ugacauccauggacaauac

SEQ ID NO: 1832884 - RNA, 19 nt, Homo sapiens
  misc_RNA (1)...(19): siRNA sense strand
uagauaaacucaacaucga

SEQ ID NO: 1832885 - RNA, 19 nt, Homo sapiens
  misc_RNA (1)...(19): siRNA sense strand
ucagaggacugugcuuaaa

SEQ ID NO: 1832886 - RNA, 19 nt, Homo sapiens
  misc_RNA (1)...(19): siRNA sense strand
ggagacgaucugccucuua

SEQ ID NO: 1832887 - RNA, 19 nt, Homo sapiens
  misc_RNA (1)...(19): siRNA sense strand
gagacgaucugccucuuac

SEQ ID NO: 1832888 - RNA, 19 nt, Homo sapiens
  misc_RNA (1)...(19): siRNA sense strand
uuuaaagccugcagagaaa

SEQ ID NO: 1832889 - RNA, 19 nt, Homo sapiens
  misc_RNA (1)...(19): siRNA sense strand
caaugcaggugccaugaug

SEQ ID NO: 1832890 - RNA, 19 nt, Homo sapiens
  misc_RNA (1)...(19): siRNA sense strand
cuuaaagucucgugaaauc

SEQ ID NO: 1832891 - RNA, 19 nt, Homo sapiens
  misc_RNA (1)...(19): siRNA sense strand
aagcaugauuuggaucuua

SEQ ID NO: 1832892 - RNA, 19 nt, Homo sapiens
  misc_RNA (1)...(19): siRNA sense strand
agaaagcaacuaccuguuu

SEQ ID NO: 1832893 - RNA, 19 nt, Homo sapiens
  misc_RNA (1)...(19): siRNA sense strand
gaacuugaagcaccacuca

SEQ ID NO: 1832894 - RNA, 19 nt, Homo sapiens
  misc_RNA (1)...(19): siRNA sense strand
gcggagaguuugacaaugc

SEQ ID NO: 1832895 - RNA, 19 nt, Homo sapiens
  misc_RNA (1)...(19): siRNA sense strand
ggucuucuuugugaucuuu

SEQ ID NO: 1832896 - RNA, 19 nt, Homo sapiens
  misc_RNA (1)...(19): siRNA sense strand
ucaggagaaugaaaucaga

SEQ ID NO: 1832897 - RNA, 19 nt, Homo sapiens
  misc_RNA (1)...(19): siRNA sense strand
guccaagccugguaagaau

SEQ ID NO: 1832898 - RNA, 19 nt, Homo sapiens
  misc_RNA (1)...(19): siRNA sense strand
gcaguuggucacucuguuu

SEQ ID NO: 1832899 - RNA, 19 nt, Homo sapiens
  misc_RNA (1)...(19): siRNA sense strand
caacaucgacagcauuauc

SEQ ID NO: 1832900 - RNA, 19 nt, Homo sapiens
  misc_RNA (1)...(19): siRNA sense strand
gaucaaggucuucuuugug

SEQ ID NO: 1832901 - RNA, 19 nt, Homo sapiens
  misc_RNA (1)...(19): siRNA sense strand
ccagaucaaggucuucuuu

SEQ ID NO: 1832902 - RNA, 19 nt, Homo sapiens
  misc_RNA (1)...(19): siRNA sense strand
ggagguuuaucaccagauc

SEQ ID NO: 1832903 - RNA, 19 nt, Homo sapiens
  misc_RNA (1)...(19): siRNA sense strand
gguccaagccugguaagaa

SEQ ID NO: 1832904 - RNA, 19 nt, Homo sapiens
  misc_RNA (1)...(19): siRNA sense strand
cauggacaauacuaugauu

SEQ ID NO: 1832905 - RNA, 19 nt, Homo sapiens
  misc_RNA (1)...(19): siRNA sense strand
gaauuaugcgaccaacuga

SEQ ID NO: 1832906 - RNA, 19 nt, Homo sapiens
  misc_RNA (1)...(19): siRNA sense strand
gaagauauucugcugucau

SEQ ID NO: 1832907 - RNA, 19 nt, Homo sapiens
  misc_RNA (1)...(19): siRNA sense strand
ggacaauacuaugauuugc

SEQ ID NO: 1832908 - RNA, 19 nt, Homo sapiens
  misc_RNA (1)...(19): siRNA sense strand
uaaagucucgugaaaucuu

SEQ ID NO: 1832909 - RNA, 19 nt, Homo sapiens
  misc_RNA (1)...(19): siRNA sense strand
ccauaagcaugauuuggau

SEQ ID NO: 1832910 - RNA, 19 nt, Homo sapiens
  misc_RNA (1)...(19): siRNA sense strand
caaaauuucuccauaagca

SEQ ID NO: 1832911 - RNA, 19 nt, Homo sapiens
  misc_RNA (1)...(19): siRNA sense strand
agaagugguugcaaaauuu

SEQ ID NO: 1832912 - RNA, 19 nt, Homo sapiens
  misc_RNA (1)...(19): siRNA sense strand
cgaauuaugcgaccaacug

SEQ ID NO: 1832913 - RNA, 19 nt, Homo sapiens
  misc_RNA (1)...(19): siRNA sense strand
gauagcagccaucguggau

SEQ ID NO: 1832914 - RNA, 19 nt, Homo sapiens
  misc_RNA (1)...(19): siRNA sense strand
aaucagaggacugugcuua

SEQ ID NO: 1832915 - RNA, 19 nt, Homo sapiens
  misc_RNA (1)...(19): siRNA sense strand
cagaagugguugcaaaauu

SEQ ID NO: 1832916 - RNA, 19 nt, Homo sapiens
  misc_RNA (1)...(19): siRNA sense strand
gauauucugcugucaugga

SEQ ID NO: 1832917 - RNA, 19 nt, Homo sapiens
  misc_RNA (1)...(19): siRNA sense strand
uuacuggccuacaaaauaa

SEQ ID NO: 1832918 - RNA, 19 nt, Homo sapiens
  misc_RNA (1)...(19): siRNA sense strand
aagauauucugcugucaug

SEQ ID NO: 1832919 - RNA, 19 nt, Homo sapiens
  misc_RNA (1)...(19): siRNA sense strand
gccagcaucaacagaauuu

SEQ ID NO: 1832920 - RNA, 19 nt, Homo sapiens
  misc_RNA (1)...(19): siRNA sense strand
aucaaggucuucuuuguga

SEQ ID NO: 1832921 - RNA, 19 nt, Homo sapiens
  misc_RNA (1)...(19): siRNA sense strand
gaaugugccagcaucaaca

SEQ ID NO: 1832922 - RNA, 19 nt, Homo sapiens
  misc_RNA (1)...(19): siRNA sense strand
caagggguaugaucacaaa

SEQ ID NO: 1832923 - RNA, 19 nt, Homo sapiens
  misc_RNA (1)...(19): siRNA sense strand
agaucaaggucuucuuugu

SEQ ID NO: 1832924 - RNA, 19 nt, Homo sapiens
  misc_RNA (1)...(19): siRNA sense strand
gcgaccaacugauguacca

SEQ ID NO: 1832925 - RNA, 19 nt, Homo sapiens
  misc_RNA (1)...(19): siRNA sense strand
cagcaucaacagaauuuau

SEQ ID NO: 1832926 - RNA, 19 nt, Homo sapiens
  misc_RNA (1)...(19): siRNA sense strand
cccaucaggugguugaaga

SEQ ID NO: 1832927 - RNA, 19 nt, Homo sapiens
  misc_RNA (1)...(19): siRNA sense strand
gaucacaaagcaagcaaag

SEQ ID NO: 1832928 - RNA, 19 nt, Homo sapiens
  misc_RNA (1)...(19): siRNA sense strand
caugaugaguguggaugaa

SEQ ID NO: 1832929 - RNA, 19 nt, Homo sapiens
  misc_RNA (1)...(19): siRNA sense strand
ucaggugguugaagaugga

SEQ ID NO: 1832930 - RNA, 19 nt, Homo sapiens
  misc_RNA (1)...(19): siRNA sense strand
agaggacugugcuuaaagu

SEQ ID NO: 1832931 - RNA, 19 nt, Homo sapiens
  misc_RNA (1)...(19): siRNA sense strand
cacauuuggugcagaagug

SEQ ID NO: 1832932 - RNA, 19 nt, Homo sapiens
  misc_RNA (1)...(19): siRNA sense strand
caacggcugcuggaaguga

SEQ ID NO: 1832933 - RNA, 19 nt, Homo sapiens
  misc_RNA (1)...(19): siRNA sense strand
cugcugucauggagguuua

SEQ ID NO: 1832934 - RNA, 19 nt, Homo sapiens
  misc_RNA (1)...(19): siRNA sense strand
caggugccaugaugagugu

SEQ ID NO: 1832935 - RNA, 19 nt, Homo sapiens
  misc_RNA (1)...(19): siRNA sense strand
ugaagcaccacucaaaaua

SEQ ID NO: 1832936 - RNA, 19 nt, Homo sapiens
  misc_RNA (1)...(19): siRNA sense strand
ucagagggaaccaugaaug

SEQ ID NO: 1832937 - RNA, 19 nt, Homo sapiens
  misc_RNA (1)...(19): siRNA sense strand
ggcaguuggucacucuguu

SEQ ID NO: 1832938 - RNA, 19 nt, Homo sapiens
  misc_RNA (1)...(19): siRNA sense strand
gcaugauuuggaucuuaua

SEQ ID NO: 1832939 - RNA, 19 nt, Homo sapiens
  misc_RNA (1)...(19): siRNA sense strand
cuucacauuuggugcagaa

SEQ ID NO: 1832940 - RNA, 19 nt, Homo sapiens
  misc_RNA (1)...(19): siRNA sense strand
cagagggaaccaugaaugu

SEQ ID NO: 1832941 - RNA, 19 nt, Homo sapiens
  misc_RNA (1)...(19): siRNA sense strand
gagcccaucaggugguuga

SEQ ID NO: 1832942 - RNA, 19 nt, Homo sapiens
  misc_RNA (1)...(19): siRNA sense strand
acaaagcaagcaaagaaau

SEQ ID NO: 1832943 - RNA, 19 nt, Homo sapiens
  misc_RNA (1)...(19): siRNA sense strand
cacaaagcaagcaaagaaa

SEQ ID NO: 1832944 - RNA, 19 nt, Homo sapiens
  misc_RNA (1)...(19): siRNA sense strand
cagucagccuauccuacua

SEQ ID NO: 1832945 - RNA, 19 nt, Homo sapiens
  misc_RNA (1)...(19): siRNA sense strand
gugccagcaucaacagaau

SEQ ID NO: 1832946 - RNA, 19 nt, Homo sapiens
  misc_RNA (1)...(19): siRNA sense strand
uggacaauacuaugauuug

SEQ ID NO: 1832947 - RNA, 19 nt, Homo sapiens
  misc_RNA (1)...(19): siRNA sense strand
gaagcaccacucaaaauau

SEQ ID NO: 1832948 - RNA, 19 nt, Homo sapiens
  misc_RNA (1)...(19): siRNA sense strand
gaggguccaagccugguaa

SEQ ID NO: 1832949 - RNA, 19 nt, Homo sapiens
  misc_RNA (1)...(19): siRNA sense strand
uaugauuugcugcgacuuu

SEQ ID NO: 1832950 - RNA, 19 nt, Homo sapiens
  misc_RNA (1)...(19): siRNA sense strand
ugcuuaaagucucgugaaa

SEQ ID NO: 1832951 - RNA, 19 nt, Homo sapiens
  misc_RNA (1)...(19): siRNA sense strand
cucaacaucgacagcauua

SEQ ID NO: 1832952 - RNA, 19 nt, Homo sapiens
  misc_RNA (1)...(19): siRNA sense strand
gaaaaugacagaggagugu

SEQ ID NO: 1832953 - RNA, 19 nt, Homo sapiens
  misc_RNA (1)...(19): siRNA sense strand
caaggucuucuuugugauc

SEQ ID NO: 1832954 - RNA, 19 nt, Homo sapiens
  misc_RNA (1)...(19): siRNA sense strand
guugcaaaauuucuccaua

SEQ ID NO: 1832955 - RNA, 19 nt, Homo sapiens
  misc_RNA (1)...(19): siRNA sense strand
gaguguccuucacauuugg

SEQ ID NO: 1832956 - RNA, 19 nt, Homo sapiens
  misc_RNA (1)...(19): siRNA sense strand
uaagcaugauuuggaucuu

SEQ ID NO: 1832957 - RNA, 19 nt, Homo sapiens
  misc_RNA (1)...(19): siRNA sense strand
aaagcaagcaaagaaauag

SEQ ID NO: 1832958 - RNA, 19 nt, Homo sapiens
  misc_RNA (1)...(19): siRNA sense strand
guggaugaaacacuaaugu

SEQ ID NO: 1832959 - RNA, 19 nt, Homo sapiens
  misc_RNA (1)...(19): siRNA sense strand
gaugaguguggaugaaaca

SEQ ID NO: 1832960 - RNA, 19 nt, Homo sapiens
  misc_RNA (1)...(19): siRNA sense strand
gacaaugcaggugccauga

SEQ ID NO: 1832961 - RNA, 19 nt, Homo sapiens
  misc_RNA (1)...(19): siRNA sense strand
cagaaagcaacuaccuguu

SEQ ID NO: 1832962 - RNA, 19 nt, Homo sapiens
  misc_RNA (1)...(19): siRNA sense strand
ccaagccugguaagaaugu

SEQ ID NO: 1832963 - RNA, 19 nt, Homo sapiens
  misc_RNA (1)...(19): siRNA sense strand
gugcuuaaagucucgugaa

SEQ ID NO: 1832964 - RNA, 19 nt, Homo sapiens
  misc_RNA (1)...(19): siRNA sense strand
cagaucaaggucuucuuug

SEQ ID NO: 1832965 - RNA, 19 nt, Homo sapiens
  misc_RNA (1)...(19): siRNA sense strand
gcuuaaagucucgugaaau

SEQ ID NO: 1832966 - RNA, 19 nt, Homo sapiens
  misc_RNA (1)...(19): siRNA sense strand
gacgaucugccucuuacug

SEQ ID NO: 1832967 - RNA, 19 nt, Homo sapiens
  misc_RNA (1)...(19): siRNA sense strand
ucucagagggaaccaugaa

SEQ ID NO: 1832968 - RNA, 19 nt, Homo sapiens
  misc_RNA (1)...(19): siRNA sense strand
agcaugauuuggaucuuau

SEQ ID NO: 1832969 - RNA, 19 nt, Homo sapiens
  misc_RNA (1)...(19): siRNA sense strand
cagccuauccuacuagaac

SEQ ID NO: 1832970 - RNA, 19 nt, Homo sapiens
  misc_RNA (1)...(19): siRNA sense strand
ggugguugaagauggauau

SEQ ID NO: 1832971 - RNA, 19 nt, Homo sapiens
  misc_RNA (1)...(19): siRNA sense strand
cagagcagauggcccagua

SEQ ID NO: 1832972 - RNA, 19 nt, Homo sapiens
  misc_RNA (1)...(19): siRNA sense strand
guagauacaucaacaugcu

SEQ ID NO: 1832973 - RNA, 19 nt, Homo sapiens
  misc_RNA (1)...(19): siRNA sense strand
cugcguggcucuguuacua

SEQ ID NO: 1832974 - RNA, 19 nt, Homo sapiens
  misc_RNA (1)...(19): siRNA sense strand
gagcagauggcccaguaug

SEQ ID NO: 1832975 - RNA, 19 nt, Homo sapiens
  misc_RNA (1)...(19): siRNA sense strand
gcagauggcccaguaugca

SEQ ID NO: 1832976 - RNA, 19 nt, Homo sapiens
  misc_RNA (1)...(19): siRNA sense strand
gcguggcucuguuacuaca

SEQ ID NO: 1832977 - RNA, 19 nt, Homo sapiens
  misc_RNA (1)...(19): siRNA sense strand
caccugcguggcucuguua

SEQ ID NO: 1832978 - RNA, 19 nt, Homo sapiens
  misc_RNA (1)...(19): siRNA sense strand
cuccguagauacaucaaca

SEQ ID NO: 1832979 - RNA, 19 nt, Homo sapiens
  misc_RNA (1)...(19): siRNA sense strand
gaaugagacuggaguaauu

SEQ ID NO: 1832980 - RNA, 19 nt, Homo sapiens
  misc_RNA (1)...(19): siRNA sense strand
gcaaagagguggauauucu

SEQ ID NO: 1832981 - RNA, 19 nt, Homo sapiens
  misc_RNA (1)...(19): siRNA sense strand
ggaaagauauaaagacaug

SEQ ID NO: 1832982 - RNA, 19 nt, Homo sapiens
  misc_RNA (1)...(19): siRNA sense strand
ggaaguuucucaaguugua

SEQ ID NO: 1832983 - RNA, 19 nt, Homo sapiens
  misc_RNA (1)...(19): siRNA sense strand
ggguagacaucaacaauuu

SEQ ID NO: 1832984 - RNA, 19 nt, Homo sapiens
  misc_RNA (1)...(19): siRNA sense strand
guggagagcuugcugguuu

SEQ ID NO: 1832985 - RNA, 19 nt, Homo sapiens
  misc_RNA (1)...(19): siRNA sense strand
ccauauaucuggaaaggaa

SEQ ID NO: 1832986 - RNA, 19 nt, Homo sapiens
  misc_RNA (1)...(19): siRNA sense strand
caacggcagugaaauuuau

SEQ ID NO: 1832987 - RNA, 19 nt, Homo sapiens
  misc_RNA (1)...(19): siRNA sense strand
cggauuaucuucuaucuau

SEQ ID NO: 1832988 - RNA, 19 nt, Homo sapiens
  misc_RNA (1)...(19): siRNA sense strand
caugaaauaccuacuguua

SEQ ID NO: 1832989 - RNA, 19 nt, Homo sapiens
  misc_RNA (1)...(19): siRNA sense strand
gcuuuaggcugguguauga

SEQ ID NO: 1832990 - RNA, 19 nt, Homo sapiens
  misc_RNA (1)...(19): siRNA sense strand
aaaggaaguuucucaaguu

SEQ ID NO: 1832991 - RNA, 19 nt, Homo sapiens
  misc_RNA (1)...(19): siRNA sense strand
gaaacgaucacaacaacaa

SEQ ID NO: 1832992 - RNA, 19 nt, Homo sapiens
  misc_RNA (1)...(19): siRNA sense strand
gcucuaucaucuuacaaua

SEQ ID NO: 1832993 - RNA, 19 nt, Homo sapiens
  misc_RNA (1)...(19): siRNA sense strand
ggaaagaugcugccacuca

SEQ ID NO: 1832994 - RNA, 19 nt, Homo sapiens
  misc_RNA (1)...(19): siRNA sense strand
ugaaauaccuacuguuagu

SEQ ID NO: 1832995 - RNA, 19 nt, Homo sapiens
  misc_RNA (1)...(19): siRNA sense strand
gggacaauuugcuagcuua

SEQ ID NO: 1832996 - RNA, 19 nt, Homo sapiens
  misc_RNA (1)...(19): siRNA sense strand
gcagugggauuaggaaaug

SEQ ID NO: 1832997 - RNA, 19 nt, Homo sapiens
  misc_RNA (1)...(19): siRNA sense strand
guaauuacgccuauccuuu

SEQ ID NO: 1832998 - RNA, 19 nt, Homo sapiens
  misc_RNA (1)...(19): siRNA sense strand
ggaggauucuuccauuguu

SEQ ID NO: 1832999 - RNA, 19 nt, Homo sapiens
  misc_RNA (1)...(19): siRNA sense strand
ucagagaauuuccauguug

SEQ ID NO: 1833000 - RNA, 19 nt, Homo sapiens
  misc_RNA (1)...(19): siRNA sense strand
ggagggaacagauucauug

SEQ ID NO: 1833001 - RNA, 19 nt, Homo sapiens
  misc_RNA (1)...(19): siRNA sense strand
gagcagcacuauuuaaagg

SEQ ID NO: 1833002 - RNA, 19 nt, Homo sapiens
  misc_RNA (1)...(19): siRNA sense strand
uagcagaucaccaauagua

SEQ ID NO: 1833003 - RNA, 19 nt, Homo sapiens
  misc_RNA (1)...(19): siRNA sense strand
cuugauaccuuaugcaauu

SEQ ID NO: 1833004 - RNA, 19 nt, Homo sapiens
  misc_RNA (1)...(19): siRNA sense strand
gaaagugucggcuucauca

SEQ ID NO: 1833005 - RNA, 19 nt, Homo sapiens
  misc_RNA (1)...(19): siRNA sense strand
uaaggaagcugagguaugg

SEQ ID NO: 1833006 - RNA, 19 nt, Homo sapiens
  misc_RNA (1)...(19): siRNA sense strand
gaauuuccauguuggugaa

SEQ ID NO: 1833007 - RNA, 19 nt, Homo sapiens
  misc_RNA (1)...(19): siRNA sense strand
caaaaggcauuucauacua

SEQ ID NO: 1833008 - RNA, 19 nt, Homo sapiens
  misc_RNA (1)...(19): siRNA sense strand
uacaagagaucauccaaau

SEQ ID NO: 1833009 - RNA, 19 nt, Homo sapiens
  misc_RNA (1)...(19): siRNA sense strand
aaagugaacuaccauggaa

SEQ ID NO: 1833010 - RNA, 19 nt, Homo sapiens
  misc_RNA (1)...(19): siRNA sense strand
gcagcacuauuuaaaggaa

SEQ ID NO: 1833011 - RNA, 19 nt, Homo sapiens
  misc_RNA (1)...(19): siRNA sense strand
uagcuuagguccaguuuca

SEQ ID NO: 1833012 - RNA, 19 nt, Homo sapiens
  misc_RNA (1)...(19): siRNA sense strand
gaggauucuuccauuguuu

SEQ ID NO: 1833013 - RNA, 19 nt, Homo sapiens
  misc_RNA (1)...(19): siRNA sense strand
cagggcagcuucccaguga

SEQ ID NO: 1833014 - RNA, 19 nt, Homo sapiens
  misc_RNA (1)...(19): siRNA sense strand
ggagcuaguuggaaucauc

SEQ ID NO: 1833015 - RNA, 19 nt, Homo sapiens
  misc_RNA (1)...(19): siRNA sense strand
uaguugcucuaucaucuua

SEQ ID NO: 1833016 - RNA, 19 nt, Homo sapiens
  misc_RNA (1)...(19): siRNA sense strand
gagcaaagagguggauauu

SEQ ID NO: 1833017 - RNA, 19 nt, Homo sapiens
  misc_RNA (1)...(19): siRNA sense strand
gaacagauucauugaggau

SEQ ID NO: 1833018 - RNA, 19 nt, Homo sapiens
  misc_RNA (1)...(19): siRNA sense strand
gaucaccaauaguaacuca

SEQ ID NO: 1833019 - RNA, 19 nt, Homo sapiens
  misc_RNA (1)...(19): siRNA sense strand
ggauaccaauuauggcuau

SEQ ID NO: 1833020 - RNA, 19 nt, Homo sapiens
  misc_RNA (1)...(19): siRNA sense strand
uaucugaccuacagcaaug

SEQ ID NO: 1833021 - RNA, 19 nt, Homo sapiens
  misc_RNA (1)...(19): siRNA sense strand
gcugagguauggaaagaug

SEQ ID NO: 1833022 - RNA, 19 nt, Homo sapiens
  misc_RNA (1)...(19): siRNA sense strand
gugacaaucuauuacaaug

SEQ ID NO: 1833023 - RNA, 19 nt, Homo sapiens
  misc_RNA (1)...(19): siRNA sense strand
ggaauuuacuggguucauc

SEQ ID NO: 1833024 - RNA, 19 nt, Homo sapiens
  misc_RNA (1)...(19): siRNA sense strand
gagacuggaguaauuguuu

SEQ ID NO: 1833025 - RNA, 19 nt, Homo sapiens
  misc_RNA (1)...(19): siRNA sense strand
caagauuuauuucccaaag

SEQ ID NO: 1833026 - RNA, 19 nt, Homo sapiens
  misc_RNA (1)...(19): siRNA sense strand
ugacucaggcuggaauuua

SEQ ID NO: 1833027 - RNA, 19 nt, Homo sapiens
  misc_RNA (1)...(19): siRNA sense strand
gaauuacaaugguccugau

SEQ ID NO: 1833028 - RNA, 19 nt, Homo sapiens
  misc_RNA (1)...(19): siRNA sense strand
agagcuugcugguuuguaa

SEQ ID NO: 1833029 - RNA, 19 nt, Homo sapiens
  misc_RNA (1)...(19): siRNA sense strand
uuacuggguucaucugauu

SEQ ID NO: 1833030 - RNA, 19 nt, Homo sapiens
  misc_RNA (1)...(19): siRNA sense strand
cuggcaaggugguauauuu

SEQ ID NO: 1833031 - RNA, 19 nt, Homo sapiens
  misc_RNA (1)...(19): siRNA sense strand
gaauaaaggaauacaagag

SEQ ID NO: 1833032 - RNA, 19 nt, Homo sapiens
  misc_RNA (1)...(19): siRNA sense strand
auacagaaaugaugauugg

SEQ ID NO: 1833033 - RNA, 19 nt, Homo sapiens
  misc_RNA (1)...(19): siRNA sense strand
uggcuuaguugcucuauca

SEQ ID NO: 1833034 - RNA, 19 nt, Homo sapiens
  misc_RNA (1)...(19): siRNA sense strand
caucaacggcagugaaauu

SEQ ID NO: 1833035 - RNA, 19 nt, Homo sapiens
  misc_RNA (1)...(19): siRNA sense strand
ggaggcgccuucuugauac

SEQ ID NO: 1833036 - RNA, 19 nt, Homo sapiens
  misc_RNA (1)...(19): siRNA sense strand
gaggauacagaaaugauga

SEQ ID NO: 1833037 - RNA, 19 nt, Homo sapiens
  misc_RNA (1)...(19): siRNA sense strand
caucagagaauuuccaugu

SEQ ID NO: 1833038 - RNA, 19 nt, Homo sapiens
  misc_RNA (1)...(19): siRNA sense strand
uaggaaauguguggagauu

SEQ ID NO: 1833039 - RNA, 19 nt, Homo sapiens
  misc_RNA (1)...(19): siRNA sense strand
gcaauuucauagaccuaau

SEQ ID NO: 1833040 - RNA, 19 nt, Homo sapiens
  misc_RNA (1)...(19): siRNA sense strand
gaaaugaugauuggagcaa

SEQ ID NO: 1833041 - RNA, 19 nt, Homo sapiens
  misc_RNA (1)...(19): siRNA sense strand
gggucucgauucucaguuu

SEQ ID NO: 1833042 - RNA, 19 nt, Homo sapiens
  misc_RNA (1)...(19): siRNA sense strand
gcagggagaaggagaaagu

SEQ ID NO: 1833043 - RNA, 19 nt, Homo sapiens
  misc_RNA (1)...(19): siRNA sense strand
uggaggcgccuucuugaua

SEQ ID NO: 1833044 - RNA, 19 nt, Homo sapiens
  misc_RNA (1)...(19): siRNA sense strand
gauauaaagacaugguaga

SEQ ID NO: 1833045 - RNA, 19 nt, Homo sapiens
  misc_RNA (1)...(19): siRNA sense strand
uagcguguuugcuggauuu

SEQ ID NO: 1833046 - RNA, 19 nt, Homo sapiens
  misc_RNA (1)...(19): siRNA sense strand
caauaguaacucacuguaa

SEQ ID NO: 1833047 - RNA, 19 nt, Homo sapiens
  misc_RNA (1)...(19): siRNA sense strand
uguagcagaucaccaauag

SEQ ID NO: 1833048 - RNA, 19 nt, Homo sapiens
  misc_RNA (1)...(19): siRNA sense strand
ggaguaauuguuugguauu

SEQ ID NO: 1833049 - RNA, 19 nt, Homo sapiens
  misc_RNA (1)...(19): siRNA sense strand
gaucacaacaacaauucaa

SEQ ID NO: 1833050 - RNA, 19 nt, Homo sapiens
  misc_RNA (1)...(19): siRNA sense strand
aaaagaggcugaccaugaa

SEQ ID NO: 1833051 - RNA, 19 nt, Homo sapiens
  misc_RNA (1)...(19): siRNA sense strand
uuucaacgccuuauaaguu

SEQ ID NO: 1833052 - RNA, 19 nt, Homo sapiens
  misc_RNA (1)...(19): siRNA sense strand
gcuugcugguuuguaauua

SEQ ID NO: 1833053 - RNA, 19 nt, Homo sapiens
  misc_RNA (1)...(19): siRNA sense strand
gaaaaugaggguucccaua

SEQ ID NO: 1833054 - RNA, 19 nt, Homo sapiens
  misc_RNA (1)...(19): siRNA sense strand
ggcauuucauacuauauug

SEQ ID NO: 1833055 - RNA, 19 nt, Homo sapiens
  misc_RNA (1)...(19): siRNA sense strand
ugguuuaccuuuguucuuu

SEQ ID NO: 1833056 - RNA, 19 nt, Homo sapiens
  misc_RNA (1)...(19): siRNA sense strand
gcaauuccauacccugacu

SEQ ID NO: 1833057 - RNA, 19 nt, Homo sapiens
  misc_RNA (1)...(19): siRNA sense strand
ccaaagugaugaagaaaau

SEQ ID NO: 1833058 - RNA, 19 nt, Homo sapiens
  misc_RNA (1)...(19): siRNA sense strand
caaagugaacuaccaugga

SEQ ID NO: 1833059 - RNA, 19 nt, Homo sapiens
  misc_RNA (1)...(19): siRNA sense strand
ucaacggcagugaaauuua

SEQ ID NO: 1833060 - RNA, 19 nt, Homo sapiens
  misc_RNA (1)...(19): siRNA sense strand
ucaguuugcuucgauugaa

SEQ ID NO: 1833061 - RNA, 19 nt, Homo sapiens
  misc_RNA (1)...(19): siRNA sense strand
ggucaaguggaaugaauga

SEQ ID NO: 1833062 - RNA, 19 nt, Homo sapiens
  misc_RNA (1)...(19): siRNA sense strand
gcgccuucuugauaccuua

SEQ ID NO: 1833063 - RNA, 19 nt, Homo sapiens
  misc_RNA (1)...(19): siRNA sense strand
gagaaucaggaccguggua

SEQ ID NO: 1833064 - RNA, 19 nt, Homo sapiens
  misc_RNA (1)...(19): siRNA sense strand
agacuggaguaauuguuug

SEQ ID NO: 1833065 - RNA, 19 nt, Homo sapiens
  misc_RNA (1)...(19): siRNA sense strand
uaauucaggcuaaaggaaa

SEQ ID NO: 1833066 - RNA, 19 nt, Homo sapiens
  misc_RNA (1)...(19): siRNA sense strand
gauacagaaaugaugauug

SEQ ID NO: 1833067 - RNA, 19 nt, Homo sapiens
  misc_RNA (1)...(19): siRNA sense strand
ggagcccagucaaauuuua

SEQ ID NO: 1833068 - RNA, 19 nt, Homo sapiens
  misc_RNA (1)...(19): siRNA sense strand
gguccuacucauccuguua

SEQ ID NO: 1833069 - RNA, 19 nt, Homo sapiens
  misc_RNA (1)...(19): siRNA sense strand
guauuuagcacuuugucuu

SEQ ID NO: 1833070 - RNA, 19 nt, Homo sapiens
  misc_RNA (1)...(19): siRNA sense strand
ugucauaauugccuauagu

SEQ ID NO: 1833071 - RNA, 19 nt, Homo sapiens
  misc_RNA (1)...(19): siRNA sense strand
ggagcaaagagguggauau

SEQ ID NO: 1833072 - RNA, 19 nt, Homo sapiens
  misc_RNA (1)...(19): siRNA sense strand
ucacaacaacaauucaaga

SEQ ID NO: 1833073 - RNA, 19 nt, Homo sapiens
  misc_RNA (1)...(19): siRNA sense strand
cugcuucucugaugccauu

SEQ ID NO: 1833074 - RNA, 19 nt, Homo sapiens
  misc_RNA (1)...(19): siRNA sense strand
aagcugagguauggaaaga

SEQ ID NO: 1833075 - RNA, 19 nt, Homo sapiens
  misc_RNA (1)...(19): siRNA sense strand
uggaguaauuguuugguau

SEQ ID NO: 1833076 - RNA, 19 nt, Homo sapiens
  misc_RNA (1)...(19): siRNA sense strand
ccagugaacaauauuggaa

SEQ ID NO: 1833077 - RNA, 19 nt, Homo sapiens
  misc_RNA (1)...(19): siRNA sense strand
ccaauaguaacucacugua

SEQ ID NO: 1833078 - RNA, 19 nt, Homo sapiens
  misc_RNA (1)...(19): siRNA sense strand
cauaauugccuauagucuu

SEQ ID NO: 1833079 - RNA, 19 nt, Homo sapiens
  misc_RNA (1)...(19): siRNA sense strand
ggaacaggauuaccaacua

SEQ ID NO: 1833080 - RNA, 19 nt, Homo sapiens
  misc_RNA (1)...(19): siRNA sense strand
ggacuugaaucguaucuuc

SEQ ID NO: 1833081 - RNA, 19 nt, Homo sapiens
  misc_RNA (1)...(19): siRNA sense strand
aaucguaucuucccacuuu

SEQ ID NO: 1833082 - RNA, 19 nt, Homo sapiens
  misc_RNA (1)...(19): siRNA sense strand
ggacuugggucaacaugga

SEQ ID NO: 1833083 - RNA, 19 nt, Homo sapiens
  misc_RNA (1)...(19): siRNA sense strand
gaacaggauuaccaacuag

SEQ ID NO: 1833084 - RNA, 19 nt, Homo sapiens
  misc_RNA (1)...(19): siRNA sense strand
gcaaacugccuugaagaaa

SEQ ID NO: 1833085 - RNA, 19 nt, Homo sapiens
  misc_RNA (1)...(19): siRNA sense strand
ugcagaagcuacucaaaug

SEQ ID NO: 1833086 - RNA, 19 nt, Homo sapiens
  misc_RNA (1)...(19): siRNA sense strand
ccaggugaauccaacaaga

SEQ ID NO: 1833087 - RNA, 19 nt, Homo sapiens
  misc_RNA (1)...(19): siRNA sense strand
caaacugccuugaagaaaa

SEQ ID NO: 1833088 - RNA, 19 nt, Homo sapiens
  misc_RNA (1)...(19): siRNA sense strand
aauccucaguucaagguua

SEQ ID NO: 1833089 - RNA, 19 nt, Homo sapiens
  misc_RNA (1)...(19): siRNA sense strand
ggaccaauguucgaacuac

SEQ ID NO: 1833090 - RNA, 19 nt, Homo sapiens
  misc_RNA (1)...(19): siRNA sense strand
uuaggucucuugacaggaa

SEQ ID NO: 1833091 - RNA, 19 nt, Homo sapiens
  misc_RNA (1)...(19): siRNA sense strand
gggucaacauggauuagaa

SEQ ID NO: 1833092 - RNA, 19 nt, Homo sapiens
  misc_RNA (1)...(19): siRNA sense strand
guucuggaauccucaguuc

SEQ ID NO: 1833093 - RNA, 19 nt, Homo sapiens
  misc_RNA (1)...(19): siRNA sense strand
gcugcaauccagacaguaa

SEQ ID NO: 1833094 - RNA, 19 nt, Homo sapiens
  misc_RNA (1)...(19): siRNA sense strand
gagaauccaggacuugaau

SEQ ID NO: 1833095 - RNA, 19 nt, Homo sapiens
  misc_RNA (1)...(19): siRNA sense strand
cgaacuacuuccaggugaa

SEQ ID NO: 1833096 - RNA, 19 nt, Homo sapiens
  misc_RNA (1)...(19): siRNA sense strand
ggaaauggaacaggauuac

SEQ ID NO: 1833097 - RNA, 19 nt, Homo sapiens
  misc_RNA (1)...(19): siRNA sense strand
gcgcugcaauccagacagu

SEQ ID NO: 1833098 - RNA, 19 nt, Homo sapiens
  misc_RNA (1)...(19): siRNA sense strand
auccaggacuugaaucgua

SEQ ID NO: 1833099 - RNA, 19 nt, Homo sapiens
  misc_RNA (1)...(19): siRNA sense strand
gaacuacuuccaggugaau

SEQ ID NO: 1833100 - RNA, 19 nt, Homo sapiens
  misc_RNA (1)...(19): siRNA sense strand
agacgagaauccaggacuu

SEQ ID NO: 1833101 - RNA, 19 nt, Homo sapiens
  misc_RNA (1)...(19): siRNA sense strand
ggaauccucaguucaaggu

SEQ ID NO: 1833102 - RNA, 19 nt, Homo sapiens
  misc_RNA (1)...(19): siRNA sense strand
caaaugcagucggcuuguc

SEQ ID NO: 1833103 - RNA, 19 nt, Homo sapiens
  misc_RNA (1)...(19): siRNA sense strand
cggaaauggaacaggauua

SEQ ID NO: 1833104 - RNA, 19 nt, Homo sapiens
  misc_RNA (1)...(19): siRNA sense strand
gacaguaauucugcaaacu

SEQ ID NO: 1833105 - RNA, 19 nt, Homo sapiens
  misc_RNA (1)...(19): siRNA sense strand
gugaugcuuuccaugacaa

SEQ ID NO: 1833106 - RNA, 19 nt, Homo sapiens
  misc_RNA (1)...(19): siRNA sense strand
gcaauccagacaguaauuc

SEQ ID NO: 1833107 - RNA, 19 nt, Homo sapiens
  misc_RNA (1)...(19): siRNA sense strand
agacaguaauucugcaaac

SEQ ID NO: 1833108 - RNA, 19 nt, Homo sapiens
  misc_RNA (1)...(19): siRNA sense strand
cgagaauccaggacuugaa

SEQ ID NO: 1833109 - RNA, 19 nt, Homo sapiens
  misc_RNA (1)...(19): siRNA sense strand
ccaacuaguagacgaaagu

SEQ ID NO: 1833110 - RNA, 19 nt, Homo sapiens
  misc_RNA (1)...(19): siRNA sense strand
acaggauuaccaacuagua

SEQ ID NO: 1833111 - RNA, 19 nt, Homo sapiens
  misc_RNA (1)...(19): siRNA sense strand
gaugcagaagcuacucaaa

SEQ ID NO: 1833112 - RNA, 19 nt, Homo sapiens
  misc_RNA (1)...(19): siRNA sense strand
ucugcaaacugccuugaag

SEQ ID NO: 1833113 - RNA, 19 nt, Homo sapiens
  misc_RNA (1)...(19): siRNA sense strand
gcagaagcuacucaaaugc

SEQ ID NO: 1833114 - RNA, 19 nt, Homo sapiens
  misc_RNA (1)...(19): siRNA sense strand
ucaguucaagguuauccua

SEQ ID NO: 1833115 - RNA, 19 nt, Homo sapiens
  misc_RNA (1)...(19): siRNA sense strand
gaccaauguucgaacuacu

SEQ ID NO: 1833116 - RNA, 19 nt, Homo sapiens
  misc_RNA (1)...(19): siRNA sense strand
gacgagaauccaggacuug

SEQ ID NO: 1833117 - RNA, 19 nt, Homo sapiens
  misc_RNA (1)...(19): siRNA sense strand
cagaagcuacucaaaugca

SEQ ID NO: 1833118 - RNA, 19 nt, Homo sapiens
  misc_RNA (1)...(19): siRNA sense strand
uccaggacuugaaucguau

SEQ ID NO: 1833119 - RNA, 19 nt, Homo sapiens
  misc_RNA (1)...(19): siRNA sense strand
ucugaggacuacucuggau

SEQ ID NO: 1833120 - RNA, 19 nt, Homo sapiens
  misc_RNA (1)...(19): siRNA sense strand
ccaauguucgaacuacuuc

SEQ ID NO: 1833121 - RNA, 19 nt, Homo sapiens
  misc_RNA (1)...(19): siRNA sense strand
ucuggaauccucaguucaa

SEQ ID NO: 1833122 - RNA, 19 nt, Homo sapiens
  misc_RNA (1)...(19): siRNA sense strand
ugaggacuacucuggauca

SEQ ID NO: 1833123 - RNA, 19 nt, Homo sapiens
  misc_RNA (1)...(19): siRNA sense strand
ugcaaacugccuugaagaa

SEQ ID NO: 1833124 - RNA, 19 nt, Homo sapiens
  misc_RNA (1)...(19): siRNA sense strand
gaauccaggacuugaaucg

SEQ ID NO: 1833125 - RNA, 19 nt, Homo sapiens
  misc_RNA (1)...(19): siRNA sense strand
cagauuggauugcuauuua

SEQ ID NO: 1833126 - RNA, 19 nt, Homo sapiens
  misc_RNA (1)...(19): siRNA sense strand
gagcauacuuugaaugaga

SEQ ID NO: 1833127 - RNA, 19 nt, Homo sapiens
  misc_RNA (1)...(19): siRNA sense strand
gaagagucauguugguaaa

SEQ ID NO: 1833128 - RNA, 19 nt, Homo sapiens
  misc_RNA (1)...(19): siRNA sense strand
caacuuugaugacuaugaa

SEQ ID NO: 1833129 - RNA, 19 nt, Homo sapiens
  misc_RNA (1)...(19): siRNA sense strand
gcagaagguuguuaaacug

SEQ ID NO: 1833130 - RNA, 19 nt, Homo sapiens
  misc_RNA (1)...(19): siRNA sense strand
gaagauauccgugucucua

SEQ ID NO: 1833131 - RNA, 19 nt, Homo sapiens
  misc_RNA (1)...(19): siRNA sense strand
aggcagaacuuggacauua

SEQ ID NO: 1833132 - RNA, 19 nt, Homo sapiens
  misc_RNA (1)...(19): siRNA sense strand
ggaagagucauguugguaa

SEQ ID NO: 1833133 - RNA, 19 nt, Homo sapiens
  misc_RNA (1)...(19): siRNA sense strand
gagaauccaacucagaaua

SEQ ID NO: 1833134 - RNA, 19 nt, Homo sapiens
  misc_RNA (1)...(19): siRNA sense strand
ggagauaccagcaacuuug

SEQ ID NO: 1833135 - RNA, 19 nt, Homo sapiens
  misc_RNA (1)...(19): siRNA sense strand
gaauaaugccggacuugaa

SEQ ID NO: 1833136 - RNA, 19 nt, Homo sapiens
  misc_RNA (1)...(19): siRNA sense strand
ggucacagacuuuggguuu

SEQ ID NO: 1833137 - RNA, 19 nt, Homo sapiens
  misc_RNA (1)...(19): siRNA sense strand
gaagcuccauucauaccaa

SEQ ID NO: 1833138 - RNA, 19 nt, Homo sapiens
  misc_RNA (1)...(19): siRNA sense strand
uaggagugcuaaucuauga

SEQ ID NO: 1833139 - RNA, 19 nt, Homo sapiens
  misc_RNA (1)...(19): siRNA sense strand
gaacaguauuaugccauga

SEQ ID NO: 1833140 - RNA, 19 nt, Homo sapiens
  misc_RNA (1)...(19): siRNA sense strand
uaaagaauggugucaguga

SEQ ID NO: 1833141 - RNA, 19 nt, Homo sapiens
  misc_RNA (1)...(19): siRNA sense strand
cagcaacuuugaugacuau

SEQ ID NO: 1833142 - RNA, 19 nt, Homo sapiens
  misc_RNA (1)...(19): siRNA sense strand
gaauccaacucagaauaau

SEQ ID NO: 1833143 - RNA, 19 nt, Homo sapiens
  misc_RNA (1)...(19): siRNA sense strand
uaagaagaauuggaagguu

SEQ ID NO: 1833144 - RNA, 19 nt, Homo sapiens
  misc_RNA (1)...(19): siRNA sense strand
ucacaucuaagaagaauug

SEQ ID NO: 1833145 - RNA, 19 nt, Homo sapiens
  misc_RNA (1)...(19): siRNA sense strand
gaccaaccaauucagauuu

SEQ ID NO: 1833146 - RNA, 19 nt, Homo sapiens
  misc_RNA (1)...(19): siRNA sense strand
gauauccgugucucuauaa

SEQ ID NO: 1833147 - RNA, 19 nt, Homo sapiens
  misc_RNA (1)...(19): siRNA sense strand
ggcagaacuuggacauuau

SEQ ID NO: 1833148 - RNA, 19 nt, Homo sapiens
  misc_RNA (1)...(19): siRNA sense strand
agauauccgugucucuaua

SEQ ID NO: 1833149 - RNA, 19 nt, Homo sapiens
  misc_RNA (1)...(19): siRNA sense strand
ggagugcuaaucuaugaaa

SEQ ID NO: 1833150 - RNA, 19 nt, Homo sapiens
  misc_RNA (1)...(19): siRNA sense strand
gauaagcagaagguuguua

SEQ ID NO: 1833151 - RNA, 19 nt, Homo sapiens
  misc_RNA (1)...(19): siRNA sense strand
ugaugacuaugaagaagaa

SEQ ID NO: 1833152 - RNA, 19 nt, Homo sapiens
  misc_RNA (1)...(19): siRNA sense strand
caucuaagaagaauuggaa

SEQ ID NO: 1833153 - RNA, 19 nt, Homo sapiens
  misc_RNA (1)...(19): siRNA sense strand
ucagcaagggcuacaauaa

SEQ ID NO: 1833154 - RNA, 19 nt, Homo sapiens
  misc_RNA (1)...(19): siRNA sense strand
gggagaauccaacucagaa

SEQ ID NO: 1833155 - RNA, 19 nt, Homo sapiens
  misc_RNA (1)...(19): siRNA sense strand
ccagcaacuuugaugacua

SEQ ID NO: 1833156 - RNA, 19 nt, Homo sapiens
  misc_RNA (1)...(19): siRNA sense strand
gaagguuguuaaacugaag

SEQ ID NO: 1833157 - RNA, 19 nt, Homo sapiens
  misc_RNA (1)...(19): siRNA sense strand
ccauucauaccaaaguuua

SEQ ID NO: 1833158 - RNA, 19 nt, Homo sapiens
  misc_RNA (1)...(19): siRNA sense strand
accaaccaauucagauuua

SEQ ID NO: 1833159 - RNA, 19 nt, Homo sapiens
  misc_RNA (1)...(19): siRNA sense strand
gaauuggaagguucaguga

SEQ ID NO: 1833160 - RNA, 19 nt, Homo sapiens
  misc_RNA (1)...(19): siRNA sense strand
gagauaccagcaacuuuga

SEQ ID NO: 1833161 - RNA, 19 nt, Homo sapiens
  misc_RNA (1)...(19): siRNA sense strand
uagagcauacuuugaauga

SEQ ID NO: 1833162 - RNA, 19 nt, Homo sapiens
  misc_RNA (1)...(19): siRNA sense strand
gcagaccaaccaauucaga

SEQ ID NO: 1833163 - RNA, 19 nt, Homo sapiens
  misc_RNA (1)...(19): siRNA sense strand
agaauccaacucagaauaa

SEQ ID NO: 1833164 - RNA, 19 nt, Homo sapiens
  misc_RNA (1)...(19): siRNA sense strand
guucuaugcagcucagaua

SEQ ID NO: 1833165 - RNA, 19 nt, Homo sapiens
  misc_RNA (1)...(19): siRNA sense strand
gaauggugucagugauaua

SEQ ID NO: 1833166 - RNA, 19 nt, Homo sapiens
  misc_RNA (1)...(19): siRNA sense strand
gugcuaaucuaugaaaugg

SEQ ID NO: 1833167 - RNA, 19 nt, Homo sapiens
  misc_RNA (1)...(19): siRNA sense strand
gcaacuuugaugacuauga

SEQ ID NO: 1833168 - RNA, 19 nt, Homo sapiens
  misc_RNA (1)...(19): siRNA sense strand
gaauauuacaggcagugaa

SEQ ID NO: 1833169 - RNA, 19 nt, Homo sapiens
  misc_RNA (1)...(19): siRNA sense strand
gaagguugaagcuccauuc

SEQ ID NO: 1833170 - RNA, 19 nt, Homo sapiens
  misc_RNA (1)...(19): siRNA sense strand
ggauuugaccaagagauuu

SEQ ID NO: 1833171 - RNA, 19 nt, Homo sapiens
  misc_RNA (1)...(19): siRNA sense strand
guuaaaggcagaacuugga

SEQ ID NO: 1833172 - RNA, 19 nt, Homo sapiens
  misc_RNA (1)...(19): siRNA sense strand
gaauuuuccuuuccuuguu

SEQ ID NO: 1833173 - RNA, 19 nt, Homo sapiens
  misc_RNA (1)...(19): siRNA sense strand
cgacagauuggauugcuau

SEQ ID NO: 1833174 - RNA, 19 nt, Homo sapiens
  misc_RNA (1)...(19): siRNA sense strand
agaauggugucagugauau

SEQ ID NO: 1833175 - RNA, 19 nt, Homo sapiens
  misc_RNA (1)...(19): siRNA sense strand
gauuugaccaagagauuug

SEQ ID NO: 1833176 - RNA, 19 nt, Homo sapiens
  misc_RNA (1)...(19): siRNA sense strand
ucagauagugcuaacauuc

SEQ ID NO: 1833177 - RNA, 19 nt, Homo sapiens
  misc_RNA (1)...(19): siRNA sense strand
uagauaagcagaagguugu

SEQ ID NO: 1833178 - RNA, 19 nt, Homo sapiens
  misc_RNA (1)...(19): siRNA sense strand
aagaauggugucagugaua

SEQ ID NO: 1833179 - RNA, 19 nt, Homo sapiens
  misc_RNA (1)...(19): siRNA sense strand
aaagaauggugucagugau

SEQ ID NO: 1833180 - RNA, 19 nt, Homo sapiens
  misc_RNA (1)...(19): siRNA sense strand
uuggaaaucuaaagaaugg

SEQ ID NO: 1833181 - RNA, 19 nt, Homo sapiens
  misc_RNA (1)...(19): siRNA sense strand
gcagaacuuggacauuaug

SEQ ID NO: 1833182 - RNA, 19 nt, Homo sapiens
  misc_RNA (1)...(19): siRNA sense strand
ggaguaugcuuuuaaggau

SEQ ID NO: 1833183 - RNA, 19 nt, Homo sapiens
  misc_RNA (1)...(19): siRNA sense strand
uauuacaggcagugaauuu

SEQ ID NO: 1833184 - RNA, 19 nt, Homo sapiens
  misc_RNA (1)...(19): siRNA sense strand
gcucagauagugcuaacau

SEQ ID NO: 1833185 - RNA, 19 nt, Homo sapiens
  misc_RNA (1)...(19): siRNA sense strand
gauaccagcaacuuugaug

SEQ ID NO: 1833186 - RNA, 19 nt, Homo sapiens
  misc_RNA (1)...(19): siRNA sense strand
acacaaagccacugaacag

SEQ ID NO: 1833187 - RNA, 19 nt, Homo sapiens
  misc_RNA (1)...(19): siRNA sense strand
ucuaaagaauggugucagu

SEQ ID NO: 1833188 - RNA, 19 nt, Homo sapiens
  misc_RNA (1)...(19): siRNA sense strand
ccacuucaguucagaucuc

SEQ ID NO: 1833189 - RNA, 19 nt, Homo sapiens
  misc_RNA (1)...(19): siRNA sense strand
ugaagcaaauagagcauac

SEQ ID NO: 1833190 - RNA, 19 nt, Homo sapiens
  misc_RNA (1)...(19): siRNA sense strand
guuguuaaacugaagcaaa

SEQ ID NO: 1833191 - RNA, 19 nt, Homo sapiens
  misc_RNA (1)...(19): siRNA sense strand
agaagguuguuaaacugaa

SEQ ID NO: 1833192 - RNA, 19 nt, Homo sapiens
  misc_RNA (1)...(19): siRNA sense strand
caaccaauucagauuuaug

SEQ ID NO: 1833193 - RNA, 19 nt, Homo sapiens
  misc_RNA (1)...(19): siRNA sense strand
ccaaccaauucagauuuau

SEQ ID NO: 1833194 - RNA, 19 nt, Homo sapiens
  misc_RNA (1)...(19): siRNA sense strand
ucgaguaccuccauucacu

SEQ ID NO: 1833195 - RNA, 19 nt, Homo sapiens
  misc_RNA (1)...(19): siRNA sense strand
ucagaauaaugccggacuu

SEQ ID NO: 1833196 - RNA, 19 nt, Homo sapiens
  misc_RNA (1)...(19): siRNA sense strand
gaagaagauauccgugucu

SEQ ID NO: 1833197 - RNA, 19 nt, Homo sapiens
  misc_RNA (1)...(19): siRNA sense strand
cagcaagggcuacaauaag

SEQ ID NO: 1833198 - RNA, 19 nt, Homo sapiens
  misc_RNA (1)...(19): siRNA sense strand
guaccuccauucacuagac

SEQ ID NO: 1833199 - RNA, 19 nt, Homo sapiens
  misc_RNA (1)...(19): siRNA sense strand
cagaagguuguuaaacuga

SEQ ID NO: 1833200 - RNA, 19 nt, Homo sapiens
  misc_RNA (1)...(19): siRNA sense strand
gaguaugcuuuuaaggaua

SEQ ID NO: 1833201 - RNA, 19 nt, Homo sapiens
  misc_RNA (1)...(19): siRNA sense strand
augccggacuugaagauuu

SEQ ID NO: 1833202 - RNA, 19 nt, Homo sapiens
  misc_RNA (1)...(19): siRNA sense strand
ggagaauccaacucagaau

SEQ ID NO: 1833203 - RNA, 19 nt, Homo sapiens
  misc_RNA (1)...(19): siRNA sense strand
cagguggauuugaccaaga

SEQ ID NO: 1833204 - RNA, 19 nt, Homo sapiens
  misc_RNA (1)...(19): siRNA sense strand
auaagcagaagguuguuaa

SEQ ID NO: 1833205 - RNA, 19 nt, Homo sapiens
  misc_RNA (1)...(19): siRNA sense strand
cgacuggaguaugcuuuua

SEQ ID NO: 1833206 - RNA, 19 nt, Homo sapiens
  misc_RNA (1)...(19): siRNA sense strand
agaccaaccaauucagauu

SEQ ID NO: 1833207 - RNA, 19 nt, Homo sapiens
  misc_RNA (1)...(19): siRNA sense strand
uaagcagaagguuguuaaa

SEQ ID NO: 1833208 - RNA, 19 nt, Homo sapiens
  misc_RNA (1)...(19): siRNA sense strand
agcagaagguuguuaaacu

SEQ ID NO: 1833209 - RNA, 19 nt, Homo sapiens
  misc_RNA (1)...(19): siRNA sense strand
ucacagacuuuggguuugc

SEQ ID NO: 1833210 - RNA, 19 nt, Homo sapiens
  misc_RNA (1)...(19): siRNA sense strand
gagugcuaaucuaugaaau

SEQ ID NO: 1833211 - RNA, 19 nt, Homo sapiens
  misc_RNA (1)...(19): siRNA sense strand
acagauuggauugcuauuu

SEQ ID NO: 1833212 - RNA, 19 nt, Homo sapiens
  misc_RNA (1)...(19): siRNA sense strand
gcuauauccaggucacaga

SEQ ID NO: 1833213 - RNA, 19 nt, Homo sapiens
  misc_RNA (1)...(19): siRNA sense strand
ccgugucucuauaacagaa

SEQ ID NO: 1833214 - RNA, 19 nt, Homo sapiens
  misc_RNA (1)...(19): siRNA sense strand
guuaaacugaagcaaauag

SEQ ID NO: 1833215 - RNA, 19 nt, Homo sapiens
  misc_RNA (1)...(19): siRNA sense strand
agaauaaugccggacuuga

SEQ ID NO: 1833216 - RNA, 19 nt, Homo sapiens
  misc_RNA (1)...(19): siRNA sense strand
ggauuggugggcauuagga

SEQ ID NO: 1833217 - RNA, 19 nt, Homo sapiens
  misc_RNA (1)...(19): siRNA sense strand
cgaguaccuccauucacua

SEQ ID NO: 1833218 - RNA, 19 nt, Homo sapiens
  misc_RNA (1)...(19): siRNA sense strand
agauagugcuaacauucga

SEQ ID NO: 1833219 - RNA, 19 nt, Homo sapiens
  misc_RNA (1)...(19): siRNA sense strand
uagccaaagccaaagaaga

SEQ ID NO: 1833220 - RNA, 19 nt, Homo sapiens
  misc_RNA (1)...(19): siRNA sense strand
agcaagggcuacaauaagg

SEQ ID NO: 1833221 - RNA, 19 nt, Homo sapiens
  misc_RNA (1)...(19): siRNA sense strand
ugacuaugaagaagaagau

SEQ ID NO: 1833222 - RNA, 19 nt, Homo sapiens
  misc_RNA (1)...(19): siRNA sense strand
aauggugucagugauauaa

SEQ ID NO: 1833223 - RNA, 19 nt, Homo sapiens
  misc_RNA (1)...(19): siRNA sense strand
aagcaaauagagcauacuu

SEQ ID NO: 1833224 - RNA, 19 nt, Homo sapiens
  misc_RNA (1)...(19): siRNA sense strand
ccaaagccaaagaagacuu

SEQ ID NO: 1833225 - RNA, 19 nt, Homo sapiens
  misc_RNA (1)...(19): siRNA sense strand
cagauuggauugcuauuua

SEQ ID NO: 1833226 - RNA, 19 nt, Homo sapiens
  misc_RNA (1)...(19): siRNA sense strand
gagcauacuuugaaugaga

SEQ ID NO: 1833227 - RNA, 19 nt, Homo sapiens
  misc_RNA (1)...(19): siRNA sense strand
gaagagucauguugguaaa

SEQ ID NO: 1833228 - RNA, 19 nt, Homo sapiens
  misc_RNA (1)...(19): siRNA sense strand
caacuuugaugacuaugaa

SEQ ID NO: 1833229 - RNA, 19 nt, Homo sapiens
  misc_RNA (1)...(19): siRNA sense strand
gcagaagguuguuaaacug

SEQ ID NO: 1833230 - RNA, 19 nt, Homo sapiens
  misc_RNA (1)...(19): siRNA sense strand
gaagauauccgugucucua

SEQ ID NO: 1833231 - RNA, 19 nt, Homo sapiens
  misc_RNA (1)...(19): siRNA sense strand
aggcagaacuuggacauua

SEQ ID NO: 1833232 - RNA, 19 nt, Homo sapiens
  misc_RNA (1)...(19): siRNA sense strand
ggaagagucauguugguaa

SEQ ID NO: 1833233 - RNA, 19 nt, Homo sapiens
  misc_RNA (1)...(19): siRNA sense strand
gagaauccaacucagaaua

SEQ ID NO: 1833234 - RNA, 19 nt, Homo sapiens
  misc_RNA (1)...(19): siRNA sense strand
ggagauaccagcaacuuug

SEQ ID NO: 1833235 - RNA, 19 nt, Homo sapiens
  misc_RNA (1)...(19): siRNA sense strand
gaauaaugccggacuugaa

SEQ ID NO: 1833236 - RNA, 19 nt, Homo sapiens
  misc_RNA (1)...(19): siRNA sense strand
ggucacagacuuuggguuu

SEQ ID NO: 1833237 - RNA, 19 nt, Homo sapiens
  misc_RNA (1)...(19): siRNA sense strand
gaagcuccauucauaccaa

SEQ ID NO: 1833238 - RNA, 19 nt, Homo sapiens
  misc_RNA (1)...(19): siRNA sense strand
uaggagugcuaaucuauga

SEQ ID NO: 1833239 - RNA, 19 nt, Homo sapiens
  misc_RNA (1)...(19): siRNA sense strand
gaacaguauuaugccauga

SEQ ID NO: 1833240 - RNA, 19 nt, Homo sapiens
  misc_RNA (1)...(19): siRNA sense strand
uaaagaauggugucaguga

SEQ ID NO: 1833241 - RNA, 19 nt, Homo sapiens
  misc_RNA (1)...(19): siRNA sense strand
cagcaacuuugaugacuau

SEQ ID NO: 1833242 - RNA, 19 nt, Homo sapiens
  misc_RNA (1)...(19): siRNA sense strand
gaauccaacucagaauaau

SEQ ID NO: 1833243 - RNA, 19 nt, Homo sapiens
  misc_RNA (1)...(19): siRNA sense strand
uaagaagaauuggaagguu

SEQ ID NO: 1833244 - RNA, 19 nt, Homo sapiens
  misc_RNA (1)...(19): siRNA sense strand
ucacaucuaagaagaauug

SEQ ID NO: 1833245 - RNA, 19 nt, Homo sapiens
  misc_RNA (1)...(19): siRNA sense strand
gaccaaccaauucagauuu

SEQ ID NO: 1833246 - RNA, 19 nt, Homo sapiens
  misc_RNA (1)...(19): siRNA sense strand
gauauccgugucucuauaa

SEQ ID NO: 1833247 - RNA, 19 nt, Homo sapiens
  misc_RNA (1)...(19): siRNA sense strand
ggcagaacuuggacauuau

SEQ ID NO: 1833248 - RNA, 19 nt, Homo sapiens
  misc_RNA (1)...(19): siRNA sense strand
agauauccgugucucuaua

SEQ ID NO: 1833249 - RNA, 19 nt, Homo sapiens
  misc_RNA (1)...(19): siRNA sense strand
ggagugcuaaucuaugaaa

SEQ ID NO: 1833250 - RNA, 19 nt, Homo sapiens
  misc_RNA (1)...(19): siRNA sense strand
gauaagcagaagguuguua

SEQ ID NO: 1833251 - RNA, 19 nt, Homo sapiens
  misc_RNA (1)...(19): siRNA sense strand
ugaugacuaugaagaagaa

SEQ ID NO: 1833252 - RNA, 19 nt, Homo sapiens
  misc_RNA (1)...(19): siRNA sense strand
caucuaagaagaauuggaa

SEQ ID NO: 1833253 - RNA, 19 nt, Homo sapiens
  misc_RNA (1)...(19): siRNA sense strand
ucagcaagggcuacaauaa

SEQ ID NO: 1833254 - RNA, 19 nt, Homo sapiens
  misc_RNA (1)...(19): siRNA sense strand
gggagaauccaacucagaa

SEQ ID NO: 1833255 - RNA, 19 nt, Homo sapiens
  misc_RNA (1)...(19): siRNA sense strand
ccagcaacuuugaugacua

SEQ ID NO: 1833256 - RNA, 19 nt, Homo sapiens
  misc_RNA (1)...(19): siRNA sense strand
gaagguuguuaaacugaag

SEQ ID NO: 1833257 - RNA, 19 nt, Homo sapiens
  misc_RNA (1)...(19): siRNA sense strand
ccauucauaccaaaguuua

SEQ ID NO: 1833258 - RNA, 19 nt, Homo sapiens
  misc_RNA (1)...(19): siRNA sense strand
accaaccaauucagauuua

SEQ ID NO: 1833259 - RNA, 19 nt, Homo sapiens
  misc_RNA (1)...(19): siRNA sense strand
gaauuggaagguucaguga

SEQ ID NO: 1833260 - RNA, 19 nt, Homo sapiens
  misc_RNA (1)...(19): siRNA sense strand
gagauaccagcaacuuuga

SEQ ID NO: 1833261 - RNA, 19 nt, Homo sapiens
  misc_RNA (1)...(19): siRNA sense strand
uagagcauacuuugaauga

SEQ ID NO: 1833262 - RNA, 19 nt, Homo sapiens
  misc_RNA (1)...(19): siRNA sense strand
gcagaccaaccaauucaga

SEQ ID NO: 1833263 - RNA, 19 nt, Homo sapiens
  misc_RNA (1)...(19): siRNA sense strand
agaauccaacucagaauaa

SEQ ID NO: 1833264 - RNA, 19 nt, Homo sapiens
  misc_RNA (1)...(19): siRNA sense strand
guucuaugcagcucagaua

SEQ ID NO: 1833265 - RNA, 19 nt, Homo sapiens
  misc_RNA (1)...(19): siRNA sense strand
gaauggugucagugauaua

SEQ ID NO: 1833266 - RNA, 19 nt, Homo sapiens
  misc_RNA (1)...(19): siRNA sense strand
gugcuaaucuaugaaaugg

SEQ ID NO: 1833267 - RNA, 19 nt, Homo sapiens
  misc_RNA (1)...(19): siRNA sense strand
gcaacuuugaugacuauga

SEQ ID NO: 1833268 - RNA, 19 nt, Homo sapiens
  misc_RNA (1)...(19): siRNA sense strand
gaauauuacaggcagugaa

SEQ ID NO: 1833269 - RNA, 19 nt, Homo sapiens
  misc_RNA (1)...(19): siRNA sense strand
gaagguugaagcuccauuc

SEQ ID NO: 1833270 - RNA, 19 nt, Homo sapiens
  misc_RNA (1)...(19): siRNA sense strand
ggauuugaccaagagauuu

SEQ ID NO: 1833271 - RNA, 19 nt, Homo sapiens
  misc_RNA (1)...(19): siRNA sense strand
guuaaaggcagaacuugga

SEQ ID NO: 1833272 - RNA, 19 nt, Homo sapiens
  misc_RNA (1)...(19): siRNA sense strand
gaauuuuccuuuccuuguu

SEQ ID NO: 1833273 - RNA, 19 nt, Homo sapiens
  misc_RNA (1)...(19): siRNA sense strand
cgacagauuggauugcuau

SEQ ID NO: 1833274 - RNA, 19 nt, Homo sapiens
  misc_RNA (1)...(19): siRNA sense strand
agaauggugucagugauau

SEQ ID NO: 1833275 - RNA, 19 nt, Homo sapiens
  misc_RNA (1)...(19): siRNA sense strand
gauuugaccaagagauuug

SEQ ID NO: 1833276 - RNA, 19 nt, Homo sapiens
  misc_RNA (1)...(19): siRNA sense strand
ucagauagugcuaacauuc

SEQ ID NO: 1833277 - RNA, 19 nt, Homo sapiens
  misc_RNA (1)...(19): siRNA sense strand
uagauaagcagaagguugu

SEQ ID NO: 1833278 - RNA, 19 nt, Homo sapiens
  misc_RNA (1)...(19): siRNA sense strand
aagaauggugucagugaua

SEQ ID NO: 1833279 - RNA, 19 nt, Homo sapiens
  misc_RNA (1)...(19): siRNA sense strand
aaagaauggugucagugau

SEQ ID NO: 1833280 - RNA, 19 nt, Homo sapiens
  misc_RNA (1)...(19): siRNA sense strand
uuggaaaucuaaagaaugg

SEQ ID NO: 1833281 - RNA, 19 nt, Homo sapiens
  misc_RNA (1)...(19): siRNA sense strand
gcagaacuuggacauuaug

SEQ ID NO: 1833282 - RNA, 19 nt, Homo sapiens
  misc_RNA (1)...(19): siRNA sense strand
ggaguaugcuuuuaaggau

SEQ ID NO: 1833283 - RNA, 19 nt, Homo sapiens
  misc_RNA (1)...(19): siRNA sense strand
uauuacaggcagugaauuu

SEQ ID NO: 1833284 - RNA, 19 nt, Homo sapiens
  misc_RNA (1)...(19): siRNA sense strand
gcucagauagugcuaacau

SEQ ID NO: 1833285 - RNA, 19 nt, Homo sapiens
  misc_RNA (1)...(19): siRNA sense strand
gauaccagcaacuuugaug

SEQ ID NO: 1833286 - RNA, 19 nt, Homo sapiens
  misc_RNA (1)...(19): siRNA sense strand
acacaaagccacugaacag

SEQ ID NO: 1833287 - RNA, 19 nt, Homo sapiens
  misc_RNA (1)...(19): siRNA sense strand
ucuaaagaauggugucagu

SEQ ID NO: 1833288 - RNA, 19 nt, Homo sapiens
  misc_RNA (1)...(19): siRNA sense strand
ccacuucaguucagaucuc

SEQ ID NO: 1833289 - RNA, 19 nt, Homo sapiens
  misc_RNA (1)...(19): siRNA sense strand
ugaagcaaauagagcauac

SEQ ID NO: 1833290 - RNA, 19 nt, Homo sapiens
  misc_RNA (1)...(19): siRNA sense strand
guuguuaaacugaagcaaa

SEQ ID NO: 1833291 - RNA, 19 nt, Homo sapiens
  misc_RNA (1)...(19): siRNA sense strand
agaagguuguuaaacugaa

SEQ ID NO: 1833292 - RNA, 19 nt, Homo sapiens
  misc_RNA (1)...(19): siRNA sense strand
caaccaauucagauuuaug

SEQ ID NO: 1833293 - RNA, 19 nt, Homo sapiens
  misc_RNA (1)...(19): siRNA sense strand
ccaaccaauucagauuuau

SEQ ID NO: 1833294 - RNA, 19 nt, Homo sapiens
  misc_RNA (1)...(19): siRNA sense strand
ucgaguaccuccauucacu

SEQ ID NO: 1833295 - RNA, 19 nt, Homo sapiens
  misc_RNA (1)...(19): siRNA sense strand
ucagaauaaugccggacuu

SEQ ID NO: 1833296 - RNA, 19 nt, Homo sapiens
  misc_RNA (1)...(19): siRNA sense strand
gaagaagauauccgugucu

SEQ ID NO: 1833297 - RNA, 19 nt, Homo sapiens
  misc_RNA (1)...(19): siRNA sense strand
cagcaagggcuacaauaag

SEQ ID NO: 1833298 - RNA, 19 nt, Homo sapiens
  misc_RNA (1)...(19): siRNA sense strand
guaccuccauucacuagac

SEQ ID NO: 1833299 - RNA, 19 nt, Homo sapiens
  misc_RNA (1)...(19): siRNA sense strand
cagaagguuguuaaacuga

SEQ ID NO: 1833300 - RNA, 19 nt, Homo sapiens
  misc_RNA (1)...(19): siRNA sense strand
gaguaugcuuuuaaggaua

SEQ ID NO: 1833301 - RNA, 19 nt, Homo sapiens
  misc_RNA (1)...(19): siRNA sense strand
augccggacuugaagauuu

SEQ ID NO: 1833302 - RNA, 19 nt, Homo sapiens
  misc_RNA (1)...(19): siRNA sense strand
ggagaauccaacucagaau

SEQ ID NO: 1833303 - RNA, 19 nt, Homo sapiens
  misc_RNA (1)...(19): siRNA sense strand
cagguggauuugaccaaga

SEQ ID NO: 1833304 - RNA, 19 nt, Homo sapiens
  misc_RNA (1)...(19): siRNA sense strand
auaagcagaagguuguuaa

SEQ ID NO: 1833305 - RNA, 19 nt, Homo sapiens
  misc_RNA (1)...(19): siRNA sense strand
cgacuggaguaugcuuuua

SEQ ID NO: 1833306 - RNA, 19 nt, Homo sapiens
  misc_RNA (1)...(19): siRNA sense strand
agaccaaccaauucagauu

SEQ ID NO: 1833307 - RNA, 19 nt, Homo sapiens
  misc_RNA (1)...(19): siRNA sense strand
uaagcagaagguuguuaaa

SEQ ID NO: 1833308 - RNA, 19 nt, Homo sapiens
  misc_RNA (1)...(19): siRNA sense strand
agcagaagguuguuaaacu

SEQ ID NO: 1833309 - RNA, 19 nt, Homo sapiens
  misc_RNA (1)...(19): siRNA sense strand
ucacagacuuuggguuugc

SEQ ID NO: 1833310 - RNA, 19 nt, Homo sapiens
  misc_RNA (1)...(19): siRNA sense strand
gagugcuaaucuaugaaau

SEQ ID NO: 1833311 - RNA, 19 nt, Homo sapiens
  misc_RNA (1)...(19): siRNA sense strand
acagauuggauugcuauuu

SEQ ID NO: 1833312 - RNA, 19 nt, Homo sapiens
  misc_RNA (1)...(19): siRNA sense strand
gcuauauccaggucacaga

SEQ ID NO: 1833313 - RNA, 19 nt, Homo sapiens
  misc_RNA (1)...(19): siRNA sense strand
ccgugucucuauaacagaa

SEQ ID NO: 1833314 - RNA, 19 nt, Homo sapiens
  misc_RNA (1)...(19): siRNA sense strand
guuaaacugaagcaaauag

SEQ ID NO: 1833315 - RNA, 19 nt, Homo sapiens
  misc_RNA (1)...(19): siRNA sense strand
agaauaaugccggacuuga

SEQ ID NO: 1833316 - RNA, 19 nt, Homo sapiens
  misc_RNA (1)...(19): siRNA sense strand
ggauuggugggcauuagga

SEQ ID NO: 1833317 - RNA, 19 nt, Homo sapiens
  misc_RNA (1)...(19): siRNA sense strand
cgaguaccuccauucacua

SEQ ID NO: 1833318 - RNA, 19 nt, Homo sapiens
  misc_RNA (1)...(19): siRNA sense strand
agauagugcuaacauucga

SEQ ID NO: 1833319 - RNA, 19 nt, Homo sapiens
  misc_RNA (1)...(19): siRNA sense strand
uagccaaagccaaagaaga

SEQ ID NO: 1833320 - RNA, 19 nt, Homo sapiens
  misc_RNA (1)...(19): siRNA sense strand
agcaagggcuacaauaagg

SEQ ID NO: 1833321 - RNA, 19 nt, Homo sapiens
  misc_RNA (1)...(19): siRNA sense strand
ugacuaugaagaagaagau

SEQ ID NO: 1833322 - RNA, 19 nt, Homo sapiens
  misc_RNA (1)...(19): siRNA sense strand
aauggugucagugauauaa

SEQ ID NO: 1833323 - RNA, 19 nt, Homo sapiens
  misc_RNA (1)...(19): siRNA sense strand
aagcaaauagagcauacuu

SEQ ID NO: 1833324 - RNA, 19 nt, Homo sapiens
  misc_RNA (1)...(19): siRNA sense strand
ccaaagccaaagaagacuu

SEQ ID NO: 1833325 - RNA, 19 nt, Homo sapiens
  misc_RNA (1)...(19): siRNA sense strand
caugccaacuaucgaauua

SEQ ID NO: 1833326 - RNA, 19 nt, Homo sapiens
  misc_RNA (1)...(19): siRNA sense strand
gaacccugcugauccagaa

SEQ ID NO: 1833327 - RNA, 19 nt, Homo sapiens
  misc_RNA (1)...(19): siRNA sense strand
caacaggacccucguucua

SEQ ID NO: 1833328 - RNA, 19 nt, Homo sapiens
  misc_RNA (1)...(19): siRNA sense strand
gcacacaacggucgagaga

SEQ ID NO: 1833329 - RNA, 19 nt, Homo sapiens
  misc_RNA (1)...(19): siRNA sense strand
gaaguaaccagacaauucu

SEQ ID NO: 1833330 - RNA, 19 nt, Homo sapiens
  misc_RNA (1)...(19): siRNA sense strand
ugccaacuaucgaauuaua

SEQ ID NO: 1833331 - RNA, 19 nt, Homo sapiens
  misc_RNA (1)...(19): siRNA sense strand
gaagaaguaaccagacaau

SEQ ID NO: 1833332 - RNA, 19 nt, Homo sapiens
  misc_RNA (1)...(19): siRNA sense strand
ccagacaauucuacguauu

SEQ ID NO: 1833333 - RNA, 19 nt, Homo sapiens
  misc_RNA (1)...(19): siRNA sense strand
cacaaagaaugacauagga

SEQ ID NO: 1833334 - RNA, 19 nt, Homo sapiens
  misc_RNA (1)...(19): siRNA sense strand
cauaaugagucccagaauc

SEQ ID NO: 1833335 - RNA, 19 nt, Homo sapiens
  misc_RNA (1)...(19): siRNA sense strand
acacaacggucgagagaca

SEQ ID NO: 1833336 - RNA, 19 nt, Homo sapiens
  misc_RNA (1)...(19): siRNA sense strand
ucaauccgguggagaacaa

SEQ ID NO: 1833337 - RNA, 19 nt, Homo sapiens
  misc_RNA (1)...(19): siRNA sense strand
agaaguaaccagacaauuc

SEQ ID NO: 1833338 - RNA, 19 nt, Homo sapiens
  misc_RNA (1)...(19): siRNA sense strand
ggagguccuucuaguaguc

SEQ ID NO: 1833339 - RNA, 19 nt, Homo sapiens
  misc_RNA (1)...(19): siRNA sense strand
caaugacgcaggauucuau

SEQ ID NO: 1833340 - RNA, 19 nt, Homo sapiens
  misc_RNA (1)...(19): siRNA sense strand
cuacucagcgccacaaaga

SEQ ID NO: 1833341 - RNA, 19 nt, Homo sapiens
  misc_RNA (1)...(19): siRNA sense strand
ccacaaagaaugacauagg

SEQ ID NO: 1833342 - RNA, 19 nt, Homo sapiens
  misc_RNA (1)...(19): siRNA sense strand
caucaugauuggaguacug

SEQ ID NO: 1833343 - RNA, 19 nt, Homo sapiens
  misc_RNA (1)...(19): siRNA sense strand
gaauguccgcuaugaguca

SEQ ID NO: 1833344 - RNA, 19 nt, Homo sapiens
  misc_RNA (1)...(19): siRNA sense strand
ugggauggcucugauauag

SEQ ID NO: 1833345 - RNA, 19 nt, Homo sapiens
  misc_RNA (1)...(19): siRNA sense strand
ccacaaugacgcaggauuc

SEQ ID NO: 1833346 - RNA, 19 nt, Homo sapiens
  misc_RNA (1)...(19): siRNA sense strand
gcucacagccucgcuuuua

SEQ ID NO: 1833347 - RNA, 19 nt, Homo sapiens
  misc_RNA (1)...(19): siRNA sense strand
gcccagaccaauauugaug

SEQ ID NO: 1833348 - RNA, 19 nt, Homo sapiens
  misc_RNA (1)...(19): siRNA sense strand
ucuauacccuacacguuau

SEQ ID NO: 1833349 - RNA, 19 nt, Homo sapiens
  misc_RNA (1)...(19): siRNA sense strand
ggcuacaacugguacaaag

SEQ ID NO: 1833350 - RNA, 19 nt, Homo sapiens
  misc_RNA (1)...(19): siRNA sense strand
gccguucaaugucgcagaa

SEQ ID NO: 1833351 - RNA, 19 nt, Homo sapiens
  misc_RNA (1)...(19): siRNA sense strand
gcaugccaacuaucgaauu

SEQ ID NO: 1833352 - RNA, 19 nt, Homo sapiens
  misc_RNA (1)...(19): siRNA sense strand
aaagggugcaugccaacua

SEQ ID NO: 1833353 - RNA, 19 nt, Homo sapiens
  misc_RNA (1)...(19): siRNA sense strand
agacucagaacacaaccua

SEQ ID NO: 1833354 - RNA, 19 nt, Homo sapiens
  misc_RNA (1)...(19): siRNA sense strand
aaccagacaauucuacgua

SEQ ID NO: 1833355 - RNA, 19 nt, Homo sapiens
  misc_RNA (1)...(19): siRNA sense strand
ugugguggguaaacaauca

SEQ ID NO: 1833356 - RNA, 19 nt, Homo sapiens
  misc_RNA (1)...(19): siRNA sense strand
guggagaacaaagauauug

SEQ ID NO: 1833357 - RNA, 19 nt, Homo sapiens
  misc_RNA (1)...(19): siRNA sense strand
cagacaauucuacguauuc

SEQ ID NO: 1833358 - RNA, 19 nt, Homo sapiens
  misc_RNA (1)...(19): siRNA sense strand
gugcccagaccaauauuga

SEQ ID NO: 1833359 - RNA, 19 nt, Homo sapiens
  misc_RNA (1)...(19): siRNA sense strand
cuaugaaugugaaauacag

SEQ ID NO: 1833360 - RNA, 19 nt, Homo sapiens
  misc_RNA (1)...(19): siRNA sense strand
gaaucuuuauggcuacaac

SEQ ID NO: 1833361 - RNA, 19 nt, Homo sapiens
  misc_RNA (1)...(19): siRNA sense strand
gcugggauggcucugauau

SEQ ID NO: 1833362 - RNA, 19 nt, Homo sapiens
  misc_RNA (1)...(19): siRNA sense strand
ccauacagagugugcauuc

SEQ ID NO: 1833363 - RNA, 19 nt, Homo sapiens
  misc_RNA (1)...(19): siRNA sense strand
aagggugcaugccaacuau

SEQ ID NO: 1833364 - RNA, 19 nt, Homo sapiens
  misc_RNA (1)...(19): siRNA sense strand
caacggucgagagacaaua

SEQ ID NO: 1833365 - RNA, 19 nt, Homo sapiens
  misc_RNA (1)...(19): siRNA sense strand
acagugcccagaccaauau

SEQ ID NO: 1833366 - RNA, 19 nt, Homo sapiens
  misc_RNA (1)...(19): siRNA sense strand
gguggagaacaaagauauu

SEQ ID NO: 1833367 - RNA, 19 nt, Homo sapiens
  misc_RNA (1)...(19): siRNA sense strand
caaacagugcccagaccaa

SEQ ID NO: 1833368 - RNA, 19 nt, Homo sapiens
  misc_RNA (1)...(19): siRNA sense strand
uucuauacccuacacguua

SEQ ID NO: 1833369 - RNA, 19 nt, Homo sapiens
  misc_RNA (1)...(19): siRNA sense strand
aaguucaccugaccucuca

SEQ ID NO: 1833370 - RNA, 19 nt, Homo sapiens
  misc_RNA (1)...(19): siRNA sense strand
ccagaccaauauugauguc

SEQ ID NO: 1833371 - RNA, 19 nt, Homo sapiens
  misc_RNA (1)...(19): siRNA sense strand
ucuggaaccugccaaacag

SEQ ID NO: 1833372 - RNA, 19 nt, Homo sapiens
  misc_RNA (1)...(19): siRNA sense strand
cugcugcucuccacugaca

SEQ ID NO: 1833373 - RNA, 19 nt, Homo sapiens
  misc_RNA (1)...(19): siRNA sense strand
caauggaacccugcugauc

SEQ ID NO: 1833374 - RNA, 19 nt, Homo sapiens
  misc_RNA (1)...(19): siRNA sense strand
gagacaauauaccccaaug

SEQ ID NO: 1833375 - RNA, 19 nt, Homo sapiens
  misc_RNA (1)...(19): siRNA sense strand
gugcaugccaacuaucgaa

SEQ ID NO: 1833376 - RNA, 19 nt, Homo sapiens
  misc_RNA (1)...(19): siRNA sense strand
aaacagugcccagaccaau

SEQ ID NO: 1833377 - RNA, 19 nt, Homo sapiens
  misc_RNA (1)...(19): siRNA sense strand
auaaugagucccagaaucu

SEQ ID NO: 1833378 - RNA, 19 nt, Homo sapiens
  misc_RNA (1)...(19): siRNA sense strand
aaugagucccagaaucuuu

SEQ ID NO: 1833379 - RNA, 19 nt, Homo sapiens
  misc_RNA (1)...(19): siRNA sense strand
cagcaucaugauuggagua

SEQ ID NO: 1833380 - RNA, 19 nt, Homo sapiens
  misc_RNA (1)...(19): siRNA sense strand
ggcugcugcucuccacuga

SEQ ID NO: 1833381 - RNA, 19 nt, Homo sapiens
  misc_RNA (1)...(19): siRNA sense strand
agacaauucuacguauucu

SEQ ID NO: 1833382 - RNA, 19 nt, Homo sapiens
  misc_RNA (1)...(19): siRNA sense strand
aacagugcccagaccaaua

SEQ ID NO: 1833383 - RNA, 19 nt, Homo sapiens
  misc_RNA (1)...(19): siRNA sense strand
gaugucgugccguucaaug

SEQ ID NO: 1833384 - RNA, 19 nt, Homo sapiens
  misc_RNA (1)...(19): siRNA sense strand
ugaagaaguaaccagacaa

SEQ ID NO: 1833385 - RNA, 19 nt, Homo sapiens
  misc_RNA (1)...(19): siRNA sense strand
augagucccagaaucuuua

SEQ ID NO: 1833386 - RNA, 19 nt, Homo sapiens
  misc_RNA (1)...(19): siRNA sense strand
cacccugaauguccgcuau

SEQ ID NO: 1833387 - RNA, 19 nt, Homo sapiens
  misc_RNA (1)...(19): siRNA sense strand
acucagcgccacaaagaau

SEQ ID NO: 1833388 - RNA, 19 nt, Homo sapiens
  misc_RNA (1)...(19): siRNA sense strand
augaagaaguaaccagaca

SEQ ID NO: 1833389 - RNA, 19 nt, Homo sapiens
  misc_RNA (1)...(19): siRNA sense strand
gaaaaucuugugaaugaag

SEQ ID NO: 1833390 - RNA, 19 nt, Homo sapiens
  misc_RNA (1)...(19): siRNA sense strand
gcacucagcugcucuacaa

SEQ ID NO: 1833391 - RNA, 19 nt, Homo sapiens
  misc_RNA (1)...(19): siRNA sense strand
gaggaggcguuuaagaaua

SEQ ID NO: 1833392 - RNA, 19 nt, Homo sapiens
  misc_RNA (1)...(19): siRNA sense strand
gaauggagguuaaagugaa

SEQ ID NO: 1833393 - RNA, 19 nt, Homo sapiens
  misc_RNA (1)...(19): siRNA sense strand
gcagggaaauguugauaau

SEQ ID NO: 1833394 - RNA, 19 nt, Homo sapiens
  misc_RNA (1)...(19): siRNA sense strand
gaaaagccuugcauuauug

SEQ ID NO: 1833395 - RNA, 19 nt, Homo sapiens
  misc_RNA (1)...(19): siRNA sense strand
gcagaagacuccuggaaac

SEQ ID NO: 1833396 - RNA, 19 nt, Homo sapiens
  misc_RNA (1)...(19): siRNA sense strand
gaagcaacaugcagagaag

SEQ ID NO: 1833397 - RNA, 19 nt, Homo sapiens
  misc_RNA (1)...(19): siRNA sense strand
agaauagaauggagguuaa

SEQ ID NO: 1833398 - RNA, 19 nt, Homo sapiens
  misc_RNA (1)...(19): siRNA sense strand
ggagcaauguuggccuaua

SEQ ID NO: 1833399 - RNA, 19 nt, Homo sapiens
  misc_RNA (1)...(19): siRNA sense strand
ggaauaugcgguuaaugaa

SEQ ID NO: 1833400 - RNA, 19 nt, Homo sapiens
  misc_RNA (1)...(19): siRNA sense strand
ucaacucccugccaagaaa

SEQ ID NO: 1833401 - RNA, 19 nt, Homo sapiens
  misc_RNA (1)...(19): siRNA sense strand
gcuccaaugucccagguuu

SEQ ID NO: 1833402 - RNA, 19 nt, Homo sapiens
  misc_RNA (1)...(19): siRNA sense strand
acagcaaucugcagaagaa

SEQ ID NO: 1833403 - RNA, 19 nt, Homo sapiens
  misc_RNA (1)...(19): siRNA sense strand
cagcugcucuacaaauuug

SEQ ID NO: 1833404 - RNA, 19 nt, Homo sapiens
  misc_RNA (1)...(19): siRNA sense strand
gcaagaaaucgcagggaaa

SEQ ID NO: 1833405 - RNA, 19 nt, Homo sapiens
  misc_RNA (1)...(19): siRNA sense strand
gaaguuguggcaggaauaa

SEQ ID NO: 1833406 - RNA, 19 nt, Homo sapiens
  misc_RNA (1)...(19): siRNA sense strand
gagcaauguuggccuauac

SEQ ID NO: 1833407 - RNA, 19 nt, Homo sapiens
  misc_RNA (1)...(19): siRNA sense strand
ggacagcaaucugcagaag

SEQ ID NO: 1833408 - RNA, 19 nt, Homo sapiens
  misc_RNA (1)...(19): siRNA sense strand
ccagaaagaacaagcagaa

SEQ ID NO: 1833409 - RNA, 19 nt, Homo sapiens
  misc_RNA (1)...(19): siRNA sense strand
caccacaccuacugagauu

SEQ ID NO: 1833410 - RNA, 19 nt, Homo sapiens
  misc_RNA (1)...(19): siRNA sense strand
aaagugaggaggcguuuaa

SEQ ID NO: 1833411 - RNA, 19 nt, Homo sapiens
  misc_RNA (1)...(19): siRNA sense strand
gaauucugcaucucucuuu

SEQ ID NO: 1833412 - RNA, 19 nt, Homo sapiens
  misc_RNA (1)...(19): siRNA sense strand
gugaggaggcguuuaagaa

SEQ ID NO: 1833413 - RNA, 19 nt, Homo sapiens
  misc_RNA (1)...(19): siRNA sense strand
uaaggaauaugcgguuaau

SEQ ID NO: 1833414 - RNA, 19 nt, Homo sapiens
  misc_RNA (1)...(19): siRNA sense strand
gcagagaaguaaaaugaga

SEQ ID NO: 1833415 - RNA, 19 nt, Homo sapiens
  misc_RNA (1)...(19): siRNA sense strand
gcaaagaauucugcaucuc

SEQ ID NO: 1833416 - RNA, 19 nt, Homo sapiens
  misc_RNA (1)...(19): siRNA sense strand
gaaagaacaagcagaagac

SEQ ID NO: 1833417 - RNA, 19 nt, Homo sapiens
  misc_RNA (1)...(19): siRNA sense strand
gggaaauguugauaauaag

SEQ ID NO: 1833418 - RNA, 19 nt, Homo sapiens
  misc_RNA (1)...(19): siRNA sense strand
aaauguagaugcaauucug

SEQ ID NO: 1833419 - RNA, 19 nt, Homo sapiens
  misc_RNA (1)...(19): siRNA sense strand
agaagcagcuguuucaacu

SEQ ID NO: 1833420 - RNA, 19 nt, Homo sapiens
  misc_RNA (1)...(19): siRNA sense strand
agaaaagccuugcauuauu

SEQ ID NO: 1833421 - RNA, 19 nt, Homo sapiens
  misc_RNA (1)...(19): siRNA sense strand
gaaagugaggaggcguuua

SEQ ID NO: 1833422 - RNA, 19 nt, Homo sapiens
  misc_RNA (1)...(19): siRNA sense strand
aagaauagaauggagguua

SEQ ID NO: 1833423 - RNA, 19 nt, Homo sapiens
  misc_RNA (1)...(19): siRNA sense strand
gaauagaauggagguuaaa

SEQ ID NO: 1833424 - RNA, 19 nt, Homo sapiens
  misc_RNA (1)...(19): siRNA sense strand
gagaaaagccuugcauuau

SEQ ID NO: 1833425 - RNA, 19 nt, Homo sapiens
  misc_RNA (1)...(19): siRNA sense strand
aggaauaugcgguuaauga

SEQ ID NO: 1833426 - RNA, 19 nt, Homo sapiens
  misc_RNA (1)...(19): siRNA sense strand
aauaaggaauaugcgguua

SEQ ID NO: 1833427 - RNA, 19 nt, Homo sapiens
  misc_RNA (1)...(19): siRNA sense strand
gcaacaugcagagaaguaa

SEQ ID NO: 1833428 - RNA, 19 nt, Homo sapiens
  misc_RNA (1)...(19): siRNA sense strand
gaaaucgcagggaaauguu

SEQ ID NO: 1833429 - RNA, 19 nt, Homo sapiens
  misc_RNA (1)...(19): siRNA sense strand
caagaaaucgcagggaaau

SEQ ID NO: 1833430 - RNA, 19 nt, Homo sapiens
  misc_RNA (1)...(19): siRNA sense strand
gagguuaaagugaagauuc

SEQ ID NO: 1833431 - RNA, 19 nt, Homo sapiens
  misc_RNA (1)...(19): siRNA sense strand
ggcaaagaauucugcaucu

SEQ ID NO: 1833432 - RNA, 19 nt, Homo sapiens
  misc_RNA (1)...(19): siRNA sense strand
agaaagaacaagcagaaga

SEQ ID NO: 1833433 - RNA, 19 nt, Homo sapiens
  misc_RNA (1)...(19): siRNA sense strand
aauaugcgguuaaugaagu

SEQ ID NO: 1833434 - RNA, 19 nt, Homo sapiens
  misc_RNA (1)...(19): siRNA sense strand
caacaugcagagaaguaaa

SEQ ID NO: 1833435 - RNA, 19 nt, Homo sapiens
  misc_RNA (1)...(19): siRNA sense strand
aagugaagauuccugaaga

SEQ ID NO: 1833436 - RNA, 19 nt, Homo sapiens
  misc_RNA (1)...(19): siRNA sense strand
ggcagaagcagcuguuuca

SEQ ID NO: 1833437 - RNA, 19 nt, Homo sapiens
  misc_RNA (1)...(19): siRNA sense strand
caaagaauucugcaucucu

SEQ ID NO: 1833438 - RNA, 19 nt, Homo sapiens
  misc_RNA (1)...(19): siRNA sense strand
cuauuugcaugauuuccua

SEQ ID NO: 1833439 - RNA, 19 nt, Homo sapiens
  misc_RNA (1)...(19): siRNA sense strand
ugagaaaagccuugcauua

SEQ ID NO: 1833440 - RNA, 19 nt, Homo sapiens
  misc_RNA (1)...(19): siRNA sense strand
ccacaccuacugagauuau

SEQ ID NO: 1833441 - RNA, 19 nt, Homo sapiens
  misc_RNA (1)...(19): siRNA sense strand
gcaccacaccuacugagau

SEQ ID NO: 1833442 - RNA, 19 nt, Homo sapiens
  misc_RNA (1)...(19): siRNA sense strand
gaauaugcgguuaaugaag

SEQ ID NO: 1833443 - RNA, 19 nt, Homo sapiens
  misc_RNA (1)...(19): siRNA sense strand
cauuauuguugggcuauuu

SEQ ID NO: 1833444 - RNA, 19 nt, Homo sapiens
  misc_RNA (1)...(19): siRNA sense strand
ugaggaagaccagaaagaa

SEQ ID NO: 1833445 - RNA, 19 nt, Homo sapiens
  misc_RNA (1)...(19): siRNA sense strand
ggaagaccagaaagaacaa

SEQ ID NO: 1833446 - RNA, 19 nt, Homo sapiens
  misc_RNA (1)...(19): siRNA sense strand
gaaccagcucucccaggaa

SEQ ID NO: 1833447 - RNA, 19 nt, Homo sapiens
  misc_RNA (1)...(19): siRNA sense strand
uagaauggagguuaaagug

SEQ ID NO: 1833448 - RNA, 19 nt, Homo sapiens
  misc_RNA (1)...(19): siRNA sense strand
ccucuuggcucacccugau

SEQ ID NO: 1833449 - RNA, 19 nt, Homo sapiens
  misc_RNA (1)...(19): siRNA sense strand
agaaaucgcagggaaaugu

SEQ ID NO: 1833450 - RNA, 19 nt, Homo sapiens
  misc_RNA (1)...(19): siRNA sense strand
augcaauucuggaggagua

SEQ ID NO: 1833451 - RNA, 19 nt, Homo sapiens
  misc_RNA (1)...(19): siRNA sense strand
gaggacugggacuuaguua

SEQ ID NO: 1833452 - RNA, 19 nt, Homo sapiens
  misc_RNA (1)...(19): siRNA sense strand
ugaggaggcguuuaagaau

SEQ ID NO: 1833453 - RNA, 19 nt, Homo sapiens
  misc_RNA (1)...(19): siRNA sense strand
ugggcuauuugcaugauuu

SEQ ID NO: 1833454 - RNA, 19 nt, Homo sapiens
  misc_RNA (1)...(19): siRNA sense strand
ggaaauguugauaauaagg

SEQ ID NO: 1833455 - RNA, 19 nt, Homo sapiens
  misc_RNA (1)...(19): siRNA sense strand
gcauuauuguugggcuauu

SEQ ID NO: 1833456 - RNA, 19 nt, Homo sapiens
  misc_RNA (1)...(19): siRNA sense strand
aggaggcguuuaagaauag

SEQ ID NO: 1833457 - RNA, 19 nt, Homo sapiens
  misc_RNA (1)...(19): siRNA sense strand
aauucugcaucucucuuua

SEQ ID NO: 1833458 - RNA, 19 nt, Homo sapiens
  misc_RNA (1)...(19): siRNA sense strand
gcaaucugcagaagaagag

SEQ ID NO: 1833459 - RNA, 19 nt, Homo sapiens
  misc_RNA (1)...(19): siRNA sense strand
gugaggaagaccagaaaga

SEQ ID NO: 1833460 - RNA, 19 nt, Homo sapiens
  misc_RNA (1)...(19): siRNA sense strand
agaauggagguuaaaguga

SEQ ID NO: 1833461 - RNA, 19 nt, Homo sapiens
  misc_RNA (1)...(19): siRNA sense strand
cucagcugcucuacaaauu

SEQ ID NO: 1833462 - RNA, 19 nt, Homo sapiens
  misc_RNA (1)...(19): siRNA sense strand
ugaaguuguggcaggaaua

SEQ ID NO: 1833463 - RNA, 19 nt, Homo sapiens
  misc_RNA (1)...(19): siRNA sense strand
agaagcaacaugcagagaa

SEQ ID NO: 1833464 - RNA, 19 nt, Homo sapiens
  misc_RNA (1)...(19): siRNA sense strand
cagggaaauguugauaaua

SEQ ID NO: 1833465 - RNA, 19 nt, Homo sapiens
  misc_RNA (1)...(19): siRNA sense strand
agugaagauuccugaagaa

SEQ ID NO: 1833466 - RNA, 19 nt, Homo sapiens
  misc_RNA (1)...(19): siRNA sense strand
ugccagugauuacaaagug

SEQ ID NO: 1833467 - RNA, 19 nt, Homo sapiens
  misc_RNA (1)...(19): siRNA sense strand
uggaggaguaugcaaauug

SEQ ID NO: 1833468 - RNA, 19 nt, Homo sapiens
  misc_RNA (1)...(19): siRNA sense strand
uuaaaaccauggcuuguug

SEQ ID NO: 1833469 - RNA, 19 nt, Homo sapiens
  misc_RNA (1)...(19): siRNA sense strand
ucagcugcucuacaaauuu

SEQ ID NO: 1833470 - RNA, 19 nt, Homo sapiens
  misc_RNA (1)...(19): siRNA sense strand
guugaggacugggacuuag

SEQ ID NO: 1833471 - RNA, 19 nt, Homo sapiens
  misc_RNA (1)...(19): siRNA sense strand
gaggaagaccagaaagaac

SEQ ID NO: 1833472 - RNA, 19 nt, Homo sapiens
  misc_RNA (1)...(19): siRNA sense strand
ggagcaccacaccuacuga

SEQ ID NO: 1833473 - RNA, 19 nt, Homo sapiens
  misc_RNA (1)...(19): siRNA sense strand
uuauggagcaccacaccua

SEQ ID NO: 1833474 - RNA, 19 nt, Homo sapiens
  misc_RNA (1)...(19): siRNA sense strand
caaugucccagguuuaugg

SEQ ID NO: 1833475 - RNA, 19 nt, Homo sapiens
  misc_RNA (1)...(19): siRNA sense strand
ggacugggacuuaguuacc

SEQ ID NO: 1833476 - RNA, 19 nt, Homo sapiens
  misc_RNA (1)...(19): siRNA sense strand
caacuagaagcaacaugca

SEQ ID NO: 1833477 - RNA, 19 nt, Homo sapiens
  misc_RNA (1)...(19): siRNA sense strand
gggcagaccccacuguuga

SEQ ID NO: 1833478 - RNA, 19 nt, Homo sapiens
  misc_RNA (1)...(19): siRNA sense strand
acaccuacugagauuauuu

SEQ ID NO: 1833479 - RNA, 19 nt, Homo sapiens
  misc_RNA (1)...(19): siRNA sense strand
uggcaggaauaaaagaaua

SEQ ID NO: 1833480 - RNA, 19 nt, Homo sapiens
  misc_RNA (1)...(19): siRNA sense strand
aagcagaagacuccuggaa

SEQ ID NO: 1833481 - RNA, 19 nt, Homo sapiens
  misc_RNA (1)...(19): siRNA sense strand
gacagcaaucugcagaaga

SEQ ID NO: 1833482 - RNA, 19 nt, Homo sapiens
  misc_RNA (1)...(19): siRNA sense strand
uaaagugaagauuccugaa

SEQ ID NO: 1833483 - RNA, 19 nt, Homo sapiens
  misc_RNA (1)...(19): siRNA sense strand
ucacccugaugcuccaaug

SEQ ID NO: 1833484 - RNA, 19 nt, Homo sapiens
  misc_RNA (1)...(19): siRNA sense strand
gcagaagcagcuguuucaa

SEQ ID NO: 1833485 - RNA, 19 nt, Homo sapiens
  misc_RNA (1)...(19): siRNA sense strand
ggaggcguuuaagaauaga

SEQ ID NO: 1833486 - RNA, 19 nt, Homo sapiens
  misc_RNA (1)...(19): siRNA sense strand
aaagugaagauuccugaag

SEQ ID NO: 1833487 - RNA, 19 nt, Homo sapiens
  misc_RNA (1)...(19): siRNA sense strand
aggaagaccagaaagaaca

SEQ ID NO: 1833488 - RNA, 19 nt, Homo sapiens
  misc_RNA (1)...(19): siRNA sense strand
ggagguuaaagugaagauu

SEQ ID NO: 1833489 - RNA, 19 nt, Homo sapiens
  misc_RNA (1)...(19): siRNA sense strand
auaaggaauaugcgguuaa

SEQ ID NO: 1833490 - RNA, 19 nt, Homo sapiens
  misc_RNA (1)...(19): siRNA sense strand
gcagaugucucaaguauua

SEQ ID NO: 1833491 - RNA, 19 nt, Homo sapiens
  misc_RNA (1)...(19): siRNA sense strand
gaacaucgcuaccuaugaa

SEQ ID NO: 1833492 - RNA, 19 nt, Homo sapiens
  misc_RNA (1)...(19): siRNA sense strand
guucaaugcuccaguaaua

SEQ ID NO: 1833493 - RNA, 19 nt, Homo sapiens
  misc_RNA (1)...(19): siRNA sense strand
gaaaguaguagaugugaua

SEQ ID NO: 1833494 - RNA, 19 nt, Homo sapiens
  misc_RNA (1)...(19): siRNA sense strand
gagcagaugucucaaguau

SEQ ID NO: 1833495 - RNA, 19 nt, Homo sapiens
  misc_RNA (1)...(19): siRNA sense strand
gcaaagacauccugcuguu

SEQ ID NO: 1833496 - RNA, 19 nt, Homo sapiens
  misc_RNA (1)...(19): siRNA sense strand
ggaagagaauggugcagua

SEQ ID NO: 1833497 - RNA, 19 nt, Homo sapiens
  misc_RNA (1)...(19): siRNA sense strand
gaagauguguugguaacua

SEQ ID NO: 1833498 - RNA, 19 nt, Homo sapiens
  misc_RNA (1)...(19): siRNA sense strand
gaacuggccuuaauguaca

SEQ ID NO: 1833499 - RNA, 19 nt, Homo sapiens
  misc_RNA (1)...(19): siRNA sense strand
gauagaggcacauuugaua

SEQ ID NO: 1833500 - RNA, 19 nt, Homo sapiens
  misc_RNA (1)...(19): siRNA sense strand
gaaaugugaugguguugga

SEQ ID NO: 1833501 - RNA, 19 nt, Homo sapiens
  misc_RNA (1)...(19): siRNA sense strand
gaugcagaguccaggauua

SEQ ID NO: 1833502 - RNA, 19 nt, Homo sapiens
  misc_RNA (1)...(19): siRNA sense strand
gagauucggcugauucuuu

SEQ ID NO: 1833503 - RNA, 19 nt, Homo sapiens
  misc_RNA (1)...(19): siRNA sense strand
aaagacauccugcuguuua

SEQ ID NO: 1833504 - RNA, 19 nt, Homo sapiens
  misc_RNA (1)...(19): siRNA sense strand
gaggcacauuugauauuua

SEQ ID NO: 1833505 - RNA, 19 nt, Homo sapiens
  misc_RNA (1)...(19): siRNA sense strand
aguauuagaugccauguuu

SEQ ID NO: 1833506 - RNA, 19 nt, Homo sapiens
  misc_RNA (1)...(19): siRNA sense strand
guaauaaaccgauucacaa

SEQ ID NO: 1833507 - RNA, 19 nt, Homo sapiens
  misc_RNA (1)...(19): siRNA sense strand
ugacgauggugacaacuuu

SEQ ID NO: 1833508 - RNA, 19 nt, Homo sapiens
  misc_RNA (1)...(19): siRNA sense strand
ggaccuugcauggaaauua

SEQ ID NO: 1833509 - RNA, 19 nt, Homo sapiens
  misc_RNA (1)...(19): siRNA sense strand
aaaggaacaucgcuaccua

SEQ ID NO: 1833510 - RNA, 19 nt, Homo sapiens
  misc_RNA (1)...(19): siRNA sense strand
gaccuugcauggaaauuau

SEQ ID NO: 1833511 - RNA, 19 nt, Homo sapiens
  misc_RNA (1)...(19): siRNA sense strand
gcaccaaaguauacaacga

SEQ ID NO: 1833512 - RNA, 19 nt, Homo sapiens
  misc_RNA (1)...(19): siRNA sense strand
ugucaaauguuuagcaaug

SEQ ID NO: 1833513 - RNA, 19 nt, Homo sapiens
  misc_RNA (1)...(19): siRNA sense strand
aaucagaaguggaagagaa

SEQ ID NO: 1833514 - RNA, 19 nt, Homo sapiens
  misc_RNA (1)...(19): siRNA sense strand
ggugacaacuuuuauguaa

SEQ ID NO: 1833515 - RNA, 19 nt, Homo sapiens
  misc_RNA (1)...(19): siRNA sense strand
ccuuaaaucuuuggaguuu

SEQ ID NO: 1833516 - RNA, 19 nt, Homo sapiens
  misc_RNA (1)...(19): siRNA sense strand
ucacugccauuccuuaaau

SEQ ID NO: 1833517 - RNA, 19 nt, Homo sapiens
  misc_RNA (1)...(19): siRNA sense strand
auacaacgauggagaacaa

SEQ ID NO: 1833518 - RNA, 19 nt, Homo sapiens
  misc_RNA (1)...(19): siRNA sense strand
uguagaaucuggagaagug

SEQ ID NO: 1833519 - RNA, 19 nt, Homo sapiens
  misc_RNA (1)...(19): siRNA sense strand
gaaaagaaaggguaaauca

SEQ ID NO: 1833520 - RNA, 19 nt, Homo sapiens
  misc_RNA (1)...(19): siRNA sense strand
guuggaagauguguuggua

SEQ ID NO: 1833521 - RNA, 19 nt, Homo sapiens
  misc_RNA (1)...(19): siRNA sense strand
aaagaaaggguaaaucaga

SEQ ID NO: 1833522 - RNA, 19 nt, Homo sapiens
  misc_RNA (1)...(19): siRNA sense strand
gcauguaauugaucaaggu

SEQ ID NO: 1833523 - RNA, 19 nt, Homo sapiens
  misc_RNA (1)...(19): siRNA sense strand
gaauggugcaguagaaaug

SEQ ID NO: 1833524 - RNA, 19 nt, Homo sapiens
  misc_RNA (1)...(19): siRNA sense strand
agagaauggugcaguagaa

SEQ ID NO: 1833525 - RNA, 19 nt, Homo sapiens
  misc_RNA (1)...(19): siRNA sense strand
aagaaaggguaaaucagaa

SEQ ID NO: 1833526 - RNA, 19 nt, Homo sapiens
  misc_RNA (1)...(19): siRNA sense strand
ugccauuccuuaaaucuuu

SEQ ID NO: 1833527 - RNA, 19 nt, Homo sapiens
  misc_RNA (1)...(19): siRNA sense strand
agaggcacauuugauauuu

SEQ ID NO: 1833528 - RNA, 19 nt, Homo sapiens
  misc_RNA (1)...(19): siRNA sense strand
ucaaagaaauagguugcaa

SEQ ID NO: 1833529 - RNA, 19 nt, Homo sapiens
  misc_RNA (1)...(19): siRNA sense strand
gagcuugcccugguaacua

SEQ ID NO: 1833530 - RNA, 19 nt, Homo sapiens
  misc_RNA (1)...(19): siRNA sense strand
ugaaagcuuuauugaguca

SEQ ID NO: 1833531 - RNA, 19 nt, Homo sapiens
  misc_RNA (1)...(19): siRNA sense strand
ucaaugcuccaguaauaaa

SEQ ID NO: 1833532 - RNA, 19 nt, Homo sapiens
  misc_RNA (1)...(19): siRNA sense strand
gggagcauguaauugauca

SEQ ID NO: 1833533 - RNA, 19 nt, Homo sapiens
  misc_RNA (1)...(19): siRNA sense strand
caaaguauacaacgaugga

SEQ ID NO: 1833534 - RNA, 19 nt, Homo sapiens
  misc_RNA (1)...(19): siRNA sense strand
aaagaaauagguugcaaga

SEQ ID NO: 1833535 - RNA, 19 nt, Homo sapiens
  misc_RNA (1)...(19): siRNA sense strand
ggaacaucgcuaccuauga

SEQ ID NO: 1833536 - RNA, 19 nt, Homo sapiens
  misc_RNA (1)...(19): siRNA sense strand
ggcguucaaugcuccagua

SEQ ID NO: 1833537 - RNA, 19 nt, Homo sapiens
  misc_RNA (1)...(19): siRNA sense strand
gauaggcaccaaaguauac

SEQ ID NO: 1833538 - RNA, 19 nt, Homo sapiens
  misc_RNA (1)...(19): siRNA sense strand
ucugggaccuugcauggaa

SEQ ID NO: 1833539 - RNA, 19 nt, Homo sapiens
  misc_RNA (1)...(19): siRNA sense strand
aagacauccugcuguuuaa

SEQ ID NO: 1833540 - RNA, 19 nt, Homo sapiens
  misc_RNA (1)...(19): siRNA sense strand
ucaaauguuuagcaaugga

SEQ ID NO: 1833541 - RNA, 19 nt, Homo sapiens
  misc_RNA (1)...(19): siRNA sense strand
cgauggagaacaaaucauu

SEQ ID NO: 1833542 - RNA, 19 nt, Homo sapiens
  misc_RNA (1)...(19): siRNA sense strand
ugugauaggcaccaaagua

SEQ ID NO: 1833543 - RNA, 19 nt, Homo sapiens
  misc_RNA (1)...(19): siRNA sense strand
ugugaaaugugaugguguu

SEQ ID NO: 1833544 - RNA, 19 nt, Homo sapiens
  misc_RNA (1)...(19): siRNA sense strand
ggguaaaucagaaguggaa

SEQ ID NO: 1833545 - RNA, 19 nt, Homo sapiens
  misc_RNA (1)...(19): siRNA sense strand
gugauaggcaccaaaguau

SEQ ID NO: 1833546 - RNA, 19 nt, Homo sapiens
  misc_RNA (1)...(19): siRNA sense strand
cuuauaauccugaugaaga

SEQ ID NO: 1833547 - RNA, 19 nt, Homo sapiens
  misc_RNA (1)...(19): siRNA sense strand
gaugugcaagcauuugaaa

SEQ ID NO: 1833548 - RNA, 19 nt, Homo sapiens
  misc_RNA (1)...(19): siRNA sense strand
aggguaaccuucaggagaa

SEQ ID NO: 1833549 - RNA, 19 nt, Homo sapiens
  misc_RNA (1)...(19): siRNA sense strand
gcgaacuggccuuaaugua

SEQ ID NO: 1833550 - RNA, 19 nt, Homo sapiens
  misc_RNA (1)...(19): siRNA sense strand
guugguaacuaugauaauc

SEQ ID NO: 1833551 - RNA, 19 nt, Homo sapiens
  misc_RNA (1)...(19): siRNA sense strand
caaagacauccugcuguuu

SEQ ID NO: 1833552 - RNA, 19 nt, Homo sapiens
  misc_RNA (1)...(19): siRNA sense strand
gcauggaaauuaugaaaag

SEQ ID NO: 1833553 - RNA, 19 nt, Homo sapiens
  misc_RNA (1)...(19): siRNA sense strand
gagaauggugcaguagaaa

SEQ ID NO: 1833554 - RNA, 19 nt, Homo sapiens
  misc_RNA (1)...(19): siRNA sense strand
gcagaguccaggauuauac

SEQ ID NO: 1833555 - RNA, 19 nt, Homo sapiens
  misc_RNA (1)...(19): siRNA sense strand
uuagaugccauguuugaaa

SEQ ID NO: 1833556 - RNA, 19 nt, Homo sapiens
  misc_RNA (1)...(19): siRNA sense strand
ggagagcuugcccugguaa

SEQ ID NO: 1833557 - RNA, 19 nt, Homo sapiens
  misc_RNA (1)...(19): siRNA sense strand
guaaaucagaaguggaaga

SEQ ID NO: 1833558 - RNA, 19 nt, Homo sapiens
  misc_RNA (1)...(19): siRNA sense strand
gaaaggguaaaucagaagu

SEQ ID NO: 1833559 - RNA, 19 nt, Homo sapiens
  misc_RNA (1)...(19): siRNA sense strand
gauggagaacaaaucauug

SEQ ID NO: 1833560 - RNA, 19 nt, Homo sapiens
  misc_RNA (1)...(19): siRNA sense strand
guaaccuucaggagaauaa

SEQ ID NO: 1833561 - RNA, 19 nt, Homo sapiens
  misc_RNA (1)...(19): siRNA sense strand
cagagcagcuacaaucacu

SEQ ID NO: 1833562 - RNA, 19 nt, Homo sapiens
  misc_RNA (1)...(19): siRNA sense strand
cgaacuggccuuaauguac

SEQ ID NO: 1833563 - RNA, 19 nt, Homo sapiens
  misc_RNA (1)...(19): siRNA sense strand
uauuagaugccauguuuga

SEQ ID NO: 1833564 - RNA, 19 nt, Homo sapiens
  misc_RNA (1)...(19): siRNA sense strand
gaagagaauggugcaguag

SEQ ID NO: 1833565 - RNA, 19 nt, Homo sapiens
  misc_RNA (1)...(19): siRNA sense strand
ugauaggcaccaaaguaua

SEQ ID NO: 1833566 - RNA, 19 nt, Homo sapiens
  misc_RNA (1)...(19): siRNA sense strand
uagaggcacauuugauauu

SEQ ID NO: 1833567 - RNA, 19 nt, Homo sapiens
  misc_RNA (1)...(19): siRNA sense strand
caacgauggagaacaaauc

SEQ ID NO: 1833568 - RNA, 19 nt, Homo sapiens
  misc_RNA (1)...(19): siRNA sense strand
cggagcagaugucucaagu

SEQ ID NO: 1833569 - RNA, 19 nt, Homo sapiens
  misc_RNA (1)...(19): siRNA sense strand
ucaggagaauaauugugaa

SEQ ID NO: 1833570 - RNA, 19 nt, Homo sapiens
  misc_RNA (1)...(19): siRNA sense strand
gauguguugguaacuauga

SEQ ID NO: 1833571 - RNA, 19 nt, Homo sapiens
  misc_RNA (1)...(19): siRNA sense strand
ggagcagaugucucaagua

SEQ ID NO: 1833572 - RNA, 19 nt, Homo sapiens
  misc_RNA (1)...(19): siRNA sense strand
gguguuggaagauguguug

SEQ ID NO: 1833573 - RNA, 19 nt, Homo sapiens
  misc_RNA (1)...(19): siRNA sense strand
aagauguguugguaacuau

SEQ ID NO: 1833574 - RNA, 19 nt, Homo sapiens
  misc_RNA (1)...(19): siRNA sense strand
uaauccugaugaagaagaa

SEQ ID NO: 1833575 - RNA, 19 nt, Homo sapiens
  misc_RNA (1)...(19): siRNA sense strand
gaugaucaaagaaauaggu

SEQ ID NO: 1833576 - RNA, 19 nt, Homo sapiens
  misc_RNA (1)...(19): siRNA sense strand
gagucacugccauuccuua

SEQ ID NO: 1833577 - RNA, 19 nt, Homo sapiens
  misc_RNA (1)...(19): siRNA sense strand
aagcuuauaauccugauga

SEQ ID NO: 1833578 - RNA, 19 nt, Homo sapiens
  misc_RNA (1)...(19): siRNA sense strand
gacauccugcuguuuaaga

SEQ ID NO: 1833579 - RNA, 19 nt, Homo sapiens
  misc_RNA (1)...(19): siRNA sense strand
ugaagaagaagaugaugca

SEQ ID NO: 1833580 - RNA, 19 nt, Homo sapiens
  misc_RNA (1)...(19): siRNA sense strand
uaccuaugaagaacaguua

SEQ ID NO: 1833581 - RNA, 19 nt, Homo sapiens
  misc_RNA (1)...(19): siRNA sense strand
uugggacugucaaauguuu

SEQ ID NO: 1833582 - RNA, 19 nt, Homo sapiens
  misc_RNA (1)...(19): siRNA sense strand
gccauuccuuaaaucuuug

SEQ ID NO: 1833583 - RNA, 19 nt, Homo sapiens
  misc_RNA (1)...(19): siRNA sense strand
uaauaaaccgauucacaag

SEQ ID NO: 1833584 - RNA, 19 nt, Homo sapiens
  misc_RNA (1)...(19): siRNA sense strand
ucugaacgccugaaaguag

SEQ ID NO: 1833585 - RNA, 19 nt, Homo sapiens
  misc_RNA (1)...(19): siRNA sense strand
gugaugguguuggaagaug

SEQ ID NO: 1833586 - RNA, 19 nt, Homo sapiens
  misc_RNA (1)...(19): siRNA sense strand
ggaugugcaagcauuugaa

SEQ ID NO: 1833587 - RNA, 19 nt, Homo sapiens
  misc_RNA (1)...(19): siRNA sense strand
caguaugugcagaagcuua

SEQ ID NO: 1833588 - RNA, 19 nt, Homo sapiens
  misc_RNA (1)...(19): siRNA sense strand
aaucauugcucagggagau

SEQ ID NO: 1833589 - RNA, 19 nt, Homo sapiens
  misc_RNA (1)...(19): siRNA sense strand
uggaagauguguugguaac

SEQ ID NO: 1833590 - RNA, 19 nt, Homo sapiens
  misc_RNA (1)...(19): siRNA sense strand
gcaaaggacugaugaccaa

SEQ ID NO: 1833591 - RNA, 19 nt, Homo sapiens
  misc_RNA (1)...(19): siRNA sense strand
gaagaaggauguggugauu

SEQ ID NO: 1833592 - RNA, 19 nt, Homo sapiens
  misc_RNA (1)...(19): siRNA sense strand
ggauuguucuuucuucaua

SEQ ID NO: 1833593 - RNA, 19 nt, Homo sapiens
  misc_RNA (1)...(19): siRNA sense strand
gaaacaaccuuccaacaac

SEQ ID NO: 1833594 - RNA, 19 nt, Homo sapiens
  misc_RNA (1)...(19): siRNA sense strand
ggacuucaauuuccucaug

SEQ ID NO: 1833595 - RNA, 19 nt, Homo sapiens
  misc_RNA (1)...(19): siRNA sense strand
cagaagaacuguaugcaau

SEQ ID NO: 1833596 - RNA, 19 nt, Homo sapiens
  misc_RNA (1)...(19): siRNA sense strand
ggacugggaucgaacaaca

SEQ ID NO: 1833597 - RNA, 19 nt, Homo sapiens
  misc_RNA (1)...(19): siRNA sense strand
gaaggguucucguauguca

SEQ ID NO: 1833598 - RNA, 19 nt, Homo sapiens
  misc_RNA (1)...(19): siRNA sense strand
caagaggugccaugaauuu

SEQ ID NO: 1833599 - RNA, 19 nt, Homo sapiens
  misc_RNA (1)...(19): siRNA sense strand
gccaugaauuuguuacuuu

SEQ ID NO: 1833600 - RNA, 19 nt, Homo sapiens
  misc_RNA (1)...(19): siRNA sense strand
gaagaacuguaugcaauca

SEQ ID NO: 1833601 - RNA, 19 nt, Homo sapiens
  misc_RNA (1)...(19): siRNA sense strand
caaaguguguggcaaagga

SEQ ID NO: 1833602 - RNA, 19 nt, Homo sapiens
  misc_RNA (1)...(19): siRNA sense strand
ucacugcucuauggacuua

SEQ ID NO: 1833603 - RNA, 19 nt, Homo sapiens
  misc_RNA (1)...(19): siRNA sense strand
caaggaggcuguuucuauc

SEQ ID NO: 1833604 - RNA, 19 nt, Homo sapiens
  misc_RNA (1)...(19): siRNA sense strand
cacaagaggugccaugaau

SEQ ID NO: 1833605 - RNA, 19 nt, Homo sapiens
  misc_RNA (1)...(19): siRNA sense strand
ccaaggaggcuguuucuau

SEQ ID NO: 1833606 - RNA, 19 nt, Homo sapiens
  misc_RNA (1)...(19): siRNA sense strand
gaacaacaaggaaugacuu

SEQ ID NO: 1833607 - RNA, 19 nt, Homo sapiens
  misc_RNA (1)...(19): siRNA sense strand
gaauggaucacacugagaa

SEQ ID NO: 1833608 - RNA, 19 nt, Homo sapiens
  misc_RNA (1)...(19): siRNA sense strand
gcaaggaacacaugaugga

SEQ ID NO: 1833609 - RNA, 19 nt, Homo sapiens
  misc_RNA (1)...(19): siRNA sense strand
gaaauucgagaaagccaaa

SEQ ID NO: 1833610 - RNA, 19 nt, Homo sapiens
  misc_RNA (1)...(19): siRNA sense strand
gcacaacguuuccuaucca

SEQ ID NO: 1833611 - RNA, 19 nt, Homo sapiens
  misc_RNA (1)...(19): siRNA sense strand
gagcagagaacuuugacaa

SEQ ID NO: 1833612 - RNA, 19 nt, Homo sapiens
  misc_RNA (1)...(19): siRNA sense strand
gcaguggaaugaguccuuu

SEQ ID NO: 1833613 - RNA, 19 nt, Homo sapiens
  misc_RNA (1)...(19): siRNA sense strand
uuauagggaucugaaguua

SEQ ID NO: 1833614 - RNA, 19 nt, Homo sapiens
  misc_RNA (1)...(19): siRNA sense strand
uaaggaaccacaagcagua

SEQ ID NO: 1833615 - RNA, 19 nt, Homo sapiens
  misc_RNA (1)...(19): siRNA sense strand
gaggugccaugaauuuguu

SEQ ID NO: 1833616 - RNA, 19 nt, Homo sapiens
  misc_RNA (1)...(19): siRNA sense strand
uaugugaagcugaaacuua

SEQ ID NO: 1833617 - RNA, 19 nt, Homo sapiens
  misc_RNA (1)...(19): siRNA sense strand
agaaggauguggugauuca

SEQ ID NO: 1833618 - RNA, 19 nt, Homo sapiens
  misc_RNA (1)...(19): siRNA sense strand
gaaggaaacauggaacuca

SEQ ID NO: 1833619 - RNA, 19 nt, Homo sapiens
  misc_RNA (1)...(19): siRNA sense strand
gaaacucacggacuucaau

SEQ ID NO: 1833620 - RNA, 19 nt, Homo sapiens
  misc_RNA (1)...(19): siRNA sense strand
auagggaucugaaguuaga

SEQ ID NO: 1833621 - RNA, 19 nt, Homo sapiens
  misc_RNA (1)...(19): siRNA sense strand
gacgagcuauuucagucua

SEQ ID NO: 1833622 - RNA, 19 nt, Homo sapiens
  misc_RNA (1)...(19): siRNA sense strand
cauguuggauucagaagga

SEQ ID NO: 1833623 - RNA, 19 nt, Homo sapiens
  misc_RNA (1)...(19): siRNA sense strand
aggcugagguugcugauga

SEQ ID NO: 1833624 - RNA, 19 nt, Homo sapiens
  misc_RNA (1)...(19): siRNA sense strand
gaucagcugguuauugcua

SEQ ID NO: 1833625 - RNA, 19 nt, Homo sapiens
  misc_RNA (1)...(19): siRNA sense strand
gcaaaggagcagagaacuu

SEQ ID NO: 1833626 - RNA, 19 nt, Homo sapiens
  misc_RNA (1)...(19): siRNA sense strand
ggugaaggaccacaaauuc

SEQ ID NO: 1833627 - RNA, 19 nt, Homo sapiens
  misc_RNA (1)...(19): siRNA sense strand
uagauaacgucauguugga

SEQ ID NO: 1833628 - RNA, 19 nt, Homo sapiens
  misc_RNA (1)...(19): siRNA sense strand
agaacuguaugcaaucaaa

SEQ ID NO: 1833629 - RNA, 19 nt, Homo sapiens
  misc_RNA (1)...(19): siRNA sense strand
ggacgaggaaggaaacaug

SEQ ID NO: 1833630 - RNA, 19 nt, Homo sapiens
  misc_RNA (1)...(19): siRNA sense strand
uuucggagcugaugaagau

SEQ ID NO: 1833631 - RNA, 19 nt, Homo sapiens
  misc_RNA (1)...(19): siRNA sense strand
cgacgacugucuguagaaa

SEQ ID NO: 1833632 - RNA, 19 nt, Homo sapiens
  misc_RNA (1)...(19): siRNA sense strand
ggagcaagcacaaguucaa

SEQ ID NO: 1833633 - RNA, 19 nt, Homo sapiens
  misc_RNA (1)...(19): siRNA sense strand
gauaacgucauguuggauu

SEQ ID NO: 1833634 - RNA, 19 nt, Homo sapiens
  misc_RNA (1)...(19): siRNA sense strand
aaagcuccaugucacagua

SEQ ID NO: 1833635 - RNA, 19 nt, Homo sapiens
  misc_RNA (1)...(19): siRNA sense strand
guaccacauucagcaagua

SEQ ID NO: 1833636 - RNA, 19 nt, Homo sapiens
  misc_RNA (1)...(19): siRNA sense strand
ucaauuuccucaugguguu

SEQ ID NO: 1833637 - RNA, 19 nt, Homo sapiens
  misc_RNA (1)...(19): siRNA sense strand
caugggaucccuuuccuuu

SEQ ID NO: 1833638 - RNA, 19 nt, Homo sapiens
  misc_RNA (1)...(19): siRNA sense strand
gaucgaacaacaaggaaug

SEQ ID NO: 1833639 - RNA, 19 nt, Homo sapiens
  misc_RNA (1)...(19): siRNA sense strand
gaagacaggaaacaaccuu

SEQ ID NO: 1833640 - RNA, 19 nt, Homo sapiens
  misc_RNA (1)...(19): siRNA sense strand
gacaaagaccgacgacugu

SEQ ID NO: 1833641 - RNA, 19 nt, Homo sapiens
  misc_RNA (1)...(19): siRNA sense strand
ccuauggcguccuguugua

SEQ ID NO: 1833642 - RNA, 19 nt, Homo sapiens
  misc_RNA (1)...(19): siRNA sense strand
gaagggcacagaagaacug

SEQ ID NO: 1833643 - RNA, 19 nt, Homo sapiens
  misc_RNA (1)...(19): siRNA sense strand
gaagacgagcuauuucagu

SEQ ID NO: 1833644 - RNA, 19 nt, Homo sapiens
  misc_RNA (1)...(19): siRNA sense strand
ugugacaccugcgauauga

SEQ ID NO: 1833645 - RNA, 19 nt, Homo sapiens
  misc_RNA (1)...(19): siRNA sense strand
uaaauccgcaguggaauga

SEQ ID NO: 1833646 - RNA, 19 nt, Homo sapiens
  misc_RNA (1)...(19): siRNA sense strand
agaagaaggugaguacuac

SEQ ID NO: 1833647 - RNA, 19 nt, Homo sapiens
  misc_RNA (1)...(19): siRNA sense strand
gcuuucagauccuuaugug

SEQ ID NO: 1833648 - RNA, 19 nt, Homo sapiens
  misc_RNA (1)...(19): siRNA sense strand
gaacucaggcagaaauucg

SEQ ID NO: 1833649 - RNA, 19 nt, Homo sapiens
  misc_RNA (1)...(19): siRNA sense strand
aagaagaaggugaguacua

SEQ ID NO: 1833650 - RNA, 19 nt, Homo sapiens
  misc_RNA (1)...(19): siRNA sense strand
gccaguggaugguacaagu

SEQ ID NO: 1833651 - RNA, 19 nt, Homo sapiens
  misc_RNA (1)...(19): siRNA sense strand
gagcacaacguuuccuauc

SEQ ID NO: 1833652 - RNA, 19 nt, Homo sapiens
  misc_RNA (1)...(19): siRNA sense strand
ggaaccacaagcaguauuc

SEQ ID NO: 1833653 - RNA, 19 nt, Homo sapiens
  misc_RNA (1)...(19): siRNA sense strand
caaccuugaccgagugaaa

SEQ ID NO: 1833654 - RNA, 19 nt, Homo sapiens
  misc_RNA (1)...(19): siRNA sense strand
gaaggaccacaaauucauc

SEQ ID NO: 1833655 - RNA, 19 nt, Homo sapiens
  misc_RNA (1)...(19): siRNA sense strand
gaggacagcccgucuuaac

SEQ ID NO: 1833656 - RNA, 19 nt, Homo sapiens
  misc_RNA (1)...(19): siRNA sense strand
ggagauccagccaccauuc

SEQ ID NO: 1833657 - RNA, 19 nt, Homo sapiens
  misc_RNA (1)...(19): siRNA sense strand
ccaagaagaaggugaguac

SEQ ID NO: 1833658 - RNA, 19 nt, Homo sapiens
  misc_RNA (1)...(19): siRNA sense strand
gaugaagacgagcuauuuc

SEQ ID NO: 1833659 - RNA, 19 nt, Homo sapiens
  misc_RNA (1)...(19): siRNA sense strand
gugggucacugcucuaugg

SEQ ID NO: 1833660 - RNA, 19 nt, Homo sapiens
  misc_RNA (1)...(19): siRNA sense strand
agaugaagacgagcuauuu

SEQ ID NO: 1833661 - RNA, 19 nt, Homo sapiens
  misc_RNA (1)...(19): siRNA sense strand
gagcaagcacaaguucaaa

SEQ ID NO: 1833662 - RNA, 19 nt, Homo sapiens
  misc_RNA (1)...(19): siRNA sense strand
accauccgcuccacacuaa

SEQ ID NO: 1833663 - RNA, 19 nt, Homo sapiens
  misc_RNA (1)...(19): siRNA sense strand
caagcaaugcgucaucaau

SEQ ID NO: 1833664 - RNA, 19 nt, Homo sapiens
  misc_RNA (1)...(19): siRNA sense strand
aucaagggaugaaauguga

SEQ ID NO: 1833665 - RNA, 19 nt, Homo sapiens
  misc_RNA (1)...(19): siRNA sense strand
ggagugcaccaugguagaa

SEQ ID NO: 1833666 - RNA, 19 nt, Homo sapiens
  misc_RNA (1)...(19): siRNA sense strand
gaaaggggaguuuuggaaa

SEQ ID NO: 1833667 - RNA, 19 nt, Homo sapiens
  misc_RNA (1)...(19): siRNA sense strand
ccacugcaccgacuucauc

SEQ ID NO: 1833668 - RNA, 19 nt, Homo sapiens
  misc_RNA (1)...(19): siRNA sense strand
ggaauggaucacacugaga

SEQ ID NO: 1833669 - RNA, 19 nt, Homo sapiens
  misc_RNA (1)...(19): siRNA sense strand
cuuacagagugcaguauga

SEQ ID NO: 1833670 - RNA, 19 nt, Homo sapiens
  misc_RNA (1)...(19): siRNA sense strand
uugaaggguucucguaugu

SEQ ID NO: 1833671 - RNA, 19 nt, Homo sapiens
  misc_RNA (1)...(19): siRNA sense strand
ccacaagaggugccaugaa

SEQ ID NO: 1833672 - RNA, 19 nt, Homo sapiens
  misc_RNA (1)...(19): siRNA sense strand
uggaaugaguccuuuacau

SEQ ID NO: 1833673 - RNA, 19 nt, Homo sapiens
  misc_RNA (1)...(19): siRNA sense strand
ccaaacgggcuuucagauc

SEQ ID NO: 1833674 - RNA, 19 nt, Homo sapiens
  misc_RNA (1)...(19): siRNA sense strand
gcugaaacuuauuccugau

SEQ ID NO: 1833675 - RNA, 19 nt, Homo sapiens
  misc_RNA (1)...(19): siRNA sense strand
caucuuacagagugcagua

SEQ ID NO: 1833676 - RNA, 19 nt, Homo sapiens
  misc_RNA (1)...(19): siRNA sense strand
ggacagcccgucuuaacac

SEQ ID NO: 1833677 - RNA, 19 nt, Homo sapiens
  misc_RNA (1)...(19): siRNA sense strand
ccccagagauaaucgcuua

SEQ ID NO: 1833678 - RNA, 19 nt, Homo sapiens
  misc_RNA (1)...(19): siRNA sense strand
ccacaagcaguauucuaug

SEQ ID NO: 1833679 - RNA, 19 nt, Homo sapiens
  misc_RNA (1)...(19): siRNA sense strand
acauggaacucaggcagaa

SEQ ID NO: 1833680 - RNA, 19 nt, Homo sapiens
  misc_RNA (1)...(19): siRNA sense strand
gaccgacgacugucuguag

SEQ ID NO: 1833681 - RNA, 19 nt, Homo sapiens
  misc_RNA (1)...(19): siRNA sense strand
gcccaaaguguguggcaaa

SEQ ID NO: 1833682 - RNA, 19 nt, Homo sapiens
  misc_RNA (1)...(19): siRNA sense strand
uaucauggagcacaacguu

SEQ ID NO: 1833683 - RNA, 19 nt, Homo sapiens
  misc_RNA (1)...(19): siRNA sense strand
ggcguccuguuguaugaaa

SEQ ID NO: 1833684 - RNA, 19 nt, Homo sapiens
  misc_RNA (1)...(19): siRNA sense strand
cuuaucagccguauggaaa

SEQ ID NO: 1833685 - RNA, 19 nt, Homo sapiens
  misc_RNA (1)...(19): siRNA sense strand
guacuucgucauggaauau

SEQ ID NO: 1833686 - RNA, 19 nt, Homo sapiens
  misc_RNA (1)...(19): siRNA sense strand
uguacuucgucauggaaua

SEQ ID NO: 1833687 - RNA, 19 nt, Homo sapiens
  misc_RNA (1)...(19): siRNA sense strand
caaucaaaauccugaagaa

SEQ ID NO: 1833688 - RNA, 19 nt, Homo sapiens
  misc_RNA (1)...(19): siRNA sense strand
cgacaggaagggcacagaa

SEQ ID NO: 1833689 - RNA, 19 nt, Homo sapiens
  misc_RNA (1)...(19): siRNA sense strand
ggagcacaacguuuccuau

SEQ ID NO: 1833690 - RNA, 19 nt, Homo sapiens
  misc_RNA (1)...(19): siRNA sense strand
gaagagauguagcuauuaa

SEQ ID NO: 1833691 - RNA, 19 nt, Homo sapiens
  misc_RNA (1)...(19): siRNA sense strand
gaaagaguguuuguuguua

SEQ ID NO: 1833692 - RNA, 19 nt, Homo sapiens
  misc_RNA (1)...(19): siRNA sense strand
cauaagagaugugcauuua

SEQ ID NO: 1833693 - RNA, 19 nt, Homo sapiens
  misc_RNA (1)...(19): siRNA sense strand
gaaugcagcuuucauguau

SEQ ID NO: 1833694 - RNA, 19 nt, Homo sapiens
  misc_RNA (1)...(19): siRNA sense strand
ggaaggaaauaucucauga

SEQ ID NO: 1833695 - RNA, 19 nt, Homo sapiens
  misc_RNA (1)...(19): siRNA sense strand
ggaaggcgaucuuauugaa

SEQ ID NO: 1833696 - RNA, 19 nt, Homo sapiens
  misc_RNA (1)...(19): siRNA sense strand
gaaguggucuugucacguu

SEQ ID NO: 1833697 - RNA, 19 nt, Homo sapiens
  misc_RNA (1)...(19): siRNA sense strand
cggcaaauguaguguauua

SEQ ID NO: 1833698 - RNA, 19 nt, Homo sapiens
  misc_RNA (1)...(19): siRNA sense strand
uaucagaccugguuagauu

SEQ ID NO: 1833699 - RNA, 19 nt, Homo sapiens
  misc_RNA (1)...(19): siRNA sense strand
ccaaaucccuggaaggaaa

SEQ ID NO: 1833700 - RNA, 19 nt, Homo sapiens
  misc_RNA (1)...(19): siRNA sense strand
gaacgacaguggcgagaug

SEQ ID NO: 1833701 - RNA, 19 nt, Homo sapiens
  misc_RNA (1)...(19): siRNA sense strand
guaaugagguugcaauucu

SEQ ID NO: 1833702 - RNA, 19 nt, Homo sapiens
  misc_RNA (1)...(19): siRNA sense strand
gcaaauguauuacccucuu

SEQ ID NO: 1833703 - RNA, 19 nt, Homo sapiens
  misc_RNA (1)...(19): siRNA sense strand
gaaccaacuugcacagaga

SEQ ID NO: 1833704 - RNA, 19 nt, Homo sapiens
  misc_RNA (1)...(19): siRNA sense strand
ggucaaauucucaaucaua

SEQ ID NO: 1833705 - RNA, 19 nt, Homo sapiens
  misc_RNA (1)...(19): siRNA sense strand
gagauuggauagcaaaugu

SEQ ID NO: 1833706 - RNA, 19 nt, Homo sapiens
  misc_RNA (1)...(19): siRNA sense strand
gucaaggucuuaaauguga

SEQ ID NO: 1833707 - RNA, 19 nt, Homo sapiens
  misc_RNA (1)...(19): siRNA sense strand
gaccagaaguucccugaau

SEQ ID NO: 1833708 - RNA, 19 nt, Homo sapiens
  misc_RNA (1)...(19): siRNA sense strand
agaaggcucucaaacguuu

SEQ ID NO: 1833709 - RNA, 19 nt, Homo sapiens
  misc_RNA (1)...(19): siRNA sense strand
gaggucaaauucucaauca

SEQ ID NO: 1833710 - RNA, 19 nt, Homo sapiens
  misc_RNA (1)...(19): siRNA sense strand
gcugaacucucuacaagug

SEQ ID NO: 1833711 - RNA, 19 nt, Homo sapiens
  misc_RNA (1)...(19): siRNA sense strand
gagagaagaggucaaauuc

SEQ ID NO: 1833712 - RNA, 19 nt, Homo sapiens
  misc_RNA (1)...(19): siRNA sense strand
ggacaucagcacaguauau

SEQ ID NO: 1833713 - RNA, 19 nt, Homo sapiens
  misc_RNA (1)...(19): siRNA sense strand
gcagcacagucaugaaaga

SEQ ID NO: 1833714 - RNA, 19 nt, Homo sapiens
  misc_RNA (1)...(19): siRNA sense strand
agacauacacgaccaaauu

SEQ ID NO: 1833715 - RNA, 19 nt, Homo sapiens
  misc_RNA (1)...(19): siRNA sense strand
gcaaauguaguguauuaug

SEQ ID NO: 1833716 - RNA, 19 nt, Homo sapiens
  misc_RNA (1)...(19): siRNA sense strand
guauuacccucuuucagaa

SEQ ID NO: 1833717 - RNA, 19 nt, Homo sapiens
  misc_RNA (1)...(19): siRNA sense strand
gguccaagaugcagagaug

SEQ ID NO: 1833718 - RNA, 19 nt, Homo sapiens
  misc_RNA (1)...(19): siRNA sense strand
ggucugaauuaccauaaga

SEQ ID NO: 1833719 - RNA, 19 nt, Homo sapiens
  misc_RNA (1)...(19): siRNA sense strand
ggaagagauguagcuauua

SEQ ID NO: 1833720 - RNA, 19 nt, Homo sapiens
  misc_RNA (1)...(19): siRNA sense strand
aggaagagauguagcuauu

SEQ ID NO: 1833721 - RNA, 19 nt, Homo sapiens
  misc_RNA (1)...(19): siRNA sense strand
caaauguauuacccucuuu

SEQ ID NO: 1833722 - RNA, 19 nt, Homo sapiens
  misc_RNA (1)...(19): siRNA sense strand
caaauugccagauucaaga

SEQ ID NO: 1833723 - RNA, 19 nt, Homo sapiens
  misc_RNA (1)...(19): siRNA sense strand
ccaggaaggcgaucuuauu

SEQ ID NO: 1833724 - RNA, 19 nt, Homo sapiens
  misc_RNA (1)...(19): siRNA sense strand
ccacacaccugaucaaucc

SEQ ID NO: 1833725 - RNA, 19 nt, Homo sapiens
  misc_RNA (1)...(19): siRNA sense strand
gaaggaaauaucucaugaa

SEQ ID NO: 1833726 - RNA, 19 nt, Homo sapiens
  misc_RNA (1)...(19): siRNA sense strand
cgagagaagaggucaaauu

SEQ ID NO: 1833727 - RNA, 19 nt, Homo sapiens
  misc_RNA (1)...(19): siRNA sense strand
ggagauagccauccagcau

SEQ ID NO: 1833728 - RNA, 19 nt, Homo sapiens
  misc_RNA (1)...(19): siRNA sense strand
uacaaucgcucucuagaca

SEQ ID NO: 1833729 - RNA, 19 nt, Homo sapiens
  misc_RNA (1)...(19): siRNA sense strand
ggagacaugcuggaaauga

SEQ ID NO: 1833730 - RNA, 19 nt, Homo sapiens
  misc_RNA (1)...(19): siRNA sense strand
ugaauuaccauaagagaug

SEQ ID NO: 1833731 - RNA, 19 nt, Homo sapiens
  misc_RNA (1)...(19): siRNA sense strand
gaagaaacagaaaugaaag

SEQ ID NO: 1833732 - RNA, 19 nt, Homo sapiens
  misc_RNA (1)...(19): siRNA sense strand
gagacaugcuggaaaugau

SEQ ID NO: 1833733 - RNA, 19 nt, Homo sapiens
  misc_RNA (1)...(19): siRNA sense strand
uaaugagguugcaauucua

SEQ ID NO: 1833734 - RNA, 19 nt, Homo sapiens
  misc_RNA (1)...(19): siRNA sense strand
gcaacaauaucccacucau

SEQ ID NO: 1833735 - RNA, 19 nt, Homo sapiens
  misc_RNA (1)...(19): siRNA sense strand
ggacaguuuggaauuguuu

SEQ ID NO: 1833736 - RNA, 19 nt, Homo sapiens
  misc_RNA (1)...(19): siRNA sense strand
cgaaaucacuacggcaaau

SEQ ID NO: 1833737 - RNA, 19 nt, Homo sapiens
  misc_RNA (1)...(19): siRNA sense strand
gaaagcggccagugauauc

SEQ ID NO: 1833738 - RNA, 19 nt, Homo sapiens
  misc_RNA (1)...(19): siRNA sense strand
ugagaaagcgcuacagugu

SEQ ID NO: 1833739 - RNA, 19 nt, Homo sapiens
  misc_RNA (1)...(19): siRNA sense strand
caacugccuuggcgaagug

SEQ ID NO: 1833740 - RNA, 19 nt, Homo sapiens
  misc_RNA (1)...(19): siRNA sense strand
ugaaagaguguuuguuguu

SEQ ID NO: 1833741 - RNA, 19 nt, Homo sapiens
  misc_RNA (1)...(19): siRNA sense strand
aacaauaucccacucauga

SEQ ID NO: 1833742 - RNA, 19 nt, Homo sapiens
  misc_RNA (1)...(19): siRNA sense strand
caaucgcucucuagacaug

SEQ ID NO: 1833743 - RNA, 19 nt, Homo sapiens
  misc_RNA (1)...(19): siRNA sense strand
gggcuacaaucgcucucua

SEQ ID NO: 1833744 - RNA, 19 nt, Homo sapiens
  misc_RNA (1)...(19): siRNA sense strand
gccaugacccuaccucuga

SEQ ID NO: 1833745 - RNA, 19 nt, Homo sapiens
  misc_RNA (1)...(19): siRNA sense strand
ugaaggguguggucugaau

SEQ ID NO: 1833746 - RNA, 19 nt, Homo sapiens
  misc_RNA (1)...(19): siRNA sense strand
caugaagccauugaucuua

SEQ ID NO: 1833747 - RNA, 19 nt, Homo sapiens
  misc_RNA (1)...(19): siRNA sense strand
ggugaaacuuugugauuuu

SEQ ID NO: 1833748 - RNA, 19 nt, Homo sapiens
  misc_RNA (1)...(19): siRNA sense strand
cagagcacauaacgaaguu

SEQ ID NO: 1833749 - RNA, 19 nt, Homo sapiens
  misc_RNA (1)...(19): siRNA sense strand
ggaauuguuuauggaggaa

SEQ ID NO: 1833750 - RNA, 19 nt, Homo sapiens
  misc_RNA (1)...(19): siRNA sense strand
cggaauguaugauaagauc

SEQ ID NO: 1833751 - RNA, 19 nt, Homo sapiens
  misc_RNA (1)...(19): siRNA sense strand
aaacggcacuauuggagau

SEQ ID NO: 1833752 - RNA, 19 nt, Homo sapiens
  misc_RNA (1)...(19): siRNA sense strand
caucaacaagcaacaauau

SEQ ID NO: 1833753 - RNA, 19 nt, Homo sapiens
  misc_RNA (1)...(19): siRNA sense strand
aagaagcaaugguccaaga

SEQ ID NO: 1833754 - RNA, 19 nt, Homo sapiens
  misc_RNA (1)...(19): siRNA sense strand
ggagugaugacaaugauag

SEQ ID NO: 1833755 - RNA, 19 nt, Homo sapiens
  misc_RNA (1)...(19): siRNA sense strand
gaagaggucaaauucucaa

SEQ ID NO: 1833756 - RNA, 19 nt, Homo sapiens
  misc_RNA (1)...(19): siRNA sense strand
ccaucagagucguuuauug

SEQ ID NO: 1833757 - RNA, 19 nt, Homo sapiens
  misc_RNA (1)...(19): siRNA sense strand
cuacaucacccaugaaagu

SEQ ID NO: 1833758 - RNA, 19 nt, Homo sapiens
  misc_RNA (1)...(19): siRNA sense strand
ucuacggaauguaugauaa

SEQ ID NO: 1833759 - RNA, 19 nt, Homo sapiens
  misc_RNA (1)...(19): siRNA sense strand
gugcagauguggccaggau

SEQ ID NO: 1833760 - RNA, 19 nt, Homo sapiens
  misc_RNA (1)...(19): siRNA sense strand
gaagcaaugguccaagaug

SEQ ID NO: 1833761 - RNA, 19 nt, Homo sapiens
  misc_RNA (1)...(19): siRNA sense strand
gaacagugggcucauggau

SEQ ID NO: 1833762 - RNA, 19 nt, Homo sapiens
  misc_RNA (1)...(19): siRNA sense strand
gaauuaccauaagagaugu

SEQ ID NO: 1833763 - RNA, 19 nt, Homo sapiens
  misc_RNA (1)...(19): siRNA sense strand
ggaagaagcaaugguccaa

SEQ ID NO: 1833764 - RNA, 19 nt, Homo sapiens
  misc_RNA (1)...(19): siRNA sense strand
gacgaccaauucaccuuga

SEQ ID NO: 1833765 - RNA, 19 nt, Homo sapiens
  misc_RNA (1)...(19): siRNA sense strand
ugcgagagcuggaaugcaa

SEQ ID NO: 1833766 - RNA, 19 nt, Homo sapiens
  misc_RNA (1)...(19): siRNA sense strand
aaggaaauaucucaugaag

SEQ ID NO: 1833767 - RNA, 19 nt, Homo sapiens
  misc_RNA (1)...(19): siRNA sense strand
ucaaacacacgaagaggaa

SEQ ID NO: 1833768 - RNA, 19 nt, Homo sapiens
  misc_RNA (1)...(19): siRNA sense strand
caggaaggcgaucuuauug

SEQ ID NO: 1833769 - RNA, 19 nt, Homo sapiens
  misc_RNA (1)...(19): siRNA sense strand
agaagggagugaugacaau

SEQ ID NO: 1833770 - RNA, 19 nt, Homo sapiens
  misc_RNA (1)...(19): siRNA sense strand
gcaccgaaaguaccaaaca

SEQ ID NO: 1833771 - RNA, 19 nt, Homo sapiens
  misc_RNA (1)...(19): siRNA sense strand
guacgucaaggucuuaaau

SEQ ID NO: 1833772 - RNA, 19 nt, Homo sapiens
  misc_RNA (1)...(19): siRNA sense strand
caggugaaacuuugugauu

SEQ ID NO: 1833773 - RNA, 19 nt, Homo sapiens
  misc_RNA (1)...(19): siRNA sense strand
ugacaaugauagugaaagg

SEQ ID NO: 1833774 - RNA, 19 nt, Homo sapiens
  misc_RNA (1)...(19): siRNA sense strand
ggacuaucagaccugguua

SEQ ID NO: 1833775 - RNA, 19 nt, Homo sapiens
  misc_RNA (1)...(19): siRNA sense strand
agaaugcagcuuucaugua

SEQ ID NO: 1833776 - RNA, 19 nt, Homo sapiens
  misc_RNA (1)...(19): siRNA sense strand
gaagacauacacgaccaaa

SEQ ID NO: 1833777 - RNA, 19 nt, Homo sapiens
  misc_RNA (1)...(19): siRNA sense strand
ccugaaagaguguuuguug

SEQ ID NO: 1833778 - RNA, 19 nt, Homo sapiens
  misc_RNA (1)...(19): siRNA sense strand
acccugguguuguaaauuu

SEQ ID NO: 1833779 - RNA, 19 nt, Homo sapiens
  misc_RNA (1)...(19): siRNA sense strand
aguaucaaauugccagauu

SEQ ID NO: 1833780 - RNA, 19 nt, Homo sapiens
  misc_RNA (1)...(19): siRNA sense strand
uguauuacccucuuucaga

SEQ ID NO: 1833781 - RNA, 19 nt, Homo sapiens
  misc_RNA (1)...(19): siRNA sense strand
cagauucaacugccauaaa

SEQ ID NO: 1833782 - RNA, 19 nt, Homo sapiens
  misc_RNA (1)...(19): siRNA sense strand
gcggcacauucccauuuaa

SEQ ID NO: 1833783 - RNA, 19 nt, Homo sapiens
  misc_RNA (1)...(19): siRNA sense strand
guaucaaauugccagauuc

SEQ ID NO: 1833784 - RNA, 19 nt, Homo sapiens
  misc_RNA (1)...(19): siRNA sense strand
caccgaaaguaccaaacaa

SEQ ID NO: 1833785 - RNA, 19 nt, Homo sapiens
  misc_RNA (1)...(19): siRNA sense strand
uaaacguugugcaccgaaa

SEQ ID NO: 1833786 - RNA, 19 nt, Homo sapiens
  misc_RNA (1)...(19): siRNA sense strand
gauuggauagcaaauguau

SEQ ID NO: 1833787 - RNA, 19 nt, Homo sapiens
  misc_RNA (1)...(19): siRNA sense strand
ggaacaagggcuacaaucg

SEQ ID NO: 1833788 - RNA, 19 nt, Homo sapiens
  misc_RNA (1)...(19): siRNA sense strand
cagcacaguauaucagauu

SEQ ID NO: 1833789 - RNA, 19 nt, Homo sapiens
  misc_RNA (1)...(19): siRNA sense strand
agauaucucugugaguauu

SEQ ID NO: 1833790 - RNA, 19 nt, Homo sapiens
  misc_RNA (1)...(19): siRNA sense strand
ucaaggagcuggaugauga

SEQ ID NO: 1833791 - RNA, 19 nt, Homo sapiens
  misc_RNA (1)...(19): siRNA sense strand
ugaagaagauccuuauuga

SEQ ID NO: 1833792 - RNA, 19 nt, Homo sapiens
  misc_RNA (1)...(19): siRNA sense strand
gagaacaccugcaaagaga

SEQ ID NO: 1833793 - RNA, 19 nt, Homo sapiens
  misc_RNA (1)...(19): siRNA sense strand
ggaagaagaggcugaagaa

SEQ ID NO: 1833794 - RNA, 19 nt, Homo sapiens
  misc_RNA (1)...(19): siRNA sense strand
ggucaacgaugguguuugu

SEQ ID NO: 1833795 - RNA, 19 nt, Homo sapiens
  misc_RNA (1)...(19): siRNA sense strand
ccaaagagcagcaccagaa

SEQ ID NO: 1833796 - RNA, 19 nt, Homo sapiens
  misc_RNA (1)...(19): siRNA sense strand
ggaagaagucucuggaaga

SEQ ID NO: 1833797 - RNA, 19 nt, Homo sapiens
  misc_RNA (1)...(19): siRNA sense strand
gcaaagagaagggccguaa

SEQ ID NO: 1833798 - RNA, 19 nt, Homo sapiens
  misc_RNA (1)...(19): siRNA sense strand
gcuacgagcucaccaccaa

SEQ ID NO: 1833799 - RNA, 19 nt, Homo sapiens
  misc_RNA (1)...(19): siRNA sense strand
ggaguuugcuuaccuguac

SEQ ID NO: 1833800 - RNA, 19 nt, Homo sapiens
  misc_RNA (1)...(19): siRNA sense strand
ggagcuggaugaugacaug

SEQ ID NO: 1833801 - RNA, 19 nt, Homo sapiens
  misc_RNA (1)...(19): siRNA sense strand
gcaccaacacuggcuauaa

SEQ ID NO: 1833802 - RNA, 19 nt, Homo sapiens
  misc_RNA (1)...(19): siRNA sense strand
ucagugccaugaaguauga

SEQ ID NO: 1833803 - RNA, 19 nt, Homo sapiens
  misc_RNA (1)...(19): siRNA sense strand
gaaccuggagcaagagauu

SEQ ID NO: 1833804 - RNA, 19 nt, Homo sapiens
  misc_RNA (1)...(19): siRNA sense strand
agaagaggcugaagaagag

SEQ ID NO: 1833805 - RNA, 19 nt, Homo sapiens
  misc_RNA (1)...(19): siRNA sense strand
gaacagacgaguacaacag

SEQ ID NO: 1833806 - RNA, 19 nt, Homo sapiens
  misc_RNA (1)...(19): siRNA sense strand
agacagacgccaccucuuu

SEQ ID NO: 1833807 - RNA, 19 nt, Homo sapiens
  misc_RNA (1)...(19): siRNA sense strand
gaaggguuccgucugaaga

SEQ ID NO: 1833808 - RNA, 19 nt, Homo sapiens
  misc_RNA (1)...(19): siRNA sense strand
aagaagaggcugaagaaga

SEQ ID NO: 1833809 - RNA, 19 nt, Homo sapiens
  misc_RNA (1)...(19): siRNA sense strand
caccaacacuggcuauaag

SEQ ID NO: 1833810 - RNA, 19 nt, Homo sapiens
  misc_RNA (1)...(19): siRNA sense strand
gagaugcugcggacaguga

SEQ ID NO: 1833811 - RNA, 19 nt, Homo sapiens
  misc_RNA (1)...(19): siRNA sense strand
gaagggccguaaggagaga

SEQ ID NO: 1833812 - RNA, 19 nt, Homo sapiens
  misc_RNA (1)...(19): siRNA sense strand
ucaccaaucaucacuucua

SEQ ID NO: 1833813 - RNA, 19 nt, Homo sapiens
  misc_RNA (1)...(19): siRNA sense strand
gaagaagauccuuauugag

SEQ ID NO: 1833814 - RNA, 19 nt, Homo sapiens
  misc_RNA (1)...(19): siRNA sense strand
gaaggaggaagcugagaag

SEQ ID NO: 1833815 - RNA, 19 nt, Homo sapiens
  misc_RNA (1)...(19): siRNA sense strand
gaacaccugcaaagagaag

SEQ ID NO: 1833816 - RNA, 19 nt, Homo sapiens
  misc_RNA (1)...(19): siRNA sense strand
gcacggcugccuguccuaa

SEQ ID NO: 1833817 - RNA, 19 nt, Homo sapiens
  misc_RNA (1)...(19): siRNA sense strand
acccggagcuggacacaga

SEQ ID NO: 1833818 - RNA, 19 nt, Homo sapiens
  misc_RNA (1)...(19): siRNA sense strand
ccucaccaaucaucacuuc

SEQ ID NO: 1833819 - RNA, 19 nt, Homo sapiens
  misc_RNA (1)...(19): siRNA sense strand
cugaagaagauccuuauug

SEQ ID NO: 1833820 - RNA, 19 nt, Homo sapiens
  misc_RNA (1)...(19): siRNA sense strand
cgcgaaggguuccgucuga

SEQ ID NO: 1833821 - RNA, 19 nt, Homo sapiens
  misc_RNA (1)...(19): siRNA sense strand
guacaacagcggcgucauc

SEQ ID NO: 1833822 - RNA, 19 nt, Homo sapiens
  misc_RNA (1)...(19): siRNA sense strand
ccaaucaucacuucuacga

SEQ ID NO: 1833823 - RNA, 19 nt, Homo sapiens
  misc_RNA (1)...(19): siRNA sense strand
gcgaaggguuccgucugaa

SEQ ID NO: 1833824 - RNA, 19 nt, Homo sapiens
  misc_RNA (1)...(19): siRNA sense strand
gcgucucccucaccaauca

SEQ ID NO: 1833825 - RNA, 19 nt, Homo sapiens
  misc_RNA (1)...(19): siRNA sense strand
ucaacgaugguguuuguga

SEQ ID NO: 1833826 - RNA, 19 nt, Homo sapiens
  misc_RNA (1)...(19): siRNA sense strand
gcuacaggcugggaagaag

SEQ ID NO: 1833827 - RNA, 19 nt, Homo sapiens
  misc_RNA (1)...(19): siRNA sense strand
gcgauggaacagacgagua

SEQ ID NO: 1833828 - RNA, 19 nt, Homo sapiens
  misc_RNA (1)...(19): siRNA sense strand
ggaggaggaggaggaagaa

SEQ ID NO: 1833829 - RNA, 19 nt, Homo sapiens
  misc_RNA (1)...(19): siRNA sense strand
ugagaacaccugcaaagag

SEQ ID NO: 1833830 - RNA, 19 nt, Homo sapiens
  misc_RNA (1)...(19): siRNA sense strand
gagcucaccaccaacgaau

SEQ ID NO: 1833831 - RNA, 19 nt, Homo sapiens
  misc_RNA (1)...(19): siRNA sense strand
ggaggaagaagaggcugaa

SEQ ID NO: 1833832 - RNA, 19 nt, Homo sapiens
  misc_RNA (1)...(19): siRNA sense strand
ugaaggaggaagcugagaa

SEQ ID NO: 1833833 - RNA, 19 nt, Homo sapiens
  misc_RNA (1)...(19): siRNA sense strand
cgucugaagaagauccuua

SEQ ID NO: 1833834 - RNA, 19 nt, Homo sapiens
  misc_RNA (1)...(19): siRNA sense strand
ggacggucucggugacuga

SEQ ID NO: 1833835 - RNA, 19 nt, Homo sapiens
  misc_RNA (1)...(19): siRNA sense strand
cggccaccaucccauuuga

SEQ ID NO: 1833836 - RNA, 19 nt, Homo sapiens
  misc_RNA (1)...(19): siRNA sense strand
ggaggaggaggaagaagag

SEQ ID NO: 1833837 - RNA, 19 nt, Homo sapiens
  misc_RNA (1)...(19): siRNA sense strand
gacagacgccaccucuuuc

SEQ ID NO: 1833838 - RNA, 19 nt, Homo sapiens
  misc_RNA (1)...(19): siRNA sense strand
accagaagcugugggaaga

SEQ ID NO: 1833839 - RNA, 19 nt, Homo sapiens
  misc_RNA (1)...(19): siRNA sense strand
gaagaagaggcugaagaag

SEQ ID NO: 1833840 - RNA, 19 nt, Homo sapiens
  misc_RNA (1)...(19): siRNA sense strand
ucaagcuugucucgcagaa

SEQ ID NO: 1833841 - RNA, 19 nt, Homo sapiens
  misc_RNA (1)...(19): siRNA sense strand
ggaacagacgaguacaaca

SEQ ID NO: 1833842 - RNA, 19 nt, Homo sapiens
  misc_RNA (1)...(19): siRNA sense strand
aagcuugucucgcagaaac

SEQ ID NO: 1833843 - RNA, 19 nt, Homo sapiens
  misc_RNA (1)...(19): siRNA sense strand
gugagaacaccugcaaaga

SEQ ID NO: 1833844 - RNA, 19 nt, Homo sapiens
  misc_RNA (1)...(19): siRNA sense strand
gcucaccaccaacgaauac

SEQ ID NO: 1833845 - RNA, 19 nt, Homo sapiens
  misc_RNA (1)...(19): siRNA sense strand
gggaguuugcuuaccugua

SEQ ID NO: 1833846 - RNA, 19 nt, Homo sapiens
  misc_RNA (1)...(19): siRNA sense strand
gggcgucucccucaccaau

SEQ ID NO: 1833847 - RNA, 19 nt, Homo sapiens
  misc_RNA (1)...(19): siRNA sense strand
cugagaagccagagagaga

SEQ ID NO: 1833848 - RNA, 19 nt, Homo sapiens
  misc_RNA (1)...(19): siRNA sense strand
caccaaucaucacuucuac

SEQ ID NO: 1833849 - RNA, 19 nt, Homo sapiens
  misc_RNA (1)...(19): siRNA sense strand
ggaagaccagguggagaug

SEQ ID NO: 1833850 - RNA, 19 nt, Homo sapiens
  misc_RNA (1)...(19): siRNA sense strand
gacaaguucagugccauga

SEQ ID NO: 1833851 - RNA, 19 nt, Homo sapiens
  misc_RNA (1)...(19): siRNA sense strand
caaagagcagcaccagaag

SEQ ID NO: 1833852 - RNA, 19 nt, Homo sapiens
  misc_RNA (1)...(19): siRNA sense strand
acgaugaguccaagccuuu

SEQ ID NO: 1833853 - RNA, 19 nt, Homo sapiens
  misc_RNA (1)...(19): siRNA sense strand
ggaggaggaggaggaggaa

SEQ ID NO: 1833854 - RNA, 19 nt, Homo sapiens
  misc_RNA (1)...(19): siRNA sense strand
gguuccgucugaagaagau

SEQ ID NO: 1833855 - RNA, 19 nt, Homo sapiens
  misc_RNA (1)...(19): siRNA sense strand
cugaagcacccaccgaaga

SEQ ID NO: 1833856 - RNA, 19 nt, Homo sapiens
  misc_RNA (1)...(19): siRNA sense strand
agagagagaggccaaagag

SEQ ID NO: 1833857 - RNA, 19 nt, Homo sapiens
  misc_RNA (1)...(19): siRNA sense strand
cagagagagaggccaaaga

SEQ ID NO: 1833858 - RNA, 19 nt, Homo sapiens
  misc_RNA (1)...(19): siRNA sense strand
agaaggcacgggaggagaa

SEQ ID NO: 1833859 - RNA, 19 nt, Homo sapiens
  misc_RNA (1)...(19): siRNA sense strand
ggcgucaucugugagaaca

SEQ ID NO: 1833860 - RNA, 19 nt, Homo sapiens
  misc_RNA (1)...(19): siRNA sense strand
gaagcugagaagccagaga

SEQ ID NO: 1833861 - RNA, 19 nt, Homo sapiens
  misc_RNA (1)...(19): siRNA sense strand
aaagagaagggccguaagg

SEQ ID NO: 1833862 - RNA, 19 nt, Homo sapiens
  misc_RNA (1)...(19): siRNA sense strand
gaugaguccaagccuuuca

SEQ ID NO: 1833863 - RNA, 19 nt, Homo sapiens
  misc_RNA (1)...(19): siRNA sense strand
ggucgaagcugugcaagga

SEQ ID NO: 1833864 - RNA, 19 nt, Homo sapiens
  misc_RNA (1)...(19): siRNA sense strand
uggaggagcucgccaagaa

SEQ ID NO: 1833865 - RNA, 19 nt, Homo sapiens
  misc_RNA (1)...(19): siRNA sense strand
ccaagaagcgauucaaaga

SEQ ID NO: 1833866 - RNA, 19 nt, Homo sapiens
  misc_RNA (1)...(19): siRNA sense strand
aagaagcgauucaaagaca

SEQ ID NO: 1833867 - RNA, 19 nt, Homo sapiens
  misc_RNA (1)...(19): siRNA sense strand
ucacggacaccaccaaguu

SEQ ID NO: 1833868 - RNA, 19 nt, Homo sapiens
  misc_RNA (1)...(19): siRNA sense strand
ggacgagucaggcuaugug

SEQ ID NO: 1833869 - RNA, 19 nt, Homo sapiens
  misc_RNA (1)...(19): siRNA sense strand
gccggaccaucaccuuuga

SEQ ID NO: 1833870 - RNA, 19 nt, Homo sapiens
  misc_RNA (1)...(19): siRNA sense strand
ggccaagccugccaaagcu

SEQ ID NO: 1833871 - RNA, 19 nt, Homo sapiens
  misc_RNA (1)...(19): siRNA sense strand
ucacugacguggacaucgu

SEQ ID NO: 1833872 - RNA, 19 nt, Homo sapiens
  misc_RNA (1)...(19): siRNA sense strand
gccaagaagcgauucaaag

SEQ ID NO: 1833873 - RNA, 19 nt, Homo sapiens
  misc_RNA (1)...(19): siRNA sense strand
ggagaugcacggcaagaac

SEQ ID NO: 1833874 - RNA, 19 nt, Homo sapiens
  misc_RNA (1)...(19): siRNA sense strand
gaagcgauucaaagacaag

SEQ ID NO: 1833875 - RNA, 19 nt, Homo sapiens
  misc_RNA (1)...(19): siRNA sense strand
agaagcgauucaaagacaa

SEQ ID NO: 1833876 - RNA, 19 nt, Homo sapiens
  misc_RNA (1)...(19): siRNA sense strand
gcaagaacuggucgaagcu

SEQ ID NO: 1833877 - RNA, 19 nt, Homo sapiens
  misc_RNA (1)...(19): siRNA sense strand
gagaugcacggcaagaacu

SEQ ID NO: 1833878 - RNA, 19 nt, Homo sapiens
  misc_RNA (1)...(19): siRNA sense strand
gcaaggacugccaggugau

SEQ ID NO: 1833879 - RNA, 19 nt, Homo sapiens
  misc_RNA (1)...(19): siRNA sense strand
caagaagcgauucaaagac

SEQ ID NO: 1833880 - RNA, 19 nt, Homo sapiens
  misc_RNA (1)...(19): siRNA sense strand
caucaccuuugagcaguuc

SEQ ID NO: 1833881 - RNA, 19 nt, Homo sapiens
  misc_RNA (1)...(19): siRNA sense strand
gggagaugcacggcaagaa

SEQ ID NO: 1833882 - RNA, 19 nt, Homo sapiens
  misc_RNA (1)...(19): siRNA sense strand
aagaggcugucgcuggaau

SEQ ID NO: 1833883 - RNA, 19 nt, Homo sapiens
  misc_RNA (1)...(19): siRNA sense strand
caaagaagucgcagacgaa

SEQ ID NO: 1833884 - RNA, 19 nt, Homo sapiens
  misc_RNA (1)...(19): siRNA sense strand
gauauuaccgccagagaca

SEQ ID NO: 1833885 - RNA, 19 nt, Homo sapiens
  misc_RNA (1)...(19): siRNA sense strand
agaccgagauguagaagac

SEQ ID NO: 1833886 - RNA, 19 nt, Homo sapiens
  misc_RNA (1)...(19): siRNA sense strand
agaagucgcagacgaagga

SEQ ID NO: 1833887 - RNA, 19 nt, Homo sapiens
  misc_RNA (1)...(19): siRNA sense strand
gagauguagaagacacuaa

SEQ ID NO: 1833888 - RNA, 19 nt, Homo sapiens
  misc_RNA (1)...(19): siRNA sense strand
acacggaggagagccauga

SEQ ID NO: 1833889 - RNA, 19 nt, Homo sapiens
  misc_RNA (1)...(19): siRNA sense strand
gccagagccggagcagaua

SEQ ID NO: 1833890 - RNA, 19 nt, Homo sapiens
  misc_RNA (1)...(19): siRNA sense strand
uauuaccgccagagacaaa

SEQ ID NO: 1833891 - RNA, 19 nt, Homo sapiens
  misc_RNA (1)...(19): siRNA sense strand
cagcaucgcuccugcagaa

SEQ ID NO: 1833892 - RNA, 19 nt, Homo sapiens
  misc_RNA (1)...(19): siRNA sense strand
agacacugcucucgaagga

SEQ ID NO: 1833893 - RNA, 19 nt, Homo sapiens
  misc_RNA (1)...(19): siRNA sense strand
gaacaugcagaaggcacua

SEQ ID NO: 1833894 - RNA, 19 nt, Homo sapiens
  misc_RNA (1)...(19): siRNA sense strand
guaugcacgucgaggucua

SEQ ID NO: 1833895 - RNA, 19 nt, Homo sapiens
  misc_RNA (1)...(19): siRNA sense strand
gaaccaggaagagaacaug

SEQ ID NO: 1833896 - RNA, 19 nt, Homo sapiens
  misc_RNA (1)...(19): siRNA sense strand
aggaagagaacaugcagaa

SEQ ID NO: 1833897 - RNA, 19 nt, Homo sapiens
  misc_RNA (1)...(19): siRNA sense strand
gcagaaccaggaagagaac

SEQ ID NO: 1833898 - RNA, 19 nt, Homo sapiens
  misc_RNA (1)...(19): siRNA sense strand
gaacaugcagcgagaauuu

SEQ ID NO: 1833899 - RNA, 19 nt, Homo sapiens
  misc_RNA (1)...(19): siRNA sense strand
ccaaacaagugaaugcaua

SEQ ID NO: 1833900 - RNA, 19 nt, Homo sapiens
  misc_RNA (1)...(19): siRNA sense strand
ggagagaugugacccagaa

SEQ ID NO: 1833901 - RNA, 19 nt, Homo sapiens
  misc_RNA (1)...(19): siRNA sense strand
gcaguugucucuugcuauu

SEQ ID NO: 1833902 - RNA, 19 nt, Homo sapiens
  misc_RNA (1)...(19): siRNA sense strand
ggucauaaauucccucgaa

SEQ ID NO: 1833903 - RNA, 19 nt, Homo sapiens
  misc_RNA (1)...(19): siRNA sense strand
gaacacauguauacacaca

SEQ ID NO: 1833904 - RNA, 19 nt, Homo sapiens
  misc_RNA (1)...(19): siRNA sense strand
caacugaaaugaaucaagu

SEQ ID NO: 1833905 - RNA, 19 nt, Homo sapiens
  misc_RNA (1)...(19): siRNA sense strand
agacuugccuugugccuua

SEQ ID NO: 1833906 - RNA, 19 nt, Homo sapiens
  misc_RNA (1)...(19): siRNA sense strand
cauccaaccugacauauuc

SEQ ID NO: 1833907 - RNA, 19 nt, Homo sapiens
  misc_RNA (1)...(19): siRNA sense strand
ugaaaugaaucaaguguuc

SEQ ID NO: 1833908 - RNA, 19 nt, Homo sapiens
  misc_RNA (1)...(19): siRNA sense strand
agucagagcucacacaaga

SEQ ID NO: 1833909 - RNA, 19 nt, Homo sapiens
  misc_RNA (1)...(19): siRNA sense strand
ccacagagccuuugcagau

SEQ ID NO: 1833910 - RNA, 19 nt, Homo sapiens
  misc_RNA (1)...(19): siRNA sense strand
acacagagccaguagaauu

SEQ ID NO: 1833911 - RNA, 19 nt, Homo sapiens
  misc_RNA (1)...(19): siRNA sense strand
guaaugaccuuggugaagu

SEQ ID NO: 1833912 - RNA, 19 nt, Homo sapiens
  misc_RNA (1)...(19): siRNA sense strand
ggaggaagggauucgauuu

SEQ ID NO: 1833913 - RNA, 19 nt, Homo sapiens
  misc_RNA (1)...(19): siRNA sense strand
gaaaaguucucgcuuguca

SEQ ID NO: 1833914 - RNA, 19 nt, Homo sapiens
  misc_RNA (1)...(19): siRNA sense strand
ggaagggauucgauuucuu

SEQ ID NO: 1833915 - RNA, 19 nt, Homo sapiens
  misc_RNA (1)...(19): siRNA sense strand
acacauguauacacacaaa

SEQ ID NO: 1833916 - RNA, 19 nt, Homo sapiens
  misc_RNA (1)...(19): siRNA sense strand
caacaucuccauacacaug

SEQ ID NO: 1833917 - RNA, 19 nt, Homo sapiens
  misc_RNA (1)...(19): siRNA sense strand
gugcaguccucaaauuuau

SEQ ID NO: 1833918 - RNA, 19 nt, Homo sapiens
  misc_RNA (1)...(19): siRNA sense strand
caaaacagauuguggauca

SEQ ID NO: 1833919 - RNA, 19 nt, Homo sapiens
  misc_RNA (1)...(19): siRNA sense strand
cgacuaccuuucucacauu

SEQ ID NO: 1833920 - RNA, 19 nt, Homo sapiens
  misc_RNA (1)...(19): siRNA sense strand
caucuguggucauaaauuc

SEQ ID NO: 1833921 - RNA, 19 nt, Homo sapiens
  misc_RNA (1)...(19): siRNA sense strand
ggcaacaucuccauacaca

SEQ ID NO: 1833922 - RNA, 19 nt, Homo sapiens
  misc_RNA (1)...(19): siRNA sense strand
ggucugaugucucccugaa

SEQ ID NO: 1833923 - RNA, 19 nt, Homo sapiens
  misc_RNA (1)...(19): siRNA sense strand
ggaaaguaaugaccuuggu

SEQ ID NO: 1833924 - RNA, 19 nt, Homo sapiens
  misc_RNA (1)...(19): siRNA sense strand
gcuauuuguugcacauuau

SEQ ID NO: 1833925 - RNA, 19 nt, Homo sapiens
  misc_RNA (1)...(19): siRNA sense strand
cacagagccaguagaauua

SEQ ID NO: 1833926 - RNA, 19 nt, Homo sapiens
  misc_RNA (1)...(19): siRNA sense strand
gcucagcuccuucauuguu

SEQ ID NO: 1833927 - RNA, 19 nt, Homo sapiens
  misc_RNA (1)...(19): siRNA sense strand
caaacaagugaaugcauaa

SEQ ID NO: 1833928 - RNA, 19 nt, Homo sapiens
  misc_RNA (1)...(19): siRNA sense strand
ugacauccaaccugacaua

SEQ ID NO: 1833929 - RNA, 19 nt, Homo sapiens
  misc_RNA (1)...(19): siRNA sense strand
aggcucagcuccuucauug

SEQ ID NO: 1833930 - RNA, 19 nt, Homo sapiens
  misc_RNA (1)...(19): siRNA sense strand
ggagauguuuacuucaaag

SEQ ID NO: 1833931 - RNA, 19 nt, Homo sapiens
  misc_RNA (1)...(19): siRNA sense strand
ugugacagcuggucugaug

SEQ ID NO: 1833932 - RNA, 19 nt, Homo sapiens
  misc_RNA (1)...(19): siRNA sense strand
gcauucagaucucaacaac

SEQ ID NO: 1833933 - RNA, 19 nt, Homo sapiens
  misc_RNA (1)...(19): siRNA sense strand
cauaaauucccucgaaaga

SEQ ID NO: 1833934 - RNA, 19 nt, Homo sapiens
  misc_RNA (1)...(19): siRNA sense strand
aaacagauuguggaucaua

SEQ ID NO: 1833935 - RNA, 19 nt, Homo sapiens
  misc_RNA (1)...(19): siRNA sense strand
gauuucagccauacuguga

SEQ ID NO: 1833936 - RNA, 19 nt, Homo sapiens
  misc_RNA (1)...(19): siRNA sense strand
aaaaugagcuguaccaucu

SEQ ID NO: 1833937 - RNA, 19 nt, Homo sapiens
  misc_RNA (1)...(19): siRNA sense strand
ugacauauucagcuauuug

SEQ ID NO: 1833938 - RNA, 19 nt, Homo sapiens
  misc_RNA (1)...(19): siRNA sense strand
caaagacacagagccagua

SEQ ID NO: 1833939 - RNA, 19 nt, Homo sapiens
  misc_RNA (1)...(19): siRNA sense strand
guaguaaccuaaggcaaca

SEQ ID NO: 1833940 - RNA, 19 nt, Homo sapiens
  misc_RNA (1)...(19): siRNA sense strand
gcaguccucaaauuuauau

SEQ ID NO: 1833941 - RNA, 19 nt, Homo sapiens
  misc_RNA (1)...(19): siRNA sense strand
cauauucagcuauuuguug

SEQ ID NO: 1833942 - RNA, 19 nt, Homo sapiens
  misc_RNA (1)...(19): siRNA sense strand
aauuggagauguuuacuuc

SEQ ID NO: 1833943 - RNA, 19 nt, Homo sapiens
  misc_RNA (1)...(19): siRNA sense strand
cacacaaagguaaaucuua

SEQ ID NO: 1833944 - RNA, 19 nt, Homo sapiens
  misc_RNA (1)...(19): siRNA sense strand
ucagagcucacacaagaaa

SEQ ID NO: 1833945 - RNA, 19 nt, Homo sapiens
  misc_RNA (1)...(19): siRNA sense strand
agauauaaccgaugccaaa

SEQ ID NO: 1833946 - RNA, 19 nt, Homo sapiens
  misc_RNA (1)...(19): siRNA sense strand
acaaccaacugacauccaa

SEQ ID NO: 1833947 - RNA, 19 nt, Homo sapiens
  misc_RNA (1)...(19): siRNA sense strand
gaggaagggauucgauuuc

SEQ ID NO: 1833948 - RNA, 19 nt, Homo sapiens
  misc_RNA (1)...(19): siRNA sense strand
caguaacaguggaaacaga

SEQ ID NO: 1833949 - RNA, 19 nt, Homo sapiens
  misc_RNA (1)...(19): siRNA sense strand
gucauaaauucccucgaaa

SEQ ID NO: 1833950 - RNA, 19 nt, Homo sapiens
  misc_RNA (1)...(19): siRNA sense strand
agacacagagccaguagaa

SEQ ID NO: 1833951 - RNA, 19 nt, Homo sapiens
  misc_RNA (1)...(19): siRNA sense strand
uauaaccgaugccaaaggu

SEQ ID NO: 1833952 - RNA, 19 nt, Homo sapiens
  misc_RNA (1)...(19): siRNA sense strand
aaacagcgaggcccuugaa

SEQ ID NO: 1833953 - RNA, 19 nt, Homo sapiens
  misc_RNA (1)...(19): siRNA sense strand
cagagccaguagaauuaaa

SEQ ID NO: 1833954 - RNA, 19 nt, Homo sapiens
  misc_RNA (1)...(19): siRNA sense strand
acacuuaugccauuacugu

SEQ ID NO: 1833955 - RNA, 19 nt, Homo sapiens
  misc_RNA (1)...(19): siRNA sense strand
uggaacacauguauacaca

SEQ ID NO: 1833956 - RNA, 19 nt, Homo sapiens
  misc_RNA (1)...(19): siRNA sense strand
cacaagaacacuuagacuu

SEQ ID NO: 1833957 - RNA, 19 nt, Homo sapiens
  misc_RNA (1)...(19): siRNA sense strand
caguugcaguugucucuug

SEQ ID NO: 1833958 - RNA, 19 nt, Homo sapiens
  misc_RNA (1)...(19): siRNA sense strand
gccauagccuuguucuucu

SEQ ID NO: 1833959 - RNA, 19 nt, Homo sapiens
  misc_RNA (1)...(19): siRNA sense strand
uggagauguuuacuucaaa

SEQ ID NO: 1833960 - RNA, 19 nt, Homo sapiens
  misc_RNA (1)...(19): siRNA sense strand
gaucagucaaguaucuuug

SEQ ID NO: 1833961 - RNA, 19 nt, Homo sapiens
  misc_RNA (1)...(19): siRNA sense strand
ucagcuccuucauuguuaa

SEQ ID NO: 1833962 - RNA, 19 nt, Homo sapiens
  misc_RNA (1)...(19): siRNA sense strand
gaaaacagugucaaaauac

SEQ ID NO: 1833963 - RNA, 19 nt, Homo sapiens
  misc_RNA (1)...(19): siRNA sense strand
uuucucacauugcaacuga

SEQ ID NO: 1833964 - RNA, 19 nt, Homo sapiens
  misc_RNA (1)...(19): siRNA sense strand
ugugcaguccucaaauuua

SEQ ID NO: 1833965 - RNA, 19 nt, Homo sapiens
  misc_RNA (1)...(19): siRNA sense strand
uaaugaccuuggugaagug

SEQ ID NO: 1833966 - RNA, 19 nt, Homo sapiens
  misc_RNA (1)...(19): siRNA sense strand
ccagagauuucagccauac

SEQ ID NO: 1833967 - RNA, 19 nt, Homo sapiens
  misc_RNA (1)...(19): siRNA sense strand
acagagccuuugcagauca

SEQ ID NO: 1833968 - RNA, 19 nt, Homo sapiens
  misc_RNA (1)...(19): siRNA sense strand
cucagcuccuucauuguua

SEQ ID NO: 1833969 - RNA, 19 nt, Homo sapiens
  misc_RNA (1)...(19): siRNA sense strand
ccgacuaccuuucucacau

SEQ ID NO: 1833970 - RNA, 19 nt, Homo sapiens
  misc_RNA (1)...(19): siRNA sense strand
uuggagauguuuacuucaa

SEQ ID NO: 1833971 - RNA, 19 nt, Homo sapiens
  misc_RNA (1)...(19): siRNA sense strand
gacuaccuuucucacauug

SEQ ID NO: 1833972 - RNA, 19 nt, Homo sapiens
  misc_RNA (1)...(19): siRNA sense strand
gaaagggccaaaacagauu

SEQ ID NO: 1833973 - RNA, 19 nt, Homo sapiens
  misc_RNA (1)...(19): siRNA sense strand
gcauuggcccagagauuuc

SEQ ID NO: 1833974 - RNA, 19 nt, Homo sapiens
  misc_RNA (1)...(19): siRNA sense strand
uguauacacacaaagguaa

SEQ ID NO: 1833975 - RNA, 19 nt, Homo sapiens
  misc_RNA (1)...(19): siRNA sense strand
ggacuggaggucaaagaag

SEQ ID NO: 1833976 - RNA, 19 nt, Homo sapiens
  misc_RNA (1)...(19): siRNA sense strand
cuaaggcaacaucuccaua

SEQ ID NO: 1833977 - RNA, 19 nt, Homo sapiens
  misc_RNA (1)...(19): siRNA sense strand
cccagagauuucagccaua

SEQ ID NO: 1833978 - RNA, 19 nt, Homo sapiens
  misc_RNA (1)...(19): siRNA sense strand
ggaaagggccaaaacagau

SEQ ID NO: 1833979 - RNA, 19 nt, Homo sapiens
  misc_RNA (1)...(19): siRNA sense strand
guauacacacaaagguaaa

SEQ ID NO: 1833980 - RNA, 19 nt, Homo sapiens
  misc_RNA (1)...(19): siRNA sense strand
ucgaaagagccaauuguug

SEQ ID NO: 1833981 - RNA, 19 nt, Homo sapiens
  misc_RNA (1)...(19): siRNA sense strand
uugcagaucagucaaguau

SEQ ID NO: 1833982 - RNA, 19 nt, Homo sapiens
  misc_RNA (1)...(19): siRNA sense strand
gcaacugaaaugaaucaag

SEQ ID NO: 1833983 - RNA, 19 nt, Homo sapiens
  misc_RNA (1)...(19): siRNA sense strand
aacaaggacuggaggucaa

SEQ ID NO: 1833984 - RNA, 19 nt, Homo sapiens
  misc_RNA (1)...(19): siRNA sense strand
cagcgaggcccuugaaugc

SEQ ID NO: 1833985 - RNA, 19 nt, Homo sapiens
  misc_RNA (1)...(19): siRNA sense strand
gaaaugaaucaaguguucu

SEQ ID NO: 1833986 - RNA, 19 nt, Homo sapiens
  misc_RNA (1)...(19): siRNA sense strand
gacauauucagcuauuugu

SEQ ID NO: 1833987 - RNA, 19 nt, Homo sapiens
  misc_RNA (1)...(19): siRNA sense strand
agcuauuuguugcacauua

SEQ ID NO: 1833988 - RNA, 19 nt, Homo sapiens
  misc_RNA (1)...(19): siRNA sense strand
caauuggagauguuuacuu

SEQ ID NO: 1833989 - RNA, 19 nt, Homo sapiens
  misc_RNA (1)...(19): siRNA sense strand
uaaggcaacaucuccauac

SEQ ID NO: 1833990 - RNA, 19 nt, Homo sapiens
  misc_RNA (1)...(19): siRNA sense strand
aagguuugguaaugcauug

SEQ ID NO: 1833991 - RNA, 19 nt, Homo sapiens
  misc_RNA (1)...(19): siRNA sense strand
acacacaaagguaaaucuu

SEQ ID NO: 1833992 - RNA, 19 nt, Homo sapiens
  misc_RNA (1)...(19): siRNA sense strand
cggugucccugcuuccauu

SEQ ID NO: 1833993 - RNA, 19 nt, Homo sapiens
  misc_RNA (1)...(19): siRNA sense strand
uauauggcauucagaucuc

SEQ ID NO: 1833994 - RNA, 19 nt, Homo sapiens
  misc_RNA (1)...(19): siRNA sense strand
gauauaaccgaugccaaag

SEQ ID NO: 1833995 - RNA, 19 nt, Homo sapiens
  misc_RNA (1)...(19): siRNA sense strand
ucaagcaggagagauguga

SEQ ID NO: 1833996 - RNA, 19 nt, Homo sapiens
  misc_RNA (1)...(19): siRNA sense strand
cacagagccuuugcagauc

SEQ ID NO: 1833997 - RNA, 19 nt, Homo sapiens
  misc_RNA (1)...(19): siRNA sense strand
aaugagcuguaccaucugu

SEQ ID NO: 1833998 - RNA, 19 nt, Homo sapiens
  misc_RNA (1)...(19): siRNA sense strand
cagaaggucuccucaguga

SEQ ID NO: 1833999 - RNA, 19 nt, Homo sapiens
  misc_RNA (1)...(19): siRNA sense strand
uggagaagcuggccaagaa

SEQ ID NO: 1834000 - RNA, 19 nt, Homo sapiens
  misc_RNA (1)...(19): siRNA sense strand
gaaggucuccucagugaug

SEQ ID NO: 1834001 - RNA, 19 nt, Homo sapiens
  misc_RNA (1)...(19): siRNA sense strand
ccaagaaggcggagaagga

SEQ ID NO: 1834002 - RNA, 19 nt, Homo sapiens
  misc_RNA (1)...(19): siRNA sense strand
gcagaucgccgaggagaau

SEQ ID NO: 1834003 - RNA, 19 nt, Homo sapiens
  misc_RNA (1)...(19): siRNA sense strand
gagugcugcuccugucauu

SEQ ID NO: 1834004 - RNA, 19 nt, Homo sapiens
  misc_RNA (1)...(19): siRNA sense strand
gaagaacgaaggugugaac

SEQ ID NO: 1834005 - RNA, 19 nt, Homo sapiens
  misc_RNA (1)...(19): siRNA sense strand
gauacccuguuccaguuga

SEQ ID NO: 1834006 - RNA, 19 nt, Homo sapiens
  misc_RNA (1)...(19): siRNA sense strand
gaccaaagcccuggacaag

SEQ ID NO: 1834007 - RNA, 19 nt, Homo sapiens
  misc_RNA (1)...(19): siRNA sense strand
ccucagugauggacagguu

SEQ ID NO: 1834008 - RNA, 19 nt, Homo sapiens
  misc_RNA (1)...(19): siRNA sense strand
gagaacgccauccgcaaga

SEQ ID NO: 1834009 - RNA, 19 nt, Homo sapiens
  misc_RNA (1)...(19): siRNA sense strand
acgauacccuguuccaguu

SEQ ID NO: 1834010 - RNA, 19 nt, Homo sapiens
  misc_RNA (1)...(19): siRNA sense strand
cauggacgauacccuguuc

SEQ ID NO: 1834011 - RNA, 19 nt, Homo sapiens
  misc_RNA (1)...(19): siRNA sense strand
cggcgaagcagcuggagaa

SEQ ID NO: 1834012 - RNA, 19 nt, Homo sapiens
  misc_RNA (1)...(19): siRNA sense strand
ggagcaggccaaagugaag

SEQ ID NO: 1834013 - RNA, 19 nt, Homo sapiens
  misc_RNA (1)...(19): siRNA sense strand
gugcugcuccugucauugu

SEQ ID NO: 1834014 - RNA, 19 nt, Homo sapiens
  misc_RNA (1)...(19): siRNA sense strand
caccgcgucuugccuuugu

SEQ ID NO: 1834015 - RNA, 19 nt, Homo sapiens
  misc_RNA (1)...(19): siRNA sense strand
gcagguggacagccucauc

SEQ ID NO: 1834016 - RNA, 19 nt, Homo sapiens
  misc_RNA (1)...(19): siRNA sense strand
ugcagaaggucuccucagu

SEQ ID NO: 1834017 - RNA, 19 nt, Homo sapiens
  misc_RNA (1)...(19): siRNA sense strand
gagcaggccaaagugaaga

SEQ ID NO: 1834018 - RNA, 19 nt, Homo sapiens
  misc_RNA (1)...(19): siRNA sense strand
ggaguuggcgucccuucuc

SEQ ID NO: 1834019 - RNA, 19 nt, Homo sapiens
  misc_RNA (1)...(19): siRNA sense strand
gcggagcaggccaaaguga

SEQ ID NO: 1834020 - RNA, 19 nt, Homo sapiens
  misc_RNA (1)...(19): siRNA sense strand
gcaccauggaccugcagaa

SEQ ID NO: 1834021 - RNA, 19 nt, Homo sapiens
  misc_RNA (1)...(19): siRNA sense strand
gaacgccauccgcaagaag

SEQ ID NO: 1834022 - RNA, 19 nt, Homo sapiens
  misc_RNA (1)...(19): siRNA sense strand
agagugugcccguguguau

SEQ ID NO: 1834023 - RNA, 19 nt, Homo sapiens
  misc_RNA (1)...(19): siRNA sense strand
agaacgccauccgcaagaa

SEQ ID NO: 1834024 - RNA, 19 nt, Homo sapiens
  misc_RNA (1)...(19): siRNA sense strand
aagaagaacgaagguguga

SEQ ID NO: 1834025 - RNA, 19 nt, Homo sapiens
  misc_RNA (1)...(19): siRNA sense strand
ugaccaaagcccuggacaa

SEQ ID NO: 1834026 - RNA, 19 nt, Homo sapiens
  misc_RNA (1)...(19): siRNA sense strand
gcagcuuggucgguucgau

SEQ ID NO: 1834027 - RNA, 19 nt, Homo sapiens
  misc_RNA (1)...(19): siRNA sense strand
gguggacagccucaucaug

SEQ ID NO: 1834028 - RNA, 19 nt, Homo sapiens
  misc_RNA (1)...(19): siRNA sense strand
gcacagagcacaucaaaug

SEQ ID NO: 1834029 - RNA, 19 nt, Homo sapiens
  misc_RNA (1)...(19): siRNA sense strand
ggucagagccucccuauga

SEQ ID NO: 1834030 - RNA, 19 nt, Homo sapiens
  misc_RNA (1)...(19): siRNA sense strand
caacaggacccucuuucua

SEQ ID NO: 1834031 - RNA, 19 nt, Homo sapiens
  misc_RNA (1)...(19): siRNA sense strand
gagagaaccucgacuuguc

SEQ ID NO: 1834032 - RNA, 19 nt, Homo sapiens
  misc_RNA (1)...(19): siRNA sense strand
ucagucaccucuuacuauu

SEQ ID NO: 1834033 - RNA, 19 nt, Homo sapiens
  misc_RNA (1)...(19): siRNA sense strand
gcacaguauucuuggacaa

SEQ ID NO: 1834034 - RNA, 19 nt, Homo sapiens
  misc_RNA (1)...(19): siRNA sense strand
gacaauuaaugggaaguuu

SEQ ID NO: 1834035 - RNA, 19 nt, Homo sapiens
  misc_RNA (1)...(19): siRNA sense strand
caguauucuuggacaauua

SEQ ID NO: 1834036 - RNA, 19 nt, Homo sapiens
  misc_RNA (1)...(19): siRNA sense strand
cagagcacaucaaauggaa

SEQ ID NO: 1834037 - RNA, 19 nt, Homo sapiens
  misc_RNA (1)...(19): siRNA sense strand
acaggacccucuuucuauu

SEQ ID NO: 1834038 - RNA, 19 nt, Homo sapiens
  misc_RNA (1)...(19): siRNA sense strand
ggagagaaccucgacuugu

SEQ ID NO: 1834039 - RNA, 19 nt, Homo sapiens
  misc_RNA (1)...(19): siRNA sense strand
ucccuucagucaccucuua

SEQ ID NO: 1834040 - RNA, 19 nt, Homo sapiens
  misc_RNA (1)...(19): siRNA sense strand
cagauuacuccaaagcaua

SEQ ID NO: 1834041 - RNA, 19 nt, Homo sapiens
  misc_RNA (1)...(19): siRNA sense strand
gcaggacccuaugaaugug

SEQ ID NO: 1834042 - RNA, 19 nt, Homo sapiens
  misc_RNA (1)...(19): siRNA sense strand
agucaccucuuacuauuca

SEQ ID NO: 1834043 - RNA, 19 nt, Homo sapiens
  misc_RNA (1)...(19): siRNA sense strand
aaugggaaguuucagcuau

SEQ ID NO: 1834044 - RNA, 19 nt, Homo sapiens
  misc_RNA (1)...(19): siRNA sense strand
ggacaauuaaugggaaguu

SEQ ID NO: 1834045 - RNA, 19 nt, Homo sapiens
  misc_RNA (1)...(19): siRNA sense strand
ucagauuacuccaaagcau

SEQ ID NO: 1834046 - RNA, 19 nt, Homo sapiens
  misc_RNA (1)...(19): siRNA sense strand
caauuaaugggaaguuuca

SEQ ID NO: 1834047 - RNA, 19 nt, Homo sapiens
  misc_RNA (1)...(19): siRNA sense strand
acaguauucuuggacaauu

SEQ ID NO: 1834048 - RNA, 19 nt, Homo sapiens
  misc_RNA (1)...(19): siRNA sense strand
caccagcacaguauucuug

SEQ ID NO: 1834049 - RNA, 19 nt, Homo sapiens
  misc_RNA (1)...(19): siRNA sense strand
ucccucagauuacuccaaa

SEQ ID NO: 1834050 - RNA, 19 nt, Homo sapiens
  misc_RNA (1)...(19): siRNA sense strand
uaacccaccagcacaguau

SEQ ID NO: 1834051 - RNA, 19 nt, Homo sapiens
  misc_RNA (1)...(19): siRNA sense strand
aacaggacccucuuucuau

SEQ ID NO: 1834052 - RNA, 19 nt, Homo sapiens
  misc_RNA (1)...(19): siRNA sense strand
cucuuuaucccucagauua

SEQ ID NO: 1834053 - RNA, 19 nt, Homo sapiens
  misc_RNA (1)...(19): siRNA sense strand
caucuccagcagcaacuua

SEQ ID NO: 1834054 - RNA, 19 nt, Homo sapiens
  misc_RNA (1)...(19): siRNA sense strand
caggacccucuuucuauuu

SEQ ID NO: 1834055 - RNA, 19 nt, Homo sapiens
  misc_RNA (1)...(19): siRNA sense strand
agauuacuccaaagcauaa

SEQ ID NO: 1834056 - RNA, 19 nt, Homo sapiens
  misc_RNA (1)...(19): siRNA sense strand
caggagagaaccucgacuu

SEQ ID NO: 1834057 - RNA, 19 nt, Homo sapiens
  misc_RNA (1)...(19): siRNA sense strand
uuucagcuaucaggacaaa

SEQ ID NO: 1834058 - RNA, 19 nt, Homo sapiens
  misc_RNA (1)...(19): siRNA sense strand
ugcaggacccuaugaaugu

SEQ ID NO: 1834059 - RNA, 19 nt, Homo sapiens
  misc_RNA (1)...(19): siRNA sense strand
uaugcuugcucugcucgua

SEQ ID NO: 1834060 - RNA, 19 nt, Homo sapiens
  misc_RNA (1)...(19): siRNA sense strand
aggacccucuuucuauuug

SEQ ID NO: 1834061 - RNA, 19 nt, Homo sapiens
  misc_RNA (1)...(19): siRNA sense strand
cugcaggacccuaugaaug

SEQ ID NO: 1834062 - RNA, 19 nt, Homo sapiens
  misc_RNA (1)...(19): siRNA sense strand
cugcacagagcacaucaaa

SEQ ID NO: 1834063 - RNA, 19 nt, Homo sapiens
  misc_RNA (1)...(19): siRNA sense strand
ccagaccuccccagaauuu

SEQ ID NO: 1834064 - RNA, 19 nt, Homo sapiens
  misc_RNA (1)...(19): siRNA sense strand
acagagcacaucaaaugga

SEQ ID NO: 1834065 - RNA, 19 nt, Homo sapiens
  misc_RNA (1)...(19): siRNA sense strand
gcgaggaaagcuccacauc

SEQ ID NO: 1834066 - RNA, 19 nt, Homo sapiens
  misc_RNA (1)...(19): siRNA sense strand
ccagcacaguauucuugga

SEQ ID NO: 1834067 - RNA, 19 nt, Homo sapiens
  misc_RNA (1)...(19): siRNA sense strand
caaagcauaaugggcucua

SEQ ID NO: 1834068 - RNA, 19 nt, Homo sapiens
  misc_RNA (1)...(19): siRNA sense strand
gcucuuuaucccucagauu

SEQ ID NO: 1834069 - RNA, 19 nt, Homo sapiens
  misc_RNA (1)...(19): siRNA sense strand
uaaugggaaguuucagcua

SEQ ID NO: 1834070 - RNA, 19 nt, Homo sapiens
  misc_RNA (1)...(19): siRNA sense strand
guccagaccuccccagaau

SEQ ID NO: 1834071 - RNA, 19 nt, Homo sapiens
  misc_RNA (1)...(19): siRNA sense strand
ccaacaggacccucuuucu

SEQ ID NO: 1834072 - RNA, 19 nt, Homo sapiens
  misc_RNA (1)...(19): siRNA sense strand
ggacccucuuucuauuugg

SEQ ID NO: 1834073 - RNA, 19 nt, Homo sapiens
  misc_RNA (1)...(19): siRNA sense strand
gcacacaccucaucacuug

SEQ ID NO: 1834074 - RNA, 19 nt, Homo sapiens
  misc_RNA (1)...(19): siRNA sense strand
caacaggacccucuuuaua

SEQ ID NO: 1834075 - RNA, 19 nt, Homo sapiens
  misc_RNA (1)...(19): siRNA sense strand
ggucagagccucccuauga

SEQ ID NO: 1834076 - RNA, 19 nt, Homo sapiens
  misc_RNA (1)...(19): siRNA sense strand
gaaagaguauauuccaaug

SEQ ID NO: 1834077 - RNA, 19 nt, Homo sapiens
  misc_RNA (1)...(19): siRNA sense strand
gaaucuugcuggcuacauu

SEQ ID NO: 1834078 - RNA, 19 nt, Homo sapiens
  misc_RNA (1)...(19): siRNA sense strand
cauggaggcugugaucuua

SEQ ID NO: 1834079 - RNA, 19 nt, Homo sapiens
  misc_RNA (1)...(19): siRNA sense strand
gaagagaaagaguauauuc

SEQ ID NO: 1834080 - RNA, 19 nt, Homo sapiens
  misc_RNA (1)...(19): siRNA sense strand
gagaaagaguauauuccaa

SEQ ID NO: 1834081 - RNA, 19 nt, Homo sapiens
  misc_RNA (1)...(19): siRNA sense strand
gaaauacggaacccaguga

SEQ ID NO: 1834082 - RNA, 19 nt, Homo sapiens
  misc_RNA (1)...(19): siRNA sense strand
gcacaauauucuuggacaa

SEQ ID NO: 1834083 - RNA, 19 nt, Homo sapiens
  misc_RNA (1)...(19): siRNA sense strand
guagacggucaaagaauua

SEQ ID NO: 1834084 - RNA, 19 nt, Homo sapiens
  misc_RNA (1)...(19): siRNA sense strand
acaggacccucuuuauauu

SEQ ID NO: 1834085 - RNA, 19 nt, Homo sapiens
  misc_RNA (1)...(19): siRNA sense strand
acaaagggcaaaugacaua

SEQ ID NO: 1834086 - RNA, 19 nt, Homo sapiens
  misc_RNA (1)...(19): siRNA sense strand
guacaaagggcaaaugaca

SEQ ID NO: 1834087 - RNA, 19 nt, Homo sapiens
  misc_RNA (1)...(19): siRNA sense strand
gacaauuaaugggaaguuu

SEQ ID NO: 1834088 - RNA, 19 nt, Homo sapiens
  misc_RNA (1)...(19): siRNA sense strand
cgaugggacuggaggagua

SEQ ID NO: 1834089 - RNA, 19 nt, Homo sapiens
  misc_RNA (1)...(19): siRNA sense strand
ccaaauccaucacagucaa

SEQ ID NO: 1834090 - RNA, 19 nt, Homo sapiens
  misc_RNA (1)...(19): siRNA sense strand
gcucuaugcuugcucuguu

SEQ ID NO: 1834091 - RNA, 19 nt, Homo sapiens
  misc_RNA (1)...(19): siRNA sense strand
gcaaggaaagcuccaaauc

SEQ ID NO: 1834092 - RNA, 19 nt, Homo sapiens
  misc_RNA (1)...(19): siRNA sense strand
gcucacagcaucacuuuua

SEQ ID NO: 1834093 - RNA, 19 nt, Homo sapiens
  misc_RNA (1)...(19): siRNA sense strand
gagaaaaccucuacuuguc

SEQ ID NO: 1834094 - RNA, 19 nt, Homo sapiens
  misc_RNA (1)...(19): siRNA sense strand
aggaguaacuggacauuuc

SEQ ID NO: 1834095 - RNA, 19 nt, Homo sapiens
  misc_RNA (1)...(19): siRNA sense strand
gcccacaacugcccaaguc

SEQ ID NO: 1834096 - RNA, 19 nt, Homo sapiens
  misc_RNA (1)...(19): siRNA sense strand
aguagacggucaaagaauu

SEQ ID NO: 1834097 - RNA, 19 nt, Homo sapiens
  misc_RNA (1)...(19): siRNA sense strand
guaguagacggucaaagaa

SEQ ID NO: 1834098 - RNA, 19 nt, Homo sapiens
  misc_RNA (1)...(19): siRNA sense strand
aaggaaagcuccaaaucca

SEQ ID NO: 1834099 - RNA, 19 nt, Homo sapiens
  misc_RNA (1)...(19): siRNA sense strand
cagcaucacuuuuaaacuu

SEQ ID NO: 1834100 - RNA, 19 nt, Homo sapiens
  misc_RNA (1)...(19): siRNA sense strand
ggaagagaaagaguauauu

SEQ ID NO: 1834101 - RNA, 19 nt, Homo sapiens
  misc_RNA (1)...(19): siRNA sense strand
acccuucauucaccuauua

SEQ ID NO: 1834102 - RNA, 19 nt, Homo sapiens
  misc_RNA (1)...(19): siRNA sense strand
uguaguagacggucaaaga

SEQ ID NO: 1834103 - RNA, 19 nt, Homo sapiens
  misc_RNA (1)...(19): siRNA sense strand
acauuucaccuucaccuua

SEQ ID NO: 1834104 - RNA, 19 nt, Homo sapiens
  misc_RNA (1)...(19): siRNA sense strand
ugcaggauccuacaccuua

SEQ ID NO: 1834105 - RNA, 19 nt, Homo sapiens
  misc_RNA (1)...(19): siRNA sense strand
aacaggacccucuuuauau

SEQ ID NO: 1834106 - RNA, 19 nt, Homo sapiens
  misc_RNA (1)...(19): siRNA sense strand
gcccagccacccaaaguuu

SEQ ID NO: 1834107 - RNA, 19 nt, Homo sapiens
  misc_RNA (1)...(19): siRNA sense strand
uaacuggacauuucaccuu

SEQ ID NO: 1834108 - RNA, 19 nt, Homo sapiens
  misc_RNA (1)...(19): siRNA sense strand
uggaagagaaagaguauau

SEQ ID NO: 1834109 - RNA, 19 nt, Homo sapiens
  misc_RNA (1)...(19): siRNA sense strand
aaugggaaguuucagcuau

SEQ ID NO: 1834110 - RNA, 19 nt, Homo sapiens
  misc_RNA (1)...(19): siRNA sense strand
ccaacaggacccucuuuau

SEQ ID NO: 1834111 - RNA, 19 nt, Homo sapiens
  misc_RNA (1)...(19): siRNA sense strand
ggaguaacuggacauuuca

SEQ ID NO: 1834112 - RNA, 19 nt, Homo sapiens
  misc_RNA (1)...(19): siRNA sense strand
aagaguauauuccaaugca

SEQ ID NO: 1834113 - RNA, 19 nt, Homo sapiens
  misc_RNA (1)...(19): siRNA sense strand
ggacaauuaaugggaaguu

SEQ ID NO: 1834114 - RNA, 19 nt, Homo sapiens
  misc_RNA (1)...(19): siRNA sense strand
ggagaaaaccucuacuugu

SEQ ID NO: 1834115 - RNA, 19 nt, Homo sapiens
  misc_RNA (1)...(19): siRNA sense strand
caauuaaugggaaguuuca

SEQ ID NO: 1834116 - RNA, 19 nt, Homo sapiens
  misc_RNA (1)...(19): siRNA sense strand
gacggucaaagaauuauau

SEQ ID NO: 1834117 - RNA, 19 nt, Homo sapiens
  misc_RNA (1)...(19): siRNA sense strand
caucccugcugauccagaa

SEQ ID NO: 1834118 - RNA, 19 nt, Homo sapiens
  misc_RNA (1)...(19): siRNA sense strand
gaaagcuccaaauccauca

SEQ ID NO: 1834119 - RNA, 19 nt, Homo sapiens
  misc_RNA (1)...(19): siRNA sense strand
gaggaguaacuggacauuu

SEQ ID NO: 1834120 - RNA, 19 nt, Homo sapiens
  misc_RNA (1)...(19): siRNA sense strand
gcaggauccuacaccuuac

SEQ ID NO: 1834121 - RNA, 19 nt, Homo sapiens
  misc_RNA (1)...(19): siRNA sense strand
caucuccagcagcaacuua

SEQ ID NO: 1834122 - RNA, 19 nt, Homo sapiens
  misc_RNA (1)...(19): siRNA sense strand
cuauuaccguucaggagaa

SEQ ID NO: 1834123 - RNA, 19 nt, Homo sapiens
  misc_RNA (1)...(19): siRNA sense strand
cuacaccuuacacaucaua

SEQ ID NO: 1834124 - RNA, 19 nt, Homo sapiens
  misc_RNA (1)...(19): siRNA sense strand
caaauccaucacagucaaa

SEQ ID NO: 1834125 - RNA, 19 nt, Homo sapiens
  misc_RNA (1)...(19): siRNA sense strand
uaugcuugcucuguucgua

SEQ ID NO: 1834126 - RNA, 19 nt, Homo sapiens
  misc_RNA (1)...(19): siRNA sense strand
uaacccacgggcacaauau

SEQ ID NO: 1834127 - RNA, 19 nt, Homo sapiens
  misc_RNA (1)...(19): siRNA sense strand
gauccuacaccuuacacau

SEQ ID NO: 1834128 - RNA, 19 nt, Homo sapiens
  misc_RNA (1)...(19): siRNA sense strand
caaggaaagcuccaaaucc

SEQ ID NO: 1834129 - RNA, 19 nt, Homo sapiens
  misc_RNA (1)...(19): siRNA sense strand
ggaggaguaacuggacauu

SEQ ID NO: 1834130 - RNA, 19 nt, Homo sapiens
  misc_RNA (1)...(19): siRNA sense strand
uuucagcuaucaggacaaa

SEQ ID NO: 1834131 - RNA, 19 nt, Homo sapiens
  misc_RNA (1)...(19): siRNA sense strand
gcauuuacccuucauucac

SEQ ID NO: 1834132 - RNA, 19 nt, Homo sapiens
  misc_RNA (1)...(19): siRNA sense strand
ccauggaggcugugaucuu

SEQ ID NO: 1834133 - RNA, 19 nt, Homo sapiens
  misc_RNA (1)...(19): siRNA sense strand
cagcauuuacccuucauuc

SEQ ID NO: 1834134 - RNA, 19 nt, Homo sapiens
  misc_RNA (1)...(19): siRNA sense strand
cauuucaccuucaccuuac

SEQ ID NO: 1834135 - RNA, 19 nt, Homo sapiens
  misc_RNA (1)...(19): siRNA sense strand
uccuacaccuuacacauca

SEQ ID NO: 1834136 - RNA, 19 nt, Homo sapiens
  misc_RNA (1)...(19): siRNA sense strand
caacugcccaagucacgau

SEQ ID NO: 1834137 - RNA, 19 nt, Homo sapiens
  misc_RNA (1)...(19): siRNA sense strand
gaugggacuggaggaguaa

SEQ ID NO: 1834138 - RNA, 19 nt, Homo sapiens
  misc_RNA (1)...(19): siRNA sense strand
cuaacccacgggcacaaua

SEQ ID NO: 1834139 - RNA, 19 nt, Homo sapiens
  misc_RNA (1)...(19): siRNA sense strand
agagaaagaguauauucca

SEQ ID NO: 1834140 - RNA, 19 nt, Homo sapiens
  misc_RNA (1)...(19): siRNA sense strand
uaaugggaaguuucagcua

SEQ ID NO: 1834141 - RNA, 19 nt, Homo sapiens
  misc_RNA (1)...(19): siRNA sense strand
cgacuccagccgcaagcua

SEQ ID NO: 1834142 - RNA, 19 nt, Homo sapiens
  misc_RNA (1)...(19): siRNA sense strand
cugcccaagucacgauuga

SEQ ID NO: 1834143 - RNA, 19 nt, Homo sapiens
  misc_RNA (1)...(19): siRNA sense strand
ggacaaaagcucucuaucc

SEQ ID NO: 1834144 - RNA, 19 nt, Homo sapiens
  misc_RNA (1)...(19): siRNA sense strand
ggauguucuucuacuuguc

SEQ ID NO: 1834145 - RNA, 19 nt, Homo sapiens
  misc_RNA (1)...(19): siRNA sense strand
accaacaggacccucuuua

SEQ ID NO: 1834146 - RNA, 19 nt, Homo sapiens
  misc_RNA (1)...(19): siRNA sense strand
gcccaagucacgauugaag

SEQ ID NO: 1834147 - RNA, 19 nt, Homo sapiens
  misc_RNA (1)...(19): siRNA sense strand
aggauguucuucuacuugu

SEQ ID NO: 1834148 - RNA, 19 nt, Homo sapiens
  misc_RNA (1)...(19): siRNA sense strand
ucagggaccucuaccauua

SEQ ID NO: 1834149 - RNA, 19 nt, Homo sapiens
  misc_RNA (1)...(19): siRNA sense strand
ggucagagccucccuauga

SEQ ID NO: 1834150 - RNA, 19 nt, Homo sapiens
  misc_RNA (1)...(19): siRNA sense strand
gaaacaguauauuccaaug

SEQ ID NO: 1834151 - RNA, 19 nt, Homo sapiens
  misc_RNA (1)...(19): siRNA sense strand
caacaggacccucuaccua

SEQ ID NO: 1834152 - RNA, 19 nt, Homo sapiens
  misc_RNA (1)...(19): siRNA sense strand
gaacuacaccuacauuugg

SEQ ID NO: 1834153 - RNA, 19 nt, Homo sapiens
  misc_RNA (1)...(19): siRNA sense strand
guaguagacggucaaauaa

SEQ ID NO: 1834154 - RNA, 19 nt, Homo sapiens
  misc_RNA (1)...(19): siRNA sense strand
gagaaacaguauauuccaa

SEQ ID NO: 1834155 - RNA, 19 nt, Homo sapiens
  misc_RNA (1)...(19): siRNA sense strand
uguaguagacggucaaaua

SEQ ID NO: 1834156 - RNA, 19 nt, Homo sapiens
  misc_RNA (1)...(19): siRNA sense strand
guagacggucaaauaauua

SEQ ID NO: 1834157 - RNA, 19 nt, Homo sapiens
  misc_RNA (1)...(19): siRNA sense strand
cacaggauccuacacuuua

SEQ ID NO: 1834158 - RNA, 19 nt, Homo sapiens
  misc_RNA (1)...(19): siRNA sense strand
gaaacaggacccuaucaau

SEQ ID NO: 1834159 - RNA, 19 nt, Homo sapiens
  misc_RNA (1)...(19): siRNA sense strand
aguagacggucaaauaauu

SEQ ID NO: 1834160 - RNA, 19 nt, Homo sapiens
  misc_RNA (1)...(19): siRNA sense strand
gacaauuaaugggaaguuu

SEQ ID NO: 1834161 - RNA, 19 nt, Homo sapiens
  misc_RNA (1)...(19): siRNA sense strand
gcacaguauucuuggacaa

SEQ ID NO: 1834162 - RNA, 19 nt, Homo sapiens
  misc_RNA (1)...(19): siRNA sense strand
aaacaggacccuaucaaug

SEQ ID NO: 1834163 - RNA, 19 nt, Homo sapiens
  misc_RNA (1)...(19): siRNA sense strand
caguauucuuggacaauua

SEQ ID NO: 1834164 - RNA, 19 nt, Homo sapiens
  misc_RNA (1)...(19): siRNA sense strand
gcaaggaaagcuccaaauc

SEQ ID NO: 1834165 - RNA, 19 nt, Homo sapiens
  misc_RNA (1)...(19): siRNA sense strand
ugaugggacuggaggagua

SEQ ID NO: 1834166 - RNA, 19 nt, Homo sapiens
  misc_RNA (1)...(19): siRNA sense strand
gcucacagcaucacuuuua

SEQ ID NO: 1834167 - RNA, 19 nt, Homo sapiens
  misc_RNA (1)...(19): siRNA sense strand
acaggacccucuaccuauu

SEQ ID NO: 1834168 - RNA, 19 nt, Homo sapiens
  misc_RNA (1)...(19): siRNA sense strand
ggaccucuaccauuauguu

SEQ ID NO: 1834169 - RNA, 19 nt, Homo sapiens
  misc_RNA (1)...(19): siRNA sense strand
gacgagaaacaguauauuc

SEQ ID NO: 1834170 - RNA, 19 nt, Homo sapiens
  misc_RNA (1)...(19): siRNA sense strand
cagcaucacuuuuaaacuu

SEQ ID NO: 1834171 - RNA, 19 nt, Homo sapiens
  misc_RNA (1)...(19): siRNA sense strand
gacacaggauccuacacuu

SEQ ID NO: 1834172 - RNA, 19 nt, Homo sapiens
  misc_RNA (1)...(19): siRNA sense strand
gaccucuaccauuauguua

SEQ ID NO: 1834173 - RNA, 19 nt, Homo sapiens
  misc_RNA (1)...(19): siRNA sense strand
gaaaacaggauccucauuc

SEQ ID NO: 1834174 - RNA, 19 nt, Homo sapiens
  misc_RNA (1)...(19): siRNA sense strand
ggacgagaaacaguauauu

SEQ ID NO: 1834175 - RNA, 19 nt, Homo sapiens
  misc_RNA (1)...(19): siRNA sense strand
aaacaggauccucauucua

SEQ ID NO: 1834176 - RNA, 19 nt, Homo sapiens
  misc_RNA (1)...(19): siRNA sense strand
caagcuaccugugguggau

SEQ ID NO: 1834177 - RNA, 19 nt, Homo sapiens
  misc_RNA (1)...(19): siRNA sense strand
acacaggauccuacacuuu

SEQ ID NO: 1834178 - RNA, 19 nt, Homo sapiens
  misc_RNA (1)...(19): siRNA sense strand
caucaccaucaauaacuua

SEQ ID NO: 1834179 - RNA, 19 nt, Homo sapiens
  misc_RNA (1)...(19): siRNA sense strand
aggaguaacuggacguuuc

SEQ ID NO: 1834180 - RNA, 19 nt, Homo sapiens
  misc_RNA (1)...(19): siRNA sense strand
gaagacacaggauccuaca

SEQ ID NO: 1834181 - RNA, 19 nt, Homo sapiens
  misc_RNA (1)...(19): siRNA sense strand
ggacaauuaaugggaaguu

SEQ ID NO: 1834182 - RNA, 19 nt, Homo sapiens
  misc_RNA (1)...(19): siRNA sense strand
uaacuggacguuucaccuu

SEQ ID NO: 1834183 - RNA, 19 nt, Homo sapiens
  misc_RNA (1)...(19): siRNA sense strand
ccagggagaauaaggaugu

SEQ ID NO: 1834184 - RNA, 19 nt, Homo sapiens
  misc_RNA (1)...(19): siRNA sense strand
caauuaaugggaaguuuca

SEQ ID NO: 1834185 - RNA, 19 nt, Homo sapiens
  misc_RNA (1)...(19): siRNA sense strand
agaacuacaccuacauuug

SEQ ID NO: 1834186 - RNA, 19 nt, Homo sapiens
  misc_RNA (1)...(19): siRNA sense strand
ccucuaccauuauguuaca

SEQ ID NO: 1834187 - RNA, 19 nt, Homo sapiens
  misc_RNA (1)...(19): siRNA sense strand
acaguauucuuggacaauu

SEQ ID NO: 1834188 - RNA, 19 nt, Homo sapiens
  misc_RNA (1)...(19): siRNA sense strand
ggaguaacuggacguuuca

SEQ ID NO: 1834189 - RNA, 19 nt, Homo sapiens
  misc_RNA (1)...(19): siRNA sense strand
ggcuacaucugguacaaag

SEQ ID NO: 1834190 - RNA, 19 nt, Homo sapiens
  misc_RNA (1)...(19): siRNA sense strand
ugaaacaggacccuaucaa

SEQ ID NO: 1834191 - RNA, 19 nt, Homo sapiens
  misc_RNA (1)...(19): siRNA sense strand
caucccugcugauccagaa

SEQ ID NO: 1834192 - RNA, 19 nt, Homo sapiens
  misc_RNA (1)...(19): siRNA sense strand
caccaucaauaacuuaaac

SEQ ID NO: 1834193 - RNA, 19 nt, Homo sapiens
  misc_RNA (1)...(19): siRNA sense strand
gauccuacacuuuacacau

SEQ ID NO: 1834194 - RNA, 19 nt, Homo sapiens
  misc_RNA (1)...(19): siRNA sense strand
uaacccaccggcacaguau

SEQ ID NO: 1834195 - RNA, 19 nt, Homo sapiens
  misc_RNA (1)...(19): siRNA sense strand
aacaggacccuaucaaugu

SEQ ID NO: 1834196 - RNA, 19 nt, Homo sapiens
  misc_RNA (1)...(19): siRNA sense strand
cacagcauauaaccuggaa

SEQ ID NO: 1834197 - RNA, 19 nt, Homo sapiens
  misc_RNA (1)...(19): siRNA sense strand
cuacaucugguacaaagga

SEQ ID NO: 1834198 - RNA, 19 nt, Homo sapiens
  misc_RNA (1)...(19): siRNA sense strand
cguuucaccuucaccuuau

SEQ ID NO: 1834199 - RNA, 19 nt, Homo sapiens
  misc_RNA (1)...(19): siRNA sense strand
cagcauauaaccuggaaag

SEQ ID NO: 1834200 - RNA, 19 nt, Homo sapiens
  misc_RNA (1)...(19): siRNA sense strand
acaggacccuaucaaugug

SEQ ID NO: 1834201 - RNA, 19 nt, Homo sapiens
  misc_RNA (1)...(19): siRNA sense strand
aaaugaaacaggacccuau

SEQ ID NO: 1834202 - RNA, 19 nt, Homo sapiens
  misc_RNA (1)...(19): siRNA sense strand
caaggaaagcuccaaaucc

SEQ ID NO: 1834203 - RNA, 19 nt, Homo sapiens
  misc_RNA (1)...(19): siRNA sense strand
aacaguauauuccaaugca

SEQ ID NO: 1834204 - RNA, 19 nt, Homo sapiens
  misc_RNA (1)...(19): siRNA sense strand
guuucaccuucaccuuaua

SEQ ID NO: 1834205 - RNA, 19 nt, Homo sapiens
  misc_RNA (1)...(19): siRNA sense strand
uaccugugguggaugaaug

SEQ ID NO: 1834206 - RNA, 19 nt, Homo sapiens
  misc_RNA (1)...(19): siRNA sense strand
gaugggacuggaggaguaa

SEQ ID NO: 1834207 - RNA, 19 nt, Homo sapiens
  misc_RNA (1)...(19): siRNA sense strand
ccagaccuccccagaauuu

SEQ ID NO: 1834208 - RNA, 19 nt, Homo sapiens
  misc_RNA (1)...(19): siRNA sense strand
cgagaaacaguauauucca

SEQ ID NO: 1834209 - RNA, 19 nt, Homo sapiens
  misc_RNA (1)...(19): siRNA sense strand
gaaagggcuccugcucaca

SEQ ID NO: 1834210 - RNA, 19 nt, Homo sapiens
  misc_RNA (1)...(19): siRNA sense strand
caccggcacaguauucuug

SEQ ID NO: 1834211 - RNA, 19 nt, Homo sapiens
  misc_RNA (1)...(19): siRNA sense strand
acaucaccaucaauaacuu

SEQ ID NO: 1834212 - RNA, 19 nt, Homo sapiens
  misc_RNA (1)...(19): siRNA sense strand
cuacaucaccaucaauaac

SEQ ID NO: 1834213 - RNA, 19 nt, Homo sapiens
  misc_RNA (1)...(19): siRNA sense strand
ccuacaucaccaucaauaa

SEQ ID NO: 1834214 - RNA, 19 nt, Homo sapiens
  misc_RNA (1)...(19): siRNA sense strand
gaggaguaacuggacguuu

SEQ ID NO: 1834215 - RNA, 19 nt, Homo sapiens
  misc_RNA (1)...(19): siRNA sense strand
aacaggacccucuaccuau

SEQ ID NO: 1834216 - RNA, 19 nt, Homo sapiens
  misc_RNA (1)...(19): siRNA sense strand
cuaacccaccggcacagua

SEQ ID NO: 1834217 - RNA, 19 nt, Homo sapiens
  misc_RNA (1)...(19): siRNA sense strand
aaaccaacaggacccucua

SEQ ID NO: 1834218 - RNA, 19 nt, Homo sapiens
  misc_RNA (1)...(19): siRNA sense strand
guccagaccuccccagaau

SEQ ID NO: 1834219 - RNA, 19 nt, Homo sapiens
  misc_RNA (1)...(19): siRNA sense strand
cccuacaucaccaucaaua

SEQ ID NO: 1834220 - RNA, 19 nt, Homo sapiens
  misc_RNA (1)...(19): siRNA sense strand
cuacacuuuacacaucaua

SEQ ID NO: 1834221 - RNA, 19 nt, Homo sapiens
  misc_RNA (1)...(19): siRNA sense strand
acguuucaccuucaccuua

SEQ ID NO: 1834222 - RNA, 19 nt, Homo sapiens
  misc_RNA (1)...(19): siRNA sense strand
ggaagaagauucaauacuu

SEQ ID NO: 1834223 - RNA, 19 nt, Homo sapiens
  misc_RNA (1)...(19): siRNA sense strand
ggagaaaccuuauggaugu

SEQ ID NO: 1834224 - RNA, 19 nt, Homo sapiens
  misc_RNA (1)...(19): siRNA sense strand
ccaaagagcuacagacuug

SEQ ID NO: 1834225 - RNA, 19 nt, Homo sapiens
  misc_RNA (1)...(19): siRNA sense strand
agaagaagcucagggauua

SEQ ID NO: 1834226 - RNA, 19 nt, Homo sapiens
  misc_RNA (1)...(19): siRNA sense strand
ggagaaaccuuaugaaugc

SEQ ID NO: 1834227 - RNA, 19 nt, Homo sapiens
  misc_RNA (1)...(19): siRNA sense strand
ugacagugcuggaggauuu

SEQ ID NO: 1834228 - RNA, 19 nt, Homo sapiens
  misc_RNA (1)...(19): siRNA sense strand
gcucagggauuaccaaguu

SEQ ID NO: 1834229 - RNA, 19 nt, Homo sapiens
  misc_RNA (1)...(19): siRNA sense strand
ggagcuuccuucagcauua

SEQ ID NO: 1834230 - RNA, 19 nt, Homo sapiens
  misc_RNA (1)...(19): siRNA sense strand
caugguaucucaagaagaa

SEQ ID NO: 1834231 - RNA, 19 nt, Homo sapiens
  misc_RNA (1)...(19): siRNA sense strand
agaaaucccucucgaaaga

SEQ ID NO: 1834232 - RNA, 19 nt, Homo sapiens
  misc_RNA (1)...(19): siRNA sense strand
gcucagcccuuauucuuca

SEQ ID NO: 1834233 - RNA, 19 nt, Homo sapiens
  misc_RNA (1)...(19): siRNA sense strand
ugaauguuguggaaguuua

SEQ ID NO: 1834234 - RNA, 19 nt, Homo sapiens
  misc_RNA (1)...(19): siRNA sense strand
uagaagacaugguaucuca

SEQ ID NO: 1834235 - RNA, 19 nt, Homo sapiens
  misc_RNA (1)...(19): siRNA sense strand
gggagaaaccuuaugaaug

SEQ ID NO: 1834236 - RNA, 19 nt, Homo sapiens
  misc_RNA (1)...(19): siRNA sense strand
gcaguuuguugccauccua

SEQ ID NO: 1834237 - RNA, 19 nt, Homo sapiens
  misc_RNA (1)...(19): siRNA sense strand
gggaaguacuaguagaaga

SEQ ID NO: 1834238 - RNA, 19 nt, Homo sapiens
  misc_RNA (1)...(19): siRNA sense strand
gagaagacacaaugcagaa

SEQ ID NO: 1834239 - RNA, 19 nt, Homo sapiens
  misc_RNA (1)...(19): siRNA sense strand
ggccagagacgcacacaaa

SEQ ID NO: 1834240 - RNA, 19 nt, Homo sapiens
  misc_RNA (1)...(19): siRNA sense strand
gggaaaucguauagucaaa

SEQ ID NO: 1834241 - RNA, 19 nt, Homo sapiens
  misc_RNA (1)...(19): siRNA sense strand
gcacugugaugaugauggu

SEQ ID NO: 1834242 - RNA, 19 nt, Homo sapiens
  misc_RNA (1)...(19): siRNA sense strand
gagaucaucauccagagaa

SEQ ID NO: 1834243 - RNA, 19 nt, Homo sapiens
  misc_RNA (1)...(19): siRNA sense strand
caucagagaagacacaaug

SEQ ID NO: 1834244 - RNA, 19 nt, Homo sapiens
  misc_RNA (1)...(19): siRNA sense strand
gaaaucguauagucaaagc

SEQ ID NO: 1834245 - RNA, 19 nt, Homo sapiens
  misc_RNA (1)...(19): siRNA sense strand
gcgaagagggaucaaguau

SEQ ID NO: 1834246 - RNA, 19 nt, Homo sapiens
  misc_RNA (1)...(19): siRNA sense strand
gaaaccuuauggauguguu

SEQ ID NO: 1834247 - RNA, 19 nt, Homo sapiens
  misc_RNA (1)...(19): siRNA sense strand
gcauuagaaucccaugaag

SEQ ID NO: 1834248 - RNA, 19 nt, Homo sapiens
  misc_RNA (1)...(19): siRNA sense strand
gaagacaugguaucucaag

SEQ ID NO: 1834249 - RNA, 19 nt, Homo sapiens
  misc_RNA (1)...(19): siRNA sense strand
gacaugguaucucaagaag

SEQ ID NO: 1834250 - RNA, 19 nt, Homo sapiens
  misc_RNA (1)...(19): siRNA sense strand
gaauguuguggaaguuuaa

SEQ ID NO: 1834251 - RNA, 19 nt, Homo sapiens
  misc_RNA (1)...(19): siRNA sense strand
gaugaugguaggacugaaa

SEQ ID NO: 1834252 - RNA, 19 nt, Homo sapiens
  misc_RNA (1)...(19): siRNA sense strand
cuaaggcacugugaugaug

SEQ ID NO: 1834253 - RNA, 19 nt, Homo sapiens
  misc_RNA (1)...(19): siRNA sense strand
gggcagguuugaaagaaag

SEQ ID NO: 1834254 - RNA, 19 nt, Homo sapiens
  misc_RNA (1)...(19): siRNA sense strand
cgagaacuuugccgucugu

SEQ ID NO: 1834255 - RNA, 19 nt, Homo sapiens
  misc_RNA (1)...(19): siRNA sense strand
caucagagaauccauacug

SEQ ID NO: 1834256 - RNA, 19 nt, Homo sapiens
  misc_RNA (1)...(19): siRNA sense strand
gcuuauuaaucaucagaga

SEQ ID NO: 1834257 - RNA, 19 nt, Homo sapiens
  misc_RNA (1)...(19): siRNA sense strand
guauggguguuccucaaau

SEQ ID NO: 1834258 - RNA, 19 nt, Homo sapiens
  misc_RNA (1)...(19): siRNA sense strand
gaucaaguauccccuggaa

SEQ ID NO: 1834259 - RNA, 19 nt, Homo sapiens
  misc_RNA (1)...(19): siRNA sense strand
uggaggauuuggagaguga

SEQ ID NO: 1834260 - RNA, 19 nt, Homo sapiens
  misc_RNA (1)...(19): siRNA sense strand
gauucaggcaguuuggaua

SEQ ID NO: 1834261 - RNA, 19 nt, Homo sapiens
  misc_RNA (1)...(19): siRNA sense strand
gcccuuauucuucaucaaa

SEQ ID NO: 1834262 - RNA, 19 nt, Homo sapiens
  misc_RNA (1)...(19): siRNA sense strand
cagccgaaguuccauucuu

SEQ ID NO: 1834263 - RNA, 19 nt, Homo sapiens
  misc_RNA (1)...(19): siRNA sense strand
agacuuggguucgagauca

SEQ ID NO: 1834264 - RNA, 19 nt, Homo sapiens
  misc_RNA (1)...(19): siRNA sense strand
cacagucaguggaagaaga

SEQ ID NO: 1834265 - RNA, 19 nt, Homo sapiens
  misc_RNA (1)...(19): siRNA sense strand
aaaucccucucgaaagaaa

SEQ ID NO: 1834266 - RNA, 19 nt, Homo sapiens
  misc_RNA (1)...(19): siRNA sense strand
gaaaucccucucgaaagaa

SEQ ID NO: 1834267 - RNA, 19 nt, Homo sapiens
  misc_RNA (1)...(19): siRNA sense strand
uauggguguuccucaaauu

SEQ ID NO: 1834268 - RNA, 19 nt, Homo sapiens
  misc_RNA (1)...(19): siRNA sense strand
ggagcuccauucccuaagg

SEQ ID NO: 1834269 - RNA, 19 nt, Homo sapiens
  misc_RNA (1)...(19): siRNA sense strand
agacaugguaucucaagaa

SEQ ID NO: 1834270 - RNA, 19 nt, Homo sapiens
  misc_RNA (1)...(19): siRNA sense strand
caagggcagguuugaaaga

SEQ ID NO: 1834271 - RNA, 19 nt, Homo sapiens
  misc_RNA (1)...(19): siRNA sense strand
gagaggaggcagugacagu

SEQ ID NO: 1834272 - RNA, 19 nt, Homo sapiens
  misc_RNA (1)...(19): siRNA sense strand
aagaagaagcucagggauu

SEQ ID NO: 1834273 - RNA, 19 nt, Homo sapiens
  misc_RNA (1)...(19): siRNA sense strand
gagcuuccuucagcauuag

SEQ ID NO: 1834274 - RNA, 19 nt, Homo sapiens
  misc_RNA (1)...(19): siRNA sense strand
aguggaagaagauucaaua

SEQ ID NO: 1834275 - RNA, 19 nt, Homo sapiens
  misc_RNA (1)...(19): siRNA sense strand
gaagacacaaugcagaaaa

SEQ ID NO: 1834276 - RNA, 19 nt, Homo sapiens
  misc_RNA (1)...(19): siRNA sense strand
acuaguagaagacauggua

SEQ ID NO: 1834277 - RNA, 19 nt, Homo sapiens
  misc_RNA (1)...(19): siRNA sense strand
ggaaaucguauagucaaag

SEQ ID NO: 1834278 - RNA, 19 nt, Homo sapiens
  misc_RNA (1)...(19): siRNA sense strand
aaucaucagagaauccaua

SEQ ID NO: 1834279 - RNA, 19 nt, Homo sapiens
  misc_RNA (1)...(19): siRNA sense strand
ccuuacaaaugucuugaau

SEQ ID NO: 1834280 - RNA, 19 nt, Homo sapiens
  misc_RNA (1)...(19): siRNA sense strand
uuauggauguguugagugu

SEQ ID NO: 1834281 - RNA, 19 nt, Homo sapiens
  misc_RNA (1)...(19): siRNA sense strand
cauccuacccaaagagcua

SEQ ID NO: 1834282 - RNA, 19 nt, Homo sapiens
  misc_RNA (1)...(19): siRNA sense strand
agccgaaguuccauucuug

SEQ ID NO: 1834283 - RNA, 19 nt, Homo sapiens
  misc_RNA (1)...(19): siRNA sense strand
gagaaaccuuauggaugug

SEQ ID NO: 1834284 - RNA, 19 nt, Homo sapiens
  misc_RNA (1)...(19): siRNA sense strand
cccaagggcagguuugaaa

SEQ ID NO: 1834285 - RNA, 19 nt, Homo sapiens
  misc_RNA (1)...(19): siRNA sense strand
caguauggguguuccucaa

SEQ ID NO: 1834286 - RNA, 19 nt, Homo sapiens
  misc_RNA (1)...(19): siRNA sense strand
guuccuggcacucucagua

SEQ ID NO: 1834287 - RNA, 19 nt, Homo sapiens
  misc_RNA (1)...(19): siRNA sense strand
auuagaaucccaugaaguu

SEQ ID NO: 1834288 - RNA, 19 nt, Homo sapiens
  misc_RNA (1)...(19): siRNA sense strand
gaaagcauucagccgaagu

SEQ ID NO: 1834289 - RNA, 19 nt, Homo sapiens
  misc_RNA (1)...(19): siRNA sense strand
gaaguuccuggcacucuca

SEQ ID NO: 1834290 - RNA, 19 nt, Homo sapiens
  misc_RNA (1)...(19): siRNA sense strand
gaucaucauccagagaaug

SEQ ID NO: 1834291 - RNA, 19 nt, Homo sapiens
  misc_RNA (1)...(19): siRNA sense strand
aagggcagguuugaaagaa

SEQ ID NO: 1834292 - RNA, 19 nt, Homo sapiens
  misc_RNA (1)...(19): siRNA sense strand
caguuuggauaccaggauu

SEQ ID NO: 1834293 - RNA, 19 nt, Homo sapiens
  misc_RNA (1)...(19): siRNA sense strand
ggcgaagagggaucaagua

SEQ ID NO: 1834294 - RNA, 19 nt, Homo sapiens
  misc_RNA (1)...(19): siRNA sense strand
ggaaguacuaguagaagac

SEQ ID NO: 1834295 - RNA, 19 nt, Homo sapiens
  misc_RNA (1)...(19): siRNA sense strand
ucucgaaagaaacaacaua

SEQ ID NO: 1834296 - RNA, 19 nt, Homo sapiens
  misc_RNA (1)...(19): siRNA sense strand
ugugggaaaucguauaguc

SEQ ID NO: 1834297 - RNA, 19 nt, Homo sapiens
  misc_RNA (1)...(19): siRNA sense strand
gcauucagccgaaguucca

SEQ ID NO: 1834298 - RNA, 19 nt, Homo sapiens
  misc_RNA (1)...(19): siRNA sense strand
gaaguacuaguagaagaca

SEQ ID NO: 1834299 - RNA, 19 nt, Homo sapiens
  misc_RNA (1)...(19): siRNA sense strand
gaagcucagggauuaccaa

SEQ ID NO: 1834300 - RNA, 19 nt, Homo sapiens
  misc_RNA (1)...(19): siRNA sense strand
gcuggaggauuuggagagu

SEQ ID NO: 1834301 - RNA, 19 nt, Homo sapiens
  misc_RNA (1)...(19): siRNA sense strand
ggauuuggagagugaacuu

SEQ ID NO: 1834302 - RNA, 19 nt, Homo sapiens
  misc_RNA (1)...(19): siRNA sense strand
gcacacaaaagaacaaauc

SEQ ID NO: 1834303 - RNA, 19 nt, Homo sapiens
  misc_RNA (1)...(19): siRNA sense strand
guuccauucuugugcaaca

SEQ ID NO: 1834304 - RNA, 19 nt, Homo sapiens
  misc_RNA (1)...(19): siRNA sense strand
gcuacagacuuggguucga

SEQ ID NO: 1834305 - RNA, 19 nt, Homo sapiens
  misc_RNA (1)...(19): siRNA sense strand
gguuugaaagaaagagaaa

SEQ ID NO: 1834306 - RNA, 19 nt, Homo sapiens
  misc_RNA (1)...(19): siRNA sense strand
uaaggcacugugaugauga

SEQ ID NO: 1834307 - RNA, 19 nt, Homo sapiens
  misc_RNA (1)...(19): siRNA sense strand
aaacgggaaguacuaguag

SEQ ID NO: 1834308 - RNA, 19 nt, Homo sapiens
  misc_RNA (1)...(19): siRNA sense strand
cgaagagggaucaaguauc

SEQ ID NO: 1834309 - RNA, 19 nt, Homo sapiens
  misc_RNA (1)...(19): siRNA sense strand
gggcuuauuaaucaucaga

SEQ ID NO: 1834310 - RNA, 19 nt, Homo sapiens
  misc_RNA (1)...(19): siRNA sense strand
gguucgagaucaucaucca

SEQ ID NO: 1834311 - RNA, 19 nt, Homo sapiens
  misc_RNA (1)...(19): siRNA sense strand
gcaguuuggauaccaggau

SEQ ID NO: 1834312 - RNA, 19 nt, Homo sapiens
  misc_RNA (1)...(19): siRNA sense strand
gacccuggacaaccgguuu

SEQ ID NO: 1834313 - RNA, 19 nt, Homo sapiens
  misc_RNA (1)...(19): siRNA sense strand
guggagaaccagcucaagu

SEQ ID NO: 1834314 - RNA, 19 nt, Homo sapiens
  misc_RNA (1)...(19): siRNA sense strand
uggagaaccagcucaagug

SEQ ID NO: 1834315 - RNA, 19 nt, Homo sapiens
  misc_RNA (1)...(19): siRNA sense strand
gacugaaaauggagcacua

SEQ ID NO: 1834316 - RNA, 19 nt, Homo sapiens
  misc_RNA (1)...(19): siRNA sense strand
ggaaguccauccaagauuu

SEQ ID NO: 1834317 - RNA, 19 nt, Homo sapiens
  misc_RNA (1)...(19): siRNA sense strand
caagacaccugggaagaaa

SEQ ID NO: 1834318 - RNA, 19 nt, Homo sapiens
  misc_RNA (1)...(19): siRNA sense strand
ggagcucgauucacgguaa

SEQ ID NO: 1834319 - RNA, 19 nt, Homo sapiens
  misc_RNA (1)...(19): siRNA sense strand
cuaacaagguggagacgua

SEQ ID NO: 1834320 - RNA, 19 nt, Homo sapiens
  misc_RNA (1)...(19): siRNA sense strand
gaaguccauccaagauuua

SEQ ID NO: 1834321 - RNA, 19 nt, Homo sapiens
  misc_RNA (1)...(19): siRNA sense strand
gaugagggcagauaccuaa

SEQ ID NO: 1834322 - RNA, 19 nt, Homo sapiens
  misc_RNA (1)...(19): siRNA sense strand
caaaagagcugugucugaa

SEQ ID NO: 1834323 - RNA, 19 nt, Homo sapiens
  misc_RNA (1)...(19): siRNA sense strand
aacaucagcuccuccauga

SEQ ID NO: 1834324 - RNA, 19 nt, Homo sapiens
  misc_RNA (1)...(19): siRNA sense strand
gcaaggagcaggaaaagaa

SEQ ID NO: 1834325 - RNA, 19 nt, Homo sapiens
  misc_RNA (1)...(19): siRNA sense strand
gaaauccacacagcugaaa

SEQ ID NO: 1834326 - RNA, 19 nt, Homo sapiens
  misc_RNA (1)...(19): siRNA sense strand
aaagagcugugucugaaca

SEQ ID NO: 1834327 - RNA, 19 nt, Homo sapiens
  misc_RNA (1)...(19): siRNA sense strand
gggaaguccauccaagauu

SEQ ID NO: 1834328 - RNA, 19 nt, Homo sapiens
  misc_RNA (1)...(19): siRNA sense strand
gaaccaccccguccgauuu

SEQ ID NO: 1834329 - RNA, 19 nt, Homo sapiens
  misc_RNA (1)...(19): siRNA sense strand
uaacucaggaaacuaacaa

SEQ ID NO: 1834330 - RNA, 19 nt, Homo sapiens
  misc_RNA (1)...(19): siRNA sense strand
gauuugggucugaugauga

SEQ ID NO: 1834331 - RNA, 19 nt, Homo sapiens
  misc_RNA (1)...(19): siRNA sense strand
gaacucgcucugccugguu

SEQ ID NO: 1834332 - RNA, 19 nt, Homo sapiens
  misc_RNA (1)...(19): siRNA sense strand
gagggcagauaccuaacuc

SEQ ID NO: 1834333 - RNA, 19 nt, Homo sapiens
  misc_RNA (1)...(19): siRNA sense strand
caucagcuccuccaugaca

SEQ ID NO: 1834334 - RNA, 19 nt, Homo sapiens
  misc_RNA (1)...(19): siRNA sense strand
ucaagacaccugggaagaa

SEQ ID NO: 1834335 - RNA, 19 nt, Homo sapiens
  misc_RNA (1)...(19): siRNA sense strand
caagcccucucccaacaca

SEQ ID NO: 1834336 - RNA, 19 nt, Homo sapiens
  misc_RNA (1)...(19): siRNA sense strand
cgauuugggucugaugaug

SEQ ID NO: 1834337 - RNA, 19 nt, Homo sapiens
  misc_RNA (1)...(19): siRNA sense strand
gagcugugucugaacauca

SEQ ID NO: 1834338 - RNA, 19 nt, Homo sapiens
  misc_RNA (1)...(19): siRNA sense strand
uccaagcccucucccaaca

SEQ ID NO: 1834339 - RNA, 19 nt, Homo sapiens
  misc_RNA (1)...(19): siRNA sense strand
gaaacgcaaggagcaggaa

SEQ ID NO: 1834340 - RNA, 19 nt, Homo sapiens
  misc_RNA (1)...(19): siRNA sense strand
gaucgcagaaauccacaca

SEQ ID NO: 1834341 - RNA, 19 nt, Homo sapiens
  misc_RNA (1)...(19): siRNA sense strand
caagauuuacggcgacgau

SEQ ID NO: 1834342 - RNA, 19 nt, Homo sapiens
  misc_RNA (1)...(19): siRNA sense strand
gauucuuccuucaccaucu

SEQ ID NO: 1834343 - RNA, 19 nt, Homo sapiens
  misc_RNA (1)...(19): siRNA sense strand
auaccuaacucaggaaacu

SEQ ID NO: 1834344 - RNA, 19 nt, Homo sapiens
  misc_RNA (1)...(19): siRNA sense strand
ucugacaccuccacaacgu

SEQ ID NO: 1834345 - RNA, 19 nt, Homo sapiens
  misc_RNA (1)...(19): siRNA sense strand
caagguggagacguacaaa

SEQ ID NO: 1834346 - RNA, 19 nt, Homo sapiens
  misc_RNA (1)...(19): siRNA sense strand
aacucgcucugccugguua

SEQ ID NO: 1834347 - RNA, 19 nt, Homo sapiens
  misc_RNA (1)...(19): siRNA sense strand
gauuuacggcgacgauucu

SEQ ID NO: 1834348 - RNA, 19 nt, Homo sapiens
  misc_RNA (1)...(19): siRNA sense strand
gacugggagugggcuagaa

SEQ ID NO: 1834349 - RNA, 19 nt, Homo sapiens
  misc_RNA (1)...(19): siRNA sense strand
gaagaagguguuucacaug

SEQ ID NO: 1834350 - RNA, 19 nt, Homo sapiens
  misc_RNA (1)...(19): siRNA sense strand
gauggcugcuggagacaaa

SEQ ID NO: 1834351 - RNA, 19 nt, Homo sapiens
  misc_RNA (1)...(19): siRNA sense strand
ggacaaaaguggcuucauc

SEQ ID NO: 1834352 - RNA, 19 nt, Homo sapiens
  misc_RNA (1)...(19): siRNA sense strand
ucugguggcugaaagcuaa

SEQ ID NO: 1834353 - RNA, 19 nt, Homo sapiens
  misc_RNA (1)...(19): siRNA sense strand
caaauggucggccugaaga

SEQ ID NO: 1834354 - RNA, 19 nt, Homo sapiens
  misc_RNA (1)...(19): siRNA sense strand
gcugaacgcugaggacauc

SEQ ID NO: 1834355 - RNA, 19 nt, Homo sapiens
  misc_RNA (1)...(19): siRNA sense strand
cggaugaugugaagaaggu

SEQ ID NO: 1834356 - RNA, 19 nt, Homo sapiens
  misc_RNA (1)...(19): siRNA sense strand
gugcggaugaugugaagaa

SEQ ID NO: 1834357 - RNA, 19 nt, Homo sapiens
  misc_RNA (1)...(19): siRNA sense strand
ccaaauggucggccugaag

SEQ ID NO: 1834358 - RNA, 19 nt, Homo sapiens
  misc_RNA (1)...(19): siRNA sense strand
gagugcggaugaugugaag

SEQ ID NO: 1834359 - RNA, 19 nt, Homo sapiens
  misc_RNA (1)...(19): siRNA sense strand
gaacgcugaggacaucaag

SEQ ID NO: 1834360 - RNA, 19 nt, Homo sapiens
  misc_RNA (1)...(19): siRNA sense strand
aaagagugcggaugaugug

SEQ ID NO: 1834361 - RNA, 19 nt, Homo sapiens
  misc_RNA (1)...(19): siRNA sense strand
cuaaagaaaccaagaugcu

SEQ ID NO: 1834362 - RNA, 19 nt, Homo sapiens
  misc_RNA (1)...(19): siRNA sense strand
acgcugaggacaucaagaa

SEQ ID NO: 1834363 - RNA, 19 nt, Homo sapiens
  misc_RNA (1)...(19): siRNA sense strand
gaggaugagcugggauuca

SEQ ID NO: 1834364 - RNA, 19 nt, Homo sapiens
  misc_RNA (1)...(19): siRNA sense strand
cgacuccuucgaccacaaa

SEQ ID NO: 1834365 - RNA, 19 nt, Homo sapiens
  misc_RNA (1)...(19): siRNA sense strand
gaugacagacuugcugaac

SEQ ID NO: 1834366 - RNA, 19 nt, Homo sapiens
  misc_RNA (1)...(19): siRNA sense strand
cgaaagaauugauugcuaa

SEQ ID NO: 1834367 - RNA, 19 nt, Homo sapiens
  misc_RNA (1)...(19): siRNA sense strand
gaaauaccauucaaguguu

SEQ ID NO: 1834368 - RNA, 19 nt, Homo sapiens
  misc_RNA (1)...(19): siRNA sense strand
ggagaaagcggcagcagua

SEQ ID NO: 1834369 - RNA, 19 nt, Homo sapiens
  misc_RNA (1)...(19): siRNA sense strand
ggaaauaccauucaagugu

SEQ ID NO: 1834370 - RNA, 19 nt, Homo sapiens
  misc_RNA (1)...(19): siRNA sense strand
gcgaaagaauugauugcua

SEQ ID NO: 1834371 - RNA, 19 nt, Homo sapiens
  misc_RNA (1)...(19): siRNA sense strand
gggaagcgaugaugaggaa

SEQ ID NO: 1834372 - RNA, 19 nt, Homo sapiens
  misc_RNA (1)...(19): siRNA sense strand
guaaacagaaggcggcuua

SEQ ID NO: 1834373 - RNA, 19 nt, Homo sapiens
  misc_RNA (1)...(19): siRNA sense strand
ucuaugagcuggacacaga

SEQ ID NO: 1834374 - RNA, 19 nt, Homo sapiens
  misc_RNA (1)...(19): siRNA sense strand
ggagacagcugcaaauucc

SEQ ID NO: 1834375 - RNA, 19 nt, Homo sapiens
  misc_RNA (1)...(19): siRNA sense strand
gacccacaauccaaugaua

SEQ ID NO: 1834376 - RNA, 19 nt, Homo sapiens
  misc_RNA (1)...(19): siRNA sense strand
gaggaugcaauucccauua

SEQ ID NO: 1834377 - RNA, 19 nt, Homo sapiens
  misc_RNA (1)...(19): siRNA sense strand
gcaaggaggaugacaagau

SEQ ID NO: 1834378 - RNA, 19 nt, Homo sapiens
  misc_RNA (1)...(19): siRNA sense strand
gagcagcuuucuccaggaa

SEQ ID NO: 1834379 - RNA, 19 nt, Homo sapiens
  misc_RNA (1)...(19): siRNA sense strand
caaggaggaugacaagauc

SEQ ID NO: 1834380 - RNA, 19 nt, Homo sapiens
  misc_RNA (1)...(19): siRNA sense strand
ggaaucaacaauuaucaga

SEQ ID NO: 1834381 - RNA, 19 nt, Homo sapiens
  misc_RNA (1)...(19): siRNA sense strand
gaaagagcgcgaugcacaa

SEQ ID NO: 1834382 - RNA, 19 nt, Homo sapiens
  misc_RNA (1)...(19): siRNA sense strand
ccaagugcaggcauuauuu

SEQ ID NO: 1834383 - RNA, 19 nt, Homo sapiens
  misc_RNA (1)...(19): siRNA sense strand
gaggaaauaccauucaagu

SEQ ID NO: 1834384 - RNA, 19 nt, Homo sapiens
  misc_RNA (1)...(19): siRNA sense strand
gaucgaacgugagcuugau

SEQ ID NO: 1834385 - RNA, 19 nt, Homo sapiens
  misc_RNA (1)...(19): siRNA sense strand
aagcgaugaugaggaaaua

SEQ ID NO: 1834386 - RNA, 19 nt, Homo sapiens
  misc_RNA (1)...(19): siRNA sense strand
gcugcaaauuccuccauga

SEQ ID NO: 1834387 - RNA, 19 nt, Homo sapiens
  misc_RNA (1)...(19): siRNA sense strand
acaauccaaugauacagaa

SEQ ID NO: 1834388 - RNA, 19 nt, Homo sapiens
  misc_RNA (1)...(19): siRNA sense strand
uccaugaccguucagauua

SEQ ID NO: 1834389 - RNA, 19 nt, Homo sapiens
  misc_RNA (1)...(19): siRNA sense strand
gaagcgaugaugaggaaau

SEQ ID NO: 1834390 - RNA, 19 nt, Homo sapiens
  misc_RNA (1)...(19): siRNA sense strand
gcagaucgaacgugagcuu

SEQ ID NO: 1834391 - RNA, 19 nt, Homo sapiens
  misc_RNA (1)...(19): siRNA sense strand
gaauugauugcuaaacuag

SEQ ID NO: 1834392 - RNA, 19 nt, Homo sapiens
  misc_RNA (1)...(19): siRNA sense strand
ggguggugcuuccgacuug

SEQ ID NO: 1834393 - RNA, 19 nt, Homo sapiens
  misc_RNA (1)...(19): siRNA sense strand
caggaaaggcgguggauca

SEQ ID NO: 1834394 - RNA, 19 nt, Homo sapiens
  misc_RNA (1)...(19): siRNA sense strand
cgucuucaauccagcgaaa

SEQ ID NO: 1834395 - RNA, 19 nt, Homo sapiens
  misc_RNA (1)...(19): siRNA sense strand
ugacagugguaaacagaag

SEQ ID NO: 1834396 - RNA, 19 nt, Homo sapiens
  misc_RNA (1)...(19): siRNA sense strand
gaugaggaaauaccauuca

SEQ ID NO: 1834397 - RNA, 19 nt, Homo sapiens
  misc_RNA (1)...(19): siRNA sense strand
cagcgaagaggaagaggaa

SEQ ID NO: 1834398 - RNA, 19 nt, Homo sapiens
  misc_RNA (1)...(19): siRNA sense strand
gaagugggaagcgaugaug

SEQ ID NO: 1834399 - RNA, 19 nt, Homo sapiens
  misc_RNA (1)...(19): siRNA sense strand
augcaauucccauuacuua

SEQ ID NO: 1834400 - RNA, 19 nt, Homo sapiens
  misc_RNA (1)...(19): siRNA sense strand
uacaugaagcccaaggaua

SEQ ID NO: 1834401 - RNA, 19 nt, Homo sapiens
  misc_RNA (1)...(19): siRNA sense strand
ccaauggcgucuucaaucc

SEQ ID NO: 1834402 - RNA, 19 nt, Homo sapiens
  misc_RNA (1)...(19): siRNA sense strand
gaccaauggcgucuucaau

SEQ ID NO: 1834403 - RNA, 19 nt, Homo sapiens
  misc_RNA (1)...(19): siRNA sense strand
ccauucaaguguuucaucu

SEQ ID NO: 1834404 - RNA, 19 nt, Homo sapiens
  misc_RNA (1)...(19): siRNA sense strand
ucaauccagcgaaagaauu

SEQ ID NO: 1834405 - RNA, 19 nt, Homo sapiens
  misc_RNA (1)...(19): siRNA sense strand
ucaccaagugcaggcauua

SEQ ID NO: 1834406 - RNA, 19 nt, Homo sapiens
  misc_RNA (1)...(19): siRNA sense strand
gagggucgcuauggugucu

SEQ ID NO: 1834407 - RNA, 19 nt, Homo sapiens
  misc_RNA (1)...(19): siRNA sense strand
caagugcaggcauuauuuc

SEQ ID NO: 1834408 - RNA, 19 nt, Homo sapiens
  misc_RNA (1)...(19): siRNA sense strand
cgacaucuguaaggacuac

SEQ ID NO: 1834409 - RNA, 19 nt, Homo sapiens
  misc_RNA (1)...(19): siRNA sense strand
gaugcaauucccauuacuu

SEQ ID NO: 1834410 - RNA, 19 nt, Homo sapiens
  misc_RNA (1)...(19): siRNA sense strand
cuagagaagcaucgagcua

SEQ ID NO: 1834411 - RNA, 19 nt, Homo sapiens
  misc_RNA (1)...(19): siRNA sense strand
ggauacgucuaugggcaau

SEQ ID NO: 1834412 - RNA, 19 nt, Homo sapiens
  misc_RNA (1)...(19): siRNA sense strand
agagaagcaucgagcuaca

SEQ ID NO: 1834413 - RNA, 19 nt, Homo sapiens
  misc_RNA (1)...(19): siRNA sense strand
cggcagcaguagcgacgaa

SEQ ID NO: 1834414 - RNA, 19 nt, Homo sapiens
  misc_RNA (1)...(19): siRNA sense strand
auucaaguguuucaucugu

SEQ ID NO: 1834415 - RNA, 19 nt, Homo sapiens
  misc_RNA (1)...(19): siRNA sense strand
ccaccgugcgcugggauua

SEQ ID NO: 1834416 - RNA, 19 nt, Homo sapiens
  misc_RNA (1)...(19): siRNA sense strand
gggcaaggaggaugacaag

SEQ ID NO: 1834417 - RNA, 19 nt, Homo sapiens
  misc_RNA (1)...(19): siRNA sense strand
ggaugcaauucccauuacu

SEQ ID NO: 1834418 - RNA, 19 nt, Homo sapiens
  misc_RNA (1)...(19): siRNA sense strand
ccaugaccguucagauuac

SEQ ID NO: 1834419 - RNA, 19 nt, Homo sapiens
  misc_RNA (1)...(19): siRNA sense strand
acaugaagcccaaggauac

SEQ ID NO: 1834420 - RNA, 19 nt, Homo sapiens
  misc_RNA (1)...(19): siRNA sense strand
gcccaaggauacgucuaug

SEQ ID NO: 1834421 - RNA, 19 nt, Homo sapiens
  misc_RNA (1)...(19): siRNA sense strand
gggucgcuauggugucuau

SEQ ID NO: 1834422 - RNA, 19 nt, Homo sapiens
  misc_RNA (1)...(19): siRNA sense strand
gucucggcgugguuuauaa

SEQ ID NO: 1834423 - RNA, 19 nt, Homo sapiens
  misc_RNA (1)...(19): siRNA sense strand
ggaggaugacaagaucuau

SEQ ID NO: 1834424 - RNA, 19 nt, Homo sapiens
  misc_RNA (1)...(19): siRNA sense strand
cacaauccaaugauacaga

SEQ ID NO: 1834425 - RNA, 19 nt, Homo sapiens
  misc_RNA (1)...(19): siRNA sense strand
cuccaugaccguucagauu

SEQ ID NO: 1834426 - RNA, 19 nt, Homo sapiens
  misc_RNA (1)...(19): siRNA sense strand
acaaagagacuggcuucug

SEQ ID NO: 1834427 - RNA, 19 nt, Homo sapiens
  misc_RNA (1)...(19): siRNA sense strand
gggauuaccagcccgacau

SEQ ID NO: 1834428 - RNA, 19 nt, Homo sapiens
  misc_RNA (1)...(19): siRNA sense strand
gaggaugacaagaucuauc

SEQ ID NO: 1834429 - RNA, 19 nt, Homo sapiens
  misc_RNA (1)...(19): siRNA sense strand
cggagacagcugcaaauuc

SEQ ID NO: 1834430 - RNA, 19 nt, Homo sapiens
  misc_RNA (1)...(19): siRNA sense strand
acagaagacccgugacagu

SEQ ID NO: 1834431 - RNA, 19 nt, Homo sapiens
  misc_RNA (1)...(19): siRNA sense strand
cgaaggcugcacugugguu

SEQ ID NO: 1834432 - RNA, 19 nt, Homo sapiens
  misc_RNA (1)...(19): siRNA sense strand
ccagcgaaagaauugauug

SEQ ID NO: 1834433 - RNA, 19 nt, Homo sapiens
  misc_RNA (1)...(19): siRNA sense strand
gagcagcgaagaggaagag

SEQ ID NO: 1834434 - RNA, 19 nt, Homo sapiens
  misc_RNA (1)...(19): siRNA sense strand
aaaaugagcccgagagucu

SEQ ID NO: 1834435 - RNA, 19 nt, Homo sapiens
  misc_RNA (1)...(19): siRNA sense strand
ggaugaaaacuaugaagug

SEQ ID NO: 1834436 - RNA, 19 nt, Homo sapiens
  misc_RNA (1)...(19): siRNA sense strand
ugaugagggucgcuauggu

SEQ ID NO: 1834437 - RNA, 19 nt, Homo sapiens
  misc_RNA (1)...(19): siRNA sense strand
ugaaggaucucaccaauuu

SEQ ID NO: 1834438 - RNA, 19 nt, Homo sapiens
  misc_RNA (1)...(19): siRNA sense strand
caacaacaaccuccuauua

SEQ ID NO: 1834439 - RNA, 19 nt, Homo sapiens
  misc_RNA (1)...(19): siRNA sense strand
ggagaagaauccuauugua

SEQ ID NO: 1834440 - RNA, 19 nt, Homo sapiens
  misc_RNA (1)...(19): siRNA sense strand
gcacgaauguucaucuuug

SEQ ID NO: 1834441 - RNA, 19 nt, Homo sapiens
  misc_RNA (1)...(19): siRNA sense strand
agacagacuucuucauuua

SEQ ID NO: 1834442 - RNA, 19 nt, Homo sapiens
  misc_RNA (1)...(19): siRNA sense strand
gaccauauguuccucaauu

SEQ ID NO: 1834443 - RNA, 19 nt, Homo sapiens
  misc_RNA (1)...(19): siRNA sense strand
caacaaccauguccucauu

SEQ ID NO: 1834444 - RNA, 19 nt, Homo sapiens
  misc_RNA (1)...(19): siRNA sense strand
caacuaacauugugaagug

SEQ ID NO: 1834445 - RNA, 19 nt, Homo sapiens
  misc_RNA (1)...(19): siRNA sense strand
gcuagaagcuggcaucaau

SEQ ID NO: 1834446 - RNA, 19 nt, Homo sapiens
  misc_RNA (1)...(19): siRNA sense strand
auacugaacucacuugaua

SEQ ID NO: 1834447 - RNA, 19 nt, Homo sapiens
  misc_RNA (1)...(19): siRNA sense strand
ugaaugacgccaauuauua

SEQ ID NO: 1834448 - RNA, 19 nt, Homo sapiens
  misc_RNA (1)...(19): siRNA sense strand
ggagaggucuucacacuca

SEQ ID NO: 1834449 - RNA, 19 nt, Homo sapiens
  misc_RNA (1)...(19): siRNA sense strand
uaaggaagcugugaaagaa

SEQ ID NO: 1834450 - RNA, 19 nt, Homo sapiens
  misc_RNA (1)...(19): siRNA sense strand
caucaaauguggucaaaga

SEQ ID NO: 1834451 - RNA, 19 nt, Homo sapiens
  misc_RNA (1)...(19): siRNA sense strand
gaacucacuugauaaggaa

SEQ ID NO: 1834452 - RNA, 19 nt, Homo sapiens
  misc_RNA (1)...(19): siRNA sense strand
ggacagaagugagcaacaa

SEQ ID NO: 1834453 - RNA, 19 nt, Homo sapiens
  misc_RNA (1)...(19): siRNA sense strand
gauccuacaucuucauuga

SEQ ID NO: 1834454 - RNA, 19 nt, Homo sapiens
  misc_RNA (1)...(19): siRNA sense strand
caaaucagacgcuaaguuu

SEQ ID NO: 1834455 - RNA, 19 nt, Homo sapiens
  misc_RNA (1)...(19): siRNA sense strand
gaagaauccuauuguaucu

SEQ ID NO: 1834456 - RNA, 19 nt, Homo sapiens
  misc_RNA (1)...(19): siRNA sense strand
gaacugauuccacugauau

SEQ ID NO: 1834457 - RNA, 19 nt, Homo sapiens
  misc_RNA (1)...(19): siRNA sense strand
acacuuggcucacagcuuu

SEQ ID NO: 1834458 - RNA, 19 nt, Homo sapiens
  misc_RNA (1)...(19): siRNA sense strand
gcaaacaggaucagugaaa

SEQ ID NO: 1834459 - RNA, 19 nt, Homo sapiens
  misc_RNA (1)...(19): siRNA sense strand
ccaauaaacucuucuucau

SEQ ID NO: 1834460 - RNA, 19 nt, Homo sapiens
  misc_RNA (1)...(19): siRNA sense strand
gugauacccuuaaauaaug

SEQ ID NO: 1834461 - RNA, 19 nt, Homo sapiens
  misc_RNA (1)...(19): siRNA sense strand
uauguucccuuaucaagua

SEQ ID NO: 1834462 - RNA, 19 nt, Homo sapiens
  misc_RNA (1)...(19): siRNA sense strand
cuacagaaccgcaguauau

SEQ ID NO: 1834463 - RNA, 19 nt, Homo sapiens
  misc_RNA (1)...(19): siRNA sense strand
ggaauucagucaacagcuu

SEQ ID NO: 1834464 - RNA, 19 nt, Homo sapiens
  misc_RNA (1)...(19): siRNA sense strand
agaaucagguggaaggaua

SEQ ID NO: 1834465 - RNA, 19 nt, Homo sapiens
  misc_RNA (1)...(19): siRNA sense strand
agagacagcugaacuacaa

SEQ ID NO: 1834466 - RNA, 19 nt, Homo sapiens
  misc_RNA (1)...(19): siRNA sense strand
gaacagaacaugguccuau

SEQ ID NO: 1834467 - RNA, 19 nt, Homo sapiens
  misc_RNA (1)...(19): siRNA sense strand
gaccugaccucugcaacua

SEQ ID NO: 1834468 - RNA, 19 nt, Homo sapiens
  misc_RNA (1)...(19): siRNA sense strand
cagacaaacccauguauaa

SEQ ID NO: 1834469 - RNA, 19 nt, Homo sapiens
  misc_RNA (1)...(19): siRNA sense strand
gaaggacaauggcuguuuc

SEQ ID NO: 1834470 - RNA, 19 nt, Homo sapiens
  misc_RNA (1)...(19): siRNA sense strand
acaguaagauuccguguug

SEQ ID NO: 1834471 - RNA, 19 nt, Homo sapiens
  misc_RNA (1)...(19): siRNA sense strand
guagagagaccauauguuc

SEQ ID NO: 1834472 - RNA, 19 nt, Homo sapiens
  misc_RNA (1)...(19): siRNA sense strand
gaacaggugacaaaucaga

SEQ ID NO: 1834473 - RNA, 19 nt, Homo sapiens
  misc_RNA (1)...(19): siRNA sense strand
gagaagaauccuauuguau

SEQ ID NO: 1834474 - RNA, 19 nt, Homo sapiens
  misc_RNA (1)...(19): siRNA sense strand
acaaccauguccucauuua

SEQ ID NO: 1834475 - RNA, 19 nt, Homo sapiens
  misc_RNA (1)...(19): siRNA sense strand
gguggaggcugaagguauu

SEQ ID NO: 1834476 - RNA, 19 nt, Homo sapiens
  misc_RNA (1)...(19): siRNA sense strand
ccuaugugcuccucgcuua

SEQ ID NO: 1834477 - RNA, 19 nt, Homo sapiens
  misc_RNA (1)...(19): siRNA sense strand
aaagggagguguagaagau

SEQ ID NO: 1834478 - RNA, 19 nt, Homo sapiens
  misc_RNA (1)...(19): siRNA sense strand
ccacugauauaccuugaga

SEQ ID NO: 1834479 - RNA, 19 nt, Homo sapiens
  misc_RNA (1)...(19): siRNA sense strand
agacauccaugaaauacaa

SEQ ID NO: 1834480 - RNA, 19 nt, Homo sapiens
  misc_RNA (1)...(19): siRNA sense strand
gcucaacaaugccauaaag

SEQ ID NO: 1834481 - RNA, 19 nt, Homo sapiens
  misc_RNA (1)...(19): siRNA sense strand
caaauguggucaaagaauc

SEQ ID NO: 1834482 - RNA, 19 nt, Homo sapiens
  misc_RNA (1)...(19): siRNA sense strand
aaugugaacuucucaguga

SEQ ID NO: 1834483 - RNA, 19 nt, Homo sapiens
  misc_RNA (1)...(19): siRNA sense strand
ugccagagcuucuuucuca

SEQ ID NO: 1834484 - RNA, 19 nt, Homo sapiens
  misc_RNA (1)...(19): siRNA sense strand
gaugguaucugguuuuauu

SEQ ID NO: 1834485 - RNA, 19 nt, Homo sapiens
  misc_RNA (1)...(19): siRNA sense strand
gucaacagcuuaacagcaa

SEQ ID NO: 1834486 - RNA, 19 nt, Homo sapiens
  misc_RNA (1)...(19): siRNA sense strand
gaagacaaccucguccauu

SEQ ID NO: 1834487 - RNA, 19 nt, Homo sapiens
  misc_RNA (1)...(19): siRNA sense strand
ugaacucacuugauaagga

SEQ ID NO: 1834488 - RNA, 19 nt, Homo sapiens
  misc_RNA (1)...(19): siRNA sense strand
ggagucagccuggaaugua

SEQ ID NO: 1834489 - RNA, 19 nt, Homo sapiens
  misc_RNA (1)...(19): siRNA sense strand
ccaagaagaaaucgaauug

SEQ ID NO: 1834490 - RNA, 19 nt, Homo sapiens
  misc_RNA (1)...(19): siRNA sense strand
uggaacaggugacaaauca

SEQ ID NO: 1834491 - RNA, 19 nt, Homo sapiens
  misc_RNA (1)...(19): siRNA sense strand
gaauucagucaacagcuua

SEQ ID NO: 1834492 - RNA, 19 nt, Homo sapiens
  misc_RNA (1)...(19): siRNA sense strand
gagaaauacugaacucacu

SEQ ID NO: 1834493 - RNA, 19 nt, Homo sapiens
  misc_RNA (1)...(19): siRNA sense strand
gaagccagcaauuguuaaa

SEQ ID NO: 1834494 - RNA, 19 nt, Homo sapiens
  misc_RNA (1)...(19): siRNA sense strand
gcacaguuuucaaucaaua

SEQ ID NO: 1834495 - RNA, 19 nt, Homo sapiens
  misc_RNA (1)...(19): siRNA sense strand
ucacagaccuuuucuacaa

SEQ ID NO: 1834496 - RNA, 19 nt, Homo sapiens
  misc_RNA (1)...(19): siRNA sense strand
ucauuuaugucuugugcua

SEQ ID NO: 1834497 - RNA, 19 nt, Homo sapiens
  misc_RNA (1)...(19): siRNA sense strand
gaaauacugaacucacuug

SEQ ID NO: 1834498 - RNA, 19 nt, Homo sapiens
  misc_RNA (1)...(19): siRNA sense strand
gcaaugcaguccuuagaac

SEQ ID NO: 1834499 - RNA, 19 nt, Homo sapiens
  misc_RNA (1)...(19): siRNA sense strand
gaagaugcuggacuuggua

SEQ ID NO: 1834500 - RNA, 19 nt, Homo sapiens
  misc_RNA (1)...(19): siRNA sense strand
aaagugugcugcucaugaa

SEQ ID NO: 1834501 - RNA, 19 nt, Homo sapiens
  misc_RNA (1)...(19): siRNA sense strand
ugaacugauuccacugaua

SEQ ID NO: 1834502 - RNA, 19 nt, Homo sapiens
  misc_RNA (1)...(19): siRNA sense strand
ugaaguggaucaugaagca

SEQ ID NO: 1834503 - RNA, 19 nt, Homo sapiens
  misc_RNA (1)...(19): siRNA sense strand
cagaauagagaaauacuga

SEQ ID NO: 1834504 - RNA, 19 nt, Homo sapiens
  misc_RNA (1)...(19): siRNA sense strand
ucacguggcucucccagau

SEQ ID NO: 1834505 - RNA, 19 nt, Homo sapiens
  misc_RNA (1)...(19): siRNA sense strand
gaacuacaaacaccaagau

SEQ ID NO: 1834506 - RNA, 19 nt, Homo sapiens
  misc_RNA (1)...(19): siRNA sense strand
caaagugugcugcucauga

SEQ ID NO: 1834507 - RNA, 19 nt, Homo sapiens
  misc_RNA (1)...(19): siRNA sense strand
ggaggucugugaggaauuc

SEQ ID NO: 1834508 - RNA, 19 nt, Homo sapiens
  misc_RNA (1)...(19): siRNA sense strand
gaaagaggacuccccauuu

SEQ ID NO: 1834509 - RNA, 19 nt, Homo sapiens
  misc_RNA (1)...(19): siRNA sense strand
gcuaucucaucacugguua

SEQ ID NO: 1834510 - RNA, 19 nt, Homo sapiens
  misc_RNA (1)...(19): siRNA sense strand
ugaacuaucugaaugaaac

SEQ ID NO: 1834511 - RNA, 19 nt, Homo sapiens
  misc_RNA (1)...(19): siRNA sense strand
gcagggucuugcacaguuu

SEQ ID NO: 1834512 - RNA, 19 nt, Homo sapiens
  misc_RNA (1)...(19): siRNA sense strand
gccagugacucaaacucua

SEQ ID NO: 1834513 - RNA, 19 nt, Homo sapiens
  misc_RNA (1)...(19): siRNA sense strand
aagacaaccucguccauug

SEQ ID NO: 1834514 - RNA, 19 nt, Homo sapiens
  misc_RNA (1)...(19): siRNA sense strand
ccaaagucguguucaguca

SEQ ID NO: 1834515 - RNA, 19 nt, Homo sapiens
  misc_RNA (1)...(19): siRNA sense strand
ggagucaggagacaugaaa

SEQ ID NO: 1834516 - RNA, 19 nt, Homo sapiens
  misc_RNA (1)...(19): siRNA sense strand
acaggagccucuucacuga

SEQ ID NO: 1834517 - RNA, 19 nt, Homo sapiens
  misc_RNA (1)...(19): siRNA sense strand
accaguaucucgguuaaua

SEQ ID NO: 1834518 - RNA, 19 nt, Homo sapiens
  misc_RNA (1)...(19): siRNA sense strand
ccaaugcaaccaccaauga

SEQ ID NO: 1834519 - RNA, 19 nt, Homo sapiens
  misc_RNA (1)...(19): siRNA sense strand
caaacaggaucagugaaau

SEQ ID NO: 1834520 - RNA, 19 nt, Homo sapiens
  misc_RNA (1)...(19): siRNA sense strand
uaucucguguucuuaauug

SEQ ID NO: 1834521 - RNA, 19 nt, Homo sapiens
  misc_RNA (1)...(19): siRNA sense strand
ugccaaagauaaucaguau

SEQ ID NO: 1834522 - RNA, 19 nt, Homo sapiens
  misc_RNA (1)...(19): siRNA sense strand
gaaauuccucucccaguca

SEQ ID NO: 1834523 - RNA, 19 nt, Homo sapiens
  misc_RNA (1)...(19): siRNA sense strand
cguccuuucuucauucaua

SEQ ID NO: 1834524 - RNA, 19 nt, Homo sapiens
  misc_RNA (1)...(19): siRNA sense strand
ggaagaacaaggacacugu

SEQ ID NO: 1834525 - RNA, 19 nt, Homo sapiens
  misc_RNA (1)...(19): siRNA sense strand
aauacgggcuuugaaauga

SEQ ID NO: 1834526 - RNA, 19 nt, Homo sapiens
  misc_RNA (1)...(19): siRNA sense strand
gauuguugauguaaagaug

SEQ ID NO: 1834527 - RNA, 19 nt, Homo sapiens
  misc_RNA (1)...(19): siRNA sense strand
gacuugcgauggacacaaa

SEQ ID NO: 1834528 - RNA, 19 nt, Homo sapiens
  misc_RNA (1)...(19): siRNA sense strand
gaagugagagacaaaccuu

SEQ ID NO: 1834529 - RNA, 19 nt, Homo sapiens
  misc_RNA (1)...(19): siRNA sense strand
gaaacggugcgaagcuauu

SEQ ID NO: 1834530 - RNA, 19 nt, Homo sapiens
  misc_RNA (1)...(19): siRNA sense strand
guucaggugccaaagauaa

SEQ ID NO: 1834531 - RNA, 19 nt, Homo sapiens
  misc_RNA (1)...(19): siRNA sense strand
cagcaauuguuaaagucua

SEQ ID NO: 1834532 - RNA, 19 nt, Homo sapiens
  misc_RNA (1)...(19): siRNA sense strand
gaagguauugagcaagaaa

SEQ ID NO: 1834533 - RNA, 19 nt, Homo sapiens
  misc_RNA (1)...(19): siRNA sense strand
uggagcaggucuaggagua

SEQ ID NO: 1834534 - RNA, 19 nt, Homo sapiens
  misc_RNA (1)...(19): siRNA sense strand
ccaacaagguggauuugag

SEQ ID NO: 1834535 - RNA, 19 nt, Homo sapiens
  misc_RNA (1)...(19): siRNA sense strand
uuagaacucuguggaaaug

SEQ ID NO: 1834536 - RNA, 19 nt, Homo sapiens
  misc_RNA (1)...(19): siRNA sense strand
ugaggucccugagauuaaa

SEQ ID NO: 1834537 - RNA, 19 nt, Homo sapiens
  misc_RNA (1)...(19): siRNA sense strand
gaaggagucuuugacauua

SEQ ID NO: 1834538 - RNA, 19 nt, Homo sapiens
  misc_RNA (1)...(19): siRNA sense strand
ggacucaucuucauggaaa

SEQ ID NO: 1834539 - RNA, 19 nt, Homo sapiens
  misc_RNA (1)...(19): siRNA sense strand
gauauuacacggagagaua

SEQ ID NO: 1834540 - RNA, 19 nt, Homo sapiens
  misc_RNA (1)...(19): siRNA sense strand
gaacauggacucaucuuca

SEQ ID NO: 1834541 - RNA, 19 nt, Homo sapiens
  misc_RNA (1)...(19): siRNA sense strand
guagaagaggcauuuauua

SEQ ID NO: 1834542 - RNA, 19 nt, Homo sapiens
  misc_RNA (1)...(19): siRNA sense strand
gcaggagcuuuacuaguuu

SEQ ID NO: 1834543 - RNA, 19 nt, Homo sapiens
  misc_RNA (1)...(19): siRNA sense strand
gggcaagaauccuuucguu

SEQ ID NO: 1834544 - RNA, 19 nt, Homo sapiens
  misc_RNA (1)...(19): siRNA sense strand
gugcaugaccuuacuauug

SEQ ID NO: 1834545 - RNA, 19 nt, Homo sapiens
  misc_RNA (1)...(19): siRNA sense strand
acgccuaucucuucaagua

SEQ ID NO: 1834546 - RNA, 19 nt, Homo sapiens
  misc_RNA (1)...(19): siRNA sense strand
gcucgaaugauaacuauug

SEQ ID NO: 1834547 - RNA, 19 nt, Homo sapiens
  misc_RNA (1)...(19): siRNA sense strand
agcaggagcuuuacuaguu

SEQ ID NO: 1834548 - RNA, 19 nt, Homo sapiens
  misc_RNA (1)...(19): siRNA sense strand
gagauacauucaaccacuu

SEQ ID NO: 1834549 - RNA, 19 nt, Homo sapiens
  misc_RNA (1)...(19): siRNA sense strand
gaaucuagaagagaaguaa

SEQ ID NO: 1834550 - RNA, 19 nt, Homo sapiens
  misc_RNA (1)...(19): siRNA sense strand
caggagcuuuacuaguuua

SEQ ID NO: 1834551 - RNA, 19 nt, Homo sapiens
  misc_RNA (1)...(19): siRNA sense strand
gagcuuuacuaguuuacga

SEQ ID NO: 1834552 - RNA, 19 nt, Homo sapiens
  misc_RNA (1)...(19): siRNA sense strand
ggaaacagauaaaacuuca

SEQ ID NO: 1834553 - RNA, 19 nt, Homo sapiens
  misc_RNA (1)...(19): siRNA sense strand
gauaacuauugaugggaaa

SEQ ID NO: 1834554 - RNA, 19 nt, Homo sapiens
  misc_RNA (1)...(19): siRNA sense strand
cgaaugauaacuauugaug

SEQ ID NO: 1834555 - RNA, 19 nt, Homo sapiens
  misc_RNA (1)...(19): siRNA sense strand
gcauuccaauuccaacaug

SEQ ID NO: 1834556 - RNA, 19 nt, Homo sapiens
  misc_RNA (1)...(19): siRNA sense strand
agaaggagucuuugacauu

SEQ ID NO: 1834557 - RNA, 19 nt, Homo sapiens
  misc_RNA (1)...(19): siRNA sense strand
caagaauccuuucguucca

SEQ ID NO: 1834558 - RNA, 19 nt, Homo sapiens
  misc_RNA (1)...(19): siRNA sense strand
agaagaaggugaagcuuuu

SEQ ID NO: 1834559 - RNA, 19 nt, Homo sapiens
  misc_RNA (1)...(19): siRNA sense strand
aaacuucagauaugggaua

SEQ ID NO: 1834560 - RNA, 19 nt, Homo sapiens
  misc_RNA (1)...(19): siRNA sense strand
caacauggucauuaugcuu

SEQ ID NO: 1834561 - RNA, 19 nt, Homo sapiens
  misc_RNA (1)...(19): siRNA sense strand
gugcucgaaugauaacuau

SEQ ID NO: 1834562 - RNA, 19 nt, Homo sapiens
  misc_RNA (1)...(19): siRNA sense strand
guacgccuaucucuucaag

SEQ ID NO: 1834563 - RNA, 19 nt, Homo sapiens
  misc_RNA (1)...(19): siRNA sense strand
ggagagauacauucaacca

SEQ ID NO: 1834564 - RNA, 19 nt, Homo sapiens
  misc_RNA (1)...(19): siRNA sense strand
ugaccuuacuauuggugua

SEQ ID NO: 1834565 - RNA, 19 nt, Homo sapiens
  misc_RNA (1)...(19): siRNA sense strand
gguaaaucaugcuuauugc

SEQ ID NO: 1834566 - RNA, 19 nt, Homo sapiens
  misc_RNA (1)...(19): siRNA sense strand
aagaagaaggugaagcuuu

SEQ ID NO: 1834567 - RNA, 19 nt, Homo sapiens
  misc_RNA (1)...(19): siRNA sense strand
uguagaagaggcauuuauu

SEQ ID NO: 1834568 - RNA, 19 nt, Homo sapiens
  misc_RNA (1)...(19): siRNA sense strand
ugguaaaucaugcuuauug

SEQ ID NO: 1834569 - RNA, 19 nt, Homo sapiens
  misc_RNA (1)...(19): siRNA sense strand
gcuuauugcuacaguuuac

SEQ ID NO: 1834570 - RNA, 19 nt, Homo sapiens
  misc_RNA (1)...(19): siRNA sense strand
ugcaugaccuuacuauugg

SEQ ID NO: 1834571 - RNA, 19 nt, Homo sapiens
  misc_RNA (1)...(19): siRNA sense strand
ccaucacaaggucguauua

SEQ ID NO: 1834572 - RNA, 19 nt, Homo sapiens
  misc_RNA (1)...(19): siRNA sense strand
caacacaugcaggcaauca

SEQ ID NO: 1834573 - RNA, 19 nt, Homo sapiens
  misc_RNA (1)...(19): siRNA sense strand
aaggagucuuugacauuaa

SEQ ID NO: 1834574 - RNA, 19 nt, Homo sapiens
  misc_RNA (1)...(19): siRNA sense strand
aacauggucauuaugcuua

SEQ ID NO: 1834575 - RNA, 19 nt, Homo sapiens
  misc_RNA (1)...(19): siRNA sense strand
ucauggaaacgucugcuaa

SEQ ID NO: 1834576 - RNA, 19 nt, Homo sapiens
  misc_RNA (1)...(19): siRNA sense strand
gucauuaugcuuauuggaa

SEQ ID NO: 1834577 - RNA, 19 nt, Homo sapiens
  misc_RNA (1)...(19): siRNA sense strand
gauaaaacuucagauaugg

SEQ ID NO: 1834578 - RNA, 19 nt, Homo sapiens
  misc_RNA (1)...(19): siRNA sense strand
cacaaggucguauuacaga

SEQ ID NO: 1834579 - RNA, 19 nt, Homo sapiens
  misc_RNA (1)...(19): siRNA sense strand
gccuaucucuucaaguaca

SEQ ID NO: 1834580 - RNA, 19 nt, Homo sapiens
  misc_RNA (1)...(19): siRNA sense strand
gguuucagccagugcauga

SEQ ID NO: 1834581 - RNA, 19 nt, Homo sapiens
  misc_RNA (1)...(19): siRNA sense strand
ggauacggcagggcaagaa

SEQ ID NO: 1834582 - RNA, 19 nt, Homo sapiens
  misc_RNA (1)...(19): siRNA sense strand
ucucuucaaguacaucaua

SEQ ID NO: 1834583 - RNA, 19 nt, Homo sapiens
  misc_RNA (1)...(19): siRNA sense strand
ggugcucgaaugauaacua

SEQ ID NO: 1834584 - RNA, 19 nt, Homo sapiens
  misc_RNA (1)...(19): siRNA sense strand
gcagcaggagcuuuacuag

SEQ ID NO: 1834585 - RNA, 19 nt, Homo sapiens
  misc_RNA (1)...(19): siRNA sense strand
caucauaaucggcgacaca

SEQ ID NO: 1834586 - RNA, 19 nt, Homo sapiens
  misc_RNA (1)...(19): siRNA sense strand
acgagaacauggacucauc

SEQ ID NO: 1834587 - RNA, 19 nt, Homo sapiens
  misc_RNA (1)...(19): siRNA sense strand
gcuuuacuaguuuacgaua

SEQ ID NO: 1834588 - RNA, 19 nt, Homo sapiens
  misc_RNA (1)...(19): siRNA sense strand
gagaacauggacucaucuu

SEQ ID NO: 1834589 - RNA, 19 nt, Homo sapiens
  misc_RNA (1)...(19): siRNA sense strand
ggagucuuugacauuaaua

SEQ ID NO: 1834590 - RNA, 19 nt, Homo sapiens
  misc_RNA (1)...(19): siRNA sense strand
acacggagagauacauuca

SEQ ID NO: 1834591 - RNA, 19 nt, Homo sapiens
  misc_RNA (1)...(19): siRNA sense strand
uuaauaaugaggcaaaugg

SEQ ID NO: 1834592 - RNA, 19 nt, Homo sapiens
  misc_RNA (1)...(19): siRNA sense strand
auuccaacauggucauuau

SEQ ID NO: 1834593 - RNA, 19 nt, Homo sapiens
  misc_RNA (1)...(19): siRNA sense strand
ucacaaggucguauuacag

SEQ ID NO: 1834594 - RNA, 19 nt, Homo sapiens
  misc_RNA (1)...(19): siRNA sense strand
gcacgagaacauggacuca

SEQ ID NO: 1834595 - RNA, 19 nt, Homo sapiens
  misc_RNA (1)...(19): siRNA sense strand
gcguacgccuaucucuuca

SEQ ID NO: 1834596 - RNA, 19 nt, Homo sapiens
  misc_RNA (1)...(19): siRNA sense strand
aacauggacucaucuucau

SEQ ID NO: 1834597 - RNA, 19 nt, Homo sapiens
  misc_RNA (1)...(19): siRNA sense strand
uacuauugguguagaguuc

SEQ ID NO: 1834598 - RNA, 19 nt, Homo sapiens
  misc_RNA (1)...(19): siRNA sense strand
gccagugcaugaccuuacu

SEQ ID NO: 1834599 - RNA, 19 nt, Homo sapiens
  misc_RNA (1)...(19): siRNA sense strand
gcaugaccuuacuauuggu

SEQ ID NO: 1834600 - RNA, 19 nt, Homo sapiens
  misc_RNA (1)...(19): siRNA sense strand
aggagucuuugacauuaau

SEQ ID NO: 1834601 - RNA, 19 nt, Homo sapiens
  misc_RNA (1)...(19): siRNA sense strand
auggaaacgucugcuaaga

SEQ ID NO: 1834602 - RNA, 19 nt, Homo sapiens
  misc_RNA (1)...(19): siRNA sense strand
ccaacauggucauuaugcu

SEQ ID NO: 1834603 - RNA, 19 nt, Homo sapiens
  misc_RNA (1)...(19): siRNA sense strand
acggagagauacauucaac

SEQ ID NO: 1834604 - RNA, 19 nt, Homo sapiens
  misc_RNA (1)...(19): siRNA sense strand
cucgaaugauaacuauuga

SEQ ID NO: 1834605 - RNA, 19 nt, Homo sapiens
  misc_RNA (1)...(19): siRNA sense strand
uuacacggagagauacauu

SEQ ID NO: 1834606 - RNA, 19 nt, Homo sapiens
  misc_RNA (1)...(19): siRNA sense strand
gaagauggcugcuguaaga

SEQ ID NO: 1834607 - RNA, 19 nt, Homo sapiens
  misc_RNA (1)...(19): siRNA sense strand
gaaaugaugucuucucaaa

SEQ ID NO: 1834608 - RNA, 19 nt, Homo sapiens
  misc_RNA (1)...(19): siRNA sense strand
gaaggcugcuggauaauga

SEQ ID NO: 1834609 - RNA, 19 nt, Homo sapiens
  misc_RNA (1)...(19): siRNA sense strand
gaaagggacuggacugucu

SEQ ID NO: 1834610 - RNA, 19 nt, Homo sapiens
  misc_RNA (1)...(19): siRNA sense strand
gggaaaugcugccugguaa

SEQ ID NO: 1834611 - RNA, 19 nt, Homo sapiens
  misc_RNA (1)...(19): siRNA sense strand
gacaugaaauccaaacuug

SEQ ID NO: 1834612 - RNA, 19 nt, Homo sapiens
  misc_RNA (1)...(19): siRNA sense strand
gcagaugauuaaggauuua

SEQ ID NO: 1834613 - RNA, 19 nt, Homo sapiens
  misc_RNA (1)...(19): siRNA sense strand
gauuaaggauuuagccaaa

SEQ ID NO: 1834614 - RNA, 19 nt, Homo sapiens
  misc_RNA (1)...(19): siRNA sense strand
gggcaucccugaaucuuug

SEQ ID NO: 1834615 - RNA, 19 nt, Homo sapiens
  misc_RNA (1)...(19): siRNA sense strand
ccaugaagauccagaagaa

SEQ ID NO: 1834616 - RNA, 19 nt, Homo sapiens
  misc_RNA (1)...(19): siRNA sense strand
caacaagcaugugcaguga

SEQ ID NO: 1834617 - RNA, 19 nt, Homo sapiens
  misc_RNA (1)...(19): siRNA sense strand
gaauuuauccaguucugua

SEQ ID NO: 1834618 - RNA, 19 nt, Homo sapiens
  misc_RNA (1)...(19): siRNA sense strand
ugaagcagaugauuaagga

SEQ ID NO: 1834619 - RNA, 19 nt, Homo sapiens
  misc_RNA (1)...(19): siRNA sense strand
gaacuuaagcugaguaacu

SEQ ID NO: 1834620 - RNA, 19 nt, Homo sapiens
  misc_RNA (1)...(19): siRNA sense strand
gcucuuggaugacaacaug

SEQ ID NO: 1834621 - RNA, 19 nt, Homo sapiens
  misc_RNA (1)...(19): siRNA sense strand
aaacgggaauugcugcuuu

SEQ ID NO: 1834622 - RNA, 19 nt, Homo sapiens
  misc_RNA (1)...(19): siRNA sense strand
uagcuucacuucugacuga

SEQ ID NO: 1834623 - RNA, 19 nt, Homo sapiens
  misc_RNA (1)...(19): siRNA sense strand
guaaaacucuguacaguau

SEQ ID NO: 1834624 - RNA, 19 nt, Homo sapiens
  misc_RNA (1)...(19): siRNA sense strand
caagagagaacauaugaug

SEQ ID NO: 1834625 - RNA, 19 nt, Homo sapiens
  misc_RNA (1)...(19): siRNA sense strand
ugacggaucuugccucaca

SEQ ID NO: 1834626 - RNA, 19 nt, Homo sapiens
  misc_RNA (1)...(19): siRNA sense strand
aaauaagccuguggaauga

SEQ ID NO: 1834627 - RNA, 19 nt, Homo sapiens
  misc_RNA (1)...(19): siRNA sense strand
gagagaauuuauccaguuc

SEQ ID NO: 1834628 - RNA, 19 nt, Homo sapiens
  misc_RNA (1)...(19): siRNA sense strand
ggauuccuaugagaaauuu

SEQ ID NO: 1834629 - RNA, 19 nt, Homo sapiens
  misc_RNA (1)...(19): siRNA sense strand
gcagaaccguguguauguu

SEQ ID NO: 1834630 - RNA, 19 nt, Homo sapiens
  misc_RNA (1)...(19): siRNA sense strand
ggacaugaaauccaaacuu

SEQ ID NO: 1834631 - RNA, 19 nt, Homo sapiens
  misc_RNA (1)...(19): siRNA sense strand
gcaguuugcacaccuguuu

SEQ ID NO: 1834632 - RNA, 19 nt, Homo sapiens
  misc_RNA (1)...(19): siRNA sense strand
gcacaugaacgaccucuca

SEQ ID NO: 1834633 - RNA, 19 nt, Homo sapiens
  misc_RNA (1)...(19): siRNA sense strand
caagaucaaucaguacaau

SEQ ID NO: 1834634 - RNA, 19 nt, Homo sapiens
  misc_RNA (1)...(19): siRNA sense strand
caaucacaaucugaacuua

SEQ ID NO: 1834635 - RNA, 19 nt, Homo sapiens
  misc_RNA (1)...(19): siRNA sense strand
cagcugaagcagaugauua

SEQ ID NO: 1834636 - RNA, 19 nt, Homo sapiens
  misc_RNA (1)...(19): siRNA sense strand
uuugugagcugccucgaua

SEQ ID NO: 1834637 - RNA, 19 nt, Homo sapiens
  misc_RNA (1)...(19): siRNA sense strand
agagagaauuuauccaguu

SEQ ID NO: 1834638 - RNA, 19 nt, Homo sapiens
  misc_RNA (1)...(19): siRNA sense strand
gagaagauggcugcuguaa

SEQ ID NO: 1834639 - RNA, 19 nt, Homo sapiens
  misc_RNA (1)...(19): siRNA sense strand
gagaaagaauugcccaaaa

SEQ ID NO: 1834640 - RNA, 19 nt, Homo sapiens
  misc_RNA (1)...(19): siRNA sense strand
ugcgaaggcugcuggauaa

SEQ ID NO: 1834641 - RNA, 19 nt, Homo sapiens
  misc_RNA (1)...(19): siRNA sense strand
gauggcugcuguaagauca

SEQ ID NO: 1834642 - RNA, 19 nt, Homo sapiens
  misc_RNA (1)...(19): siRNA sense strand
gcgaggagagugagaaaga

SEQ ID NO: 1834643 - RNA, 19 nt, Homo sapiens
  misc_RNA (1)...(19): siRNA sense strand
gaaaugagccaccaaucac

SEQ ID NO: 1834644 - RNA, 19 nt, Homo sapiens
  misc_RNA (1)...(19): siRNA sense strand
ucagagagguggugagcau

SEQ ID NO: 1834645 - RNA, 19 nt, Homo sapiens
  misc_RNA (1)...(19): siRNA sense strand
gaacagucauuagucaacu

SEQ ID NO: 1834646 - RNA, 19 nt, Homo sapiens
  misc_RNA (1)...(19): siRNA sense strand
gaacgaaacgggaauugcu

SEQ ID NO: 1834647 - RNA, 19 nt, Homo sapiens
  misc_RNA (1)...(19): siRNA sense strand
caugaaauccaaacuugaa

SEQ ID NO: 1834648 - RNA, 19 nt, Homo sapiens
  misc_RNA (1)...(19): siRNA sense strand
ugagcugccucgauauuau

SEQ ID NO: 1834649 - RNA, 19 nt, Homo sapiens
  misc_RNA (1)...(19): siRNA sense strand
ugaaaugagccaccaauca

SEQ ID NO: 1834650 - RNA, 19 nt, Homo sapiens
  misc_RNA (1)...(19): siRNA sense strand
uuaaggauuuagccaaaga

SEQ ID NO: 1834651 - RNA, 19 nt, Homo sapiens
  misc_RNA (1)...(19): siRNA sense strand
gaggagcucuacgacuuau

SEQ ID NO: 1834652 - RNA, 19 nt, Homo sapiens
  misc_RNA (1)...(19): siRNA sense strand
gaaacccaauggugaugca

SEQ ID NO: 1834653 - RNA, 19 nt, Homo sapiens
  misc_RNA (1)...(19): siRNA sense strand
gagcggaugcugcccgauu

SEQ ID NO: 1834654 - RNA, 19 nt, Homo sapiens
  misc_RNA (1)...(19): siRNA sense strand
gagaaaugaaugagaagau

SEQ ID NO: 1834655 - RNA, 19 nt, Homo sapiens
  misc_RNA (1)...(19): siRNA sense strand
uggcuucucuucucagaug

SEQ ID NO: 1834656 - RNA, 19 nt, Homo sapiens
  misc_RNA (1)...(19): siRNA sense strand
gugcagugaccacagauuu

SEQ ID NO: 1834657 - RNA, 19 nt, Homo sapiens
  misc_RNA (1)...(19): siRNA sense strand
uggcuucacucguguuuca

SEQ ID NO: 1834658 - RNA, 19 nt, Homo sapiens
  misc_RNA (1)...(19): siRNA sense strand
augccaagaucaaucagua

SEQ ID NO: 1834659 - RNA, 19 nt, Homo sapiens
  misc_RNA (1)...(19): siRNA sense strand
gaagccagagcacagaaug

SEQ ID NO: 1834660 - RNA, 19 nt, Homo sapiens
  misc_RNA (1)...(19): siRNA sense strand
ggagcucuacgacuuauuc

SEQ ID NO: 1834661 - RNA, 19 nt, Homo sapiens
  misc_RNA (1)...(19): siRNA sense strand
gcuguugguugcugugugu

SEQ ID NO: 1834662 - RNA, 19 nt, Homo sapiens
  misc_RNA (1)...(19): siRNA sense strand
ccagagcacagaaugaguu

SEQ ID NO: 1834663 - RNA, 19 nt, Homo sapiens
  misc_RNA (1)...(19): siRNA sense strand
ucacucguguuucauucaa

SEQ ID NO: 1834664 - RNA, 19 nt, Homo sapiens
  misc_RNA (1)...(19): siRNA sense strand
uggaccagcucaucgaguu

SEQ ID NO: 1834665 - RNA, 19 nt, Homo sapiens
  misc_RNA (1)...(19): siRNA sense strand
caacauggaccagcucauc

SEQ ID NO: 1834666 - RNA, 19 nt, Homo sapiens
  misc_RNA (1)...(19): siRNA sense strand
gcagguuucuagaucacau

SEQ ID NO: 1834667 - RNA, 19 nt, Homo sapiens
  misc_RNA (1)...(19): siRNA sense strand
ugacagcuacaucugcuuu

SEQ ID NO: 1834668 - RNA, 19 nt, Homo sapiens
  misc_RNA (1)...(19): siRNA sense strand
ucucagcccuggcgucugu

SEQ ID NO: 1834669 - RNA, 19 nt, Homo sapiens
  misc_RNA (1)...(19): siRNA sense strand
aaaauaagccuguggaaug

SEQ ID NO: 1834670 - RNA, 19 nt, Homo sapiens
  misc_RNA (1)...(19): siRNA sense strand
ggcagaaccguguguaugu

SEQ ID NO: 1834671 - RNA, 19 nt, Homo sapiens
  misc_RNA (1)...(19): siRNA sense strand
gugagcugccucgauauua

SEQ ID NO: 1834672 - RNA, 19 nt, Homo sapiens
  misc_RNA (1)...(19): siRNA sense strand
gcucuacgacuuauucaag

SEQ ID NO: 1834673 - RNA, 19 nt, Homo sapiens
  misc_RNA (1)...(19): siRNA sense strand
ccaccaaucacaaucugaa

SEQ ID NO: 1834674 - RNA, 19 nt, Homo sapiens
  misc_RNA (1)...(19): siRNA sense strand
gccagucgccguugaggaa

SEQ ID NO: 1834675 - RNA, 19 nt, Homo sapiens
  misc_RNA (1)...(19): siRNA sense strand
ggagaaaugaaugagaaga

SEQ ID NO: 1834676 - RNA, 19 nt, Homo sapiens
  misc_RNA (1)...(19): siRNA sense strand
gaggagagugagaaagaga

SEQ ID NO: 1834677 - RNA, 19 nt, Homo sapiens
  misc_RNA (1)...(19): siRNA sense strand
uacaguauguuccaugaag

SEQ ID NO: 1834678 - RNA, 19 nt, Homo sapiens
  misc_RNA (1)...(19): siRNA sense strand
uguacaguauguuccauga

SEQ ID NO: 1834679 - RNA, 19 nt, Homo sapiens
  misc_RNA (1)...(19): siRNA sense strand
gaaagaauugcccaaaaug

SEQ ID NO: 1834680 - RNA, 19 nt, Homo sapiens
  misc_RNA (1)...(19): siRNA sense strand
gcacgcgguuguggacugu

SEQ ID NO: 1834681 - RNA, 19 nt, Homo sapiens
  misc_RNA (1)...(19): siRNA sense strand
caauggugaugcaguugau

SEQ ID NO: 1834682 - RNA, 19 nt, Homo sapiens
  misc_RNA (1)...(19): siRNA sense strand
cguucaggcucuuggauga

SEQ ID NO: 1834683 - RNA, 19 nt, Homo sapiens
  misc_RNA (1)...(19): siRNA sense strand
agaucgagcaccuacguua

SEQ ID NO: 1834684 - RNA, 19 nt, Homo sapiens
  misc_RNA (1)...(19): siRNA sense strand
gcuggauaaugaggucuuu

SEQ ID NO: 1834685 - RNA, 19 nt, Homo sapiens
  misc_RNA (1)...(19): siRNA sense strand
cgacaccucugcggaugau

SEQ ID NO: 1834686 - RNA, 19 nt, Homo sapiens
  misc_RNA (1)...(19): siRNA sense strand
agcagaugauuaaggauuu

SEQ ID NO: 1834687 - RNA, 19 nt, Homo sapiens
  misc_RNA (1)...(19): siRNA sense strand
auggagaaaugaaugagaa

SEQ ID NO: 1834688 - RNA, 19 nt, Homo sapiens
  misc_RNA (1)...(19): siRNA sense strand
gcugagcaguaccgcauag

SEQ ID NO: 1834689 - RNA, 19 nt, Homo sapiens
  misc_RNA (1)...(19): siRNA sense strand
gggauuccuaugagaaauu

SEQ ID NO: 1834690 - RNA, 19 nt, Homo sapiens
  misc_RNA (1)...(19): siRNA sense strand
uugaaaugaugucuucuca

SEQ ID NO: 1834691 - RNA, 19 nt, Homo sapiens
  misc_RNA (1)...(19): siRNA sense strand
ccaaucacaaucugaacuu

SEQ ID NO: 1834692 - RNA, 19 nt, Homo sapiens
  misc_RNA (1)...(19): siRNA sense strand
agaaagaauugcccaaaau

SEQ ID NO: 1834693 - RNA, 19 nt, Homo sapiens
  misc_RNA (1)...(19): siRNA sense strand
ugagaaagaauugcccaaa

SEQ ID NO: 1834694 - RNA, 19 nt, Homo sapiens
  misc_RNA (1)...(19): siRNA sense strand
gacagccagucgccguuga

SEQ ID NO: 1834695 - RNA, 19 nt, Homo sapiens
  misc_RNA (1)...(19): siRNA sense strand
ucagcagguuucuagauca

SEQ ID NO: 1834696 - RNA, 19 nt, Homo sapiens
  misc_RNA (1)...(19): siRNA sense strand
agcggaugcugcccgauua

SEQ ID NO: 1834697 - RNA, 19 nt, Homo sapiens
  misc_RNA (1)...(19): siRNA sense strand
cagaaccguguguauguuu

SEQ ID NO: 1834698 - RNA, 19 nt, Homo sapiens
  misc_RNA (1)...(19): siRNA sense strand
gaugcugcccgauuacuuc

SEQ ID NO: 1834699 - RNA, 19 nt, Homo sapiens
  misc_RNA (1)...(19): siRNA sense strand
uaagcugaguaacuuguag

SEQ ID NO: 1834700 - RNA, 19 nt, Homo sapiens
  misc_RNA (1)...(19): siRNA sense strand
gaaaagccacuggacauga

SEQ ID NO: 1834701 - RNA, 19 nt, Homo sapiens
  misc_RNA (1)...(19): siRNA sense strand
cgaggcagcagcucuggaa

SEQ ID NO: 1834702 - RNA, 19 nt, Homo sapiens
  misc_RNA (1)...(19): siRNA sense strand
aagcagaugauuaaggauu

SEQ ID NO: 1834703 - RNA, 19 nt, Homo sapiens
  misc_RNA (1)...(19): siRNA sense strand
gagcugccucgauauuaug

SEQ ID NO: 1834704 - RNA, 19 nt, Homo sapiens
  misc_RNA (1)...(19): siRNA sense strand
ugaaugugguagacugcuu

SEQ ID NO: 1834705 - RNA, 19 nt, Homo sapiens
  misc_RNA (1)...(19): siRNA sense strand
uggcagagcacaugaacga

SEQ ID NO: 1834706 - RNA, 19 nt, Homo sapiens
  misc_RNA (1)...(19): siRNA sense strand
gcaaggagcauuucaauua

SEQ ID NO: 1834707 - RNA, 19 nt, Homo sapiens
  misc_RNA (1)...(19): siRNA sense strand
ugacaaagcugaucaaugc

SEQ ID NO: 1834708 - RNA, 19 nt, Homo sapiens
  misc_RNA (1)...(19): siRNA sense strand
gagcaugucaucagcaaua

SEQ ID NO: 1834709 - RNA, 19 nt, Homo sapiens
  misc_RNA (1)...(19): siRNA sense strand
gcugaucaaugcugaauau

SEQ ID NO: 1834710 - RNA, 19 nt, Homo sapiens
  misc_RNA (1)...(19): siRNA sense strand
caaggcggcuggaauauca

SEQ ID NO: 1834711 - RNA, 19 nt, Homo sapiens
  misc_RNA (1)...(19): siRNA sense strand
acaaggagaucauguuuca

SEQ ID NO: 1834712 - RNA, 19 nt, Homo sapiens
  misc_RNA (1)...(19): siRNA sense strand
gagaugaugugcccuucuu

SEQ ID NO: 1834713 - RNA, 19 nt, Homo sapiens
  misc_RNA (1)...(19): siRNA sense strand
gaagcaggauggaugaaca

SEQ ID NO: 1834714 - RNA, 19 nt, Homo sapiens
  misc_RNA (1)...(19): siRNA sense strand
gcauuucaauuacuacuca

SEQ ID NO: 1834715 - RNA, 19 nt, Homo sapiens
  misc_RNA (1)...(19): siRNA sense strand
uggcaaaguugguguguga

SEQ ID NO: 1834716 - RNA, 19 nt, Homo sapiens
  misc_RNA (1)...(19): siRNA sense strand
cagaggcgcucaaggacuu

SEQ ID NO: 1834717 - RNA, 19 nt, Homo sapiens
  misc_RNA (1)...(19): siRNA sense strand
ucaccgaguucccuaaugu

SEQ ID NO: 1834718 - RNA, 19 nt, Homo sapiens
  misc_RNA (1)...(19): siRNA sense strand
ggccaaggcggcuggaaua

SEQ ID NO: 1834719 - RNA, 19 nt, Homo sapiens
  misc_RNA (1)...(19): siRNA sense strand
ggaguuccuugaauuucuu

SEQ ID NO: 1834720 - RNA, 19 nt, Homo sapiens
  misc_RNA (1)...(19): siRNA sense strand
caaggagcauuucaauuac

SEQ ID NO: 1834721 - RNA, 19 nt, Homo sapiens
  misc_RNA (1)...(19): siRNA sense strand
caaaguuggugugugaaga

SEQ ID NO: 1834722 - RNA, 19 nt, Homo sapiens
  misc_RNA (1)...(19): siRNA sense strand
gagaacucauccacucaga

SEQ ID NO: 1834723 - RNA, 19 nt, Homo sapiens
  misc_RNA (1)...(19): siRNA sense strand
caauguggaucgguucuau

SEQ ID NO: 1834724 - RNA, 19 nt, Homo sapiens
  misc_RNA (1)...(19): siRNA sense strand
cuacaaggcagagaaguuu

SEQ ID NO: 1834725 - RNA, 19 nt, Homo sapiens
  misc_RNA (1)...(19): siRNA sense strand
caccuugucuucucacuca

SEQ ID NO: 1834726 - RNA, 19 nt, Homo sapiens
  misc_RNA (1)...(19): siRNA sense strand
uacaggaggugcaggagaa

SEQ ID NO: 1834727 - RNA, 19 nt, Homo sapiens
  misc_RNA (1)...(19): siRNA sense strand
caucguggcuguggucuuc

SEQ ID NO: 1834728 - RNA, 19 nt, Homo sapiens
  misc_RNA (1)...(19): siRNA sense strand
ccaccaagcugccauacac

SEQ ID NO: 1834729 - RNA, 19 nt, Homo sapiens
  misc_RNA (1)...(19): siRNA sense strand
ucaaacugcaggacuuuaa

SEQ ID NO: 1834730 - RNA, 19 nt, Homo sapiens
  misc_RNA (1)...(19): siRNA sense strand
gaggaggacuacauuccau

SEQ ID NO: 1834731 - RNA, 19 nt, Homo sapiens
  misc_RNA (1)...(19): siRNA sense strand
aaacagaggaggacuacau

SEQ ID NO: 1834732 - RNA, 19 nt, Homo sapiens
  misc_RNA (1)...(19): siRNA sense strand
gaugaugugcccuucuuug

SEQ ID NO: 1834733 - RNA, 19 nt, Homo sapiens
  misc_RNA (1)...(19): siRNA sense strand
caaguuuggcgucauuuau

SEQ ID NO: 1834734 - RNA, 19 nt, Homo sapiens
  misc_RNA (1)...(19): siRNA sense strand
ccacugcagucgcccacaa

SEQ ID NO: 1834735 - RNA, 19 nt, Homo sapiens
  misc_RNA (1)...(19): siRNA sense strand
ggaccaagugccggacaua

SEQ ID NO: 1834736 - RNA, 19 nt, Homo sapiens
  misc_RNA (1)...(19): siRNA sense strand
caucagcaauaacuucaag

SEQ ID NO: 1834737 - RNA, 19 nt, Homo sapiens
  misc_RNA (1)...(19): siRNA sense strand
ccgaaucuguguacugcaa

SEQ ID NO: 1834738 - RNA, 19 nt, Homo sapiens
  misc_RNA (1)...(19): siRNA sense strand
gaacucuucagcaccaaug

SEQ ID NO: 1834739 - RNA, 19 nt, Homo sapiens
  misc_RNA (1)...(19): siRNA sense strand
ucaaguuuggcgucauuua

SEQ ID NO: 1834740 - RNA, 19 nt, Homo sapiens
  misc_RNA (1)...(19): siRNA sense strand
gagaugcccacgaccaaga

SEQ ID NO: 1834741 - RNA, 19 nt, Homo sapiens
  misc_RNA (1)...(19): siRNA sense strand
gcuacaaggcagagaaguu

SEQ ID NO: 1834742 - RNA, 19 nt, Homo sapiens
  misc_RNA (1)...(19): siRNA sense strand
gcacaucgggaacgacauc

SEQ ID NO: 1834743 - RNA, 19 nt, Homo sapiens
  misc_RNA (1)...(19): siRNA sense strand
gcgggacuccuucaucuau

SEQ ID NO: 1834744 - RNA, 19 nt, Homo sapiens
  misc_RNA (1)...(19): siRNA sense strand
gggacuccuucaucuauag

SEQ ID NO: 1834745 - RNA, 19 nt, Homo sapiens
  misc_RNA (1)...(19): siRNA sense strand
cgggacuccuucaucuaua

SEQ ID NO: 1834746 - RNA, 19 nt, Homo sapiens
  misc_RNA (1)...(19): siRNA sense strand
caugaucgcguccaacuuc

SEQ ID NO: 1834747 - RNA, 19 nt, Homo sapiens
  misc_RNA (1)...(19): siRNA sense strand
aggagcauuucaauuacua

SEQ ID NO: 1834748 - RNA, 19 nt, Homo sapiens
  misc_RNA (1)...(19): siRNA sense strand
cuucaaguuuggcgucauu

SEQ ID NO: 1834749 - RNA, 19 nt, Homo sapiens
  misc_RNA (1)...(19): siRNA sense strand
cgaguucccuaauguuguc

SEQ ID NO: 1834750 - RNA, 19 nt, Homo sapiens
  misc_RNA (1)...(19): siRNA sense strand
ggucaaacugcaggacuuu

SEQ ID NO: 1834751 - RNA, 19 nt, Homo sapiens
  misc_RNA (1)...(19): siRNA sense strand
ggaccgaaucuguguacug

SEQ ID NO: 1834752 - RNA, 19 nt, Homo sapiens
  misc_RNA (1)...(19): siRNA sense strand
ucguggaguuccuugaauu

SEQ ID NO: 1834753 - RNA, 19 nt, Homo sapiens
  misc_RNA (1)...(19): siRNA sense strand
ggcaaggagcauuucaauu

SEQ ID NO: 1834754 - RNA, 19 nt, Homo sapiens
  misc_RNA (1)...(19): siRNA sense strand
aggacaagauggagaaugg

SEQ ID NO: 1834755 - RNA, 19 nt, Homo sapiens
  misc_RNA (1)...(19): siRNA sense strand
ccacagccaguccaugaug

SEQ ID NO: 1834756 - RNA, 19 nt, Homo sapiens
  misc_RNA (1)...(19): siRNA sense strand
ggagacgcucuaugaggaa

SEQ ID NO: 1834757 - RNA, 19 nt, Homo sapiens
  misc_RNA (1)...(19): siRNA sense strand
ugaauaugccugcuacaag

SEQ ID NO: 1834758 - RNA, 19 nt, Homo sapiens
  misc_RNA (1)...(19): siRNA sense strand
gcaacuuccgcaacaagga

SEQ ID NO: 1834759 - RNA, 19 nt, Homo sapiens
  misc_RNA (1)...(19): siRNA sense strand
gcaaaguuggugugugaag

SEQ ID NO: 1834760 - RNA, 19 nt, Homo sapiens
  misc_RNA (1)...(19): siRNA sense strand
gacgcucuaugaggaacua

SEQ ID NO: 1834761 - RNA, 19 nt, Homo sapiens
  misc_RNA (1)...(19): siRNA sense strand
aagcgggacuccuucaucu

SEQ ID NO: 1834762 - RNA, 19 nt, Homo sapiens
  misc_RNA (1)...(19): siRNA sense strand
aggugaagcucgagugcaa

SEQ ID NO: 1834763 - RNA, 19 nt, Homo sapiens
  misc_RNA (1)...(19): siRNA sense strand
acucagagcuccccagaga

SEQ ID NO: 1834764 - RNA, 19 nt, Homo sapiens
  misc_RNA (1)...(19): siRNA sense strand
ucacucaaguacgauguca

SEQ ID NO: 1834765 - RNA, 19 nt, Homo sapiens
  misc_RNA (1)...(19): siRNA sense strand
ccaagucggagaacucauc

SEQ ID NO: 1834766 - RNA, 19 nt, Homo sapiens
  misc_RNA (1)...(19): siRNA sense strand
ccauuggcaucgagaacau

SEQ ID NO: 1834767 - RNA, 19 nt, Homo sapiens
  misc_RNA (1)...(19): siRNA sense strand
gcggcuucuuugagucuuu

SEQ ID NO: 1834768 - RNA, 19 nt, Homo sapiens
  misc_RNA (1)...(19): siRNA sense strand
gcaucuaccggaagcacuu

SEQ ID NO: 1834769 - RNA, 19 nt, Homo sapiens
  misc_RNA (1)...(19): siRNA sense strand
ucuccugccucaccgaguu

SEQ ID NO: 1834770 - RNA, 19 nt, Homo sapiens
  misc_RNA (1)...(19): siRNA sense strand
gagcgugcacgaggucuug

SEQ ID NO: 1834771 - RNA, 19 nt, Homo sapiens
  misc_RNA (1)...(19): siRNA sense strand
cagcaccaaugaggaaagu

SEQ ID NO: 1834772 - RNA, 19 nt, Homo sapiens
  misc_RNA (1)...(19): siRNA sense strand
gaaucuguguacugcaacu

SEQ ID NO: 1834773 - RNA, 19 nt, Homo sapiens
  misc_RNA (1)...(19): siRNA sense strand
gggcaccaaccacgaaauc

SEQ ID NO: 1834774 - RNA, 19 nt, Homo sapiens
  misc_RNA (1)...(19): siRNA sense strand
ggaagagccccacgaggaa

SEQ ID NO: 1834775 - RNA, 19 nt, Homo sapiens
  misc_RNA (1)...(19): siRNA sense strand
gagaagaugcagggaagca

SEQ ID NO: 1834776 - RNA, 19 nt, Homo sapiens
  misc_RNA (1)...(19): siRNA sense strand
gcaacaagaagcccaacac

SEQ ID NO: 1834777 - RNA, 19 nt, Homo sapiens
  misc_RNA (1)...(19): siRNA sense strand
cggcaaggagcauuucaau

SEQ ID NO: 1834778 - RNA, 19 nt, Homo sapiens
  misc_RNA (1)...(19): siRNA sense strand
ggauugagggcaccaacca

SEQ ID NO: 1834779 - RNA, 19 nt, Homo sapiens
  misc_RNA (1)...(19): siRNA sense strand
ggaggacuacauuccauac

SEQ ID NO: 1834780 - RNA, 19 nt, Homo sapiens
  misc_RNA (1)...(19): siRNA sense strand
cguggaguuccuugaauuu

SEQ ID NO: 1834781 - RNA, 19 nt, Homo sapiens
  misc_RNA (1)...(19): siRNA sense strand
gguucuauccugugcucua

SEQ ID NO: 1834782 - RNA, 19 nt, Homo sapiens
  misc_RNA (1)...(19): siRNA sense strand
ucccuaauguuguccagau

SEQ ID NO: 1834783 - RNA, 19 nt, Homo sapiens
  misc_RNA (1)...(19): siRNA sense strand
uggaguuccuugaauuucu

SEQ ID NO: 1834784 - RNA, 19 nt, Homo sapiens
  misc_RNA (1)...(19): siRNA sense strand
caagcgggacuccuucauc

SEQ ID NO: 1834785 - RNA, 19 nt, Homo sapiens
  misc_RNA (1)...(19): siRNA sense strand
cagagaugcccacgaccaa

SEQ ID NO: 1834786 - RNA, 19 nt, Homo sapiens
  misc_RNA (1)...(19): siRNA sense strand
gacaugaucgcguccaacu

SEQ ID NO: 1834787 - RNA, 19 nt, Homo sapiens
  misc_RNA (1)...(19): siRNA sense strand
gcgacgaggacaagaugga

SEQ ID NO: 1834788 - RNA, 19 nt, Homo sapiens
  misc_RNA (1)...(19): siRNA sense strand
gagggcaccaaccacgaaa

SEQ ID NO: 1834789 - RNA, 19 nt, Homo sapiens
  misc_RNA (1)...(19): siRNA sense strand
gcggcuggaauaucacuga

SEQ ID NO: 1834790 - RNA, 19 nt, Homo sapiens
  misc_RNA (1)...(19): siRNA sense strand
gcaccaaccacgaaaucac

SEQ ID NO: 1834791 - RNA, 19 nt, Homo sapiens
  misc_RNA (1)...(19): siRNA sense strand
ucagaaagaugacauagaa

SEQ ID NO: 1834792 - RNA, 19 nt, Homo sapiens
  misc_RNA (1)...(19): siRNA sense strand
gcagauaacagcaugauaa

SEQ ID NO: 1834793 - RNA, 19 nt, Homo sapiens
  misc_RNA (1)...(19): siRNA sense strand
gagaauaccuguugggaau

SEQ ID NO: 1834794 - RNA, 19 nt, Homo sapiens
  misc_RNA (1)...(19): siRNA sense strand
caacaaugccgaugacaua

SEQ ID NO: 1834795 - RNA, 19 nt, Homo sapiens
  misc_RNA (1)...(19): siRNA sense strand
uaacaaagaaugacccaua

SEQ ID NO: 1834796 - RNA, 19 nt, Homo sapiens
  misc_RNA (1)...(19): siRNA sense strand
gauaacagcaugauaaaug

SEQ ID NO: 1834797 - RNA, 19 nt, Homo sapiens
  misc_RNA (1)...(19): siRNA sense strand
gaaaaccccucauguaauu

SEQ ID NO: 1834798 - RNA, 19 nt, Homo sapiens
  misc_RNA (1)...(19): siRNA sense strand
caaagaaugacccauauaa

SEQ ID NO: 1834799 - RNA, 19 nt, Homo sapiens
  misc_RNA (1)...(19): siRNA sense strand
aggaggagaugaaauauuu

SEQ ID NO: 1834800 - RNA, 19 nt, Homo sapiens
  misc_RNA (1)...(19): siRNA sense strand
gaacauacccuucuaucca

SEQ ID NO: 1834801 - RNA, 19 nt, Homo sapiens
  misc_RNA (1)...(19): siRNA sense strand
ccaacaugcugucuaauug

SEQ ID NO: 1834802 - RNA, 19 nt, Homo sapiens
  misc_RNA (1)...(19): siRNA sense strand
gauagucaguauucaggua

SEQ ID NO: 1834803 - RNA, 19 nt, Homo sapiens
  misc_RNA (1)...(19): siRNA sense strand
uccaaauacugcagaauua

SEQ ID NO: 1834804 - RNA, 19 nt, Homo sapiens
  misc_RNA (1)...(19): siRNA sense strand
gcagagacggcuacuauga

SEQ ID NO: 1834805 - RNA, 19 nt, Homo sapiens
  misc_RNA (1)...(19): siRNA sense strand
cagaggaggagaugaaaua

SEQ ID NO: 1834806 - RNA, 19 nt, Homo sapiens
  misc_RNA (1)...(19): siRNA sense strand
uuaaggauuugucguguaa

SEQ ID NO: 1834807 - RNA, 19 nt, Homo sapiens
  misc_RNA (1)...(19): siRNA sense strand
gaauaccuguugggaauga

SEQ ID NO: 1834808 - RNA, 19 nt, Homo sapiens
  misc_RNA (1)...(19): siRNA sense strand
gaaagaugacauagaaguu

SEQ ID NO: 1834809 - RNA, 19 nt, Homo sapiens
  misc_RNA (1)...(19): siRNA sense strand
gugcugggauuacaguuaa

SEQ ID NO: 1834810 - RNA, 19 nt, Homo sapiens
  misc_RNA (1)...(19): siRNA sense strand
gcaauaaagcaaagaaaca

SEQ ID NO: 1834811 - RNA, 19 nt, Homo sapiens
  misc_RNA (1)...(19): siRNA sense strand
ugagacagcuccaucagau

SEQ ID NO: 1834812 - RNA, 19 nt, Homo sapiens
  misc_RNA (1)...(19): siRNA sense strand
ugacaaaguucagaaagau

SEQ ID NO: 1834813 - RNA, 19 nt, Homo sapiens
  misc_RNA (1)...(19): siRNA sense strand
ggacacuuccuucuaauuc

SEQ ID NO: 1834814 - RNA, 19 nt, Homo sapiens
  misc_RNA (1)...(19): siRNA sense strand
ggaaguuagugaaucuaug

SEQ ID NO: 1834815 - RNA, 19 nt, Homo sapiens
  misc_RNA (1)...(19): siRNA sense strand
guacuaauccaaacaguca

SEQ ID NO: 1834816 - RNA, 19 nt, Homo sapiens
  misc_RNA (1)...(19): siRNA sense strand
ugaugaacaugguaauuug

SEQ ID NO: 1834817 - RNA, 19 nt, Homo sapiens
  misc_RNA (1)...(19): siRNA sense strand
cagauguccucuuccagua

SEQ ID NO: 1834818 - RNA, 19 nt, Homo sapiens
  misc_RNA (1)...(19): siRNA sense strand
gugacaaaguucagaaaga

SEQ ID NO: 1834819 - RNA, 19 nt, Homo sapiens
  misc_RNA (1)...(19): siRNA sense strand
gauaauccaagacuucuga

SEQ ID NO: 1834820 - RNA, 19 nt, Homo sapiens
  misc_RNA (1)...(19): siRNA sense strand
uugcaaagcuaucacagaa

SEQ ID NO: 1834821 - RNA, 19 nt, Homo sapiens
  misc_RNA (1)...(19): siRNA sense strand
aaagauacuuacggcaaua

SEQ ID NO: 1834822 - RNA, 19 nt, Homo sapiens
  misc_RNA (1)...(19): siRNA sense strand
gggaaugauuuaaaugcuu

SEQ ID NO: 1834823 - RNA, 19 nt, Homo sapiens
  misc_RNA (1)...(19): siRNA sense strand
ucaaguggauugucacauc

SEQ ID NO: 1834824 - RNA, 19 nt, Homo sapiens
  misc_RNA (1)...(19): siRNA sense strand
ugacaaccgugcuccaaau

SEQ ID NO: 1834825 - RNA, 19 nt, Homo sapiens
  misc_RNA (1)...(19): siRNA sense strand
uaacccguauauagagaua

SEQ ID NO: 1834826 - RNA, 19 nt, Homo sapiens
  misc_RNA (1)...(19): siRNA sense strand
caagaacgcagaccuuugu

SEQ ID NO: 1834827 - RNA, 19 nt, Homo sapiens
  misc_RNA (1)...(19): siRNA sense strand
ugacauagucggaauggaa

SEQ ID NO: 1834828 - RNA, 19 nt, Homo sapiens
  misc_RNA (1)...(19): siRNA sense strand
gguauucgaugugugaaga

SEQ ID NO: 1834829 - RNA, 19 nt, Homo sapiens
  misc_RNA (1)...(19): siRNA sense strand
cagcagauuuauaugguau

SEQ ID NO: 1834830 - RNA, 19 nt, Homo sapiens
  misc_RNA (1)...(19): siRNA sense strand
ggacaagaacgcagaccuu

SEQ ID NO: 1834831 - RNA, 19 nt, Homo sapiens
  misc_RNA (1)...(19): siRNA sense strand
gccaucagcagauuuauau

SEQ ID NO: 1834832 - RNA, 19 nt, Homo sapiens
  misc_RNA (1)...(19): siRNA sense strand
gaacccaauuuaugacaac

SEQ ID NO: 1834833 - RNA, 19 nt, Homo sapiens
  misc_RNA (1)...(19): siRNA sense strand
gguauuggcaguaugcaaa

SEQ ID NO: 1834834 - RNA, 19 nt, Homo sapiens
  misc_RNA (1)...(19): siRNA sense strand
caaguggauugucacauca

SEQ ID NO: 1834835 - RNA, 19 nt, Homo sapiens
  misc_RNA (1)...(19): siRNA sense strand
ccaaagugcugggauuaca

SEQ ID NO: 1834836 - RNA, 19 nt, Homo sapiens
  misc_RNA (1)...(19): siRNA sense strand
cacagaacccguaacagua

SEQ ID NO: 1834837 - RNA, 19 nt, Homo sapiens
  misc_RNA (1)...(19): siRNA sense strand
ucacagaacccguaacagu

SEQ ID NO: 1834838 - RNA, 19 nt, Homo sapiens
  misc_RNA (1)...(19): siRNA sense strand
gaacgcagaccuuuguuuu

SEQ ID NO: 1834839 - RNA, 19 nt, Homo sapiens
  misc_RNA (1)...(19): siRNA sense strand
caucucaaguggauuguca

SEQ ID NO: 1834840 - RNA, 19 nt, Homo sapiens
  misc_RNA (1)...(19): siRNA sense strand
gaacuauuauggaaaagga

SEQ ID NO: 1834841 - RNA, 19 nt, Homo sapiens
  misc_RNA (1)...(19): siRNA sense strand
gauguccucuuccaguaug

SEQ ID NO: 1834842 - RNA, 19 nt, Homo sapiens
  misc_RNA (1)...(19): siRNA sense strand
gaaguuagugaaucuaugg

SEQ ID NO: 1834843 - RNA, 19 nt, Homo sapiens
  misc_RNA (1)...(19): siRNA sense strand
gacaagaacgcagaccuuu

SEQ ID NO: 1834844 - RNA, 19 nt, Homo sapiens
  misc_RNA (1)...(19): siRNA sense strand
ccaaauacugcagaauuaa

SEQ ID NO: 1834845 - RNA, 19 nt, Homo sapiens
  misc_RNA (1)...(19): siRNA sense strand
cuauccagauuaugaacua

SEQ ID NO: 1834846 - RNA, 19 nt, Homo sapiens
  misc_RNA (1)...(19): siRNA sense strand
caaacaguacuaauccaaa

SEQ ID NO: 1834847 - RNA, 19 nt, Homo sapiens
  misc_RNA (1)...(19): siRNA sense strand
gugccaggaucacguagaa

SEQ ID NO: 1834848 - RNA, 19 nt, Homo sapiens
  misc_RNA (1)...(19): siRNA sense strand
ccaggaaguuagugaaucu

SEQ ID NO: 1834849 - RNA, 19 nt, Homo sapiens
  misc_RNA (1)...(19): siRNA sense strand
gacaaccgugcuccaaaua

SEQ ID NO: 1834850 - RNA, 19 nt, Homo sapiens
  misc_RNA (1)...(19): siRNA sense strand
gcugaaugauauugaagau

SEQ ID NO: 1834851 - RNA, 19 nt, Homo sapiens
  misc_RNA (1)...(19): siRNA sense strand
gaauaaaggcaggaaucaa

SEQ ID NO: 1834852 - RNA, 19 nt, Homo sapiens
  misc_RNA (1)...(19): siRNA sense strand
cagauaacagcaugauaaa

SEQ ID NO: 1834853 - RNA, 19 nt, Homo sapiens
  misc_RNA (1)...(19): siRNA sense strand
acagaacccguaacaguaa

SEQ ID NO: 1834854 - RNA, 19 nt, Homo sapiens
  misc_RNA (1)...(19): siRNA sense strand
gaggaggagaugaaauauu

SEQ ID NO: 1834855 - RNA, 19 nt, Homo sapiens
  misc_RNA (1)...(19): siRNA sense strand
aacaaagaaugacccauau

SEQ ID NO: 1834856 - RNA, 19 nt, Homo sapiens
  misc_RNA (1)...(19): siRNA sense strand
ucucgaacccaauuuauga

SEQ ID NO: 1834857 - RNA, 19 nt, Homo sapiens
  misc_RNA (1)...(19): siRNA sense strand
cuacuaugaagcagaauuu

SEQ ID NO: 1834858 - RNA, 19 nt, Homo sapiens
  misc_RNA (1)...(19): siRNA sense strand
ugacuucaguugugcagau

SEQ ID NO: 1834859 - RNA, 19 nt, Homo sapiens
  misc_RNA (1)...(19): siRNA sense strand
caagacuucugagcaugaa

SEQ ID NO: 1834860 - RNA, 19 nt, Homo sapiens
  misc_RNA (1)...(19): siRNA sense strand
gggagagacugauaaucca

SEQ ID NO: 1834861 - RNA, 19 nt, Homo sapiens
  misc_RNA (1)...(19): siRNA sense strand
ucagcagauuuauauggua

SEQ ID NO: 1834862 - RNA, 19 nt, Homo sapiens
  misc_RNA (1)...(19): siRNA sense strand
aauacaaacccacugagua

SEQ ID NO: 1834863 - RNA, 19 nt, Homo sapiens
  misc_RNA (1)...(19): siRNA sense strand
gauguacaccgucaaguag

SEQ ID NO: 1834864 - RNA, 19 nt, Homo sapiens
  misc_RNA (1)...(19): siRNA sense strand
ugauguacaccgucaagua

SEQ ID NO: 1834865 - RNA, 19 nt, Homo sapiens
  misc_RNA (1)...(19): siRNA sense strand
caaccgugcuccaaauacu

SEQ ID NO: 1834866 - RNA, 19 nt, Homo sapiens
  misc_RNA (1)...(19): siRNA sense strand
gcacagcacagacaacaac

SEQ ID NO: 1834867 - RNA, 19 nt, Homo sapiens
  misc_RNA (1)...(19): siRNA sense strand
gaugaacaugguaauuuga

SEQ ID NO: 1834868 - RNA, 19 nt, Homo sapiens
  misc_RNA (1)...(19): siRNA sense strand
acaaucagaugcauuugag

SEQ ID NO: 1834869 - RNA, 19 nt, Homo sapiens
  misc_RNA (1)...(19): siRNA sense strand
gaagcagaauuuggacaag

SEQ ID NO: 1834870 - RNA, 19 nt, Homo sapiens
  misc_RNA (1)...(19): siRNA sense strand
gugacuccuuuccauauga

SEQ ID NO: 1834871 - RNA, 19 nt, Homo sapiens
  misc_RNA (1)...(19): siRNA sense strand
aaacaguacuaauccaaac

SEQ ID NO: 1834872 - RNA, 19 nt, Homo sapiens
  misc_RNA (1)...(19): siRNA sense strand
gcaggcgccaauuccaaua

SEQ ID NO: 1834873 - RNA, 19 nt, Homo sapiens
  misc_RNA (1)...(19): siRNA sense strand
acaaagaaugacccauaua

SEQ ID NO: 1834874 - RNA, 19 nt, Homo sapiens
  misc_RNA (1)...(19): siRNA sense strand
cggcuacuaugaagcagaa

SEQ ID NO: 1834875 - RNA, 19 nt, Homo sapiens
  misc_RNA (1)...(19): siRNA sense strand
gacuucaguugugcagaua

SEQ ID NO: 1834876 - RNA, 19 nt, Homo sapiens
  misc_RNA (1)...(19): siRNA sense strand
cuucugagcaugaaucuug

SEQ ID NO: 1834877 - RNA, 19 nt, Homo sapiens
  misc_RNA (1)...(19): siRNA sense strand
gcgaucagcaggcagcauu

SEQ ID NO: 1834878 - RNA, 19 nt, Homo sapiens
  misc_RNA (1)...(19): siRNA sense strand
gcaugggagagacugauaa

SEQ ID NO: 1834879 - RNA, 19 nt, Homo sapiens
  misc_RNA (1)...(19): siRNA sense strand
ucaagcagaauccuacuau

SEQ ID NO: 1834880 - RNA, 19 nt, Homo sapiens
  misc_RNA (1)...(19): siRNA sense strand
gguuucaagucaagcagaa

SEQ ID NO: 1834881 - RNA, 19 nt, Homo sapiens
  misc_RNA (1)...(19): siRNA sense strand
acaaaguucagaaagauga

SEQ ID NO: 1834882 - RNA, 19 nt, Homo sapiens
  misc_RNA (1)...(19): siRNA sense strand
aaauuuggguauucgaugu

SEQ ID NO: 1834883 - RNA, 19 nt, Homo sapiens
  misc_RNA (1)...(19): siRNA sense strand
ggaaugcguuuuagauaca

SEQ ID NO: 1834884 - RNA, 19 nt, Homo sapiens
  misc_RNA (1)...(19): siRNA sense strand
cucauguaauucaguguua

SEQ ID NO: 1834885 - RNA, 19 nt, Homo sapiens
  misc_RNA (1)...(19): siRNA sense strand
caacaugcugucuaauugu

SEQ ID NO: 1834886 - RNA, 19 nt, Homo sapiens
  misc_RNA (1)...(19): siRNA sense strand
caaugccgaugacauaguc

SEQ ID NO: 1834887 - RNA, 19 nt, Homo sapiens
  misc_RNA (1)...(19): siRNA sense strand
gggcccaucucaaguggau

SEQ ID NO: 1834888 - RNA, 19 nt, Homo sapiens
  misc_RNA (1)...(19): siRNA sense strand
gagaccuucugaccaggaa

SEQ ID NO: 1834889 - RNA, 19 nt, Homo sapiens
  misc_RNA (1)...(19): siRNA sense strand
aauaaaggcaggaaucaau

SEQ ID NO: 1834890 - RNA, 19 nt, Homo sapiens
  misc_RNA (1)...(19): siRNA sense strand
gaccaucaaacaguacuaa

SEQ ID NO: 1834891 - RNA, 19 nt, Homo sapiens
  misc_RNA (1)...(19): siRNA sense strand
gcaagaagcugaacaagaa

SEQ ID NO: 1834892 - RNA, 19 nt, Homo sapiens
  misc_RNA (1)...(19): siRNA sense strand
ggaaagacaucgaggacua

SEQ ID NO: 1834893 - RNA, 19 nt, Homo sapiens
  misc_RNA (1)...(19): siRNA sense strand
gaaguacccugauaaguuc

SEQ ID NO: 1834894 - RNA, 19 nt, Homo sapiens
  misc_RNA (1)...(19): siRNA sense strand
gagagaagguggagaacaa

SEQ ID NO: 1834895 - RNA, 19 nt, Homo sapiens
  misc_RNA (1)...(19): siRNA sense strand
ggaugugucugguuuccua

SEQ ID NO: 1834896 - RNA, 19 nt, Homo sapiens
  misc_RNA (1)...(19): siRNA sense strand
ucucagagcccgugaagua

SEQ ID NO: 1834897 - RNA, 19 nt, Homo sapiens
  misc_RNA (1)...(19): siRNA sense strand
ugaaguacccugauaaguu

SEQ ID NO: 1834898 - RNA, 19 nt, Homo sapiens
  misc_RNA (1)...(19): siRNA sense strand
ucagggaugugucugguuu

SEQ ID NO: 1834899 - RNA, 19 nt, Homo sapiens
  misc_RNA (1)...(19): siRNA sense strand
ggauaguggcgaaguuuaa

SEQ ID NO: 1834900 - RNA, 19 nt, Homo sapiens
  misc_RNA (1)...(19): siRNA sense strand
gaucgagacgggcaucuuu

SEQ ID NO: 1834901 - RNA, 19 nt, Homo sapiens
  misc_RNA (1)...(19): siRNA sense strand
acaagaagcggcugaagaa

SEQ ID NO: 1834902 - RNA, 19 nt, Homo sapiens
  misc_RNA (1)...(19): siRNA sense strand
ggccaacucugccuucauc

SEQ ID NO: 1834903 - RNA, 19 nt, Homo sapiens
  misc_RNA (1)...(19): siRNA sense strand
gcaauguccggaucucuga

SEQ ID NO: 1834904 - RNA, 19 nt, Homo sapiens
  misc_RNA (1)...(19): siRNA sense strand
gugcuaugguggagaagaa

SEQ ID NO: 1834905 - RNA, 19 nt, Homo sapiens
  misc_RNA (1)...(19): siRNA sense strand
gaaagacaucgaggacuau

SEQ ID NO: 1834906 - RNA, 19 nt, Homo sapiens
  misc_RNA (1)...(19): siRNA sense strand
gggauaguggcgaaguuua

SEQ ID NO: 1834907 - RNA, 19 nt, Homo sapiens
  misc_RNA (1)...(19): siRNA sense strand
agaaguaccuggccaagcu

SEQ ID NO: 1834908 - RNA, 19 nt, Homo sapiens
  misc_RNA (1)...(19): siRNA sense strand
aaacagacacagaauucuu

SEQ ID NO: 1834909 - RNA, 19 nt, Homo sapiens
  misc_RNA (1)...(19): siRNA sense strand
agaagcggcugaagaagag

SEQ ID NO: 1834910 - RNA, 19 nt, Homo sapiens
  misc_RNA (1)...(19): siRNA sense strand
gaagcucuuucagcaguuc

SEQ ID NO: 1834911 - RNA, 19 nt, Homo sapiens
  misc_RNA (1)...(19): siRNA sense strand
ccaaaacugucuacgcaaa

SEQ ID NO: 1834912 - RNA, 19 nt, Homo sapiens
  misc_RNA (1)...(19): siRNA sense strand
gagaugagaccugcgacaa

SEQ ID NO: 1834913 - RNA, 19 nt, Homo sapiens
  misc_RNA (1)...(19): siRNA sense strand
gacaucagguaccacaucu

SEQ ID NO: 1834914 - RNA, 19 nt, Homo sapiens
  misc_RNA (1)...(19): siRNA sense strand
caucgugucucuggccuau

SEQ ID NO: 1834915 - RNA, 19 nt, Homo sapiens
  misc_RNA (1)...(19): siRNA sense strand
ucagguaccacaucuacaa

SEQ ID NO: 1834916 - RNA, 19 nt, Homo sapiens
  misc_RNA (1)...(19): siRNA sense strand
gcagguucaucgugucucu

SEQ ID NO: 1834917 - RNA, 19 nt, Homo sapiens
  misc_RNA (1)...(19): siRNA sense strand
aaccaaagccgaccucugu

SEQ ID NO: 1834918 - RNA, 19 nt, Homo sapiens
  misc_RNA (1)...(19): siRNA sense strand
gagcugaagcaccggauca

SEQ ID NO: 1834919 - RNA, 19 nt, Homo sapiens
  misc_RNA (1)...(19): siRNA sense strand
ccacaucuacaacgugaau

SEQ ID NO: 1834920 - RNA, 19 nt, Homo sapiens
  misc_RNA (1)...(19): siRNA sense strand
caaaacagacacagaauuc

SEQ ID NO: 1834921 - RNA, 19 nt, Homo sapiens
  misc_RNA (1)...(19): siRNA sense strand
cccgugaaguacccugaua

SEQ ID NO: 1834922 - RNA, 19 nt, Homo sapiens
  misc_RNA (1)...(19): siRNA sense strand
gaacaagaagcggcugaag

SEQ ID NO: 1834923 - RNA, 19 nt, Homo sapiens
  misc_RNA (1)...(19): siRNA sense strand
caacgugaaugaggagaac

SEQ ID NO: 1834924 - RNA, 19 nt, Homo sapiens
  misc_RNA (1)...(19): siRNA sense strand
gaagauucugaugaaagua

SEQ ID NO: 1834925 - RNA, 19 nt, Homo sapiens
  misc_RNA (1)...(19): siRNA sense strand
aagaagcggcugaagaaga

SEQ ID NO: 1834926 - RNA, 19 nt, Homo sapiens
  misc_RNA (1)...(19): siRNA sense strand
gcuggacaaugacggcaau

SEQ ID NO: 1834927 - RNA, 19 nt, Homo sapiens
  misc_RNA (1)...(19): siRNA sense strand
agaacgugcugcuggacaa

SEQ ID NO: 1834928 - RNA, 19 nt, Homo sapiens
  misc_RNA (1)...(19): siRNA sense strand
gaggugacaucagguacca

SEQ ID NO: 1834929 - RNA, 19 nt, Homo sapiens
  misc_RNA (1)...(19): siRNA sense strand
guggagagaagguggagaa

SEQ ID NO: 1834930 - RNA, 19 nt, Homo sapiens
  misc_RNA (1)...(19): siRNA sense strand
uuucagcaguuccuacaau

SEQ ID NO: 1834931 - RNA, 19 nt, Homo sapiens
  misc_RNA (1)...(19): siRNA sense strand
gagcagcccaucggcaaga

SEQ ID NO: 1834932 - RNA, 19 nt, Homo sapiens
  misc_RNA (1)...(19): siRNA sense strand
gccuggaguuugagagugu

SEQ ID NO: 1834933 - RNA, 19 nt, Homo sapiens
  misc_RNA (1)...(19): siRNA sense strand
ggagagaagguggagaaca

SEQ ID NO: 1834934 - RNA, 19 nt, Homo sapiens
  misc_RNA (1)...(19): siRNA sense strand
ggagaaggacccggagaag

SEQ ID NO: 1834935 - RNA, 19 nt, Homo sapiens
  misc_RNA (1)...(19): siRNA sense strand
aacagacacagaauucuuu

SEQ ID NO: 1834936 - RNA, 19 nt, Homo sapiens
  misc_RNA (1)...(19): siRNA sense strand
cuggagcucuggaaagaca

SEQ ID NO: 1834937 - RNA, 19 nt, Homo sapiens
  misc_RNA (1)...(19): siRNA sense strand
ucagaugccggacgacaug

SEQ ID NO: 1834938 - RNA, 19 nt, Homo sapiens
  misc_RNA (1)...(19): siRNA sense strand
ugacaaaacagacacagaa

SEQ ID NO: 1834939 - RNA, 19 nt, Homo sapiens
  misc_RNA (1)...(19): siRNA sense strand
cccuggagcucuggaaaga

SEQ ID NO: 1834940 - RNA, 19 nt, Homo sapiens
  misc_RNA (1)...(19): siRNA sense strand
gccucagccuggaguuuga

SEQ ID NO: 1834941 - RNA, 19 nt, Homo sapiens
  misc_RNA (1)...(19): siRNA sense strand
cgaccucugucuggugaug

SEQ ID NO: 1834942 - RNA, 19 nt, Homo sapiens
  misc_RNA (1)...(19): siRNA sense strand
gggcgaggaguacgacuuc

SEQ ID NO: 1834943 - RNA, 19 nt, Homo sapiens
  misc_RNA (1)...(19): siRNA sense strand
gguaccacaucuacaacgu

SEQ ID NO: 1834944 - RNA, 19 nt, Homo sapiens
  misc_RNA (1)...(19): siRNA sense strand
caucagguaccacaucuac

SEQ ID NO: 1834945 - RNA, 19 nt, Homo sapiens
  misc_RNA (1)...(19): siRNA sense strand
cacagaauucuuucaggaa

SEQ ID NO: 1834946 - RNA, 19 nt, Homo sapiens
  misc_RNA (1)...(19): siRNA sense strand
gugucggccugccagauga

SEQ ID NO: 1834947 - RNA, 19 nt, Homo sapiens
  misc_RNA (1)...(19): siRNA sense strand
ugcaagaagcugaacaaga

SEQ ID NO: 1834948 - RNA, 19 nt, Homo sapiens
  misc_RNA (1)...(19): siRNA sense strand
gccuguacuuccugagguu

SEQ ID NO: 1834949 - RNA, 19 nt, Homo sapiens
  misc_RNA (1)...(19): siRNA sense strand
ugacaucagguaccacauc

SEQ ID NO: 1834950 - RNA, 19 nt, Homo sapiens
  misc_RNA (1)...(19): siRNA sense strand
aacaagaagcggcugaaga

SEQ ID NO: 1834951 - RNA, 19 nt, Homo sapiens
  misc_RNA (1)...(19): siRNA sense strand
ggacugguuccuggacuuc

SEQ ID NO: 1834952 - RNA, 19 nt, Homo sapiens
  misc_RNA (1)...(19): siRNA sense strand
gauaguggcgaaguuuaag

SEQ ID NO: 1834953 - RNA, 19 nt, Homo sapiens
  misc_RNA (1)...(19): siRNA sense strand
gaacgugcugcuggacaau

SEQ ID NO: 1834954 - RNA, 19 nt, Homo sapiens
  misc_RNA (1)...(19): siRNA sense strand
gcuguaugccugcaagaag

SEQ ID NO: 1834955 - RNA, 19 nt, Homo sapiens
  misc_RNA (1)...(19): siRNA sense strand
cacccuguaugagaugauu

SEQ ID NO: 1834956 - RNA, 19 nt, Homo sapiens
  misc_RNA (1)...(19): siRNA sense strand
aaaguacacagcagguuca

SEQ ID NO: 1834957 - RNA, 19 nt, Homo sapiens
  misc_RNA (1)...(19): siRNA sense strand
gaagcaccggaucaucuca

SEQ ID NO: 1834958 - RNA, 19 nt, Homo sapiens
  misc_RNA (1)...(19): siRNA sense strand
gcaaugacaaugcaguuua

SEQ ID NO: 1834959 - RNA, 19 nt, Homo sapiens
  misc_RNA (1)...(19): siRNA sense strand
ucaggaggcugccaaguuu

SEQ ID NO: 1834960 - RNA, 19 nt, Homo sapiens
  misc_RNA (1)...(19): siRNA sense strand
aaauugaucuggaacaguu

SEQ ID NO: 1834961 - RNA, 19 nt, Homo sapiens
  misc_RNA (1)...(19): siRNA sense strand
gaaaagaaacugaagagaa

SEQ ID NO: 1834962 - RNA, 19 nt, Homo sapiens
  misc_RNA (1)...(19): siRNA sense strand
caaugacaaugcaguuuau

SEQ ID NO: 1834963 - RNA, 19 nt, Homo sapiens
  misc_RNA (1)...(19): siRNA sense strand
caaugcaguuuauuaguca

SEQ ID NO: 1834964 - RNA, 19 nt, Homo sapiens
  misc_RNA (1)...(19): siRNA sense strand
uaucaugacccuacuauag

SEQ ID NO: 1834965 - RNA, 19 nt, Homo sapiens
  misc_RNA (1)...(19): siRNA sense strand
ugagggaaauucgcaagaa

SEQ ID NO: 1834966 - RNA, 19 nt, Homo sapiens
  misc_RNA (1)...(19): siRNA sense strand
acaaugagccagcuuacuu

SEQ ID NO: 1834967 - RNA, 19 nt, Homo sapiens
  misc_RNA (1)...(19): siRNA sense strand
acaaugcaguuuauuaguc

SEQ ID NO: 1834968 - RNA, 19 nt, Homo sapiens
  misc_RNA (1)...(19): siRNA sense strand
ucaugacccuacuauagaa

SEQ ID NO: 1834969 - RNA, 19 nt, Homo sapiens
  misc_RNA (1)...(19): siRNA sense strand
gagggaaauucgcaagaag

SEQ ID NO: 1834970 - RNA, 19 nt, Homo sapiens
  misc_RNA (1)...(19): siRNA sense strand
ugacaaugcaguuuauuag

SEQ ID NO: 1834971 - RNA, 19 nt, Homo sapiens
  misc_RNA (1)...(19): siRNA sense strand
cagcuuacuuggacaucuu

SEQ ID NO: 1834972 - RNA, 19 nt, Homo sapiens
  misc_RNA (1)...(19): siRNA sense strand
gcccaagaauauaauugug

SEQ ID NO: 1834973 - RNA, 19 nt, Homo sapiens
  misc_RNA (1)...(19): siRNA sense strand
caaugagccagcuuacuug

SEQ ID NO: 1834974 - RNA, 19 nt, Homo sapiens
  misc_RNA (1)...(19): siRNA sense strand
gagaguacaaggugguaau

SEQ ID NO: 1834975 - RNA, 19 nt, Homo sapiens
  misc_RNA (1)...(19): siRNA sense strand
gggaaauucgcaagaagga

SEQ ID NO: 1834976 - RNA, 19 nt, Homo sapiens
  misc_RNA (1)...(19): siRNA sense strand
gagagaaaauaugacauga

SEQ ID NO: 1834977 - RNA, 19 nt, Homo sapiens
  misc_RNA (1)...(19): siRNA sense strand
ccgccacaccuaugaaauu

SEQ ID NO: 1834978 - RNA, 19 nt, Homo sapiens
  misc_RNA (1)...(19): siRNA sense strand
gguaaaagcgcaaugacaa

SEQ ID NO: 1834979 - RNA, 19 nt, Homo sapiens
  misc_RNA (1)...(19): siRNA sense strand
gaagagagaaaauaugaca

SEQ ID NO: 1834980 - RNA, 19 nt, Homo sapiens
  misc_RNA (1)...(19): siRNA sense strand
gacaaugcaguuuauuagu

SEQ ID NO: 1834981 - RNA, 19 nt, Homo sapiens
  misc_RNA (1)...(19): siRNA sense strand
uagaagaugcuuauaagac

SEQ ID NO: 1834982 - RNA, 19 nt, Homo sapiens
  misc_RNA (1)...(19): siRNA sense strand
guuuauuagucaucaguuc

SEQ ID NO: 1834983 - RNA, 19 nt, Homo sapiens
  misc_RNA (1)...(19): siRNA sense strand
gaagaagagagaaaauaug

SEQ ID NO: 1834984 - RNA, 19 nt, Homo sapiens
  misc_RNA (1)...(19): siRNA sense strand
gcgcaaugacaaugcaguu

SEQ ID NO: 1834985 - RNA, 19 nt, Homo sapiens
  misc_RNA (1)...(19): siRNA sense strand
gcugguggguaacaaaauu

SEQ ID NO: 1834986 - RNA, 19 nt, Homo sapiens
  misc_RNA (1)...(19): siRNA sense strand
cgccacaccuaugaaauuc

SEQ ID NO: 1834987 - RNA, 19 nt, Homo sapiens
  misc_RNA (1)...(19): siRNA sense strand
cagaagaaggcuugagucu

SEQ ID NO: 1834988 - RNA, 19 nt, Homo sapiens
  misc_RNA (1)...(19): siRNA sense strand
caggaggcugccaaguuua

SEQ ID NO: 1834989 - RNA, 19 nt, Homo sapiens
  misc_RNA (1)...(19): siRNA sense strand
ggaggcugccaaguuuaaa

SEQ ID NO: 1834990 - RNA, 19 nt, Homo sapiens
  misc_RNA (1)...(19): siRNA sense strand
gaagaagaagagagaaaau

SEQ ID NO: 1834991 - RNA, 19 nt, Homo sapiens
  misc_RNA (1)...(19): siRNA sense strand
cuacuauagaagaugcuua

SEQ ID NO: 1834992 - RNA, 19 nt, Homo sapiens
  misc_RNA (1)...(19): siRNA sense strand
gauuaucaugacccuacua

SEQ ID NO: 1834993 - RNA, 19 nt, Homo sapiens
  misc_RNA (1)...(19): siRNA sense strand
aaagcgcaaugacaaugca

SEQ ID NO: 1834994 - RNA, 19 nt, Homo sapiens
  misc_RNA (1)...(19): siRNA sense strand
ucaggcggguccagagagu

SEQ ID NO: 1834995 - RNA, 19 nt, Homo sapiens
  misc_RNA (1)...(19): siRNA sense strand
ugacccuacuauagaagau

SEQ ID NO: 1834996 - RNA, 19 nt, Homo sapiens
  misc_RNA (1)...(19): siRNA sense strand
ggacagggcugagguguau

SEQ ID NO: 1834997 - RNA, 19 nt, Homo sapiens
  misc_RNA (1)...(19): siRNA sense strand
caacguuccuacaaacaga

SEQ ID NO: 1834998 - RNA, 19 nt, Homo sapiens
  misc_RNA (1)...(19): siRNA sense strand
gaguacagguucaaguaug

SEQ ID NO: 1834999 - RNA, 19 nt, Homo sapiens
  misc_RNA (1)...(19): siRNA sense strand
ucaaguauguccuggucaa

SEQ ID NO: 1835000 - RNA, 19 nt, Homo sapiens
  misc_RNA (1)...(19): siRNA sense strand
gcucaacguuccuacaaac

SEQ ID NO: 1835001 - RNA, 19 nt, Homo sapiens
  misc_RNA (1)...(19): siRNA sense strand
ccucacagauccugaaugc

SEQ ID NO: 1835002 - RNA, 19 nt, Homo sapiens
  misc_RNA (1)...(19): siRNA sense strand
ggaguacagguucaaguau

SEQ ID NO: 1835003 - RNA, 19 nt, Homo sapiens
  misc_RNA (1)...(19): siRNA sense strand
ccaaccagcucaccccaua

SEQ ID NO: 1835004 - RNA, 19 nt, Homo sapiens
  misc_RNA (1)...(19): siRNA sense strand
aguauguccuggucaauau

SEQ ID NO: 1835005 - RNA, 19 nt, Homo sapiens
  misc_RNA (1)...(19): siRNA sense strand
acucacgacucccaaauca

SEQ ID NO: 1835006 - RNA, 19 nt, Homo sapiens
  misc_RNA (1)...(19): siRNA sense strand
cggaguacagguucaagua

SEQ ID NO: 1835007 - RNA, 19 nt, Homo sapiens
  misc_RNA (1)...(19): siRNA sense strand
aagccucucugcauguuug

SEQ ID NO: 1835008 - RNA, 19 nt, Homo sapiens
  misc_RNA (1)...(19): siRNA sense strand
gggcucaacguuccuacaa

SEQ ID NO: 1835009 - RNA, 19 nt, Homo sapiens
  misc_RNA (1)...(19): siRNA sense strand
ggcucaacguuccuacaaa

SEQ ID NO: 1835010 - RNA, 19 nt, Homo sapiens
  misc_RNA (1)...(19): siRNA sense strand
ggaaugccucagugcaaga

SEQ ID NO: 1835011 - RNA, 19 nt, Homo sapiens
  misc_RNA (1)...(19): siRNA sense strand
guccaaggccucacagauc

SEQ ID NO: 1835012 - RNA, 19 nt, Homo sapiens
  misc_RNA (1)...(19): siRNA sense strand
caacuuccagggccucugu

SEQ ID NO: 1835013 - RNA, 19 nt, Homo sapiens
  misc_RNA (1)...(19): siRNA sense strand
gcccuucuuucuacuugug

SEQ ID NO: 1835014 - RNA, 19 nt, Homo sapiens
  misc_RNA (1)...(19): siRNA sense strand
gaaaagccucucugcaugu

SEQ ID NO: 1835015 - RNA, 19 nt, Homo sapiens
  misc_RNA (1)...(19): siRNA sense strand
caggaaugccucagugcaa

SEQ ID NO: 1835016 - RNA, 19 nt, Homo sapiens
  misc_RNA (1)...(19): siRNA sense strand
aguacagguucaaguaugu

SEQ ID NO: 1835017 - RNA, 19 nt, Homo sapiens
  misc_RNA (1)...(19): siRNA sense strand
aaguauguccuggucaaua

SEQ ID NO: 1835018 - RNA, 19 nt, Homo sapiens
  misc_RNA (1)...(19): siRNA sense strand
ucacgacucccaaaucacu

SEQ ID NO: 1835019 - RNA, 19 nt, Homo sapiens
  misc_RNA (1)...(19): siRNA sense strand
cgacucacgacucccaaau

SEQ ID NO: 1835020 - RNA, 19 nt, Homo sapiens
  misc_RNA (1)...(19): siRNA sense strand
gggaugaccuaaacaauua

SEQ ID NO: 1835021 - RNA, 19 nt, Homo sapiens
  misc_RNA (1)...(19): siRNA sense strand
gaagguaucuuucagcaaa

SEQ ID NO: 1835022 - RNA, 19 nt, Homo sapiens
  misc_RNA (1)...(19): siRNA sense strand
gaacagagacggcagaauu

SEQ ID NO: 1835023 - RNA, 19 nt, Homo sapiens
  misc_RNA (1)...(19): siRNA sense strand
gcaagaaacuguaaauaag

SEQ ID NO: 1835024 - RNA, 19 nt, Homo sapiens
  misc_RNA (1)...(19): siRNA sense strand
ggacaggacuauugacuga

SEQ ID NO: 1835025 - RNA, 19 nt, Homo sapiens
  misc_RNA (1)...(19): siRNA sense strand
gaagguaaaucggaaauga

SEQ ID NO: 1835026 - RNA, 19 nt, Homo sapiens
  misc_RNA (1)...(19): siRNA sense strand
agaaagagauguagaagaa

SEQ ID NO: 1835027 - RNA, 19 nt, Homo sapiens
  misc_RNA (1)...(19): siRNA sense strand
gaagagaacguuaaacuug

SEQ ID NO: 1835028 - RNA, 19 nt, Homo sapiens
  misc_RNA (1)...(19): siRNA sense strand
gaaucuaucuccaaccuuu

SEQ ID NO: 1835029 - RNA, 19 nt, Homo sapiens
  misc_RNA (1)...(19): siRNA sense strand
ggaagaaacucaucagaag

SEQ ID NO: 1835030 - RNA, 19 nt, Homo sapiens
  misc_RNA (1)...(19): siRNA sense strand
gaagacacguuaaacaaau

SEQ ID NO: 1835031 - RNA, 19 nt, Homo sapiens
  misc_RNA (1)...(19): siRNA sense strand
gaagaaggcuagaguccaa

SEQ ID NO: 1835032 - RNA, 19 nt, Homo sapiens
  misc_RNA (1)...(19): siRNA sense strand
gcaaagggcuuggaacaga

SEQ ID NO: 1835033 - RNA, 19 nt, Homo sapiens
  misc_RNA (1)...(19): siRNA sense strand
gagaagagcagcugauaaa

SEQ ID NO: 1835034 - RNA, 19 nt, Homo sapiens
  misc_RNA (1)...(19): siRNA sense strand
gaucugugcucaauaauca

SEQ ID NO: 1835035 - RNA, 19 nt, Homo sapiens
  misc_RNA (1)...(19): siRNA sense strand
aaagaucugugcucaauaa

SEQ ID NO: 1835036 - RNA, 19 nt, Homo sapiens
  misc_RNA (1)...(19): siRNA sense strand
gaagaugccaugcagauaa

SEQ ID NO: 1835037 - RNA, 19 nt, Homo sapiens
  misc_RNA (1)...(19): siRNA sense strand
gcagaaauccaucaguaua

SEQ ID NO: 1835038 - RNA, 19 nt, Homo sapiens
  misc_RNA (1)...(19): siRNA sense strand
ggagaaagaccuagcauug

SEQ ID NO: 1835039 - RNA, 19 nt, Homo sapiens
  misc_RNA (1)...(19): siRNA sense strand
gcucaaggcuacugaagaa

SEQ ID NO: 1835040 - RNA, 19 nt, Homo sapiens
  misc_RNA (1)...(19): siRNA sense strand
gaaagaaagagauguagaa

SEQ ID NO: 1835041 - RNA, 19 nt, Homo sapiens
  misc_RNA (1)...(19): siRNA sense strand
guagaagaauuacagcuaa

SEQ ID NO: 1835042 - RNA, 19 nt, Homo sapiens
  misc_RNA (1)...(19): siRNA sense strand
ccacaaaguuaccaagauu

SEQ ID NO: 1835043 - RNA, 19 nt, Homo sapiens
  misc_RNA (1)...(19): siRNA sense strand
gaacagagccagcaagaag

SEQ ID NO: 1835044 - RNA, 19 nt, Homo sapiens
  misc_RNA (1)...(19): siRNA sense strand
gaagaagaaucaauuacca

SEQ ID NO: 1835045 - RNA, 19 nt, Homo sapiens
  misc_RNA (1)...(19): siRNA sense strand
gagaaacaguccaagaaga

SEQ ID NO: 1835046 - RNA, 19 nt, Homo sapiens
  misc_RNA (1)...(19): siRNA sense strand
gaacagaugaccaaagaga

SEQ ID NO: 1835047 - RNA, 19 nt, Homo sapiens
  misc_RNA (1)...(19): siRNA sense strand
gggcuaaacugaugaaagu

SEQ ID NO: 1835048 - RNA, 19 nt, Homo sapiens
  misc_RNA (1)...(19): siRNA sense strand
uaauggaacuggagaaaga

SEQ ID NO: 1835049 - RNA, 19 nt, Homo sapiens
  misc_RNA (1)...(19): siRNA sense strand
aaagagaacucagauguga

SEQ ID NO: 1835050 - RNA, 19 nt, Homo sapiens
  misc_RNA (1)...(19): siRNA sense strand
uggaagagcugaacaaauc

SEQ ID NO: 1835051 - RNA, 19 nt, Homo sapiens
  misc_RNA (1)...(19): siRNA sense strand
caguauaacuagugccuua

SEQ ID NO: 1835052 - RNA, 19 nt, Homo sapiens
  misc_RNA (1)...(19): siRNA sense strand
gaagaaugauggcgcuguu

SEQ ID NO: 1835053 - RNA, 19 nt, Homo sapiens
  misc_RNA (1)...(19): siRNA sense strand
ggaagacacguuaaacaaa

SEQ ID NO: 1835054 - RNA, 19 nt, Homo sapiens
  misc_RNA (1)...(19): siRNA sense strand
gcucaauaaucaguuguua

SEQ ID NO: 1835055 - RNA, 19 nt, Homo sapiens
  misc_RNA (1)...(19): siRNA sense strand
gcaaacaaaugcaaaacua

SEQ ID NO: 1835056 - RNA, 19 nt, Homo sapiens
  misc_RNA (1)...(19): siRNA sense strand
uacccgaccuucaaaguua

SEQ ID NO: 1835057 - RNA, 19 nt, Homo sapiens
  misc_RNA (1)...(19): siRNA sense strand
acaggaagcugaaauaaag

SEQ ID NO: 1835058 - RNA, 19 nt, Homo sapiens
  misc_RNA (1)...(19): siRNA sense strand
gaacgcccauacugugaaa

SEQ ID NO: 1835059 - RNA, 19 nt, Homo sapiens
  misc_RNA (1)...(19): siRNA sense strand
gcaagaagagaacguuaaa

SEQ ID NO: 1835060 - RNA, 19 nt, Homo sapiens
  misc_RNA (1)...(19): siRNA sense strand
caacugcaaugacgacgaa

SEQ ID NO: 1835061 - RNA, 19 nt, Homo sapiens
  misc_RNA (1)...(19): siRNA sense strand
ccaaagagaacgagucauu

SEQ ID NO: 1835062 - RNA, 19 nt, Homo sapiens
  misc_RNA (1)...(19): siRNA sense strand
ggaagaauuuaggaaagaa

SEQ ID NO: 1835063 - RNA, 19 nt, Homo sapiens
  misc_RNA (1)...(19): siRNA sense strand
gaaauugucggaccuggaa

SEQ ID NO: 1835064 - RNA, 19 nt, Homo sapiens
  misc_RNA (1)...(19): siRNA sense strand
gaaaagcucuuggaucuug

SEQ ID NO: 1835065 - RNA, 19 nt, Homo sapiens
  misc_RNA (1)...(19): siRNA sense strand
caaaagaacuccugacugu

SEQ ID NO: 1835066 - RNA, 19 nt, Homo sapiens
  misc_RNA (1)...(19): siRNA sense strand
ugaagucagucaagugaaa

SEQ ID NO: 1835067 - RNA, 19 nt, Homo sapiens
  misc_RNA (1)...(19): siRNA sense strand
agacgcagaugaagagaaa

SEQ ID NO: 1835068 - RNA, 19 nt, Homo sapiens
  misc_RNA (1)...(19): siRNA sense strand
gaggcuggcucaaucaaga

SEQ ID NO: 1835069 - RNA, 19 nt, Homo sapiens
  misc_RNA (1)...(19): siRNA sense strand
ugaauuacgucugaaagaa

SEQ ID NO: 1835070 - RNA, 19 nt, Homo sapiens
  misc_RNA (1)...(19): siRNA sense strand
uagcagauauggaggcaaa

SEQ ID NO: 1835071 - RNA, 19 nt, Homo sapiens
  misc_RNA (1)...(19): siRNA sense strand
ggaguuagaugagccacuu

SEQ ID NO: 1835072 - RNA, 19 nt, Homo sapiens
  misc_RNA (1)...(19): siRNA sense strand
ggagauaaaggcucuguau

SEQ ID NO: 1835073 - RNA, 19 nt, Homo sapiens
  misc_RNA (1)...(19): siRNA sense strand
guggaugacuuucgaguug

SEQ ID NO: 1835074 - RNA, 19 nt, Homo sapiens
  misc_RNA (1)...(19): siRNA sense strand
agaaagaucugugcucaau

SEQ ID NO: 1835075 - RNA, 19 nt, Homo sapiens
  misc_RNA (1)...(19): siRNA sense strand
gagauaaaggcucuguaua

SEQ ID NO: 1835076 - RNA, 19 nt, Homo sapiens
  misc_RNA (1)...(19): siRNA sense strand
gcagaaauaaugaagaugu

SEQ ID NO: 1835077 - RNA, 19 nt, Homo sapiens
  misc_RNA (1)...(19): siRNA sense strand
agaaagaauuggagaggaa

SEQ ID NO: 1835078 - RNA, 19 nt, Homo sapiens
  misc_RNA (1)...(19): siRNA sense strand
ggacggacaugaccagcau

SEQ ID NO: 1835079 - RNA, 19 nt, Homo sapiens
  misc_RNA (1)...(19): siRNA sense strand
ugacauuugugacugcuuu

SEQ ID NO: 1835080 - RNA, 19 nt, Homo sapiens
  misc_RNA (1)...(19): siRNA sense strand
uggagaaacugagaaauga

SEQ ID NO: 1835081 - RNA, 19 nt, Homo sapiens
  misc_RNA (1)...(19): siRNA sense strand
uggaacagaugaccaaaga

SEQ ID NO: 1835082 - RNA, 19 nt, Homo sapiens
  misc_RNA (1)...(19): siRNA sense strand
gaauuacgucugaaagaaa

SEQ ID NO: 1835083 - RNA, 19 nt, Homo sapiens
  misc_RNA (1)...(19): siRNA sense strand
gaacucagaugugauagcu

SEQ ID NO: 1835084 - RNA, 19 nt, Homo sapiens
  misc_RNA (1)...(19): siRNA sense strand
ucagaaaagucacguauaa

SEQ ID NO: 1835085 - RNA, 19 nt, Homo sapiens
  misc_RNA (1)...(19): siRNA sense strand
gagaaagaccuagcauuga

SEQ ID NO: 1835086 - RNA, 19 nt, Homo sapiens
  misc_RNA (1)...(19): siRNA sense strand
ggcagaauuugcugaacua

SEQ ID NO: 1835087 - RNA, 19 nt, Homo sapiens
  misc_RNA (1)...(19): siRNA sense strand
gaagacaccuacggcuguu

SEQ ID NO: 1835088 - RNA, 19 nt, Homo sapiens
  misc_RNA (1)...(19): siRNA sense strand
uaaagaacuuggagcuuca

SEQ ID NO: 1835089 - RNA, 19 nt, Homo sapiens
  misc_RNA (1)...(19): siRNA sense strand
gagaauccaaguucauaaa

SEQ ID NO: 1835090 - RNA, 19 nt, Homo sapiens
  misc_RNA (1)...(19): siRNA sense strand
gaagucacaagucaucaaa

SEQ ID NO: 1835091 - RNA, 19 nt, Homo sapiens
  misc_RNA (1)...(19): siRNA sense strand
cuacagaaccuccagaaga

SEQ ID NO: 1835092 - RNA, 19 nt, Homo sapiens
  misc_RNA (1)...(19): siRNA sense strand
gaguuugggugaauggaaa

SEQ ID NO: 1835093 - RNA, 19 nt, Homo sapiens
  misc_RNA (1)...(19): siRNA sense strand
gagagaagagcagcugaua

SEQ ID NO: 1835094 - RNA, 19 nt, Homo sapiens
  misc_RNA (1)...(19): siRNA sense strand
gaaagccaguuccgaaggu

SEQ ID NO: 1835095 - RNA, 19 nt, Homo sapiens
  misc_RNA (1)...(19): siRNA sense strand
agaaauggaagacacguua

SEQ ID NO: 1835096 - RNA, 19 nt, Homo sapiens
  misc_RNA (1)...(19): siRNA sense strand
gggaagaaacucaucagaa

SEQ ID NO: 1835097 - RNA, 19 nt, Homo sapiens
  misc_RNA (1)...(19): siRNA sense strand
gaaauggaagacacguuaa

SEQ ID NO: 1835098 - RNA, 19 nt, Homo sapiens
  misc_RNA (1)...(19): siRNA sense strand
gagcuucaacucaaagaaa

SEQ ID NO: 1835099 - RNA, 19 nt, Homo sapiens
  misc_RNA (1)...(19): siRNA sense strand
uugcagaaauccaucagua

SEQ ID NO: 1835100 - RNA, 19 nt, Homo sapiens
  misc_RNA (1)...(19): siRNA sense strand
agagaaagaugagagagaa

SEQ ID NO: 1835101 - RNA, 19 nt, Homo sapiens
  misc_RNA (1)...(19): siRNA sense strand
guaaaucggaaaugaagaa

SEQ ID NO: 1835102 - RNA, 19 nt, Homo sapiens
  misc_RNA (1)...(19): siRNA sense strand
ucaguggccuccucuguga

SEQ ID NO: 1835103 - RNA, 19 nt, Homo sapiens
  misc_RNA (1)...(19): siRNA sense strand
gaaucaagaccucaagaug

SEQ ID NO: 1835104 - RNA, 19 nt, Homo sapiens
  misc_RNA (1)...(19): siRNA sense strand
cagaaauccaucaguauaa

SEQ ID NO: 1835105 - RNA, 19 nt, Homo sapiens
  misc_RNA (1)...(19): siRNA sense strand
gaaagaucugugcucaaua

SEQ ID NO: 1835106 - RNA, 19 nt, Homo sapiens
  misc_RNA (1)...(19): siRNA sense strand
uaaaggagcuagagguacu

SEQ ID NO: 1835107 - RNA, 19 nt, Homo sapiens
  misc_RNA (1)...(19): siRNA sense strand
gguaaaggagcuagaggua

SEQ ID NO: 1835108 - RNA, 19 nt, Homo sapiens
  misc_RNA (1)...(19): siRNA sense strand
ggucgaaacuggacaaagc

SEQ ID NO: 1835109 - RNA, 19 nt, Homo sapiens
  misc_RNA (1)...(19): siRNA sense strand
gcuaauggccugcagacaa

SEQ ID NO: 1835110 - RNA, 19 nt, Homo sapiens
  misc_RNA (1)...(19): siRNA sense strand
ggaagaugccaugcagaua

SEQ ID NO: 1835111 - RNA, 19 nt, Homo sapiens
  misc_RNA (1)...(19): siRNA sense strand
gaaacuggacaaagcagaa

SEQ ID NO: 1835112 - RNA, 19 nt, Homo sapiens
  misc_RNA (1)...(19): siRNA sense strand
uguuguagcuccaguagaa

SEQ ID NO: 1835113 - RNA, 19 nt, Homo sapiens
  misc_RNA (1)...(19): siRNA sense strand
guacugaccaccagagaga

SEQ ID NO: 1835114 - RNA, 19 nt, Homo sapiens
  misc_RNA (1)...(19): siRNA sense strand
ggaauuuguggaugacuuu

SEQ ID NO: 1835115 - RNA, 19 nt, Homo sapiens
  misc_RNA (1)...(19): siRNA sense strand
agccaaagcugcucaaaca

SEQ ID NO: 1835116 - RNA, 19 nt, Homo sapiens
  misc_RNA (1)...(19): siRNA sense strand
gagagccacuucugagaca

SEQ ID NO: 1835117 - RNA, 19 nt, Homo sapiens
  misc_RNA (1)...(19): siRNA sense strand
ggaaaugaagaaacuuaga

SEQ ID NO: 1835118 - RNA, 19 nt, Homo sapiens
  misc_RNA (1)...(19): siRNA sense strand
gaagagcagcugauaaagg

SEQ ID NO: 1835119 - RNA, 19 nt, Homo sapiens
  misc_RNA (1)...(19): siRNA sense strand
gaaacaguccaagaagaaa

SEQ ID NO: 1835120 - RNA, 19 nt, Homo sapiens
  misc_RNA (1)...(19): siRNA sense strand
gggaugaccuaaacaauua

SEQ ID NO: 1835121 - RNA, 19 nt, Homo sapiens
  misc_RNA (1)...(19): siRNA sense strand
gaagguaucuuucagcaaa

SEQ ID NO: 1835122 - RNA, 19 nt, Homo sapiens
  misc_RNA (1)...(19): siRNA sense strand
gaacagagacggcagaauu

SEQ ID NO: 1835123 - RNA, 19 nt, Homo sapiens
  misc_RNA (1)...(19): siRNA sense strand
gcaagaaacuguaaauaag

SEQ ID NO: 1835124 - RNA, 19 nt, Homo sapiens
  misc_RNA (1)...(19): siRNA sense strand
ggacaggacuauugacuga

SEQ ID NO: 1835125 - RNA, 19 nt, Homo sapiens
  misc_RNA (1)...(19): siRNA sense strand
gaagguaaaucggaaauga

SEQ ID NO: 1835126 - RNA, 19 nt, Homo sapiens
  misc_RNA (1)...(19): siRNA sense strand
agaaagagauguagaagaa

SEQ ID NO: 1835127 - RNA, 19 nt, Homo sapiens
  misc_RNA (1)...(19): siRNA sense strand
gaagagaacguuaaacuug

SEQ ID NO: 1835128 - RNA, 19 nt, Homo sapiens
  misc_RNA (1)...(19): siRNA sense strand
gaaucuaucuccaaccuuu

SEQ ID NO: 1835129 - RNA, 19 nt, Homo sapiens
  misc_RNA (1)...(19): siRNA sense strand
ggaagaaacucaucagaag

SEQ ID NO: 1835130 - RNA, 19 nt, Homo sapiens
  misc_RNA (1)...(19): siRNA sense strand
gaagacacguuaaacaaau

SEQ ID NO: 1835131 - RNA, 19 nt, Homo sapiens
  misc_RNA (1)...(19): siRNA sense strand
gaagaaggcuagaguccaa

SEQ ID NO: 1835132 - RNA, 19 nt, Homo sapiens
  misc_RNA (1)...(19): siRNA sense strand
gcaaagggcuuggaacaga

SEQ ID NO: 1835133 - RNA, 19 nt, Homo sapiens
  misc_RNA (1)...(19): siRNA sense strand
gagaagagcagcugauaaa

SEQ ID NO: 1835134 - RNA, 19 nt, Homo sapiens
  misc_RNA (1)...(19): siRNA sense strand
gaucugugcucaauaauca

SEQ ID NO: 1835135 - RNA, 19 nt, Homo sapiens
  misc_RNA (1)...(19): siRNA sense strand
aaagaucugugcucaauaa

SEQ ID NO: 1835136 - RNA, 19 nt, Homo sapiens
  misc_RNA (1)...(19): siRNA sense strand
gaagaugccaugcagauaa

SEQ ID NO: 1835137 - RNA, 19 nt, Homo sapiens
  misc_RNA (1)...(19): siRNA sense strand
gcagaaauccaucaguaua

SEQ ID NO: 1835138 - RNA, 19 nt, Homo sapiens
  misc_RNA (1)...(19): siRNA sense strand
ggagaaagaccuagcauug

SEQ ID NO: 1835139 - RNA, 19 nt, Homo sapiens
  misc_RNA (1)...(19): siRNA sense strand
gcucaaggcuacugaagaa

SEQ ID NO: 1835140 - RNA, 19 nt, Homo sapiens
  misc_RNA (1)...(19): siRNA sense strand
gaaagaaagagauguagaa

SEQ ID NO: 1835141 - RNA, 19 nt, Homo sapiens
  misc_RNA (1)...(19): siRNA sense strand
guagaagaauuacagcuaa

SEQ ID NO: 1835142 - RNA, 19 nt, Homo sapiens
  misc_RNA (1)...(19): siRNA sense strand
ccacaaaguuaccaagauu

SEQ ID NO: 1835143 - RNA, 19 nt, Homo sapiens
  misc_RNA (1)...(19): siRNA sense strand
gaacagagccagcaagaag

SEQ ID NO: 1835144 - RNA, 19 nt, Homo sapiens
  misc_RNA (1)...(19): siRNA sense strand
gaagaagaaucaauuacca

SEQ ID NO: 1835145 - RNA, 19 nt, Homo sapiens
  misc_RNA (1)...(19): siRNA sense strand
gagaaacaguccaagaaga

SEQ ID NO: 1835146 - RNA, 19 nt, Homo sapiens
  misc_RNA (1)...(19): siRNA sense strand
gaacagaugaccaaagaga

SEQ ID NO: 1835147 - RNA, 19 nt, Homo sapiens
  misc_RNA (1)...(19): siRNA sense strand
gggcuaaacugaugaaagu

SEQ ID NO: 1835148 - RNA, 19 nt, Homo sapiens
  misc_RNA (1)...(19): siRNA sense strand
uaauggaacuggagaaaga

SEQ ID NO: 1835149 - RNA, 19 nt, Homo sapiens
  misc_RNA (1)...(19): siRNA sense strand
aaagagaacucagauguga

SEQ ID NO: 1835150 - RNA, 19 nt, Homo sapiens
  misc_RNA (1)...(19): siRNA sense strand
uggaagagcugaacaaauc

SEQ ID NO: 1835151 - RNA, 19 nt, Homo sapiens
  misc_RNA (1)...(19): siRNA sense strand
caguauaacuagugccuua

SEQ ID NO: 1835152 - RNA, 19 nt, Homo sapiens
  misc_RNA (1)...(19): siRNA sense strand
gaagaaugauggcgcuguu

SEQ ID NO: 1835153 - RNA, 19 nt, Homo sapiens
  misc_RNA (1)...(19): siRNA sense strand
ggaagacacguuaaacaaa

SEQ ID NO: 1835154 - RNA, 19 nt, Homo sapiens
  misc_RNA (1)...(19): siRNA sense strand
gcucaauaaucaguuguua

SEQ ID NO: 1835155 - RNA, 19 nt, Homo sapiens
  misc_RNA (1)...(19): siRNA sense strand
gcaaacaaaugcaaaacua

SEQ ID NO: 1835156 - RNA, 19 nt, Homo sapiens
  misc_RNA (1)...(19): siRNA sense strand
uacccgaccuucaaaguua

SEQ ID NO: 1835157 - RNA, 19 nt, Homo sapiens
  misc_RNA (1)...(19): siRNA sense strand
acaggaagcugaaauaaag

SEQ ID NO: 1835158 - RNA, 19 nt, Homo sapiens
  misc_RNA (1)...(19): siRNA sense strand
gaacgcccauacugugaaa

SEQ ID NO: 1835159 - RNA, 19 nt, Homo sapiens
  misc_RNA (1)...(19): siRNA sense strand
gcaagaagagaacguuaaa

SEQ ID NO: 1835160 - RNA, 19 nt, Homo sapiens
  misc_RNA (1)...(19): siRNA sense strand
caacugcaaugacgacgaa

SEQ ID NO: 1835161 - RNA, 19 nt, Homo sapiens
  misc_RNA (1)...(19): siRNA sense strand
ccaaagagaacgagucauu

SEQ ID NO: 1835162 - RNA, 19 nt, Homo sapiens
  misc_RNA (1)...(19): siRNA sense strand
ggaagaauuuaggaaagaa

SEQ ID NO: 1835163 - RNA, 19 nt, Homo sapiens
  misc_RNA (1)...(19): siRNA sense strand
gaaauugucggaccuggaa

SEQ ID NO: 1835164 - RNA, 19 nt, Homo sapiens
  misc_RNA (1)...(19): siRNA sense strand
gaaaagcucuuggaucuug

SEQ ID NO: 1835165 - RNA, 19 nt, Homo sapiens
  misc_RNA (1)...(19): siRNA sense strand
caaaagaacuccugacugu

SEQ ID NO: 1835166 - RNA, 19 nt, Homo sapiens
  misc_RNA (1)...(19): siRNA sense strand
ugaagucagucaagugaaa

SEQ ID NO: 1835167 - RNA, 19 nt, Homo sapiens
  misc_RNA (1)...(19): siRNA sense strand
agacgcagaugaagagaaa

SEQ ID NO: 1835168 - RNA, 19 nt, Homo sapiens
  misc_RNA (1)...(19): siRNA sense strand
gaggcuggcucaaucaaga

SEQ ID NO: 1835169 - RNA, 19 nt, Homo sapiens
  misc_RNA (1)...(19): siRNA sense strand
ugaauuacgucugaaagaa

SEQ ID NO: 1835170 - RNA, 19 nt, Homo sapiens
  misc_RNA (1)...(19): siRNA sense strand
uagcagauauggaggcaaa

SEQ ID NO: 1835171 - RNA, 19 nt, Homo sapiens
  misc_RNA (1)...(19): siRNA sense strand
ggaguuagaugagccacuu

SEQ ID NO: 1835172 - RNA, 19 nt, Homo sapiens
  misc_RNA (1)...(19): siRNA sense strand
ggagauaaaggcucuguau

SEQ ID NO: 1835173 - RNA, 19 nt, Homo sapiens
  misc_RNA (1)...(19): siRNA sense strand
guggaugacuuucgaguug

SEQ ID NO: 1835174 - RNA, 19 nt, Homo sapiens
  misc_RNA (1)...(19): siRNA sense strand
agaaagaucugugcucaau

SEQ ID NO: 1835175 - RNA, 19 nt, Homo sapiens
  misc_RNA (1)...(19): siRNA sense strand
gagauaaaggcucuguaua

SEQ ID NO: 1835176 - RNA, 19 nt, Homo sapiens
  misc_RNA (1)...(19): siRNA sense strand
gcagaaauaaugaagaugu

SEQ ID NO: 1835177 - RNA, 19 nt, Homo sapiens
  misc_RNA (1)...(19): siRNA sense strand
agaaagaauuggagaggaa

SEQ ID NO: 1835178 - RNA, 19 nt, Homo sapiens
  misc_RNA (1)...(19): siRNA sense strand
ggacggacaugaccagcau

SEQ ID NO: 1835179 - RNA, 19 nt, Homo sapiens
  misc_RNA (1)...(19): siRNA sense strand
ugacauuugugacugcuuu

SEQ ID NO: 1835180 - RNA, 19 nt, Homo sapiens
  misc_RNA (1)...(19): siRNA sense strand
uggagaaacugagaaauga

SEQ ID NO: 1835181 - RNA, 19 nt, Homo sapiens
  misc_RNA (1)...(19): siRNA sense strand
uggaacagaugaccaaaga

SEQ ID NO: 1835182 - RNA, 19 nt, Homo sapiens
  misc_RNA (1)...(19): siRNA sense strand
gaauuacgucugaaagaaa

SEQ ID NO: 1835183 - RNA, 19 nt, Homo sapiens
  misc_RNA (1)...(19): siRNA sense strand
gaacucagaugugauagcu

SEQ ID NO: 1835184 - RNA, 19 nt, Homo sapiens
  misc_RNA (1)...(19): siRNA sense strand
ucagaaaagucacguauaa

SEQ ID NO: 1835185 - RNA, 19 nt, Homo sapiens
  misc_RNA (1)...(19): siRNA sense strand
gagaaagaccuagcauuga

SEQ ID NO: 1835186 - RNA, 19 nt, Homo sapiens
  misc_RNA (1)...(19): siRNA sense strand
ggcagaauuugcugaacua

SEQ ID NO: 1835187 - RNA, 19 nt, Homo sapiens
  misc_RNA (1)...(19): siRNA sense strand
gaagacaccuacggcuguu

SEQ ID NO: 1835188 - RNA, 19 nt, Homo sapiens
  misc_RNA (1)...(19): siRNA sense strand
uaaagaacuuggagcuuca

SEQ ID NO: 1835189 - RNA, 19 nt, Homo sapiens
  misc_RNA (1)...(19): siRNA sense strand
gagaauccaaguucauaaa

SEQ ID NO: 1835190 - RNA, 19 nt, Homo sapiens
  misc_RNA (1)...(19): siRNA sense strand
gaagucacaagucaucaaa

SEQ ID NO: 1835191 - RNA, 19 nt, Homo sapiens
  misc_RNA (1)...(19): siRNA sense strand
cuacagaaccuccagaaga

SEQ ID NO: 1835192 - RNA, 19 nt, Homo sapiens
  misc_RNA (1)...(19): siRNA sense strand
gaguuugggugaauggaaa

SEQ ID NO: 1835193 - RNA, 19 nt, Homo sapiens
  misc_RNA (1)...(19): siRNA sense strand
gagagaagagcagcugaua

SEQ ID NO: 1835194 - RNA, 19 nt, Homo sapiens
  misc_RNA (1)...(19): siRNA sense strand
gaaagccaguuccgaaggu

SEQ ID NO: 1835195 - RNA, 19 nt, Homo sapiens
  misc_RNA (1)...(19): siRNA sense strand
agaaauggaagacacguua

SEQ ID NO: 1835196 - RNA, 19 nt, Homo sapiens
  misc_RNA (1)...(19): siRNA sense strand
gggaagaaacucaucagaa

SEQ ID NO: 1835197 - RNA, 19 nt, Homo sapiens
  misc_RNA (1)...(19): siRNA sense strand
gaaauggaagacacguuaa

SEQ ID NO: 1835198 - RNA, 19 nt, Homo sapiens
  misc_RNA (1)...(19): siRNA sense strand
gagcuucaacucaaagaaa

SEQ ID NO: 1835199 - RNA, 19 nt, Homo sapiens
  misc_RNA (1)...(19): siRNA sense strand
uugcagaaauccaucagua

SEQ ID NO: 1835200 - RNA, 19 nt, Homo sapiens
  misc_RNA (1)...(19): siRNA sense strand
agagaaagaugagagagaa

SEQ ID NO: 1835201 - RNA, 19 nt, Homo sapiens
  misc_RNA (1)...(19): siRNA sense strand
guaaaucggaaaugaagaa

SEQ ID NO: 1835202 - RNA, 19 nt, Homo sapiens
  misc_RNA (1)...(19): siRNA sense strand
ucaguggccuccucuguga

SEQ ID NO: 1835203 - RNA, 19 nt, Homo sapiens
  misc_RNA (1)...(19): siRNA sense strand
gaaucaagaccucaagaug

SEQ ID NO: 1835204 - RNA, 19 nt, Homo sapiens
  misc_RNA (1)...(19): siRNA sense strand
cagaaauccaucaguauaa

SEQ ID NO: 1835205 - RNA, 19 nt, Homo sapiens
  misc_RNA (1)...(19): siRNA sense strand
gaaagaucugugcucaaua

SEQ ID NO: 1835206 - RNA, 19 nt, Homo sapiens
  misc_RNA (1)...(19): siRNA sense strand
uaaaggagcuagagguacu

SEQ ID NO: 1835207 - RNA, 19 nt, Homo sapiens
  misc_RNA (1)...(19): siRNA sense strand
gguaaaggagcuagaggua

SEQ ID NO: 1835208 - RNA, 19 nt, Homo sapiens
  misc_RNA (1)...(19): siRNA sense strand
ggucgaaacuggacaaagc

SEQ ID NO: 1835209 - RNA, 19 nt, Homo sapiens
  misc_RNA (1)...(19): siRNA sense strand
gcuaauggccugcagacaa

SEQ ID NO: 1835210 - RNA, 19 nt, Homo sapiens
  misc_RNA (1)...(19): siRNA sense strand
ggaagaugccaugcagaua

SEQ ID NO: 1835211 - RNA, 19 nt, Homo sapiens
  misc_RNA (1)...(19): siRNA sense strand
gaaacuggacaaagcagaa

SEQ ID NO: 1835212 - RNA, 19 nt, Homo sapiens
  misc_RNA (1)...(19): siRNA sense strand
uguuguagcuccaguagaa

SEQ ID NO: 1835213 - RNA, 19 nt, Homo sapiens
  misc_RNA (1)...(19): siRNA sense strand
guacugaccaccagagaga

SEQ ID NO: 1835214 - RNA, 19 nt, Homo sapiens
  misc_RNA (1)...(19): siRNA sense strand
ggaauuuguggaugacuuu

SEQ ID NO: 1835215 - RNA, 19 nt, Homo sapiens
  misc_RNA (1)...(19): siRNA sense strand
agccaaagcugcucaaaca

SEQ ID NO: 1835216 - RNA, 19 nt, Homo sapiens
  misc_RNA (1)...(19): siRNA sense strand
gagagccacuucugagaca

SEQ ID NO: 1835217 - RNA, 19 nt, Homo sapiens
  misc_RNA (1)...(19): siRNA sense strand
ggaaaugaagaaacuuaga

SEQ ID NO: 1835218 - RNA, 19 nt, Homo sapiens
  misc_RNA (1)...(19): siRNA sense strand
gaagagcagcugauaaagg

SEQ ID NO: 1835219 - RNA, 19 nt, Homo sapiens
  misc_RNA (1)...(19): siRNA sense strand
gaaacaguccaagaagaaa

SEQ ID NO: 1835220 - RNA, 19 nt, Homo sapiens
  misc_RNA (1)...(19): siRNA sense strand
gaucaaggcuucacaaauu

SEQ ID NO: 1835221 - RNA, 19 nt, Homo sapiens
  misc_RNA (1)...(19): siRNA sense strand
gcagagaguuggugaaaua

SEQ ID NO: 1835222 - RNA, 19 nt, Homo sapiens
  misc_RNA (1)...(19): siRNA sense strand
gcaagaacuuugagaauuu

SEQ ID NO: 1835223 - RNA, 19 nt, Homo sapiens
  misc_RNA (1)...(19): siRNA sense strand
gaccaaagguguuucauaa

SEQ ID NO: 1835224 - RNA, 19 nt, Homo sapiens
  misc_RNA (1)...(19): siRNA sense strand
gcaugaagcuguuugguaa

SEQ ID NO: 1835225 - RNA, 19 nt, Homo sapiens
  misc_RNA (1)...(19): siRNA sense strand
ugaagaagcuaauguauga

SEQ ID NO: 1835226 - RNA, 19 nt, Homo sapiens
  misc_RNA (1)...(19): siRNA sense strand
gaucagagaaagacaauua

SEQ ID NO: 1835227 - RNA, 19 nt, Homo sapiens
  misc_RNA (1)...(19): siRNA sense strand
gaacuggaaacccauauua

SEQ ID NO: 1835228 - RNA, 19 nt, Homo sapiens
  misc_RNA (1)...(19): siRNA sense strand
gaagauauuucugaccaua

SEQ ID NO: 1835229 - RNA, 19 nt, Homo sapiens
  misc_RNA (1)...(19): siRNA sense strand
caucugaagucaugaauaa

SEQ ID NO: 1835230 - RNA, 19 nt, Homo sapiens
  misc_RNA (1)...(19): siRNA sense strand
uaaacaagcuccaaggauu

SEQ ID NO: 1835231 - RNA, 19 nt, Homo sapiens
  misc_RNA (1)...(19): siRNA sense strand
gugaaagccuucuguuuaa

SEQ ID NO: 1835232 - RNA, 19 nt, Homo sapiens
  misc_RNA (1)...(19): siRNA sense strand
gagaauacuuugcuuggaa

SEQ ID NO: 1835233 - RNA, 19 nt, Homo sapiens
  misc_RNA (1)...(19): siRNA sense strand
gaacaucauucuucucauc

SEQ ID NO: 1835234 - RNA, 19 nt, Homo sapiens
  misc_RNA (1)...(19): siRNA sense strand
cuagcaagcuuucagauuu

SEQ ID NO: 1835235 - RNA, 19 nt, Homo sapiens
  misc_RNA (1)...(19): siRNA sense strand
caaguagguuggaacauuu

SEQ ID NO: 1835236 - RNA, 19 nt, Homo sapiens
  misc_RNA (1)...(19): siRNA sense strand
guucaucuaugccguauuu

SEQ ID NO: 1835237 - RNA, 19 nt, Homo sapiens
  misc_RNA (1)...(19): siRNA sense strand
gaauggcucuucuucgauu

SEQ ID NO: 1835238 - RNA, 19 nt, Homo sapiens
  misc_RNA (1)...(19): siRNA sense strand
cuaagaagauugaaccaaa

SEQ ID NO: 1835239 - RNA, 19 nt, Homo sapiens
  misc_RNA (1)...(19): siRNA sense strand
auaaggagauucagaguaa

SEQ ID NO: 1835240 - RNA, 19 nt, Homo sapiens
  misc_RNA (1)...(19): siRNA sense strand
ggugaaauaucuaagaaga

SEQ ID NO: 1835241 - RNA, 19 nt, Homo sapiens
  misc_RNA (1)...(19): siRNA sense strand
gaacaacuaucaagguuuu

SEQ ID NO: 1835242 - RNA, 19 nt, Homo sapiens
  misc_RNA (1)...(19): siRNA sense strand
gaauuugucugccacauag

SEQ ID NO: 1835243 - RNA, 19 nt, Homo sapiens
  misc_RNA (1)...(19): siRNA sense strand
gaagauaugcccauuauac

SEQ ID NO: 1835244 - RNA, 19 nt, Homo sapiens
  misc_RNA (1)...(19): siRNA sense strand
ggaagaugcuacucucaga

SEQ ID NO: 1835245 - RNA, 19 nt, Homo sapiens
  misc_RNA (1)...(19): siRNA sense strand
ugaaagaguuuguccauag

SEQ ID NO: 1835246 - RNA, 19 nt, Homo sapiens
  misc_RNA (1)...(19): siRNA sense strand
guagagaacaauugguuua

SEQ ID NO: 1835247 - RNA, 19 nt, Homo sapiens
  misc_RNA (1)...(19): siRNA sense strand
ccaaagguguuucauaauc

SEQ ID NO: 1835248 - RNA, 19 nt, Homo sapiens
  misc_RNA (1)...(19): siRNA sense strand
gaacuuugauaauguugga

SEQ ID NO: 1835249 - RNA, 19 nt, Homo sapiens
  misc_RNA (1)...(19): siRNA sense strand
gggaaggucuacaugauau

SEQ ID NO: 1835250 - RNA, 19 nt, Homo sapiens
  misc_RNA (1)...(19): siRNA sense strand
gcucaucgcuuuccguugu

SEQ ID NO: 1835251 - RNA, 19 nt, Homo sapiens
  misc_RNA (1)...(19): siRNA sense strand
caaucuagcucaucugaau

SEQ ID NO: 1835252 - RNA, 19 nt, Homo sapiens
  misc_RNA (1)...(19): siRNA sense strand
ucaugucccugacuaauuu

SEQ ID NO: 1835253 - RNA, 19 nt, Homo sapiens
  misc_RNA (1)...(19): siRNA sense strand
uaaagaaggugccuauuuu

SEQ ID NO: 1835254 - RNA, 19 nt, Homo sapiens
  misc_RNA (1)...(19): siRNA sense strand
ggccuuauuugcccuauuu

SEQ ID NO: 1835255 - RNA, 19 nt, Homo sapiens
  misc_RNA (1)...(19): siRNA sense strand
ggauggaucacuauuauga

SEQ ID NO: 1835256 - RNA, 19 nt, Homo sapiens
  misc_RNA (1)...(19): siRNA sense strand
ggauuacccugaaguacuu

SEQ ID NO: 1835257 - RNA, 19 nt, Homo sapiens
  misc_RNA (1)...(19): siRNA sense strand
gaaaguauuggccaacauu

SEQ ID NO: 1835258 - RNA, 19 nt, Homo sapiens
  misc_RNA (1)...(19): siRNA sense strand
uaugauagauggugacaga

SEQ ID NO: 1835259 - RNA, 19 nt, Homo sapiens
  misc_RNA (1)...(19): siRNA sense strand
ugugaaagccuucuguuua

SEQ ID NO: 1835260 - RNA, 19 nt, Homo sapiens
  misc_RNA (1)...(19): siRNA sense strand
gagaacaauugguuuaagu

SEQ ID NO: 1835261 - RNA, 19 nt, Homo sapiens
  misc_RNA (1)...(19): siRNA sense strand
aaugagagccaaucacuua

SEQ ID NO: 1835262 - RNA, 19 nt, Homo sapiens
  misc_RNA (1)...(19): siRNA sense strand
ggaccaaagguguuucaua

SEQ ID NO: 1835263 - RNA, 19 nt, Homo sapiens
  misc_RNA (1)...(19): siRNA sense strand
cugaugaucuggcugauuu

SEQ ID NO: 1835264 - RNA, 19 nt, Homo sapiens
  misc_RNA (1)...(19): siRNA sense strand
aagaagauaugcccauuau

SEQ ID NO: 1835265 - RNA, 19 nt, Homo sapiens
  misc_RNA (1)...(19): siRNA sense strand
guacauuguuguugucaug

SEQ ID NO: 1835266 - RNA, 19 nt, Homo sapiens
  misc_RNA (1)...(19): siRNA sense strand
aggagaaucugauauagaa

SEQ ID NO: 1835267 - RNA, 19 nt, Homo sapiens
  misc_RNA (1)...(19): siRNA sense strand
ugaagaccaugaagaagaa

SEQ ID NO: 1835268 - RNA, 19 nt, Homo sapiens
  misc_RNA (1)...(19): siRNA sense strand
uguaacagcugaagagaau

SEQ ID NO: 1835269 - RNA, 19 nt, Homo sapiens
  misc_RNA (1)...(19): siRNA sense strand
cuaaagaaggugccuauuu

SEQ ID NO: 1835270 - RNA, 19 nt, Homo sapiens
  misc_RNA (1)...(19): siRNA sense strand
caaugcggcuuccaucuug

SEQ ID NO: 1835271 - RNA, 19 nt, Homo sapiens
  misc_RNA (1)...(19): siRNA sense strand
guaaauggucugacuguga

SEQ ID NO: 1835272 - RNA, 19 nt, Homo sapiens
  misc_RNA (1)...(19): siRNA sense strand
caauagccaugaugauaga

SEQ ID NO: 1835273 - RNA, 19 nt, Homo sapiens
  misc_RNA (1)...(19): siRNA sense strand
gaucuucacuuggucaaau

SEQ ID NO: 1835274 - RNA, 19 nt, Homo sapiens
  misc_RNA (1)...(19): siRNA sense strand
gaccauacccuuucugaau

SEQ ID NO: 1835275 - RNA, 19 nt, Homo sapiens
  misc_RNA (1)...(19): siRNA sense strand
uggaagauguggacccaua

SEQ ID NO: 1835276 - RNA, 19 nt, Homo sapiens
  misc_RNA (1)...(19): siRNA sense strand
agaaagauaugcucuccuu

SEQ ID NO: 1835277 - RNA, 19 nt, Homo sapiens
  misc_RNA (1)...(19): siRNA sense strand
ggucugaaaucccuuguag

SEQ ID NO: 1835278 - RNA, 19 nt, Homo sapiens
  misc_RNA (1)...(19): siRNA sense strand
gaaccaaaauuucaacaga

SEQ ID NO: 1835279 - RNA, 19 nt, Homo sapiens
  misc_RNA (1)...(19): siRNA sense strand
aaacaaccuuacccacuuu

SEQ ID NO: 1835280 - RNA, 19 nt, Homo sapiens
  misc_RNA (1)...(19): siRNA sense strand
ccaugaagaagaagacuua

SEQ ID NO: 1835281 - RNA, 19 nt, Homo sapiens
  misc_RNA (1)...(19): siRNA sense strand
ggccaagaccauacaaaua

SEQ ID NO: 1835282 - RNA, 19 nt, Homo sapiens
  misc_RNA (1)...(19): siRNA sense strand
gcuuggaauuuacacauuu

SEQ ID NO: 1835283 - RNA, 19 nt, Homo sapiens
  misc_RNA (1)...(19): siRNA sense strand
agaaauagaaucaggguuu

SEQ ID NO: 1835284 - RNA, 19 nt, Homo sapiens
  misc_RNA (1)...(19): siRNA sense strand
ugacugugauccugauaaa

SEQ ID NO: 1835285 - RNA, 19 nt, Homo sapiens
  misc_RNA (1)...(19): siRNA sense strand
ggaucacuauuaugaauuc

SEQ ID NO: 1835286 - RNA, 19 nt, Homo sapiens
  misc_RNA (1)...(19): siRNA sense strand
uaucaugggaguagacuua

SEQ ID NO: 1835287 - RNA, 19 nt, Homo sapiens
  misc_RNA (1)...(19): siRNA sense strand
gcugcaagauuguagagaa

SEQ ID NO: 1835288 - RNA, 19 nt, Homo sapiens
  misc_RNA (1)...(19): siRNA sense strand
aagaaaaggucaccaauuu

SEQ ID NO: 1835289 - RNA, 19 nt, Homo sapiens
  misc_RNA (1)...(19): siRNA sense strand
gagaguuggugaaauaucu

SEQ ID NO: 1835290 - RNA, 19 nt, Homo sapiens
  misc_RNA (1)...(19): siRNA sense strand
caagaagauaugcccauua

SEQ ID NO: 1835291 - RNA, 19 nt, Homo sapiens
  misc_RNA (1)...(19): siRNA sense strand
uaaauggucugacugugau

SEQ ID NO: 1835292 - RNA, 19 nt, Homo sapiens
  misc_RNA (1)...(19): siRNA sense strand
accaguaccucgcccauua

SEQ ID NO: 1835293 - RNA, 19 nt, Homo sapiens
  misc_RNA (1)...(19): siRNA sense strand
gaagaacaacuaucaaggu

SEQ ID NO: 1835294 - RNA, 19 nt, Homo sapiens
  misc_RNA (1)...(19): siRNA sense strand
gaugauagacacugauguu

SEQ ID NO: 1835295 - RNA, 19 nt, Homo sapiens
  misc_RNA (1)...(19): siRNA sense strand
gaguaagucuggugaugga

SEQ ID NO: 1835296 - RNA, 19 nt, Homo sapiens
  misc_RNA (1)...(19): siRNA sense strand
uaacagcugaagagaauaa

SEQ ID NO: 1835297 - RNA, 19 nt, Homo sapiens
  misc_RNA (1)...(19): siRNA sense strand
ggaaauuuacugguacuuu

SEQ ID NO: 1835298 - RNA, 19 nt, Homo sapiens
  misc_RNA (1)...(19): siRNA sense strand
gauaguguuccaugguuua

SEQ ID NO: 1835299 - RNA, 19 nt, Homo sapiens
  misc_RNA (1)...(19): siRNA sense strand
gaaagaguuuguccauagg

SEQ ID NO: 1835300 - RNA, 19 nt, Homo sapiens
  misc_RNA (1)...(19): siRNA sense strand
gaaggucuacaugauauuu

SEQ ID NO: 1835301 - RNA, 19 nt, Homo sapiens
  misc_RNA (1)...(19): siRNA sense strand
ccauggaacuggcucgauu

SEQ ID NO: 1835302 - RNA, 19 nt, Homo sapiens
  misc_RNA (1)...(19): siRNA sense strand
uaauuaguguccugauuga

SEQ ID NO: 1835303 - RNA, 19 nt, Homo sapiens
  misc_RNA (1)...(19): siRNA sense strand
caaagguguuucauaaucu

SEQ ID NO: 1835304 - RNA, 19 nt, Homo sapiens
  misc_RNA (1)...(19): siRNA sense strand
uaaugaagaccaugaagaa

SEQ ID NO: 1835305 - RNA, 19 nt, Homo sapiens
  misc_RNA (1)...(19): siRNA sense strand
gaguuuguccauaggauua

SEQ ID NO: 1835306 - RNA, 19 nt, Homo sapiens
  misc_RNA (1)...(19): siRNA sense strand
ugaaggauaugugugugua

SEQ ID NO: 1835307 - RNA, 19 nt, Homo sapiens
  misc_RNA (1)...(19): siRNA sense strand
ggagaccaguauuagagaa

SEQ ID NO: 1835308 - RNA, 19 nt, Homo sapiens
  misc_RNA (1)...(19): siRNA sense strand
ggaacuggcucgauuucag

SEQ ID NO: 1835309 - RNA, 19 nt, Homo sapiens
  misc_RNA (1)...(19): siRNA sense strand
cgacuacuuugaaacgaaa

SEQ ID NO: 1835310 - RNA, 19 nt, Homo sapiens
  misc_RNA (1)...(19): siRNA sense strand
ggacuaugucugccuauga

SEQ ID NO: 1835311 - RNA, 19 nt, Homo sapiens
  misc_RNA (1)...(19): siRNA sense strand
gcaauagccaugaugauag

SEQ ID NO: 1835312 - RNA, 19 nt, Homo sapiens
  misc_RNA (1)...(19): siRNA sense strand
gaacaauugguuuaagugu

SEQ ID NO: 1835313 - RNA, 19 nt, Homo sapiens
  misc_RNA (1)...(19): siRNA sense strand
ggacccauauuacuacaag

SEQ ID NO: 1835314 - RNA, 19 nt, Homo sapiens
  misc_RNA (1)...(19): siRNA sense strand
uuggugagcucauuuaguu

SEQ ID NO: 1835315 - RNA, 19 nt, Homo sapiens
  misc_RNA (1)...(19): siRNA sense strand
ccacauagacaaagacugu

SEQ ID NO: 1835316 - RNA, 19 nt, Homo sapiens
  misc_RNA (1)...(19): siRNA sense strand
gaagcuguuugguaagaau

SEQ ID NO: 1835317 - RNA, 19 nt, Homo sapiens
  misc_RNA (1)...(19): siRNA sense strand
ugaaagacuugguccuguu

SEQ ID NO: 1835318 - RNA, 19 nt, Homo sapiens
  misc_RNA (1)...(19): siRNA sense strand
ccaagaagauaugcccauu

SEQ ID NO: 1835319 - RNA, 19 nt, Homo sapiens
  misc_RNA (1)...(19): siRNA sense strand
ugacagagauguucaugcu

SEQ ID NO: 1835320 - RNA, 19 nt, Homo sapiens
  misc_RNA (1)...(19): siRNA sense strand
ggaagaaucaucaaaguaa

SEQ ID NO: 1835321 - RNA, 19 nt, Homo sapiens
  misc_RNA (1)...(19): siRNA sense strand
uaauaaagcucacagauca

SEQ ID NO: 1835322 - RNA, 19 nt, Homo sapiens
  misc_RNA (1)...(19): siRNA sense strand
gcacaacgcccaguguuua

SEQ ID NO: 1835323 - RNA, 19 nt, Homo sapiens
  misc_RNA (1)...(19): siRNA sense strand
gaucgaaacuguggugaaa

SEQ ID NO: 1835324 - RNA, 19 nt, Homo sapiens
  misc_RNA (1)...(19): siRNA sense strand
gaagagagguggugaaacg

SEQ ID NO: 1835325 - RNA, 19 nt, Homo sapiens
  misc_RNA (1)...(19): siRNA sense strand
ggagugacguugauucaga

SEQ ID NO: 1835326 - RNA, 19 nt, Homo sapiens
  misc_RNA (1)...(19): siRNA sense strand
ggagguggaucaaagagaa

SEQ ID NO: 1835327 - RNA, 19 nt, Homo sapiens
  misc_RNA (1)...(19): siRNA sense strand
cagacaagcugguguagaa

SEQ ID NO: 1835328 - RNA, 19 nt, Homo sapiens
  misc_RNA (1)...(19): siRNA sense strand
gcccucaucuguaucauaa

SEQ ID NO: 1835329 - RNA, 19 nt, Homo sapiens
  misc_RNA (1)...(19): siRNA sense strand
gccauuagcuuucuacagu

SEQ ID NO: 1835330 - RNA, 19 nt, Homo sapiens
  misc_RNA (1)...(19): siRNA sense strand
cagcggaguucaucaagaa

SEQ ID NO: 1835331 - RNA, 19 nt, Homo sapiens
  misc_RNA (1)...(19): siRNA sense strand
cggaguucaucaagaauua

SEQ ID NO: 1835332 - RNA, 19 nt, Homo sapiens
  misc_RNA (1)...(19): siRNA sense strand
ggccagcgcuugacuuugu

SEQ ID NO: 1835333 - RNA, 19 nt, Homo sapiens
  misc_RNA (1)...(19): siRNA sense strand
agacugaagugaaaguuga

SEQ ID NO: 1835334 - RNA, 19 nt, Homo sapiens
  misc_RNA (1)...(19): siRNA sense strand
gaacacugaucaugacaac

SEQ ID NO: 1835335 - RNA, 19 nt, Homo sapiens
  misc_RNA (1)...(19): siRNA sense strand
ccaaagaggagaucaugaa

SEQ ID NO: 1835336 - RNA, 19 nt, Homo sapiens
  misc_RNA (1)...(19): siRNA sense strand
acagauauuuggcagcuuu

SEQ ID NO: 1835337 - RNA, 19 nt, Homo sapiens
  misc_RNA (1)...(19): siRNA sense strand
ugaaacggaucgaaacugu

SEQ ID NO: 1835338 - RNA, 19 nt, Homo sapiens
  misc_RNA (1)...(19): siRNA sense strand
gaagaagcagcuaugagaa

SEQ ID NO: 1835339 - RNA, 19 nt, Homo sapiens
  misc_RNA (1)...(19): siRNA sense strand
aaacagagacgccgaaagu

SEQ ID NO: 1835340 - RNA, 19 nt, Homo sapiens
  misc_RNA (1)...(19): siRNA sense strand
ugaagaagcagcuaugaga

SEQ ID NO: 1835341 - RNA, 19 nt, Homo sapiens
  misc_RNA (1)...(19): siRNA sense strand
agaaggaggugccuauauc

SEQ ID NO: 1835342 - RNA, 19 nt, Homo sapiens
  misc_RNA (1)...(19): siRNA sense strand
gagaagagagguggugaaa

SEQ ID NO: 1835343 - RNA, 19 nt, Homo sapiens
  misc_RNA (1)...(19): siRNA sense strand
caucaagaauuacaugaag

SEQ ID NO: 1835344 - RNA, 19 nt, Homo sapiens
  misc_RNA (1)...(19): siRNA sense strand
caaagaaggaggugccuau

SEQ ID NO: 1835345 - RNA, 19 nt, Homo sapiens
  misc_RNA (1)...(19): siRNA sense strand
gaaggaacugcgucuuuga

SEQ ID NO: 1835346 - RNA, 19 nt, Homo sapiens
  misc_RNA (1)...(19): siRNA sense strand
gcgaauagccacaugcaau

SEQ ID NO: 1835347 - RNA, 19 nt, Homo sapiens
  misc_RNA (1)...(19): siRNA sense strand
gaagaaucaucaaaguaac

SEQ ID NO: 1835348 - RNA, 19 nt, Homo sapiens
  misc_RNA (1)...(19): siRNA sense strand
gcagcggaguucaucaaga

SEQ ID NO: 1835349 - RNA, 19 nt, Homo sapiens
  misc_RNA (1)...(19): siRNA sense strand
gcucagccaugccguguca

SEQ ID NO: 1835350 - RNA, 19 nt, Homo sapiens
  misc_RNA (1)...(19): siRNA sense strand
aauauucauugcugccuua

SEQ ID NO: 1835351 - RNA, 19 nt, Homo sapiens
  misc_RNA (1)...(19): siRNA sense strand
gcuacgguaccaauaauaa

SEQ ID NO: 1835352 - RNA, 19 nt, Homo sapiens
  misc_RNA (1)...(19): siRNA sense strand
agaaggaacugcgucuuug

SEQ ID NO: 1835353 - RNA, 19 nt, Homo sapiens
  misc_RNA (1)...(19): siRNA sense strand
aaucagaccagguuuacua

SEQ ID NO: 1835354 - RNA, 19 nt, Homo sapiens
  misc_RNA (1)...(19): siRNA sense strand
gugccuauaucgccaaaga

SEQ ID NO: 1835355 - RNA, 19 nt, Homo sapiens
  misc_RNA (1)...(19): siRNA sense strand
ucgaaacuguggugaaaga

SEQ ID NO: 1835356 - RNA, 19 nt, Homo sapiens
  misc_RNA (1)...(19): siRNA sense strand
caaagaggagaucaugaaa

SEQ ID NO: 1835357 - RNA, 19 nt, Homo sapiens
  misc_RNA (1)...(19): siRNA sense strand
uaacucaggaggugauuga

SEQ ID NO: 1835358 - RNA, 19 nt, Homo sapiens
  misc_RNA (1)...(19): siRNA sense strand
gacggcugauguacagaua

SEQ ID NO: 1835359 - RNA, 19 nt, Homo sapiens
  misc_RNA (1)...(19): siRNA sense strand
acaguugcauccaagaauu

SEQ ID NO: 1835360 - RNA, 19 nt, Homo sapiens
  misc_RNA (1)...(19): siRNA sense strand
gcugagccguguuccauca

SEQ ID NO: 1835361 - RNA, 19 nt, Homo sapiens
  misc_RNA (1)...(19): siRNA sense strand
cggcugauguacagauauu

SEQ ID NO: 1835362 - RNA, 19 nt, Homo sapiens
  misc_RNA (1)...(19): siRNA sense strand
agagggaccugaaugaagu

SEQ ID NO: 1835363 - RNA, 19 nt, Homo sapiens
  misc_RNA (1)...(19): siRNA sense strand
gaagugaaaguugacauca

SEQ ID NO: 1835364 - RNA, 19 nt, Homo sapiens
  misc_RNA (1)...(19): siRNA sense strand
caagaucaaagagcgaaua

SEQ ID NO: 1835365 - RNA, 19 nt, Homo sapiens
  misc_RNA (1)...(19): siRNA sense strand
gaaaaccgguauuagaauc

SEQ ID NO: 1835366 - RNA, 19 nt, Homo sapiens
  misc_RNA (1)...(19): siRNA sense strand
ugacaucagcuuuaacaug

SEQ ID NO: 1835367 - RNA, 19 nt, Homo sapiens
  misc_RNA (1)...(19): siRNA sense strand
gaaagccguccaccacaug

SEQ ID NO: 1835368 - RNA, 19 nt, Homo sapiens
  misc_RNA (1)...(19): siRNA sense strand
uagaaggaacugcgucuuu

SEQ ID NO: 1835369 - RNA, 19 nt, Homo sapiens
  misc_RNA (1)...(19): siRNA sense strand
cagaccagguuuacuauac

SEQ ID NO: 1835370 - RNA, 19 nt, Homo sapiens
  misc_RNA (1)...(19): siRNA sense strand
gaucaugacaaccaacaau

SEQ ID NO: 1835371 - RNA, 19 nt, Homo sapiens
  misc_RNA (1)...(19): siRNA sense strand
uaggaagaaucaucaaagu

SEQ ID NO: 1835372 - RNA, 19 nt, Homo sapiens
  misc_RNA (1)...(19): siRNA sense strand
cagguggaauuagcucaua

SEQ ID NO: 1835373 - RNA, 19 nt, Homo sapiens
  misc_RNA (1)...(19): siRNA sense strand
gcagagggaccugaaugaa

SEQ ID NO: 1835374 - RNA, 19 nt, Homo sapiens
  misc_RNA (1)...(19): siRNA sense strand
agaagcagcuaugagaaga

SEQ ID NO: 1835375 - RNA, 19 nt, Homo sapiens
  misc_RNA (1)...(19): siRNA sense strand
ccagaacacugaucaugac

SEQ ID NO: 1835376 - RNA, 19 nt, Homo sapiens
  misc_RNA (1)...(19): siRNA sense strand
gguauuagaaucaaagaag

SEQ ID NO: 1835377 - RNA, 19 nt, Homo sapiens
  misc_RNA (1)...(19): siRNA sense strand
ugacguugauucagacaca

SEQ ID NO: 1835378 - RNA, 19 nt, Homo sapiens
  misc_RNA (1)...(19): siRNA sense strand
cauuagcuuucuacaguug

SEQ ID NO: 1835379 - RNA, 19 nt, Homo sapiens
  misc_RNA (1)...(19): siRNA sense strand
gaaccgagagcccgagucu

SEQ ID NO: 1835380 - RNA, 19 nt, Homo sapiens
  misc_RNA (1)...(19): siRNA sense strand
cucaggaggugauugacua

SEQ ID NO: 1835381 - RNA, 19 nt, Homo sapiens
  misc_RNA (1)...(19): siRNA sense strand
aagcaggucuucgauuaug

SEQ ID NO: 1835382 - RNA, 19 nt, Homo sapiens
  misc_RNA (1)...(19): siRNA sense strand
gaacucuaugggagaaauu

SEQ ID NO: 1835383 - RNA, 19 nt, Homo sapiens
  misc_RNA (1)...(19): siRNA sense strand
ccaacaaucagaccagguu

SEQ ID NO: 1835384 - RNA, 19 nt, Homo sapiens
  misc_RNA (1)...(19): siRNA sense strand
uaguacaggucuuuaucuu

SEQ ID NO: 1835385 - RNA, 19 nt, Homo sapiens
  misc_RNA (1)...(19): siRNA sense strand
cgaauagccacaugcaaug

SEQ ID NO: 1835386 - RNA, 19 nt, Homo sapiens
  misc_RNA (1)...(19): siRNA sense strand
aagaggagaucaugaaagc

SEQ ID NO: 1835387 - RNA, 19 nt, Homo sapiens
  misc_RNA (1)...(19): siRNA sense strand
gcagcacaacggcaugaaa

SEQ ID NO: 1835388 - RNA, 19 nt, Homo sapiens
  misc_RNA (1)...(19): siRNA sense strand
gcccaccacuuccagaaca

SEQ ID NO: 1835389 - RNA, 19 nt, Homo sapiens
  misc_RNA (1)...(19): siRNA sense strand
gucuuuaucuuccaacuag

SEQ ID NO: 1835390 - RNA, 19 nt, Homo sapiens
  misc_RNA (1)...(19): siRNA sense strand
ugaaagccguccaccacau

SEQ ID NO: 1835391 - RNA, 19 nt, Homo sapiens
  misc_RNA (1)...(19): siRNA sense strand
gguccuauccaaacagaga

SEQ ID NO: 1835392 - RNA, 19 nt, Homo sapiens
  misc_RNA (1)...(19): siRNA sense strand
gcccaguguuuaccaguuc

SEQ ID NO: 1835393 - RNA, 19 nt, Homo sapiens
  misc_RNA (1)...(19): siRNA sense strand
gcugauguacagauauuug

SEQ ID NO: 1835394 - RNA, 19 nt, Homo sapiens
  misc_RNA (1)...(19): siRNA sense strand
ugacaaggcuacgguacca

SEQ ID NO: 1835395 - RNA, 19 nt, Homo sapiens
  misc_RNA (1)...(19): siRNA sense strand
gcacaacggcaugaaacug

SEQ ID NO: 1835396 - RNA, 19 nt, Homo sapiens
  misc_RNA (1)...(19): siRNA sense strand
uaccggagguggaucaaag

SEQ ID NO: 1835397 - RNA, 19 nt, Homo sapiens
  misc_RNA (1)...(19): siRNA sense strand
ccauuagcuuucuacaguu

SEQ ID NO: 1835398 - RNA, 19 nt, Homo sapiens
  misc_RNA (1)...(19): siRNA sense strand
auucauugcugccuuacuu

SEQ ID NO: 1835399 - RNA, 19 nt, Homo sapiens
  misc_RNA (1)...(19): siRNA sense strand
caaggcuacgguaccaaua

SEQ ID NO: 1835400 - RNA, 19 nt, Homo sapiens
  misc_RNA (1)...(19): siRNA sense strand
gcucacagaucaggagacu

SEQ ID NO: 1835401 - RNA, 19 nt, Homo sapiens
  misc_RNA (1)...(19): siRNA sense strand
gagacugaagugaaaguug

SEQ ID NO: 1835402 - RNA, 19 nt, Homo sapiens
  misc_RNA (1)...(19): siRNA sense strand
aaguugacaucagcuuuaa

SEQ ID NO: 1835403 - RNA, 19 nt, Homo sapiens
  misc_RNA (1)...(19): siRNA sense strand
caacaaucagaccagguuu

SEQ ID NO: 1835404 - RNA, 19 nt, Homo sapiens
  misc_RNA (1)...(19): siRNA sense strand
gcggaguucaucaagaauu

SEQ ID NO: 1835405 - RNA, 19 nt, Homo sapiens
  misc_RNA (1)...(19): siRNA sense strand
gcucauacagccuaauuuu

SEQ ID NO: 1835406 - RNA, 19 nt, Homo sapiens
  misc_RNA (1)...(19): siRNA sense strand
aaagaaggaggugccuaua

SEQ ID NO: 1835407 - RNA, 19 nt, Homo sapiens
  misc_RNA (1)...(19): siRNA sense strand
auauuuggcagcuuuagua

SEQ ID NO: 1835408 - RNA, 19 nt, Homo sapiens
  misc_RNA (1)...(19): siRNA sense strand
aggaagaaucaucaaagua

SEQ ID NO: 1835409 - RNA, 19 nt, Homo sapiens
  misc_RNA (1)...(19): siRNA sense strand
acaagcugguguagaagga

SEQ ID NO: 1835410 - RNA, 19 nt, Homo sapiens
  misc_RNA (1)...(19): siRNA sense strand
aagcagcuaugagaagaga

SEQ ID NO: 1835411 - RNA, 19 nt, Homo sapiens
  misc_RNA (1)...(19): siRNA sense strand
cuacgguaccaauaauaaa

SEQ ID NO: 1835412 - RNA, 19 nt, Homo sapiens
  misc_RNA (1)...(19): siRNA sense strand
guugacaucagcuuuaaca

SEQ ID NO: 1835413 - RNA, 19 nt, Homo sapiens
  misc_RNA (1)...(19): siRNA sense strand
gcagacaagcugguguaga

SEQ ID NO: 1835414 - RNA, 19 nt, Homo sapiens
  misc_RNA (1)...(19): siRNA sense strand
ggucuuuaucuuccaacua

SEQ ID NO: 1835415 - RNA, 19 nt, Homo sapiens
  misc_RNA (1)...(19): siRNA sense strand
cagguccuauccaaacaga

SEQ ID NO: 1835416 - RNA, 19 nt, Homo sapiens
  misc_RNA (1)...(19): siRNA sense strand
gaaggaggugccuauaucg

SEQ ID NO: 1835417 - RNA, 19 nt, Homo sapiens
  misc_RNA (1)...(19): siRNA sense strand
aaaccgguauuagaaucaa

SEQ ID NO: 1835418 - RNA, 19 nt, Homo sapiens
  misc_RNA (1)...(19): siRNA sense strand
gggcagcggaguucaucaa

SEQ ID NO: 1835419 - RNA, 19 nt, Homo sapiens
  misc_RNA (1)...(19): siRNA sense strand
cucgagcccucaucuguau

SEQ ID NO: 1835420 - RNA, 19 nt, Homo sapiens
  misc_RNA (1)...(19): siRNA sense strand
uuucauagcugacuacuuu

SEQ ID NO: 1835421 - RNA, 19 nt, Homo sapiens
  misc_RNA (1)...(19): siRNA sense strand
aggaguggguccagaaaua

SEQ ID NO: 1835422 - RNA, 19 nt, Homo sapiens
  misc_RNA (1)...(19): siRNA sense strand
ccaguucucugcaucacuu

SEQ ID NO: 1835423 - RNA, 19 nt, Homo sapiens
  misc_RNA (1)...(19): siRNA sense strand
agaauuucauagcugacua

SEQ ID NO: 1835424 - RNA, 19 nt, Homo sapiens
  misc_RNA (1)...(19): siRNA sense strand
gcaccauggcucucugcaa

SEQ ID NO: 1835425 - RNA, 19 nt, Homo sapiens
  misc_RNA (1)...(19): siRNA sense strand
caaccaguucucugcauca

SEQ ID NO: 1835426 - RNA, 19 nt, Homo sapiens
  misc_RNA (1)...(19): siRNA sense strand
ucauagcugacuacuuuga

SEQ ID NO: 1835427 - RNA, 19 nt, Homo sapiens
  misc_RNA (1)...(19): siRNA sense strand
gaggaguggguccagaaau

SEQ ID NO: 1835428 - RNA, 19 nt, Homo sapiens
  misc_RNA (1)...(19): siRNA sense strand
auagcugacuacuuugaga

SEQ ID NO: 1835429 - RNA, 19 nt, Homo sapiens
  misc_RNA (1)...(19): siRNA sense strand
gaauuucauagcugacuac

SEQ ID NO: 1835430 - RNA, 19 nt, Homo sapiens
  misc_RNA (1)...(19): siRNA sense strand
gugaggaguggguccagaa

SEQ ID NO: 1835431 - RNA, 19 nt, Homo sapiens
  misc_RNA (1)...(19): siRNA sense strand
gcaggaaucugaugacuuu

SEQ ID NO: 1835432 - RNA, 19 nt, Homo sapiens
  misc_RNA (1)...(19): siRNA sense strand
gcaagaaacccaucuacaa

SEQ ID NO: 1835433 - RNA, 19 nt, Homo sapiens
  misc_RNA (1)...(19): siRNA sense strand
ccaagaaacuagaggagaa

SEQ ID NO: 1835434 - RNA, 19 nt, Homo sapiens
  misc_RNA (1)...(19): siRNA sense strand
gcuaugaccugggcaagaa

SEQ ID NO: 1835435 - RNA, 19 nt, Homo sapiens
  misc_RNA (1)...(19): siRNA sense strand
agaaacccaucuacaagaa

SEQ ID NO: 1835436 - RNA, 19 nt, Homo sapiens
  misc_RNA (1)...(19): siRNA sense strand
gaucggcccugaaguuguc

SEQ ID NO: 1835437 - RNA, 19 nt, Homo sapiens
  misc_RNA (1)...(19): siRNA sense strand
gugaggauguguccaacaa

SEQ ID NO: 1835438 - RNA, 19 nt, Homo sapiens
  misc_RNA (1)...(19): siRNA sense strand
ccaacaaggugucaauguc

SEQ ID NO: 1835439 - RNA, 19 nt, Homo sapiens
  misc_RNA (1)...(19): siRNA sense strand
caagaaacccaucuacaag

SEQ ID NO: 1835440 - RNA, 19 nt, Homo sapiens
  misc_RNA (1)...(19): siRNA sense strand
guaugaagaagaaggauga

SEQ ID NO: 1835441 - RNA, 19 nt, Homo sapiens
  misc_RNA (1)...(19): siRNA sense strand
ggaaucugaugacuuugag

SEQ ID NO: 1835442 - RNA, 19 nt, Homo sapiens
  misc_RNA (1)...(19): siRNA sense strand
gaaacccaucuacaagaaa

SEQ ID NO: 1835443 - RNA, 19 nt, Homo sapiens
  misc_RNA (1)...(19): siRNA sense strand
gcagggcagcaacaucuuu

SEQ ID NO: 1835444 - RNA, 19 nt, Homo sapiens
  misc_RNA (1)...(19): siRNA sense strand
gaaucucacccguugaaga

SEQ ID NO: 1835445 - RNA, 19 nt, Homo sapiens
  misc_RNA (1)...(19): siRNA sense strand
cuggagaucuggaugacuu

SEQ ID NO: 1835446 - RNA, 19 nt, Homo sapiens
  misc_RNA (1)...(19): siRNA sense strand
caugaucggcccugaaguu

SEQ ID NO: 1835447 - RNA, 19 nt, Homo sapiens
  misc_RNA (1)...(19): siRNA sense strand
aaacccaucuacaagaaag

SEQ ID NO: 1835448 - RNA, 19 nt, Homo sapiens
  misc_RNA (1)...(19): siRNA sense strand
gaaggaugaaggcagcuau

SEQ ID NO: 1835449 - RNA, 19 nt, Homo sapiens
  misc_RNA (1)...(19): siRNA sense strand
caucgugggcauccucuuu

SEQ ID NO: 1835450 - RNA, 19 nt, Homo sapiens
  misc_RNA (1)...(19): siRNA sense strand
gaagagagugaggaugugu

SEQ ID NO: 1835451 - RNA, 19 nt, Homo sapiens
  misc_RNA (1)...(19): siRNA sense strand
gguccuggcagcucugauu

SEQ ID NO: 1835452 - RNA, 19 nt, Homo sapiens
  misc_RNA (1)...(19): siRNA sense strand
gaaacuagaggagaaugag

SEQ ID NO: 1835453 - RNA, 19 nt, Homo sapiens
  misc_RNA (1)...(19): siRNA sense strand
ccaccgaacccaagaaacu

SEQ ID NO: 1835454 - RNA, 19 nt, Homo sapiens
  misc_RNA (1)...(19): siRNA sense strand
uagaggagaaugagguuau

SEQ ID NO: 1835455 - RNA, 19 nt, Homo sapiens
  misc_RNA (1)...(19): siRNA sense strand
aagaaacccaucuacaaga

SEQ ID NO: 1835456 - RNA, 19 nt, Homo sapiens
  misc_RNA (1)...(19): siRNA sense strand
gcucuggagaucuggauga

SEQ ID NO: 1835457 - RNA, 19 nt, Homo sapiens
  misc_RNA (1)...(19): siRNA sense strand
cagcaacaucuuugagaga

SEQ ID NO: 1835458 - RNA, 19 nt, Homo sapiens
  misc_RNA (1)...(19): siRNA sense strand
agaucuggaugacuuggaa

SEQ ID NO: 1835459 - RNA, 19 nt, Homo sapiens
  misc_RNA (1)...(19): siRNA sense strand
ugaagagagugaggaugug

SEQ ID NO: 1835460 - RNA, 19 nt, Homo sapiens
  misc_RNA (1)...(19): siRNA sense strand
ggcagcaacaucuuugaga

SEQ ID NO: 1835461 - RNA, 19 nt, Homo sapiens
  misc_RNA (1)...(19): siRNA sense strand
ggcaagaaacccaucuaca

SEQ ID NO: 1835462 - RNA, 19 nt, Homo sapiens
  misc_RNA (1)...(19): siRNA sense strand
agcaacaucuuugagagaa

SEQ ID NO: 1835463 - RNA, 19 nt, Homo sapiens
  misc_RNA (1)...(19): siRNA sense strand
gagguuauccccaagagaa

SEQ ID NO: 1835464 - RNA, 19 nt, Homo sapiens
  misc_RNA (1)...(19): siRNA sense strand
gcaacaucuuugagagaac

SEQ ID NO: 1835465 - RNA, 19 nt, Homo sapiens
  misc_RNA (1)...(19): siRNA sense strand
caagaaacuagaggagaau

SEQ ID NO: 1835466 - RNA, 19 nt, Homo sapiens
  misc_RNA (1)...(19): siRNA sense strand
gggcaggaaucugaugacu

SEQ ID NO: 1835467 - RNA, 19 nt, Homo sapiens
  misc_RNA (1)...(19): siRNA sense strand
caccgaacccaagaaacua

SEQ ID NO: 1835468 - RNA, 19 nt, Homo sapiens
  misc_RNA (1)...(19): siRNA sense strand
uguaccguaugaagaagaa

SEQ ID NO: 1835469 - RNA, 19 nt, Homo sapiens
  misc_RNA (1)...(19): siRNA sense strand
cauccucuuugccgucuuc

SEQ ID NO: 1835470 - RNA, 19 nt, Homo sapiens
  misc_RNA (1)...(19): siRNA sense strand
gugcagggcagcaacaucu

SEQ ID NO: 1835471 - RNA, 19 nt, Homo sapiens
  misc_RNA (1)...(19): siRNA sense strand
ccuuggugccucuagauaa

SEQ ID NO: 1835472 - RNA, 19 nt, Homo sapiens
  misc_RNA (1)...(19): siRNA sense strand
ugauccuacugcucaugua

SEQ ID NO: 1835473 - RNA, 19 nt, Homo sapiens
  misc_RNA (1)...(19): siRNA sense strand
ccuggcagcucugauugug

SEQ ID NO: 1835474 - RNA, 19 nt, Homo sapiens
  misc_RNA (1)...(19): siRNA sense strand
ccgagagacugaggucauc

SEQ ID NO: 1835475 - RNA, 19 nt, Homo sapiens
  misc_RNA (1)...(19): siRNA sense strand
agaaacuagaggagaauga

SEQ ID NO: 1835476 - RNA, 19 nt, Homo sapiens
  misc_RNA (1)...(19): siRNA sense strand
accagacgaugaggaugua

SEQ ID NO: 1835477 - RNA, 19 nt, Homo sapiens
  misc_RNA (1)...(19): siRNA sense strand
gggcaagaaacccaucuac

SEQ ID NO: 1835478 - RNA, 19 nt, Homo sapiens
  misc_RNA (1)...(19): siRNA sense strand
agagugaggauguguccaa

SEQ ID NO: 1835479 - RNA, 19 nt, Homo sapiens
  misc_RNA (1)...(19): siRNA sense strand
uugaagagagugaggaugu

SEQ ID NO: 1835480 - RNA, 19 nt, Homo sapiens
  misc_RNA (1)...(19): siRNA sense strand
ggacaucaaucaagucuua

SEQ ID NO: 1835481 - RNA, 19 nt, Homo sapiens
  misc_RNA (1)...(19): siRNA sense strand
ccaaagggcuccagcuaua

SEQ ID NO: 1835482 - RNA, 19 nt, Homo sapiens
  misc_RNA (1)...(19): siRNA sense strand
gaagauaucuaccuccaau

SEQ ID NO: 1835483 - RNA, 19 nt, Homo sapiens
  misc_RNA (1)...(19): siRNA sense strand
gcaaagauguggcugugaa

SEQ ID NO: 1835484 - RNA, 19 nt, Homo sapiens
  misc_RNA (1)...(19): siRNA sense strand
gaucaaagauuacuaugca

SEQ ID NO: 1835485 - RNA, 19 nt, Homo sapiens
  misc_RNA (1)...(19): siRNA sense strand
gcaaugacaugaugaaucu

SEQ ID NO: 1835486 - RNA, 19 nt, Homo sapiens
  misc_RNA (1)...(19): siRNA sense strand
acaggaaacugcacuauuu

SEQ ID NO: 1835487 - RNA, 19 nt, Homo sapiens
  misc_RNA (1)...(19): siRNA sense strand
guaaagaaaugcauucaca

SEQ ID NO: 1835488 - RNA, 19 nt, Homo sapiens
  misc_RNA (1)...(19): siRNA sense strand
uggcacagcucuuuauuaa

SEQ ID NO: 1835489 - RNA, 19 nt, Homo sapiens
  misc_RNA (1)...(19): siRNA sense strand
ucacaaagcuacccgcaaa

SEQ ID NO: 1835490 - RNA, 19 nt, Homo sapiens
  misc_RNA (1)...(19): siRNA sense strand
gcacagcucuuuauuaagc

SEQ ID NO: 1835491 - RNA, 19 nt, Homo sapiens
  misc_RNA (1)...(19): siRNA sense strand
gcaaagaggagacauguau

SEQ ID NO: 1835492 - RNA, 19 nt, Homo sapiens
  misc_RNA (1)...(19): siRNA sense strand
gaaagacuaugucaaggau

SEQ ID NO: 1835493 - RNA, 19 nt, Homo sapiens
  misc_RNA (1)...(19): siRNA sense strand
ggagacauguaucaacgua

SEQ ID NO: 1835494 - RNA, 19 nt, Homo sapiens
  misc_RNA (1)...(19): siRNA sense strand
acacugagcugaaugaaau

SEQ ID NO: 1835495 - RNA, 19 nt, Homo sapiens
  misc_RNA (1)...(19): siRNA sense strand
guacaucguugcugaguau

SEQ ID NO: 1835496 - RNA, 19 nt, Homo sapiens
  misc_RNA (1)...(19): siRNA sense strand
gugaugaucuugacccuaa

SEQ ID NO: 1835497 - RNA, 19 nt, Homo sapiens
  misc_RNA (1)...(19): siRNA sense strand
gaaggagaaugaaaucugu

SEQ ID NO: 1835498 - RNA, 19 nt, Homo sapiens
  misc_RNA (1)...(19): siRNA sense strand
gaagaaaguucgcgauggu

SEQ ID NO: 1835499 - RNA, 19 nt, Homo sapiens
  misc_RNA (1)...(19): siRNA sense strand
gaucuugacccuaauacua

SEQ ID NO: 1835500 - RNA, 19 nt, Homo sapiens
  misc_RNA (1)...(19): siRNA sense strand
gagugaagcucauugacuu

SEQ ID NO: 1835501 - RNA, 19 nt, Homo sapiens
  misc_RNA (1)...(19): siRNA sense strand
gaaucagccuucccaguga

SEQ ID NO: 1835502 - RNA, 19 nt, Homo sapiens
  misc_RNA (1)...(19): siRNA sense strand
ccagagauuucaucaaugu

SEQ ID NO: 1835503 - RNA, 19 nt, Homo sapiens
  misc_RNA (1)...(19): siRNA sense strand
ggagaaaucacccugaaga

SEQ ID NO: 1835504 - RNA, 19 nt, Homo sapiens
  misc_RNA (1)...(19): siRNA sense strand
gagaagagcaagaaagguu

SEQ ID NO: 1835505 - RNA, 19 nt, Homo sapiens
  misc_RNA (1)...(19): siRNA sense strand
uagacuaccuuaugaauca

SEQ ID NO: 1835506 - RNA, 19 nt, Homo sapiens
  misc_RNA (1)...(19): siRNA sense strand
gaacauccuugacacugau

SEQ ID NO: 1835507 - RNA, 19 nt, Homo sapiens
  misc_RNA (1)...(19): siRNA sense strand
gaacaugugucugguguac

SEQ ID NO: 1835508 - RNA, 19 nt, Homo sapiens
  misc_RNA (1)...(19): siRNA sense strand
gaaaucacccugaagaucu

SEQ ID NO: 1835509 - RNA, 19 nt, Homo sapiens
  misc_RNA (1)...(19): siRNA sense strand
gucaagagcuacauuguca

SEQ ID NO: 1835510 - RNA, 19 nt, Homo sapiens
  misc_RNA (1)...(19): siRNA sense strand
gaaauguccuccucuuugc

SEQ ID NO: 1835511 - RNA, 19 nt, Homo sapiens
  misc_RNA (1)...(19): siRNA sense strand
gaugaaauguccuccucuu

SEQ ID NO: 1835512 - RNA, 19 nt, Homo sapiens
  misc_RNA (1)...(19): siRNA sense strand
caagacagugggauuuaua

SEQ ID NO: 1835513 - RNA, 19 nt, Homo sapiens
  misc_RNA (1)...(19): siRNA sense strand
ggccguuucucuauaguaa

SEQ ID NO: 1835514 - RNA, 19 nt, Homo sapiens
  misc_RNA (1)...(19): siRNA sense strand
gaaggaaaauuuugacuca

SEQ ID NO: 1835515 - RNA, 19 nt, Homo sapiens
  misc_RNA (1)...(19): siRNA sense strand
agacagcgcugaugagaag

SEQ ID NO: 1835516 - RNA, 19 nt, Homo sapiens
  misc_RNA (1)...(19): siRNA sense strand
ggaggaugcuguccagauc

SEQ ID NO: 1835517 - RNA, 19 nt, Homo sapiens
  misc_RNA (1)...(19): siRNA sense strand
gauaacagcucagccacau

SEQ ID NO: 1835518 - RNA, 19 nt, Homo sapiens
  misc_RNA (1)...(19): siRNA sense strand
ggauguuuguccugaauga

SEQ ID NO: 1835519 - RNA, 19 nt, Homo sapiens
  misc_RNA (1)...(19): siRNA sense strand
gaaaugcauucacaaagcu

SEQ ID NO: 1835520 - RNA, 19 nt, Homo sapiens
  misc_RNA (1)...(19): siRNA sense strand
gaguuaaugugccuuguuc

SEQ ID NO: 1835521 - RNA, 19 nt, Homo sapiens
  misc_RNA (1)...(19): siRNA sense strand
agauguggcugugaaauuu

SEQ ID NO: 1835522 - RNA, 19 nt, Homo sapiens
  misc_RNA (1)...(19): siRNA sense strand
gguuuggaguguucagaua

SEQ ID NO: 1835523 - RNA, 19 nt, Homo sapiens
  misc_RNA (1)...(19): siRNA sense strand
gaauacuucugugguguga

SEQ ID NO: 1835524 - RNA, 19 nt, Homo sapiens
  misc_RNA (1)...(19): siRNA sense strand
gcucuuagacuaccuuaug

SEQ ID NO: 1835525 - RNA, 19 nt, Homo sapiens
  misc_RNA (1)...(19): siRNA sense strand
guacaucacucuccaugac

SEQ ID NO: 1835526 - RNA, 19 nt, Homo sapiens
  misc_RNA (1)...(19): siRNA sense strand
gagaaugaaaucuguguga

SEQ ID NO: 1835527 - RNA, 19 nt, Homo sapiens
  misc_RNA (1)...(19): siRNA sense strand
gcacugaaggagaaugaaa

SEQ ID NO: 1835528 - RNA, 19 nt, Homo sapiens
  misc_RNA (1)...(19): siRNA sense strand
caacgacccuacacaggau

SEQ ID NO: 1835529 - RNA, 19 nt, Homo sapiens
  misc_RNA (1)...(19): siRNA sense strand
aggagaauguggacaauga

SEQ ID NO: 1835530 - RNA, 19 nt, Homo sapiens
  misc_RNA (1)...(19): siRNA sense strand
agaaagcaguggaguuaau

SEQ ID NO: 1835531 - RNA, 19 nt, Homo sapiens
  misc_RNA (1)...(19): siRNA sense strand
ucaaggaucugggcauugu

SEQ ID NO: 1835532 - RNA, 19 nt, Homo sapiens
  misc_RNA (1)...(19): siRNA sense strand
ugaaauguccuccucuuug

SEQ ID NO: 1835533 - RNA, 19 nt, Homo sapiens
  misc_RNA (1)...(19): siRNA sense strand
caaauuucauccaagaagu

SEQ ID NO: 1835534 - RNA, 19 nt, Homo sapiens
  misc_RNA (1)...(19): siRNA sense strand
gcaagcaccagaaugaugu

SEQ ID NO: 1835535 - RNA, 19 nt, Homo sapiens
  misc_RNA (1)...(19): siRNA sense strand
gcaaugcugccagagauuu

SEQ ID NO: 1835536 - RNA, 19 nt, Homo sapiens
  misc_RNA (1)...(19): siRNA sense strand
acacuuaccucgucaucga

SEQ ID NO: 1835537 - RNA, 19 nt, Homo sapiens
  misc_RNA (1)...(19): siRNA sense strand
caauggcaguccaggguuu

SEQ ID NO: 1835538 - RNA, 19 nt, Homo sapiens
  misc_RNA (1)...(19): siRNA sense strand
ugccagagauuucaucaau

SEQ ID NO: 1835539 - RNA, 19 nt, Homo sapiens
  misc_RNA (1)...(19): siRNA sense strand
agacauguaucaacguaug

SEQ ID NO: 1835540 - RNA, 19 nt, Homo sapiens
  misc_RNA (1)...(19): siRNA sense strand
ccagugagcccucggaguu

SEQ ID NO: 1835541 - RNA, 19 nt, Homo sapiens
  misc_RNA (1)...(19): siRNA sense strand
cauacacggucuccucuug

SEQ ID NO: 1835542 - RNA, 19 nt, Homo sapiens
  misc_RNA (1)...(19): siRNA sense strand
gaggaagguucucagaucu

SEQ ID NO: 1835543 - RNA, 19 nt, Homo sapiens
  misc_RNA (1)...(19): siRNA sense strand
caccaacacucuuaagaag

SEQ ID NO: 1835544 - RNA, 19 nt, Homo sapiens
  misc_RNA (1)...(19): siRNA sense strand
caagcugagucuagaagga

SEQ ID NO: 1835545 - RNA, 19 nt, Homo sapiens
  misc_RNA (1)...(19): siRNA sense strand
agaggaagguucucagauc

SEQ ID NO: 1835546 - RNA, 19 nt, Homo sapiens
  misc_RNA (1)...(19): siRNA sense strand
ccaagacagugggauuuau

SEQ ID NO: 1835547 - RNA, 19 nt, Homo sapiens
  misc_RNA (1)...(19): siRNA sense strand
aaugaucccugcaaguuug

SEQ ID NO: 1835548 - RNA, 19 nt, Homo sapiens
  misc_RNA (1)...(19): siRNA sense strand
gaaagcaguggaguuaaug

SEQ ID NO: 1835549 - RNA, 19 nt, Homo sapiens
  misc_RNA (1)...(19): siRNA sense strand
ccaccaacacucuuaagaa

SEQ ID NO: 1835550 - RNA, 19 nt, Homo sapiens
  misc_RNA (1)...(19): siRNA sense strand
cauaauggcagcuacucua

SEQ ID NO: 1835551 - RNA, 19 nt, Homo sapiens
  misc_RNA (1)...(19): siRNA sense strand
ggagacagcgcugaugaga

SEQ ID NO: 1835552 - RNA, 19 nt, Homo sapiens
  misc_RNA (1)...(19): siRNA sense strand
aauggcagcuacucuaaga

SEQ ID NO: 1835553 - RNA, 19 nt, Homo sapiens
  misc_RNA (1)...(19): siRNA sense strand
ucuuggaacugauggauga

SEQ ID NO: 1835554 - RNA, 19 nt, Homo sapiens
  misc_RNA (1)...(19): siRNA sense strand
uggccgugaucaaagauua

SEQ ID NO: 1835555 - RNA, 19 nt, Homo sapiens
  misc_RNA (1)...(19): siRNA sense strand
gaguaucaacggaaagaaa

SEQ ID NO: 1835556 - RNA, 19 nt, Homo sapiens
  misc_RNA (1)...(19): siRNA sense strand
ggaggagaauguggacaau

SEQ ID NO: 1835557 - RNA, 19 nt, Homo sapiens
  misc_RNA (1)...(19): siRNA sense strand
cccaaacgcugcaaugaca

SEQ ID NO: 1835558 - RNA, 19 nt, Homo sapiens
  misc_RNA (1)...(19): siRNA sense strand
gaugaucuugacccuaaua

SEQ ID NO: 1835559 - RNA, 19 nt, Homo sapiens
  misc_RNA (1)...(19): siRNA sense strand
ccgccuagcaugcuucaua

SEQ ID NO: 1835560 - RNA, 19 nt, Homo sapiens
  misc_RNA (1)...(19): siRNA sense strand
gagcaaagaggagacaugu

SEQ ID NO: 1835561 - RNA, 19 nt, Homo sapiens
  misc_RNA (1)...(19): siRNA sense strand
gaccagaacauccuugaca

SEQ ID NO: 1835562 - RNA, 19 nt, Homo sapiens
  misc_RNA (1)...(19): siRNA sense strand
cugcagaccuugucaaugc

SEQ ID NO: 1835563 - RNA, 19 nt, Homo sapiens
  misc_RNA (1)...(19): siRNA sense strand
agaacauccuugacacuga

SEQ ID NO: 1835564 - RNA, 19 nt, Homo sapiens
  misc_RNA (1)...(19): siRNA sense strand
aaagauuacuaugcacuga

SEQ ID NO: 1835565 - RNA, 19 nt, Homo sapiens
  misc_RNA (1)...(19): siRNA sense strand
gcaguccaggguuugaaua

SEQ ID NO: 1835566 - RNA, 19 nt, Homo sapiens
  misc_RNA (1)...(19): siRNA sense strand
ugagaggguuguucugcaa

SEQ ID NO: 1835567 - RNA, 19 nt, Homo sapiens
  misc_RNA (1)...(19): siRNA sense strand
caaugaucccugcaaguuu

SEQ ID NO: 1835568 - RNA, 19 nt, Homo sapiens
  misc_RNA (1)...(19): siRNA sense strand
cuucgaccuuggacacuua

SEQ ID NO: 1835569 - RNA, 19 nt, Homo sapiens
  misc_RNA (1)...(19): siRNA sense strand
ccauggccgugaucaaaga

SEQ ID NO: 1835570 - RNA, 19 nt, Homo sapiens
  misc_RNA (1)...(19): siRNA sense strand
caaagggcuccagcuauaa

SEQ ID NO: 1835571 - RNA, 19 nt, Homo sapiens
  misc_RNA (1)...(19): siRNA sense strand
agacagagaaagacuaugu

SEQ ID NO: 1835572 - RNA, 19 nt, Homo sapiens
  misc_RNA (1)...(19): siRNA sense strand
gguugcacauuuggacaua

SEQ ID NO: 1835573 - RNA, 19 nt, Homo sapiens
  misc_RNA (1)...(19): siRNA sense strand
cauccuacauccugaucuu

SEQ ID NO: 1835574 - RNA, 19 nt, Homo sapiens
  misc_RNA (1)...(19): siRNA sense strand
guacagagaggaagguucu

SEQ ID NO: 1835575 - RNA, 19 nt, Homo sapiens
  misc_RNA (1)...(19): siRNA sense strand
ggucuccucuugugauucu

SEQ ID NO: 1835576 - RNA, 19 nt, Homo sapiens
  misc_RNA (1)...(19): siRNA sense strand
ucaaucaagucuuagaaac

SEQ ID NO: 1835577 - RNA, 19 nt, Homo sapiens
  misc_RNA (1)...(19): siRNA sense strand
aaacaggagauaaaucaga

SEQ ID NO: 1835578 - RNA, 19 nt, Homo sapiens
  misc_RNA (1)...(19): siRNA sense strand
agaaaugcauucacaaagc

SEQ ID NO: 1835579 - RNA, 19 nt, Homo sapiens
  misc_RNA (1)...(19): siRNA sense strand
gcuaagugcugcuguugcu

SEQ ID NO: 1835580 - RNA, 19 nt, Homo sapiens
  misc_RNA (1)...(19): siRNA sense strand
gcaacaaacugaauccaaa

SEQ ID NO: 1835581 - RNA, 19 nt, Homo sapiens
  misc_RNA (1)...(19): siRNA sense strand
caacaacugcuccauaaua

SEQ ID NO: 1835582 - RNA, 19 nt, Homo sapiens
  misc_RNA (1)...(19): siRNA sense strand
gaccgaaacccauuauuua

SEQ ID NO: 1835583 - RNA, 19 nt, Homo sapiens
  misc_RNA (1)...(19): siRNA sense strand
aagaugagcuccuaguaua

SEQ ID NO: 1835584 - RNA, 19 nt, Homo sapiens
  misc_RNA (1)...(19): siRNA sense strand
caacauggauccaaagaca

SEQ ID NO: 1835585 - RNA, 19 nt, Homo sapiens
  misc_RNA (1)...(19): siRNA sense strand
gagaggaacauucaaguaa

SEQ ID NO: 1835586 - RNA, 19 nt, Homo sapiens
  misc_RNA (1)...(19): siRNA sense strand
gggauuggauauuguaauu

SEQ ID NO: 1835587 - RNA, 19 nt, Homo sapiens
  misc_RNA (1)...(19): siRNA sense strand
gaaagggaauauccaguca

SEQ ID NO: 1835588 - RNA, 19 nt, Homo sapiens
  misc_RNA (1)...(19): siRNA sense strand
gggaauagcccaucuggaa

SEQ ID NO: 1835589 - RNA, 19 nt, Homo sapiens
  misc_RNA (1)...(19): siRNA sense strand
gucaacaacugcuccauaa

SEQ ID NO: 1835590 - RNA, 19 nt, Homo sapiens
  misc_RNA (1)...(19): siRNA sense strand
gcagagaccaugauaaauc

SEQ ID NO: 1835591 - RNA, 19 nt, Homo sapiens
  misc_RNA (1)...(19): siRNA sense strand
gcacagggcaagucucaaa

SEQ ID NO: 1835592 - RNA, 19 nt, Homo sapiens
  misc_RNA (1)...(19): siRNA sense strand
gcaggaagaugacagugau

SEQ ID NO: 1835593 - RNA, 19 nt, Homo sapiens
  misc_RNA (1)...(19): siRNA sense strand
uagccaaacugaagagaaa

SEQ ID NO: 1835594 - RNA, 19 nt, Homo sapiens
  misc_RNA (1)...(19): siRNA sense strand
gaaaggcuguggguucaug

SEQ ID NO: 1835595 - RNA, 19 nt, Homo sapiens
  misc_RNA (1)...(19): siRNA sense strand
gaaagacgacuccacuaug

SEQ ID NO: 1835596 - RNA, 19 nt, Homo sapiens
  misc_RNA (1)...(19): siRNA sense strand
gaaagacgacuccacuaug

SEQ ID NO: 1835597 - RNA, 19 nt, Homo sapiens
  misc_RNA (1)...(19): siRNA sense strand
gaugagcuccuaguauaua

SEQ ID NO: 1835598 - RNA, 19 nt, Homo sapiens
  misc_RNA (1)...(19): siRNA sense strand
gaagcaagcagcugugaug

SEQ ID NO: 1835599 - RNA, 19 nt, Homo sapiens
  misc_RNA (1)...(19): siRNA sense strand
gaaggcagagaccaugaua

SEQ ID NO: 1835600 - RNA, 19 nt, Homo sapiens
  misc_RNA (1)...(19): siRNA sense strand
gcaguuauguucuccaaac

SEQ ID NO: 1835601 - RNA, 19 nt, Homo sapiens
  misc_RNA (1)...(19): siRNA sense strand
cgaccgaaacccauuauuu

SEQ ID NO: 1835602 - RNA, 19 nt, Homo sapiens
  misc_RNA (1)...(19): siRNA sense strand
aacaacugcuccauaauaa

SEQ ID NO: 1835603 - RNA, 19 nt, Homo sapiens
  misc_RNA (1)...(19): siRNA sense strand
ucccaaagcaguauuuaua

SEQ ID NO: 1835604 - RNA, 19 nt, Homo sapiens
  misc_RNA (1)...(19): siRNA sense strand
guuauguucuccaaacuga

SEQ ID NO: 1835605 - RNA, 19 nt, Homo sapiens
  misc_RNA (1)...(19): siRNA sense strand
cacaacaucuuaacaacga

SEQ ID NO: 1835606 - RNA, 19 nt, Homo sapiens
  misc_RNA (1)...(19): siRNA sense strand
ucauaccaaucuucaagua

SEQ ID NO: 1835607 - RNA, 19 nt, Homo sapiens
  misc_RNA (1)...(19): siRNA sense strand
ucauaccaaucuucaagua

SEQ ID NO: 1835608 - RNA, 19 nt, Homo sapiens
  misc_RNA (1)...(19): siRNA sense strand
ggaauagcccaucuggaaa

SEQ ID NO: 1835609 - RNA, 19 nt, Homo sapiens
  misc_RNA (1)...(19): siRNA sense strand
gaggaacauucaaguaaag

SEQ ID NO: 1835610 - RNA, 19 nt, Homo sapiens
  misc_RNA (1)...(19): siRNA sense strand
agaggaacauucaaguaaa

SEQ ID NO: 1835611 - RNA, 19 nt, Homo sapiens
  misc_RNA (1)...(19): siRNA sense strand
aaacaaggcggaucccaaa

SEQ ID NO: 1835612 - RNA, 19 nt, Homo sapiens
  misc_RNA (1)...(19): siRNA sense strand
caacaucaucuuuguacuu

SEQ ID NO: 1835613 - RNA, 19 nt, Homo sapiens
  misc_RNA (1)...(19): siRNA sense strand
cgaaacccauuauuuacau

SEQ ID NO: 1835614 - RNA, 19 nt, Homo sapiens
  misc_RNA (1)...(19): siRNA sense strand
caagaugagcuccuaguau

SEQ ID NO: 1835615 - RNA, 19 nt, Homo sapiens
  misc_RNA (1)...(19): siRNA sense strand
caccaaauccuaagcaaga

SEQ ID NO: 1835616 - RNA, 19 nt, Homo sapiens
  misc_RNA (1)...(19): siRNA sense strand
caacgaccgaaacccauua

SEQ ID NO: 1835617 - RNA, 19 nt, Homo sapiens
  misc_RNA (1)...(19): siRNA sense strand
ucuccaaacugaagagcua

SEQ ID NO: 1835618 - RNA, 19 nt, Homo sapiens
  misc_RNA (1)...(19): siRNA sense strand
aaagacgacuccacuaugg

SEQ ID NO: 1835619 - RNA, 19 nt, Homo sapiens
  misc_RNA (1)...(19): siRNA sense strand
aaagauguaucccaaagca

SEQ ID NO: 1835620 - RNA, 19 nt, Homo sapiens
  misc_RNA (1)...(19): siRNA sense strand
aaagacgacuccacuaugg

SEQ ID NO: 1835621 - RNA, 19 nt, Homo sapiens
  misc_RNA (1)...(19): siRNA sense strand
gaagugagagaggaacauu

SEQ ID NO: 1835622 - RNA, 19 nt, Homo sapiens
  misc_RNA (1)...(19): siRNA sense strand
caagacaaacuccaacaug

SEQ ID NO: 1835623 - RNA, 19 nt, Homo sapiens
  misc_RNA (1)...(19): siRNA sense strand
ggaacauucaaguaaagua

SEQ ID NO: 1835624 - RNA, 19 nt, Homo sapiens
  misc_RNA (1)...(19): siRNA sense strand
agaaagauguaucccaaag

SEQ ID NO: 1835625 - RNA, 19 nt, Homo sapiens
  misc_RNA (1)...(19): siRNA sense strand
gcuguggguucauggacua

SEQ ID NO: 1835626 - RNA, 19 nt, Homo sapiens
  misc_RNA (1)...(19): siRNA sense strand
ccgauuaccaagugaauuu

SEQ ID NO: 1835627 - RNA, 19 nt, Homo sapiens
  misc_RNA (1)...(19): siRNA sense strand
gaacauucaaguaaaguac

SEQ ID NO: 1835628 - RNA, 19 nt, Homo sapiens
  misc_RNA (1)...(19): siRNA sense strand
ccaaagcaguuauguucuc

SEQ ID NO: 1835629 - RNA, 19 nt, Homo sapiens
  misc_RNA (1)...(19): siRNA sense strand
ggacuaaguaaagaacaaa

SEQ ID NO: 1835630 - RNA, 19 nt, Homo sapiens
  misc_RNA (1)...(19): siRNA sense strand
aaauagagaacaagaccua

SEQ ID NO: 1835631 - RNA, 19 nt, Homo sapiens
  misc_RNA (1)...(19): siRNA sense strand
gcaccaagacaaacuccaa

SEQ ID NO: 1835632 - RNA, 19 nt, Homo sapiens
  misc_RNA (1)...(19): siRNA sense strand
agaacaaacuuccgucucu

SEQ ID NO: 1835633 - RNA, 19 nt, Homo sapiens
  misc_RNA (1)...(19): siRNA sense strand
caaucaagaucaacagcau

SEQ ID NO: 1835634 - RNA, 19 nt, Homo sapiens
  misc_RNA (1)...(19): siRNA sense strand
uuauagagcaggaagauga

SEQ ID NO: 1835635 - RNA, 19 nt, Homo sapiens
  misc_RNA (1)...(19): siRNA sense strand
aacaagaccuacucaguca

SEQ ID NO: 1835636 - RNA, 19 nt, Homo sapiens
  misc_RNA (1)...(19): siRNA sense strand
ccaagaugagcuccuagua

SEQ ID NO: 1835637 - RNA, 19 nt, Homo sapiens
  misc_RNA (1)...(19): siRNA sense strand
aggcagagaccaugauaaa

SEQ ID NO: 1835638 - RNA, 19 nt, Homo sapiens
  misc_RNA (1)...(19): siRNA sense strand
ucuggccaaucuacaaaua

SEQ ID NO: 1835639 - RNA, 19 nt, Homo sapiens
  misc_RNA (1)...(19): siRNA sense strand
guauuuauagccaaacuga

SEQ ID NO: 1835640 - RNA, 19 nt, Homo sapiens
  misc_RNA (1)...(19): siRNA sense strand
guauuuauagccaaacuga

SEQ ID NO: 1835641 - RNA, 19 nt, Homo sapiens
  misc_RNA (1)...(19): siRNA sense strand
guucauggacuaaguaaag

SEQ ID NO: 1835642 - RNA, 19 nt, Homo sapiens
  misc_RNA (1)...(19): siRNA sense strand
gaauagcccaucuggaaag

SEQ ID NO: 1835643 - RNA, 19 nt, Homo sapiens
  misc_RNA (1)...(19): siRNA sense strand
aaaggccgauuaccaagug

SEQ ID NO: 1835644 - RNA, 19 nt, Homo sapiens
  misc_RNA (1)...(19): siRNA sense strand
caacugcuccauaauaaac

SEQ ID NO: 1835645 - RNA, 19 nt, Homo sapiens
  misc_RNA (1)...(19): siRNA sense strand
caaggcggaucccaaagca

SEQ ID NO: 1835646 - RNA, 19 nt, Homo sapiens
  misc_RNA (1)...(19): siRNA sense strand
gauuugaaugcccuacaua

SEQ ID NO: 1835647 - RNA, 19 nt, Homo sapiens
  misc_RNA (1)...(19): siRNA sense strand
gcaagcaacaaacugaauc

SEQ ID NO: 1835648 - RNA, 19 nt, Homo sapiens
  misc_RNA (1)...(19): siRNA sense strand
aaaugugguugaagugaga

SEQ ID NO: 1835649 - RNA, 19 nt, Homo sapiens
  misc_RNA (1)...(19): siRNA sense strand
aagaaaggcuguggguuca

SEQ ID NO: 1835650 - RNA, 19 nt, Homo sapiens
  misc_RNA (1)...(19): siRNA sense strand
agaaagacgacuccacuau

SEQ ID NO: 1835651 - RNA, 19 nt, Homo sapiens
  misc_RNA (1)...(19): siRNA sense strand
agaaagacgacuccacuau

SEQ ID NO: 1835652 - RNA, 19 nt, Homo sapiens
  misc_RNA (1)...(19): siRNA sense strand
agaaucaacaccagacaaa

SEQ ID NO: 1835653 - RNA, 19 nt, Homo sapiens
  misc_RNA (1)...(19): siRNA sense strand
gcucaucgugggacacaaa

SEQ ID NO: 1835654 - RNA, 19 nt, Homo sapiens
  misc_RNA (1)...(19): siRNA sense strand
uaaagggcauuaccaaaau

SEQ ID NO: 1835655 - RNA, 19 nt, Homo sapiens
  misc_RNA (1)...(19): siRNA sense strand
gaagcccaacaucaucuuu

SEQ ID NO: 1835656 - RNA, 19 nt, Homo sapiens
  misc_RNA (1)...(19): siRNA sense strand
gcuccauaauaaacaagaa

SEQ ID NO: 1835657 - RNA, 19 nt, Homo sapiens
  misc_RNA (1)...(19): siRNA sense strand
gaaagcacagggcaagucu

SEQ ID NO: 1835658 - RNA, 19 nt, Homo sapiens
  misc_RNA (1)...(19): siRNA sense strand
gauguaucccaaagcagua

SEQ ID NO: 1835659 - RNA, 19 nt, Homo sapiens
  misc_RNA (1)...(19): siRNA sense strand
auaccaaucuucaaguaca

SEQ ID NO: 1835660 - RNA, 19 nt, Homo sapiens
  misc_RNA (1)...(19): siRNA sense strand
agagaggaacauucaagua

SEQ ID NO: 1835661 - RNA, 19 nt, Homo sapiens
  misc_RNA (1)...(19): siRNA sense strand
aagggaauauccagucaau

SEQ ID NO: 1835662 - RNA, 19 nt, Homo sapiens
  misc_RNA (1)...(19): siRNA sense strand
ugaaugcccuacauaagac

SEQ ID NO: 1835663 - RNA, 19 nt, Homo sapiens
  misc_RNA (1)...(19): siRNA sense strand
cuacaaauagagaacaaga

SEQ ID NO: 1835664 - RNA, 19 nt, Homo sapiens
  misc_RNA (1)...(19): siRNA sense strand
ccaaagcaguauuuauagc

SEQ ID NO: 1835665 - RNA, 19 nt, Homo sapiens
  misc_RNA (1)...(19): siRNA sense strand
aaauaaagggcauuaccaa

SEQ ID NO: 1835666 - RNA, 19 nt, Homo sapiens
  misc_RNA (1)...(19): siRNA sense strand
aaacaacaacgugagacua

SEQ ID NO: 1835667 - RNA, 19 nt, Homo sapiens
  misc_RNA (1)...(19): siRNA sense strand
aacaacaacgugagacuaa

SEQ ID NO: 1835668 - RNA, 19 nt, Homo sapiens
  misc_RNA (1)...(19): siRNA sense strand
caagaccuacucagucaug

SEQ ID NO: 1835669 - RNA, 19 nt, Homo sapiens
  misc_RNA (1)...(19): siRNA sense strand
gagagaggaacauucaagu

SEQ ID NO: 1835670 - RNA, 19 nt, Homo sapiens
  misc_RNA (1)...(19): siRNA sense strand
acaacaacgugagacuaaa

SEQ ID NO: 1835671 - RNA, 19 nt, Homo sapiens
  misc_RNA (1)...(19): siRNA sense strand
ucccaaagcaguuauguuc

SEQ ID NO: 1835672 - RNA, 19 nt, Homo sapiens
  misc_RNA (1)...(19): siRNA sense strand
aaaauggugugcagaaaga

SEQ ID NO: 1835673 - RNA, 19 nt, Homo sapiens
  misc_RNA (1)...(19): siRNA sense strand
aaaauggugugcagaaaga

SEQ ID NO: 1835674 - RNA, 19 nt, Homo sapiens
  misc_RNA (1)...(19): siRNA sense strand
gcggaucccaaagcaguua

SEQ ID NO: 1835675 - RNA, 19 nt, Homo sapiens
  misc_RNA (1)...(19): siRNA sense strand
uugaaugcccuacauaaga

SEQ ID NO: 1835676 - RNA, 19 nt, Homo sapiens
  misc_RNA (1)...(19): siRNA sense strand
gagaagcaagcagcuguga

SEQ ID NO: 1835677 - RNA, 19 nt, Homo sapiens
  misc_RNA (1)...(19): siRNA sense strand
caacaaacugaauccaaag

SEQ ID NO: 1835678 - RNA, 19 nt, Homo sapiens
  misc_RNA (1)...(19): siRNA sense strand
caaaagggccagcacuauu

SEQ ID NO: 1835679 - RNA, 19 nt, Homo sapiens
  misc_RNA (1)...(19): siRNA sense strand
caaaauccuucucaagauc

SEQ ID NO: 1835680 - RNA, 19 nt, Homo sapiens
  misc_RNA (1)...(19): siRNA sense strand
gcaacaaacugaauccaaa

SEQ ID NO: 1835681 - RNA, 19 nt, Homo sapiens
  misc_RNA (1)...(19): siRNA sense strand
caacaacugcuccauaaua

SEQ ID NO: 1835682 - RNA, 19 nt, Homo sapiens
  misc_RNA (1)...(19): siRNA sense strand
gaccgaaacccauuauuua

SEQ ID NO: 1835683 - RNA, 19 nt, Homo sapiens
  misc_RNA (1)...(19): siRNA sense strand
aagaugagcuccuaguaua

SEQ ID NO: 1835684 - RNA, 19 nt, Homo sapiens
  misc_RNA (1)...(19): siRNA sense strand
caacauggauccaaagaca

SEQ ID NO: 1835685 - RNA, 19 nt, Homo sapiens
  misc_RNA (1)...(19): siRNA sense strand
gagaggaacauucaaguaa

SEQ ID NO: 1835686 - RNA, 19 nt, Homo sapiens
  misc_RNA (1)...(19): siRNA sense strand
gggauuggauauuguaauu

SEQ ID NO: 1835687 - RNA, 19 nt, Homo sapiens
  misc_RNA (1)...(19): siRNA sense strand
gaaagggaauauccaguca

SEQ ID NO: 1835688 - RNA, 19 nt, Homo sapiens
  misc_RNA (1)...(19): siRNA sense strand
gggaauagcccaucuggaa

SEQ ID NO: 1835689 - RNA, 19 nt, Homo sapiens
  misc_RNA (1)...(19): siRNA sense strand
gucaacaacugcuccauaa

SEQ ID NO: 1835690 - RNA, 19 nt, Homo sapiens
  misc_RNA (1)...(19): siRNA sense strand
gcagagaccaugauaaauc

SEQ ID NO: 1835691 - RNA, 19 nt, Homo sapiens
  misc_RNA (1)...(19): siRNA sense strand
gcacagggcaagucucaaa

SEQ ID NO: 1835692 - RNA, 19 nt, Homo sapiens
  misc_RNA (1)...(19): siRNA sense strand
gcaggaagaugacagugau

SEQ ID NO: 1835693 - RNA, 19 nt, Homo sapiens
  misc_RNA (1)...(19): siRNA sense strand
uagccaaacugaagagaaa

SEQ ID NO: 1835694 - RNA, 19 nt, Homo sapiens
  misc_RNA (1)...(19): siRNA sense strand
gaaaggcuguggguucaug

SEQ ID NO: 1835695 - RNA, 19 nt, Homo sapiens
  misc_RNA (1)...(19): siRNA sense strand
gaaagacgacuccacuaug

SEQ ID NO: 1835696 - RNA, 19 nt, Homo sapiens
  misc_RNA (1)...(19): siRNA sense strand
gaugagcuccuaguauaua

SEQ ID NO: 1835697 - RNA, 19 nt, Homo sapiens
  misc_RNA (1)...(19): siRNA sense strand
gaagcaagcagcugugaug

SEQ ID NO: 1835698 - RNA, 19 nt, Homo sapiens
  misc_RNA (1)...(19): siRNA sense strand
gaaggcagagaccaugaua

SEQ ID NO: 1835699 - RNA, 19 nt, Homo sapiens
  misc_RNA (1)...(19): siRNA sense strand
gcaguuauguucuccaaac

SEQ ID NO: 1835700 - RNA, 19 nt, Homo sapiens
  misc_RNA (1)...(19): siRNA sense strand
cgaccgaaacccauuauuu

SEQ ID NO: 1835701 - RNA, 19 nt, Homo sapiens
  misc_RNA (1)...(19): siRNA sense strand
aacaacugcuccauaauaa

SEQ ID NO: 1835702 - RNA, 19 nt, Homo sapiens
  misc_RNA (1)...(19): siRNA sense strand
ucccaaagcaguauuuaua

SEQ ID NO: 1835703 - RNA, 19 nt, Homo sapiens
  misc_RNA (1)...(19): siRNA sense strand
guuauguucuccaaacuga

SEQ ID NO: 1835704 - RNA, 19 nt, Homo sapiens
  misc_RNA (1)...(19): siRNA sense strand
cacaacaucuuaacaacga

SEQ ID NO: 1835705 - RNA, 19 nt, Homo sapiens
  misc_RNA (1)...(19): siRNA sense strand
ucauaccaaucuucaagua

SEQ ID NO: 1835706 - RNA, 19 nt, Homo sapiens
  misc_RNA (1)...(19): siRNA sense strand
ggaauagcccaucuggaaa

SEQ ID NO: 1835707 - RNA, 19 nt, Homo sapiens
  misc_RNA (1)...(19): siRNA sense strand
gaggaacauucaaguaaag

SEQ ID NO: 1835708 - RNA, 19 nt, Homo sapiens
  misc_RNA (1)...(19): siRNA sense strand
agaggaacauucaaguaaa

SEQ ID NO: 1835709 - RNA, 19 nt, Homo sapiens
  misc_RNA (1)...(19): siRNA sense strand
aaacaaggcggaucccaaa

SEQ ID NO: 1835710 - RNA, 19 nt, Homo sapiens
  misc_RNA (1)...(19): siRNA sense strand
caacaucaucuuuguacuu

SEQ ID NO: 1835711 - RNA, 19 nt, Homo sapiens
  misc_RNA (1)...(19): siRNA sense strand
cgaaacccauuauuuacau

SEQ ID NO: 1835712 - RNA, 19 nt, Homo sapiens
  misc_RNA (1)...(19): siRNA sense strand
caagaugagcuccuaguau

SEQ ID NO: 1835713 - RNA, 19 nt, Homo sapiens
  misc_RNA (1)...(19): siRNA sense strand
caccaaauccuaagcaaga

SEQ ID NO: 1835714 - RNA, 19 nt, Homo sapiens
  misc_RNA (1)...(19): siRNA sense strand
caacgaccgaaacccauua

SEQ ID NO: 1835715 - RNA, 19 nt, Homo sapiens
  misc_RNA (1)...(19): siRNA sense strand
ucuccaaacugaagagcua

SEQ ID NO: 1835716 - RNA, 19 nt, Homo sapiens
  misc_RNA (1)...(19): siRNA sense strand
aaagauguaucccaaagca

SEQ ID NO: 1835717 - RNA, 19 nt, Homo sapiens
  misc_RNA (1)...(19): siRNA sense strand
aaagacgacuccacuaugg

SEQ ID NO: 1835718 - RNA, 19 nt, Homo sapiens
  misc_RNA (1)...(19): siRNA sense strand
gaagugagagaggaacauu

SEQ ID NO: 1835719 - RNA, 19 nt, Homo sapiens
  misc_RNA (1)...(19): siRNA sense strand
caagacaaacuccaacaug

SEQ ID NO: 1835720 - RNA, 19 nt, Homo sapiens
  misc_RNA (1)...(19): siRNA sense strand
ggaacauucaaguaaagua

SEQ ID NO: 1835721 - RNA, 19 nt, Homo sapiens
  misc_RNA (1)...(19): siRNA sense strand
agaaagauguaucccaaag

SEQ ID NO: 1835722 - RNA, 19 nt, Homo sapiens
  misc_RNA (1)...(19): siRNA sense strand
gcuguggguucauggacua

SEQ ID NO: 1835723 - RNA, 19 nt, Homo sapiens
  misc_RNA (1)...(19): siRNA sense strand
ccgauuaccaagugaauuu

SEQ ID NO: 1835724 - RNA, 19 nt, Homo sapiens
  misc_RNA (1)...(19): siRNA sense strand
gaacauucaaguaaaguac

SEQ ID NO: 1835725 - RNA, 19 nt, Homo sapiens
  misc_RNA (1)...(19): siRNA sense strand
ccaaagcaguuauguucuc

SEQ ID NO: 1835726 - RNA, 19 nt, Homo sapiens
  misc_RNA (1)...(19): siRNA sense strand
ggacuaaguaaagaacaaa

SEQ ID NO: 1835727 - RNA, 19 nt, Homo sapiens
  misc_RNA (1)...(19): siRNA sense strand
aaauagagaacaagaccua

SEQ ID NO: 1835728 - RNA, 19 nt, Homo sapiens
  misc_RNA (1)...(19): siRNA sense strand
gcaccaagacaaacuccaa

SEQ ID NO: 1835729 - RNA, 19 nt, Homo sapiens
  misc_RNA (1)...(19): siRNA sense strand
agaacaaacuuccgucucu

SEQ ID NO: 1835730 - RNA, 19 nt, Homo sapiens
  misc_RNA (1)...(19): siRNA sense strand
caaucaagaucaacagcau

SEQ ID NO: 1835731 - RNA, 19 nt, Homo sapiens
  misc_RNA (1)...(19): siRNA sense strand
uuauagagcaggaagauga

SEQ ID NO: 1835732 - RNA, 19 nt, Homo sapiens
  misc_RNA (1)...(19): siRNA sense strand
aacaagaccuacucaguca

SEQ ID NO: 1835733 - RNA, 19 nt, Homo sapiens
  misc_RNA (1)...(19): siRNA sense strand
ccaagaugagcuccuagua

SEQ ID NO: 1835734 - RNA, 19 nt, Homo sapiens
  misc_RNA (1)...(19): siRNA sense strand
aggcagagaccaugauaaa

SEQ ID NO: 1835735 - RNA, 19 nt, Homo sapiens
  misc_RNA (1)...(19): siRNA sense strand
aaaggccgauuaccaagug

SEQ ID NO: 1835736 - RNA, 19 nt, Homo sapiens
  misc_RNA (1)...(19): siRNA sense strand
ucuggccaaucuacaaaua

SEQ ID NO: 1835737 - RNA, 19 nt, Homo sapiens
  misc_RNA (1)...(19): siRNA sense strand
guauuuauagccaaacuga

SEQ ID NO: 1835738 - RNA, 19 nt, Homo sapiens
  misc_RNA (1)...(19): siRNA sense strand
guucauggacuaaguaaag

SEQ ID NO: 1835739 - RNA, 19 nt, Homo sapiens
  misc_RNA (1)...(19): siRNA sense strand
gaauagcccaucuggaaag

SEQ ID NO: 1835740 - RNA, 19 nt, Homo sapiens
  misc_RNA (1)...(19): siRNA sense strand
caacugcuccauaauaaac

SEQ ID NO: 1835741 - RNA, 19 nt, Homo sapiens
  misc_RNA (1)...(19): siRNA sense strand
caaggcggaucccaaagca

SEQ ID NO: 1835742 - RNA, 19 nt, Homo sapiens
  misc_RNA (1)...(19): siRNA sense strand
gauuugaaugcccuacaua

SEQ ID NO: 1835743 - RNA, 19 nt, Homo sapiens
  misc_RNA (1)...(19): siRNA sense strand
aaaugugguugaagugaga

SEQ ID NO: 1835744 - RNA, 19 nt, Homo sapiens
  misc_RNA (1)...(19): siRNA sense strand
gcaagcaacaaacugaauc

SEQ ID NO: 1835745 - RNA, 19 nt, Homo sapiens
  misc_RNA (1)...(19): siRNA sense strand
aagaaaggcuguggguuca

SEQ ID NO: 1835746 - RNA, 19 nt, Homo sapiens
  misc_RNA (1)...(19): siRNA sense strand
agaaagacgacuccacuau

SEQ ID NO: 1835747 - RNA, 19 nt, Homo sapiens
  misc_RNA (1)...(19): siRNA sense strand
agaaucaacaccagacaaa

SEQ ID NO: 1835748 - RNA, 19 nt, Homo sapiens
  misc_RNA (1)...(19): siRNA sense strand
gcucaucgugggacacaaa

SEQ ID NO: 1835749 - RNA, 19 nt, Homo sapiens
  misc_RNA (1)...(19): siRNA sense strand
gaagcccaacaucaucuuu

SEQ ID NO: 1835750 - RNA, 19 nt, Homo sapiens
  misc_RNA (1)...(19): siRNA sense strand
uaaagggcauuaccaaaau

SEQ ID NO: 1835751 - RNA, 19 nt, Homo sapiens
  misc_RNA (1)...(19): siRNA sense strand
gcuccauaauaaacaagaa

SEQ ID NO: 1835752 - RNA, 19 nt, Homo sapiens
  misc_RNA (1)...(19): siRNA sense strand
gaaagcacagggcaagucu

SEQ ID NO: 1835753 - RNA, 19 nt, Homo sapiens
  misc_RNA (1)...(19): siRNA sense strand
gauguaucccaaagcagua

SEQ ID NO: 1835754 - RNA, 19 nt, Homo sapiens
  misc_RNA (1)...(19): siRNA sense strand
auaccaaucuucaaguaca

SEQ ID NO: 1835755 - RNA, 19 nt, Homo sapiens
  misc_RNA (1)...(19): siRNA sense strand
agagaggaacauucaagua

SEQ ID NO: 1835756 - RNA, 19 nt, Homo sapiens
  misc_RNA (1)...(19): siRNA sense strand
aagggaauauccagucaau

SEQ ID NO: 1835757 - RNA, 19 nt, Homo sapiens
  misc_RNA (1)...(19): siRNA sense strand
ugaaugcccuacauaagac

SEQ ID NO: 1835758 - RNA, 19 nt, Homo sapiens
  misc_RNA (1)...(19): siRNA sense strand
cuacaaauagagaacaaga

SEQ ID NO: 1835759 - RNA, 19 nt, Homo sapiens
  misc_RNA (1)...(19): siRNA sense strand
ccaaagcaguauuuauagc

SEQ ID NO: 1835760 - RNA, 19 nt, Homo sapiens
  misc_RNA (1)...(19): siRNA sense strand
aaauaaagggcauuaccaa

SEQ ID NO: 1835761 - RNA, 19 nt, Homo sapiens
  misc_RNA (1)...(19): siRNA sense strand
aaacaacaacgugagacua

SEQ ID NO: 1835762 - RNA, 19 nt, Homo sapiens
  misc_RNA (1)...(19): siRNA sense strand
aacaacaacgugagacuaa

SEQ ID NO: 1835763 - RNA, 19 nt, Homo sapiens
  misc_RNA (1)...(19): siRNA sense strand
caagaccuacucagucaug

SEQ ID NO: 1835764 - RNA, 19 nt, Homo sapiens
  misc_RNA (1)...(19): siRNA sense strand
gagagaggaacauucaagu

SEQ ID NO: 1835765 - RNA, 19 nt, Homo sapiens
  misc_RNA (1)...(19): siRNA sense strand
acaacaacgugagacuaaa

SEQ ID NO: 1835766 - RNA, 19 nt, Homo sapiens
  misc_RNA (1)...(19): siRNA sense strand
ucccaaagcaguuauguuc

SEQ ID NO: 1835767 - RNA, 19 nt, Homo sapiens
  misc_RNA (1)...(19): siRNA sense strand
aaaauggugugcagaaaga

SEQ ID NO: 1835768 - RNA, 19 nt, Homo sapiens
  misc_RNA (1)...(19): siRNA sense strand
gagaagcaagcagcuguga

SEQ ID NO: 1835769 - RNA, 19 nt, Homo sapiens
  misc_RNA (1)...(19): siRNA sense strand
uugaaugcccuacauaaga

SEQ ID NO: 1835770 - RNA, 19 nt, Homo sapiens
  misc_RNA (1)...(19): siRNA sense strand
gcggaucccaaagcaguua

SEQ ID NO: 1835771 - RNA, 19 nt, Homo sapiens
  misc_RNA (1)...(19): siRNA sense strand
caaaauccuucucaagauc

SEQ ID NO: 1835772 - RNA, 19 nt, Homo sapiens
  misc_RNA (1)...(19): siRNA sense strand
caaaagggccagcacuauu

SEQ ID NO: 1835773 - RNA, 19 nt, Homo sapiens
  misc_RNA (1)...(19): siRNA sense strand
caacaaacugaauccaaag

SEQ ID NO: 1835774 - RNA, 19 nt, Homo sapiens
  misc_RNA (1)...(19): siRNA sense strand
aauaaagggcauuaccaaa

SEQ ID NO: 1835775 - RNA, 19 nt, Homo sapiens
  misc_RNA (1)...(19): siRNA sense strand
ccuacucagucaugaacaa

SEQ ID NO: 1835776 - RNA, 19 nt, Homo sapiens
  misc_RNA (1)...(19): siRNA sense strand
uggacuaaguaaagaacaa

SEQ ID NO: 1835777 - RNA, 19 nt, Homo sapiens
  misc_RNA (1)...(19): siRNA sense strand
ccgaaaggcaaauaaaaua

SEQ ID NO: 1835778 - RNA, 19 nt, Homo sapiens
  misc_RNA (1)...(19): siRNA sense strand
cauuuggcacaacaucuua

SEQ ID NO: 1835779 - RNA, 19 nt, Homo sapiens
  misc_RNA (1)...(19): siRNA sense strand
ggcacaacaucuuaacaac

SEQ ID NO: 1835780 - RNA, 19 nt, Homo sapiens
  misc_RNA (1)...(19): siRNA sense strand
gucaacaacugcucaauua

SEQ ID NO: 1835781 - RNA, 19 nt, Homo sapiens
  misc_RNA (1)...(19): siRNA sense strand
gcaaauacauggcaagucu

SEQ ID NO: 1835782 - RNA, 19 nt, Homo sapiens
  misc_RNA (1)...(19): siRNA sense strand
aagaugagcuccuaguaua

SEQ ID NO: 1835783 - RNA, 19 nt, Homo sapiens
  misc_RNA (1)...(19): siRNA sense strand
ccagaaagguguauccaaa

SEQ ID NO: 1835784 - RNA, 19 nt, Homo sapiens
  misc_RNA (1)...(19): siRNA sense strand
caacaacugcucaauuaua

SEQ ID NO: 1835785 - RNA, 19 nt, Homo sapiens
  misc_RNA (1)...(19): siRNA sense strand
aagcggaucuucccaauuu

SEQ ID NO: 1835786 - RNA, 19 nt, Homo sapiens
  misc_RNA (1)...(19): siRNA sense strand
gagaggaacauucaaguaa

SEQ ID NO: 1835787 - RNA, 19 nt, Homo sapiens
  misc_RNA (1)...(19): siRNA sense strand
gaagaaagacgucucaaca

SEQ ID NO: 1835788 - RNA, 19 nt, Homo sapiens
  misc_RNA (1)...(19): siRNA sense strand
acagaaagauguauccaaa

SEQ ID NO: 1835789 - RNA, 19 nt, Homo sapiens
  misc_RNA (1)...(19): siRNA sense strand
gggaauagcccaucuggaa

SEQ ID NO: 1835790 - RNA, 19 nt, Homo sapiens
  misc_RNA (1)...(19): siRNA sense strand
gauccaaacugaagagcaa

SEQ ID NO: 1835791 - RNA, 19 nt, Homo sapiens
  misc_RNA (1)...(19): siRNA sense strand
acagaaagguguauccaaa

SEQ ID NO: 1835792 - RNA, 19 nt, Homo sapiens
  misc_RNA (1)...(19): siRNA sense strand
ggaaagagcacgcagaaag

SEQ ID NO: 1835793 - RNA, 19 nt, Homo sapiens
  misc_RNA (1)...(19): siRNA sense strand
gaagacagaaauccaauau

SEQ ID NO: 1835794 - RNA, 19 nt, Homo sapiens
  misc_RNA (1)...(19): siRNA sense strand
gcauuucuauccaaacuga

SEQ ID NO: 1835795 - RNA, 19 nt, Homo sapiens
  misc_RNA (1)...(19): siRNA sense strand
gaaagagcacgcagaaaga

SEQ ID NO: 1835796 - RNA, 19 nt, Homo sapiens
  misc_RNA (1)...(19): siRNA sense strand
gcagagaccaugauaaauc

SEQ ID NO: 1835797 - RNA, 19 nt, Homo sapiens
  misc_RNA (1)...(19): siRNA sense strand
uauccaaacugaagagaaa

SEQ ID NO: 1835798 - RNA, 19 nt, Homo sapiens
  misc_RNA (1)...(19): siRNA sense strand
uauccaaacugaagagaaa

SEQ ID NO: 1835799 - RNA, 19 nt, Homo sapiens
  misc_RNA (1)...(19): siRNA sense strand
guauuucgauccaaacuga

SEQ ID NO: 1835800 - RNA, 19 nt, Homo sapiens
  misc_RNA (1)...(19): siRNA sense strand
gaaagacgacucaacuaug

SEQ ID NO: 1835801 - RNA, 19 nt, Homo sapiens
  misc_RNA (1)...(19): siRNA sense strand
agaaagacaucucaacugu

SEQ ID NO: 1835802 - RNA, 19 nt, Homo sapiens
  misc_RNA (1)...(19): siRNA sense strand
agacagaaauccaauaucu

SEQ ID NO: 1835803 - RNA, 19 nt, Homo sapiens
  misc_RNA (1)...(19): siRNA sense strand
gaagaaagacgacucaacu

SEQ ID NO: 1835804 - RNA, 19 nt, Homo sapiens
  misc_RNA (1)...(19): siRNA sense strand
gaugagcuccuaguauaua

SEQ ID NO: 1835805 - RNA, 19 nt, Homo sapiens
  misc_RNA (1)...(19): siRNA sense strand
gagcauggccauaaggaaa

SEQ ID NO: 1835806 - RNA, 19 nt, Homo sapiens
  misc_RNA (1)...(19): siRNA sense strand
gaaaauacauggcaagucu

SEQ ID NO: 1835807 - RNA, 19 nt, Homo sapiens
  misc_RNA (1)...(19): siRNA sense strand
gagcauggccauaaggaaa

SEQ ID NO: 1835808 - RNA, 19 nt, Homo sapiens
  misc_RNA (1)...(19): siRNA sense strand
gaaaauacauggcaagucu

SEQ ID NO: 1835809 - RNA, 19 nt, Homo sapiens
  misc_RNA (1)...(19): siRNA sense strand
gaaggcagagaccaugaua

SEQ ID NO: 1835810 - RNA, 19 nt, Homo sapiens
  misc_RNA (1)...(19): siRNA sense strand
gaagcaagcagcugugaug

SEQ ID NO: 1835811 - RNA, 19 nt, Homo sapiens
  misc_RNA (1)...(19): siRNA sense strand
gcaguuauguucuccaaac

SEQ ID NO: 1835812 - RNA, 19 nt, Homo sapiens
  misc_RNA (1)...(19): siRNA sense strand
guauuucuauccaaacuga

SEQ ID NO: 1835813 - RNA, 19 nt, Homo sapiens
  misc_RNA (1)...(19): siRNA sense strand
ucuccaaacugaagaacua

SEQ ID NO: 1835814 - RNA, 19 nt, Homo sapiens
  misc_RNA (1)...(19): siRNA sense strand
gcuauggguucauggacua

SEQ ID NO: 1835815 - RNA, 19 nt, Homo sapiens
  misc_RNA (1)...(19): siRNA sense strand
gaagaaagacaucucaacu

SEQ ID NO: 1835816 - RNA, 19 nt, Homo sapiens
  misc_RNA (1)...(19): siRNA sense strand
guuauguucuccaaacuga

SEQ ID NO: 1835817 - RNA, 19 nt, Homo sapiens
  misc_RNA (1)...(19): siRNA sense strand
ucauaccaaucuucaagua

SEQ ID NO: 1835818 - RNA, 19 nt, Homo sapiens
  misc_RNA (1)...(19): siRNA sense strand
gguaagaauuccuagucaa

SEQ ID NO: 1835819 - RNA, 19 nt, Homo sapiens
  misc_RNA (1)...(19): siRNA sense strand
ucauaccaaucuucaagua

SEQ ID NO: 1835820 - RNA, 19 nt, Homo sapiens
  misc_RNA (1)...(19): siRNA sense strand
ggaauagcccaucuggaaa

SEQ ID NO: 1835821 - RNA, 19 nt, Homo sapiens
  misc_RNA (1)...(19): siRNA sense strand
agaaagacgucucaacagu

SEQ ID NO: 1835822 - RNA, 19 nt, Homo sapiens
  misc_RNA (1)...(19): siRNA sense strand
caacauggacccaaagaca

SEQ ID NO: 1835823 - RNA, 19 nt, Homo sapiens
  misc_RNA (1)...(19): siRNA sense strand
caagacagacuccaacaug

SEQ ID NO: 1835824 - RNA, 19 nt, Homo sapiens
  misc_RNA (1)...(19): siRNA sense strand
agaggaacauucaaguaaa

SEQ ID NO: 1835825 - RNA, 19 nt, Homo sapiens
  misc_RNA (1)...(19): siRNA sense strand
caagguggaucccaaagca

SEQ ID NO: 1835826 - RNA, 19 nt, Homo sapiens
  misc_RNA (1)...(19): siRNA sense strand
caccaaauccuaaucaaga

SEQ ID NO: 1835827 - RNA, 19 nt, Homo sapiens
  misc_RNA (1)...(19): siRNA sense strand
gaucaauggucuggccaaa

SEQ ID NO: 1835828 - RNA, 19 nt, Homo sapiens
  misc_RNA (1)...(19): siRNA sense strand
aaagacgacucaacuaugg

SEQ ID NO: 1835829 - RNA, 19 nt, Homo sapiens
  misc_RNA (1)...(19): siRNA sense strand
aaacaggaauccagugagu

SEQ ID NO: 1835830 - RNA, 19 nt, Homo sapiens
  misc_RNA (1)...(19): siRNA sense strand
gaaggcaagucucaaaucc

SEQ ID NO: 1835831 - RNA, 19 nt, Homo sapiens
  misc_RNA (1)...(19): siRNA sense strand
guagaaggcaagucucaaa

SEQ ID NO: 1835832 - RNA, 19 nt, Homo sapiens
  misc_RNA (1)...(19): siRNA sense strand
caagaugagcuccuaguau

SEQ ID NO: 1835833 - RNA, 19 nt, Homo sapiens
  misc_RNA (1)...(19): siRNA sense strand
ccaagaugaucauuugaca

SEQ ID NO: 1835834 - RNA, 19 nt, Homo sapiens
  misc_RNA (1)...(19): siRNA sense strand
gaggaaagagcacgcagaa

SEQ ID NO: 1835835 - RNA, 19 nt, Homo sapiens
  misc_RNA (1)...(19): siRNA sense strand
ggcaguauuucuauccaaa

SEQ ID NO: 1835836 - RNA, 19 nt, Homo sapiens
  misc_RNA (1)...(19): siRNA sense strand
uagucaagcucaagaguau

SEQ ID NO: 1835837 - RNA, 19 nt, Homo sapiens
  misc_RNA (1)...(19): siRNA sense strand
aaagauguaucccaaagca

SEQ ID NO: 1835838 - RNA, 19 nt, Homo sapiens
  misc_RNA (1)...(19): siRNA sense strand
gguaacaauucauagucaa

SEQ ID NO: 1835839 - RNA, 19 nt, Homo sapiens
  misc_RNA (1)...(19): siRNA sense strand
ggcaguauuucgauccaaa

SEQ ID NO: 1835840 - RNA, 19 nt, Homo sapiens
  misc_RNA (1)...(19): siRNA sense strand
gaggaacauucaaguaaac

SEQ ID NO: 1835841 - RNA, 19 nt, Homo sapiens
  misc_RNA (1)...(19): siRNA sense strand
caaacaagaccuacucagu

SEQ ID NO: 1835842 - RNA, 19 nt, Homo sapiens
  misc_RNA (1)...(19): siRNA sense strand
agaaagauguaucccaaag

SEQ ID NO: 1835843 - RNA, 19 nt, Homo sapiens
  misc_RNA (1)...(19): siRNA sense strand
agaaagauguauccaaagg

SEQ ID NO: 1835844 - RNA, 19 nt, Homo sapiens
  misc_RNA (1)...(19): siRNA sense strand
ccaaagcaguuauguucuc

SEQ ID NO: 1835845 - RNA, 19 nt, Homo sapiens
  misc_RNA (1)...(19): siRNA sense strand
gcaugagguugcccaagau

SEQ ID NO: 1835846 - RNA, 19 nt, Homo sapiens
  misc_RNA (1)...(19): siRNA sense strand
caaaggcaguauuucuauc

SEQ ID NO: 1835847 - RNA, 19 nt, Homo sapiens
  misc_RNA (1)...(19): siRNA sense strand
ccaaaggcaguauuucuau

SEQ ID NO: 1835848 - RNA, 19 nt, Homo sapiens
  misc_RNA (1)...(19): siRNA sense strand
agaaaaggauguacagaaa

SEQ ID NO: 1835849 - RNA, 19 nt, Homo sapiens
  misc_RNA (1)...(19): siRNA sense strand
ucauaccaaucuucgagua

SEQ ID NO: 1835850 - RNA, 19 nt, Homo sapiens
  misc_RNA (1)...(19): siRNA sense strand
gaacauucaaguaaacuac

SEQ ID NO: 1835851 - RNA, 19 nt, Homo sapiens
  misc_RNA (1)...(19): siRNA sense strand
ccaaacugaagaacuagua

SEQ ID NO: 1835852 - RNA, 19 nt, Homo sapiens
  misc_RNA (1)...(19): siRNA sense strand
gaaggcacauaaaauauca

SEQ ID NO: 1835853 - RNA, 19 nt, Homo sapiens
  misc_RNA (1)...(19): siRNA sense strand
gacagaaauccaauaucua

SEQ ID NO: 1835854 - RNA, 19 nt, Homo sapiens
  misc_RNA (1)...(19): siRNA sense strand
gguaacaauuccuagucaa

SEQ ID NO: 1835855 - RNA, 19 nt, Homo sapiens
  misc_RNA (1)...(19): siRNA sense strand
cgacucaacuauggaggaa

SEQ ID NO: 1835856 - RNA, 19 nt, Homo sapiens
  misc_RNA (1)...(19): siRNA sense strand
aacaagaccuacucaguca

SEQ ID NO: 1835857 - RNA, 19 nt, Homo sapiens
  misc_RNA (1)...(19): siRNA sense strand
ccaagaugagcuccuagua

SEQ ID NO: 1835858 - RNA, 19 nt, Homo sapiens
  misc_RNA (1)...(19): siRNA sense strand
ccaaaggcagcauuucuau

SEQ ID NO: 1835859 - RNA, 19 nt, Homo sapiens
  misc_RNA (1)...(19): siRNA sense strand
aggcagagaccaugauaaa

SEQ ID NO: 1835860 - RNA, 19 nt, Homo sapiens
  misc_RNA (1)...(19): siRNA sense strand
agaaagacgacucaacuau

SEQ ID NO: 1835861 - RNA, 19 nt, Homo sapiens
  misc_RNA (1)...(19): siRNA sense strand
ccaagcggaucuucccaau

SEQ ID NO: 1835862 - RNA, 19 nt, Homo sapiens
  misc_RNA (1)...(19): siRNA sense strand
caacuucaccauggagaaa

SEQ ID NO: 1835863 - RNA, 19 nt, Homo sapiens
  misc_RNA (1)...(19): siRNA sense strand
guucauggacuaaguaaag

SEQ ID NO: 1835864 - RNA, 19 nt, Homo sapiens
  misc_RNA (1)...(19): siRNA sense strand
gaauagcccaucuggaaag

SEQ ID NO: 1835865 - RNA, 19 nt, Homo sapiens
  misc_RNA (1)...(19): siRNA sense strand
ggaacauucaaguaaacua

SEQ ID NO: 1835866 - RNA, 19 nt, Homo sapiens
  misc_RNA (1)...(19): siRNA sense strand
gaugaucauuugacacaac

SEQ ID NO: 1835867 - RNA, 19 nt, Homo sapiens
  misc_RNA (1)...(19): siRNA sense strand
gaccaacaacauacuaaau

SEQ ID NO: 1835868 - RNA, 19 nt, Homo sapiens
  misc_RNA (1)...(19): siRNA sense strand
aggaaagucuggucaaucu

SEQ ID NO: 1835869 - RNA, 19 nt, Homo sapiens
  misc_RNA (1)...(19): siRNA sense strand
aaaggaaagucuggucaau

SEQ ID NO: 1835870 - RNA, 19 nt, Homo sapiens
  misc_RNA (1)...(19): siRNA sense strand
uaacaauuccuagucaaga

SEQ ID NO: 1835871 - RNA, 19 nt, Homo sapiens
  misc_RNA (1)...(19): siRNA sense strand
ucauacccgucuucacgua

SEQ ID NO: 1835872 - RNA, 19 nt, Homo sapiens
  misc_RNA (1)...(19): siRNA sense strand
gacaccaaauccuaaucaa

SEQ ID NO: 1835873 - RNA, 19 nt, Homo sapiens
  misc_RNA (1)...(19): siRNA sense strand
gauuugaaugcccuacaua

SEQ ID NO: 1835874 - RNA, 19 nt, Homo sapiens
  misc_RNA (1)...(19): siRNA sense strand
gaaguccaucauccucuuu

SEQ ID NO: 1835875 - RNA, 19 nt, Homo sapiens
  misc_RNA (1)...(19): siRNA sense strand
ugcccaagaugaucauuug

SEQ ID NO: 1835876 - RNA, 19 nt, Homo sapiens
  misc_RNA (1)...(19): siRNA sense strand
gcagauacaaacaggaauc

SEQ ID NO: 1835877 - RNA, 19 nt, Homo sapiens
  misc_RNA (1)...(19): siRNA sense strand
gaaaagggcauccagaaag

SEQ ID NO: 1835878 - RNA, 19 nt, Homo sapiens
  misc_RNA (1)...(19): siRNA sense strand
agaaucaacaccagacaaa

SEQ ID NO: 1835879 - RNA, 19 nt, Homo sapiens
  misc_RNA (1)...(19): siRNA sense strand
ucaagagcauggccauaag

SEQ ID NO: 1835880 - RNA, 19 nt, Homo sapiens
  misc_RNA (1)...(19): siRNA sense strand
gaauacagcucuucucgaa

SEQ ID NO: 1835881 - RNA, 19 nt, Homo sapiens
  misc_RNA (1)...(19): siRNA sense strand
agaagaagcuggcagagaa

SEQ ID NO: 1835882 - RNA, 19 nt, Homo sapiens
  misc_RNA (1)...(19): siRNA sense strand
gcugagagcccuguuaaua

SEQ ID NO: 1835883 - RNA, 19 nt, Homo sapiens
  misc_RNA (1)...(19): siRNA sense strand
caacaugauugaccgauuc

SEQ ID NO: 1835884 - RNA, 19 nt, Homo sapiens
  misc_RNA (1)...(19): siRNA sense strand
gaucuacauugaugaguug

SEQ ID NO: 1835885 - RNA, 19 nt, Homo sapiens
  misc_RNA (1)...(19): siRNA sense strand
ggagagaguuucgggagaa

SEQ ID NO: 1835886 - RNA, 19 nt, Homo sapiens
  misc_RNA (1)...(19): siRNA sense strand
acaaacaggccacgacuua

SEQ ID NO: 1835887 - RNA, 19 nt, Homo sapiens
  misc_RNA (1)...(19): siRNA sense strand
gagaagaucacguucauca

SEQ ID NO: 1835888 - RNA, 19 nt, Homo sapiens
  misc_RNA (1)...(19): siRNA sense strand
ggacguggaugaauugaac

SEQ ID NO: 1835889 - RNA, 19 nt, Homo sapiens
  misc_RNA (1)...(19): siRNA sense strand
ugagagcccuguuaauaug

SEQ ID NO: 1835890 - RNA, 19 nt, Homo sapiens
  misc_RNA (1)...(19): siRNA sense strand
gguggcagaucucaacaaa

SEQ ID NO: 1835891 - RNA, 19 nt, Homo sapiens
  misc_RNA (1)...(19): siRNA sense strand
uggcagaucucaacaaaca

SEQ ID NO: 1835892 - RNA, 19 nt, Homo sapiens
  misc_RNA (1)...(19): siRNA sense strand
uaagaaggcggcacaagaa

SEQ ID NO: 1835893 - RNA, 19 nt, Homo sapiens
  misc_RNA (1)...(19): siRNA sense strand
ggagacgggaguauuauga

SEQ ID NO: 1835894 - RNA, 19 nt, Homo sapiens
  misc_RNA (1)...(19): siRNA sense strand
uaccagaucuacauugaug

SEQ ID NO: 1835895 - RNA, 19 nt, Homo sapiens
  misc_RNA (1)...(19): siRNA sense strand
gcgaagaugagaagaagaa

SEQ ID NO: 1835896 - RNA, 19 nt, Homo sapiens
  misc_RNA (1)...(19): siRNA sense strand
ucacguucaucaccaguuu

SEQ ID NO: 1835897 - RNA, 19 nt, Homo sapiens
  misc_RNA (1)...(19): siRNA sense strand
ggacaccaacaacaugauu

SEQ ID NO: 1835898 - RNA, 19 nt, Homo sapiens
  misc_RNA (1)...(19): siRNA sense strand
acagaggccuggugcagaa

SEQ ID NO: 1835899 - RNA, 19 nt, Homo sapiens
  misc_RNA (1)...(19): siRNA sense strand
gcaacucggacgaagauga

SEQ ID NO: 1835900 - RNA, 19 nt, Homo sapiens
  misc_RNA (1)...(19): siRNA sense strand
gagcaacucggacgaagau

SEQ ID NO: 1835901 - RNA, 19 nt, Homo sapiens
  misc_RNA (1)...(19): siRNA sense strand
agacgggaguauuaugaaa

SEQ ID NO: 1835902 - RNA, 19 nt, Homo sapiens
  misc_RNA (1)...(19): siRNA sense strand
gaaggacccagcccaguuc

SEQ ID NO: 1835903 - RNA, 19 nt, Homo sapiens
  misc_RNA (1)...(19): siRNA sense strand
caggagaagcugaaacuga

SEQ ID NO: 1835904 - RNA, 19 nt, Homo sapiens
  misc_RNA (1)...(19): siRNA sense strand
gaucagcccacccagcuau

SEQ ID NO: 1835905 - RNA, 19 nt, Homo sapiens
  misc_RNA (1)...(19): siRNA sense strand
cagcgaagaugagaagaag

SEQ ID NO: 1835906 - RNA, 19 nt, Homo sapiens
  misc_RNA (1)...(19): siRNA sense strand
gcaagauccgcaugaagga

SEQ ID NO: 1835907 - RNA, 19 nt, Homo sapiens
  misc_RNA (1)...(19): siRNA sense strand
gcgaggagaagaucacguu

SEQ ID NO: 1835908 - RNA, 19 nt, Homo sapiens
  misc_RNA (1)...(19): siRNA sense strand
aaacaggccacgacuuaug

SEQ ID NO: 1835909 - RNA, 19 nt, Homo sapiens
  misc_RNA (1)...(19): siRNA sense strand
uaacuacgagcgcuacaga

SEQ ID NO: 1835910 - RNA, 19 nt, Homo sapiens
  misc_RNA (1)...(19): siRNA sense strand
gagcggagacgggaguauu

SEQ ID NO: 1835911 - RNA, 19 nt, Homo sapiens
  misc_RNA (1)...(19): siRNA sense strand
ucaggaugcuccggaaaga

SEQ ID NO: 1835912 - RNA, 19 nt, Homo sapiens
  misc_RNA (1)...(19): siRNA sense strand
gagagaaggagagagaaga

SEQ ID NO: 1835913 - RNA, 19 nt, Homo sapiens
  misc_RNA (1)...(19): siRNA sense strand
cgacuuugccggcaucuca

SEQ ID NO: 1835914 - RNA, 19 nt, Homo sapiens
  misc_RNA (1)...(19): siRNA sense strand
ccagagacccagcgaagau

SEQ ID NO: 1835915 - RNA, 19 nt, Homo sapiens
  misc_RNA (1)...(19): siRNA sense strand
acaacaugauugaccgauu

SEQ ID NO: 1835916 - RNA, 19 nt, Homo sapiens
  misc_RNA (1)...(19): siRNA sense strand
gagacgggaguauuaugaa

SEQ ID NO: 1835917 - RNA, 19 nt, Homo sapiens
  misc_RNA (1)...(19): siRNA sense strand
gaggagaagaucacguuca

SEQ ID NO: 1835918 - RNA, 19 nt, Homo sapiens
  misc_RNA (1)...(19): siRNA sense strand
agaucuacauugaugaguu

SEQ ID NO: 1835919 - RNA, 19 nt, Homo sapiens
  misc_RNA (1)...(19): siRNA sense strand
ccgauacagucgagaauac

SEQ ID NO: 1835920 - RNA, 19 nt, Homo sapiens
  misc_RNA (1)...(19): siRNA sense strand
guacauggccgagcuugca

SEQ ID NO: 1835921 - RNA, 19 nt, Homo sapiens
  misc_RNA (1)...(19): siRNA sense strand
cggacgaacggaaguguaa

SEQ ID NO: 1835922 - RNA, 19 nt, Homo sapiens
  misc_RNA (1)...(19): siRNA sense strand
auaagaaggcggcacaaga

SEQ ID NO: 1835923 - RNA, 19 nt, Homo sapiens
  misc_RNA (1)...(19): siRNA sense strand
guucaaggcggauaagaag

SEQ ID NO: 1835924 - RNA, 19 nt, Homo sapiens
  misc_RNA (1)...(19): siRNA sense strand
ggagguggacguggaugaa

SEQ ID NO: 1835925 - RNA, 19 nt, Homo sapiens
  misc_RNA (1)...(19): siRNA sense strand
ggagagcaacucggacgaa

SEQ ID NO: 1835926 - RNA, 19 nt, Homo sapiens
  misc_RNA (1)...(19): siRNA sense strand
guagagaaggcggcagaaa

SEQ ID NO: 1835927 - RNA, 19 nt, Homo sapiens
  misc_RNA (1)...(19): siRNA sense strand
gagagcccuguuaauauga

SEQ ID NO: 1835928 - RNA, 19 nt, Homo sapiens
  misc_RNA (1)...(19): siRNA sense strand
gcagcagcaucaggaguca

SEQ ID NO: 1835929 - RNA, 19 nt, Homo sapiens
  misc_RNA (1)...(19): siRNA sense strand
gcagguggcagaucucaac

SEQ ID NO: 1835930 - RNA, 19 nt, Homo sapiens
  misc_RNA (1)...(19): siRNA sense strand
cagaggagcagugccugua

SEQ ID NO: 1835931 - RNA, 19 nt, Homo sapiens
  misc_RNA (1)...(19): siRNA sense strand
cugagagcccuguuaauau

SEQ ID NO: 1835932 - RNA, 19 nt, Homo sapiens
  misc_RNA (1)...(19): siRNA sense strand
ccgcugagagcccuguuaa

SEQ ID NO: 1835933 - RNA, 19 nt, Homo sapiens
  misc_RNA (1)...(19): siRNA sense strand
gaagaagcuggcagagaag

SEQ ID NO: 1835934 - RNA, 19 nt, Homo sapiens
  misc_RNA (1)...(19): siRNA sense strand
agaaggacccagcccaguu

SEQ ID NO: 1835935 - RNA, 19 nt, Homo sapiens
  misc_RNA (1)...(19): siRNA sense strand
gccgagagaaggagagaga

SEQ ID NO: 1835936 - RNA, 19 nt, Homo sapiens
  misc_RNA (1)...(19): siRNA sense strand
gaaccugccgcugguaaag

SEQ ID NO: 1835937 - RNA, 19 nt, Homo sapiens
  misc_RNA (1)...(19): siRNA sense strand
aggagaagaucacguucau

SEQ ID NO: 1835938 - RNA, 19 nt, Homo sapiens
  misc_RNA (1)...(19): siRNA sense strand
gguggacguggaugaauug

SEQ ID NO: 1835939 - RNA, 19 nt, Homo sapiens
  misc_RNA (1)...(19): siRNA sense strand
acucgcagccgcagccaua

SEQ ID NO: 1835940 - RNA, 19 nt, Homo sapiens
  misc_RNA (1)...(19): siRNA sense strand
acaccaacaacaugauuga

SEQ ID NO: 1835941 - RNA, 19 nt, Homo sapiens
  misc_RNA (1)...(19): siRNA sense strand
ccagcgaagaugagaagaa

SEQ ID NO: 1835942 - RNA, 19 nt, Homo sapiens
  misc_RNA (1)...(19): siRNA sense strand
caaacaggccacgacuuau

SEQ ID NO: 1835943 - RNA, 19 nt, Homo sapiens
  misc_RNA (1)...(19): siRNA sense strand
gaagcuggcagagaagaag

SEQ ID NO: 1835944 - RNA, 19 nt, Homo sapiens
  misc_RNA (1)...(19): siRNA sense strand
ggaggcagaggccaucaag

SEQ ID NO: 1835945 - RNA, 19 nt, Homo sapiens
  misc_RNA (1)...(19): siRNA sense strand
gagagaguuucgggagaag

SEQ ID NO: 1835946 - RNA, 19 nt, Homo sapiens
  misc_RNA (1)...(19): siRNA sense strand
gauaagaaggcggcacaag

SEQ ID NO: 1835947 - RNA, 19 nt, Homo sapiens
  misc_RNA (1)...(19): siRNA sense strand
gacaccaacaacaugauug

SEQ ID NO: 1835948 - RNA, 19 nt, Homo sapiens
  misc_RNA (1)...(19): siRNA sense strand
caacucggacgaagaugag

SEQ ID NO: 1835949 - RNA, 19 nt, Homo sapiens
  misc_RNA (1)...(19): siRNA sense strand
agguggacguggaugaauu

SEQ ID NO: 1835950 - RNA, 19 nt, Homo sapiens
  misc_RNA (1)...(19): siRNA sense strand
ggaguauuaugaaaagauc

SEQ ID NO: 1835951 - RNA, 19 nt, Homo sapiens
  misc_RNA (1)...(19): siRNA sense strand
aggaggagaaggccaugua

SEQ ID NO: 1835952 - RNA, 19 nt, Homo sapiens
  misc_RNA (1)...(19): siRNA sense strand
gagcccuguuaauaugaug

SEQ ID NO: 1835953 - RNA, 19 nt, Homo sapiens
  misc_RNA (1)...(19): siRNA sense strand
ggaugcagaaggcgcugaa

SEQ ID NO: 1835954 - RNA, 19 nt, Homo sapiens
  misc_RNA (1)...(19): siRNA sense strand
agagacaggagcugccaaa

SEQ ID NO: 1835955 - RNA, 19 nt, Homo sapiens
  misc_RNA (1)...(19): siRNA sense strand
gcggagacgggaguauuau

SEQ ID NO: 1835956 - RNA, 19 nt, Homo sapiens
  misc_RNA (1)...(19): siRNA sense strand
aagaaggcggcacaagaaa

SEQ ID NO: 1835957 - RNA, 19 nt, Homo sapiens
  misc_RNA (1)...(19): siRNA sense strand
ugaaacugaggaugcagaa

SEQ ID NO: 1835958 - RNA, 19 nt, Homo sapiens
  misc_RNA (1)...(19): siRNA sense strand
gagacagccccaccuauga

SEQ ID NO: 1835959 - RNA, 19 nt, Homo sapiens
  misc_RNA (1)...(19): siRNA sense strand
augaaaagaucaagaagga

SEQ ID NO: 1835960 - RNA, 19 nt, Homo sapiens
  misc_RNA (1)...(19): siRNA sense strand
gagcagguggcagaucuca

SEQ ID NO: 1835961 - RNA, 19 nt, Homo sapiens
  misc_RNA (1)...(19): siRNA sense strand
ggaggagaaggccauguac

SEQ ID NO: 1835962 - RNA, 19 nt, Homo sapiens
  misc_RNA (1)...(19): siRNA sense strand
cgccaucacccgcaagaga

SEQ ID NO: 1835963 - RNA, 19 nt, Homo sapiens
  misc_RNA (1)...(19): siRNA sense strand
gaagguccaaguccaaguc

SEQ ID NO: 1835964 - RNA, 19 nt, Homo sapiens
  misc_RNA (1)...(19): siRNA sense strand
gagcugcgggugcaaaugg

SEQ ID NO: 1835965 - RNA, 19 nt, Homo sapiens
  misc_RNA (1)...(19): siRNA sense strand
ccucgucggucuccagauc

SEQ ID NO: 1835966 - RNA, 19 nt, Homo sapiens
  misc_RNA (1)...(19): siRNA sense strand
ugaggcgcgucuucgagaa

SEQ ID NO: 1835967 - RNA, 19 nt, Homo sapiens
  misc_RNA (1)...(19): siRNA sense strand
caagagggaauccaaaucc

SEQ ID NO: 1835968 - RNA, 19 nt, Homo sapiens
  misc_RNA (1)...(19): siRNA sense strand
ccaagagggaauccaaauc

SEQ ID NO: 1835969 - RNA, 19 nt, Homo sapiens
  misc_RNA (1)...(19): siRNA sense strand
gaucucggucgaccuccaa

SEQ ID NO: 1835970 - RNA, 19 nt, Homo sapiens
  misc_RNA (1)...(19): siRNA sense strand
gcaaagagguccugaugga

SEQ ID NO: 1835971 - RNA, 19 nt, Homo sapiens
  misc_RNA (1)...(19): siRNA sense strand
ggagaugguucuggagaug

SEQ ID NO: 1835972 - RNA, 19 nt, Homo sapiens
  misc_RNA (1)...(19): siRNA sense strand
caccugaaacgccuucuua

SEQ ID NO: 1835973 - RNA, 19 nt, Homo sapiens
  misc_RNA (1)...(19): siRNA sense strand
gcugcuacaucaugaagau

SEQ ID NO: 1835974 - RNA, 19 nt, Homo sapiens
  misc_RNA (1)...(19): siRNA sense strand
cagcaaagagguccugaug

SEQ ID NO: 1835975 - RNA, 19 nt, Homo sapiens
  misc_RNA (1)...(19): siRNA sense strand
gcgaggugccgcucuacua

SEQ ID NO: 1835976 - RNA, 19 nt, Homo sapiens
  misc_RNA (1)...(19): siRNA sense strand
ccgcagugccuacgucuaa

SEQ ID NO: 1835977 - RNA, 19 nt, Homo sapiens
  misc_RNA (1)...(19): siRNA sense strand
gaaacacacggagaugguu

SEQ ID NO: 1835978 - RNA, 19 nt, Homo sapiens
  misc_RNA (1)...(19): siRNA sense strand
ugaaacgccuucuuaucgu

SEQ ID NO: 1835979 - RNA, 19 nt, Homo sapiens
  misc_RNA (1)...(19): siRNA sense strand
cacaugagccagaaacaca

SEQ ID NO: 1835980 - RNA, 19 nt, Homo sapiens
  misc_RNA (1)...(19): siRNA sense strand
gagaugguucuggagauga

SEQ ID NO: 1835981 - RNA, 19 nt, Homo sapiens
  misc_RNA (1)...(19): siRNA sense strand
cugaaacgccuucuuaucg

SEQ ID NO: 1835982 - RNA, 19 nt, Homo sapiens
  misc_RNA (1)...(19): siRNA sense strand
gagagcauccccagucuug

SEQ ID NO: 1835983 - RNA, 19 nt, Homo sapiens
  misc_RNA (1)...(19): siRNA sense strand
ggcaccugcugcuacauca

SEQ ID NO: 1835984 - RNA, 19 nt, Homo sapiens
  misc_RNA (1)...(19): siRNA sense strand
gccagaaacacacggagau

SEQ ID NO: 1835985 - RNA, 19 nt, Homo sapiens
  misc_RNA (1)...(19): siRNA sense strand
ugagugagcaccugguuac

SEQ ID NO: 1835986 - RNA, 19 nt, Homo sapiens
  misc_RNA (1)...(19): siRNA sense strand
gcaccugaaacgccuucuu

SEQ ID NO: 1835987 - RNA, 19 nt, Homo sapiens
  misc_RNA (1)...(19): siRNA sense strand
cggagaugguucuggagau

SEQ ID NO: 1835988 - RNA, 19 nt, Homo sapiens
  misc_RNA (1)...(19): siRNA sense strand
guucuggagaugagcauug

SEQ ID NO: 1835989 - RNA, 19 nt, Homo sapiens
  misc_RNA (1)...(19): siRNA sense strand
ccugaaacgccuucuuauc

SEQ ID NO: 1835990 - RNA, 19 nt, Homo sapiens
  misc_RNA (1)...(19): siRNA sense strand
ccagaaacacacggagaug

SEQ ID NO: 1835991 - RNA, 19 nt, Homo sapiens
  misc_RNA (1)...(19): siRNA sense strand
agaaggagcugaauaagua

SEQ ID NO: 1835992 - RNA, 19 nt, Homo sapiens
  misc_RNA (1)...(19): siRNA sense strand
ggaaggugcuuaucaugga

SEQ ID NO: 1835993 - RNA, 19 nt, Homo sapiens
  misc_RNA (1)...(19): siRNA sense strand
ggacaaggcgaacaucaaa

SEQ ID NO: 1835994 - RNA, 19 nt, Homo sapiens
  misc_RNA (1)...(19): siRNA sense strand
ugaaggcacuggacaagaa

SEQ ID NO: 1835995 - RNA, 19 nt, Homo sapiens
  misc_RNA (1)...(19): siRNA sense strand
gcauggagcccaccuauca

SEQ ID NO: 1835996 - RNA, 19 nt, Homo sapiens
  misc_RNA (1)...(19): siRNA sense strand
ggacgaggacgaugacuug

SEQ ID NO: 1835997 - RNA, 19 nt, Homo sapiens
  misc_RNA (1)...(19): siRNA sense strand
caaagguggugaagacguu

SEQ ID NO: 1835998 - RNA, 19 nt, Homo sapiens
  misc_RNA (1)...(19): siRNA sense strand
gauccagcaugccaaugua

SEQ ID NO: 1835999 - RNA, 19 nt, Homo sapiens
  misc_RNA (1)...(19): siRNA sense strand
ucaaagaccuaucccagau

SEQ ID NO: 1836000 - RNA, 19 nt, Homo sapiens
  misc_RNA (1)...(19): siRNA sense strand
gagcuucgccacaugcaua

SEQ ID NO: 1836001 - RNA, 19 nt, Homo sapiens
  misc_RNA (1)...(19): siRNA sense strand
ucgcagauguguccaagaa

SEQ ID NO: 1836002 - RNA, 19 nt, Homo sapiens
  misc_RNA (1)...(19): siRNA sense strand
acaagaagcuggaggacau

SEQ ID NO: 1836003 - RNA, 19 nt, Homo sapiens
  misc_RNA (1)...(19): siRNA sense strand
acauagagcaggacacaua

SEQ ID NO: 1836004 - RNA, 19 nt, Homo sapiens
  misc_RNA (1)...(19): siRNA sense strand
gaucaaggacuccaugaag

SEQ ID NO: 1836005 - RNA, 19 nt, Homo sapiens
  misc_RNA (1)...(19): siRNA sense strand
gcaucaccauuguugaaga

SEQ ID NO: 1836006 - RNA, 19 nt, Homo sapiens
  misc_RNA (1)...(19): siRNA sense strand
gaaccuguggcccuucgua

SEQ ID NO: 1836007 - RNA, 19 nt, Homo sapiens
  misc_RNA (1)...(19): siRNA sense strand
gcugagggcaucaccauug

SEQ ID NO: 1836008 - RNA, 19 nt, Homo sapiens
  misc_RNA (1)...(19): siRNA sense strand
cugaggaccuucugugaga

SEQ ID NO: 1836009 - RNA, 19 nt, Homo sapiens
  misc_RNA (1)...(19): siRNA sense strand
ggacauagagcaggacaca

SEQ ID NO: 1836010 - RNA, 19 nt, Homo sapiens
  misc_RNA (1)...(19): siRNA sense strand
gaaggugcuuaucauggau

SEQ ID NO: 1836011 - RNA, 19 nt, Homo sapiens
  misc_RNA (1)...(19): siRNA sense strand
ccacaugcauaucgcagau

SEQ ID NO: 1836012 - RNA, 19 nt, Homo sapiens
  misc_RNA (1)...(19): siRNA sense strand
ggaguuauucggaguguca

SEQ ID NO: 1836013 - RNA, 19 nt, Homo sapiens
  misc_RNA (1)...(19): siRNA sense strand
uggagaagcuguguagugu

SEQ ID NO: 1836014 - RNA, 19 nt, Homo sapiens
  misc_RNA (1)...(19): siRNA sense strand
gggcaucaccauuguugaa

SEQ ID NO: 1836015 - RNA, 19 nt, Homo sapiens
  misc_RNA (1)...(19): siRNA sense strand
gaacaucaaagaccuaucc

SEQ ID NO: 1836016 - RNA, 19 nt, Homo sapiens
  misc_RNA (1)...(19): siRNA sense strand
ugaagacguugaaggagau

SEQ ID NO: 1836017 - RNA, 19 nt, Homo sapiens
  misc_RNA (1)...(19): siRNA sense strand
cguaugaucugcuggacau

SEQ ID NO: 1836018 - RNA, 19 nt, Homo sapiens
  misc_RNA (1)...(19): siRNA sense strand
acagcagccucauccguaa

SEQ ID NO: 1836019 - RNA, 19 nt, Homo sapiens
  misc_RNA (1)...(19): siRNA sense strand
gcaugcgcaucuugucuuc

SEQ ID NO: 1836020 - RNA, 19 nt, Homo sapiens
  misc_RNA (1)...(19): siRNA sense strand
gagggcaucaccauuguug

SEQ ID NO: 1836021 - RNA, 19 nt, Homo sapiens
  misc_RNA (1)...(19): siRNA sense strand
ucuagcagaugauuguaug

SEQ ID NO: 1836022 - RNA, 19 nt, Homo sapiens
  misc_RNA (1)...(19): siRNA sense strand
gcucucgucuggcaaaggu

SEQ ID NO: 1836023 - RNA, 19 nt, Homo sapiens
  misc_RNA (1)...(19): siRNA sense strand
uggcaaagguggugaagac

SEQ ID NO: 1836024 - RNA, 19 nt, Homo sapiens
  misc_RNA (1)...(19): siRNA sense strand
gucuggaggccauuuauuu

SEQ ID NO: 1836025 - RNA, 19 nt, Homo sapiens
  misc_RNA (1)...(19): siRNA sense strand
acaaggcgaacaucaaaga

SEQ ID NO: 1836026 - RNA, 19 nt, Homo sapiens
  misc_RNA (1)...(19): siRNA sense strand
gcucaucguguaugucaug

SEQ ID NO: 1836027 - RNA, 19 nt, Homo sapiens
  misc_RNA (1)...(19): siRNA sense strand
gaaggagcugaauaaguau

SEQ ID NO: 1836028 - RNA, 19 nt, Homo sapiens
  misc_RNA (1)...(19): siRNA sense strand
cagaaggagcugaauaagu

SEQ ID NO: 1836029 - RNA, 19 nt, Homo sapiens
  misc_RNA (1)...(19): siRNA sense strand
ccacggagaagucgguuca

SEQ ID NO: 1836030 - RNA, 19 nt, Homo sapiens
  misc_RNA (1)...(19): siRNA sense strand
gaaccuggccaagcugauc

SEQ ID NO: 1836031 - RNA, 19 nt, Homo sapiens
  misc_RNA (1)...(19): siRNA sense strand
gcaccuacaaccucuacug

SEQ ID NO: 1836032 - RNA, 19 nt, Homo sapiens
  misc_RNA (1)...(19): siRNA sense strand
gaguggaaggugcuuauca

SEQ ID NO: 1836033 - RNA, 19 nt, Homo sapiens
  misc_RNA (1)...(19): siRNA sense strand
uaccagaaggagcugaaua

SEQ ID NO: 1836034 - RNA, 19 nt, Homo sapiens
  misc_RNA (1)...(19): siRNA sense strand
guggagaagcuguguagug

SEQ ID NO: 1836035 - RNA, 19 nt, Homo sapiens
  misc_RNA (1)...(19): siRNA sense strand
uccaggccauggcguauga

SEQ ID NO: 1836036 - RNA, 19 nt, Homo sapiens
  misc_RNA (1)...(19): siRNA sense strand
accagaaggagcugaauaa

SEQ ID NO: 1836037 - RNA, 19 nt, Homo sapiens
  misc_RNA (1)...(19): siRNA sense strand
caccauuguugaagacauc

SEQ ID NO: 1836038 - RNA, 19 nt, Homo sapiens
  misc_RNA (1)...(19): siRNA sense strand
gggaguggaaggugcuuau

SEQ ID NO: 1836039 - RNA, 19 nt, Homo sapiens
  misc_RNA (1)...(19): siRNA sense strand
caagugggaggugcucauu

SEQ ID NO: 1836040 - RNA, 19 nt, Homo sapiens
  misc_RNA (1)...(19): siRNA sense strand
ugcaugagcucacguucca

SEQ ID NO: 1836041 - RNA, 19 nt, Homo sapiens
  misc_RNA (1)...(19): siRNA sense strand
cgacccgcuuccuggauga

SEQ ID NO: 1836042 - RNA, 19 nt, Homo sapiens
  misc_RNA (1)...(19): siRNA sense strand
cucauuggcuccucacaca

SEQ ID NO: 1836043 - RNA, 19 nt, Homo sapiens
  misc_RNA (1)...(19): siRNA sense strand
gcugcaaaaugucagauau

SEQ ID NO: 1836044 - RNA, 19 nt, Homo sapiens
  misc_RNA (1)...(19): siRNA sense strand
uagcagaugauuguaugaa

SEQ ID NO: 1836045 - RNA, 19 nt, Homo sapiens
  misc_RNA (1)...(19): siRNA sense strand
ggccauggcguaugaucug

SEQ ID NO: 1836046 - RNA, 19 nt, Homo sapiens
  misc_RNA (1)...(19): siRNA sense strand
ucuggaggccauuuauuug

SEQ ID NO: 1836047 - RNA, 19 nt, Homo sapiens
  misc_RNA (1)...(19): siRNA sense strand
gguguggccaugucagaga

SEQ ID NO: 1836048 - RNA, 19 nt, Homo sapiens
  misc_RNA (1)...(19): siRNA sense strand
cuacgaggcccagguguuc

SEQ ID NO: 1836049 - RNA, 19 nt, Homo sapiens
  misc_RNA (1)...(19): siRNA sense strand
gcaagugggaggugcucau

SEQ ID NO: 1836050 - RNA, 19 nt, Homo sapiens
  misc_RNA (1)...(19): siRNA sense strand
gaaggcacuggacaagaag

SEQ ID NO: 1836051 - RNA, 19 nt, Homo sapiens
  misc_RNA (1)...(19): siRNA sense strand
cagaggacacagcccaguu

SEQ ID NO: 1836052 - RNA, 19 nt, Homo sapiens
  misc_RNA (1)...(19): siRNA sense strand
aggagaaccuggccaagcu

SEQ ID NO: 1836053 - RNA, 19 nt, Homo sapiens
  misc_RNA (1)...(19): siRNA sense strand
aguggaaggugcuuaucau

SEQ ID NO: 1836054 - RNA, 19 nt, Homo sapiens
  misc_RNA (1)...(19): siRNA sense strand
ccacggacaaggcgaacau

SEQ ID NO: 1836055 - RNA, 19 nt, Homo sapiens
  misc_RNA (1)...(19): siRNA sense strand
caucaccauuguugaagac

SEQ ID NO: 1836056 - RNA, 19 nt, Homo sapiens
  misc_RNA (1)...(19): siRNA sense strand
gcggaguuauucggagugu

SEQ ID NO: 1836057 - RNA, 19 nt, Homo sapiens
  misc_RNA (1)...(19): siRNA sense strand
gcgaacaucaaagaccuau

SEQ ID NO: 1836058 - RNA, 19 nt, Homo sapiens
  misc_RNA (1)...(19): siRNA sense strand
caagaagcuggaggacauu

SEQ ID NO: 1836059 - RNA, 19 nt, Homo sapiens
  misc_RNA (1)...(19): siRNA sense strand
agugggaggugcucauugg

SEQ ID NO: 1836060 - RNA, 19 nt, Homo sapiens
  misc_RNA (1)...(19): siRNA sense strand
cugagggcaucaccauugu

SEQ ID NO: 1836061 - RNA, 19 nt, Homo sapiens
  misc_RNA (1)...(19): siRNA sense strand
caaagaccuaucccagauc

SEQ ID NO: 1836062 - RNA, 19 nt, Homo sapiens
  misc_RNA (1)...(19): siRNA sense strand
gaugauggaugucuagaaa

SEQ ID NO: 1836063 - RNA, 19 nt, Homo sapiens
  misc_RNA (1)...(19): siRNA sense strand
ccaaaucccuguccuguug

SEQ ID NO: 1836064 - RNA, 19 nt, Homo sapiens
  misc_RNA (1)...(19): siRNA sense strand
ggaggagugucaauccaua

SEQ ID NO: 1836065 - RNA, 19 nt, Homo sapiens
  misc_RNA (1)...(19): siRNA sense strand
ggacagagacuggauaaug

SEQ ID NO: 1836066 - RNA, 19 nt, Homo sapiens
  misc_RNA (1)...(19): siRNA sense strand
gacagagacuggauaaugu

SEQ ID NO: 1836067 - RNA, 19 nt, Homo sapiens
  misc_RNA (1)...(19): siRNA sense strand
ggaacaagaaacuccuuua

SEQ ID NO: 1836068 - RNA, 19 nt, Homo sapiens
  misc_RNA (1)...(19): siRNA sense strand
acaagaaacuccuuuacga

SEQ ID NO: 1836069 - RNA, 19 nt, Homo sapiens
  misc_RNA (1)...(19): siRNA sense strand
gagacuggauaauguuguu

SEQ ID NO: 1836070 - RNA, 19 nt, Homo sapiens
  misc_RNA (1)...(19): siRNA sense strand
gaacaagaaacuccuuuac

SEQ ID NO: 1836071 - RNA, 19 nt, Homo sapiens
  misc_RNA (1)...(19): siRNA sense strand
gaaacuccuuuacgagaag

SEQ ID NO: 1836072 - RNA, 19 nt, Homo sapiens
  misc_RNA (1)...(19): siRNA sense strand
gagugucaauccauaucua

SEQ ID NO: 1836073 - RNA, 19 nt, Homo sapiens
  misc_RNA (1)...(19): siRNA sense strand
uggauaauguuguugcaaa

SEQ ID NO: 1836074 - RNA, 19 nt, Homo sapiens
  misc_RNA (1)...(19): siRNA sense strand
gcaccagcaucucuuugau

SEQ ID NO: 1836075 - RNA, 19 nt, Homo sapiens
  misc_RNA (1)...(19): siRNA sense strand
agaaacuccuuuacgagaa

SEQ ID NO: 1836076 - RNA, 19 nt, Homo sapiens
  misc_RNA (1)...(19): siRNA sense strand
ggauaauguuguugcaaag

SEQ ID NO: 1836077 - RNA, 19 nt, Homo sapiens
  misc_RNA (1)...(19): siRNA sense strand
ggagacaacauuccuaagg

SEQ ID NO: 1836078 - RNA, 19 nt, Homo sapiens
  misc_RNA (1)...(19): siRNA sense strand
caauccauaucuacaagga

SEQ ID NO: 1836079 - RNA, 19 nt, Homo sapiens
  misc_RNA (1)...(19): siRNA sense strand
gcaaguggaacaagaaacu

SEQ ID NO: 1836080 - RNA, 19 nt, Homo sapiens
  misc_RNA (1)...(19): siRNA sense strand
gaagguggagcucaugaag

SEQ ID NO: 1836081 - RNA, 19 nt, Homo sapiens
  misc_RNA (1)...(19): siRNA sense strand
gaugaagggaggagagaga

SEQ ID NO: 1836082 - RNA, 19 nt, Homo sapiens
  misc_RNA (1)...(19): siRNA sense strand
caugcuaucuggccuacug

SEQ ID NO: 1836083 - RNA, 19 nt, Homo sapiens
  misc_RNA (1)...(19): siRNA sense strand
caaggacagagacuggaua

SEQ ID NO: 1836084 - RNA, 19 nt, Homo sapiens
  misc_RNA (1)...(19): siRNA sense strand
cgaaagcggaggaguguca

SEQ ID NO: 1836085 - RNA, 19 nt, Homo sapiens
  misc_RNA (1)...(19): siRNA sense strand
agguggagcucaugaagga

SEQ ID NO: 1836086 - RNA, 19 nt, Homo sapiens
  misc_RNA (1)...(19): siRNA sense strand
gauaauguuguugcaaaga

SEQ ID NO: 1836087 - RNA, 19 nt, Homo sapiens
  misc_RNA (1)...(19): siRNA sense strand
agaguucagucgagaguuc

SEQ ID NO: 1836088 - RNA, 19 nt, Homo sapiens
  misc_RNA (1)...(19): siRNA sense strand
gcuaucuggccuacuguuu

SEQ ID NO: 1836089 - RNA, 19 nt, Homo sapiens
  misc_RNA (1)...(19): siRNA sense strand
guacccagacccuccaaau

SEQ ID NO: 1836090 - RNA, 19 nt, Homo sapiens
  misc_RNA (1)...(19): siRNA sense strand
caccaggccaugaaucuug

SEQ ID NO: 1836091 - RNA, 19 nt, Homo sapiens
  misc_RNA (1)...(19): siRNA sense strand
gacgaaagcggaggagugu

SEQ ID NO: 1836092 - RNA, 19 nt, Homo sapiens
  misc_RNA (1)...(19): siRNA sense strand
gggcaaguggaacaagaaa

SEQ ID NO: 1836093 - RNA, 19 nt, Homo sapiens
  misc_RNA (1)...(19): siRNA sense strand
ccaacaucguggcagaguu

SEQ ID NO: 1836094 - RNA, 19 nt, Homo sapiens
  misc_RNA (1)...(19): siRNA sense strand
gcagaguucagucgagagu

SEQ ID NO: 1836095 - RNA, 19 nt, Homo sapiens
  misc_RNA (1)...(19): siRNA sense strand
ggucucagaagcagauauc

SEQ ID NO: 1836096 - RNA, 19 nt, Homo sapiens
  misc_RNA (1)...(19): siRNA sense strand
uaauguuguugcaaagaag

SEQ ID NO: 1836097 - RNA, 19 nt, Homo sapiens
  misc_RNA (1)...(19): siRNA sense strand
gucaauccauaucuacaag

SEQ ID NO: 1836098 - RNA, 19 nt, Homo sapiens
  misc_RNA (1)...(19): siRNA sense strand
gaggagugucaauccauau

SEQ ID NO: 1836099 - RNA, 19 nt, Homo sapiens
  misc_RNA (1)...(19): siRNA sense strand
ucuuugauccggaacauga

SEQ ID NO: 1836100 - RNA, 19 nt, Homo sapiens
  misc_RNA (1)...(19): siRNA sense strand
uaaggacuuuagugaggau

SEQ ID NO: 1836101 - RNA, 19 nt, Homo sapiens
  misc_RNA (1)...(19): siRNA sense strand
gcggaggagugucaaucca

SEQ ID NO: 1836102 - RNA, 19 nt, Homo sapiens
  misc_RNA (1)...(19): siRNA sense strand
gaggcugcuucaugguguu

SEQ ID NO: 1836103 - RNA, 19 nt, Homo sapiens
  misc_RNA (1)...(19): siRNA sense strand
gucgagaguuccaguugca

SEQ ID NO: 1836104 - RNA, 19 nt, Homo sapiens
  misc_RNA (1)...(19): siRNA sense strand
cauugaagguggagcucau

SEQ ID NO: 1836105 - RNA, 19 nt, Homo sapiens
  misc_RNA (1)...(19): siRNA sense strand
cagcucaccaggccaugaa

SEQ ID NO: 1836106 - RNA, 19 nt, Homo sapiens
  misc_RNA (1)...(19): siRNA sense strand
aacagaugauggaugucua

SEQ ID NO: 1836107 - RNA, 19 nt, Homo sapiens
  misc_RNA (1)...(19): siRNA sense strand
gcugcuucaugguguuaug

SEQ ID NO: 1836108 - RNA, 19 nt, Homo sapiens
  misc_RNA (1)...(19): siRNA sense strand
acagagacuggauaauguu

SEQ ID NO: 1836109 - RNA, 19 nt, Homo sapiens
  misc_RNA (1)...(19): siRNA sense strand
aaggacagagacuggauaa

SEQ ID NO: 1836110 - RNA, 19 nt, Homo sapiens
  misc_RNA (1)...(19): siRNA sense strand
ggacuuuagugaggaucag

SEQ ID NO: 1836111 - RNA, 19 nt, Homo sapiens
  misc_RNA (1)...(19): siRNA sense strand
gaaagcggaggagugucaa

SEQ ID NO: 1836112 - RNA, 19 nt, Homo sapiens
  misc_RNA (1)...(19): siRNA sense strand
aaacagaugauggaugucu

SEQ ID NO: 1836113 - RNA, 19 nt, Homo sapiens
  misc_RNA (1)...(19): siRNA sense strand
cuggagacaacauuccuaa

SEQ ID NO: 1836114 - RNA, 19 nt, Homo sapiens
  misc_RNA (1)...(19): siRNA sense strand
ggagugucaauccauaucu

SEQ ID NO: 1836115 - RNA, 19 nt, Homo sapiens
  misc_RNA (1)...(19): siRNA sense strand
gcauaaagguauccaguua

SEQ ID NO: 1836116 - RNA, 19 nt, Homo sapiens
  misc_RNA (1)...(19): siRNA sense strand
gcaagaaacugcucaacaa

SEQ ID NO: 1836117 - RNA, 19 nt, Homo sapiens
  misc_RNA (1)...(19): siRNA sense strand
ccaaguggcuaaacaagua

SEQ ID NO: 1836118 - RNA, 19 nt, Homo sapiens
  misc_RNA (1)...(19): siRNA sense strand
ggagagugcuggcuacaug

SEQ ID NO: 1836119 - RNA, 19 nt, Homo sapiens
  misc_RNA (1)...(19): siRNA sense strand
ccagaaagcuacccaucaa

SEQ ID NO: 1836120 - RNA, 19 nt, Homo sapiens
  misc_RNA (1)...(19): siRNA sense strand
agaaugaucucaagagcaa

SEQ ID NO: 1836121 - RNA, 19 nt, Homo sapiens
  misc_RNA (1)...(19): siRNA sense strand
gcacuugucccuccucuau

SEQ ID NO: 1836122 - RNA, 19 nt, Homo sapiens
  misc_RNA (1)...(19): siRNA sense strand
gaccauagccgaugacuac

SEQ ID NO: 1836123 - RNA, 19 nt, Homo sapiens
  misc_RNA (1)...(19): siRNA sense strand
agaaacugcucaacaagug

SEQ ID NO: 1836124 - RNA, 19 nt, Homo sapiens
  misc_RNA (1)...(19): siRNA sense strand
cuacucagaucccuuugau

SEQ ID NO: 1836125 - RNA, 19 nt, Homo sapiens
  misc_RNA (1)...(19): siRNA sense strand
cacagaggaucaugacaga

SEQ ID NO: 1836126 - RNA, 19 nt, Homo sapiens
  misc_RNA (1)...(19): siRNA sense strand
cauagccgaugacuacuca

SEQ ID NO: 1836127 - RNA, 19 nt, Homo sapiens
  misc_RNA (1)...(19): siRNA sense strand
cggaagucauccacuacua

SEQ ID NO: 1836128 - RNA, 19 nt, Homo sapiens
  misc_RNA (1)...(19): siRNA sense strand
aaagguauccaguuauaug

SEQ ID NO: 1836129 - RNA, 19 nt, Homo sapiens
  misc_RNA (1)...(19): siRNA sense strand
ugacuacucagaucccuuu

SEQ ID NO: 1836130 - RNA, 19 nt, Homo sapiens
  misc_RNA (1)...(19): siRNA sense strand
gaaggacaaggugaccaua

SEQ ID NO: 1836131 - RNA, 19 nt, Homo sapiens
  misc_RNA (1)...(19): siRNA sense strand
caaaggggcugagcacuug

SEQ ID NO: 1836132 - RNA, 19 nt, Homo sapiens
  misc_RNA (1)...(19): siRNA sense strand
gaagucauccacuacuaca

SEQ ID NO: 1836133 - RNA, 19 nt, Homo sapiens
  misc_RNA (1)...(19): siRNA sense strand
gguauccaguuauaugaca

SEQ ID NO: 1836134 - RNA, 19 nt, Homo sapiens
  misc_RNA (1)...(19): siRNA sense strand
gaggaucaugacagaauuu

SEQ ID NO: 1836135 - RNA, 19 nt, Homo sapiens
  misc_RNA (1)...(19): siRNA sense strand
uggagaagcaaauauggua

SEQ ID NO: 1836136 - RNA, 19 nt, Homo sapiens
  misc_RNA (1)...(19): siRNA sense strand
gaaccugaaggccaaagug

SEQ ID NO: 1836137 - RNA, 19 nt, Homo sapiens
  misc_RNA (1)...(19): siRNA sense strand
gaaagcuacccaucaaagg

SEQ ID NO: 1836138 - RNA, 19 nt, Homo sapiens
  misc_RNA (1)...(19): siRNA sense strand
cagaggaucaugacagaau

SEQ ID NO: 1836139 - RNA, 19 nt, Homo sapiens
  misc_RNA (1)...(19): siRNA sense strand
gcacaugaaacuggccaaa

SEQ ID NO: 1836140 - RNA, 19 nt, Homo sapiens
  misc_RNA (1)...(19): siRNA sense strand
gcucgucgcugcgcaaacu

SEQ ID NO: 1836141 - RNA, 19 nt, Homo sapiens
  misc_RNA (1)...(19): siRNA sense strand
ggagaagcaaauaugguau

SEQ ID NO: 1836142 - RNA, 19 nt, Homo sapiens
  misc_RNA (1)...(19): siRNA sense strand
agaggaucaugacagaauu

SEQ ID NO: 1836143 - RNA, 19 nt, Homo sapiens
  misc_RNA (1)...(19): siRNA sense strand
gcagaggagacgccgagaa

SEQ ID NO: 1836144 - RNA, 19 nt, Homo sapiens
  misc_RNA (1)...(19): siRNA sense strand
ggcaagaaacugcucaaca

SEQ ID NO: 1836145 - RNA, 19 nt, Homo sapiens
  misc_RNA (1)...(19): siRNA sense strand
gaaacuggccaaaaccaaa

SEQ ID NO: 1836146 - RNA, 19 nt, Homo sapiens
  misc_RNA (1)...(19): siRNA sense strand
gaucaugacagaauuucag

SEQ ID NO: 1836147 - RNA, 19 nt, Homo sapiens
  misc_RNA (1)...(19): siRNA sense strand
gccgaugacuacucagauc

SEQ ID NO: 1836148 - RNA, 19 nt, Homo sapiens
  misc_RNA (1)...(19): siRNA sense strand
ccugaaggccaaaguguug

SEQ ID NO: 1836149 - RNA, 19 nt, Homo sapiens
  misc_RNA (1)...(19): siRNA sense strand
ggaagucauccacuacuac

SEQ ID NO: 1836150 - RNA, 19 nt, Homo sapiens
  misc_RNA (1)...(19): siRNA sense strand
agaagcaaauaugguauca

SEQ ID NO: 1836151 - RNA, 19 nt, Homo sapiens
  misc_RNA (1)...(19): siRNA sense strand
gagaagcaaauaugguauc

SEQ ID NO: 1836152 - RNA, 19 nt, Homo sapiens
  misc_RNA (1)...(19): siRNA sense strand
ggucccagcauaaagguau

SEQ ID NO: 1836153 - RNA, 19 nt, Homo sapiens
  misc_RNA (1)...(19): siRNA sense strand
ucccggaagucauccacua

SEQ ID NO: 1836154 - RNA, 19 nt, Homo sapiens
  misc_RNA (1)...(19): siRNA sense strand
ggaacagccagaccagcaa

SEQ ID NO: 1836155 - RNA, 19 nt, Homo sapiens
  misc_RNA (1)...(19): siRNA sense strand
caagaaacugcucaacaag

SEQ ID NO: 1836156 - RNA, 19 nt, Homo sapiens
  misc_RNA (1)...(19): siRNA sense strand
caagcaccgccucaucaaa

SEQ ID NO: 1836157 - RNA, 19 nt, Homo sapiens
  misc_RNA (1)...(19): siRNA sense strand
ggcaacagcaagaccaaga

SEQ ID NO: 1836158 - RNA, 19 nt, Homo sapiens
  misc_RNA (1)...(19): siRNA sense strand
ggcgcgagauuccuagcuu

SEQ ID NO: 1836159 - RNA, 19 nt, Homo sapiens
  misc_RNA (1)...(19): siRNA sense strand
ccaagaaugaucucaagag

SEQ ID NO: 1836160 - RNA, 19 nt, Homo sapiens
  misc_RNA (1)...(19): siRNA sense strand
uaaacaaguacuucagcuu

SEQ ID NO: 1836161 - RNA, 19 nt, Homo sapiens
  misc_RNA (1)...(19): siRNA sense strand
cuacaccaccagaaagcua

SEQ ID NO: 1836162 - RNA, 19 nt, Homo sapiens
  misc_RNA (1)...(19): siRNA sense strand
ccuuugaugccaagaauga

SEQ ID NO: 1836163 - RNA, 19 nt, Homo sapiens
  misc_RNA (1)...(19): siRNA sense strand
ccaaaaccaaagagaaaua

SEQ ID NO: 1836164 - RNA, 19 nt, Homo sapiens
  misc_RNA (1)...(19): siRNA sense strand
gcccuggcagcacaguuua

SEQ ID NO: 1836165 - RNA, 19 nt, Homo sapiens
  misc_RNA (1)...(19): siRNA sense strand
cagaaagcuacccaucaaa

SEQ ID NO: 1836166 - RNA, 19 nt, Homo sapiens
  misc_RNA (1)...(19): siRNA sense strand
ccaagcaccgccucaucaa

SEQ ID NO: 1836167 - RNA, 19 nt, Homo sapiens
  misc_RNA (1)...(19): siRNA sense strand
aaacaugggagcccugagu

SEQ ID NO: 1836168 - RNA, 19 nt, Homo sapiens
  misc_RNA (1)...(19): siRNA sense strand
caagagcaaagcaggaaag

SEQ ID NO: 1836169 - RNA, 19 nt, Homo sapiens
  misc_RNA (1)...(19): siRNA sense strand
agaaagcuacccaucaaag

SEQ ID NO: 1836170 - RNA, 19 nt, Homo sapiens
  misc_RNA (1)...(19): siRNA sense strand
gcuacauggagcccuauga

SEQ ID NO: 1836171 - RNA, 19 nt, Homo sapiens
  misc_RNA (1)...(19): siRNA sense strand
ggccaaaaccaaagagaaa

SEQ ID NO: 1836172 - RNA, 19 nt, Homo sapiens
  misc_RNA (1)...(19): siRNA sense strand
ugccaagaaugaucucaag

SEQ ID NO: 1836173 - RNA, 19 nt, Homo sapiens
  misc_RNA (1)...(19): siRNA sense strand
aaccaaagagaaauacguu

SEQ ID NO: 1836174 - RNA, 19 nt, Homo sapiens
  misc_RNA (1)...(19): siRNA sense strand
gagaaccugcugcgacucu

SEQ ID NO: 1836175 - RNA, 19 nt, Homo sapiens
  misc_RNA (1)...(19): siRNA sense strand
aguguccggucccagcaua

SEQ ID NO: 1836176 - RNA, 19 nt, Homo sapiens
  misc_RNA (1)...(19): siRNA sense strand
gcccuccguucgacagugu

SEQ ID NO: 1836177 - RNA, 19 nt, Homo sapiens
  misc_RNA (1)...(19): siRNA sense strand
gcaacagcaagaccaagag

SEQ ID NO: 1836178 - RNA, 19 nt, Homo sapiens
  misc_RNA (1)...(19): siRNA sense strand
cagaggagacgccgagaac

SEQ ID NO: 1836179 - RNA, 19 nt, Homo sapiens
  misc_RNA (1)...(19): siRNA sense strand
gaggcacagaggaucauga

SEQ ID NO: 1836180 - RNA, 19 nt, Homo sapiens
  misc_RNA (1)...(19): siRNA sense strand
caaaauaucugccaguuua

SEQ ID NO: 1836181 - RNA, 19 nt, Homo sapiens
  misc_RNA (1)...(19): siRNA sense strand
uaacugcccugcauuguaa

SEQ ID NO: 1836182 - RNA, 19 nt, Homo sapiens
  misc_RNA (1)...(19): siRNA sense strand
caacaaagaugacguaacu

SEQ ID NO: 1836183 - RNA, 19 nt, Homo sapiens
  misc_RNA (1)...(19): siRNA sense strand
caacagcuguggaaacaaa

SEQ ID NO: 1836184 - RNA, 19 nt, Homo sapiens
  misc_RNA (1)...(19): siRNA sense strand
gaauggaaguuucaaggaa

SEQ ID NO: 1836185 - RNA, 19 nt, Homo sapiens
  misc_RNA (1)...(19): siRNA sense strand
uaacaaagcuuuacuugcu

SEQ ID NO: 1836186 - RNA, 19 nt, Homo sapiens
  misc_RNA (1)...(19): siRNA sense strand
caauaacucucucuccuuu

SEQ ID NO: 1836187 - RNA, 19 nt, Homo sapiens
  misc_RNA (1)...(19): siRNA sense strand
gagaaugccuugaagacaa

SEQ ID NO: 1836188 - RNA, 19 nt, Homo sapiens
  misc_RNA (1)...(19): siRNA sense strand
gagcaucucuuaccugugu

SEQ ID NO: 1836189 - RNA, 19 nt, Homo sapiens
  misc_RNA (1)...(19): siRNA sense strand
ggaguagaguuuaagcuuu

SEQ ID NO: 1836190 - RNA, 19 nt, Homo sapiens
  misc_RNA (1)...(19): siRNA sense strand
gaaacucccaagaugauua

SEQ ID NO: 1836191 - RNA, 19 nt, Homo sapiens
  misc_RNA (1)...(19): siRNA sense strand
caugguaucugcauuaguu

SEQ ID NO: 1836192 - RNA, 19 nt, Homo sapiens
  misc_RNA (1)...(19): siRNA sense strand
gcucauuuguccuugauaa

SEQ ID NO: 1836193 - RNA, 19 nt, Homo sapiens
  misc_RNA (1)...(19): siRNA sense strand
ccaaaguguuagccaauaa

SEQ ID NO: 1836194 - RNA, 19 nt, Homo sapiens
  misc_RNA (1)...(19): siRNA sense strand
gaagaaggguggaaaaguu

SEQ ID NO: 1836195 - RNA, 19 nt, Homo sapiens
  misc_RNA (1)...(19): siRNA sense strand
gcaaauaacaucauuacca

SEQ ID NO: 1836196 - RNA, 19 nt, Homo sapiens
  misc_RNA (1)...(19): siRNA sense strand
gaggaggcuuugcaacuuu

SEQ ID NO: 1836197 - RNA, 19 nt, Homo sapiens
  misc_RNA (1)...(19): siRNA sense strand
ccaaagcucuuaguaaaca

SEQ ID NO: 1836198 - RNA, 19 nt, Homo sapiens
  misc_RNA (1)...(19): siRNA sense strand
guaucugccucuacaagua

SEQ ID NO: 1836199 - RNA, 19 nt, Homo sapiens
  misc_RNA (1)...(19): siRNA sense strand
gaacuggccaucauucaug

SEQ ID NO: 1836200 - RNA, 19 nt, Homo sapiens
  misc_RNA (1)...(19): siRNA sense strand
cuacauacauucggaagaa

SEQ ID NO: 1836201 - RNA, 19 nt, Homo sapiens
  misc_RNA (1)...(19): siRNA sense strand
uagaggaguuaaagcauaa

SEQ ID NO: 1836202 - RNA, 19 nt, Homo sapiens
  misc_RNA (1)...(19): siRNA sense strand
caaggaagcuuugaauguc

SEQ ID NO: 1836203 - RNA, 19 nt, Homo sapiens
  misc_RNA (1)...(19): siRNA sense strand
gaagaaagguggaaaaggu

SEQ ID NO: 1836204 - RNA, 19 nt, Homo sapiens
  misc_RNA (1)...(19): siRNA sense strand
gaacaaugccgcaaaauau

SEQ ID NO: 1836205 - RNA, 19 nt, Homo sapiens
  misc_RNA (1)...(19): siRNA sense strand
gaaacaacuacaagcuaua

SEQ ID NO: 1836206 - RNA, 19 nt, Homo sapiens
  misc_RNA (1)...(19): siRNA sense strand
caucaauacucacaccaaa

SEQ ID NO: 1836207 - RNA, 19 nt, Homo sapiens
  misc_RNA (1)...(19): siRNA sense strand
gcccagcucugccgugaaa

SEQ ID NO: 1836208 - RNA, 19 nt, Homo sapiens
  misc_RNA (1)...(19): siRNA sense strand
gaguagaguuuaagcuuuc

SEQ ID NO: 1836209 - RNA, 19 nt, Homo sapiens
  misc_RNA (1)...(19): siRNA sense strand
gaacagaggaggcuuugca

SEQ ID NO: 1836210 - RNA, 19 nt, Homo sapiens
  misc_RNA (1)...(19): siRNA sense strand
gaaccugggccuccaagaa

SEQ ID NO: 1836211 - RNA, 19 nt, Homo sapiens
  misc_RNA (1)...(19): siRNA sense strand
gaaggagcuuuauggacaa

SEQ ID NO: 1836212 - RNA, 19 nt, Homo sapiens
  misc_RNA (1)...(19): siRNA sense strand
gaacaaggacagggagauu

SEQ ID NO: 1836213 - RNA, 19 nt, Homo sapiens
  misc_RNA (1)...(19): siRNA sense strand
agccaaagcucuuaguaaa

SEQ ID NO: 1836214 - RNA, 19 nt, Homo sapiens
  misc_RNA (1)...(19): siRNA sense strand
gaucaacaaagaugacgua

SEQ ID NO: 1836215 - RNA, 19 nt, Homo sapiens
  misc_RNA (1)...(19): siRNA sense strand
ggaagaaggaggcaauuag

SEQ ID NO: 1836216 - RNA, 19 nt, Homo sapiens
  misc_RNA (1)...(19): siRNA sense strand
gcugcaaacuucaaacuca

SEQ ID NO: 1836217 - RNA, 19 nt, Homo sapiens
  misc_RNA (1)...(19): siRNA sense strand
agaaacaacuacaagcuau

SEQ ID NO: 1836218 - RNA, 19 nt, Homo sapiens
  misc_RNA (1)...(19): siRNA sense strand
ccaagaagaaagugaaauu

SEQ ID NO: 1836219 - RNA, 19 nt, Homo sapiens
  misc_RNA (1)...(19): siRNA sense strand
gaauugagaaugccuugaa

SEQ ID NO: 1836220 - RNA, 19 nt, Homo sapiens
  misc_RNA (1)...(19): siRNA sense strand
auagagaucucguccgaaa

SEQ ID NO: 1836221 - RNA, 19 nt, Homo sapiens
  misc_RNA (1)...(19): siRNA sense strand
gcucaaagcaauugggaaa

SEQ ID NO: 1836222 - RNA, 19 nt, Homo sapiens
  misc_RNA (1)...(19): siRNA sense strand
gaaaaugcagcugaaauua

SEQ ID NO: 1836223 - RNA, 19 nt, Homo sapiens
  misc_RNA (1)...(19): siRNA sense strand
gagaaagccaaagcucuua

SEQ ID NO: 1836224 - RNA, 19 nt, Homo sapiens
  misc_RNA (1)...(19): siRNA sense strand
cacaagcuauccaguggua

SEQ ID NO: 1836225 - RNA, 19 nt, Homo sapiens
  misc_RNA (1)...(19): siRNA sense strand
aguuuaagcuuuccaagaa

SEQ ID NO: 1836226 - RNA, 19 nt, Homo sapiens
  misc_RNA (1)...(19): siRNA sense strand
gaagaaggaggcaauuagu

SEQ ID NO: 1836227 - RNA, 19 nt, Homo sapiens
  misc_RNA (1)...(19): siRNA sense strand
uaagagaagcugcaaacuu

SEQ ID NO: 1836228 - RNA, 19 nt, Homo sapiens
  misc_RNA (1)...(19): siRNA sense strand
gcuauccagugguaucaaa

SEQ ID NO: 1836229 - RNA, 19 nt, Homo sapiens
  misc_RNA (1)...(19): siRNA sense strand
guaacugcccugcauugua

SEQ ID NO: 1836230 - RNA, 19 nt, Homo sapiens
  misc_RNA (1)...(19): siRNA sense strand
guauagccaugaagaagau

SEQ ID NO: 1836231 - RNA, 19 nt, Homo sapiens
  misc_RNA (1)...(19): siRNA sense strand
auagaggaguuaaagcaua

SEQ ID NO: 1836232 - RNA, 19 nt, Homo sapiens
  misc_RNA (1)...(19): siRNA sense strand
cggaaggaguagaguuuaa

SEQ ID NO: 1836233 - RNA, 19 nt, Homo sapiens
  misc_RNA (1)...(19): siRNA sense strand
ggaacgcuaugaugaaugc

SEQ ID NO: 1836234 - RNA, 19 nt, Homo sapiens
  misc_RNA (1)...(19): siRNA sense strand
aaaugcagcugaaauuaag

SEQ ID NO: 1836235 - RNA, 19 nt, Homo sapiens
  misc_RNA (1)...(19): siRNA sense strand
ucaagaccgucaauaagau

SEQ ID NO: 1836236 - RNA, 19 nt, Homo sapiens
  misc_RNA (1)...(19): siRNA sense strand
aaaccaggcugaacaaugc

SEQ ID NO: 1836237 - RNA, 19 nt, Homo sapiens
  misc_RNA (1)...(19): siRNA sense strand
aagcuuuacuugcuaugua

SEQ ID NO: 1836238 - RNA, 19 nt, Homo sapiens
  misc_RNA (1)...(19): siRNA sense strand
caacagaugugggauuacu

SEQ ID NO: 1836239 - RNA, 19 nt, Homo sapiens
  misc_RNA (1)...(19): siRNA sense strand
gacaaguguuauaccguuu

SEQ ID NO: 1836240 - RNA, 19 nt, Homo sapiens
  misc_RNA (1)...(19): siRNA sense strand
aaagaaacagcaacagaaa

SEQ ID NO: 1836241 - RNA, 19 nt, Homo sapiens
  misc_RNA (1)...(19): siRNA sense strand
ugacguaacugcccugcau

SEQ ID NO: 1836242 - RNA, 19 nt, Homo sapiens
  misc_RNA (1)...(19): siRNA sense strand
guccgaaacucccaagaug

SEQ ID NO: 1836243 - RNA, 19 nt, Homo sapiens
  misc_RNA (1)...(19): siRNA sense strand
ccauugaggucuucacaca

SEQ ID NO: 1836244 - RNA, 19 nt, Homo sapiens
  misc_RNA (1)...(19): siRNA sense strand
caagaccgucaauaagaua

SEQ ID NO: 1836245 - RNA, 19 nt, Homo sapiens
  misc_RNA (1)...(19): siRNA sense strand
ggaggcaauuagugaccua

SEQ ID NO: 1836246 - RNA, 19 nt, Homo sapiens
  misc_RNA (1)...(19): siRNA sense strand
gcuuagcaguguauagaga

SEQ ID NO: 1836247 - RNA, 19 nt, Homo sapiens
  misc_RNA (1)...(19): siRNA sense strand
gcuuauuucugcuuacuca

SEQ ID NO: 1836248 - RNA, 19 nt, Homo sapiens
  misc_RNA (1)...(19): siRNA sense strand
gcauagaggaguuaaagca

SEQ ID NO: 1836249 - RNA, 19 nt, Homo sapiens
  misc_RNA (1)...(19): siRNA sense strand
auaacucucucuccuuuga

SEQ ID NO: 1836250 - RNA, 19 nt, Homo sapiens
  misc_RNA (1)...(19): siRNA sense strand
aaagaaggaucagauugga

SEQ ID NO: 1836251 - RNA, 19 nt, Homo sapiens
  misc_RNA (1)...(19): siRNA sense strand
gauaagagaagcugcaaac

SEQ ID NO: 1836252 - RNA, 19 nt, Homo sapiens
  misc_RNA (1)...(19): siRNA sense strand
gaaccgguauggccagaac

SEQ ID NO: 1836253 - RNA, 19 nt, Homo sapiens
  misc_RNA (1)...(19): siRNA sense strand
uagagcugcuucaggaauu

SEQ ID NO: 1836254 - RNA, 19 nt, Homo sapiens
  misc_RNA (1)...(19): siRNA sense strand
acgcuaugaugaaugcuua

SEQ ID NO: 1836255 - RNA, 19 nt, Homo sapiens
  misc_RNA (1)...(19): siRNA sense strand
ugaaugucaucaauacuca

SEQ ID NO: 1836256 - RNA, 19 nt, Homo sapiens
  misc_RNA (1)...(19): siRNA sense strand
gagaagcauagaggaguua

SEQ ID NO: 1836257 - RNA, 19 nt, Homo sapiens
  misc_RNA (1)...(19): siRNA sense strand
accaacagaugugggauua

SEQ ID NO: 1836258 - RNA, 19 nt, Homo sapiens
  misc_RNA (1)...(19): siRNA sense strand
uacuacagaucaacaaaga

SEQ ID NO: 1836259 - RNA, 19 nt, Homo sapiens
  misc_RNA (1)...(19): siRNA sense strand
gcaacaguaucugccucua

SEQ ID NO: 1836260 - RNA, 19 nt, Homo sapiens
  misc_RNA (1)...(19): siRNA sense strand
uacaacagcuguggaaaca

SEQ ID NO: 1836261 - RNA, 19 nt, Homo sapiens
  misc_RNA (1)...(19): siRNA sense strand
agaaggaggcaauuaguga

SEQ ID NO: 1836262 - RNA, 19 nt, Homo sapiens
  misc_RNA (1)...(19): siRNA sense strand
gaaguuucaaggaagcuuu

SEQ ID NO: 1836263 - RNA, 19 nt, Homo sapiens
  misc_RNA (1)...(19): siRNA sense strand
gaccauggcacaguugaaa

SEQ ID NO: 1836264 - RNA, 19 nt, Homo sapiens
  misc_RNA (1)...(19): siRNA sense strand
caaaccaggcugaacaaug

SEQ ID NO: 1836265 - RNA, 19 nt, Homo sapiens
  misc_RNA (1)...(19): siRNA sense strand
guaaagugguaugccuuau

SEQ ID NO: 1836266 - RNA, 19 nt, Homo sapiens
  misc_RNA (1)...(19): siRNA sense strand
agaaggaucagauuggaaa

SEQ ID NO: 1836267 - RNA, 19 nt, Homo sapiens
  misc_RNA (1)...(19): siRNA sense strand
ucucuuaccuguguuaauc

SEQ ID NO: 1836268 - RNA, 19 nt, Homo sapiens
  misc_RNA (1)...(19): siRNA sense strand
gaccgucaauaagauacua

SEQ ID NO: 1836269 - RNA, 19 nt, Homo sapiens
  misc_RNA (1)...(19): siRNA sense strand
gaguacaggcugaacagaa

SEQ ID NO: 1836270 - RNA, 19 nt, Homo sapiens
  misc_RNA (1)...(19): siRNA sense strand
ggagauagucaaccaaagg

SEQ ID NO: 1836271 - RNA, 19 nt, Homo sapiens
  misc_RNA (1)...(19): siRNA sense strand
ggcaauuagugaccuacaa

SEQ ID NO: 1836272 - RNA, 19 nt, Homo sapiens
  misc_RNA (1)...(19): siRNA sense strand
ugagaagcauagaggaguu

SEQ ID NO: 1836273 - RNA, 19 nt, Homo sapiens
  misc_RNA (1)...(19): siRNA sense strand
ugucuaauauugagaagca

SEQ ID NO: 1836274 - RNA, 19 nt, Homo sapiens
  misc_RNA (1)...(19): siRNA sense strand
caacuacaagcuauagaau

SEQ ID NO: 1836275 - RNA, 19 nt, Homo sapiens
  misc_RNA (1)...(19): siRNA sense strand
cuacagaucaacaaagaug

SEQ ID NO: 1836276 - RNA, 19 nt, Homo sapiens
  misc_RNA (1)...(19): siRNA sense strand
ccaagaugauuaugaugag

SEQ ID NO: 1836277 - RNA, 19 nt, Homo sapiens
  misc_RNA (1)...(19): siRNA sense strand
gcagaacuggccaucauuc

SEQ ID NO: 1836278 - RNA, 19 nt, Homo sapiens
  misc_RNA (1)...(19): siRNA sense strand
gaguuuaagcuuuccaaga

SEQ ID NO: 1836279 - RNA, 19 nt, Homo sapiens
  misc_RNA (1)...(19): siRNA sense strand
ucauuaccauuaacaagga

SEQ ID NO: 1836280 - RNA, 19 nt, Homo sapiens
  misc_RNA (1)...(19): siRNA sense strand
gaagagauauggacuccua

SEQ ID NO: 1836281 - RNA, 19 nt, Homo sapiens
  misc_RNA (1)...(19): siRNA sense strand
gcaguaaucugaauauuuc

SEQ ID NO: 1836282 - RNA, 19 nt, Homo sapiens
  misc_RNA (1)...(19): siRNA sense strand
gaugguaccuuuccacuuu

SEQ ID NO: 1836283 - RNA, 19 nt, Homo sapiens
  misc_RNA (1)...(19): siRNA sense strand
caacagcucuggcaagaaa

SEQ ID NO: 1836284 - RNA, 19 nt, Homo sapiens
  misc_RNA (1)...(19): siRNA sense strand
gaagcaagaugauaccaaa

SEQ ID NO: 1836285 - RNA, 19 nt, Homo sapiens
  misc_RNA (1)...(19): siRNA sense strand
gcagugaucucuggauuaa

SEQ ID NO: 1836286 - RNA, 19 nt, Homo sapiens
  misc_RNA (1)...(19): siRNA sense strand
ugaagaagguguaacauug

SEQ ID NO: 1836287 - RNA, 19 nt, Homo sapiens
  misc_RNA (1)...(19): siRNA sense strand
gaacaagacagacagcuaa

SEQ ID NO: 1836288 - RNA, 19 nt, Homo sapiens
  misc_RNA (1)...(19): siRNA sense strand
ucaaguaaaccaccuauua

SEQ ID NO: 1836289 - RNA, 19 nt, Homo sapiens
  misc_RNA (1)...(19): siRNA sense strand
gaaacacaguccagaaguu

SEQ ID NO: 1836290 - RNA, 19 nt, Homo sapiens
  misc_RNA (1)...(19): siRNA sense strand
gagccugacucucaaauga

SEQ ID NO: 1836291 - RNA, 19 nt, Homo sapiens
  misc_RNA (1)...(19): siRNA sense strand
caacauugcuguggaagaa

SEQ ID NO: 1836292 - RNA, 19 nt, Homo sapiens
  misc_RNA (1)...(19): siRNA sense strand
caagagaaaugauaguuca

SEQ ID NO: 1836293 - RNA, 19 nt, Homo sapiens
  misc_RNA (1)...(19): siRNA sense strand
gaauuuggcugucuggaau

SEQ ID NO: 1836294 - RNA, 19 nt, Homo sapiens
  misc_RNA (1)...(19): siRNA sense strand
guaaagaaccuuaaaccaa

SEQ ID NO: 1836295 - RNA, 19 nt, Homo sapiens
  misc_RNA (1)...(19): siRNA sense strand
ugacuucaguucagcuuua

SEQ ID NO: 1836296 - RNA, 19 nt, Homo sapiens
  misc_RNA (1)...(19): siRNA sense strand
gaauuuaaccagccacuuu

SEQ ID NO: 1836297 - RNA, 19 nt, Homo sapiens
  misc_RNA (1)...(19): siRNA sense strand
gguagugcaucuucauuaa

SEQ ID NO: 1836298 - RNA, 19 nt, Homo sapiens
  misc_RNA (1)...(19): siRNA sense strand
gguaugggcuugcuguuug

SEQ ID NO: 1836299 - RNA, 19 nt, Homo sapiens
  misc_RNA (1)...(19): siRNA sense strand
caaguaaaccaccuauuaa

SEQ ID NO: 1836300 - RNA, 19 nt, Homo sapiens
  misc_RNA (1)...(19): siRNA sense strand
cgaagaguauccuauaaga

SEQ ID NO: 1836301 - RNA, 19 nt, Homo sapiens
  misc_RNA (1)...(19): siRNA sense strand
gagaagaccauccgacuug

SEQ ID NO: 1836302 - RNA, 19 nt, Homo sapiens
  misc_RNA (1)...(19): siRNA sense strand
gcaagaccgccuucacaua

SEQ ID NO: 1836303 - RNA, 19 nt, Homo sapiens
  misc_RNA (1)...(19): siRNA sense strand
caauauaguccgcuaaauu

SEQ ID NO: 1836304 - RNA, 19 nt, Homo sapiens
  misc_RNA (1)...(19): siRNA sense strand
ggauggcaauuucauagaa

SEQ ID NO: 1836305 - RNA, 19 nt, Homo sapiens
  misc_RNA (1)...(19): siRNA sense strand
caguaacucuagcaaauaa

SEQ ID NO: 1836306 - RNA, 19 nt, Homo sapiens
  misc_RNA (1)...(19): siRNA sense strand
gaagaagguguaacauuga

SEQ ID NO: 1836307 - RNA, 19 nt, Homo sapiens
  misc_RNA (1)...(19): siRNA sense strand
gauauggacuccuacaaag

SEQ ID NO: 1836308 - RNA, 19 nt, Homo sapiens
  misc_RNA (1)...(19): siRNA sense strand
gaagacaaauggaguuggu

SEQ ID NO: 1836309 - RNA, 19 nt, Homo sapiens
  misc_RNA (1)...(19): siRNA sense strand
aaacacaguuggauccauu

SEQ ID NO: 1836310 - RNA, 19 nt, Homo sapiens
  misc_RNA (1)...(19): siRNA sense strand
acacgcaaauuguuacuuu

SEQ ID NO: 1836311 - RNA, 19 nt, Homo sapiens
  misc_RNA (1)...(19): siRNA sense strand
gcucuacagugccauauau

SEQ ID NO: 1836312 - RNA, 19 nt, Homo sapiens
  misc_RNA (1)...(19): siRNA sense strand
ggaguugguuucuguggaa

SEQ ID NO: 1836313 - RNA, 19 nt, Homo sapiens
  misc_RNA (1)...(19): siRNA sense strand
cuacaaagcagugacaaua

SEQ ID NO: 1836314 - RNA, 19 nt, Homo sapiens
  misc_RNA (1)...(19): siRNA sense strand
gagaaaagguguaagcauu

SEQ ID NO: 1836315 - RNA, 19 nt, Homo sapiens
  misc_RNA (1)...(19): siRNA sense strand
gcaaggagcaaacacaguu

SEQ ID NO: 1836316 - RNA, 19 nt, Homo sapiens
  misc_RNA (1)...(19): siRNA sense strand
guaggcaccuucuuagaug

SEQ ID NO: 1836317 - RNA, 19 nt, Homo sapiens
  misc_RNA (1)...(19): siRNA sense strand
gcagaugaauagcaugaau

SEQ ID NO: 1836318 - RNA, 19 nt, Homo sapiens
  misc_RNA (1)...(19): siRNA sense strand
cuacagaaauccaaagcuu

SEQ ID NO: 1836319 - RNA, 19 nt, Homo sapiens
  misc_RNA (1)...(19): siRNA sense strand
caagcaggaugguaccuuu

SEQ ID NO: 1836320 - RNA, 19 nt, Homo sapiens
  misc_RNA (1)...(19): siRNA sense strand
guccagcccuguacuguaa

SEQ ID NO: 1836321 - RNA, 19 nt, Homo sapiens
  misc_RNA (1)...(19): siRNA sense strand
aaacgaagaguauccuaua

SEQ ID NO: 1836322 - RNA, 19 nt, Homo sapiens
  misc_RNA (1)...(19): siRNA sense strand
ggaugaaacacgcaaauug

SEQ ID NO: 1836323 - RNA, 19 nt, Homo sapiens
  misc_RNA (1)...(19): siRNA sense strand
gacaguagaucgcuuugau

SEQ ID NO: 1836324 - RNA, 19 nt, Homo sapiens
  misc_RNA (1)...(19): siRNA sense strand
ggaagaugccaauacauga

SEQ ID NO: 1836325 - RNA, 19 nt, Homo sapiens
  misc_RNA (1)...(19): siRNA sense strand
ccagugaggacaugaauuu

SEQ ID NO: 1836326 - RNA, 19 nt, Homo sapiens
  misc_RNA (1)...(19): siRNA sense strand
guaccugaaugccuagaaa

SEQ ID NO: 1836327 - RNA, 19 nt, Homo sapiens
  misc_RNA (1)...(19): siRNA sense strand
uaagaagccuuggaguaaa

SEQ ID NO: 1836328 - RNA, 19 nt, Homo sapiens
  misc_RNA (1)...(19): siRNA sense strand
ucacgacucugguguugaa

SEQ ID NO: 1836329 - RNA, 19 nt, Homo sapiens
  misc_RNA (1)...(19): siRNA sense strand
gaucacgacucugguguug

SEQ ID NO: 1836330 - RNA, 19 nt, Homo sapiens
  misc_RNA (1)...(19): siRNA sense strand
gcaguaacucuagcaaaua

SEQ ID NO: 1836331 - RNA, 19 nt, Homo sapiens
  misc_RNA (1)...(19): siRNA sense strand
ggaaauuucaucauaguuc

SEQ ID NO: 1836332 - RNA, 19 nt, Homo sapiens
  misc_RNA (1)...(19): siRNA sense strand
cuaagaagccuuggaguaa

SEQ ID NO: 1836333 - RNA, 19 nt, Homo sapiens
  misc_RNA (1)...(19): siRNA sense strand
uggaaauggugaauaauga

SEQ ID NO: 1836334 - RNA, 19 nt, Homo sapiens
  misc_RNA (1)...(19): siRNA sense strand
caaaguucauacucaagaa

SEQ ID NO: 1836335 - RNA, 19 nt, Homo sapiens
  misc_RNA (1)...(19): siRNA sense strand
uaaagcagaugaauagcau

SEQ ID NO: 1836336 - RNA, 19 nt, Homo sapiens
  misc_RNA (1)...(19): siRNA sense strand
caagacugguggacaaaga

SEQ ID NO: 1836337 - RNA, 19 nt, Homo sapiens
  misc_RNA (1)...(19): siRNA sense strand
caagaccgccuucacauau

SEQ ID NO: 1836338 - RNA, 19 nt, Homo sapiens
  misc_RNA (1)...(19): siRNA sense strand
aaucugaucccaagguuua

SEQ ID NO: 1836339 - RNA, 19 nt, Homo sapiens
  misc_RNA (1)...(19): siRNA sense strand
ggaaucugaucccaagguu

SEQ ID NO: 1836340 - RNA, 19 nt, Homo sapiens
  misc_RNA (1)...(19): siRNA sense strand
gcaaaguucauacucaaga

SEQ ID NO: 1836341 - RNA, 19 nt, Homo sapiens
  misc_RNA (1)...(19): siRNA sense strand
caacgcagauacgccagua

SEQ ID NO: 1836342 - RNA, 19 nt, Homo sapiens
  misc_RNA (1)...(19): siRNA sense strand
ugauguaccuguguucuuu

SEQ ID NO: 1836343 - RNA, 19 nt, Homo sapiens
  misc_RNA (1)...(19): siRNA sense strand
caguugauauucccaguuu

SEQ ID NO: 1836344 - RNA, 19 nt, Homo sapiens
  misc_RNA (1)...(19): siRNA sense strand
caaaugaagcaagaugaua

SEQ ID NO: 1836345 - RNA, 19 nt, Homo sapiens
  misc_RNA (1)...(19): siRNA sense strand
gaagauuucuaagauccaa

SEQ ID NO: 1836346 - RNA, 19 nt, Homo sapiens
  misc_RNA (1)...(19): siRNA sense strand
guaaggcuuccaagaauuu

SEQ ID NO: 1836347 - RNA, 19 nt, Homo sapiens
  misc_RNA (1)...(19): siRNA sense strand
gagcaguaaucugaauauu

SEQ ID NO: 1836348 - RNA, 19 nt, Homo sapiens
  misc_RNA (1)...(19): siRNA sense strand
aaugauaguucacagugua

SEQ ID NO: 1836349 - RNA, 19 nt, Homo sapiens
  misc_RNA (1)...(19): siRNA sense strand
ggauuaaacugcaugucau

SEQ ID NO: 1836350 - RNA, 19 nt, Homo sapiens
  misc_RNA (1)...(19): siRNA sense strand
ccagaugaauaccagguuu

SEQ ID NO: 1836351 - RNA, 19 nt, Homo sapiens
  misc_RNA (1)...(19): siRNA sense strand
caaagauuguguccuuaau

SEQ ID NO: 1836352 - RNA, 19 nt, Homo sapiens
  misc_RNA (1)...(19): siRNA sense strand
agacgaagaugaagaaggu

SEQ ID NO: 1836353 - RNA, 19 nt, Homo sapiens
  misc_RNA (1)...(19): siRNA sense strand
caguaaggcuuccaagaau

SEQ ID NO: 1836354 - RNA, 19 nt, Homo sapiens
  misc_RNA (1)...(19): siRNA sense strand
caagggacuuauaaauaug

SEQ ID NO: 1836355 - RNA, 19 nt, Homo sapiens
  misc_RNA (1)...(19): siRNA sense strand
gguguaacauugacaguag

SEQ ID NO: 1836356 - RNA, 19 nt, Homo sapiens
  misc_RNA (1)...(19): siRNA sense strand
gaugaaacacgcaaauugu

SEQ ID NO: 1836357 - RNA, 19 nt, Homo sapiens
  misc_RNA (1)...(19): siRNA sense strand
ugacaauagugaagaugaa

SEQ ID NO: 1836358 - RNA, 19 nt, Homo sapiens
  misc_RNA (1)...(19): siRNA sense strand
caaaugcuauagcucugaa

SEQ ID NO: 1836359 - RNA, 19 nt, Homo sapiens
  misc_RNA (1)...(19): siRNA sense strand
gcagaaaguguaagcaugu

SEQ ID NO: 1836360 - RNA, 19 nt, Homo sapiens
  misc_RNA (1)...(19): siRNA sense strand
gcauucuguucuucaagua

SEQ ID NO: 1836361 - RNA, 19 nt, Homo sapiens
  misc_RNA (1)...(19): siRNA sense strand
gaacaguauuaaaccaucu

SEQ ID NO: 1836362 - RNA, 19 nt, Homo sapiens
  misc_RNA (1)...(19): siRNA sense strand
uaaugcaacucuuaagcaa

SEQ ID NO: 1836363 - RNA, 19 nt, Homo sapiens
  misc_RNA (1)...(19): siRNA sense strand
gagcagccgucuaccaaag

SEQ ID NO: 1836364 - RNA, 19 nt, Homo sapiens
  misc_RNA (1)...(19): siRNA sense strand
ggagauaugggcaguuguu

SEQ ID NO: 1836365 - RNA, 19 nt, Homo sapiens
  misc_RNA (1)...(19): siRNA sense strand
gggaagaugccaauacaug

SEQ ID NO: 1836366 - RNA, 19 nt, Homo sapiens
  misc_RNA (1)...(19): siRNA sense strand
ccauauauguagcaaagau

SEQ ID NO: 1836367 - RNA, 19 nt, Homo sapiens
  misc_RNA (1)...(19): siRNA sense strand
guacuguaaugcauucugu

SEQ ID NO: 1836368 - RNA, 19 nt, Homo sapiens
  misc_RNA (1)...(19): siRNA sense strand
uugagacacugcaaaguaa

SEQ ID NO: 1836369 - RNA, 19 nt, Homo sapiens
  misc_RNA (1)...(19): siRNA sense strand
ggaaauggugaauaaugaa

SEQ ID NO: 1836370 - RNA, 19 nt, Homo sapiens
  misc_RNA (1)...(19): siRNA sense strand
ucaguaaggcuuccaagaa

SEQ ID NO: 1836371 - RNA, 19 nt, Homo sapiens
  misc_RNA (1)...(19): siRNA sense strand
guagaugacuucaguucag

SEQ ID NO: 1836372 - RNA, 19 nt, Homo sapiens
  misc_RNA (1)...(19): siRNA sense strand
ccauucagccuucuccaua

SEQ ID NO: 1836373 - RNA, 19 nt, Homo sapiens
  misc_RNA (1)...(19): siRNA sense strand
ggauuuauugggucaagua

SEQ ID NO: 1836374 - RNA, 19 nt, Homo sapiens
  misc_RNA (1)...(19): siRNA sense strand
gaaaguguaagcauguguu

SEQ ID NO: 1836375 - RNA, 19 nt, Homo sapiens
  misc_RNA (1)...(19): siRNA sense strand
gacagccaccugccuauaa

SEQ ID NO: 1836376 - RNA, 19 nt, Homo sapiens
  misc_RNA (1)...(19): siRNA sense strand
ugagaggaauaccaaauca

SEQ ID NO: 1836377 - RNA, 19 nt, Homo sapiens
  misc_RNA (1)...(19): siRNA sense strand
caaagcuuguggugacuga

SEQ ID NO: 1836378 - RNA, 19 nt, Homo sapiens
  misc_RNA (1)...(19): siRNA sense strand
ggaauuuggcugucuggaa

SEQ ID NO: 1836379 - RNA, 19 nt, Homo sapiens
  misc_RNA (1)...(19): siRNA sense strand
gaaggggacauuacaauuu

SEQ ID NO: 1836380 - RNA, 19 nt, Homo sapiens
  misc_RNA (1)...(19): siRNA sense strand
gcgacgagcuccacaucua

SEQ ID NO: 1836381 - RNA, 19 nt, Homo sapiens
  misc_RNA (1)...(19): siRNA sense strand
ugaaggagcugcaggaaca

SEQ ID NO: 1836382 - RNA, 19 nt, Homo sapiens
  misc_RNA (1)...(19): siRNA sense strand
gaaagaggccaacgaguca

SEQ ID NO: 1836383 - RNA, 19 nt, Homo sapiens
  misc_RNA (1)...(19): siRNA sense strand
gaauucaccuccuccuugu

SEQ ID NO: 1836384 - RNA, 19 nt, Homo sapiens
  misc_RNA (1)...(19): siRNA sense strand
agaagacgcuggagcaguu

SEQ ID NO: 1836385 - RNA, 19 nt, Homo sapiens
  misc_RNA (1)...(19): siRNA sense strand
ccacggaggccaagcguaa

SEQ ID NO: 1836386 - RNA, 19 nt, Homo sapiens
  misc_RNA (1)...(19): siRNA sense strand
aagagaaguuccugcauga

SEQ ID NO: 1836387 - RNA, 19 nt, Homo sapiens
  misc_RNA (1)...(19): siRNA sense strand
gaaggagaaauucgacuau

SEQ ID NO: 1836388 - RNA, 19 nt, Homo sapiens
  misc_RNA (1)...(19): siRNA sense strand
gcaggaggccuacaagaag

SEQ ID NO: 1836389 - RNA, 19 nt, Homo sapiens
  misc_RNA (1)...(19): siRNA sense strand
uggagaagguggugaagga

SEQ ID NO: 1836390 - RNA, 19 nt, Homo sapiens
  misc_RNA (1)...(19): siRNA sense strand
ccaaggaagccaaagagaa

SEQ ID NO: 1836391 - RNA, 19 nt, Homo sapiens
  misc_RNA (1)...(19): siRNA sense strand
caaggaagccaaagagaag

SEQ ID NO: 1836392 - RNA, 19 nt, Homo sapiens
  misc_RNA (1)...(19): siRNA sense strand
gagacagcuucuacuccua

SEQ ID NO: 1836393 - RNA, 19 nt, Homo sapiens
  misc_RNA (1)...(19): siRNA sense strand
aaacagaugacaccucuuc

SEQ ID NO: 1836394 - RNA, 19 nt, Homo sapiens
  misc_RNA (1)...(19): siRNA sense strand
gccagcgccucucugcuuu

SEQ ID NO: 1836395 - RNA, 19 nt, Homo sapiens
  misc_RNA (1)...(19): siRNA sense strand
gaacgagaagaagaugaaa

SEQ ID NO: 1836396 - RNA, 19 nt, Homo sapiens
  misc_RNA (1)...(19): siRNA sense strand
gcacaaggcccuggagaac

SEQ ID NO: 1836397 - RNA, 19 nt, Homo sapiens
  misc_RNA (1)...(19): siRNA sense strand
ggacaccaaggaagccaaa

SEQ ID NO: 1836398 - RNA, 19 nt, Homo sapiens
  misc_RNA (1)...(19): siRNA sense strand
ugaaggagaaauucgacua

SEQ ID NO: 1836399 - RNA, 19 nt, Homo sapiens
  misc_RNA (1)...(19): siRNA sense strand
aggcggagguggaaguuga

SEQ ID NO: 1836400 - RNA, 19 nt, Homo sapiens
  misc_RNA (1)...(19): siRNA sense strand
ugcaugagguggucaagau

SEQ ID NO: 1836401 - RNA, 19 nt, Homo sapiens
  misc_RNA (1)...(19): siRNA sense strand
gaaagcagggaggaauuca

SEQ ID NO: 1836402 - RNA, 19 nt, Homo sapiens
  misc_RNA (1)...(19): siRNA sense strand
gcgccgagaacgagaagaa

SEQ ID NO: 1836403 - RNA, 19 nt, Homo sapiens
  misc_RNA (1)...(19): siRNA sense strand
gcgagaagcgccugugucu

SEQ ID NO: 1836404 - RNA, 19 nt, Homo sapiens
  misc_RNA (1)...(19): siRNA sense strand
ggagauccucaaagucaug

SEQ ID NO: 1836405 - RNA, 19 nt, Homo sapiens
  misc_RNA (1)...(19): siRNA sense strand
ggaagcggaagcugacugu

SEQ ID NO: 1836406 - RNA, 19 nt, Homo sapiens
  misc_RNA (1)...(19): siRNA sense strand
ggacugccgccucauguac

SEQ ID NO: 1836407 - RNA, 19 nt, Homo sapiens
  misc_RNA (1)...(19): siRNA sense strand
gcgugaagcaggaggagaa

SEQ ID NO: 1836408 - RNA, 19 nt, Homo sapiens
  misc_RNA (1)...(19): siRNA sense strand
guacucggcccagaucgaa

SEQ ID NO: 1836409 - RNA, 19 nt, Homo sapiens
  misc_RNA (1)...(19): siRNA sense strand
gagaacgagaagaagauga

SEQ ID NO: 1836410 - RNA, 19 nt, Homo sapiens
  misc_RNA (1)...(19): siRNA sense strand
agaaggagagcgccaagga

SEQ ID NO: 1836411 - RNA, 19 nt, Homo sapiens
  misc_RNA (1)...(19): siRNA sense strand
agaacgagaagaagaugaa

SEQ ID NO: 1836412 - RNA, 19 nt, Homo sapiens
  misc_RNA (1)...(19): siRNA sense strand
uggacgacgugaaggagaa

SEQ ID NO: 1836413 - RNA, 19 nt, Homo sapiens
  misc_RNA (1)...(19): siRNA sense strand
acgagaagaagaugaaaga

SEQ ID NO: 1836414 - RNA, 19 nt, Homo sapiens
  misc_RNA (1)...(19): siRNA sense strand
cgcaggaggccuacaagaa

SEQ ID NO: 1836415 - RNA, 19 nt, Homo sapiens
  misc_RNA (1)...(19): siRNA sense strand
cuacaagagcuuugagaca

SEQ ID NO: 1836416 - RNA, 19 nt, Homo sapiens
  misc_RNA (1)...(19): siRNA sense strand
gagccuccggccuccauaa

SEQ ID NO: 1836417 - RNA, 19 nt, Homo sapiens
  misc_RNA (1)...(19): siRNA sense strand
aaggagaaauucgacuaug

SEQ ID NO: 1836418 - RNA, 19 nt, Homo sapiens
  misc_RNA (1)...(19): siRNA sense strand
cuggagauccucaaaguca

SEQ ID NO: 1836419 - RNA, 19 nt, Homo sapiens
  misc_RNA (1)...(19): siRNA sense strand
ugucagcgagugagaaaga

SEQ ID NO: 1836420 - RNA, 19 nt, Homo sapiens
  misc_RNA (1)...(19): siRNA sense strand
caaguacucggcccagauc

SEQ ID NO: 1836421 - RNA, 19 nt, Homo sapiens
  misc_RNA (1)...(19): siRNA sense strand
aggagaaauucgacuaugg

SEQ ID NO: 1836422 - RNA, 19 nt, Homo sapiens
  misc_RNA (1)...(19): siRNA sense strand
gcgcaggaggccuacaaga

SEQ ID NO: 1836423 - RNA, 19 nt, Homo sapiens
  misc_RNA (1)...(19): siRNA sense strand
cgugcgggcucaucaccaa

SEQ ID NO: 1836424 - RNA, 19 nt, Homo sapiens
  misc_RNA (1)...(19): siRNA sense strand
gccgagaacgagaagaaga

SEQ ID NO: 1836425 - RNA, 19 nt, Homo sapiens
  misc_RNA (1)...(19): siRNA sense strand
ggacgacgugaaggagaaa

SEQ ID NO: 1836426 - RNA, 19 nt, Homo sapiens
  misc_RNA (1)...(19): siRNA sense strand
ggagguggaaguugaaagc

SEQ ID NO: 1836427 - RNA, 19 nt, Homo sapiens
  misc_RNA (1)...(19): siRNA sense strand
ucgacuauggcaacaagua

SEQ ID NO: 1836428 - RNA, 19 nt, Homo sapiens
  misc_RNA (1)...(19): siRNA sense strand
caaagagaaguuccugcau

SEQ ID NO: 1836429 - RNA, 19 nt, Homo sapiens
  misc_RNA (1)...(19): siRNA sense strand
gcaugagguggucaagaug

SEQ ID NO: 1836430 - RNA, 19 nt, Homo sapiens
  misc_RNA (1)...(19): siRNA sense strand
ugaaagcagggaggaauuc

SEQ ID NO: 1836431 - RNA, 19 nt, Homo sapiens
  misc_RNA (1)...(19): siRNA sense strand
ccaaguacucggcccagau

SEQ ID NO: 1836432 - RNA, 19 nt, Homo sapiens
  misc_RNA (1)...(19): siRNA sense strand
cgacgugaaggagaaauuc

SEQ ID NO: 1836433 - RNA, 19 nt, Homo sapiens
  misc_RNA (1)...(19): siRNA sense strand
acaccaaggaagccaaaga

SEQ ID NO: 1836434 - RNA, 19 nt, Homo sapiens
  misc_RNA (1)...(19): siRNA sense strand
guugaaagcagggaggaau

SEQ ID NO: 1836435 - RNA, 19 nt, Homo sapiens
  misc_RNA (1)...(19): siRNA sense strand
gaaauauccuccugugaca

SEQ ID NO: 1836436 - RNA, 19 nt, Homo sapiens
  misc_RNA (1)...(19): siRNA sense strand
caaaguauccaccgaagag

SEQ ID NO: 1836437 - RNA, 19 nt, Homo sapiens
  misc_RNA (1)...(19): siRNA sense strand
gcagugccagcagaaauau

SEQ ID NO: 1836438 - RNA, 19 nt, Homo sapiens
  misc_RNA (1)...(19): siRNA sense strand
cagcagugccagcagaaau

SEQ ID NO: 1836439 - RNA, 19 nt, Homo sapiens
  misc_RNA (1)...(19): siRNA sense strand
cagaaauauccuccuguga

SEQ ID NO: 1836440 - RNA, 19 nt, Homo sapiens
  misc_RNA (1)...(19): siRNA sense strand
ccaaaguauccaccgaaga

SEQ ID NO: 1836441 - RNA, 19 nt, Homo sapiens
  misc_RNA (1)...(19): siRNA sense strand
agcagugccagcagaaaua

SEQ ID NO: 1836442 - RNA, 19 nt, Homo sapiens
  misc_RNA (1)...(19): siRNA sense strand
cacccugccagccaaagua

SEQ ID NO: 1836443 - RNA, 19 nt, Homo sapiens
  misc_RNA (1)...(19): siRNA sense strand
gaucaaggcucacuuaugg

SEQ ID NO: 1836444 - RNA, 19 nt, Homo sapiens
  misc_RNA (1)...(19): siRNA sense strand
gagggaaccuguccaaugu

SEQ ID NO: 1836445 - RNA, 19 nt, Homo sapiens
  misc_RNA (1)...(19): siRNA sense strand
caagaucaaggcucacuua

SEQ ID NO: 1836446 - RNA, 19 nt, Homo sapiens
  misc_RNA (1)...(19): siRNA sense strand
gggaagagcaucauguuug

SEQ ID NO: 1836447 - RNA, 19 nt, Homo sapiens
  misc_RNA (1)...(19): siRNA sense strand
ggaaauggcaccuacaaag

SEQ ID NO: 1836448 - RNA, 19 nt, Homo sapiens
  misc_RNA (1)...(19): siRNA sense strand
ggacaugaaccucagcauu

SEQ ID NO: 1836449 - RNA, 19 nt, Homo sapiens
  misc_RNA (1)...(19): siRNA sense strand
gacaugaaccucagcauug

SEQ ID NO: 1836450 - RNA, 19 nt, Homo sapiens
  misc_RNA (1)...(19): siRNA sense strand
ggagggaaccuguccaaug

SEQ ID NO: 1836451 - RNA, 19 nt, Homo sapiens
  misc_RNA (1)...(19): siRNA sense strand
ggacaaggugcccuauaaa

SEQ ID NO: 1836452 - RNA, 19 nt, Homo sapiens
  misc_RNA (1)...(19): siRNA sense strand
ucaagacucccaaggauaa

SEQ ID NO: 1836453 - RNA, 19 nt, Homo sapiens
  misc_RNA (1)...(19): siRNA sense strand
aggacaaggugcccuauaa

SEQ ID NO: 1836454 - RNA, 19 nt, Homo sapiens
  misc_RNA (1)...(19): siRNA sense strand
ggaagagcaucauguuugc

SEQ ID NO: 1836455 - RNA, 19 nt, Homo sapiens
  misc_RNA (1)...(19): siRNA sense strand
ucucauuccuugcaccaua

SEQ ID NO: 1836456 - RNA, 19 nt, Homo sapiens
  misc_RNA (1)...(19): siRNA sense strand
gaaccuguccaaugucuuc

SEQ ID NO: 1836457 - RNA, 19 nt, Homo sapiens
  misc_RNA (1)...(19): siRNA sense strand
cuacacagcugccacaacu

SEQ ID NO: 1836458 - RNA, 19 nt, Homo sapiens
  misc_RNA (1)...(19): siRNA sense strand
gaaauggcaccuacaaagg

SEQ ID NO: 1836459 - RNA, 19 nt, Homo sapiens
  misc_RNA (1)...(19): siRNA sense strand
cuauaaaggcaucgugaua

SEQ ID NO: 1836460 - RNA, 19 nt, Homo sapiens
  misc_RNA (1)...(19): siRNA sense strand
ugacaccacucuugauugc

SEQ ID NO: 1836461 - RNA, 19 nt, Homo sapiens
  misc_RNA (1)...(19): siRNA sense strand
ugccacaacugaagaaaca

SEQ ID NO: 1836462 - RNA, 19 nt, Homo sapiens
  misc_RNA (1)...(19): siRNA sense strand
gaaccucagcauugugaug

SEQ ID NO: 1836463 - RNA, 19 nt, Homo sapiens
  misc_RNA (1)...(19): siRNA sense strand
ccuccucccugaugccuuu

SEQ ID NO: 1836464 - RNA, 19 nt, Homo sapiens
  misc_RNA (1)...(19): siRNA sense strand
ccauagggaucguccucaa

SEQ ID NO: 1836465 - RNA, 19 nt, Homo sapiens
  misc_RNA (1)...(19): siRNA sense strand
gcucucuucugccucaaug

SEQ ID NO: 1836466 - RNA, 19 nt, Homo sapiens
  misc_RNA (1)...(19): siRNA sense strand
auaaaggcaucgugauauc

SEQ ID NO: 1836467 - RNA, 19 nt, Homo sapiens
  misc_RNA (1)...(19): siRNA sense strand
caugacaccacucuugauu

SEQ ID NO: 1836468 - RNA, 19 nt, Homo sapiens
  misc_RNA (1)...(19): siRNA sense strand
uauaaaggcaucgugauau

SEQ ID NO: 1836469 - RNA, 19 nt, Homo sapiens
  misc_RNA (1)...(19): siRNA sense strand
acacagcugccacaacuga

SEQ ID NO: 1836470 - RNA, 19 nt, Homo sapiens
  misc_RNA (1)...(19): siRNA sense strand
ucuccucauugccauauuu

SEQ ID NO: 1836471 - RNA, 19 nt, Homo sapiens
  misc_RNA (1)...(19): siRNA sense strand
caaacggccacaauacaug

SEQ ID NO: 1836472 - RNA, 19 nt, Homo sapiens
  misc_RNA (1)...(19): siRNA sense strand
aauccaaacggccacaaua

SEQ ID NO: 1836473 - RNA, 19 nt, Homo sapiens
  misc_RNA (1)...(19): siRNA sense strand
ucaaggcucacuuauggaa

SEQ ID NO: 1836474 - RNA, 19 nt, Homo sapiens
  misc_RNA (1)...(19): siRNA sense strand
gggaaauggcaccuacaaa

SEQ ID NO: 1836475 - RNA, 19 nt, Homo sapiens
  misc_RNA (1)...(19): siRNA sense strand
gagacuggaugccaaaaug

SEQ ID NO: 1836476 - RNA, 19 nt, Homo sapiens
  misc_RNA (1)...(19): siRNA sense strand
gacaaggugcccuauaaag

SEQ ID NO: 1836477 - RNA, 19 nt, Homo sapiens
  misc_RNA (1)...(19): siRNA sense strand
gggaaccuguccaaugucu

SEQ ID NO: 1836478 - RNA, 19 nt, Homo sapiens
  misc_RNA (1)...(19): siRNA sense strand
guuccaccauccucaaugu

SEQ ID NO: 1836479 - RNA, 19 nt, Homo sapiens
  misc_RNA (1)...(19): siRNA sense strand
ccaaacggccacaauacau

SEQ ID NO: 1836480 - RNA, 19 nt, Homo sapiens
  misc_RNA (1)...(19): siRNA sense strand
caggagcucugggaaaugg

SEQ ID NO: 1836481 - RNA, 19 nt, Homo sapiens
  misc_RNA (1)...(19): siRNA sense strand
ugaugccucuccuccugua

SEQ ID NO: 1836482 - RNA, 19 nt, Homo sapiens
  misc_RNA (1)...(19): siRNA sense strand
gccaugacaccacucuuga

SEQ ID NO: 1836483 - RNA, 19 nt, Homo sapiens
  misc_RNA (1)...(19): siRNA sense strand
acaugaaccucagcauugu

SEQ ID NO: 1836484 - RNA, 19 nt, Homo sapiens
  misc_RNA (1)...(19): siRNA sense strand
acaguucucucugccauca

SEQ ID NO: 1836485 - RNA, 19 nt, Homo sapiens
  misc_RNA (1)...(19): siRNA sense strand
ccauggaguucagcaagau

SEQ ID NO: 1836486 - RNA, 19 nt, Homo sapiens
  misc_RNA (1)...(19): siRNA sense strand
ggcacaguauggcaucaug

SEQ ID NO: 1836487 - RNA, 19 nt, Homo sapiens
  misc_RNA (1)...(19): siRNA sense strand
cauccucaauguggccuuu

SEQ ID NO: 1836488 - RNA, 19 nt, Homo sapiens
  misc_RNA (1)...(19): siRNA sense strand
ccacaauacaugcgcuaug

SEQ ID NO: 1836489 - RNA, 19 nt, Homo sapiens
  misc_RNA (1)...(19): siRNA sense strand
ccacaacugaagaaacaau

SEQ ID NO: 1836490 - RNA, 19 nt, Homo sapiens
  misc_RNA (1)...(19): siRNA sense strand
gaucguccucaaauccaaa

SEQ ID NO: 1836491 - RNA, 19 nt, Homo sapiens
  misc_RNA (1)...(19): siRNA sense strand
caacgcgucugccccauuc

SEQ ID NO: 1836492 - RNA, 19 nt, Homo sapiens
  misc_RNA (1)...(19): siRNA sense strand
auucaagacucccaaggau

SEQ ID NO: 1836493 - RNA, 19 nt, Homo sapiens
  misc_RNA (1)...(19): siRNA sense strand
uaaaggcaucgugauauca

SEQ ID NO: 1836494 - RNA, 19 nt, Homo sapiens
  misc_RNA (1)...(19): siRNA sense strand
gauaucacugguccugguu

SEQ ID NO: 1836495 - RNA, 19 nt, Homo sapiens
  misc_RNA (1)...(19): siRNA sense strand
cauagggaucguccucaaa

SEQ ID NO: 1836496 - RNA, 19 nt, Homo sapiens
  misc_RNA (1)...(19): siRNA sense strand
gcaaggucuuccggcugaa

SEQ ID NO: 1836497 - RNA, 19 nt, Homo sapiens
  misc_RNA (1)...(19): siRNA sense strand
gcaagaucaaggcucacuu

SEQ ID NO: 1836498 - RNA, 19 nt, Homo sapiens
  misc_RNA (1)...(19): siRNA sense strand
gaaggacaaggugcccuau

SEQ ID NO: 1836499 - RNA, 19 nt, Homo sapiens
  misc_RNA (1)...(19): siRNA sense strand
ucacugguccugguucuca

SEQ ID NO: 1836500 - RNA, 19 nt, Homo sapiens
  misc_RNA (1)...(19): siRNA sense strand
gcuaugagaaauucaagac

SEQ ID NO: 1836501 - RNA, 19 nt, Homo sapiens
  misc_RNA (1)...(19): siRNA sense strand
caaaauguccaacucuguu

SEQ ID NO: 1836502 - RNA, 19 nt, Homo sapiens
  misc_RNA (1)...(19): siRNA sense strand
uguccaaugucuucagucu

SEQ ID NO: 1836503 - RNA, 19 nt, Homo sapiens
  misc_RNA (1)...(19): siRNA sense strand
gcuuucugcuggguuaugu

SEQ ID NO: 1836504 - RNA, 19 nt, Homo sapiens
  misc_RNA (1)...(19): siRNA sense strand
acaaggugcccuauaaagg

SEQ ID NO: 1836505 - RNA, 19 nt, Homo sapiens
  misc_RNA (1)...(19): siRNA sense strand
guguucauguuguucuuca

SEQ ID NO: 1836506 - RNA, 19 nt, Homo sapiens
  misc_RNA (1)...(19): siRNA sense strand
gcuggguuauguucucucu

SEQ ID NO: 1836507 - RNA, 19 nt, Homo sapiens
  misc_RNA (1)...(19): siRNA sense strand
gcaccauggaguucagcaa

SEQ ID NO: 1836508 - RNA, 19 nt, Homo sapiens
  misc_RNA (1)...(19): siRNA sense strand
uugaggcacuggccaucuu

SEQ ID NO: 1836509 - RNA, 19 nt, Homo sapiens
  misc_RNA (1)...(19): siRNA sense strand
gaagaaagcguaccuagug

SEQ ID NO: 1836510 - RNA, 19 nt, Homo sapiens
  misc_RNA (1)...(19): siRNA sense strand
gaagccaucucagcucaua

SEQ ID NO: 1836511 - RNA, 19 nt, Homo sapiens
  misc_RNA (1)...(19): siRNA sense strand
ggaauagcauggaugaaug

SEQ ID NO: 1836512 - RNA, 19 nt, Homo sapiens
  misc_RNA (1)...(19): siRNA sense strand
gaccuauacucuacucuuu

SEQ ID NO: 1836513 - RNA, 19 nt, Homo sapiens
  misc_RNA (1)...(19): siRNA sense strand
ccacaguuauguuugcuuu

SEQ ID NO: 1836514 - RNA, 19 nt, Homo sapiens
  misc_RNA (1)...(19): siRNA sense strand
gaagagaagcuugcuauuc

SEQ ID NO: 1836515 - RNA, 19 nt, Homo sapiens
  misc_RNA (1)...(19): siRNA sense strand
gaaguguaauguacgaguu

SEQ ID NO: 1836516 - RNA, 19 nt, Homo sapiens
  misc_RNA (1)...(19): siRNA sense strand
aagcguaccuaguggaaua

SEQ ID NO: 1836517 - RNA, 19 nt, Homo sapiens
  misc_RNA (1)...(19): siRNA sense strand
caccguggcuguugaagaa

SEQ ID NO: 1836518 - RNA, 19 nt, Homo sapiens
  misc_RNA (1)...(19): siRNA sense strand
gaauagcauggaugaauga

SEQ ID NO: 1836519 - RNA, 19 nt, Homo sapiens
  misc_RNA (1)...(19): siRNA sense strand
ugacauggaguucaaagaa

SEQ ID NO: 1836520 - RNA, 19 nt, Homo sapiens
  misc_RNA (1)...(19): siRNA sense strand
gaagcuugcuauucugagu

SEQ ID NO: 1836521 - RNA, 19 nt, Homo sapiens
  misc_RNA (1)...(19): siRNA sense strand
uauaugacauggaguucaa

SEQ ID NO: 1836522 - RNA, 19 nt, Homo sapiens
  misc_RNA (1)...(19): siRNA sense strand
caacaggauuggauaucau

SEQ ID NO: 1836523 - RNA, 19 nt, Homo sapiens
  misc_RNA (1)...(19): siRNA sense strand
gaaagcguaccuaguggaa

SEQ ID NO: 1836524 - RNA, 19 nt, Homo sapiens
  misc_RNA (1)...(19): siRNA sense strand
cauguuugcuggcuuuguu

SEQ ID NO: 1836525 - RNA, 19 nt, Homo sapiens
  misc_RNA (1)...(19): siRNA sense strand
gguggauucuucuaugaug

SEQ ID NO: 1836526 - RNA, 19 nt, Homo sapiens
  misc_RNA (1)...(19): siRNA sense strand
ggaagagaagcuugcuauu

SEQ ID NO: 1836527 - RNA, 19 nt, Homo sapiens
  misc_RNA (1)...(19): siRNA sense strand
caaaggcugugaugcaacu

SEQ ID NO: 1836528 - RNA, 19 nt, Homo sapiens
  misc_RNA (1)...(19): siRNA sense strand
gacauggaguucaaagaag

SEQ ID NO: 1836529 - RNA, 19 nt, Homo sapiens
  misc_RNA (1)...(19): siRNA sense strand
ggagcucccuuuggaagug

SEQ ID NO: 1836530 - RNA, 19 nt, Homo sapiens
  misc_RNA (1)...(19): siRNA sense strand
caugguggauucuucuaug

SEQ ID NO: 1836531 - RNA, 19 nt, Homo sapiens
  misc_RNA (1)...(19): siRNA sense strand
ggaccuauacucuacucuu

SEQ ID NO: 1836532 - RNA, 19 nt, Homo sapiens
  misc_RNA (1)...(19): siRNA sense strand
ccuauacucuacucuuugu

SEQ ID NO: 1836533 - RNA, 19 nt, Homo sapiens
  misc_RNA (1)...(19): siRNA sense strand
ggcauuggaucuucauuuu

SEQ ID NO: 1836534 - RNA, 19 nt, Homo sapiens
  misc_RNA (1)...(19): siRNA sense strand
gugcccaccuuccuauaug

SEQ ID NO: 1836535 - RNA, 19 nt, Homo sapiens
  misc_RNA (1)...(19): siRNA sense strand
ggucaucaacaucgucuau

SEQ ID NO: 1836536 - RNA, 19 nt, Homo sapiens
  misc_RNA (1)...(19): siRNA sense strand
ccucgccucuccugccuuu

SEQ ID NO: 1836537 - RNA, 19 nt, Homo sapiens
  misc_RNA (1)...(19): siRNA sense strand
caucugcuuugccaacaug

SEQ ID NO: 1836538 - RNA, 19 nt, Homo sapiens
  misc_RNA (1)...(19): siRNA sense strand
auguuucucuccacaguua

SEQ ID NO: 1836539 - RNA, 19 nt, Homo sapiens
  misc_RNA (1)...(19): siRNA sense strand
guucaaagaagucaacucu

SEQ ID NO: 1836540 - RNA, 19 nt, Homo sapiens
  misc_RNA (1)...(19): siRNA sense strand
ggauguaugcaacccagaa

SEQ ID NO: 1836541 - RNA, 19 nt, Homo sapiens
  misc_RNA (1)...(19): siRNA sense strand
guaccagcuugcucugugu

SEQ ID NO: 1836542 - RNA, 19 nt, Homo sapiens
  misc_RNA (1)...(19): siRNA sense strand
ucucaaagacccuuacauc

SEQ ID NO: 1836543 - RNA, 19 nt, Homo sapiens
  misc_RNA (1)...(19): siRNA sense strand
guaauguacgaguuuguug

SEQ ID NO: 1836544 - RNA, 19 nt, Homo sapiens
  misc_RNA (1)...(19): siRNA sense strand
ucaaggcauuggaucuuca

SEQ ID NO: 1836545 - RNA, 19 nt, Homo sapiens
  misc_RNA (1)...(19): siRNA sense strand
ugaugcaacuucuggucaa

SEQ ID NO: 1836546 - RNA, 19 nt, Homo sapiens
  misc_RNA (1)...(19): siRNA sense strand
cuacagccuuccaaagucu

SEQ ID NO: 1836547 - RNA, 19 nt, Homo sapiens
  misc_RNA (1)...(19): siRNA sense strand
acauggaguucaaagaagu

SEQ ID NO: 1836548 - RNA, 19 nt, Homo sapiens
  misc_RNA (1)...(19): siRNA sense strand
cccagaagcccacgaagga

SEQ ID NO: 1836549 - RNA, 19 nt, Homo sapiens
  misc_RNA (1)...(19): siRNA sense strand
uugcaugggcuuugcuaua

SEQ ID NO: 1836550 - RNA, 19 nt, Homo sapiens
  misc_RNA (1)...(19): siRNA sense strand
uggcuuuguuaucauguuu

SEQ ID NO: 1836551 - RNA, 19 nt, Homo sapiens
  misc_RNA (1)...(19): siRNA sense strand
ucgcuuugcuccuggacaa

SEQ ID NO: 1836552 - RNA, 19 nt, Homo sapiens
  misc_RNA (1)...(19): siRNA sense strand
augaggagccugaccauga

SEQ ID NO: 1836553 - RNA, 19 nt, Homo sapiens
  misc_RNA (1)...(19): siRNA sense strand
gaagcccacgaaggaauuu

SEQ ID NO: 1836554 - RNA, 19 nt, Homo sapiens
  misc_RNA (1)...(19): siRNA sense strand
caacccagaagcccacgaa

SEQ ID NO: 1836555 - RNA, 19 nt, Homo sapiens
  misc_RNA (1)...(19): siRNA sense strand
ugcaugggcuuugcuauag

SEQ ID NO: 1836556 - RNA, 19 nt, Homo sapiens
  misc_RNA (1)...(19): siRNA sense strand
uggaauagcauggaugaau

SEQ ID NO: 1836557 - RNA, 19 nt, Homo sapiens
  misc_RNA (1)...(19): siRNA sense strand
ugaggagccugaccaugag

SEQ ID NO: 1836558 - RNA, 19 nt, Homo sapiens
  misc_RNA (1)...(19): siRNA sense strand
ucaaagacccuuacauccu

SEQ ID NO: 1836559 - RNA, 19 nt, Homo sapiens
  misc_RNA (1)...(19): siRNA sense strand
ccuacagccuuccaaaguc

SEQ ID NO: 1836560 - RNA, 19 nt, Homo sapiens
  misc_RNA (1)...(19): siRNA sense strand
gaucuucauuuucaucugu

SEQ ID NO: 1836561 - RNA, 19 nt, Homo sapiens
  misc_RNA (1)...(19): siRNA sense strand
ccauggagacccggaugua

SEQ ID NO: 1836562 - RNA, 19 nt, Homo sapiens
  misc_RNA (1)...(19): siRNA sense strand
gcaugguggauucuucuau

SEQ ID NO: 1836563 - RNA, 19 nt, Homo sapiens
  misc_RNA (1)...(19): siRNA sense strand
ugucuacacugaugaccau

SEQ ID NO: 1836564 - RNA, 19 nt, Homo sapiens
  misc_RNA (1)...(19): siRNA sense strand
ccacacugcccaucuggau

SEQ ID NO: 1836565 - RNA, 19 nt, Homo sapiens
  misc_RNA (1)...(19): siRNA sense strand
ugaagaaagcguaccuagu

SEQ ID NO: 1836566 - RNA, 19 nt, Homo sapiens
  misc_RNA (1)...(19): siRNA sense strand
caguguguccuaccucauu

SEQ ID NO: 1836567 - RNA, 19 nt, Homo sapiens
  misc_RNA (1)...(19): siRNA sense strand
ggaaugcuggccagugucu

SEQ ID NO: 1836568 - RNA, 19 nt, Homo sapiens
  misc_RNA (1)...(19): siRNA sense strand
cauuggaucuucauuuuca

SEQ ID NO: 1836569 - RNA, 19 nt, Homo sapiens
  misc_RNA (1)...(19): siRNA sense strand
uaucauauccccauguuug

SEQ ID NO: 1836570 - RNA, 19 nt, Homo sapiens
  misc_RNA (1)...(19): siRNA sense strand
uuacugugguggugccaau

SEQ ID NO: 1836571 - RNA, 19 nt, Homo sapiens
  misc_RNA (1)...(19): siRNA sense strand
caucuucuccuucuucaac

SEQ ID NO: 1836572 - RNA, 19 nt, Homo sapiens
  misc_RNA (1)...(19): siRNA sense strand
cagaagcccacgaaggaau

SEQ ID NO: 1836573 - RNA, 19 nt, Homo sapiens
  misc_RNA (1)...(19): siRNA sense strand
ggugguauucgucgcuuug

SEQ ID NO: 1836574 - RNA, 19 nt, Homo sapiens
  misc_RNA (1)...(19): siRNA sense strand
aggaagagaagcuugcuau

SEQ ID NO: 1836575 - RNA, 19 nt, Homo sapiens
  misc_RNA (1)...(19): siRNA sense strand
ucaucaacaucgucuaugc

SEQ ID NO: 1836576 - RNA, 19 nt, Homo sapiens
  misc_RNA (1)...(19): siRNA sense strand
gcaugggcuuugcuauagg

SEQ ID NO: 1836577 - RNA, 19 nt, Homo sapiens
  misc_RNA (1)...(19): siRNA sense strand
ggacgagccaugggaacug

SEQ ID NO: 1836578 - RNA, 19 nt, Homo sapiens
  misc_RNA (1)...(19): siRNA sense strand
ucugggaccuauacucuac

SEQ ID NO: 1836579 - RNA, 19 nt, Homo sapiens
  misc_RNA (1)...(19): siRNA sense strand
aacaggauuggauaucaua

SEQ ID NO: 1836580 - RNA, 19 nt, Homo sapiens
  misc_RNA (1)...(19): siRNA sense strand
ggaugaugcagaccaugug

SEQ ID NO: 1836581 - RNA, 19 nt, Homo sapiens
  misc_RNA (1)...(19): siRNA sense strand
cuacacugaugaccaugag

SEQ ID NO: 1836582 - RNA, 19 nt, Homo sapiens
  misc_RNA (1)...(19): siRNA sense strand
ucucuccacaguuauguuu

SEQ ID NO: 1836583 - RNA, 19 nt, Homo sapiens
  misc_RNA (1)...(19): siRNA sense strand
ucauguuucucuccacagu

SEQ ID NO: 1836584 - RNA, 19 nt, Homo sapiens
  misc_RNA (1)...(19): siRNA sense strand
uguugcaggucuuggaaug

SEQ ID NO: 1836585 - RNA, 19 nt, Homo sapiens
  misc_RNA (1)...(19): siRNA sense strand
ccucuggcucacaauauuu

SEQ ID NO: 1836586 - RNA, 19 nt, Homo sapiens
  misc_RNA (1)...(19): siRNA sense strand
guuccucuggcucacaaua

SEQ ID NO: 1836587 - RNA, 19 nt, Homo sapiens
  misc_RNA (1)...(19): siRNA sense strand
cgguggcuguguucccuaa

SEQ ID NO: 1836588 - RNA, 19 nt, Homo sapiens
  misc_RNA (1)...(19): siRNA sense strand
gagcucccuuuggaagugu

SEQ ID NO: 1836589 - RNA, 19 nt, Homo sapiens
  misc_RNA (1)...(19): siRNA sense strand
uuggaaugcuggccagugu

SEQ ID NO: 1836590 - RNA, 19 nt, Homo sapiens
  misc_RNA (1)...(19): siRNA sense strand
ggaguucaaagaagucaac

SEQ ID NO: 1836591 - RNA, 19 nt, Homo sapiens
  misc_RNA (1)...(19): siRNA sense strand
uccucuggcucacaauauu

SEQ ID NO: 1836592 - RNA, 19 nt, Homo sapiens
  misc_RNA (1)...(19): siRNA sense strand
uaaucgggaugcugguagu

SEQ ID NO: 1836593 - RNA, 19 nt, Homo sapiens
  misc_RNA (1)...(19): siRNA sense strand
aggcauuggaucuucauuu

SEQ ID NO: 1836594 - RNA, 19 nt, Homo sapiens
  misc_RNA (1)...(19): siRNA sense strand
ccaccuuccuauaugacau

SEQ ID NO: 1836595 - RNA, 19 nt, Homo sapiens
  misc_RNA (1)...(19): siRNA sense strand
uucaaaggcugugaugcaa

SEQ ID NO: 1836596 - RNA, 19 nt, Homo sapiens
  misc_RNA (1)...(19): siRNA sense strand
cuaguggaauagcauggau

SEQ ID NO: 1836597 - RNA, 19 nt, Homo sapiens
  misc_RNA (1)...(19): siRNA sense strand
agaagcccacgaaggaauu

SEQ ID NO: 1836598 - RNA, 19 nt, Homo sapiens
  misc_RNA (1)...(19): siRNA sense strand
uuguaaaggccaucgguuu

SEQ ID NO: 1836599 - RNA, 19 nt, Homo sapiens
  misc_RNA (1)...(19): siRNA sense strand
gggaugcugguaguaggua

SEQ ID NO: 1836600 - RNA, 19 nt, Homo sapiens
  misc_RNA (1)...(19): siRNA sense strand
guggcuguguucccuaauc

SEQ ID NO: 1836601 - RNA, 19 nt, Homo sapiens
  misc_RNA (1)...(19): siRNA sense strand
cauccuacagccuuccaaa

SEQ ID NO: 1836602 - RNA, 19 nt, Homo sapiens
  misc_RNA (1)...(19): siRNA sense strand
cuucaaaggcugugaugca

SEQ ID NO: 1836603 - RNA, 19 nt, Homo sapiens
  misc_RNA (1)...(19): siRNA sense strand
gaucacaacugcccuauua

SEQ ID NO: 1836604 - RNA, 19 nt, Homo sapiens
  misc_RNA (1)...(19): siRNA sense strand
acaaagaccuccugaauga

SEQ ID NO: 1836605 - RNA, 19 nt, Homo sapiens
  misc_RNA (1)...(19): siRNA sense strand
gaagaaugcuacagaaauc

SEQ ID NO: 1836606 - RNA, 19 nt, Homo sapiens
  misc_RNA (1)...(19): siRNA sense strand
gcuaguaucucuuaucuca

SEQ ID NO: 1836607 - RNA, 19 nt, Homo sapiens
  misc_RNA (1)...(19): siRNA sense strand
ggagugugcucuaugaguu

SEQ ID NO: 1836608 - RNA, 19 nt, Homo sapiens
  misc_RNA (1)...(19): siRNA sense strand
gcaaguuggucuguuguuu

SEQ ID NO: 1836609 - RNA, 19 nt, Homo sapiens
  misc_RNA (1)...(19): siRNA sense strand
gcauuaagcaugagaagaa

SEQ ID NO: 1836610 - RNA, 19 nt, Homo sapiens
  misc_RNA (1)...(19): siRNA sense strand
caaguuaucuguacagcau

SEQ ID NO: 1836611 - RNA, 19 nt, Homo sapiens
  misc_RNA (1)...(19): siRNA sense strand
ccagagaccugacacuuca

SEQ ID NO: 1836612 - RNA, 19 nt, Homo sapiens
  misc_RNA (1)...(19): siRNA sense strand
uaaccacgcugcugaagga

SEQ ID NO: 1836613 - RNA, 19 nt, Homo sapiens
  misc_RNA (1)...(19): siRNA sense strand
acucauagcuccgaacuuu

SEQ ID NO: 1836614 - RNA, 19 nt, Homo sapiens
  misc_RNA (1)...(19): siRNA sense strand
cagagcaucuucuccuauu

SEQ ID NO: 1836615 - RNA, 19 nt, Homo sapiens
  misc_RNA (1)...(19): siRNA sense strand
gaaguccaccugccaaaga

SEQ ID NO: 1836616 - RNA, 19 nt, Homo sapiens
  misc_RNA (1)...(19): siRNA sense strand
ugagaagaaugcuacagaa

SEQ ID NO: 1836617 - RNA, 19 nt, Homo sapiens
  misc_RNA (1)...(19): siRNA sense strand
caccaacccuuucauagga

SEQ ID NO: 1836618 - RNA, 19 nt, Homo sapiens
  misc_RNA (1)...(19): siRNA sense strand
gagaagaaugcuacagaaa

SEQ ID NO: 1836619 - RNA, 19 nt, Homo sapiens
  misc_RNA (1)...(19): siRNA sense strand
cuacacagaugaugaagag

SEQ ID NO: 1836620 - RNA, 19 nt, Homo sapiens
  misc_RNA (1)...(19): siRNA sense strand
caacagaauuggcuaucca

SEQ ID NO: 1836621 - RNA, 19 nt, Homo sapiens
  misc_RNA (1)...(19): siRNA sense strand
gcuauccaauucccauauu

SEQ ID NO: 1836622 - RNA, 19 nt, Homo sapiens
  misc_RNA (1)...(19): siRNA sense strand
gaugaagaaucugaaagug

SEQ ID NO: 1836623 - RNA, 19 nt, Homo sapiens
  misc_RNA (1)...(19): siRNA sense strand
gcacacugccuccaucuca

SEQ ID NO: 1836624 - RNA, 19 nt, Homo sapiens
  misc_RNA (1)...(19): siRNA sense strand
gacaaagaccuccugaaug

SEQ ID NO: 1836625 - RNA, 19 nt, Homo sapiens
  misc_RNA (1)...(19): siRNA sense strand
agacaaagaccuccugaau

SEQ ID NO: 1836626 - RNA, 19 nt, Homo sapiens
  misc_RNA (1)...(19): siRNA sense strand
ucacaacugcccuauuaaa

SEQ ID NO: 1836627 - RNA, 19 nt, Homo sapiens
  misc_RNA (1)...(19): siRNA sense strand
gagcaucuucuccuauuau

SEQ ID NO: 1836628 - RNA, 19 nt, Homo sapiens
  misc_RNA (1)...(19): siRNA sense strand
uaucaugggcuaccucgua

SEQ ID NO: 1836629 - RNA, 19 nt, Homo sapiens
  misc_RNA (1)...(19): siRNA sense strand
aaagaccuccugaaugaaa

SEQ ID NO: 1836630 - RNA, 19 nt, Homo sapiens
  misc_RNA (1)...(19): siRNA sense strand
cagcuaguaucucuuaucu

SEQ ID NO: 1836631 - RNA, 19 nt, Homo sapiens
  misc_RNA (1)...(19): siRNA sense strand
gaccauguguucccgaaag

SEQ ID NO: 1836632 - RNA, 19 nt, Homo sapiens
  misc_RNA (1)...(19): siRNA sense strand
caucaccaacccuuucaua

SEQ ID NO: 1836633 - RNA, 19 nt, Homo sapiens
  misc_RNA (1)...(19): siRNA sense strand
ggacuacugaccaacagaa

SEQ ID NO: 1836634 - RNA, 19 nt, Homo sapiens
  misc_RNA (1)...(19): siRNA sense strand
cuacugaccaacagaauug

SEQ ID NO: 1836635 - RNA, 19 nt, Homo sapiens
  misc_RNA (1)...(19): siRNA sense strand
gcugggcguugccuucuug

SEQ ID NO: 1836636 - RNA, 19 nt, Homo sapiens
  misc_RNA (1)...(19): siRNA sense strand
gauaggugaagaugaagaa

SEQ ID NO: 1836637 - RNA, 19 nt, Homo sapiens
  misc_RNA (1)...(19): siRNA sense strand
uccgauaggugaagaugaa

SEQ ID NO: 1836638 - RNA, 19 nt, Homo sapiens
  misc_RNA (1)...(19): siRNA sense strand
gcucuucugggaaugauaa

SEQ ID NO: 1836639 - RNA, 19 nt, Homo sapiens
  misc_RNA (1)...(19): siRNA sense strand
ugggauacuugcacacaaa

SEQ ID NO: 1836640 - RNA, 19 nt, Homo sapiens
  misc_RNA (1)...(19): siRNA sense strand
ggagucagcauuuuaugua

SEQ ID NO: 1836641 - RNA, 19 nt, Homo sapiens
  misc_RNA (1)...(19): siRNA sense strand
gcaauuggaaugguggauu

SEQ ID NO: 1836642 - RNA, 19 nt, Homo sapiens
  misc_RNA (1)...(19): siRNA sense strand
agagcaucuucuccuauua

SEQ ID NO: 1836643 - RNA, 19 nt, Homo sapiens
  misc_RNA (1)...(19): siRNA sense strand
caucugcuuugcaaacaug

SEQ ID NO: 1836644 - RNA, 19 nt, Homo sapiens
  misc_RNA (1)...(19): siRNA sense strand
gaggcaacgucaugggaau

SEQ ID NO: 1836645 - RNA, 19 nt, Homo sapiens
  misc_RNA (1)...(19): siRNA sense strand
gggauucugcaucauguuu

SEQ ID NO: 1836646 - RNA, 19 nt, Homo sapiens
  misc_RNA (1)...(19): siRNA sense strand
caaguuggucuguuguuug

SEQ ID NO: 1836647 - RNA, 19 nt, Homo sapiens
  misc_RNA (1)...(19): siRNA sense strand
agaagaaugcuacagaaau

SEQ ID NO: 1836648 - RNA, 19 nt, Homo sapiens
  misc_RNA (1)...(19): siRNA sense strand
caacugcccuauuaaaaca

SEQ ID NO: 1836649 - RNA, 19 nt, Homo sapiens
  misc_RNA (1)...(19): siRNA sense strand
gcaaaggcaauuggauuuc

SEQ ID NO: 1836650 - RNA, 19 nt, Homo sapiens
  misc_RNA (1)...(19): siRNA sense strand
acaacaugcugcucacugu

SEQ ID NO: 1836651 - RNA, 19 nt, Homo sapiens
  misc_RNA (1)...(19): siRNA sense strand
aguuaucuguacagcauua

SEQ ID NO: 1836652 - RNA, 19 nt, Homo sapiens
  misc_RNA (1)...(19): siRNA sense strand
gcgggauucugcaucaugu

SEQ ID NO: 1836653 - RNA, 19 nt, Homo sapiens
  misc_RNA (1)...(19): siRNA sense strand
ucauaggacuacugaccaa

SEQ ID NO: 1836654 - RNA, 19 nt, Homo sapiens
  misc_RNA (1)...(19): siRNA sense strand
cgcggaagcucauccuguu

SEQ ID NO: 1836655 - RNA, 19 nt, Homo sapiens
  misc_RNA (1)...(19): siRNA sense strand
cacagaugaugaagagaga

SEQ ID NO: 1836656 - RNA, 19 nt, Homo sapiens
  misc_RNA (1)...(19): siRNA sense strand
caucuucuccuauuaugau

SEQ ID NO: 1836657 - RNA, 19 nt, Homo sapiens
  misc_RNA (1)...(19): siRNA sense strand
acucuuggauggagcuauu

SEQ ID NO: 1836658 - RNA, 19 nt, Homo sapiens
  misc_RNA (1)...(19): siRNA sense strand
cuauccaauucccauauuu

SEQ ID NO: 1836659 - RNA, 19 nt, Homo sapiens
  misc_RNA (1)...(19): siRNA sense strand
gaccaacgcguccgcuguu

SEQ ID NO: 1836660 - RNA, 19 nt, Homo sapiens
  misc_RNA (1)...(19): siRNA sense strand
uguacagcauuaagcauga

SEQ ID NO: 1836661 - RNA, 19 nt, Homo sapiens
  misc_RNA (1)...(19): siRNA sense strand
ucagaauaauauccaguca

SEQ ID NO: 1836662 - RNA, 19 nt, Homo sapiens
  misc_RNA (1)...(19): siRNA sense strand
ggaguugguuuugcaauug

SEQ ID NO: 1836663 - RNA, 19 nt, Homo sapiens
  misc_RNA (1)...(19): siRNA sense strand
gauucugcaucauguuugu

SEQ ID NO: 1836664 - RNA, 19 nt, Homo sapiens
  misc_RNA (1)...(19): siRNA sense strand
cgugcaaguuggucuguug

SEQ ID NO: 1836665 - RNA, 19 nt, Homo sapiens
  misc_RNA (1)...(19): siRNA sense strand
ucgggagugugcucuauga

SEQ ID NO: 1836666 - RNA, 19 nt, Homo sapiens
  misc_RNA (1)...(19): siRNA sense strand
gcucaucaccaacccuuuc

SEQ ID NO: 1836667 - RNA, 19 nt, Homo sapiens
  misc_RNA (1)...(19): siRNA sense strand
aaauggcuauucucaugga

SEQ ID NO: 1836668 - RNA, 19 nt, Homo sapiens
  misc_RNA (1)...(19): siRNA sense strand
uggcuauucucauggauca

SEQ ID NO: 1836669 - RNA, 19 nt, Homo sapiens
  misc_RNA (1)...(19): siRNA sense strand
ggaagcucauccuguucau

SEQ ID NO: 1836670 - RNA, 19 nt, Homo sapiens
  misc_RNA (1)...(19): siRNA sense strand
gagugugcucuaugaguuu

SEQ ID NO: 1836671 - RNA, 19 nt, Homo sapiens
  misc_RNA (1)...(19): siRNA sense strand
agagagaggcaacgucaug

SEQ ID NO: 1836672 - RNA, 19 nt, Homo sapiens
  misc_RNA (1)...(19): siRNA sense strand
ugcaaaggcaauuggauuu

SEQ ID NO: 1836673 - RNA, 19 nt, Homo sapiens
  misc_RNA (1)...(19): siRNA sense strand
gggaguguguacgccauug

SEQ ID NO: 1836674 - RNA, 19 nt, Homo sapiens
  misc_RNA (1)...(19): siRNA sense strand
caucccaaguuaucuguac

SEQ ID NO: 1836675 - RNA, 19 nt, Homo sapiens
  misc_RNA (1)...(19): siRNA sense strand
ugccagcuaguaucucuua

SEQ ID NO: 1836676 - RNA, 19 nt, Homo sapiens
  misc_RNA (1)...(19): siRNA sense strand
acaauuauguuugccuucu

SEQ ID NO: 1836677 - RNA, 19 nt, Homo sapiens
  misc_RNA (1)...(19): siRNA sense strand
cauuaagcaugagaagaau

SEQ ID NO: 1836678 - RNA, 19 nt, Homo sapiens
  misc_RNA (1)...(19): siRNA sense strand
caaaggcaauuggauuucc

SEQ ID NO: 1836679 - RNA, 19 nt, Homo sapiens
  misc_RNA (1)...(19): siRNA sense strand
cuucugggaaugauaauug

SEQ ID NO: 1836680 - RNA, 19 nt, Homo sapiens
  misc_RNA (1)...(19): siRNA sense strand
gagguggcuuugugcucuu

SEQ ID NO: 1836681 - RNA, 19 nt, Homo sapiens
  misc_RNA (1)...(19): siRNA sense strand
uauccaauucccauauuug

SEQ ID NO: 1836682 - RNA, 19 nt, Homo sapiens
  misc_RNA (1)...(19): siRNA sense strand
cauugcggauguggcauuu

SEQ ID NO: 1836683 - RNA, 19 nt, Homo sapiens
  misc_RNA (1)...(19): siRNA sense strand
ggauucugcaucauguuug

SEQ ID NO: 1836684 - RNA, 19 nt, Homo sapiens
  misc_RNA (1)...(19): siRNA sense strand
caaagaccuccugaaugaa

SEQ ID NO: 1836685 - RNA, 19 nt, Homo sapiens
  misc_RNA (1)...(19): siRNA sense strand
ggacccguacauccucauu

SEQ ID NO: 1836686 - RNA, 19 nt, Homo sapiens
  misc_RNA (1)...(19): siRNA sense strand
uccagagcaucuucuccua

SEQ ID NO: 1836687 - RNA, 19 nt, Homo sapiens
  misc_RNA (1)...(19): siRNA sense strand
ccagagcaucuucuccuau

SEQ ID NO: 1836688 - RNA, 19 nt, Homo sapiens
  misc_RNA (1)...(19): siRNA sense strand
ucaccaacccuuucauagg

SEQ ID NO: 1836689 - RNA, 19 nt, Homo sapiens
  misc_RNA (1)...(19): siRNA sense strand
gcuaugccuuccugcugau

SEQ ID NO: 1836690 - RNA, 19 nt, Homo sapiens
  misc_RNA (1)...(19): siRNA sense strand
aaugguggauucgucaaug

SEQ ID NO: 1836691 - RNA, 19 nt, Homo sapiens
  misc_RNA (1)...(19): siRNA sense strand
ggaucacaacugcccuauu

SEQ ID NO: 1836692 - RNA, 19 nt, Homo sapiens
  misc_RNA (1)...(19): siRNA sense strand
aaguccaccugccaaagaa

SEQ ID NO: 1836693 - RNA, 19 nt, Homo sapiens
  misc_RNA (1)...(19): siRNA sense strand
gauguggcauuuuguaugg

SEQ ID NO: 1836694 - RNA, 19 nt, Homo sapiens
  misc_RNA (1)...(19): siRNA sense strand
gcaucuucuccuauuauga

SEQ ID NO: 1836695 - RNA, 19 nt, Homo sapiens
  misc_RNA (1)...(19): siRNA sense strand
ggacucauagcuccgaacu

SEQ ID NO: 1836696 - RNA, 19 nt, Homo sapiens
  misc_RNA (1)...(19): siRNA sense strand
gggagugugcucuaugagu

SEQ ID NO: 1836697 - RNA, 19 nt, Homo sapiens
  misc_RNA (1)...(19): siRNA sense strand
augaagaaucugaaaguga

SEQ ID NO: 1836698 - RNA, 19 nt, Homo sapiens
  misc_RNA (1)...(19): siRNA sense strand
ucauagcuccgaacuuugg

SEQ ID NO: 1836699 - RNA, 19 nt, Homo sapiens
  misc_RNA (1)...(19): siRNA sense strand
guacagcauuaagcaugag

SEQ ID NO: 1836700 - RNA, 19 nt, Homo sapiens
  misc_RNA (1)...(19): siRNA sense strand
gaaugaaaacgugcaaguu

SEQ ID NO: 1836701 - RNA, 19 nt, Homo sapiens
  misc_RNA (1)...(19): siRNA sense strand
uaucucuuaucucauugga

SEQ ID NO: 1836702 - RNA, 19 nt, Homo sapiens
  misc_RNA (1)...(19): siRNA sense strand
ugucuacacagaugaugaa

SEQ ID NO: 1836703 - RNA, 19 nt, Homo sapiens
  misc_RNA (1)...(19): siRNA sense strand
gcgaugugcugcuugauga

SEQ ID NO: 1836704 - RNA, 19 nt, Homo sapiens
  misc_RNA (1)...(19): siRNA sense strand
gcucuaugcucccgucuug

SEQ ID NO: 1836705 - RNA, 19 nt, Homo sapiens
  misc_RNA (1)...(19): siRNA sense strand
ccacguggaugaagcauac

SEQ ID NO: 1836706 - RNA, 19 nt, Homo sapiens
  misc_RNA (1)...(19): siRNA sense strand
gcucaccaccuguaacauu

SEQ ID NO: 1836707 - RNA, 19 nt, Homo sapiens
  misc_RNA (1)...(19): siRNA sense strand
gcaagcgcgugcccuucuu

SEQ ID NO: 1836708 - RNA, 19 nt, Homo sapiens
  misc_RNA (1)...(19): siRNA sense strand
ggacgugcgccaugucuca

SEQ ID NO: 1836709 - RNA, 19 nt, Homo sapiens
  misc_RNA (1)...(19): siRNA sense strand
gcgaggacgacuacaacua

SEQ ID NO: 1836710 - RNA, 19 nt, Homo sapiens
  misc_RNA (1)...(19): siRNA sense strand
ggacuacgccacgcuguuc

SEQ ID NO: 1836711 - RNA, 19 nt, Homo sapiens
  misc_RNA (1)...(19): siRNA sense strand
gcgcuggccuucauuagcu

SEQ ID NO: 1836712 - RNA, 19 nt, Homo sapiens
  misc_RNA (1)...(19): siRNA sense strand
gagcgaagacgugaagauc

SEQ ID NO: 1836713 - RNA, 19 nt, Homo sapiens
  misc_RNA (1)...(19): siRNA sense strand
ggagagcgaagacgugaag

SEQ ID NO: 1836714 - RNA, 19 nt, Homo sapiens
  misc_RNA (1)...(19): siRNA sense strand
ucgccgacaucuccuauuc

SEQ ID NO: 1836715 - RNA, 19 nt, Homo sapiens
  misc_RNA (1)...(19): siRNA sense strand
gacuacaacuacuacuaca

SEQ ID NO: 1836716 - RNA, 19 nt, Homo sapiens
  misc_RNA (1)...(19): siRNA sense strand
ggacgacuacaacuacuac

SEQ ID NO: 1836717 - RNA, 19 nt, Homo sapiens
  misc_RNA (1)...(19): siRNA sense strand
gggcauccucuaugaguuc

SEQ ID NO: 1836718 - RNA, 19 nt, Homo sapiens
  misc_RNA (1)...(19): siRNA sense strand
cgacuacaacuacuacuac

SEQ ID NO: 1836719 - RNA, 19 nt, Homo sapiens
  misc_RNA (1)...(19): siRNA sense strand
gcaugggacuggccaaccu

SEQ ID NO: 1836720 - RNA, 19 nt, Homo sapiens
  misc_RNA (1)...(19): siRNA sense strand
ggucaucgugcccauagug

SEQ ID NO: 1836721 - RNA, 19 nt, Homo sapiens
  misc_RNA (1)...(19): siRNA sense strand
gcgcucaccaccuguaaca

SEQ ID NO: 1836722 - RNA, 19 nt, Homo sapiens
  misc_RNA (1)...(19): siRNA sense strand
gaagaucggggugcuguuu

SEQ ID NO: 1836723 - RNA, 19 nt, Homo sapiens
  misc_RNA (1)...(19): siRNA sense strand
uggccaaccugcucuaugc

SEQ ID NO: 1836724 - RNA, 19 nt, Homo sapiens
  misc_RNA (1)...(19): siRNA sense strand
gaggacgacuacaacuacu

SEQ ID NO: 1836725 - RNA, 19 nt, Homo sapiens
  misc_RNA (1)...(19): siRNA sense strand
cgaggacgacuacaacuac

SEQ ID NO: 1836726 - RNA, 19 nt, Homo sapiens
  misc_RNA (1)...(19): siRNA sense strand
uggacaacaugcuguacau

SEQ ID NO: 1836727 - RNA, 19 nt, Homo sapiens
  misc_RNA (1)...(19): siRNA sense strand
cgccaugucucagucuaug

SEQ ID NO: 1836728 - RNA, 19 nt, Homo sapiens
  misc_RNA (1)...(19): siRNA sense strand
cgacuacaucgcccacaug

SEQ ID NO: 1836729 - RNA, 19 nt, Homo sapiens
  misc_RNA (1)...(19): siRNA sense strand
ucacuaugcggccucuguu

SEQ ID NO: 1836730 - RNA, 19 nt, Homo sapiens
  misc_RNA (1)...(19): siRNA sense strand
gggaauaugugcaggugua

SEQ ID NO: 1836731 - RNA, 19 nt, Homo sapiens
  misc_RNA (1)...(19): siRNA sense strand
ugaauaaggugucugaagu

SEQ ID NO: 1836732 - RNA, 19 nt, Homo sapiens
  misc_RNA (1)...(19): siRNA sense strand
gccaagacguucauagaga

SEQ ID NO: 1836733 - RNA, 19 nt, Homo sapiens
  misc_RNA (1)...(19): siRNA sense strand
caacguggcugcugucaac

SEQ ID NO: 1836734 - RNA, 19 nt, Homo sapiens
  misc_RNA (1)...(19): siRNA sense strand
ccacaucauuugagcuuau

SEQ ID NO: 1836735 - RNA, 19 nt, Homo sapiens
  misc_RNA (1)...(19): siRNA sense strand
gugaauaaauuuggcagaa

SEQ ID NO: 1836736 - RNA, 19 nt, Homo sapiens
  misc_RNA (1)...(19): siRNA sense strand
gaaucuccuugcaaacgua

SEQ ID NO: 1836737 - RNA, 19 nt, Homo sapiens
  misc_RNA (1)...(19): siRNA sense strand
gcccagaucuuuggucuuc

SEQ ID NO: 1836738 - RNA, 19 nt, Homo sapiens
  misc_RNA (1)...(19): siRNA sense strand
ucaacgcuaucuacuacua

SEQ ID NO: 1836739 - RNA, 19 nt, Homo sapiens
  misc_RNA (1)...(19): siRNA sense strand
ucauagagaucaaccagau

SEQ ID NO: 1836740 - RNA, 19 nt, Homo sapiens
  misc_RNA (1)...(19): siRNA sense strand
ucaccaagaugaauaaggu

SEQ ID NO: 1836741 - RNA, 19 nt, Homo sapiens
  misc_RNA (1)...(19): siRNA sense strand
uaaggugucugaaguguac

SEQ ID NO: 1836742 - RNA, 19 nt, Homo sapiens
  misc_RNA (1)...(19): siRNA sense strand
gaucuuuggucuucggaau

SEQ ID NO: 1836743 - RNA, 19 nt, Homo sapiens
  misc_RNA (1)...(19): siRNA sense strand
ugucaucuccuacgucaua

SEQ ID NO: 1836744 - RNA, 19 nt, Homo sapiens
  misc_RNA (1)...(19): siRNA sense strand
gcacugcucaugcaacaau

SEQ ID NO: 1836745 - RNA, 19 nt, Homo sapiens
  misc_RNA (1)...(19): siRNA sense strand
cagagucgccacaucauuu

SEQ ID NO: 1836746 - RNA, 19 nt, Homo sapiens
  misc_RNA (1)...(19): siRNA sense strand
ccaagacguucauagagau

SEQ ID NO: 1836747 - RNA, 19 nt, Homo sapiens
  misc_RNA (1)...(19): siRNA sense strand
ggucauccuuccaguaugg

SEQ ID NO: 1836748 - RNA, 19 nt, Homo sapiens
  misc_RNA (1)...(19): siRNA sense strand
cgucaacgcuaucuacuac

SEQ ID NO: 1836749 - RNA, 19 nt, Homo sapiens
  misc_RNA (1)...(19): siRNA sense strand
caaugagacuuacuauggu

SEQ ID NO: 1836750 - RNA, 19 nt, Homo sapiens
  misc_RNA (1)...(19): siRNA sense strand
acaaugagacuuacuaugg

SEQ ID NO: 1836751 - RNA, 19 nt, Homo sapiens
  misc_RNA (1)...(19): siRNA sense strand
gaauaaggugucugaagug

SEQ ID NO: 1836752 - RNA, 19 nt, Homo sapiens
  misc_RNA (1)...(19): siRNA sense strand
aaugagacuuacuauggua

SEQ ID NO: 1836753 - RNA, 19 nt, Homo sapiens
  misc_RNA (1)...(19): siRNA sense strand
gcagagucgccacaucauu

SEQ ID NO: 1836754 - RNA, 19 nt, Homo sapiens
  misc_RNA (1)...(19): siRNA sense strand
ggaaucuccuugcaaacgu

SEQ ID NO: 1836755 - RNA, 19 nt, Homo sapiens
  misc_RNA (1)...(19): siRNA sense strand
cggaggagcacgugcagua

SEQ ID NO: 1836756 - RNA, 19 nt, Homo sapiens
  misc_RNA (1)...(19): siRNA sense strand
caacaggaucagagcauga

SEQ ID NO: 1836757 - RNA, 19 nt, Homo sapiens
  misc_RNA (1)...(19): siRNA sense strand
gagcuuaucauuauuucca

SEQ ID NO: 1836758 - RNA, 19 nt, Homo sapiens
  misc_RNA (1)...(19): siRNA sense strand
ggaaaaggaggaacugaaa

SEQ ID NO: 1836759 - RNA, 19 nt, Homo sapiens
  misc_RNA (1)...(19): siRNA sense strand
uaggaccggugaauucaug

SEQ ID NO: 1836760 - RNA, 19 nt, Homo sapiens
  misc_RNA (1)...(19): siRNA sense strand
cagcagagucgccacauca

SEQ ID NO: 1836761 - RNA, 19 nt, Homo sapiens
  misc_RNA (1)...(19): siRNA sense strand
gugaauucauggaagacuu

SEQ ID NO: 1836762 - RNA, 19 nt, Homo sapiens
  misc_RNA (1)...(19): siRNA sense strand
auagagaucaaccagauuu

SEQ ID NO: 1836763 - RNA, 19 nt, Homo sapiens
  misc_RNA (1)...(19): siRNA sense strand
gcacuggcucuccaacuuc

SEQ ID NO: 1836764 - RNA, 19 nt, Homo sapiens
  misc_RNA (1)...(19): siRNA sense strand
gcagcagagucgccacauc

SEQ ID NO: 1836765 - RNA, 19 nt, Homo sapiens
  misc_RNA (1)...(19): siRNA sense strand
ugacguugcuguggucugu

SEQ ID NO: 1836766 - RNA, 19 nt, Homo sapiens
  misc_RNA (1)...(19): siRNA sense strand
ccguacagcuucauugucu

SEQ ID NO: 1836767 - RNA, 19 nt, Homo sapiens
  misc_RNA (1)...(19): siRNA sense strand
acagggagguggccgagau

SEQ ID NO: 1836768 - RNA, 19 nt, Homo sapiens
  misc_RNA (1)...(19): siRNA sense strand
ggcuugaucuucccguuca

SEQ ID NO: 1836769 - RNA, 19 nt, Homo sapiens
  misc_RNA (1)...(19): siRNA sense strand
ccgcgcugcucaucacuga

SEQ ID NO: 1836770 - RNA, 19 nt, Homo sapiens
  misc_RNA (1)...(19): siRNA sense strand
gugcagguguaucuuccaa

SEQ ID NO: 1836771 - RNA, 19 nt, Homo sapiens
  misc_RNA (1)...(19): siRNA sense strand
caagaugaauaaggugucu

SEQ ID NO: 1836772 - RNA, 19 nt, Homo sapiens
  misc_RNA (1)...(19): siRNA sense strand
ucaccaccaucuacaucuu

SEQ ID NO: 1836773 - RNA, 19 nt, Homo sapiens
  misc_RNA (1)...(19): siRNA sense strand
guaaccguguccauguuuc

SEQ ID NO: 1836774 - RNA, 19 nt, Homo sapiens
  misc_RNA (1)...(19): siRNA sense strand
caucuacaucuucuugauu

SEQ ID NO: 1836775 - RNA, 19 nt, Homo sapiens
  misc_RNA (1)...(19): siRNA sense strand
ccaucuacaucuucuugau

SEQ ID NO: 1836776 - RNA, 19 nt, Homo sapiens
  misc_RNA (1)...(19): siRNA sense strand
guacagcuucauugucuuc

SEQ ID NO: 1836777 - RNA, 19 nt, Homo sapiens
  misc_RNA (1)...(19): siRNA sense strand
ccggugaauucauggaaga

SEQ ID NO: 1836778 - RNA, 19 nt, Homo sapiens
  misc_RNA (1)...(19): siRNA sense strand
gccaagaaagcccuacaga

SEQ ID NO: 1836779 - RNA, 19 nt, Homo sapiens
  misc_RNA (1)...(19): siRNA sense strand
gagacuuacuaugguagga

SEQ ID NO: 1836780 - RNA, 19 nt, Homo sapiens
  misc_RNA (1)...(19): siRNA sense strand
aauaaggugucugaagugu

SEQ ID NO: 1836781 - RNA, 19 nt, Homo sapiens
  misc_RNA (1)...(19): siRNA sense strand
agaccaaggccaagacguu

SEQ ID NO: 1836782 - RNA, 19 nt, Homo sapiens
  misc_RNA (1)...(19): siRNA sense strand
aagggaggcugacgcuugu

SEQ ID NO: 1836783 - RNA, 19 nt, Homo sapiens
  misc_RNA (1)...(19): siRNA sense strand
gcaguccucucggccaucu

SEQ ID NO: 1836784 - RNA, 19 nt, Homo sapiens
  misc_RNA (1)...(19): siRNA sense strand
cugcugggcuucuccaucu

SEQ ID NO: 1836785 - RNA, 19 nt, Homo sapiens
  misc_RNA (1)...(19): siRNA sense strand
gccacaucauuugagcuua

SEQ ID NO: 1836786 - RNA, 19 nt, Homo sapiens
  misc_RNA (1)...(19): siRNA sense strand
gguaggaccggugaauuca

SEQ ID NO: 1836787 - RNA, 19 nt, Homo sapiens
  misc_RNA (1)...(19): siRNA sense strand
uucggaaucuccuugcaaa

SEQ ID NO: 1836788 - RNA, 19 nt, Homo sapiens
  misc_RNA (1)...(19): siRNA sense strand
ugcacuggcucuccaacuu

SEQ ID NO: 1836789 - RNA, 19 nt, Homo sapiens
  misc_RNA (1)...(19): siRNA sense strand
caucacuguuggcauccuu

SEQ ID NO: 1836790 - RNA, 19 nt, Homo sapiens
  misc_RNA (1)...(19): siRNA sense strand
caccaucuacaucuucuug

SEQ ID NO: 1836791 - RNA, 19 nt, Homo sapiens
  misc_RNA (1)...(19): siRNA sense strand
cagcaucgucugugucauc

SEQ ID NO: 1836792 - RNA, 19 nt, Homo sapiens
  misc_RNA (1)...(19): siRNA sense strand
cuacuacgcggaccagauc

SEQ ID NO: 1836793 - RNA, 19 nt, Homo sapiens
  misc_RNA (1)...(19): siRNA sense strand
ggaauaugugcagguguau

SEQ ID NO: 1836794 - RNA, 19 nt, Homo sapiens
  misc_RNA (1)...(19): siRNA sense strand
gcaacaauuuuacaaugag

SEQ ID NO: 1836795 - RNA, 19 nt, Homo sapiens
  misc_RNA (1)...(19): siRNA sense strand
guguccauguuuccauuug

SEQ ID NO: 1836796 - RNA, 19 nt, Homo sapiens
  misc_RNA (1)...(19): siRNA sense strand
gaccuucugcgccguguuc

SEQ ID NO: 1836797 - RNA, 19 nt, Homo sapiens
  misc_RNA (1)...(19): siRNA sense strand
ggccaagacguucauagag

SEQ ID NO: 1836798 - RNA, 19 nt, Homo sapiens
  misc_RNA (1)...(19): siRNA sense strand
aaagagcuuccaccuguca

SEQ ID NO: 1836799 - RNA, 19 nt, Homo sapiens
  misc_RNA (1)...(19): siRNA sense strand
ucugaaguguacccggaaa

SEQ ID NO: 1836800 - RNA, 19 nt, Homo sapiens
  misc_RNA (1)...(19): siRNA sense strand
gaccggugaauucauggaa

SEQ ID NO: 1836801 - RNA, 19 nt, Homo sapiens
  misc_RNA (1)...(19): siRNA sense strand
agaugaauaaggugucuga

SEQ ID NO: 1836802 - RNA, 19 nt, Homo sapiens
  misc_RNA (1)...(19): siRNA sense strand
acguugcuguggucuguaa

SEQ ID NO: 1836803 - RNA, 19 nt, Homo sapiens
  misc_RNA (1)...(19): siRNA sense strand
aucuacaucuucuugauug

SEQ ID NO: 1836804 - RNA, 19 nt, Homo sapiens
  misc_RNA (1)...(19): siRNA sense strand
agacguucauagagaucaa

SEQ ID NO: 1836805 - RNA, 19 nt, Homo sapiens
  misc_RNA (1)...(19): siRNA sense strand
ggaggaacugaaagagcuu

SEQ ID NO: 1836806 - RNA, 19 nt, Homo sapiens
  misc_RNA (1)...(19): siRNA sense strand
ccguguccauguuuccauu

SEQ ID NO: 1836807 - RNA, 19 nt, Homo sapiens
  misc_RNA (1)...(19): siRNA sense strand
cauagagaucaaccagauu

SEQ ID NO: 1836808 - RNA, 19 nt, Homo sapiens
  misc_RNA (1)...(19): siRNA sense strand
gcgggcagcucuucgauua

SEQ ID NO: 1836809 - RNA, 19 nt, Homo sapiens
  misc_RNA (1)...(19): siRNA sense strand
guacagaccuucgucauuc

SEQ ID NO: 1836810 - RNA, 19 nt, Homo sapiens
  misc_RNA (1)...(19): siRNA sense strand
ggaaacaucuccagcuucu

SEQ ID NO: 1836811 - RNA, 19 nt, Homo sapiens
  misc_RNA (1)...(19): siRNA sense strand
cuacugggcuggcuguuug

SEQ ID NO: 1836812 - RNA, 19 nt, Homo sapiens
  misc_RNA (1)...(19): siRNA sense strand
ggaagagccugacccacau

SEQ ID NO: 1836813 - RNA, 19 nt, Homo sapiens
  misc_RNA (1)...(19): siRNA sense strand
gaggugggcugcuccaaca

SEQ ID NO: 1836814 - RNA, 19 nt, Homo sapiens
  misc_RNA (1)...(19): siRNA sense strand
gcucugggcuggaacaucu

SEQ ID NO: 1836815 - RNA, 19 nt, Homo sapiens
  misc_RNA (1)...(19): siRNA sense strand
gaagcugacgcccauguuu

SEQ ID NO: 1836816 - RNA, 19 nt, Homo sapiens
  misc_RNA (1)...(19): siRNA sense strand
gcagcacgcucuucaccau

SEQ ID NO: 1836817 - RNA, 19 nt, Homo sapiens
  misc_RNA (1)...(19): siRNA sense strand
ugacaauccugcugacauc

SEQ ID NO: 1836818 - RNA, 19 nt, Homo sapiens
  misc_RNA (1)...(19): siRNA sense strand
ucaaugcccugcucaugau

SEQ ID NO: 1836819 - RNA, 19 nt, Homo sapiens
  misc_RNA (1)...(19): siRNA sense strand
agaaggcccugauugacaa

SEQ ID NO: 1836820 - RNA, 19 nt, Homo sapiens
  misc_RNA (1)...(19): siRNA sense strand
ggaccuggaugcugaugag

SEQ ID NO: 1836821 - RNA, 19 nt, Homo sapiens
  misc_RNA (1)...(19): siRNA sense strand
agucauugcugcauauuuc

SEQ ID NO: 1836822 - RNA, 19 nt, Homo sapiens
  misc_RNA (1)...(19): siRNA sense strand
gggcagcucuucgauuaca

SEQ ID NO: 1836823 - RNA, 19 nt, Homo sapiens
  misc_RNA (1)...(19): siRNA sense strand
gguacagaccuucgucauu

SEQ ID NO: 1836824 - RNA, 19 nt, Homo sapiens
  misc_RNA (1)...(19): siRNA sense strand
caauccugcugacauccua

SEQ ID NO: 1836825 - RNA, 19 nt, Homo sapiens
  misc_RNA (1)...(19): siRNA sense strand
cuccggagcuguauucauc

SEQ ID NO: 1836826 - RNA, 19 nt, Homo sapiens
  misc_RNA (1)...(19): siRNA sense strand
ccuagucauugcugcauau

SEQ ID NO: 1836827 - RNA, 19 nt, Homo sapiens
  misc_RNA (1)...(19): siRNA sense strand
agagugccauggagaugaa

SEQ ID NO: 1836828 - RNA, 19 nt, Homo sapiens
  misc_RNA (1)...(19): siRNA sense strand
gagagugccauggagauga

SEQ ID NO: 1836829 - RNA, 19 nt, Homo sapiens
  misc_RNA (1)...(19): siRNA sense strand
cagaaggcccugauugaca

SEQ ID NO: 1836830 - RNA, 19 nt, Homo sapiens
  misc_RNA (1)...(19): siRNA sense strand
gaucucaguggacauguuc

SEQ ID NO: 1836831 - RNA, 19 nt, Homo sapiens
  misc_RNA (1)...(19): siRNA sense strand
ugggaaacaucuccagcuu

SEQ ID NO: 1836832 - RNA, 19 nt, Homo sapiens
  misc_RNA (1)...(19): siRNA sense strand
ccugcauccucauggguua

SEQ ID NO: 1836833 - RNA, 19 nt, Homo sapiens
  misc_RNA (1)...(19): siRNA sense strand
caagaucucaguggacaug

SEQ ID NO: 1836834 - RNA, 19 nt, Homo sapiens
  misc_RNA (1)...(19): siRNA sense strand
gcuccucacucccuguaca

SEQ ID NO: 1836835 - RNA, 19 nt, Homo sapiens
  misc_RNA (1)...(19): siRNA sense strand
gcuuggcuguugcuggauu

SEQ ID NO: 1836836 - RNA, 19 nt, Homo sapiens
  misc_RNA (1)...(19): siRNA sense strand
ccauugugcuguucuucug

SEQ ID NO: 1836837 - RNA, 19 nt, Homo sapiens
  misc_RNA (1)...(19): siRNA sense strand
gcccagaaggcccugauug

SEQ ID NO: 1836838 - RNA, 19 nt, Homo sapiens
  misc_RNA (1)...(19): siRNA sense strand
cauguucuccggagcugua

SEQ ID NO: 1836839 - RNA, 19 nt, Homo sapiens
  misc_RNA (1)...(19): siRNA sense strand
ggcaugaucagccgcauuc

SEQ ID NO: 1836840 - RNA, 19 nt, Homo sapiens
  misc_RNA (1)...(19): siRNA sense strand
cccagaaggcccugauuga

SEQ ID NO: 1836841 - RNA, 19 nt, Homo sapiens
  misc_RNA (1)...(19): siRNA sense strand
cgaguggaaugcgcucuuc

SEQ ID NO: 1836842 - RNA, 19 nt, Homo sapiens
  misc_RNA (1)...(19): siRNA sense strand
gcccagagagugccaugga

SEQ ID NO: 1836843 - RNA, 19 nt, Homo sapiens
  misc_RNA (1)...(19): siRNA sense strand
gcacgcucuucaccaugga

SEQ ID NO: 1836844 - RNA, 19 nt, Homo sapiens
  misc_RNA (1)...(19): siRNA sense strand
ucgcuggccuccaucuuca

SEQ ID NO: 1836845 - RNA, 19 nt, Homo sapiens
  misc_RNA (1)...(19): siRNA sense strand
gagccugacccacaucaag

SEQ ID NO: 1836846 - RNA, 19 nt, Homo sapiens
  misc_RNA (1)...(19): siRNA sense strand
gaucagccgcauucuguac

SEQ ID NO: 1836847 - RNA, 19 nt, Homo sapiens
  misc_RNA (1)...(19): siRNA sense strand
gcuacugggcuggcuguuu

SEQ ID NO: 1836848 - RNA, 19 nt, Homo sapiens
  misc_RNA (1)...(19): siRNA sense strand
caucuaugccuccgucauc

SEQ ID NO: 1836849 - RNA, 19 nt, Homo sapiens
  misc_RNA (1)...(19): siRNA sense strand
cuucugggcaucaccauga

SEQ ID NO: 1836850 - RNA, 19 nt, Homo sapiens
  misc_RNA (1)...(19): siRNA sense strand
ggaacgggaggaccuggau

SEQ ID NO: 1836851 - RNA, 19 nt, Homo sapiens
  misc_RNA (1)...(19): siRNA sense strand
cauauuuccugcuggucau

SEQ ID NO: 1836852 - RNA, 19 nt, Homo sapiens
  misc_RNA (1)...(19): siRNA sense strand
cgggucucuucgacaaaua

SEQ ID NO: 1836853 - RNA, 19 nt, Homo sapiens
  misc_RNA (1)...(19): siRNA sense strand
cucaaugcccugcucauga

SEQ ID NO: 1836854 - RNA, 19 nt, Homo sapiens
  misc_RNA (1)...(19): siRNA sense strand
uccaggcagucucuagcua

SEQ ID NO: 1836855 - RNA, 19 nt, Homo sapiens
  misc_RNA (1)...(19): siRNA sense strand
gaagagccugacccacauc

SEQ ID NO: 1836856 - RNA, 19 nt, Homo sapiens
  misc_RNA (1)...(19): siRNA sense strand
gaagcuggcuccuauguuc

SEQ ID NO: 1836857 - RNA, 19 nt, Homo sapiens
  misc_RNA (1)...(19): siRNA sense strand
gcaaggaggccuacaucua

SEQ ID NO: 1836858 - RNA, 19 nt, Homo sapiens
  misc_RNA (1)...(19): siRNA sense strand
ucacagcccugguggauga

SEQ ID NO: 1836859 - RNA, 19 nt, Homo sapiens
  misc_RNA (1)...(19): siRNA sense strand
ggucaacacuaccaacaug

SEQ ID NO: 1836860 - RNA, 19 nt, Homo sapiens
  misc_RNA (1)...(19): siRNA sense strand
gguguuggcuggacuggaa

SEQ ID NO: 1836861 - RNA, 19 nt, Homo sapiens
  misc_RNA (1)...(19): siRNA sense strand
uauggaagcuggcuccuau

SEQ ID NO: 1836862 - RNA, 19 nt, Homo sapiens
  misc_RNA (1)...(19): siRNA sense strand
ccuggauccuuguguauuu

SEQ ID NO: 1836863 - RNA, 19 nt, Homo sapiens
  misc_RNA (1)...(19): siRNA sense strand
caaggaggccuacaucuag

SEQ ID NO: 1836864 - RNA, 19 nt, Homo sapiens
  misc_RNA (1)...(19): siRNA sense strand
cuacaacucuuuccacaac

SEQ ID NO: 1836865 - RNA, 19 nt, Homo sapiens
  misc_RNA (1)...(19): siRNA sense strand
ggguauuuaugucuucaaa

SEQ ID NO: 1836866 - RNA, 19 nt, Homo sapiens
  misc_RNA (1)...(19): siRNA sense strand
cuacauguuccucaccuua

SEQ ID NO: 1836867 - RNA, 19 nt, Homo sapiens
  misc_RNA (1)...(19): siRNA sense strand
cuggaaagguggucuacuu

SEQ ID NO: 1836868 - RNA, 19 nt, Homo sapiens
  misc_RNA (1)...(19): siRNA sense strand
gaaugugucucuauuuccu

SEQ ID NO: 1836869 - RNA, 19 nt, Homo sapiens
  misc_RNA (1)...(19): siRNA sense strand
cauucuggcugaacaucua

SEQ ID NO: 1836870 - RNA, 19 nt, Homo sapiens
  misc_RNA (1)...(19): siRNA sense strand
gaagagguccauugcugau

SEQ ID NO: 1836871 - RNA, 19 nt, Homo sapiens
  misc_RNA (1)...(19): siRNA sense strand
ggcauccucuucuacauca

SEQ ID NO: 1836872 - RNA, 19 nt, Homo sapiens
  misc_RNA (1)...(19): siRNA sense strand
gagcgcaacaugcaucaga

SEQ ID NO: 1836873 - RNA, 19 nt, Homo sapiens
  misc_RNA (1)...(19): siRNA sense strand
caacccagaucuucuucuc

SEQ ID NO: 1836874 - RNA, 19 nt, Homo sapiens
  misc_RNA (1)...(19): siRNA sense strand
cggcugcugugcuaucauu

SEQ ID NO: 1836875 - RNA, 19 nt, Homo sapiens
  misc_RNA (1)...(19): siRNA sense strand
ugacggacgggcuggauaa

SEQ ID NO: 1836876 - RNA, 19 nt, Homo sapiens
  misc_RNA (1)...(19): siRNA sense strand
aaacucugcuggucuuucu

SEQ ID NO: 1836877 - RNA, 19 nt, Homo sapiens
  misc_RNA (1)...(19): siRNA sense strand
caaccgauucuaugacaau

SEQ ID NO: 1836878 - RNA, 19 nt, Homo sapiens
  misc_RNA (1)...(19): siRNA sense strand
ggacuggaaagguggucua

SEQ ID NO: 1836879 - RNA, 19 nt, Homo sapiens
  misc_RNA (1)...(19): siRNA sense strand
cuacaucacacccaacuuc

SEQ ID NO: 1836880 - RNA, 19 nt, Homo sapiens
  misc_RNA (1)...(19): siRNA sense strand
acauguuccucaccuuaaa

SEQ ID NO: 1836881 - RNA, 19 nt, Homo sapiens
  misc_RNA (1)...(19): siRNA sense strand
uggaaacucugcuggucuu

SEQ ID NO: 1836882 - RNA, 19 nt, Homo sapiens
  misc_RNA (1)...(19): siRNA sense strand
ccgauucuaugacaauauc

SEQ ID NO: 1836883 - RNA, 19 nt, Homo sapiens
  misc_RNA (1)...(19): siRNA sense strand
uugaaugugucucuauuuc

SEQ ID NO: 1836884 - RNA, 19 nt, Homo sapiens
  misc_RNA (1)...(19): siRNA sense strand
ggaagcuggcuccuauguu

SEQ ID NO: 1836885 - RNA, 19 nt, Homo sapiens
  misc_RNA (1)...(19): siRNA sense strand
ggauaagccaggucagauc

SEQ ID NO: 1836886 - RNA, 19 nt, Homo sapiens
  misc_RNA (1)...(19): siRNA sense strand
cuacagggacuccaucauc

SEQ ID NO: 1836887 - RNA, 19 nt, Homo sapiens
  misc_RNA (1)...(19): siRNA sense strand
agagguccauugcugaugu

SEQ ID NO: 1836888 - RNA, 19 nt, Homo sapiens
  misc_RNA (1)...(19): siRNA sense strand
ugacccagcugccuaucuc

SEQ ID NO: 1836889 - RNA, 19 nt, Homo sapiens
  misc_RNA (1)...(19): siRNA sense strand
ucgccuggauccuugugua

SEQ ID NO: 1836890 - RNA, 19 nt, Homo sapiens
  misc_RNA (1)...(19): siRNA sense strand
gcugcugucugcaucaucu

SEQ ID NO: 1836891 - RNA, 19 nt, Homo sapiens
  misc_RNA (1)...(19): siRNA sense strand
acaacucuuuccacaacaa

SEQ ID NO: 1836892 - RNA, 19 nt, Homo sapiens
  misc_RNA (1)...(19): siRNA sense strand
cugcuggucuuucuucaca

SEQ ID NO: 1836893 - RNA, 19 nt, Homo sapiens
  misc_RNA (1)...(19): siRNA sense strand
ggugucaaccgauucuaug

SEQ ID NO: 1836894 - RNA, 19 nt, Homo sapiens
  misc_RNA (1)...(19): siRNA sense strand
caucaucuccugggccauu

SEQ ID NO: 1836895 - RNA, 19 nt, Homo sapiens
  misc_RNA (1)...(19): siRNA sense strand
aagcagcgcauccaaguca

SEQ ID NO: 1836896 - RNA, 19 nt, Homo sapiens
  misc_RNA (1)...(19): siRNA sense strand
ugaagcagcgcauccaagu

SEQ ID NO: 1836897 - RNA, 19 nt, Homo sapiens
  misc_RNA (1)...(19): siRNA sense strand
uggucaaggugcagaagaa

SEQ ID NO: 1836898 - RNA, 19 nt, Homo sapiens
  misc_RNA (1)...(19): siRNA sense strand
ccagcgcugugguggaguu

SEQ ID NO: 1836899 - RNA, 19 nt, Homo sapiens
  misc_RNA (1)...(19): siRNA sense strand
cagcccugguggaugagua

SEQ ID NO: 1836900 - RNA, 19 nt, Homo sapiens
  misc_RNA (1)...(19): siRNA sense strand
gugcagaugacgcaacuca

SEQ ID NO: 1836901 - RNA, 19 nt, Homo sapiens
  misc_RNA (1)...(19): siRNA sense strand
ggcugaacaucuacuacau

SEQ ID NO: 1836902 - RNA, 19 nt, Homo sapiens
  misc_RNA (1)...(19): siRNA sense strand
cuuugaaugugucucuauu

SEQ ID NO: 1836903 - RNA, 19 nt, Homo sapiens
  misc_RNA (1)...(19): siRNA sense strand
ggcuggcguuccuggcaua

SEQ ID NO: 1836904 - RNA, 19 nt, Homo sapiens
  misc_RNA (1)...(19): siRNA sense strand
cccagaucuucuucucaua

SEQ ID NO: 1836905 - RNA, 19 nt, Homo sapiens
  misc_RNA (1)...(19): siRNA sense strand
gcgcugugguggaguucug

SEQ ID NO: 1836906 - RNA, 19 nt, Homo sapiens
  misc_RNA (1)...(19): siRNA sense strand
gcccagcgaagacaucguu

SEQ ID NO: 1836907 - RNA, 19 nt, Homo sapiens
  misc_RNA (1)...(19): siRNA sense strand
ccuugcggcugcugugcua

SEQ ID NO: 1836908 - RNA, 19 nt, Homo sapiens
  misc_RNA (1)...(19): siRNA sense strand
ggucuuucuucacaccaau

SEQ ID NO: 1836909 - RNA, 19 nt, Homo sapiens
  misc_RNA (1)...(19): siRNA sense strand
gcaugagccugcuguuccu

SEQ ID NO: 1836910 - RNA, 19 nt, Homo sapiens
  misc_RNA (1)...(19): siRNA sense strand
caucacagcccugguggau

SEQ ID NO: 1836911 - RNA, 19 nt, Homo sapiens
  misc_RNA (1)...(19): siRNA sense strand
gaccgcugcuucuccaacu

SEQ ID NO: 1836912 - RNA, 19 nt, Homo sapiens
  misc_RNA (1)...(19): siRNA sense strand
aaccgauucuaugacaaua

SEQ ID NO: 1836913 - RNA, 19 nt, Homo sapiens
  misc_RNA (1)...(19): siRNA sense strand
ugaucggucucucuaacau

SEQ ID NO: 1836914 - RNA, 19 nt, Homo sapiens
  misc_RNA (1)...(19): siRNA sense strand
gagguccauugcugaugug

SEQ ID NO: 1836915 - RNA, 19 nt, Homo sapiens
  misc_RNA (1)...(19): siRNA sense strand
uuuacuaccuguacaacuc

SEQ ID NO: 1836916 - RNA, 19 nt, Homo sapiens
  misc_RNA (1)...(19): siRNA sense strand
cagcaaggaggccuacauc

SEQ ID NO: 1836917 - RNA, 19 nt, Homo sapiens
  misc_RNA (1)...(19): siRNA sense strand
ccggguacauggccuacau

SEQ ID NO: 1836918 - RNA, 19 nt, Homo sapiens
  misc_RNA (1)...(19): siRNA sense strand
ugacaauauccaagagaug

SEQ ID NO: 1836919 - RNA, 19 nt, Homo sapiens
  misc_RNA (1)...(19): siRNA sense strand
ucuaugacaauauccaaga

SEQ ID NO: 1836920 - RNA, 19 nt, Homo sapiens
  misc_RNA (1)...(19): siRNA sense strand
gggcauugacagccaguuc

SEQ ID NO: 1836921 - RNA, 19 nt, Homo sapiens
  misc_RNA (1)...(19): siRNA sense strand
cagcauguucgcaggauuc

SEQ ID NO: 1836922 - RNA, 19 nt, Homo sapiens
  misc_RNA (1)...(19): siRNA sense strand
ccagcauguucgcaggauu

SEQ ID NO: 1836923 - RNA, 19 nt, Homo sapiens
  misc_RNA (1)...(19): siRNA sense strand
caucgucugcugcaucaau

SEQ ID NO: 1836924 - RNA, 19 nt, Homo sapiens
  misc_RNA (1)...(19): siRNA sense strand
acccagaucuucuucucau

SEQ ID NO: 1836925 - RNA, 19 nt, Homo sapiens
  misc_RNA (1)...(19): siRNA sense strand
gggcauccucuucuacauc

SEQ ID NO: 1836926 - RNA, 19 nt, Homo sapiens
  misc_RNA (1)...(19): siRNA sense strand
ggccaucgccuggauccuu

SEQ ID NO: 1836927 - RNA, 19 nt, Homo sapiens
  misc_RNA (1)...(19): siRNA sense strand
uacauguuccucaccuuaa

SEQ ID NO: 1836928 - RNA, 19 nt, Homo sapiens
  misc_RNA (1)...(19): siRNA sense strand
uuucagugcugugcagaug

SEQ ID NO: 1836929 - RNA, 19 nt, Homo sapiens
  misc_RNA (1)...(19): siRNA sense strand
ucgcaggauucgucaucuu

SEQ ID NO: 1836930 - RNA, 19 nt, Homo sapiens
  misc_RNA (1)...(19): siRNA sense strand
gcuacaacucuuuccacaa

SEQ ID NO: 1836931 - RNA, 19 nt, Homo sapiens
  misc_RNA (1)...(19): siRNA sense strand
ccgcuucgacuuccucaug

SEQ ID NO: 1836932 - RNA, 19 nt, Homo sapiens
  misc_RNA (1)...(19): siRNA sense strand
gcugaacaucuacuacauc

SEQ ID NO: 1836933 - RNA, 19 nt, Homo sapiens
  misc_RNA (1)...(19): siRNA sense strand
ucacgaagagguccauugc

SEQ ID NO: 1836934 - RNA, 19 nt, Homo sapiens
  misc_RNA (1)...(19): siRNA sense strand
ccagaucuucuucucauac

SEQ ID NO: 1836935 - RNA, 19 nt, Homo sapiens
  misc_RNA (1)...(19): siRNA sense strand
cgacacugccguggaaaca

SEQ ID NO: 1836936 - RNA, 19 nt, Homo sapiens
  misc_RNA (1)...(19): siRNA sense strand
ucuccugggccauuuacua

SEQ ID NO: 1836937 - RNA, 19 nt, Homo sapiens
  misc_RNA (1)...(19): siRNA sense strand
guauggaagcuggcuccua

SEQ ID NO: 1836938 - RNA, 19 nt, Homo sapiens
  misc_RNA (1)...(19): siRNA sense strand
caacucaccaugggaaacu

SEQ ID NO: 1836939 - RNA, 19 nt, Homo sapiens
  misc_RNA (1)...(19): siRNA sense strand
ggaaacucugcuggucuuu

SEQ ID NO: 1836940 - RNA, 19 nt, Homo sapiens
  misc_RNA (1)...(19): siRNA sense strand
ucaaccgauucuaugacaa

SEQ ID NO: 1836941 - RNA, 19 nt, Homo sapiens
  misc_RNA (1)...(19): siRNA sense strand
ccugaucggucucucuaac

SEQ ID NO: 1836942 - RNA, 19 nt, Homo sapiens
  misc_RNA (1)...(19): siRNA sense strand
uaccugaucggucucucua

SEQ ID NO: 1836943 - RNA, 19 nt, Homo sapiens
  misc_RNA (1)...(19): siRNA sense strand
gccauuuacuaccuguaca

SEQ ID NO: 1836944 - RNA, 19 nt, Homo sapiens
  misc_RNA (1)...(19): siRNA sense strand
gaacggcgcucucgugaaa

SEQ ID NO: 1836945 - RNA, 19 nt, Homo sapiens
  misc_RNA (1)...(19): siRNA sense strand
gaaaagaucugccccuugu

SEQ ID NO: 1836946 - RNA, 19 nt, Homo sapiens
  misc_RNA (1)...(19): siRNA sense strand
gagaaguggucuagcaaga

SEQ ID NO: 1836947 - RNA, 19 nt, Homo sapiens
  misc_RNA (1)...(19): siRNA sense strand
gaaguggucuagcaagauc

SEQ ID NO: 1836948 - RNA, 19 nt, Homo sapiens
  misc_RNA (1)...(19): siRNA sense strand
gcaucaaguucuaucugua

SEQ ID NO: 1836949 - RNA, 19 nt, Homo sapiens
  misc_RNA (1)...(19): siRNA sense strand
guuauugccuggauauaug

SEQ ID NO: 1836950 - RNA, 19 nt, Homo sapiens
  misc_RNA (1)...(19): siRNA sense strand
gaaaccgacccacaucauu

SEQ ID NO: 1836951 - RNA, 19 nt, Homo sapiens
  misc_RNA (1)...(19): siRNA sense strand
cauccuugguugaucuuua

SEQ ID NO: 1836952 - RNA, 19 nt, Homo sapiens
  misc_RNA (1)...(19): siRNA sense strand
cagauauucuucucuuaug

SEQ ID NO: 1836953 - RNA, 19 nt, Homo sapiens
  misc_RNA (1)...(19): siRNA sense strand
gaacagugguaccaguuuu

SEQ ID NO: 1836954 - RNA, 19 nt, Homo sapiens
  misc_RNA (1)...(19): siRNA sense strand
ggacucagauauucuucuc

SEQ ID NO: 1836955 - RNA, 19 nt, Homo sapiens
  misc_RNA (1)...(19): siRNA sense strand
ugcagugucugaaagauuu

SEQ ID NO: 1836956 - RNA, 19 nt, Homo sapiens
  misc_RNA (1)...(19): siRNA sense strand
ggaggugcguuucucauac

SEQ ID NO: 1836957 - RNA, 19 nt, Homo sapiens
  misc_RNA (1)...(19): siRNA sense strand
ggcaucaccugcugggaaa

SEQ ID NO: 1836958 - RNA, 19 nt, Homo sapiens
  misc_RNA (1)...(19): siRNA sense strand
gacggaggguggcauguau

SEQ ID NO: 1836959 - RNA, 19 nt, Homo sapiens
  misc_RNA (1)...(19): siRNA sense strand
ggacgaggcugagggaaaa

SEQ ID NO: 1836960 - RNA, 19 nt, Homo sapiens
  misc_RNA (1)...(19): siRNA sense strand
gcuacaacaaguacaagua

SEQ ID NO: 1836961 - RNA, 19 nt, Homo sapiens
  misc_RNA (1)...(19): siRNA sense strand
gaaguugaaggacagauca

SEQ ID NO: 1836962 - RNA, 19 nt, Homo sapiens
  misc_RNA (1)...(19): siRNA sense strand
gagaagcugcagugucuga

SEQ ID NO: 1836963 - RNA, 19 nt, Homo sapiens
  misc_RNA (1)...(19): siRNA sense strand
cuagcaagaucgacuuugu

SEQ ID NO: 1836964 - RNA, 19 nt, Homo sapiens
  misc_RNA (1)...(19): siRNA sense strand
gccgaggcaucaaguucua

SEQ ID NO: 1836965 - RNA, 19 nt, Homo sapiens
  misc_RNA (1)...(19): siRNA sense strand
gcgagggagccacaccuua

SEQ ID NO: 1836966 - RNA, 19 nt, Homo sapiens
  misc_RNA (1)...(19): siRNA sense strand
uguuucagcucuuugacua

SEQ ID NO: 1836967 - RNA, 19 nt, Homo sapiens
  misc_RNA (1)...(19): siRNA sense strand
ggcaucaaguucuaucugu

SEQ ID NO: 1836968 - RNA, 19 nt, Homo sapiens
  misc_RNA (1)...(19): siRNA sense strand
ccaguuuguugaaguugaa

SEQ ID NO: 1836969 - RNA, 19 nt, Homo sapiens
  misc_RNA (1)...(19): siRNA sense strand
ggcuaugccuccguuguaa

SEQ ID NO: 1836970 - RNA, 19 nt, Homo sapiens
  misc_RNA (1)...(19): siRNA sense strand
ugaugccgcugcccacauu

SEQ ID NO: 1836971 - RNA, 19 nt, Homo sapiens
  misc_RNA (1)...(19): siRNA sense strand
gaagcugcagugucugaaa

SEQ ID NO: 1836972 - RNA, 19 nt, Homo sapiens
  misc_RNA (1)...(19): siRNA sense strand
aggagaagcugcagugucu

SEQ ID NO: 1836973 - RNA, 19 nt, Homo sapiens
  misc_RNA (1)...(19): siRNA sense strand
aaaccgacccacaucauug

SEQ ID NO: 1836974 - RNA, 19 nt, Homo sapiens
  misc_RNA (1)...(19): siRNA sense strand
ucuucucgcucgucaagua

SEQ ID NO: 1836975 - RNA, 19 nt, Homo sapiens
  misc_RNA (1)...(19): siRNA sense strand
ggugaucacuccaguucuc

SEQ ID NO: 1836976 - RNA, 19 nt, Homo sapiens
  misc_RNA (1)...(19): siRNA sense strand
ggauauauggaggugauaa

SEQ ID NO: 1836977 - RNA, 19 nt, Homo sapiens
  misc_RNA (1)...(19): siRNA sense strand
gaggacaccaugcgcaaga

SEQ ID NO: 1836978 - RNA, 19 nt, Homo sapiens
  misc_RNA (1)...(19): siRNA sense strand
gaggguggcauguaugugu

SEQ ID NO: 1836979 - RNA, 19 nt, Homo sapiens
  misc_RNA (1)...(19): siRNA sense strand
ucacauccuugguugaucu

SEQ ID NO: 1836980 - RNA, 19 nt, Homo sapiens
  misc_RNA (1)...(19): siRNA sense strand
gugucuggcuucgcaauuu

SEQ ID NO: 1836981 - RNA, 19 nt, Homo sapiens
  misc_RNA (1)...(19): siRNA sense strand
cacccaggcucucugaaau

SEQ ID NO: 1836982 - RNA, 19 nt, Homo sapiens
  misc_RNA (1)...(19): siRNA sense strand
caucaaguucuaucuguau

SEQ ID NO: 1836983 - RNA, 19 nt, Homo sapiens
  misc_RNA (1)...(19): siRNA sense strand
cuaugcagcuagcggugua

SEQ ID NO: 1836984 - RNA, 19 nt, Homo sapiens
  misc_RNA (1)...(19): siRNA sense strand
guauguguuucagcucuuu

SEQ ID NO: 1836985 - RNA, 19 nt, Homo sapiens
  misc_RNA (1)...(19): siRNA sense strand
cuacaacaaguacaaguau

SEQ ID NO: 1836986 - RNA, 19 nt, Homo sapiens
  misc_RNA (1)...(19): siRNA sense strand
ggagcuacaacaaguacaa

SEQ ID NO: 1836987 - RNA, 19 nt, Homo sapiens
  misc_RNA (1)...(19): siRNA sense strand
acucagauauucuucucuu

SEQ ID NO: 1836988 - RNA, 19 nt, Homo sapiens
  misc_RNA (1)...(19): siRNA sense strand
ccacccaggcucucugaaa

SEQ ID NO: 1836989 - RNA, 19 nt, Homo sapiens
  misc_RNA (1)...(19): siRNA sense strand
ggauagccaguuuguugaa

SEQ ID NO: 1836990 - RNA, 19 nt, Homo sapiens
  misc_RNA (1)...(19): siRNA sense strand
caaaagcugugacaaugau

SEQ ID NO: 1836991 - RNA, 19 nt, Homo sapiens
  misc_RNA (1)...(19): siRNA sense strand
uagucuggcuaguguguuu

SEQ ID NO: 1836992 - RNA, 19 nt, Homo sapiens
  misc_RNA (1)...(19): siRNA sense strand
ucacuccaguucucugugu

SEQ ID NO: 1836993 - RNA, 19 nt, Homo sapiens
  misc_RNA (1)...(19): siRNA sense strand
gcaacgugcugagcuuguc

SEQ ID NO: 1836994 - RNA, 19 nt, Homo sapiens
  misc_RNA (1)...(19): siRNA sense strand
ccaguucucuguguuggau

SEQ ID NO: 1836995 - RNA, 19 nt, Homo sapiens
  misc_RNA (1)...(19): siRNA sense strand
gccaguuuguugaaguuga

SEQ ID NO: 1836996 - RNA, 19 nt, Homo sapiens
  misc_RNA (1)...(19): siRNA sense strand
cugggaaggucgucuacuu

SEQ ID NO: 1836997 - RNA, 19 nt, Homo sapiens
  misc_RNA (1)...(19): siRNA sense strand
gaaugguggaggugcguuu

SEQ ID NO: 1836998 - RNA, 19 nt, Homo sapiens
  misc_RNA (1)...(19): siRNA sense strand
ggaacacaccucacugcau

SEQ ID NO: 1836999 - RNA, 19 nt, Homo sapiens
  misc_RNA (1)...(19): siRNA sense strand
caucagcuccaccaacuuc

SEQ ID NO: 1837000 - RNA, 19 nt, Homo sapiens
  misc_RNA (1)...(19): siRNA sense strand
uagccaguuuguugaaguu

SEQ ID NO: 1837001 - RNA, 19 nt, Homo sapiens
  misc_RNA (1)...(19): siRNA sense strand
cggcuaugccuccguugua

SEQ ID NO: 1837002 - RNA, 19 nt, Homo sapiens
  misc_RNA (1)...(19): siRNA sense strand
uuuguggguugcauucuuu

SEQ ID NO: 1837003 - RNA, 19 nt, Homo sapiens
  misc_RNA (1)...(19): siRNA sense strand
ucagcucuuugacuacuau

SEQ ID NO: 1837004 - RNA, 19 nt, Homo sapiens
  misc_RNA (1)...(19): siRNA sense strand
ugacggaggguggcaugua

SEQ ID NO: 1837005 - RNA, 19 nt, Homo sapiens
  misc_RNA (1)...(19): siRNA sense strand
gauagccaguuuguugaag

SEQ ID NO: 1837006 - RNA, 19 nt, Homo sapiens
  misc_RNA (1)...(19): siRNA sense strand
guaccucugcuacaagaau

SEQ ID NO: 1837007 - RNA, 19 nt, Homo sapiens
  misc_RNA (1)...(19): siRNA sense strand
cuucaucgccuucgugugu

SEQ ID NO: 1837008 - RNA, 19 nt, Homo sapiens
  misc_RNA (1)...(19): siRNA sense strand
ggccacauacuaccuguuc

SEQ ID NO: 1837009 - RNA, 19 nt, Homo sapiens
  misc_RNA (1)...(19): siRNA sense strand
uggaggugcguuucucaua

SEQ ID NO: 1837010 - RNA, 19 nt, Homo sapiens
  misc_RNA (1)...(19): siRNA sense strand
acagaucacauccuugguu

SEQ ID NO: 1837011 - RNA, 19 nt, Homo sapiens
  misc_RNA (1)...(19): siRNA sense strand
cucagauauucuucucuua

SEQ ID NO: 1837012 - RNA, 19 nt, Homo sapiens
  misc_RNA (1)...(19): siRNA sense strand
ccacugggaaggucgucua

SEQ ID NO: 1837013 - RNA, 19 nt, Homo sapiens
  misc_RNA (1)...(19): siRNA sense strand
aaguacagcugggugauca

SEQ ID NO: 1837014 - RNA, 19 nt, Homo sapiens
  misc_RNA (1)...(19): siRNA sense strand
gaaguacagcugggugauc

SEQ ID NO: 1837015 - RNA, 19 nt, Homo sapiens
  misc_RNA (1)...(19): siRNA sense strand
ugaacagugguaccaguuu

SEQ ID NO: 1837016 - RNA, 19 nt, Homo sapiens
  misc_RNA (1)...(19): siRNA sense strand
ccguaccucugcuacaaga

SEQ ID NO: 1837017 - RNA, 19 nt, Homo sapiens
  misc_RNA (1)...(19): siRNA sense strand
gggagaaguggucuagcaa

SEQ ID NO: 1837018 - RNA, 19 nt, Homo sapiens
  misc_RNA (1)...(19): siRNA sense strand
gaucacuccaguucucugu

SEQ ID NO: 1837019 - RNA, 19 nt, Homo sapiens
  misc_RNA (1)...(19): siRNA sense strand
ugacaucacccgccuugag

SEQ ID NO: 1837020 - RNA, 19 nt, Homo sapiens
  misc_RNA (1)...(19): siRNA sense strand
gagccacaccuuacaacuc

SEQ ID NO: 1837021 - RNA, 19 nt, Homo sapiens
  misc_RNA (1)...(19): siRNA sense strand
ggccguuccuugugagagu

SEQ ID NO: 1837022 - RNA, 19 nt, Homo sapiens
  misc_RNA (1)...(19): siRNA sense strand
gaucgacuuugugcucucu

SEQ ID NO: 1837023 - RNA, 19 nt, Homo sapiens
  misc_RNA (1)...(19): siRNA sense strand
guauugaggacaugauugg

SEQ ID NO: 1837024 - RNA, 19 nt, Homo sapiens
  misc_RNA (1)...(19): siRNA sense strand
gguauugaggacaugauug

SEQ ID NO: 1837025 - RNA, 19 nt, Homo sapiens
  misc_RNA (1)...(19): siRNA sense strand
ucccguaccucugcuacaa

SEQ ID NO: 1837026 - RNA, 19 nt, Homo sapiens
  misc_RNA (1)...(19): siRNA sense strand
gggccgaggcaucaaguuc

SEQ ID NO: 1837027 - RNA, 19 nt, Homo sapiens
  misc_RNA (1)...(19): siRNA sense strand
agggagaaguggucuagca

SEQ ID NO: 1837028 - RNA, 19 nt, Homo sapiens
  misc_RNA (1)...(19): siRNA sense strand
cuaugccuccguuguaauu

SEQ ID NO: 1837029 - RNA, 19 nt, Homo sapiens
  misc_RNA (1)...(19): siRNA sense strand
ggauugacgcugggacuca

SEQ ID NO: 1837030 - RNA, 19 nt, Homo sapiens
  misc_RNA (1)...(19): siRNA sense strand
cgagggagccacaccuuac

SEQ ID NO: 1837031 - RNA, 19 nt, Homo sapiens
  misc_RNA (1)...(19): siRNA sense strand
cuggauauauggaggugau

SEQ ID NO: 1837032 - RNA, 19 nt, Homo sapiens
  misc_RNA (1)...(19): siRNA sense strand
aagcugcagugucugaaag

SEQ ID NO: 1837033 - RNA, 19 nt, Homo sapiens
  misc_RNA (1)...(19): siRNA sense strand
cugcugggaugccugaaca

SEQ ID NO: 1837034 - RNA, 19 nt, Homo sapiens
  misc_RNA (1)...(19): siRNA sense strand
agccacaccuuacaacucu

SEQ ID NO: 1837035 - RNA, 19 nt, Homo sapiens
  misc_RNA (1)...(19): siRNA sense strand
gaucaucauaggccaguac

SEQ ID NO: 1837036 - RNA, 19 nt, Homo sapiens
  misc_RNA (1)...(19): siRNA sense strand
uauuaugcuucucuugcuu

SEQ ID NO: 1837037 - RNA, 19 nt, Homo sapiens
  misc_RNA (1)...(19): siRNA sense strand
cccaaaagcugugacaaug

SEQ ID NO: 1837038 - RNA, 19 nt, Homo sapiens
  misc_RNA (1)...(19): siRNA sense strand
gaccacccaggcucucuga

SEQ ID NO: 1837039 - RNA, 19 nt, Homo sapiens
  misc_RNA (1)...(19): siRNA sense strand
gagggagccacaccuuaca

SEQ ID NO: 1837040 - RNA, 19 nt, Homo sapiens
  misc_RNA (1)...(19): siRNA sense strand
cuucauggcacaagagcaa

SEQ ID NO: 1837041 - RNA, 19 nt, Homo sapiens
  misc_RNA (1)...(19): siRNA sense strand
caacaaguacaaguauaac

SEQ ID NO: 1837042 - RNA, 19 nt, Homo sapiens
  misc_RNA (1)...(19): siRNA sense strand
gcuagcgguguaugccuuu

SEQ ID NO: 1837043 - RNA, 19 nt, Homo sapiens
  misc_RNA (1)...(19): siRNA sense strand
acaaguacaaguauaacuc

SEQ ID NO: 1837044 - RNA, 19 nt, Homo sapiens
  misc_RNA (1)...(19): siRNA sense strand
gaucauaauucucaucuug

SEQ ID NO: 1837045 - RNA, 19 nt, Homo sapiens
  misc_RNA (1)...(19): siRNA sense strand
agaccaagcucucauuuaa

SEQ ID NO: 1837046 - RNA, 19 nt, Homo sapiens
  misc_RNA (1)...(19): siRNA sense strand
gaacgucuaucucaugaug

SEQ ID NO: 1837047 - RNA, 19 nt, Homo sapiens
  misc_RNA (1)...(19): siRNA sense strand
gaggauggacugcuauuua

SEQ ID NO: 1837048 - RNA, 19 nt, Homo sapiens
  misc_RNA (1)...(19): siRNA sense strand
ggacacacaugacucugaa

SEQ ID NO: 1837049 - RNA, 19 nt, Homo sapiens
  misc_RNA (1)...(19): siRNA sense strand
gcaaaguccugcucaacau

SEQ ID NO: 1837050 - RNA, 19 nt, Homo sapiens
  misc_RNA (1)...(19): siRNA sense strand
ggacugcuauuuaaauucu

SEQ ID NO: 1837051 - RNA, 19 nt, Homo sapiens
  misc_RNA (1)...(19): siRNA sense strand
gcagugaucauaauucuca

SEQ ID NO: 1837052 - RNA, 19 nt, Homo sapiens
  misc_RNA (1)...(19): siRNA sense strand
ggaaggugguggacuguag

SEQ ID NO: 1837053 - RNA, 19 nt, Homo sapiens
  misc_RNA (1)...(19): siRNA sense strand
gaagggaggcucucaccaa

SEQ ID NO: 1837054 - RNA, 19 nt, Homo sapiens
  misc_RNA (1)...(19): siRNA sense strand
gggcucagcuuaccucuac

SEQ ID NO: 1837055 - RNA, 19 nt, Homo sapiens
  misc_RNA (1)...(19): siRNA sense strand
caaaaucucugggcuaauu

SEQ ID NO: 1837056 - RNA, 19 nt, Homo sapiens
  misc_RNA (1)...(19): siRNA sense strand
ggaacuuaauccucuccua

SEQ ID NO: 1837057 - RNA, 19 nt, Homo sapiens
  misc_RNA (1)...(19): siRNA sense strand
aggauggacugcuauuuaa

SEQ ID NO: 1837058 - RNA, 19 nt, Homo sapiens
  misc_RNA (1)...(19): siRNA sense strand
ccuuauagcuguucucauc

SEQ ID NO: 1837059 - RNA, 19 nt, Homo sapiens
  misc_RNA (1)...(19): siRNA sense strand
gaucguggcgucccucuug

SEQ ID NO: 1837060 - RNA, 19 nt, Homo sapiens
  misc_RNA (1)...(19): siRNA sense strand
gugaacgucuaucucauga

SEQ ID NO: 1837061 - RNA, 19 nt, Homo sapiens
  misc_RNA (1)...(19): siRNA sense strand
ggagagcucugggccuuca

SEQ ID NO: 1837062 - RNA, 19 nt, Homo sapiens
  misc_RNA (1)...(19): siRNA sense strand
ccaagacgggcucagcuua

SEQ ID NO: 1837063 - RNA, 19 nt, Homo sapiens
  misc_RNA (1)...(19): siRNA sense strand
gugauggccuuccucuuug

SEQ ID NO: 1837064 - RNA, 19 nt, Homo sapiens
  misc_RNA (1)...(19): siRNA sense strand
caucaucaccuucugcauu

SEQ ID NO: 1837065 - RNA, 19 nt, Homo sapiens
  misc_RNA (1)...(19): siRNA sense strand
gcaagaccaagcucucauu

SEQ ID NO: 1837066 - RNA, 19 nt, Homo sapiens
  misc_RNA (1)...(19): siRNA sense strand
caucaggccgucucuguuu

SEQ ID NO: 1837067 - RNA, 19 nt, Homo sapiens
  misc_RNA (1)...(19): siRNA sense strand
cauauucgcagugaucaua

SEQ ID NO: 1837068 - RNA, 19 nt, Homo sapiens
  misc_RNA (1)...(19): siRNA sense strand
guccugggcuucauaaugg

SEQ ID NO: 1837069 - RNA, 19 nt, Homo sapiens
  misc_RNA (1)...(19): siRNA sense strand
gggcuaauugugaacauuu

SEQ ID NO: 1837070 - RNA, 19 nt, Homo sapiens
  misc_RNA (1)...(19): siRNA sense strand
gaagggaagcccgguguug

SEQ ID NO: 1837071 - RNA, 19 nt, Homo sapiens
  misc_RNA (1)...(19): siRNA sense strand
cauaauggugucaggauuu

SEQ ID NO: 1837072 - RNA, 19 nt, Homo sapiens
  misc_RNA (1)...(19): siRNA sense strand
gauggacugcuauuuaaau

SEQ ID NO: 1837073 - RNA, 19 nt, Homo sapiens
  misc_RNA (1)...(19): siRNA sense strand
gggaggcucucaccaaagg

SEQ ID NO: 1837074 - RNA, 19 nt, Homo sapiens
  misc_RNA (1)...(19): siRNA sense strand
ugugauggccuuccucuuu

SEQ ID NO: 1837075 - RNA, 19 nt, Homo sapiens
  misc_RNA (1)...(19): siRNA sense strand
uuaauccucuccuacauca

SEQ ID NO: 1837076 - RNA, 19 nt, Homo sapiens
  misc_RNA (1)...(19): siRNA sense strand
gcagcgacuugcuucuaug

SEQ ID NO: 1837077 - RNA, 19 nt, Homo sapiens
  misc_RNA (1)...(19): siRNA sense strand
ggcagcgacuugcuucuau

SEQ ID NO: 1837078 - RNA, 19 nt, Homo sapiens
  misc_RNA (1)...(19): siRNA sense strand
aagggaggcucucaccaaa

SEQ ID NO: 1837079 - RNA, 19 nt, Homo sapiens
  misc_RNA (1)...(19): siRNA sense strand
caagaccaagcucucauuu

SEQ ID NO: 1837080 - RNA, 19 nt, Homo sapiens
  misc_RNA (1)...(19): siRNA sense strand
ucauaauggugucaggauu

SEQ ID NO: 1837081 - RNA, 19 nt, Homo sapiens
  misc_RNA (1)...(19): siRNA sense strand
caucaccggcuggaacuua

SEQ ID NO: 1837082 - RNA, 19 nt, Homo sapiens
  misc_RNA (1)...(19): siRNA sense strand
caccaauaaucgccacauu

SEQ ID NO: 1837083 - RNA, 19 nt, Homo sapiens
  misc_RNA (1)...(19): siRNA sense strand
ucuucuagguuccauguuu

SEQ ID NO: 1837084 - RNA, 19 nt, Homo sapiens
  misc_RNA (1)...(19): siRNA sense strand
gaacaaugacacaaaagaa

SEQ ID NO: 1837085 - RNA, 19 nt, Homo sapiens
  misc_RNA (1)...(19): siRNA sense strand
ccugugcuauggcgaguuu

SEQ ID NO: 1837086 - RNA, 19 nt, Homo sapiens
  misc_RNA (1)...(19): siRNA sense strand
gcacucuccuggcuuacuc

SEQ ID NO: 1837087 - RNA, 19 nt, Homo sapiens
  misc_RNA (1)...(19): siRNA sense strand
cgacauauucgcagugauc

SEQ ID NO: 1837088 - RNA, 19 nt, Homo sapiens
  misc_RNA (1)...(19): siRNA sense strand
uagccaacgucaaugauag

SEQ ID NO: 1837089 - RNA, 19 nt, Homo sapiens
  misc_RNA (1)...(19): siRNA sense strand
ggauggacugcuauuuaaa

SEQ ID NO: 1837090 - RNA, 19 nt, Homo sapiens
  misc_RNA (1)...(19): siRNA sense strand
gcugggaaggugccaagua

SEQ ID NO: 1837091 - RNA, 19 nt, Homo sapiens
  misc_RNA (1)...(19): siRNA sense strand
ggacuugguggaccucaug

SEQ ID NO: 1837092 - RNA, 19 nt, Homo sapiens
  misc_RNA (1)...(19): siRNA sense strand
caucaucuacuuuggcuau

SEQ ID NO: 1837093 - RNA, 19 nt, Homo sapiens
  misc_RNA (1)...(19): siRNA sense strand
ucucugggcuaauugugaa

SEQ ID NO: 1837094 - RNA, 19 nt, Homo sapiens
  misc_RNA (1)...(19): siRNA sense strand
caaaguccugcucaacauu

SEQ ID NO: 1837095 - RNA, 19 nt, Homo sapiens
  misc_RNA (1)...(19): siRNA sense strand
gguccugggcuucauaaug

SEQ ID NO: 1837096 - RNA, 19 nt, Homo sapiens
  misc_RNA (1)...(19): siRNA sense strand
ggugucaggauuugugaaa

SEQ ID NO: 1837097 - RNA, 19 nt, Homo sapiens
  misc_RNA (1)...(19): siRNA sense strand
caagcucucauuuaagguu

SEQ ID NO: 1837098 - RNA, 19 nt, Homo sapiens
  misc_RNA (1)...(19): siRNA sense strand
gugaaaggaucgguuaaaa

SEQ ID NO: 1837099 - RNA, 19 nt, Homo sapiens
  misc_RNA (1)...(19): siRNA sense strand
agagcagccuaaccuggua

SEQ ID NO: 1837100 - RNA, 19 nt, Homo sapiens
  misc_RNA (1)...(19): siRNA sense strand
gggcagcgacuugcuucua

SEQ ID NO: 1837101 - RNA, 19 nt, Homo sapiens
  misc_RNA (1)...(19): siRNA sense strand
aagaccaagcucucauuua

SEQ ID NO: 1837102 - RNA, 19 nt, Homo sapiens
  misc_RNA (1)...(19): siRNA sense strand
ugacaggacuuuuaacucu

SEQ ID NO: 1837103 - RNA, 19 nt, Homo sapiens
  misc_RNA (1)...(19): siRNA sense strand
cauuucaaccagccuuaua

SEQ ID NO: 1837104 - RNA, 19 nt, Homo sapiens
  misc_RNA (1)...(19): siRNA sense strand
guacuuccgacgaguuaga

SEQ ID NO: 1837105 - RNA, 19 nt, Homo sapiens
  misc_RNA (1)...(19): siRNA sense strand
ggcugaggauggacugcua

SEQ ID NO: 1837106 - RNA, 19 nt, Homo sapiens
  misc_RNA (1)...(19): siRNA sense strand
acuucugccuggacaauaa

SEQ ID NO: 1837107 - RNA, 19 nt, Homo sapiens
  misc_RNA (1)...(19): siRNA sense strand
auaauggugucaggauuug

SEQ ID NO: 1837108 - RNA, 19 nt, Homo sapiens
  misc_RNA (1)...(19): siRNA sense strand
caguacuuccgacgaguua

SEQ ID NO: 1837109 - RNA, 19 nt, Homo sapiens
  misc_RNA (1)...(19): siRNA sense strand
ucuuugaccugaaggacuu

SEQ ID NO: 1837110 - RNA, 19 nt, Homo sapiens
  misc_RNA (1)...(19): siRNA sense strand
ucgcagugaucauaauucu

SEQ ID NO: 1837111 - RNA, 19 nt, Homo sapiens
  misc_RNA (1)...(19): siRNA sense strand
ugauggccuuccucuuuga

SEQ ID NO: 1837112 - RNA, 19 nt, Homo sapiens
  misc_RNA (1)...(19): siRNA sense strand
ggugcaaaguccugcucaa

SEQ ID NO: 1837113 - RNA, 19 nt, Homo sapiens
  misc_RNA (1)...(19): siRNA sense strand
ugaaaaccccgacauauuc

SEQ ID NO: 1837114 - RNA, 19 nt, Homo sapiens
  misc_RNA (1)...(19): siRNA sense strand
gcaucuucgugaacgucua

SEQ ID NO: 1837115 - RNA, 19 nt, Homo sapiens
  misc_RNA (1)...(19): siRNA sense strand
uauaccagauggccaguac

SEQ ID NO: 1837116 - RNA, 19 nt, Homo sapiens
  misc_RNA (1)...(19): siRNA sense strand
uuggcacucuccuggcuua

SEQ ID NO: 1837117 - RNA, 19 nt, Homo sapiens
  misc_RNA (1)...(19): siRNA sense strand
ugaaagagucggccauggu

SEQ ID NO: 1837118 - RNA, 19 nt, Homo sapiens
  misc_RNA (1)...(19): siRNA sense strand
caucuugacaggacuuuua

SEQ ID NO: 1837119 - RNA, 19 nt, Homo sapiens
  misc_RNA (1)...(19): siRNA sense strand
caggugaagaggugaagaa

SEQ ID NO: 1837120 - RNA, 19 nt, Homo sapiens
  misc_RNA (1)...(19): siRNA sense strand
accaagcucucauuuaagg

SEQ ID NO: 1837121 - RNA, 19 nt, Homo sapiens
  misc_RNA (1)...(19): siRNA sense strand
gcuuaccucuacagcuaug

SEQ ID NO: 1837122 - RNA, 19 nt, Homo sapiens
  misc_RNA (1)...(19): siRNA sense strand
gaccaaaacaccaauaauc

SEQ ID NO: 1837123 - RNA, 19 nt, Homo sapiens
  misc_RNA (1)...(19): siRNA sense strand
uuagccaacgucaaugaua

SEQ ID NO: 1837124 - RNA, 19 nt, Homo sapiens
  misc_RNA (1)...(19): siRNA sense strand
caccuucgacgagcugaua

SEQ ID NO: 1837125 - RNA, 19 nt, Homo sapiens
  misc_RNA (1)...(19): siRNA sense strand
ggcuaauugugaacauuuc

SEQ ID NO: 1837126 - RNA, 19 nt, Homo sapiens
  misc_RNA (1)...(19): siRNA sense strand
uaccagaggcagagauguu

SEQ ID NO: 1837127 - RNA, 19 nt, Homo sapiens
  misc_RNA (1)...(19): siRNA sense strand
caaaaugaauuggcaagca

SEQ ID NO: 1837128 - RNA, 19 nt, Homo sapiens
  misc_RNA (1)...(19): siRNA sense strand
aucaucaccuucugcauug

SEQ ID NO: 1837129 - RNA, 19 nt, Homo sapiens
  misc_RNA (1)...(19): siRNA sense strand
caacauugggcagcagaug

SEQ ID NO: 1837130 - RNA, 19 nt, Homo sapiens
  misc_RNA (1)...(19): siRNA sense strand
ugucaucuccuuccugauc

SEQ ID NO: 1837131 - RNA, 19 nt, Homo sapiens
  misc_RNA (1)...(19): siRNA sense strand
aaaguccugcucaacauug

SEQ ID NO: 1837132 - RNA, 19 nt, Homo sapiens
  misc_RNA (1)...(19): siRNA sense strand
ucauaauucucaucuugac

SEQ ID NO: 1837133 - RNA, 19 nt, Homo sapiens
  misc_RNA (1)...(19): siRNA sense strand
gaccaagcucucauuuaag

SEQ ID NO: 1837134 - RNA, 19 nt, Homo sapiens
  misc_RNA (1)...(19): siRNA sense strand
ugccguugcugcugugaug

SEQ ID NO: 1837135 - RNA, 19 nt, Homo sapiens
  misc_RNA (1)...(19): siRNA sense strand
cgucaaugauaggaccaaa

SEQ ID NO: 1837136 - RNA, 19 nt, Homo sapiens
  misc_RNA (1)...(19): siRNA sense strand
cuucuagguuccauguuuc

SEQ ID NO: 1837137 - RNA, 19 nt, Homo sapiens
  misc_RNA (1)...(19): siRNA sense strand
gaggugaagaacccacaga

SEQ ID NO: 1837138 - RNA, 19 nt, Homo sapiens
  misc_RNA (1)...(19): siRNA sense strand
gucaggauuugugaaagga

SEQ ID NO: 1837139 - RNA, 19 nt, Homo sapiens
  misc_RNA (1)...(19): siRNA sense strand
ugucaggauuugugaaagg

SEQ ID NO: 1837140 - RNA, 19 nt, Homo sapiens
  misc_RNA (1)...(19): siRNA sense strand
uggcgucccucuugaucug

SEQ ID NO: 1837141 - RNA, 19 nt, Homo sapiens
  misc_RNA (1)...(19): siRNA sense strand
gguggcugccuguguguug

SEQ ID NO: 1837142 - RNA, 19 nt, Homo sapiens
  misc_RNA (1)...(19): siRNA sense strand
cugggaaggugccaaguac

SEQ ID NO: 1837143 - RNA, 19 nt, Homo sapiens
  misc_RNA (1)...(19): siRNA sense strand
gcucaugaugcccuacuuc

SEQ ID NO: 1837144 - RNA, 19 nt, Homo sapiens
  misc_RNA (1)...(19): siRNA sense strand
gcaauuggcuuccugauuu

SEQ ID NO: 1837145 - RNA, 19 nt, Homo sapiens
  misc_RNA (1)...(19): siRNA sense strand
gaagauuagugaagaguuu

SEQ ID NO: 1837146 - RNA, 19 nt, Homo sapiens
  misc_RNA (1)...(19): siRNA sense strand
ccagaaagcuauucccauu

SEQ ID NO: 1837147 - RNA, 19 nt, Homo sapiens
  misc_RNA (1)...(19): siRNA sense strand
gcaaacagauuggucaguu

SEQ ID NO: 1837148 - RNA, 19 nt, Homo sapiens
  misc_RNA (1)...(19): siRNA sense strand
caaauuaugccgcugcuua

SEQ ID NO: 1837149 - RNA, 19 nt, Homo sapiens
  misc_RNA (1)...(19): siRNA sense strand
cgggauggcuuacuguuua

SEQ ID NO: 1837150 - RNA, 19 nt, Homo sapiens
  misc_RNA (1)...(19): siRNA sense strand
acacuggucuugcagaaua

SEQ ID NO: 1837151 - RNA, 19 nt, Homo sapiens
  misc_RNA (1)...(19): siRNA sense strand
guggcaaacuggaagauua

SEQ ID NO: 1837152 - RNA, 19 nt, Homo sapiens
  misc_RNA (1)...(19): siRNA sense strand
cuucacagcuguuaauauu

SEQ ID NO: 1837153 - RNA, 19 nt, Homo sapiens
  misc_RNA (1)...(19): siRNA sense strand
gcaucuuggugaacauuua

SEQ ID NO: 1837154 - RNA, 19 nt, Homo sapiens
  misc_RNA (1)...(19): siRNA sense strand
caauuggcuuccugauuua

SEQ ID NO: 1837155 - RNA, 19 nt, Homo sapiens
  misc_RNA (1)...(19): siRNA sense strand
ggucauuucugcuuugaug

SEQ ID NO: 1837156 - RNA, 19 nt, Homo sapiens
  misc_RNA (1)...(19): siRNA sense strand
gaaaggaaauguggcaaac

SEQ ID NO: 1837157 - RNA, 19 nt, Homo sapiens
  misc_RNA (1)...(19): siRNA sense strand
ucuagaagacaccaaauua

SEQ ID NO: 1837158 - RNA, 19 nt, Homo sapiens
  misc_RNA (1)...(19): siRNA sense strand
gaauuacacuggucuugca

SEQ ID NO: 1837159 - RNA, 19 nt, Homo sapiens
  misc_RNA (1)...(19): siRNA sense strand
ccucugcuaugccgaauuu

SEQ ID NO: 1837160 - RNA, 19 nt, Homo sapiens
  misc_RNA (1)...(19): siRNA sense strand
gaagaugcuuauccagaca

SEQ ID NO: 1837161 - RNA, 19 nt, Homo sapiens
  misc_RNA (1)...(19): siRNA sense strand
cguacuaccuccucgauga

SEQ ID NO: 1837162 - RNA, 19 nt, Homo sapiens
  misc_RNA (1)...(19): siRNA sense strand
ucacagcuguuaauauucu

SEQ ID NO: 1837163 - RNA, 19 nt, Homo sapiens
  misc_RNA (1)...(19): siRNA sense strand
gcauuuggauggcaauugg

SEQ ID NO: 1837164 - RNA, 19 nt, Homo sapiens
  misc_RNA (1)...(19): siRNA sense strand
ugaagaagaugcuuaucca

SEQ ID NO: 1837165 - RNA, 19 nt, Homo sapiens
  misc_RNA (1)...(19): siRNA sense strand
gaaauguggcaaacuggaa

SEQ ID NO: 1837166 - RNA, 19 nt, Homo sapiens
  misc_RNA (1)...(19): siRNA sense strand
caguucaccuuucauauuc

SEQ ID NO: 1837167 - RNA, 19 nt, Homo sapiens
  misc_RNA (1)...(19): siRNA sense strand
ugcaacaacuggugaagaa

SEQ ID NO: 1837168 - RNA, 19 nt, Homo sapiens
  misc_RNA (1)...(19): siRNA sense strand
gaccaucacccaagaaauc

SEQ ID NO: 1837169 - RNA, 19 nt, Homo sapiens
  misc_RNA (1)...(19): siRNA sense strand
ggugaacauuuacuugaug

SEQ ID NO: 1837170 - RNA, 19 nt, Homo sapiens
  misc_RNA (1)...(19): siRNA sense strand
ggaguggcaccuuugauga

SEQ ID NO: 1837171 - RNA, 19 nt, Homo sapiens
  misc_RNA (1)...(19): siRNA sense strand
ugaaggcgcuuguggacau

SEQ ID NO: 1837172 - RNA, 19 nt, Homo sapiens
  misc_RNA (1)...(19): siRNA sense strand
caaacuggaagauuaguga

SEQ ID NO: 1837173 - RNA, 19 nt, Homo sapiens
  misc_RNA (1)...(19): siRNA sense strand
gaacuucuuagcaaacaga

SEQ ID NO: 1837174 - RNA, 19 nt, Homo sapiens
  misc_RNA (1)...(19): siRNA sense strand
ugggucagauucagcauuu

SEQ ID NO: 1837175 - RNA, 19 nt, Homo sapiens
  misc_RNA (1)...(19): siRNA sense strand
auagguacaucaaguguug

SEQ ID NO: 1837176 - RNA, 19 nt, Homo sapiens
  misc_RNA (1)...(19): siRNA sense strand
ucaguucaccuuucauauu

SEQ ID NO: 1837177 - RNA, 19 nt, Homo sapiens
  misc_RNA (1)...(19): siRNA sense strand
uagcaggucuuuugucuuu

SEQ ID NO: 1837178 - RNA, 19 nt, Homo sapiens
  misc_RNA (1)...(19): siRNA sense strand
cugcauauuuguacaccua

SEQ ID NO: 1837179 - RNA, 19 nt, Homo sapiens
  misc_RNA (1)...(19): siRNA sense strand
uagaagacaccaaauuaug

SEQ ID NO: 1837180 - RNA, 19 nt, Homo sapiens
  misc_RNA (1)...(19): siRNA sense strand
aaacggaacaaguaucuau

SEQ ID NO: 1837181 - RNA, 19 nt, Homo sapiens
  misc_RNA (1)...(19): siRNA sense strand
gaggacauacuucagaaug

SEQ ID NO: 1837182 - RNA, 19 nt, Homo sapiens
  misc_RNA (1)...(19): siRNA sense strand
gaaagcuauucccauugga

SEQ ID NO: 1837183 - RNA, 19 nt, Homo sapiens
  misc_RNA (1)...(19): siRNA sense strand
uugaugaacuucuuagcaa

SEQ ID NO: 1837184 - RNA, 19 nt, Homo sapiens
  misc_RNA (1)...(19): siRNA sense strand
agaaagcuauucccauugg

SEQ ID NO: 1837185 - RNA, 19 nt, Homo sapiens
  misc_RNA (1)...(19): siRNA sense strand
ugacgucuuugcuuguuug

SEQ ID NO: 1837186 - RNA, 19 nt, Homo sapiens
  misc_RNA (1)...(19): siRNA sense strand
gaaaucucaguucaccuuu

SEQ ID NO: 1837187 - RNA, 19 nt, Homo sapiens
  misc_RNA (1)...(19): siRNA sense strand
ugaugaacuucuuagcaaa

SEQ ID NO: 1837188 - RNA, 19 nt, Homo sapiens
  misc_RNA (1)...(19): siRNA sense strand
caaugaagaagaugcuuau

SEQ ID NO: 1837189 - RNA, 19 nt, Homo sapiens
  misc_RNA (1)...(19): siRNA sense strand
acaaugaagaagaugcuua

SEQ ID NO: 1837190 - RNA, 19 nt, Homo sapiens
  misc_RNA (1)...(19): siRNA sense strand
cgucuuugcuuguuugcuu

SEQ ID NO: 1837191 - RNA, 19 nt, Homo sapiens
  misc_RNA (1)...(19): siRNA sense strand
cuuuaugccuuauggcuuu

SEQ ID NO: 1837192 - RNA, 19 nt, Homo sapiens
  misc_RNA (1)...(19): siRNA sense strand
cccaagaaaucucaguuca

SEQ ID NO: 1837193 - RNA, 19 nt, Homo sapiens
  misc_RNA (1)...(19): siRNA sense strand
ggagagcugugggccuuca

SEQ ID NO: 1837194 - RNA, 19 nt, Homo sapiens
  misc_RNA (1)...(19): siRNA sense strand
aaucugccauucaagcaaa

SEQ ID NO: 1837195 - RNA, 19 nt, Homo sapiens
  misc_RNA (1)...(19): siRNA sense strand
uuugauggccuuucuguuu

SEQ ID NO: 1837196 - RNA, 19 nt, Homo sapiens
  misc_RNA (1)...(19): siRNA sense strand
cuucugggcucuauguuuc

SEQ ID NO: 1837197 - RNA, 19 nt, Homo sapiens
  misc_RNA (1)...(19): siRNA sense strand
ggaaucucauuuuaucgua

SEQ ID NO: 1837198 - RNA, 19 nt, Homo sapiens
  misc_RNA (1)...(19): siRNA sense strand
aaggaaauguggcaaacug

SEQ ID NO: 1837199 - RNA, 19 nt, Homo sapiens
  misc_RNA (1)...(19): siRNA sense strand
cuagaagacaccaaauuau

SEQ ID NO: 1837200 - RNA, 19 nt, Homo sapiens
  misc_RNA (1)...(19): siRNA sense strand
ugugaugguugcuggguuu

SEQ ID NO: 1837201 - RNA, 19 nt, Homo sapiens
  misc_RNA (1)...(19): siRNA sense strand
aaaaguagccuucaugguu

SEQ ID NO: 1837202 - RNA, 19 nt, Homo sapiens
  misc_RNA (1)...(19): siRNA sense strand
caacaacuggugaagaagu

SEQ ID NO: 1837203 - RNA, 19 nt, Homo sapiens
  misc_RNA (1)...(19): siRNA sense strand
ggaagauuagugaagaguu

SEQ ID NO: 1837204 - RNA, 19 nt, Homo sapiens
  misc_RNA (1)...(19): siRNA sense strand
uuacacuggucuugcagaa

SEQ ID NO: 1837205 - RNA, 19 nt, Homo sapiens
  misc_RNA (1)...(19): siRNA sense strand
aaucucaguucaccuuuca

SEQ ID NO: 1837206 - RNA, 19 nt, Homo sapiens
  misc_RNA (1)...(19): siRNA sense strand
aaaugaccaucacccaaga

SEQ ID NO: 1837207 - RNA, 19 nt, Homo sapiens
  misc_RNA (1)...(19): siRNA sense strand
gcacacucauggccuacuc

SEQ ID NO: 1837208 - RNA, 19 nt, Homo sapiens
  misc_RNA (1)...(19): siRNA sense strand
aagaggcagucaccaguug

SEQ ID NO: 1837209 - RNA, 19 nt, Homo sapiens
  misc_RNA (1)...(19): siRNA sense strand
gaugguugcuggguuugug

SEQ ID NO: 1837210 - RNA, 19 nt, Homo sapiens
  misc_RNA (1)...(19): siRNA sense strand
gugguguccuuccucauug

SEQ ID NO: 1837211 - RNA, 19 nt, Homo sapiens
  misc_RNA (1)...(19): siRNA sense strand
ugccuuauauuacuucuag

SEQ ID NO: 1837212 - RNA, 19 nt, Homo sapiens
  misc_RNA (1)...(19): siRNA sense strand
uacaucaaguguugcaaga

SEQ ID NO: 1837213 - RNA, 19 nt, Homo sapiens
  misc_RNA (1)...(19): siRNA sense strand
ucaccaugcugcagagaca

SEQ ID NO: 1837214 - RNA, 19 nt, Homo sapiens
  misc_RNA (1)...(19): siRNA sense strand
ugaaaggaaauguggcaaa

SEQ ID NO: 1837215 - RNA, 19 nt, Homo sapiens
  misc_RNA (1)...(19): siRNA sense strand
cuucaucacuggcuggaau

SEQ ID NO: 1837216 - RNA, 19 nt, Homo sapiens
  misc_RNA (1)...(19): siRNA sense strand
gaguggcaccuuugaugaa

SEQ ID NO: 1837217 - RNA, 19 nt, Homo sapiens
  misc_RNA (1)...(19): siRNA sense strand
ggcaauuggcuuccugauu

SEQ ID NO: 1837218 - RNA, 19 nt, Homo sapiens
  misc_RNA (1)...(19): siRNA sense strand
gcagacacuugggucagau

SEQ ID NO: 1837219 - RNA, 19 nt, Homo sapiens
  misc_RNA (1)...(19): siRNA sense strand
gaugggguccugccaaaua

SEQ ID NO: 1837220 - RNA, 19 nt, Homo sapiens
  misc_RNA (1)...(19): siRNA sense strand
cugcuugggugaauaaagu

SEQ ID NO: 1837221 - RNA, 19 nt, Homo sapiens
  misc_RNA (1)...(19): siRNA sense strand
aggacauacuucagaauga

SEQ ID NO: 1837222 - RNA, 19 nt, Homo sapiens
  misc_RNA (1)...(19): siRNA sense strand
ccuggagggucaucugaga

SEQ ID NO: 1837223 - RNA, 19 nt, Homo sapiens
  misc_RNA (1)...(19): siRNA sense strand
uugauggccuuucuguuug

SEQ ID NO: 1837224 - RNA, 19 nt, Homo sapiens
  misc_RNA (1)...(19): siRNA sense strand
gcuggaaucucauuuuauc

SEQ ID NO: 1837225 - RNA, 19 nt, Homo sapiens
  misc_RNA (1)...(19): siRNA sense strand
caagucuucugggcucuau

SEQ ID NO: 1837226 - RNA, 19 nt, Homo sapiens
  misc_RNA (1)...(19): siRNA sense strand
ucugcagcuuuaacacuua

SEQ ID NO: 1837227 - RNA, 19 nt, Homo sapiens
  misc_RNA (1)...(19): siRNA sense strand
gcaggucuuuugucuuuug

SEQ ID NO: 1837228 - RNA, 19 nt, Homo sapiens
  misc_RNA (1)...(19): siRNA sense strand
ucucaguucaccuuucaua

SEQ ID NO: 1837229 - RNA, 19 nt, Homo sapiens
  misc_RNA (1)...(19): siRNA sense strand
agaaaucucaguucaccuu

SEQ ID NO: 1837230 - RNA, 19 nt, Homo sapiens
  misc_RNA (1)...(19): siRNA sense strand
ugagcuuucugguaggauu

SEQ ID NO: 1837231 - RNA, 19 nt, Homo sapiens
  misc_RNA (1)...(19): siRNA sense strand
uuagauuucuugccagagu

SEQ ID NO: 1837232 - RNA, 19 nt, Homo sapiens
  misc_RNA (1)...(19): siRNA sense strand
gcagcuuuaacacuuauga

SEQ ID NO: 1837233 - RNA, 19 nt, Homo sapiens
  misc_RNA (1)...(19): siRNA sense strand
gaugucugauccggagaaa

SEQ ID NO: 1837234 - RNA, 19 nt, Homo sapiens
  misc_RNA (1)...(19): siRNA sense strand
cuucuuagcaaacagauug

SEQ ID NO: 1837235 - RNA, 19 nt, Homo sapiens
  misc_RNA (1)...(19): siRNA sense strand
uuacuugaugguccaguua

SEQ ID NO: 1837236 - RNA, 19 nt, Homo sapiens
  misc_RNA (1)...(19): siRNA sense strand
gaaggcgcuuguggacaug

SEQ ID NO: 1837237 - RNA, 19 nt, Homo sapiens
  misc_RNA (1)...(19): siRNA sense strand
ugauggccuuucuguuuga

SEQ ID NO: 1837238 - RNA, 19 nt, Homo sapiens
  misc_RNA (1)...(19): siRNA sense strand
guacuaccuccucgaugaa

SEQ ID NO: 1837239 - RNA, 19 nt, Homo sapiens
  misc_RNA (1)...(19): siRNA sense strand
caccuuugaugaacuucuu

SEQ ID NO: 1837240 - RNA, 19 nt, Homo sapiens
  misc_RNA (1)...(19): siRNA sense strand
ucucuucguugccaucguu

SEQ ID NO: 1837241 - RNA, 19 nt, Homo sapiens
  misc_RNA (1)...(19): siRNA sense strand
gauagguacaucaaguguu

SEQ ID NO: 1837242 - RNA, 19 nt, Homo sapiens
  misc_RNA (1)...(19): siRNA sense strand
agagagccaccuucugaaa

SEQ ID NO: 1837243 - RNA, 19 nt, Homo sapiens
  misc_RNA (1)...(19): siRNA sense strand
gcaaacuggaagauuagug

SEQ ID NO: 1837244 - RNA, 19 nt, Homo sapiens
  misc_RNA (1)...(19): siRNA sense strand
auagaaggcuguaucauug

SEQ ID NO: 1837245 - RNA, 19 nt, Homo sapiens
  misc_RNA (1)...(19): siRNA sense strand
caaaauagaucgcggauuc

SEQ ID NO: 1837246 - RNA, 19 nt, Homo sapiens
  misc_RNA (1)...(19): siRNA sense strand
gcaagugaauaugcggaua

SEQ ID NO: 1837247 - RNA, 19 nt, Homo sapiens
  misc_RNA (1)...(19): siRNA sense strand
uguauuagaugaugcagaa

SEQ ID NO: 1837248 - RNA, 19 nt, Homo sapiens
  misc_RNA (1)...(19): siRNA sense strand
cagaaagugcagaagguua

SEQ ID NO: 1837249 - RNA, 19 nt, Homo sapiens
  misc_RNA (1)...(19): siRNA sense strand
ggauucagguguggcucua

SEQ ID NO: 1837250 - RNA, 19 nt, Homo sapiens
  misc_RNA (1)...(19): siRNA sense strand
ucuaugagcaagugaauau

SEQ ID NO: 1837251 - RNA, 19 nt, Homo sapiens
  misc_RNA (1)...(19): siRNA sense strand
gugaauaugcggauagaag

SEQ ID NO: 1837252 - RNA, 19 nt, Homo sapiens
  misc_RNA (1)...(19): siRNA sense strand
agaaagugcagaagguuau

SEQ ID NO: 1837253 - RNA, 19 nt, Homo sapiens
  misc_RNA (1)...(19): siRNA sense strand
gucagaaagugcagaaggu

SEQ ID NO: 1837254 - RNA, 19 nt, Homo sapiens
  misc_RNA (1)...(19): siRNA sense strand
aaacaacugggucggauca

SEQ ID NO: 1837255 - RNA, 19 nt, Homo sapiens
  misc_RNA (1)...(19): siRNA sense strand
gaaagugcagaagguuaug

SEQ ID NO: 1837256 - RNA, 19 nt, Homo sapiens
  misc_RNA (1)...(19): siRNA sense strand
gcccaucaaccucaucuuc

SEQ ID NO: 1837257 - RNA, 19 nt, Homo sapiens
  misc_RNA (1)...(19): siRNA sense strand
caagugaauaugcggauag

SEQ ID NO: 1837258 - RNA, 19 nt, Homo sapiens
  misc_RNA (1)...(19): siRNA sense strand
aaggcuguaucauugguuu

SEQ ID NO: 1837259 - RNA, 19 nt, Homo sapiens
  misc_RNA (1)...(19): siRNA sense strand
gaaccuuguauuagaugau

SEQ ID NO: 1837260 - RNA, 19 nt, Homo sapiens
  misc_RNA (1)...(19): siRNA sense strand
ccaucaaccucaucuucag

SEQ ID NO: 1837261 - RNA, 19 nt, Homo sapiens
  misc_RNA (1)...(19): siRNA sense strand
acaacugggucggaucaug

SEQ ID NO: 1837262 - RNA, 19 nt, Homo sapiens
  misc_RNA (1)...(19): siRNA sense strand
gaaggcuguaucauugguu

SEQ ID NO: 1837263 - RNA, 19 nt, Homo sapiens
  misc_RNA (1)...(19): siRNA sense strand
ugaaccuuguauuagauga

SEQ ID NO: 1837264 - RNA, 19 nt, Homo sapiens
  misc_RNA (1)...(19): siRNA sense strand
ugggucggaucaugcuaaa

SEQ ID NO: 1837265 - RNA, 19 nt, Homo sapiens
  misc_RNA (1)...(19): siRNA sense strand
ucagaaagugcagaagguu

SEQ ID NO: 1837266 - RNA, 19 nt, Homo sapiens
  misc_RNA (1)...(19): siRNA sense strand
uauuagaugaugcagaaga

SEQ ID NO: 1837267 - RNA, 19 nt, Homo sapiens
  misc_RNA (1)...(19): siRNA sense strand
caucaaccucaucuucaga

SEQ ID NO: 1837268 - RNA, 19 nt, Homo sapiens
  misc_RNA (1)...(19): siRNA sense strand
gagaagaacuauaacaugu

SEQ ID NO: 1837269 - RNA, 19 nt, Homo sapiens
  misc_RNA (1)...(19): siRNA sense strand
ugaagaagauccaugagaa

SEQ ID NO: 1837270 - RNA, 19 nt, Homo sapiens
  misc_RNA (1)...(19): siRNA sense strand
agacagaggugguggaaga

SEQ ID NO: 1837271 - RNA, 19 nt, Homo sapiens
  misc_RNA (1)...(19): siRNA sense strand
gaagaacuauaacauguac

SEQ ID NO: 1837272 - RNA, 19 nt, Homo sapiens
  misc_RNA (1)...(19): siRNA sense strand
gagaaggugugcagcaaug

SEQ ID NO: 1837273 - RNA, 19 nt, Homo sapiens
  misc_RNA (1)...(19): siRNA sense strand
acaacaaccuucugacuga

SEQ ID NO: 1837274 - RNA, 19 nt, Homo sapiens
  misc_RNA (1)...(19): siRNA sense strand
ccugugaccuggacaauga

SEQ ID NO: 1837275 - RNA, 19 nt, Homo sapiens
  misc_RNA (1)...(19): siRNA sense strand
acucugagcugaccgaauu

SEQ ID NO: 1837276 - RNA, 19 nt, Homo sapiens
  misc_RNA (1)...(19): siRNA sense strand
gcagaaggauaucgacaag

SEQ ID NO: 1837277 - RNA, 19 nt, Homo sapiens
  misc_RNA (1)...(19): siRNA sense strand
aagaagcccugccugauga

SEQ ID NO: 1837278 - RNA, 19 nt, Homo sapiens
  misc_RNA (1)...(19): siRNA sense strand
agaaggauaucgacaagga

SEQ ID NO: 1837279 - RNA, 19 nt, Homo sapiens
  misc_RNA (1)...(19): siRNA sense strand
ggaaguaggagaauuugau

SEQ ID NO: 1837280 - RNA, 19 nt, Homo sapiens
  misc_RNA (1)...(19): siRNA sense strand
gaagaagauccaugagaau

SEQ ID NO: 1837281 - RNA, 19 nt, Homo sapiens
  misc_RNA (1)...(19): siRNA sense strand
caacaagaccuucgacucu

SEQ ID NO: 1837282 - RNA, 19 nt, Homo sapiens
  misc_RNA (1)...(19): siRNA sense strand
gaagauccaugagaaugag

SEQ ID NO: 1837283 - RNA, 19 nt, Homo sapiens
  misc_RNA (1)...(19): siRNA sense strand
gcaucaagcagaaggauau

SEQ ID NO: 1837284 - RNA, 19 nt, Homo sapiens
  misc_RNA (1)...(19): siRNA sense strand
caagaagcccugccugaug

SEQ ID NO: 1837285 - RNA, 19 nt, Homo sapiens
  misc_RNA (1)...(19): siRNA sense strand
caucgggccuugcaaauac

SEQ ID NO: 1837286 - RNA, 19 nt, Homo sapiens
  misc_RNA (1)...(19): siRNA sense strand
gguggaaguaggagaauuu

SEQ ID NO: 1837287 - RNA, 19 nt, Homo sapiens
  misc_RNA (1)...(19): siRNA sense strand
gcaaugacaacaagaccuu

SEQ ID NO: 1837288 - RNA, 19 nt, Homo sapiens
  misc_RNA (1)...(19): siRNA sense strand
gaaguaggagaauuugaug

SEQ ID NO: 1837289 - RNA, 19 nt, Homo sapiens
  misc_RNA (1)...(19): siRNA sense strand
gcaagaagcccugccugau

SEQ ID NO: 1837290 - RNA, 19 nt, Homo sapiens
  misc_RNA (1)...(19): siRNA sense strand
guaggagaauuugaugaug

SEQ ID NO: 1837291 - RNA, 19 nt, Homo sapiens
  misc_RNA (1)...(19): siRNA sense strand
cgagaagaacuauaacaug

SEQ ID NO: 1837292 - RNA, 19 nt, Homo sapiens
  misc_RNA (1)...(19): siRNA sense strand
gaggacaacaaccuucuga

SEQ ID NO: 1837293 - RNA, 19 nt, Homo sapiens
  misc_RNA (1)...(19): siRNA sense strand
ugugcgagcuggaugagaa

SEQ ID NO: 1837294 - RNA, 19 nt, Homo sapiens
  misc_RNA (1)...(19): siRNA sense strand
ggacaacaaccuucugacu

SEQ ID NO: 1837295 - RNA, 19 nt, Homo sapiens
  misc_RNA (1)...(19): siRNA sense strand
gugcagcaaugacaacaag

SEQ ID NO: 1837296 - RNA, 19 nt, Homo sapiens
  misc_RNA (1)...(19): siRNA sense strand
gaucuucuuucuccuuugc

SEQ ID NO: 1837297 - RNA, 19 nt, Homo sapiens
  misc_RNA (1)...(19): siRNA sense strand
gugaagaagauccaugaga

SEQ ID NO: 1837298 - RNA, 19 nt, Homo sapiens
  misc_RNA (1)...(19): siRNA sense strand
gcauugcaccacccgcuuu

SEQ ID NO: 1837299 - RNA, 19 nt, Homo sapiens
  misc_RNA (1)...(19): siRNA sense strand
gggccuggaucuucuuucu

SEQ ID NO: 1837300 - RNA, 19 nt, Homo sapiens
  misc_RNA (1)...(19): siRNA sense strand
ccagaaccaccacugcaaa

SEQ ID NO: 1837301 - RNA, 19 nt, Homo sapiens
  misc_RNA (1)...(19): siRNA sense strand
gggugaagaagauccauga

SEQ ID NO: 1837302 - RNA, 19 nt, Homo sapiens
  misc_RNA (1)...(19): siRNA sense strand
agaagauccaugagaauga

SEQ ID NO: 1837303 - RNA, 19 nt, Homo sapiens
  misc_RNA (1)...(19): siRNA sense strand
cuacaucgggccuugcaaa

SEQ ID NO: 1837304 - RNA, 19 nt, Homo sapiens
  misc_RNA (1)...(19): siRNA sense strand
uggaucuucuuucuccuuu

SEQ ID NO: 1837305 - RNA, 19 nt, Homo sapiens
  misc_RNA (1)...(19): siRNA sense strand
ugaugauggugcagaggaa

SEQ ID NO: 1837306 - RNA, 19 nt, Homo sapiens
  misc_RNA (1)...(19): siRNA sense strand
ggacaaugacaaguacauc

SEQ ID NO: 1837307 - RNA, 19 nt, Homo sapiens
  misc_RNA (1)...(19): siRNA sense strand
gugcagaggaaaccgaaga

SEQ ID NO: 1837308 - RNA, 19 nt, Homo sapiens
  misc_RNA (1)...(19): siRNA sense strand
ccagguggaaguaggagaa

SEQ ID NO: 1837309 - RNA, 19 nt, Homo sapiens
  misc_RNA (1)...(19): siRNA sense strand
agaggugacugagguaucu

SEQ ID NO: 1837310 - RNA, 19 nt, Homo sapiens
  misc_RNA (1)...(19): siRNA sense strand
gaacuauaacauguacauc

SEQ ID NO: 1837311 - RNA, 19 nt, Homo sapiens
  misc_RNA (1)...(19): siRNA sense strand
ggaugaggacaacaaccuu

SEQ ID NO: 1837312 - RNA, 19 nt, Homo sapiens
  misc_RNA (1)...(19): siRNA sense strand
gcaccaagaagggccacaa

SEQ ID NO: 1837313 - RNA, 19 nt, Homo sapiens
  misc_RNA (1)...(19): siRNA sense strand
acaucgggccuugcaaaua

SEQ ID NO: 1837314 - RNA, 19 nt, Homo sapiens
  misc_RNA (1)...(19): siRNA sense strand
ggcaucaagcagaaggaua

SEQ ID NO: 1837315 - RNA, 19 nt, Homo sapiens
  misc_RNA (1)...(19): siRNA sense strand
ggaucuucuuucuccuuug

SEQ ID NO: 1837316 - RNA, 19 nt, Homo sapiens
  misc_RNA (1)...(19): siRNA sense strand
aagaagauccaugagaaug

SEQ ID NO: 1837317 - RNA, 19 nt, Homo sapiens
  misc_RNA (1)...(19): siRNA sense strand
gccagaaccaccacugcaa

SEQ ID NO: 1837318 - RNA, 19 nt, Homo sapiens
  misc_RNA (1)...(19): siRNA sense strand
gaaggauaucgacaaggau

SEQ ID NO: 1837319 - RNA, 19 nt, Homo sapiens
  misc_RNA (1)...(19): siRNA sense strand
ugagagggaugaggacaac

SEQ ID NO: 1837320 - RNA, 19 nt, Homo sapiens
  misc_RNA (1)...(19): siRNA sense strand
gaaccaccacugcaaacac

SEQ ID NO: 1837321 - RNA, 19 nt, Homo sapiens
  misc_RNA (1)...(19): siRNA sense strand
gcagaggugacugagguau

SEQ ID NO: 1837322 - RNA, 19 nt, Homo sapiens
  misc_RNA (1)...(19): siRNA sense strand
cagaggugguggaagaaac

SEQ ID NO: 1837323 - RNA, 19 nt, Homo sapiens
  misc_RNA (1)...(19): siRNA sense strand
ccaagaagggccacaagcu

SEQ ID NO: 1837324 - RNA, 19 nt, Homo sapiens
  misc_RNA (1)...(19): siRNA sense strand
ggauaucgacaaggaucuu

SEQ ID NO: 1837325 - RNA, 19 nt, Homo sapiens
  misc_RNA (1)...(19): siRNA sense strand
gaugauggugcagaggaaa

SEQ ID NO: 1837326 - RNA, 19 nt, Homo sapiens
  misc_RNA (1)...(19): siRNA sense strand
ugacugagaagcagaagcu

SEQ ID NO: 1837327 - RNA, 19 nt, Homo sapiens
  misc_RNA (1)...(19): siRNA sense strand
cgacucuuccugccacuuc

SEQ ID NO: 1837328 - RNA, 19 nt, Homo sapiens
  misc_RNA (1)...(19): siRNA sense strand
ucaagcagaaggauaucga

SEQ ID NO: 1837329 - RNA, 19 nt, Homo sapiens
  misc_RNA (1)...(19): siRNA sense strand
ccuggacaaugacaaguac

SEQ ID NO: 1837330 - RNA, 19 nt, Homo sapiens
  misc_RNA (1)...(19): siRNA sense strand
ucgagaagaacuauaacau

SEQ ID NO: 1837331 - RNA, 19 nt, Homo sapiens
  misc_RNA (1)...(19): siRNA sense strand
gcacagagcaagaauaaau

SEQ ID NO: 1837332 - RNA, 19 nt, Homo sapiens
  misc_RNA (1)...(19): siRNA sense strand
guccauaagugaacaauuu

SEQ ID NO: 1837333 - RNA, 19 nt, Homo sapiens
  misc_RNA (1)...(19): siRNA sense strand
gagaacaacuuggucauga

SEQ ID NO: 1837334 - RNA, 19 nt, Homo sapiens
  misc_RNA (1)...(19): siRNA sense strand
gagcaagaauaaauacuga

SEQ ID NO: 1837335 - RNA, 19 nt, Homo sapiens
  misc_RNA (1)...(19): siRNA sense strand
ggaaugaacuacuggucuu

SEQ ID NO: 1837336 - RNA, 19 nt, Homo sapiens
  misc_RNA (1)...(19): siRNA sense strand
gaguugagguccuagauga

SEQ ID NO: 1837337 - RNA, 19 nt, Homo sapiens
  misc_RNA (1)...(19): siRNA sense strand
gagaagaucccgcuacaug

SEQ ID NO: 1837338 - RNA, 19 nt, Homo sapiens
  misc_RNA (1)...(19): siRNA sense strand
ggucaugaauuuagaguuc

SEQ ID NO: 1837339 - RNA, 19 nt, Homo sapiens
  misc_RNA (1)...(19): siRNA sense strand
gagaagaugacgaugauga

SEQ ID NO: 1837340 - RNA, 19 nt, Homo sapiens
  misc_RNA (1)...(19): siRNA sense strand
acaacuuggucaugaauuu

SEQ ID NO: 1837341 - RNA, 19 nt, Homo sapiens
  misc_RNA (1)...(19): siRNA sense strand
guugggaucucauaaaugg

SEQ ID NO: 1837342 - RNA, 19 nt, Homo sapiens
  misc_RNA (1)...(19): siRNA sense strand
gcucagguuucccagugua

SEQ ID NO: 1837343 - RNA, 19 nt, Homo sapiens
  misc_RNA (1)...(19): siRNA sense strand
gaagaucccgcuacaugug

SEQ ID NO: 1837344 - RNA, 19 nt, Homo sapiens
  misc_RNA (1)...(19): siRNA sense strand
caacuuggucaugaauuua

SEQ ID NO: 1837345 - RNA, 19 nt, Homo sapiens
  misc_RNA (1)...(19): siRNA sense strand
gaacaacuuggucaugaau

SEQ ID NO: 1837346 - RNA, 19 nt, Homo sapiens
  misc_RNA (1)...(19): siRNA sense strand
gcauucagaagcucauuaa

SEQ ID NO: 1837347 - RNA, 19 nt, Homo sapiens
  misc_RNA (1)...(19): siRNA sense strand
cgaugaugaugaagauauu

SEQ ID NO: 1837348 - RNA, 19 nt, Homo sapiens
  misc_RNA (1)...(19): siRNA sense strand
ugacgaugaugaugaagau

SEQ ID NO: 1837349 - RNA, 19 nt, Homo sapiens
  misc_RNA (1)...(19): siRNA sense strand
cggcacagagcaagaauaa

SEQ ID NO: 1837350 - RNA, 19 nt, Homo sapiens
  misc_RNA (1)...(19): siRNA sense strand
gaaacagaagguacccaaa

SEQ ID NO: 1837351 - RNA, 19 nt, Homo sapiens
  misc_RNA (1)...(19): siRNA sense strand
uauguuugcucuuggaaug

SEQ ID NO: 1837352 - RNA, 19 nt, Homo sapiens
  misc_RNA (1)...(19): siRNA sense strand
gaauggagaagaugacgau

SEQ ID NO: 1837353 - RNA, 19 nt, Homo sapiens
  misc_RNA (1)...(19): siRNA sense strand
caacaugcaggaaggauuc

SEQ ID NO: 1837354 - RNA, 19 nt, Homo sapiens
  misc_RNA (1)...(19): siRNA sense strand
cagagggacuacuaugugu

SEQ ID NO: 1837355 - RNA, 19 nt, Homo sapiens
  misc_RNA (1)...(19): siRNA sense strand
gguauugccuccuggaaac

SEQ ID NO: 1837356 - RNA, 19 nt, Homo sapiens
  misc_RNA (1)...(19): siRNA sense strand
gaagcaccgugaagguauc

SEQ ID NO: 1837357 - RNA, 19 nt, Homo sapiens
  misc_RNA (1)...(19): siRNA sense strand
gauuauguuugcucuugga

SEQ ID NO: 1837358 - RNA, 19 nt, Homo sapiens
  misc_RNA (1)...(19): siRNA sense strand
uggagaagaugacgaugau

SEQ ID NO: 1837359 - RNA, 19 nt, Homo sapiens
  misc_RNA (1)...(19): siRNA sense strand
uauuuggucucauuucaga

SEQ ID NO: 1837360 - RNA, 19 nt, Homo sapiens
  misc_RNA (1)...(19): siRNA sense strand
gaagaugacgaugaugaug

SEQ ID NO: 1837361 - RNA, 19 nt, Homo sapiens
  misc_RNA (1)...(19): siRNA sense strand
ccucagugccucuguggua

SEQ ID NO: 1837362 - RNA, 19 nt, Homo sapiens
  misc_RNA (1)...(19): siRNA sense strand
cacagagcaagaauaaaua

SEQ ID NO: 1837363 - RNA, 19 nt, Homo sapiens
  misc_RNA (1)...(19): siRNA sense strand
cagaagcaccgugaaggua

SEQ ID NO: 1837364 - RNA, 19 nt, Homo sapiens
  misc_RNA (1)...(19): siRNA sense strand
agaugacgaugaugaugaa

SEQ ID NO: 1837365 - RNA, 19 nt, Homo sapiens
  misc_RNA (1)...(19): siRNA sense strand
agaacaacuuggucaugaa

SEQ ID NO: 1837366 - RNA, 19 nt, Homo sapiens
  misc_RNA (1)...(19): siRNA sense strand
uacgauccauccuccuuaa

SEQ ID NO: 1837367 - RNA, 19 nt, Homo sapiens
  misc_RNA (1)...(19): siRNA sense strand
ucagacgaguccauaagug

SEQ ID NO: 1837368 - RNA, 19 nt, Homo sapiens
  misc_RNA (1)...(19): siRNA sense strand
ucacugaguccguaucugu

SEQ ID NO: 1837369 - RNA, 19 nt, Homo sapiens
  misc_RNA (1)...(19): siRNA sense strand
ccacagcuguuugcagaag

SEQ ID NO: 1837370 - RNA, 19 nt, Homo sapiens
  misc_RNA (1)...(19): siRNA sense strand
ccagagggacuacuaugug

SEQ ID NO: 1837371 - RNA, 19 nt, Homo sapiens
  misc_RNA (1)...(19): siRNA sense strand
gcagaagcaccgugaaggu

SEQ ID NO: 1837372 - RNA, 19 nt, Homo sapiens
  misc_RNA (1)...(19): siRNA sense strand
ucuauuuggucucauuuca

SEQ ID NO: 1837373 - RNA, 19 nt, Homo sapiens
  misc_RNA (1)...(19): siRNA sense strand
cagacgaguccauaaguga

SEQ ID NO: 1837374 - RNA, 19 nt, Homo sapiens
  misc_RNA (1)...(19): siRNA sense strand
cuacgauccauccuccuua

SEQ ID NO: 1837375 - RNA, 19 nt, Homo sapiens
  misc_RNA (1)...(19): siRNA sense strand
ucacuugggaucaugagaa

SEQ ID NO: 1837376 - RNA, 19 nt, Homo sapiens
  misc_RNA (1)...(19): siRNA sense strand
gaucaugagaaggguauug

SEQ ID NO: 1837377 - RNA, 19 nt, Homo sapiens
  misc_RNA (1)...(19): siRNA sense strand
gcaagaauaaauacugacu

SEQ ID NO: 1837378 - RNA, 19 nt, Homo sapiens
  misc_RNA (1)...(19): siRNA sense strand
ggcauucagaagcucauua

SEQ ID NO: 1837379 - RNA, 19 nt, Homo sapiens
  misc_RNA (1)...(19): siRNA sense strand
uugauuauguuugcucuug

SEQ ID NO: 1837380 - RNA, 19 nt, Homo sapiens
  misc_RNA (1)...(19): siRNA sense strand
gacauguugggaucucaua

SEQ ID NO: 1837381 - RNA, 19 nt, Homo sapiens
  misc_RNA (1)...(19): siRNA sense strand
uggagaagaucccgcuaca

SEQ ID NO: 1837382 - RNA, 19 nt, Homo sapiens
  misc_RNA (1)...(19): siRNA sense strand
gguccuagaugagaacaac

SEQ ID NO: 1837383 - RNA, 19 nt, Homo sapiens
  misc_RNA (1)...(19): siRNA sense strand
cauguugggaucucauaaa

SEQ ID NO: 1837384 - RNA, 19 nt, Homo sapiens
  misc_RNA (1)...(19): siRNA sense strand
gaaugaacuacuggucuug

SEQ ID NO: 1837385 - RNA, 19 nt, Homo sapiens
  misc_RNA (1)...(19): siRNA sense strand
ggguauugccuccuggaaa

SEQ ID NO: 1837386 - RNA, 19 nt, Homo sapiens
  misc_RNA (1)...(19): siRNA sense strand
ccuccacgucugagucuua

SEQ ID NO: 1837387 - RNA, 19 nt, Homo sapiens
  misc_RNA (1)...(19): siRNA sense strand
aagaugacgaugaugauga

SEQ ID NO: 1837388 - RNA, 19 nt, Homo sapiens
  misc_RNA (1)...(19): siRNA sense strand
aaacagaagguacccaaac

SEQ ID NO: 1837389 - RNA, 19 nt, Homo sapiens
  misc_RNA (1)...(19): siRNA sense strand
uuacagcagcgaagagaug

SEQ ID NO: 1837390 - RNA, 19 nt, Homo sapiens
  misc_RNA (1)...(19): siRNA sense strand
cagcagcgaagagaugauu

SEQ ID NO: 1837391 - RNA, 19 nt, Homo sapiens
  misc_RNA (1)...(19): siRNA sense strand
aaaagugaauucccaguca

SEQ ID NO: 1837392 - RNA, 19 nt, Homo sapiens
  misc_RNA (1)...(19): siRNA sense strand
agaagcaccgugaagguau

SEQ ID NO: 1837393 - RNA, 19 nt, Homo sapiens
  misc_RNA (1)...(19): siRNA sense strand
gaugaugaugaagauauug

SEQ ID NO: 1837394 - RNA, 19 nt, Homo sapiens
  misc_RNA (1)...(19): siRNA sense strand
agacgaguccauaagugaa

SEQ ID NO: 1837395 - RNA, 19 nt, Homo sapiens
  misc_RNA (1)...(19): siRNA sense strand
gggaucaugagaaggguau

SEQ ID NO: 1837396 - RNA, 19 nt, Homo sapiens
  misc_RNA (1)...(19): siRNA sense strand
guugagguccuagaugaga

SEQ ID NO: 1837397 - RNA, 19 nt, Homo sapiens
  misc_RNA (1)...(19): siRNA sense strand
agaagaucccgcuacaugu

SEQ ID NO: 1837398 - RNA, 19 nt, Homo sapiens
  misc_RNA (1)...(19): siRNA sense strand
gcagcgaagagaugauuuu

SEQ ID NO: 1837399 - RNA, 19 nt, Homo sapiens
  misc_RNA (1)...(19): siRNA sense strand
ucaagaaggugaagaagaa

SEQ ID NO: 1837400 - RNA, 19 nt, Homo sapiens
  misc_RNA (1)...(19): siRNA sense strand
gcaagaagaugaccuacca

SEQ ID NO: 1837401 - RNA, 19 nt, Homo sapiens
  misc_RNA (1)...(19): siRNA sense strand
gccaaacgcacgaguauua

SEQ ID NO: 1837402 - RNA, 19 nt, Homo sapiens
  misc_RNA (1)...(19): siRNA sense strand
gaagaugaccuaccagaag

SEQ ID NO: 1837403 - RNA, 19 nt, Homo sapiens
  misc_RNA (1)...(19): siRNA sense strand
agaagaagcucaccuacca

SEQ ID NO: 1837404 - RNA, 19 nt, Homo sapiens
  misc_RNA (1)...(19): siRNA sense strand
ugacacggaucuauaccaa

SEQ ID NO: 1837405 - RNA, 19 nt, Homo sapiens
  misc_RNA (1)...(19): siRNA sense strand
agaagaagauccgccugua

SEQ ID NO: 1837406 - RNA, 19 nt, Homo sapiens
  misc_RNA (1)...(19): siRNA sense strand
gaagcucaccuaccaguuc

SEQ ID NO: 1837407 - RNA, 19 nt, Homo sapiens
  misc_RNA (1)...(19): siRNA sense strand
aagaugaccuaccagaaga

SEQ ID NO: 1837408 - RNA, 19 nt, Homo sapiens
  misc_RNA (1)...(19): siRNA sense strand
ugaagaagaagcucaccua

SEQ ID NO: 1837409 - RNA, 19 nt, Homo sapiens
  misc_RNA (1)...(19): siRNA sense strand
acauggagcuggagcagau

SEQ ID NO: 1837410 - RNA, 19 nt, Homo sapiens
  misc_RNA (1)...(19): siRNA sense strand
ccuaugacacggaucuaua

SEQ ID NO: 1837411 - RNA, 19 nt, Homo sapiens
  misc_RNA (1)...(19): siRNA sense strand
gagacaggcagcaagaaga

SEQ ID NO: 1837412 - RNA, 19 nt, Homo sapiens
  misc_RNA (1)...(19): siRNA sense strand
gcacgaguauuaccccuau

SEQ ID NO: 1837413 - RNA, 19 nt, Homo sapiens
  misc_RNA (1)...(19): siRNA sense strand
gaagaagauccgccuguac

SEQ ID NO: 1837414 - RNA, 19 nt, Homo sapiens
  misc_RNA (1)...(19): siRNA sense strand
cagaugcacguccucgaua

SEQ ID NO: 1837415 - RNA, 19 nt, Homo sapiens
  misc_RNA (1)...(19): siRNA sense strand
ggagagccauagcgaccau

SEQ ID NO: 1837416 - RNA, 19 nt, Homo sapiens
  misc_RNA (1)...(19): siRNA sense strand
gcagaugcacguccucgau

SEQ ID NO: 1837417 - RNA, 19 nt, Homo sapiens
  misc_RNA (1)...(19): siRNA sense strand
gaagggcaaccgcaagaag

SEQ ID NO: 1837418 - RNA, 19 nt, Homo sapiens
  misc_RNA (1)...(19): siRNA sense strand
ggagacaggcagcaagaag

SEQ ID NO: 1837419 - RNA, 19 nt, Homo sapiens
  misc_RNA (1)...(19): siRNA sense strand
gaucuauaccaacgccaaa

SEQ ID NO: 1837420 - RNA, 19 nt, Homo sapiens
  misc_RNA (1)...(19): siRNA sense strand
agacaggcagcaagaagaa

SEQ ID NO: 1837421 - RNA, 19 nt, Homo sapiens
  misc_RNA (1)...(19): siRNA sense strand
gcaagacgggcgaggucaa

SEQ ID NO: 1837422 - RNA, 19 nt, Homo sapiens
  misc_RNA (1)...(19): siRNA sense strand
cagaagggcaaccgcaaga

SEQ ID NO: 1837423 - RNA, 19 nt, Homo sapiens
  misc_RNA (1)...(19): siRNA sense strand
gaagaccuggugcccuaug

SEQ ID NO: 1837424 - RNA, 19 nt, Homo sapiens
  misc_RNA (1)...(19): siRNA sense strand
ggcaaccgcaagaagauga

SEQ ID NO: 1837425 - RNA, 19 nt, Homo sapiens
  misc_RNA (1)...(19): siRNA sense strand
ucugguggguggacaagga

SEQ ID NO: 1837426 - RNA, 19 nt, Homo sapiens
  misc_RNA (1)...(19): siRNA sense strand
gucaagaaggugaagaaga

SEQ ID NO: 1837427 - RNA, 19 nt, Homo sapiens
  misc_RNA (1)...(19): siRNA sense strand
aagcucaccuaccaguuca

SEQ ID NO: 1837428 - RNA, 19 nt, Homo sapiens
  misc_RNA (1)...(19): siRNA sense strand
acagcgaguucgagagcuu

SEQ ID NO: 1837429 - RNA, 19 nt, Homo sapiens
  misc_RNA (1)...(19): siRNA sense strand
agaagaugaccuaccagaa

SEQ ID NO: 1837430 - RNA, 19 nt, Homo sapiens
  misc_RNA (1)...(19): siRNA sense strand
gcagcucuaccgccacaug

SEQ ID NO: 1837431 - RNA, 19 nt, Homo sapiens
  misc_RNA (1)...(19): siRNA sense strand
gagcuucgccgagaacaac

SEQ ID NO: 1837432 - RNA, 19 nt, Homo sapiens
  misc_RNA (1)...(19): siRNA sense strand
agagccauagcgaccauua

SEQ ID NO: 1837433 - RNA, 19 nt, Homo sapiens
  misc_RNA (1)...(19): siRNA sense strand
aagaccuggugcccuauga

SEQ ID NO: 1837434 - RNA, 19 nt, Homo sapiens
  misc_RNA (1)...(19): siRNA sense strand
cgggcgaggucaagaaggu

SEQ ID NO: 1837435 - RNA, 19 nt, Homo sapiens
  misc_RNA (1)...(19): siRNA sense strand
ccaguucagcggcgaagug

SEQ ID NO: 1837436 - RNA, 19 nt, Homo sapiens
  misc_RNA (1)...(19): siRNA sense strand
gcaagaagcugcgccugua

SEQ ID NO: 1837437 - RNA, 19 nt, Homo sapiens
  misc_RNA (1)...(19): siRNA sense strand
cagauggcgucuucuauga

SEQ ID NO: 1837438 - RNA, 19 nt, Homo sapiens
  misc_RNA (1)...(19): siRNA sense strand
guacccagauggcgucuuc

SEQ ID NO: 1837439 - RNA, 19 nt, Homo sapiens
  misc_RNA (1)...(19): siRNA sense strand
cuggacagcugcaagcauu

SEQ ID NO: 1837440 - RNA, 19 nt, Homo sapiens
  misc_RNA (1)...(19): siRNA sense strand
ccagauggcgucuucuaug

SEQ ID NO: 1837441 - RNA, 19 nt, Homo sapiens
  misc_RNA (1)...(19): siRNA sense strand
cauuccagcuacccugauu

SEQ ID NO: 1837442 - RNA, 19 nt, Homo sapiens
  misc_RNA (1)...(19): siRNA sense strand
uaucagaggaggaagacuu

SEQ ID NO: 1837443 - RNA, 19 nt, Homo sapiens
  misc_RNA (1)...(19): siRNA sense strand
ccagcccugugcuaucaga

SEQ ID NO: 1837444 - RNA, 19 nt, Homo sapiens
  misc_RNA (1)...(19): siRNA sense strand
ggacagcgagucggaugag

SEQ ID NO: 1837445 - RNA, 19 nt, Homo sapiens
  misc_RNA (1)...(19): siRNA sense strand
gcgaaaugcugaacugaua

SEQ ID NO: 1837446 - RNA, 19 nt, Homo sapiens
  misc_RNA (1)...(19): siRNA sense strand
gcagaacaauuaccucaaa

SEQ ID NO: 1837447 - RNA, 19 nt, Homo sapiens
  misc_RNA (1)...(19): siRNA sense strand
caaauaacauccacaggaa

SEQ ID NO: 1837448 - RNA, 19 nt, Homo sapiens
  misc_RNA (1)...(19): siRNA sense strand
aaaccgcacugcacaaaua

SEQ ID NO: 1837449 - RNA, 19 nt, Homo sapiens
  misc_RNA (1)...(19): siRNA sense strand
cauguuuccucgaauauaa

SEQ ID NO: 1837450 - RNA, 19 nt, Homo sapiens
  misc_RNA (1)...(19): siRNA sense strand
gaaugaauguccagcaaca

SEQ ID NO: 1837451 - RNA, 19 nt, Homo sapiens
  misc_RNA (1)...(19): siRNA sense strand
ggaagaaauuguuaaacgu

SEQ ID NO: 1837452 - RNA, 19 nt, Homo sapiens
  misc_RNA (1)...(19): siRNA sense strand
gaguaugaguggaauuuau

SEQ ID NO: 1837453 - RNA, 19 nt, Homo sapiens
  misc_RNA (1)...(19): siRNA sense strand
gaccauaacugugaaccuu

SEQ ID NO: 1837454 - RNA, 19 nt, Homo sapiens
  misc_RNA (1)...(19): siRNA sense strand
ugaaugccaucgcguuaaa

SEQ ID NO: 1837455 - RNA, 19 nt, Homo sapiens
  misc_RNA (1)...(19): siRNA sense strand
auacauguuuccucgaaua

SEQ ID NO: 1837456 - RNA, 19 nt, Homo sapiens
  misc_RNA (1)...(19): siRNA sense strand
ugaagguacucuccaaaug

SEQ ID NO: 1837457 - RNA, 19 nt, Homo sapiens
  misc_RNA (1)...(19): siRNA sense strand
gguaugggccuaaaggaaa

SEQ ID NO: 1837458 - RNA, 19 nt, Homo sapiens
  misc_RNA (1)...(19): siRNA sense strand
guucacagcucgauaucau

SEQ ID NO: 1837459 - RNA, 19 nt, Homo sapiens
  misc_RNA (1)...(19): siRNA sense strand
gagaguaugaguggaauuu

SEQ ID NO: 1837460 - RNA, 19 nt, Homo sapiens
  misc_RNA (1)...(19): siRNA sense strand
guuaaacgucuucaacuaa

SEQ ID NO: 1837461 - RNA, 19 nt, Homo sapiens
  misc_RNA (1)...(19): siRNA sense strand
ugaguggaauuuauacaug

SEQ ID NO: 1837462 - RNA, 19 nt, Homo sapiens
  misc_RNA (1)...(19): siRNA sense strand
gaagguacucuccaaaugg

SEQ ID NO: 1837463 - RNA, 19 nt, Homo sapiens
  misc_RNA (1)...(19): siRNA sense strand
uguuaaacgucuucaacua

SEQ ID NO: 1837464 - RNA, 19 nt, Homo sapiens
  misc_RNA (1)...(19): siRNA sense strand
gaguggaauuuauacaugu

SEQ ID NO: 1837465 - RNA, 19 nt, Homo sapiens
  misc_RNA (1)...(19): siRNA sense strand
aaagaguccacacguguua

SEQ ID NO: 1837466 - RNA, 19 nt, Homo sapiens
  misc_RNA (1)...(19): siRNA sense strand
cagacgugcagaacaauua

SEQ ID NO: 1837467 - RNA, 19 nt, Homo sapiens
  misc_RNA (1)...(19): siRNA sense strand
gaaaugcugaacugauaga

SEQ ID NO: 1837468 - RNA, 19 nt, Homo sapiens
  misc_RNA (1)...(19): siRNA sense strand
uggcagacgugcagaacaa

SEQ ID NO: 1837469 - RNA, 19 nt, Homo sapiens
  misc_RNA (1)...(19): siRNA sense strand
cugcagcccuggaucauau

SEQ ID NO: 1837470 - RNA, 19 nt, Homo sapiens
  misc_RNA (1)...(19): siRNA sense strand
auagugggaucaacaaguu

SEQ ID NO: 1837471 - RNA, 19 nt, Homo sapiens
  misc_RNA (1)...(19): siRNA sense strand
gcaauagcagccuggugua

SEQ ID NO: 1837472 - RNA, 19 nt, Homo sapiens
  misc_RNA (1)...(19): siRNA sense strand
gaggagaguaugaguggaa

SEQ ID NO: 1837473 - RNA, 19 nt, Homo sapiens
  misc_RNA (1)...(19): siRNA sense strand
auauaaaccuacuguggaa

SEQ ID NO: 1837474 - RNA, 19 nt, Homo sapiens
  misc_RNA (1)...(19): siRNA sense strand
uuucaucucuagacacuga

SEQ ID NO: 1837475 - RNA, 19 nt, Homo sapiens
  misc_RNA (1)...(19): siRNA sense strand
ccaaugguaugggccuaaa

SEQ ID NO: 1837476 - RNA, 19 nt, Homo sapiens
  misc_RNA (1)...(19): siRNA sense strand
uaacugugaaccuuacaaa

SEQ ID NO: 1837477 - RNA, 19 nt, Homo sapiens
  misc_RNA (1)...(19): siRNA sense strand
gauagacccaucauuccaa

SEQ ID NO: 1837478 - RNA, 19 nt, Homo sapiens
  misc_RNA (1)...(19): siRNA sense strand
caaacugcuucuugaccuu

SEQ ID NO: 1837479 - RNA, 19 nt, Homo sapiens
  misc_RNA (1)...(19): siRNA sense strand
gaaauuguuaaacgucuuc

SEQ ID NO: 1837480 - RNA, 19 nt, Homo sapiens
  misc_RNA (1)...(19): siRNA sense strand
gcacugcacaaauaacauc

SEQ ID NO: 1837481 - RNA, 19 nt, Homo sapiens
  misc_RNA (1)...(19): siRNA sense strand
cagaacaauuaccucaaau

SEQ ID NO: 1837482 - RNA, 19 nt, Homo sapiens
  misc_RNA (1)...(19): siRNA sense strand
cgggugcccucaucaguug

SEQ ID NO: 1837483 - RNA, 19 nt, Homo sapiens
  misc_RNA (1)...(19): siRNA sense strand
gagcugguuugcaaaauga

SEQ ID NO: 1837484 - RNA, 19 nt, Homo sapiens
  misc_RNA (1)...(19): siRNA sense strand
uggaagaaauuguuaaacg

SEQ ID NO: 1837485 - RNA, 19 nt, Homo sapiens
  misc_RNA (1)...(19): siRNA sense strand
uuauacauguuuccucgaa

SEQ ID NO: 1837486 - RNA, 19 nt, Homo sapiens
  misc_RNA (1)...(19): siRNA sense strand
gcagacgugcagaacaauu

SEQ ID NO: 1837487 - RNA, 19 nt, Homo sapiens
  misc_RNA (1)...(19): siRNA sense strand
gaaaauagugggaucaaca

SEQ ID NO: 1837488 - RNA, 19 nt, Homo sapiens
  misc_RNA (1)...(19): siRNA sense strand
caugugaaauuuccuuacu

SEQ ID NO: 1837489 - RNA, 19 nt, Homo sapiens
  misc_RNA (1)...(19): siRNA sense strand
ccacaggaagccuuguauu

SEQ ID NO: 1837490 - RNA, 19 nt, Homo sapiens
  misc_RNA (1)...(19): siRNA sense strand
uaaaccuacuguggaagaa

SEQ ID NO: 1837491 - RNA, 19 nt, Homo sapiens
  misc_RNA (1)...(19): siRNA sense strand
gguacucuccaaaugguuu

SEQ ID NO: 1837492 - RNA, 19 nt, Homo sapiens
  misc_RNA (1)...(19): siRNA sense strand
caacaaguuuuccagugaa

SEQ ID NO: 1837493 - RNA, 19 nt, Homo sapiens
  misc_RNA (1)...(19): siRNA sense strand
gagccucauuauuauuauc

SEQ ID NO: 1837494 - RNA, 19 nt, Homo sapiens
  misc_RNA (1)...(19): siRNA sense strand
cacaggaagccuuguauuc

SEQ ID NO: 1837495 - RNA, 19 nt, Homo sapiens
  misc_RNA (1)...(19): siRNA sense strand
ucaacaaguuuuccaguga

SEQ ID NO: 1837496 - RNA, 19 nt, Homo sapiens
  misc_RNA (1)...(19): siRNA sense strand
gaaaaccgcacugcacaaa

SEQ ID NO: 1837497 - RNA, 19 nt, Homo sapiens
  misc_RNA (1)...(19): siRNA sense strand
ccauaacugugaaccuuac

SEQ ID NO: 1837498 - RNA, 19 nt, Homo sapiens
  misc_RNA (1)...(19): siRNA sense strand
ccugcaauagcauuuauaa

SEQ ID NO: 1837499 - RNA, 19 nt, Homo sapiens
  misc_RNA (1)...(19): siRNA sense strand
agugaaagcguaugucaug

SEQ ID NO: 1837500 - RNA, 19 nt, Homo sapiens
  misc_RNA (1)...(19): siRNA sense strand
ucaguucacagcucgauau

SEQ ID NO: 1837501 - RNA, 19 nt, Homo sapiens
  misc_RNA (1)...(19): siRNA sense strand
uauugaagguacucuccaa

SEQ ID NO: 1837502 - RNA, 19 nt, Homo sapiens
  misc_RNA (1)...(19): siRNA sense strand
ccagugaaagcguauguca

SEQ ID NO: 1837503 - RNA, 19 nt, Homo sapiens
  misc_RNA (1)...(19): siRNA sense strand
caagcgauguacagaccau

SEQ ID NO: 1837504 - RNA, 19 nt, Homo sapiens
  misc_RNA (1)...(19): siRNA sense strand
gccgccauccuccucuuua

SEQ ID NO: 1837505 - RNA, 19 nt, Homo sapiens
  misc_RNA (1)...(19): siRNA sense strand
caggauauggaaugaaugu

SEQ ID NO: 1837506 - RNA, 19 nt, Homo sapiens
  misc_RNA (1)...(19): siRNA sense strand
gcgggugcccucaucaguu

SEQ ID NO: 1837507 - RNA, 19 nt, Homo sapiens
  misc_RNA (1)...(19): siRNA sense strand
ucugaaugccaucgcguua

SEQ ID NO: 1837508 - RNA, 19 nt, Homo sapiens
  misc_RNA (1)...(19): siRNA sense strand
uucuugaccuuucauguga

SEQ ID NO: 1837509 - RNA, 19 nt, Homo sapiens
  misc_RNA (1)...(19): siRNA sense strand
ucaguuucaucucuagaca

SEQ ID NO: 1837510 - RNA, 19 nt, Homo sapiens
  misc_RNA (1)...(19): siRNA sense strand
aaaggacccaagcgaugua

SEQ ID NO: 1837511 - RNA, 19 nt, Homo sapiens
  misc_RNA (1)...(19): siRNA sense strand
uggaauucauugccuucaa

SEQ ID NO: 1837512 - RNA, 19 nt, Homo sapiens
  misc_RNA (1)...(19): siRNA sense strand
gcagcccuggaucauauaa

SEQ ID NO: 1837513 - RNA, 19 nt, Homo sapiens
  misc_RNA (1)...(19): siRNA sense strand
uguccugagugcuguguga

SEQ ID NO: 1837514 - RNA, 19 nt, Homo sapiens
  misc_RNA (1)...(19): siRNA sense strand
ccgccauccuccucuuuau

SEQ ID NO: 1837515 - RNA, 19 nt, Homo sapiens
  misc_RNA (1)...(19): siRNA sense strand
ccucaucaguuggacacuu

SEQ ID NO: 1837516 - RNA, 19 nt, Homo sapiens
  misc_RNA (1)...(19): siRNA sense strand
uaugucaugcuccaucaaa

SEQ ID NO: 1837517 - RNA, 19 nt, Homo sapiens
  misc_RNA (1)...(19): siRNA sense strand
ucgcugcuuuccaggauau

SEQ ID NO: 1837518 - RNA, 19 nt, Homo sapiens
  misc_RNA (1)...(19): siRNA sense strand
cguaugucaugcuccauca

SEQ ID NO: 1837519 - RNA, 19 nt, Homo sapiens
  misc_RNA (1)...(19): siRNA sense strand
aaccuacuguggaagaaau

SEQ ID NO: 1837520 - RNA, 19 nt, Homo sapiens
  misc_RNA (1)...(19): siRNA sense strand
cucaucaguuggacacuug

SEQ ID NO: 1837521 - RNA, 19 nt, Homo sapiens
  misc_RNA (1)...(19): siRNA sense strand
caauagcagccugguguau

SEQ ID NO: 1837522 - RNA, 19 nt, Homo sapiens
  misc_RNA (1)...(19): siRNA sense strand
guaugggccuaaaggaaaa

SEQ ID NO: 1837523 - RNA, 19 nt, Homo sapiens
  misc_RNA (1)...(19): siRNA sense strand
agaguaugaguggaauuua

SEQ ID NO: 1837524 - RNA, 19 nt, Homo sapiens
  misc_RNA (1)...(19): siRNA sense strand
ggagaguaugaguggaauu

SEQ ID NO: 1837525 - RNA, 19 nt, Homo sapiens
  misc_RNA (1)...(19): siRNA sense strand
aagguacucuccaaauggu

SEQ ID NO: 1837526 - RNA, 19 nt, Homo sapiens
  misc_RNA (1)...(19): siRNA sense strand
aaacugcuucuugaccuuu

SEQ ID NO: 1837527 - RNA, 19 nt, Homo sapiens
  misc_RNA (1)...(19): siRNA sense strand
gauguacagaccauaacug

SEQ ID NO: 1837528 - RNA, 19 nt, Homo sapiens
  misc_RNA (1)...(19): siRNA sense strand
aaucgcugcuuuccaggau

SEQ ID NO: 1837529 - RNA, 19 nt, Homo sapiens
  misc_RNA (1)...(19): siRNA sense strand
uuggauuaaucgcugcuuu

SEQ ID NO: 1837530 - RNA, 19 nt, Homo sapiens
  misc_RNA (1)...(19): siRNA sense strand
guuggacacuugguucgau

SEQ ID NO: 1837531 - RNA, 19 nt, Homo sapiens
  misc_RNA (1)...(19): siRNA sense strand
gaagagaggccaaauguua

SEQ ID NO: 1837532 - RNA, 19 nt, Homo sapiens
  misc_RNA (1)...(19): siRNA sense strand
gaagguaacaggcaucuuu

SEQ ID NO: 1837533 - RNA, 19 nt, Homo sapiens
  misc_RNA (1)...(19): siRNA sense strand
ggaaauacuuaucccaaug

SEQ ID NO: 1837534 - RNA, 19 nt, Homo sapiens
  misc_RNA (1)...(19): siRNA sense strand
ggacugauggaaauacuua

SEQ ID NO: 1837535 - RNA, 19 nt, Homo sapiens
  misc_RNA (1)...(19): siRNA sense strand
ggccaaauguuacaaugaa

SEQ ID NO: 1837536 - RNA, 19 nt, Homo sapiens
  misc_RNA (1)...(19): siRNA sense strand
gaaauacuuaucccaauga

SEQ ID NO: 1837537 - RNA, 19 nt, Homo sapiens
  misc_RNA (1)...(19): siRNA sense strand
ggaaacgccagacuucuau

SEQ ID NO: 1837538 - RNA, 19 nt, Homo sapiens
  misc_RNA (1)...(19): siRNA sense strand
gggaagagaggccaaaugu

SEQ ID NO: 1837539 - RNA, 19 nt, Homo sapiens
  misc_RNA (1)...(19): siRNA sense strand
uaacaggcaucuuucuucu

SEQ ID NO: 1837540 - RNA, 19 nt, Homo sapiens
  misc_RNA (1)...(19): siRNA sense strand
acaggcaucuuucuucuca

SEQ ID NO: 1837541 - RNA, 19 nt, Homo sapiens
  misc_RNA (1)...(19): siRNA sense strand
cuuaauggaugcaccaaga

SEQ ID NO: 1837542 - RNA, 19 nt, Homo sapiens
  misc_RNA (1)...(19): siRNA sense strand
agacuucuauccucauuca

SEQ ID NO: 1837543 - RNA, 19 nt, Homo sapiens
  misc_RNA (1)...(19): siRNA sense strand
gaggccaaauguuacaaug

SEQ ID NO: 1837544 - RNA, 19 nt, Homo sapiens
  misc_RNA (1)...(19): siRNA sense strand
guaacaggcaucuuucuuc

SEQ ID NO: 1837545 - RNA, 19 nt, Homo sapiens
  misc_RNA (1)...(19): siRNA sense strand
augaaugcguguuauguuu

SEQ ID NO: 1837546 - RNA, 19 nt, Homo sapiens
  misc_RNA (1)...(19): siRNA sense strand
ccagacuucuauccucauu

SEQ ID NO: 1837547 - RNA, 19 nt, Homo sapiens
  misc_RNA (1)...(19): siRNA sense strand
ggaagagaggccaaauguu

SEQ ID NO: 1837548 - RNA, 19 nt, Homo sapiens
  misc_RNA (1)...(19): siRNA sense strand
auacuuaucccaaugaaug

SEQ ID NO: 1837549 - RNA, 19 nt, Homo sapiens
  misc_RNA (1)...(19): siRNA sense strand
uaauggaugcaccaagaua

SEQ ID NO: 1837550 - RNA, 19 nt, Homo sapiens
  misc_RNA (1)...(19): siRNA sense strand
gauauaugacccugucugu

SEQ ID NO: 1837551 - RNA, 19 nt, Homo sapiens
  misc_RNA (1)...(19): siRNA sense strand
gagucuaucugguaacacu

SEQ ID NO: 1837552 - RNA, 19 nt, Homo sapiens
  misc_RNA (1)...(19): siRNA sense strand
uggaaauacuuaucccaau

SEQ ID NO: 1837553 - RNA, 19 nt, Homo sapiens
  misc_RNA (1)...(19): siRNA sense strand
cggaaacgccagacuucua

SEQ ID NO: 1837554 - RNA, 19 nt, Homo sapiens
  misc_RNA (1)...(19): siRNA sense strand
gguaacaggcaucuuucuu

SEQ ID NO: 1837555 - RNA, 19 nt, Homo sapiens
  misc_RNA (1)...(19): siRNA sense strand
gaugcaccaagauauauga

SEQ ID NO: 1837556 - RNA, 19 nt, Homo sapiens
  misc_RNA (1)...(19): siRNA sense strand
gaaugcguguuauguuuug

SEQ ID NO: 1837557 - RNA, 19 nt, Homo sapiens
  misc_RNA (1)...(19): siRNA sense strand
ccaaugaaugcguguuaug

SEQ ID NO: 1837558 - RNA, 19 nt, Homo sapiens
  misc_RNA (1)...(19): siRNA sense strand
caaugaaugcguguuaugu

SEQ ID NO: 1837559 - RNA, 19 nt, Homo sapiens
  misc_RNA (1)...(19): siRNA sense strand
ggucggaaacgccagacuu

SEQ ID NO: 1837560 - RNA, 19 nt, Homo sapiens
  misc_RNA (1)...(19): siRNA sense strand
ggaugcaccaagauauaug

SEQ ID NO: 1837561 - RNA, 19 nt, Homo sapiens
  misc_RNA (1)...(19): siRNA sense strand
uguugagucuaucugguaa

SEQ ID NO: 1837562 - RNA, 19 nt, Homo sapiens
  misc_RNA (1)...(19): siRNA sense strand
ucccaaugaaugcguguua

SEQ ID NO: 1837563 - RNA, 19 nt, Homo sapiens
  misc_RNA (1)...(19): siRNA sense strand
aaugaaugcguguuauguu

SEQ ID NO: 1837564 - RNA, 19 nt, Homo sapiens
  misc_RNA (1)...(19): siRNA sense strand
cccaaugaaugcguguuau

SEQ ID NO: 1837565 - RNA, 19 nt, Homo sapiens
  misc_RNA (1)...(19): siRNA sense strand
gaagaccaagcagaaguaa

SEQ ID NO: 1837566 - RNA, 19 nt, Homo sapiens
  misc_RNA (1)...(19): siRNA sense strand
gcccugcccuucaauaguc

SEQ ID NO: 1837567 - RNA, 19 nt, Homo sapiens
  misc_RNA (1)...(19): siRNA sense strand
gcaccagcccagcagaaga

SEQ ID NO: 1837568 - RNA, 19 nt, Homo sapiens
  misc_RNA (1)...(19): siRNA sense strand
agaagaccaagcagaagua

SEQ ID NO: 1837569 - RNA, 19 nt, Homo sapiens
  misc_RNA (1)...(19): siRNA sense strand
ccugagcccugcccuucaa

SEQ ID NO: 1837570 - RNA, 19 nt, Homo sapiens
  misc_RNA (1)...(19): siRNA sense strand
gagcccugcccuucaauag

SEQ ID NO: 1837571 - RNA, 19 nt, Homo sapiens
  misc_RNA (1)...(19): siRNA sense strand
cagaagaccaagcagaagu

SEQ ID NO: 1837572 - RNA, 19 nt, Homo sapiens
  misc_RNA (1)...(19): siRNA sense strand
gaaccaugcauccccaaaa

SEQ ID NO: 1837573 - RNA, 19 nt, Homo sapiens
  misc_RNA (1)...(19): siRNA sense strand
gcagaagaccaagcagaag

SEQ ID NO: 1837574 - RNA, 19 nt, Homo sapiens
  misc_RNA (1)...(19): siRNA sense strand
gagaagacauccuaaauaa

SEQ ID NO: 1837575 - RNA, 19 nt, Homo sapiens
  misc_RNA (1)...(19): siRNA sense strand
gaagaucacugaccuagaa

SEQ ID NO: 1837576 - RNA, 19 nt, Homo sapiens
  misc_RNA (1)...(19): siRNA sense strand
ggacaaagcuuggagacua

SEQ ID NO: 1837577 - RNA, 19 nt, Homo sapiens
  misc_RNA (1)...(19): siRNA sense strand
ggagugugcugacaucuua

SEQ ID NO: 1837578 - RNA, 19 nt, Homo sapiens
  misc_RNA (1)...(19): siRNA sense strand
uaaauaagguguugcauga

SEQ ID NO: 1837579 - RNA, 19 nt, Homo sapiens
  misc_RNA (1)...(19): siRNA sense strand
caagguagcugaugaucua

SEQ ID NO: 1837580 - RNA, 19 nt, Homo sapiens
  misc_RNA (1)...(19): siRNA sense strand
gcaccuaucugacaucauu

SEQ ID NO: 1837581 - RNA, 19 nt, Homo sapiens
  misc_RNA (1)...(19): siRNA sense strand
ggaagacgauuaugccuuu

SEQ ID NO: 1837582 - RNA, 19 nt, Homo sapiens
  misc_RNA (1)...(19): siRNA sense strand
gagggcaagucauauauua

SEQ ID NO: 1837583 - RNA, 19 nt, Homo sapiens
  misc_RNA (1)...(19): siRNA sense strand
caacagagguucaacacaa

SEQ ID NO: 1837584 - RNA, 19 nt, Homo sapiens
  misc_RNA (1)...(19): siRNA sense strand
gcaugaggccuuucuauua

SEQ ID NO: 1837585 - RNA, 19 nt, Homo sapiens
  misc_RNA (1)...(19): siRNA sense strand
gaucauaacuguagacaag

SEQ ID NO: 1837586 - RNA, 19 nt, Homo sapiens
  misc_RNA (1)...(19): siRNA sense strand
ggagaaagucaauaucuua

SEQ ID NO: 1837587 - RNA, 19 nt, Homo sapiens
  misc_RNA (1)...(19): siRNA sense strand
gcaccgaaguucugcauaa

SEQ ID NO: 1837588 - RNA, 19 nt, Homo sapiens
  misc_RNA (1)...(19): siRNA sense strand
gaaggaaccuauuguagau

SEQ ID NO: 1837589 - RNA, 19 nt, Homo sapiens
  misc_RNA (1)...(19): siRNA sense strand
ccacacauaugcagcaaua

SEQ ID NO: 1837590 - RNA, 19 nt, Homo sapiens
  misc_RNA (1)...(19): siRNA sense strand
gggagaagcucaaagaguu

SEQ ID NO: 1837591 - RNA, 19 nt, Homo sapiens
  misc_RNA (1)...(19): siRNA sense strand
ggagaagacauccuaaaua

SEQ ID NO: 1837592 - RNA, 19 nt, Homo sapiens
  misc_RNA (1)...(19): siRNA sense strand
ucaaggaccugaauacauu

SEQ ID NO: 1837593 - RNA, 19 nt, Homo sapiens
  misc_RNA (1)...(19): siRNA sense strand
ggaaguggaucauggagaa

SEQ ID NO: 1837594 - RNA, 19 nt, Homo sapiens
  misc_RNA (1)...(19): siRNA sense strand
ggagaagggugaccaguug

SEQ ID NO: 1837595 - RNA, 19 nt, Homo sapiens
  misc_RNA (1)...(19): siRNA sense strand
acucagagcuugcuaauga

SEQ ID NO: 1837596 - RNA, 19 nt, Homo sapiens
  misc_RNA (1)...(19): siRNA sense strand
gaaauaggccauccugauu

SEQ ID NO: 1837597 - RNA, 19 nt, Homo sapiens
  misc_RNA (1)...(19): siRNA sense strand
ucacugaccuagaacauuu

SEQ ID NO: 1837598 - RNA, 19 nt, Homo sapiens
  misc_RNA (1)...(19): siRNA sense strand
gcucagaucuguucagugu

SEQ ID NO: 1837599 - RNA, 19 nt, Homo sapiens
  misc_RNA (1)...(19): siRNA sense strand
uuacagaccuggcugcaua

SEQ ID NO: 1837600 - RNA, 19 nt, Homo sapiens
  misc_RNA (1)...(19): siRNA sense strand
ggaaauaucagaagcauca

SEQ ID NO: 1837601 - RNA, 19 nt, Homo sapiens
  misc_RNA (1)...(19): siRNA sense strand
ggacucagaugaccuaaag

SEQ ID NO: 1837602 - RNA, 19 nt, Homo sapiens
  misc_RNA (1)...(19): siRNA sense strand
guccaaugcugcaaacuua

SEQ ID NO: 1837603 - RNA, 19 nt, Homo sapiens
  misc_RNA (1)...(19): siRNA sense strand
caaguccagugaugaaaua

SEQ ID NO: 1837604 - RNA, 19 nt, Homo sapiens
  misc_RNA (1)...(19): siRNA sense strand
caagacaggucaagaacuu

SEQ ID NO: 1837605 - RNA, 19 nt, Homo sapiens
  misc_RNA (1)...(19): siRNA sense strand
uaaaugaggcccagaaauu

SEQ ID NO: 1837606 - RNA, 19 nt, Homo sapiens
  misc_RNA (1)...(19): siRNA sense strand
gcagagaagcugacacuuu

SEQ ID NO: 1837607 - RNA, 19 nt, Homo sapiens
  misc_RNA (1)...(19): siRNA sense strand
ggaacuagaugauguuugg

SEQ ID NO: 1837608 - RNA, 19 nt, Homo sapiens
  misc_RNA (1)...(19): siRNA sense strand
cagagaagcugaaagacaa

SEQ ID NO: 1837609 - RNA, 19 nt, Homo sapiens
  misc_RNA (1)...(19): siRNA sense strand
cuaaagaacuggaucaaca

SEQ ID NO: 1837610 - RNA, 19 nt, Homo sapiens
  misc_RNA (1)...(19): siRNA sense strand
ggaagaaucccuagaauac

SEQ ID NO: 1837611 - RNA, 19 nt, Homo sapiens
  misc_RNA (1)...(19): siRNA sense strand
ggagcuggccgaagacuua

SEQ ID NO: 1837612 - RNA, 19 nt, Homo sapiens
  misc_RNA (1)...(19): siRNA sense strand
caacaagcguuuccugaau

SEQ ID NO: 1837613 - RNA, 19 nt, Homo sapiens
  misc_RNA (1)...(19): siRNA sense strand
gaaaaggaguuggcaguua

SEQ ID NO: 1837614 - RNA, 19 nt, Homo sapiens
  misc_RNA (1)...(19): siRNA sense strand
ccacuaacauucagaggaa

SEQ ID NO: 1837615 - RNA, 19 nt, Homo sapiens
  misc_RNA (1)...(19): siRNA sense strand
ggacuucagugcagaacuu

SEQ ID NO: 1837616 - RNA, 19 nt, Homo sapiens
  misc_RNA (1)...(19): siRNA sense strand
caaacgaaaucaagacuca

SEQ ID NO: 1837617 - RNA, 19 nt, Homo sapiens
  misc_RNA (1)...(19): siRNA sense strand
gcagagggcaagucauaua

SEQ ID NO: 1837618 - RNA, 19 nt, Homo sapiens
  misc_RNA (1)...(19): siRNA sense strand
ggacuuaaguuggaagaau

SEQ ID NO: 1837619 - RNA, 19 nt, Homo sapiens
  misc_RNA (1)...(19): siRNA sense strand
guaaggagagccuaaauga

SEQ ID NO: 1837620 - RNA, 19 nt, Homo sapiens
  misc_RNA (1)...(19): siRNA sense strand
ggaaauacuugacaacaac

SEQ ID NO: 1837621 - RNA, 19 nt, Homo sapiens
  misc_RNA (1)...(19): siRNA sense strand
cagagaagcugacacuuuc

SEQ ID NO: 1837622 - RNA, 19 nt, Homo sapiens
  misc_RNA (1)...(19): siRNA sense strand
ucagaagcaugaagacuuu

SEQ ID NO: 1837623 - RNA, 19 nt, Homo sapiens
  misc_RNA (1)...(19): siRNA sense strand
gaacaugagcccaaguuug

SEQ ID NO: 1837624 - RNA, 19 nt, Homo sapiens
  misc_RNA (1)...(19): siRNA sense strand
gaagaaacgggacgauuug

SEQ ID NO: 1837625 - RNA, 19 nt, Homo sapiens
  misc_RNA (1)...(19): siRNA sense strand
ggagggaguugcuggagaa

SEQ ID NO: 1837626 - RNA, 19 nt, Homo sapiens
  misc_RNA (1)...(19): siRNA sense strand
caggaaaccuacucaagaa

SEQ ID NO: 1837627 - RNA, 19 nt, Homo sapiens
  misc_RNA (1)...(19): siRNA sense strand
ggaagacgcucugauccuu

SEQ ID NO: 1837628 - RNA, 19 nt, Homo sapiens
  misc_RNA (1)...(19): siRNA sense strand
gagcuagaccagcagauua

SEQ ID NO: 1837629 - RNA, 19 nt, Homo sapiens
  misc_RNA (1)...(19): siRNA sense strand
gaagacauccuaaauaagg

SEQ ID NO: 1837630 - RNA, 19 nt, Homo sapiens
  misc_RNA (1)...(19): siRNA sense strand
agacaagacugcaaccaaa

SEQ ID NO: 1837631 - RNA, 19 nt, Homo sapiens
  misc_RNA (1)...(19): siRNA sense strand
gaucauugcucaaagaaac

SEQ ID NO: 1837632 - RNA, 19 nt, Homo sapiens
  misc_RNA (1)...(19): siRNA sense strand
ggaucuagaugaugaggaa

SEQ ID NO: 1837633 - RNA, 19 nt, Homo sapiens
  misc_RNA (1)...(19): siRNA sense strand
caagaagcaucagcuauug

SEQ ID NO: 1837634 - RNA, 19 nt, Homo sapiens
  misc_RNA (1)...(19): siRNA sense strand
gcaggaaaccuacucaaga

SEQ ID NO: 1837635 - RNA, 19 nt, Homo sapiens
  misc_RNA (1)...(19): siRNA sense strand
aagcacaacugauugauga

SEQ ID NO: 1837636 - RNA, 19 nt, Homo sapiens
  misc_RNA (1)...(19): siRNA sense strand
gaacauugccagccaugaa

SEQ ID NO: 1837637 - RNA, 19 nt, Homo sapiens
  misc_RNA (1)...(19): siRNA sense strand
gaaccaauaugccaaugag

SEQ ID NO: 1837638 - RNA, 19 nt, Homo sapiens
  misc_RNA (1)...(19): siRNA sense strand
caagcagacuuuaaauguu

SEQ ID NO: 1837639 - RNA, 19 nt, Homo sapiens
  misc_RNA (1)...(19): siRNA sense strand
gaaagaccaugaggacuuc

SEQ ID NO: 1837640 - RNA, 19 nt, Homo sapiens
  misc_RNA (1)...(19): siRNA sense strand
gagaagaucauaacuguag

SEQ ID NO: 1837641 - RNA, 19 nt, Homo sapiens
  misc_RNA (1)...(19): siRNA sense strand
ggaaacagcagaagagauc

SEQ ID NO: 1837642 - RNA, 19 nt, Homo sapiens
  misc_RNA (1)...(19): siRNA sense strand
ucacugaccugaaggacaa

SEQ ID NO: 1837643 - RNA, 19 nt, Homo sapiens
  misc_RNA (1)...(19): siRNA sense strand
caaagacgccacuaacauu

SEQ ID NO: 1837644 - RNA, 19 nt, Homo sapiens
  misc_RNA (1)...(19): siRNA sense strand
ggaaaggaccugauugcuu

SEQ ID NO: 1837645 - RNA, 19 nt, Homo sapiens
  misc_RNA (1)...(19): siRNA sense strand
agcaugagauugacucuua

SEQ ID NO: 1837646 - RNA, 19 nt, Homo sapiens
  misc_RNA (1)...(19): siRNA sense strand
uaugaagacccaacuaaua

SEQ ID NO: 1837647 - RNA, 19 nt, Homo sapiens
  misc_RNA (1)...(19): siRNA sense strand
agaaauugcuggagaaaca

SEQ ID NO: 1837648 - RNA, 19 nt, Homo sapiens
  misc_RNA (1)...(19): siRNA sense strand
gagauaaggugaccauacu

SEQ ID NO: 1837649 - RNA, 19 nt, Homo sapiens
  misc_RNA (1)...(19): siRNA sense strand
gucagaagcuugaggauuc

SEQ ID NO: 1837650 - RNA, 19 nt, Homo sapiens
  misc_RNA (1)...(19): siRNA sense strand
gaaccacgcauucaagaga

SEQ ID NO: 1837651 - RNA, 19 nt, Homo sapiens
  misc_RNA (1)...(19): siRNA sense strand
aagcagaggugcaaacgaa

SEQ ID NO: 1837652 - RNA, 19 nt, Homo sapiens
  misc_RNA (1)...(19): siRNA sense strand
uacauuggcugaagauuug

SEQ ID NO: 1837653 - RNA, 19 nt, Homo sapiens
  misc_RNA (1)...(19): siRNA sense strand
aaacauggaucagagagaa

SEQ ID NO: 1837654 - RNA, 19 nt, Homo sapiens
  misc_RNA (1)...(19): siRNA sense strand
gaagagaagaucauaacug

SEQ ID NO: 1837655 - RNA, 19 nt, Homo sapiens
  misc_RNA (1)...(19): siRNA sense strand
gccaguaccuuccuucaau

SEQ ID NO: 1837656 - RNA, 19 nt, Homo sapiens
  misc_RNA (1)...(19): siRNA sense strand
aaacaagccuaaagaccaa

SEQ ID NO: 1837657 - RNA, 19 nt, Homo sapiens
  misc_RNA (1)...(19): siRNA sense strand
gcaauuggaagacgauuau

SEQ ID NO: 1837658 - RNA, 19 nt, Homo sapiens
  misc_RNA (1)...(19): siRNA sense strand
gauguuggcucgagaggau

SEQ ID NO: 1837659 - RNA, 19 nt, Homo sapiens
  misc_RNA (1)...(19): siRNA sense strand
gaaaggugaugucuuaacg

SEQ ID NO: 1837660 - RNA, 19 nt, Homo sapiens
  misc_RNA (1)...(19): siRNA sense strand
uaacuauggugcugaugaa

SEQ ID NO: 1837661 - RNA, 19 nt, Homo sapiens
  misc_RNA (1)...(19): siRNA sense strand
gaagacugcugcgaucaau

SEQ ID NO: 1837662 - RNA, 19 nt, Homo sapiens
  misc_RNA (1)...(19): siRNA sense strand
agacauugcuggccaugaa

SEQ ID NO: 1837663 - RNA, 19 nt, Homo sapiens
  misc_RNA (1)...(19): siRNA sense strand
ugaagaaacgggacgauuu

SEQ ID NO: 1837664 - RNA, 19 nt, Homo sapiens
  misc_RNA (1)...(19): siRNA sense strand
cgaaggagcagauugagaa

SEQ ID NO: 1837665 - RNA, 19 nt, Homo sapiens
  misc_RNA (1)...(19): siRNA sense strand
gcagaggcuugcagaugaa

SEQ ID NO: 1837666 - RNA, 19 nt, Homo sapiens
  misc_RNA (1)...(19): siRNA sense strand
ucaacaagguagcugauga

SEQ ID NO: 1837667 - RNA, 19 nt, Homo sapiens
  misc_RNA (1)...(19): siRNA sense strand
ugaaagcucugcggaauca

SEQ ID NO: 1837668 - RNA, 19 nt, Homo sapiens
  misc_RNA (1)...(19): siRNA sense strand
ugaagccucugaugaaguu

SEQ ID NO: 1837669 - RNA, 19 nt, Homo sapiens
  misc_RNA (1)...(19): siRNA sense strand
gggaguugcuggagaacaa

SEQ ID NO: 1837670 - RNA, 19 nt, Homo sapiens
  misc_RNA (1)...(19): siRNA sense strand
gcgaugaagcgucaacuaa

SEQ ID NO: 1837671 - RNA, 19 nt, Homo sapiens
  misc_RNA (1)...(19): siRNA sense strand
caaccagucuaaagccauu

SEQ ID NO: 1837672 - RNA, 19 nt, Homo sapiens
  misc_RNA (1)...(19): siRNA sense strand
gauuaugccuuucaggaau

SEQ ID NO: 1837673 - RNA, 19 nt, Homo sapiens
  misc_RNA (1)...(19): siRNA sense strand
cacaggagcuggccgaaga

SEQ ID NO: 1837674 - RNA, 19 nt, Homo sapiens
  misc_RNA (1)...(19): siRNA sense strand
gcaaagaucuuaccaaugu

SEQ ID NO: 1837675 - RNA, 19 nt, Homo sapiens
  misc_RNA (1)...(19): siRNA sense strand
gcaagaagcuguccgauga

SEQ ID NO: 1837676 - RNA, 19 nt, Homo sapiens
  misc_RNA (1)...(19): siRNA sense strand
caacagagguaaggauuua

SEQ ID NO: 1837677 - RNA, 19 nt, Homo sapiens
  misc_RNA (1)...(19): siRNA sense strand
gagaggaacugauuacaaa

SEQ ID NO: 1837678 - RNA, 19 nt, Homo sapiens
  misc_RNA (1)...(19): siRNA sense strand
gcaaagaccuggcuucugu

SEQ ID NO: 1837679 - RNA, 19 nt, Homo sapiens
  misc_RNA (1)...(19): siRNA sense strand
gaagaaacaugcccugcua

SEQ ID NO: 1837680 - RNA, 19 nt, Homo sapiens
  misc_RNA (1)...(19): siRNA sense strand
gacaagaccucauuaagaa

SEQ ID NO: 1837681 - RNA, 19 nt, Homo sapiens
  misc_RNA (1)...(19): siRNA sense strand
gaagaagccuggaucaaug

SEQ ID NO: 1837682 - RNA, 19 nt, Homo sapiens
  misc_RNA (1)...(19): siRNA sense strand
caacaucacugcccucaaa

SEQ ID NO: 1837683 - RNA, 19 nt, Homo sapiens
  misc_RNA (1)...(19): siRNA sense strand
gcaagaaguuuauguuguu

SEQ ID NO: 1837684 - RNA, 19 nt, Homo sapiens
  misc_RNA (1)...(19): siRNA sense strand
gaacagagauggccauguc

SEQ ID NO: 1837685 - RNA, 19 nt, Homo sapiens
  misc_RNA (1)...(19): siRNA sense strand
aaagaaacaucaagccuua

SEQ ID NO: 1837686 - RNA, 19 nt, Homo sapiens
  misc_RNA (1)...(19): siRNA sense strand
ugaaugaggugaucaguuu

SEQ ID NO: 1837687 - RNA, 19 nt, Homo sapiens
  misc_RNA (1)...(19): siRNA sense strand
ccacagagaugcugaugaa

SEQ ID NO: 1837688 - RNA, 19 nt, Homo sapiens
  misc_RNA (1)...(19): siRNA sense strand
cagaugagcuugccaguga

SEQ ID NO: 1837689 - RNA, 19 nt, Homo sapiens
  misc_RNA (1)...(19): siRNA sense strand
ggacaagaccucauuaaga

SEQ ID NO: 1837690 - RNA, 19 nt, Homo sapiens
  misc_RNA (1)...(19): siRNA sense strand
caaccaagcuaauucagaa

SEQ ID NO: 1837691 - RNA, 19 nt, Homo sapiens
  misc_RNA (1)...(19): siRNA sense strand
gcacgaagacuuugagaaa

SEQ ID NO: 1837692 - RNA, 19 nt, Homo sapiens
  misc_RNA (1)...(19): siRNA sense strand
gcacaagggugaaauugau

SEQ ID NO: 1837693 - RNA, 19 nt, Homo sapiens
  misc_RNA (1)...(19): siRNA sense strand
gaaucaagcucuaaacaca

SEQ ID NO: 1837694 - RNA, 19 nt, Homo sapiens
  misc_RNA (1)...(19): siRNA sense strand
gaauucagcaugauguuua

SEQ ID NO: 1837695 - RNA, 19 nt, Homo sapiens
  misc_RNA (1)...(19): siRNA sense strand
gagacuaucaguuggauua

SEQ ID NO: 1837696 - RNA, 19 nt, Homo sapiens
  misc_RNA (1)...(19): siRNA sense strand
gaagaaacaugaagcuuuu

SEQ ID NO: 1837697 - RNA, 19 nt, Homo sapiens
  misc_RNA (1)...(19): siRNA sense strand
gagccaagcugaaugaauc

SEQ ID NO: 1837698 - RNA, 19 nt, Homo sapiens
  misc_RNA (1)...(19): siRNA sense strand
gaagaaacacgaagcuuug

SEQ ID NO: 1837699 - RNA, 19 nt, Homo sapiens
  misc_RNA (1)...(19): siRNA sense strand
guaaaggcauguuggagaa

SEQ ID NO: 1837700 - RNA, 19 nt, Homo sapiens
  misc_RNA (1)...(19): siRNA sense strand
gagaagaguugcaagaagu

SEQ ID NO: 1837701 - RNA, 19 nt, Homo sapiens
  misc_RNA (1)...(19): siRNA sense strand
cugaagagcuggagaaaug

SEQ ID NO: 1837702 - RNA, 19 nt, Homo sapiens
  misc_RNA (1)...(19): siRNA sense strand
ggaaguguauggcaugaug

SEQ ID NO: 1837703 - RNA, 19 nt, Homo sapiens
  misc_RNA (1)...(19): siRNA sense strand
caacaaggauugguggaaa

SEQ ID NO: 1837704 - RNA, 19 nt, Homo sapiens
  misc_RNA (1)...(19): siRNA sense strand
gaacaaccacuaugcaaug

SEQ ID NO: 1837705 - RNA, 19 nt, Homo sapiens
  misc_RNA (1)...(19): siRNA sense strand
gaagaaagaguuaaugaag

SEQ ID NO: 1837706 - RNA, 19 nt, Homo sapiens
  misc_RNA (1)...(19): siRNA sense strand
ccacugaacugaaaggaau

SEQ ID NO: 1837707 - RNA, 19 nt, Homo sapiens
  misc_RNA (1)...(19): siRNA sense strand
ucaaagagaugcugaagag

SEQ ID NO: 1837708 - RNA, 19 nt, Homo sapiens
  misc_RNA (1)...(19): siRNA sense strand
gaaaagagccagaaacuga

SEQ ID NO: 1837709 - RNA, 19 nt, Homo sapiens
  misc_RNA (1)...(19): siRNA sense strand
gaaggacauuaacaaggua

SEQ ID NO: 1837710 - RNA, 19 nt, Homo sapiens
  misc_RNA (1)...(19): siRNA sense strand
ucagaagcaucaagcauuu

SEQ ID NO: 1837711 - RNA, 19 nt, Homo sapiens
  misc_RNA (1)...(19): siRNA sense strand
gaaggaagccgcucugaca

SEQ ID NO: 1837712 - RNA, 19 nt, Homo sapiens
  misc_RNA (1)...(19): siRNA sense strand
gcaauuuaaucgcaauguu

SEQ ID NO: 1837713 - RNA, 19 nt, Homo sapiens
  misc_RNA (1)...(19): siRNA sense strand
gauauugaauuguggcuau

SEQ ID NO: 1837714 - RNA, 19 nt, Homo sapiens
  misc_RNA (1)...(19): siRNA sense strand
gaagucugcucgucugaug

SEQ ID NO: 1837715 - RNA, 19 nt, Homo sapiens
  misc_RNA (1)...(19): siRNA sense strand
ccacaaggaucgcgugaau

SEQ ID NO: 1837716 - RNA, 19 nt, Homo sapiens
  misc_RNA (1)...(19): siRNA sense strand
gacaugaucucgccagugu

SEQ ID NO: 1837717 - RNA, 19 nt, Homo sapiens
  misc_RNA (1)...(19): siRNA sense strand
gaacuuggugcaguacuua

SEQ ID NO: 1837718 - RNA, 19 nt, Homo sapiens
  misc_RNA (1)...(19): siRNA sense strand
uggaagaaaucaaagcuuu

SEQ ID NO: 1837719 - RNA, 19 nt, Homo sapiens
  misc_RNA (1)...(19): siRNA sense strand
gaaaggcgaacguggauga

SEQ ID NO: 1837720 - RNA, 19 nt, Homo sapiens
  misc_RNA (1)...(19): siRNA sense strand
gaagaacaaucaccaugag

SEQ ID NO: 1837721 - RNA, 19 nt, Homo sapiens
  misc_RNA (1)...(19): siRNA sense strand
agaaauugcuggacaugaa

SEQ ID NO: 1837722 - RNA, 19 nt, Homo sapiens
  misc_RNA (1)...(19): siRNA sense strand
cugaugagcucaagaguug

SEQ ID NO: 1837723 - RNA, 19 nt, Homo sapiens
  misc_RNA (1)...(19): siRNA sense strand
ggaagaagccuggaucaau

SEQ ID NO: 1837724 - RNA, 19 nt, Homo sapiens
  misc_RNA (1)...(19): siRNA sense strand
cagaugagcuagccaagga

SEQ ID NO: 1837725 - RNA, 19 nt, Homo sapiens
  misc_RNA (1)...(19): siRNA sense strand
ucaaagcaguuacacagaa

SEQ ID NO: 1837726 - RNA, 19 nt, Homo sapiens
  misc_RNA (1)...(19): siRNA sense strand
ggagaaagcuggccaaaag

SEQ ID NO: 1837727 - RNA, 19 nt, Homo sapiens
  misc_RNA (1)...(19): siRNA sense strand
ggaaaagauuacagcauua

SEQ ID NO: 1837728 - RNA, 19 nt, Homo sapiens
  misc_RNA (1)...(19): siRNA sense strand
cgggaggccuucuugaaua

SEQ ID NO: 1837729 - RNA, 19 nt, Homo sapiens
  misc_RNA (1)...(19): siRNA sense strand
gucagaagcuggaagauuc

SEQ ID NO: 1837730 - RNA, 19 nt, Homo sapiens
  misc_RNA (1)...(19): siRNA sense strand
gggaggcacugaaagcaaa

SEQ ID NO: 1837731 - RNA, 19 nt, Homo sapiens
  misc_RNA (1)...(19): siRNA sense strand
ccacagaugaagcuuauaa

SEQ ID NO: 1837732 - RNA, 19 nt, Homo sapiens
  misc_RNA (1)...(19): siRNA sense strand
acacgaagcuuugauguca

SEQ ID NO: 1837733 - RNA, 19 nt, Homo sapiens
  misc_RNA (1)...(19): siRNA sense strand
ggaagaguccuuggaauau

SEQ ID NO: 1837734 - RNA, 19 nt, Homo sapiens
  misc_RNA (1)...(19): siRNA sense strand
ggagaagaguugcaagaag

SEQ ID NO: 1837735 - RNA, 19 nt, Homo sapiens
  misc_RNA (1)...(19): siRNA sense strand
agaaagaguuaaugaagug

SEQ ID NO: 1837736 - RNA, 19 nt, Homo sapiens
  misc_RNA (1)...(19): siRNA sense strand
ggucaaagcuaggagaauc

SEQ ID NO: 1837737 - RNA, 19 nt, Homo sapiens
  misc_RNA (1)...(19): siRNA sense strand
gcccugagaucaagcagaa

SEQ ID NO: 1837738 - RNA, 19 nt, Homo sapiens
  misc_RNA (1)...(19): siRNA sense strand
aagaauggauugaagagaa

SEQ ID NO: 1837739 - RNA, 19 nt, Homo sapiens
  misc_RNA (1)...(19): siRNA sense strand
ugaaauugaugcccaugaa

SEQ ID NO: 1837740 - RNA, 19 nt, Homo sapiens
  misc_RNA (1)...(19): siRNA sense strand
gaagcgagaggaacugauu

SEQ ID NO: 1837741 - RNA, 19 nt, Homo sapiens
  misc_RNA (1)...(19): siRNA sense strand
ucacugcccucaaagauca

SEQ ID NO: 1837742 - RNA, 19 nt, Homo sapiens
  misc_RNA (1)...(19): siRNA sense strand
gaagaguccuuggaauauc

SEQ ID NO: 1837743 - RNA, 19 nt, Homo sapiens
  misc_RNA (1)...(19): siRNA sense strand
uggaagaacuauaucauuc

SEQ ID NO: 1837744 - RNA, 19 nt, Homo sapiens
  misc_RNA (1)...(19): siRNA sense strand
ggagauauccuuaccuuac

SEQ ID NO: 1837745 - RNA, 19 nt, Homo sapiens
  misc_RNA (1)...(19): siRNA sense strand
ggagauuucuuggauagug

SEQ ID NO: 1837746 - RNA, 19 nt, Homo sapiens
  misc_RNA (1)...(19): siRNA sense strand
gcugaagcccugcuagaua

SEQ ID NO: 1837747 - RNA, 19 nt, Homo sapiens
  misc_RNA (1)...(19): siRNA sense strand
gcacgagggucuggagaga

SEQ ID NO: 1837748 - RNA, 19 nt, Homo sapiens
  misc_RNA (1)...(19): siRNA sense strand
gcucagagggaaagccuua

SEQ ID NO: 1837749 - RNA, 19 nt, Homo sapiens
  misc_RNA (1)...(19): siRNA sense strand
ccaaacacguucaguccaa

SEQ ID NO: 1837750 - RNA, 19 nt, Homo sapiens
  misc_RNA (1)...(19): siRNA sense strand
ugaagaaacaugaagcuuu

SEQ ID NO: 1837751 - RNA, 19 nt, Homo sapiens
  misc_RNA (1)...(19): siRNA sense strand
cggcaaagaucuuaccaau

SEQ ID NO: 1837752 - RNA, 19 nt, Homo sapiens
  misc_RNA (1)...(19): siRNA sense strand
caaccacuaugcaauggaa

SEQ ID NO: 1837753 - RNA, 19 nt, Homo sapiens
  misc_RNA (1)...(19): siRNA sense strand
uuaaugaagugaaccaguu

SEQ ID NO: 1837754 - RNA, 19 nt, Homo sapiens
  misc_RNA (1)...(19): siRNA sense strand
uaagaagcacgaagacuuu

SEQ ID NO: 1837755 - RNA, 19 nt, Homo sapiens
  misc_RNA (1)...(19): siRNA sense strand
agauauggcugcucaugaa

SEQ ID NO: 1837756 - RNA, 19 nt, Homo sapiens
  misc_RNA (1)...(19): siRNA sense strand
cuacagcaauggaucaaug

SEQ ID NO: 1837757 - RNA, 19 nt, Homo sapiens
  misc_RNA (1)...(19): siRNA sense strand
gcagguggaagaacuauau

SEQ ID NO: 1837758 - RNA, 19 nt, Homo sapiens
  misc_RNA (1)...(19): siRNA sense strand
ggacaugaaccacgcauca

SEQ ID NO: 1837759 - RNA, 19 nt, Homo sapiens
  misc_RNA (1)...(19): siRNA sense strand
gaauugaugccuuggagaa

SEQ ID NO: 1837760 - RNA, 19 nt, Homo sapiens
  misc_RNA (1)...(19): siRNA sense strand
caaccaacuugcagggaaa

SEQ ID NO: 1837761 - RNA, 19 nt, Homo sapiens
  misc_RNA (1)...(19): siRNA sense strand
gaaguggcagcucguauga

SEQ ID NO: 1837762 - RNA, 19 nt, Homo sapiens
  misc_RNA (1)...(19): siRNA sense strand
gcuugaagacagaugauua

SEQ ID NO: 1837763 - RNA, 19 nt, Homo sapiens
  misc_RNA (1)...(19): siRNA sense strand
ugaaggacauuaacaaggu

SEQ ID NO: 1837764 - RNA, 19 nt, Homo sapiens
  misc_RNA (1)...(19): siRNA sense strand
ugaagaaacacgaagcuuu

SEQ ID NO: 1837765 - RNA, 19 nt, Homo sapiens
  misc_RNA (1)...(19): siRNA sense strand
gcucaugaagaaagaguua

SEQ ID NO: 1837766 - RNA, 19 nt, Homo sapiens
  misc_RNA (1)...(19): siRNA sense strand
gcagcagcauccaggcuuu

SEQ ID NO: 1837767 - RNA, 19 nt, Homo sapiens
  misc_RNA (1)...(19): siRNA sense strand
gcauggaccugcagcucuu

SEQ ID NO: 1837768 - RNA, 19 nt, Homo sapiens
  misc_RNA (1)...(19): siRNA sense strand
gaaguucagcgcuuuaaca

SEQ ID NO: 1837769 - RNA, 19 nt, Homo sapiens
  misc_RNA (1)...(19): siRNA sense strand
aggaggagcucuaccagaa

SEQ ID NO: 1837770 - RNA, 19 nt, Homo sapiens
  misc_RNA (1)...(19): siRNA sense strand
gaaacacgaagcuuugaug

SEQ ID NO: 1837771 - RNA, 19 nt, Homo sapiens
  misc_RNA (1)...(19): siRNA sense strand
cagaugaagcuuauaaaga

SEQ ID NO: 1837772 - RNA, 19 nt, Homo sapiens
  misc_RNA (1)...(19): siRNA sense strand
cagaagaccugcaggaaaa

SEQ ID NO: 1837773 - RNA, 19 nt, Homo sapiens
  misc_RNA (1)...(19): siRNA sense strand
gaaauccgagccaugagaa

SEQ ID NO: 1837774 - RNA, 19 nt, Homo sapiens
  misc_RNA (1)...(19): siRNA sense strand
cggaagagaucgccaauua

SEQ ID NO: 1837775 - RNA, 19 nt, Homo sapiens
  misc_RNA (1)...(19): siRNA sense strand
gaagaaaucugccaaggau

SEQ ID NO: 1837776 - RNA, 19 nt, Homo sapiens
  misc_RNA (1)...(19): siRNA sense strand
ggacaugucuuacgaugaa

SEQ ID NO: 1837777 - RNA, 19 nt, Homo sapiens
  misc_RNA (1)...(19): siRNA sense strand
caacagggaucuacagaaa

SEQ ID NO: 1837778 - RNA, 19 nt, Homo sapiens
  misc_RNA (1)...(19): siRNA sense strand
ggaaagaaaugaucgacaa

SEQ ID NO: 1837779 - RNA, 19 nt, Homo sapiens
  misc_RNA (1)...(19): siRNA sense strand
gaacaaaccaucaucauuc

SEQ ID NO: 1837780 - RNA, 19 nt, Homo sapiens
  misc_RNA (1)...(19): siRNA sense strand
ccaaagagauccaucaguu

SEQ ID NO: 1837781 - RNA, 19 nt, Homo sapiens
  misc_RNA (1)...(19): siRNA sense strand
ggagaaaccacccaaauuu

SEQ ID NO: 1837782 - RNA, 19 nt, Homo sapiens
  misc_RNA (1)...(19): siRNA sense strand
ggaacgagcuccacaagau

SEQ ID NO: 1837783 - RNA, 19 nt, Homo sapiens
  misc_RNA (1)...(19): siRNA sense strand
gaugagaaguccauaauca

SEQ ID NO: 1837784 - RNA, 19 nt, Homo sapiens
  misc_RNA (1)...(19): siRNA sense strand
ugaaagaccuugcugaaga

SEQ ID NO: 1837785 - RNA, 19 nt, Homo sapiens
  misc_RNA (1)...(19): siRNA sense strand
gagaaaccacccaaauuua

SEQ ID NO: 1837786 - RNA, 19 nt, Homo sapiens
  misc_RNA (1)...(19): siRNA sense strand
ggccugaccugauagauuu

SEQ ID NO: 1837787 - RNA, 19 nt, Homo sapiens
  misc_RNA (1)...(19): siRNA sense strand
gaaaggugcuugacaaugc

SEQ ID NO: 1837788 - RNA, 19 nt, Homo sapiens
  misc_RNA (1)...(19): siRNA sense strand
gaagcaagccgaagccuuu

SEQ ID NO: 1837789 - RNA, 19 nt, Homo sapiens
  misc_RNA (1)...(19): siRNA sense strand
gaagagcaccgacgaggua

SEQ ID NO: 1837790 - RNA, 19 nt, Homo sapiens
  misc_RNA (1)...(19): siRNA sense strand
guaaaugguugaagcauca

SEQ ID NO: 1837791 - RNA, 19 nt, Homo sapiens
  misc_RNA (1)...(19): siRNA sense strand
agacagacauugccgcaua

SEQ ID NO: 1837792 - RNA, 19 nt, Homo sapiens
  misc_RNA (1)...(19): siRNA sense strand
gaacuugcauccaacaaag

SEQ ID NO: 1837793 - RNA, 19 nt, Homo sapiens
  misc_RNA (1)...(19): siRNA sense strand
gaaaugaaggugcuaguau

SEQ ID NO: 1837794 - RNA, 19 nt, Homo sapiens
  misc_RNA (1)...(19): siRNA sense strand
gugcagaucuagacaaaug

SEQ ID NO: 1837795 - RNA, 19 nt, Homo sapiens
  misc_RNA (1)...(19): siRNA sense strand
ucaaucaccuggcagauga

SEQ ID NO: 1837796 - RNA, 19 nt, Homo sapiens
  misc_RNA (1)...(19): siRNA sense strand
uggaaaggcugacuacauu

SEQ ID NO: 1837797 - RNA, 19 nt, Homo sapiens
  misc_RNA (1)...(19): siRNA sense strand
gaacuggcuuugcggaaug

SEQ ID NO: 1837798 - RNA, 19 nt, Homo sapiens
  misc_RNA (1)...(19): siRNA sense strand
gaagagaucgccaauuaca

SEQ ID NO: 1837799 - RNA, 19 nt, Homo sapiens
  misc_RNA (1)...(19): siRNA sense strand
caucaacucuggacauuca

SEQ ID NO: 1837800 - RNA, 19 nt, Homo sapiens
  misc_RNA (1)...(19): siRNA sense strand
gagcagagaguccaucuug

SEQ ID NO: 1837801 - RNA, 19 nt, Homo sapiens
  misc_RNA (1)...(19): siRNA sense strand
ggaaggauggccucaauga

SEQ ID NO: 1837802 - RNA, 19 nt, Homo sapiens
  misc_RNA (1)...(19): siRNA sense strand
acagggaucuacagaaauu

SEQ ID NO: 1837803 - RNA, 19 nt, Homo sapiens
  misc_RNA (1)...(19): siRNA sense strand
guggagaccuuacagagaa

SEQ ID NO: 1837804 - RNA, 19 nt, Homo sapiens
  misc_RNA (1)...(19): siRNA sense strand
gaacacaguggagaccuua

SEQ ID NO: 1837805 - RNA, 19 nt, Homo sapiens
  misc_RNA (1)...(19): siRNA sense strand
cuuauguggugacuuauua

SEQ ID NO: 1837806 - RNA, 19 nt, Homo sapiens
  misc_RNA (1)...(19): siRNA sense strand
gugcagcuguuaauaaaga

SEQ ID NO: 1837807 - RNA, 19 nt, Homo sapiens
  misc_RNA (1)...(19): siRNA sense strand
ggaagaaggagaucgaaga

SEQ ID NO: 1837808 - RNA, 19 nt, Homo sapiens
  misc_RNA (1)...(19): siRNA sense strand
agaaauuccugcaagauug

SEQ ID NO: 1837809 - RNA, 19 nt, Homo sapiens
  misc_RNA (1)...(19): siRNA sense strand
caacaaggccugggaaaga

SEQ ID NO: 1837810 - RNA, 19 nt, Homo sapiens
  misc_RNA (1)...(19): siRNA sense strand
gcauugaacuugggaaauc

SEQ ID NO: 1837811 - RNA, 19 nt, Homo sapiens
  misc_RNA (1)...(19): siRNA sense strand
ggagauggcagaagaggaa

SEQ ID NO: 1837812 - RNA, 19 nt, Homo sapiens
  misc_RNA (1)...(19): siRNA sense strand
cagagaagcuggaggaucu

SEQ ID NO: 1837813 - RNA, 19 nt, Homo sapiens
  misc_RNA (1)...(19): siRNA sense strand
ggccuucaaugcacugaua

SEQ ID NO: 1837814 - RNA, 19 nt, Homo sapiens
  misc_RNA (1)...(19): siRNA sense strand
gaaagaccuugcugaagag

SEQ ID NO: 1837815 - RNA, 19 nt, Homo sapiens
  misc_RNA (1)...(19): siRNA sense strand
caaagaauggcuugacaaa

SEQ ID NO: 1837816 - RNA, 19 nt, Homo sapiens
  misc_RNA (1)...(19): siRNA sense strand
ugagugaccugcagaagga

SEQ ID NO: 1837817 - RNA, 19 nt, Homo sapiens
  misc_RNA (1)...(19): siRNA sense strand
aaaugaaggugcuaguauu

SEQ ID NO: 1837818 - RNA, 19 nt, Homo sapiens
  misc_RNA (1)...(19): siRNA sense strand
ucaaugcacugauacacaa

SEQ ID NO: 1837819 - RNA, 19 nt, Homo sapiens
  misc_RNA (1)...(19): siRNA sense strand
ucugaacaaucgcaaauuu

SEQ ID NO: 1837820 - RNA, 19 nt, Homo sapiens
  misc_RNA (1)...(19): siRNA sense strand
gagguucucugcccuggaa

SEQ ID NO: 1837821 - RNA, 19 nt, Homo sapiens
  misc_RNA (1)...(19): siRNA sense strand
caaaguggauaaacuguac

SEQ ID NO: 1837822 - RNA, 19 nt, Homo sapiens
  misc_RNA (1)...(19): siRNA sense strand
ggagaucuuugggcguaua

SEQ ID NO: 1837823 - RNA, 19 nt, Homo sapiens
  misc_RNA (1)...(19): siRNA sense strand
ggcagaugcugaugacauu

SEQ ID NO: 1837824 - RNA, 19 nt, Homo sapiens
  misc_RNA (1)...(19): siRNA sense strand
cgacagccauccugaaagu

SEQ ID NO: 1837825 - RNA, 19 nt, Homo sapiens
  misc_RNA (1)...(19): siRNA sense strand
gagaacugguugacaggaa

SEQ ID NO: 1837826 - RNA, 19 nt, Homo sapiens
  misc_RNA (1)...(19): siRNA sense strand
ggaguucuguuaucaagag

SEQ ID NO: 1837827 - RNA, 19 nt, Homo sapiens
  misc_RNA (1)...(19): siRNA sense strand
gaagaggcaagcuggauga

SEQ ID NO: 1837828 - RNA, 19 nt, Homo sapiens
  misc_RNA (1)...(19): siRNA sense strand
ccagagcugugcagaucua

SEQ ID NO: 1837829 - RNA, 19 nt, Homo sapiens
  misc_RNA (1)...(19): siRNA sense strand
acaccggccugaccugaua

SEQ ID NO: 1837830 - RNA, 19 nt, Homo sapiens
  misc_RNA (1)...(19): siRNA sense strand
gcagcaaccugggaugaga

SEQ ID NO: 1837831 - RNA, 19 nt, Homo sapiens
  misc_RNA (1)...(19): siRNA sense strand
gaaauugaugcacguaaug

SEQ ID NO: 1837832 - RNA, 19 nt, Homo sapiens
  misc_RNA (1)...(19): siRNA sense strand
gagcaggagcuguacauga

SEQ ID NO: 1837833 - RNA, 19 nt, Homo sapiens
  misc_RNA (1)...(19): siRNA sense strand
gacagcggcucgagaugaa

SEQ ID NO: 1837834 - RNA, 19 nt, Homo sapiens
  misc_RNA (1)...(19): siRNA sense strand
gcucaucucugacaucaac

SEQ ID NO: 1837835 - RNA, 19 nt, Homo sapiens
  misc_RNA (1)...(19): siRNA sense strand
gaugaaggccuuagcuguu

SEQ ID NO: 1837836 - RNA, 19 nt, Homo sapiens
  misc_RNA (1)...(19): siRNA sense strand
cacagucucuggucaagaa

SEQ ID NO: 1837837 - RNA, 19 nt, Homo sapiens
  misc_RNA (1)...(19): siRNA sense strand
gagccgagcacgaagguuu

SEQ ID NO: 1837838 - RNA, 19 nt, Homo sapiens
  misc_RNA (1)...(19): siRNA sense strand
ggagagaucagaacacagu

SEQ ID NO: 1837839 - RNA, 19 nt, Homo sapiens
  misc_RNA (1)...(19): siRNA sense strand
uggcagaacuugcauccaa

SEQ ID NO: 1837840 - RNA, 19 nt, Homo sapiens
  misc_RNA (1)...(19): siRNA sense strand
gugaagccgugcagaagaa

SEQ ID NO: 1837841 - RNA, 19 nt, Homo sapiens
  misc_RNA (1)...(19): siRNA sense strand
gggaauaccuacuggaacu

SEQ ID NO: 1837842 - RNA, 19 nt, Homo sapiens
  misc_RNA (1)...(19): siRNA sense strand
gaagguggacucuauugau

SEQ ID NO: 1837843 - RNA, 19 nt, Homo sapiens
  misc_RNA (1)...(19): siRNA sense strand
caaggaaggcgaagacaug

SEQ ID NO: 1837844 - RNA, 19 nt, Homo sapiens
  misc_RNA (1)...(19): siRNA sense strand
cgagugcaaugaaaccaaa

SEQ ID NO: 1837845 - RNA, 19 nt, Homo sapiens
  misc_RNA (1)...(19): siRNA sense strand
gagaacaaguuucccaaaa

SEQ ID NO: 1837846 - RNA, 19 nt, Homo sapiens
  misc_RNA (1)...(19): siRNA sense strand
ugaaauugaugcacguaau

SEQ ID NO: 1837847 - RNA, 19 nt, Homo sapiens
  misc_RNA (1)...(19): siRNA sense strand
gaaagugagcgcauuagca

SEQ ID NO: 1837848 - RNA, 19 nt, Homo sapiens
  misc_RNA (1)...(19): siRNA sense strand
gccgaagccuuucuuaaca

SEQ ID NO: 1837849 - RNA, 19 nt, Homo sapiens
  misc_RNA (1)...(19): siRNA sense strand
caaaccaucaucauucuga

SEQ ID NO: 1837850 - RNA, 19 nt, Homo sapiens
  misc_RNA (1)...(19): siRNA sense strand
gcagacagcaagaggaaga

SEQ ID NO: 1837851 - RNA, 19 nt, Homo sapiens
  misc_RNA (1)...(19): siRNA sense strand
ggacaggagccguaccuau

SEQ ID NO: 1837852 - RNA, 19 nt, Homo sapiens
  misc_RNA (1)...(19): siRNA sense strand
gcaaacaaggccgaacuuu

SEQ ID NO: 1837853 - RNA, 19 nt, Homo sapiens
  misc_RNA (1)...(19): siRNA sense strand
gcagaccgaugcccaguac

SEQ ID NO: 1837854 - RNA, 19 nt, Homo sapiens
  misc_RNA (1)...(19): siRNA sense strand
ggaaacugaagacaacaaa

SEQ ID NO: 1837855 - RNA, 19 nt, Homo sapiens
  misc_RNA (1)...(19): siRNA sense strand
ccacccaaauuuacugaga

SEQ ID NO: 1837856 - RNA, 19 nt, Homo sapiens
  misc_RNA (1)...(19): siRNA sense strand
gaugagagacacagguuau

SEQ ID NO: 1837857 - RNA, 19 nt, Homo sapiens
  misc_RNA (1)...(19): siRNA sense strand
gaugaagaccacccugaaa

SEQ ID NO: 1837858 - RNA, 19 nt, Homo sapiens
  misc_RNA (1)...(19): siRNA sense strand
gugcugcucuucaccauuc

SEQ ID NO: 1837859 - RNA, 19 nt, Homo sapiens
  misc_RNA (1)...(19): siRNA sense strand
aaacugaagacaacaaaga

SEQ ID NO: 1837860 - RNA, 19 nt, Homo sapiens
  misc_RNA (1)...(19): siRNA sense strand
gaaggauggccucaaugaa

SEQ ID NO: 1837861 - RNA, 19 nt, Homo sapiens
  misc_RNA (1)...(19): siRNA sense strand
gcacgaggccauugagaca

SEQ ID NO: 1837862 - RNA, 19 nt, Homo sapiens
  misc_RNA (1)...(19): siRNA sense strand
ggagaacaaguuucccaaa

SEQ ID NO: 1837863 - RNA, 19 nt, Homo sapiens
  misc_RNA (1)...(19): siRNA sense strand
ggacaaguuccgcuucuuc

SEQ ID NO: 1837864 - RNA, 19 nt, Homo sapiens
  misc_RNA (1)...(19): siRNA sense strand
acacuacauuugagcauga

SEQ ID NO: 1837865 - RNA, 19 nt, Homo sapiens
  misc_RNA (1)...(19): siRNA sense strand
ugaacgagaggaagcauaa

SEQ ID NO: 1837866 - RNA, 19 nt, Homo sapiens
  misc_RNA (1)...(19): siRNA sense strand
gaacgagcuccacaagaug

SEQ ID NO: 1837867 - RNA, 19 nt, Homo sapiens
  misc_RNA (1)...(19): siRNA sense strand
gagccuagaaccagaaaug

SEQ ID NO: 1837868 - RNA, 19 nt, Homo sapiens
  misc_RNA (1)...(19): siRNA sense strand
ggacguggcggaagagauc

SEQ ID NO: 1837869 - RNA, 19 nt, Homo sapiens
  misc_RNA (1)...(19): siRNA sense strand
acaaggacguggcggaaga

SEQ ID NO: 1837870 - RNA, 19 nt, Homo sapiens
  misc_RNA (1)...(19): siRNA sense strand
gaaaucugcacaguaaaug

SEQ ID NO: 1837871 - RNA, 19 nt, Homo sapiens
  misc_RNA (1)...(19): siRNA sense strand
gaaaagaggaaagaaauga

SEQ ID NO: 1837872 - RNA, 19 nt, Homo sapiens
  misc_RNA (1)...(19): siRNA sense strand
ugacaaggccgacgauauc

SEQ ID NO: 1837873 - RNA, 19 nt, Homo sapiens
  misc_RNA (1)...(19): siRNA sense strand
uuacagagaaugcacacua

SEQ ID NO: 1837874 - RNA, 19 nt, Homo sapiens
  misc_RNA (1)...(19): siRNA sense strand
cggaagagaucgccaauua

SEQ ID NO: 1837875 - RNA, 19 nt, Homo sapiens
  misc_RNA (1)...(19): siRNA sense strand
gaagaaaucugccaaggau

SEQ ID NO: 1837876 - RNA, 19 nt, Homo sapiens
  misc_RNA (1)...(19): siRNA sense strand
ggacaugucuuacgaugaa

SEQ ID NO: 1837877 - RNA, 19 nt, Homo sapiens
  misc_RNA (1)...(19): siRNA sense strand
caacagggaucuacagaaa

SEQ ID NO: 1837878 - RNA, 19 nt, Homo sapiens
  misc_RNA (1)...(19): siRNA sense strand
ggaaagaaaugaucgacaa

SEQ ID NO: 1837879 - RNA, 19 nt, Homo sapiens
  misc_RNA (1)...(19): siRNA sense strand
gaacaaaccaucaucauuc

SEQ ID NO: 1837880 - RNA, 19 nt, Homo sapiens
  misc_RNA (1)...(19): siRNA sense strand
ccaaagagauccaucaguu

SEQ ID NO: 1837881 - RNA, 19 nt, Homo sapiens
  misc_RNA (1)...(19): siRNA sense strand
ggagaaaccacccaaauuu

SEQ ID NO: 1837882 - RNA, 19 nt, Homo sapiens
  misc_RNA (1)...(19): siRNA sense strand
ggaacgagcuccacaagau

SEQ ID NO: 1837883 - RNA, 19 nt, Homo sapiens
  misc_RNA (1)...(19): siRNA sense strand
gaugagaaguccauaauca

SEQ ID NO: 1837884 - RNA, 19 nt, Homo sapiens
  misc_RNA (1)...(19): siRNA sense strand
ugaaagaccuugcugaaga

SEQ ID NO: 1837885 - RNA, 19 nt, Homo sapiens
  misc_RNA (1)...(19): siRNA sense strand
gagaaaccacccaaauuua

SEQ ID NO: 1837886 - RNA, 19 nt, Homo sapiens
  misc_RNA (1)...(19): siRNA sense strand
ggccugaccugauagauuu

SEQ ID NO: 1837887 - RNA, 19 nt, Homo sapiens
  misc_RNA (1)...(19): siRNA sense strand
gaaaggugcuugacaaugc

SEQ ID NO: 1837888 - RNA, 19 nt, Homo sapiens
  misc_RNA (1)...(19): siRNA sense strand
gaagcaagccgaagccuuu

SEQ ID NO: 1837889 - RNA, 19 nt, Homo sapiens
  misc_RNA (1)...(19): siRNA sense strand
gaagagcaccgacgaggua

SEQ ID NO: 1837890 - RNA, 19 nt, Homo sapiens
  misc_RNA (1)...(19): siRNA sense strand
guaaaugguugaagcauca

SEQ ID NO: 1837891 - RNA, 19 nt, Homo sapiens
  misc_RNA (1)...(19): siRNA sense strand
agacagacauugccgcaua

SEQ ID NO: 1837892 - RNA, 19 nt, Homo sapiens
  misc_RNA (1)...(19): siRNA sense strand
gaacuugcauccaacaaag

SEQ ID NO: 1837893 - RNA, 19 nt, Homo sapiens
  misc_RNA (1)...(19): siRNA sense strand
gaaaugaaggugcuaguau

SEQ ID NO: 1837894 - RNA, 19 nt, Homo sapiens
  misc_RNA (1)...(19): siRNA sense strand
gugcagaucuagacaaaug

SEQ ID NO: 1837895 - RNA, 19 nt, Homo sapiens
  misc_RNA (1)...(19): siRNA sense strand
ucaaucaccuggcagauga

SEQ ID NO: 1837896 - RNA, 19 nt, Homo sapiens
  misc_RNA (1)...(19): siRNA sense strand
uggaaaggcugacuacauu

SEQ ID NO: 1837897 - RNA, 19 nt, Homo sapiens
  misc_RNA (1)...(19): siRNA sense strand
gaacuggcuuugcggaaug

SEQ ID NO: 1837898 - RNA, 19 nt, Homo sapiens
  misc_RNA (1)...(19): siRNA sense strand
gaagagaucgccaauuaca

SEQ ID NO: 1837899 - RNA, 19 nt, Homo sapiens
  misc_RNA (1)...(19): siRNA sense strand
caucaacucuggacauuca

SEQ ID NO: 1837900 - RNA, 19 nt, Homo sapiens
  misc_RNA (1)...(19): siRNA sense strand
gagcagagaguccaucuug

SEQ ID NO: 1837901 - RNA, 19 nt, Homo sapiens
  misc_RNA (1)...(19): siRNA sense strand
ggaaggauggccucaauga

SEQ ID NO: 1837902 - RNA, 19 nt, Homo sapiens
  misc_RNA (1)...(19): siRNA sense strand
acagggaucuacagaaauu

SEQ ID NO: 1837903 - RNA, 19 nt, Homo sapiens
  misc_RNA (1)...(19): siRNA sense strand
guggagaccuuacagagaa

SEQ ID NO: 1837904 - RNA, 19 nt, Homo sapiens
  misc_RNA (1)...(19): siRNA sense strand
gaacacaguggagaccuua

SEQ ID NO: 1837905 - RNA, 19 nt, Homo sapiens
  misc_RNA (1)...(19): siRNA sense strand
cuuauguggugacuuauua

SEQ ID NO: 1837906 - RNA, 19 nt, Homo sapiens
  misc_RNA (1)...(19): siRNA sense strand
gugcagcuguuaauaaaga

SEQ ID NO: 1837907 - RNA, 19 nt, Homo sapiens
  misc_RNA (1)...(19): siRNA sense strand
ggaagaaggagaucgaaga

SEQ ID NO: 1837908 - RNA, 19 nt, Homo sapiens
  misc_RNA (1)...(19): siRNA sense strand
agaaauuccugcaagauug

SEQ ID NO: 1837909 - RNA, 19 nt, Homo sapiens
  misc_RNA (1)...(19): siRNA sense strand
caacaaggccugggaaaga

SEQ ID NO: 1837910 - RNA, 19 nt, Homo sapiens
  misc_RNA (1)...(19): siRNA sense strand
gcauugaacuugggaaauc

SEQ ID NO: 1837911 - RNA, 19 nt, Homo sapiens
  misc_RNA (1)...(19): siRNA sense strand
ggagauggcagaagaggaa

SEQ ID NO: 1837912 - RNA, 19 nt, Homo sapiens
  misc_RNA (1)...(19): siRNA sense strand
cagagaagcuggaggaucu

SEQ ID NO: 1837913 - RNA, 19 nt, Homo sapiens
  misc_RNA (1)...(19): siRNA sense strand
ggccuucaaugcacugaua

SEQ ID NO: 1837914 - RNA, 19 nt, Homo sapiens
  misc_RNA (1)...(19): siRNA sense strand
gaaagaccuugcugaagag

SEQ ID NO: 1837915 - RNA, 19 nt, Homo sapiens
  misc_RNA (1)...(19): siRNA sense strand
caaagaauggcuugacaaa

SEQ ID NO: 1837916 - RNA, 19 nt, Homo sapiens
  misc_RNA (1)...(19): siRNA sense strand
ugagugaccugcagaagga

SEQ ID NO: 1837917 - RNA, 19 nt, Homo sapiens
  misc_RNA (1)...(19): siRNA sense strand
aaaugaaggugcuaguauu

SEQ ID NO: 1837918 - RNA, 19 nt, Homo sapiens
  misc_RNA (1)...(19): siRNA sense strand
ucaaugcacugauacacaa

SEQ ID NO: 1837919 - RNA, 19 nt, Homo sapiens
  misc_RNA (1)...(19): siRNA sense strand
ucugaacaaucgcaaauuu

SEQ ID NO: 1837920 - RNA, 19 nt, Homo sapiens
  misc_RNA (1)...(19): siRNA sense strand
gagguucucugcccuggaa

SEQ ID NO: 1837921 - RNA, 19 nt, Homo sapiens
  misc_RNA (1)...(19): siRNA sense strand
caaaguggauaaacuguac

SEQ ID NO: 1837922 - RNA, 19 nt, Homo sapiens
  misc_RNA (1)...(19): siRNA sense strand
ggagaucuuugggcguaua

SEQ ID NO: 1837923 - RNA, 19 nt, Homo sapiens
  misc_RNA (1)...(19): siRNA sense strand
ggcagaugcugaugacauu

SEQ ID NO: 1837924 - RNA, 19 nt, Homo sapiens
  misc_RNA (1)...(19): siRNA sense strand
cgacagccauccugaaagu

SEQ ID NO: 1837925 - RNA, 19 nt, Homo sapiens
  misc_RNA (1)...(19): siRNA sense strand
gagaacugguugacaggaa

SEQ ID NO: 1837926 - RNA, 19 nt, Homo sapiens
  misc_RNA (1)...(19): siRNA sense strand
ggaguucuguuaucaagag

SEQ ID NO: 1837927 - RNA, 19 nt, Homo sapiens
  misc_RNA (1)...(19): siRNA sense strand
gaagaggcaagcuggauga

SEQ ID NO: 1837928 - RNA, 19 nt, Homo sapiens
  misc_RNA (1)...(19): siRNA sense strand
ccagagcugugcagaucua

SEQ ID NO: 1837929 - RNA, 19 nt, Homo sapiens
  misc_RNA (1)...(19): siRNA sense strand
acaccggccugaccugaua

SEQ ID NO: 1837930 - RNA, 19 nt, Homo sapiens
  misc_RNA (1)...(19): siRNA sense strand
gcagcaaccugggaugaga

SEQ ID NO: 1837931 - RNA, 19 nt, Homo sapiens
  misc_RNA (1)...(19): siRNA sense strand
gaaauugaugcacguaaug

SEQ ID NO: 1837932 - RNA, 19 nt, Homo sapiens
  misc_RNA (1)...(19): siRNA sense strand
gagcaggagcuguacauga

SEQ ID NO: 1837933 - RNA, 19 nt, Homo sapiens
  misc_RNA (1)...(19): siRNA sense strand
gacagcggcucgagaugaa

SEQ ID NO: 1837934 - RNA, 19 nt, Homo sapiens
  misc_RNA (1)...(19): siRNA sense strand
gcucaucucugacaucaac

SEQ ID NO: 1837935 - RNA, 19 nt, Homo sapiens
  misc_RNA (1)...(19): siRNA sense strand
gaugaaggccuuagcuguu

SEQ ID NO: 1837936 - RNA, 19 nt, Homo sapiens
  misc_RNA (1)...(19): siRNA sense strand
cacagucucuggucaagaa

SEQ ID NO: 1837937 - RNA, 19 nt, Homo sapiens
  misc_RNA (1)...(19): siRNA sense strand
gagccgagcacgaagguuu

SEQ ID NO: 1837938 - RNA, 19 nt, Homo sapiens
  misc_RNA (1)...(19): siRNA sense strand
ggagagaucagaacacagu

SEQ ID NO: 1837939 - RNA, 19 nt, Homo sapiens
  misc_RNA (1)...(19): siRNA sense strand
uggcagaacuugcauccaa

SEQ ID NO: 1837940 - RNA, 19 nt, Homo sapiens
  misc_RNA (1)...(19): siRNA sense strand
gugaagccgugcagaagaa

SEQ ID NO: 1837941 - RNA, 19 nt, Homo sapiens
  misc_RNA (1)...(19): siRNA sense strand
gggaauaccuacuggaacu

SEQ ID NO: 1837942 - RNA, 19 nt, Homo sapiens
  misc_RNA (1)...(19): siRNA sense strand
gaagguggacucuauugau

SEQ ID NO: 1837943 - RNA, 19 nt, Homo sapiens
  misc_RNA (1)...(19): siRNA sense strand
caaggaaggcgaagacaug

SEQ ID NO: 1837944 - RNA, 19 nt, Homo sapiens
  misc_RNA (1)...(19): siRNA sense strand
cgagugcaaugaaaccaaa

SEQ ID NO: 1837945 - RNA, 19 nt, Homo sapiens
  misc_RNA (1)...(19): siRNA sense strand
gagaacaaguuucccaaaa

SEQ ID NO: 1837946 - RNA, 19 nt, Homo sapiens
  misc_RNA (1)...(19): siRNA sense strand
ugaaauugaugcacguaau

SEQ ID NO: 1837947 - RNA, 19 nt, Homo sapiens
  misc_RNA (1)...(19): siRNA sense strand
gaaagugagcgcauuagca

SEQ ID NO: 1837948 - RNA, 19 nt, Homo sapiens
  misc_RNA (1)...(19): siRNA sense strand
gccgaagccuuucuuaaca

SEQ ID NO: 1837949 - RNA, 19 nt, Homo sapiens
  misc_RNA (1)...(19): siRNA sense strand
caaaccaucaucauucuga

SEQ ID NO: 1837950 - RNA, 19 nt, Homo sapiens
  misc_RNA (1)...(19): siRNA sense strand
gcagacagcaagaggaaga

SEQ ID NO: 1837951 - RNA, 19 nt, Homo sapiens
  misc_RNA (1)...(19): siRNA sense strand
ggacaggagccguaccuau

SEQ ID NO: 1837952 - RNA, 19 nt, Homo sapiens
  misc_RNA (1)...(19): siRNA sense strand
gcaaacaaggccgaacuuu

SEQ ID NO: 1837953 - RNA, 19 nt, Homo sapiens
  misc_RNA (1)...(19): siRNA sense strand
gcagaccgaugcccaguac

SEQ ID NO: 1837954 - RNA, 19 nt, Homo sapiens
  misc_RNA (1)...(19): siRNA sense strand
ggaaacugaagacaacaaa

SEQ ID NO: 1837955 - RNA, 19 nt, Homo sapiens
  misc_RNA (1)...(19): siRNA sense strand
ccacccaaauuuacugaga

SEQ ID NO: 1837956 - RNA, 19 nt, Homo sapiens
  misc_RNA (1)...(19): siRNA sense strand
gaugagagacacagguuau

SEQ ID NO: 1837957 - RNA, 19 nt, Homo sapiens
  misc_RNA (1)...(19): siRNA sense strand
gaugaagaccacccugaaa

SEQ ID NO: 1837958 - RNA, 19 nt, Homo sapiens
  misc_RNA (1)...(19): siRNA sense strand
gugcugcucuucaccauuc

SEQ ID NO: 1837959 - RNA, 19 nt, Homo sapiens
  misc_RNA (1)...(19): siRNA sense strand
aaacugaagacaacaaaga

SEQ ID NO: 1837960 - RNA, 19 nt, Homo sapiens
  misc_RNA (1)...(19): siRNA sense strand
gaaggauggccucaaugaa

SEQ ID NO: 1837961 - RNA, 19 nt, Homo sapiens
  misc_RNA (1)...(19): siRNA sense strand
gcacgaggccauugagaca

SEQ ID NO: 1837962 - RNA, 19 nt, Homo sapiens
  misc_RNA (1)...(19): siRNA sense strand
ggagaacaaguuucccaaa

SEQ ID NO: 1837963 - RNA, 19 nt, Homo sapiens
  misc_RNA (1)...(19): siRNA sense strand
ggacaaguuccgcuucuuc

SEQ ID NO: 1837964 - RNA, 19 nt, Homo sapiens
  misc_RNA (1)...(19): siRNA sense strand
acacuacauuugagcauga

SEQ ID NO: 1837965 - RNA, 19 nt, Homo sapiens
  misc_RNA (1)...(19): siRNA sense strand
ugaacgagaggaagcauaa

SEQ ID NO: 1837966 - RNA, 19 nt, Homo sapiens
  misc_RNA (1)...(19): siRNA sense strand
gaacgagcuccacaagaug

SEQ ID NO: 1837967 - RNA, 19 nt, Homo sapiens
  misc_RNA (1)...(19): siRNA sense strand
gagccuagaaccagaaaug

SEQ ID NO: 1837968 - RNA, 19 nt, Homo sapiens
  misc_RNA (1)...(19): siRNA sense strand
ggacguggcggaagagauc

SEQ ID NO: 1837969 - RNA, 19 nt, Homo sapiens
  misc_RNA (1)...(19): siRNA sense strand
acaaggacguggcggaaga

SEQ ID NO: 1837970 - RNA, 19 nt, Homo sapiens
  misc_RNA (1)...(19): siRNA sense strand
gaaaucugcacaguaaaug

SEQ ID NO: 1837971 - RNA, 19 nt, Homo sapiens
  misc_RNA (1)...(19): siRNA sense strand
gaaaagaggaaagaaauga

SEQ ID NO: 1837972 - RNA, 19 nt, Homo sapiens
  misc_RNA (1)...(19): siRNA sense strand
ugacaaggccgacgauauc

SEQ ID NO: 1837973 - RNA, 19 nt, Homo sapiens
  misc_RNA (1)...(19): siRNA sense strand
uuacagagaaugcacacua

SEQ ID NO: 1837974 - RNA, 19 nt, Homo sapiens
  misc_RNA (1)...(19): siRNA sense strand
ggacugugcugaagaguac

SEQ ID NO: 1837975 - RNA, 19 nt, Homo sapiens
  misc_RNA (1)...(19): siRNA sense strand
agacagaucucaccuacca

SEQ ID NO: 1837976 - RNA, 19 nt, Homo sapiens
  misc_RNA (1)...(19): siRNA sense strand
ggaagacgggcaucaugaa

SEQ ID NO: 1837977 - RNA, 19 nt, Homo sapiens
  misc_RNA (1)...(19): siRNA sense strand
agacgggcaucaugaagaa

SEQ ID NO: 1837978 - RNA, 19 nt, Homo sapiens
  misc_RNA (1)...(19): siRNA sense strand
gcgugaagaucaagaugga

SEQ ID NO: 1837979 - RNA, 19 nt, Homo sapiens
  misc_RNA (1)...(19): siRNA sense strand
ugagacaggccauguguau

SEQ ID NO: 1837980 - RNA, 19 nt, Homo sapiens
  misc_RNA (1)...(19): siRNA sense strand
gcaccuagcaccucuacca

SEQ ID NO: 1837981 - RNA, 19 nt, Homo sapiens
  misc_RNA (1)...(19): siRNA sense strand
uacacgaccuucagcaaga

SEQ ID NO: 1837982 - RNA, 19 nt, Homo sapiens
  misc_RNA (1)...(19): siRNA sense strand
gcaccagugucugcuagug

SEQ ID NO: 1837983 - RNA, 19 nt, Homo sapiens
  misc_RNA (1)...(19): siRNA sense strand
ggccauguguauaccuuug

SEQ ID NO: 1837984 - RNA, 19 nt, Homo sapiens
  misc_RNA (1)...(19): siRNA sense strand
gaggaagacgggcaucaug

SEQ ID NO: 1837985 - RNA, 19 nt, Homo sapiens
  misc_RNA (1)...(19): siRNA sense strand
gagacaggccauguguaua

SEQ ID NO: 1837986 - RNA, 19 nt, Homo sapiens
  misc_RNA (1)...(19): siRNA sense strand
gggccaagccggguaagaa

SEQ ID NO: 1837987 - RNA, 19 nt, Homo sapiens
  misc_RNA (1)...(19): siRNA sense strand
ccaaugggacugugcugaa

SEQ ID NO: 1837988 - RNA, 19 nt, Homo sapiens
  misc_RNA (1)...(19): siRNA sense strand
gaagacgggcaucaugaag

SEQ ID NO: 1837989 - RNA, 19 nt, Homo sapiens
  misc_RNA (1)...(19): siRNA sense strand
caguucagcuccaccagau

SEQ ID NO: 1837990 - RNA, 19 nt, Homo sapiens
  misc_RNA (1)...(19): siRNA sense strand
caacagaccagagaaugag

SEQ ID NO: 1837991 - RNA, 19 nt, Homo sapiens
  misc_RNA (1)...(19): siRNA sense strand
ccacaacagaccagagaau

SEQ ID NO: 1837992 - RNA, 19 nt, Homo sapiens
  misc_RNA (1)...(19): siRNA sense strand
gggacugugcugaagagua

SEQ ID NO: 1837993 - RNA, 19 nt, Homo sapiens
  misc_RNA (1)...(19): siRNA sense strand
acaacagaccagagaauga

SEQ ID NO: 1837994 - RNA, 19 nt, Homo sapiens
  misc_RNA (1)...(19): siRNA sense strand
aaacugcagcccaugauca

SEQ ID NO: 1837995 - RNA, 19 nt, Homo sapiens
  misc_RNA (1)...(19): siRNA sense strand
gaagaucaagauggaguuc

SEQ ID NO: 1837996 - RNA, 19 nt, Homo sapiens
  misc_RNA (1)...(19): siRNA sense strand
agacaggccauguguauac

SEQ ID NO: 1837997 - RNA, 19 nt, Homo sapiens
  misc_RNA (1)...(19): siRNA sense strand
caaugggacugugcugaag

SEQ ID NO: 1837998 - RNA, 19 nt, Homo sapiens
  misc_RNA (1)...(19): siRNA sense strand
gaucccuguuucagcaguu

SEQ ID NO: 1837999 - RNA, 19 nt, Homo sapiens
  misc_RNA (1)...(19): siRNA sense strand
cagugcagaucccuguuuc

SEQ ID NO: 1838000 - RNA, 19 nt, Homo sapiens
  misc_RNA (1)...(19): siRNA sense strand
gaccaaggacacacugaag

SEQ ID NO: 1838001 - RNA, 19 nt, Homo sapiens
  misc_RNA (1)...(19): siRNA sense strand
ggaguucaucgacaacaag

SEQ ID NO: 1838002 - RNA, 19 nt, Homo sapiens
  misc_RNA (1)...(19): siRNA sense strand
gaccggcaaggcacugauu

SEQ ID NO: 1838003 - RNA, 19 nt, Homo sapiens
  misc_RNA (1)...(19): siRNA sense strand
ccaccagauggcugugaua

SEQ ID NO: 1838004 - RNA, 19 nt, Homo sapiens
  misc_RNA (1)...(19): siRNA sense strand
gcuacacgaccuucagcaa

SEQ ID NO: 1838005 - RNA, 19 nt, Homo sapiens
  misc_RNA (1)...(19): siRNA sense strand
auucagaccugccucaacu

SEQ ID NO: 1838006 - RNA, 19 nt, Homo sapiens
  misc_RNA (1)...(19): siRNA sense strand
ccacagcaccaagagugaa

SEQ ID NO: 1838007 - RNA, 19 nt, Homo sapiens
  misc_RNA (1)...(19): siRNA sense strand
agaucaagauggaguucau

SEQ ID NO: 1838008 - RNA, 19 nt, Homo sapiens
  misc_RNA (1)...(19): siRNA sense strand
uggaguucaucgacaacaa

SEQ ID NO: 1838009 - RNA, 19 nt, Homo sapiens
  misc_RNA (1)...(19): siRNA sense strand
caggccauguguauaccuu

SEQ ID NO: 1838010 - RNA, 19 nt, Homo sapiens
  misc_RNA (1)...(19): siRNA sense strand
cagcaccaagagugaauga

SEQ ID NO: 1838011 - RNA, 19 nt, Homo sapiens
  misc_RNA (1)...(19): siRNA sense strand
aggaagacgggcaucauga

SEQ ID NO: 1838012 - RNA, 19 nt, Homo sapiens
  misc_RNA (1)...(19): siRNA sense strand
gcaccucuaccaccaugca

SEQ ID NO: 1838013 - RNA, 19 nt, Homo sapiens
  misc_RNA (1)...(19): siRNA sense strand
guucagaccccacaacaga

SEQ ID NO: 1838014 - RNA, 19 nt, Homo sapiens
  misc_RNA (1)...(19): siRNA sense strand
cgucauccgugcccacaac

SEQ ID NO: 1838015 - RNA, 19 nt, Homo sapiens
  misc_RNA (1)...(19): siRNA sense strand
ccuuucccaucaccaacua

SEQ ID NO: 1838016 - RNA, 19 nt, Homo sapiens
  misc_RNA (1)...(19): siRNA sense strand
cacaacagaccagagaaug

SEQ ID NO: 1838017 - RNA, 19 nt, Homo sapiens
  misc_RNA (1)...(19): siRNA sense strand
gcagauagaugcugaugaa

SEQ ID NO: 1838018 - RNA, 19 nt, Homo sapiens
  misc_RNA (1)...(19): siRNA sense strand
gauagaugcugaugaauug

SEQ ID NO: 1838019 - RNA, 19 nt, Homo sapiens
  misc_RNA (1)...(19): siRNA sense strand
gacaacacuuuaucaguuu

SEQ ID NO: 1838020 - RNA, 19 nt, Homo sapiens
  misc_RNA (1)...(19): siRNA sense strand
agacaacacuuuaucaguu

SEQ ID NO: 1838021 - RNA, 19 nt, Homo sapiens
  misc_RNA (1)...(19): siRNA sense strand
ugacaggaguggaacagua

SEQ ID NO: 1838022 - RNA, 19 nt, Homo sapiens
  misc_RNA (1)...(19): siRNA sense strand
gcacaauggguuucaauga

SEQ ID NO: 1838023 - RNA, 19 nt, Homo sapiens
  misc_RNA (1)...(19): siRNA sense strand
acaaugggauuuagguuga

SEQ ID NO: 1838024 - RNA, 19 nt, Homo sapiens
  misc_RNA (1)...(19): siRNA sense strand
aggauccgcuguaugguua

SEQ ID NO: 1838025 - RNA, 19 nt, Homo sapiens
  misc_RNA (1)...(19): siRNA sense strand
agaaggcccugacaacaau

SEQ ID NO: 1838026 - RNA, 19 nt, Homo sapiens
  misc_RNA (1)...(19): siRNA sense strand
ucagcaagguguugugaau

SEQ ID NO: 1838027 - RNA, 19 nt, Homo sapiens
  misc_RNA (1)...(19): siRNA sense strand
gaacaguagacccacaaga

SEQ ID NO: 1838028 - RNA, 19 nt, Homo sapiens
  misc_RNA (1)...(19): siRNA sense strand
caaugugucaugaguguuu

SEQ ID NO: 1838029 - RNA, 19 nt, Homo sapiens
  misc_RNA (1)...(19): siRNA sense strand
agcaagguguugugaauuu

SEQ ID NO: 1838030 - RNA, 19 nt, Homo sapiens
  misc_RNA (1)...(19): siRNA sense strand
agauaugucuggcacaaug

SEQ ID NO: 1838031 - RNA, 19 nt, Homo sapiens
  misc_RNA (1)...(19): siRNA sense strand
gcaagguguugugaauuuc

SEQ ID NO: 1838032 - RNA, 19 nt, Homo sapiens
  misc_RNA (1)...(19): siRNA sense strand
gcugaugaauugcagagau

SEQ ID NO: 1838033 - RNA, 19 nt, Homo sapiens
  misc_RNA (1)...(19): siRNA sense strand
acagacagcuuucgaagac

SEQ ID NO: 1838034 - RNA, 19 nt, Homo sapiens
  misc_RNA (1)...(19): siRNA sense strand
ugacaacaaugggauuuag

SEQ ID NO: 1838035 - RNA, 19 nt, Homo sapiens
  misc_RNA (1)...(19): siRNA sense strand
gcagaaggcccugacaaca

SEQ ID NO: 1838036 - RNA, 19 nt, Homo sapiens
  misc_RNA (1)...(19): siRNA sense strand
uuucaaugcuggauagaga

SEQ ID NO: 1838037 - RNA, 19 nt, Homo sapiens
  misc_RNA (1)...(19): siRNA sense strand
cagaaggcccugacaacaa

SEQ ID NO: 1838038 - RNA, 19 nt, Homo sapiens
  misc_RNA (1)...(19): siRNA sense strand
gaauuucccauaugaugau

SEQ ID NO: 1838039 - RNA, 19 nt, Homo sapiens
  misc_RNA (1)...(19): siRNA sense strand
acucugggcuguacugaau

SEQ ID NO: 1838040 - RNA, 19 nt, Homo sapiens
  misc_RNA (1)...(19): siRNA sense strand
cuggagacuugccggcuua

SEQ ID NO: 1838041 - RNA, 19 nt, Homo sapiens
  misc_RNA (1)...(19): siRNA sense strand
guugugaauuucccauaug

SEQ ID NO: 1838042 - RNA, 19 nt, Homo sapiens
  misc_RNA (1)...(19): siRNA sense strand
agauagaugcugaugaauu

SEQ ID NO: 1838043 - RNA, 19 nt, Homo sapiens
  misc_RNA (1)...(19): siRNA sense strand
cgauacagcaccaauggaa

SEQ ID NO: 1838044 - RNA, 19 nt, Homo sapiens
  misc_RNA (1)...(19): siRNA sense strand
aaagaacucugggcuguac

SEQ ID NO: 1838045 - RNA, 19 nt, Homo sapiens
  misc_RNA (1)...(19): siRNA sense strand
caacaaugggauuuagguu

SEQ ID NO: 1838046 - RNA, 19 nt, Homo sapiens
  misc_RNA (1)...(19): siRNA sense strand
gagacaacacuuuaucagu

SEQ ID NO: 1838047 - RNA, 19 nt, Homo sapiens
  misc_RNA (1)...(19): siRNA sense strand
gcuggaggauacaaaccuu

SEQ ID NO: 1838048 - RNA, 19 nt, Homo sapiens
  misc_RNA (1)...(19): siRNA sense strand
cagcaccaauggaaagauc

SEQ ID NO: 1838049 - RNA, 19 nt, Homo sapiens
  misc_RNA (1)...(19): siRNA sense strand
caguagacccacaagaauu

SEQ ID NO: 1838050 - RNA, 19 nt, Homo sapiens
  misc_RNA (1)...(19): siRNA sense strand
agagauaugucuggcacaa

SEQ ID NO: 1838051 - RNA, 19 nt, Homo sapiens
  misc_RNA (1)...(19): siRNA sense strand
ugaauuucccauaugauga

SEQ ID NO: 1838052 - RNA, 19 nt, Homo sapiens
  misc_RNA (1)...(19): siRNA sense strand
gugaauuucccauaugaug

SEQ ID NO: 1838053 - RNA, 19 nt, Homo sapiens
  misc_RNA (1)...(19): siRNA sense strand
gauacagcaccaauggaaa

SEQ ID NO: 1838054 - RNA, 19 nt, Homo sapiens
  misc_RNA (1)...(19): siRNA sense strand
aaacucaggauccgcugua

SEQ ID NO: 1838055 - RNA, 19 nt, Homo sapiens
  misc_RNA (1)...(19): siRNA sense strand
ucaaugcuggauagagaua

SEQ ID NO: 1838056 - RNA, 19 nt, Homo sapiens
  misc_RNA (1)...(19): siRNA sense strand
cugaauggcuggagacaac

SEQ ID NO: 1838057 - RNA, 19 nt, Homo sapiens
  misc_RNA (1)...(19): siRNA sense strand
uggcauugcuggaggauac

SEQ ID NO: 1838058 - RNA, 19 nt, Homo sapiens
  misc_RNA (1)...(19): siRNA sense strand
ggacaggaugggcagauag

SEQ ID NO: 1838059 - RNA, 19 nt, Homo sapiens
  misc_RNA (1)...(19): siRNA sense strand
ggagacaacacuuuaucag

SEQ ID NO: 1838060 - RNA, 19 nt, Homo sapiens
  misc_RNA (1)...(19): siRNA sense strand
aacaguagacccacaagaa

SEQ ID NO: 1838061 - RNA, 19 nt, Homo sapiens
  misc_RNA (1)...(19): siRNA sense strand
uaaagaacucugggcugua

SEQ ID NO: 1838062 - RNA, 19 nt, Homo sapiens
  misc_RNA (1)...(19): siRNA sense strand
ggcuggagacaacacuuua

SEQ ID NO: 1838063 - RNA, 19 nt, Homo sapiens
  misc_RNA (1)...(19): siRNA sense strand
gagacuugccggcuuaugg

SEQ ID NO: 1838064 - RNA, 19 nt, Homo sapiens
  misc_RNA (1)...(19): siRNA sense strand
gacaggaugggcagauaga

SEQ ID NO: 1838065 - RNA, 19 nt, Homo sapiens
  misc_RNA (1)...(19): siRNA sense strand
cugaugaauugcagagaug

SEQ ID NO: 1838066 - RNA, 19 nt, Homo sapiens
  misc_RNA (1)...(19): siRNA sense strand
gaacucugggcuguacuga

SEQ ID NO: 1838067 - RNA, 19 nt, Homo sapiens
  misc_RNA (1)...(19): siRNA sense strand
uggacaggaugggcagaua

SEQ ID NO: 1838068 - RNA, 19 nt, Homo sapiens
  misc_RNA (1)...(19): siRNA sense strand
uuacuuugcugcuguagcu

SEQ ID NO: 1838069 - RNA, 19 nt, Homo sapiens
  misc_RNA (1)...(19): siRNA sense strand
gacaggaguggaacaguag

SEQ ID NO: 1838070 - RNA, 19 nt, Homo sapiens
  misc_RNA (1)...(19): siRNA sense strand
acaguagacccacaagaau

SEQ ID NO: 1838071 - RNA, 19 nt, Homo sapiens
  misc_RNA (1)...(19): siRNA sense strand
uugugaauuucccauauga

SEQ ID NO: 1838072 - RNA, 19 nt, Homo sapiens
  misc_RNA (1)...(19): siRNA sense strand
aaacugagggcucuuacag

SEQ ID NO: 1838073 - RNA, 19 nt, Homo sapiens
  misc_RNA (1)...(19): siRNA sense strand
gaggauacaaaccuuuuaa

SEQ ID NO: 1838074 - RNA, 19 nt, Homo sapiens
  misc_RNA (1)...(19): siRNA sense strand
aaugugucaugaguguuua

SEQ ID NO: 1838075 - RNA, 19 nt, Homo sapiens
  misc_RNA (1)...(19): siRNA sense strand
uguugugaauuucccauau

SEQ ID NO: 1838076 - RNA, 19 nt, Homo sapiens
  misc_RNA (1)...(19): siRNA sense strand
gcucagcaagguguuguga

SEQ ID NO: 1838077 - RNA, 19 nt, Homo sapiens
  misc_RNA (1)...(19): siRNA sense strand
aaacgauacagcaccaaug

SEQ ID NO: 1838078 - RNA, 19 nt, Homo sapiens
  misc_RNA (1)...(19): siRNA sense strand
aguagacccacaagaauug

SEQ ID NO: 1838079 - RNA, 19 nt, Homo sapiens
  misc_RNA (1)...(19): siRNA sense strand
ccaauggaaagaucaccuu

SEQ ID NO: 1838080 - RNA, 19 nt, Homo sapiens
  misc_RNA (1)...(19): siRNA sense strand
cccaggcugugaauucaau

SEQ ID NO: 1838081 - RNA, 19 nt, Homo sapiens
  misc_RNA (1)...(19): siRNA sense strand
caggauccgcuguaugguu

SEQ ID NO: 1838082 - RNA, 19 nt, Homo sapiens
  misc_RNA (1)...(19): siRNA sense strand
gacacagucuggcauugcu

SEQ ID NO: 1838083 - RNA, 19 nt, Homo sapiens
  misc_RNA (1)...(19): siRNA sense strand
ggaggauacaaaccuuuua

SEQ ID NO: 1838084 - RNA, 19 nt, Homo sapiens
  misc_RNA (1)...(19): siRNA sense strand
auggaaagaucaccuucga

SEQ ID NO: 1838085 - RNA, 19 nt, Homo sapiens
  misc_RNA (1)...(19): siRNA sense strand
caggaugggcagauagaug

SEQ ID NO: 1838086 - RNA, 19 nt, Homo sapiens
  misc_RNA (1)...(19): siRNA sense strand
gcuggagacaacacuuuau

SEQ ID NO: 1838087 - RNA, 19 nt, Homo sapiens
  misc_RNA (1)...(19): siRNA sense strand
gucaaacugagggcucuua

SEQ ID NO: 1838088 - RNA, 19 nt, Homo sapiens
  misc_RNA (1)...(19): siRNA sense strand
cagcaagguguugugaauu

SEQ ID NO: 1838089 - RNA, 19 nt, Homo sapiens
  misc_RNA (1)...(19): siRNA sense strand
uucaaugugucaugagugu

SEQ ID NO: 1838090 - RNA, 19 nt, Homo sapiens
  misc_RNA (1)...(19): siRNA sense strand
gcagauagaugcugaugaa

SEQ ID NO: 1838091 - RNA, 19 nt, Homo sapiens
  misc_RNA (1)...(19): siRNA sense strand
gauagaugcugaugaauug

SEQ ID NO: 1838092 - RNA, 19 nt, Homo sapiens
  misc_RNA (1)...(19): siRNA sense strand
gacaacacuuuaucaguuu

SEQ ID NO: 1838093 - RNA, 19 nt, Homo sapiens
  misc_RNA (1)...(19): siRNA sense strand
agacaacacuuuaucaguu

SEQ ID NO: 1838094 - RNA, 19 nt, Homo sapiens
  misc_RNA (1)...(19): siRNA sense strand
ugacaggaguggaacagua

SEQ ID NO: 1838095 - RNA, 19 nt, Homo sapiens
  misc_RNA (1)...(19): siRNA sense strand
gcacaauggguuucaauga

SEQ ID NO: 1838096 - RNA, 19 nt, Homo sapiens
  misc_RNA (1)...(19): siRNA sense strand
acaaugggauuuagguuga

SEQ ID NO: 1838097 - RNA, 19 nt, Homo sapiens
  misc_RNA (1)...(19): siRNA sense strand
aggauccgcuguaugguua

SEQ ID NO: 1838098 - RNA, 19 nt, Homo sapiens
  misc_RNA (1)...(19): siRNA sense strand
agaaggcccugacaacaau

SEQ ID NO: 1838099 - RNA, 19 nt, Homo sapiens
  misc_RNA (1)...(19): siRNA sense strand
ucagcaagguguugugaau

SEQ ID NO: 1838100 - RNA, 19 nt, Homo sapiens
  misc_RNA (1)...(19): siRNA sense strand
gaacaguagacccacaaga

SEQ ID NO: 1838101 - RNA, 19 nt, Homo sapiens
  misc_RNA (1)...(19): siRNA sense strand
caaugugucaugaguguuu

SEQ ID NO: 1838102 - RNA, 19 nt, Homo sapiens
  misc_RNA (1)...(19): siRNA sense strand
agcaagguguugugaauuu

SEQ ID NO: 1838103 - RNA, 19 nt, Homo sapiens
  misc_RNA (1)...(19): siRNA sense strand
agauaugucuggcacaaug

SEQ ID NO: 1838104 - RNA, 19 nt, Homo sapiens
  misc_RNA (1)...(19): siRNA sense strand
gcaagguguugugaauuuc

SEQ ID NO: 1838105 - RNA, 19 nt, Homo sapiens
  misc_RNA (1)...(19): siRNA sense strand
gcugaugaauugcagagau

SEQ ID NO: 1838106 - RNA, 19 nt, Homo sapiens
  misc_RNA (1)...(19): siRNA sense strand
acagacagcuuucgaagac

SEQ ID NO: 1838107 - RNA, 19 nt, Homo sapiens
  misc_RNA (1)...(19): siRNA sense strand
ugacaacaaugggauuuag

SEQ ID NO: 1838108 - RNA, 19 nt, Homo sapiens
  misc_RNA (1)...(19): siRNA sense strand
gcagaaggcccugacaaca

SEQ ID NO: 1838109 - RNA, 19 nt, Homo sapiens
  misc_RNA (1)...(19): siRNA sense strand
uuucaaugcuggauagaga

SEQ ID NO: 1838110 - RNA, 19 nt, Homo sapiens
  misc_RNA (1)...(19): siRNA sense strand
cagaaggcccugacaacaa

SEQ ID NO: 1838111 - RNA, 19 nt, Homo sapiens
  misc_RNA (1)...(19): siRNA sense strand
gaauuucccauaugaugau

SEQ ID NO: 1838112 - RNA, 19 nt, Homo sapiens
  misc_RNA (1)...(19): siRNA sense strand
acucugggcuguacugaau

SEQ ID NO: 1838113 - RNA, 19 nt, Homo sapiens
  misc_RNA (1)...(19): siRNA sense strand
cuggagacuugccggcuua

SEQ ID NO: 1838114 - RNA, 19 nt, Homo sapiens
  misc_RNA (1)...(19): siRNA sense strand
guugugaauuucccauaug

SEQ ID NO: 1838115 - RNA, 19 nt, Homo sapiens
  misc_RNA (1)...(19): siRNA sense strand
agauagaugcugaugaauu

SEQ ID NO: 1838116 - RNA, 19 nt, Homo sapiens
  misc_RNA (1)...(19): siRNA sense strand
cgauacagcaccaauggaa

SEQ ID NO: 1838117 - RNA, 19 nt, Homo sapiens
  misc_RNA (1)...(19): siRNA sense strand
aaagaacucugggcuguac

SEQ ID NO: 1838118 - RNA, 19 nt, Homo sapiens
  misc_RNA (1)...(19): siRNA sense strand
caacaaugggauuuagguu

SEQ ID NO: 1838119 - RNA, 19 nt, Homo sapiens
  misc_RNA (1)...(19): siRNA sense strand
gagacaacacuuuaucagu

SEQ ID NO: 1838120 - RNA, 19 nt, Homo sapiens
  misc_RNA (1)...(19): siRNA sense strand
gcuggaggauacaaaccuu

SEQ ID NO: 1838121 - RNA, 19 nt, Homo sapiens
  misc_RNA (1)...(19): siRNA sense strand
cagcaccaauggaaagauc

SEQ ID NO: 1838122 - RNA, 19 nt, Homo sapiens
  misc_RNA (1)...(19): siRNA sense strand
caguagacccacaagaauu

SEQ ID NO: 1838123 - RNA, 19 nt, Homo sapiens
  misc_RNA (1)...(19): siRNA sense strand
agagauaugucuggcacaa

SEQ ID NO: 1838124 - RNA, 19 nt, Homo sapiens
  misc_RNA (1)...(19): siRNA sense strand
ugaauuucccauaugauga

SEQ ID NO: 1838125 - RNA, 19 nt, Homo sapiens
  misc_RNA (1)...(19): siRNA sense strand
gugaauuucccauaugaug

SEQ ID NO: 1838126 - RNA, 19 nt, Homo sapiens
  misc_RNA (1)...(19): siRNA sense strand
gauacagcaccaauggaaa

SEQ ID NO: 1838127 - RNA, 19 nt, Homo sapiens
  misc_RNA (1)...(19): siRNA sense strand
aaacucaggauccgcugua

SEQ ID NO: 1838128 - RNA, 19 nt, Homo sapiens
  misc_RNA (1)...(19): siRNA sense strand
ucaaugcuggauagagaua

SEQ ID NO: 1838129 - RNA, 19 nt, Homo sapiens
  misc_RNA (1)...(19): siRNA sense strand
cugaauggcuggagacaac

SEQ ID NO: 1838130 - RNA, 19 nt, Homo sapiens
  misc_RNA (1)...(19): siRNA sense strand
uggcauugcuggaggauac

SEQ ID NO: 1838131 - RNA, 19 nt, Homo sapiens
  misc_RNA (1)...(19): siRNA sense strand
ggacaggaugggcagauag

SEQ ID NO: 1838132 - RNA, 19 nt, Homo sapiens
  misc_RNA (1)...(19): siRNA sense strand
ggagacaacacuuuaucag

SEQ ID NO: 1838133 - RNA, 19 nt, Homo sapiens
  misc_RNA (1)...(19): siRNA sense strand
aacaguagacccacaagaa

SEQ ID NO: 1838134 - RNA, 19 nt, Homo sapiens
  misc_RNA (1)...(19): siRNA sense strand
uaaagaacucugggcugua

SEQ ID NO: 1838135 - RNA, 19 nt, Homo sapiens
  misc_RNA (1)...(19): siRNA sense strand
ggcuggagacaacacuuua

SEQ ID NO: 1838136 - RNA, 19 nt, Homo sapiens
  misc_RNA (1)...(19): siRNA sense strand
gagacuugccggcuuaugg

SEQ ID NO: 1838137 - RNA, 19 nt, Homo sapiens
  misc_RNA (1)...(19): siRNA sense strand
gacaggaugggcagauaga

SEQ ID NO: 1838138 - RNA, 19 nt, Homo sapiens
  misc_RNA (1)...(19): siRNA sense strand
cugaugaauugcagagaug

SEQ ID NO: 1838139 - RNA, 19 nt, Homo sapiens
  misc_RNA (1)...(19): siRNA sense strand
gaacucugggcuguacuga

SEQ ID NO: 1838140 - RNA, 19 nt, Homo sapiens
  misc_RNA (1)...(19): siRNA sense strand
uggacaggaugggcagaua

SEQ ID NO: 1838141 - RNA, 19 nt, Homo sapiens
  misc_RNA (1)...(19): siRNA sense strand
uuacuuugcugcuguagcu

SEQ ID NO: 1838142 - RNA, 19 nt, Homo sapiens
  misc_RNA (1)...(19): siRNA sense strand
gacaggaguggaacaguag

SEQ ID NO: 1838143 - RNA, 19 nt, Homo sapiens
  misc_RNA (1)...(19): siRNA sense strand
acaguagacccacaagaau

SEQ ID NO: 1838144 - RNA, 19 nt, Homo sapiens
  misc_RNA (1)...(19): siRNA sense strand
uugugaauuucccauauga

SEQ ID NO: 1838145 - RNA, 19 nt, Homo sapiens
  misc_RNA (1)...(19): siRNA sense strand
aaacugagggcucuuacag

SEQ ID NO: 1838146 - RNA, 19 nt, Homo sapiens
  misc_RNA (1)...(19): siRNA sense strand
gaggauacaaaccuuuuaa

SEQ ID NO: 1838147 - RNA, 19 nt, Homo sapiens
  misc_RNA (1)...(19): siRNA sense strand
aaugugucaugaguguuua

SEQ ID NO: 1838148 - RNA, 19 nt, Homo sapiens
  misc_RNA (1)...(19): siRNA sense strand
uguugugaauuucccauau

SEQ ID NO: 1838149 - RNA, 19 nt, Homo sapiens
  misc_RNA (1)...(19): siRNA sense strand
gcucagcaagguguuguga

SEQ ID NO: 1838150 - RNA, 19 nt, Homo sapiens
  misc_RNA (1)...(19): siRNA sense strand
aaacgauacagcaccaaug

SEQ ID NO: 1838151 - RNA, 19 nt, Homo sapiens
  misc_RNA (1)...(19): siRNA sense strand
aguagacccacaagaauug

SEQ ID NO: 1838152 - RNA, 19 nt, Homo sapiens
  misc_RNA (1)...(19): siRNA sense strand
ccaauggaaagaucaccuu

SEQ ID NO: 1838153 - RNA, 19 nt, Homo sapiens
  misc_RNA (1)...(19): siRNA sense strand
cccaggcugugaauucaau

SEQ ID NO: 1838154 - RNA, 19 nt, Homo sapiens
  misc_RNA (1)...(19): siRNA sense strand
caggauccgcuguaugguu

SEQ ID NO: 1838155 - RNA, 19 nt, Homo sapiens
  misc_RNA (1)...(19): siRNA sense strand
gacacagucuggcauugcu

SEQ ID NO: 1838156 - RNA, 19 nt, Homo sapiens
  misc_RNA (1)...(19): siRNA sense strand
ggaggauacaaaccuuuua

SEQ ID NO: 1838157 - RNA, 19 nt, Homo sapiens
  misc_RNA (1)...(19): siRNA sense strand
auggaaagaucaccuucga

SEQ ID NO: 1838158 - RNA, 19 nt, Homo sapiens
  misc_RNA (1)...(19): siRNA sense strand
caggaugggcagauagaug

SEQ ID NO: 1838159 - RNA, 19 nt, Homo sapiens
  misc_RNA (1)...(19): siRNA sense strand
gcuggagacaacacuuuau

SEQ ID NO: 1838160 - RNA, 19 nt, Homo sapiens
  misc_RNA (1)...(19): siRNA sense strand
gucaaacugagggcucuua

SEQ ID NO: 1838161 - RNA, 19 nt, Homo sapiens
  misc_RNA (1)...(19): siRNA sense strand
cagcaagguguugugaauu

SEQ ID NO: 1838162 - RNA, 19 nt, Homo sapiens
  misc_RNA (1)...(19): siRNA sense strand
uucaaugugucaugagugu

SEQ ID NO: 1838163 - RNA, 19 nt, Homo sapiens
  misc_RNA (1)...(19): siRNA sense strand
gcaagauggcccaggagaa

SEQ ID NO: 1838164 - RNA, 19 nt, Homo sapiens
  misc_RNA (1)...(19): siRNA sense strand
aguggaaacugcucacaga

SEQ ID NO: 1838165 - RNA, 19 nt, Homo sapiens
  misc_RNA (1)...(19): siRNA sense strand
gaccugggcuccaaaaugg

SEQ ID NO: 1838166 - RNA, 19 nt, Homo sapiens
  misc_RNA (1)...(19): siRNA sense strand
gcuacaugaucccgugcaa

SEQ ID NO: 1838167 - RNA, 19 nt, Homo sapiens
  misc_RNA (1)...(19): siRNA sense strand
caagauggcccaggagaac

SEQ ID NO: 1838168 - RNA, 19 nt, Homo sapiens
  misc_RNA (1)...(19): siRNA sense strand
gaagacagcccucaaggaa

SEQ ID NO: 1838169 - RNA, 19 nt, Homo sapiens
  misc_RNA (1)...(19): siRNA sense strand
agacagcccucaaggaaga

SEQ ID NO: 1838170 - RNA, 19 nt, Homo sapiens
  misc_RNA (1)...(19): siRNA sense strand
ccgaaagucucuucaagga

SEQ ID NO: 1838171 - RNA, 19 nt, Homo sapiens
  misc_RNA (1)...(19): siRNA sense strand
agaugcagcugaaguacua

SEQ ID NO: 1838172 - RNA, 19 nt, Homo sapiens
  misc_RNA (1)...(19): siRNA sense strand
gcaagaacccgagcacgaa

SEQ ID NO: 1838173 - RNA, 19 nt, Homo sapiens
  misc_RNA (1)...(19): siRNA sense strand
ucaaggagaugcggcaguu

SEQ ID NO: 1838174 - RNA, 19 nt, Homo sapiens
  misc_RNA (1)...(19): siRNA sense strand
gcacggagagagacgaguu

SEQ ID NO: 1838175 - RNA, 19 nt, Homo sapiens
  misc_RNA (1)...(19): siRNA sense strand
gcaccuggaccucaucaag

SEQ ID NO: 1838176 - RNA, 19 nt, Homo sapiens
  misc_RNA (1)...(19): siRNA sense strand
ccuauuaccagcucaugaa

SEQ ID NO: 1838177 - RNA, 19 nt, Homo sapiens
  misc_RNA (1)...(19): siRNA sense strand
ucauccaagucuccaagaa

SEQ ID NO: 1838178 - RNA, 19 nt, Homo sapiens
  misc_RNA (1)...(19): siRNA sense strand
cagcugaaguacuacaacu

SEQ ID NO: 1838179 - RNA, 19 nt, Homo sapiens
  misc_RNA (1)...(19): siRNA sense strand
ugaagacagcccucaagga

SEQ ID NO: 1838180 - RNA, 19 nt, Homo sapiens
  misc_RNA (1)...(19): siRNA sense strand
uggcgcagaugcagcugaa

SEQ ID NO: 1838181 - RNA, 19 nt, Homo sapiens
  misc_RNA (1)...(19): siRNA sense strand
cgcgaaaggugcugaucau

SEQ ID NO: 1838182 - RNA, 19 nt, Homo sapiens
  misc_RNA (1)...(19): siRNA sense strand
gcgcagaugcagcugaagu

SEQ ID NO: 1838183 - RNA, 19 nt, Homo sapiens
  misc_RNA (1)...(19): siRNA sense strand
cgccgaaagucucuucaag

SEQ ID NO: 1838184 - RNA, 19 nt, Homo sapiens
  misc_RNA (1)...(19): siRNA sense strand
ccaagucuccaagaaguuc

SEQ ID NO: 1838185 - RNA, 19 nt, Homo sapiens
  misc_RNA (1)...(19): siRNA sense strand
gguguuggacggugucauc

SEQ ID NO: 1838186 - RNA, 19 nt, Homo sapiens
  misc_RNA (1)...(19): siRNA sense strand
ccuuugugcugcccgaguu

SEQ ID NO: 1838187 - RNA, 19 nt, Homo sapiens
  misc_RNA (1)...(19): siRNA sense strand
cgcagaugcagcugaagua

SEQ ID NO: 1838188 - RNA, 19 nt, Homo sapiens
  misc_RNA (1)...(19): siRNA sense strand
ggacuuaacguauuucuug

SEQ ID NO: 1838189 - RNA, 19 nt, Homo sapiens
  misc_RNA (1)...(19): siRNA sense strand
cagcagaaaugauaccuaa

SEQ ID NO: 1838190 - RNA, 19 nt, Homo sapiens
  misc_RNA (1)...(19): siRNA sense strand
cuacagagauucaagaugu

SEQ ID NO: 1838191 - RNA, 19 nt, Homo sapiens
  misc_RNA (1)...(19): siRNA sense strand
caggacagguuuauuugua

SEQ ID NO: 1838192 - RNA, 19 nt, Homo sapiens
  misc_RNA (1)...(19): siRNA sense strand
guaagucaguaauguugua

SEQ ID NO: 1838193 - RNA, 19 nt, Homo sapiens
  misc_RNA (1)...(19): siRNA sense strand
gaccaggacagguuuauuu

SEQ ID NO: 1838194 - RNA, 19 nt, Homo sapiens
  misc_RNA (1)...(19): siRNA sense strand
guaucuauccugcuuauuu

SEQ ID NO: 1838195 - RNA, 19 nt, Homo sapiens
  misc_RNA (1)...(19): siRNA sense strand
guacaguucccaucacgua

SEQ ID NO: 1838196 - RNA, 19 nt, Homo sapiens
  misc_RNA (1)...(19): siRNA sense strand
guaugcagcagaaaugaua

SEQ ID NO: 1838197 - RNA, 19 nt, Homo sapiens
  misc_RNA (1)...(19): siRNA sense strand
ugaccaaagucuucaacaa

SEQ ID NO: 1838198 - RNA, 19 nt, Homo sapiens
  misc_RNA (1)...(19): siRNA sense strand
ucacguaagucaguaaugu

SEQ ID NO: 1838199 - RNA, 19 nt, Homo sapiens
  misc_RNA (1)...(19): siRNA sense strand
gauucaagauguauguuca

SEQ ID NO: 1838200 - RNA, 19 nt, Homo sapiens
  misc_RNA (1)...(19): siRNA sense strand
ggaaucgugauguccaaua

SEQ ID NO: 1838201 - RNA, 19 nt, Homo sapiens
  misc_RNA (1)...(19): siRNA sense strand
gcaguuggacuuaacguau

SEQ ID NO: 1838202 - RNA, 19 nt, Homo sapiens
  misc_RNA (1)...(19): siRNA sense strand
ggacagguuuauuuguauc

SEQ ID NO: 1838203 - RNA, 19 nt, Homo sapiens
  misc_RNA (1)...(19): siRNA sense strand
gcagaaaugauaccuaaac

SEQ ID NO: 1838204 - RNA, 19 nt, Homo sapiens
  misc_RNA (1)...(19): siRNA sense strand
gaaucgugauguccaauac

SEQ ID NO: 1838205 - RNA, 19 nt, Homo sapiens
  misc_RNA (1)...(19): siRNA sense strand
caacaaggagagggaagua

SEQ ID NO: 1838206 - RNA, 19 nt, Homo sapiens
  misc_RNA (1)...(19): siRNA sense strand
ccaaagucuucaacaagga

SEQ ID NO: 1838207 - RNA, 19 nt, Homo sapiens
  misc_RNA (1)...(19): siRNA sense strand
guucagcaguuggacuuaa

SEQ ID NO: 1838208 - RNA, 19 nt, Homo sapiens
  misc_RNA (1)...(19): siRNA sense strand
caguuggacuuaacguauu

SEQ ID NO: 1838209 - RNA, 19 nt, Homo sapiens
  misc_RNA (1)...(19): siRNA sense strand
gacuuaacguauuucuuga

SEQ ID NO: 1838210 - RNA, 19 nt, Homo sapiens
  misc_RNA (1)...(19): siRNA sense strand
gaccaaagucuucaacaag

SEQ ID NO: 1838211 - RNA, 19 nt, Homo sapiens
  misc_RNA (1)...(19): siRNA sense strand
agauguauguucagcaguu

SEQ ID NO: 1838212 - RNA, 19 nt, Homo sapiens
  misc_RNA (1)...(19): siRNA sense strand
acaaggagagggaaguaaa

SEQ ID NO: 1838213 - RNA, 19 nt, Homo sapiens
  misc_RNA (1)...(19): siRNA sense strand
gauguauguucagcaguug

SEQ ID NO: 1838214 - RNA, 19 nt, Homo sapiens
  misc_RNA (1)...(19): siRNA sense strand
cagaaaugauaccuaaacu

SEQ ID NO: 1838215 - RNA, 19 nt, Homo sapiens
  misc_RNA (1)...(19): siRNA sense strand
gagaauggaaucgugaugu

SEQ ID NO: 1838216 - RNA, 19 nt, Homo sapiens
  misc_RNA (1)...(19): siRNA sense strand
uaaguaaggcuguugaaaa

SEQ ID NO: 1838217 - RNA, 19 nt, Homo sapiens
  misc_RNA (1)...(19): siRNA sense strand
gggagccucugccuuguac

SEQ ID NO: 1838218 - RNA, 19 nt, Homo sapiens
  misc_RNA (1)...(19): siRNA sense strand
cuuaacguauuucuugaga

SEQ ID NO: 1838219 - RNA, 19 nt, Homo sapiens
  misc_RNA (1)...(19): siRNA sense strand
ggaaggcgaauccccauaa

SEQ ID NO: 1838220 - RNA, 19 nt, Homo sapiens
  misc_RNA (1)...(19): siRNA sense strand
aacaggaggugcugaccaa

SEQ ID NO: 1838221 - RNA, 19 nt, Homo sapiens
  misc_RNA (1)...(19): siRNA sense strand
agaauggaaucgugauguc

SEQ ID NO: 1838222 - RNA, 19 nt, Homo sapiens
  misc_RNA (1)...(19): siRNA sense strand
gcagcagaaaugauaccua

SEQ ID NO: 1838223 - RNA, 19 nt, Homo sapiens
  misc_RNA (1)...(19): siRNA sense strand
aauguuguaugcagcagaa

SEQ ID NO: 1838224 - RNA, 19 nt, Homo sapiens
  misc_RNA (1)...(19): siRNA sense strand
uccuacagcuacagagauu

SEQ ID NO: 1838225 - RNA, 19 nt, Homo sapiens
  misc_RNA (1)...(19): siRNA sense strand
aauguacucuagagaaugg

SEQ ID NO: 1838226 - RNA, 19 nt, Homo sapiens
  misc_RNA (1)...(19): siRNA sense strand
aggacagguuuauuuguau

SEQ ID NO: 1838227 - RNA, 19 nt, Homo sapiens
  misc_RNA (1)...(19): siRNA sense strand
aguuggacuuaacguauuu

SEQ ID NO: 1838228 - RNA, 19 nt, Homo sapiens
  misc_RNA (1)...(19): siRNA sense strand
aggaggugcugaccaaagu

SEQ ID NO: 1838229 - RNA, 19 nt, Homo sapiens
  misc_RNA (1)...(19): siRNA sense strand
ccucugccuuguacaguuc

SEQ ID NO: 1838230 - RNA, 19 nt, Homo sapiens
  misc_RNA (1)...(19): siRNA sense strand
cuacagcuacagagauuca

SEQ ID NO: 1838231 - RNA, 19 nt, Homo sapiens
  misc_RNA (1)...(19): siRNA sense strand
aaguaaggcuguugaaaau

SEQ ID NO: 1838232 - RNA, 19 nt, Homo sapiens
  misc_RNA (1)...(19): siRNA sense strand
gcagagggaaggcgaaucc

SEQ ID NO: 1838233 - RNA, 19 nt, Homo sapiens
  misc_RNA (1)...(19): siRNA sense strand
gccucugccuuguacaguu

SEQ ID NO: 1838234 - RNA, 19 nt, Homo sapiens
  misc_RNA (1)...(19): siRNA sense strand
guuguaugcagcagaaaug

SEQ ID NO: 1838235 - RNA, 19 nt, Homo sapiens
  misc_RNA (1)...(19): siRNA sense strand
cagcuacagagauucaaga

SEQ ID NO: 1838236 - RNA, 19 nt, Homo sapiens
  misc_RNA (1)...(19): siRNA sense strand
ccauaaguaaggcuguuga

SEQ ID NO: 1838237 - RNA, 19 nt, Homo sapiens
  misc_RNA (1)...(19): siRNA sense strand
cauaaguaaggcuguugaa

SEQ ID NO: 1838238 - RNA, 19 nt, Homo sapiens
  misc_RNA (1)...(19): siRNA sense strand
ccaggacagguuuauuugu

SEQ ID NO: 1838239 - RNA, 19 nt, Homo sapiens
  misc_RNA (1)...(19): siRNA sense strand
aggcagggcuugucaauga

SEQ ID NO: 1838240 - RNA, 19 nt, Homo sapiens
  misc_RNA (1)...(19): siRNA sense strand
caaugaggcagaucagauu

SEQ ID NO: 1838241 - RNA, 19 nt, Homo sapiens
  misc_RNA (1)...(19): siRNA sense strand
gacagagaaugaccacauc

SEQ ID NO: 1838242 - RNA, 19 nt, Homo sapiens
  misc_RNA (1)...(19): siRNA sense strand
caaggagggugugaagaca

SEQ ID NO: 1838243 - RNA, 19 nt, Homo sapiens
  misc_RNA (1)...(19): siRNA sense strand
gggcagccaaucaaugaaa

SEQ ID NO: 1838244 - RNA, 19 nt, Homo sapiens
  misc_RNA (1)...(19): siRNA sense strand
guggugcaguucaagauca

SEQ ID NO: 1838245 - RNA, 19 nt, Homo sapiens
  misc_RNA (1)...(19): siRNA sense strand
ucaaugaggcagaucagau

SEQ ID NO: 1838246 - RNA, 19 nt, Homo sapiens
  misc_RNA (1)...(19): siRNA sense strand
gugugaagacagagaauga

SEQ ID NO: 1838247 - RNA, 19 nt, Homo sapiens
  misc_RNA (1)...(19): siRNA sense strand
agacagagaaugaccacau

SEQ ID NO: 1838248 - RNA, 19 nt, Homo sapiens
  misc_RNA (1)...(19): siRNA sense strand
gcuccguggugcaguucaa

SEQ ID NO: 1838249 - RNA, 19 nt, Homo sapiens
  misc_RNA (1)...(19): siRNA sense strand
ccaaggagggugugaagac

SEQ ID NO: 1838250 - RNA, 19 nt, Homo sapiens
  misc_RNA (1)...(19): siRNA sense strand
cagagaaugaccacaucaa

SEQ ID NO: 1838251 - RNA, 19 nt, Homo sapiens
  misc_RNA (1)...(19): siRNA sense strand
aggagggugugaagacaga

SEQ ID NO: 1838252 - RNA, 19 nt, Homo sapiens
  misc_RNA (1)...(19): siRNA sense strand
ccgaggagaagcccaagga

SEQ ID NO: 1838253 - RNA, 19 nt, Homo sapiens
  misc_RNA (1)...(19): siRNA sense strand
gaugggaacuuguguguua

SEQ ID NO: 1838254 - RNA, 19 nt, Homo sapiens
  misc_RNA (1)...(19): siRNA sense strand
gaaauuccacagucaacua

SEQ ID NO: 1838255 - RNA, 19 nt, Homo sapiens
  misc_RNA (1)...(19): siRNA sense strand
caaggaagcccgcaauguu

SEQ ID NO: 1838256 - RNA, 19 nt, Homo sapiens
  misc_RNA (1)...(19): siRNA sense strand
ucaaauauaggcauucuga

SEQ ID NO: 1838257 - RNA, 19 nt, Homo sapiens
  misc_RNA (1)...(19): siRNA sense strand
caacuaaugcgacuuaugg

SEQ ID NO: 1838258 - RNA, 19 nt, Homo sapiens
  misc_RNA (1)...(19): siRNA sense strand
cacgugugguucucaaaua

SEQ ID NO: 1838259 - RNA, 19 nt, Homo sapiens
  misc_RNA (1)...(19): siRNA sense strand
aaggaagcccgcaauguua

SEQ ID NO: 1838260 - RNA, 19 nt, Homo sapiens
  misc_RNA (1)...(19): siRNA sense strand
caagauguaaagaagauug

SEQ ID NO: 1838261 - RNA, 19 nt, Homo sapiens
  misc_RNA (1)...(19): siRNA sense strand
guucucaaauauaggcauu

SEQ ID NO: 1838262 - RNA, 19 nt, Homo sapiens
  misc_RNA (1)...(19): siRNA sense strand
gcacgugugguucucaaau

SEQ ID NO: 1838263 - RNA, 19 nt, Homo sapiens
  misc_RNA (1)...(19): siRNA sense strand
aaauauaggcauucugaug

SEQ ID NO: 1838264 - RNA, 19 nt, Homo sapiens
  misc_RNA (1)...(19): siRNA sense strand
uuaccucgcugacccuaug

SEQ ID NO: 1838265 - RNA, 19 nt, Homo sapiens
  misc_RNA (1)...(19): siRNA sense strand
gcgcugccgagaagcuuua

SEQ ID NO: 1838266 - RNA, 19 nt, Homo sapiens
  misc_RNA (1)...(19): siRNA sense strand
gauguaaagaagauugaga

SEQ ID NO: 1838267 - RNA, 19 nt, Homo sapiens
  misc_RNA (1)...(19): siRNA sense strand
gcauucugaugggaacuug

SEQ ID NO: 1838268 - RNA, 19 nt, Homo sapiens
  misc_RNA (1)...(19): siRNA sense strand
gugugguucucaaauauag

SEQ ID NO: 1838269 - RNA, 19 nt, Homo sapiens
  misc_RNA (1)...(19): siRNA sense strand
gcucaagauguaaagaaga

SEQ ID NO: 1838270 - RNA, 19 nt, Homo sapiens
  misc_RNA (1)...(19): siRNA sense strand
uaugaaggcacgugugguu

SEQ ID NO: 1838271 - RNA, 19 nt, Homo sapiens
  misc_RNA (1)...(19): siRNA sense strand
gaaggcacgugugguucuc

SEQ ID NO: 1838272 - RNA, 19 nt, Homo sapiens
  misc_RNA (1)...(19): siRNA sense strand
ccaaggaagcccgcaaugu

SEQ ID NO: 1838273 - RNA, 19 nt, Homo sapiens
  misc_RNA (1)...(19): siRNA sense strand
cucaagauguaaagaagau

SEQ ID NO: 1838274 - RNA, 19 nt, Homo sapiens
  misc_RNA (1)...(19): siRNA sense strand
aaauuccacagucaacuaa

SEQ ID NO: 1838275 - RNA, 19 nt, Homo sapiens
  misc_RNA (1)...(19): siRNA sense strand
uugagaaauuccacaguca

SEQ ID NO: 1838276 - RNA, 19 nt, Homo sapiens
  misc_RNA (1)...(19): siRNA sense strand
gcaauguuaccauggaaac

SEQ ID NO: 1838277 - RNA, 19 nt, Homo sapiens
  misc_RNA (1)...(19): siRNA sense strand
gagaaauuccacagucaac

SEQ ID NO: 1838278 - RNA, 19 nt, Homo sapiens
  misc_RNA (1)...(19): siRNA sense strand
ccgcaauguuaccauggaa

SEQ ID NO: 1838279 - RNA, 19 nt, Homo sapiens
  misc_RNA (1)...(19): siRNA sense strand
gggaacuuguguguuaaag

SEQ ID NO: 1838280 - RNA, 19 nt, Homo sapiens
  misc_RNA (1)...(19): siRNA sense strand
cgugugguucucaaauaua

SEQ ID NO: 1838281 - RNA, 19 nt, Homo sapiens
  misc_RNA (1)...(19): siRNA sense strand
ugagaaauuccacagucaa

SEQ ID NO: 1838282 - RNA, 19 nt, Homo sapiens
  misc_RNA (1)...(19): siRNA sense strand
acgugugguucucaaauau

SEQ ID NO: 1838283 - RNA, 19 nt, Homo sapiens
  misc_RNA (1)...(19): siRNA sense strand
acuaaugcgacuuauggua

SEQ ID NO: 1838284 - RNA, 19 nt, Homo sapiens
  misc_RNA (1)...(19): siRNA sense strand
gaugauuuaguuuguuugg

SEQ ID NO: 1838285 - RNA, 19 nt, Homo sapiens
  misc_RNA (1)...(19): siRNA sense strand
gacuuaugguagccaagga

SEQ ID NO: 1838286 - RNA, 19 nt, Homo sapiens
  misc_RNA (1)...(19): siRNA sense strand
ucucaaauauaggcauucu

SEQ ID NO: 1838287 - RNA, 19 nt, Homo sapiens
  misc_RNA (1)...(19): siRNA sense strand
aagcucaagauguaaagaa

SEQ ID NO: 1838288 - RNA, 19 nt, Homo sapiens
  misc_RNA (1)...(19): siRNA sense strand
ccagggaucucuuuccaaa

SEQ ID NO: 1838289 - RNA, 19 nt, Homo sapiens
  misc_RNA (1)...(19): siRNA sense strand
gaacaguuuggcugcauua

SEQ ID NO: 1838290 - RNA, 19 nt, Homo sapiens
  misc_RNA (1)...(19): siRNA sense strand
ggagacauaauuacucuuu

SEQ ID NO: 1838291 - RNA, 19 nt, Homo sapiens
  misc_RNA (1)...(19): siRNA sense strand
caacagcgaagacaugaaa

SEQ ID NO: 1838292 - RNA, 19 nt, Homo sapiens
  misc_RNA (1)...(19): siRNA sense strand
guucagagacuacaacaaa

SEQ ID NO: 1838293 - RNA, 19 nt, Homo sapiens
  misc_RNA (1)...(19): siRNA sense strand
gcucaugccuuucaggaau

SEQ ID NO: 1838294 - RNA, 19 nt, Homo sapiens
  misc_RNA (1)...(19): siRNA sense strand
gaaccuucauuggguguaa

SEQ ID NO: 1838295 - RNA, 19 nt, Homo sapiens
  misc_RNA (1)...(19): siRNA sense strand
acaccuauguugccuugua

SEQ ID NO: 1838296 - RNA, 19 nt, Homo sapiens
  misc_RNA (1)...(19): siRNA sense strand
aaagacccauuacagauga

SEQ ID NO: 1838297 - RNA, 19 nt, Homo sapiens
  misc_RNA (1)...(19): siRNA sense strand
cauuacagaugaacaccua

SEQ ID NO: 1838298 - RNA, 19 nt, Homo sapiens
  misc_RNA (1)...(19): siRNA sense strand
ucacagaaccucuacuuca

SEQ ID NO: 1838299 - RNA, 19 nt, Homo sapiens
  misc_RNA (1)...(19): siRNA sense strand
agauaacacugaaagagaa

SEQ ID NO: 1838300 - RNA, 19 nt, Homo sapiens
  misc_RNA (1)...(19): siRNA sense strand
gaaaugaggccaggagaca

SEQ ID NO: 1838301 - RNA, 19 nt, Homo sapiens
  misc_RNA (1)...(19): siRNA sense strand
uaaagaaguuaugcccauu

SEQ ID NO: 1838302 - RNA, 19 nt, Homo sapiens
  misc_RNA (1)...(19): siRNA sense strand
ugcaaagccuguaagauga

SEQ ID NO: 1838303 - RNA, 19 nt, Homo sapiens
  misc_RNA (1)...(19): siRNA sense strand
aaucagaucugcgugaguu

SEQ ID NO: 1838304 - RNA, 19 nt, Homo sapiens
  misc_RNA (1)...(19): siRNA sense strand
caaagacccauuacagaug

SEQ ID NO: 1838305 - RNA, 19 nt, Homo sapiens
  misc_RNA (1)...(19): siRNA sense strand
ccaaagacccauuacagau

SEQ ID NO: 1838306 - RNA, 19 nt, Homo sapiens
  misc_RNA (1)...(19): siRNA sense strand
ucagagauccagcgaagaa

SEQ ID NO: 1838307 - RNA, 19 nt, Homo sapiens
  misc_RNA (1)...(19): siRNA sense strand
caacuuuguucagagacua

SEQ ID NO: 1838308 - RNA, 19 nt, Homo sapiens
  misc_RNA (1)...(19): siRNA sense strand
caguuuggcugcauuaaag

SEQ ID NO: 1838309 - RNA, 19 nt, Homo sapiens
  misc_RNA (1)...(19): siRNA sense strand
ggagaaugaagauuuggaa

SEQ ID NO: 1838310 - RNA, 19 nt, Homo sapiens
  misc_RNA (1)...(19): siRNA sense strand
acaggagaaugaagauuug

SEQ ID NO: 1838311 - RNA, 19 nt, Homo sapiens
  misc_RNA (1)...(19): siRNA sense strand
uauguugccuuguacaaau

SEQ ID NO: 1838312 - RNA, 19 nt, Homo sapiens
  misc_RNA (1)...(19): siRNA sense strand
gaaaauggcacugaugauu

SEQ ID NO: 1838313 - RNA, 19 nt, Homo sapiens
  misc_RNA (1)...(19): siRNA sense strand
cugcaaagccuguaagaug

SEQ ID NO: 1838314 - RNA, 19 nt, Homo sapiens
  misc_RNA (1)...(19): siRNA sense strand
cacaggagaaugaagauuu

SEQ ID NO: 1838315 - RNA, 19 nt, Homo sapiens
  misc_RNA (1)...(19): siRNA sense strand
gaagcccacuuucugugau

SEQ ID NO: 1838316 - RNA, 19 nt, Homo sapiens
  misc_RNA (1)...(19): siRNA sense strand
cagauaacacugaaagaga

SEQ ID NO: 1838317 - RNA, 19 nt, Homo sapiens
  misc_RNA (1)...(19): siRNA sense strand
aauccaagcuccagaaacu

SEQ ID NO: 1838318 - RNA, 19 nt, Homo sapiens
  misc_RNA (1)...(19): siRNA sense strand
gcagauaacacugaaagag

SEQ ID NO: 1838319 - RNA, 19 nt, Homo sapiens
  misc_RNA (1)...(19): siRNA sense strand
gagaaugaagauuuggaaa

SEQ ID NO: 1838320 - RNA, 19 nt, Homo sapiens
  misc_RNA (1)...(19): siRNA sense strand
gaagaagaacaagaugguu

SEQ ID NO: 1838321 - RNA, 19 nt, Homo sapiens
  misc_RNA (1)...(19): siRNA sense strand
gaaacugcaagcacacaug

SEQ ID NO: 1838322 - RNA, 19 nt, Homo sapiens
  misc_RNA (1)...(19): siRNA sense strand
ggaauccaagcuccagaaa

SEQ ID NO: 1838323 - RNA, 19 nt, Homo sapiens
  misc_RNA (1)...(19): siRNA sense strand
gaaccucuacuucagaucu

SEQ ID NO: 1838324 - RNA, 19 nt, Homo sapiens
  misc_RNA (1)...(19): siRNA sense strand
caccacaagugcacagaug

SEQ ID NO: 1838325 - RNA, 19 nt, Homo sapiens
  misc_RNA (1)...(19): siRNA sense strand
ggaggcggguaugaccuaa

SEQ ID NO: 1838326 - RNA, 19 nt, Homo sapiens
  misc_RNA (1)...(19): siRNA sense strand
aagaagaacaagaugguuu

SEQ ID NO: 1838327 - RNA, 19 nt, Homo sapiens
  misc_RNA (1)...(19): siRNA sense strand
ugaaagagaaucagaucug

SEQ ID NO: 1838328 - RNA, 19 nt, Homo sapiens
  misc_RNA (1)...(19): siRNA sense strand
caggagacauaauuacucu

SEQ ID NO: 1838329 - RNA, 19 nt, Homo sapiens
  misc_RNA (1)...(19): siRNA sense strand
guguuuacauauccagaaa

SEQ ID NO: 1838330 - RNA, 19 nt, Homo sapiens
  misc_RNA (1)...(19): siRNA sense strand
caaccgcccucuccugcau

SEQ ID NO: 1838331 - RNA, 19 nt, Homo sapiens
  misc_RNA (1)...(19): siRNA sense strand
cagaaccucuacuucagau

SEQ ID NO: 1838332 - RNA, 19 nt, Homo sapiens
  misc_RNA (1)...(19): siRNA sense strand
uuuagaggauuccaaugaa

SEQ ID NO: 1838333 - RNA, 19 nt, Homo sapiens
  misc_RNA (1)...(19): siRNA sense strand
aaugaagacugguggaaag

SEQ ID NO: 1838334 - RNA, 19 nt, Homo sapiens
  misc_RNA (1)...(19): siRNA sense strand
gaggccaggagacauaauu

SEQ ID NO: 1838335 - RNA, 19 nt, Homo sapiens
  misc_RNA (1)...(19): siRNA sense strand
aacgaucacuuucuuucaa

SEQ ID NO: 1838336 - RNA, 19 nt, Homo sapiens
  misc_RNA (1)...(19): siRNA sense strand
ccagccaacuuuguucaga

SEQ ID NO: 1838337 - RNA, 19 nt, Homo sapiens
  misc_RNA (1)...(19): siRNA sense strand
caaugaagacugguggaaa

SEQ ID NO: 1838338 - RNA, 19 nt, Homo sapiens
  misc_RNA (1)...(19): siRNA sense strand
caaagggguuucggcguua

SEQ ID NO: 1838339 - RNA, 19 nt, Homo sapiens
  misc_RNA (1)...(19): siRNA sense strand
ucagaguccucaguggaaa

SEQ ID NO: 1838340 - RNA, 19 nt, Homo sapiens
  misc_RNA (1)...(19): siRNA sense strand
gaacaagaugguuuuauca

SEQ ID NO: 1838341 - RNA, 19 nt, Homo sapiens
  misc_RNA (1)...(19): siRNA sense strand
gaaccaacagcgaagacau

SEQ ID NO: 1838342 - RNA, 19 nt, Homo sapiens
  misc_RNA (1)...(19): siRNA sense strand
gcacacaugguggcugaga

SEQ ID NO: 1838343 - RNA, 19 nt, Homo sapiens
  misc_RNA (1)...(19): siRNA sense strand
gggcagauaacacugaaag

SEQ ID NO: 1838344 - RNA, 19 nt, Homo sapiens
  misc_RNA (1)...(19): siRNA sense strand
aaugaggccaggagacaua

SEQ ID NO: 1838345 - RNA, 19 nt, Homo sapiens
  misc_RNA (1)...(19): siRNA sense strand
cacagaaccucuacuucag

SEQ ID NO: 1838346 - RNA, 19 nt, Homo sapiens
  misc_RNA (1)...(19): siRNA sense strand
ugaacaguuuggcugcauu

SEQ ID NO: 1838347 - RNA, 19 nt, Homo sapiens
  misc_RNA (1)...(19): siRNA sense strand
cuaaaacgaucacuuucuu

SEQ ID NO: 1838348 - RNA, 19 nt, Homo sapiens
  misc_RNA (1)...(19): siRNA sense strand
ugucugcaaccacaugaua

SEQ ID NO: 1838349 - RNA, 19 nt, Homo sapiens
  misc_RNA (1)...(19): siRNA sense strand
caugauagugggaacaaau

SEQ ID NO: 1838350 - RNA, 19 nt, Homo sapiens
  misc_RNA (1)...(19): siRNA sense strand
gguaugaccuaaggaaacg

SEQ ID NO: 1838351 - RNA, 19 nt, Homo sapiens
  misc_RNA (1)...(19): siRNA sense strand
gauccagcgaagaacauaa

SEQ ID NO: 1838352 - RNA, 19 nt, Homo sapiens
  misc_RNA (1)...(19): siRNA sense strand
gaagaacaagaugguuuua

SEQ ID NO: 1838353 - RNA, 19 nt, Homo sapiens
  misc_RNA (1)...(19): siRNA sense strand
ugaagaagaacaagauggu

SEQ ID NO: 1838354 - RNA, 19 nt, Homo sapiens
  misc_RNA (1)...(19): siRNA sense strand
cucaugccuuucaggaaua

SEQ ID NO: 1838355 - RNA, 19 nt, Homo sapiens
  misc_RNA (1)...(19): siRNA sense strand
uaacacugaaagagaauca

SEQ ID NO: 1838356 - RNA, 19 nt, Homo sapiens
  misc_RNA (1)...(19): siRNA sense strand
gauaacacugaaagagaau

SEQ ID NO: 1838357 - RNA, 19 nt, Homo sapiens
  misc_RNA (1)...(19): siRNA sense strand
uagaggauuccaaugaaga

SEQ ID NO: 1838358 - RNA, 19 nt, Homo sapiens
  misc_RNA (1)...(19): siRNA sense strand
caccagggaucucuuucca

SEQ ID NO: 1838359 - RNA, 19 nt, Homo sapiens
  misc_RNA (1)...(19): siRNA sense strand
cuaaggaaacgcagcaaca

SEQ ID NO: 1838360 - RNA, 19 nt, Homo sapiens
  misc_RNA (1)...(19): siRNA sense strand
uccaagcuccagaaacuaa

SEQ ID NO: 1838361 - RNA, 19 nt, Homo sapiens
  misc_RNA (1)...(19): siRNA sense strand
aaagaaguuaugcccauug

SEQ ID NO: 1838362 - RNA, 19 nt, Homo sapiens
  misc_RNA (1)...(19): siRNA sense strand
aaacgaucacuuucuuuca

SEQ ID NO: 1838363 - RNA, 19 nt, Homo sapiens
  misc_RNA (1)...(19): siRNA sense strand
uguguuagaaccuucauug

SEQ ID NO: 1838364 - RNA, 19 nt, Homo sapiens
  misc_RNA (1)...(19): siRNA sense strand
ggaaagggaaaauucaaga

SEQ ID NO: 1838365 - RNA, 19 nt, Homo sapiens
  misc_RNA (1)...(19): siRNA sense strand
gcaaagccuguaagaugag

SEQ ID NO: 1838366 - RNA, 19 nt, Homo sapiens
  misc_RNA (1)...(19): siRNA sense strand
uuagauguguuagaaccuu

SEQ ID NO: 1838367 - RNA, 19 nt, Homo sapiens
  misc_RNA (1)...(19): siRNA sense strand
ccucacagaaccucuacuu

SEQ ID NO: 1838368 - RNA, 19 nt, Homo sapiens
  misc_RNA (1)...(19): siRNA sense strand
uaagguggacccugucuac

SEQ ID NO: 1838369 - RNA, 19 nt, Homo sapiens
  misc_RNA (1)...(19): siRNA sense strand
acaguuuggcugcauuaaa

SEQ ID NO: 1838370 - RNA, 19 nt, Homo sapiens
  misc_RNA (1)...(19): siRNA sense strand
ccaaugaagacugguggaa

SEQ ID NO: 1838371 - RNA, 19 nt, Homo sapiens
  misc_RNA (1)...(19): siRNA sense strand
uuagaggauuccaaugaag

SEQ ID NO: 1838372 - RNA, 19 nt, Homo sapiens
  misc_RNA (1)...(19): siRNA sense strand
uccaaagacccauuacaga

SEQ ID NO: 1838373 - RNA, 19 nt, Homo sapiens
  misc_RNA (1)...(19): siRNA sense strand
cagcgaagaacauaaacca

SEQ ID NO: 1838374 - RNA, 19 nt, Homo sapiens
  misc_RNA (1)...(19): siRNA sense strand
gcggguaugaccuaaggaa

SEQ ID NO: 1838375 - RNA, 19 nt, Homo sapiens
  misc_RNA (1)...(19): siRNA sense strand
uggcugcauuaaagaaguu

SEQ ID NO: 1838376 - RNA, 19 nt, Homo sapiens
  misc_RNA (1)...(19): siRNA sense strand
gaaacuaaaacgaucacuu

SEQ ID NO: 1838377 - RNA, 19 nt, Homo sapiens
  misc_RNA (1)...(19): siRNA sense strand
agaacaagaugguuuuauc

SEQ ID NO: 1838378 - RNA, 19 nt, Homo sapiens
  misc_RNA (1)...(19): siRNA sense strand
gcauggacugcgcugcaaa

SEQ ID NO: 1838379 - RNA, 19 nt, Homo sapiens
  misc_RNA (1)...(19): siRNA sense strand
uuucaagaccaagaguuua

SEQ ID NO: 1838380 - RNA, 19 nt, Homo sapiens
  misc_RNA (1)...(19): siRNA sense strand
uaccacaggagaaugaaga

SEQ ID NO: 1838381 - RNA, 19 nt, Homo sapiens
  misc_RNA (1)...(19): siRNA sense strand
gagauccagcgaagaacau

SEQ ID NO: 1838382 - RNA, 19 nt, Homo sapiens
  misc_RNA (1)...(19): siRNA sense strand
ccacaggagaaugaagauu

SEQ ID NO: 1838383 - RNA, 19 nt, Homo sapiens
  misc_RNA (1)...(19): siRNA sense strand
aggccaggagacauaauua

SEQ ID NO: 1838384 - RNA, 19 nt, Homo sapiens
  misc_RNA (1)...(19): siRNA sense strand
acaagaugguuuuaucaga

SEQ ID NO: 1838385 - RNA, 19 nt, Homo sapiens
  misc_RNA (1)...(19): siRNA sense strand
ccaagcuccagaaacuaaa

SEQ ID NO: 1838386 - RNA, 19 nt, Homo sapiens
  misc_RNA (1)...(19): siRNA sense strand
ccaggagacauaauuacuc

SEQ ID NO: 1838387 - RNA, 19 nt, Homo sapiens
  misc_RNA (1)...(19): siRNA sense strand
ggucaagucuucagggaaa

SEQ ID NO: 1838388 - RNA, 19 nt, Homo sapiens
  misc_RNA (1)...(19): siRNA sense strand
acaacaaguuccacaauaa

SEQ ID NO: 1838389 - RNA, 19 nt, Homo sapiens
  misc_RNA (1)...(19): siRNA sense strand
ggagugggcuaugguauga

SEQ ID NO: 1838390 - RNA, 19 nt, Homo sapiens
  misc_RNA (1)...(19): siRNA sense strand
gcaaccagaucgaguuugu

SEQ ID NO: 1838391 - RNA, 19 nt, Homo sapiens
  misc_RNA (1)...(19): siRNA sense strand
gccaucaucuucuuuauuc

SEQ ID NO: 1838392 - RNA, 19 nt, Homo sapiens
  misc_RNA (1)...(19): siRNA sense strand
uacaacaaguuccacaaua

SEQ ID NO: 1838393 - RNA, 19 nt, Homo sapiens
  misc_RNA (1)...(19): siRNA sense strand
ggucaucuccugcaucaug

SEQ ID NO: 1838394 - RNA, 19 nt, Homo sapiens
  misc_RNA (1)...(19): siRNA sense strand
ccacaaagccaagcagaga

SEQ ID NO: 1838395 - RNA, 19 nt, Homo sapiens
  misc_RNA (1)...(19): siRNA sense strand
gggaggcgccuucauguuc

SEQ ID NO: 1838396 - RNA, 19 nt, Homo sapiens
  misc_RNA (1)...(19): siRNA sense strand
cagaugacauugggaacuu

SEQ ID NO: 1838397 - RNA, 19 nt, Homo sapiens
  misc_RNA (1)...(19): siRNA sense strand
caccauggcuuccuacaac

SEQ ID NO: 1838398 - RNA, 19 nt, Homo sapiens
  misc_RNA (1)...(19): siRNA sense strand
ggcaucauguacuaccuaa

SEQ ID NO: 1838399 - RNA, 19 nt, Homo sapiens
  misc_RNA (1)...(19): siRNA sense strand
ggucucugcucuucuucuu

SEQ ID NO: 1838400 - RNA, 19 nt, Homo sapiens
  misc_RNA (1)...(19): siRNA sense strand
ccaccuacaucggcaucua

SEQ ID NO: 1838401 - RNA, 19 nt, Homo sapiens
  misc_RNA (1)...(19): siRNA sense strand
guggucaucuccugcauca

SEQ ID NO: 1838402 - RNA, 19 nt, Homo sapiens
  misc_RNA (1)...(19): siRNA sense strand
ccuccaaccucaccaaugg

SEQ ID NO: 1838403 - RNA, 19 nt, Homo sapiens
  misc_RNA (1)...(19): siRNA sense strand
ucaaaggagugggcuaugg

SEQ ID NO: 1838404 - RNA, 19 nt, Homo sapiens
  misc_RNA (1)...(19): siRNA sense strand
ucucugcucuucuucuuca

SEQ ID NO: 1838405 - RNA, 19 nt, Homo sapiens
  misc_RNA (1)...(19): siRNA sense strand
gaugcugccucccagaucu

SEQ ID NO: 1838406 - RNA, 19 nt, Homo sapiens
  misc_RNA (1)...(19): siRNA sense strand
gcuguggucucugcucuuc

SEQ ID NO: 1838407 - RNA, 19 nt, Homo sapiens
  misc_RNA (1)...(19): siRNA sense strand
gugcugaccauucuguuug

SEQ ID NO: 1838408 - RNA, 19 nt, Homo sapiens
  misc_RNA (1)...(19): siRNA sense strand
gggcaaccagaucgaguuu

SEQ ID NO: 1838409 - RNA, 19 nt, Homo sapiens
  misc_RNA (1)...(19): siRNA sense strand
ucuauuggcugcugcugau

SEQ ID NO: 1838410 - RNA, 19 nt, Homo sapiens
  misc_RNA (1)...(19): siRNA sense strand
cagaucgaguuuguacuga

SEQ ID NO: 1838411 - RNA, 19 nt, Homo sapiens
  misc_RNA (1)...(19): siRNA sense strand
cuccaggacucccggauau

SEQ ID NO: 1838412 - RNA, 19 nt, Homo sapiens
  misc_RNA (1)...(19): siRNA sense strand
ccaccaagagggaccagaa

SEQ ID NO: 1838413 - RNA, 19 nt, Homo sapiens
  misc_RNA (1)...(19): siRNA sense strand
caacaaguuccacaauaac

SEQ ID NO: 1838414 - RNA, 19 nt, Homo sapiens
  misc_RNA (1)...(19): siRNA sense strand
ccuacaaccacuaccagua

SEQ ID NO: 1838415 - RNA, 19 nt, Homo sapiens
  misc_RNA (1)...(19): siRNA sense strand
ccagaucgaguuuguacug

SEQ ID NO: 1838416 - RNA, 19 nt, Homo sapiens
  misc_RNA (1)...(19): siRNA sense strand
ggugcugaccauucuguuu

SEQ ID NO: 1838417 - RNA, 19 nt, Homo sapiens
  misc_RNA (1)...(19): siRNA sense strand
gaacuacuuccaggacauc

SEQ ID NO: 1838418 - RNA, 19 nt, Homo sapiens
  misc_RNA (1)...(19): siRNA sense strand
gaugacauugggaacuuug

SEQ ID NO: 1838419 - RNA, 19 nt, Homo sapiens
  misc_RNA (1)...(19): siRNA sense strand
cuacaacaaguuccacaau

SEQ ID NO: 1838420 - RNA, 19 nt, Homo sapiens
  misc_RNA (1)...(19): siRNA sense strand
caaaggagugggcuauggu

SEQ ID NO: 1838421 - RNA, 19 nt, Homo sapiens
  misc_RNA (1)...(19): siRNA sense strand
cuacuacaauguggucauc

SEQ ID NO: 1838422 - RNA, 19 nt, Homo sapiens
  misc_RNA (1)...(19): siRNA sense strand
aaaggagugggcuauggua

SEQ ID NO: 1838423 - RNA, 19 nt, Homo sapiens
  misc_RNA (1)...(19): siRNA sense strand
uguggucucugcucuucuu

SEQ ID NO: 1838424 - RNA, 19 nt, Homo sapiens
  misc_RNA (1)...(19): siRNA sense strand
ucaucaccauggcuuccua

SEQ ID NO: 1838425 - RNA, 19 nt, Homo sapiens
  misc_RNA (1)...(19): siRNA sense strand
cagccaggcaggcaucuau

SEQ ID NO: 1838426 - RNA, 19 nt, Homo sapiens
  misc_RNA (1)...(19): siRNA sense strand
caaccagaucgaguuugua

SEQ ID NO: 1838427 - RNA, 19 nt, Homo sapiens
  misc_RNA (1)...(19): siRNA sense strand
ucacacuacuucccaucuc

SEQ ID NO: 1838428 - RNA, 19 nt, Homo sapiens
  misc_RNA (1)...(19): siRNA sense strand
gccuggccuucguggcuua

SEQ ID NO: 1838429 - RNA, 19 nt, Homo sapiens
  misc_RNA (1)...(19): siRNA sense strand
guucaaaggagugggcuau

SEQ ID NO: 1838430 - RNA, 19 nt, Homo sapiens
  misc_RNA (1)...(19): siRNA sense strand
cuacaaccacuaccaguac

SEQ ID NO: 1838431 - RNA, 19 nt, Homo sapiens
  misc_RNA (1)...(19): siRNA sense strand
augaguggauccugcagaa

SEQ ID NO: 1838432 - RNA, 19 nt, Homo sapiens
  misc_RNA (1)...(19): siRNA sense strand
cuacaucggcaucuacuac

SEQ ID NO: 1838433 - RNA, 19 nt, Homo sapiens
  misc_RNA (1)...(19): siRNA sense strand
ccaggacucccggauauag

SEQ ID NO: 1838434 - RNA, 19 nt, Homo sapiens
  misc_RNA (1)...(19): siRNA sense strand
acacccuccuccagcguuu

SEQ ID NO: 1838435 - RNA, 19 nt, Homo sapiens
  misc_RNA (1)...(19): siRNA sense strand
gccaggcaggcaucuauug

SEQ ID NO: 1838436 - RNA, 19 nt, Homo sapiens
  misc_RNA (1)...(19): siRNA sense strand
uugacggcaucauguacua

SEQ ID NO: 1838437 - RNA, 19 nt, Homo sapiens
  misc_RNA (1)...(19): siRNA sense strand
gcucuccuucggccaguuu

SEQ ID NO: 1838438 - RNA, 19 nt, Homo sapiens
  misc_RNA (1)...(19): siRNA sense strand
gaguggauccugcagaaaa

SEQ ID NO: 1838439 - RNA, 19 nt, Homo sapiens
  misc_RNA (1)...(19): siRNA sense strand
cccugggccuacugcaaua

SEQ ID NO: 1838440 - RNA, 19 nt, Homo sapiens
  misc_RNA (1)...(19): siRNA sense strand
ucccauaccucugcuaucg

SEQ ID NO: 1838441 - RNA, 19 nt, Homo sapiens
  misc_RNA (1)...(19): siRNA sense strand
ccgccaucaucuucuuuau

SEQ ID NO: 1838442 - RNA, 19 nt, Homo sapiens
  misc_RNA (1)...(19): siRNA sense strand
gcucuucuucuucaugcuu

SEQ ID NO: 1838443 - RNA, 19 nt, Homo sapiens
  misc_RNA (1)...(19): siRNA sense strand
agaugacauugggaacuuu

SEQ ID NO: 1838444 - RNA, 19 nt, Homo sapiens
  misc_RNA (1)...(19): siRNA sense strand
cggcaucuacuacaaugug

SEQ ID NO: 1838445 - RNA, 19 nt, Homo sapiens
  misc_RNA (1)...(19): siRNA sense strand
ccuccaggacucccggaua

SEQ ID NO: 1838446 - RNA, 19 nt, Homo sapiens
  misc_RNA (1)...(19): siRNA sense strand
gaucaccuacaaccacuac

SEQ ID NO: 1838447 - RNA, 19 nt, Homo sapiens
  misc_RNA (1)...(19): siRNA sense strand
ccucccagaucuucuacuc

SEQ ID NO: 1838448 - RNA, 19 nt, Homo sapiens
  misc_RNA (1)...(19): siRNA sense strand
gaacaaacaucaucaaagu

SEQ ID NO: 1838449 - RNA, 19 nt, Homo sapiens
  misc_RNA (1)...(19): siRNA sense strand
ggagguauaugcaguauuu

SEQ ID NO: 1838450 - RNA, 19 nt, Homo sapiens
  misc_RNA (1)...(19): siRNA sense strand
aaacaggacuugagcaaua

SEQ ID NO: 1838451 - RNA, 19 nt, Homo sapiens
  misc_RNA (1)...(19): siRNA sense strand
gaagaaaggccgucuguga

SEQ ID NO: 1838452 - RNA, 19 nt, Homo sapiens
  misc_RNA (1)...(19): siRNA sense strand
ggaaacagauucauugucu

SEQ ID NO: 1838453 - RNA, 19 nt, Homo sapiens
  misc_RNA (1)...(19): siRNA sense strand
ggaaaggucagacaaauga

SEQ ID NO: 1838454 - RNA, 19 nt, Homo sapiens
  misc_RNA (1)...(19): siRNA sense strand
gaacuagccacaaucagua

SEQ ID NO: 1838455 - RNA, 19 nt, Homo sapiens
  misc_RNA (1)...(19): siRNA sense strand
gaaaggaaacagauucauu

SEQ ID NO: 1838456 - RNA, 19 nt, Homo sapiens
  misc_RNA (1)...(19): siRNA sense strand
gaaacuggauucuaaagag

SEQ ID NO: 1838457 - RNA, 19 nt, Homo sapiens
  misc_RNA (1)...(19): siRNA sense strand
aaacaaacccuacaacuau

SEQ ID NO: 1838458 - RNA, 19 nt, Homo sapiens
  misc_RNA (1)...(19): siRNA sense strand
caaacaaacccuacaacua

SEQ ID NO: 1838459 - RNA, 19 nt, Homo sapiens
  misc_RNA (1)...(19): siRNA sense strand
ggaugccucuaaugaguua

SEQ ID NO: 1838460 - RNA, 19 nt, Homo sapiens
  misc_RNA (1)...(19): siRNA sense strand
gaaagcgucucugagugua

SEQ ID NO: 1838461 - RNA, 19 nt, Homo sapiens
  misc_RNA (1)...(19): siRNA sense strand
aaagagagcugugaagaug

SEQ ID NO: 1838462 - RNA, 19 nt, Homo sapiens
  misc_RNA (1)...(19): siRNA sense strand
cuugagaacugauguaauu

SEQ ID NO: 1838463 - RNA, 19 nt, Homo sapiens
  misc_RNA (1)...(19): siRNA sense strand
ugaaauuaaugccuuggua

SEQ ID NO: 1838464 - RNA, 19 nt, Homo sapiens
  misc_RNA (1)...(19): siRNA sense strand
ugugaaagcucgccaguug

SEQ ID NO: 1838465 - RNA, 19 nt, Homo sapiens
  misc_RNA (1)...(19): siRNA sense strand
ggaggaggaggaugaauuu

SEQ ID NO: 1838466 - RNA, 19 nt, Homo sapiens
  misc_RNA (1)...(19): siRNA sense strand
gcacaugggugaaaaguau

SEQ ID NO: 1838467 - RNA, 19 nt, Homo sapiens
  misc_RNA (1)...(19): siRNA sense strand
ggaggaggaugaauuugau

SEQ ID NO: 1838468 - RNA, 19 nt, Homo sapiens
  misc_RNA (1)...(19): siRNA sense strand
uauaaugggugaaggcaaa

SEQ ID NO: 1838469 - RNA, 19 nt, Homo sapiens
  misc_RNA (1)...(19): siRNA sense strand
ucaaguugcuggugaaugu

SEQ ID NO: 1838470 - RNA, 19 nt, Homo sapiens
  misc_RNA (1)...(19): siRNA sense strand
caaaaugucuuccuaacaa

SEQ ID NO: 1838471 - RNA, 19 nt, Homo sapiens
  misc_RNA (1)...(19): siRNA sense strand
gaguuaaguucuucuacaa

SEQ ID NO: 1838472 - RNA, 19 nt, Homo sapiens
  misc_RNA (1)...(19): siRNA sense strand
aaacugaaccuccgaaaug

SEQ ID NO: 1838473 - RNA, 19 nt, Homo sapiens
  misc_RNA (1)...(19): siRNA sense strand
gagauggucugcucuacau

SEQ ID NO: 1838474 - RNA, 19 nt, Homo sapiens
  misc_RNA (1)...(19): siRNA sense strand
gagcagguguaugaucuuu

SEQ ID NO: 1838475 - RNA, 19 nt, Homo sapiens
  misc_RNA (1)...(19): siRNA sense strand
gagaaucagccaagauauu

SEQ ID NO: 1838476 - RNA, 19 nt, Homo sapiens
  misc_RNA (1)...(19): siRNA sense strand
ugaaggaggugauuuguac

SEQ ID NO: 1838477 - RNA, 19 nt, Homo sapiens
  misc_RNA (1)...(19): siRNA sense strand
gaaagcccauaccugcaaa

SEQ ID NO: 1838478 - RNA, 19 nt, Homo sapiens
  misc_RNA (1)...(19): siRNA sense strand
gaggaugaguuaaguucuu

SEQ ID NO: 1838479 - RNA, 19 nt, Homo sapiens
  misc_RNA (1)...(19): siRNA sense strand
caagcaguaugucaucaaa

SEQ ID NO: 1838480 - RNA, 19 nt, Homo sapiens
  misc_RNA (1)...(19): siRNA sense strand
gaggugauuuguaccgaaa

SEQ ID NO: 1838481 - RNA, 19 nt, Homo sapiens
  misc_RNA (1)...(19): siRNA sense strand
ggucagacaaaugaaauua

SEQ ID NO: 1838482 - RNA, 19 nt, Homo sapiens
  misc_RNA (1)...(19): siRNA sense strand
caugagcccugaauuguuc

SEQ ID NO: 1838483 - RNA, 19 nt, Homo sapiens
  misc_RNA (1)...(19): siRNA sense strand
gaacugauaagaacaaugc

SEQ ID NO: 1838484 - RNA, 19 nt, Homo sapiens
  misc_RNA (1)...(19): siRNA sense strand
ugaauuugauagagaggua

SEQ ID NO: 1838485 - RNA, 19 nt, Homo sapiens
  misc_RNA (1)...(19): siRNA sense strand
gcccugaauuguucucaaa

SEQ ID NO: 1838486 - RNA, 19 nt, Homo sapiens
  misc_RNA (1)...(19): siRNA sense strand
ggaaauaucgggacacacu

SEQ ID NO: 1838487 - RNA, 19 nt, Homo sapiens
  misc_RNA (1)...(19): siRNA sense strand
ggaaagcgucucugagugu

SEQ ID NO: 1838488 - RNA, 19 nt, Homo sapiens
  misc_RNA (1)...(19): siRNA sense strand
gcuggugaauguauuauag

SEQ ID NO: 1838489 - RNA, 19 nt, Homo sapiens
  misc_RNA (1)...(19): siRNA sense strand
gcguaaauauugacaucuu

SEQ ID NO: 1838490 - RNA, 19 nt, Homo sapiens
  misc_RNA (1)...(19): siRNA sense strand
gcaaacaggacuugagcaa

SEQ ID NO: 1838491 - RNA, 19 nt, Homo sapiens
  misc_RNA (1)...(19): siRNA sense strand
ggucugcucuacauuguca

SEQ ID NO: 1838492 - RNA, 19 nt, Homo sapiens
  misc_RNA (1)...(19): siRNA sense strand
caaacccagugucagaauu

SEQ ID NO: 1838493 - RNA, 19 nt, Homo sapiens
  misc_RNA (1)...(19): siRNA sense strand
aaaggaaacagauucauug

SEQ ID NO: 1838494 - RNA, 19 nt, Homo sapiens
  misc_RNA (1)...(19): siRNA sense strand
aaacuggauucuaaagaga

SEQ ID NO: 1838495 - RNA, 19 nt, Homo sapiens
  misc_RNA (1)...(19): siRNA sense strand
ccauggcuuugcaguauuu

SEQ ID NO: 1838496 - RNA, 19 nt, Homo sapiens
  misc_RNA (1)...(19): siRNA sense strand
gaggaaagcgucucugagu

SEQ ID NO: 1838497 - RNA, 19 nt, Homo sapiens
  misc_RNA (1)...(19): siRNA sense strand
aucaaaggaucgaccauua

SEQ ID NO: 1838498 - RNA, 19 nt, Homo sapiens
  misc_RNA (1)...(19): siRNA sense strand
aacaaacccuacaacuaua

SEQ ID NO: 1838499 - RNA, 19 nt, Homo sapiens
  misc_RNA (1)...(19): siRNA sense strand
gauauuuggaugccucuaa

SEQ ID NO: 1838500 - RNA, 19 nt, Homo sapiens
  misc_RNA (1)...(19): siRNA sense strand
gaaaagaucaggagacuag

SEQ ID NO: 1838501 - RNA, 19 nt, Homo sapiens
  misc_RNA (1)...(19): siRNA sense strand
ccaaaggaccagagucuug

SEQ ID NO: 1838502 - RNA, 19 nt, Homo sapiens
  misc_RNA (1)...(19): siRNA sense strand
gcagaacugauaagaacaa

SEQ ID NO: 1838503 - RNA, 19 nt, Homo sapiens
  misc_RNA (1)...(19): siRNA sense strand
guugaagucuugagaacug

SEQ ID NO: 1838504 - RNA, 19 nt, Homo sapiens
  misc_RNA (1)...(19): siRNA sense strand
agaaucagccaagauauuu

SEQ ID NO: 1838505 - RNA, 19 nt, Homo sapiens
  misc_RNA (1)...(19): siRNA sense strand
gaagaugucccgguagcaa

SEQ ID NO: 1838506 - RNA, 19 nt, Homo sapiens
  misc_RNA (1)...(19): siRNA sense strand
cccugaaacuggauucuaa

SEQ ID NO: 1838507 - RNA, 19 nt, Homo sapiens
  misc_RNA (1)...(19): siRNA sense strand
gaagggaaaggucagacaa

SEQ ID NO: 1838508 - RNA, 19 nt, Homo sapiens
  misc_RNA (1)...(19): siRNA sense strand
guuaaguucuucuacaagu

SEQ ID NO: 1838509 - RNA, 19 nt, Homo sapiens
  misc_RNA (1)...(19): siRNA sense strand
guagagugguuuguacaga

SEQ ID NO: 1838510 - RNA, 19 nt, Homo sapiens
  misc_RNA (1)...(19): siRNA sense strand
ggaucaaguugcuggugaa

SEQ ID NO: 1838511 - RNA, 19 nt, Homo sapiens
  misc_RNA (1)...(19): siRNA sense strand
ucaguagcguaaauauuga

SEQ ID NO: 1838512 - RNA, 19 nt, Homo sapiens
  misc_RNA (1)...(19): siRNA sense strand
gcucuaggaugcugugucu

SEQ ID NO: 1838513 - RNA, 19 nt, Homo sapiens
  misc_RNA (1)...(19): siRNA sense strand
cuacaugagcccugaauug

SEQ ID NO: 1838514 - RNA, 19 nt, Homo sapiens
  misc_RNA (1)...(19): siRNA sense strand
gcccagcucuugucucagu

SEQ ID NO: 1838515 - RNA, 19 nt, Homo sapiens
  misc_RNA (1)...(19): siRNA sense strand
gggacacacugauacuuca

SEQ ID NO: 1838516 - RNA, 19 nt, Homo sapiens
  misc_RNA (1)...(19): siRNA sense strand
caaacuucaucggaaauau

SEQ ID NO: 1838517 - RNA, 19 nt, Homo sapiens
  misc_RNA (1)...(19): siRNA sense strand
gcgagcugcugaacaggaa

SEQ ID NO: 1838518 - RNA, 19 nt, Homo sapiens
  misc_RNA (1)...(19): siRNA sense strand
agagucgccuccucgauuu

SEQ ID NO: 1838519 - RNA, 19 nt, Homo sapiens
  misc_RNA (1)...(19): siRNA sense strand
gaggcagaaucaaaucaug

SEQ ID NO: 1838520 - RNA, 19 nt, Homo sapiens
  misc_RNA (1)...(19): siRNA sense strand
cggcaaaucuccuucuuuu

SEQ ID NO: 1838521 - RNA, 19 nt, Homo sapiens
  misc_RNA (1)...(19): siRNA sense strand
uggcagaacugauaagaac

SEQ ID NO: 1838522 - RNA, 19 nt, Homo sapiens
  misc_RNA (1)...(19): siRNA sense strand
cagcaaugccaagagauua

SEQ ID NO: 1838523 - RNA, 19 nt, Homo sapiens
  misc_RNA (1)...(19): siRNA sense strand
gaugcugugucuaugaaau

SEQ ID NO: 1838524 - RNA, 19 nt, Homo sapiens
  misc_RNA (1)...(19): siRNA sense strand
ugaguuaaguucuucuaca

SEQ ID NO: 1838525 - RNA, 19 nt, Homo sapiens
  misc_RNA (1)...(19): siRNA sense strand
ggagaggugacgcuuguga

SEQ ID NO: 1838526 - RNA, 19 nt, Homo sapiens
  misc_RNA (1)...(19): siRNA sense strand
agagagaggaggcgacuaa

SEQ ID NO: 1838527 - RNA, 19 nt, Homo sapiens
  misc_RNA (1)...(19): siRNA sense strand
uuaaugccuugguacaauu

SEQ ID NO: 1838528 - RNA, 19 nt, Homo sapiens
  misc_RNA (1)...(19): siRNA sense strand
gaucaggagacuaguugaa

SEQ ID NO: 1838529 - RNA, 19 nt, Homo sapiens
  misc_RNA (1)...(19): siRNA sense strand
caaaaggccugaagaaagg

SEQ ID NO: 1838530 - RNA, 19 nt, Homo sapiens
  misc_RNA (1)...(19): siRNA sense strand
gaggaugaauuugauagag

SEQ ID NO: 1838531 - RNA, 19 nt, Homo sapiens
  misc_RNA (1)...(19): siRNA sense strand
caaaggaucgaccauuauc

SEQ ID NO: 1838532 - RNA, 19 nt, Homo sapiens
  misc_RNA (1)...(19): siRNA sense strand
cgccauggcuuugcaguau

SEQ ID NO: 1838533 - RNA, 19 nt, Homo sapiens
  misc_RNA (1)...(19): siRNA sense strand
gcagguguaugaucuuuug

SEQ ID NO: 1838534 - RNA, 19 nt, Homo sapiens
  misc_RNA (1)...(19): siRNA sense strand
gcagucacaggaagaaaug

SEQ ID NO: 1838535 - RNA, 19 nt, Homo sapiens
  misc_RNA (1)...(19): siRNA sense strand
acacaacucugggucugaa

SEQ ID NO: 1838536 - RNA, 19 nt, Homo sapiens
  misc_RNA (1)...(19): siRNA sense strand
ccgaguagcugggauuaca

SEQ ID NO: 1838537 - RNA, 19 nt, Homo sapiens
  misc_RNA (1)...(19): siRNA sense strand
caguauuucucaaguggaa

SEQ ID NO: 1838538 - RNA, 19 nt, Homo sapiens
  misc_RNA (1)...(19): siRNA sense strand
cacaaucaguagcguaaau

SEQ ID NO: 1838539 - RNA, 19 nt, Homo sapiens
  misc_RNA (1)...(19): siRNA sense strand
cccaaccacucucuucuga

SEQ ID NO: 1838540 - RNA, 19 nt, Homo sapiens
  misc_RNA (1)...(19): siRNA sense strand
cuauaagucugauguuugg

SEQ ID NO: 1838541 - RNA, 19 nt, Homo sapiens
  misc_RNA (1)...(19): siRNA sense strand
uagcguaaauauugacauc

SEQ ID NO: 1838542 - RNA, 19 nt, Homo sapiens
  misc_RNA (1)...(19): siRNA sense strand
ugaaagcucgccaguugaa

SEQ ID NO: 1838543 - RNA, 19 nt, Homo sapiens
  misc_RNA (1)...(19): siRNA sense strand
ugucagaauucaaacuuca

SEQ ID NO: 1838544 - RNA, 19 nt, Homo sapiens
  misc_RNA (1)...(19): siRNA sense strand
aaaagaggcugaaaaccaa

SEQ ID NO: 1838545 - RNA, 19 nt, Homo sapiens
  misc_RNA (1)...(19): siRNA sense strand
gauggucugcucuacauug

SEQ ID NO: 1838546 - RNA, 19 nt, Homo sapiens
  misc_RNA (1)...(19): siRNA sense strand
uagcaaacccagugucaga

SEQ ID NO: 1838547 - RNA, 19 nt, Homo sapiens
  misc_RNA (1)...(19): siRNA sense strand
cagaagaggcagaggaaau

SEQ ID NO: 1838548 - RNA, 19 nt, Homo sapiens
  misc_RNA (1)...(19): siRNA sense strand
acaagaagcucagcaagaa

SEQ ID NO: 1838549 - RNA, 19 nt, Homo sapiens
  misc_RNA (1)...(19): siRNA sense strand
cagaugaccuccugcaaga

SEQ ID NO: 1838550 - RNA, 19 nt, Homo sapiens
  misc_RNA (1)...(19): siRNA sense strand
uggccaagcugcucaauga

SEQ ID NO: 1838551 - RNA, 19 nt, Homo sapiens
  misc_RNA (1)...(19): siRNA sense strand
gacaagaagcucagcaaga

SEQ ID NO: 1838552 - RNA, 19 nt, Homo sapiens
  misc_RNA (1)...(19): siRNA sense strand
ccuaugagauggagauuac

SEQ ID NO: 1838553 - RNA, 19 nt, Homo sapiens
  misc_RNA (1)...(19): siRNA sense strand
cggcguaucuucaccaaca

SEQ ID NO: 1838554 - RNA, 19 nt, Homo sapiens
  misc_RNA (1)...(19): siRNA sense strand
ccggaugccuucccuaugu

SEQ ID NO: 1838555 - RNA, 19 nt, Homo sapiens
  misc_RNA (1)...(19): siRNA sense strand
gagauggagauuacugaug

SEQ ID NO: 1838556 - RNA, 19 nt, Homo sapiens
  misc_RNA (1)...(19): siRNA sense strand
caccaacaaucgagugaag

SEQ ID NO: 1838557 - RNA, 19 nt, Homo sapiens
  misc_RNA (1)...(19): siRNA sense strand
gccuggccaugaaguauau

SEQ ID NO: 1838558 - RNA, 19 nt, Homo sapiens
  misc_RNA (1)...(19): siRNA sense strand
ccaaaguugugcggcguau

SEQ ID NO: 1838559 - RNA, 19 nt, Homo sapiens
  misc_RNA (1)...(19): siRNA sense strand
gauggcggcagcagaaugu

SEQ ID NO: 1838560 - RNA, 19 nt, Homo sapiens
  misc_RNA (1)...(19): siRNA sense strand
gccaugaaguauaucaacu

SEQ ID NO: 1838561 - RNA, 19 nt, Homo sapiens
  misc_RNA (1)...(19): siRNA sense strand
aagaagcucagcaagaaug

SEQ ID NO: 1838562 - RNA, 19 nt, Homo sapiens
  misc_RNA (1)...(19): siRNA sense strand
caagaagcucagcaagaau

SEQ ID NO: 1838563 - RNA, 19 nt, Homo sapiens
  misc_RNA (1)...(19): siRNA sense strand
cggaugccuucccuauguu

SEQ ID NO: 1838564 - RNA, 19 nt, Homo sapiens
  misc_RNA (1)...(19): siRNA sense strand
ccaacaaucgagugaagag

SEQ ID NO: 1838565 - RNA, 19 nt, Homo sapiens
  misc_RNA (1)...(19): siRNA sense strand
gauggagauuacugauggu

SEQ ID NO: 1838566 - RNA, 19 nt, Homo sapiens
  misc_RNA (1)...(19): siRNA sense strand
cgagugaagaggagaccuu

SEQ ID NO: 1838567 - RNA, 19 nt, Homo sapiens
  misc_RNA (1)...(19): siRNA sense strand
gcacuuacacuuaugauua

SEQ ID NO: 1838568 - RNA, 19 nt, Homo sapiens
  misc_RNA (1)...(19): siRNA sense strand
gccaaaggcucuacucuua

SEQ ID NO: 1838569 - RNA, 19 nt, Homo sapiens
  misc_RNA (1)...(19): siRNA sense strand
gaagagacucggcaaguua

SEQ ID NO: 1838570 - RNA, 19 nt, Homo sapiens
  misc_RNA (1)...(19): siRNA sense strand
agaggaggcuguuuguuua

SEQ ID NO: 1838571 - RNA, 19 nt, Homo sapiens
  misc_RNA (1)...(19): siRNA sense strand
aaacauugcucaugccaaa

SEQ ID NO: 1838572 - RNA, 19 nt, Homo sapiens
  misc_RNA (1)...(19): siRNA sense strand
aaacaccaguugacgcuua

SEQ ID NO: 1838573 - RNA, 19 nt, Homo sapiens
  misc_RNA (1)...(19): siRNA sense strand
gaaagaaacggaugaugga

SEQ ID NO: 1838574 - RNA, 19 nt, Homo sapiens
  misc_RNA (1)...(19): siRNA sense strand
gaggccagauguaccuuua

SEQ ID NO: 1838575 - RNA, 19 nt, Homo sapiens
  misc_RNA (1)...(19): siRNA sense strand
ucuuauggcuggcuucuua

SEQ ID NO: 1838576 - RNA, 19 nt, Homo sapiens
  misc_RNA (1)...(19): siRNA sense strand
ggaauucaaugccuuacug

SEQ ID NO: 1838577 - RNA, 19 nt, Homo sapiens
  misc_RNA (1)...(19): siRNA sense strand
gaggauauuuguggcauuu

SEQ ID NO: 1838578 - RNA, 19 nt, Homo sapiens
  misc_RNA (1)...(19): siRNA sense strand
caaaggcucuacucuuaug

SEQ ID NO: 1838579 - RNA, 19 nt, Homo sapiens
  misc_RNA (1)...(19): siRNA sense strand
gcagugaucuacacagaca

SEQ ID NO: 1838580 - RNA, 19 nt, Homo sapiens
  misc_RNA (1)...(19): siRNA sense strand
gcugguugcuccaauauug

SEQ ID NO: 1838581 - RNA, 19 nt, Homo sapiens
  misc_RNA (1)...(19): siRNA sense strand
uauauaccaugccugaaua

SEQ ID NO: 1838582 - RNA, 19 nt, Homo sapiens
  misc_RNA (1)...(19): siRNA sense strand
gaaagaaagaaacggauga

SEQ ID NO: 1838583 - RNA, 19 nt, Homo sapiens
  misc_RNA (1)...(19): siRNA sense strand
gaaugugaccaaccugaua

SEQ ID NO: 1838584 - RNA, 19 nt, Homo sapiens
  misc_RNA (1)...(19): siRNA sense strand
uaagaaagaagcccugaaa

SEQ ID NO: 1838585 - RNA, 19 nt, Homo sapiens
  misc_RNA (1)...(19): siRNA sense strand
ggauauuuguggcauuuau

SEQ ID NO: 1838586 - RNA, 19 nt, Homo sapiens
  misc_RNA (1)...(19): siRNA sense strand
uaccaugccugaauacuug

SEQ ID NO: 1838587 - RNA, 19 nt, Homo sapiens
  misc_RNA (1)...(19): siRNA sense strand
agaagaaccugguggugaa

SEQ ID NO: 1838588 - RNA, 19 nt, Homo sapiens
  misc_RNA (1)...(19): siRNA sense strand
uggaauggcuggcuuuguu

SEQ ID NO: 1838589 - RNA, 19 nt, Homo sapiens
  misc_RNA (1)...(19): siRNA sense strand
uaacagugccaguaccaua

SEQ ID NO: 1838590 - RNA, 19 nt, Homo sapiens
  misc_RNA (1)...(19): siRNA sense strand
ccaggauacuguuuacuga

SEQ ID NO: 1838591 - RNA, 19 nt, Homo sapiens
  misc_RNA (1)...(19): siRNA sense strand
ucacgggacucauuacugu

SEQ ID NO: 1838592 - RNA, 19 nt, Homo sapiens
  misc_RNA (1)...(19): siRNA sense strand
gaagcaccgugaguggaua

SEQ ID NO: 1838593 - RNA, 19 nt, Homo sapiens
  misc_RNA (1)...(19): siRNA sense strand
gaaaagagcauucugagau

SEQ ID NO: 1838594 - RNA, 19 nt, Homo sapiens
  misc_RNA (1)...(19): siRNA sense strand
caucaaagacauccauuau

SEQ ID NO: 1838595 - RNA, 19 nt, Homo sapiens
  misc_RNA (1)...(19): siRNA sense strand
gaaagaagcccugaaaaug

SEQ ID NO: 1838596 - RNA, 19 nt, Homo sapiens
  misc_RNA (1)...(19): siRNA sense strand
uaagagaagguacauguug

SEQ ID NO: 1838597 - RNA, 19 nt, Homo sapiens
  misc_RNA (1)...(19): siRNA sense strand
ggauacuguuuacugauga

SEQ ID NO: 1838598 - RNA, 19 nt, Homo sapiens
  misc_RNA (1)...(19): siRNA sense strand
cagcagacauugccauagu

SEQ ID NO: 1838599 - RNA, 19 nt, Homo sapiens
  misc_RNA (1)...(19): siRNA sense strand
gauguuaaucuguugguaa

SEQ ID NO: 1838600 - RNA, 19 nt, Homo sapiens
  misc_RNA (1)...(19): siRNA sense strand
ggaaguucauagacugguu

SEQ ID NO: 1838601 - RNA, 19 nt, Homo sapiens
  misc_RNA (1)...(19): siRNA sense strand
gccauaggauucaggucua

SEQ ID NO: 1838602 - RNA, 19 nt, Homo sapiens
  misc_RNA (1)...(19): siRNA sense strand
aagaggaggcuguuuguuu

SEQ ID NO: 1838603 - RNA, 19 nt, Homo sapiens
  misc_RNA (1)...(19): siRNA sense strand
agaaagagagaaagaaaga

SEQ ID NO: 1838604 - RNA, 19 nt, Homo sapiens
  misc_RNA (1)...(19): siRNA sense strand
gaccaucaaccacaucauu

SEQ ID NO: 1838605 - RNA, 19 nt, Homo sapiens
  misc_RNA (1)...(19): siRNA sense strand
uaaagcuccugccaauguu

SEQ ID NO: 1838606 - RNA, 19 nt, Homo sapiens
  misc_RNA (1)...(19): siRNA sense strand
guuuacagaugcuagaaga

SEQ ID NO: 1838607 - RNA, 19 nt, Homo sapiens
  misc_RNA (1)...(19): siRNA sense strand
gagaugcagugagaauaau

SEQ ID NO: 1838608 - RNA, 19 nt, Homo sapiens
  misc_RNA (1)...(19): siRNA sense strand
ugagaugcagugagaauaa

SEQ ID NO: 1838609 - RNA, 19 nt, Homo sapiens
  misc_RNA (1)...(19): siRNA sense strand
gccaauguuuaucauaguu

SEQ ID NO: 1838610 - RNA, 19 nt, Homo sapiens
  misc_RNA (1)...(19): siRNA sense strand
gaaguucauagacugguuu

SEQ ID NO: 1838611 - RNA, 19 nt, Homo sapiens
  misc_RNA (1)...(19): siRNA sense strand
ugagaaagagagaaagaaa

SEQ ID NO: 1838612 - RNA, 19 nt, Homo sapiens
  misc_RNA (1)...(19): siRNA sense strand
uugcagcucugaugaguga

SEQ ID NO: 1838613 - RNA, 19 nt, Homo sapiens
  misc_RNA (1)...(19): siRNA sense strand
uucaggagguagcagauua

SEQ ID NO: 1838614 - RNA, 19 nt, Homo sapiens
  misc_RNA (1)...(19): siRNA sense strand
agaagagacucggcaaguu

SEQ ID NO: 1838615 - RNA, 19 nt, Homo sapiens
  misc_RNA (1)...(19): siRNA sense strand
ggaagaggaggcuguuugu

SEQ ID NO: 1838616 - RNA, 19 nt, Homo sapiens
  misc_RNA (1)...(19): siRNA sense strand
ggaggucgguacuggaagu

SEQ ID NO: 1838617 - RNA, 19 nt, Homo sapiens
  misc_RNA (1)...(19): siRNA sense strand
ugaccaaccugauaauagg

SEQ ID NO: 1838618 - RNA, 19 nt, Homo sapiens
  misc_RNA (1)...(19): siRNA sense strand
guauauaccaugccugaau

SEQ ID NO: 1838619 - RNA, 19 nt, Homo sapiens
  misc_RNA (1)...(19): siRNA sense strand
ucggcaaguuaaaguaaua

SEQ ID NO: 1838620 - RNA, 19 nt, Homo sapiens
  misc_RNA (1)...(19): siRNA sense strand
aguaagagccucagcaaga

SEQ ID NO: 1838621 - RNA, 19 nt, Homo sapiens
  misc_RNA (1)...(19): siRNA sense strand
ggaggauauuuguggcauu

SEQ ID NO: 1838622 - RNA, 19 nt, Homo sapiens
  misc_RNA (1)...(19): siRNA sense strand
caacuucugggauggguuu

SEQ ID NO: 1838623 - RNA, 19 nt, Homo sapiens
  misc_RNA (1)...(19): siRNA sense strand
guaagagccucagcaagag

SEQ ID NO: 1838624 - RNA, 19 nt, Homo sapiens
  misc_RNA (1)...(19): siRNA sense strand
gaaaucugaagacagcauu

SEQ ID NO: 1838625 - RNA, 19 nt, Homo sapiens
  misc_RNA (1)...(19): siRNA sense strand
caaagacauccauuauaug

SEQ ID NO: 1838626 - RNA, 19 nt, Homo sapiens
  misc_RNA (1)...(19): siRNA sense strand
uuaaagcuccugccaaugu

SEQ ID NO: 1838627 - RNA, 19 nt, Homo sapiens
  misc_RNA (1)...(19): siRNA sense strand
ucuuaaagcuccugccaau

SEQ ID NO: 1838628 - RNA, 19 nt, Homo sapiens
  misc_RNA (1)...(19): siRNA sense strand
guuaagagaagguacaugu

SEQ ID NO: 1838629 - RNA, 19 nt, Homo sapiens
  misc_RNA (1)...(19): siRNA sense strand
gaaguuaagagaagguaca

SEQ ID NO: 1838630 - RNA, 19 nt, Homo sapiens
  misc_RNA (1)...(19): siRNA sense strand
gcucugcucaugaucauug

SEQ ID NO: 1838631 - RNA, 19 nt, Homo sapiens
  misc_RNA (1)...(19): siRNA sense strand
gaaagagagaaagaaagaa

SEQ ID NO: 1838632 - RNA, 19 nt, Homo sapiens
  misc_RNA (1)...(19): siRNA sense strand
ucacaccaccucccacaaa

SEQ ID NO: 1838633 - RNA, 19 nt, Homo sapiens
  misc_RNA (1)...(19): siRNA sense strand
ccauaguggcccuguauuu

SEQ ID NO: 1838634 - RNA, 19 nt, Homo sapiens
  misc_RNA (1)...(19): siRNA sense strand
uucaaugccuuacugcuuu

SEQ ID NO: 1838635 - RNA, 19 nt, Homo sapiens
  misc_RNA (1)...(19): siRNA sense strand
caacccaguggcauccuua

SEQ ID NO: 1838636 - RNA, 19 nt, Homo sapiens
  misc_RNA (1)...(19): siRNA sense strand
gaugauugcagcucugaug

SEQ ID NO: 1838637 - RNA, 19 nt, Homo sapiens
  misc_RNA (1)...(19): siRNA sense strand
ggucgguacuggaaguuca

SEQ ID NO: 1838638 - RNA, 19 nt, Homo sapiens
  misc_RNA (1)...(19): siRNA sense strand
gcaaggaggccagauguac

SEQ ID NO: 1838639 - RNA, 19 nt, Homo sapiens
  misc_RNA (1)...(19): siRNA sense strand
ugacauacaaccuuuccaa

SEQ ID NO: 1838640 - RNA, 19 nt, Homo sapiens
  misc_RNA (1)...(19): siRNA sense strand
uggaagcgcugcaaugaac

SEQ ID NO: 1838641 - RNA, 19 nt, Homo sapiens
  misc_RNA (1)...(19): siRNA sense strand
gauugcagcucugaugagu

SEQ ID NO: 1838642 - RNA, 19 nt, Homo sapiens
  misc_RNA (1)...(19): siRNA sense strand
gaggguccuugcagccaaa

SEQ ID NO: 1838643 - RNA, 19 nt, Homo sapiens
  misc_RNA (1)...(19): siRNA sense strand
ugagcaauauugggaguga

SEQ ID NO: 1838644 - RNA, 19 nt, Homo sapiens
  misc_RNA (1)...(19): siRNA sense strand
gcaacccaguggcauccuu

SEQ ID NO: 1838645 - RNA, 19 nt, Homo sapiens
  misc_RNA (1)...(19): siRNA sense strand
gagaauaaugagaccauca

SEQ ID NO: 1838646 - RNA, 19 nt, Homo sapiens
  misc_RNA (1)...(19): siRNA sense strand
uagcaugggugccaaucau

SEQ ID NO: 1838647 - RNA, 19 nt, Homo sapiens
  misc_RNA (1)...(19): siRNA sense strand
ugacugcuuugcugacugu

SEQ ID NO: 1838648 - RNA, 19 nt, Homo sapiens
  misc_RNA (1)...(19): siRNA sense strand
gaagaggaggcuguuuguu

SEQ ID NO: 1838649 - RNA, 19 nt, Homo sapiens
  misc_RNA (1)...(19): siRNA sense strand
gcagugggcgcaugggaau

SEQ ID NO: 1838650 - RNA, 19 nt, Homo sapiens
  misc_RNA (1)...(19): siRNA sense strand
gagaaagagagaaagaaag

SEQ ID NO: 1838651 - RNA, 19 nt, Homo sapiens
  misc_RNA (1)...(19): siRNA sense strand
auucugagaugcagugaga

SEQ ID NO: 1838652 - RNA, 19 nt, Homo sapiens
  misc_RNA (1)...(19): siRNA sense strand
cucgauguguacaaacuua

SEQ ID NO: 1838653 - RNA, 19 nt, Homo sapiens
  misc_RNA (1)...(19): siRNA sense strand
uggccuggauucauucuug

SEQ ID NO: 1838654 - RNA, 19 nt, Homo sapiens
  misc_RNA (1)...(19): siRNA sense strand
ugucucugauucucuauau

SEQ ID NO: 1838655 - RNA, 19 nt, Homo sapiens
  misc_RNA (1)...(19): siRNA sense strand
ggugagaaagagagaaaga

SEQ ID NO: 1838656 - RNA, 19 nt, Homo sapiens
  misc_RNA (1)...(19): siRNA sense strand
ucaucaaagacauccauua

SEQ ID NO: 1838657 - RNA, 19 nt, Homo sapiens
  misc_RNA (1)...(19): siRNA sense strand
gaauccaacagaugaagau

SEQ ID NO: 1838658 - RNA, 19 nt, Homo sapiens
  misc_RNA (1)...(19): siRNA sense strand
ggaauccaacagaugaaga

SEQ ID NO: 1838659 - RNA, 19 nt, Homo sapiens
  misc_RNA (1)...(19): siRNA sense strand
cauacaaccuuuccaacac
